United States Patent Application Publication US 2005/0136395 A1 - sequence listing, part 5

SEQ ID NO: 159318 - DNA, 25 bp, SARS Virus
taggtcgtctttagtagtataatat

SEQ ID NO: 159319 - DNA, 25 bp, SARS Virus
aggtcgtctttaatagtataatata

SEQ ID NO: 159320 - DNA, 25 bp, SARS Virus
ggtcgtctttagaagtataatatac

SEQ ID NO: 159321 - DNA, 25 bp, SARS Virus
gtcgtctttagtagtataatatacg

SEQ ID NO: 159322 - DNA, 25 bp, SARS Virus
tcgtctttagtaatataatatacgt

SEQ ID NO: 159323 - DNA, 25 bp, SARS Virus
cgtctttagtagaataatatacgta

SEQ ID NO: 159324 - DNA, 25 bp, SARS Virus
gtctttagtagtataatatacgtag

SEQ ID NO: 159325 - DNA, 25 bp, SARS Virus
tctttagtagtaaaatatacgtagg

SEQ ID NO: 159326 - DNA, 25 bp, SARS Virus
ctttagtagtataatatacgtaggt

SEQ ID NO: 159327 - DNA, 25 bp, SARS Virus
tttagtagtataatatacgtaggtt

SEQ ID NO: 159328 - DNA, 25 bp, SARS Virus
ttagtagtataaaatacgtaggttc

SEQ ID NO: 159329 - DNA, 25 bp, SARS Virus
tagtagtataatatacgtaggttca

SEQ ID NO: 159330 - DNA, 25 bp, SARS Virus
agtagtataataaacgtaggttcat

SEQ ID NO: 159331 - DNA, 25 bp, SARS Virus
gtagtataatatacgtaggttcatg

SEQ ID NO: 159332 - DNA, 25 bp, SARS Virus
tagtataatataagtaggttcatga

SEQ ID NO: 159333 - DNA, 25 bp, SARS Virus
agtataatatacataggttcatgac

SEQ ID NO: 159334 - DNA, 25 bp, SARS Virus
gtataatatacgaaggttcatgaca

SEQ ID NO: 159335 - DNA, 25 bp, SARS Virus
tataatatacgtaggttcatgacag

SEQ ID NO: 159336 - DNA, 25 bp, SARS Virus
ataatatacgtaagttcatgacagc

SEQ ID NO: 159337 - DNA, 25 bp, SARS Virus
taatatacgtagattcatgacagcc

SEQ ID NO: 159338 - DNA, 25 bp, SARS Virus
aatatacgtaggatcatgacagcca

SEQ ID NO: 159339 - DNA, 25 bp, SARS Virus
atatacgtaggtacatgacagccat

SEQ ID NO: 159340 - DNA, 25 bp, SARS Virus
tatacgtaggttaatgacagccatg

SEQ ID NO: 159341 - DNA, 25 bp, SARS Virus
atacgtaggttcatgacagccatga

SEQ ID NO: 159342 - DNA, 25 bp, SARS Virus
tacgtaggttcaagacagccatgag

SEQ ID NO: 159343 - DNA, 25 bp, SARS Virus
acgtaggttcataacagccatgagt

SEQ ID NO: 159344 - DNA, 25 bp, SARS Virus
cgtaggttcatgacagccatgagta

SEQ ID NO: 159345 - DNA, 25 bp, SARS Virus
gtaggttcatgaaagccatgagtaa

SEQ ID NO: 159346 - DNA, 25 bp, SARS Virus
taggttcatgacagccatgagtaaa

SEQ ID NO: 159347 - DNA, 25 bp, SARS Virus
aggttcatgacaaccatgagtaaac

SEQ ID NO: 159348 - DNA, 25 bp, SARS Virus
ggttcatgacagacatgagtaaacg

SEQ ID NO: 159349 - DNA, 25 bp, SARS Virus
gttcatgacagcaatgagtaaacgt

SEQ ID NO: 159350 - DNA, 25 bp, SARS Virus
ttcatgacagccatgagtaaacgta

SEQ ID NO: 159351 - DNA, 25 bp, SARS Virus
tcatgacagccaagagtaaacgtac

SEQ ID NO: 159352 - DNA, 25 bp, SARS Virus
catgacagccataagtaaacgtacc

SEQ ID NO: 159353 - DNA, 25 bp, SARS Virus
atgacagccatgagtaaacgtacca

SEQ ID NO: 159354 - DNA, 25 bp, SARS Virus
tgacagccatgaataaacgtaccac

SEQ ID NO: 159355 - DNA, 25 bp, SARS Virus
gacagccatgagaaaacgtaccaca

SEQ ID NO: 159356 - DNA, 25 bp, SARS Virus
acagccatgagtaaacgtaccacag

SEQ ID NO: 159357 - DNA, 25 bp, SARS Virus
cagccatgagtaaacgtaccacaga

SEQ ID NO: 159358 - DNA, 25 bp, SARS Virus
agccatgagtaaacgtaccacagac

SEQ ID NO: 159359 - DNA, 25 bp, SARS Virus
gccatgagtaaaagtaccacagacg

SEQ ID NO: 159360 - DNA, 25 bp, SARS Virus
ccatgagtaaacataccacagacgt

SEQ ID NO: 159361 - DNA, 25 bp, SARS Virus
catgagtaaacgaaccacagacgtt

SEQ ID NO: 159362 - DNA, 25 bp, SARS Virus
atgagtaaacgtaccacagacgttt

SEQ ID NO: 159363 - DNA, 25 bp, SARS Virus
tgagtaaacgtaacacagacgtttg

SEQ ID NO: 159364 - DNA, 25 bp, SARS Virus
gagtaaacgtacaacagacgtttgt

SEQ ID NO: 159365 - DNA, 25 bp, SARS Virus
agtaaacgtaccacagacgtttgtc

SEQ ID NO: 159366 - DNA, 25 bp, SARS Virus
gtaaacgtaccaaagacgtttgtcg

SEQ ID NO: 159367 - DNA, 25 bp, SARS Virus
taaacgtaccacagacgtttgtcgt

SEQ ID NO: 159368 - DNA, 25 bp, SARS Virus
aaacgtaccacaaacgtttgtcgtg

SEQ ID NO: 159369 - DNA, 25 bp, SARS Virus
aacgtaccacagacgtttgtcgtgg

SEQ ID NO: 159370 - DNA, 25 bp, SARS Virus
acgtaccacagaagtttgtcgtggt

SEQ ID NO: 159371 - DNA, 25 bp, SARS Virus
cgtaccacagacatttgtcgtggtg

SEQ ID NO: 159372 - DNA, 25 bp, SARS Virus
gtaccacagacgattgtcgtggtgg

SEQ ID NO: 159373 - DNA, 25 bp, SARS Virus
taccacagacgtatgtcgtggtgga

SEQ ID NO: 159374 - DNA, 25 bp, SARS Virus
accacagacgttagtcgtggtggat

SEQ ID NO: 159375 - DNA, 25 bp, SARS Virus
ccacagacgtttatcgtggtggatt

SEQ ID NO: 159376 - DNA, 25 bp, SARS Virus
cacagacgtttgacgtggtggattt

SEQ ID NO: 159377 - DNA, 25 bp, SARS Virus
acagacgtttgtagtggtggattta

SEQ ID NO: 159378 - DNA, 25 bp, SARS Virus
cagacgtttgtcatggtggatttaa

SEQ ID NO: 159379 - DNA, 25 bp, SARS Virus
agacgtttgtcgaggtggatttaac

SEQ ID NO: 159380 - DNA, 25 bp, SARS Virus
gacgtttgtcgtagtggatttaacg

SEQ ID NO: 159381 - DNA, 25 bp, SARS Virus
acgtttgtcgtgatggatttaacgt

SEQ ID NO: 159382 - DNA, 25 bp, SARS Virus
cgtttgtcgtggaggatttaacgta

SEQ ID NO: 159383 - DNA, 25 bp, SARS Virus
gtttgtcgtggtagatttaacgtag

SEQ ID NO: 159384 - DNA, 25 bp, SARS Virus
tttgtcgtggtgaatttaacgtagc

SEQ ID NO: 159385 - DNA, 25 bp, SARS Virus
ttgtcgtggtggatttaacgtagca

SEQ ID NO: 159386 - DNA, 25 bp, SARS Virus
tgtcgtggtggaattaacgtagcac

SEQ ID NO: 159387 - DNA, 25 bp, SARS Virus
gtcgtggtggatataacgtagcaca

SEQ ID NO: 159388 - DNA, 25 bp, SARS Virus
tcgtggtggattaaacgtagcacat

SEQ ID NO: 159389 - DNA, 25 bp, SARS Virus
cgtggtggatttaacgtagcacatt

SEQ ID NO: 159390 - DNA, 25 bp, SARS Virus
gtggtggatttaacgtagcacatta

SEQ ID NO: 159391 - DNA, 25 bp, SARS Virus
tggtggatttaaagtagcacattat

SEQ ID NO: 159392 - DNA, 25 bp, SARS Virus
ggtggatttaacatagcacattatg

SEQ ID NO: 159393 - DNA, 25 bp, SARS Virus
gtggatttaacgaagcacattatgt

SEQ ID NO: 159394 - DNA, 25 bp, SARS Virus
tggatttaacgtagcacattatgtg

SEQ ID NO: 159395 - DNA, 25 bp, SARS Virus
ggatttaacgtaacacattatgtgc

SEQ ID NO: 159396 - DNA, 25 bp, SARS Virus
gatttaacgtagaacattatgtgca

SEQ ID NO: 159397 - DNA, 25 bp, SARS Virus
atttaacgtagcacattatgtgcat

SEQ ID NO: 159398 - DNA, 25 bp, SARS Virus
tttaacgtagcaaattatgtgcatc

SEQ ID NO: 159399 - DNA, 25 bp, SARS Virus
ttaacgtagcacattatgtgcatcg

SEQ ID NO: 159400 - DNA, 25 bp, SARS Virus
taacgtagcacaatatgtgcatcgt

SEQ ID NO: 159401 - DNA, 25 bp, SARS Virus
aacgtagcacataatgtgcatcgtc

SEQ ID NO: 159402 - DNA, 25 bp, SARS Virus
acgtagcacattatgtgcatcgtct

SEQ ID NO: 159403 - DNA, 25 bp, SARS Virus
cgtagcacattaagtgcatcgtcta

SEQ ID NO: 159404 - DNA, 25 bp, SARS Virus
gtagcacattatatgcatcgtctaa

SEQ ID NO: 159405 - DNA, 25 bp, SARS Virus
tagcacattatgagcatcgtctaaa

SEQ ID NO: 159406 - DNA, 25 bp, SARS Virus
agcacattatgtacatcgtctaaac

SEQ ID NO: 159407 - DNA, 25 bp, SARS Virus
gcacattatgtgaatcgtctaaact

SEQ ID NO: 159408 - DNA, 25 bp, SARS Virus
cacattatgtgcatcgtctaaactc

SEQ ID NO: 159409 - DNA, 25 bp, SARS Virus
acattatgtgcaacgtctaaactca

SEQ ID NO: 159410 - DNA, 25 bp, SARS Virus
cattatgtgcatagtctaaactcac

SEQ ID NO: 159411 - DNA, 25 bp, SARS Virus
attatgtgcatcatctaaactcacc

SEQ ID NO: 159412 - DNA, 25 bp, SARS Virus
ttatgtgcatcgactaaactcacct

SEQ ID NO: 159413 - DNA, 25 bp, SARS Virus
tatgtgcatcgtataaactcacctt

SEQ ID NO: 159414 - DNA, 25 bp, SARS Virus
atgtgcatcgtcaaaactcaccttg

SEQ ID NO: 159415 - DNA, 25 bp, SARS Virus
tgtgcatcgtctaaactcaccttgt

SEQ ID NO: 159416 - DNA, 25 bp, SARS Virus
gtgcatcgtctaaactcaccttgta

SEQ ID NO: 159417 - DNA, 25 bp, SARS Virus
tgcatcgtctaaactcaccttgtat

SEQ ID NO: 159418 - DNA, 25 bp, SARS Virus
gcatcgtctaaaatcaccttgtatt

SEQ ID NO: 159419 - DNA, 25 bp, SARS Virus
catcgtctaaacacaccttgtatta

SEQ ID NO: 159420 - DNA, 25 bp, SARS Virus
atcgtctaaactaaccttgtattag

SEQ ID NO: 159421 - DNA, 25 bp, SARS Virus
tcgtctaaactcaccttgtattagt

SEQ ID NO: 159422 - DNA, 25 bp, SARS Virus
cgtctaaactcaacttgtattagtt

SEQ ID NO: 159423 - DNA, 25 bp, SARS Virus
gtctaaactcacattgtattagtta

SEQ ID NO: 159424 - DNA, 25 bp, SARS Virus
tctaaactcaccatgtattagttat

SEQ ID NO: 159425 - DNA, 25 bp, SARS Virus
ctaaactcacctagtattagttata

SEQ ID NO: 159426 - DNA, 25 bp, SARS Virus
taaactcaccttatattagttatag

SEQ ID NO: 159427 - DNA, 25 bp, SARS Virus
aaactcaccttgaattagttatagg

SEQ ID NO: 159428 - DNA, 25 bp, SARS Virus
aactcaccttgtattagttataggc

SEQ ID NO: 159429 - DNA, 25 bp, SARS Virus
actcaccttgtaatagttataggct

SEQ ID NO: 159430 - DNA, 25 bp, SARS Virus
ctcaccttgtataagttataggctg

SEQ ID NO: 159431 - DNA, 25 bp, SARS Virus
tcaccttgtattagttataggctgt

SEQ ID NO: 159432 - DNA, 25 bp, SARS Virus
caccttgtattaattataggctgtg

SEQ ID NO: 159433 - DNA, 25 bp, SARS Virus
accttgtattagatataggctgtga

SEQ ID NO: 159434 - DNA, 25 bp, SARS Virus
ccttgtattagtaataggctgtgat

SEQ ID NO: 159435 - DNA, 25 bp, SARS Virus
cttgtattagttataggctgtgatg

SEQ ID NO: 159436 - DNA, 25 bp, SARS Virus
ttgtattagttaaaggctgtgatga

SEQ ID NO: 159437 - DNA, 25 bp, SARS Virus
tgtattagttataggctgtgatgaa

SEQ ID NO: 159438 - DNA, 25 bp, SARS Virus
gtattagttataagctgtgatgaac

SEQ ID NO: 159439 - DNA, 25 bp, SARS Virus
tattagttatagactgtgatgaaca

SEQ ID NO: 159440 - DNA, 25 bp, SARS Virus
attagttataggatgtgatgaacaa

SEQ ID NO: 159441 - DNA, 25 bp, SARS Virus
ttagttataggcagtgatgaacaaa

SEQ ID NO: 159442 - DNA, 25 bp, SARS Virus
tagttataggctatgatgaacaaac

SEQ ID NO: 159443 - DNA, 25 bp, SARS Virus
agttataggctgagatgaacaaacg

SEQ ID NO: 159444 - DNA, 25 bp, SARS Virus
gttataggctgtaatgaacaaacgg

SEQ ID NO: 159445 - DNA, 25 bp, SARS Virus
ttataggctgtgatgaacaaacggt

SEQ ID NO: 159446 - DNA, 25 bp, SARS Virus
tataggctgtgaagaacaaacggta

SEQ ID NO: 159447 - DNA, 25 bp, SARS Virus
ataggctgtgataaacaaacggtac

SEQ ID NO: 159448 - DNA, 25 bp, SARS Virus
taggctgtgatgaacaaacggtact

SEQ ID NO: 159449 - DNA, 25 bp, SARS Virus
aggctgtgatgaacaaacggtactc

SEQ ID NO: 159450 - DNA, 25 bp, SARS Virus
ggctgtgatgaaaaaacggtactct

SEQ ID NO: 159451 - DNA, 25 bp, SARS Virus
gctgtgatgaacaaacggtactctg

SEQ ID NO: 159452 - DNA, 25 bp, SARS Virus
ctgtgatgaacaaacggtactctga

SEQ ID NO: 159453 - DNA, 25 bp, SARS Virus
tgtgatgaacaaacggtactctgag

SEQ ID NO: 159454 - DNA, 25 bp, SARS Virus
gtgatgaacaaaaggtactctgagt

SEQ ID NO: 159455 - DNA, 25 bp, SARS Virus
tgatgaacaaacagtactctgagtg

SEQ ID NO: 159456 - DNA, 25 bp, SARS Virus
gatgaacaaacgatactctgagtgt

SEQ ID NO: 159457 - DNA, 25 bp, SARS Virus
atgaacaaacggaactctgagtgtt

SEQ ID NO: 159458 - DNA, 25 bp, SARS Virus
tgaacaaacggtactctgagtgttc

SEQ ID NO: 159459 - DNA, 25 bp, SARS Virus
gaacaaacggtaatctgagtgttcc

SEQ ID NO: 159460 - DNA, 25 bp, SARS Virus
aacaaacggtacactgagtgttcct

SEQ ID NO: 159461 - DNA, 25 bp, SARS Virus
acaaacggtactatgagtgttcctg

SEQ ID NO: 159462 - DNA, 25 bp, SARS Virus
caaacggtactcagagtgttcctga

SEQ ID NO: 159463 - DNA, 25 bp, SARS Virus
aaacggtactctaagtgttcctgat

SEQ ID NO: 159464 - DNA, 25 bp, SARS Virus
aacggtactctgagtgttcctgata

SEQ ID NO: 159465 - DNA, 25 bp, SARS Virus
acggtactctgaatgttcctgatag

SEQ ID NO: 159466 - DNA, 25 bp, SARS Virus
cggtactctgagagttcctgatagt

SEQ ID NO: 159467 - DNA, 25 bp, SARS Virus
ggtactctgagtattcctgatagtc

SEQ ID NO: 159468 - DNA, 25 bp, SARS Virus
gtactctgagtgatcctgatagtct

SEQ ID NO: 159469 - DNA, 25 bp, SARS Virus
tactctgagtgtacctgatagtctt

SEQ ID NO: 159470 - DNA, 25 bp, SARS Virus
actctgagtgttactgatagtctta

SEQ ID NO: 159471 - DNA, 25 bp, SARS Virus
ctctgagtgttcatgatagtcttat

SEQ ID NO: 159472 - DNA, 25 bp, SARS Virus
tctgagtgttccagatagtcttatc

SEQ ID NO: 159473 - DNA, 25 bp, SARS Virus
ctgagtgttcctaatagtcttatca

SEQ ID NO: 159474 - DNA, 25 bp, SARS Virus
tgagtgttcctgatagtcttatcat

SEQ ID NO: 159475 - DNA, 25 bp, SARS Virus
gagtgttcctgaaagtcttatcatt

SEQ ID NO: 159476 - DNA, 25 bp, SARS Virus
agtgttcctgatagtcttatcattt

SEQ ID NO: 159477 - DNA, 25 bp, SARS Virus
gtgttcctgataatcttatcatttt

SEQ ID NO: 159478 - DNA, 25 bp, SARS Virus
tgttcctgatagacttatcattttc

SEQ ID NO: 159479 - DNA, 25 bp, SARS Virus
gttcctgatagtattatcattttct

SEQ ID NO: 159480 - DNA, 25 bp, SARS Virus
ttcctgatagtcatatcattttctt

SEQ ID NO: 159481 - DNA, 25 bp, SARS Virus
tcctgatagtctaatcattttcttt

SEQ ID NO: 159482 - DNA, 25 bp, SARS Virus
cctgatagtcttatcattttctttc

SEQ ID NO: 159483 - DNA, 25 bp, SARS Virus
ctgatagtcttaacattttctttcc

SEQ ID NO: 159484 - DNA, 25 bp, SARS Virus
tgatagtcttataattttctttccg

SEQ ID NO: 159485 - DNA, 25 bp, SARS Virus
gatagtcttatcattttctttccgt

SEQ ID NO: 159486 - DNA, 25 bp, SARS Virus
atagtcttatcaatttctttccgtt

SEQ ID NO: 159487 - DNA, 25 bp, SARS Virus
tagtcttatcatattctttccgtta

SEQ ID NO: 159488 - DNA, 25 bp, SARS Virus
agtcttatcattatctttccgttaa

SEQ ID NO: 159489 - DNA, 25 bp, SARS Virus
gtcttatcatttactttccgttaac

SEQ ID NO: 159490 - DNA, 25 bp, SARS Virus
tcttatcattttatttccgttaacg

SEQ ID NO: 159491 - DNA, 25 bp, SARS Virus
cttatcattttcattccgttaacga

SEQ ID NO: 159492 - DNA, 25 bp, SARS Virus
ttatcattttctatccgttaacgaa

SEQ ID NO: 159493 - DNA, 25 bp, SARS Virus
tatcattttcttaccgttaacgaaa

SEQ ID NO: 159494 - DNA, 25 bp, SARS Virus
atcattttctttacgttaacgaaat

SEQ ID NO: 159495 - DNA, 25 bp, SARS Virus
tcattttctttcagttaacgaaatt

SEQ ID NO: 159496 - DNA, 25 bp, SARS Virus
cattttctttccattaacgaaattt

SEQ ID NO: 159497 - DNA, 25 bp, SARS Virus
attttctttccgataacgaaattta

SEQ ID NO: 159498 - DNA, 25 bp, SARS Virus
ttttctttccgtaaacgaaatttaa

SEQ ID NO: 159499 - DNA, 25 bp, SARS Virus
tttctttccgttaacgaaatttaat

SEQ ID NO: 159500 - DNA, 25 bp, SARS Virus
ttctttccgttaacgaaatttaatc

SEQ ID NO: 159501 - DNA, 25 bp, SARS Virus
tctttccgttaaagaaatttaatca

SEQ ID NO: 159502 - DNA, 25 bp, SARS Virus
ctttccgttaacaaaatttaatcat

SEQ ID NO: 159503 - DNA, 25 bp, SARS Virus
tttccgttaacgaaatttaatcatt

SEQ ID NO: 159504 - DNA, 25 bp, SARS Virus
ttccgttaacgaaatttaatcattt

SEQ ID NO: 159505 - DNA, 25 bp, SARS Virus
tccgttaacgaaatttaatcattta

SEQ ID NO: 159506 - DNA, 25 bp, SARS Virus
ccgttaacgaaaattaatcatttac

SEQ ID NO: 159507 - DNA, 25 bp, SARS Virus
cgttaacgaaatataatcatttacg

SEQ ID NO: 159508 - DNA, 25 bp, SARS Virus
gttaacgaaattaaatcatttacgt

SEQ ID NO: 159509 - DNA, 25 bp, SARS Virus
ttaacgaaatttaatcatttacgtg

SEQ ID NO: 159510 - DNA, 25 bp, SARS Virus
taacgaaatttaatcatttacgtga

SEQ ID NO: 159511 - DNA, 25 bp, SARS Virus
aacgaaatttaaacatttacgtgaa

SEQ ID NO: 159512 - DNA, 25 bp, SARS Virus
acgaaatttaataatttacgtgaaa

SEQ ID NO: 159513 - DNA, 25 bp, SARS Virus
cgaaatttaatcatttacgtgaaaa

SEQ ID NO: 159514 - DNA, 25 bp, SARS Virus
gaaatttaatcaattacgtgaaaat

SEQ ID NO: 159515 - DNA, 25 bp, SARS Virus
aaatttaatcatatacgtgaaaata

SEQ ID NO: 159516 - DNA, 25 bp, SARS Virus
aatttaatcattaacgtgaaaatag

SEQ ID NO: 159517 - DNA, 25 bp, SARS Virus
atttaatcatttacgtgaaaatagc

SEQ ID NO: 159518 - DNA, 25 bp, SARS Virus
tttaatcatttaagtgaaaatagct

SEQ ID NO: 159519 - DNA, 25 bp, SARS Virus
ttaatcatttacatgaaaatagctt

SEQ ID NO: 159520 - DNA, 25 bp, SARS Virus
taatcatttacgagaaaatagcttt

SEQ ID NO: 159521 - DNA, 25 bp, SARS Virus
aatcatttacgtaaaaatagctttc

SEQ ID NO: 159522 - DNA, 25 bp, SARS Virus
atcatttacgtgaaaatagctttcg

SEQ ID NO: 159523 - DNA, 25 bp, SARS Virus
tcatttacgtgaaaatagctttcga

SEQ ID NO: 159524 - DNA, 25 bp, SARS Virus
catttacgtgaaaatagctttcgac

SEQ ID NO: 159525 - DNA, 25 bp, SARS Virus
atttacgtgaaaatagctttcgacc

SEQ ID NO: 159526 - DNA, 25 bp, SARS Virus
tttacgtgaaaaaagctttcgacct

SEQ ID NO: 159527 - DNA, 25 bp, SARS Virus
ttacgtgaaaatagctttcgacctc

SEQ ID NO: 159528 - DNA, 25 bp, SARS Virus
tacgtgaaaataactttcgacctca

SEQ ID NO: 159529 - DNA, 25 bp, SARS Virus
acgtgaaaatagatttcgacctcac

SEQ ID NO: 159530 - DNA, 25 bp, SARS Virus
cgtgaaaatagcattcgacctcaca

SEQ ID NO: 159531 - DNA, 25 bp, SARS Virus
gtgaaaatagctatcgacctcacac

SEQ ID NO: 159532 - DNA, 25 bp, SARS Virus
tgaaaatagcttacgacctcacacc

SEQ ID NO: 159533 - DNA, 25 bp, SARS Virus
gaaaatagctttagacctcacacct

SEQ ID NO: 159534 - DNA, 25 bp, SARS Virus
aaaatagctttcaacctcacacctt

SEQ ID NO: 159535 - DNA, 25 bp, SARS Virus
aaatagctttcgacctcacacctta

SEQ ID NO: 159536 - DNA, 25 bp, SARS Virus
aatagctttcgaactcacaccttac

SEQ ID NO: 159537 - DNA, 25 bp, SARS Virus
atagctttcgacatcacaccttacg

SEQ ID NO: 159538 - DNA, 25 bp, SARS Virus
tagctttcgaccacacaccttacgt

SEQ ID NO: 159539 - DNA, 25 bp, SARS Virus
agctttcgacctaacaccttacgta

SEQ ID NO: 159540 - DNA, 25 bp, SARS Virus
gctttcgacctcacaccttacgtac

SEQ ID NO: 159541 - DNA, 25 bp, SARS Virus
ctttcgacctcaaaccttacgtacg

SEQ ID NO: 159542 - DNA, 25 bp, SARS Virus
tttcgacctcacaccttacgtacga

SEQ ID NO: 159543 - DNA, 25 bp, SARS Virus
ttcgacctcacaacttacgtacgaa

SEQ ID NO: 159544 - DNA, 25 bp, SARS Virus
tcgacctcacacattacgtacgaat

SEQ ID NO: 159545 - DNA, 25 bp, SARS Virus
cgacctcacaccatacgtacgaata

SEQ ID NO: 159546 - DNA, 25 bp, SARS Virus
gacctcacacctaacgtacgaataa

SEQ ID NO: 159547 - DNA, 25 bp, SARS Virus
acctcacaccttacgtacgaataag

SEQ ID NO: 159548 - DNA, 25 bp, SARS Virus
cctcacaccttaagtacgaataagt

SEQ ID NO: 159549 - DNA, 25 bp, SARS Virus
ctcacaccttacatacgaataagtg

SEQ ID NO: 159550 - DNA, 25 bp, SARS Virus
tcacaccttacgaacgaataagtgt

SEQ ID NO: 159551 - DNA, 25 bp, SARS Virus
cacaccttacgtacgaataagtgta

SEQ ID NO: 159552 - DNA, 25 bp, SARS Virus
acaccttacgtaagaataagtgtat

SEQ ID NO: 159553 - DNA, 25 bp, SARS Virus
caccttacgtacaaataagtgtatg

SEQ ID NO: 159554 - DNA, 25 bp, SARS Virus
accttacgtacgaataagtgtatgt

SEQ ID NO: 159555 - DNA, 25 bp, SARS Virus
ccttacgtacgaataagtgtatgtt

SEQ ID NO: 159556 - DNA, 25 bp, SARS Virus
cttacgtacgaaaaagtgtatgttt

SEQ ID NO: 159557 - DNA, 25 bp, SARS Virus
ttacgtacgaataagtgtatgtttg

SEQ ID NO: 159558 - DNA, 25 bp, SARS Virus
tacgtacgaataagtgtatgtttga

SEQ ID NO: 159559 - DNA, 25 bp, SARS Virus
acgtacgaataaatgtatgtttgat

SEQ ID NO: 159560 - DNA, 25 bp, SARS Virus
cgtacgaataagagtatgtttgatg

SEQ ID NO: 159561 - DNA, 25 bp, SARS Virus
gtacgaataagtatatgtttgatgg

SEQ ID NO: 159562 - DNA, 25 bp, SARS Virus
tacgaataagtgaatgtttgatggt

SEQ ID NO: 159563 - DNA, 25 bp, SARS Virus
acgaataagtgtatgtttgatggtg

SEQ ID NO: 159564 - DNA, 25 bp, SARS Virus
cgaataagtgtaagtttgatggtgg

SEQ ID NO: 159565 - DNA, 25 bp, SARS Virus
gaataagtgtatatttgatggtggt

SEQ ID NO: 159566 - DNA, 25 bp, SARS Virus
aataagtgtatgattgatggtggta

SEQ ID NO: 159567 - DNA, 25 bp, SARS Virus
ataagtgtatgtatgatggtggtag

SEQ ID NO: 159568 - DNA, 25 bp, SARS Virus
taagtgtatgttagatggtggtagt

SEQ ID NO: 159569 - DNA, 25 bp, SARS Virus
aagtgtatgtttaatggtggtagtg

SEQ ID NO: 159570 - DNA, 25 bp, SARS Virus
agtgtatgtttgatggtggtagtgt

SEQ ID NO: 159571 - DNA, 25 bp, SARS Virus
gtgtatgtttgaaggtggtagtgtc

SEQ ID NO: 159572 - DNA, 25 bp, SARS Virus
tgtatgtttgatagtggtagtgtcg

SEQ ID NO: 159573 - DNA, 25 bp, SARS Virus
gtatgtttgatgatggtagtgtcgg

SEQ ID NO: 159574 - DNA, 25 bp, SARS Virus
tatgtttgatggaggtagtgtcgga

SEQ ID NO: 159575 - DNA, 25 bp, SARS Virus
atgtttgatggtagtagtgtcggac

SEQ ID NO: 159576 - DNA, 25 bp, SARS Virus
tgtttgatggtgatagtgtcggacc

SEQ ID NO: 159577 - DNA, 25 bp, SARS Virus
gtttgatggtggaagtgtcggacca

SEQ ID NO: 159578 - DNA, 25 bp, SARS Virus
tttgatggtggtagtgtcggaccat

SEQ ID NO: 159579 - DNA, 25 bp, SARS Virus
ttgatggtggtaatgtcggaccatt

SEQ ID NO: 159580 - DNA, 25 bp, SARS Virus
tgatggtggtagagtcggaccattc

SEQ ID NO: 159581 - DNA, 25 bp, SARS Virus
gatggtggtagtatcggaccattca

SEQ ID NO: 159582 - DNA, 25 bp, SARS Virus
atggtggtagtgacggaccattcaa

SEQ ID NO: 159583 - DNA, 25 bp, SARS Virus
tggtggtagtgtaggaccattcaag

SEQ ID NO: 159584 - DNA, 25 bp, SARS Virus
ggtggtagtgtcagaccattcaagt

SEQ ID NO: 159585 - DNA, 25 bp, SARS Virus
gtggtagtgtcgaaccattcaagtt

SEQ ID NO: 159586 - DNA, 25 bp, SARS Virus
tggtagtgtcggaccattcaagttc

SEQ ID NO: 159587 - DNA, 25 bp, SARS Virus
ggtagtgtcggaacattcaagttca

SEQ ID NO: 159588 - DNA, 25 bp, SARS Virus
gtagtgtcggacaattcaagttcaa

SEQ ID NO: 159589 - DNA, 25 bp, SARS Virus
tagtgtcggaccattcaagttcaaa

SEQ ID NO: 159590 - DNA, 25 bp, SARS Virus
agtgtcggaccaatcaagttcaaac

SEQ ID NO: 159591 - DNA, 25 bp, SARS Virus
gtgtcggaccatacaagttcaaact

SEQ ID NO: 159592 - DNA, 25 bp, SARS Virus
tgtcggaccattaaagttcaaactg

SEQ ID NO: 159593 - DNA, 25 bp, SARS Virus
gtcggaccattcaagttcaaactgt

SEQ ID NO: 159594 - DNA, 25 bp, SARS Virus
tcggaccattcaagttcaaactgtt

SEQ ID NO: 159595 - DNA, 25 bp, SARS Virus
cggaccattcaaattcaaactgttc

SEQ ID NO: 159596 - DNA, 25 bp, SARS Virus
ggaccattcaagatcaaactgttct

SEQ ID NO: 159597 - DNA, 25 bp, SARS Virus
gaccattcaagtacaaactgttctg

SEQ ID NO: 159598 - DNA, 25 bp, SARS Virus
accattcaagttaaaactgttctga

SEQ ID NO: 159599 - DNA, 25 bp, SARS Virus
ccattcaagttcaaactgttctgag

SEQ ID NO: 159600 - DNA, 25 bp, SARS Virus
cattcaagttcaaactgttctgaga

SEQ ID NO: 159601 - DNA, 25 bp, SARS Virus
attcaagttcaaactgttctgagaa

SEQ ID NO: 159602 - DNA, 25 bp, SARS Virus
ttcaagttcaaaatgttctgagaac

SEQ ID NO: 159603 - DNA, 25 bp, SARS Virus
tcaagttcaaacagttctgagaaca

SEQ ID NO: 159604 - DNA, 25 bp, SARS Virus
caagttcaaactattctgagaacac

SEQ ID NO: 159605 - DNA, 25 bp, SARS Virus
aagttcaaactgatctgagaacaca

SEQ ID NO: 159606 - DNA, 25 bp, SARS Virus
agttcaaactgtactgagaacacag

SEQ ID NO: 159607 - DNA, 25 bp, SARS Virus
gttcaaactgttatgagaacacagt

SEQ ID NO: 159608 - DNA, 25 bp, SARS Virus
ttcaaactgttcagagaacacagtt

SEQ ID NO: 159609 - DNA, 25 bp, SARS Virus
aagtttctagagctgtagttatggt

SEQ ID NO: 159610 - DNA, 25 bp, SARS Virus
agtttctagaggcgtagttatggta

SEQ ID NO: 159611 - DNA, 25 bp, SARS Virus
gtttctagaggtctagttatggtag

SEQ ID NO: 159612 - DNA, 25 bp, SARS Virus
tttctagaggtgcagttatggtaga

SEQ ID NO: 159613 - DNA, 25 bp, SARS Virus
ttctagaggtgtcgttatggtagat

SEQ ID NO: 159614 - DNA, 25 bp, SARS Virus
tctagaggtgtacttatggtagatg

SEQ ID NO: 159615 - DNA, 25 bp, SARS Virus
ctagaggtgtagctatggtagatgg

SEQ ID NO: 159616 - DNA, 25 bp, SARS Virus
tagaggtgtagtcatggtagatgga

SEQ ID NO: 159617 - DNA, 25 bp, SARS Virus
agaggtgtagttctggtagatggaa

SEQ ID NO: 159618 - DNA, 25 bp, SARS Virus
gaggtgtagttacggtagatggaaa

SEQ ID NO: 159619 - DNA, 25 bp, SARS Virus
aggtgtagttatcgtagatggaaac

SEQ ID NO: 159620 - DNA, 25 bp, SARS Virus
ggtgtagttatgctagatggaaaca

SEQ ID NO: 159621 - DNA, 25 bp, SARS Virus
gtgtagttatggcagatggaaacac

SEQ ID NO: 159622 - DNA, 25 bp, SARS Virus
tgtagttatggtcgatggaaacaca

SEQ ID NO: 159623 - DNA, 25 bp, SARS Virus
gtagttatggtacatggaaacacat

SEQ ID NO: 159624 - DNA, 25 bp, SARS Virus
tagttatggtagctggaaacacatt

SEQ ID NO: 159625 - DNA, 25 bp, SARS Virus
agttatggtagacggaaacacattt

SEQ ID NO: 159626 - DNA, 25 bp, SARS Virus
gttatggtagatcgaaacacatttg

SEQ ID NO: 159627 - DNA, 25 bp, SARS Virus
ttatggtagatgcaaacacatttgt

SEQ ID NO: 159628 - DNA, 25 bp, SARS Virus
tatggtagatggcaacacatttgtc

SEQ ID NO: 159629 - DNA, 25 bp, SARS Virus
atggtagatggacacacatttgtcg

SEQ ID NO: 159630 - DNA, 25 bp, SARS Virus
tggtagatggaaccacatttgtcgt

SEQ ID NO: 159631 - DNA, 25 bp, SARS Virus
ggtagatggaaacacatttgtcgta

SEQ ID NO: 159632 - DNA, 25 bp, SARS Virus
gtagatggaaacccatttgtcgtaa

SEQ ID NO: 159633 - DNA, 25 bp, SARS Virus
tagatggaaacacatttgtcgtaat

SEQ ID NO: 159634 - DNA, 25 bp, SARS Virus
agatggaaacacctttgtcgtaata

SEQ ID NO: 159635 - DNA, 25 bp, SARS Virus
gatggaaacacacttgtcgtaataa

SEQ ID NO: 159636 - DNA, 25 bp, SARS Virus
atggaaacacatctgtcgtaataat

SEQ ID NO: 159637 - DNA, 25 bp, SARS Virus
tggaaacacattcgtcgtaataatt

SEQ ID NO: 159638 - DNA, 25 bp, SARS Virus
ggaaacacatttctcgtaataatta

SEQ ID NO: 159639 - DNA, 25 bp, SARS Virus
gaaacacatttgccgtaataattac

SEQ ID NO: 159640 - DNA, 25 bp, SARS Virus
aaacacatttgtcgtaataattact

SEQ ID NO: 159641 - DNA, 25 bp, SARS Virus
aacacatttgtcctaataattacta

SEQ ID NO: 159642 - DNA, 25 bp, SARS Virus
acacatttgtcgcaataattactac

SEQ ID NO: 159643 - DNA, 25 bp, SARS Virus
cacatttgtcgtcataattactacc

SEQ ID NO: 159644 - DNA, 25 bp, SARS Virus
acatttgtcgtactaattactacct

SEQ ID NO: 159645 - DNA, 25 bp, SARS Virus
catttgtcgtaacaattactacctt

SEQ ID NO: 159646 - DNA, 25 bp, SARS Virus
atttgtcgtaatcattactaccttt

SEQ ID NO: 159647 - DNA, 25 bp, SARS Virus
tttgtcgtaatacttactacctttg

SEQ ID NO: 159648 - DNA, 25 bp, SARS Virus
ttgtcgtaataactactacctttgt

SEQ ID NO: 159649 - DNA, 25 bp, SARS Virus
tgtcgtaataatcactacctttgtc

SEQ ID NO: 159650 - DNA, 25 bp, SARS Virus
gtcgtaataattcctacctttgtcc

SEQ ID NO: 159651 - DNA, 25 bp, SARS Virus
tcgtaataattactacctttgtcca

SEQ ID NO: 159652 - DNA, 25 bp, SARS Virus
cgtaataattaccacctttgtccac

SEQ ID NO: 159653 - DNA, 25 bp, SARS Virus
gtaataattactccctttgtccacg

SEQ ID NO: 159654 - DNA, 25 bp, SARS Virus
taataattactacctttgtccacga

SEQ ID NO: 159655 - DNA, 25 bp, SARS Virus
aataattactacctttgtccacgaa

SEQ ID NO: 159656 - DNA, 25 bp, SARS Virus
ataattactacccttgtccacgaag

SEQ ID NO: 159657 - DNA, 25 bp, SARS Virus
taattactacctctgtccacgaagc

SEQ ID NO: 159658 - DNA, 25 bp, SARS Virus
aattactaccttcgtccacgaagcg

SEQ ID NO: 159659 - DNA, 25 bp, SARS Virus
attactacctttctccacgaagcgg

SEQ ID NO: 159660 - DNA, 25 bp, SARS Virus
ttactacctttgcccacgaagcggc

SEQ ID NO: 159661 - DNA, 25 bp, SARS Virus
tactacctttgtccacgaagcggcc

SEQ ID NO: 159662 - DNA, 25 bp, SARS Virus
actacctttgtccacgaagcggccg

SEQ ID NO: 159663 - DNA, 25 bp, SARS Virus
ctacctttgtccccgaagcggccgc

SEQ ID NO: 159664 - DNA, 25 bp, SARS Virus
tacctttgtccacgaagcggccgca

SEQ ID NO: 159665 - DNA, 25 bp, SARS Virus
acctttgtccaccaagcggccgcac

SEQ ID NO: 159666 - DNA, 25 bp, SARS Virus
cctttgtccacgcagcggccgcaca

SEQ ID NO: 159667 - DNA, 25 bp, SARS Virus
ctttgtccacgacgcggccgcacag

SEQ ID NO: 159668 - DNA, 25 bp, SARS Virus
tttgtccacgaaccggccgcacagg

SEQ ID NO: 159669 - DNA, 25 bp, SARS Virus
ttgtccacgaagcggccgcacaggt

SEQ ID NO: 159670 - DNA, 25 bp, SARS Virus
tgtccacgaagccgccgcacaggta

SEQ ID NO: 159671 - DNA, 25 bp, SARS Virus
gtccacgaagcgcccgcacaggtag

SEQ ID NO: 159672 - DNA, 25 bp, SARS Virus
tccacgaagcggccgcacaggtagt

SEQ ID NO: 159673 - DNA, 25 bp, SARS Virus
ccacgaagcggccgcacaggtagtt

SEQ ID NO: 159674 - DNA, 25 bp, SARS Virus
cacgaagcggccccacaggtagttt

SEQ ID NO: 159675 - DNA, 25 bp, SARS Virus
acgaagcggccgcacaggtagtttc

SEQ ID NO: 159676 - DNA, 25 bp, SARS Virus
cgaagcggccgcccaggtagtttca

SEQ ID NO: 159677 - DNA, 25 bp, SARS Virus
gaagcggccgcacaggtagtttcac

SEQ ID NO: 159678 - DNA, 25 bp, SARS Virus
aagcggccgcaccggtagtttcaca

SEQ ID NO: 159679 - DNA, 25 bp, SARS Virus
agcggccgcacacgtagtttcacag

SEQ ID NO: 159680 - DNA, 25 bp, SARS Virus
gcggccgcacagctagtttcacagg

SEQ ID NO: 159681 - DNA, 25 bp, SARS Virus
cggccgcacaggcagtttcacagga

SEQ ID NO: 159682 - DNA, 25 bp, SARS Virus
ggccgcacaggtcgtttcacaggaa

SEQ ID NO: 159683 - DNA, 25 bp, SARS Virus
gccgcacaggtactttcacaggaaa

SEQ ID NO: 159684 - DNA, 25 bp, SARS Virus
ccgcacaggtagcttcacaggaaat

SEQ ID NO: 159685 - DNA, 25 bp, SARS Virus
cgcacaggtagtctcacaggaaata

SEQ ID NO: 159686 - DNA, 25 bp, SARS Virus
gcacaggtagttccacaggaaataa

SEQ ID NO: 159687 - DNA, 25 bp, SARS Virus
cacaggtagtttcacaggaaataat

SEQ ID NO: 159688 - DNA, 25 bp, SARS Virus
acaggtagtttcccaggaaataatt

SEQ ID NO: 159689 - DNA, 25 bp, SARS Virus
caggtagtttcacaggaaataattg

SEQ ID NO: 159690 - DNA, 25 bp, SARS Virus
aggtagtttcaccggaaataattgt

SEQ ID NO: 159691 - DNA, 25 bp, SARS Virus
ggtagtttcacacgaaataattgtt

SEQ ID NO: 159692 - DNA, 25 bp, SARS Virus
gtagtttcacagcaaataattgttg

SEQ ID NO: 159693 - DNA, 25 bp, SARS Virus
tagtttcacaggcaataattgttgt

SEQ ID NO: 159694 - DNA, 25 bp, SARS Virus
agtttcacaggacataattgttgta

SEQ ID NO: 159695 - DNA, 25 bp, SARS Virus
gtttcacaggaactaattgttgtaa

SEQ ID NO: 159696 - DNA, 25 bp, SARS Virus
tttcacaggaaacaattgttgtaat

SEQ ID NO: 159697 - DNA, 25 bp, SARS Virus
ttcacaggaaatcattgttgtaata

SEQ ID NO: 159698 - DNA, 25 bp, SARS Virus
tcacaggaaatacttgttgtaatat

SEQ ID NO: 159699 - DNA, 25 bp, SARS Virus
cacaggaaataactgttgtaatatt

SEQ ID NO: 159700 - DNA, 25 bp, SARS Virus
acaggaaataatcgttgtaatattc

SEQ ID NO: 159701 - DNA, 25 bp, SARS Virus
caggaaataattcttgtaatattcg

SEQ ID NO: 159702 - DNA, 25 bp, SARS Virus
aggaaataattgctgtaatattcgg

SEQ ID NO: 159703 - DNA, 25 bp, SARS Virus
ggaaataattgtcgtaatattcggt

SEQ ID NO: 159704 - DNA, 25 bp, SARS Virus
gaaataattgttctaatattcggtg

SEQ ID NO: 159705 - DNA, 25 bp, SARS Virus
aaataattgttgcaatattcggtgt

SEQ ID NO: 159706 - DNA, 25 bp, SARS Virus
aataattgttgtcatattcggtgta

SEQ ID NO: 159707 - DNA, 25 bp, SARS Virus
ataattgttgtactattcggtgtaa

SEQ ID NO: 159708 - DNA, 25 bp, SARS Virus
taattgttgtaacattcggtgtaaa

SEQ ID NO: 159709 - DNA, 25 bp, SARS Virus
aattgttgtaatcttcggtgtaaaa

SEQ ID NO: 159710 - DNA, 25 bp, SARS Virus
attgttgtaatactcggtgtaaaag

SEQ ID NO: 159711 - DNA, 25 bp, SARS Virus
ttgttgtaatatccggtgtaaaaga

SEQ ID NO: 159712 - DNA, 25 bp, SARS Virus
tgttgtaatattcggtgtaaaagat

SEQ ID NO: 159713 - DNA, 25 bp, SARS Virus
gttgtaatattccgtgtaaaagatt

SEQ ID NO: 159714 - DNA, 25 bp, SARS Virus
ttgtaatattcgctgtaaaagattt

SEQ ID NO: 159715 - DNA, 25 bp, SARS Virus
tgtaatattcggcgtaaaagatttg

SEQ ID NO: 159716 - DNA, 25 bp, SARS Virus
gtaatattcggtctaaaagatttga

SEQ ID NO: 159717 - DNA, 25 bp, SARS Virus
taatattcggtgcaaaagatttgag

SEQ ID NO: 159718 - DNA, 25 bp, SARS Virus
aatattcggtgtcaaagatttgaga

SEQ ID NO: 159719 - DNA, 25 bp, SARS Virus
atattcggtgtacaagatttgagac

SEQ ID NO: 159720 - DNA, 25 bp, SARS Virus
tattcggtgtaacagatttgagaca

SEQ ID NO: 159721 - DNA, 25 bp, SARS Virus
attcggtgtaaacgatttgagacat

SEQ ID NO: 159722 - DNA, 25 bp, SARS Virus
ttcggtgtaaaacatttgagacatt

SEQ ID NO: 159723 - DNA, 25 bp, SARS Virus
tcggtgtaaaagctttgagacattg

SEQ ID NO: 159724 - DNA, 25 bp, SARS Virus
cggtgtaaaagacttgagacattgg

SEQ ID NO: 159725 - DNA, 25 bp, SARS Virus
ggtgtaaaagatctgagacattgga

SEQ ID NO: 159726 - DNA, 25 bp, SARS Virus
gtgtaaaagattcgagacattggac

SEQ ID NO: 159727 - DNA, 25 bp, SARS Virus
tgtaaaagatttcagacattggacc

SEQ ID NO: 159728 - DNA, 25 bp, SARS Virus
gtaaaagatttgcgacattggacca

SEQ ID NO: 159729 - DNA, 25 bp, SARS Virus
taaaagatttgacacattggaccat

SEQ ID NO: 159730 - DNA, 25 bp, SARS Virus
aaaagatttgagccattggaccatt

SEQ ID NO: 159731 - DNA, 25 bp, SARS Virus
aaagatttgagacattggaccattt

SEQ ID NO: 159732 - DNA, 25 bp, SARS Virus
aagatttgagaccttggaccattta

SEQ ID NO: 159733 - DNA, 25 bp, SARS Virus
agatttgagacactggaccatttac

SEQ ID NO: 159734 - DNA, 25 bp, SARS Virus
gatttgagacatcggaccatttaca

SEQ ID NO: 159735 - DNA, 25 bp, SARS Virus
atttgagacattcgaccatttacat

SEQ ID NO: 159736 - DNA, 25 bp, SARS Virus
tttgagacattgcaccatttacata

SEQ ID NO: 159737 - DNA, 25 bp, SARS Virus
ttgagacattggcccatttacataa

SEQ ID NO: 159738 - DNA, 25 bp, SARS Virus
tgagacattggaccatttacataag

SEQ ID NO: 159739 - DNA, 25 bp, SARS Virus
gagacattggaccatttacataagg

SEQ ID NO: 159740 - DNA, 25 bp, SARS Virus
agacattggaccctttacataaggt

SEQ ID NO: 159741 - DNA, 25 bp, SARS Virus
gacattggaccacttacataaggtg

SEQ ID NO: 159742 - DNA, 25 bp, SARS Virus
acattggaccatctacataaggtgt

SEQ ID NO: 159743 - DNA, 25 bp, SARS Virus
cattggaccattcacataaggtgtc

SEQ ID NO: 159744 - DNA, 25 bp, SARS Virus
attggaccatttccataaggtgtcc

SEQ ID NO: 159745 - DNA, 25 bp, SARS Virus
ttggaccatttacataaggtgtcca

SEQ ID NO: 159746 - DNA, 25 bp, SARS Virus
tggaccatttacctaaggtgtccaa

SEQ ID NO: 159747 - DNA, 25 bp, SARS Virus
ggaccatttacacaaggtgtccaat

SEQ ID NO: 159748 - DNA, 25 bp, SARS Virus
gaccatttacatcaggtgtccaata

SEQ ID NO: 159749 - DNA, 25 bp, SARS Virus
accatttacatacggtgtccaatat

SEQ ID NO: 159750 - DNA, 25 bp, SARS Virus
ccatttacataacgtgtccaatatt

SEQ ID NO: 159751 - DNA, 25 bp, SARS Virus
catttacataagctgtccaatattc

SEQ ID NO: 159752 - DNA, 25 bp, SARS Virus
atttacataaggcgtccaatattca

SEQ ID NO: 159753 - DNA, 25 bp, SARS Virus
tttacataaggtctccaatattcat

SEQ ID NO: 159754 - DNA, 25 bp, SARS Virus
ttacataaggtgcccaatattcata

SEQ ID NO: 159755 - DNA, 25 bp, SARS Virus
tacataaggtgtccaatattcatag

SEQ ID NO: 159756 - DNA, 25 bp, SARS Virus
acataaggtgtccaatattcatagt

SEQ ID NO: 159757 - DNA, 25 bp, SARS Virus
cataaggtgtcccatattcatagtt

SEQ ID NO: 159758 - DNA, 25 bp, SARS Virus
ataaggtgtccactattcatagttt

SEQ ID NO: 159759 - DNA, 25 bp, SARS Virus
taaggtgtccaacattcatagttta

SEQ ID NO: 159760 - DNA, 25 bp, SARS Virus
aaggtgtccaatcttcatagtttaa

SEQ ID NO: 159761 - DNA, 25 bp, SARS Virus
aggtgtccaatactcatagtttaac

SEQ ID NO: 159762 - DNA, 25 bp, SARS Virus
ggtgtccaatatccatagtttaaca

SEQ ID NO: 159763 - DNA, 25 bp, SARS Virus
gtgtccaatattcatagtttaacaa

SEQ ID NO: 159764 - DNA, 25 bp, SARS Virus
tgtccaatattcctagtttaacaaa

SEQ ID NO: 159765 - DNA, 25 bp, SARS Virus
gtccaatattcacagtttaacaaac

SEQ ID NO: 159766 - DNA, 25 bp, SARS Virus
tccaatattcatcgtttaacaaaca

SEQ ID NO: 159767 - DNA, 25 bp, SARS Virus
ccaatattcatactttaacaaacat

SEQ ID NO: 159768 - DNA, 25 bp, SARS Virus
caatattcatagcttaacaaacatt

SEQ ID NO: 159769 - DNA, 25 bp, SARS Virus
aatattcatagtctaacaaacattt

SEQ ID NO: 159770 - DNA, 25 bp, SARS Virus
atattcatagttcaacaaacattta

SEQ ID NO: 159771 - DNA, 25 bp, SARS Virus
tattcatagtttcacaaacatttag

SEQ ID NO: 159772 - DNA, 25 bp, SARS Virus
attcatagtttaccaaacatttagg

SEQ ID NO: 159773 - DNA, 25 bp, SARS Virus
ttcatagtttaacaaacatttaggt

SEQ ID NO: 159774 - DNA, 25 bp, SARS Virus
tcatagtttaaccaacatttaggta

SEQ ID NO: 159775 - DNA, 25 bp, SARS Virus
catagtttaacacacatttaggtat

SEQ ID NO: 159776 - DNA, 25 bp, SARS Virus
atagtttaacaaccatttaggtatc

SEQ ID NO: 159777 - DNA, 25 bp, SARS Virus
tagtttaacaaacatttaggtatcc

SEQ ID NO: 159778 - DNA, 25 bp, SARS Virus
agtttaacaaacctttaggtatccg

SEQ ID NO: 159779 - DNA, 25 bp, SARS Virus
gtttaacaaacacttaggtatccga

SEQ ID NO: 159780 - DNA, 25 bp, SARS Virus
tttaacaaacatctaggtatccgat

SEQ ID NO: 159781 - DNA, 25 bp, SARS Virus
ttaacaaacattcaggtatccgatt

SEQ ID NO: 159782 - DNA, 25 bp, SARS Virus
taacaaacatttcggtatccgattt

SEQ ID NO: 159783 - DNA, 25 bp, SARS Virus
aacaaacatttacgtatccgattta

SEQ ID NO: 159784 - DNA, 25 bp, SARS Virus
acaaacatttagctatccgatttag

SEQ ID NO: 159785 - DNA, 25 bp, SARS Virus
caaacatttaggcatccgatttagg

SEQ ID NO: 159786 - DNA, 25 bp, SARS Virus
aaacatttaggtctccgatttaggt

SEQ ID NO: 159787 - DNA, 25 bp, SARS Virus
aacatttaggtacccgatttaggtc

SEQ ID NO: 159788 - DNA, 25 bp, SARS Virus
acatttaggtatccgatttaggtcg

SEQ ID NO: 159789 - DNA, 25 bp, SARS Virus
catttaggtatccgatttaggtcgt

SEQ ID NO: 159790 - DNA, 25 bp, SARS Virus
atttaggtatcccatttaggtcgtc

SEQ ID NO: 159791 - DNA, 25 bp, SARS Virus
tttaggtatccgctttaggtcgtct

SEQ ID NO: 159792 - DNA, 25 bp, SARS Virus
ttaggtatccgacttaggtcgtctt

SEQ ID NO: 159793 - DNA, 25 bp, SARS Virus
taggtatccgatctaggtcgtcttt

SEQ ID NO: 159794 - DNA, 25 bp, SARS Virus
aggtatccgattcaggtcgtcttta

SEQ ID NO: 159795 - DNA, 25 bp, SARS Virus
ggtatccgatttcggtcgtctttag

SEQ ID NO: 159796 - DNA, 25 bp, SARS Virus
gtatccgatttacgtcgtctttagt

SEQ ID NO: 159797 - DNA, 25 bp, SARS Virus
tatccgatttagctcgtctttagta

SEQ ID NO: 159798 - DNA, 25 bp, SARS Virus
atccgatttaggccgtctttagtag

SEQ ID NO: 159799 - DNA, 25 bp, SARS Virus
tccgatttaggtcgtctttagtagt

SEQ ID NO: 159800 - DNA, 25 bp, SARS Virus
ccgatttaggtcctctttagtagta

SEQ ID NO: 159801 - DNA, 25 bp, SARS Virus
cgatttaggtcgcctttagtagtat

SEQ ID NO: 159802 - DNA, 25 bp, SARS Virus
gatttaggtcgtctttagtagtata

SEQ ID NO: 159803 - DNA, 25 bp, SARS Virus
atttaggtcgtccttagtagtataa

SEQ ID NO: 159804 - DNA, 25 bp, SARS Virus
tttaggtcgtctctagtagtataat

SEQ ID NO: 159805 - DNA, 25 bp, SARS Virus
ttaggtcgtcttcagtagtataata

SEQ ID NO: 159806 - DNA, 25 bp, SARS Virus
taggtcgtctttcgtagtataatat

SEQ ID NO: 159807 - DNA, 25 bp, SARS Virus
aggtcgtctttactagtataatata

SEQ ID NO: 159808 - DNA, 25 bp, SARS Virus
ggtcgtctttagcagtataatatac

SEQ ID NO: 159809 - DNA, 25 bp, SARS Virus
gtcgtctttagtcgtataatatacg

SEQ ID NO: 159810 - DNA, 25 bp, SARS Virus
tcgtctttagtactataatatacgt

SEQ ID NO: 159811 - DNA, 25 bp, SARS Virus
cgtctttagtagcataatatacgta

SEQ ID NO: 159812 - DNA, 25 bp, SARS Virus
gtctttagtagtctaatatacgtag

SEQ ID NO: 159813 - DNA, 25 bp, SARS Virus
tctttagtagtacaatatacgtagg

SEQ ID NO: 159814 - DNA, 25 bp, SARS Virus
ctttagtagtatcatatacgtaggt

SEQ ID NO: 159815 - DNA, 25 bp, SARS Virus
tttagtagtatactatacgtaggtt

SEQ ID NO: 159816 - DNA, 25 bp, SARS Virus
ttagtagtataacatacgtaggttc

SEQ ID NO: 159817 - DNA, 25 bp, SARS Virus
tagtagtataatctacgtaggttca

SEQ ID NO: 159818 - DNA, 25 bp, SARS Virus
agtagtataatacacgtaggttcat

SEQ ID NO: 159819 - DNA, 25 bp, SARS Virus
gtagtataatatccgtaggttcatg

SEQ ID NO: 159820 - DNA, 25 bp, SARS Virus
tagtataatatacgtaggttcatga

SEQ ID NO: 159821 - DNA, 25 bp, SARS Virus
agtataatatacctaggttcatgac

SEQ ID NO: 159822 - DNA, 25 bp, SARS Virus
gtataatatacgcaggttcatgaca

SEQ ID NO: 159823 - DNA, 25 bp, SARS Virus
tataatatacgtcggttcatgacag

SEQ ID NO: 159824 - DNA, 25 bp, SARS Virus
ataatatacgtacgttcatgacagc

SEQ ID NO: 159825 - DNA, 25 bp, SARS Virus
taatatacgtagcttcatgacagcc

SEQ ID NO: 159826 - DNA, 25 bp, SARS Virus
aatatacgtaggctcatgacagcca

SEQ ID NO: 159827 - DNA, 25 bp, SARS Virus
atatacgtaggtccatgacagccat

SEQ ID NO: 159828 - DNA, 25 bp, SARS Virus
tatacgtaggttcatgacagccatg

SEQ ID NO: 159829 - DNA, 25 bp, SARS Virus
atacgtaggttcctgacagccatga

SEQ ID NO: 159830 - DNA, 25 bp, SARS Virus
tacgtaggttcacgacagccatgag

SEQ ID NO: 159831 - DNA, 25 bp, SARS Virus
acgtaggttcatcacagccatgagt

SEQ ID NO: 159832 - DNA, 25 bp, SARS Virus
cgtaggttcatgccagccatgagta

SEQ ID NO: 159833 - DNA, 25 bp, SARS Virus
gtaggttcatgacagccatgagtaa

SEQ ID NO: 159834 - DNA, 25 bp, SARS Virus
taggttcatgaccgccatgagtaaa

SEQ ID NO: 159835 - DNA, 25 bp, SARS Virus
aggttcatgacacccatgagtaaac

SEQ ID NO: 159836 - DNA, 25 bp, SARS Virus
ggttcatgacagccatgagtaaacg

SEQ ID NO: 159837 - DNA, 25 bp, SARS Virus
gttcatgacagccatgagtaaacgt

SEQ ID NO: 159838 - DNA, 25 bp, SARS Virus
ttcatgacagccctgagtaaacgta

SEQ ID NO: 159839 - DNA, 25 bp, SARS Virus
tcatgacagccacgagtaaacgtac

SEQ ID NO: 159840 - DNA, 25 bp, SARS Virus
catgacagccatcagtaaacgtacc

SEQ ID NO: 159841 - DNA, 25 bp, SARS Virus
atgacagccatgcgtaaacgtacca

SEQ ID NO: 159842 - DNA, 25 bp, SARS Virus
tgacagccatgactaaacgtaccac

SEQ ID NO: 159843 - DNA, 25 bp, SARS Virus
gacagccatgagcaaacgtaccaca

SEQ ID NO: 159844 - DNA, 25 bp, SARS Virus
acagccatgagtcaacgtaccacag

SEQ ID NO: 159845 - DNA, 25 bp, SARS Virus
cagccatgagtacacgtaccacaga

SEQ ID NO: 159846 - DNA, 25 bp, SARS Virus
agccatgagtaaccgtaccacagac

SEQ ID NO: 159847 - DNA, 25 bp, SARS Virus
gccatgagtaaacgtaccacagacg

SEQ ID NO: 159848 - DNA, 25 bp, SARS Virus
ccatgagtaaacctaccacagacgt

SEQ ID NO: 159849 - DNA, 25 bp, SARS Virus
catgagtaaacgcaccacagacgtt

SEQ ID NO: 159850 - DNA, 25 bp, SARS Virus
atgagtaaacgtcccacagacgttt

SEQ ID NO: 159851 - DNA, 25 bp, SARS Virus
tgagtaaacgtaccacagacgtttg

SEQ ID NO: 159852 - DNA, 25 bp, SARS Virus
gagtaaacgtaccacagacgtttgt

SEQ ID NO: 159853 - DNA, 25 bp, SARS Virus
agtaaacgtaccccagacgtttgtc

SEQ ID NO: 159854 - DNA, 25 bp, SARS Virus
gtaaacgtaccacagacgtttgtcg

SEQ ID NO: 159855 - DNA, 25 bp, SARS Virus
taaacgtaccaccgacgtttgtcgt

SEQ ID NO: 159856 - DNA, 25 bp, SARS Virus
aaacgtaccacacacgtttgtcgtg

SEQ ID NO: 159857 - DNA, 25 bp, SARS Virus
aacgtaccacagccgtttgtcgtgg

SEQ ID NO: 159858 - DNA, 25 bp, SARS Virus
acgtaccacagacgtttgtcgtggt

SEQ ID NO: 159859 - DNA, 25 bp, SARS Virus
cgtaccacagacctttgtcgtggtg

SEQ ID NO: 159860 - DNA, 25 bp, SARS Virus
gtaccacagacgcttgtcgtggtgg

SEQ ID NO: 159861 - DNA, 25 bp, SARS Virus
taccacagacgtctgtcgtggtgga

SEQ ID NO: 159862 - DNA, 25 bp, SARS Virus
accacagacgttcgtcgtggtggat

SEQ ID NO: 159863 - DNA, 25 bp, SARS Virus
ccacagacgtttctcgtggtggatt

SEQ ID NO: 159864 - DNA, 25 bp, SARS Virus
cacagacgtttgccgtggtggattt

SEQ ID NO: 159865 - DNA, 25 bp, SARS Virus
acagacgtttgtcgtggtggattta

SEQ ID NO: 159866 - DNA, 25 bp, SARS Virus
cagacgtttgtcctggtggatttaa

SEQ ID NO: 159867 - DNA, 25 bp, SARS Virus
agacgtttgtcgcggtggatttaac

SEQ ID NO: 159868 - DNA, 25 bp, SARS Virus
gacgtttgtcgtcgtggatttaacg

SEQ ID NO: 159869 - DNA, 25 bp, SARS Virus
acgtttgtcgtgctggatttaacgt

SEQ ID NO: 159870 - DNA, 25 bp, SARS Virus
cgtttgtcgtggcggatttaacgta

SEQ ID NO: 159871 - DNA, 25 bp, SARS Virus
gtttgtcgtggtcgatttaacgtag

SEQ ID NO: 159872 - DNA, 25 bp, SARS Virus
tttgtcgtggtgcatttaacgtagc

SEQ ID NO: 159873 - DNA, 25 bp, SARS Virus
ttgtcgtggtggctttaacgtagca

SEQ ID NO: 159874 - DNA, 25 bp, SARS Virus
tgtcgtggtggacttaacgtagcac

SEQ ID NO: 159875 - DNA, 25 bp, SARS Virus
gtcgtggtggatctaacgtagcaca

SEQ ID NO: 159876 - DNA, 25 bp, SARS Virus
tcgtggtggattcaacgtagcacat

SEQ ID NO: 159877 - DNA, 25 bp, SARS Virus
cgtggtggatttcacgtagcacatt

SEQ ID NO: 159878 - DNA, 25 bp, SARS Virus
gtggtggatttaccgtagcacatta

SEQ ID NO: 159879 - DNA, 25 bp, SARS Virus
tggtggatttaacgtagcacattat

SEQ ID NO: 159880 - DNA, 25 bp, SARS Virus
ggtggatttaacctagcacattatg

SEQ ID NO: 159881 - DNA, 25 bp, SARS Virus
gtggatttaacgcagcacattatgt

SEQ ID NO: 159882 - DNA, 25 bp, SARS Virus
tggatttaacgtcgcacattatgtg

SEQ ID NO: 159883 - DNA, 25 bp, SARS Virus
ggatttaacgtaccacattatgtgc

SEQ ID NO: 159884 - DNA, 25 bp, SARS Virus
gatttaacgtagcacattatgtgca

SEQ ID NO: 159885 - DNA, 25 bp, SARS Virus
atttaacgtagcccattatgtgcat

SEQ ID NO: 159886 - DNA, 25 bp, SARS Virus
tttaacgtagcacattatgtgcatc

SEQ ID NO: 159887 - DNA, 25 bp, SARS Virus
ttaacgtagcaccttatgtgcatcg

SEQ ID NO: 159888 - DNA, 25 bp, SARS Virus
taacgtagcacactatgtgcatcgt

SEQ ID NO: 159889 - DNA, 25 bp, SARS Virus
aacgtagcacatcatgtgcatcgtc

SEQ ID NO: 159890 - DNA, 25 bp, SARS Virus
acgtagcacattctgtgcatcgtct

SEQ ID NO: 159891 - DNA, 25 bp, SARS Virus
cgtagcacattacgtgcatcgtcta

SEQ ID NO: 159892 - DNA, 25 bp, SARS Virus
gtagcacattatctgcatcgtctaa

SEQ ID NO: 159893 - DNA, 25 bp, SARS Virus
tagcacattatgcgcatcgtctaaa

SEQ ID NO: 159894 - DNA, 25 bp, SARS Virus
agcacattatgtccatcgtctaaac

SEQ ID NO: 159895 - DNA, 25 bp, SARS Virus
gcacattatgtgcatcgtctaaact

SEQ ID NO: 159896 - DNA, 25 bp, SARS Virus
cacattatgtgcctcgtctaaactc

SEQ ID NO: 159897 - DNA, 25 bp, SARS Virus
acattatgtgcaccgtctaaactca

SEQ ID NO: 159898 - DNA, 25 bp, SARS Virus
cattatgtgcatcgtctaaactcac

SEQ ID NO: 159899 - DNA, 25 bp, SARS Virus
attatgtgcatcctctaaactcacc

SEQ ID NO: 159900 - DNA, 25 bp, SARS Virus
ttatgtgcatcgcctaaactcacct

SEQ ID NO: 159901 - DNA, 25 bp, SARS Virus
tatgtgcatcgtctaaactcacctt

SEQ ID NO: 159902 - DNA, 25 bp, SARS Virus
atgtgcatcgtccaaactcaccttg

SEQ ID NO: 159903 - DNA, 25 bp, SARS Virus
tgtgcatcgtctcaactcaccttgt

SEQ ID NO: 159904 - DNA, 25 bp, SARS Virus
gtgcatcgtctacactcaccttgta

SEQ ID NO: 159905 - DNA, 25 bp, SARS Virus
tgcatcgtctaacctcaccttgtat

SEQ ID NO: 159906 - DNA, 25 bp, SARS Virus
gcatcgtctaaactcaccttgtatt

SEQ ID NO: 159907 - DNA, 25 bp, SARS Virus
catcgtctaaacccaccttgtatta

SEQ ID NO: 159908 - DNA, 25 bp, SARS Virus
atcgtctaaactcaccttgtattag

SEQ ID NO: 159909 - DNA, 25 bp, SARS Virus
tcgtctaaactccccttgtattagt

SEQ ID NO: 159910 - DNA, 25 bp, SARS Virus
cgtctaaactcaccttgtattagtt

SEQ ID NO: 159911 - DNA, 25 bp, SARS Virus
gtctaaactcaccttgtattagtta

SEQ ID NO: 159912 - DNA, 25 bp, SARS Virus
tctaaactcaccctgtattagttat

SEQ ID NO: 159913 - DNA, 25 bp, SARS Virus
ctaaactcacctcgtattagttata

SEQ ID NO: 159914 - DNA, 25 bp, SARS Virus
taaactcaccttctattagttatag

SEQ ID NO: 159915 - DNA, 25 bp, SARS Virus
aaactcaccttgcattagttatagg

SEQ ID NO: 159916 - DNA, 25 bp, SARS Virus
aactcaccttgtcttagttataggc

SEQ ID NO: 159917 - DNA, 25 bp, SARS Virus
actcaccttgtactagttataggct

SEQ ID NO: 159918 - DNA, 25 bp, SARS Virus
ctcaccttgtatcagttataggctg

SEQ ID NO: 159919 - DNA, 25 bp, SARS Virus
tcaccttgtattcgttataggctgt

SEQ ID NO: 159920 - DNA, 25 bp, SARS Virus
caccttgtattacttataggctgtg

SEQ ID NO: 159921 - DNA, 25 bp, SARS Virus
accttgtattagctataggctgtga

SEQ ID NO: 159922 - DNA, 25 bp, SARS Virus
ccttgtattagtcataggctgtgat

SEQ ID NO: 159923 - DNA, 25 bp, SARS Virus
cttgtattagttctaggctgtgatg

SEQ ID NO: 159924 - DNA, 25 bp, SARS Virus
ttgtattagttacaggctgtgatga

SEQ ID NO: 159925 - DNA, 25 bp, SARS Virus
tgtattagttatcggctgtgatgaa

SEQ ID NO: 159926 - DNA, 25 bp, SARS Virus
gtattagttatacgctgtgatgaac

SEQ ID NO: 159927 - DNA, 25 bp, SARS Virus
tattagttatagcctgtgatgaaca

SEQ ID NO: 159928 - DNA, 25 bp, SARS Virus
attagttataggctgtgatgaacaa

SEQ ID NO: 159929 - DNA, 25 bp, SARS Virus
ttagttataggccgtgatgaacaaa

SEQ ID NO: 159930 - DNA, 25 bp, SARS Virus
tagttataggctctgatgaacaaac

SEQ ID NO: 159931 - DNA, 25 bp, SARS Virus
agttataggctgcgatgaacaaacg

SEQ ID NO: 159932 - DNA, 25 bp, SARS Virus
gttataggctgtcatgaacaaacgg

SEQ ID NO: 159933 - DNA, 25 bp, SARS Virus
ttataggctgtgctgaacaaacggt

SEQ ID NO: 159934 - DNA, 25 bp, SARS Virus
tataggctgtgacgaacaaacggta

SEQ ID NO: 159935 - DNA, 25 bp, SARS Virus
ataggctgtgatcaacaaacggtac

SEQ ID NO: 159936 - DNA, 25 bp, SARS Virus
taggctgtgatgcacaaacggtact

SEQ ID NO: 159937 - DNA, 25 bp, SARS Virus
aggctgtgatgaccaaacggtactc

SEQ ID NO: 159938 - DNA, 25 bp, SARS Virus
ggctgtgatgaacaaacggtactct

SEQ ID NO: 159939 - DNA, 25 bp, SARS Virus
gctgtgatgaaccaacggtactctg

SEQ ID NO: 159940 - DNA, 25 bp, SARS Virus
ctgtgatgaacacacggtactctga

SEQ ID NO: 159941 - DNA, 25 bp, SARS Virus
tgtgatgaacaaccggtactctgag

SEQ ID NO: 159942 - DNA, 25 bp, SARS Virus
gtgatgaacaaacggtactctgagt

SEQ ID NO: 159943 - DNA, 25 bp, SARS Virus
tgatgaacaaaccgtactctgagtg

SEQ ID NO: 159944 - DNA, 25 bp, SARS Virus
gatgaacaaacgctactctgagtgt

SEQ ID NO: 159945 - DNA, 25 bp, SARS Virus
atgaacaaacggcactctgagtgtt

SEQ ID NO: 159946 - DNA, 25 bp, SARS Virus
tgaacaaacggtcctctgagtgttc

SEQ ID NO: 159947 - DNA, 25 bp, SARS Virus
gaacaaacggtactctgagtgttcc

SEQ ID NO: 159948 - DNA, 25 bp, SARS Virus
aacaaacggtaccctgagtgttcct

SEQ ID NO: 159949 - DNA, 25 bp, SARS Virus
acaaacggtactctgagtgttcctg

SEQ ID NO: 159950 - DNA, 25 bp, SARS Virus
caaacggtactccgagtgttcctga

SEQ ID NO: 159951 - DNA, 25 bp, SARS Virus
aaacggtactctcagtgttcctgat

SEQ ID NO: 159952 - DNA, 25 bp, SARS Virus
aacggtactctgcgtgttcctgata

SEQ ID NO: 159953 - DNA, 25 bp, SARS Virus
acggtactctgactgttcctgatag

SEQ ID NO: 159954 - DNA, 25 bp, SARS Virus
cggtactctgagcgttcctgatagt

SEQ ID NO: 159955 - DNA, 25 bp, SARS Virus
ggtactctgagtcttcctgatagtc

SEQ ID NO: 159956 - DNA, 25 bp, SARS Virus
gtactctgagtgctcctgatagtct

SEQ ID NO: 159957 - DNA, 25 bp, SARS Virus
tactctgagtgtccctgatagtctt

SEQ ID NO: 159958 - DNA, 25 bp, SARS Virus
actctgagtgttcctgatagtctta

SEQ ID NO: 159959 - DNA, 25 bp, SARS Virus
ctctgagtgttcctgatagtcttat

SEQ ID NO: 159960 - DNA, 25 bp, SARS Virus
tctgagtgttcccgatagtcttatc

SEQ ID NO: 159961 - DNA, 25 bp, SARS Virus
ctgagtgttcctcatagtcttatca

SEQ ID NO: 159962 - DNA, 25 bp, SARS Virus
tgagtgttcctgctagtcttatcat

SEQ ID NO: 159963 - DNA, 25 bp, SARS Virus
gagtgttcctgacagtcttatcatt

SEQ ID NO: 159964 - DNA, 25 bp, SARS Virus
agtgttcctgatcgtcttatcattt

SEQ ID NO: 159965 - DNA, 25 bp, SARS Virus
gtgttcctgatactcttatcatttt

SEQ ID NO: 159966 - DNA, 25 bp, SARS Virus
tgttcctgatagccttatcattttc

SEQ ID NO: 159967 - DNA, 25 bp, SARS Virus
gttcctgatagtcttatcattttct

SEQ ID NO: 159968 - DNA, 25 bp, SARS Virus
ttcctgatagtcctatcattttctt

SEQ ID NO: 159969 - DNA, 25 bp, SARS Virus
tcctgatagtctcatcattttcttt

SEQ ID NO: 159970 - DNA, 25 bp, SARS Virus
cctgatagtcttctcattttctttc

SEQ ID NO: 159971 - DNA, 25 bp, SARS Virus
ctgatagtcttaccattttctttcc

SEQ ID NO: 159972 - DNA, 25 bp, SARS Virus
tgatagtcttatcattttctttccg

SEQ ID NO: 159973 - DNA, 25 bp, SARS Virus
gatagtcttatccttttctttccgt

SEQ ID NO: 159974 - DNA, 25 bp, SARS Virus
atagtcttatcactttctttccgtt

SEQ ID NO: 159975 - DNA, 25 bp, SARS Virus
tagtcttatcatcttctttccgtta

SEQ ID NO: 159976 - DNA, 25 bp, SARS Virus
agtcttatcattctctttccgttaa

SEQ ID NO: 159977 - DNA, 25 bp, SARS Virus
gtcttatcatttcctttccgttaac

SEQ ID NO: 159978 - DNA, 25 bp, SARS Virus
tcttatcattttctttccgttaacg

SEQ ID NO: 159979 - DNA, 25 bp, SARS Virus
cttatcattttccttccgttaacga

SEQ ID NO: 159980 - DNA, 25 bp, SARS Virus
ttatcattttctctccgttaacgaa

SEQ ID NO: 159981 - DNA, 25 bp, SARS Virus
tatcattttcttcccgttaacgaaa

SEQ ID NO: 159982 - DNA, 25 bp, SARS Virus
atcattttctttccgttaacgaaat

SEQ ID NO: 159983 - DNA, 25 bp, SARS Virus
tcattttctttccgttaacgaaatt

SEQ ID NO: 159984 - DNA, 25 bp, SARS Virus
cattttctttcccttaacgaaattt

SEQ ID NO: 159985 - DNA, 25 bp, SARS Virus
attttctttccgctaacgaaattta

SEQ ID NO: 159986 - DNA, 25 bp, SARS Virus
ttttctttccgtcaacgaaatttaa

SEQ ID NO: 159987 - DNA, 25 bp, SARS Virus
tttctttccgttcacgaaatttaat

SEQ ID NO: 159988 - DNA, 25 bp, SARS Virus
ttctttccgttaccgaaatttaatc

SEQ ID NO: 159989 - DNA, 25 bp, SARS Virus
tctttccgttaacgaaatttaatca

SEQ ID NO: 159990 - DNA, 25 bp, SARS Virus
ctttccgttaaccaaatttaatcat

SEQ ID NO: 159991 - DNA, 25 bp, SARS Virus
tttccgttaacgcaatttaatcatt

SEQ ID NO: 159992 - DNA, 25 bp, SARS Virus
ttccgttaacgacatttaatcattt

SEQ ID NO: 159993 - DNA, 25 bp, SARS Virus
tccgttaacgaactttaatcattta

SEQ ID NO: 159994 - DNA, 25 bp, SARS Virus
ccgttaacgaaacttaatcatttac

SEQ ID NO: 159995 - DNA, 25 bp, SARS Virus
cgttaacgaaatctaatcatttacg

SEQ ID NO: 159996 - DNA, 25 bp, SARS Virus
gttaacgaaattcaatcatttacgt

SEQ ID NO: 159997 - DNA, 25 bp, SARS Virus
ttaacgaaatttcatcatttacgtg

SEQ ID NO: 159998 - DNA, 25 bp, SARS Virus
taacgaaatttactcatttacgtga

SEQ ID NO: 159999 - DNA, 25 bp, SARS Virus
aacgaaatttaaccatttacgtgaa

SEQ ID NO: 160000 - DNA, 25 bp, SARS Virus
acgaaatttaatcatttacgtgaaa

SEQ ID NO: 160001 - DNA, 25 bp, SARS Virus
cgaaatttaatcctttacgtgaaaa

SEQ ID NO: 160002 - DNA, 25 bp, SARS Virus
gaaatttaatcacttacgtgaaaat

SEQ ID NO: 160003 - DNA, 25 bp, SARS Virus
aaatttaatcatctacgtgaaaata

SEQ ID NO: 160004 - DNA, 25 bp, SARS Virus
aatttaatcattcacgtgaaaatag

SEQ ID NO: 160005 - DNA, 25 bp, SARS Virus
atttaatcatttccgtgaaaatagc

SEQ ID NO: 160006 - DNA, 25 bp, SARS Virus
tttaatcatttacgtgaaaatagct

SEQ ID NO: 160007 - DNA, 25 bp, SARS Virus
ttaatcatttacctgaaaatagctt

SEQ ID NO: 160008 - DNA, 25 bp, SARS Virus
taatcatttacgcgaaaatagcttt

SEQ ID NO: 160009 - DNA, 25 bp, SARS Virus
aatcatttacgtcaaaatagctttc

SEQ ID NO: 160010 - DNA, 25 bp, SARS Virus
atcatttacgtgcaaatagctttcg

SEQ ID NO: 160011 - DNA, 25 bp, SARS Virus
tcatttacgtgacaatagctttcga

SEQ ID NO: 160012 - DNA, 25 bp, SARS Virus
catttacgtgaacatagctttcgac

SEQ ID NO: 160013 - DNA, 25 bp, SARS Virus
atttacgtgaaactagctttcgacc

SEQ ID NO: 160014 - DNA, 25 bp, SARS Virus
tttacgtgaaaacagctttcgacct

SEQ ID NO: 160015 - DNA, 25 bp, SARS Virus
ttacgtgaaaatcgctttcgacctc

SEQ ID NO: 160016 - DNA, 25 bp, SARS Virus
tacgtgaaaatacctttcgacctca

SEQ ID NO: 160017 - DNA, 25 bp, SARS Virus
acgtgaaaatagctttcgacctcac

SEQ ID NO: 160018 - DNA, 25 bp, SARS Virus
cgtgaaaatagccttcgacctcaca

SEQ ID NO: 160019 - DNA, 25 bp, SARS Virus
gtgaaaatagctctcgacctcacac

SEQ ID NO: 160020 - DNA, 25 bp, SARS Virus
tgaaaatagcttccgacctcacacc

SEQ ID NO: 160021 - DNA, 25 bp, SARS Virus
gaaaatagctttcgacctcacacct

SEQ ID NO: 160022 - DNA, 25 bp, SARS Virus
aaaatagctttccacctcacacctt

SEQ ID NO: 160023 - DNA, 25 bp, SARS Virus
aaatagctttcgccctcacacctta

SEQ ID NO: 160024 - DNA, 25 bp, SARS Virus
aatagctttcgacctcacaccttac

SEQ ID NO: 160025 - DNA, 25 bp, SARS Virus
atagctttcgacctcacaccttacg

SEQ ID NO: 160026 - DNA, 25 bp, SARS Virus
tagctttcgaccccacaccttacgt

SEQ ID NO: 160027 - DNA, 25 bp, SARS Virus
agctttcgacctcacaccttacgta

SEQ ID NO: 160028 - DNA, 25 bp, SARS Virus
gctttcgacctcccaccttacgtac

SEQ ID NO: 160029 - DNA, 25 bp, SARS Virus
ctttcgacctcacaccttacgtacg

SEQ ID NO: 160030 - DNA, 25 bp, SARS Virus
tttcgacctcaccccttacgtacga

SEQ ID NO: 160031 - DNA, 25 bp, SARS Virus
ttcgacctcacaccttacgtacgaa

SEQ ID NO: 160032 - DNA, 25 bp, SARS Virus
tcgacctcacaccttacgtacgaat

SEQ ID NO: 160033 - DNA, 25 bp, SARS Virus
cgacctcacaccctacgtacgaata

SEQ ID NO: 160034 - DNA, 25 bp, SARS Virus
gacctcacacctcacgtacgaataa

SEQ ID NO: 160035 - DNA, 25 bp, SARS Virus
acctcacaccttccgtacgaataag

SEQ ID NO: 160036 - DNA, 25 bp, SARS Virus
cctcacaccttacgtacgaataagt

SEQ ID NO: 160037 - DNA, 25 bp, SARS Virus
ctcacaccttacctacgaataagtg

SEQ ID NO: 160038 - DNA, 25 bp, SARS Virus
tcacaccttacgcacgaataagtgt

SEQ ID NO: 160039 - DNA, 25 bp, SARS Virus
cacaccttacgtccgaataagtgta

SEQ ID NO: 160040 - DNA, 25 bp, SARS Virus
acaccttacgtacgaataagtgtat

SEQ ID NO: 160041 - DNA, 25 bp, SARS Virus
caccttacgtaccaataagtgtatg

SEQ ID NO: 160042 - DNA, 25 bp, SARS Virus
accttacgtacgcataagtgtatgt

SEQ ID NO: 160043 - DNA, 25 bp, SARS Virus
ccttacgtacgactaagtgtatgtt

SEQ ID NO: 160044 - DNA, 25 bp, SARS Virus
cttacgtacgaacaagtgtatgttt

SEQ ID NO: 160045 - DNA, 25 bp, SARS Virus
ttacgtacgaatcagtgtatgtttg

SEQ ID NO: 160046 - DNA, 25 bp, SARS Virus
tacgtacgaatacgtgtatgtttga

SEQ ID NO: 160047 - DNA, 25 bp, SARS Virus
acgtacgaataactgtatgtttgat

SEQ ID NO: 160048 - DNA, 25 bp, SARS Virus
cgtacgaataagcgtatgtttgatg

SEQ ID NO: 160049 - DNA, 25 bp, SARS Virus
gtacgaataagtctatgtttgatgg

SEQ ID NO: 160050 - DNA, 25 bp, SARS Virus
tacgaataagtgcatgtttgatggt

SEQ ID NO: 160051 - DNA, 25 bp, SARS Virus
acgaataagtgtctgtttgatggtg

SEQ ID NO: 160052 - DNA, 25 bp, SARS Virus
cgaataagtgtacgtttgatggtgg

SEQ ID NO: 160053 - DNA, 25 bp, SARS Virus
gaataagtgtatctttgatggtggt

SEQ ID NO: 160054 - DNA, 25 bp, SARS Virus
aataagtgtatgcttgatggtggta

SEQ ID NO: 160055 - DNA, 25 bp, SARS Virus
ataagtgtatgtctgatggtggtag

SEQ ID NO: 160056 - DNA, 25 bp, SARS Virus
taagtgtatgttcgatggtggtagt

SEQ ID NO: 160057 - DNA, 25 bp, SARS Virus
aagtgtatgtttcatggtggtagtg

SEQ ID NO: 160058 - DNA, 25 bp, SARS Virus
agtgtatgtttgctggtggtagtgt

SEQ ID NO: 160059 - DNA, 25 bp, SARS Virus
gtgtatgtttgacggtggtagtgtc

SEQ ID NO: 160060 - DNA, 25 bp, SARS Virus
tgtatgtttgatcgtggtagtgtcg

SEQ ID NO: 160061 - DNA, 25 bp, SARS Virus
gtatgtttgatgctggtagtgtcgg

SEQ ID NO: 160062 - DNA, 25 bp, SARS Virus
tatgtttgatggcggtagtgtcgga

SEQ ID NO: 160063 - DNA, 25 bp, SARS Virus
atgtttgatggtcgtagtgtcggac

SEQ ID NO: 160064 - DNA, 25 bp, SARS Virus
tgtttgatggtgctagtgtcggacc

SEQ ID NO: 160065 - DNA, 25 bp, SARS Virus
gtttgatggtggcagtgtcggacca

SEQ ID NO: 160066 - DNA, 25 bp, SARS Virus
tttgatggtggtcgtgtcggaccat

SEQ ID NO: 160067 - DNA, 25 bp, SARS Virus
ttgatggtggtactgtcggaccatt

SEQ ID NO: 160068 - DNA, 25 bp, SARS Virus
tgatggtggtagcgtcggaccattc

SEQ ID NO: 160069 - DNA, 25 bp, SARS Virus
gatggtggtagtctcggaccattca

SEQ ID NO: 160070 - DNA, 25 bp, SARS Virus
atggtggtagtgccggaccattcaa

SEQ ID NO: 160071 - DNA, 25 bp, SARS Virus
tggtggtagtgtcggaccattcaag

SEQ ID NO: 160072 - DNA, 25 bp, SARS Virus
ggtggtagtgtccgaccattcaagt

SEQ ID NO: 160073 - DNA, 25 bp, SARS Virus
gtggtagtgtcgcaccattcaagtt

SEQ ID NO: 160074 - DNA, 25 bp, SARS Virus
tggtagtgtcggcccattcaagttc

SEQ ID NO: 160075 - DNA, 25 bp, SARS Virus
ggtagtgtcggaccattcaagttca

SEQ ID NO: 160076 - DNA, 25 bp, SARS Virus
gtagtgtcggaccattcaagttcaa

SEQ ID NO: 160077 - DNA, 25 bp, SARS Virus
tagtgtcggacccttcaagttcaaa

SEQ ID NO: 160078 - DNA, 25 bp, SARS Virus
agtgtcggaccactcaagttcaaac

SEQ ID NO: 160079 - DNA, 25 bp, SARS Virus
gtgtcggaccatccaagttcaaact

SEQ ID NO: 160080 - DNA, 25 bp, SARS Virus
tgtcggaccattcaagttcaaactg

SEQ ID NO: 160081 - DNA, 25 bp, SARS Virus
gtcggaccattccagttcaaactgt

SEQ ID NO: 160082 - DNA, 25 bp, SARS Virus
tcggaccattcacgttcaaactgtt

SEQ ID NO: 160083 - DNA, 25 bp, SARS Virus
cggaccattcaacttcaaactgttc

SEQ ID NO: 160084 - DNA, 25 bp, SARS Virus
ggaccattcaagctcaaactgttct

SEQ ID NO: 160085 - DNA, 25 bp, SARS Virus
gaccattcaagtccaaactgttctg

SEQ ID NO: 160086 - DNA, 25 bp, SARS Virus
accattcaagttcaaactgttctga

SEQ ID NO: 160087 - DNA, 25 bp, SARS Virus
ccattcaagttccaactgttctgag

SEQ ID NO: 160088 - DNA, 25 bp, SARS Virus
cattcaagttcacactgttctgaga

SEQ ID NO: 160089 - DNA, 25 bp, SARS Virus
attcaagttcaacctgttctgagaa

SEQ ID NO: 160090 - DNA, 25 bp, SARS Virus
ttcaagttcaaactgttctgagaac

SEQ ID NO: 160091 - DNA, 25 bp, SARS Virus
tcaagttcaaaccgttctgagaaca

SEQ ID NO: 160092 - DNA, 25 bp, SARS Virus
caagttcaaactcttctgagaacac

SEQ ID NO: 160093 - DNA, 25 bp, SARS Virus
aagttcaaactgctctgagaacaca

SEQ ID NO: 160094 - DNA, 25 bp, SARS Virus
agttcaaactgtcctgagaacacag

SEQ ID NO: 160095 - DNA, 25 bp, SARS Virus
gttcaaactgttctgagaacacagt

SEQ ID NO: 160096 - DNA, 25 bp, SARS Virus
ttcaaactgttccgagaacacagtt

SEQ ID NO: 160097 - DNA, 25 bp, SARS Virus
aagtttctagaggtgtagttatggt

SEQ ID NO: 160098 - DNA, 25 bp, SARS Virus
agtttctagaggggtagttatggta

SEQ ID NO: 160099 - DNA, 25 bp, SARS Virus
gtttctagaggtgtagttatggtag

SEQ ID NO: 160100 - DNA, 25 bp, SARS Virus
tttctagaggtggagttatggtaga

SEQ ID NO: 160101 - DNA, 25 bp, SARS Virus
ttctagaggtgtggttatggtagat

SEQ ID NO: 160102 - DNA, 25 bp, SARS Virus
tctagaggtgtagttatggtagatg

SEQ ID NO: 160103 - DNA, 25 bp, SARS Virus
ctagaggtgtaggtatggtagatgg

SEQ ID NO: 160104 - DNA, 25 bp, SARS Virus
tagaggtgtagtgatggtagatgga

SEQ ID NO: 160105 - DNA, 25 bp, SARS Virus
agaggtgtagttgtggtagatggaa

SEQ ID NO: 160106 - DNA, 25 bp, SARS Virus
gaggtgtagttagggtagatggaaa

SEQ ID NO: 160107 - DNA, 25 bp, SARS Virus
aggtgtagttatggtagatggaaac

SEQ ID NO: 160108 - DNA, 25 bp, SARS Virus
ggtgtagttatggtagatggaaaca

SEQ ID NO: 160109 - DNA, 25 bp, SARS Virus
gtgtagttatgggagatggaaacac

SEQ ID NO: 160110 - DNA, 25 bp, SARS Virus
tgtagttatggtggatggaaacaca

SEQ ID NO: 160111 - DNA, 25 bp, SARS Virus
gtagttatggtagatggaaacacat

SEQ ID NO: 160112 - DNA, 25 bp, SARS Virus
tagttatggtaggtggaaacacatt

SEQ ID NO: 160113 - DNA, 25 bp, SARS Virus
agttatggtagagggaaacacattt

SEQ ID NO: 160114 - DNA, 25 bp, SARS Virus
gttatggtagatggaaacacatttg

SEQ ID NO: 160115 - DNA, 25 bp, SARS Virus
ttatggtagatggaaacacatttgt

SEQ ID NO: 160116 - DNA, 25 bp, SARS Virus
tatggtagatgggaacacatttgtc

SEQ ID NO: 160117 - DNA, 25 bp, SARS Virus
atggtagatggagacacatttgtcg

SEQ ID NO: 160118 - DNA, 25 bp, SARS Virus
tggtagatggaagcacatttgtcgt

SEQ ID NO: 160119 - DNA, 25 bp, SARS Virus
ggtagatggaaagacatttgtcgta

SEQ ID NO: 160120 - DNA, 25 bp, SARS Virus
gtagatggaaacgcatttgtcgtaa

SEQ ID NO: 160121 - DNA, 25 bp, SARS Virus
tagatggaaacagatttgtcgtaat

SEQ ID NO: 160122 - DNA, 25 bp, SARS Virus
agatggaaacacgtttgtcgtaata

SEQ ID NO: 160123 - DNA, 25 bp, SARS Virus
gatggaaacacagttgtcgtaataa

SEQ ID NO: 160124 - DNA, 25 bp, SARS Virus
atggaaacacatgtgtcgtaataat

SEQ ID NO: 160125 - DNA, 25 bp, SARS Virus
tggaaacacattggtcgtaataatt

SEQ ID NO: 160126 - DNA, 25 bp, SARS Virus
ggaaacacatttgtcgtaataatta

SEQ ID NO: 160127 - DNA, 25 bp, SARS Virus
gaaacacatttggcgtaataattac

SEQ ID NO: 160128 - DNA, 25 bp, SARS Virus
aaacacatttgtggtaataattact

SEQ ID NO: 160129 - DNA, 25 bp, SARS Virus
aacacatttgtcgtaataattacta

SEQ ID NO: 160130 - DNA, 25 bp, SARS Virus
acacatttgtcggaataattactac

SEQ ID NO: 160131 - DNA, 25 bp, SARS Virus
cacatttgtcgtgataattactacc

SEQ ID NO: 160132 - DNA, 25 bp, SARS Virus
acatttgtcgtagtaattactacct

SEQ ID NO: 160133 - DNA, 25 bp, SARS Virus
catttgtcgtaagaattactacctt

SEQ ID NO: 160134 - DNA, 25 bp, SARS Virus
atttgtcgtaatgattactaccttt

SEQ ID NO: 160135 - DNA, 25 bp, SARS Virus
tttgtcgtaatagttactacctttg

SEQ ID NO: 160136 - DNA, 25 bp, SARS Virus
ttgtcgtaataagtactacctttgt

SEQ ID NO: 160137 - DNA, 25 bp, SARS Virus
tgtcgtaataatgactacctttgtc

SEQ ID NO: 160138 - DNA, 25 bp, SARS Virus
gtcgtaataattgctacctttgtcc

SEQ ID NO: 160139 - DNA, 25 bp, SARS Virus
tcgtaataattagtacctttgtcca

SEQ ID NO: 160140 - DNA, 25 bp, SARS Virus
cgtaataattacgacctttgtccac

SEQ ID NO: 160141 - DNA, 25 bp, SARS Virus
gtaataattactgcctttgtccacg

SEQ ID NO: 160142 - DNA, 25 bp, SARS Virus
taataattactagctttgtccacga

SEQ ID NO: 160143 - DNA, 25 bp, SARS Virus
aataattactacgtttgtccacgaa

SEQ ID NO: 160144 - DNA, 25 bp, SARS Virus
ataattactaccgttgtccacgaag

SEQ ID NO: 160145 - DNA, 25 bp, SARS Virus
taattactacctgtgtccacgaagc

SEQ ID NO: 160146 - DNA, 25 bp, SARS Virus
aattactaccttggtccacgaagcg

SEQ ID NO: 160147 - DNA, 25 bp, SARS Virus
attactacctttgtccacgaagcgg

SEQ ID NO: 160148 - DNA, 25 bp, SARS Virus
ttactacctttggccacgaagcggc

SEQ ID NO: 160149 - DNA, 25 bp, SARS Virus
tactacctttgtgcacgaagcggcc

SEQ ID NO: 160150 - DNA, 25 bp, SARS Virus
actacctttgtcgacgaagcggccg

SEQ ID NO: 160151 - DNA, 25 bp, SARS Virus
ctacctttgtccgcgaagcggccgc

SEQ ID NO: 160152 - DNA, 25 bp, SARS Virus
tacctttgtccaggaagcggccgca

SEQ ID NO: 160153 - DNA, 25 bp, SARS Virus
acctttgtccacgaagcggccgcac

SEQ ID NO: 160154 - DNA, 25 bp, SARS Virus
cctttgtccacggagcggccgcaca

SEQ ID NO: 160155 - DNA, 25 bp, SARS Virus
ctttgtccacgaggcggccgcacag

SEQ ID NO: 160156 - DNA, 25 bp, SARS Virus
tttgtccacgaagcggccgcacagg

SEQ ID NO: 160157 - DNA, 25 bp, SARS Virus
ttgtccacgaaggggccgcacaggt

SEQ ID NO: 160158 - DNA, 25 bp, SARS Virus
tgtccacgaagcggccgcacaggta

SEQ ID NO: 160159 - DNA, 25 bp, SARS Virus
gtccacgaagcggccgcacaggtag

SEQ ID NO: 160160 - DNA, 25 bp, SARS Virus
tccacgaagcgggcgcacaggtagt

SEQ ID NO: 160161 - DNA, 25 bp, SARS Virus
ccacgaagcggcggcacaggtagtt

SEQ ID NO: 160162 - DNA, 25 bp, SARS Virus
cacgaagcggccgcacaggtagttt

SEQ ID NO: 160163 - DNA, 25 bp, SARS Virus
acgaagcggccggacaggtagtttc

SEQ ID NO: 160164 - DNA, 25 bp, SARS Virus
cgaagcggccgcgcaggtagtttca

SEQ ID NO: 160165 - DNA, 25 bp, SARS Virus
gaagcggccgcagaggtagtttcac

SEQ ID NO: 160166 - DNA, 25 bp, SARS Virus
aagcggccgcacgggtagtttcaca

SEQ ID NO: 160167 - DNA, 25 bp, SARS Virus
agcggccgcacaggtagtttcacag

SEQ ID NO: 160168 - DNA, 25 bp, SARS Virus
gcggccgcacaggtagtttcacagg

SEQ ID NO: 160169 - DNA, 25 bp, SARS Virus
cggccgcacagggagtttcacagga

SEQ ID NO: 160170 - DNA, 25 bp, SARS Virus
ggccgcacaggtggtttcacaggaa

SEQ ID NO: 160171 - DNA, 25 bp, SARS Virus
gccgcacaggtagtttcacaggaaa

SEQ ID NO: 160172 - DNA, 25 bp, SARS Virus
ccgcacaggtaggttcacaggaaat

SEQ ID NO: 160173 - DNA, 25 bp, SARS Virus
cgcacaggtagtgtcacaggaaata

SEQ ID NO: 160174 - DNA, 25 bp, SARS Virus
gcacaggtagttgcacaggaaataa

SEQ ID NO: 160175 - DNA, 25 bp, SARS Virus
cacaggtagtttgacaggaaataat

SEQ ID NO: 160176 - DNA, 25 bp, SARS Virus
acaggtagtttcgcaggaaataatt

SEQ ID NO: 160177 - DNA, 25 bp, SARS Virus
caggtagtttcagaggaaataattg

SEQ ID NO: 160178 - DNA, 25 bp, SARS Virus
aggtagtttcacgggaaataattgt

SEQ ID NO: 160179 - DNA, 25 bp, SARS Virus
ggtagtttcacaggaaataattgtt

SEQ ID NO: 160180 - DNA, 25 bp, SARS Virus
gtagtttcacaggaaataattgttg

SEQ ID NO: 160181 - DNA, 25 bp, SARS Virus
tagtttcacagggaataattgttgt

SEQ ID NO: 160182 - DNA, 25 bp, SARS Virus
agtttcacaggagataattgttgta

SEQ ID NO: 160183 - DNA, 25 bp, SARS Virus
gtttcacaggaagtaattgttgtaa

SEQ ID NO: 160184 - DNA, 25 bp, SARS Virus
tttcacaggaaagaattgttgtaat

SEQ ID NO: 160185 - DNA, 25 bp, SARS Virus
ttcacaggaaatgattgttgtaata

SEQ ID NO: 160186 - DNA, 25 bp, SARS Virus
tcacaggaaatagttgttgtaatat

SEQ ID NO: 160187 - DNA, 25 bp, SARS Virus
cacaggaaataagtgttgtaatatt

SEQ ID NO: 160188 - DNA, 25 bp, SARS Virus
acaggaaataatggttgtaatattc

SEQ ID NO: 160189 - DNA, 25 bp, SARS Virus
caggaaataattgttgtaatattcg

SEQ ID NO: 160190 - DNA, 25 bp, SARS Virus
aggaaataattggtgtaatattcgg

SEQ ID NO: 160191 - DNA, 25 bp, SARS Virus
ggaaataattgtggtaatattcggt

SEQ ID NO: 160192 - DNA, 25 bp, SARS Virus
gaaataattgttgtaatattcggtg

SEQ ID NO: 160193 - DNA, 25 bp, SARS Virus
aaataattgttggaatattcggtgt

SEQ ID NO: 160194 - DNA, 25 bp, SARS Virus
aataattgttgtgatattcggtgta

SEQ ID NO: 160195 - DNA, 25 bp, SARS Virus
ataattgttgtagtattcggtgtaa

SEQ ID NO: 160196 - DNA, 25 bp, SARS Virus
taattgttgtaagattcggtgtaaa

SEQ ID NO: 160197 - DNA, 25 bp, SARS Virus
aattgttgtaatgttcggtgtaaaa

SEQ ID NO: 160198 - DNA, 25 bp, SARS Virus
attgttgtaatagtcggtgtaaaag

SEQ ID NO: 160199 - DNA, 25 bp, SARS Virus
ttgttgtaatatgcggtgtaaaaga

SEQ ID NO: 160200 - DNA, 25 bp, SARS Virus
tgttgtaatattgggtgtaaaagat

SEQ ID NO: 160201 - DNA, 25 bp, SARS Virus
gttgtaatattcggtgtaaaagatt

SEQ ID NO: 160202 - DNA, 25 bp, SARS Virus
ttgtaatattcggtgtaaaagattt

SEQ ID NO: 160203 - DNA, 25 bp, SARS Virus
tgtaatattcggggtaaaagatttg

SEQ ID NO: 160204 - DNA, 25 bp, SARS Virus
gtaatattcggtgtaaaagatttga

SEQ ID NO: 160205 - DNA, 25 bp, SARS Virus
taatattcggtggaaaagatttgag

SEQ ID NO: 160206 - DNA, 25 bp, SARS Virus
aatattcggtgtgaaagatttgaga

SEQ ID NO: 160207 - DNA, 25 bp, SARS Virus
atattcggtgtagaagatttgagac

SEQ ID NO: 160208 - DNA, 25 bp, SARS Virus
tattcggtgtaagagatttgagaca

SEQ ID NO: 160209 - DNA, 25 bp, SARS Virus
attcggtgtaaaggatttgagacat

SEQ ID NO: 160210 - DNA, 25 bp, SARS Virus
ttcggtgtaaaagatttgagacatt

SEQ ID NO: 160211 - DNA, 25 bp, SARS Virus
tcggtgtaaaaggtttgagacattg

SEQ ID NO: 160212 - DNA, 25 bp, SARS Virus
cggtgtaaaagagttgagacattgg

SEQ ID NO: 160213 - DNA, 25 bp, SARS Virus
ggtgtaaaagatgtgagacattgga

SEQ ID NO: 160214 - DNA, 25 bp, SARS Virus
gtgtaaaagattggagacattggac

SEQ ID NO: 160215 - DNA, 25 bp, SARS Virus
tgtaaaagatttgagacattggacc

SEQ ID NO: 160216 - DNA, 25 bp, SARS Virus
gtaaaagatttgggacattggacca

SEQ ID NO: 160217 - DNA, 25 bp, SARS Virus
taaaagatttgagacattggaccat

SEQ ID NO: 160218 - DNA, 25 bp, SARS Virus
aaaagatttgaggcattggaccatt

SEQ ID NO: 160219 - DNA, 25 bp, SARS Virus
aaagatttgagagattggaccattt

SEQ ID NO: 160220 - DNA, 25 bp, SARS Virus
aagatttgagacgttggaccattta

SEQ ID NO: 160221 - DNA, 25 bp, SARS Virus
agatttgagacagtggaccatttac

SEQ ID NO: 160222 - DNA, 25 bp, SARS Virus
gatttgagacatgggaccatttaca

SEQ ID NO: 160223 - DNA, 25 bp, SARS Virus
atttgagacattggaccatttacat

SEQ ID NO: 160224 - DNA, 25 bp, SARS Virus
tttgagacattggaccatttacata

SEQ ID NO: 160225 - DNA, 25 bp, SARS Virus
ttgagacattgggccatttacataa

SEQ ID NO: 160226 - DNA, 25 bp, SARS Virus
tgagacattggagcatttacataag

SEQ ID NO: 160227 - DNA, 25 bp, SARS Virus
gagacattggacgatttacataagg

SEQ ID NO: 160228 - DNA, 25 bp, SARS Virus
agacattggaccgtttacataaggt

SEQ ID NO: 160229 - DNA, 25 bp, SARS Virus
gacattggaccagttacataaggtg

SEQ ID NO: 160230 - DNA, 25 bp, SARS Virus
acattggaccatgtacataaggtgt

SEQ ID NO: 160231 - DNA, 25 bp, SARS Virus
cattggaccattgacataaggtgtc

SEQ ID NO: 160232 - DNA, 25 bp, SARS Virus
attggaccatttgcataaggtgtcc

SEQ ID NO: 160233 - DNA, 25 bp, SARS Virus
ttggaccatttagataaggtgtcca

SEQ ID NO: 160234 - DNA, 25 bp, SARS Virus
tggaccatttacgtaaggtgtccaa

SEQ ID NO: 160235 - DNA, 25 bp, SARS Virus
ggaccatttacagaaggtgtccaat

SEQ ID NO: 160236 - DNA, 25 bp, SARS Virus
gaccatttacatgaggtgtccaata

SEQ ID NO: 160237 - DNA, 25 bp, SARS Virus
accatttacatagggtgtccaatat

SEQ ID NO: 160238 - DNA, 25 bp, SARS Virus
ccatttacataaggtgtccaatatt

SEQ ID NO: 160239 - DNA, 25 bp, SARS Virus
catttacataaggtgtccaatattc

SEQ ID NO: 160240 - DNA, 25 bp, SARS Virus
atttacataaggggtccaatattca

SEQ ID NO: 160241 - DNA, 25 bp, SARS Virus
tttacataaggtgtccaatattcat

SEQ ID NO: 160242 - DNA, 25 bp, SARS Virus
ttacataaggtggccaatattcata

SEQ ID NO: 160243 - DNA, 25 bp, SARS Virus
tacataaggtgtgcaatattcatag

SEQ ID NO: 160244 - DNA, 25 bp, SARS Virus
acataaggtgtcgaatattcatagt

SEQ ID NO: 160245 - DNA, 25 bp, SARS Virus
cataaggtgtccgatattcatagtt

SEQ ID NO: 160246 - DNA, 25 bp, SARS Virus
ataaggtgtccagtattcatagttt

SEQ ID NO: 160247 - DNA, 25 bp, SARS Virus
taaggtgtccaagattcatagttta

SEQ ID NO: 160248 - DNA, 25 bp, SARS Virus
aaggtgtccaatgttcatagtttaa

SEQ ID NO: 160249 - DNA, 25 bp, SARS Virus
aggtgtccaatagtcatagtttaac

SEQ ID NO: 160250 - DNA, 25 bp, SARS Virus
ggtgtccaatatgcatagtttaaca

SEQ ID NO: 160251 - DNA, 25 bp, SARS Virus
gtgtccaatattgatagtttaacaa

SEQ ID NO: 160252 - DNA, 25 bp, SARS Virus
tgtccaatattcgtagtttaacaaa

SEQ ID NO: 160253 - DNA, 25 bp, SARS Virus
gtccaatattcagagtttaacaaac

SEQ ID NO: 160254 - DNA, 25 bp, SARS Virus
tccaatattcatggtttaacaaaca

SEQ ID NO: 160255 - DNA, 25 bp, SARS Virus
ccaatattcatagtttaacaaacat

SEQ ID NO: 160256 - DNA, 25 bp, SARS Virus
caatattcataggttaacaaacatt

SEQ ID NO: 160257 - DNA, 25 bp, SARS Virus
aatattcatagtgtaacaaacattt

SEQ ID NO: 160258 - DNA, 25 bp, SARS Virus
atattcatagttgaacaaacattta

SEQ ID NO: 160259 - DNA, 25 bp, SARS Virus
tattcatagtttgacaaacatttag

SEQ ID NO: 160260 - DNA, 25 bp, SARS Virus
attcatagtttagcaaacatttagg

SEQ ID NO: 160261 - DNA, 25 bp, SARS Virus
ttcatagtttaagaaacatttaggt

SEQ ID NO: 160262 - DNA, 25 bp, SARS Virus
tcatagtttaacgaacatttaggta

SEQ ID NO: 160263 - DNA, 25 bp, SARS Virus
catagtttaacagacatttaggtat

SEQ ID NO: 160264 - DNA, 25 bp, SARS Virus
atagtttaacaagcatttaggtatc

SEQ ID NO: 160265 - DNA, 25 bp, SARS Virus
tagtttaacaaagatttaggtatcc

SEQ ID NO: 160266 - DNA, 25 bp, SARS Virus
agtttaacaaacgtttaggtatccg

SEQ ID NO: 160267 - DNA, 25 bp, SARS Virus
gtttaacaaacagttaggtatccga

SEQ ID NO: 160268 - DNA, 25 bp, SARS Virus
tttaacaaacatgtaggtatccgat

SEQ ID NO: 160269 - DNA, 25 bp, SARS Virus
ttaacaaacattgaggtatccgatt

SEQ ID NO: 160270 - DNA, 25 bp, SARS Virus
taacaaacatttgggtatccgattt

SEQ ID NO: 160271 - DNA, 25 bp, SARS Virus
aacaaacatttaggtatccgattta

SEQ ID NO: 160272 - DNA, 25 bp, SARS Virus
acaaacatttaggtatccgatttag

SEQ ID NO: 160273 - DNA, 25 bp, SARS Virus
caaacatttagggatccgatttagg

SEQ ID NO: 160274 - DNA, 25 bp, SARS Virus
aaacatttaggtgtccgatttaggt

SEQ ID NO: 160275 - DNA, 25 bp, SARS Virus
aacatttaggtagccgatttaggtc

SEQ ID NO: 160276 - DNA, 25 bp, SARS Virus
acatttaggtatgcgatttaggtcg

SEQ ID NO: 160277 - DNA, 25 bp, SARS Virus
catttaggtatcggatttaggtcgt

SEQ ID NO: 160278 - DNA, 25 bp, SARS Virus
atttaggtatccgatttaggtcgtc

SEQ ID NO: 160279 - DNA, 25 bp, SARS Virus
tttaggtatccggtttaggtcgtct

SEQ ID NO: 160280 - DNA, 25 bp, SARS Virus
ttaggtatccgagttaggtcgtctt

SEQ ID NO: 160281 - DNA, 25 bp, SARS Virus
taggtatccgatgtaggtcgtcttt

SEQ ID NO: 160282 - DNA, 25 bp, SARS Virus
aggtatccgattgaggtcgtcttta

SEQ ID NO: 160283 - DNA, 25 bp, SARS Virus
ggtatccgatttgggtcgtctttag

SEQ ID NO: 160284 - DNA, 25 bp, SARS Virus
gtatccgatttaggtcgtctttagt

SEQ ID NO: 160285 - DNA, 25 bp, SARS Virus
tatccgatttaggtcgtctttagta

SEQ ID NO: 160286 - DNA, 25 bp, SARS Virus
atccgatttagggcgtctttagtag

SEQ ID NO: 160287 - DNA, 25 bp, SARS Virus
tccgatttaggtggtctttagtagt

SEQ ID NO: 160288 - DNA, 25 bp, SARS Virus
ccgatttaggtcgtctttagtagta

SEQ ID NO: 160289 - DNA, 25 bp, SARS Virus
cgatttaggtcggctttagtagtat

SEQ ID NO: 160290 - DNA, 25 bp, SARS Virus
gatttaggtcgtgtttagtagtata

SEQ ID NO: 160291 - DNA, 25 bp, SARS Virus
atttaggtcgtcgttagtagtataa

SEQ ID NO: 160292 - DNA, 25 bp, SARS Virus
tttaggtcgtctgtagtagtataat

SEQ ID NO: 160293 - DNA, 25 bp, SARS Virus
ttaggtcgtcttgagtagtataata

SEQ ID NO: 160294 - DNA, 25 bp, SARS Virus
taggtcgtctttggtagtataatat

SEQ ID NO: 160295 - DNA, 25 bp, SARS Virus
aggtcgtctttagtagtataatata

SEQ ID NO: 160296 - DNA, 25 bp, SARS Virus
ggtcgtctttaggagtataatatac

SEQ ID NO: 160297 - DNA, 25 bp, SARS Virus
gtcgtctttagtggtataatatacg

SEQ ID NO: 160298 - DNA, 25 bp, SARS Virus
tcgtctttagtagtataatatacgt

SEQ ID NO: 160299 - DNA, 25 bp, SARS Virus
cgtctttagtaggataatatacgta

SEQ ID NO: 160300 - DNA, 25 bp, SARS Virus
gtctttagtagtgtaatatacgtag

SEQ ID NO: 160301 - DNA, 25 bp, SARS Virus
tctttagtagtagaatatacgtagg

SEQ ID NO: 160302 - DNA, 25 bp, SARS Virus
ctttagtagtatgatatacgtaggt

SEQ ID NO: 160303 - DNA, 25 bp, SARS Virus
tttagtagtatagtatacgtaggtt

SEQ ID NO: 160304 - DNA, 25 bp, SARS Virus
ttagtagtataagatacgtaggttc

SEQ ID NO: 160305 - DNA, 25 bp, SARS Virus
tagtagtataatgtacgtaggttca

SEQ ID NO: 160306 - DNA, 25 bp, SARS Virus
agtagtataatagacgtaggttcat

SEQ ID NO: 160307 - DNA, 25 bp, SARS Virus
gtagtataatatgcgtaggttcatg

SEQ ID NO: 160308 - DNA, 25 bp, SARS Virus
tagtataatataggtaggttcatga

SEQ ID NO: 160309 - DNA, 25 bp, SARS Virus
agtataatatacgtaggttcatgac

SEQ ID NO: 160310 - DNA, 25 bp, SARS Virus
gtataatatacggaggttcatgaca

SEQ ID NO: 160311 - DNA, 25 bp, SARS Virus
tataatatacgtgggttcatgacag

SEQ ID NO: 160312 - DNA, 25 bp, SARS Virus
ataatatacgtaggttcatgacagc

SEQ ID NO: 160313 - DNA, 25 bp, SARS Virus
taatatacgtaggttcatgacagcc

SEQ ID NO: 160314 - DNA, 25 bp, SARS Virus
aatatacgtagggtcatgacagcca

SEQ ID NO: 160315 - DNA, 25 bp, SARS Virus
atatacgtaggtgcatgacagccat

SEQ ID NO: 160316 - DNA, 25 bp, SARS Virus
tatacgtaggttgatgacagccatg

SEQ ID NO: 160317 - DNA, 25 bp, SARS Virus
atacgtaggttcgtgacagccatga

SEQ ID NO: 160318 - DNA, 25 bp, SARS Virus
tacgtaggttcaggacagccatgag

SEQ ID NO: 160319 - DNA, 25 bp, SARS Virus
acgtaggttcatgacagccatgagt

SEQ ID NO: 160320 - DNA, 25 bp, SARS Virus
cgtaggttcatggcagccatgagta

SEQ ID NO: 160321 - DNA, 25 bp, SARS Virus
gtaggttcatgagagccatgagtaa

SEQ ID NO: 160322 - DNA, 25 bp, SARS Virus
taggttcatgacggccatgagtaaa

SEQ ID NO: 160323 - DNA, 25 bp, SARS Virus
aggttcatgacagccatgagtaaac

SEQ ID NO: 160324 - DNA, 25 bp, SARS Virus
ggttcatgacaggcatgagtaaacg

SEQ ID NO: 160325 - DNA, 25 bp, SARS Virus
gttcatgacagcgatgagtaaacgt

SEQ ID NO: 160326 - DNA, 25 bp, SARS Virus
ttcatgacagccgtgagtaaacgta

SEQ ID NO: 160327 - DNA, 25 bp, SARS Virus
tcatgacagccaggagtaaacgtac

SEQ ID NO: 160328 - DNA, 25 bp, SARS Virus
catgacagccatgagtaaacgtacc

SEQ ID NO: 160329 - DNA, 25 bp, SARS Virus
atgacagccatgggtaaacgtacca

SEQ ID NO: 160330 - DNA, 25 bp, SARS Virus
tgacagccatgagtaaacgtaccac

SEQ ID NO: 160331 - DNA, 25 bp, SARS Virus
gacagccatgaggaaacgtaccaca

SEQ ID NO: 160332 - DNA, 25 bp, SARS Virus
acagccatgagtgaacgtaccacag

SEQ ID NO: 160333 - DNA, 25 bp, SARS Virus
cagccatgagtagacgtaccacaga

SEQ ID NO: 160334 - DNA, 25 bp, SARS Virus
agccatgagtaagcgtaccacagac

SEQ ID NO: 160335 - DNA, 25 bp, SARS Virus
gccatgagtaaaggtaccacagacg

SEQ ID NO: 160336 - DNA, 25 bp, SARS Virus
ccatgagtaaacgtaccacagacgt

SEQ ID NO: 160337 - DNA, 25 bp, SARS Virus
catgagtaaacggaccacagacgtt

SEQ ID NO: 160338 - DNA, 25 bp, SARS Virus
atgagtaaacgtgccacagacgttt

SEQ ID NO: 160339 - DNA, 25 bp, SARS Virus
tgagtaaacgtagcacagacgtttg

SEQ ID NO: 160340 - DNA, 25 bp, SARS Virus
gagtaaacgtacgacagacgtttgt

SEQ ID NO: 160341 - DNA, 25 bp, SARS Virus
agtaaacgtaccgcagacgtttgtc

SEQ ID NO: 160342 - DNA, 25 bp, SARS Virus
gtaaacgtaccagagacgtttgtcg

SEQ ID NO: 160343 - DNA, 25 bp, SARS Virus
taaacgtaccacggacgtttgtcgt

SEQ ID NO: 160344 - DNA, 25 bp, SARS Virus
aaacgtaccacagacgtttgtcgtg

SEQ ID NO: 160345 - DNA, 25 bp, SARS Virus
aacgtaccacaggcgtttgtcgtgg

SEQ ID NO: 160346 - DNA, 25 bp, SARS Virus
acgtaccacagaggtttgtcgtggt

SEQ ID NO: 160347 - DNA, 25 bp, SARS Virus
cgtaccacagacgtttgtcgtggtg

SEQ ID NO: 160348 - DNA, 25 bp, SARS Virus
gtaccacagacggttgtcgtggtgg

SEQ ID NO: 160349 - DNA, 25 bp, SARS Virus
taccacagacgtgtgtcgtggtgga

SEQ ID NO: 160350 - DNA, 25 bp, SARS Virus
accacagacgttggtcgtggtggat

SEQ ID NO: 160351 - DNA, 25 bp, SARS Virus
ccacagacgtttgtcgtggtggatt

SEQ ID NO: 160352 - DNA, 25 bp, SARS Virus
cacagacgtttggcgtggtggattt

SEQ ID NO: 160353 - DNA, 25 bp, SARS Virus
acagacgtttgtggtggtggattta

SEQ ID NO: 160354 - DNA, 25 bp, SARS Virus
cagacgtttgtcgtggtggatttaa

SEQ ID NO: 160355 - DNA, 25 bp, SARS Virus
agacgtttgtcggggtggatttaac

SEQ ID NO: 160356 - DNA, 25 bp, SARS Virus
gacgtttgtcgtggtggatttaacg

SEQ ID NO: 160357 - DNA, 25 bp, SARS Virus
acgtttgtcgtggtggatttaacgt

SEQ ID NO: 160358 - DNA, 25 bp, SARS Virus
cgtttgtcgtgggggatttaacgta

SEQ ID NO: 160359 - DNA, 25 bp, SARS Virus
gtttgtcgtggtggatttaacgtag

SEQ ID NO: 160360 - DNA, 25 bp, SARS Virus
tttgtcgtggtggatttaacgtagc

SEQ ID NO: 160361 - DNA, 25 bp, SARS Virus
ttgtcgtggtgggtttaacgtagca

SEQ ID NO: 160362 - DNA, 25 bp, SARS Virus
tgtcgtggtggagttaacgtagcac

SEQ ID NO: 160363 - DNA, 25 bp, SARS Virus
gtcgtggtggatgtaacgtagcaca

SEQ ID NO: 160364 - DNA, 25 bp, SARS Virus
tcgtggtggattgaacgtagcacat

SEQ ID NO: 160365 - DNA, 25 bp, SARS Virus
cgtggtggatttgacgtagcacatt

SEQ ID NO: 160366 - DNA, 25 bp, SARS Virus
gtggtggatttagcgtagcacatta

SEQ ID NO: 160367 - DNA, 25 bp, SARS Virus
tggtggatttaaggtagcacattat

SEQ ID NO: 160368 - DNA, 25 bp, SARS Virus
ggtggatttaacgtagcacattatg

SEQ ID NO: 160369 - DNA, 25 bp, SARS Virus
gtggatttaacggagcacattatgt

SEQ ID NO: 160370 - DNA, 25 bp, SARS Virus
tggatttaacgtggcacattatgtg

SEQ ID NO: 160371 - DNA, 25 bp, SARS Virus
ggatttaacgtagcacattatgtgc

SEQ ID NO: 160372 - DNA, 25 bp, SARS Virus
gatttaacgtaggacattatgtgca

SEQ ID NO: 160373 - DNA, 25 bp, SARS Virus
atttaacgtagcgcattatgtgcat

SEQ ID NO: 160374 - DNA, 25 bp, SARS Virus
tttaacgtagcagattatgtgcatc

SEQ ID NO: 160375 - DNA, 25 bp, SARS Virus
ttaacgtagcacgttatgtgcatcg

SEQ ID NO: 160376 - DNA, 25 bp, SARS Virus
taacgtagcacagtatgtgcatcgt

SEQ ID NO: 160377 - DNA, 25 bp, SARS Virus
aacgtagcacatgatgtgcatcgtc

SEQ ID NO: 160378 - DNA, 25 bp, SARS Virus
acgtagcacattgtgtgcatcgtct

SEQ ID NO: 160379 - DNA, 25 bp, SARS Virus
cgtagcacattaggtgcatcgtcta

SEQ ID NO: 160380 - DNA, 25 bp, SARS Virus
gtagcacattatgtgcatcgtctaa

SEQ ID NO: 160381 - DNA, 25 bp, SARS Virus
tagcacattatgggcatcgtctaaa

SEQ ID NO: 160382 - DNA, 25 bp, SARS Virus
agcacattatgtgcatcgtctaaac

SEQ ID NO: 160383 - DNA, 25 bp, SARS Virus
gcacattatgtggatcgtctaaact

SEQ ID NO: 160384 - DNA, 25 bp, SARS Virus
cacattatgtgcgtcgtctaaactc

SEQ ID NO: 160385 - DNA, 25 bp, SARS Virus
acattatgtgcagcgtctaaactca

SEQ ID NO: 160386 - DNA, 25 bp, SARS Virus
cattatgtgcatggtctaaactcac

SEQ ID NO: 160387 - DNA, 25 bp, SARS Virus
attatgtgcatcgtctaaactcacc

SEQ ID NO: 160388 - DNA, 25 bp, SARS Virus
ttatgtgcatcggctaaactcacct

SEQ ID NO: 160389 - DNA, 25 bp, SARS Virus
tatgtgcatcgtgtaaactcacctt

SEQ ID NO: 160390 - DNA, 25 bp, SARS Virus
atgtgcatcgtcgaaactcaccttg

SEQ ID NO: 160391 - DNA, 25 bp, SARS Virus
tgtgcatcgtctgaactcaccttgt

SEQ ID NO: 160392 - DNA, 25 bp, SARS Virus
gtgcatcgtctagactcaccttgta

SEQ ID NO: 160393 - DNA, 25 bp, SARS Virus
tgcatcgtctaagctcaccttgtat

SEQ ID NO: 160394 - DNA, 25 bp, SARS Virus
gcatcgtctaaagtcaccttgtatt

SEQ ID NO: 160395 - DNA, 25 bp, SARS Virus
catcgtctaaacgcaccttgtatta

SEQ ID NO: 160396 - DNA, 25 bp, SARS Virus
atcgtctaaactgaccttgtattag

SEQ ID NO: 160397 - DNA, 25 bp, SARS Virus
tcgtctaaactcgccttgtattagt

SEQ ID NO: 160398 - DNA, 25 bp, SARS Virus
cgtctaaactcagcttgtattagtt

SEQ ID NO: 160399 - DNA, 25 bp, SARS Virus
gtctaaactcacgttgtattagtta

SEQ ID NO: 160400 - DNA, 25 bp, SARS Virus
tctaaactcaccgtgtattagttat

SEQ ID NO: 160401 - DNA, 25 bp, SARS Virus
ctaaactcacctggtattagttata

SEQ ID NO: 160402 - DNA, 25 bp, SARS Virus
taaactcaccttgtattagttatag

SEQ ID NO: 160403 - DNA, 25 bp, SARS Virus
aaactcaccttggattagttatagg

SEQ ID NO: 160404 - DNA, 25 bp, SARS Virus
aactcaccttgtgttagttataggc

SEQ ID NO: 160405 - DNA, 25 bp, SARS Virus
actcaccttgtagtagttataggct

SEQ ID NO: 160406 - DNA, 25 bp, SARS Virus
ctcaccttgtatgagttataggctg

SEQ ID NO: 160407 - DNA, 25 bp, SARS Virus
tcaccttgtattggttataggctgt

SEQ ID NO: 160408 - DNA, 25 bp, SARS Virus
caccttgtattagttataggctgtg

SEQ ID NO: 160409 - DNA, 25 bp, SARS Virus
accttgtattaggtataggctgtga

SEQ ID NO: 160410 - DNA, 25 bp, SARS Virus
ccttgtattagtgataggctgtgat

SEQ ID NO: 160411 - DNA, 25 bp, SARS Virus
cttgtattagttgtaggctgtgatg

SEQ ID NO: 160412 - DNA, 25 bp, SARS Virus
ttgtattagttagaggctgtgatga

SEQ ID NO: 160413 - DNA, 25 bp, SARS Virus
tgtattagttatgggctgtgatgaa

SEQ ID NO: 160414 - DNA, 25 bp, SARS Virus
gtattagttataggctgtgatgaac

SEQ ID NO: 160415 - DNA, 25 bp, SARS Virus
tattagttataggctgtgatgaaca

SEQ ID NO: 160416 - DNA, 25 bp, SARS Virus
attagttatagggtgtgatgaacaa

SEQ ID NO: 160417 - DNA, 25 bp, SARS Virus
ttagttataggcggtgatgaacaaa

SEQ ID NO: 160418 - DNA, 25 bp, SARS Virus
tagttataggctgtgatgaacaaac

SEQ ID NO: 160419 - DNA, 25 bp, SARS Virus
agttataggctgggatgaacaaacg

SEQ ID NO: 160420 - DNA, 25 bp, SARS Virus
gttataggctgtgatgaacaaacgg

SEQ ID NO: 160421 - DNA, 25 bp, SARS Virus
ttataggctgtggtgaacaaacggt

SEQ ID NO: 160422 - DNA, 25 bp, SARS Virus
tataggctgtgaggaacaaacggta

SEQ ID NO: 160423 - DNA, 25 bp, SARS Virus
ataggctgtgatgaacaaacggtac

SEQ ID NO: 160424 - DNA, 25 bp, SARS Virus
taggctgtgatggacaaacggtact

SEQ ID NO: 160425 - DNA, 25 bp, SARS Virus
aggctgtgatgagcaaacggtactc

SEQ ID NO: 160426 - DNA, 25 bp, SARS Virus
ggctgtgatgaagaaacggtactct

SEQ ID NO: 160427 - DNA, 25 bp, SARS Virus
gctgtgatgaacgaacggtactctg

SEQ ID NO: 160428 - DNA, 25 bp, SARS Virus
ctgtgatgaacagacggtactctga

SEQ ID NO: 160429 - DNA, 25 bp, SARS Virus
tgtgatgaacaagcggtactctgag

SEQ ID NO: 160430 - DNA, 25 bp, SARS Virus
gtgatgaacaaagggtactctgagt

SEQ ID NO: 160431 - DNA, 25 bp, SARS Virus
tgatgaacaaacggtactctgagtg

SEQ ID NO: 160432 - DNA, 25 bp, SARS Virus
gatgaacaaacggtactctgagtgt

SEQ ID NO: 160433 - DNA, 25 bp, SARS Virus
atgaacaaacgggactctgagtgtt

SEQ ID NO: 160434 - DNA, 25 bp, SARS Virus
tgaacaaacggtgctctgagtgttc

SEQ ID NO: 160435 - DNA, 25 bp, SARS Virus
gaacaaacggtagtctgagtgttcc

SEQ ID NO: 160436 - DNA, 25 bp, SARS Virus
aacaaacggtacgctgagtgttcct

SEQ ID NO: 160437 - DNA, 25 bp, SARS Virus
acaaacggtactgtgagtgttcctg

SEQ ID NO: 160438 - DNA, 25 bp, SARS Virus
caaacggtactcggagtgttcctga

SEQ ID NO: 160439 - DNA, 25 bp, SARS Virus
aaacggtactctgagtgttcctgat

SEQ ID NO: 160440 - DNA, 25 bp, SARS Virus
aacggtactctgggtgttcctgata

SEQ ID NO: 160441 - DNA, 25 bp, SARS Virus
acggtactctgagtgttcctgatag

SEQ ID NO: 160442 - DNA, 25 bp, SARS Virus
cggtactctgagggttcctgatagt

SEQ ID NO: 160443 - DNA, 25 bp, SARS Virus
ggtactctgagtgttcctgatagtc

SEQ ID NO: 160444 - DNA, 25 bp, SARS Virus
gtactctgagtggtcctgatagtct

SEQ ID NO: 160445 - DNA, 25 bp, SARS Virus
tactctgagtgtgcctgatagtctt

SEQ ID NO: 160446 - DNA, 25 bp, SARS Virus
actctgagtgttgctgatagtctta

SEQ ID NO: 160447 - DNA, 25 bp, SARS Virus
ctctgagtgttcgtgatagtcttat

SEQ ID NO: 160448 - DNA, 25 bp, SARS Virus
tctgagtgttccggatagtcttatc

SEQ ID NO: 160449 - DNA, 25 bp, SARS Virus
ctgagtgttcctgatagtcttatca

SEQ ID NO: 160450 - DNA, 25 bp, SARS Virus
tgagtgttcctggtagtcttatcat

SEQ ID NO: 160451 - DNA, 25 bp, SARS Virus
gagtgttcctgagagtcttatcatt

SEQ ID NO: 160452 - DNA, 25 bp, SARS Virus
agtgttcctgatggtcttatcattt

SEQ ID NO: 160453 - DNA, 25 bp, SARS Virus
gtgttcctgatagtcttatcatttt

SEQ ID NO: 160454 - DNA, 25 bp, SARS Virus
tgttcctgataggcttatcattttc

SEQ ID NO: 160455 - DNA, 25 bp, SARS Virus
gttcctgatagtgttatcattttct

SEQ ID NO: 160456 - DNA, 25 bp, SARS Virus
ttcctgatagtcgtatcattttctt

SEQ ID NO: 160457 - DNA, 25 bp, SARS Virus
tcctgatagtctgatcattttcttt

SEQ ID NO: 160458 - DNA, 25 bp, SARS Virus
cctgatagtcttgtcattttctttc

SEQ ID NO: 160459 - DNA, 25 bp, SARS Virus
ctgatagtcttagcattttctttcc

SEQ ID NO: 160460 - DNA, 25 bp, SARS Virus
tgatagtcttatgattttctttccg

SEQ ID NO: 160461 - DNA, 25 bp, SARS Virus
gatagtcttatcgttttctttccgt

SEQ ID NO: 160462 - DNA, 25 bp, SARS Virus
atagtcttatcagtttctttccgtt

SEQ ID NO: 160463 - DNA, 25 bp, SARS Virus
tagtcttatcatgttctttccgtta

SEQ ID NO: 160464 - DNA, 25 bp, SARS Virus
agtcttatcattgtctttccgttaa

SEQ ID NO: 160465 - DNA, 25 bp, SARS Virus
gtcttatcatttgctttccgttaac

SEQ ID NO: 160466 - DNA, 25 bp, SARS Virus
tcttatcattttgtttccgttaacg

SEQ ID NO: 160467 - DNA, 25 bp, SARS Virus
cttatcattttcgttccgttaacga

SEQ ID NO: 160468 - DNA, 25 bp, SARS Virus
ttatcattttctgtccgttaacgaa

SEQ ID NO: 160469 - DNA, 25 bp, SARS Virus
tatcattttcttgccgttaacgaaa

SEQ ID NO: 160470 - DNA, 25 bp, SARS Virus
atcattttctttgcgttaacgaaat

SEQ ID NO: 160471 - DNA, 25 bp, SARS Virus
tcattttctttcggttaacgaaatt

SEQ ID NO: 160472 - DNA, 25 bp, SARS Virus
cattttctttccgttaacgaaattt

SEQ ID NO: 160473 - DNA, 25 bp, SARS Virus
attttctttccggtaacgaaattta

SEQ ID NO: 160474 - DNA, 25 bp, SARS Virus
ttttctttccgtgaacgaaatttaa

SEQ ID NO: 160475 - DNA, 25 bp, SARS Virus
tttctttccgttgacgaaatttaat

SEQ ID NO: 160476 - DNA, 25 bp, SARS Virus
ttctttccgttagcgaaatttaatc

SEQ ID NO: 160477 - DNA, 25 bp, SARS Virus
tctttccgttaaggaaatttaatca

SEQ ID NO: 160478 - DNA, 25 bp, SARS Virus
ctttccgttaacgaaatttaatcat

SEQ ID NO: 160479 - DNA, 25 bp, SARS Virus
tttccgttaacggaatttaatcatt

SEQ ID NO: 160480 - DNA, 25 bp, SARS Virus
ttccgttaacgagatttaatcattt

SEQ ID NO: 160481 - DNA, 25 bp, SARS Virus
tccgttaacgaagtttaatcattta

SEQ ID NO: 160482 - DNA, 25 bp, SARS Virus
ccgttaacgaaagttaatcatttac

SEQ ID NO: 160483 - DNA, 25 bp, SARS Virus
cgttaacgaaatgtaatcatttacg

SEQ ID NO: 160484 - DNA, 25 bp, SARS Virus
gttaacgaaattgaatcatttacgt

SEQ ID NO: 160485 - DNA, 25 bp, SARS Virus
ttaacgaaatttgatcatttacgtg

SEQ ID NO: 160486 - DNA, 25 bp, SARS Virus
taacgaaatttagtcatttacgtga

SEQ ID NO: 160487 - DNA, 25 bp, SARS Virus
aacgaaatttaagcatttacgtgaa

SEQ ID NO: 160488 - DNA, 25 bp, SARS Virus
acgaaatttaatgatttacgtgaaa

SEQ ID NO: 160489 - DNA, 25 bp, SARS Virus
cgaaatttaatcgtttacgtgaaaa

SEQ ID NO: 160490 - DNA, 25 bp, SARS Virus
gaaatttaatcagttacgtgaaaat

SEQ ID NO: 160491 - DNA, 25 bp, SARS Virus
aaatttaatcatgtacgtgaaaata

SEQ ID NO: 160492 - DNA, 25 bp, SARS Virus
aatttaatcattgacgtgaaaatag

SEQ ID NO: 160493 - DNA, 25 bp, SARS Virus
atttaatcatttgcgtgaaaatagc

SEQ ID NO: 160494 - DNA, 25 bp, SARS Virus
tttaatcatttaggtgaaaatagct

SEQ ID NO: 160495 - DNA, 25 bp, SARS Virus
ttaatcatttacgtgaaaatagctt

SEQ ID NO: 160496 - DNA, 25 bp, SARS Virus
taatcatttacgggaaaatagcttt

SEQ ID NO: 160497 - DNA, 25 bp, SARS Virus
aatcatttacgtgaaaatagctttc

SEQ ID NO: 160498 - DNA, 25 bp, SARS Virus
atcatttacgtggaaatagctttcg

SEQ ID NO: 160499 - DNA, 25 bp, SARS Virus
tcatttacgtgagaatagctttcga

SEQ ID NO: 160500 - DNA, 25 bp, SARS Virus
catttacgtgaagatagctttcgac

SEQ ID NO: 160501 - DNA, 25 bp, SARS Virus
atttacgtgaaagtagctttcgacc

SEQ ID NO: 160502 - DNA, 25 bp, SARS Virus
tttacgtgaaaagagctttcgacct

SEQ ID NO: 160503 - DNA, 25 bp, SARS Virus
ttacgtgaaaatggctttcgacctc

SEQ ID NO: 160504 - DNA, 25 bp, SARS Virus
tacgtgaaaatagctttcgacctca

SEQ ID NO: 160505 - DNA, 25 bp, SARS Virus
acgtgaaaataggtttcgacctcac

SEQ ID NO: 160506 - DNA, 25 bp, SARS Virus
cgtgaaaatagcgttcgacctcaca

SEQ ID NO: 160507 - DNA, 25 bp, SARS Virus
gtgaaaatagctgtcgacctcacac

SEQ ID NO: 160508 - DNA, 25 bp, SARS Virus
tgaaaatagcttgcgacctcacacc

SEQ ID NO: 160509 - DNA, 25 bp, SARS Virus
gaaaatagctttggacctcacacct

SEQ ID NO: 160510 - DNA, 25 bp, SARS Virus
aaaatagctttcgacctcacacctt

SEQ ID NO: 160511 - DNA, 25 bp, SARS Virus
aaatagctttcggcctcacacctta

SEQ ID NO: 160512 - DNA, 25 bp, SARS Virus
aatagctttcgagctcacaccttac

SEQ ID NO: 160513 - DNA, 25 bp, SARS Virus
atagctttcgacgtcacaccttacg

SEQ ID NO: 160514 - DNA, 25 bp, SARS Virus
tagctttcgaccgcacaccttacgt

SEQ ID NO: 160515 - DNA, 25 bp, SARS Virus
agctttcgacctgacaccttacgta

SEQ ID NO: 160516 - DNA, 25 bp, SARS Virus
gctttcgacctcgcaccttacgtac

SEQ ID NO: 160517 - DNA, 25 bp, SARS Virus
ctttcgacctcagaccttacgtacg

SEQ ID NO: 160518 - DNA, 25 bp, SARS Virus
tttcgacctcacgccttacgtacga

SEQ ID NO: 160519 - DNA, 25 bp, SARS Virus
ttcgacctcacagcttacgtacgaa

SEQ ID NO: 160520 - DNA, 25 bp, SARS Virus
tcgacctcacacgttacgtacgaat

SEQ ID NO: 160521 - DNA, 25 bp, SARS Virus
cgacctcacaccgtacgtacgaata

SEQ ID NO: 160522 - DNA, 25 bp, SARS Virus
gacctcacacctgacgtacgaataa

SEQ ID NO: 160523 - DNA, 25 bp, SARS Virus
acctcacaccttgcgtacgaataag

SEQ ID NO: 160524 - DNA, 25 bp, SARS Virus
cctcacaccttaggtacgaataagt

SEQ ID NO: 160525 - DNA, 25 bp, SARS Virus
ctcacaccttacgtacgaataagtg

SEQ ID NO: 160526 - DNA, 25 bp, SARS Virus
tcacaccttacggacgaataagtgt

SEQ ID NO: 160527 - DNA, 25 bp, SARS Virus
cacaccttacgtgcgaataagtgta

SEQ ID NO: 160528 - DNA, 25 bp, SARS Virus
acaccttacgtaggaataagtgtat

SEQ ID NO: 160529 - DNA, 25 bp, SARS Virus
caccttacgtacgaataagtgtatg

SEQ ID NO: 160530 - DNA, 25 bp, SARS Virus
accttacgtacggataagtgtatgt

SEQ ID NO: 160531 - DNA, 25 bp, SARS Virus
ccttacgtacgagtaagtgtatgtt

SEQ ID NO: 160532 - DNA, 25 bp, SARS Virus
cttacgtacgaagaagtgtatgttt

SEQ ID NO: 160533 - DNA, 25 bp, SARS Virus
ttacgtacgaatgagtgtatgtttg

SEQ ID NO: 160534 - DNA, 25 bp, SARS Virus
tacgtacgaataggtgtatgtttga

SEQ ID NO: 160535 - DNA, 25 bp, SARS Virus
acgtacgaataagtgtatgtttgat

SEQ ID NO: 160536 - DNA, 25 bp, SARS Virus
cgtacgaataagggtatgtttgatg

SEQ ID NO: 160537 - DNA, 25 bp, SARS Virus
gtacgaataagtgtatgtttgatgg

SEQ ID NO: 160538 - DNA, 25 bp, SARS Virus
tacgaataagtggatgtttgatggt

SEQ ID NO: 160539 - DNA, 25 bp, SARS Virus
acgaataagtgtgtgtttgatggtg

SEQ ID NO: 160540 - DNA, 25 bp, SARS Virus
cgaataagtgtaggtttgatggtgg

SEQ ID NO: 160541 - DNA, 25 bp, SARS Virus
gaataagtgtatgtttgatggtggt

SEQ ID NO: 160542 - DNA, 25 bp, SARS Virus
aataagtgtatggttgatggtggta

SEQ ID NO: 160543 - DNA, 25 bp, SARS Virus
ataagtgtatgtgtgatggtggtag

SEQ ID NO: 160544 - DNA, 25 bp, SARS Virus
taagtgtatgttggatggtggtagt

SEQ ID NO: 160545 - DNA, 25 bp, SARS Virus
aagtgtatgtttgatggtggtagtg

SEQ ID NO: 160546 - DNA, 25 bp, SARS Virus
agtgtatgtttggtggtggtagtgt

SEQ ID NO: 160547 - DNA, 25 bp, SARS Virus
gtgtatgtttgagggtggtagtgtc

SEQ ID NO: 160548 - DNA, 25 bp, SARS Virus
tgtatgtttgatggtggtagtgtcg

SEQ ID NO: 160549 - DNA, 25 bp, SARS Virus
gtatgtttgatggtggtagtgtcgg

SEQ ID NO: 160550 - DNA, 25 bp, SARS Virus
tatgtttgatgggggtagtgtcgga

SEQ ID NO: 160551 - DNA, 25 bp, SARS Virus
atgtttgatggtggtagtgtcggac

SEQ ID NO: 160552 - DNA, 25 bp, SARS Virus
tgtttgatggtggtagtgtcggacc

SEQ ID NO: 160553 - DNA, 25 bp, SARS Virus
gtttgatggtgggagtgtcggacca

SEQ ID NO: 160554 - DNA, 25 bp, SARS Virus
tttgatggtggtggtgtcggaccat

SEQ ID NO: 160555 - DNA, 25 bp, SARS Virus
ttgatggtggtagtgtcggaccatt

SEQ ID NO: 160556 - DNA, 25 bp, SARS Virus
tgatggtggtagggtcggaccattc

SEQ ID NO: 160557 - DNA, 25 bp, SARS Virus
gatggtggtagtgtcggaccattca

SEQ ID NO: 160558 - DNA, 25 bp, SARS Virus
atggtggtagtggcggaccattcaa

SEQ ID NO: 160559 - DNA, 25 bp, SARS Virus
tggtggtagtgtgggaccattcaag

SEQ ID NO: 160560 - DNA, 25 bp, SARS Virus
ggtggtagtgtcggaccattcaagt

SEQ ID NO: 160561 - DNA, 25 bp, SARS Virus
gtggtagtgtcggaccattcaagtt

SEQ ID NO: 160562 - DNA, 25 bp, SARS Virus
tggtagtgtcgggccattcaagttc

SEQ ID NO: 160563 - DNA, 25 bp, SARS Virus
ggtagtgtcggagcattcaagttca

SEQ ID NO: 160564 - DNA, 25 bp, SARS Virus
gtagtgtcggacgattcaagttcaa

SEQ ID NO: 160565 - DNA, 25 bp, SARS Virus
tagtgtcggaccgttcaagttcaaa

SEQ ID NO: 160566 - DNA, 25 bp, SARS Virus
agtgtcggaccagtcaagttcaaac

SEQ ID NO: 160567 - DNA, 25 bp, SARS Virus
gtgtcggaccatgcaagttcaaact

SEQ ID NO: 160568 - DNA, 25 bp, SARS Virus
tgtcggaccattgaagttcaaactg

SEQ ID NO: 160569 - DNA, 25 bp, SARS Virus
gtcggaccattcgagttcaaactgt

SEQ ID NO: 160570 - DNA, 25 bp, SARS Virus
tcggaccattcaggttcaaactgtt

SEQ ID NO: 160571 - DNA, 25 bp, SARS Virus
cggaccattcaagttcaaactgttc

SEQ ID NO: 160572 - DNA, 25 bp, SARS Virus
ggaccattcaaggtcaaactgttct

SEQ ID NO: 160573 - DNA, 25 bp, SARS Virus
gaccattcaagtgcaaactgttctg

SEQ ID NO: 160574 - DNA, 25 bp, SARS Virus
accattcaagttgaaactgttctga

SEQ ID NO: 160575 - DNA, 25 bp, SARS Virus
ccattcaagttcgaactgttctgag

SEQ ID NO: 160576 - DNA, 25 bp, SARS Virus
cattcaagttcagactgttctgaga

SEQ ID NO: 160577 - DNA, 25 bp, SARS Virus
attcaagttcaagctgttctgagaa

SEQ ID NO: 160578 - DNA, 25 bp, SARS Virus
ttcaagttcaaagtgttctgagaac

SEQ ID NO: 160579 - DNA, 25 bp, SARS Virus
tcaagttcaaacggttctgagaaca

SEQ ID NO: 160580 - DNA, 25 bp, SARS Virus
caagttcaaactgttctgagaacac

SEQ ID NO: 160581 - DNA, 25 bp, SARS Virus
aagttcaaactggtctgagaacaca

SEQ ID NO: 160582 - DNA, 25 bp, SARS Virus
agttcaaactgtgctgagaacacag

SEQ ID NO: 160583 - DNA, 25 bp, SARS Virus
gttcaaactgttgtgagaacacagt

SEQ ID NO: 160584 - DNA, 25 bp, SARS Virus
ttcaaactgttcggagaacacagtt

SEQ ID NO: 160585 - DNA, 25 bp, SARS Virus
aagtttctagagttgtagttatggt

SEQ ID NO: 160586 - DNA, 25 bp, SARS Virus
agtttctagaggtgtagttatggta

SEQ ID NO: 160587 - DNA, 25 bp, SARS Virus
gtttctagaggtttagttatggtag

SEQ ID NO: 160588 - DNA, 25 bp, SARS Virus
tttctagaggtgtagttatggtaga

SEQ ID NO: 160589 - DNA, 25 bp, SARS Virus
ttctagaggtgttgttatggtagat

SEQ ID NO: 160590 - DNA, 25 bp, SARS Virus
tctagaggtgtatttatggtagatg

SEQ ID NO: 160591 - DNA, 25 bp, SARS Virus
ctagaggtgtagttatggtagatgg

SEQ ID NO: 160592 - DNA, 25 bp, SARS Virus
tagaggtgtagttatggtagatgga

SEQ ID NO: 160593 - DNA, 25 bp, SARS Virus
agaggtgtagttttggtagatggaa

SEQ ID NO: 160594 - DNA, 25 bp, SARS Virus
gaggtgtagttatggtagatggaaa

SEQ ID NO: 160595 - DNA, 25 bp, SARS Virus
aggtgtagttattgtagatggaaac

SEQ ID NO: 160596 - DNA, 25 bp, SARS Virus
ggtgtagttatgttagatggaaaca

SEQ ID NO: 160597 - DNA, 25 bp, SARS Virus
gtgtagttatggtagatggaaacac

SEQ ID NO: 160598 - DNA, 25 bp, SARS Virus
tgtagttatggttgatggaaacaca

SEQ ID NO: 160599 - DNA, 25 bp, SARS Virus
gtagttatggtatatggaaacacat

SEQ ID NO: 160600 - DNA, 25 bp, SARS Virus
tagttatggtagttggaaacacatt

SEQ ID NO: 160601 - DNA, 25 bp, SARS Virus
agttatggtagatggaaacacattt

SEQ ID NO: 160602 - DNA, 25 bp, SARS Virus
gttatggtagattgaaacacatttg

SEQ ID NO: 160603 - DNA, 25 bp, SARS Virus
ttatggtagatgtaaacacatttgt

SEQ ID NO: 160604 - DNA, 25 bp, SARS Virus
tatggtagatggtaacacatttgtc

SEQ ID NO: 160605 - DNA, 25 bp, SARS Virus
atggtagatggatacacatttgtcg

SEQ ID NO: 160606 - DNA, 25 bp, SARS Virus
tggtagatggaatcacatttgtcgt

SEQ ID NO: 160607 - DNA, 25 bp, SARS Virus
ggtagatggaaatacatttgtcgta

SEQ ID NO: 160608 - DNA, 25 bp, SARS Virus
gtagatggaaactcatttgtcgtaa

SEQ ID NO: 160609 - DNA, 25 bp, SARS Virus
tagatggaaacatatttgtcgtaat

SEQ ID NO: 160610 - DNA, 25 bp, SARS Virus
agatggaaacacttttgtcgtaata

SEQ ID NO: 160611 - DNA, 25 bp, SARS Virus
gatggaaacacatttgtcgtaataa

SEQ ID NO: 160612 - DNA, 25 bp, SARS Virus
atggaaacacatttgtcgtaataat

SEQ ID NO: 160613 - DNA, 25 bp, SARS Virus
tggaaacacatttgtcgtaataatt

SEQ ID NO: 160614 - DNA, 25 bp, SARS Virus
ggaaacacatttttcgtaataatta

SEQ ID NO: 160615 - DNA, 25 bp, SARS Virus
gaaacacatttgtcgtaataattac

SEQ ID NO: 160616 - DNA, 25 bp, SARS Virus
aaacacatttgttgtaataattact

SEQ ID NO: 160617 - DNA, 25 bp, SARS Virus
aacacatttgtcttaataattacta

SEQ ID NO: 160618 - DNA, 25 bp, SARS Virus
acacatttgtcgtaataattactac

SEQ ID NO: 160619 - DNA, 25 bp, SARS Virus
cacatttgtcgttataattactacc

SEQ ID NO: 160620 - DNA, 25 bp, SARS Virus
acatttgtcgtattaattactacct

SEQ ID NO: 160621 - DNA, 25 bp, SARS Virus
catttgtcgtaataattactacctt

SEQ ID NO: 160622 - DNA, 25 bp, SARS Virus
atttgtcgtaattattactaccttt

SEQ ID NO: 160623 - DNA, 25 bp, SARS Virus
tttgtcgtaatatttactacctttg

SEQ ID NO: 160624 - DNA, 25 bp, SARS Virus
ttgtcgtaataattactacctttgt

SEQ ID NO: 160625 - DNA, 25 bp, SARS Virus
tgtcgtaataattactacctttgtc

SEQ ID NO: 160626 - DNA, 25 bp, SARS Virus
gtcgtaataatttctacctttgtcc

SEQ ID NO: 160627 - DNA, 25 bp, SARS Virus
tcgtaataattattacctttgtcca

SEQ ID NO: 160628 - DNA, 25 bp, SARS Virus
cgtaataattactacctttgtccac

SEQ ID NO: 160629 - DNA, 25 bp, SARS Virus
gtaataattacttcctttgtccacg

SEQ ID NO: 160630 - DNA, 25 bp, SARS Virus
taataattactatctttgtccacga

SEQ ID NO: 160631 - DNA, 25 bp, SARS Virus
aataattactacttttgtccacgaa

SEQ ID NO: 160632 - DNA, 25 bp, SARS Virus
ataattactacctttgtccacgaag

SEQ ID NO: 160633 - DNA, 25 bp, SARS Virus
taattactacctttgtccacgaagc

SEQ ID NO: 160634 - DNA, 25 bp, SARS Virus
aattactacctttgtccacgaagcg

SEQ ID NO: 160635 - DNA, 25 bp, SARS Virus
attactacctttttccacgaagcgg

SEQ ID NO: 160636 - DNA, 25 bp, SARS Virus
ttactacctttgtccacgaagcggc

SEQ ID NO: 160637 - DNA, 25 bp, SARS Virus
tactacctttgttcacgaagcggcc

SEQ ID NO: 160638 - DNA, 25 bp, SARS Virus
actacctttgtctacgaagcggccg

SEQ ID NO: 160639 - DNA, 25 bp, SARS Virus
ctacctttgtcctcgaagcggccgc

SEQ ID NO: 160640 - DNA, 25 bp, SARS Virus
tacctttgtccatgaagcggccgca

SEQ ID NO: 160641 - DNA, 25 bp, SARS Virus
acctttgtccactaagcggccgcac

SEQ ID NO: 160642 - DNA, 25 bp, SARS Virus
cctttgtccacgtagcggccgcaca

SEQ ID NO: 160643 - DNA, 25 bp, SARS Virus
ctttgtccacgatgcggccgcacag

SEQ ID NO: 160644 - DNA, 25 bp, SARS Virus
tttgtccacgaatcggccgcacagg

SEQ ID NO: 160645 - DNA, 25 bp, SARS Virus
ttgtccacgaagtggccgcacaggt

SEQ ID NO: 160646 - DNA, 25 bp, SARS Virus
tgtccacgaagctgccgcacaggta

SEQ ID NO: 160647 - DNA, 25 bp, SARS Virus
gtccacgaagcgtccgcacaggtag

SEQ ID NO: 160648 - DNA, 25 bp, SARS Virus
tccacgaagcggtcgcacaggtagt

SEQ ID NO: 160649 - DNA, 25 bp, SARS Virus
ccacgaagcggctgcacaggtagtt

SEQ ID NO: 160650 - DNA, 25 bp, SARS Virus
cacgaagcggcctcacaggtagttt

SEQ ID NO: 160651 - DNA, 25 bp, SARS Virus
acgaagcggccgtacaggtagtttc

SEQ ID NO: 160652 - DNA, 25 bp, SARS Virus
cgaagcggccgctcaggtagtttca

SEQ ID NO: 160653 - DNA, 25 bp, SARS Virus
gaagcggccgcataggtagtttcac

SEQ ID NO: 160654 - DNA, 25 bp, SARS Virus
aagcggccgcactggtagtttcaca

SEQ ID NO: 160655 - DNA, 25 bp, SARS Virus
agcggccgcacatgtagtttcacag

SEQ ID NO: 160656 - DNA, 25 bp, SARS Virus
gcggccgcacagttagtttcacagg

SEQ ID NO: 160657 - DNA, 25 bp, SARS Virus
cggccgcacaggtagtttcacagga

SEQ ID NO: 160658 - DNA, 25 bp, SARS Virus
ggccgcacaggttgtttcacaggaa

SEQ ID NO: 160659 - DNA, 25 bp, SARS Virus
gccgcacaggtattttcacaggaaa

SEQ ID NO: 160660 - DNA, 25 bp, SARS Virus
ccgcacaggtagtttcacaggaaat

SEQ ID NO: 160661 - DNA, 25 bp, SARS Virus
cgcacaggtagtttcacaggaaata

SEQ ID NO: 160662 - DNA, 25 bp, SARS Virus
gcacaggtagtttcacaggaaataa

SEQ ID NO: 160663 - DNA, 25 bp, SARS Virus
cacaggtagttttacaggaaataat

SEQ ID NO: 160664 - DNA, 25 bp, SARS Virus
acaggtagtttctcaggaaataatt

SEQ ID NO: 160665 - DNA, 25 bp, SARS Virus
caggtagtttcataggaaataattg

SEQ ID NO: 160666 - DNA, 25 bp, SARS Virus
aggtagtttcactggaaataattgt

SEQ ID NO: 160667 - DNA, 25 bp, SARS Virus
ggtagtttcacatgaaataattgtt

SEQ ID NO: 160668 - DNA, 25 bp, SARS Virus
gtagtttcacagtaaataattgttg

SEQ ID NO: 160669 - DNA, 25 bp, SARS Virus
tagtttcacaggtaataattgttgt

SEQ ID NO: 160670 - DNA, 25 bp, SARS Virus
agtttcacaggatataattgttgta

SEQ ID NO: 160671 - DNA, 25 bp, SARS Virus
gtttcacaggaattaattgttgtaa

SEQ ID NO: 160672 - DNA, 25 bp, SARS Virus
tttcacaggaaataattgttgtaat

SEQ ID NO: 160673 - DNA, 25 bp, SARS Virus
ttcacaggaaattattgttgtaata

SEQ ID NO: 160674 - DNA, 25 bp, SARS Virus
tcacaggaaatatttgttgtaatat

SEQ ID NO: 160675 - DNA, 25 bp, SARS Virus
cacaggaaataattgttgtaatatt

SEQ ID NO: 160676 - DNA, 25 bp, SARS Virus
acaggaaataattgttgtaatattc

SEQ ID NO: 160677 - DNA, 25 bp, SARS Virus
caggaaataatttttgtaatattcg

SEQ ID NO: 160678 - DNA, 25 bp, SARS Virus
aggaaataattgttgtaatattcgg

SEQ ID NO: 160679 - DNA, 25 bp, SARS Virus
ggaaataattgttgtaatattcggt

SEQ ID NO: 160680 - DNA, 25 bp, SARS Virus
gaaataattgttttaatattcggtg

SEQ ID NO: 160681 - DNA, 25 bp, SARS Virus
aaataattgttgtaatattcggtgt

SEQ ID NO: 160682 - DNA, 25 bp, SARS Virus
aataattgttgttatattcggtgta

SEQ ID NO: 160683 - DNA, 25 bp, SARS Virus
ataattgttgtattattcggtgtaa

SEQ ID NO: 160684 - DNA, 25 bp, SARS Virus
taattgttgtaatattcggtgtaaa

SEQ ID NO: 160685 - DNA, 25 bp, SARS Virus
aattgttgtaattttcggtgtaaaa

SEQ ID NO: 160686 - DNA, 25 bp, SARS Virus
attgttgtaatattcggtgtaaaag

SEQ ID NO: 160687 - DNA, 25 bp, SARS Virus
ttgttgtaatattcggtgtaaaaga

SEQ ID NO: 160688 - DNA, 25 bp, SARS Virus
tgttgtaatatttggtgtaaaagat

SEQ ID NO: 160689 - DNA, 25 bp, SARS Virus
gttgtaatattctgtgtaaaagatt

SEQ ID NO: 160690 - DNA, 25 bp, SARS Virus
ttgtaatattcgttgtaaaagattt

SEQ ID NO: 160691 - DNA, 25 bp, SARS Virus
tgtaatattcggtgtaaaagatttg

SEQ ID NO: 160692 - DNA, 25 bp, SARS Virus
gtaatattcggtttaaaagatttga

SEQ ID NO: 160693 - DNA, 25 bp, SARS Virus
taatattcggtgtaaaagatttgag

SEQ ID NO: 160694 - DNA, 25 bp, SARS Virus
aatattcggtgttaaagatttgaga

SEQ ID NO: 160695 - DNA, 25 bp, SARS Virus
atattcggtgtataagatttgagac

SEQ ID NO: 160696 - DNA, 25 bp, SARS Virus
tattcggtgtaatagatttgagaca

SEQ ID NO: 160697 - DNA, 25 bp, SARS Virus
attcggtgtaaatgatttgagacat

SEQ ID NO: 160698 - DNA, 25 bp, SARS Virus
ttcggtgtaaaatatttgagacatt

SEQ ID NO: 160699 - DNA, 25 bp, SARS Virus
tcggtgtaaaagttttgagacattg

SEQ ID NO: 160700 - DNA, 25 bp, SARS Virus
cggtgtaaaagatttgagacattgg

SEQ ID NO: 160701 - DNA, 25 bp, SARS Virus
ggtgtaaaagatttgagacattgga

SEQ ID NO: 160702 - DNA, 25 bp, SARS Virus
gtgtaaaagatttgagacattggac

SEQ ID NO: 160703 - DNA, 25 bp, SARS Virus
tgtaaaagattttagacattggacc

SEQ ID NO: 160704 - DNA, 25 bp, SARS Virus
gtaaaagatttgtgacattggacca

SEQ ID NO: 160705 - DNA, 25 bp, SARS Virus
taaaagatttgatacattggaccat

SEQ ID NO: 160706 - DNA, 25 bp, SARS Virus
aaaagatttgagtcattggaccatt

SEQ ID NO: 160707 - DNA, 25 bp, SARS Virus
aaagatttgagatattggaccattt

SEQ ID NO: 160708 - DNA, 25 bp, SARS Virus
aagatttgagactttggaccattta

SEQ ID NO: 160709 - DNA, 25 bp, SARS Virus
agatttgagacattggaccatttac

SEQ ID NO: 160710 - DNA, 25 bp, SARS Virus
gatttgagacattggaccatttaca

SEQ ID NO: 160711 - DNA, 25 bp, SARS Virus
atttgagacatttgaccatttacat

SEQ ID NO: 160712 - DNA, 25 bp, SARS Virus
tttgagacattgtaccatttacata

SEQ ID NO: 160713 - DNA, 25 bp, SARS Virus
ttgagacattggtccatttacataa

SEQ ID NO: 160714 - DNA, 25 bp, SARS Virus
tgagacattggatcatttacataag

SEQ ID NO: 160715 - DNA, 25 bp, SARS Virus
gagacattggactatttacataagg

SEQ ID NO: 160716 - DNA, 25 bp, SARS Virus
agacattggaccttttacataaggt

SEQ ID NO: 160717 - DNA, 25 bp, SARS Virus
gacattggaccatttacataaggtg

SEQ ID NO: 160718 - DNA, 25 bp, SARS Virus
acattggaccatttacataaggtgt

SEQ ID NO: 160719 - DNA, 25 bp, SARS Virus
cattggaccatttacataaggtgtc

SEQ ID NO: 160720 - DNA, 25 bp, SARS Virus
attggaccattttcataaggtgtcc

SEQ ID NO: 160721 - DNA, 25 bp, SARS Virus
ttggaccatttatataaggtgtcca

SEQ ID NO: 160722 - DNA, 25 bp, SARS Virus
tggaccatttacttaaggtgtccaa

SEQ ID NO: 160723 - DNA, 25 bp, SARS Virus
ggaccatttacataaggtgtccaat

SEQ ID NO: 160724 - DNA, 25 bp, SARS Virus
gaccatttacattaggtgtccaata

SEQ ID NO: 160725 - DNA, 25 bp, SARS Virus
accatttacatatggtgtccaatat

SEQ ID NO: 160726 - DNA, 25 bp, SARS Virus
ccatttacataatgtgtccaatatt

SEQ ID NO: 160727 - DNA, 25 bp, SARS Virus
catttacataagttgtccaatattc

SEQ ID NO: 160728 - DNA, 25 bp, SARS Virus
atttacataaggtgtccaatattca

SEQ ID NO: 160729 - DNA, 25 bp, SARS Virus
tttacataaggtttccaatattcat

SEQ ID NO: 160730 - DNA, 25 bp, SARS Virus
ttacataaggtgtccaatattcata

SEQ ID NO: 160731 - DNA, 25 bp, SARS Virus
tacataaggtgttcaatattcatag

SEQ ID NO: 160732 - DNA, 25 bp, SARS Virus
acataaggtgtctaatattcatagt

SEQ ID NO: 160733 - DNA, 25 bp, SARS Virus
cataaggtgtcctatattcatagtt

SEQ ID NO: 160734 - DNA, 25 bp, SARS Virus
ataaggtgtccattattcatagttt

SEQ ID NO: 160735 - DNA, 25 bp, SARS Virus
taaggtgtccaatattcatagttta

SEQ ID NO: 160736 - DNA, 25 bp, SARS Virus
aaggtgtccaattttcatagtttaa

SEQ ID NO: 160737 - DNA, 25 bp, SARS Virus
aggtgtccaatattcatagtttaac

SEQ ID NO: 160738 - DNA, 25 bp, SARS Virus
ggtgtccaatattcatagtttaaca

SEQ ID NO: 160739 - DNA, 25 bp, SARS Virus
gtgtccaatatttatagtttaacaa

SEQ ID NO: 160740 - DNA, 25 bp, SARS Virus
tgtccaatattcttagtttaacaaa

SEQ ID NO: 160741 - DNA, 25 bp, SARS Virus
gtccaatattcatagtttaacaaac

SEQ ID NO: 160742 - DNA, 25 bp, SARS Virus
tccaatattcattgtttaacaaaca

SEQ ID NO: 160743 - DNA, 25 bp, SARS Virus
ccaatattcatattttaacaaacat

SEQ ID NO: 160744 - DNA, 25 bp, SARS Virus
caatattcatagtttaacaaacatt

SEQ ID NO: 160745 - DNA, 25 bp, SARS Virus
aatattcatagtttaacaaacattt

SEQ ID NO: 160746 - DNA, 25 bp, SARS Virus
atattcatagtttaacaaacattta

SEQ ID NO: 160747 - DNA, 25 bp, SARS Virus
tattcatagttttacaaacatttag

SEQ ID NO: 160748 - DNA, 25 bp, SARS Virus
attcatagtttatcaaacatttagg

SEQ ID NO: 160749 - DNA, 25 bp, SARS Virus
ttcatagtttaataaacatttaggt

SEQ ID NO: 160750 - DNA, 25 bp, SARS Virus
tcatagtttaactaacatttaggta

SEQ ID NO: 160751 - DNA, 25 bp, SARS Virus
catagtttaacatacatttaggtat

SEQ ID NO: 160752 - DNA, 25 bp, SARS Virus
atagtttaacaatcatttaggtatc

SEQ ID NO: 160753 - DNA, 25 bp, SARS Virus
tagtttaacaaatatttaggtatcc

SEQ ID NO: 160754 - DNA, 25 bp, SARS Virus
agtttaacaaacttttaggtatccg

SEQ ID NO: 160755 - DNA, 25 bp, SARS Virus
gtttaacaaacatttaggtatccga

SEQ ID NO: 160756 - DNA, 25 bp, SARS Virus
tttaacaaacatttaggtatccgat

SEQ ID NO: 160757 - DNA, 25 bp, SARS Virus
ttaacaaacatttaggtatccgatt

SEQ ID NO: 160758 - DNA, 25 bp, SARS Virus
taacaaacattttggtatccgattt

SEQ ID NO: 160759 - DNA, 25 bp, SARS Virus
aacaaacatttatgtatccgattta

SEQ ID NO: 160760 - DNA, 25 bp, SARS Virus
acaaacatttagttatccgatttag

SEQ ID NO: 160761 - DNA, 25 bp, SARS Virus
caaacatttaggtatccgatttagg

SEQ ID NO: 160762 - DNA, 25 bp, SARS Virus
aaacatttaggtttccgatttaggt

SEQ ID NO: 160763 - DNA, 25 bp, SARS Virus
aacatttaggtatccgatttaggtc

SEQ ID NO: 160764 - DNA, 25 bp, SARS Virus
acatttaggtattcgatttaggtcg

SEQ ID NO: 160765 - DNA, 25 bp, SARS Virus
catttaggtatctgatttaggtcgt

SEQ ID NO: 160766 - DNA, 25 bp, SARS Virus
atttaggtatcctatttaggtcgtc

SEQ ID NO: 160767 - DNA, 25 bp, SARS Virus
tttaggtatccgttttaggtcgtct

SEQ ID NO: 160768 - DNA, 25 bp, SARS Virus
ttaggtatccgatttaggtcgtctt

SEQ ID NO: 160769 - DNA, 25 bp, SARS Virus
taggtatccgatttaggtcgtcttt

SEQ ID NO: 160770 - DNA, 25 bp, SARS Virus
aggtatccgatttaggtcgtcttta

SEQ ID NO: 160771 - DNA, 25 bp, SARS Virus
ggtatccgattttggtcgtctttag

SEQ ID NO: 160772 - DNA, 25 bp, SARS Virus
gtatccgatttatgtcgtctttagt

SEQ ID NO: 160773 - DNA, 25 bp, SARS Virus
tatccgatttagttcgtctttagta

SEQ ID NO: 160774 - DNA, 25 bp, SARS Virus
atccgatttaggtcgtctttagtag

SEQ ID NO: 160775 - DNA, 25 bp, SARS Virus
tccgatttaggttgtctttagtagt

SEQ ID NO: 160776 - DNA, 25 bp, SARS Virus
ccgatttaggtcttctttagtagta

SEQ ID NO: 160777 - DNA, 25 bp, SARS Virus
cgatttaggtcgtctttagtagtat

SEQ ID NO: 160778 - DNA, 25 bp, SARS Virus
gatttaggtcgtttttagtagtata

SEQ ID NO: 160779 - DNA, 25 bp, SARS Virus
atttaggtcgtctttagtagtataa

SEQ ID NO: 160780 - DNA, 25 bp, SARS Virus
tttaggtcgtctttagtagtataat

SEQ ID NO: 160781 - DNA, 25 bp, SARS Virus
ttaggtcgtctttagtagtataata

SEQ ID NO: 160782 - DNA, 25 bp, SARS Virus
taggtcgtcttttgtagtataatat

SEQ ID NO: 160783 - DNA, 25 bp, SARS Virus
aggtcgtctttattagtataatata

SEQ ID NO: 160784 - DNA, 25 bp, SARS Virus
ggtcgtctttagtagtataatatac

SEQ ID NO: 160785 - DNA, 25 bp, SARS Virus
gtcgtctttagttgtataatatacg

SEQ ID NO: 160786 - DNA, 25 bp, SARS Virus
tcgtctttagtattataatatacgt

SEQ ID NO: 160787 - DNA, 25 bp, SARS Virus
cgtctttagtagtataatatacgta

SEQ ID NO: 160788 - DNA, 25 bp, SARS Virus
gtctttagtagtttaatatacgtag

SEQ ID NO: 160789 - DNA, 25 bp, SARS Virus
tctttagtagtataatatacgtagg

SEQ ID NO: 160790 - DNA, 25 bp, SARS Virus
ctttagtagtattatatacgtaggt

SEQ ID NO: 160791 - DNA, 25 bp, SARS Virus
tttagtagtatattatacgtaggtt

SEQ ID NO: 160792 - DNA, 25 bp, SARS Virus
ttagtagtataatatacgtaggttc

SEQ ID NO: 160793 - DNA, 25 bp, SARS Virus
tagtagtataatttacgtaggttca

SEQ ID NO: 160794 - DNA, 25 bp, SARS Virus
agtagtataatatacgtaggttcat

SEQ ID NO: 160795 - DNA, 25 bp, SARS Virus
gtagtataatattcgtaggttcatg

SEQ ID NO: 160796 - DNA, 25 bp, SARS Virus
tagtataatatatgtaggttcatga

SEQ ID NO: 160797 - DNA, 25 bp, SARS Virus
agtataatatacttaggttcatgac

SEQ ID NO: 160798 - DNA, 25 bp, SARS Virus
gtataatatacgtaggttcatgaca

SEQ ID NO: 160799 - DNA, 25 bp, SARS Virus
tataatatacgttggttcatgacag

SEQ ID NO: 160800 - DNA, 25 bp, SARS Virus
ataatatacgtatgttcatgacagc

SEQ ID NO: 160801 - DNA, 25 bp, SARS Virus
taatatacgtagtttcatgacagcc

SEQ ID NO: 160802 - DNA, 25 bp, SARS Virus
aatatacgtaggttcatgacagcca

SEQ ID NO: 160803 - DNA, 25 bp, SARS Virus
atatacgtaggttcatgacagccat

SEQ ID NO: 160804 - DNA, 25 bp, SARS Virus
tatacgtaggtttatgacagccatg

SEQ ID NO: 160805 - DNA, 25 bp, SARS Virus
atacgtaggttcttgacagccatga

SEQ ID NO: 160806 - DNA, 25 bp, SARS Virus
tacgtaggttcatgacagccatgag

SEQ ID NO: 160807 - DNA, 25 bp, SARS Virus
acgtaggttcattacagccatgagt

SEQ ID NO: 160808 - DNA, 25 bp, SARS Virus
cgtaggttcatgtcagccatgagta

SEQ ID NO: 160809 - DNA, 25 bp, SARS Virus
gtaggttcatgatagccatgagtaa

SEQ ID NO: 160810 - DNA, 25 bp, SARS Virus
taggttcatgactgccatgagtaaa

SEQ ID NO: 160811 - DNA, 25 bp, SARS Virus
aggttcatgacatccatgagtaaac

SEQ ID NO: 160812 - DNA, 25 bp, SARS Virus
ggttcatgacagtcatgagtaaacg

SEQ ID NO: 160813 - DNA, 25 bp, SARS Virus
gttcatgacagctatgagtaaacgt

SEQ ID NO: 160814 - DNA, 25 bp, SARS Virus
ttcatgacagccttgagtaaacgta

SEQ ID NO: 160815 - DNA, 25 bp, SARS Virus
tcatgacagccatgagtaaacgtac

SEQ ID NO: 160816 - DNA, 25 bp, SARS Virus
catgacagccattagtaaacgtacc

SEQ ID NO: 160817 - DNA, 25 bp, SARS Virus
atgacagccatgtgtaaacgtacca

SEQ ID NO: 160818 - DNA, 25 bp, SARS Virus
tgacagccatgattaaacgtaccac

SEQ ID NO: 160819 - DNA, 25 bp, SARS Virus
gacagccatgagtaaacgtaccaca

SEQ ID NO: 160820 - DNA, 25 bp, SARS Virus
acagccatgagttaacgtaccacag

SEQ ID NO: 160821 - DNA, 25 bp, SARS Virus
cagccatgagtatacgtaccacaga

SEQ ID NO: 160822 - DNA, 25 bp, SARS Virus
agccatgagtaatcgtaccacagac

SEQ ID NO: 160823 - DNA, 25 bp, SARS Virus
gccatgagtaaatgtaccacagacg

SEQ ID NO: 160824 - DNA, 25 bp, SARS Virus
ccatgagtaaacttaccacagacgt

SEQ ID NO: 160825 - DNA, 25 bp, SARS Virus
catgagtaaacgtaccacagacgtt

SEQ ID NO: 160826 - DNA, 25 bp, SARS Virus
atgagtaaacgttccacagacgttt

SEQ ID NO: 160827 - DNA, 25 bp, SARS Virus
tgagtaaacgtatcacagacgtttg

SEQ ID NO: 160828 - DNA, 25 bp, SARS Virus
gagtaaacgtactacagacgtttgt

SEQ ID NO: 160829 - DNA, 25 bp, SARS Virus
agtaaacgtacctcagacgtttgtc

SEQ ID NO: 160830 - DNA, 25 bp, SARS Virus
gtaaacgtaccatagacgtttgtcg

SEQ ID NO: 160831 - DNA, 25 bp, SARS Virus
taaacgtaccactgacgtttgtcgt

SEQ ID NO: 160832 - DNA, 25 bp, SARS Virus
aaacgtaccacatacgtttgtcgtg

SEQ ID NO: 160833 - DNA, 25 bp, SARS Virus
aacgtaccacagtcgtttgtcgtgg

SEQ ID NO: 160834 - DNA, 25 bp, SARS Virus
acgtaccacagatgtttgtcgtggt

SEQ ID NO: 160835 - DNA, 25 bp, SARS Virus
cgtaccacagacttttgtcgtggtg

SEQ ID NO: 160836 - DNA, 25 bp, SARS Virus
gtaccacagacgtttgtcgtggtgg

SEQ ID NO: 160837 - DNA, 25 bp, SARS Virus
taccacagacgtttgtcgtggtgga

SEQ ID NO: 160838 - DNA, 25 bp, SARS Virus
accacagacgtttgtcgtggtggat

SEQ ID NO: 160839 - DNA, 25 bp, SARS Virus
ccacagacgtttttcgtggtggatt

SEQ ID NO: 160840 - DNA, 25 bp, SARS Virus
cacagacgtttgtcgtggtggattt

SEQ ID NO: 160841 - DNA, 25 bp, SARS Virus
acagacgtttgttgtggtggattta

SEQ ID NO: 160842 - DNA, 25 bp, SARS Virus
cagacgtttgtcttggtggatttaa

SEQ ID NO: 160843 - DNA, 25 bp, SARS Virus
agacgtttgtcgtggtggatttaac

SEQ ID NO: 160844 - DNA, 25 bp, SARS Virus
gacgtttgtcgttgtggatttaacg

SEQ ID NO: 160845 - DNA, 25 bp, SARS Virus
acgtttgtcgtgttggatttaacgt

SEQ ID NO: 160846 - DNA, 25 bp, SARS Virus
cgtttgtcgtggtggatttaacgta

SEQ ID NO: 160847 - DNA, 25 bp, SARS Virus
gtttgtcgtggttgatttaacgtag

SEQ ID NO: 160848 - DNA, 25 bp, SARS Virus
tttgtcgtggtgtatttaacgtagc

SEQ ID NO: 160849 - DNA, 25 bp, SARS Virus
ttgtcgtggtggttttaacgtagca

SEQ ID NO: 160850 - DNA, 25 bp, SARS Virus
tgtcgtggtggatttaacgtagcac

SEQ ID NO: 160851 - DNA, 25 bp, SARS Virus
gtcgtggtggatttaacgtagcaca

SEQ ID NO: 160852 - DNA, 25 bp, SARS Virus
tcgtggtggatttaacgtagcacat

SEQ ID NO: 160853 - DNA, 25 bp, SARS Virus
cgtggtggattttacgtagcacatt

SEQ ID NO: 160854 - DNA, 25 bp, SARS Virus
gtggtggatttatcgtagcacatta

SEQ ID NO: 160855 - DNA, 25 bp, SARS Virus
tggtggatttaatgtagcacattat

SEQ ID NO: 160856 - DNA, 25 bp, SARS Virus
ggtggatttaacttagcacattatg

SEQ ID NO: 160857 - DNA, 25 bp, SARS Virus
gtggatttaacgtagcacattatgt

SEQ ID NO: 160858 - DNA, 25 bp, SARS Virus
tggatttaacgttgcacattatgtg

SEQ ID NO: 160859 - DNA, 25 bp, SARS Virus
ggatttaacgtatcacattatgtgc

SEQ ID NO: 160860 - DNA, 25 bp, SARS Virus
gatttaacgtagtacattatgtgca

SEQ ID NO: 160861 - DNA, 25 bp, SARS Virus
atttaacgtagctcattatgtgcat

SEQ ID NO: 160862 - DNA, 25 bp, SARS Virus
tttaacgtagcatattatgtgcatc

SEQ ID NO: 160863 - DNA, 25 bp, SARS Virus
ttaacgtagcactttatgtgcatcg

SEQ ID NO: 160864 - DNA, 25 bp, SARS Virus
taacgtagcacattatgtgcatcgt

SEQ ID NO: 160865 - DNA, 25 bp, SARS Virus
aacgtagcacattatgtgcatcgtc

SEQ ID NO: 160866 - DNA, 25 bp, SARS Virus
acgtagcacattttgtgcatcgtct

SEQ ID NO: 160867 - DNA, 25 bp, SARS Virus
cgtagcacattatgtgcatcgtcta

SEQ ID NO: 160868 - DNA, 25 bp, SARS Virus
gtagcacattatttgcatcgtctaa

SEQ ID NO: 160869 - DNA, 25 bp, SARS Virus
tagcacattatgtgcatcgtctaaa

SEQ ID NO: 160870 - DNA, 25 bp, SARS Virus
agcacattatgttcatcgtctaaac

SEQ ID NO: 160871 - DNA, 25 bp, SARS Virus
gcacattatgtgtatcgtctaaact

SEQ ID NO: 160872 - DNA, 25 bp, SARS Virus
cacattatgtgcttcgtctaaactc

SEQ ID NO: 160873 - DNA, 25 bp, SARS Virus
acattatgtgcatcgtctaaactca

SEQ ID NO: 160874 - DNA, 25 bp, SARS Virus
cattatgtgcattgtctaaactcac

SEQ ID NO: 160875 - DNA, 25 bp, SARS Virus
attatgtgcatcttctaaactcacc

SEQ ID NO: 160876 - DNA, 25 bp, SARS Virus
ttatgtgcatcgtctaaactcacct

SEQ ID NO: 160877 - DNA, 25 bp, SARS Virus
tatgtgcatcgtttaaactcacctt

SEQ ID NO: 160878 - DNA, 25 bp, SARS Virus
atgtgcatcgtctaaactcaccttg

SEQ ID NO: 160879 - DNA, 25 bp, SARS Virus
tgtgcatcgtcttaactcaccttgt

SEQ ID NO: 160880 - DNA, 25 bp, SARS Virus
gtgcatcgtctatactcaccttgta

SEQ ID NO: 160881 - DNA, 25 bp, SARS Virus
tgcatcgtctaatctcaccttgtat

SEQ ID NO: 160882 - DNA, 25 bp, SARS Virus
gcatcgtctaaattcaccttgtatt

SEQ ID NO: 160883 - DNA, 25 bp, SARS Virus
catcgtctaaactcaccttgtatta

SEQ ID NO: 160884 - DNA, 25 bp, SARS Virus
atcgtctaaacttaccttgtattag

SEQ ID NO: 160885 - DNA, 25 bp, SARS Virus
tcgtctaaactctccttgtattagt

SEQ ID NO: 160886 - DNA, 25 bp, SARS Virus
cgtctaaactcatcttgtattagtt

SEQ ID NO: 160887 - DNA, 25 bp, SARS Virus
gtctaaactcactttgtattagtta

SEQ ID NO: 160888 - DNA, 25 bp, SARS Virus
tctaaactcaccttgtattagttat

SEQ ID NO: 160889 - DNA, 25 bp, SARS Virus
ctaaactcaccttgtattagttata

SEQ ID NO: 160890 - DNA, 25 bp, SARS Virus
taaactcaccttttattagttatag

SEQ ID NO: 160891 - DNA, 25 bp, SARS Virus
aaactcaccttgtattagttatagg

SEQ ID NO: 160892 - DNA, 25 bp, SARS Virus
aactcaccttgttttagttataggc

SEQ ID NO: 160893 - DNA, 25 bp, SARS Virus
actcaccttgtattagttataggct

SEQ ID NO: 160894 - DNA, 25 bp, SARS Virus
ctcaccttgtattagttataggctg

SEQ ID NO: 160895 - DNA, 25 bp, SARS Virus
tcaccttgtatttgttataggctgt

SEQ ID NO: 160896 - DNA, 25 bp, SARS Virus
caccttgtattatttataggctgtg

SEQ ID NO: 160897 - DNA, 25 bp, SARS Virus
accttgtattagttataggctgtga

SEQ ID NO: 160898 - DNA, 25 bp, SARS Virus
ccttgtattagttataggctgtgat

SEQ ID NO: 160899 - DNA, 25 bp, SARS Virus
cttgtattagttttaggctgtgatg

SEQ ID NO: 160900 - DNA, 25 bp, SARS Virus
ttgtattagttataggctgtgatga

SEQ ID NO: 160901 - DNA, 25 bp, SARS Virus
tgtattagttattggctgtgatgaa

SEQ ID NO: 160902 - DNA, 25 bp, SARS Virus
gtattagttatatgctgtgatgaac

SEQ ID NO: 160903 - DNA, 25 bp, SARS Virus
tattagttatagtctgtgatgaaca

SEQ ID NO: 160904 - DNA, 25 bp, SARS Virus
attagttataggttgtgatgaacaa

SEQ ID NO: 160905 - DNA, 25 bp, SARS Virus
ttagttataggctgtgatgaacaaa

SEQ ID NO: 160906 - DNA, 25 bp, SARS Virus
tagttataggctttgatgaacaaac

SEQ ID NO: 160907 - DNA, 25 bp, SARS Virus
agttataggctgtgatgaacaaacg

SEQ ID NO: 160908 - DNA, 25 bp, SARS Virus
gttataggctgttatgaacaaacgg

SEQ ID NO: 160909 - DNA, 25 bp, SARS Virus
ttataggctgtgttgaacaaacggt

SEQ ID NO: 160910 - DNA, 25 bp, SARS Virus
tataggctgtgatgaacaaacggta

SEQ ID NO: 160911 - DNA, 25 bp, SARS Virus
ataggctgtgattaacaaacggtac

SEQ ID NO: 160912 - DNA, 25 bp, SARS Virus
taggctgtgatgtacaaacggtact

SEQ ID NO: 160913 - DNA, 25 bp, SARS Virus
aggctgtgatgatcaaacggtactc

SEQ ID NO: 160914 - DNA, 25 bp, SARS Virus
ggctgtgatgaataaacggtactct

SEQ ID NO: 160915 - DNA, 25 bp, SARS Virus
gctgtgatgaactaacggtactctg

SEQ ID NO: 160916 - DNA, 25 bp, SARS Virus
ctgtgatgaacatacggtactctga

SEQ ID NO: 160917 - DNA, 25 bp, SARS Virus
tgtgatgaacaatcggtactctgag

SEQ ID NO: 160918 - DNA, 25 bp, SARS Virus
gtgatgaacaaatggtactctgagt

SEQ ID NO: 160919 - DNA, 25 bp, SARS Virus
tgatgaacaaactgtactctgagtg

SEQ ID NO: 160920 - DNA, 25 bp, SARS Virus
gatgaacaaacgttactctgagtgt

SEQ ID NO: 160921 - DNA, 25 bp, SARS Virus
atgaacaaacggtactctgagtgtt

SEQ ID NO: 160922 - DNA, 25 bp, SARS Virus
tgaacaaacggttctctgagtgttc

SEQ ID NO: 160923 - DNA, 25 bp, SARS Virus
gaacaaacggtattctgagtgttcc

SEQ ID NO: 160924 - DNA, 25 bp, SARS Virus
aacaaacggtactctgagtgttcct

SEQ ID NO: 160925 - DNA, 25 bp, SARS Virus
acaaacggtactttgagtgttcctg

SEQ ID NO: 160926 - DNA, 25 bp, SARS Virus
caaacggtactctgagtgttcctga

SEQ ID NO: 160927 - DNA, 25 bp, SARS Virus
aaacggtactcttagtgttcctgat

SEQ ID NO: 160928 - DNA, 25 bp, SARS Virus
aacggtactctgtgtgttcctgata

SEQ ID NO: 160929 - DNA, 25 bp, SARS Virus
acggtactctgattgttcctgatag

SEQ ID NO: 160930 - DNA, 25 bp, SARS Virus
cggtactctgagtgttcctgatagt

SEQ ID NO: 160931 - DNA, 25 bp, SARS Virus
ggtactctgagttttcctgatagtc

SEQ ID NO: 160932 - DNA, 25 bp, SARS Virus
gtactctgagtgttcctgatagtct

SEQ ID NO: 160933 - DNA, 25 bp, SARS Virus
tactctgagtgttcctgatagtctt

SEQ ID NO: 160934 - DNA, 25 bp, SARS Virus
actctgagtgtttctgatagtctta

SEQ ID NO: 160935 - DNA, 25 bp, SARS Virus
ctctgagtgttcttgatagtcttat

SEQ ID NO: 160936 - DNA, 25 bp, SARS Virus
tctgagtgttcctgatagtcttatc

SEQ ID NO: 160937 - DNA, 25 bp, SARS Virus
ctgagtgttccttatagtcttatca

SEQ ID NO: 160938 - DNA, 25 bp, SARS Virus
tgagtgttcctgttagtcttatcat

SEQ ID NO: 160939 - DNA, 25 bp, SARS Virus
gagtgttcctgatagtcttatcatt

SEQ ID NO: 160940 - DNA, 25 bp, SARS Virus
agtgttcctgattgtcttatcattt

SEQ ID NO: 160941 - DNA, 25 bp, SARS Virus
gtgttcctgatattcttatcatttt

SEQ ID NO: 160942 - DNA, 25 bp, SARS Virus
tgttcctgatagtcttatcattttc

SEQ ID NO: 160943 - DNA, 25 bp, SARS Virus
gttcctgatagttttatcattttct

SEQ ID NO: 160944 - DNA, 25 bp, SARS Virus
ttcctgatagtcttatcattttctt

SEQ ID NO: 160945 - DNA, 25 bp, SARS Virus
tcctgatagtcttatcattttcttt

SEQ ID NO: 160946 - DNA, 25 bp, SARS Virus
cctgatagtcttttcattttctttc

SEQ ID NO: 160947 - DNA, 25 bp, SARS Virus
ctgatagtcttatcattttctttcc

SEQ ID NO: 160948 - DNA, 25 bp, SARS Virus
tgatagtcttattattttctttccg

SEQ ID NO: 160949 - DNA, 25 bp, SARS Virus
gatagtcttatctttttctttccgt

SEQ ID NO: 160950 - DNA, 25 bp, SARS Virus
atagtcttatcattttctttccgtt

SEQ ID NO: 160951 - DNA, 25 bp, SARS Virus
tagtcttatcattttctttccgtta

SEQ ID NO: 160952 - DNA, 25 bp, SARS Virus
agtcttatcattttctttccgttaa

SEQ ID NO: 160953 - DNA, 25 bp, SARS Virus
gtcttatcattttctttccgttaac

SEQ ID NO: 160954 - DNA, 25 bp, SARS Virus
tcttatcattttttttccgttaacg

SEQ ID NO: 160955 - DNA, 25 bp, SARS Virus
cttatcattttctttccgttaacga

SEQ ID NO: 160956 - DNA, 25 bp, SARS Virus
ttatcattttctttccgttaacgaa

SEQ ID NO: 160957 - DNA, 25 bp, SARS Virus
tatcattttctttccgttaacgaaa

SEQ ID NO: 160958 - DNA, 25 bp, SARS Virus
atcattttcttttcgttaacgaaat

SEQ ID NO: 160959 - DNA, 25 bp, SARS Virus
tcattttctttctgttaacgaaatt

SEQ ID NO: 160960 - DNA, 25 bp, SARS Virus
cattttctttcctttaacgaaattt

SEQ ID NO: 160961 - DNA, 25 bp, SARS Virus
attttctttccgttaacgaaattta

SEQ ID NO: 160962 - DNA, 25 bp, SARS Virus
ttttctttccgttaacgaaatttaa

SEQ ID NO: 160963 - DNA, 25 bp, SARS Virus
tttctttccgtttacgaaatttaat

SEQ ID NO: 160964 - DNA, 25 bp, SARS Virus
ttctttccgttatcgaaatttaatc

SEQ ID NO: 160965 - DNA, 25 bp, SARS Virus
tctttccgttaatgaaatttaatca

SEQ ID NO: 160966 - DNA, 25 bp, SARS Virus
ctttccgttaactaaatttaatcat

SEQ ID NO: 160967 - DNA, 25 bp, SARS Virus
tttccgttaacgtaatttaatcatt

SEQ ID NO: 160968 - DNA, 25 bp, SARS Virus
ttccgttaacgatatttaatcattt

SEQ ID NO: 160969 - DNA, 25 bp, SARS Virus
tccgttaacgaattttaatcattta

SEQ ID NO: 160970 - DNA, 25 bp, SARS Virus
ccgttaacgaaatttaatcatttac

SEQ ID NO: 160971 - DNA, 25 bp, SARS Virus
cgttaacgaaatttaatcatttacg

SEQ ID NO: 160972 - DNA, 25 bp, SARS Virus
gttaacgaaatttaatcatttacgt

SEQ ID NO: 160973 - DNA, 25 bp, SARS Virus
ttaacgaaattttatcatttacgtg

SEQ ID NO: 160974 - DNA, 25 bp, SARS Virus
taacgaaatttattcatttacgtga

SEQ ID NO: 160975 - DNA, 25 bp, SARS Virus
aacgaaatttaatcatttacgtgaa

SEQ ID NO: 160976 - DNA, 25 bp, SARS Virus
acgaaatttaattatttacgtgaaa

SEQ ID NO: 160977 - DNA, 25 bp, SARS Virus
cgaaatttaatcttttacgtgaaaa

SEQ ID NO: 160978 - DNA, 25 bp, SARS Virus
gaaatttaatcatttacgtgaaaat

SEQ ID NO: 160979 - DNA, 25 bp, SARS Virus
aaatttaatcatttacgtgaaaata

SEQ ID NO: 160980 - DNA, 25 bp, SARS Virus
aatttaatcatttacgtgaaaatag

SEQ ID NO: 160981 - DNA, 25 bp, SARS Virus
atttaatcattttcgtgaaaatagc

SEQ ID NO: 160982 - DNA, 25 bp, SARS Virus
tttaatcatttatgtgaaaatagct

SEQ ID NO: 160983 - DNA, 25 bp, SARS Virus
ttaatcatttacttgaaaatagctt

SEQ ID NO: 160984 - DNA, 25 bp, SARS Virus
taatcatttacgtgaaaatagcttt

SEQ ID NO: 160985 - DNA, 25 bp, SARS Virus
aatcatttacgttaaaatagctttc

SEQ ID NO: 160986 - DNA, 25 bp, SARS Virus
atcatttacgtgtaaatagctttcg

SEQ ID NO: 160987 - DNA, 25 bp, SARS Virus
tcatttacgtgataatagctttcga

SEQ ID NO: 160988 - DNA, 25 bp, SARS Virus
catttacgtgaatatagctttcgac

SEQ ID NO: 160989 - DNA, 25 bp, SARS Virus
atttacgtgaaattagctttcgacc

SEQ ID NO: 160990 - DNA, 25 bp, SARS Virus
tttacgtgaaaatagctttcgacct

SEQ ID NO: 160991 - DNA, 25 bp, SARS Virus
ttacgtgaaaattgctttcgacctc

SEQ ID NO: 160992 - DNA, 25 bp, SARS Virus
tacgtgaaaatatctttcgacctca

SEQ ID NO: 160993 - DNA, 25 bp, SARS Virus
acgtgaaaatagttttcgacctcac

SEQ ID NO: 160994 - DNA, 25 bp, SARS Virus
cgtgaaaatagctttcgacctcaca

SEQ ID NO: 160995 - DNA, 25 bp, SARS Virus
gtgaaaatagctttcgacctcacac

SEQ ID NO: 160996 - DNA, 25 bp, SARS Virus
tgaaaatagctttcgacctcacacc

SEQ ID NO: 160997 - DNA, 25 bp, SARS Virus
gaaaatagcttttgacctcacacct

SEQ ID NO: 160998 - DNA, 25 bp, SARS Virus
aaaatagctttctacctcacacctt

SEQ ID NO: 160999 - DNA, 25 bp, SARS Virus
aaatagctttcgtcctcacacctta

SEQ ID NO: 161000 - DNA, 25 bp, SARS Virus
aatagctttcgatctcacaccttac

SEQ ID NO: 161001 - DNA, 25 bp, SARS Virus
atagctttcgacttcacaccttacg

SEQ ID NO: 161002 - DNA, 25 bp, SARS Virus
tagctttcgacctcacaccttacgt

SEQ ID NO: 161003 - DNA, 25 bp, SARS Virus
agctttcgaccttacaccttacgta

SEQ ID NO: 161004 - DNA, 25 bp, SARS Virus
gctttcgacctctcaccttacgtac

SEQ ID NO: 161005 - DNA, 25 bp, SARS Virus
ctttcgacctcataccttacgtacg

SEQ ID NO: 161006 - DNA, 25 bp, SARS Virus
tttcgacctcactccttacgtacga

SEQ ID NO: 161007 - DNA, 25 bp, SARS Virus
ttcgacctcacatcttacgtacgaa

SEQ ID NO: 161008 - DNA, 25 bp, SARS Virus
tcgacctcacactttacgtacgaat

SEQ ID NO: 161009 - DNA, 25 bp, SARS Virus
cgacctcacaccttacgtacgaata

SEQ ID NO: 161010 - DNA, 25 bp, SARS Virus
gacctcacaccttacgtacgaataa

SEQ ID NO: 161011 - DNA, 25 bp, SARS Virus
acctcacacctttcgtacgaataag

SEQ ID NO: 161012 - DNA, 25 bp, SARS Virus
cctcacaccttatgtacgaataagt

SEQ ID NO: 161013 - DNA, 25 bp, SARS Virus
ctcacaccttacttacgaataagtg

SEQ ID NO: 161014 - DNA, 25 bp, SARS Virus
tcacaccttacgtacgaataagtgt

SEQ ID NO: 161015 - DNA, 25 bp, SARS Virus
cacaccttacgttcgaataagtgta

SEQ ID NO: 161016 - DNA, 25 bp, SARS Virus
acaccttacgtatgaataagtgtat

SEQ ID NO: 161017 - DNA, 25 bp, SARS Virus
caccttacgtactaataagtgtatg

SEQ ID NO: 161018 - DNA, 25 bp, SARS Virus
accttacgtacgtataagtgtatgt

SEQ ID NO: 161019 - DNA, 25 bp, SARS Virus
ccttacgtacgattaagtgtatgtt

SEQ ID NO: 161020 - DNA, 25 bp, SARS Virus
cttacgtacgaataagtgtatgttt

SEQ ID NO: 161021 - DNA, 25 bp, SARS Virus
ttacgtacgaattagtgtatgtttg

SEQ ID NO: 161022 - DNA, 25 bp, SARS Virus
tacgtacgaatatgtgtatgtttga

SEQ ID NO: 161023 - DNA, 25 bp, SARS Virus
acgtacgaataattgtatgtttgat

SEQ ID NO: 161024 - DNA, 25 bp, SARS Virus
cgtacgaataagtgtatgtttgatg

SEQ ID NO: 161025 - DNA, 25 bp, SARS Virus
gtacgaataagtttatgtttgatgg

SEQ ID NO: 161026 - DNA, 25 bp, SARS Virus
tacgaataagtgtatgtttgatggt

SEQ ID NO: 161027 - DNA, 25 bp, SARS Virus
acgaataagtgtttgtttgatggtg

SEQ ID NO: 161028 - DNA, 25 bp, SARS Virus
cgaataagtgtatgtttgatggtgg

SEQ ID NO: 161029 - DNA, 25 bp, SARS Virus
gaataagtgtatttttgatggtggt

SEQ ID NO: 161030 - DNA, 25 bp, SARS Virus
aataagtgtatgtttgatggtggta

SEQ ID NO: 161031 - DNA, 25 bp, SARS Virus
ataagtgtatgtttgatggtggtag

SEQ ID NO: 161032 - DNA, 25 bp, SARS Virus
taagtgtatgtttgatggtggtagt

SEQ ID NO: 161033 - DNA, 25 bp, SARS Virus
aagtgtatgttttatggtggtagtg

SEQ ID NO: 161034 - DNA, 25 bp, SARS Virus
agtgtatgtttgttggtggtagtgt

SEQ ID NO: 161035 - DNA, 25 bp, SARS Virus
gtgtatgtttgatggtggtagtgtc

SEQ ID NO: 161036 - DNA, 25 bp, SARS Virus
tgtatgtttgattgtggtagtgtcg

SEQ ID NO: 161037 - DNA, 25 bp, SARS Virus
gtatgtttgatgttggtagtgtcgg

SEQ ID NO: 161038 - DNA, 25 bp, SARS Virus
tatgtttgatggtggtagtgtcgga

SEQ ID NO: 161039 - DNA, 25 bp, SARS Virus
atgtttgatggttgtagtgtcggac

SEQ ID NO: 161040 - DNA, 25 bp, SARS Virus
tgtttgatggtgttagtgtcggacc

SEQ ID NO: 161041 - DNA, 25 bp, SARS Virus
gtttgatggtggtagtgtcggacca

SEQ ID NO: 161042 - DNA, 25 bp, SARS Virus
tttgatggtggttgtgtcggaccat

SEQ ID NO: 161043 - DNA, 25 bp, SARS Virus
ttgatggtggtattgtcggaccatt

SEQ ID NO: 161044 - DNA, 25 bp, SARS Virus
tgatggtggtagtgtcggaccattc

SEQ ID NO: 161045 - DNA, 25 bp, SARS Virus
gatggtggtagtttcggaccattca

SEQ ID NO: 161046 - DNA, 25 bp, SARS Virus
atggtggtagtgtcggaccattcaa

SEQ ID NO: 161047 - DNA, 25 bp, SARS Virus
tggtggtagtgttggaccattcaag

SEQ ID NO: 161048 - DNA, 25 bp, SARS Virus
ggtggtagtgtctgaccattcaagt

SEQ ID NO: 161049 - DNA, 25 bp, SARS Virus
gtggtagtgtcgtaccattcaagtt

SEQ ID NO: 161050 - DNA, 25 bp, SARS Virus
tggtagtgtcggtccattcaagttc

SEQ ID NO: 161051 - DNA, 25 bp, SARS Virus
ggtagtgtcggatcattcaagttca

SEQ ID NO: 161052 - DNA, 25 bp, SARS Virus
gtagtgtcggactattcaagttcaa

SEQ ID NO: 161053 - DNA, 25 bp, SARS Virus
tagtgtcggacctttcaagttcaaa

SEQ ID NO: 161054 - DNA, 25 bp, SARS Virus
agtgtcggaccattcaagttcaaac

SEQ ID NO: 161055 - DNA, 25 bp, SARS Virus
gtgtcggaccattcaagttcaaact

SEQ ID NO: 161056 - DNA, 25 bp, SARS Virus
tgtcggaccatttaagttcaaactg

SEQ ID NO: 161057 - DNA, 25 bp, SARS Virus
gtcggaccattctagttcaaactgt

SEQ ID NO: 161058 - DNA, 25 bp, SARS Virus
tcggaccattcatgttcaaactgtt

SEQ ID NO: 161059 - DNA, 25 bp, SARS Virus
cggaccattcaatttcaaactgttc

SEQ ID NO: 161060 - DNA, 25 bp, SARS Virus
ggaccattcaagttcaaactgttct

SEQ ID NO: 161061 - DNA, 25 bp, SARS Virus
gaccattcaagttcaaactgttctg

SEQ ID NO: 161062 - DNA, 25 bp, SARS Virus
accattcaagtttaaactgttctga

SEQ ID NO: 161063 - DNA, 25 bp, SARS Virus
ccattcaagttctaactgttctgag

SEQ ID NO: 161064 - DNA, 25 bp, SARS Virus
cattcaagttcatactgttctgaga

SEQ ID NO: 161065 - DNA, 25 bp, SARS Virus
attcaagttcaatctgttctgagaa

SEQ ID NO: 161066 - DNA, 25 bp, SARS Virus
ttcaagttcaaattgttctgagaac

SEQ ID NO: 161067 - DNA, 25 bp, SARS Virus
tcaagttcaaactgttctgagaaca

SEQ ID NO: 161068 - DNA, 25 bp, SARS Virus
caagttcaaacttttctgagaacac

SEQ ID NO: 161069 - DNA, 25 bp, SARS Virus
aagttcaaactgttctgagaacaca

SEQ ID NO: 161070 - DNA, 25 bp, SARS Virus
agttcaaactgttctgagaacacag

SEQ ID NO: 161071 - DNA, 25 bp, SARS Virus
gttcaaactgttttgagaacacagt

SEQ ID NO: 161072 - DNA, 25 bp, SARS Virus
ttcaaactgttctgagaacacagtt

SEQ ID NO: 161073 - DNA, 25 bp, SARS Virus
tcaaactgttctaagaacacagttt

SEQ ID NO: 161074 - DNA, 25 bp, SARS Virus
caaactgttctgagaacacagtttg

SEQ ID NO: 161075 - DNA, 25 bp, SARS Virus
aaactgttctgaaaacacagtttgg

SEQ ID NO: 161076 - DNA, 25 bp, SARS Virus
aactgttctgagaacacagtttgga

SEQ ID NO: 161077 - DNA, 25 bp, SARS Virus
actgttctgagaacacagtttggat

SEQ ID NO: 161078 - DNA, 25 bp, SARS Virus
ctgttctgagaaaacagtttggatg

SEQ ID NO: 161079 - DNA, 25 bp, SARS Virus
tgttctgagaacacagtttggatgt

SEQ ID NO: 161080 - DNA, 25 bp, SARS Virus
gttctgagaacaaagtttggatgtg

SEQ ID NO: 161081 - DNA, 25 bp, SARS Virus
ttctgagaacacagtttggatgtgt

SEQ ID NO: 161082 - DNA, 25 bp, SARS Virus
tctgagaacacaatttggatgtgtg

SEQ ID NO: 161083 - DNA, 25 bp, SARS Virus
ctgagaacacagattggatgtgtgt

SEQ ID NO: 161084 - DNA, 25 bp, SARS Virus
tgagaacacagtatggatgtgtgtt

SEQ ID NO: 161085 - DNA, 25 bp, SARS Virus
gagaacacagttaggatgtgtgtta

SEQ ID NO: 161086 - DNA, 25 bp, SARS Virus
agaacacagtttagatgtgtgttaa

SEQ ID NO: 161087 - DNA, 25 bp, SARS Virus
gaacacagtttgaatgtgtgttaac

SEQ ID NO: 161088 - DNA, 25 bp, SARS Virus
aacacagtttggatgtgtgttaacg

SEQ ID NO: 161089 - DNA, 25 bp, SARS Virus
acacagtttggaagtgtgttaacgt

SEQ ID NO: 161090 - DNA, 25 bp, SARS Virus
cacagtttggatatgtgttaacgta

SEQ ID NO: 161091 - DNA, 25 bp, SARS Virus
acagtttggatgagtgttaacgtaa

SEQ ID NO: 161092 - DNA, 25 bp, SARS Virus
cagtttggatgtatgttaacgtaac

SEQ ID NO: 161093 - DNA, 25 bp, SARS Virus
agtttggatgtgagttaacgtaacc

SEQ ID NO: 161094 - DNA, 25 bp, SARS Virus
gtttggatgtgtattaacgtaaccg

SEQ ID NO: 161095 - DNA, 25 bp, SARS Virus
tttggatgtgtgataacgtaaccga

SEQ ID NO: 161096 - DNA, 25 bp, SARS Virus
ttggatgtgtgtaaacgtaaccgac

SEQ ID NO: 161097 - DNA, 25 bp, SARS Virus
tggatgtgtgttaacgtaaccgacc

SEQ ID NO: 161098 - DNA, 25 bp, SARS Virus
ggatgtgtgttaacgtaaccgaccc

SEQ ID NO: 161099 - DNA, 25 bp, SARS Virus
gatgtgtgttaaagtaaccgaccca

SEQ ID NO: 161100 - DNA, 25 bp, SARS Virus
atgtgtgttaacataaccgacccat

SEQ ID NO: 161101 - DNA, 25 bp, SARS Virus
tgtgtgttaacgaaaccgacccatt

SEQ ID NO: 161102 - DNA, 25 bp, SARS Virus
gtgtgttaacgtaaccgacccattg

SEQ ID NO: 161103 - DNA, 25 bp, SARS Virus
tgtgttaacgtaaccgacccattgc

SEQ ID NO: 161104 - DNA, 25 bp, SARS Virus
gtgttaacgtaaacgacccattgct

SEQ ID NO: 161105 - DNA, 25 bp, SARS Virus
tgttaacgtaacagacccattgcta

SEQ ID NO: 161106 - DNA, 25 bp, SARS Virus
gttaacgtaaccaacccattgctag

SEQ ID NO: 161107 - DNA, 25 bp, SARS Virus
ttaacgtaaccgacccattgctagt

SEQ ID NO: 161108 - DNA, 25 bp, SARS Virus
taacgtaaccgaaccattgctagtt

SEQ ID NO: 161109 - DNA, 25 bp, SARS Virus
aacgtaaccgacacattgctagttg

SEQ ID NO: 161110 - DNA, 25 bp, SARS Virus
acgtaaccgaccaattgctagttgc

SEQ ID NO: 161111 - DNA, 25 bp, SARS Virus
cgtaaccgacccattgctagttgca

SEQ ID NO: 161112 - DNA, 25 bp, SARS Virus
gtaaccgacccaatgctagttgcaa

SEQ ID NO: 161113 - DNA, 25 bp, SARS Virus
taaccgacccatagctagttgcaat

SEQ ID NO: 161114 - DNA, 25 bp, SARS Virus
aaccgacccattactagttgcaatg

SEQ ID NO: 161115 - DNA, 25 bp, SARS Virus
accgacccattgatagttgcaatgt

SEQ ID NO: 161116 - DNA, 25 bp, SARS Virus
ccgacccattgcaagttgcaatgtt

SEQ ID NO: 161117 - DNA, 25 bp, SARS Virus
cgacccattgctagttgcaatgtta

SEQ ID NO: 161118 - DNA, 25 bp, SARS Virus
gacccattgctaattgcaatgttaa

SEQ ID NO: 161119 - DNA, 25 bp, SARS Virus
acccattgctagatgcaatgttaag

SEQ ID NO: 161120 - DNA, 25 bp, SARS Virus
cccattgctagtagcaatgttaagg

SEQ ID NO: 161121 - DNA, 25 bp, SARS Virus
ccattgctagttacaatgttaaggt

SEQ ID NO: 161122 - DNA, 25 bp, SARS Virus
cattgctagttgaaatgttaaggtt

SEQ ID NO: 161123 - DNA, 25 bp, SARS Virus
attgctagttgcaatgttaaggttt

SEQ ID NO: 161124 - DNA, 25 bp, SARS Virus
ttgctagttgcaatgttaaggtttt

SEQ ID NO: 161125 - DNA, 25 bp, SARS Virus
tgctagttgcaaagttaaggttttg

SEQ ID NO: 161126 - DNA, 25 bp, SARS Virus
gctagttgcaatattaaggttttgt

SEQ ID NO: 161127 - DNA, 25 bp, SARS Virus
ctagttgcaatgataaggttttgtt

SEQ ID NO: 161128 - DNA, 25 bp, SARS Virus
tagttgcaatgtaaaggttttgttt

SEQ ID NO: 161129 - DNA, 25 bp, SARS Virus
agttgcaatgttaaggttttgtttg

SEQ ID NO: 161130 - DNA, 25 bp, SARS Virus
gttgcaatgttaaggttttgtttgt

SEQ ID NO: 161131 - DNA, 25 bp, SARS Virus
ttgcaatgttaaagttttgtttgtt

SEQ ID NO: 161132 - DNA, 25 bp, SARS Virus
tgcaatgttaagattttgtttgttt

SEQ ID NO: 161133 - DNA, 25 bp, SARS Virus
gcaatgttaaggatttgtttgtttg

SEQ ID NO: 161134 - DNA, 25 bp, SARS Virus
caatgttaaggtattgtttgtttgt

SEQ ID NO: 161135 - DNA, 25 bp, SARS Virus
aatgttaaggttatgtttgtttgtg

SEQ ID NO: 161136 - DNA, 25 bp, SARS Virus
atgttaaggtttagtttgtttgtgg

SEQ ID NO: 161137 - DNA, 25 bp, SARS Virus
tgttaaggttttatttgtttgtggt

SEQ ID NO: 161138 - DNA, 25 bp, SARS Virus
gttaaggttttgattgtttgtggta

SEQ ID NO: 161139 - DNA, 25 bp, SARS Virus
ttaaggttttgtatgtttgtggtag

SEQ ID NO: 161140 - DNA, 25 bp, SARS Virus
taaggttttgttagtttgtggtagt

SEQ ID NO: 161141 - DNA, 25 bp, SARS Virus
aaggttttgtttatttgtggtagtc

SEQ ID NO: 161142 - DNA, 25 bp, SARS Virus
aggttttgtttgattgtggtagtca

SEQ ID NO: 161143 - DNA, 25 bp, SARS Virus
ggttttgtttgtatgtggtagtcac

SEQ ID NO: 161144 - DNA, 25 bp, SARS Virus
gttttgtttgttagtggtagtcact

SEQ ID NO: 161145 - DNA, 25 bp, SARS Virus
ttttgtttgtttatggtagtcactt

SEQ ID NO: 161146 - DNA, 25 bp, SARS Virus
tttgtttgtttgaggtagtcactta

SEQ ID NO: 161147 - DNA, 25 bp, SARS Virus
ttgtttgtttgtagtagtcacttaa

SEQ ID NO: 161148 - DNA, 25 bp, SARS Virus
tgtttgtttgtgatagtcacttaaa

SEQ ID NO: 161149 - DNA, 25 bp, SARS Virus
gtttgtttgtggaagtcacttaaat

SEQ ID NO: 161150 - DNA, 25 bp, SARS Virus
tttgtttgtggtagtcacttaaata

SEQ ID NO: 161151 - DNA, 25 bp, SARS Virus
ttgtttgtggtaatcacttaaatag

SEQ ID NO: 161152 - DNA, 25 bp, SARS Virus
tgtttgtggtagacacttaaatagc

SEQ ID NO: 161153 - DNA, 25 bp, SARS Virus
gtttgtggtagtaacttaaatagca

SEQ ID NO: 161154 - DNA, 25 bp, SARS Virus
tttgtggtagtcacttaaatagcac

SEQ ID NO: 161155 - DNA, 25 bp, SARS Virus
ttgtggtagtcaattaaatagcact

SEQ ID NO: 161156 - DNA, 25 bp, SARS Virus
tgtggtagtcacataaatagcacta

SEQ ID NO: 161157 - DNA, 25 bp, SARS Virus
gtggtagtcactaaaatagcactac

SEQ ID NO: 161158 - DNA, 25 bp, SARS Virus
tggtagtcacttaaatagcactaca

SEQ ID NO: 161159 - DNA, 25 bp, SARS Virus
ggtagtcacttaaatagcactacac

SEQ ID NO: 161160 - DNA, 25 bp, SARS Virus
gtagtcacttaaatagcactacaca

SEQ ID NO: 161161 - DNA, 25 bp, SARS Virus
tagtcacttaaaaagcactacacat

SEQ ID NO: 161162 - DNA, 25 bp, SARS Virus
agtcacttaaatagcactacacatc

SEQ ID NO: 161163 - DNA, 25 bp, SARS Virus
gtcacttaaataacactacacatcg

SEQ ID NO: 161164 - DNA, 25 bp, SARS Virus
tcacttaaatagaactacacatcgt

SEQ ID NO: 161165 - DNA, 25 bp, SARS Virus
cacttaaatagcactacacatcgta

SEQ ID NO: 161166 - DNA, 25 bp, SARS Virus
acttaaatagcaatacacatcgtat

SEQ ID NO: 161167 - DNA, 25 bp, SARS Virus
cttaaatagcacaacacatcgtatt

SEQ ID NO: 161168 - DNA, 25 bp, SARS Virus
ttaaatagcactacacatcgtattc

SEQ ID NO: 161169 - DNA, 25 bp, SARS Virus
taaatagcactaaacatcgtattct

SEQ ID NO: 161170 - DNA, 25 bp, SARS Virus
aaatagcactacacatcgtattctt

SEQ ID NO: 161171 - DNA, 25 bp, SARS Virus
aatagcactacaaatcgtattctta

SEQ ID NO: 161172 - DNA, 25 bp, SARS Virus
atagcactacacatcgtattcttat

SEQ ID NO: 161173 - DNA, 25 bp, SARS Virus
tagcactacacaacgtattcttatc

SEQ ID NO: 161174 - DNA, 25 bp, SARS Virus
agcactacacatagtattcttatct

SEQ ID NO: 161175 - DNA, 25 bp, SARS Virus
gcactacacatcatattcttatctt

SEQ ID NO: 161176 - DNA, 25 bp, SARS Virus
cactacacatcgaattcttatcttc

SEQ ID NO: 161177 - DNA, 25 bp, SARS Virus
actacacatcgtattcttatcttct

SEQ ID NO: 161178 - DNA, 25 bp, SARS Virus
ctacacatcgtaatcttatcttctc

SEQ ID NO: 161179 - DNA, 25 bp, SARS Virus
tacacatcgtatacttatcttctca

SEQ ID NO: 161180 - DNA, 25 bp, SARS Virus
acacatcgtattattatcttctcaa

SEQ ID NO: 161181 - DNA, 25 bp, SARS Virus
cacatcgtattcatatcttctcaag

SEQ ID NO: 161182 - DNA, 25 bp, SARS Virus
acatcgtattctaatcttctcaagg

SEQ ID NO: 161183 - DNA, 25 bp, SARS Virus
catcgtattcttatcttctcaagga

SEQ ID NO: 161184 - DNA, 25 bp, SARS Virus
atcgtattcttaacttctcaaggag

SEQ ID NO: 161185 - DNA, 25 bp, SARS Virus
tcgtattcttatattctcaaggaga

SEQ ID NO: 161186 - DNA, 25 bp, SARS Virus
cgtattcttatcatctcaaggagat

SEQ ID NO: 161187 - DNA, 25 bp, SARS Virus
gtattcttatctactcaaggagata

SEQ ID NO: 161188 - DNA, 25 bp, SARS Virus
tattcttatcttatcaaggagataa

SEQ ID NO: 161189 - DNA, 25 bp, SARS Virus
attcttatcttcacaaggagataaa

SEQ ID NO: 161190 - DNA, 25 bp, SARS Virus
ttcttatcttctaaaggagataaaa

SEQ ID NO: 161191 - DNA, 25 bp, SARS Virus
tcttatcttctcaaggagataaaac

SEQ ID NO: 161192 - DNA, 25 bp, SARS Virus
cttatcttctcaaggagataaaaca

SEQ ID NO: 161193 - DNA, 25 bp, SARS Virus
ttatcttctcaaagagataaaacat

SEQ ID NO: 161194 - DNA, 25 bp, SARS Virus
tatcttctcaagaagataaaacatt

SEQ ID NO: 161195 - DNA, 25 bp, SARS Virus
atcttctcaaggagataaaacattc

SEQ ID NO: 161196 - DNA, 25 bp, SARS Virus
tcttctcaaggaaataaaacattcg

SEQ ID NO: 161197 - DNA, 25 bp, SARS Virus
cttctcaaggagataaaacattcga

SEQ ID NO: 161198 - DNA, 25 bp, SARS Virus
ttctcaaggagaaaaaacattcgaa

SEQ ID NO: 161199 - DNA, 25 bp, SARS Virus
tctcaaggagataaaacattcgaaa

SEQ ID NO: 161200 - DNA, 25 bp, SARS Virus
ctcaaggagataaaacattcgaaac

SEQ ID NO: 161201 - DNA, 25 bp, SARS Virus
tcaaggagataaaacattcgaaaca

SEQ ID NO: 161202 - DNA, 25 bp, SARS Virus
caaggagataaaacattcgaaacag

SEQ ID NO: 161203 - DNA, 25 bp, SARS Virus
aaggagataaaaaattcgaaacagt

SEQ ID NO: 161204 - DNA, 25 bp, SARS Virus
aggagataaaacattcgaaacagtg

SEQ ID NO: 161205 - DNA, 25 bp, SARS Virus
ggagataaaacaatcgaaacagtga

SEQ ID NO: 161206 - DNA, 25 bp, SARS Virus
gagataaaacatacgaaacagtgat

SEQ ID NO: 161207 - DNA, 25 bp, SARS Virus
agataaaacattagaaacagtgatg

SEQ ID NO: 161208 - DNA, 25 bp, SARS Virus
gataaaacattcaaaacagtgatgt

SEQ ID NO: 161209 - DNA, 25 bp, SARS Virus
ataaaacattcgaaacagtgatgta

SEQ ID NO: 161210 - DNA, 25 bp, SARS Virus
taaaacattcgaaacagtgatgtac

SEQ ID NO: 161211 - DNA, 25 bp, SARS Virus
aaaacattcgaaacagtgatgtacc

SEQ ID NO: 161212 - DNA, 25 bp, SARS Virus
aaacattcgaaaaagtgatgtaccg

SEQ ID NO: 161213 - DNA, 25 bp, SARS Virus
aacattcgaaacagtgatgtaccga

SEQ ID NO: 161214 - DNA, 25 bp, SARS Virus
acattcgaaacaatgatgtaccgac

SEQ ID NO: 161215 - DNA, 25 bp, SARS Virus
cattcgaaacagagatgtaccgact

SEQ ID NO: 161216 - DNA, 25 bp, SARS Virus
attcgaaacagtaatgtaccgactc

SEQ ID NO: 161217 - DNA, 25 bp, SARS Virus
ttcgaaacagtgatgtaccgactcg

SEQ ID NO: 161218 - DNA, 25 bp, SARS Virus
tcgaaacagtgaagtaccgactcgt

SEQ ID NO: 161219 - DNA, 25 bp, SARS Virus
cgaaacagtgatataccgactcgta

SEQ ID NO: 161220 - DNA, 25 bp, SARS Virus
gaaacagtgatgaaccgactcgtag

SEQ ID NO: 161221 - DNA, 25 bp, SARS Virus
aaacagtgatgtaccgactcgtagc

SEQ ID NO: 161222 - DNA, 25 bp, SARS Virus
aacagtgatgtaacgactcgtagca

SEQ ID NO: 161223 - DNA, 25 bp, SARS Virus
acagtgatgtacagactcgtagcat

SEQ ID NO: 161224 - DNA, 25 bp, SARS Virus
cagtgatgtaccaactcgtagcatc

SEQ ID NO: 161225 - DNA, 25 bp, SARS Virus
agtgatgtaccgactcgtagcatct

SEQ ID NO: 161226 - DNA, 25 bp, SARS Virus
gtgatgtaccgaatcgtagcatctt

SEQ ID NO: 161227 - DNA, 25 bp, SARS Virus
tgatgtaccgacacgtagcatcttg

SEQ ID NO: 161228 - DNA, 25 bp, SARS Virus
gatgtaccgactagtagcatcttga

SEQ ID NO: 161229 - DNA, 25 bp, SARS Virus
atgtaccgactcatagcatcttgaa

SEQ ID NO: 161230 - DNA, 25 bp, SARS Virus
tgtaccgactcgaagcatcttgaag

SEQ ID NO: 161231 - DNA, 25 bp, SARS Virus
gtaccgactcgtagcatcttgaagg

SEQ ID NO: 161232 - DNA, 25 bp, SARS Virus
taccgactcgtaacatcttgaaggt

SEQ ID NO: 161233 - DNA, 25 bp, SARS Virus
accgactcgtagaatcttgaaggta

SEQ ID NO: 161234 - DNA, 25 bp, SARS Virus
ccgactcgtagcatcttgaaggtaa

SEQ ID NO: 161235 - DNA, 25 bp, SARS Virus
cgactcgtagcaacttgaaggtaag

SEQ ID NO: 161236 - DNA, 25 bp, SARS Virus
gactcgtagcatattgaaggtaaga

SEQ ID NO: 161237 - DNA, 25 bp, SARS Virus
actcgtagcatcatgaaggtaagat

SEQ ID NO: 161238 - DNA, 25 bp, SARS Virus
ctcgtagcatctagaaggtaagatg

SEQ ID NO: 161239 - DNA, 25 bp, SARS Virus
tcgtagcatcttaaaggtaagatga

SEQ ID NO: 161240 - DNA, 25 bp, SARS Virus
cgtagcatcttgaaggtaagatgaa

SEQ ID NO: 161241 - DNA, 25 bp, SARS Virus
gtagcatcttgaaggtaagatgaag

SEQ ID NO: 161242 - DNA, 25 bp, SARS Virus
tagcatcttgaaagtaagatgaagt

SEQ ID NO: 161243 - DNA, 25 bp, SARS Virus
agcatcttgaagataagatgaagtc

SEQ ID NO: 161244 - DNA, 25 bp, SARS Virus
gcatcttgaaggaaagatgaagtcg

SEQ ID NO: 161245 - DNA, 25 bp, SARS Virus
catcttgaaggtaagatgaagtcgg

SEQ ID NO: 161246 - DNA, 25 bp, SARS Virus
atcttgaaggtaagatgaagtcgga

SEQ ID NO: 161247 - DNA, 25 bp, SARS Virus
tcttgaaggtaaaatgaagtcggac

SEQ ID NO: 161248 - DNA, 25 bp, SARS Virus
cttgaaggtaagatgaagtcggact

SEQ ID NO: 161249 - DNA, 25 bp, SARS Virus
ttgaaggtaagaagaagtcggactc

SEQ ID NO: 161250 - DNA, 25 bp, SARS Virus
tgaaggtaagataaagtcggactcc

SEQ ID NO: 161251 - DNA, 25 bp, SARS Virus
gaaggtaagatgaagtcggactccg

SEQ ID NO: 161252 - DNA, 25 bp, SARS Virus
aaggtaagatgaagtcggactccgt

SEQ ID NO: 161253 - DNA, 25 bp, SARS Virus
aggtaagatgaaatcggactccgtg

SEQ ID NO: 161254 - DNA, 25 bp, SARS Virus
ggtaagatgaagacggactccgtgt

SEQ ID NO: 161255 - DNA, 25 bp, SARS Virus
gtaagatgaagtaggactccgtgtg

SEQ ID NO: 161256 - DNA, 25 bp, SARS Virus
taagatgaagtcagactccgtgtgt

SEQ ID NO: 161257 - DNA, 25 bp, SARS Virus
aagatgaagtcgaactccgtgtgtg

SEQ ID NO: 161258 - DNA, 25 bp, SARS Virus
agatgaagtcggactccgtgtgtga

SEQ ID NO: 161259 - DNA, 25 bp, SARS Virus
gatgaagtcggaatccgtgtgtgaa

SEQ ID NO: 161260 - DNA, 25 bp, SARS Virus
atgaagtcggacaccgtgtgtgaac

SEQ ID NO: 161261 - DNA, 25 bp, SARS Virus
tgaagtcggactacgtgtgtgaact

SEQ ID NO: 161262 - DNA, 25 bp, SARS Virus
gaagtcggactcagtgtgtgaacta

SEQ ID NO: 161263 - DNA, 25 bp, SARS Virus
aagtcggactccatgtgtgaactat

SEQ ID NO: 161264 - DNA, 25 bp, SARS Virus
agtcggactccgagtgtgaactatc

SEQ ID NO: 161265 - DNA, 25 bp, SARS Virus
gtcggactccgtatgtgaactatcg

SEQ ID NO: 161266 - DNA, 25 bp, SARS Virus
tcggactccgtgagtgaactatcgg

SEQ ID NO: 161267 - DNA, 25 bp, SARS Virus
cggactccgtgtatgaactatcgga

SEQ ID NO: 161268 - DNA, 25 bp, SARS Virus
ggactccgtgtgagaactatcggaa

SEQ ID NO: 161269 - DNA, 25 bp, SARS Virus
gactccgtgtgtaaactatcggaaa

SEQ ID NO: 161270 - DNA, 25 bp, SARS Virus
actccgtgtgtgaactatcggaaac

SEQ ID NO: 161271 - DNA, 25 bp, SARS Virus
ctccgtgtgtgaactatcggaaacc

SEQ ID NO: 161272 - DNA, 25 bp, SARS Virus
tccgtgtgtgaaatatcggaaacct

SEQ ID NO: 161273 - DNA, 25 bp, SARS Virus
ccgtgtgtgaacaatcggaaaccta

SEQ ID NO: 161274 - DNA, 25 bp, SARS Virus
cgtgtgtgaactatcggaaacctaa

SEQ ID NO: 161275 - DNA, 25 bp, SARS Virus
gtgtgtgaactaacggaaacctaaa

SEQ ID NO: 161276 - DNA, 25 bp, SARS Virus
tgtgtgaactataggaaacctaaag

SEQ ID NO: 161277 - DNA, 25 bp, SARS Virus
gtgtgaactatcagaaacctaaagg

SEQ ID NO: 161278 - DNA, 25 bp, SARS Virus
tgtgaactatcgaaaacctaaaggt

SEQ ID NO: 161279 - DNA, 25 bp, SARS Virus
gtgaactatcggaaacctaaaggtt

SEQ ID NO: 161280 - DNA, 25 bp, SARS Virus
tgaactatcggaaacctaaaggtta

SEQ ID NO: 161281 - DNA, 25 bp, SARS Virus
gaactatcggaaacctaaaggttac

SEQ ID NO: 161282 - DNA, 25 bp, SARS Virus
aactatcggaaaactaaaggttaca

SEQ ID NO: 161283 - DNA, 25 bp, SARS Virus
actatcggaaacataaaggttacag

SEQ ID NO: 161284 - DNA, 25 bp, SARS Virus
ctatcggaaaccaaaaggttacagt

SEQ ID NO: 161285 - DNA, 25 bp, SARS Virus
tatcggaaacctaaaggttacagta

SEQ ID NO: 161286 - DNA, 25 bp, SARS Virus
atcggaaacctaaaggttacagtac

SEQ ID NO: 161287 - DNA, 25 bp, SARS Virus
tcggaaacctaaaggttacagtact

SEQ ID NO: 161288 - DNA, 25 bp, SARS Virus
cggaaacctaaaagttacagtactt

SEQ ID NO: 161289 - DNA, 25 bp, SARS Virus
ggaaacctaaagattacagtacttc

SEQ ID NO: 161290 - DNA, 25 bp, SARS Virus
gaaacctaaaggatacagtacttct

SEQ ID NO: 161291 - DNA, 25 bp, SARS Virus
aaacctaaaggtaacagtacttctt

SEQ ID NO: 161292 - DNA, 25 bp, SARS Virus
aacctaaaggttacagtacttcttg

SEQ ID NO: 161293 - DNA, 25 bp, SARS Virus
acctaaaggttaaagtacttcttga

SEQ ID NO: 161294 - DNA, 25 bp, SARS Virus
cctaaaggttacagtacttcttgac

SEQ ID NO: 161295 - DNA, 25 bp, SARS Virus
ctaaaggttacaatacttcttgacc

SEQ ID NO: 161296 - DNA, 25 bp, SARS Virus
taaaggttacagaacttcttgacct

SEQ ID NO: 161297 - DNA, 25 bp, SARS Virus
aaaggttacagtacttcttgacctt

SEQ ID NO: 161298 - DNA, 25 bp, SARS Virus
aaggttacagtaattcttgaccttt

SEQ ID NO: 161299 - DNA, 25 bp, SARS Virus
aggttacagtacatcttgacctttg

SEQ ID NO: 161300 - DNA, 25 bp, SARS Virus
ggttacagtactacttgacctttga

SEQ ID NO: 161301 - DNA, 25 bp, SARS Virus
gttacagtacttattgacctttgaa

SEQ ID NO: 161302 - DNA, 25 bp, SARS Virus
ttacagtacttcatgacctttgaat

SEQ ID NO: 161303 - DNA, 25 bp, SARS Virus
tacagtacttctagacctttgaata

SEQ ID NO: 161304 - DNA, 25 bp, SARS Virus
acagtacttcttaacctttgaatag

SEQ ID NO: 161305 - DNA, 25 bp, SARS Virus
cagtacttcttgacctttgaatagt

SEQ ID NO: 161306 - DNA, 25 bp, SARS Virus
agtacttcttgaactttgaatagtc

SEQ ID NO: 161307 - DNA, 25 bp, SARS Virus
gtacttcttgacatttgaatagtcg

SEQ ID NO: 161308 - DNA, 25 bp, SARS Virus
tacttcttgaccattgaatagtcgt

SEQ ID NO: 161309 - DNA, 25 bp, SARS Virus
acttcttgacctatgaatagtcgtt

SEQ ID NO: 161310 - DNA, 25 bp, SARS Virus
cttcttgaccttagaatagtcgttc

SEQ ID NO: 161311 - DNA, 25 bp, SARS Virus
ttcttgacctttaaatagtcgttcg

SEQ ID NO: 161312 - DNA, 25 bp, SARS Virus
tcttgacctttgaatagtcgttcgt

SEQ ID NO: 161313 - DNA, 25 bp, SARS Virus
cttgacctttgaatagtcgttcgtt

SEQ ID NO: 161314 - DNA, 25 bp, SARS Virus
ttgacctttgaaaagtcgttcgtta

SEQ ID NO: 161315 - DNA, 25 bp, SARS Virus
tgacctttgaatagtcgttcgttac

SEQ ID NO: 161316 - DNA, 25 bp, SARS Virus
gacctttgaataatcgttcgttacg

SEQ ID NO: 161317 - DNA, 25 bp, SARS Virus
acctttgaatagacgttcgttacgt

SEQ ID NO: 161318 - DNA, 25 bp, SARS Virus
cctttgaatagtagttcgttacgtc

SEQ ID NO: 161319 - DNA, 25 bp, SARS Virus
ctttgaatagtcattcgttacgtct

SEQ ID NO: 161320 - DNA, 25 bp, SARS Virus
tttgaatagtcgatcgttacgtctg

SEQ ID NO: 161321 - DNA, 25 bp, SARS Virus
ttgaatagtcgtacgttacgtctga

SEQ ID NO: 161322 - DNA, 25 bp, SARS Virus
tgaatagtcgttagttacgtctgaa

SEQ ID NO: 161323 - DNA, 25 bp, SARS Virus
gaatagtcgttcattacgtctgaag

SEQ ID NO: 161324 - DNA, 25 bp, SARS Virus
aatagtcgttcgatacgtctgaagt

SEQ ID NO: 161325 - DNA, 25 bp, SARS Virus
atagtcgttcgtaacgtctgaagtg

SEQ ID NO: 161326 - DNA, 25 bp, SARS Virus
tagtcgttcgttacgtctgaagtgt

SEQ ID NO: 161327 - DNA, 25 bp, SARS Virus
agtcgttcgttaagtctgaagtgtt

SEQ ID NO: 161328 - DNA, 25 bp, SARS Virus
gtcgttcgttacatctgaagtgttg

SEQ ID NO: 161329 - DNA, 25 bp, SARS Virus
tcgttcgttacgactgaagtgttgg

SEQ ID NO: 161330 - DNA, 25 bp, SARS Virus
cgttcgttacgtatgaagtgttggt

SEQ ID NO: 161331 - DNA, 25 bp, SARS Virus
gttcgttacgtcagaagtgttggta

SEQ ID NO: 161332 - DNA, 25 bp, SARS Virus
ttcgttacgtctaaagtgttggtac

SEQ ID NO: 161333 - DNA, 25 bp, SARS Virus
tcgttacgtctgaagtgttggtaca

SEQ ID NO: 161334 - DNA, 25 bp, SARS Virus
cgttacgtctgaagtgttggtacac

SEQ ID NO: 161335 - DNA, 25 bp, SARS Virus
gttacgtctgaaatgttggtacaca

SEQ ID NO: 161336 - DNA, 25 bp, SARS Virus
ttacgtctgaagagttggtacacaa

SEQ ID NO: 161337 - DNA, 25 bp, SARS Virus
tacgtctgaagtattggtacacaac

SEQ ID NO: 161338 - DNA, 25 bp, SARS Virus
acgtctgaagtgatggtacacaaca

SEQ ID NO: 161339 - DNA, 25 bp, SARS Virus
cgtctgaagtgtaggtacacaacat

SEQ ID NO: 161340 - DNA, 25 bp, SARS Virus
gtctgaagtgttagtacacaacatg

SEQ ID NO: 161341 - DNA, 25 bp, SARS Virus
tctgaagtgttgatacacaacatga

SEQ ID NO: 161342 - DNA, 25 bp, SARS Virus
ctgaagtgttggaacacaacatgaa

SEQ ID NO: 161343 - DNA, 25 bp, SARS Virus
tgaagtgttggtacacaacatgaaa

SEQ ID NO: 161344 - DNA, 25 bp, SARS Virus
gaagtgttggtaaacaacatgaaaa

SEQ ID NO: 161345 - DNA, 25 bp, SARS Virus
aagtgttggtacacaacatgaaaag

SEQ ID NO: 161346 - DNA, 25 bp, SARS Virus
agtgttggtacaaaacatgaaaaga

SEQ ID NO: 161347 - DNA, 25 bp, SARS Virus
gtgttggtacacaacatgaaaagac

SEQ ID NO: 161348 - DNA, 25 bp, SARS Virus
tgttggtacacaacatgaaaagacg

SEQ ID NO: 161349 - DNA, 25 bp, SARS Virus
gttggtacacaaaatgaaaagacgt

SEQ ID NO: 161350 - DNA, 25 bp, SARS Virus
ttggtacacaacatgaaaagacgtt

SEQ ID NO: 161351 - DNA, 25 bp, SARS Virus
tggtacacaacaagaaaagacgttc

SEQ ID NO: 161352 - DNA, 25 bp, SARS Virus
ggtacacaacataaaaagacgttcg

SEQ ID NO: 161353 - DNA, 25 bp, SARS Virus
gtacacaacatgaaaagacgttcgt

SEQ ID NO: 161354 - DNA, 25 bp, SARS Virus
tacacaacatgaaaagacgttcgtc

SEQ ID NO: 161355 - DNA, 25 bp, SARS Virus
acacaacatgaaaagacgttcgtct

SEQ ID NO: 161356 - DNA, 25 bp, SARS Virus
cacaacatgaaaagacgttcgtctt

SEQ ID NO: 161357 - DNA, 25 bp, SARS Virus
acaacatgaaaaaacgttcgtctta

SEQ ID NO: 161358 - DNA, 25 bp, SARS Virus
caacatgaaaagacgttcgtcttaa

SEQ ID NO: 161359 - DNA, 25 bp, SARS Virus
aacatgaaaagaagttcgtcttaat

SEQ ID NO: 161360 - DNA, 25 bp, SARS Virus
acatgaaaagacattcgtcttaatt

SEQ ID NO: 161361 - DNA, 25 bp, SARS Virus
catgaaaagacgatcgtcttaattg

SEQ ID NO: 161362 - DNA, 25 bp, SARS Virus
atgaaaagacgtacgtcttaattgg

SEQ ID NO: 161363 - DNA, 25 bp, SARS Virus
tgaaaagacgttagtcttaattggg

SEQ ID NO: 161364 - DNA, 25 bp, SARS Virus
gaaaagacgttcatcttaattggga

SEQ ID NO: 161365 - DNA, 25 bp, SARS Virus
aaaagacgttcgacttaattgggag

SEQ ID NO: 161366 - DNA, 25 bp, SARS Virus
aaagacgttcgtattaattgggagt

SEQ ID NO: 161367 - DNA, 25 bp, SARS Virus
aagacgttcgtcataattgggagtc

SEQ ID NO: 161368 - DNA, 25 bp, SARS Virus
agacgttcgtctaaattgggagtca

SEQ ID NO: 161369 - DNA, 25 bp, SARS Virus
gacgttcgtcttaattgggagtcaa

SEQ ID NO: 161370 - DNA, 25 bp, SARS Virus
acgttcgtcttaattgggagtcaag

SEQ ID NO: 161371 - DNA, 25 bp, SARS Virus
cgttcgtcttaaatgggagtcaagt

SEQ ID NO: 161372 - DNA, 25 bp, SARS Virus
gttcgtcttaatagggagtcaagta

SEQ ID NO: 161373 - DNA, 25 bp, SARS Virus
ttcgtcttaattaggagtcaagtag

SEQ ID NO: 161374 - DNA, 25 bp, SARS Virus
tcgtcttaattgagagtcaagtaga

SEQ ID NO: 161375 - DNA, 25 bp, SARS Virus
cgtcttaattggaagtcaagtagag

SEQ ID NO: 161376 - DNA, 25 bp, SARS Virus
gtcttaattgggagtcaagtagagg

SEQ ID NO: 161377 - DNA, 25 bp, SARS Virus
tcttaattgggaatcaagtagagga

SEQ ID NO: 161378 - DNA, 25 bp, SARS Virus
cttaattgggagacaagtagaggat

SEQ ID NO: 161379 - DNA, 25 bp, SARS Virus
ttaattgggagtaaagtagaggata

SEQ ID NO: 161380 - DNA, 25 bp, SARS Virus
taattgggagtcaagtagaggatat

SEQ ID NO: 161381 - DNA, 25 bp, SARS Virus
aattgggagtcaagtagaggatatt

SEQ ID NO: 161382 - DNA, 25 bp, SARS Virus
attgggagtcaaatagaggatatta

SEQ ID NO: 161383 - DNA, 25 bp, SARS Virus
ttgggagtcaagaagaggatattat

SEQ ID NO: 161384 - DNA, 25 bp, SARS Virus
tgggagtcaagtagaggatattatc

SEQ ID NO: 161385 - DNA, 25 bp, SARS Virus
gggagtcaagtaaaggatattatcc

SEQ ID NO: 161386 - DNA, 25 bp, SARS Virus
ggagtcaagtagaggatattatccc

SEQ ID NO: 161387 - DNA, 25 bp, SARS Virus
gagtcaagtagaagatattatccca

SEQ ID NO: 161388 - DNA, 25 bp, SARS Virus
agtcaagtagagaatattatcccat

SEQ ID NO: 161389 - DNA, 25 bp, SARS Virus
gtcaagtagaggatattatcccata

SEQ ID NO: 161390 - DNA, 25 bp, SARS Virus
tcaagtagaggaaattatcccataa

SEQ ID NO: 161391 - DNA, 25 bp, SARS Virus
caagtagaggatattatcccataag

SEQ ID NO: 161392 - DNA, 25 bp, SARS Virus
aagtagaggataatatcccataagt

SEQ ID NO: 161393 - DNA, 25 bp, SARS Virus
agtagaggatataatcccataagtt

SEQ ID NO: 161394 - DNA, 25 bp, SARS Virus
gtagaggatattatcccataagttg

SEQ ID NO: 161395 - DNA, 25 bp, SARS Virus
tagaggatattaacccataagttgt

SEQ ID NO: 161396 - DNA, 25 bp, SARS Virus
agaggatattataccataagttgtc

SEQ ID NO: 161397 - DNA, 25 bp, SARS Virus
gaggatattatcacataagttgtct

SEQ ID NO: 161398 - DNA, 25 bp, SARS Virus
aggatattatccaataagttgtctg

SEQ ID NO: 161399 - DNA, 25 bp, SARS Virus
ggatattatcccataagttgtctgg

SEQ ID NO: 161400 - DNA, 25 bp, SARS Virus
gatattatcccaaaagttgtctggt

SEQ ID NO: 161401 - DNA, 25 bp, SARS Virus
atattatcccataagttgtctggtt

SEQ ID NO: 161402 - DNA, 25 bp, SARS Virus
tattatcccataagttgtctggtta

SEQ ID NO: 161403 - DNA, 25 bp, SARS Virus
attatcccataaattgtctggttag

SEQ ID NO: 161404 - DNA, 25 bp, SARS Virus
ttatcccataagatgtctggttagt

SEQ ID NO: 161405 - DNA, 25 bp, SARS Virus
tatcccataagtagtctggttagtt

SEQ ID NO: 161406 - DNA, 25 bp, SARS Virus
atcccataagttatctggttagttg

SEQ ID NO: 161407 - DNA, 25 bp, SARS Virus
tcccataagttgactggttagttgc

SEQ ID NO: 161408 - DNA, 25 bp, SARS Virus
cccataagttgtatggttagttgcg

SEQ ID NO: 161409 - DNA, 25 bp, SARS Virus
ccataagttgtcaggttagttgcgc

SEQ ID NO: 161410 - DNA, 25 bp, SARS Virus
cataagttgtctagttagttgcgcg

SEQ ID NO: 161411 - DNA, 25 bp, SARS Virus
ataagttgtctgattagttgcgcga

SEQ ID NO: 161412 - DNA, 25 bp, SARS Virus
taagttgtctggatagttgcgcgaa

SEQ ID NO: 161413 - DNA, 25 bp, SARS Virus
aagttgtctggtaagttgcgcgaat

SEQ ID NO: 161414 - DNA, 25 bp, SARS Virus
agttgtctggttagttgcgcgaatt

SEQ ID NO: 161415 - DNA, 25 bp, SARS Virus
gttgtctggttaattgcgcgaattg

SEQ ID NO: 161416 - DNA, 25 bp, SARS Virus
ttgtctggttagatgcgcgaattgt

SEQ ID NO: 161417 - DNA, 25 bp, SARS Virus
tgtctggttagtagcgcgaattgtt

SEQ ID NO: 161418 - DNA, 25 bp, SARS Virus
gtctggttagttacgcgaattgttt

SEQ ID NO: 161419 - DNA, 25 bp, SARS Virus
tctggttagttgagcgaattgtttc

SEQ ID NO: 161420 - DNA, 25 bp, SARS Virus
ctggttagttgcacgaattgtttcg

SEQ ID NO: 161421 - DNA, 25 bp, SARS Virus
tggttagttgcgagaattgtttcgt

SEQ ID NO: 161422 - DNA, 25 bp, SARS Virus
ggttagttgcgcaaattgtttcgtg

SEQ ID NO: 161423 - DNA, 25 bp, SARS Virus
gttagttgcgcgaattgtttcgtga

SEQ ID NO: 161424 - DNA, 25 bp, SARS Virus
ttagttgcgcgaattgtttcgtgag

SEQ ID NO: 161425 - DNA, 25 bp, SARS Virus
tagttgcgcgaaatgtttcgtgagt

SEQ ID NO: 161426 - DNA, 25 bp, SARS Virus
agttgcgcgaatagtttcgtgagta

SEQ ID NO: 161427 - DNA, 25 bp, SARS Virus
gttgcgcgaattatttcgtgagtac

SEQ ID NO: 161428 - DNA, 25 bp, SARS Virus
ttgcgcgaattgattcgtgagtacc

SEQ ID NO: 161429 - DNA, 25 bp, SARS Virus
tgcgcgaattgtatcgtgagtacct

SEQ ID NO: 161430 - DNA, 25 bp, SARS Virus
gcgcgaattgttacgtgagtacctg

SEQ ID NO: 161431 - DNA, 25 bp, SARS Virus
cgcgaattgtttagtgagtacctga

SEQ ID NO: 161432 - DNA, 25 bp, SARS Virus
gcgaattgtttcatgagtacctgac

SEQ ID NO: 161433 - DNA, 25 bp, SARS Virus
cgaattgtttcgagagtacctgacg

SEQ ID NO: 161434 - DNA, 25 bp, SARS Virus
gaattgtttcgtaagtacctgacga

SEQ ID NO: 161435 - DNA, 25 bp, SARS Virus
aattgtttcgtgagtacctgacgat

SEQ ID NO: 161436 - DNA, 25 bp, SARS Virus
attgtttcgtgaatacctgacgatt

SEQ ID NO: 161437 - DNA, 25 bp, SARS Virus
ttgtttcgtgagaacctgacgattt

SEQ ID NO: 161438 - DNA, 25 bp, SARS Virus
tgtttcgtgagtacctgacgatttg

SEQ ID NO: 161439 - DNA, 25 bp, SARS Virus
gtttcgtgagtaactgacgatttgt

SEQ ID NO: 161440 - DNA, 25 bp, SARS Virus
tttcgtgagtacatgacgatttgta

SEQ ID NO: 161441 - DNA, 25 bp, SARS Virus
ttcgtgagtaccagacgatttgtag

SEQ ID NO: 161442 - DNA, 25 bp, SARS Virus
tcgtgagtacctaacgatttgtaga

SEQ ID NO: 161443 - DNA, 25 bp, SARS Virus
cgtgagtacctgacgatttgtagat

SEQ ID NO: 161444 - DNA, 25 bp, SARS Virus
gtgagtacctgaagatttgtagatc

SEQ ID NO: 161445 - DNA, 25 bp, SARS Virus
tgagtacctgacaatttgtagatca

SEQ ID NO: 161446 - DNA, 25 bp, SARS Virus
gagtacctgacgatttgtagatcag

SEQ ID NO: 161447 - DNA, 25 bp, SARS Virus
agtacctgacgaattgtagatcagt

SEQ ID NO: 161448 - DNA, 25 bp, SARS Virus
gtacctgacgatatgtagatcagta

SEQ ID NO: 161449 - DNA, 25 bp, SARS Virus
tacctgacgattagtagatcagtac

SEQ ID NO: 161450 - DNA, 25 bp, SARS Virus
acctgacgatttatagatcagtact

SEQ ID NO: 161451 - DNA, 25 bp, SARS Virus
cctgacgatttgaagatcagtacta

SEQ ID NO: 161452 - DNA, 25 bp, SARS Virus
ctgacgatttgtagatcagtactat

SEQ ID NO: 161453 - DNA, 25 bp, SARS Virus
tgacgatttgtaaatcagtactatc

SEQ ID NO: 161454 - DNA, 25 bp, SARS Virus
gacgatttgtagatcagtactatcg

SEQ ID NO: 161455 - DNA, 25 bp, SARS Virus
acgatttgtagaacagtactatcgt

SEQ ID NO: 161456 - DNA, 25 bp, SARS Virus
cgatttgtagataagtactatcgta

SEQ ID NO: 161457 - DNA, 25 bp, SARS Virus
gatttgtagatcagtactatcgtag

SEQ ID NO: 161458 - DNA, 25 bp, SARS Virus
atttgtagatcaatactatcgtagt

SEQ ID NO: 161459 - DNA, 25 bp, SARS Virus
tttgtagatcagaactatcgtagtg

SEQ ID NO: 161460 - DNA, 25 bp, SARS Virus
ttgtagatcagtactatcgtagtgt

SEQ ID NO: 161461 - DNA, 25 bp, SARS Virus
tgtagatcagtaatatcgtagtgtt

SEQ ID NO: 161462 - DNA, 25 bp, SARS Virus
gtagatcagtacaatcgtagtgttg

SEQ ID NO: 161463 - DNA, 25 bp, SARS Virus
tagatcagtactatcgtagtgttga

SEQ ID NO: 161464 - DNA, 25 bp, SARS Virus
agatcagtactaacgtagtgttgat

SEQ ID NO: 161465 - DNA, 25 bp, SARS Virus
gatcagtactatagtagtgttgatc

SEQ ID NO: 161466 - DNA, 25 bp, SARS Virus
atcagtactatcatagtgttgatcg

SEQ ID NO: 161467 - DNA, 25 bp, SARS Virus
tcagtactatcgaagtgttgatcgg

SEQ ID NO: 161468 - DNA, 25 bp, SARS Virus
cagtactatcgtagtgttgatcggt

SEQ ID NO: 161469 - DNA, 25 bp, SARS Virus
agtactatcgtaatgttgatcggtg

SEQ ID NO: 161470 - DNA, 25 bp, SARS Virus
gtactatcgtagagttgatcggtgt

SEQ ID NO: 161471 - DNA, 25 bp, SARS Virus
tactatcgtagtattgatcggtgta

SEQ ID NO: 161472 - DNA, 25 bp, SARS Virus
actatcgtagtgatgatcggtgtac

SEQ ID NO: 161473 - DNA, 25 bp, SARS Virus
ctatcgtagtgtagatcggtgtaca

SEQ ID NO: 161474 - DNA, 25 bp, SARS Virus
tatcgtagtgttaatcggtgtacac

SEQ ID NO: 161475 - DNA, 25 bp, SARS Virus
atcgtagtgttgatcggtgtacacg

SEQ ID NO: 161476 - DNA, 25 bp, SARS Virus
tcgtagtgttgaacggtgtacacgt

SEQ ID NO: 161477 - DNA, 25 bp, SARS Virus
cgtagtgttgataggtgtacacgta

SEQ ID NO: 161478 - DNA, 25 bp, SARS Virus
gtagtgttgatcagtgtacacgtaa

SEQ ID NO: 161479 - DNA, 25 bp, SARS Virus
tagtgttgatcgatgtacacgtaaa

SEQ ID NO: 161480 - DNA, 25 bp, SARS Virus
agtgttgatcggagtacacgtaaag

SEQ ID NO: 161481 - DNA, 25 bp, SARS Virus
gtgttgatcggtatacacgtaaagg

SEQ ID NO: 161482 - DNA, 25 bp, SARS Virus
tgttgatcggtgaacacgtaaaggt

SEQ ID NO: 161483 - DNA, 25 bp, SARS Virus
gttgatcggtgtacacgtaaaggta

SEQ ID NO: 161484 - DNA, 25 bp, SARS Virus
ttgatcggtgtaaacgtaaaggtac

SEQ ID NO: 161485 - DNA, 25 bp, SARS Virus
tgatcggtgtacacgtaaaggtaca

SEQ ID NO: 161486 - DNA, 25 bp, SARS Virus
gatcggtgtacaagtaaaggtacat

SEQ ID NO: 161487 - DNA, 25 bp, SARS Virus
atcggtgtacacataaaggtacatg

SEQ ID NO: 161488 - DNA, 25 bp, SARS Virus
tcggtgtacacgaaaaggtacatgg

SEQ ID NO: 161489 - DNA, 25 bp, SARS Virus
cggtgtacacgtaaaggtacatgga

SEQ ID NO: 161490 - DNA, 25 bp, SARS Virus
ggtgtacacgtaaaggtacatggac

SEQ ID NO: 161491 - DNA, 25 bp, SARS Virus
gtgtacacgtaaaggtacatggacc

SEQ ID NO: 161492 - DNA, 25 bp, SARS Virus
tgtacacgtaaaagtacatggaccg

SEQ ID NO: 161493 - DNA, 25 bp, SARS Virus
gtacacgtaaagatacatggaccgt

SEQ ID NO: 161494 - DNA, 25 bp, SARS Virus
tacacgtaaaggaacatggaccgtt

SEQ ID NO: 161495 - DNA, 25 bp, SARS Virus
acacgtaaaggtacatggaccgtta

SEQ ID NO: 161496 - DNA, 25 bp, SARS Virus
cacgtaaaggtaaatggaccgttac

SEQ ID NO: 161497 - DNA, 25 bp, SARS Virus
acgtaaaggtacatggaccgttaca

SEQ ID NO: 161498 - DNA, 25 bp, SARS Virus
cgtaaaggtacaaggaccgttacaa

SEQ ID NO: 161499 - DNA, 25 bp, SARS Virus
gtaaaggtacatagaccgttacaac

SEQ ID NO: 161500 - DNA, 25 bp, SARS Virus
taaaggtacatgaaccgttacaacc

SEQ ID NO: 161501 - DNA, 25 bp, SARS Virus
aaaggtacatggaccgttacaacca

SEQ ID NO: 161502 - DNA, 25 bp, SARS Virus
aaggtacatggaacgttacaaccag

SEQ ID NO: 161503 - DNA, 25 bp, SARS Virus
aggtacatggacagttacaaccagt

SEQ ID NO: 161504 - DNA, 25 bp, SARS Virus
ggtacatggaccattacaaccagta

SEQ ID NO: 161505 - DNA, 25 bp, SARS Virus
gtacatggaccgatacaaccagtac

SEQ ID NO: 161506 - DNA, 25 bp, SARS Virus
tacatggaccgtaacaaccagtacc

SEQ ID NO: 161507 - DNA, 25 bp, SARS Virus
acatggaccgttacaaccagtacca

SEQ ID NO: 161508 - DNA, 25 bp, SARS Virus
catggaccgttaaaaccagtaccaa

SEQ ID NO: 161509 - DNA, 25 bp, SARS Virus
atggaccgttacaaccagtaccaat

SEQ ID NO: 161510 - DNA, 25 bp, SARS Virus
tggaccgttacaaccagtaccaatg

SEQ ID NO: 161511 - DNA, 25 bp, SARS Virus
ggaccgttacaaacagtaccaatga

SEQ ID NO: 161512 - DNA, 25 bp, SARS Virus
gaccgttacaacaagtaccaatgag

SEQ ID NO: 161513 - DNA, 25 bp, SARS Virus
accgttacaaccagtaccaatgaga

SEQ ID NO: 161514 - DNA, 25 bp, SARS Virus
ccgttacaaccaataccaatgagac

SEQ ID NO: 161515 - DNA, 25 bp, SARS Virus
cgttacaaccagaaccaatgagact

SEQ ID NO: 161516 - DNA, 25 bp, SARS Virus
gttacaaccagtaccaatgagactt

SEQ ID NO: 161517 - DNA, 25 bp, SARS Virus
ttacaaccagtaacaatgagacttc

SEQ ID NO: 161518 - DNA, 25 bp, SARS Virus
tacaaccagtacaaatgagacttcc

SEQ ID NO: 161519 - DNA, 25 bp, SARS Virus
acaaccagtaccaatgagacttcca

SEQ ID NO: 161520 - DNA, 25 bp, SARS Virus
caaccagtaccaatgagacttccaa

SEQ ID NO: 161521 - DNA, 25 bp, SARS Virus
aaccagtaccaaagagacttccaat

SEQ ID NO: 161522 - DNA, 25 bp, SARS Virus
accagtaccaataagacttccaatg

SEQ ID NO: 161523 - DNA, 25 bp, SARS Virus
ccagtaccaatgagacttccaatgg

SEQ ID NO: 161524 - DNA, 25 bp, SARS Virus
cagtaccaatgaaacttccaatggg

SEQ ID NO: 161525 - DNA, 25 bp, SARS Virus
agtaccaatgagacttccaatgggc

SEQ ID NO: 161526 - DNA, 25 bp, SARS Virus
gtaccaatgagaattccaatgggca

SEQ ID NO: 161527 - DNA, 25 bp, SARS Virus
taccaatgagacatccaatgggcat

SEQ ID NO: 161528 - DNA, 25 bp, SARS Virus
accaatgagactaccaatgggcatt

SEQ ID NO: 161529 - DNA, 25 bp, SARS Virus
ccaatgagacttacaatgggcattt

SEQ ID NO: 161530 - DNA, 25 bp, SARS Virus
caatgagacttcaaatgggcatttc

SEQ ID NO: 161531 - DNA, 25 bp, SARS Virus
aatgagacttccaatgggcatttcg

SEQ ID NO: 161532 - DNA, 25 bp, SARS Virus
atgagacttccaatgggcatttcgg

SEQ ID NO: 161533 - DNA, 25 bp, SARS Virus
tgagacttccaaagggcatttcggg

SEQ ID NO: 161534 - DNA, 25 bp, SARS Virus
gagacttccaataggcatttcgggg

SEQ ID NO: 161535 - DNA, 25 bp, SARS Virus
agacttccaatgagcatttcggggt

SEQ ID NO: 161536 - DNA, 25 bp, SARS Virus
gacttccaatggacatttcggggtg

SEQ ID NO: 161537 - DNA, 25 bp, SARS Virus
acttccaatgggaatttcggggtga

SEQ ID NO: 161538 - DNA, 25 bp, SARS Virus
cttccaatgggcatttcggggtgac

SEQ ID NO: 161539 - DNA, 25 bp, SARS Virus
ttccaatgggcaattcggggtgacg

SEQ ID NO: 161540 - DNA, 25 bp, SARS Virus
tccaatgggcatatcggggtgacga

SEQ ID NO: 161541 - DNA, 25 bp, SARS Virus
ccaatgggcattacggggtgacgac

SEQ ID NO: 161542 - DNA, 25 bp, SARS Virus
caatgggcatttaggggtgacgact

SEQ ID NO: 161543 - DNA, 25 bp, SARS Virus
aatgggcatttcagggtgacgactt

SEQ ID NO: 161544 - DNA, 25 bp, SARS Virus
atgggcatttcgaggtgacgacttg

SEQ ID NO: 161545 - DNA, 25 bp, SARS Virus
tgggcatttcggagtgacgacttgt

SEQ ID NO: 161546 - DNA, 25 bp, SARS Virus
gggcatttcgggatgacgacttgta

SEQ ID NO: 161547 - DNA, 25 bp, SARS Virus
ggcatttcggggagacgacttgtag

SEQ ID NO: 161548 - DNA, 25 bp, SARS Virus
gcatttcggggtaacgacttgtagt

SEQ ID NO: 161549 - DNA, 25 bp, SARS Virus
catttcggggtgacgacttgtagtt

SEQ ID NO: 161550 - DNA, 25 bp, SARS Virus
atttcggggtgaagacttgtagtta

SEQ ID NO: 161551 - DNA, 25 bp, SARS Virus
tttcggggtgacaacttgtagttag

SEQ ID NO: 161552 - DNA, 25 bp, SARS Virus
ttcggggtgacgacttgtagttagt

SEQ ID NO: 161553 - DNA, 25 bp, SARS Virus
tcggggtgacgaattgtagttagta

SEQ ID NO: 161554 - DNA, 25 bp, SARS Virus
cggggtgacgacatgtagttagtat

SEQ ID NO: 161555 - DNA, 25 bp, SARS Virus
ggggtgacgactagtagttagtatt

SEQ ID NO: 161556 - DNA, 25 bp, SARS Virus
gggtgacgacttatagttagtattt

SEQ ID NO: 161557 - DNA, 25 bp, SARS Virus
ggtgacgacttgaagttagtattta

SEQ ID NO: 161558 - DNA, 25 bp, SARS Virus
gtgacgacttgtagttagtatttac

SEQ ID NO: 161559 - DNA, 25 bp, SARS Virus
tgacgacttgtaattagtatttacc

SEQ ID NO: 161560 - DNA, 25 bp, SARS Virus
gacgacttgtagatagtatttaccc

SEQ ID NO: 161561 - DNA, 25 bp, SARS Virus
tcaaactgttctcagaacacagttt

SEQ ID NO: 161562 - DNA, 25 bp, SARS Virus
caaactgttctgcgaacacagtttg

SEQ ID NO: 161563 - DNA, 25 bp, SARS Virus
aaactgttctgacaacacagtttgg

SEQ ID NO: 161564 - DNA, 25 bp, SARS Virus
aactgttctgagcacacagtttgga

SEQ ID NO: 161565 - DNA, 25 bp, SARS Virus
actgttctgagaccacagtttggat

SEQ ID NO: 161566 - DNA, 25 bp, SARS Virus
ctgttctgagaacacagtttggatg

SEQ ID NO: 161567 - DNA, 25 bp, SARS Virus
tgttctgagaacccagtttggatgt

SEQ ID NO: 161568 - DNA, 25 bp, SARS Virus
gttctgagaacacagtttggatgtg

SEQ ID NO: 161569 - DNA, 25 bp, SARS Virus
ttctgagaacaccgtttggatgtgt

SEQ ID NO: 161570 - DNA, 25 bp, SARS Virus
tctgagaacacactttggatgtgtg

SEQ ID NO: 161571 - DNA, 25 bp, SARS Virus
ctgagaacacagcttggatgtgtgt

SEQ ID NO: 161572 - DNA, 25 bp, SARS Virus
tgagaacacagtctggatgtgtgtt

SEQ ID NO: 161573 - DNA, 25 bp, SARS Virus
gagaacacagttcggatgtgtgtta

SEQ ID NO: 161574 - DNA, 25 bp, SARS Virus
agaacacagtttcgatgtgtgttaa

SEQ ID NO: 161575 - DNA, 25 bp, SARS Virus
gaacacagtttgcatgtgtgttaac

SEQ ID NO: 161576 - DNA, 25 bp, SARS Virus
aacacagtttggctgtgtgttaacg

SEQ ID NO: 161577 - DNA, 25 bp, SARS Virus
acacagtttggacgtgtgttaacgt

SEQ ID NO: 161578 - DNA, 25 bp, SARS Virus
cacagtttggatctgtgttaacgta

SEQ ID NO: 161579 - DNA, 25 bp, SARS Virus
acagtttggatgcgtgttaacgtaa

SEQ ID NO: 161580 - DNA, 25 bp, SARS Virus
cagtttggatgtctgttaacgtaac

SEQ ID NO: 161581 - DNA, 25 bp, SARS Virus
agtttggatgtgcgttaacgtaacc

SEQ ID NO: 161582 - DNA, 25 bp, SARS Virus
gtttggatgtgtcttaacgtaaccg

SEQ ID NO: 161583 - DNA, 25 bp, SARS Virus
tttggatgtgtgctaacgtaaccga

SEQ ID NO: 161584 - DNA, 25 bp, SARS Virus
ttggatgtgtgtcaacgtaaccgac

SEQ ID NO: 161585 - DNA, 25 bp, SARS Virus
tggatgtgtgttcacgtaaccgacc

SEQ ID NO: 161586 - DNA, 25 bp, SARS Virus
ggatgtgtgttaccgtaaccgaccc

SEQ ID NO: 161587 - DNA, 25 bp, SARS Virus
gatgtgtgttaacgtaaccgaccca

SEQ ID NO: 161588 - DNA, 25 bp, SARS Virus
atgtgtgttaacctaaccgacccat

SEQ ID NO: 161589 - DNA, 25 bp, SARS Virus
tgtgtgttaacgcaaccgacccatt

SEQ ID NO: 161590 - DNA, 25 bp, SARS Virus
gtgtgttaacgtcaccgacccattg

SEQ ID NO: 161591 - DNA, 25 bp, SARS Virus
tgtgttaacgtacccgacccattgc

SEQ ID NO: 161592 - DNA, 25 bp, SARS Virus
gtgttaacgtaaccgacccattgct

SEQ ID NO: 161593 - DNA, 25 bp, SARS Virus
tgttaacgtaaccgacccattgcta

SEQ ID NO: 161594 - DNA, 25 bp, SARS Virus
gttaacgtaacccacccattgctag

SEQ ID NO: 161595 - DNA, 25 bp, SARS Virus
ttaacgtaaccgccccattgctagt

SEQ ID NO: 161596 - DNA, 25 bp, SARS Virus
taacgtaaccgacccattgctagtt

SEQ ID NO: 161597 - DNA, 25 bp, SARS Virus
aacgtaaccgacccattgctagttg

SEQ ID NO: 161598 - DNA, 25 bp, SARS Virus
acgtaaccgacccattgctagttgc

SEQ ID NO: 161599 - DNA, 25 bp, SARS Virus
cgtaaccgaccccttgctagttgca

SEQ ID NO: 161600 - DNA, 25 bp, SARS Virus
gtaaccgacccactgctagttgcaa

SEQ ID NO: 161601 - DNA, 25 bp, SARS Virus
taaccgacccatcgctagttgcaat

SEQ ID NO: 161602 - DNA, 25 bp, SARS Virus
aaccgacccattcctagttgcaatg

SEQ ID NO: 161603 - DNA, 25 bp, SARS Virus
accgacccattgctagttgcaatgt

SEQ ID NO: 161604 - DNA, 25 bp, SARS Virus
ccgacccattgccagttgcaatgtt

SEQ ID NO: 161605 - DNA, 25 bp, SARS Virus
cgacccattgctcgttgcaatgtta

SEQ ID NO: 161606 - DNA, 25 bp, SARS Virus
gacccattgctacttgcaatgttaa

SEQ ID NO: 161607 - DNA, 25 bp, SARS Virus
acccattgctagctgcaatgttaag

SEQ ID NO: 161608 - DNA, 25 bp, SARS Virus
cccattgctagtcgcaatgttaagg

SEQ ID NO: 161609 - DNA, 25 bp, SARS Virus
ccattgctagttccaatgttaaggt

SEQ ID NO: 161610 - DNA, 25 bp, SARS Virus
cattgctagttgcaatgttaaggtt

SEQ ID NO: 161611 - DNA, 25 bp, SARS Virus
attgctagttgccatgttaaggttt

SEQ ID NO: 161612 - DNA, 25 bp, SARS Virus
ttgctagttgcactgttaaggtttt

SEQ ID NO: 161613 - DNA, 25 bp, SARS Virus
tgctagttgcaacgttaaggttttg

SEQ ID NO: 161614 - DNA, 25 bp, SARS Virus
gctagttgcaatcttaaggttttgt

SEQ ID NO: 161615 - DNA, 25 bp, SARS Virus
ctagttgcaatgctaaggttttgtt

SEQ ID NO: 161616 - DNA, 25 bp, SARS Virus
tagttgcaatgtcaaggttttgttt

SEQ ID NO: 161617 - DNA, 25 bp, SARS Virus
agttgcaatgttcaggttttgtttg

SEQ ID NO: 161618 - DNA, 25 bp, SARS Virus
gttgcaatgttacggttttgtttgt

SEQ ID NO: 161619 - DNA, 25 bp, SARS Virus
ttgcaatgttaacgttttgtttgtt

SEQ ID NO: 161620 - DNA, 25 bp, SARS Virus
tgcaatgttaagcttttgtttgttt

SEQ ID NO: 161621 - DNA, 25 bp, SARS Virus
gcaatgttaaggctttgtttgtttg

SEQ ID NO: 161622 - DNA, 25 bp, SARS Virus
caatgttaaggtcttgtttgtttgt

SEQ ID NO: 161623 - DNA, 25 bp, SARS Virus
aatgttaaggttctgtttgtttgtg

SEQ ID NO: 161624 - DNA, 25 bp, SARS Virus
atgttaaggtttcgtttgtttgtgg

SEQ ID NO: 161625 - DNA, 25 bp, SARS Virus
tgttaaggttttctttgtttgtggt

SEQ ID NO: 161626 - DNA, 25 bp, SARS Virus
gttaaggttttgcttgtttgtggta

SEQ ID NO: 161627 - DNA, 25 bp, SARS Virus
ttaaggttttgtctgtttgtggtag

SEQ ID NO: 161628 - DNA, 25 bp, SARS Virus
taaggttttgttcgtttgtggtagt

SEQ ID NO: 161629 - DNA, 25 bp, SARS Virus
aaggttttgtttctttgtggtagtc

SEQ ID NO: 161630 - DNA, 25 bp, SARS Virus
aggttttgtttgcttgtggtagtca

SEQ ID NO: 161631 - DNA, 25 bp, SARS Virus
ggttttgtttgtctgtggtagtcac

SEQ ID NO: 161632 - DNA, 25 bp, SARS Virus
gttttgtttgttcgtggtagtcact

SEQ ID NO: 161633 - DNA, 25 bp, SARS Virus
ttttgtttgtttctggtagtcactt

SEQ ID NO: 161634 - DNA, 25 bp, SARS Virus
tttgtttgtttgcggtagtcactta

SEQ ID NO: 161635 - DNA, 25 bp, SARS Virus
ttgtttgtttgtcgtagtcacttaa

SEQ ID NO: 161636 - DNA, 25 bp, SARS Virus
tgtttgtttgtgctagtcacttaaa

SEQ ID NO: 161637 - DNA, 25 bp, SARS Virus
gtttgtttgtggcagtcacttaaat

SEQ ID NO: 161638 - DNA, 25 bp, SARS Virus
tttgtttgtggtcgtcacttaaata

SEQ ID NO: 161639 - DNA, 25 bp, SARS Virus
ttgtttgtggtactcacttaaatag

SEQ ID NO: 161640 - DNA, 25 bp, SARS Virus
tgtttgtggtagccacttaaatagc

SEQ ID NO: 161641 - DNA, 25 bp, SARS Virus
gtttgtggtagtcacttaaatagca

SEQ ID NO: 161642 - DNA, 25 bp, SARS Virus
tttgtggtagtcccttaaatagcac

SEQ ID NO: 161643 - DNA, 25 bp, SARS Virus
ttgtggtagtcacttaaatagcact

SEQ ID NO: 161644 - DNA, 25 bp, SARS Virus
tgtggtagtcacctaaatagcacta

SEQ ID NO: 161645 - DNA, 25 bp, SARS Virus
gtggtagtcactcaaatagcactac

SEQ ID NO: 161646 - DNA, 25 bp, SARS Virus
tggtagtcacttcaatagcactaca

SEQ ID NO: 161647 - DNA, 25 bp, SARS Virus
ggtagtcacttacatagcactacac

SEQ ID NO: 161648 - DNA, 25 bp, SARS Virus
gtagtcacttaactagcactacaca

SEQ ID NO: 161649 - DNA, 25 bp, SARS Virus
tagtcacttaaacagcactacacat

SEQ ID NO: 161650 - DNA, 25 bp, SARS Virus
agtcacttaaatcgcactacacatc

SEQ ID NO: 161651 - DNA, 25 bp, SARS Virus
gtcacttaaataccactacacatcg

SEQ ID NO: 161652 - DNA, 25 bp, SARS Virus
tcacttaaatagcactacacatcgt

SEQ ID NO: 161653 - DNA, 25 bp, SARS Virus
cacttaaatagccctacacatcgta

SEQ ID NO: 161654 - DNA, 25 bp, SARS Virus
acttaaatagcactacacatcgtat

SEQ ID NO: 161655 - DNA, 25 bp, SARS Virus
cttaaatagcaccacacatcgtatt

SEQ ID NO: 161656 - DNA, 25 bp, SARS Virus
ttaaatagcactccacatcgtattc

SEQ ID NO: 161657 - DNA, 25 bp, SARS Virus
taaatagcactacacatcgtattct

SEQ ID NO: 161658 - DNA, 25 bp, SARS Virus
aaatagcactacccatcgtattctt

SEQ ID NO: 161659 - DNA, 25 bp, SARS Virus
aatagcactacacatcgtattctta

SEQ ID NO: 161660 - DNA, 25 bp, SARS Virus
atagcactacacctcgtattcttat

SEQ ID NO: 161661 - DNA, 25 bp, SARS Virus
tagcactacacaccgtattcttatc

SEQ ID NO: 161662 - DNA, 25 bp, SARS Virus
agcactacacatcgtattcttatct

SEQ ID NO: 161663 - DNA, 25 bp, SARS Virus
gcactacacatcctattcttatctt

SEQ ID NO: 161664 - DNA, 25 bp, SARS Virus
cactacacatcgcattcttatcttc

SEQ ID NO: 161665 - DNA, 25 bp, SARS Virus
actacacatcgtcttcttatcttct

SEQ ID NO: 161666 - DNA, 25 bp, SARS Virus
ctacacatcgtactcttatcttctc

SEQ ID NO: 161667 - DNA, 25 bp, SARS Virus
tacacatcgtatccttatcttctca

SEQ ID NO: 161668 - DNA, 25 bp, SARS Virus
acacatcgtattcttatcttctcaa

SEQ ID NO: 161669 - DNA, 25 bp, SARS Virus
cacatcgtattcctatcttctcaag

SEQ ID NO: 161670 - DNA, 25 bp, SARS Virus
acatcgtattctcatcttctcaagg

SEQ ID NO: 161671 - DNA, 25 bp, SARS Virus
catcgtattcttctcttctcaagga

SEQ ID NO: 161672 - DNA, 25 bp, SARS Virus
atcgtattcttaccttctcaaggag

SEQ ID NO: 161673 - DNA, 25 bp, SARS Virus
tcgtattcttatcttctcaaggaga

SEQ ID NO: 161674 - DNA, 25 bp, SARS Virus
cgtattcttatcctctcaaggagat

SEQ ID NO: 161675 - DNA, 25 bp, SARS Virus
gtattcttatctcctcaaggagata

SEQ ID NO: 161676 - DNA, 25 bp, SARS Virus
tattcttatcttctcaaggagataa

SEQ ID NO: 161677 - DNA, 25 bp, SARS Virus
attcttatcttcccaaggagataaa

SEQ ID NO: 161678 - DNA, 25 bp, SARS Virus
ttcttatcttctcaaggagataaaa

SEQ ID NO: 161679 - DNA, 25 bp, SARS Virus
tcttatcttctccaggagataaaac

SEQ ID NO: 161680 - DNA, 25 bp, SARS Virus
cttatcttctcacggagataaaaca

SEQ ID NO: 161681 - DNA, 25 bp, SARS Virus
ttatcttctcaacgagataaaacat

SEQ ID NO: 161682 - DNA, 25 bp, SARS Virus
tatcttctcaagcagataaaacatt

SEQ ID NO: 161683 - DNA, 25 bp, SARS Virus
atcttctcaaggcgataaaacattc

SEQ ID NO: 161684 - DNA, 25 bp, SARS Virus
tcttctcaaggacataaaacattcg

SEQ ID NO: 161685 - DNA, 25 bp, SARS Virus
cttctcaaggagctaaaacattcga

SEQ ID NO: 161686 - DNA, 25 bp, SARS Virus
ttctcaaggagacaaaacattcgaa

SEQ ID NO: 161687 - DNA, 25 bp, SARS Virus
tctcaaggagatcaaacattcgaaa

SEQ ID NO: 161688 - DNA, 25 bp, SARS Virus
ctcaaggagatacaacattcgaaac

SEQ ID NO: 161689 - DNA, 25 bp, SARS Virus
tcaaggagataacacattcgaaaca

SEQ ID NO: 161690 - DNA, 25 bp, SARS Virus
caaggagataaaccattcgaaacag

SEQ ID NO: 161691 - DNA, 25 bp, SARS Virus
aaggagataaaacattcgaaacagt

SEQ ID NO: 161692 - DNA, 25 bp, SARS Virus
aggagataaaaccttcgaaacagtg

SEQ ID NO: 161693 - DNA, 25 bp, SARS Virus
ggagataaaacactcgaaacagtga

SEQ ID NO: 161694 - DNA, 25 bp, SARS Virus
gagataaaacatccgaaacagtgat

SEQ ID NO: 161695 - DNA, 25 bp, SARS Virus
agataaaacattcgaaacagtgatg

SEQ ID NO: 161696 - DNA, 25 bp, SARS Virus
gataaaacattccaaacagtgatgt

SEQ ID NO: 161697 - DNA, 25 bp, SARS Virus
ataaaacattcgcaacagtgatgta

SEQ ID NO: 161698 - DNA, 25 bp, SARS Virus
taaaacattcgacacagtgatgtac

SEQ ID NO: 161699 - DNA, 25 bp, SARS Virus
aaaacattcgaaccagtgatgtacc

SEQ ID NO: 161700 - DNA, 25 bp, SARS Virus
aaacattcgaaacagtgatgtaccg

SEQ ID NO: 161701 - DNA, 25 bp, SARS Virus
aacattcgaaaccgtgatgtaccga

SEQ ID NO: 161702 - DNA, 25 bp, SARS Virus
acattcgaaacactgatgtaccgac

SEQ ID NO: 161703 - DNA, 25 bp, SARS Virus
cattcgaaacagcgatgtaccgact

SEQ ID NO: 161704 - DNA, 25 bp, SARS Virus
attcgaaacagtcatgtaccgactc

SEQ ID NO: 161705 - DNA, 25 bp, SARS Virus
ttcgaaacagtgctgtaccgactcg

SEQ ID NO: 161706 - DNA, 25 bp, SARS Virus
tcgaaacagtgacgtaccgactcgt

SEQ ID NO: 161707 - DNA, 25 bp, SARS Virus
cgaaacagtgatctaccgactcgta

SEQ ID NO: 161708 - DNA, 25 bp, SARS Virus
gaaacagtgatgcaccgactcgtag

SEQ ID NO: 161709 - DNA, 25 bp, SARS Virus
aaacagtgatgtcccgactcgtagc

SEQ ID NO: 161710 - DNA, 25 bp, SARS Virus
aacagtgatgtaccgactcgtagca

SEQ ID NO: 161711 - DNA, 25 bp, SARS Virus
acagtgatgtaccgactcgtagcat

SEQ ID NO: 161712 - DNA, 25 bp, SARS Virus
cagtgatgtacccactcgtagcatc

SEQ ID NO: 161713 - DNA, 25 bp, SARS Virus
agtgatgtaccgcctcgtagcatct

SEQ ID NO: 161714 - DNA, 25 bp, SARS Virus
gtgatgtaccgactcgtagcatctt

SEQ ID NO: 161715 - DNA, 25 bp, SARS Virus
tgatgtaccgacccgtagcatcttg

SEQ ID NO: 161716 - DNA, 25 bp, SARS Virus
gatgtaccgactcgtagcatcttga

SEQ ID NO: 161717 - DNA, 25 bp, SARS Virus
atgtaccgactcctagcatcttgaa

SEQ ID NO: 161718 - DNA, 25 bp, SARS Virus
tgtaccgactcgcagcatcttgaag

SEQ ID NO: 161719 - DNA, 25 bp, SARS Virus
gtaccgactcgtcgcatcttgaagg

SEQ ID NO: 161720 - DNA, 25 bp, SARS Virus
taccgactcgtaccatcttgaaggt

SEQ ID NO: 161721 - DNA, 25 bp, SARS Virus
accgactcgtagcatcttgaaggta

SEQ ID NO: 161722 - DNA, 25 bp, SARS Virus
ccgactcgtagcctcttgaaggtaa

SEQ ID NO: 161723 - DNA, 25 bp, SARS Virus
cgactcgtagcaccttgaaggtaag

SEQ ID NO: 161724 - DNA, 25 bp, SARS Virus
gactcgtagcatcttgaaggtaaga

SEQ ID NO: 161725 - DNA, 25 bp, SARS Virus
actcgtagcatcctgaaggtaagat

SEQ ID NO: 161726 - DNA, 25 bp, SARS Virus
ctcgtagcatctcgaaggtaagatg

SEQ ID NO: 161727 - DNA, 25 bp, SARS Virus
tcgtagcatcttcaaggtaagatga

SEQ ID NO: 161728 - DNA, 25 bp, SARS Virus
cgtagcatcttgcaggtaagatgaa

SEQ ID NO: 161729 - DNA, 25 bp, SARS Virus
gtagcatcttgacggtaagatgaag

SEQ ID NO: 161730 - DNA, 25 bp, SARS Virus
tagcatcttgaacgtaagatgaagt

SEQ ID NO: 161731 - DNA, 25 bp, SARS Virus
agcatcttgaagctaagatgaagtc

SEQ ID NO: 161732 - DNA, 25 bp, SARS Virus
gcatcttgaaggcaagatgaagtcg

SEQ ID NO: 161733 - DNA, 25 bp, SARS Virus
catcttgaaggtcagatgaagtcgg

SEQ ID NO: 161734 - DNA, 25 bp, SARS Virus
atcttgaaggtacgatgaagtcgga

SEQ ID NO: 161735 - DNA, 25 bp, SARS Virus
tcttgaaggtaacatgaagtcggac

SEQ ID NO: 161736 - DNA, 25 bp, SARS Virus
cttgaaggtaagctgaagtcggact

SEQ ID NO: 161737 - DNA, 25 bp, SARS Virus
ttgaaggtaagacgaagtcggactc

SEQ ID NO: 161738 - DNA, 25 bp, SARS Virus
tgaaggtaagatcaagtcggactcc

SEQ ID NO: 161739 - DNA, 25 bp, SARS Virus
gaaggtaagatgcagtcggactccg

SEQ ID NO: 161740 - DNA, 25 bp, SARS Virus
aaggtaagatgacgtcggactccgt

SEQ ID NO: 161741 - DNA, 25 bp, SARS Virus
aggtaagatgaactcggactccgtg

SEQ ID NO: 161742 - DNA, 25 bp, SARS Virus
ggtaagatgaagccggactccgtgt

SEQ ID NO: 161743 - DNA, 25 bp, SARS Virus
gtaagatgaagtcggactccgtgtg

SEQ ID NO: 161744 - DNA, 25 bp, SARS Virus
taagatgaagtccgactccgtgtgt

SEQ ID NO: 161745 - DNA, 25 bp, SARS Virus
aagatgaagtcgcactccgtgtgtg

SEQ ID NO: 161746 - DNA, 25 bp, SARS Virus
agatgaagtcggcctccgtgtgtga

SEQ ID NO: 161747 - DNA, 25 bp, SARS Virus
gatgaagtcggactccgtgtgtgaa

SEQ ID NO: 161748 - DNA, 25 bp, SARS Virus
atgaagtcggaccccgtgtgtgaac

SEQ ID NO: 161749 - DNA, 25 bp, SARS Virus
tgaagtcggactccgtgtgtgaact

SEQ ID NO: 161750 - DNA, 25 bp, SARS Virus
gaagtcggactccgtgtgtgaacta

SEQ ID NO: 161751 - DNA, 25 bp, SARS Virus
aagtcggactccctgtgtgaactat

SEQ ID NO: 161752 - DNA, 25 bp, SARS Virus
agtcggactccgcgtgtgaactatc

SEQ ID NO: 161753 - DNA, 25 bp, SARS Virus
gtcggactccgtctgtgaactatcg

SEQ ID NO: 161754 - DNA, 25 bp, SARS Virus
tcggactccgtgcgtgaactatcgg

SEQ ID NO: 161755 - DNA, 25 bp, SARS Virus
cggactccgtgtctgaactatcgga

SEQ ID NO: 161756 - DNA, 25 bp, SARS Virus
ggactccgtgtgcgaactatcggaa

SEQ ID NO: 161757 - DNA, 25 bp, SARS Virus
gactccgtgtgtcaactatcggaaa

SEQ ID NO: 161758 - DNA, 25 bp, SARS Virus
actccgtgtgtgcactatcggaaac

SEQ ID NO: 161759 - DNA, 25 bp, SARS Virus
ctccgtgtgtgacctatcggaaacc

SEQ ID NO: 161760 - DNA, 25 bp, SARS Virus
tccgtgtgtgaactatcggaaacct

SEQ ID NO: 161761 - DNA, 25 bp, SARS Virus
ccgtgtgtgaaccatcggaaaccta

SEQ ID NO: 161762 - DNA, 25 bp, SARS Virus
cgtgtgtgaactctcggaaacctaa

SEQ ID NO: 161763 - DNA, 25 bp, SARS Virus
gtgtgtgaactaccggaaacctaaa

SEQ ID NO: 161764 - DNA, 25 bp, SARS Virus
tgtgtgaactatcggaaacctaaag

SEQ ID NO: 161765 - DNA, 25 bp, SARS Virus
gtgtgaactatccgaaacctaaagg

SEQ ID NO: 161766 - DNA, 25 bp, SARS Virus
tgtgaactatcgcaaacctaaaggt

SEQ ID NO: 161767 - DNA, 25 bp, SARS Virus
gtgaactatcggcaacctaaaggtt

SEQ ID NO: 161768 - DNA, 25 bp, SARS Virus
tgaactatcggacacctaaaggtta

SEQ ID NO: 161769 - DNA, 25 bp, SARS Virus
gaactatcggaaccctaaaggttac

SEQ ID NO: 161770 - DNA, 25 bp, SARS Virus
aactatcggaaacctaaaggttaca

SEQ ID NO: 161771 - DNA, 25 bp, SARS Virus
actatcggaaacctaaaggttacag

SEQ ID NO: 161772 - DNA, 25 bp, SARS Virus
ctatcggaaacccaaaggttacagt

SEQ ID NO: 161773 - DNA, 25 bp, SARS Virus
tatcggaaacctcaaggttacagta

SEQ ID NO: 161774 - DNA, 25 bp, SARS Virus
atcggaaacctacaggttacagtac

SEQ ID NO: 161775 - DNA, 25 bp, SARS Virus
tcggaaacctaacggttacagtact

SEQ ID NO: 161776 - DNA, 25 bp, SARS Virus
cggaaacctaaacgttacagtactt

SEQ ID NO: 161777 - DNA, 25 bp, SARS Virus
ggaaacctaaagcttacagtacttc

SEQ ID NO: 161778 - DNA, 25 bp, SARS Virus
gaaacctaaaggctacagtacttct

SEQ ID NO: 161779 - DNA, 25 bp, SARS Virus
aaacctaaaggtcacagtacttctt

SEQ ID NO: 161780 - DNA, 25 bp, SARS Virus
aacctaaaggttccagtacttcttg

SEQ ID NO: 161781 - DNA, 25 bp, SARS Virus
acctaaaggttacagtacttcttga

SEQ ID NO: 161782 - DNA, 25 bp, SARS Virus
cctaaaggttaccgtacttcttgac

SEQ ID NO: 161783 - DNA, 25 bp, SARS Virus
ctaaaggttacactacttcttgacc

SEQ ID NO: 161784 - DNA, 25 bp, SARS Virus
taaaggttacagcacttcttgacct

SEQ ID NO: 161785 - DNA, 25 bp, SARS Virus
aaaggttacagtccttcttgacctt

SEQ ID NO: 161786 - DNA, 25 bp, SARS Virus
aaggttacagtacttcttgaccttt

SEQ ID NO: 161787 - DNA, 25 bp, SARS Virus
aggttacagtacctcttgacctttg

SEQ ID NO: 161788 - DNA, 25 bp, SARS Virus
ggttacagtactccttgacctttga

SEQ ID NO: 161789 - DNA, 25 bp, SARS Virus
gttacagtacttcttgacctttgaa

SEQ ID NO: 161790 - DNA, 25 bp, SARS Virus
ttacagtacttcctgacctttgaat

SEQ ID NO: 161791 - DNA, 25 bp, SARS Virus
tacagtacttctcgacctttgaata

SEQ ID NO: 161792 - DNA, 25 bp, SARS Virus
acagtacttcttcacctttgaatag

SEQ ID NO: 161793 - DNA, 25 bp, SARS Virus
cagtacttcttgccctttgaatagt

SEQ ID NO: 161794 - DNA, 25 bp, SARS Virus
agtacttcttgacctttgaatagtc

SEQ ID NO: 161795 - DNA, 25 bp, SARS Virus
gtacttcttgacctttgaatagtcg

SEQ ID NO: 161796 - DNA, 25 bp, SARS Virus
tacttcttgacccttgaatagtcgt

SEQ ID NO: 161797 - DNA, 25 bp, SARS Virus
acttcttgacctctgaatagtcgtt

SEQ ID NO: 161798 - DNA, 25 bp, SARS Virus
cttcttgaccttcgaatagtcgttc

SEQ ID NO: 161799 - DNA, 25 bp, SARS Virus
ttcttgacctttcaatagtcgttcg

SEQ ID NO: 161800 - DNA, 25 bp, SARS Virus
tcttgacctttgcatagtcgttcgt

SEQ ID NO: 161801 - DNA, 25 bp, SARS Virus
cttgacctttgactagtcgttcgtt

SEQ ID NO: 161802 - DNA, 25 bp, SARS Virus
ttgacctttgaacagtcgttcgtta

SEQ ID NO: 161803 - DNA, 25 bp, SARS Virus
tgacctttgaatcgtcgttcgttac

SEQ ID NO: 161804 - DNA, 25 bp, SARS Virus
gacctttgaatactcgttcgttacg

SEQ ID NO: 161805 - DNA, 25 bp, SARS Virus
acctttgaatagccgttcgttacgt

SEQ ID NO: 161806 - DNA, 25 bp, SARS Virus
cctttgaatagtcgttcgttacgtc

SEQ ID NO: 161807 - DNA, 25 bp, SARS Virus
ctttgaatagtccttcgttacgtct

SEQ ID NO: 161808 - DNA, 25 bp, SARS Virus
tttgaatagtcgctcgttacgtctg

SEQ ID NO: 161809 - DNA, 25 bp, SARS Virus
ttgaatagtcgtccgttacgtctga

SEQ ID NO: 161810 - DNA, 25 bp, SARS Virus
tgaatagtcgttcgttacgtctgaa

SEQ ID NO: 161811 - DNA, 25 bp, SARS Virus
gaatagtcgttccttacgtctgaag

SEQ ID NO: 161812 - DNA, 25 bp, SARS Virus
aatagtcgttcgctacgtctgaagt

SEQ ID NO: 161813 - DNA, 25 bp, SARS Virus
atagtcgttcgtcacgtctgaagtg

SEQ ID NO: 161814 - DNA, 25 bp, SARS Virus
tagtcgttcgttccgtctgaagtgt

SEQ ID NO: 161815 - DNA, 25 bp, SARS Virus
agtcgttcgttacgtctgaagtgtt

SEQ ID NO: 161816 - DNA, 25 bp, SARS Virus
gtcgttcgttacctctgaagtgttg

SEQ ID NO: 161817 - DNA, 25 bp, SARS Virus
tcgttcgttacgcctgaagtgttgg

SEQ ID NO: 161818 - DNA, 25 bp, SARS Virus
cgttcgttacgtctgaagtgttggt

SEQ ID NO: 161819 - DNA, 25 bp, SARS Virus
gttcgttacgtccgaagtgttggta

SEQ ID NO: 161820 - DNA, 25 bp, SARS Virus
ttcgttacgtctcaagtgttggtac

SEQ ID NO: 161821 - DNA, 25 bp, SARS Virus
tcgttacgtctgcagtgttggtaca

SEQ ID NO: 161822 - DNA, 25 bp, SARS Virus
cgttacgtctgacgtgttggtacac

SEQ ID NO: 161823 - DNA, 25 bp, SARS Virus
gttacgtctgaactgttggtacaca

SEQ ID NO: 161824 - DNA, 25 bp, SARS Virus
ttacgtctgaagcgttggtacacaa

SEQ ID NO: 161825 - DNA, 25 bp, SARS Virus
tacgtctgaagtcttggtacacaac

SEQ ID NO: 161826 - DNA, 25 bp, SARS Virus
acgtctgaagtgctggtacacaaca

SEQ ID NO: 161827 - DNA, 25 bp, SARS Virus
cgtctgaagtgtcggtacacaacat

SEQ ID NO: 161828 - DNA, 25 bp, SARS Virus
gtctgaagtgttcgtacacaacatg

SEQ ID NO: 161829 - DNA, 25 bp, SARS Virus
tctgaagtgttgctacacaacatga

SEQ ID NO: 161830 - DNA, 25 bp, SARS Virus
ctgaagtgttggcacacaacatgaa

SEQ ID NO: 161831 - DNA, 25 bp, SARS Virus
tgaagtgttggtccacaacatgaaa

SEQ ID NO: 161832 - DNA, 25 bp, SARS Virus
gaagtgttggtacacaacatgaaaa

SEQ ID NO: 161833 - DNA, 25 bp, SARS Virus
aagtgttggtacccaacatgaaaag

SEQ ID NO: 161834 - DNA, 25 bp, SARS Virus
agtgttggtacacaacatgaaaaga

SEQ ID NO: 161835 - DNA, 25 bp, SARS Virus
gtgttggtacaccacatgaaaagac

SEQ ID NO: 161836 - DNA, 25 bp, SARS Virus
tgttggtacacaccatgaaaagacg

SEQ ID NO: 161837 - DNA, 25 bp, SARS Virus
gttggtacacaacatgaaaagacgt

SEQ ID NO: 161838 - DNA, 25 bp, SARS Virus
ttggtacacaacctgaaaagacgtt

SEQ ID NO: 161839 - DNA, 25 bp, SARS Virus
tggtacacaacacgaaaagacgttc

SEQ ID NO: 161840 - DNA, 25 bp, SARS Virus
ggtacacaacatcaaaagacgttcg

SEQ ID NO: 161841 - DNA, 25 bp, SARS Virus
gtacacaacatgcaaagacgttcgt

SEQ ID NO: 161842 - DNA, 25 bp, SARS Virus
tacacaacatgacaagacgttcgtc

SEQ ID NO: 161843 - DNA, 25 bp, SARS Virus
acacaacatgaacagacgttcgtct

SEQ ID NO: 161844 - DNA, 25 bp, SARS Virus
cacaacatgaaacgacgttcgtctt

SEQ ID NO: 161845 - DNA, 25 bp, SARS Virus
acaacatgaaaacacgttcgtctta

SEQ ID NO: 161846 - DNA, 25 bp, SARS Virus
caacatgaaaagccgttcgtcttaa

SEQ ID NO: 161847 - DNA, 25 bp, SARS Virus
aacatgaaaagacgttcgtcttaat

SEQ ID NO: 161848 - DNA, 25 bp, SARS Virus
acatgaaaagaccttcgtcttaatt

SEQ ID NO: 161849 - DNA, 25 bp, SARS Virus
catgaaaagacgctcgtcttaattg

SEQ ID NO: 161850 - DNA, 25 bp, SARS Virus
atgaaaagacgtccgtcttaattgg

SEQ ID NO: 161851 - DNA, 25 bp, SARS Virus
tgaaaagacgttcgtcttaattggg

SEQ ID NO: 161852 - DNA, 25 bp, SARS Virus
gaaaagacgttcctcttaattggga

SEQ ID NO: 161853 - DNA, 25 bp, SARS Virus
aaaagacgttcgccttaattgggag

SEQ ID NO: 161854 - DNA, 25 bp, SARS Virus
aaagacgttcgtcttaattgggagt

SEQ ID NO: 161855 - DNA, 25 bp, SARS Virus
aagacgttcgtcctaattgggagtc

SEQ ID NO: 161856 - DNA, 25 bp, SARS Virus
agacgttcgtctcaattgggagtca

SEQ ID NO: 161857 - DNA, 25 bp, SARS Virus
gacgttcgtcttcattgggagtcaa

SEQ ID NO: 161858 - DNA, 25 bp, SARS Virus
acgttcgtcttacttgggagtcaag

SEQ ID NO: 161859 - DNA, 25 bp, SARS Virus
cgttcgtcttaactgggagtcaagt

SEQ ID NO: 161860 - DNA, 25 bp, SARS Virus
gttcgtcttaatcgggagtcaagta

SEQ ID NO: 161861 - DNA, 25 bp, SARS Virus
ttcgtcttaattcggagtcaagtag

SEQ ID NO: 161862 - DNA, 25 bp, SARS Virus
tcgtcttaattgcgagtcaagtaga

SEQ ID NO: 161863 - DNA, 25 bp, SARS Virus
cgtcttaattggcagtcaagtagag

SEQ ID NO: 161864 - DNA, 25 bp, SARS Virus
gtcttaattgggcgtcaagtagagg

SEQ ID NO: 161865 - DNA, 25 bp, SARS Virus
tcttaattgggactcaagtagagga

SEQ ID NO: 161866 - DNA, 25 bp, SARS Virus
cttaattgggagccaagtagaggat

SEQ ID NO: 161867 - DNA, 25 bp, SARS Virus
ttaattgggagtcaagtagaggata

SEQ ID NO: 161868 - DNA, 25 bp, SARS Virus
taattgggagtccagtagaggatat

SEQ ID NO: 161869 - DNA, 25 bp, SARS Virus
aattgggagtcacgtagaggatatt

SEQ ID NO: 161870 - DNA, 25 bp, SARS Virus
attgggagtcaactagaggatatta

SEQ ID NO: 161871 - DNA, 25 bp, SARS Virus
ttgggagtcaagcagaggatattat

SEQ ID NO: 161872 - DNA, 25 bp, SARS Virus
tgggagtcaagtcgaggatattatc

SEQ ID NO: 161873 - DNA, 25 bp, SARS Virus
gggagtcaagtacaggatattatcc

SEQ ID NO: 161874 - DNA, 25 bp, SARS Virus
ggagtcaagtagcggatattatccc

SEQ ID NO: 161875 - DNA, 25 bp, SARS Virus
gagtcaagtagacgatattatccca

SEQ ID NO: 161876 - DNA, 25 bp, SARS Virus
agtcaagtagagcatattatcccat

SEQ ID NO: 161877 - DNA, 25 bp, SARS Virus
gtcaagtagaggctattatcccata

SEQ ID NO: 161878 - DNA, 25 bp, SARS Virus
tcaagtagaggacattatcccataa

SEQ ID NO: 161879 - DNA, 25 bp, SARS Virus
caagtagaggatcttatcccataag

SEQ ID NO: 161880 - DNA, 25 bp, SARS Virus
aagtagaggatactatcccataagt

SEQ ID NO: 161881 - DNA, 25 bp, SARS Virus
agtagaggatatcatcccataagtt

SEQ ID NO: 161882 - DNA, 25 bp, SARS Virus
gtagaggatattctcccataagttg

SEQ ID NO: 161883 - DNA, 25 bp, SARS Virus
tagaggatattaccccataagttgt

SEQ ID NO: 161884 - DNA, 25 bp, SARS Virus
agaggatattatcccataagttgtc

SEQ ID NO: 161885 - DNA, 25 bp, SARS Virus
gaggatattatcccataagttgtct

SEQ ID NO: 161886 - DNA, 25 bp, SARS Virus
aggatattatcccataagttgtctg

SEQ ID NO: 161887 - DNA, 25 bp, SARS Virus
ggatattatcccctaagttgtctgg

SEQ ID NO: 161888 - DNA, 25 bp, SARS Virus
gatattatcccacaagttgtctggt

SEQ ID NO: 161889 - DNA, 25 bp, SARS Virus
atattatcccatcagttgtctggtt

SEQ ID NO: 161890 - DNA, 25 bp, SARS Virus
tattatcccatacgttgtctggtta

SEQ ID NO: 161891 - DNA, 25 bp, SARS Virus
attatcccataacttgtctggttag

SEQ ID NO: 161892 - DNA, 25 bp, SARS Virus
ttatcccataagctgtctggttagt

SEQ ID NO: 161893 - DNA, 25 bp, SARS Virus
tatcccataagtcgtctggttagtt

SEQ ID NO: 161894 - DNA, 25 bp, SARS Virus
atcccataagttctctggttagttg

SEQ ID NO: 161895 - DNA, 25 bp, SARS Virus
tcccataagttgcctggttagttgc

SEQ ID NO: 161896 - DNA, 25 bp, SARS Virus
cccataagttgtctggttagttgcg

SEQ ID NO: 161897 - DNA, 25 bp, SARS Virus
ccataagttgtccggttagttgcgc

SEQ ID NO: 161898 - DNA, 25 bp, SARS Virus
cataagttgtctcgttagttgcgcg

SEQ ID NO: 161899 - DNA, 25 bp, SARS Virus
ataagttgtctgcttagttgcgcga

SEQ ID NO: 161900 - DNA, 25 bp, SARS Virus
taagttgtctggctagttgcgcgaa

SEQ ID NO: 161901 - DNA, 25 bp, SARS Virus
aagttgtctggtcagttgcgcgaat

SEQ ID NO: 161902 - DNA, 25 bp, SARS Virus
agttgtctggttcgttgcgcgaatt

SEQ ID NO: 161903 - DNA, 25 bp, SARS Virus
gttgtctggttacttgcgcgaattg

SEQ ID NO: 161904 - DNA, 25 bp, SARS Virus
ttgtctggttagctgcgcgaattgt

SEQ ID NO: 161905 - DNA, 25 bp, SARS Virus
tgtctggttagtcgcgcgaattgtt

SEQ ID NO: 161906 - DNA, 25 bp, SARS Virus
gtctggttagttccgcgaattgttt

SEQ ID NO: 161907 - DNA, 25 bp, SARS Virus
tctggttagttgcgcgaattgtttc

SEQ ID NO: 161908 - DNA, 25 bp, SARS Virus
ctggttagttgcccgaattgtttcg

SEQ ID NO: 161909 - DNA, 25 bp, SARS Virus
tggttagttgcgcgaattgtttcgt

SEQ ID NO: 161910 - DNA, 25 bp, SARS Virus
ggttagttgcgccaattgtttcgtg

SEQ ID NO: 161911 - DNA, 25 bp, SARS Virus
gttagttgcgcgcattgtttcgtga

SEQ ID NO: 161912 - DNA, 25 bp, SARS Virus
ttagttgcgcgacttgtttcgtgag

SEQ ID NO: 161913 - DNA, 25 bp, SARS Virus
tagttgcgcgaactgtttcgtgagt

SEQ ID NO: 161914 - DNA, 25 bp, SARS Virus
agttgcgcgaatcgtttcgtgagta

SEQ ID NO: 161915 - DNA, 25 bp, SARS Virus
gttgcgcgaattctttcgtgagtac

SEQ ID NO: 161916 - DNA, 25 bp, SARS Virus
ttgcgcgaattgcttcgtgagtacc

SEQ ID NO: 161917 - DNA, 25 bp, SARS Virus
tgcgcgaattgtctcgtgagtacct

SEQ ID NO: 161918 - DNA, 25 bp, SARS Virus
gcgcgaattgttccgtgagtacctg

SEQ ID NO: 161919 - DNA, 25 bp, SARS Virus
cgcgaattgtttcgtgagtacctga

SEQ ID NO: 161920 - DNA, 25 bp, SARS Virus
gcgaattgtttcctgagtacctgac

SEQ ID NO: 161921 - DNA, 25 bp, SARS Virus
cgaattgtttcgcgagtacctgacg

SEQ ID NO: 161922 - DNA, 25 bp, SARS Virus
gaattgtttcgtcagtacctgacga

SEQ ID NO: 161923 - DNA, 25 bp, SARS Virus
aattgtttcgtgcgtacctgacgat

SEQ ID NO: 161924 - DNA, 25 bp, SARS Virus
attgtttcgtgactacctgacgatt

SEQ ID NO: 161925 - DNA, 25 bp, SARS Virus
ttgtttcgtgagcacctgacgattt

SEQ ID NO: 161926 - DNA, 25 bp, SARS Virus
tgtttcgtgagtccctgacgatttg

SEQ ID NO: 161927 - DNA, 25 bp, SARS Virus
gtttcgtgagtacctgacgatttgt

SEQ ID NO: 161928 - DNA, 25 bp, SARS Virus
tttcgtgagtacctgacgatttgta

SEQ ID NO: 161929 - DNA, 25 bp, SARS Virus
ttcgtgagtacccgacgatttgtag

SEQ ID NO: 161930 - DNA, 25 bp, SARS Virus
tcgtgagtacctcacgatttgtaga

SEQ ID NO: 161931 - DNA, 25 bp, SARS Virus
cgtgagtacctgccgatttgtagat

SEQ ID NO: 161932 - DNA, 25 bp, SARS Virus
gtgagtacctgacgatttgtagatc

SEQ ID NO: 161933 - DNA, 25 bp, SARS Virus
tgagtacctgaccatttgtagatca

SEQ ID NO: 161934 - DNA, 25 bp, SARS Virus
gagtacctgacgctttgtagatcag

SEQ ID NO: 161935 - DNA, 25 bp, SARS Virus
agtacctgacgacttgtagatcagt

SEQ ID NO: 161936 - DNA, 25 bp, SARS Virus
gtacctgacgatctgtagatcagta

SEQ ID NO: 161937 - DNA, 25 bp, SARS Virus
tacctgacgattcgtagatcagtac

SEQ ID NO: 161938 - DNA, 25 bp, SARS Virus
acctgacgatttctagatcagtact

SEQ ID NO: 161939 - DNA, 25 bp, SARS Virus
cctgacgatttgcagatcagtacta

SEQ ID NO: 161940 - DNA, 25 bp, SARS Virus
ctgacgatttgtcgatcagtactat

SEQ ID NO: 161941 - DNA, 25 bp, SARS Virus
tgacgatttgtacatcagtactatc

SEQ ID NO: 161942 - DNA, 25 bp, SARS Virus
gacgatttgtagctcagtactatcg

SEQ ID NO: 161943 - DNA, 25 bp, SARS Virus
acgatttgtagaccagtactatcgt

SEQ ID NO: 161944 - DNA, 25 bp, SARS Virus
cgatttgtagatcagtactatcgta

SEQ ID NO: 161945 - DNA, 25 bp, SARS Virus
gatttgtagatccgtactatcgtag

SEQ ID NO: 161946 - DNA, 25 bp, SARS Virus
atttgtagatcactactatcgtagt

SEQ ID NO: 161947 - DNA, 25 bp, SARS Virus
tttgtagatcagcactatcgtagtg

SEQ ID NO: 161948 - DNA, 25 bp, SARS Virus
ttgtagatcagtcctatcgtagtgt

SEQ ID NO: 161949 - DNA, 25 bp, SARS Virus
tgtagatcagtactatcgtagtgtt

SEQ ID NO: 161950 - DNA, 25 bp, SARS Virus
gtagatcagtaccatcgtagtgttg

SEQ ID NO: 161951 - DNA, 25 bp, SARS Virus
tagatcagtactctcgtagtgttga

SEQ ID NO: 161952 - DNA, 25 bp, SARS Virus
agatcagtactaccgtagtgttgat

SEQ ID NO: 161953 - DNA, 25 bp, SARS Virus
gatcagtactatcgtagtgttgatc

SEQ ID NO: 161954 - DNA, 25 bp, SARS Virus
atcagtactatcctagtgttgatcg

SEQ ID NO: 161955 - DNA, 25 bp, SARS Virus
tcagtactatcgcagtgttgatcgg

SEQ ID NO: 161956 - DNA, 25 bp, SARS Virus
cagtactatcgtcgtgttgatcggt

SEQ ID NO: 161957 - DNA, 25 bp, SARS Virus
agtactatcgtactgttgatcggtg

SEQ ID NO: 161958 - DNA, 25 bp, SARS Virus
gtactatcgtagcgttgatcggtgt

SEQ ID NO: 161959 - DNA, 25 bp, SARS Virus
tactatcgtagtcttgatcggtgta

SEQ ID NO: 161960 - DNA, 25 bp, SARS Virus
actatcgtagtgctgatcggtgtac

SEQ ID NO: 161961 - DNA, 25 bp, SARS Virus
ctatcgtagtgtcgatcggtgtaca

SEQ ID NO: 161962 - DNA, 25 bp, SARS Virus
tatcgtagtgttcatcggtgtacac

SEQ ID NO: 161963 - DNA, 25 bp, SARS Virus
atcgtagtgttgctcggtgtacacg

SEQ ID NO: 161964 - DNA, 25 bp, SARS Virus
tcgtagtgttgaccggtgtacacgt

SEQ ID NO: 161965 - DNA, 25 bp, SARS Virus
cgtagtgttgatcggtgtacacgta

SEQ ID NO: 161966 - DNA, 25 bp, SARS Virus
gtagtgttgatccgtgtacacgtaa

SEQ ID NO: 161967 - DNA, 25 bp, SARS Virus
tagtgttgatcgctgtacacgtaaa

SEQ ID NO: 161968 - DNA, 25 bp, SARS Virus
agtgttgatcggcgtacacgtaaag

SEQ ID NO: 161969 - DNA, 25 bp, SARS Virus
gtgttgatcggtctacacgtaaagg

SEQ ID NO: 161970 - DNA, 25 bp, SARS Virus
tgttgatcggtgcacacgtaaaggt

SEQ ID NO: 161971 - DNA, 25 bp, SARS Virus
gttgatcggtgtccacgtaaaggta

SEQ ID NO: 161972 - DNA, 25 bp, SARS Virus
ttgatcggtgtacacgtaaaggtac

SEQ ID NO: 161973 - DNA, 25 bp, SARS Virus
tgatcggtgtacccgtaaaggtaca

SEQ ID NO: 161974 - DNA, 25 bp, SARS Virus
gatcggtgtacacgtaaaggtacat

SEQ ID NO: 161975 - DNA, 25 bp, SARS Virus
atcggtgtacacctaaaggtacatg

SEQ ID NO: 161976 - DNA, 25 bp, SARS Virus
tcggtgtacacgcaaaggtacatgg

SEQ ID NO: 161977 - DNA, 25 bp, SARS Virus
cggtgtacacgtcaaggtacatgga

SEQ ID NO: 161978 - DNA, 25 bp, SARS Virus
ggtgtacacgtacaggtacatggac

SEQ ID NO: 161979 - DNA, 25 bp, SARS Virus
gtgtacacgtaacggtacatggacc

SEQ ID NO: 161980 - DNA, 25 bp, SARS Virus
tgtacacgtaaacgtacatggaccg

SEQ ID NO: 161981 - DNA, 25 bp, SARS Virus
gtacacgtaaagctacatggaccgt

SEQ ID NO: 161982 - DNA, 25 bp, SARS Virus
tacacgtaaaggcacatggaccgtt

SEQ ID NO: 161983 - DNA, 25 bp, SARS Virus
acacgtaaaggtccatggaccgtta

SEQ ID NO: 161984 - DNA, 25 bp, SARS Virus
cacgtaaaggtacatggaccgttac

SEQ ID NO: 161985 - DNA, 25 bp, SARS Virus
acgtaaaggtacctggaccgttaca

SEQ ID NO: 161986 - DNA, 25 bp, SARS Virus
cgtaaaggtacacggaccgttacaa

SEQ ID NO: 161987 - DNA, 25 bp, SARS Virus
gtaaaggtacatcgaccgttacaac

SEQ ID NO: 161988 - DNA, 25 bp, SARS Virus
taaaggtacatgcaccgttacaacc

SEQ ID NO: 161989 - DNA, 25 bp, SARS Virus
aaaggtacatggcccgttacaacca

SEQ ID NO: 161990 - DNA, 25 bp, SARS Virus
aaggtacatggaccgttacaaccag

SEQ ID NO: 161991 - DNA, 25 bp, SARS Virus
aggtacatggaccgttacaaccagt

SEQ ID NO: 161992 - DNA, 25 bp, SARS Virus
ggtacatggacccttacaaccagta

SEQ ID NO: 161993 - DNA, 25 bp, SARS Virus
gtacatggaccgctacaaccagtac

SEQ ID NO: 161994 - DNA, 25 bp, SARS Virus
tacatggaccgtcacaaccagtacc

SEQ ID NO: 161995 - DNA, 25 bp, SARS Virus
acatggaccgttccaaccagtacca

SEQ ID NO: 161996 - DNA, 25 bp, SARS Virus
catggaccgttacaaccagtaccaa

SEQ ID NO: 161997 - DNA, 25 bp, SARS Virus
atggaccgttaccaccagtaccaat

SEQ ID NO: 161998 - DNA, 25 bp, SARS Virus
tggaccgttacacccagtaccaatg

SEQ ID NO: 161999 - DNA, 25 bp, SARS Virus
ggaccgttacaaccagtaccaatga

SEQ ID NO: 162000 - DNA, 25 bp, SARS Virus
gaccgttacaaccagtaccaatgag

SEQ ID NO: 162001 - DNA, 25 bp, SARS Virus
accgttacaacccgtaccaatgaga

SEQ ID NO: 162002 - DNA, 25 bp, SARS Virus
ccgttacaaccactaccaatgagac

SEQ ID NO: 162003 - DNA, 25 bp, SARS Virus
cgttacaaccagcaccaatgagact

SEQ ID NO: 162004 - DNA, 25 bp, SARS Virus
gttacaaccagtcccaatgagactt

SEQ ID NO: 162005 - DNA, 25 bp, SARS Virus
ttacaaccagtaccaatgagacttc

SEQ ID NO: 162006 - DNA, 25 bp, SARS Virus
tacaaccagtaccaatgagacttcc

SEQ ID NO: 162007 - DNA, 25 bp, SARS Virus
acaaccagtacccatgagacttcca

SEQ ID NO: 162008 - DNA, 25 bp, SARS Virus
caaccagtaccactgagacttccaa

SEQ ID NO: 162009 - DNA, 25 bp, SARS Virus
aaccagtaccaacgagacttccaat

SEQ ID NO: 162010 - DNA, 25 bp, SARS Virus
accagtaccaatcagacttccaatg

SEQ ID NO: 162011 - DNA, 25 bp, SARS Virus
ccagtaccaatgcgacttccaatgg

SEQ ID NO: 162012 - DNA, 25 bp, SARS Virus
cagtaccaatgacacttccaatggg

SEQ ID NO: 162013 - DNA, 25 bp, SARS Virus
agtaccaatgagccttccaatgggc

SEQ ID NO: 162014 - DNA, 25 bp, SARS Virus
gtaccaatgagacttccaatgggca

SEQ ID NO: 162015 - DNA, 25 bp, SARS Virus
taccaatgagacctccaatgggcat

SEQ ID NO: 162016 - DNA, 25 bp, SARS Virus
accaatgagactcccaatgggcatt

SEQ ID NO: 162017 - DNA, 25 bp, SARS Virus
ccaatgagacttccaatgggcattt

SEQ ID NO: 162018 - DNA, 25 bp, SARS Virus
caatgagacttccaatgggcatttc

SEQ ID NO: 162019 - DNA, 25 bp, SARS Virus
aatgagacttcccatgggcatttcg

SEQ ID NO: 162020 - DNA, 25 bp, SARS Virus
atgagacttccactgggcatttcgg

SEQ ID NO: 162021 - DNA, 25 bp, SARS Virus
tgagacttccaacgggcatttcggg

SEQ ID NO: 162022 - DNA, 25 bp, SARS Virus
gagacttccaatcggcatttcgggg

SEQ ID NO: 162023 - DNA, 25 bp, SARS Virus
agacttccaatgcgcatttcggggt

SEQ ID NO: 162024 - DNA, 25 bp, SARS Virus
gacttccaatggccatttcggggtg

SEQ ID NO: 162025 - DNA, 25 bp, SARS Virus
acttccaatgggcatttcggggtga

SEQ ID NO: 162026 - DNA, 25 bp, SARS Virus
cttccaatgggcctttcggggtgac

SEQ ID NO: 162027 - DNA, 25 bp, SARS Virus
ttccaatgggcacttcggggtgacg

SEQ ID NO: 162028 - DNA, 25 bp, SARS Virus
tccaatgggcatctcggggtgacga

SEQ ID NO: 162029 - DNA, 25 bp, SARS Virus
ccaatgggcattccggggtgacgac

SEQ ID NO: 162030 - DNA, 25 bp, SARS Virus
caatgggcatttcggggtgacgact

SEQ ID NO: 162031 - DNA, 25 bp, SARS Virus
aatgggcatttccgggtgacgactt

SEQ ID NO: 162032 - DNA, 25 bp, SARS Virus
atgggcatttcgcggtgacgacttg

SEQ ID NO: 162033 - DNA, 25 bp, SARS Virus
tgggcatttcggcgtgacgacttgt

SEQ ID NO: 162034 - DNA, 25 bp, SARS Virus
gggcatttcgggctgacgacttgta

SEQ ID NO: 162035 - DNA, 25 bp, SARS Virus
ggcatttcggggcgacgacttgtag

SEQ ID NO: 162036 - DNA, 25 bp, SARS Virus
gcatttcggggtcacgacttgtagt

SEQ ID NO: 162037 - DNA, 25 bp, SARS Virus
catttcggggtgccgacttgtagtt

SEQ ID NO: 162038 - DNA, 25 bp, SARS Virus
atttcggggtgacgacttgtagtta

SEQ ID NO: 162039 - DNA, 25 bp, SARS Virus
tttcggggtgaccacttgtagttag

SEQ ID NO: 162040 - DNA, 25 bp, SARS Virus
ttcggggtgacgccttgtagttagt

SEQ ID NO: 162041 - DNA, 25 bp, SARS Virus
tcggggtgacgacttgtagttagta

SEQ ID NO: 162042 - DNA, 25 bp, SARS Virus
cggggtgacgacctgtagttagtat

SEQ ID NO: 162043 - DNA, 25 bp, SARS Virus
ggggtgacgactcgtagttagtatt

SEQ ID NO: 162044 - DNA, 25 bp, SARS Virus
gggtgacgacttctagttagtattt

SEQ ID NO: 162045 - DNA, 25 bp, SARS Virus
ggtgacgacttgcagttagtattta

SEQ ID NO: 162046 - DNA, 25 bp, SARS Virus
gtgacgacttgtcgttagtatttac

SEQ ID NO: 162047 - DNA, 25 bp, SARS Virus
tgacgacttgtacttagtatttacc

SEQ ID NO: 162048 - DNA, 25 bp, SARS Virus
gacgacttgtagctagtatttaccc

SEQ ID NO: 162049 - DNA, 25 bp, SARS Virus
tcaaactgttctgagaacacagttt

SEQ ID NO: 162050 - DNA, 25 bp, SARS Virus
caaactgttctgggaacacagtttg

SEQ ID NO: 162051 - DNA, 25 bp, SARS Virus
aaactgttctgagaacacagtttgg

SEQ ID NO: 162052 - DNA, 25 bp, SARS Virus
aactgttctgaggacacagtttgga

SEQ ID NO: 162053 - DNA, 25 bp, SARS Virus
actgttctgagagcacagtttggat

SEQ ID NO: 162054 - DNA, 25 bp, SARS Virus
ctgttctgagaagacagtttggatg

SEQ ID NO: 162055 - DNA, 25 bp, SARS Virus
tgttctgagaacgcagtttggatgt

SEQ ID NO: 162056 - DNA, 25 bp, SARS Virus
gttctgagaacagagtttggatgtg

SEQ ID NO: 162057 - DNA, 25 bp, SARS Virus
ttctgagaacacggtttggatgtgt

SEQ ID NO: 162058 - DNA, 25 bp, SARS Virus
tctgagaacacagtttggatgtgtg

SEQ ID NO: 162059 - DNA, 25 bp, SARS Virus
ctgagaacacaggttggatgtgtgt

SEQ ID NO: 162060 - DNA, 25 bp, SARS Virus
tgagaacacagtgtggatgtgtgtt

SEQ ID NO: 162061 - DNA, 25 bp, SARS Virus
gagaacacagttgggatgtgtgtta

SEQ ID NO: 162062 - DNA, 25 bp, SARS Virus
agaacacagtttggatgtgtgttaa

SEQ ID NO: 162063 - DNA, 25 bp, SARS Virus
gaacacagtttggatgtgtgttaac

SEQ ID NO: 162064 - DNA, 25 bp, SARS Virus
aacacagtttgggtgtgtgttaacg

SEQ ID NO: 162065 - DNA, 25 bp, SARS Virus
acacagtttggaggtgtgttaacgt

SEQ ID NO: 162066 - DNA, 25 bp, SARS Virus
cacagtttggatgtgtgttaacgta

SEQ ID NO: 162067 - DNA, 25 bp, SARS Virus
acagtttggatgggtgttaacgtaa

SEQ ID NO: 162068 - DNA, 25 bp, SARS Virus
cagtttggatgtgtgttaacgtaac

SEQ ID NO: 162069 - DNA, 25 bp, SARS Virus
agtttggatgtgggttaacgtaacc

SEQ ID NO: 162070 - DNA, 25 bp, SARS Virus
gtttggatgtgtgttaacgtaaccg

SEQ ID NO: 162071 - DNA, 25 bp, SARS Virus
tttggatgtgtggtaacgtaaccga

SEQ ID NO: 162072 - DNA, 25 bp, SARS Virus
ttggatgtgtgtgaacgtaaccgac

SEQ ID NO: 162073 - DNA, 25 bp, SARS Virus
tggatgtgtgttgacgtaaccgacc

SEQ ID NO: 162074 - DNA, 25 bp, SARS Virus
ggatgtgtgttagcgtaaccgaccc

SEQ ID NO: 162075 - DNA, 25 bp, SARS Virus
gatgtgtgttaaggtaaccgaccca

SEQ ID NO: 162076 - DNA, 25 bp, SARS Virus
atgtgtgttaacgtaaccgacccat

SEQ ID NO: 162077 - DNA, 25 bp, SARS Virus
tgtgtgttaacggaaccgacccatt

SEQ ID NO: 162078 - DNA, 25 bp, SARS Virus
gtgtgttaacgtgaccgacccattg

SEQ ID NO: 162079 - DNA, 25 bp, SARS Virus
tgtgttaacgtagccgacccattgc

SEQ ID NO: 162080 - DNA, 25 bp, SARS Virus
gtgttaacgtaagcgacccattgct

SEQ ID NO: 162081 - DNA, 25 bp, SARS Virus
tgttaacgtaacggacccattgcta

SEQ ID NO: 162082 - DNA, 25 bp, SARS Virus
gttaacgtaaccgacccattgctag

SEQ ID NO: 162083 - DNA, 25 bp, SARS Virus
ttaacgtaaccggcccattgctagt

SEQ ID NO: 162084 - DNA, 25 bp, SARS Virus
taacgtaaccgagccattgctagtt

SEQ ID NO: 162085 - DNA, 25 bp, SARS Virus
aacgtaaccgacgcattgctagttg

SEQ ID NO: 162086 - DNA, 25 bp, SARS Virus
acgtaaccgaccgattgctagttgc

SEQ ID NO: 162087 - DNA, 25 bp, SARS Virus
cgtaaccgacccgttgctagttgca

SEQ ID NO: 162088 - DNA, 25 bp, SARS Virus
gtaaccgacccagtgctagttgcaa

SEQ ID NO: 162089 - DNA, 25 bp, SARS Virus
taaccgacccatggctagttgcaat

SEQ ID NO: 162090 - DNA, 25 bp, SARS Virus
aaccgacccattgctagttgcaatg

SEQ ID NO: 162091 - DNA, 25 bp, SARS Virus
accgacccattggtagttgcaatgt

SEQ ID NO: 162092 - DNA, 25 bp, SARS Virus
ccgacccattgcgagttgcaatgtt

SEQ ID NO: 162093 - DNA, 25 bp, SARS Virus
cgacccattgctggttgcaatgtta

SEQ ID NO: 162094 - DNA, 25 bp, SARS Virus
gacccattgctagttgcaatgttaa

SEQ ID NO: 162095 - DNA, 25 bp, SARS Virus
acccattgctaggtgcaatgttaag

SEQ ID NO: 162096 - DNA, 25 bp, SARS Virus
cccattgctagtggcaatgttaagg

SEQ ID NO: 162097 - DNA, 25 bp, SARS Virus
ccattgctagttgcaatgttaaggt

SEQ ID NO: 162098 - DNA, 25 bp, SARS Virus
cattgctagttggaatgttaaggtt

SEQ ID NO: 162099 - DNA, 25 bp, SARS Virus
attgctagttgcgatgttaaggttt

SEQ ID NO: 162100 - DNA, 25 bp, SARS Virus
ttgctagttgcagtgttaaggtttt

SEQ ID NO: 162101 - DNA, 25 bp, SARS Virus
tgctagttgcaaggttaaggttttg

SEQ ID NO: 162102 - DNA, 25 bp, SARS Virus
gctagttgcaatgttaaggttttgt

SEQ ID NO: 162103 - DNA, 25 bp, SARS Virus
ctagttgcaatggtaaggttttgtt

SEQ ID NO: 162104 - DNA, 25 bp, SARS Virus
tagttgcaatgtgaaggttttgttt

SEQ ID NO: 162105 - DNA, 25 bp, SARS Virus
agttgcaatgttgaggttttgtttg

SEQ ID NO: 162106 - DNA, 25 bp, SARS Virus
gttgcaatgttagggttttgtttgt

SEQ ID NO: 162107 - DNA, 25 bp, SARS Virus
ttgcaatgttaaggttttgtttgtt

SEQ ID NO: 162108 - DNA, 25 bp, SARS Virus
tgcaatgttaaggttttgtttgttt

SEQ ID NO: 162109 - DNA, 25 bp, SARS Virus
gcaatgttaagggtttgtttgtttg

SEQ ID NO: 162110 - DNA, 25 bp, SARS Virus
caatgttaaggtgttgtttgtttgt

SEQ ID NO: 162111 - DNA, 25 bp, SARS Virus
aatgttaaggttgtgtttgtttgtg

SEQ ID NO: 162112 - DNA, 25 bp, SARS Virus
atgttaaggtttggtttgtttgtgg

SEQ ID NO: 162113 - DNA, 25 bp, SARS Virus
tgttaaggttttgtttgtttgtggt

SEQ ID NO: 162114 - DNA, 25 bp, SARS Virus
gttaaggttttggttgtttgtggta

SEQ ID NO: 162115 - DNA, 25 bp, SARS Virus
ttaaggttttgtgtgtttgtggtag

SEQ ID NO: 162116 - DNA, 25 bp, SARS Virus
taaggttttgttggtttgtggtagt

SEQ ID NO: 162117 - DNA, 25 bp, SARS Virus
aaggttttgtttgtttgtggtagtc

SEQ ID NO: 162118 - DNA, 25 bp, SARS Virus
aggttttgtttggttgtggtagtca

SEQ ID NO: 162119 - DNA, 25 bp, SARS Virus
ggttttgtttgtgtgtggtagtcac

SEQ ID NO: 162120 - DNA, 25 bp, SARS Virus
gttttgtttgttggtggtagtcact

SEQ ID NO: 162121 - DNA, 25 bp, SARS Virus
ttttgtttgtttgtggtagtcactt

SEQ ID NO: 162122 - DNA, 25 bp, SARS Virus
tttgtttgtttggggtagtcactta

SEQ ID NO: 162123 - DNA, 25 bp, SARS Virus
ttgtttgtttgtggtagtcacttaa

SEQ ID NO: 162124 - DNA, 25 bp, SARS Virus
tgtttgtttgtggtagtcacttaaa

SEQ ID NO: 162125 - DNA, 25 bp, SARS Virus
gtttgtttgtgggagtcacttaaat

SEQ ID NO: 162126 - DNA, 25 bp, SARS Virus
tttgtttgtggtggtcacttaaata

SEQ ID NO: 162127 - DNA, 25 bp, SARS Virus
ttgtttgtggtagtcacttaaatag

SEQ ID NO: 162128 - DNA, 25 bp, SARS Virus
tgtttgtggtaggcacttaaatagc

SEQ ID NO: 162129 - DNA, 25 bp, SARS Virus
gtttgtggtagtgacttaaatagca

SEQ ID NO: 162130 - DNA, 25 bp, SARS Virus
tttgtggtagtcgcttaaatagcac

SEQ ID NO: 162131 - DNA, 25 bp, SARS Virus
ttgtggtagtcagttaaatagcact

SEQ ID NO: 162132 - DNA, 25 bp, SARS Virus
tgtggtagtcacgtaaatagcacta

SEQ ID NO: 162133 - DNA, 25 bp, SARS Virus
gtggtagtcactgaaatagcactac

SEQ ID NO: 162134 - DNA, 25 bp, SARS Virus
tggtagtcacttgaatagcactaca

SEQ ID NO: 162135 - DNA, 25 bp, SARS Virus
ggtagtcacttagatagcactacac

SEQ ID NO: 162136 - DNA, 25 bp, SARS Virus
gtagtcacttaagtagcactacaca

SEQ ID NO: 162137 - DNA, 25 bp, SARS Virus
tagtcacttaaagagcactacacat

SEQ ID NO: 162138 - DNA, 25 bp, SARS Virus
agtcacttaaatggcactacacatc

SEQ ID NO: 162139 - DNA, 25 bp, SARS Virus
gtcacttaaatagcactacacatcg

SEQ ID NO: 162140 - DNA, 25 bp, SARS Virus
tcacttaaataggactacacatcgt

SEQ ID NO: 162141 - DNA, 25 bp, SARS Virus
cacttaaatagcgctacacatcgta

SEQ ID NO: 162142 - DNA, 25 bp, SARS Virus
acttaaatagcagtacacatcgtat

SEQ ID NO: 162143 - DNA, 25 bp, SARS Virus
cttaaatagcacgacacatcgtatt

SEQ ID NO: 162144 - DNA, 25 bp, SARS Virus
ttaaatagcactgcacatcgtattc

SEQ ID NO: 162145 - DNA, 25 bp, SARS Virus
taaatagcactagacatcgtattct

SEQ ID NO: 162146 - DNA, 25 bp, SARS Virus
aaatagcactacgcatcgtattctt

SEQ ID NO: 162147 - DNA, 25 bp, SARS Virus
aatagcactacagatcgtattctta

SEQ ID NO: 162148 - DNA, 25 bp, SARS Virus
atagcactacacgtcgtattcttat

SEQ ID NO: 162149 - DNA, 25 bp, SARS Virus
tagcactacacagcgtattcttatc

SEQ ID NO: 162150 - DNA, 25 bp, SARS Virus
agcactacacatggtattcttatct

SEQ ID NO: 162151 - DNA, 25 bp, SARS Virus
gcactacacatcgtattcttatctt

SEQ ID NO: 162152 - DNA, 25 bp, SARS Virus
cactacacatcggattcttatcttc

SEQ ID NO: 162153 - DNA, 25 bp, SARS Virus
actacacatcgtgttcttatcttct

SEQ ID NO: 162154 - DNA, 25 bp, SARS Virus
ctacacatcgtagtcttatcttctc

SEQ ID NO: 162155 - DNA, 25 bp, SARS Virus
tacacatcgtatgcttatcttctca

SEQ ID NO: 162156 - DNA, 25 bp, SARS Virus
acacatcgtattgttatcttctcaa

SEQ ID NO: 162157 - DNA, 25 bp, SARS Virus
cacatcgtattcgtatcttctcaag

SEQ ID NO: 162158 - DNA, 25 bp, SARS Virus
acatcgtattctgatcttctcaagg

SEQ ID NO: 162159 - DNA, 25 bp, SARS Virus
catcgtattcttgtcttctcaagga

SEQ ID NO: 162160 - DNA, 25 bp, SARS Virus
atcgtattcttagcttctcaaggag

SEQ ID NO: 162161 - DNA, 25 bp, SARS Virus
tcgtattcttatgttctcaaggaga

SEQ ID NO: 162162 - DNA, 25 bp, SARS Virus
cgtattcttatcgtctcaaggagat

SEQ ID NO: 162163 - DNA, 25 bp, SARS Virus
gtattcttatctgctcaaggagata

SEQ ID NO: 162164 - DNA, 25 bp, SARS Virus
tattcttatcttgtcaaggagataa

SEQ ID NO: 162165 - DNA, 25 bp, SARS Virus
attcttatcttcgcaaggagataaa

SEQ ID NO: 162166 - DNA, 25 bp, SARS Virus
ttcttatcttctgaaggagataaaa

SEQ ID NO: 162167 - DNA, 25 bp, SARS Virus
tcttatcttctcgaggagataaaac

SEQ ID NO: 162168 - DNA, 25 bp, SARS Virus
cttatcttctcagggagataaaaca

SEQ ID NO: 162169 - DNA, 25 bp, SARS Virus
ttatcttctcaaggagataaaacat

SEQ ID NO: 162170 - DNA, 25 bp, SARS Virus
tatcttctcaaggagataaaacatt

SEQ ID NO: 162171 - DNA, 25 bp, SARS Virus
atcttctcaaggggataaaacattc

SEQ ID NO: 162172 - DNA, 25 bp, SARS Virus
tcttctcaaggagataaaacattcg

SEQ ID NO: 162173 - DNA, 25 bp, SARS Virus
cttctcaaggaggtaaaacattcga

SEQ ID NO: 162174 - DNA, 25 bp, SARS Virus
ttctcaaggagagaaaacattcgaa

SEQ ID NO: 162175 - DNA, 25 bp, SARS Virus
tctcaaggagatgaaacattcgaaa

SEQ ID NO: 162176 - DNA, 25 bp, SARS Virus
ctcaaggagatagaacattcgaaac

SEQ ID NO: 162177 - DNA, 25 bp, SARS Virus
tcaaggagataagacattcgaaaca

SEQ ID NO: 162178 - DNA, 25 bp, SARS Virus
caaggagataaagcattcgaaacag

SEQ ID NO: 162179 - DNA, 25 bp, SARS Virus
aaggagataaaagattcgaaacagt

SEQ ID NO: 162180 - DNA, 25 bp, SARS Virus
aggagataaaacgttcgaaacagtg

SEQ ID NO: 162181 - DNA, 25 bp, SARS Virus
ggagataaaacagtcgaaacagtga

SEQ ID NO: 162182 - DNA, 25 bp, SARS Virus
gagataaaacatgcgaaacagtgat

SEQ ID NO: 162183 - DNA, 25 bp, SARS Virus
agataaaacattggaaacagtgatg

SEQ ID NO: 162184 - DNA, 25 bp, SARS Virus
gataaaacattcgaaacagtgatgt

SEQ ID NO: 162185 - DNA, 25 bp, SARS Virus
ataaaacattcggaacagtgatgta

SEQ ID NO: 162186 - DNA, 25 bp, SARS Virus
taaaacattcgagacagtgatgtac

SEQ ID NO: 162187 - DNA, 25 bp, SARS Virus
aaaacattcgaagcagtgatgtacc

SEQ ID NO: 162188 - DNA, 25 bp, SARS Virus
aaacattcgaaagagtgatgtaccg

SEQ ID NO: 162189 - DNA, 25 bp, SARS Virus
aacattcgaaacggtgatgtaccga

SEQ ID NO: 162190 - DNA, 25 bp, SARS Virus
acattcgaaacagtgatgtaccgac

SEQ ID NO: 162191 - DNA, 25 bp, SARS Virus
cattcgaaacagggatgtaccgact

SEQ ID NO: 162192 - DNA, 25 bp, SARS Virus
attcgaaacagtgatgtaccgactc

SEQ ID NO: 162193 - DNA, 25 bp, SARS Virus
ttcgaaacagtggtgtaccgactcg

SEQ ID NO: 162194 - DNA, 25 bp, SARS Virus
tcgaaacagtgaggtaccgactcgt

SEQ ID NO: 162195 - DNA, 25 bp, SARS Virus
cgaaacagtgatgtaccgactcgta

SEQ ID NO: 162196 - DNA, 25 bp, SARS Virus
gaaacagtgatggaccgactcgtag

SEQ ID NO: 162197 - DNA, 25 bp, SARS Virus
aaacagtgatgtgccgactcgtagc

SEQ ID NO: 162198 - DNA, 25 bp, SARS Virus
aacagtgatgtagcgactcgtagca

SEQ ID NO: 162199 - DNA, 25 bp, SARS Virus
acagtgatgtacggactcgtagcat

SEQ ID NO: 162200 - DNA, 25 bp, SARS Virus
cagtgatgtaccgactcgtagcatc

SEQ ID NO: 162201 - DNA, 25 bp, SARS Virus
agtgatgtaccggctcgtagcatct

SEQ ID NO: 162202 - DNA, 25 bp, SARS Virus
gtgatgtaccgagtcgtagcatctt

SEQ ID NO: 162203 - DNA, 25 bp, SARS Virus
tgatgtaccgacgcgtagcatcttg

SEQ ID NO: 162204 - DNA, 25 bp, SARS Virus
gatgtaccgactggtagcatcttga

SEQ ID NO: 162205 - DNA, 25 bp, SARS Virus
atgtaccgactcgtagcatcttgaa

SEQ ID NO: 162206 - DNA, 25 bp, SARS Virus
tgtaccgactcggagcatcttgaag

SEQ ID NO: 162207 - DNA, 25 bp, SARS Virus
gtaccgactcgtggcatcttgaagg

SEQ ID NO: 162208 - DNA, 25 bp, SARS Virus
taccgactcgtagcatcttgaaggt

SEQ ID NO: 162209 - DNA, 25 bp, SARS Virus
accgactcgtaggatcttgaaggta

SEQ ID NO: 162210 - DNA, 25 bp, SARS Virus
ccgactcgtagcgtcttgaaggtaa

SEQ ID NO: 162211 - DNA, 25 bp, SARS Virus
cgactcgtagcagcttgaaggtaag

SEQ ID NO: 162212 - DNA, 25 bp, SARS Virus
gactcgtagcatgttgaaggtaaga

SEQ ID NO: 162213 - DNA, 25 bp, SARS Virus
actcgtagcatcgtgaaggtaagat

SEQ ID NO: 162214 - DNA, 25 bp, SARS Virus
ctcgtagcatctggaaggtaagatg

SEQ ID NO: 162215 - DNA, 25 bp, SARS Virus
tcgtagcatcttgaaggtaagatga

SEQ ID NO: 162216 - DNA, 25 bp, SARS Virus
cgtagcatcttggaggtaagatgaa

SEQ ID NO: 162217 - DNA, 25 bp, SARS Virus
gtagcatcttgagggtaagatgaag

SEQ ID NO: 162218 - DNA, 25 bp, SARS Virus
tagcatcttgaaggtaagatgaagt

SEQ ID NO: 162219 - DNA, 25 bp, SARS Virus
agcatcttgaaggtaagatgaagtc

SEQ ID NO: 162220 - DNA, 25 bp, SARS Virus
gcatcttgaagggaagatgaagtcg

SEQ ID NO: 162221 - DNA, 25 bp, SARS Virus
catcttgaaggtgagatgaagtcgg

SEQ ID NO: 162222 - DNA, 25 bp, SARS Virus
atcttgaaggtaggatgaagtcgga

SEQ ID NO: 162223 - DNA, 25 bp, SARS Virus
tcttgaaggtaagatgaagtcggac

SEQ ID NO: 162224 - DNA, 25 bp, SARS Virus
cttgaaggtaaggtgaagtcggact

SEQ ID NO: 162225 - DNA, 25 bp, SARS Virus
ttgaaggtaagaggaagtcggactc

SEQ ID NO: 162226 - DNA, 25 bp, SARS Virus
tgaaggtaagatgaagtcggactcc

SEQ ID NO: 162227 - DNA, 25 bp, SARS Virus
gaaggtaagatggagtcggactccg

SEQ ID NO: 162228 - DNA, 25 bp, SARS Virus
aaggtaagatgaggtcggactccgt

SEQ ID NO: 162229 - DNA, 25 bp, SARS Virus
aggtaagatgaagtcggactccgtg

SEQ ID NO: 162230 - DNA, 25 bp, SARS Virus
ggtaagatgaaggcggactccgtgt

SEQ ID NO: 162231 - DNA, 25 bp, SARS Virus
gtaagatgaagtgggactccgtgtg

SEQ ID NO: 162232 - DNA, 25 bp, SARS Virus
taagatgaagtcggactccgtgtgt

SEQ ID NO: 162233 - DNA, 25 bp, SARS Virus
aagatgaagtcggactccgtgtgtg

SEQ ID NO: 162234 - DNA, 25 bp, SARS Virus
agatgaagtcgggctccgtgtgtga

SEQ ID NO: 162235 - DNA, 25 bp, SARS Virus
gatgaagtcggagtccgtgtgtgaa

SEQ ID NO: 162236 - DNA, 25 bp, SARS Virus
atgaagtcggacgccgtgtgtgaac

SEQ ID NO: 162237 - DNA, 25 bp, SARS Virus
tgaagtcggactgcgtgtgtgaact

SEQ ID NO: 162238 - DNA, 25 bp, SARS Virus
gaagtcggactcggtgtgtgaacta

SEQ ID NO: 162239 - DNA, 25 bp, SARS Virus
aagtcggactccgtgtgtgaactat

SEQ ID NO: 162240 - DNA, 25 bp, SARS Virus
agtcggactccgggtgtgaactatc

SEQ ID NO: 162241 - DNA, 25 bp, SARS Virus
gtcggactccgtgtgtgaactatcg

SEQ ID NO: 162242 - DNA, 25 bp, SARS Virus
tcggactccgtgggtgaactatcgg

SEQ ID NO: 162243 - DNA, 25 bp, SARS Virus
cggactccgtgtgtgaactatcgga

SEQ ID NO: 162244 - DNA, 25 bp, SARS Virus
ggactccgtgtgggaactatcggaa

SEQ ID NO: 162245 - DNA, 25 bp, SARS Virus
gactccgtgtgtgaactatcggaaa

SEQ ID NO: 162246 - DNA, 25 bp, SARS Virus
actccgtgtgtggactatcggaaac

SEQ ID NO: 162247 - DNA, 25 bp, SARS Virus
ctccgtgtgtgagctatcggaaacc

SEQ ID NO: 162248 - DNA, 25 bp, SARS Virus
tccgtgtgtgaagtatcggaaacct

SEQ ID NO: 162249 - DNA, 25 bp, SARS Virus
ccgtgtgtgaacgatcggaaaccta

SEQ ID NO: 162250 - DNA, 25 bp, SARS Virus
cgtgtgtgaactgtcggaaacctaa

SEQ ID NO: 162251 - DNA, 25 bp, SARS Virus
gtgtgtgaactagcggaaacctaaa

SEQ ID NO: 162252 - DNA, 25 bp, SARS Virus
tgtgtgaactatgggaaacctaaag

SEQ ID NO: 162253 - DNA, 25 bp, SARS Virus
gtgtgaactatcggaaacctaaagg

SEQ ID NO: 162254 - DNA, 25 bp, SARS Virus
tgtgaactatcggaaacctaaaggt

SEQ ID NO: 162255 - DNA, 25 bp, SARS Virus
gtgaactatcgggaacctaaaggtt

SEQ ID NO: 162256 - DNA, 25 bp, SARS Virus
tgaactatcggagacctaaaggtta

SEQ ID NO: 162257 - DNA, 25 bp, SARS Virus
gaactatcggaagcctaaaggttac

SEQ ID NO: 162258 - DNA, 25 bp, SARS Virus
aactatcggaaagctaaaggttaca

SEQ ID NO: 162259 - DNA, 25 bp, SARS Virus
actatcggaaacgtaaaggttacag

SEQ ID NO: 162260 - DNA, 25 bp, SARS Virus
ctatcggaaaccgaaaggttacagt

SEQ ID NO: 162261 - DNA, 25 bp, SARS Virus
tatcggaaacctgaaggttacagta

SEQ ID NO: 162262 - DNA, 25 bp, SARS Virus
atcggaaacctagaggttacagtac

SEQ ID NO: 162263 - DNA, 25 bp, SARS Virus
tcggaaacctaagggttacagtact

SEQ ID NO: 162264 - DNA, 25 bp, SARS Virus
cggaaacctaaaggttacagtactt

SEQ ID NO: 162265 - DNA, 25 bp, SARS Virus
ggaaacctaaaggttacagtacttc

SEQ ID NO: 162266 - DNA, 25 bp, SARS Virus
gaaacctaaagggtacagtacttct

SEQ ID NO: 162267 - DNA, 25 bp, SARS Virus
aaacctaaaggtgacagtacttctt

SEQ ID NO: 162268 - DNA, 25 bp, SARS Virus
aacctaaaggttgcagtacttcttg

SEQ ID NO: 162269 - DNA, 25 bp, SARS Virus
acctaaaggttagagtacttcttga

SEQ ID NO: 162270 - DNA, 25 bp, SARS Virus
cctaaaggttacggtacttcttgac

SEQ ID NO: 162271 - DNA, 25 bp, SARS Virus
ctaaaggttacagtacttcttgacc

SEQ ID NO: 162272 - DNA, 25 bp, SARS Virus
taaaggttacaggacttcttgacct

SEQ ID NO: 162273 - DNA, 25 bp, SARS Virus
aaaggttacagtgcttcttgacctt

SEQ ID NO: 162274 - DNA, 25 bp, SARS Virus
aaggttacagtagttcttgaccttt

SEQ ID NO: 162275 - DNA, 25 bp, SARS Virus
aggttacagtacgtcttgacctttg

SEQ ID NO: 162276 - DNA, 25 bp, SARS Virus
ggttacagtactgcttgacctttga

SEQ ID NO: 162277 - DNA, 25 bp, SARS Virus
gttacagtacttgttgacctttgaa

SEQ ID NO: 162278 - DNA, 25 bp, SARS Virus
ttacagtacttcgtgacctttgaat

SEQ ID NO: 162279 - DNA, 25 bp, SARS Virus
tacagtacttctggacctttgaata

SEQ ID NO: 162280 - DNA, 25 bp, SARS Virus
acagtacttcttgacctttgaatag

SEQ ID NO: 162281 - DNA, 25 bp, SARS Virus
cagtacttcttggcctttgaatagt

SEQ ID NO: 162282 - DNA, 25 bp, SARS Virus
agtacttcttgagctttgaatagtc

SEQ ID NO: 162283 - DNA, 25 bp, SARS Virus
gtacttcttgacgtttgaatagtcg

SEQ ID NO: 162284 - DNA, 25 bp, SARS Virus
tacttcttgaccgttgaatagtcgt

SEQ ID NO: 162285 - DNA, 25 bp, SARS Virus
acttcttgacctgtgaatagtcgtt

SEQ ID NO: 162286 - DNA, 25 bp, SARS Virus
cttcttgaccttggaatagtcgttc

SEQ ID NO: 162287 - DNA, 25 bp, SARS Virus
ttcttgacctttgaatagtcgttcg

SEQ ID NO: 162288 - DNA, 25 bp, SARS Virus
tcttgacctttggatagtcgttcgt

SEQ ID NO: 162289 - DNA, 25 bp, SARS Virus
cttgacctttgagtagtcgttcgtt

SEQ ID NO: 162290 - DNA, 25 bp, SARS Virus
ttgacctttgaagagtcgttcgtta

SEQ ID NO: 162291 - DNA, 25 bp, SARS Virus
tgacctttgaatggtcgttcgttac

SEQ ID NO: 162292 - DNA, 25 bp, SARS Virus
gacctttgaatagtcgttcgttacg

SEQ ID NO: 162293 - DNA, 25 bp, SARS Virus
acctttgaataggcgttcgttacgt

SEQ ID NO: 162294 - DNA, 25 bp, SARS Virus
cctttgaatagtggttcgttacgtc

SEQ ID NO: 162295 - DNA, 25 bp, SARS Virus
ctttgaatagtcgttcgttacgtct

SEQ ID NO: 162296 - DNA, 25 bp, SARS Virus
tttgaatagtcggtcgttacgtctg

SEQ ID NO: 162297 - DNA, 25 bp, SARS Virus
ttgaatagtcgtgcgttacgtctga

SEQ ID NO: 162298 - DNA, 25 bp, SARS Virus
tgaatagtcgttggttacgtctgaa

SEQ ID NO: 162299 - DNA, 25 bp, SARS Virus
gaatagtcgttcgttacgtctgaag

SEQ ID NO: 162300 - DNA, 25 bp, SARS Virus
aatagtcgttcggtacgtctgaagt

SEQ ID NO: 162301 - DNA, 25 bp, SARS Virus
atagtcgttcgtgacgtctgaagtg

SEQ ID NO: 162302 - DNA, 25 bp, SARS Virus
tagtcgttcgttgcgtctgaagtgt

SEQ ID NO: 162303 - DNA, 25 bp, SARS Virus
agtcgttcgttaggtctgaagtgtt

SEQ ID NO: 162304 - DNA, 25 bp, SARS Virus
gtcgttcgttacgtctgaagtgttg

SEQ ID NO: 162305 - DNA, 25 bp, SARS Virus
tcgttcgttacggctgaagtgttgg

SEQ ID NO: 162306 - DNA, 25 bp, SARS Virus
cgttcgttacgtgtgaagtgttggt

SEQ ID NO: 162307 - DNA, 25 bp, SARS Virus
gttcgttacgtcggaagtgttggta

SEQ ID NO: 162308 - DNA, 25 bp, SARS Virus
ttcgttacgtctgaagtgttggtac

SEQ ID NO: 162309 - DNA, 25 bp, SARS Virus
tcgttacgtctggagtgttggtaca

SEQ ID NO: 162310 - DNA, 25 bp, SARS Virus
cgttacgtctgaggtgttggtacac

SEQ ID NO: 162311 - DNA, 25 bp, SARS Virus
gttacgtctgaagtgttggtacaca

SEQ ID NO: 162312 - DNA, 25 bp, SARS Virus
ttacgtctgaagggttggtacacaa

SEQ ID NO: 162313 - DNA, 25 bp, SARS Virus
tacgtctgaagtgttggtacacaac

SEQ ID NO: 162314 - DNA, 25 bp, SARS Virus
acgtctgaagtggtggtacacaaca

SEQ ID NO: 162315 - DNA, 25 bp, SARS Virus
cgtctgaagtgtgggtacacaacat

SEQ ID NO: 162316 - DNA, 25 bp, SARS Virus
gtctgaagtgttggtacacaacatg

SEQ ID NO: 162317 - DNA, 25 bp, SARS Virus
tctgaagtgttggtacacaacatga

SEQ ID NO: 162318 - DNA, 25 bp, SARS Virus
ctgaagtgttgggacacaacatgaa

SEQ ID NO: 162319 - DNA, 25 bp, SARS Virus
tgaagtgttggtgcacaacatgaaa

SEQ ID NO: 162320 - DNA, 25 bp, SARS Virus
gaagtgttggtagacaacatgaaaa

SEQ ID NO: 162321 - DNA, 25 bp, SARS Virus
aagtgttggtacgcaacatgaaaag

SEQ ID NO: 162322 - DNA, 25 bp, SARS Virus
agtgttggtacagaacatgaaaaga

SEQ ID NO: 162323 - DNA, 25 bp, SARS Virus
gtgttggtacacgacatgaaaagac

SEQ ID NO: 162324 - DNA, 25 bp, SARS Virus
tgttggtacacagcatgaaaagacg

SEQ ID NO: 162325 - DNA, 25 bp, SARS Virus
gttggtacacaagatgaaaagacgt

SEQ ID NO: 162326 - DNA, 25 bp, SARS Virus
ttggtacacaacgtgaaaagacgtt

SEQ ID NO: 162327 - DNA, 25 bp, SARS Virus
tggtacacaacaggaaaagacgttc

SEQ ID NO: 162328 - DNA, 25 bp, SARS Virus
ggtacacaacatgaaaagacgttcg

SEQ ID NO: 162329 - DNA, 25 bp, SARS Virus
gtacacaacatggaaagacgttcgt

SEQ ID NO: 162330 - DNA, 25 bp, SARS Virus
tacacaacatgagaagacgttcgtc

SEQ ID NO: 162331 - DNA, 25 bp, SARS Virus
acacaacatgaagagacgttcgtct

SEQ ID NO: 162332 - DNA, 25 bp, SARS Virus
cacaacatgaaaggacgttcgtctt

SEQ ID NO: 162333 - DNA, 25 bp, SARS Virus
acaacatgaaaagacgttcgtctta

SEQ ID NO: 162334 - DNA, 25 bp, SARS Virus
caacatgaaaaggcgttcgtcttaa

SEQ ID NO: 162335 - DNA, 25 bp, SARS Virus
aacatgaaaagaggttcgtcttaat

SEQ ID NO: 162336 - DNA, 25 bp, SARS Virus
acatgaaaagacgttcgtcttaatt

SEQ ID NO: 162337 - DNA, 25 bp, SARS Virus
catgaaaagacggtcgtcttaattg

SEQ ID NO: 162338 - DNA, 25 bp, SARS Virus
atgaaaagacgtgcgtcttaattgg

SEQ ID NO: 162339 - DNA, 25 bp, SARS Virus
tgaaaagacgttggtcttaattggg

SEQ ID NO: 162340 - DNA, 25 bp, SARS Virus
gaaaagacgttcgtcttaattggga

SEQ ID NO: 162341 - DNA, 25 bp, SARS Virus
aaaagacgttcggcttaattgggag

SEQ ID NO: 162342 - DNA, 25 bp, SARS Virus
aaagacgttcgtgttaattgggagt

SEQ ID NO: 162343 - DNA, 25 bp, SARS Virus
aagacgttcgtcgtaattgggagtc

SEQ ID NO: 162344 - DNA, 25 bp, SARS Virus
agacgttcgtctgaattgggagtca

SEQ ID NO: 162345 - DNA, 25 bp, SARS Virus
gacgttcgtcttgattgggagtcaa

SEQ ID NO: 162346 - DNA, 25 bp, SARS Virus
acgttcgtcttagttgggagtcaag

SEQ ID NO: 162347 - DNA, 25 bp, SARS Virus
cgttcgtcttaagtgggagtcaagt

SEQ ID NO: 162348 - DNA, 25 bp, SARS Virus
gttcgtcttaatggggagtcaagta

SEQ ID NO: 162349 - DNA, 25 bp, SARS Virus
ttcgtcttaattgggagtcaagtag

SEQ ID NO: 162350 - DNA, 25 bp, SARS Virus
tcgtcttaattgggagtcaagtaga

SEQ ID NO: 162351 - DNA, 25 bp, SARS Virus
cgtcttaattgggagtcaagtagag

SEQ ID NO: 162352 - DNA, 25 bp, SARS Virus
gtcttaattgggggtcaagtagagg

SEQ ID NO: 162353 - DNA, 25 bp, SARS Virus
tcttaattgggagtcaagtagagga

SEQ ID NO: 162354 - DNA, 25 bp, SARS Virus
cttaattgggaggcaagtagaggat

SEQ ID NO: 162355 - DNA, 25 bp, SARS Virus
ttaattgggagtgaagtagaggata

SEQ ID NO: 162356 - DNA, 25 bp, SARS Virus
taattgggagtcgagtagaggatat

SEQ ID NO: 162357 - DNA, 25 bp, SARS Virus
aattgggagtcaggtagaggatatt

SEQ ID NO: 162358 - DNA, 25 bp, SARS Virus
attgggagtcaagtagaggatatta

SEQ ID NO: 162359 - DNA, 25 bp, SARS Virus
ttgggagtcaaggagaggatattat

SEQ ID NO: 162360 - DNA, 25 bp, SARS Virus
tgggagtcaagtggaggatattatc

SEQ ID NO: 162361 - DNA, 25 bp, SARS Virus
gggagtcaagtagaggatattatcc

SEQ ID NO: 162362 - DNA, 25 bp, SARS Virus
ggagtcaagtaggggatattatccc

SEQ ID NO: 162363 - DNA, 25 bp, SARS Virus
gagtcaagtagaggatattatccca

SEQ ID NO: 162364 - DNA, 25 bp, SARS Virus
agtcaagtagaggatattatcccat

SEQ ID NO: 162365 - DNA, 25 bp, SARS Virus
gtcaagtagagggtattatcccata

SEQ ID NO: 162366 - DNA, 25 bp, SARS Virus
tcaagtagaggagattatcccataa

SEQ ID NO: 162367 - DNA, 25 bp, SARS Virus
caagtagaggatgttatcccataag

SEQ ID NO: 162368 - DNA, 25 bp, SARS Virus
aagtagaggatagtatcccataagt

SEQ ID NO: 162369 - DNA, 25 bp, SARS Virus
agtagaggatatgatcccataagtt

SEQ ID NO: 162370 - DNA, 25 bp, SARS Virus
gtagaggatattgtcccataagttg

SEQ ID NO: 162371 - DNA, 25 bp, SARS Virus
tagaggatattagcccataagttgt

SEQ ID NO: 162372 - DNA, 25 bp, SARS Virus
agaggatattatgccataagttgtc

SEQ ID NO: 162373 - DNA, 25 bp, SARS Virus
gaggatattatcgcataagttgtct

SEQ ID NO: 162374 - DNA, 25 bp, SARS Virus
aggatattatccgataagttgtctg

SEQ ID NO: 162375 - DNA, 25 bp, SARS Virus
ggatattatcccgtaagttgtctgg

SEQ ID NO: 162376 - DNA, 25 bp, SARS Virus
gatattatcccagaagttgtctggt

SEQ ID NO: 162377 - DNA, 25 bp, SARS Virus
atattatcccatgagttgtctggtt

SEQ ID NO: 162378 - DNA, 25 bp, SARS Virus
tattatcccataggttgtctggtta

SEQ ID NO: 162379 - DNA, 25 bp, SARS Virus
attatcccataagttgtctggttag

SEQ ID NO: 162380 - DNA, 25 bp, SARS Virus
ttatcccataaggtgtctggttagt

SEQ ID NO: 162381 - DNA, 25 bp, SARS Virus
tatcccataagtggtctggttagtt

SEQ ID NO: 162382 - DNA, 25 bp, SARS Virus
atcccataagttgtctggttagttg

SEQ ID NO: 162383 - DNA, 25 bp, SARS Virus
tcccataagttggctggttagttgc

SEQ ID NO: 162384 - DNA, 25 bp, SARS Virus
cccataagttgtgtggttagttgcg

SEQ ID NO: 162385 - DNA, 25 bp, SARS Virus
ccataagttgtcgggttagttgcgc

SEQ ID NO: 162386 - DNA, 25 bp, SARS Virus
cataagttgtctggttagttgcgcg

SEQ ID NO: 162387 - DNA, 25 bp, SARS Virus
ataagttgtctggttagttgcgcga

SEQ ID NO: 162388 - DNA, 25 bp, SARS Virus
taagttgtctgggtagttgcgcgaa

SEQ ID NO: 162389 - DNA, 25 bp, SARS Virus
aagttgtctggtgagttgcgcgaat

SEQ ID NO: 162390 - DNA, 25 bp, SARS Virus
agttgtctggttggttgcgcgaatt

SEQ ID NO: 162391 - DNA, 25 bp, SARS Virus
gttgtctggttagttgcgcgaattg

SEQ ID NO: 162392 - DNA, 25 bp, SARS Virus
ttgtctggttaggtgcgcgaattgt

SEQ ID NO: 162393 - DNA, 25 bp, SARS Virus
tgtctggttagtggcgcgaattgtt

SEQ ID NO: 162394 - DNA, 25 bp, SARS Virus
gtctggttagttgcgcgaattgttt

SEQ ID NO: 162395 - DNA, 25 bp, SARS Virus
tctggttagttgggcgaattgtttc

SEQ ID NO: 162396 - DNA, 25 bp, SARS Virus
ctggttagttgcgcgaattgtttcg

SEQ ID NO: 162397 - DNA, 25 bp, SARS Virus
tggttagttgcgggaattgtttcgt

SEQ ID NO: 162398 - DNA, 25 bp, SARS Virus
ggttagttgcgcgaattgtttcgtg

SEQ ID NO: 162399 - DNA, 25 bp, SARS Virus
gttagttgcgcggattgtttcgtga

SEQ ID NO: 162400 - DNA, 25 bp, SARS Virus
ttagttgcgcgagttgtttcgtgag

SEQ ID NO: 162401 - DNA, 25 bp, SARS Virus
tagttgcgcgaagtgtttcgtgagt

SEQ ID NO: 162402 - DNA, 25 bp, SARS Virus
agttgcgcgaatggtttcgtgagta

SEQ ID NO: 162403 - DNA, 25 bp, SARS Virus
gttgcgcgaattgtttcgtgagtac

SEQ ID NO: 162404 - DNA, 25 bp, SARS Virus
ttgcgcgaattggttcgtgagtacc

SEQ ID NO: 162405 - DNA, 25 bp, SARS Virus
tgcgcgaattgtgtcgtgagtacct

SEQ ID NO: 162406 - DNA, 25 bp, SARS Virus
gcgcgaattgttgcgtgagtacctg

SEQ ID NO: 162407 - DNA, 25 bp, SARS Virus
cgcgaattgtttggtgagtacctga

SEQ ID NO: 162408 - DNA, 25 bp, SARS Virus
gcgaattgtttcgtgagtacctgac

SEQ ID NO: 162409 - DNA, 25 bp, SARS Virus
cgaattgtttcgggagtacctgacg

SEQ ID NO: 162410 - DNA, 25 bp, SARS Virus
gaattgtttcgtgagtacctgacga

SEQ ID NO: 162411 - DNA, 25 bp, SARS Virus
aattgtttcgtgggtacctgacgat

SEQ ID NO: 162412 - DNA, 25 bp, SARS Virus
attgtttcgtgagtacctgacgatt

SEQ ID NO: 162413 - DNA, 25 bp, SARS Virus
ttgtttcgtgaggacctgacgattt

SEQ ID NO: 162414 - DNA, 25 bp, SARS Virus
tgtttcgtgagtgcctgacgatttg

SEQ ID NO: 162415 - DNA, 25 bp, SARS Virus
gtttcgtgagtagctgacgatttgt

SEQ ID NO: 162416 - DNA, 25 bp, SARS Virus
tttcgtgagtacgtgacgatttgta

SEQ ID NO: 162417 - DNA, 25 bp, SARS Virus
ttcgtgagtaccggacgatttgtag

SEQ ID NO: 162418 - DNA, 25 bp, SARS Virus
tcgtgagtacctgacgatttgtaga

SEQ ID NO: 162419 - DNA, 25 bp, SARS Virus
cgtgagtacctggcgatttgtagat

SEQ ID NO: 162420 - DNA, 25 bp, SARS Virus
gtgagtacctgaggatttgtagatc

SEQ ID NO: 162421 - DNA, 25 bp, SARS Virus
tgagtacctgacgatttgtagatca

SEQ ID NO: 162422 - DNA, 25 bp, SARS Virus
gagtacctgacggtttgtagatcag

SEQ ID NO: 162423 - DNA, 25 bp, SARS Virus
agtacctgacgagttgtagatcagt

SEQ ID NO: 162424 - DNA, 25 bp, SARS Virus
gtacctgacgatgtgtagatcagta

SEQ ID NO: 162425 - DNA, 25 bp, SARS Virus
tacctgacgattggtagatcagtac

SEQ ID NO: 162426 - DNA, 25 bp, SARS Virus
acctgacgatttgtagatcagtact

SEQ ID NO: 162427 - DNA, 25 bp, SARS Virus
cctgacgatttggagatcagtacta

SEQ ID NO: 162428 - DNA, 25 bp, SARS Virus
ctgacgatttgtggatcagtactat

SEQ ID NO: 162429 - DNA, 25 bp, SARS Virus
tgacgatttgtagatcagtactatc

SEQ ID NO: 162430 - DNA, 25 bp, SARS Virus
gacgatttgtaggtcagtactatcg

SEQ ID NO: 162431 - DNA, 25 bp, SARS Virus
acgatttgtagagcagtactatcgt

SEQ ID NO: 162432 - DNA, 25 bp, SARS Virus
cgatttgtagatgagtactatcgta

SEQ ID NO: 162433 - DNA, 25 bp, SARS Virus
gatttgtagatcggtactatcgtag

SEQ ID NO: 162434 - DNA, 25 bp, SARS Virus
atttgtagatcagtactatcgtagt

SEQ ID NO: 162435 - DNA, 25 bp, SARS Virus
tttgtagatcaggactatcgtagtg

SEQ ID NO: 162436 - DNA, 25 bp, SARS Virus
ttgtagatcagtgctatcgtagtgt

SEQ ID NO: 162437 - DNA, 25 bp, SARS Virus
tgtagatcagtagtatcgtagtgtt

SEQ ID NO: 162438 - DNA, 25 bp, SARS Virus
gtagatcagtacgatcgtagtgttg

SEQ ID NO: 162439 - DNA, 25 bp, SARS Virus
tagatcagtactgtcgtagtgttga

SEQ ID NO: 162440 - DNA, 25 bp, SARS Virus
agatcagtactagcgtagtgttgat

SEQ ID NO: 162441 - DNA, 25 bp, SARS Virus
gatcagtactatggtagtgttgatc

SEQ ID NO: 162442 - DNA, 25 bp, SARS Virus
atcagtactatcgtagtgttgatcg

SEQ ID NO: 162443 - DNA, 25 bp, SARS Virus
tcagtactatcggagtgttgatcgg

SEQ ID NO: 162444 - DNA, 25 bp, SARS Virus
cagtactatcgtggtgttgatcggt

SEQ ID NO: 162445 - DNA, 25 bp, SARS Virus
agtactatcgtagtgttgatcggtg

SEQ ID NO: 162446 - DNA, 25 bp, SARS Virus
gtactatcgtagggttgatcggtgt

SEQ ID NO: 162447 - DNA, 25 bp, SARS Virus
tactatcgtagtgttgatcggtgta

SEQ ID NO: 162448 - DNA, 25 bp, SARS Virus
actatcgtagtggtgatcggtgtac

SEQ ID NO: 162449 - DNA, 25 bp, SARS Virus
ctatcgtagtgtggatcggtgtaca

SEQ ID NO: 162450 - DNA, 25 bp, SARS Virus
tatcgtagtgttgatcggtgtacac

SEQ ID NO: 162451 - DNA, 25 bp, SARS Virus
atcgtagtgttggtcggtgtacacg

SEQ ID NO: 162452 - DNA, 25 bp, SARS Virus
tcgtagtgttgagcggtgtacacgt

SEQ ID NO: 162453 - DNA, 25 bp, SARS Virus
cgtagtgttgatgggtgtacacgta

SEQ ID NO: 162454 - DNA, 25 bp, SARS Virus
gtagtgttgatcggtgtacacgtaa

SEQ ID NO: 162455 - DNA, 25 bp, SARS Virus
tagtgttgatcggtgtacacgtaaa

SEQ ID NO: 162456 - DNA, 25 bp, SARS Virus
agtgttgatcggggtacacgtaaag

SEQ ID NO: 162457 - DNA, 25 bp, SARS Virus
gtgttgatcggtgtacacgtaaagg

SEQ ID NO: 162458 - DNA, 25 bp, SARS Virus
tgttgatcggtggacacgtaaaggt

SEQ ID NO: 162459 - DNA, 25 bp, SARS Virus
gttgatcggtgtgcacgtaaaggta

SEQ ID NO: 162460 - DNA, 25 bp, SARS Virus
ttgatcggtgtagacgtaaaggtac

SEQ ID NO: 162461 - DNA, 25 bp, SARS Virus
tgatcggtgtacgcgtaaaggtaca

SEQ ID NO: 162462 - DNA, 25 bp, SARS Virus
gatcggtgtacaggtaaaggtacat

SEQ ID NO: 162463 - DNA, 25 bp, SARS Virus
atcggtgtacacgtaaaggtacatg

SEQ ID NO: 162464 - DNA, 25 bp, SARS Virus
tcggtgtacacggaaaggtacatgg

SEQ ID NO: 162465 - DNA, 25 bp, SARS Virus
cggtgtacacgtgaaggtacatgga

SEQ ID NO: 162466 - DNA, 25 bp, SARS Virus
ggtgtacacgtagaggtacatggac

SEQ ID NO: 162467 - DNA, 25 bp, SARS Virus
gtgtacacgtaagggtacatggacc

SEQ ID NO: 162468 - DNA, 25 bp, SARS Virus
tgtacacgtaaaggtacatggaccg

SEQ ID NO: 162469 - DNA, 25 bp, SARS Virus
gtacacgtaaaggtacatggaccgt

SEQ ID NO: 162470 - DNA, 25 bp, SARS Virus
tacacgtaaagggacatggaccgtt

SEQ ID NO: 162471 - DNA, 25 bp, SARS Virus
acacgtaaaggtgcatggaccgtta

SEQ ID NO: 162472 - DNA, 25 bp, SARS Virus
cacgtaaaggtagatggaccgttac

SEQ ID NO: 162473 - DNA, 25 bp, SARS Virus
acgtaaaggtacgtggaccgttaca

SEQ ID NO: 162474 - DNA, 25 bp, SARS Virus
cgtaaaggtacagggaccgttacaa

SEQ ID NO: 162475 - DNA, 25 bp, SARS Virus
gtaaaggtacatggaccgttacaac

SEQ ID NO: 162476 - DNA, 25 bp, SARS Virus
taaaggtacatggaccgttacaacc

SEQ ID NO: 162477 - DNA, 25 bp, SARS Virus
aaaggtacatgggccgttacaacca

SEQ ID NO: 162478 - DNA, 25 bp, SARS Virus
aaggtacatggagcgttacaaccag

SEQ ID NO: 162479 - DNA, 25 bp, SARS Virus
aggtacatggacggttacaaccagt

SEQ ID NO: 162480 - DNA, 25 bp, SARS Virus
ggtacatggaccgttacaaccagta

SEQ ID NO: 162481 - DNA, 25 bp, SARS Virus
gtacatggaccggtacaaccagtac

SEQ ID NO: 162482 - DNA, 25 bp, SARS Virus
tacatggaccgtgacaaccagtacc

SEQ ID NO: 162483 - DNA, 25 bp, SARS Virus
acatggaccgttgcaaccagtacca

SEQ ID NO: 162484 - DNA, 25 bp, SARS Virus
catggaccgttagaaccagtaccaa

SEQ ID NO: 162485 - DNA, 25 bp, SARS Virus
atggaccgttacgaccagtaccaat

SEQ ID NO: 162486 - DNA, 25 bp, SARS Virus
tggaccgttacagccagtaccaatg

SEQ ID NO: 162487 - DNA, 25 bp, SARS Virus
ggaccgttacaagcagtaccaatga

SEQ ID NO: 162488 - DNA, 25 bp, SARS Virus
gaccgttacaacgagtaccaatgag

SEQ ID NO: 162489 - DNA, 25 bp, SARS Virus
accgttacaaccggtaccaatgaga

SEQ ID NO: 162490 - DNA, 25 bp, SARS Virus
ccgttacaaccagtaccaatgagac

SEQ ID NO: 162491 - DNA, 25 bp, SARS Virus
cgttacaaccaggaccaatgagact

SEQ ID NO: 162492 - DNA, 25 bp, SARS Virus
gttacaaccagtgccaatgagactt

SEQ ID NO: 162493 - DNA, 25 bp, SARS Virus
ttacaaccagtagcaatgagacttc

SEQ ID NO: 162494 - DNA, 25 bp, SARS Virus
tacaaccagtacgaatgagacttcc

SEQ ID NO: 162495 - DNA, 25 bp, SARS Virus
acaaccagtaccgatgagacttcca

SEQ ID NO: 162496 - DNA, 25 bp, SARS Virus
caaccagtaccagtgagacttccaa

SEQ ID NO: 162497 - DNA, 25 bp, SARS Virus
aaccagtaccaaggagacttccaat

SEQ ID NO: 162498 - DNA, 25 bp, SARS Virus
accagtaccaatgagacttccaatg

SEQ ID NO: 162499 - DNA, 25 bp, SARS Virus
ccagtaccaatgggacttccaatgg

SEQ ID NO: 162500 - DNA, 25 bp, SARS Virus
cagtaccaatgagacttccaatggg

SEQ ID NO: 162501 - DNA, 25 bp, SARS Virus
agtaccaatgaggcttccaatgggc

SEQ ID NO: 162502 - DNA, 25 bp, SARS Virus
gtaccaatgagagttccaatgggca

SEQ ID NO: 162503 - DNA, 25 bp, SARS Virus
taccaatgagacgtccaatgggcat

SEQ ID NO: 162504 - DNA, 25 bp, SARS Virus
accaatgagactgccaatgggcatt

SEQ ID NO: 162505 - DNA, 25 bp, SARS Virus
ccaatgagacttgcaatgggcattt

SEQ ID NO: 162506 - DNA, 25 bp, SARS Virus
caatgagacttcgaatgggcatttc

SEQ ID NO: 162507 - DNA, 25 bp, SARS Virus
aatgagacttccgatgggcatttcg

SEQ ID NO: 162508 - DNA, 25 bp, SARS Virus
atgagacttccagtgggcatttcgg

SEQ ID NO: 162509 - DNA, 25 bp, SARS Virus
tgagacttccaaggggcatttcggg

SEQ ID NO: 162510 - DNA, 25 bp, SARS Virus
gagacttccaatgggcatttcgggg

SEQ ID NO: 162511 - DNA, 25 bp, SARS Virus
agacttccaatgggcatttcggggt

SEQ ID NO: 162512 - DNA, 25 bp, SARS Virus
gacttccaatgggcatttcggggtg

SEQ ID NO: 162513 - DNA, 25 bp, SARS Virus
acttccaatggggatttcggggtga

SEQ ID NO: 162514 - DNA, 25 bp, SARS Virus
cttccaatgggcgtttcggggtgac

SEQ ID NO: 162515 - DNA, 25 bp, SARS Virus
ttccaatgggcagttcggggtgacg

SEQ ID NO: 162516 - DNA, 25 bp, SARS Virus
tccaatgggcatgtcggggtgacga

SEQ ID NO: 162517 - DNA, 25 bp, SARS Virus
ccaatgggcattgcggggtgacgac

SEQ ID NO: 162518 - DNA, 25 bp, SARS Virus
caatgggcatttgggggtgacgact

SEQ ID NO: 162519 - DNA, 25 bp, SARS Virus
aatgggcatttcggggtgacgactt

SEQ ID NO: 162520 - DNA, 25 bp, SARS Virus
atgggcatttcggggtgacgacttg

SEQ ID NO: 162521 - DNA, 25 bp, SARS Virus
tgggcatttcggggtgacgacttgt

SEQ ID NO: 162522 - DNA, 25 bp, SARS Virus
gggcatttcggggtgacgacttgta

SEQ ID NO: 162523 - DNA, 25 bp, SARS Virus
ggcatttcggggggacgacttgtag

SEQ ID NO: 162524 - DNA, 25 bp, SARS Virus
gcatttcggggtgacgacttgtagt

SEQ ID NO: 162525 - DNA, 25 bp, SARS Virus
catttcggggtggcgacttgtagtt

SEQ ID NO: 162526 - DNA, 25 bp, SARS Virus
atttcggggtgaggacttgtagtta

SEQ ID NO: 162527 - DNA, 25 bp, SARS Virus
tttcggggtgacgacttgtagttag

SEQ ID NO: 162528 - DNA, 25 bp, SARS Virus
ttcggggtgacggcttgtagttagt

SEQ ID NO: 162529 - DNA, 25 bp, SARS Virus
tcggggtgacgagttgtagttagta

SEQ ID NO: 162530 - DNA, 25 bp, SARS Virus
cggggtgacgacgtgtagttagtat

SEQ ID NO: 162531 - DNA, 25 bp, SARS Virus
ggggtgacgactggtagttagtatt

SEQ ID NO: 162532 - DNA, 25 bp, SARS Virus
gggtgacgacttgtagttagtattt

SEQ ID NO: 162533 - DNA, 25 bp, SARS Virus
ggtgacgacttggagttagtattta

SEQ ID NO: 162534 - DNA, 25 bp, SARS Virus
gtgacgacttgtggttagtatttac

SEQ ID NO: 162535 - DNA, 25 bp, SARS Virus
tgacgacttgtagttagtatttacc

SEQ ID NO: 162536 - DNA, 25 bp, SARS Virus
gacgacttgtaggtagtatttaccc

SEQ ID NO: 162537 - DNA, 25 bp, SARS Virus
tcaaactgttcttagaacacagttt

SEQ ID NO: 162538 - DNA, 25 bp, SARS Virus
caaactgttctgtgaacacagtttg

SEQ ID NO: 162539 - DNA, 25 bp, SARS Virus
aaactgttctgataacacagtttgg

SEQ ID NO: 162540 - DNA, 25 bp, SARS Virus
aactgttctgagtacacagtttgga

SEQ ID NO: 162541 - DNA, 25 bp, SARS Virus
actgttctgagatcacagtttggat

SEQ ID NO: 162542 - DNA, 25 bp, SARS Virus
ctgttctgagaatacagtttggatg

SEQ ID NO: 162543 - DNA, 25 bp, SARS Virus
tgttctgagaactcagtttggatgt

SEQ ID NO: 162544 - DNA, 25 bp, SARS Virus
gttctgagaacatagtttggatgtg

SEQ ID NO: 162545 - DNA, 25 bp, SARS Virus
ttctgagaacactgtttggatgtgt

SEQ ID NO: 162546 - DNA, 25 bp, SARS Virus
tctgagaacacattttggatgtgtg

SEQ ID NO: 162547 - DNA, 25 bp, SARS Virus
ctgagaacacagtttggatgtgtgt

SEQ ID NO: 162548 - DNA, 25 bp, SARS Virus
tgagaacacagtttggatgtgtgtt

SEQ ID NO: 162549 - DNA, 25 bp, SARS Virus
gagaacacagtttggatgtgtgtta

SEQ ID NO: 162550 - DNA, 25 bp, SARS Virus
agaacacagttttgatgtgtgttaa

SEQ ID NO: 162551 - DNA, 25 bp, SARS Virus
gaacacagtttgtatgtgtgttaac

SEQ ID NO: 162552 - DNA, 25 bp, SARS Virus
aacacagtttggttgtgtgttaacg

SEQ ID NO: 162553 - DNA, 25 bp, SARS Virus
acacagtttggatgtgtgttaacgt

SEQ ID NO: 162554 - DNA, 25 bp, SARS Virus
cacagtttggatttgtgttaacgta

SEQ ID NO: 162555 - DNA, 25 bp, SARS Virus
acagtttggatgtgtgttaacgtaa

SEQ ID NO: 162556 - DNA, 25 bp, SARS Virus
cagtttggatgtttgttaacgtaac

SEQ ID NO: 162557 - DNA, 25 bp, SARS Virus
agtttggatgtgtgttaacgtaacc

SEQ ID NO: 162558 - DNA, 25 bp, SARS Virus
gtttggatgtgttttaacgtaaccg

SEQ ID NO: 162559 - DNA, 25 bp, SARS Virus
tttggatgtgtgttaacgtaaccga

SEQ ID NO: 162560 - DNA, 25 bp, SARS Virus
ttggatgtgtgttaacgtaaccgac

SEQ ID NO: 162561 - DNA, 25 bp, SARS Virus
tggatgtgtgtttacgtaaccgacc

SEQ ID NO: 162562 - DNA, 25 bp, SARS Virus
ggatgtgtgttatcgtaaccgaccc

SEQ ID NO: 162563 - DNA, 25 bp, SARS Virus
gatgtgtgttaatgtaaccgaccca

SEQ ID NO: 162564 - DNA, 25 bp, SARS Virus
atgtgtgttaacttaaccgacccat

SEQ ID NO: 162565 - DNA, 25 bp, SARS Virus
tgtgtgttaacgtaaccgacccatt

SEQ ID NO: 162566 - DNA, 25 bp, SARS Virus
gtgtgttaacgttaccgacccattg

SEQ ID NO: 162567 - DNA, 25 bp, SARS Virus
tgtgttaacgtatccgacccattgc

SEQ ID NO: 162568 - DNA, 25 bp, SARS Virus
gtgttaacgtaatcgacccattgct

SEQ ID NO: 162569 - DNA, 25 bp, SARS Virus
tgttaacgtaactgacccattgcta

SEQ ID NO: 162570 - DNA, 25 bp, SARS Virus
gttaacgtaacctacccattgctag

SEQ ID NO: 162571 - DNA, 25 bp, SARS Virus
ttaacgtaaccgtcccattgctagt

SEQ ID NO: 162572 - DNA, 25 bp, SARS Virus
taacgtaaccgatccattgctagtt

SEQ ID NO: 162573 - DNA, 25 bp, SARS Virus
aacgtaaccgactcattgctagttg

SEQ ID NO: 162574 - DNA, 25 bp, SARS Virus
acgtaaccgacctattgctagttgc

SEQ ID NO: 162575 - DNA, 25 bp, SARS Virus
cgtaaccgaccctttgctagttgca

SEQ ID NO: 162576 - DNA, 25 bp, SARS Virus
gtaaccgacccattgctagttgcaa

SEQ ID NO: 162577 - DNA, 25 bp, SARS Virus
taaccgacccattgctagttgcaat

SEQ ID NO: 162578 - DNA, 25 bp, SARS Virus
aaccgacccatttctagttgcaatg

SEQ ID NO: 162579 - DNA, 25 bp, SARS Virus
accgacccattgttagttgcaatgt

SEQ ID NO: 162580 - DNA, 25 bp, SARS Virus
ccgacccattgctagttgcaatgtt

SEQ ID NO: 162581 - DNA, 25 bp, SARS Virus
cgacccattgcttgttgcaatgtta

SEQ ID NO: 162582 - DNA, 25 bp, SARS Virus
gacccattgctatttgcaatgttaa

SEQ ID NO: 162583 - DNA, 25 bp, SARS Virus
acccattgctagttgcaatgttaag

SEQ ID NO: 162584 - DNA, 25 bp, SARS Virus
cccattgctagttgcaatgttaagg

SEQ ID NO: 162585 - DNA, 25 bp, SARS Virus
ccattgctagtttcaatgttaaggt

SEQ ID NO: 162586 - DNA, 25 bp, SARS Virus
cattgctagttgtaatgttaaggtt

SEQ ID NO: 162587 - DNA, 25 bp, SARS Virus
attgctagttgctatgttaaggttt

SEQ ID NO: 162588 - DNA, 25 bp, SARS Virus
ttgctagttgcattgttaaggtttt

SEQ ID NO: 162589 - DNA, 25 bp, SARS Virus
tgctagttgcaatgttaaggttttg

SEQ ID NO: 162590 - DNA, 25 bp, SARS Virus
gctagttgcaattttaaggttttgt

SEQ ID NO: 162591 - DNA, 25 bp, SARS Virus
ctagttgcaatgttaaggttttgtt

SEQ ID NO: 162592 - DNA, 25 bp, SARS Virus
tagttgcaatgttaaggttttgttt

SEQ ID NO: 162593 - DNA, 25 bp, SARS Virus
agttgcaatgtttaggttttgtttg

SEQ ID NO: 162594 - DNA, 25 bp, SARS Virus
gttgcaatgttatggttttgtttgt

SEQ ID NO: 162595 - DNA, 25 bp, SARS Virus
ttgcaatgttaatgttttgtttgtt

SEQ ID NO: 162596 - DNA, 25 bp, SARS Virus
tgcaatgttaagtttttgtttgttt

SEQ ID NO: 162597 - DNA, 25 bp, SARS Virus
gcaatgttaaggttttgtttgtttg

SEQ ID NO: 162598 - DNA, 25 bp, SARS Virus
caatgttaaggttttgtttgtttgt

SEQ ID NO: 162599 - DNA, 25 bp, SARS Virus
aatgttaaggttttgtttgtttgtg

SEQ ID NO: 162600 - DNA, 25 bp, SARS Virus
atgttaaggttttgtttgtttgtgg

SEQ ID NO: 162601 - DNA, 25 bp, SARS Virus
tgttaaggttttttttgtttgtggt

SEQ ID NO: 162602 - DNA, 25 bp, SARS Virus
gttaaggttttgtttgtttgtggta

SEQ ID NO: 162603 - DNA, 25 bp, SARS Virus
ttaaggttttgtttgtttgtggtag

SEQ ID NO: 162604 - DNA, 25 bp, SARS Virus
taaggttttgtttgtttgtggtagt

SEQ ID NO: 162605 - DNA, 25 bp, SARS Virus
aaggttttgtttttttgtggtagtc

SEQ ID NO: 162606 - DNA, 25 bp, SARS Virus
aggttttgtttgtttgtggtagtca

SEQ ID NO: 162607 - DNA, 25 bp, SARS Virus
ggttttgtttgtttgtggtagtcac

SEQ ID NO: 162608 - DNA, 25 bp, SARS Virus
gttttgtttgtttgtggtagtcact

SEQ ID NO: 162609 - DNA, 25 bp, SARS Virus
ttttgtttgtttttggtagtcactt

SEQ ID NO: 162610 - DNA, 25 bp, SARS Virus
tttgtttgtttgtggtagtcactta

SEQ ID NO: 162611 - DNA, 25 bp, SARS Virus
ttgtttgtttgttgtagtcacttaa

SEQ ID NO: 162612 - DNA, 25 bp, SARS Virus
tgtttgtttgtgttagtcacttaaa

SEQ ID NO: 162613 - DNA, 25 bp, SARS Virus
gtttgtttgtggtagtcacttaaat

SEQ ID NO: 162614 - DNA, 25 bp, SARS Virus
tttgtttgtggttgtcacttaaata

SEQ ID NO: 162615 - DNA, 25 bp, SARS Virus
ttgtttgtggtattcacttaaatag

SEQ ID NO: 162616 - DNA, 25 bp, SARS Virus
tgtttgtggtagtcacttaaatagc

SEQ ID NO: 162617 - DNA, 25 bp, SARS Virus
gtttgtggtagttacttaaatagca

SEQ ID NO: 162618 - DNA, 25 bp, SARS Virus
tttgtggtagtctcttaaatagcac

SEQ ID NO: 162619 - DNA, 25 bp, SARS Virus
ttgtggtagtcatttaaatagcact

SEQ ID NO: 162620 - DNA, 25 bp, SARS Virus
tgtggtagtcacttaaatagcacta

SEQ ID NO: 162621 - DNA, 25 bp, SARS Virus
gtggtagtcacttaaatagcactac

SEQ ID NO: 162622 - DNA, 25 bp, SARS Virus
tggtagtcactttaatagcactaca

SEQ ID NO: 162623 - DNA, 25 bp, SARS Virus
ggtagtcacttatatagcactacac

SEQ ID NO: 162624 - DNA, 25 bp, SARS Virus
gtagtcacttaattagcactacaca

SEQ ID NO: 162625 - DNA, 25 bp, SARS Virus
tagtcacttaaatagcactacacat

SEQ ID NO: 162626 - DNA, 25 bp, SARS Virus
agtcacttaaattgcactacacatc

SEQ ID NO: 162627 - DNA, 25 bp, SARS Virus
gtcacttaaatatcactacacatcg

SEQ ID NO: 162628 - DNA, 25 bp, SARS Virus
tcacttaaatagtactacacatcgt

SEQ ID NO: 162629 - DNA, 25 bp, SARS Virus
cacttaaatagctctacacatcgta

SEQ ID NO: 162630 - DNA, 25 bp, SARS Virus
acttaaatagcattacacatcgtat

SEQ ID NO: 162631 - DNA, 25 bp, SARS Virus
cttaaatagcactacacatcgtatt

SEQ ID NO: 162632 - DNA, 25 bp, SARS Virus
ttaaatagcacttcacatcgtattc

SEQ ID NO: 162633 - DNA, 25 bp, SARS Virus
taaatagcactatacatcgtattct

SEQ ID NO: 162634 - DNA, 25 bp, SARS Virus
aaatagcactactcatcgtattctt

SEQ ID NO: 162635 - DNA, 25 bp, SARS Virus
aatagcactacatatcgtattctta

SEQ ID NO: 162636 - DNA, 25 bp, SARS Virus
atagcactacacttcgtattcttat

SEQ ID NO: 162637 - DNA, 25 bp, SARS Virus
tagcactacacatcgtattcttatc

SEQ ID NO: 162638 - DNA, 25 bp, SARS Virus
agcactacacattgtattcttatct

SEQ ID NO: 162639 - DNA, 25 bp, SARS Virus
gcactacacatcttattcttatctt

SEQ ID NO: 162640 - DNA, 25 bp, SARS Virus
cactacacatcgtattcttatcttc

SEQ ID NO: 162641 - DNA, 25 bp, SARS Virus
actacacatcgttttcttatcttct

SEQ ID NO: 162642 - DNA, 25 bp, SARS Virus
ctacacatcgtattcttatcttctc

SEQ ID NO: 162643 - DNA, 25 bp, SARS Virus
tacacatcgtattcttatcttctca

SEQ ID NO: 162644 - DNA, 25 bp, SARS Virus
acacatcgtatttttatcttctcaa

SEQ ID NO: 162645 - DNA, 25 bp, SARS Virus
cacatcgtattcttatcttctcaag

SEQ ID NO: 162646 - DNA, 25 bp, SARS Virus
acatcgtattcttatcttctcaagg

SEQ ID NO: 162647 - DNA, 25 bp, SARS Virus
catcgtattcttttcttctcaagga

SEQ ID NO: 162648 - DNA, 25 bp, SARS Virus
atcgtattcttatcttctcaaggag

SEQ ID NO: 162649 - DNA, 25 bp, SARS Virus
tcgtattcttattttctcaaggaga

SEQ ID NO: 162650 - DNA, 25 bp, SARS Virus
cgtattcttatcttctcaaggagat

SEQ ID NO: 162651 - DNA, 25 bp, SARS Virus
gtattcttatcttctcaaggagata

SEQ ID NO: 162652 - DNA, 25 bp, SARS Virus
tattcttatcttttcaaggagataa

SEQ ID NO: 162653 - DNA, 25 bp, SARS Virus
attcttatcttctcaaggagataaa

SEQ ID NO: 162654 - DNA, 25 bp, SARS Virus
ttcttatcttcttaaggagataaaa

SEQ ID NO: 162655 - DNA, 25 bp, SARS Virus
tcttatcttctctaggagataaaac

SEQ ID NO: 162656 - DNA, 25 bp, SARS Virus
cttatcttctcatggagataaaaca

SEQ ID NO: 162657 - DNA, 25 bp, SARS Virus
ttatcttctcaatgagataaaacat

SEQ ID NO: 162658 - DNA, 25 bp, SARS Virus
tatcttctcaagtagataaaacatt

SEQ ID NO: 162659 - DNA, 25 bp, SARS Virus
atcttctcaaggtgataaaacattc

SEQ ID NO: 162660 - DNA, 25 bp, SARS Virus
tcttctcaaggatataaaacattcg

SEQ ID NO: 162661 - DNA, 25 bp, SARS Virus
cttctcaaggagttaaaacattcga

SEQ ID NO: 162662 - DNA, 25 bp, SARS Virus
ttctcaaggagataaaacattcgaa

SEQ ID NO: 162663 - DNA, 25 bp, SARS Virus
tctcaaggagattaaacattcgaaa

SEQ ID NO: 162664 - DNA, 25 bp, SARS Virus
ctcaaggagatataacattcgaaac

SEQ ID NO: 162665 - DNA, 25 bp, SARS Virus
tcaaggagataatacattcgaaaca

SEQ ID NO: 162666 - DNA, 25 bp, SARS Virus
caaggagataaatcattcgaaacag

SEQ ID NO: 162667 - DNA, 25 bp, SARS Virus
aaggagataaaatattcgaaacagt

SEQ ID NO: 162668 - DNA, 25 bp, SARS Virus
aggagataaaactttcgaaacagtg

SEQ ID NO: 162669 - DNA, 25 bp, SARS Virus
ggagataaaacattcgaaacagtga

SEQ ID NO: 162670 - DNA, 25 bp, SARS Virus
gagataaaacattcgaaacagtgat

SEQ ID NO: 162671 - DNA, 25 bp, SARS Virus
agataaaacatttgaaacagtgatg

SEQ ID NO: 162672 - DNA, 25 bp, SARS Virus
gataaaacattctaaacagtgatgt

SEQ ID NO: 162673 - DNA, 25 bp, SARS Virus
ataaaacattcgtaacagtgatgta

SEQ ID NO: 162674 - DNA, 25 bp, SARS Virus
taaaacattcgatacagtgatgtac

SEQ ID NO: 162675 - DNA, 25 bp, SARS Virus
aaaacattcgaatcagtgatgtacc

SEQ ID NO: 162676 - DNA, 25 bp, SARS Virus
aaacattcgaaatagtgatgtaccg

SEQ ID NO: 162677 - DNA, 25 bp, SARS Virus
aacattcgaaactgtgatgtaccga

SEQ ID NO: 162678 - DNA, 25 bp, SARS Virus
acattcgaaacattgatgtaccgac

SEQ ID NO: 162679 - DNA, 25 bp, SARS Virus
cattcgaaacagtgatgtaccgact

SEQ ID NO: 162680 - DNA, 25 bp, SARS Virus
attcgaaacagttatgtaccgactc

SEQ ID NO: 162681 - DNA, 25 bp, SARS Virus
ttcgaaacagtgttgtaccgactcg

SEQ ID NO: 162682 - DNA, 25 bp, SARS Virus
tcgaaacagtgatgtaccgactcgt

SEQ ID NO: 162683 - DNA, 25 bp, SARS Virus
cgaaacagtgatttaccgactcgta

SEQ ID NO: 162684 - DNA, 25 bp, SARS Virus
gaaacagtgatgtaccgactcgtag

SEQ ID NO: 162685 - DNA, 25 bp, SARS Virus
aaacagtgatgttccgactcgtagc

SEQ ID NO: 162686 - DNA, 25 bp, SARS Virus
aacagtgatgtatcgactcgtagca

SEQ ID NO: 162687 - DNA, 25 bp, SARS Virus
acagtgatgtactgactcgtagcat

SEQ ID NO: 162688 - DNA, 25 bp, SARS Virus
cagtgatgtacctactcgtagcatc

SEQ ID NO: 162689 - DNA, 25 bp, SARS Virus
agtgatgtaccgtctcgtagcatct

SEQ ID NO: 162690 - DNA, 25 bp, SARS Virus
gtgatgtaccgattcgtagcatctt

SEQ ID NO: 162691 - DNA, 25 bp, SARS Virus
tgatgtaccgactcgtagcatcttg

SEQ ID NO: 162692 - DNA, 25 bp, SARS Virus
gatgtaccgacttgtagcatcttga

SEQ ID NO: 162693 - DNA, 25 bp, SARS Virus
atgtaccgactcttagcatcttgaa

SEQ ID NO: 162694 - DNA, 25 bp, SARS Virus
tgtaccgactcgtagcatcttgaag

SEQ ID NO: 162695 - DNA, 25 bp, SARS Virus
gtaccgactcgttgcatcttgaagg

SEQ ID NO: 162696 - DNA, 25 bp, SARS Virus
taccgactcgtatcatcttgaaggt

SEQ ID NO: 162697 - DNA, 25 bp, SARS Virus
accgactcgtagtatcttgaaggta

SEQ ID NO: 162698 - DNA, 25 bp, SARS Virus
ccgactcgtagcttcttgaaggtaa

SEQ ID NO: 162699 - DNA, 25 bp, SARS Virus
cgactcgtagcatcttgaaggtaag

SEQ ID NO: 162700 - DNA, 25 bp, SARS Virus
gactcgtagcattttgaaggtaaga

SEQ ID NO: 162701 - DNA, 25 bp, SARS Virus
actcgtagcatcttgaaggtaagat

SEQ ID NO: 162702 - DNA, 25 bp, SARS Virus
ctcgtagcatcttgaaggtaagatg

SEQ ID NO: 162703 - DNA, 25 bp, SARS Virus
tcgtagcatctttaaggtaagatga

SEQ ID NO: 162704 - DNA, 25 bp, SARS Virus
cgtagcatcttgtaggtaagatgaa

SEQ ID NO: 162705 - DNA, 25 bp, SARS Virus
gtagcatcttgatggtaagatgaag

SEQ ID NO: 162706 - DNA, 25 bp, SARS Virus
tagcatcttgaatgtaagatgaagt

SEQ ID NO: 162707 - DNA, 25 bp, SARS Virus
agcatcttgaagttaagatgaagtc

SEQ ID NO: 162708 - DNA, 25 bp, SARS Virus
gcatcttgaaggtaagatgaagtcg

SEQ ID NO: 162709 - DNA, 25 bp, SARS Virus
catcttgaaggttagatgaagtcgg

SEQ ID NO: 162710 - DNA, 25 bp, SARS Virus
atcttgaaggtatgatgaagtcgga

SEQ ID NO: 162711 - DNA, 25 bp, SARS Virus
tcttgaaggtaatatgaagtcggac

SEQ ID NO: 162712 - DNA, 25 bp, SARS Virus
cttgaaggtaagttgaagtcggact

SEQ ID NO: 162713 - DNA, 25 bp, SARS Virus
ttgaaggtaagatgaagtcggactc

SEQ ID NO: 162714 - DNA, 25 bp, SARS Virus
tgaaggtaagattaagtcggactcc

SEQ ID NO: 162715 - DNA, 25 bp, SARS Virus
gaaggtaagatgtagtcggactccg

SEQ ID NO: 162716 - DNA, 25 bp, SARS Virus
aaggtaagatgatgtcggactccgt

SEQ ID NO: 162717 - DNA, 25 bp, SARS Virus
aggtaagatgaattcggactccgtg

SEQ ID NO: 162718 - DNA, 25 bp, SARS Virus
ggtaagatgaagtcggactccgtgt

SEQ ID NO: 162719 - DNA, 25 bp, SARS Virus
gtaagatgaagttggactccgtgtg

SEQ ID NO: 162720 - DNA, 25 bp, SARS Virus
taagatgaagtctgactccgtgtgt

SEQ ID NO: 162721 - DNA, 25 bp, SARS Virus
aagatgaagtcgtactccgtgtgtg

SEQ ID NO: 162722 - DNA, 25 bp, SARS Virus
agatgaagtcggtctccgtgtgtga

SEQ ID NO: 162723 - DNA, 25 bp, SARS Virus
gatgaagtcggattccgtgtgtgaa

SEQ ID NO: 162724 - DNA, 25 bp, SARS Virus
atgaagtcggactccgtgtgtgaac

SEQ ID NO: 162725 - DNA, 25 bp, SARS Virus
tgaagtcggacttcgtgtgtgaact

SEQ ID NO: 162726 - DNA, 25 bp, SARS Virus
gaagtcggactctgtgtgtgaacta

SEQ ID NO: 162727 - DNA, 25 bp, SARS Virus
aagtcggactccttgtgtgaactat

SEQ ID NO: 162728 - DNA, 25 bp, SARS Virus
agtcggactccgtgtgtgaactatc

SEQ ID NO: 162729 - DNA, 25 bp, SARS Virus
gtcggactccgtttgtgaactatcg

SEQ ID NO: 162730 - DNA, 25 bp, SARS Virus
tcggactccgtgtgtgaactatcgg

SEQ ID NO: 162731 - DNA, 25 bp, SARS Virus
cggactccgtgtttgaactatcgga

SEQ ID NO: 162732 - DNA, 25 bp, SARS Virus
ggactccgtgtgtgaactatcggaa

SEQ ID NO: 162733 - DNA, 25 bp, SARS Virus
gactccgtgtgttaactatcggaaa

SEQ ID NO: 162734 - DNA, 25 bp, SARS Virus
actccgtgtgtgtactatcggaaac

SEQ ID NO: 162735 - DNA, 25 bp, SARS Virus
ctccgtgtgtgatctatcggaaacc

SEQ ID NO: 162736 - DNA, 25 bp, SARS Virus
tccgtgtgtgaattatcggaaacct

SEQ ID NO: 162737 - DNA, 25 bp, SARS Virus
ccgtgtgtgaactatcggaaaccta

SEQ ID NO: 162738 - DNA, 25 bp, SARS Virus
cgtgtgtgaactttcggaaacctaa

SEQ ID NO: 162739 - DNA, 25 bp, SARS Virus
gtgtgtgaactatcggaaacctaaa

SEQ ID NO: 162740 - DNA, 25 bp, SARS Virus
tgtgtgaactattggaaacctaaag

SEQ ID NO: 162741 - DNA, 25 bp, SARS Virus
gtgtgaactatctgaaacctaaagg

SEQ ID NO: 162742 - DNA, 25 bp, SARS Virus
tgtgaactatcgtaaacctaaaggt

SEQ ID NO: 162743 - DNA, 25 bp, SARS Virus
gtgaactatcggtaacctaaaggtt

SEQ ID NO: 162744 - DNA, 25 bp, SARS Virus
tgaactatcggatacctaaaggtta

SEQ ID NO: 162745 - DNA, 25 bp, SARS Virus
gaactatcggaatcctaaaggttac

SEQ ID NO: 162746 - DNA, 25 bp, SARS Virus
aactatcggaaatctaaaggttaca

SEQ ID NO: 162747 - DNA, 25 bp, SARS Virus
actatcggaaacttaaaggttacag

SEQ ID NO: 162748 - DNA, 25 bp, SARS Virus
ctatcggaaacctaaaggttacagt

SEQ ID NO: 162749 - DNA, 25 bp, SARS Virus
tatcggaaaccttaaggttacagta

SEQ ID NO: 162750 - DNA, 25 bp, SARS Virus
atcggaaacctataggttacagtac

SEQ ID NO: 162751 - DNA, 25 bp, SARS Virus
tcggaaacctaatggttacagtact

SEQ ID NO: 162752 - DNA, 25 bp, SARS Virus
cggaaacctaaatgttacagtactt

SEQ ID NO: 162753 - DNA, 25 bp, SARS Virus
ggaaacctaaagtttacagtacttc

SEQ ID NO: 162754 - DNA, 25 bp, SARS Virus
gaaacctaaaggttacagtacttct

SEQ ID NO: 162755 - DNA, 25 bp, SARS Virus
aaacctaaaggttacagtacttctt

SEQ ID NO: 162756 - DNA, 25 bp, SARS Virus
aacctaaaggtttcagtacttcttg

SEQ ID NO: 162757 - DNA, 25 bp, SARS Virus
acctaaaggttatagtacttcttga

SEQ ID NO: 162758 - DNA, 25 bp, SARS Virus
cctaaaggttactgtacttcttgac

SEQ ID NO: 162759 - DNA, 25 bp, SARS Virus
ctaaaggttacattacttcttgacc

SEQ ID NO: 162760 - DNA, 25 bp, SARS Virus
taaaggttacagtacttcttgacct

SEQ ID NO: 162761 - DNA, 25 bp, SARS Virus
aaaggttacagttcttcttgacctt

SEQ ID NO: 162762 - DNA, 25 bp, SARS Virus
aaggttacagtatttcttgaccttt

SEQ ID NO: 162763 - DNA, 25 bp, SARS Virus
aggttacagtacttcttgacctttg

SEQ ID NO: 162764 - DNA, 25 bp, SARS Virus
ggttacagtacttcttgacctttga

SEQ ID NO: 162765 - DNA, 25 bp, SARS Virus
gttacagtactttttgacctttgaa

SEQ ID NO: 162766 - DNA, 25 bp, SARS Virus
ttacagtacttcttgacctttgaat

SEQ ID NO: 162767 - DNA, 25 bp, SARS Virus
tacagtacttcttgacctttgaata

SEQ ID NO: 162768 - DNA, 25 bp, SARS Virus
acagtacttctttacctttgaatag

SEQ ID NO: 162769 - DNA, 25 bp, SARS Virus
cagtacttcttgtcctttgaatagt

SEQ ID NO: 162770 - DNA, 25 bp, SARS Virus
agtacttcttgatctttgaatagtc

SEQ ID NO: 162771 - DNA, 25 bp, SARS Virus
gtacttcttgacttttgaatagtcg

SEQ ID NO: 162772 - DNA, 25 bp, SARS Virus
tacttcttgacctttgaatagtcgt

SEQ ID NO: 162773 - DNA, 25 bp, SARS Virus
acttcttgacctttgaatagtcgtt

SEQ ID NO: 162774 - DNA, 25 bp, SARS Virus
cttcttgacctttgaatagtcgttc

SEQ ID NO: 162775 - DNA, 25 bp, SARS Virus
ttcttgaccttttaatagtcgttcg

SEQ ID NO: 162776 - DNA, 25 bp, SARS Virus
tcttgacctttgtatagtcgttcgt

SEQ ID NO: 162777 - DNA, 25 bp, SARS Virus
cttgacctttgattagtcgttcgtt

SEQ ID NO: 162778 - DNA, 25 bp, SARS Virus
ttgacctttgaatagtcgttcgtta

SEQ ID NO: 162779 - DNA, 25 bp, SARS Virus
tgacctttgaattgtcgttcgttac

SEQ ID NO: 162780 - DNA, 25 bp, SARS Virus
gacctttgaatattcgttcgttacg

SEQ ID NO: 162781 - DNA, 25 bp, SARS Virus
acctttgaatagtcgttcgttacgt

SEQ ID NO: 162782 - DNA, 25 bp, SARS Virus
cctttgaatagttgttcgttacgtc

SEQ ID NO: 162783 - DNA, 25 bp, SARS Virus
ctttgaatagtctttcgttacgtct

SEQ ID NO: 162784 - DNA, 25 bp, SARS Virus
tttgaatagtcgttcgttacgtctg

SEQ ID NO: 162785 - DNA, 25 bp, SARS Virus
ttgaatagtcgttcgttacgtctga

SEQ ID NO: 162786 - DNA, 25 bp, SARS Virus
tgaatagtcgtttgttacgtctgaa

SEQ ID NO: 162787 - DNA, 25 bp, SARS Virus
gaatagtcgttctttacgtctgaag

SEQ ID NO: 162788 - DNA, 25 bp, SARS Virus
aatagtcgttcgttacgtctgaagt

SEQ ID NO: 162789 - DNA, 25 bp, SARS Virus
atagtcgttcgttacgtctgaagtg

SEQ ID NO: 162790 - DNA, 25 bp, SARS Virus
tagtcgttcgtttcgtctgaagtgt

SEQ ID NO: 162791 - DNA, 25 bp, SARS Virus
agtcgttcgttatgtctgaagtgtt

SEQ ID NO: 162792 - DNA, 25 bp, SARS Virus
gtcgttcgttacttctgaagtgttg

SEQ ID NO: 162793 - DNA, 25 bp, SARS Virus
tcgttcgttacgtctgaagtgttgg

SEQ ID NO: 162794 - DNA, 25 bp, SARS Virus
cgttcgttacgtttgaagtgttggt

SEQ ID NO: 162795 - DNA, 25 bp, SARS Virus
gttcgttacgtctgaagtgttggta

SEQ ID NO: 162796 - DNA, 25 bp, SARS Virus
ttcgttacgtcttaagtgttggtac

SEQ ID NO: 162797 - DNA, 25 bp, SARS Virus
tcgttacgtctgtagtgttggtaca

SEQ ID NO: 162798 - DNA, 25 bp, SARS Virus
cgttacgtctgatgtgttggtacac

SEQ ID NO: 162799 - DNA, 25 bp, SARS Virus
gttacgtctgaattgttggtacaca

SEQ ID NO: 162800 - DNA, 25 bp, SARS Virus
ttacgtctgaagtgttggtacacaa

SEQ ID NO: 162801 - DNA, 25 bp, SARS Virus
tacgtctgaagttttggtacacaac

SEQ ID NO: 162802 - DNA, 25 bp, SARS Virus
acgtctgaagtgttggtacacaaca

SEQ ID NO: 162803 - DNA, 25 bp, SARS Virus
cgtctgaagtgttggtacacaacat

SEQ ID NO: 162804 - DNA, 25 bp, SARS Virus
gtctgaagtgtttgtacacaacatg

SEQ ID NO: 162805 - DNA, 25 bp, SARS Virus
tctgaagtgttgttacacaacatga

SEQ ID NO: 162806 - DNA, 25 bp, SARS Virus
ctgaagtgttggtacacaacatgaa

SEQ ID NO: 162807 - DNA, 25 bp, SARS Virus
tgaagtgttggttcacaacatgaaa

SEQ ID NO: 162808 - DNA, 25 bp, SARS Virus
gaagtgttggtatacaacatgaaaa

SEQ ID NO: 162809 - DNA, 25 bp, SARS Virus
aagtgttggtactcaacatgaaaag

SEQ ID NO: 162810 - DNA, 25 bp, SARS Virus
agtgttggtacataacatgaaaaga

SEQ ID NO: 162811 - DNA, 25 bp, SARS Virus
gtgttggtacactacatgaaaagac

SEQ ID NO: 162812 - DNA, 25 bp, SARS Virus
tgttggtacacatcatgaaaagacg

SEQ ID NO: 162813 - DNA, 25 bp, SARS Virus
gttggtacacaatatgaaaagacgt

SEQ ID NO: 162814 - DNA, 25 bp, SARS Virus
ttggtacacaacttgaaaagacgtt

SEQ ID NO: 162815 - DNA, 25 bp, SARS Virus
tggtacacaacatgaaaagacgttc

SEQ ID NO: 162816 - DNA, 25 bp, SARS Virus
ggtacacaacattaaaagacgttcg

SEQ ID NO: 162817 - DNA, 25 bp, SARS Virus
gtacacaacatgtaaagacgttcgt

SEQ ID NO: 162818 - DNA, 25 bp, SARS Virus
tacacaacatgataagacgttcgtc

SEQ ID NO: 162819 - DNA, 25 bp, SARS Virus
acacaacatgaatagacgttcgtct

SEQ ID NO: 162820 - DNA, 25 bp, SARS Virus
cacaacatgaaatgacgttcgtctt

SEQ ID NO: 162821 - DNA, 25 bp, SARS Virus
acaacatgaaaatacgttcgtctta

SEQ ID NO: 162822 - DNA, 25 bp, SARS Virus
caacatgaaaagtcgttcgtcttaa

SEQ ID NO: 162823 - DNA, 25 bp, SARS Virus
aacatgaaaagatgttcgtcttaat

SEQ ID NO: 162824 - DNA, 25 bp, SARS Virus
acatgaaaagactttcgtcttaatt

SEQ ID NO: 162825 - DNA, 25 bp, SARS Virus
catgaaaagacgttcgtcttaattg

SEQ ID NO: 162826 - DNA, 25 bp, SARS Virus
atgaaaagacgttcgtcttaattgg

SEQ ID NO: 162827 - DNA, 25 bp, SARS Virus
tgaaaagacgtttgtcttaattggg

SEQ ID NO: 162828 - DNA, 25 bp, SARS Virus
gaaaagacgttcttcttaattggga

SEQ ID NO: 162829 - DNA, 25 bp, SARS Virus
aaaagacgttcgtcttaattgggag

SEQ ID NO: 162830 - DNA, 25 bp, SARS Virus
aaagacgttcgttttaattgggagt

SEQ ID NO: 162831 - DNA, 25 bp, SARS Virus
aagacgttcgtcttaattgggagtc

SEQ ID NO: 162832 - DNA, 25 bp, SARS Virus
agacgttcgtcttaattgggagtca

SEQ ID NO: 162833 - DNA, 25 bp, SARS Virus
gacgttcgtctttattgggagtcaa

SEQ ID NO: 162834 - DNA, 25 bp, SARS Virus
acgttcgtcttatttgggagtcaag

SEQ ID NO: 162835 - DNA, 25 bp, SARS Virus
cgttcgtcttaattgggagtcaagt

SEQ ID NO: 162836 - DNA, 25 bp, SARS Virus
gttcgtcttaattgggagtcaagta

SEQ ID NO: 162837 - DNA, 25 bp, SARS Virus
ttcgtcttaatttggagtcaagtag

SEQ ID NO: 162838 - DNA, 25 bp, SARS Virus
tcgtcttaattgtgagtcaagtaga

SEQ ID NO: 162839 - DNA, 25 bp, SARS Virus
cgtcttaattggtagtcaagtagag

SEQ ID NO: 162840 - DNA, 25 bp, SARS Virus
gtcttaattgggtgtcaagtagagg

SEQ ID NO: 162841 - DNA, 25 bp, SARS Virus
tcttaattgggattcaagtagagga

SEQ ID NO: 162842 - DNA, 25 bp, SARS Virus
cttaattgggagtcaagtagaggat

SEQ ID NO: 162843 - DNA, 25 bp, SARS Virus
ttaattgggagttaagtagaggata

SEQ ID NO: 162844 - DNA, 25 bp, SARS Virus
taattgggagtctagtagaggatat

SEQ ID NO: 162845 - DNA, 25 bp, SARS Virus
aattgggagtcatgtagaggatatt

SEQ ID NO: 162846 - DNA, 25 bp, SARS Virus
attgggagtcaattagaggatatta

SEQ ID NO: 162847 - DNA, 25 bp, SARS Virus
ttgggagtcaagtagaggatattat

SEQ ID NO: 162848 - DNA, 25 bp, SARS Virus
tgggagtcaagttgaggatattatc

SEQ ID NO: 162849 - DNA, 25 bp, SARS Virus
gggagtcaagtataggatattatcc

SEQ ID NO: 162850 - DNA, 25 bp, SARS Virus
ggagtcaagtagtggatattatccc

SEQ ID NO: 162851 - DNA, 25 bp, SARS Virus
gagtcaagtagatgatattatccca

SEQ ID NO: 162852 - DNA, 25 bp, SARS Virus
agtcaagtagagtatattatcccat

SEQ ID NO: 162853 - DNA, 25 bp, SARS Virus
gtcaagtagaggttattatcccata

SEQ ID NO: 162854 - DNA, 25 bp, SARS Virus
tcaagtagaggatattatcccataa

SEQ ID NO: 162855 - DNA, 25 bp, SARS Virus
caagtagaggattttatcccataag

SEQ ID NO: 162856 - DNA, 25 bp, SARS Virus
aagtagaggatattatcccataagt

SEQ ID NO: 162857 - DNA, 25 bp, SARS Virus
agtagaggatattatcccataagtt

SEQ ID NO: 162858 - DNA, 25 bp, SARS Virus
gtagaggatattttcccataagttg

SEQ ID NO: 162859 - DNA, 25 bp, SARS Virus
tagaggatattatcccataagttgt

SEQ ID NO: 162860 - DNA, 25 bp, SARS Virus
agaggatattattccataagttgtc

SEQ ID NO: 162861 - DNA, 25 bp, SARS Virus
gaggatattatctcataagttgtct

SEQ ID NO: 162862 - DNA, 25 bp, SARS Virus
aggatattatcctataagttgtctg

SEQ ID NO: 162863 - DNA, 25 bp, SARS Virus
ggatattatcccttaagttgtctgg

SEQ ID NO: 162864 - DNA, 25 bp, SARS Virus
gatattatcccataagttgtctggt

SEQ ID NO: 162865 - DNA, 25 bp, SARS Virus
atattatcccattagttgtctggtt

SEQ ID NO: 162866 - DNA, 25 bp, SARS Virus
tattatcccatatgttgtctggtta

SEQ ID NO: 162867 - DNA, 25 bp, SARS Virus
attatcccataatttgtctggttag

SEQ ID NO: 162868 - DNA, 25 bp, SARS Virus
ttatcccataagttgtctggttagt

SEQ ID NO: 162869 - DNA, 25 bp, SARS Virus
tatcccataagttgtctggttagtt

SEQ ID NO: 162870 - DNA, 25 bp, SARS Virus
atcccataagttttctggttagttg

SEQ ID NO: 162871 - DNA, 25 bp, SARS Virus
tcccataagttgtctggttagttgc

SEQ ID NO: 162872 - DNA, 25 bp, SARS Virus
cccataagttgtttggttagttgcg

SEQ ID NO: 162873 - DNA, 25 bp, SARS Virus
ccataagttgtctggttagttgcgc

SEQ ID NO: 162874 - DNA, 25 bp, SARS Virus
cataagttgtcttgttagttgcgcg

SEQ ID NO: 162875 - DNA, 25 bp, SARS Virus
ataagttgtctgtttagttgcgcga

SEQ ID NO: 162876 - DNA, 25 bp, SARS Virus
taagttgtctggttagttgcgcgaa

SEQ ID NO: 162877 - DNA, 25 bp, SARS Virus
aagttgtctggttagttgcgcgaat

SEQ ID NO: 162878 - DNA, 25 bp, SARS Virus
agttgtctggtttgttgcgcgaatt

SEQ ID NO: 162879 - DNA, 25 bp, SARS Virus
gttgtctggttatttgcgcgaattg

SEQ ID NO: 162880 - DNA, 25 bp, SARS Virus
ttgtctggttagttgcgcgaattgt

SEQ ID NO: 162881 - DNA, 25 bp, SARS Virus
tgtctggttagttgcgcgaattgtt

SEQ ID NO: 162882 - DNA, 25 bp, SARS Virus
gtctggttagtttcgcgaattgttt

SEQ ID NO: 162883 - DNA, 25 bp, SARS Virus
tctggttagttgtgcgaattgtttc

SEQ ID NO: 162884 - DNA, 25 bp, SARS Virus
ctggttagttgctcgaattgtttcg

SEQ ID NO: 162885 - DNA, 25 bp, SARS Virus
tggttagttgcgtgaattgtttcgt

SEQ ID NO: 162886 - DNA, 25 bp, SARS Virus
ggttagttgcgctaattgtttcgtg

SEQ ID NO: 162887 - DNA, 25 bp, SARS Virus
gttagttgcgcgtattgtttcgtga

SEQ ID NO: 162888 - DNA, 25 bp, SARS Virus
ttagttgcgcgatttgtttcgtgag

SEQ ID NO: 162889 - DNA, 25 bp, SARS Virus
tagttgcgcgaattgtttcgtgagt

SEQ ID NO: 162890 - DNA, 25 bp, SARS Virus
agttgcgcgaattgtttcgtgagta

SEQ ID NO: 162891 - DNA, 25 bp, SARS Virus
gttgcgcgaattttttcgtgagtac

SEQ ID NO: 162892 - DNA, 25 bp, SARS Virus
ttgcgcgaattgtttcgtgagtacc

SEQ ID NO: 162893 - DNA, 25 bp, SARS Virus
tgcgcgaattgtttcgtgagtacct

SEQ ID NO: 162894 - DNA, 25 bp, SARS Virus
gcgcgaattgtttcgtgagtacctg

SEQ ID NO: 162895 - DNA, 25 bp, SARS Virus
cgcgaattgttttgtgagtacctga

SEQ ID NO: 162896 - DNA, 25 bp, SARS Virus
gcgaattgtttcttgagtacctgac

SEQ ID NO: 162897 - DNA, 25 bp, SARS Virus
cgaattgtttcgtgagtacctgacg

SEQ ID NO: 162898 - DNA, 25 bp, SARS Virus
gaattgtttcgttagtacctgacga

SEQ ID NO: 162899 - DNA, 25 bp, SARS Virus
aattgtttcgtgtgtacctgacgat

SEQ ID NO: 162900 - DNA, 25 bp, SARS Virus
attgtttcgtgattacctgacgatt

SEQ ID NO: 162901 - DNA, 25 bp, SARS Virus
ttgtttcgtgagtacctgacgattt

SEQ ID NO: 162902 - DNA, 25 bp, SARS Virus
tgtttcgtgagttcctgacgatttg

SEQ ID NO: 162903 - DNA, 25 bp, SARS Virus
gtttcgtgagtatctgacgatttgt

SEQ ID NO: 162904 - DNA, 25 bp, SARS Virus
tttcgtgagtacttgacgatttgta

SEQ ID NO: 162905 - DNA, 25 bp, SARS Virus
ttcgtgagtacctgacgatttgtag

SEQ ID NO: 162906 - DNA, 25 bp, SARS Virus
tcgtgagtaccttacgatttgtaga

SEQ ID NO: 162907 - DNA, 25 bp, SARS Virus
cgtgagtacctgtcgatttgtagat

SEQ ID NO: 162908 - DNA, 25 bp, SARS Virus
gtgagtacctgatgatttgtagatc

SEQ ID NO: 162909 - DNA, 25 bp, SARS Virus
tgagtacctgactatttgtagatca

SEQ ID NO: 162910 - DNA, 25 bp, SARS Virus
gagtacctgacgttttgtagatcag

SEQ ID NO: 162911 - DNA, 25 bp, SARS Virus
agtacctgacgatttgtagatcagt

SEQ ID NO: 162912 - DNA, 25 bp, SARS Virus
gtacctgacgatttgtagatcagta

SEQ ID NO: 162913 - DNA, 25 bp, SARS Virus
tacctgacgatttgtagatcagtac

SEQ ID NO: 162914 - DNA, 25 bp, SARS Virus
acctgacgatttttagatcagtact

SEQ ID NO: 162915 - DNA, 25 bp, SARS Virus
cctgacgatttgtagatcagtacta

SEQ ID NO: 162916 - DNA, 25 bp, SARS Virus
ctgacgatttgttgatcagtactat

SEQ ID NO: 162917 - DNA, 25 bp, SARS Virus
tgacgatttgtatatcagtactatc

SEQ ID NO: 162918 - DNA, 25 bp, SARS Virus
gacgatttgtagttcagtactatcg

SEQ ID NO: 162919 - DNA, 25 bp, SARS Virus
acgatttgtagatcagtactatcgt

SEQ ID NO: 162920 - DNA, 25 bp, SARS Virus
cgatttgtagattagtactatcgta

SEQ ID NO: 162921 - DNA, 25 bp, SARS Virus
gatttgtagatctgtactatcgtag

SEQ ID NO: 162922 - DNA, 25 bp, SARS Virus
atttgtagatcattactatcgtagt

SEQ ID NO: 162923 - DNA, 25 bp, SARS Virus
tttgtagatcagtactatcgtagtg

SEQ ID NO: 162924 - DNA, 25 bp, SARS Virus
ttgtagatcagttctatcgtagtgt

SEQ ID NO: 162925 - DNA, 25 bp, SARS Virus
tgtagatcagtattatcgtagtgtt

SEQ ID NO: 162926 - DNA, 25 bp, SARS Virus
gtagatcagtactatcgtagtgttg

SEQ ID NO: 162927 - DNA, 25 bp, SARS Virus
tagatcagtactttcgtagtgttga

SEQ ID NO: 162928 - DNA, 25 bp, SARS Virus
agatcagtactatcgtagtgttgat

SEQ ID NO: 162929 - DNA, 25 bp, SARS Virus
gatcagtactattgtagtgttgatc

SEQ ID NO: 162930 - DNA, 25 bp, SARS Virus
atcagtactatcttagtgttgatcg

SEQ ID NO: 162931 - DNA, 25 bp, SARS Virus
tcagtactatcgtagtgttgatcgg

SEQ ID NO: 162932 - DNA, 25 bp, SARS Virus
cagtactatcgttgtgttgatcggt

SEQ ID NO: 162933 - DNA, 25 bp, SARS Virus
agtactatcgtattgttgatcggtg

SEQ ID NO: 162934 - DNA, 25 bp, SARS Virus
gtactatcgtagtgttgatcggtgt

SEQ ID NO: 162935 - DNA, 25 bp, SARS Virus
tactatcgtagttttgatcggtgta

SEQ ID NO: 162936 - DNA, 25 bp, SARS Virus
actatcgtagtgttgatcggtgtac

SEQ ID NO: 162937 - DNA, 25 bp, SARS Virus
ctatcgtagtgttgatcggtgtaca

SEQ ID NO: 162938 - DNA, 25 bp, SARS Virus
tatcgtagtgtttatcggtgtacac

SEQ ID NO: 162939 - DNA, 25 bp, SARS Virus
atcgtagtgttgttcggtgtacacg

SEQ ID NO: 162940 - DNA, 25 bp, SARS Virus
tcgtagtgttgatcggtgtacacgt

SEQ ID NO: 162941 - DNA, 25 bp, SARS Virus
cgtagtgttgattggtgtacacgta

SEQ ID NO: 162942 - DNA, 25 bp, SARS Virus
gtagtgttgatctgtgtacacgtaa

SEQ ID NO: 162943 - DNA, 25 bp, SARS Virus
tagtgttgatcgttgtacacgtaaa

SEQ ID NO: 162944 - DNA, 25 bp, SARS Virus
agtgttgatcggtgtacacgtaaag

SEQ ID NO: 162945 - DNA, 25 bp, SARS Virus
gtgttgatcggtttacacgtaaagg

SEQ ID NO: 162946 - DNA, 25 bp, SARS Virus
tgttgatcggtgtacacgtaaaggt

SEQ ID NO: 162947 - DNA, 25 bp, SARS Virus
gttgatcggtgttcacgtaaaggta

SEQ ID NO: 162948 - DNA, 25 bp, SARS Virus
ttgatcggtgtatacgtaaaggtac

SEQ ID NO: 162949 - DNA, 25 bp, SARS Virus
tgatcggtgtactcgtaaaggtaca

SEQ ID NO: 162950 - DNA, 25 bp, SARS Virus
gatcggtgtacatgtaaaggtacat

SEQ ID NO: 162951 - DNA, 25 bp, SARS Virus
atcggtgtacacttaaaggtacatg

SEQ ID NO: 162952 - DNA, 25 bp, SARS Virus
tcggtgtacacgtaaaggtacatgg

SEQ ID NO: 162953 - DNA, 25 bp, SARS Virus
cggtgtacacgttaaggtacatgga

SEQ ID NO: 162954 - DNA, 25 bp, SARS Virus
ggtgtacacgtataggtacatggac

SEQ ID NO: 162955 - DNA, 25 bp, SARS Virus
gtgtacacgtaatggtacatggacc

SEQ ID NO: 162956 - DNA, 25 bp, SARS Virus
tgtacacgtaaatgtacatggaccg

SEQ ID NO: 162957 - DNA, 25 bp, SARS Virus
gtacacgtaaagttacatggaccgt

SEQ ID NO: 162958 - DNA, 25 bp, SARS Virus
tacacgtaaaggtacatggaccgtt

SEQ ID NO: 162959 - DNA, 25 bp, SARS Virus
acacgtaaaggttcatggaccgtta

SEQ ID NO: 162960 - DNA, 25 bp, SARS Virus
cacgtaaaggtatatggaccgttac

SEQ ID NO: 162961 - DNA, 25 bp, SARS Virus
acgtaaaggtacttggaccgttaca

SEQ ID NO: 162962 - DNA, 25 bp, SARS Virus
cgtaaaggtacatggaccgttacaa

SEQ ID NO: 162963 - DNA, 25 bp, SARS Virus
gtaaaggtacattgaccgttacaac

SEQ ID NO: 162964 - DNA, 25 bp, SARS Virus
taaaggtacatgtaccgttacaacc

SEQ ID NO: 162965 - DNA, 25 bp, SARS Virus
aaaggtacatggtccgttacaacca

SEQ ID NO: 162966 - DNA, 25 bp, SARS Virus
aaggtacatggatcgttacaaccag

SEQ ID NO: 162967 - DNA, 25 bp, SARS Virus
aggtacatggactgttacaaccagt

SEQ ID NO: 162968 - DNA, 25 bp, SARS Virus
ggtacatggacctttacaaccagta

SEQ ID NO: 162969 - DNA, 25 bp, SARS Virus
gtacatggaccgttacaaccagtac

SEQ ID NO: 162970 - DNA, 25 bp, SARS Virus
tacatggaccgttacaaccagtacc

SEQ ID NO: 162971 - DNA, 25 bp, SARS Virus
acatggaccgtttcaaccagtacca

SEQ ID NO: 162972 - DNA, 25 bp, SARS Virus
catggaccgttataaccagtaccaa

SEQ ID NO: 162973 - DNA, 25 bp, SARS Virus
atggaccgttactaccagtaccaat

SEQ ID NO: 162974 - DNA, 25 bp, SARS Virus
tggaccgttacatccagtaccaatg

SEQ ID NO: 162975 - DNA, 25 bp, SARS Virus
ggaccgttacaatcagtaccaatga

SEQ ID NO: 162976 - DNA, 25 bp, SARS Virus
gaccgttacaactagtaccaatgag

SEQ ID NO: 162977 - DNA, 25 bp, SARS Virus
accgttacaacctgtaccaatgaga

SEQ ID NO: 162978 - DNA, 25 bp, SARS Virus
ccgttacaaccattaccaatgagac

SEQ ID NO: 162979 - DNA, 25 bp, SARS Virus
cgttacaaccagtaccaatgagact

SEQ ID NO: 162980 - DNA, 25 bp, SARS Virus
gttacaaccagttccaatgagactt

SEQ ID NO: 162981 - DNA, 25 bp, SARS Virus
ttacaaccagtatcaatgagacttc

SEQ ID NO: 162982 - DNA, 25 bp, SARS Virus
tacaaccagtactaatgagacttcc

SEQ ID NO: 162983 - DNA, 25 bp, SARS Virus
acaaccagtacctatgagacttcca

SEQ ID NO: 162984 - DNA, 25 bp, SARS Virus
caaccagtaccattgagacttccaa

SEQ ID NO: 162985 - DNA, 25 bp, SARS Virus
aaccagtaccaatgagacttccaat

SEQ ID NO: 162986 - DNA, 25 bp, SARS Virus
accagtaccaattagacttccaatg

SEQ ID NO: 162987 - DNA, 25 bp, SARS Virus
ccagtaccaatgtgacttccaatgg

SEQ ID NO: 162988 - DNA, 25 bp, SARS Virus
cagtaccaatgatacttccaatggg

SEQ ID NO: 162989 - DNA, 25 bp, SARS Virus
agtaccaatgagtcttccaatgggc

SEQ ID NO: 162990 - DNA, 25 bp, SARS Virus
gtaccaatgagatttccaatgggca

SEQ ID NO: 162991 - DNA, 25 bp, SARS Virus
taccaatgagacttccaatgggcat

SEQ ID NO: 162992 - DNA, 25 bp, SARS Virus
accaatgagacttccaatgggcatt

SEQ ID NO: 162993 - DNA, 25 bp, SARS Virus
ccaatgagactttcaatgggcattt

SEQ ID NO: 162994 - DNA, 25 bp, SARS Virus
caatgagacttctaatgggcatttc

SEQ ID NO: 162995 - DNA, 25 bp, SARS Virus
aatgagacttcctatgggcatttcg

SEQ ID NO: 162996 - DNA, 25 bp, SARS Virus
atgagacttccattgggcatttcgg

SEQ ID NO: 162997 - DNA, 25 bp, SARS Virus
tgagacttccaatgggcatttcggg

SEQ ID NO: 162998 - DNA, 25 bp, SARS Virus
gagacttccaattggcatttcgggg

SEQ ID NO: 162999 - DNA, 25 bp, SARS Virus
agacttccaatgtgcatttcggggt

SEQ ID NO: 163000 - DNA, 25 bp, SARS Virus
gacttccaatggtcatttcggggtg

SEQ ID NO: 163001 - DNA, 25 bp, SARS Virus
acttccaatgggtatttcggggtga

SEQ ID NO: 163002 - DNA, 25 bp, SARS Virus
cttccaatgggcttttcggggtgac

SEQ ID NO: 163003 - DNA, 25 bp, SARS Virus
ttccaatgggcatttcggggtgacg

SEQ ID NO: 163004 - DNA, 25 bp, SARS Virus
tccaatgggcatttcggggtgacga

SEQ ID NO: 163005 - DNA, 25 bp, SARS Virus
ccaatgggcatttcggggtgacgac

SEQ ID NO: 163006 - DNA, 25 bp, SARS Virus
caatgggcattttggggtgacgact

SEQ ID NO: 163007 - DNA, 25 bp, SARS Virus
aatgggcatttctgggtgacgactt

SEQ ID NO: 163008 - DNA, 25 bp, SARS Virus
atgggcatttcgtggtgacgacttg

SEQ ID NO: 163009 - DNA, 25 bp, SARS Virus
tgggcatttcggtgtgacgacttgt

SEQ ID NO: 163010 - DNA, 25 bp, SARS Virus
gggcatttcgggttgacgacttgta

SEQ ID NO: 163011 - DNA, 25 bp, SARS Virus
ggcatttcggggtgacgacttgtag

SEQ ID NO: 163012 - DNA, 25 bp, SARS Virus
gcatttcggggttacgacttgtagt

SEQ ID NO: 163013 - DNA, 25 bp, SARS Virus
catttcggggtgtcgacttgtagtt

SEQ ID NO: 163014 - DNA, 25 bp, SARS Virus
atttcggggtgatgacttgtagtta

SEQ ID NO: 163015 - DNA, 25 bp, SARS Virus
tttcggggtgactacttgtagttag

SEQ ID NO: 163016 - DNA, 25 bp, SARS Virus
ttcggggtgacgtcttgtagttagt

SEQ ID NO: 163017 - DNA, 25 bp, SARS Virus
tcggggtgacgatttgtagttagta

SEQ ID NO: 163018 - DNA, 25 bp, SARS Virus
cggggtgacgacttgtagttagtat

SEQ ID NO: 163019 - DNA, 25 bp, SARS Virus
ggggtgacgacttgtagttagtatt

SEQ ID NO: 163020 - DNA, 25 bp, SARS Virus
gggtgacgacttttagttagtattt

SEQ ID NO: 163021 - DNA, 25 bp, SARS Virus
ggtgacgacttgtagttagtattta

SEQ ID NO: 163022 - DNA, 25 bp, SARS Virus
gtgacgacttgttgttagtatttac

SEQ ID NO: 163023 - DNA, 25 bp, SARS Virus
tgacgacttgtatttagtatttacc

SEQ ID NO: 163024 - DNA, 25 bp, SARS Virus
gacgacttgtagttagtatttaccc

SEQ ID NO: 163025 - DNA, 25 bp, SARS Virus
acgacttgtagtaagtatttaccca

SEQ ID NO: 163026 - DNA, 25 bp, SARS Virus
cgacttgtagttagtatttacccaa

SEQ ID NO: 163027 - DNA, 25 bp, SARS Virus
gacttgtagttaatatttacccaat

SEQ ID NO: 163028 - DNA, 25 bp, SARS Virus
acttgtagttagaatttacccaata

SEQ ID NO: 163029 - DNA, 25 bp, SARS Virus
cttgtagttagtatttacccaatat

SEQ ID NO: 163030 - DNA, 25 bp, SARS Virus
ttgtagttagtaattacccaatatc

SEQ ID NO: 163031 - DNA, 25 bp, SARS Virus
tgtagttagtatatacccaatatct

SEQ ID NO: 163032 - DNA, 25 bp, SARS Virus
gtagttagtattaacccaatatctg

SEQ ID NO: 163033 - DNA, 25 bp, SARS Virus
tagttagtatttacccaatatctgt

SEQ ID NO: 163034 - DNA, 25 bp, SARS Virus
agttagtatttaaccaatatctgta

SEQ ID NO: 163035 - DNA, 25 bp, SARS Virus
gttagtatttacacaatatctgtat

SEQ ID NO: 163036 - DNA, 25 bp, SARS Virus
ttagtatttaccaaatatctgtatc

SEQ ID NO: 163037 - DNA, 25 bp, SARS Virus
tagtatttacccaatatctgtatca

SEQ ID NO: 163038 - DNA, 25 bp, SARS Virus
agtatttacccaatatctgtatcag

SEQ ID NO: 163039 - DNA, 25 bp, SARS Virus
gtatttacccaaaatctgtatcagt

SEQ ID NO: 163040 - DNA, 25 bp, SARS Virus
tatttacccaatatctgtatcagtt

SEQ ID NO: 163041 - DNA, 25 bp, SARS Virus
atttacccaataactgtatcagttt

SEQ ID NO: 163042 - DNA, 25 bp, SARS Virus
tttacccaatatatgtatcagtttt

SEQ ID NO: 163043 - DNA, 25 bp, SARS Virus
ttacccaatatcagtatcagttttg

SEQ ID NO: 163044 - DNA, 25 bp, SARS Virus
tacccaatatctatatcagttttgg

SEQ ID NO: 163045 - DNA, 25 bp, SARS Virus
acccaatatctgaatcagttttggg

SEQ ID NO: 163046 - DNA, 25 bp, SARS Virus
cccaatatctgtatcagttttgggt

SEQ ID NO: 163047 - DNA, 25 bp, SARS Virus
ccaatatctgtaacagttttgggtg

SEQ ID NO: 163048 - DNA, 25 bp, SARS Virus
caatatctgtataagttttgggtgt

SEQ ID NO: 163049 - DNA, 25 bp, SARS Virus
aatatctgtatcagttttgggtgtc

SEQ ID NO: 163050 - DNA, 25 bp, SARS Virus
atatctgtatcaattttgggtgtct

SEQ ID NO: 163051 - DNA, 25 bp, SARS Virus
tatctgtatcagatttgggtgtctt

SEQ ID NO: 163052 - DNA, 25 bp, SARS Virus
atctgtatcagtattgggtgtctta

SEQ ID NO: 163053 - DNA, 25 bp, SARS Virus
tctgtatcagttatgggtgtcttac

SEQ ID NO: 163054 - DNA, 25 bp, SARS Virus
ctgtatcagtttagggtgtcttact

SEQ ID NO: 163055 - DNA, 25 bp, SARS Virus
tgtatcagttttaggtgtcttacta

SEQ ID NO: 163056 - DNA, 25 bp, SARS Virus
gtatcagttttgagtgtcttactaa

SEQ ID NO: 163057 - DNA, 25 bp, SARS Virus
tatcagttttggatgtcttactaag

SEQ ID NO: 163058 - DNA, 25 bp, SARS Virus
atcagttttgggagtcttactaagg

SEQ ID NO: 163059 - DNA, 25 bp, SARS Virus
tcagttttgggtatcttactaaggt

SEQ ID NO: 163060 - DNA, 25 bp, SARS Virus
cagttttgggtgacttactaaggtc

SEQ ID NO: 163061 - DNA, 25 bp, SARS Virus
agttttgggtgtattactaaggtcg

SEQ ID NO: 163062 - DNA, 25 bp, SARS Virus
gttttgggtgtcatactaaggtcgt

SEQ ID NO: 163063 - DNA, 25 bp, SARS Virus
ttttgggtgtctaactaaggtcgtc

SEQ ID NO: 163064 - DNA, 25 bp, SARS Virus
tttgggtgtcttactaaggtcgtcc

SEQ ID NO: 163065 - DNA, 25 bp, SARS Virus
ttgggtgtcttaataaggtcgtccg

SEQ ID NO: 163066 - DNA, 25 bp, SARS Virus
tgggtgtcttacaaaggtcgtccgt

SEQ ID NO: 163067 - DNA, 25 bp, SARS Virus
gggtgtcttactaaggtcgtccgta

SEQ ID NO: 163068 - DNA, 25 bp, SARS Virus
ggtgtcttactaaggtcgtccgtat

SEQ ID NO: 163069 - DNA, 25 bp, SARS Virus
gtgtcttactaaagtcgtccgtatt

SEQ ID NO: 163070 - DNA, 25 bp, SARS Virus
tgtcttactaagatcgtccgtattc

SEQ ID NO: 163071 - DNA, 25 bp, SARS Virus
gtcttactaaggacgtccgtattca

SEQ ID NO: 163072 - DNA, 25 bp, SARS Virus
tcttactaaggtagtccgtattcat

SEQ ID NO: 163073 - DNA, 25 bp, SARS Virus
cttactaaggtcatccgtattcata

SEQ ID NO: 163074 - DNA, 25 bp, SARS Virus
ttactaaggtcgaccgtattcatag

SEQ ID NO: 163075 - DNA, 25 bp, SARS Virus
tactaaggtcgtacgtattcataga

SEQ ID NO: 163076 - DNA, 25 bp, SARS Virus
actaaggtcgtcagtattcatagac

SEQ ID NO: 163077 - DNA, 25 bp, SARS Virus
ctaaggtcgtccatattcatagact

SEQ ID NO: 163078 - DNA, 25 bp, SARS Virus
taaggtcgtccgaattcatagacta

SEQ ID NO: 163079 - DNA, 25 bp, SARS Virus
aaggtcgtccgtattcatagactac

SEQ ID NO: 163080 - DNA, 25 bp, SARS Virus
aggtcgtccgtaatcatagactact

SEQ ID NO: 163081 - DNA, 25 bp, SARS Virus
ggtcgtccgtatacatagactactt

SEQ ID NO: 163082 - DNA, 25 bp, SARS Virus
gtcgtccgtattaatagactacttc

SEQ ID NO: 163083 - DNA, 25 bp, SARS Virus
tcgtccgtattcatagactacttca

SEQ ID NO: 163084 - DNA, 25 bp, SARS Virus
cgtccgtattcaaagactacttcat

SEQ ID NO: 163085 - DNA, 25 bp, SARS Virus
gtccgtattcatagactacttcatc

SEQ ID NO: 163086 - DNA, 25 bp, SARS Virus
tccgtattcataaactacttcatct

SEQ ID NO: 163087 - DNA, 25 bp, SARS Virus
ccgtattcatagactacttcatctt

SEQ ID NO: 163088 - DNA, 25 bp, SARS Virus
cgtattcatagaatacttcatcttt

SEQ ID NO: 163089 - DNA, 25 bp, SARS Virus
gtattcatagacaacttcatctttt

SEQ ID NO: 163090 - DNA, 25 bp, SARS Virus
tattcatagactacttcatcttttc

SEQ ID NO: 163091 - DNA, 25 bp, SARS Virus
attcatagactaattcatcttttcg

SEQ ID NO: 163092 - DNA, 25 bp, SARS Virus
ttcatagactacatcatcttttcgt

SEQ ID NO: 163093 - DNA, 25 bp, SARS Virus
tcatagactactacatcttttcgtt

SEQ ID NO: 163094 - DNA, 25 bp, SARS Virus
catagactacttaatcttttcgttc

SEQ ID NO: 163095 - DNA, 25 bp, SARS Virus
atagactacttcatcttttcgttca

SEQ ID NO: 163096 - DNA, 25 bp, SARS Virus
tagactacttcaacttttcgttcaa

SEQ ID NO: 163097 - DNA, 25 bp, SARS Virus
agactacttcatattttcgttcaac

SEQ ID NO: 163098 - DNA, 25 bp, SARS Virus
gactacttcatcatttcgttcaacg

SEQ ID NO: 163099 - DNA, 25 bp, SARS Virus
actacttcatctattcgttcaacgt

SEQ ID NO: 163100 - DNA, 25 bp, SARS Virus
ctacttcatcttatcgttcaacgtg

SEQ ID NO: 163101 - DNA, 25 bp, SARS Virus
tacttcatctttacgttcaacgtgc

SEQ ID NO: 163102 - DNA, 25 bp, SARS Virus
acttcatcttttagttcaacgtgca

SEQ ID NO: 163103 - DNA, 25 bp, SARS Virus
cttcatcttttcattcaacgtgcaa

SEQ ID NO: 163104 - DNA, 25 bp, SARS Virus
ttcatcttttcgatcaacgtgcaaa

SEQ ID NO: 163105 - DNA, 25 bp, SARS Virus
tcatcttttcgtacaacgtgcaaac

SEQ ID NO: 163106 - DNA, 25 bp, SARS Virus
catcttttcgttaaacgtgcaaaca

SEQ ID NO: 163107 - DNA, 25 bp, SARS Virus
atcttttcgttcaacgtgcaaacag

SEQ ID NO: 163108 - DNA, 25 bp, SARS Virus
tcttttcgttcaacgtgcaaacagt

SEQ ID NO: 163109 - DNA, 25 bp, SARS Virus
cttttcgttcaaagtgcaaacagtg

SEQ ID NO: 163110 - DNA, 25 bp, SARS Virus
ttttcgttcaacatgcaaacagtgt

SEQ ID NO: 163111 - DNA, 25 bp, SARS Virus
tttcgttcaacgagcaaacagtgtg

SEQ ID NO: 163112 - DNA, 25 bp, SARS Virus
ttcgttcaacgtacaaacagtgtgt

SEQ ID NO: 163113 - DNA, 25 bp, SARS Virus
tcgttcaacgtgaaaacagtgtgtc

SEQ ID NO: 163114 - DNA, 25 bp, SARS Virus
cgttcaacgtgcaaacagtgtgtct

SEQ ID NO: 163115 - DNA, 25 bp, SARS Virus
gttcaacgtgcaaacagtgtgtctg

SEQ ID NO: 163116 - DNA, 25 bp, SARS Virus
ttcaacgtgcaaacagtgtgtctgt

SEQ ID NO: 163117 - DNA, 25 bp, SARS Virus
tcaacgtgcaaaaagtgtgtctgtt

SEQ ID NO: 163118 - DNA, 25 bp, SARS Virus
caacgtgcaaacagtgtgtctgttg

SEQ ID NO: 163119 - DNA, 25 bp, SARS Virus
aacgtgcaaacaatgtgtctgttgt

SEQ ID NO: 163120 - DNA, 25 bp, SARS Virus
acgtgcaaacagagtgtctgttgtg

SEQ ID NO: 163121 - DNA, 25 bp, SARS Virus
cgtgcaaacagtatgtctgttgtgc

SEQ ID NO: 163122 - DNA, 25 bp, SARS Virus
gtgcaaacagtgagtctgttgtgca

SEQ ID NO: 163123 - DNA, 25 bp, SARS Virus
tgcaaacagtgtatctgttgtgcaa

SEQ ID NO: 163124 - DNA, 25 bp, SARS Virus
gcaaacagtgtgactgttgtgcaag

SEQ ID NO: 163125 - DNA, 25 bp, SARS Virus
caaacagtgtgtatgttgtgcaaga

SEQ ID NO: 163126 - DNA, 25 bp, SARS Virus
aaacagtgtgtcagttgtgcaagaa

SEQ ID NO: 163127 - DNA, 25 bp, SARS Virus
aacagtgtgtctattgtgcaagaaa

SEQ ID NO: 163128 - DNA, 25 bp, SARS Virus
acagtgtgtctgatgtgcaagaaag

SEQ ID NO: 163129 - DNA, 25 bp, SARS Virus
cagtgtgtctgtagtgcaagaaagt

SEQ ID NO: 163130 - DNA, 25 bp, SARS Virus
agtgtgtctgttatgcaagaaagtc

SEQ ID NO: 163131 - DNA, 25 bp, SARS Virus
gtgtgtctgttgagcaagaaagtcc

SEQ ID NO: 163132 - DNA, 25 bp, SARS Virus
tgtgtctgttgtacaagaaagtcca

SEQ ID NO: 163133 - DNA, 25 bp, SARS Virus
gtgtctgttgtgaaagaaagtccag

SEQ ID NO: 163134 - DNA, 25 bp, SARS Virus
tgtctgttgtgcaagaaagtccagg

SEQ ID NO: 163135 - DNA, 25 bp, SARS Virus
gtctgttgtgcaagaaagtccaggt

SEQ ID NO: 163136 - DNA, 25 bp, SARS Virus
tctgttgtgcaaaaaagtccaggtt

SEQ ID NO: 163137 - DNA, 25 bp, SARS Virus
ctgttgtgcaagaaagtccaggtta

SEQ ID NO: 163138 - DNA, 25 bp, SARS Virus
tgttgtgcaagaaagtccaggttag

SEQ ID NO: 163139 - DNA, 25 bp, SARS Virus
gttgtgcaagaaagtccaggttaga

SEQ ID NO: 163140 - DNA, 25 bp, SARS Virus
ttgtgcaagaaaatccaggttagaa

SEQ ID NO: 163141 - DNA, 25 bp, SARS Virus
tgtgcaagaaagaccaggttagaac

SEQ ID NO: 163142 - DNA, 25 bp, SARS Virus
gtgcaagaaagtacaggttagaact

SEQ ID NO: 163143 - DNA, 25 bp, SARS Virus
tgcaagaaagtcaaggttagaactg

SEQ ID NO: 163144 - DNA, 25 bp, SARS Virus
gcaagaaagtccaggttagaactgt

SEQ ID NO: 163145 - DNA, 25 bp, SARS Virus
caagaaagtccaagttagaactgtt

SEQ ID NO: 163146 - DNA, 25 bp, SARS Virus
aagaaagtccagattagaactgttt

SEQ ID NO: 163147 - DNA, 25 bp, SARS Virus
agaaagtccaggatagaactgtttc

SEQ ID NO: 163148 - DNA, 25 bp, SARS Virus
gaaagtccaggtaagaactgtttca

SEQ ID NO: 163149 - DNA, 25 bp, SARS Virus
aaagtccaggttagaactgtttcat

SEQ ID NO: 163150 - DNA, 25 bp, SARS Virus
aagtccaggttaaaactgtttcatg

SEQ ID NO: 163151 - DNA, 25 bp, SARS Virus
agtccaggttagaactgtttcatga

SEQ ID NO: 163152 - DNA, 25 bp, SARS Virus
gtccaggttagaactgtttcatgaa

SEQ ID NO: 163153 - DNA, 25 bp, SARS Virus
tccaggttagaaatgtttcatgaag

SEQ ID NO: 163154 - DNA, 25 bp, SARS Virus
ccaggttagaacagtttcatgaagt

SEQ ID NO: 163155 - DNA, 25 bp, SARS Virus
caggttagaactatttcatgaagta

SEQ ID NO: 163156 - DNA, 25 bp, SARS Virus
aggttagaactgattcatgaagtaa

SEQ ID NO: 163157 - DNA, 25 bp, SARS Virus
ggttagaactgtatcatgaagtaac

SEQ ID NO: 163158 - DNA, 25 bp, SARS Virus
gttagaactgttacatgaagtaact

SEQ ID NO: 163159 - DNA, 25 bp, SARS Virus
ttagaactgtttaatgaagtaacta

SEQ ID NO: 163160 - DNA, 25 bp, SARS Virus
tagaactgtttcatgaagtaactac

SEQ ID NO: 163161 - DNA, 25 bp, SARS Virus
agaactgtttcaagaagtaactaca

SEQ ID NO: 163162 - DNA, 25 bp, SARS Virus
gaactgtttcataaagtaactacat

SEQ ID NO: 163163 - DNA, 25 bp, SARS Virus
aactgtttcatgaagtaactacatt

SEQ ID NO: 163164 - DNA, 25 bp, SARS Virus
actgtttcatgaagtaactacattc

SEQ ID NO: 163165 - DNA, 25 bp, SARS Virus
ctgtttcatgaaataactacattcg

SEQ ID NO: 163166 - DNA, 25 bp, SARS Virus
tgtttcatgaagaaactacattcga

SEQ ID NO: 163167 - DNA, 25 bp, SARS Virus
gtttcatgaagtaactacattcgag

SEQ ID NO: 163168 - DNA, 25 bp, SARS Virus
tttcatgaagtaactacattcgagt

SEQ ID NO: 163169 - DNA, 25 bp, SARS Virus
ttcatgaagtaaatacattcgagtt

SEQ ID NO: 163170 - DNA, 25 bp, SARS Virus
tcatgaagtaacaacattcgagttt

SEQ ID NO: 163171 - DNA, 25 bp, SARS Virus
catgaagtaactacattcgagtttc

SEQ ID NO: 163172 - DNA, 25 bp, SARS Virus
atgaagtaactaaattcgagtttcg

SEQ ID NO: 163173 - DNA, 25 bp, SARS Virus
tgaagtaactacattcgagtttcgg

SEQ ID NO: 163174 - DNA, 25 bp, SARS Virus
gaagtaactacaatcgagtttcggt

SEQ ID NO: 163175 - DNA, 25 bp, SARS Virus
aagtaactacatacgagtttcggta

SEQ ID NO: 163176 - DNA, 25 bp, SARS Virus
agtaactacattagagtttcggtac

SEQ ID NO: 163177 - DNA, 25 bp, SARS Virus
gtaactacattcaagtttcggtacg

SEQ ID NO: 163178 - DNA, 25 bp, SARS Virus
taactacattcgagtttcggtacgc

SEQ ID NO: 163179 - DNA, 25 bp, SARS Virus
aactacattcgaatttcggtacgcg

SEQ ID NO: 163180 - DNA, 25 bp, SARS Virus
actacattcgagattcggtacgcgg

SEQ ID NO: 163181 - DNA, 25 bp, SARS Virus
ctacattcgagtatcggtacgcggg

SEQ ID NO: 163182 - DNA, 25 bp, SARS Virus
tacattcgagttacggtacgcgggt

SEQ ID NO: 163183 - DNA, 25 bp, SARS Virus
acattcgagtttaggtacgcgggtt

SEQ ID NO: 163184 - DNA, 25 bp, SARS Virus
cattcgagtttcagtacgcgggttt

SEQ ID NO: 163185 - DNA, 25 bp, SARS Virus
attcgagtttcgatacgcgggtttc

SEQ ID NO: 163186 - DNA, 25 bp, SARS Virus
ttcgagtttcggaacgcgggtttcc

SEQ ID NO: 163187 - DNA, 25 bp, SARS Virus
tcgagtttcggtacgcgggtttcct

SEQ ID NO: 163188 - DNA, 25 bp, SARS Virus
cgagtttcggtaagcgggtttcctg

SEQ ID NO: 163189 - DNA, 25 bp, SARS Virus
gagtttcggtacacgggtttcctgc

SEQ ID NO: 163190 - DNA, 25 bp, SARS Virus
agtttcggtacgagggtttcctgct

SEQ ID NO: 163191 - DNA, 25 bp, SARS Virus
gtttcggtacgcaggtttcctgctt

SEQ ID NO: 163192 - DNA, 25 bp, SARS Virus
tttcggtacgcgagtttcctgcttg

SEQ ID NO: 163193 - DNA, 25 bp, SARS Virus
ttcggtacgcggatttcctgcttgt

SEQ ID NO: 163194 - DNA, 25 bp, SARS Virus
tcggtacgcgggattcctgcttgtg

SEQ ID NO: 163195 - DNA, 25 bp, SARS Virus
cggtacgcgggtatcctgcttgtgc

SEQ ID NO: 163196 - DNA, 25 bp, SARS Virus
ggtacgcgggttacctgcttgtgct

SEQ ID NO: 163197 - DNA, 25 bp, SARS Virus
gtacgcgggtttactgcttgtgctg

SEQ ID NO: 163198 - DNA, 25 bp, SARS Virus
tacgcgggtttcatgcttgtgctga

SEQ ID NO: 163199 - DNA, 25 bp, SARS Virus
acgcgggtttccagcttgtgctgag

SEQ ID NO: 163200 - DNA, 25 bp, SARS Virus
cgcgggtttcctacttgtgctgaga

SEQ ID NO: 163201 - DNA, 25 bp, SARS Virus
gcgggtttcctgattgtgctgagac

SEQ ID NO: 163202 - DNA, 25 bp, SARS Virus
cgggtttcctgcatgtgctgagaca

SEQ ID NO: 163203 - DNA, 25 bp, SARS Virus
gggtttcctgctagtgctgagacag

SEQ ID NO: 163204 - DNA, 25 bp, SARS Virus
ggtttcctgcttatgctgagacaga

SEQ ID NO: 163205 - DNA, 25 bp, SARS Virus
gtttcctgcttgagctgagacagac

SEQ ID NO: 163206 - DNA, 25 bp, SARS Virus
tttcctgcttgtactgagacagact

SEQ ID NO: 163207 - DNA, 25 bp, SARS Virus
ttcctgcttgtgatgagacagactg

SEQ ID NO: 163208 - DNA, 25 bp, SARS Virus
tcctgcttgtgcagagacagactgt

SEQ ID NO: 163209 - DNA, 25 bp, SARS Virus
cctgcttgtgctaagacagactgtt

SEQ ID NO: 163210 - DNA, 25 bp, SARS Virus
ctgcttgtgctgagacagactgtta

SEQ ID NO: 163211 - DNA, 25 bp, SARS Virus
tgcttgtgctgaaacagactgttag

SEQ ID NO: 163212 - DNA, 25 bp, SARS Virus
gcttgtgctgagacagactgttagg

SEQ ID NO: 163213 - DNA, 25 bp, SARS Virus
cttgtgctgagaaagactgttagga

SEQ ID NO: 163214 - DNA, 25 bp, SARS Virus
ttgtgctgagacagactgttaggaa

SEQ ID NO: 163215 - DNA, 25 bp, SARS Virus
tgtgctgagacaaactgttaggaaa

SEQ ID NO: 163216 - DNA, 25 bp, SARS Virus
gtgctgagacagactgttaggaaag

SEQ ID NO: 163217 - DNA, 25 bp, SARS Virus
tgctgagacagaatgttaggaaagt

SEQ ID NO: 163218 - DNA, 25 bp, SARS Virus
gctgagacagacagttaggaaagtc

SEQ ID NO: 163219 - DNA, 25 bp, SARS Virus
ctgagacagactattaggaaagtca

SEQ ID NO: 163220 - DNA, 25 bp, SARS Virus
tgagacagactgataggaaagtcac

SEQ ID NO: 163221 - DNA, 25 bp, SARS Virus
gagacagactgtaaggaaagtcaca

SEQ ID NO: 163222 - DNA, 25 bp, SARS Virus
agacagactgttaggaaagtcacat

SEQ ID NO: 163223 - DNA, 25 bp, SARS Virus
gacagactgttaagaaagtcacata

SEQ ID NO: 163224 - DNA, 25 bp, SARS Virus
acagactgttagaaaagtcacatag

SEQ ID NO: 163225 - DNA, 25 bp, SARS Virus
cagactgttaggaaagtcacatagt

SEQ ID NO: 163226 - DNA, 25 bp, SARS Virus
agactgttaggaaagtcacatagtg

SEQ ID NO: 163227 - DNA, 25 bp, SARS Virus
gactgttaggaaagtcacatagtga

SEQ ID NO: 163228 - DNA, 25 bp, SARS Virus
actgttaggaaaatcacatagtgac

SEQ ID NO: 163229 - DNA, 25 bp, SARS Virus
ctgttaggaaagacacatagtgact

SEQ ID NO: 163230 - DNA, 25 bp, SARS Virus
tgttaggaaagtaacatagtgactc

SEQ ID NO: 163231 - DNA, 25 bp, SARS Virus
gttaggaaagtcacatagtgactcg

SEQ ID NO: 163232 - DNA, 25 bp, SARS Virus
ttaggaaagtcaaatagtgactcgt

SEQ ID NO: 163233 - DNA, 25 bp, SARS Virus
taggaaagtcacatagtgactcgta

SEQ ID NO: 163234 - DNA, 25 bp, SARS Virus
aggaaagtcacaaagtgactcgtaa

SEQ ID NO: 163235 - DNA, 25 bp, SARS Virus
ggaaagtcacatagtgactcgtaaa

SEQ ID NO: 163236 - DNA, 25 bp, SARS Virus
gaaagtcacataatgactcgtaaac

SEQ ID NO: 163237 - DNA, 25 bp, SARS Virus
aaagtcacatagagactcgtaaaca

SEQ ID NO: 163238 - DNA, 25 bp, SARS Virus
aagtcacatagtaactcgtaaacat

SEQ ID NO: 163239 - DNA, 25 bp, SARS Virus
agtcacatagtgactcgtaaacatg

SEQ ID NO: 163240 - DNA, 25 bp, SARS Virus
gtcacatagtgaatcgtaaacatga

SEQ ID NO: 163241 - DNA, 25 bp, SARS Virus
tcacatagtgacacgtaaacatgat

SEQ ID NO: 163242 - DNA, 25 bp, SARS Virus
cacatagtgactagtaaacatgata

SEQ ID NO: 163243 - DNA, 25 bp, SARS Virus
acatagtgactcataaacatgatag

SEQ ID NO: 163244 - DNA, 25 bp, SARS Virus
catagtgactcgaaaacatgataga

SEQ ID NO: 163245 - DNA, 25 bp, SARS Virus
atagtgactcgtaaacatgatagaa

SEQ ID NO: 163246 - DNA, 25 bp, SARS Virus
tagtgactcgtaaacatgatagaat

SEQ ID NO: 163247 - DNA, 25 bp, SARS Virus
agtgactcgtaaacatgatagaatt

SEQ ID NO: 163248 - DNA, 25 bp, SARS Virus
gtgactcgtaaaaatgatagaatta

SEQ ID NO: 163249 - DNA, 25 bp, SARS Virus
tgactcgtaaacatgatagaattat

SEQ ID NO: 163250 - DNA, 25 bp, SARS Virus
gactcgtaaacaagatagaattatg

SEQ ID NO: 163251 - DNA, 25 bp, SARS Virus
actcgtaaacataatagaattatgc

SEQ ID NO: 163252 - DNA, 25 bp, SARS Virus
ctcgtaaacatgatagaattatgcg

SEQ ID NO: 163253 - DNA, 25 bp, SARS Virus
tcgtaaacatgaaagaattatgcgt

SEQ ID NO: 163254 - DNA, 25 bp, SARS Virus
cgtaaacatgatagaattatgcgtg

SEQ ID NO: 163255 - DNA, 25 bp, SARS Virus
gtaaacatgataaaattatgcgtga

SEQ ID NO: 163256 - DNA, 25 bp, SARS Virus
taaacatgatagaattatgcgtgat

SEQ ID NO: 163257 - DNA, 25 bp, SARS Virus
aaacatgatagaattatgcgtgatg

SEQ ID NO: 163258 - DNA, 25 bp, SARS Virus
aacatgatagaaatatgcgtgatgt

SEQ ID NO: 163259 - DNA, 25 bp, SARS Virus
acatgatagaataatgcgtgatgta

SEQ ID NO: 163260 - DNA, 25 bp, SARS Virus
catgatagaattatgcgtgatgtaa

SEQ ID NO: 163261 - DNA, 25 bp, SARS Virus
atgatagaattaagcgtgatgtaag

SEQ ID NO: 163262 - DNA, 25 bp, SARS Virus
tgatagaattatacgtgatgtaagg

SEQ ID NO: 163263 - DNA, 25 bp, SARS Virus
gatagaattatgagtgatgtaaggt

SEQ ID NO: 163264 - DNA, 25 bp, SARS Virus
atagaattatgcatgatgtaaggtc

SEQ ID NO: 163265 - DNA, 25 bp, SARS Virus
tagaattatgcgagatgtaaggtcc

SEQ ID NO: 163266 - DNA, 25 bp, SARS Virus
agaattatgcgtaatgtaaggtccc

SEQ ID NO: 163267 - DNA, 25 bp, SARS Virus
gaattatgcgtgatgtaaggtcccg

SEQ ID NO: 163268 - DNA, 25 bp, SARS Virus
aattatgcgtgaagtaaggtcccgt

SEQ ID NO: 163269 - DNA, 25 bp, SARS Virus
attatgcgtgatataaggtcccgtt

SEQ ID NO: 163270 - DNA, 25 bp, SARS Virus
ttatgcgtgatgaaaggtcccgttc

SEQ ID NO: 163271 - DNA, 25 bp, SARS Virus
tatgcgtgatgtaaggtcccgttcg

SEQ ID NO: 163272 - DNA, 25 bp, SARS Virus
atgcgtgatgtaaggtcccgttcgg

SEQ ID NO: 163273 - DNA, 25 bp, SARS Virus
tgcgtgatgtaaagtcccgttcgga

SEQ ID NO: 163274 - DNA, 25 bp, SARS Virus
gcgtgatgtaagatcccgttcggaa

SEQ ID NO: 163275 - DNA, 25 bp, SARS Virus
cgtgatgtaaggacccgttcggaaa

SEQ ID NO: 163276 - DNA, 25 bp, SARS Virus
gtgatgtaaggtaccgttcggaaat

SEQ ID NO: 163277 - DNA, 25 bp, SARS Virus
tgatgtaaggtcacgttcggaaata

SEQ ID NO: 163278 - DNA, 25 bp, SARS Virus
gatgtaaggtccagttcggaaatat

SEQ ID NO: 163279 - DNA, 25 bp, SARS Virus
atgtaaggtcccattcggaaatatg

SEQ ID NO: 163280 - DNA, 25 bp, SARS Virus
tgtaaggtcccgatcggaaatatgt

SEQ ID NO: 163281 - DNA, 25 bp, SARS Virus
gtaaggtcccgtacggaaatatgta

SEQ ID NO: 163282 - DNA, 25 bp, SARS Virus
taaggtcccgttaggaaatatgtac

SEQ ID NO: 163283 - DNA, 25 bp, SARS Virus
aaggtcccgttcagaaatatgtact

SEQ ID NO: 163284 - DNA, 25 bp, SARS Virus
aggtcccgttcgaaaatatgtactc

SEQ ID NO: 163285 - DNA, 25 bp, SARS Virus
ggtcccgttcggaaatatgtactca

SEQ ID NO: 163286 - DNA, 25 bp, SARS Virus
gtcccgttcggaaatatgtactcac

SEQ ID NO: 163287 - DNA, 25 bp, SARS Virus
tcccgttcggaaatatgtactcacc

SEQ ID NO: 163288 - DNA, 25 bp, SARS Virus
cccgttcggaaaaatgtactcacca

SEQ ID NO: 163289 - DNA, 25 bp, SARS Virus
ccgttcggaaatatgtactcaccat

SEQ ID NO: 163290 - DNA, 25 bp, SARS Virus
cgttcggaaataagtactcaccata

SEQ ID NO: 163291 - DNA, 25 bp, SARS Virus
gttcggaaatatatactcaccatat

SEQ ID NO: 163292 - DNA, 25 bp, SARS Virus
ttcggaaatatgaactcaccatatt

SEQ ID NO: 163293 - DNA, 25 bp, SARS Virus
tcggaaatatgtactcaccatattc

SEQ ID NO: 163294 - DNA, 25 bp, SARS Virus
cggaaatatgtaatcaccatattct

SEQ ID NO: 163295 - DNA, 25 bp, SARS Virus
ggaaatatgtacacaccatattcta

SEQ ID NO: 163296 - DNA, 25 bp, SARS Virus
gaaatatgtactaaccatattctac

SEQ ID NO: 163297 - DNA, 25 bp, SARS Virus
aaatatgtactcaccatattctaca

SEQ ID NO: 163298 - DNA, 25 bp, SARS Virus
aatatgtactcaacatattctacaa

SEQ ID NO: 163299 - DNA, 25 bp, SARS Virus
atatgtactcacaatattctacaaa

SEQ ID NO: 163300 - DNA, 25 bp, SARS Virus
tatgtactcaccatattctacaaat

SEQ ID NO: 163301 - DNA, 25 bp, SARS Virus
atgtactcaccaaattctacaaatt

SEQ ID NO: 163302 - DNA, 25 bp, SARS Virus
tgtactcaccatattctacaaattt

SEQ ID NO: 163303 - DNA, 25 bp, SARS Virus
gtactcaccataatctacaaatttg

SEQ ID NO: 163304 - DNA, 25 bp, SARS Virus
tactcaccatatactacaaatttga

SEQ ID NO: 163305 - DNA, 25 bp, SARS Virus
actcaccatattatacaaatttgac

SEQ ID NO: 163306 - DNA, 25 bp, SARS Virus
ctcaccatattcaacaaatttgacc

SEQ ID NO: 163307 - DNA, 25 bp, SARS Virus
tcaccatattctacaaatttgacca

SEQ ID NO: 163308 - DNA, 25 bp, SARS Virus
caccatattctaaaaatttgaccag

SEQ ID NO: 163309 - DNA, 25 bp, SARS Virus
accatattctacaaatttgaccagt

SEQ ID NO: 163310 - DNA, 25 bp, SARS Virus
ccatattctacaaatttgaccagtg

SEQ ID NO: 163311 - DNA, 25 bp, SARS Virus
catattctacaaatttgaccagtgg

SEQ ID NO: 163312 - DNA, 25 bp, SARS Virus
atattctacaaaattgaccagtgga

SEQ ID NO: 163313 - DNA, 25 bp, SARS Virus
tattctacaaatatgaccagtggac

SEQ ID NO: 163314 - DNA, 25 bp, SARS Virus
attctacaaattagaccagtggacc

SEQ ID NO: 163315 - DNA, 25 bp, SARS Virus
ttctacaaatttaaccagtggacca

SEQ ID NO: 163316 - DNA, 25 bp, SARS Virus
tctacaaatttgaccagtggaccac

SEQ ID NO: 163317 - DNA, 25 bp, SARS Virus
ctacaaatttgaacagtggaccacc

SEQ ID NO: 163318 - DNA, 25 bp, SARS Virus
tacaaatttgacaagtggaccacct

SEQ ID NO: 163319 - DNA, 25 bp, SARS Virus
acaaatttgaccagtggaccacctc

SEQ ID NO: 163320 - DNA, 25 bp, SARS Virus
caaatttgaccaatggaccacctcc

SEQ ID NO: 163321 - DNA, 25 bp, SARS Virus
aaatttgaccagaggaccacctcca

SEQ ID NO: 163322 - DNA, 25 bp, SARS Virus
aatttgaccagtagaccacctccaa

SEQ ID NO: 163323 - DNA, 25 bp, SARS Virus
atttgaccagtgaaccacctccaaa

SEQ ID NO: 163324 - DNA, 25 bp, SARS Virus
tttgaccagtggaccacctccaaaa

SEQ ID NO: 163325 - DNA, 25 bp, SARS Virus
ttgaccagtggaacacctccaaaac

SEQ ID NO: 163326 - DNA, 25 bp, SARS Virus
tgaccagtggacaacctccaaaacg

SEQ ID NO: 163327 - DNA, 25 bp, SARS Virus
gaccagtggaccacctccaaaacgt

SEQ ID NO: 163328 - DNA, 25 bp, SARS Virus
accagtggaccaactccaaaacgta

SEQ ID NO: 163329 - DNA, 25 bp, SARS Virus
ccagtggaccacatccaaaacgtaa

SEQ ID NO: 163330 - DNA, 25 bp, SARS Virus
cagtggaccaccaccaaaacgtaat

SEQ ID NO: 163331 - DNA, 25 bp, SARS Virus
agtggaccacctacaaaacgtaatt

SEQ ID NO: 163332 - DNA, 25 bp, SARS Virus
gtggaccacctcaaaaacgtaattg

SEQ ID NO: 163333 - DNA, 25 bp, SARS Virus
tggaccacctccaaaacgtaattga

SEQ ID NO: 163334 - DNA, 25 bp, SARS Virus
ggaccacctccaaaacgtaattgag

SEQ ID NO: 163335 - DNA, 25 bp, SARS Virus
gaccacctccaaaacgtaattgaga

SEQ ID NO: 163336 - DNA, 25 bp, SARS Virus
accacctccaaaacgtaattgagac

SEQ ID NO: 163337 - DNA, 25 bp, SARS Virus
ccacctccaaaaagtaattgagacc

SEQ ID NO: 163338 - DNA, 25 bp, SARS Virus
cacctccaaaacataattgagacca

SEQ ID NO: 163339 - DNA, 25 bp, SARS Virus
acctccaaaacgaaattgagaccac

SEQ ID NO: 163340 - DNA, 25 bp, SARS Virus
cctccaaaacgtaattgagaccact

SEQ ID NO: 163341 - DNA, 25 bp, SARS Virus
ctccaaaacgtaattgagaccactt

SEQ ID NO: 163342 - DNA, 25 bp, SARS Virus
tccaaaacgtaaatgagaccactta

SEQ ID NO: 163343 - DNA, 25 bp, SARS Virus
ccaaaacgtaatagagaccacttaa

SEQ ID NO: 163344 - DNA, 25 bp, SARS Virus
caaaacgtaattaagaccacttaag

SEQ ID NO: 163345 - DNA, 25 bp, SARS Virus
aaaacgtaattgagaccacttaaga

SEQ ID NO: 163346 - DNA, 25 bp, SARS Virus
aaacgtaattgaaaccacttaagac

SEQ ID NO: 163347 - DNA, 25 bp, SARS Virus
aacgtaattgagaccacttaagaca

SEQ ID NO: 163348 - DNA, 25 bp, SARS Virus
acgtaattgagaacacttaagacac

SEQ ID NO: 163349 - DNA, 25 bp, SARS Virus
cgtaattgagacaacttaagacaca

SEQ ID NO: 163350 - DNA, 25 bp, SARS Virus
gtaattgagaccacttaagacacaa

SEQ ID NO: 163351 - DNA, 25 bp, SARS Virus
taattgagaccaattaagacacaat

SEQ ID NO: 163352 - DNA, 25 bp, SARS Virus
aattgagaccacataagacacaata

SEQ ID NO: 163353 - DNA, 25 bp, SARS Virus
attgagaccactaaagacacaataa

SEQ ID NO: 163354 - DNA, 25 bp, SARS Virus
ttgagaccacttaagacacaataaa

SEQ ID NO: 163355 - DNA, 25 bp, SARS Virus
tgagaccacttaagacacaataaaa

SEQ ID NO: 163356 - DNA, 25 bp, SARS Virus
gagaccacttaaaacacaataaaag

SEQ ID NO: 163357 - DNA, 25 bp, SARS Virus
agaccacttaagacacaataaaagt

SEQ ID NO: 163358 - DNA, 25 bp, SARS Virus
gaccacttaagaaacaataaaagtc

SEQ ID NO: 163359 - DNA, 25 bp, SARS Virus
accacttaagacacaataaaagtca

SEQ ID NO: 163360 - DNA, 25 bp, SARS Virus
ccacttaagacaaaataaaagtcac

SEQ ID NO: 163361 - DNA, 25 bp, SARS Virus
cacttaagacacaataaaagtcaca

SEQ ID NO: 163362 - DNA, 25 bp, SARS Virus
acttaagacacaataaaagtcacag

SEQ ID NO: 163363 - DNA, 25 bp, SARS Virus
cttaagacacaaaaaaagtcacagt

SEQ ID NO: 163364 - DNA, 25 bp, SARS Virus
ttaagacacaataaaagtcacagtt

SEQ ID NO: 163365 - DNA, 25 bp, SARS Virus
taagacacaataaaagtcacagttg

SEQ ID NO: 163366 - DNA, 25 bp, SARS Virus
aagacacaataaaagtcacagttgt

SEQ ID NO: 163367 - DNA, 25 bp, SARS Virus
agacacaataaaagtcacagttgta

SEQ ID NO: 163368 - DNA, 25 bp, SARS Virus
gacacaataaaaatcacagttgtat

SEQ ID NO: 163369 - DNA, 25 bp, SARS Virus
acacaataaaagacacagttgtatt

SEQ ID NO: 163370 - DNA, 25 bp, SARS Virus
cacaataaaagtaacagttgtattg

SEQ ID NO: 163371 - DNA, 25 bp, SARS Virus
acaataaaagtcacagttgtattgg

SEQ ID NO: 163372 - DNA, 25 bp, SARS Virus
caataaaagtcaaagttgtattggt

SEQ ID NO: 163373 - DNA, 25 bp, SARS Virus
aataaaagtcacagttgtattggtc

SEQ ID NO: 163374 - DNA, 25 bp, SARS Virus
ataaaagtcacaattgtattggtca

SEQ ID NO: 163375 - DNA, 25 bp, SARS Virus
taaaagtcacagatgtattggtcag

SEQ ID NO: 163376 - DNA, 25 bp, SARS Virus
aaaagtcacagtagtattggtcagc

SEQ ID NO: 163377 - DNA, 25 bp, SARS Virus
aaagtcacagttatattggtcagcc

SEQ ID NO: 163378 - DNA, 25 bp, SARS Virus
aagtcacagttgaattggtcagcca

SEQ ID NO: 163379 - DNA, 25 bp, SARS Virus
agtcacagttgtattggtcagccat

SEQ ID NO: 163380 - DNA, 25 bp, SARS Virus
gtcacagttgtaatggtcagccatg

SEQ ID NO: 163381 - DNA, 25 bp, SARS Virus
tcacagttgtataggtcagccatgt

SEQ ID NO: 163382 - DNA, 25 bp, SARS Virus
cacagttgtattagtcagccatgtc

SEQ ID NO: 163383 - DNA, 25 bp, SARS Virus
acagttgtattgatcagccatgtcg

SEQ ID NO: 163384 - DNA, 25 bp, SARS Virus
cagttgtattggacagccatgtcga

SEQ ID NO: 163385 - DNA, 25 bp, SARS Virus
agttgtattggtaagccatgtcgat

SEQ ID NO: 163386 - DNA, 25 bp, SARS Virus
gttgtattggtcagccatgtcgatg

SEQ ID NO: 163387 - DNA, 25 bp, SARS Virus
ttgtattggtcaaccatgtcgatga

SEQ ID NO: 163388 - DNA, 25 bp, SARS Virus
tgtattggtcagacatgtcgatgat

SEQ ID NO: 163389 - DNA, 25 bp, SARS Virus
gtattggtcagcaatgtcgatgatt

SEQ ID NO: 163390 - DNA, 25 bp, SARS Virus
tattggtcagccatgtcgatgattc

SEQ ID NO: 163391 - DNA, 25 bp, SARS Virus
attggtcagccaagtcgatgattca

SEQ ID NO: 163392 - DNA, 25 bp, SARS Virus
ttggtcagccatatcgatgattcaa

SEQ ID NO: 163393 - DNA, 25 bp, SARS Virus
tggtcagccatgacgatgattcaat

SEQ ID NO: 163394 - DNA, 25 bp, SARS Virus
ggtcagccatgtagatgattcaatt

SEQ ID NO: 163395 - DNA, 25 bp, SARS Virus
gtcagccatgtcaatgattcaattg

SEQ ID NO: 163396 - DNA, 25 bp, SARS Virus
tcagccatgtcgatgattcaattgt

SEQ ID NO: 163397 - DNA, 25 bp, SARS Virus
cagccatgtcgaagattcaattgtg

SEQ ID NO: 163398 - DNA, 25 bp, SARS Virus
agccatgtcgataattcaattgtgg

SEQ ID NO: 163399 - DNA, 25 bp, SARS Virus
gccatgtcgatgattcaattgtgga

SEQ ID NO: 163400 - DNA, 25 bp, SARS Virus
ccatgtcgatgaatcaattgtggac

SEQ ID NO: 163401 - DNA, 25 bp, SARS Virus
catgtcgatgatacaattgtggaca

SEQ ID NO: 163402 - DNA, 25 bp, SARS Virus
atgtcgatgattaaattgtggacat

SEQ ID NO: 163403 - DNA, 25 bp, SARS Virus
tgtcgatgattcaattgtggacatc

SEQ ID NO: 163404 - DNA, 25 bp, SARS Virus
gtcgatgattcaattgtggacatct

SEQ ID NO: 163405 - DNA, 25 bp, SARS Virus
tcgatgattcaaatgtggacatctt

SEQ ID NO: 163406 - DNA, 25 bp, SARS Virus
cgatgattcaatagtggacatcttt

SEQ ID NO: 163407 - DNA, 25 bp, SARS Virus
gatgattcaattatggacatctttt

SEQ ID NO: 163408 - DNA, 25 bp, SARS Virus
atgattcaattgaggacatctttta

SEQ ID NO: 163409 - DNA, 25 bp, SARS Virus
tgattcaattgtagacatcttttag

SEQ ID NO: 163410 - DNA, 25 bp, SARS Virus
gattcaattgtgaacatcttttagg

SEQ ID NO: 163411 - DNA, 25 bp, SARS Virus
attcaattgtggacatcttttagga

SEQ ID NO: 163412 - DNA, 25 bp, SARS Virus
ttcaattgtggaaatcttttaggat

SEQ ID NO: 163413 - DNA, 25 bp, SARS Virus
tcaattgtggacatcttttaggatc

SEQ ID NO: 163414 - DNA, 25 bp, SARS Virus
caattgtggacaacttttaggatcg

SEQ ID NO: 163415 - DNA, 25 bp, SARS Virus
aattgtggacatattttaggatcga

SEQ ID NO: 163416 - DNA, 25 bp, SARS Virus
attgtggacatcatttaggatcgac

SEQ ID NO: 163417 - DNA, 25 bp, SARS Virus
ttgtggacatctattaggatcgacc

SEQ ID NO: 163418 - DNA, 25 bp, SARS Virus
tgtggacatcttataggatcgacct

SEQ ID NO: 163419 - DNA, 25 bp, SARS Virus
gtggacatctttaaggatcgacctc

SEQ ID NO: 163420 - DNA, 25 bp, SARS Virus
tggacatcttttaggatcgacctct

SEQ ID NO: 163421 - DNA, 25 bp, SARS Virus
ggacatcttttaagatcgacctctc

SEQ ID NO: 163422 - DNA, 25 bp, SARS Virus
gacatcttttagaatcgacctctcc

SEQ ID NO: 163423 - DNA, 25 bp, SARS Virus
acatcttttaggatcgacctctcca

SEQ ID NO: 163424 - DNA, 25 bp, SARS Virus
catcttttaggaacgacctctccat

SEQ ID NO: 163425 - DNA, 25 bp, SARS Virus
atcttttaggatagacctctccatc

SEQ ID NO: 163426 - DNA, 25 bp, SARS Virus
tcttttaggatcaacctctccatcc

SEQ ID NO: 163427 - DNA, 25 bp, SARS Virus
cttttaggatcgacctctccatcca

SEQ ID NO: 163428 - DNA, 25 bp, SARS Virus
ttttaggatcgaactctccatccaa

SEQ ID NO: 163429 - DNA, 25 bp, SARS Virus
tttaggatcgacatctccatccaat

SEQ ID NO: 163430 - DNA, 25 bp, SARS Virus
ttaggatcgaccactccatccaatc

SEQ ID NO: 163431 - DNA, 25 bp, SARS Virus
taggatcgacctatccatccaatca

SEQ ID NO: 163432 - DNA, 25 bp, SARS Virus
aggatcgacctcaccatccaatcat

SEQ ID NO: 163433 - DNA, 25 bp, SARS Virus
ggatcgacctctacatccaatcatg

SEQ ID NO: 163434 - DNA, 25 bp, SARS Virus
gatcgacctctcaatccaatcatgg

SEQ ID NO: 163435 - DNA, 25 bp, SARS Virus
atcgacctctccatccaatcatggg

SEQ ID NO: 163436 - DNA, 25 bp, SARS Virus
tcgacctctccaaccaatcatgggt

SEQ ID NO: 163437 - DNA, 25 bp, SARS Virus
cgacctctccatacaatcatgggtg

SEQ ID NO: 163438 - DNA, 25 bp, SARS Virus
gacctctccatcaaatcatgggtgt

SEQ ID NO: 163439 - DNA, 25 bp, SARS Virus
acctctccatccaatcatgggtgtc

SEQ ID NO: 163440 - DNA, 25 bp, SARS Virus
cctctccatccaatcatgggtgtcg

SEQ ID NO: 163441 - DNA, 25 bp, SARS Virus
ctctccatccaaacatgggtgtcgt

SEQ ID NO: 163442 - DNA, 25 bp, SARS Virus
tctccatccaataatgggtgtcgta

SEQ ID NO: 163443 - DNA, 25 bp, SARS Virus
ctccatccaatcatgggtgtcgtag

SEQ ID NO: 163444 - DNA, 25 bp, SARS Virus
tccatccaatcaagggtgtcgtaga

SEQ ID NO: 163445 - DNA, 25 bp, SARS Virus
ccatccaatcataggtgtcgtagag

SEQ ID NO: 163446 - DNA, 25 bp, SARS Virus
catccaatcatgagtgtcgtagaga

SEQ ID NO: 163447 - DNA, 25 bp, SARS Virus
atccaatcatggatgtcgtagagat

SEQ ID NO: 163448 - DNA, 25 bp, SARS Virus
tccaatcatgggagtcgtagagatc

SEQ ID NO: 163449 - DNA, 25 bp, SARS Virus
ccaatcatgggtatcgtagagatca

SEQ ID NO: 163450 - DNA, 25 bp, SARS Virus
caatcatgggtgacgtagagatcaa

SEQ ID NO: 163451 - DNA, 25 bp, SARS Virus
aatcatgggtgtagtagagatcaac

SEQ ID NO: 163452 - DNA, 25 bp, SARS Virus
atcatgggtgtcatagagatcaacg

SEQ ID NO: 163453 - DNA, 25 bp, SARS Virus
tcatgggtgtcgaagagatcaacgt

SEQ ID NO: 163454 - DNA, 25 bp, SARS Virus
catgggtgtcgtagagatcaacgta

SEQ ID NO: 163455 - DNA, 25 bp, SARS Virus
atgggtgtcgtaaagatcaacgtac

SEQ ID NO: 163456 - DNA, 25 bp, SARS Virus
tgggtgtcgtagagatcaacgtact

SEQ ID NO: 163457 - DNA, 25 bp, SARS Virus
gggtgtcgtagaaatcaacgtactg

SEQ ID NO: 163458 - DNA, 25 bp, SARS Virus
ggtgtcgtagagatcaacgtactgt

SEQ ID NO: 163459 - DNA, 25 bp, SARS Virus
gtgtcgtagagaacaacgtactgtc

SEQ ID NO: 163460 - DNA, 25 bp, SARS Virus
tgtcgtagagataaacgtactgtcg

SEQ ID NO: 163461 - DNA, 25 bp, SARS Virus
gtcgtagagatcaacgtactgtcgg

SEQ ID NO: 163462 - DNA, 25 bp, SARS Virus
tcgtagagatcaacgtactgtcggg

SEQ ID NO: 163463 - DNA, 25 bp, SARS Virus
cgtagagatcaaagtactgtcggga

SEQ ID NO: 163464 - DNA, 25 bp, SARS Virus
gtagagatcaacatactgtcgggag

SEQ ID NO: 163465 - DNA, 25 bp, SARS Virus
tagagatcaacgaactgtcgggaga

SEQ ID NO: 163466 - DNA, 25 bp, SARS Virus
agagatcaacgtactgtcgggagat

SEQ ID NO: 163467 - DNA, 25 bp, SARS Virus
gagatcaacgtaatgtcgggagatg

SEQ ID NO: 163468 - DNA, 25 bp, SARS Virus
agatcaacgtacagtcgggagatgt

SEQ ID NO: 163469 - DNA, 25 bp, SARS Virus
gatcaacgtactatcgggagatgta

SEQ ID NO: 163470 - DNA, 25 bp, SARS Virus
atcaacgtactgacgggagatgtag

SEQ ID NO: 163471 - DNA, 25 bp, SARS Virus
tcaacgtactgtagggagatgtagt

SEQ ID NO: 163472 - DNA, 25 bp, SARS Virus
caacgtactgtcaggagatgtagtt

SEQ ID NO: 163473 - DNA, 25 bp, SARS Virus
aacgtactgtcgagagatgtagttt

SEQ ID NO: 163474 - DNA, 25 bp, SARS Virus
acgtactgtcggaagatgtagtttc

SEQ ID NO: 163475 - DNA, 25 bp, SARS Virus
cgtactgtcgggagatgtagtttcg

SEQ ID NO: 163476 - DNA, 25 bp, SARS Virus
gtactgtcgggaaatgtagtttcgg

SEQ ID NO: 163477 - DNA, 25 bp, SARS Virus
tactgtcgggagatgtagtttcggt

SEQ ID NO: 163478 - DNA, 25 bp, SARS Virus
actgtcgggagaagtagtttcggtt

SEQ ID NO: 163479 - DNA, 25 bp, SARS Virus
ctgtcgggagatatagtttcggtta

SEQ ID NO: 163480 - DNA, 25 bp, SARS Virus
tgtcgggagatgaagtttcggttag

SEQ ID NO: 163481 - DNA, 25 bp, SARS Virus
gtcgggagatgtagtttcggttagg

SEQ ID NO: 163482 - DNA, 25 bp, SARS Virus
tcgggagatgtaatttcggttaggt

SEQ ID NO: 163483 - DNA, 25 bp, SARS Virus
cgggagatgtagattcggttaggtg

SEQ ID NO: 163484 - DNA, 25 bp, SARS Virus
gggagatgtagtatcggttaggtgc

SEQ ID NO: 163485 - DNA, 25 bp, SARS Virus
ggagatgtagttacggttaggtgcg

SEQ ID NO: 163486 - DNA, 25 bp, SARS Virus
gagatgtagtttaggttaggtgcgt

SEQ ID NO: 163487 - DNA, 25 bp, SARS Virus
agatgtagtttcagttaggtgcgtg

SEQ ID NO: 163488 - DNA, 25 bp, SARS Virus
gatgtagtttcgattaggtgcgtgc

SEQ ID NO: 163489 - DNA, 25 bp, SARS Virus
atgtagtttcggataggtgcgtgct

SEQ ID NO: 163490 - DNA, 25 bp, SARS Virus
tgtagtttcggtaaggtgcgtgctt

SEQ ID NO: 163491 - DNA, 25 bp, SARS Virus
gtagtttcggttaggtgcgtgcttg

SEQ ID NO: 163492 - DNA, 25 bp, SARS Virus
tagtttcggttaagtgcgtgcttgc

SEQ ID NO: 163493 - DNA, 25 bp, SARS Virus
agtttcggttagatgcgtgcttgca

SEQ ID NO: 163494 - DNA, 25 bp, SARS Virus
gtttcggttaggagcgtgcttgcac

SEQ ID NO: 163495 - DNA, 25 bp, SARS Virus
tttcggttaggtacgtgcttgcact

SEQ ID NO: 163496 - DNA, 25 bp, SARS Virus
ttcggttaggtgagtgcttgcactg

SEQ ID NO: 163497 - DNA, 25 bp, SARS Virus
tcggttaggtgcatgcttgcactgc

SEQ ID NO: 163498 - DNA, 25 bp, SARS Virus
cggttaggtgcgagcttgcactgct

SEQ ID NO: 163499 - DNA, 25 bp, SARS Virus
ggttaggtgcgtacttgcactgctt

SEQ ID NO: 163500 - DNA, 25 bp, SARS Virus
gttaggtgcgtgattgcactgctta

SEQ ID NO: 163501 - DNA, 25 bp, SARS Virus
ttaggtgcgtgcatgcactgcttat

SEQ ID NO: 163502 - DNA, 25 bp, SARS Virus
taggtgcgtgctagcactgcttatc

SEQ ID NO: 163503 - DNA, 25 bp, SARS Virus
aggtgcgtgcttacactgcttatcg

SEQ ID NO: 163504 - DNA, 25 bp, SARS Virus
ggtgcgtgcttgaactgcttatcga

SEQ ID NO: 163505 - DNA, 25 bp, SARS Virus
gtgcgtgcttgcactgcttatcgaa

SEQ ID NO: 163506 - DNA, 25 bp, SARS Virus
tgcgtgcttgcaatgcttatcgaag

SEQ ID NO: 163507 - DNA, 25 bp, SARS Virus
gcgtgcttgcacagcttatcgaaga

SEQ ID NO: 163508 - DNA, 25 bp, SARS Virus
cgtgcttgcactacttatcgaagaa

SEQ ID NO: 163509 - DNA, 25 bp, SARS Virus
gtgcttgcactgattatcgaagaag

SEQ ID NO: 163510 - DNA, 25 bp, SARS Virus
tgcttgcactgcatatcgaagaagc

SEQ ID NO: 163511 - DNA, 25 bp, SARS Virus
gcttgcactgctaatcgaagaagcg

SEQ ID NO: 163512 - DNA, 25 bp, SARS Virus
cttgcactgcttatcgaagaagcgc

SEQ ID NO: 163513 - DNA, 25 bp, SARS Virus
acgacttgtagtcagtatttaccca

SEQ ID NO: 163514 - DNA, 25 bp, SARS Virus
cgacttgtagttcgtatttacccaa

SEQ ID NO: 163515 - DNA, 25 bp, SARS Virus
gacttgtagttactatttacccaat

SEQ ID NO: 163516 - DNA, 25 bp, SARS Virus
acttgtagttagcatttacccaata

SEQ ID NO: 163517 - DNA, 25 bp, SARS Virus
cttgtagttagtctttacccaatat

SEQ ID NO: 163518 - DNA, 25 bp, SARS Virus
ttgtagttagtacttacccaatatc

SEQ ID NO: 163519 - DNA, 25 bp, SARS Virus
tgtagttagtatctacccaatatct

SEQ ID NO: 163520 - DNA, 25 bp, SARS Virus
gtagttagtattcacccaatatctg

SEQ ID NO: 163521 - DNA, 25 bp, SARS Virus
tagttagtatttccccaatatctgt

SEQ ID NO: 163522 - DNA, 25 bp, SARS Virus
agttagtatttacccaatatctgta

SEQ ID NO: 163523 - DNA, 25 bp, SARS Virus
gttagtatttacccaatatctgtat

SEQ ID NO: 163524 - DNA, 25 bp, SARS Virus
ttagtatttacccaatatctgtatc

SEQ ID NO: 163525 - DNA, 25 bp, SARS Virus
tagtatttaccccatatctgtatca

SEQ ID NO: 163526 - DNA, 25 bp, SARS Virus
agtatttacccactatctgtatcag

SEQ ID NO: 163527 - DNA, 25 bp, SARS Virus
gtatttacccaacatctgtatcagt

SEQ ID NO: 163528 - DNA, 25 bp, SARS Virus
tatttacccaatctctgtatcagtt

SEQ ID NO: 163529 - DNA, 25 bp, SARS Virus
atttacccaatacctgtatcagttt

SEQ ID NO: 163530 - DNA, 25 bp, SARS Virus
tttacccaatatctgtatcagtttt

SEQ ID NO: 163531 - DNA, 25 bp, SARS Virus
ttacccaatatccgtatcagttttg

SEQ ID NO: 163532 - DNA, 25 bp, SARS Virus
tacccaatatctctatcagttttgg

SEQ ID NO: 163533 - DNA, 25 bp, SARS Virus
acccaatatctgcatcagttttggg

SEQ ID NO: 163534 - DNA, 25 bp, SARS Virus
cccaatatctgtctcagttttgggt

SEQ ID NO: 163535 - DNA, 25 bp, SARS Virus
ccaatatctgtaccagttttgggtg

SEQ ID NO: 163536 - DNA, 25 bp, SARS Virus
caatatctgtatcagttttgggtgt

SEQ ID NO: 163537 - DNA, 25 bp, SARS Virus
aatatctgtatccgttttgggtgtc

SEQ ID NO: 163538 - DNA, 25 bp, SARS Virus
atatctgtatcacttttgggtgtct

SEQ ID NO: 163539 - DNA, 25 bp, SARS Virus
tatctgtatcagctttgggtgtctt

SEQ ID NO: 163540 - DNA, 25 bp, SARS Virus
atctgtatcagtcttgggtgtctta

SEQ ID NO: 163541 - DNA, 25 bp, SARS Virus
tctgtatcagttctgggtgtcttac

SEQ ID NO: 163542 - DNA, 25 bp, SARS Virus
ctgtatcagtttcgggtgtcttact

SEQ ID NO: 163543 - DNA, 25 bp, SARS Virus
tgtatcagttttcggtgtcttacta

SEQ ID NO: 163544 - DNA, 25 bp, SARS Virus
gtatcagttttgcgtgtcttactaa

SEQ ID NO: 163545 - DNA, 25 bp, SARS Virus
tatcagttttggctgtcttactaag

SEQ ID NO: 163546 - DNA, 25 bp, SARS Virus
atcagttttgggcgtcttactaagg

SEQ ID NO: 163547 - DNA, 25 bp, SARS Virus
tcagttttgggtctcttactaaggt

SEQ ID NO: 163548 - DNA, 25 bp, SARS Virus
cagttttgggtgccttactaaggtc

SEQ ID NO: 163549 - DNA, 25 bp, SARS Virus
agttttgggtgtcttactaaggtcg

SEQ ID NO: 163550 - DNA, 25 bp, SARS Virus
gttttgggtgtcctactaaggtcgt

SEQ ID NO: 163551 - DNA, 25 bp, SARS Virus
ttttgggtgtctcactaaggtcgtc

SEQ ID NO: 163552 - DNA, 25 bp, SARS Virus
tttgggtgtcttcctaaggtcgtcc

SEQ ID NO: 163553 - DNA, 25 bp, SARS Virus
ttgggtgtcttactaaggtcgtccg

SEQ ID NO: 163554 - DNA, 25 bp, SARS Virus
tgggtgtcttaccaaggtcgtccgt

SEQ ID NO: 163555 - DNA, 25 bp, SARS Virus
gggtgtcttactcaggtcgtccgta

SEQ ID NO: 163556 - DNA, 25 bp, SARS Virus
ggtgtcttactacggtcgtccgtat

SEQ ID NO: 163557 - DNA, 25 bp, SARS Virus
gtgtcttactaacgtcgtccgtatt

SEQ ID NO: 163558 - DNA, 25 bp, SARS Virus
tgtcttactaagctcgtccgtattc

SEQ ID NO: 163559 - DNA, 25 bp, SARS Virus
gtcttactaaggccgtccgtattca

SEQ ID NO: 163560 - DNA, 25 bp, SARS Virus
tcttactaaggtcgtccgtattcat

SEQ ID NO: 163561 - DNA, 25 bp, SARS Virus
cttactaaggtcctccgtattcata

SEQ ID NO: 163562 - DNA, 25 bp, SARS Virus
ttactaaggtcgcccgtattcatag

SEQ ID NO: 163563 - DNA, 25 bp, SARS Virus
tactaaggtcgtccgtattcataga

SEQ ID NO: 163564 - DNA, 25 bp, SARS Virus
actaaggtcgtccgtattcatagac

SEQ ID NO: 163565 - DNA, 25 bp, SARS Virus
ctaaggtcgtccctattcatagact

SEQ ID NO: 163566 - DNA, 25 bp, SARS Virus
taaggtcgtccgcattcatagacta

SEQ ID NO: 163567 - DNA, 25 bp, SARS Virus
aaggtcgtccgtcttcatagactac

SEQ ID NO: 163568 - DNA, 25 bp, SARS Virus
aggtcgtccgtactcatagactact

SEQ ID NO: 163569 - DNA, 25 bp, SARS Virus
ggtcgtccgtatccatagactactt

SEQ ID NO: 163570 - DNA, 25 bp, SARS Virus
gtcgtccgtattcatagactacttc

SEQ ID NO: 163571 - DNA, 25 bp, SARS Virus
tcgtccgtattcctagactacttca

SEQ ID NO: 163572 - DNA, 25 bp, SARS Virus
cgtccgtattcacagactacttcat

SEQ ID NO: 163573 - DNA, 25 bp, SARS Virus
gtccgtattcatcgactacttcatc

SEQ ID NO: 163574 - DNA, 25 bp, SARS Virus
tccgtattcatacactacttcatct

SEQ ID NO: 163575 - DNA, 25 bp, SARS Virus
ccgtattcatagcctacttcatctt

SEQ ID NO: 163576 - DNA, 25 bp, SARS Virus
cgtattcatagactacttcatcttt

SEQ ID NO: 163577 - DNA, 25 bp, SARS Virus
gtattcatagaccacttcatctttt

SEQ ID NO: 163578 - DNA, 25 bp, SARS Virus
tattcatagactccttcatcttttc

SEQ ID NO: 163579 - DNA, 25 bp, SARS Virus
attcatagactacttcatcttttcg

SEQ ID NO: 163580 - DNA, 25 bp, SARS Virus
ttcatagactacctcatcttttcgt

SEQ ID NO: 163581 - DNA, 25 bp, SARS Virus
tcatagactactccatcttttcgtt

SEQ ID NO: 163582 - DNA, 25 bp, SARS Virus
catagactacttcatcttttcgttc

SEQ ID NO: 163583 - DNA, 25 bp, SARS Virus
atagactacttcctcttttcgttca

SEQ ID NO: 163584 - DNA, 25 bp, SARS Virus
tagactacttcaccttttcgttcaa

SEQ ID NO: 163585 - DNA, 25 bp, SARS Virus
agactacttcatcttttcgttcaac

SEQ ID NO: 163586 - DNA, 25 bp, SARS Virus
gactacttcatcctttcgttcaacg

SEQ ID NO: 163587 - DNA, 25 bp, SARS Virus
actacttcatctcttcgttcaacgt

SEQ ID NO: 163588 - DNA, 25 bp, SARS Virus
ctacttcatcttctcgttcaacgtg

SEQ ID NO: 163589 - DNA, 25 bp, SARS Virus
tacttcatctttccgttcaacgtgc

SEQ ID NO: 163590 - DNA, 25 bp, SARS Virus
acttcatcttttcgttcaacgtgca

SEQ ID NO: 163591 - DNA, 25 bp, SARS Virus
cttcatcttttccttcaacgtgcaa

SEQ ID NO: 163592 - DNA, 25 bp, SARS Virus
ttcatcttttcgctcaacgtgcaaa

SEQ ID NO: 163593 - DNA, 25 bp, SARS Virus
tcatcttttcgtccaacgtgcaaac

SEQ ID NO: 163594 - DNA, 25 bp, SARS Virus
catcttttcgttcaacgtgcaaaca

SEQ ID NO: 163595 - DNA, 25 bp, SARS Virus
atcttttcgttccacgtgcaaacag

SEQ ID NO: 163596 - DNA, 25 bp, SARS Virus
tcttttcgttcaccgtgcaaacagt

SEQ ID NO: 163597 - DNA, 25 bp, SARS Virus
cttttcgttcaacgtgcaaacagtg

SEQ ID NO: 163598 - DNA, 25 bp, SARS Virus
ttttcgttcaacctgcaaacagtgt

SEQ ID NO: 163599 - DNA, 25 bp, SARS Virus
tttcgttcaacgcgcaaacagtgtg

SEQ ID NO: 163600 - DNA, 25 bp, SARS Virus
ttcgttcaacgtccaaacagtgtgt

SEQ ID NO: 163601 - DNA, 25 bp, SARS Virus
tcgttcaacgtgcaaacagtgtgtc

SEQ ID NO: 163602 - DNA, 25 bp, SARS Virus
cgttcaacgtgccaacagtgtgtct

SEQ ID NO: 163603 - DNA, 25 bp, SARS Virus
gttcaacgtgcacacagtgtgtctg

SEQ ID NO: 163604 - DNA, 25 bp, SARS Virus
ttcaacgtgcaaccagtgtgtctgt

SEQ ID NO: 163605 - DNA, 25 bp, SARS Virus
tcaacgtgcaaacagtgtgtctgtt

SEQ ID NO: 163606 - DNA, 25 bp, SARS Virus
caacgtgcaaaccgtgtgtctgttg

SEQ ID NO: 163607 - DNA, 25 bp, SARS Virus
aacgtgcaaacactgtgtctgttgt

SEQ ID NO: 163608 - DNA, 25 bp, SARS Virus
acgtgcaaacagcgtgtctgttgtg

SEQ ID NO: 163609 - DNA, 25 bp, SARS Virus
cgtgcaaacagtctgtctgttgtgc

SEQ ID NO: 163610 - DNA, 25 bp, SARS Virus
gtgcaaacagtgcgtctgttgtgca

SEQ ID NO: 163611 - DNA, 25 bp, SARS Virus
tgcaaacagtgtctctgttgtgcaa

SEQ ID NO: 163612 - DNA, 25 bp, SARS Virus
gcaaacagtgtgcctgttgtgcaag

SEQ ID NO: 163613 - DNA, 25 bp, SARS Virus
caaacagtgtgtctgttgtgcaaga

SEQ ID NO: 163614 - DNA, 25 bp, SARS Virus
aaacagtgtgtccgttgtgcaagaa

SEQ ID NO: 163615 - DNA, 25 bp, SARS Virus
aacagtgtgtctcttgtgcaagaaa

SEQ ID NO: 163616 - DNA, 25 bp, SARS Virus
acagtgtgtctgctgtgcaagaaag

SEQ ID NO: 163617 - DNA, 25 bp, SARS Virus
cagtgtgtctgtcgtgcaagaaagt

SEQ ID NO: 163618 - DNA, 25 bp, SARS Virus
agtgtgtctgttctgcaagaaagtc

SEQ ID NO: 163619 - DNA, 25 bp, SARS Virus
gtgtgtctgttgcgcaagaaagtcc

SEQ ID NO: 163620 - DNA, 25 bp, SARS Virus
tgtgtctgttgtccaagaaagtcca

SEQ ID NO: 163621 - DNA, 25 bp, SARS Virus
gtgtctgttgtgcaagaaagtccag

SEQ ID NO: 163622 - DNA, 25 bp, SARS Virus
tgtctgttgtgccagaaagtccagg

SEQ ID NO: 163623 - DNA, 25 bp, SARS Virus
gtctgttgtgcacgaaagtccaggt

SEQ ID NO: 163624 - DNA, 25 bp, SARS Virus
tctgttgtgcaacaaagtccaggtt

SEQ ID NO: 163625 - DNA, 25 bp, SARS Virus
ctgttgtgcaagcaagtccaggtta

SEQ ID NO: 163626 - DNA, 25 bp, SARS Virus
tgttgtgcaagacagtccaggttag

SEQ ID NO: 163627 - DNA, 25 bp, SARS Virus
gttgtgcaagaacgtccaggttaga

SEQ ID NO: 163628 - DNA, 25 bp, SARS Virus
ttgtgcaagaaactccaggttagaa

SEQ ID NO: 163629 - DNA, 25 bp, SARS Virus
tgtgcaagaaagcccaggttagaac

SEQ ID NO: 163630 - DNA, 25 bp, SARS Virus
gtgcaagaaagtccaggttagaact

SEQ ID NO: 163631 - DNA, 25 bp, SARS Virus
tgcaagaaagtccaggttagaactg

SEQ ID NO: 163632 - DNA, 25 bp, SARS Virus
gcaagaaagtcccggttagaactgt

SEQ ID NO: 163633 - DNA, 25 bp, SARS Virus
caagaaagtccacgttagaactgtt

SEQ ID NO: 163634 - DNA, 25 bp, SARS Virus
aagaaagtccagcttagaactgttt

SEQ ID NO: 163635 - DNA, 25 bp, SARS Virus
agaaagtccaggctagaactgtttc

SEQ ID NO: 163636 - DNA, 25 bp, SARS Virus
gaaagtccaggtcagaactgtttca

SEQ ID NO: 163637 - DNA, 25 bp, SARS Virus
aaagtccaggttcgaactgtttcat

SEQ ID NO: 163638 - DNA, 25 bp, SARS Virus
aagtccaggttacaactgtttcatg

SEQ ID NO: 163639 - DNA, 25 bp, SARS Virus
agtccaggttagcactgtttcatga

SEQ ID NO: 163640 - DNA, 25 bp, SARS Virus
gtccaggttagacctgtttcatgaa

SEQ ID NO: 163641 - DNA, 25 bp, SARS Virus
tccaggttagaactgtttcatgaag

SEQ ID NO: 163642 - DNA, 25 bp, SARS Virus
ccaggttagaaccgtttcatgaagt

SEQ ID NO: 163643 - DNA, 25 bp, SARS Virus
caggttagaactctttcatgaagta

SEQ ID NO: 163644 - DNA, 25 bp, SARS Virus
aggttagaactgcttcatgaagtaa

SEQ ID NO: 163645 - DNA, 25 bp, SARS Virus
ggttagaactgtctcatgaagtaac

SEQ ID NO: 163646 - DNA, 25 bp, SARS Virus
gttagaactgttccatgaagtaact

SEQ ID NO: 163647 - DNA, 25 bp, SARS Virus
ttagaactgtttcatgaagtaacta

SEQ ID NO: 163648 - DNA, 25 bp, SARS Virus
tagaactgtttcctgaagtaactac

SEQ ID NO: 163649 - DNA, 25 bp, SARS Virus
agaactgtttcacgaagtaactaca

SEQ ID NO: 163650 - DNA, 25 bp, SARS Virus
gaactgtttcatcaagtaactacat

SEQ ID NO: 163651 - DNA, 25 bp, SARS Virus
aactgtttcatgcagtaactacatt

SEQ ID NO: 163652 - DNA, 25 bp, SARS Virus
actgtttcatgacgtaactacattc

SEQ ID NO: 163653 - DNA, 25 bp, SARS Virus
ctgtttcatgaactaactacattcg

SEQ ID NO: 163654 - DNA, 25 bp, SARS Virus
tgtttcatgaagcaactacattcga

SEQ ID NO: 163655 - DNA, 25 bp, SARS Virus
gtttcatgaagtcactacattcgag

SEQ ID NO: 163656 - DNA, 25 bp, SARS Virus
tttcatgaagtacctacattcgagt

SEQ ID NO: 163657 - DNA, 25 bp, SARS Virus
ttcatgaagtaactacattcgagtt

SEQ ID NO: 163658 - DNA, 25 bp, SARS Virus
tcatgaagtaaccacattcgagttt

SEQ ID NO: 163659 - DNA, 25 bp, SARS Virus
catgaagtaactccattcgagtttc

SEQ ID NO: 163660 - DNA, 25 bp, SARS Virus
atgaagtaactacattcgagtttcg

SEQ ID NO: 163661 - DNA, 25 bp, SARS Virus
tgaagtaactaccttcgagtttcgg

SEQ ID NO: 163662 - DNA, 25 bp, SARS Virus
gaagtaactacactcgagtttcggt

SEQ ID NO: 163663 - DNA, 25 bp, SARS Virus
aagtaactacatccgagtttcggta

SEQ ID NO: 163664 - DNA, 25 bp, SARS Virus
agtaactacattcgagtttcggtac

SEQ ID NO: 163665 - DNA, 25 bp, SARS Virus
gtaactacattccagtttcggtacg

SEQ ID NO: 163666 - DNA, 25 bp, SARS Virus
taactacattcgcgtttcggtacgc

SEQ ID NO: 163667 - DNA, 25 bp, SARS Virus
aactacattcgactttcggtacgcg

SEQ ID NO: 163668 - DNA, 25 bp, SARS Virus
actacattcgagcttcggtacgcgg

SEQ ID NO: 163669 - DNA, 25 bp, SARS Virus
ctacattcgagtctcggtacgcggg

SEQ ID NO: 163670 - DNA, 25 bp, SARS Virus
tacattcgagttccggtacgcgggt

SEQ ID NO: 163671 - DNA, 25 bp, SARS Virus
acattcgagtttcggtacgcgggtt

SEQ ID NO: 163672 - DNA, 25 bp, SARS Virus
cattcgagtttccgtacgcgggttt

SEQ ID NO: 163673 - DNA, 25 bp, SARS Virus
attcgagtttcgctacgcgggtttc

SEQ ID NO: 163674 - DNA, 25 bp, SARS Virus
ttcgagtttcggcacgcgggtttcc

SEQ ID NO: 163675 - DNA, 25 bp, SARS Virus
tcgagtttcggtccgcgggtttcct

SEQ ID NO: 163676 - DNA, 25 bp, SARS Virus
cgagtttcggtacgcgggtttcctg

SEQ ID NO: 163677 - DNA, 25 bp, SARS Virus
gagtttcggtacccgggtttcctgc

SEQ ID NO: 163678 - DNA, 25 bp, SARS Virus
agtttcggtacgcgggtttcctgct

SEQ ID NO: 163679 - DNA, 25 bp, SARS Virus
gtttcggtacgccggtttcctgctt

SEQ ID NO: 163680 - DNA, 25 bp, SARS Virus
tttcggtacgcgcgtttcctgcttg

SEQ ID NO: 163681 - DNA, 25 bp, SARS Virus
ttcggtacgcggctttcctgcttgt

SEQ ID NO: 163682 - DNA, 25 bp, SARS Virus
tcggtacgcgggcttcctgcttgtg

SEQ ID NO: 163683 - DNA, 25 bp, SARS Virus
cggtacgcgggtctcctgcttgtgc

SEQ ID NO: 163684 - DNA, 25 bp, SARS Virus
ggtacgcgggttccctgcttgtgct

SEQ ID NO: 163685 - DNA, 25 bp, SARS Virus
gtacgcgggtttcctgcttgtgctg

SEQ ID NO: 163686 - DNA, 25 bp, SARS Virus
tacgcgggtttcctgcttgtgctga

SEQ ID NO: 163687 - DNA, 25 bp, SARS Virus
acgcgggtttcccgcttgtgctgag

SEQ ID NO: 163688 - DNA, 25 bp, SARS Virus
cgcgggtttcctccttgtgctgaga

SEQ ID NO: 163689 - DNA, 25 bp, SARS Virus
gcgggtttcctgcttgtgctgagac

SEQ ID NO: 163690 - DNA, 25 bp, SARS Virus
cgggtttcctgcctgtgctgagaca

SEQ ID NO: 163691 - DNA, 25 bp, SARS Virus
gggtttcctgctcgtgctgagacag

SEQ ID NO: 163692 - DNA, 25 bp, SARS Virus
ggtttcctgcttctgctgagacaga

SEQ ID NO: 163693 - DNA, 25 bp, SARS Virus
gtttcctgcttgcgctgagacagac

SEQ ID NO: 163694 - DNA, 25 bp, SARS Virus
tttcctgcttgtcctgagacagact

SEQ ID NO: 163695 - DNA, 25 bp, SARS Virus
ttcctgcttgtgctgagacagactg

SEQ ID NO: 163696 - DNA, 25 bp, SARS Virus
tcctgcttgtgccgagacagactgt

SEQ ID NO: 163697 - DNA, 25 bp, SARS Virus
cctgcttgtgctcagacagactgtt

SEQ ID NO: 163698 - DNA, 25 bp, SARS Virus
ctgcttgtgctgcgacagactgtta

SEQ ID NO: 163699 - DNA, 25 bp, SARS Virus
tgcttgtgctgacacagactgttag

SEQ ID NO: 163700 - DNA, 25 bp, SARS Virus
gcttgtgctgagccagactgttagg

SEQ ID NO: 163701 - DNA, 25 bp, SARS Virus
cttgtgctgagacagactgttagga

SEQ ID NO: 163702 - DNA, 25 bp, SARS Virus
ttgtgctgagaccgactgttaggaa

SEQ ID NO: 163703 - DNA, 25 bp, SARS Virus
tgtgctgagacacactgttaggaaa

SEQ ID NO: 163704 - DNA, 25 bp, SARS Virus
gtgctgagacagcctgttaggaaag

SEQ ID NO: 163705 - DNA, 25 bp, SARS Virus
tgctgagacagactgttaggaaagt

SEQ ID NO: 163706 - DNA, 25 bp, SARS Virus
gctgagacagaccgttaggaaagtc

SEQ ID NO: 163707 - DNA, 25 bp, SARS Virus
ctgagacagactcttaggaaagtca

SEQ ID NO: 163708 - DNA, 25 bp, SARS Virus
tgagacagactgctaggaaagtcac

SEQ ID NO: 163709 - DNA, 25 bp, SARS Virus
gagacagactgtcaggaaagtcaca

SEQ ID NO: 163710 - DNA, 25 bp, SARS Virus
agacagactgttcggaaagtcacat

SEQ ID NO: 163711 - DNA, 25 bp, SARS Virus
gacagactgttacgaaagtcacata

SEQ ID NO: 163712 - DNA, 25 bp, SARS Virus
acagactgttagcaaagtcacatag

SEQ ID NO: 163713 - DNA, 25 bp, SARS Virus
cagactgttaggcaagtcacatagt

SEQ ID NO: 163714 - DNA, 25 bp, SARS Virus
agactgttaggacagtcacatagtg

SEQ ID NO: 163715 - DNA, 25 bp, SARS Virus
gactgttaggaacgtcacatagtga

SEQ ID NO: 163716 - DNA, 25 bp, SARS Virus
actgttaggaaactcacatagtgac

SEQ ID NO: 163717 - DNA, 25 bp, SARS Virus
ctgttaggaaagccacatagtgact

SEQ ID NO: 163718 - DNA, 25 bp, SARS Virus
tgttaggaaagtcacatagtgactc

SEQ ID NO: 163719 - DNA, 25 bp, SARS Virus
gttaggaaagtcccatagtgactcg

SEQ ID NO: 163720 - DNA, 25 bp, SARS Virus
ttaggaaagtcacatagtgactcgt

SEQ ID NO: 163721 - DNA, 25 bp, SARS Virus
taggaaagtcacctagtgactcgta

SEQ ID NO: 163722 - DNA, 25 bp, SARS Virus
aggaaagtcacacagtgactcgtaa

SEQ ID NO: 163723 - DNA, 25 bp, SARS Virus
ggaaagtcacatcgtgactcgtaaa

SEQ ID NO: 163724 - DNA, 25 bp, SARS Virus
gaaagtcacatactgactcgtaaac

SEQ ID NO: 163725 - DNA, 25 bp, SARS Virus
aaagtcacatagcgactcgtaaaca

SEQ ID NO: 163726 - DNA, 25 bp, SARS Virus
aagtcacatagtcactcgtaaacat

SEQ ID NO: 163727 - DNA, 25 bp, SARS Virus
agtcacatagtgcctcgtaaacatg

SEQ ID NO: 163728 - DNA, 25 bp, SARS Virus
gtcacatagtgactcgtaaacatga

SEQ ID NO: 163729 - DNA, 25 bp, SARS Virus
tcacatagtgacccgtaaacatgat

SEQ ID NO: 163730 - DNA, 25 bp, SARS Virus
cacatagtgactcgtaaacatgata

SEQ ID NO: 163731 - DNA, 25 bp, SARS Virus
acatagtgactcctaaacatgatag

SEQ ID NO: 163732 - DNA, 25 bp, SARS Virus
catagtgactcgcaaacatgataga

SEQ ID NO: 163733 - DNA, 25 bp, SARS Virus
atagtgactcgtcaacatgatagaa

SEQ ID NO: 163734 - DNA, 25 bp, SARS Virus
tagtgactcgtacacatgatagaat

SEQ ID NO: 163735 - DNA, 25 bp, SARS Virus
agtgactcgtaaccatgatagaatt

SEQ ID NO: 163736 - DNA, 25 bp, SARS Virus
gtgactcgtaaacatgatagaatta

SEQ ID NO: 163737 - DNA, 25 bp, SARS Virus
tgactcgtaaacctgatagaattat

SEQ ID NO: 163738 - DNA, 25 bp, SARS Virus
gactcgtaaacacgatagaattatg

SEQ ID NO: 163739 - DNA, 25 bp, SARS Virus
actcgtaaacatcatagaattatgc

SEQ ID NO: 163740 - DNA, 25 bp, SARS Virus
ctcgtaaacatgctagaattatgcg

SEQ ID NO: 163741 - DNA, 25 bp, SARS Virus
tcgtaaacatgacagaattatgcgt

SEQ ID NO: 163742 - DNA, 25 bp, SARS Virus
cgtaaacatgatcgaattatgcgtg

SEQ ID NO: 163743 - DNA, 25 bp, SARS Virus
gtaaacatgatacaattatgcgtga

SEQ ID NO: 163744 - DNA, 25 bp, SARS Virus
taaacatgatagcattatgcgtgat

SEQ ID NO: 163745 - DNA, 25 bp, SARS Virus
aaacatgatagacttatgcgtgatg

SEQ ID NO: 163746 - DNA, 25 bp, SARS Virus
aacatgatagaactatgcgtgatgt

SEQ ID NO: 163747 - DNA, 25 bp, SARS Virus
acatgatagaatcatgcgtgatgta

SEQ ID NO: 163748 - DNA, 25 bp, SARS Virus
catgatagaattctgcgtgatgtaa

SEQ ID NO: 163749 - DNA, 25 bp, SARS Virus
atgatagaattacgcgtgatgtaag

SEQ ID NO: 163750 - DNA, 25 bp, SARS Virus
tgatagaattatccgtgatgtaagg

SEQ ID NO: 163751 - DNA, 25 bp, SARS Virus
gatagaattatgcgtgatgtaaggt

SEQ ID NO: 163752 - DNA, 25 bp, SARS Virus
atagaattatgcctgatgtaaggtc

SEQ ID NO: 163753 - DNA, 25 bp, SARS Virus
tagaattatgcgcgatgtaaggtcc

SEQ ID NO: 163754 - DNA, 25 bp, SARS Virus
agaattatgcgtcatgtaaggtccc

SEQ ID NO: 163755 - DNA, 25 bp, SARS Virus
gaattatgcgtgctgtaaggtcccg

SEQ ID NO: 163756 - DNA, 25 bp, SARS Virus
aattatgcgtgacgtaaggtcccgt

SEQ ID NO: 163757 - DNA, 25 bp, SARS Virus
attatgcgtgatctaaggtcccgtt

SEQ ID NO: 163758 - DNA, 25 bp, SARS Virus
ttatgcgtgatgcaaggtcccgttc

SEQ ID NO: 163759 - DNA, 25 bp, SARS Virus
tatgcgtgatgtcaggtcccgttcg

SEQ ID NO: 163760 - DNA, 25 bp, SARS Virus
atgcgtgatgtacggtcccgttcgg

SEQ ID NO: 163761 - DNA, 25 bp, SARS Virus
tgcgtgatgtaacgtcccgttcgga

SEQ ID NO: 163762 - DNA, 25 bp, SARS Virus
gcgtgatgtaagctcccgttcggaa

SEQ ID NO: 163763 - DNA, 25 bp, SARS Virus
cgtgatgtaaggccccgttcggaaa

SEQ ID NO: 163764 - DNA, 25 bp, SARS Virus
gtgatgtaaggtcccgttcggaaat

SEQ ID NO: 163765 - DNA, 25 bp, SARS Virus
tgatgtaaggtcccgttcggaaata

SEQ ID NO: 163766 - DNA, 25 bp, SARS Virus
gatgtaaggtcccgttcggaaatat

SEQ ID NO: 163767 - DNA, 25 bp, SARS Virus
atgtaaggtccccttcggaaatatg

SEQ ID NO: 163768 - DNA, 25 bp, SARS Virus
tgtaaggtcccgctcggaaatatgt

SEQ ID NO: 163769 - DNA, 25 bp, SARS Virus
gtaaggtcccgtccggaaatatgta

SEQ ID NO: 163770 - DNA, 25 bp, SARS Virus
taaggtcccgttcggaaatatgtac

SEQ ID NO: 163771 - DNA, 25 bp, SARS Virus
aaggtcccgttccgaaatatgtact

SEQ ID NO: 163772 - DNA, 25 bp, SARS Virus
aggtcccgttcgcaaatatgtactc

SEQ ID NO: 163773 - DNA, 25 bp, SARS Virus
ggtcccgttcggcaatatgtactca

SEQ ID NO: 163774 - DNA, 25 bp, SARS Virus
gtcccgttcggacatatgtactcac

SEQ ID NO: 163775 - DNA, 25 bp, SARS Virus
tcccgttcggaactatgtactcacc

SEQ ID NO: 163776 - DNA, 25 bp, SARS Virus
cccgttcggaaacatgtactcacca

SEQ ID NO: 163777 - DNA, 25 bp, SARS Virus
ccgttcggaaatctgtactcaccat

SEQ ID NO: 163778 - DNA, 25 bp, SARS Virus
cgttcggaaatacgtactcaccata

SEQ ID NO: 163779 - DNA, 25 bp, SARS Virus
gttcggaaatatctactcaccatat

SEQ ID NO: 163780 - DNA, 25 bp, SARS Virus
ttcggaaatatgcactcaccatatt

SEQ ID NO: 163781 - DNA, 25 bp, SARS Virus
tcggaaatatgtcctcaccatattc

SEQ ID NO: 163782 - DNA, 25 bp, SARS Virus
cggaaatatgtactcaccatattct

SEQ ID NO: 163783 - DNA, 25 bp, SARS Virus
ggaaatatgtacccaccatattcta

SEQ ID NO: 163784 - DNA, 25 bp, SARS Virus
gaaatatgtactcaccatattctac

SEQ ID NO: 163785 - DNA, 25 bp, SARS Virus
aaatatgtactccccatattctaca

SEQ ID NO: 163786 - DNA, 25 bp, SARS Virus
aatatgtactcaccatattctacaa

SEQ ID NO: 163787 - DNA, 25 bp, SARS Virus
atatgtactcaccatattctacaaa

SEQ ID NO: 163788 - DNA, 25 bp, SARS Virus
tatgtactcaccctattctacaaat

SEQ ID NO: 163789 - DNA, 25 bp, SARS Virus
atgtactcaccacattctacaaatt

SEQ ID NO: 163790 - DNA, 25 bp, SARS Virus
tgtactcaccatcttctacaaattt

SEQ ID NO: 163791 - DNA, 25 bp, SARS Virus
gtactcaccatactctacaaatttg

SEQ ID NO: 163792 - DNA, 25 bp, SARS Virus
tactcaccatatcctacaaatttga

SEQ ID NO: 163793 - DNA, 25 bp, SARS Virus
actcaccatattctacaaatttgac

SEQ ID NO: 163794 - DNA, 25 bp, SARS Virus
ctcaccatattccacaaatttgacc

SEQ ID NO: 163795 - DNA, 25 bp, SARS Virus
tcaccatattctccaaatttgacca

SEQ ID NO: 163796 - DNA, 25 bp, SARS Virus
caccatattctacaaatttgaccag

SEQ ID NO: 163797 - DNA, 25 bp, SARS Virus
accatattctaccaatttgaccagt

SEQ ID NO: 163798 - DNA, 25 bp, SARS Virus
ccatattctacacatttgaccagtg

SEQ ID NO: 163799 - DNA, 25 bp, SARS Virus
catattctacaactttgaccagtgg

SEQ ID NO: 163800 - DNA, 25 bp, SARS Virus
atattctacaaacttgaccagtgga

SEQ ID NO: 163801 - DNA, 25 bp, SARS Virus
tattctacaaatctgaccagtggac

SEQ ID NO: 163802 - DNA, 25 bp, SARS Virus
attctacaaattcgaccagtggacc

SEQ ID NO: 163803 - DNA, 25 bp, SARS Virus
ttctacaaatttcaccagtggacca

SEQ ID NO: 163804 - DNA, 25 bp, SARS Virus
tctacaaatttgcccagtggaccac

SEQ ID NO: 163805 - DNA, 25 bp, SARS Virus
ctacaaatttgaccagtggaccacc

SEQ ID NO: 163806 - DNA, 25 bp, SARS Virus
tacaaatttgaccagtggaccacct

SEQ ID NO: 163807 - DNA, 25 bp, SARS Virus
acaaatttgacccgtggaccacctc

SEQ ID NO: 163808 - DNA, 25 bp, SARS Virus
caaatttgaccactggaccacctcc

SEQ ID NO: 163809 - DNA, 25 bp, SARS Virus
aaatttgaccagcggaccacctcca

SEQ ID NO: 163810 - DNA, 25 bp, SARS Virus
aatttgaccagtcgaccacctccaa

SEQ ID NO: 163811 - DNA, 25 bp, SARS Virus
atttgaccagtgcaccacctccaaa

SEQ ID NO: 163812 - DNA, 25 bp, SARS Virus
tttgaccagtggcccacctccaaaa

SEQ ID NO: 163813 - DNA, 25 bp, SARS Virus
ttgaccagtggaccacctccaaaac

SEQ ID NO: 163814 - DNA, 25 bp, SARS Virus
tgaccagtggaccacctccaaaacg

SEQ ID NO: 163815 - DNA, 25 bp, SARS Virus
gaccagtggaccccctccaaaacgt

SEQ ID NO: 163816 - DNA, 25 bp, SARS Virus
accagtggaccacctccaaaacgta

SEQ ID NO: 163817 - DNA, 25 bp, SARS Virus
ccagtggaccacctccaaaacgtaa

SEQ ID NO: 163818 - DNA, 25 bp, SARS Virus
cagtggaccacccccaaaacgtaat

SEQ ID NO: 163819 - DNA, 25 bp, SARS Virus
agtggaccacctccaaaacgtaatt

SEQ ID NO: 163820 - DNA, 25 bp, SARS Virus
gtggaccacctccaaaacgtaattg

SEQ ID NO: 163821 - DNA, 25 bp, SARS Virus
tggaccacctcccaaacgtaattga

SEQ ID NO: 163822 - DNA, 25 bp, SARS Virus
ggaccacctccacaacgtaattgag

SEQ ID NO: 163823 - DNA, 25 bp, SARS Virus
gaccacctccaacacgtaattgaga

SEQ ID NO: 163824 - DNA, 25 bp, SARS Virus
accacctccaaaccgtaattgagac

SEQ ID NO: 163825 - DNA, 25 bp, SARS Virus
ccacctccaaaacgtaattgagacc

SEQ ID NO: 163826 - DNA, 25 bp, SARS Virus
cacctccaaaacctaattgagacca

SEQ ID NO: 163827 - DNA, 25 bp, SARS Virus
acctccaaaacgcaattgagaccac

SEQ ID NO: 163828 - DNA, 25 bp, SARS Virus
cctccaaaacgtcattgagaccact

SEQ ID NO: 163829 - DNA, 25 bp, SARS Virus
ctccaaaacgtacttgagaccactt

SEQ ID NO: 163830 - DNA, 25 bp, SARS Virus
tccaaaacgtaactgagaccactta

SEQ ID NO: 163831 - DNA, 25 bp, SARS Virus
ccaaaacgtaatcgagaccacttaa

SEQ ID NO: 163832 - DNA, 25 bp, SARS Virus
caaaacgtaattcagaccacttaag

SEQ ID NO: 163833 - DNA, 25 bp, SARS Virus
aaaacgtaattgcgaccacttaaga

SEQ ID NO: 163834 - DNA, 25 bp, SARS Virus
aaacgtaattgacaccacttaagac

SEQ ID NO: 163835 - DNA, 25 bp, SARS Virus
aacgtaattgagcccacttaagaca

SEQ ID NO: 163836 - DNA, 25 bp, SARS Virus
acgtaattgagaccacttaagacac

SEQ ID NO: 163837 - DNA, 25 bp, SARS Virus
cgtaattgagaccacttaagacaca

SEQ ID NO: 163838 - DNA, 25 bp, SARS Virus
gtaattgagaccccttaagacacaa

SEQ ID NO: 163839 - DNA, 25 bp, SARS Virus
taattgagaccacttaagacacaat

SEQ ID NO: 163840 - DNA, 25 bp, SARS Virus
aattgagaccacctaagacacaata

SEQ ID NO: 163841 - DNA, 25 bp, SARS Virus
attgagaccactcaagacacaataa

SEQ ID NO: 163842 - DNA, 25 bp, SARS Virus
ttgagaccacttcagacacaataaa

SEQ ID NO: 163843 - DNA, 25 bp, SARS Virus
tgagaccacttacgacacaataaaa

SEQ ID NO: 163844 - DNA, 25 bp, SARS Virus
gagaccacttaacacacaataaaag

SEQ ID NO: 163845 - DNA, 25 bp, SARS Virus
agaccacttaagccacaataaaagt

SEQ ID NO: 163846 - DNA, 25 bp, SARS Virus
gaccacttaagacacaataaaagtc

SEQ ID NO: 163847 - DNA, 25 bp, SARS Virus
accacttaagacccaataaaagtca

SEQ ID NO: 163848 - DNA, 25 bp, SARS Virus
ccacttaagacacaataaaagtcac

SEQ ID NO: 163849 - DNA, 25 bp, SARS Virus
cacttaagacaccataaaagtcaca

SEQ ID NO: 163850 - DNA, 25 bp, SARS Virus
acttaagacacactaaaagtcacag

SEQ ID NO: 163851 - DNA, 25 bp, SARS Virus
cttaagacacaacaaaagtcacagt

SEQ ID NO: 163852 - DNA, 25 bp, SARS Virus
ttaagacacaatcaaagtcacagtt

SEQ ID NO: 163853 - DNA, 25 bp, SARS Virus
taagacacaatacaagtcacagttg

SEQ ID NO: 163854 - DNA, 25 bp, SARS Virus
aagacacaataacagtcacagttgt

SEQ ID NO: 163855 - DNA, 25 bp, SARS Virus
agacacaataaacgtcacagttgta

SEQ ID NO: 163856 - DNA, 25 bp, SARS Virus
gacacaataaaactcacagttgtat

SEQ ID NO: 163857 - DNA, 25 bp, SARS Virus
acacaataaaagccacagttgtatt

SEQ ID NO: 163858 - DNA, 25 bp, SARS Virus
cacaataaaagtcacagttgtattg

SEQ ID NO: 163859 - DNA, 25 bp, SARS Virus
acaataaaagtcccagttgtattgg

SEQ ID NO: 163860 - DNA, 25 bp, SARS Virus
caataaaagtcacagttgtattggt

SEQ ID NO: 163861 - DNA, 25 bp, SARS Virus
aataaaagtcaccgttgtattggtc

SEQ ID NO: 163862 - DNA, 25 bp, SARS Virus
ataaaagtcacacttgtattggtca

SEQ ID NO: 163863 - DNA, 25 bp, SARS Virus
taaaagtcacagctgtattggtcag

SEQ ID NO: 163864 - DNA, 25 bp, SARS Virus
aaaagtcacagtcgtattggtcagc

SEQ ID NO: 163865 - DNA, 25 bp, SARS Virus
aaagtcacagttctattggtcagcc

SEQ ID NO: 163866 - DNA, 25 bp, SARS Virus
aagtcacagttgcattggtcagcca

SEQ ID NO: 163867 - DNA, 25 bp, SARS Virus
agtcacagttgtcttggtcagccat

SEQ ID NO: 163868 - DNA, 25 bp, SARS Virus
gtcacagttgtactggtcagccatg

SEQ ID NO: 163869 - DNA, 25 bp, SARS Virus
tcacagttgtatcggtcagccatgt

SEQ ID NO: 163870 - DNA, 25 bp, SARS Virus
cacagttgtattcgtcagccatgtc

SEQ ID NO: 163871 - DNA, 25 bp, SARS Virus
acagttgtattgctcagccatgtcg

SEQ ID NO: 163872 - DNA, 25 bp, SARS Virus
cagttgtattggccagccatgtcga

SEQ ID NO: 163873 - DNA, 25 bp, SARS Virus
agttgtattggtcagccatgtcgat

SEQ ID NO: 163874 - DNA, 25 bp, SARS Virus
gttgtattggtccgccatgtcgatg

SEQ ID NO: 163875 - DNA, 25 bp, SARS Virus
ttgtattggtcacccatgtcgatga

SEQ ID NO: 163876 - DNA, 25 bp, SARS Virus
tgtattggtcagccatgtcgatgat

SEQ ID NO: 163877 - DNA, 25 bp, SARS Virus
gtattggtcagccatgtcgatgatt

SEQ ID NO: 163878 - DNA, 25 bp, SARS Virus
tattggtcagccctgtcgatgattc

SEQ ID NO: 163879 - DNA, 25 bp, SARS Virus
attggtcagccacgtcgatgattca

SEQ ID NO: 163880 - DNA, 25 bp, SARS Virus
ttggtcagccatctcgatgattcaa

SEQ ID NO: 163881 - DNA, 25 bp, SARS Virus
tggtcagccatgccgatgattcaat

SEQ ID NO: 163882 - DNA, 25 bp, SARS Virus
ggtcagccatgtcgatgattcaatt

SEQ ID NO: 163883 - DNA, 25 bp, SARS Virus
gtcagccatgtccatgattcaattg

SEQ ID NO: 163884 - DNA, 25 bp, SARS Virus
tcagccatgtcgctgattcaattgt

SEQ ID NO: 163885 - DNA, 25 bp, SARS Virus
cagccatgtcgacgattcaattgtg

SEQ ID NO: 163886 - DNA, 25 bp, SARS Virus
agccatgtcgatcattcaattgtgg

SEQ ID NO: 163887 - DNA, 25 bp, SARS Virus
gccatgtcgatgcttcaattgtgga

SEQ ID NO: 163888 - DNA, 25 bp, SARS Virus
ccatgtcgatgactcaattgtggac

SEQ ID NO: 163889 - DNA, 25 bp, SARS Virus
catgtcgatgatccaattgtggaca

SEQ ID NO: 163890 - DNA, 25 bp, SARS Virus
atgtcgatgattcaattgtggacat

SEQ ID NO: 163891 - DNA, 25 bp, SARS Virus
tgtcgatgattccattgtggacatc

SEQ ID NO: 163892 - DNA, 25 bp, SARS Virus
gtcgatgattcacttgtggacatct

SEQ ID NO: 163893 - DNA, 25 bp, SARS Virus
tcgatgattcaactgtggacatctt

SEQ ID NO: 163894 - DNA, 25 bp, SARS Virus
cgatgattcaatcgtggacatcttt

SEQ ID NO: 163895 - DNA, 25 bp, SARS Virus
gatgattcaattctggacatctttt

SEQ ID NO: 163896 - DNA, 25 bp, SARS Virus
atgattcaattgcggacatctttta

SEQ ID NO: 163897 - DNA, 25 bp, SARS Virus
tgattcaattgtcgacatcttttag

SEQ ID NO: 163898 - DNA, 25 bp, SARS Virus
gattcaattgtgcacatcttttagg

SEQ ID NO: 163899 - DNA, 25 bp, SARS Virus
attcaattgtggccatcttttagga

SEQ ID NO: 163900 - DNA, 25 bp, SARS Virus
ttcaattgtggacatcttttaggat

SEQ ID NO: 163901 - DNA, 25 bp, SARS Virus
tcaattgtggacctcttttaggatc

SEQ ID NO: 163902 - DNA, 25 bp, SARS Virus
caattgtggacaccttttaggatcg

SEQ ID NO: 163903 - DNA, 25 bp, SARS Virus
aattgtggacatcttttaggatcga

SEQ ID NO: 163904 - DNA, 25 bp, SARS Virus
attgtggacatcctttaggatcgac

SEQ ID NO: 163905 - DNA, 25 bp, SARS Virus
ttgtggacatctcttaggatcgacc

SEQ ID NO: 163906 - DNA, 25 bp, SARS Virus
tgtggacatcttctaggatcgacct

SEQ ID NO: 163907 - DNA, 25 bp, SARS Virus
gtggacatctttcaggatcgacctc

SEQ ID NO: 163908 - DNA, 25 bp, SARS Virus
tggacatcttttcggatcgacctct

SEQ ID NO: 163909 - DNA, 25 bp, SARS Virus
ggacatcttttacgatcgacctctc

SEQ ID NO: 163910 - DNA, 25 bp, SARS Virus
gacatcttttagcatcgacctctcc

SEQ ID NO: 163911 - DNA, 25 bp, SARS Virus
acatcttttaggctcgacctctcca

SEQ ID NO: 163912 - DNA, 25 bp, SARS Virus
catcttttaggaccgacctctccat

SEQ ID NO: 163913 - DNA, 25 bp, SARS Virus
atcttttaggatcgacctctccatc

SEQ ID NO: 163914 - DNA, 25 bp, SARS Virus
tcttttaggatccacctctccatcc

SEQ ID NO: 163915 - DNA, 25 bp, SARS Virus
cttttaggatcgccctctccatcca

SEQ ID NO: 163916 - DNA, 25 bp, SARS Virus
ttttaggatcgacctctccatccaa

SEQ ID NO: 163917 - DNA, 25 bp, SARS Virus
tttaggatcgacctctccatccaat

SEQ ID NO: 163918 - DNA, 25 bp, SARS Virus
ttaggatcgacccctccatccaatc

SEQ ID NO: 163919 - DNA, 25 bp, SARS Virus
taggatcgacctctccatccaatca

SEQ ID NO: 163920 - DNA, 25 bp, SARS Virus
aggatcgacctccccatccaatcat

SEQ ID NO: 163921 - DNA, 25 bp, SARS Virus
ggatcgacctctccatccaatcatg

SEQ ID NO: 163922 - DNA, 25 bp, SARS Virus
gatcgacctctccatccaatcatgg

SEQ ID NO: 163923 - DNA, 25 bp, SARS Virus
atcgacctctccctccaatcatggg

SEQ ID NO: 163924 - DNA, 25 bp, SARS Virus
tcgacctctccacccaatcatgggt

SEQ ID NO: 163925 - DNA, 25 bp, SARS Virus
cgacctctccatccaatcatgggtg

SEQ ID NO: 163926 - DNA, 25 bp, SARS Virus
gacctctccatccaatcatgggtgt

SEQ ID NO: 163927 - DNA, 25 bp, SARS Virus
acctctccatcccatcatgggtgtc

SEQ ID NO: 163928 - DNA, 25 bp, SARS Virus
cctctccatccactcatgggtgtcg

SEQ ID NO: 163929 - DNA, 25 bp, SARS Virus
ctctccatccaaccatgggtgtcgt

SEQ ID NO: 163930 - DNA, 25 bp, SARS Virus
tctccatccaatcatgggtgtcgta

SEQ ID NO: 163931 - DNA, 25 bp, SARS Virus
ctccatccaatcctgggtgtcgtag

SEQ ID NO: 163932 - DNA, 25 bp, SARS Virus
tccatccaatcacgggtgtcgtaga

SEQ ID NO: 163933 - DNA, 25 bp, SARS Virus
ccatccaatcatcggtgtcgtagag

SEQ ID NO: 163934 - DNA, 25 bp, SARS Virus
catccaatcatgcgtgtcgtagaga

SEQ ID NO: 163935 - DNA, 25 bp, SARS Virus
atccaatcatggctgtcgtagagat

SEQ ID NO: 163936 - DNA, 25 bp, SARS Virus
tccaatcatgggcgtcgtagagatc

SEQ ID NO: 163937 - DNA, 25 bp, SARS Virus
ccaatcatgggtctcgtagagatca

SEQ ID NO: 163938 - DNA, 25 bp, SARS Virus
caatcatgggtgccgtagagatcaa

SEQ ID NO: 163939 - DNA, 25 bp, SARS Virus
aatcatgggtgtcgtagagatcaac

SEQ ID NO: 163940 - DNA, 25 bp, SARS Virus
atcatgggtgtcctagagatcaacg

SEQ ID NO: 163941 - DNA, 25 bp, SARS Virus
tcatgggtgtcgcagagatcaacgt

SEQ ID NO: 163942 - DNA, 25 bp, SARS Virus
catgggtgtcgtcgagatcaacgta

SEQ ID NO: 163943 - DNA, 25 bp, SARS Virus
atgggtgtcgtacagatcaacgtac

SEQ ID NO: 163944 - DNA, 25 bp, SARS Virus
tgggtgtcgtagcgatcaacgtact

SEQ ID NO: 163945 - DNA, 25 bp, SARS Virus
gggtgtcgtagacatcaacgtactg

SEQ ID NO: 163946 - DNA, 25 bp, SARS Virus
ggtgtcgtagagctcaacgtactgt

SEQ ID NO: 163947 - DNA, 25 bp, SARS Virus
gtgtcgtagagaccaacgtactgtc

SEQ ID NO: 163948 - DNA, 25 bp, SARS Virus
tgtcgtagagatcaacgtactgtcg

SEQ ID NO: 163949 - DNA, 25 bp, SARS Virus
gtcgtagagatccacgtactgtcgg

SEQ ID NO: 163950 - DNA, 25 bp, SARS Virus
tcgtagagatcaccgtactgtcggg

SEQ ID NO: 163951 - DNA, 25 bp, SARS Virus
cgtagagatcaacgtactgtcggga

SEQ ID NO: 163952 - DNA, 25 bp, SARS Virus
gtagagatcaacctactgtcgggag

SEQ ID NO: 163953 - DNA, 25 bp, SARS Virus
tagagatcaacgcactgtcgggaga

SEQ ID NO: 163954 - DNA, 25 bp, SARS Virus
agagatcaacgtcctgtcgggagat

SEQ ID NO: 163955 - DNA, 25 bp, SARS Virus
gagatcaacgtactgtcgggagatg

SEQ ID NO: 163956 - DNA, 25 bp, SARS Virus
agatcaacgtaccgtcgggagatgt

SEQ ID NO: 163957 - DNA, 25 bp, SARS Virus
gatcaacgtactctcgggagatgta

SEQ ID NO: 163958 - DNA, 25 bp, SARS Virus
atcaacgtactgccgggagatgtag

SEQ ID NO: 163959 - DNA, 25 bp, SARS Virus
tcaacgtactgtcgggagatgtagt

SEQ ID NO: 163960 - DNA, 25 bp, SARS Virus
caacgtactgtccggagatgtagtt

SEQ ID NO: 163961 - DNA, 25 bp, SARS Virus
aacgtactgtcgcgagatgtagttt

SEQ ID NO: 163962 - DNA, 25 bp, SARS Virus
acgtactgtcggcagatgtagtttc

SEQ ID NO: 163963 - DNA, 25 bp, SARS Virus
cgtactgtcgggcgatgtagtttcg

SEQ ID NO: 163964 - DNA, 25 bp, SARS Virus
gtactgtcgggacatgtagtttcgg

SEQ ID NO: 163965 - DNA, 25 bp, SARS Virus
tactgtcgggagctgtagtttcggt

SEQ ID NO: 163966 - DNA, 25 bp, SARS Virus
actgtcgggagacgtagtttcggtt

SEQ ID NO: 163967 - DNA, 25 bp, SARS Virus
ctgtcgggagatctagtttcggtta

SEQ ID NO: 163968 - DNA, 25 bp, SARS Virus
tgtcgggagatgcagtttcggttag

SEQ ID NO: 163969 - DNA, 25 bp, SARS Virus
gtcgggagatgtcgtttcggttagg

SEQ ID NO: 163970 - DNA, 25 bp, SARS Virus
tcgggagatgtactttcggttaggt

SEQ ID NO: 163971 - DNA, 25 bp, SARS Virus
cgggagatgtagcttcggttaggtg

SEQ ID NO: 163972 - DNA, 25 bp, SARS Virus
gggagatgtagtctcggttaggtgc

SEQ ID NO: 163973 - DNA, 25 bp, SARS Virus
ggagatgtagttccggttaggtgcg

SEQ ID NO: 163974 - DNA, 25 bp, SARS Virus
gagatgtagtttcggttaggtgcgt

SEQ ID NO: 163975 - DNA, 25 bp, SARS Virus
agatgtagtttccgttaggtgcgtg

SEQ ID NO: 163976 - DNA, 25 bp, SARS Virus
gatgtagtttcgcttaggtgcgtgc

SEQ ID NO: 163977 - DNA, 25 bp, SARS Virus
atgtagtttcggctaggtgcgtgct

SEQ ID NO: 163978 - DNA, 25 bp, SARS Virus
tgtagtttcggtcaggtgcgtgctt

SEQ ID NO: 163979 - DNA, 25 bp, SARS Virus
gtagtttcggttcggtgcgtgcttg

SEQ ID NO: 163980 - DNA, 25 bp, SARS Virus
tagtttcggttacgtgcgtgcttgc

SEQ ID NO: 163981 - DNA, 25 bp, SARS Virus
agtttcggttagctgcgtgcttgca

SEQ ID NO: 163982 - DNA, 25 bp, SARS Virus
gtttcggttaggcgcgtgcttgcac

SEQ ID NO: 163983 - DNA, 25 bp, SARS Virus
tttcggttaggtccgtgcttgcact

SEQ ID NO: 163984 - DNA, 25 bp, SARS Virus
ttcggttaggtgcgtgcttgcactg

SEQ ID NO: 163985 - DNA, 25 bp, SARS Virus
tcggttaggtgcctgcttgcactgc

SEQ ID NO: 163986 - DNA, 25 bp, SARS Virus
cggttaggtgcgcgcttgcactgct

SEQ ID NO: 163987 - DNA, 25 bp, SARS Virus
ggttaggtgcgtccttgcactgctt

SEQ ID NO: 163988 - DNA, 25 bp, SARS Virus
gttaggtgcgtgcttgcactgctta

SEQ ID NO: 163989 - DNA, 25 bp, SARS Virus
ttaggtgcgtgcctgcactgcttat

SEQ ID NO: 163990 - DNA, 25 bp, SARS Virus
taggtgcgtgctcgcactgcttatc

SEQ ID NO: 163991 - DNA, 25 bp, SARS Virus
aggtgcgtgcttccactgcttatcg

SEQ ID NO: 163992 - DNA, 25 bp, SARS Virus
ggtgcgtgcttgcactgcttatcga

SEQ ID NO: 163993 - DNA, 25 bp, SARS Virus
gtgcgtgcttgccctgcttatcgaa

SEQ ID NO: 163994 - DNA, 25 bp, SARS Virus
tgcgtgcttgcactgcttatcgaag

SEQ ID NO: 163995 - DNA, 25 bp, SARS Virus
gcgtgcttgcaccgcttatcgaaga

SEQ ID NO: 163996 - DNA, 25 bp, SARS Virus
cgtgcttgcactccttatcgaagaa

SEQ ID NO: 163997 - DNA, 25 bp, SARS Virus
gtgcttgcactgcttatcgaagaag

SEQ ID NO: 163998 - DNA, 25 bp, SARS Virus
tgcttgcactgcctatcgaagaagc

SEQ ID NO: 163999 - DNA, 25 bp, SARS Virus
gcttgcactgctcatcgaagaagcg

SEQ ID NO: 164000 - DNA, 25 bp, SARS Virus
cttgcactgcttctcgaagaagcgc

SEQ ID NO: 164001 - DNA, 25 bp, SARS Virus
acgacttgtagtgagtatttaccca

SEQ ID NO: 164002 - DNA, 25 bp, SARS Virus
cgacttgtagttggtatttacccaa

SEQ ID NO: 164003 - DNA, 25 bp, SARS Virus
gacttgtagttagtatttacccaat

SEQ ID NO: 164004 - DNA, 25 bp, SARS Virus
acttgtagttaggatttacccaata

SEQ ID NO: 164005 - DNA, 25 bp, SARS Virus
cttgtagttagtgtttacccaatat

SEQ ID NO: 164006 - DNA, 25 bp, SARS Virus
ttgtagttagtagttacccaatatc

SEQ ID NO: 164007 - DNA, 25 bp, SARS Virus
tgtagttagtatgtacccaatatct

SEQ ID NO: 164008 - DNA, 25 bp, SARS Virus
gtagttagtattgacccaatatctg

SEQ ID NO: 164009 - DNA, 25 bp, SARS Virus
tagttagtatttgcccaatatctgt

SEQ ID NO: 164010 - DNA, 25 bp, SARS Virus
agttagtatttagccaatatctgta

SEQ ID NO: 164011 - DNA, 25 bp, SARS Virus
gttagtatttacgcaatatctgtat

SEQ ID NO: 164012 - DNA, 25 bp, SARS Virus
ttagtatttaccgaatatctgtatc

SEQ ID NO: 164013 - DNA, 25 bp, SARS Virus
tagtatttacccgatatctgtatca

SEQ ID NO: 164014 - DNA, 25 bp, SARS Virus
agtatttacccagtatctgtatcag

SEQ ID NO: 164015 - DNA, 25 bp, SARS Virus
gtatttacccaagatctgtatcagt

SEQ ID NO: 164016 - DNA, 25 bp, SARS Virus
tatttacccaatgtctgtatcagtt

SEQ ID NO: 164017 - DNA, 25 bp, SARS Virus
atttacccaatagctgtatcagttt

SEQ ID NO: 164018 - DNA, 25 bp, SARS Virus
tttacccaatatgtgtatcagtttt

SEQ ID NO: 164019 - DNA, 25 bp, SARS Virus
ttacccaatatcggtatcagttttg

SEQ ID NO: 164020 - DNA, 25 bp, SARS Virus
tacccaatatctgtatcagttttgg

SEQ ID NO: 164021 - DNA, 25 bp, SARS Virus
acccaatatctggatcagttttggg

SEQ ID NO: 164022 - DNA, 25 bp, SARS Virus
cccaatatctgtgtcagttttgggt

SEQ ID NO: 164023 - DNA, 25 bp, SARS Virus
ccaatatctgtagcagttttgggtg

SEQ ID NO: 164024 - DNA, 25 bp, SARS Virus
caatatctgtatgagttttgggtgt

SEQ ID NO: 164025 - DNA, 25 bp, SARS Virus
aatatctgtatcggttttgggtgtc

SEQ ID NO: 164026 - DNA, 25 bp, SARS Virus
atatctgtatcagttttgggtgtct

SEQ ID NO: 164027 - DNA, 25 bp, SARS Virus
tatctgtatcaggtttgggtgtctt

SEQ ID NO: 164028 - DNA, 25 bp, SARS Virus
atctgtatcagtgttgggtgtctta

SEQ ID NO: 164029 - DNA, 25 bp, SARS Virus
tctgtatcagttgtgggtgtcttac

SEQ ID NO: 164030 - DNA, 25 bp, SARS Virus
ctgtatcagtttggggtgtcttact

SEQ ID NO: 164031 - DNA, 25 bp, SARS Virus
tgtatcagttttgggtgtcttacta

SEQ ID NO: 164032 - DNA, 25 bp, SARS Virus
gtatcagttttgggtgtcttactaa

SEQ ID NO: 164033 - DNA, 25 bp, SARS Virus
tatcagttttgggtgtcttactaag

SEQ ID NO: 164034 - DNA, 25 bp, SARS Virus
atcagttttgggggtcttactaagg

SEQ ID NO: 164035 - DNA, 25 bp, SARS Virus
tcagttttgggtgtcttactaaggt

SEQ ID NO: 164036 - DNA, 25 bp, SARS Virus
cagttttgggtggcttactaaggtc

SEQ ID NO: 164037 - DNA, 25 bp, SARS Virus
agttttgggtgtgttactaaggtcg

SEQ ID NO: 164038 - DNA, 25 bp, SARS Virus
gttttgggtgtcgtactaaggtcgt

SEQ ID NO: 164039 - DNA, 25 bp, SARS Virus
ttttgggtgtctgactaaggtcgtc

SEQ ID NO: 164040 - DNA, 25 bp, SARS Virus
tttgggtgtcttgctaaggtcgtcc

SEQ ID NO: 164041 - DNA, 25 bp, SARS Virus
ttgggtgtcttagtaaggtcgtccg

SEQ ID NO: 164042 - DNA, 25 bp, SARS Virus
tgggtgtcttacgaaggtcgtccgt

SEQ ID NO: 164043 - DNA, 25 bp, SARS Virus
gggtgtcttactgaggtcgtccgta

SEQ ID NO: 164044 - DNA, 25 bp, SARS Virus
ggtgtcttactagggtcgtccgtat

SEQ ID NO: 164045 - DNA, 25 bp, SARS Virus
gtgtcttactaaggtcgtccgtatt

SEQ ID NO: 164046 - DNA, 25 bp, SARS Virus
tgtcttactaaggtcgtccgtattc

SEQ ID NO: 164047 - DNA, 25 bp, SARS Virus
gtcttactaagggcgtccgtattca

SEQ ID NO: 164048 - DNA, 25 bp, SARS Virus
tcttactaaggtggtccgtattcat

SEQ ID NO: 164049 - DNA, 25 bp, SARS Virus
cttactaaggtcgtccgtattcata

SEQ ID NO: 164050 - DNA, 25 bp, SARS Virus
ttactaaggtcggccgtattcatag

SEQ ID NO: 164051 - DNA, 25 bp, SARS Virus
tactaaggtcgtgcgtattcataga

SEQ ID NO: 164052 - DNA, 25 bp, SARS Virus
actaaggtcgtcggtattcatagac

SEQ ID NO: 164053 - DNA, 25 bp, SARS Virus
ctaaggtcgtccgtattcatagact

SEQ ID NO: 164054 - DNA, 25 bp, SARS Virus
taaggtcgtccggattcatagacta

SEQ ID NO: 164055 - DNA, 25 bp, SARS Virus
aaggtcgtccgtgttcatagactac

SEQ ID NO: 164056 - DNA, 25 bp, SARS Virus
aggtcgtccgtagtcatagactact

SEQ ID NO: 164057 - DNA, 25 bp, SARS Virus
ggtcgtccgtatgcatagactactt

SEQ ID NO: 164058 - DNA, 25 bp, SARS Virus
gtcgtccgtattgatagactacttc

SEQ ID NO: 164059 - DNA, 25 bp, SARS Virus
tcgtccgtattcgtagactacttca

SEQ ID NO: 164060 - DNA, 25 bp, SARS Virus
cgtccgtattcagagactacttcat

SEQ ID NO: 164061 - DNA, 25 bp, SARS Virus
gtccgtattcatggactacttcatc

SEQ ID NO: 164062 - DNA, 25 bp, SARS Virus
tccgtattcatagactacttcatct

SEQ ID NO: 164063 - DNA, 25 bp, SARS Virus
ccgtattcataggctacttcatctt

SEQ ID NO: 164064 - DNA, 25 bp, SARS Virus
cgtattcatagagtacttcatcttt

SEQ ID NO: 164065 - DNA, 25 bp, SARS Virus
gtattcatagacgacttcatctttt

SEQ ID NO: 164066 - DNA, 25 bp, SARS Virus
tattcatagactgcttcatcttttc

SEQ ID NO: 164067 - DNA, 25 bp, SARS Virus
attcatagactagttcatcttttcg

SEQ ID NO: 164068 - DNA, 25 bp, SARS Virus
ttcatagactacgtcatcttttcgt

SEQ ID NO: 164069 - DNA, 25 bp, SARS Virus
tcatagactactgcatcttttcgtt

SEQ ID NO: 164070 - DNA, 25 bp, SARS Virus
catagactacttgatcttttcgttc

SEQ ID NO: 164071 - DNA, 25 bp, SARS Virus
atagactacttcgtcttttcgttca

SEQ ID NO: 164072 - DNA, 25 bp, SARS Virus
tagactacttcagcttttcgttcaa

SEQ ID NO: 164073 - DNA, 25 bp, SARS Virus
agactacttcatgttttcgttcaac

SEQ ID NO: 164074 - DNA, 25 bp, SARS Virus
gactacttcatcgtttcgttcaacg

SEQ ID NO: 164075 - DNA, 25 bp, SARS Virus
actacttcatctgttcgttcaacgt

SEQ ID NO: 164076 - DNA, 25 bp, SARS Virus
ctacttcatcttgtcgttcaacgtg

SEQ ID NO: 164077 - DNA, 25 bp, SARS Virus
tacttcatctttgcgttcaacgtgc

SEQ ID NO: 164078 - DNA, 25 bp, SARS Virus
acttcatcttttggttcaacgtgca

SEQ ID NO: 164079 - DNA, 25 bp, SARS Virus
cttcatcttttcgttcaacgtgcaa

SEQ ID NO: 164080 - DNA, 25 bp, SARS Virus
ttcatcttttcggtcaacgtgcaaa

SEQ ID NO: 164081 - DNA, 25 bp, SARS Virus
tcatcttttcgtgcaacgtgcaaac

SEQ ID NO: 164082 - DNA, 25 bp, SARS Virus
catcttttcgttgaacgtgcaaaca

SEQ ID NO: 164083 - DNA, 25 bp, SARS Virus
atcttttcgttcgacgtgcaaacag

SEQ ID NO: 164084 - DNA, 25 bp, SARS Virus
tcttttcgttcagcgtgcaaacagt

SEQ ID NO: 164085 - DNA, 25 bp, SARS Virus
cttttcgttcaaggtgcaaacagtg

SEQ ID NO: 164086 - DNA, 25 bp, SARS Virus
ttttcgttcaacgtgcaaacagtgt

SEQ ID NO: 164087 - DNA, 25 bp, SARS Virus
tttcgttcaacgggcaaacagtgtg

SEQ ID NO: 164088 - DNA, 25 bp, SARS Virus
ttcgttcaacgtgcaaacagtgtgt

SEQ ID NO: 164089 - DNA, 25 bp, SARS Virus
tcgttcaacgtggaaacagtgtgtc

SEQ ID NO: 164090 - DNA, 25 bp, SARS Virus
cgttcaacgtgcgaacagtgtgtct

SEQ ID NO: 164091 - DNA, 25 bp, SARS Virus
gttcaacgtgcagacagtgtgtctg

SEQ ID NO: 164092 - DNA, 25 bp, SARS Virus
ttcaacgtgcaagcagtgtgtctgt

SEQ ID NO: 164093 - DNA, 25 bp, SARS Virus
tcaacgtgcaaagagtgtgtctgtt

SEQ ID NO: 164094 - DNA, 25 bp, SARS Virus
caacgtgcaaacggtgtgtctgttg

SEQ ID NO: 164095 - DNA, 25 bp, SARS Virus
aacgtgcaaacagtgtgtctgttgt

SEQ ID NO: 164096 - DNA, 25 bp, SARS Virus
acgtgcaaacagggtgtctgttgtg

SEQ ID NO: 164097 - DNA, 25 bp, SARS Virus
cgtgcaaacagtgtgtctgttgtgc

SEQ ID NO: 164098 - DNA, 25 bp, SARS Virus
gtgcaaacagtgggtctgttgtgca

SEQ ID NO: 164099 - DNA, 25 bp, SARS Virus
tgcaaacagtgtgtctgttgtgcaa

SEQ ID NO: 164100 - DNA, 25 bp, SARS Virus
gcaaacagtgtggctgttgtgcaag

SEQ ID NO: 164101 - DNA, 25 bp, SARS Virus
caaacagtgtgtgtgttgtgcaaga

SEQ ID NO: 164102 - DNA, 25 bp, SARS Virus
aaacagtgtgtcggttgtgcaagaa

SEQ ID NO: 164103 - DNA, 25 bp, SARS Virus
aacagtgtgtctgttgtgcaagaaa

SEQ ID NO: 164104 - DNA, 25 bp, SARS Virus
acagtgtgtctggtgtgcaagaaag

SEQ ID NO: 164105 - DNA, 25 bp, SARS Virus
cagtgtgtctgtggtgcaagaaagt

SEQ ID NO: 164106 - DNA, 25 bp, SARS Virus
agtgtgtctgttgtgcaagaaagtc

SEQ ID NO: 164107 - DNA, 25 bp, SARS Virus
gtgtgtctgttgggcaagaaagtcc

SEQ ID NO: 164108 - DNA, 25 bp, SARS Virus
tgtgtctgttgtgcaagaaagtcca

SEQ ID NO: 164109 - DNA, 25 bp, SARS Virus
gtgtctgttgtggaagaaagtccag

SEQ ID NO: 164110 - DNA, 25 bp, SARS Virus
tgtctgttgtgcgagaaagtccagg

SEQ ID NO: 164111 - DNA, 25 bp, SARS Virus
gtctgttgtgcaggaaagtccaggt

SEQ ID NO: 164112 - DNA, 25 bp, SARS Virus
tctgttgtgcaagaaagtccaggtt

SEQ ID NO: 164113 - DNA, 25 bp, SARS Virus
ctgttgtgcaaggaagtccaggtta

SEQ ID NO: 164114 - DNA, 25 bp, SARS Virus
tgttgtgcaagagagtccaggttag

SEQ ID NO: 164115 - DNA, 25 bp, SARS Virus
gttgtgcaagaaggtccaggttaga

SEQ ID NO: 164116 - DNA, 25 bp, SARS Virus
ttgtgcaagaaagtccaggttagaa

SEQ ID NO: 164117 - DNA, 25 bp, SARS Virus
tgtgcaagaaaggccaggttagaac

SEQ ID NO: 164118 - DNA, 25 bp, SARS Virus
gtgcaagaaagtgcaggttagaact

SEQ ID NO: 164119 - DNA, 25 bp, SARS Virus
tgcaagaaagtcgaggttagaactg

SEQ ID NO: 164120 - DNA, 25 bp, SARS Virus
gcaagaaagtccgggttagaactgt

SEQ ID NO: 164121 - DNA, 25 bp, SARS Virus
caagaaagtccaggttagaactgtt

SEQ ID NO: 164122 - DNA, 25 bp, SARS Virus
aagaaagtccaggttagaactgttt

SEQ ID NO: 164123 - DNA, 25 bp, SARS Virus
agaaagtccagggtagaactgtttc

SEQ ID NO: 164124 - DNA, 25 bp, SARS Virus
gaaagtccaggtgagaactgtttca

SEQ ID NO: 164125 - DNA, 25 bp, SARS Virus
aaagtccaggttggaactgtttcat

SEQ ID NO: 164126 - DNA, 25 bp, SARS Virus
aagtccaggttagaactgtttcatg

SEQ ID NO: 164127 - DNA, 25 bp, SARS Virus
agtccaggttaggactgtttcatga

SEQ ID NO: 164128 - DNA, 25 bp, SARS Virus
gtccaggttagagctgtttcatgaa

SEQ ID NO: 164129 - DNA, 25 bp, SARS Virus
tccaggttagaagtgtttcatgaag

SEQ ID NO: 164130 - DNA, 25 bp, SARS Virus
ccaggttagaacggtttcatgaagt

SEQ ID NO: 164131 - DNA, 25 bp, SARS Virus
caggttagaactgtttcatgaagta

SEQ ID NO: 164132 - DNA, 25 bp, SARS Virus
aggttagaactggttcatgaagtaa

SEQ ID NO: 164133 - DNA, 25 bp, SARS Virus
ggttagaactgtgtcatgaagtaac

SEQ ID NO: 164134 - DNA, 25 bp, SARS Virus
gttagaactgttgcatgaagtaact

SEQ ID NO: 164135 - DNA, 25 bp, SARS Virus
ttagaactgtttgatgaagtaacta

SEQ ID NO: 164136 - DNA, 25 bp, SARS Virus
tagaactgtttcgtgaagtaactac

SEQ ID NO: 164137 - DNA, 25 bp, SARS Virus
agaactgtttcaggaagtaactaca

SEQ ID NO: 164138 - DNA, 25 bp, SARS Virus
gaactgtttcatgaagtaactacat

SEQ ID NO: 164139 - DNA, 25 bp, SARS Virus
aactgtttcatggagtaactacatt

SEQ ID NO: 164140 - DNA, 25 bp, SARS Virus
actgtttcatgaggtaactacattc

SEQ ID NO: 164141 - DNA, 25 bp, SARS Virus
ctgtttcatgaagtaactacattcg

SEQ ID NO: 164142 - DNA, 25 bp, SARS Virus
tgtttcatgaaggaactacattcga

SEQ ID NO: 164143 - DNA, 25 bp, SARS Virus
gtttcatgaagtgactacattcgag

SEQ ID NO: 164144 - DNA, 25 bp, SARS Virus
tttcatgaagtagctacattcgagt

SEQ ID NO: 164145 - DNA, 25 bp, SARS Virus
ttcatgaagtaagtacattcgagtt

SEQ ID NO: 164146 - DNA, 25 bp, SARS Virus
tcatgaagtaacgacattcgagttt

SEQ ID NO: 164147 - DNA, 25 bp, SARS Virus
catgaagtaactgcattcgagtttc

SEQ ID NO: 164148 - DNA, 25 bp, SARS Virus
atgaagtaactagattcgagtttcg

SEQ ID NO: 164149 - DNA, 25 bp, SARS Virus
tgaagtaactacgttcgagtttcgg

SEQ ID NO: 164150 - DNA, 25 bp, SARS Virus
gaagtaactacagtcgagtttcggt

SEQ ID NO: 164151 - DNA, 25 bp, SARS Virus
aagtaactacatgcgagtttcggta

SEQ ID NO: 164152 - DNA, 25 bp, SARS Virus
agtaactacattggagtttcggtac

SEQ ID NO: 164153 - DNA, 25 bp, SARS Virus
gtaactacattcgagtttcggtacg

SEQ ID NO: 164154 - DNA, 25 bp, SARS Virus
taactacattcgggtttcggtacgc

SEQ ID NO: 164155 - DNA, 25 bp, SARS Virus
aactacattcgagtttcggtacgcg

SEQ ID NO: 164156 - DNA, 25 bp, SARS Virus
actacattcgaggttcggtacgcgg

SEQ ID NO: 164157 - DNA, 25 bp, SARS Virus
ctacattcgagtgtcggtacgcggg

SEQ ID NO: 164158 - DNA, 25 bp, SARS Virus
tacattcgagttgcggtacgcgggt

SEQ ID NO: 164159 - DNA, 25 bp, SARS Virus
acattcgagtttgggtacgcgggtt

SEQ ID NO: 164160 - DNA, 25 bp, SARS Virus
cattcgagtttcggtacgcgggttt

SEQ ID NO: 164161 - DNA, 25 bp, SARS Virus
attcgagtttcggtacgcgggtttc

SEQ ID NO: 164162 - DNA, 25 bp, SARS Virus
ttcgagtttcgggacgcgggtttcc

SEQ ID NO: 164163 - DNA, 25 bp, SARS Virus
tcgagtttcggtgcgcgggtttcct

SEQ ID NO: 164164 - DNA, 25 bp, SARS Virus
cgagtttcggtaggcgggtttcctg

SEQ ID NO: 164165 - DNA, 25 bp, SARS Virus
gagtttcggtacgcgggtttcctgc

SEQ ID NO: 164166 - DNA, 25 bp, SARS Virus
agtttcggtacgggggtttcctgct

SEQ ID NO: 164167 - DNA, 25 bp, SARS Virus
gtttcggtacgcgggtttcctgctt

SEQ ID NO: 164168 - DNA, 25 bp, SARS Virus
tttcggtacgcgggtttcctgcttg

SEQ ID NO: 164169 - DNA, 25 bp, SARS Virus
ttcggtacgcgggtttcctgcttgt

SEQ ID NO: 164170 - DNA, 25 bp, SARS Virus
tcggtacgcggggttcctgcttgtg

SEQ ID NO: 164171 - DNA, 25 bp, SARS Virus
cggtacgcgggtgtcctgcttgtgc

SEQ ID NO: 164172 - DNA, 25 bp, SARS Virus
ggtacgcgggttgcctgcttgtgct

SEQ ID NO: 164173 - DNA, 25 bp, SARS Virus
gtacgcgggtttgctgcttgtgctg

SEQ ID NO: 164174 - DNA, 25 bp, SARS Virus
tacgcgggtttcgtgcttgtgctga

SEQ ID NO: 164175 - DNA, 25 bp, SARS Virus
acgcgggtttccggcttgtgctgag

SEQ ID NO: 164176 - DNA, 25 bp, SARS Virus
cgcgggtttcctgcttgtgctgaga

SEQ ID NO: 164177 - DNA, 25 bp, SARS Virus
gcgggtttcctggttgtgctgagac

SEQ ID NO: 164178 - DNA, 25 bp, SARS Virus
cgggtttcctgcgtgtgctgagaca

SEQ ID NO: 164179 - DNA, 25 bp, SARS Virus
gggtttcctgctggtgctgagacag

SEQ ID NO: 164180 - DNA, 25 bp, SARS Virus
ggtttcctgcttgtgctgagacaga

SEQ ID NO: 164181 - DNA, 25 bp, SARS Virus
gtttcctgcttgggctgagacagac

SEQ ID NO: 164182 - DNA, 25 bp, SARS Virus
tttcctgcttgtgctgagacagact

SEQ ID NO: 164183 - DNA, 25 bp, SARS Virus
ttcctgcttgtggtgagacagactg

SEQ ID NO: 164184 - DNA, 25 bp, SARS Virus
tcctgcttgtgcggagacagactgt

SEQ ID NO: 164185 - DNA, 25 bp, SARS Virus
cctgcttgtgctgagacagactgtt

SEQ ID NO: 164186 - DNA, 25 bp, SARS Virus
ctgcttgtgctgggacagactgtta

SEQ ID NO: 164187 - DNA, 25 bp, SARS Virus
tgcttgtgctgagacagactgttag

SEQ ID NO: 164188 - DNA, 25 bp, SARS Virus
gcttgtgctgaggcagactgttagg

SEQ ID NO: 164189 - DNA, 25 bp, SARS Virus
cttgtgctgagagagactgttagga

SEQ ID NO: 164190 - DNA, 25 bp, SARS Virus
ttgtgctgagacggactgttaggaa

SEQ ID NO: 164191 - DNA, 25 bp, SARS Virus
tgtgctgagacagactgttaggaaa

SEQ ID NO: 164192 - DNA, 25 bp, SARS Virus
gtgctgagacaggctgttaggaaag

SEQ ID NO: 164193 - DNA, 25 bp, SARS Virus
tgctgagacagagtgttaggaaagt

SEQ ID NO: 164194 - DNA, 25 bp, SARS Virus
gctgagacagacggttaggaaagtc

SEQ ID NO: 164195 - DNA, 25 bp, SARS Virus
ctgagacagactgttaggaaagtca

SEQ ID NO: 164196 - DNA, 25 bp, SARS Virus
tgagacagactggtaggaaagtcac

SEQ ID NO: 164197 - DNA, 25 bp, SARS Virus
gagacagactgtgaggaaagtcaca

SEQ ID NO: 164198 - DNA, 25 bp, SARS Virus
agacagactgttgggaaagtcacat

SEQ ID NO: 164199 - DNA, 25 bp, SARS Virus
gacagactgttaggaaagtcacata

SEQ ID NO: 164200 - DNA, 25 bp, SARS Virus
acagactgttaggaaagtcacatag

SEQ ID NO: 164201 - DNA, 25 bp, SARS Virus
cagactgttagggaagtcacatagt

SEQ ID NO: 164202 - DNA, 25 bp, SARS Virus
agactgttaggagagtcacatagtg

SEQ ID NO: 164203 - DNA, 25 bp, SARS Virus
gactgttaggaaggtcacatagtga

SEQ ID NO: 164204 - DNA, 25 bp, SARS Virus
actgttaggaaagtcacatagtgac

SEQ ID NO: 164205 - DNA, 25 bp, SARS Virus
ctgttaggaaaggcacatagtgact

SEQ ID NO: 164206 - DNA, 25 bp, SARS Virus
tgttaggaaagtgacatagtgactc

SEQ ID NO: 164207 - DNA, 25 bp, SARS Virus
gttaggaaagtcgcatagtgactcg

SEQ ID NO: 164208 - DNA, 25 bp, SARS Virus
ttaggaaagtcagatagtgactcgt

SEQ ID NO: 164209 - DNA, 25 bp, SARS Virus
taggaaagtcacgtagtgactcgta

SEQ ID NO: 164210 - DNA, 25 bp, SARS Virus
aggaaagtcacagagtgactcgtaa

SEQ ID NO: 164211 - DNA, 25 bp, SARS Virus
ggaaagtcacatggtgactcgtaaa

SEQ ID NO: 164212 - DNA, 25 bp, SARS Virus
gaaagtcacatagtgactcgtaaac

SEQ ID NO: 164213 - DNA, 25 bp, SARS Virus
aaagtcacatagggactcgtaaaca

SEQ ID NO: 164214 - DNA, 25 bp, SARS Virus
aagtcacatagtgactcgtaaacat

SEQ ID NO: 164215 - DNA, 25 bp, SARS Virus
agtcacatagtggctcgtaaacatg

SEQ ID NO: 164216 - DNA, 25 bp, SARS Virus
gtcacatagtgagtcgtaaacatga

SEQ ID NO: 164217 - DNA, 25 bp, SARS Virus
tcacatagtgacgcgtaaacatgat

SEQ ID NO: 164218 - DNA, 25 bp, SARS Virus
cacatagtgactggtaaacatgata

SEQ ID NO: 164219 - DNA, 25 bp, SARS Virus
acatagtgactcgtaaacatgatag

SEQ ID NO: 164220 - DNA, 25 bp, SARS Virus
catagtgactcggaaacatgataga

SEQ ID NO: 164221 - DNA, 25 bp, SARS Virus
atagtgactcgtgaacatgatagaa

SEQ ID NO: 164222 - DNA, 25 bp, SARS Virus
tagtgactcgtagacatgatagaat

SEQ ID NO: 164223 - DNA, 25 bp, SARS Virus
agtgactcgtaagcatgatagaatt

SEQ ID NO: 164224 - DNA, 25 bp, SARS Virus
gtgactcgtaaagatgatagaatta

SEQ ID NO: 164225 - DNA, 25 bp, SARS Virus
tgactcgtaaacgtgatagaattat

SEQ ID NO: 164226 - DNA, 25 bp, SARS Virus
gactcgtaaacaggatagaattatg

SEQ ID NO: 164227 - DNA, 25 bp, SARS Virus
actcgtaaacatgatagaattatgc

SEQ ID NO: 164228 - DNA, 25 bp, SARS Virus
ctcgtaaacatggtagaattatgcg

SEQ ID NO: 164229 - DNA, 25 bp, SARS Virus
tcgtaaacatgagagaattatgcgt

SEQ ID NO: 164230 - DNA, 25 bp, SARS Virus
cgtaaacatgatggaattatgcgtg

SEQ ID NO: 164231 - DNA, 25 bp, SARS Virus
gtaaacatgatagaattatgcgtga

SEQ ID NO: 164232 - DNA, 25 bp, SARS Virus
taaacatgataggattatgcgtgat

SEQ ID NO: 164233 - DNA, 25 bp, SARS Virus
aaacatgatagagttatgcgtgatg

SEQ ID NO: 164234 - DNA, 25 bp, SARS Virus
aacatgatagaagtatgcgtgatgt

SEQ ID NO: 164235 - DNA, 25 bp, SARS Virus
acatgatagaatgatgcgtgatgta

SEQ ID NO: 164236 - DNA, 25 bp, SARS Virus
catgatagaattgtgcgtgatgtaa

SEQ ID NO: 164237 - DNA, 25 bp, SARS Virus
atgatagaattaggcgtgatgtaag

SEQ ID NO: 164238 - DNA, 25 bp, SARS Virus
tgatagaattatgcgtgatgtaagg

SEQ ID NO: 164239 - DNA, 25 bp, SARS Virus
gatagaattatgggtgatgtaaggt

SEQ ID NO: 164240 - DNA, 25 bp, SARS Virus
atagaattatgcgtgatgtaaggtc

SEQ ID NO: 164241 - DNA, 25 bp, SARS Virus
tagaattatgcgggatgtaaggtcc

SEQ ID NO: 164242 - DNA, 25 bp, SARS Virus
agaattatgcgtgatgtaaggtccc

SEQ ID NO: 164243 - DNA, 25 bp, SARS Virus
gaattatgcgtggtgtaaggtcccg

SEQ ID NO: 164244 - DNA, 25 bp, SARS Virus
aattatgcgtgaggtaaggtcccgt

SEQ ID NO: 164245 - DNA, 25 bp, SARS Virus
attatgcgtgatgtaaggtcccgtt

SEQ ID NO: 164246 - DNA, 25 bp, SARS Virus
ttatgcgtgatggaaggtcccgttc

SEQ ID NO: 164247 - DNA, 25 bp, SARS Virus
tatgcgtgatgtgaggtcccgttcg

SEQ ID NO: 164248 - DNA, 25 bp, SARS Virus
atgcgtgatgtagggtcccgttcgg

SEQ ID NO: 164249 - DNA, 25 bp, SARS Virus
tgcgtgatgtaaggtcccgttcgga

SEQ ID NO: 164250 - DNA, 25 bp, SARS Virus
gcgtgatgtaaggtcccgttcggaa

SEQ ID NO: 164251 - DNA, 25 bp, SARS Virus
cgtgatgtaagggcccgttcggaaa

SEQ ID NO: 164252 - DNA, 25 bp, SARS Virus
gtgatgtaaggtgccgttcggaaat

SEQ ID NO: 164253 - DNA, 25 bp, SARS Virus
tgatgtaaggtcgcgttcggaaata

SEQ ID NO: 164254 - DNA, 25 bp, SARS Virus
gatgtaaggtccggttcggaaatat

SEQ ID NO: 164255 - DNA, 25 bp, SARS Virus
atgtaaggtcccgttcggaaatatg

SEQ ID NO: 164256 - DNA, 25 bp, SARS Virus
tgtaaggtcccggtcggaaatatgt

SEQ ID NO: 164257 - DNA, 25 bp, SARS Virus
gtaaggtcccgtgcggaaatatgta

SEQ ID NO: 164258 - DNA, 25 bp, SARS Virus
taaggtcccgttgggaaatatgtac

SEQ ID NO: 164259 - DNA, 25 bp, SARS Virus
aaggtcccgttcggaaatatgtact

SEQ ID NO: 164260 - DNA, 25 bp, SARS Virus
aggtcccgttcggaaatatgtactc

SEQ ID NO: 164261 - DNA, 25 bp, SARS Virus
ggtcccgttcgggaatatgtactca

SEQ ID NO: 164262 - DNA, 25 bp, SARS Virus
gtcccgttcggagatatgtactcac

SEQ ID NO: 164263 - DNA, 25 bp, SARS Virus
tcccgttcggaagtatgtactcacc

SEQ ID NO: 164264 - DNA, 25 bp, SARS Virus
cccgttcggaaagatgtactcacca

SEQ ID NO: 164265 - DNA, 25 bp, SARS Virus
ccgttcggaaatgtgtactcaccat

SEQ ID NO: 164266 - DNA, 25 bp, SARS Virus
cgttcggaaataggtactcaccata

SEQ ID NO: 164267 - DNA, 25 bp, SARS Virus
gttcggaaatatgtactcaccatat

SEQ ID NO: 164268 - DNA, 25 bp, SARS Virus
ttcggaaatatggactcaccatatt

SEQ ID NO: 164269 - DNA, 25 bp, SARS Virus
tcggaaatatgtgctcaccatattc

SEQ ID NO: 164270 - DNA, 25 bp, SARS Virus
cggaaatatgtagtcaccatattct

SEQ ID NO: 164271 - DNA, 25 bp, SARS Virus
ggaaatatgtacgcaccatattcta

SEQ ID NO: 164272 - DNA, 25 bp, SARS Virus
gaaatatgtactgaccatattctac

SEQ ID NO: 164273 - DNA, 25 bp, SARS Virus
aaatatgtactcgccatattctaca

SEQ ID NO: 164274 - DNA, 25 bp, SARS Virus
aatatgtactcagcatattctacaa

SEQ ID NO: 164275 - DNA, 25 bp, SARS Virus
atatgtactcacgatattctacaaa

SEQ ID NO: 164276 - DNA, 25 bp, SARS Virus
tatgtactcaccgtattctacaaat

SEQ ID NO: 164277 - DNA, 25 bp, SARS Virus
atgtactcaccagattctacaaatt

SEQ ID NO: 164278 - DNA, 25 bp, SARS Virus
tgtactcaccatgttctacaaattt

SEQ ID NO: 164279 - DNA, 25 bp, SARS Virus
gtactcaccatagtctacaaatttg

SEQ ID NO: 164280 - DNA, 25 bp, SARS Virus
tactcaccatatgctacaaatttga

SEQ ID NO: 164281 - DNA, 25 bp, SARS Virus
actcaccatattgtacaaatttgac

SEQ ID NO: 164282 - DNA, 25 bp, SARS Virus
ctcaccatattcgacaaatttgacc

SEQ ID NO: 164283 - DNA, 25 bp, SARS Virus
tcaccatattctgcaaatttgacca

SEQ ID NO: 164284 - DNA, 25 bp, SARS Virus
caccatattctagaaatttgaccag

SEQ ID NO: 164285 - DNA, 25 bp, SARS Virus
accatattctacgaatttgaccagt

SEQ ID NO: 164286 - DNA, 25 bp, SARS Virus
ccatattctacagatttgaccagtg

SEQ ID NO: 164287 - DNA, 25 bp, SARS Virus
catattctacaagtttgaccagtgg

SEQ ID NO: 164288 - DNA, 25 bp, SARS Virus
atattctacaaagttgaccagtgga

SEQ ID NO: 164289 - DNA, 25 bp, SARS Virus
tattctacaaatgtgaccagtggac

SEQ ID NO: 164290 - DNA, 25 bp, SARS Virus
attctacaaattggaccagtggacc

SEQ ID NO: 164291 - DNA, 25 bp, SARS Virus
ttctacaaatttgaccagtggacca

SEQ ID NO: 164292 - DNA, 25 bp, SARS Virus
tctacaaatttggccagtggaccac

SEQ ID NO: 164293 - DNA, 25 bp, SARS Virus
ctacaaatttgagcagtggaccacc

SEQ ID NO: 164294 - DNA, 25 bp, SARS Virus
tacaaatttgacgagtggaccacct

SEQ ID NO: 164295 - DNA, 25 bp, SARS Virus
acaaatttgaccggtggaccacctc

SEQ ID NO: 164296 - DNA, 25 bp, SARS Virus
caaatttgaccagtggaccacctcc

SEQ ID NO: 164297 - DNA, 25 bp, SARS Virus
aaatttgaccaggggaccacctcca

SEQ ID NO: 164298 - DNA, 25 bp, SARS Virus
aatttgaccagtggaccacctccaa

SEQ ID NO: 164299 - DNA, 25 bp, SARS Virus
atttgaccagtggaccacctccaaa

SEQ ID NO: 164300 - DNA, 25 bp, SARS Virus
tttgaccagtgggccacctccaaaa

SEQ ID NO: 164301 - DNA, 25 bp, SARS Virus
ttgaccagtggagcacctccaaaac

SEQ ID NO: 164302 - DNA, 25 bp, SARS Virus
tgaccagtggacgacctccaaaacg

SEQ ID NO: 164303 - DNA, 25 bp, SARS Virus
gaccagtggaccgcctccaaaacgt

SEQ ID NO: 164304 - DNA, 25 bp, SARS Virus
accagtggaccagctccaaaacgta

SEQ ID NO: 164305 - DNA, 25 bp, SARS Virus
ccagtggaccacgtccaaaacgtaa

SEQ ID NO: 164306 - DNA, 25 bp, SARS Virus
cagtggaccaccgccaaaacgtaat

SEQ ID NO: 164307 - DNA, 25 bp, SARS Virus
agtggaccacctgcaaaacgtaatt

SEQ ID NO: 164308 - DNA, 25 bp, SARS Virus
gtggaccacctcgaaaacgtaattg

SEQ ID NO: 164309 - DNA, 25 bp, SARS Virus
tggaccacctccgaaacgtaattga

SEQ ID NO: 164310 - DNA, 25 bp, SARS Virus
ggaccacctccagaacgtaattgag

SEQ ID NO: 164311 - DNA, 25 bp, SARS Virus
gaccacctccaagacgtaattgaga

SEQ ID NO: 164312 - DNA, 25 bp, SARS Virus
accacctccaaagcgtaattgagac

SEQ ID NO: 164313 - DNA, 25 bp, SARS Virus
ccacctccaaaaggtaattgagacc

SEQ ID NO: 164314 - DNA, 25 bp, SARS Virus
cacctccaaaacgtaattgagacca

SEQ ID NO: 164315 - DNA, 25 bp, SARS Virus
acctccaaaacggaattgagaccac

SEQ ID NO: 164316 - DNA, 25 bp, SARS Virus
cctccaaaacgtgattgagaccact

SEQ ID NO: 164317 - DNA, 25 bp, SARS Virus
ctccaaaacgtagttgagaccactt

SEQ ID NO: 164318 - DNA, 25 bp, SARS Virus
tccaaaacgtaagtgagaccactta

SEQ ID NO: 164319 - DNA, 25 bp, SARS Virus
ccaaaacgtaatggagaccacttaa

SEQ ID NO: 164320 - DNA, 25 bp, SARS Virus
caaaacgtaattgagaccacttaag

SEQ ID NO: 164321 - DNA, 25 bp, SARS Virus
aaaacgtaattgggaccacttaaga

SEQ ID NO: 164322 - DNA, 25 bp, SARS Virus
aaacgtaattgagaccacttaagac

SEQ ID NO: 164323 - DNA, 25 bp, SARS Virus
aacgtaattgaggccacttaagaca

SEQ ID NO: 164324 - DNA, 25 bp, SARS Virus
acgtaattgagagcacttaagacac

SEQ ID NO: 164325 - DNA, 25 bp, SARS Virus
cgtaattgagacgacttaagacaca

SEQ ID NO: 164326 - DNA, 25 bp, SARS Virus
gtaattgagaccgcttaagacacaa

SEQ ID NO: 164327 - DNA, 25 bp, SARS Virus
taattgagaccagttaagacacaat

SEQ ID NO: 164328 - DNA, 25 bp, SARS Virus
aattgagaccacgtaagacacaata

SEQ ID NO: 164329 - DNA, 25 bp, SARS Virus
attgagaccactgaagacacaataa

SEQ ID NO: 164330 - DNA, 25 bp, SARS Virus
ttgagaccacttgagacacaataaa

SEQ ID NO: 164331 - DNA, 25 bp, SARS Virus
tgagaccacttaggacacaataaaa

SEQ ID NO: 164332 - DNA, 25 bp, SARS Virus
gagaccacttaagacacaataaaag

SEQ ID NO: 164333 - DNA, 25 bp, SARS Virus
agaccacttaaggcacaataaaagt

SEQ ID NO: 164334 - DNA, 25 bp, SARS Virus
gaccacttaagagacaataaaagtc

SEQ ID NO: 164335 - DNA, 25 bp, SARS Virus
accacttaagacgcaataaaagtca

SEQ ID NO: 164336 - DNA, 25 bp, SARS Virus
ccacttaagacagaataaaagtcac

SEQ ID NO: 164337 - DNA, 25 bp, SARS Virus
cacttaagacacgataaaagtcaca

SEQ ID NO: 164338 - DNA, 25 bp, SARS Virus
acttaagacacagtaaaagtcacag

SEQ ID NO: 164339 - DNA, 25 bp, SARS Virus
cttaagacacaagaaaagtcacagt

SEQ ID NO: 164340 - DNA, 25 bp, SARS Virus
ttaagacacaatgaaagtcacagtt

SEQ ID NO: 164341 - DNA, 25 bp, SARS Virus
taagacacaatagaagtcacagttg

SEQ ID NO: 164342 - DNA, 25 bp, SARS Virus
aagacacaataagagtcacagttgt

SEQ ID NO: 164343 - DNA, 25 bp, SARS Virus
agacacaataaaggtcacagttgta

SEQ ID NO: 164344 - DNA, 25 bp, SARS Virus
gacacaataaaagtcacagttgtat

SEQ ID NO: 164345 - DNA, 25 bp, SARS Virus
acacaataaaaggcacagttgtatt

SEQ ID NO: 164346 - DNA, 25 bp, SARS Virus
cacaataaaagtgacagttgtattg

SEQ ID NO: 164347 - DNA, 25 bp, SARS Virus
acaataaaagtcgcagttgtattgg

SEQ ID NO: 164348 - DNA, 25 bp, SARS Virus
caataaaagtcagagttgtattggt

SEQ ID NO: 164349 - DNA, 25 bp, SARS Virus
aataaaagtcacggttgtattggtc

SEQ ID NO: 164350 - DNA, 25 bp, SARS Virus
ataaaagtcacagttgtattggtca

SEQ ID NO: 164351 - DNA, 25 bp, SARS Virus
taaaagtcacaggtgtattggtcag

SEQ ID NO: 164352 - DNA, 25 bp, SARS Virus
aaaagtcacagtggtattggtcagc

SEQ ID NO: 164353 - DNA, 25 bp, SARS Virus
aaagtcacagttgtattggtcagcc

SEQ ID NO: 164354 - DNA, 25 bp, SARS Virus
aagtcacagttggattggtcagcca

SEQ ID NO: 164355 - DNA, 25 bp, SARS Virus
agtcacagttgtgttggtcagccat

SEQ ID NO: 164356 - DNA, 25 bp, SARS Virus
gtcacagttgtagtggtcagccatg

SEQ ID NO: 164357 - DNA, 25 bp, SARS Virus
tcacagttgtatgggtcagccatgt

SEQ ID NO: 164358 - DNA, 25 bp, SARS Virus
cacagttgtattggtcagccatgtc

SEQ ID NO: 164359 - DNA, 25 bp, SARS Virus
acagttgtattggtcagccatgtcg

SEQ ID NO: 164360 - DNA, 25 bp, SARS Virus
cagttgtattgggcagccatgtcga

SEQ ID NO: 164361 - DNA, 25 bp, SARS Virus
agttgtattggtgagccatgtcgat

SEQ ID NO: 164362 - DNA, 25 bp, SARS Virus
gttgtattggtcggccatgtcgatg

SEQ ID NO: 164363 - DNA, 25 bp, SARS Virus
ttgtattggtcagccatgtcgatga

SEQ ID NO: 164364 - DNA, 25 bp, SARS Virus
tgtattggtcaggcatgtcgatgat

SEQ ID NO: 164365 - DNA, 25 bp, SARS Virus
gtattggtcagcgatgtcgatgatt

SEQ ID NO: 164366 - DNA, 25 bp, SARS Virus
tattggtcagccgtgtcgatgattc

SEQ ID NO: 164367 - DNA, 25 bp, SARS Virus
attggtcagccaggtcgatgattca

SEQ ID NO: 164368 - DNA, 25 bp, SARS Virus
ttggtcagccatgtcgatgattcaa

SEQ ID NO: 164369 - DNA, 25 bp, SARS Virus
tggtcagccatggcgatgattcaat

SEQ ID NO: 164370 - DNA, 25 bp, SARS Virus
ggtcagccatgtggatgattcaatt

SEQ ID NO: 164371 - DNA, 25 bp, SARS Virus
gtcagccatgtcgatgattcaattg

SEQ ID NO: 164372 - DNA, 25 bp, SARS Virus
tcagccatgtcggtgattcaattgt

SEQ ID NO: 164373 - DNA, 25 bp, SARS Virus
cagccatgtcgaggattcaattgtg

SEQ ID NO: 164374 - DNA, 25 bp, SARS Virus
agccatgtcgatgattcaattgtgg

SEQ ID NO: 164375 - DNA, 25 bp, SARS Virus
gccatgtcgatggttcaattgtgga

SEQ ID NO: 164376 - DNA, 25 bp, SARS Virus
ccatgtcgatgagtcaattgtggac

SEQ ID NO: 164377 - DNA, 25 bp, SARS Virus
catgtcgatgatgcaattgtggaca

SEQ ID NO: 164378 - DNA, 25 bp, SARS Virus
atgtcgatgattgaattgtggacat

SEQ ID NO: 164379 - DNA, 25 bp, SARS Virus
tgtcgatgattcgattgtggacatc

SEQ ID NO: 164380 - DNA, 25 bp, SARS Virus
gtcgatgattcagttgtggacatct

SEQ ID NO: 164381 - DNA, 25 bp, SARS Virus
tcgatgattcaagtgtggacatctt

SEQ ID NO: 164382 - DNA, 25 bp, SARS Virus
cgatgattcaatggtggacatcttt

SEQ ID NO: 164383 - DNA, 25 bp, SARS Virus
gatgattcaattgtggacatctttt

SEQ ID NO: 164384 - DNA, 25 bp, SARS Virus
atgattcaattggggacatctttta

SEQ ID NO: 164385 - DNA, 25 bp, SARS Virus
tgattcaattgtggacatcttttag

SEQ ID NO: 164386 - DNA, 25 bp, SARS Virus
gattcaattgtggacatcttttagg

SEQ ID NO: 164387 - DNA, 25 bp, SARS Virus
attcaattgtgggcatcttttagga

SEQ ID NO: 164388 - DNA, 25 bp, SARS Virus
ttcaattgtggagatcttttaggat

SEQ ID NO: 164389 - DNA, 25 bp, SARS Virus
tcaattgtggacgtcttttaggatc

SEQ ID NO: 164390 - DNA, 25 bp, SARS Virus
caattgtggacagcttttaggatcg

SEQ ID NO: 164391 - DNA, 25 bp, SARS Virus
aattgtggacatgttttaggatcga

SEQ ID NO: 164392 - DNA, 25 bp, SARS Virus
attgtggacatcgtttaggatcgac

SEQ ID NO: 164393 - DNA, 25 bp, SARS Virus
ttgtggacatctgttaggatcgacc

SEQ ID NO: 164394 - DNA, 25 bp, SARS Virus
tgtggacatcttgtaggatcgacct

SEQ ID NO: 164395 - DNA, 25 bp, SARS Virus
gtggacatctttgaggatcgacctc

SEQ ID NO: 164396 - DNA, 25 bp, SARS Virus
tggacatcttttgggatcgacctct

SEQ ID NO: 164397 - DNA, 25 bp, SARS Virus
ggacatcttttaggatcgacctctc

SEQ ID NO: 164398 - DNA, 25 bp, SARS Virus
gacatcttttaggatcgacctctcc

SEQ ID NO: 164399 - DNA, 25 bp, SARS Virus
acatcttttagggtcgacctctcca

SEQ ID NO: 164400 - DNA, 25 bp, SARS Virus
catcttttaggagcgacctctccat

SEQ ID NO: 164401 - DNA, 25 bp, SARS Virus
atcttttaggatggacctctccatc

SEQ ID NO: 164402 - DNA, 25 bp, SARS Virus
tcttttaggatcgacctctccatcc

SEQ ID NO: 164403 - DNA, 25 bp, SARS Virus
cttttaggatcggcctctccatcca

SEQ ID NO: 164404 - DNA, 25 bp, SARS Virus
ttttaggatcgagctctccatccaa

SEQ ID NO: 164405 - DNA, 25 bp, SARS Virus
tttaggatcgacgtctccatccaat

SEQ ID NO: 164406 - DNA, 25 bp, SARS Virus
ttaggatcgaccgctccatccaatc

SEQ ID NO: 164407 - DNA, 25 bp, SARS Virus
taggatcgacctgtccatccaatca

SEQ ID NO: 164408 - DNA, 25 bp, SARS Virus
aggatcgacctcgccatccaatcat

SEQ ID NO: 164409 - DNA, 25 bp, SARS Virus
ggatcgacctctgcatccaatcatg

SEQ ID NO: 164410 - DNA, 25 bp, SARS Virus
gatcgacctctcgatccaatcatgg

SEQ ID NO: 164411 - DNA, 25 bp, SARS Virus
atcgacctctccgtccaatcatggg

SEQ ID NO: 164412 - DNA, 25 bp, SARS Virus
tcgacctctccagccaatcatgggt

SEQ ID NO: 164413 - DNA, 25 bp, SARS Virus
cgacctctccatgcaatcatgggtg

SEQ ID NO: 164414 - DNA, 25 bp, SARS Virus
gacctctccatcgaatcatgggtgt

SEQ ID NO: 164415 - DNA, 25 bp, SARS Virus
acctctccatccgatcatgggtgtc

SEQ ID NO: 164416 - DNA, 25 bp, SARS Virus
cctctccatccagtcatgggtgtcg

SEQ ID NO: 164417 - DNA, 25 bp, SARS Virus
ctctccatccaagcatgggtgtcgt

SEQ ID NO: 164418 - DNA, 25 bp, SARS Virus
tctccatccaatgatgggtgtcgta

SEQ ID NO: 164419 - DNA, 25 bp, SARS Virus
ctccatccaatcgtgggtgtcgtag

SEQ ID NO: 164420 - DNA, 25 bp, SARS Virus
tccatccaatcaggggtgtcgtaga

SEQ ID NO: 164421 - DNA, 25 bp, SARS Virus
ccatccaatcatgggtgtcgtagag

SEQ ID NO: 164422 - DNA, 25 bp, SARS Virus
catccaatcatgggtgtcgtagaga

SEQ ID NO: 164423 - DNA, 25 bp, SARS Virus
atccaatcatgggtgtcgtagagat

SEQ ID NO: 164424 - DNA, 25 bp, SARS Virus
tccaatcatgggggtcgtagagatc

SEQ ID NO: 164425 - DNA, 25 bp, SARS Virus
ccaatcatgggtgtcgtagagatca

SEQ ID NO: 164426 - DNA, 25 bp, SARS Virus
caatcatgggtggcgtagagatcaa

SEQ ID NO: 164427 - DNA, 25 bp, SARS Virus
aatcatgggtgtggtagagatcaac

SEQ ID NO: 164428 - DNA, 25 bp, SARS Virus
atcatgggtgtcgtagagatcaacg

SEQ ID NO: 164429 - DNA, 25 bp, SARS Virus
tcatgggtgtcggagagatcaacgt

SEQ ID NO: 164430 - DNA, 25 bp, SARS Virus
catgggtgtcgtggagatcaacgta

SEQ ID NO: 164431 - DNA, 25 bp, SARS Virus
atgggtgtcgtagagatcaacgtac

SEQ ID NO: 164432 - DNA, 25 bp, SARS Virus
tgggtgtcgtagggatcaacgtact

SEQ ID NO: 164433 - DNA, 25 bp, SARS Virus
gggtgtcgtagagatcaacgtactg

SEQ ID NO: 164434 - DNA, 25 bp, SARS Virus
ggtgtcgtagaggtcaacgtactgt

SEQ ID NO: 164435 - DNA, 25 bp, SARS Virus
gtgtcgtagagagcaacgtactgtc

SEQ ID NO: 164436 - DNA, 25 bp, SARS Virus
tgtcgtagagatgaacgtactgtcg

SEQ ID NO: 164437 - DNA, 25 bp, SARS Virus
gtcgtagagatcgacgtactgtcgg

SEQ ID NO: 164438 - DNA, 25 bp, SARS Virus
tcgtagagatcagcgtactgtcggg

SEQ ID NO: 164439 - DNA, 25 bp, SARS Virus
cgtagagatcaaggtactgtcggga

SEQ ID NO: 164440 - DNA, 25 bp, SARS Virus
gtagagatcaacgtactgtcgggag

SEQ ID NO: 164441 - DNA, 25 bp, SARS Virus
tagagatcaacggactgtcgggaga

SEQ ID NO: 164442 - DNA, 25 bp, SARS Virus
agagatcaacgtgctgtcgggagat

SEQ ID NO: 164443 - DNA, 25 bp, SARS Virus
gagatcaacgtagtgtcgggagatg

SEQ ID NO: 164444 - DNA, 25 bp, SARS Virus
agatcaacgtacggtcgggagatgt

SEQ ID NO: 164445 - DNA, 25 bp, SARS Virus
gatcaacgtactgtcgggagatgta

SEQ ID NO: 164446 - DNA, 25 bp, SARS Virus
atcaacgtactggcgggagatgtag

SEQ ID NO: 164447 - DNA, 25 bp, SARS Virus
tcaacgtactgtggggagatgtagt

SEQ ID NO: 164448 - DNA, 25 bp, SARS Virus
caacgtactgtcgggagatgtagtt

SEQ ID NO: 164449 - DNA, 25 bp, SARS Virus
aacgtactgtcgggagatgtagttt

SEQ ID NO: 164450 - DNA, 25 bp, SARS Virus
acgtactgtcgggagatgtagtttc

SEQ ID NO: 164451 - DNA, 25 bp, SARS Virus
cgtactgtcgggggatgtagtttcg

SEQ ID NO: 164452 - DNA, 25 bp, SARS Virus
gtactgtcgggagatgtagtttcgg

SEQ ID NO: 164453 - DNA, 25 bp, SARS Virus
tactgtcgggaggtgtagtttcggt

SEQ ID NO: 164454 - DNA, 25 bp, SARS Virus
actgtcgggagaggtagtttcggtt

SEQ ID NO: 164455 - DNA, 25 bp, SARS Virus
ctgtcgggagatgtagtttcggtta

SEQ ID NO: 164456 - DNA, 25 bp, SARS Virus
tgtcgggagatggagtttcggttag

SEQ ID NO: 164457 - DNA, 25 bp, SARS Virus
gtcgggagatgtggtttcggttagg

SEQ ID NO: 164458 - DNA, 25 bp, SARS Virus
tcgggagatgtagtttcggttaggt

SEQ ID NO: 164459 - DNA, 25 bp, SARS Virus
cgggagatgtaggttcggttaggtg

SEQ ID NO: 164460 - DNA, 25 bp, SARS Virus
gggagatgtagtgtcggttaggtgc

SEQ ID NO: 164461 - DNA, 25 bp, SARS Virus
ggagatgtagttgcggttaggtgcg

SEQ ID NO: 164462 - DNA, 25 bp, SARS Virus
gagatgtagtttgggttaggtgcgt

SEQ ID NO: 164463 - DNA, 25 bp, SARS Virus
agatgtagtttcggttaggtgcgtg

SEQ ID NO: 164464 - DNA, 25 bp, SARS Virus
gatgtagtttcggttaggtgcgtgc

SEQ ID NO: 164465 - DNA, 25 bp, SARS Virus
atgtagtttcgggtaggtgcgtgct

SEQ ID NO: 164466 - DNA, 25 bp, SARS Virus
tgtagtttcggtgaggtgcgtgctt

SEQ ID NO: 164467 - DNA, 25 bp, SARS Virus
gtagtttcggttgggtgcgtgcttg

SEQ ID NO: 164468 - DNA, 25 bp, SARS Virus
tagtttcggttaggtgcgtgcttgc

SEQ ID NO: 164469 - DNA, 25 bp, SARS Virus
agtttcggttaggtgcgtgcttgca

SEQ ID NO: 164470 - DNA, 25 bp, SARS Virus
gtttcggttaggggcgtgcttgcac

SEQ ID NO: 164471 - DNA, 25 bp, SARS Virus
tttcggttaggtgcgtgcttgcact

SEQ ID NO: 164472 - DNA, 25 bp, SARS Virus
ttcggttaggtgggtgcttgcactg

SEQ ID NO: 164473 - DNA, 25 bp, SARS Virus
tcggttaggtgcgtgcttgcactgc

SEQ ID NO: 164474 - DNA, 25 bp, SARS Virus
cggttaggtgcgggcttgcactgct

SEQ ID NO: 164475 - DNA, 25 bp, SARS Virus
ggttaggtgcgtgcttgcactgctt

SEQ ID NO: 164476 - DNA, 25 bp, SARS Virus
gttaggtgcgtggttgcactgctta

SEQ ID NO: 164477 - DNA, 25 bp, SARS Virus
ttaggtgcgtgcgtgcactgcttat

SEQ ID NO: 164478 - DNA, 25 bp, SARS Virus
taggtgcgtgctggcactgcttatc

SEQ ID NO: 164479 - DNA, 25 bp, SARS Virus
aggtgcgtgcttgcactgcttatcg

SEQ ID NO: 164480 - DNA, 25 bp, SARS Virus
ggtgcgtgcttggactgcttatcga

SEQ ID NO: 164481 - DNA, 25 bp, SARS Virus
gtgcgtgcttgcgctgcttatcgaa

SEQ ID NO: 164482 - DNA, 25 bp, SARS Virus
tgcgtgcttgcagtgcttatcgaag

SEQ ID NO: 164483 - DNA, 25 bp, SARS Virus
gcgtgcttgcacggcttatcgaaga

SEQ ID NO: 164484 - DNA, 25 bp, SARS Virus
cgtgcttgcactgcttatcgaagaa

SEQ ID NO: 164485 - DNA, 25 bp, SARS Virus
gtgcttgcactggttatcgaagaag

SEQ ID NO: 164486 - DNA, 25 bp, SARS Virus
tgcttgcactgcgtatcgaagaagc

SEQ ID NO: 164487 - DNA, 25 bp, SARS Virus
gcttgcactgctgatcgaagaagcg

SEQ ID NO: 164488 - DNA, 25 bp, SARS Virus
cttgcactgcttgtcgaagaagcgc

SEQ ID NO: 164489 - DNA, 25 bp, SARS Virus
acgacttgtagttagtatttaccca

SEQ ID NO: 164490 - DNA, 25 bp, SARS Virus
cgacttgtagtttgtatttacccaa

SEQ ID NO: 164491 - DNA, 25 bp, SARS Virus
gacttgtagttattatttacccaat

SEQ ID NO: 164492 - DNA, 25 bp, SARS Virus
acttgtagttagtatttacccaata

SEQ ID NO: 164493 - DNA, 25 bp, SARS Virus
cttgtagttagtttttacccaatat

SEQ ID NO: 164494 - DNA, 25 bp, SARS Virus
ttgtagttagtatttacccaatatc

SEQ ID NO: 164495 - DNA, 25 bp, SARS Virus
tgtagttagtatttacccaatatct

SEQ ID NO: 164496 - DNA, 25 bp, SARS Virus
gtagttagtatttacccaatatctg

SEQ ID NO: 164497 - DNA, 25 bp, SARS Virus
tagttagtattttcccaatatctgt

SEQ ID NO: 164498 - DNA, 25 bp, SARS Virus
agttagtatttatccaatatctgta

SEQ ID NO: 164499 - DNA, 25 bp, SARS Virus
gttagtatttactcaatatctgtat

SEQ ID NO: 164500 - DNA, 25 bp, SARS Virus
ttagtatttacctaatatctgtatc

SEQ ID NO: 164501 - DNA, 25 bp, SARS Virus
tagtatttaccctatatctgtatca

SEQ ID NO: 164502 - DNA, 25 bp, SARS Virus
agtatttacccattatctgtatcag

SEQ ID NO: 164503 - DNA, 25 bp, SARS Virus
gtatttacccaatatctgtatcagt

SEQ ID NO: 164504 - DNA, 25 bp, SARS Virus
tatttacccaatttctgtatcagtt

SEQ ID NO: 164505 - DNA, 25 bp, SARS Virus
atttacccaatatctgtatcagttt

SEQ ID NO: 164506 - DNA, 25 bp, SARS Virus
tttacccaatatttgtatcagtttt

SEQ ID NO: 164507 - DNA, 25 bp, SARS Virus
ttacccaatatctgtatcagttttg

SEQ ID NO: 164508 - DNA, 25 bp, SARS Virus
tacccaatatctttatcagttttgg

SEQ ID NO: 164509 - DNA, 25 bp, SARS Virus
acccaatatctgtatcagttttggg

SEQ ID NO: 164510 - DNA, 25 bp, SARS Virus
cccaatatctgtttcagttttgggt

SEQ ID NO: 164511 - DNA, 25 bp, SARS Virus
ccaatatctgtatcagttttgggtg

SEQ ID NO: 164512 - DNA, 25 bp, SARS Virus
caatatctgtattagttttgggtgt

SEQ ID NO: 164513 - DNA, 25 bp, SARS Virus
aatatctgtatctgttttgggtgtc

SEQ ID NO: 164514 - DNA, 25 bp, SARS Virus
atatctgtatcatttttgggtgtct

SEQ ID NO: 164515 - DNA, 25 bp, SARS Virus
tatctgtatcagttttgggtgtctt

SEQ ID NO: 164516 - DNA, 25 bp, SARS Virus
atctgtatcagttttgggtgtctta

SEQ ID NO: 164517 - DNA, 25 bp, SARS Virus
tctgtatcagttttgggtgtcttac

SEQ ID NO: 164518 - DNA, 25 bp, SARS Virus
ctgtatcagttttgggtgtcttact

SEQ ID NO: 164519 - DNA, 25 bp, SARS Virus
tgtatcagtttttggtgtcttacta

SEQ ID NO: 164520 - DNA, 25 bp, SARS Virus
gtatcagttttgtgtgtcttactaa

SEQ ID NO: 164521 - DNA, 25 bp, SARS Virus
tatcagttttggttgtcttactaag

SEQ ID NO: 164522 - DNA, 25 bp, SARS Virus
atcagttttgggtgtcttactaagg

SEQ ID NO: 164523 - DNA, 25 bp, SARS Virus
tcagttttgggtttcttactaaggt

SEQ ID NO: 164524 - DNA, 25 bp, SARS Virus
cagttttgggtgtcttactaaggtc

SEQ ID NO: 164525 - DNA, 25 bp, SARS Virus
agttttgggtgttttactaaggtcg

SEQ ID NO: 164526 - DNA, 25 bp, SARS Virus
gttttgggtgtcttactaaggtcgt

SEQ ID NO: 164527 - DNA, 25 bp, SARS Virus
ttttgggtgtcttactaaggtcgtc

SEQ ID NO: 164528 - DNA, 25 bp, SARS Virus
tttgggtgtctttctaaggtcgtcc

SEQ ID NO: 164529 - DNA, 25 bp, SARS Virus
ttgggtgtcttattaaggtcgtccg

SEQ ID NO: 164530 - DNA, 25 bp, SARS Virus
tgggtgtcttactaaggtcgtccgt

SEQ ID NO: 164531 - DNA, 25 bp, SARS Virus
gggtgtcttacttaggtcgtccgta

SEQ ID NO: 164532 - DNA, 25 bp, SARS Virus
ggtgtcttactatggtcgtccgtat

SEQ ID NO: 164533 - DNA, 25 bp, SARS Virus
gtgtcttactaatgtcgtccgtatt

SEQ ID NO: 164534 - DNA, 25 bp, SARS Virus
tgtcttactaagttcgtccgtattc

SEQ ID NO: 164535 - DNA, 25 bp, SARS Virus
gtcttactaaggtcgtccgtattca

SEQ ID NO: 164536 - DNA, 25 bp, SARS Virus
tcttactaaggttgtccgtattcat

SEQ ID NO: 164537 - DNA, 25 bp, SARS Virus
cttactaaggtcttccgtattcata

SEQ ID NO: 164538 - DNA, 25 bp, SARS Virus
ttactaaggtcgtccgtattcatag

SEQ ID NO: 164539 - DNA, 25 bp, SARS Virus
tactaaggtcgttcgtattcataga

SEQ ID NO: 164540 - DNA, 25 bp, SARS Virus
actaaggtcgtctgtattcatagac

SEQ ID NO: 164541 - DNA, 25 bp, SARS Virus
ctaaggtcgtccttattcatagact

SEQ ID NO: 164542 - DNA, 25 bp, SARS Virus
taaggtcgtccgtattcatagacta

SEQ ID NO: 164543 - DNA, 25 bp, SARS Virus
aaggtcgtccgttttcatagactac

SEQ ID NO: 164544 - DNA, 25 bp, SARS Virus
aggtcgtccgtattcatagactact

SEQ ID NO: 164545 - DNA, 25 bp, SARS Virus
ggtcgtccgtattcatagactactt

SEQ ID NO: 164546 - DNA, 25 bp, SARS Virus
gtcgtccgtatttatagactacttc

SEQ ID NO: 164547 - DNA, 25 bp, SARS Virus
tcgtccgtattcttagactacttca

SEQ ID NO: 164548 - DNA, 25 bp, SARS Virus
cgtccgtattcatagactacttcat

SEQ ID NO: 164549 - DNA, 25 bp, SARS Virus
gtccgtattcattgactacttcatc

SEQ ID NO: 164550 - DNA, 25 bp, SARS Virus
tccgtattcatatactacttcatct

SEQ ID NO: 164551 - DNA, 25 bp, SARS Virus
ccgtattcatagtctacttcatctt

SEQ ID NO: 164552 - DNA, 25 bp, SARS Virus
cgtattcatagattacttcatcttt

SEQ ID NO: 164553 - DNA, 25 bp, SARS Virus
gtattcatagactacttcatctttt

SEQ ID NO: 164554 - DNA, 25 bp, SARS Virus
tattcatagacttcttcatcttttc

SEQ ID NO: 164555 - DNA, 25 bp, SARS Virus
attcatagactatttcatcttttcg

SEQ ID NO: 164556 - DNA, 25 bp, SARS Virus
ttcatagactacttcatcttttcgt

SEQ ID NO: 164557 - DNA, 25 bp, SARS Virus
tcatagactacttcatcttttcgtt

SEQ ID NO: 164558 - DNA, 25 bp, SARS Virus
catagactactttatcttttcgttc

SEQ ID NO: 164559 - DNA, 25 bp, SARS Virus
atagactacttcttcttttcgttca

SEQ ID NO: 164560 - DNA, 25 bp, SARS Virus
tagactacttcatcttttcgttcaa

SEQ ID NO: 164561 - DNA, 25 bp, SARS Virus
agactacttcattttttcgttcaac

SEQ ID NO: 164562 - DNA, 25 bp, SARS Virus
gactacttcatcttttcgttcaacg

SEQ ID NO: 164563 - DNA, 25 bp, SARS Virus
actacttcatcttttcgttcaacgt

SEQ ID NO: 164564 - DNA, 25 bp, SARS Virus
ctacttcatcttttcgttcaacgtg

SEQ ID NO: 164565 - DNA, 25 bp, SARS Virus
tacttcatcttttcgttcaacgtgc

SEQ ID NO: 164566 - DNA, 25 bp, SARS Virus
acttcatctttttgttcaacgtgca

SEQ ID NO: 164567 - DNA, 25 bp, SARS Virus
cttcatcttttctttcaacgtgcaa

SEQ ID NO: 164568 - DNA, 25 bp, SARS Virus
ttcatcttttcgttcaacgtgcaaa

SEQ ID NO: 164569 - DNA, 25 bp, SARS Virus
tcatcttttcgttcaacgtgcaaac

SEQ ID NO: 164570 - DNA, 25 bp, SARS Virus
catcttttcgtttaacgtgcaaaca

SEQ ID NO: 164571 - DNA, 25 bp, SARS Virus
atcttttcgttctacgtgcaaacag

SEQ ID NO: 164572 - DNA, 25 bp, SARS Virus
tcttttcgttcatcgtgcaaacagt

SEQ ID NO: 164573 - DNA, 25 bp, SARS Virus
cttttcgttcaatgtgcaaacagtg

SEQ ID NO: 164574 - DNA, 25 bp, SARS Virus
ttttcgttcaacttgcaaacagtgt

SEQ ID NO: 164575 - DNA, 25 bp, SARS Virus
tttcgttcaacgtgcaaacagtgtg

SEQ ID NO: 164576 - DNA, 25 bp, SARS Virus
ttcgttcaacgttcaaacagtgtgt

SEQ ID NO: 164577 - DNA, 25 bp, SARS Virus
tcgttcaacgtgtaaacagtgtgtc

SEQ ID NO: 164578 - DNA, 25 bp, SARS Virus
cgttcaacgtgctaacagtgtgtct

SEQ ID NO: 164579 - DNA, 25 bp, SARS Virus
gttcaacgtgcatacagtgtgtctg

SEQ ID NO: 164580 - DNA, 25 bp, SARS Virus
ttcaacgtgcaatcagtgtgtctgt

SEQ ID NO: 164581 - DNA, 25 bp, SARS Virus
tcaacgtgcaaatagtgtgtctgtt

SEQ ID NO: 164582 - DNA, 25 bp, SARS Virus
caacgtgcaaactgtgtgtctgttg

SEQ ID NO: 164583 - DNA, 25 bp, SARS Virus
aacgtgcaaacattgtgtctgttgt

SEQ ID NO: 164584 - DNA, 25 bp, SARS Virus
acgtgcaaacagtgtgtctgttgtg

SEQ ID NO: 164585 - DNA, 25 bp, SARS Virus
cgtgcaaacagtttgtctgttgtgc

SEQ ID NO: 164586 - DNA, 25 bp, SARS Virus
gtgcaaacagtgtgtctgttgtgca

SEQ ID NO: 164587 - DNA, 25 bp, SARS Virus
tgcaaacagtgtttctgttgtgcaa

SEQ ID NO: 164588 - DNA, 25 bp, SARS Virus
gcaaacagtgtgtctgttgtgcaag

SEQ ID NO: 164589 - DNA, 25 bp, SARS Virus
caaacagtgtgtttgttgtgcaaga

SEQ ID NO: 164590 - DNA, 25 bp, SARS Virus
aaacagtgtgtctgttgtgcaagaa

SEQ ID NO: 164591 - DNA, 25 bp, SARS Virus
aacagtgtgtcttttgtgcaagaaa

SEQ ID NO: 164592 - DNA, 25 bp, SARS Virus
acagtgtgtctgttgtgcaagaaag

SEQ ID NO: 164593 - DNA, 25 bp, SARS Virus
cagtgtgtctgttgtgcaagaaagt

SEQ ID NO: 164594 - DNA, 25 bp, SARS Virus
agtgtgtctgttttgcaagaaagtc

SEQ ID NO: 164595 - DNA, 25 bp, SARS Virus
gtgtgtctgttgtgcaagaaagtcc

SEQ ID NO: 164596 - DNA, 25 bp, SARS Virus
tgtgtctgttgttcaagaaagtcca

SEQ ID NO: 164597 - DNA, 25 bp, SARS Virus
gtgtctgttgtgtaagaaagtccag

SEQ ID NO: 164598 - DNA, 25 bp, SARS Virus
tgtctgttgtgctagaaagtccagg

SEQ ID NO: 164599 - DNA, 25 bp, SARS Virus
gtctgttgtgcatgaaagtccaggt

SEQ ID NO: 164600 - DNA, 25 bp, SARS Virus
tctgttgtgcaataaagtccaggtt

SEQ ID NO: 164601 - DNA, 25 bp, SARS Virus
ctgttgtgcaagtaagtccaggtta

SEQ ID NO: 164602 - DNA, 25 bp, SARS Virus
tgttgtgcaagatagtccaggttag

SEQ ID NO: 164603 - DNA, 25 bp, SARS Virus
gttgtgcaagaatgtccaggttaga

SEQ ID NO: 164604 - DNA, 25 bp, SARS Virus
ttgtgcaagaaattccaggttagaa

SEQ ID NO: 164605 - DNA, 25 bp, SARS Virus
tgtgcaagaaagtccaggttagaac

SEQ ID NO: 164606 - DNA, 25 bp, SARS Virus
gtgcaagaaagttcaggttagaact

SEQ ID NO: 164607 - DNA, 25 bp, SARS Virus
tgcaagaaagtctaggttagaactg

SEQ ID NO: 164608 - DNA, 25 bp, SARS Virus
gcaagaaagtcctggttagaactgt

SEQ ID NO: 164609 - DNA, 25 bp, SARS Virus
caagaaagtccatgttagaactgtt

SEQ ID NO: 164610 - DNA, 25 bp, SARS Virus
aagaaagtccagtttagaactgttt

SEQ ID NO: 164611 - DNA, 25 bp, SARS Virus
agaaagtccaggttagaactgtttc

SEQ ID NO: 164612 - DNA, 25 bp, SARS Virus
gaaagtccaggttagaactgtttca

SEQ ID NO: 164613 - DNA, 25 bp, SARS Virus
aaagtccaggtttgaactgtttcat

SEQ ID NO: 164614 - DNA, 25 bp, SARS Virus
aagtccaggttataactgtttcatg

SEQ ID NO: 164615 - DNA, 25 bp, SARS Virus
agtccaggttagtactgtttcatga

SEQ ID NO: 164616 - DNA, 25 bp, SARS Virus
gtccaggttagatctgtttcatgaa

SEQ ID NO: 164617 - DNA, 25 bp, SARS Virus
tccaggttagaattgtttcatgaag

SEQ ID NO: 164618 - DNA, 25 bp, SARS Virus
ccaggttagaactgtttcatgaagt

SEQ ID NO: 164619 - DNA, 25 bp, SARS Virus
caggttagaactttttcatgaagta

SEQ ID NO: 164620 - DNA, 25 bp, SARS Virus
aggttagaactgtttcatgaagtaa

SEQ ID NO: 164621 - DNA, 25 bp, SARS Virus
ggttagaactgtttcatgaagtaac

SEQ ID NO: 164622 - DNA, 25 bp, SARS Virus
gttagaactgtttcatgaagtaact

SEQ ID NO: 164623 - DNA, 25 bp, SARS Virus
ttagaactgttttatgaagtaacta

SEQ ID NO: 164624 - DNA, 25 bp, SARS Virus
tagaactgtttcttgaagtaactac

SEQ ID NO: 164625 - DNA, 25 bp, SARS Virus
agaactgtttcatgaagtaactaca

SEQ ID NO: 164626 - DNA, 25 bp, SARS Virus
gaactgtttcattaagtaactacat

SEQ ID NO: 164627 - DNA, 25 bp, SARS Virus
aactgtttcatgtagtaactacatt

SEQ ID NO: 164628 - DNA, 25 bp, SARS Virus
actgtttcatgatgtaactacattc

SEQ ID NO: 164629 - DNA, 25 bp, SARS Virus
ctgtttcatgaattaactacattcg

SEQ ID NO: 164630 - DNA, 25 bp, SARS Virus
tgtttcatgaagtaactacattcga

SEQ ID NO: 164631 - DNA, 25 bp, SARS Virus
gtttcatgaagttactacattcgag

SEQ ID NO: 164632 - DNA, 25 bp, SARS Virus
tttcatgaagtatctacattcgagt

SEQ ID NO: 164633 - DNA, 25 bp, SARS Virus
ttcatgaagtaattacattcgagtt

SEQ ID NO: 164634 - DNA, 25 bp, SARS Virus
tcatgaagtaactacattcgagttt

SEQ ID NO: 164635 - DNA, 25 bp, SARS Virus
catgaagtaacttcattcgagtttc

SEQ ID NO: 164636 - DNA, 25 bp, SARS Virus
atgaagtaactatattcgagtttcg

SEQ ID NO: 164637 - DNA, 25 bp, SARS Virus
tgaagtaactactttcgagtttcgg

SEQ ID NO: 164638 - DNA, 25 bp, SARS Virus
gaagtaactacattcgagtttcggt

SEQ ID NO: 164639 - DNA, 25 bp, SARS Virus
aagtaactacattcgagtttcggta

SEQ ID NO: 164640 - DNA, 25 bp, SARS Virus
agtaactacatttgagtttcggtac

SEQ ID NO: 164641 - DNA, 25 bp, SARS Virus
gtaactacattctagtttcggtacg

SEQ ID NO: 164642 - DNA, 25 bp, SARS Virus
taactacattcgtgtttcggtacgc

SEQ ID NO: 164643 - DNA, 25 bp, SARS Virus
aactacattcgattttcggtacgcg

SEQ ID NO: 164644 - DNA, 25 bp, SARS Virus
actacattcgagtttcggtacgcgg

SEQ ID NO: 164645 - DNA, 25 bp, SARS Virus
ctacattcgagtttcggtacgcggg

SEQ ID NO: 164646 - DNA, 25 bp, SARS Virus
tacattcgagtttcggtacgcgggt

SEQ ID NO: 164647 - DNA, 25 bp, SARS Virus
acattcgagttttggtacgcgggtt

SEQ ID NO: 164648 - DNA, 25 bp, SARS Virus
cattcgagtttctgtacgcgggttt

SEQ ID NO: 164649 - DNA, 25 bp, SARS Virus
attcgagtttcgttacgcgggtttc

SEQ ID NO: 164650 - DNA, 25 bp, SARS Virus
ttcgagtttcggtacgcgggtttcc

SEQ ID NO: 164651 - DNA, 25 bp, SARS Virus
tcgagtttcggttcgcgggtttcct

SEQ ID NO: 164652 - DNA, 25 bp, SARS Virus
cgagtttcggtatgcgggtttcctg

SEQ ID NO: 164653 - DNA, 25 bp, SARS Virus
gagtttcggtactcgggtttcctgc

SEQ ID NO: 164654 - DNA, 25 bp, SARS Virus
agtttcggtacgtgggtttcctgct

SEQ ID NO: 164655 - DNA, 25 bp, SARS Virus
gtttcggtacgctggtttcctgctt

SEQ ID NO: 164656 - DNA, 25 bp, SARS Virus
tttcggtacgcgtgtttcctgcttg

SEQ ID NO: 164657 - DNA, 25 bp, SARS Virus
ttcggtacgcggttttcctgcttgt

SEQ ID NO: 164658 - DNA, 25 bp, SARS Virus
tcggtacgcgggtttcctgcttgtg

SEQ ID NO: 164659 - DNA, 25 bp, SARS Virus
cggtacgcgggtttcctgcttgtgc

SEQ ID NO: 164660 - DNA, 25 bp, SARS Virus
ggtacgcgggtttcctgcttgtgct

SEQ ID NO: 164661 - DNA, 25 bp, SARS Virus
gtacgcgggttttctgcttgtgctg

SEQ ID NO: 164662 - DNA, 25 bp, SARS Virus
tacgcgggtttcttgcttgtgctga

SEQ ID NO: 164663 - DNA, 25 bp, SARS Virus
acgcgggtttcctgcttgtgctgag

SEQ ID NO: 164664 - DNA, 25 bp, SARS Virus
cgcgggtttccttcttgtgctgaga

SEQ ID NO: 164665 - DNA, 25 bp, SARS Virus
gcgggtttcctgtttgtgctgagac

SEQ ID NO: 164666 - DNA, 25 bp, SARS Virus
cgggtttcctgcttgtgctgagaca

SEQ ID NO: 164667 - DNA, 25 bp, SARS Virus
gggtttcctgcttgtgctgagacag

SEQ ID NO: 164668 - DNA, 25 bp, SARS Virus
ggtttcctgcttttgctgagacaga

SEQ ID NO: 164669 - DNA, 25 bp, SARS Virus
gtttcctgcttgtgctgagacagac

SEQ ID NO: 164670 - DNA, 25 bp, SARS Virus
tttcctgcttgttctgagacagact

SEQ ID NO: 164671 - DNA, 25 bp, SARS Virus
ttcctgcttgtgttgagacagactg

SEQ ID NO: 164672 - DNA, 25 bp, SARS Virus
tcctgcttgtgctgagacagactgt

SEQ ID NO: 164673 - DNA, 25 bp, SARS Virus
cctgcttgtgcttagacagactgtt

SEQ ID NO: 164674 - DNA, 25 bp, SARS Virus
ctgcttgtgctgtgacagactgtta

SEQ ID NO: 164675 - DNA, 25 bp, SARS Virus
tgcttgtgctgatacagactgttag

SEQ ID NO: 164676 - DNA, 25 bp, SARS Virus
gcttgtgctgagtcagactgttagg

SEQ ID NO: 164677 - DNA, 25 bp, SARS Virus
cttgtgctgagatagactgttagga

SEQ ID NO: 164678 - DNA, 25 bp, SARS Virus
ttgtgctgagactgactgttaggaa

SEQ ID NO: 164679 - DNA, 25 bp, SARS Virus
tgtgctgagacatactgttaggaaa

SEQ ID NO: 164680 - DNA, 25 bp, SARS Virus
gtgctgagacagtctgttaggaaag

SEQ ID NO: 164681 - DNA, 25 bp, SARS Virus
tgctgagacagattgttaggaaagt

SEQ ID NO: 164682 - DNA, 25 bp, SARS Virus
gctgagacagactgttaggaaagtc

SEQ ID NO: 164683 - DNA, 25 bp, SARS Virus
ctgagacagacttttaggaaagtca

SEQ ID NO: 164684 - DNA, 25 bp, SARS Virus
tgagacagactgttaggaaagtcac

SEQ ID NO: 164685 - DNA, 25 bp, SARS Virus
gagacagactgttaggaaagtcaca

SEQ ID NO: 164686 - DNA, 25 bp, SARS Virus
agacagactgtttggaaagtcacat

SEQ ID NO: 164687 - DNA, 25 bp, SARS Virus
gacagactgttatgaaagtcacata

SEQ ID NO: 164688 - DNA, 25 bp, SARS Virus
acagactgttagtaaagtcacatag

SEQ ID NO: 164689 - DNA, 25 bp, SARS Virus
cagactgttaggtaagtcacatagt

SEQ ID NO: 164690 - DNA, 25 bp, SARS Virus
agactgttaggatagtcacatagtg

SEQ ID NO: 164691 - DNA, 25 bp, SARS Virus
gactgttaggaatgtcacatagtga

SEQ ID NO: 164692 - DNA, 25 bp, SARS Virus
actgttaggaaattcacatagtgac

SEQ ID NO: 164693 - DNA, 25 bp, SARS Virus
ctgttaggaaagtcacatagtgact

SEQ ID NO: 164694 - DNA, 25 bp, SARS Virus
tgttaggaaagttacatagtgactc

SEQ ID NO: 164695 - DNA, 25 bp, SARS Virus
gttaggaaagtctcatagtgactcg

SEQ ID NO: 164696 - DNA, 25 bp, SARS Virus
ttaggaaagtcatatagtgactcgt

SEQ ID NO: 164697 - DNA, 25 bp, SARS Virus
taggaaagtcacttagtgactcgta

SEQ ID NO: 164698 - DNA, 25 bp, SARS Virus
aggaaagtcacatagtgactcgtaa

SEQ ID NO: 164699 - DNA, 25 bp, SARS Virus
ggaaagtcacattgtgactcgtaaa

SEQ ID NO: 164700 - DNA, 25 bp, SARS Virus
gaaagtcacatattgactcgtaaac

SEQ ID NO: 164701 - DNA, 25 bp, SARS Virus
aaagtcacatagtgactcgtaaaca

SEQ ID NO: 164702 - DNA, 25 bp, SARS Virus
aagtcacatagttactcgtaaacat

SEQ ID NO: 164703 - DNA, 25 bp, SARS Virus
agtcacatagtgtctcgtaaacatg

SEQ ID NO: 164704 - DNA, 25 bp, SARS Virus
gtcacatagtgattcgtaaacatga

SEQ ID NO: 164705 - DNA, 25 bp, SARS Virus
tcacatagtgactcgtaaacatgat

SEQ ID NO: 164706 - DNA, 25 bp, SARS Virus
cacatagtgacttgtaaacatgata

SEQ ID NO: 164707 - DNA, 25 bp, SARS Virus
acatagtgactcttaaacatgatag

SEQ ID NO: 164708 - DNA, 25 bp, SARS Virus
catagtgactcgtaaacatgataga

SEQ ID NO: 164709 - DNA, 25 bp, SARS Virus
atagtgactcgttaacatgatagaa

SEQ ID NO: 164710 - DNA, 25 bp, SARS Virus
tagtgactcgtatacatgatagaat

SEQ ID NO: 164711 - DNA, 25 bp, SARS Virus
agtgactcgtaatcatgatagaatt

SEQ ID NO: 164712 - DNA, 25 bp, SARS Virus
gtgactcgtaaatatgatagaatta

SEQ ID NO: 164713 - DNA, 25 bp, SARS Virus
tgactcgtaaacttgatagaattat

SEQ ID NO: 164714 - DNA, 25 bp, SARS Virus
gactcgtaaacatgatagaattatg

SEQ ID NO: 164715 - DNA, 25 bp, SARS Virus
actcgtaaacattatagaattatgc

SEQ ID NO: 164716 - DNA, 25 bp, SARS Virus
ctcgtaaacatgttagaattatgcg

SEQ ID NO: 164717 - DNA, 25 bp, SARS Virus
tcgtaaacatgatagaattatgcgt

SEQ ID NO: 164718 - DNA, 25 bp, SARS Virus
cgtaaacatgattgaattatgcgtg

SEQ ID NO: 164719 - DNA, 25 bp, SARS Virus
gtaaacatgatataattatgcgtga

SEQ ID NO: 164720 - DNA, 25 bp, SARS Virus
taaacatgatagtattatgcgtgat

SEQ ID NO: 164721 - DNA, 25 bp, SARS Virus
aaacatgatagatttatgcgtgatg

SEQ ID NO: 164722 - DNA, 25 bp, SARS Virus
aacatgatagaattatgcgtgatgt

SEQ ID NO: 164723 - DNA, 25 bp, SARS Virus
acatgatagaattatgcgtgatgta

SEQ ID NO: 164724 - DNA, 25 bp, SARS Virus
catgatagaattttgcgtgatgtaa

SEQ ID NO: 164725 - DNA, 25 bp, SARS Virus
atgatagaattatgcgtgatgtaag

SEQ ID NO: 164726 - DNA, 25 bp, SARS Virus
tgatagaattattcgtgatgtaagg

SEQ ID NO: 164727 - DNA, 25 bp, SARS Virus
gatagaattatgtgtgatgtaaggt

SEQ ID NO: 164728 - DNA, 25 bp, SARS Virus
atagaattatgcttgatgtaaggtc

SEQ ID NO: 164729 - DNA, 25 bp, SARS Virus
tagaattatgcgtgatgtaaggtcc

SEQ ID NO: 164730 - DNA, 25 bp, SARS Virus
agaattatgcgttatgtaaggtccc

SEQ ID NO: 164731 - DNA, 25 bp, SARS Virus
gaattatgcgtgttgtaaggtcccg

SEQ ID NO: 164732 - DNA, 25 bp, SARS Virus
aattatgcgtgatgtaaggtcccgt

SEQ ID NO: 164733 - DNA, 25 bp, SARS Virus
attatgcgtgatttaaggtcccgtt

SEQ ID NO: 164734 - DNA, 25 bp, SARS Virus
ttatgcgtgatgtaaggtcccgttc

SEQ ID NO: 164735 - DNA, 25 bp, SARS Virus
tatgcgtgatgttaggtcccgttcg

SEQ ID NO: 164736 - DNA, 25 bp, SARS Virus
atgcgtgatgtatggtcccgttcgg

SEQ ID NO: 164737 - DNA, 25 bp, SARS Virus
tgcgtgatgtaatgtcccgttcgga

SEQ ID NO: 164738 - DNA, 25 bp, SARS Virus
gcgtgatgtaagttcccgttcggaa

SEQ ID NO: 164739 - DNA, 25 bp, SARS Virus
cgtgatgtaaggtcccgttcggaaa

SEQ ID NO: 164740 - DNA, 25 bp, SARS Virus
gtgatgtaaggttccgttcggaaat

SEQ ID NO: 164741 - DNA, 25 bp, SARS Virus
tgatgtaaggtctcgttcggaaata

SEQ ID NO: 164742 - DNA, 25 bp, SARS Virus
gatgtaaggtcctgttcggaaatat

SEQ ID NO: 164743 - DNA, 25 bp, SARS Virus
atgtaaggtccctttcggaaatatg

SEQ ID NO: 164744 - DNA, 25 bp, SARS Virus
tgtaaggtcccgttcggaaatatgt

SEQ ID NO: 164745 - DNA, 25 bp, SARS Virus
gtaaggtcccgttcggaaatatgta

SEQ ID NO: 164746 - DNA, 25 bp, SARS Virus
taaggtcccgtttggaaatatgtac

SEQ ID NO: 164747 - DNA, 25 bp, SARS Virus
aaggtcccgttctgaaatatgtact

SEQ ID NO: 164748 - DNA, 25 bp, SARS Virus
aggtcccgttcgtaaatatgtactc

SEQ ID NO: 164749 - DNA, 25 bp, SARS Virus
ggtcccgttcggtaatatgtactca

SEQ ID NO: 164750 - DNA, 25 bp, SARS Virus
gtcccgttcggatatatgtactcac

SEQ ID NO: 164751 - DNA, 25 bp, SARS Virus
tcccgttcggaattatgtactcacc

SEQ ID NO: 164752 - DNA, 25 bp, SARS Virus
cccgttcggaaatatgtactcacca

SEQ ID NO: 164753 - DNA, 25 bp, SARS Virus
ccgttcggaaatttgtactcaccat

SEQ ID NO: 164754 - DNA, 25 bp, SARS Virus
cgttcggaaatatgtactcaccata

SEQ ID NO: 164755 - DNA, 25 bp, SARS Virus
gttcggaaatatttactcaccatat

SEQ ID NO: 164756 - DNA, 25 bp, SARS Virus
ttcggaaatatgtactcaccatatt

SEQ ID NO: 164757 - DNA, 25 bp, SARS Virus
tcggaaatatgttctcaccatattc

SEQ ID NO: 164758 - DNA, 25 bp, SARS Virus
cggaaatatgtattcaccatattct

SEQ ID NO: 164759 - DNA, 25 bp, SARS Virus
ggaaatatgtactcaccatattcta

SEQ ID NO: 164760 - DNA, 25 bp, SARS Virus
gaaatatgtacttaccatattctac

SEQ ID NO: 164761 - DNA, 25 bp, SARS Virus
aaatatgtactctccatattctaca

SEQ ID NO: 164762 - DNA, 25 bp, SARS Virus
aatatgtactcatcatattctacaa

SEQ ID NO: 164763 - DNA, 25 bp, SARS Virus
atatgtactcactatattctacaaa

SEQ ID NO: 164764 - DNA, 25 bp, SARS Virus
tatgtactcaccttattctacaaat

SEQ ID NO: 164765 - DNA, 25 bp, SARS Virus
atgtactcaccatattctacaaatt

SEQ ID NO: 164766 - DNA, 25 bp, SARS Virus
tgtactcaccattttctacaaattt

SEQ ID NO: 164767 - DNA, 25 bp, SARS Virus
gtactcaccatattctacaaatttg

SEQ ID NO: 164768 - DNA, 25 bp, SARS Virus
tactcaccatattctacaaatttga

SEQ ID NO: 164769 - DNA, 25 bp, SARS Virus
actcaccatattttacaaatttgac

SEQ ID NO: 164770 - DNA, 25 bp, SARS Virus
ctcaccatattctacaaatttgacc

SEQ ID NO: 164771 - DNA, 25 bp, SARS Virus
tcaccatattcttcaaatttgacca

SEQ ID NO: 164772 - DNA, 25 bp, SARS Virus
caccatattctataaatttgaccag

SEQ ID NO: 164773 - DNA, 25 bp, SARS Virus
accatattctactaatttgaccagt

SEQ ID NO: 164774 - DNA, 25 bp, SARS Virus
ccatattctacatatttgaccagtg

SEQ ID NO: 164775 - DNA, 25 bp, SARS Virus
catattctacaattttgaccagtgg

SEQ ID NO: 164776 - DNA, 25 bp, SARS Virus
atattctacaaatttgaccagtgga

SEQ ID NO: 164777 - DNA, 25 bp, SARS Virus
tattctacaaatttgaccagtggac

SEQ ID NO: 164778 - DNA, 25 bp, SARS Virus
attctacaaatttgaccagtggacc

SEQ ID NO: 164779 - DNA, 25 bp, SARS Virus
ttctacaaattttaccagtggacca

SEQ ID NO: 164780 - DNA, 25 bp, SARS Virus
tctacaaatttgtccagtggaccac

SEQ ID NO: 164781 - DNA, 25 bp, SARS Virus
ctacaaatttgatcagtggaccacc

SEQ ID NO: 164782 - DNA, 25 bp, SARS Virus
tacaaatttgactagtggaccacct

SEQ ID NO: 164783 - DNA, 25 bp, SARS Virus
acaaatttgacctgtggaccacctc

SEQ ID NO: 164784 - DNA, 25 bp, SARS Virus
caaatttgaccattggaccacctcc

SEQ ID NO: 164785 - DNA, 25 bp, SARS Virus
aaatttgaccagtggaccacctcca

SEQ ID NO: 164786 - DNA, 25 bp, SARS Virus
aatttgaccagttgaccacctccaa

SEQ ID NO: 164787 - DNA, 25 bp, SARS Virus
atttgaccagtgtaccacctccaaa

SEQ ID NO: 164788 - DNA, 25 bp, SARS Virus
tttgaccagtggtccacctccaaaa

SEQ ID NO: 164789 - DNA, 25 bp, SARS Virus
ttgaccagtggatcacctccaaaac

SEQ ID NO: 164790 - DNA, 25 bp, SARS Virus
tgaccagtggactacctccaaaacg

SEQ ID NO: 164791 - DNA, 25 bp, SARS Virus
gaccagtggacctcctccaaaacgt

SEQ ID NO: 164792 - DNA, 25 bp, SARS Virus
accagtggaccatctccaaaacgta

SEQ ID NO: 164793 - DNA, 25 bp, SARS Virus
ccagtggaccacttccaaaacgtaa

SEQ ID NO: 164794 - DNA, 25 bp, SARS Virus
cagtggaccacctccaaaacgtaat

SEQ ID NO: 164795 - DNA, 25 bp, SARS Virus
agtggaccaccttcaaaacgtaatt

SEQ ID NO: 164796 - DNA, 25 bp, SARS Virus
gtggaccacctctaaaacgtaattg

SEQ ID NO: 164797 - DNA, 25 bp, SARS Virus
tggaccacctcctaaacgtaattga

SEQ ID NO: 164798 - DNA, 25 bp, SARS Virus
ggaccacctccataacgtaattgag

SEQ ID NO: 164799 - DNA, 25 bp, SARS Virus
gaccacctccaatacgtaattgaga

SEQ ID NO: 164800 - DNA, 25 bp, SARS Virus
accacctccaaatcgtaattgagac

SEQ ID NO: 164801 - DNA, 25 bp, SARS Virus
ccacctccaaaatgtaattgagacc

SEQ ID NO: 164802 - DNA, 25 bp, SARS Virus
cacctccaaaacttaattgagacca

SEQ ID NO: 164803 - DNA, 25 bp, SARS Virus
acctccaaaacgtaattgagaccac

SEQ ID NO: 164804 - DNA, 25 bp, SARS Virus
cctccaaaacgttattgagaccact

SEQ ID NO: 164805 - DNA, 25 bp, SARS Virus
ctccaaaacgtatttgagaccactt

SEQ ID NO: 164806 - DNA, 25 bp, SARS Virus
tccaaaacgtaattgagaccactta

SEQ ID NO: 164807 - DNA, 25 bp, SARS Virus
ccaaaacgtaattgagaccacttaa

SEQ ID NO: 164808 - DNA, 25 bp, SARS Virus
caaaacgtaatttagaccacttaag

SEQ ID NO: 164809 - DNA, 25 bp, SARS Virus
aaaacgtaattgtgaccacttaaga

SEQ ID NO: 164810 - DNA, 25 bp, SARS Virus
aaacgtaattgataccacttaagac

SEQ ID NO: 164811 - DNA, 25 bp, SARS Virus
aacgtaattgagtccacttaagaca

SEQ ID NO: 164812 - DNA, 25 bp, SARS Virus
acgtaattgagatcacttaagacac

SEQ ID NO: 164813 - DNA, 25 bp, SARS Virus
cgtaattgagactacttaagacaca

SEQ ID NO: 164814 - DNA, 25 bp, SARS Virus
gtaattgagacctcttaagacacaa

SEQ ID NO: 164815 - DNA, 25 bp, SARS Virus
taattgagaccatttaagacacaat

SEQ ID NO: 164816 - DNA, 25 bp, SARS Virus
aattgagaccacttaagacacaata

SEQ ID NO: 164817 - DNA, 25 bp, SARS Virus
attgagaccacttaagacacaataa

SEQ ID NO: 164818 - DNA, 25 bp, SARS Virus
ttgagaccactttagacacaataaa

SEQ ID NO: 164819 - DNA, 25 bp, SARS Virus
tgagaccacttatgacacaataaaa

SEQ ID NO: 164820 - DNA, 25 bp, SARS Virus
gagaccacttaatacacaataaaag

SEQ ID NO: 164821 - DNA, 25 bp, SARS Virus
agaccacttaagtcacaataaaagt

SEQ ID NO: 164822 - DNA, 25 bp, SARS Virus
gaccacttaagatacaataaaagtc

SEQ ID NO: 164823 - DNA, 25 bp, SARS Virus
accacttaagactcaataaaagtca

SEQ ID NO: 164824 - DNA, 25 bp, SARS Virus
ccacttaagacataataaaagtcac

SEQ ID NO: 164825 - DNA, 25 bp, SARS Virus
cacttaagacactataaaagtcaca

SEQ ID NO: 164826 - DNA, 25 bp, SARS Virus
acttaagacacattaaaagtcacag

SEQ ID NO: 164827 - DNA, 25 bp, SARS Virus
cttaagacacaataaaagtcacagt

SEQ ID NO: 164828 - DNA, 25 bp, SARS Virus
ttaagacacaattaaagtcacagtt

SEQ ID NO: 164829 - DNA, 25 bp, SARS Virus
taagacacaatataagtcacagttg

SEQ ID NO: 164830 - DNA, 25 bp, SARS Virus
aagacacaataatagtcacagttgt

SEQ ID NO: 164831 - DNA, 25 bp, SARS Virus
agacacaataaatgtcacagttgta

SEQ ID NO: 164832 - DNA, 25 bp, SARS Virus
gacacaataaaattcacagttgtat

SEQ ID NO: 164833 - DNA, 25 bp, SARS Virus
acacaataaaagtcacagttgtatt

SEQ ID NO: 164834 - DNA, 25 bp, SARS Virus
cacaataaaagttacagttgtattg

SEQ ID NO: 164835 - DNA, 25 bp, SARS Virus
acaataaaagtctcagttgtattgg

SEQ ID NO: 164836 - DNA, 25 bp, SARS Virus
caataaaagtcatagttgtattggt

SEQ ID NO: 164837 - DNA, 25 bp, SARS Virus
aataaaagtcactgttgtattggtc

SEQ ID NO: 164838 - DNA, 25 bp, SARS Virus
ataaaagtcacatttgtattggtca

SEQ ID NO: 164839 - DNA, 25 bp, SARS Virus
taaaagtcacagttgtattggtcag

SEQ ID NO: 164840 - DNA, 25 bp, SARS Virus
aaaagtcacagttgtattggtcagc

SEQ ID NO: 164841 - DNA, 25 bp, SARS Virus
aaagtcacagttttattggtcagcc

SEQ ID NO: 164842 - DNA, 25 bp, SARS Virus
aagtcacagttgtattggtcagcca

SEQ ID NO: 164843 - DNA, 25 bp, SARS Virus
agtcacagttgttttggtcagccat

SEQ ID NO: 164844 - DNA, 25 bp, SARS Virus
gtcacagttgtattggtcagccatg

SEQ ID NO: 164845 - DNA, 25 bp, SARS Virus
tcacagttgtattggtcagccatgt

SEQ ID NO: 164846 - DNA, 25 bp, SARS Virus
cacagttgtatttgtcagccatgtc

SEQ ID NO: 164847 - DNA, 25 bp, SARS Virus
acagttgtattgttcagccatgtcg

SEQ ID NO: 164848 - DNA, 25 bp, SARS Virus
cagttgtattggtcagccatgtcga

SEQ ID NO: 164849 - DNA, 25 bp, SARS Virus
agttgtattggttagccatgtcgat

SEQ ID NO: 164850 - DNA, 25 bp, SARS Virus
gttgtattggtctgccatgtcgatg

SEQ ID NO: 164851 - DNA, 25 bp, SARS Virus
ttgtattggtcatccatgtcgatga

SEQ ID NO: 164852 - DNA, 25 bp, SARS Virus
tgtattggtcagtcatgtcgatgat

SEQ ID NO: 164853 - DNA, 25 bp, SARS Virus
gtattggtcagctatgtcgatgatt

SEQ ID NO: 164854 - DNA, 25 bp, SARS Virus
tattggtcagccttgtcgatgattc

SEQ ID NO: 164855 - DNA, 25 bp, SARS Virus
attggtcagccatgtcgatgattca

SEQ ID NO: 164856 - DNA, 25 bp, SARS Virus
ttggtcagccatttcgatgattcaa

SEQ ID NO: 164857 - DNA, 25 bp, SARS Virus
tggtcagccatgtcgatgattcaat

SEQ ID NO: 164858 - DNA, 25 bp, SARS Virus
ggtcagccatgttgatgattcaatt

SEQ ID NO: 164859 - DNA, 25 bp, SARS Virus
gtcagccatgtctatgattcaattg

SEQ ID NO: 164860 - DNA, 25 bp, SARS Virus
tcagccatgtcgttgattcaattgt

SEQ ID NO: 164861 - DNA, 25 bp, SARS Virus
cagccatgtcgatgattcaattgtg

SEQ ID NO: 164862 - DNA, 25 bp, SARS Virus
agccatgtcgattattcaattgtgg

SEQ ID NO: 164863 - DNA, 25 bp, SARS Virus
gccatgtcgatgtttcaattgtgga

SEQ ID NO: 164864 - DNA, 25 bp, SARS Virus
ccatgtcgatgattcaattgtggac

SEQ ID NO: 164865 - DNA, 25 bp, SARS Virus
catgtcgatgattcaattgtggaca

SEQ ID NO: 164866 - DNA, 25 bp, SARS Virus
atgtcgatgatttaattgtggacat

SEQ ID NO: 164867 - DNA, 25 bp, SARS Virus
tgtcgatgattctattgtggacatc

SEQ ID NO: 164868 - DNA, 25 bp, SARS Virus
gtcgatgattcatttgtggacatct

SEQ ID NO: 164869 - DNA, 25 bp, SARS Virus
tcgatgattcaattgtggacatctt

SEQ ID NO: 164870 - DNA, 25 bp, SARS Virus
cgatgattcaattgtggacatcttt

SEQ ID NO: 164871 - DNA, 25 bp, SARS Virus
gatgattcaattttggacatctttt

SEQ ID NO: 164872 - DNA, 25 bp, SARS Virus
atgattcaattgtggacatctttta

SEQ ID NO: 164873 - DNA, 25 bp, SARS Virus
tgattcaattgttgacatcttttag

SEQ ID NO: 164874 - DNA, 25 bp, SARS Virus
gattcaattgtgtacatcttttagg

SEQ ID NO: 164875 - DNA, 25 bp, SARS Virus
attcaattgtggtcatcttttagga

SEQ ID NO: 164876 - DNA, 25 bp, SARS Virus
ttcaattgtggatatcttttaggat

SEQ ID NO: 164877 - DNA, 25 bp, SARS Virus
tcaattgtggacttcttttaggatc

SEQ ID NO: 164878 - DNA, 25 bp, SARS Virus
caattgtggacatcttttaggatcg

SEQ ID NO: 164879 - DNA, 25 bp, SARS Virus
aattgtggacattttttaggatcga

SEQ ID NO: 164880 - DNA, 25 bp, SARS Virus
attgtggacatcttttaggatcgac

SEQ ID NO: 164881 - DNA, 25 bp, SARS Virus
ttgtggacatcttttaggatcgacc

SEQ ID NO: 164882 - DNA, 25 bp, SARS Virus
tgtggacatcttttaggatcgacct

SEQ ID NO: 164883 - DNA, 25 bp, SARS Virus
gtggacatcttttaggatcgacctc

SEQ ID NO: 164884 - DNA, 25 bp, SARS Virus
tggacatctttttggatcgacctct

SEQ ID NO: 164885 - DNA, 25 bp, SARS Virus
ggacatcttttatgatcgacctctc

SEQ ID NO: 164886 - DNA, 25 bp, SARS Virus
gacatcttttagtatcgacctctcc

SEQ ID NO: 164887 - DNA, 25 bp, SARS Virus
acatcttttaggttcgacctctcca

SEQ ID NO: 164888 - DNA, 25 bp, SARS Virus
catcttttaggatcgacctctccat

SEQ ID NO: 164889 - DNA, 25 bp, SARS Virus
atcttttaggattgacctctccatc

SEQ ID NO: 164890 - DNA, 25 bp, SARS Virus
tcttttaggatctacctctccatcc

SEQ ID NO: 164891 - DNA, 25 bp, SARS Virus
cttttaggatcgtcctctccatcca

SEQ ID NO: 164892 - DNA, 25 bp, SARS Virus
ttttaggatcgatctctccatccaa

SEQ ID NO: 164893 - DNA, 25 bp, SARS Virus
tttaggatcgacttctccatccaat

SEQ ID NO: 164894 - DNA, 25 bp, SARS Virus
ttaggatcgacctctccatccaatc

SEQ ID NO: 164895 - DNA, 25 bp, SARS Virus
taggatcgacctttccatccaatca

SEQ ID NO: 164896 - DNA, 25 bp, SARS Virus
aggatcgacctctccatccaatcat

SEQ ID NO: 164897 - DNA, 25 bp, SARS Virus
ggatcgacctcttcatccaatcatg

SEQ ID NO: 164898 - DNA, 25 bp, SARS Virus
gatcgacctctctatccaatcatgg

SEQ ID NO: 164899 - DNA, 25 bp, SARS Virus
atcgacctctccttccaatcatggg

SEQ ID NO: 164900 - DNA, 25 bp, SARS Virus
tcgacctctccatccaatcatgggt

SEQ ID NO: 164901 - DNA, 25 bp, SARS Virus
cgacctctccattcaatcatgggtg

SEQ ID NO: 164902 - DNA, 25 bp, SARS Virus
gacctctccatctaatcatgggtgt

SEQ ID NO: 164903 - DNA, 25 bp, SARS Virus
acctctccatcctatcatgggtgtc

SEQ ID NO: 164904 - DNA, 25 bp, SARS Virus
cctctccatccattcatgggtgtcg

SEQ ID NO: 164905 - DNA, 25 bp, SARS Virus
ctctccatccaatcatgggtgtcgt

SEQ ID NO: 164906 - DNA, 25 bp, SARS Virus
tctccatccaattatgggtgtcgta

SEQ ID NO: 164907 - DNA, 25 bp, SARS Virus
ctccatccaatcttgggtgtcgtag

SEQ ID NO: 164908 - DNA, 25 bp, SARS Virus
tccatccaatcatgggtgtcgtaga

SEQ ID NO: 164909 - DNA, 25 bp, SARS Virus
ccatccaatcattggtgtcgtagag

SEQ ID NO: 164910 - DNA, 25 bp, SARS Virus
catccaatcatgtgtgtcgtagaga

SEQ ID NO: 164911 - DNA, 25 bp, SARS Virus
atccaatcatggttgtcgtagagat

SEQ ID NO: 164912 - DNA, 25 bp, SARS Virus
tccaatcatgggtgtcgtagagatc

SEQ ID NO: 164913 - DNA, 25 bp, SARS Virus
ccaatcatgggtttcgtagagatca

SEQ ID NO: 164914 - DNA, 25 bp, SARS Virus
caatcatgggtgtcgtagagatcaa

SEQ ID NO: 164915 - DNA, 25 bp, SARS Virus
aatcatgggtgttgtagagatcaac

SEQ ID NO: 164916 - DNA, 25 bp, SARS Virus
atcatgggtgtcttagagatcaacg

SEQ ID NO: 164917 - DNA, 25 bp, SARS Virus
tcatgggtgtcgtagagatcaacgt

SEQ ID NO: 164918 - DNA, 25 bp, SARS Virus
catgggtgtcgttgagatcaacgta

SEQ ID NO: 164919 - DNA, 25 bp, SARS Virus
atgggtgtcgtatagatcaacgtac

SEQ ID NO: 164920 - DNA, 25 bp, SARS Virus
tgggtgtcgtagtgatcaacgtact

SEQ ID NO: 164921 - DNA, 25 bp, SARS Virus
gggtgtcgtagatatcaacgtactg

SEQ ID NO: 164922 - DNA, 25 bp, SARS Virus
ggtgtcgtagagttcaacgtactgt

SEQ ID NO: 164923 - DNA, 25 bp, SARS Virus
gtgtcgtagagatcaacgtactgtc

SEQ ID NO: 164924 - DNA, 25 bp, SARS Virus
tgtcgtagagattaacgtactgtcg

SEQ ID NO: 164925 - DNA, 25 bp, SARS Virus
gtcgtagagatctacgtactgtcgg

SEQ ID NO: 164926 - DNA, 25 bp, SARS Virus
tcgtagagatcatcgtactgtcggg

SEQ ID NO: 164927 - DNA, 25 bp, SARS Virus
cgtagagatcaatgtactgtcggga

SEQ ID NO: 164928 - DNA, 25 bp, SARS Virus
gtagagatcaacttactgtcgggag

SEQ ID NO: 164929 - DNA, 25 bp, SARS Virus
tagagatcaacgtactgtcgggaga

SEQ ID NO: 164930 - DNA, 25 bp, SARS Virus
agagatcaacgttctgtcgggagat

SEQ ID NO: 164931 - DNA, 25 bp, SARS Virus
gagatcaacgtattgtcgggagatg

SEQ ID NO: 164932 - DNA, 25 bp, SARS Virus
agatcaacgtactgtcgggagatgt

SEQ ID NO: 164933 - DNA, 25 bp, SARS Virus
gatcaacgtactttcgggagatgta

SEQ ID NO: 164934 - DNA, 25 bp, SARS Virus
atcaacgtactgtcgggagatgtag

SEQ ID NO: 164935 - DNA, 25 bp, SARS Virus
tcaacgtactgttgggagatgtagt

SEQ ID NO: 164936 - DNA, 25 bp, SARS Virus
caacgtactgtctggagatgtagtt

SEQ ID NO: 164937 - DNA, 25 bp, SARS Virus
aacgtactgtcgtgagatgtagttt

SEQ ID NO: 164938 - DNA, 25 bp, SARS Virus
acgtactgtcggtagatgtagtttc

SEQ ID NO: 164939 - DNA, 25 bp, SARS Virus
cgtactgtcgggtgatgtagtttcg

SEQ ID NO: 164940 - DNA, 25 bp, SARS Virus
gtactgtcgggatatgtagtttcgg

SEQ ID NO: 164941 - DNA, 25 bp, SARS Virus
tactgtcgggagttgtagtttcggt

SEQ ID NO: 164942 - DNA, 25 bp, SARS Virus
actgtcgggagatgtagtttcggtt

SEQ ID NO: 164943 - DNA, 25 bp, SARS Virus
ctgtcgggagatttagtttcggtta

SEQ ID NO: 164944 - DNA, 25 bp, SARS Virus
tgtcgggagatgtagtttcggttag

SEQ ID NO: 164945 - DNA, 25 bp, SARS Virus
gtcgggagatgttgtttcggttagg

SEQ ID NO: 164946 - DNA, 25 bp, SARS Virus
tcgggagatgtattttcggttaggt

SEQ ID NO: 164947 - DNA, 25 bp, SARS Virus
cgggagatgtagtttcggttaggtg

SEQ ID NO: 164948 - DNA, 25 bp, SARS Virus
gggagatgtagtttcggttaggtgc

SEQ ID NO: 164949 - DNA, 25 bp, SARS Virus
ggagatgtagtttcggttaggtgcg

SEQ ID NO: 164950 - DNA, 25 bp, SARS Virus
gagatgtagttttggttaggtgcgt

SEQ ID NO: 164951 - DNA, 25 bp, SARS Virus
agatgtagtttctgttaggtgcgtg

SEQ ID NO: 164952 - DNA, 25 bp, SARS Virus
gatgtagtttcgtttaggtgcgtgc

SEQ ID NO: 164953 - DNA, 25 bp, SARS Virus
atgtagtttcggttaggtgcgtgct

SEQ ID NO: 164954 - DNA, 25 bp, SARS Virus
tgtagtttcggttaggtgcgtgctt

SEQ ID NO: 164955 - DNA, 25 bp, SARS Virus
gtagtttcggtttggtgcgtgcttg

SEQ ID NO: 164956 - DNA, 25 bp, SARS Virus
tagtttcggttatgtgcgtgcttgc

SEQ ID NO: 164957 - DNA, 25 bp, SARS Virus
agtttcggttagttgcgtgcttgca

SEQ ID NO: 164958 - DNA, 25 bp, SARS Virus
gtttcggttaggtgcgtgcttgcac

SEQ ID NO: 164959 - DNA, 25 bp, SARS Virus
tttcggttaggttcgtgcttgcact

SEQ ID NO: 164960 - DNA, 25 bp, SARS Virus
ttcggttaggtgtgtgcttgcactg

SEQ ID NO: 164961 - DNA, 25 bp, SARS Virus
tcggttaggtgcttgcttgcactgc

SEQ ID NO: 164962 - DNA, 25 bp, SARS Virus
cggttaggtgcgtgcttgcactgct

SEQ ID NO: 164963 - DNA, 25 bp, SARS Virus
ggttaggtgcgttcttgcactgctt

SEQ ID NO: 164964 - DNA, 25 bp, SARS Virus
gttaggtgcgtgtttgcactgctta

SEQ ID NO: 164965 - DNA, 25 bp, SARS Virus
ttaggtgcgtgcttgcactgcttat

SEQ ID NO: 164966 - DNA, 25 bp, SARS Virus
taggtgcgtgcttgcactgcttatc

SEQ ID NO: 164967 - DNA, 25 bp, SARS Virus
aggtgcgtgctttcactgcttatcg

SEQ ID NO: 164968 - DNA, 25 bp, SARS Virus
ggtgcgtgcttgtactgcttatcga

SEQ ID NO: 164969 - DNA, 25 bp, SARS Virus
gtgcgtgcttgctctgcttatcgaa

SEQ ID NO: 164970 - DNA, 25 bp, SARS Virus
tgcgtgcttgcattgcttatcgaag

SEQ ID NO: 164971 - DNA, 25 bp, SARS Virus
gcgtgcttgcactgcttatcgaaga

SEQ ID NO: 164972 - DNA, 25 bp, SARS Virus
cgtgcttgcacttcttatcgaagaa

SEQ ID NO: 164973 - DNA, 25 bp, SARS Virus
gtgcttgcactgtttatcgaagaag

SEQ ID NO: 164974 - DNA, 25 bp, SARS Virus
tgcttgcactgcttatcgaagaagc

SEQ ID NO: 164975 - DNA, 25 bp, SARS Virus
gcttgcactgcttatcgaagaagcg

SEQ ID NO: 164976 - DNA, 25 bp, SARS Virus
cttgcactgcttttcgaagaagcgc

SEQ ID NO: 164977 - DNA, 25 bp, SARS Virus
ttgcactgcttaacgaagaagcgcc

SEQ ID NO: 164978 - DNA, 25 bp, SARS Virus
tgcactgcttatagaagaagcgccc

SEQ ID NO: 164979 - DNA, 25 bp, SARS Virus
gcactgcttatcaaagaagcgccca

SEQ ID NO: 164980 - DNA, 25 bp, SARS Virus
cactgcttatcgaagaagcgcccac

SEQ ID NO: 164981 - DNA, 25 bp, SARS Virus
actgcttatcgaagaagcgcccact

SEQ ID NO: 164982 - DNA, 25 bp, SARS Virus
ctgcttatcgaaaaagcgcccacta

SEQ ID NO: 164983 - DNA, 25 bp, SARS Virus
tgcttatcgaagaagcgcccactat

SEQ ID NO: 164984 - DNA, 25 bp, SARS Virus
gcttatcgaagaagcgcccactatt

SEQ ID NO: 164985 - DNA, 25 bp, SARS Virus
cttatcgaagaaacgcccactattt

SEQ ID NO: 164986 - DNA, 25 bp, SARS Virus
ttatcgaagaagagcccactatttg

SEQ ID NO: 164987 - DNA, 25 bp, SARS Virus
tatcgaagaagcacccactatttgt

SEQ ID NO: 164988 - DNA, 25 bp, SARS Virus
atcgaagaagcgaccactatttgta

SEQ ID NO: 164989 - DNA, 25 bp, SARS Virus
tcgaagaagcgcacactatttgtat

SEQ ID NO: 164990 - DNA, 25 bp, SARS Virus
cgaagaagcgccaactatttgtata

SEQ ID NO: 164991 - DNA, 25 bp, SARS Virus
gaagaagcgcccactatttgtataa

SEQ ID NO: 164992 - DNA, 25 bp, SARS Virus
aagaagcgcccaatatttgtataat

SEQ ID NO: 164993 - DNA, 25 bp, SARS Virus
agaagcgcccacaatttgtataatc

SEQ ID NO: 164994 - DNA, 25 bp, SARS Virus
gaagcgcccactatttgtataatcc

SEQ ID NO: 164995 - DNA, 25 bp, SARS Virus
aagcgcccactaattgtataatccc

SEQ ID NO: 164996 - DNA, 25 bp, SARS Virus
agcgcccactatatgtataatccca

SEQ ID NO: 164997 - DNA, 25 bp, SARS Virus
gcgcccactattagtataatcccat

SEQ ID NO: 164998 - DNA, 25 bp, SARS Virus
cgcccactatttatataatcccatt

SEQ ID NO: 164999 - DNA, 25 bp, SARS Virus
gcccactatttgaataatcccattg

SEQ ID NO: 165000 - DNA, 25 bp, SARS Virus
cccactatttgtataatcccattgg

SEQ ID NO: 165001 - DNA, 25 bp, SARS Virus
ccactatttgtaaaatcccattggt

SEQ ID NO: 165002 - DNA, 25 bp, SARS Virus
cactatttgtataatcccattggta

SEQ ID NO: 165003 - DNA, 25 bp, SARS Virus
actatttgtataatcccattggtaa

SEQ ID NO: 165004 - DNA, 25 bp, SARS Virus
ctatttgtataaacccattggtaac

SEQ ID NO: 165005 - DNA, 25 bp, SARS Virus
tatttgtataataccattggtaact

SEQ ID NO: 165006 - DNA, 25 bp, SARS Virus
atttgtataatcacattggtaactg

SEQ ID NO: 165007 - DNA, 25 bp, SARS Virus
tttgtataatccaattggtaactga

SEQ ID NO: 165008 - DNA, 25 bp, SARS Virus
ttgtataatcccattggtaactgaa

SEQ ID NO: 165009 - DNA, 25 bp, SARS Virus
tgtataatcccaatggtaactgaac

SEQ ID NO: 165010 - DNA, 25 bp, SARS Virus
gtataatcccataggtaactgaacc

SEQ ID NO: 165011 - DNA, 25 bp, SARS Virus
tataatcccattagtaactgaacca

SEQ ID NO: 165012 - DNA, 25 bp, SARS Virus
ataatcccattgataactgaaccat

SEQ ID NO: 165013 - DNA, 25 bp, SARS Virus
taatcccattggaaactgaaccatt

SEQ ID NO: 165014 - DNA, 25 bp, SARS Virus
aatcccattggtaactgaaccatta

SEQ ID NO: 165015 - DNA, 25 bp, SARS Virus
atcccattggtaactgaaccattaa

SEQ ID NO: 165016 - DNA, 25 bp, SARS Virus
tcccattggtaaatgaaccattaag

SEQ ID NO: 165017 - DNA, 25 bp, SARS Virus
cccattggtaacagaaccattaagt

SEQ ID NO: 165018 - DNA, 25 bp, SARS Virus
ccattggtaactaaaccattaagta

SEQ ID NO: 165019 - DNA, 25 bp, SARS Virus
cattggtaactgaaccattaagtaa

SEQ ID NO: 165020 - DNA, 25 bp, SARS Virus
attggtaactgaaccattaagtaaa

SEQ ID NO: 165021 - DNA, 25 bp, SARS Virus
ttggtaactgaaacattaagtaaaa

SEQ ID NO: 165022 - DNA, 25 bp, SARS Virus
tggtaactgaacaattaagtaaaac

SEQ ID NO: 165023 - DNA, 25 bp, SARS Virus
ggtaactgaaccattaagtaaaact

SEQ ID NO: 165024 - DNA, 25 bp, SARS Virus
gtaactgaaccaataagtaaaactt

SEQ ID NO: 165025 - DNA, 25 bp, SARS Virus
taactgaaccataaagtaaaacttt

SEQ ID NO: 165026 - DNA, 25 bp, SARS Virus
aactgaaccattaagtaaaactttg

SEQ ID NO: 165027 - DNA, 25 bp, SARS Virus
actgaaccattaagtaaaactttgg

SEQ ID NO: 165028 - DNA, 25 bp, SARS Virus
ctgaaccattaaataaaactttggg

SEQ ID NO: 165029 - DNA, 25 bp, SARS Virus
tgaaccattaagaaaaactttgggt

SEQ ID NO: 165030 - DNA, 25 bp, SARS Virus
gaaccattaagtaaaactttgggta

SEQ ID NO: 165031 - DNA, 25 bp, SARS Virus
aaccattaagtaaaactttgggtag

SEQ ID NO: 165032 - DNA, 25 bp, SARS Virus
accattaagtaaaactttgggtagt

SEQ ID NO: 165033 - DNA, 25 bp, SARS Virus
ccattaagtaaaactttgggtagta

SEQ ID NO: 165034 - DNA, 25 bp, SARS Virus
cattaagtaaaaatttgggtagtat

SEQ ID NO: 165035 - DNA, 25 bp, SARS Virus
attaagtaaaacattgggtagtatc

SEQ ID NO: 165036 - DNA, 25 bp, SARS Virus
ttaagtaaaactatgggtagtatct

SEQ ID NO: 165037 - DNA, 25 bp, SARS Virus
taagtaaaacttagggtagtatctc

SEQ ID NO: 165038 - DNA, 25 bp, SARS Virus
aagtaaaactttaggtagtatctct

SEQ ID NO: 165039 - DNA, 25 bp, SARS Virus
agtaaaactttgagtagtatctcta

SEQ ID NO: 165040 - DNA, 25 bp, SARS Virus
gtaaaactttggatagtatctctac

SEQ ID NO: 165041 - DNA, 25 bp, SARS Virus
taaaactttgggaagtatctctact

SEQ ID NO: 165042 - DNA, 25 bp, SARS Virus
aaaactttgggtagtatctctactc

SEQ ID NO: 165043 - DNA, 25 bp, SARS Virus
aaactttgggtaatatctctactca

SEQ ID NO: 165044 - DNA, 25 bp, SARS Virus
aactttgggtagaatctctactcag

SEQ ID NO: 165045 - DNA, 25 bp, SARS Virus
actttgggtagtatctctactcaga

SEQ ID NO: 165046 - DNA, 25 bp, SARS Virus
ctttgggtagtaactctactcagat

SEQ ID NO: 165047 - DNA, 25 bp, SARS Virus
tttgggtagtatatctactcagatg

SEQ ID NO: 165048 - DNA, 25 bp, SARS Virus
ttgggtagtatcactactcagatgc

SEQ ID NO: 165049 - DNA, 25 bp, SARS Virus
tgggtagtatctatactcagatgcc

SEQ ID NO: 165050 - DNA, 25 bp, SARS Virus
gggtagtatctcaactcagatgcca

SEQ ID NO: 165051 - DNA, 25 bp, SARS Virus
ggtagtatctctactcagatgccat

SEQ ID NO: 165052 - DNA, 25 bp, SARS Virus
gtagtatctctaatcagatgccatc

SEQ ID NO: 165053 - DNA, 25 bp, SARS Virus
tagtatctctacacagatgccatcc

SEQ ID NO: 165054 - DNA, 25 bp, SARS Virus
agtatctctactaagatgccatcca

SEQ ID NO: 165055 - DNA, 25 bp, SARS Virus
gtatctctactcagatgccatccag

SEQ ID NO: 165056 - DNA, 25 bp, SARS Virus
tatctctactcaaatgccatccagt

SEQ ID NO: 165057 - DNA, 25 bp, SARS Virus
atctctactcagatgccatccagta

SEQ ID NO: 165058 - DNA, 25 bp, SARS Virus
tctctactcagaagccatccagtac

SEQ ID NO: 165059 - DNA, 25 bp, SARS Virus
ctctactcagataccatccagtaca

SEQ ID NO: 165060 - DNA, 25 bp, SARS Virus
tctactcagatgacatccagtacag

SEQ ID NO: 165061 - DNA, 25 bp, SARS Virus
ctactcagatgcaatccagtacagg

SEQ ID NO: 165062 - DNA, 25 bp, SARS Virus
tactcagatgccatccagtacagga

SEQ ID NO: 165063 - DNA, 25 bp, SARS Virus
actcagatgccaaccagtacaggaa

SEQ ID NO: 165064 - DNA, 25 bp, SARS Virus
ctcagatgccatacagtacaggaaa

SEQ ID NO: 165065 - DNA, 25 bp, SARS Virus
tcagatgccatcaagtacaggaaac

SEQ ID NO: 165066 - DNA, 25 bp, SARS Virus
cagatgccatccagtacaggaaacc

SEQ ID NO: 165067 - DNA, 25 bp, SARS Virus
agatgccatccaatacaggaaacca

SEQ ID NO: 165068 - DNA, 25 bp, SARS Virus
gatgccatccagaacaggaaaccat

SEQ ID NO: 165069 - DNA, 25 bp, SARS Virus
atgccatccagtacaggaaaccata

SEQ ID NO: 165070 - DNA, 25 bp, SARS Virus
tgccatccagtaaaggaaaccatac

SEQ ID NO: 165071 - DNA, 25 bp, SARS Virus
gccatccagtacaggaaaccatacg

SEQ ID NO: 165072 - DNA, 25 bp, SARS Virus
ccatccagtacaagaaaccatacgg

SEQ ID NO: 165073 - DNA, 25 bp, SARS Virus
catccagtacagaaaaccatacgga

SEQ ID NO: 165074 - DNA, 25 bp, SARS Virus
atccagtacaggaaaccatacggac

SEQ ID NO: 165075 - DNA, 25 bp, SARS Virus
tccagtacaggaaaccatacggacc

SEQ ID NO: 165076 - DNA, 25 bp, SARS Virus
ccagtacaggaaaccatacggacca

SEQ ID NO: 165077 - DNA, 25 bp, SARS Virus
cagtacaggaaaacatacggaccat

SEQ ID NO: 165078 - DNA, 25 bp, SARS Virus
agtacaggaaacaatacggaccata

SEQ ID NO: 165079 - DNA, 25 bp, SARS Virus
gtacaggaaaccatacggaccatac

SEQ ID NO: 165080 - DNA, 25 bp, SARS Virus
tacaggaaaccaaacggaccataca

SEQ ID NO: 165081 - DNA, 25 bp, SARS Virus
acaggaaaccatacggaccatacag

SEQ ID NO: 165082 - DNA, 25 bp, SARS Virus
caggaaaccataaggaccatacagt

SEQ ID NO: 165083 - DNA, 25 bp, SARS Virus
aggaaaccatacagaccatacagtt

SEQ ID NO: 165084 - DNA, 25 bp, SARS Virus
ggaaaccatacgaaccatacagttg

SEQ ID NO: 165085 - DNA, 25 bp, SARS Virus
gaaaccatacggaccatacagttgt

SEQ ID NO: 165086 - DNA, 25 bp, SARS Virus
aaaccatacggaacatacagttgtg

SEQ ID NO: 165087 - DNA, 25 bp, SARS Virus
aaccatacggacaatacagttgtgt

SEQ ID NO: 165088 - DNA, 25 bp, SARS Virus
accatacggaccatacagttgtgta

SEQ ID NO: 165089 - DNA, 25 bp, SARS Virus
ccatacggaccaaacagttgtgtat

SEQ ID NO: 165090 - DNA, 25 bp, SARS Virus
catacggaccatacagttgtgtatt

SEQ ID NO: 165091 - DNA, 25 bp, SARS Virus
atacggaccataaagttgtgtatta

SEQ ID NO: 165092 - DNA, 25 bp, SARS Virus
tacggaccatacagttgtgtattag

SEQ ID NO: 165093 - DNA, 25 bp, SARS Virus
acggaccatacaattgtgtattagg

SEQ ID NO: 165094 - DNA, 25 bp, SARS Virus
cggaccatacagatgtgtattagga

SEQ ID NO: 165095 - DNA, 25 bp, SARS Virus
ggaccatacagtagtgtattaggaa

SEQ ID NO: 165096 - DNA, 25 bp, SARS Virus
gaccatacagttatgtattaggaag

SEQ ID NO: 165097 - DNA, 25 bp, SARS Virus
accatacagttgagtattaggaagt

SEQ ID NO: 165098 - DNA, 25 bp, SARS Virus
ccatacagttgtatattaggaagtc

SEQ ID NO: 165099 - DNA, 25 bp, SARS Virus
catacagttgtgaattaggaagtca

SEQ ID NO: 165100 - DNA, 25 bp, SARS Virus
atacagttgtgtattaggaagtcag

SEQ ID NO: 165101 - DNA, 25 bp, SARS Virus
tacagttgtgtaataggaagtcaga

SEQ ID NO: 165102 - DNA, 25 bp, SARS Virus
acagttgtgtataaggaagtcagaa

SEQ ID NO: 165103 - DNA, 25 bp, SARS Virus
cagttgtgtattaggaagtcagaac

SEQ ID NO: 165104 - DNA, 25 bp, SARS Virus
agttgtgtattaagaagtcagaact

SEQ ID NO: 165105 - DNA, 25 bp, SARS Virus
gttgtgtattagaaagtcagaactt

SEQ ID NO: 165106 - DNA, 25 bp, SARS Virus
ttgtgtattaggaagtcagaacttg

SEQ ID NO: 165107 - DNA, 25 bp, SARS Virus
tgtgtattaggaagtcagaacttga

SEQ ID NO: 165108 - DNA, 25 bp, SARS Virus
gtgtattaggaaatcagaacttgaa

SEQ ID NO: 165109 - DNA, 25 bp, SARS Virus
tgtattaggaagacagaacttgaaa

SEQ ID NO: 165110 - DNA, 25 bp, SARS Virus
gtattaggaagtaagaacttgaaat

SEQ ID NO: 165111 - DNA, 25 bp, SARS Virus
tattaggaagtcagaacttgaaata

SEQ ID NO: 165112 - DNA, 25 bp, SARS Virus
attaggaagtcaaaacttgaaatat

SEQ ID NO: 165113 - DNA, 25 bp, SARS Virus
ttaggaagtcagaacttgaaatata

SEQ ID NO: 165114 - DNA, 25 bp, SARS Virus
taggaagtcagaacttgaaatatag

SEQ ID NO: 165115 - DNA, 25 bp, SARS Virus
aggaagtcagaaattgaaatatagt

SEQ ID NO: 165116 - DNA, 25 bp, SARS Virus
ggaagtcagaacatgaaatatagtt

SEQ ID NO: 165117 - DNA, 25 bp, SARS Virus
gaagtcagaactagaaatatagttg

SEQ ID NO: 165118 - DNA, 25 bp, SARS Virus
aagtcagaacttaaaatatagttgc

SEQ ID NO: 165119 - DNA, 25 bp, SARS Virus
agtcagaacttgaaatatagttgcg

SEQ ID NO: 165120 - DNA, 25 bp, SARS Virus
gtcagaacttgaaatatagttgcga

SEQ ID NO: 165121 - DNA, 25 bp, SARS Virus
tcagaacttgaaatatagttgcgac

SEQ ID NO: 165122 - DNA, 25 bp, SARS Virus
cagaacttgaaaaatagttgcgact

SEQ ID NO: 165123 - DNA, 25 bp, SARS Virus
agaacttgaaatatagttgcgactc

SEQ ID NO: 165124 - DNA, 25 bp, SARS Virus
gaacttgaaataaagttgcgactcc

SEQ ID NO: 165125 - DNA, 25 bp, SARS Virus
aacttgaaatatagttgcgactcca

SEQ ID NO: 165126 - DNA, 25 bp, SARS Virus
acttgaaatataattgcgactccac

SEQ ID NO: 165127 - DNA, 25 bp, SARS Virus
cttgaaatatagatgcgactccaca

SEQ ID NO: 165128 - DNA, 25 bp, SARS Virus
ttgaaatatagtagcgactccacac

SEQ ID NO: 165129 - DNA, 25 bp, SARS Virus
tgaaatatagttacgactccacaca

SEQ ID NO: 165130 - DNA, 25 bp, SARS Virus
gaaatatagttgagactccacacat

SEQ ID NO: 165131 - DNA, 25 bp, SARS Virus
aaatatagttgcaactccacacatc

SEQ ID NO: 165132 - DNA, 25 bp, SARS Virus
aatatagttgcgactccacacatcc

SEQ ID NO: 165133 - DNA, 25 bp, SARS Virus
atatagttgcgaatccacacatcca

SEQ ID NO: 165134 - DNA, 25 bp, SARS Virus
tatagttgcgacaccacacatccac

SEQ ID NO: 165135 - DNA, 25 bp, SARS Virus
atagttgcgactacacacatccacg

SEQ ID NO: 165136 - DNA, 25 bp, SARS Virus
tagttgcgactcaacacatccacgg

SEQ ID NO: 165137 - DNA, 25 bp, SARS Virus
agttgcgactccacacatccacgga

SEQ ID NO: 165138 - DNA, 25 bp, SARS Virus
gttgcgactccaaacatccacggac

SEQ ID NO: 165139 - DNA, 25 bp, SARS Virus
ttgcgactccacacatccacggaca

SEQ ID NO: 165140 - DNA, 25 bp, SARS Virus
tgcgactccacaaatccacggacac

SEQ ID NO: 165141 - DNA, 25 bp, SARS Virus
gcgactccacacatccacggacaca

SEQ ID NO: 165142 - DNA, 25 bp, SARS Virus
cgactccacacaaccacggacacat

SEQ ID NO: 165143 - DNA, 25 bp, SARS Virus
gactccacacatacacggacacatc

SEQ ID NO: 165144 - DNA, 25 bp, SARS Virus
actccacacatcaacggacacatcc

SEQ ID NO: 165145 - DNA, 25 bp, SARS Virus
ctccacacatccacggacacatcct

SEQ ID NO: 165146 - DNA, 25 bp, SARS Virus
tccacacatccaaggacacatccta

SEQ ID NO: 165147 - DNA, 25 bp, SARS Virus
ccacacatccacagacacatcctac

SEQ ID NO: 165148 - DNA, 25 bp, SARS Virus
cacacatccacgaacacatcctact

SEQ ID NO: 165149 - DNA, 25 bp, SARS Virus
acacatccacggacacatcctactt

SEQ ID NO: 165150 - DNA, 25 bp, SARS Virus
cacatccacggaaacatcctacttc

SEQ ID NO: 165151 - DNA, 25 bp, SARS Virus
acatccacggacacatcctacttct

SEQ ID NO: 165152 - DNA, 25 bp, SARS Virus
catccacggacaaatcctacttctg

SEQ ID NO: 165153 - DNA, 25 bp, SARS Virus
atccacggacacatcctacttctgg

SEQ ID NO: 165154 - DNA, 25 bp, SARS Virus
tccacggacacaacctacttctggt

SEQ ID NO: 165155 - DNA, 25 bp, SARS Virus
ccacggacacatactacttctggtc

SEQ ID NO: 165156 - DNA, 25 bp, SARS Virus
cacggacacatcatacttctggtca

SEQ ID NO: 165157 - DNA, 25 bp, SARS Virus
acggacacatccaacttctggtcat

SEQ ID NO: 165158 - DNA, 25 bp, SARS Virus
cggacacatcctacttctggtcatt

SEQ ID NO: 165159 - DNA, 25 bp, SARS Virus
ggacacatcctaattctggtcatta

SEQ ID NO: 165160 - DNA, 25 bp, SARS Virus
gacacatcctacatctggtcattac

SEQ ID NO: 165161 - DNA, 25 bp, SARS Virus
acacatcctactactggtcattact

SEQ ID NO: 165162 - DNA, 25 bp, SARS Virus
cacatcctacttatggtcattacta

SEQ ID NO: 165163 - DNA, 25 bp, SARS Virus
acatcctacttcaggtcattactag

SEQ ID NO: 165164 - DNA, 25 bp, SARS Virus
catcctacttctagtcattactaga

SEQ ID NO: 165165 - DNA, 25 bp, SARS Virus
atcctacttctgatcattactagaa

SEQ ID NO: 165166 - DNA, 25 bp, SARS Virus
tcctacttctggacattactagaat

SEQ ID NO: 165167 - DNA, 25 bp, SARS Virus
cctacttctggtaattactagaatg

SEQ ID NO: 165168 - DNA, 25 bp, SARS Virus
ctacttctggtcattactagaatga

SEQ ID NO: 165169 - DNA, 25 bp, SARS Virus
tacttctggtcaatactagaatgat

SEQ ID NO: 165170 - DNA, 25 bp, SARS Virus
acttctggtcataactagaatgatg

SEQ ID NO: 165171 - DNA, 25 bp, SARS Virus
cttctggtcattactagaatgatgt

SEQ ID NO: 165172 - DNA, 25 bp, SARS Virus
ttctggtcattaatagaatgatgtc

SEQ ID NO: 165173 - DNA, 25 bp, SARS Virus
tctggtcattacaagaatgatgtca

SEQ ID NO: 165174 - DNA, 25 bp, SARS Virus
ctggtcattactagaatgatgtcag

SEQ ID NO: 165175 - DNA, 25 bp, SARS Virus
tggtcattactaaaatgatgtcagg

SEQ ID NO: 165176 - DNA, 25 bp, SARS Virus
ggtcattactagaatgatgtcagga

SEQ ID NO: 165177 - DNA, 25 bp, SARS Virus
gtcattactagaatgatgtcaggaa

SEQ ID NO: 165178 - DNA, 25 bp, SARS Virus
tcattactagaaagatgtcaggaat

SEQ ID NO: 165179 - DNA, 25 bp, SARS Virus
cattactagaataatgtcaggaatt

SEQ ID NO: 165180 - DNA, 25 bp, SARS Virus
attactagaatgatgtcaggaattt

SEQ ID NO: 165181 - DNA, 25 bp, SARS Virus
ttactagaatgaagtcaggaatttt

SEQ ID NO: 165182 - DNA, 25 bp, SARS Virus
tactagaatgatatcaggaattttt

SEQ ID NO: 165183 - DNA, 25 bp, SARS Virus
actagaatgatgacaggaatttttc

SEQ ID NO: 165184 - DNA, 25 bp, SARS Virus
ctagaatgatgtaaggaatttttca

SEQ ID NO: 165185 - DNA, 25 bp, SARS Virus
tagaatgatgtcaggaatttttcag

SEQ ID NO: 165186 - DNA, 25 bp, SARS Virus
agaatgatgtcaagaatttttcagg

SEQ ID NO: 165187 - DNA, 25 bp, SARS Virus
gaatgatgtcagaaatttttcaggt

SEQ ID NO: 165188 - DNA, 25 bp, SARS Virus
aatgatgtcaggaatttttcaggtc

SEQ ID NO: 165189 - DNA, 25 bp, SARS Virus
atgatgtcaggaatttttcaggtca

SEQ ID NO: 165190 - DNA, 25 bp, SARS Virus
tgatgtcaggaaattttcaggtcaa

SEQ ID NO: 165191 - DNA, 25 bp, SARS Virus
gatgtcaggaatatttcaggtcaat

SEQ ID NO: 165192 - DNA, 25 bp, SARS Virus
atgtcaggaattattcaggtcaatg

SEQ ID NO: 165193 - DNA, 25 bp, SARS Virus
tgtcaggaatttatcaggtcaatgt

SEQ ID NO: 165194 - DNA, 25 bp, SARS Virus
gtcaggaattttacaggtcaatgta

SEQ ID NO: 165195 - DNA, 25 bp, SARS Virus
tcaggaatttttaaggtcaatgtaa

SEQ ID NO: 165196 - DNA, 25 bp, SARS Virus
caggaatttttcaggtcaatgtaaa

SEQ ID NO: 165197 - DNA, 25 bp, SARS Virus
aggaatttttcaagtcaatgtaaaa

SEQ ID NO: 165198 - DNA, 25 bp, SARS Virus
ggaatttttcagatcaatgtaaaag

SEQ ID NO: 165199 - DNA, 25 bp, SARS Virus
gaatttttcaggacaatgtaaaaga

SEQ ID NO: 165200 - DNA, 25 bp, SARS Virus
aatttttcaggtaaatgtaaaagac

SEQ ID NO: 165201 - DNA, 25 bp, SARS Virus
atttttcaggtcaatgtaaaagacg

SEQ ID NO: 165202 - DNA, 25 bp, SARS Virus
tttttcaggtcaatgtaaaagacga

SEQ ID NO: 165203 - DNA, 25 bp, SARS Virus
ttttcaggtcaaagtaaaagacgaa

SEQ ID NO: 165204 - DNA, 25 bp, SARS Virus
tttcaggtcaatataaaagacgaac

SEQ ID NO: 165205 - DNA, 25 bp, SARS Virus
ttcaggtcaatgaaaaagacgaaca

SEQ ID NO: 165206 - DNA, 25 bp, SARS Virus
tcaggtcaatgtaaaagacgaacat

SEQ ID NO: 165207 - DNA, 25 bp, SARS Virus
caggtcaatgtaaaagacgaacatt

SEQ ID NO: 165208 - DNA, 25 bp, SARS Virus
aggtcaatgtaaaagacgaacatta

SEQ ID NO: 165209 - DNA, 25 bp, SARS Virus
ggtcaatgtaaaagacgaacattac

SEQ ID NO: 165210 - DNA, 25 bp, SARS Virus
gtcaatgtaaaaaacgaacattaca

SEQ ID NO: 165211 - DNA, 25 bp, SARS Virus
tcaatgtaaaagacgaacattacat

SEQ ID NO: 165212 - DNA, 25 bp, SARS Virus
caatgtaaaagaagaacattacatc

SEQ ID NO: 165213 - DNA, 25 bp, SARS Virus
aatgtaaaagacaaacattacatcg

SEQ ID NO: 165214 - DNA, 25 bp, SARS Virus
atgtaaaagacgaacattacatcgg

SEQ ID NO: 165215 - DNA, 25 bp, SARS Virus
tgtaaaagacgaacattacatcggt

SEQ ID NO: 165216 - DNA, 25 bp, SARS Virus
gtaaaagacgaaaattacatcggtg

SEQ ID NO: 165217 - DNA, 25 bp, SARS Virus
taaaagacgaacattacatcggtgt

SEQ ID NO: 165218 - DNA, 25 bp, SARS Virus
aaaagacgaacaatacatcggtgta

SEQ ID NO: 165219 - DNA, 25 bp, SARS Virus
aaagacgaacataacatcggtgtaa

SEQ ID NO: 165220 - DNA, 25 bp, SARS Virus
aagacgaacattacatcggtgtaac

SEQ ID NO: 165221 - DNA, 25 bp, SARS Virus
agacgaacattaaatcggtgtaacg

SEQ ID NO: 165222 - DNA, 25 bp, SARS Virus
gacgaacattacatcggtgtaacgc

SEQ ID NO: 165223 - DNA, 25 bp, SARS Virus
acgaacattacaacggtgtaacgct

SEQ ID NO: 165224 - DNA, 25 bp, SARS Virus
cgaacattacataggtgtaacgctg

SEQ ID NO: 165225 - DNA, 25 bp, SARS Virus
gaacattacatcagtgtaacgctgc

SEQ ID NO: 165226 - DNA, 25 bp, SARS Virus
aacattacatcgatgtaacgctgca

SEQ ID NO: 165227 - DNA, 25 bp, SARS Virus
acattacatcggagtaacgctgcac

SEQ ID NO: 165228 - DNA, 25 bp, SARS Virus
cattacatcggtataacgctgcacc

SEQ ID NO: 165229 - DNA, 25 bp, SARS Virus
attacatcggtgaaacgctgcacca

SEQ ID NO: 165230 - DNA, 25 bp, SARS Virus
ttacatcggtgtaacgctgcaccat

SEQ ID NO: 165231 - DNA, 25 bp, SARS Virus
tacatcggtgtaacgctgcaccata

SEQ ID NO: 165232 - DNA, 25 bp, SARS Virus
acatcggtgtaaagctgcaccataa

SEQ ID NO: 165233 - DNA, 25 bp, SARS Virus
catcggtgtaacactgcaccataaa

SEQ ID NO: 165234 - DNA, 25 bp, SARS Virus
atcggtgtaacgatgcaccataaag

SEQ ID NO: 165235 - DNA, 25 bp, SARS Virus
tcggtgtaacgcagcaccataaaga

SEQ ID NO: 165236 - DNA, 25 bp, SARS Virus
cggtgtaacgctacaccataaagat

SEQ ID NO: 165237 - DNA, 25 bp, SARS Virus
ggtgtaacgctgaaccataaagatc

SEQ ID NO: 165238 - DNA, 25 bp, SARS Virus
gtgtaacgctgcaccataaagatct

SEQ ID NO: 165239 - DNA, 25 bp, SARS Virus
tgtaacgctgcaacataaagatctg

SEQ ID NO: 165240 - DNA, 25 bp, SARS Virus
gtaacgctgcacaataaagatctga

SEQ ID NO: 165241 - DNA, 25 bp, SARS Virus
taacgctgcaccataaagatctgaa

SEQ ID NO: 165242 - DNA, 25 bp, SARS Virus
aacgctgcaccaaaaagatctgaac

SEQ ID NO: 165243 - DNA, 25 bp, SARS Virus
acgctgcaccataaagatctgaaca

SEQ ID NO: 165244 - DNA, 25 bp, SARS Virus
cgctgcaccataaagatctgaacat

SEQ ID NO: 165245 - DNA, 25 bp, SARS Virus
gctgcaccataaagatctgaacatt

SEQ ID NO: 165246 - DNA, 25 bp, SARS Virus
ctgcaccataaaaatctgaacattt

SEQ ID NO: 165247 - DNA, 25 bp, SARS Virus
tgcaccataaagatctgaacattta

SEQ ID NO: 165248 - DNA, 25 bp, SARS Virus
gcaccataaagaactgaacatttaa

SEQ ID NO: 165249 - DNA, 25 bp, SARS Virus
caccataaagatatgaacatttaac

SEQ ID NO: 165250 - DNA, 25 bp, SARS Virus
accataaagatcagaacatttaacg

SEQ ID NO: 165251 - DNA, 25 bp, SARS Virus
ccataaagatctaaacatttaacgt

SEQ ID NO: 165252 - DNA, 25 bp, SARS Virus
cataaagatctgaacatttaacgtc

SEQ ID NO: 165253 - DNA, 25 bp, SARS Virus
ataaagatctgaacatttaacgtca

SEQ ID NO: 165254 - DNA, 25 bp, SARS Virus
taaagatctgaaaatttaacgtcaa

SEQ ID NO: 165255 - DNA, 25 bp, SARS Virus
aaagatctgaacatttaacgtcaaa

SEQ ID NO: 165256 - DNA, 25 bp, SARS Virus
aagatctgaacaattaacgtcaaac

SEQ ID NO: 165257 - DNA, 25 bp, SARS Virus
agatctgaacatataacgtcaaaca

SEQ ID NO: 165258 - DNA, 25 bp, SARS Virus
gatctgaacattaaacgtcaaacag

SEQ ID NO: 165259 - DNA, 25 bp, SARS Virus
atctgaacatttaacgtcaaacagt

SEQ ID NO: 165260 - DNA, 25 bp, SARS Virus
tctgaacatttaacgtcaaacagta

SEQ ID NO: 165261 - DNA, 25 bp, SARS Virus
ctgaacatttaaagtcaaacagtat

SEQ ID NO: 165262 - DNA, 25 bp, SARS Virus
tgaacatttaacatcaaacagtatt

SEQ ID NO: 165263 - DNA, 25 bp, SARS Virus
gaacatttaacgacaaacagtattt

SEQ ID NO: 165264 - DNA, 25 bp, SARS Virus
aacatttaacgtaaaacagtatttc

SEQ ID NO: 165265 - DNA, 25 bp, SARS Virus
acatttaacgtcaaacagtatttct

SEQ ID NO: 165266 - DNA, 25 bp, SARS Virus
catttaacgtcaaacagtatttcta

SEQ ID NO: 165267 - DNA, 25 bp, SARS Virus
atttaacgtcaaacagtatttctag

SEQ ID NO: 165268 - DNA, 25 bp, SARS Virus
tttaacgtcaaaaagtatttctaga

SEQ ID NO: 165269 - DNA, 25 bp, SARS Virus
ttaacgtcaaacagtatttctagag

SEQ ID NO: 165270 - DNA, 25 bp, SARS Virus
taacgtcaaacaatatttctagaga

SEQ ID NO: 165271 - DNA, 25 bp, SARS Virus
aacgtcaaacagaatttctagagat

SEQ ID NO: 165272 - DNA, 25 bp, SARS Virus
acgtcaaacagtatttctagagata

SEQ ID NO: 165273 - DNA, 25 bp, SARS Virus
cgtcaaacagtaattctagagatag

SEQ ID NO: 165274 - DNA, 25 bp, SARS Virus
gtcaaacagtatatctagagatagt

SEQ ID NO: 165275 - DNA, 25 bp, SARS Virus
tcaaacagtattactagagatagtc

SEQ ID NO: 165276 - DNA, 25 bp, SARS Virus
caaacagtatttatagagatagtct

SEQ ID NO: 165277 - DNA, 25 bp, SARS Virus
aaacagtatttcaagagatagtctg

SEQ ID NO: 165278 - DNA, 25 bp, SARS Virus
aacagtatttctagagatagtctgt

SEQ ID NO: 165279 - DNA, 25 bp, SARS Virus
acagtatttctaaagatagtctgta

SEQ ID NO: 165280 - DNA, 25 bp, SARS Virus
cagtatttctagagatagtctgtaa

SEQ ID NO: 165281 - DNA, 25 bp, SARS Virus
agtatttctagaaatagtctgtaat

SEQ ID NO: 165282 - DNA, 25 bp, SARS Virus
gtatttctagagatagtctgtaata

SEQ ID NO: 165283 - DNA, 25 bp, SARS Virus
tatttctagagaaagtctgtaatac

SEQ ID NO: 165284 - DNA, 25 bp, SARS Virus
atttctagagatagtctgtaatacg

SEQ ID NO: 165285 - DNA, 25 bp, SARS Virus
tttctagagataatctgtaatacgt

SEQ ID NO: 165286 - DNA, 25 bp, SARS Virus
ttctagagatagactgtaatacgtg

SEQ ID NO: 165287 - DNA, 25 bp, SARS Virus
tctagagatagtatgtaatacgtgt

SEQ ID NO: 165288 - DNA, 25 bp, SARS Virus
ctagagatagtcagtaatacgtgtt

SEQ ID NO: 165289 - DNA, 25 bp, SARS Virus
tagagatagtctataatacgtgttt

SEQ ID NO: 165290 - DNA, 25 bp, SARS Virus
agagatagtctgaaatacgtgtttt

SEQ ID NO: 165291 - DNA, 25 bp, SARS Virus
gagatagtctgtaatacgtgtttta

SEQ ID NO: 165292 - DNA, 25 bp, SARS Virus
agatagtctgtaatacgtgttttac

SEQ ID NO: 165293 - DNA, 25 bp, SARS Virus
gatagtctgtaaaacgtgttttacg

SEQ ID NO: 165294 - DNA, 25 bp, SARS Virus
atagtctgtaatacgtgttttacgg

SEQ ID NO: 165295 - DNA, 25 bp, SARS Virus
tagtctgtaataagtgttttacggt

SEQ ID NO: 165296 - DNA, 25 bp, SARS Virus
agtctgtaatacatgttttacggtt

SEQ ID NO: 165297 - DNA, 25 bp, SARS Virus
gtctgtaatacgagttttacggtta

SEQ ID NO: 165298 - DNA, 25 bp, SARS Virus
tctgtaatacgtattttacggttaa

SEQ ID NO: 165299 - DNA, 25 bp, SARS Virus
ctgtaatacgtgatttacggttaaa

SEQ ID NO: 165300 - DNA, 25 bp, SARS Virus
tgtaatacgtgtattacggttaaaa

SEQ ID NO: 165301 - DNA, 25 bp, SARS Virus
gtaatacgtgttatacggttaaaaa

SEQ ID NO: 165302 - DNA, 25 bp, SARS Virus
taatacgtgtttaacggttaaaaac

SEQ ID NO: 165303 - DNA, 25 bp, SARS Virus
aatacgtgttttacggttaaaaacg

SEQ ID NO: 165304 - DNA, 25 bp, SARS Virus
atacgtgttttaaggttaaaaacgg

SEQ ID NO: 165305 - DNA, 25 bp, SARS Virus
tacgtgttttacagttaaaaacggg

SEQ ID NO: 165306 - DNA, 25 bp, SARS Virus
acgtgttttacgattaaaaacggga

SEQ ID NO: 165307 - DNA, 25 bp, SARS Virus
cgtgttttacggataaaaacgggaa

SEQ ID NO: 165308 - DNA, 25 bp, SARS Virus
gtgttttacggtaaaaaacgggaac

SEQ ID NO: 165309 - DNA, 25 bp, SARS Virus
tgttttacggttaaaaacgggaaca

SEQ ID NO: 165310 - DNA, 25 bp, SARS Virus
gttttacggttaaaaacgggaacac

SEQ ID NO: 165311 - DNA, 25 bp, SARS Virus
ttttacggttaaaaacgggaacact

SEQ ID NO: 165312 - DNA, 25 bp, SARS Virus
tttacggttaaaaacgggaacacta

SEQ ID NO: 165313 - DNA, 25 bp, SARS Virus
ttacggttaaaaacgggaacactat

SEQ ID NO: 165314 - DNA, 25 bp, SARS Virus
tacggttaaaaaagggaacactatc

SEQ ID NO: 165315 - DNA, 25 bp, SARS Virus
acggttaaaaacaggaacactatcg

SEQ ID NO: 165316 - DNA, 25 bp, SARS Virus
cggttaaaaacgagaacactatcgg

SEQ ID NO: 165317 - DNA, 25 bp, SARS Virus
ggttaaaaacggaaacactatcggt

SEQ ID NO: 165318 - DNA, 25 bp, SARS Virus
gttaaaaacgggaacactatcggtg

SEQ ID NO: 165319 - DNA, 25 bp, SARS Virus
ttaaaaacgggaacactatcggtgt

SEQ ID NO: 165320 - DNA, 25 bp, SARS Virus
taaaaacgggaaaactatcggtgta

SEQ ID NO: 165321 - DNA, 25 bp, SARS Virus
aaaaacgggaacactatcggtgtaa

SEQ ID NO: 165322 - DNA, 25 bp, SARS Virus
aaaacgggaacaatatcggtgtaac

SEQ ID NO: 165323 - DNA, 25 bp, SARS Virus
aaacgggaacacaatcggtgtaact

SEQ ID NO: 165324 - DNA, 25 bp, SARS Virus
aacgggaacactatcggtgtaactt

SEQ ID NO: 165325 - DNA, 25 bp, SARS Virus
acgggaacactaacggtgtaacttc

SEQ ID NO: 165326 - DNA, 25 bp, SARS Virus
cgggaacactataggtgtaacttcg

SEQ ID NO: 165327 - DNA, 25 bp, SARS Virus
gggaacactatcagtgtaacttcgc

SEQ ID NO: 165328 - DNA, 25 bp, SARS Virus
ggaacactatcgatgtaacttcgcc

SEQ ID NO: 165329 - DNA, 25 bp, SARS Virus
gaacactatcggagtaacttcgcca

SEQ ID NO: 165330 - DNA, 25 bp, SARS Virus
aacactatcggtataacttcgccaa

SEQ ID NO: 165331 - DNA, 25 bp, SARS Virus
acactatcggtgaaacttcgccaac

SEQ ID NO: 165332 - DNA, 25 bp, SARS Virus
cactatcggtgtaacttcgccaact

SEQ ID NO: 165333 - DNA, 25 bp, SARS Virus
actatcggtgtaacttcgccaactg

SEQ ID NO: 165334 - DNA, 25 bp, SARS Virus
ctatcggtgtaaattcgccaactgt

SEQ ID NO: 165335 - DNA, 25 bp, SARS Virus
tatcggtgtaacatcgccaactgta

SEQ ID NO: 165336 - DNA, 25 bp, SARS Virus
atcggtgtaactacgccaactgtaa

SEQ ID NO: 165337 - DNA, 25 bp, SARS Virus
tcggtgtaacttagccaactgtaat

SEQ ID NO: 165338 - DNA, 25 bp, SARS Virus
cggtgtaacttcaccaactgtaatg

SEQ ID NO: 165339 - DNA, 25 bp, SARS Virus
ggtgtaacttcgacaactgtaatgt

SEQ ID NO: 165340 - DNA, 25 bp, SARS Virus
gtgtaacttcgcaaactgtaatgtt

SEQ ID NO: 165341 - DNA, 25 bp, SARS Virus
tgtaacttcgccaactgtaatgttc

SEQ ID NO: 165342 - DNA, 25 bp, SARS Virus
gtaacttcgccaactgtaatgttct

SEQ ID NO: 165343 - DNA, 25 bp, SARS Virus
taacttcgccaaatgtaatgttctc

SEQ ID NO: 165344 - DNA, 25 bp, SARS Virus
aacttcgccaacagtaatgttctca

SEQ ID NO: 165345 - DNA, 25 bp, SARS Virus
acttcgccaactataatgttctcac

SEQ ID NO: 165346 - DNA, 25 bp, SARS Virus
cttcgccaactgaaatgttctcaca

SEQ ID NO: 165347 - DNA, 25 bp, SARS Virus
ttcgccaactgtaatgttctcacac

SEQ ID NO: 165348 - DNA, 25 bp, SARS Virus
tcgccaactgtaatgttctcacacg

SEQ ID NO: 165349 - DNA, 25 bp, SARS Virus
cgccaactgtaaagttctcacacga

SEQ ID NO: 165350 - DNA, 25 bp, SARS Virus
gccaactgtaatattctcacacgac

SEQ ID NO: 165351 - DNA, 25 bp, SARS Virus
ccaactgtaatgatctcacacgaca

SEQ ID NO: 165352 - DNA, 25 bp, SARS Virus
caactgtaatgtactcacacgacaa

SEQ ID NO: 165353 - DNA, 25 bp, SARS Virus
aactgtaatgttatcacacgacaaa

SEQ ID NO: 165354 - DNA, 25 bp, SARS Virus
actgtaatgttcacacacgacaaag

SEQ ID NO: 165355 - DNA, 25 bp, SARS Virus
ctgtaatgttctaacacgacaaagt

SEQ ID NO: 165356 - DNA, 25 bp, SARS Virus
tgtaatgttctcacacgacaaagtc

SEQ ID NO: 165357 - DNA, 25 bp, SARS Virus
gtaatgttctcaaacgacaaagtca

SEQ ID NO: 165358 - DNA, 25 bp, SARS Virus
taatgttctcacacgacaaagtcat

SEQ ID NO: 165359 - DNA, 25 bp, SARS Virus
aatgttctcacaagacaaagtcatc

SEQ ID NO: 165360 - DNA, 25 bp, SARS Virus
atgttctcacacaacaaagtcatca

SEQ ID NO: 165361 - DNA, 25 bp, SARS Virus
tgttctcacacgacaaagtcatcaa

SEQ ID NO: 165362 - DNA, 25 bp, SARS Virus
gttctcacacgaaaaagtcatcaaa

SEQ ID NO: 165363 - DNA, 25 bp, SARS Virus
ttctcacacgacaaagtcatcaaac

SEQ ID NO: 165364 - DNA, 25 bp, SARS Virus
tctcacacgacaaagtcatcaaaca

SEQ ID NO: 165365 - DNA, 25 bp, SARS Virus
ctcacacgacaaagtcatcaaacac

SEQ ID NO: 165366 - DNA, 25 bp, SARS Virus
tcacacgacaaaatcatcaaacaca

SEQ ID NO: 165367 - DNA, 25 bp, SARS Virus
cacacgacaaagacatcaaacacac

SEQ ID NO: 165368 - DNA, 25 bp, SARS Virus
acacgacaaagtaatcaaacacact

SEQ ID NO: 165369 - DNA, 25 bp, SARS Virus
cacgacaaagtcatcaaacacactt

SEQ ID NO: 165370 - DNA, 25 bp, SARS Virus
acgacaaagtcaacaaacacactta

SEQ ID NO: 165371 - DNA, 25 bp, SARS Virus
cgacaaagtcataaaacacacttat

SEQ ID NO: 165372 - DNA, 25 bp, SARS Virus
gacaaagtcatcaaacacacttata

SEQ ID NO: 165373 - DNA, 25 bp, SARS Virus
acaaagtcatcaaacacacttatac

SEQ ID NO: 165374 - DNA, 25 bp, SARS Virus
caaagtcatcaaacacacttatact

SEQ ID NO: 165375 - DNA, 25 bp, SARS Virus
aaagtcatcaaaaacacttatactg

SEQ ID NO: 165376 - DNA, 25 bp, SARS Virus
aagtcatcaaacacacttatactgt

SEQ ID NO: 165377 - DNA, 25 bp, SARS Virus
agtcatcaaacaaacttatactgta

SEQ ID NO: 165378 - DNA, 25 bp, SARS Virus
gtcatcaaacacacttatactgtat

SEQ ID NO: 165379 - DNA, 25 bp, SARS Virus
tcatcaaacacaattatactgtatc

SEQ ID NO: 165380 - DNA, 25 bp, SARS Virus
catcaaacacacatatactgtatca

SEQ ID NO: 165381 - DNA, 25 bp, SARS Virus
atcaaacacactaatactgtatcag

SEQ ID NO: 165382 - DNA, 25 bp, SARS Virus
tcaaacacacttatactgtatcagt

SEQ ID NO: 165383 - DNA, 25 bp, SARS Virus
caaacacacttaaactgtatcagta

SEQ ID NO: 165384 - DNA, 25 bp, SARS Virus
aaacacacttatactgtatcagtat

SEQ ID NO: 165385 - DNA, 25 bp, SARS Virus
aacacacttataatgtatcagtata

SEQ ID NO: 165386 - DNA, 25 bp, SARS Virus
acacacttatacagtatcagtataa

SEQ ID NO: 165387 - DNA, 25 bp, SARS Virus
cacacttatactatatcagtataag

SEQ ID NO: 165388 - DNA, 25 bp, SARS Virus
acacttatactgaatcagtataagt

SEQ ID NO: 165389 - DNA, 25 bp, SARS Virus
cacttatactgtatcagtataagtc

SEQ ID NO: 165390 - DNA, 25 bp, SARS Virus
acttatactgtaacagtataagtct

SEQ ID NO: 165391 - DNA, 25 bp, SARS Virus
cttatactgtataagtataagtctt

SEQ ID NO: 165392 - DNA, 25 bp, SARS Virus
ttatactgtatcagtataagtcttg

SEQ ID NO: 165393 - DNA, 25 bp, SARS Virus
tatactgtatcaatataagtcttgg

SEQ ID NO: 165394 - DNA, 25 bp, SARS Virus
atactgtatcagaataagtcttggg

SEQ ID NO: 165395 - DNA, 25 bp, SARS Virus
tactgtatcagtataagtcttggga

SEQ ID NO: 165396 - DNA, 25 bp, SARS Virus
actgtatcagtaaaagtcttgggac

SEQ ID NO: 165397 - DNA, 25 bp, SARS Virus
ctgtatcagtataagtcttgggaca

SEQ ID NO: 165398 - DNA, 25 bp, SARS Virus
tgtatcagtataagtcttgggacac

SEQ ID NO: 165399 - DNA, 25 bp, SARS Virus
gtatcagtataaatcttgggacact

SEQ ID NO: 165400 - DNA, 25 bp, SARS Virus
tatcagtataagacttgggacacta

SEQ ID NO: 165401 - DNA, 25 bp, SARS Virus
atcagtataagtattgggacactac

SEQ ID NO: 165402 - DNA, 25 bp, SARS Virus
tcagtataagtcatgggacactact

SEQ ID NO: 165403 - DNA, 25 bp, SARS Virus
cagtataagtctagggacactactt

SEQ ID NO: 165404 - DNA, 25 bp, SARS Virus
agtataagtcttaggacactactta

SEQ ID NO: 165405 - DNA, 25 bp, SARS Virus
gtataagtcttgagacactacttag

SEQ ID NO: 165406 - DNA, 25 bp, SARS Virus
tataagtcttggaacactacttagt

SEQ ID NO: 165407 - DNA, 25 bp, SARS Virus
ataagtcttgggacactacttagtt

SEQ ID NO: 165408 - DNA, 25 bp, SARS Virus
taagtcttgggaaactacttagttg

SEQ ID NO: 165409 - DNA, 25 bp, SARS Virus
aagtcttgggacactacttagttgt

SEQ ID NO: 165410 - DNA, 25 bp, SARS Virus
agtcttgggacaatacttagttgtc

SEQ ID NO: 165411 - DNA, 25 bp, SARS Virus
gtcttgggacacaacttagttgtca

SEQ ID NO: 165412 - DNA, 25 bp, SARS Virus
tcttgggacactacttagttgtcag

SEQ ID NO: 165413 - DNA, 25 bp, SARS Virus
cttgggacactaattagttgtcaga

SEQ ID NO: 165414 - DNA, 25 bp, SARS Virus
ttgggacactacatagttgtcagac

SEQ ID NO: 165415 - DNA, 25 bp, SARS Virus
tgggacactactaagttgtcagacg

SEQ ID NO: 165416 - DNA, 25 bp, SARS Virus
gggacactacttagttgtcagacgc

SEQ ID NO: 165417 - DNA, 25 bp, SARS Virus
ggacactacttaattgtcagacgca

SEQ ID NO: 165418 - DNA, 25 bp, SARS Virus
gacactacttagatgtcagacgcat

SEQ ID NO: 165419 - DNA, 25 bp, SARS Virus
acactacttagtagtcagacgcatc

SEQ ID NO: 165420 - DNA, 25 bp, SARS Virus
cactacttagttatcagacgcatcc

SEQ ID NO: 165421 - DNA, 25 bp, SARS Virus
actacttagttgacagacgcatccg

SEQ ID NO: 165422 - DNA, 25 bp, SARS Virus
ctacttagttgtaagacgcatccgt

SEQ ID NO: 165423 - DNA, 25 bp, SARS Virus
tacttagttgtcagacgcatccgtt

SEQ ID NO: 165424 - DNA, 25 bp, SARS Virus
acttagttgtcaaacgcatccgtta

SEQ ID NO: 165425 - DNA, 25 bp, SARS Virus
cttagttgtcagacgcatccgttag

SEQ ID NO: 165426 - DNA, 25 bp, SARS Virus
ttagttgtcagaagcatccgttagg

SEQ ID NO: 165427 - DNA, 25 bp, SARS Virus
tagttgtcagacacatccgttagga

SEQ ID NO: 165428 - DNA, 25 bp, SARS Virus
agttgtcagacgaatccgttaggat

SEQ ID NO: 165429 - DNA, 25 bp, SARS Virus
gttgtcagacgcatccgttaggatt

SEQ ID NO: 165430 - DNA, 25 bp, SARS Virus
ttgtcagacgcaaccgttaggattc

SEQ ID NO: 165431 - DNA, 25 bp, SARS Virus
tgtcagacgcatacgttaggattct

SEQ ID NO: 165432 - DNA, 25 bp, SARS Virus
gtcagacgcatcagttaggattcta

SEQ ID NO: 165433 - DNA, 25 bp, SARS Virus
tcagacgcatccattaggattctaa

SEQ ID NO: 165434 - DNA, 25 bp, SARS Virus
cagacgcatccgataggattctaaa

SEQ ID NO: 165435 - DNA, 25 bp, SARS Virus
agacgcatccgtaaggattctaaaa

SEQ ID NO: 165436 - DNA, 25 bp, SARS Virus
gacgcatccgttaggattctaaaaa

SEQ ID NO: 165437 - DNA, 25 bp, SARS Virus
acgcatccgttaagattctaaaaac

SEQ ID NO: 165438 - DNA, 25 bp, SARS Virus
cgcatccgttagaattctaaaaact

SEQ ID NO: 165439 - DNA, 25 bp, SARS Virus
gcatccgttaggattctaaaaactt

SEQ ID NO: 165440 - DNA, 25 bp, SARS Virus
catccgttaggaatctaaaaacttc

SEQ ID NO: 165441 - DNA, 25 bp, SARS Virus
atccgttaggatactaaaaacttcg

SEQ ID NO: 165442 - DNA, 25 bp, SARS Virus
tccgttaggattataaaaacttcga

SEQ ID NO: 165443 - DNA, 25 bp, SARS Virus
ccgttaggattcaaaaaacttcgat

SEQ ID NO: 165444 - DNA, 25 bp, SARS Virus
cgttaggattctaaaaacttcgatg

SEQ ID NO: 165445 - DNA, 25 bp, SARS Virus
gttaggattctaaaaacttcgatgt

SEQ ID NO: 165446 - DNA, 25 bp, SARS Virus
ttaggattctaaaaacttcgatgtc

SEQ ID NO: 165447 - DNA, 25 bp, SARS Virus
taggattctaaaaacttcgatgtcg

SEQ ID NO: 165448 - DNA, 25 bp, SARS Virus
aggattctaaaaacttcgatgtcgc

SEQ ID NO: 165449 - DNA, 25 bp, SARS Virus
ggattctaaaaaattcgatgtcgca

SEQ ID NO: 165450 - DNA, 25 bp, SARS Virus
gattctaaaaacatcgatgtcgcaa

SEQ ID NO: 165451 - DNA, 25 bp, SARS Virus
attctaaaaactacgatgtcgcaag

SEQ ID NO: 165452 - DNA, 25 bp, SARS Virus
ttctaaaaacttagatgtcgcaaga

SEQ ID NO: 165453 - DNA, 25 bp, SARS Virus
tctaaaaacttcaatgtcgcaagac

SEQ ID NO: 165454 - DNA, 25 bp, SARS Virus
ctaaaaacttcgatgtcgcaagaca

SEQ ID NO: 165455 - DNA, 25 bp, SARS Virus
taaaaacttcgaagtcgcaagacac

SEQ ID NO: 165456 - DNA, 25 bp, SARS Virus
aaaaacttcgatatcgcaagacact

SEQ ID NO: 165457 - DNA, 25 bp, SARS Virus
aaaacttcgatgacgcaagacactt

SEQ ID NO: 165458 - DNA, 25 bp, SARS Virus
aaacttcgatgtagcaagacactta

SEQ ID NO: 165459 - DNA, 25 bp, SARS Virus
aacttcgatgtcacaagacacttaa

SEQ ID NO: 165460 - DNA, 25 bp, SARS Virus
acttcgatgtcgaaagacacttaat

SEQ ID NO: 165461 - DNA, 25 bp, SARS Virus
cttcgatgtcgcaagacacttaata

SEQ ID NO: 165462 - DNA, 25 bp, SARS Virus
ttcgatgtcgcaagacacttaatat

SEQ ID NO: 165463 - DNA, 25 bp, SARS Virus
tcgatgtcgcaaaacacttaatatt

SEQ ID NO: 165464 - DNA, 25 bp, SARS Virus
cgatgtcgcaagacacttaatattc

SEQ ID NO: 165465 - DNA, 25 bp, SARS Virus
ttgcactgcttaccgaagaagcgcc

SEQ ID NO: 165466 - DNA, 25 bp, SARS Virus
tgcactgcttatcgaagaagcgccc

SEQ ID NO: 165467 - DNA, 25 bp, SARS Virus
gcactgcttatccaagaagcgccca

SEQ ID NO: 165468 - DNA, 25 bp, SARS Virus
cactgcttatcgcagaagcgcccac

SEQ ID NO: 165469 - DNA, 25 bp, SARS Virus
actgcttatcgacgaagcgcccact

SEQ ID NO: 165470 - DNA, 25 bp, SARS Virus
ctgcttatcgaacaagcgcccacta

SEQ ID NO: 165471 - DNA, 25 bp, SARS Virus
tgcttatcgaagcagcgcccactat

SEQ ID NO: 165472 - DNA, 25 bp, SARS Virus
gcttatcgaagacgcgcccactatt

SEQ ID NO: 165473 - DNA, 25 bp, SARS Virus
cttatcgaagaaccgcccactattt

SEQ ID NO: 165474 - DNA, 25 bp, SARS Virus
ttatcgaagaagcgcccactatttg

SEQ ID NO: 165475 - DNA, 25 bp, SARS Virus
tatcgaagaagcccccactatttgt

SEQ ID NO: 165476 - DNA, 25 bp, SARS Virus
atcgaagaagcgcccactatttgta

SEQ ID NO: 165477 - DNA, 25 bp, SARS Virus
tcgaagaagcgcccactatttgtat

SEQ ID NO: 165478 - DNA, 25 bp, SARS Virus
cgaagaagcgcccactatttgtata

SEQ ID NO: 165479 - DNA, 25 bp, SARS Virus
gaagaagcgccccctatttgtataa

SEQ ID NO: 165480 - DNA, 25 bp, SARS Virus
aagaagcgcccactatttgtataat

SEQ ID NO: 165481 - DNA, 25 bp, SARS Virus
agaagcgcccaccatttgtataatc

SEQ ID NO: 165482 - DNA, 25 bp, SARS Virus
gaagcgcccactctttgtataatcc

SEQ ID NO: 165483 - DNA, 25 bp, SARS Virus
aagcgcccactacttgtataatccc

SEQ ID NO: 165484 - DNA, 25 bp, SARS Virus
agcgcccactatctgtataatccca

SEQ ID NO: 165485 - DNA, 25 bp, SARS Virus
gcgcccactattcgtataatcccat

SEQ ID NO: 165486 - DNA, 25 bp, SARS Virus
cgcccactatttctataatcccatt

SEQ ID NO: 165487 - DNA, 25 bp, SARS Virus
gcccactatttgcataatcccattg

SEQ ID NO: 165488 - DNA, 25 bp, SARS Virus
cccactatttgtctaatcccattgg

SEQ ID NO: 165489 - DNA, 25 bp, SARS Virus
ccactatttgtacaatcccattggt

SEQ ID NO: 165490 - DNA, 25 bp, SARS Virus
cactatttgtatcatcccattggta

SEQ ID NO: 165491 - DNA, 25 bp, SARS Virus
actatttgtatactcccattggtaa

SEQ ID NO: 165492 - DNA, 25 bp, SARS Virus
ctatttgtataaccccattggtaac

SEQ ID NO: 165493 - DNA, 25 bp, SARS Virus
tatttgtataatcccattggtaact

SEQ ID NO: 165494 - DNA, 25 bp, SARS Virus
atttgtataatcccattggtaactg

SEQ ID NO: 165495 - DNA, 25 bp, SARS Virus
tttgtataatcccattggtaactga

SEQ ID NO: 165496 - DNA, 25 bp, SARS Virus
ttgtataatccccttggtaactgaa

SEQ ID NO: 165497 - DNA, 25 bp, SARS Virus
tgtataatcccactggtaactgaac

SEQ ID NO: 165498 - DNA, 25 bp, SARS Virus
gtataatcccatcggtaactgaacc

SEQ ID NO: 165499 - DNA, 25 bp, SARS Virus
tataatcccattcgtaactgaacca

SEQ ID NO: 165500 - DNA, 25 bp, SARS Virus
ataatcccattgctaactgaaccat

SEQ ID NO: 165501 - DNA, 25 bp, SARS Virus
taatcccattggcaactgaaccatt

SEQ ID NO: 165502 - DNA, 25 bp, SARS Virus
aatcccattggtcactgaaccatta

SEQ ID NO: 165503 - DNA, 25 bp, SARS Virus
atcccattggtacctgaaccattaa

SEQ ID NO: 165504 - DNA, 25 bp, SARS Virus
tcccattggtaactgaaccattaag

SEQ ID NO: 165505 - DNA, 25 bp, SARS Virus
cccattggtaaccgaaccattaagt

SEQ ID NO: 165506 - DNA, 25 bp, SARS Virus
ccattggtaactcaaccattaagta

SEQ ID NO: 165507 - DNA, 25 bp, SARS Virus
cattggtaactgcaccattaagtaa

SEQ ID NO: 165508 - DNA, 25 bp, SARS Virus
attggtaactgacccattaagtaaa

SEQ ID NO: 165509 - DNA, 25 bp, SARS Virus
ttggtaactgaaccattaagtaaaa

SEQ ID NO: 165510 - DNA, 25 bp, SARS Virus
tggtaactgaaccattaagtaaaac

SEQ ID NO: 165511 - DNA, 25 bp, SARS Virus
ggtaactgaacccttaagtaaaact

SEQ ID NO: 165512 - DNA, 25 bp, SARS Virus
gtaactgaaccactaagtaaaactt

SEQ ID NO: 165513 - DNA, 25 bp, SARS Virus
taactgaaccatcaagtaaaacttt

SEQ ID NO: 165514 - DNA, 25 bp, SARS Virus
aactgaaccattcagtaaaactttg

SEQ ID NO: 165515 - DNA, 25 bp, SARS Virus
actgaaccattacgtaaaactttgg

SEQ ID NO: 165516 - DNA, 25 bp, SARS Virus
ctgaaccattaactaaaactttggg

SEQ ID NO: 165517 - DNA, 25 bp, SARS Virus
tgaaccattaagcaaaactttgggt

SEQ ID NO: 165518 - DNA, 25 bp, SARS Virus
gaaccattaagtcaaactttgggta

SEQ ID NO: 165519 - DNA, 25 bp, SARS Virus
aaccattaagtacaactttgggtag

SEQ ID NO: 165520 - DNA, 25 bp, SARS Virus
accattaagtaacactttgggtagt

SEQ ID NO: 165521 - DNA, 25 bp, SARS Virus
ccattaagtaaacctttgggtagta

SEQ ID NO: 165522 - DNA, 25 bp, SARS Virus
cattaagtaaaactttgggtagtat

SEQ ID NO: 165523 - DNA, 25 bp, SARS Virus
attaagtaaaaccttgggtagtatc

SEQ ID NO: 165524 - DNA, 25 bp, SARS Virus
ttaagtaaaactctgggtagtatct

SEQ ID NO: 165525 - DNA, 25 bp, SARS Virus
taagtaaaacttcgggtagtatctc

SEQ ID NO: 165526 - DNA, 25 bp, SARS Virus
aagtaaaactttcggtagtatctct

SEQ ID NO: 165527 - DNA, 25 bp, SARS Virus
agtaaaactttgcgtagtatctcta

SEQ ID NO: 165528 - DNA, 25 bp, SARS Virus
gtaaaactttggctagtatctctac

SEQ ID NO: 165529 - DNA, 25 bp, SARS Virus
taaaactttgggcagtatctctact

SEQ ID NO: 165530 - DNA, 25 bp, SARS Virus
aaaactttgggtcgtatctctactc

SEQ ID NO: 165531 - DNA, 25 bp, SARS Virus
aaactttgggtactatctctactca

SEQ ID NO: 165532 - DNA, 25 bp, SARS Virus
aactttgggtagcatctctactcag

SEQ ID NO: 165533 - DNA, 25 bp, SARS Virus
actttgggtagtctctctactcaga

SEQ ID NO: 165534 - DNA, 25 bp, SARS Virus
ctttgggtagtacctctactcagat

SEQ ID NO: 165535 - DNA, 25 bp, SARS Virus
tttgggtagtatctctactcagatg

SEQ ID NO: 165536 - DNA, 25 bp, SARS Virus
ttgggtagtatccctactcagatgc

SEQ ID NO: 165537 - DNA, 25 bp, SARS Virus
tgggtagtatctctactcagatgcc

SEQ ID NO: 165538 - DNA, 25 bp, SARS Virus
gggtagtatctccactcagatgcca

SEQ ID NO: 165539 - DNA, 25 bp, SARS Virus
ggtagtatctctcctcagatgccat

SEQ ID NO: 165540 - DNA, 25 bp, SARS Virus
gtagtatctctactcagatgccatc

SEQ ID NO: 165541 - DNA, 25 bp, SARS Virus
tagtatctctacccagatgccatcc

SEQ ID NO: 165542 - DNA, 25 bp, SARS Virus
agtatctctactcagatgccatcca

SEQ ID NO: 165543 - DNA, 25 bp, SARS Virus
gtatctctactccgatgccatccag

SEQ ID NO: 165544 - DNA, 25 bp, SARS Virus
tatctctactcacatgccatccagt

SEQ ID NO: 165545 - DNA, 25 bp, SARS Virus
atctctactcagctgccatccagta

SEQ ID NO: 165546 - DNA, 25 bp, SARS Virus
tctctactcagacgccatccagtac

SEQ ID NO: 165547 - DNA, 25 bp, SARS Virus
ctctactcagatcccatccagtaca

SEQ ID NO: 165548 - DNA, 25 bp, SARS Virus
tctactcagatgccatccagtacag

SEQ ID NO: 165549 - DNA, 25 bp, SARS Virus
ctactcagatgccatccagtacagg

SEQ ID NO: 165550 - DNA, 25 bp, SARS Virus
tactcagatgccctccagtacagga

SEQ ID NO: 165551 - DNA, 25 bp, SARS Virus
actcagatgccacccagtacaggaa

SEQ ID NO: 165552 - DNA, 25 bp, SARS Virus
ctcagatgccatccagtacaggaaa

SEQ ID NO: 165553 - DNA, 25 bp, SARS Virus
tcagatgccatccagtacaggaaac

SEQ ID NO: 165554 - DNA, 25 bp, SARS Virus
cagatgccatcccgtacaggaaacc

SEQ ID NO: 165555 - DNA, 25 bp, SARS Virus
agatgccatccactacaggaaacca

SEQ ID NO: 165556 - DNA, 25 bp, SARS Virus
gatgccatccagcacaggaaaccat

SEQ ID NO: 165557 - DNA, 25 bp, SARS Virus
atgccatccagtccaggaaaccata

SEQ ID NO: 165558 - DNA, 25 bp, SARS Virus
tgccatccagtacaggaaaccatac

SEQ ID NO: 165559 - DNA, 25 bp, SARS Virus
gccatccagtaccggaaaccatacg

SEQ ID NO: 165560 - DNA, 25 bp, SARS Virus
ccatccagtacacgaaaccatacgg

SEQ ID NO: 165561 - DNA, 25 bp, SARS Virus
catccagtacagcaaaccatacgga

SEQ ID NO: 165562 - DNA, 25 bp, SARS Virus
atccagtacaggcaaccatacggac

SEQ ID NO: 165563 - DNA, 25 bp, SARS Virus
tccagtacaggacaccatacggacc

SEQ ID NO: 165564 - DNA, 25 bp, SARS Virus
ccagtacaggaacccatacggacca

SEQ ID NO: 165565 - DNA, 25 bp, SARS Virus
cagtacaggaaaccatacggaccat

SEQ ID NO: 165566 - DNA, 25 bp, SARS Virus
agtacaggaaaccatacggaccata

SEQ ID NO: 165567 - DNA, 25 bp, SARS Virus
gtacaggaaaccctacggaccatac

SEQ ID NO: 165568 - DNA, 25 bp, SARS Virus
tacaggaaaccacacggaccataca

SEQ ID NO: 165569 - DNA, 25 bp, SARS Virus
acaggaaaccatccggaccatacag

SEQ ID NO: 165570 - DNA, 25 bp, SARS Virus
caggaaaccatacggaccatacagt

SEQ ID NO: 165571 - DNA, 25 bp, SARS Virus
aggaaaccataccgaccatacagtt

SEQ ID NO: 165572 - DNA, 25 bp, SARS Virus
ggaaaccatacgcaccatacagttg

SEQ ID NO: 165573 - DNA, 25 bp, SARS Virus
gaaaccatacggcccatacagttgt

SEQ ID NO: 165574 - DNA, 25 bp, SARS Virus
aaaccatacggaccatacagttgtg

SEQ ID NO: 165575 - DNA, 25 bp, SARS Virus
aaccatacggaccatacagttgtgt

SEQ ID NO: 165576 - DNA, 25 bp, SARS Virus
accatacggaccctacagttgtgta

SEQ ID NO: 165577 - DNA, 25 bp, SARS Virus
ccatacggaccacacagttgtgtat

SEQ ID NO: 165578 - DNA, 25 bp, SARS Virus
catacggaccatccagttgtgtatt

SEQ ID NO: 165579 - DNA, 25 bp, SARS Virus
atacggaccatacagttgtgtatta

SEQ ID NO: 165580 - DNA, 25 bp, SARS Virus
tacggaccataccgttgtgtattag

SEQ ID NO: 165581 - DNA, 25 bp, SARS Virus
acggaccatacacttgtgtattagg

SEQ ID NO: 165582 - DNA, 25 bp, SARS Virus
cggaccatacagctgtgtattagga

SEQ ID NO: 165583 - DNA, 25 bp, SARS Virus
ggaccatacagtcgtgtattaggaa

SEQ ID NO: 165584 - DNA, 25 bp, SARS Virus
gaccatacagttctgtattaggaag

SEQ ID NO: 165585 - DNA, 25 bp, SARS Virus
accatacagttgcgtattaggaagt

SEQ ID NO: 165586 - DNA, 25 bp, SARS Virus
ccatacagttgtctattaggaagtc

SEQ ID NO: 165587 - DNA, 25 bp, SARS Virus
catacagttgtgcattaggaagtca

SEQ ID NO: 165588 - DNA, 25 bp, SARS Virus
atacagttgtgtcttaggaagtcag

SEQ ID NO: 165589 - DNA, 25 bp, SARS Virus
tacagttgtgtactaggaagtcaga

SEQ ID NO: 165590 - DNA, 25 bp, SARS Virus
acagttgtgtatcaggaagtcagaa

SEQ ID NO: 165591 - DNA, 25 bp, SARS Virus
cagttgtgtattcggaagtcagaac

SEQ ID NO: 165592 - DNA, 25 bp, SARS Virus
agttgtgtattacgaagtcagaact

SEQ ID NO: 165593 - DNA, 25 bp, SARS Virus
gttgtgtattagcaagtcagaactt

SEQ ID NO: 165594 - DNA, 25 bp, SARS Virus
ttgtgtattaggcagtcagaacttg

SEQ ID NO: 165595 - DNA, 25 bp, SARS Virus
tgtgtattaggacgtcagaacttga

SEQ ID NO: 165596 - DNA, 25 bp, SARS Virus
gtgtattaggaactcagaacttgaa

SEQ ID NO: 165597 - DNA, 25 bp, SARS Virus
tgtattaggaagccagaacttgaaa

SEQ ID NO: 165598 - DNA, 25 bp, SARS Virus
gtattaggaagtcagaacttgaaat

SEQ ID NO: 165599 - DNA, 25 bp, SARS Virus
tattaggaagtccgaacttgaaata

SEQ ID NO: 165600 - DNA, 25 bp, SARS Virus
attaggaagtcacaacttgaaatat

SEQ ID NO: 165601 - DNA, 25 bp, SARS Virus
ttaggaagtcagcacttgaaatata

SEQ ID NO: 165602 - DNA, 25 bp, SARS Virus
taggaagtcagaccttgaaatatag

SEQ ID NO: 165603 - DNA, 25 bp, SARS Virus
aggaagtcagaacttgaaatatagt

SEQ ID NO: 165604 - DNA, 25 bp, SARS Virus
ggaagtcagaacctgaaatatagtt

SEQ ID NO: 165605 - DNA, 25 bp, SARS Virus
gaagtcagaactcgaaatatagttg

SEQ ID NO: 165606 - DNA, 25 bp, SARS Virus
aagtcagaacttcaaatatagttgc

SEQ ID NO: 165607 - DNA, 25 bp, SARS Virus
agtcagaacttgcaatatagttgcg

SEQ ID NO: 165608 - DNA, 25 bp, SARS Virus
gtcagaacttgacatatagttgcga

SEQ ID NO: 165609 - DNA, 25 bp, SARS Virus
tcagaacttgaactatagttgcgac

SEQ ID NO: 165610 - DNA, 25 bp, SARS Virus
cagaacttgaaacatagttgcgact

SEQ ID NO: 165611 - DNA, 25 bp, SARS Virus
agaacttgaaatctagttgcgactc

SEQ ID NO: 165612 - DNA, 25 bp, SARS Virus
gaacttgaaatacagttgcgactcc

SEQ ID NO: 165613 - DNA, 25 bp, SARS Virus
aacttgaaatatcgttgcgactcca

SEQ ID NO: 165614 - DNA, 25 bp, SARS Virus
acttgaaatatacttgcgactccac

SEQ ID NO: 165615 - DNA, 25 bp, SARS Virus
cttgaaatatagctgcgactccaca

SEQ ID NO: 165616 - DNA, 25 bp, SARS Virus
ttgaaatatagtcgcgactccacac

SEQ ID NO: 165617 - DNA, 25 bp, SARS Virus
tgaaatatagttccgactccacaca

SEQ ID NO: 165618 - DNA, 25 bp, SARS Virus
gaaatatagttgcgactccacacat

SEQ ID NO: 165619 - DNA, 25 bp, SARS Virus
aaatatagttgccactccacacatc

SEQ ID NO: 165620 - DNA, 25 bp, SARS Virus
aatatagttgcgcctccacacatcc

SEQ ID NO: 165621 - DNA, 25 bp, SARS Virus
atatagttgcgactccacacatcca

SEQ ID NO: 165622 - DNA, 25 bp, SARS Virus
tatagttgcgaccccacacatccac

SEQ ID NO: 165623 - DNA, 25 bp, SARS Virus
atagttgcgactccacacatccacg

SEQ ID NO: 165624 - DNA, 25 bp, SARS Virus
tagttgcgactccacacatccacgg

SEQ ID NO: 165625 - DNA, 25 bp, SARS Virus
agttgcgactccccacatccacgga

SEQ ID NO: 165626 - DNA, 25 bp, SARS Virus
gttgcgactccacacatccacggac

SEQ ID NO: 165627 - DNA, 25 bp, SARS Virus
ttgcgactccacccatccacggaca

SEQ ID NO: 165628 - DNA, 25 bp, SARS Virus
tgcgactccacacatccacggacac

SEQ ID NO: 165629 - DNA, 25 bp, SARS Virus
gcgactccacacctccacggacaca

SEQ ID NO: 165630 - DNA, 25 bp, SARS Virus
cgactccacacacccacggacacat

SEQ ID NO: 165631 - DNA, 25 bp, SARS Virus
gactccacacatccacggacacatc

SEQ ID NO: 165632 - DNA, 25 bp, SARS Virus
actccacacatccacggacacatcc

SEQ ID NO: 165633 - DNA, 25 bp, SARS Virus
ctccacacatccccggacacatcct

SEQ ID NO: 165634 - DNA, 25 bp, SARS Virus
tccacacatccacggacacatccta

SEQ ID NO: 165635 - DNA, 25 bp, SARS Virus
ccacacatccaccgacacatcctac

SEQ ID NO: 165636 - DNA, 25 bp, SARS Virus
cacacatccacgcacacatcctact

SEQ ID NO: 165637 - DNA, 25 bp, SARS Virus
acacatccacggccacatcctactt

SEQ ID NO: 165638 - DNA, 25 bp, SARS Virus
cacatccacggacacatcctacttc

SEQ ID NO: 165639 - DNA, 25 bp, SARS Virus
acatccacggacccatcctacttct

SEQ ID NO: 165640 - DNA, 25 bp, SARS Virus
catccacggacacatcctacttctg

SEQ ID NO: 165641 - DNA, 25 bp, SARS Virus
atccacggacacctcctacttctgg

SEQ ID NO: 165642 - DNA, 25 bp, SARS Virus
tccacggacacaccctacttctggt

SEQ ID NO: 165643 - DNA, 25 bp, SARS Virus
ccacggacacatcctacttctggtc

SEQ ID NO: 165644 - DNA, 25 bp, SARS Virus
cacggacacatcctacttctggtca

SEQ ID NO: 165645 - DNA, 25 bp, SARS Virus
acggacacatcccacttctggtcat

SEQ ID NO: 165646 - DNA, 25 bp, SARS Virus
cggacacatcctccttctggtcatt

SEQ ID NO: 165647 - DNA, 25 bp, SARS Virus
ggacacatcctacttctggtcatta

SEQ ID NO: 165648 - DNA, 25 bp, SARS Virus
gacacatcctacctctggtcattac

SEQ ID NO: 165649 - DNA, 25 bp, SARS Virus
acacatcctactcctggtcattact

SEQ ID NO: 165650 - DNA, 25 bp, SARS Virus
cacatcctacttctggtcattacta

SEQ ID NO: 165651 - DNA, 25 bp, SARS Virus
acatcctacttccggtcattactag

SEQ ID NO: 165652 - DNA, 25 bp, SARS Virus
catcctacttctcgtcattactaga

SEQ ID NO: 165653 - DNA, 25 bp, SARS Virus
atcctacttctgctcattactagaa

SEQ ID NO: 165654 - DNA, 25 bp, SARS Virus
tcctacttctggccattactagaat

SEQ ID NO: 165655 - DNA, 25 bp, SARS Virus
cctacttctggtcattactagaatg

SEQ ID NO: 165656 - DNA, 25 bp, SARS Virus
ctacttctggtccttactagaatga

SEQ ID NO: 165657 - DNA, 25 bp, SARS Virus
tacttctggtcactactagaatgat

SEQ ID NO: 165658 - DNA, 25 bp, SARS Virus
acttctggtcatcactagaatgatg

SEQ ID NO: 165659 - DNA, 25 bp, SARS Virus
cttctggtcattcctagaatgatgt

SEQ ID NO: 165660 - DNA, 25 bp, SARS Virus
ttctggtcattactagaatgatgtc

SEQ ID NO: 165661 - DNA, 25 bp, SARS Virus
tctggtcattaccagaatgatgtca

SEQ ID NO: 165662 - DNA, 25 bp, SARS Virus
ctggtcattactcgaatgatgtcag

SEQ ID NO: 165663 - DNA, 25 bp, SARS Virus
tggtcattactacaatgatgtcagg

SEQ ID NO: 165664 - DNA, 25 bp, SARS Virus
ggtcattactagcatgatgtcagga

SEQ ID NO: 165665 - DNA, 25 bp, SARS Virus
gtcattactagactgatgtcaggaa

SEQ ID NO: 165666 - DNA, 25 bp, SARS Virus
tcattactagaacgatgtcaggaat

SEQ ID NO: 165667 - DNA, 25 bp, SARS Virus
cattactagaatcatgtcaggaatt

SEQ ID NO: 165668 - DNA, 25 bp, SARS Virus
attactagaatgctgtcaggaattt

SEQ ID NO: 165669 - DNA, 25 bp, SARS Virus
ttactagaatgacgtcaggaatttt

SEQ ID NO: 165670 - DNA, 25 bp, SARS Virus
tactagaatgatctcaggaattttt

SEQ ID NO: 165671 - DNA, 25 bp, SARS Virus
actagaatgatgccaggaatttttc

SEQ ID NO: 165672 - DNA, 25 bp, SARS Virus
ctagaatgatgtcaggaatttttca

SEQ ID NO: 165673 - DNA, 25 bp, SARS Virus
tagaatgatgtccggaatttttcag

SEQ ID NO: 165674 - DNA, 25 bp, SARS Virus
agaatgatgtcacgaatttttcagg

SEQ ID NO: 165675 - DNA, 25 bp, SARS Virus
gaatgatgtcagcaatttttcaggt

SEQ ID NO: 165676 - DNA, 25 bp, SARS Virus
aatgatgtcaggcatttttcaggtc

SEQ ID NO: 165677 - DNA, 25 bp, SARS Virus
atgatgtcaggactttttcaggtca

SEQ ID NO: 165678 - DNA, 25 bp, SARS Virus
tgatgtcaggaacttttcaggtcaa

SEQ ID NO: 165679 - DNA, 25 bp, SARS Virus
gatgtcaggaatctttcaggtcaat

SEQ ID NO: 165680 - DNA, 25 bp, SARS Virus
atgtcaggaattcttcaggtcaatg

SEQ ID NO: 165681 - DNA, 25 bp, SARS Virus
tgtcaggaatttctcaggtcaatgt

SEQ ID NO: 165682 - DNA, 25 bp, SARS Virus
gtcaggaattttccaggtcaatgta

SEQ ID NO: 165683 - DNA, 25 bp, SARS Virus
tcaggaatttttcaggtcaatgtaa

SEQ ID NO: 165684 - DNA, 25 bp, SARS Virus
caggaatttttccggtcaatgtaaa

SEQ ID NO: 165685 - DNA, 25 bp, SARS Virus
aggaatttttcacgtcaatgtaaaa

SEQ ID NO: 165686 - DNA, 25 bp, SARS Virus
ggaatttttcagctcaatgtaaaag

SEQ ID NO: 165687 - DNA, 25 bp, SARS Virus
gaatttttcaggccaatgtaaaaga

SEQ ID NO: 165688 - DNA, 25 bp, SARS Virus
aatttttcaggtcaatgtaaaagac

SEQ ID NO: 165689 - DNA, 25 bp, SARS Virus
atttttcaggtccatgtaaaagacg

SEQ ID NO: 165690 - DNA, 25 bp, SARS Virus
tttttcaggtcactgtaaaagacga

SEQ ID NO: 165691 - DNA, 25 bp, SARS Virus
ttttcaggtcaacgtaaaagacgaa

SEQ ID NO: 165692 - DNA, 25 bp, SARS Virus
tttcaggtcaatctaaaagacgaac

SEQ ID NO: 165693 - DNA, 25 bp, SARS Virus
ttcaggtcaatgcaaaagacgaaca

SEQ ID NO: 165694 - DNA, 25 bp, SARS Virus
tcaggtcaatgtcaaagacgaacat

SEQ ID NO: 165695 - DNA, 25 bp, SARS Virus
caggtcaatgtacaagacgaacatt

SEQ ID NO: 165696 - DNA, 25 bp, SARS Virus
aggtcaatgtaacagacgaacatta

SEQ ID NO: 165697 - DNA, 25 bp, SARS Virus
ggtcaatgtaaacgacgaacattac

SEQ ID NO: 165698 - DNA, 25 bp, SARS Virus
gtcaatgtaaaacacgaacattaca

SEQ ID NO: 165699 - DNA, 25 bp, SARS Virus
tcaatgtaaaagccgaacattacat

SEQ ID NO: 165700 - DNA, 25 bp, SARS Virus
caatgtaaaagacgaacattacatc

SEQ ID NO: 165701 - DNA, 25 bp, SARS Virus
aatgtaaaagaccaacattacatcg

SEQ ID NO: 165702 - DNA, 25 bp, SARS Virus
atgtaaaagacgcacattacatcgg

SEQ ID NO: 165703 - DNA, 25 bp, SARS Virus
tgtaaaagacgaccattacatcggt

SEQ ID NO: 165704 - DNA, 25 bp, SARS Virus
gtaaaagacgaacattacatcggtg

SEQ ID NO: 165705 - DNA, 25 bp, SARS Virus
taaaagacgaaccttacatcggtgt

SEQ ID NO: 165706 - DNA, 25 bp, SARS Virus
aaaagacgaacactacatcggtgta

SEQ ID NO: 165707 - DNA, 25 bp, SARS Virus
aaagacgaacatcacatcggtgtaa

SEQ ID NO: 165708 - DNA, 25 bp, SARS Virus
aagacgaacattccatcggtgtaac

SEQ ID NO: 165709 - DNA, 25 bp, SARS Virus
agacgaacattacatcggtgtaacg

SEQ ID NO: 165710 - DNA, 25 bp, SARS Virus
gacgaacattacctcggtgtaacgc

SEQ ID NO: 165711 - DNA, 25 bp, SARS Virus
acgaacattacaccggtgtaacgct

SEQ ID NO: 165712 - DNA, 25 bp, SARS Virus
cgaacattacatcggtgtaacgctg

SEQ ID NO: 165713 - DNA, 25 bp, SARS Virus
gaacattacatccgtgtaacgctgc

SEQ ID NO: 165714 - DNA, 25 bp, SARS Virus
aacattacatcgctgtaacgctgca

SEQ ID NO: 165715 - DNA, 25 bp, SARS Virus
acattacatcggcgtaacgctgcac

SEQ ID NO: 165716 - DNA, 25 bp, SARS Virus
cattacatcggtctaacgctgcacc

SEQ ID NO: 165717 - DNA, 25 bp, SARS Virus
attacatcggtgcaacgctgcacca

SEQ ID NO: 165718 - DNA, 25 bp, SARS Virus
ttacatcggtgtcacgctgcaccat

SEQ ID NO: 165719 - DNA, 25 bp, SARS Virus
tacatcggtgtaccgctgcaccata

SEQ ID NO: 165720 - DNA, 25 bp, SARS Virus
acatcggtgtaacgctgcaccataa

SEQ ID NO: 165721 - DNA, 25 bp, SARS Virus
catcggtgtaaccctgcaccataaa

SEQ ID NO: 165722 - DNA, 25 bp, SARS Virus
atcggtgtaacgctgcaccataaag

SEQ ID NO: 165723 - DNA, 25 bp, SARS Virus
tcggtgtaacgccgcaccataaaga

SEQ ID NO: 165724 - DNA, 25 bp, SARS Virus
cggtgtaacgctccaccataaagat

SEQ ID NO: 165725 - DNA, 25 bp, SARS Virus
ggtgtaacgctgcaccataaagatc

SEQ ID NO: 165726 - DNA, 25 bp, SARS Virus
gtgtaacgctgccccataaagatct

SEQ ID NO: 165727 - DNA, 25 bp, SARS Virus
tgtaacgctgcaccataaagatctg

SEQ ID NO: 165728 - DNA, 25 bp, SARS Virus
gtaacgctgcaccataaagatctga

SEQ ID NO: 165729 - DNA, 25 bp, SARS Virus
taacgctgcaccctaaagatctgaa

SEQ ID NO: 165730 - DNA, 25 bp, SARS Virus
aacgctgcaccacaaagatctgaac

SEQ ID NO: 165731 - DNA, 25 bp, SARS Virus
acgctgcaccatcaagatctgaaca

SEQ ID NO: 165732 - DNA, 25 bp, SARS Virus
cgctgcaccatacagatctgaacat

SEQ ID NO: 165733 - DNA, 25 bp, SARS Virus
gctgcaccataacgatctgaacatt

SEQ ID NO: 165734 - DNA, 25 bp, SARS Virus
ctgcaccataaacatctgaacattt

SEQ ID NO: 165735 - DNA, 25 bp, SARS Virus
tgcaccataaagctctgaacattta

SEQ ID NO: 165736 - DNA, 25 bp, SARS Virus
gcaccataaagacctgaacatttaa

SEQ ID NO: 165737 - DNA, 25 bp, SARS Virus
caccataaagatctgaacatttaac

SEQ ID NO: 165738 - DNA, 25 bp, SARS Virus
accataaagatccgaacatttaacg

SEQ ID NO: 165739 - DNA, 25 bp, SARS Virus
ccataaagatctcaacatttaacgt

SEQ ID NO: 165740 - DNA, 25 bp, SARS Virus
cataaagatctgcacatttaacgtc

SEQ ID NO: 165741 - DNA, 25 bp, SARS Virus
ataaagatctgaccatttaacgtca

SEQ ID NO: 165742 - DNA, 25 bp, SARS Virus
taaagatctgaacatttaacgtcaa

SEQ ID NO: 165743 - DNA, 25 bp, SARS Virus
aaagatctgaacctttaacgtcaaa

SEQ ID NO: 165744 - DNA, 25 bp, SARS Virus
aagatctgaacacttaacgtcaaac

SEQ ID NO: 165745 - DNA, 25 bp, SARS Virus
agatctgaacatctaacgtcaaaca

SEQ ID NO: 165746 - DNA, 25 bp, SARS Virus
gatctgaacattcaacgtcaaacag

SEQ ID NO: 165747 - DNA, 25 bp, SARS Virus
atctgaacatttcacgtcaaacagt

SEQ ID NO: 165748 - DNA, 25 bp, SARS Virus
tctgaacatttaccgtcaaacagta

SEQ ID NO: 165749 - DNA, 25 bp, SARS Virus
ctgaacatttaacgtcaaacagtat

SEQ ID NO: 165750 - DNA, 25 bp, SARS Virus
tgaacatttaacctcaaacagtatt

SEQ ID NO: 165751 - DNA, 25 bp, SARS Virus
gaacatttaacgccaaacagtattt

SEQ ID NO: 165752 - DNA, 25 bp, SARS Virus
aacatttaacgtcaaacagtatttc

SEQ ID NO: 165753 - DNA, 25 bp, SARS Virus
acatttaacgtccaacagtatttct

SEQ ID NO: 165754 - DNA, 25 bp, SARS Virus
catttaacgtcacacagtatttcta

SEQ ID NO: 165755 - DNA, 25 bp, SARS Virus
atttaacgtcaaccagtatttctag

SEQ ID NO: 165756 - DNA, 25 bp, SARS Virus
tttaacgtcaaacagtatttctaga

SEQ ID NO: 165757 - DNA, 25 bp, SARS Virus
ttaacgtcaaaccgtatttctagag

SEQ ID NO: 165758 - DNA, 25 bp, SARS Virus
taacgtcaaacactatttctagaga

SEQ ID NO: 165759 - DNA, 25 bp, SARS Virus
aacgtcaaacagcatttctagagat

SEQ ID NO: 165760 - DNA, 25 bp, SARS Virus
acgtcaaacagtctttctagagata

SEQ ID NO: 165761 - DNA, 25 bp, SARS Virus
cgtcaaacagtacttctagagatag

SEQ ID NO: 165762 - DNA, 25 bp, SARS Virus
gtcaaacagtatctctagagatagt

SEQ ID NO: 165763 - DNA, 25 bp, SARS Virus
tcaaacagtattcctagagatagtc

SEQ ID NO: 165764 - DNA, 25 bp, SARS Virus
caaacagtatttctagagatagtct

SEQ ID NO: 165765 - DNA, 25 bp, SARS Virus
aaacagtatttccagagatagtctg

SEQ ID NO: 165766 - DNA, 25 bp, SARS Virus
aacagtatttctcgagatagtctgt

SEQ ID NO: 165767 - DNA, 25 bp, SARS Virus
acagtatttctacagatagtctgta

SEQ ID NO: 165768 - DNA, 25 bp, SARS Virus
cagtatttctagcgatagtctgtaa

SEQ ID NO: 165769 - DNA, 25 bp, SARS Virus
agtatttctagacatagtctgtaat

SEQ ID NO: 165770 - DNA, 25 bp, SARS Virus
gtatttctagagctagtctgtaata

SEQ ID NO: 165771 - DNA, 25 bp, SARS Virus
tatttctagagacagtctgtaatac

SEQ ID NO: 165772 - DNA, 25 bp, SARS Virus
atttctagagatcgtctgtaatacg

SEQ ID NO: 165773 - DNA, 25 bp, SARS Virus
tttctagagatactctgtaatacgt

SEQ ID NO: 165774 - DNA, 25 bp, SARS Virus
ttctagagatagcctgtaatacgtg

SEQ ID NO: 165775 - DNA, 25 bp, SARS Virus
tctagagatagtctgtaatacgtgt

SEQ ID NO: 165776 - DNA, 25 bp, SARS Virus
ctagagatagtccgtaatacgtgtt

SEQ ID NO: 165777 - DNA, 25 bp, SARS Virus
tagagatagtctctaatacgtgttt

SEQ ID NO: 165778 - DNA, 25 bp, SARS Virus
agagatagtctgcaatacgtgtttt

SEQ ID NO: 165779 - DNA, 25 bp, SARS Virus
gagatagtctgtcatacgtgtttta

SEQ ID NO: 165780 - DNA, 25 bp, SARS Virus
agatagtctgtactacgtgttttac

SEQ ID NO: 165781 - DNA, 25 bp, SARS Virus
gatagtctgtaacacgtgttttacg

SEQ ID NO: 165782 - DNA, 25 bp, SARS Virus
atagtctgtaatccgtgttttacgg

SEQ ID NO: 165783 - DNA, 25 bp, SARS Virus
tagtctgtaatacgtgttttacggt

SEQ ID NO: 165784 - DNA, 25 bp, SARS Virus
agtctgtaatacctgttttacggtt

SEQ ID NO: 165785 - DNA, 25 bp, SARS Virus
gtctgtaatacgcgttttacggtta

SEQ ID NO: 165786 - DNA, 25 bp, SARS Virus
tctgtaatacgtcttttacggttaa

SEQ ID NO: 165787 - DNA, 25 bp, SARS Virus
ctgtaatacgtgctttacggttaaa

SEQ ID NO: 165788 - DNA, 25 bp, SARS Virus
tgtaatacgtgtcttacggttaaaa

SEQ ID NO: 165789 - DNA, 25 bp, SARS Virus
gtaatacgtgttctacggttaaaaa

SEQ ID NO: 165790 - DNA, 25 bp, SARS Virus
taatacgtgtttcacggttaaaaac

SEQ ID NO: 165791 - DNA, 25 bp, SARS Virus
aatacgtgttttccggttaaaaacg

SEQ ID NO: 165792 - DNA, 25 bp, SARS Virus
atacgtgttttacggttaaaaacgg

SEQ ID NO: 165793 - DNA, 25 bp, SARS Virus
tacgtgttttaccgttaaaaacggg

SEQ ID NO: 165794 - DNA, 25 bp, SARS Virus
acgtgttttacgcttaaaaacggga

SEQ ID NO: 165795 - DNA, 25 bp, SARS Virus
cgtgttttacggctaaaaacgggaa

SEQ ID NO: 165796 - DNA, 25 bp, SARS Virus
gtgttttacggtcaaaaacgggaac

SEQ ID NO: 165797 - DNA, 25 bp, SARS Virus
tgttttacggttcaaaacgggaaca

SEQ ID NO: 165798 - DNA, 25 bp, SARS Virus
gttttacggttacaaacgggaacac

SEQ ID NO: 165799 - DNA, 25 bp, SARS Virus
ttttacggttaacaacgggaacact

SEQ ID NO: 165800 - DNA, 25 bp, SARS Virus
tttacggttaaacacgggaacacta

SEQ ID NO: 165801 - DNA, 25 bp, SARS Virus
ttacggttaaaaccgggaacactat

SEQ ID NO: 165802 - DNA, 25 bp, SARS Virus
tacggttaaaaacgggaacactatc

SEQ ID NO: 165803 - DNA, 25 bp, SARS Virus
acggttaaaaaccggaacactatcg

SEQ ID NO: 165804 - DNA, 25 bp, SARS Virus
cggttaaaaacgcgaacactatcgg

SEQ ID NO: 165805 - DNA, 25 bp, SARS Virus
ggttaaaaacggcaacactatcggt

SEQ ID NO: 165806 - DNA, 25 bp, SARS Virus
gttaaaaacgggcacactatcggtg

SEQ ID NO: 165807 - DNA, 25 bp, SARS Virus
ttaaaaacgggaccactatcggtgt

SEQ ID NO: 165808 - DNA, 25 bp, SARS Virus
taaaaacgggaacactatcggtgta

SEQ ID NO: 165809 - DNA, 25 bp, SARS Virus
aaaaacgggaaccctatcggtgtaa

SEQ ID NO: 165810 - DNA, 25 bp, SARS Virus
aaaacgggaacactatcggtgtaac

SEQ ID NO: 165811 - DNA, 25 bp, SARS Virus
aaacgggaacaccatcggtgtaact

SEQ ID NO: 165812 - DNA, 25 bp, SARS Virus
aacgggaacactctcggtgtaactt

SEQ ID NO: 165813 - DNA, 25 bp, SARS Virus
acgggaacactaccggtgtaacttc

SEQ ID NO: 165814 - DNA, 25 bp, SARS Virus
cgggaacactatcggtgtaacttcg

SEQ ID NO: 165815 - DNA, 25 bp, SARS Virus
gggaacactatccgtgtaacttcgc

SEQ ID NO: 165816 - DNA, 25 bp, SARS Virus
ggaacactatcgctgtaacttcgcc

SEQ ID NO: 165817 - DNA, 25 bp, SARS Virus
gaacactatcggcgtaacttcgcca

SEQ ID NO: 165818 - DNA, 25 bp, SARS Virus
aacactatcggtctaacttcgccaa

SEQ ID NO: 165819 - DNA, 25 bp, SARS Virus
acactatcggtgcaacttcgccaac

SEQ ID NO: 165820 - DNA, 25 bp, SARS Virus
cactatcggtgtcacttcgccaact

SEQ ID NO: 165821 - DNA, 25 bp, SARS Virus
actatcggtgtaccttcgccaactg

SEQ ID NO: 165822 - DNA, 25 bp, SARS Virus
ctatcggtgtaacttcgccaactgt

SEQ ID NO: 165823 - DNA, 25 bp, SARS Virus
tatcggtgtaacctcgccaactgta

SEQ ID NO: 165824 - DNA, 25 bp, SARS Virus
atcggtgtaactccgccaactgtaa

SEQ ID NO: 165825 - DNA, 25 bp, SARS Virus
tcggtgtaacttcgccaactgtaat

SEQ ID NO: 165826 - DNA, 25 bp, SARS Virus
cggtgtaacttccccaactgtaatg

SEQ ID NO: 165827 - DNA, 25 bp, SARS Virus
ggtgtaacttcgccaactgtaatgt

SEQ ID NO: 165828 - DNA, 25 bp, SARS Virus
gtgtaacttcgccaactgtaatgtt

SEQ ID NO: 165829 - DNA, 25 bp, SARS Virus
tgtaacttcgcccactgtaatgttc

SEQ ID NO: 165830 - DNA, 25 bp, SARS Virus
gtaacttcgccacctgtaatgttct

SEQ ID NO: 165831 - DNA, 25 bp, SARS Virus
taacttcgccaactgtaatgttctc

SEQ ID NO: 165832 - DNA, 25 bp, SARS Virus
aacttcgccaaccgtaatgttctca

SEQ ID NO: 165833 - DNA, 25 bp, SARS Virus
acttcgccaactctaatgttctcac

SEQ ID NO: 165834 - DNA, 25 bp, SARS Virus
cttcgccaactgcaatgttctcaca

SEQ ID NO: 165835 - DNA, 25 bp, SARS Virus
ttcgccaactgtcatgttctcacac

SEQ ID NO: 165836 - DNA, 25 bp, SARS Virus
tcgccaactgtactgttctcacacg

SEQ ID NO: 165837 - DNA, 25 bp, SARS Virus
cgccaactgtaacgttctcacacga

SEQ ID NO: 165838 - DNA, 25 bp, SARS Virus
gccaactgtaatcttctcacacgac

SEQ ID NO: 165839 - DNA, 25 bp, SARS Virus
ccaactgtaatgctctcacacgaca

SEQ ID NO: 165840 - DNA, 25 bp, SARS Virus
caactgtaatgtcctcacacgacaa

SEQ ID NO: 165841 - DNA, 25 bp, SARS Virus
aactgtaatgttctcacacgacaaa

SEQ ID NO: 165842 - DNA, 25 bp, SARS Virus
actgtaatgttcccacacgacaaag

SEQ ID NO: 165843 - DNA, 25 bp, SARS Virus
ctgtaatgttctcacacgacaaagt

SEQ ID NO: 165844 - DNA, 25 bp, SARS Virus
tgtaatgttctcccacgacaaagtc

SEQ ID NO: 165845 - DNA, 25 bp, SARS Virus
gtaatgttctcacacgacaaagtca

SEQ ID NO: 165846 - DNA, 25 bp, SARS Virus
taatgttctcacccgacaaagtcat

SEQ ID NO: 165847 - DNA, 25 bp, SARS Virus
aatgttctcacacgacaaagtcatc

SEQ ID NO: 165848 - DNA, 25 bp, SARS Virus
atgttctcacaccacaaagtcatca

SEQ ID NO: 165849 - DNA, 25 bp, SARS Virus
tgttctcacacgccaaagtcatcaa

SEQ ID NO: 165850 - DNA, 25 bp, SARS Virus
gttctcacacgacaaagtcatcaaa

SEQ ID NO: 165851 - DNA, 25 bp, SARS Virus
ttctcacacgaccaagtcatcaaac

SEQ ID NO: 165852 - DNA, 25 bp, SARS Virus
tctcacacgacacagtcatcaaaca

SEQ ID NO: 165853 - DNA, 25 bp, SARS Virus
ctcacacgacaacgtcatcaaacac

SEQ ID NO: 165854 - DNA, 25 bp, SARS Virus
tcacacgacaaactcatcaaacaca

SEQ ID NO: 165855 - DNA, 25 bp, SARS Virus
cacacgacaaagccatcaaacacac

SEQ ID NO: 165856 - DNA, 25 bp, SARS Virus
acacgacaaagtcatcaaacacact

SEQ ID NO: 165857 - DNA, 25 bp, SARS Virus
cacgacaaagtcctcaaacacactt

SEQ ID NO: 165858 - DNA, 25 bp, SARS Virus
acgacaaagtcaccaaacacactta

SEQ ID NO: 165859 - DNA, 25 bp, SARS Virus
cgacaaagtcatcaaacacacttat

SEQ ID NO: 165860 - DNA, 25 bp, SARS Virus
gacaaagtcatccaacacacttata

SEQ ID NO: 165861 - DNA, 25 bp, SARS Virus
acaaagtcatcacacacacttatac

SEQ ID NO: 165862 - DNA, 25 bp, SARS Virus
caaagtcatcaaccacacttatact

SEQ ID NO: 165863 - DNA, 25 bp, SARS Virus
aaagtcatcaaacacacttatactg

SEQ ID NO: 165864 - DNA, 25 bp, SARS Virus
aagtcatcaaacccacttatactgt

SEQ ID NO: 165865 - DNA, 25 bp, SARS Virus
agtcatcaaacacacttatactgta

SEQ ID NO: 165866 - DNA, 25 bp, SARS Virus
gtcatcaaacacccttatactgtat

SEQ ID NO: 165867 - DNA, 25 bp, SARS Virus
tcatcaaacacacttatactgtatc

SEQ ID NO: 165868 - DNA, 25 bp, SARS Virus
catcaaacacacctatactgtatca

SEQ ID NO: 165869 - DNA, 25 bp, SARS Virus
atcaaacacactcatactgtatcag

SEQ ID NO: 165870 - DNA, 25 bp, SARS Virus
tcaaacacacttctactgtatcagt

SEQ ID NO: 165871 - DNA, 25 bp, SARS Virus
caaacacacttacactgtatcagta

SEQ ID NO: 165872 - DNA, 25 bp, SARS Virus
aaacacacttatcctgtatcagtat

SEQ ID NO: 165873 - DNA, 25 bp, SARS Virus
aacacacttatactgtatcagtata

SEQ ID NO: 165874 - DNA, 25 bp, SARS Virus
acacacttataccgtatcagtataa

SEQ ID NO: 165875 - DNA, 25 bp, SARS Virus
cacacttatactctatcagtataag

SEQ ID NO: 165876 - DNA, 25 bp, SARS Virus
acacttatactgcatcagtataagt

SEQ ID NO: 165877 - DNA, 25 bp, SARS Virus
cacttatactgtctcagtataagtc

SEQ ID NO: 165878 - DNA, 25 bp, SARS Virus
acttatactgtaccagtataagtct

SEQ ID NO: 165879 - DNA, 25 bp, SARS Virus
cttatactgtatcagtataagtctt

SEQ ID NO: 165880 - DNA, 25 bp, SARS Virus
ttatactgtatccgtataagtcttg

SEQ ID NO: 165881 - DNA, 25 bp, SARS Virus
tatactgtatcactataagtcttgg

SEQ ID NO: 165882 - DNA, 25 bp, SARS Virus
atactgtatcagcataagtcttggg

SEQ ID NO: 165883 - DNA, 25 bp, SARS Virus
tactgtatcagtctaagtcttggga

SEQ ID NO: 165884 - DNA, 25 bp, SARS Virus
actgtatcagtacaagtcttgggac

SEQ ID NO: 165885 - DNA, 25 bp, SARS Virus
ctgtatcagtatcagtcttgggaca

SEQ ID NO: 165886 - DNA, 25 bp, SARS Virus
tgtatcagtatacgtcttgggacac

SEQ ID NO: 165887 - DNA, 25 bp, SARS Virus
gtatcagtataactcttgggacact

SEQ ID NO: 165888 - DNA, 25 bp, SARS Virus
tatcagtataagccttgggacacta

SEQ ID NO: 165889 - DNA, 25 bp, SARS Virus
atcagtataagtcttgggacactac

SEQ ID NO: 165890 - DNA, 25 bp, SARS Virus
tcagtataagtcctgggacactact

SEQ ID NO: 165891 - DNA, 25 bp, SARS Virus
cagtataagtctcgggacactactt

SEQ ID NO: 165892 - DNA, 25 bp, SARS Virus
agtataagtcttcggacactactta

SEQ ID NO: 165893 - DNA, 25 bp, SARS Virus
gtataagtcttgcgacactacttag

SEQ ID NO: 165894 - DNA, 25 bp, SARS Virus
tataagtcttggcacactacttagt

SEQ ID NO: 165895 - DNA, 25 bp, SARS Virus
ataagtcttgggccactacttagtt

SEQ ID NO: 165896 - DNA, 25 bp, SARS Virus
taagtcttgggacactacttagttg

SEQ ID NO: 165897 - DNA, 25 bp, SARS Virus
aagtcttgggaccctacttagttgt

SEQ ID NO: 165898 - DNA, 25 bp, SARS Virus
agtcttgggacactacttagttgtc

SEQ ID NO: 165899 - DNA, 25 bp, SARS Virus
gtcttgggacaccacttagttgtca

SEQ ID NO: 165900 - DNA, 25 bp, SARS Virus
tcttgggacactccttagttgtcag

SEQ ID NO: 165901 - DNA, 25 bp, SARS Virus
cttgggacactacttagttgtcaga

SEQ ID NO: 165902 - DNA, 25 bp, SARS Virus
ttgggacactacctagttgtcagac

SEQ ID NO: 165903 - DNA, 25 bp, SARS Virus
tgggacactactcagttgtcagacg

SEQ ID NO: 165904 - DNA, 25 bp, SARS Virus
gggacactacttcgttgtcagacgc

SEQ ID NO: 165905 - DNA, 25 bp, SARS Virus
ggacactacttacttgtcagacgca

SEQ ID NO: 165906 - DNA, 25 bp, SARS Virus
gacactacttagctgtcagacgcat

SEQ ID NO: 165907 - DNA, 25 bp, SARS Virus
acactacttagtcgtcagacgcatc

SEQ ID NO: 165908 - DNA, 25 bp, SARS Virus
cactacttagttctcagacgcatcc

SEQ ID NO: 165909 - DNA, 25 bp, SARS Virus
actacttagttgccagacgcatccg

SEQ ID NO: 165910 - DNA, 25 bp, SARS Virus
ctacttagttgtcagacgcatccgt

SEQ ID NO: 165911 - DNA, 25 bp, SARS Virus
tacttagttgtccgacgcatccgtt

SEQ ID NO: 165912 - DNA, 25 bp, SARS Virus
acttagttgtcacacgcatccgtta

SEQ ID NO: 165913 - DNA, 25 bp, SARS Virus
cttagttgtcagccgcatccgttag

SEQ ID NO: 165914 - DNA, 25 bp, SARS Virus
ttagttgtcagacgcatccgttagg

SEQ ID NO: 165915 - DNA, 25 bp, SARS Virus
tagttgtcagacccatccgttagga

SEQ ID NO: 165916 - DNA, 25 bp, SARS Virus
agttgtcagacgcatccgttaggat

SEQ ID NO: 165917 - DNA, 25 bp, SARS Virus
gttgtcagacgcctccgttaggatt

SEQ ID NO: 165918 - DNA, 25 bp, SARS Virus
ttgtcagacgcacccgttaggattc

SEQ ID NO: 165919 - DNA, 25 bp, SARS Virus
tgtcagacgcatccgttaggattct

SEQ ID NO: 165920 - DNA, 25 bp, SARS Virus
gtcagacgcatccgttaggattcta

SEQ ID NO: 165921 - DNA, 25 bp, SARS Virus
tcagacgcatcccttaggattctaa

SEQ ID NO: 165922 - DNA, 25 bp, SARS Virus
cagacgcatccgctaggattctaaa

SEQ ID NO: 165923 - DNA, 25 bp, SARS Virus
agacgcatccgtcaggattctaaaa

SEQ ID NO: 165924 - DNA, 25 bp, SARS Virus
gacgcatccgttcggattctaaaaa

SEQ ID NO: 165925 - DNA, 25 bp, SARS Virus
acgcatccgttacgattctaaaaac

SEQ ID NO: 165926 - DNA, 25 bp, SARS Virus
cgcatccgttagcattctaaaaact

SEQ ID NO: 165927 - DNA, 25 bp, SARS Virus
gcatccgttaggcttctaaaaactt

SEQ ID NO: 165928 - DNA, 25 bp, SARS Virus
catccgttaggactctaaaaacttc

SEQ ID NO: 165929 - DNA, 25 bp, SARS Virus
atccgttaggatcctaaaaacttcg

SEQ ID NO: 165930 - DNA, 25 bp, SARS Virus
tccgttaggattctaaaaacttcga

SEQ ID NO: 165931 - DNA, 25 bp, SARS Virus
ccgttaggattccaaaaacttcgat

SEQ ID NO: 165932 - DNA, 25 bp, SARS Virus
cgttaggattctcaaaacttcgatg

SEQ ID NO: 165933 - DNA, 25 bp, SARS Virus
gttaggattctacaaacttcgatgt

SEQ ID NO: 165934 - DNA, 25 bp, SARS Virus
ttaggattctaacaacttcgatgtc

SEQ ID NO: 165935 - DNA, 25 bp, SARS Virus
taggattctaaacacttcgatgtcg

SEQ ID NO: 165936 - DNA, 25 bp, SARS Virus
aggattctaaaaccttcgatgtcgc

SEQ ID NO: 165937 - DNA, 25 bp, SARS Virus
ggattctaaaaacttcgatgtcgca

SEQ ID NO: 165938 - DNA, 25 bp, SARS Virus
gattctaaaaacctcgatgtcgcaa

SEQ ID NO: 165939 - DNA, 25 bp, SARS Virus
attctaaaaactccgatgtcgcaag

SEQ ID NO: 165940 - DNA, 25 bp, SARS Virus
ttctaaaaacttcgatgtcgcaaga

SEQ ID NO: 165941 - DNA, 25 bp, SARS Virus
tctaaaaacttccatgtcgcaagac

SEQ ID NO: 165942 - DNA, 25 bp, SARS Virus
ctaaaaacttcgctgtcgcaagaca

SEQ ID NO: 165943 - DNA, 25 bp, SARS Virus
taaaaacttcgacgtcgcaagacac

SEQ ID NO: 165944 - DNA, 25 bp, SARS Virus
aaaaacttcgatctcgcaagacact

SEQ ID NO: 165945 - DNA, 25 bp, SARS Virus
aaaacttcgatgccgcaagacactt

SEQ ID NO: 165946 - DNA, 25 bp, SARS Virus
aaacttcgatgtcgcaagacactta

SEQ ID NO: 165947 - DNA, 25 bp, SARS Virus
aacttcgatgtcccaagacacttaa

SEQ ID NO: 165948 - DNA, 25 bp, SARS Virus
acttcgatgtcgcaagacacttaat

SEQ ID NO: 165949 - DNA, 25 bp, SARS Virus
cttcgatgtcgccagacacttaata

SEQ ID NO: 165950 - DNA, 25 bp, SARS Virus
ttcgatgtcgcacgacacttaatat

SEQ ID NO: 165951 - DNA, 25 bp, SARS Virus
tcgatgtcgcaacacacttaatatt

SEQ ID NO: 165952 - DNA, 25 bp, SARS Virus
cgatgtcgcaagccacttaatattc

SEQ ID NO: 165953 - DNA, 25 bp, SARS Virus
ttgcactgcttagcgaagaagcgcc

SEQ ID NO: 165954 - DNA, 25 bp, SARS Virus
tgcactgcttatggaagaagcgccc

SEQ ID NO: 165955 - DNA, 25 bp, SARS Virus
gcactgcttatcgaagaagcgccca

SEQ ID NO: 165956 - DNA, 25 bp, SARS Virus
cactgcttatcggagaagcgcccac

SEQ ID NO: 165957 - DNA, 25 bp, SARS Virus
actgcttatcgaggaagcgcccact

SEQ ID NO: 165958 - DNA, 25 bp, SARS Virus
ctgcttatcgaagaagcgcccacta

SEQ ID NO: 165959 - DNA, 25 bp, SARS Virus
tgcttatcgaaggagcgcccactat

SEQ ID NO: 165960 - DNA, 25 bp, SARS Virus
gcttatcgaagaggcgcccactatt

SEQ ID NO: 165961 - DNA, 25 bp, SARS Virus
cttatcgaagaagcgcccactattt

SEQ ID NO: 165962 - DNA, 25 bp, SARS Virus
ttatcgaagaagggcccactatttg

SEQ ID NO: 165963 - DNA, 25 bp, SARS Virus
tatcgaagaagcgcccactatttgt

SEQ ID NO: 165964 - DNA, 25 bp, SARS Virus
atcgaagaagcggccactatttgta

SEQ ID NO: 165965 - DNA, 25 bp, SARS Virus
tcgaagaagcgcgcactatttgtat

SEQ ID NO: 165966 - DNA, 25 bp, SARS Virus
cgaagaagcgccgactatttgtata

SEQ ID NO: 165967 - DNA, 25 bp, SARS Virus
gaagaagcgcccgctatttgtataa

SEQ ID NO: 165968 - DNA, 25 bp, SARS Virus
aagaagcgcccagtatttgtataat

SEQ ID NO: 165969 - DNA, 25 bp, SARS Virus
agaagcgcccacgatttgtataatc

SEQ ID NO: 165970 - DNA, 25 bp, SARS Virus
gaagcgcccactgtttgtataatcc

SEQ ID NO: 165971 - DNA, 25 bp, SARS Virus
aagcgcccactagttgtataatccc

SEQ ID NO: 165972 - DNA, 25 bp, SARS Virus
agcgcccactatgtgtataatccca

SEQ ID NO: 165973 - DNA, 25 bp, SARS Virus
gcgcccactattggtataatcccat

SEQ ID NO: 165974 - DNA, 25 bp, SARS Virus
cgcccactatttgtataatcccatt

SEQ ID NO: 165975 - DNA, 25 bp, SARS Virus
gcccactatttggataatcccattg

SEQ ID NO: 165976 - DNA, 25 bp, SARS Virus
cccactatttgtgtaatcccattgg

SEQ ID NO: 165977 - DNA, 25 bp, SARS Virus
ccactatttgtagaatcccattggt

SEQ ID NO: 165978 - DNA, 25 bp, SARS Virus
cactatttgtatgatcccattggta

SEQ ID NO: 165979 - DNA, 25 bp, SARS Virus
actatttgtatagtcccattggtaa

SEQ ID NO: 165980 - DNA, 25 bp, SARS Virus
ctatttgtataagcccattggtaac

SEQ ID NO: 165981 - DNA, 25 bp, SARS Virus
tatttgtataatgccattggtaact

SEQ ID NO: 165982 - DNA, 25 bp, SARS Virus
atttgtataatcgcattggtaactg

SEQ ID NO: 165983 - DNA, 25 bp, SARS Virus
tttgtataatccgattggtaactga

SEQ ID NO: 165984 - DNA, 25 bp, SARS Virus
ttgtataatcccgttggtaactgaa

SEQ ID NO: 165985 - DNA, 25 bp, SARS Virus
tgtataatcccagtggtaactgaac

SEQ ID NO: 165986 - DNA, 25 bp, SARS Virus
gtataatcccatgggtaactgaacc

SEQ ID NO: 165987 - DNA, 25 bp, SARS Virus
tataatcccattggtaactgaacca

SEQ ID NO: 165988 - DNA, 25 bp, SARS Virus
ataatcccattggtaactgaaccat

SEQ ID NO: 165989 - DNA, 25 bp, SARS Virus
taatcccattgggaactgaaccatt

SEQ ID NO: 165990 - DNA, 25 bp, SARS Virus
aatcccattggtgactgaaccatta

SEQ ID NO: 165991 - DNA, 25 bp, SARS Virus
atcccattggtagctgaaccattaa

SEQ ID NO: 165992 - DNA, 25 bp, SARS Virus
tcccattggtaagtgaaccattaag

SEQ ID NO: 165993 - DNA, 25 bp, SARS Virus
cccattggtaacggaaccattaagt

SEQ ID NO: 165994 - DNA, 25 bp, SARS Virus
ccattggtaactgaaccattaagta

SEQ ID NO: 165995 - DNA, 25 bp, SARS Virus
cattggtaactggaccattaagtaa

SEQ ID NO: 165996 - DNA, 25 bp, SARS Virus
attggtaactgagccattaagtaaa

SEQ ID NO: 165997 - DNA, 25 bp, SARS Virus
ttggtaactgaagcattaagtaaaa

SEQ ID NO: 165998 - DNA, 25 bp, SARS Virus
tggtaactgaacgattaagtaaaac

SEQ ID NO: 165999 - DNA, 25 bp, SARS Virus
ggtaactgaaccgttaagtaaaact

SEQ ID NO: 166000 - DNA, 25 bp, SARS Virus
gtaactgaaccagtaagtaaaactt

SEQ ID NO: 166001 - DNA, 25 bp, SARS Virus
taactgaaccatgaagtaaaacttt

SEQ ID NO: 166002 - DNA, 25 bp, SARS Virus
aactgaaccattgagtaaaactttg

SEQ ID NO: 166003 - DNA, 25 bp, SARS Virus
actgaaccattaggtaaaactttgg

SEQ ID NO: 166004 - DNA, 25 bp, SARS Virus
ctgaaccattaagtaaaactttggg

SEQ ID NO: 166005 - DNA, 25 bp, SARS Virus
tgaaccattaaggaaaactttgggt

SEQ ID NO: 166006 - DNA, 25 bp, SARS Virus
gaaccattaagtgaaactttgggta

SEQ ID NO: 166007 - DNA, 25 bp, SARS Virus
aaccattaagtagaactttgggtag

SEQ ID NO: 166008 - DNA, 25 bp, SARS Virus
accattaagtaagactttgggtagt

SEQ ID NO: 166009 - DNA, 25 bp, SARS Virus
ccattaagtaaagctttgggtagta

SEQ ID NO: 166010 - DNA, 25 bp, SARS Virus
cattaagtaaaagtttgggtagtat

SEQ ID NO: 166011 - DNA, 25 bp, SARS Virus
attaagtaaaacgttgggtagtatc

SEQ ID NO: 166012 - DNA, 25 bp, SARS Virus
ttaagtaaaactgtgggtagtatct

SEQ ID NO: 166013 - DNA, 25 bp, SARS Virus
taagtaaaacttggggtagtatctc

SEQ ID NO: 166014 - DNA, 25 bp, SARS Virus
aagtaaaactttgggtagtatctct

SEQ ID NO: 166015 - DNA, 25 bp, SARS Virus
agtaaaactttgggtagtatctcta

SEQ ID NO: 166016 - DNA, 25 bp, SARS Virus
gtaaaactttgggtagtatctctac

SEQ ID NO: 166017 - DNA, 25 bp, SARS Virus
taaaactttggggagtatctctact

SEQ ID NO: 166018 - DNA, 25 bp, SARS Virus
aaaactttgggtggtatctctactc

SEQ ID NO: 166019 - DNA, 25 bp, SARS Virus
aaactttgggtagtatctctactca

SEQ ID NO: 166020 - DNA, 25 bp, SARS Virus
aactttgggtaggatctctactcag

SEQ ID NO: 166021 - DNA, 25 bp, SARS Virus
actttgggtagtgtctctactcaga

SEQ ID NO: 166022 - DNA, 25 bp, SARS Virus
ctttgggtagtagctctactcagat

SEQ ID NO: 166023 - DNA, 25 bp, SARS Virus
tttgggtagtatgtctactcagatg

SEQ ID NO: 166024 - DNA, 25 bp, SARS Virus
ttgggtagtatcgctactcagatgc

SEQ ID NO: 166025 - DNA, 25 bp, SARS Virus
tgggtagtatctgtactcagatgcc

SEQ ID NO: 166026 - DNA, 25 bp, SARS Virus
gggtagtatctcgactcagatgcca

SEQ ID NO: 166027 - DNA, 25 bp, SARS Virus
ggtagtatctctgctcagatgccat

SEQ ID NO: 166028 - DNA, 25 bp, SARS Virus
gtagtatctctagtcagatgccatc

SEQ ID NO: 166029 - DNA, 25 bp, SARS Virus
tagtatctctacgcagatgccatcc

SEQ ID NO: 166030 - DNA, 25 bp, SARS Virus
agtatctctactgagatgccatcca

SEQ ID NO: 166031 - DNA, 25 bp, SARS Virus
gtatctctactcggatgccatccag

SEQ ID NO: 166032 - DNA, 25 bp, SARS Virus
tatctctactcagatgccatccagt

SEQ ID NO: 166033 - DNA, 25 bp, SARS Virus
atctctactcaggtgccatccagta

SEQ ID NO: 166034 - DNA, 25 bp, SARS Virus
tctctactcagaggccatccagtac

SEQ ID NO: 166035 - DNA, 25 bp, SARS Virus
ctctactcagatgccatccagtaca

SEQ ID NO: 166036 - DNA, 25 bp, SARS Virus
tctactcagatggcatccagtacag

SEQ ID NO: 166037 - DNA, 25 bp, SARS Virus
ctactcagatgcgatccagtacagg

SEQ ID NO: 166038 - DNA, 25 bp, SARS Virus
tactcagatgccgtccagtacagga

SEQ ID NO: 166039 - DNA, 25 bp, SARS Virus
actcagatgccagccagtacaggaa

SEQ ID NO: 166040 - DNA, 25 bp, SARS Virus
ctcagatgccatgcagtacaggaaa

SEQ ID NO: 166041 - DNA, 25 bp, SARS Virus
tcagatgccatcgagtacaggaaac

SEQ ID NO: 166042 - DNA, 25 bp, SARS Virus
cagatgccatccggtacaggaaacc

SEQ ID NO: 166043 - DNA, 25 bp, SARS Virus
agatgccatccagtacaggaaacca

SEQ ID NO: 166044 - DNA, 25 bp, SARS Virus
gatgccatccaggacaggaaaccat

SEQ ID NO: 166045 - DNA, 25 bp, SARS Virus
atgccatccagtgcaggaaaccata

SEQ ID NO: 166046 - DNA, 25 bp, SARS Virus
tgccatccagtagaggaaaccatac

SEQ ID NO: 166047 - DNA, 25 bp, SARS Virus
gccatccagtacgggaaaccatacg

SEQ ID NO: 166048 - DNA, 25 bp, SARS Virus
ccatccagtacaggaaaccatacgg

SEQ ID NO: 166049 - DNA, 25 bp, SARS Virus
catccagtacaggaaaccatacgga

SEQ ID NO: 166050 - DNA, 25 bp, SARS Virus
atccagtacagggaaccatacggac

SEQ ID NO: 166051 - DNA, 25 bp, SARS Virus
tccagtacaggagaccatacggacc

SEQ ID NO: 166052 - DNA, 25 bp, SARS Virus
ccagtacaggaagccatacggacca

SEQ ID NO: 166053 - DNA, 25 bp, SARS Virus
cagtacaggaaagcatacggaccat

SEQ ID NO: 166054 - DNA, 25 bp, SARS Virus
agtacaggaaacgatacggaccata

SEQ ID NO: 166055 - DNA, 25 bp, SARS Virus
gtacaggaaaccgtacggaccatac

SEQ ID NO: 166056 - DNA, 25 bp, SARS Virus
tacaggaaaccagacggaccataca

SEQ ID NO: 166057 - DNA, 25 bp, SARS Virus
acaggaaaccatgcggaccatacag

SEQ ID NO: 166058 - DNA, 25 bp, SARS Virus
caggaaaccatagggaccatacagt

SEQ ID NO: 166059 - DNA, 25 bp, SARS Virus
aggaaaccatacggaccatacagtt

SEQ ID NO: 166060 - DNA, 25 bp, SARS Virus
ggaaaccatacggaccatacagttg

SEQ ID NO: 166061 - DNA, 25 bp, SARS Virus
gaaaccatacgggccatacagttgt

SEQ ID NO: 166062 - DNA, 25 bp, SARS Virus
aaaccatacggagcatacagttgtg

SEQ ID NO: 166063 - DNA, 25 bp, SARS Virus
aaccatacggacgatacagttgtgt

SEQ ID NO: 166064 - DNA, 25 bp, SARS Virus
accatacggaccgtacagttgtgta

SEQ ID NO: 166065 - DNA, 25 bp, SARS Virus
ccatacggaccagacagttgtgtat

SEQ ID NO: 166066 - DNA, 25 bp, SARS Virus
catacggaccatgcagttgtgtatt

SEQ ID NO: 166067 - DNA, 25 bp, SARS Virus
atacggaccatagagttgtgtatta

SEQ ID NO: 166068 - DNA, 25 bp, SARS Virus
tacggaccatacggttgtgtattag

SEQ ID NO: 166069 - DNA, 25 bp, SARS Virus
acggaccatacagttgtgtattagg

SEQ ID NO: 166070 - DNA, 25 bp, SARS Virus
cggaccatacaggtgtgtattagga

SEQ ID NO: 166071 - DNA, 25 bp, SARS Virus
ggaccatacagtggtgtattaggaa

SEQ ID NO: 166072 - DNA, 25 bp, SARS Virus
gaccatacagttgtgtattaggaag

SEQ ID NO: 166073 - DNA, 25 bp, SARS Virus
accatacagttgggtattaggaagt

SEQ ID NO: 166074 - DNA, 25 bp, SARS Virus
ccatacagttgtgtattaggaagtc

SEQ ID NO: 166075 - DNA, 25 bp, SARS Virus
catacagttgtggattaggaagtca

SEQ ID NO: 166076 - DNA, 25 bp, SARS Virus
atacagttgtgtgttaggaagtcag

SEQ ID NO: 166077 - DNA, 25 bp, SARS Virus
tacagttgtgtagtaggaagtcaga

SEQ ID NO: 166078 - DNA, 25 bp, SARS Virus
acagttgtgtatgaggaagtcagaa

SEQ ID NO: 166079 - DNA, 25 bp, SARS Virus
cagttgtgtattgggaagtcagaac

SEQ ID NO: 166080 - DNA, 25 bp, SARS Virus
agttgtgtattaggaagtcagaact

SEQ ID NO: 166081 - DNA, 25 bp, SARS Virus
gttgtgtattaggaagtcagaactt

SEQ ID NO: 166082 - DNA, 25 bp, SARS Virus
ttgtgtattagggagtcagaacttg

SEQ ID NO: 166083 - DNA, 25 bp, SARS Virus
tgtgtattaggaggtcagaacttga

SEQ ID NO: 166084 - DNA, 25 bp, SARS Virus
gtgtattaggaagtcagaacttgaa

SEQ ID NO: 166085 - DNA, 25 bp, SARS Virus
tgtattaggaaggcagaacttgaaa

SEQ ID NO: 166086 - DNA, 25 bp, SARS Virus
gtattaggaagtgagaacttgaaat

SEQ ID NO: 166087 - DNA, 25 bp, SARS Virus
tattaggaagtcggaacttgaaata

SEQ ID NO: 166088 - DNA, 25 bp, SARS Virus
attaggaagtcagaacttgaaatat

SEQ ID NO: 166089 - DNA, 25 bp, SARS Virus
ttaggaagtcaggacttgaaatata

SEQ ID NO: 166090 - DNA, 25 bp, SARS Virus
taggaagtcagagcttgaaatatag

SEQ ID NO: 166091 - DNA, 25 bp, SARS Virus
aggaagtcagaagttgaaatatagt

SEQ ID NO: 166092 - DNA, 25 bp, SARS Virus
ggaagtcagaacgtgaaatatagtt

SEQ ID NO: 166093 - DNA, 25 bp, SARS Virus
gaagtcagaactggaaatatagttg

SEQ ID NO: 166094 - DNA, 25 bp, SARS Virus
aagtcagaacttgaaatatagttgc

SEQ ID NO: 166095 - DNA, 25 bp, SARS Virus
agtcagaacttggaatatagttgcg

SEQ ID NO: 166096 - DNA, 25 bp, SARS Virus
gtcagaacttgagatatagttgcga

SEQ ID NO: 166097 - DNA, 25 bp, SARS Virus
tcagaacttgaagtatagttgcgac

SEQ ID NO: 166098 - DNA, 25 bp, SARS Virus
cagaacttgaaagatagttgcgact

SEQ ID NO: 166099 - DNA, 25 bp, SARS Virus
agaacttgaaatgtagttgcgactc

SEQ ID NO: 166100 - DNA, 25 bp, SARS Virus
gaacttgaaatagagttgcgactcc

SEQ ID NO: 166101 - DNA, 25 bp, SARS Virus
aacttgaaatatggttgcgactcca

SEQ ID NO: 166102 - DNA, 25 bp, SARS Virus
acttgaaatatagttgcgactccac

SEQ ID NO: 166103 - DNA, 25 bp, SARS Virus
cttgaaatataggtgcgactccaca

SEQ ID NO: 166104 - DNA, 25 bp, SARS Virus
ttgaaatatagtggcgactccacac

SEQ ID NO: 166105 - DNA, 25 bp, SARS Virus
tgaaatatagttgcgactccacaca

SEQ ID NO: 166106 - DNA, 25 bp, SARS Virus
gaaatatagttgggactccacacat

SEQ ID NO: 166107 - DNA, 25 bp, SARS Virus
aaatatagttgcgactccacacatc

SEQ ID NO: 166108 - DNA, 25 bp, SARS Virus
aatatagttgcggctccacacatcc

SEQ ID NO: 166109 - DNA, 25 bp, SARS Virus
atatagttgcgagtccacacatcca

SEQ ID NO: 166110 - DNA, 25 bp, SARS Virus
tatagttgcgacgccacacatccac

SEQ ID NO: 166111 - DNA, 25 bp, SARS Virus
atagttgcgactgcacacatccacg

SEQ ID NO: 166112 - DNA, 25 bp, SARS Virus
tagttgcgactcgacacatccacgg

SEQ ID NO: 166113 - DNA, 25 bp, SARS Virus
agttgcgactccgcacatccacgga

SEQ ID NO: 166114 - DNA, 25 bp, SARS Virus
gttgcgactccagacatccacggac

SEQ ID NO: 166115 - DNA, 25 bp, SARS Virus
ttgcgactccacgcatccacggaca

SEQ ID NO: 166116 - DNA, 25 bp, SARS Virus
tgcgactccacagatccacggacac

SEQ ID NO: 166117 - DNA, 25 bp, SARS Virus
gcgactccacacgtccacggacaca

SEQ ID NO: 166118 - DNA, 25 bp, SARS Virus
cgactccacacagccacggacacat

SEQ ID NO: 166119 - DNA, 25 bp, SARS Virus
gactccacacatgcacggacacatc

SEQ ID NO: 166120 - DNA, 25 bp, SARS Virus
actccacacatcgacggacacatcc

SEQ ID NO: 166121 - DNA, 25 bp, SARS Virus
ctccacacatccgcggacacatcct

SEQ ID NO: 166122 - DNA, 25 bp, SARS Virus
tccacacatccagggacacatccta

SEQ ID NO: 166123 - DNA, 25 bp, SARS Virus
ccacacatccacggacacatcctac

SEQ ID NO: 166124 - DNA, 25 bp, SARS Virus
cacacatccacggacacatcctact

SEQ ID NO: 166125 - DNA, 25 bp, SARS Virus
acacatccacgggcacatcctactt

SEQ ID NO: 166126 - DNA, 25 bp, SARS Virus
cacatccacggagacatcctacttc

SEQ ID NO: 166127 - DNA, 25 bp, SARS Virus
acatccacggacgcatcctacttct

SEQ ID NO: 166128 - DNA, 25 bp, SARS Virus
catccacggacagatcctacttctg

SEQ ID NO: 166129 - DNA, 25 bp, SARS Virus
atccacggacacgtcctacttctgg

SEQ ID NO: 166130 - DNA, 25 bp, SARS Virus
tccacggacacagcctacttctggt

SEQ ID NO: 166131 - DNA, 25 bp, SARS Virus
ccacggacacatgctacttctggtc

SEQ ID NO: 166132 - DNA, 25 bp, SARS Virus
cacggacacatcgtacttctggtca

SEQ ID NO: 166133 - DNA, 25 bp, SARS Virus
acggacacatccgacttctggtcat

SEQ ID NO: 166134 - DNA, 25 bp, SARS Virus
cggacacatcctgcttctggtcatt

SEQ ID NO: 166135 - DNA, 25 bp, SARS Virus
ggacacatcctagttctggtcatta

SEQ ID NO: 166136 - DNA, 25 bp, SARS Virus
gacacatcctacgtctggtcattac

SEQ ID NO: 166137 - DNA, 25 bp, SARS Virus
acacatcctactgctggtcattact

SEQ ID NO: 166138 - DNA, 25 bp, SARS Virus
cacatcctacttgtggtcattacta

SEQ ID NO: 166139 - DNA, 25 bp, SARS Virus
acatcctacttcgggtcattactag

SEQ ID NO: 166140 - DNA, 25 bp, SARS Virus
catcctacttctggtcattactaga

SEQ ID NO: 166141 - DNA, 25 bp, SARS Virus
atcctacttctggtcattactagaa

SEQ ID NO: 166142 - DNA, 25 bp, SARS Virus
tcctacttctgggcattactagaat

SEQ ID NO: 166143 - DNA, 25 bp, SARS Virus
cctacttctggtgattactagaatg

SEQ ID NO: 166144 - DNA, 25 bp, SARS Virus
ctacttctggtcgttactagaatga

SEQ ID NO: 166145 - DNA, 25 bp, SARS Virus
tacttctggtcagtactagaatgat

SEQ ID NO: 166146 - DNA, 25 bp, SARS Virus
acttctggtcatgactagaatgatg

SEQ ID NO: 166147 - DNA, 25 bp, SARS Virus
cttctggtcattgctagaatgatgt

SEQ ID NO: 166148 - DNA, 25 bp, SARS Virus
ttctggtcattagtagaatgatgtc

SEQ ID NO: 166149 - DNA, 25 bp, SARS Virus
tctggtcattacgagaatgatgtca

SEQ ID NO: 166150 - DNA, 25 bp, SARS Virus
ctggtcattactggaatgatgtcag

SEQ ID NO: 166151 - DNA, 25 bp, SARS Virus
tggtcattactagaatgatgtcagg

SEQ ID NO: 166152 - DNA, 25 bp, SARS Virus
ggtcattactaggatgatgtcagga

SEQ ID NO: 166153 - DNA, 25 bp, SARS Virus
gtcattactagagtgatgtcaggaa

SEQ ID NO: 166154 - DNA, 25 bp, SARS Virus
tcattactagaaggatgtcaggaat

SEQ ID NO: 166155 - DNA, 25 bp, SARS Virus
cattactagaatgatgtcaggaatt

SEQ ID NO: 166156 - DNA, 25 bp, SARS Virus
attactagaatggtgtcaggaattt

SEQ ID NO: 166157 - DNA, 25 bp, SARS Virus
ttactagaatgaggtcaggaatttt

SEQ ID NO: 166158 - DNA, 25 bp, SARS Virus
tactagaatgatgtcaggaattttt

SEQ ID NO: 166159 - DNA, 25 bp, SARS Virus
actagaatgatggcaggaatttttc

SEQ ID NO: 166160 - DNA, 25 bp, SARS Virus
ctagaatgatgtgaggaatttttca

SEQ ID NO: 166161 - DNA, 25 bp, SARS Virus
tagaatgatgtcgggaatttttcag

SEQ ID NO: 166162 - DNA, 25 bp, SARS Virus
agaatgatgtcaggaatttttcagg

SEQ ID NO: 166163 - DNA, 25 bp, SARS Virus
gaatgatgtcaggaatttttcaggt

SEQ ID NO: 166164 - DNA, 25 bp, SARS Virus
aatgatgtcagggatttttcaggtc

SEQ ID NO: 166165 - DNA, 25 bp, SARS Virus
atgatgtcaggagtttttcaggtca

SEQ ID NO: 166166 - DNA, 25 bp, SARS Virus
tgatgtcaggaagttttcaggtcaa

SEQ ID NO: 166167 - DNA, 25 bp, SARS Virus
gatgtcaggaatgtttcaggtcaat

SEQ ID NO: 166168 - DNA, 25 bp, SARS Virus
atgtcaggaattgttcaggtcaatg

SEQ ID NO: 166169 - DNA, 25 bp, SARS Virus
tgtcaggaatttgtcaggtcaatgt

SEQ ID NO: 166170 - DNA, 25 bp, SARS Virus
gtcaggaattttgcaggtcaatgta

SEQ ID NO: 166171 - DNA, 25 bp, SARS Virus
tcaggaatttttgaggtcaatgtaa

SEQ ID NO: 166172 - DNA, 25 bp, SARS Virus
caggaatttttcgggtcaatgtaaa

SEQ ID NO: 166173 - DNA, 25 bp, SARS Virus
aggaatttttcaggtcaatgtaaaa

SEQ ID NO: 166174 - DNA, 25 bp, SARS Virus
ggaatttttcaggtcaatgtaaaag

SEQ ID NO: 166175 - DNA, 25 bp, SARS Virus
gaatttttcagggcaatgtaaaaga

SEQ ID NO: 166176 - DNA, 25 bp, SARS Virus
aatttttcaggtgaatgtaaaagac

SEQ ID NO: 166177 - DNA, 25 bp, SARS Virus
atttttcaggtcgatgtaaaagacg

SEQ ID NO: 166178 - DNA, 25 bp, SARS Virus
tttttcaggtcagtgtaaaagacga

SEQ ID NO: 166179 - DNA, 25 bp, SARS Virus
ttttcaggtcaaggtaaaagacgaa

SEQ ID NO: 166180 - DNA, 25 bp, SARS Virus
tttcaggtcaatgtaaaagacgaac

SEQ ID NO: 166181 - DNA, 25 bp, SARS Virus
ttcaggtcaatggaaaagacgaaca

SEQ ID NO: 166182 - DNA, 25 bp, SARS Virus
tcaggtcaatgtgaaagacgaacat

SEQ ID NO: 166183 - DNA, 25 bp, SARS Virus
caggtcaatgtagaagacgaacatt

SEQ ID NO: 166184 - DNA, 25 bp, SARS Virus
aggtcaatgtaagagacgaacatta

SEQ ID NO: 166185 - DNA, 25 bp, SARS Virus
ggtcaatgtaaaggacgaacattac

SEQ ID NO: 166186 - DNA, 25 bp, SARS Virus
gtcaatgtaaaagacgaacattaca

SEQ ID NO: 166187 - DNA, 25 bp, SARS Virus
tcaatgtaaaaggcgaacattacat

SEQ ID NO: 166188 - DNA, 25 bp, SARS Virus
caatgtaaaagaggaacattacatc

SEQ ID NO: 166189 - DNA, 25 bp, SARS Virus
aatgtaaaagacgaacattacatcg

SEQ ID NO: 166190 - DNA, 25 bp, SARS Virus
atgtaaaagacggacattacatcgg

SEQ ID NO: 166191 - DNA, 25 bp, SARS Virus
tgtaaaagacgagcattacatcggt

SEQ ID NO: 166192 - DNA, 25 bp, SARS Virus
gtaaaagacgaagattacatcggtg

SEQ ID NO: 166193 - DNA, 25 bp, SARS Virus
taaaagacgaacgttacatcggtgt

SEQ ID NO: 166194 - DNA, 25 bp, SARS Virus
aaaagacgaacagtacatcggtgta

SEQ ID NO: 166195 - DNA, 25 bp, SARS Virus
aaagacgaacatgacatcggtgtaa

SEQ ID NO: 166196 - DNA, 25 bp, SARS Virus
aagacgaacattgcatcggtgtaac

SEQ ID NO: 166197 - DNA, 25 bp, SARS Virus
agacgaacattagatcggtgtaacg

SEQ ID NO: 166198 - DNA, 25 bp, SARS Virus
gacgaacattacgtcggtgtaacgc

SEQ ID NO: 166199 - DNA, 25 bp, SARS Virus
acgaacattacagcggtgtaacgct

SEQ ID NO: 166200 - DNA, 25 bp, SARS Virus
cgaacattacatgggtgtaacgctg

SEQ ID NO: 166201 - DNA, 25 bp, SARS Virus
gaacattacatcggtgtaacgctgc

SEQ ID NO: 166202 - DNA, 25 bp, SARS Virus
aacattacatcggtgtaacgctgca

SEQ ID NO: 166203 - DNA, 25 bp, SARS Virus
acattacatcggggtaacgctgcac

SEQ ID NO: 166204 - DNA, 25 bp, SARS Virus
cattacatcggtgtaacgctgcacc

SEQ ID NO: 166205 - DNA, 25 bp, SARS Virus
attacatcggtggaacgctgcacca

SEQ ID NO: 166206 - DNA, 25 bp, SARS Virus
ttacatcggtgtgacgctgcaccat

SEQ ID NO: 166207 - DNA, 25 bp, SARS Virus
tacatcggtgtagcgctgcaccata

SEQ ID NO: 166208 - DNA, 25 bp, SARS Virus
acatcggtgtaaggctgcaccataa

SEQ ID NO: 166209 - DNA, 25 bp, SARS Virus
catcggtgtaacgctgcaccataaa

SEQ ID NO: 166210 - DNA, 25 bp, SARS Virus
atcggtgtaacggtgcaccataaag

SEQ ID NO: 166211 - DNA, 25 bp, SARS Virus
tcggtgtaacgcggcaccataaaga

SEQ ID NO: 166212 - DNA, 25 bp, SARS Virus
cggtgtaacgctgcaccataaagat

SEQ ID NO: 166213 - DNA, 25 bp, SARS Virus
ggtgtaacgctggaccataaagatc

SEQ ID NO: 166214 - DNA, 25 bp, SARS Virus
gtgtaacgctgcgccataaagatct

SEQ ID NO: 166215 - DNA, 25 bp, SARS Virus
tgtaacgctgcagcataaagatctg

SEQ ID NO: 166216 - DNA, 25 bp, SARS Virus
gtaacgctgcacgataaagatctga

SEQ ID NO: 166217 - DNA, 25 bp, SARS Virus
taacgctgcaccgtaaagatctgaa

SEQ ID NO: 166218 - DNA, 25 bp, SARS Virus
aacgctgcaccagaaagatctgaac

SEQ ID NO: 166219 - DNA, 25 bp, SARS Virus
acgctgcaccatgaagatctgaaca

SEQ ID NO: 166220 - DNA, 25 bp, SARS Virus
cgctgcaccatagagatctgaacat

SEQ ID NO: 166221 - DNA, 25 bp, SARS Virus
gctgcaccataaggatctgaacatt

SEQ ID NO: 166222 - DNA, 25 bp, SARS Virus
ctgcaccataaagatctgaacattt

SEQ ID NO: 166223 - DNA, 25 bp, SARS Virus
tgcaccataaaggtctgaacattta

SEQ ID NO: 166224 - DNA, 25 bp, SARS Virus
gcaccataaagagctgaacatttaa

SEQ ID NO: 166225 - DNA, 25 bp, SARS Virus
caccataaagatgtgaacatttaac

SEQ ID NO: 166226 - DNA, 25 bp, SARS Virus
accataaagatcggaacatttaacg

SEQ ID NO: 166227 - DNA, 25 bp, SARS Virus
ccataaagatctgaacatttaacgt

SEQ ID NO: 166228 - DNA, 25 bp, SARS Virus
cataaagatctggacatttaacgtc

SEQ ID NO: 166229 - DNA, 25 bp, SARS Virus
ataaagatctgagcatttaacgtca

SEQ ID NO: 166230 - DNA, 25 bp, SARS Virus
taaagatctgaagatttaacgtcaa

SEQ ID NO: 166231 - DNA, 25 bp, SARS Virus
aaagatctgaacgtttaacgtcaaa

SEQ ID NO: 166232 - DNA, 25 bp, SARS Virus
aagatctgaacagttaacgtcaaac

SEQ ID NO: 166233 - DNA, 25 bp, SARS Virus
agatctgaacatgtaacgtcaaaca

SEQ ID NO: 166234 - DNA, 25 bp, SARS Virus
gatctgaacattgaacgtcaaacag

SEQ ID NO: 166235 - DNA, 25 bp, SARS Virus
atctgaacatttgacgtcaaacagt

SEQ ID NO: 166236 - DNA, 25 bp, SARS Virus
tctgaacatttagcgtcaaacagta

SEQ ID NO: 166237 - DNA, 25 bp, SARS Virus
ctgaacatttaaggtcaaacagtat

SEQ ID NO: 166238 - DNA, 25 bp, SARS Virus
tgaacatttaacgtcaaacagtatt

SEQ ID NO: 166239 - DNA, 25 bp, SARS Virus
gaacatttaacggcaaacagtattt

SEQ ID NO: 166240 - DNA, 25 bp, SARS Virus
aacatttaacgtgaaacagtatttc

SEQ ID NO: 166241 - DNA, 25 bp, SARS Virus
acatttaacgtcgaacagtatttct

SEQ ID NO: 166242 - DNA, 25 bp, SARS Virus
catttaacgtcagacagtatttcta

SEQ ID NO: 166243 - DNA, 25 bp, SARS Virus
atttaacgtcaagcagtatttctag

SEQ ID NO: 166244 - DNA, 25 bp, SARS Virus
tttaacgtcaaagagtatttctaga

SEQ ID NO: 166245 - DNA, 25 bp, SARS Virus
ttaacgtcaaacggtatttctagag

SEQ ID NO: 166246 - DNA, 25 bp, SARS Virus
taacgtcaaacagtatttctagaga

SEQ ID NO: 166247 - DNA, 25 bp, SARS Virus
aacgtcaaacaggatttctagagat

SEQ ID NO: 166248 - DNA, 25 bp, SARS Virus
acgtcaaacagtgtttctagagata

SEQ ID NO: 166249 - DNA, 25 bp, SARS Virus
cgtcaaacagtagttctagagatag

SEQ ID NO: 166250 - DNA, 25 bp, SARS Virus
gtcaaacagtatgtctagagatagt

SEQ ID NO: 166251 - DNA, 25 bp, SARS Virus
tcaaacagtattgctagagatagtc

SEQ ID NO: 166252 - DNA, 25 bp, SARS Virus
caaacagtatttgtagagatagtct

SEQ ID NO: 166253 - DNA, 25 bp, SARS Virus
aaacagtatttcgagagatagtctg

SEQ ID NO: 166254 - DNA, 25 bp, SARS Virus
aacagtatttctggagatagtctgt

SEQ ID NO: 166255 - DNA, 25 bp, SARS Virus
acagtatttctagagatagtctgta

SEQ ID NO: 166256 - DNA, 25 bp, SARS Virus
cagtatttctagggatagtctgtaa

SEQ ID NO: 166257 - DNA, 25 bp, SARS Virus
agtatttctagagatagtctgtaat

SEQ ID NO: 166258 - DNA, 25 bp, SARS Virus
gtatttctagaggtagtctgtaata

SEQ ID NO: 166259 - DNA, 25 bp, SARS Virus
tatttctagagagagtctgtaatac

SEQ ID NO: 166260 - DNA, 25 bp, SARS Virus
atttctagagatggtctgtaatacg

SEQ ID NO: 166261 - DNA, 25 bp, SARS Virus
tttctagagatagtctgtaatacgt

SEQ ID NO: 166262 - DNA, 25 bp, SARS Virus
ttctagagataggctgtaatacgtg

SEQ ID NO: 166263 - DNA, 25 bp, SARS Virus
tctagagatagtgtgtaatacgtgt

SEQ ID NO: 166264 - DNA, 25 bp, SARS Virus
ctagagatagtcggtaatacgtgtt

SEQ ID NO: 166265 - DNA, 25 bp, SARS Virus
tagagatagtctgtaatacgtgttt

SEQ ID NO: 166266 - DNA, 25 bp, SARS Virus
agagatagtctggaatacgtgtttt

SEQ ID NO: 166267 - DNA, 25 bp, SARS Virus
gagatagtctgtgatacgtgtttta

SEQ ID NO: 166268 - DNA, 25 bp, SARS Virus
agatagtctgtagtacgtgttttac

SEQ ID NO: 166269 - DNA, 25 bp, SARS Virus
gatagtctgtaagacgtgttttacg

SEQ ID NO: 166270 - DNA, 25 bp, SARS Virus
atagtctgtaatgcgtgttttacgg

SEQ ID NO: 166271 - DNA, 25 bp, SARS Virus
tagtctgtaataggtgttttacggt

SEQ ID NO: 166272 - DNA, 25 bp, SARS Virus
agtctgtaatacgtgttttacggtt

SEQ ID NO: 166273 - DNA, 25 bp, SARS Virus
gtctgtaatacgggttttacggtta

SEQ ID NO: 166274 - DNA, 25 bp, SARS Virus
tctgtaatacgtgttttacggttaa

SEQ ID NO: 166275 - DNA, 25 bp, SARS Virus
ctgtaatacgtggtttacggttaaa

SEQ ID NO: 166276 - DNA, 25 bp, SARS Virus
tgtaatacgtgtgttacggttaaaa

SEQ ID NO: 166277 - DNA, 25 bp, SARS Virus
gtaatacgtgttgtacggttaaaaa

SEQ ID NO: 166278 - DNA, 25 bp, SARS Virus
taatacgtgtttgacggttaaaaac

SEQ ID NO: 166279 - DNA, 25 bp, SARS Virus
aatacgtgttttgcggttaaaaacg

SEQ ID NO: 166280 - DNA, 25 bp, SARS Virus
atacgtgttttagggttaaaaacgg

SEQ ID NO: 166281 - DNA, 25 bp, SARS Virus
tacgtgttttacggttaaaaacggg

SEQ ID NO: 166282 - DNA, 25 bp, SARS Virus
acgtgttttacggttaaaaacggga

SEQ ID NO: 166283 - DNA, 25 bp, SARS Virus
cgtgttttacgggtaaaaacgggaa

SEQ ID NO: 166284 - DNA, 25 bp, SARS Virus
gtgttttacggtgaaaaacgggaac

SEQ ID NO: 166285 - DNA, 25 bp, SARS Virus
tgttttacggttgaaaacgggaaca

SEQ ID NO: 166286 - DNA, 25 bp, SARS Virus
gttttacggttagaaacgggaacac

SEQ ID NO: 166287 - DNA, 25 bp, SARS Virus
ttttacggttaagaacgggaacact

SEQ ID NO: 166288 - DNA, 25 bp, SARS Virus
tttacggttaaagacgggaacacta

SEQ ID NO: 166289 - DNA, 25 bp, SARS Virus
ttacggttaaaagcgggaacactat

SEQ ID NO: 166290 - DNA, 25 bp, SARS Virus
tacggttaaaaaggggaacactatc

SEQ ID NO: 166291 - DNA, 25 bp, SARS Virus
acggttaaaaacgggaacactatcg

SEQ ID NO: 166292 - DNA, 25 bp, SARS Virus
cggttaaaaacgggaacactatcgg

SEQ ID NO: 166293 - DNA, 25 bp, SARS Virus
ggttaaaaacgggaacactatcggt

SEQ ID NO: 166294 - DNA, 25 bp, SARS Virus
gttaaaaacggggacactatcggtg

SEQ ID NO: 166295 - DNA, 25 bp, SARS Virus
ttaaaaacgggagcactatcggtgt

SEQ ID NO: 166296 - DNA, 25 bp, SARS Virus
taaaaacgggaagactatcggtgta

SEQ ID NO: 166297 - DNA, 25 bp, SARS Virus
aaaaacgggaacgctatcggtgtaa

SEQ ID NO: 166298 - DNA, 25 bp, SARS Virus
aaaacgggaacagtatcggtgtaac

SEQ ID NO: 166299 - DNA, 25 bp, SARS Virus
aaacgggaacacgatcggtgtaact

SEQ ID NO: 166300 - DNA, 25 bp, SARS Virus
aacgggaacactgtcggtgtaactt

SEQ ID NO: 166301 - DNA, 25 bp, SARS Virus
acgggaacactagcggtgtaacttc

SEQ ID NO: 166302 - DNA, 25 bp, SARS Virus
cgggaacactatgggtgtaacttcg

SEQ ID NO: 166303 - DNA, 25 bp, SARS Virus
gggaacactatcggtgtaacttcgc

SEQ ID NO: 166304 - DNA, 25 bp, SARS Virus
ggaacactatcggtgtaacttcgcc

SEQ ID NO: 166305 - DNA, 25 bp, SARS Virus
gaacactatcggggtaacttcgcca

SEQ ID NO: 166306 - DNA, 25 bp, SARS Virus
aacactatcggtgtaacttcgccaa

SEQ ID NO: 166307 - DNA, 25 bp, SARS Virus
acactatcggtggaacttcgccaac

SEQ ID NO: 166308 - DNA, 25 bp, SARS Virus
cactatcggtgtgacttcgccaact

SEQ ID NO: 166309 - DNA, 25 bp, SARS Virus
actatcggtgtagcttcgccaactg

SEQ ID NO: 166310 - DNA, 25 bp, SARS Virus
ctatcggtgtaagttcgccaactgt

SEQ ID NO: 166311 - DNA, 25 bp, SARS Virus
tatcggtgtaacgtcgccaactgta

SEQ ID NO: 166312 - DNA, 25 bp, SARS Virus
atcggtgtaactgcgccaactgtaa

SEQ ID NO: 166313 - DNA, 25 bp, SARS Virus
tcggtgtaacttggccaactgtaat

SEQ ID NO: 166314 - DNA, 25 bp, SARS Virus
cggtgtaacttcgccaactgtaatg

SEQ ID NO: 166315 - DNA, 25 bp, SARS Virus
ggtgtaacttcggcaactgtaatgt

SEQ ID NO: 166316 - DNA, 25 bp, SARS Virus
gtgtaacttcgcgaactgtaatgtt

SEQ ID NO: 166317 - DNA, 25 bp, SARS Virus
tgtaacttcgccgactgtaatgttc

SEQ ID NO: 166318 - DNA, 25 bp, SARS Virus
gtaacttcgccagctgtaatgttct

SEQ ID NO: 166319 - DNA, 25 bp, SARS Virus
taacttcgccaagtgtaatgttctc

SEQ ID NO: 166320 - DNA, 25 bp, SARS Virus
aacttcgccaacggtaatgttctca

SEQ ID NO: 166321 - DNA, 25 bp, SARS Virus
acttcgccaactgtaatgttctcac

SEQ ID NO: 166322 - DNA, 25 bp, SARS Virus
cttcgccaactggaatgttctcaca

SEQ ID NO: 166323 - DNA, 25 bp, SARS Virus
ttcgccaactgtgatgttctcacac

SEQ ID NO: 166324 - DNA, 25 bp, SARS Virus
tcgccaactgtagtgttctcacacg

SEQ ID NO: 166325 - DNA, 25 bp, SARS Virus
cgccaactgtaaggttctcacacga

SEQ ID NO: 166326 - DNA, 25 bp, SARS Virus
gccaactgtaatgttctcacacgac

SEQ ID NO: 166327 - DNA, 25 bp, SARS Virus
ccaactgtaatggtctcacacgaca

SEQ ID NO: 166328 - DNA, 25 bp, SARS Virus
caactgtaatgtgctcacacgacaa

SEQ ID NO: 166329 - DNA, 25 bp, SARS Virus
aactgtaatgttgtcacacgacaaa

SEQ ID NO: 166330 - DNA, 25 bp, SARS Virus
actgtaatgttcgcacacgacaaag

SEQ ID NO: 166331 - DNA, 25 bp, SARS Virus
ctgtaatgttctgacacgacaaagt

SEQ ID NO: 166332 - DNA, 25 bp, SARS Virus
tgtaatgttctcgcacgacaaagtc

SEQ ID NO: 166333 - DNA, 25 bp, SARS Virus
gtaatgttctcagacgacaaagtca

SEQ ID NO: 166334 - DNA, 25 bp, SARS Virus
taatgttctcacgcgacaaagtcat

SEQ ID NO: 166335 - DNA, 25 bp, SARS Virus
aatgttctcacaggacaaagtcatc

SEQ ID NO: 166336 - DNA, 25 bp, SARS Virus
atgttctcacacgacaaagtcatca

SEQ ID NO: 166337 - DNA, 25 bp, SARS Virus
tgttctcacacggcaaagtcatcaa

SEQ ID NO: 166338 - DNA, 25 bp, SARS Virus
gttctcacacgagaaagtcatcaaa

SEQ ID NO: 166339 - DNA, 25 bp, SARS Virus
ttctcacacgacgaagtcatcaaac

SEQ ID NO: 166340 - DNA, 25 bp, SARS Virus
tctcacacgacagagtcatcaaaca

SEQ ID NO: 166341 - DNA, 25 bp, SARS Virus
ctcacacgacaaggtcatcaaacac

SEQ ID NO: 166342 - DNA, 25 bp, SARS Virus
tcacacgacaaagtcatcaaacaca

SEQ ID NO: 166343 - DNA, 25 bp, SARS Virus
cacacgacaaaggcatcaaacacac

SEQ ID NO: 166344 - DNA, 25 bp, SARS Virus
acacgacaaagtgatcaaacacact

SEQ ID NO: 166345 - DNA, 25 bp, SARS Virus
cacgacaaagtcgtcaaacacactt

SEQ ID NO: 166346 - DNA, 25 bp, SARS Virus
acgacaaagtcagcaaacacactta

SEQ ID NO: 166347 - DNA, 25 bp, SARS Virus
cgacaaagtcatgaaacacacttat

SEQ ID NO: 166348 - DNA, 25 bp, SARS Virus
gacaaagtcatcgaacacacttata

SEQ ID NO: 166349 - DNA, 25 bp, SARS Virus
acaaagtcatcagacacacttatac

SEQ ID NO: 166350 - DNA, 25 bp, SARS Virus
caaagtcatcaagcacacttatact

SEQ ID NO: 166351 - DNA, 25 bp, SARS Virus
aaagtcatcaaagacacttatactg

SEQ ID NO: 166352 - DNA, 25 bp, SARS Virus
aagtcatcaaacgcacttatactgt

SEQ ID NO: 166353 - DNA, 25 bp, SARS Virus
agtcatcaaacagacttatactgta

SEQ ID NO: 166354 - DNA, 25 bp, SARS Virus
gtcatcaaacacgcttatactgtat

SEQ ID NO: 166355 - DNA, 25 bp, SARS Virus
tcatcaaacacagttatactgtatc

SEQ ID NO: 166356 - DNA, 25 bp, SARS Virus
catcaaacacacgtatactgtatca

SEQ ID NO: 166357 - DNA, 25 bp, SARS Virus
atcaaacacactgatactgtatcag

SEQ ID NO: 166358 - DNA, 25 bp, SARS Virus
tcaaacacacttgtactgtatcagt

SEQ ID NO: 166359 - DNA, 25 bp, SARS Virus
caaacacacttagactgtatcagta

SEQ ID NO: 166360 - DNA, 25 bp, SARS Virus
aaacacacttatgctgtatcagtat

SEQ ID NO: 166361 - DNA, 25 bp, SARS Virus
aacacacttatagtgtatcagtata

SEQ ID NO: 166362 - DNA, 25 bp, SARS Virus
acacacttatacggtatcagtataa

SEQ ID NO: 166363 - DNA, 25 bp, SARS Virus
cacacttatactgtatcagtataag

SEQ ID NO: 166364 - DNA, 25 bp, SARS Virus
acacttatactggatcagtataagt

SEQ ID NO: 166365 - DNA, 25 bp, SARS Virus
cacttatactgtgtcagtataagtc

SEQ ID NO: 166366 - DNA, 25 bp, SARS Virus
acttatactgtagcagtataagtct

SEQ ID NO: 166367 - DNA, 25 bp, SARS Virus
cttatactgtatgagtataagtctt

SEQ ID NO: 166368 - DNA, 25 bp, SARS Virus
ttatactgtatcggtataagtcttg

SEQ ID NO: 166369 - DNA, 25 bp, SARS Virus
tatactgtatcagtataagtcttgg

SEQ ID NO: 166370 - DNA, 25 bp, SARS Virus
atactgtatcaggataagtcttggg

SEQ ID NO: 166371 - DNA, 25 bp, SARS Virus
tactgtatcagtgtaagtcttggga

SEQ ID NO: 166372 - DNA, 25 bp, SARS Virus
actgtatcagtagaagtcttgggac

SEQ ID NO: 166373 - DNA, 25 bp, SARS Virus
ctgtatcagtatgagtcttgggaca

SEQ ID NO: 166374 - DNA, 25 bp, SARS Virus
tgtatcagtataggtcttgggacac

SEQ ID NO: 166375 - DNA, 25 bp, SARS Virus
gtatcagtataagtcttgggacact

SEQ ID NO: 166376 - DNA, 25 bp, SARS Virus
tatcagtataaggcttgggacacta

SEQ ID NO: 166377 - DNA, 25 bp, SARS Virus
atcagtataagtgttgggacactac

SEQ ID NO: 166378 - DNA, 25 bp, SARS Virus
tcagtataagtcgtgggacactact

SEQ ID NO: 166379 - DNA, 25 bp, SARS Virus
cagtataagtctggggacactactt

SEQ ID NO: 166380 - DNA, 25 bp, SARS Virus
agtataagtcttgggacactactta

SEQ ID NO: 166381 - DNA, 25 bp, SARS Virus
gtataagtcttgggacactacttag

SEQ ID NO: 166382 - DNA, 25 bp, SARS Virus
tataagtcttgggacactacttagt

SEQ ID NO: 166383 - DNA, 25 bp, SARS Virus
ataagtcttggggcactacttagtt

SEQ ID NO: 166384 - DNA, 25 bp, SARS Virus
taagtcttgggagactacttagttg

SEQ ID NO: 166385 - DNA, 25 bp, SARS Virus
aagtcttgggacgctacttagttgt

SEQ ID NO: 166386 - DNA, 25 bp, SARS Virus
agtcttgggacagtacttagttgtc

SEQ ID NO: 166387 - DNA, 25 bp, SARS Virus
gtcttgggacacgacttagttgtca

SEQ ID NO: 166388 - DNA, 25 bp, SARS Virus
tcttgggacactgcttagttgtcag

SEQ ID NO: 166389 - DNA, 25 bp, SARS Virus
cttgggacactagttagttgtcaga

SEQ ID NO: 166390 - DNA, 25 bp, SARS Virus
ttgggacactacgtagttgtcagac

SEQ ID NO: 166391 - DNA, 25 bp, SARS Virus
tgggacactactgagttgtcagacg

SEQ ID NO: 166392 - DNA, 25 bp, SARS Virus
gggacactacttggttgtcagacgc

SEQ ID NO: 166393 - DNA, 25 bp, SARS Virus
ggacactacttagttgtcagacgca

SEQ ID NO: 166394 - DNA, 25 bp, SARS Virus
gacactacttaggtgtcagacgcat

SEQ ID NO: 166395 - DNA, 25 bp, SARS Virus
acactacttagtggtcagacgcatc

SEQ ID NO: 166396 - DNA, 25 bp, SARS Virus
cactacttagttgtcagacgcatcc

SEQ ID NO: 166397 - DNA, 25 bp, SARS Virus
actacttagttggcagacgcatccg

SEQ ID NO: 166398 - DNA, 25 bp, SARS Virus
ctacttagttgtgagacgcatccgt

SEQ ID NO: 166399 - DNA, 25 bp, SARS Virus
tacttagttgtcggacgcatccgtt

SEQ ID NO: 166400 - DNA, 25 bp, SARS Virus
acttagttgtcagacgcatccgtta

SEQ ID NO: 166401 - DNA, 25 bp, SARS Virus
cttagttgtcaggcgcatccgttag

SEQ ID NO: 166402 - DNA, 25 bp, SARS Virus
ttagttgtcagaggcatccgttagg

SEQ ID NO: 166403 - DNA, 25 bp, SARS Virus
tagttgtcagacgcatccgttagga

SEQ ID NO: 166404 - DNA, 25 bp, SARS Virus
agttgtcagacggatccgttaggat

SEQ ID NO: 166405 - DNA, 25 bp, SARS Virus
gttgtcagacgcgtccgttaggatt

SEQ ID NO: 166406 - DNA, 25 bp, SARS Virus
ttgtcagacgcagccgttaggattc

SEQ ID NO: 166407 - DNA, 25 bp, SARS Virus
tgtcagacgcatgcgttaggattct

SEQ ID NO: 166408 - DNA, 25 bp, SARS Virus
gtcagacgcatcggttaggattcta

SEQ ID NO: 166409 - DNA, 25 bp, SARS Virus
tcagacgcatccgttaggattctaa

SEQ ID NO: 166410 - DNA, 25 bp, SARS Virus
cagacgcatccggtaggattctaaa

SEQ ID NO: 166411 - DNA, 25 bp, SARS Virus
agacgcatccgtgaggattctaaaa

SEQ ID NO: 166412 - DNA, 25 bp, SARS Virus
gacgcatccgttgggattctaaaaa

SEQ ID NO: 166413 - DNA, 25 bp, SARS Virus
acgcatccgttaggattctaaaaac

SEQ ID NO: 166414 - DNA, 25 bp, SARS Virus
cgcatccgttaggattctaaaaact

SEQ ID NO: 166415 - DNA, 25 bp, SARS Virus
gcatccgttagggttctaaaaactt

SEQ ID NO: 166416 - DNA, 25 bp, SARS Virus
catccgttaggagtctaaaaacttc

SEQ ID NO: 166417 - DNA, 25 bp, SARS Virus
atccgttaggatgctaaaaacttcg

SEQ ID NO: 166418 - DNA, 25 bp, SARS Virus
tccgttaggattgtaaaaacttcga

SEQ ID NO: 166419 - DNA, 25 bp, SARS Virus
ccgttaggattcgaaaaacttcgat

SEQ ID NO: 166420 - DNA, 25 bp, SARS Virus
cgttaggattctgaaaacttcgatg

SEQ ID NO: 166421 - DNA, 25 bp, SARS Virus
gttaggattctagaaacttcgatgt

SEQ ID NO: 166422 - DNA, 25 bp, SARS Virus
ttaggattctaagaacttcgatgtc

SEQ ID NO: 166423 - DNA, 25 bp, SARS Virus
taggattctaaagacttcgatgtcg

SEQ ID NO: 166424 - DNA, 25 bp, SARS Virus
aggattctaaaagcttcgatgtcgc

SEQ ID NO: 166425 - DNA, 25 bp, SARS Virus
ggattctaaaaagttcgatgtcgca

SEQ ID NO: 166426 - DNA, 25 bp, SARS Virus
gattctaaaaacgtcgatgtcgcaa

SEQ ID NO: 166427 - DNA, 25 bp, SARS Virus
attctaaaaactgcgatgtcgcaag

SEQ ID NO: 166428 - DNA, 25 bp, SARS Virus
ttctaaaaacttggatgtcgcaaga

SEQ ID NO: 166429 - DNA, 25 bp, SARS Virus
tctaaaaacttcgatgtcgcaagac

SEQ ID NO: 166430 - DNA, 25 bp, SARS Virus
ctaaaaacttcggtgtcgcaagaca

SEQ ID NO: 166431 - DNA, 25 bp, SARS Virus
taaaaacttcgaggtcgcaagacac

SEQ ID NO: 166432 - DNA, 25 bp, SARS Virus
aaaaacttcgatgtcgcaagacact

SEQ ID NO: 166433 - DNA, 25 bp, SARS Virus
aaaacttcgatggcgcaagacactt

SEQ ID NO: 166434 - DNA, 25 bp, SARS Virus
aaacttcgatgtggcaagacactta

SEQ ID NO: 166435 - DNA, 25 bp, SARS Virus
aacttcgatgtcgcaagacacttaa

SEQ ID NO: 166436 - DNA, 25 bp, SARS Virus
acttcgatgtcggaagacacttaat

SEQ ID NO: 166437 - DNA, 25 bp, SARS Virus
cttcgatgtcgcgagacacttaata

SEQ ID NO: 166438 - DNA, 25 bp, SARS Virus
ttcgatgtcgcaggacacttaatat

SEQ ID NO: 166439 - DNA, 25 bp, SARS Virus
tcgatgtcgcaagacacttaatatt

SEQ ID NO: 166440 - DNA, 25 bp, SARS Virus
cgatgtcgcaaggcacttaatattc

SEQ ID NO: 166441 - DNA, 25 bp, SARS Virus
ttgcactgcttatcgaagaagcgcc

SEQ ID NO: 166442 - DNA, 25 bp, SARS Virus
tgcactgcttattgaagaagcgccc

SEQ ID NO: 166443 - DNA, 25 bp, SARS Virus
gcactgcttatctaagaagcgccca

SEQ ID NO: 166444 - DNA, 25 bp, SARS Virus
cactgcttatcgtagaagcgcccac

SEQ ID NO: 166445 - DNA, 25 bp, SARS Virus
actgcttatcgatgaagcgcccact

SEQ ID NO: 166446 - DNA, 25 bp, SARS Virus
ctgcttatcgaataagcgcccacta

SEQ ID NO: 166447 - DNA, 25 bp, SARS Virus
tgcttatcgaagtagcgcccactat

SEQ ID NO: 166448 - DNA, 25 bp, SARS Virus
gcttatcgaagatgcgcccactatt

SEQ ID NO: 166449 - DNA, 25 bp, SARS Virus
cttatcgaagaatcgcccactattt

SEQ ID NO: 166450 - DNA, 25 bp, SARS Virus
ttatcgaagaagtgcccactatttg

SEQ ID NO: 166451 - DNA, 25 bp, SARS Virus
tatcgaagaagctcccactatttgt

SEQ ID NO: 166452 - DNA, 25 bp, SARS Virus
atcgaagaagcgtccactatttgta

SEQ ID NO: 166453 - DNA, 25 bp, SARS Virus
tcgaagaagcgctcactatttgtat

SEQ ID NO: 166454 - DNA, 25 bp, SARS Virus
cgaagaagcgcctactatttgtata

SEQ ID NO: 166455 - DNA, 25 bp, SARS Virus
gaagaagcgccctctatttgtataa

SEQ ID NO: 166456 - DNA, 25 bp, SARS Virus
aagaagcgcccattatttgtataat

SEQ ID NO: 166457 - DNA, 25 bp, SARS Virus
agaagcgcccactatttgtataatc

SEQ ID NO: 166458 - DNA, 25 bp, SARS Virus
gaagcgcccactttttgtataatcc

SEQ ID NO: 166459 - DNA, 25 bp, SARS Virus
aagcgcccactatttgtataatccc

SEQ ID NO: 166460 - DNA, 25 bp, SARS Virus
agcgcccactatttgtataatccca

SEQ ID NO: 166461 - DNA, 25 bp, SARS Virus
gcgcccactatttgtataatcccat

SEQ ID NO: 166462 - DNA, 25 bp, SARS Virus
cgcccactatttttataatcccatt

SEQ ID NO: 166463 - DNA, 25 bp, SARS Virus
gcccactatttgtataatcccattg

SEQ ID NO: 166464 - DNA, 25 bp, SARS Virus
cccactatttgtttaatcccattgg

SEQ ID NO: 166465 - DNA, 25 bp, SARS Virus
ccactatttgtataatcccattggt

SEQ ID NO: 166466 - DNA, 25 bp, SARS Virus
cactatttgtattatcccattggta

SEQ ID NO: 166467 - DNA, 25 bp, SARS Virus
actatttgtatattcccattggtaa

SEQ ID NO: 166468 - DNA, 25 bp, SARS Virus
ctatttgtataatcccattggtaac

SEQ ID NO: 166469 - DNA, 25 bp, SARS Virus
tatttgtataattccattggtaact

SEQ ID NO: 166470 - DNA, 25 bp, SARS Virus
atttgtataatctcattggtaactg

SEQ ID NO: 166471 - DNA, 25 bp, SARS Virus
tttgtataatcctattggtaactga

SEQ ID NO: 166472 - DNA, 25 bp, SARS Virus
ttgtataatccctttggtaactgaa

SEQ ID NO: 166473 - DNA, 25 bp, SARS Virus
tgtataatcccattggtaactgaac

SEQ ID NO: 166474 - DNA, 25 bp, SARS Virus
gtataatcccattggtaactgaacc

SEQ ID NO: 166475 - DNA, 25 bp, SARS Virus
tataatcccatttgtaactgaacca

SEQ ID NO: 166476 - DNA, 25 bp, SARS Virus
ataatcccattgttaactgaaccat

SEQ ID NO: 166477 - DNA, 25 bp, SARS Virus
taatcccattggtaactgaaccatt

SEQ ID NO: 166478 - DNA, 25 bp, SARS Virus
aatcccattggttactgaaccatta

SEQ ID NO: 166479 - DNA, 25 bp, SARS Virus
atcccattggtatctgaaccattaa

SEQ ID NO: 166480 - DNA, 25 bp, SARS Virus
tcccattggtaattgaaccattaag

SEQ ID NO: 166481 - DNA, 25 bp, SARS Virus
cccattggtaactgaaccattaagt

SEQ ID NO: 166482 - DNA, 25 bp, SARS Virus
ccattggtaacttaaccattaagta

SEQ ID NO: 166483 - DNA, 25 bp, SARS Virus
cattggtaactgtaccattaagtaa

SEQ ID NO: 166484 - DNA, 25 bp, SARS Virus
attggtaactgatccattaagtaaa

SEQ ID NO: 166485 - DNA, 25 bp, SARS Virus
ttggtaactgaatcattaagtaaaa

SEQ ID NO: 166486 - DNA, 25 bp, SARS Virus
tggtaactgaactattaagtaaaac

SEQ ID NO: 166487 - DNA, 25 bp, SARS Virus
ggtaactgaacctttaagtaaaact

SEQ ID NO: 166488 - DNA, 25 bp, SARS Virus
gtaactgaaccattaagtaaaactt

SEQ ID NO: 166489 - DNA, 25 bp, SARS Virus
taactgaaccattaagtaaaacttt

SEQ ID NO: 166490 - DNA, 25 bp, SARS Virus
aactgaaccatttagtaaaactttg

SEQ ID NO: 166491 - DNA, 25 bp, SARS Virus
actgaaccattatgtaaaactttgg

SEQ ID NO: 166492 - DNA, 25 bp, SARS Virus
ctgaaccattaattaaaactttggg

SEQ ID NO: 166493 - DNA, 25 bp, SARS Virus
tgaaccattaagtaaaactttgggt

SEQ ID NO: 166494 - DNA, 25 bp, SARS Virus
gaaccattaagttaaactttgggta

SEQ ID NO: 166495 - DNA, 25 bp, SARS Virus
aaccattaagtataactttgggtag

SEQ ID NO: 166496 - DNA, 25 bp, SARS Virus
accattaagtaatactttgggtagt

SEQ ID NO: 166497 - DNA, 25 bp, SARS Virus
ccattaagtaaatctttgggtagta

SEQ ID NO: 166498 - DNA, 25 bp, SARS Virus
cattaagtaaaattttgggtagtat

SEQ ID NO: 166499 - DNA, 25 bp, SARS Virus
attaagtaaaactttgggtagtatc

SEQ ID NO: 166500 - DNA, 25 bp, SARS Virus
ttaagtaaaactttgggtagtatct

SEQ ID NO: 166501 - DNA, 25 bp, SARS Virus
taagtaaaactttgggtagtatctc

SEQ ID NO: 166502 - DNA, 25 bp, SARS Virus
aagtaaaacttttggtagtatctct

SEQ ID NO: 166503 - DNA, 25 bp, SARS Virus
agtaaaactttgtgtagtatctcta

SEQ ID NO: 166504 - DNA, 25 bp, SARS Virus
gtaaaactttggttagtatctctac

SEQ ID NO: 166505 - DNA, 25 bp, SARS Virus
taaaactttgggtagtatctctact

SEQ ID NO: 166506 - DNA, 25 bp, SARS Virus
aaaactttgggttgtatctctactc

SEQ ID NO: 166507 - DNA, 25 bp, SARS Virus
aaactttgggtattatctctactca

SEQ ID NO: 166508 - DNA, 25 bp, SARS Virus
aactttgggtagtatctctactcag

SEQ ID NO: 166509 - DNA, 25 bp, SARS Virus
actttgggtagtttctctactcaga

SEQ ID NO: 166510 - DNA, 25 bp, SARS Virus
ctttgggtagtatctctactcagat

SEQ ID NO: 166511 - DNA, 25 bp, SARS Virus
tttgggtagtatttctactcagatg

SEQ ID NO: 166512 - DNA, 25 bp, SARS Virus
ttgggtagtatctctactcagatgc

SEQ ID NO: 166513 - DNA, 25 bp, SARS Virus
tgggtagtatctttactcagatgcc

SEQ ID NO: 166514 - DNA, 25 bp, SARS Virus
gggtagtatctctactcagatgcca

SEQ ID NO: 166515 - DNA, 25 bp, SARS Virus
ggtagtatctcttctcagatgccat

SEQ ID NO: 166516 - DNA, 25 bp, SARS Virus
gtagtatctctattcagatgccatc

SEQ ID NO: 166517 - DNA, 25 bp, SARS Virus
tagtatctctactcagatgccatcc

SEQ ID NO: 166518 - DNA, 25 bp, SARS Virus
agtatctctacttagatgccatcca

SEQ ID NO: 166519 - DNA, 25 bp, SARS Virus
gtatctctactctgatgccatccag

SEQ ID NO: 166520 - DNA, 25 bp, SARS Virus
tatctctactcatatgccatccagt

SEQ ID NO: 166521 - DNA, 25 bp, SARS Virus
atctctactcagttgccatccagta

SEQ ID NO: 166522 - DNA, 25 bp, SARS Virus
tctctactcagatgccatccagtac

SEQ ID NO: 166523 - DNA, 25 bp, SARS Virus
ctctactcagattccatccagtaca

SEQ ID NO: 166524 - DNA, 25 bp, SARS Virus
tctactcagatgtcatccagtacag

SEQ ID NO: 166525 - DNA, 25 bp, SARS Virus
ctactcagatgctatccagtacagg

SEQ ID NO: 166526 - DNA, 25 bp, SARS Virus
tactcagatgccttccagtacagga

SEQ ID NO: 166527 - DNA, 25 bp, SARS Virus
actcagatgccatccagtacaggaa

SEQ ID NO: 166528 - DNA, 25 bp, SARS Virus
ctcagatgccattcagtacaggaaa

SEQ ID NO: 166529 - DNA, 25 bp, SARS Virus
tcagatgccatctagtacaggaaac

SEQ ID NO: 166530 - DNA, 25 bp, SARS Virus
cagatgccatcctgtacaggaaacc

SEQ ID NO: 166531 - DNA, 25 bp, SARS Virus
agatgccatccattacaggaaacca

SEQ ID NO: 166532 - DNA, 25 bp, SARS Virus
gatgccatccagtacaggaaaccat

SEQ ID NO: 166533 - DNA, 25 bp, SARS Virus
atgccatccagttcaggaaaccata

SEQ ID NO: 166534 - DNA, 25 bp, SARS Virus
tgccatccagtataggaaaccatac

SEQ ID NO: 166535 - DNA, 25 bp, SARS Virus
gccatccagtactggaaaccatacg

SEQ ID NO: 166536 - DNA, 25 bp, SARS Virus
ccatccagtacatgaaaccatacgg

SEQ ID NO: 166537 - DNA, 25 bp, SARS Virus
catccagtacagtaaaccatacgga

SEQ ID NO: 166538 - DNA, 25 bp, SARS Virus
atccagtacaggtaaccatacggac

SEQ ID NO: 166539 - DNA, 25 bp, SARS Virus
tccagtacaggataccatacggacc

SEQ ID NO: 166540 - DNA, 25 bp, SARS Virus
ccagtacaggaatccatacggacca

SEQ ID NO: 166541 - DNA, 25 bp, SARS Virus
cagtacaggaaatcatacggaccat

SEQ ID NO: 166542 - DNA, 25 bp, SARS Virus
agtacaggaaactatacggaccata

SEQ ID NO: 166543 - DNA, 25 bp, SARS Virus
gtacaggaaaccttacggaccatac

SEQ ID NO: 166544 - DNA, 25 bp, SARS Virus
tacaggaaaccatacggaccataca

SEQ ID NO: 166545 - DNA, 25 bp, SARS Virus
acaggaaaccattcggaccatacag

SEQ ID NO: 166546 - DNA, 25 bp, SARS Virus
caggaaaccatatggaccatacagt

SEQ ID NO: 166547 - DNA, 25 bp, SARS Virus
aggaaaccatactgaccatacagtt

SEQ ID NO: 166548 - DNA, 25 bp, SARS Virus
ggaaaccatacgtaccatacagttg

SEQ ID NO: 166549 - DNA, 25 bp, SARS Virus
gaaaccatacggtccatacagttgt

SEQ ID NO: 166550 - DNA, 25 bp, SARS Virus
aaaccatacggatcatacagttgtg

SEQ ID NO: 166551 - DNA, 25 bp, SARS Virus
aaccatacggactatacagttgtgt

SEQ ID NO: 166552 - DNA, 25 bp, SARS Virus
accatacggaccttacagttgtgta

SEQ ID NO: 166553 - DNA, 25 bp, SARS Virus
ccatacggaccatacagttgtgtat

SEQ ID NO: 166554 - DNA, 25 bp, SARS Virus
catacggaccattcagttgtgtatt

SEQ ID NO: 166555 - DNA, 25 bp, SARS Virus
atacggaccatatagttgtgtatta

SEQ ID NO: 166556 - DNA, 25 bp, SARS Virus
tacggaccatactgttgtgtattag

SEQ ID NO: 166557 - DNA, 25 bp, SARS Virus
acggaccatacatttgtgtattagg

SEQ ID NO: 166558 - DNA, 25 bp, SARS Virus
cggaccatacagttgtgtattagga

SEQ ID NO: 166559 - DNA, 25 bp, SARS Virus
ggaccatacagttgtgtattaggaa

SEQ ID NO: 166560 - DNA, 25 bp, SARS Virus
gaccatacagttttgtattaggaag

SEQ ID NO: 166561 - DNA, 25 bp, SARS Virus
accatacagttgtgtattaggaagt

SEQ ID NO: 166562 - DNA, 25 bp, SARS Virus
ccatacagttgtttattaggaagtc

SEQ ID NO: 166563 - DNA, 25 bp, SARS Virus
catacagttgtgtattaggaagtca

SEQ ID NO: 166564 - DNA, 25 bp, SARS Virus
atacagttgtgttttaggaagtcag

SEQ ID NO: 166565 - DNA, 25 bp, SARS Virus
tacagttgtgtattaggaagtcaga

SEQ ID NO: 166566 - DNA, 25 bp, SARS Virus
acagttgtgtattaggaagtcagaa

SEQ ID NO: 166567 - DNA, 25 bp, SARS Virus
cagttgtgtatttggaagtcagaac

SEQ ID NO: 166568 - DNA, 25 bp, SARS Virus
agttgtgtattatgaagtcagaact

SEQ ID NO: 166569 - DNA, 25 bp, SARS Virus
gttgtgtattagtaagtcagaactt

SEQ ID NO: 166570 - DNA, 25 bp, SARS Virus
ttgtgtattaggtagtcagaacttg

SEQ ID NO: 166571 - DNA, 25 bp, SARS Virus
tgtgtattaggatgtcagaacttga

SEQ ID NO: 166572 - DNA, 25 bp, SARS Virus
gtgtattaggaattcagaacttgaa

SEQ ID NO: 166573 - DNA, 25 bp, SARS Virus
tgtattaggaagtcagaacttgaaa

SEQ ID NO: 166574 - DNA, 25 bp, SARS Virus
gtattaggaagttagaacttgaaat

SEQ ID NO: 166575 - DNA, 25 bp, SARS Virus
tattaggaagtctgaacttgaaata

SEQ ID NO: 166576 - DNA, 25 bp, SARS Virus
attaggaagtcataacttgaaatat

SEQ ID NO: 166577 - DNA, 25 bp, SARS Virus
ttaggaagtcagtacttgaaatata

SEQ ID NO: 166578 - DNA, 25 bp, SARS Virus
taggaagtcagatcttgaaatatag

SEQ ID NO: 166579 - DNA, 25 bp, SARS Virus
aggaagtcagaatttgaaatatagt

SEQ ID NO: 166580 - DNA, 25 bp, SARS Virus
ggaagtcagaacttgaaatatagtt

SEQ ID NO: 166581 - DNA, 25 bp, SARS Virus
gaagtcagaacttgaaatatagttg

SEQ ID NO: 166582 - DNA, 25 bp, SARS Virus
aagtcagaactttaaatatagttgc

SEQ ID NO: 166583 - DNA, 25 bp, SARS Virus
agtcagaacttgtaatatagttgcg

SEQ ID NO: 166584 - DNA, 25 bp, SARS Virus
gtcagaacttgatatatagttgcga

SEQ ID NO: 166585 - DNA, 25 bp, SARS Virus
tcagaacttgaattatagttgcgac

SEQ ID NO: 166586 - DNA, 25 bp, SARS Virus
cagaacttgaaatatagttgcgact

SEQ ID NO: 166587 - DNA, 25 bp, SARS Virus
agaacttgaaatttagttgcgactc

SEQ ID NO: 166588 - DNA, 25 bp, SARS Virus
gaacttgaaatatagttgcgactcc

SEQ ID NO: 166589 - DNA, 25 bp, SARS Virus
aacttgaaatattgttgcgactcca

SEQ ID NO: 166590 - DNA, 25 bp, SARS Virus
acttgaaatatatttgcgactccac

SEQ ID NO: 166591 - DNA, 25 bp, SARS Virus
cttgaaatatagttgcgactccaca

SEQ ID NO: 166592 - DNA, 25 bp, SARS Virus
ttgaaatatagttgcgactccacac

SEQ ID NO: 166593 - DNA, 25 bp, SARS Virus
tgaaatatagtttcgactccacaca

SEQ ID NO: 166594 - DNA, 25 bp, SARS Virus
gaaatatagttgtgactccacacat

SEQ ID NO: 166595 - DNA, 25 bp, SARS Virus
aaatatagttgctactccacacatc

SEQ ID NO: 166596 - DNA, 25 bp, SARS Virus
aatatagttgcgtctccacacatcc

SEQ ID NO: 166597 - DNA, 25 bp, SARS Virus
atatagttgcgattccacacatcca

SEQ ID NO: 166598 - DNA, 25 bp, SARS Virus
tatagttgcgactccacacatccac

SEQ ID NO: 166599 - DNA, 25 bp, SARS Virus
atagttgcgacttcacacatccacg

SEQ ID NO: 166600 - DNA, 25 bp, SARS Virus
tagttgcgactctacacatccacgg

SEQ ID NO: 166601 - DNA, 25 bp, SARS Virus
agttgcgactcctcacatccacgga

SEQ ID NO: 166602 - DNA, 25 bp, SARS Virus
gttgcgactccatacatccacggac

SEQ ID NO: 166603 - DNA, 25 bp, SARS Virus
ttgcgactccactcatccacggaca

SEQ ID NO: 166604 - DNA, 25 bp, SARS Virus
tgcgactccacatatccacggacac

SEQ ID NO: 166605 - DNA, 25 bp, SARS Virus
gcgactccacacttccacggacaca

SEQ ID NO: 166606 - DNA, 25 bp, SARS Virus
cgactccacacatccacggacacat

SEQ ID NO: 166607 - DNA, 25 bp, SARS Virus
gactccacacattcacggacacatc

SEQ ID NO: 166608 - DNA, 25 bp, SARS Virus
actccacacatctacggacacatcc

SEQ ID NO: 166609 - DNA, 25 bp, SARS Virus
ctccacacatcctcggacacatcct

SEQ ID NO: 166610 - DNA, 25 bp, SARS Virus
tccacacatccatggacacatccta

SEQ ID NO: 166611 - DNA, 25 bp, SARS Virus
ccacacatccactgacacatcctac

SEQ ID NO: 166612 - DNA, 25 bp, SARS Virus
cacacatccacgtacacatcctact

SEQ ID NO: 166613 - DNA, 25 bp, SARS Virus
acacatccacggtcacatcctactt

SEQ ID NO: 166614 - DNA, 25 bp, SARS Virus
cacatccacggatacatcctacttc

SEQ ID NO: 166615 - DNA, 25 bp, SARS Virus
acatccacggactcatcctacttct

SEQ ID NO: 166616 - DNA, 25 bp, SARS Virus
catccacggacatatcctacttctg

SEQ ID NO: 166617 - DNA, 25 bp, SARS Virus
atccacggacacttcctacttctgg

SEQ ID NO: 166618 - DNA, 25 bp, SARS Virus
tccacggacacatcctacttctggt

SEQ ID NO: 166619 - DNA, 25 bp, SARS Virus
ccacggacacattctacttctggtc

SEQ ID NO: 166620 - DNA, 25 bp, SARS Virus
cacggacacatcttacttctggtca

SEQ ID NO: 166621 - DNA, 25 bp, SARS Virus
acggacacatcctacttctggtcat

SEQ ID NO: 166622 - DNA, 25 bp, SARS Virus
cggacacatccttcttctggtcatt

SEQ ID NO: 166623 - DNA, 25 bp, SARS Virus
ggacacatcctatttctggtcatta

SEQ ID NO: 166624 - DNA, 25 bp, SARS Virus
gacacatcctacttctggtcattac

SEQ ID NO: 166625 - DNA, 25 bp, SARS Virus
acacatcctacttctggtcattact

SEQ ID NO: 166626 - DNA, 25 bp, SARS Virus
cacatcctacttttggtcattacta

SEQ ID NO: 166627 - DNA, 25 bp, SARS Virus
acatcctacttctggtcattactag

SEQ ID NO: 166628 - DNA, 25 bp, SARS Virus
catcctacttcttgtcattactaga

SEQ ID NO: 166629 - DNA, 25 bp, SARS Virus
atcctacttctgttcattactagaa

SEQ ID NO: 166630 - DNA, 25 bp, SARS Virus
tcctacttctggtcattactagaat

SEQ ID NO: 166631 - DNA, 25 bp, SARS Virus
cctacttctggttattactagaatg

SEQ ID NO: 166632 - DNA, 25 bp, SARS Virus
ctacttctggtctttactagaatga

SEQ ID NO: 166633 - DNA, 25 bp, SARS Virus
tacttctggtcattactagaatgat

SEQ ID NO: 166634 - DNA, 25 bp, SARS Virus
acttctggtcattactagaatgatg

SEQ ID NO: 166635 - DNA, 25 bp, SARS Virus
cttctggtcatttctagaatgatgt

SEQ ID NO: 166636 - DNA, 25 bp, SARS Virus
ttctggtcattattagaatgatgtc

SEQ ID NO: 166637 - DNA, 25 bp, SARS Virus
tctggtcattactagaatgatgtca

SEQ ID NO: 166638 - DNA, 25 bp, SARS Virus
ctggtcattacttgaatgatgtcag

SEQ ID NO: 166639 - DNA, 25 bp, SARS Virus
tggtcattactataatgatgtcagg

SEQ ID NO: 166640 - DNA, 25 bp, SARS Virus
ggtcattactagtatgatgtcagga

SEQ ID NO: 166641 - DNA, 25 bp, SARS Virus
gtcattactagattgatgtcaggaa

SEQ ID NO: 166642 - DNA, 25 bp, SARS Virus
tcattactagaatgatgtcaggaat

SEQ ID NO: 166643 - DNA, 25 bp, SARS Virus
cattactagaattatgtcaggaatt

SEQ ID NO: 166644 - DNA, 25 bp, SARS Virus
attactagaatgttgtcaggaattt

SEQ ID NO: 166645 - DNA, 25 bp, SARS Virus
ttactagaatgatgtcaggaatttt

SEQ ID NO: 166646 - DNA, 25 bp, SARS Virus
tactagaatgatttcaggaattttt

SEQ ID NO: 166647 - DNA, 25 bp, SARS Virus
actagaatgatgtcaggaatttttc

SEQ ID NO: 166648 - DNA, 25 bp, SARS Virus
ctagaatgatgttaggaatttttca

SEQ ID NO: 166649 - DNA, 25 bp, SARS Virus
tagaatgatgtctggaatttttcag

SEQ ID NO: 166650 - DNA, 25 bp, SARS Virus
agaatgatgtcatgaatttttcagg

SEQ ID NO: 166651 - DNA, 25 bp, SARS Virus
gaatgatgtcagtaatttttcaggt

SEQ ID NO: 166652 - DNA, 25 bp, SARS Virus
aatgatgtcaggtatttttcaggtc

SEQ ID NO: 166653 - DNA, 25 bp, SARS Virus
atgatgtcaggattttttcaggtca

SEQ ID NO: 166654 - DNA, 25 bp, SARS Virus
tgatgtcaggaatttttcaggtcaa

SEQ ID NO: 166655 - DNA, 25 bp, SARS Virus
gatgtcaggaatttttcaggtcaat

SEQ ID NO: 166656 - DNA, 25 bp, SARS Virus
atgtcaggaatttttcaggtcaatg

SEQ ID NO: 166657 - DNA, 25 bp, SARS Virus
tgtcaggaatttttcaggtcaatgt

SEQ ID NO: 166658 - DNA, 25 bp, SARS Virus
gtcaggaatttttcaggtcaatgta

SEQ ID NO: 166659 - DNA, 25 bp, SARS Virus
tcaggaattttttaggtcaatgtaa

SEQ ID NO: 166660 - DNA, 25 bp, SARS Virus
caggaatttttctggtcaatgtaaa

SEQ ID NO: 166661 - DNA, 25 bp, SARS Virus
aggaatttttcatgtcaatgtaaaa

SEQ ID NO: 166662 - DNA, 25 bp, SARS Virus
ggaatttttcagttcaatgtaaaag

SEQ ID NO: 166663 - DNA, 25 bp, SARS Virus
gaatttttcaggtcaatgtaaaaga

SEQ ID NO: 166664 - DNA, 25 bp, SARS Virus
aatttttcaggttaatgtaaaagac

SEQ ID NO: 166665 - DNA, 25 bp, SARS Virus
atttttcaggtctatgtaaaagacg

SEQ ID NO: 166666 - DNA, 25 bp, SARS Virus
tttttcaggtcattgtaaaagacga

SEQ ID NO: 166667 - DNA, 25 bp, SARS Virus
ttttcaggtcaatgtaaaagacgaa

SEQ ID NO: 166668 - DNA, 25 bp, SARS Virus
tttcaggtcaatttaaaagacgaac

SEQ ID NO: 166669 - DNA, 25 bp, SARS Virus
ttcaggtcaatgtaaaagacgaaca

SEQ ID NO: 166670 - DNA, 25 bp, SARS Virus
tcaggtcaatgttaaagacgaacat

SEQ ID NO: 166671 - DNA, 25 bp, SARS Virus
caggtcaatgtataagacgaacatt

SEQ ID NO: 166672 - DNA, 25 bp, SARS Virus
aggtcaatgtaatagacgaacatta

SEQ ID NO: 166673 - DNA, 25 bp, SARS Virus
ggtcaatgtaaatgacgaacattac

SEQ ID NO: 166674 - DNA, 25 bp, SARS Virus
gtcaatgtaaaatacgaacattaca

SEQ ID NO: 166675 - DNA, 25 bp, SARS Virus
tcaatgtaaaagtcgaacattacat

SEQ ID NO: 166676 - DNA, 25 bp, SARS Virus
caatgtaaaagatgaacattacatc

SEQ ID NO: 166677 - DNA, 25 bp, SARS Virus
aatgtaaaagactaacattacatcg

SEQ ID NO: 166678 - DNA, 25 bp, SARS Virus
atgtaaaagacgtacattacatcgg

SEQ ID NO: 166679 - DNA, 25 bp, SARS Virus
tgtaaaagacgatcattacatcggt

SEQ ID NO: 166680 - DNA, 25 bp, SARS Virus
gtaaaagacgaatattacatcggtg

SEQ ID NO: 166681 - DNA, 25 bp, SARS Virus
taaaagacgaactttacatcggtgt

SEQ ID NO: 166682 - DNA, 25 bp, SARS Virus
aaaagacgaacattacatcggtgta

SEQ ID NO: 166683 - DNA, 25 bp, SARS Virus
aaagacgaacattacatcggtgtaa

SEQ ID NO: 166684 - DNA, 25 bp, SARS Virus
aagacgaacatttcatcggtgtaac

SEQ ID NO: 166685 - DNA, 25 bp, SARS Virus
agacgaacattatatcggtgtaacg

SEQ ID NO: 166686 - DNA, 25 bp, SARS Virus
gacgaacattacttcggtgtaacgc

SEQ ID NO: 166687 - DNA, 25 bp, SARS Virus
acgaacattacatcggtgtaacgct

SEQ ID NO: 166688 - DNA, 25 bp, SARS Virus
cgaacattacattggtgtaacgctg

SEQ ID NO: 166689 - DNA, 25 bp, SARS Virus
gaacattacatctgtgtaacgctgc

SEQ ID NO: 166690 - DNA, 25 bp, SARS Virus
aacattacatcgttgtaacgctgca

SEQ ID NO: 166691 - DNA, 25 bp, SARS Virus
acattacatcggtgtaacgctgcac

SEQ ID NO: 166692 - DNA, 25 bp, SARS Virus
cattacatcggtttaacgctgcacc

SEQ ID NO: 166693 - DNA, 25 bp, SARS Virus
attacatcggtgtaacgctgcacca

SEQ ID NO: 166694 - DNA, 25 bp, SARS Virus
ttacatcggtgttacgctgcaccat

SEQ ID NO: 166695 - DNA, 25 bp, SARS Virus
tacatcggtgtatcgctgcaccata

SEQ ID NO: 166696 - DNA, 25 bp, SARS Virus
acatcggtgtaatgctgcaccataa

SEQ ID NO: 166697 - DNA, 25 bp, SARS Virus
catcggtgtaactctgcaccataaa

SEQ ID NO: 166698 - DNA, 25 bp, SARS Virus
atcggtgtaacgttgcaccataaag

SEQ ID NO: 166699 - DNA, 25 bp, SARS Virus
tcggtgtaacgctgcaccataaaga

SEQ ID NO: 166700 - DNA, 25 bp, SARS Virus
cggtgtaacgcttcaccataaagat

SEQ ID NO: 166701 - DNA, 25 bp, SARS Virus
ggtgtaacgctgtaccataaagatc

SEQ ID NO: 166702 - DNA, 25 bp, SARS Virus
gtgtaacgctgctccataaagatct

SEQ ID NO: 166703 - DNA, 25 bp, SARS Virus
tgtaacgctgcatcataaagatctg

SEQ ID NO: 166704 - DNA, 25 bp, SARS Virus
gtaacgctgcactataaagatctga

SEQ ID NO: 166705 - DNA, 25 bp, SARS Virus
taacgctgcaccttaaagatctgaa

SEQ ID NO: 166706 - DNA, 25 bp, SARS Virus
aacgctgcaccataaagatctgaac

SEQ ID NO: 166707 - DNA, 25 bp, SARS Virus
acgctgcaccattaagatctgaaca

SEQ ID NO: 166708 - DNA, 25 bp, SARS Virus
cgctgcaccatatagatctgaacat

SEQ ID NO: 166709 - DNA, 25 bp, SARS Virus
gctgcaccataatgatctgaacatt

SEQ ID NO: 166710 - DNA, 25 bp, SARS Virus
ctgcaccataaatatctgaacattt

SEQ ID NO: 166711 - DNA, 25 bp, SARS Virus
tgcaccataaagttctgaacattta

SEQ ID NO: 166712 - DNA, 25 bp, SARS Virus
gcaccataaagatctgaacatttaa

SEQ ID NO: 166713 - DNA, 25 bp, SARS Virus
caccataaagatttgaacatttaac

SEQ ID NO: 166714 - DNA, 25 bp, SARS Virus
accataaagatctgaacatttaacg

SEQ ID NO: 166715 - DNA, 25 bp, SARS Virus
ccataaagatcttaacatttaacgt

SEQ ID NO: 166716 - DNA, 25 bp, SARS Virus
cataaagatctgtacatttaacgtc

SEQ ID NO: 166717 - DNA, 25 bp, SARS Virus
ataaagatctgatcatttaacgtca

SEQ ID NO: 166718 - DNA, 25 bp, SARS Virus
taaagatctgaatatttaacgtcaa

SEQ ID NO: 166719 - DNA, 25 bp, SARS Virus
aaagatctgaacttttaacgtcaaa

SEQ ID NO: 166720 - DNA, 25 bp, SARS Virus
aagatctgaacatttaacgtcaaac

SEQ ID NO: 166721 - DNA, 25 bp, SARS Virus
agatctgaacatttaacgtcaaaca

SEQ ID NO: 166722 - DNA, 25 bp, SARS Virus
gatctgaacatttaacgtcaaacag

SEQ ID NO: 166723 - DNA, 25 bp, SARS Virus
atctgaacattttacgtcaaacagt

SEQ ID NO: 166724 - DNA, 25 bp, SARS Virus
tctgaacatttatcgtcaaacagta

SEQ ID NO: 166725 - DNA, 25 bp, SARS Virus
ctgaacatttaatgtcaaacagtat

SEQ ID NO: 166726 - DNA, 25 bp, SARS Virus
tgaacatttaacttcaaacagtatt

SEQ ID NO: 166727 - DNA, 25 bp, SARS Virus
gaacatttaacgtcaaacagtattt

SEQ ID NO: 166728 - DNA, 25 bp, SARS Virus
aacatttaacgttaaacagtatttc

SEQ ID NO: 166729 - DNA, 25 bp, SARS Virus
acatttaacgtctaacagtatttct

SEQ ID NO: 166730 - DNA, 25 bp, SARS Virus
catttaacgtcatacagtatttcta

SEQ ID NO: 166731 - DNA, 25 bp, SARS Virus
atttaacgtcaatcagtatttctag

SEQ ID NO: 166732 - DNA, 25 bp, SARS Virus
tttaacgtcaaatagtatttctaga

SEQ ID NO: 166733 - DNA, 25 bp, SARS Virus
ttaacgtcaaactgtatttctagag

SEQ ID NO: 166734 - DNA, 25 bp, SARS Virus
taacgtcaaacattatttctagaga

SEQ ID NO: 166735 - DNA, 25 bp, SARS Virus
aacgtcaaacagtatttctagagat

SEQ ID NO: 166736 - DNA, 25 bp, SARS Virus
acgtcaaacagtttttctagagata

SEQ ID NO: 166737 - DNA, 25 bp, SARS Virus
cgtcaaacagtatttctagagatag

SEQ ID NO: 166738 - DNA, 25 bp, SARS Virus
gtcaaacagtatttctagagatagt

SEQ ID NO: 166739 - DNA, 25 bp, SARS Virus
tcaaacagtatttctagagatagtc

SEQ ID NO: 166740 - DNA, 25 bp, SARS Virus
caaacagtatttttagagatagtct

SEQ ID NO: 166741 - DNA, 25 bp, SARS Virus
aaacagtatttctagagatagtctg

SEQ ID NO: 166742 - DNA, 25 bp, SARS Virus
aacagtatttcttgagatagtctgt

SEQ ID NO: 166743 - DNA, 25 bp, SARS Virus
acagtatttctatagatagtctgta

SEQ ID NO: 166744 - DNA, 25 bp, SARS Virus
cagtatttctagtgatagtctgtaa

SEQ ID NO: 166745 - DNA, 25 bp, SARS Virus
agtatttctagatatagtctgtaat

SEQ ID NO: 166746 - DNA, 25 bp, SARS Virus
gtatttctagagttagtctgtaata

SEQ ID NO: 166747 - DNA, 25 bp, SARS Virus
tatttctagagatagtctgtaatac

SEQ ID NO: 166748 - DNA, 25 bp, SARS Virus
atttctagagattgtctgtaatacg

SEQ ID NO: 166749 - DNA, 25 bp, SARS Virus
tttctagagatattctgtaatacgt

SEQ ID NO: 166750 - DNA, 25 bp, SARS Virus
ttctagagatagtctgtaatacgtg

SEQ ID NO: 166751 - DNA, 25 bp, SARS Virus
tctagagatagtttgtaatacgtgt

SEQ ID NO: 166752 - DNA, 25 bp, SARS Virus
ctagagatagtctgtaatacgtgtt

SEQ ID NO: 166753 - DNA, 25 bp, SARS Virus
tagagatagtctttaatacgtgttt

SEQ ID NO: 166754 - DNA, 25 bp, SARS Virus
agagatagtctgtaatacgtgtttt

SEQ ID NO: 166755 - DNA, 25 bp, SARS Virus
gagatagtctgttatacgtgtttta

SEQ ID NO: 166756 - DNA, 25 bp, SARS Virus
agatagtctgtattacgtgttttac

SEQ ID NO: 166757 - DNA, 25 bp, SARS Virus
gatagtctgtaatacgtgttttacg

SEQ ID NO: 166758 - DNA, 25 bp, SARS Virus
atagtctgtaattcgtgttttacgg

SEQ ID NO: 166759 - DNA, 25 bp, SARS Virus
tagtctgtaatatgtgttttacggt

SEQ ID NO: 166760 - DNA, 25 bp, SARS Virus
agtctgtaatacttgttttacggtt

SEQ ID NO: 166761 - DNA, 25 bp, SARS Virus
gtctgtaatacgtgttttacggtta

SEQ ID NO: 166762 - DNA, 25 bp, SARS Virus
tctgtaatacgttttttacggttaa

SEQ ID NO: 166763 - DNA, 25 bp, SARS Virus
ctgtaatacgtgttttacggttaaa

SEQ ID NO: 166764 - DNA, 25 bp, SARS Virus
tgtaatacgtgttttacggttaaaa

SEQ ID NO: 166765 - DNA, 25 bp, SARS Virus
gtaatacgtgttttacggttaaaaa

SEQ ID NO: 166766 - DNA, 25 bp, SARS Virus
taatacgtgttttacggttaaaaac

SEQ ID NO: 166767 - DNA, 25 bp, SARS Virus
aatacgtgtttttcggttaaaaacg

SEQ ID NO: 166768 - DNA, 25 bp, SARS Virus
atacgtgttttatggttaaaaacgg

SEQ ID NO: 166769 - DNA, 25 bp, SARS Virus
tacgtgttttactgttaaaaacggg

SEQ ID NO: 166770 - DNA, 25 bp, SARS Virus
acgtgttttacgtttaaaaacggga

SEQ ID NO: 166771 - DNA, 25 bp, SARS Virus
cgtgttttacggttaaaaacgggaa

SEQ ID NO: 166772 - DNA, 25 bp, SARS Virus
gtgttttacggttaaaaacgggaac

SEQ ID NO: 166773 - DNA, 25 bp, SARS Virus
tgttttacggtttaaaacgggaaca

SEQ ID NO: 166774 - DNA, 25 bp, SARS Virus
gttttacggttataaacgggaacac

SEQ ID NO: 166775 - DNA, 25 bp, SARS Virus
ttttacggttaataacgggaacact

SEQ ID NO: 166776 - DNA, 25 bp, SARS Virus
tttacggttaaatacgggaacacta

SEQ ID NO: 166777 - DNA, 25 bp, SARS Virus
ttacggttaaaatcgggaacactat

SEQ ID NO: 166778 - DNA, 25 bp, SARS Virus
tacggttaaaaatgggaacactatc

SEQ ID NO: 166779 - DNA, 25 bp, SARS Virus
acggttaaaaactggaacactatcg

SEQ ID NO: 166780 - DNA, 25 bp, SARS Virus
cggttaaaaacgtgaacactatcgg

SEQ ID NO: 166781 - DNA, 25 bp, SARS Virus
ggttaaaaacggtaacactatcggt

SEQ ID NO: 166782 - DNA, 25 bp, SARS Virus
gttaaaaacgggtacactatcggtg

SEQ ID NO: 166783 - DNA, 25 bp, SARS Virus
ttaaaaacgggatcactatcggtgt

SEQ ID NO: 166784 - DNA, 25 bp, SARS Virus
taaaaacgggaatactatcggtgta

SEQ ID NO: 166785 - DNA, 25 bp, SARS Virus
aaaaacgggaactctatcggtgtaa

SEQ ID NO: 166786 - DNA, 25 bp, SARS Virus
aaaacgggaacattatcggtgtaac

SEQ ID NO: 166787 - DNA, 25 bp, SARS Virus
aaacgggaacactatcggtgtaact

SEQ ID NO: 166788 - DNA, 25 bp, SARS Virus
aacgggaacactttcggtgtaactt

SEQ ID NO: 166789 - DNA, 25 bp, SARS Virus
acgggaacactatcggtgtaacttc

SEQ ID NO: 166790 - DNA, 25 bp, SARS Virus
cgggaacactattggtgtaacttcg

SEQ ID NO: 166791 - DNA, 25 bp, SARS Virus
gggaacactatctgtgtaacttcgc

SEQ ID NO: 166792 - DNA, 25 bp, SARS Virus
ggaacactatcgttgtaacttcgcc

SEQ ID NO: 166793 - DNA, 25 bp, SARS Virus
gaacactatcggtgtaacttcgcca

SEQ ID NO: 166794 - DNA, 25 bp, SARS Virus
aacactatcggtttaacttcgccaa

SEQ ID NO: 166795 - DNA, 25 bp, SARS Virus
acactatcggtgtaacttcgccaac

SEQ ID NO: 166796 - DNA, 25 bp, SARS Virus
cactatcggtgttacttcgccaact

SEQ ID NO: 166797 - DNA, 25 bp, SARS Virus
actatcggtgtatcttcgccaactg

SEQ ID NO: 166798 - DNA, 25 bp, SARS Virus
ctatcggtgtaatttcgccaactgt

SEQ ID NO: 166799 - DNA, 25 bp, SARS Virus
tatcggtgtaacttcgccaactgta

SEQ ID NO: 166800 - DNA, 25 bp, SARS Virus
atcggtgtaacttcgccaactgtaa

SEQ ID NO: 166801 - DNA, 25 bp, SARS Virus
tcggtgtaactttgccaactgtaat

SEQ ID NO: 166802 - DNA, 25 bp, SARS Virus
cggtgtaacttctccaactgtaatg

SEQ ID NO: 166803 - DNA, 25 bp, SARS Virus
ggtgtaacttcgtcaactgtaatgt

SEQ ID NO: 166804 - DNA, 25 bp, SARS Virus
gtgtaacttcgctaactgtaatgtt

SEQ ID NO: 166805 - DNA, 25 bp, SARS Virus
tgtaacttcgcctactgtaatgttc

SEQ ID NO: 166806 - DNA, 25 bp, SARS Virus
gtaacttcgccatctgtaatgttct

SEQ ID NO: 166807 - DNA, 25 bp, SARS Virus
taacttcgccaattgtaatgttctc

SEQ ID NO: 166808 - DNA, 25 bp, SARS Virus
aacttcgccaactgtaatgttctca

SEQ ID NO: 166809 - DNA, 25 bp, SARS Virus
acttcgccaactttaatgttctcac

SEQ ID NO: 166810 - DNA, 25 bp, SARS Virus
cttcgccaactgtaatgttctcaca

SEQ ID NO: 166811 - DNA, 25 bp, SARS Virus
ttcgccaactgttatgttctcacac

SEQ ID NO: 166812 - DNA, 25 bp, SARS Virus
tcgccaactgtattgttctcacacg

SEQ ID NO: 166813 - DNA, 25 bp, SARS Virus
cgccaactgtaatgttctcacacga

SEQ ID NO: 166814 - DNA, 25 bp, SARS Virus
gccaactgtaattttctcacacgac

SEQ ID NO: 166815 - DNA, 25 bp, SARS Virus
ccaactgtaatgttctcacacgaca

SEQ ID NO: 166816 - DNA, 25 bp, SARS Virus
caactgtaatgttctcacacgacaa

SEQ ID NO: 166817 - DNA, 25 bp, SARS Virus
aactgtaatgttttcacacgacaaa

SEQ ID NO: 166818 - DNA, 25 bp, SARS Virus
actgtaatgttctcacacgacaaag

SEQ ID NO: 166819 - DNA, 25 bp, SARS Virus
ctgtaatgttcttacacgacaaagt

SEQ ID NO: 166820 - DNA, 25 bp, SARS Virus
tgtaatgttctctcacgacaaagtc

SEQ ID NO: 166821 - DNA, 25 bp, SARS Virus
gtaatgttctcatacgacaaagtca

SEQ ID NO: 166822 - DNA, 25 bp, SARS Virus
taatgttctcactcgacaaagtcat

SEQ ID NO: 166823 - DNA, 25 bp, SARS Virus
aatgttctcacatgacaaagtcatc

SEQ ID NO: 166824 - DNA, 25 bp, SARS Virus
atgttctcacactacaaagtcatca

SEQ ID NO: 166825 - DNA, 25 bp, SARS Virus
tgttctcacacgtcaaagtcatcaa

SEQ ID NO: 166826 - DNA, 25 bp, SARS Virus
gttctcacacgataaagtcatcaaa

SEQ ID NO: 166827 - DNA, 25 bp, SARS Virus
ttctcacacgactaagtcatcaaac

SEQ ID NO: 166828 - DNA, 25 bp, SARS Virus
tctcacacgacatagtcatcaaaca

SEQ ID NO: 166829 - DNA, 25 bp, SARS Virus
ctcacacgacaatgtcatcaaacac

SEQ ID NO: 166830 - DNA, 25 bp, SARS Virus
tcacacgacaaattcatcaaacaca

SEQ ID NO: 166831 - DNA, 25 bp, SARS Virus
cacacgacaaagtcatcaaacacac

SEQ ID NO: 166832 - DNA, 25 bp, SARS Virus
acacgacaaagttatcaaacacact

SEQ ID NO: 166833 - DNA, 25 bp, SARS Virus
cacgacaaagtcttcaaacacactt

SEQ ID NO: 166834 - DNA, 25 bp, SARS Virus
acgacaaagtcatcaaacacactta

SEQ ID NO: 166835 - DNA, 25 bp, SARS Virus
cgacaaagtcattaaacacacttat

SEQ ID NO: 166836 - DNA, 25 bp, SARS Virus
gacaaagtcatctaacacacttata

SEQ ID NO: 166837 - DNA, 25 bp, SARS Virus
acaaagtcatcatacacacttatac

SEQ ID NO: 166838 - DNA, 25 bp, SARS Virus
caaagtcatcaatcacacttatact

SEQ ID NO: 166839 - DNA, 25 bp, SARS Virus
aaagtcatcaaatacacttatactg

SEQ ID NO: 166840 - DNA, 25 bp, SARS Virus
aagtcatcaaactcacttatactgt

SEQ ID NO: 166841 - DNA, 25 bp, SARS Virus
agtcatcaaacatacttatactgta

SEQ ID NO: 166842 - DNA, 25 bp, SARS Virus
gtcatcaaacactcttatactgtat

SEQ ID NO: 166843 - DNA, 25 bp, SARS Virus
tcatcaaacacatttatactgtatc

SEQ ID NO: 166844 - DNA, 25 bp, SARS Virus
catcaaacacacttatactgtatca

SEQ ID NO: 166845 - DNA, 25 bp, SARS Virus
atcaaacacacttatactgtatcag

SEQ ID NO: 166846 - DNA, 25 bp, SARS Virus
tcaaacacacttttactgtatcagt

SEQ ID NO: 166847 - DNA, 25 bp, SARS Virus
caaacacacttatactgtatcagta

SEQ ID NO: 166848 - DNA, 25 bp, SARS Virus
aaacacacttattctgtatcagtat

SEQ ID NO: 166849 - DNA, 25 bp, SARS Virus
aacacacttatattgtatcagtata

SEQ ID NO: 166850 - DNA, 25 bp, SARS Virus
acacacttatactgtatcagtataa

SEQ ID NO: 166851 - DNA, 25 bp, SARS Virus
cacacttatactttatcagtataag

SEQ ID NO: 166852 - DNA, 25 bp, SARS Virus
acacttatactgtatcagtataagt

SEQ ID NO: 166853 - DNA, 25 bp, SARS Virus
cacttatactgtttcagtataagtc

SEQ ID NO: 166854 - DNA, 25 bp, SARS Virus
acttatactgtatcagtataagtct

SEQ ID NO: 166855 - DNA, 25 bp, SARS Virus
cttatactgtattagtataagtctt

SEQ ID NO: 166856 - DNA, 25 bp, SARS Virus
ttatactgtatctgtataagtcttg

SEQ ID NO: 166857 - DNA, 25 bp, SARS Virus
tatactgtatcattataagtcttgg

SEQ ID NO: 166858 - DNA, 25 bp, SARS Virus
atactgtatcagtataagtcttggg

SEQ ID NO: 166859 - DNA, 25 bp, SARS Virus
tactgtatcagtttaagtcttggga

SEQ ID NO: 166860 - DNA, 25 bp, SARS Virus
actgtatcagtataagtcttgggac

SEQ ID NO: 166861 - DNA, 25 bp, SARS Virus
ctgtatcagtattagtcttgggaca

SEQ ID NO: 166862 - DNA, 25 bp, SARS Virus
tgtatcagtatatgtcttgggacac

SEQ ID NO: 166863 - DNA, 25 bp, SARS Virus
gtatcagtataattcttgggacact

SEQ ID NO: 166864 - DNA, 25 bp, SARS Virus
tatcagtataagtcttgggacacta

SEQ ID NO: 166865 - DNA, 25 bp, SARS Virus
atcagtataagttttgggacactac

SEQ ID NO: 166866 - DNA, 25 bp, SARS Virus
tcagtataagtcttgggacactact

SEQ ID NO: 166867 - DNA, 25 bp, SARS Virus
cagtataagtcttgggacactactt

SEQ ID NO: 166868 - DNA, 25 bp, SARS Virus
agtataagtctttggacactactta

SEQ ID NO: 166869 - DNA, 25 bp, SARS Virus
gtataagtcttgtgacactacttag

SEQ ID NO: 166870 - DNA, 25 bp, SARS Virus
tataagtcttggtacactacttagt

SEQ ID NO: 166871 - DNA, 25 bp, SARS Virus
ataagtcttgggtcactacttagtt

SEQ ID NO: 166872 - DNA, 25 bp, SARS Virus
taagtcttgggatactacttagttg

SEQ ID NO: 166873 - DNA, 25 bp, SARS Virus
aagtcttgggactctacttagttgt

SEQ ID NO: 166874 - DNA, 25 bp, SARS Virus
agtcttgggacattacttagttgtc

SEQ ID NO: 166875 - DNA, 25 bp, SARS Virus
gtcttgggacactacttagttgtca

SEQ ID NO: 166876 - DNA, 25 bp, SARS Virus
tcttgggacacttcttagttgtcag

SEQ ID NO: 166877 - DNA, 25 bp, SARS Virus
cttgggacactatttagttgtcaga

SEQ ID NO: 166878 - DNA, 25 bp, SARS Virus
ttgggacactacttagttgtcagac

SEQ ID NO: 166879 - DNA, 25 bp, SARS Virus
tgggacactacttagttgtcagacg

SEQ ID NO: 166880 - DNA, 25 bp, SARS Virus
gggacactactttgttgtcagacgc

SEQ ID NO: 166881 - DNA, 25 bp, SARS Virus
ggacactacttatttgtcagacgca

SEQ ID NO: 166882 - DNA, 25 bp, SARS Virus
gacactacttagttgtcagacgcat

SEQ ID NO: 166883 - DNA, 25 bp, SARS Virus
acactacttagttgtcagacgcatc

SEQ ID NO: 166884 - DNA, 25 bp, SARS Virus
cactacttagttttcagacgcatcc

SEQ ID NO: 166885 - DNA, 25 bp, SARS Virus
actacttagttgtcagacgcatccg

SEQ ID NO: 166886 - DNA, 25 bp, SARS Virus
ctacttagttgttagacgcatccgt

SEQ ID NO: 166887 - DNA, 25 bp, SARS Virus
tacttagttgtctgacgcatccgtt

SEQ ID NO: 166888 - DNA, 25 bp, SARS Virus
acttagttgtcatacgcatccgtta

SEQ ID NO: 166889 - DNA, 25 bp, SARS Virus
cttagttgtcagtcgcatccgttag

SEQ ID NO: 166890 - DNA, 25 bp, SARS Virus
ttagttgtcagatgcatccgttagg

SEQ ID NO: 166891 - DNA, 25 bp, SARS Virus
tagttgtcagactcatccgttagga

SEQ ID NO: 166892 - DNA, 25 bp, SARS Virus
agttgtcagacgtatccgttaggat

SEQ ID NO: 166893 - DNA, 25 bp, SARS Virus
gttgtcagacgcttccgttaggatt

SEQ ID NO: 166894 - DNA, 25 bp, SARS Virus
ttgtcagacgcatccgttaggattc

SEQ ID NO: 166895 - DNA, 25 bp, SARS Virus
tgtcagacgcattcgttaggattct

SEQ ID NO: 166896 - DNA, 25 bp, SARS Virus
gtcagacgcatctgttaggattcta

SEQ ID NO: 166897 - DNA, 25 bp, SARS Virus
tcagacgcatcctttaggattctaa

SEQ ID NO: 166898 - DNA, 25 bp, SARS Virus
cagacgcatccgttaggattctaaa

SEQ ID NO: 166899 - DNA, 25 bp, SARS Virus
agacgcatccgttaggattctaaaa

SEQ ID NO: 166900 - DNA, 25 bp, SARS Virus
gacgcatccgtttggattctaaaaa

SEQ ID NO: 166901 - DNA, 25 bp, SARS Virus
acgcatccgttatgattctaaaaac

SEQ ID NO: 166902 - DNA, 25 bp, SARS Virus
cgcatccgttagtattctaaaaact

SEQ ID NO: 166903 - DNA, 25 bp, SARS Virus
gcatccgttaggtttctaaaaactt

SEQ ID NO: 166904 - DNA, 25 bp, SARS Virus
catccgttaggattctaaaaacttc

SEQ ID NO: 166905 - DNA, 25 bp, SARS Virus
atccgttaggattctaaaaacttcg

SEQ ID NO: 166906 - DNA, 25 bp, SARS Virus
tccgttaggattttaaaaacttcga

SEQ ID NO: 166907 - DNA, 25 bp, SARS Virus
ccgttaggattctaaaaacttcgat

SEQ ID NO: 166908 - DNA, 25 bp, SARS Virus
cgttaggattcttaaaacttcgatg

SEQ ID NO: 166909 - DNA, 25 bp, SARS Virus
gttaggattctataaacttcgatgt

SEQ ID NO: 166910 - DNA, 25 bp, SARS Virus
ttaggattctaataacttcgatgtc

SEQ ID NO: 166911 - DNA, 25 bp, SARS Virus
taggattctaaatacttcgatgtcg

SEQ ID NO: 166912 - DNA, 25 bp, SARS Virus
aggattctaaaatcttcgatgtcgc

SEQ ID NO: 166913 - DNA, 25 bp, SARS Virus
ggattctaaaaatttcgatgtcgca

SEQ ID NO: 166914 - DNA, 25 bp, SARS Virus
gattctaaaaacttcgatgtcgcaa

SEQ ID NO: 166915 - DNA, 25 bp, SARS Virus
attctaaaaacttcgatgtcgcaag

SEQ ID NO: 166916 - DNA, 25 bp, SARS Virus
ttctaaaaactttgatgtcgcaaga

SEQ ID NO: 166917 - DNA, 25 bp, SARS Virus
tctaaaaacttctatgtcgcaagac

SEQ ID NO: 166918 - DNA, 25 bp, SARS Virus
ctaaaaacttcgttgtcgcaagaca

SEQ ID NO: 166919 - DNA, 25 bp, SARS Virus
taaaaacttcgatgtcgcaagacac

SEQ ID NO: 166920 - DNA, 25 bp, SARS Virus
aaaaacttcgatttcgcaagacact

SEQ ID NO: 166921 - DNA, 25 bp, SARS Virus
aaaacttcgatgtcgcaagacactt

SEQ ID NO: 166922 - DNA, 25 bp, SARS Virus
aaacttcgatgttgcaagacactta

SEQ ID NO: 166923 - DNA, 25 bp, SARS Virus
aacttcgatgtctcaagacacttaa

SEQ ID NO: 166924 - DNA, 25 bp, SARS Virus
acttcgatgtcgtaagacacttaat

SEQ ID NO: 166925 - DNA, 25 bp, SARS Virus
cttcgatgtcgctagacacttaata

SEQ ID NO: 166926 - DNA, 25 bp, SARS Virus
ttcgatgtcgcatgacacttaatat

SEQ ID NO: 166927 - DNA, 25 bp, SARS Virus
tcgatgtcgcaatacacttaatatt

SEQ ID NO: 166928 - DNA, 25 bp, SARS Virus
cgatgtcgcaagtcacttaatattc

SEQ ID NO: 166929 - DNA, 25 bp, SARS Virus
gatgtcgcaagaaacttaatattcc

SEQ ID NO: 166930 - DNA, 25 bp, SARS Virus
atgtcgcaagacacttaatattcca

SEQ ID NO: 166931 - DNA, 25 bp, SARS Virus
tgtcgcaagacaattaatattccac

SEQ ID NO: 166932 - DNA, 25 bp, SARS Virus
gtcgcaagacacataatattccact

SEQ ID NO: 166933 - DNA, 25 bp, SARS Virus
tcgcaagacactaaatattccactc

SEQ ID NO: 166934 - DNA, 25 bp, SARS Virus
cgcaagacacttaatattccactct

SEQ ID NO: 166935 - DNA, 25 bp, SARS Virus
gcaagacacttaatattccactcta

SEQ ID NO: 166936 - DNA, 25 bp, SARS Virus
caagacacttaaaattccactctat

SEQ ID NO: 166937 - DNA, 25 bp, SARS Virus
aagacacttaatattccactctatt

SEQ ID NO: 166938 - DNA, 25 bp, SARS Virus
agacacttaataatccactctattt

SEQ ID NO: 166939 - DNA, 25 bp, SARS Virus
gacacttaatataccactctatttt

SEQ ID NO: 166940 - DNA, 25 bp, SARS Virus
acacttaatattacactctattttt

SEQ ID NO: 166941 - DNA, 25 bp, SARS Virus
cacttaatattcaactctatttttg

SEQ ID NO: 166942 - DNA, 25 bp, SARS Virus
acttaatattccactctatttttgt

SEQ ID NO: 166943 - DNA, 25 bp, SARS Virus
cttaatattccaatctatttttgtc

SEQ ID NO: 166944 - DNA, 25 bp, SARS Virus
ttaatattccacactatttttgtcg

SEQ ID NO: 166945 - DNA, 25 bp, SARS Virus
taatattccactatatttttgtcga

SEQ ID NO: 166946 - DNA, 25 bp, SARS Virus
aatattccactcaatttttgtcgaa

SEQ ID NO: 166947 - DNA, 25 bp, SARS Virus
atattccactctatttttgtcgaaa

SEQ ID NO: 166948 - DNA, 25 bp, SARS Virus
tattccactctaattttgtcgaaaa

SEQ ID NO: 166949 - DNA, 25 bp, SARS Virus
attccactctatatttgtcgaaaag

SEQ ID NO: 166950 - DNA, 25 bp, SARS Virus
ttccactctattattgtcgaaaaga

SEQ ID NO: 166951 - DNA, 25 bp, SARS Virus
tccactctatttatgtcgaaaagag

SEQ ID NO: 166952 - DNA, 25 bp, SARS Virus
ccactctattttagtcgaaaagagg

SEQ ID NO: 166953 - DNA, 25 bp, SARS Virus
cactctatttttatcgaaaagaggt

SEQ ID NO: 166954 - DNA, 25 bp, SARS Virus
actctatttttgacgaaaagaggtt

SEQ ID NO: 166955 - DNA, 25 bp, SARS Virus
ctctatttttgtagaaaagaggttc

SEQ ID NO: 166956 - DNA, 25 bp, SARS Virus
tctatttttgtcaaaaagaggttcg

SEQ ID NO: 166957 - DNA, 25 bp, SARS Virus
ctatttttgtcgaaaagaggttcgt

SEQ ID NO: 166958 - DNA, 25 bp, SARS Virus
tatttttgtcgaaaagaggttcgtc

SEQ ID NO: 166959 - DNA, 25 bp, SARS Virus
atttttgtcgaaaagaggttcgtcc

SEQ ID NO: 166960 - DNA, 25 bp, SARS Virus
tttttgtcgaaaagaggttcgtcct

SEQ ID NO: 166961 - DNA, 25 bp, SARS Virus
ttttgtcgaaaaaaggttcgtccta

SEQ ID NO: 166962 - DNA, 25 bp, SARS Virus
tttgtcgaaaagaggttcgtcctaa

SEQ ID NO: 166963 - DNA, 25 bp, SARS Virus
ttgtcgaaaagaagttcgtcctaac

SEQ ID NO: 166964 - DNA, 25 bp, SARS Virus
tgtcgaaaagagattcgtcctaacg

SEQ ID NO: 166965 - DNA, 25 bp, SARS Virus
gtcgaaaagaggatcgtcctaacgc

SEQ ID NO: 166966 - DNA, 25 bp, SARS Virus
tcgaaaagaggtacgtcctaacgca

SEQ ID NO: 166967 - DNA, 25 bp, SARS Virus
cgaaaagaggttagtcctaacgcac

SEQ ID NO: 166968 - DNA, 25 bp, SARS Virus
gaaaagaggttcatcctaacgcaca

SEQ ID NO: 166969 - DNA, 25 bp, SARS Virus
aaaagaggttcgacctaacgcacat

SEQ ID NO: 166970 - DNA, 25 bp, SARS Virus
aaagaggttcgtactaacgcacatt

SEQ ID NO: 166971 - DNA, 25 bp, SARS Virus
aagaggttcgtcataacgcacattc

SEQ ID NO: 166972 - DNA, 25 bp, SARS Virus
agaggttcgtccaaacgcacattct

SEQ ID NO: 166973 - DNA, 25 bp, SARS Virus
gaggttcgtcctaacgcacattctt

SEQ ID NO: 166974 - DNA, 25 bp, SARS Virus
aggttcgtcctaacgcacattcttt

SEQ ID NO: 166975 - DNA, 25 bp, SARS Virus
ggttcgtcctaaagcacattcttta

SEQ ID NO: 166976 - DNA, 25 bp, SARS Virus
gttcgtcctaacacacattctttaa

SEQ ID NO: 166977 - DNA, 25 bp, SARS Virus
ttcgtcctaacgaacattctttaag

SEQ ID NO: 166978 - DNA, 25 bp, SARS Virus
tcgtcctaacgcacattctttaaga

SEQ ID NO: 166979 - DNA, 25 bp, SARS Virus
cgtcctaacgcaaattctttaagag

SEQ ID NO: 166980 - DNA, 25 bp, SARS Virus
gtcctaacgcacattctttaagaga

SEQ ID NO: 166981 - DNA, 25 bp, SARS Virus
tcctaacgcacaatctttaagagaa

SEQ ID NO: 166982 - DNA, 25 bp, SARS Virus
cctaacgcacatactttaagagaat

SEQ ID NO: 166983 - DNA, 25 bp, SARS Virus
ctaacgcacattatttaagagaatg

SEQ ID NO: 166984 - DNA, 25 bp, SARS Virus
taacgcacattcattaagagaatgt

SEQ ID NO: 166985 - DNA, 25 bp, SARS Virus
aacgcacattctataagagaatgtt

SEQ ID NO: 166986 - DNA, 25 bp, SARS Virus
acgcacattcttaaagagaatgttg

SEQ ID NO: 166987 - DNA, 25 bp, SARS Virus
cgcacattctttaagagaatgttgc

SEQ ID NO: 166988 - DNA, 25 bp, SARS Virus
gcacattctttaagagaatgttgcg

SEQ ID NO: 166989 - DNA, 25 bp, SARS Virus
cacattctttaaaagaatgttgcgg

SEQ ID NO: 166990 - DNA, 25 bp, SARS Virus
acattctttaagagaatgttgcgga

SEQ ID NO: 166991 - DNA, 25 bp, SARS Virus
cattctttaagaaaatgttgcggat

SEQ ID NO: 166992 - DNA, 25 bp, SARS Virus
attctttaagagaatgttgcggata

SEQ ID NO: 166993 - DNA, 25 bp, SARS Virus
ttctttaagagaatgttgcggataa

SEQ ID NO: 166994 - DNA, 25 bp, SARS Virus
tctttaagagaaagttgcggataaa

SEQ ID NO: 166995 - DNA, 25 bp, SARS Virus
ctttaagagaatattgcggataaac

SEQ ID NO: 166996 - DNA, 25 bp, SARS Virus
tttaagagaatgatgcggataaact

SEQ ID NO: 166997 - DNA, 25 bp, SARS Virus
ttaagagaatgtagcggataaactc

SEQ ID NO: 166998 - DNA, 25 bp, SARS Virus
taagagaatgttacggataaactcc

SEQ ID NO: 166999 - DNA, 25 bp, SARS Virus
aagagaatgttgaggataaactcca

SEQ ID NO: 167000 - DNA, 25 bp, SARS Virus
agagaatgttgcagataaactccag

SEQ ID NO: 167001 - DNA, 25 bp, SARS Virus
gagaatgttgcgaataaactccaga

SEQ ID NO: 167002 - DNA, 25 bp, SARS Virus
agaatgttgcggataaactccagac

SEQ ID NO: 167003 - DNA, 25 bp, SARS Virus
gaatgttgcggaaaaactccagaca

SEQ ID NO: 167004 - DNA, 25 bp, SARS Virus
aatgttgcggataaactccagacaa

SEQ ID NO: 167005 - DNA, 25 bp, SARS Virus
atgttgcggataaactccagacaac

SEQ ID NO: 167006 - DNA, 25 bp, SARS Virus
tgttgcggataaactccagacaact

SEQ ID NO: 167007 - DNA, 25 bp, SARS Virus
gttgcggataaaatccagacaacta

SEQ ID NO: 167008 - DNA, 25 bp, SARS Virus
ttgcggataaacaccagacaactaa

SEQ ID NO: 167009 - DNA, 25 bp, SARS Virus
tgcggataaactacagacaactaac

SEQ ID NO: 167010 - DNA, 25 bp, SARS Virus
gcggataaactcaagacaactaacg

SEQ ID NO: 167011 - DNA, 25 bp, SARS Virus
cggataaactccagacaactaacgt

SEQ ID NO: 167012 - DNA, 25 bp, SARS Virus
ggataaactccaaacaactaacgtc

SEQ ID NO: 167013 - DNA, 25 bp, SARS Virus
gataaactccagacaactaacgtct

SEQ ID NO: 167014 - DNA, 25 bp, SARS Virus
ataaactccagaaaactaacgtcta

SEQ ID NO: 167015 - DNA, 25 bp, SARS Virus
taaactccagacaactaacgtctac

SEQ ID NO: 167016 - DNA, 25 bp, SARS Virus
aaactccagacaactaacgtctact

SEQ ID NO: 167017 - DNA, 25 bp, SARS Virus
aactccagacaaataacgtctactt

SEQ ID NO: 167018 - DNA, 25 bp, SARS Virus
actccagacaacaaacgtctacttt

SEQ ID NO: 167019 - DNA, 25 bp, SARS Virus
ctccagacaactaacgtctactttg

SEQ ID NO: 167020 - DNA, 25 bp, SARS Virus
tccagacaactaacgtctactttgt

SEQ ID NO: 167021 - DNA, 25 bp, SARS Virus
ccagacaactaaagtctactttgta

SEQ ID NO: 167022 - DNA, 25 bp, SARS Virus
cagacaactaacatctactttgtag

SEQ ID NO: 167023 - DNA, 25 bp, SARS Virus
agacaactaacgactactttgtagt

SEQ ID NO: 167024 - DNA, 25 bp, SARS Virus
gacaactaacgtatactttgtagta

SEQ ID NO: 167025 - DNA, 25 bp, SARS Virus
acaactaacgtcaactttgtagtac

SEQ ID NO: 167026 - DNA, 25 bp, SARS Virus
caactaacgtctactttgtagtaca

SEQ ID NO: 167027 - DNA, 25 bp, SARS Virus
aactaacgtctaatttgtagtacac

SEQ ID NO: 167028 - DNA, 25 bp, SARS Virus
actaacgtctacattgtagtacaca

SEQ ID NO: 167029 - DNA, 25 bp, SARS Virus
ctaacgtctactatgtagtacacat

SEQ ID NO: 167030 - DNA, 25 bp, SARS Virus
taacgtctacttagtagtacacatt

SEQ ID NO: 167031 - DNA, 25 bp, SARS Virus
aacgtctactttatagtacacatta

SEQ ID NO: 167032 - DNA, 25 bp, SARS Virus
acgtctactttgaagtacacattat

SEQ ID NO: 167033 - DNA, 25 bp, SARS Virus
cgtctactttgtagtacacattatt

SEQ ID NO: 167034 - DNA, 25 bp, SARS Virus
gtctactttgtaatacacattattg

SEQ ID NO: 167035 - DNA, 25 bp, SARS Virus
tctactttgtagaacacattattgt

SEQ ID NO: 167036 - DNA, 25 bp, SARS Virus
ctactttgtagtacacattattgtg

SEQ ID NO: 167037 - DNA, 25 bp, SARS Virus
tactttgtagtaaacattattgtgg

SEQ ID NO: 167038 - DNA, 25 bp, SARS Virus
actttgtagtacacattattgtgga

SEQ ID NO: 167039 - DNA, 25 bp, SARS Virus
ctttgtagtacaaattattgtggaa

SEQ ID NO: 167040 - DNA, 25 bp, SARS Virus
tttgtagtacacattattgtggaaa

SEQ ID NO: 167041 - DNA, 25 bp, SARS Virus
ttgtagtacacaatattgtggaaac

SEQ ID NO: 167042 - DNA, 25 bp, SARS Virus
tgtagtacacataattgtggaaaca

SEQ ID NO: 167043 - DNA, 25 bp, SARS Virus
gtagtacacattattgtggaaacat

SEQ ID NO: 167044 - DNA, 25 bp, SARS Virus
tagtacacattaatgtggaaacatc

SEQ ID NO: 167045 - DNA, 25 bp, SARS Virus
agtacacattatagtggaaacatct

SEQ ID NO: 167046 - DNA, 25 bp, SARS Virus
gtacacattattatggaaacatctt

SEQ ID NO: 167047 - DNA, 25 bp, SARS Virus
tacacattattgaggaaacatcttg

SEQ ID NO: 167048 - DNA, 25 bp, SARS Virus
acacattattgtagaaacatcttgt

SEQ ID NO: 167049 - DNA, 25 bp, SARS Virus
cacattattgtgaaaacatcttgta

SEQ ID NO: 167050 - DNA, 25 bp, SARS Virus
acattattgtggaaacatcttgtaa

SEQ ID NO: 167051 - DNA, 25 bp, SARS Virus
cattattgtggaaacatcttgtaaa

SEQ ID NO: 167052 - DNA, 25 bp, SARS Virus
attattgtggaaacatcttgtaaaa

SEQ ID NO: 167053 - DNA, 25 bp, SARS Virus
ttattgtggaaaaatcttgtaaaac

SEQ ID NO: 167054 - DNA, 25 bp, SARS Virus
tattgtggaaacatcttgtaaaact

SEQ ID NO: 167055 - DNA, 25 bp, SARS Virus
attgtggaaacaacttgtaaaactt

SEQ ID NO: 167056 - DNA, 25 bp, SARS Virus
ttgtggaaacatattgtaaaacttc

SEQ ID NO: 167057 - DNA, 25 bp, SARS Virus
tgtggaaacatcatgtaaaacttcg

SEQ ID NO: 167058 - DNA, 25 bp, SARS Virus
gtggaaacatctagtaaaacttcgt

SEQ ID NO: 167059 - DNA, 25 bp, SARS Virus
tggaaacatcttataaaacttcgta

SEQ ID NO: 167060 - DNA, 25 bp, SARS Virus
ggaaacatcttgaaaaacttcgtaa

SEQ ID NO: 167061 - DNA, 25 bp, SARS Virus
gaaacatcttgtaaaacttcgtaac

SEQ ID NO: 167062 - DNA, 25 bp, SARS Virus
aaacatcttgtaaaacttcgtaact

SEQ ID NO: 167063 - DNA, 25 bp, SARS Virus
aacatcttgtaaaacttcgtaactc

SEQ ID NO: 167064 - DNA, 25 bp, SARS Virus
acatcttgtaaaacttcgtaactcg

SEQ ID NO: 167065 - DNA, 25 bp, SARS Virus
catcttgtaaaaattcgtaactcga

SEQ ID NO: 167066 - DNA, 25 bp, SARS Virus
atcttgtaaaacatcgtaactcgac

SEQ ID NO: 167067 - DNA, 25 bp, SARS Virus
tcttgtaaaactacgtaactcgact

SEQ ID NO: 167068 - DNA, 25 bp, SARS Virus
cttgtaaaacttagtaactcgactg

SEQ ID NO: 167069 - DNA, 25 bp, SARS Virus
ttgtaaaacttcataactcgactga

SEQ ID NO: 167070 - DNA, 25 bp, SARS Virus
tgtaaaacttcgaaactcgactgaa

SEQ ID NO: 167071 - DNA, 25 bp, SARS Virus
gtaaaacttcgtaactcgactgaat

SEQ ID NO: 167072 - DNA, 25 bp, SARS Virus
taaaacttcgtaactcgactgaata

SEQ ID NO: 167073 - DNA, 25 bp, SARS Virus
aaaacttcgtaaatcgactgaatag

SEQ ID NO: 167074 - DNA, 25 bp, SARS Virus
aaacttcgtaacacgactgaatagg

SEQ ID NO: 167075 - DNA, 25 bp, SARS Virus
aacttcgtaactagactgaatagga

SEQ ID NO: 167076 - DNA, 25 bp, SARS Virus
acttcgtaactcaactgaataggaa

SEQ ID NO: 167077 - DNA, 25 bp, SARS Virus
cttcgtaactcgactgaataggaac

SEQ ID NO: 167078 - DNA, 25 bp, SARS Virus
ttcgtaactcgaatgaataggaaca

SEQ ID NO: 167079 - DNA, 25 bp, SARS Virus
tcgtaactcgacagaataggaacac

SEQ ID NO: 167080 - DNA, 25 bp, SARS Virus
cgtaactcgactaaataggaacaca

SEQ ID NO: 167081 - DNA, 25 bp, SARS Virus
gtaactcgactgaataggaacacac

SEQ ID NO: 167082 - DNA, 25 bp, SARS Virus
taactcgactgaataggaacacacg

SEQ ID NO: 167083 - DNA, 25 bp, SARS Virus
aactcgactgaaaaggaacacacga

SEQ ID NO: 167084 - DNA, 25 bp, SARS Virus
actcgactgaataggaacacacgaa

SEQ ID NO: 167085 - DNA, 25 bp, SARS Virus
ctcgactgaataagaacacacgaaa

SEQ ID NO: 167086 - DNA, 25 bp, SARS Virus
tcgactgaatagaaacacacgaaaa

SEQ ID NO: 167087 - DNA, 25 bp, SARS Virus
cgactgaataggaacacacgaaaat

SEQ ID NO: 167088 - DNA, 25 bp, SARS Virus
gactgaataggaacacacgaaaatc

SEQ ID NO: 167089 - DNA, 25 bp, SARS Virus
actgaataggaaaacacgaaaatcg

SEQ ID NO: 167090 - DNA, 25 bp, SARS Virus
ctgaataggaacacacgaaaatcga

SEQ ID NO: 167091 - DNA, 25 bp, SARS Virus
tgaataggaacaaacgaaaatcgaa

SEQ ID NO: 167092 - DNA, 25 bp, SARS Virus
gaataggaacacacgaaaatcgaat

SEQ ID NO: 167093 - DNA, 25 bp, SARS Virus
aataggaacacaagaaaatcgaata

SEQ ID NO: 167094 - DNA, 25 bp, SARS Virus
ataggaacacacaaaaatcgaataa

SEQ ID NO: 167095 - DNA, 25 bp, SARS Virus
taggaacacacgaaaatcgaataac

SEQ ID NO: 167096 - DNA, 25 bp, SARS Virus
aggaacacacgaaaatcgaataaca

SEQ ID NO: 167097 - DNA, 25 bp, SARS Virus
ggaacacacgaaaatcgaataacag

SEQ ID NO: 167098 - DNA, 25 bp, SARS Virus
gaacacacgaaaatcgaataacagt

SEQ ID NO: 167099 - DNA, 25 bp, SARS Virus
aacacacgaaaaacgaataacagta

SEQ ID NO: 167100 - DNA, 25 bp, SARS Virus
acacacgaaaatagaataacagtat

SEQ ID NO: 167101 - DNA, 25 bp, SARS Virus
cacacgaaaatcaaataacagtatt

SEQ ID NO: 167102 - DNA, 25 bp, SARS Virus
acacgaaaatcgaataacagtattt

SEQ ID NO: 167103 - DNA, 25 bp, SARS Virus
cacgaaaatcgaataacagtatttg

SEQ ID NO: 167104 - DNA, 25 bp, SARS Virus
acgaaaatcgaaaaacagtatttga

SEQ ID NO: 167105 - DNA, 25 bp, SARS Virus
cgaaaatcgaataacagtatttgat

SEQ ID NO: 167106 - DNA, 25 bp, SARS Virus
gaaaatcgaataacagtatttgatt

SEQ ID NO: 167107 - DNA, 25 bp, SARS Virus
aaaatcgaataaaagtatttgattt

SEQ ID NO: 167108 - DNA, 25 bp, SARS Virus
aaatcgaataacagtatttgatttc

SEQ ID NO: 167109 - DNA, 25 bp, SARS Virus
aatcgaataacaatatttgatttcg

SEQ ID NO: 167110 - DNA, 25 bp, SARS Virus
atcgaataacagaatttgatttcgt

SEQ ID NO: 167111 - DNA, 25 bp, SARS Virus
tcgaataacagtatttgatttcgtg

SEQ ID NO: 167112 - DNA, 25 bp, SARS Virus
cgaataacagtaattgatttcgtga

SEQ ID NO: 167113 - DNA, 25 bp, SARS Virus
gaataacagtatatgatttcgtgag

SEQ ID NO: 167114 - DNA, 25 bp, SARS Virus
aataacagtattagatttcgtgagt

SEQ ID NO: 167115 - DNA, 25 bp, SARS Virus
ataacagtatttaatttcgtgagtg

SEQ ID NO: 167116 - DNA, 25 bp, SARS Virus
taacagtatttgatttcgtgagtgt

SEQ ID NO: 167117 - DNA, 25 bp, SARS Virus
aacagtatttgaattcgtgagtgtc

SEQ ID NO: 167118 - DNA, 25 bp, SARS Virus
acagtatttgatatcgtgagtgtca

SEQ ID NO: 167119 - DNA, 25 bp, SARS Virus
cagtatttgattacgtgagtgtcac

SEQ ID NO: 167120 - DNA, 25 bp, SARS Virus
agtatttgatttagtgagtgtcaca

SEQ ID NO: 167121 - DNA, 25 bp, SARS Virus
gtatttgatttcatgagtgtcacag

SEQ ID NO: 167122 - DNA, 25 bp, SARS Virus
tatttgatttcgagagtgtcacagt

SEQ ID NO: 167123 - DNA, 25 bp, SARS Virus
atttgatttcgtaagtgtcacagtt

SEQ ID NO: 167124 - DNA, 25 bp, SARS Virus
tttgatttcgtgagtgtcacagttg

SEQ ID NO: 167125 - DNA, 25 bp, SARS Virus
ttgatttcgtgaatgtcacagttgt

SEQ ID NO: 167126 - DNA, 25 bp, SARS Virus
tgatttcgtgagagtcacagttgtt

SEQ ID NO: 167127 - DNA, 25 bp, SARS Virus
gatttcgtgagtatcacagttgtta

SEQ ID NO: 167128 - DNA, 25 bp, SARS Virus
atttcgtgagtgacacagttgttaa

SEQ ID NO: 167129 - DNA, 25 bp, SARS Virus
tttcgtgagtgtaacagttgttaaa

SEQ ID NO: 167130 - DNA, 25 bp, SARS Virus
ttcgtgagtgtcacagttgttaaag

SEQ ID NO: 167131 - DNA, 25 bp, SARS Virus
tcgtgagtgtcaaagttgttaaagt

SEQ ID NO: 167132 - DNA, 25 bp, SARS Virus
cgtgagtgtcacagttgttaaagtc

SEQ ID NO: 167133 - DNA, 25 bp, SARS Virus
gtgagtgtcacaattgttaaagtcg

SEQ ID NO: 167134 - DNA, 25 bp, SARS Virus
tgagtgtcacagatgttaaagtcgt

SEQ ID NO: 167135 - DNA, 25 bp, SARS Virus
gagtgtcacagtagttaaagtcgtc

SEQ ID NO: 167136 - DNA, 25 bp, SARS Virus
agtgtcacagttattaaagtcgtcc

SEQ ID NO: 167137 - DNA, 25 bp, SARS Virus
gtgtcacagttgataaagtcgtcct

SEQ ID NO: 167138 - DNA, 25 bp, SARS Virus
tgtcacagttgtaaaagtcgtcctg

SEQ ID NO: 167139 - DNA, 25 bp, SARS Virus
gtcacagttgttaaagtcgtcctgt

SEQ ID NO: 167140 - DNA, 25 bp, SARS Virus
tcacagttgttaaagtcgtcctgtt

SEQ ID NO: 167141 - DNA, 25 bp, SARS Virus
cacagttgttaaagtcgtcctgttg

SEQ ID NO: 167142 - DNA, 25 bp, SARS Virus
acagttgttaaaatcgtcctgttgc

SEQ ID NO: 167143 - DNA, 25 bp, SARS Virus
cagttgttaaagacgtcctgttgcc

SEQ ID NO: 167144 - DNA, 25 bp, SARS Virus
agttgttaaagtagtcctgttgccg

SEQ ID NO: 167145 - DNA, 25 bp, SARS Virus
gttgttaaagtcatcctgttgccgc

SEQ ID NO: 167146 - DNA, 25 bp, SARS Virus
ttgttaaagtcgacctgttgccgct

SEQ ID NO: 167147 - DNA, 25 bp, SARS Virus
tgttaaagtcgtactgttgccgctg

SEQ ID NO: 167148 - DNA, 25 bp, SARS Virus
gttaaagtcgtcatgttgccgctgt

SEQ ID NO: 167149 - DNA, 25 bp, SARS Virus
ttaaagtcgtccagttgccgctgtt

SEQ ID NO: 167150 - DNA, 25 bp, SARS Virus
taaagtcgtcctattgccgctgttc

SEQ ID NO: 167151 - DNA, 25 bp, SARS Virus
aaagtcgtcctgatgccgctgttca

SEQ ID NO: 167152 - DNA, 25 bp, SARS Virus
aagtcgtcctgtagccgctgttcaa

SEQ ID NO: 167153 - DNA, 25 bp, SARS Virus
agtcgtcctgttaccgctgttcaag

SEQ ID NO: 167154 - DNA, 25 bp, SARS Virus
gtcgtcctgttgacgctgttcaagg

SEQ ID NO: 167155 - DNA, 25 bp, SARS Virus
tcgtcctgttgcagctgttcaaggt

SEQ ID NO: 167156 - DNA, 25 bp, SARS Virus
cgtcctgttgccactgttcaaggtt

SEQ ID NO: 167157 - DNA, 25 bp, SARS Virus
gtcctgttgccgatgttcaaggttc

SEQ ID NO: 167158 - DNA, 25 bp, SARS Virus
tcctgttgccgcagttcaaggttcc

SEQ ID NO: 167159 - DNA, 25 bp, SARS Virus
cctgttgccgctattcaaggttcct

SEQ ID NO: 167160 - DNA, 25 bp, SARS Virus
ctgttgccgctgatcaaggttcctt

SEQ ID NO: 167161 - DNA, 25 bp, SARS Virus
tgttgccgctgtacaaggttccttg

SEQ ID NO: 167162 - DNA, 25 bp, SARS Virus
gttgccgctgttaaaggttccttgt

SEQ ID NO: 167163 - DNA, 25 bp, SARS Virus
ttgccgctgttcaaggttccttgta

SEQ ID NO: 167164 - DNA, 25 bp, SARS Virus
tgccgctgttcaaggttccttgtac

SEQ ID NO: 167165 - DNA, 25 bp, SARS Virus
gccgctgttcaaagttccttgtaca

SEQ ID NO: 167166 - DNA, 25 bp, SARS Virus
ccgctgttcaagattccttgtacag

SEQ ID NO: 167167 - DNA, 25 bp, SARS Virus
cgctgttcaaggatccttgtacaga

SEQ ID NO: 167168 - DNA, 25 bp, SARS Virus
gctgttcaaggtaccttgtacagac

SEQ ID NO: 167169 - DNA, 25 bp, SARS Virus
ctgttcaaggttacttgtacagacc

SEQ ID NO: 167170 - DNA, 25 bp, SARS Virus
tgttcaaggttcattgtacagacct

SEQ ID NO: 167171 - DNA, 25 bp, SARS Virus
gttcaaggttccatgtacagacctg

SEQ ID NO: 167172 - DNA, 25 bp, SARS Virus
ttcaaggttcctagtacagacctgg

SEQ ID NO: 167173 - DNA, 25 bp, SARS Virus
tcaaggttccttatacagacctgga

SEQ ID NO: 167174 - DNA, 25 bp, SARS Virus
caaggttccttgaacagacctggat

SEQ ID NO: 167175 - DNA, 25 bp, SARS Virus
aaggttccttgtacagacctggata

SEQ ID NO: 167176 - DNA, 25 bp, SARS Virus
aggttccttgtaaagacctggataa

SEQ ID NO: 167177 - DNA, 25 bp, SARS Virus
ggttccttgtacagacctggataac

SEQ ID NO: 167178 - DNA, 25 bp, SARS Virus
gttccttgtacaaacctggataaca

SEQ ID NO: 167179 - DNA, 25 bp, SARS Virus
ttccttgtacagacctggataacaa

SEQ ID NO: 167180 - DNA, 25 bp, SARS Virus
tccttgtacagaactggataacaaa

SEQ ID NO: 167181 - DNA, 25 bp, SARS Virus
ccttgtacagacatggataacaaaa

SEQ ID NO: 167182 - DNA, 25 bp, SARS Virus
cttgtacagaccaggataacaaaag

SEQ ID NO: 167183 - DNA, 25 bp, SARS Virus
ttgtacagacctagataacaaaagt

SEQ ID NO: 167184 - DNA, 25 bp, SARS Virus
tgtacagacctgaataacaaaagta

SEQ ID NO: 167185 - DNA, 25 bp, SARS Virus
gtacagacctggataacaaaagtat

SEQ ID NO: 167186 - DNA, 25 bp, SARS Virus
tacagacctggaaaacaaaagtatt

SEQ ID NO: 167187 - DNA, 25 bp, SARS Virus
acagacctggataacaaaagtattc

SEQ ID NO: 167188 - DNA, 25 bp, SARS Virus
cagacctggataacaaaagtattca

SEQ ID NO: 167189 - DNA, 25 bp, SARS Virus
agacctggataaaaaaagtattcag

SEQ ID NO: 167190 - DNA, 25 bp, SARS Virus
gacctggataacaaaagtattcaga

SEQ ID NO: 167191 - DNA, 25 bp, SARS Virus
acctggataacaaaagtattcagac

SEQ ID NO: 167192 - DNA, 25 bp, SARS Virus
cctggataacaaaagtattcagacg

SEQ ID NO: 167193 - DNA, 25 bp, SARS Virus
ctggataacaaaagtattcagacgt

SEQ ID NO: 167194 - DNA, 25 bp, SARS Virus
tggataacaaaaatattcagacgtg

SEQ ID NO: 167195 - DNA, 25 bp, SARS Virus
ggataacaaaagaattcagacgtgt

SEQ ID NO: 167196 - DNA, 25 bp, SARS Virus
gataacaaaagtattcagacgtgtg

SEQ ID NO: 167197 - DNA, 25 bp, SARS Virus
ataacaaaagtaatcagacgtgtga

SEQ ID NO: 167198 - DNA, 25 bp, SARS Virus
taacaaaagtatacagacgtgtgac

SEQ ID NO: 167199 - DNA, 25 bp, SARS Virus
aacaaaagtattaagacgtgtgact

SEQ ID NO: 167200 - DNA, 25 bp, SARS Virus
acaaaagtattcagacgtgtgactt

SEQ ID NO: 167201 - DNA, 25 bp, SARS Virus
caaaagtattcaaacgtgtgactta

SEQ ID NO: 167202 - DNA, 25 bp, SARS Virus
aaaagtattcagacgtgtgacttaa

SEQ ID NO: 167203 - DNA, 25 bp, SARS Virus
aaagtattcagaagtgtgacttaat

SEQ ID NO: 167204 - DNA, 25 bp, SARS Virus
aagtattcagacatgtgacttaatt

SEQ ID NO: 167205 - DNA, 25 bp, SARS Virus
agtattcagacgagtgacttaattt

SEQ ID NO: 167206 - DNA, 25 bp, SARS Virus
gtattcagacgtatgacttaatttt

SEQ ID NO: 167207 - DNA, 25 bp, SARS Virus
tattcagacgtgagacttaatttta

SEQ ID NO: 167208 - DNA, 25 bp, SARS Virus
attcagacgtgtaacttaattttat

SEQ ID NO: 167209 - DNA, 25 bp, SARS Virus
ttcagacgtgtgacttaattttata

SEQ ID NO: 167210 - DNA, 25 bp, SARS Virus
tcagacgtgtgaattaattttataa

SEQ ID NO: 167211 - DNA, 25 bp, SARS Virus
cagacgtgtgacataattttataag

SEQ ID NO: 167212 - DNA, 25 bp, SARS Virus
agacgtgtgactaaattttataaga

SEQ ID NO: 167213 - DNA, 25 bp, SARS Virus
gacgtgtgacttaattttataagac

SEQ ID NO: 167214 - DNA, 25 bp, SARS Virus
acgtgtgacttaattttataagacc

SEQ ID NO: 167215 - DNA, 25 bp, SARS Virus
cgtgtgacttaaatttataagacca

SEQ ID NO: 167216 - DNA, 25 bp, SARS Virus
gtgtgacttaatattataagaccaa

SEQ ID NO: 167217 - DNA, 25 bp, SARS Virus
tgtgacttaattatataagaccaag

SEQ ID NO: 167218 - DNA, 25 bp, SARS Virus
gtgacttaatttaataagaccaaga

SEQ ID NO: 167219 - DNA, 25 bp, SARS Virus
tgacttaattttataagaccaagat

SEQ ID NO: 167220 - DNA, 25 bp, SARS Virus
gacttaattttaaaagaccaagatc

SEQ ID NO: 167221 - DNA, 25 bp, SARS Virus
acttaattttataagaccaagatca

SEQ ID NO: 167222 - DNA, 25 bp, SARS Virus
cttaattttataagaccaagatcac

SEQ ID NO: 167223 - DNA, 25 bp, SARS Virus
ttaattttataaaaccaagatcaca

SEQ ID NO: 167224 - DNA, 25 bp, SARS Virus
taattttataagaccaagatcacac

SEQ ID NO: 167225 - DNA, 25 bp, SARS Virus
aattttataagaacaagatcacacg

SEQ ID NO: 167226 - DNA, 25 bp, SARS Virus
attttataagacaaagatcacacgg

SEQ ID NO: 167227 - DNA, 25 bp, SARS Virus
ttttataagaccaagatcacacgga

SEQ ID NO: 167228 - DNA, 25 bp, SARS Virus
tttataagaccaagatcacacggaa

SEQ ID NO: 167229 - DNA, 25 bp, SARS Virus
ttataagaccaaaatcacacggaaa

SEQ ID NO: 167230 - DNA, 25 bp, SARS Virus
tataagaccaagatcacacggaaat

SEQ ID NO: 167231 - DNA, 25 bp, SARS Virus
ataagaccaagaacacacggaaatc

SEQ ID NO: 167232 - DNA, 25 bp, SARS Virus
taagaccaagataacacggaaatca

SEQ ID NO: 167233 - DNA, 25 bp, SARS Virus
aagaccaagatcacacggaaatcag

SEQ ID NO: 167234 - DNA, 25 bp, SARS Virus
agaccaagatcaaacggaaatcagt

SEQ ID NO: 167235 - DNA, 25 bp, SARS Virus
gaccaagatcacacggaaatcagtc

SEQ ID NO: 167236 - DNA, 25 bp, SARS Virus
accaagatcacaaggaaatcagtcg

SEQ ID NO: 167237 - DNA, 25 bp, SARS Virus
ccaagatcacacagaaatcagtcgt

SEQ ID NO: 167238 - DNA, 25 bp, SARS Virus
caagatcacacgaaaatcagtcgtt

SEQ ID NO: 167239 - DNA, 25 bp, SARS Virus
aagatcacacggaaatcagtcgtta

SEQ ID NO: 167240 - DNA, 25 bp, SARS Virus
agatcacacggaaatcagtcgttac

SEQ ID NO: 167241 - DNA, 25 bp, SARS Virus
gatcacacggaaatcagtcgttaca

SEQ ID NO: 167242 - DNA, 25 bp, SARS Virus
atcacacggaaaacagtcgttacac

SEQ ID NO: 167243 - DNA, 25 bp, SARS Virus
tcacacggaaataagtcgttacacg

SEQ ID NO: 167244 - DNA, 25 bp, SARS Virus
cacacggaaatcagtcgttacacgc

SEQ ID NO: 167245 - DNA, 25 bp, SARS Virus
acacggaaatcaatcgttacacgcc

SEQ ID NO: 167246 - DNA, 25 bp, SARS Virus
cacggaaatcagacgttacacgccc

SEQ ID NO: 167247 - DNA, 25 bp, SARS Virus
acggaaatcagtagttacacgcccc

SEQ ID NO: 167248 - DNA, 25 bp, SARS Virus
cggaaatcagtcattacacgccccc

SEQ ID NO: 167249 - DNA, 25 bp, SARS Virus
ggaaatcagtcgatacacgcccccc

SEQ ID NO: 167250 - DNA, 25 bp, SARS Virus
gaaatcagtcgtaacacgccccccg

SEQ ID NO: 167251 - DNA, 25 bp, SARS Virus
aaatcagtcgttacacgccccccga

SEQ ID NO: 167252 - DNA, 25 bp, SARS Virus
aatcagtcgttaaacgccccccgac

SEQ ID NO: 167253 - DNA, 25 bp, SARS Virus
atcagtcgttacacgccccccgacc

SEQ ID NO: 167254 - DNA, 25 bp, SARS Virus
tcagtcgttacaagccccccgacca

SEQ ID NO: 167255 - DNA, 25 bp, SARS Virus
cagtcgttacacaccccccgaccat

SEQ ID NO: 167256 - DNA, 25 bp, SARS Virus
agtcgttacacgacccccgaccatt

SEQ ID NO: 167257 - DNA, 25 bp, SARS Virus
gtcgttacacgcaccccgaccatta

SEQ ID NO: 167258 - DNA, 25 bp, SARS Virus
tcgttacacgccacccgaccattaa

SEQ ID NO: 167259 - DNA, 25 bp, SARS Virus
cgttacacgcccaccgaccattaac

SEQ ID NO: 167260 - DNA, 25 bp, SARS Virus
gttacacgccccacgaccattaact

SEQ ID NO: 167261 - DNA, 25 bp, SARS Virus
ttacacgcccccagaccattaactc

SEQ ID NO: 167262 - DNA, 25 bp, SARS Virus
tacacgccccccaaccattaactcg

SEQ ID NO: 167263 - DNA, 25 bp, SARS Virus
acacgccccccgaccattaactcgt

SEQ ID NO: 167264 - DNA, 25 bp, SARS Virus
cacgccccccgaacattaactcgtc

SEQ ID NO: 167265 - DNA, 25 bp, SARS Virus
acgccccccgacaattaactcgtcc

SEQ ID NO: 167266 - DNA, 25 bp, SARS Virus
cgccccccgaccattaactcgtcct

SEQ ID NO: 167267 - DNA, 25 bp, SARS Virus
gccccccgaccaataactcgtccta

SEQ ID NO: 167268 - DNA, 25 bp, SARS Virus
ccccccgaccataaactcgtcctag

SEQ ID NO: 167269 - DNA, 25 bp, SARS Virus
cccccgaccattaactcgtcctagc

SEQ ID NO: 167270 - DNA, 25 bp, SARS Virus
ccccgaccattaactcgtcctagcg

SEQ ID NO: 167271 - DNA, 25 bp, SARS Virus
cccgaccattaaatcgtcctagcgg

SEQ ID NO: 167272 - DNA, 25 bp, SARS Virus
ccgaccattaacacgtcctagcggt

SEQ ID NO: 167273 - DNA, 25 bp, SARS Virus
cgaccattaactagtcctagcggtt

SEQ ID NO: 167274 - DNA, 25 bp, SARS Virus
gaccattaactcatcctagcggtta

SEQ ID NO: 167275 - DNA, 25 bp, SARS Virus
accattaactcgacctagcggttat

SEQ ID NO: 167276 - DNA, 25 bp, SARS Virus
ccattaactcgtactagcggttata

SEQ ID NO: 167277 - DNA, 25 bp, SARS Virus
cattaactcgtcatagcggttatat

SEQ ID NO: 167278 - DNA, 25 bp, SARS Virus
attaactcgtccaagcggttatatc

SEQ ID NO: 167279 - DNA, 25 bp, SARS Virus
ttaactcgtcctagcggttatatct

SEQ ID NO: 167280 - DNA, 25 bp, SARS Virus
taactcgtcctaacggttatatctg

SEQ ID NO: 167281 - DNA, 25 bp, SARS Virus
aactcgtcctagaggttatatctgc

SEQ ID NO: 167282 - DNA, 25 bp, SARS Virus
actcgtcctagcagttatatctgca

SEQ ID NO: 167283 - DNA, 25 bp, SARS Virus
ctcgtcctagcgattatatctgcat

SEQ ID NO: 167284 - DNA, 25 bp, SARS Virus
tcgtcctagcggatatatctgcatc

SEQ ID NO: 167285 - DNA, 25 bp, SARS Virus
cgtcctagcggtaatatctgcatca

SEQ ID NO: 167286 - DNA, 25 bp, SARS Virus
gtcctagcggttatatctgcatcac

SEQ ID NO: 167287 - DNA, 25 bp, SARS Virus
tcctagcggttaaatctgcatcaca

SEQ ID NO: 167288 - DNA, 25 bp, SARS Virus
cctagcggttatatctgcatcacaa

SEQ ID NO: 167289 - DNA, 25 bp, SARS Virus
ctagcggttataactgcatcacaaa

SEQ ID NO: 167290 - DNA, 25 bp, SARS Virus
tagcggttatatatgcatcacaaaa

SEQ ID NO: 167291 - DNA, 25 bp, SARS Virus
agcggttatatcagcatcacaaaac

SEQ ID NO: 167292 - DNA, 25 bp, SARS Virus
gcggttatatctacatcacaaaacg

SEQ ID NO: 167293 - DNA, 25 bp, SARS Virus
cggttatatctgaatcacaaaacgt

SEQ ID NO: 167294 - DNA, 25 bp, SARS Virus
ggttatatctgcatcacaaaacgtg

SEQ ID NO: 167295 - DNA, 25 bp, SARS Virus
gttatatctgcaacacaaaacgtgc

SEQ ID NO: 167296 - DNA, 25 bp, SARS Virus
ttatatctgcataacaaaacgtgct

SEQ ID NO: 167297 - DNA, 25 bp, SARS Virus
tatatctgcatcacaaaacgtgctt

SEQ ID NO: 167298 - DNA, 25 bp, SARS Virus
atatctgcatcaaaaaacgtgcttc

SEQ ID NO: 167299 - DNA, 25 bp, SARS Virus
tatctgcatcacaaaacgtgcttca

SEQ ID NO: 167300 - DNA, 25 bp, SARS Virus
atctgcatcacaaaacgtgcttcag

SEQ ID NO: 167301 - DNA, 25 bp, SARS Virus
tctgcatcacaaaacgtgcttcaga

SEQ ID NO: 167302 - DNA, 25 bp, SARS Virus
ctgcatcacaaaacgtgcttcagat

SEQ ID NO: 167303 - DNA, 25 bp, SARS Virus
tgcatcacaaaaagtgcttcagatc

SEQ ID NO: 167304 - DNA, 25 bp, SARS Virus
gcatcacaaaacatgcttcagatcg

SEQ ID NO: 167305 - DNA, 25 bp, SARS Virus
catcacaaaacgagcttcagatcgt

SEQ ID NO: 167306 - DNA, 25 bp, SARS Virus
atcacaaaacgtacttcagatcgta

SEQ ID NO: 167307 - DNA, 25 bp, SARS Virus
tcacaaaacgtgattcagatcgtaa

SEQ ID NO: 167308 - DNA, 25 bp, SARS Virus
cacaaaacgtgcatcagatcgtaac

SEQ ID NO: 167309 - DNA, 25 bp, SARS Virus
acaaaacgtgctacagatcgtaact

SEQ ID NO: 167310 - DNA, 25 bp, SARS Virus
caaaacgtgcttaagatcgtaactg

SEQ ID NO: 167311 - DNA, 25 bp, SARS Virus
aaaacgtgcttcagatcgtaactgt

SEQ ID NO: 167312 - DNA, 25 bp, SARS Virus
aaacgtgcttcaaatcgtaactgtt

SEQ ID NO: 167313 - DNA, 25 bp, SARS Virus
aacgtgcttcagatcgtaactgttg

SEQ ID NO: 167314 - DNA, 25 bp, SARS Virus
acgtgcttcagaacgtaactgttgt

SEQ ID NO: 167315 - DNA, 25 bp, SARS Virus
cgtgcttcagatagtaactgttgtg

SEQ ID NO: 167316 - DNA, 25 bp, SARS Virus
gtgcttcagatcataactgttgtga

SEQ ID NO: 167317 - DNA, 25 bp, SARS Virus
tgcttcagatcgaaactgttgtgag

SEQ ID NO: 167318 - DNA, 25 bp, SARS Virus
gcttcagatcgtaactgttgtgagt

SEQ ID NO: 167319 - DNA, 25 bp, SARS Virus
cttcagatcgtaactgttgtgagtt

SEQ ID NO: 167320 - DNA, 25 bp, SARS Virus
ttcagatcgtaaatgttgtgagttc

SEQ ID NO: 167321 - DNA, 25 bp, SARS Virus
tcagatcgtaacagttgtgagttca

SEQ ID NO: 167322 - DNA, 25 bp, SARS Virus
cagatcgtaactattgtgagttcag

SEQ ID NO: 167323 - DNA, 25 bp, SARS Virus
agatcgtaactgatgtgagttcagt

SEQ ID NO: 167324 - DNA, 25 bp, SARS Virus
gatcgtaactgtagtgagttcagta

SEQ ID NO: 167325 - DNA, 25 bp, SARS Virus
atcgtaactgttatgagttcagtat

SEQ ID NO: 167326 - DNA, 25 bp, SARS Virus
tcgtaactgttgagagttcagtatt

SEQ ID NO: 167327 - DNA, 25 bp, SARS Virus
cgtaactgttgtaagttcagtatta

SEQ ID NO: 167328 - DNA, 25 bp, SARS Virus
gtaactgttgtgagttcagtattaa

SEQ ID NO: 167329 - DNA, 25 bp, SARS Virus
taactgttgtgaattcagtattaat

SEQ ID NO: 167330 - DNA, 25 bp, SARS Virus
aactgttgtgagatcagtattaatc

SEQ ID NO: 167331 - DNA, 25 bp, SARS Virus
actgttgtgagtacagtattaatca

SEQ ID NO: 167332 - DNA, 25 bp, SARS Virus
ctgttgtgagttaagtattaatcat

SEQ ID NO: 167333 - DNA, 25 bp, SARS Virus
tgttgtgagttcagtattaatcatc

SEQ ID NO: 167334 - DNA, 25 bp, SARS Virus
gttgtgagttcaatattaatcatcg

SEQ ID NO: 167335 - DNA, 25 bp, SARS Virus
ttgtgagttcagaattaatcatcgg

SEQ ID NO: 167336 - DNA, 25 bp, SARS Virus
tgtgagttcagtattaatcatcggt

SEQ ID NO: 167337 - DNA, 25 bp, SARS Virus
gtgagttcagtaataatcatcggta

SEQ ID NO: 167338 - DNA, 25 bp, SARS Virus
tgagttcagtataaatcatcggtat

SEQ ID NO: 167339 - DNA, 25 bp, SARS Virus
gagttcagtattaatcatcggtatc

SEQ ID NO: 167340 - DNA, 25 bp, SARS Virus
agttcagtattaatcatcggtatct

SEQ ID NO: 167341 - DNA, 25 bp, SARS Virus
gttcagtattaaacatcggtatctc

SEQ ID NO: 167342 - DNA, 25 bp, SARS Virus
ttcagtattaataatcggtatctct

SEQ ID NO: 167343 - DNA, 25 bp, SARS Virus
tcagtattaatcatcggtatctcta

SEQ ID NO: 167344 - DNA, 25 bp, SARS Virus
cagtattaatcaacggtatctctaa

SEQ ID NO: 167345 - DNA, 25 bp, SARS Virus
agtattaatcataggtatctctaaa

SEQ ID NO: 167346 - DNA, 25 bp, SARS Virus
gtattaatcatcagtatctctaaag

SEQ ID NO: 167347 - DNA, 25 bp, SARS Virus
tattaatcatcgatatctctaaagt

SEQ ID NO: 167348 - DNA, 25 bp, SARS Virus
attaatcatcggaatctctaaagta

SEQ ID NO: 167349 - DNA, 25 bp, SARS Virus
ttaatcatcggtatctctaaagtag

SEQ ID NO: 167350 - DNA, 25 bp, SARS Virus
taatcatcggtaactctaaagtagt

SEQ ID NO: 167351 - DNA, 25 bp, SARS Virus
aatcatcggtatatctaaagtagtt

SEQ ID NO: 167352 - DNA, 25 bp, SARS Virus
atcatcggtatcactaaagtagttt

SEQ ID NO: 167353 - DNA, 25 bp, SARS Virus
tcatcggtatctataaagtagtttc

SEQ ID NO: 167354 - DNA, 25 bp, SARS Virus
catcggtatctcaaaagtagtttct

SEQ ID NO: 167355 - DNA, 25 bp, SARS Virus
atcggtatctctaaagtagtttctg

SEQ ID NO: 167356 - DNA, 25 bp, SARS Virus
tcggtatctctaaagtagtttctga

SEQ ID NO: 167357 - DNA, 25 bp, SARS Virus
cggtatctctaaagtagtttctgat

SEQ ID NO: 167358 - DNA, 25 bp, SARS Virus
ggtatctctaaaatagtttctgatg

SEQ ID NO: 167359 - DNA, 25 bp, SARS Virus
gtatctctaaagaagtttctgatgt

SEQ ID NO: 167360 - DNA, 25 bp, SARS Virus
tatctctaaagtagtttctgatgtt

SEQ ID NO: 167361 - DNA, 25 bp, SARS Virus
atctctaaagtaatttctgatgtta

SEQ ID NO: 167362 - DNA, 25 bp, SARS Virus
tctctaaagtagattctgatgttac

SEQ ID NO: 167363 - DNA, 25 bp, SARS Virus
ctctaaagtagtatctgatgttaca

SEQ ID NO: 167364 - DNA, 25 bp, SARS Virus
tctaaagtagttactgatgttacag

SEQ ID NO: 167365 - DNA, 25 bp, SARS Virus
ctaaagtagtttatgatgttacagt

SEQ ID NO: 167366 - DNA, 25 bp, SARS Virus
taaagtagtttcagatgttacagtc

SEQ ID NO: 167367 - DNA, 25 bp, SARS Virus
aaagtagtttctaatgttacagtcg

SEQ ID NO: 167368 - DNA, 25 bp, SARS Virus
aagtagtttctgatgttacagtcgt

SEQ ID NO: 167369 - DNA, 25 bp, SARS Virus
agtagtttctgaagttacagtcgtc

SEQ ID NO: 167370 - DNA, 25 bp, SARS Virus
gtagtttctgatattacagtcgtca

SEQ ID NO: 167371 - DNA, 25 bp, SARS Virus
tagtttctgatgatacagtcgtcaa

SEQ ID NO: 167372 - DNA, 25 bp, SARS Virus
agtttctgatgtaacagtcgtcaac

SEQ ID NO: 167373 - DNA, 25 bp, SARS Virus
gtttctgatgttacagtcgtcaaca

SEQ ID NO: 167374 - DNA, 25 bp, SARS Virus
tttctgatgttaaagtcgtcaacaa

SEQ ID NO: 167375 - DNA, 25 bp, SARS Virus
ttctgatgttacagtcgtcaacaaa

SEQ ID NO: 167376 - DNA, 25 bp, SARS Virus
tctgatgttacaatcgtcaacaaag

SEQ ID NO: 167377 - DNA, 25 bp, SARS Virus
ctgatgttacagacgtcaacaaaga

SEQ ID NO: 167378 - DNA, 25 bp, SARS Virus
tgatgttacagtagtcaacaaagac

SEQ ID NO: 167379 - DNA, 25 bp, SARS Virus
gatgttacagtcatcaacaaagacc

SEQ ID NO: 167380 - DNA, 25 bp, SARS Virus
atgttacagtcgacaacaaagaccg

SEQ ID NO: 167381 - DNA, 25 bp, SARS Virus
tgttacagtcgtaaacaaagaccgt

SEQ ID NO: 167382 - DNA, 25 bp, SARS Virus
gttacagtcgtcaacaaagaccgtt

SEQ ID NO: 167383 - DNA, 25 bp, SARS Virus
ttacagtcgtcaacaaagaccgtta

SEQ ID NO: 167384 - DNA, 25 bp, SARS Virus
tacagtcgtcaaaaaagaccgttac

SEQ ID NO: 167385 - DNA, 25 bp, SARS Virus
acagtcgtcaacaaagaccgttacg

SEQ ID NO: 167386 - DNA, 25 bp, SARS Virus
cagtcgtcaacaaagaccgttacgt

SEQ ID NO: 167387 - DNA, 25 bp, SARS Virus
agtcgtcaacaaagaccgttacgta

SEQ ID NO: 167388 - DNA, 25 bp, SARS Virus
gtcgtcaacaaaaaccgttacgtaa

SEQ ID NO: 167389 - DNA, 25 bp, SARS Virus
tcgtcaacaaagaccgttacgtaaa

SEQ ID NO: 167390 - DNA, 25 bp, SARS Virus
cgtcaacaaagaacgttacgtaaat

SEQ ID NO: 167391 - DNA, 25 bp, SARS Virus
gtcaacaaagacagttacgtaaatg

SEQ ID NO: 167392 - DNA, 25 bp, SARS Virus
tcaacaaagaccattacgtaaatgt

SEQ ID NO: 167393 - DNA, 25 bp, SARS Virus
caacaaagaccgatacgtaaatgtc

SEQ ID NO: 167394 - DNA, 25 bp, SARS Virus
aacaaagaccgtaacgtaaatgtca

SEQ ID NO: 167395 - DNA, 25 bp, SARS Virus
acaaagaccgttacgtaaatgtcac

SEQ ID NO: 167396 - DNA, 25 bp, SARS Virus
caaagaccgttaagtaaatgtcacg

SEQ ID NO: 167397 - DNA, 25 bp, SARS Virus
aaagaccgttacataaatgtcacgt

SEQ ID NO: 167398 - DNA, 25 bp, SARS Virus
aagaccgttacgaaaatgtcacgtc

SEQ ID NO: 167399 - DNA, 25 bp, SARS Virus
agaccgttacgtaaatgtcacgtct

SEQ ID NO: 167400 - DNA, 25 bp, SARS Virus
gaccgttacgtaaatgtcacgtctt

SEQ ID NO: 167401 - DNA, 25 bp, SARS Virus
accgttacgtaaatgtcacgtcttt

SEQ ID NO: 167402 - DNA, 25 bp, SARS Virus
ccgttacgtaaaagtcacgtctttt

SEQ ID NO: 167403 - DNA, 25 bp, SARS Virus
cgttacgtaaatatcacgtcttttg

SEQ ID NO: 167404 - DNA, 25 bp, SARS Virus
gttacgtaaatgacacgtcttttgt

SEQ ID NO: 167405 - DNA, 25 bp, SARS Virus
ttacgtaaatgtaacgtcttttgta

SEQ ID NO: 167406 - DNA, 25 bp, SARS Virus
tacgtaaatgtcacgtcttttgtat

SEQ ID NO: 167407 - DNA, 25 bp, SARS Virus
acgtaaatgtcaagtcttttgtatg

SEQ ID NO: 167408 - DNA, 25 bp, SARS Virus
cgtaaatgtcacatcttttgtatga

SEQ ID NO: 167409 - DNA, 25 bp, SARS Virus
gtaaatgtcacgacttttgtatgac

SEQ ID NO: 167410 - DNA, 25 bp, SARS Virus
taaatgtcacgtattttgtatgaca

SEQ ID NO: 167411 - DNA, 25 bp, SARS Virus
aaatgtcacgtcatttgtatgacaa

SEQ ID NO: 167412 - DNA, 25 bp, SARS Virus
aatgtcacgtctattgtatgacaag

SEQ ID NO: 167413 - DNA, 25 bp, SARS Virus
atgtcacgtcttatgtatgacaaga

SEQ ID NO: 167414 - DNA, 25 bp, SARS Virus
tgtcacgtctttagtatgacaagat

SEQ ID NO: 167415 - DNA, 25 bp, SARS Virus
gtcacgtcttttatatgacaagatc

SEQ ID NO: 167416 - DNA, 25 bp, SARS Virus
tcacgtcttttgaatgacaagatca

SEQ ID NO: 167417 - DNA, 25 bp, SARS Virus
gatgtcgcaagacacttaatattcc

SEQ ID NO: 167418 - DNA, 25 bp, SARS Virus
atgtcgcaagacccttaatattcca

SEQ ID NO: 167419 - DNA, 25 bp, SARS Virus
tgtcgcaagacacttaatattccac

SEQ ID NO: 167420 - DNA, 25 bp, SARS Virus
gtcgcaagacacctaatattccact

SEQ ID NO: 167421 - DNA, 25 bp, SARS Virus
tcgcaagacactcaatattccactc

SEQ ID NO: 167422 - DNA, 25 bp, SARS Virus
cgcaagacacttcatattccactct

SEQ ID NO: 167423 - DNA, 25 bp, SARS Virus
gcaagacacttactattccactcta

SEQ ID NO: 167424 - DNA, 25 bp, SARS Virus
caagacacttaacattccactctat

SEQ ID NO: 167425 - DNA, 25 bp, SARS Virus
aagacacttaatcttccactctatt

SEQ ID NO: 167426 - DNA, 25 bp, SARS Virus
agacacttaatactccactctattt

SEQ ID NO: 167427 - DNA, 25 bp, SARS Virus
gacacttaatatcccactctatttt

SEQ ID NO: 167428 - DNA, 25 bp, SARS Virus
acacttaatattccactctattttt

SEQ ID NO: 167429 - DNA, 25 bp, SARS Virus
cacttaatattccactctatttttg

SEQ ID NO: 167430 - DNA, 25 bp, SARS Virus
acttaatattcccctctatttttgt

SEQ ID NO: 167431 - DNA, 25 bp, SARS Virus
cttaatattccactctatttttgtc

SEQ ID NO: 167432 - DNA, 25 bp, SARS Virus
ttaatattccaccctatttttgtcg

SEQ ID NO: 167433 - DNA, 25 bp, SARS Virus
taatattccactctatttttgtcga

SEQ ID NO: 167434 - DNA, 25 bp, SARS Virus
aatattccactccatttttgtcgaa

SEQ ID NO: 167435 - DNA, 25 bp, SARS Virus
atattccactctctttttgtcgaaa

SEQ ID NO: 167436 - DNA, 25 bp, SARS Virus
tattccactctacttttgtcgaaaa

SEQ ID NO: 167437 - DNA, 25 bp, SARS Virus
attccactctatctttgtcgaaaag

SEQ ID NO: 167438 - DNA, 25 bp, SARS Virus
ttccactctattcttgtcgaaaaga

SEQ ID NO: 167439 - DNA, 25 bp, SARS Virus
tccactctatttctgtcgaaaagag

SEQ ID NO: 167440 - DNA, 25 bp, SARS Virus
ccactctattttcgtcgaaaagagg

SEQ ID NO: 167441 - DNA, 25 bp, SARS Virus
cactctatttttctcgaaaagaggt

SEQ ID NO: 167442 - DNA, 25 bp, SARS Virus
actctatttttgccgaaaagaggtt

SEQ ID NO: 167443 - DNA, 25 bp, SARS Virus
ctctatttttgtcgaaaagaggttc

SEQ ID NO: 167444 - DNA, 25 bp, SARS Virus
tctatttttgtccaaaagaggttcg

SEQ ID NO: 167445 - DNA, 25 bp, SARS Virus
ctatttttgtcgcaaagaggttcgt

SEQ ID NO: 167446 - DNA, 25 bp, SARS Virus
tatttttgtcgacaagaggttcgtc

SEQ ID NO: 167447 - DNA, 25 bp, SARS Virus
atttttgtcgaacagaggttcgtcc

SEQ ID NO: 167448 - DNA, 25 bp, SARS Virus
tttttgtcgaaacgaggttcgtcct

SEQ ID NO: 167449 - DNA, 25 bp, SARS Virus
ttttgtcgaaaacaggttcgtccta

SEQ ID NO: 167450 - DNA, 25 bp, SARS Virus
tttgtcgaaaagcggttcgtcctaa

SEQ ID NO: 167451 - DNA, 25 bp, SARS Virus
ttgtcgaaaagacgttcgtcctaac

SEQ ID NO: 167452 - DNA, 25 bp, SARS Virus
tgtcgaaaagagcttcgtcctaacg

SEQ ID NO: 167453 - DNA, 25 bp, SARS Virus
gtcgaaaagaggctcgtcctaacgc

SEQ ID NO: 167454 - DNA, 25 bp, SARS Virus
tcgaaaagaggtccgtcctaacgca

SEQ ID NO: 167455 - DNA, 25 bp, SARS Virus
cgaaaagaggttcgtcctaacgcac

SEQ ID NO: 167456 - DNA, 25 bp, SARS Virus
gaaaagaggttcctcctaacgcaca

SEQ ID NO: 167457 - DNA, 25 bp, SARS Virus
aaaagaggttcgccctaacgcacat

SEQ ID NO: 167458 - DNA, 25 bp, SARS Virus
aaagaggttcgtcctaacgcacatt

SEQ ID NO: 167459 - DNA, 25 bp, SARS Virus
aagaggttcgtcctaacgcacattc

SEQ ID NO: 167460 - DNA, 25 bp, SARS Virus
agaggttcgtcccaacgcacattct

SEQ ID NO: 167461 - DNA, 25 bp, SARS Virus
gaggttcgtcctcacgcacattctt

SEQ ID NO: 167462 - DNA, 25 bp, SARS Virus
aggttcgtcctaccgcacattcttt

SEQ ID NO: 167463 - DNA, 25 bp, SARS Virus
ggttcgtcctaacgcacattcttta

SEQ ID NO: 167464 - DNA, 25 bp, SARS Virus
gttcgtcctaacccacattctttaa

SEQ ID NO: 167465 - DNA, 25 bp, SARS Virus
ttcgtcctaacgcacattctttaag

SEQ ID NO: 167466 - DNA, 25 bp, SARS Virus
tcgtcctaacgcccattctttaaga

SEQ ID NO: 167467 - DNA, 25 bp, SARS Virus
cgtcctaacgcacattctttaagag

SEQ ID NO: 167468 - DNA, 25 bp, SARS Virus
gtcctaacgcaccttctttaagaga

SEQ ID NO: 167469 - DNA, 25 bp, SARS Virus
tcctaacgcacactctttaagagaa

SEQ ID NO: 167470 - DNA, 25 bp, SARS Virus
cctaacgcacatcctttaagagaat

SEQ ID NO: 167471 - DNA, 25 bp, SARS Virus
ctaacgcacattctttaagagaatg

SEQ ID NO: 167472 - DNA, 25 bp, SARS Virus
taacgcacattccttaagagaatgt

SEQ ID NO: 167473 - DNA, 25 bp, SARS Virus
aacgcacattctctaagagaatgtt

SEQ ID NO: 167474 - DNA, 25 bp, SARS Virus
acgcacattcttcaagagaatgttg

SEQ ID NO: 167475 - DNA, 25 bp, SARS Virus
cgcacattctttcagagaatgttgc

SEQ ID NO: 167476 - DNA, 25 bp, SARS Virus
gcacattctttacgagaatgttgcg

SEQ ID NO: 167477 - DNA, 25 bp, SARS Virus
cacattctttaacagaatgttgcgg

SEQ ID NO: 167478 - DNA, 25 bp, SARS Virus
acattctttaagcgaatgttgcgga

SEQ ID NO: 167479 - DNA, 25 bp, SARS Virus
cattctttaagacaatgttgcggat

SEQ ID NO: 167480 - DNA, 25 bp, SARS Virus
attctttaagagcatgttgcggata

SEQ ID NO: 167481 - DNA, 25 bp, SARS Virus
ttctttaagagactgttgcggataa

SEQ ID NO: 167482 - DNA, 25 bp, SARS Virus
tctttaagagaacgttgcggataaa

SEQ ID NO: 167483 - DNA, 25 bp, SARS Virus
ctttaagagaatcttgcggataaac

SEQ ID NO: 167484 - DNA, 25 bp, SARS Virus
tttaagagaatgctgcggataaact

SEQ ID NO: 167485 - DNA, 25 bp, SARS Virus
ttaagagaatgtcgcggataaactc

SEQ ID NO: 167486 - DNA, 25 bp, SARS Virus
taagagaatgttccggataaactcc

SEQ ID NO: 167487 - DNA, 25 bp, SARS Virus
aagagaatgttgcggataaactcca

SEQ ID NO: 167488 - DNA, 25 bp, SARS Virus
agagaatgttgccgataaactccag

SEQ ID NO: 167489 - DNA, 25 bp, SARS Virus
gagaatgttgcgcataaactccaga

SEQ ID NO: 167490 - DNA, 25 bp, SARS Virus
agaatgttgcggctaaactccagac

SEQ ID NO: 167491 - DNA, 25 bp, SARS Virus
gaatgttgcggacaaactccagaca

SEQ ID NO: 167492 - DNA, 25 bp, SARS Virus
aatgttgcggatcaactccagacaa

SEQ ID NO: 167493 - DNA, 25 bp, SARS Virus
atgttgcggatacactccagacaac

SEQ ID NO: 167494 - DNA, 25 bp, SARS Virus
tgttgcggataacctccagacaact

SEQ ID NO: 167495 - DNA, 25 bp, SARS Virus
gttgcggataaactccagacaacta

SEQ ID NO: 167496 - DNA, 25 bp, SARS Virus
ttgcggataaaccccagacaactaa

SEQ ID NO: 167497 - DNA, 25 bp, SARS Virus
tgcggataaactccagacaactaac

SEQ ID NO: 167498 - DNA, 25 bp, SARS Virus
gcggataaactccagacaactaacg

SEQ ID NO: 167499 - DNA, 25 bp, SARS Virus
cggataaactcccgacaactaacgt

SEQ ID NO: 167500 - DNA, 25 bp, SARS Virus
ggataaactccacacaactaacgtc

SEQ ID NO: 167501 - DNA, 25 bp, SARS Virus
gataaactccagccaactaacgtct

SEQ ID NO: 167502 - DNA, 25 bp, SARS Virus
ataaactccagacaactaacgtcta

SEQ ID NO: 167503 - DNA, 25 bp, SARS Virus
taaactccagaccactaacgtctac

SEQ ID NO: 167504 - DNA, 25 bp, SARS Virus
aaactccagacacctaacgtctact

SEQ ID NO: 167505 - DNA, 25 bp, SARS Virus
aactccagacaactaacgtctactt

SEQ ID NO: 167506 - DNA, 25 bp, SARS Virus
actccagacaaccaacgtctacttt

SEQ ID NO: 167507 - DNA, 25 bp, SARS Virus
ctccagacaactcacgtctactttg

SEQ ID NO: 167508 - DNA, 25 bp, SARS Virus
tccagacaactaccgtctactttgt

SEQ ID NO: 167509 - DNA, 25 bp, SARS Virus
ccagacaactaacgtctactttgta

SEQ ID NO: 167510 - DNA, 25 bp, SARS Virus
cagacaactaacctctactttgtag

SEQ ID NO: 167511 - DNA, 25 bp, SARS Virus
agacaactaacgcctactttgtagt

SEQ ID NO: 167512 - DNA, 25 bp, SARS Virus
gacaactaacgtctactttgtagta

SEQ ID NO: 167513 - DNA, 25 bp, SARS Virus
acaactaacgtccactttgtagtac

SEQ ID NO: 167514 - DNA, 25 bp, SARS Virus
caactaacgtctcctttgtagtaca

SEQ ID NO: 167515 - DNA, 25 bp, SARS Virus
aactaacgtctactttgtagtacac

SEQ ID NO: 167516 - DNA, 25 bp, SARS Virus
actaacgtctaccttgtagtacaca

SEQ ID NO: 167517 - DNA, 25 bp, SARS Virus
ctaacgtctactctgtagtacacat

SEQ ID NO: 167518 - DNA, 25 bp, SARS Virus
taacgtctacttcgtagtacacatt

SEQ ID NO: 167519 - DNA, 25 bp, SARS Virus
aacgtctactttctagtacacatta

SEQ ID NO: 167520 - DNA, 25 bp, SARS Virus
acgtctactttgcagtacacattat

SEQ ID NO: 167521 - DNA, 25 bp, SARS Virus
cgtctactttgtcgtacacattatt

SEQ ID NO: 167522 - DNA, 25 bp, SARS Virus
gtctactttgtactacacattattg

SEQ ID NO: 167523 - DNA, 25 bp, SARS Virus
tctactttgtagcacacattattgt

SEQ ID NO: 167524 - DNA, 25 bp, SARS Virus
ctactttgtagtccacattattgtg

SEQ ID NO: 167525 - DNA, 25 bp, SARS Virus
tactttgtagtacacattattgtgg

SEQ ID NO: 167526 - DNA, 25 bp, SARS Virus
actttgtagtacccattattgtgga

SEQ ID NO: 167527 - DNA, 25 bp, SARS Virus
ctttgtagtacacattattgtggaa

SEQ ID NO: 167528 - DNA, 25 bp, SARS Virus
tttgtagtacaccttattgtggaaa

SEQ ID NO: 167529 - DNA, 25 bp, SARS Virus
ttgtagtacacactattgtggaaac

SEQ ID NO: 167530 - DNA, 25 bp, SARS Virus
tgtagtacacatcattgtggaaaca

SEQ ID NO: 167531 - DNA, 25 bp, SARS Virus
gtagtacacattcttgtggaaacat

SEQ ID NO: 167532 - DNA, 25 bp, SARS Virus
tagtacacattactgtggaaacatc

SEQ ID NO: 167533 - DNA, 25 bp, SARS Virus
agtacacattatcgtggaaacatct

SEQ ID NO: 167534 - DNA, 25 bp, SARS Virus
gtacacattattctggaaacatctt

SEQ ID NO: 167535 - DNA, 25 bp, SARS Virus
tacacattattgcggaaacatcttg

SEQ ID NO: 167536 - DNA, 25 bp, SARS Virus
acacattattgtcgaaacatcttgt

SEQ ID NO: 167537 - DNA, 25 bp, SARS Virus
cacattattgtgcaaacatcttgta

SEQ ID NO: 167538 - DNA, 25 bp, SARS Virus
acattattgtggcaacatcttgtaa

SEQ ID NO: 167539 - DNA, 25 bp, SARS Virus
cattattgtggacacatcttgtaaa

SEQ ID NO: 167540 - DNA, 25 bp, SARS Virus
attattgtggaaccatcttgtaaaa

SEQ ID NO: 167541 - DNA, 25 bp, SARS Virus
ttattgtggaaacatcttgtaaaac

SEQ ID NO: 167542 - DNA, 25 bp, SARS Virus
tattgtggaaacctcttgtaaaact

SEQ ID NO: 167543 - DNA, 25 bp, SARS Virus
attgtggaaacaccttgtaaaactt

SEQ ID NO: 167544 - DNA, 25 bp, SARS Virus
ttgtggaaacatcttgtaaaacttc

SEQ ID NO: 167545 - DNA, 25 bp, SARS Virus
tgtggaaacatcctgtaaaacttcg

SEQ ID NO: 167546 - DNA, 25 bp, SARS Virus
gtggaaacatctcgtaaaacttcgt

SEQ ID NO: 167547 - DNA, 25 bp, SARS Virus
tggaaacatcttctaaaacttcgta

SEQ ID NO: 167548 - DNA, 25 bp, SARS Virus
ggaaacatcttgcaaaacttcgtaa

SEQ ID NO: 167549 - DNA, 25 bp, SARS Virus
gaaacatcttgtcaaacttcgtaac

SEQ ID NO: 167550 - DNA, 25 bp, SARS Virus
aaacatcttgtacaacttcgtaact

SEQ ID NO: 167551 - DNA, 25 bp, SARS Virus
aacatcttgtaacacttcgtaactc

SEQ ID NO: 167552 - DNA, 25 bp, SARS Virus
acatcttgtaaaccttcgtaactcg

SEQ ID NO: 167553 - DNA, 25 bp, SARS Virus
catcttgtaaaacttcgtaactcga

SEQ ID NO: 167554 - DNA, 25 bp, SARS Virus
atcttgtaaaacctcgtaactcgac

SEQ ID NO: 167555 - DNA, 25 bp, SARS Virus
tcttgtaaaactccgtaactcgact

SEQ ID NO: 167556 - DNA, 25 bp, SARS Virus
cttgtaaaacttcgtaactcgactg

SEQ ID NO: 167557 - DNA, 25 bp, SARS Virus
ttgtaaaacttcctaactcgactga

SEQ ID NO: 167558 - DNA, 25 bp, SARS Virus
tgtaaaacttcgcaactcgactgaa

SEQ ID NO: 167559 - DNA, 25 bp, SARS Virus
gtaaaacttcgtcactcgactgaat

SEQ ID NO: 167560 - DNA, 25 bp, SARS Virus
taaaacttcgtacctcgactgaata

SEQ ID NO: 167561 - DNA, 25 bp, SARS Virus
aaaacttcgtaactcgactgaatag

SEQ ID NO: 167562 - DNA, 25 bp, SARS Virus
aaacttcgtaacccgactgaatagg

SEQ ID NO: 167563 - DNA, 25 bp, SARS Virus
aacttcgtaactcgactgaatagga

SEQ ID NO: 167564 - DNA, 25 bp, SARS Virus
acttcgtaactccactgaataggaa

SEQ ID NO: 167565 - DNA, 25 bp, SARS Virus
cttcgtaactcgcctgaataggaac

SEQ ID NO: 167566 - DNA, 25 bp, SARS Virus
ttcgtaactcgactgaataggaaca

SEQ ID NO: 167567 - DNA, 25 bp, SARS Virus
tcgtaactcgaccgaataggaacac

SEQ ID NO: 167568 - DNA, 25 bp, SARS Virus
cgtaactcgactcaataggaacaca

SEQ ID NO: 167569 - DNA, 25 bp, SARS Virus
gtaactcgactgcataggaacacac

SEQ ID NO: 167570 - DNA, 25 bp, SARS Virus
taactcgactgactaggaacacacg

SEQ ID NO: 167571 - DNA, 25 bp, SARS Virus
aactcgactgaacaggaacacacga

SEQ ID NO: 167572 - DNA, 25 bp, SARS Virus
actcgactgaatcggaacacacgaa

SEQ ID NO: 167573 - DNA, 25 bp, SARS Virus
ctcgactgaatacgaacacacgaaa

SEQ ID NO: 167574 - DNA, 25 bp, SARS Virus
tcgactgaatagcaacacacgaaaa

SEQ ID NO: 167575 - DNA, 25 bp, SARS Virus
cgactgaataggcacacacgaaaat

SEQ ID NO: 167576 - DNA, 25 bp, SARS Virus
gactgaataggaccacacgaaaatc

SEQ ID NO: 167577 - DNA, 25 bp, SARS Virus
actgaataggaacacacgaaaatcg

SEQ ID NO: 167578 - DNA, 25 bp, SARS Virus
ctgaataggaacccacgaaaatcga

SEQ ID NO: 167579 - DNA, 25 bp, SARS Virus
tgaataggaacacacgaaaatcgaa

SEQ ID NO: 167580 - DNA, 25 bp, SARS Virus
gaataggaacacccgaaaatcgaat

SEQ ID NO: 167581 - DNA, 25 bp, SARS Virus
aataggaacacacgaaaatcgaata

SEQ ID NO: 167582 - DNA, 25 bp, SARS Virus
ataggaacacaccaaaatcgaataa

SEQ ID NO: 167583 - DNA, 25 bp, SARS Virus
taggaacacacgcaaatcgaataac

SEQ ID NO: 167584 - DNA, 25 bp, SARS Virus
aggaacacacgacaatcgaataaca

SEQ ID NO: 167585 - DNA, 25 bp, SARS Virus
ggaacacacgaacatcgaataacag

SEQ ID NO: 167586 - DNA, 25 bp, SARS Virus
gaacacacgaaactcgaataacagt

SEQ ID NO: 167587 - DNA, 25 bp, SARS Virus
aacacacgaaaaccgaataacagta

SEQ ID NO: 167588 - DNA, 25 bp, SARS Virus
acacacgaaaatcgaataacagtat

SEQ ID NO: 167589 - DNA, 25 bp, SARS Virus
cacacgaaaatccaataacagtatt

SEQ ID NO: 167590 - DNA, 25 bp, SARS Virus
acacgaaaatcgcataacagtattt

SEQ ID NO: 167591 - DNA, 25 bp, SARS Virus
cacgaaaatcgactaacagtatttg

SEQ ID NO: 167592 - DNA, 25 bp, SARS Virus
acgaaaatcgaacaacagtatttga

SEQ ID NO: 167593 - DNA, 25 bp, SARS Virus
cgaaaatcgaatcacagtatttgat

SEQ ID NO: 167594 - DNA, 25 bp, SARS Virus
gaaaatcgaataccagtatttgatt

SEQ ID NO: 167595 - DNA, 25 bp, SARS Virus
aaaatcgaataacagtatttgattt

SEQ ID NO: 167596 - DNA, 25 bp, SARS Virus
aaatcgaataaccgtatttgatttc

SEQ ID NO: 167597 - DNA, 25 bp, SARS Virus
aatcgaataacactatttgatttcg

SEQ ID NO: 167598 - DNA, 25 bp, SARS Virus
atcgaataacagcatttgatttcgt

SEQ ID NO: 167599 - DNA, 25 bp, SARS Virus
tcgaataacagtctttgatttcgtg

SEQ ID NO: 167600 - DNA, 25 bp, SARS Virus
cgaataacagtacttgatttcgtga

SEQ ID NO: 167601 - DNA, 25 bp, SARS Virus
gaataacagtatctgatttcgtgag

SEQ ID NO: 167602 - DNA, 25 bp, SARS Virus
aataacagtattcgatttcgtgagt

SEQ ID NO: 167603 - DNA, 25 bp, SARS Virus
ataacagtatttcatttcgtgagtg

SEQ ID NO: 167604 - DNA, 25 bp, SARS Virus
taacagtatttgctttcgtgagtgt

SEQ ID NO: 167605 - DNA, 25 bp, SARS Virus
aacagtatttgacttcgtgagtgtc

SEQ ID NO: 167606 - DNA, 25 bp, SARS Virus
acagtatttgatctcgtgagtgtca

SEQ ID NO: 167607 - DNA, 25 bp, SARS Virus
cagtatttgattccgtgagtgtcac

SEQ ID NO: 167608 - DNA, 25 bp, SARS Virus
agtatttgatttcgtgagtgtcaca

SEQ ID NO: 167609 - DNA, 25 bp, SARS Virus
gtatttgatttcctgagtgtcacag

SEQ ID NO: 167610 - DNA, 25 bp, SARS Virus
tatttgatttcgcgagtgtcacagt

SEQ ID NO: 167611 - DNA, 25 bp, SARS Virus
atttgatttcgtcagtgtcacagtt

SEQ ID NO: 167612 - DNA, 25 bp, SARS Virus
tttgatttcgtgcgtgtcacagttg

SEQ ID NO: 167613 - DNA, 25 bp, SARS Virus
ttgatttcgtgactgtcacagttgt

SEQ ID NO: 167614 - DNA, 25 bp, SARS Virus
tgatttcgtgagcgtcacagttgtt

SEQ ID NO: 167615 - DNA, 25 bp, SARS Virus
gatttcgtgagtctcacagttgtta

SEQ ID NO: 167616 - DNA, 25 bp, SARS Virus
atttcgtgagtgccacagttgttaa

SEQ ID NO: 167617 - DNA, 25 bp, SARS Virus
tttcgtgagtgtcacagttgttaaa

SEQ ID NO: 167618 - DNA, 25 bp, SARS Virus
ttcgtgagtgtcccagttgttaaag

SEQ ID NO: 167619 - DNA, 25 bp, SARS Virus
tcgtgagtgtcacagttgttaaagt

SEQ ID NO: 167620 - DNA, 25 bp, SARS Virus
cgtgagtgtcaccgttgttaaagtc

SEQ ID NO: 167621 - DNA, 25 bp, SARS Virus
gtgagtgtcacacttgttaaagtcg

SEQ ID NO: 167622 - DNA, 25 bp, SARS Virus
tgagtgtcacagctgttaaagtcgt

SEQ ID NO: 167623 - DNA, 25 bp, SARS Virus
gagtgtcacagtcgttaaagtcgtc

SEQ ID NO: 167624 - DNA, 25 bp, SARS Virus
agtgtcacagttcttaaagtcgtcc

SEQ ID NO: 167625 - DNA, 25 bp, SARS Virus
gtgtcacagttgctaaagtcgtcct

SEQ ID NO: 167626 - DNA, 25 bp, SARS Virus
tgtcacagttgtcaaagtcgtcctg

SEQ ID NO: 167627 - DNA, 25 bp, SARS Virus
gtcacagttgttcaagtcgtcctgt

SEQ ID NO: 167628 - DNA, 25 bp, SARS Virus
tcacagttgttacagtcgtcctgtt

SEQ ID NO: 167629 - DNA, 25 bp, SARS Virus
cacagttgttaacgtcgtcctgttg

SEQ ID NO: 167630 - DNA, 25 bp, SARS Virus
acagttgttaaactcgtcctgttgc

SEQ ID NO: 167631 - DNA, 25 bp, SARS Virus
cagttgttaaagccgtcctgttgcc

SEQ ID NO: 167632 - DNA, 25 bp, SARS Virus
agttgttaaagtcgtcctgttgccg

SEQ ID NO: 167633 - DNA, 25 bp, SARS Virus
gttgttaaagtcctcctgttgccgc

SEQ ID NO: 167634 - DNA, 25 bp, SARS Virus
ttgttaaagtcgccctgttgccgct

SEQ ID NO: 167635 - DNA, 25 bp, SARS Virus
tgttaaagtcgtcctgttgccgctg

SEQ ID NO: 167636 - DNA, 25 bp, SARS Virus
gttaaagtcgtcctgttgccgctgt

SEQ ID NO: 167637 - DNA, 25 bp, SARS Virus
ttaaagtcgtcccgttgccgctgtt

SEQ ID NO: 167638 - DNA, 25 bp, SARS Virus
taaagtcgtcctcttgccgctgttc

SEQ ID NO: 167639 - DNA, 25 bp, SARS Virus
aaagtcgtcctgctgccgctgttca

SEQ ID NO: 167640 - DNA, 25 bp, SARS Virus
aagtcgtcctgtcgccgctgttcaa

SEQ ID NO: 167641 - DNA, 25 bp, SARS Virus
agtcgtcctgttcccgctgttcaag

SEQ ID NO: 167642 - DNA, 25 bp, SARS Virus
gtcgtcctgttgccgctgttcaagg

SEQ ID NO: 167643 - DNA, 25 bp, SARS Virus
tcgtcctgttgccgctgttcaaggt

SEQ ID NO: 167644 - DNA, 25 bp, SARS Virus
cgtcctgttgcccctgttcaaggtt

SEQ ID NO: 167645 - DNA, 25 bp, SARS Virus
gtcctgttgccgctgttcaaggttc

SEQ ID NO: 167646 - DNA, 25 bp, SARS Virus
tcctgttgccgccgttcaaggttcc

SEQ ID NO: 167647 - DNA, 25 bp, SARS Virus
cctgttgccgctcttcaaggttcct

SEQ ID NO: 167648 - DNA, 25 bp, SARS Virus
ctgttgccgctgctcaaggttcctt

SEQ ID NO: 167649 - DNA, 25 bp, SARS Virus
tgttgccgctgtccaaggttccttg

SEQ ID NO: 167650 - DNA, 25 bp, SARS Virus
gttgccgctgttcaaggttccttgt

SEQ ID NO: 167651 - DNA, 25 bp, SARS Virus
ttgccgctgttccaggttccttgta

SEQ ID NO: 167652 - DNA, 25 bp, SARS Virus
tgccgctgttcacggttccttgtac

SEQ ID NO: 167653 - DNA, 25 bp, SARS Virus
gccgctgttcaacgttccttgtaca

SEQ ID NO: 167654 - DNA, 25 bp, SARS Virus
ccgctgttcaagcttccttgtacag

SEQ ID NO: 167655 - DNA, 25 bp, SARS Virus
cgctgttcaaggctccttgtacaga

SEQ ID NO: 167656 - DNA, 25 bp, SARS Virus
gctgttcaaggtcccttgtacagac

SEQ ID NO: 167657 - DNA, 25 bp, SARS Virus
ctgttcaaggttccttgtacagacc

SEQ ID NO: 167658 - DNA, 25 bp, SARS Virus
tgttcaaggttccttgtacagacct

SEQ ID NO: 167659 - DNA, 25 bp, SARS Virus
gttcaaggttccctgtacagacctg

SEQ ID NO: 167660 - DNA, 25 bp, SARS Virus
ttcaaggttcctcgtacagacctgg

SEQ ID NO: 167661 - DNA, 25 bp, SARS Virus
tcaaggttccttctacagacctgga

SEQ ID NO: 167662 - DNA, 25 bp, SARS Virus
caaggttccttgcacagacctggat

SEQ ID NO: 167663 - DNA, 25 bp, SARS Virus
aaggttccttgtccagacctggata

SEQ ID NO: 167664 - DNA, 25 bp, SARS Virus
aggttccttgtacagacctggataa

SEQ ID NO: 167665 - DNA, 25 bp, SARS Virus
ggttccttgtaccgacctggataac

SEQ ID NO: 167666 - DNA, 25 bp, SARS Virus
gttccttgtacacacctggataaca

SEQ ID NO: 167667 - DNA, 25 bp, SARS Virus
ttccttgtacagccctggataacaa

SEQ ID NO: 167668 - DNA, 25 bp, SARS Virus
tccttgtacagacctggataacaaa

SEQ ID NO: 167669 - DNA, 25 bp, SARS Virus
ccttgtacagacctggataacaaaa

SEQ ID NO: 167670 - DNA, 25 bp, SARS Virus
cttgtacagacccggataacaaaag

SEQ ID NO: 167671 - DNA, 25 bp, SARS Virus
ttgtacagacctcgataacaaaagt

SEQ ID NO: 167672 - DNA, 25 bp, SARS Virus
tgtacagacctgcataacaaaagta

SEQ ID NO: 167673 - DNA, 25 bp, SARS Virus
gtacagacctggctaacaaaagtat

SEQ ID NO: 167674 - DNA, 25 bp, SARS Virus
tacagacctggacaacaaaagtatt

SEQ ID NO: 167675 - DNA, 25 bp, SARS Virus
acagacctggatcacaaaagtattc

SEQ ID NO: 167676 - DNA, 25 bp, SARS Virus
cagacctggataccaaaagtattca

SEQ ID NO: 167677 - DNA, 25 bp, SARS Virus
agacctggataacaaaagtattcag

SEQ ID NO: 167678 - DNA, 25 bp, SARS Virus
gacctggataaccaaagtattcaga

SEQ ID NO: 167679 - DNA, 25 bp, SARS Virus
acctggataacacaagtattcagac

SEQ ID NO: 167680 - DNA, 25 bp, SARS Virus
cctggataacaacagtattcagacg

SEQ ID NO: 167681 - DNA, 25 bp, SARS Virus
ctggataacaaacgtattcagacgt

SEQ ID NO: 167682 - DNA, 25 bp, SARS Virus
tggataacaaaactattcagacgtg

SEQ ID NO: 167683 - DNA, 25 bp, SARS Virus
ggataacaaaagcattcagacgtgt

SEQ ID NO: 167684 - DNA, 25 bp, SARS Virus
gataacaaaagtcttcagacgtgtg

SEQ ID NO: 167685 - DNA, 25 bp, SARS Virus
ataacaaaagtactcagacgtgtga

SEQ ID NO: 167686 - DNA, 25 bp, SARS Virus
taacaaaagtatccagacgtgtgac

SEQ ID NO: 167687 - DNA, 25 bp, SARS Virus
aacaaaagtattcagacgtgtgact

SEQ ID NO: 167688 - DNA, 25 bp, SARS Virus
acaaaagtattccgacgtgtgactt

SEQ ID NO: 167689 - DNA, 25 bp, SARS Virus
caaaagtattcacacgtgtgactta

SEQ ID NO: 167690 - DNA, 25 bp, SARS Virus
aaaagtattcagccgtgtgacttaa

SEQ ID NO: 167691 - DNA, 25 bp, SARS Virus
aaagtattcagacgtgtgacttaat

SEQ ID NO: 167692 - DNA, 25 bp, SARS Virus
aagtattcagacctgtgacttaatt

SEQ ID NO: 167693 - DNA, 25 bp, SARS Virus
agtattcagacgcgtgacttaattt

SEQ ID NO: 167694 - DNA, 25 bp, SARS Virus
gtattcagacgtctgacttaatttt

SEQ ID NO: 167695 - DNA, 25 bp, SARS Virus
tattcagacgtgcgacttaatttta

SEQ ID NO: 167696 - DNA, 25 bp, SARS Virus
attcagacgtgtcacttaattttat

SEQ ID NO: 167697 - DNA, 25 bp, SARS Virus
ttcagacgtgtgccttaattttata

SEQ ID NO: 167698 - DNA, 25 bp, SARS Virus
tcagacgtgtgacttaattttataa

SEQ ID NO: 167699 - DNA, 25 bp, SARS Virus
cagacgtgtgacctaattttataag

SEQ ID NO: 167700 - DNA, 25 bp, SARS Virus
agacgtgtgactcaattttataaga

SEQ ID NO: 167701 - DNA, 25 bp, SARS Virus
gacgtgtgacttcattttataagac

SEQ ID NO: 167702 - DNA, 25 bp, SARS Virus
acgtgtgacttacttttataagacc

SEQ ID NO: 167703 - DNA, 25 bp, SARS Virus
cgtgtgacttaactttataagacca

SEQ ID NO: 167704 - DNA, 25 bp, SARS Virus
gtgtgacttaatcttataagaccaa

SEQ ID NO: 167705 - DNA, 25 bp, SARS Virus
tgtgacttaattctataagaccaag

SEQ ID NO: 167706 - DNA, 25 bp, SARS Virus
gtgacttaatttcataagaccaaga

SEQ ID NO: 167707 - DNA, 25 bp, SARS Virus
tgacttaattttctaagaccaagat

SEQ ID NO: 167708 - DNA, 25 bp, SARS Virus
gacttaattttacaagaccaagatc

SEQ ID NO: 167709 - DNA, 25 bp, SARS Virus
acttaattttatcagaccaagatca

SEQ ID NO: 167710 - DNA, 25 bp, SARS Virus
cttaattttatacgaccaagatcac

SEQ ID NO: 167711 - DNA, 25 bp, SARS Virus
ttaattttataacaccaagatcaca

SEQ ID NO: 167712 - DNA, 25 bp, SARS Virus
taattttataagcccaagatcacac

SEQ ID NO: 167713 - DNA, 25 bp, SARS Virus
aattttataagaccaagatcacacg

SEQ ID NO: 167714 - DNA, 25 bp, SARS Virus
attttataagaccaagatcacacgg

SEQ ID NO: 167715 - DNA, 25 bp, SARS Virus
ttttataagacccagatcacacgga

SEQ ID NO: 167716 - DNA, 25 bp, SARS Virus
tttataagaccacgatcacacggaa

SEQ ID NO: 167717 - DNA, 25 bp, SARS Virus
ttataagaccaacatcacacggaaa

SEQ ID NO: 167718 - DNA, 25 bp, SARS Virus
tataagaccaagctcacacggaaat

SEQ ID NO: 167719 - DNA, 25 bp, SARS Virus
ataagaccaagaccacacggaaatc

SEQ ID NO: 167720 - DNA, 25 bp, SARS Virus
taagaccaagatcacacggaaatca

SEQ ID NO: 167721 - DNA, 25 bp, SARS Virus
aagaccaagatcccacggaaatcag

SEQ ID NO: 167722 - DNA, 25 bp, SARS Virus
agaccaagatcacacggaaatcagt

SEQ ID NO: 167723 - DNA, 25 bp, SARS Virus
gaccaagatcacccggaaatcagtc

SEQ ID NO: 167724 - DNA, 25 bp, SARS Virus
accaagatcacacggaaatcagtcg

SEQ ID NO: 167725 - DNA, 25 bp, SARS Virus
ccaagatcacaccgaaatcagtcgt

SEQ ID NO: 167726 - DNA, 25 bp, SARS Virus
caagatcacacgcaaatcagtcgtt

SEQ ID NO: 167727 - DNA, 25 bp, SARS Virus
aagatcacacggcaatcagtcgtta

SEQ ID NO: 167728 - DNA, 25 bp, SARS Virus
agatcacacggacatcagtcgttac

SEQ ID NO: 167729 - DNA, 25 bp, SARS Virus
gatcacacggaactcagtcgttaca

SEQ ID NO: 167730 - DNA, 25 bp, SARS Virus
atcacacggaaaccagtcgttacac

SEQ ID NO: 167731 - DNA, 25 bp, SARS Virus
tcacacggaaatcagtcgttacacg

SEQ ID NO: 167732 - DNA, 25 bp, SARS Virus
cacacggaaatccgtcgttacacgc

SEQ ID NO: 167733 - DNA, 25 bp, SARS Virus
acacggaaatcactcgttacacgcc

SEQ ID NO: 167734 - DNA, 25 bp, SARS Virus
cacggaaatcagccgttacacgccc

SEQ ID NO: 167735 - DNA, 25 bp, SARS Virus
acggaaatcagtcgttacacgcccc

SEQ ID NO: 167736 - DNA, 25 bp, SARS Virus
cggaaatcagtccttacacgccccc

SEQ ID NO: 167737 - DNA, 25 bp, SARS Virus
ggaaatcagtcgctacacgcccccc

SEQ ID NO: 167738 - DNA, 25 bp, SARS Virus
gaaatcagtcgtcacacgccccccg

SEQ ID NO: 167739 - DNA, 25 bp, SARS Virus
aaatcagtcgttccacgccccccga

SEQ ID NO: 167740 - DNA, 25 bp, SARS Virus
aatcagtcgttacacgccccccgac

SEQ ID NO: 167741 - DNA, 25 bp, SARS Virus
atcagtcgttacccgccccccgacc

SEQ ID NO: 167742 - DNA, 25 bp, SARS Virus
tcagtcgttacacgccccccgacca

SEQ ID NO: 167743 - DNA, 25 bp, SARS Virus
cagtcgttacaccccccccgaccat

SEQ ID NO: 167744 - DNA, 25 bp, SARS Virus
agtcgttacacgccccccgaccatt

SEQ ID NO: 167745 - DNA, 25 bp, SARS Virus
gtcgttacacgccccccgaccatta

SEQ ID NO: 167746 - DNA, 25 bp, SARS Virus
tcgttacacgccccccgaccattaa

SEQ ID NO: 167747 - DNA, 25 bp, SARS Virus
cgttacacgccccccgaccattaac

SEQ ID NO: 167748 - DNA, 25 bp, SARS Virus
gttacacgccccccgaccattaact

SEQ ID NO: 167749 - DNA, 25 bp, SARS Virus
ttacacgccccccgaccattaactc

SEQ ID NO: 167750 - DNA, 25 bp, SARS Virus
tacacgcccccccaccattaactcg

SEQ ID NO: 167751 - DNA, 25 bp, SARS Virus
acacgccccccgcccattaactcgt

SEQ ID NO: 167752 - DNA, 25 bp, SARS Virus
cacgccccccgaccattaactcgtc

SEQ ID NO: 167753 - DNA, 25 bp, SARS Virus
acgccccccgaccattaactcgtcc

SEQ ID NO: 167754 - DNA, 25 bp, SARS Virus
cgccccccgacccttaactcgtcct

SEQ ID NO: 167755 - DNA, 25 bp, SARS Virus
gccccccgaccactaactcgtccta

SEQ ID NO: 167756 - DNA, 25 bp, SARS Virus
ccccccgaccatcaactcgtcctag

SEQ ID NO: 167757 - DNA, 25 bp, SARS Virus
cccccgaccattcactcgtcctagc

SEQ ID NO: 167758 - DNA, 25 bp, SARS Virus
ccccgaccattacctcgtcctagcg

SEQ ID NO: 167759 - DNA, 25 bp, SARS Virus
cccgaccattaactcgtcctagcgg

SEQ ID NO: 167760 - DNA, 25 bp, SARS Virus
ccgaccattaacccgtcctagcggt

SEQ ID NO: 167761 - DNA, 25 bp, SARS Virus
cgaccattaactcgtcctagcggtt

SEQ ID NO: 167762 - DNA, 25 bp, SARS Virus
gaccattaactcctcctagcggtta

SEQ ID NO: 167763 - DNA, 25 bp, SARS Virus
accattaactcgccctagcggttat

SEQ ID NO: 167764 - DNA, 25 bp, SARS Virus
ccattaactcgtcctagcggttata

SEQ ID NO: 167765 - DNA, 25 bp, SARS Virus
cattaactcgtcctagcggttatat

SEQ ID NO: 167766 - DNA, 25 bp, SARS Virus
attaactcgtcccagcggttatatc

SEQ ID NO: 167767 - DNA, 25 bp, SARS Virus
ttaactcgtcctcgcggttatatct

SEQ ID NO: 167768 - DNA, 25 bp, SARS Virus
taactcgtcctaccggttatatctg

SEQ ID NO: 167769 - DNA, 25 bp, SARS Virus
aactcgtcctagcggttatatctgc

SEQ ID NO: 167770 - DNA, 25 bp, SARS Virus
actcgtcctagccgttatatctgca

SEQ ID NO: 167771 - DNA, 25 bp, SARS Virus
ctcgtcctagcgcttatatctgcat

SEQ ID NO: 167772 - DNA, 25 bp, SARS Virus
tcgtcctagcggctatatctgcatc

SEQ ID NO: 167773 - DNA, 25 bp, SARS Virus
cgtcctagcggtcatatctgcatca

SEQ ID NO: 167774 - DNA, 25 bp, SARS Virus
gtcctagcggttctatctgcatcac

SEQ ID NO: 167775 - DNA, 25 bp, SARS Virus
tcctagcggttacatctgcatcaca

SEQ ID NO: 167776 - DNA, 25 bp, SARS Virus
cctagcggttatctctgcatcacaa

SEQ ID NO: 167777 - DNA, 25 bp, SARS Virus
ctagcggttatacctgcatcacaaa

SEQ ID NO: 167778 - DNA, 25 bp, SARS Virus
tagcggttatatctgcatcacaaaa

SEQ ID NO: 167779 - DNA, 25 bp, SARS Virus
agcggttatatccgcatcacaaaac

SEQ ID NO: 167780 - DNA, 25 bp, SARS Virus
gcggttatatctccatcacaaaacg

SEQ ID NO: 167781 - DNA, 25 bp, SARS Virus
cggttatatctgcatcacaaaacgt

SEQ ID NO: 167782 - DNA, 25 bp, SARS Virus
ggttatatctgcctcacaaaacgtg

SEQ ID NO: 167783 - DNA, 25 bp, SARS Virus
gttatatctgcaccacaaaacgtgc

SEQ ID NO: 167784 - DNA, 25 bp, SARS Virus
ttatatctgcatcacaaaacgtgct

SEQ ID NO: 167785 - DNA, 25 bp, SARS Virus
tatatctgcatcccaaaacgtgctt

SEQ ID NO: 167786 - DNA, 25 bp, SARS Virus
atatctgcatcacaaaacgtgcttc

SEQ ID NO: 167787 - DNA, 25 bp, SARS Virus
tatctgcatcaccaaacgtgcttca

SEQ ID NO: 167788 - DNA, 25 bp, SARS Virus
atctgcatcacacaacgtgcttcag

SEQ ID NO: 167789 - DNA, 25 bp, SARS Virus
tctgcatcacaacacgtgcttcaga

SEQ ID NO: 167790 - DNA, 25 bp, SARS Virus
ctgcatcacaaaccgtgcttcagat

SEQ ID NO: 167791 - DNA, 25 bp, SARS Virus
tgcatcacaaaacgtgcttcagatc

SEQ ID NO: 167792 - DNA, 25 bp, SARS Virus
gcatcacaaaacctgcttcagatcg

SEQ ID NO: 167793 - DNA, 25 bp, SARS Virus
catcacaaaacgcgcttcagatcgt

SEQ ID NO: 167794 - DNA, 25 bp, SARS Virus
atcacaaaacgtccttcagatcgta

SEQ ID NO: 167795 - DNA, 25 bp, SARS Virus
tcacaaaacgtgcttcagatcgtaa

SEQ ID NO: 167796 - DNA, 25 bp, SARS Virus
cacaaaacgtgcctcagatcgtaac

SEQ ID NO: 167797 - DNA, 25 bp, SARS Virus
acaaaacgtgctccagatcgtaact

SEQ ID NO: 167798 - DNA, 25 bp, SARS Virus
caaaacgtgcttcagatcgtaactg

SEQ ID NO: 167799 - DNA, 25 bp, SARS Virus
aaaacgtgcttccgatcgtaactgt

SEQ ID NO: 167800 - DNA, 25 bp, SARS Virus
aaacgtgcttcacatcgtaactgtt

SEQ ID NO: 167801 - DNA, 25 bp, SARS Virus
aacgtgcttcagctcgtaactgttg

SEQ ID NO: 167802 - DNA, 25 bp, SARS Virus
acgtgcttcagaccgtaactgttgt

SEQ ID NO: 167803 - DNA, 25 bp, SARS Virus
cgtgcttcagatcgtaactgttgtg

SEQ ID NO: 167804 - DNA, 25 bp, SARS Virus
gtgcttcagatcctaactgttgtga

SEQ ID NO: 167805 - DNA, 25 bp, SARS Virus
tgcttcagatcgcaactgttgtgag

SEQ ID NO: 167806 - DNA, 25 bp, SARS Virus
gcttcagatcgtcactgttgtgagt

SEQ ID NO: 167807 - DNA, 25 bp, SARS Virus
cttcagatcgtacctgttgtgagtt

SEQ ID NO: 167808 - DNA, 25 bp, SARS Virus
ttcagatcgtaactgttgtgagttc

SEQ ID NO: 167809 - DNA, 25 bp, SARS Virus
tcagatcgtaaccgttgtgagttca

SEQ ID NO: 167810 - DNA, 25 bp, SARS Virus
cagatcgtaactcttgtgagttcag

SEQ ID NO: 167811 - DNA, 25 bp, SARS Virus
agatcgtaactgctgtgagttcagt

SEQ ID NO: 167812 - DNA, 25 bp, SARS Virus
gatcgtaactgtcgtgagttcagta

SEQ ID NO: 167813 - DNA, 25 bp, SARS Virus
atcgtaactgttctgagttcagtat

SEQ ID NO: 167814 - DNA, 25 bp, SARS Virus
tcgtaactgttgcgagttcagtatt

SEQ ID NO: 167815 - DNA, 25 bp, SARS Virus
cgtaactgttgtcagttcagtatta

SEQ ID NO: 167816 - DNA, 25 bp, SARS Virus
gtaactgttgtgcgttcagtattaa

SEQ ID NO: 167817 - DNA, 25 bp, SARS Virus
taactgttgtgacttcagtattaat

SEQ ID NO: 167818 - DNA, 25 bp, SARS Virus
aactgttgtgagctcagtattaatc

SEQ ID NO: 167819 - DNA, 25 bp, SARS Virus
actgttgtgagtccagtattaatca

SEQ ID NO: 167820 - DNA, 25 bp, SARS Virus
ctgttgtgagttcagtattaatcat

SEQ ID NO: 167821 - DNA, 25 bp, SARS Virus
tgttgtgagttccgtattaatcatc

SEQ ID NO: 167822 - DNA, 25 bp, SARS Virus
gttgtgagttcactattaatcatcg

SEQ ID NO: 167823 - DNA, 25 bp, SARS Virus
ttgtgagttcagcattaatcatcgg

SEQ ID NO: 167824 - DNA, 25 bp, SARS Virus
tgtgagttcagtcttaatcatcggt

SEQ ID NO: 167825 - DNA, 25 bp, SARS Virus
gtgagttcagtactaatcatcggta

SEQ ID NO: 167826 - DNA, 25 bp, SARS Virus
tgagttcagtatcaatcatcggtat

SEQ ID NO: 167827 - DNA, 25 bp, SARS Virus
gagttcagtattcatcatcggtatc

SEQ ID NO: 167828 - DNA, 25 bp, SARS Virus
agttcagtattactcatcggtatct

SEQ ID NO: 167829 - DNA, 25 bp, SARS Virus
gttcagtattaaccatcggtatctc

SEQ ID NO: 167830 - DNA, 25 bp, SARS Virus
ttcagtattaatcatcggtatctct

SEQ ID NO: 167831 - DNA, 25 bp, SARS Virus
tcagtattaatcctcggtatctcta

SEQ ID NO: 167832 - DNA, 25 bp, SARS Virus
cagtattaatcaccggtatctctaa

SEQ ID NO: 167833 - DNA, 25 bp, SARS Virus
agtattaatcatcggtatctctaaa

SEQ ID NO: 167834 - DNA, 25 bp, SARS Virus
gtattaatcatccgtatctctaaag

SEQ ID NO: 167835 - DNA, 25 bp, SARS Virus
tattaatcatcgctatctctaaagt

SEQ ID NO: 167836 - DNA, 25 bp, SARS Virus
attaatcatcggcatctctaaagta

SEQ ID NO: 167837 - DNA, 25 bp, SARS Virus
ttaatcatcggtctctctaaagtag

SEQ ID NO: 167838 - DNA, 25 bp, SARS Virus
taatcatcggtacctctaaagtagt

SEQ ID NO: 167839 - DNA, 25 bp, SARS Virus
aatcatcggtatctctaaagtagtt

SEQ ID NO: 167840 - DNA, 25 bp, SARS Virus
atcatcggtatccctaaagtagttt

SEQ ID NO: 167841 - DNA, 25 bp, SARS Virus
tcatcggtatctctaaagtagtttc

SEQ ID NO: 167842 - DNA, 25 bp, SARS Virus
catcggtatctccaaagtagtttct

SEQ ID NO: 167843 - DNA, 25 bp, SARS Virus
atcggtatctctcaagtagtttctg

SEQ ID NO: 167844 - DNA, 25 bp, SARS Virus
tcggtatctctacagtagtttctga

SEQ ID NO: 167845 - DNA, 25 bp, SARS Virus
cggtatctctaacgtagtttctgat

SEQ ID NO: 167846 - DNA, 25 bp, SARS Virus
ggtatctctaaactagtttctgatg

SEQ ID NO: 167847 - DNA, 25 bp, SARS Virus
gtatctctaaagcagtttctgatgt

SEQ ID NO: 167848 - DNA, 25 bp, SARS Virus
tatctctaaagtcgtttctgatgtt

SEQ ID NO: 167849 - DNA, 25 bp, SARS Virus
atctctaaagtactttctgatgtta

SEQ ID NO: 167850 - DNA, 25 bp, SARS Virus
tctctaaagtagcttctgatgttac

SEQ ID NO: 167851 - DNA, 25 bp, SARS Virus
ctctaaagtagtctctgatgttaca

SEQ ID NO: 167852 - DNA, 25 bp, SARS Virus
tctaaagtagttcctgatgttacag

SEQ ID NO: 167853 - DNA, 25 bp, SARS Virus
ctaaagtagtttctgatgttacagt

SEQ ID NO: 167854 - DNA, 25 bp, SARS Virus
taaagtagtttccgatgttacagtc

SEQ ID NO: 167855 - DNA, 25 bp, SARS Virus
aaagtagtttctcatgttacagtcg

SEQ ID NO: 167856 - DNA, 25 bp, SARS Virus
aagtagtttctgctgttacagtcgt

SEQ ID NO: 167857 - DNA, 25 bp, SARS Virus
agtagtttctgacgttacagtcgtc

SEQ ID NO: 167858 - DNA, 25 bp, SARS Virus
gtagtttctgatcttacagtcgtca

SEQ ID NO: 167859 - DNA, 25 bp, SARS Virus
tagtttctgatgctacagtcgtcaa

SEQ ID NO: 167860 - DNA, 25 bp, SARS Virus
agtttctgatgtcacagtcgtcaac

SEQ ID NO: 167861 - DNA, 25 bp, SARS Virus
gtttctgatgttccagtcgtcaaca

SEQ ID NO: 167862 - DNA, 25 bp, SARS Virus
tttctgatgttacagtcgtcaacaa

SEQ ID NO: 167863 - DNA, 25 bp, SARS Virus
ttctgatgttaccgtcgtcaacaaa

SEQ ID NO: 167864 - DNA, 25 bp, SARS Virus
tctgatgttacactcgtcaacaaag

SEQ ID NO: 167865 - DNA, 25 bp, SARS Virus
ctgatgttacagccgtcaacaaaga

SEQ ID NO: 167866 - DNA, 25 bp, SARS Virus
tgatgttacagtcgtcaacaaagac

SEQ ID NO: 167867 - DNA, 25 bp, SARS Virus
gatgttacagtcctcaacaaagacc

SEQ ID NO: 167868 - DNA, 25 bp, SARS Virus
atgttacagtcgccaacaaagaccg

SEQ ID NO: 167869 - DNA, 25 bp, SARS Virus
tgttacagtcgtcaacaaagaccgt

SEQ ID NO: 167870 - DNA, 25 bp, SARS Virus
gttacagtcgtccacaaagaccgtt

SEQ ID NO: 167871 - DNA, 25 bp, SARS Virus
ttacagtcgtcaccaaagaccgtta

SEQ ID NO: 167872 - DNA, 25 bp, SARS Virus
tacagtcgtcaacaaagaccgttac

SEQ ID NO: 167873 - DNA, 25 bp, SARS Virus
acagtcgtcaaccaagaccgttacg

SEQ ID NO: 167874 - DNA, 25 bp, SARS Virus
cagtcgtcaacacagaccgttacgt

SEQ ID NO: 167875 - DNA, 25 bp, SARS Virus
agtcgtcaacaacgaccgttacgta

SEQ ID NO: 167876 - DNA, 25 bp, SARS Virus
gtcgtcaacaaacaccgttacgtaa

SEQ ID NO: 167877 - DNA, 25 bp, SARS Virus
tcgtcaacaaagcccgttacgtaaa

SEQ ID NO: 167878 - DNA, 25 bp, SARS Virus
cgtcaacaaagaccgttacgtaaat

SEQ ID NO: 167879 - DNA, 25 bp, SARS Virus
gtcaacaaagaccgttacgtaaatg

SEQ ID NO: 167880 - DNA, 25 bp, SARS Virus
tcaacaaagacccttacgtaaatgt

SEQ ID NO: 167881 - DNA, 25 bp, SARS Virus
caacaaagaccgctacgtaaatgtc

SEQ ID NO: 167882 - DNA, 25 bp, SARS Virus
aacaaagaccgtcacgtaaatgtca

SEQ ID NO: 167883 - DNA, 25 bp, SARS Virus
acaaagaccgttccgtaaatgtcac

SEQ ID NO: 167884 - DNA, 25 bp, SARS Virus
caaagaccgttacgtaaatgtcacg

SEQ ID NO: 167885 - DNA, 25 bp, SARS Virus
aaagaccgttacctaaatgtcacgt

SEQ ID NO: 167886 - DNA, 25 bp, SARS Virus
aagaccgttacgcaaatgtcacgtc

SEQ ID NO: 167887 - DNA, 25 bp, SARS Virus
agaccgttacgtcaatgtcacgtct

SEQ ID NO: 167888 - DNA, 25 bp, SARS Virus
gaccgttacgtacatgtcacgtctt

SEQ ID NO: 167889 - DNA, 25 bp, SARS Virus
accgttacgtaactgtcacgtcttt

SEQ ID NO: 167890 - DNA, 25 bp, SARS Virus
ccgttacgtaaacgtcacgtctttt

SEQ ID NO: 167891 - DNA, 25 bp, SARS Virus
cgttacgtaaatctcacgtcttttg

SEQ ID NO: 167892 - DNA, 25 bp, SARS Virus
gttacgtaaatgccacgtcttttgt

SEQ ID NO: 167893 - DNA, 25 bp, SARS Virus
ttacgtaaatgtcacgtcttttgta

SEQ ID NO: 167894 - DNA, 25 bp, SARS Virus
tacgtaaatgtcccgtcttttgtat

SEQ ID NO: 167895 - DNA, 25 bp, SARS Virus
acgtaaatgtcacgtcttttgtatg

SEQ ID NO: 167896 - DNA, 25 bp, SARS Virus
cgtaaatgtcacctcttttgtatga

SEQ ID NO: 167897 - DNA, 25 bp, SARS Virus
gtaaatgtcacgccttttgtatgac

SEQ ID NO: 167898 - DNA, 25 bp, SARS Virus
taaatgtcacgtcttttgtatgaca

SEQ ID NO: 167899 - DNA, 25 bp, SARS Virus
aaatgtcacgtcctttgtatgacaa

SEQ ID NO: 167900 - DNA, 25 bp, SARS Virus
aatgtcacgtctcttgtatgacaag

SEQ ID NO: 167901 - DNA, 25 bp, SARS Virus
atgtcacgtcttctgtatgacaaga

SEQ ID NO: 167902 - DNA, 25 bp, SARS Virus
tgtcacgtctttcgtatgacaagat

SEQ ID NO: 167903 - DNA, 25 bp, SARS Virus
gtcacgtcttttctatgacaagatc

SEQ ID NO: 167904 - DNA, 25 bp, SARS Virus
tcacgtcttttgcatgacaagatca

SEQ ID NO: 167905 - DNA, 25 bp, SARS Virus
gatgtcgcaagagacttaatattcc

SEQ ID NO: 167906 - DNA, 25 bp, SARS Virus
atgtcgcaagacgcttaatattcca

SEQ ID NO: 167907 - DNA, 25 bp, SARS Virus
tgtcgcaagacagttaatattccac

SEQ ID NO: 167908 - DNA, 25 bp, SARS Virus
gtcgcaagacacgtaatattccact

SEQ ID NO: 167909 - DNA, 25 bp, SARS Virus
tcgcaagacactgaatattccactc

SEQ ID NO: 167910 - DNA, 25 bp, SARS Virus
cgcaagacacttgatattccactct

SEQ ID NO: 167911 - DNA, 25 bp, SARS Virus
gcaagacacttagtattccactcta

SEQ ID NO: 167912 - DNA, 25 bp, SARS Virus
caagacacttaagattccactctat

SEQ ID NO: 167913 - DNA, 25 bp, SARS Virus
aagacacttaatgttccactctatt

SEQ ID NO: 167914 - DNA, 25 bp, SARS Virus
agacacttaatagtccactctattt

SEQ ID NO: 167915 - DNA, 25 bp, SARS Virus
gacacttaatatgccactctatttt

SEQ ID NO: 167916 - DNA, 25 bp, SARS Virus
acacttaatattgcactctattttt

SEQ ID NO: 167917 - DNA, 25 bp, SARS Virus
cacttaatattcgactctatttttg

SEQ ID NO: 167918 - DNA, 25 bp, SARS Virus
acttaatattccgctctatttttgt

SEQ ID NO: 167919 - DNA, 25 bp, SARS Virus
cttaatattccagtctatttttgtc

SEQ ID NO: 167920 - DNA, 25 bp, SARS Virus
ttaatattccacgctatttttgtcg

SEQ ID NO: 167921 - DNA, 25 bp, SARS Virus
taatattccactgtatttttgtcga

SEQ ID NO: 167922 - DNA, 25 bp, SARS Virus
aatattccactcgatttttgtcgaa

SEQ ID NO: 167923 - DNA, 25 bp, SARS Virus
atattccactctgtttttgtcgaaa

SEQ ID NO: 167924 - DNA, 25 bp, SARS Virus
tattccactctagttttgtcgaaaa

SEQ ID NO: 167925 - DNA, 25 bp, SARS Virus
attccactctatgtttgtcgaaaag

SEQ ID NO: 167926 - DNA, 25 bp, SARS Virus
ttccactctattgttgtcgaaaaga

SEQ ID NO: 167927 - DNA, 25 bp, SARS Virus
tccactctatttgtgtcgaaaagag

SEQ ID NO: 167928 - DNA, 25 bp, SARS Virus
ccactctattttggtcgaaaagagg

SEQ ID NO: 167929 - DNA, 25 bp, SARS Virus
cactctatttttgtcgaaaagaggt

SEQ ID NO: 167930 - DNA, 25 bp, SARS Virus
actctatttttggcgaaaagaggtt

SEQ ID NO: 167931 - DNA, 25 bp, SARS Virus
ctctatttttgtggaaaagaggttc

SEQ ID NO: 167932 - DNA, 25 bp, SARS Virus
tctatttttgtcgaaaagaggttcg

SEQ ID NO: 167933 - DNA, 25 bp, SARS Virus
ctatttttgtcggaaagaggttcgt

SEQ ID NO: 167934 - DNA, 25 bp, SARS Virus
tatttttgtcgagaagaggttcgtc

SEQ ID NO: 167935 - DNA, 25 bp, SARS Virus
atttttgtcgaagagaggttcgtcc

SEQ ID NO: 167936 - DNA, 25 bp, SARS Virus
tttttgtcgaaaggaggttcgtcct

SEQ ID NO: 167937 - DNA, 25 bp, SARS Virus
ttttgtcgaaaagaggttcgtccta

SEQ ID NO: 167938 - DNA, 25 bp, SARS Virus
tttgtcgaaaaggggttcgtcctaa

SEQ ID NO: 167939 - DNA, 25 bp, SARS Virus
ttgtcgaaaagaggttcgtcctaac

SEQ ID NO: 167940 - DNA, 25 bp, SARS Virus
tgtcgaaaagaggttcgtcctaacg

SEQ ID NO: 167941 - DNA, 25 bp, SARS Virus
gtcgaaaagagggtcgtcctaacgc

SEQ ID NO: 167942 - DNA, 25 bp, SARS Virus
tcgaaaagaggtgcgtcctaacgca

SEQ ID NO: 167943 - DNA, 25 bp, SARS Virus
cgaaaagaggttggtcctaacgcac

SEQ ID NO: 167944 - DNA, 25 bp, SARS Virus
gaaaagaggttcgtcctaacgcaca

SEQ ID NO: 167945 - DNA, 25 bp, SARS Virus
aaaagaggttcggcctaacgcacat

SEQ ID NO: 167946 - DNA, 25 bp, SARS Virus
aaagaggttcgtgctaacgcacatt

SEQ ID NO: 167947 - DNA, 25 bp, SARS Virus
aagaggttcgtcgtaacgcacattc

SEQ ID NO: 167948 - DNA, 25 bp, SARS Virus
agaggttcgtccgaacgcacattct

SEQ ID NO: 167949 - DNA, 25 bp, SARS Virus
gaggttcgtcctgacgcacattctt

SEQ ID NO: 167950 - DNA, 25 bp, SARS Virus
aggttcgtcctagcgcacattcttt

SEQ ID NO: 167951 - DNA, 25 bp, SARS Virus
ggttcgtcctaaggcacattcttta

SEQ ID NO: 167952 - DNA, 25 bp, SARS Virus
gttcgtcctaacgcacattctttaa

SEQ ID NO: 167953 - DNA, 25 bp, SARS Virus
ttcgtcctaacggacattctttaag

SEQ ID NO: 167954 - DNA, 25 bp, SARS Virus
tcgtcctaacgcgcattctttaaga

SEQ ID NO: 167955 - DNA, 25 bp, SARS Virus
cgtcctaacgcagattctttaagag

SEQ ID NO: 167956 - DNA, 25 bp, SARS Virus
gtcctaacgcacgttctttaagaga

SEQ ID NO: 167957 - DNA, 25 bp, SARS Virus
tcctaacgcacagtctttaagagaa

SEQ ID NO: 167958 - DNA, 25 bp, SARS Virus
cctaacgcacatgctttaagagaat

SEQ ID NO: 167959 - DNA, 25 bp, SARS Virus
ctaacgcacattgtttaagagaatg

SEQ ID NO: 167960 - DNA, 25 bp, SARS Virus
taacgcacattcgttaagagaatgt

SEQ ID NO: 167961 - DNA, 25 bp, SARS Virus
aacgcacattctgtaagagaatgtt

SEQ ID NO: 167962 - DNA, 25 bp, SARS Virus
acgcacattcttgaagagaatgttg

SEQ ID NO: 167963 - DNA, 25 bp, SARS Virus
cgcacattctttgagagaatgttgc

SEQ ID NO: 167964 - DNA, 25 bp, SARS Virus
gcacattctttaggagaatgttgcg

SEQ ID NO: 167965 - DNA, 25 bp, SARS Virus
cacattctttaagagaatgttgcgg

SEQ ID NO: 167966 - DNA, 25 bp, SARS Virus
acattctttaagggaatgttgcgga

SEQ ID NO: 167967 - DNA, 25 bp, SARS Virus
cattctttaagagaatgttgcggat

SEQ ID NO: 167968 - DNA, 25 bp, SARS Virus
attctttaagaggatgttgcggata

SEQ ID NO: 167969 - DNA, 25 bp, SARS Virus
ttctttaagagagtgttgcggataa

SEQ ID NO: 167970 - DNA, 25 bp, SARS Virus
tctttaagagaaggttgcggataaa

SEQ ID NO: 167971 - DNA, 25 bp, SARS Virus
ctttaagagaatgttgcggataaac

SEQ ID NO: 167972 - DNA, 25 bp, SARS Virus
tttaagagaatggtgcggataaact

SEQ ID NO: 167973 - DNA, 25 bp, SARS Virus
ttaagagaatgtggcggataaactc

SEQ ID NO: 167974 - DNA, 25 bp, SARS Virus
taagagaatgttgcggataaactcc

SEQ ID NO: 167975 - DNA, 25 bp, SARS Virus
aagagaatgttggggataaactcca

SEQ ID NO: 167976 - DNA, 25 bp, SARS Virus
agagaatgttgcggataaactccag

SEQ ID NO: 167977 - DNA, 25 bp, SARS Virus
gagaatgttgcggataaactccaga

SEQ ID NO: 167978 - DNA, 25 bp, SARS Virus
agaatgttgcgggtaaactccagac

SEQ ID NO: 167979 - DNA, 25 bp, SARS Virus
gaatgttgcggagaaactccagaca

SEQ ID NO: 167980 - DNA, 25 bp, SARS Virus
aatgttgcggatgaactccagacaa

SEQ ID NO: 167981 - DNA, 25 bp, SARS Virus
atgttgcggatagactccagacaac

SEQ ID NO: 167982 - DNA, 25 bp, SARS Virus
tgttgcggataagctccagacaact

SEQ ID NO: 167983 - DNA, 25 bp, SARS Virus
gttgcggataaagtccagacaacta

SEQ ID NO: 167984 - DNA, 25 bp, SARS Virus
ttgcggataaacgccagacaactaa

SEQ ID NO: 167985 - DNA, 25 bp, SARS Virus
tgcggataaactgcagacaactaac

SEQ ID NO: 167986 - DNA, 25 bp, SARS Virus
gcggataaactcgagacaactaacg

SEQ ID NO: 167987 - DNA, 25 bp, SARS Virus
cggataaactccggacaactaacgt

SEQ ID NO: 167988 - DNA, 25 bp, SARS Virus
ggataaactccagacaactaacgtc

SEQ ID NO: 167989 - DNA, 25 bp, SARS Virus
gataaactccaggcaactaacgtct

SEQ ID NO: 167990 - DNA, 25 bp, SARS Virus
ataaactccagagaactaacgtcta

SEQ ID NO: 167991 - DNA, 25 bp, SARS Virus
taaactccagacgactaacgtctac

SEQ ID NO: 167992 - DNA, 25 bp, SARS Virus
aaactccagacagctaacgtctact

SEQ ID NO: 167993 - DNA, 25 bp, SARS Virus
aactccagacaagtaacgtctactt

SEQ ID NO: 167994 - DNA, 25 bp, SARS Virus
actccagacaacgaacgtctacttt

SEQ ID NO: 167995 - DNA, 25 bp, SARS Virus
ctccagacaactgacgtctactttg

SEQ ID NO: 167996 - DNA, 25 bp, SARS Virus
tccagacaactagcgtctactttgt

SEQ ID NO: 167997 - DNA, 25 bp, SARS Virus
ccagacaactaaggtctactttgta

SEQ ID NO: 167998 - DNA, 25 bp, SARS Virus
cagacaactaacgtctactttgtag

SEQ ID NO: 167999 - DNA, 25 bp, SARS Virus
agacaactaacggctactttgtagt

SEQ ID NO: 168000 - DNA, 25 bp, SARS Virus
gacaactaacgtgtactttgtagta

SEQ ID NO: 168001 - DNA, 25 bp, SARS Virus
acaactaacgtcgactttgtagtac

SEQ ID NO: 168002 - DNA, 25 bp, SARS Virus
caactaacgtctgctttgtagtaca

SEQ ID NO: 168003 - DNA, 25 bp, SARS Virus
aactaacgtctagtttgtagtacac

SEQ ID NO: 168004 - DNA, 25 bp, SARS Virus
actaacgtctacgttgtagtacaca

SEQ ID NO: 168005 - DNA, 25 bp, SARS Virus
ctaacgtctactgtgtagtacacat

SEQ ID NO: 168006 - DNA, 25 bp, SARS Virus
taacgtctacttggtagtacacatt

SEQ ID NO: 168007 - DNA, 25 bp, SARS Virus
aacgtctactttgtagtacacatta

SEQ ID NO: 168008 - DNA, 25 bp, SARS Virus
acgtctactttggagtacacattat

SEQ ID NO: 168009 - DNA, 25 bp, SARS Virus
cgtctactttgtggtacacattatt

SEQ ID NO: 168010 - DNA, 25 bp, SARS Virus
gtctactttgtagtacacattattg

SEQ ID NO: 168011 - DNA, 25 bp, SARS Virus
tctactttgtaggacacattattgt

SEQ ID NO: 168012 - DNA, 25 bp, SARS Virus
ctactttgtagtgcacattattgtg

SEQ ID NO: 168013 - DNA, 25 bp, SARS Virus
tactttgtagtagacattattgtgg

SEQ ID NO: 168014 - DNA, 25 bp, SARS Virus
actttgtagtacgcattattgtgga

SEQ ID NO: 168015 - DNA, 25 bp, SARS Virus
ctttgtagtacagattattgtggaa

SEQ ID NO: 168016 - DNA, 25 bp, SARS Virus
tttgtagtacacgttattgtggaaa

SEQ ID NO: 168017 - DNA, 25 bp, SARS Virus
ttgtagtacacagtattgtggaaac

SEQ ID NO: 168018 - DNA, 25 bp, SARS Virus
tgtagtacacatgattgtggaaaca

SEQ ID NO: 168019 - DNA, 25 bp, SARS Virus
gtagtacacattgttgtggaaacat

SEQ ID NO: 168020 - DNA, 25 bp, SARS Virus
tagtacacattagtgtggaaacatc

SEQ ID NO: 168021 - DNA, 25 bp, SARS Virus
agtacacattatggtggaaacatct

SEQ ID NO: 168022 - DNA, 25 bp, SARS Virus
gtacacattattgtggaaacatctt

SEQ ID NO: 168023 - DNA, 25 bp, SARS Virus
tacacattattggggaaacatcttg

SEQ ID NO: 168024 - DNA, 25 bp, SARS Virus
acacattattgtggaaacatcttgt

SEQ ID NO: 168025 - DNA, 25 bp, SARS Virus
cacattattgtggaaacatcttgta

SEQ ID NO: 168026 - DNA, 25 bp, SARS Virus
acattattgtgggaacatcttgtaa

SEQ ID NO: 168027 - DNA, 25 bp, SARS Virus
cattattgtggagacatcttgtaaa

SEQ ID NO: 168028 - DNA, 25 bp, SARS Virus
attattgtggaagcatcttgtaaaa

SEQ ID NO: 168029 - DNA, 25 bp, SARS Virus
ttattgtggaaagatcttgtaaaac

SEQ ID NO: 168030 - DNA, 25 bp, SARS Virus
tattgtggaaacgtcttgtaaaact

SEQ ID NO: 168031 - DNA, 25 bp, SARS Virus
attgtggaaacagcttgtaaaactt

SEQ ID NO: 168032 - DNA, 25 bp, SARS Virus
ttgtggaaacatgttgtaaaacttc

SEQ ID NO: 168033 - DNA, 25 bp, SARS Virus
tgtggaaacatcgtgtaaaacttcg

SEQ ID NO: 168034 - DNA, 25 bp, SARS Virus
gtggaaacatctggtaaaacttcgt

SEQ ID NO: 168035 - DNA, 25 bp, SARS Virus
tggaaacatcttgtaaaacttcgta

SEQ ID NO: 168036 - DNA, 25 bp, SARS Virus
ggaaacatcttggaaaacttcgtaa

SEQ ID NO: 168037 - DNA, 25 bp, SARS Virus
gaaacatcttgtgaaacttcgtaac

SEQ ID NO: 168038 - DNA, 25 bp, SARS Virus
aaacatcttgtagaacttcgtaact

SEQ ID NO: 168039 - DNA, 25 bp, SARS Virus
aacatcttgtaagacttcgtaactc

SEQ ID NO: 168040 - DNA, 25 bp, SARS Virus
acatcttgtaaagcttcgtaactcg

SEQ ID NO: 168041 - DNA, 25 bp, SARS Virus
catcttgtaaaagttcgtaactcga

SEQ ID NO: 168042 - DNA, 25 bp, SARS Virus
atcttgtaaaacgtcgtaactcgac

SEQ ID NO: 168043 - DNA, 25 bp, SARS Virus
tcttgtaaaactgcgtaactcgact

SEQ ID NO: 168044 - DNA, 25 bp, SARS Virus
cttgtaaaacttggtaactcgactg

SEQ ID NO: 168045 - DNA, 25 bp, SARS Virus
ttgtaaaacttcgtaactcgactga

SEQ ID NO: 168046 - DNA, 25 bp, SARS Virus
tgtaaaacttcggaactcgactgaa

SEQ ID NO: 168047 - DNA, 25 bp, SARS Virus
gtaaaacttcgtgactcgactgaat

SEQ ID NO: 168048 - DNA, 25 bp, SARS Virus
taaaacttcgtagctcgactgaata

SEQ ID NO: 168049 - DNA, 25 bp, SARS Virus
aaaacttcgtaagtcgactgaatag

SEQ ID NO: 168050 - DNA, 25 bp, SARS Virus
aaacttcgtaacgcgactgaatagg

SEQ ID NO: 168051 - DNA, 25 bp, SARS Virus
aacttcgtaactggactgaatagga

SEQ ID NO: 168052 - DNA, 25 bp, SARS Virus
acttcgtaactcgactgaataggaa

SEQ ID NO: 168053 - DNA, 25 bp, SARS Virus
cttcgtaactcggctgaataggaac

SEQ ID NO: 168054 - DNA, 25 bp, SARS Virus
ttcgtaactcgagtgaataggaaca

SEQ ID NO: 168055 - DNA, 25 bp, SARS Virus
tcgtaactcgacggaataggaacac

SEQ ID NO: 168056 - DNA, 25 bp, SARS Virus
cgtaactcgactgaataggaacaca

SEQ ID NO: 168057 - DNA, 25 bp, SARS Virus
gtaactcgactggataggaacacac

SEQ ID NO: 168058 - DNA, 25 bp, SARS Virus
taactcgactgagtaggaacacacg

SEQ ID NO: 168059 - DNA, 25 bp, SARS Virus
aactcgactgaagaggaacacacga

SEQ ID NO: 168060 - DNA, 25 bp, SARS Virus
actcgactgaatgggaacacacgaa

SEQ ID NO: 168061 - DNA, 25 bp, SARS Virus
ctcgactgaataggaacacacgaaa

SEQ ID NO: 168062 - DNA, 25 bp, SARS Virus
tcgactgaataggaacacacgaaaa

SEQ ID NO: 168063 - DNA, 25 bp, SARS Virus
cgactgaatagggacacacgaaaat

SEQ ID NO: 168064 - DNA, 25 bp, SARS Virus
gactgaataggagcacacgaaaatc

SEQ ID NO: 168065 - DNA, 25 bp, SARS Virus
actgaataggaagacacgaaaatcg

SEQ ID NO: 168066 - DNA, 25 bp, SARS Virus
ctgaataggaacgcacgaaaatcga

SEQ ID NO: 168067 - DNA, 25 bp, SARS Virus
tgaataggaacagacgaaaatcgaa

SEQ ID NO: 168068 - DNA, 25 bp, SARS Virus
gaataggaacacgcgaaaatcgaat

SEQ ID NO: 168069 - DNA, 25 bp, SARS Virus
aataggaacacaggaaaatcgaata

SEQ ID NO: 168070 - DNA, 25 bp, SARS Virus
ataggaacacacgaaaatcgaataa

SEQ ID NO: 168071 - DNA, 25 bp, SARS Virus
taggaacacacggaaatcgaataac

SEQ ID NO: 168072 - DNA, 25 bp, SARS Virus
aggaacacacgagaatcgaataaca

SEQ ID NO: 168073 - DNA, 25 bp, SARS Virus
ggaacacacgaagatcgaataacag

SEQ ID NO: 168074 - DNA, 25 bp, SARS Virus
gaacacacgaaagtcgaataacagt

SEQ ID NO: 168075 - DNA, 25 bp, SARS Virus
aacacacgaaaagcgaataacagta

SEQ ID NO: 168076 - DNA, 25 bp, SARS Virus
acacacgaaaatggaataacagtat

SEQ ID NO: 168077 - DNA, 25 bp, SARS Virus
cacacgaaaatcgaataacagtatt

SEQ ID NO: 168078 - DNA, 25 bp, SARS Virus
acacgaaaatcggataacagtattt

SEQ ID NO: 168079 - DNA, 25 bp, SARS Virus
cacgaaaatcgagtaacagtatttg

SEQ ID NO: 168080 - DNA, 25 bp, SARS Virus
acgaaaatcgaagaacagtatttga

SEQ ID NO: 168081 - DNA, 25 bp, SARS Virus
cgaaaatcgaatgacagtatttgat

SEQ ID NO: 168082 - DNA, 25 bp, SARS Virus
gaaaatcgaatagcagtatttgatt

SEQ ID NO: 168083 - DNA, 25 bp, SARS Virus
aaaatcgaataagagtatttgattt

SEQ ID NO: 168084 - DNA, 25 bp, SARS Virus
aaatcgaataacggtatttgatttc

SEQ ID NO: 168085 - DNA, 25 bp, SARS Virus
aatcgaataacagtatttgatttcg

SEQ ID NO: 168086 - DNA, 25 bp, SARS Virus
atcgaataacaggatttgatttcgt

SEQ ID NO: 168087 - DNA, 25 bp, SARS Virus
tcgaataacagtgtttgatttcgtg

SEQ ID NO: 168088 - DNA, 25 bp, SARS Virus
cgaataacagtagttgatttcgtga

SEQ ID NO: 168089 - DNA, 25 bp, SARS Virus
gaataacagtatgtgatttcgtgag

SEQ ID NO: 168090 - DNA, 25 bp, SARS Virus
aataacagtattggatttcgtgagt

SEQ ID NO: 168091 - DNA, 25 bp, SARS Virus
ataacagtatttgatttcgtgagtg

SEQ ID NO: 168092 - DNA, 25 bp, SARS Virus
taacagtatttggtttcgtgagtgt

SEQ ID NO: 168093 - DNA, 25 bp, SARS Virus
aacagtatttgagttcgtgagtgtc

SEQ ID NO: 168094 - DNA, 25 bp, SARS Virus
acagtatttgatgtcgtgagtgtca

SEQ ID NO: 168095 - DNA, 25 bp, SARS Virus
cagtatttgattgcgtgagtgtcac

SEQ ID NO: 168096 - DNA, 25 bp, SARS Virus
agtatttgatttggtgagtgtcaca

SEQ ID NO: 168097 - DNA, 25 bp, SARS Virus
gtatttgatttcgtgagtgtcacag

SEQ ID NO: 168098 - DNA, 25 bp, SARS Virus
tatttgatttcgggagtgtcacagt

SEQ ID NO: 168099 - DNA, 25 bp, SARS Virus
atttgatttcgtgagtgtcacagtt

SEQ ID NO: 168100 - DNA, 25 bp, SARS Virus
tttgatttcgtgggtgtcacagttg

SEQ ID NO: 168101 - DNA, 25 bp, SARS Virus
ttgatttcgtgagtgtcacagttgt

SEQ ID NO: 168102 - DNA, 25 bp, SARS Virus
tgatttcgtgagggtcacagttgtt

SEQ ID NO: 168103 - DNA, 25 bp, SARS Virus
gatttcgtgagtgtcacagttgtta

SEQ ID NO: 168104 - DNA, 25 bp, SARS Virus
atttcgtgagtggcacagttgttaa

SEQ ID NO: 168105 - DNA, 25 bp, SARS Virus
tttcgtgagtgtgacagttgttaaa

SEQ ID NO: 168106 - DNA, 25 bp, SARS Virus
ttcgtgagtgtcgcagttgttaaag

SEQ ID NO: 168107 - DNA, 25 bp, SARS Virus
tcgtgagtgtcagagttgttaaagt

SEQ ID NO: 168108 - DNA, 25 bp, SARS Virus
cgtgagtgtcacggttgttaaagtc

SEQ ID NO: 168109 - DNA, 25 bp, SARS Virus
gtgagtgtcacagttgttaaagtcg

SEQ ID NO: 168110 - DNA, 25 bp, SARS Virus
tgagtgtcacaggtgttaaagtcgt

SEQ ID NO: 168111 - DNA, 25 bp, SARS Virus
gagtgtcacagtggttaaagtcgtc

SEQ ID NO: 168112 - DNA, 25 bp, SARS Virus
agtgtcacagttgttaaagtcgtcc

SEQ ID NO: 168113 - DNA, 25 bp, SARS Virus
gtgtcacagttggtaaagtcgtcct

SEQ ID NO: 168114 - DNA, 25 bp, SARS Virus
tgtcacagttgtgaaagtcgtcctg

SEQ ID NO: 168115 - DNA, 25 bp, SARS Virus
gtcacagttgttgaagtcgtcctgt

SEQ ID NO: 168116 - DNA, 25 bp, SARS Virus
tcacagttgttagagtcgtcctgtt

SEQ ID NO: 168117 - DNA, 25 bp, SARS Virus
cacagttgttaaggtcgtcctgttg

SEQ ID NO: 168118 - DNA, 25 bp, SARS Virus
acagttgttaaagtcgtcctgttgc

SEQ ID NO: 168119 - DNA, 25 bp, SARS Virus
cagttgttaaaggcgtcctgttgcc

SEQ ID NO: 168120 - DNA, 25 bp, SARS Virus
agttgttaaagtggtcctgttgccg

SEQ ID NO: 168121 - DNA, 25 bp, SARS Virus
gttgttaaagtcgtcctgttgccgc

SEQ ID NO: 168122 - DNA, 25 bp, SARS Virus
ttgttaaagtcggcctgttgccgct

SEQ ID NO: 168123 - DNA, 25 bp, SARS Virus
tgttaaagtcgtgctgttgccgctg

SEQ ID NO: 168124 - DNA, 25 bp, SARS Virus
gttaaagtcgtcgtgttgccgctgt

SEQ ID NO: 168125 - DNA, 25 bp, SARS Virus
ttaaagtcgtccggttgccgctgtt

SEQ ID NO: 168126 - DNA, 25 bp, SARS Virus
taaagtcgtcctgttgccgctgttc

SEQ ID NO: 168127 - DNA, 25 bp, SARS Virus
aaagtcgtcctggtgccgctgttca

SEQ ID NO: 168128 - DNA, 25 bp, SARS Virus
aagtcgtcctgtggccgctgttcaa

SEQ ID NO: 168129 - DNA, 25 bp, SARS Virus
agtcgtcctgttgccgctgttcaag

SEQ ID NO: 168130 - DNA, 25 bp, SARS Virus
gtcgtcctgttggcgctgttcaagg

SEQ ID NO: 168131 - DNA, 25 bp, SARS Virus
tcgtcctgttgcggctgttcaaggt

SEQ ID NO: 168132 - DNA, 25 bp, SARS Virus
cgtcctgttgccgctgttcaaggtt

SEQ ID NO: 168133 - DNA, 25 bp, SARS Virus
gtcctgttgccggtgttcaaggttc

SEQ ID NO: 168134 - DNA, 25 bp, SARS Virus
tcctgttgccgcggttcaaggttcc

SEQ ID NO: 168135 - DNA, 25 bp, SARS Virus
cctgttgccgctgttcaaggttcct

SEQ ID NO: 168136 - DNA, 25 bp, SARS Virus
ctgttgccgctggtcaaggttcctt

SEQ ID NO: 168137 - DNA, 25 bp, SARS Virus
tgttgccgctgtgcaaggttccttg

SEQ ID NO: 168138 - DNA, 25 bp, SARS Virus
gttgccgctgttgaaggttccttgt

SEQ ID NO: 168139 - DNA, 25 bp, SARS Virus
ttgccgctgttcgaggttccttgta

SEQ ID NO: 168140 - DNA, 25 bp, SARS Virus
tgccgctgttcagggttccttgtac

SEQ ID NO: 168141 - DNA, 25 bp, SARS Virus
gccgctgttcaaggttccttgtaca

SEQ ID NO: 168142 - DNA, 25 bp, SARS Virus
ccgctgttcaaggttccttgtacag

SEQ ID NO: 168143 - DNA, 25 bp, SARS Virus
cgctgttcaagggtccttgtacaga

SEQ ID NO: 168144 - DNA, 25 bp, SARS Virus
gctgttcaaggtgccttgtacagac

SEQ ID NO: 168145 - DNA, 25 bp, SARS Virus
ctgttcaaggttgcttgtacagacc

SEQ ID NO: 168146 - DNA, 25 bp, SARS Virus
tgttcaaggttcgttgtacagacct

SEQ ID NO: 168147 - DNA, 25 bp, SARS Virus
gttcaaggttccgtgtacagacctg

SEQ ID NO: 168148 - DNA, 25 bp, SARS Virus
ttcaaggttcctggtacagacctgg

SEQ ID NO: 168149 - DNA, 25 bp, SARS Virus
tcaaggttccttgtacagacctgga

SEQ ID NO: 168150 - DNA, 25 bp, SARS Virus
caaggttccttggacagacctggat

SEQ ID NO: 168151 - DNA, 25 bp, SARS Virus
aaggttccttgtgcagacctggata

SEQ ID NO: 168152 - DNA, 25 bp, SARS Virus
aggttccttgtagagacctggataa

SEQ ID NO: 168153 - DNA, 25 bp, SARS Virus
ggttccttgtacggacctggataac

SEQ ID NO: 168154 - DNA, 25 bp, SARS Virus
gttccttgtacagacctggataaca

SEQ ID NO: 168155 - DNA, 25 bp, SARS Virus
ttccttgtacaggcctggataacaa

SEQ ID NO: 168156 - DNA, 25 bp, SARS Virus
tccttgtacagagctggataacaaa

SEQ ID NO: 168157 - DNA, 25 bp, SARS Virus
ccttgtacagacgtggataacaaaa

SEQ ID NO: 168158 - DNA, 25 bp, SARS Virus
cttgtacagaccgggataacaaaag

SEQ ID NO: 168159 - DNA, 25 bp, SARS Virus
ttgtacagacctggataacaaaagt

SEQ ID NO: 168160 - DNA, 25 bp, SARS Virus
tgtacagacctggataacaaaagta

SEQ ID NO: 168161 - DNA, 25 bp, SARS Virus
gtacagacctgggtaacaaaagtat

SEQ ID NO: 168162 - DNA, 25 bp, SARS Virus
tacagacctggagaacaaaagtatt

SEQ ID NO: 168163 - DNA, 25 bp, SARS Virus
acagacctggatgacaaaagtattc

SEQ ID NO: 168164 - DNA, 25 bp, SARS Virus
cagacctggatagcaaaagtattca

SEQ ID NO: 168165 - DNA, 25 bp, SARS Virus
agacctggataagaaaagtattcag

SEQ ID NO: 168166 - DNA, 25 bp, SARS Virus
gacctggataacgaaagtattcaga

SEQ ID NO: 168167 - DNA, 25 bp, SARS Virus
acctggataacagaagtattcagac

SEQ ID NO: 168168 - DNA, 25 bp, SARS Virus
cctggataacaagagtattcagacg

SEQ ID NO: 168169 - DNA, 25 bp, SARS Virus
ctggataacaaaggtattcagacgt

SEQ ID NO: 168170 - DNA, 25 bp, SARS Virus
tggataacaaaagtattcagacgtg

SEQ ID NO: 168171 - DNA, 25 bp, SARS Virus
ggataacaaaaggattcagacgtgt

SEQ ID NO: 168172 - DNA, 25 bp, SARS Virus
gataacaaaagtgttcagacgtgtg

SEQ ID NO: 168173 - DNA, 25 bp, SARS Virus
ataacaaaagtagtcagacgtgtga

SEQ ID NO: 168174 - DNA, 25 bp, SARS Virus
taacaaaagtatgcagacgtgtgac

SEQ ID NO: 168175 - DNA, 25 bp, SARS Virus
aacaaaagtattgagacgtgtgact

SEQ ID NO: 168176 - DNA, 25 bp, SARS Virus
acaaaagtattcggacgtgtgactt

SEQ ID NO: 168177 - DNA, 25 bp, SARS Virus
caaaagtattcagacgtgtgactta

SEQ ID NO: 168178 - DNA, 25 bp, SARS Virus
aaaagtattcaggcgtgtgacttaa

SEQ ID NO: 168179 - DNA, 25 bp, SARS Virus
aaagtattcagaggtgtgacttaat

SEQ ID NO: 168180 - DNA, 25 bp, SARS Virus
aagtattcagacgtgtgacttaatt

SEQ ID NO: 168181 - DNA, 25 bp, SARS Virus
agtattcagacgggtgacttaattt

SEQ ID NO: 168182 - DNA, 25 bp, SARS Virus
gtattcagacgtgtgacttaatttt

SEQ ID NO: 168183 - DNA, 25 bp, SARS Virus
tattcagacgtgggacttaatttta

SEQ ID NO: 168184 - DNA, 25 bp, SARS Virus
attcagacgtgtgacttaattttat

SEQ ID NO: 168185 - DNA, 25 bp, SARS Virus
ttcagacgtgtggcttaattttata

SEQ ID NO: 168186 - DNA, 25 bp, SARS Virus
tcagacgtgtgagttaattttataa

SEQ ID NO: 168187 - DNA, 25 bp, SARS Virus
cagacgtgtgacgtaattttataag

SEQ ID NO: 168188 - DNA, 25 bp, SARS Virus
agacgtgtgactgaattttataaga

SEQ ID NO: 168189 - DNA, 25 bp, SARS Virus
gacgtgtgacttgattttataagac

SEQ ID NO: 168190 - DNA, 25 bp, SARS Virus
acgtgtgacttagttttataagacc

SEQ ID NO: 168191 - DNA, 25 bp, SARS Virus
cgtgtgacttaagtttataagacca

SEQ ID NO: 168192 - DNA, 25 bp, SARS Virus
gtgtgacttaatgttataagaccaa

SEQ ID NO: 168193 - DNA, 25 bp, SARS Virus
tgtgacttaattgtataagaccaag

SEQ ID NO: 168194 - DNA, 25 bp, SARS Virus
gtgacttaatttgataagaccaaga

SEQ ID NO: 168195 - DNA, 25 bp, SARS Virus
tgacttaattttgtaagaccaagat

SEQ ID NO: 168196 - DNA, 25 bp, SARS Virus
gacttaattttagaagaccaagatc

SEQ ID NO: 168197 - DNA, 25 bp, SARS Virus
acttaattttatgagaccaagatca

SEQ ID NO: 168198 - DNA, 25 bp, SARS Virus
cttaattttataggaccaagatcac

SEQ ID NO: 168199 - DNA, 25 bp, SARS Virus
ttaattttataagaccaagatcaca

SEQ ID NO: 168200 - DNA, 25 bp, SARS Virus
taattttataaggccaagatcacac

SEQ ID NO: 168201 - DNA, 25 bp, SARS Virus
aattttataagagcaagatcacacg

SEQ ID NO: 168202 - DNA, 25 bp, SARS Virus
attttataagacgaagatcacacgg

SEQ ID NO: 168203 - DNA, 25 bp, SARS Virus
ttttataagaccgagatcacacgga

SEQ ID NO: 168204 - DNA, 25 bp, SARS Virus
tttataagaccaggatcacacggaa

SEQ ID NO: 168205 - DNA, 25 bp, SARS Virus
ttataagaccaagatcacacggaaa

SEQ ID NO: 168206 - DNA, 25 bp, SARS Virus
tataagaccaaggtcacacggaaat

SEQ ID NO: 168207 - DNA, 25 bp, SARS Virus
ataagaccaagagcacacggaaatc

SEQ ID NO: 168208 - DNA, 25 bp, SARS Virus
taagaccaagatgacacggaaatca

SEQ ID NO: 168209 - DNA, 25 bp, SARS Virus
aagaccaagatcgcacggaaatcag

SEQ ID NO: 168210 - DNA, 25 bp, SARS Virus
agaccaagatcagacggaaatcagt

SEQ ID NO: 168211 - DNA, 25 bp, SARS Virus
gaccaagatcacgcggaaatcagtc

SEQ ID NO: 168212 - DNA, 25 bp, SARS Virus
accaagatcacagggaaatcagtcg

SEQ ID NO: 168213 - DNA, 25 bp, SARS Virus
ccaagatcacacggaaatcagtcgt

SEQ ID NO: 168214 - DNA, 25 bp, SARS Virus
caagatcacacggaaatcagtcgtt

SEQ ID NO: 168215 - DNA, 25 bp, SARS Virus
aagatcacacgggaatcagtcgtta

SEQ ID NO: 168216 - DNA, 25 bp, SARS Virus
agatcacacggagatcagtcgttac

SEQ ID NO: 168217 - DNA, 25 bp, SARS Virus
gatcacacggaagtcagtcgttaca

SEQ ID NO: 168218 - DNA, 25 bp, SARS Virus
atcacacggaaagcagtcgttacac

SEQ ID NO: 168219 - DNA, 25 bp, SARS Virus
tcacacggaaatgagtcgttacacg

SEQ ID NO: 168220 - DNA, 25 bp, SARS Virus
cacacggaaatcggtcgttacacgc

SEQ ID NO: 168221 - DNA, 25 bp, SARS Virus
acacggaaatcagtcgttacacgcc

SEQ ID NO: 168222 - DNA, 25 bp, SARS Virus
cacggaaatcaggcgttacacgccc

SEQ ID NO: 168223 - DNA, 25 bp, SARS Virus
acggaaatcagtggttacacgcccc

SEQ ID NO: 168224 - DNA, 25 bp, SARS Virus
cggaaatcagtcgttacacgccccc

SEQ ID NO: 168225 - DNA, 25 bp, SARS Virus
ggaaatcagtcggtacacgcccccc

SEQ ID NO: 168226 - DNA, 25 bp, SARS Virus
gaaatcagtcgtgacacgccccccg

SEQ ID NO: 168227 - DNA, 25 bp, SARS Virus
aaatcagtcgttgcacgccccccga

SEQ ID NO: 168228 - DNA, 25 bp, SARS Virus
aatcagtcgttagacgccccccgac

SEQ ID NO: 168229 - DNA, 25 bp, SARS Virus
atcagtcgttacgcgccccccgacc

SEQ ID NO: 168230 - DNA, 25 bp, SARS Virus
tcagtcgttacaggccccccgacca

SEQ ID NO: 168231 - DNA, 25 bp, SARS Virus
cagtcgttacacgccccccgaccat

SEQ ID NO: 168232 - DNA, 25 bp, SARS Virus
agtcgttacacggcccccgaccatt

SEQ ID NO: 168233 - DNA, 25 bp, SARS Virus
gtcgttacacgcgccccgaccatta

SEQ ID NO: 168234 - DNA, 25 bp, SARS Virus
tcgttacacgccgcccgaccattaa

SEQ ID NO: 168235 - DNA, 25 bp, SARS Virus
cgttacacgcccgccgaccattaac

SEQ ID NO: 168236 - DNA, 25 bp, SARS Virus
gttacacgccccgcgaccattaact

SEQ ID NO: 168237 - DNA, 25 bp, SARS Virus
ttacacgcccccggaccattaactc

SEQ ID NO: 168238 - DNA, 25 bp, SARS Virus
tacacgccccccgaccattaactcg

SEQ ID NO: 168239 - DNA, 25 bp, SARS Virus
acacgccccccggccattaactcgt

SEQ ID NO: 168240 - DNA, 25 bp, SARS Virus
cacgccccccgagcattaactcgtc

SEQ ID NO: 168241 - DNA, 25 bp, SARS Virus
acgccccccgacgattaactcgtcc

SEQ ID NO: 168242 - DNA, 25 bp, SARS Virus
cgccccccgaccgttaactcgtcct

SEQ ID NO: 168243 - DNA, 25 bp, SARS Virus
gccccccgaccagtaactcgtccta

SEQ ID NO: 168244 - DNA, 25 bp, SARS Virus
ccccccgaccatgaactcgtcctag

SEQ ID NO: 168245 - DNA, 25 bp, SARS Virus
cccccgaccattgactcgtcctagc

SEQ ID NO: 168246 - DNA, 25 bp, SARS Virus
ccccgaccattagctcgtcctagcg

SEQ ID NO: 168247 - DNA, 25 bp, SARS Virus
cccgaccattaagtcgtcctagcgg

SEQ ID NO: 168248 - DNA, 25 bp, SARS Virus
ccgaccattaacgcgtcctagcggt

SEQ ID NO: 168249 - DNA, 25 bp, SARS Virus
cgaccattaactggtcctagcggtt

SEQ ID NO: 168250 - DNA, 25 bp, SARS Virus
gaccattaactcgtcctagcggtta

SEQ ID NO: 168251 - DNA, 25 bp, SARS Virus
accattaactcggcctagcggttat

SEQ ID NO: 168252 - DNA, 25 bp, SARS Virus
ccattaactcgtgctagcggttata

SEQ ID NO: 168253 - DNA, 25 bp, SARS Virus
cattaactcgtcgtagcggttatat

SEQ ID NO: 168254 - DNA, 25 bp, SARS Virus
attaactcgtccgagcggttatatc

SEQ ID NO: 168255 - DNA, 25 bp, SARS Virus
ttaactcgtcctggcggttatatct

SEQ ID NO: 168256 - DNA, 25 bp, SARS Virus
taactcgtcctagcggttatatctg

SEQ ID NO: 168257 - DNA, 25 bp, SARS Virus
aactcgtcctaggggttatatctgc

SEQ ID NO: 168258 - DNA, 25 bp, SARS Virus
actcgtcctagcggttatatctgca

SEQ ID NO: 168259 - DNA, 25 bp, SARS Virus
ctcgtcctagcggttatatctgcat

SEQ ID NO: 168260 - DNA, 25 bp, SARS Virus
tcgtcctagcgggtatatctgcatc

SEQ ID NO: 168261 - DNA, 25 bp, SARS Virus
cgtcctagcggtgatatctgcatca

SEQ ID NO: 168262 - DNA, 25 bp, SARS Virus
gtcctagcggttgtatctgcatcac

SEQ ID NO: 168263 - DNA, 25 bp, SARS Virus
tcctagcggttagatctgcatcaca

SEQ ID NO: 168264 - DNA, 25 bp, SARS Virus
cctagcggttatgtctgcatcacaa

SEQ ID NO: 168265 - DNA, 25 bp, SARS Virus
ctagcggttatagctgcatcacaaa

SEQ ID NO: 168266 - DNA, 25 bp, SARS Virus
tagcggttatatgtgcatcacaaaa

SEQ ID NO: 168267 - DNA, 25 bp, SARS Virus
agcggttatatcggcatcacaaaac

SEQ ID NO: 168268 - DNA, 25 bp, SARS Virus
gcggttatatctgcatcacaaaacg

SEQ ID NO: 168269 - DNA, 25 bp, SARS Virus
cggttatatctggatcacaaaacgt

SEQ ID NO: 168270 - DNA, 25 bp, SARS Virus
ggttatatctgcgtcacaaaacgtg

SEQ ID NO: 168271 - DNA, 25 bp, SARS Virus
gttatatctgcagcacaaaacgtgc

SEQ ID NO: 168272 - DNA, 25 bp, SARS Virus
ttatatctgcatgacaaaacgtgct

SEQ ID NO: 168273 - DNA, 25 bp, SARS Virus
tatatctgcatcgcaaaacgtgctt

SEQ ID NO: 168274 - DNA, 25 bp, SARS Virus
atatctgcatcagaaaacgtgcttc

SEQ ID NO: 168275 - DNA, 25 bp, SARS Virus
tatctgcatcacgaaacgtgcttca

SEQ ID NO: 168276 - DNA, 25 bp, SARS Virus
atctgcatcacagaacgtgcttcag

SEQ ID NO: 168277 - DNA, 25 bp, SARS Virus
tctgcatcacaagacgtgcttcaga

SEQ ID NO: 168278 - DNA, 25 bp, SARS Virus
ctgcatcacaaagcgtgcttcagat

SEQ ID NO: 168279 - DNA, 25 bp, SARS Virus
tgcatcacaaaaggtgcttcagatc

SEQ ID NO: 168280 - DNA, 25 bp, SARS Virus
gcatcacaaaacgtgcttcagatcg

SEQ ID NO: 168281 - DNA, 25 bp, SARS Virus
catcacaaaacgggcttcagatcgt

SEQ ID NO: 168282 - DNA, 25 bp, SARS Virus
atcacaaaacgtgcttcagatcgta

SEQ ID NO: 168283 - DNA, 25 bp, SARS Virus
tcacaaaacgtggttcagatcgtaa

SEQ ID NO: 168284 - DNA, 25 bp, SARS Virus
cacaaaacgtgcgtcagatcgtaac

SEQ ID NO: 168285 - DNA, 25 bp, SARS Virus
acaaaacgtgctgcagatcgtaact

SEQ ID NO: 168286 - DNA, 25 bp, SARS Virus
caaaacgtgcttgagatcgtaactg

SEQ ID NO: 168287 - DNA, 25 bp, SARS Virus
aaaacgtgcttcggatcgtaactgt

SEQ ID NO: 168288 - DNA, 25 bp, SARS Virus
aaacgtgcttcagatcgtaactgtt

SEQ ID NO: 168289 - DNA, 25 bp, SARS Virus
aacgtgcttcaggtcgtaactgttg

SEQ ID NO: 168290 - DNA, 25 bp, SARS Virus
acgtgcttcagagcgtaactgttgt

SEQ ID NO: 168291 - DNA, 25 bp, SARS Virus
cgtgcttcagatggtaactgttgtg

SEQ ID NO: 168292 - DNA, 25 bp, SARS Virus
gtgcttcagatcgtaactgttgtga

SEQ ID NO: 168293 - DNA, 25 bp, SARS Virus
tgcttcagatcggaactgttgtgag

SEQ ID NO: 168294 - DNA, 25 bp, SARS Virus
gcttcagatcgtgactgttgtgagt

SEQ ID NO: 168295 - DNA, 25 bp, SARS Virus
cttcagatcgtagctgttgtgagtt

SEQ ID NO: 168296 - DNA, 25 bp, SARS Virus
ttcagatcgtaagtgttgtgagttc

SEQ ID NO: 168297 - DNA, 25 bp, SARS Virus
tcagatcgtaacggttgtgagttca

SEQ ID NO: 168298 - DNA, 25 bp, SARS Virus
cagatcgtaactgttgtgagttcag

SEQ ID NO: 168299 - DNA, 25 bp, SARS Virus
agatcgtaactggtgtgagttcagt

SEQ ID NO: 168300 - DNA, 25 bp, SARS Virus
gatcgtaactgtggtgagttcagta

SEQ ID NO: 168301 - DNA, 25 bp, SARS Virus
atcgtaactgttgtgagttcagtat

SEQ ID NO: 168302 - DNA, 25 bp, SARS Virus
tcgtaactgttgggagttcagtatt

SEQ ID NO: 168303 - DNA, 25 bp, SARS Virus
cgtaactgttgtgagttcagtatta

SEQ ID NO: 168304 - DNA, 25 bp, SARS Virus
gtaactgttgtgggttcagtattaa

SEQ ID NO: 168305 - DNA, 25 bp, SARS Virus
taactgttgtgagttcagtattaat

SEQ ID NO: 168306 - DNA, 25 bp, SARS Virus
aactgttgtgaggtcagtattaatc

SEQ ID NO: 168307 - DNA, 25 bp, SARS Virus
actgttgtgagtgcagtattaatca

SEQ ID NO: 168308 - DNA, 25 bp, SARS Virus
ctgttgtgagttgagtattaatcat

SEQ ID NO: 168309 - DNA, 25 bp, SARS Virus
tgttgtgagttcggtattaatcatc

SEQ ID NO: 168310 - DNA, 25 bp, SARS Virus
gttgtgagttcagtattaatcatcg

SEQ ID NO: 168311 - DNA, 25 bp, SARS Virus
ttgtgagttcaggattaatcatcgg

SEQ ID NO: 168312 - DNA, 25 bp, SARS Virus
tgtgagttcagtgttaatcatcggt

SEQ ID NO: 168313 - DNA, 25 bp, SARS Virus
gtgagttcagtagtaatcatcggta

SEQ ID NO: 168314 - DNA, 25 bp, SARS Virus
tgagttcagtatgaatcatcggtat

SEQ ID NO: 168315 - DNA, 25 bp, SARS Virus
gagttcagtattgatcatcggtatc

SEQ ID NO: 168316 - DNA, 25 bp, SARS Virus
agttcagtattagtcatcggtatct

SEQ ID NO: 168317 - DNA, 25 bp, SARS Virus
gttcagtattaagcatcggtatctc

SEQ ID NO: 168318 - DNA, 25 bp, SARS Virus
ttcagtattaatgatcggtatctct

SEQ ID NO: 168319 - DNA, 25 bp, SARS Virus
tcagtattaatcgtcggtatctcta

SEQ ID NO: 168320 - DNA, 25 bp, SARS Virus
cagtattaatcagcggtatctctaa

SEQ ID NO: 168321 - DNA, 25 bp, SARS Virus
agtattaatcatgggtatctctaaa

SEQ ID NO: 168322 - DNA, 25 bp, SARS Virus
gtattaatcatcggtatctctaaag

SEQ ID NO: 168323 - DNA, 25 bp, SARS Virus
tattaatcatcggtatctctaaagt

SEQ ID NO: 168324 - DNA, 25 bp, SARS Virus
attaatcatcgggatctctaaagta

SEQ ID NO: 168325 - DNA, 25 bp, SARS Virus
ttaatcatcggtgtctctaaagtag

SEQ ID NO: 168326 - DNA, 25 bp, SARS Virus
taatcatcggtagctctaaagtagt

SEQ ID NO: 168327 - DNA, 25 bp, SARS Virus
aatcatcggtatgtctaaagtagtt

SEQ ID NO: 168328 - DNA, 25 bp, SARS Virus
atcatcggtatcgctaaagtagttt

SEQ ID NO: 168329 - DNA, 25 bp, SARS Virus
tcatcggtatctgtaaagtagtttc

SEQ ID NO: 168330 - DNA, 25 bp, SARS Virus
catcggtatctcgaaagtagtttct

SEQ ID NO: 168331 - DNA, 25 bp, SARS Virus
atcggtatctctgaagtagtttctg

SEQ ID NO: 168332 - DNA, 25 bp, SARS Virus
tcggtatctctagagtagtttctga

SEQ ID NO: 168333 - DNA, 25 bp, SARS Virus
cggtatctctaaggtagtttctgat

SEQ ID NO: 168334 - DNA, 25 bp, SARS Virus
ggtatctctaaagtagtttctgatg

SEQ ID NO: 168335 - DNA, 25 bp, SARS Virus
gtatctctaaaggagtttctgatgt

SEQ ID NO: 168336 - DNA, 25 bp, SARS Virus
tatctctaaagtggtttctgatgtt

SEQ ID NO: 168337 - DNA, 25 bp, SARS Virus
atctctaaagtagtttctgatgtta

SEQ ID NO: 168338 - DNA, 25 bp, SARS Virus
tctctaaagtaggttctgatgttac

SEQ ID NO: 168339 - DNA, 25 bp, SARS Virus
ctctaaagtagtgtctgatgttaca

SEQ ID NO: 168340 - DNA, 25 bp, SARS Virus
tctaaagtagttgctgatgttacag

SEQ ID NO: 168341 - DNA, 25 bp, SARS Virus
ctaaagtagtttgtgatgttacagt

SEQ ID NO: 168342 - DNA, 25 bp, SARS Virus
taaagtagtttcggatgttacagtc

SEQ ID NO: 168343 - DNA, 25 bp, SARS Virus
aaagtagtttctgatgttacagtcg

SEQ ID NO: 168344 - DNA, 25 bp, SARS Virus
aagtagtttctggtgttacagtcgt

SEQ ID NO: 168345 - DNA, 25 bp, SARS Virus
agtagtttctgaggttacagtcgtc

SEQ ID NO: 168346 - DNA, 25 bp, SARS Virus
gtagtttctgatgttacagtcgtca

SEQ ID NO: 168347 - DNA, 25 bp, SARS Virus
tagtttctgatggtacagtcgtcaa

SEQ ID NO: 168348 - DNA, 25 bp, SARS Virus
agtttctgatgtgacagtcgtcaac

SEQ ID NO: 168349 - DNA, 25 bp, SARS Virus
gtttctgatgttgcagtcgtcaaca

SEQ ID NO: 168350 - DNA, 25 bp, SARS Virus
tttctgatgttagagtcgtcaacaa

SEQ ID NO: 168351 - DNA, 25 bp, SARS Virus
ttctgatgttacggtcgtcaacaaa

SEQ ID NO: 168352 - DNA, 25 bp, SARS Virus
tctgatgttacagtcgtcaacaaag

SEQ ID NO: 168353 - DNA, 25 bp, SARS Virus
ctgatgttacaggcgtcaacaaaga

SEQ ID NO: 168354 - DNA, 25 bp, SARS Virus
tgatgttacagtggtcaacaaagac

SEQ ID NO: 168355 - DNA, 25 bp, SARS Virus
gatgttacagtcgtcaacaaagacc

SEQ ID NO: 168356 - DNA, 25 bp, SARS Virus
atgttacagtcggcaacaaagaccg

SEQ ID NO: 168357 - DNA, 25 bp, SARS Virus
tgttacagtcgtgaacaaagaccgt

SEQ ID NO: 168358 - DNA, 25 bp, SARS Virus
gttacagtcgtcgacaaagaccgtt

SEQ ID NO: 168359 - DNA, 25 bp, SARS Virus
ttacagtcgtcagcaaagaccgtta

SEQ ID NO: 168360 - DNA, 25 bp, SARS Virus
tacagtcgtcaagaaagaccgttac

SEQ ID NO: 168361 - DNA, 25 bp, SARS Virus
acagtcgtcaacgaagaccgttacg

SEQ ID NO: 168362 - DNA, 25 bp, SARS Virus
cagtcgtcaacagagaccgttacgt

SEQ ID NO: 168363 - DNA, 25 bp, SARS Virus
agtcgtcaacaaggaccgttacgta

SEQ ID NO: 168364 - DNA, 25 bp, SARS Virus
gtcgtcaacaaagaccgttacgtaa

SEQ ID NO: 168365 - DNA, 25 bp, SARS Virus
tcgtcaacaaaggccgttacgtaaa

SEQ ID NO: 168366 - DNA, 25 bp, SARS Virus
cgtcaacaaagagcgttacgtaaat

SEQ ID NO: 168367 - DNA, 25 bp, SARS Virus
gtcaacaaagacggttacgtaaatg

SEQ ID NO: 168368 - DNA, 25 bp, SARS Virus
tcaacaaagaccgttacgtaaatgt

SEQ ID NO: 168369 - DNA, 25 bp, SARS Virus
caacaaagaccggtacgtaaatgtc

SEQ ID NO: 168370 - DNA, 25 bp, SARS Virus
aacaaagaccgtgacgtaaatgtca

SEQ ID NO: 168371 - DNA, 25 bp, SARS Virus
acaaagaccgttgcgtaaatgtcac

SEQ ID NO: 168372 - DNA, 25 bp, SARS Virus
caaagaccgttaggtaaatgtcacg

SEQ ID NO: 168373 - DNA, 25 bp, SARS Virus
aaagaccgttacgtaaatgtcacgt

SEQ ID NO: 168374 - DNA, 25 bp, SARS Virus
aagaccgttacggaaatgtcacgtc

SEQ ID NO: 168375 - DNA, 25 bp, SARS Virus
agaccgttacgtgaatgtcacgtct

SEQ ID NO: 168376 - DNA, 25 bp, SARS Virus
gaccgttacgtagatgtcacgtctt

SEQ ID NO: 168377 - DNA, 25 bp, SARS Virus
accgttacgtaagtgtcacgtcttt

SEQ ID NO: 168378 - DNA, 25 bp, SARS Virus
ccgttacgtaaaggtcacgtctttt

SEQ ID NO: 168379 - DNA, 25 bp, SARS Virus
cgttacgtaaatgtcacgtcttttg

SEQ ID NO: 168380 - DNA, 25 bp, SARS Virus
gttacgtaaatggcacgtcttttgt

SEQ ID NO: 168381 - DNA, 25 bp, SARS Virus
ttacgtaaatgtgacgtcttttgta

SEQ ID NO: 168382 - DNA, 25 bp, SARS Virus
tacgtaaatgtcgcgtcttttgtat

SEQ ID NO: 168383 - DNA, 25 bp, SARS Virus
acgtaaatgtcaggtcttttgtatg

SEQ ID NO: 168384 - DNA, 25 bp, SARS Virus
cgtaaatgtcacgtcttttgtatga

SEQ ID NO: 168385 - DNA, 25 bp, SARS Virus
gtaaatgtcacggcttttgtatgac

SEQ ID NO: 168386 - DNA, 25 bp, SARS Virus
taaatgtcacgtgttttgtatgaca

SEQ ID NO: 168387 - DNA, 25 bp, SARS Virus
aaatgtcacgtcgtttgtatgacaa

SEQ ID NO: 168388 - DNA, 25 bp, SARS Virus
aatgtcacgtctgttgtatgacaag

SEQ ID NO: 168389 - DNA, 25 bp, SARS Virus
atgtcacgtcttgtgtatgacaaga

SEQ ID NO: 168390 - DNA, 25 bp, SARS Virus
tgtcacgtctttggtatgacaagat

SEQ ID NO: 168391 - DNA, 25 bp, SARS Virus
gtcacgtcttttgtatgacaagatc

SEQ ID NO: 168392 - DNA, 25 bp, SARS Virus
tcacgtcttttggatgacaagatca

SEQ ID NO: 168393 - DNA, 25 bp, SARS Virus
gatgtcgcaagatacttaatattcc

SEQ ID NO: 168394 - DNA, 25 bp, SARS Virus
atgtcgcaagactcttaatattcca

SEQ ID NO: 168395 - DNA, 25 bp, SARS Virus
tgtcgcaagacatttaatattccac

SEQ ID NO: 168396 - DNA, 25 bp, SARS Virus
gtcgcaagacacttaatattccact

SEQ ID NO: 168397 - DNA, 25 bp, SARS Virus
tcgcaagacacttaatattccactc

SEQ ID NO: 168398 - DNA, 25 bp, SARS Virus
cgcaagacactttatattccactct

SEQ ID NO: 168399 - DNA, 25 bp, SARS Virus
gcaagacacttattattccactcta

SEQ ID NO: 168400 - DNA, 25 bp, SARS Virus
caagacacttaatattccactctat

SEQ ID NO: 168401 - DNA, 25 bp, SARS Virus
aagacacttaattttccactctatt

SEQ ID NO: 168402 - DNA, 25 bp, SARS Virus
agacacttaatattccactctattt

SEQ ID NO: 168403 - DNA, 25 bp, SARS Virus
gacacttaatattccactctatttt

SEQ ID NO: 168404 - DNA, 25 bp, SARS Virus
acacttaatatttcactctattttt

SEQ ID NO: 168405 - DNA, 25 bp, SARS Virus
cacttaatattctactctatttttg

SEQ ID NO: 168406 - DNA, 25 bp, SARS Virus
acttaatattcctctctatttttgt

SEQ ID NO: 168407 - DNA, 25 bp, SARS Virus
cttaatattccattctatttttgtc

SEQ ID NO: 168408 - DNA, 25 bp, SARS Virus
ttaatattccactctatttttgtcg

SEQ ID NO: 168409 - DNA, 25 bp, SARS Virus
taatattccactttatttttgtcga

SEQ ID NO: 168410 - DNA, 25 bp, SARS Virus
aatattccactctatttttgtcgaa

SEQ ID NO: 168411 - DNA, 25 bp, SARS Virus
atattccactctttttttgtcgaaa

SEQ ID NO: 168412 - DNA, 25 bp, SARS Virus
tattccactctatttttgtcgaaaa

SEQ ID NO: 168413 - DNA, 25 bp, SARS Virus
attccactctatttttgtcgaaaag

SEQ ID NO: 168414 - DNA, 25 bp, SARS Virus
ttccactctatttttgtcgaaaaga

SEQ ID NO: 168415 - DNA, 25 bp, SARS Virus
tccactctatttttgtcgaaaagag

SEQ ID NO: 168416 - DNA, 25 bp, SARS Virus
ccactctatttttgtcgaaaagagg

SEQ ID NO: 168417 - DNA, 25 bp, SARS Virus
cactctatttttttcgaaaagaggt

SEQ ID NO: 168418 - DNA, 25 bp, SARS Virus
actctatttttgtcgaaaagaggtt

SEQ ID NO: 168419 - DNA, 25 bp, SARS Virus
ctctatttttgttgaaaagaggttc

SEQ ID NO: 168420 - DNA, 25 bp, SARS Virus
tctatttttgtctaaaagaggttcg

SEQ ID NO: 168421 - DNA, 25 bp, SARS Virus
ctatttttgtcgtaaagaggttcgt

SEQ ID NO: 168422 - DNA, 25 bp, SARS Virus
tatttttgtcgataagaggttcgtc

SEQ ID NO: 168423 - DNA, 25 bp, SARS Virus
atttttgtcgaatagaggttcgtcc

SEQ ID NO: 168424 - DNA, 25 bp, SARS Virus
tttttgtcgaaatgaggttcgtcct

SEQ ID NO: 168425 - DNA, 25 bp, SARS Virus
ttttgtcgaaaataggttcgtccta

SEQ ID NO: 168426 - DNA, 25 bp, SARS Virus
tttgtcgaaaagtggttcgtcctaa

SEQ ID NO: 168427 - DNA, 25 bp, SARS Virus
ttgtcgaaaagatgttcgtcctaac

SEQ ID NO: 168428 - DNA, 25 bp, SARS Virus
tgtcgaaaagagtttcgtcctaacg

SEQ ID NO: 168429 - DNA, 25 bp, SARS Virus
gtcgaaaagaggttcgtcctaacgc

SEQ ID NO: 168430 - DNA, 25 bp, SARS Virus
tcgaaaagaggttcgtcctaacgca

SEQ ID NO: 168431 - DNA, 25 bp, SARS Virus
cgaaaagaggtttgtcctaacgcac

SEQ ID NO: 168432 - DNA, 25 bp, SARS Virus
gaaaagaggttcttcctaacgcaca

SEQ ID NO: 168433 - DNA, 25 bp, SARS Virus
aaaagaggttcgtcctaacgcacat

SEQ ID NO: 168434 - DNA, 25 bp, SARS Virus
aaagaggttcgttctaacgcacatt

SEQ ID NO: 168435 - DNA, 25 bp, SARS Virus
aagaggttcgtcttaacgcacattc

SEQ ID NO: 168436 - DNA, 25 bp, SARS Virus
agaggttcgtcctaacgcacattct

SEQ ID NO: 168437 - DNA, 25 bp, SARS Virus
gaggttcgtccttacgcacattctt

SEQ ID NO: 168438 - DNA, 25 bp, SARS Virus
aggttcgtcctatcgcacattcttt

SEQ ID NO: 168439 - DNA, 25 bp, SARS Virus
ggttcgtcctaatgcacattcttta

SEQ ID NO: 168440 - DNA, 25 bp, SARS Virus
gttcgtcctaactcacattctttaa

SEQ ID NO: 168441 - DNA, 25 bp, SARS Virus
ttcgtcctaacgtacattctttaag

SEQ ID NO: 168442 - DNA, 25 bp, SARS Virus
tcgtcctaacgctcattctttaaga

SEQ ID NO: 168443 - DNA, 25 bp, SARS Virus
cgtcctaacgcatattctttaagag

SEQ ID NO: 168444 - DNA, 25 bp, SARS Virus
gtcctaacgcactttctttaagaga

SEQ ID NO: 168445 - DNA, 25 bp, SARS Virus
tcctaacgcacattctttaagagaa

SEQ ID NO: 168446 - DNA, 25 bp, SARS Virus
cctaacgcacattctttaagagaat

SEQ ID NO: 168447 - DNA, 25 bp, SARS Virus
ctaacgcacattttttaagagaatg

SEQ ID NO: 168448 - DNA, 25 bp, SARS Virus
taacgcacattctttaagagaatgt

SEQ ID NO: 168449 - DNA, 25 bp, SARS Virus
aacgcacattctttaagagaatgtt

SEQ ID NO: 168450 - DNA, 25 bp, SARS Virus
acgcacattctttaagagaatgttg

SEQ ID NO: 168451 - DNA, 25 bp, SARS Virus
cgcacattcttttagagaatgttgc

SEQ ID NO: 168452 - DNA, 25 bp, SARS Virus
gcacattctttatgagaatgttgcg

SEQ ID NO: 168453 - DNA, 25 bp, SARS Virus
cacattctttaatagaatgttgcgg

SEQ ID NO: 168454 - DNA, 25 bp, SARS Virus
acattctttaagtgaatgttgcgga

SEQ ID NO: 168455 - DNA, 25 bp, SARS Virus
cattctttaagataatgttgcggat

SEQ ID NO: 168456 - DNA, 25 bp, SARS Virus
attctttaagagtatgttgcggata

SEQ ID NO: 168457 - DNA, 25 bp, SARS Virus
ttctttaagagattgttgcggataa

SEQ ID NO: 168458 - DNA, 25 bp, SARS Virus
tctttaagagaatgttgcggataaa

SEQ ID NO: 168459 - DNA, 25 bp, SARS Virus
ctttaagagaattttgcggataaac

SEQ ID NO: 168460 - DNA, 25 bp, SARS Virus
tttaagagaatgttgcggataaact

SEQ ID NO: 168461 - DNA, 25 bp, SARS Virus
ttaagagaatgttgcggataaactc

SEQ ID NO: 168462 - DNA, 25 bp, SARS Virus
taagagaatgtttcggataaactcc

SEQ ID NO: 168463 - DNA, 25 bp, SARS Virus
aagagaatgttgtggataaactcca

SEQ ID NO: 168464 - DNA, 25 bp, SARS Virus
agagaatgttgctgataaactccag

SEQ ID NO: 168465 - DNA, 25 bp, SARS Virus
gagaatgttgcgtataaactccaga

SEQ ID NO: 168466 - DNA, 25 bp, SARS Virus
agaatgttgcggttaaactccagac

SEQ ID NO: 168467 - DNA, 25 bp, SARS Virus
gaatgttgcggataaactccagaca

SEQ ID NO: 168468 - DNA, 25 bp, SARS Virus
aatgttgcggattaactccagacaa

SEQ ID NO: 168469 - DNA, 25 bp, SARS Virus
atgttgcggatatactccagacaac

SEQ ID NO: 168470 - DNA, 25 bp, SARS Virus
tgttgcggataatctccagacaact

SEQ ID NO: 168471 - DNA, 25 bp, SARS Virus
gttgcggataaattccagacaacta

SEQ ID NO: 168472 - DNA, 25 bp, SARS Virus
ttgcggataaactccagacaactaa

SEQ ID NO: 168473 - DNA, 25 bp, SARS Virus
tgcggataaacttcagacaactaac

SEQ ID NO: 168474 - DNA, 25 bp, SARS Virus
gcggataaactctagacaactaacg

SEQ ID NO: 168475 - DNA, 25 bp, SARS Virus
cggataaactcctgacaactaacgt

SEQ ID NO: 168476 - DNA, 25 bp, SARS Virus
ggataaactccatacaactaacgtc

SEQ ID NO: 168477 - DNA, 25 bp, SARS Virus
gataaactccagtcaactaacgtct

SEQ ID NO: 168478 - DNA, 25 bp, SARS Virus
ataaactccagataactaacgtcta

SEQ ID NO: 168479 - DNA, 25 bp, SARS Virus
taaactccagactactaacgtctac

SEQ ID NO: 168480 - DNA, 25 bp, SARS Virus
aaactccagacatctaacgtctact

SEQ ID NO: 168481 - DNA, 25 bp, SARS Virus
aactccagacaattaacgtctactt

SEQ ID NO: 168482 - DNA, 25 bp, SARS Virus
actccagacaactaacgtctacttt

SEQ ID NO: 168483 - DNA, 25 bp, SARS Virus
ctccagacaacttacgtctactttg

SEQ ID NO: 168484 - DNA, 25 bp, SARS Virus
tccagacaactatcgtctactttgt

SEQ ID NO: 168485 - DNA, 25 bp, SARS Virus
ccagacaactaatgtctactttgta

SEQ ID NO: 168486 - DNA, 25 bp, SARS Virus
cagacaactaacttctactttgtag

SEQ ID NO: 168487 - DNA, 25 bp, SARS Virus
agacaactaacgtctactttgtagt

SEQ ID NO: 168488 - DNA, 25 bp, SARS Virus
gacaactaacgtttactttgtagta

SEQ ID NO: 168489 - DNA, 25 bp, SARS Virus
acaactaacgtctactttgtagtac

SEQ ID NO: 168490 - DNA, 25 bp, SARS Virus
caactaacgtcttctttgtagtaca

SEQ ID NO: 168491 - DNA, 25 bp, SARS Virus
aactaacgtctattttgtagtacac

SEQ ID NO: 168492 - DNA, 25 bp, SARS Virus
actaacgtctactttgtagtacaca

SEQ ID NO: 168493 - DNA, 25 bp, SARS Virus
ctaacgtctactttgtagtacacat

SEQ ID NO: 168494 - DNA, 25 bp, SARS Virus
taacgtctactttgtagtacacatt

SEQ ID NO: 168495 - DNA, 25 bp, SARS Virus
aacgtctactttttagtacacatta

SEQ ID NO: 168496 - DNA, 25 bp, SARS Virus
acgtctactttgtagtacacattat

SEQ ID NO: 168497 - DNA, 25 bp, SARS Virus
cgtctactttgttgtacacattatt

SEQ ID NO: 168498 - DNA, 25 bp, SARS Virus
gtctactttgtattacacattattg

SEQ ID NO: 168499 - DNA, 25 bp, SARS Virus
tctactttgtagtacacattattgt

SEQ ID NO: 168500 - DNA, 25 bp, SARS Virus
ctactttgtagttcacattattgtg

SEQ ID NO: 168501 - DNA, 25 bp, SARS Virus
tactttgtagtatacattattgtgg

SEQ ID NO: 168502 - DNA, 25 bp, SARS Virus
actttgtagtactcattattgtgga

SEQ ID NO: 168503 - DNA, 25 bp, SARS Virus
ctttgtagtacatattattgtggaa

SEQ ID NO: 168504 - DNA, 25 bp, SARS Virus
tttgtagtacactttattgtggaaa

SEQ ID NO: 168505 - DNA, 25 bp, SARS Virus
ttgtagtacacattattgtggaaac

SEQ ID NO: 168506 - DNA, 25 bp, SARS Virus
tgtagtacacattattgtggaaaca

SEQ ID NO: 168507 - DNA, 25 bp, SARS Virus
gtagtacacatttttgtggaaacat

SEQ ID NO: 168508 - DNA, 25 bp, SARS Virus
tagtacacattattgtggaaacatc

SEQ ID NO: 168509 - DNA, 25 bp, SARS Virus
agtacacattattgtggaaacatct

SEQ ID NO: 168510 - DNA, 25 bp, SARS Virus
gtacacattattttggaaacatctt

SEQ ID NO: 168511 - DNA, 25 bp, SARS Virus
tacacattattgtggaaacatcttg

SEQ ID NO: 168512 - DNA, 25 bp, SARS Virus
acacattattgttgaaacatcttgt

SEQ ID NO: 168513 - DNA, 25 bp, SARS Virus
cacattattgtgtaaacatcttgta

SEQ ID NO: 168514 - DNA, 25 bp, SARS Virus
acattattgtggtaacatcttgtaa

SEQ ID NO: 168515 - DNA, 25 bp, SARS Virus
cattattgtggatacatcttgtaaa

SEQ ID NO: 168516 - DNA, 25 bp, SARS Virus
attattgtggaatcatcttgtaaaa

SEQ ID NO: 168517 - DNA, 25 bp, SARS Virus
ttattgtggaaatatcttgtaaaac

SEQ ID NO: 168518 - DNA, 25 bp, SARS Virus
tattgtggaaacttcttgtaaaact

SEQ ID NO: 168519 - DNA, 25 bp, SARS Virus
attgtggaaacatcttgtaaaactt

SEQ ID NO: 168520 - DNA, 25 bp, SARS Virus
ttgtggaaacattttgtaaaacttc

SEQ ID NO: 168521 - DNA, 25 bp, SARS Virus
tgtggaaacatcttgtaaaacttcg

SEQ ID NO: 168522 - DNA, 25 bp, SARS Virus
gtggaaacatcttgtaaaacttcgt

SEQ ID NO: 168523 - DNA, 25 bp, SARS Virus
tggaaacatcttttaaaacttcgta

SEQ ID NO: 168524 - DNA, 25 bp, SARS Virus
ggaaacatcttgtaaaacttcgtaa

SEQ ID NO: 168525 - DNA, 25 bp, SARS Virus
gaaacatcttgttaaacttcgtaac

SEQ ID NO: 168526 - DNA, 25 bp, SARS Virus
aaacatcttgtataacttcgtaact

SEQ ID NO: 168527 - DNA, 25 bp, SARS Virus
aacatcttgtaatacttcgtaactc

SEQ ID NO: 168528 - DNA, 25 bp, SARS Virus
acatcttgtaaatcttcgtaactcg

SEQ ID NO: 168529 - DNA, 25 bp, SARS Virus
catcttgtaaaatttcgtaactcga

SEQ ID NO: 168530 - DNA, 25 bp, SARS Virus
atcttgtaaaacttcgtaactcgac

SEQ ID NO: 168531 - DNA, 25 bp, SARS Virus
tcttgtaaaacttcgtaactcgact

SEQ ID NO: 168532 - DNA, 25 bp, SARS Virus
cttgtaaaactttgtaactcgactg

SEQ ID NO: 168533 - DNA, 25 bp, SARS Virus
ttgtaaaacttcttaactcgactga

SEQ ID NO: 168534 - DNA, 25 bp, SARS Virus
tgtaaaacttcgtaactcgactgaa

SEQ ID NO: 168535 - DNA, 25 bp, SARS Virus
gtaaaacttcgttactcgactgaat

SEQ ID NO: 168536 - DNA, 25 bp, SARS Virus
taaaacttcgtatctcgactgaata

SEQ ID NO: 168537 - DNA, 25 bp, SARS Virus
aaaacttcgtaattcgactgaatag

SEQ ID NO: 168538 - DNA, 25 bp, SARS Virus
aaacttcgtaactcgactgaatagg

SEQ ID NO: 168539 - DNA, 25 bp, SARS Virus
aacttcgtaacttgactgaatagga

SEQ ID NO: 168540 - DNA, 25 bp, SARS Virus
acttcgtaactctactgaataggaa

SEQ ID NO: 168541 - DNA, 25 bp, SARS Virus
cttcgtaactcgtctgaataggaac

SEQ ID NO: 168542 - DNA, 25 bp, SARS Virus
ttcgtaactcgattgaataggaaca

SEQ ID NO: 168543 - DNA, 25 bp, SARS Virus
tcgtaactcgactgaataggaacac

SEQ ID NO: 168544 - DNA, 25 bp, SARS Virus
cgtaactcgacttaataggaacaca

SEQ ID NO: 168545 - DNA, 25 bp, SARS Virus
gtaactcgactgtataggaacacac

SEQ ID NO: 168546 - DNA, 25 bp, SARS Virus
taactcgactgattaggaacacacg

SEQ ID NO: 168547 - DNA, 25 bp, SARS Virus
aactcgactgaataggaacacacga

SEQ ID NO: 168548 - DNA, 25 bp, SARS Virus
actcgactgaattggaacacacgaa

SEQ ID NO: 168549 - DNA, 25 bp, SARS Virus
ctcgactgaatatgaacacacgaaa

SEQ ID NO: 168550 - DNA, 25 bp, SARS Virus
tcgactgaatagtaacacacgaaaa

SEQ ID NO: 168551 - DNA, 25 bp, SARS Virus
cgactgaataggtacacacgaaaat

SEQ ID NO: 168552 - DNA, 25 bp, SARS Virus
gactgaataggatcacacgaaaatc

SEQ ID NO: 168553 - DNA, 25 bp, SARS Virus
actgaataggaatacacgaaaatcg

SEQ ID NO: 168554 - DNA, 25 bp, SARS Virus
ctgaataggaactcacgaaaatcga

SEQ ID NO: 168555 - DNA, 25 bp, SARS Virus
tgaataggaacatacgaaaatcgaa

SEQ ID NO: 168556 - DNA, 25 bp, SARS Virus
gaataggaacactcgaaaatcgaat

SEQ ID NO: 168557 - DNA, 25 bp, SARS Virus
aataggaacacatgaaaatcgaata

SEQ ID NO: 168558 - DNA, 25 bp, SARS Virus
ataggaacacactaaaatcgaataa

SEQ ID NO: 168559 - DNA, 25 bp, SARS Virus
taggaacacacgtaaatcgaataac

SEQ ID NO: 168560 - DNA, 25 bp, SARS Virus
aggaacacacgataatcgaataaca

SEQ ID NO: 168561 - DNA, 25 bp, SARS Virus
ggaacacacgaatatcgaataacag

SEQ ID NO: 168562 - DNA, 25 bp, SARS Virus
gaacacacgaaattcgaataacagt

SEQ ID NO: 168563 - DNA, 25 bp, SARS Virus
aacacacgaaaatcgaataacagta

SEQ ID NO: 168564 - DNA, 25 bp, SARS Virus
acacacgaaaattgaataacagtat

SEQ ID NO: 168565 - DNA, 25 bp, SARS Virus
cacacgaaaatctaataacagtatt

SEQ ID NO: 168566 - DNA, 25 bp, SARS Virus
acacgaaaatcgtataacagtattt

SEQ ID NO: 168567 - DNA, 25 bp, SARS Virus
cacgaaaatcgattaacagtatttg

SEQ ID NO: 168568 - DNA, 25 bp, SARS Virus
acgaaaatcgaataacagtatttga

SEQ ID NO: 168569 - DNA, 25 bp, SARS Virus
cgaaaatcgaattacagtatttgat

SEQ ID NO: 168570 - DNA, 25 bp, SARS Virus
gaaaatcgaatatcagtatttgatt

SEQ ID NO: 168571 - DNA, 25 bp, SARS Virus
aaaatcgaataatagtatttgattt

SEQ ID NO: 168572 - DNA, 25 bp, SARS Virus
aaatcgaataactgtatttgatttc

SEQ ID NO: 168573 - DNA, 25 bp, SARS Virus
aatcgaataacattatttgatttcg

SEQ ID NO: 168574 - DNA, 25 bp, SARS Virus
atcgaataacagtatttgatttcgt

SEQ ID NO: 168575 - DNA, 25 bp, SARS Virus
tcgaataacagtttttgatttcgtg

SEQ ID NO: 168576 - DNA, 25 bp, SARS Virus
cgaataacagtatttgatttcgtga

SEQ ID NO: 168577 - DNA, 25 bp, SARS Virus
gaataacagtatttgatttcgtgag

SEQ ID NO: 168578 - DNA, 25 bp, SARS Virus
aataacagtatttgatttcgtgagt

SEQ ID NO: 168579 - DNA, 25 bp, SARS Virus
ataacagtattttatttcgtgagtg

SEQ ID NO: 168580 - DNA, 25 bp, SARS Virus
taacagtatttgttttcgtgagtgt

SEQ ID NO: 168581 - DNA, 25 bp, SARS Virus
aacagtatttgatttcgtgagtgtc

SEQ ID NO: 168582 - DNA, 25 bp, SARS Virus
acagtatttgatttcgtgagtgtca

SEQ ID NO: 168583 - DNA, 25 bp, SARS Virus
cagtatttgatttcgtgagtgtcac

SEQ ID NO: 168584 - DNA, 25 bp, SARS Virus
agtatttgattttgtgagtgtcaca

SEQ ID NO: 168585 - DNA, 25 bp, SARS Virus
gtatttgatttcttgagtgtcacag

SEQ ID NO: 168586 - DNA, 25 bp, SARS Virus
tatttgatttcgtgagtgtcacagt

SEQ ID NO: 168587 - DNA, 25 bp, SARS Virus
atttgatttcgttagtgtcacagtt

SEQ ID NO: 168588 - DNA, 25 bp, SARS Virus
tttgatttcgtgtgtgtcacagttg

SEQ ID NO: 168589 - DNA, 25 bp, SARS Virus
ttgatttcgtgattgtcacagttgt

SEQ ID NO: 168590 - DNA, 25 bp, SARS Virus
tgatttcgtgagtgtcacagttgtt

SEQ ID NO: 168591 - DNA, 25 bp, SARS Virus
gatttcgtgagtttcacagttgtta

SEQ ID NO: 168592 - DNA, 25 bp, SARS Virus
atttcgtgagtgtcacagttgttaa

SEQ ID NO: 168593 - DNA, 25 bp, SARS Virus
tttcgtgagtgttacagttgttaaa

SEQ ID NO: 168594 - DNA, 25 bp, SARS Virus
ttcgtgagtgtctcagttgttaaag

SEQ ID NO: 168595 - DNA, 25 bp, SARS Virus
tcgtgagtgtcatagttgttaaagt

SEQ ID NO: 168596 - DNA, 25 bp, SARS Virus
cgtgagtgtcactgttgttaaagtc

SEQ ID NO: 168597 - DNA, 25 bp, SARS Virus
gtgagtgtcacatttgttaaagtcg

SEQ ID NO: 168598 - DNA, 25 bp, SARS Virus
tgagtgtcacagttgttaaagtcgt

SEQ ID NO: 168599 - DNA, 25 bp, SARS Virus
gagtgtcacagttgttaaagtcgtc

SEQ ID NO: 168600 - DNA, 25 bp, SARS Virus
agtgtcacagtttttaaagtcgtcc

SEQ ID NO: 168601 - DNA, 25 bp, SARS Virus
gtgtcacagttgttaaagtcgtcct

SEQ ID NO: 168602 - DNA, 25 bp, SARS Virus
tgtcacagttgttaaagtcgtcctg

SEQ ID NO: 168603 - DNA, 25 bp, SARS Virus
gtcacagttgtttaagtcgtcctgt

SEQ ID NO: 168604 - DNA, 25 bp, SARS Virus
tcacagttgttatagtcgtcctgtt

SEQ ID NO: 168605 - DNA, 25 bp, SARS Virus
cacagttgttaatgtcgtcctgttg

SEQ ID NO: 168606 - DNA, 25 bp, SARS Virus
acagttgttaaattcgtcctgttgc

SEQ ID NO: 168607 - DNA, 25 bp, SARS Virus
cagttgttaaagtcgtcctgttgcc

SEQ ID NO: 168608 - DNA, 25 bp, SARS Virus
agttgttaaagttgtcctgttgccg

SEQ ID NO: 168609 - DNA, 25 bp, SARS Virus
gttgttaaagtcttcctgttgccgc

SEQ ID NO: 168610 - DNA, 25 bp, SARS Virus
ttgttaaagtcgtcctgttgccgct

SEQ ID NO: 168611 - DNA, 25 bp, SARS Virus
tgttaaagtcgttctgttgccgctg

SEQ ID NO: 168612 - DNA, 25 bp, SARS Virus
gttaaagtcgtcttgttgccgctgt

SEQ ID NO: 168613 - DNA, 25 bp, SARS Virus
ttaaagtcgtcctgttgccgctgtt

SEQ ID NO: 168614 - DNA, 25 bp, SARS Virus
taaagtcgtccttttgccgctgttc

SEQ ID NO: 168615 - DNA, 25 bp, SARS Virus
aaagtcgtcctgttgccgctgttca

SEQ ID NO: 168616 - DNA, 25 bp, SARS Virus
aagtcgtcctgttgccgctgttcaa

SEQ ID NO: 168617 - DNA, 25 bp, SARS Virus
agtcgtcctgtttccgctgttcaag

SEQ ID NO: 168618 - DNA, 25 bp, SARS Virus
gtcgtcctgttgtcgctgttcaagg

SEQ ID NO: 168619 - DNA, 25 bp, SARS Virus
tcgtcctgttgctgctgttcaaggt

SEQ ID NO: 168620 - DNA, 25 bp, SARS Virus
cgtcctgttgcctctgttcaaggtt

SEQ ID NO: 168621 - DNA, 25 bp, SARS Virus
gtcctgttgccgttgttcaaggttc

SEQ ID NO: 168622 - DNA, 25 bp, SARS Virus
tcctgttgccgctgttcaaggttcc

SEQ ID NO: 168623 - DNA, 25 bp, SARS Virus
cctgttgccgcttttcaaggttcct

SEQ ID NO: 168624 - DNA, 25 bp, SARS Virus
ctgttgccgctgttcaaggttcctt

SEQ ID NO: 168625 - DNA, 25 bp, SARS Virus
tgttgccgctgttcaaggttccttg

SEQ ID NO: 168626 - DNA, 25 bp, SARS Virus
gttgccgctgtttaaggttccttgt

SEQ ID NO: 168627 - DNA, 25 bp, SARS Virus
ttgccgctgttctaggttccttgta

SEQ ID NO: 168628 - DNA, 25 bp, SARS Virus
tgccgctgttcatggttccttgtac

SEQ ID NO: 168629 - DNA, 25 bp, SARS Virus
gccgctgttcaatgttccttgtaca

SEQ ID NO: 168630 - DNA, 25 bp, SARS Virus
ccgctgttcaagtttccttgtacag

SEQ ID NO: 168631 - DNA, 25 bp, SARS Virus
cgctgttcaaggttccttgtacaga

SEQ ID NO: 168632 - DNA, 25 bp, SARS Virus
gctgttcaaggttccttgtacagac

SEQ ID NO: 168633 - DNA, 25 bp, SARS Virus
ctgttcaaggtttcttgtacagacc

SEQ ID NO: 168634 - DNA, 25 bp, SARS Virus
tgttcaaggttctttgtacagacct

SEQ ID NO: 168635 - DNA, 25 bp, SARS Virus
gttcaaggttccttgtacagacctg

SEQ ID NO: 168636 - DNA, 25 bp, SARS Virus
ttcaaggttccttgtacagacctgg

SEQ ID NO: 168637 - DNA, 25 bp, SARS Virus
tcaaggttccttttacagacctgga

SEQ ID NO: 168638 - DNA, 25 bp, SARS Virus
caaggttccttgtacagacctggat

SEQ ID NO: 168639 - DNA, 25 bp, SARS Virus
aaggttccttgttcagacctggata

SEQ ID NO: 168640 - DNA, 25 bp, SARS Virus
aggttccttgtatagacctggataa

SEQ ID NO: 168641 - DNA, 25 bp, SARS Virus
ggttccttgtactgacctggataac

SEQ ID NO: 168642 - DNA, 25 bp, SARS Virus
gttccttgtacatacctggataaca

SEQ ID NO: 168643 - DNA, 25 bp, SARS Virus
ttccttgtacagtcctggataacaa

SEQ ID NO: 168644 - DNA, 25 bp, SARS Virus
tccttgtacagatctggataacaaa

SEQ ID NO: 168645 - DNA, 25 bp, SARS Virus
ccttgtacagacttggataacaaaa

SEQ ID NO: 168646 - DNA, 25 bp, SARS Virus
cttgtacagacctggataacaaaag

SEQ ID NO: 168647 - DNA, 25 bp, SARS Virus
ttgtacagaccttgataacaaaagt

SEQ ID NO: 168648 - DNA, 25 bp, SARS Virus
tgtacagacctgtataacaaaagta

SEQ ID NO: 168649 - DNA, 25 bp, SARS Virus
gtacagacctggttaacaaaagtat

SEQ ID NO: 168650 - DNA, 25 bp, SARS Virus
tacagacctggataacaaaagtatt

SEQ ID NO: 168651 - DNA, 25 bp, SARS Virus
acagacctggattacaaaagtattc

SEQ ID NO: 168652 - DNA, 25 bp, SARS Virus
cagacctggatatcaaaagtattca

SEQ ID NO: 168653 - DNA, 25 bp, SARS Virus
agacctggataataaaagtattcag

SEQ ID NO: 168654 - DNA, 25 bp, SARS Virus
gacctggataactaaagtattcaga

SEQ ID NO: 168655 - DNA, 25 bp, SARS Virus
acctggataacataagtattcagac

SEQ ID NO: 168656 - DNA, 25 bp, SARS Virus
cctggataacaatagtattcagacg

SEQ ID NO: 168657 - DNA, 25 bp, SARS Virus
ctggataacaaatgtattcagacgt

SEQ ID NO: 168658 - DNA, 25 bp, SARS Virus
tggataacaaaattattcagacgtg

SEQ ID NO: 168659 - DNA, 25 bp, SARS Virus
ggataacaaaagtattcagacgtgt

SEQ ID NO: 168660 - DNA, 25 bp, SARS Virus
gataacaaaagttttcagacgtgtg

SEQ ID NO: 168661 - DNA, 25 bp, SARS Virus
ataacaaaagtattcagacgtgtga

SEQ ID NO: 168662 - DNA, 25 bp, SARS Virus
taacaaaagtattcagacgtgtgac

SEQ ID NO: 168663 - DNA, 25 bp, SARS Virus
aacaaaagtatttagacgtgtgact

SEQ ID NO: 168664 - DNA, 25 bp, SARS Virus
acaaaagtattctgacgtgtgactt

SEQ ID NO: 168665 - DNA, 25 bp, SARS Virus
caaaagtattcatacgtgtgactta

SEQ ID NO: 168666 - DNA, 25 bp, SARS Virus
aaaagtattcagtcgtgtgacttaa

SEQ ID NO: 168667 - DNA, 25 bp, SARS Virus
aaagtattcagatgtgtgacttaat

SEQ ID NO: 168668 - DNA, 25 bp, SARS Virus
aagtattcagacttgtgacttaatt

SEQ ID NO: 168669 - DNA, 25 bp, SARS Virus
agtattcagacgtgtgacttaattt

SEQ ID NO: 168670 - DNA, 25 bp, SARS Virus
gtattcagacgtttgacttaatttt

SEQ ID NO: 168671 - DNA, 25 bp, SARS Virus
tattcagacgtgtgacttaatttta

SEQ ID NO: 168672 - DNA, 25 bp, SARS Virus
attcagacgtgttacttaattttat

SEQ ID NO: 168673 - DNA, 25 bp, SARS Virus
ttcagacgtgtgtcttaattttata

SEQ ID NO: 168674 - DNA, 25 bp, SARS Virus
tcagacgtgtgatttaattttataa

SEQ ID NO: 168675 - DNA, 25 bp, SARS Virus
cagacgtgtgacttaattttataag

SEQ ID NO: 168676 - DNA, 25 bp, SARS Virus
agacgtgtgacttaattttataaga

SEQ ID NO: 168677 - DNA, 25 bp, SARS Virus
gacgtgtgactttattttataagac

SEQ ID NO: 168678 - DNA, 25 bp, SARS Virus
acgtgtgacttatttttataagacc

SEQ ID NO: 168679 - DNA, 25 bp, SARS Virus
cgtgtgacttaattttataagacca

SEQ ID NO: 168680 - DNA, 25 bp, SARS Virus
gtgtgacttaattttataagaccaa

SEQ ID NO: 168681 - DNA, 25 bp, SARS Virus
tgtgacttaattttataagaccaag

SEQ ID NO: 168682 - DNA, 25 bp, SARS Virus
gtgacttaattttataagaccaaga

SEQ ID NO: 168683 - DNA, 25 bp, SARS Virus
tgacttaattttttaagaccaagat

SEQ ID NO: 168684 - DNA, 25 bp, SARS Virus
gacttaattttataagaccaagatc

SEQ ID NO: 168685 - DNA, 25 bp, SARS Virus
acttaattttattagaccaagatca

SEQ ID NO: 168686 - DNA, 25 bp, SARS Virus
cttaattttatatgaccaagatcac

SEQ ID NO: 168687 - DNA, 25 bp, SARS Virus
ttaattttataataccaagatcaca

SEQ ID NO: 168688 - DNA, 25 bp, SARS Virus
taattttataagtccaagatcacac

SEQ ID NO: 168689 - DNA, 25 bp, SARS Virus
aattttataagatcaagatcacacg

SEQ ID NO: 168690 - DNA, 25 bp, SARS Virus
attttataagactaagatcacacgg

SEQ ID NO: 168691 - DNA, 25 bp, SARS Virus
ttttataagacctagatcacacgga

SEQ ID NO: 168692 - DNA, 25 bp, SARS Virus
tttataagaccatgatcacacggaa

SEQ ID NO: 168693 - DNA, 25 bp, SARS Virus
ttataagaccaatatcacacggaaa

SEQ ID NO: 168694 - DNA, 25 bp, SARS Virus
tataagaccaagttcacacggaaat

SEQ ID NO: 168695 - DNA, 25 bp, SARS Virus
ataagaccaagatcacacggaaatc

SEQ ID NO: 168696 - DNA, 25 bp, SARS Virus
taagaccaagattacacggaaatca

SEQ ID NO: 168697 - DNA, 25 bp, SARS Virus
aagaccaagatctcacggaaatcag

SEQ ID NO: 168698 - DNA, 25 bp, SARS Virus
agaccaagatcatacggaaatcagt

SEQ ID NO: 168699 - DNA, 25 bp, SARS Virus
gaccaagatcactcggaaatcagtc

SEQ ID NO: 168700 - DNA, 25 bp, SARS Virus
accaagatcacatggaaatcagtcg

SEQ ID NO: 168701 - DNA, 25 bp, SARS Virus
ccaagatcacactgaaatcagtcgt

SEQ ID NO: 168702 - DNA, 25 bp, SARS Virus
caagatcacacgtaaatcagtcgtt

SEQ ID NO: 168703 - DNA, 25 bp, SARS Virus
aagatcacacggtaatcagtcgtta

SEQ ID NO: 168704 - DNA, 25 bp, SARS Virus
agatcacacggatatcagtcgttac

SEQ ID NO: 168705 - DNA, 25 bp, SARS Virus
gatcacacggaattcagtcgttaca

SEQ ID NO: 168706 - DNA, 25 bp, SARS Virus
atcacacggaaatcagtcgttacac

SEQ ID NO: 168707 - DNA, 25 bp, SARS Virus
tcacacggaaattagtcgttacacg

SEQ ID NO: 168708 - DNA, 25 bp, SARS Virus
cacacggaaatctgtcgttacacgc

SEQ ID NO: 168709 - DNA, 25 bp, SARS Virus
acacggaaatcattcgttacacgcc

SEQ ID NO: 168710 - DNA, 25 bp, SARS Virus
cacggaaatcagtcgttacacgccc

SEQ ID NO: 168711 - DNA, 25 bp, SARS Virus
acggaaatcagttgttacacgcccc

SEQ ID NO: 168712 - DNA, 25 bp, SARS Virus
cggaaatcagtctttacacgccccc

SEQ ID NO: 168713 - DNA, 25 bp, SARS Virus
ggaaatcagtcgttacacgcccccc

SEQ ID NO: 168714 - DNA, 25 bp, SARS Virus
gaaatcagtcgttacacgccccccg

SEQ ID NO: 168715 - DNA, 25 bp, SARS Virus
aaatcagtcgtttcacgccccccga

SEQ ID NO: 168716 - DNA, 25 bp, SARS Virus
aatcagtcgttatacgccccccgac

SEQ ID NO: 168717 - DNA, 25 bp, SARS Virus
atcagtcgttactcgccccccgacc

SEQ ID NO: 168718 - DNA, 25 bp, SARS Virus
tcagtcgttacatgccccccgacca

SEQ ID NO: 168719 - DNA, 25 bp, SARS Virus
cagtcgttacactccccccgaccat

SEQ ID NO: 168720 - DNA, 25 bp, SARS Virus
agtcgttacacgtcccccgaccatt

SEQ ID NO: 168721 - DNA, 25 bp, SARS Virus
gtcgttacacgctccccgaccatta

SEQ ID NO: 168722 - DNA, 25 bp, SARS Virus
tcgttacacgcctcccgaccattaa

SEQ ID NO: 168723 - DNA, 25 bp, SARS Virus
cgttacacgccctccgaccattaac

SEQ ID NO: 168724 - DNA, 25 bp, SARS Virus
gttacacgcccctcgaccattaact

SEQ ID NO: 168725 - DNA, 25 bp, SARS Virus
ttacacgccccctgaccattaactc

SEQ ID NO: 168726 - DNA, 25 bp, SARS Virus
tacacgcccccctaccattaactcg

SEQ ID NO: 168727 - DNA, 25 bp, SARS Virus
acacgccccccgtccattaactcgt

SEQ ID NO: 168728 - DNA, 25 bp, SARS Virus
cacgccccccgatcattaactcgtc

SEQ ID NO: 168729 - DNA, 25 bp, SARS Virus
acgccccccgactattaactcgtcc

SEQ ID NO: 168730 - DNA, 25 bp, SARS Virus
cgccccccgacctttaactcgtcct

SEQ ID NO: 168731 - DNA, 25 bp, SARS Virus
gccccccgaccattaactcgtccta

SEQ ID NO: 168732 - DNA, 25 bp, SARS Virus
ccccccgaccattaactcgtcctag

SEQ ID NO: 168733 - DNA, 25 bp, SARS Virus
cccccgaccatttactcgtcctagc

SEQ ID NO: 168734 - DNA, 25 bp, SARS Virus
ccccgaccattatctcgtcctagcg

SEQ ID NO: 168735 - DNA, 25 bp, SARS Virus
cccgaccattaattcgtcctagcgg

SEQ ID NO: 168736 - DNA, 25 bp, SARS Virus
ccgaccattaactcgtcctagcggt

SEQ ID NO: 168737 - DNA, 25 bp, SARS Virus
cgaccattaacttgtcctagcggtt

SEQ ID NO: 168738 - DNA, 25 bp, SARS Virus
gaccattaactcttcctagcggtta

SEQ ID NO: 168739 - DNA, 25 bp, SARS Virus
accattaactcgtcctagcggttat

SEQ ID NO: 168740 - DNA, 25 bp, SARS Virus
ccattaactcgttctagcggttata

SEQ ID NO: 168741 - DNA, 25 bp, SARS Virus
cattaactcgtcttagcggttatat

SEQ ID NO: 168742 - DNA, 25 bp, SARS Virus
attaactcgtcctagcggttatatc

SEQ ID NO: 168743 - DNA, 25 bp, SARS Virus
ttaactcgtccttgcggttatatct

SEQ ID NO: 168744 - DNA, 25 bp, SARS Virus
taactcgtcctatcggttatatctg

SEQ ID NO: 168745 - DNA, 25 bp, SARS Virus
aactcgtcctagtggttatatctgc

SEQ ID NO: 168746 - DNA, 25 bp, SARS Virus
actcgtcctagctgttatatctgca

SEQ ID NO: 168747 - DNA, 25 bp, SARS Virus
ctcgtcctagcgtttatatctgcat

SEQ ID NO: 168748 - DNA, 25 bp, SARS Virus
tcgtcctagcggttatatctgcatc

SEQ ID NO: 168749 - DNA, 25 bp, SARS Virus
cgtcctagcggttatatctgcatca

SEQ ID NO: 168750 - DNA, 25 bp, SARS Virus
gtcctagcggttttatctgcatcac

SEQ ID NO: 168751 - DNA, 25 bp, SARS Virus
tcctagcggttatatctgcatcaca

SEQ ID NO: 168752 - DNA, 25 bp, SARS Virus
cctagcggttatttctgcatcacaa

SEQ ID NO: 168753 - DNA, 25 bp, SARS Virus
ctagcggttatatctgcatcacaaa

SEQ ID NO: 168754 - DNA, 25 bp, SARS Virus
tagcggttatatttgcatcacaaaa

SEQ ID NO: 168755 - DNA, 25 bp, SARS Virus
agcggttatatctgcatcacaaaac

SEQ ID NO: 168756 - DNA, 25 bp, SARS Virus
gcggttatatcttcatcacaaaacg

SEQ ID NO: 168757 - DNA, 25 bp, SARS Virus
cggttatatctgtatcacaaaacgt

SEQ ID NO: 168758 - DNA, 25 bp, SARS Virus
ggttatatctgcttcacaaaacgtg

SEQ ID NO: 168759 - DNA, 25 bp, SARS Virus
gttatatctgcatcacaaaacgtgc

SEQ ID NO: 168760 - DNA, 25 bp, SARS Virus
ttatatctgcattacaaaacgtgct

SEQ ID NO: 168761 - DNA, 25 bp, SARS Virus
tatatctgcatctcaaaacgtgctt

SEQ ID NO: 168762 - DNA, 25 bp, SARS Virus
atatctgcatcataaaacgtgcttc

SEQ ID NO: 168763 - DNA, 25 bp, SARS Virus
tatctgcatcactaaacgtgcttca

SEQ ID NO: 168764 - DNA, 25 bp, SARS Virus
atctgcatcacataacgtgcttcag

SEQ ID NO: 168765 - DNA, 25 bp, SARS Virus
tctgcatcacaatacgtgcttcaga

SEQ ID NO: 168766 - DNA, 25 bp, SARS Virus
ctgcatcacaaatcgtgcttcagat

SEQ ID NO: 168767 - DNA, 25 bp, SARS Virus
tgcatcacaaaatgtgcttcagatc

SEQ ID NO: 168768 - DNA, 25 bp, SARS Virus
gcatcacaaaacttgcttcagatcg

SEQ ID NO: 168769 - DNA, 25 bp, SARS Virus
catcacaaaacgtgcttcagatcgt

SEQ ID NO: 168770 - DNA, 25 bp, SARS Virus
atcacaaaacgttcttcagatcgta

SEQ ID NO: 168771 - DNA, 25 bp, SARS Virus
tcacaaaacgtgtttcagatcgtaa

SEQ ID NO: 168772 - DNA, 25 bp, SARS Virus
cacaaaacgtgcttcagatcgtaac

SEQ ID NO: 168773 - DNA, 25 bp, SARS Virus
acaaaacgtgcttcagatcgtaact

SEQ ID NO: 168774 - DNA, 25 bp, SARS Virus
caaaacgtgctttagatcgtaactg

SEQ ID NO: 168775 - DNA, 25 bp, SARS Virus
aaaacgtgcttctgatcgtaactgt

SEQ ID NO: 168776 - DNA, 25 bp, SARS Virus
aaacgtgcttcatatcgtaactgtt

SEQ ID NO: 168777 - DNA, 25 bp, SARS Virus
aacgtgcttcagttcgtaactgttg

SEQ ID NO: 168778 - DNA, 25 bp, SARS Virus
acgtgcttcagatcgtaactgttgt

SEQ ID NO: 168779 - DNA, 25 bp, SARS Virus
cgtgcttcagattgtaactgttgtg

SEQ ID NO: 168780 - DNA, 25 bp, SARS Virus
gtgcttcagatcttaactgttgtga

SEQ ID NO: 168781 - DNA, 25 bp, SARS Virus
tgcttcagatcgtaactgttgtgag

SEQ ID NO: 168782 - DNA, 25 bp, SARS Virus
gcttcagatcgttactgttgtgagt

SEQ ID NO: 168783 - DNA, 25 bp, SARS Virus
cttcagatcgtatctgttgtgagtt

SEQ ID NO: 168784 - DNA, 25 bp, SARS Virus
ttcagatcgtaattgttgtgagttc

SEQ ID NO: 168785 - DNA, 25 bp, SARS Virus
tcagatcgtaactgttgtgagttca

SEQ ID NO: 168786 - DNA, 25 bp, SARS Virus
cagatcgtaacttttgtgagttcag

SEQ ID NO: 168787 - DNA, 25 bp, SARS Virus
agatcgtaactgttgtgagttcagt

SEQ ID NO: 168788 - DNA, 25 bp, SARS Virus
gatcgtaactgttgtgagttcagta

SEQ ID NO: 168789 - DNA, 25 bp, SARS Virus
atcgtaactgttttgagttcagtat

SEQ ID NO: 168790 - DNA, 25 bp, SARS Virus
tcgtaactgttgtgagttcagtatt

SEQ ID NO: 168791 - DNA, 25 bp, SARS Virus
cgtaactgttgttagttcagtatta

SEQ ID NO: 168792 - DNA, 25 bp, SARS Virus
gtaactgttgtgtgttcagtattaa

SEQ ID NO: 168793 - DNA, 25 bp, SARS Virus
taactgttgtgatttcagtattaat

SEQ ID NO: 168794 - DNA, 25 bp, SARS Virus
aactgttgtgagttcagtattaatc

SEQ ID NO: 168795 - DNA, 25 bp, SARS Virus
actgttgtgagttcagtattaatca

SEQ ID NO: 168796 - DNA, 25 bp, SARS Virus
ctgttgtgagtttagtattaatcat

SEQ ID NO: 168797 - DNA, 25 bp, SARS Virus
tgttgtgagttctgtattaatcatc

SEQ ID NO: 168798 - DNA, 25 bp, SARS Virus
gttgtgagttcattattaatcatcg

SEQ ID NO: 168799 - DNA, 25 bp, SARS Virus
ttgtgagttcagtattaatcatcgg

SEQ ID NO: 168800 - DNA, 25 bp, SARS Virus
tgtgagttcagttttaatcatcggt

SEQ ID NO: 168801 - DNA, 25 bp, SARS Virus
gtgagttcagtattaatcatcggta

SEQ ID NO: 168802 - DNA, 25 bp, SARS Virus
tgagttcagtattaatcatcggtat

SEQ ID NO: 168803 - DNA, 25 bp, SARS Virus
gagttcagtatttatcatcggtatc

SEQ ID NO: 168804 - DNA, 25 bp, SARS Virus
agttcagtattattcatcggtatct

SEQ ID NO: 168805 - DNA, 25 bp, SARS Virus
gttcagtattaatcatcggtatctc

SEQ ID NO: 168806 - DNA, 25 bp, SARS Virus
ttcagtattaattatcggtatctct

SEQ ID NO: 168807 - DNA, 25 bp, SARS Virus
tcagtattaatcttcggtatctcta

SEQ ID NO: 168808 - DNA, 25 bp, SARS Virus
cagtattaatcatcggtatctctaa

SEQ ID NO: 168809 - DNA, 25 bp, SARS Virus
agtattaatcattggtatctctaaa

SEQ ID NO: 168810 - DNA, 25 bp, SARS Virus
gtattaatcatctgtatctctaaag

SEQ ID NO: 168811 - DNA, 25 bp, SARS Virus
tattaatcatcgttatctctaaagt

SEQ ID NO: 168812 - DNA, 25 bp, SARS Virus
attaatcatcggtatctctaaagta

SEQ ID NO: 168813 - DNA, 25 bp, SARS Virus
ttaatcatcggtttctctaaagtag

SEQ ID NO: 168814 - DNA, 25 bp, SARS Virus
taatcatcggtatctctaaagtagt

SEQ ID NO: 168815 - DNA, 25 bp, SARS Virus
aatcatcggtatttctaaagtagtt

SEQ ID NO: 168816 - DNA, 25 bp, SARS Virus
atcatcggtatctctaaagtagttt

SEQ ID NO: 168817 - DNA, 25 bp, SARS Virus
tcatcggtatctttaaagtagtttc

SEQ ID NO: 168818 - DNA, 25 bp, SARS Virus
catcggtatctctaaagtagtttct

SEQ ID NO: 168819 - DNA, 25 bp, SARS Virus
atcggtatctcttaagtagtttctg

SEQ ID NO: 168820 - DNA, 25 bp, SARS Virus
tcggtatctctatagtagtttctga

SEQ ID NO: 168821 - DNA, 25 bp, SARS Virus
cggtatctctaatgtagtttctgat

SEQ ID NO: 168822 - DNA, 25 bp, SARS Virus
ggtatctctaaattagtttctgatg

SEQ ID NO: 168823 - DNA, 25 bp, SARS Virus
gtatctctaaagtagtttctgatgt

SEQ ID NO: 168824 - DNA, 25 bp, SARS Virus
tatctctaaagttgtttctgatgtt

SEQ ID NO: 168825 - DNA, 25 bp, SARS Virus
atctctaaagtattttctgatgtta

SEQ ID NO: 168826 - DNA, 25 bp, SARS Virus
tctctaaagtagtttctgatgttac

SEQ ID NO: 168827 - DNA, 25 bp, SARS Virus
ctctaaagtagtttctgatgttaca

SEQ ID NO: 168828 - DNA, 25 bp, SARS Virus
tctaaagtagtttctgatgttacag

SEQ ID NO: 168829 - DNA, 25 bp, SARS Virus
ctaaagtagtttttgatgttacagt

SEQ ID NO: 168830 - DNA, 25 bp, SARS Virus
taaagtagtttctgatgttacagtc

SEQ ID NO: 168831 - DNA, 25 bp, SARS Virus
aaagtagtttcttatgttacagtcg

SEQ ID NO: 168832 - DNA, 25 bp, SARS Virus
aagtagtttctgttgttacagtcgt

SEQ ID NO: 168833 - DNA, 25 bp, SARS Virus
agtagtttctgatgttacagtcgtc

SEQ ID NO: 168834 - DNA, 25 bp, SARS Virus
gtagtttctgattttacagtcgtca

SEQ ID NO: 168835 - DNA, 25 bp, SARS Virus
tagtttctgatgttacagtcgtcaa

SEQ ID NO: 168836 - DNA, 25 bp, SARS Virus
agtttctgatgttacagtcgtcaac

SEQ ID NO: 168837 - DNA, 25 bp, SARS Virus
gtttctgatgtttcagtcgtcaaca

SEQ ID NO: 168838 - DNA, 25 bp, SARS Virus
tttctgatgttatagtcgtcaacaa

SEQ ID NO: 168839 - DNA, 25 bp, SARS Virus
ttctgatgttactgtcgtcaacaaa

SEQ ID NO: 168840 - DNA, 25 bp, SARS Virus
tctgatgttacattcgtcaacaaag

SEQ ID NO: 168841 - DNA, 25 bp, SARS Virus
ctgatgttacagtcgtcaacaaaga

SEQ ID NO: 168842 - DNA, 25 bp, SARS Virus
tgatgttacagttgtcaacaaagac

SEQ ID NO: 168843 - DNA, 25 bp, SARS Virus
gatgttacagtcttcaacaaagacc

SEQ ID NO: 168844 - DNA, 25 bp, SARS Virus
atgttacagtcgtcaacaaagaccg

SEQ ID NO: 168845 - DNA, 25 bp, SARS Virus
tgttacagtcgttaacaaagaccgt

SEQ ID NO: 168846 - DNA, 25 bp, SARS Virus
gttacagtcgtctacaaagaccgtt

SEQ ID NO: 168847 - DNA, 25 bp, SARS Virus
ttacagtcgtcatcaaagaccgtta

SEQ ID NO: 168848 - DNA, 25 bp, SARS Virus
tacagtcgtcaataaagaccgttac

SEQ ID NO: 168849 - DNA, 25 bp, SARS Virus
acagtcgtcaactaagaccgttacg

SEQ ID NO: 168850 - DNA, 25 bp, SARS Virus
cagtcgtcaacatagaccgttacgt

SEQ ID NO: 168851 - DNA, 25 bp, SARS Virus
agtcgtcaacaatgaccgttacgta

SEQ ID NO: 168852 - DNA, 25 bp, SARS Virus
gtcgtcaacaaataccgttacgtaa

SEQ ID NO: 168853 - DNA, 25 bp, SARS Virus
tcgtcaacaaagtccgttacgtaaa

SEQ ID NO: 168854 - DNA, 25 bp, SARS Virus
cgtcaacaaagatcgttacgtaaat

SEQ ID NO: 168855 - DNA, 25 bp, SARS Virus
gtcaacaaagactgttacgtaaatg

SEQ ID NO: 168856 - DNA, 25 bp, SARS Virus
tcaacaaagacctttacgtaaatgt

SEQ ID NO: 168857 - DNA, 25 bp, SARS Virus
caacaaagaccgttacgtaaatgtc

SEQ ID NO: 168858 - DNA, 25 bp, SARS Virus
aacaaagaccgttacgtaaatgtca

SEQ ID NO: 168859 - DNA, 25 bp, SARS Virus
acaaagaccgtttcgtaaatgtcac

SEQ ID NO: 168860 - DNA, 25 bp, SARS Virus
caaagaccgttatgtaaatgtcacg

SEQ ID NO: 168861 - DNA, 25 bp, SARS Virus
aaagaccgttacttaaatgtcacgt

SEQ ID NO: 168862 - DNA, 25 bp, SARS Virus
aagaccgttacgtaaatgtcacgtc

SEQ ID NO: 168863 - DNA, 25 bp, SARS Virus
agaccgttacgttaatgtcacgtct

SEQ ID NO: 168864 - DNA, 25 bp, SARS Virus
gaccgttacgtatatgtcacgtctt

SEQ ID NO: 168865 - DNA, 25 bp, SARS Virus
accgttacgtaattgtcacgtcttt

SEQ ID NO: 168866 - DNA, 25 bp, SARS Virus
ccgttacgtaaatgtcacgtctttt

SEQ ID NO: 168867 - DNA, 25 bp, SARS Virus
cgttacgtaaatttcacgtcttttg

SEQ ID NO: 168868 - DNA, 25 bp, SARS Virus
gttacgtaaatgtcacgtcttttgt

SEQ ID NO: 168869 - DNA, 25 bp, SARS Virus
ttacgtaaatgttacgtcttttgta

SEQ ID NO: 168870 - DNA, 25 bp, SARS Virus
tacgtaaatgtctcgtcttttgtat

SEQ ID NO: 168871 - DNA, 25 bp, SARS Virus
acgtaaatgtcatgtcttttgtatg

SEQ ID NO: 168872 - DNA, 25 bp, SARS Virus
cgtaaatgtcacttcttttgtatga

SEQ ID NO: 168873 - DNA, 25 bp, SARS Virus
gtaaatgtcacgtcttttgtatgac

SEQ ID NO: 168874 - DNA, 25 bp, SARS Virus
taaatgtcacgttttttgtatgaca

SEQ ID NO: 168875 - DNA, 25 bp, SARS Virus
aaatgtcacgtcttttgtatgacaa

SEQ ID NO: 168876 - DNA, 25 bp, SARS Virus
aatgtcacgtcttttgtatgacaag

SEQ ID NO: 168877 - DNA, 25 bp, SARS Virus
atgtcacgtcttttgtatgacaaga

SEQ ID NO: 168878 - DNA, 25 bp, SARS Virus
tgtcacgtcttttgtatgacaagat

SEQ ID NO: 168879 - DNA, 25 bp, SARS Virus
gtcacgtcttttttatgacaagatc

SEQ ID NO: 168880 - DNA, 25 bp, SARS Virus
tcacgtcttttgtatgacaagatca

SEQ ID NO: 168881 - DNA, 25 bp, SARS Virus
cacgtcttttgtatgacaagatcac

SEQ ID NO: 168882 - DNA, 25 bp, SARS Virus
acgtcttttgtaagacaagatcaca

SEQ ID NO: 168883 - DNA, 25 bp, SARS Virus
cgtcttttgtataacaagatcacaa

SEQ ID NO: 168884 - DNA, 25 bp, SARS Virus
gtcttttgtatgacaagatcacaac

SEQ ID NO: 168885 - DNA, 25 bp, SARS Virus
tcttttgtatgaaaagatcacaact

SEQ ID NO: 168886 - DNA, 25 bp, SARS Virus
cttttgtatgacaagatcacaactt

SEQ ID NO: 168887 - DNA, 25 bp, SARS Virus
ttttgtatgacaagatcacaactta

SEQ ID NO: 168888 - DNA, 25 bp, SARS Virus
tttgtatgacaaaatcacaacttaa

SEQ ID NO: 168889 - DNA, 25 bp, SARS Virus
ttgtatgacaagatcacaacttaag

SEQ ID NO: 168890 - DNA, 25 bp, SARS Virus
tgtatgacaagaacacaacttaagt

SEQ ID NO: 168891 - DNA, 25 bp, SARS Virus
gtatgacaagataacaacttaagtg

SEQ ID NO: 168892 - DNA, 25 bp, SARS Virus
tatgacaagatcacaacttaagtga

SEQ ID NO: 168893 - DNA, 25 bp, SARS Virus
atgacaagatcaaaacttaagtgaa

SEQ ID NO: 168894 - DNA, 25 bp, SARS Virus
tgacaagatcacaacttaagtgaaa

SEQ ID NO: 168895 - DNA, 25 bp, SARS Virus
gacaagatcacaacttaagtgaaac

SEQ ID NO: 168896 - DNA, 25 bp, SARS Virus
acaagatcacaaattaagtgaaact

SEQ ID NO: 168897 - DNA, 25 bp, SARS Virus
caagatcacaacataagtgaaactt

SEQ ID NO: 168898 - DNA, 25 bp, SARS Virus
aagatcacaactaaagtgaaactta

SEQ ID NO: 168899 - DNA, 25 bp, SARS Virus
agatcacaacttaagtgaaacttaa

SEQ ID NO: 168900 - DNA, 25 bp, SARS Virus
gatcacaacttaagtgaaacttaaa

SEQ ID NO: 168901 - DNA, 25 bp, SARS Virus
atcacaacttaaatgaaacttaaat

SEQ ID NO: 168902 - DNA, 25 bp, SARS Virus
tcacaacttaagagaaacttaaata

SEQ ID NO: 168903 - DNA, 25 bp, SARS Virus
cacaacttaagtaaaacttaaatag

SEQ ID NO: 168904 - DNA, 25 bp, SARS Virus
acaacttaagtgaaacttaaatagt

SEQ ID NO: 168905 - DNA, 25 bp, SARS Virus
caacttaagtgaaacttaaatagtt

SEQ ID NO: 168906 - DNA, 25 bp, SARS Virus
aacttaagtgaaacttaaatagttt

SEQ ID NO: 168907 - DNA, 25 bp, SARS Virus
acttaagtgaaaattaaatagtttt

SEQ ID NO: 168908 - DNA, 25 bp, SARS Virus
cttaagtgaaacataaatagttttg

SEQ ID NO: 168909 - DNA, 25 bp, SARS Virus
ttaagtgaaactaaaatagttttgt

SEQ ID NO: 168910 - DNA, 25 bp, SARS Virus
taagtgaaacttaaatagttttgtg

SEQ ID NO: 168911 - DNA, 25 bp, SARS Virus
aagtgaaacttaaatagttttgtga

SEQ ID NO: 168912 - DNA, 25 bp, SARS Virus
agtgaaacttaaatagttttgtgag

SEQ ID NO: 168913 - DNA, 25 bp, SARS Virus
gtgaaacttaaaaagttttgtgaga

SEQ ID NO: 168914 - DNA, 25 bp, SARS Virus
tgaaacttaaatagttttgtgagat

SEQ ID NO: 168915 - DNA, 25 bp, SARS Virus
gaaacttaaataattttgtgagatg

SEQ ID NO: 168916 - DNA, 25 bp, SARS Virus
aaacttaaatagatttgtgagatgc

SEQ ID NO: 168917 - DNA, 25 bp, SARS Virus
aacttaaatagtattgtgagatgcg

SEQ ID NO: 168918 - DNA, 25 bp, SARS Virus
acttaaatagttatgtgagatgcgc

SEQ ID NO: 168919 - DNA, 25 bp, SARS Virus
cttaaatagtttagtgagatgcgcg

SEQ ID NO: 168920 - DNA, 25 bp, SARS Virus
ttaaatagttttatgagatgcgcgc

SEQ ID NO: 168921 - DNA, 25 bp, SARS Virus
taaatagttttgagagatgcgcgcg

SEQ ID NO: 168922 - DNA, 25 bp, SARS Virus
aaatagttttgtaagatgcgcgcgt

SEQ ID NO: 168923 - DNA, 25 bp, SARS Virus
aatagttttgtgagatgcgcgcgtg

SEQ ID NO: 168924 - DNA, 25 bp, SARS Virus
atagttttgtgaaatgcgcgcgtgc

SEQ ID NO: 168925 - DNA, 25 bp, SARS Virus
tagttttgtgagatgcgcgcgtgcg

SEQ ID NO: 168926 - DNA, 25 bp, SARS Virus
agttttgtgagaagcgcgcgtgcgc

SEQ ID NO: 168927 - DNA, 25 bp, SARS Virus
gttttgtgagatacgcgcgtgcgcg

SEQ ID NO: 168928 - DNA, 25 bp, SARS Virus
ttttgtgagatgagcgcgtgcgcgt

SEQ ID NO: 168929 - DNA, 25 bp, SARS Virus
tttgtgagatgcacgcgtgcgcgtc

SEQ ID NO: 168930 - DNA, 25 bp, SARS Virus
ttgtgagatgcgagcgtgcgcgtcc

SEQ ID NO: 168931 - DNA, 25 bp, SARS Virus
tgtgagatgcgcacgtgcgcgtcca

SEQ ID NO: 168932 - DNA, 25 bp, SARS Virus
gtgagatgcgcgagtgcgcgtccat

SEQ ID NO: 168933 - DNA, 25 bp, SARS Virus
tgagatgcgcgcatgcgcgtccata

SEQ ID NO: 168934 - DNA, 25 bp, SARS Virus
gagatgcgcgcgagcgcgtccatac

SEQ ID NO: 168935 - DNA, 25 bp, SARS Virus
agatgcgcgcgtacgcgtccatact

SEQ ID NO: 168936 - DNA, 25 bp, SARS Virus
gatgcgcgcgtgagcgtccatacta

SEQ ID NO: 168937 - DNA, 25 bp, SARS Virus
atgcgcgcgtgcacgtccatactaa

SEQ ID NO: 168938 - DNA, 25 bp, SARS Virus
tgcgcgcgtgcgagtccatactaag

SEQ ID NO: 168939 - DNA, 25 bp, SARS Virus
gcgcgcgtgcgcatccatactaaga

SEQ ID NO: 168940 - DNA, 25 bp, SARS Virus
cgcgcgtgcgcgaccatactaagat

SEQ ID NO: 168941 - DNA, 25 bp, SARS Virus
gcgcgtgcgcgtacatactaagatg

SEQ ID NO: 168942 - DNA, 25 bp, SARS Virus
cgcgtgcgcgtcaatactaagatga

SEQ ID NO: 168943 - DNA, 25 bp, SARS Virus
gcgtgcgcgtccatactaagatgat

SEQ ID NO: 168944 - DNA, 25 bp, SARS Virus
cgtgcgcgtccaaactaagatgatg

SEQ ID NO: 168945 - DNA, 25 bp, SARS Virus
gtgcgcgtccatactaagatgatgt

SEQ ID NO: 168946 - DNA, 25 bp, SARS Virus
tgcgcgtccataataagatgatgta

SEQ ID NO: 168947 - DNA, 25 bp, SARS Virus
gcgcgtccatacaaagatgatgtaa

SEQ ID NO: 168948 - DNA, 25 bp, SARS Virus
cgcgtccatactaagatgatgtaaa

SEQ ID NO: 168949 - DNA, 25 bp, SARS Virus
gcgtccatactaagatgatgtaaat

SEQ ID NO: 168950 - DNA, 25 bp, SARS Virus
cgtccatactaaaatgatgtaaata

SEQ ID NO: 168951 - DNA, 25 bp, SARS Virus
gtccatactaagatgatgtaaatag

SEQ ID NO: 168952 - DNA, 25 bp, SARS Virus
tccatactaagaagatgtaaataga

SEQ ID NO: 168953 - DNA, 25 bp, SARS Virus
ccatactaagataatgtaaatagat

SEQ ID NO: 168954 - DNA, 25 bp, SARS Virus
catactaagatgatgtaaatagata

SEQ ID NO: 168955 - DNA, 25 bp, SARS Virus
atactaagatgaagtaaatagatac

SEQ ID NO: 168956 - DNA, 25 bp, SARS Virus
tactaagatgatataaatagatacc

SEQ ID NO: 168957 - DNA, 25 bp, SARS Virus
actaagatgatgaaaatagataccc

SEQ ID NO: 168958 - DNA, 25 bp, SARS Virus
ctaagatgatgtaaatagatacccg

SEQ ID NO: 168959 - DNA, 25 bp, SARS Virus
taagatgatgtaaatagatacccgt

SEQ ID NO: 168960 - DNA, 25 bp, SARS Virus
aagatgatgtaaatagatacccgtt

SEQ ID NO: 168961 - DNA, 25 bp, SARS Virus
agatgatgtaaaaagatacccgttt

SEQ ID NO: 168962 - DNA, 25 bp, SARS Virus
gatgatgtaaatagatacccgttta

SEQ ID NO: 168963 - DNA, 25 bp, SARS Virus
atgatgtaaataaatacccgtttat

SEQ ID NO: 168964 - DNA, 25 bp, SARS Virus
tgatgtaaatagatacccgtttata

SEQ ID NO: 168965 - DNA, 25 bp, SARS Virus
gatgtaaatagaaacccgtttataa

SEQ ID NO: 168966 - DNA, 25 bp, SARS Virus
atgtaaatagatacccgtttataaa

SEQ ID NO: 168967 - DNA, 25 bp, SARS Virus
tgtaaatagataaccgtttataaaa

SEQ ID NO: 168968 - DNA, 25 bp, SARS Virus
gtaaatagatacacgtttataaaat

SEQ ID NO: 168969 - DNA, 25 bp, SARS Virus
taaatagataccagtttataaaatt

SEQ ID NO: 168970 - DNA, 25 bp, SARS Virus
aaatagatacccatttataaaatta

SEQ ID NO: 168971 - DNA, 25 bp, SARS Virus
aatagatacccgattataaaattac

SEQ ID NO: 168972 - DNA, 25 bp, SARS Virus
atagatacccgtatataaaattacg

SEQ ID NO: 168973 - DNA, 25 bp, SARS Virus
tagatacccgttaataaaattacgg

SEQ ID NO: 168974 - DNA, 25 bp, SARS Virus
agatacccgtttataaaattacgga

SEQ ID NO: 168975 - DNA, 25 bp, SARS Virus
gatacccgtttaaaaaattacggaa

SEQ ID NO: 168976 - DNA, 25 bp, SARS Virus
atacccgtttataaaattacggaaa

SEQ ID NO: 168977 - DNA, 25 bp, SARS Virus
tacccgtttataaaattacggaaaa

SEQ ID NO: 168978 - DNA, 25 bp, SARS Virus
acccgtttataaaattacggaaaag

SEQ ID NO: 168979 - DNA, 25 bp, SARS Virus
cccgtttataaaattacggaaaagt

SEQ ID NO: 168980 - DNA, 25 bp, SARS Virus
ccgtttataaaaatacggaaaagtg

SEQ ID NO: 168981 - DNA, 25 bp, SARS Virus
cgtttataaaataacggaaaagtgt

SEQ ID NO: 168982 - DNA, 25 bp, SARS Virus
gtttataaaattacggaaaagtgta

SEQ ID NO: 168983 - DNA, 25 bp, SARS Virus
tttataaaattaaggaaaagtgtat

SEQ ID NO: 168984 - DNA, 25 bp, SARS Virus
ttataaaattacagaaaagtgtatc

SEQ ID NO: 168985 - DNA, 25 bp, SARS Virus
tataaaattacgaaaaagtgtatcc

SEQ ID NO: 168986 - DNA, 25 bp, SARS Virus
ataaaattacggaaaagtgtatccc

SEQ ID NO: 168987 - DNA, 25 bp, SARS Virus
taaaattacggaaaagtgtatcccg

SEQ ID NO: 168988 - DNA, 25 bp, SARS Virus
aaaattacggaaaagtgtatcccgt

SEQ ID NO: 168989 - DNA, 25 bp, SARS Virus
aaattacggaaaagtgtatcccgta

SEQ ID NO: 168990 - DNA, 25 bp, SARS Virus
aattacggaaaaatgtatcccgtag

SEQ ID NO: 168991 - DNA, 25 bp, SARS Virus
attacggaaaagagtatcccgtagt

SEQ ID NO: 168992 - DNA, 25 bp, SARS Virus
ttacggaaaagtatatcccgtagtt

SEQ ID NO: 168993 - DNA, 25 bp, SARS Virus
tacggaaaagtgaatcccgtagttg

SEQ ID NO: 168994 - DNA, 25 bp, SARS Virus
acggaaaagtgtatcccgtagttgt

SEQ ID NO: 168995 - DNA, 25 bp, SARS Virus
cggaaaagtgtaacccgtagttgtc

SEQ ID NO: 168996 - DNA, 25 bp, SARS Virus
ggaaaagtgtataccgtagttgtcg

SEQ ID NO: 168997 - DNA, 25 bp, SARS Virus
gaaaagtgtatcacgtagttgtcga

SEQ ID NO: 168998 - DNA, 25 bp, SARS Virus
aaaagtgtatccagtagttgtcgac

SEQ ID NO: 168999 - DNA, 25 bp, SARS Virus
aaagtgtatcccatagttgtcgacg

SEQ ID NO: 169000 - DNA, 25 bp, SARS Virus
aagtgtatcccgaagttgtcgacgt

SEQ ID NO: 169001 - DNA, 25 bp, SARS Virus
agtgtatcccgtagttgtcgacgta

SEQ ID NO: 169002 - DNA, 25 bp, SARS Virus
gtgtatcccgtaattgtcgacgtac

SEQ ID NO: 169003 - DNA, 25 bp, SARS Virus
tgtatcccgtagatgtcgacgtact

SEQ ID NO: 169004 - DNA, 25 bp, SARS Virus
gtatcccgtagtagtcgacgtactc

SEQ ID NO: 169005 - DNA, 25 bp, SARS Virus
tatcccgtagttatcgacgtactct

SEQ ID NO: 169006 - DNA, 25 bp, SARS Virus
atcccgtagttgacgacgtactctc

SEQ ID NO: 169007 - DNA, 25 bp, SARS Virus
tcccgtagttgtagacgtactctcg

SEQ ID NO: 169008 - DNA, 25 bp, SARS Virus
cccgtagttgtcaacgtactctcgt

SEQ ID NO: 169009 - DNA, 25 bp, SARS Virus
ccgtagttgtcgacgtactctcgta

SEQ ID NO: 169010 - DNA, 25 bp, SARS Virus
cgtagttgtcgaagtactctcgtac

SEQ ID NO: 169011 - DNA, 25 bp, SARS Virus
gtagttgtcgacatactctcgtacg

SEQ ID NO: 169012 - DNA, 25 bp, SARS Virus
tagttgtcgacgaactctcgtacgg

SEQ ID NO: 169013 - DNA, 25 bp, SARS Virus
agttgtcgacgtactctcgtacggc

SEQ ID NO: 169014 - DNA, 25 bp, SARS Virus
gttgtcgacgtaatctcgtacggca

SEQ ID NO: 169015 - DNA, 25 bp, SARS Virus
ttgtcgacgtacactcgtacggcat

SEQ ID NO: 169016 - DNA, 25 bp, SARS Virus
tgtcgacgtactatcgtacggcata

SEQ ID NO: 169017 - DNA, 25 bp, SARS Virus
gtcgacgtactcacgtacggcatat

SEQ ID NO: 169018 - DNA, 25 bp, SARS Virus
tcgacgtactctagtacggcatatg

SEQ ID NO: 169019 - DNA, 25 bp, SARS Virus
cgacgtactctcatacggcatatgt

SEQ ID NO: 169020 - DNA, 25 bp, SARS Virus
gacgtactctcgaacggcatatgtg

SEQ ID NO: 169021 - DNA, 25 bp, SARS Virus
acgtactctcgtacggcatatgtga

SEQ ID NO: 169022 - DNA, 25 bp, SARS Virus
cgtactctcgtaaggcatatgtgat

SEQ ID NO: 169023 - DNA, 25 bp, SARS Virus
gtactctcgtacagcatatgtgata

SEQ ID NO: 169024 - DNA, 25 bp, SARS Virus
tactctcgtacgacatatgtgatac

SEQ ID NO: 169025 - DNA, 25 bp, SARS Virus
actctcgtacggaatatgtgatacg

SEQ ID NO: 169026 - DNA, 25 bp, SARS Virus
ctctcgtacggcatatgtgatacgc

SEQ ID NO: 169027 - DNA, 25 bp, SARS Virus
tctcgtacggcaaatgtgatacgct

SEQ ID NO: 169028 - DNA, 25 bp, SARS Virus
ctcgtacggcatatgtgatacgctc

SEQ ID NO: 169029 - DNA, 25 bp, SARS Virus
tcgtacggcataagtgatacgctcg

SEQ ID NO: 169030 - DNA, 25 bp, SARS Virus
cgtacggcatatatgatacgctcgt

SEQ ID NO: 169031 - DNA, 25 bp, SARS Virus
gtacggcatatgagatacgctcgtc

SEQ ID NO: 169032 - DNA, 25 bp, SARS Virus
tacggcatatgtaatacgctcgtct

SEQ ID NO: 169033 - DNA, 25 bp, SARS Virus
acggcatatgtgatacgctcgtcta

SEQ ID NO: 169034 - DNA, 25 bp, SARS Virus
cggcatatgtgaaacgctcgtctac

SEQ ID NO: 169035 - DNA, 25 bp, SARS Virus
ggcatatgtgatacgctcgtctacc

SEQ ID NO: 169036 - DNA, 25 bp, SARS Virus
gcatatgtgataagctcgtctaccc

SEQ ID NO: 169037 - DNA, 25 bp, SARS Virus
catatgtgatacactcgtctaccca

SEQ ID NO: 169038 - DNA, 25 bp, SARS Virus
atatgtgatacgatcgtctacccat

SEQ ID NO: 169039 - DNA, 25 bp, SARS Virus
tatgtgatacgcacgtctacccatt

SEQ ID NO: 169040 - DNA, 25 bp, SARS Virus
atgtgatacgctagtctacccatta

SEQ ID NO: 169041 - DNA, 25 bp, SARS Virus
tgtgatacgctcatctacccattat

SEQ ID NO: 169042 - DNA, 25 bp, SARS Virus
gtgatacgctcgactacccattatc

SEQ ID NO: 169043 - DNA, 25 bp, SARS Virus
tgatacgctcgtatacccattatct

SEQ ID NO: 169044 - DNA, 25 bp, SARS Virus
gatacgctcgtcaacccattatctc

SEQ ID NO: 169045 - DNA, 25 bp, SARS Virus
atacgctcgtctacccattatctct

SEQ ID NO: 169046 - DNA, 25 bp, SARS Virus
tacgctcgtctaaccattatctctc

SEQ ID NO: 169047 - DNA, 25 bp, SARS Virus
acgctcgtctacacattatctctcg

SEQ ID NO: 169048 - DNA, 25 bp, SARS Virus
cgctcgtctaccaattatctctcgt

SEQ ID NO: 169049 - DNA, 25 bp, SARS Virus
gctcgtctacccattatctctcgtt

SEQ ID NO: 169050 - DNA, 25 bp, SARS Virus
ctcgtctacccaatatctctcgttc

SEQ ID NO: 169051 - DNA, 25 bp, SARS Virus
tcgtctacccataatctctcgttca

SEQ ID NO: 169052 - DNA, 25 bp, SARS Virus
cgtctacccattatctctcgttcag

SEQ ID NO: 169053 - DNA, 25 bp, SARS Virus
gtctacccattaactctcgttcagg

SEQ ID NO: 169054 - DNA, 25 bp, SARS Virus
tctacccattatatctcgttcaggc

SEQ ID NO: 169055 - DNA, 25 bp, SARS Virus
ctacccattatcactcgttcaggct

SEQ ID NO: 169056 - DNA, 25 bp, SARS Virus
tacccattatctatcgttcaggcta

SEQ ID NO: 169057 - DNA, 25 bp, SARS Virus
acccattatctcacgttcaggctac

SEQ ID NO: 169058 - DNA, 25 bp, SARS Virus
cccattatctctagttcaggctacc

SEQ ID NO: 169059 - DNA, 25 bp, SARS Virus
ccattatctctcattcaggctaccg

SEQ ID NO: 169060 - DNA, 25 bp, SARS Virus
cattatctctcgatcaggctaccgt

SEQ ID NO: 169061 - DNA, 25 bp, SARS Virus
attatctctcgtacaggctaccgtt

SEQ ID NO: 169062 - DNA, 25 bp, SARS Virus
ttatctctcgttaaggctaccgttt

SEQ ID NO: 169063 - DNA, 25 bp, SARS Virus
tatctctcgttcaggctaccgtttt

SEQ ID NO: 169064 - DNA, 25 bp, SARS Virus
atctctcgttcaagctaccgtttta

SEQ ID NO: 169065 - DNA, 25 bp, SARS Virus
tctctcgttcagactaccgttttac

SEQ ID NO: 169066 - DNA, 25 bp, SARS Virus
ctctcgttcaggataccgttttact

SEQ ID NO: 169067 - DNA, 25 bp, SARS Virus
tctcgttcaggcaaccgttttactg

SEQ ID NO: 169068 - DNA, 25 bp, SARS Virus
ctcgttcaggctaccgttttactga

SEQ ID NO: 169069 - DNA, 25 bp, SARS Virus
tcgttcaggctaacgttttactgag

SEQ ID NO: 169070 - DNA, 25 bp, SARS Virus
cgttcaggctacagttttactgaga

SEQ ID NO: 169071 - DNA, 25 bp, SARS Virus
gttcaggctaccattttactgagaa

SEQ ID NO: 169072 - DNA, 25 bp, SARS Virus
ttcaggctaccgatttactgagaat

SEQ ID NO: 169073 - DNA, 25 bp, SARS Virus
tcaggctaccgtattactgagaatg

SEQ ID NO: 169074 - DNA, 25 bp, SARS Virus
caggctaccgttatactgagaatgg

SEQ ID NO: 169075 - DNA, 25 bp, SARS Virus
aggctaccgtttaactgagaatggt

SEQ ID NO: 169076 - DNA, 25 bp, SARS Virus
ggctaccgttttactgagaatggtc

SEQ ID NO: 169077 - DNA, 25 bp, SARS Virus
gctaccgttttaatgagaatggtca

SEQ ID NO: 169078 - DNA, 25 bp, SARS Virus
ctaccgttttacagagaatggtcat

SEQ ID NO: 169079 - DNA, 25 bp, SARS Virus
taccgttttactaagaatggtcatg

SEQ ID NO: 169080 - DNA, 25 bp, SARS Virus
accgttttactgagaatggtcatgg

SEQ ID NO: 169081 - DNA, 25 bp, SARS Virus
ccgttttactgaaaatggtcatggt

SEQ ID NO: 169082 - DNA, 25 bp, SARS Virus
cgttttactgagaatggtcatggtc

SEQ ID NO: 169083 - DNA, 25 bp, SARS Virus
gttttactgagaatggtcatggtcc

SEQ ID NO: 169084 - DNA, 25 bp, SARS Virus
ttttactgagaaaggtcatggtcca

SEQ ID NO: 169085 - DNA, 25 bp, SARS Virus
tttactgagaatagtcatggtccac

SEQ ID NO: 169086 - DNA, 25 bp, SARS Virus
ttactgagaatgatcatggtccacc

SEQ ID NO: 169087 - DNA, 25 bp, SARS Virus
tactgagaatggacatggtccacca

SEQ ID NO: 169088 - DNA, 25 bp, SARS Virus
actgagaatggtaatggtccaccag

SEQ ID NO: 169089 - DNA, 25 bp, SARS Virus
ctgagaatggtcatggtccaccagg

SEQ ID NO: 169090 - DNA, 25 bp, SARS Virus
tgagaatggtcaaggtccaccagga

SEQ ID NO: 169091 - DNA, 25 bp, SARS Virus
gagaatggtcatagtccaccaggaa

SEQ ID NO: 169092 - DNA, 25 bp, SARS Virus
agaatggtcatgatccaccaggaac

SEQ ID NO: 169093 - DNA, 25 bp, SARS Virus
gaatggtcatggaccaccaggaacc

SEQ ID NO: 169094 - DNA, 25 bp, SARS Virus
aatggtcatggtacaccaggaacct

SEQ ID NO: 169095 - DNA, 25 bp, SARS Virus
atggtcatggtcaaccaggaacctc

SEQ ID NO: 169096 - DNA, 25 bp, SARS Virus
tggtcatggtccaccaggaacctca

SEQ ID NO: 169097 - DNA, 25 bp, SARS Virus
ggtcatggtccaacaggaacctcac

SEQ ID NO: 169098 - DNA, 25 bp, SARS Virus
gtcatggtccacaaggaacctcaca

SEQ ID NO: 169099 - DNA, 25 bp, SARS Virus
tcatggtccaccaggaacctcacat

SEQ ID NO: 169100 - DNA, 25 bp, SARS Virus
catggtccaccaagaacctcacatc

SEQ ID NO: 169101 - DNA, 25 bp, SARS Virus
atggtccaccagaaacctcacatct

SEQ ID NO: 169102 - DNA, 25 bp, SARS Virus
tggtccaccaggaacctcacatctc

SEQ ID NO: 169103 - DNA, 25 bp, SARS Virus
ggtccaccaggaacctcacatctca

SEQ ID NO: 169104 - DNA, 25 bp, SARS Virus
gtccaccaggaaactcacatctcat

SEQ ID NO: 169105 - DNA, 25 bp, SARS Virus
tccaccaggaacatcacatctcatg

SEQ ID NO: 169106 - DNA, 25 bp, SARS Virus
ccaccaggaaccacacatctcatga

SEQ ID NO: 169107 - DNA, 25 bp, SARS Virus
caccaggaacctaacatctcatgaa

SEQ ID NO: 169108 - DNA, 25 bp, SARS Virus
accaggaacctcacatctcatgaaa

SEQ ID NO: 169109 - DNA, 25 bp, SARS Virus
ccaggaacctcaaatctcatgaaaa

SEQ ID NO: 169110 - DNA, 25 bp, SARS Virus
caggaacctcacatctcatgaaaac

SEQ ID NO: 169111 - DNA, 25 bp, SARS Virus
aggaacctcacaactcatgaaaacg

SEQ ID NO: 169112 - DNA, 25 bp, SARS Virus
ggaacctcacatatcatgaaaacgt

SEQ ID NO: 169113 - DNA, 25 bp, SARS Virus
gaacctcacatcacatgaaaacgta

SEQ ID NO: 169114 - DNA, 25 bp, SARS Virus
aacctcacatctaatgaaaacgtac

SEQ ID NO: 169115 - DNA, 25 bp, SARS Virus
acctcacatctcatgaaaacgtacg

SEQ ID NO: 169116 - DNA, 25 bp, SARS Virus
cctcacatctcaagaaaacgtacgg

SEQ ID NO: 169117 - DNA, 25 bp, SARS Virus
ctcacatctcataaaaacgtacggc

SEQ ID NO: 169118 - DNA, 25 bp, SARS Virus
tcacatctcatgaaaacgtacggct

SEQ ID NO: 169119 - DNA, 25 bp, SARS Virus
cacatctcatgaaaacgtacggctg

SEQ ID NO: 169120 - DNA, 25 bp, SARS Virus
acatctcatgaaaacgtacggctgg

SEQ ID NO: 169121 - DNA, 25 bp, SARS Virus
catctcatgaaaacgtacggctgga

SEQ ID NO: 169122 - DNA, 25 bp, SARS Virus
atctcatgaaaaagtacggctggaa

SEQ ID NO: 169123 - DNA, 25 bp, SARS Virus
tctcatgaaaacatacggctggaaa

SEQ ID NO: 169124 - DNA, 25 bp, SARS Virus
ctcatgaaaacgaacggctggaaaa

SEQ ID NO: 169125 - DNA, 25 bp, SARS Virus
tcatgaaaacgtacggctggaaaac

SEQ ID NO: 169126 - DNA, 25 bp, SARS Virus
catgaaaacgtaaggctggaaaact

SEQ ID NO: 169127 - DNA, 25 bp, SARS Virus
atgaaaacgtacagctggaaaacta

SEQ ID NO: 169128 - DNA, 25 bp, SARS Virus
tgaaaacgtacgactggaaaactat

SEQ ID NO: 169129 - DNA, 25 bp, SARS Virus
gaaaacgtacggatggaaaactatt

SEQ ID NO: 169130 - DNA, 25 bp, SARS Virus
aaaacgtacggcaggaaaactatta

SEQ ID NO: 169131 - DNA, 25 bp, SARS Virus
aaacgtacggctagaaaactattaa

SEQ ID NO: 169132 - DNA, 25 bp, SARS Virus
aacgtacggctgaaaaactattaaa

SEQ ID NO: 169133 - DNA, 25 bp, SARS Virus
acgtacggctggaaaactattaaac

SEQ ID NO: 169134 - DNA, 25 bp, SARS Virus
cgtacggctggaaaactattaaacg

SEQ ID NO: 169135 - DNA, 25 bp, SARS Virus
gtacggctggaaaactattaaacgt

SEQ ID NO: 169136 - DNA, 25 bp, SARS Virus
tacggctggaaaactattaaacgtt

SEQ ID NO: 169137 - DNA, 25 bp, SARS Virus
acggctggaaaaatattaaacgttg

SEQ ID NO: 169138 - DNA, 25 bp, SARS Virus
cggctggaaaacaattaaacgttgt

SEQ ID NO: 169139 - DNA, 25 bp, SARS Virus
ggctggaaaactattaaacgttgta

SEQ ID NO: 169140 - DNA, 25 bp, SARS Virus
gctggaaaactaataaacgttgtaa

SEQ ID NO: 169141 - DNA, 25 bp, SARS Virus
ctggaaaactataaaacgttgtaac

SEQ ID NO: 169142 - DNA, 25 bp, SARS Virus
tggaaaactattaaacgttgtaacg

SEQ ID NO: 169143 - DNA, 25 bp, SARS Virus
ggaaaactattaaacgttgtaacga

SEQ ID NO: 169144 - DNA, 25 bp, SARS Virus
gaaaactattaaacgttgtaacgat

SEQ ID NO: 169145 - DNA, 25 bp, SARS Virus
aaaactattaaaagttgtaacgatc

SEQ ID NO: 169146 - DNA, 25 bp, SARS Virus
aaactattaaacattgtaacgatct

SEQ ID NO: 169147 - DNA, 25 bp, SARS Virus
aactattaaacgatgtaacgatctt

SEQ ID NO: 169148 - DNA, 25 bp, SARS Virus
actattaaacgtagtaacgatcttt

SEQ ID NO: 169149 - DNA, 25 bp, SARS Virus
ctattaaacgttataacgatctttt

SEQ ID NO: 169150 - DNA, 25 bp, SARS Virus
tattaaacgttgaaacgatcttttg

SEQ ID NO: 169151 - DNA, 25 bp, SARS Virus
attaaacgttgtaacgatcttttga

SEQ ID NO: 169152 - DNA, 25 bp, SARS Virus
ttaaacgttgtaacgatcttttgag

SEQ ID NO: 169153 - DNA, 25 bp, SARS Virus
taaacgttgtaaagatcttttgagt

SEQ ID NO: 169154 - DNA, 25 bp, SARS Virus
aaacgttgtaacaatcttttgagta

SEQ ID NO: 169155 - DNA, 25 bp, SARS Virus
aacgttgtaacgatcttttgagtag

SEQ ID NO: 169156 - DNA, 25 bp, SARS Virus
acgttgtaacgaacttttgagtaga

SEQ ID NO: 169157 - DNA, 25 bp, SARS Virus
cgttgtaacgatattttgagtagac

SEQ ID NO: 169158 - DNA, 25 bp, SARS Virus
gttgtaacgatcatttgagtagact

SEQ ID NO: 169159 - DNA, 25 bp, SARS Virus
ttgtaacgatctattgagtagactc

SEQ ID NO: 169160 - DNA, 25 bp, SARS Virus
tgtaacgatcttatgagtagactct

SEQ ID NO: 169161 - DNA, 25 bp, SARS Virus
gtaacgatctttagagtagactcta

SEQ ID NO: 169162 - DNA, 25 bp, SARS Virus
taacgatcttttaagtagactctac

SEQ ID NO: 169163 - DNA, 25 bp, SARS Virus
aacgatcttttgagtagactctaca

SEQ ID NO: 169164 - DNA, 25 bp, SARS Virus
acgatcttttgaatagactctacaa

SEQ ID NO: 169165 - DNA, 25 bp, SARS Virus
cgatcttttgagaagactctacaac

SEQ ID NO: 169166 - DNA, 25 bp, SARS Virus
gatcttttgagtagactctacaact

SEQ ID NO: 169167 - DNA, 25 bp, SARS Virus
atcttttgagtaaactctacaactc

SEQ ID NO: 169168 - DNA, 25 bp, SARS Virus
tcttttgagtagactctacaactca

SEQ ID NO: 169169 - DNA, 25 bp, SARS Virus
cttttgagtagaatctacaactcac

SEQ ID NO: 169170 - DNA, 25 bp, SARS Virus
ttttgagtagacactacaactcaca

SEQ ID NO: 169171 - DNA, 25 bp, SARS Virus
tttgagtagactatacaactcacaa

SEQ ID NO: 169172 - DNA, 25 bp, SARS Virus
ttgagtagactcaacaactcacaac

SEQ ID NO: 169173 - DNA, 25 bp, SARS Virus
tgagtagactctacaactcacaacc

SEQ ID NO: 169174 - DNA, 25 bp, SARS Virus
gagtagactctaaaactcacaaccc

SEQ ID NO: 169175 - DNA, 25 bp, SARS Virus
agtagactctacaactcacaaccca

SEQ ID NO: 169176 - DNA, 25 bp, SARS Virus
gtagactctacaactcacaacccat

SEQ ID NO: 169177 - DNA, 25 bp, SARS Virus
tagactctacaaatcacaacccatg

SEQ ID NO: 169178 - DNA, 25 bp, SARS Virus
agactctacaacacacaacccatgt

SEQ ID NO: 169179 - DNA, 25 bp, SARS Virus
gactctacaactaacaacccatgtt

SEQ ID NO: 169180 - DNA, 25 bp, SARS Virus
actctacaactcacaacccatgttc

SEQ ID NO: 169181 - DNA, 25 bp, SARS Virus
ctctacaactcaaaacccatgttcg

SEQ ID NO: 169182 - DNA, 25 bp, SARS Virus
tctacaactcacaacccatgttcgg

SEQ ID NO: 169183 - DNA, 25 bp, SARS Virus
ctacaactcacaacccatgttcggt

SEQ ID NO: 169184 - DNA, 25 bp, SARS Virus
tacaactcacaaaccatgttcggtc

SEQ ID NO: 169185 - DNA, 25 bp, SARS Virus
acaactcacaacacatgttcggtca

SEQ ID NO: 169186 - DNA, 25 bp, SARS Virus
caactcacaaccaatgttcggtcat

SEQ ID NO: 169187 - DNA, 25 bp, SARS Virus
aactcacaacccatgttcggtcatt

SEQ ID NO: 169188 - DNA, 25 bp, SARS Virus
actcacaacccaagttcggtcatta

SEQ ID NO: 169189 - DNA, 25 bp, SARS Virus
ctcacaacccatattcggtcattaa

SEQ ID NO: 169190 - DNA, 25 bp, SARS Virus
tcacaacccatgatcggtcattaag

SEQ ID NO: 169191 - DNA, 25 bp, SARS Virus
cacaacccatgtacggtcattaaga

SEQ ID NO: 169192 - DNA, 25 bp, SARS Virus
acaacccatgttaggtcattaagag

SEQ ID NO: 169193 - DNA, 25 bp, SARS Virus
caacccatgttcagtcattaagagt

SEQ ID NO: 169194 - DNA, 25 bp, SARS Virus
aacccatgttcgatcattaagagtg

SEQ ID NO: 169195 - DNA, 25 bp, SARS Virus
acccatgttcggacattaagagtgt

SEQ ID NO: 169196 - DNA, 25 bp, SARS Virus
cccatgttcggtaattaagagtgta

SEQ ID NO: 169197 - DNA, 25 bp, SARS Virus
ccatgttcggtcattaagagtgtat

SEQ ID NO: 169198 - DNA, 25 bp, SARS Virus
catgttcggtcaataagagtgtatc

SEQ ID NO: 169199 - DNA, 25 bp, SARS Virus
atgttcggtcataaagagtgtatca

SEQ ID NO: 169200 - DNA, 25 bp, SARS Virus
tgttcggtcattaagagtgtatcac

SEQ ID NO: 169201 - DNA, 25 bp, SARS Virus
gttcggtcattaagagtgtatcacg

SEQ ID NO: 169202 - DNA, 25 bp, SARS Virus
ttcggtcattaaaagtgtatcacga

SEQ ID NO: 169203 - DNA, 25 bp, SARS Virus
tcggtcattaagagtgtatcacgag

SEQ ID NO: 169204 - DNA, 25 bp, SARS Virus
cggtcattaagaatgtatcacgaga

SEQ ID NO: 169205 - DNA, 25 bp, SARS Virus
ggtcattaagagagtatcacgagaa

SEQ ID NO: 169206 - DNA, 25 bp, SARS Virus
gtcattaagagtatatcacgagaac

SEQ ID NO: 169207 - DNA, 25 bp, SARS Virus
tcattaagagtgaatcacgagaaca

SEQ ID NO: 169208 - DNA, 25 bp, SARS Virus
cattaagagtgtatcacgagaacac

SEQ ID NO: 169209 - DNA, 25 bp, SARS Virus
attaagagtgtaacacgagaacacc

SEQ ID NO: 169210 - DNA, 25 bp, SARS Virus
ttaagagtgtataacgagaacaccg

SEQ ID NO: 169211 - DNA, 25 bp, SARS Virus
taagagtgtatcacgagaacaccgt

SEQ ID NO: 169212 - DNA, 25 bp, SARS Virus
aagagtgtatcaagagaacaccgtg

SEQ ID NO: 169213 - DNA, 25 bp, SARS Virus
agagtgtatcacaagaacaccgtga

SEQ ID NO: 169214 - DNA, 25 bp, SARS Virus
gagtgtatcacgagaacaccgtgat

SEQ ID NO: 169215 - DNA, 25 bp, SARS Virus
agtgtatcacgaaaacaccgtgatc

SEQ ID NO: 169216 - DNA, 25 bp, SARS Virus
gtgtatcacgagaacaccgtgatct

SEQ ID NO: 169217 - DNA, 25 bp, SARS Virus
tgtatcacgagaacaccgtgatctc

SEQ ID NO: 169218 - DNA, 25 bp, SARS Virus
gtatcacgagaaaaccgtgatctca

SEQ ID NO: 169219 - DNA, 25 bp, SARS Virus
tatcacgagaacaccgtgatctcat

SEQ ID NO: 169220 - DNA, 25 bp, SARS Virus
atcacgagaacaacgtgatctcatc

SEQ ID NO: 169221 - DNA, 25 bp, SARS Virus
tcacgagaacacagtgatctcatcc

SEQ ID NO: 169222 - DNA, 25 bp, SARS Virus
cacgagaacaccatgatctcatcca

SEQ ID NO: 169223 - DNA, 25 bp, SARS Virus
acgagaacaccgagatctcatccac

SEQ ID NO: 169224 - DNA, 25 bp, SARS Virus
cgagaacaccgtaatctcatccacg

SEQ ID NO: 169225 - DNA, 25 bp, SARS Virus
gagaacaccgtgatctcatccacgt

SEQ ID NO: 169226 - DNA, 25 bp, SARS Virus
agaacaccgtgaactcatccacgtg

SEQ ID NO: 169227 - DNA, 25 bp, SARS Virus
gaacaccgtgatatcatccacgtga

SEQ ID NO: 169228 - DNA, 25 bp, SARS Virus
aacaccgtgatcacatccacgtgat

SEQ ID NO: 169229 - DNA, 25 bp, SARS Virus
acaccgtgatctaatccacgtgatt

SEQ ID NO: 169230 - DNA, 25 bp, SARS Virus
caccgtgatctcatccacgtgattc

SEQ ID NO: 169231 - DNA, 25 bp, SARS Virus
accgtgatctcaaccacgtgattca

SEQ ID NO: 169232 - DNA, 25 bp, SARS Virus
ccgtgatctcatacacgtgattcac

SEQ ID NO: 169233 - DNA, 25 bp, SARS Virus
cgtgatctcatcaacgtgattcacc

SEQ ID NO: 169234 - DNA, 25 bp, SARS Virus
gtgatctcatccacgtgattcaccg

SEQ ID NO: 169235 - DNA, 25 bp, SARS Virus
tgatctcatccaagtgattcaccgt

SEQ ID NO: 169236 - DNA, 25 bp, SARS Virus
gatctcatccacatgattcaccgta

SEQ ID NO: 169237 - DNA, 25 bp, SARS Virus
atctcatccacgagattcaccgtaa

SEQ ID NO: 169238 - DNA, 25 bp, SARS Virus
tctcatccacgtaattcaccgtaat

SEQ ID NO: 169239 - DNA, 25 bp, SARS Virus
ctcatccacgtgattcaccgtaatg

SEQ ID NO: 169240 - DNA, 25 bp, SARS Virus
tcatccacgtgaatcaccgtaatgt

SEQ ID NO: 169241 - DNA, 25 bp, SARS Virus
catccacgtgatacaccgtaatgtc

SEQ ID NO: 169242 - DNA, 25 bp, SARS Virus
atccacgtgattaaccgtaatgtca

SEQ ID NO: 169243 - DNA, 25 bp, SARS Virus
tccacgtgattcaccgtaatgtcac

SEQ ID NO: 169244 - DNA, 25 bp, SARS Virus
ccacgtgattcaacgtaatgtcaca

SEQ ID NO: 169245 - DNA, 25 bp, SARS Virus
cacgtgattcacagtaatgtcacac

SEQ ID NO: 169246 - DNA, 25 bp, SARS Virus
acgtgattcaccataatgtcacact

SEQ ID NO: 169247 - DNA, 25 bp, SARS Virus
cgtgattcaccgaaatgtcacactc

SEQ ID NO: 169248 - DNA, 25 bp, SARS Virus
gtgattcaccgtaatgtcacactct

SEQ ID NO: 169249 - DNA, 25 bp, SARS Virus
tgattcaccgtaatgtcacactcta

SEQ ID NO: 169250 - DNA, 25 bp, SARS Virus
gattcaccgtaaagtcacactctac

SEQ ID NO: 169251 - DNA, 25 bp, SARS Virus
attcaccgtaatatcacactctaca

SEQ ID NO: 169252 - DNA, 25 bp, SARS Virus
ttcaccgtaatgacacactctacag

SEQ ID NO: 169253 - DNA, 25 bp, SARS Virus
tcaccgtaatgtaacactctacagt

SEQ ID NO: 169254 - DNA, 25 bp, SARS Virus
caccgtaatgtcacactctacagtt

SEQ ID NO: 169255 - DNA, 25 bp, SARS Virus
accgtaatgtcaaactctacagttg

SEQ ID NO: 169256 - DNA, 25 bp, SARS Virus
ccgtaatgtcacactctacagttgt

SEQ ID NO: 169257 - DNA, 25 bp, SARS Virus
cgtaatgtcacaatctacagttgtg

SEQ ID NO: 169258 - DNA, 25 bp, SARS Virus
gtaatgtcacacactacagttgtgt

SEQ ID NO: 169259 - DNA, 25 bp, SARS Virus
taatgtcacactatacagttgtgtt

SEQ ID NO: 169260 - DNA, 25 bp, SARS Virus
aatgtcacactcaacagttgtgttt

SEQ ID NO: 169261 - DNA, 25 bp, SARS Virus
atgtcacactctacagttgtgtttc

SEQ ID NO: 169262 - DNA, 25 bp, SARS Virus
tgtcacactctaaagttgtgtttca

SEQ ID NO: 169263 - DNA, 25 bp, SARS Virus
gtcacactctacagttgtgtttcat

SEQ ID NO: 169264 - DNA, 25 bp, SARS Virus
tcacactctacaattgtgtttcatt

SEQ ID NO: 169265 - DNA, 25 bp, SARS Virus
cacactctacagatgtgtttcatta

SEQ ID NO: 169266 - DNA, 25 bp, SARS Virus
acactctacagtagtgtttcattag

SEQ ID NO: 169267 - DNA, 25 bp, SARS Virus
cactctacagttatgtttcattagt

SEQ ID NO: 169268 - DNA, 25 bp, SARS Virus
actctacagttgagtttcattagtg

SEQ ID NO: 169269 - DNA, 25 bp, SARS Virus
ctctacagttgtatttcattagtgg

SEQ ID NO: 169270 - DNA, 25 bp, SARS Virus
tctacagttgtgattcattagtggt

SEQ ID NO: 169271 - DNA, 25 bp, SARS Virus
ctacagttgtgtatcattagtggtt

SEQ ID NO: 169272 - DNA, 25 bp, SARS Virus
tacagttgtgttacattagtggttg

SEQ ID NO: 169273 - DNA, 25 bp, SARS Virus
acagttgtgtttaattagtggttgt

SEQ ID NO: 169274 - DNA, 25 bp, SARS Virus
cagttgtgtttcattagtggttgta

SEQ ID NO: 169275 - DNA, 25 bp, SARS Virus
agttgtgtttcaatagtggttgtaa

SEQ ID NO: 169276 - DNA, 25 bp, SARS Virus
gttgtgtttcataagtggttgtaag

SEQ ID NO: 169277 - DNA, 25 bp, SARS Virus
ttgtgtttcattagtggttgtaagt

SEQ ID NO: 169278 - DNA, 25 bp, SARS Virus
tgtgtttcattaatggttgtaagtt

SEQ ID NO: 169279 - DNA, 25 bp, SARS Virus
gtgtttcattagaggttgtaagttg

SEQ ID NO: 169280 - DNA, 25 bp, SARS Virus
tgtttcattagtagttgtaagttga

SEQ ID NO: 169281 - DNA, 25 bp, SARS Virus
gtttcattagtgattgtaagttgaa

SEQ ID NO: 169282 - DNA, 25 bp, SARS Virus
tttcattagtggatgtaagttgaac

SEQ ID NO: 169283 - DNA, 25 bp, SARS Virus
ttcattagtggtagtaagttgaaca

SEQ ID NO: 169284 - DNA, 25 bp, SARS Virus
tcattagtggttataagttgaacat

SEQ ID NO: 169285 - DNA, 25 bp, SARS Virus
cattagtggttgaaagttgaacata

SEQ ID NO: 169286 - DNA, 25 bp, SARS Virus
attagtggttgtaagttgaacatac

SEQ ID NO: 169287 - DNA, 25 bp, SARS Virus
ttagtggttgtaagttgaacataca

SEQ ID NO: 169288 - DNA, 25 bp, SARS Virus
tagtggttgtaaattgaacatacag

SEQ ID NO: 169289 - DNA, 25 bp, SARS Virus
agtggttgtaagatgaacatacagc

SEQ ID NO: 169290 - DNA, 25 bp, SARS Virus
gtggttgtaagtagaacatacagca

SEQ ID NO: 169291 - DNA, 25 bp, SARS Virus
tggttgtaagttaaacatacagcat

SEQ ID NO: 169292 - DNA, 25 bp, SARS Virus
ggttgtaagttgaacatacagcatc

SEQ ID NO: 169293 - DNA, 25 bp, SARS Virus
gttgtaagttgaacatacagcatca

SEQ ID NO: 169294 - DNA, 25 bp, SARS Virus
ttgtaagttgaaaatacagcatcat

SEQ ID NO: 169295 - DNA, 25 bp, SARS Virus
tgtaagttgaacatacagcatcatg

SEQ ID NO: 169296 - DNA, 25 bp, SARS Virus
gtaagttgaacaaacagcatcatgg

SEQ ID NO: 169297 - DNA, 25 bp, SARS Virus
taagttgaacatacagcatcatgga

SEQ ID NO: 169298 - DNA, 25 bp, SARS Virus
aagttgaacataaagcatcatggag

SEQ ID NO: 169299 - DNA, 25 bp, SARS Virus
agttgaacatacagcatcatggaga

SEQ ID NO: 169300 - DNA, 25 bp, SARS Virus
gttgaacatacaacatcatggagac

SEQ ID NO: 169301 - DNA, 25 bp, SARS Virus
ttgaacatacagaatcatggagaca

SEQ ID NO: 169302 - DNA, 25 bp, SARS Virus
tgaacatacagcatcatggagacat

SEQ ID NO: 169303 - DNA, 25 bp, SARS Virus
gaacatacagcaacatggagacatg

SEQ ID NO: 169304 - DNA, 25 bp, SARS Virus
aacatacagcataatggagacatgt

SEQ ID NO: 169305 - DNA, 25 bp, SARS Virus
acatacagcatcatggagacatgtg

SEQ ID NO: 169306 - DNA, 25 bp, SARS Virus
catacagcatcaaggagacatgtgt

SEQ ID NO: 169307 - DNA, 25 bp, SARS Virus
atacagcatcatagagacatgtgtt

SEQ ID NO: 169308 - DNA, 25 bp, SARS Virus
tacagcatcatgaagacatgtgttg

SEQ ID NO: 169309 - DNA, 25 bp, SARS Virus
acagcatcatggagacatgtgttgt

SEQ ID NO: 169310 - DNA, 25 bp, SARS Virus
cagcatcatggaaacatgtgttgtc

SEQ ID NO: 169311 - DNA, 25 bp, SARS Virus
agcatcatggagacatgtgttgtcg

SEQ ID NO: 169312 - DNA, 25 bp, SARS Virus
gcatcatggagaaatgtgttgtcgt

SEQ ID NO: 169313 - DNA, 25 bp, SARS Virus
catcatggagacatgtgttgtcgta

SEQ ID NO: 169314 - DNA, 25 bp, SARS Virus
atcatggagacaagtgttgtcgtag

SEQ ID NO: 169315 - DNA, 25 bp, SARS Virus
tcatggagacatatgttgtcgtagt

SEQ ID NO: 169316 - DNA, 25 bp, SARS Virus
catggagacatgagttgtcgtagtg

SEQ ID NO: 169317 - DNA, 25 bp, SARS Virus
atggagacatgtattgtcgtagtgg

SEQ ID NO: 169318 - DNA, 25 bp, SARS Virus
tggagacatgtgatgtcgtagtggt

SEQ ID NO: 169319 - DNA, 25 bp, SARS Virus
ggagacatgtgtagtcgtagtggta

SEQ ID NO: 169320 - DNA, 25 bp, SARS Virus
gagacatgtgttatcgtagtggtat

SEQ ID NO: 169321 - DNA, 25 bp, SARS Virus
agacatgtgttgacgtagtggtatc

SEQ ID NO: 169322 - DNA, 25 bp, SARS Virus
gacatgtgttgtagtagtggtatca

SEQ ID NO: 169323 - DNA, 25 bp, SARS Virus
acatgtgttgtcatagtggtatcag

SEQ ID NO: 169324 - DNA, 25 bp, SARS Virus
catgtgttgtcgaagtggtatcagt

SEQ ID NO: 169325 - DNA, 25 bp, SARS Virus
atgtgttgtcgtagtggtatcagtg

SEQ ID NO: 169326 - DNA, 25 bp, SARS Virus
tgtgttgtcgtaatggtatcagtgg

SEQ ID NO: 169327 - DNA, 25 bp, SARS Virus
gtgttgtcgtagaggtatcagtgga

SEQ ID NO: 169328 - DNA, 25 bp, SARS Virus
tgttgtcgtagtagtatcagtggaa

SEQ ID NO: 169329 - DNA, 25 bp, SARS Virus
gttgtcgtagtgatatcagtggaaa

SEQ ID NO: 169330 - DNA, 25 bp, SARS Virus
ttgtcgtagtggaatcagtggaaaa

SEQ ID NO: 169331 - DNA, 25 bp, SARS Virus
tgtcgtagtggtatcagtggaaaaa

SEQ ID NO: 169332 - DNA, 25 bp, SARS Virus
gtcgtagtggtaacagtggaaaaag

SEQ ID NO: 169333 - DNA, 25 bp, SARS Virus
tcgtagtggtataagtggaaaaagt

SEQ ID NO: 169334 - DNA, 25 bp, SARS Virus
cgtagtggtatcagtggaaaaagtt

SEQ ID NO: 169335 - DNA, 25 bp, SARS Virus
gtagtggtatcaatggaaaaagttt

SEQ ID NO: 169336 - DNA, 25 bp, SARS Virus
tagtggtatcagaggaaaaagtttc

SEQ ID NO: 169337 - DNA, 25 bp, SARS Virus
agtggtatcagtagaaaaagtttcc

SEQ ID NO: 169338 - DNA, 25 bp, SARS Virus
gtggtatcagtgaaaaaagtttcca

SEQ ID NO: 169339 - DNA, 25 bp, SARS Virus
tggtatcagtggaaaaagtttccac

SEQ ID NO: 169340 - DNA, 25 bp, SARS Virus
ggtatcagtggaaaaagtttccaca

SEQ ID NO: 169341 - DNA, 25 bp, SARS Virus
gtatcagtggaaaaagtttccacat

SEQ ID NO: 169342 - DNA, 25 bp, SARS Virus
tatcagtggaaaaagtttccacatg

SEQ ID NO: 169343 - DNA, 25 bp, SARS Virus
atcagtggaaaaagtttccacatga

SEQ ID NO: 169344 - DNA, 25 bp, SARS Virus
tcagtggaaaaaatttccacatgag

SEQ ID NO: 169345 - DNA, 25 bp, SARS Virus
cagtggaaaaagattccacatgaga

SEQ ID NO: 169346 - DNA, 25 bp, SARS Virus
agtggaaaaagtatccacatgagag

SEQ ID NO: 169347 - DNA, 25 bp, SARS Virus
gtggaaaaagttaccacatgagagg

SEQ ID NO: 169348 - DNA, 25 bp, SARS Virus
tggaaaaagtttacacatgagaggt

SEQ ID NO: 169349 - DNA, 25 bp, SARS Virus
ggaaaaagtttcaacatgagaggtt

SEQ ID NO: 169350 - DNA, 25 bp, SARS Virus
gaaaaagtttccacatgagaggtta

SEQ ID NO: 169351 - DNA, 25 bp, SARS Virus
aaaaagtttccaaatgagaggttag

SEQ ID NO: 169352 - DNA, 25 bp, SARS Virus
aaaagtttccacatgagaggttaga

SEQ ID NO: 169353 - DNA, 25 bp, SARS Virus
aaagtttccacaagagaggttagac

SEQ ID NO: 169354 - DNA, 25 bp, SARS Virus
aagtttccacataagaggttagaca

SEQ ID NO: 169355 - DNA, 25 bp, SARS Virus
agtttccacatgagaggttagacat

SEQ ID NO: 169356 - DNA, 25 bp, SARS Virus
gtttccacatgaaaggttagacatg

SEQ ID NO: 169357 - DNA, 25 bp, SARS Virus
tttccacatgagaggttagacatga

SEQ ID NO: 169358 - DNA, 25 bp, SARS Virus
ttccacatgagaagttagacatgaa

SEQ ID NO: 169359 - DNA, 25 bp, SARS Virus
tccacatgagagattagacatgaaa

SEQ ID NO: 169360 - DNA, 25 bp, SARS Virus
ccacatgagaggatagacatgaaat

SEQ ID NO: 169361 - DNA, 25 bp, SARS Virus
cacatgagaggtaagacatgaaatg

SEQ ID NO: 169362 - DNA, 25 bp, SARS Virus
acatgagaggttagacatgaaatga

SEQ ID NO: 169363 - DNA, 25 bp, SARS Virus
catgagaggttaaacatgaaatgat

SEQ ID NO: 169364 - DNA, 25 bp, SARS Virus
atgagaggttagacatgaaatgata

SEQ ID NO: 169365 - DNA, 25 bp, SARS Virus
tgagaggttagaaatgaaatgataa

SEQ ID NO: 169366 - DNA, 25 bp, SARS Virus
gagaggttagacatgaaatgataaa

SEQ ID NO: 169367 - DNA, 25 bp, SARS Virus
agaggttagacaagaaatgataaaa

SEQ ID NO: 169368 - DNA, 25 bp, SARS Virus
gaggttagacataaaatgataaaaa

SEQ ID NO: 169369 - DNA, 25 bp, SARS Virus
cacgtcttttgtctgacaagatcac

SEQ ID NO: 169370 - DNA, 25 bp, SARS Virus
acgtcttttgtacgacaagatcaca

SEQ ID NO: 169371 - DNA, 25 bp, SARS Virus
cgtcttttgtatcacaagatcacaa

SEQ ID NO: 169372 - DNA, 25 bp, SARS Virus
gtcttttgtatgccaagatcacaac

SEQ ID NO: 169373 - DNA, 25 bp, SARS Virus
tcttttgtatgacaagatcacaact

SEQ ID NO: 169374 - DNA, 25 bp, SARS Virus
cttttgtatgaccagatcacaactt

SEQ ID NO: 169375 - DNA, 25 bp, SARS Virus
ttttgtatgacacgatcacaactta

SEQ ID NO: 169376 - DNA, 25 bp, SARS Virus
tttgtatgacaacatcacaacttaa

SEQ ID NO: 169377 - DNA, 25 bp, SARS Virus
ttgtatgacaagctcacaacttaag

SEQ ID NO: 169378 - DNA, 25 bp, SARS Virus
tgtatgacaagaccacaacttaagt

SEQ ID NO: 169379 - DNA, 25 bp, SARS Virus
gtatgacaagatcacaacttaagtg

SEQ ID NO: 169380 - DNA, 25 bp, SARS Virus
tatgacaagatcccaacttaagtga

SEQ ID NO: 169381 - DNA, 25 bp, SARS Virus
atgacaagatcacaacttaagtgaa

SEQ ID NO: 169382 - DNA, 25 bp, SARS Virus
tgacaagatcaccacttaagtgaaa

SEQ ID NO: 169383 - DNA, 25 bp, SARS Virus
gacaagatcacaccttaagtgaaac

SEQ ID NO: 169384 - DNA, 25 bp, SARS Virus
acaagatcacaacttaagtgaaact

SEQ ID NO: 169385 - DNA, 25 bp, SARS Virus
caagatcacaacctaagtgaaactt

SEQ ID NO: 169386 - DNA, 25 bp, SARS Virus
aagatcacaactcaagtgaaactta

SEQ ID NO: 169387 - DNA, 25 bp, SARS Virus
agatcacaacttcagtgaaacttaa

SEQ ID NO: 169388 - DNA, 25 bp, SARS Virus
gatcacaacttacgtgaaacttaaa

SEQ ID NO: 169389 - DNA, 25 bp, SARS Virus
atcacaacttaactgaaacttaaat

SEQ ID NO: 169390 - DNA, 25 bp, SARS Virus
tcacaacttaagcgaaacttaaata

SEQ ID NO: 169391 - DNA, 25 bp, SARS Virus
cacaacttaagtcaaacttaaatag

SEQ ID NO: 169392 - DNA, 25 bp, SARS Virus
acaacttaagtgcaacttaaatagt

SEQ ID NO: 169393 - DNA, 25 bp, SARS Virus
caacttaagtgacacttaaatagtt

SEQ ID NO: 169394 - DNA, 25 bp, SARS Virus
aacttaagtgaaccttaaatagttt

SEQ ID NO: 169395 - DNA, 25 bp, SARS Virus
acttaagtgaaacttaaatagtttt

SEQ ID NO: 169396 - DNA, 25 bp, SARS Virus
cttaagtgaaacctaaatagttttg

SEQ ID NO: 169397 - DNA, 25 bp, SARS Virus
ttaagtgaaactcaaatagttttgt

SEQ ID NO: 169398 - DNA, 25 bp, SARS Virus
taagtgaaacttcaatagttttgtg

SEQ ID NO: 169399 - DNA, 25 bp, SARS Virus
aagtgaaacttacatagttttgtga

SEQ ID NO: 169400 - DNA, 25 bp, SARS Virus
agtgaaacttaactagttttgtgag

SEQ ID NO: 169401 - DNA, 25 bp, SARS Virus
gtgaaacttaaacagttttgtgaga

SEQ ID NO: 169402 - DNA, 25 bp, SARS Virus
tgaaacttaaatcgttttgtgagat

SEQ ID NO: 169403 - DNA, 25 bp, SARS Virus
gaaacttaaatacttttgtgagatg

SEQ ID NO: 169404 - DNA, 25 bp, SARS Virus
aaacttaaatagctttgtgagatgc

SEQ ID NO: 169405 - DNA, 25 bp, SARS Virus
aacttaaatagtcttgtgagatgcg

SEQ ID NO: 169406 - DNA, 25 bp, SARS Virus
acttaaatagttctgtgagatgcgc

SEQ ID NO: 169407 - DNA, 25 bp, SARS Virus
cttaaatagtttcgtgagatgcgcg

SEQ ID NO: 169408 - DNA, 25 bp, SARS Virus
ttaaatagttttctgagatgcgcgc

SEQ ID NO: 169409 - DNA, 25 bp, SARS Virus
taaatagttttgcgagatgcgcgcg

SEQ ID NO: 169410 - DNA, 25 bp, SARS Virus
aaatagttttgtcagatgcgcgcgt

SEQ ID NO: 169411 - DNA, 25 bp, SARS Virus
aatagttttgtgcgatgcgcgcgtg

SEQ ID NO: 169412 - DNA, 25 bp, SARS Virus
atagttttgtgacatgcgcgcgtgc

SEQ ID NO: 169413 - DNA, 25 bp, SARS Virus
tagttttgtgagctgcgcgcgtgcg

SEQ ID NO: 169414 - DNA, 25 bp, SARS Virus
agttttgtgagacgcgcgcgtgcgc

SEQ ID NO: 169415 - DNA, 25 bp, SARS Virus
gttttgtgagatccgcgcgtgcgcg

SEQ ID NO: 169416 - DNA, 25 bp, SARS Virus
ttttgtgagatgcgcgcgtgcgcgt

SEQ ID NO: 169417 - DNA, 25 bp, SARS Virus
tttgtgagatgcccgcgtgcgcgtc

SEQ ID NO: 169418 - DNA, 25 bp, SARS Virus
ttgtgagatgcgcgcgtgcgcgtcc

SEQ ID NO: 169419 - DNA, 25 bp, SARS Virus
tgtgagatgcgcccgtgcgcgtcca

SEQ ID NO: 169420 - DNA, 25 bp, SARS Virus
gtgagatgcgcgcgtgcgcgtccat

SEQ ID NO: 169421 - DNA, 25 bp, SARS Virus
tgagatgcgcgcctgcgcgtccata

SEQ ID NO: 169422 - DNA, 25 bp, SARS Virus
gagatgcgcgcgcgcgcgtccatac

SEQ ID NO: 169423 - DNA, 25 bp, SARS Virus
agatgcgcgcgtccgcgtccatact

SEQ ID NO: 169424 - DNA, 25 bp, SARS Virus
gatgcgcgcgtgcgcgtccatacta

SEQ ID NO: 169425 - DNA, 25 bp, SARS Virus
atgcgcgcgtgcccgtccatactaa

SEQ ID NO: 169426 - DNA, 25 bp, SARS Virus
tgcgcgcgtgcgcgtccatactaag

SEQ ID NO: 169427 - DNA, 25 bp, SARS Virus
gcgcgcgtgcgcctccatactaaga

SEQ ID NO: 169428 - DNA, 25 bp, SARS Virus
cgcgcgtgcgcgcccatactaagat

SEQ ID NO: 169429 - DNA, 25 bp, SARS Virus
gcgcgtgcgcgtccatactaagatg

SEQ ID NO: 169430 - DNA, 25 bp, SARS Virus
cgcgtgcgcgtccatactaagatga

SEQ ID NO: 169431 - DNA, 25 bp, SARS Virus
gcgtgcgcgtccctactaagatgat

SEQ ID NO: 169432 - DNA, 25 bp, SARS Virus
cgtgcgcgtccacactaagatgatg

SEQ ID NO: 169433 - DNA, 25 bp, SARS Virus
gtgcgcgtccatcctaagatgatgt

SEQ ID NO: 169434 - DNA, 25 bp, SARS Virus
tgcgcgtccatactaagatgatgta

SEQ ID NO: 169435 - DNA, 25 bp, SARS Virus
gcgcgtccataccaagatgatgtaa

SEQ ID NO: 169436 - DNA, 25 bp, SARS Virus
cgcgtccatactcagatgatgtaaa

SEQ ID NO: 169437 - DNA, 25 bp, SARS Virus
gcgtccatactacgatgatgtaaat

SEQ ID NO: 169438 - DNA, 25 bp, SARS Virus
cgtccatactaacatgatgtaaata

SEQ ID NO: 169439 - DNA, 25 bp, SARS Virus
gtccatactaagctgatgtaaatag

SEQ ID NO: 169440 - DNA, 25 bp, SARS Virus
tccatactaagacgatgtaaataga

SEQ ID NO: 169441 - DNA, 25 bp, SARS Virus
ccatactaagatcatgtaaatagat

SEQ ID NO: 169442 - DNA, 25 bp, SARS Virus
catactaagatgctgtaaatagata

SEQ ID NO: 169443 - DNA, 25 bp, SARS Virus
atactaagatgacgtaaatagatac

SEQ ID NO: 169444 - DNA, 25 bp, SARS Virus
tactaagatgatctaaatagatacc

SEQ ID NO: 169445 - DNA, 25 bp, SARS Virus
actaagatgatgcaaatagataccc

SEQ ID NO: 169446 - DNA, 25 bp, SARS Virus
ctaagatgatgtcaatagatacccg

SEQ ID NO: 169447 - DNA, 25 bp, SARS Virus
taagatgatgtacatagatacccgt

SEQ ID NO: 169448 - DNA, 25 bp, SARS Virus
aagatgatgtaactagatacccgtt

SEQ ID NO: 169449 - DNA, 25 bp, SARS Virus
agatgatgtaaacagatacccgttt

SEQ ID NO: 169450 - DNA, 25 bp, SARS Virus
gatgatgtaaatcgatacccgttta

SEQ ID NO: 169451 - DNA, 25 bp, SARS Virus
atgatgtaaatacatacccgtttat

SEQ ID NO: 169452 - DNA, 25 bp, SARS Virus
tgatgtaaatagctacccgtttata

SEQ ID NO: 169453 - DNA, 25 bp, SARS Virus
gatgtaaatagacacccgtttataa

SEQ ID NO: 169454 - DNA, 25 bp, SARS Virus
atgtaaatagatccccgtttataaa

SEQ ID NO: 169455 - DNA, 25 bp, SARS Virus
tgtaaatagatacccgtttataaaa

SEQ ID NO: 169456 - DNA, 25 bp, SARS Virus
gtaaatagatacccgtttataaaat

SEQ ID NO: 169457 - DNA, 25 bp, SARS Virus
taaatagatacccgtttataaaatt

SEQ ID NO: 169458 - DNA, 25 bp, SARS Virus
aaatagatacccctttataaaatta

SEQ ID NO: 169459 - DNA, 25 bp, SARS Virus
aatagatacccgcttataaaattac

SEQ ID NO: 169460 - DNA, 25 bp, SARS Virus
atagatacccgtctataaaattacg

SEQ ID NO: 169461 - DNA, 25 bp, SARS Virus
tagatacccgttcataaaattacgg

SEQ ID NO: 169462 - DNA, 25 bp, SARS Virus
agatacccgtttctaaaattacgga

SEQ ID NO: 169463 - DNA, 25 bp, SARS Virus
gatacccgtttacaaaattacggaa

SEQ ID NO: 169464 - DNA, 25 bp, SARS Virus
atacccgtttatcaaattacggaaa

SEQ ID NO: 169465 - DNA, 25 bp, SARS Virus
tacccgtttatacaattacggaaaa

SEQ ID NO: 169466 - DNA, 25 bp, SARS Virus
acccgtttataacattacggaaaag

SEQ ID NO: 169467 - DNA, 25 bp, SARS Virus
cccgtttataaacttacggaaaagt

SEQ ID NO: 169468 - DNA, 25 bp, SARS Virus
ccgtttataaaactacggaaaagtg

SEQ ID NO: 169469 - DNA, 25 bp, SARS Virus
cgtttataaaatcacggaaaagtgt

SEQ ID NO: 169470 - DNA, 25 bp, SARS Virus
gtttataaaattccggaaaagtgta

SEQ ID NO: 169471 - DNA, 25 bp, SARS Virus
tttataaaattacggaaaagtgtat

SEQ ID NO: 169472 - DNA, 25 bp, SARS Virus
ttataaaattaccgaaaagtgtatc

SEQ ID NO: 169473 - DNA, 25 bp, SARS Virus
tataaaattacgcaaaagtgtatcc

SEQ ID NO: 169474 - DNA, 25 bp, SARS Virus
ataaaattacggcaaagtgtatccc

SEQ ID NO: 169475 - DNA, 25 bp, SARS Virus
taaaattacggacaagtgtatcccg

SEQ ID NO: 169476 - DNA, 25 bp, SARS Virus
aaaattacggaacagtgtatcccgt

SEQ ID NO: 169477 - DNA, 25 bp, SARS Virus
aaattacggaaacgtgtatcccgta

SEQ ID NO: 169478 - DNA, 25 bp, SARS Virus
aattacggaaaactgtatcccgtag

SEQ ID NO: 169479 - DNA, 25 bp, SARS Virus
attacggaaaagcgtatcccgtagt

SEQ ID NO: 169480 - DNA, 25 bp, SARS Virus
ttacggaaaagtctatcccgtagtt

SEQ ID NO: 169481 - DNA, 25 bp, SARS Virus
tacggaaaagtgcatcccgtagttg

SEQ ID NO: 169482 - DNA, 25 bp, SARS Virus
acggaaaagtgtctcccgtagttgt

SEQ ID NO: 169483 - DNA, 25 bp, SARS Virus
cggaaaagtgtaccccgtagttgtc

SEQ ID NO: 169484 - DNA, 25 bp, SARS Virus
ggaaaagtgtatcccgtagttgtcg

SEQ ID NO: 169485 - DNA, 25 bp, SARS Virus
gaaaagtgtatcccgtagttgtcga

SEQ ID NO: 169486 - DNA, 25 bp, SARS Virus
aaaagtgtatcccgtagttgtcgac

SEQ ID NO: 169487 - DNA, 25 bp, SARS Virus
aaagtgtatcccctagttgtcgacg

SEQ ID NO: 169488 - DNA, 25 bp, SARS Virus
aagtgtatcccgcagttgtcgacgt

SEQ ID NO: 169489 - DNA, 25 bp, SARS Virus
agtgtatcccgtcgttgtcgacgta

SEQ ID NO: 169490 - DNA, 25 bp, SARS Virus
gtgtatcccgtacttgtcgacgtac

SEQ ID NO: 169491 - DNA, 25 bp, SARS Virus
tgtatcccgtagctgtcgacgtact

SEQ ID NO: 169492 - DNA, 25 bp, SARS Virus
gtatcccgtagtcgtcgacgtactc

SEQ ID NO: 169493 - DNA, 25 bp, SARS Virus
tatcccgtagttctcgacgtactct

SEQ ID NO: 169494 - DNA, 25 bp, SARS Virus
atcccgtagttgccgacgtactctc

SEQ ID NO: 169495 - DNA, 25 bp, SARS Virus
tcccgtagttgtcgacgtactctcg

SEQ ID NO: 169496 - DNA, 25 bp, SARS Virus
cccgtagttgtccacgtactctcgt

SEQ ID NO: 169497 - DNA, 25 bp, SARS Virus
ccgtagttgtcgccgtactctcgta

SEQ ID NO: 169498 - DNA, 25 bp, SARS Virus
cgtagttgtcgacgtactctcgtac

SEQ ID NO: 169499 - DNA, 25 bp, SARS Virus
gtagttgtcgacctactctcgtacg

SEQ ID NO: 169500 - DNA, 25 bp, SARS Virus
tagttgtcgacgcactctcgtacgg

SEQ ID NO: 169501 - DNA, 25 bp, SARS Virus
agttgtcgacgtcctctcgtacggc

SEQ ID NO: 169502 - DNA, 25 bp, SARS Virus
gttgtcgacgtactctcgtacggca

SEQ ID NO: 169503 - DNA, 25 bp, SARS Virus
ttgtcgacgtaccctcgtacggcat

SEQ ID NO: 169504 - DNA, 25 bp, SARS Virus
tgtcgacgtactctcgtacggcata

SEQ ID NO: 169505 - DNA, 25 bp, SARS Virus
gtcgacgtactcccgtacggcatat

SEQ ID NO: 169506 - DNA, 25 bp, SARS Virus
tcgacgtactctcgtacggcatatg

SEQ ID NO: 169507 - DNA, 25 bp, SARS Virus
cgacgtactctcctacggcatatgt

SEQ ID NO: 169508 - DNA, 25 bp, SARS Virus
gacgtactctcgcacggcatatgtg

SEQ ID NO: 169509 - DNA, 25 bp, SARS Virus
acgtactctcgtccggcatatgtga

SEQ ID NO: 169510 - DNA, 25 bp, SARS Virus
cgtactctcgtacggcatatgtgat

SEQ ID NO: 169511 - DNA, 25 bp, SARS Virus
gtactctcgtaccgcatatgtgata

SEQ ID NO: 169512 - DNA, 25 bp, SARS Virus
tactctcgtacgccatatgtgatac

SEQ ID NO: 169513 - DNA, 25 bp, SARS Virus
actctcgtacggcatatgtgatacg

SEQ ID NO: 169514 - DNA, 25 bp, SARS Virus
ctctcgtacggcctatgtgatacgc

SEQ ID NO: 169515 - DNA, 25 bp, SARS Virus
tctcgtacggcacatgtgatacgct

SEQ ID NO: 169516 - DNA, 25 bp, SARS Virus
ctcgtacggcatctgtgatacgctc

SEQ ID NO: 169517 - DNA, 25 bp, SARS Virus
tcgtacggcatacgtgatacgctcg

SEQ ID NO: 169518 - DNA, 25 bp, SARS Virus
cgtacggcatatctgatacgctcgt

SEQ ID NO: 169519 - DNA, 25 bp, SARS Virus
gtacggcatatgcgatacgctcgtc

SEQ ID NO: 169520 - DNA, 25 bp, SARS Virus
tacggcatatgtcatacgctcgtct

SEQ ID NO: 169521 - DNA, 25 bp, SARS Virus
acggcatatgtgctacgctcgtcta

SEQ ID NO: 169522 - DNA, 25 bp, SARS Virus
cggcatatgtgacacgctcgtctac

SEQ ID NO: 169523 - DNA, 25 bp, SARS Virus
ggcatatgtgatccgctcgtctacc

SEQ ID NO: 169524 - DNA, 25 bp, SARS Virus
gcatatgtgatacgctcgtctaccc

SEQ ID NO: 169525 - DNA, 25 bp, SARS Virus
catatgtgataccctcgtctaccca

SEQ ID NO: 169526 - DNA, 25 bp, SARS Virus
atatgtgatacgctcgtctacccat

SEQ ID NO: 169527 - DNA, 25 bp, SARS Virus
tatgtgatacgcccgtctacccatt

SEQ ID NO: 169528 - DNA, 25 bp, SARS Virus
atgtgatacgctcgtctacccatta

SEQ ID NO: 169529 - DNA, 25 bp, SARS Virus
tgtgatacgctcctctacccattat

SEQ ID NO: 169530 - DNA, 25 bp, SARS Virus
gtgatacgctcgcctacccattatc

SEQ ID NO: 169531 - DNA, 25 bp, SARS Virus
tgatacgctcgtctacccattatct

SEQ ID NO: 169532 - DNA, 25 bp, SARS Virus
gatacgctcgtccacccattatctc

SEQ ID NO: 169533 - DNA, 25 bp, SARS Virus
atacgctcgtctccccattatctct

SEQ ID NO: 169534 - DNA, 25 bp, SARS Virus
tacgctcgtctacccattatctctc

SEQ ID NO: 169535 - DNA, 25 bp, SARS Virus
acgctcgtctacccattatctctcg

SEQ ID NO: 169536 - DNA, 25 bp, SARS Virus
cgctcgtctacccattatctctcgt

SEQ ID NO: 169537 - DNA, 25 bp, SARS Virus
gctcgtctaccccttatctctcgtt

SEQ ID NO: 169538 - DNA, 25 bp, SARS Virus
ctcgtctacccactatctctcgttc

SEQ ID NO: 169539 - DNA, 25 bp, SARS Virus
tcgtctacccatcatctctcgttca

SEQ ID NO: 169540 - DNA, 25 bp, SARS Virus
cgtctacccattctctctcgttcag

SEQ ID NO: 169541 - DNA, 25 bp, SARS Virus
gtctacccattacctctcgttcagg

SEQ ID NO: 169542 - DNA, 25 bp, SARS Virus
tctacccattatctctcgttcaggc

SEQ ID NO: 169543 - DNA, 25 bp, SARS Virus
ctacccattatccctcgttcaggct

SEQ ID NO: 169544 - DNA, 25 bp, SARS Virus
tacccattatctctcgttcaggcta

SEQ ID NO: 169545 - DNA, 25 bp, SARS Virus
acccattatctcccgttcaggctac

SEQ ID NO: 169546 - DNA, 25 bp, SARS Virus
cccattatctctcgttcaggctacc

SEQ ID NO: 169547 - DNA, 25 bp, SARS Virus
ccattatctctccttcaggctaccg

SEQ ID NO: 169548 - DNA, 25 bp, SARS Virus
cattatctctcgctcaggctaccgt

SEQ ID NO: 169549 - DNA, 25 bp, SARS Virus
attatctctcgtccaggctaccgtt

SEQ ID NO: 169550 - DNA, 25 bp, SARS Virus
ttatctctcgttcaggctaccgttt

SEQ ID NO: 169551 - DNA, 25 bp, SARS Virus
tatctctcgttccggctaccgtttt

SEQ ID NO: 169552 - DNA, 25 bp, SARS Virus
atctctcgttcacgctaccgtttta

SEQ ID NO: 169553 - DNA, 25 bp, SARS Virus
tctctcgttcagcctaccgttttac

SEQ ID NO: 169554 - DNA, 25 bp, SARS Virus
ctctcgttcaggctaccgttttact

SEQ ID NO: 169555 - DNA, 25 bp, SARS Virus
tctcgttcaggccaccgttttactg

SEQ ID NO: 169556 - DNA, 25 bp, SARS Virus
ctcgttcaggctcccgttttactga

SEQ ID NO: 169557 - DNA, 25 bp, SARS Virus
tcgttcaggctaccgttttactgag

SEQ ID NO: 169558 - DNA, 25 bp, SARS Virus
cgttcaggctaccgttttactgaga

SEQ ID NO: 169559 - DNA, 25 bp, SARS Virus
gttcaggctacccttttactgagaa

SEQ ID NO: 169560 - DNA, 25 bp, SARS Virus
ttcaggctaccgctttactgagaat

SEQ ID NO: 169561 - DNA, 25 bp, SARS Virus
tcaggctaccgtcttactgagaatg

SEQ ID NO: 169562 - DNA, 25 bp, SARS Virus
caggctaccgttctactgagaatgg

SEQ ID NO: 169563 - DNA, 25 bp, SARS Virus
aggctaccgtttcactgagaatggt

SEQ ID NO: 169564 - DNA, 25 bp, SARS Virus
ggctaccgttttcctgagaatggtc

SEQ ID NO: 169565 - DNA, 25 bp, SARS Virus
gctaccgttttactgagaatggtca

SEQ ID NO: 169566 - DNA, 25 bp, SARS Virus
ctaccgttttaccgagaatggtcat

SEQ ID NO: 169567 - DNA, 25 bp, SARS Virus
taccgttttactcagaatggtcatg

SEQ ID NO: 169568 - DNA, 25 bp, SARS Virus
accgttttactgcgaatggtcatgg

SEQ ID NO: 169569 - DNA, 25 bp, SARS Virus
ccgttttactgacaatggtcatggt

SEQ ID NO: 169570 - DNA, 25 bp, SARS Virus
cgttttactgagcatggtcatggtc

SEQ ID NO: 169571 - DNA, 25 bp, SARS Virus
gttttactgagactggtcatggtcc

SEQ ID NO: 169572 - DNA, 25 bp, SARS Virus
ttttactgagaacggtcatggtcca

SEQ ID NO: 169573 - DNA, 25 bp, SARS Virus
tttactgagaatcgtcatggtccac

SEQ ID NO: 169574 - DNA, 25 bp, SARS Virus
ttactgagaatgctcatggtccacc

SEQ ID NO: 169575 - DNA, 25 bp, SARS Virus
tactgagaatggccatggtccacca

SEQ ID NO: 169576 - DNA, 25 bp, SARS Virus
actgagaatggtcatggtccaccag

SEQ ID NO: 169577 - DNA, 25 bp, SARS Virus
ctgagaatggtcctggtccaccagg

SEQ ID NO: 169578 - DNA, 25 bp, SARS Virus
tgagaatggtcacggtccaccagga

SEQ ID NO: 169579 - DNA, 25 bp, SARS Virus
gagaatggtcatcgtccaccaggaa

SEQ ID NO: 169580 - DNA, 25 bp, SARS Virus
agaatggtcatgctccaccaggaac

SEQ ID NO: 169581 - DNA, 25 bp, SARS Virus
gaatggtcatggcccaccaggaacc

SEQ ID NO: 169582 - DNA, 25 bp, SARS Virus
aatggtcatggtccaccaggaacct

SEQ ID NO: 169583 - DNA, 25 bp, SARS Virus
atggtcatggtccaccaggaacctc

SEQ ID NO: 169584 - DNA, 25 bp, SARS Virus
tggtcatggtcccccaggaacctca

SEQ ID NO: 169585 - DNA, 25 bp, SARS Virus
ggtcatggtccaccaggaacctcac

SEQ ID NO: 169586 - DNA, 25 bp, SARS Virus
gtcatggtccaccaggaacctcaca

SEQ ID NO: 169587 - DNA, 25 bp, SARS Virus
tcatggtccacccggaacctcacat

SEQ ID NO: 169588 - DNA, 25 bp, SARS Virus
catggtccaccacgaacctcacatc

SEQ ID NO: 169589 - DNA, 25 bp, SARS Virus
atggtccaccagcaacctcacatct

SEQ ID NO: 169590 - DNA, 25 bp, SARS Virus
tggtccaccaggcacctcacatctc

SEQ ID NO: 169591 - DNA, 25 bp, SARS Virus
ggtccaccaggaccctcacatctca

SEQ ID NO: 169592 - DNA, 25 bp, SARS Virus
gtccaccaggaacctcacatctcat

SEQ ID NO: 169593 - DNA, 25 bp, SARS Virus
tccaccaggaacctcacatctcatg

SEQ ID NO: 169594 - DNA, 25 bp, SARS Virus
ccaccaggaaccccacatctcatga

SEQ ID NO: 169595 - DNA, 25 bp, SARS Virus
caccaggaacctcacatctcatgaa

SEQ ID NO: 169596 - DNA, 25 bp, SARS Virus
accaggaacctcccatctcatgaaa

SEQ ID NO: 169597 - DNA, 25 bp, SARS Virus
ccaggaacctcacatctcatgaaaa

SEQ ID NO: 169598 - DNA, 25 bp, SARS Virus
caggaacctcacctctcatgaaaac

SEQ ID NO: 169599 - DNA, 25 bp, SARS Virus
aggaacctcacacctcatgaaaacg

SEQ ID NO: 169600 - DNA, 25 bp, SARS Virus
ggaacctcacatctcatgaaaacgt

SEQ ID NO: 169601 - DNA, 25 bp, SARS Virus
gaacctcacatcccatgaaaacgta

SEQ ID NO: 169602 - DNA, 25 bp, SARS Virus
aacctcacatctcatgaaaacgtac

SEQ ID NO: 169603 - DNA, 25 bp, SARS Virus
acctcacatctcctgaaaacgtacg

SEQ ID NO: 169604 - DNA, 25 bp, SARS Virus
cctcacatctcacgaaaacgtacgg

SEQ ID NO: 169605 - DNA, 25 bp, SARS Virus
ctcacatctcatcaaaacgtacggc

SEQ ID NO: 169606 - DNA, 25 bp, SARS Virus
tcacatctcatgcaaacgtacggct

SEQ ID NO: 169607 - DNA, 25 bp, SARS Virus
cacatctcatgacaacgtacggctg

SEQ ID NO: 169608 - DNA, 25 bp, SARS Virus
acatctcatgaacacgtacggctgg

SEQ ID NO: 169609 - DNA, 25 bp, SARS Virus
catctcatgaaaccgtacggctgga

SEQ ID NO: 169610 - DNA, 25 bp, SARS Virus
atctcatgaaaacgtacggctggaa

SEQ ID NO: 169611 - DNA, 25 bp, SARS Virus
tctcatgaaaacctacggctggaaa

SEQ ID NO: 169612 - DNA, 25 bp, SARS Virus
ctcatgaaaacgcacggctggaaaa

SEQ ID NO: 169613 - DNA, 25 bp, SARS Virus
tcatgaaaacgtccggctggaaaac

SEQ ID NO: 169614 - DNA, 25 bp, SARS Virus
catgaaaacgtacggctggaaaact

SEQ ID NO: 169615 - DNA, 25 bp, SARS Virus
atgaaaacgtaccgctggaaaacta

SEQ ID NO: 169616 - DNA, 25 bp, SARS Virus
tgaaaacgtacgcctggaaaactat

SEQ ID NO: 169617 - DNA, 25 bp, SARS Virus
gaaaacgtacggctggaaaactatt

SEQ ID NO: 169618 - DNA, 25 bp, SARS Virus
aaaacgtacggccggaaaactatta

SEQ ID NO: 169619 - DNA, 25 bp, SARS Virus
aaacgtacggctcgaaaactattaa

SEQ ID NO: 169620 - DNA, 25 bp, SARS Virus
aacgtacggctgcaaaactattaaa

SEQ ID NO: 169621 - DNA, 25 bp, SARS Virus
acgtacggctggcaaactattaaac

SEQ ID NO: 169622 - DNA, 25 bp, SARS Virus
cgtacggctggacaactattaaacg

SEQ ID NO: 169623 - DNA, 25 bp, SARS Virus
gtacggctggaacactattaaacgt

SEQ ID NO: 169624 - DNA, 25 bp, SARS Virus
tacggctggaaacctattaaacgtt

SEQ ID NO: 169625 - DNA, 25 bp, SARS Virus
acggctggaaaactattaaacgttg

SEQ ID NO: 169626 - DNA, 25 bp, SARS Virus
cggctggaaaaccattaaacgttgt

SEQ ID NO: 169627 - DNA, 25 bp, SARS Virus
ggctggaaaactcttaaacgttgta

SEQ ID NO: 169628 - DNA, 25 bp, SARS Virus
gctggaaaactactaaacgttgtaa

SEQ ID NO: 169629 - DNA, 25 bp, SARS Virus
ctggaaaactatcaaacgttgtaac

SEQ ID NO: 169630 - DNA, 25 bp, SARS Virus
tggaaaactattcaacgttgtaacg

SEQ ID NO: 169631 - DNA, 25 bp, SARS Virus
ggaaaactattacacgttgtaacga

SEQ ID NO: 169632 - DNA, 25 bp, SARS Virus
gaaaactattaaccgttgtaacgat

SEQ ID NO: 169633 - DNA, 25 bp, SARS Virus
aaaactattaaacgttgtaacgatc

SEQ ID NO: 169634 - DNA, 25 bp, SARS Virus
aaactattaaaccttgtaacgatct

SEQ ID NO: 169635 - DNA, 25 bp, SARS Virus
aactattaaacgctgtaacgatctt

SEQ ID NO: 169636 - DNA, 25 bp, SARS Virus
actattaaacgtcgtaacgatcttt

SEQ ID NO: 169637 - DNA, 25 bp, SARS Virus
ctattaaacgttctaacgatctttt

SEQ ID NO: 169638 - DNA, 25 bp, SARS Virus
tattaaacgttgcaacgatcttttg

SEQ ID NO: 169639 - DNA, 25 bp, SARS Virus
attaaacgttgtcacgatcttttga

SEQ ID NO: 169640 - DNA, 25 bp, SARS Virus
ttaaacgttgtaccgatcttttgag

SEQ ID NO: 169641 - DNA, 25 bp, SARS Virus
taaacgttgtaacgatcttttgagt

SEQ ID NO: 169642 - DNA, 25 bp, SARS Virus
aaacgttgtaaccatcttttgagta

SEQ ID NO: 169643 - DNA, 25 bp, SARS Virus
aacgttgtaacgctcttttgagtag

SEQ ID NO: 169644 - DNA, 25 bp, SARS Virus
acgttgtaacgaccttttgagtaga

SEQ ID NO: 169645 - DNA, 25 bp, SARS Virus
cgttgtaacgatcttttgagtagac

SEQ ID NO: 169646 - DNA, 25 bp, SARS Virus
gttgtaacgatcctttgagtagact

SEQ ID NO: 169647 - DNA, 25 bp, SARS Virus
ttgtaacgatctcttgagtagactc

SEQ ID NO: 169648 - DNA, 25 bp, SARS Virus
tgtaacgatcttctgagtagactct

SEQ ID NO: 169649 - DNA, 25 bp, SARS Virus
gtaacgatctttcgagtagactcta

SEQ ID NO: 169650 - DNA, 25 bp, SARS Virus
taacgatcttttcagtagactctac

SEQ ID NO: 169651 - DNA, 25 bp, SARS Virus
aacgatcttttgcgtagactctaca

SEQ ID NO: 169652 - DNA, 25 bp, SARS Virus
acgatcttttgactagactctacaa

SEQ ID NO: 169653 - DNA, 25 bp, SARS Virus
cgatcttttgagcagactctacaac

SEQ ID NO: 169654 - DNA, 25 bp, SARS Virus
gatcttttgagtcgactctacaact

SEQ ID NO: 169655 - DNA, 25 bp, SARS Virus
atcttttgagtacactctacaactc

SEQ ID NO: 169656 - DNA, 25 bp, SARS Virus
tcttttgagtagcctctacaactca

SEQ ID NO: 169657 - DNA, 25 bp, SARS Virus
cttttgagtagactctacaactcac

SEQ ID NO: 169658 - DNA, 25 bp, SARS Virus
ttttgagtagaccctacaactcaca

SEQ ID NO: 169659 - DNA, 25 bp, SARS Virus
tttgagtagactctacaactcacaa

SEQ ID NO: 169660 - DNA, 25 bp, SARS Virus
ttgagtagactccacaactcacaac

SEQ ID NO: 169661 - DNA, 25 bp, SARS Virus
tgagtagactctccaactcacaacc

SEQ ID NO: 169662 - DNA, 25 bp, SARS Virus
gagtagactctacaactcacaaccc

SEQ ID NO: 169663 - DNA, 25 bp, SARS Virus
agtagactctaccactcacaaccca

SEQ ID NO: 169664 - DNA, 25 bp, SARS Virus
gtagactctacacctcacaacccat

SEQ ID NO: 169665 - DNA, 25 bp, SARS Virus
tagactctacaactcacaacccatg

SEQ ID NO: 169666 - DNA, 25 bp, SARS Virus
agactctacaacccacaacccatgt

SEQ ID NO: 169667 - DNA, 25 bp, SARS Virus
gactctacaactcacaacccatgtt

SEQ ID NO: 169668 - DNA, 25 bp, SARS Virus
actctacaactcccaacccatgttc

SEQ ID NO: 169669 - DNA, 25 bp, SARS Virus
ctctacaactcacaacccatgttcg

SEQ ID NO: 169670 - DNA, 25 bp, SARS Virus
tctacaactcaccacccatgttcgg

SEQ ID NO: 169671 - DNA, 25 bp, SARS Virus
ctacaactcacaccccatgttcggt

SEQ ID NO: 169672 - DNA, 25 bp, SARS Virus
tacaactcacaacccatgttcggtc

SEQ ID NO: 169673 - DNA, 25 bp, SARS Virus
acaactcacaacccatgttcggtca

SEQ ID NO: 169674 - DNA, 25 bp, SARS Virus
caactcacaacccatgttcggtcat

SEQ ID NO: 169675 - DNA, 25 bp, SARS Virus
aactcacaacccctgttcggtcatt

SEQ ID NO: 169676 - DNA, 25 bp, SARS Virus
actcacaacccacgttcggtcatta

SEQ ID NO: 169677 - DNA, 25 bp, SARS Virus
ctcacaacccatcttcggtcattaa

SEQ ID NO: 169678 - DNA, 25 bp, SARS Virus
tcacaacccatgctcggtcattaag

SEQ ID NO: 169679 - DNA, 25 bp, SARS Virus
cacaacccatgtccggtcattaaga

SEQ ID NO: 169680 - DNA, 25 bp, SARS Virus
acaacccatgttcggtcattaagag

SEQ ID NO: 169681 - DNA, 25 bp, SARS Virus
caacccatgttccgtcattaagagt

SEQ ID NO: 169682 - DNA, 25 bp, SARS Virus
aacccatgttcgctcattaagagtg

SEQ ID NO: 169683 - DNA, 25 bp, SARS Virus
acccatgttcggccattaagagtgt

SEQ ID NO: 169684 - DNA, 25 bp, SARS Virus
cccatgttcggtcattaagagtgta

SEQ ID NO: 169685 - DNA, 25 bp, SARS Virus
ccatgttcggtccttaagagtgtat

SEQ ID NO: 169686 - DNA, 25 bp, SARS Virus
catgttcggtcactaagagtgtatc

SEQ ID NO: 169687 - DNA, 25 bp, SARS Virus
atgttcggtcatcaagagtgtatca

SEQ ID NO: 169688 - DNA, 25 bp, SARS Virus
tgttcggtcattcagagtgtatcac

SEQ ID NO: 169689 - DNA, 25 bp, SARS Virus
gttcggtcattacgagtgtatcacg

SEQ ID NO: 169690 - DNA, 25 bp, SARS Virus
ttcggtcattaacagtgtatcacga

SEQ ID NO: 169691 - DNA, 25 bp, SARS Virus
tcggtcattaagcgtgtatcacgag

SEQ ID NO: 169692 - DNA, 25 bp, SARS Virus
cggtcattaagactgtatcacgaga

SEQ ID NO: 169693 - DNA, 25 bp, SARS Virus
ggtcattaagagcgtatcacgagaa

SEQ ID NO: 169694 - DNA, 25 bp, SARS Virus
gtcattaagagtctatcacgagaac

SEQ ID NO: 169695 - DNA, 25 bp, SARS Virus
tcattaagagtgcatcacgagaaca

SEQ ID NO: 169696 - DNA, 25 bp, SARS Virus
cattaagagtgtctcacgagaacac

SEQ ID NO: 169697 - DNA, 25 bp, SARS Virus
attaagagtgtaccacgagaacacc

SEQ ID NO: 169698 - DNA, 25 bp, SARS Virus
ttaagagtgtatcacgagaacaccg

SEQ ID NO: 169699 - DNA, 25 bp, SARS Virus
taagagtgtatcccgagaacaccgt

SEQ ID NO: 169700 - DNA, 25 bp, SARS Virus
aagagtgtatcacgagaacaccgtg

SEQ ID NO: 169701 - DNA, 25 bp, SARS Virus
agagtgtatcaccagaacaccgtga

SEQ ID NO: 169702 - DNA, 25 bp, SARS Virus
gagtgtatcacgcgaacaccgtgat

SEQ ID NO: 169703 - DNA, 25 bp, SARS Virus
agtgtatcacgacaacaccgtgatc

SEQ ID NO: 169704 - DNA, 25 bp, SARS Virus
gtgtatcacgagcacaccgtgatct

SEQ ID NO: 169705 - DNA, 25 bp, SARS Virus
tgtatcacgagaccaccgtgatctc

SEQ ID NO: 169706 - DNA, 25 bp, SARS Virus
gtatcacgagaacaccgtgatctca

SEQ ID NO: 169707 - DNA, 25 bp, SARS Virus
tatcacgagaaccccgtgatctcat

SEQ ID NO: 169708 - DNA, 25 bp, SARS Virus
atcacgagaacaccgtgatctcatc

SEQ ID NO: 169709 - DNA, 25 bp, SARS Virus
tcacgagaacaccgtgatctcatcc

SEQ ID NO: 169710 - DNA, 25 bp, SARS Virus
cacgagaacaccctgatctcatcca

SEQ ID NO: 169711 - DNA, 25 bp, SARS Virus
acgagaacaccgcgatctcatccac

SEQ ID NO: 169712 - DNA, 25 bp, SARS Virus
cgagaacaccgtcatctcatccacg

SEQ ID NO: 169713 - DNA, 25 bp, SARS Virus
gagaacaccgtgctctcatccacgt

SEQ ID NO: 169714 - DNA, 25 bp, SARS Virus
agaacaccgtgacctcatccacgtg

SEQ ID NO: 169715 - DNA, 25 bp, SARS Virus
gaacaccgtgatctcatccacgtga

SEQ ID NO: 169716 - DNA, 25 bp, SARS Virus
aacaccgtgatcccatccacgtgat

SEQ ID NO: 169717 - DNA, 25 bp, SARS Virus
acaccgtgatctcatccacgtgatt

SEQ ID NO: 169718 - DNA, 25 bp, SARS Virus
caccgtgatctcctccacgtgattc

SEQ ID NO: 169719 - DNA, 25 bp, SARS Virus
accgtgatctcacccacgtgattca

SEQ ID NO: 169720 - DNA, 25 bp, SARS Virus
ccgtgatctcatccacgtgattcac

SEQ ID NO: 169721 - DNA, 25 bp, SARS Virus
cgtgatctcatccacgtgattcacc

SEQ ID NO: 169722 - DNA, 25 bp, SARS Virus
gtgatctcatccccgtgattcaccg

SEQ ID NO: 169723 - DNA, 25 bp, SARS Virus
tgatctcatccacgtgattcaccgt

SEQ ID NO: 169724 - DNA, 25 bp, SARS Virus
gatctcatccacctgattcaccgta

SEQ ID NO: 169725 - DNA, 25 bp, SARS Virus
atctcatccacgcgattcaccgtaa

SEQ ID NO: 169726 - DNA, 25 bp, SARS Virus
tctcatccacgtcattcaccgtaat

SEQ ID NO: 169727 - DNA, 25 bp, SARS Virus
ctcatccacgtgcttcaccgtaatg

SEQ ID NO: 169728 - DNA, 25 bp, SARS Virus
tcatccacgtgactcaccgtaatgt

SEQ ID NO: 169729 - DNA, 25 bp, SARS Virus
catccacgtgatccaccgtaatgtc

SEQ ID NO: 169730 - DNA, 25 bp, SARS Virus
atccacgtgattcaccgtaatgtca

SEQ ID NO: 169731 - DNA, 25 bp, SARS Virus
tccacgtgattccccgtaatgtcac

SEQ ID NO: 169732 - DNA, 25 bp, SARS Virus
ccacgtgattcaccgtaatgtcaca

SEQ ID NO: 169733 - DNA, 25 bp, SARS Virus
cacgtgattcaccgtaatgtcacac

SEQ ID NO: 169734 - DNA, 25 bp, SARS Virus
acgtgattcaccctaatgtcacact

SEQ ID NO: 169735 - DNA, 25 bp, SARS Virus
cgtgattcaccgcaatgtcacactc

SEQ ID NO: 169736 - DNA, 25 bp, SARS Virus
gtgattcaccgtcatgtcacactct

SEQ ID NO: 169737 - DNA, 25 bp, SARS Virus
tgattcaccgtactgtcacactcta

SEQ ID NO: 169738 - DNA, 25 bp, SARS Virus
gattcaccgtaacgtcacactctac

SEQ ID NO: 169739 - DNA, 25 bp, SARS Virus
attcaccgtaatctcacactctaca

SEQ ID NO: 169740 - DNA, 25 bp, SARS Virus
ttcaccgtaatgccacactctacag

SEQ ID NO: 169741 - DNA, 25 bp, SARS Virus
tcaccgtaatgtcacactctacagt

SEQ ID NO: 169742 - DNA, 25 bp, SARS Virus
caccgtaatgtcccactctacagtt

SEQ ID NO: 169743 - DNA, 25 bp, SARS Virus
accgtaatgtcacactctacagttg

SEQ ID NO: 169744 - DNA, 25 bp, SARS Virus
ccgtaatgtcaccctctacagttgt

SEQ ID NO: 169745 - DNA, 25 bp, SARS Virus
cgtaatgtcacactctacagttgtg

SEQ ID NO: 169746 - DNA, 25 bp, SARS Virus
gtaatgtcacaccctacagttgtgt

SEQ ID NO: 169747 - DNA, 25 bp, SARS Virus
taatgtcacactctacagttgtgtt

SEQ ID NO: 169748 - DNA, 25 bp, SARS Virus
aatgtcacactccacagttgtgttt

SEQ ID NO: 169749 - DNA, 25 bp, SARS Virus
atgtcacactctccagttgtgtttc

SEQ ID NO: 169750 - DNA, 25 bp, SARS Virus
tgtcacactctacagttgtgtttca

SEQ ID NO: 169751 - DNA, 25 bp, SARS Virus
gtcacactctaccgttgtgtttcat

SEQ ID NO: 169752 - DNA, 25 bp, SARS Virus
tcacactctacacttgtgtttcatt

SEQ ID NO: 169753 - DNA, 25 bp, SARS Virus
cacactctacagctgtgtttcatta

SEQ ID NO: 169754 - DNA, 25 bp, SARS Virus
acactctacagtcgtgtttcattag

SEQ ID NO: 169755 - DNA, 25 bp, SARS Virus
cactctacagttctgtttcattagt

SEQ ID NO: 169756 - DNA, 25 bp, SARS Virus
actctacagttgcgtttcattagtg

SEQ ID NO: 169757 - DNA, 25 bp, SARS Virus
ctctacagttgtctttcattagtgg

SEQ ID NO: 169758 - DNA, 25 bp, SARS Virus
tctacagttgtgcttcattagtggt

SEQ ID NO: 169759 - DNA, 25 bp, SARS Virus
ctacagttgtgtctcattagtggtt

SEQ ID NO: 169760 - DNA, 25 bp, SARS Virus
tacagttgtgttccattagtggttg

SEQ ID NO: 169761 - DNA, 25 bp, SARS Virus
acagttgtgtttcattagtggttgt

SEQ ID NO: 169762 - DNA, 25 bp, SARS Virus
cagttgtgtttccttagtggttgta

SEQ ID NO: 169763 - DNA, 25 bp, SARS Virus
agttgtgtttcactagtggttgtaa

SEQ ID NO: 169764 - DNA, 25 bp, SARS Virus
gttgtgtttcatcagtggttgtaag

SEQ ID NO: 169765 - DNA, 25 bp, SARS Virus
ttgtgtttcattcgtggttgtaagt

SEQ ID NO: 169766 - DNA, 25 bp, SARS Virus
tgtgtttcattactggttgtaagtt

SEQ ID NO: 169767 - DNA, 25 bp, SARS Virus
gtgtttcattagcggttgtaagttg

SEQ ID NO: 169768 - DNA, 25 bp, SARS Virus
tgtttcattagtcgttgtaagttga

SEQ ID NO: 169769 - DNA, 25 bp, SARS Virus
gtttcattagtgcttgtaagttgaa

SEQ ID NO: 169770 - DNA, 25 bp, SARS Virus
tttcattagtggctgtaagttgaac

SEQ ID NO: 169771 - DNA, 25 bp, SARS Virus
ttcattagtggtcgtaagttgaaca

SEQ ID NO: 169772 - DNA, 25 bp, SARS Virus
tcattagtggttctaagttgaacat

SEQ ID NO: 169773 - DNA, 25 bp, SARS Virus
cattagtggttgcaagttgaacata

SEQ ID NO: 169774 - DNA, 25 bp, SARS Virus
attagtggttgtcagttgaacatac

SEQ ID NO: 169775 - DNA, 25 bp, SARS Virus
ttagtggttgtacgttgaacataca

SEQ ID NO: 169776 - DNA, 25 bp, SARS Virus
tagtggttgtaacttgaacatacag

SEQ ID NO: 169777 - DNA, 25 bp, SARS Virus
agtggttgtaagctgaacatacagc

SEQ ID NO: 169778 - DNA, 25 bp, SARS Virus
gtggttgtaagtcgaacatacagca

SEQ ID NO: 169779 - DNA, 25 bp, SARS Virus
tggttgtaagttcaacatacagcat

SEQ ID NO: 169780 - DNA, 25 bp, SARS Virus
ggttgtaagttgcacatacagcatc

SEQ ID NO: 169781 - DNA, 25 bp, SARS Virus
gttgtaagttgaccatacagcatca

SEQ ID NO: 169782 - DNA, 25 bp, SARS Virus
ttgtaagttgaacatacagcatcat

SEQ ID NO: 169783 - DNA, 25 bp, SARS Virus
tgtaagttgaacctacagcatcatg

SEQ ID NO: 169784 - DNA, 25 bp, SARS Virus
gtaagttgaacacacagcatcatgg

SEQ ID NO: 169785 - DNA, 25 bp, SARS Virus
taagttgaacatccagcatcatgga

SEQ ID NO: 169786 - DNA, 25 bp, SARS Virus
aagttgaacatacagcatcatggag

SEQ ID NO: 169787 - DNA, 25 bp, SARS Virus
agttgaacataccgcatcatggaga

SEQ ID NO: 169788 - DNA, 25 bp, SARS Virus
gttgaacatacaccatcatggagac

SEQ ID NO: 169789 - DNA, 25 bp, SARS Virus
ttgaacatacagcatcatggagaca

SEQ ID NO: 169790 - DNA, 25 bp, SARS Virus
tgaacatacagcctcatggagacat

SEQ ID NO: 169791 - DNA, 25 bp, SARS Virus
gaacatacagcaccatggagacatg

SEQ ID NO: 169792 - DNA, 25 bp, SARS Virus
aacatacagcatcatggagacatgt

SEQ ID NO: 169793 - DNA, 25 bp, SARS Virus
acatacagcatcctggagacatgtg

SEQ ID NO: 169794 - DNA, 25 bp, SARS Virus
catacagcatcacggagacatgtgt

SEQ ID NO: 169795 - DNA, 25 bp, SARS Virus
atacagcatcatcgagacatgtgtt

SEQ ID NO: 169796 - DNA, 25 bp, SARS Virus
tacagcatcatgcagacatgtgttg

SEQ ID NO: 169797 - DNA, 25 bp, SARS Virus
acagcatcatggcgacatgtgttgt

SEQ ID NO: 169798 - DNA, 25 bp, SARS Virus
cagcatcatggacacatgtgttgtc

SEQ ID NO: 169799 - DNA, 25 bp, SARS Virus
agcatcatggagccatgtgttgtcg

SEQ ID NO: 169800 - DNA, 25 bp, SARS Virus
gcatcatggagacatgtgttgtcgt

SEQ ID NO: 169801 - DNA, 25 bp, SARS Virus
catcatggagacctgtgttgtcgta

SEQ ID NO: 169802 - DNA, 25 bp, SARS Virus
atcatggagacacgtgttgtcgtag

SEQ ID NO: 169803 - DNA, 25 bp, SARS Virus
tcatggagacatctgttgtcgtagt

SEQ ID NO: 169804 - DNA, 25 bp, SARS Virus
catggagacatgcgttgtcgtagtg

SEQ ID NO: 169805 - DNA, 25 bp, SARS Virus
atggagacatgtcttgtcgtagtgg

SEQ ID NO: 169806 - DNA, 25 bp, SARS Virus
tggagacatgtgctgtcgtagtggt

SEQ ID NO: 169807 - DNA, 25 bp, SARS Virus
ggagacatgtgtcgtcgtagtggta

SEQ ID NO: 169808 - DNA, 25 bp, SARS Virus
gagacatgtgttctcgtagtggtat

SEQ ID NO: 169809 - DNA, 25 bp, SARS Virus
agacatgtgttgccgtagtggtatc

SEQ ID NO: 169810 - DNA, 25 bp, SARS Virus
gacatgtgttgtcgtagtggtatca

SEQ ID NO: 169811 - DNA, 25 bp, SARS Virus
acatgtgttgtcctagtggtatcag

SEQ ID NO: 169812 - DNA, 25 bp, SARS Virus
catgtgttgtcgcagtggtatcagt

SEQ ID NO: 169813 - DNA, 25 bp, SARS Virus
atgtgttgtcgtcgtggtatcagtg

SEQ ID NO: 169814 - DNA, 25 bp, SARS Virus
tgtgttgtcgtactggtatcagtgg

SEQ ID NO: 169815 - DNA, 25 bp, SARS Virus
gtgttgtcgtagcggtatcagtgga

SEQ ID NO: 169816 - DNA, 25 bp, SARS Virus
tgttgtcgtagtcgtatcagtggaa

SEQ ID NO: 169817 - DNA, 25 bp, SARS Virus
gttgtcgtagtgctatcagtggaaa

SEQ ID NO: 169818 - DNA, 25 bp, SARS Virus
ttgtcgtagtggcatcagtggaaaa

SEQ ID NO: 169819 - DNA, 25 bp, SARS Virus
tgtcgtagtggtctcagtggaaaaa

SEQ ID NO: 169820 - DNA, 25 bp, SARS Virus
gtcgtagtggtaccagtggaaaaag

SEQ ID NO: 169821 - DNA, 25 bp, SARS Virus
tcgtagtggtatcagtggaaaaagt

SEQ ID NO: 169822 - DNA, 25 bp, SARS Virus
cgtagtggtatccgtggaaaaagtt

SEQ ID NO: 169823 - DNA, 25 bp, SARS Virus
gtagtggtatcactggaaaaagttt

SEQ ID NO: 169824 - DNA, 25 bp, SARS Virus
tagtggtatcagcggaaaaagtttc

SEQ ID NO: 169825 - DNA, 25 bp, SARS Virus
agtggtatcagtcgaaaaagtttcc

SEQ ID NO: 169826 - DNA, 25 bp, SARS Virus
gtggtatcagtgcaaaaagtttcca

SEQ ID NO: 169827 - DNA, 25 bp, SARS Virus
tggtatcagtggcaaaagtttccac

SEQ ID NO: 169828 - DNA, 25 bp, SARS Virus
ggtatcagtggacaaagtttccaca

SEQ ID NO: 169829 - DNA, 25 bp, SARS Virus
gtatcagtggaacaagtttccacat

SEQ ID NO: 169830 - DNA, 25 bp, SARS Virus
tatcagtggaaacagtttccacatg

SEQ ID NO: 169831 - DNA, 25 bp, SARS Virus
atcagtggaaaacgtttccacatga

SEQ ID NO: 169832 - DNA, 25 bp, SARS Virus
tcagtggaaaaactttccacatgag

SEQ ID NO: 169833 - DNA, 25 bp, SARS Virus
cagtggaaaaagcttccacatgaga

SEQ ID NO: 169834 - DNA, 25 bp, SARS Virus
agtggaaaaagtctccacatgagag

SEQ ID NO: 169835 - DNA, 25 bp, SARS Virus
gtggaaaaagttcccacatgagagg

SEQ ID NO: 169836 - DNA, 25 bp, SARS Virus
tggaaaaagtttccacatgagaggt

SEQ ID NO: 169837 - DNA, 25 bp, SARS Virus
ggaaaaagtttccacatgagaggtt

SEQ ID NO: 169838 - DNA, 25 bp, SARS Virus
gaaaaagtttccccatgagaggtta

SEQ ID NO: 169839 - DNA, 25 bp, SARS Virus
aaaaagtttccacatgagaggttag

SEQ ID NO: 169840 - DNA, 25 bp, SARS Virus
aaaagtttccacctgagaggttaga

SEQ ID NO: 169841 - DNA, 25 bp, SARS Virus
aaagtttccacacgagaggttagac

SEQ ID NO: 169842 - DNA, 25 bp, SARS Virus
aagtttccacatcagaggttagaca

SEQ ID NO: 169843 - DNA, 25 bp, SARS Virus
agtttccacatgcgaggttagacat

SEQ ID NO: 169844 - DNA, 25 bp, SARS Virus
gtttccacatgacaggttagacatg

SEQ ID NO: 169845 - DNA, 25 bp, SARS Virus
tttccacatgagcggttagacatga

SEQ ID NO: 169846 - DNA, 25 bp, SARS Virus
ttccacatgagacgttagacatgaa

SEQ ID NO: 169847 - DNA, 25 bp, SARS Virus
tccacatgagagcttagacatgaaa

SEQ ID NO: 169848 - DNA, 25 bp, SARS Virus
ccacatgagaggctagacatgaaat

SEQ ID NO: 169849 - DNA, 25 bp, SARS Virus
cacatgagaggtcagacatgaaatg

SEQ ID NO: 169850 - DNA, 25 bp, SARS Virus
acatgagaggttcgacatgaaatga

SEQ ID NO: 169851 - DNA, 25 bp, SARS Virus
catgagaggttacacatgaaatgat

SEQ ID NO: 169852 - DNA, 25 bp, SARS Virus
atgagaggttagccatgaaatgata

SEQ ID NO: 169853 - DNA, 25 bp, SARS Virus
tgagaggttagacatgaaatgataa

SEQ ID NO: 169854 - DNA, 25 bp, SARS Virus
gagaggttagacctgaaatgataaa

SEQ ID NO: 169855 - DNA, 25 bp, SARS Virus
agaggttagacacgaaatgataaaa

SEQ ID NO: 169856 - DNA, 25 bp, SARS Virus
gaggttagacatcaaatgataaaaa

SEQ ID NO: 169857 - DNA, 25 bp, SARS Virus
cacgtcttttgtgtgacaagatcac

SEQ ID NO: 169858 - DNA, 25 bp, SARS Virus
acgtcttttgtaggacaagatcaca

SEQ ID NO: 169859 - DNA, 25 bp, SARS Virus
cgtcttttgtatgacaagatcacaa

SEQ ID NO: 169860 - DNA, 25 bp, SARS Virus
gtcttttgtatggcaagatcacaac

SEQ ID NO: 169861 - DNA, 25 bp, SARS Virus
tcttttgtatgagaagatcacaact

SEQ ID NO: 169862 - DNA, 25 bp, SARS Virus
cttttgtatgacgagatcacaactt

SEQ ID NO: 169863 - DNA, 25 bp, SARS Virus
ttttgtatgacaggatcacaactta

SEQ ID NO: 169864 - DNA, 25 bp, SARS Virus
tttgtatgacaagatcacaacttaa

SEQ ID NO: 169865 - DNA, 25 bp, SARS Virus
ttgtatgacaaggtcacaacttaag

SEQ ID NO: 169866 - DNA, 25 bp, SARS Virus
tgtatgacaagagcacaacttaagt

SEQ ID NO: 169867 - DNA, 25 bp, SARS Virus
gtatgacaagatgacaacttaagtg

SEQ ID NO: 169868 - DNA, 25 bp, SARS Virus
tatgacaagatcgcaacttaagtga

SEQ ID NO: 169869 - DNA, 25 bp, SARS Virus
atgacaagatcagaacttaagtgaa

SEQ ID NO: 169870 - DNA, 25 bp, SARS Virus
tgacaagatcacgacttaagtgaaa

SEQ ID NO: 169871 - DNA, 25 bp, SARS Virus
gacaagatcacagcttaagtgaaac

SEQ ID NO: 169872 - DNA, 25 bp, SARS Virus
acaagatcacaagttaagtgaaact

SEQ ID NO: 169873 - DNA, 25 bp, SARS Virus
caagatcacaacgtaagtgaaactt

SEQ ID NO: 169874 - DNA, 25 bp, SARS Virus
aagatcacaactgaagtgaaactta

SEQ ID NO: 169875 - DNA, 25 bp, SARS Virus
agatcacaacttgagtgaaacttaa

SEQ ID NO: 169876 - DNA, 25 bp, SARS Virus
gatcacaacttaggtgaaacttaaa

SEQ ID NO: 169877 - DNA, 25 bp, SARS Virus
atcacaacttaagtgaaacttaaat

SEQ ID NO: 169878 - DNA, 25 bp, SARS Virus
tcacaacttaagggaaacttaaata

SEQ ID NO: 169879 - DNA, 25 bp, SARS Virus
cacaacttaagtgaaacttaaatag

SEQ ID NO: 169880 - DNA, 25 bp, SARS Virus
acaacttaagtggaacttaaatagt

SEQ ID NO: 169881 - DNA, 25 bp, SARS Virus
caacttaagtgagacttaaatagtt

SEQ ID NO: 169882 - DNA, 25 bp, SARS Virus
aacttaagtgaagcttaaatagttt

SEQ ID NO: 169883 - DNA, 25 bp, SARS Virus
acttaagtgaaagttaaatagtttt

SEQ ID NO: 169884 - DNA, 25 bp, SARS Virus
cttaagtgaaacgtaaatagttttg

SEQ ID NO: 169885 - DNA, 25 bp, SARS Virus
ttaagtgaaactgaaatagttttgt

SEQ ID NO: 169886 - DNA, 25 bp, SARS Virus
taagtgaaacttgaatagttttgtg

SEQ ID NO: 169887 - DNA, 25 bp, SARS Virus
aagtgaaacttagatagttttgtga

SEQ ID NO: 169888 - DNA, 25 bp, SARS Virus
agtgaaacttaagtagttttgtgag

SEQ ID NO: 169889 - DNA, 25 bp, SARS Virus
gtgaaacttaaagagttttgtgaga

SEQ ID NO: 169890 - DNA, 25 bp, SARS Virus
tgaaacttaaatggttttgtgagat

SEQ ID NO: 169891 - DNA, 25 bp, SARS Virus
gaaacttaaatagttttgtgagatg

SEQ ID NO: 169892 - DNA, 25 bp, SARS Virus
aaacttaaataggtttgtgagatgc

SEQ ID NO: 169893 - DNA, 25 bp, SARS Virus
aacttaaatagtgttgtgagatgcg

SEQ ID NO: 169894 - DNA, 25 bp, SARS Virus
acttaaatagttgtgtgagatgcgc

SEQ ID NO: 169895 - DNA, 25 bp, SARS Virus
cttaaatagtttggtgagatgcgcg

SEQ ID NO: 169896 - DNA, 25 bp, SARS Virus
ttaaatagttttgtgagatgcgcgc

SEQ ID NO: 169897 - DNA, 25 bp, SARS Virus
taaatagttttgggagatgcgcgcg

SEQ ID NO: 169898 - DNA, 25 bp, SARS Virus
aaatagttttgtgagatgcgcgcgt

SEQ ID NO: 169899 - DNA, 25 bp, SARS Virus
aatagttttgtgggatgcgcgcgtg

SEQ ID NO: 169900 - DNA, 25 bp, SARS Virus
atagttttgtgagatgcgcgcgtgc

SEQ ID NO: 169901 - DNA, 25 bp, SARS Virus
tagttttgtgaggtgcgcgcgtgcg

SEQ ID NO: 169902 - DNA, 25 bp, SARS Virus
agttttgtgagaggcgcgcgtgcgc

SEQ ID NO: 169903 - DNA, 25 bp, SARS Virus
gttttgtgagatgcgcgcgtgcgcg

SEQ ID NO: 169904 - DNA, 25 bp, SARS Virus
ttttgtgagatgggcgcgtgcgcgt

SEQ ID NO: 169905 - DNA, 25 bp, SARS Virus
tttgtgagatgcgcgcgtgcgcgtc

SEQ ID NO: 169906 - DNA, 25 bp, SARS Virus
ttgtgagatgcgggcgtgcgcgtcc

SEQ ID NO: 169907 - DNA, 25 bp, SARS Virus
tgtgagatgcgcgcgtgcgcgtcca

SEQ ID NO: 169908 - DNA, 25 bp, SARS Virus
gtgagatgcgcgggtgcgcgtccat

SEQ ID NO: 169909 - DNA, 25 bp, SARS Virus
tgagatgcgcgcgtgcgcgtccata

SEQ ID NO: 169910 - DNA, 25 bp, SARS Virus
gagatgcgcgcgggcgcgtccatac

SEQ ID NO: 169911 - DNA, 25 bp, SARS Virus
agatgcgcgcgtgcgcgtccatact

SEQ ID NO: 169912 - DNA, 25 bp, SARS Virus
gatgcgcgcgtgggcgtccatacta

SEQ ID NO: 169913 - DNA, 25 bp, SARS Virus
atgcgcgcgtgcgcgtccatactaa

SEQ ID NO: 169914 - DNA, 25 bp, SARS Virus
tgcgcgcgtgcgggtccatactaag

SEQ ID NO: 169915 - DNA, 25 bp, SARS Virus
gcgcgcgtgcgcgtccatactaaga

SEQ ID NO: 169916 - DNA, 25 bp, SARS Virus
cgcgcgtgcgcggccatactaagat

SEQ ID NO: 169917 - DNA, 25 bp, SARS Virus
gcgcgtgcgcgtgcatactaagatg

SEQ ID NO: 169918 - DNA, 25 bp, SARS Virus
cgcgtgcgcgtcgatactaagatga

SEQ ID NO: 169919 - DNA, 25 bp, SARS Virus
gcgtgcgcgtccgtactaagatgat

SEQ ID NO: 169920 - DNA, 25 bp, SARS Virus
cgtgcgcgtccagactaagatgatg

SEQ ID NO: 169921 - DNA, 25 bp, SARS Virus
gtgcgcgtccatgctaagatgatgt

SEQ ID NO: 169922 - DNA, 25 bp, SARS Virus
tgcgcgtccatagtaagatgatgta

SEQ ID NO: 169923 - DNA, 25 bp, SARS Virus
gcgcgtccatacgaagatgatgtaa

SEQ ID NO: 169924 - DNA, 25 bp, SARS Virus
cgcgtccatactgagatgatgtaaa

SEQ ID NO: 169925 - DNA, 25 bp, SARS Virus
gcgtccatactaggatgatgtaaat

SEQ ID NO: 169926 - DNA, 25 bp, SARS Virus
cgtccatactaagatgatgtaaata

SEQ ID NO: 169927 - DNA, 25 bp, SARS Virus
gtccatactaaggtgatgtaaatag

SEQ ID NO: 169928 - DNA, 25 bp, SARS Virus
tccatactaagaggatgtaaataga

SEQ ID NO: 169929 - DNA, 25 bp, SARS Virus
ccatactaagatgatgtaaatagat

SEQ ID NO: 169930 - DNA, 25 bp, SARS Virus
catactaagatggtgtaaatagata

SEQ ID NO: 169931 - DNA, 25 bp, SARS Virus
atactaagatgaggtaaatagatac

SEQ ID NO: 169932 - DNA, 25 bp, SARS Virus
tactaagatgatgtaaatagatacc

SEQ ID NO: 169933 - DNA, 25 bp, SARS Virus
actaagatgatggaaatagataccc

SEQ ID NO: 169934 - DNA, 25 bp, SARS Virus
ctaagatgatgtgaatagatacccg

SEQ ID NO: 169935 - DNA, 25 bp, SARS Virus
taagatgatgtagatagatacccgt

SEQ ID NO: 169936 - DNA, 25 bp, SARS Virus
aagatgatgtaagtagatacccgtt

SEQ ID NO: 169937 - DNA, 25 bp, SARS Virus
agatgatgtaaagagatacccgttt

SEQ ID NO: 169938 - DNA, 25 bp, SARS Virus
gatgatgtaaatggatacccgttta

SEQ ID NO: 169939 - DNA, 25 bp, SARS Virus
atgatgtaaatagatacccgtttat

SEQ ID NO: 169940 - DNA, 25 bp, SARS Virus
tgatgtaaataggtacccgtttata

SEQ ID NO: 169941 - DNA, 25 bp, SARS Virus
gatgtaaatagagacccgtttataa

SEQ ID NO: 169942 - DNA, 25 bp, SARS Virus
atgtaaatagatgcccgtttataaa

SEQ ID NO: 169943 - DNA, 25 bp, SARS Virus
tgtaaatagatagccgtttataaaa

SEQ ID NO: 169944 - DNA, 25 bp, SARS Virus
gtaaatagatacgcgtttataaaat

SEQ ID NO: 169945 - DNA, 25 bp, SARS Virus
taaatagataccggtttataaaatt

SEQ ID NO: 169946 - DNA, 25 bp, SARS Virus
aaatagatacccgtttataaaatta

SEQ ID NO: 169947 - DNA, 25 bp, SARS Virus
aatagatacccggttataaaattac

SEQ ID NO: 169948 - DNA, 25 bp, SARS Virus
atagatacccgtgtataaaattacg

SEQ ID NO: 169949 - DNA, 25 bp, SARS Virus
tagatacccgttgataaaattacgg

SEQ ID NO: 169950 - DNA, 25 bp, SARS Virus
agatacccgtttgtaaaattacgga

SEQ ID NO: 169951 - DNA, 25 bp, SARS Virus
gatacccgtttagaaaattacggaa

SEQ ID NO: 169952 - DNA, 25 bp, SARS Virus
atacccgtttatgaaattacggaaa

SEQ ID NO: 169953 - DNA, 25 bp, SARS Virus
tacccgtttatagaattacggaaaa

SEQ ID NO: 169954 - DNA, 25 bp, SARS Virus
acccgtttataagattacggaaaag

SEQ ID NO: 169955 - DNA, 25 bp, SARS Virus
cccgtttataaagttacggaaaagt

SEQ ID NO: 169956 - DNA, 25 bp, SARS Virus
ccgtttataaaagtacggaaaagtg

SEQ ID NO: 169957 - DNA, 25 bp, SARS Virus
cgtttataaaatgacggaaaagtgt

SEQ ID NO: 169958 - DNA, 25 bp, SARS Virus
gtttataaaattgcggaaaagtgta

SEQ ID NO: 169959 - DNA, 25 bp, SARS Virus
tttataaaattagggaaaagtgtat

SEQ ID NO: 169960 - DNA, 25 bp, SARS Virus
ttataaaattacggaaaagtgtatc

SEQ ID NO: 169961 - DNA, 25 bp, SARS Virus
tataaaattacggaaaagtgtatcc

SEQ ID NO: 169962 - DNA, 25 bp, SARS Virus
ataaaattacgggaaagtgtatccc

SEQ ID NO: 169963 - DNA, 25 bp, SARS Virus
taaaattacggagaagtgtatcccg

SEQ ID NO: 169964 - DNA, 25 bp, SARS Virus
aaaattacggaagagtgtatcccgt

SEQ ID NO: 169965 - DNA, 25 bp, SARS Virus
aaattacggaaaggtgtatcccgta

SEQ ID NO: 169966 - DNA, 25 bp, SARS Virus
aattacggaaaagtgtatcccgtag

SEQ ID NO: 169967 - DNA, 25 bp, SARS Virus
attacggaaaagggtatcccgtagt

SEQ ID NO: 169968 - DNA, 25 bp, SARS Virus
ttacggaaaagtgtatcccgtagtt

SEQ ID NO: 169969 - DNA, 25 bp, SARS Virus
tacggaaaagtggatcccgtagttg

SEQ ID NO: 169970 - DNA, 25 bp, SARS Virus
acggaaaagtgtgtcccgtagttgt

SEQ ID NO: 169971 - DNA, 25 bp, SARS Virus
cggaaaagtgtagcccgtagttgtc

SEQ ID NO: 169972 - DNA, 25 bp, SARS Virus
ggaaaagtgtatgccgtagttgtcg

SEQ ID NO: 169973 - DNA, 25 bp, SARS Virus
gaaaagtgtatcgcgtagttgtcga

SEQ ID NO: 169974 - DNA, 25 bp, SARS Virus
aaaagtgtatccggtagttgtcgac

SEQ ID NO: 169975 - DNA, 25 bp, SARS Virus
aaagtgtatcccgtagttgtcgacg

SEQ ID NO: 169976 - DNA, 25 bp, SARS Virus
aagtgtatcccggagttgtcgacgt

SEQ ID NO: 169977 - DNA, 25 bp, SARS Virus
agtgtatcccgtggttgtcgacgta

SEQ ID NO: 169978 - DNA, 25 bp, SARS Virus
gtgtatcccgtagttgtcgacgtac

SEQ ID NO: 169979 - DNA, 25 bp, SARS Virus
tgtatcccgtaggtgtcgacgtact

SEQ ID NO: 169980 - DNA, 25 bp, SARS Virus
gtatcccgtagtggtcgacgtactc

SEQ ID NO: 169981 - DNA, 25 bp, SARS Virus
tatcccgtagttgtcgacgtactct

SEQ ID NO: 169982 - DNA, 25 bp, SARS Virus
atcccgtagttggcgacgtactctc

SEQ ID NO: 169983 - DNA, 25 bp, SARS Virus
tcccgtagttgtggacgtactctcg

SEQ ID NO: 169984 - DNA, 25 bp, SARS Virus
cccgtagttgtcgacgtactctcgt

SEQ ID NO: 169985 - DNA, 25 bp, SARS Virus
ccgtagttgtcggcgtactctcgta

SEQ ID NO: 169986 - DNA, 25 bp, SARS Virus
cgtagttgtcgaggtactctcgtac

SEQ ID NO: 169987 - DNA, 25 bp, SARS Virus
gtagttgtcgacgtactctcgtacg

SEQ ID NO: 169988 - DNA, 25 bp, SARS Virus
tagttgtcgacggactctcgtacgg

SEQ ID NO: 169989 - DNA, 25 bp, SARS Virus
agttgtcgacgtgctctcgtacggc

SEQ ID NO: 169990 - DNA, 25 bp, SARS Virus
gttgtcgacgtagtctcgtacggca

SEQ ID NO: 169991 - DNA, 25 bp, SARS Virus
ttgtcgacgtacgctcgtacggcat

SEQ ID NO: 169992 - DNA, 25 bp, SARS Virus
tgtcgacgtactgtcgtacggcata

SEQ ID NO: 169993 - DNA, 25 bp, SARS Virus
gtcgacgtactcgcgtacggcatat

SEQ ID NO: 169994 - DNA, 25 bp, SARS Virus
tcgacgtactctggtacggcatatg

SEQ ID NO: 169995 - DNA, 25 bp, SARS Virus
cgacgtactctcgtacggcatatgt

SEQ ID NO: 169996 - DNA, 25 bp, SARS Virus
gacgtactctcggacggcatatgtg

SEQ ID NO: 169997 - DNA, 25 bp, SARS Virus
acgtactctcgtgcggcatatgtga

SEQ ID NO: 169998 - DNA, 25 bp, SARS Virus
cgtactctcgtagggcatatgtgat

SEQ ID NO: 169999 - DNA, 25 bp, SARS Virus
gtactctcgtacggcatatgtgata

SEQ ID NO: 170000 - DNA, 25 bp, SARS Virus
tactctcgtacggcatatgtgatac

SEQ ID NO: 170001 - DNA, 25 bp, SARS Virus
actctcgtacgggatatgtgatacg

SEQ ID NO: 170002 - DNA, 25 bp, SARS Virus
ctctcgtacggcgtatgtgatacgc

SEQ ID NO: 170003 - DNA, 25 bp, SARS Virus
tctcgtacggcagatgtgatacgct

SEQ ID NO: 170004 - DNA, 25 bp, SARS Virus
ctcgtacggcatgtgtgatacgctc

SEQ ID NO: 170005 - DNA, 25 bp, SARS Virus
tcgtacggcataggtgatacgctcg

SEQ ID NO: 170006 - DNA, 25 bp, SARS Virus
cgtacggcatatgtgatacgctcgt

SEQ ID NO: 170007 - DNA, 25 bp, SARS Virus
gtacggcatatgggatacgctcgtc

SEQ ID NO: 170008 - DNA, 25 bp, SARS Virus
tacggcatatgtgatacgctcgtct

SEQ ID NO: 170009 - DNA, 25 bp, SARS Virus
acggcatatgtggtacgctcgtcta

SEQ ID NO: 170010 - DNA, 25 bp, SARS Virus
cggcatatgtgagacgctcgtctac

SEQ ID NO: 170011 - DNA, 25 bp, SARS Virus
ggcatatgtgatgcgctcgtctacc

SEQ ID NO: 170012 - DNA, 25 bp, SARS Virus
gcatatgtgataggctcgtctaccc

SEQ ID NO: 170013 - DNA, 25 bp, SARS Virus
catatgtgatacgctcgtctaccca

SEQ ID NO: 170014 - DNA, 25 bp, SARS Virus
atatgtgatacggtcgtctacccat

SEQ ID NO: 170015 - DNA, 25 bp, SARS Virus
tatgtgatacgcgcgtctacccatt

SEQ ID NO: 170016 - DNA, 25 bp, SARS Virus
atgtgatacgctggtctacccatta

SEQ ID NO: 170017 - DNA, 25 bp, SARS Virus
tgtgatacgctcgtctacccattat

SEQ ID NO: 170018 - DNA, 25 bp, SARS Virus
gtgatacgctcggctacccattatc

SEQ ID NO: 170019 - DNA, 25 bp, SARS Virus
tgatacgctcgtgtacccattatct

SEQ ID NO: 170020 - DNA, 25 bp, SARS Virus
gatacgctcgtcgacccattatctc

SEQ ID NO: 170021 - DNA, 25 bp, SARS Virus
atacgctcgtctgcccattatctct

SEQ ID NO: 170022 - DNA, 25 bp, SARS Virus
tacgctcgtctagccattatctctc

SEQ ID NO: 170023 - DNA, 25 bp, SARS Virus
acgctcgtctacgcattatctctcg

SEQ ID NO: 170024 - DNA, 25 bp, SARS Virus
cgctcgtctaccgattatctctcgt

SEQ ID NO: 170025 - DNA, 25 bp, SARS Virus
gctcgtctacccgttatctctcgtt

SEQ ID NO: 170026 - DNA, 25 bp, SARS Virus
ctcgtctacccagtatctctcgttc

SEQ ID NO: 170027 - DNA, 25 bp, SARS Virus
tcgtctacccatgatctctcgttca

SEQ ID NO: 170028 - DNA, 25 bp, SARS Virus
cgtctacccattgtctctcgttcag

SEQ ID NO: 170029 - DNA, 25 bp, SARS Virus
gtctacccattagctctcgttcagg

SEQ ID NO: 170030 - DNA, 25 bp, SARS Virus
tctacccattatgtctcgttcaggc

SEQ ID NO: 170031 - DNA, 25 bp, SARS Virus
ctacccattatcgctcgttcaggct

SEQ ID NO: 170032 - DNA, 25 bp, SARS Virus
tacccattatctgtcgttcaggcta

SEQ ID NO: 170033 - DNA, 25 bp, SARS Virus
acccattatctcgcgttcaggctac

SEQ ID NO: 170034 - DNA, 25 bp, SARS Virus
cccattatctctggttcaggctacc

SEQ ID NO: 170035 - DNA, 25 bp, SARS Virus
ccattatctctcgttcaggctaccg

SEQ ID NO: 170036 - DNA, 25 bp, SARS Virus
cattatctctcggtcaggctaccgt

SEQ ID NO: 170037 - DNA, 25 bp, SARS Virus
attatctctcgtgcaggctaccgtt

SEQ ID NO: 170038 - DNA, 25 bp, SARS Virus
ttatctctcgttgaggctaccgttt

SEQ ID NO: 170039 - DNA, 25 bp, SARS Virus
tatctctcgttcgggctaccgtttt

SEQ ID NO: 170040 - DNA, 25 bp, SARS Virus
atctctcgttcaggctaccgtttta

SEQ ID NO: 170041 - DNA, 25 bp, SARS Virus
tctctcgttcaggctaccgttttac

SEQ ID NO: 170042 - DNA, 25 bp, SARS Virus
ctctcgttcagggtaccgttttact

SEQ ID NO: 170043 - DNA, 25 bp, SARS Virus
tctcgttcaggcgaccgttttactg

SEQ ID NO: 170044 - DNA, 25 bp, SARS Virus
ctcgttcaggctgccgttttactga

SEQ ID NO: 170045 - DNA, 25 bp, SARS Virus
tcgttcaggctagcgttttactgag

SEQ ID NO: 170046 - DNA, 25 bp, SARS Virus
cgttcaggctacggttttactgaga

SEQ ID NO: 170047 - DNA, 25 bp, SARS Virus
gttcaggctaccgttttactgagaa

SEQ ID NO: 170048 - DNA, 25 bp, SARS Virus
ttcaggctaccggtttactgagaat

SEQ ID NO: 170049 - DNA, 25 bp, SARS Virus
tcaggctaccgtgttactgagaatg

SEQ ID NO: 170050 - DNA, 25 bp, SARS Virus
caggctaccgttgtactgagaatgg

SEQ ID NO: 170051 - DNA, 25 bp, SARS Virus
aggctaccgtttgactgagaatggt

SEQ ID NO: 170052 - DNA, 25 bp, SARS Virus
ggctaccgttttgctgagaatggtc

SEQ ID NO: 170053 - DNA, 25 bp, SARS Virus
gctaccgttttagtgagaatggtca

SEQ ID NO: 170054 - DNA, 25 bp, SARS Virus
ctaccgttttacggagaatggtcat

SEQ ID NO: 170055 - DNA, 25 bp, SARS Virus
taccgttttactgagaatggtcatg

SEQ ID NO: 170056 - DNA, 25 bp, SARS Virus
accgttttactgggaatggtcatgg

SEQ ID NO: 170057 - DNA, 25 bp, SARS Virus
ccgttttactgagaatggtcatggt

SEQ ID NO: 170058 - DNA, 25 bp, SARS Virus
cgttttactgaggatggtcatggtc

SEQ ID NO: 170059 - DNA, 25 bp, SARS Virus
gttttactgagagtggtcatggtcc

SEQ ID NO: 170060 - DNA, 25 bp, SARS Virus
ttttactgagaagggtcatggtcca

SEQ ID NO: 170061 - DNA, 25 bp, SARS Virus
tttactgagaatggtcatggtccac

SEQ ID NO: 170062 - DNA, 25 bp, SARS Virus
ttactgagaatggtcatggtccacc

SEQ ID NO: 170063 - DNA, 25 bp, SARS Virus
tactgagaatgggcatggtccacca

SEQ ID NO: 170064 - DNA, 25 bp, SARS Virus
actgagaatggtgatggtccaccag

SEQ ID NO: 170065 - DNA, 25 bp, SARS Virus
ctgagaatggtcgtggtccaccagg

SEQ ID NO: 170066 - DNA, 25 bp, SARS Virus
tgagaatggtcagggtccaccagga

SEQ ID NO: 170067 - DNA, 25 bp, SARS Virus
gagaatggtcatggtccaccaggaa

SEQ ID NO: 170068 - DNA, 25 bp, SARS Virus
agaatggtcatggtccaccaggaac

SEQ ID NO: 170069 - DNA, 25 bp, SARS Virus
gaatggtcatgggccaccaggaacc

SEQ ID NO: 170070 - DNA, 25 bp, SARS Virus
aatggtcatggtgcaccaggaacct

SEQ ID NO: 170071 - DNA, 25 bp, SARS Virus
atggtcatggtcgaccaggaacctc

SEQ ID NO: 170072 - DNA, 25 bp, SARS Virus
tggtcatggtccgccaggaacctca

SEQ ID NO: 170073 - DNA, 25 bp, SARS Virus
ggtcatggtccagcaggaacctcac

SEQ ID NO: 170074 - DNA, 25 bp, SARS Virus
gtcatggtccacgaggaacctcaca

SEQ ID NO: 170075 - DNA, 25 bp, SARS Virus
tcatggtccaccgggaacctcacat

SEQ ID NO: 170076 - DNA, 25 bp, SARS Virus
catggtccaccaggaacctcacatc

SEQ ID NO: 170077 - DNA, 25 bp, SARS Virus
atggtccaccaggaacctcacatct

SEQ ID NO: 170078 - DNA, 25 bp, SARS Virus
tggtccaccagggacctcacatctc

SEQ ID NO: 170079 - DNA, 25 bp, SARS Virus
ggtccaccaggagcctcacatctca

SEQ ID NO: 170080 - DNA, 25 bp, SARS Virus
gtccaccaggaagctcacatctcat

SEQ ID NO: 170081 - DNA, 25 bp, SARS Virus
tccaccaggaacgtcacatctcatg

SEQ ID NO: 170082 - DNA, 25 bp, SARS Virus
ccaccaggaaccgcacatctcatga

SEQ ID NO: 170083 - DNA, 25 bp, SARS Virus
caccaggaacctgacatctcatgaa

SEQ ID NO: 170084 - DNA, 25 bp, SARS Virus
accaggaacctcgcatctcatgaaa

SEQ ID NO: 170085 - DNA, 25 bp, SARS Virus
ccaggaacctcagatctcatgaaaa

SEQ ID NO: 170086 - DNA, 25 bp, SARS Virus
caggaacctcacgtctcatgaaaac

SEQ ID NO: 170087 - DNA, 25 bp, SARS Virus
aggaacctcacagctcatgaaaacg

SEQ ID NO: 170088 - DNA, 25 bp, SARS Virus
ggaacctcacatgtcatgaaaacgt

SEQ ID NO: 170089 - DNA, 25 bp, SARS Virus
gaacctcacatcgcatgaaaacgta

SEQ ID NO: 170090 - DNA, 25 bp, SARS Virus
aacctcacatctgatgaaaacgtac

SEQ ID NO: 170091 - DNA, 25 bp, SARS Virus
acctcacatctcgtgaaaacgtacg

SEQ ID NO: 170092 - DNA, 25 bp, SARS Virus
cctcacatctcaggaaaacgtacgg

SEQ ID NO: 170093 - DNA, 25 bp, SARS Virus
ctcacatctcatgaaaacgtacggc

SEQ ID NO: 170094 - DNA, 25 bp, SARS Virus
tcacatctcatggaaacgtacggct

SEQ ID NO: 170095 - DNA, 25 bp, SARS Virus
cacatctcatgagaacgtacggctg

SEQ ID NO: 170096 - DNA, 25 bp, SARS Virus
acatctcatgaagacgtacggctgg

SEQ ID NO: 170097 - DNA, 25 bp, SARS Virus
catctcatgaaagcgtacggctgga

SEQ ID NO: 170098 - DNA, 25 bp, SARS Virus
atctcatgaaaaggtacggctggaa

SEQ ID NO: 170099 - DNA, 25 bp, SARS Virus
tctcatgaaaacgtacggctggaaa

SEQ ID NO: 170100 - DNA, 25 bp, SARS Virus
ctcatgaaaacggacggctggaaaa

SEQ ID NO: 170101 - DNA, 25 bp, SARS Virus
tcatgaaaacgtgcggctggaaaac

SEQ ID NO: 170102 - DNA, 25 bp, SARS Virus
catgaaaacgtagggctggaaaact

SEQ ID NO: 170103 - DNA, 25 bp, SARS Virus
atgaaaacgtacggctggaaaacta

SEQ ID NO: 170104 - DNA, 25 bp, SARS Virus
tgaaaacgtacggctggaaaactat

SEQ ID NO: 170105 - DNA, 25 bp, SARS Virus
gaaaacgtacgggtggaaaactatt

SEQ ID NO: 170106 - DNA, 25 bp, SARS Virus
aaaacgtacggcgggaaaactatta

SEQ ID NO: 170107 - DNA, 25 bp, SARS Virus
aaacgtacggctggaaaactattaa

SEQ ID NO: 170108 - DNA, 25 bp, SARS Virus
aacgtacggctggaaaactattaaa

SEQ ID NO: 170109 - DNA, 25 bp, SARS Virus
acgtacggctgggaaactattaaac

SEQ ID NO: 170110 - DNA, 25 bp, SARS Virus
cgtacggctggagaactattaaacg

SEQ ID NO: 170111 - DNA, 25 bp, SARS Virus
gtacggctggaagactattaaacgt

SEQ ID NO: 170112 - DNA, 25 bp, SARS Virus
tacggctggaaagctattaaacgtt

SEQ ID NO: 170113 - DNA, 25 bp, SARS Virus
acggctggaaaagtattaaacgttg

SEQ ID NO: 170114 - DNA, 25 bp, SARS Virus
cggctggaaaacgattaaacgttgt

SEQ ID NO: 170115 - DNA, 25 bp, SARS Virus
ggctggaaaactgttaaacgttgta

SEQ ID NO: 170116 - DNA, 25 bp, SARS Virus
gctggaaaactagtaaacgttgtaa

SEQ ID NO: 170117 - DNA, 25 bp, SARS Virus
ctggaaaactatgaaacgttgtaac

SEQ ID NO: 170118 - DNA, 25 bp, SARS Virus
tggaaaactattgaacgttgtaacg

SEQ ID NO: 170119 - DNA, 25 bp, SARS Virus
ggaaaactattagacgttgtaacga

SEQ ID NO: 170120 - DNA, 25 bp, SARS Virus
gaaaactattaagcgttgtaacgat

SEQ ID NO: 170121 - DNA, 25 bp, SARS Virus
aaaactattaaaggttgtaacgatc

SEQ ID NO: 170122 - DNA, 25 bp, SARS Virus
aaactattaaacgttgtaacgatct

SEQ ID NO: 170123 - DNA, 25 bp, SARS Virus
aactattaaacggtgtaacgatctt

SEQ ID NO: 170124 - DNA, 25 bp, SARS Virus
actattaaacgtggtaacgatcttt

SEQ ID NO: 170125 - DNA, 25 bp, SARS Virus
ctattaaacgttgtaacgatctttt

SEQ ID NO: 170126 - DNA, 25 bp, SARS Virus
tattaaacgttggaacgatcttttg

SEQ ID NO: 170127 - DNA, 25 bp, SARS Virus
attaaacgttgtgacgatcttttga

SEQ ID NO: 170128 - DNA, 25 bp, SARS Virus
ttaaacgttgtagcgatcttttgag

SEQ ID NO: 170129 - DNA, 25 bp, SARS Virus
taaacgttgtaaggatcttttgagt

SEQ ID NO: 170130 - DNA, 25 bp, SARS Virus
aaacgttgtaacgatcttttgagta

SEQ ID NO: 170131 - DNA, 25 bp, SARS Virus
aacgttgtaacggtcttttgagtag

SEQ ID NO: 170132 - DNA, 25 bp, SARS Virus
acgttgtaacgagcttttgagtaga

SEQ ID NO: 170133 - DNA, 25 bp, SARS Virus
cgttgtaacgatgttttgagtagac

SEQ ID NO: 170134 - DNA, 25 bp, SARS Virus
gttgtaacgatcgtttgagtagact

SEQ ID NO: 170135 - DNA, 25 bp, SARS Virus
ttgtaacgatctgttgagtagactc

SEQ ID NO: 170136 - DNA, 25 bp, SARS Virus
tgtaacgatcttgtgagtagactct

SEQ ID NO: 170137 - DNA, 25 bp, SARS Virus
gtaacgatctttggagtagactcta

SEQ ID NO: 170138 - DNA, 25 bp, SARS Virus
taacgatcttttgagtagactctac

SEQ ID NO: 170139 - DNA, 25 bp, SARS Virus
aacgatcttttgggtagactctaca

SEQ ID NO: 170140 - DNA, 25 bp, SARS Virus
acgatcttttgagtagactctacaa

SEQ ID NO: 170141 - DNA, 25 bp, SARS Virus
cgatcttttgaggagactctacaac

SEQ ID NO: 170142 - DNA, 25 bp, SARS Virus
gatcttttgagtggactctacaact

SEQ ID NO: 170143 - DNA, 25 bp, SARS Virus
atcttttgagtagactctacaactc

SEQ ID NO: 170144 - DNA, 25 bp, SARS Virus
tcttttgagtaggctctacaactca

SEQ ID NO: 170145 - DNA, 25 bp, SARS Virus
cttttgagtagagtctacaactcac

SEQ ID NO: 170146 - DNA, 25 bp, SARS Virus
ttttgagtagacgctacaactcaca

SEQ ID NO: 170147 - DNA, 25 bp, SARS Virus
tttgagtagactgtacaactcacaa

SEQ ID NO: 170148 - DNA, 25 bp, SARS Virus
ttgagtagactcgacaactcacaac

SEQ ID NO: 170149 - DNA, 25 bp, SARS Virus
tgagtagactctgcaactcacaacc

SEQ ID NO: 170150 - DNA, 25 bp, SARS Virus
gagtagactctagaactcacaaccc

SEQ ID NO: 170151 - DNA, 25 bp, SARS Virus
agtagactctacgactcacaaccca

SEQ ID NO: 170152 - DNA, 25 bp, SARS Virus
gtagactctacagctcacaacccat

SEQ ID NO: 170153 - DNA, 25 bp, SARS Virus
tagactctacaagtcacaacccatg

SEQ ID NO: 170154 - DNA, 25 bp, SARS Virus
agactctacaacgcacaacccatgt

SEQ ID NO: 170155 - DNA, 25 bp, SARS Virus
gactctacaactgacaacccatgtt

SEQ ID NO: 170156 - DNA, 25 bp, SARS Virus
actctacaactcgcaacccatgttc

SEQ ID NO: 170157 - DNA, 25 bp, SARS Virus
ctctacaactcagaacccatgttcg

SEQ ID NO: 170158 - DNA, 25 bp, SARS Virus
tctacaactcacgacccatgttcgg

SEQ ID NO: 170159 - DNA, 25 bp, SARS Virus
ctacaactcacagcccatgttcggt

SEQ ID NO: 170160 - DNA, 25 bp, SARS Virus
tacaactcacaagccatgttcggtc

SEQ ID NO: 170161 - DNA, 25 bp, SARS Virus
acaactcacaacgcatgttcggtca

SEQ ID NO: 170162 - DNA, 25 bp, SARS Virus
caactcacaaccgatgttcggtcat

SEQ ID NO: 170163 - DNA, 25 bp, SARS Virus
aactcacaacccgtgttcggtcatt

SEQ ID NO: 170164 - DNA, 25 bp, SARS Virus
actcacaacccaggttcggtcatta

SEQ ID NO: 170165 - DNA, 25 bp, SARS Virus
ctcacaacccatgttcggtcattaa

SEQ ID NO: 170166 - DNA, 25 bp, SARS Virus
tcacaacccatggtcggtcattaag

SEQ ID NO: 170167 - DNA, 25 bp, SARS Virus
cacaacccatgtgcggtcattaaga

SEQ ID NO: 170168 - DNA, 25 bp, SARS Virus
acaacccatgttgggtcattaagag

SEQ ID NO: 170169 - DNA, 25 bp, SARS Virus
caacccatgttcggtcattaagagt

SEQ ID NO: 170170 - DNA, 25 bp, SARS Virus
aacccatgttcggtcattaagagtg

SEQ ID NO: 170171 - DNA, 25 bp, SARS Virus
acccatgttcgggcattaagagtgt

SEQ ID NO: 170172 - DNA, 25 bp, SARS Virus
cccatgttcggtgattaagagtgta

SEQ ID NO: 170173 - DNA, 25 bp, SARS Virus
ccatgttcggtcgttaagagtgtat

SEQ ID NO: 170174 - DNA, 25 bp, SARS Virus
catgttcggtcagtaagagtgtatc

SEQ ID NO: 170175 - DNA, 25 bp, SARS Virus
atgttcggtcatgaagagtgtatca

SEQ ID NO: 170176 - DNA, 25 bp, SARS Virus
tgttcggtcattgagagtgtatcac

SEQ ID NO: 170177 - DNA, 25 bp, SARS Virus
gttcggtcattaggagtgtatcacg

SEQ ID NO: 170178 - DNA, 25 bp, SARS Virus
ttcggtcattaagagtgtatcacga

SEQ ID NO: 170179 - DNA, 25 bp, SARS Virus
tcggtcattaagggtgtatcacgag

SEQ ID NO: 170180 - DNA, 25 bp, SARS Virus
cggtcattaagagtgtatcacgaga

SEQ ID NO: 170181 - DNA, 25 bp, SARS Virus
ggtcattaagagggtatcacgagaa

SEQ ID NO: 170182 - DNA, 25 bp, SARS Virus
gtcattaagagtgtatcacgagaac

SEQ ID NO: 170183 - DNA, 25 bp, SARS Virus
tcattaagagtggatcacgagaaca

SEQ ID NO: 170184 - DNA, 25 bp, SARS Virus
cattaagagtgtgtcacgagaacac

SEQ ID NO: 170185 - DNA, 25 bp, SARS Virus
attaagagtgtagcacgagaacacc

SEQ ID NO: 170186 - DNA, 25 bp, SARS Virus
ttaagagtgtatgacgagaacaccg

SEQ ID NO: 170187 - DNA, 25 bp, SARS Virus
taagagtgtatcgcgagaacaccgt

SEQ ID NO: 170188 - DNA, 25 bp, SARS Virus
aagagtgtatcaggagaacaccgtg

SEQ ID NO: 170189 - DNA, 25 bp, SARS Virus
agagtgtatcacgagaacaccgtga

SEQ ID NO: 170190 - DNA, 25 bp, SARS Virus
gagtgtatcacgggaacaccgtgat

SEQ ID NO: 170191 - DNA, 25 bp, SARS Virus
agtgtatcacgagaacaccgtgatc

SEQ ID NO: 170192 - DNA, 25 bp, SARS Virus
gtgtatcacgaggacaccgtgatct

SEQ ID NO: 170193 - DNA, 25 bp, SARS Virus
tgtatcacgagagcaccgtgatctc

SEQ ID NO: 170194 - DNA, 25 bp, SARS Virus
gtatcacgagaagaccgtgatctca

SEQ ID NO: 170195 - DNA, 25 bp, SARS Virus
tatcacgagaacgccgtgatctcat

SEQ ID NO: 170196 - DNA, 25 bp, SARS Virus
atcacgagaacagcgtgatctcatc

SEQ ID NO: 170197 - DNA, 25 bp, SARS Virus
tcacgagaacacggtgatctcatcc

SEQ ID NO: 170198 - DNA, 25 bp, SARS Virus
cacgagaacaccgtgatctcatcca

SEQ ID NO: 170199 - DNA, 25 bp, SARS Virus
acgagaacaccgggatctcatccac

SEQ ID NO: 170200 - DNA, 25 bp, SARS Virus
cgagaacaccgtgatctcatccacg

SEQ ID NO: 170201 - DNA, 25 bp, SARS Virus
gagaacaccgtggtctcatccacgt

SEQ ID NO: 170202 - DNA, 25 bp, SARS Virus
agaacaccgtgagctcatccacgtg

SEQ ID NO: 170203 - DNA, 25 bp, SARS Virus
gaacaccgtgatgtcatccacgtga

SEQ ID NO: 170204 - DNA, 25 bp, SARS Virus
aacaccgtgatcgcatccacgtgat

SEQ ID NO: 170205 - DNA, 25 bp, SARS Virus
acaccgtgatctgatccacgtgatt

SEQ ID NO: 170206 - DNA, 25 bp, SARS Virus
caccgtgatctcgtccacgtgattc

SEQ ID NO: 170207 - DNA, 25 bp, SARS Virus
accgtgatctcagccacgtgattca

SEQ ID NO: 170208 - DNA, 25 bp, SARS Virus
ccgtgatctcatgcacgtgattcac

SEQ ID NO: 170209 - DNA, 25 bp, SARS Virus
cgtgatctcatcgacgtgattcacc

SEQ ID NO: 170210 - DNA, 25 bp, SARS Virus
gtgatctcatccgcgtgattcaccg

SEQ ID NO: 170211 - DNA, 25 bp, SARS Virus
tgatctcatccaggtgattcaccgt

SEQ ID NO: 170212 - DNA, 25 bp, SARS Virus
gatctcatccacgtgattcaccgta

SEQ ID NO: 170213 - DNA, 25 bp, SARS Virus
atctcatccacgggattcaccgtaa

SEQ ID NO: 170214 - DNA, 25 bp, SARS Virus
tctcatccacgtgattcaccgtaat

SEQ ID NO: 170215 - DNA, 25 bp, SARS Virus
ctcatccacgtggttcaccgtaatg

SEQ ID NO: 170216 - DNA, 25 bp, SARS Virus
tcatccacgtgagtcaccgtaatgt

SEQ ID NO: 170217 - DNA, 25 bp, SARS Virus
catccacgtgatgcaccgtaatgtc

SEQ ID NO: 170218 - DNA, 25 bp, SARS Virus
atccacgtgattgaccgtaatgtca

SEQ ID NO: 170219 - DNA, 25 bp, SARS Virus
tccacgtgattcgccgtaatgtcac

SEQ ID NO: 170220 - DNA, 25 bp, SARS Virus
ccacgtgattcagcgtaatgtcaca

SEQ ID NO: 170221 - DNA, 25 bp, SARS Virus
cacgtgattcacggtaatgtcacac

SEQ ID NO: 170222 - DNA, 25 bp, SARS Virus
acgtgattcaccgtaatgtcacact

SEQ ID NO: 170223 - DNA, 25 bp, SARS Virus
cgtgattcaccggaatgtcacactc

SEQ ID NO: 170224 - DNA, 25 bp, SARS Virus
gtgattcaccgtgatgtcacactct

SEQ ID NO: 170225 - DNA, 25 bp, SARS Virus
tgattcaccgtagtgtcacactcta

SEQ ID NO: 170226 - DNA, 25 bp, SARS Virus
gattcaccgtaaggtcacactctac

SEQ ID NO: 170227 - DNA, 25 bp, SARS Virus
attcaccgtaatgtcacactctaca

SEQ ID NO: 170228 - DNA, 25 bp, SARS Virus
ttcaccgtaatggcacactctacag

SEQ ID NO: 170229 - DNA, 25 bp, SARS Virus
tcaccgtaatgtgacactctacagt

SEQ ID NO: 170230 - DNA, 25 bp, SARS Virus
caccgtaatgtcgcactctacagtt

SEQ ID NO: 170231 - DNA, 25 bp, SARS Virus
accgtaatgtcagactctacagttg

SEQ ID NO: 170232 - DNA, 25 bp, SARS Virus
ccgtaatgtcacgctctacagttgt

SEQ ID NO: 170233 - DNA, 25 bp, SARS Virus
cgtaatgtcacagtctacagttgtg

SEQ ID NO: 170234 - DNA, 25 bp, SARS Virus
gtaatgtcacacgctacagttgtgt

SEQ ID NO: 170235 - DNA, 25 bp, SARS Virus
taatgtcacactgtacagttgtgtt

SEQ ID NO: 170236 - DNA, 25 bp, SARS Virus
aatgtcacactcgacagttgtgttt

SEQ ID NO: 170237 - DNA, 25 bp, SARS Virus
atgtcacactctgcagttgtgtttc

SEQ ID NO: 170238 - DNA, 25 bp, SARS Virus
tgtcacactctagagttgtgtttca

SEQ ID NO: 170239 - DNA, 25 bp, SARS Virus
gtcacactctacggttgtgtttcat

SEQ ID NO: 170240 - DNA, 25 bp, SARS Virus
tcacactctacagttgtgtttcatt

SEQ ID NO: 170241 - DNA, 25 bp, SARS Virus
cacactctacaggtgtgtttcatta

SEQ ID NO: 170242 - DNA, 25 bp, SARS Virus
acactctacagtggtgtttcattag

SEQ ID NO: 170243 - DNA, 25 bp, SARS Virus
cactctacagttgtgtttcattagt

SEQ ID NO: 170244 - DNA, 25 bp, SARS Virus
actctacagttgggtttcattagtg

SEQ ID NO: 170245 - DNA, 25 bp, SARS Virus
ctctacagttgtgtttcattagtgg

SEQ ID NO: 170246 - DNA, 25 bp, SARS Virus
tctacagttgtggttcattagtggt

SEQ ID NO: 170247 - DNA, 25 bp, SARS Virus
ctacagttgtgtgtcattagtggtt

SEQ ID NO: 170248 - DNA, 25 bp, SARS Virus
tacagttgtgttgcattagtggttg

SEQ ID NO: 170249 - DNA, 25 bp, SARS Virus
acagttgtgtttgattagtggttgt

SEQ ID NO: 170250 - DNA, 25 bp, SARS Virus
cagttgtgtttcgttagtggttgta

SEQ ID NO: 170251 - DNA, 25 bp, SARS Virus
agttgtgtttcagtagtggttgtaa

SEQ ID NO: 170252 - DNA, 25 bp, SARS Virus
gttgtgtttcatgagtggttgtaag

SEQ ID NO: 170253 - DNA, 25 bp, SARS Virus
ttgtgtttcattggtggttgtaagt

SEQ ID NO: 170254 - DNA, 25 bp, SARS Virus
tgtgtttcattagtggttgtaagtt

SEQ ID NO: 170255 - DNA, 25 bp, SARS Virus
gtgtttcattaggggttgtaagttg

SEQ ID NO: 170256 - DNA, 25 bp, SARS Virus
tgtttcattagtggttgtaagttga

SEQ ID NO: 170257 - DNA, 25 bp, SARS Virus
gtttcattagtggttgtaagttgaa

SEQ ID NO: 170258 - DNA, 25 bp, SARS Virus
tttcattagtgggtgtaagttgaac

SEQ ID NO: 170259 - DNA, 25 bp, SARS Virus
ttcattagtggtggtaagttgaaca

SEQ ID NO: 170260 - DNA, 25 bp, SARS Virus
tcattagtggttgtaagttgaacat

SEQ ID NO: 170261 - DNA, 25 bp, SARS Virus
cattagtggttggaagttgaacata

SEQ ID NO: 170262 - DNA, 25 bp, SARS Virus
attagtggttgtgagttgaacatac

SEQ ID NO: 170263 - DNA, 25 bp, SARS Virus
ttagtggttgtaggttgaacataca

SEQ ID NO: 170264 - DNA, 25 bp, SARS Virus
tagtggttgtaagttgaacatacag

SEQ ID NO: 170265 - DNA, 25 bp, SARS Virus
agtggttgtaaggtgaacatacagc

SEQ ID NO: 170266 - DNA, 25 bp, SARS Virus
gtggttgtaagtggaacatacagca

SEQ ID NO: 170267 - DNA, 25 bp, SARS Virus
tggttgtaagttgaacatacagcat

SEQ ID NO: 170268 - DNA, 25 bp, SARS Virus
ggttgtaagttggacatacagcatc

SEQ ID NO: 170269 - DNA, 25 bp, SARS Virus
gttgtaagttgagcatacagcatca

SEQ ID NO: 170270 - DNA, 25 bp, SARS Virus
ttgtaagttgaagatacagcatcat

SEQ ID NO: 170271 - DNA, 25 bp, SARS Virus
tgtaagttgaacgtacagcatcatg

SEQ ID NO: 170272 - DNA, 25 bp, SARS Virus
gtaagttgaacagacagcatcatgg

SEQ ID NO: 170273 - DNA, 25 bp, SARS Virus
taagttgaacatgcagcatcatgga

SEQ ID NO: 170274 - DNA, 25 bp, SARS Virus
aagttgaacatagagcatcatggag

SEQ ID NO: 170275 - DNA, 25 bp, SARS Virus
agttgaacatacggcatcatggaga

SEQ ID NO: 170276 - DNA, 25 bp, SARS Virus
gttgaacatacagcatcatggagac

SEQ ID NO: 170277 - DNA, 25 bp, SARS Virus
ttgaacatacaggatcatggagaca

SEQ ID NO: 170278 - DNA, 25 bp, SARS Virus
tgaacatacagcgtcatggagacat

SEQ ID NO: 170279 - DNA, 25 bp, SARS Virus
gaacatacagcagcatggagacatg

SEQ ID NO: 170280 - DNA, 25 bp, SARS Virus
aacatacagcatgatggagacatgt

SEQ ID NO: 170281 - DNA, 25 bp, SARS Virus
acatacagcatcgtggagacatgtg

SEQ ID NO: 170282 - DNA, 25 bp, SARS Virus
catacagcatcagggagacatgtgt

SEQ ID NO: 170283 - DNA, 25 bp, SARS Virus
atacagcatcatggagacatgtgtt

SEQ ID NO: 170284 - DNA, 25 bp, SARS Virus
tacagcatcatggagacatgtgttg

SEQ ID NO: 170285 - DNA, 25 bp, SARS Virus
acagcatcatggggacatgtgttgt

SEQ ID NO: 170286 - DNA, 25 bp, SARS Virus
cagcatcatggagacatgtgttgtc

SEQ ID NO: 170287 - DNA, 25 bp, SARS Virus
agcatcatggaggcatgtgttgtcg

SEQ ID NO: 170288 - DNA, 25 bp, SARS Virus
gcatcatggagagatgtgttgtcgt

SEQ ID NO: 170289 - DNA, 25 bp, SARS Virus
catcatggagacgtgtgttgtcgta

SEQ ID NO: 170290 - DNA, 25 bp, SARS Virus
atcatggagacaggtgttgtcgtag

SEQ ID NO: 170291 - DNA, 25 bp, SARS Virus
tcatggagacatgtgttgtcgtagt

SEQ ID NO: 170292 - DNA, 25 bp, SARS Virus
catggagacatgggttgtcgtagtg

SEQ ID NO: 170293 - DNA, 25 bp, SARS Virus
atggagacatgtgttgtcgtagtgg

SEQ ID NO: 170294 - DNA, 25 bp, SARS Virus
tggagacatgtggtgtcgtagtggt

SEQ ID NO: 170295 - DNA, 25 bp, SARS Virus
ggagacatgtgtggtcgtagtggta

SEQ ID NO: 170296 - DNA, 25 bp, SARS Virus
gagacatgtgttgtcgtagtggtat

SEQ ID NO: 170297 - DNA, 25 bp, SARS Virus
agacatgtgttggcgtagtggtatc

SEQ ID NO: 170298 - DNA, 25 bp, SARS Virus
gacatgtgttgtggtagtggtatca

SEQ ID NO: 170299 - DNA, 25 bp, SARS Virus
acatgtgttgtcgtagtggtatcag

SEQ ID NO: 170300 - DNA, 25 bp, SARS Virus
catgtgttgtcggagtggtatcagt

SEQ ID NO: 170301 - DNA, 25 bp, SARS Virus
atgtgttgtcgtggtggtatcagtg

SEQ ID NO: 170302 - DNA, 25 bp, SARS Virus
tgtgttgtcgtagtggtatcagtgg

SEQ ID NO: 170303 - DNA, 25 bp, SARS Virus
gtgttgtcgtaggggtatcagtgga

SEQ ID NO: 170304 - DNA, 25 bp, SARS Virus
tgttgtcgtagtggtatcagtggaa

SEQ ID NO: 170305 - DNA, 25 bp, SARS Virus
gttgtcgtagtggtatcagtggaaa

SEQ ID NO: 170306 - DNA, 25 bp, SARS Virus
ttgtcgtagtgggatcagtggaaaa

SEQ ID NO: 170307 - DNA, 25 bp, SARS Virus
tgtcgtagtggtgtcagtggaaaaa

SEQ ID NO: 170308 - DNA, 25 bp, SARS Virus
gtcgtagtggtagcagtggaaaaag

SEQ ID NO: 170309 - DNA, 25 bp, SARS Virus
tcgtagtggtatgagtggaaaaagt

SEQ ID NO: 170310 - DNA, 25 bp, SARS Virus
cgtagtggtatcggtggaaaaagtt

SEQ ID NO: 170311 - DNA, 25 bp, SARS Virus
gtagtggtatcagtggaaaaagttt

SEQ ID NO: 170312 - DNA, 25 bp, SARS Virus
tagtggtatcaggggaaaaagtttc

SEQ ID NO: 170313 - DNA, 25 bp, SARS Virus
agtggtatcagtggaaaaagtttcc

SEQ ID NO: 170314 - DNA, 25 bp, SARS Virus
gtggtatcagtggaaaaagtttcca

SEQ ID NO: 170315 - DNA, 25 bp, SARS Virus
tggtatcagtgggaaaagtttccac

SEQ ID NO: 170316 - DNA, 25 bp, SARS Virus
ggtatcagtggagaaagtttccaca

SEQ ID NO: 170317 - DNA, 25 bp, SARS Virus
gtatcagtggaagaagtttccacat

SEQ ID NO: 170318 - DNA, 25 bp, SARS Virus
tatcagtggaaagagtttccacatg

SEQ ID NO: 170319 - DNA, 25 bp, SARS Virus
atcagtggaaaaggtttccacatga

SEQ ID NO: 170320 - DNA, 25 bp, SARS Virus
tcagtggaaaaagtttccacatgag

SEQ ID NO: 170321 - DNA, 25 bp, SARS Virus
cagtggaaaaaggttccacatgaga

SEQ ID NO: 170322 - DNA, 25 bp, SARS Virus
agtggaaaaagtgtccacatgagag

SEQ ID NO: 170323 - DNA, 25 bp, SARS Virus
gtggaaaaagttgccacatgagagg

SEQ ID NO: 170324 - DNA, 25 bp, SARS Virus
tggaaaaagtttgcacatgagaggt

SEQ ID NO: 170325 - DNA, 25 bp, SARS Virus
ggaaaaagtttcgacatgagaggtt

SEQ ID NO: 170326 - DNA, 25 bp, SARS Virus
gaaaaagtttccgcatgagaggtta

SEQ ID NO: 170327 - DNA, 25 bp, SARS Virus
aaaaagtttccagatgagaggttag

SEQ ID NO: 170328 - DNA, 25 bp, SARS Virus
aaaagtttccacgtgagaggttaga

SEQ ID NO: 170329 - DNA, 25 bp, SARS Virus
aaagtttccacaggagaggttagac

SEQ ID NO: 170330 - DNA, 25 bp, SARS Virus
aagtttccacatgagaggttagaca

SEQ ID NO: 170331 - DNA, 25 bp, SARS Virus
agtttccacatgggaggttagacat

SEQ ID NO: 170332 - DNA, 25 bp, SARS Virus
gtttccacatgagaggttagacatg

SEQ ID NO: 170333 - DNA, 25 bp, SARS Virus
tttccacatgaggggttagacatga

SEQ ID NO: 170334 - DNA, 25 bp, SARS Virus
ttccacatgagaggttagacatgaa

SEQ ID NO: 170335 - DNA, 25 bp, SARS Virus
tccacatgagaggttagacatgaaa

SEQ ID NO: 170336 - DNA, 25 bp, SARS Virus
ccacatgagagggtagacatgaaat

SEQ ID NO: 170337 - DNA, 25 bp, SARS Virus
cacatgagaggtgagacatgaaatg

SEQ ID NO: 170338 - DNA, 25 bp, SARS Virus
acatgagaggttggacatgaaatga

SEQ ID NO: 170339 - DNA, 25 bp, SARS Virus
catgagaggttagacatgaaatgat

SEQ ID NO: 170340 - DNA, 25 bp, SARS Virus
atgagaggttaggcatgaaatgata

SEQ ID NO: 170341 - DNA, 25 bp, SARS Virus
tgagaggttagagatgaaatgataa

SEQ ID NO: 170342 - DNA, 25 bp, SARS Virus
gagaggttagacgtgaaatgataaa

SEQ ID NO: 170343 - DNA, 25 bp, SARS Virus
agaggttagacaggaaatgataaaa

SEQ ID NO: 170344 - DNA, 25 bp, SARS Virus
gaggttagacatgaaatgataaaaa

SEQ ID NO: 170345 - DNA, 25 bp, SARS Virus
cacgtcttttgtttgacaagatcac

SEQ ID NO: 170346 - DNA, 25 bp, SARS Virus
acgtcttttgtatgacaagatcaca

SEQ ID NO: 170347 - DNA, 25 bp, SARS Virus
cgtcttttgtattacaagatcacaa

SEQ ID NO: 170348 - DNA, 25 bp, SARS Virus
gtcttttgtatgtcaagatcacaac

SEQ ID NO: 170349 - DNA, 25 bp, SARS Virus
tcttttgtatgataagatcacaact

SEQ ID NO: 170350 - DNA, 25 bp, SARS Virus
cttttgtatgactagatcacaactt

SEQ ID NO: 170351 - DNA, 25 bp, SARS Virus
ttttgtatgacatgatcacaactta

SEQ ID NO: 170352 - DNA, 25 bp, SARS Virus
tttgtatgacaatatcacaacttaa

SEQ ID NO: 170353 - DNA, 25 bp, SARS Virus
ttgtatgacaagttcacaacttaag

SEQ ID NO: 170354 - DNA, 25 bp, SARS Virus
tgtatgacaagatcacaacttaagt

SEQ ID NO: 170355 - DNA, 25 bp, SARS Virus
gtatgacaagattacaacttaagtg

SEQ ID NO: 170356 - DNA, 25 bp, SARS Virus
tatgacaagatctcaacttaagtga

SEQ ID NO: 170357 - DNA, 25 bp, SARS Virus
atgacaagatcataacttaagtgaa

SEQ ID NO: 170358 - DNA, 25 bp, SARS Virus
tgacaagatcactacttaagtgaaa

SEQ ID NO: 170359 - DNA, 25 bp, SARS Virus
gacaagatcacatcttaagtgaaac

SEQ ID NO: 170360 - DNA, 25 bp, SARS Virus
acaagatcacaatttaagtgaaact

SEQ ID NO: 170361 - DNA, 25 bp, SARS Virus
caagatcacaacttaagtgaaactt

SEQ ID NO: 170362 - DNA, 25 bp, SARS Virus
aagatcacaacttaagtgaaactta

SEQ ID NO: 170363 - DNA, 25 bp, SARS Virus
agatcacaactttagtgaaacttaa

SEQ ID NO: 170364 - DNA, 25 bp, SARS Virus
gatcacaacttatgtgaaacttaaa

SEQ ID NO: 170365 - DNA, 25 bp, SARS Virus
atcacaacttaattgaaacttaaat

SEQ ID NO: 170366 - DNA, 25 bp, SARS Virus
tcacaacttaagtgaaacttaaata

SEQ ID NO: 170367 - DNA, 25 bp, SARS Virus
cacaacttaagttaaacttaaatag

SEQ ID NO: 170368 - DNA, 25 bp, SARS Virus
acaacttaagtgtaacttaaatagt

SEQ ID NO: 170369 - DNA, 25 bp, SARS Virus
caacttaagtgatacttaaatagtt

SEQ ID NO: 170370 - DNA, 25 bp, SARS Virus
aacttaagtgaatcttaaatagttt

SEQ ID NO: 170371 - DNA, 25 bp, SARS Virus
acttaagtgaaatttaaatagtttt

SEQ ID NO: 170372 - DNA, 25 bp, SARS Virus
cttaagtgaaacttaaatagttttg

SEQ ID NO: 170373 - DNA, 25 bp, SARS Virus
ttaagtgaaacttaaatagttttgt

SEQ ID NO: 170374 - DNA, 25 bp, SARS Virus
taagtgaaactttaatagttttgtg

SEQ ID NO: 170375 - DNA, 25 bp, SARS Virus
aagtgaaacttatatagttttgtga

SEQ ID NO: 170376 - DNA, 25 bp, SARS Virus
agtgaaacttaattagttttgtgag

SEQ ID NO: 170377 - DNA, 25 bp, SARS Virus
gtgaaacttaaatagttttgtgaga

SEQ ID NO: 170378 - DNA, 25 bp, SARS Virus
tgaaacttaaattgttttgtgagat

SEQ ID NO: 170379 - DNA, 25 bp, SARS Virus
gaaacttaaatatttttgtgagatg

SEQ ID NO: 170380 - DNA, 25 bp, SARS Virus
aaacttaaatagttttgtgagatgc

SEQ ID NO: 170381 - DNA, 25 bp, SARS Virus
aacttaaatagttttgtgagatgcg

SEQ ID NO: 170382 - DNA, 25 bp, SARS Virus
acttaaatagttttgtgagatgcgc

SEQ ID NO: 170383 - DNA, 25 bp, SARS Virus
cttaaatagttttgtgagatgcgcg

SEQ ID NO: 170384 - DNA, 25 bp, SARS Virus
ttaaatagttttttgagatgcgcgc

SEQ ID NO: 170385 - DNA, 25 bp, SARS Virus
taaatagttttgtgagatgcgcgcg

SEQ ID NO: 170386 - DNA, 25 bp, SARS Virus
aaatagttttgttagatgcgcgcgt

SEQ ID NO: 170387 - DNA, 25 bp, SARS Virus
aatagttttgtgtgatgcgcgcgtg

SEQ ID NO: 170388 - DNA, 25 bp, SARS Virus
atagttttgtgatatgcgcgcgtgc

SEQ ID NO: 170389 - DNA, 25 bp, SARS Virus
tagttttgtgagttgcgcgcgtgcg

SEQ ID NO: 170390 - DNA, 25 bp, SARS Virus
agttttgtgagatgcgcgcgtgcgc

SEQ ID NO: 170391 - DNA, 25 bp, SARS Virus
gttttgtgagattcgcgcgtgcgcg

SEQ ID NO: 170392 - DNA, 25 bp, SARS Virus
ttttgtgagatgtgcgcgtgcgcgt

SEQ ID NO: 170393 - DNA, 25 bp, SARS Virus
tttgtgagatgctcgcgtgcgcgtc

SEQ ID NO: 170394 - DNA, 25 bp, SARS Virus
ttgtgagatgcgtgcgtgcgcgtcc

SEQ ID NO: 170395 - DNA, 25 bp, SARS Virus
tgtgagatgcgctcgtgcgcgtcca

SEQ ID NO: 170396 - DNA, 25 bp, SARS Virus
gtgagatgcgcgtgtgcgcgtccat

SEQ ID NO: 170397 - DNA, 25 bp, SARS Virus
tgagatgcgcgcttgcgcgtccata

SEQ ID NO: 170398 - DNA, 25 bp, SARS Virus
gagatgcgcgcgtgcgcgtccatac

SEQ ID NO: 170399 - DNA, 25 bp, SARS Virus
agatgcgcgcgttcgcgtccatact

SEQ ID NO: 170400 - DNA, 25 bp, SARS Virus
gatgcgcgcgtgtgcgtccatacta

SEQ ID NO: 170401 - DNA, 25 bp, SARS Virus
atgcgcgcgtgctcgtccatactaa

SEQ ID NO: 170402 - DNA, 25 bp, SARS Virus
tgcgcgcgtgcgtgtccatactaag

SEQ ID NO: 170403 - DNA, 25 bp, SARS Virus
gcgcgcgtgcgcttccatactaaga

SEQ ID NO: 170404 - DNA, 25 bp, SARS Virus
cgcgcgtgcgcgtccatactaagat

SEQ ID NO: 170405 - DNA, 25 bp, SARS Virus
gcgcgtgcgcgttcatactaagatg

SEQ ID NO: 170406 - DNA, 25 bp, SARS Virus
cgcgtgcgcgtctatactaagatga

SEQ ID NO: 170407 - DNA, 25 bp, SARS Virus
gcgtgcgcgtccttactaagatgat

SEQ ID NO: 170408 - DNA, 25 bp, SARS Virus
cgtgcgcgtccatactaagatgatg

SEQ ID NO: 170409 - DNA, 25 bp, SARS Virus
gtgcgcgtccattctaagatgatgt

SEQ ID NO: 170410 - DNA, 25 bp, SARS Virus
tgcgcgtccatattaagatgatgta

SEQ ID NO: 170411 - DNA, 25 bp, SARS Virus
gcgcgtccatactaagatgatgtaa

SEQ ID NO: 170412 - DNA, 25 bp, SARS Virus
cgcgtccatacttagatgatgtaaa

SEQ ID NO: 170413 - DNA, 25 bp, SARS Virus
gcgtccatactatgatgatgtaaat

SEQ ID NO: 170414 - DNA, 25 bp, SARS Virus
cgtccatactaatatgatgtaaata

SEQ ID NO: 170415 - DNA, 25 bp, SARS Virus
gtccatactaagttgatgtaaatag

SEQ ID NO: 170416 - DNA, 25 bp, SARS Virus
tccatactaagatgatgtaaataga

SEQ ID NO: 170417 - DNA, 25 bp, SARS Virus
ccatactaagattatgtaaatagat

SEQ ID NO: 170418 - DNA, 25 bp, SARS Virus
catactaagatgttgtaaatagata

SEQ ID NO: 170419 - DNA, 25 bp, SARS Virus
atactaagatgatgtaaatagatac

SEQ ID NO: 170420 - DNA, 25 bp, SARS Virus
tactaagatgatttaaatagatacc

SEQ ID NO: 170421 - DNA, 25 bp, SARS Virus
actaagatgatgtaaatagataccc

SEQ ID NO: 170422 - DNA, 25 bp, SARS Virus
ctaagatgatgttaatagatacccg

SEQ ID NO: 170423 - DNA, 25 bp, SARS Virus
taagatgatgtatatagatacccgt

SEQ ID NO: 170424 - DNA, 25 bp, SARS Virus
aagatgatgtaattagatacccgtt

SEQ ID NO: 170425 - DNA, 25 bp, SARS Virus
agatgatgtaaatagatacccgttt

SEQ ID NO: 170426 - DNA, 25 bp, SARS Virus
gatgatgtaaattgatacccgttta

SEQ ID NO: 170427 - DNA, 25 bp, SARS Virus
atgatgtaaatatatacccgtttat

SEQ ID NO: 170428 - DNA, 25 bp, SARS Virus
tgatgtaaatagttacccgtttata

SEQ ID NO: 170429 - DNA, 25 bp, SARS Virus
gatgtaaatagatacccgtttataa

SEQ ID NO: 170430 - DNA, 25 bp, SARS Virus
atgtaaatagattcccgtttataaa

SEQ ID NO: 170431 - DNA, 25 bp, SARS Virus
tgtaaatagatatccgtttataaaa

SEQ ID NO: 170432 - DNA, 25 bp, SARS Virus
gtaaatagatactcgtttataaaat

SEQ ID NO: 170433 - DNA, 25 bp, SARS Virus
taaatagatacctgtttataaaatt

SEQ ID NO: 170434 - DNA, 25 bp, SARS Virus
aaatagatacccttttataaaatta

SEQ ID NO: 170435 - DNA, 25 bp, SARS Virus
aatagatacccgtttataaaattac

SEQ ID NO: 170436 - DNA, 25 bp, SARS Virus
atagatacccgtttataaaattacg

SEQ ID NO: 170437 - DNA, 25 bp, SARS Virus
tagatacccgtttataaaattacgg

SEQ ID NO: 170438 - DNA, 25 bp, SARS Virus
agatacccgtttttaaaattacgga

SEQ ID NO: 170439 - DNA, 25 bp, SARS Virus
gatacccgtttataaaattacggaa

SEQ ID NO: 170440 - DNA, 25 bp, SARS Virus
atacccgtttattaaattacggaaa

SEQ ID NO: 170441 - DNA, 25 bp, SARS Virus
tacccgtttatataattacggaaaa

SEQ ID NO: 170442 - DNA, 25 bp, SARS Virus
acccgtttataatattacggaaaag

SEQ ID NO: 170443 - DNA, 25 bp, SARS Virus
cccgtttataaatttacggaaaagt

SEQ ID NO: 170444 - DNA, 25 bp, SARS Virus
ccgtttataaaattacggaaaagtg

SEQ ID NO: 170445 - DNA, 25 bp, SARS Virus
cgtttataaaattacggaaaagtgt

SEQ ID NO: 170446 - DNA, 25 bp, SARS Virus
gtttataaaatttcggaaaagtgta

SEQ ID NO: 170447 - DNA, 25 bp, SARS Virus
tttataaaattatggaaaagtgtat

SEQ ID NO: 170448 - DNA, 25 bp, SARS Virus
ttataaaattactgaaaagtgtatc

SEQ ID NO: 170449 - DNA, 25 bp, SARS Virus
tataaaattacgtaaaagtgtatcc

SEQ ID NO: 170450 - DNA, 25 bp, SARS Virus
ataaaattacggtaaagtgtatccc

SEQ ID NO: 170451 - DNA, 25 bp, SARS Virus
taaaattacggataagtgtatcccg

SEQ ID NO: 170452 - DNA, 25 bp, SARS Virus
aaaattacggaatagtgtatcccgt

SEQ ID NO: 170453 - DNA, 25 bp, SARS Virus
aaattacggaaatgtgtatcccgta

SEQ ID NO: 170454 - DNA, 25 bp, SARS Virus
aattacggaaaattgtatcccgtag

SEQ ID NO: 170455 - DNA, 25 bp, SARS Virus
attacggaaaagtgtatcccgtagt

SEQ ID NO: 170456 - DNA, 25 bp, SARS Virus
ttacggaaaagtttatcccgtagtt

SEQ ID NO: 170457 - DNA, 25 bp, SARS Virus
tacggaaaagtgtatcccgtagttg

SEQ ID NO: 170458 - DNA, 25 bp, SARS Virus
acggaaaagtgtttcccgtagttgt

SEQ ID NO: 170459 - DNA, 25 bp, SARS Virus
cggaaaagtgtatcccgtagttgtc

SEQ ID NO: 170460 - DNA, 25 bp, SARS Virus
ggaaaagtgtattccgtagttgtcg

SEQ ID NO: 170461 - DNA, 25 bp, SARS Virus
gaaaagtgtatctcgtagttgtcga

SEQ ID NO: 170462 - DNA, 25 bp, SARS Virus
aaaagtgtatcctgtagttgtcgac

SEQ ID NO: 170463 - DNA, 25 bp, SARS Virus
aaagtgtatcccttagttgtcgacg

SEQ ID NO: 170464 - DNA, 25 bp, SARS Virus
aagtgtatcccgtagttgtcgacgt

SEQ ID NO: 170465 - DNA, 25 bp, SARS Virus
agtgtatcccgttgttgtcgacgta

SEQ ID NO: 170466 - DNA, 25 bp, SARS Virus
gtgtatcccgtatttgtcgacgtac

SEQ ID NO: 170467 - DNA, 25 bp, SARS Virus
tgtatcccgtagttgtcgacgtact

SEQ ID NO: 170468 - DNA, 25 bp, SARS Virus
gtatcccgtagttgtcgacgtactc

SEQ ID NO: 170469 - DNA, 25 bp, SARS Virus
tatcccgtagttttcgacgtactct

SEQ ID NO: 170470 - DNA, 25 bp, SARS Virus
atcccgtagttgtcgacgtactctc

SEQ ID NO: 170471 - DNA, 25 bp, SARS Virus
tcccgtagttgttgacgtactctcg

SEQ ID NO: 170472 - DNA, 25 bp, SARS Virus
cccgtagttgtctacgtactctcgt

SEQ ID NO: 170473 - DNA, 25 bp, SARS Virus
ccgtagttgtcgtcgtactctcgta

SEQ ID NO: 170474 - DNA, 25 bp, SARS Virus
cgtagttgtcgatgtactctcgtac

SEQ ID NO: 170475 - DNA, 25 bp, SARS Virus
gtagttgtcgacttactctcgtacg

SEQ ID NO: 170476 - DNA, 25 bp, SARS Virus
tagttgtcgacgtactctcgtacgg

SEQ ID NO: 170477 - DNA, 25 bp, SARS Virus
agttgtcgacgttctctcgtacggc

SEQ ID NO: 170478 - DNA, 25 bp, SARS Virus
gttgtcgacgtattctcgtacggca

SEQ ID NO: 170479 - DNA, 25 bp, SARS Virus
ttgtcgacgtactctcgtacggcat

SEQ ID NO: 170480 - DNA, 25 bp, SARS Virus
tgtcgacgtactttcgtacggcata

SEQ ID NO: 170481 - DNA, 25 bp, SARS Virus
gtcgacgtactctcgtacggcatat

SEQ ID NO: 170482 - DNA, 25 bp, SARS Virus
tcgacgtactcttgtacggcatatg

SEQ ID NO: 170483 - DNA, 25 bp, SARS Virus
cgacgtactctcttacggcatatgt

SEQ ID NO: 170484 - DNA, 25 bp, SARS Virus
gacgtactctcgtacggcatatgtg

SEQ ID NO: 170485 - DNA, 25 bp, SARS Virus
acgtactctcgttcggcatatgtga

SEQ ID NO: 170486 - DNA, 25 bp, SARS Virus
cgtactctcgtatggcatatgtgat

SEQ ID NO: 170487 - DNA, 25 bp, SARS Virus
gtactctcgtactgcatatgtgata

SEQ ID NO: 170488 - DNA, 25 bp, SARS Virus
tactctcgtacgtcatatgtgatac

SEQ ID NO: 170489 - DNA, 25 bp, SARS Virus
actctcgtacggtatatgtgatacg

SEQ ID NO: 170490 - DNA, 25 bp, SARS Virus
ctctcgtacggcttatgtgatacgc

SEQ ID NO: 170491 - DNA, 25 bp, SARS Virus
tctcgtacggcatatgtgatacgct

SEQ ID NO: 170492 - DNA, 25 bp, SARS Virus
ctcgtacggcatttgtgatacgctc

SEQ ID NO: 170493 - DNA, 25 bp, SARS Virus
tcgtacggcatatgtgatacgctcg

SEQ ID NO: 170494 - DNA, 25 bp, SARS Virus
cgtacggcatatttgatacgctcgt

SEQ ID NO: 170495 - DNA, 25 bp, SARS Virus
gtacggcatatgtgatacgctcgtc

SEQ ID NO: 170496 - DNA, 25 bp, SARS Virus
tacggcatatgttatacgctcgtct

SEQ ID NO: 170497 - DNA, 25 bp, SARS Virus
acggcatatgtgttacgctcgtcta

SEQ ID NO: 170498 - DNA, 25 bp, SARS Virus
cggcatatgtgatacgctcgtctac

SEQ ID NO: 170499 - DNA, 25 bp, SARS Virus
ggcatatgtgattcgctcgtctacc

SEQ ID NO: 170500 - DNA, 25 bp, SARS Virus
gcatatgtgatatgctcgtctaccc

SEQ ID NO: 170501 - DNA, 25 bp, SARS Virus
catatgtgatactctcgtctaccca

SEQ ID NO: 170502 - DNA, 25 bp, SARS Virus
atatgtgatacgttcgtctacccat

SEQ ID NO: 170503 - DNA, 25 bp, SARS Virus
tatgtgatacgctcgtctacccatt

SEQ ID NO: 170504 - DNA, 25 bp, SARS Virus
atgtgatacgcttgtctacccatta

SEQ ID NO: 170505 - DNA, 25 bp, SARS Virus
tgtgatacgctcttctacccattat

SEQ ID NO: 170506 - DNA, 25 bp, SARS Virus
gtgatacgctcgtctacccattatc

SEQ ID NO: 170507 - DNA, 25 bp, SARS Virus
tgatacgctcgtttacccattatct

SEQ ID NO: 170508 - DNA, 25 bp, SARS Virus
gatacgctcgtctacccattatctc

SEQ ID NO: 170509 - DNA, 25 bp, SARS Virus
atacgctcgtcttcccattatctct

SEQ ID NO: 170510 - DNA, 25 bp, SARS Virus
tacgctcgtctatccattatctctc

SEQ ID NO: 170511 - DNA, 25 bp, SARS Virus
acgctcgtctactcattatctctcg

SEQ ID NO: 170512 - DNA, 25 bp, SARS Virus
cgctcgtctacctattatctctcgt

SEQ ID NO: 170513 - DNA, 25 bp, SARS Virus
gctcgtctaccctttatctctcgtt

SEQ ID NO: 170514 - DNA, 25 bp, SARS Virus
ctcgtctacccattatctctcgttc

SEQ ID NO: 170515 - DNA, 25 bp, SARS Virus
tcgtctacccattatctctcgttca

SEQ ID NO: 170516 - DNA, 25 bp, SARS Virus
cgtctacccattttctctcgttcag

SEQ ID NO: 170517 - DNA, 25 bp, SARS Virus
gtctacccattatctctcgttcagg

SEQ ID NO: 170518 - DNA, 25 bp, SARS Virus
tctacccattatttctcgttcaggc

SEQ ID NO: 170519 - DNA, 25 bp, SARS Virus
ctacccattatctctcgttcaggct

SEQ ID NO: 170520 - DNA, 25 bp, SARS Virus
tacccattatctttcgttcaggcta

SEQ ID NO: 170521 - DNA, 25 bp, SARS Virus
acccattatctctcgttcaggctac

SEQ ID NO: 170522 - DNA, 25 bp, SARS Virus
cccattatctcttgttcaggctacc

SEQ ID NO: 170523 - DNA, 25 bp, SARS Virus
ccattatctctctttcaggctaccg

SEQ ID NO: 170524 - DNA, 25 bp, SARS Virus
cattatctctcgttcaggctaccgt

SEQ ID NO: 170525 - DNA, 25 bp, SARS Virus
attatctctcgttcaggctaccgtt

SEQ ID NO: 170526 - DNA, 25 bp, SARS Virus
ttatctctcgtttaggctaccgttt

SEQ ID NO: 170527 - DNA, 25 bp, SARS Virus
tatctctcgttctggctaccgtttt

SEQ ID NO: 170528 - DNA, 25 bp, SARS Virus
atctctcgttcatgctaccgtttta

SEQ ID NO: 170529 - DNA, 25 bp, SARS Virus
tctctcgttcagtctaccgttttac

SEQ ID NO: 170530 - DNA, 25 bp, SARS Virus
ctctcgttcaggttaccgttttact

SEQ ID NO: 170531 - DNA, 25 bp, SARS Virus
tctcgttcaggctaccgttttactg

SEQ ID NO: 170532 - DNA, 25 bp, SARS Virus
ctcgttcaggcttccgttttactga

SEQ ID NO: 170533 - DNA, 25 bp, SARS Virus
tcgttcaggctatcgttttactgag

SEQ ID NO: 170534 - DNA, 25 bp, SARS Virus
cgttcaggctactgttttactgaga

SEQ ID NO: 170535 - DNA, 25 bp, SARS Virus
gttcaggctacctttttactgagaa

SEQ ID NO: 170536 - DNA, 25 bp, SARS Virus
ttcaggctaccgttttactgagaat

SEQ ID NO: 170537 - DNA, 25 bp, SARS Virus
tcaggctaccgttttactgagaatg

SEQ ID NO: 170538 - DNA, 25 bp, SARS Virus
caggctaccgttttactgagaatgg

SEQ ID NO: 170539 - DNA, 25 bp, SARS Virus
aggctaccgttttactgagaatggt

SEQ ID NO: 170540 - DNA, 25 bp, SARS Virus
ggctaccgtttttctgagaatggtc

SEQ ID NO: 170541 - DNA, 25 bp, SARS Virus
gctaccgttttattgagaatggtca

SEQ ID NO: 170542 - DNA, 25 bp, SARS Virus
ctaccgttttactgagaatggtcat

SEQ ID NO: 170543 - DNA, 25 bp, SARS Virus
taccgttttacttagaatggtcatg

SEQ ID NO: 170544 - DNA, 25 bp, SARS Virus
accgttttactgtgaatggtcatgg

SEQ ID NO: 170545 - DNA, 25 bp, SARS Virus
ccgttttactgataatggtcatggt

SEQ ID NO: 170546 - DNA, 25 bp, SARS Virus
cgttttactgagtatggtcatggtc

SEQ ID NO: 170547 - DNA, 25 bp, SARS Virus
gttttactgagattggtcatggtcc

SEQ ID NO: 170548 - DNA, 25 bp, SARS Virus
ttttactgagaatggtcatggtcca

SEQ ID NO: 170549 - DNA, 25 bp, SARS Virus
tttactgagaattgtcatggtccac

SEQ ID NO: 170550 - DNA, 25 bp, SARS Virus
ttactgagaatgttcatggtccacc

SEQ ID NO: 170551 - DNA, 25 bp, SARS Virus
tactgagaatggtcatggtccacca

SEQ ID NO: 170552 - DNA, 25 bp, SARS Virus
actgagaatggttatggtccaccag

SEQ ID NO: 170553 - DNA, 25 bp, SARS Virus
ctgagaatggtcttggtccaccagg

SEQ ID NO: 170554 - DNA, 25 bp, SARS Virus
tgagaatggtcatggtccaccagga

SEQ ID NO: 170555 - DNA, 25 bp, SARS Virus
gagaatggtcattgtccaccaggaa

SEQ ID NO: 170556 - DNA, 25 bp, SARS Virus
agaatggtcatgttccaccaggaac

SEQ ID NO: 170557 - DNA, 25 bp, SARS Virus
gaatggtcatggtccaccaggaacc

SEQ ID NO: 170558 - DNA, 25 bp, SARS Virus
aatggtcatggttcaccaggaacct

SEQ ID NO: 170559 - DNA, 25 bp, SARS Virus
atggtcatggtctaccaggaacctc

SEQ ID NO: 170560 - DNA, 25 bp, SARS Virus
tggtcatggtcctccaggaacctca

SEQ ID NO: 170561 - DNA, 25 bp, SARS Virus
ggtcatggtccatcaggaacctcac

SEQ ID NO: 170562 - DNA, 25 bp, SARS Virus
gtcatggtccactaggaacctcaca

SEQ ID NO: 170563 - DNA, 25 bp, SARS Virus
tcatggtccacctggaacctcacat

SEQ ID NO: 170564 - DNA, 25 bp, SARS Virus
catggtccaccatgaacctcacatc

SEQ ID NO: 170565 - DNA, 25 bp, SARS Virus
atggtccaccagtaacctcacatct

SEQ ID NO: 170566 - DNA, 25 bp, SARS Virus
tggtccaccaggtacctcacatctc

SEQ ID NO: 170567 - DNA, 25 bp, SARS Virus
ggtccaccaggatcctcacatctca

SEQ ID NO: 170568 - DNA, 25 bp, SARS Virus
gtccaccaggaatctcacatctcat

SEQ ID NO: 170569 - DNA, 25 bp, SARS Virus
tccaccaggaacttcacatctcatg

SEQ ID NO: 170570 - DNA, 25 bp, SARS Virus
ccaccaggaacctcacatctcatga

SEQ ID NO: 170571 - DNA, 25 bp, SARS Virus
caccaggaaccttacatctcatgaa

SEQ ID NO: 170572 - DNA, 25 bp, SARS Virus
accaggaacctctcatctcatgaaa

SEQ ID NO: 170573 - DNA, 25 bp, SARS Virus
ccaggaacctcatatctcatgaaaa

SEQ ID NO: 170574 - DNA, 25 bp, SARS Virus
caggaacctcacttctcatgaaaac

SEQ ID NO: 170575 - DNA, 25 bp, SARS Virus
aggaacctcacatctcatgaaaacg

SEQ ID NO: 170576 - DNA, 25 bp, SARS Virus
ggaacctcacatttcatgaaaacgt

SEQ ID NO: 170577 - DNA, 25 bp, SARS Virus
gaacctcacatctcatgaaaacgta

SEQ ID NO: 170578 - DNA, 25 bp, SARS Virus
aacctcacatcttatgaaaacgtac

SEQ ID NO: 170579 - DNA, 25 bp, SARS Virus
acctcacatctcttgaaaacgtacg

SEQ ID NO: 170580 - DNA, 25 bp, SARS Virus
cctcacatctcatgaaaacgtacgg

SEQ ID NO: 170581 - DNA, 25 bp, SARS Virus
ctcacatctcattaaaacgtacggc

SEQ ID NO: 170582 - DNA, 25 bp, SARS Virus
tcacatctcatgtaaacgtacggct

SEQ ID NO: 170583 - DNA, 25 bp, SARS Virus
cacatctcatgataacgtacggctg

SEQ ID NO: 170584 - DNA, 25 bp, SARS Virus
acatctcatgaatacgtacggctgg

SEQ ID NO: 170585 - DNA, 25 bp, SARS Virus
catctcatgaaatcgtacggctgga

SEQ ID NO: 170586 - DNA, 25 bp, SARS Virus
atctcatgaaaatgtacggctggaa

SEQ ID NO: 170587 - DNA, 25 bp, SARS Virus
tctcatgaaaacttacggctggaaa

SEQ ID NO: 170588 - DNA, 25 bp, SARS Virus
ctcatgaaaacgtacggctggaaaa

SEQ ID NO: 170589 - DNA, 25 bp, SARS Virus
tcatgaaaacgttcggctggaaaac

SEQ ID NO: 170590 - DNA, 25 bp, SARS Virus
catgaaaacgtatggctggaaaact

SEQ ID NO: 170591 - DNA, 25 bp, SARS Virus
atgaaaacgtactgctggaaaacta

SEQ ID NO: 170592 - DNA, 25 bp, SARS Virus
tgaaaacgtacgtctggaaaactat

SEQ ID NO: 170593 - DNA, 25 bp, SARS Virus
gaaaacgtacggttggaaaactatt

SEQ ID NO: 170594 - DNA, 25 bp, SARS Virus
aaaacgtacggctggaaaactatta

SEQ ID NO: 170595 - DNA, 25 bp, SARS Virus
aaacgtacggcttgaaaactattaa

SEQ ID NO: 170596 - DNA, 25 bp, SARS Virus
aacgtacggctgtaaaactattaaa

SEQ ID NO: 170597 - DNA, 25 bp, SARS Virus
acgtacggctggtaaactattaaac

SEQ ID NO: 170598 - DNA, 25 bp, SARS Virus
cgtacggctggataactattaaacg

SEQ ID NO: 170599 - DNA, 25 bp, SARS Virus
gtacggctggaatactattaaacgt

SEQ ID NO: 170600 - DNA, 25 bp, SARS Virus
tacggctggaaatctattaaacgtt

SEQ ID NO: 170601 - DNA, 25 bp, SARS Virus
acggctggaaaattattaaacgttg

SEQ ID NO: 170602 - DNA, 25 bp, SARS Virus
cggctggaaaactattaaacgttgt

SEQ ID NO: 170603 - DNA, 25 bp, SARS Virus
ggctggaaaacttttaaacgttgta

SEQ ID NO: 170604 - DNA, 25 bp, SARS Virus
gctggaaaactattaaacgttgtaa

SEQ ID NO: 170605 - DNA, 25 bp, SARS Virus
ctggaaaactattaaacgttgtaac

SEQ ID NO: 170606 - DNA, 25 bp, SARS Virus
tggaaaactatttaacgttgtaacg

SEQ ID NO: 170607 - DNA, 25 bp, SARS Virus
ggaaaactattatacgttgtaacga

SEQ ID NO: 170608 - DNA, 25 bp, SARS Virus
gaaaactattaatcgttgtaacgat

SEQ ID NO: 170609 - DNA, 25 bp, SARS Virus
aaaactattaaatgttgtaacgatc

SEQ ID NO: 170610 - DNA, 25 bp, SARS Virus
aaactattaaactttgtaacgatct

SEQ ID NO: 170611 - DNA, 25 bp, SARS Virus
aactattaaacgttgtaacgatctt

SEQ ID NO: 170612 - DNA, 25 bp, SARS Virus
actattaaacgttgtaacgatcttt

SEQ ID NO: 170613 - DNA, 25 bp, SARS Virus
ctattaaacgttttaacgatctttt

SEQ ID NO: 170614 - DNA, 25 bp, SARS Virus
tattaaacgttgtaacgatcttttg

SEQ ID NO: 170615 - DNA, 25 bp, SARS Virus
attaaacgttgttacgatcttttga

SEQ ID NO: 170616 - DNA, 25 bp, SARS Virus
ttaaacgttgtatcgatcttttgag

SEQ ID NO: 170617 - DNA, 25 bp, SARS Virus
taaacgttgtaatgatcttttgagt

SEQ ID NO: 170618 - DNA, 25 bp, SARS Virus
aaacgttgtaactatcttttgagta

SEQ ID NO: 170619 - DNA, 25 bp, SARS Virus
aacgttgtaacgttcttttgagtag

SEQ ID NO: 170620 - DNA, 25 bp, SARS Virus
acgttgtaacgatcttttgagtaga

SEQ ID NO: 170621 - DNA, 25 bp, SARS Virus
cgttgtaacgattttttgagtagac

SEQ ID NO: 170622 - DNA, 25 bp, SARS Virus
gttgtaacgatcttttgagtagact

SEQ ID NO: 170623 - DNA, 25 bp, SARS Virus
ttgtaacgatcttttgagtagactc

SEQ ID NO: 170624 - DNA, 25 bp, SARS Virus
tgtaacgatcttttgagtagactct

SEQ ID NO: 170625 - DNA, 25 bp, SARS Virus
gtaacgatcttttgagtagactcta

SEQ ID NO: 170626 - DNA, 25 bp, SARS Virus
taacgatctttttagtagactctac

SEQ ID NO: 170627 - DNA, 25 bp, SARS Virus
aacgatcttttgtgtagactctaca

SEQ ID NO: 170628 - DNA, 25 bp, SARS Virus
acgatcttttgattagactctacaa

SEQ ID NO: 170629 - DNA, 25 bp, SARS Virus
cgatcttttgagtagactctacaac

SEQ ID NO: 170630 - DNA, 25 bp, SARS Virus
gatcttttgagttgactctacaact

SEQ ID NO: 170631 - DNA, 25 bp, SARS Virus
atcttttgagtatactctacaactc

SEQ ID NO: 170632 - DNA, 25 bp, SARS Virus
tcttttgagtagtctctacaactca

SEQ ID NO: 170633 - DNA, 25 bp, SARS Virus
cttttgagtagattctacaactcac

SEQ ID NO: 170634 - DNA, 25 bp, SARS Virus
ttttgagtagactctacaactcaca

SEQ ID NO: 170635 - DNA, 25 bp, SARS Virus
tttgagtagactttacaactcacaa

SEQ ID NO: 170636 - DNA, 25 bp, SARS Virus
ttgagtagactctacaactcacaac

SEQ ID NO: 170637 - DNA, 25 bp, SARS Virus
tgagtagactcttcaactcacaacc

SEQ ID NO: 170638 - DNA, 25 bp, SARS Virus
gagtagactctataactcacaaccc

SEQ ID NO: 170639 - DNA, 25 bp, SARS Virus
agtagactctactactcacaaccca

SEQ ID NO: 170640 - DNA, 25 bp, SARS Virus
gtagactctacatctcacaacccat

SEQ ID NO: 170641 - DNA, 25 bp, SARS Virus
tagactctacaattcacaacccatg

SEQ ID NO: 170642 - DNA, 25 bp, SARS Virus
agactctacaactcacaacccatgt

SEQ ID NO: 170643 - DNA, 25 bp, SARS Virus
gactctacaacttacaacccatgtt

SEQ ID NO: 170644 - DNA, 25 bp, SARS Virus
actctacaactctcaacccatgttc

SEQ ID NO: 170645 - DNA, 25 bp, SARS Virus
ctctacaactcataacccatgttcg

SEQ ID NO: 170646 - DNA, 25 bp, SARS Virus
tctacaactcactacccatgttcgg

SEQ ID NO: 170647 - DNA, 25 bp, SARS Virus
ctacaactcacatcccatgttcggt

SEQ ID NO: 170648 - DNA, 25 bp, SARS Virus
tacaactcacaatccatgttcggtc

SEQ ID NO: 170649 - DNA, 25 bp, SARS Virus
acaactcacaactcatgttcggtca

SEQ ID NO: 170650 - DNA, 25 bp, SARS Virus
caactcacaacctatgttcggtcat

SEQ ID NO: 170651 - DNA, 25 bp, SARS Virus
aactcacaacccttgttcggtcatt

SEQ ID NO: 170652 - DNA, 25 bp, SARS Virus
actcacaacccatgttcggtcatta

SEQ ID NO: 170653 - DNA, 25 bp, SARS Virus
ctcacaacccattttcggtcattaa

SEQ ID NO: 170654 - DNA, 25 bp, SARS Virus
tcacaacccatgttcggtcattaag

SEQ ID NO: 170655 - DNA, 25 bp, SARS Virus
cacaacccatgttcggtcattaaga

SEQ ID NO: 170656 - DNA, 25 bp, SARS Virus
acaacccatgtttggtcattaagag

SEQ ID NO: 170657 - DNA, 25 bp, SARS Virus
caacccatgttctgtcattaagagt

SEQ ID NO: 170658 - DNA, 25 bp, SARS Virus
aacccatgttcgttcattaagagtg

SEQ ID NO: 170659 - DNA, 25 bp, SARS Virus
acccatgttcggtcattaagagtgt

SEQ ID NO: 170660 - DNA, 25 bp, SARS Virus
cccatgttcggttattaagagtgta

SEQ ID NO: 170661 - DNA, 25 bp, SARS Virus
ccatgttcggtctttaagagtgtat

SEQ ID NO: 170662 - DNA, 25 bp, SARS Virus
catgttcggtcattaagagtgtatc

SEQ ID NO: 170663 - DNA, 25 bp, SARS Virus
atgttcggtcattaagagtgtatca

SEQ ID NO: 170664 - DNA, 25 bp, SARS Virus
tgttcggtcatttagagtgtatcac

SEQ ID NO: 170665 - DNA, 25 bp, SARS Virus
gttcggtcattatgagtgtatcacg

SEQ ID NO: 170666 - DNA, 25 bp, SARS Virus
ttcggtcattaatagtgtatcacga

SEQ ID NO: 170667 - DNA, 25 bp, SARS Virus
tcggtcattaagtgtgtatcacgag

SEQ ID NO: 170668 - DNA, 25 bp, SARS Virus
cggtcattaagattgtatcacgaga

SEQ ID NO: 170669 - DNA, 25 bp, SARS Virus
ggtcattaagagtgtatcacgagaa

SEQ ID NO: 170670 - DNA, 25 bp, SARS Virus
gtcattaagagtttatcacgagaac

SEQ ID NO: 170671 - DNA, 25 bp, SARS Virus
tcattaagagtgtatcacgagaaca

SEQ ID NO: 170672 - DNA, 25 bp, SARS Virus
cattaagagtgtttcacgagaacac

SEQ ID NO: 170673 - DNA, 25 bp, SARS Virus
attaagagtgtatcacgagaacacc

SEQ ID NO: 170674 - DNA, 25 bp, SARS Virus
ttaagagtgtattacgagaacaccg

SEQ ID NO: 170675 - DNA, 25 bp, SARS Virus
taagagtgtatctcgagaacaccgt

SEQ ID NO: 170676 - DNA, 25 bp, SARS Virus
aagagtgtatcatgagaacaccgtg

SEQ ID NO: 170677 - DNA, 25 bp, SARS Virus
agagtgtatcactagaacaccgtga

SEQ ID NO: 170678 - DNA, 25 bp, SARS Virus
gagtgtatcacgtgaacaccgtgat

SEQ ID NO: 170679 - DNA, 25 bp, SARS Virus
agtgtatcacgataacaccgtgatc

SEQ ID NO: 170680 - DNA, 25 bp, SARS Virus
gtgtatcacgagtacaccgtgatct

SEQ ID NO: 170681 - DNA, 25 bp, SARS Virus
tgtatcacgagatcaccgtgatctc

SEQ ID NO: 170682 - DNA, 25 bp, SARS Virus
gtatcacgagaataccgtgatctca

SEQ ID NO: 170683 - DNA, 25 bp, SARS Virus
tatcacgagaactccgtgatctcat

SEQ ID NO: 170684 - DNA, 25 bp, SARS Virus
atcacgagaacatcgtgatctcatc

SEQ ID NO: 170685 - DNA, 25 bp, SARS Virus
tcacgagaacactgtgatctcatcc

SEQ ID NO: 170686 - DNA, 25 bp, SARS Virus
cacgagaacaccttgatctcatcca

SEQ ID NO: 170687 - DNA, 25 bp, SARS Virus
acgagaacaccgtgatctcatccac

SEQ ID NO: 170688 - DNA, 25 bp, SARS Virus
cgagaacaccgttatctcatccacg

SEQ ID NO: 170689 - DNA, 25 bp, SARS Virus
gagaacaccgtgttctcatccacgt

SEQ ID NO: 170690 - DNA, 25 bp, SARS Virus
agaacaccgtgatctcatccacgtg

SEQ ID NO: 170691 - DNA, 25 bp, SARS Virus
gaacaccgtgatttcatccacgtga

SEQ ID NO: 170692 - DNA, 25 bp, SARS Virus
aacaccgtgatctcatccacgtgat

SEQ ID NO: 170693 - DNA, 25 bp, SARS Virus
acaccgtgatcttatccacgtgatt

SEQ ID NO: 170694 - DNA, 25 bp, SARS Virus
caccgtgatctcttccacgtgattc

SEQ ID NO: 170695 - DNA, 25 bp, SARS Virus
accgtgatctcatccacgtgattca

SEQ ID NO: 170696 - DNA, 25 bp, SARS Virus
ccgtgatctcattcacgtgattcac

SEQ ID NO: 170697 - DNA, 25 bp, SARS Virus
cgtgatctcatctacgtgattcacc

SEQ ID NO: 170698 - DNA, 25 bp, SARS Virus
gtgatctcatcctcgtgattcaccg

SEQ ID NO: 170699 - DNA, 25 bp, SARS Virus
tgatctcatccatgtgattcaccgt

SEQ ID NO: 170700 - DNA, 25 bp, SARS Virus
gatctcatccacttgattcaccgta

SEQ ID NO: 170701 - DNA, 25 bp, SARS Virus
atctcatccacgtgattcaccgtaa

SEQ ID NO: 170702 - DNA, 25 bp, SARS Virus
tctcatccacgttattcaccgtaat

SEQ ID NO: 170703 - DNA, 25 bp, SARS Virus
ctcatccacgtgtttcaccgtaatg

SEQ ID NO: 170704 - DNA, 25 bp, SARS Virus
tcatccacgtgattcaccgtaatgt

SEQ ID NO: 170705 - DNA, 25 bp, SARS Virus
catccacgtgattcaccgtaatgtc

SEQ ID NO: 170706 - DNA, 25 bp, SARS Virus
atccacgtgatttaccgtaatgtca

SEQ ID NO: 170707 - DNA, 25 bp, SARS Virus
tccacgtgattctccgtaatgtcac

SEQ ID NO: 170708 - DNA, 25 bp, SARS Virus
ccacgtgattcatcgtaatgtcaca

SEQ ID NO: 170709 - DNA, 25 bp, SARS Virus
cacgtgattcactgtaatgtcacac

SEQ ID NO: 170710 - DNA, 25 bp, SARS Virus
acgtgattcaccttaatgtcacact

SEQ ID NO: 170711 - DNA, 25 bp, SARS Virus
cgtgattcaccgtaatgtcacactc

SEQ ID NO: 170712 - DNA, 25 bp, SARS Virus
gtgattcaccgttatgtcacactct

SEQ ID NO: 170713 - DNA, 25 bp, SARS Virus
tgattcaccgtattgtcacactcta

SEQ ID NO: 170714 - DNA, 25 bp, SARS Virus
gattcaccgtaatgtcacactctac

SEQ ID NO: 170715 - DNA, 25 bp, SARS Virus
attcaccgtaatttcacactctaca

SEQ ID NO: 170716 - DNA, 25 bp, SARS Virus
ttcaccgtaatgtcacactctacag

SEQ ID NO: 170717 - DNA, 25 bp, SARS Virus
tcaccgtaatgttacactctacagt

SEQ ID NO: 170718 - DNA, 25 bp, SARS Virus
caccgtaatgtctcactctacagtt

SEQ ID NO: 170719 - DNA, 25 bp, SARS Virus
accgtaatgtcatactctacagttg

SEQ ID NO: 170720 - DNA, 25 bp, SARS Virus
ccgtaatgtcactctctacagttgt

SEQ ID NO: 170721 - DNA, 25 bp, SARS Virus
cgtaatgtcacattctacagttgtg

SEQ ID NO: 170722 - DNA, 25 bp, SARS Virus
gtaatgtcacactctacagttgtgt

SEQ ID NO: 170723 - DNA, 25 bp, SARS Virus
taatgtcacactttacagttgtgtt

SEQ ID NO: 170724 - DNA, 25 bp, SARS Virus
aatgtcacactctacagttgtgttt

SEQ ID NO: 170725 - DNA, 25 bp, SARS Virus
atgtcacactcttcagttgtgtttc

SEQ ID NO: 170726 - DNA, 25 bp, SARS Virus
tgtcacactctatagttgtgtttca

SEQ ID NO: 170727 - DNA, 25 bp, SARS Virus
gtcacactctactgttgtgtttcat

SEQ ID NO: 170728 - DNA, 25 bp, SARS Virus
tcacactctacatttgtgtttcatt

SEQ ID NO: 170729 - DNA, 25 bp, SARS Virus
cacactctacagttgtgtttcatta

SEQ ID NO: 170730 - DNA, 25 bp, SARS Virus
acactctacagttgtgtttcattag

SEQ ID NO: 170731 - DNA, 25 bp, SARS Virus
cactctacagttttgtttcattagt

SEQ ID NO: 170732 - DNA, 25 bp, SARS Virus
actctacagttgtgtttcattagtg

SEQ ID NO: 170733 - DNA, 25 bp, SARS Virus
ctctacagttgtttttcattagtgg

SEQ ID NO: 170734 - DNA, 25 bp, SARS Virus
tctacagttgtgtttcattagtggt

SEQ ID NO: 170735 - DNA, 25 bp, SARS Virus
ctacagttgtgtttcattagtggtt

SEQ ID NO: 170736 - DNA, 25 bp, SARS Virus
tacagttgtgtttcattagtggttg

SEQ ID NO: 170737 - DNA, 25 bp, SARS Virus
acagttgtgttttattagtggttgt

SEQ ID NO: 170738 - DNA, 25 bp, SARS Virus
cagttgtgtttctttagtggttgta

SEQ ID NO: 170739 - DNA, 25 bp, SARS Virus
agttgtgtttcattagtggttgtaa

SEQ ID NO: 170740 - DNA, 25 bp, SARS Virus
gttgtgtttcattagtggttgtaag

SEQ ID NO: 170741 - DNA, 25 bp, SARS Virus
ttgtgtttcatttgtggttgtaagt

SEQ ID NO: 170742 - DNA, 25 bp, SARS Virus
tgtgtttcattattggttgtaagtt

SEQ ID NO: 170743 - DNA, 25 bp, SARS Virus
gtgtttcattagtggttgtaagttg

SEQ ID NO: 170744 - DNA, 25 bp, SARS Virus
tgtttcattagttgttgtaagttga

SEQ ID NO: 170745 - DNA, 25 bp, SARS Virus
gtttcattagtgtttgtaagttgaa

SEQ ID NO: 170746 - DNA, 25 bp, SARS Virus
tttcattagtggttgtaagttgaac

SEQ ID NO: 170747 - DNA, 25 bp, SARS Virus
ttcattagtggttgtaagttgaaca

SEQ ID NO: 170748 - DNA, 25 bp, SARS Virus
tcattagtggttttaagttgaacat

SEQ ID NO: 170749 - DNA, 25 bp, SARS Virus
cattagtggttgtaagttgaacata

SEQ ID NO: 170750 - DNA, 25 bp, SARS Virus
attagtggttgttagttgaacatac

SEQ ID NO: 170751 - DNA, 25 bp, SARS Virus
ttagtggttgtatgttgaacataca

SEQ ID NO: 170752 - DNA, 25 bp, SARS Virus
tagtggttgtaatttgaacatacag

SEQ ID NO: 170753 - DNA, 25 bp, SARS Virus
agtggttgtaagttgaacatacagc

SEQ ID NO: 170754 - DNA, 25 bp, SARS Virus
gtggttgtaagttgaacatacagca

SEQ ID NO: 170755 - DNA, 25 bp, SARS Virus
tggttgtaagtttaacatacagcat

SEQ ID NO: 170756 - DNA, 25 bp, SARS Virus
ggttgtaagttgtacatacagcatc

SEQ ID NO: 170757 - DNA, 25 bp, SARS Virus
gttgtaagttgatcatacagcatca

SEQ ID NO: 170758 - DNA, 25 bp, SARS Virus
ttgtaagttgaatatacagcatcat

SEQ ID NO: 170759 - DNA, 25 bp, SARS Virus
tgtaagttgaacttacagcatcatg

SEQ ID NO: 170760 - DNA, 25 bp, SARS Virus
gtaagttgaacatacagcatcatgg

SEQ ID NO: 170761 - DNA, 25 bp, SARS Virus
taagttgaacattcagcatcatgga

SEQ ID NO: 170762 - DNA, 25 bp, SARS Virus
aagttgaacatatagcatcatggag

SEQ ID NO: 170763 - DNA, 25 bp, SARS Virus
agttgaacatactgcatcatggaga

SEQ ID NO: 170764 - DNA, 25 bp, SARS Virus
gttgaacatacatcatcatggagac

SEQ ID NO: 170765 - DNA, 25 bp, SARS Virus
ttgaacatacagtatcatggagaca

SEQ ID NO: 170766 - DNA, 25 bp, SARS Virus
tgaacatacagcttcatggagacat

SEQ ID NO: 170767 - DNA, 25 bp, SARS Virus
gaacatacagcatcatggagacatg

SEQ ID NO: 170768 - DNA, 25 bp, SARS Virus
aacatacagcattatggagacatgt

SEQ ID NO: 170769 - DNA, 25 bp, SARS Virus
acatacagcatcttggagacatgtg

SEQ ID NO: 170770 - DNA, 25 bp, SARS Virus
catacagcatcatggagacatgtgt

SEQ ID NO: 170771 - DNA, 25 bp, SARS Virus
atacagcatcattgagacatgtgtt

SEQ ID NO: 170772 - DNA, 25 bp, SARS Virus
tacagcatcatgtagacatgtgttg

SEQ ID NO: 170773 - DNA, 25 bp, SARS Virus
acagcatcatggtgacatgtgttgt

SEQ ID NO: 170774 - DNA, 25 bp, SARS Virus
cagcatcatggatacatgtgttgtc

SEQ ID NO: 170775 - DNA, 25 bp, SARS Virus
agcatcatggagtcatgtgttgtcg

SEQ ID NO: 170776 - DNA, 25 bp, SARS Virus
gcatcatggagatatgtgttgtcgt

SEQ ID NO: 170777 - DNA, 25 bp, SARS Virus
catcatggagacttgtgttgtcgta

SEQ ID NO: 170778 - DNA, 25 bp, SARS Virus
atcatggagacatgtgttgtcgtag

SEQ ID NO: 170779 - DNA, 25 bp, SARS Virus
tcatggagacatttgttgtcgtagt

SEQ ID NO: 170780 - DNA, 25 bp, SARS Virus
catggagacatgtgttgtcgtagtg

SEQ ID NO: 170781 - DNA, 25 bp, SARS Virus
atggagacatgttttgtcgtagtgg

SEQ ID NO: 170782 - DNA, 25 bp, SARS Virus
tggagacatgtgttgtcgtagtggt

SEQ ID NO: 170783 - DNA, 25 bp, SARS Virus
ggagacatgtgttgtcgtagtggta

SEQ ID NO: 170784 - DNA, 25 bp, SARS Virus
gagacatgtgttttcgtagtggtat

SEQ ID NO: 170785 - DNA, 25 bp, SARS Virus
agacatgtgttgtcgtagtggtatc

SEQ ID NO: 170786 - DNA, 25 bp, SARS Virus
gacatgtgttgttgtagtggtatca

SEQ ID NO: 170787 - DNA, 25 bp, SARS Virus
acatgtgttgtcttagtggtatcag

SEQ ID NO: 170788 - DNA, 25 bp, SARS Virus
catgtgttgtcgtagtggtatcagt

SEQ ID NO: 170789 - DNA, 25 bp, SARS Virus
atgtgttgtcgttgtggtatcagtg

SEQ ID NO: 170790 - DNA, 25 bp, SARS Virus
tgtgttgtcgtattggtatcagtgg

SEQ ID NO: 170791 - DNA, 25 bp, SARS Virus
gtgttgtcgtagtggtatcagtgga

SEQ ID NO: 170792 - DNA, 25 bp, SARS Virus
tgttgtcgtagttgtatcagtggaa

SEQ ID NO: 170793 - DNA, 25 bp, SARS Virus
gttgtcgtagtgttatcagtggaaa

SEQ ID NO: 170794 - DNA, 25 bp, SARS Virus
ttgtcgtagtggtatcagtggaaaa

SEQ ID NO: 170795 - DNA, 25 bp, SARS Virus
tgtcgtagtggtttcagtggaaaaa

SEQ ID NO: 170796 - DNA, 25 bp, SARS Virus
gtcgtagtggtatcagtggaaaaag

SEQ ID NO: 170797 - DNA, 25 bp, SARS Virus
tcgtagtggtattagtggaaaaagt

SEQ ID NO: 170798 - DNA, 25 bp, SARS Virus
cgtagtggtatctgtggaaaaagtt

SEQ ID NO: 170799 - DNA, 25 bp, SARS Virus
gtagtggtatcattggaaaaagttt

SEQ ID NO: 170800 - DNA, 25 bp, SARS Virus
tagtggtatcagtggaaaaagtttc

SEQ ID NO: 170801 - DNA, 25 bp, SARS Virus
agtggtatcagttgaaaaagtttcc

SEQ ID NO: 170802 - DNA, 25 bp, SARS Virus
gtggtatcagtgtaaaaagtttcca

SEQ ID NO: 170803 - DNA, 25 bp, SARS Virus
tggtatcagtggtaaaagtttccac

SEQ ID NO: 170804 - DNA, 25 bp, SARS Virus
ggtatcagtggataaagtttccaca

SEQ ID NO: 170805 - DNA, 25 bp, SARS Virus
gtatcagtggaataagtttccacat

SEQ ID NO: 170806 - DNA, 25 bp, SARS Virus
tatcagtggaaatagtttccacatg

SEQ ID NO: 170807 - DNA, 25 bp, SARS Virus
atcagtggaaaatgtttccacatga

SEQ ID NO: 170808 - DNA, 25 bp, SARS Virus
tcagtggaaaaattttccacatgag

SEQ ID NO: 170809 - DNA, 25 bp, SARS Virus
cagtggaaaaagtttccacatgaga

SEQ ID NO: 170810 - DNA, 25 bp, SARS Virus
agtggaaaaagtttccacatgagag

SEQ ID NO: 170811 - DNA, 25 bp, SARS Virus
gtggaaaaagtttccacatgagagg

SEQ ID NO: 170812 - DNA, 25 bp, SARS Virus
tggaaaaagttttcacatgagaggt

SEQ ID NO: 170813 - DNA, 25 bp, SARS Virus
ggaaaaagtttctacatgagaggtt

SEQ ID NO: 170814 - DNA, 25 bp, SARS Virus
gaaaaagtttcctcatgagaggtta

SEQ ID NO: 170815 - DNA, 25 bp, SARS Virus
aaaaagtttccatatgagaggttag

SEQ ID NO: 170816 - DNA, 25 bp, SARS Virus
aaaagtttccacttgagaggttaga

SEQ ID NO: 170817 - DNA, 25 bp, SARS Virus
aaagtttccacatgagaggttagac

SEQ ID NO: 170818 - DNA, 25 bp, SARS Virus
aagtttccacattagaggttagaca

SEQ ID NO: 170819 - DNA, 25 bp, SARS Virus
agtttccacatgtgaggttagacat

SEQ ID NO: 170820 - DNA, 25 bp, SARS Virus
gtttccacatgataggttagacatg

SEQ ID NO: 170821 - DNA, 25 bp, SARS Virus
tttccacatgagtggttagacatga

SEQ ID NO: 170822 - DNA, 25 bp, SARS Virus
ttccacatgagatgttagacatgaa

SEQ ID NO: 170823 - DNA, 25 bp, SARS Virus
tccacatgagagtttagacatgaaa

SEQ ID NO: 170824 - DNA, 25 bp, SARS Virus
ccacatgagaggttagacatgaaat

SEQ ID NO: 170825 - DNA, 25 bp, SARS Virus
cacatgagaggttagacatgaaatg

SEQ ID NO: 170826 - DNA, 25 bp, SARS Virus
acatgagaggtttgacatgaaatga

SEQ ID NO: 170827 - DNA, 25 bp, SARS Virus
catgagaggttatacatgaaatgat

SEQ ID NO: 170828 - DNA, 25 bp, SARS Virus
atgagaggttagtcatgaaatgata

SEQ ID NO: 170829 - DNA, 25 bp, SARS Virus
tgagaggttagatatgaaatgataa

SEQ ID NO: 170830 - DNA, 25 bp, SARS Virus
gagaggttagacttgaaatgataaa

SEQ ID NO: 170831 - DNA, 25 bp, SARS Virus
agaggttagacatgaaatgataaaa

SEQ ID NO: 170832 - DNA, 25 bp, SARS Virus
gaggttagacattaaatgataaaaa

SEQ ID NO: 170833 - DNA, 25 bp, SARS Virus
aggttagacatgaaatgataaaaat

SEQ ID NO: 170834 - DNA, 25 bp, SARS Virus
ggttagacatgaaatgataaaaatc

SEQ ID NO: 170835 - DNA, 25 bp, SARS Virus
gttagacatgaaatgataaaaatca

SEQ ID NO: 170836 - DNA, 25 bp, SARS Virus
ttagacatgaaaagataaaaatcaa

SEQ ID NO: 170837 - DNA, 25 bp, SARS Virus
tagacatgaaataataaaaatcaat

SEQ ID NO: 170838 - DNA, 25 bp, SARS Virus
agacatgaaatgataaaaatcaatg

SEQ ID NO: 170839 - DNA, 25 bp, SARS Virus
gacatgaaatgaaaaaaatcaatgt

SEQ ID NO: 170840 - DNA, 25 bp, SARS Virus
acatgaaatgataaaaatcaatgtg

SEQ ID NO: 170841 - DNA, 25 bp, SARS Virus
catgaaatgataaaaatcaatgtgc

SEQ ID NO: 170842 - DNA, 25 bp, SARS Virus
atgaaatgataaaaatcaatgtgcc

SEQ ID NO: 170843 - DNA, 25 bp, SARS Virus
tgaaatgataaaaatcaatgtgcca

SEQ ID NO: 170844 - DNA, 25 bp, SARS Virus
gaaatgataaaaatcaatgtgccat

SEQ ID NO: 170845 - DNA, 25 bp, SARS Virus
aaatgataaaaaacaatgtgccatt

SEQ ID NO: 170846 - DNA, 25 bp, SARS Virus
aatgataaaaataaatgtgccattg

SEQ ID NO: 170847 - DNA, 25 bp, SARS Virus
atgataaaaatcaatgtgccattgg

SEQ ID NO: 170848 - DNA, 25 bp, SARS Virus
tgataaaaatcaatgtgccattggt

SEQ ID NO: 170849 - DNA, 25 bp, SARS Virus
gataaaaatcaaagtgccattggtc

SEQ ID NO: 170850 - DNA, 25 bp, SARS Virus
ataaaaatcaatatgccattggtca

SEQ ID NO: 170851 - DNA, 25 bp, SARS Virus
taaaaatcaatgagccattggtcat

SEQ ID NO: 170852 - DNA, 25 bp, SARS Virus
aaaaatcaatgtaccattggtcatt

SEQ ID NO: 170853 - DNA, 25 bp, SARS Virus
aaaatcaatgtgacattggtcattt

SEQ ID NO: 170854 - DNA, 25 bp, SARS Virus
aaatcaatgtgcaattggtcatttc

SEQ ID NO: 170855 - DNA, 25 bp, SARS Virus
aatcaatgtgccattggtcatttct

SEQ ID NO: 170856 - DNA, 25 bp, SARS Virus
atcaatgtgccaatggtcatttctg

SEQ ID NO: 170857 - DNA, 25 bp, SARS Virus
tcaatgtgccataggtcatttctgt

SEQ ID NO: 170858 - DNA, 25 bp, SARS Virus
caatgtgccattagtcatttctgta

SEQ ID NO: 170859 - DNA, 25 bp, SARS Virus
aatgtgccattgatcatttctgtat

SEQ ID NO: 170860 - DNA, 25 bp, SARS Virus
atgtgccattggacatttctgtatc

SEQ ID NO: 170861 - DNA, 25 bp, SARS Virus
tgtgccattggtaatttctgtatca

SEQ ID NO: 170862 - DNA, 25 bp, SARS Virus
gtgccattggtcatttctgtatcaa

SEQ ID NO: 170863 - DNA, 25 bp, SARS Virus
tgccattggtcaattctgtatcaaa

SEQ ID NO: 170864 - DNA, 25 bp, SARS Virus
gccattggtcatatctgtatcaaag

SEQ ID NO: 170865 - DNA, 25 bp, SARS Virus
ccattggtcattactgtatcaaaga

SEQ ID NO: 170866 - DNA, 25 bp, SARS Virus
cattggtcatttatgtatcaaagac

SEQ ID NO: 170867 - DNA, 25 bp, SARS Virus
attggtcatttcagtatcaaagaca

SEQ ID NO: 170868 - DNA, 25 bp, SARS Virus
ttggtcatttctatatcaaagacaa

SEQ ID NO: 170869 - DNA, 25 bp, SARS Virus
tggtcatttctgaatcaaagacaag

SEQ ID NO: 170870 - DNA, 25 bp, SARS Virus
ggtcatttctgtatcaaagacaagt

SEQ ID NO: 170871 - DNA, 25 bp, SARS Virus
gtcatttctgtaacaaagacaagtt

SEQ ID NO: 170872 - DNA, 25 bp, SARS Virus
tcatttctgtataaaagacaagtta

SEQ ID NO: 170873 - DNA, 25 bp, SARS Virus
catttctgtatcaaagacaagttac

SEQ ID NO: 170874 - DNA, 25 bp, SARS Virus
atttctgtatcaaagacaagttacc

SEQ ID NO: 170875 - DNA, 25 bp, SARS Virus
tttctgtatcaaagacaagttacca

SEQ ID NO: 170876 - DNA, 25 bp, SARS Virus
ttctgtatcaaaaacaagttaccac

SEQ ID NO: 170877 - DNA, 25 bp, SARS Virus
tctgtatcaaagacaagttaccacc

SEQ ID NO: 170878 - DNA, 25 bp, SARS Virus
ctgtatcaaagaaaagttaccacca

SEQ ID NO: 170879 - DNA, 25 bp, SARS Virus
tgtatcaaagacaagttaccaccag

SEQ ID NO: 170880 - DNA, 25 bp, SARS Virus
gtatcaaagacaagttaccaccaga

SEQ ID NO: 170881 - DNA, 25 bp, SARS Virus
tatcaaagacaaattaccaccagat

SEQ ID NO: 170882 - DNA, 25 bp, SARS Virus
atcaaagacaagataccaccagatc

SEQ ID NO: 170883 - DNA, 25 bp, SARS Virus
tcaaagacaagtaaccaccagatcc

SEQ ID NO: 170884 - DNA, 25 bp, SARS Virus
caaagacaagttaccaccagatcca

SEQ ID NO: 170885 - DNA, 25 bp, SARS Virus
aaagacaagttaacaccagatccaa

SEQ ID NO: 170886 - DNA, 25 bp, SARS Virus
aagacaagttacaaccagatccaaa

SEQ ID NO: 170887 - DNA, 25 bp, SARS Virus
agacaagttaccaccagatccaaaa

SEQ ID NO: 170888 - DNA, 25 bp, SARS Virus
gacaagttaccaacagatccaaaag

SEQ ID NO: 170889 - DNA, 25 bp, SARS Virus
acaagttaccacaagatccaaaagg

SEQ ID NO: 170890 - DNA, 25 bp, SARS Virus
caagttaccaccagatccaaaaggt

SEQ ID NO: 170891 - DNA, 25 bp, SARS Virus
aagttaccaccaaatccaaaaggtt

SEQ ID NO: 170892 - DNA, 25 bp, SARS Virus
agttaccaccagatccaaaaggttg

SEQ ID NO: 170893 - DNA, 25 bp, SARS Virus
gttaccaccagaaccaaaaggttgg

SEQ ID NO: 170894 - DNA, 25 bp, SARS Virus
ttaccaccagatacaaaaggttgga

SEQ ID NO: 170895 - DNA, 25 bp, SARS Virus
taccaccagatcaaaaaggttggag

SEQ ID NO: 170896 - DNA, 25 bp, SARS Virus
accaccagatccaaaaggttggagg

SEQ ID NO: 170897 - DNA, 25 bp, SARS Virus
ccaccagatccaaaaggttggaggg

SEQ ID NO: 170898 - DNA, 25 bp, SARS Virus
caccagatccaaaaggttggagggt

SEQ ID NO: 170899 - DNA, 25 bp, SARS Virus
accagatccaaaaggttggagggta

SEQ ID NO: 170900 - DNA, 25 bp, SARS Virus
ccagatccaaaaagttggagggtac

SEQ ID NO: 170901 - DNA, 25 bp, SARS Virus
cagatccaaaagattggagggtact

SEQ ID NO: 170902 - DNA, 25 bp, SARS Virus
agatccaaaaggatggagggtactt

SEQ ID NO: 170903 - DNA, 25 bp, SARS Virus
gatccaaaaggtaggagggtacttt

SEQ ID NO: 170904 - DNA, 25 bp, SARS Virus
atccaaaaggttagagggtactttc

SEQ ID NO: 170905 - DNA, 25 bp, SARS Virus
tccaaaaggttgaagggtactttct

SEQ ID NO: 170906 - DNA, 25 bp, SARS Virus
ccaaaaggttggagggtactttcta

SEQ ID NO: 170907 - DNA, 25 bp, SARS Virus
caaaaggttggaaggtactttctac

SEQ ID NO: 170908 - DNA, 25 bp, SARS Virus
aaaaggttggagagtactttctacg

SEQ ID NO: 170909 - DNA, 25 bp, SARS Virus
aaaggttggaggatactttctacgt

SEQ ID NO: 170910 - DNA, 25 bp, SARS Virus
aaggttggagggaactttctacgtt

SEQ ID NO: 170911 - DNA, 25 bp, SARS Virus
aggttggagggtactttctacgtta

SEQ ID NO: 170912 - DNA, 25 bp, SARS Virus
ggttggagggtaatttctacgttaa

SEQ ID NO: 170913 - DNA, 25 bp, SARS Virus
gttggagggtacattctacgttaag

SEQ ID NO: 170914 - DNA, 25 bp, SARS Virus
ttggagggtactatctacgttaaga

SEQ ID NO: 170915 - DNA, 25 bp, SARS Virus
tggagggtacttactacgttaagag

SEQ ID NO: 170916 - DNA, 25 bp, SARS Virus
ggagggtactttatacgttaagaga

SEQ ID NO: 170917 - DNA, 25 bp, SARS Virus
gagggtactttcaacgttaagagac

SEQ ID NO: 170918 - DNA, 25 bp, SARS Virus
agggtactttctacgttaagagaca

SEQ ID NO: 170919 - DNA, 25 bp, SARS Virus
gggtactttctaagttaagagacag

SEQ ID NO: 170920 - DNA, 25 bp, SARS Virus
ggtactttctacattaagagacagt

SEQ ID NO: 170921 - DNA, 25 bp, SARS Virus
gtactttctacgataagagacagtc

SEQ ID NO: 170922 - DNA, 25 bp, SARS Virus
tactttctacgtaaagagacagtct

SEQ ID NO: 170923 - DNA, 25 bp, SARS Virus
actttctacgttaagagacagtctc

SEQ ID NO: 170924 - DNA, 25 bp, SARS Virus
ctttctacgttaagagacagtctct

SEQ ID NO: 170925 - DNA, 25 bp, SARS Virus
tttctacgttaaaagacagtctctc

SEQ ID NO: 170926 - DNA, 25 bp, SARS Virus
ttctacgttaagagacagtctctca

SEQ ID NO: 170927 - DNA, 25 bp, SARS Virus
tctacgttaagaaacagtctctcat

SEQ ID NO: 170928 - DNA, 25 bp, SARS Virus
ctacgttaagagacagtctctcatg

SEQ ID NO: 170929 - DNA, 25 bp, SARS Virus
tacgttaagagaaagtctctcatga

SEQ ID NO: 170930 - DNA, 25 bp, SARS Virus
acgttaagagacagtctctcatgaa

SEQ ID NO: 170931 - DNA, 25 bp, SARS Virus
cgttaagagacaatctctcatgaag

SEQ ID NO: 170932 - DNA, 25 bp, SARS Virus
gttaagagacagactctcatgaagc

SEQ ID NO: 170933 - DNA, 25 bp, SARS Virus
ttaagagacagtatctcatgaagcg

SEQ ID NO: 170934 - DNA, 25 bp, SARS Virus
taagagacagtcactcatgaagcgc

SEQ ID NO: 170935 - DNA, 25 bp, SARS Virus
aagagacagtctatcatgaagcgca

SEQ ID NO: 170936 - DNA, 25 bp, SARS Virus
agagacagtctcacatgaagcgcat

SEQ ID NO: 170937 - DNA, 25 bp, SARS Virus
gagacagtctctaatgaagcgcatg

SEQ ID NO: 170938 - DNA, 25 bp, SARS Virus
agacagtctctcatgaagcgcatgt

SEQ ID NO: 170939 - DNA, 25 bp, SARS Virus
gacagtctctcaagaagcgcatgtc

SEQ ID NO: 170940 - DNA, 25 bp, SARS Virus
acagtctctcataaagcgcatgtca

SEQ ID NO: 170941 - DNA, 25 bp, SARS Virus
cagtctctcatgaagcgcatgtcac

SEQ ID NO: 170942 - DNA, 25 bp, SARS Virus
agtctctcatgaagcgcatgtcacc

SEQ ID NO: 170943 - DNA, 25 bp, SARS Virus
gtctctcatgaaacgcatgtcaccg

SEQ ID NO: 170944 - DNA, 25 bp, SARS Virus
tctctcatgaagagcatgtcaccgt

SEQ ID NO: 170945 - DNA, 25 bp, SARS Virus
ctctcatgaagcacatgtcaccgtt

SEQ ID NO: 170946 - DNA, 25 bp, SARS Virus
tctcatgaagcgaatgtcaccgtta

SEQ ID NO: 170947 - DNA, 25 bp, SARS Virus
ctcatgaagcgcatgtcaccgttat

SEQ ID NO: 170948 - DNA, 25 bp, SARS Virus
tcatgaagcgcaagtcaccgttatg

SEQ ID NO: 170949 - DNA, 25 bp, SARS Virus
catgaagcgcatatcaccgttatgg

SEQ ID NO: 170950 - DNA, 25 bp, SARS Virus
atgaagcgcatgacaccgttatggt

SEQ ID NO: 170951 - DNA, 25 bp, SARS Virus
tgaagcgcatgtaaccgttatggta

SEQ ID NO: 170952 - DNA, 25 bp, SARS Virus
gaagcgcatgtcaccgttatggtat

SEQ ID NO: 170953 - DNA, 25 bp, SARS Virus
aagcgcatgtcaacgttatggtata

SEQ ID NO: 170954 - DNA, 25 bp, SARS Virus
agcgcatgtcacagttatggtatac

SEQ ID NO: 170955 - DNA, 25 bp, SARS Virus
gcgcatgtcaccattatggtatact

SEQ ID NO: 170956 - DNA, 25 bp, SARS Virus
cgcatgtcaccgatatggtatactg

SEQ ID NO: 170957 - DNA, 25 bp, SARS Virus
gcatgtcaccgtaatggtatactgt

SEQ ID NO: 170958 - DNA, 25 bp, SARS Virus
catgtcaccgttatggtatactgtc

SEQ ID NO: 170959 - DNA, 25 bp, SARS Virus
atgtcaccgttaaggtatactgtcg

SEQ ID NO: 170960 - DNA, 25 bp, SARS Virus
tgtcaccgttatagtatactgtcga

SEQ ID NO: 170961 - DNA, 25 bp, SARS Virus
gtcaccgttatgatatactgtcgaa

SEQ ID NO: 170962 - DNA, 25 bp, SARS Virus
tcaccgttatggaatactgtcgaat

SEQ ID NO: 170963 - DNA, 25 bp, SARS Virus
caccgttatggtatactgtcgaatt

SEQ ID NO: 170964 - DNA, 25 bp, SARS Virus
accgttatggtaaactgtcgaattt

SEQ ID NO: 170965 - DNA, 25 bp, SARS Virus
ccgttatggtatactgtcgaattta

SEQ ID NO: 170966 - DNA, 25 bp, SARS Virus
cgttatggtataatgtcgaatttac

SEQ ID NO: 170967 - DNA, 25 bp, SARS Virus
gttatggtatacagtcgaatttaca

SEQ ID NO: 170968 - DNA, 25 bp, SARS Virus
ttatggtatactatcgaatttacaa

SEQ ID NO: 170969 - DNA, 25 bp, SARS Virus
tatggtatactgacgaatttacaaa

SEQ ID NO: 170970 - DNA, 25 bp, SARS Virus
atggtatactgtagaatttacaaag

SEQ ID NO: 170971 - DNA, 25 bp, SARS Virus
tggtatactgtcaaatttacaaagg

SEQ ID NO: 170972 - DNA, 25 bp, SARS Virus
ggtatactgtcgaatttacaaagga

SEQ ID NO: 170973 - DNA, 25 bp, SARS Virus
gtatactgtcgaatttacaaaggag

SEQ ID NO: 170974 - DNA, 25 bp, SARS Virus
tatactgtcgaaattacaaaggagt

SEQ ID NO: 170975 - DNA, 25 bp, SARS Virus
atactgtcgaatatacaaaggagtc

SEQ ID NO: 170976 - DNA, 25 bp, SARS Virus
tactgtcgaattaacaaaggagtca

SEQ ID NO: 170977 - DNA, 25 bp, SARS Virus
actgtcgaatttacaaaggagtcac

SEQ ID NO: 170978 - DNA, 25 bp, SARS Virus
ctgtcgaatttaaaaaggagtcacc

SEQ ID NO: 170979 - DNA, 25 bp, SARS Virus
tgtcgaatttacaaaggagtcaccg

SEQ ID NO: 170980 - DNA, 25 bp, SARS Virus
gtcgaatttacaaaggagtcaccga

SEQ ID NO: 170981 - DNA, 25 bp, SARS Virus
tcgaatttacaaaggagtcaccgaa

SEQ ID NO: 170982 - DNA, 25 bp, SARS Virus
cgaatttacaaaagagtcaccgaaa

SEQ ID NO: 170983 - DNA, 25 bp, SARS Virus
gaatttacaaagaagtcaccgaaac

SEQ ID NO: 170984 - DNA, 25 bp, SARS Virus
aatttacaaaggagtcaccgaaact

SEQ ID NO: 170985 - DNA, 25 bp, SARS Virus
atttacaaaggaatcaccgaaactc

SEQ ID NO: 170986 - DNA, 25 bp, SARS Virus
tttacaaaggagacaccgaaactcg

SEQ ID NO: 170987 - DNA, 25 bp, SARS Virus
ttacaaaggagtaaccgaaactcgc

SEQ ID NO: 170988 - DNA, 25 bp, SARS Virus
tacaaaggagtcaccgaaactcgca

SEQ ID NO: 170989 - DNA, 25 bp, SARS Virus
acaaaggagtcaacgaaactcgcaa

SEQ ID NO: 170990 - DNA, 25 bp, SARS Virus
caaaggagtcacagaaactcgcaaa

SEQ ID NO: 170991 - DNA, 25 bp, SARS Virus
aaaggagtcaccaaaactcgcaaag

SEQ ID NO: 170992 - DNA, 25 bp, SARS Virus
aaggagtcaccgaaactcgcaaaga

SEQ ID NO: 170993 - DNA, 25 bp, SARS Virus
aggagtcaccgaaactcgcaaagac

SEQ ID NO: 170994 - DNA, 25 bp, SARS Virus
ggagtcaccgaaactcgcaaagacg

SEQ ID NO: 170995 - DNA, 25 bp, SARS Virus
gagtcaccgaaaatcgcaaagacga

SEQ ID NO: 170996 - DNA, 25 bp, SARS Virus
agtcaccgaaacacgcaaagacgac

SEQ ID NO: 170997 - DNA, 25 bp, SARS Virus
gtcaccgaaactagcaaagacgacg

SEQ ID NO: 170998 - DNA, 25 bp, SARS Virus
tcaccgaaactcacaaagacgacgc

SEQ ID NO: 170999 - DNA, 25 bp, SARS Virus
caccgaaactcgaaaagacgacgct

SEQ ID NO: 171000 - DNA, 25 bp, SARS Virus
accgaaactcgcaaagacgacgctt

SEQ ID NO: 171001 - DNA, 25 bp, SARS Virus
ccgaaactcgcaaagacgacgcttt

SEQ ID NO: 171002 - DNA, 25 bp, SARS Virus
cgaaactcgcaaagacgacgctttt

SEQ ID NO: 171003 - DNA, 25 bp, SARS Virus
gaaactcgcaaaaacgacgcttttc

SEQ ID NO: 171004 - DNA, 25 bp, SARS Virus
aaactcgcaaagacgacgcttttcg

SEQ ID NO: 171005 - DNA, 25 bp, SARS Virus
aactcgcaaagaagacgcttttcga

SEQ ID NO: 171006 - DNA, 25 bp, SARS Virus
actcgcaaagacaacgcttttcgaa

SEQ ID NO: 171007 - DNA, 25 bp, SARS Virus
ctcgcaaagacgacgcttttcgaac

SEQ ID NO: 171008 - DNA, 25 bp, SARS Virus
tcgcaaagacgaagcttttcgaact

SEQ ID NO: 171009 - DNA, 25 bp, SARS Virus
cgcaaagacgacacttttcgaactc

SEQ ID NO: 171010 - DNA, 25 bp, SARS Virus
gcaaagacgacgattttcgaactca

SEQ ID NO: 171011 - DNA, 25 bp, SARS Virus
caaagacgacgcatttcgaactcag

SEQ ID NO: 171012 - DNA, 25 bp, SARS Virus
aaagacgacgctattcgaactcaga

SEQ ID NO: 171013 - DNA, 25 bp, SARS Virus
aagacgacgcttatcgaactcagag

SEQ ID NO: 171014 - DNA, 25 bp, SARS Virus
agacgacgctttacgaactcagaga

SEQ ID NO: 171015 - DNA, 25 bp, SARS Virus
gacgacgcttttagaactcagagag

SEQ ID NO: 171016 - DNA, 25 bp, SARS Virus
acgacgcttttcaaactcagagagt

SEQ ID NO: 171017 - DNA, 25 bp, SARS Virus
cgacgcttttcgaactcagagagtc

SEQ ID NO: 171018 - DNA, 25 bp, SARS Virus
gacgcttttcgaactcagagagtca

SEQ ID NO: 171019 - DNA, 25 bp, SARS Virus
acgcttttcgaaatcagagagtcat

SEQ ID NO: 171020 - DNA, 25 bp, SARS Virus
cgcttttcgaacacagagagtcatg

SEQ ID NO: 171021 - DNA, 25 bp, SARS Virus
gcttttcgaactaagagagtcatgt

SEQ ID NO: 171022 - DNA, 25 bp, SARS Virus
cttttcgaactcagagagtcatgtt

SEQ ID NO: 171023 - DNA, 25 bp, SARS Virus
ttttcgaactcaaagagtcatgttc

SEQ ID NO: 171024 - DNA, 25 bp, SARS Virus
tttcgaactcagagagtcatgttca

SEQ ID NO: 171025 - DNA, 25 bp, SARS Virus
ttcgaactcagaaagtcatgttcac

SEQ ID NO: 171026 - DNA, 25 bp, SARS Virus
tcgaactcagagagtcatgttcaca

SEQ ID NO: 171027 - DNA, 25 bp, SARS Virus
cgaactcagagaatcatgttcacaa

SEQ ID NO: 171028 - DNA, 25 bp, SARS Virus
gaactcagagagacatgttcacaac

SEQ ID NO: 171029 - DNA, 25 bp, SARS Virus
aactcagagagtaatgttcacaacc

SEQ ID NO: 171030 - DNA, 25 bp, SARS Virus
actcagagagtcatgttcacaaccg

SEQ ID NO: 171031 - DNA, 25 bp, SARS Virus
ctcagagagtcaagttcacaaccgt

SEQ ID NO: 171032 - DNA, 25 bp, SARS Virus
tcagagagtcatattcacaaccgtt

SEQ ID NO: 171033 - DNA, 25 bp, SARS Virus
cagagagtcatgatcacaaccgttc

SEQ ID NO: 171034 - DNA, 25 bp, SARS Virus
agagagtcatgtacacaaccgttca

SEQ ID NO: 171035 - DNA, 25 bp, SARS Virus
gagagtcatgttaacaaccgttcat

SEQ ID NO: 171036 - DNA, 25 bp, SARS Virus
agagtcatgttcacaaccgttcata

SEQ ID NO: 171037 - DNA, 25 bp, SARS Virus
gagtcatgttcaaaaccgttcatac

SEQ ID NO: 171038 - DNA, 25 bp, SARS Virus
agtcatgttcacaaccgttcataca

SEQ ID NO: 171039 - DNA, 25 bp, SARS Virus
gtcatgttcacaaccgttcatacat

SEQ ID NO: 171040 - DNA, 25 bp, SARS Virus
tcatgttcacaaacgttcatacatt

SEQ ID NO: 171041 - DNA, 25 bp, SARS Virus
catgttcacaacagttcatacatta

SEQ ID NO: 171042 - DNA, 25 bp, SARS Virus
atgttcacaaccattcatacattag

SEQ ID NO: 171043 - DNA, 25 bp, SARS Virus
tgttcacaaccgatcatacattagc

SEQ ID NO: 171044 - DNA, 25 bp, SARS Virus
gttcacaaccgtacatacattagcg

SEQ ID NO: 171045 - DNA, 25 bp, SARS Virus
ttcacaaccgttaatacattagcgg

SEQ ID NO: 171046 - DNA, 25 bp, SARS Virus
tcacaaccgttcatacattagcggt

SEQ ID NO: 171047 - DNA, 25 bp, SARS Virus
cacaaccgttcaaacattagcggtc

SEQ ID NO: 171048 - DNA, 25 bp, SARS Virus
acaaccgttcatacattagcggtcg

SEQ ID NO: 171049 - DNA, 25 bp, SARS Virus
caaccgttcataaattagcggtcgt

SEQ ID NO: 171050 - DNA, 25 bp, SARS Virus
aaccgttcatacattagcggtcgta

SEQ ID NO: 171051 - DNA, 25 bp, SARS Virus
accgttcatacaatagcggtcgtaa

SEQ ID NO: 171052 - DNA, 25 bp, SARS Virus
ccgttcatacataagcggtcgtaat

SEQ ID NO: 171053 - DNA, 25 bp, SARS Virus
cgttcatacattagcggtcgtaatc

SEQ ID NO: 171054 - DNA, 25 bp, SARS Virus
gttcatacattaacggtcgtaatca

SEQ ID NO: 171055 - DNA, 25 bp, SARS Virus
ttcatacattagaggtcgtaatcag

SEQ ID NO: 171056 - DNA, 25 bp, SARS Virus
tcatacattagcagtcgtaatcagg

SEQ ID NO: 171057 - DNA, 25 bp, SARS Virus
catacattagcgatcgtaatcaggt

SEQ ID NO: 171058 - DNA, 25 bp, SARS Virus
atacattagcggacgtaatcaggtt

SEQ ID NO: 171059 - DNA, 25 bp, SARS Virus
tacattagcggtagtaatcaggtta

SEQ ID NO: 171060 - DNA, 25 bp, SARS Virus
acattagcggtcataatcaggttag

SEQ ID NO: 171061 - DNA, 25 bp, SARS Virus
cattagcggtcgaaatcaggttagt

SEQ ID NO: 171062 - DNA, 25 bp, SARS Virus
attagcggtcgtaatcaggttagtg

SEQ ID NO: 171063 - DNA, 25 bp, SARS Virus
ttagcggtcgtaatcaggttagtgt

SEQ ID NO: 171064 - DNA, 25 bp, SARS Virus
tagcggtcgtaaacaggttagtgta

SEQ ID NO: 171065 - DNA, 25 bp, SARS Virus
agcggtcgtaataaggttagtgtac

SEQ ID NO: 171066 - DNA, 25 bp, SARS Virus
gcggtcgtaatcaggttagtgtaca

SEQ ID NO: 171067 - DNA, 25 bp, SARS Virus
cggtcgtaatcaagttagtgtacaa

SEQ ID NO: 171068 - DNA, 25 bp, SARS Virus
ggtcgtaatcagattagtgtacaac

SEQ ID NO: 171069 - DNA, 25 bp, SARS Virus
gtcgtaatcaggatagtgtacaacg

SEQ ID NO: 171070 - DNA, 25 bp, SARS Virus
tcgtaatcaggtaagtgtacaacga

SEQ ID NO: 171071 - DNA, 25 bp, SARS Virus
cgtaatcaggttagtgtacaacgat

SEQ ID NO: 171072 - DNA, 25 bp, SARS Virus
gtaatcaggttaatgtacaacgata

SEQ ID NO: 171073 - DNA, 25 bp, SARS Virus
taatcaggttagagtacaacgatag

SEQ ID NO: 171074 - DNA, 25 bp, SARS Virus
aatcaggttagtatacaacgatagc

SEQ ID NO: 171075 - DNA, 25 bp, SARS Virus
atcaggttagtgaacaacgatagcg

SEQ ID NO: 171076 - DNA, 25 bp, SARS Virus
tcaggttagtgtacaacgatagcgt

SEQ ID NO: 171077 - DNA, 25 bp, SARS Virus
caggttagtgtaaaacgatagcgta

SEQ ID NO: 171078 - DNA, 25 bp, SARS Virus
aggttagtgtacaacgatagcgtaa

SEQ ID NO: 171079 - DNA, 25 bp, SARS Virus
ggttagtgtacaacgatagcgtaac

SEQ ID NO: 171080 - DNA, 25 bp, SARS Virus
gttagtgtacaaagatagcgtaact

SEQ ID NO: 171081 - DNA, 25 bp, SARS Virus
ttagtgtacaacaatagcgtaactt

SEQ ID NO: 171082 - DNA, 25 bp, SARS Virus
tagtgtacaacgatagcgtaacttc

SEQ ID NO: 171083 - DNA, 25 bp, SARS Virus
agtgtacaacgaaagcgtaacttca

SEQ ID NO: 171084 - DNA, 25 bp, SARS Virus
gtgtacaacgatagcgtaacttcag

SEQ ID NO: 171085 - DNA, 25 bp, SARS Virus
tgtacaacgataacgtaacttcagt

SEQ ID NO: 171086 - DNA, 25 bp, SARS Virus
gtacaacgatagagtaacttcagtc

SEQ ID NO: 171087 - DNA, 25 bp, SARS Virus
tacaacgatagcataacttcagtca

SEQ ID NO: 171088 - DNA, 25 bp, SARS Virus
acaacgatagcgaaacttcagtcac

SEQ ID NO: 171089 - DNA, 25 bp, SARS Virus
caacgatagcgtaacttcagtcact

SEQ ID NO: 171090 - DNA, 25 bp, SARS Virus
aacgatagcgtaacttcagtcactg

SEQ ID NO: 171091 - DNA, 25 bp, SARS Virus
acgatagcgtaaattcagtcactgt

SEQ ID NO: 171092 - DNA, 25 bp, SARS Virus
cgatagcgtaacatcagtcactgta

SEQ ID NO: 171093 - DNA, 25 bp, SARS Virus
gatagcgtaactacagtcactgtaa

SEQ ID NO: 171094 - DNA, 25 bp, SARS Virus
atagcgtaacttaagtcactgtaac

SEQ ID NO: 171095 - DNA, 25 bp, SARS Virus
tagcgtaacttcagtcactgtaaca

SEQ ID NO: 171096 - DNA, 25 bp, SARS Virus
agcgtaacttcaatcactgtaacag

SEQ ID NO: 171097 - DNA, 25 bp, SARS Virus
gcgtaacttcagacactgtaacagt

SEQ ID NO: 171098 - DNA, 25 bp, SARS Virus
cgtaacttcagtaactgtaacagtg

SEQ ID NO: 171099 - DNA, 25 bp, SARS Virus
gtaacttcagtcactgtaacagtga

SEQ ID NO: 171100 - DNA, 25 bp, SARS Virus
taacttcagtcaatgtaacagtgac

SEQ ID NO: 171101 - DNA, 25 bp, SARS Virus
aacttcagtcacagtaacagtgacg

SEQ ID NO: 171102 - DNA, 25 bp, SARS Virus
acttcagtcactataacagtgacgg

SEQ ID NO: 171103 - DNA, 25 bp, SARS Virus
cttcagtcactgaaacagtgacgga

SEQ ID NO: 171104 - DNA, 25 bp, SARS Virus
ttcagtcactgtaacagtgacggat

SEQ ID NO: 171105 - DNA, 25 bp, SARS Virus
tcagtcactgtaacagtgacggatg

SEQ ID NO: 171106 - DNA, 25 bp, SARS Virus
cagtcactgtaaaagtgacggatgt

SEQ ID NO: 171107 - DNA, 25 bp, SARS Virus
agtcactgtaacagtgacggatgtg

SEQ ID NO: 171108 - DNA, 25 bp, SARS Virus
gtcactgtaacaatgacggatgtgt

SEQ ID NO: 171109 - DNA, 25 bp, SARS Virus
tcactgtaacagagacggatgtgta

SEQ ID NO: 171110 - DNA, 25 bp, SARS Virus
cactgtaacagtaacggatgtgtac

SEQ ID NO: 171111 - DNA, 25 bp, SARS Virus
actgtaacagtgacggatgtgtaca

SEQ ID NO: 171112 - DNA, 25 bp, SARS Virus
ctgtaacagtgaaggatgtgtacac

SEQ ID NO: 171113 - DNA, 25 bp, SARS Virus
tgtaacagtgacagatgtgtacaca

SEQ ID NO: 171114 - DNA, 25 bp, SARS Virus
gtaacagtgacgaatgtgtacacaa

SEQ ID NO: 171115 - DNA, 25 bp, SARS Virus
taacagtgacggatgtgtacacaaa

SEQ ID NO: 171116 - DNA, 25 bp, SARS Virus
aacagtgacggaagtgtacacaaaa

SEQ ID NO: 171117 - DNA, 25 bp, SARS Virus
acagtgacggatatgtacacaaaaa

SEQ ID NO: 171118 - DNA, 25 bp, SARS Virus
cagtgacggatgagtacacaaaaac

SEQ ID NO: 171119 - DNA, 25 bp, SARS Virus
agtgacggatgtatacacaaaaaca

SEQ ID NO: 171120 - DNA, 25 bp, SARS Virus
gtgacggatgtgaacacaaaaacat

SEQ ID NO: 171121 - DNA, 25 bp, SARS Virus
tgacggatgtgtacacaaaaacata

SEQ ID NO: 171122 - DNA, 25 bp, SARS Virus
gacggatgtgtaaacaaaaacatat

SEQ ID NO: 171123 - DNA, 25 bp, SARS Virus
acggatgtgtacacaaaaacatatt

SEQ ID NO: 171124 - DNA, 25 bp, SARS Virus
cggatgtgtacaaaaaaacatattt

SEQ ID NO: 171125 - DNA, 25 bp, SARS Virus
ggatgtgtacacaaaaacatatttg

SEQ ID NO: 171126 - DNA, 25 bp, SARS Virus
gatgtgtacacaaaaacatatttgg

SEQ ID NO: 171127 - DNA, 25 bp, SARS Virus
atgtgtacacaaaaacatatttggt

SEQ ID NO: 171128 - DNA, 25 bp, SARS Virus
tgtgtacacaaaaacatatttggtt

SEQ ID NO: 171129 - DNA, 25 bp, SARS Virus
gtgtacacaaaaacatatttggttt

SEQ ID NO: 171130 - DNA, 25 bp, SARS Virus
tgtacacaaaaaaatatttggtttt

SEQ ID NO: 171131 - DNA, 25 bp, SARS Virus
gtacacaaaaacatatttggttttt

SEQ ID NO: 171132 - DNA, 25 bp, SARS Virus
tacacaaaaacaaatttggtttttg

SEQ ID NO: 171133 - DNA, 25 bp, SARS Virus
acacaaaaacatatttggtttttgg

SEQ ID NO: 171134 - DNA, 25 bp, SARS Virus
cacaaaaacataattggtttttgga

SEQ ID NO: 171135 - DNA, 25 bp, SARS Virus
acaaaaacatatatggtttttggac

SEQ ID NO: 171136 - DNA, 25 bp, SARS Virus
caaaaacatattaggtttttggact

SEQ ID NO: 171137 - DNA, 25 bp, SARS Virus
aaaaacatatttagtttttggactg

SEQ ID NO: 171138 - DNA, 25 bp, SARS Virus
aaaacatatttgatttttggactgg

SEQ ID NO: 171139 - DNA, 25 bp, SARS Virus
aaacatatttggattttggactggt

SEQ ID NO: 171140 - DNA, 25 bp, SARS Virus
aacatatttggtatttggactggta

SEQ ID NO: 171141 - DNA, 25 bp, SARS Virus
acatatttggttattggactggtaa

SEQ ID NO: 171142 - DNA, 25 bp, SARS Virus
catatttggtttatggactggtaat

SEQ ID NO: 171143 - DNA, 25 bp, SARS Virus
atatttggttttaggactggtaatc

SEQ ID NO: 171144 - DNA, 25 bp, SARS Virus
tatttggtttttagactggtaatcg

SEQ ID NO: 171145 - DNA, 25 bp, SARS Virus
atttggtttttgaactggtaatcgt

SEQ ID NO: 171146 - DNA, 25 bp, SARS Virus
tttggtttttggactggtaatcgtg

SEQ ID NO: 171147 - DNA, 25 bp, SARS Virus
ttggtttttggaatggtaatcgtgt

SEQ ID NO: 171148 - DNA, 25 bp, SARS Virus
tggtttttggacaggtaatcgtgta

SEQ ID NO: 171149 - DNA, 25 bp, SARS Virus
ggtttttggactagtaatcgtgtat

SEQ ID NO: 171150 - DNA, 25 bp, SARS Virus
gtttttggactgataatcgtgtatt

SEQ ID NO: 171151 - DNA, 25 bp, SARS Virus
tttttggactggaaatcgtgtatta

SEQ ID NO: 171152 - DNA, 25 bp, SARS Virus
ttttggactggtaatcgtgtattac

SEQ ID NO: 171153 - DNA, 25 bp, SARS Virus
tttggactggtaatcgtgtattacc

SEQ ID NO: 171154 - DNA, 25 bp, SARS Virus
ttggactggtaaacgtgtattacct

SEQ ID NO: 171155 - DNA, 25 bp, SARS Virus
tggactggtaatagtgtattacctt

SEQ ID NO: 171156 - DNA, 25 bp, SARS Virus
ggactggtaatcatgtattaccttt

SEQ ID NO: 171157 - DNA, 25 bp, SARS Virus
gactggtaatcgagtattacctttt

SEQ ID NO: 171158 - DNA, 25 bp, SARS Virus
actggtaatcgtatattaccttttg

SEQ ID NO: 171159 - DNA, 25 bp, SARS Virus
ctggtaatcgtgaattaccttttga

SEQ ID NO: 171160 - DNA, 25 bp, SARS Virus
tggtaatcgtgtattaccttttgat

SEQ ID NO: 171161 - DNA, 25 bp, SARS Virus
ggtaatcgtgtaataccttttgatt

SEQ ID NO: 171162 - DNA, 25 bp, SARS Virus
gtaatcgtgtataaccttttgatta

SEQ ID NO: 171163 - DNA, 25 bp, SARS Virus
taatcgtgtattaccttttgattac

SEQ ID NO: 171164 - DNA, 25 bp, SARS Virus
aatcgtgtattaacttttgattacc

SEQ ID NO: 171165 - DNA, 25 bp, SARS Virus
atcgtgtattacattttgattaccc

SEQ ID NO: 171166 - DNA, 25 bp, SARS Virus
tcgtgtattaccatttgattaccct

SEQ ID NO: 171167 - DNA, 25 bp, SARS Virus
cgtgtattacctattgattaccctc

SEQ ID NO: 171168 - DNA, 25 bp, SARS Virus
gtgtattaccttatgattaccctcc

SEQ ID NO: 171169 - DNA, 25 bp, SARS Virus
tgtattacctttagattaccctccg

SEQ ID NO: 171170 - DNA, 25 bp, SARS Virus
gtattaccttttaattaccctccga

SEQ ID NO: 171171 - DNA, 25 bp, SARS Virus
tattaccttttgattaccctccgaa

SEQ ID NO: 171172 - DNA, 25 bp, SARS Virus
attaccttttgaataccctccgaat

SEQ ID NO: 171173 - DNA, 25 bp, SARS Virus
ttaccttttgataaccctccgaata

SEQ ID NO: 171174 - DNA, 25 bp, SARS Virus
taccttttgattaccctccgaatac

SEQ ID NO: 171175 - DNA, 25 bp, SARS Virus
accttttgattaacctccgaataca

SEQ ID NO: 171176 - DNA, 25 bp, SARS Virus
ccttttgattacactccgaatacac

SEQ ID NO: 171177 - DNA, 25 bp, SARS Virus
cttttgattaccatccgaatacact

SEQ ID NO: 171178 - DNA, 25 bp, SARS Virus
ttttgattacccaccgaatacactg

SEQ ID NO: 171179 - DNA, 25 bp, SARS Virus
tttgattaccctacgaatacactga

SEQ ID NO: 171180 - DNA, 25 bp, SARS Virus
ttgattaccctcagaatacactgaa

SEQ ID NO: 171181 - DNA, 25 bp, SARS Virus
tgattaccctccaaatacactgaac

SEQ ID NO: 171182 - DNA, 25 bp, SARS Virus
gattaccctccgaatacactgaacg

SEQ ID NO: 171183 - DNA, 25 bp, SARS Virus
attaccctccgaatacactgaacgt

SEQ ID NO: 171184 - DNA, 25 bp, SARS Virus
ttaccctccgaaaacactgaacgtt

SEQ ID NO: 171185 - DNA, 25 bp, SARS Virus
taccctccgaatacactgaacgtta

SEQ ID NO: 171186 - DNA, 25 bp, SARS Virus
accctccgaataaactgaacgttat

SEQ ID NO: 171187 - DNA, 25 bp, SARS Virus
ccctccgaatacactgaacgttatt

SEQ ID NO: 171188 - DNA, 25 bp, SARS Virus
cctccgaatacaatgaacgttatta

SEQ ID NO: 171189 - DNA, 25 bp, SARS Virus
ctccgaatacacagaacgttattat

SEQ ID NO: 171190 - DNA, 25 bp, SARS Virus
tccgaatacactaaacgttattatc

SEQ ID NO: 171191 - DNA, 25 bp, SARS Virus
ccgaatacactgaacgttattatcg

SEQ ID NO: 171192 - DNA, 25 bp, SARS Virus
cgaatacactgaacgttattatcga

SEQ ID NO: 171193 - DNA, 25 bp, SARS Virus
gaatacactgaaagttattatcgag

SEQ ID NO: 171194 - DNA, 25 bp, SARS Virus
aatacactgaacattattatcgagt

SEQ ID NO: 171195 - DNA, 25 bp, SARS Virus
atacactgaacgatattatcgagta

SEQ ID NO: 171196 - DNA, 25 bp, SARS Virus
tacactgaacgtaattatcgagtat

SEQ ID NO: 171197 - DNA, 25 bp, SARS Virus
acactgaacgttattatcgagtatg

SEQ ID NO: 171198 - DNA, 25 bp, SARS Virus
cactgaacgttaatatcgagtatgg

SEQ ID NO: 171199 - DNA, 25 bp, SARS Virus
actgaacgttataatcgagtatgga

SEQ ID NO: 171200 - DNA, 25 bp, SARS Virus
ctgaacgttattatcgagtatggag

SEQ ID NO: 171201 - DNA, 25 bp, SARS Virus
tgaacgttattaacgagtatggagg

SEQ ID NO: 171202 - DNA, 25 bp, SARS Virus
gaacgttattatagagtatggagga

SEQ ID NO: 171203 - DNA, 25 bp, SARS Virus
aacgttattatcaagtatggaggat

SEQ ID NO: 171204 - DNA, 25 bp, SARS Virus
acgttattatcgagtatggaggatc

SEQ ID NO: 171205 - DNA, 25 bp, SARS Virus
cgttattatcgaatatggaggatct

SEQ ID NO: 171206 - DNA, 25 bp, SARS Virus
gttattatcgagaatggaggatcta

SEQ ID NO: 171207 - DNA, 25 bp, SARS Virus
ttattatcgagtatggaggatctat

SEQ ID NO: 171208 - DNA, 25 bp, SARS Virus
tattatcgagtaaggaggatctatg

SEQ ID NO: 171209 - DNA, 25 bp, SARS Virus
attatcgagtatagaggatctatgt

SEQ ID NO: 171210 - DNA, 25 bp, SARS Virus
ttatcgagtatgaaggatctatgtc

SEQ ID NO: 171211 - DNA, 25 bp, SARS Virus
tatcgagtatggaggatctatgtca

SEQ ID NO: 171212 - DNA, 25 bp, SARS Virus
atcgagtatggaagatctatgtcaa

SEQ ID NO: 171213 - DNA, 25 bp, SARS Virus
tcgagtatggagaatctatgtcaac

SEQ ID NO: 171214 - DNA, 25 bp, SARS Virus
cgagtatggaggatctatgtcaaca

SEQ ID NO: 171215 - DNA, 25 bp, SARS Virus
gagtatggaggaactatgtcaacac

SEQ ID NO: 171216 - DNA, 25 bp, SARS Virus
agtatggaggatatatgtcaacaca

SEQ ID NO: 171217 - DNA, 25 bp, SARS Virus
gtatggaggatcaatgtcaacacag

SEQ ID NO: 171218 - DNA, 25 bp, SARS Virus
tatggaggatctatgtcaacacagt

SEQ ID NO: 171219 - DNA, 25 bp, SARS Virus
atggaggatctaagtcaacacagtg

SEQ ID NO: 171220 - DNA, 25 bp, SARS Virus
tggaggatctatatcaacacagtgt

SEQ ID NO: 171221 - DNA, 25 bp, SARS Virus
ggaggatctatgacaacacagtgta

SEQ ID NO: 171222 - DNA, 25 bp, SARS Virus
gaggatctatgtaaacacagtgtag

SEQ ID NO: 171223 - DNA, 25 bp, SARS Virus
aggatctatgtcaacacagtgtagt

SEQ ID NO: 171224 - DNA, 25 bp, SARS Virus
ggatctatgtcaacacagtgtagtc

SEQ ID NO: 171225 - DNA, 25 bp, SARS Virus
gatctatgtcaaaacagtgtagtca

SEQ ID NO: 171226 - DNA, 25 bp, SARS Virus
atctatgtcaacacagtgtagtcac

SEQ ID NO: 171227 - DNA, 25 bp, SARS Virus
tctatgtcaacaaagtgtagtcact

SEQ ID NO: 171228 - DNA, 25 bp, SARS Virus
ctatgtcaacacagtgtagtcactg

SEQ ID NO: 171229 - DNA, 25 bp, SARS Virus
tatgtcaacacaatgtagtcactgt

SEQ ID NO: 171230 - DNA, 25 bp, SARS Virus
atgtcaacacagagtagtcactgta

SEQ ID NO: 171231 - DNA, 25 bp, SARS Virus
tgtcaacacagtatagtcactgtag

SEQ ID NO: 171232 - DNA, 25 bp, SARS Virus
gtcaacacagtgaagtcactgtagt

SEQ ID NO: 171233 - DNA, 25 bp, SARS Virus
tcaacacagtgtagtcactgtagtg

SEQ ID NO: 171234 - DNA, 25 bp, SARS Virus
caacacagtgtaatcactgtagtgt

SEQ ID NO: 171235 - DNA, 25 bp, SARS Virus
aacacagtgtagacactgtagtgtt

SEQ ID NO: 171236 - DNA, 25 bp, SARS Virus
acacagtgtagtaactgtagtgttg

SEQ ID NO: 171237 - DNA, 25 bp, SARS Virus
cacagtgtagtcactgtagtgttgg

SEQ ID NO: 171238 - DNA, 25 bp, SARS Virus
acagtgtagtcaatgtagtgttgga

SEQ ID NO: 171239 - DNA, 25 bp, SARS Virus
cagtgtagtcacagtagtgttggac

SEQ ID NO: 171240 - DNA, 25 bp, SARS Virus
agtgtagtcactatagtgttggacc

SEQ ID NO: 171241 - DNA, 25 bp, SARS Virus
gtgtagtcactgaagtgttggaccc

SEQ ID NO: 171242 - DNA, 25 bp, SARS Virus
tgtagtcactgtagtgttggacccc

SEQ ID NO: 171243 - DNA, 25 bp, SARS Virus
gtagtcactgtaatgttggaccccg

SEQ ID NO: 171244 - DNA, 25 bp, SARS Virus
tagtcactgtagagttggaccccgt

SEQ ID NO: 171245 - DNA, 25 bp, SARS Virus
agtcactgtagtattggaccccgta

SEQ ID NO: 171246 - DNA, 25 bp, SARS Virus
gtcactgtagtgatggaccccgtaa

SEQ ID NO: 171247 - DNA, 25 bp, SARS Virus
tcactgtagtgtaggaccccgtaac

SEQ ID NO: 171248 - DNA, 25 bp, SARS Virus
cactgtagtgttagaccccgtaacg

SEQ ID NO: 171249 - DNA, 25 bp, SARS Virus
actgtagtgttgaaccccgtaacgt

SEQ ID NO: 171250 - DNA, 25 bp, SARS Virus
ctgtagtgttggaccccgtaacgtt

SEQ ID NO: 171251 - DNA, 25 bp, SARS Virus
tgtagtgttggaacccgtaacgttt

SEQ ID NO: 171252 - DNA, 25 bp, SARS Virus
gtagtgttggacaccgtaacgtttg

SEQ ID NO: 171253 - DNA, 25 bp, SARS Virus
tagtgttggaccacgtaacgtttgt

SEQ ID NO: 171254 - DNA, 25 bp, SARS Virus
agtgttggacccagtaacgtttgta

SEQ ID NO: 171255 - DNA, 25 bp, SARS Virus
gtgttggaccccataacgtttgtat

SEQ ID NO: 171256 - DNA, 25 bp, SARS Virus
tgttggaccccgaaacgtttgtatc

SEQ ID NO: 171257 - DNA, 25 bp, SARS Virus
gttggaccccgtaacgtttgtatcc

SEQ ID NO: 171258 - DNA, 25 bp, SARS Virus
ttggaccccgtaacgtttgtatccc

SEQ ID NO: 171259 - DNA, 25 bp, SARS Virus
tggaccccgtaaagtttgtatccct

SEQ ID NO: 171260 - DNA, 25 bp, SARS Virus
ggaccccgtaacatttgtatcccta

SEQ ID NO: 171261 - DNA, 25 bp, SARS Virus
gaccccgtaacgattgtatccctaa

SEQ ID NO: 171262 - DNA, 25 bp, SARS Virus
accccgtaacgtatgtatccctaat

SEQ ID NO: 171263 - DNA, 25 bp, SARS Virus
ccccgtaacgttagtatccctaatt

SEQ ID NO: 171264 - DNA, 25 bp, SARS Virus
cccgtaacgtttatatccctaattg

SEQ ID NO: 171265 - DNA, 25 bp, SARS Virus
ccgtaacgtttgaatccctaattgt

SEQ ID NO: 171266 - DNA, 25 bp, SARS Virus
cgtaacgtttgtatccctaattgtc

SEQ ID NO: 171267 - DNA, 25 bp, SARS Virus
gtaacgtttgtaaccctaattgtct

SEQ ID NO: 171268 - DNA, 25 bp, SARS Virus
taacgtttgtatacctaattgtctg

SEQ ID NO: 171269 - DNA, 25 bp, SARS Virus
aacgtttgtatcactaattgtctgt

SEQ ID NO: 171270 - DNA, 25 bp, SARS Virus
acgtttgtatccataattgtctgtt

SEQ ID NO: 171271 - DNA, 25 bp, SARS Virus
cgtttgtatcccaaattgtctgttg

SEQ ID NO: 171272 - DNA, 25 bp, SARS Virus
gtttgtatccctaattgtctgttgt

SEQ ID NO: 171273 - DNA, 25 bp, SARS Virus
tttgtatccctaattgtctgttgtg

SEQ ID NO: 171274 - DNA, 25 bp, SARS Virus
ttgtatccctaaatgtctgttgtga

SEQ ID NO: 171275 - DNA, 25 bp, SARS Virus
tgtatccctaatagtctgttgtgat

SEQ ID NO: 171276 - DNA, 25 bp, SARS Virus
gtatccctaattatctgttgtgatt

SEQ ID NO: 171277 - DNA, 25 bp, SARS Virus
tatccctaattgactgttgtgatta

SEQ ID NO: 171278 - DNA, 25 bp, SARS Virus
atccctaattgtatgttgtgattaa

SEQ ID NO: 171279 - DNA, 25 bp, SARS Virus
tccctaattgtcagttgtgattaaa

SEQ ID NO: 171280 - DNA, 25 bp, SARS Virus
ccctaattgtctattgtgattaaac

SEQ ID NO: 171281 - DNA, 25 bp, SARS Virus
cctaattgtctgatgtgattaaaca

SEQ ID NO: 171282 - DNA, 25 bp, SARS Virus
ctaattgtctgtagtgattaaacac

SEQ ID NO: 171283 - DNA, 25 bp, SARS Virus
taattgtctgttatgattaaacaca

SEQ ID NO: 171284 - DNA, 25 bp, SARS Virus
aattgtctgttgagattaaacacac

SEQ ID NO: 171285 - DNA, 25 bp, SARS Virus
attgtctgttgtaattaaacacact

SEQ ID NO: 171286 - DNA, 25 bp, SARS Virus
ttgtctgttgtgattaaacacacta

SEQ ID NO: 171287 - DNA, 25 bp, SARS Virus
tgtctgttgtgaataaacacactac

SEQ ID NO: 171288 - DNA, 25 bp, SARS Virus
gtctgttgtgataaaacacactaca

SEQ ID NO: 171289 - DNA, 25 bp, SARS Virus
tctgttgtgattaaacacactacaa

SEQ ID NO: 171290 - DNA, 25 bp, SARS Virus
ctgttgtgattaaacacactacaac

SEQ ID NO: 171291 - DNA, 25 bp, SARS Virus
tgttgtgattaaacacactacaact

SEQ ID NO: 171292 - DNA, 25 bp, SARS Virus
gttgtgattaaaaacactacaactt

SEQ ID NO: 171293 - DNA, 25 bp, SARS Virus
ttgtgattaaacacactacaacttt

SEQ ID NO: 171294 - DNA, 25 bp, SARS Virus
tgtgattaaacaaactacaacttta

SEQ ID NO: 171295 - DNA, 25 bp, SARS Virus
gtgattaaacacactacaactttac

SEQ ID NO: 171296 - DNA, 25 bp, SARS Virus
tgattaaacacaatacaactttact

SEQ ID NO: 171297 - DNA, 25 bp, SARS Virus
gattaaacacacaacaactttactg

SEQ ID NO: 171298 - DNA, 25 bp, SARS Virus
attaaacacactacaactttactgt

SEQ ID NO: 171299 - DNA, 25 bp, SARS Virus
ttaaacacactaaaactttactgta

SEQ ID NO: 171300 - DNA, 25 bp, SARS Virus
taaacacactacaactttactgtac

SEQ ID NO: 171301 - DNA, 25 bp, SARS Virus
aaacacactacaactttactgtacc

SEQ ID NO: 171302 - DNA, 25 bp, SARS Virus
aacacactacaaatttactgtacca

SEQ ID NO: 171303 - DNA, 25 bp, SARS Virus
acacactacaacattactgtaccag

SEQ ID NO: 171304 - DNA, 25 bp, SARS Virus
cacactacaactatactgtaccagt

SEQ ID NO: 171305 - DNA, 25 bp, SARS Virus
acactacaacttaactgtaccagta

SEQ ID NO: 171306 - DNA, 25 bp, SARS Virus
cactacaactttactgtaccagtat

SEQ ID NO: 171307 - DNA, 25 bp, SARS Virus
actacaactttaatgtaccagtatc

SEQ ID NO: 171308 - DNA, 25 bp, SARS Virus
ctacaactttacagtaccagtatcg

SEQ ID NO: 171309 - DNA, 25 bp, SARS Virus
tacaactttactataccagtatcgt

SEQ ID NO: 171310 - DNA, 25 bp, SARS Virus
acaactttactgaaccagtatcgtc

SEQ ID NO: 171311 - DNA, 25 bp, SARS Virus
caactttactgtaccagtatcgtcg

SEQ ID NO: 171312 - DNA, 25 bp, SARS Virus
aactttactgtaacagtatcgtcgt

SEQ ID NO: 171313 - DNA, 25 bp, SARS Virus
actttactgtacaagtatcgtcgtg

SEQ ID NO: 171314 - DNA, 25 bp, SARS Virus
ctttactgtaccagtatcgtcgtga

SEQ ID NO: 171315 - DNA, 25 bp, SARS Virus
tttactgtaccaatatcgtcgtgaa

SEQ ID NO: 171316 - DNA, 25 bp, SARS Virus
ttactgtaccagaatcgtcgtgaac

SEQ ID NO: 171317 - DNA, 25 bp, SARS Virus
tactgtaccagtatcgtcgtgaacg

SEQ ID NO: 171318 - DNA, 25 bp, SARS Virus
actgtaccagtaacgtcgtgaacgt

SEQ ID NO: 171319 - DNA, 25 bp, SARS Virus
ctgtaccagtatagtcgtgaacgtt

SEQ ID NO: 171320 - DNA, 25 bp, SARS Virus
tgtaccagtatcatcgtgaacgttg

SEQ ID NO: 171321 - DNA, 25 bp, SARS Virus
aggttagacatgcaatgataaaaat

SEQ ID NO: 171322 - DNA, 25 bp, SARS Virus
ggttagacatgacatgataaaaatc

SEQ ID NO: 171323 - DNA, 25 bp, SARS Virus
gttagacatgaactgataaaaatca

SEQ ID NO: 171324 - DNA, 25 bp, SARS Virus
ttagacatgaaacgataaaaatcaa

SEQ ID NO: 171325 - DNA, 25 bp, SARS Virus
tagacatgaaatcataaaaatcaat

SEQ ID NO: 171326 - DNA, 25 bp, SARS Virus
agacatgaaatgctaaaaatcaatg

SEQ ID NO: 171327 - DNA, 25 bp, SARS Virus
gacatgaaatgacaaaaatcaatgt

SEQ ID NO: 171328 - DNA, 25 bp, SARS Virus
acatgaaatgatcaaaatcaatgtg

SEQ ID NO: 171329 - DNA, 25 bp, SARS Virus
catgaaatgatacaaatcaatgtgc

SEQ ID NO: 171330 - DNA, 25 bp, SARS Virus
atgaaatgataacaatcaatgtgcc

SEQ ID NO: 171331 - DNA, 25 bp, SARS Virus
tgaaatgataaacatcaatgtgcca

SEQ ID NO: 171332 - DNA, 25 bp, SARS Virus
gaaatgataaaactcaatgtgccat

SEQ ID NO: 171333 - DNA, 25 bp, SARS Virus
aaatgataaaaaccaatgtgccatt

SEQ ID NO: 171334 - DNA, 25 bp, SARS Virus
aatgataaaaatcaatgtgccattg

SEQ ID NO: 171335 - DNA, 25 bp, SARS Virus
atgataaaaatccatgtgccattgg

SEQ ID NO: 171336 - DNA, 25 bp, SARS Virus
tgataaaaatcactgtgccattggt

SEQ ID NO: 171337 - DNA, 25 bp, SARS Virus
gataaaaatcaacgtgccattggtc

SEQ ID NO: 171338 - DNA, 25 bp, SARS Virus
ataaaaatcaatctgccattggtca

SEQ ID NO: 171339 - DNA, 25 bp, SARS Virus
taaaaatcaatgcgccattggtcat

SEQ ID NO: 171340 - DNA, 25 bp, SARS Virus
aaaaatcaatgtcccattggtcatt

SEQ ID NO: 171341 - DNA, 25 bp, SARS Virus
aaaatcaatgtgccattggtcattt

SEQ ID NO: 171342 - DNA, 25 bp, SARS Virus
aaatcaatgtgccattggtcatttc

SEQ ID NO: 171343 - DNA, 25 bp, SARS Virus
aatcaatgtgcccttggtcatttct

SEQ ID NO: 171344 - DNA, 25 bp, SARS Virus
atcaatgtgccactggtcatttctg

SEQ ID NO: 171345 - DNA, 25 bp, SARS Virus
tcaatgtgccatcggtcatttctgt

SEQ ID NO: 171346 - DNA, 25 bp, SARS Virus
caatgtgccattcgtcatttctgta

SEQ ID NO: 171347 - DNA, 25 bp, SARS Virus
aatgtgccattgctcatttctgtat

SEQ ID NO: 171348 - DNA, 25 bp, SARS Virus
atgtgccattggccatttctgtatc

SEQ ID NO: 171349 - DNA, 25 bp, SARS Virus
tgtgccattggtcatttctgtatca

SEQ ID NO: 171350 - DNA, 25 bp, SARS Virus
gtgccattggtcctttctgtatcaa

SEQ ID NO: 171351 - DNA, 25 bp, SARS Virus
tgccattggtcacttctgtatcaaa

SEQ ID NO: 171352 - DNA, 25 bp, SARS Virus
gccattggtcatctctgtatcaaag

SEQ ID NO: 171353 - DNA, 25 bp, SARS Virus
ccattggtcattcctgtatcaaaga

SEQ ID NO: 171354 - DNA, 25 bp, SARS Virus
cattggtcatttctgtatcaaagac

SEQ ID NO: 171355 - DNA, 25 bp, SARS Virus
attggtcatttccgtatcaaagaca

SEQ ID NO: 171356 - DNA, 25 bp, SARS Virus
ttggtcatttctctatcaaagacaa

SEQ ID NO: 171357 - DNA, 25 bp, SARS Virus
tggtcatttctgcatcaaagacaag

SEQ ID NO: 171358 - DNA, 25 bp, SARS Virus
ggtcatttctgtctcaaagacaagt

SEQ ID NO: 171359 - DNA, 25 bp, SARS Virus
gtcatttctgtaccaaagacaagtt

SEQ ID NO: 171360 - DNA, 25 bp, SARS Virus
tcatttctgtatcaaagacaagtta

SEQ ID NO: 171361 - DNA, 25 bp, SARS Virus
catttctgtatccaagacaagttac

SEQ ID NO: 171362 - DNA, 25 bp, SARS Virus
atttctgtatcacagacaagttacc

SEQ ID NO: 171363 - DNA, 25 bp, SARS Virus
tttctgtatcaacgacaagttacca

SEQ ID NO: 171364 - DNA, 25 bp, SARS Virus
ttctgtatcaaacacaagttaccac

SEQ ID NO: 171365 - DNA, 25 bp, SARS Virus
tctgtatcaaagccaagttaccacc

SEQ ID NO: 171366 - DNA, 25 bp, SARS Virus
ctgtatcaaagacaagttaccacca

SEQ ID NO: 171367 - DNA, 25 bp, SARS Virus
tgtatcaaagaccagttaccaccag

SEQ ID NO: 171368 - DNA, 25 bp, SARS Virus
gtatcaaagacacgttaccaccaga

SEQ ID NO: 171369 - DNA, 25 bp, SARS Virus
tatcaaagacaacttaccaccagat

SEQ ID NO: 171370 - DNA, 25 bp, SARS Virus
atcaaagacaagctaccaccagatc

SEQ ID NO: 171371 - DNA, 25 bp, SARS Virus
tcaaagacaagtcaccaccagatcc

SEQ ID NO: 171372 - DNA, 25 bp, SARS Virus
caaagacaagttcccaccagatcca

SEQ ID NO: 171373 - DNA, 25 bp, SARS Virus
aaagacaagttaccaccagatccaa

SEQ ID NO: 171374 - DNA, 25 bp, SARS Virus
aagacaagttaccaccagatccaaa

SEQ ID NO: 171375 - DNA, 25 bp, SARS Virus
agacaagttacccccagatccaaaa

SEQ ID NO: 171376 - DNA, 25 bp, SARS Virus
gacaagttaccaccagatccaaaag

SEQ ID NO: 171377 - DNA, 25 bp, SARS Virus
acaagttaccaccagatccaaaagg

SEQ ID NO: 171378 - DNA, 25 bp, SARS Virus
caagttaccacccgatccaaaaggt

SEQ ID NO: 171379 - DNA, 25 bp, SARS Virus
aagttaccaccacatccaaaaggtt

SEQ ID NO: 171380 - DNA, 25 bp, SARS Virus
agttaccaccagctccaaaaggttg

SEQ ID NO: 171381 - DNA, 25 bp, SARS Virus
gttaccaccagacccaaaaggttgg

SEQ ID NO: 171382 - DNA, 25 bp, SARS Virus
ttaccaccagatccaaaaggttgga

SEQ ID NO: 171383 - DNA, 25 bp, SARS Virus
taccaccagatccaaaaggttggag

SEQ ID NO: 171384 - DNA, 25 bp, SARS Virus
accaccagatcccaaaggttggagg

SEQ ID NO: 171385 - DNA, 25 bp, SARS Virus
ccaccagatccacaaggttggaggg

SEQ ID NO: 171386 - DNA, 25 bp, SARS Virus
caccagatccaacaggttggagggt

SEQ ID NO: 171387 - DNA, 25 bp, SARS Virus
accagatccaaacggttggagggta

SEQ ID NO: 171388 - DNA, 25 bp, SARS Virus
ccagatccaaaacgttggagggtac

SEQ ID NO: 171389 - DNA, 25 bp, SARS Virus
cagatccaaaagcttggagggtact

SEQ ID NO: 171390 - DNA, 25 bp, SARS Virus
agatccaaaaggctggagggtactt

SEQ ID NO: 171391 - DNA, 25 bp, SARS Virus
gatccaaaaggtcggagggtacttt

SEQ ID NO: 171392 - DNA, 25 bp, SARS Virus
atccaaaaggttcgagggtactttc

SEQ ID NO: 171393 - DNA, 25 bp, SARS Virus
tccaaaaggttgcagggtactttct

SEQ ID NO: 171394 - DNA, 25 bp, SARS Virus
ccaaaaggttggcgggtactttcta

SEQ ID NO: 171395 - DNA, 25 bp, SARS Virus
caaaaggttggacggtactttctac

SEQ ID NO: 171396 - DNA, 25 bp, SARS Virus
aaaaggttggagcgtactttctacg

SEQ ID NO: 171397 - DNA, 25 bp, SARS Virus
aaaggttggaggctactttctacgt

SEQ ID NO: 171398 - DNA, 25 bp, SARS Virus
aaggttggagggcactttctacgtt

SEQ ID NO: 171399 - DNA, 25 bp, SARS Virus
aggttggagggtcctttctacgtta

SEQ ID NO: 171400 - DNA, 25 bp, SARS Virus
ggttggagggtactttctacgttaa

SEQ ID NO: 171401 - DNA, 25 bp, SARS Virus
gttggagggtaccttctacgttaag

SEQ ID NO: 171402 - DNA, 25 bp, SARS Virus
ttggagggtactctctacgttaaga

SEQ ID NO: 171403 - DNA, 25 bp, SARS Virus
tggagggtacttcctacgttaagag

SEQ ID NO: 171404 - DNA, 25 bp, SARS Virus
ggagggtactttctacgttaagaga

SEQ ID NO: 171405 - DNA, 25 bp, SARS Virus
gagggtactttccacgttaagagac

SEQ ID NO: 171406 - DNA, 25 bp, SARS Virus
agggtactttctccgttaagagaca

SEQ ID NO: 171407 - DNA, 25 bp, SARS Virus
gggtactttctacgttaagagacag

SEQ ID NO: 171408 - DNA, 25 bp, SARS Virus
ggtactttctaccttaagagacagt

SEQ ID NO: 171409 - DNA, 25 bp, SARS Virus
gtactttctacgctaagagacagtc

SEQ ID NO: 171410 - DNA, 25 bp, SARS Virus
tactttctacgtcaagagacagtct

SEQ ID NO: 171411 - DNA, 25 bp, SARS Virus
actttctacgttcagagacagtctc

SEQ ID NO: 171412 - DNA, 25 bp, SARS Virus
ctttctacgttacgagacagtctct

SEQ ID NO: 171413 - DNA, 25 bp, SARS Virus
tttctacgttaacagacagtctctc

SEQ ID NO: 171414 - DNA, 25 bp, SARS Virus
ttctacgttaagcgacagtctctca

SEQ ID NO: 171415 - DNA, 25 bp, SARS Virus
tctacgttaagacacagtctctcat

SEQ ID NO: 171416 - DNA, 25 bp, SARS Virus
ctacgttaagagccagtctctcatg

SEQ ID NO: 171417 - DNA, 25 bp, SARS Virus
tacgttaagagacagtctctcatga

SEQ ID NO: 171418 - DNA, 25 bp, SARS Virus
acgttaagagaccgtctctcatgaa

SEQ ID NO: 171419 - DNA, 25 bp, SARS Virus
cgttaagagacactctctcatgaag

SEQ ID NO: 171420 - DNA, 25 bp, SARS Virus
gttaagagacagcctctcatgaagc

SEQ ID NO: 171421 - DNA, 25 bp, SARS Virus
ttaagagacagtctctcatgaagcg

SEQ ID NO: 171422 - DNA, 25 bp, SARS Virus
taagagacagtccctcatgaagcgc

SEQ ID NO: 171423 - DNA, 25 bp, SARS Virus
aagagacagtctctcatgaagcgca

SEQ ID NO: 171424 - DNA, 25 bp, SARS Virus
agagacagtctcccatgaagcgcat

SEQ ID NO: 171425 - DNA, 25 bp, SARS Virus
gagacagtctctcatgaagcgcatg

SEQ ID NO: 171426 - DNA, 25 bp, SARS Virus
agacagtctctcctgaagcgcatgt

SEQ ID NO: 171427 - DNA, 25 bp, SARS Virus
gacagtctctcacgaagcgcatgtc

SEQ ID NO: 171428 - DNA, 25 bp, SARS Virus
acagtctctcatcaagcgcatgtca

SEQ ID NO: 171429 - DNA, 25 bp, SARS Virus
cagtctctcatgcagcgcatgtcac

SEQ ID NO: 171430 - DNA, 25 bp, SARS Virus
agtctctcatgacgcgcatgtcacc

SEQ ID NO: 171431 - DNA, 25 bp, SARS Virus
gtctctcatgaaccgcatgtcaccg

SEQ ID NO: 171432 - DNA, 25 bp, SARS Virus
tctctcatgaagcgcatgtcaccgt

SEQ ID NO: 171433 - DNA, 25 bp, SARS Virus
ctctcatgaagcccatgtcaccgtt

SEQ ID NO: 171434 - DNA, 25 bp, SARS Virus
tctcatgaagcgcatgtcaccgtta

SEQ ID NO: 171435 - DNA, 25 bp, SARS Virus
ctcatgaagcgcctgtcaccgttat

SEQ ID NO: 171436 - DNA, 25 bp, SARS Virus
tcatgaagcgcacgtcaccgttatg

SEQ ID NO: 171437 - DNA, 25 bp, SARS Virus
catgaagcgcatctcaccgttatgg

SEQ ID NO: 171438 - DNA, 25 bp, SARS Virus
atgaagcgcatgccaccgttatggt

SEQ ID NO: 171439 - DNA, 25 bp, SARS Virus
tgaagcgcatgtcaccgttatggta

SEQ ID NO: 171440 - DNA, 25 bp, SARS Virus
gaagcgcatgtccccgttatggtat

SEQ ID NO: 171441 - DNA, 25 bp, SARS Virus
aagcgcatgtcaccgttatggtata

SEQ ID NO: 171442 - DNA, 25 bp, SARS Virus
agcgcatgtcaccgttatggtatac

SEQ ID NO: 171443 - DNA, 25 bp, SARS Virus
gcgcatgtcacccttatggtatact

SEQ ID NO: 171444 - DNA, 25 bp, SARS Virus
cgcatgtcaccgctatggtatactg

SEQ ID NO: 171445 - DNA, 25 bp, SARS Virus
gcatgtcaccgtcatggtatactgt

SEQ ID NO: 171446 - DNA, 25 bp, SARS Virus
catgtcaccgttctggtatactgtc

SEQ ID NO: 171447 - DNA, 25 bp, SARS Virus
atgtcaccgttacggtatactgtcg

SEQ ID NO: 171448 - DNA, 25 bp, SARS Virus
tgtcaccgttatcgtatactgtcga

SEQ ID NO: 171449 - DNA, 25 bp, SARS Virus
gtcaccgttatgctatactgtcgaa

SEQ ID NO: 171450 - DNA, 25 bp, SARS Virus
tcaccgttatggcatactgtcgaat

SEQ ID NO: 171451 - DNA, 25 bp, SARS Virus
caccgttatggtctactgtcgaatt

SEQ ID NO: 171452 - DNA, 25 bp, SARS Virus
accgttatggtacactgtcgaattt

SEQ ID NO: 171453 - DNA, 25 bp, SARS Virus
ccgttatggtatcctgtcgaattta

SEQ ID NO: 171454 - DNA, 25 bp, SARS Virus
cgttatggtatactgtcgaatttac

SEQ ID NO: 171455 - DNA, 25 bp, SARS Virus
gttatggtataccgtcgaatttaca

SEQ ID NO: 171456 - DNA, 25 bp, SARS Virus
ttatggtatactctcgaatttacaa

SEQ ID NO: 171457 - DNA, 25 bp, SARS Virus
tatggtatactgccgaatttacaaa

SEQ ID NO: 171458 - DNA, 25 bp, SARS Virus
atggtatactgtcgaatttacaaag

SEQ ID NO: 171459 - DNA, 25 bp, SARS Virus
tggtatactgtccaatttacaaagg

SEQ ID NO: 171460 - DNA, 25 bp, SARS Virus
ggtatactgtcgcatttacaaagga

SEQ ID NO: 171461 - DNA, 25 bp, SARS Virus
gtatactgtcgactttacaaaggag

SEQ ID NO: 171462 - DNA, 25 bp, SARS Virus
tatactgtcgaacttacaaaggagt

SEQ ID NO: 171463 - DNA, 25 bp, SARS Virus
atactgtcgaatctacaaaggagtc

SEQ ID NO: 171464 - DNA, 25 bp, SARS Virus
tactgtcgaattcacaaaggagtca

SEQ ID NO: 171465 - DNA, 25 bp, SARS Virus
actgtcgaatttccaaaggagtcac

SEQ ID NO: 171466 - DNA, 25 bp, SARS Virus
ctgtcgaatttacaaaggagtcacc

SEQ ID NO: 171467 - DNA, 25 bp, SARS Virus
tgtcgaatttaccaaggagtcaccg

SEQ ID NO: 171468 - DNA, 25 bp, SARS Virus
gtcgaatttacacaggagtcaccga

SEQ ID NO: 171469 - DNA, 25 bp, SARS Virus
tcgaatttacaacggagtcaccgaa

SEQ ID NO: 171470 - DNA, 25 bp, SARS Virus
cgaatttacaaacgagtcaccgaaa

SEQ ID NO: 171471 - DNA, 25 bp, SARS Virus
gaatttacaaagcagtcaccgaaac

SEQ ID NO: 171472 - DNA, 25 bp, SARS Virus
aatttacaaaggcgtcaccgaaact

SEQ ID NO: 171473 - DNA, 25 bp, SARS Virus
atttacaaaggactcaccgaaactc

SEQ ID NO: 171474 - DNA, 25 bp, SARS Virus
tttacaaaggagccaccgaaactcg

SEQ ID NO: 171475 - DNA, 25 bp, SARS Virus
ttacaaaggagtcaccgaaactcgc

SEQ ID NO: 171476 - DNA, 25 bp, SARS Virus
tacaaaggagtccccgaaactcgca

SEQ ID NO: 171477 - DNA, 25 bp, SARS Virus
acaaaggagtcaccgaaactcgcaa

SEQ ID NO: 171478 - DNA, 25 bp, SARS Virus
caaaggagtcaccgaaactcgcaaa

SEQ ID NO: 171479 - DNA, 25 bp, SARS Virus
aaaggagtcacccaaactcgcaaag

SEQ ID NO: 171480 - DNA, 25 bp, SARS Virus
aaggagtcaccgcaactcgcaaaga

SEQ ID NO: 171481 - DNA, 25 bp, SARS Virus
aggagtcaccgacactcgcaaagac

SEQ ID NO: 171482 - DNA, 25 bp, SARS Virus
ggagtcaccgaacctcgcaaagacg

SEQ ID NO: 171483 - DNA, 25 bp, SARS Virus
gagtcaccgaaactcgcaaagacga

SEQ ID NO: 171484 - DNA, 25 bp, SARS Virus
agtcaccgaaacccgcaaagacgac

SEQ ID NO: 171485 - DNA, 25 bp, SARS Virus
gtcaccgaaactcgcaaagacgacg

SEQ ID NO: 171486 - DNA, 25 bp, SARS Virus
tcaccgaaactcccaaagacgacgc

SEQ ID NO: 171487 - DNA, 25 bp, SARS Virus
caccgaaactcgcaaagacgacgct

SEQ ID NO: 171488 - DNA, 25 bp, SARS Virus
accgaaactcgccaagacgacgctt

SEQ ID NO: 171489 - DNA, 25 bp, SARS Virus
ccgaaactcgcacagacgacgcttt

SEQ ID NO: 171490 - DNA, 25 bp, SARS Virus
cgaaactcgcaacgacgacgctttt

SEQ ID NO: 171491 - DNA, 25 bp, SARS Virus
gaaactcgcaaacacgacgcttttc

SEQ ID NO: 171492 - DNA, 25 bp, SARS Virus
aaactcgcaaagccgacgcttttcg

SEQ ID NO: 171493 - DNA, 25 bp, SARS Virus
aactcgcaaagacgacgcttttcga

SEQ ID NO: 171494 - DNA, 25 bp, SARS Virus
actcgcaaagaccacgcttttcgaa

SEQ ID NO: 171495 - DNA, 25 bp, SARS Virus
ctcgcaaagacgccgcttttcgaac

SEQ ID NO: 171496 - DNA, 25 bp, SARS Virus
tcgcaaagacgacgcttttcgaact

SEQ ID NO: 171497 - DNA, 25 bp, SARS Virus
cgcaaagacgacccttttcgaactc

SEQ ID NO: 171498 - DNA, 25 bp, SARS Virus
gcaaagacgacgcttttcgaactca

SEQ ID NO: 171499 - DNA, 25 bp, SARS Virus
caaagacgacgcctttcgaactcag

SEQ ID NO: 171500 - DNA, 25 bp, SARS Virus
aaagacgacgctcttcgaactcaga

SEQ ID NO: 171501 - DNA, 25 bp, SARS Virus
aagacgacgcttctcgaactcagag

SEQ ID NO: 171502 - DNA, 25 bp, SARS Virus
agacgacgctttccgaactcagaga

SEQ ID NO: 171503 - DNA, 25 bp, SARS Virus
gacgacgcttttcgaactcagagag

SEQ ID NO: 171504 - DNA, 25 bp, SARS Virus
acgacgcttttccaactcagagagt

SEQ ID NO: 171505 - DNA, 25 bp, SARS Virus
cgacgcttttcgcactcagagagtc

SEQ ID NO: 171506 - DNA, 25 bp, SARS Virus
gacgcttttcgacctcagagagtca

SEQ ID NO: 171507 - DNA, 25 bp, SARS Virus
acgcttttcgaactcagagagtcat

SEQ ID NO: 171508 - DNA, 25 bp, SARS Virus
cgcttttcgaacccagagagtcatg

SEQ ID NO: 171509 - DNA, 25 bp, SARS Virus
gcttttcgaactcagagagtcatgt

SEQ ID NO: 171510 - DNA, 25 bp, SARS Virus
cttttcgaactccgagagtcatgtt

SEQ ID NO: 171511 - DNA, 25 bp, SARS Virus
ttttcgaactcacagagtcatgttc

SEQ ID NO: 171512 - DNA, 25 bp, SARS Virus
tttcgaactcagcgagtcatgttca

SEQ ID NO: 171513 - DNA, 25 bp, SARS Virus
ttcgaactcagacagtcatgttcac

SEQ ID NO: 171514 - DNA, 25 bp, SARS Virus
tcgaactcagagcgtcatgttcaca

SEQ ID NO: 171515 - DNA, 25 bp, SARS Virus
cgaactcagagactcatgttcacaa

SEQ ID NO: 171516 - DNA, 25 bp, SARS Virus
gaactcagagagccatgttcacaac

SEQ ID NO: 171517 - DNA, 25 bp, SARS Virus
aactcagagagtcatgttcacaacc

SEQ ID NO: 171518 - DNA, 25 bp, SARS Virus
actcagagagtcctgttcacaaccg

SEQ ID NO: 171519 - DNA, 25 bp, SARS Virus
ctcagagagtcacgttcacaaccgt

SEQ ID NO: 171520 - DNA, 25 bp, SARS Virus
tcagagagtcatcttcacaaccgtt

SEQ ID NO: 171521 - DNA, 25 bp, SARS Virus
cagagagtcatgctcacaaccgttc

SEQ ID NO: 171522 - DNA, 25 bp, SARS Virus
agagagtcatgtccacaaccgttca

SEQ ID NO: 171523 - DNA, 25 bp, SARS Virus
gagagtcatgttcacaaccgttcat

SEQ ID NO: 171524 - DNA, 25 bp, SARS Virus
agagtcatgttcccaaccgttcata

SEQ ID NO: 171525 - DNA, 25 bp, SARS Virus
gagtcatgttcacaaccgttcatac

SEQ ID NO: 171526 - DNA, 25 bp, SARS Virus
agtcatgttcaccaccgttcataca

SEQ ID NO: 171527 - DNA, 25 bp, SARS Virus
gtcatgttcacacccgttcatacat

SEQ ID NO: 171528 - DNA, 25 bp, SARS Virus
tcatgttcacaaccgttcatacatt

SEQ ID NO: 171529 - DNA, 25 bp, SARS Virus
catgttcacaaccgttcatacatta

SEQ ID NO: 171530 - DNA, 25 bp, SARS Virus
atgttcacaacccttcatacattag

SEQ ID NO: 171531 - DNA, 25 bp, SARS Virus
tgttcacaaccgctcatacattagc

SEQ ID NO: 171532 - DNA, 25 bp, SARS Virus
gttcacaaccgtccatacattagcg

SEQ ID NO: 171533 - DNA, 25 bp, SARS Virus
ttcacaaccgttcatacattagcgg

SEQ ID NO: 171534 - DNA, 25 bp, SARS Virus
tcacaaccgttcctacattagcggt

SEQ ID NO: 171535 - DNA, 25 bp, SARS Virus
cacaaccgttcacacattagcggtc

SEQ ID NO: 171536 - DNA, 25 bp, SARS Virus
acaaccgttcatccattagcggtcg

SEQ ID NO: 171537 - DNA, 25 bp, SARS Virus
caaccgttcatacattagcggtcgt

SEQ ID NO: 171538 - DNA, 25 bp, SARS Virus
aaccgttcataccttagcggtcgta

SEQ ID NO: 171539 - DNA, 25 bp, SARS Virus
accgttcatacactagcggtcgtaa

SEQ ID NO: 171540 - DNA, 25 bp, SARS Virus
ccgttcatacatcagcggtcgtaat

SEQ ID NO: 171541 - DNA, 25 bp, SARS Virus
cgttcatacattcgcggtcgtaatc

SEQ ID NO: 171542 - DNA, 25 bp, SARS Virus
gttcatacattaccggtcgtaatca

SEQ ID NO: 171543 - DNA, 25 bp, SARS Virus
ttcatacattagcggtcgtaatcag

SEQ ID NO: 171544 - DNA, 25 bp, SARS Virus
tcatacattagccgtcgtaatcagg

SEQ ID NO: 171545 - DNA, 25 bp, SARS Virus
catacattagcgctcgtaatcaggt

SEQ ID NO: 171546 - DNA, 25 bp, SARS Virus
atacattagcggccgtaatcaggtt

SEQ ID NO: 171547 - DNA, 25 bp, SARS Virus
tacattagcggtcgtaatcaggtta

SEQ ID NO: 171548 - DNA, 25 bp, SARS Virus
acattagcggtcctaatcaggttag

SEQ ID NO: 171549 - DNA, 25 bp, SARS Virus
cattagcggtcgcaatcaggttagt

SEQ ID NO: 171550 - DNA, 25 bp, SARS Virus
attagcggtcgtcatcaggttagtg

SEQ ID NO: 171551 - DNA, 25 bp, SARS Virus
ttagcggtcgtactcaggttagtgt

SEQ ID NO: 171552 - DNA, 25 bp, SARS Virus
tagcggtcgtaaccaggttagtgta

SEQ ID NO: 171553 - DNA, 25 bp, SARS Virus
agcggtcgtaatcaggttagtgtac

SEQ ID NO: 171554 - DNA, 25 bp, SARS Virus
gcggtcgtaatccggttagtgtaca

SEQ ID NO: 171555 - DNA, 25 bp, SARS Virus
cggtcgtaatcacgttagtgtacaa

SEQ ID NO: 171556 - DNA, 25 bp, SARS Virus
ggtcgtaatcagcttagtgtacaac

SEQ ID NO: 171557 - DNA, 25 bp, SARS Virus
gtcgtaatcaggctagtgtacaacg

SEQ ID NO: 171558 - DNA, 25 bp, SARS Virus
tcgtaatcaggtcagtgtacaacga

SEQ ID NO: 171559 - DNA, 25 bp, SARS Virus
cgtaatcaggttcgtgtacaacgat

SEQ ID NO: 171560 - DNA, 25 bp, SARS Virus
gtaatcaggttactgtacaacgata

SEQ ID NO: 171561 - DNA, 25 bp, SARS Virus
taatcaggttagcgtacaacgatag

SEQ ID NO: 171562 - DNA, 25 bp, SARS Virus
aatcaggttagtctacaacgatagc

SEQ ID NO: 171563 - DNA, 25 bp, SARS Virus
atcaggttagtgcacaacgatagcg

SEQ ID NO: 171564 - DNA, 25 bp, SARS Virus
tcaggttagtgtccaacgatagcgt

SEQ ID NO: 171565 - DNA, 25 bp, SARS Virus
caggttagtgtacaacgatagcgta

SEQ ID NO: 171566 - DNA, 25 bp, SARS Virus
aggttagtgtaccacgatagcgtaa

SEQ ID NO: 171567 - DNA, 25 bp, SARS Virus
ggttagtgtacaccgatagcgtaac

SEQ ID NO: 171568 - DNA, 25 bp, SARS Virus
gttagtgtacaacgatagcgtaact

SEQ ID NO: 171569 - DNA, 25 bp, SARS Virus
ttagtgtacaaccatagcgtaactt

SEQ ID NO: 171570 - DNA, 25 bp, SARS Virus
tagtgtacaacgctagcgtaacttc

SEQ ID NO: 171571 - DNA, 25 bp, SARS Virus
agtgtacaacgacagcgtaacttca

SEQ ID NO: 171572 - DNA, 25 bp, SARS Virus
gtgtacaacgatcgcgtaacttcag

SEQ ID NO: 171573 - DNA, 25 bp, SARS Virus
tgtacaacgataccgtaacttcagt

SEQ ID NO: 171574 - DNA, 25 bp, SARS Virus
gtacaacgatagcgtaacttcagtc

SEQ ID NO: 171575 - DNA, 25 bp, SARS Virus
tacaacgatagcctaacttcagtca

SEQ ID NO: 171576 - DNA, 25 bp, SARS Virus
acaacgatagcgcaacttcagtcac

SEQ ID NO: 171577 - DNA, 25 bp, SARS Virus
caacgatagcgtcacttcagtcact

SEQ ID NO: 171578 - DNA, 25 bp, SARS Virus
aacgatagcgtaccttcagtcactg

SEQ ID NO: 171579 - DNA, 25 bp, SARS Virus
acgatagcgtaacttcagtcactgt

SEQ ID NO: 171580 - DNA, 25 bp, SARS Virus
cgatagcgtaacctcagtcactgta

SEQ ID NO: 171581 - DNA, 25 bp, SARS Virus
gatagcgtaactccagtcactgtaa

SEQ ID NO: 171582 - DNA, 25 bp, SARS Virus
atagcgtaacttcagtcactgtaac

SEQ ID NO: 171583 - DNA, 25 bp, SARS Virus
tagcgtaacttccgtcactgtaaca

SEQ ID NO: 171584 - DNA, 25 bp, SARS Virus
agcgtaacttcactcactgtaacag

SEQ ID NO: 171585 - DNA, 25 bp, SARS Virus
gcgtaacttcagccactgtaacagt

SEQ ID NO: 171586 - DNA, 25 bp, SARS Virus
cgtaacttcagtcactgtaacagtg

SEQ ID NO: 171587 - DNA, 25 bp, SARS Virus
gtaacttcagtccctgtaacagtga

SEQ ID NO: 171588 - DNA, 25 bp, SARS Virus
taacttcagtcactgtaacagtgac

SEQ ID NO: 171589 - DNA, 25 bp, SARS Virus
aacttcagtcaccgtaacagtgacg

SEQ ID NO: 171590 - DNA, 25 bp, SARS Virus
acttcagtcactctaacagtgacgg

SEQ ID NO: 171591 - DNA, 25 bp, SARS Virus
cttcagtcactgcaacagtgacgga

SEQ ID NO: 171592 - DNA, 25 bp, SARS Virus
ttcagtcactgtcacagtgacggat

SEQ ID NO: 171593 - DNA, 25 bp, SARS Virus
tcagtcactgtaccagtgacggatg

SEQ ID NO: 171594 - DNA, 25 bp, SARS Virus
cagtcactgtaacagtgacggatgt

SEQ ID NO: 171595 - DNA, 25 bp, SARS Virus
agtcactgtaaccgtgacggatgtg

SEQ ID NO: 171596 - DNA, 25 bp, SARS Virus
gtcactgtaacactgacggatgtgt

SEQ ID NO: 171597 - DNA, 25 bp, SARS Virus
tcactgtaacagcgacggatgtgta

SEQ ID NO: 171598 - DNA, 25 bp, SARS Virus
cactgtaacagtcacggatgtgtac

SEQ ID NO: 171599 - DNA, 25 bp, SARS Virus
actgtaacagtgccggatgtgtaca

SEQ ID NO: 171600 - DNA, 25 bp, SARS Virus
ctgtaacagtgacggatgtgtacac

SEQ ID NO: 171601 - DNA, 25 bp, SARS Virus
tgtaacagtgaccgatgtgtacaca

SEQ ID NO: 171602 - DNA, 25 bp, SARS Virus
gtaacagtgacgcatgtgtacacaa

SEQ ID NO: 171603 - DNA, 25 bp, SARS Virus
taacagtgacggctgtgtacacaaa

SEQ ID NO: 171604 - DNA, 25 bp, SARS Virus
aacagtgacggacgtgtacacaaaa

SEQ ID NO: 171605 - DNA, 25 bp, SARS Virus
acagtgacggatctgtacacaaaaa

SEQ ID NO: 171606 - DNA, 25 bp, SARS Virus
cagtgacggatgcgtacacaaaaac

SEQ ID NO: 171607 - DNA, 25 bp, SARS Virus
agtgacggatgtctacacaaaaaca

SEQ ID NO: 171608 - DNA, 25 bp, SARS Virus
gtgacggatgtgcacacaaaaacat

SEQ ID NO: 171609 - DNA, 25 bp, SARS Virus
tgacggatgtgtccacaaaaacata

SEQ ID NO: 171610 - DNA, 25 bp, SARS Virus
gacggatgtgtacacaaaaacatat

SEQ ID NO: 171611 - DNA, 25 bp, SARS Virus
acggatgtgtacccaaaaacatatt

SEQ ID NO: 171612 - DNA, 25 bp, SARS Virus
cggatgtgtacacaaaaacatattt

SEQ ID NO: 171613 - DNA, 25 bp, SARS Virus
ggatgtgtacaccaaaacatatttg

SEQ ID NO: 171614 - DNA, 25 bp, SARS Virus
gatgtgtacacacaaacatatttgg

SEQ ID NO: 171615 - DNA, 25 bp, SARS Virus
atgtgtacacaacaacatatttggt

SEQ ID NO: 171616 - DNA, 25 bp, SARS Virus
tgtgtacacaaacacatatttggtt

SEQ ID NO: 171617 - DNA, 25 bp, SARS Virus
gtgtacacaaaaccatatttggttt

SEQ ID NO: 171618 - DNA, 25 bp, SARS Virus
tgtacacaaaaacatatttggtttt

SEQ ID NO: 171619 - DNA, 25 bp, SARS Virus
gtacacaaaaacctatttggttttt

SEQ ID NO: 171620 - DNA, 25 bp, SARS Virus
tacacaaaaacacatttggtttttg

SEQ ID NO: 171621 - DNA, 25 bp, SARS Virus
acacaaaaacatctttggtttttgg

SEQ ID NO: 171622 - DNA, 25 bp, SARS Virus
cacaaaaacatacttggtttttgga

SEQ ID NO: 171623 - DNA, 25 bp, SARS Virus
acaaaaacatatctggtttttggac

SEQ ID NO: 171624 - DNA, 25 bp, SARS Virus
caaaaacatattcggtttttggact

SEQ ID NO: 171625 - DNA, 25 bp, SARS Virus
aaaaacatatttcgtttttggactg

SEQ ID NO: 171626 - DNA, 25 bp, SARS Virus
aaaacatatttgctttttggactgg

SEQ ID NO: 171627 - DNA, 25 bp, SARS Virus
aaacatatttggcttttggactggt

SEQ ID NO: 171628 - DNA, 25 bp, SARS Virus
aacatatttggtctttggactggta

SEQ ID NO: 171629 - DNA, 25 bp, SARS Virus
acatatttggttcttggactggtaa

SEQ ID NO: 171630 - DNA, 25 bp, SARS Virus
catatttggtttctggactggtaat

SEQ ID NO: 171631 - DNA, 25 bp, SARS Virus
atatttggttttcggactggtaatc

SEQ ID NO: 171632 - DNA, 25 bp, SARS Virus
tatttggtttttcgactggtaatcg

SEQ ID NO: 171633 - DNA, 25 bp, SARS Virus
atttggtttttgcactggtaatcgt

SEQ ID NO: 171634 - DNA, 25 bp, SARS Virus
tttggtttttggcctggtaatcgtg

SEQ ID NO: 171635 - DNA, 25 bp, SARS Virus
ttggtttttggactggtaatcgtgt

SEQ ID NO: 171636 - DNA, 25 bp, SARS Virus
tggtttttggaccggtaatcgtgta

SEQ ID NO: 171637 - DNA, 25 bp, SARS Virus
ggtttttggactcgtaatcgtgtat

SEQ ID NO: 171638 - DNA, 25 bp, SARS Virus
gtttttggactgctaatcgtgtatt

SEQ ID NO: 171639 - DNA, 25 bp, SARS Virus
tttttggactggcaatcgtgtatta

SEQ ID NO: 171640 - DNA, 25 bp, SARS Virus
ttttggactggtcatcgtgtattac

SEQ ID NO: 171641 - DNA, 25 bp, SARS Virus
tttggactggtactcgtgtattacc

SEQ ID NO: 171642 - DNA, 25 bp, SARS Virus
ttggactggtaaccgtgtattacct

SEQ ID NO: 171643 - DNA, 25 bp, SARS Virus
tggactggtaatcgtgtattacctt

SEQ ID NO: 171644 - DNA, 25 bp, SARS Virus
ggactggtaatcctgtattaccttt

SEQ ID NO: 171645 - DNA, 25 bp, SARS Virus
gactggtaatcgcgtattacctttt

SEQ ID NO: 171646 - DNA, 25 bp, SARS Virus
actggtaatcgtctattaccttttg

SEQ ID NO: 171647 - DNA, 25 bp, SARS Virus
ctggtaatcgtgcattaccttttga

SEQ ID NO: 171648 - DNA, 25 bp, SARS Virus
tggtaatcgtgtcttaccttttgat

SEQ ID NO: 171649 - DNA, 25 bp, SARS Virus
ggtaatcgtgtactaccttttgatt

SEQ ID NO: 171650 - DNA, 25 bp, SARS Virus
gtaatcgtgtatcaccttttgatta

SEQ ID NO: 171651 - DNA, 25 bp, SARS Virus
taatcgtgtattcccttttgattac

SEQ ID NO: 171652 - DNA, 25 bp, SARS Virus
aatcgtgtattaccttttgattacc

SEQ ID NO: 171653 - DNA, 25 bp, SARS Virus
atcgtgtattaccttttgattaccc

SEQ ID NO: 171654 - DNA, 25 bp, SARS Virus
tcgtgtattaccctttgattaccct

SEQ ID NO: 171655 - DNA, 25 bp, SARS Virus
cgtgtattacctcttgattaccctc

SEQ ID NO: 171656 - DNA, 25 bp, SARS Virus
gtgtattaccttctgattaccctcc

SEQ ID NO: 171657 - DNA, 25 bp, SARS Virus
tgtattacctttcgattaccctccg

SEQ ID NO: 171658 - DNA, 25 bp, SARS Virus
gtattaccttttcattaccctccga

SEQ ID NO: 171659 - DNA, 25 bp, SARS Virus
tattaccttttgcttaccctccgaa

SEQ ID NO: 171660 - DNA, 25 bp, SARS Virus
attaccttttgactaccctccgaat

SEQ ID NO: 171661 - DNA, 25 bp, SARS Virus
ttaccttttgatcaccctccgaata

SEQ ID NO: 171662 - DNA, 25 bp, SARS Virus
taccttttgattcccctccgaatac

SEQ ID NO: 171663 - DNA, 25 bp, SARS Virus
accttttgattaccctccgaataca

SEQ ID NO: 171664 - DNA, 25 bp, SARS Virus
ccttttgattaccctccgaatacac

SEQ ID NO: 171665 - DNA, 25 bp, SARS Virus
cttttgattaccctccgaatacact

SEQ ID NO: 171666 - DNA, 25 bp, SARS Virus
ttttgattaccccccgaatacactg

SEQ ID NO: 171667 - DNA, 25 bp, SARS Virus
tttgattaccctccgaatacactga

SEQ ID NO: 171668 - DNA, 25 bp, SARS Virus
ttgattaccctccgaatacactgaa

SEQ ID NO: 171669 - DNA, 25 bp, SARS Virus
tgattaccctcccaatacactgaac

SEQ ID NO: 171670 - DNA, 25 bp, SARS Virus
gattaccctccgcatacactgaacg

SEQ ID NO: 171671 - DNA, 25 bp, SARS Virus
attaccctccgactacactgaacgt

SEQ ID NO: 171672 - DNA, 25 bp, SARS Virus
ttaccctccgaacacactgaacgtt

SEQ ID NO: 171673 - DNA, 25 bp, SARS Virus
taccctccgaatccactgaacgtta

SEQ ID NO: 171674 - DNA, 25 bp, SARS Virus
accctccgaatacactgaacgttat

SEQ ID NO: 171675 - DNA, 25 bp, SARS Virus
ccctccgaataccctgaacgttatt

SEQ ID NO: 171676 - DNA, 25 bp, SARS Virus
cctccgaatacactgaacgttatta

SEQ ID NO: 171677 - DNA, 25 bp, SARS Virus
ctccgaatacaccgaacgttattat

SEQ ID NO: 171678 - DNA, 25 bp, SARS Virus
tccgaatacactcaacgttattatc

SEQ ID NO: 171679 - DNA, 25 bp, SARS Virus
ccgaatacactgcacgttattatcg

SEQ ID NO: 171680 - DNA, 25 bp, SARS Virus
cgaatacactgaccgttattatcga

SEQ ID NO: 171681 - DNA, 25 bp, SARS Virus
gaatacactgaacgttattatcgag

SEQ ID NO: 171682 - DNA, 25 bp, SARS Virus
aatacactgaaccttattatcgagt

SEQ ID NO: 171683 - DNA, 25 bp, SARS Virus
atacactgaacgctattatcgagta

SEQ ID NO: 171684 - DNA, 25 bp, SARS Virus
tacactgaacgtcattatcgagtat

SEQ ID NO: 171685 - DNA, 25 bp, SARS Virus
acactgaacgttcttatcgagtatg

SEQ ID NO: 171686 - DNA, 25 bp, SARS Virus
cactgaacgttactatcgagtatgg

SEQ ID NO: 171687 - DNA, 25 bp, SARS Virus
actgaacgttatcatcgagtatgga

SEQ ID NO: 171688 - DNA, 25 bp, SARS Virus
ctgaacgttattctcgagtatggag

SEQ ID NO: 171689 - DNA, 25 bp, SARS Virus
tgaacgttattaccgagtatggagg

SEQ ID NO: 171690 - DNA, 25 bp, SARS Virus
gaacgttattatcgagtatggagga

SEQ ID NO: 171691 - DNA, 25 bp, SARS Virus
aacgttattatccagtatggaggat

SEQ ID NO: 171692 - DNA, 25 bp, SARS Virus
acgttattatcgcgtatggaggatc

SEQ ID NO: 171693 - DNA, 25 bp, SARS Virus
cgttattatcgactatggaggatct

SEQ ID NO: 171694 - DNA, 25 bp, SARS Virus
gttattatcgagcatggaggatcta

SEQ ID NO: 171695 - DNA, 25 bp, SARS Virus
ttattatcgagtctggaggatctat

SEQ ID NO: 171696 - DNA, 25 bp, SARS Virus
tattatcgagtacggaggatctatg

SEQ ID NO: 171697 - DNA, 25 bp, SARS Virus
attatcgagtatcgaggatctatgt

SEQ ID NO: 171698 - DNA, 25 bp, SARS Virus
ttatcgagtatgcaggatctatgtc

SEQ ID NO: 171699 - DNA, 25 bp, SARS Virus
tatcgagtatggcggatctatgtca

SEQ ID NO: 171700 - DNA, 25 bp, SARS Virus
atcgagtatggacgatctatgtcaa

SEQ ID NO: 171701 - DNA, 25 bp, SARS Virus
tcgagtatggagcatctatgtcaac

SEQ ID NO: 171702 - DNA, 25 bp, SARS Virus
cgagtatggaggctctatgtcaaca

SEQ ID NO: 171703 - DNA, 25 bp, SARS Virus
gagtatggaggacctatgtcaacac

SEQ ID NO: 171704 - DNA, 25 bp, SARS Virus
agtatggaggatctatgtcaacaca

SEQ ID NO: 171705 - DNA, 25 bp, SARS Virus
gtatggaggatccatgtcaacacag

SEQ ID NO: 171706 - DNA, 25 bp, SARS Virus
tatggaggatctctgtcaacacagt

SEQ ID NO: 171707 - DNA, 25 bp, SARS Virus
atggaggatctacgtcaacacagtg

SEQ ID NO: 171708 - DNA, 25 bp, SARS Virus
tggaggatctatctcaacacagtgt

SEQ ID NO: 171709 - DNA, 25 bp, SARS Virus
ggaggatctatgccaacacagtgta

SEQ ID NO: 171710 - DNA, 25 bp, SARS Virus
gaggatctatgtcaacacagtgtag

SEQ ID NO: 171711 - DNA, 25 bp, SARS Virus
aggatctatgtccacacagtgtagt

SEQ ID NO: 171712 - DNA, 25 bp, SARS Virus
ggatctatgtcaccacagtgtagtc

SEQ ID NO: 171713 - DNA, 25 bp, SARS Virus
gatctatgtcaacacagtgtagtca

SEQ ID NO: 171714 - DNA, 25 bp, SARS Virus
atctatgtcaacccagtgtagtcac

SEQ ID NO: 171715 - DNA, 25 bp, SARS Virus
tctatgtcaacacagtgtagtcact

SEQ ID NO: 171716 - DNA, 25 bp, SARS Virus
ctatgtcaacaccgtgtagtcactg

SEQ ID NO: 171717 - DNA, 25 bp, SARS Virus
tatgtcaacacactgtagtcactgt

SEQ ID NO: 171718 - DNA, 25 bp, SARS Virus
atgtcaacacagcgtagtcactgta

SEQ ID NO: 171719 - DNA, 25 bp, SARS Virus
tgtcaacacagtctagtcactgtag

SEQ ID NO: 171720 - DNA, 25 bp, SARS Virus
gtcaacacagtgcagtcactgtagt

SEQ ID NO: 171721 - DNA, 25 bp, SARS Virus
tcaacacagtgtcgtcactgtagtg

SEQ ID NO: 171722 - DNA, 25 bp, SARS Virus
caacacagtgtactcactgtagtgt

SEQ ID NO: 171723 - DNA, 25 bp, SARS Virus
aacacagtgtagccactgtagtgtt

SEQ ID NO: 171724 - DNA, 25 bp, SARS Virus
acacagtgtagtcactgtagtgttg

SEQ ID NO: 171725 - DNA, 25 bp, SARS Virus
cacagtgtagtccctgtagtgttgg

SEQ ID NO: 171726 - DNA, 25 bp, SARS Virus
acagtgtagtcactgtagtgttgga

SEQ ID NO: 171727 - DNA, 25 bp, SARS Virus
cagtgtagtcaccgtagtgttggac

SEQ ID NO: 171728 - DNA, 25 bp, SARS Virus
agtgtagtcactctagtgttggacc

SEQ ID NO: 171729 - DNA, 25 bp, SARS Virus
gtgtagtcactgcagtgttggaccc

SEQ ID NO: 171730 - DNA, 25 bp, SARS Virus
tgtagtcactgtcgtgttggacccc

SEQ ID NO: 171731 - DNA, 25 bp, SARS Virus
gtagtcactgtactgttggaccccg

SEQ ID NO: 171732 - DNA, 25 bp, SARS Virus
tagtcactgtagcgttggaccccgt

SEQ ID NO: 171733 - DNA, 25 bp, SARS Virus
agtcactgtagtcttggaccccgta

SEQ ID NO: 171734 - DNA, 25 bp, SARS Virus
gtcactgtagtgctggaccccgtaa

SEQ ID NO: 171735 - DNA, 25 bp, SARS Virus
tcactgtagtgtcggaccccgtaac

SEQ ID NO: 171736 - DNA, 25 bp, SARS Virus
cactgtagtgttcgaccccgtaacg

SEQ ID NO: 171737 - DNA, 25 bp, SARS Virus
actgtagtgttgcaccccgtaacgt

SEQ ID NO: 171738 - DNA, 25 bp, SARS Virus
ctgtagtgttggcccccgtaacgtt

SEQ ID NO: 171739 - DNA, 25 bp, SARS Virus
tgtagtgttggaccccgtaacgttt

SEQ ID NO: 171740 - DNA, 25 bp, SARS Virus
gtagtgttggaccccgtaacgtttg

SEQ ID NO: 171741 - DNA, 25 bp, SARS Virus
tagtgttggaccccgtaacgtttgt

SEQ ID NO: 171742 - DNA, 25 bp, SARS Virus
agtgttggaccccgtaacgtttgta

SEQ ID NO: 171743 - DNA, 25 bp, SARS Virus
gtgttggaccccctaacgtttgtat

SEQ ID NO: 171744 - DNA, 25 bp, SARS Virus
tgttggaccccgcaacgtttgtatc

SEQ ID NO: 171745 - DNA, 25 bp, SARS Virus
gttggaccccgtcacgtttgtatcc

SEQ ID NO: 171746 - DNA, 25 bp, SARS Virus
ttggaccccgtaccgtttgtatccc

SEQ ID NO: 171747 - DNA, 25 bp, SARS Virus
tggaccccgtaacgtttgtatccct

SEQ ID NO: 171748 - DNA, 25 bp, SARS Virus
ggaccccgtaacctttgtatcccta

SEQ ID NO: 171749 - DNA, 25 bp, SARS Virus
gaccccgtaacgcttgtatccctaa

SEQ ID NO: 171750 - DNA, 25 bp, SARS Virus
accccgtaacgtctgtatccctaat

SEQ ID NO: 171751 - DNA, 25 bp, SARS Virus
ccccgtaacgttcgtatccctaatt

SEQ ID NO: 171752 - DNA, 25 bp, SARS Virus
cccgtaacgtttctatccctaattg

SEQ ID NO: 171753 - DNA, 25 bp, SARS Virus
ccgtaacgtttgcatccctaattgt

SEQ ID NO: 171754 - DNA, 25 bp, SARS Virus
cgtaacgtttgtctccctaattgtc

SEQ ID NO: 171755 - DNA, 25 bp, SARS Virus
gtaacgtttgtacccctaattgtct

SEQ ID NO: 171756 - DNA, 25 bp, SARS Virus
taacgtttgtatccctaattgtctg

SEQ ID NO: 171757 - DNA, 25 bp, SARS Virus
aacgtttgtatccctaattgtctgt

SEQ ID NO: 171758 - DNA, 25 bp, SARS Virus
acgtttgtatccctaattgtctgtt

SEQ ID NO: 171759 - DNA, 25 bp, SARS Virus
cgtttgtatccccaattgtctgttg

SEQ ID NO: 171760 - DNA, 25 bp, SARS Virus
gtttgtatccctcattgtctgttgt

SEQ ID NO: 171761 - DNA, 25 bp, SARS Virus
tttgtatccctacttgtctgttgtg

SEQ ID NO: 171762 - DNA, 25 bp, SARS Virus
ttgtatccctaactgtctgttgtga

SEQ ID NO: 171763 - DNA, 25 bp, SARS Virus
tgtatccctaatcgtctgttgtgat

SEQ ID NO: 171764 - DNA, 25 bp, SARS Virus
gtatccctaattctctgttgtgatt

SEQ ID NO: 171765 - DNA, 25 bp, SARS Virus
tatccctaattgcctgttgtgatta

SEQ ID NO: 171766 - DNA, 25 bp, SARS Virus
atccctaattgtctgttgtgattaa

SEQ ID NO: 171767 - DNA, 25 bp, SARS Virus
tccctaattgtccgttgtgattaaa

SEQ ID NO: 171768 - DNA, 25 bp, SARS Virus
ccctaattgtctcttgtgattaaac

SEQ ID NO: 171769 - DNA, 25 bp, SARS Virus
cctaattgtctgctgtgattaaaca

SEQ ID NO: 171770 - DNA, 25 bp, SARS Virus
ctaattgtctgtcgtgattaaacac

SEQ ID NO: 171771 - DNA, 25 bp, SARS Virus
taattgtctgttctgattaaacaca

SEQ ID NO: 171772 - DNA, 25 bp, SARS Virus
aattgtctgttgcgattaaacacac

SEQ ID NO: 171773 - DNA, 25 bp, SARS Virus
attgtctgttgtcattaaacacact

SEQ ID NO: 171774 - DNA, 25 bp, SARS Virus
ttgtctgttgtgcttaaacacacta

SEQ ID NO: 171775 - DNA, 25 bp, SARS Virus
tgtctgttgtgactaaacacactac

SEQ ID NO: 171776 - DNA, 25 bp, SARS Virus
gtctgttgtgatcaaacacactaca

SEQ ID NO: 171777 - DNA, 25 bp, SARS Virus
tctgttgtgattcaacacactacaa

SEQ ID NO: 171778 - DNA, 25 bp, SARS Virus
ctgttgtgattacacacactacaac

SEQ ID NO: 171779 - DNA, 25 bp, SARS Virus
tgttgtgattaaccacactacaact

SEQ ID NO: 171780 - DNA, 25 bp, SARS Virus
gttgtgattaaacacactacaactt

SEQ ID NO: 171781 - DNA, 25 bp, SARS Virus
ttgtgattaaacccactacaacttt

SEQ ID NO: 171782 - DNA, 25 bp, SARS Virus
tgtgattaaacacactacaacttta

SEQ ID NO: 171783 - DNA, 25 bp, SARS Virus
gtgattaaacaccctacaactttac

SEQ ID NO: 171784 - DNA, 25 bp, SARS Virus
tgattaaacacactacaactttact

SEQ ID NO: 171785 - DNA, 25 bp, SARS Virus
gattaaacacaccacaactttactg

SEQ ID NO: 171786 - DNA, 25 bp, SARS Virus
attaaacacactccaactttactgt

SEQ ID NO: 171787 - DNA, 25 bp, SARS Virus
ttaaacacactacaactttactgta

SEQ ID NO: 171788 - DNA, 25 bp, SARS Virus
taaacacactaccactttactgtac

SEQ ID NO: 171789 - DNA, 25 bp, SARS Virus
aaacacactacacctttactgtacc

SEQ ID NO: 171790 - DNA, 25 bp, SARS Virus
aacacactacaactttactgtacca

SEQ ID NO: 171791 - DNA, 25 bp, SARS Virus
acacactacaaccttactgtaccag

SEQ ID NO: 171792 - DNA, 25 bp, SARS Virus
cacactacaactctactgtaccagt

SEQ ID NO: 171793 - DNA, 25 bp, SARS Virus
acactacaacttcactgtaccagta

SEQ ID NO: 171794 - DNA, 25 bp, SARS Virus
cactacaactttcctgtaccagtat

SEQ ID NO: 171795 - DNA, 25 bp, SARS Virus
actacaactttactgtaccagtatc

SEQ ID NO: 171796 - DNA, 25 bp, SARS Virus
ctacaactttaccgtaccagtatcg

SEQ ID NO: 171797 - DNA, 25 bp, SARS Virus
tacaactttactctaccagtatcgt

SEQ ID NO: 171798 - DNA, 25 bp, SARS Virus
acaactttactgcaccagtatcgtc

SEQ ID NO: 171799 - DNA, 25 bp, SARS Virus
caactttactgtcccagtatcgtcg

SEQ ID NO: 171800 - DNA, 25 bp, SARS Virus
aactttactgtaccagtatcgtcgt

SEQ ID NO: 171801 - DNA, 25 bp, SARS Virus
actttactgtaccagtatcgtcgtg

SEQ ID NO: 171802 - DNA, 25 bp, SARS Virus
ctttactgtacccgtatcgtcgtga

SEQ ID NO: 171803 - DNA, 25 bp, SARS Virus
tttactgtaccactatcgtcgtgaa

SEQ ID NO: 171804 - DNA, 25 bp, SARS Virus
ttactgtaccagcatcgtcgtgaac

SEQ ID NO: 171805 - DNA, 25 bp, SARS Virus
tactgtaccagtctcgtcgtgaacg

SEQ ID NO: 171806 - DNA, 25 bp, SARS Virus
actgtaccagtaccgtcgtgaacgt

SEQ ID NO: 171807 - DNA, 25 bp, SARS Virus
ctgtaccagtatcgtcgtgaacgtt

SEQ ID NO: 171808 - DNA, 25 bp, SARS Virus
tgtaccagtatcctcgtgaacgttg

SEQ ID NO: 171809 - DNA, 25 bp, SARS Virus
aggttagacatggaatgataaaaat

SEQ ID NO: 171810 - DNA, 25 bp, SARS Virus
ggttagacatgagatgataaaaatc

SEQ ID NO: 171811 - DNA, 25 bp, SARS Virus
gttagacatgaagtgataaaaatca

SEQ ID NO: 171812 - DNA, 25 bp, SARS Virus
ttagacatgaaaggataaaaatcaa

SEQ ID NO: 171813 - DNA, 25 bp, SARS Virus
tagacatgaaatgataaaaatcaat

SEQ ID NO: 171814 - DNA, 25 bp, SARS Virus
agacatgaaatggtaaaaatcaatg

SEQ ID NO: 171815 - DNA, 25 bp, SARS Virus
gacatgaaatgagaaaaatcaatgt

SEQ ID NO: 171816 - DNA, 25 bp, SARS Virus
acatgaaatgatgaaaatcaatgtg

SEQ ID NO: 171817 - DNA, 25 bp, SARS Virus
catgaaatgatagaaatcaatgtgc

SEQ ID NO: 171818 - DNA, 25 bp, SARS Virus
atgaaatgataagaatcaatgtgcc

SEQ ID NO: 171819 - DNA, 25 bp, SARS Virus
tgaaatgataaagatcaatgtgcca

SEQ ID NO: 171820 - DNA, 25 bp, SARS Virus
gaaatgataaaagtcaatgtgccat

SEQ ID NO: 171821 - DNA, 25 bp, SARS Virus
aaatgataaaaagcaatgtgccatt

SEQ ID NO: 171822 - DNA, 25 bp, SARS Virus
aatgataaaaatgaatgtgccattg

SEQ ID NO: 171823 - DNA, 25 bp, SARS Virus
atgataaaaatcgatgtgccattgg

SEQ ID NO: 171824 - DNA, 25 bp, SARS Virus
tgataaaaatcagtgtgccattggt

SEQ ID NO: 171825 - DNA, 25 bp, SARS Virus
gataaaaatcaaggtgccattggtc

SEQ ID NO: 171826 - DNA, 25 bp, SARS Virus
ataaaaatcaatgtgccattggtca

SEQ ID NO: 171827 - DNA, 25 bp, SARS Virus
taaaaatcaatgggccattggtcat

SEQ ID NO: 171828 - DNA, 25 bp, SARS Virus
aaaaatcaatgtgccattggtcatt

SEQ ID NO: 171829 - DNA, 25 bp, SARS Virus
aaaatcaatgtggcattggtcattt

SEQ ID NO: 171830 - DNA, 25 bp, SARS Virus
aaatcaatgtgcgattggtcatttc

SEQ ID NO: 171831 - DNA, 25 bp, SARS Virus
aatcaatgtgccgttggtcatttct

SEQ ID NO: 171832 - DNA, 25 bp, SARS Virus
atcaatgtgccagtggtcatttctg

SEQ ID NO: 171833 - DNA, 25 bp, SARS Virus
tcaatgtgccatgggtcatttctgt

SEQ ID NO: 171834 - DNA, 25 bp, SARS Virus
caatgtgccattggtcatttctgta

SEQ ID NO: 171835 - DNA, 25 bp, SARS Virus
aatgtgccattggtcatttctgtat

SEQ ID NO: 171836 - DNA, 25 bp, SARS Virus
atgtgccattgggcatttctgtatc

SEQ ID NO: 171837 - DNA, 25 bp, SARS Virus
tgtgccattggtgatttctgtatca

SEQ ID NO: 171838 - DNA, 25 bp, SARS Virus
gtgccattggtcgtttctgtatcaa

SEQ ID NO: 171839 - DNA, 25 bp, SARS Virus
tgccattggtcagttctgtatcaaa

SEQ ID NO: 171840 - DNA, 25 bp, SARS Virus
gccattggtcatgtctgtatcaaag

SEQ ID NO: 171841 - DNA, 25 bp, SARS Virus
ccattggtcattgctgtatcaaaga

SEQ ID NO: 171842 - DNA, 25 bp, SARS Virus
cattggtcatttgtgtatcaaagac

SEQ ID NO: 171843 - DNA, 25 bp, SARS Virus
attggtcatttcggtatcaaagaca

SEQ ID NO: 171844 - DNA, 25 bp, SARS Virus
ttggtcatttctgtatcaaagacaa

SEQ ID NO: 171845 - DNA, 25 bp, SARS Virus
tggtcatttctggatcaaagacaag

SEQ ID NO: 171846 - DNA, 25 bp, SARS Virus
ggtcatttctgtgtcaaagacaagt

SEQ ID NO: 171847 - DNA, 25 bp, SARS Virus
gtcatttctgtagcaaagacaagtt

SEQ ID NO: 171848 - DNA, 25 bp, SARS Virus
tcatttctgtatgaaagacaagtta

SEQ ID NO: 171849 - DNA, 25 bp, SARS Virus
catttctgtatcgaagacaagttac

SEQ ID NO: 171850 - DNA, 25 bp, SARS Virus
atttctgtatcagagacaagttacc

SEQ ID NO: 171851 - DNA, 25 bp, SARS Virus
tttctgtatcaaggacaagttacca

SEQ ID NO: 171852 - DNA, 25 bp, SARS Virus
ttctgtatcaaagacaagttaccac

SEQ ID NO: 171853 - DNA, 25 bp, SARS Virus
tctgtatcaaaggcaagttaccacc

SEQ ID NO: 171854 - DNA, 25 bp, SARS Virus
ctgtatcaaagagaagttaccacca

SEQ ID NO: 171855 - DNA, 25 bp, SARS Virus
tgtatcaaagacgagttaccaccag

SEQ ID NO: 171856 - DNA, 25 bp, SARS Virus
gtatcaaagacaggttaccaccaga

SEQ ID NO: 171857 - DNA, 25 bp, SARS Virus
tatcaaagacaagttaccaccagat

SEQ ID NO: 171858 - DNA, 25 bp, SARS Virus
atcaaagacaaggtaccaccagatc

SEQ ID NO: 171859 - DNA, 25 bp, SARS Virus
tcaaagacaagtgaccaccagatcc

SEQ ID NO: 171860 - DNA, 25 bp, SARS Virus
caaagacaagttgccaccagatcca

SEQ ID NO: 171861 - DNA, 25 bp, SARS Virus
aaagacaagttagcaccagatccaa

SEQ ID NO: 171862 - DNA, 25 bp, SARS Virus
aagacaagttacgaccagatccaaa

SEQ ID NO: 171863 - DNA, 25 bp, SARS Virus
agacaagttaccgccagatccaaaa

SEQ ID NO: 171864 - DNA, 25 bp, SARS Virus
gacaagttaccagcagatccaaaag

SEQ ID NO: 171865 - DNA, 25 bp, SARS Virus
acaagttaccacgagatccaaaagg

SEQ ID NO: 171866 - DNA, 25 bp, SARS Virus
caagttaccaccggatccaaaaggt

SEQ ID NO: 171867 - DNA, 25 bp, SARS Virus
aagttaccaccagatccaaaaggtt

SEQ ID NO: 171868 - DNA, 25 bp, SARS Virus
agttaccaccaggtccaaaaggttg

SEQ ID NO: 171869 - DNA, 25 bp, SARS Virus
gttaccaccagagccaaaaggttgg

SEQ ID NO: 171870 - DNA, 25 bp, SARS Virus
ttaccaccagatgcaaaaggttgga

SEQ ID NO: 171871 - DNA, 25 bp, SARS Virus
taccaccagatcgaaaaggttggag

SEQ ID NO: 171872 - DNA, 25 bp, SARS Virus
accaccagatccgaaaggttggagg

SEQ ID NO: 171873 - DNA, 25 bp, SARS Virus
ccaccagatccagaaggttggaggg

SEQ ID NO: 171874 - DNA, 25 bp, SARS Virus
caccagatccaagaggttggagggt

SEQ ID NO: 171875 - DNA, 25 bp, SARS Virus
accagatccaaagggttggagggta

SEQ ID NO: 171876 - DNA, 25 bp, SARS Virus
ccagatccaaaaggttggagggtac

SEQ ID NO: 171877 - DNA, 25 bp, SARS Virus
cagatccaaaaggttggagggtact

SEQ ID NO: 171878 - DNA, 25 bp, SARS Virus
agatccaaaagggtggagggtactt

SEQ ID NO: 171879 - DNA, 25 bp, SARS Virus
gatccaaaaggtgggagggtacttt

SEQ ID NO: 171880 - DNA, 25 bp, SARS Virus
atccaaaaggttggagggtactttc

SEQ ID NO: 171881 - DNA, 25 bp, SARS Virus
tccaaaaggttggagggtactttct

SEQ ID NO: 171882 - DNA, 25 bp, SARS Virus
ccaaaaggttggggggtactttcta

SEQ ID NO: 171883 - DNA, 25 bp, SARS Virus
caaaaggttggagggtactttctac

SEQ ID NO: 171884 - DNA, 25 bp, SARS Virus
aaaaggttggagggtactttctacg

SEQ ID NO: 171885 - DNA, 25 bp, SARS Virus
aaaggttggagggtactttctacgt

SEQ ID NO: 171886 - DNA, 25 bp, SARS Virus
aaggttggaggggactttctacgtt

SEQ ID NO: 171887 - DNA, 25 bp, SARS Virus
aggttggagggtgctttctacgtta

SEQ ID NO: 171888 - DNA, 25 bp, SARS Virus
ggttggagggtagtttctacgttaa

SEQ ID NO: 171889 - DNA, 25 bp, SARS Virus
gttggagggtacgttctacgttaag

SEQ ID NO: 171890 - DNA, 25 bp, SARS Virus
ttggagggtactgtctacgttaaga

SEQ ID NO: 171891 - DNA, 25 bp, SARS Virus
tggagggtacttgctacgttaagag

SEQ ID NO: 171892 - DNA, 25 bp, SARS Virus
ggagggtactttgtacgttaagaga

SEQ ID NO: 171893 - DNA, 25 bp, SARS Virus
gagggtactttcgacgttaagagac

SEQ ID NO: 171894 - DNA, 25 bp, SARS Virus
agggtactttctgcgttaagagaca

SEQ ID NO: 171895 - DNA, 25 bp, SARS Virus
gggtactttctaggttaagagacag

SEQ ID NO: 171896 - DNA, 25 bp, SARS Virus
ggtactttctacgttaagagacagt

SEQ ID NO: 171897 - DNA, 25 bp, SARS Virus
gtactttctacggtaagagacagtc

SEQ ID NO: 171898 - DNA, 25 bp, SARS Virus
tactttctacgtgaagagacagtct

SEQ ID NO: 171899 - DNA, 25 bp, SARS Virus
actttctacgttgagagacagtctc

SEQ ID NO: 171900 - DNA, 25 bp, SARS Virus
ctttctacgttaggagacagtctct

SEQ ID NO: 171901 - DNA, 25 bp, SARS Virus
tttctacgttaagagacagtctctc

SEQ ID NO: 171902 - DNA, 25 bp, SARS Virus
ttctacgttaagggacagtctctca

SEQ ID NO: 171903 - DNA, 25 bp, SARS Virus
tctacgttaagagacagtctctcat

SEQ ID NO: 171904 - DNA, 25 bp, SARS Virus
ctacgttaagaggcagtctctcatg

SEQ ID NO: 171905 - DNA, 25 bp, SARS Virus
tacgttaagagagagtctctcatga

SEQ ID NO: 171906 - DNA, 25 bp, SARS Virus
acgttaagagacggtctctcatgaa

SEQ ID NO: 171907 - DNA, 25 bp, SARS Virus
cgttaagagacagtctctcatgaag

SEQ ID NO: 171908 - DNA, 25 bp, SARS Virus
gttaagagacaggctctcatgaagc

SEQ ID NO: 171909 - DNA, 25 bp, SARS Virus
ttaagagacagtgtctcatgaagcg

SEQ ID NO: 171910 - DNA, 25 bp, SARS Virus
taagagacagtcgctcatgaagcgc

SEQ ID NO: 171911 - DNA, 25 bp, SARS Virus
aagagacagtctgtcatgaagcgca

SEQ ID NO: 171912 - DNA, 25 bp, SARS Virus
agagacagtctcgcatgaagcgcat

SEQ ID NO: 171913 - DNA, 25 bp, SARS Virus
gagacagtctctgatgaagcgcatg

SEQ ID NO: 171914 - DNA, 25 bp, SARS Virus
agacagtctctcgtgaagcgcatgt

SEQ ID NO: 171915 - DNA, 25 bp, SARS Virus
gacagtctctcaggaagcgcatgtc

SEQ ID NO: 171916 - DNA, 25 bp, SARS Virus
acagtctctcatgaagcgcatgtca

SEQ ID NO: 171917 - DNA, 25 bp, SARS Virus
cagtctctcatggagcgcatgtcac

SEQ ID NO: 171918 - DNA, 25 bp, SARS Virus
agtctctcatgaggcgcatgtcacc

SEQ ID NO: 171919 - DNA, 25 bp, SARS Virus
gtctctcatgaagcgcatgtcaccg

SEQ ID NO: 171920 - DNA, 25 bp, SARS Virus
tctctcatgaagggcatgtcaccgt

SEQ ID NO: 171921 - DNA, 25 bp, SARS Virus
ctctcatgaagcgcatgtcaccgtt

SEQ ID NO: 171922 - DNA, 25 bp, SARS Virus
tctcatgaagcggatgtcaccgtta

SEQ ID NO: 171923 - DNA, 25 bp, SARS Virus
ctcatgaagcgcgtgtcaccgttat

SEQ ID NO: 171924 - DNA, 25 bp, SARS Virus
tcatgaagcgcaggtcaccgttatg

SEQ ID NO: 171925 - DNA, 25 bp, SARS Virus
catgaagcgcatgtcaccgttatgg

SEQ ID NO: 171926 - DNA, 25 bp, SARS Virus
atgaagcgcatggcaccgttatggt

SEQ ID NO: 171927 - DNA, 25 bp, SARS Virus
tgaagcgcatgtgaccgttatggta

SEQ ID NO: 171928 - DNA, 25 bp, SARS Virus
gaagcgcatgtcgccgttatggtat

SEQ ID NO: 171929 - DNA, 25 bp, SARS Virus
aagcgcatgtcagcgttatggtata

SEQ ID NO: 171930 - DNA, 25 bp, SARS Virus
agcgcatgtcacggttatggtatac

SEQ ID NO: 171931 - DNA, 25 bp, SARS Virus
gcgcatgtcaccgttatggtatact

SEQ ID NO: 171932 - DNA, 25 bp, SARS Virus
cgcatgtcaccggtatggtatactg

SEQ ID NO: 171933 - DNA, 25 bp, SARS Virus
gcatgtcaccgtgatggtatactgt

SEQ ID NO: 171934 - DNA, 25 bp, SARS Virus
catgtcaccgttgtggtatactgtc

SEQ ID NO: 171935 - DNA, 25 bp, SARS Virus
atgtcaccgttagggtatactgtcg

SEQ ID NO: 171936 - DNA, 25 bp, SARS Virus
tgtcaccgttatggtatactgtcga

SEQ ID NO: 171937 - DNA, 25 bp, SARS Virus
gtcaccgttatggtatactgtcgaa

SEQ ID NO: 171938 - DNA, 25 bp, SARS Virus
tcaccgttatgggatactgtcgaat

SEQ ID NO: 171939 - DNA, 25 bp, SARS Virus
caccgttatggtgtactgtcgaatt

SEQ ID NO: 171940 - DNA, 25 bp, SARS Virus
accgttatggtagactgtcgaattt

SEQ ID NO: 171941 - DNA, 25 bp, SARS Virus
ccgttatggtatgctgtcgaattta

SEQ ID NO: 171942 - DNA, 25 bp, SARS Virus
cgttatggtatagtgtcgaatttac

SEQ ID NO: 171943 - DNA, 25 bp, SARS Virus
gttatggtatacggtcgaatttaca

SEQ ID NO: 171944 - DNA, 25 bp, SARS Virus
ttatggtatactgtcgaatttacaa

SEQ ID NO: 171945 - DNA, 25 bp, SARS Virus
tatggtatactggcgaatttacaaa

SEQ ID NO: 171946 - DNA, 25 bp, SARS Virus
atggtatactgtggaatttacaaag

SEQ ID NO: 171947 - DNA, 25 bp, SARS Virus
tggtatactgtcgaatttacaaagg

SEQ ID NO: 171948 - DNA, 25 bp, SARS Virus
ggtatactgtcggatttacaaagga

SEQ ID NO: 171949 - DNA, 25 bp, SARS Virus
gtatactgtcgagtttacaaaggag

SEQ ID NO: 171950 - DNA, 25 bp, SARS Virus
tatactgtcgaagttacaaaggagt

SEQ ID NO: 171951 - DNA, 25 bp, SARS Virus
atactgtcgaatgtacaaaggagtc

SEQ ID NO: 171952 - DNA, 25 bp, SARS Virus
tactgtcgaattgacaaaggagtca

SEQ ID NO: 171953 - DNA, 25 bp, SARS Virus
actgtcgaatttgcaaaggagtcac

SEQ ID NO: 171954 - DNA, 25 bp, SARS Virus
ctgtcgaatttagaaaggagtcacc

SEQ ID NO: 171955 - DNA, 25 bp, SARS Virus
tgtcgaatttacgaaggagtcaccg

SEQ ID NO: 171956 - DNA, 25 bp, SARS Virus
gtcgaatttacagaggagtcaccga

SEQ ID NO: 171957 - DNA, 25 bp, SARS Virus
tcgaatttacaagggagtcaccgaa

SEQ ID NO: 171958 - DNA, 25 bp, SARS Virus
cgaatttacaaaggagtcaccgaaa

SEQ ID NO: 171959 - DNA, 25 bp, SARS Virus
gaatttacaaaggagtcaccgaaac

SEQ ID NO: 171960 - DNA, 25 bp, SARS Virus
aatttacaaaggggtcaccgaaact

SEQ ID NO: 171961 - DNA, 25 bp, SARS Virus
atttacaaaggagtcaccgaaactc

SEQ ID NO: 171962 - DNA, 25 bp, SARS Virus
tttacaaaggaggcaccgaaactcg

SEQ ID NO: 171963 - DNA, 25 bp, SARS Virus
ttacaaaggagtgaccgaaactcgc

SEQ ID NO: 171964 - DNA, 25 bp, SARS Virus
tacaaaggagtcgccgaaactcgca

SEQ ID NO: 171965 - DNA, 25 bp, SARS Virus
acaaaggagtcagcgaaactcgcaa

SEQ ID NO: 171966 - DNA, 25 bp, SARS Virus
caaaggagtcacggaaactcgcaaa

SEQ ID NO: 171967 - DNA, 25 bp, SARS Virus
aaaggagtcaccgaaactcgcaaag

SEQ ID NO: 171968 - DNA, 25 bp, SARS Virus
aaggagtcaccggaactcgcaaaga

SEQ ID NO: 171969 - DNA, 25 bp, SARS Virus
aggagtcaccgagactcgcaaagac

SEQ ID NO: 171970 - DNA, 25 bp, SARS Virus
ggagtcaccgaagctcgcaaagacg

SEQ ID NO: 171971 - DNA, 25 bp, SARS Virus
gagtcaccgaaagtcgcaaagacga

SEQ ID NO: 171972 - DNA, 25 bp, SARS Virus
agtcaccgaaacgcgcaaagacgac

SEQ ID NO: 171973 - DNA, 25 bp, SARS Virus
gtcaccgaaactggcaaagacgacg

SEQ ID NO: 171974 - DNA, 25 bp, SARS Virus
tcaccgaaactcgcaaagacgacgc

SEQ ID NO: 171975 - DNA, 25 bp, SARS Virus
caccgaaactcggaaagacgacgct

SEQ ID NO: 171976 - DNA, 25 bp, SARS Virus
accgaaactcgcgaagacgacgctt

SEQ ID NO: 171977 - DNA, 25 bp, SARS Virus
ccgaaactcgcagagacgacgcttt

SEQ ID NO: 171978 - DNA, 25 bp, SARS Virus
cgaaactcgcaaggacgacgctttt

SEQ ID NO: 171979 - DNA, 25 bp, SARS Virus
gaaactcgcaaagacgacgcttttc

SEQ ID NO: 171980 - DNA, 25 bp, SARS Virus
aaactcgcaaaggcgacgcttttcg

SEQ ID NO: 171981 - DNA, 25 bp, SARS Virus
aactcgcaaagaggacgcttttcga

SEQ ID NO: 171982 - DNA, 25 bp, SARS Virus
actcgcaaagacgacgcttttcgaa

SEQ ID NO: 171983 - DNA, 25 bp, SARS Virus
ctcgcaaagacggcgcttttcgaac

SEQ ID NO: 171984 - DNA, 25 bp, SARS Virus
tcgcaaagacgaggcttttcgaact

SEQ ID NO: 171985 - DNA, 25 bp, SARS Virus
cgcaaagacgacgcttttcgaactc

SEQ ID NO: 171986 - DNA, 25 bp, SARS Virus
gcaaagacgacggttttcgaactca

SEQ ID NO: 171987 - DNA, 25 bp, SARS Virus
caaagacgacgcgtttcgaactcag

SEQ ID NO: 171988 - DNA, 25 bp, SARS Virus
aaagacgacgctgttcgaactcaga

SEQ ID NO: 171989 - DNA, 25 bp, SARS Virus
aagacgacgcttgtcgaactcagag

SEQ ID NO: 171990 - DNA, 25 bp, SARS Virus
agacgacgctttgcgaactcagaga

SEQ ID NO: 171991 - DNA, 25 bp, SARS Virus
gacgacgcttttggaactcagagag

SEQ ID NO: 171992 - DNA, 25 bp, SARS Virus
acgacgcttttcgaactcagagagt

SEQ ID NO: 171993 - DNA, 25 bp, SARS Virus
cgacgcttttcggactcagagagtc

SEQ ID NO: 171994 - DNA, 25 bp, SARS Virus
gacgcttttcgagctcagagagtca

SEQ ID NO: 171995 - DNA, 25 bp, SARS Virus
acgcttttcgaagtcagagagtcat

SEQ ID NO: 171996 - DNA, 25 bp, SARS Virus
cgcttttcgaacgcagagagtcatg

SEQ ID NO: 171997 - DNA, 25 bp, SARS Virus
gcttttcgaactgagagagtcatgt

SEQ ID NO: 171998 - DNA, 25 bp, SARS Virus
cttttcgaactcggagagtcatgtt

SEQ ID NO: 171999 - DNA, 25 bp, SARS Virus
ttttcgaactcagagagtcatgttc

SEQ ID NO: 172000 - DNA, 25 bp, SARS Virus
tttcgaactcagggagtcatgttca

SEQ ID NO: 172001 - DNA, 25 bp, SARS Virus
ttcgaactcagagagtcatgttcac

SEQ ID NO: 172002 - DNA, 25 bp, SARS Virus
tcgaactcagagggtcatgttcaca

SEQ ID NO: 172003 - DNA, 25 bp, SARS Virus
cgaactcagagagtcatgttcacaa

SEQ ID NO: 172004 - DNA, 25 bp, SARS Virus
gaactcagagaggcatgttcacaac

SEQ ID NO: 172005 - DNA, 25 bp, SARS Virus
aactcagagagtgatgttcacaacc

SEQ ID NO: 172006 - DNA, 25 bp, SARS Virus
actcagagagtcgtgttcacaaccg

SEQ ID NO: 172007 - DNA, 25 bp, SARS Virus
ctcagagagtcaggttcacaaccgt

SEQ ID NO: 172008 - DNA, 25 bp, SARS Virus
tcagagagtcatgttcacaaccgtt

SEQ ID NO: 172009 - DNA, 25 bp, SARS Virus
cagagagtcatggtcacaaccgttc

SEQ ID NO: 172010 - DNA, 25 bp, SARS Virus
agagagtcatgtgcacaaccgttca

SEQ ID NO: 172011 - DNA, 25 bp, SARS Virus
gagagtcatgttgacaaccgttcat

SEQ ID NO: 172012 - DNA, 25 bp, SARS Virus
agagtcatgttcgcaaccgttcata

SEQ ID NO: 172013 - DNA, 25 bp, SARS Virus
gagtcatgttcagaaccgttcatac

SEQ ID NO: 172014 - DNA, 25 bp, SARS Virus
agtcatgttcacgaccgttcataca

SEQ ID NO: 172015 - DNA, 25 bp, SARS Virus
gtcatgttcacagccgttcatacat

SEQ ID NO: 172016 - DNA, 25 bp, SARS Virus
tcatgttcacaagcgttcatacatt

SEQ ID NO: 172017 - DNA, 25 bp, SARS Virus
catgttcacaacggttcatacatta

SEQ ID NO: 172018 - DNA, 25 bp, SARS Virus
atgttcacaaccgttcatacattag

SEQ ID NO: 172019 - DNA, 25 bp, SARS Virus
tgttcacaaccggtcatacattagc

SEQ ID NO: 172020 - DNA, 25 bp, SARS Virus
gttcacaaccgtgcatacattagcg

SEQ ID NO: 172021 - DNA, 25 bp, SARS Virus
ttcacaaccgttgatacattagcgg

SEQ ID NO: 172022 - DNA, 25 bp, SARS Virus
tcacaaccgttcgtacattagcggt

SEQ ID NO: 172023 - DNA, 25 bp, SARS Virus
cacaaccgttcagacattagcggtc

SEQ ID NO: 172024 - DNA, 25 bp, SARS Virus
acaaccgttcatgcattagcggtcg

SEQ ID NO: 172025 - DNA, 25 bp, SARS Virus
caaccgttcatagattagcggtcgt

SEQ ID NO: 172026 - DNA, 25 bp, SARS Virus
aaccgttcatacgttagcggtcgta

SEQ ID NO: 172027 - DNA, 25 bp, SARS Virus
accgttcatacagtagcggtcgtaa

SEQ ID NO: 172028 - DNA, 25 bp, SARS Virus
ccgttcatacatgagcggtcgtaat

SEQ ID NO: 172029 - DNA, 25 bp, SARS Virus
cgttcatacattggcggtcgtaatc

SEQ ID NO: 172030 - DNA, 25 bp, SARS Virus
gttcatacattagcggtcgtaatca

SEQ ID NO: 172031 - DNA, 25 bp, SARS Virus
ttcatacattaggggtcgtaatcag

SEQ ID NO: 172032 - DNA, 25 bp, SARS Virus
tcatacattagcggtcgtaatcagg

SEQ ID NO: 172033 - DNA, 25 bp, SARS Virus
catacattagcggtcgtaatcaggt

SEQ ID NO: 172034 - DNA, 25 bp, SARS Virus
atacattagcgggcgtaatcaggtt

SEQ ID NO: 172035 - DNA, 25 bp, SARS Virus
tacattagcggtggtaatcaggtta

SEQ ID NO: 172036 - DNA, 25 bp, SARS Virus
acattagcggtcgtaatcaggttag

SEQ ID NO: 172037 - DNA, 25 bp, SARS Virus
cattagcggtcggaatcaggttagt

SEQ ID NO: 172038 - DNA, 25 bp, SARS Virus
attagcggtcgtgatcaggttagtg

SEQ ID NO: 172039 - DNA, 25 bp, SARS Virus
ttagcggtcgtagtcaggttagtgt

SEQ ID NO: 172040 - DNA, 25 bp, SARS Virus
tagcggtcgtaagcaggttagtgta

SEQ ID NO: 172041 - DNA, 25 bp, SARS Virus
agcggtcgtaatgaggttagtgtac

SEQ ID NO: 172042 - DNA, 25 bp, SARS Virus
gcggtcgtaatcgggttagtgtaca

SEQ ID NO: 172043 - DNA, 25 bp, SARS Virus
cggtcgtaatcaggttagtgtacaa

SEQ ID NO: 172044 - DNA, 25 bp, SARS Virus
ggtcgtaatcaggttagtgtacaac

SEQ ID NO: 172045 - DNA, 25 bp, SARS Virus
gtcgtaatcagggtagtgtacaacg

SEQ ID NO: 172046 - DNA, 25 bp, SARS Virus
tcgtaatcaggtgagtgtacaacga

SEQ ID NO: 172047 - DNA, 25 bp, SARS Virus
cgtaatcaggttggtgtacaacgat

SEQ ID NO: 172048 - DNA, 25 bp, SARS Virus
gtaatcaggttagtgtacaacgata

SEQ ID NO: 172049 - DNA, 25 bp, SARS Virus
taatcaggttagggtacaacgatag

SEQ ID NO: 172050 - DNA, 25 bp, SARS Virus
aatcaggttagtgtacaacgatagc

SEQ ID NO: 172051 - DNA, 25 bp, SARS Virus
atcaggttagtggacaacgatagcg

SEQ ID NO: 172052 - DNA, 25 bp, SARS Virus
tcaggttagtgtgcaacgatagcgt

SEQ ID NO: 172053 - DNA, 25 bp, SARS Virus
caggttagtgtagaacgatagcgta

SEQ ID NO: 172054 - DNA, 25 bp, SARS Virus
aggttagtgtacgacgatagcgtaa

SEQ ID NO: 172055 - DNA, 25 bp, SARS Virus
ggttagtgtacagcgatagcgtaac

SEQ ID NO: 172056 - DNA, 25 bp, SARS Virus
gttagtgtacaaggatagcgtaact

SEQ ID NO: 172057 - DNA, 25 bp, SARS Virus
ttagtgtacaacgatagcgtaactt

SEQ ID NO: 172058 - DNA, 25 bp, SARS Virus
tagtgtacaacggtagcgtaacttc

SEQ ID NO: 172059 - DNA, 25 bp, SARS Virus
agtgtacaacgagagcgtaacttca

SEQ ID NO: 172060 - DNA, 25 bp, SARS Virus
gtgtacaacgatggcgtaacttcag

SEQ ID NO: 172061 - DNA, 25 bp, SARS Virus
tgtacaacgatagcgtaacttcagt

SEQ ID NO: 172062 - DNA, 25 bp, SARS Virus
gtacaacgatagggtaacttcagtc

SEQ ID NO: 172063 - DNA, 25 bp, SARS Virus
tacaacgatagcgtaacttcagtca

SEQ ID NO: 172064 - DNA, 25 bp, SARS Virus
acaacgatagcggaacttcagtcac

SEQ ID NO: 172065 - DNA, 25 bp, SARS Virus
caacgatagcgtgacttcagtcact

SEQ ID NO: 172066 - DNA, 25 bp, SARS Virus
aacgatagcgtagcttcagtcactg

SEQ ID NO: 172067 - DNA, 25 bp, SARS Virus
acgatagcgtaagttcagtcactgt

SEQ ID NO: 172068 - DNA, 25 bp, SARS Virus
cgatagcgtaacgtcagtcactgta

SEQ ID NO: 172069 - DNA, 25 bp, SARS Virus
gatagcgtaactgcagtcactgtaa

SEQ ID NO: 172070 - DNA, 25 bp, SARS Virus
atagcgtaacttgagtcactgtaac

SEQ ID NO: 172071 - DNA, 25 bp, SARS Virus
tagcgtaacttcggtcactgtaaca

SEQ ID NO: 172072 - DNA, 25 bp, SARS Virus
agcgtaacttcagtcactgtaacag

SEQ ID NO: 172073 - DNA, 25 bp, SARS Virus
gcgtaacttcaggcactgtaacagt

SEQ ID NO: 172074 - DNA, 25 bp, SARS Virus
cgtaacttcagtgactgtaacagtg

SEQ ID NO: 172075 - DNA, 25 bp, SARS Virus
gtaacttcagtcgctgtaacagtga

SEQ ID NO: 172076 - DNA, 25 bp, SARS Virus
taacttcagtcagtgtaacagtgac

SEQ ID NO: 172077 - DNA, 25 bp, SARS Virus
aacttcagtcacggtaacagtgacg

SEQ ID NO: 172078 - DNA, 25 bp, SARS Virus
acttcagtcactgtaacagtgacgg

SEQ ID NO: 172079 - DNA, 25 bp, SARS Virus
cttcagtcactggaacagtgacgga

SEQ ID NO: 172080 - DNA, 25 bp, SARS Virus
ttcagtcactgtgacagtgacggat

SEQ ID NO: 172081 - DNA, 25 bp, SARS Virus
tcagtcactgtagcagtgacggatg

SEQ ID NO: 172082 - DNA, 25 bp, SARS Virus
cagtcactgtaagagtgacggatgt

SEQ ID NO: 172083 - DNA, 25 bp, SARS Virus
agtcactgtaacggtgacggatgtg

SEQ ID NO: 172084 - DNA, 25 bp, SARS Virus
gtcactgtaacagtgacggatgtgt

SEQ ID NO: 172085 - DNA, 25 bp, SARS Virus
tcactgtaacagggacggatgtgta

SEQ ID NO: 172086 - DNA, 25 bp, SARS Virus
cactgtaacagtgacggatgtgtac

SEQ ID NO: 172087 - DNA, 25 bp, SARS Virus
actgtaacagtggcggatgtgtaca

SEQ ID NO: 172088 - DNA, 25 bp, SARS Virus
ctgtaacagtgagggatgtgtacac

SEQ ID NO: 172089 - DNA, 25 bp, SARS Virus
tgtaacagtgacggatgtgtacaca

SEQ ID NO: 172090 - DNA, 25 bp, SARS Virus
gtaacagtgacggatgtgtacacaa

SEQ ID NO: 172091 - DNA, 25 bp, SARS Virus
taacagtgacgggtgtgtacacaaa

SEQ ID NO: 172092 - DNA, 25 bp, SARS Virus
aacagtgacggaggtgtacacaaaa

SEQ ID NO: 172093 - DNA, 25 bp, SARS Virus
acagtgacggatgtgtacacaaaaa

SEQ ID NO: 172094 - DNA, 25 bp, SARS Virus
cagtgacggatgggtacacaaaaac

SEQ ID NO: 172095 - DNA, 25 bp, SARS Virus
agtgacggatgtgtacacaaaaaca

SEQ ID NO: 172096 - DNA, 25 bp, SARS Virus
gtgacggatgtggacacaaaaacat

SEQ ID NO: 172097 - DNA, 25 bp, SARS Virus
tgacggatgtgtgcacaaaaacata

SEQ ID NO: 172098 - DNA, 25 bp, SARS Virus
gacggatgtgtagacaaaaacatat

SEQ ID NO: 172099 - DNA, 25 bp, SARS Virus
acggatgtgtacgcaaaaacatatt

SEQ ID NO: 172100 - DNA, 25 bp, SARS Virus
cggatgtgtacagaaaaacatattt

SEQ ID NO: 172101 - DNA, 25 bp, SARS Virus
ggatgtgtacacgaaaacatatttg

SEQ ID NO: 172102 - DNA, 25 bp, SARS Virus
gatgtgtacacagaaacatatttgg

SEQ ID NO: 172103 - DNA, 25 bp, SARS Virus
atgtgtacacaagaacatatttggt

SEQ ID NO: 172104 - DNA, 25 bp, SARS Virus
tgtgtacacaaagacatatttggtt

SEQ ID NO: 172105 - DNA, 25 bp, SARS Virus
gtgtacacaaaagcatatttggttt

SEQ ID NO: 172106 - DNA, 25 bp, SARS Virus
tgtacacaaaaagatatttggtttt

SEQ ID NO: 172107 - DNA, 25 bp, SARS Virus
gtacacaaaaacgtatttggttttt

SEQ ID NO: 172108 - DNA, 25 bp, SARS Virus
tacacaaaaacagatttggtttttg

SEQ ID NO: 172109 - DNA, 25 bp, SARS Virus
acacaaaaacatgtttggtttttgg

SEQ ID NO: 172110 - DNA, 25 bp, SARS Virus
cacaaaaacatagttggtttttgga

SEQ ID NO: 172111 - DNA, 25 bp, SARS Virus
acaaaaacatatgtggtttttggac

SEQ ID NO: 172112 - DNA, 25 bp, SARS Virus
caaaaacatattgggtttttggact

SEQ ID NO: 172113 - DNA, 25 bp, SARS Virus
aaaaacatatttggtttttggactg

SEQ ID NO: 172114 - DNA, 25 bp, SARS Virus
aaaacatatttggtttttggactgg

SEQ ID NO: 172115 - DNA, 25 bp, SARS Virus
aaacatatttgggttttggactggt

SEQ ID NO: 172116 - DNA, 25 bp, SARS Virus
aacatatttggtgtttggactggta

SEQ ID NO: 172117 - DNA, 25 bp, SARS Virus
acatatttggttgttggactggtaa

SEQ ID NO: 172118 - DNA, 25 bp, SARS Virus
catatttggtttgtggactggtaat

SEQ ID NO: 172119 - DNA, 25 bp, SARS Virus
atatttggttttgggactggtaatc

SEQ ID NO: 172120 - DNA, 25 bp, SARS Virus
tatttggtttttggactggtaatcg

SEQ ID NO: 172121 - DNA, 25 bp, SARS Virus
atttggtttttggactggtaatcgt

SEQ ID NO: 172122 - DNA, 25 bp, SARS Virus
tttggtttttgggctggtaatcgtg

SEQ ID NO: 172123 - DNA, 25 bp, SARS Virus
ttggtttttggagtggtaatcgtgt

SEQ ID NO: 172124 - DNA, 25 bp, SARS Virus
tggtttttggacgggtaatcgtgta

SEQ ID NO: 172125 - DNA, 25 bp, SARS Virus
ggtttttggactggtaatcgtgtat

SEQ ID NO: 172126 - DNA, 25 bp, SARS Virus
gtttttggactggtaatcgtgtatt

SEQ ID NO: 172127 - DNA, 25 bp, SARS Virus
tttttggactgggaatcgtgtatta

SEQ ID NO: 172128 - DNA, 25 bp, SARS Virus
ttttggactggtgatcgtgtattac

SEQ ID NO: 172129 - DNA, 25 bp, SARS Virus
tttggactggtagtcgtgtattacc

SEQ ID NO: 172130 - DNA, 25 bp, SARS Virus
ttggactggtaagcgtgtattacct

SEQ ID NO: 172131 - DNA, 25 bp, SARS Virus
tggactggtaatggtgtattacctt

SEQ ID NO: 172132 - DNA, 25 bp, SARS Virus
ggactggtaatcgtgtattaccttt

SEQ ID NO: 172133 - DNA, 25 bp, SARS Virus
gactggtaatcgggtattacctttt

SEQ ID NO: 172134 - DNA, 25 bp, SARS Virus
actggtaatcgtgtattaccttttg

SEQ ID NO: 172135 - DNA, 25 bp, SARS Virus
ctggtaatcgtggattaccttttga

SEQ ID NO: 172136 - DNA, 25 bp, SARS Virus
tggtaatcgtgtgttaccttttgat

SEQ ID NO: 172137 - DNA, 25 bp, SARS Virus
ggtaatcgtgtagtaccttttgatt

SEQ ID NO: 172138 - DNA, 25 bp, SARS Virus
gtaatcgtgtatgaccttttgatta

SEQ ID NO: 172139 - DNA, 25 bp, SARS Virus
taatcgtgtattgccttttgattac

SEQ ID NO: 172140 - DNA, 25 bp, SARS Virus
aatcgtgtattagcttttgattacc

SEQ ID NO: 172141 - DNA, 25 bp, SARS Virus
atcgtgtattacgttttgattaccc

SEQ ID NO: 172142 - DNA, 25 bp, SARS Virus
tcgtgtattaccgtttgattaccct

SEQ ID NO: 172143 - DNA, 25 bp, SARS Virus
cgtgtattacctgttgattaccctc

SEQ ID NO: 172144 - DNA, 25 bp, SARS Virus
gtgtattaccttgtgattaccctcc

SEQ ID NO: 172145 - DNA, 25 bp, SARS Virus
tgtattacctttggattaccctccg

SEQ ID NO: 172146 - DNA, 25 bp, SARS Virus
gtattaccttttgattaccctccga

SEQ ID NO: 172147 - DNA, 25 bp, SARS Virus
tattaccttttggttaccctccgaa

SEQ ID NO: 172148 - DNA, 25 bp, SARS Virus
attaccttttgagtaccctccgaat

SEQ ID NO: 172149 - DNA, 25 bp, SARS Virus
ttaccttttgatgaccctccgaata

SEQ ID NO: 172150 - DNA, 25 bp, SARS Virus
taccttttgattgccctccgaatac

SEQ ID NO: 172151 - DNA, 25 bp, SARS Virus
accttttgattagcctccgaataca

SEQ ID NO: 172152 - DNA, 25 bp, SARS Virus
ccttttgattacgctccgaatacac

SEQ ID NO: 172153 - DNA, 25 bp, SARS Virus
cttttgattaccgtccgaatacact

SEQ ID NO: 172154 - DNA, 25 bp, SARS Virus
ttttgattacccgccgaatacactg

SEQ ID NO: 172155 - DNA, 25 bp, SARS Virus
tttgattaccctgcgaatacactga

SEQ ID NO: 172156 - DNA, 25 bp, SARS Virus
ttgattaccctcggaatacactgaa

SEQ ID NO: 172157 - DNA, 25 bp, SARS Virus
tgattaccctccgaatacactgaac

SEQ ID NO: 172158 - DNA, 25 bp, SARS Virus
gattaccctccggatacactgaacg

SEQ ID NO: 172159 - DNA, 25 bp, SARS Virus
attaccctccgagtacactgaacgt

SEQ ID NO: 172160 - DNA, 25 bp, SARS Virus
ttaccctccgaagacactgaacgtt

SEQ ID NO: 172161 - DNA, 25 bp, SARS Virus
taccctccgaatgcactgaacgtta

SEQ ID NO: 172162 - DNA, 25 bp, SARS Virus
accctccgaatagactgaacgttat

SEQ ID NO: 172163 - DNA, 25 bp, SARS Virus
ccctccgaatacgctgaacgttatt

SEQ ID NO: 172164 - DNA, 25 bp, SARS Virus
cctccgaatacagtgaacgttatta

SEQ ID NO: 172165 - DNA, 25 bp, SARS Virus
ctccgaatacacggaacgttattat

SEQ ID NO: 172166 - DNA, 25 bp, SARS Virus
tccgaatacactgaacgttattatc

SEQ ID NO: 172167 - DNA, 25 bp, SARS Virus
ccgaatacactggacgttattatcg

SEQ ID NO: 172168 - DNA, 25 bp, SARS Virus
cgaatacactgagcgttattatcga

SEQ ID NO: 172169 - DNA, 25 bp, SARS Virus
gaatacactgaaggttattatcgag

SEQ ID NO: 172170 - DNA, 25 bp, SARS Virus
aatacactgaacgttattatcgagt

SEQ ID NO: 172171 - DNA, 25 bp, SARS Virus
atacactgaacggtattatcgagta

SEQ ID NO: 172172 - DNA, 25 bp, SARS Virus
tacactgaacgtgattatcgagtat

SEQ ID NO: 172173 - DNA, 25 bp, SARS Virus
acactgaacgttgttatcgagtatg

SEQ ID NO: 172174 - DNA, 25 bp, SARS Virus
cactgaacgttagtatcgagtatgg

SEQ ID NO: 172175 - DNA, 25 bp, SARS Virus
actgaacgttatgatcgagtatgga

SEQ ID NO: 172176 - DNA, 25 bp, SARS Virus
ctgaacgttattgtcgagtatggag

SEQ ID NO: 172177 - DNA, 25 bp, SARS Virus
tgaacgttattagcgagtatggagg

SEQ ID NO: 172178 - DNA, 25 bp, SARS Virus
gaacgttattatggagtatggagga

SEQ ID NO: 172179 - DNA, 25 bp, SARS Virus
aacgttattatcgagtatggaggat

SEQ ID NO: 172180 - DNA, 25 bp, SARS Virus
acgttattatcgggtatggaggatc

SEQ ID NO: 172181 - DNA, 25 bp, SARS Virus
cgttattatcgagtatggaggatct

SEQ ID NO: 172182 - DNA, 25 bp, SARS Virus
gttattatcgaggatggaggatcta

SEQ ID NO: 172183 - DNA, 25 bp, SARS Virus
ttattatcgagtgtggaggatctat

SEQ ID NO: 172184 - DNA, 25 bp, SARS Virus
tattatcgagtagggaggatctatg

SEQ ID NO: 172185 - DNA, 25 bp, SARS Virus
attatcgagtatggaggatctatgt

SEQ ID NO: 172186 - DNA, 25 bp, SARS Virus
ttatcgagtatggaggatctatgtc

SEQ ID NO: 172187 - DNA, 25 bp, SARS Virus
tatcgagtatgggggatctatgtca

SEQ ID NO: 172188 - DNA, 25 bp, SARS Virus
atcgagtatggaggatctatgtcaa

SEQ ID NO: 172189 - DNA, 25 bp, SARS Virus
tcgagtatggaggatctatgtcaac

SEQ ID NO: 172190 - DNA, 25 bp, SARS Virus
cgagtatggagggtctatgtcaaca

SEQ ID NO: 172191 - DNA, 25 bp, SARS Virus
gagtatggaggagctatgtcaacac

SEQ ID NO: 172192 - DNA, 25 bp, SARS Virus
agtatggaggatgtatgtcaacaca

SEQ ID NO: 172193 - DNA, 25 bp, SARS Virus
gtatggaggatcgatgtcaacacag

SEQ ID NO: 172194 - DNA, 25 bp, SARS Virus
tatggaggatctgtgtcaacacagt

SEQ ID NO: 172195 - DNA, 25 bp, SARS Virus
atggaggatctaggtcaacacagtg

SEQ ID NO: 172196 - DNA, 25 bp, SARS Virus
tggaggatctatgtcaacacagtgt

SEQ ID NO: 172197 - DNA, 25 bp, SARS Virus
ggaggatctatggcaacacagtgta

SEQ ID NO: 172198 - DNA, 25 bp, SARS Virus
gaggatctatgtgaacacagtgtag

SEQ ID NO: 172199 - DNA, 25 bp, SARS Virus
aggatctatgtcgacacagtgtagt

SEQ ID NO: 172200 - DNA, 25 bp, SARS Virus
ggatctatgtcagcacagtgtagtc

SEQ ID NO: 172201 - DNA, 25 bp, SARS Virus
gatctatgtcaagacagtgtagtca

SEQ ID NO: 172202 - DNA, 25 bp, SARS Virus
atctatgtcaacgcagtgtagtcac

SEQ ID NO: 172203 - DNA, 25 bp, SARS Virus
tctatgtcaacagagtgtagtcact

SEQ ID NO: 172204 - DNA, 25 bp, SARS Virus
ctatgtcaacacggtgtagtcactg

SEQ ID NO: 172205 - DNA, 25 bp, SARS Virus
tatgtcaacacagtgtagtcactgt

SEQ ID NO: 172206 - DNA, 25 bp, SARS Virus
atgtcaacacagggtagtcactgta

SEQ ID NO: 172207 - DNA, 25 bp, SARS Virus
tgtcaacacagtgtagtcactgtag

SEQ ID NO: 172208 - DNA, 25 bp, SARS Virus
gtcaacacagtggagtcactgtagt

SEQ ID NO: 172209 - DNA, 25 bp, SARS Virus
tcaacacagtgtggtcactgtagtg

SEQ ID NO: 172210 - DNA, 25 bp, SARS Virus
caacacagtgtagtcactgtagtgt

SEQ ID NO: 172211 - DNA, 25 bp, SARS Virus
aacacagtgtaggcactgtagtgtt

SEQ ID NO: 172212 - DNA, 25 bp, SARS Virus
acacagtgtagtgactgtagtgttg

SEQ ID NO: 172213 - DNA, 25 bp, SARS Virus
cacagtgtagtcgctgtagtgttgg

SEQ ID NO: 172214 - DNA, 25 bp, SARS Virus
acagtgtagtcagtgtagtgttgga

SEQ ID NO: 172215 - DNA, 25 bp, SARS Virus
cagtgtagtcacggtagtgttggac

SEQ ID NO: 172216 - DNA, 25 bp, SARS Virus
agtgtagtcactgtagtgttggacc

SEQ ID NO: 172217 - DNA, 25 bp, SARS Virus
gtgtagtcactggagtgttggaccc

SEQ ID NO: 172218 - DNA, 25 bp, SARS Virus
tgtagtcactgtggtgttggacccc

SEQ ID NO: 172219 - DNA, 25 bp, SARS Virus
gtagtcactgtagtgttggaccccg

SEQ ID NO: 172220 - DNA, 25 bp, SARS Virus
tagtcactgtagggttggaccccgt

SEQ ID NO: 172221 - DNA, 25 bp, SARS Virus
agtcactgtagtgttggaccccgta

SEQ ID NO: 172222 - DNA, 25 bp, SARS Virus
gtcactgtagtggtggaccccgtaa

SEQ ID NO: 172223 - DNA, 25 bp, SARS Virus
tcactgtagtgtgggaccccgtaac

SEQ ID NO: 172224 - DNA, 25 bp, SARS Virus
cactgtagtgttggaccccgtaacg

SEQ ID NO: 172225 - DNA, 25 bp, SARS Virus
actgtagtgttggaccccgtaacgt

SEQ ID NO: 172226 - DNA, 25 bp, SARS Virus
ctgtagtgttgggccccgtaacgtt

SEQ ID NO: 172227 - DNA, 25 bp, SARS Virus
tgtagtgttggagcccgtaacgttt

SEQ ID NO: 172228 - DNA, 25 bp, SARS Virus
gtagtgttggacgccgtaacgtttg

SEQ ID NO: 172229 - DNA, 25 bp, SARS Virus
tagtgttggaccgcgtaacgtttgt

SEQ ID NO: 172230 - DNA, 25 bp, SARS Virus
agtgttggacccggtaacgtttgta

SEQ ID NO: 172231 - DNA, 25 bp, SARS Virus
gtgttggaccccgtaacgtttgtat

SEQ ID NO: 172232 - DNA, 25 bp, SARS Virus
tgttggaccccggaacgtttgtatc

SEQ ID NO: 172233 - DNA, 25 bp, SARS Virus
gttggaccccgtgacgtttgtatcc

SEQ ID NO: 172234 - DNA, 25 bp, SARS Virus
ttggaccccgtagcgtttgtatccc

SEQ ID NO: 172235 - DNA, 25 bp, SARS Virus
tggaccccgtaaggtttgtatccct

SEQ ID NO: 172236 - DNA, 25 bp, SARS Virus
ggaccccgtaacgtttgtatcccta

SEQ ID NO: 172237 - DNA, 25 bp, SARS Virus
gaccccgtaacggttgtatccctaa

SEQ ID NO: 172238 - DNA, 25 bp, SARS Virus
accccgtaacgtgtgtatccctaat

SEQ ID NO: 172239 - DNA, 25 bp, SARS Virus
ccccgtaacgttggtatccctaatt

SEQ ID NO: 172240 - DNA, 25 bp, SARS Virus
cccgtaacgtttgtatccctaattg

SEQ ID NO: 172241 - DNA, 25 bp, SARS Virus
ccgtaacgtttggatccctaattgt

SEQ ID NO: 172242 - DNA, 25 bp, SARS Virus
cgtaacgtttgtgtccctaattgtc

SEQ ID NO: 172243 - DNA, 25 bp, SARS Virus
gtaacgtttgtagccctaattgtct

SEQ ID NO: 172244 - DNA, 25 bp, SARS Virus
taacgtttgtatgcctaattgtctg

SEQ ID NO: 172245 - DNA, 25 bp, SARS Virus
aacgtttgtatcgctaattgtctgt

SEQ ID NO: 172246 - DNA, 25 bp, SARS Virus
acgtttgtatccgtaattgtctgtt

SEQ ID NO: 172247 - DNA, 25 bp, SARS Virus
cgtttgtatcccgaattgtctgttg

SEQ ID NO: 172248 - DNA, 25 bp, SARS Virus
gtttgtatccctgattgtctgttgt

SEQ ID NO: 172249 - DNA, 25 bp, SARS Virus
tttgtatccctagttgtctgttgtg

SEQ ID NO: 172250 - DNA, 25 bp, SARS Virus
ttgtatccctaagtgtctgttgtga

SEQ ID NO: 172251 - DNA, 25 bp, SARS Virus
tgtatccctaatggtctgttgtgat

SEQ ID NO: 172252 - DNA, 25 bp, SARS Virus
gtatccctaattgtctgttgtgatt

SEQ ID NO: 172253 - DNA, 25 bp, SARS Virus
tatccctaattggctgttgtgatta

SEQ ID NO: 172254 - DNA, 25 bp, SARS Virus
atccctaattgtgtgttgtgattaa

SEQ ID NO: 172255 - DNA, 25 bp, SARS Virus
tccctaattgtcggttgtgattaaa

SEQ ID NO: 172256 - DNA, 25 bp, SARS Virus
ccctaattgtctgttgtgattaaac

SEQ ID NO: 172257 - DNA, 25 bp, SARS Virus
cctaattgtctggtgtgattaaaca

SEQ ID NO: 172258 - DNA, 25 bp, SARS Virus
ctaattgtctgtggtgattaaacac

SEQ ID NO: 172259 - DNA, 25 bp, SARS Virus
taattgtctgttgtgattaaacaca

SEQ ID NO: 172260 - DNA, 25 bp, SARS Virus
aattgtctgttgggattaaacacac

SEQ ID NO: 172261 - DNA, 25 bp, SARS Virus
attgtctgttgtgattaaacacact

SEQ ID NO: 172262 - DNA, 25 bp, SARS Virus
ttgtctgttgtggttaaacacacta

SEQ ID NO: 172263 - DNA, 25 bp, SARS Virus
tgtctgttgtgagtaaacacactac

SEQ ID NO: 172264 - DNA, 25 bp, SARS Virus
gtctgttgtgatgaaacacactaca

SEQ ID NO: 172265 - DNA, 25 bp, SARS Virus
tctgttgtgattgaacacactacaa

SEQ ID NO: 172266 - DNA, 25 bp, SARS Virus
ctgttgtgattagacacactacaac

SEQ ID NO: 172267 - DNA, 25 bp, SARS Virus
tgttgtgattaagcacactacaact

SEQ ID NO: 172268 - DNA, 25 bp, SARS Virus
gttgtgattaaagacactacaactt

SEQ ID NO: 172269 - DNA, 25 bp, SARS Virus
ttgtgattaaacgcactacaacttt

SEQ ID NO: 172270 - DNA, 25 bp, SARS Virus
tgtgattaaacagactacaacttta

SEQ ID NO: 172271 - DNA, 25 bp, SARS Virus
gtgattaaacacgctacaactttac

SEQ ID NO: 172272 - DNA, 25 bp, SARS Virus
tgattaaacacagtacaactttact

SEQ ID NO: 172273 - DNA, 25 bp, SARS Virus
gattaaacacacgacaactttactg

SEQ ID NO: 172274 - DNA, 25 bp, SARS Virus
attaaacacactgcaactttactgt

SEQ ID NO: 172275 - DNA, 25 bp, SARS Virus
ttaaacacactagaactttactgta

SEQ ID NO: 172276 - DNA, 25 bp, SARS Virus
taaacacactacgactttactgtac

SEQ ID NO: 172277 - DNA, 25 bp, SARS Virus
aaacacactacagctttactgtacc

SEQ ID NO: 172278 - DNA, 25 bp, SARS Virus
aacacactacaagtttactgtacca

SEQ ID NO: 172279 - DNA, 25 bp, SARS Virus
acacactacaacgttactgtaccag

SEQ ID NO: 172280 - DNA, 25 bp, SARS Virus
cacactacaactgtactgtaccagt

SEQ ID NO: 172281 - DNA, 25 bp, SARS Virus
acactacaacttgactgtaccagta

SEQ ID NO: 172282 - DNA, 25 bp, SARS Virus
cactacaactttgctgtaccagtat

SEQ ID NO: 172283 - DNA, 25 bp, SARS Virus
actacaactttagtgtaccagtatc

SEQ ID NO: 172284 - DNA, 25 bp, SARS Virus
ctacaactttacggtaccagtatcg

SEQ ID NO: 172285 - DNA, 25 bp, SARS Virus
tacaactttactgtaccagtatcgt

SEQ ID NO: 172286 - DNA, 25 bp, SARS Virus
acaactttactggaccagtatcgtc

SEQ ID NO: 172287 - DNA, 25 bp, SARS Virus
caactttactgtgccagtatcgtcg

SEQ ID NO: 172288 - DNA, 25 bp, SARS Virus
aactttactgtagcagtatcgtcgt

SEQ ID NO: 172289 - DNA, 25 bp, SARS Virus
actttactgtacgagtatcgtcgtg

SEQ ID NO: 172290 - DNA, 25 bp, SARS Virus
ctttactgtaccggtatcgtcgtga

SEQ ID NO: 172291 - DNA, 25 bp, SARS Virus
tttactgtaccagtatcgtcgtgaa

SEQ ID NO: 172292 - DNA, 25 bp, SARS Virus
ttactgtaccaggatcgtcgtgaac

SEQ ID NO: 172293 - DNA, 25 bp, SARS Virus
tactgtaccagtgtcgtcgtgaacg

SEQ ID NO: 172294 - DNA, 25 bp, SARS Virus
actgtaccagtagcgtcgtgaacgt

SEQ ID NO: 172295 - DNA, 25 bp, SARS Virus
ctgtaccagtatggtcgtgaacgtt

SEQ ID NO: 172296 - DNA, 25 bp, SARS Virus
tgtaccagtatcgtcgtgaacgttg

SEQ ID NO: 172297 - DNA, 25 bp, SARS Virus
aggttagacatgtaatgataaaaat

SEQ ID NO: 172298 - DNA, 25 bp, SARS Virus
ggttagacatgatatgataaaaatc

SEQ ID NO: 172299 - DNA, 25 bp, SARS Virus
gttagacatgaattgataaaaatca

SEQ ID NO: 172300 - DNA, 25 bp, SARS Virus
ttagacatgaaatgataaaaatcaa

SEQ ID NO: 172301 - DNA, 25 bp, SARS Virus
tagacatgaaattataaaaatcaat

SEQ ID NO: 172302 - DNA, 25 bp, SARS Virus
agacatgaaatgttaaaaatcaatg

SEQ ID NO: 172303 - DNA, 25 bp, SARS Virus
gacatgaaatgataaaaatcaatgt

SEQ ID NO: 172304 - DNA, 25 bp, SARS Virus
acatgaaatgattaaaatcaatgtg

SEQ ID NO: 172305 - DNA, 25 bp, SARS Virus
catgaaatgatataaatcaatgtgc

SEQ ID NO: 172306 - DNA, 25 bp, SARS Virus
atgaaatgataataatcaatgtgcc

SEQ ID NO: 172307 - DNA, 25 bp, SARS Virus
tgaaatgataaatatcaatgtgcca

SEQ ID NO: 172308 - DNA, 25 bp, SARS Virus
gaaatgataaaattcaatgtgccat

SEQ ID NO: 172309 - DNA, 25 bp, SARS Virus
aaatgataaaaatcaatgtgccatt

SEQ ID NO: 172310 - DNA, 25 bp, SARS Virus
aatgataaaaattaatgtgccattg

SEQ ID NO: 172311 - DNA, 25 bp, SARS Virus
atgataaaaatctatgtgccattgg

SEQ ID NO: 172312 - DNA, 25 bp, SARS Virus
tgataaaaatcattgtgccattggt

SEQ ID NO: 172313 - DNA, 25 bp, SARS Virus
gataaaaatcaatgtgccattggtc

SEQ ID NO: 172314 - DNA, 25 bp, SARS Virus
ataaaaatcaatttgccattggtca

SEQ ID NO: 172315 - DNA, 25 bp, SARS Virus
taaaaatcaatgtgccattggtcat

SEQ ID NO: 172316 - DNA, 25 bp, SARS Virus
aaaaatcaatgttccattggtcatt

SEQ ID NO: 172317 - DNA, 25 bp, SARS Virus
aaaatcaatgtgtcattggtcattt

SEQ ID NO: 172318 - DNA, 25 bp, SARS Virus
aaatcaatgtgctattggtcatttc

SEQ ID NO: 172319 - DNA, 25 bp, SARS Virus
aatcaatgtgcctttggtcatttct

SEQ ID NO: 172320 - DNA, 25 bp, SARS Virus
atcaatgtgccattggtcatttctg

SEQ ID NO: 172321 - DNA, 25 bp, SARS Virus
tcaatgtgccattggtcatttctgt

SEQ ID NO: 172322 - DNA, 25 bp, SARS Virus
caatgtgccatttgtcatttctgta

SEQ ID NO: 172323 - DNA, 25 bp, SARS Virus
aatgtgccattgttcatttctgtat

SEQ ID NO: 172324 - DNA, 25 bp, SARS Virus
atgtgccattggtcatttctgtatc

SEQ ID NO: 172325 - DNA, 25 bp, SARS Virus
tgtgccattggttatttctgtatca

SEQ ID NO: 172326 - DNA, 25 bp, SARS Virus
gtgccattggtcttttctgtatcaa

SEQ ID NO: 172327 - DNA, 25 bp, SARS Virus
tgccattggtcatttctgtatcaaa

SEQ ID NO: 172328 - DNA, 25 bp, SARS Virus
gccattggtcatttctgtatcaaag

SEQ ID NO: 172329 - DNA, 25 bp, SARS Virus
ccattggtcatttctgtatcaaaga

SEQ ID NO: 172330 - DNA, 25 bp, SARS Virus
cattggtcatttttgtatcaaagac

SEQ ID NO: 172331 - DNA, 25 bp, SARS Virus
attggtcatttctgtatcaaagaca

SEQ ID NO: 172332 - DNA, 25 bp, SARS Virus
ttggtcatttctttatcaaagacaa

SEQ ID NO: 172333 - DNA, 25 bp, SARS Virus
tggtcatttctgtatcaaagacaag

SEQ ID NO: 172334 - DNA, 25 bp, SARS Virus
ggtcatttctgtttcaaagacaagt

SEQ ID NO: 172335 - DNA, 25 bp, SARS Virus
gtcatttctgtatcaaagacaagtt

SEQ ID NO: 172336 - DNA, 25 bp, SARS Virus
tcatttctgtattaaagacaagtta

SEQ ID NO: 172337 - DNA, 25 bp, SARS Virus
catttctgtatctaagacaagttac

SEQ ID NO: 172338 - DNA, 25 bp, SARS Virus
atttctgtatcatagacaagttacc

SEQ ID NO: 172339 - DNA, 25 bp, SARS Virus
tttctgtatcaatgacaagttacca

SEQ ID NO: 172340 - DNA, 25 bp, SARS Virus
ttctgtatcaaatacaagttaccac

SEQ ID NO: 172341 - DNA, 25 bp, SARS Virus
tctgtatcaaagtcaagttaccacc

SEQ ID NO: 172342 - DNA, 25 bp, SARS Virus
ctgtatcaaagataagttaccacca

SEQ ID NO: 172343 - DNA, 25 bp, SARS Virus
tgtatcaaagactagttaccaccag

SEQ ID NO: 172344 - DNA, 25 bp, SARS Virus
gtatcaaagacatgttaccaccaga

SEQ ID NO: 172345 - DNA, 25 bp, SARS Virus
tatcaaagacaatttaccaccagat

SEQ ID NO: 172346 - DNA, 25 bp, SARS Virus
atcaaagacaagttaccaccagatc

SEQ ID NO: 172347 - DNA, 25 bp, SARS Virus
tcaaagacaagttaccaccagatcc

SEQ ID NO: 172348 - DNA, 25 bp, SARS Virus
caaagacaagtttccaccagatcca

SEQ ID NO: 172349 - DNA, 25 bp, SARS Virus
aaagacaagttatcaccagatccaa

SEQ ID NO: 172350 - DNA, 25 bp, SARS Virus
aagacaagttactaccagatccaaa

SEQ ID NO: 172351 - DNA, 25 bp, SARS Virus
agacaagttacctccagatccaaaa

SEQ ID NO: 172352 - DNA, 25 bp, SARS Virus
gacaagttaccatcagatccaaaag

SEQ ID NO: 172353 - DNA, 25 bp, SARS Virus
acaagttaccactagatccaaaagg

SEQ ID NO: 172354 - DNA, 25 bp, SARS Virus
caagttaccacctgatccaaaaggt

SEQ ID NO: 172355 - DNA, 25 bp, SARS Virus
aagttaccaccatatccaaaaggtt

SEQ ID NO: 172356 - DNA, 25 bp, SARS Virus
agttaccaccagttccaaaaggttg

SEQ ID NO: 172357 - DNA, 25 bp, SARS Virus
gttaccaccagatccaaaaggttgg

SEQ ID NO: 172358 - DNA, 25 bp, SARS Virus
ttaccaccagattcaaaaggttgga

SEQ ID NO: 172359 - DNA, 25 bp, SARS Virus
taccaccagatctaaaaggttggag

SEQ ID NO: 172360 - DNA, 25 bp, SARS Virus
accaccagatcctaaaggttggagg

SEQ ID NO: 172361 - DNA, 25 bp, SARS Virus
ccaccagatccataaggttggaggg

SEQ ID NO: 172362 - DNA, 25 bp, SARS Virus
caccagatccaataggttggagggt

SEQ ID NO: 172363 - DNA, 25 bp, SARS Virus
accagatccaaatggttggagggta

SEQ ID NO: 172364 - DNA, 25 bp, SARS Virus
ccagatccaaaatgttggagggtac

SEQ ID NO: 172365 - DNA, 25 bp, SARS Virus
cagatccaaaagtttggagggtact

SEQ ID NO: 172366 - DNA, 25 bp, SARS Virus
agatccaaaaggttggagggtactt

SEQ ID NO: 172367 - DNA, 25 bp, SARS Virus
gatccaaaaggttggagggtacttt

SEQ ID NO: 172368 - DNA, 25 bp, SARS Virus
atccaaaaggtttgagggtactttc

SEQ ID NO: 172369 - DNA, 25 bp, SARS Virus
tccaaaaggttgtagggtactttct

SEQ ID NO: 172370 - DNA, 25 bp, SARS Virus
ccaaaaggttggtgggtactttcta

SEQ ID NO: 172371 - DNA, 25 bp, SARS Virus
caaaaggttggatggtactttctac

SEQ ID NO: 172372 - DNA, 25 bp, SARS Virus
aaaaggttggagtgtactttctacg

SEQ ID NO: 172373 - DNA, 25 bp, SARS Virus
aaaggttggaggttactttctacgt

SEQ ID NO: 172374 - DNA, 25 bp, SARS Virus
aaggttggagggtactttctacgtt

SEQ ID NO: 172375 - DNA, 25 bp, SARS Virus
aggttggagggttctttctacgtta

SEQ ID NO: 172376 - DNA, 25 bp, SARS Virus
ggttggagggtattttctacgttaa

SEQ ID NO: 172377 - DNA, 25 bp, SARS Virus
gttggagggtactttctacgttaag

SEQ ID NO: 172378 - DNA, 25 bp, SARS Virus
ttggagggtactttctacgttaaga

SEQ ID NO: 172379 - DNA, 25 bp, SARS Virus
tggagggtactttctacgttaagag

SEQ ID NO: 172380 - DNA, 25 bp, SARS Virus
ggagggtactttttacgttaagaga

SEQ ID NO: 172381 - DNA, 25 bp, SARS Virus
gagggtactttctacgttaagagac

SEQ ID NO: 172382 - DNA, 25 bp, SARS Virus
agggtactttcttcgttaagagaca

SEQ ID NO: 172383 - DNA, 25 bp, SARS Virus
gggtactttctatgttaagagacag

SEQ ID NO: 172384 - DNA, 25 bp, SARS Virus
ggtactttctactttaagagacagt

SEQ ID NO: 172385 - DNA, 25 bp, SARS Virus
gtactttctacgttaagagacagtc

SEQ ID NO: 172386 - DNA, 25 bp, SARS Virus
tactttctacgttaagagacagtct

SEQ ID NO: 172387 - DNA, 25 bp, SARS Virus
actttctacgtttagagacagtctc

SEQ ID NO: 172388 - DNA, 25 bp, SARS Virus
ctttctacgttatgagacagtctct

SEQ ID NO: 172389 - DNA, 25 bp, SARS Virus
tttctacgttaatagacagtctctc

SEQ ID NO: 172390 - DNA, 25 bp, SARS Virus
ttctacgttaagtgacagtctctca

SEQ ID NO: 172391 - DNA, 25 bp, SARS Virus
tctacgttaagatacagtctctcat

SEQ ID NO: 172392 - DNA, 25 bp, SARS Virus
ctacgttaagagtcagtctctcatg

SEQ ID NO: 172393 - DNA, 25 bp, SARS Virus
tacgttaagagatagtctctcatga

SEQ ID NO: 172394 - DNA, 25 bp, SARS Virus
acgttaagagactgtctctcatgaa

SEQ ID NO: 172395 - DNA, 25 bp, SARS Virus
cgttaagagacattctctcatgaag

SEQ ID NO: 172396 - DNA, 25 bp, SARS Virus
gttaagagacagtctctcatgaagc

SEQ ID NO: 172397 - DNA, 25 bp, SARS Virus
ttaagagacagtttctcatgaagcg

SEQ ID NO: 172398 - DNA, 25 bp, SARS Virus
taagagacagtctctcatgaagcgc

SEQ ID NO: 172399 - DNA, 25 bp, SARS Virus
aagagacagtctttcatgaagcgca

SEQ ID NO: 172400 - DNA, 25 bp, SARS Virus
agagacagtctctcatgaagcgcat

SEQ ID NO: 172401 - DNA, 25 bp, SARS Virus
gagacagtctcttatgaagcgcatg

SEQ ID NO: 172402 - DNA, 25 bp, SARS Virus
agacagtctctcttgaagcgcatgt

SEQ ID NO: 172403 - DNA, 25 bp, SARS Virus
gacagtctctcatgaagcgcatgtc

SEQ ID NO: 172404 - DNA, 25 bp, SARS Virus
acagtctctcattaagcgcatgtca

SEQ ID NO: 172405 - DNA, 25 bp, SARS Virus
cagtctctcatgtagcgcatgtcac

SEQ ID NO: 172406 - DNA, 25 bp, SARS Virus
agtctctcatgatgcgcatgtcacc

SEQ ID NO: 172407 - DNA, 25 bp, SARS Virus
gtctctcatgaatcgcatgtcaccg

SEQ ID NO: 172408 - DNA, 25 bp, SARS Virus
tctctcatgaagtgcatgtcaccgt

SEQ ID NO: 172409 - DNA, 25 bp, SARS Virus
ctctcatgaagctcatgtcaccgtt

SEQ ID NO: 172410 - DNA, 25 bp, SARS Virus
tctcatgaagcgtatgtcaccgtta

SEQ ID NO: 172411 - DNA, 25 bp, SARS Virus
ctcatgaagcgcttgtcaccgttat

SEQ ID NO: 172412 - DNA, 25 bp, SARS Virus
tcatgaagcgcatgtcaccgttatg

SEQ ID NO: 172413 - DNA, 25 bp, SARS Virus
catgaagcgcatttcaccgttatgg

SEQ ID NO: 172414 - DNA, 25 bp, SARS Virus
atgaagcgcatgtcaccgttatggt

SEQ ID NO: 172415 - DNA, 25 bp, SARS Virus
tgaagcgcatgttaccgttatggta

SEQ ID NO: 172416 - DNA, 25 bp, SARS Virus
gaagcgcatgtctccgttatggtat

SEQ ID NO: 172417 - DNA, 25 bp, SARS Virus
aagcgcatgtcatcgttatggtata

SEQ ID NO: 172418 - DNA, 25 bp, SARS Virus
agcgcatgtcactgttatggtatac

SEQ ID NO: 172419 - DNA, 25 bp, SARS Virus
gcgcatgtcacctttatggtatact

SEQ ID NO: 172420 - DNA, 25 bp, SARS Virus
cgcatgtcaccgttatggtatactg

SEQ ID NO: 172421 - DNA, 25 bp, SARS Virus
gcatgtcaccgttatggtatactgt

SEQ ID NO: 172422 - DNA, 25 bp, SARS Virus
catgtcaccgttttggtatactgtc

SEQ ID NO: 172423 - DNA, 25 bp, SARS Virus
atgtcaccgttatggtatactgtcg

SEQ ID NO: 172424 - DNA, 25 bp, SARS Virus
tgtcaccgttattgtatactgtcga

SEQ ID NO: 172425 - DNA, 25 bp, SARS Virus
gtcaccgttatgttatactgtcgaa

SEQ ID NO: 172426 - DNA, 25 bp, SARS Virus
tcaccgttatggtatactgtcgaat

SEQ ID NO: 172427 - DNA, 25 bp, SARS Virus
caccgttatggtttactgtcgaatt

SEQ ID NO: 172428 - DNA, 25 bp, SARS Virus
accgttatggtatactgtcgaattt

SEQ ID NO: 172429 - DNA, 25 bp, SARS Virus
ccgttatggtattctgtcgaattta

SEQ ID NO: 172430 - DNA, 25 bp, SARS Virus
cgttatggtatattgtcgaatttac

SEQ ID NO: 172431 - DNA, 25 bp, SARS Virus
gttatggtatactgtcgaatttaca

SEQ ID NO: 172432 - DNA, 25 bp, SARS Virus
ttatggtatactttcgaatttacaa

SEQ ID NO: 172433 - DNA, 25 bp, SARS Virus
tatggtatactgtcgaatttacaaa

SEQ ID NO: 172434 - DNA, 25 bp, SARS Virus
atggtatactgttgaatttacaaag

SEQ ID NO: 172435 - DNA, 25 bp, SARS Virus
tggtatactgtctaatttacaaagg

SEQ ID NO: 172436 - DNA, 25 bp, SARS Virus
ggtatactgtcgtatttacaaagga

SEQ ID NO: 172437 - DNA, 25 bp, SARS Virus
gtatactgtcgattttacaaaggag

SEQ ID NO: 172438 - DNA, 25 bp, SARS Virus
tatactgtcgaatttacaaaggagt

SEQ ID NO: 172439 - DNA, 25 bp, SARS Virus
atactgtcgaatttacaaaggagtc

SEQ ID NO: 172440 - DNA, 25 bp, SARS Virus
tactgtcgaatttacaaaggagtca

SEQ ID NO: 172441 - DNA, 25 bp, SARS Virus
actgtcgaattttcaaaggagtcac

SEQ ID NO: 172442 - DNA, 25 bp, SARS Virus
ctgtcgaatttataaaggagtcacc

SEQ ID NO: 172443 - DNA, 25 bp, SARS Virus
tgtcgaatttactaaggagtcaccg

SEQ ID NO: 172444 - DNA, 25 bp, SARS Virus
gtcgaatttacataggagtcaccga

SEQ ID NO: 172445 - DNA, 25 bp, SARS Virus
tcgaatttacaatggagtcaccgaa

SEQ ID NO: 172446 - DNA, 25 bp, SARS Virus
cgaatttacaaatgagtcaccgaaa

SEQ ID NO: 172447 - DNA, 25 bp, SARS Virus
gaatttacaaagtagtcaccgaaac

SEQ ID NO: 172448 - DNA, 25 bp, SARS Virus
aatttacaaaggtgtcaccgaaact

SEQ ID NO: 172449 - DNA, 25 bp, SARS Virus
atttacaaaggattcaccgaaactc

SEQ ID NO: 172450 - DNA, 25 bp, SARS Virus
tttacaaaggagtcaccgaaactcg

SEQ ID NO: 172451 - DNA, 25 bp, SARS Virus
ttacaaaggagttaccgaaactcgc

SEQ ID NO: 172452 - DNA, 25 bp, SARS Virus
tacaaaggagtctccgaaactcgca

SEQ ID NO: 172453 - DNA, 25 bp, SARS Virus
acaaaggagtcatcgaaactcgcaa

SEQ ID NO: 172454 - DNA, 25 bp, SARS Virus
caaaggagtcactgaaactcgcaaa

SEQ ID NO: 172455 - DNA, 25 bp, SARS Virus
aaaggagtcacctaaactcgcaaag

SEQ ID NO: 172456 - DNA, 25 bp, SARS Virus
aaggagtcaccgtaactcgcaaaga

SEQ ID NO: 172457 - DNA, 25 bp, SARS Virus
aggagtcaccgatactcgcaaagac

SEQ ID NO: 172458 - DNA, 25 bp, SARS Virus
ggagtcaccgaatctcgcaaagacg

SEQ ID NO: 172459 - DNA, 25 bp, SARS Virus
gagtcaccgaaattcgcaaagacga

SEQ ID NO: 172460 - DNA, 25 bp, SARS Virus
agtcaccgaaactcgcaaagacgac

SEQ ID NO: 172461 - DNA, 25 bp, SARS Virus
gtcaccgaaacttgcaaagacgacg

SEQ ID NO: 172462 - DNA, 25 bp, SARS Virus
tcaccgaaactctcaaagacgacgc

SEQ ID NO: 172463 - DNA, 25 bp, SARS Virus
caccgaaactcgtaaagacgacgct

SEQ ID NO: 172464 - DNA, 25 bp, SARS Virus
accgaaactcgctaagacgacgctt

SEQ ID NO: 172465 - DNA, 25 bp, SARS Virus
ccgaaactcgcatagacgacgcttt

SEQ ID NO: 172466 - DNA, 25 bp, SARS Virus
cgaaactcgcaatgacgacgctttt

SEQ ID NO: 172467 - DNA, 25 bp, SARS Virus
gaaactcgcaaatacgacgcttttc

SEQ ID NO: 172468 - DNA, 25 bp, SARS Virus
aaactcgcaaagtcgacgcttttcg

SEQ ID NO: 172469 - DNA, 25 bp, SARS Virus
aactcgcaaagatgacgcttttcga

SEQ ID NO: 172470 - DNA, 25 bp, SARS Virus
actcgcaaagactacgcttttcgaa

SEQ ID NO: 172471 - DNA, 25 bp, SARS Virus
ctcgcaaagacgtcgcttttcgaac

SEQ ID NO: 172472 - DNA, 25 bp, SARS Virus
tcgcaaagacgatgcttttcgaact

SEQ ID NO: 172473 - DNA, 25 bp, SARS Virus
cgcaaagacgactcttttcgaactc

SEQ ID NO: 172474 - DNA, 25 bp, SARS Virus
gcaaagacgacgtttttcgaactca

SEQ ID NO: 172475 - DNA, 25 bp, SARS Virus
caaagacgacgcttttcgaactcag

SEQ ID NO: 172476 - DNA, 25 bp, SARS Virus
aaagacgacgcttttcgaactcaga

SEQ ID NO: 172477 - DNA, 25 bp, SARS Virus
aagacgacgcttttcgaactcagag

SEQ ID NO: 172478 - DNA, 25 bp, SARS Virus
agacgacgcttttcgaactcagaga

SEQ ID NO: 172479 - DNA, 25 bp, SARS Virus
gacgacgctttttgaactcagagag

SEQ ID NO: 172480 - DNA, 25 bp, SARS Virus
acgacgcttttctaactcagagagt

SEQ ID NO: 172481 - DNA, 25 bp, SARS Virus
cgacgcttttcgtactcagagagtc

SEQ ID NO: 172482 - DNA, 25 bp, SARS Virus
gacgcttttcgatctcagagagtca

SEQ ID NO: 172483 - DNA, 25 bp, SARS Virus
acgcttttcgaattcagagagtcat

SEQ ID NO: 172484 - DNA, 25 bp, SARS Virus
cgcttttcgaactcagagagtcatg

SEQ ID NO: 172485 - DNA, 25 bp, SARS Virus
gcttttcgaacttagagagtcatgt

SEQ ID NO: 172486 - DNA, 25 bp, SARS Virus
cttttcgaactctgagagtcatgtt

SEQ ID NO: 172487 - DNA, 25 bp, SARS Virus
ttttcgaactcatagagtcatgttc

SEQ ID NO: 172488 - DNA, 25 bp, SARS Virus
tttcgaactcagtgagtcatgttca

SEQ ID NO: 172489 - DNA, 25 bp, SARS Virus
ttcgaactcagatagtcatgttcac

SEQ ID NO: 172490 - DNA, 25 bp, SARS Virus
tcgaactcagagtgtcatgttcaca

SEQ ID NO: 172491 - DNA, 25 bp, SARS Virus
cgaactcagagattcatgttcacaa

SEQ ID NO: 172492 - DNA, 25 bp, SARS Virus
gaactcagagagtcatgttcacaac

SEQ ID NO: 172493 - DNA, 25 bp, SARS Virus
aactcagagagttatgttcacaacc

SEQ ID NO: 172494 - DNA, 25 bp, SARS Virus
actcagagagtcttgttcacaaccg

SEQ ID NO: 172495 - DNA, 25 bp, SARS Virus
ctcagagagtcatgttcacaaccgt

SEQ ID NO: 172496 - DNA, 25 bp, SARS Virus
tcagagagtcattttcacaaccgtt

SEQ ID NO: 172497 - DNA, 25 bp, SARS Virus
cagagagtcatgttcacaaccgttc

SEQ ID NO: 172498 - DNA, 25 bp, SARS Virus
agagagtcatgttcacaaccgttca

SEQ ID NO: 172499 - DNA, 25 bp, SARS Virus
gagagtcatgtttacaaccgttcat

SEQ ID NO: 172500 - DNA, 25 bp, SARS Virus
agagtcatgttctcaaccgttcata

SEQ ID NO: 172501 - DNA, 25 bp, SARS Virus
gagtcatgttcataaccgttcatac

SEQ ID NO: 172502 - DNA, 25 bp, SARS Virus
agtcatgttcactaccgttcataca

SEQ ID NO: 172503 - DNA, 25 bp, SARS Virus
gtcatgttcacatccgttcatacat

SEQ ID NO: 172504 - DNA, 25 bp, SARS Virus
tcatgttcacaatcgttcatacatt

SEQ ID NO: 172505 - DNA, 25 bp, SARS Virus
catgttcacaactgttcatacatta

SEQ ID NO: 172506 - DNA, 25 bp, SARS Virus
atgttcacaacctttcatacattag

SEQ ID NO: 172507 - DNA, 25 bp, SARS Virus
tgttcacaaccgttcatacattagc

SEQ ID NO: 172508 - DNA, 25 bp, SARS Virus
gttcacaaccgttcatacattagcg

SEQ ID NO: 172509 - DNA, 25 bp, SARS Virus
ttcacaaccgtttatacattagcgg

SEQ ID NO: 172510 - DNA, 25 bp, SARS Virus
tcacaaccgttcttacattagcggt

SEQ ID NO: 172511 - DNA, 25 bp, SARS Virus
cacaaccgttcatacattagcggtc

SEQ ID NO: 172512 - DNA, 25 bp, SARS Virus
acaaccgttcattcattagcggtcg

SEQ ID NO: 172513 - DNA, 25 bp, SARS Virus
caaccgttcatatattagcggtcgt

SEQ ID NO: 172514 - DNA, 25 bp, SARS Virus
aaccgttcatactttagcggtcgta

SEQ ID NO: 172515 - DNA, 25 bp, SARS Virus
accgttcatacattagcggtcgtaa

SEQ ID NO: 172516 - DNA, 25 bp, SARS Virus
ccgttcatacattagcggtcgtaat

SEQ ID NO: 172517 - DNA, 25 bp, SARS Virus
cgttcatacatttgcggtcgtaatc

SEQ ID NO: 172518 - DNA, 25 bp, SARS Virus
gttcatacattatcggtcgtaatca

SEQ ID NO: 172519 - DNA, 25 bp, SARS Virus
ttcatacattagtggtcgtaatcag

SEQ ID NO: 172520 - DNA, 25 bp, SARS Virus
tcatacattagctgtcgtaatcagg

SEQ ID NO: 172521 - DNA, 25 bp, SARS Virus
catacattagcgttcgtaatcaggt

SEQ ID NO: 172522 - DNA, 25 bp, SARS Virus
atacattagcggtcgtaatcaggtt

SEQ ID NO: 172523 - DNA, 25 bp, SARS Virus
tacattagcggttgtaatcaggtta

SEQ ID NO: 172524 - DNA, 25 bp, SARS Virus
acattagcggtcttaatcaggttag

SEQ ID NO: 172525 - DNA, 25 bp, SARS Virus
cattagcggtcgtaatcaggttagt

SEQ ID NO: 172526 - DNA, 25 bp, SARS Virus
attagcggtcgttatcaggttagtg

SEQ ID NO: 172527 - DNA, 25 bp, SARS Virus
ttagcggtcgtattcaggttagtgt

SEQ ID NO: 172528 - DNA, 25 bp, SARS Virus
tagcggtcgtaatcaggttagtgta

SEQ ID NO: 172529 - DNA, 25 bp, SARS Virus
agcggtcgtaattaggttagtgtac

SEQ ID NO: 172530 - DNA, 25 bp, SARS Virus
gcggtcgtaatctggttagtgtaca

SEQ ID NO: 172531 - DNA, 25 bp, SARS Virus
cggtcgtaatcatgttagtgtacaa

SEQ ID NO: 172532 - DNA, 25 bp, SARS Virus
ggtcgtaatcagtttagtgtacaac

SEQ ID NO: 172533 - DNA, 25 bp, SARS Virus
gtcgtaatcaggttagtgtacaacg

SEQ ID NO: 172534 - DNA, 25 bp, SARS Virus
tcgtaatcaggttagtgtacaacga

SEQ ID NO: 172535 - DNA, 25 bp, SARS Virus
cgtaatcaggtttgtgtacaacgat

SEQ ID NO: 172536 - DNA, 25 bp, SARS Virus
gtaatcaggttattgtacaacgata

SEQ ID NO: 172537 - DNA, 25 bp, SARS Virus
taatcaggttagtgtacaacgatag

SEQ ID NO: 172538 - DNA, 25 bp, SARS Virus
aatcaggttagtttacaacgatagc

SEQ ID NO: 172539 - DNA, 25 bp, SARS Virus
atcaggttagtgtacaacgatagcg

SEQ ID NO: 172540 - DNA, 25 bp, SARS Virus
tcaggttagtgttcaacgatagcgt

SEQ ID NO: 172541 - DNA, 25 bp, SARS Virus
caggttagtgtataacgatagcgta

SEQ ID NO: 172542 - DNA, 25 bp, SARS Virus
aggttagtgtactacgatagcgtaa

SEQ ID NO: 172543 - DNA, 25 bp, SARS Virus
ggttagtgtacatcgatagcgtaac

SEQ ID NO: 172544 - DNA, 25 bp, SARS Virus
gttagtgtacaatgatagcgtaact

SEQ ID NO: 172545 - DNA, 25 bp, SARS Virus
ttagtgtacaactatagcgtaactt

SEQ ID NO: 172546 - DNA, 25 bp, SARS Virus
tagtgtacaacgttagcgtaacttc

SEQ ID NO: 172547 - DNA, 25 bp, SARS Virus
agtgtacaacgatagcgtaacttca

SEQ ID NO: 172548 - DNA, 25 bp, SARS Virus
gtgtacaacgattgcgtaacttcag

SEQ ID NO: 172549 - DNA, 25 bp, SARS Virus
tgtacaacgatatcgtaacttcagt

SEQ ID NO: 172550 - DNA, 25 bp, SARS Virus
gtacaacgatagtgtaacttcagtc

SEQ ID NO: 172551 - DNA, 25 bp, SARS Virus
tacaacgatagcttaacttcagtca

SEQ ID NO: 172552 - DNA, 25 bp, SARS Virus
acaacgatagcgtaacttcagtcac

SEQ ID NO: 172553 - DNA, 25 bp, SARS Virus
caacgatagcgttacttcagtcact

SEQ ID NO: 172554 - DNA, 25 bp, SARS Virus
aacgatagcgtatcttcagtcactg

SEQ ID NO: 172555 - DNA, 25 bp, SARS Virus
acgatagcgtaatttcagtcactgt

SEQ ID NO: 172556 - DNA, 25 bp, SARS Virus
cgatagcgtaacttcagtcactgta

SEQ ID NO: 172557 - DNA, 25 bp, SARS Virus
gatagcgtaacttcagtcactgtaa

SEQ ID NO: 172558 - DNA, 25 bp, SARS Virus
atagcgtaactttagtcactgtaac

SEQ ID NO: 172559 - DNA, 25 bp, SARS Virus
tagcgtaacttctgtcactgtaaca

SEQ ID NO: 172560 - DNA, 25 bp, SARS Virus
agcgtaacttcattcactgtaacag

SEQ ID NO: 172561 - DNA, 25 bp, SARS Virus
gcgtaacttcagtcactgtaacagt

SEQ ID NO: 172562 - DNA, 25 bp, SARS Virus
cgtaacttcagttactgtaacagtg

SEQ ID NO: 172563 - DNA, 25 bp, SARS Virus
gtaacttcagtctctgtaacagtga

SEQ ID NO: 172564 - DNA, 25 bp, SARS Virus
taacttcagtcattgtaacagtgac

SEQ ID NO: 172565 - DNA, 25 bp, SARS Virus
aacttcagtcactgtaacagtgacg

SEQ ID NO: 172566 - DNA, 25 bp, SARS Virus
acttcagtcactttaacagtgacgg

SEQ ID NO: 172567 - DNA, 25 bp, SARS Virus
cttcagtcactgtaacagtgacgga

SEQ ID NO: 172568 - DNA, 25 bp, SARS Virus
ttcagtcactgttacagtgacggat

SEQ ID NO: 172569 - DNA, 25 bp, SARS Virus
tcagtcactgtatcagtgacggatg

SEQ ID NO: 172570 - DNA, 25 bp, SARS Virus
cagtcactgtaatagtgacggatgt

SEQ ID NO: 172571 - DNA, 25 bp, SARS Virus
agtcactgtaactgtgacggatgtg

SEQ ID NO: 172572 - DNA, 25 bp, SARS Virus
gtcactgtaacattgacggatgtgt

SEQ ID NO: 172573 - DNA, 25 bp, SARS Virus
tcactgtaacagtgacggatgtgta

SEQ ID NO: 172574 - DNA, 25 bp, SARS Virus
cactgtaacagttacggatgtgtac

SEQ ID NO: 172575 - DNA, 25 bp, SARS Virus
actgtaacagtgtcggatgtgtaca

SEQ ID NO: 172576 - DNA, 25 bp, SARS Virus
ctgtaacagtgatggatgtgtacac

SEQ ID NO: 172577 - DNA, 25 bp, SARS Virus
tgtaacagtgactgatgtgtacaca

SEQ ID NO: 172578 - DNA, 25 bp, SARS Virus
gtaacagtgacgtatgtgtacacaa

SEQ ID NO: 172579 - DNA, 25 bp, SARS Virus
taacagtgacggttgtgtacacaaa

SEQ ID NO: 172580 - DNA, 25 bp, SARS Virus
aacagtgacggatgtgtacacaaaa

SEQ ID NO: 172581 - DNA, 25 bp, SARS Virus
acagtgacggatttgtacacaaaaa

SEQ ID NO: 172582 - DNA, 25 bp, SARS Virus
cagtgacggatgtgtacacaaaaac

SEQ ID NO: 172583 - DNA, 25 bp, SARS Virus
agtgacggatgtttacacaaaaaca

SEQ ID NO: 172584 - DNA, 25 bp, SARS Virus
gtgacggatgtgtacacaaaaacat

SEQ ID NO: 172585 - DNA, 25 bp, SARS Virus
tgacggatgtgttcacaaaaacata

SEQ ID NO: 172586 - DNA, 25 bp, SARS Virus
gacggatgtgtatacaaaaacatat

SEQ ID NO: 172587 - DNA, 25 bp, SARS Virus
acggatgtgtactcaaaaacatatt

SEQ ID NO: 172588 - DNA, 25 bp, SARS Virus
cggatgtgtacataaaaacatattt

SEQ ID NO: 172589 - DNA, 25 bp, SARS Virus
ggatgtgtacactaaaacatatttg

SEQ ID NO: 172590 - DNA, 25 bp, SARS Virus
gatgtgtacacataaacatatttgg

SEQ ID NO: 172591 - DNA, 25 bp, SARS Virus
atgtgtacacaataacatatttggt

SEQ ID NO: 172592 - DNA, 25 bp, SARS Virus
tgtgtacacaaatacatatttggtt

SEQ ID NO: 172593 - DNA, 25 bp, SARS Virus
gtgtacacaaaatcatatttggttt

SEQ ID NO: 172594 - DNA, 25 bp, SARS Virus
tgtacacaaaaatatatttggtttt

SEQ ID NO: 172595 - DNA, 25 bp, SARS Virus
gtacacaaaaacttatttggttttt

SEQ ID NO: 172596 - DNA, 25 bp, SARS Virus
tacacaaaaacatatttggtttttg

SEQ ID NO: 172597 - DNA, 25 bp, SARS Virus
acacaaaaacatttttggtttttgg

SEQ ID NO: 172598 - DNA, 25 bp, SARS Virus
cacaaaaacatatttggtttttgga

SEQ ID NO: 172599 - DNA, 25 bp, SARS Virus
acaaaaacatatttggtttttggac

SEQ ID NO: 172600 - DNA, 25 bp, SARS Virus
caaaaacatatttggtttttggact

SEQ ID NO: 172601 - DNA, 25 bp, SARS Virus
aaaaacatattttgtttttggactg

SEQ ID NO: 172602 - DNA, 25 bp, SARS Virus
aaaacatatttgttttttggactgg

SEQ ID NO: 172603 - DNA, 25 bp, SARS Virus
aaacatatttggtttttggactggt

SEQ ID NO: 172604 - DNA, 25 bp, SARS Virus
aacatatttggtttttggactggta

SEQ ID NO: 172605 - DNA, 25 bp, SARS Virus
acatatttggtttttggactggtaa

SEQ ID NO: 172606 - DNA, 25 bp, SARS Virus
catatttggtttttggactggtaat

SEQ ID NO: 172607 - DNA, 25 bp, SARS Virus
atatttggtttttggactggtaatc

SEQ ID NO: 172608 - DNA, 25 bp, SARS Virus
tatttggttttttgactggtaatcg

SEQ ID NO: 172609 - DNA, 25 bp, SARS Virus
atttggtttttgtactggtaatcgt

SEQ ID NO: 172610 - DNA, 25 bp, SARS Virus
tttggtttttggtctggtaatcgtg

SEQ ID NO: 172611 - DNA, 25 bp, SARS Virus
ttggtttttggattggtaatcgtgt

SEQ ID NO: 172612 - DNA, 25 bp, SARS Virus
tggtttttggactggtaatcgtgta

SEQ ID NO: 172613 - DNA, 25 bp, SARS Virus
ggtttttggacttgtaatcgtgtat

SEQ ID NO: 172614 - DNA, 25 bp, SARS Virus
gtttttggactgttaatcgtgtatt

SEQ ID NO: 172615 - DNA, 25 bp, SARS Virus
tttttggactggtaatcgtgtatta

SEQ ID NO: 172616 - DNA, 25 bp, SARS Virus
ttttggactggttatcgtgtattac

SEQ ID NO: 172617 - DNA, 25 bp, SARS Virus
tttggactggtattcgtgtattacc

SEQ ID NO: 172618 - DNA, 25 bp, SARS Virus
ttggactggtaatcgtgtattacct

SEQ ID NO: 172619 - DNA, 25 bp, SARS Virus
tggactggtaattgtgtattacctt

SEQ ID NO: 172620 - DNA, 25 bp, SARS Virus
ggactggtaatcttgtattaccttt

SEQ ID NO: 172621 - DNA, 25 bp, SARS Virus
gactggtaatcgtgtattacctttt

SEQ ID NO: 172622 - DNA, 25 bp, SARS Virus
actggtaatcgtttattaccttttg

SEQ ID NO: 172623 - DNA, 25 bp, SARS Virus
ctggtaatcgtgtattaccttttga

SEQ ID NO: 172624 - DNA, 25 bp, SARS Virus
tggtaatcgtgttttaccttttgat

SEQ ID NO: 172625 - DNA, 25 bp, SARS Virus
ggtaatcgtgtattaccttttgatt

SEQ ID NO: 172626 - DNA, 25 bp, SARS Virus
gtaatcgtgtattaccttttgatta

SEQ ID NO: 172627 - DNA, 25 bp, SARS Virus
taatcgtgtatttccttttgattac

SEQ ID NO: 172628 - DNA, 25 bp, SARS Virus
aatcgtgtattatcttttgattacc

SEQ ID NO: 172629 - DNA, 25 bp, SARS Virus
atcgtgtattactttttgattaccc

SEQ ID NO: 172630 - DNA, 25 bp, SARS Virus
tcgtgtattaccttttgattaccct

SEQ ID NO: 172631 - DNA, 25 bp, SARS Virus
cgtgtattaccttttgattaccctc

SEQ ID NO: 172632 - DNA, 25 bp, SARS Virus
gtgtattaccttttgattaccctcc

SEQ ID NO: 172633 - DNA, 25 bp, SARS Virus
tgtattaccttttgattaccctccg

SEQ ID NO: 172634 - DNA, 25 bp, SARS Virus
gtattacctttttattaccctccga

SEQ ID NO: 172635 - DNA, 25 bp, SARS Virus
tattaccttttgtttaccctccgaa

SEQ ID NO: 172636 - DNA, 25 bp, SARS Virus
attaccttttgattaccctccgaat

SEQ ID NO: 172637 - DNA, 25 bp, SARS Virus
ttaccttttgattaccctccgaata

SEQ ID NO: 172638 - DNA, 25 bp, SARS Virus
taccttttgatttccctccgaatac

SEQ ID NO: 172639 - DNA, 25 bp, SARS Virus
accttttgattatcctccgaataca

SEQ ID NO: 172640 - DNA, 25 bp, SARS Virus
ccttttgattactctccgaatacac

SEQ ID NO: 172641 - DNA, 25 bp, SARS Virus
cttttgattaccttccgaatacact

SEQ ID NO: 172642 - DNA, 25 bp, SARS Virus
ttttgattaccctccgaatacactg

SEQ ID NO: 172643 - DNA, 25 bp, SARS Virus
tttgattacccttcgaatacactga

SEQ ID NO: 172644 - DNA, 25 bp, SARS Virus
ttgattaccctctgaatacactgaa

SEQ ID NO: 172645 - DNA, 25 bp, SARS Virus
tgattaccctcctaatacactgaac

SEQ ID NO: 172646 - DNA, 25 bp, SARS Virus
gattaccctccgtatacactgaacg

SEQ ID NO: 172647 - DNA, 25 bp, SARS Virus
attaccctccgattacactgaacgt

SEQ ID NO: 172648 - DNA, 25 bp, SARS Virus
ttaccctccgaatacactgaacgtt

SEQ ID NO: 172649 - DNA, 25 bp, SARS Virus
taccctccgaattcactgaacgtta

SEQ ID NO: 172650 - DNA, 25 bp, SARS Virus
accctccgaatatactgaacgttat

SEQ ID NO: 172651 - DNA, 25 bp, SARS Virus
ccctccgaatactctgaacgttatt

SEQ ID NO: 172652 - DNA, 25 bp, SARS Virus
cctccgaatacattgaacgttatta

SEQ ID NO: 172653 - DNA, 25 bp, SARS Virus
ctccgaatacactgaacgttattat

SEQ ID NO: 172654 - DNA, 25 bp, SARS Virus
tccgaatacacttaacgttattatc

SEQ ID NO: 172655 - DNA, 25 bp, SARS Virus
ccgaatacactgtacgttattatcg

SEQ ID NO: 172656 - DNA, 25 bp, SARS Virus
cgaatacactgatcgttattatcga

SEQ ID NO: 172657 - DNA, 25 bp, SARS Virus
gaatacactgaatgttattatcgag

SEQ ID NO: 172658 - DNA, 25 bp, SARS Virus
aatacactgaactttattatcgagt

SEQ ID NO: 172659 - DNA, 25 bp, SARS Virus
atacactgaacgttattatcgagta

SEQ ID NO: 172660 - DNA, 25 bp, SARS Virus
tacactgaacgttattatcgagtat

SEQ ID NO: 172661 - DNA, 25 bp, SARS Virus
acactgaacgtttttatcgagtatg

SEQ ID NO: 172662 - DNA, 25 bp, SARS Virus
cactgaacgttattatcgagtatgg

SEQ ID NO: 172663 - DNA, 25 bp, SARS Virus
actgaacgttattatcgagtatgga

SEQ ID NO: 172664 - DNA, 25 bp, SARS Virus
ctgaacgttattttcgagtatggag

SEQ ID NO: 172665 - DNA, 25 bp, SARS Virus
tgaacgttattatcgagtatggagg

SEQ ID NO: 172666 - DNA, 25 bp, SARS Virus
gaacgttattattgagtatggagga

SEQ ID NO: 172667 - DNA, 25 bp, SARS Virus
aacgttattatctagtatggaggat

SEQ ID NO: 172668 - DNA, 25 bp, SARS Virus
acgttattatcgtgtatggaggatc

SEQ ID NO: 172669 - DNA, 25 bp, SARS Virus
cgttattatcgattatggaggatct

SEQ ID NO: 172670 - DNA, 25 bp, SARS Virus
gttattatcgagtatggaggatcta

SEQ ID NO: 172671 - DNA, 25 bp, SARS Virus
ttattatcgagtttggaggatctat

SEQ ID NO: 172672 - DNA, 25 bp, SARS Virus
tattatcgagtatggaggatctatg

SEQ ID NO: 172673 - DNA, 25 bp, SARS Virus
attatcgagtattgaggatctatgt

SEQ ID NO: 172674 - DNA, 25 bp, SARS Virus
ttatcgagtatgtaggatctatgtc

SEQ ID NO: 172675 - DNA, 25 bp, SARS Virus
tatcgagtatggtggatctatgtca

SEQ ID NO: 172676 - DNA, 25 bp, SARS Virus
atcgagtatggatgatctatgtcaa

SEQ ID NO: 172677 - DNA, 25 bp, SARS Virus
tcgagtatggagtatctatgtcaac

SEQ ID NO: 172678 - DNA, 25 bp, SARS Virus
cgagtatggaggttctatgtcaaca

SEQ ID NO: 172679 - DNA, 25 bp, SARS Virus
gagtatggaggatctatgtcaacac

SEQ ID NO: 172680 - DNA, 25 bp, SARS Virus
agtatggaggatttatgtcaacaca

SEQ ID NO: 172681 - DNA, 25 bp, SARS Virus
gtatggaggatctatgtcaacacag

SEQ ID NO: 172682 - DNA, 25 bp, SARS Virus
tatggaggatctttgtcaacacagt

SEQ ID NO: 172683 - DNA, 25 bp, SARS Virus
atggaggatctatgtcaacacagtg

SEQ ID NO: 172684 - DNA, 25 bp, SARS Virus
tggaggatctatttcaacacagtgt

SEQ ID NO: 172685 - DNA, 25 bp, SARS Virus
ggaggatctatgtcaacacagtgta

SEQ ID NO: 172686 - DNA, 25 bp, SARS Virus
gaggatctatgttaacacagtgtag

SEQ ID NO: 172687 - DNA, 25 bp, SARS Virus
aggatctatgtctacacagtgtagt

SEQ ID NO: 172688 - DNA, 25 bp, SARS Virus
ggatctatgtcatcacagtgtagtc

SEQ ID NO: 172689 - DNA, 25 bp, SARS Virus
gatctatgtcaatacagtgtagtca

SEQ ID NO: 172690 - DNA, 25 bp, SARS Virus
atctatgtcaactcagtgtagtcac

SEQ ID NO: 172691 - DNA, 25 bp, SARS Virus
tctatgtcaacatagtgtagtcact

SEQ ID NO: 172692 - DNA, 25 bp, SARS Virus
ctatgtcaacactgtgtagtcactg

SEQ ID NO: 172693 - DNA, 25 bp, SARS Virus
tatgtcaacacattgtagtcactgt

SEQ ID NO: 172694 - DNA, 25 bp, SARS Virus
atgtcaacacagtgtagtcactgta

SEQ ID NO: 172695 - DNA, 25 bp, SARS Virus
tgtcaacacagtttagtcactgtag

SEQ ID NO: 172696 - DNA, 25 bp, SARS Virus
gtcaacacagtgtagtcactgtagt

SEQ ID NO: 172697 - DNA, 25 bp, SARS Virus
tcaacacagtgttgtcactgtagtg

SEQ ID NO: 172698 - DNA, 25 bp, SARS Virus
caacacagtgtattcactgtagtgt

SEQ ID NO: 172699 - DNA, 25 bp, SARS Virus
aacacagtgtagtcactgtagtgtt

SEQ ID NO: 172700 - DNA, 25 bp, SARS Virus
acacagtgtagttactgtagtgttg

SEQ ID NO: 172701 - DNA, 25 bp, SARS Virus
cacagtgtagtctctgtagtgttgg

SEQ ID NO: 172702 - DNA, 25 bp, SARS Virus
acagtgtagtcattgtagtgttgga

SEQ ID NO: 172703 - DNA, 25 bp, SARS Virus
cagtgtagtcactgtagtgttggac

SEQ ID NO: 172704 - DNA, 25 bp, SARS Virus
agtgtagtcactttagtgttggacc

SEQ ID NO: 172705 - DNA, 25 bp, SARS Virus
gtgtagtcactgtagtgttggaccc

SEQ ID NO: 172706 - DNA, 25 bp, SARS Virus
tgtagtcactgttgtgttggacccc

SEQ ID NO: 172707 - DNA, 25 bp, SARS Virus
gtagtcactgtattgttggaccccg

SEQ ID NO: 172708 - DNA, 25 bp, SARS Virus
tagtcactgtagtgttggaccccgt

SEQ ID NO: 172709 - DNA, 25 bp, SARS Virus
agtcactgtagttttggaccccgta

SEQ ID NO: 172710 - DNA, 25 bp, SARS Virus
gtcactgtagtgttggaccccgtaa

SEQ ID NO: 172711 - DNA, 25 bp, SARS Virus
tcactgtagtgttggaccccgtaac

SEQ ID NO: 172712 - DNA, 25 bp, SARS Virus
cactgtagtgtttgaccccgtaacg

SEQ ID NO: 172713 - DNA, 25 bp, SARS Virus
actgtagtgttgtaccccgtaacgt

SEQ ID NO: 172714 - DNA, 25 bp, SARS Virus
ctgtagtgttggtccccgtaacgtt

SEQ ID NO: 172715 - DNA, 25 bp, SARS Virus
tgtagtgttggatcccgtaacgttt

SEQ ID NO: 172716 - DNA, 25 bp, SARS Virus
gtagtgttggactccgtaacgtttg

SEQ ID NO: 172717 - DNA, 25 bp, SARS Virus
tagtgttggacctcgtaacgtttgt

SEQ ID NO: 172718 - DNA, 25 bp, SARS Virus
agtgttggaccctgtaacgtttgta

SEQ ID NO: 172719 - DNA, 25 bp, SARS Virus
gtgttggaccccttaacgtttgtat

SEQ ID NO: 172720 - DNA, 25 bp, SARS Virus
tgttggaccccgtaacgtttgtatc

SEQ ID NO: 172721 - DNA, 25 bp, SARS Virus
gttggaccccgttacgtttgtatcc

SEQ ID NO: 172722 - DNA, 25 bp, SARS Virus
ttggaccccgtatcgtttgtatccc

SEQ ID NO: 172723 - DNA, 25 bp, SARS Virus
tggaccccgtaatgtttgtatccct

SEQ ID NO: 172724 - DNA, 25 bp, SARS Virus
ggaccccgtaacttttgtatcccta

SEQ ID NO: 172725 - DNA, 25 bp, SARS Virus
gaccccgtaacgtttgtatccctaa

SEQ ID NO: 172726 - DNA, 25 bp, SARS Virus
accccgtaacgtttgtatccctaat

SEQ ID NO: 172727 - DNA, 25 bp, SARS Virus
ccccgtaacgtttgtatccctaatt

SEQ ID NO: 172728 - DNA, 25 bp, SARS Virus
cccgtaacgtttttatccctaattg

SEQ ID NO: 172729 - DNA, 25 bp, SARS Virus
ccgtaacgtttgtatccctaattgt

SEQ ID NO: 172730 - DNA, 25 bp, SARS Virus
cgtaacgtttgtttccctaattgtc

SEQ ID NO: 172731 - DNA, 25 bp, SARS Virus
gtaacgtttgtatccctaattgtct

SEQ ID NO: 172732 - DNA, 25 bp, SARS Virus
taacgtttgtattcctaattgtctg

SEQ ID NO: 172733 - DNA, 25 bp, SARS Virus
aacgtttgtatctctaattgtctgt

SEQ ID NO: 172734 - DNA, 25 bp, SARS Virus
acgtttgtatccttaattgtctgtt

SEQ ID NO: 172735 - DNA, 25 bp, SARS Virus
cgtttgtatccctaattgtctgttg

SEQ ID NO: 172736 - DNA, 25 bp, SARS Virus
gtttgtatcccttattgtctgttgt

SEQ ID NO: 172737 - DNA, 25 bp, SARS Virus
tttgtatccctatttgtctgttgtg

SEQ ID NO: 172738 - DNA, 25 bp, SARS Virus
ttgtatccctaattgtctgttgtga

SEQ ID NO: 172739 - DNA, 25 bp, SARS Virus
tgtatccctaattgtctgttgtgat

SEQ ID NO: 172740 - DNA, 25 bp, SARS Virus
gtatccctaattttctgttgtgatt

SEQ ID NO: 172741 - DNA, 25 bp, SARS Virus
tatccctaattgtctgttgtgatta

SEQ ID NO: 172742 - DNA, 25 bp, SARS Virus
atccctaattgtttgttgtgattaa

SEQ ID NO: 172743 - DNA, 25 bp, SARS Virus
tccctaattgtctgttgtgattaaa

SEQ ID NO: 172744 - DNA, 25 bp, SARS Virus
ccctaattgtcttttgtgattaaac

SEQ ID NO: 172745 - DNA, 25 bp, SARS Virus
cctaattgtctgttgtgattaaaca

SEQ ID NO: 172746 - DNA, 25 bp, SARS Virus
ctaattgtctgttgtgattaaacac

SEQ ID NO: 172747 - DNA, 25 bp, SARS Virus
taattgtctgttttgattaaacaca

SEQ ID NO: 172748 - DNA, 25 bp, SARS Virus
aattgtctgttgtgattaaacacac

SEQ ID NO: 172749 - DNA, 25 bp, SARS Virus
attgtctgttgttattaaacacact

SEQ ID NO: 172750 - DNA, 25 bp, SARS Virus
ttgtctgttgtgtttaaacacacta

SEQ ID NO: 172751 - DNA, 25 bp, SARS Virus
tgtctgttgtgattaaacacactac

SEQ ID NO: 172752 - DNA, 25 bp, SARS Virus
gtctgttgtgattaaacacactaca

SEQ ID NO: 172753 - DNA, 25 bp, SARS Virus
tctgttgtgatttaacacactacaa

SEQ ID NO: 172754 - DNA, 25 bp, SARS Virus
ctgttgtgattatacacactacaac

SEQ ID NO: 172755 - DNA, 25 bp, SARS Virus
tgttgtgattaatcacactacaact

SEQ ID NO: 172756 - DNA, 25 bp, SARS Virus
gttgtgattaaatacactacaactt

SEQ ID NO: 172757 - DNA, 25 bp, SARS Virus
ttgtgattaaactcactacaacttt

SEQ ID NO: 172758 - DNA, 25 bp, SARS Virus
tgtgattaaacatactacaacttta

SEQ ID NO: 172759 - DNA, 25 bp, SARS Virus
gtgattaaacactctacaactttac

SEQ ID NO: 172760 - DNA, 25 bp, SARS Virus
tgattaaacacattacaactttact

SEQ ID NO: 172761 - DNA, 25 bp, SARS Virus
gattaaacacactacaactttactg

SEQ ID NO: 172762 - DNA, 25 bp, SARS Virus
attaaacacacttcaactttactgt

SEQ ID NO: 172763 - DNA, 25 bp, SARS Virus
ttaaacacactataactttactgta

SEQ ID NO: 172764 - DNA, 25 bp, SARS Virus
taaacacactactactttactgtac

SEQ ID NO: 172765 - DNA, 25 bp, SARS Virus
aaacacactacatctttactgtacc

SEQ ID NO: 172766 - DNA, 25 bp, SARS Virus
aacacactacaattttactgtacca

SEQ ID NO: 172767 - DNA, 25 bp, SARS Virus
acacactacaactttactgtaccag

SEQ ID NO: 172768 - DNA, 25 bp, SARS Virus
cacactacaactttactgtaccagt

SEQ ID NO: 172769 - DNA, 25 bp, SARS Virus
acactacaactttactgtaccagta

SEQ ID NO: 172770 - DNA, 25 bp, SARS Virus
cactacaacttttctgtaccagtat

SEQ ID NO: 172771 - DNA, 25 bp, SARS Virus
actacaactttattgtaccagtatc

SEQ ID NO: 172772 - DNA, 25 bp, SARS Virus
ctacaactttactgtaccagtatcg

SEQ ID NO: 172773 - DNA, 25 bp, SARS Virus
tacaactttactttaccagtatcgt

SEQ ID NO: 172774 - DNA, 25 bp, SARS Virus
acaactttactgtaccagtatcgtc

SEQ ID NO: 172775 - DNA, 25 bp, SARS Virus
caactttactgttccagtatcgtcg

SEQ ID NO: 172776 - DNA, 25 bp, SARS Virus
aactttactgtatcagtatcgtcgt

SEQ ID NO: 172777 - DNA, 25 bp, SARS Virus
actttactgtactagtatcgtcgtg

SEQ ID NO: 172778 - DNA, 25 bp, SARS Virus
ctttactgtacctgtatcgtcgtga

SEQ ID NO: 172779 - DNA, 25 bp, SARS Virus
tttactgtaccattatcgtcgtgaa

SEQ ID NO: 172780 - DNA, 25 bp, SARS Virus
ttactgtaccagtatcgtcgtgaac

SEQ ID NO: 172781 - DNA, 25 bp, SARS Virus
tactgtaccagtttcgtcgtgaacg

SEQ ID NO: 172782 - DNA, 25 bp, SARS Virus
actgtaccagtatcgtcgtgaacgt

SEQ ID NO: 172783 - DNA, 25 bp, SARS Virus
ctgtaccagtattgtcgtgaacgtt

SEQ ID NO: 172784 - DNA, 25 bp, SARS Virus
tgtaccagtatcttcgtgaacgttg

SEQ ID NO: 172785 - DNA, 25 bp, SARS Virus
gtaccagtatcgacgtgaacgttgt

SEQ ID NO: 172786 - DNA, 25 bp, SARS Virus
taccagtatcgtagtgaacgttgta

SEQ ID NO: 172787 - DNA, 25 bp, SARS Virus
accagtatcgtcatgaacgttgtat

SEQ ID NO: 172788 - DNA, 25 bp, SARS Virus
ccagtatcgtcgagaacgttgtatc

SEQ ID NO: 172789 - DNA, 25 bp, SARS Virus
cagtatcgtcgtaaacgttgtatcc

SEQ ID NO: 172790 - DNA, 25 bp, SARS Virus
agtatcgtcgtgaacgttgtatcct

SEQ ID NO: 172791 - DNA, 25 bp, SARS Virus
gtatcgtcgtgaacgttgtatcctt

SEQ ID NO: 172792 - DNA, 25 bp, SARS Virus
tatcgtcgtgaaagttgtatcctta

SEQ ID NO: 172793 - DNA, 25 bp, SARS Virus
atcgtcgtgaacattgtatccttac

SEQ ID NO: 172794 - DNA, 25 bp, SARS Virus
tcgtcgtgaacgatgtatccttacc

SEQ ID NO: 172795 - DNA, 25 bp, SARS Virus
cgtcgtgaacgtagtatccttacca

SEQ ID NO: 172796 - DNA, 25 bp, SARS Virus
gtcgtgaacgttatatccttaccag

SEQ ID NO: 172797 - DNA, 25 bp, SARS Virus
tcgtgaacgttgaatccttaccaga

SEQ ID NO: 172798 - DNA, 25 bp, SARS Virus
cgtgaacgttgtatccttaccagag

SEQ ID NO: 172799 - DNA, 25 bp, SARS Virus
gtgaacgttgtaaccttaccagagg

SEQ ID NO: 172800 - DNA, 25 bp, SARS Virus
tgaacgttgtatacttaccagagga

SEQ ID NO: 172801 - DNA, 25 bp, SARS Virus
gaacgttgtatcattaccagaggat

SEQ ID NO: 172802 - DNA, 25 bp, SARS Virus
aacgttgtatccataccagaggatt

SEQ ID NO: 172803 - DNA, 25 bp, SARS Virus
acgttgtatcctaaccagaggatta

SEQ ID NO: 172804 - DNA, 25 bp, SARS Virus
cgttgtatccttaccagaggattat

SEQ ID NO: 172805 - DNA, 25 bp, SARS Virus
gttgtatccttaacagaggattatg

SEQ ID NO: 172806 - DNA, 25 bp, SARS Virus
ttgtatccttacaagaggattatgt

SEQ ID NO: 172807 - DNA, 25 bp, SARS Virus
tgtatccttaccagaggattatgtc

SEQ ID NO: 172808 - DNA, 25 bp, SARS Virus
gtatccttaccaaaggattatgtcc

SEQ ID NO: 172809 - DNA, 25 bp, SARS Virus
tatccttaccagaggattatgtccg

SEQ ID NO: 172810 - DNA, 25 bp, SARS Virus
atccttaccagaagattatgtccgt

SEQ ID NO: 172811 - DNA, 25 bp, SARS Virus
tccttaccagagaattatgtccgtg

SEQ ID NO: 172812 - DNA, 25 bp, SARS Virus
ccttaccagaggattatgtccgtgg

SEQ ID NO: 172813 - DNA, 25 bp, SARS Virus
cttaccagaggaatatgtccgtggc

SEQ ID NO: 172814 - DNA, 25 bp, SARS Virus
ttaccagaggataatgtccgtggcg

SEQ ID NO: 172815 - DNA, 25 bp, SARS Virus
taccagaggattatgtccgtggcgt

SEQ ID NO: 172816 - DNA, 25 bp, SARS Virus
accagaggattaagtccgtggcgtt

SEQ ID NO: 172817 - DNA, 25 bp, SARS Virus
ccagaggattatatccgtggcgttg

SEQ ID NO: 172818 - DNA, 25 bp, SARS Virus
cagaggattatgaccgtggcgttgc

SEQ ID NO: 172819 - DNA, 25 bp, SARS Virus
agaggattatgtacgtggcgttgct

SEQ ID NO: 172820 - DNA, 25 bp, SARS Virus
gaggattatgtcagtggcgttgctt

SEQ ID NO: 172821 - DNA, 25 bp, SARS Virus
aggattatgtccatggcgttgcttc

SEQ ID NO: 172822 - DNA, 25 bp, SARS Virus
ggattatgtccgaggcgttgcttca

SEQ ID NO: 172823 - DNA, 25 bp, SARS Virus
gattatgtccgtagcgttgcttcac

SEQ ID NO: 172824 - DNA, 25 bp, SARS Virus
attatgtccgtgacgttgcttcact

SEQ ID NO: 172825 - DNA, 25 bp, SARS Virus
ttatgtccgtggagttgcttcactt

SEQ ID NO: 172826 - DNA, 25 bp, SARS Virus
tatgtccgtggcattgcttcacttc

SEQ ID NO: 172827 - DNA, 25 bp, SARS Virus
atgtccgtggcgatgcttcacttca

SEQ ID NO: 172828 - DNA, 25 bp, SARS Virus
tgtccgtggcgtagcttcacttcag

SEQ ID NO: 172829 - DNA, 25 bp, SARS Virus
gtccgtggcgttacttcacttcaga

SEQ ID NO: 172830 - DNA, 25 bp, SARS Virus
tccgtggcgttgattcacttcagac

SEQ ID NO: 172831 - DNA, 25 bp, SARS Virus
ccgtggcgttgcatcacttcagaca

SEQ ID NO: 172832 - DNA, 25 bp, SARS Virus
cgtggcgttgctacacttcagacac

SEQ ID NO: 172833 - DNA, 25 bp, SARS Virus
gtggcgttgcttaacttcagacact

SEQ ID NO: 172834 - DNA, 25 bp, SARS Virus
tggcgttgcttcacttcagacactt

SEQ ID NO: 172835 - DNA, 25 bp, SARS Virus
ggcgttgcttcaattcagacactta

SEQ ID NO: 172836 - DNA, 25 bp, SARS Virus
gcgttgcttcacatcagacacttaa

SEQ ID NO: 172837 - DNA, 25 bp, SARS Virus
cgttgcttcactacagacacttaac

SEQ ID NO: 172838 - DNA, 25 bp, SARS Virus
gttgcttcacttaagacacttaacg

SEQ ID NO: 172839 - DNA, 25 bp, SARS Virus
ttgcttcacttcagacacttaacgt

SEQ ID NO: 172840 - DNA, 25 bp, SARS Virus
tgcttcacttcaaacacttaacgtg

SEQ ID NO: 172841 - DNA, 25 bp, SARS Virus
gcttcacttcagacacttaacgtgt

SEQ ID NO: 172842 - DNA, 25 bp, SARS Virus
cttcacttcagaaacttaacgtgtt

SEQ ID NO: 172843 - DNA, 25 bp, SARS Virus
ttcacttcagacacttaacgtgtta

SEQ ID NO: 172844 - DNA, 25 bp, SARS Virus
tcacttcagacaattaacgtgttat

SEQ ID NO: 172845 - DNA, 25 bp, SARS Virus
cacttcagacacataacgtgttatg

SEQ ID NO: 172846 - DNA, 25 bp, SARS Virus
acttcagacactaaacgtgttatgt

SEQ ID NO: 172847 - DNA, 25 bp, SARS Virus
cttcagacacttaacgtgttatgtg

SEQ ID NO: 172848 - DNA, 25 bp, SARS Virus
ttcagacacttaacgtgttatgtgt

SEQ ID NO: 172849 - DNA, 25 bp, SARS Virus
tcagacacttaaagtgttatgtgtt

SEQ ID NO: 172850 - DNA, 25 bp, SARS Virus
cagacacttaacatgttatgtgttc

SEQ ID NO: 172851 - DNA, 25 bp, SARS Virus
agacacttaacgagttatgtgttcg

SEQ ID NO: 172852 - DNA, 25 bp, SARS Virus
gacacttaacgtattatgtgttcgt

SEQ ID NO: 172853 - DNA, 25 bp, SARS Virus
acacttaacgtgatatgtgttcgtg

SEQ ID NO: 172854 - DNA, 25 bp, SARS Virus
cacttaacgtgtaatgtgttcgtgg

SEQ ID NO: 172855 - DNA, 25 bp, SARS Virus
acttaacgtgttatgtgttcgtgga

SEQ ID NO: 172856 - DNA, 25 bp, SARS Virus
cttaacgtgttaagtgttcgtggat

SEQ ID NO: 172857 - DNA, 25 bp, SARS Virus
ttaacgtgttatatgttcgtggatg

SEQ ID NO: 172858 - DNA, 25 bp, SARS Virus
taacgtgttatgagttcgtggatgt

SEQ ID NO: 172859 - DNA, 25 bp, SARS Virus
aacgtgttatgtattcgtggatgtc

SEQ ID NO: 172860 - DNA, 25 bp, SARS Virus
acgtgttatgtgatcgtggatgtcg

SEQ ID NO: 172861 - DNA, 25 bp, SARS Virus
cgtgttatgtgtacgtggatgtcgg

SEQ ID NO: 172862 - DNA, 25 bp, SARS Virus
gtgttatgtgttagtggatgtcgga

SEQ ID NO: 172863 - DNA, 25 bp, SARS Virus
tgttatgtgttcatggatgtcggac

SEQ ID NO: 172864 - DNA, 25 bp, SARS Virus
gttatgtgttcgaggatgtcggacg

SEQ ID NO: 172865 - DNA, 25 bp, SARS Virus
ttatgtgttcgtagatgtcggacgt

SEQ ID NO: 172866 - DNA, 25 bp, SARS Virus
tatgtgttcgtgaatgtcggacgtt

SEQ ID NO: 172867 - DNA, 25 bp, SARS Virus
atgtgttcgtggatgtcggacgttc

SEQ ID NO: 172868 - DNA, 25 bp, SARS Virus
tgtgttcgtggaagtcggacgttct

SEQ ID NO: 172869 - DNA, 25 bp, SARS Virus
gtgttcgtggatatcggacgttctg

SEQ ID NO: 172870 - DNA, 25 bp, SARS Virus
tgttcgtggatgacggacgttctga

SEQ ID NO: 172871 - DNA, 25 bp, SARS Virus
gttcgtggatgtaggacgttctgac

SEQ ID NO: 172872 - DNA, 25 bp, SARS Virus
ttcgtggatgtcagacgttctgaca

SEQ ID NO: 172873 - DNA, 25 bp, SARS Virus
tcgtggatgtcgaacgttctgacat

SEQ ID NO: 172874 - DNA, 25 bp, SARS Virus
cgtggatgtcggacgttctgacata

SEQ ID NO: 172875 - DNA, 25 bp, SARS Virus
gtggatgtcggaagttctgacatac

SEQ ID NO: 172876 - DNA, 25 bp, SARS Virus
tggatgtcggacattctgacataca

SEQ ID NO: 172877 - DNA, 25 bp, SARS Virus
ggatgtcggacgatctgacatacac

SEQ ID NO: 172878 - DNA, 25 bp, SARS Virus
gatgtcggacgtactgacatacacc

SEQ ID NO: 172879 - DNA, 25 bp, SARS Virus
atgtcggacgttatgacatacacca

SEQ ID NO: 172880 - DNA, 25 bp, SARS Virus
tgtcggacgttcagacatacaccac

SEQ ID NO: 172881 - DNA, 25 bp, SARS Virus
gtcggacgttctaacatacaccaca

SEQ ID NO: 172882 - DNA, 25 bp, SARS Virus
tcggacgttctgacatacaccacac

SEQ ID NO: 172883 - DNA, 25 bp, SARS Virus
cggacgttctgaaatacaccacaca

SEQ ID NO: 172884 - DNA, 25 bp, SARS Virus
ggacgttctgacatacaccacacat

SEQ ID NO: 172885 - DNA, 25 bp, SARS Virus
gacgttctgacaaacaccacacatg

SEQ ID NO: 172886 - DNA, 25 bp, SARS Virus
acgttctgacatacaccacacatgt

SEQ ID NO: 172887 - DNA, 25 bp, SARS Virus
cgttctgacataaaccacacatgta

SEQ ID NO: 172888 - DNA, 25 bp, SARS Virus
gttctgacatacaccacacatgtat

SEQ ID NO: 172889 - DNA, 25 bp, SARS Virus
ttctgacatacaacacacatgtatc

SEQ ID NO: 172890 - DNA, 25 bp, SARS Virus
tctgacatacacaacacatgtatcg

SEQ ID NO: 172891 - DNA, 25 bp, SARS Virus
ctgacatacaccacacatgtatcgg

SEQ ID NO: 172892 - DNA, 25 bp, SARS Virus
tgacatacaccaaacatgtatcgga

SEQ ID NO: 172893 - DNA, 25 bp, SARS Virus
gacatacaccacacatgtatcggag

SEQ ID NO: 172894 - DNA, 25 bp, SARS Virus
acatacaccacaaatgtatcggagt

SEQ ID NO: 172895 - DNA, 25 bp, SARS Virus
catacaccacacatgtatcggagta

SEQ ID NO: 172896 - DNA, 25 bp, SARS Virus
atacaccacacaagtatcggagtat

SEQ ID NO: 172897 - DNA, 25 bp, SARS Virus
tacaccacacatatatcggagtatt

SEQ ID NO: 172898 - DNA, 25 bp, SARS Virus
acaccacacatgaatcggagtattt

SEQ ID NO: 172899 - DNA, 25 bp, SARS Virus
caccacacatgtatcggagtatttt

SEQ ID NO: 172900 - DNA, 25 bp, SARS Virus
accacacatgtaacggagtattttg

SEQ ID NO: 172901 - DNA, 25 bp, SARS Virus
ccacacatgtataggagtattttga

SEQ ID NO: 172902 - DNA, 25 bp, SARS Virus
cacacatgtatcagagtattttgag

SEQ ID NO: 172903 - DNA, 25 bp, SARS Virus
acacatgtatcgaagtattttgagt

SEQ ID NO: 172904 - DNA, 25 bp, SARS Virus
cacatgtatcggagtattttgagtc

SEQ ID NO: 172905 - DNA, 25 bp, SARS Virus
acatgtatcggaatattttgagtcc

SEQ ID NO: 172906 - DNA, 25 bp, SARS Virus
catgtatcggagaattttgagtcca

SEQ ID NO: 172907 - DNA, 25 bp, SARS Virus
atgtatcggagtattttgagtccaa

SEQ ID NO: 172908 - DNA, 25 bp, SARS Virus
tgtatcggagtaatttgagtccaag

SEQ ID NO: 172909 - DNA, 25 bp, SARS Virus
gtatcggagtatattgagtccaagg

SEQ ID NO: 172910 - DNA, 25 bp, SARS Virus
tatcggagtattatgagtccaaggg

SEQ ID NO: 172911 - DNA, 25 bp, SARS Virus
atcggagtatttagagtccaagggt

SEQ ID NO: 172912 - DNA, 25 bp, SARS Virus
tcggagtattttaagtccaagggtc

SEQ ID NO: 172913 - DNA, 25 bp, SARS Virus
cggagtattttgagtccaagggtca

SEQ ID NO: 172914 - DNA, 25 bp, SARS Virus
ggagtattttgaatccaagggtcat

SEQ ID NO: 172915 - DNA, 25 bp, SARS Virus
gagtattttgagaccaagggtcatg

SEQ ID NO: 172916 - DNA, 25 bp, SARS Virus
agtattttgagtacaagggtcatgg

SEQ ID NO: 172917 - DNA, 25 bp, SARS Virus
gtattttgagtcaaagggtcatggc

SEQ ID NO: 172918 - DNA, 25 bp, SARS Virus
tattttgagtccaagggtcatggca

SEQ ID NO: 172919 - DNA, 25 bp, SARS Virus
attttgagtccaagggtcatggcac

SEQ ID NO: 172920 - DNA, 25 bp, SARS Virus
ttttgagtccaaaggtcatggcact

SEQ ID NO: 172921 - DNA, 25 bp, SARS Virus
tttgagtccaagagtcatggcactc

SEQ ID NO: 172922 - DNA, 25 bp, SARS Virus
ttgagtccaaggatcatggcactcc

SEQ ID NO: 172923 - DNA, 25 bp, SARS Virus
tgagtccaagggacatggcactcca

SEQ ID NO: 172924 - DNA, 25 bp, SARS Virus
gagtccaagggtaatggcactccac

SEQ ID NO: 172925 - DNA, 25 bp, SARS Virus
agtccaagggtcatggcactccaca

SEQ ID NO: 172926 - DNA, 25 bp, SARS Virus
gtccaagggtcaaggcactccacaa

SEQ ID NO: 172927 - DNA, 25 bp, SARS Virus
tccaagggtcatagcactccacaat

SEQ ID NO: 172928 - DNA, 25 bp, SARS Virus
ccaagggtcatgacactccacaata

SEQ ID NO: 172929 - DNA, 25 bp, SARS Virus
caagggtcatggaactccacaatag

SEQ ID NO: 172930 - DNA, 25 bp, SARS Virus
aagggtcatggcactccacaatagt

SEQ ID NO: 172931 - DNA, 25 bp, SARS Virus
agggtcatggcaatccacaatagta

SEQ ID NO: 172932 - DNA, 25 bp, SARS Virus
gggtcatggcacaccacaatagtaa

SEQ ID NO: 172933 - DNA, 25 bp, SARS Virus
ggtcatggcactacacaatagtaat

SEQ ID NO: 172934 - DNA, 25 bp, SARS Virus
gtcatggcactcaacaatagtaatc

SEQ ID NO: 172935 - DNA, 25 bp, SARS Virus
tcatggcactccacaatagtaatca

SEQ ID NO: 172936 - DNA, 25 bp, SARS Virus
catggcactccaaaatagtaatcaa

SEQ ID NO: 172937 - DNA, 25 bp, SARS Virus
atggcactccacaatagtaatcaat

SEQ ID NO: 172938 - DNA, 25 bp, SARS Virus
tggcactccacaatagtaatcaatc

SEQ ID NO: 172939 - DNA, 25 bp, SARS Virus
ggcactccacaaaagtaatcaatcg

SEQ ID NO: 172940 - DNA, 25 bp, SARS Virus
gcactccacaatagtaatcaatcgt

SEQ ID NO: 172941 - DNA, 25 bp, SARS Virus
cactccacaataataatcaatcgta

SEQ ID NO: 172942 - DNA, 25 bp, SARS Virus
actccacaatagaaatcaatcgtaa

SEQ ID NO: 172943 - DNA, 25 bp, SARS Virus
ctccacaatagtaatcaatcgtaat

SEQ ID NO: 172944 - DNA, 25 bp, SARS Virus
tccacaatagtaatcaatcgtaatg

SEQ ID NO: 172945 - DNA, 25 bp, SARS Virus
ccacaatagtaaacaatcgtaatgc

SEQ ID NO: 172946 - DNA, 25 bp, SARS Virus
cacaatagtaataaatcgtaatgcc

SEQ ID NO: 172947 - DNA, 25 bp, SARS Virus
acaatagtaatcaatcgtaatgcct

SEQ ID NO: 172948 - DNA, 25 bp, SARS Virus
caatagtaatcaatcgtaatgcctt

SEQ ID NO: 172949 - DNA, 25 bp, SARS Virus
aatagtaatcaaacgtaatgcctta

SEQ ID NO: 172950 - DNA, 25 bp, SARS Virus
atagtaatcaatagtaatgccttat

SEQ ID NO: 172951 - DNA, 25 bp, SARS Virus
tagtaatcaatcataatgccttatg

SEQ ID NO: 172952 - DNA, 25 bp, SARS Virus
agtaatcaatcgaaatgccttatgt

SEQ ID NO: 172953 - DNA, 25 bp, SARS Virus
gtaatcaatcgtaatgccttatgta

SEQ ID NO: 172954 - DNA, 25 bp, SARS Virus
taatcaatcgtaatgccttatgtac

SEQ ID NO: 172955 - DNA, 25 bp, SARS Virus
aatcaatcgtaaagccttatgtaca

SEQ ID NO: 172956 - DNA, 25 bp, SARS Virus
atcaatcgtaataccttatgtacag

SEQ ID NO: 172957 - DNA, 25 bp, SARS Virus
tcaatcgtaatgacttatgtacagg

SEQ ID NO: 172958 - DNA, 25 bp, SARS Virus
caatcgtaatgcattatgtacaggt

SEQ ID NO: 172959 - DNA, 25 bp, SARS Virus
aatcgtaatgccatatgtacaggtt

SEQ ID NO: 172960 - DNA, 25 bp, SARS Virus
atcgtaatgcctaatgtacaggttg

SEQ ID NO: 172961 - DNA, 25 bp, SARS Virus
tcgtaatgccttatgtacaggttgt

SEQ ID NO: 172962 - DNA, 25 bp, SARS Virus
cgtaatgccttaagtacaggttgta

SEQ ID NO: 172963 - DNA, 25 bp, SARS Virus
gtaatgccttatatacaggttgtac

SEQ ID NO: 172964 - DNA, 25 bp, SARS Virus
taatgccttatgaacaggttgtaca

SEQ ID NO: 172965 - DNA, 25 bp, SARS Virus
aatgccttatgtacaggttgtacac

SEQ ID NO: 172966 - DNA, 25 bp, SARS Virus
atgccttatgtaaaggttgtacacc

SEQ ID NO: 172967 - DNA, 25 bp, SARS Virus
tgccttatgtacaggttgtacaccg

SEQ ID NO: 172968 - DNA, 25 bp, SARS Virus
gccttatgtacaagttgtacaccgg

SEQ ID NO: 172969 - DNA, 25 bp, SARS Virus
ccttatgtacagattgtacaccggt

SEQ ID NO: 172970 - DNA, 25 bp, SARS Virus
cttatgtacaggatgtacaccggtc

SEQ ID NO: 172971 - DNA, 25 bp, SARS Virus
ttatgtacaggtagtacaccggtca

SEQ ID NO: 172972 - DNA, 25 bp, SARS Virus
tatgtacaggttatacaccggtcat

SEQ ID NO: 172973 - DNA, 25 bp, SARS Virus
atgtacaggttgaacaccggtcatt

SEQ ID NO: 172974 - DNA, 25 bp, SARS Virus
tgtacaggttgtacaccggtcattc

SEQ ID NO: 172975 - DNA, 25 bp, SARS Virus
gtacaggttgtaaaccggtcattcg

SEQ ID NO: 172976 - DNA, 25 bp, SARS Virus
tacaggttgtacaccggtcattcga

SEQ ID NO: 172977 - DNA, 25 bp, SARS Virus
acaggttgtacaacggtcattcgag

SEQ ID NO: 172978 - DNA, 25 bp, SARS Virus
caggttgtacacaggtcattcgagt

SEQ ID NO: 172979 - DNA, 25 bp, SARS Virus
aggttgtacaccagtcattcgagta

SEQ ID NO: 172980 - DNA, 25 bp, SARS Virus
ggttgtacaccgatcattcgagtag

SEQ ID NO: 172981 - DNA, 25 bp, SARS Virus
gttgtacaccggacattcgagtagt

SEQ ID NO: 172982 - DNA, 25 bp, SARS Virus
ttgtacaccggtaattcgagtagta

SEQ ID NO: 172983 - DNA, 25 bp, SARS Virus
tgtacaccggtcattcgagtagtac

SEQ ID NO: 172984 - DNA, 25 bp, SARS Virus
gtacaccggtcaatcgagtagtaca

SEQ ID NO: 172985 - DNA, 25 bp, SARS Virus
tacaccggtcatacgagtagtacat

SEQ ID NO: 172986 - DNA, 25 bp, SARS Virus
acaccggtcattagagtagtacatt

SEQ ID NO: 172987 - DNA, 25 bp, SARS Virus
caccggtcattcaagtagtacattg

SEQ ID NO: 172988 - DNA, 25 bp, SARS Virus
accggtcattcgagtagtacattga

SEQ ID NO: 172989 - DNA, 25 bp, SARS Virus
ccggtcattcgaatagtacattgaa

SEQ ID NO: 172990 - DNA, 25 bp, SARS Virus
cggtcattcgagaagtacattgaaa

SEQ ID NO: 172991 - DNA, 25 bp, SARS Virus
ggtcattcgagtagtacattgaaag

SEQ ID NO: 172992 - DNA, 25 bp, SARS Virus
gtcattcgagtaatacattgaaaga

SEQ ID NO: 172993 - DNA, 25 bp, SARS Virus
tcattcgagtagaacattgaaagat

SEQ ID NO: 172994 - DNA, 25 bp, SARS Virus
cattcgagtagtacattgaaagatt

SEQ ID NO: 172995 - DNA, 25 bp, SARS Virus
attcgagtagtaaattgaaagatta

SEQ ID NO: 172996 - DNA, 25 bp, SARS Virus
ttcgagtagtacattgaaagattac

SEQ ID NO: 172997 - DNA, 25 bp, SARS Virus
tcgagtagtacaatgaaagattaca

SEQ ID NO: 172998 - DNA, 25 bp, SARS Virus
cgagtagtacatagaaagattacat

SEQ ID NO: 172999 - DNA, 25 bp, SARS Virus
gagtagtacattaaaagattacata

SEQ ID NO: 173000 - DNA, 25 bp, SARS Virus
agtagtacattgaaagattacataa

SEQ ID NO: 173001 - DNA, 25 bp, SARS Virus
gtagtacattgaaagattacataac

SEQ ID NO: 173002 - DNA, 25 bp, SARS Virus
tagtacattgaaagattacataaca

SEQ ID NO: 173003 - DNA, 25 bp, SARS Virus
agtacattgaaaaattacataacat

SEQ ID NO: 173004 - DNA, 25 bp, SARS Virus
gtacattgaaagattacataacatt

SEQ ID NO: 173005 - DNA, 25 bp, SARS Virus
tacattgaaagaatacataacattt

SEQ ID NO: 173006 - DNA, 25 bp, SARS Virus
acattgaaagataacataacattta

SEQ ID NO: 173007 - DNA, 25 bp, SARS Virus
cattgaaagattacataacatttat

SEQ ID NO: 173008 - DNA, 25 bp, SARS Virus
attgaaagattaaataacatttatg

SEQ ID NO: 173009 - DNA, 25 bp, SARS Virus
ttgaaagattacataacatttatgt

SEQ ID NO: 173010 - DNA, 25 bp, SARS Virus
tgaaagattacaaaacatttatgtt

SEQ ID NO: 173011 - DNA, 25 bp, SARS Virus
gaaagattacataacatttatgttc

SEQ ID NO: 173012 - DNA, 25 bp, SARS Virus
aaagattacataacatttatgttca

SEQ ID NO: 173013 - DNA, 25 bp, SARS Virus
aagattacataaaatttatgttcac

SEQ ID NO: 173014 - DNA, 25 bp, SARS Virus
agattacataacatttatgttcact

SEQ ID NO: 173015 - DNA, 25 bp, SARS Virus
gattacataacaattatgttcactt

SEQ ID NO: 173016 - DNA, 25 bp, SARS Virus
attacataacatatatgttcacttt

SEQ ID NO: 173017 - DNA, 25 bp, SARS Virus
ttacataacattaatgttcactttc

SEQ ID NO: 173018 - DNA, 25 bp, SARS Virus
tacataacatttatgttcactttct

SEQ ID NO: 173019 - DNA, 25 bp, SARS Virus
acataacatttaagttcactttctg

SEQ ID NO: 173020 - DNA, 25 bp, SARS Virus
cataacatttatattcactttctgt

SEQ ID NO: 173021 - DNA, 25 bp, SARS Virus
ataacatttatgatcactttctgta

SEQ ID NO: 173022 - DNA, 25 bp, SARS Virus
taacatttatgtacactttctgtag

SEQ ID NO: 173023 - DNA, 25 bp, SARS Virus
aacatttatgttaactttctgtagt

SEQ ID NO: 173024 - DNA, 25 bp, SARS Virus
acatttatgttcactttctgtagtc

SEQ ID NO: 173025 - DNA, 25 bp, SARS Virus
catttatgttcaatttctgtagtcg

SEQ ID NO: 173026 - DNA, 25 bp, SARS Virus
atttatgttcacattctgtagtcgt

SEQ ID NO: 173027 - DNA, 25 bp, SARS Virus
tttatgttcactatctgtagtcgta

SEQ ID NO: 173028 - DNA, 25 bp, SARS Virus
ttatgttcacttactgtagtcgtat

SEQ ID NO: 173029 - DNA, 25 bp, SARS Virus
tatgttcactttatgtagtcgtatg

SEQ ID NO: 173030 - DNA, 25 bp, SARS Virus
atgttcactttcagtagtcgtatga

SEQ ID NO: 173031 - DNA, 25 bp, SARS Virus
tgttcactttctatagtcgtatgag

SEQ ID NO: 173032 - DNA, 25 bp, SARS Virus
gttcactttctgaagtcgtatgagg

SEQ ID NO: 173033 - DNA, 25 bp, SARS Virus
ttcactttctgtagtcgtatgagga

SEQ ID NO: 173034 - DNA, 25 bp, SARS Virus
tcactttctgtaatcgtatgaggac

SEQ ID NO: 173035 - DNA, 25 bp, SARS Virus
cactttctgtagacgtatgaggact

SEQ ID NO: 173036 - DNA, 25 bp, SARS Virus
actttctgtagtagtatgaggacta

SEQ ID NO: 173037 - DNA, 25 bp, SARS Virus
ctttctgtagtcatatgaggactaa

SEQ ID NO: 173038 - DNA, 25 bp, SARS Virus
tttctgtagtcgaatgaggactaat

SEQ ID NO: 173039 - DNA, 25 bp, SARS Virus
ttctgtagtcgtatgaggactaatc

SEQ ID NO: 173040 - DNA, 25 bp, SARS Virus
tctgtagtcgtaagaggactaatcc

SEQ ID NO: 173041 - DNA, 25 bp, SARS Virus
ctgtagtcgtataaggactaatcct

SEQ ID NO: 173042 - DNA, 25 bp, SARS Virus
tgtagtcgtatgaggactaatccta

SEQ ID NO: 173043 - DNA, 25 bp, SARS Virus
gtagtcgtatgaagactaatcctac

SEQ ID NO: 173044 - DNA, 25 bp, SARS Virus
tagtcgtatgagaactaatcctaca

SEQ ID NO: 173045 - DNA, 25 bp, SARS Virus
agtcgtatgaggactaatcctacaa

SEQ ID NO: 173046 - DNA, 25 bp, SARS Virus
gtcgtatgaggaataatcctacaaa

SEQ ID NO: 173047 - DNA, 25 bp, SARS Virus
tcgtatgaggacaaatcctacaaaa

SEQ ID NO: 173048 - DNA, 25 bp, SARS Virus
cgtatgaggactaatcctacaaaac

SEQ ID NO: 173049 - DNA, 25 bp, SARS Virus
gtatgaggactaatcctacaaaaca

SEQ ID NO: 173050 - DNA, 25 bp, SARS Virus
tatgaggactaaacctacaaaacat

SEQ ID NO: 173051 - DNA, 25 bp, SARS Virus
atgaggactaatactacaaaacatt

SEQ ID NO: 173052 - DNA, 25 bp, SARS Virus
tgaggactaatcatacaaaacattc

SEQ ID NO: 173053 - DNA, 25 bp, SARS Virus
gaggactaatccaacaaaacattca

SEQ ID NO: 173054 - DNA, 25 bp, SARS Virus
aggactaatcctacaaaacattcac

SEQ ID NO: 173055 - DNA, 25 bp, SARS Virus
ggactaatcctaaaaaacattcacc

SEQ ID NO: 173056 - DNA, 25 bp, SARS Virus
gactaatcctacaaaacattcaccc

SEQ ID NO: 173057 - DNA, 25 bp, SARS Virus
actaatcctacaaaacattcaccca

SEQ ID NO: 173058 - DNA, 25 bp, SARS Virus
ctaatcctacaaaacattcacccat

SEQ ID NO: 173059 - DNA, 25 bp, SARS Virus
taatcctacaaaacattcacccatt

SEQ ID NO: 173060 - DNA, 25 bp, SARS Virus
aatcctacaaaaaattcacccattc

SEQ ID NO: 173061 - DNA, 25 bp, SARS Virus
atcctacaaaacattcacccattcg

SEQ ID NO: 173062 - DNA, 25 bp, SARS Virus
tcctacaaaacaatcacccattcgt

SEQ ID NO: 173063 - DNA, 25 bp, SARS Virus
cctacaaaacatacacccattcgta

SEQ ID NO: 173064 - DNA, 25 bp, SARS Virus
ctacaaaacattaacccattcgtag

SEQ ID NO: 173065 - DNA, 25 bp, SARS Virus
tacaaaacattcacccattcgtagt

SEQ ID NO: 173066 - DNA, 25 bp, SARS Virus
acaaaacattcaaccattcgtagtt

SEQ ID NO: 173067 - DNA, 25 bp, SARS Virus
caaaacattcacacattcgtagtta

SEQ ID NO: 173068 - DNA, 25 bp, SARS Virus
aaaacattcaccaattcgtagttat

SEQ ID NO: 173069 - DNA, 25 bp, SARS Virus
aaacattcacccattcgtagttatc

SEQ ID NO: 173070 - DNA, 25 bp, SARS Virus
aacattcacccaatcgtagttatcg

SEQ ID NO: 173071 - DNA, 25 bp, SARS Virus
acattcacccatacgtagttatcgg

SEQ ID NO: 173072 - DNA, 25 bp, SARS Virus
cattcacccattagtagttatcggt

SEQ ID NO: 173073 - DNA, 25 bp, SARS Virus
attcacccattcatagttatcggtc

SEQ ID NO: 173074 - DNA, 25 bp, SARS Virus
ttcacccattcgaagttatcggtca

SEQ ID NO: 173075 - DNA, 25 bp, SARS Virus
tcacccattcgtagttatcggtcac

SEQ ID NO: 173076 - DNA, 25 bp, SARS Virus
cacccattcgtaattatcggtcact

SEQ ID NO: 173077 - DNA, 25 bp, SARS Virus
acccattcgtagatatcggtcactg

SEQ ID NO: 173078 - DNA, 25 bp, SARS Virus
cccattcgtagtaatcggtcactgt

SEQ ID NO: 173079 - DNA, 25 bp, SARS Virus
ccattcgtagttatcggtcactgtg

SEQ ID NO: 173080 - DNA, 25 bp, SARS Virus
cattcgtagttaacggtcactgtgc

SEQ ID NO: 173081 - DNA, 25 bp, SARS Virus
attcgtagttataggtcactgtgct

SEQ ID NO: 173082 - DNA, 25 bp, SARS Virus
ttcgtagttatcagtcactgtgctt

SEQ ID NO: 173083 - DNA, 25 bp, SARS Virus
tcgtagttatcgatcactgtgcttg

SEQ ID NO: 173084 - DNA, 25 bp, SARS Virus
cgtagttatcggacactgtgcttgg

SEQ ID NO: 173085 - DNA, 25 bp, SARS Virus
gtagttatcggtaactgtgcttgga

SEQ ID NO: 173086 - DNA, 25 bp, SARS Virus
tagttatcggtcactgtgcttggaa

SEQ ID NO: 173087 - DNA, 25 bp, SARS Virus
agttatcggtcaatgtgcttggaaa

SEQ ID NO: 173088 - DNA, 25 bp, SARS Virus
gttatcggtcacagtgcttggaaag

SEQ ID NO: 173089 - DNA, 25 bp, SARS Virus
ttatcggtcactatgcttggaaagt

SEQ ID NO: 173090 - DNA, 25 bp, SARS Virus
tatcggtcactgagcttggaaagtt

SEQ ID NO: 173091 - DNA, 25 bp, SARS Virus
atcggtcactgtacttggaaagtta

SEQ ID NO: 173092 - DNA, 25 bp, SARS Virus
tcggtcactgtgattggaaagttag

SEQ ID NO: 173093 - DNA, 25 bp, SARS Virus
cggtcactgtgcatggaaagttagt

SEQ ID NO: 173094 - DNA, 25 bp, SARS Virus
ggtcactgtgctaggaaagttagta

SEQ ID NO: 173095 - DNA, 25 bp, SARS Virus
gtcactgtgcttagaaagttagtat

SEQ ID NO: 173096 - DNA, 25 bp, SARS Virus
tcactgtgcttgaaaagttagtatt

SEQ ID NO: 173097 - DNA, 25 bp, SARS Virus
cactgtgcttggaaagttagtattc

SEQ ID NO: 173098 - DNA, 25 bp, SARS Virus
actgtgcttggaaagttagtattca

SEQ ID NO: 173099 - DNA, 25 bp, SARS Virus
ctgtgcttggaaagttagtattcac

SEQ ID NO: 173100 - DNA, 25 bp, SARS Virus
tgtgcttggaaaattagtattcaca

SEQ ID NO: 173101 - DNA, 25 bp, SARS Virus
gtgcttggaaagatagtattcacat

SEQ ID NO: 173102 - DNA, 25 bp, SARS Virus
tgcttggaaagtaagtattcacatg

SEQ ID NO: 173103 - DNA, 25 bp, SARS Virus
gcttggaaagttagtattcacatgg

SEQ ID NO: 173104 - DNA, 25 bp, SARS Virus
cttggaaagttaatattcacatggt

SEQ ID NO: 173105 - DNA, 25 bp, SARS Virus
ttggaaagttagaattcacatggta

SEQ ID NO: 173106 - DNA, 25 bp, SARS Virus
tggaaagttagtattcacatggtag

SEQ ID NO: 173107 - DNA, 25 bp, SARS Virus
ggaaagttagtaatcacatggtaga

SEQ ID NO: 173108 - DNA, 25 bp, SARS Virus
gaaagttagtatacacatggtagac

SEQ ID NO: 173109 - DNA, 25 bp, SARS Virus
aaagttagtattaacatggtagaca

SEQ ID NO: 173110 - DNA, 25 bp, SARS Virus
aagttagtattcacatggtagacaa

SEQ ID NO: 173111 - DNA, 25 bp, SARS Virus
agttagtattcaaatggtagacaaa

SEQ ID NO: 173112 - DNA, 25 bp, SARS Virus
gttagtattcacatggtagacaaaa

SEQ ID NO: 173113 - DNA, 25 bp, SARS Virus
ttagtattcacaaggtagacaaaac

SEQ ID NO: 173114 - DNA, 25 bp, SARS Virus
tagtattcacatagtagacaaaact

SEQ ID NO: 173115 - DNA, 25 bp, SARS Virus
agtattcacatgatagacaaaactg

SEQ ID NO: 173116 - DNA, 25 bp, SARS Virus
gtattcacatggaagacaaaactgt

SEQ ID NO: 173117 - DNA, 25 bp, SARS Virus
tattcacatggtagacaaaactgtt

SEQ ID NO: 173118 - DNA, 25 bp, SARS Virus
attcacatggtaaacaaaactgtta

SEQ ID NO: 173119 - DNA, 25 bp, SARS Virus
ttcacatggtagacaaaactgttat

SEQ ID NO: 173120 - DNA, 25 bp, SARS Virus
tcacatggtagaaaaaactgttata

SEQ ID NO: 173121 - DNA, 25 bp, SARS Virus
cacatggtagacaaaactgttatag

SEQ ID NO: 173122 - DNA, 25 bp, SARS Virus
acatggtagacaaaactgttatagt

SEQ ID NO: 173123 - DNA, 25 bp, SARS Virus
catggtagacaaaactgttatagta

SEQ ID NO: 173124 - DNA, 25 bp, SARS Virus
atggtagacaaaactgttatagtag

SEQ ID NO: 173125 - DNA, 25 bp, SARS Virus
tggtagacaaaaatgttatagtagc

SEQ ID NO: 173126 - DNA, 25 bp, SARS Virus
ggtagacaaaacagttatagtagct

SEQ ID NO: 173127 - DNA, 25 bp, SARS Virus
gtagacaaaactattatagtagctg

SEQ ID NO: 173128 - DNA, 25 bp, SARS Virus
tagacaaaactgatatagtagctgt

SEQ ID NO: 173129 - DNA, 25 bp, SARS Virus
agacaaaactgtaatagtagctgtt

SEQ ID NO: 173130 - DNA, 25 bp, SARS Virus
gacaaaactgttatagtagctgttt

SEQ ID NO: 173131 - DNA, 25 bp, SARS Virus
acaaaactgttaaagtagctgtttt

SEQ ID NO: 173132 - DNA, 25 bp, SARS Virus
caaaactgttatagtagctgttttg

SEQ ID NO: 173133 - DNA, 25 bp, SARS Virus
aaaactgttataatagctgttttgt

SEQ ID NO: 173134 - DNA, 25 bp, SARS Virus
aaactgttatagaagctgttttgtc

SEQ ID NO: 173135 - DNA, 25 bp, SARS Virus
aactgttatagtagctgttttgtcg

SEQ ID NO: 173136 - DNA, 25 bp, SARS Virus
actgttatagtaactgttttgtcgg

SEQ ID NO: 173137 - DNA, 25 bp, SARS Virus
ctgttatagtagatgttttgtcgga

SEQ ID NO: 173138 - DNA, 25 bp, SARS Virus
tgttatagtagcagttttgtcggac

SEQ ID NO: 173139 - DNA, 25 bp, SARS Virus
gttatagtagctattttgtcggacg

SEQ ID NO: 173140 - DNA, 25 bp, SARS Virus
ttatagtagctgatttgtcggacgc

SEQ ID NO: 173141 - DNA, 25 bp, SARS Virus
tatagtagctgtattgtcggacgcg

SEQ ID NO: 173142 - DNA, 25 bp, SARS Virus
atagtagctgttatgtcggacgcgg

SEQ ID NO: 173143 - DNA, 25 bp, SARS Virus
tagtagctgtttagtcggacgcgga

SEQ ID NO: 173144 - DNA, 25 bp, SARS Virus
agtagctgttttatcggacgcggat

SEQ ID NO: 173145 - DNA, 25 bp, SARS Virus
gtagctgttttgacggacgcggatt

SEQ ID NO: 173146 - DNA, 25 bp, SARS Virus
tagctgttttgtaggacgcggatta

SEQ ID NO: 173147 - DNA, 25 bp, SARS Virus
agctgttttgtcagacgcggattat

SEQ ID NO: 173148 - DNA, 25 bp, SARS Virus
gctgttttgtcgaacgcggattata

SEQ ID NO: 173149 - DNA, 25 bp, SARS Virus
ctgttttgtcggacgcggattataa

SEQ ID NO: 173150 - DNA, 25 bp, SARS Virus
tgttttgtcggaagcggattataag

SEQ ID NO: 173151 - DNA, 25 bp, SARS Virus
gttttgtcggacacggattataaga

SEQ ID NO: 173152 - DNA, 25 bp, SARS Virus
ttttgtcggacgaggattataagaa

SEQ ID NO: 173153 - DNA, 25 bp, SARS Virus
tttgtcggacgcagattataagaac

SEQ ID NO: 173154 - DNA, 25 bp, SARS Virus
ttgtcggacgcgaattataagaact

SEQ ID NO: 173155 - DNA, 25 bp, SARS Virus
tgtcggacgcggattataagaacta

SEQ ID NO: 173156 - DNA, 25 bp, SARS Virus
gtcggacgcggaatataagaactac

SEQ ID NO: 173157 - DNA, 25 bp, SARS Virus
tcggacgcggataataagaactacc

SEQ ID NO: 173158 - DNA, 25 bp, SARS Virus
cggacgcggattataagaactacct

SEQ ID NO: 173159 - DNA, 25 bp, SARS Virus
ggacgcggattaaaagaactaccta

SEQ ID NO: 173160 - DNA, 25 bp, SARS Virus
gacgcggattataagaactacctag

SEQ ID NO: 173161 - DNA, 25 bp, SARS Virus
acgcggattataagaactacctaga

SEQ ID NO: 173162 - DNA, 25 bp, SARS Virus
cgcggattataaaaactacctagac

SEQ ID NO: 173163 - DNA, 25 bp, SARS Virus
gcggattataagaactacctagacc

SEQ ID NO: 173164 - DNA, 25 bp, SARS Virus
cggattataagaactacctagaccc

SEQ ID NO: 173165 - DNA, 25 bp, SARS Virus
ggattataagaaatacctagaccca

SEQ ID NO: 173166 - DNA, 25 bp, SARS Virus
gattataagaacaacctagacccat

SEQ ID NO: 173167 - DNA, 25 bp, SARS Virus
attataagaactacctagacccatt

SEQ ID NO: 173168 - DNA, 25 bp, SARS Virus
ttataagaactaactagacccattc

SEQ ID NO: 173169 - DNA, 25 bp, SARS Virus
tataagaactacatagacccattcc

SEQ ID NO: 173170 - DNA, 25 bp, SARS Virus
ataagaactaccaagacccattccg

SEQ ID NO: 173171 - DNA, 25 bp, SARS Virus
taagaactacctagacccattccgt

SEQ ID NO: 173172 - DNA, 25 bp, SARS Virus
aagaactacctaaacccattccgtc

SEQ ID NO: 173173 - DNA, 25 bp, SARS Virus
agaactacctagacccattccgtcc

SEQ ID NO: 173174 - DNA, 25 bp, SARS Virus
gaactacctagaaccattccgtcca

SEQ ID NO: 173175 - DNA, 25 bp, SARS Virus
aactacctagacacattccgtccat

SEQ ID NO: 173176 - DNA, 25 bp, SARS Virus
actacctagaccaattccgtccatg

SEQ ID NO: 173177 - DNA, 25 bp, SARS Virus
ctacctagacccattccgtccatgt

SEQ ID NO: 173178 - DNA, 25 bp, SARS Virus
tacctagacccaatccgtccatgtg

SEQ ID NO: 173179 - DNA, 25 bp, SARS Virus
acctagacccataccgtccatgtgc

SEQ ID NO: 173180 - DNA, 25 bp, SARS Virus
cctagacccattacgtccatgtgca

SEQ ID NO: 173181 - DNA, 25 bp, SARS Virus
ctagacccattcagtccatgtgcat

SEQ ID NO: 173182 - DNA, 25 bp, SARS Virus
tagacccattccatccatgtgcatt

SEQ ID NO: 173183 - DNA, 25 bp, SARS Virus
agacccattccgaccatgtgcatta

SEQ ID NO: 173184 - DNA, 25 bp, SARS Virus
gacccattccgtacatgtgcattag

SEQ ID NO: 173185 - DNA, 25 bp, SARS Virus
acccattccgtcaatgtgcattagt

SEQ ID NO: 173186 - DNA, 25 bp, SARS Virus
cccattccgtccatgtgcattagta

SEQ ID NO: 173187 - DNA, 25 bp, SARS Virus
ccattccgtccaagtgcattagtag

SEQ ID NO: 173188 - DNA, 25 bp, SARS Virus
cattccgtccatatgcattagtaga

SEQ ID NO: 173189 - DNA, 25 bp, SARS Virus
attccgtccatgagcattagtagag

SEQ ID NO: 173190 - DNA, 25 bp, SARS Virus
ttccgtccatgtacattagtagagg

SEQ ID NO: 173191 - DNA, 25 bp, SARS Virus
tccgtccatgtgaattagtagagga

SEQ ID NO: 173192 - DNA, 25 bp, SARS Virus
ccgtccatgtgcattagtagaggaa

SEQ ID NO: 173193 - DNA, 25 bp, SARS Virus
cgtccatgtgcaatagtagaggaac

SEQ ID NO: 173194 - DNA, 25 bp, SARS Virus
gtccatgtgcataagtagaggaaca

SEQ ID NO: 173195 - DNA, 25 bp, SARS Virus
tccatgtgcattagtagaggaacaa

SEQ ID NO: 173196 - DNA, 25 bp, SARS Virus
ccatgtgcattaatagaggaacaaa

SEQ ID NO: 173197 - DNA, 25 bp, SARS Virus
catgtgcattagaagaggaacaaat

SEQ ID NO: 173198 - DNA, 25 bp, SARS Virus
atgtgcattagtagaggaacaaatt

SEQ ID NO: 173199 - DNA, 25 bp, SARS Virus
tgtgcattagtaaaggaacaaattg

SEQ ID NO: 173200 - DNA, 25 bp, SARS Virus
gtgcattagtagaggaacaaattga

SEQ ID NO: 173201 - DNA, 25 bp, SARS Virus
tgcattagtagaagaacaaattgat

SEQ ID NO: 173202 - DNA, 25 bp, SARS Virus
gcattagtagagaaacaaattgatc

SEQ ID NO: 173203 - DNA, 25 bp, SARS Virus
cattagtagaggaacaaattgatcg

SEQ ID NO: 173204 - DNA, 25 bp, SARS Virus
attagtagaggaacaaattgatcgt

SEQ ID NO: 173205 - DNA, 25 bp, SARS Virus
ttagtagaggaaaaaattgatcgta

SEQ ID NO: 173206 - DNA, 25 bp, SARS Virus
tagtagaggaacaaattgatcgtaa

SEQ ID NO: 173207 - DNA, 25 bp, SARS Virus
agtagaggaacaaattgatcgtaac

SEQ ID NO: 173208 - DNA, 25 bp, SARS Virus
gtagaggaacaaattgatcgtaaca

SEQ ID NO: 173209 - DNA, 25 bp, SARS Virus
tagaggaacaaaatgatcgtaacat

SEQ ID NO: 173210 - DNA, 25 bp, SARS Virus
agaggaacaaatagatcgtaacata

SEQ ID NO: 173211 - DNA, 25 bp, SARS Virus
gaggaacaaattaatcgtaacatac

SEQ ID NO: 173212 - DNA, 25 bp, SARS Virus
aggaacaaattgatcgtaacatacg

SEQ ID NO: 173213 - DNA, 25 bp, SARS Virus
ggaacaaattgaacgtaacatacga

SEQ ID NO: 173214 - DNA, 25 bp, SARS Virus
gaacaaattgatagtaacatacgac

SEQ ID NO: 173215 - DNA, 25 bp, SARS Virus
aacaaattgatcataacatacgaca

SEQ ID NO: 173216 - DNA, 25 bp, SARS Virus
acaaattgatcgaaacatacgacac

SEQ ID NO: 173217 - DNA, 25 bp, SARS Virus
caaattgatcgtaacatacgacact

SEQ ID NO: 173218 - DNA, 25 bp, SARS Virus
aaattgatcgtaacatacgacactc

SEQ ID NO: 173219 - DNA, 25 bp, SARS Virus
aattgatcgtaaaatacgacactcg

SEQ ID NO: 173220 - DNA, 25 bp, SARS Virus
attgatcgtaacatacgacactcgt

SEQ ID NO: 173221 - DNA, 25 bp, SARS Virus
ttgatcgtaacaaacgacactcgtt

SEQ ID NO: 173222 - DNA, 25 bp, SARS Virus
tgatcgtaacatacgacactcgttt

SEQ ID NO: 173223 - DNA, 25 bp, SARS Virus
gatcgtaacataagacactcgtttt

SEQ ID NO: 173224 - DNA, 25 bp, SARS Virus
atcgtaacatacaacactcgtttta

SEQ ID NO: 173225 - DNA, 25 bp, SARS Virus
tcgtaacatacgacactcgttttaa

SEQ ID NO: 173226 - DNA, 25 bp, SARS Virus
cgtaacatacgaaactcgttttaag

SEQ ID NO: 173227 - DNA, 25 bp, SARS Virus
gtaacatacgacactcgttttaagc

SEQ ID NO: 173228 - DNA, 25 bp, SARS Virus
taacatacgacaatcgttttaagca

SEQ ID NO: 173229 - DNA, 25 bp, SARS Virus
aacatacgacacacgttttaagcac

SEQ ID NO: 173230 - DNA, 25 bp, SARS Virus
acatacgacactagttttaagcact

SEQ ID NO: 173231 - DNA, 25 bp, SARS Virus
catacgacactcattttaagcactc

SEQ ID NO: 173232 - DNA, 25 bp, SARS Virus
atacgacactcgatttaagcactcc

SEQ ID NO: 173233 - DNA, 25 bp, SARS Virus
tacgacactcgtattaagcactcca

SEQ ID NO: 173234 - DNA, 25 bp, SARS Virus
acgacactcgttataagcactccag

SEQ ID NO: 173235 - DNA, 25 bp, SARS Virus
cgacactcgtttaaagcactccagg

SEQ ID NO: 173236 - DNA, 25 bp, SARS Virus
gacactcgttttaagcactccagga

SEQ ID NO: 173237 - DNA, 25 bp, SARS Virus
acactcgttttaagcactccaggaa

SEQ ID NO: 173238 - DNA, 25 bp, SARS Virus
cactcgttttaaacactccaggaaa

SEQ ID NO: 173239 - DNA, 25 bp, SARS Virus
actcgttttaagaactccaggaaat

SEQ ID NO: 173240 - DNA, 25 bp, SARS Virus
ctcgttttaagcactccaggaaatc

SEQ ID NO: 173241 - DNA, 25 bp, SARS Virus
tcgttttaagcaatccaggaaatca

SEQ ID NO: 173242 - DNA, 25 bp, SARS Virus
cgttttaagcacaccaggaaatcat

SEQ ID NO: 173243 - DNA, 25 bp, SARS Virus
gttttaagcactacaggaaatcatt

SEQ ID NO: 173244 - DNA, 25 bp, SARS Virus
ttttaagcactcaaggaaatcattc

SEQ ID NO: 173245 - DNA, 25 bp, SARS Virus
tttaagcactccaggaaatcattcc

SEQ ID NO: 173246 - DNA, 25 bp, SARS Virus
ttaagcactccaagaaatcattcca

SEQ ID NO: 173247 - DNA, 25 bp, SARS Virus
taagcactccagaaaatcattccag

SEQ ID NO: 173248 - DNA, 25 bp, SARS Virus
aagcactccaggaaatcattccagt

SEQ ID NO: 173249 - DNA, 25 bp, SARS Virus
agcactccaggaaatcattccagtc

SEQ ID NO: 173250 - DNA, 25 bp, SARS Virus
gcactccaggaaatcattccagtca

SEQ ID NO: 173251 - DNA, 25 bp, SARS Virus
cactccaggaaaacattccagtcag

SEQ ID NO: 173252 - DNA, 25 bp, SARS Virus
actccaggaaataattccagtcaga

SEQ ID NO: 173253 - DNA, 25 bp, SARS Virus
ctccaggaaatcattccagtcagag

SEQ ID NO: 173254 - DNA, 25 bp, SARS Virus
tccaggaaatcaatccagtcagagt

SEQ ID NO: 173255 - DNA, 25 bp, SARS Virus
ccaggaaatcataccagtcagagtc

SEQ ID NO: 173256 - DNA, 25 bp, SARS Virus
caggaaatcattacagtcagagtca

SEQ ID NO: 173257 - DNA, 25 bp, SARS Virus
aggaaatcattcaagtcagagtcag

SEQ ID NO: 173258 - DNA, 25 bp, SARS Virus
ggaaatcattccagtcagagtcagg

SEQ ID NO: 173259 - DNA, 25 bp, SARS Virus
gaaatcattccaatcagagtcaggt

SEQ ID NO: 173260 - DNA, 25 bp, SARS Virus
aaatcattccagacagagtcaggtt

SEQ ID NO: 173261 - DNA, 25 bp, SARS Virus
aatcattccagtaagagtcaggttg

SEQ ID NO: 173262 - DNA, 25 bp, SARS Virus
atcattccagtcagagtcaggttgt

SEQ ID NO: 173263 - DNA, 25 bp, SARS Virus
tcattccagtcaaagtcaggttgta

SEQ ID NO: 173264 - DNA, 25 bp, SARS Virus
cattccagtcagagtcaggttgtaa

SEQ ID NO: 173265 - DNA, 25 bp, SARS Virus
attccagtcagaatcaggttgtaaa

SEQ ID NO: 173266 - DNA, 25 bp, SARS Virus
ttccagtcagagacaggttgtaaaa

SEQ ID NO: 173267 - DNA, 25 bp, SARS Virus
tccagtcagagtaaggttgtaaaac

SEQ ID NO: 173268 - DNA, 25 bp, SARS Virus
ccagtcagagtcaggttgtaaaacg

SEQ ID NO: 173269 - DNA, 25 bp, SARS Virus
cagtcagagtcaagttgtaaaacgg

SEQ ID NO: 173270 - DNA, 25 bp, SARS Virus
agtcagagtcagattgtaaaacgga

SEQ ID NO: 173271 - DNA, 25 bp, SARS Virus
gtcagagtcaggatgtaaaacggag

SEQ ID NO: 173272 - DNA, 25 bp, SARS Virus
tcagagtcaggtagtaaaacggagt

SEQ ID NO: 173273 - DNA, 25 bp, SARS Virus
gtaccagtatcgccgtgaacgttgt

SEQ ID NO: 173274 - DNA, 25 bp, SARS Virus
taccagtatcgtcgtgaacgttgta

SEQ ID NO: 173275 - DNA, 25 bp, SARS Virus
accagtatcgtcctgaacgttgtat

SEQ ID NO: 173276 - DNA, 25 bp, SARS Virus
ccagtatcgtcgcgaacgttgtatc

SEQ ID NO: 173277 - DNA, 25 bp, SARS Virus
cagtatcgtcgtcaacgttgtatcc

SEQ ID NO: 173278 - DNA, 25 bp, SARS Virus
agtatcgtcgtgcacgttgtatcct

SEQ ID NO: 173279 - DNA, 25 bp, SARS Virus
gtatcgtcgtgaccgttgtatcctt

SEQ ID NO: 173280 - DNA, 25 bp, SARS Virus
tatcgtcgtgaacgttgtatcctta

SEQ ID NO: 173281 - DNA, 25 bp, SARS Virus
atcgtcgtgaaccttgtatccttac

SEQ ID NO: 173282 - DNA, 25 bp, SARS Virus
tcgtcgtgaacgctgtatccttacc

SEQ ID NO: 173283 - DNA, 25 bp, SARS Virus
cgtcgtgaacgtcgtatccttacca

SEQ ID NO: 173284 - DNA, 25 bp, SARS Virus
gtcgtgaacgttctatccttaccag

SEQ ID NO: 173285 - DNA, 25 bp, SARS Virus
tcgtgaacgttgcatccttaccaga

SEQ ID NO: 173286 - DNA, 25 bp, SARS Virus
cgtgaacgttgtctccttaccagag

SEQ ID NO: 173287 - DNA, 25 bp, SARS Virus
gtgaacgttgtacccttaccagagg

SEQ ID NO: 173288 - DNA, 25 bp, SARS Virus
tgaacgttgtatccttaccagagga

SEQ ID NO: 173289 - DNA, 25 bp, SARS Virus
gaacgttgtatccttaccagaggat

SEQ ID NO: 173290 - DNA, 25 bp, SARS Virus
aacgttgtatccctaccagaggatt

SEQ ID NO: 173291 - DNA, 25 bp, SARS Virus
acgttgtatcctcaccagaggatta

SEQ ID NO: 173292 - DNA, 25 bp, SARS Virus
cgttgtatccttcccagaggattat

SEQ ID NO: 173293 - DNA, 25 bp, SARS Virus
gttgtatccttaccagaggattatg

SEQ ID NO: 173294 - DNA, 25 bp, SARS Virus
ttgtatccttaccagaggattatgt

SEQ ID NO: 173295 - DNA, 25 bp, SARS Virus
tgtatccttacccgaggattatgtc

SEQ ID NO: 173296 - DNA, 25 bp, SARS Virus
gtatccttaccacaggattatgtcc

SEQ ID NO: 173297 - DNA, 25 bp, SARS Virus
tatccttaccagcggattatgtccg

SEQ ID NO: 173298 - DNA, 25 bp, SARS Virus
atccttaccagacgattatgtccgt

SEQ ID NO: 173299 - DNA, 25 bp, SARS Virus
tccttaccagagcattatgtccgtg

SEQ ID NO: 173300 - DNA, 25 bp, SARS Virus
ccttaccagaggcttatgtccgtgg

SEQ ID NO: 173301 - DNA, 25 bp, SARS Virus
cttaccagaggactatgtccgtggc

SEQ ID NO: 173302 - DNA, 25 bp, SARS Virus
ttaccagaggatcatgtccgtggcg

SEQ ID NO: 173303 - DNA, 25 bp, SARS Virus
taccagaggattctgtccgtggcgt

SEQ ID NO: 173304 - DNA, 25 bp, SARS Virus
accagaggattacgtccgtggcgtt

SEQ ID NO: 173305 - DNA, 25 bp, SARS Virus
ccagaggattatctccgtggcgttg

SEQ ID NO: 173306 - DNA, 25 bp, SARS Virus
cagaggattatgcccgtggcgttgc

SEQ ID NO: 173307 - DNA, 25 bp, SARS Virus
agaggattatgtccgtggcgttgct

SEQ ID NO: 173308 - DNA, 25 bp, SARS Virus
gaggattatgtccgtggcgttgctt

SEQ ID NO: 173309 - DNA, 25 bp, SARS Virus
aggattatgtccctggcgttgcttc

SEQ ID NO: 173310 - DNA, 25 bp, SARS Virus
ggattatgtccgcggcgttgcttca

SEQ ID NO: 173311 - DNA, 25 bp, SARS Virus
gattatgtccgtcgcgttgcttcac

SEQ ID NO: 173312 - DNA, 25 bp, SARS Virus
attatgtccgtgccgttgcttcact

SEQ ID NO: 173313 - DNA, 25 bp, SARS Virus
ttatgtccgtggcgttgcttcactt

SEQ ID NO: 173314 - DNA, 25 bp, SARS Virus
tatgtccgtggccttgcttcacttc

SEQ ID NO: 173315 - DNA, 25 bp, SARS Virus
atgtccgtggcgctgcttcacttca

SEQ ID NO: 173316 - DNA, 25 bp, SARS Virus
tgtccgtggcgtcgcttcacttcag

SEQ ID NO: 173317 - DNA, 25 bp, SARS Virus
gtccgtggcgttccttcacttcaga

SEQ ID NO: 173318 - DNA, 25 bp, SARS Virus
tccgtggcgttgcttcacttcagac

SEQ ID NO: 173319 - DNA, 25 bp, SARS Virus
ccgtggcgttgcctcacttcagaca

SEQ ID NO: 173320 - DNA, 25 bp, SARS Virus
cgtggcgttgctccacttcagacac

SEQ ID NO: 173321 - DNA, 25 bp, SARS Virus
gtggcgttgcttcacttcagacact

SEQ ID NO: 173322 - DNA, 25 bp, SARS Virus
tggcgttgcttcccttcagacactt

SEQ ID NO: 173323 - DNA, 25 bp, SARS Virus
ggcgttgcttcacttcagacactta

SEQ ID NO: 173324 - DNA, 25 bp, SARS Virus
gcgttgcttcacctcagacacttaa

SEQ ID NO: 173325 - DNA, 25 bp, SARS Virus
cgttgcttcactccagacacttaac

SEQ ID NO: 173326 - DNA, 25 bp, SARS Virus
gttgcttcacttcagacacttaacg

SEQ ID NO: 173327 - DNA, 25 bp, SARS Virus
ttgcttcacttccgacacttaacgt

SEQ ID NO: 173328 - DNA, 25 bp, SARS Virus
tgcttcacttcacacacttaacgtg

SEQ ID NO: 173329 - DNA, 25 bp, SARS Virus
gcttcacttcagccacttaacgtgt

SEQ ID NO: 173330 - DNA, 25 bp, SARS Virus
cttcacttcagacacttaacgtgtt

SEQ ID NO: 173331 - DNA, 25 bp, SARS Virus
ttcacttcagacccttaacgtgtta

SEQ ID NO: 173332 - DNA, 25 bp, SARS Virus
tcacttcagacacttaacgtgttat

SEQ ID NO: 173333 - DNA, 25 bp, SARS Virus
cacttcagacacctaacgtgttatg

SEQ ID NO: 173334 - DNA, 25 bp, SARS Virus
acttcagacactcaacgtgttatgt

SEQ ID NO: 173335 - DNA, 25 bp, SARS Virus
cttcagacacttcacgtgttatgtg

SEQ ID NO: 173336 - DNA, 25 bp, SARS Virus
ttcagacacttaccgtgttatgtgt

SEQ ID NO: 173337 - DNA, 25 bp, SARS Virus
tcagacacttaacgtgttatgtgtt

SEQ ID NO: 173338 - DNA, 25 bp, SARS Virus
cagacacttaacctgttatgtgttc

SEQ ID NO: 173339 - DNA, 25 bp, SARS Virus
agacacttaacgcgttatgtgttcg

SEQ ID NO: 173340 - DNA, 25 bp, SARS Virus
gacacttaacgtcttatgtgttcgt

SEQ ID NO: 173341 - DNA, 25 bp, SARS Virus
acacttaacgtgctatgtgttcgtg

SEQ ID NO: 173342 - DNA, 25 bp, SARS Virus
cacttaacgtgtcatgtgttcgtgg

SEQ ID NO: 173343 - DNA, 25 bp, SARS Virus
acttaacgtgttctgtgttcgtgga

SEQ ID NO: 173344 - DNA, 25 bp, SARS Virus
cttaacgtgttacgtgttcgtggat

SEQ ID NO: 173345 - DNA, 25 bp, SARS Virus
ttaacgtgttatctgttcgtggatg

SEQ ID NO: 173346 - DNA, 25 bp, SARS Virus
taacgtgttatgcgttcgtggatgt

SEQ ID NO: 173347 - DNA, 25 bp, SARS Virus
aacgtgttatgtcttcgtggatgtc

SEQ ID NO: 173348 - DNA, 25 bp, SARS Virus
acgtgttatgtgctcgtggatgtcg

SEQ ID NO: 173349 - DNA, 25 bp, SARS Virus
cgtgttatgtgtccgtggatgtcgg

SEQ ID NO: 173350 - DNA, 25 bp, SARS Virus
gtgttatgtgttcgtggatgtcgga

SEQ ID NO: 173351 - DNA, 25 bp, SARS Virus
tgttatgtgttcctggatgtcggac

SEQ ID NO: 173352 - DNA, 25 bp, SARS Virus
gttatgtgttcgcggatgtcggacg

SEQ ID NO: 173353 - DNA, 25 bp, SARS Virus
ttatgtgttcgtcgatgtcggacgt

SEQ ID NO: 173354 - DNA, 25 bp, SARS Virus
tatgtgttcgtgcatgtcggacgtt

SEQ ID NO: 173355 - DNA, 25 bp, SARS Virus
atgtgttcgtggctgtcggacgttc

SEQ ID NO: 173356 - DNA, 25 bp, SARS Virus
tgtgttcgtggacgtcggacgttct

SEQ ID NO: 173357 - DNA, 25 bp, SARS Virus
gtgttcgtggatctcggacgttctg

SEQ ID NO: 173358 - DNA, 25 bp, SARS Virus
tgttcgtggatgccggacgttctga

SEQ ID NO: 173359 - DNA, 25 bp, SARS Virus
gttcgtggatgtcggacgttctgac

SEQ ID NO: 173360 - DNA, 25 bp, SARS Virus
ttcgtggatgtccgacgttctgaca

SEQ ID NO: 173361 - DNA, 25 bp, SARS Virus
tcgtggatgtcgcacgttctgacat

SEQ ID NO: 173362 - DNA, 25 bp, SARS Virus
cgtggatgtcggccgttctgacata

SEQ ID NO: 173363 - DNA, 25 bp, SARS Virus
gtggatgtcggacgttctgacatac

SEQ ID NO: 173364 - DNA, 25 bp, SARS Virus
tggatgtcggaccttctgacataca

SEQ ID NO: 173365 - DNA, 25 bp, SARS Virus
ggatgtcggacgctctgacatacac

SEQ ID NO: 173366 - DNA, 25 bp, SARS Virus
gatgtcggacgtcctgacatacacc

SEQ ID NO: 173367 - DNA, 25 bp, SARS Virus
atgtcggacgttctgacatacacca

SEQ ID NO: 173368 - DNA, 25 bp, SARS Virus
tgtcggacgttccgacatacaccac

SEQ ID NO: 173369 - DNA, 25 bp, SARS Virus
gtcggacgttctcacatacaccaca

SEQ ID NO: 173370 - DNA, 25 bp, SARS Virus
tcggacgttctgccatacaccacac

SEQ ID NO: 173371 - DNA, 25 bp, SARS Virus
cggacgttctgacatacaccacaca

SEQ ID NO: 173372 - DNA, 25 bp, SARS Virus
ggacgttctgacctacaccacacat

SEQ ID NO: 173373 - DNA, 25 bp, SARS Virus
gacgttctgacacacaccacacatg

SEQ ID NO: 173374 - DNA, 25 bp, SARS Virus
acgttctgacatccaccacacatgt

SEQ ID NO: 173375 - DNA, 25 bp, SARS Virus
cgttctgacatacaccacacatgta

SEQ ID NO: 173376 - DNA, 25 bp, SARS Virus
gttctgacataccccacacatgtat

SEQ ID NO: 173377 - DNA, 25 bp, SARS Virus
ttctgacatacaccacacatgtatc

SEQ ID NO: 173378 - DNA, 25 bp, SARS Virus
tctgacatacaccacacatgtatcg

SEQ ID NO: 173379 - DNA, 25 bp, SARS Virus
ctgacatacaccccacatgtatcgg

SEQ ID NO: 173380 - DNA, 25 bp, SARS Virus
tgacatacaccacacatgtatcgga

SEQ ID NO: 173381 - DNA, 25 bp, SARS Virus
gacatacaccacccatgtatcggag

SEQ ID NO: 173382 - DNA, 25 bp, SARS Virus
acatacaccacacatgtatcggagt

SEQ ID NO: 173383 - DNA, 25 bp, SARS Virus
catacaccacacctgtatcggagta

SEQ ID NO: 173384 - DNA, 25 bp, SARS Virus
atacaccacacacgtatcggagtat

SEQ ID NO: 173385 - DNA, 25 bp, SARS Virus
tacaccacacatctatcggagtatt

SEQ ID NO: 173386 - DNA, 25 bp, SARS Virus
acaccacacatgcatcggagtattt

SEQ ID NO: 173387 - DNA, 25 bp, SARS Virus
caccacacatgtctcggagtatttt

SEQ ID NO: 173388 - DNA, 25 bp, SARS Virus
accacacatgtaccggagtattttg

SEQ ID NO: 173389 - DNA, 25 bp, SARS Virus
ccacacatgtatcggagtattttga

SEQ ID NO: 173390 - DNA, 25 bp, SARS Virus
cacacatgtatccgagtattttgag

SEQ ID NO: 173391 - DNA, 25 bp, SARS Virus
acacatgtatcgcagtattttgagt

SEQ ID NO: 173392 - DNA, 25 bp, SARS Virus
cacatgtatcggcgtattttgagtc

SEQ ID NO: 173393 - DNA, 25 bp, SARS Virus
acatgtatcggactattttgagtcc

SEQ ID NO: 173394 - DNA, 25 bp, SARS Virus
catgtatcggagcattttgagtcca

SEQ ID NO: 173395 - DNA, 25 bp, SARS Virus
atgtatcggagtcttttgagtccaa

SEQ ID NO: 173396 - DNA, 25 bp, SARS Virus
tgtatcggagtactttgagtccaag

SEQ ID NO: 173397 - DNA, 25 bp, SARS Virus
gtatcggagtatcttgagtccaagg

SEQ ID NO: 173398 - DNA, 25 bp, SARS Virus
tatcggagtattctgagtccaaggg

SEQ ID NO: 173399 - DNA, 25 bp, SARS Virus
atcggagtatttcgagtccaagggt

SEQ ID NO: 173400 - DNA, 25 bp, SARS Virus
tcggagtattttcagtccaagggtc

SEQ ID NO: 173401 - DNA, 25 bp, SARS Virus
cggagtattttgcgtccaagggtca

SEQ ID NO: 173402 - DNA, 25 bp, SARS Virus
ggagtattttgactccaagggtcat

SEQ ID NO: 173403 - DNA, 25 bp, SARS Virus
gagtattttgagcccaagggtcatg

SEQ ID NO: 173404 - DNA, 25 bp, SARS Virus
agtattttgagtccaagggtcatgg

SEQ ID NO: 173405 - DNA, 25 bp, SARS Virus
gtattttgagtccaagggtcatggc

SEQ ID NO: 173406 - DNA, 25 bp, SARS Virus
tattttgagtcccagggtcatggca

SEQ ID NO: 173407 - DNA, 25 bp, SARS Virus
attttgagtccacgggtcatggcac

SEQ ID NO: 173408 - DNA, 25 bp, SARS Virus
ttttgagtccaacggtcatggcact

SEQ ID NO: 173409 - DNA, 25 bp, SARS Virus
tttgagtccaagcgtcatggcactc

SEQ ID NO: 173410 - DNA, 25 bp, SARS Virus
ttgagtccaaggctcatggcactcc

SEQ ID NO: 173411 - DNA, 25 bp, SARS Virus
tgagtccaagggccatggcactcca

SEQ ID NO: 173412 - DNA, 25 bp, SARS Virus
gagtccaagggtcatggcactccac

SEQ ID NO: 173413 - DNA, 25 bp, SARS Virus
agtccaagggtcctggcactccaca

SEQ ID NO: 173414 - DNA, 25 bp, SARS Virus
gtccaagggtcacggcactccacaa

SEQ ID NO: 173415 - DNA, 25 bp, SARS Virus
tccaagggtcatcgcactccacaat

SEQ ID NO: 173416 - DNA, 25 bp, SARS Virus
ccaagggtcatgccactccacaata

SEQ ID NO: 173417 - DNA, 25 bp, SARS Virus
caagggtcatggcactccacaatag

SEQ ID NO: 173418 - DNA, 25 bp, SARS Virus
aagggtcatggccctccacaatagt

SEQ ID NO: 173419 - DNA, 25 bp, SARS Virus
agggtcatggcactccacaatagta

SEQ ID NO: 173420 - DNA, 25 bp, SARS Virus
gggtcatggcaccccacaatagtaa

SEQ ID NO: 173421 - DNA, 25 bp, SARS Virus
ggtcatggcactccacaatagtaat

SEQ ID NO: 173422 - DNA, 25 bp, SARS Virus
gtcatggcactccacaatagtaatc

SEQ ID NO: 173423 - DNA, 25 bp, SARS Virus
tcatggcactccccaatagtaatca

SEQ ID NO: 173424 - DNA, 25 bp, SARS Virus
catggcactccacaatagtaatcaa

SEQ ID NO: 173425 - DNA, 25 bp, SARS Virus
atggcactccaccatagtaatcaat

SEQ ID NO: 173426 - DNA, 25 bp, SARS Virus
tggcactccacactagtaatcaatc

SEQ ID NO: 173427 - DNA, 25 bp, SARS Virus
ggcactccacaacagtaatcaatcg

SEQ ID NO: 173428 - DNA, 25 bp, SARS Virus
gcactccacaatcgtaatcaatcgt

SEQ ID NO: 173429 - DNA, 25 bp, SARS Virus
cactccacaatactaatcaatcgta

SEQ ID NO: 173430 - DNA, 25 bp, SARS Virus
actccacaatagcaatcaatcgtaa

SEQ ID NO: 173431 - DNA, 25 bp, SARS Virus
ctccacaatagtcatcaatcgtaat

SEQ ID NO: 173432 - DNA, 25 bp, SARS Virus
tccacaatagtactcaatcgtaatg

SEQ ID NO: 173433 - DNA, 25 bp, SARS Virus
ccacaatagtaaccaatcgtaatgc

SEQ ID NO: 173434 - DNA, 25 bp, SARS Virus
cacaatagtaatcaatcgtaatgcc

SEQ ID NO: 173435 - DNA, 25 bp, SARS Virus
acaatagtaatccatcgtaatgcct

SEQ ID NO: 173436 - DNA, 25 bp, SARS Virus
caatagtaatcactcgtaatgcctt

SEQ ID NO: 173437 - DNA, 25 bp, SARS Virus
aatagtaatcaaccgtaatgcctta

SEQ ID NO: 173438 - DNA, 25 bp, SARS Virus
atagtaatcaatcgtaatgccttat

SEQ ID NO: 173439 - DNA, 25 bp, SARS Virus
tagtaatcaatcctaatgccttatg

SEQ ID NO: 173440 - DNA, 25 bp, SARS Virus
agtaatcaatcgcaatgccttatgt

SEQ ID NO: 173441 - DNA, 25 bp, SARS Virus
gtaatcaatcgtcatgccttatgta

SEQ ID NO: 173442 - DNA, 25 bp, SARS Virus
taatcaatcgtactgccttatgtac

SEQ ID NO: 173443 - DNA, 25 bp, SARS Virus
aatcaatcgtaacgccttatgtaca

SEQ ID NO: 173444 - DNA, 25 bp, SARS Virus
atcaatcgtaatcccttatgtacag

SEQ ID NO: 173445 - DNA, 25 bp, SARS Virus
tcaatcgtaatgccttatgtacagg

SEQ ID NO: 173446 - DNA, 25 bp, SARS Virus
caatcgtaatgccttatgtacaggt

SEQ ID NO: 173447 - DNA, 25 bp, SARS Virus
aatcgtaatgccctatgtacaggtt

SEQ ID NO: 173448 - DNA, 25 bp, SARS Virus
atcgtaatgcctcatgtacaggttg

SEQ ID NO: 173449 - DNA, 25 bp, SARS Virus
tcgtaatgccttctgtacaggttgt

SEQ ID NO: 173450 - DNA, 25 bp, SARS Virus
cgtaatgccttacgtacaggttgta

SEQ ID NO: 173451 - DNA, 25 bp, SARS Virus
gtaatgccttatctacaggttgtac

SEQ ID NO: 173452 - DNA, 25 bp, SARS Virus
taatgccttatgcacaggttgtaca

SEQ ID NO: 173453 - DNA, 25 bp, SARS Virus
aatgccttatgtccaggttgtacac

SEQ ID NO: 173454 - DNA, 25 bp, SARS Virus
atgccttatgtacaggttgtacacc

SEQ ID NO: 173455 - DNA, 25 bp, SARS Virus
tgccttatgtaccggttgtacaccg

SEQ ID NO: 173456 - DNA, 25 bp, SARS Virus
gccttatgtacacgttgtacaccgg

SEQ ID NO: 173457 - DNA, 25 bp, SARS Virus
ccttatgtacagcttgtacaccggt

SEQ ID NO: 173458 - DNA, 25 bp, SARS Virus
cttatgtacaggctgtacaccggtc

SEQ ID NO: 173459 - DNA, 25 bp, SARS Virus
ttatgtacaggtcgtacaccggtca

SEQ ID NO: 173460 - DNA, 25 bp, SARS Virus
tatgtacaggttctacaccggtcat

SEQ ID NO: 173461 - DNA, 25 bp, SARS Virus
atgtacaggttgcacaccggtcatt

SEQ ID NO: 173462 - DNA, 25 bp, SARS Virus
tgtacaggttgtccaccggtcattc

SEQ ID NO: 173463 - DNA, 25 bp, SARS Virus
gtacaggttgtacaccggtcattcg

SEQ ID NO: 173464 - DNA, 25 bp, SARS Virus
tacaggttgtaccccggtcattcga

SEQ ID NO: 173465 - DNA, 25 bp, SARS Virus
acaggttgtacaccggtcattcgag

SEQ ID NO: 173466 - DNA, 25 bp, SARS Virus
caggttgtacaccggtcattcgagt

SEQ ID NO: 173467 - DNA, 25 bp, SARS Virus
aggttgtacacccgtcattcgagta

SEQ ID NO: 173468 - DNA, 25 bp, SARS Virus
ggttgtacaccgctcattcgagtag

SEQ ID NO: 173469 - DNA, 25 bp, SARS Virus
gttgtacaccggccattcgagtagt

SEQ ID NO: 173470 - DNA, 25 bp, SARS Virus
ttgtacaccggtcattcgagtagta

SEQ ID NO: 173471 - DNA, 25 bp, SARS Virus
tgtacaccggtccttcgagtagtac

SEQ ID NO: 173472 - DNA, 25 bp, SARS Virus
gtacaccggtcactcgagtagtaca

SEQ ID NO: 173473 - DNA, 25 bp, SARS Virus
tacaccggtcatccgagtagtacat

SEQ ID NO: 173474 - DNA, 25 bp, SARS Virus
acaccggtcattcgagtagtacatt

SEQ ID NO: 173475 - DNA, 25 bp, SARS Virus
caccggtcattccagtagtacattg

SEQ ID NO: 173476 - DNA, 25 bp, SARS Virus
accggtcattcgcgtagtacattga

SEQ ID NO: 173477 - DNA, 25 bp, SARS Virus
ccggtcattcgactagtacattgaa

SEQ ID NO: 173478 - DNA, 25 bp, SARS Virus
cggtcattcgagcagtacattgaaa

SEQ ID NO: 173479 - DNA, 25 bp, SARS Virus
ggtcattcgagtcgtacattgaaag

SEQ ID NO: 173480 - DNA, 25 bp, SARS Virus
gtcattcgagtactacattgaaaga

SEQ ID NO: 173481 - DNA, 25 bp, SARS Virus
tcattcgagtagcacattgaaagat

SEQ ID NO: 173482 - DNA, 25 bp, SARS Virus
cattcgagtagtccattgaaagatt

SEQ ID NO: 173483 - DNA, 25 bp, SARS Virus
attcgagtagtacattgaaagatta

SEQ ID NO: 173484 - DNA, 25 bp, SARS Virus
ttcgagtagtaccttgaaagattac

SEQ ID NO: 173485 - DNA, 25 bp, SARS Virus
tcgagtagtacactgaaagattaca

SEQ ID NO: 173486 - DNA, 25 bp, SARS Virus
cgagtagtacatcgaaagattacat

SEQ ID NO: 173487 - DNA, 25 bp, SARS Virus
gagtagtacattcaaagattacata

SEQ ID NO: 173488 - DNA, 25 bp, SARS Virus
agtagtacattgcaagattacataa

SEQ ID NO: 173489 - DNA, 25 bp, SARS Virus
gtagtacattgacagattacataac

SEQ ID NO: 173490 - DNA, 25 bp, SARS Virus
tagtacattgaacgattacataaca

SEQ ID NO: 173491 - DNA, 25 bp, SARS Virus
agtacattgaaacattacataacat

SEQ ID NO: 173492 - DNA, 25 bp, SARS Virus
gtacattgaaagcttacataacatt

SEQ ID NO: 173493 - DNA, 25 bp, SARS Virus
tacattgaaagactacataacattt

SEQ ID NO: 173494 - DNA, 25 bp, SARS Virus
acattgaaagatcacataacattta

SEQ ID NO: 173495 - DNA, 25 bp, SARS Virus
cattgaaagattccataacatttat

SEQ ID NO: 173496 - DNA, 25 bp, SARS Virus
attgaaagattacataacatttatg

SEQ ID NO: 173497 - DNA, 25 bp, SARS Virus
ttgaaagattacctaacatttatgt

SEQ ID NO: 173498 - DNA, 25 bp, SARS Virus
tgaaagattacacaacatttatgtt

SEQ ID NO: 173499 - DNA, 25 bp, SARS Virus
gaaagattacatcacatttatgttc

SEQ ID NO: 173500 - DNA, 25 bp, SARS Virus
aaagattacataccatttatgttca

SEQ ID NO: 173501 - DNA, 25 bp, SARS Virus
aagattacataacatttatgttcac

SEQ ID NO: 173502 - DNA, 25 bp, SARS Virus
agattacataacctttatgttcact

SEQ ID NO: 173503 - DNA, 25 bp, SARS Virus
gattacataacacttatgttcactt

SEQ ID NO: 173504 - DNA, 25 bp, SARS Virus
attacataacatctatgttcacttt

SEQ ID NO: 173505 - DNA, 25 bp, SARS Virus
ttacataacattcatgttcactttc

SEQ ID NO: 173506 - DNA, 25 bp, SARS Virus
tacataacatttctgttcactttct

SEQ ID NO: 173507 - DNA, 25 bp, SARS Virus
acataacatttacgttcactttctg

SEQ ID NO: 173508 - DNA, 25 bp, SARS Virus
cataacatttatcttcactttctgt

SEQ ID NO: 173509 - DNA, 25 bp, SARS Virus
ataacatttatgctcactttctgta

SEQ ID NO: 173510 - DNA, 25 bp, SARS Virus
taacatttatgtccactttctgtag

SEQ ID NO: 173511 - DNA, 25 bp, SARS Virus
aacatttatgttcactttctgtagt

SEQ ID NO: 173512 - DNA, 25 bp, SARS Virus
acatttatgttccctttctgtagtc

SEQ ID NO: 173513 - DNA, 25 bp, SARS Virus
catttatgttcactttctgtagtcg

SEQ ID NO: 173514 - DNA, 25 bp, SARS Virus
atttatgttcaccttctgtagtcgt

SEQ ID NO: 173515 - DNA, 25 bp, SARS Virus
tttatgttcactctctgtagtcgta

SEQ ID NO: 173516 - DNA, 25 bp, SARS Virus
ttatgttcacttcctgtagtcgtat

SEQ ID NO: 173517 - DNA, 25 bp, SARS Virus
tatgttcactttctgtagtcgtatg

SEQ ID NO: 173518 - DNA, 25 bp, SARS Virus
atgttcactttccgtagtcgtatga

SEQ ID NO: 173519 - DNA, 25 bp, SARS Virus
tgttcactttctctagtcgtatgag

SEQ ID NO: 173520 - DNA, 25 bp, SARS Virus
gttcactttctgcagtcgtatgagg

SEQ ID NO: 173521 - DNA, 25 bp, SARS Virus
ttcactttctgtcgtcgtatgagga

SEQ ID NO: 173522 - DNA, 25 bp, SARS Virus
tcactttctgtactcgtatgaggac

SEQ ID NO: 173523 - DNA, 25 bp, SARS Virus
cactttctgtagccgtatgaggact

SEQ ID NO: 173524 - DNA, 25 bp, SARS Virus
actttctgtagtcgtatgaggacta

SEQ ID NO: 173525 - DNA, 25 bp, SARS Virus
ctttctgtagtcctatgaggactaa

SEQ ID NO: 173526 - DNA, 25 bp, SARS Virus
tttctgtagtcgcatgaggactaat

SEQ ID NO: 173527 - DNA, 25 bp, SARS Virus
ttctgtagtcgtctgaggactaatc

SEQ ID NO: 173528 - DNA, 25 bp, SARS Virus
tctgtagtcgtacgaggactaatcc

SEQ ID NO: 173529 - DNA, 25 bp, SARS Virus
ctgtagtcgtatcaggactaatcct

SEQ ID NO: 173530 - DNA, 25 bp, SARS Virus
tgtagtcgtatgcggactaatccta

SEQ ID NO: 173531 - DNA, 25 bp, SARS Virus
gtagtcgtatgacgactaatcctac

SEQ ID NO: 173532 - DNA, 25 bp, SARS Virus
tagtcgtatgagcactaatcctaca

SEQ ID NO: 173533 - DNA, 25 bp, SARS Virus
agtcgtatgaggcctaatcctacaa

SEQ ID NO: 173534 - DNA, 25 bp, SARS Virus
gtcgtatgaggactaatcctacaaa

SEQ ID NO: 173535 - DNA, 25 bp, SARS Virus
tcgtatgaggaccaatcctacaaaa

SEQ ID NO: 173536 - DNA, 25 bp, SARS Virus
cgtatgaggactcatcctacaaaac

SEQ ID NO: 173537 - DNA, 25 bp, SARS Virus
gtatgaggactactcctacaaaaca

SEQ ID NO: 173538 - DNA, 25 bp, SARS Virus
tatgaggactaaccctacaaaacat

SEQ ID NO: 173539 - DNA, 25 bp, SARS Virus
atgaggactaatcctacaaaacatt

SEQ ID NO: 173540 - DNA, 25 bp, SARS Virus
tgaggactaatcctacaaaacattc

SEQ ID NO: 173541 - DNA, 25 bp, SARS Virus
gaggactaatcccacaaaacattca

SEQ ID NO: 173542 - DNA, 25 bp, SARS Virus
aggactaatcctccaaaacattcac

SEQ ID NO: 173543 - DNA, 25 bp, SARS Virus
ggactaatcctacaaaacattcacc

SEQ ID NO: 173544 - DNA, 25 bp, SARS Virus
gactaatcctaccaaacattcaccc

SEQ ID NO: 173545 - DNA, 25 bp, SARS Virus
actaatcctacacaacattcaccca

SEQ ID NO: 173546 - DNA, 25 bp, SARS Virus
ctaatcctacaacacattcacccat

SEQ ID NO: 173547 - DNA, 25 bp, SARS Virus
taatcctacaaaccattcacccatt

SEQ ID NO: 173548 - DNA, 25 bp, SARS Virus
aatcctacaaaacattcacccattc

SEQ ID NO: 173549 - DNA, 25 bp, SARS Virus
atcctacaaaaccttcacccattcg

SEQ ID NO: 173550 - DNA, 25 bp, SARS Virus
tcctacaaaacactcacccattcgt

SEQ ID NO: 173551 - DNA, 25 bp, SARS Virus
cctacaaaacatccacccattcgta

SEQ ID NO: 173552 - DNA, 25 bp, SARS Virus
ctacaaaacattcacccattcgtag

SEQ ID NO: 173553 - DNA, 25 bp, SARS Virus
tacaaaacattcccccattcgtagt

SEQ ID NO: 173554 - DNA, 25 bp, SARS Virus
acaaaacattcacccattcgtagtt

SEQ ID NO: 173555 - DNA, 25 bp, SARS Virus
caaaacattcacccattcgtagtta

SEQ ID NO: 173556 - DNA, 25 bp, SARS Virus
aaaacattcacccattcgtagttat

SEQ ID NO: 173557 - DNA, 25 bp, SARS Virus
aaacattcaccccttcgtagttatc

SEQ ID NO: 173558 - DNA, 25 bp, SARS Virus
aacattcacccactcgtagttatcg

SEQ ID NO: 173559 - DNA, 25 bp, SARS Virus
acattcacccatccgtagttatcgg

SEQ ID NO: 173560 - DNA, 25 bp, SARS Virus
cattcacccattcgtagttatcggt

SEQ ID NO: 173561 - DNA, 25 bp, SARS Virus
attcacccattcctagttatcggtc

SEQ ID NO: 173562 - DNA, 25 bp, SARS Virus
ttcacccattcgcagttatcggtca

SEQ ID NO: 173563 - DNA, 25 bp, SARS Virus
tcacccattcgtcgttatcggtcac

SEQ ID NO: 173564 - DNA, 25 bp, SARS Virus
cacccattcgtacttatcggtcact

SEQ ID NO: 173565 - DNA, 25 bp, SARS Virus
acccattcgtagctatcggtcactg

SEQ ID NO: 173566 - DNA, 25 bp, SARS Virus
cccattcgtagtcatcggtcactgt

SEQ ID NO: 173567 - DNA, 25 bp, SARS Virus
ccattcgtagttctcggtcactgtg

SEQ ID NO: 173568 - DNA, 25 bp, SARS Virus
cattcgtagttaccggtcactgtgc

SEQ ID NO: 173569 - DNA, 25 bp, SARS Virus
attcgtagttatcggtcactgtgct

SEQ ID NO: 173570 - DNA, 25 bp, SARS Virus
ttcgtagttatccgtcactgtgctt

SEQ ID NO: 173571 - DNA, 25 bp, SARS Virus
tcgtagttatcgctcactgtgcttg

SEQ ID NO: 173572 - DNA, 25 bp, SARS Virus
cgtagttatcggccactgtgcttgg

SEQ ID NO: 173573 - DNA, 25 bp, SARS Virus
gtagttatcggtcactgtgcttgga

SEQ ID NO: 173574 - DNA, 25 bp, SARS Virus
tagttatcggtccctgtgcttggaa

SEQ ID NO: 173575 - DNA, 25 bp, SARS Virus
agttatcggtcactgtgcttggaaa

SEQ ID NO: 173576 - DNA, 25 bp, SARS Virus
gttatcggtcaccgtgcttggaaag

SEQ ID NO: 173577 - DNA, 25 bp, SARS Virus
ttatcggtcactctgcttggaaagt

SEQ ID NO: 173578 - DNA, 25 bp, SARS Virus
tatcggtcactgcgcttggaaagtt

SEQ ID NO: 173579 - DNA, 25 bp, SARS Virus
atcggtcactgtccttggaaagtta

SEQ ID NO: 173580 - DNA, 25 bp, SARS Virus
tcggtcactgtgcttggaaagttag

SEQ ID NO: 173581 - DNA, 25 bp, SARS Virus
cggtcactgtgcctggaaagttagt

SEQ ID NO: 173582 - DNA, 25 bp, SARS Virus
ggtcactgtgctcggaaagttagta

SEQ ID NO: 173583 - DNA, 25 bp, SARS Virus
gtcactgtgcttcgaaagttagtat

SEQ ID NO: 173584 - DNA, 25 bp, SARS Virus
tcactgtgcttgcaaagttagtatt

SEQ ID NO: 173585 - DNA, 25 bp, SARS Virus
cactgtgcttggcaagttagtattc

SEQ ID NO: 173586 - DNA, 25 bp, SARS Virus
actgtgcttggacagttagtattca

SEQ ID NO: 173587 - DNA, 25 bp, SARS Virus
ctgtgcttggaacgttagtattcac

SEQ ID NO: 173588 - DNA, 25 bp, SARS Virus
tgtgcttggaaacttagtattcaca

SEQ ID NO: 173589 - DNA, 25 bp, SARS Virus
gtgcttggaaagctagtattcacat

SEQ ID NO: 173590 - DNA, 25 bp, SARS Virus
tgcttggaaagtcagtattcacatg

SEQ ID NO: 173591 - DNA, 25 bp, SARS Virus
gcttggaaagttcgtattcacatgg

SEQ ID NO: 173592 - DNA, 25 bp, SARS Virus
cttggaaagttactattcacatggt

SEQ ID NO: 173593 - DNA, 25 bp, SARS Virus
ttggaaagttagcattcacatggta

SEQ ID NO: 173594 - DNA, 25 bp, SARS Virus
tggaaagttagtcttcacatggtag

SEQ ID NO: 173595 - DNA, 25 bp, SARS Virus
ggaaagttagtactcacatggtaga

SEQ ID NO: 173596 - DNA, 25 bp, SARS Virus
gaaagttagtatccacatggtagac

SEQ ID NO: 173597 - DNA, 25 bp, SARS Virus
aaagttagtattcacatggtagaca

SEQ ID NO: 173598 - DNA, 25 bp, SARS Virus
aagttagtattcccatggtagacaa

SEQ ID NO: 173599 - DNA, 25 bp, SARS Virus
agttagtattcacatggtagacaaa

SEQ ID NO: 173600 - DNA, 25 bp, SARS Virus
gttagtattcacctggtagacaaaa

SEQ ID NO: 173601 - DNA, 25 bp, SARS Virus
ttagtattcacacggtagacaaaac

SEQ ID NO: 173602 - DNA, 25 bp, SARS Virus
tagtattcacatcgtagacaaaact

SEQ ID NO: 173603 - DNA, 25 bp, SARS Virus
agtattcacatgctagacaaaactg

SEQ ID NO: 173604 - DNA, 25 bp, SARS Virus
gtattcacatggcagacaaaactgt

SEQ ID NO: 173605 - DNA, 25 bp, SARS Virus
tattcacatggtcgacaaaactgtt

SEQ ID NO: 173606 - DNA, 25 bp, SARS Virus
attcacatggtacacaaaactgtta

SEQ ID NO: 173607 - DNA, 25 bp, SARS Virus
ttcacatggtagccaaaactgttat

SEQ ID NO: 173608 - DNA, 25 bp, SARS Virus
tcacatggtagacaaaactgttata

SEQ ID NO: 173609 - DNA, 25 bp, SARS Virus
cacatggtagaccaaactgttatag

SEQ ID NO: 173610 - DNA, 25 bp, SARS Virus
acatggtagacacaactgttatagt

SEQ ID NO: 173611 - DNA, 25 bp, SARS Virus
catggtagacaacactgttatagta

SEQ ID NO: 173612 - DNA, 25 bp, SARS Virus
atggtagacaaacctgttatagtag

SEQ ID NO: 173613 - DNA, 25 bp, SARS Virus
tggtagacaaaactgttatagtagc

SEQ ID NO: 173614 - DNA, 25 bp, SARS Virus
ggtagacaaaaccgttatagtagct

SEQ ID NO: 173615 - DNA, 25 bp, SARS Virus
gtagacaaaactcttatagtagctg

SEQ ID NO: 173616 - DNA, 25 bp, SARS Virus
tagacaaaactgctatagtagctgt

SEQ ID NO: 173617 - DNA, 25 bp, SARS Virus
agacaaaactgtcatagtagctgtt

SEQ ID NO: 173618 - DNA, 25 bp, SARS Virus
gacaaaactgttctagtagctgttt

SEQ ID NO: 173619 - DNA, 25 bp, SARS Virus
acaaaactgttacagtagctgtttt

SEQ ID NO: 173620 - DNA, 25 bp, SARS Virus
caaaactgttatcgtagctgttttg

SEQ ID NO: 173621 - DNA, 25 bp, SARS Virus
aaaactgttatactagctgttttgt

SEQ ID NO: 173622 - DNA, 25 bp, SARS Virus
aaactgttatagcagctgttttgtc

SEQ ID NO: 173623 - DNA, 25 bp, SARS Virus
aactgttatagtcgctgttttgtcg

SEQ ID NO: 173624 - DNA, 25 bp, SARS Virus
actgttatagtacctgttttgtcgg

SEQ ID NO: 173625 - DNA, 25 bp, SARS Virus
ctgttatagtagctgttttgtcgga

SEQ ID NO: 173626 - DNA, 25 bp, SARS Virus
tgttatagtagccgttttgtcggac

SEQ ID NO: 173627 - DNA, 25 bp, SARS Virus
gttatagtagctcttttgtcggacg

SEQ ID NO: 173628 - DNA, 25 bp, SARS Virus
ttatagtagctgctttgtcggacgc

SEQ ID NO: 173629 - DNA, 25 bp, SARS Virus
tatagtagctgtcttgtcggacgcg

SEQ ID NO: 173630 - DNA, 25 bp, SARS Virus
atagtagctgttctgtcggacgcgg

SEQ ID NO: 173631 - DNA, 25 bp, SARS Virus
tagtagctgtttcgtcggacgcgga

SEQ ID NO: 173632 - DNA, 25 bp, SARS Virus
agtagctgttttctcggacgcggat

SEQ ID NO: 173633 - DNA, 25 bp, SARS Virus
gtagctgttttgccggacgcggatt

SEQ ID NO: 173634 - DNA, 25 bp, SARS Virus
tagctgttttgtcggacgcggatta

SEQ ID NO: 173635 - DNA, 25 bp, SARS Virus
agctgttttgtccgacgcggattat

SEQ ID NO: 173636 - DNA, 25 bp, SARS Virus
gctgttttgtcgcacgcggattata

SEQ ID NO: 173637 - DNA, 25 bp, SARS Virus
ctgttttgtcggccgcggattataa

SEQ ID NO: 173638 - DNA, 25 bp, SARS Virus
tgttttgtcggacgcggattataag

SEQ ID NO: 173639 - DNA, 25 bp, SARS Virus
gttttgtcggacccggattataaga

SEQ ID NO: 173640 - DNA, 25 bp, SARS Virus
ttttgtcggacgcggattataagaa

SEQ ID NO: 173641 - DNA, 25 bp, SARS Virus
tttgtcggacgccgattataagaac

SEQ ID NO: 173642 - DNA, 25 bp, SARS Virus
ttgtcggacgcgcattataagaact

SEQ ID NO: 173643 - DNA, 25 bp, SARS Virus
tgtcggacgcggcttataagaacta

SEQ ID NO: 173644 - DNA, 25 bp, SARS Virus
gtcggacgcggactataagaactac

SEQ ID NO: 173645 - DNA, 25 bp, SARS Virus
tcggacgcggatcataagaactacc

SEQ ID NO: 173646 - DNA, 25 bp, SARS Virus
cggacgcggattctaagaactacct

SEQ ID NO: 173647 - DNA, 25 bp, SARS Virus
ggacgcggattacaagaactaccta

SEQ ID NO: 173648 - DNA, 25 bp, SARS Virus
gacgcggattatcagaactacctag

SEQ ID NO: 173649 - DNA, 25 bp, SARS Virus
acgcggattatacgaactacctaga

SEQ ID NO: 173650 - DNA, 25 bp, SARS Virus
cgcggattataacaactacctagac

SEQ ID NO: 173651 - DNA, 25 bp, SARS Virus
gcggattataagcactacctagacc

SEQ ID NO: 173652 - DNA, 25 bp, SARS Virus
cggattataagacctacctagaccc

SEQ ID NO: 173653 - DNA, 25 bp, SARS Virus
ggattataagaactacctagaccca

SEQ ID NO: 173654 - DNA, 25 bp, SARS Virus
gattataagaaccacctagacccat

SEQ ID NO: 173655 - DNA, 25 bp, SARS Virus
attataagaactccctagacccatt

SEQ ID NO: 173656 - DNA, 25 bp, SARS Virus
ttataagaactacctagacccattc

SEQ ID NO: 173657 - DNA, 25 bp, SARS Virus
tataagaactacctagacccattcc

SEQ ID NO: 173658 - DNA, 25 bp, SARS Virus
ataagaactacccagacccattccg

SEQ ID NO: 173659 - DNA, 25 bp, SARS Virus
taagaactacctcgacccattccgt

SEQ ID NO: 173660 - DNA, 25 bp, SARS Virus
aagaactacctacacccattccgtc

SEQ ID NO: 173661 - DNA, 25 bp, SARS Virus
agaactacctagccccattccgtcc

SEQ ID NO: 173662 - DNA, 25 bp, SARS Virus
gaactacctagacccattccgtcca

SEQ ID NO: 173663 - DNA, 25 bp, SARS Virus
aactacctagacccattccgtccat

SEQ ID NO: 173664 - DNA, 25 bp, SARS Virus
actacctagacccattccgtccatg

SEQ ID NO: 173665 - DNA, 25 bp, SARS Virus
ctacctagaccccttccgtccatgt

SEQ ID NO: 173666 - DNA, 25 bp, SARS Virus
tacctagacccactccgtccatgtg

SEQ ID NO: 173667 - DNA, 25 bp, SARS Virus
acctagacccatcccgtccatgtgc

SEQ ID NO: 173668 - DNA, 25 bp, SARS Virus
cctagacccattccgtccatgtgca

SEQ ID NO: 173669 - DNA, 25 bp, SARS Virus
ctagacccattccgtccatgtgcat

SEQ ID NO: 173670 - DNA, 25 bp, SARS Virus
tagacccattccctccatgtgcatt

SEQ ID NO: 173671 - DNA, 25 bp, SARS Virus
agacccattccgcccatgtgcatta

SEQ ID NO: 173672 - DNA, 25 bp, SARS Virus
gacccattccgtccatgtgcattag

SEQ ID NO: 173673 - DNA, 25 bp, SARS Virus
acccattccgtccatgtgcattagt

SEQ ID NO: 173674 - DNA, 25 bp, SARS Virus
cccattccgtccctgtgcattagta

SEQ ID NO: 173675 - DNA, 25 bp, SARS Virus
ccattccgtccacgtgcattagtag

SEQ ID NO: 173676 - DNA, 25 bp, SARS Virus
cattccgtccatctgcattagtaga

SEQ ID NO: 173677 - DNA, 25 bp, SARS Virus
attccgtccatgcgcattagtagag

SEQ ID NO: 173678 - DNA, 25 bp, SARS Virus
ttccgtccatgtccattagtagagg

SEQ ID NO: 173679 - DNA, 25 bp, SARS Virus
tccgtccatgtgcattagtagagga

SEQ ID NO: 173680 - DNA, 25 bp, SARS Virus
ccgtccatgtgccttagtagaggaa

SEQ ID NO: 173681 - DNA, 25 bp, SARS Virus
cgtccatgtgcactagtagaggaac

SEQ ID NO: 173682 - DNA, 25 bp, SARS Virus
gtccatgtgcatcagtagaggaaca

SEQ ID NO: 173683 - DNA, 25 bp, SARS Virus
tccatgtgcattcgtagaggaacaa

SEQ ID NO: 173684 - DNA, 25 bp, SARS Virus
ccatgtgcattactagaggaacaaa

SEQ ID NO: 173685 - DNA, 25 bp, SARS Virus
catgtgcattagcagaggaacaaat

SEQ ID NO: 173686 - DNA, 25 bp, SARS Virus
atgtgcattagtcgaggaacaaatt

SEQ ID NO: 173687 - DNA, 25 bp, SARS Virus
tgtgcattagtacaggaacaaattg

SEQ ID NO: 173688 - DNA, 25 bp, SARS Virus
gtgcattagtagcggaacaaattga

SEQ ID NO: 173689 - DNA, 25 bp, SARS Virus
tgcattagtagacgaacaaattgat

SEQ ID NO: 173690 - DNA, 25 bp, SARS Virus
gcattagtagagcaacaaattgatc

SEQ ID NO: 173691 - DNA, 25 bp, SARS Virus
cattagtagaggcacaaattgatcg

SEQ ID NO: 173692 - DNA, 25 bp, SARS Virus
attagtagaggaccaaattgatcgt

SEQ ID NO: 173693 - DNA, 25 bp, SARS Virus
ttagtagaggaacaaattgatcgta

SEQ ID NO: 173694 - DNA, 25 bp, SARS Virus
tagtagaggaaccaattgatcgtaa

SEQ ID NO: 173695 - DNA, 25 bp, SARS Virus
agtagaggaacacattgatcgtaac

SEQ ID NO: 173696 - DNA, 25 bp, SARS Virus
gtagaggaacaacttgatcgtaaca

SEQ ID NO: 173697 - DNA, 25 bp, SARS Virus
tagaggaacaaactgatcgtaacat

SEQ ID NO: 173698 - DNA, 25 bp, SARS Virus
agaggaacaaatcgatcgtaacata

SEQ ID NO: 173699 - DNA, 25 bp, SARS Virus
gaggaacaaattcatcgtaacatac

SEQ ID NO: 173700 - DNA, 25 bp, SARS Virus
aggaacaaattgctcgtaacatacg

SEQ ID NO: 173701 - DNA, 25 bp, SARS Virus
ggaacaaattgaccgtaacatacga

SEQ ID NO: 173702 - DNA, 25 bp, SARS Virus
gaacaaattgatcgtaacatacgac

SEQ ID NO: 173703 - DNA, 25 bp, SARS Virus
aacaaattgatcctaacatacgaca

SEQ ID NO: 173704 - DNA, 25 bp, SARS Virus
acaaattgatcgcaacatacgacac

SEQ ID NO: 173705 - DNA, 25 bp, SARS Virus
caaattgatcgtcacatacgacact

SEQ ID NO: 173706 - DNA, 25 bp, SARS Virus
aaattgatcgtaccatacgacactc

SEQ ID NO: 173707 - DNA, 25 bp, SARS Virus
aattgatcgtaacatacgacactcg

SEQ ID NO: 173708 - DNA, 25 bp, SARS Virus
attgatcgtaacctacgacactcgt

SEQ ID NO: 173709 - DNA, 25 bp, SARS Virus
ttgatcgtaacacacgacactcgtt

SEQ ID NO: 173710 - DNA, 25 bp, SARS Virus
tgatcgtaacatccgacactcgttt

SEQ ID NO: 173711 - DNA, 25 bp, SARS Virus
gatcgtaacatacgacactcgtttt

SEQ ID NO: 173712 - DNA, 25 bp, SARS Virus
atcgtaacataccacactcgtttta

SEQ ID NO: 173713 - DNA, 25 bp, SARS Virus
tcgtaacatacgccactcgttttaa

SEQ ID NO: 173714 - DNA, 25 bp, SARS Virus
cgtaacatacgacactcgttttaag

SEQ ID NO: 173715 - DNA, 25 bp, SARS Virus
gtaacatacgaccctcgttttaagc

SEQ ID NO: 173716 - DNA, 25 bp, SARS Virus
taacatacgacactcgttttaagca

SEQ ID NO: 173717 - DNA, 25 bp, SARS Virus
aacatacgacacccgttttaagcac

SEQ ID NO: 173718 - DNA, 25 bp, SARS Virus
acatacgacactcgttttaagcact

SEQ ID NO: 173719 - DNA, 25 bp, SARS Virus
catacgacactccttttaagcactc

SEQ ID NO: 173720 - DNA, 25 bp, SARS Virus
atacgacactcgctttaagcactcc

SEQ ID NO: 173721 - DNA, 25 bp, SARS Virus
tacgacactcgtcttaagcactcca

SEQ ID NO: 173722 - DNA, 25 bp, SARS Virus
acgacactcgttctaagcactccag

SEQ ID NO: 173723 - DNA, 25 bp, SARS Virus
cgacactcgtttcaagcactccagg

SEQ ID NO: 173724 - DNA, 25 bp, SARS Virus
gacactcgttttcagcactccagga

SEQ ID NO: 173725 - DNA, 25 bp, SARS Virus
acactcgttttacgcactccaggaa

SEQ ID NO: 173726 - DNA, 25 bp, SARS Virus
cactcgttttaaccactccaggaaa

SEQ ID NO: 173727 - DNA, 25 bp, SARS Virus
actcgttttaagcactccaggaaat

SEQ ID NO: 173728 - DNA, 25 bp, SARS Virus
ctcgttttaagccctccaggaaatc

SEQ ID NO: 173729 - DNA, 25 bp, SARS Virus
tcgttttaagcactccaggaaatca

SEQ ID NO: 173730 - DNA, 25 bp, SARS Virus
cgttttaagcaccccaggaaatcat

SEQ ID NO: 173731 - DNA, 25 bp, SARS Virus
gttttaagcactccaggaaatcatt

SEQ ID NO: 173732 - DNA, 25 bp, SARS Virus
ttttaagcactccaggaaatcattc

SEQ ID NO: 173733 - DNA, 25 bp, SARS Virus
tttaagcactcccggaaatcattcc

SEQ ID NO: 173734 - DNA, 25 bp, SARS Virus
ttaagcactccacgaaatcattcca

SEQ ID NO: 173735 - DNA, 25 bp, SARS Virus
taagcactccagcaaatcattccag

SEQ ID NO: 173736 - DNA, 25 bp, SARS Virus
aagcactccaggcaatcattccagt

SEQ ID NO: 173737 - DNA, 25 bp, SARS Virus
agcactccaggacatcattccagtc

SEQ ID NO: 173738 - DNA, 25 bp, SARS Virus
gcactccaggaactcattccagtca

SEQ ID NO: 173739 - DNA, 25 bp, SARS Virus
cactccaggaaaccattccagtcag

SEQ ID NO: 173740 - DNA, 25 bp, SARS Virus
actccaggaaatcattccagtcaga

SEQ ID NO: 173741 - DNA, 25 bp, SARS Virus
ctccaggaaatccttccagtcagag

SEQ ID NO: 173742 - DNA, 25 bp, SARS Virus
tccaggaaatcactccagtcagagt

SEQ ID NO: 173743 - DNA, 25 bp, SARS Virus
ccaggaaatcatcccagtcagagtc

SEQ ID NO: 173744 - DNA, 25 bp, SARS Virus
caggaaatcattccagtcagagtca

SEQ ID NO: 173745 - DNA, 25 bp, SARS Virus
aggaaatcattccagtcagagtcag

SEQ ID NO: 173746 - DNA, 25 bp, SARS Virus
ggaaatcattcccgtcagagtcagg

SEQ ID NO: 173747 - DNA, 25 bp, SARS Virus
gaaatcattccactcagagtcaggt

SEQ ID NO: 173748 - DNA, 25 bp, SARS Virus
aaatcattccagccagagtcaggtt

SEQ ID NO: 173749 - DNA, 25 bp, SARS Virus
aatcattccagtcagagtcaggttg

SEQ ID NO: 173750 - DNA, 25 bp, SARS Virus
atcattccagtccgagtcaggttgt

SEQ ID NO: 173751 - DNA, 25 bp, SARS Virus
tcattccagtcacagtcaggttgta

SEQ ID NO: 173752 - DNA, 25 bp, SARS Virus
cattccagtcagcgtcaggttgtaa

SEQ ID NO: 173753 - DNA, 25 bp, SARS Virus
attccagtcagactcaggttgtaaa

SEQ ID NO: 173754 - DNA, 25 bp, SARS Virus
ttccagtcagagccaggttgtaaaa

SEQ ID NO: 173755 - DNA, 25 bp, SARS Virus
tccagtcagagtcaggttgtaaaac

SEQ ID NO: 173756 - DNA, 25 bp, SARS Virus
ccagtcagagtccggttgtaaaacg

SEQ ID NO: 173757 - DNA, 25 bp, SARS Virus
cagtcagagtcacgttgtaaaacgg

SEQ ID NO: 173758 - DNA, 25 bp, SARS Virus
agtcagagtcagcttgtaaaacgga

SEQ ID NO: 173759 - DNA, 25 bp, SARS Virus
gtcagagtcaggctgtaaaacggag

SEQ ID NO: 173760 - DNA, 25 bp, SARS Virus
tcagagtcaggtcgtaaaacggagt

SEQ ID NO: 173761 - DNA, 25 bp, SARS Virus
gtaccagtatcggcgtgaacgttgt

SEQ ID NO: 173762 - DNA, 25 bp, SARS Virus
taccagtatcgtggtgaacgttgta

SEQ ID NO: 173763 - DNA, 25 bp, SARS Virus
accagtatcgtcgtgaacgttgtat

SEQ ID NO: 173764 - DNA, 25 bp, SARS Virus
ccagtatcgtcgggaacgttgtatc

SEQ ID NO: 173765 - DNA, 25 bp, SARS Virus
cagtatcgtcgtgaacgttgtatcc

SEQ ID NO: 173766 - DNA, 25 bp, SARS Virus
agtatcgtcgtggacgttgtatcct

SEQ ID NO: 173767 - DNA, 25 bp, SARS Virus
gtatcgtcgtgagcgttgtatcctt

SEQ ID NO: 173768 - DNA, 25 bp, SARS Virus
tatcgtcgtgaaggttgtatcctta

SEQ ID NO: 173769 - DNA, 25 bp, SARS Virus
atcgtcgtgaacgttgtatccttac

SEQ ID NO: 173770 - DNA, 25 bp, SARS Virus
tcgtcgtgaacggtgtatccttacc

SEQ ID NO: 173771 - DNA, 25 bp, SARS Virus
cgtcgtgaacgtggtatccttacca

SEQ ID NO: 173772 - DNA, 25 bp, SARS Virus
gtcgtgaacgttgtatccttaccag

SEQ ID NO: 173773 - DNA, 25 bp, SARS Virus
tcgtgaacgttggatccttaccaga

SEQ ID NO: 173774 - DNA, 25 bp, SARS Virus
cgtgaacgttgtgtccttaccagag

SEQ ID NO: 173775 - DNA, 25 bp, SARS Virus
gtgaacgttgtagccttaccagagg

SEQ ID NO: 173776 - DNA, 25 bp, SARS Virus
tgaacgttgtatgcttaccagagga

SEQ ID NO: 173777 - DNA, 25 bp, SARS Virus
gaacgttgtatcgttaccagaggat

SEQ ID NO: 173778 - DNA, 25 bp, SARS Virus
aacgttgtatccgtaccagaggatt

SEQ ID NO: 173779 - DNA, 25 bp, SARS Virus
acgttgtatcctgaccagaggatta

SEQ ID NO: 173780 - DNA, 25 bp, SARS Virus
cgttgtatccttgccagaggattat

SEQ ID NO: 173781 - DNA, 25 bp, SARS Virus
gttgtatccttagcagaggattatg

SEQ ID NO: 173782 - DNA, 25 bp, SARS Virus
ttgtatccttacgagaggattatgt

SEQ ID NO: 173783 - DNA, 25 bp, SARS Virus
tgtatccttaccggaggattatgtc

SEQ ID NO: 173784 - DNA, 25 bp, SARS Virus
gtatccttaccagaggattatgtcc

SEQ ID NO: 173785 - DNA, 25 bp, SARS Virus
tatccttaccaggggattatgtccg

SEQ ID NO: 173786 - DNA, 25 bp, SARS Virus
atccttaccagaggattatgtccgt

SEQ ID NO: 173787 - DNA, 25 bp, SARS Virus
tccttaccagaggattatgtccgtg

SEQ ID NO: 173788 - DNA, 25 bp, SARS Virus
ccttaccagagggttatgtccgtgg

SEQ ID NO: 173789 - DNA, 25 bp, SARS Virus
cttaccagaggagtatgtccgtggc

SEQ ID NO: 173790 - DNA, 25 bp, SARS Virus
ttaccagaggatgatgtccgtggcg

SEQ ID NO: 173791 - DNA, 25 bp, SARS Virus
taccagaggattgtgtccgtggcgt

SEQ ID NO: 173792 - DNA, 25 bp, SARS Virus
accagaggattaggtccgtggcgtt

SEQ ID NO: 173793 - DNA, 25 bp, SARS Virus
ccagaggattatgtccgtggcgttg

SEQ ID NO: 173794 - DNA, 25 bp, SARS Virus
cagaggattatggccgtggcgttgc

SEQ ID NO: 173795 - DNA, 25 bp, SARS Virus
agaggattatgtgcgtggcgttgct

SEQ ID NO: 173796 - DNA, 25 bp, SARS Virus
gaggattatgtcggtggcgttgctt

SEQ ID NO: 173797 - DNA, 25 bp, SARS Virus
aggattatgtccgtggcgttgcttc

SEQ ID NO: 173798 - DNA, 25 bp, SARS Virus
ggattatgtccggggcgttgcttca

SEQ ID NO: 173799 - DNA, 25 bp, SARS Virus
gattatgtccgtggcgttgcttcac

SEQ ID NO: 173800 - DNA, 25 bp, SARS Virus
attatgtccgtggcgttgcttcact

SEQ ID NO: 173801 - DNA, 25 bp, SARS Virus
ttatgtccgtggggttgcttcactt

SEQ ID NO: 173802 - DNA, 25 bp, SARS Virus
tatgtccgtggcgttgcttcacttc

SEQ ID NO: 173803 - DNA, 25 bp, SARS Virus
atgtccgtggcggtgcttcacttca

SEQ ID NO: 173804 - DNA, 25 bp, SARS Virus
tgtccgtggcgtggcttcacttcag

SEQ ID NO: 173805 - DNA, 25 bp, SARS Virus
gtccgtggcgttgcttcacttcaga

SEQ ID NO: 173806 - DNA, 25 bp, SARS Virus
tccgtggcgttggttcacttcagac

SEQ ID NO: 173807 - DNA, 25 bp, SARS Virus
ccgtggcgttgcgtcacttcagaca

SEQ ID NO: 173808 - DNA, 25 bp, SARS Virus
cgtggcgttgctgcacttcagacac

SEQ ID NO: 173809 - DNA, 25 bp, SARS Virus
gtggcgttgcttgacttcagacact

SEQ ID NO: 173810 - DNA, 25 bp, SARS Virus
tggcgttgcttcgcttcagacactt

SEQ ID NO: 173811 - DNA, 25 bp, SARS Virus
ggcgttgcttcagttcagacactta

SEQ ID NO: 173812 - DNA, 25 bp, SARS Virus
gcgttgcttcacgtcagacacttaa

SEQ ID NO: 173813 - DNA, 25 bp, SARS Virus
cgttgcttcactgcagacacttaac

SEQ ID NO: 173814 - DNA, 25 bp, SARS Virus
gttgcttcacttgagacacttaacg

SEQ ID NO: 173815 - DNA, 25 bp, SARS Virus
ttgcttcacttcggacacttaacgt

SEQ ID NO: 173816 - DNA, 25 bp, SARS Virus
tgcttcacttcagacacttaacgtg

SEQ ID NO: 173817 - DNA, 25 bp, SARS Virus
gcttcacttcaggcacttaacgtgt

SEQ ID NO: 173818 - DNA, 25 bp, SARS Virus
cttcacttcagagacttaacgtgtt

SEQ ID NO: 173819 - DNA, 25 bp, SARS Virus
ttcacttcagacgcttaacgtgtta

SEQ ID NO: 173820 - DNA, 25 bp, SARS Virus
tcacttcagacagttaacgtgttat

SEQ ID NO: 173821 - DNA, 25 bp, SARS Virus
cacttcagacacgtaacgtgttatg

SEQ ID NO: 173822 - DNA, 25 bp, SARS Virus
acttcagacactgaacgtgttatgt

SEQ ID NO: 173823 - DNA, 25 bp, SARS Virus
cttcagacacttgacgtgttatgtg

SEQ ID NO: 173824 - DNA, 25 bp, SARS Virus
ttcagacacttagcgtgttatgtgt

SEQ ID NO: 173825 - DNA, 25 bp, SARS Virus
tcagacacttaaggtgttatgtgtt

SEQ ID NO: 173826 - DNA, 25 bp, SARS Virus
cagacacttaacgtgttatgtgttc

SEQ ID NO: 173827 - DNA, 25 bp, SARS Virus
agacacttaacgggttatgtgttcg

SEQ ID NO: 173828 - DNA, 25 bp, SARS Virus
gacacttaacgtgttatgtgttcgt

SEQ ID NO: 173829 - DNA, 25 bp, SARS Virus
acacttaacgtggtatgtgttcgtg

SEQ ID NO: 173830 - DNA, 25 bp, SARS Virus
cacttaacgtgtgatgtgttcgtgg

SEQ ID NO: 173831 - DNA, 25 bp, SARS Virus
acttaacgtgttgtgtgttcgtgga

SEQ ID NO: 173832 - DNA, 25 bp, SARS Virus
cttaacgtgttaggtgttcgtggat

SEQ ID NO: 173833 - DNA, 25 bp, SARS Virus
ttaacgtgttatgtgttcgtggatg

SEQ ID NO: 173834 - DNA, 25 bp, SARS Virus
taacgtgttatgggttcgtggatgt

SEQ ID NO: 173835 - DNA, 25 bp, SARS Virus
aacgtgttatgtgttcgtggatgtc

SEQ ID NO: 173836 - DNA, 25 bp, SARS Virus
acgtgttatgtggtcgtggatgtcg

SEQ ID NO: 173837 - DNA, 25 bp, SARS Virus
cgtgttatgtgtgcgtggatgtcgg

SEQ ID NO: 173838 - DNA, 25 bp, SARS Virus
gtgttatgtgttggtggatgtcgga

SEQ ID NO: 173839 - DNA, 25 bp, SARS Virus
tgttatgtgttcgtggatgtcggac

SEQ ID NO: 173840 - DNA, 25 bp, SARS Virus
gttatgtgttcggggatgtcggacg

SEQ ID NO: 173841 - DNA, 25 bp, SARS Virus
ttatgtgttcgtggatgtcggacgt

SEQ ID NO: 173842 - DNA, 25 bp, SARS Virus
tatgtgttcgtggatgtcggacgtt

SEQ ID NO: 173843 - DNA, 25 bp, SARS Virus
atgtgttcgtgggtgtcggacgttc

SEQ ID NO: 173844 - DNA, 25 bp, SARS Virus
tgtgttcgtggaggtcggacgttct

SEQ ID NO: 173845 - DNA, 25 bp, SARS Virus
gtgttcgtggatgtcggacgttctg

SEQ ID NO: 173846 - DNA, 25 bp, SARS Virus
tgttcgtggatggcggacgttctga

SEQ ID NO: 173847 - DNA, 25 bp, SARS Virus
gttcgtggatgtgggacgttctgac

SEQ ID NO: 173848 - DNA, 25 bp, SARS Virus
ttcgtggatgtcggacgttctgaca

SEQ ID NO: 173849 - DNA, 25 bp, SARS Virus
tcgtggatgtcggacgttctgacat

SEQ ID NO: 173850 - DNA, 25 bp, SARS Virus
cgtggatgtcgggcgttctgacata

SEQ ID NO: 173851 - DNA, 25 bp, SARS Virus
gtggatgtcggaggttctgacatac

SEQ ID NO: 173852 - DNA, 25 bp, SARS Virus
tggatgtcggacgttctgacataca

SEQ ID NO: 173853 - DNA, 25 bp, SARS Virus
ggatgtcggacggtctgacatacac

SEQ ID NO: 173854 - DNA, 25 bp, SARS Virus
gatgtcggacgtgctgacatacacc

SEQ ID NO: 173855 - DNA, 25 bp, SARS Virus
atgtcggacgttgtgacatacacca

SEQ ID NO: 173856 - DNA, 25 bp, SARS Virus
tgtcggacgttcggacatacaccac

SEQ ID NO: 173857 - DNA, 25 bp, SARS Virus
gtcggacgttctgacatacaccaca

SEQ ID NO: 173858 - DNA, 25 bp, SARS Virus
tcggacgttctggcatacaccacac

SEQ ID NO: 173859 - DNA, 25 bp, SARS Virus
cggacgttctgagatacaccacaca

SEQ ID NO: 173860 - DNA, 25 bp, SARS Virus
ggacgttctgacgtacaccacacat

SEQ ID NO: 173861 - DNA, 25 bp, SARS Virus
gacgttctgacagacaccacacatg

SEQ ID NO: 173862 - DNA, 25 bp, SARS Virus
acgttctgacatgcaccacacatgt

SEQ ID NO: 173863 - DNA, 25 bp, SARS Virus
cgttctgacatagaccacacatgta

SEQ ID NO: 173864 - DNA, 25 bp, SARS Virus
gttctgacatacgccacacatgtat

SEQ ID NO: 173865 - DNA, 25 bp, SARS Virus
ttctgacatacagcacacatgtatc

SEQ ID NO: 173866 - DNA, 25 bp, SARS Virus
tctgacatacacgacacatgtatcg

SEQ ID NO: 173867 - DNA, 25 bp, SARS Virus
ctgacatacaccgcacatgtatcgg

SEQ ID NO: 173868 - DNA, 25 bp, SARS Virus
tgacatacaccagacatgtatcgga

SEQ ID NO: 173869 - DNA, 25 bp, SARS Virus
gacatacaccacgcatgtatcggag

SEQ ID NO: 173870 - DNA, 25 bp, SARS Virus
acatacaccacagatgtatcggagt

SEQ ID NO: 173871 - DNA, 25 bp, SARS Virus
catacaccacacgtgtatcggagta

SEQ ID NO: 173872 - DNA, 25 bp, SARS Virus
atacaccacacaggtatcggagtat

SEQ ID NO: 173873 - DNA, 25 bp, SARS Virus
tacaccacacatgtatcggagtatt

SEQ ID NO: 173874 - DNA, 25 bp, SARS Virus
acaccacacatggatcggagtattt

SEQ ID NO: 173875 - DNA, 25 bp, SARS Virus
caccacacatgtgtcggagtatttt

SEQ ID NO: 173876 - DNA, 25 bp, SARS Virus
accacacatgtagcggagtattttg

SEQ ID NO: 173877 - DNA, 25 bp, SARS Virus
ccacacatgtatgggagtattttga

SEQ ID NO: 173878 - DNA, 25 bp, SARS Virus
cacacatgtatcggagtattttgag

SEQ ID NO: 173879 - DNA, 25 bp, SARS Virus
acacatgtatcggagtattttgagt

SEQ ID NO: 173880 - DNA, 25 bp, SARS Virus
cacatgtatcggggtattttgagtc

SEQ ID NO: 173881 - DNA, 25 bp, SARS Virus
acatgtatcggagtattttgagtcc

SEQ ID NO: 173882 - DNA, 25 bp, SARS Virus
catgtatcggaggattttgagtcca

SEQ ID NO: 173883 - DNA, 25 bp, SARS Virus
atgtatcggagtgttttgagtccaa

SEQ ID NO: 173884 - DNA, 25 bp, SARS Virus
tgtatcggagtagtttgagtccaag

SEQ ID NO: 173885 - DNA, 25 bp, SARS Virus
gtatcggagtatgttgagtccaagg

SEQ ID NO: 173886 - DNA, 25 bp, SARS Virus
tatcggagtattgtgagtccaaggg

SEQ ID NO: 173887 - DNA, 25 bp, SARS Virus
atcggagtatttggagtccaagggt

SEQ ID NO: 173888 - DNA, 25 bp, SARS Virus
tcggagtattttgagtccaagggtc

SEQ ID NO: 173889 - DNA, 25 bp, SARS Virus
cggagtattttgggtccaagggtca

SEQ ID NO: 173890 - DNA, 25 bp, SARS Virus
ggagtattttgagtccaagggtcat

SEQ ID NO: 173891 - DNA, 25 bp, SARS Virus
gagtattttgaggccaagggtcatg

SEQ ID NO: 173892 - DNA, 25 bp, SARS Virus
agtattttgagtgcaagggtcatgg

SEQ ID NO: 173893 - DNA, 25 bp, SARS Virus
gtattttgagtcgaagggtcatggc

SEQ ID NO: 173894 - DNA, 25 bp, SARS Virus
tattttgagtccgagggtcatggca

SEQ ID NO: 173895 - DNA, 25 bp, SARS Virus
attttgagtccaggggtcatggcac

SEQ ID NO: 173896 - DNA, 25 bp, SARS Virus
ttttgagtccaagggtcatggcact

SEQ ID NO: 173897 - DNA, 25 bp, SARS Virus
tttgagtccaagggtcatggcactc

SEQ ID NO: 173898 - DNA, 25 bp, SARS Virus
ttgagtccaagggtcatggcactcc

SEQ ID NO: 173899 - DNA, 25 bp, SARS Virus
tgagtccaaggggcatggcactcca

SEQ ID NO: 173900 - DNA, 25 bp, SARS Virus
gagtccaagggtgatggcactccac

SEQ ID NO: 173901 - DNA, 25 bp, SARS Virus
agtccaagggtcgtggcactccaca

SEQ ID NO: 173902 - DNA, 25 bp, SARS Virus
gtccaagggtcagggcactccacaa

SEQ ID NO: 173903 - DNA, 25 bp, SARS Virus
tccaagggtcatggcactccacaat

SEQ ID NO: 173904 - DNA, 25 bp, SARS Virus
ccaagggtcatggcactccacaata

SEQ ID NO: 173905 - DNA, 25 bp, SARS Virus
caagggtcatgggactccacaatag

SEQ ID NO: 173906 - DNA, 25 bp, SARS Virus
aagggtcatggcgctccacaatagt

SEQ ID NO: 173907 - DNA, 25 bp, SARS Virus
agggtcatggcagtccacaatagta

SEQ ID NO: 173908 - DNA, 25 bp, SARS Virus
gggtcatggcacgccacaatagtaa

SEQ ID NO: 173909 - DNA, 25 bp, SARS Virus
ggtcatggcactgcacaatagtaat

SEQ ID NO: 173910 - DNA, 25 bp, SARS Virus
gtcatggcactcgacaatagtaatc

SEQ ID NO: 173911 - DNA, 25 bp, SARS Virus
tcatggcactccgcaatagtaatca

SEQ ID NO: 173912 - DNA, 25 bp, SARS Virus
catggcactccagaatagtaatcaa

SEQ ID NO: 173913 - DNA, 25 bp, SARS Virus
atggcactccacgatagtaatcaat

SEQ ID NO: 173914 - DNA, 25 bp, SARS Virus
tggcactccacagtagtaatcaatc

SEQ ID NO: 173915 - DNA, 25 bp, SARS Virus
ggcactccacaagagtaatcaatcg

SEQ ID NO: 173916 - DNA, 25 bp, SARS Virus
gcactccacaatggtaatcaatcgt

SEQ ID NO: 173917 - DNA, 25 bp, SARS Virus
cactccacaatagtaatcaatcgta

SEQ ID NO: 173918 - DNA, 25 bp, SARS Virus
actccacaataggaatcaatcgtaa

SEQ ID NO: 173919 - DNA, 25 bp, SARS Virus
ctccacaatagtgatcaatcgtaat

SEQ ID NO: 173920 - DNA, 25 bp, SARS Virus
tccacaatagtagtcaatcgtaatg

SEQ ID NO: 173921 - DNA, 25 bp, SARS Virus
ccacaatagtaagcaatcgtaatgc

SEQ ID NO: 173922 - DNA, 25 bp, SARS Virus
cacaatagtaatgaatcgtaatgcc

SEQ ID NO: 173923 - DNA, 25 bp, SARS Virus
acaatagtaatcgatcgtaatgcct

SEQ ID NO: 173924 - DNA, 25 bp, SARS Virus
caatagtaatcagtcgtaatgcctt

SEQ ID NO: 173925 - DNA, 25 bp, SARS Virus
aatagtaatcaagcgtaatgcctta

SEQ ID NO: 173926 - DNA, 25 bp, SARS Virus
atagtaatcaatggtaatgccttat

SEQ ID NO: 173927 - DNA, 25 bp, SARS Virus
tagtaatcaatcgtaatgccttatg

SEQ ID NO: 173928 - DNA, 25 bp, SARS Virus
agtaatcaatcggaatgccttatgt

SEQ ID NO: 173929 - DNA, 25 bp, SARS Virus
gtaatcaatcgtgatgccttatgta

SEQ ID NO: 173930 - DNA, 25 bp, SARS Virus
taatcaatcgtagtgccttatgtac

SEQ ID NO: 173931 - DNA, 25 bp, SARS Virus
aatcaatcgtaaggccttatgtaca

SEQ ID NO: 173932 - DNA, 25 bp, SARS Virus
atcaatcgtaatgccttatgtacag

SEQ ID NO: 173933 - DNA, 25 bp, SARS Virus
tcaatcgtaatggcttatgtacagg

SEQ ID NO: 173934 - DNA, 25 bp, SARS Virus
caatcgtaatgcgttatgtacaggt

SEQ ID NO: 173935 - DNA, 25 bp, SARS Virus
aatcgtaatgccgtatgtacaggtt

SEQ ID NO: 173936 - DNA, 25 bp, SARS Virus
atcgtaatgcctgatgtacaggttg

SEQ ID NO: 173937 - DNA, 25 bp, SARS Virus
tcgtaatgccttgtgtacaggttgt

SEQ ID NO: 173938 - DNA, 25 bp, SARS Virus
cgtaatgccttaggtacaggttgta

SEQ ID NO: 173939 - DNA, 25 bp, SARS Virus
gtaatgccttatgtacaggttgtac

SEQ ID NO: 173940 - DNA, 25 bp, SARS Virus
taatgccttatggacaggttgtaca

SEQ ID NO: 173941 - DNA, 25 bp, SARS Virus
aatgccttatgtgcaggttgtacac

SEQ ID NO: 173942 - DNA, 25 bp, SARS Virus
atgccttatgtagaggttgtacacc

SEQ ID NO: 173943 - DNA, 25 bp, SARS Virus
tgccttatgtacgggttgtacaccg

SEQ ID NO: 173944 - DNA, 25 bp, SARS Virus
gccttatgtacaggttgtacaccgg

SEQ ID NO: 173945 - DNA, 25 bp, SARS Virus
ccttatgtacaggttgtacaccggt

SEQ ID NO: 173946 - DNA, 25 bp, SARS Virus
cttatgtacagggtgtacaccggtc

SEQ ID NO: 173947 - DNA, 25 bp, SARS Virus
ttatgtacaggtggtacaccggtca

SEQ ID NO: 173948 - DNA, 25 bp, SARS Virus
tatgtacaggttgtacaccggtcat

SEQ ID NO: 173949 - DNA, 25 bp, SARS Virus
atgtacaggttggacaccggtcatt

SEQ ID NO: 173950 - DNA, 25 bp, SARS Virus
tgtacaggttgtgcaccggtcattc

SEQ ID NO: 173951 - DNA, 25 bp, SARS Virus
gtacaggttgtagaccggtcattcg

SEQ ID NO: 173952 - DNA, 25 bp, SARS Virus
tacaggttgtacgccggtcattcga

SEQ ID NO: 173953 - DNA, 25 bp, SARS Virus
acaggttgtacagcggtcattcgag

SEQ ID NO: 173954 - DNA, 25 bp, SARS Virus
caggttgtacacgggtcattcgagt

SEQ ID NO: 173955 - DNA, 25 bp, SARS Virus
aggttgtacaccggtcattcgagta

SEQ ID NO: 173956 - DNA, 25 bp, SARS Virus
ggttgtacaccggtcattcgagtag

SEQ ID NO: 173957 - DNA, 25 bp, SARS Virus
gttgtacaccgggcattcgagtagt

SEQ ID NO: 173958 - DNA, 25 bp, SARS Virus
ttgtacaccggtgattcgagtagta

SEQ ID NO: 173959 - DNA, 25 bp, SARS Virus
tgtacaccggtcgttcgagtagtac

SEQ ID NO: 173960 - DNA, 25 bp, SARS Virus
gtacaccggtcagtcgagtagtaca

SEQ ID NO: 173961 - DNA, 25 bp, SARS Virus
tacaccggtcatgcgagtagtacat

SEQ ID NO: 173962 - DNA, 25 bp, SARS Virus
acaccggtcattggagtagtacatt

SEQ ID NO: 173963 - DNA, 25 bp, SARS Virus
caccggtcattcgagtagtacattg

SEQ ID NO: 173964 - DNA, 25 bp, SARS Virus
accggtcattcgggtagtacattga

SEQ ID NO: 173965 - DNA, 25 bp, SARS Virus
ccggtcattcgagtagtacattgaa

SEQ ID NO: 173966 - DNA, 25 bp, SARS Virus
cggtcattcgaggagtacattgaaa

SEQ ID NO: 173967 - DNA, 25 bp, SARS Virus
ggtcattcgagtggtacattgaaag

SEQ ID NO: 173968 - DNA, 25 bp, SARS Virus
gtcattcgagtagtacattgaaaga

SEQ ID NO: 173969 - DNA, 25 bp, SARS Virus
tcattcgagtaggacattgaaagat

SEQ ID NO: 173970 - DNA, 25 bp, SARS Virus
cattcgagtagtgcattgaaagatt

SEQ ID NO: 173971 - DNA, 25 bp, SARS Virus
attcgagtagtagattgaaagatta

SEQ ID NO: 173972 - DNA, 25 bp, SARS Virus
ttcgagtagtacgttgaaagattac

SEQ ID NO: 173973 - DNA, 25 bp, SARS Virus
tcgagtagtacagtgaaagattaca

SEQ ID NO: 173974 - DNA, 25 bp, SARS Virus
cgagtagtacatggaaagattacat

SEQ ID NO: 173975 - DNA, 25 bp, SARS Virus
gagtagtacattgaaagattacata

SEQ ID NO: 173976 - DNA, 25 bp, SARS Virus
agtagtacattggaagattacataa

SEQ ID NO: 173977 - DNA, 25 bp, SARS Virus
gtagtacattgagagattacataac

SEQ ID NO: 173978 - DNA, 25 bp, SARS Virus
tagtacattgaaggattacataaca

SEQ ID NO: 173979 - DNA, 25 bp, SARS Virus
agtacattgaaagattacataacat

SEQ ID NO: 173980 - DNA, 25 bp, SARS Virus
gtacattgaaaggttacataacatt

SEQ ID NO: 173981 - DNA, 25 bp, SARS Virus
tacattgaaagagtacataacattt

SEQ ID NO: 173982 - DNA, 25 bp, SARS Virus
acattgaaagatgacataacattta

SEQ ID NO: 173983 - DNA, 25 bp, SARS Virus
cattgaaagattgcataacatttat

SEQ ID NO: 173984 - DNA, 25 bp, SARS Virus
attgaaagattagataacatttatg

SEQ ID NO: 173985 - DNA, 25 bp, SARS Virus
ttgaaagattacgtaacatttatgt

SEQ ID NO: 173986 - DNA, 25 bp, SARS Virus
tgaaagattacagaacatttatgtt

SEQ ID NO: 173987 - DNA, 25 bp, SARS Virus
gaaagattacatgacatttatgttc

SEQ ID NO: 173988 - DNA, 25 bp, SARS Virus
aaagattacatagcatttatgttca

SEQ ID NO: 173989 - DNA, 25 bp, SARS Virus
aagattacataagatttatgttcac

SEQ ID NO: 173990 - DNA, 25 bp, SARS Virus
agattacataacgtttatgttcact

SEQ ID NO: 173991 - DNA, 25 bp, SARS Virus
gattacataacagttatgttcactt

SEQ ID NO: 173992 - DNA, 25 bp, SARS Virus
attacataacatgtatgttcacttt

SEQ ID NO: 173993 - DNA, 25 bp, SARS Virus
ttacataacattgatgttcactttc

SEQ ID NO: 173994 - DNA, 25 bp, SARS Virus
tacataacatttgtgttcactttct

SEQ ID NO: 173995 - DNA, 25 bp, SARS Virus
acataacatttaggttcactttctg

SEQ ID NO: 173996 - DNA, 25 bp, SARS Virus
cataacatttatgttcactttctgt

SEQ ID NO: 173997 - DNA, 25 bp, SARS Virus
ataacatttatggtcactttctgta

SEQ ID NO: 173998 - DNA, 25 bp, SARS Virus
taacatttatgtgcactttctgtag

SEQ ID NO: 173999 - DNA, 25 bp, SARS Virus
aacatttatgttgactttctgtagt

SEQ ID NO: 174000 - DNA, 25 bp, SARS Virus
acatttatgttcgctttctgtagtc

SEQ ID NO: 174001 - DNA, 25 bp, SARS Virus
catttatgttcagtttctgtagtcg

SEQ ID NO: 174002 - DNA, 25 bp, SARS Virus
atttatgttcacgttctgtagtcgt

SEQ ID NO: 174003 - DNA, 25 bp, SARS Virus
tttatgttcactgtctgtagtcgta

SEQ ID NO: 174004 - DNA, 25 bp, SARS Virus
ttatgttcacttgctgtagtcgtat

SEQ ID NO: 174005 - DNA, 25 bp, SARS Virus
tatgttcactttgtgtagtcgtatg

SEQ ID NO: 174006 - DNA, 25 bp, SARS Virus
atgttcactttcggtagtcgtatga

SEQ ID NO: 174007 - DNA, 25 bp, SARS Virus
tgttcactttctgtagtcgtatgag

SEQ ID NO: 174008 - DNA, 25 bp, SARS Virus
gttcactttctggagtcgtatgagg

SEQ ID NO: 174009 - DNA, 25 bp, SARS Virus
ttcactttctgtggtcgtatgagga

SEQ ID NO: 174010 - DNA, 25 bp, SARS Virus
tcactttctgtagtcgtatgaggac

SEQ ID NO: 174011 - DNA, 25 bp, SARS Virus
cactttctgtaggcgtatgaggact

SEQ ID NO: 174012 - DNA, 25 bp, SARS Virus
actttctgtagtggtatgaggacta

SEQ ID NO: 174013 - DNA, 25 bp, SARS Virus
ctttctgtagtcgtatgaggactaa

SEQ ID NO: 174014 - DNA, 25 bp, SARS Virus
tttctgtagtcggatgaggactaat

SEQ ID NO: 174015 - DNA, 25 bp, SARS Virus
ttctgtagtcgtgtgaggactaatc

SEQ ID NO: 174016 - DNA, 25 bp, SARS Virus
tctgtagtcgtaggaggactaatcc

SEQ ID NO: 174017 - DNA, 25 bp, SARS Virus
ctgtagtcgtatgaggactaatcct

SEQ ID NO: 174018 - DNA, 25 bp, SARS Virus
tgtagtcgtatggggactaatccta

SEQ ID NO: 174019 - DNA, 25 bp, SARS Virus
gtagtcgtatgaggactaatcctac

SEQ ID NO: 174020 - DNA, 25 bp, SARS Virus
tagtcgtatgaggactaatcctaca

SEQ ID NO: 174021 - DNA, 25 bp, SARS Virus
agtcgtatgagggctaatcctacaa

SEQ ID NO: 174022 - DNA, 25 bp, SARS Virus
gtcgtatgaggagtaatcctacaaa

SEQ ID NO: 174023 - DNA, 25 bp, SARS Virus
tcgtatgaggacgaatcctacaaaa

SEQ ID NO: 174024 - DNA, 25 bp, SARS Virus
cgtatgaggactgatcctacaaaac

SEQ ID NO: 174025 - DNA, 25 bp, SARS Virus
gtatgaggactagtcctacaaaaca

SEQ ID NO: 174026 - DNA, 25 bp, SARS Virus
tatgaggactaagcctacaaaacat

SEQ ID NO: 174027 - DNA, 25 bp, SARS Virus
atgaggactaatgctacaaaacatt

SEQ ID NO: 174028 - DNA, 25 bp, SARS Virus
tgaggactaatcgtacaaaacattc

SEQ ID NO: 174029 - DNA, 25 bp, SARS Virus
gaggactaatccgacaaaacattca

SEQ ID NO: 174030 - DNA, 25 bp, SARS Virus
aggactaatcctgcaaaacattcac

SEQ ID NO: 174031 - DNA, 25 bp, SARS Virus
ggactaatcctagaaaacattcacc

SEQ ID NO: 174032 - DNA, 25 bp, SARS Virus
gactaatcctacgaaacattcaccc

SEQ ID NO: 174033 - DNA, 25 bp, SARS Virus
actaatcctacagaacattcaccca

SEQ ID NO: 174034 - DNA, 25 bp, SARS Virus
ctaatcctacaagacattcacccat

SEQ ID NO: 174035 - DNA, 25 bp, SARS Virus
taatcctacaaagcattcacccatt

SEQ ID NO: 174036 - DNA, 25 bp, SARS Virus
aatcctacaaaagattcacccattc

SEQ ID NO: 174037 - DNA, 25 bp, SARS Virus
atcctacaaaacgttcacccattcg

SEQ ID NO: 174038 - DNA, 25 bp, SARS Virus
tcctacaaaacagtcacccattcgt

SEQ ID NO: 174039 - DNA, 25 bp, SARS Virus
cctacaaaacatgcacccattcgta

SEQ ID NO: 174040 - DNA, 25 bp, SARS Virus
ctacaaaacattgacccattcgtag

SEQ ID NO: 174041 - DNA, 25 bp, SARS Virus
tacaaaacattcgcccattcgtagt

SEQ ID NO: 174042 - DNA, 25 bp, SARS Virus
acaaaacattcagccattcgtagtt

SEQ ID NO: 174043 - DNA, 25 bp, SARS Virus
caaaacattcacgcattcgtagtta

SEQ ID NO: 174044 - DNA, 25 bp, SARS Virus
aaaacattcaccgattcgtagttat

SEQ ID NO: 174045 - DNA, 25 bp, SARS Virus
aaacattcacccgttcgtagttatc

SEQ ID NO: 174046 - DNA, 25 bp, SARS Virus
aacattcacccagtcgtagttatcg

SEQ ID NO: 174047 - DNA, 25 bp, SARS Virus
acattcacccatgcgtagttatcgg

SEQ ID NO: 174048 - DNA, 25 bp, SARS Virus
cattcacccattggtagttatcggt

SEQ ID NO: 174049 - DNA, 25 bp, SARS Virus
attcacccattcgtagttatcggtc

SEQ ID NO: 174050 - DNA, 25 bp, SARS Virus
ttcacccattcggagttatcggtca

SEQ ID NO: 174051 - DNA, 25 bp, SARS Virus
tcacccattcgtggttatcggtcac

SEQ ID NO: 174052 - DNA, 25 bp, SARS Virus
cacccattcgtagttatcggtcact

SEQ ID NO: 174053 - DNA, 25 bp, SARS Virus
acccattcgtaggtatcggtcactg

SEQ ID NO: 174054 - DNA, 25 bp, SARS Virus
cccattcgtagtgatcggtcactgt

SEQ ID NO: 174055 - DNA, 25 bp, SARS Virus
ccattcgtagttgtcggtcactgtg

SEQ ID NO: 174056 - DNA, 25 bp, SARS Virus
cattcgtagttagcggtcactgtgc

SEQ ID NO: 174057 - DNA, 25 bp, SARS Virus
attcgtagttatgggtcactgtgct

SEQ ID NO: 174058 - DNA, 25 bp, SARS Virus
ttcgtagttatcggtcactgtgctt

SEQ ID NO: 174059 - DNA, 25 bp, SARS Virus
tcgtagttatcggtcactgtgcttg

SEQ ID NO: 174060 - DNA, 25 bp, SARS Virus
cgtagttatcgggcactgtgcttgg

SEQ ID NO: 174061 - DNA, 25 bp, SARS Virus
gtagttatcggtgactgtgcttgga

SEQ ID NO: 174062 - DNA, 25 bp, SARS Virus
tagttatcggtcgctgtgcttggaa

SEQ ID NO: 174063 - DNA, 25 bp, SARS Virus
agttatcggtcagtgtgcttggaaa

SEQ ID NO: 174064 - DNA, 25 bp, SARS Virus
gttatcggtcacggtgcttggaaag

SEQ ID NO: 174065 - DNA, 25 bp, SARS Virus
ttatcggtcactgtgcttggaaagt

SEQ ID NO: 174066 - DNA, 25 bp, SARS Virus
tatcggtcactgggcttggaaagtt

SEQ ID NO: 174067 - DNA, 25 bp, SARS Virus
atcggtcactgtgcttggaaagtta

SEQ ID NO: 174068 - DNA, 25 bp, SARS Virus
tcggtcactgtggttggaaagttag

SEQ ID NO: 174069 - DNA, 25 bp, SARS Virus
cggtcactgtgcgtggaaagttagt

SEQ ID NO: 174070 - DNA, 25 bp, SARS Virus
ggtcactgtgctgggaaagttagta

SEQ ID NO: 174071 - DNA, 25 bp, SARS Virus
gtcactgtgcttggaaagttagtat

SEQ ID NO: 174072 - DNA, 25 bp, SARS Virus
tcactgtgcttggaaagttagtatt

SEQ ID NO: 174073 - DNA, 25 bp, SARS Virus
cactgtgcttgggaagttagtattc

SEQ ID NO: 174074 - DNA, 25 bp, SARS Virus
actgtgcttggagagttagtattca

SEQ ID NO: 174075 - DNA, 25 bp, SARS Virus
ctgtgcttggaaggttagtattcac

SEQ ID NO: 174076 - DNA, 25 bp, SARS Virus
tgtgcttggaaagttagtattcaca

SEQ ID NO: 174077 - DNA, 25 bp, SARS Virus
gtgcttggaaaggtagtattcacat

SEQ ID NO: 174078 - DNA, 25 bp, SARS Virus
tgcttggaaagtgagtattcacatg

SEQ ID NO: 174079 - DNA, 25 bp, SARS Virus
gcttggaaagttggtattcacatgg

SEQ ID NO: 174080 - DNA, 25 bp, SARS Virus
cttggaaagttagtattcacatggt

SEQ ID NO: 174081 - DNA, 25 bp, SARS Virus
ttggaaagttaggattcacatggta

SEQ ID NO: 174082 - DNA, 25 bp, SARS Virus
tggaaagttagtgttcacatggtag

SEQ ID NO: 174083 - DNA, 25 bp, SARS Virus
ggaaagttagtagtcacatggtaga

SEQ ID NO: 174084 - DNA, 25 bp, SARS Virus
gaaagttagtatgcacatggtagac

SEQ ID NO: 174085 - DNA, 25 bp, SARS Virus
aaagttagtattgacatggtagaca

SEQ ID NO: 174086 - DNA, 25 bp, SARS Virus
aagttagtattcgcatggtagacaa

SEQ ID NO: 174087 - DNA, 25 bp, SARS Virus
agttagtattcagatggtagacaaa

SEQ ID NO: 174088 - DNA, 25 bp, SARS Virus
gttagtattcacgtggtagacaaaa

SEQ ID NO: 174089 - DNA, 25 bp, SARS Virus
ttagtattcacagggtagacaaaac

SEQ ID NO: 174090 - DNA, 25 bp, SARS Virus
tagtattcacatggtagacaaaact

SEQ ID NO: 174091 - DNA, 25 bp, SARS Virus
agtattcacatggtagacaaaactg

SEQ ID NO: 174092 - DNA, 25 bp, SARS Virus
gtattcacatgggagacaaaactgt

SEQ ID NO: 174093 - DNA, 25 bp, SARS Virus
tattcacatggtggacaaaactgtt

SEQ ID NO: 174094 - DNA, 25 bp, SARS Virus
attcacatggtagacaaaactgtta

SEQ ID NO: 174095 - DNA, 25 bp, SARS Virus
ttcacatggtaggcaaaactgttat

SEQ ID NO: 174096 - DNA, 25 bp, SARS Virus
tcacatggtagagaaaactgttata

SEQ ID NO: 174097 - DNA, 25 bp, SARS Virus
cacatggtagacgaaactgttatag

SEQ ID NO: 174098 - DNA, 25 bp, SARS Virus
acatggtagacagaactgttatagt

SEQ ID NO: 174099 - DNA, 25 bp, SARS Virus
catggtagacaagactgttatagta

SEQ ID NO: 174100 - DNA, 25 bp, SARS Virus
atggtagacaaagctgttatagtag

SEQ ID NO: 174101 - DNA, 25 bp, SARS Virus
tggtagacaaaagtgttatagtagc

SEQ ID NO: 174102 - DNA, 25 bp, SARS Virus
ggtagacaaaacggttatagtagct

SEQ ID NO: 174103 - DNA, 25 bp, SARS Virus
gtagacaaaactgttatagtagctg

SEQ ID NO: 174104 - DNA, 25 bp, SARS Virus
tagacaaaactggtatagtagctgt

SEQ ID NO: 174105 - DNA, 25 bp, SARS Virus
agacaaaactgtgatagtagctgtt

SEQ ID NO: 174106 - DNA, 25 bp, SARS Virus
gacaaaactgttgtagtagctgttt

SEQ ID NO: 174107 - DNA, 25 bp, SARS Virus
acaaaactgttagagtagctgtttt

SEQ ID NO: 174108 - DNA, 25 bp, SARS Virus
caaaactgttatggtagctgttttg

SEQ ID NO: 174109 - DNA, 25 bp, SARS Virus
aaaactgttatagtagctgttttgt

SEQ ID NO: 174110 - DNA, 25 bp, SARS Virus
aaactgttataggagctgttttgtc

SEQ ID NO: 174111 - DNA, 25 bp, SARS Virus
aactgttatagtggctgttttgtcg

SEQ ID NO: 174112 - DNA, 25 bp, SARS Virus
actgttatagtagctgttttgtcgg

SEQ ID NO: 174113 - DNA, 25 bp, SARS Virus
ctgttatagtaggtgttttgtcgga

SEQ ID NO: 174114 - DNA, 25 bp, SARS Virus
tgttatagtagcggttttgtcggac

SEQ ID NO: 174115 - DNA, 25 bp, SARS Virus
gttatagtagctgttttgtcggacg

SEQ ID NO: 174116 - DNA, 25 bp, SARS Virus
ttatagtagctggtttgtcggacgc

SEQ ID NO: 174117 - DNA, 25 bp, SARS Virus
tatagtagctgtgttgtcggacgcg

SEQ ID NO: 174118 - DNA, 25 bp, SARS Virus
atagtagctgttgtgtcggacgcgg

SEQ ID NO: 174119 - DNA, 25 bp, SARS Virus
tagtagctgtttggtcggacgcgga

SEQ ID NO: 174120 - DNA, 25 bp, SARS Virus
agtagctgttttgtcggacgcggat

SEQ ID NO: 174121 - DNA, 25 bp, SARS Virus
gtagctgttttggcggacgcggatt

SEQ ID NO: 174122 - DNA, 25 bp, SARS Virus
tagctgttttgtgggacgcggatta

SEQ ID NO: 174123 - DNA, 25 bp, SARS Virus
agctgttttgtcggacgcggattat

SEQ ID NO: 174124 - DNA, 25 bp, SARS Virus
gctgttttgtcggacgcggattata

SEQ ID NO: 174125 - DNA, 25 bp, SARS Virus
ctgttttgtcgggcgcggattataa

SEQ ID NO: 174126 - DNA, 25 bp, SARS Virus
tgttttgtcggaggcggattataag

SEQ ID NO: 174127 - DNA, 25 bp, SARS Virus
gttttgtcggacgcggattataaga

SEQ ID NO: 174128 - DNA, 25 bp, SARS Virus
ttttgtcggacggggattataagaa

SEQ ID NO: 174129 - DNA, 25 bp, SARS Virus
tttgtcggacgcggattataagaac

SEQ ID NO: 174130 - DNA, 25 bp, SARS Virus
ttgtcggacgcggattataagaact

SEQ ID NO: 174131 - DNA, 25 bp, SARS Virus
tgtcggacgcgggttataagaacta

SEQ ID NO: 174132 - DNA, 25 bp, SARS Virus
gtcggacgcggagtataagaactac

SEQ ID NO: 174133 - DNA, 25 bp, SARS Virus
tcggacgcggatgataagaactacc

SEQ ID NO: 174134 - DNA, 25 bp, SARS Virus
cggacgcggattgtaagaactacct

SEQ ID NO: 174135 - DNA, 25 bp, SARS Virus
ggacgcggattagaagaactaccta

SEQ ID NO: 174136 - DNA, 25 bp, SARS Virus
gacgcggattatgagaactacctag

SEQ ID NO: 174137 - DNA, 25 bp, SARS Virus
acgcggattataggaactacctaga

SEQ ID NO: 174138 - DNA, 25 bp, SARS Virus
cgcggattataagaactacctagac

SEQ ID NO: 174139 - DNA, 25 bp, SARS Virus
gcggattataaggactacctagacc

SEQ ID NO: 174140 - DNA, 25 bp, SARS Virus
cggattataagagctacctagaccc

SEQ ID NO: 174141 - DNA, 25 bp, SARS Virus
ggattataagaagtacctagaccca

SEQ ID NO: 174142 - DNA, 25 bp, SARS Virus
gattataagaacgacctagacccat

SEQ ID NO: 174143 - DNA, 25 bp, SARS Virus
attataagaactgcctagacccatt

SEQ ID NO: 174144 - DNA, 25 bp, SARS Virus
ttataagaactagctagacccattc

SEQ ID NO: 174145 - DNA, 25 bp, SARS Virus
tataagaactacgtagacccattcc

SEQ ID NO: 174146 - DNA, 25 bp, SARS Virus
ataagaactaccgagacccattccg

SEQ ID NO: 174147 - DNA, 25 bp, SARS Virus
taagaactacctggacccattccgt

SEQ ID NO: 174148 - DNA, 25 bp, SARS Virus
aagaactacctagacccattccgtc

SEQ ID NO: 174149 - DNA, 25 bp, SARS Virus
agaactacctaggcccattccgtcc

SEQ ID NO: 174150 - DNA, 25 bp, SARS Virus
gaactacctagagccattccgtcca

SEQ ID NO: 174151 - DNA, 25 bp, SARS Virus
aactacctagacgcattccgtccat

SEQ ID NO: 174152 - DNA, 25 bp, SARS Virus
actacctagaccgattccgtccatg

SEQ ID NO: 174153 - DNA, 25 bp, SARS Virus
ctacctagacccgttccgtccatgt

SEQ ID NO: 174154 - DNA, 25 bp, SARS Virus
tacctagacccagtccgtccatgtg

SEQ ID NO: 174155 - DNA, 25 bp, SARS Virus
acctagacccatgccgtccatgtgc

SEQ ID NO: 174156 - DNA, 25 bp, SARS Virus
cctagacccattgcgtccatgtgca

SEQ ID NO: 174157 - DNA, 25 bp, SARS Virus
ctagacccattcggtccatgtgcat

SEQ ID NO: 174158 - DNA, 25 bp, SARS Virus
tagacccattccgtccatgtgcatt

SEQ ID NO: 174159 - DNA, 25 bp, SARS Virus
agacccattccggccatgtgcatta

SEQ ID NO: 174160 - DNA, 25 bp, SARS Virus
gacccattccgtgcatgtgcattag

SEQ ID NO: 174161 - DNA, 25 bp, SARS Virus
acccattccgtcgatgtgcattagt

SEQ ID NO: 174162 - DNA, 25 bp, SARS Virus
cccattccgtccgtgtgcattagta

SEQ ID NO: 174163 - DNA, 25 bp, SARS Virus
ccattccgtccaggtgcattagtag

SEQ ID NO: 174164 - DNA, 25 bp, SARS Virus
cattccgtccatgtgcattagtaga

SEQ ID NO: 174165 - DNA, 25 bp, SARS Virus
attccgtccatgggcattagtagag

SEQ ID NO: 174166 - DNA, 25 bp, SARS Virus
ttccgtccatgtgcattagtagagg

SEQ ID NO: 174167 - DNA, 25 bp, SARS Virus
tccgtccatgtggattagtagagga

SEQ ID NO: 174168 - DNA, 25 bp, SARS Virus
ccgtccatgtgcgttagtagaggaa

SEQ ID NO: 174169 - DNA, 25 bp, SARS Virus
cgtccatgtgcagtagtagaggaac

SEQ ID NO: 174170 - DNA, 25 bp, SARS Virus
gtccatgtgcatgagtagaggaaca

SEQ ID NO: 174171 - DNA, 25 bp, SARS Virus
tccatgtgcattggtagaggaacaa

SEQ ID NO: 174172 - DNA, 25 bp, SARS Virus
ccatgtgcattagtagaggaacaaa

SEQ ID NO: 174173 - DNA, 25 bp, SARS Virus
catgtgcattaggagaggaacaaat

SEQ ID NO: 174174 - DNA, 25 bp, SARS Virus
atgtgcattagtggaggaacaaatt

SEQ ID NO: 174175 - DNA, 25 bp, SARS Virus
tgtgcattagtagaggaacaaattg

SEQ ID NO: 174176 - DNA, 25 bp, SARS Virus
gtgcattagtaggggaacaaattga

SEQ ID NO: 174177 - DNA, 25 bp, SARS Virus
tgcattagtagaggaacaaattgat

SEQ ID NO: 174178 - DNA, 25 bp, SARS Virus
gcattagtagaggaacaaattgatc

SEQ ID NO: 174179 - DNA, 25 bp, SARS Virus
cattagtagagggacaaattgatcg

SEQ ID NO: 174180 - DNA, 25 bp, SARS Virus
attagtagaggagcaaattgatcgt

SEQ ID NO: 174181 - DNA, 25 bp, SARS Virus
ttagtagaggaagaaattgatcgta

SEQ ID NO: 174182 - DNA, 25 bp, SARS Virus
tagtagaggaacgaattgatcgtaa

SEQ ID NO: 174183 - DNA, 25 bp, SARS Virus
agtagaggaacagattgatcgtaac

SEQ ID NO: 174184 - DNA, 25 bp, SARS Virus
gtagaggaacaagttgatcgtaaca

SEQ ID NO: 174185 - DNA, 25 bp, SARS Virus
tagaggaacaaagtgatcgtaacat

SEQ ID NO: 174186 - DNA, 25 bp, SARS Virus
agaggaacaaatggatcgtaacata

SEQ ID NO: 174187 - DNA, 25 bp, SARS Virus
gaggaacaaattgatcgtaacatac

SEQ ID NO: 174188 - DNA, 25 bp, SARS Virus
aggaacaaattggtcgtaacatacg

SEQ ID NO: 174189 - DNA, 25 bp, SARS Virus
ggaacaaattgagcgtaacatacga

SEQ ID NO: 174190 - DNA, 25 bp, SARS Virus
gaacaaattgatggtaacatacgac

SEQ ID NO: 174191 - DNA, 25 bp, SARS Virus
aacaaattgatcgtaacatacgaca

SEQ ID NO: 174192 - DNA, 25 bp, SARS Virus
acaaattgatcggaacatacgacac

SEQ ID NO: 174193 - DNA, 25 bp, SARS Virus
caaattgatcgtgacatacgacact

SEQ ID NO: 174194 - DNA, 25 bp, SARS Virus
aaattgatcgtagcatacgacactc

SEQ ID NO: 174195 - DNA, 25 bp, SARS Virus
aattgatcgtaagatacgacactcg

SEQ ID NO: 174196 - DNA, 25 bp, SARS Virus
attgatcgtaacgtacgacactcgt

SEQ ID NO: 174197 - DNA, 25 bp, SARS Virus
ttgatcgtaacagacgacactcgtt

SEQ ID NO: 174198 - DNA, 25 bp, SARS Virus
tgatcgtaacatgcgacactcgttt

SEQ ID NO: 174199 - DNA, 25 bp, SARS Virus
gatcgtaacataggacactcgtttt

SEQ ID NO: 174200 - DNA, 25 bp, SARS Virus
atcgtaacatacgacactcgtttta

SEQ ID NO: 174201 - DNA, 25 bp, SARS Virus
tcgtaacatacggcactcgttttaa

SEQ ID NO: 174202 - DNA, 25 bp, SARS Virus
cgtaacatacgagactcgttttaag

SEQ ID NO: 174203 - DNA, 25 bp, SARS Virus
gtaacatacgacgctcgttttaagc

SEQ ID NO: 174204 - DNA, 25 bp, SARS Virus
taacatacgacagtcgttttaagca

SEQ ID NO: 174205 - DNA, 25 bp, SARS Virus
aacatacgacacgcgttttaagcac

SEQ ID NO: 174206 - DNA, 25 bp, SARS Virus
acatacgacactggttttaagcact

SEQ ID NO: 174207 - DNA, 25 bp, SARS Virus
catacgacactcgttttaagcactc

SEQ ID NO: 174208 - DNA, 25 bp, SARS Virus
atacgacactcggtttaagcactcc

SEQ ID NO: 174209 - DNA, 25 bp, SARS Virus
tacgacactcgtgttaagcactcca

SEQ ID NO: 174210 - DNA, 25 bp, SARS Virus
acgacactcgttgtaagcactccag

SEQ ID NO: 174211 - DNA, 25 bp, SARS Virus
cgacactcgtttgaagcactccagg

SEQ ID NO: 174212 - DNA, 25 bp, SARS Virus
gacactcgttttgagcactccagga

SEQ ID NO: 174213 - DNA, 25 bp, SARS Virus
acactcgttttaggcactccaggaa

SEQ ID NO: 174214 - DNA, 25 bp, SARS Virus
cactcgttttaagcactccaggaaa

SEQ ID NO: 174215 - DNA, 25 bp, SARS Virus
actcgttttaaggactccaggaaat

SEQ ID NO: 174216 - DNA, 25 bp, SARS Virus
ctcgttttaagcgctccaggaaatc

SEQ ID NO: 174217 - DNA, 25 bp, SARS Virus
tcgttttaagcagtccaggaaatca

SEQ ID NO: 174218 - DNA, 25 bp, SARS Virus
cgttttaagcacgccaggaaatcat

SEQ ID NO: 174219 - DNA, 25 bp, SARS Virus
gttttaagcactgcaggaaatcatt

SEQ ID NO: 174220 - DNA, 25 bp, SARS Virus
ttttaagcactcgaggaaatcattc

SEQ ID NO: 174221 - DNA, 25 bp, SARS Virus
tttaagcactccgggaaatcattcc

SEQ ID NO: 174222 - DNA, 25 bp, SARS Virus
ttaagcactccaggaaatcattcca

SEQ ID NO: 174223 - DNA, 25 bp, SARS Virus
taagcactccaggaaatcattccag

SEQ ID NO: 174224 - DNA, 25 bp, SARS Virus
aagcactccagggaatcattccagt

SEQ ID NO: 174225 - DNA, 25 bp, SARS Virus
agcactccaggagatcattccagtc

SEQ ID NO: 174226 - DNA, 25 bp, SARS Virus
gcactccaggaagtcattccagtca

SEQ ID NO: 174227 - DNA, 25 bp, SARS Virus
cactccaggaaagcattccagtcag

SEQ ID NO: 174228 - DNA, 25 bp, SARS Virus
actccaggaaatgattccagtcaga

SEQ ID NO: 174229 - DNA, 25 bp, SARS Virus
ctccaggaaatcgttccagtcagag

SEQ ID NO: 174230 - DNA, 25 bp, SARS Virus
tccaggaaatcagtccagtcagagt

SEQ ID NO: 174231 - DNA, 25 bp, SARS Virus
ccaggaaatcatgccagtcagagtc

SEQ ID NO: 174232 - DNA, 25 bp, SARS Virus
caggaaatcattgcagtcagagtca

SEQ ID NO: 174233 - DNA, 25 bp, SARS Virus
aggaaatcattcgagtcagagtcag

SEQ ID NO: 174234 - DNA, 25 bp, SARS Virus
ggaaatcattccggtcagagtcagg

SEQ ID NO: 174235 - DNA, 25 bp, SARS Virus
gaaatcattccagtcagagtcaggt

SEQ ID NO: 174236 - DNA, 25 bp, SARS Virus
aaatcattccaggcagagtcaggtt

SEQ ID NO: 174237 - DNA, 25 bp, SARS Virus
aatcattccagtgagagtcaggttg

SEQ ID NO: 174238 - DNA, 25 bp, SARS Virus
atcattccagtcggagtcaggttgt

SEQ ID NO: 174239 - DNA, 25 bp, SARS Virus
tcattccagtcagagtcaggttgta

SEQ ID NO: 174240 - DNA, 25 bp, SARS Virus
cattccagtcagggtcaggttgtaa

SEQ ID NO: 174241 - DNA, 25 bp, SARS Virus
attccagtcagagtcaggttgtaaa

SEQ ID NO: 174242 - DNA, 25 bp, SARS Virus
ttccagtcagaggcaggttgtaaaa

SEQ ID NO: 174243 - DNA, 25 bp, SARS Virus
tccagtcagagtgaggttgtaaaac

SEQ ID NO: 174244 - DNA, 25 bp, SARS Virus
ccagtcagagtcgggttgtaaaacg

SEQ ID NO: 174245 - DNA, 25 bp, SARS Virus
cagtcagagtcaggttgtaaaacgg

SEQ ID NO: 174246 - DNA, 25 bp, SARS Virus
agtcagagtcaggttgtaaaacgga

SEQ ID NO: 174247 - DNA, 25 bp, SARS Virus
gtcagagtcagggtgtaaaacggag

SEQ ID NO: 174248 - DNA, 25 bp, SARS Virus
tcagagtcaggtggtaaaacggagt

SEQ ID NO: 174249 - DNA, 25 bp, SARS Virus
gtaccagtatcgtcgtgaacgttgt

SEQ ID NO: 174250 - DNA, 25 bp, SARS Virus
taccagtatcgttgtgaacgttgta

SEQ ID NO: 174251 - DNA, 25 bp, SARS Virus
accagtatcgtcttgaacgttgtat

SEQ ID NO: 174252 - DNA, 25 bp, SARS Virus
ccagtatcgtcgtgaacgttgtatc

SEQ ID NO: 174253 - DNA, 25 bp, SARS Virus
cagtatcgtcgttaacgttgtatcc

SEQ ID NO: 174254 - DNA, 25 bp, SARS Virus
agtatcgtcgtgtacgttgtatcct

SEQ ID NO: 174255 - DNA, 25 bp, SARS Virus
gtatcgtcgtgatcgttgtatcctt

SEQ ID NO: 174256 - DNA, 25 bp, SARS Virus
tatcgtcgtgaatgttgtatcctta

SEQ ID NO: 174257 - DNA, 25 bp, SARS Virus
atcgtcgtgaactttgtatccttac

SEQ ID NO: 174258 - DNA, 25 bp, SARS Virus
tcgtcgtgaacgttgtatccttacc

SEQ ID NO: 174259 - DNA, 25 bp, SARS Virus
cgtcgtgaacgttgtatccttacca

SEQ ID NO: 174260 - DNA, 25 bp, SARS Virus
gtcgtgaacgttttatccttaccag

SEQ ID NO: 174261 - DNA, 25 bp, SARS Virus
tcgtgaacgttgtatccttaccaga

SEQ ID NO: 174262 - DNA, 25 bp, SARS Virus
cgtgaacgttgtttccttaccagag

SEQ ID NO: 174263 - DNA, 25 bp, SARS Virus
gtgaacgttgtatccttaccagagg

SEQ ID NO: 174264 - DNA, 25 bp, SARS Virus
tgaacgttgtattcttaccagagga

SEQ ID NO: 174265 - DNA, 25 bp, SARS Virus
gaacgttgtatctttaccagaggat

SEQ ID NO: 174266 - DNA, 25 bp, SARS Virus
aacgttgtatccttaccagaggatt

SEQ ID NO: 174267 - DNA, 25 bp, SARS Virus
acgttgtatccttaccagaggatta

SEQ ID NO: 174268 - DNA, 25 bp, SARS Virus
cgttgtatcctttccagaggattat

SEQ ID NO: 174269 - DNA, 25 bp, SARS Virus
gttgtatccttatcagaggattatg

SEQ ID NO: 174270 - DNA, 25 bp, SARS Virus
ttgtatccttactagaggattatgt

SEQ ID NO: 174271 - DNA, 25 bp, SARS Virus
tgtatccttacctgaggattatgtc

SEQ ID NO: 174272 - DNA, 25 bp, SARS Virus
gtatccttaccataggattatgtcc

SEQ ID NO: 174273 - DNA, 25 bp, SARS Virus
tatccttaccagtggattatgtccg

SEQ ID NO: 174274 - DNA, 25 bp, SARS Virus
atccttaccagatgattatgtccgt

SEQ ID NO: 174275 - DNA, 25 bp, SARS Virus
tccttaccagagtattatgtccgtg

SEQ ID NO: 174276 - DNA, 25 bp, SARS Virus
ccttaccagaggtttatgtccgtgg

SEQ ID NO: 174277 - DNA, 25 bp, SARS Virus
cttaccagaggattatgtccgtggc

SEQ ID NO: 174278 - DNA, 25 bp, SARS Virus
ttaccagaggattatgtccgtggcg

SEQ ID NO: 174279 - DNA, 25 bp, SARS Virus
taccagaggattttgtccgtggcgt

SEQ ID NO: 174280 - DNA, 25 bp, SARS Virus
accagaggattatgtccgtggcgtt

SEQ ID NO: 174281 - DNA, 25 bp, SARS Virus
ccagaggattatttccgtggcgttg

SEQ ID NO: 174282 - DNA, 25 bp, SARS Virus
cagaggattatgtccgtggcgttgc

SEQ ID NO: 174283 - DNA, 25 bp, SARS Virus
agaggattatgttcgtggcgttgct

SEQ ID NO: 174284 - DNA, 25 bp, SARS Virus
gaggattatgtctgtggcgttgctt

SEQ ID NO: 174285 - DNA, 25 bp, SARS Virus
aggattatgtccttggcgttgcttc

SEQ ID NO: 174286 - DNA, 25 bp, SARS Virus
ggattatgtccgtggcgttgcttca

SEQ ID NO: 174287 - DNA, 25 bp, SARS Virus
gattatgtccgttgcgttgcttcac

SEQ ID NO: 174288 - DNA, 25 bp, SARS Virus
attatgtccgtgtcgttgcttcact

SEQ ID NO: 174289 - DNA, 25 bp, SARS Virus
ttatgtccgtggtgttgcttcactt

SEQ ID NO: 174290 - DNA, 25 bp, SARS Virus
tatgtccgtggctttgcttcacttc

SEQ ID NO: 174291 - DNA, 25 bp, SARS Virus
atgtccgtggcgttgcttcacttca

SEQ ID NO: 174292 - DNA, 25 bp, SARS Virus
tgtccgtggcgttgcttcacttcag

SEQ ID NO: 174293 - DNA, 25 bp, SARS Virus
gtccgtggcgtttcttcacttcaga

SEQ ID NO: 174294 - DNA, 25 bp, SARS Virus
tccgtggcgttgtttcacttcagac

SEQ ID NO: 174295 - DNA, 25 bp, SARS Virus
ccgtggcgttgcttcacttcagaca

SEQ ID NO: 174296 - DNA, 25 bp, SARS Virus
cgtggcgttgcttcacttcagacac

SEQ ID NO: 174297 - DNA, 25 bp, SARS Virus
gtggcgttgctttacttcagacact

SEQ ID NO: 174298 - DNA, 25 bp, SARS Virus
tggcgttgcttctcttcagacactt

SEQ ID NO: 174299 - DNA, 25 bp, SARS Virus
ggcgttgcttcatttcagacactta

SEQ ID NO: 174300 - DNA, 25 bp, SARS Virus
gcgttgcttcacttcagacacttaa

SEQ ID NO: 174301 - DNA, 25 bp, SARS Virus
cgttgcttcacttcagacacttaac

SEQ ID NO: 174302 - DNA, 25 bp, SARS Virus
gttgcttcactttagacacttaacg

SEQ ID NO: 174303 - DNA, 25 bp, SARS Virus
ttgcttcacttctgacacttaacgt

SEQ ID NO: 174304 - DNA, 25 bp, SARS Virus
tgcttcacttcatacacttaacgtg

SEQ ID NO: 174305 - DNA, 25 bp, SARS Virus
gcttcacttcagtcacttaacgtgt

SEQ ID NO: 174306 - DNA, 25 bp, SARS Virus
cttcacttcagatacttaacgtgtt

SEQ ID NO: 174307 - DNA, 25 bp, SARS Virus
ttcacttcagactcttaacgtgtta

SEQ ID NO: 174308 - DNA, 25 bp, SARS Virus
tcacttcagacatttaacgtgttat

SEQ ID NO: 174309 - DNA, 25 bp, SARS Virus
cacttcagacacttaacgtgttatg

SEQ ID NO: 174310 - DNA, 25 bp, SARS Virus
acttcagacacttaacgtgttatgt

SEQ ID NO: 174311 - DNA, 25 bp, SARS Virus
cttcagacactttacgtgttatgtg

SEQ ID NO: 174312 - DNA, 25 bp, SARS Virus
ttcagacacttatcgtgttatgtgt

SEQ ID NO: 174313 - DNA, 25 bp, SARS Virus
tcagacacttaatgtgttatgtgtt

SEQ ID NO: 174314 - DNA, 25 bp, SARS Virus
cagacacttaacttgttatgtgttc

SEQ ID NO: 174315 - DNA, 25 bp, SARS Virus
agacacttaacgtgttatgtgttcg

SEQ ID NO: 174316 - DNA, 25 bp, SARS Virus
gacacttaacgttttatgtgttcgt

SEQ ID NO: 174317 - DNA, 25 bp, SARS Virus
acacttaacgtgttatgtgttcgtg

SEQ ID NO: 174318 - DNA, 25 bp, SARS Virus
cacttaacgtgttatgtgttcgtgg

SEQ ID NO: 174319 - DNA, 25 bp, SARS Virus
acttaacgtgttttgtgttcgtgga

SEQ ID NO: 174320 - DNA, 25 bp, SARS Virus
cttaacgtgttatgtgttcgtggat

SEQ ID NO: 174321 - DNA, 25 bp, SARS Virus
ttaacgtgttatttgttcgtggatg

SEQ ID NO: 174322 - DNA, 25 bp, SARS Virus
taacgtgttatgtgttcgtggatgt

SEQ ID NO: 174323 - DNA, 25 bp, SARS Virus
aacgtgttatgttttcgtggatgtc

SEQ ID NO: 174324 - DNA, 25 bp, SARS Virus
acgtgttatgtgttcgtggatgtcg

SEQ ID NO: 174325 - DNA, 25 bp, SARS Virus
cgtgttatgtgttcgtggatgtcgg

SEQ ID NO: 174326 - DNA, 25 bp, SARS Virus
gtgttatgtgtttgtggatgtcgga

SEQ ID NO: 174327 - DNA, 25 bp, SARS Virus
tgttatgtgttcttggatgtcggac

SEQ ID NO: 174328 - DNA, 25 bp, SARS Virus
gttatgtgttcgtggatgtcggacg

SEQ ID NO: 174329 - DNA, 25 bp, SARS Virus
ttatgtgttcgttgatgtcggacgt

SEQ ID NO: 174330 - DNA, 25 bp, SARS Virus
tatgtgttcgtgtatgtcggacgtt

SEQ ID NO: 174331 - DNA, 25 bp, SARS Virus
atgtgttcgtggttgtcggacgttc

SEQ ID NO: 174332 - DNA, 25 bp, SARS Virus
tgtgttcgtggatgtcggacgttct

SEQ ID NO: 174333 - DNA, 25 bp, SARS Virus
gtgttcgtggatttcggacgttctg

SEQ ID NO: 174334 - DNA, 25 bp, SARS Virus
tgttcgtggatgtcggacgttctga

SEQ ID NO: 174335 - DNA, 25 bp, SARS Virus
gttcgtggatgttggacgttctgac

SEQ ID NO: 174336 - DNA, 25 bp, SARS Virus
ttcgtggatgtctgacgttctgaca

SEQ ID NO: 174337 - DNA, 25 bp, SARS Virus
tcgtggatgtcgtacgttctgacat

SEQ ID NO: 174338 - DNA, 25 bp, SARS Virus
cgtggatgtcggtcgttctgacata

SEQ ID NO: 174339 - DNA, 25 bp, SARS Virus
gtggatgtcggatgttctgacatac

SEQ ID NO: 174340 - DNA, 25 bp, SARS Virus
tggatgtcggactttctgacataca

SEQ ID NO: 174341 - DNA, 25 bp, SARS Virus
ggatgtcggacgttctgacatacac

SEQ ID NO: 174342 - DNA, 25 bp, SARS Virus
gatgtcggacgttctgacatacacc

SEQ ID NO: 174343 - DNA, 25 bp, SARS Virus
atgtcggacgttttgacatacacca

SEQ ID NO: 174344 - DNA, 25 bp, SARS Virus
tgtcggacgttctgacatacaccac

SEQ ID NO: 174345 - DNA, 25 bp, SARS Virus
gtcggacgttcttacatacaccaca

SEQ ID NO: 174346 - DNA, 25 bp, SARS Virus
tcggacgttctgtcatacaccacac

SEQ ID NO: 174347 - DNA, 25 bp, SARS Virus
cggacgttctgatatacaccacaca

SEQ ID NO: 174348 - DNA, 25 bp, SARS Virus
ggacgttctgacttacaccacacat

SEQ ID NO: 174349 - DNA, 25 bp, SARS Virus
gacgttctgacatacaccacacatg

SEQ ID NO: 174350 - DNA, 25 bp, SARS Virus
acgttctgacattcaccacacatgt

SEQ ID NO: 174351 - DNA, 25 bp, SARS Virus
cgttctgacatataccacacatgta

SEQ ID NO: 174352 - DNA, 25 bp, SARS Virus
gttctgacatactccacacatgtat

SEQ ID NO: 174353 - DNA, 25 bp, SARS Virus
ttctgacatacatcacacatgtatc

SEQ ID NO: 174354 - DNA, 25 bp, SARS Virus
tctgacatacactacacatgtatcg

SEQ ID NO: 174355 - DNA, 25 bp, SARS Virus
ctgacatacacctcacatgtatcgg

SEQ ID NO: 174356 - DNA, 25 bp, SARS Virus
tgacatacaccatacatgtatcgga

SEQ ID NO: 174357 - DNA, 25 bp, SARS Virus
gacatacaccactcatgtatcggag

SEQ ID NO: 174358 - DNA, 25 bp, SARS Virus
acatacaccacatatgtatcggagt

SEQ ID NO: 174359 - DNA, 25 bp, SARS Virus
catacaccacacttgtatcggagta

SEQ ID NO: 174360 - DNA, 25 bp, SARS Virus
atacaccacacatgtatcggagtat

SEQ ID NO: 174361 - DNA, 25 bp, SARS Virus
tacaccacacatttatcggagtatt

SEQ ID NO: 174362 - DNA, 25 bp, SARS Virus
acaccacacatgtatcggagtattt

SEQ ID NO: 174363 - DNA, 25 bp, SARS Virus
caccacacatgtttcggagtatttt

SEQ ID NO: 174364 - DNA, 25 bp, SARS Virus
accacacatgtatcggagtattttg

SEQ ID NO: 174365 - DNA, 25 bp, SARS Virus
ccacacatgtattggagtattttga

SEQ ID NO: 174366 - DNA, 25 bp, SARS Virus
cacacatgtatctgagtattttgag

SEQ ID NO: 174367 - DNA, 25 bp, SARS Virus
acacatgtatcgtagtattttgagt

SEQ ID NO: 174368 - DNA, 25 bp, SARS Virus
cacatgtatcggtgtattttgagtc

SEQ ID NO: 174369 - DNA, 25 bp, SARS Virus
acatgtatcggattattttgagtcc

SEQ ID NO: 174370 - DNA, 25 bp, SARS Virus
catgtatcggagtattttgagtcca

SEQ ID NO: 174371 - DNA, 25 bp, SARS Virus
atgtatcggagttttttgagtccaa

SEQ ID NO: 174372 - DNA, 25 bp, SARS Virus
tgtatcggagtattttgagtccaag

SEQ ID NO: 174373 - DNA, 25 bp, SARS Virus
gtatcggagtattttgagtccaagg

SEQ ID NO: 174374 - DNA, 25 bp, SARS Virus
tatcggagtattttgagtccaaggg

SEQ ID NO: 174375 - DNA, 25 bp, SARS Virus
atcggagtattttgagtccaagggt

SEQ ID NO: 174376 - DNA, 25 bp, SARS Virus
tcggagtatttttagtccaagggtc

SEQ ID NO: 174377 - DNA, 25 bp, SARS Virus
cggagtattttgtgtccaagggtca

SEQ ID NO: 174378 - DNA, 25 bp, SARS Virus
ggagtattttgattccaagggtcat

SEQ ID NO: 174379 - DNA, 25 bp, SARS Virus
gagtattttgagtccaagggtcatg

SEQ ID NO: 174380 - DNA, 25 bp, SARS Virus
agtattttgagttcaagggtcatgg

SEQ ID NO: 174381 - DNA, 25 bp, SARS Virus
gtattttgagtctaagggtcatggc

SEQ ID NO: 174382 - DNA, 25 bp, SARS Virus
tattttgagtcctagggtcatggca

SEQ ID NO: 174383 - DNA, 25 bp, SARS Virus
attttgagtccatgggtcatggcac

SEQ ID NO: 174384 - DNA, 25 bp, SARS Virus
ttttgagtccaatggtcatggcact

SEQ ID NO: 174385 - DNA, 25 bp, SARS Virus
tttgagtccaagtgtcatggcactc

SEQ ID NO: 174386 - DNA, 25 bp, SARS Virus
ttgagtccaaggttcatggcactcc

SEQ ID NO: 174387 - DNA, 25 bp, SARS Virus
tgagtccaagggtcatggcactcca

SEQ ID NO: 174388 - DNA, 25 bp, SARS Virus
gagtccaagggttatggcactccac

SEQ ID NO: 174389 - DNA, 25 bp, SARS Virus
agtccaagggtcttggcactccaca

SEQ ID NO: 174390 - DNA, 25 bp, SARS Virus
gtccaagggtcatggcactccacaa

SEQ ID NO: 174391 - DNA, 25 bp, SARS Virus
tccaagggtcattgcactccacaat

SEQ ID NO: 174392 - DNA, 25 bp, SARS Virus
ccaagggtcatgtcactccacaata

SEQ ID NO: 174393 - DNA, 25 bp, SARS Virus
caagggtcatggtactccacaatag

SEQ ID NO: 174394 - DNA, 25 bp, SARS Virus
aagggtcatggctctccacaatagt

SEQ ID NO: 174395 - DNA, 25 bp, SARS Virus
agggtcatggcattccacaatagta

SEQ ID NO: 174396 - DNA, 25 bp, SARS Virus
gggtcatggcactccacaatagtaa

SEQ ID NO: 174397 - DNA, 25 bp, SARS Virus
ggtcatggcacttcacaatagtaat

SEQ ID NO: 174398 - DNA, 25 bp, SARS Virus
gtcatggcactctacaatagtaatc

SEQ ID NO: 174399 - DNA, 25 bp, SARS Virus
tcatggcactcctcaatagtaatca

SEQ ID NO: 174400 - DNA, 25 bp, SARS Virus
catggcactccataatagtaatcaa

SEQ ID NO: 174401 - DNA, 25 bp, SARS Virus
atggcactccactatagtaatcaat

SEQ ID NO: 174402 - DNA, 25 bp, SARS Virus
tggcactccacattagtaatcaatc

SEQ ID NO: 174403 - DNA, 25 bp, SARS Virus
ggcactccacaatagtaatcaatcg

SEQ ID NO: 174404 - DNA, 25 bp, SARS Virus
gcactccacaattgtaatcaatcgt

SEQ ID NO: 174405 - DNA, 25 bp, SARS Virus
cactccacaatattaatcaatcgta

SEQ ID NO: 174406 - DNA, 25 bp, SARS Virus
actccacaatagtaatcaatcgtaa

SEQ ID NO: 174407 - DNA, 25 bp, SARS Virus
ctccacaatagttatcaatcgtaat

SEQ ID NO: 174408 - DNA, 25 bp, SARS Virus
tccacaatagtattcaatcgtaatg

SEQ ID NO: 174409 - DNA, 25 bp, SARS Virus
ccacaatagtaatcaatcgtaatgc

SEQ ID NO: 174410 - DNA, 25 bp, SARS Virus
cacaatagtaattaatcgtaatgcc

SEQ ID NO: 174411 - DNA, 25 bp, SARS Virus
acaatagtaatctatcgtaatgcct

SEQ ID NO: 174412 - DNA, 25 bp, SARS Virus
caatagtaatcattcgtaatgcctt

SEQ ID NO: 174413 - DNA, 25 bp, SARS Virus
aatagtaatcaatcgtaatgcctta

SEQ ID NO: 174414 - DNA, 25 bp, SARS Virus
atagtaatcaattgtaatgccttat

SEQ ID NO: 174415 - DNA, 25 bp, SARS Virus
tagtaatcaatcttaatgccttatg

SEQ ID NO: 174416 - DNA, 25 bp, SARS Virus
agtaatcaatcgtaatgccttatgt

SEQ ID NO: 174417 - DNA, 25 bp, SARS Virus
gtaatcaatcgttatgccttatgta

SEQ ID NO: 174418 - DNA, 25 bp, SARS Virus
taatcaatcgtattgccttatgtac

SEQ ID NO: 174419 - DNA, 25 bp, SARS Virus
aatcaatcgtaatgccttatgtaca

SEQ ID NO: 174420 - DNA, 25 bp, SARS Virus
atcaatcgtaattccttatgtacag

SEQ ID NO: 174421 - DNA, 25 bp, SARS Virus
tcaatcgtaatgtcttatgtacagg

SEQ ID NO: 174422 - DNA, 25 bp, SARS Virus
caatcgtaatgctttatgtacaggt

SEQ ID NO: 174423 - DNA, 25 bp, SARS Virus
aatcgtaatgccttatgtacaggtt

SEQ ID NO: 174424 - DNA, 25 bp, SARS Virus
atcgtaatgccttatgtacaggttg

SEQ ID NO: 174425 - DNA, 25 bp, SARS Virus
tcgtaatgccttttgtacaggttgt

SEQ ID NO: 174426 - DNA, 25 bp, SARS Virus
cgtaatgccttatgtacaggttgta

SEQ ID NO: 174427 - DNA, 25 bp, SARS Virus
gtaatgccttatttacaggttgtac

SEQ ID NO: 174428 - DNA, 25 bp, SARS Virus
taatgccttatgtacaggttgtaca

SEQ ID NO: 174429 - DNA, 25 bp, SARS Virus
aatgccttatgttcaggttgtacac

SEQ ID NO: 174430 - DNA, 25 bp, SARS Virus
atgccttatgtataggttgtacacc

SEQ ID NO: 174431 - DNA, 25 bp, SARS Virus
tgccttatgtactggttgtacaccg

SEQ ID NO: 174432 - DNA, 25 bp, SARS Virus
gccttatgtacatgttgtacaccgg

SEQ ID NO: 174433 - DNA, 25 bp, SARS Virus
ccttatgtacagtttgtacaccggt

SEQ ID NO: 174434 - DNA, 25 bp, SARS Virus
cttatgtacaggttgtacaccggtc

SEQ ID NO: 174435 - DNA, 25 bp, SARS Virus
ttatgtacaggttgtacaccggtca

SEQ ID NO: 174436 - DNA, 25 bp, SARS Virus
tatgtacaggttttacaccggtcat

SEQ ID NO: 174437 - DNA, 25 bp, SARS Virus
atgtacaggttgtacaccggtcatt

SEQ ID NO: 174438 - DNA, 25 bp, SARS Virus
tgtacaggttgttcaccggtcattc

SEQ ID NO: 174439 - DNA, 25 bp, SARS Virus
gtacaggttgtataccggtcattcg

SEQ ID NO: 174440 - DNA, 25 bp, SARS Virus
tacaggttgtactccggtcattcga

SEQ ID NO: 174441 - DNA, 25 bp, SARS Virus
acaggttgtacatcggtcattcgag

SEQ ID NO: 174442 - DNA, 25 bp, SARS Virus
caggttgtacactggtcattcgagt

SEQ ID NO: 174443 - DNA, 25 bp, SARS Virus
aggttgtacacctgtcattcgagta

SEQ ID NO: 174444 - DNA, 25 bp, SARS Virus
ggttgtacaccgttcattcgagtag

SEQ ID NO: 174445 - DNA, 25 bp, SARS Virus
gttgtacaccggtcattcgagtagt

SEQ ID NO: 174446 - DNA, 25 bp, SARS Virus
ttgtacaccggttattcgagtagta

SEQ ID NO: 174447 - DNA, 25 bp, SARS Virus
tgtacaccggtctttcgagtagtac

SEQ ID NO: 174448 - DNA, 25 bp, SARS Virus
gtacaccggtcattcgagtagtaca

SEQ ID NO: 174449 - DNA, 25 bp, SARS Virus
tacaccggtcattcgagtagtacat

SEQ ID NO: 174450 - DNA, 25 bp, SARS Virus
acaccggtcatttgagtagtacatt

SEQ ID NO: 174451 - DNA, 25 bp, SARS Virus
caccggtcattctagtagtacattg

SEQ ID NO: 174452 - DNA, 25 bp, SARS Virus
accggtcattcgtgtagtacattga

SEQ ID NO: 174453 - DNA, 25 bp, SARS Virus
ccggtcattcgattagtacattgaa

SEQ ID NO: 174454 - DNA, 25 bp, SARS Virus
cggtcattcgagtagtacattgaaa

SEQ ID NO: 174455 - DNA, 25 bp, SARS Virus
ggtcattcgagttgtacattgaaag

SEQ ID NO: 174456 - DNA, 25 bp, SARS Virus
gtcattcgagtattacattgaaaga

SEQ ID NO: 174457 - DNA, 25 bp, SARS Virus
tcattcgagtagtacattgaaagat

SEQ ID NO: 174458 - DNA, 25 bp, SARS Virus
cattcgagtagttcattgaaagatt

SEQ ID NO: 174459 - DNA, 25 bp, SARS Virus
attcgagtagtatattgaaagatta

SEQ ID NO: 174460 - DNA, 25 bp, SARS Virus
ttcgagtagtactttgaaagattac

SEQ ID NO: 174461 - DNA, 25 bp, SARS Virus
tcgagtagtacattgaaagattaca

SEQ ID NO: 174462 - DNA, 25 bp, SARS Virus
cgagtagtacattgaaagattacat

SEQ ID NO: 174463 - DNA, 25 bp, SARS Virus
gagtagtacatttaaagattacata

SEQ ID NO: 174464 - DNA, 25 bp, SARS Virus
agtagtacattgtaagattacataa

SEQ ID NO: 174465 - DNA, 25 bp, SARS Virus
gtagtacattgatagattacataac

SEQ ID NO: 174466 - DNA, 25 bp, SARS Virus
tagtacattgaatgattacataaca

SEQ ID NO: 174467 - DNA, 25 bp, SARS Virus
agtacattgaaatattacataacat

SEQ ID NO: 174468 - DNA, 25 bp, SARS Virus
gtacattgaaagtttacataacatt

SEQ ID NO: 174469 - DNA, 25 bp, SARS Virus
tacattgaaagattacataacattt

SEQ ID NO: 174470 - DNA, 25 bp, SARS Virus
acattgaaagattacataacattta

SEQ ID NO: 174471 - DNA, 25 bp, SARS Virus
cattgaaagatttcataacatttat

SEQ ID NO: 174472 - DNA, 25 bp, SARS Virus
attgaaagattatataacatttatg

SEQ ID NO: 174473 - DNA, 25 bp, SARS Virus
ttgaaagattacttaacatttatgt

SEQ ID NO: 174474 - DNA, 25 bp, SARS Virus
tgaaagattacataacatttatgtt

SEQ ID NO: 174475 - DNA, 25 bp, SARS Virus
gaaagattacattacatttatgttc

SEQ ID NO: 174476 - DNA, 25 bp, SARS Virus
aaagattacatatcatttatgttca

SEQ ID NO: 174477 - DNA, 25 bp, SARS Virus
aagattacataatatttatgttcac

SEQ ID NO: 174478 - DNA, 25 bp, SARS Virus
agattacataacttttatgttcact

SEQ ID NO: 174479 - DNA, 25 bp, SARS Virus
gattacataacatttatgttcactt

SEQ ID NO: 174480 - DNA, 25 bp, SARS Virus
attacataacatttatgttcacttt

SEQ ID NO: 174481 - DNA, 25 bp, SARS Virus
ttacataacatttatgttcactttc

SEQ ID NO: 174482 - DNA, 25 bp, SARS Virus
tacataacatttttgttcactttct

SEQ ID NO: 174483 - DNA, 25 bp, SARS Virus
acataacatttatgttcactttctg

SEQ ID NO: 174484 - DNA, 25 bp, SARS Virus
cataacatttattttcactttctgt

SEQ ID NO: 174485 - DNA, 25 bp, SARS Virus
ataacatttatgttcactttctgta

SEQ ID NO: 174486 - DNA, 25 bp, SARS Virus
taacatttatgttcactttctgtag

SEQ ID NO: 174487 - DNA, 25 bp, SARS Virus
aacatttatgtttactttctgtagt

SEQ ID NO: 174488 - DNA, 25 bp, SARS Virus
acatttatgttctctttctgtagtc

SEQ ID NO: 174489 - DNA, 25 bp, SARS Virus
catttatgttcattttctgtagtcg

SEQ ID NO: 174490 - DNA, 25 bp, SARS Virus
atttatgttcactttctgtagtcgt

SEQ ID NO: 174491 - DNA, 25 bp, SARS Virus
tttatgttcactttctgtagtcgta

SEQ ID NO: 174492 - DNA, 25 bp, SARS Virus
ttatgttcactttctgtagtcgtat

SEQ ID NO: 174493 - DNA, 25 bp, SARS Virus
tatgttcactttttgtagtcgtatg

SEQ ID NO: 174494 - DNA, 25 bp, SARS Virus
atgttcactttctgtagtcgtatga

SEQ ID NO: 174495 - DNA, 25 bp, SARS Virus
tgttcactttctttagtcgtatgag

SEQ ID NO: 174496 - DNA, 25 bp, SARS Virus
gttcactttctgtagtcgtatgagg

SEQ ID NO: 174497 - DNA, 25 bp, SARS Virus
ttcactttctgttgtcgtatgagga

SEQ ID NO: 174498 - DNA, 25 bp, SARS Virus
tcactttctgtattcgtatgaggac

SEQ ID NO: 174499 - DNA, 25 bp, SARS Virus
cactttctgtagtcgtatgaggact

SEQ ID NO: 174500 - DNA, 25 bp, SARS Virus
actttctgtagttgtatgaggacta

SEQ ID NO: 174501 - DNA, 25 bp, SARS Virus
ctttctgtagtcttatgaggactaa

SEQ ID NO: 174502 - DNA, 25 bp, SARS Virus
tttctgtagtcgtatgaggactaat

SEQ ID NO: 174503 - DNA, 25 bp, SARS Virus
ttctgtagtcgtttgaggactaatc

SEQ ID NO: 174504 - DNA, 25 bp, SARS Virus
tctgtagtcgtatgaggactaatcc

SEQ ID NO: 174505 - DNA, 25 bp, SARS Virus
ctgtagtcgtattaggactaatcct

SEQ ID NO: 174506 - DNA, 25 bp, SARS Virus
tgtagtcgtatgtggactaatccta

SEQ ID NO: 174507 - DNA, 25 bp, SARS Virus
gtagtcgtatgatgactaatcctac

SEQ ID NO: 174508 - DNA, 25 bp, SARS Virus
tagtcgtatgagtactaatcctaca

SEQ ID NO: 174509 - DNA, 25 bp, SARS Virus
agtcgtatgaggtctaatcctacaa

SEQ ID NO: 174510 - DNA, 25 bp, SARS Virus
gtcgtatgaggattaatcctacaaa

SEQ ID NO: 174511 - DNA, 25 bp, SARS Virus
tcgtatgaggactaatcctacaaaa

SEQ ID NO: 174512 - DNA, 25 bp, SARS Virus
cgtatgaggacttatcctacaaaac

SEQ ID NO: 174513 - DNA, 25 bp, SARS Virus
gtatgaggactattcctacaaaaca

SEQ ID NO: 174514 - DNA, 25 bp, SARS Virus
tatgaggactaatcctacaaaacat

SEQ ID NO: 174515 - DNA, 25 bp, SARS Virus
atgaggactaattctacaaaacatt

SEQ ID NO: 174516 - DNA, 25 bp, SARS Virus
tgaggactaatcttacaaaacattc

SEQ ID NO: 174517 - DNA, 25 bp, SARS Virus
gaggactaatcctacaaaacattca

SEQ ID NO: 174518 - DNA, 25 bp, SARS Virus
aggactaatccttcaaaacattcac

SEQ ID NO: 174519 - DNA, 25 bp, SARS Virus
ggactaatcctataaaacattcacc

SEQ ID NO: 174520 - DNA, 25 bp, SARS Virus
gactaatcctactaaacattcaccc

SEQ ID NO: 174521 - DNA, 25 bp, SARS Virus
actaatcctacataacattcaccca

SEQ ID NO: 174522 - DNA, 25 bp, SARS Virus
ctaatcctacaatacattcacccat

SEQ ID NO: 174523 - DNA, 25 bp, SARS Virus
taatcctacaaatcattcacccatt

SEQ ID NO: 174524 - DNA, 25 bp, SARS Virus
aatcctacaaaatattcacccattc

SEQ ID NO: 174525 - DNA, 25 bp, SARS Virus
atcctacaaaactttcacccattcg

SEQ ID NO: 174526 - DNA, 25 bp, SARS Virus
tcctacaaaacattcacccattcgt

SEQ ID NO: 174527 - DNA, 25 bp, SARS Virus
cctacaaaacattcacccattcgta

SEQ ID NO: 174528 - DNA, 25 bp, SARS Virus
ctacaaaacatttacccattcgtag

SEQ ID NO: 174529 - DNA, 25 bp, SARS Virus
tacaaaacattctcccattcgtagt

SEQ ID NO: 174530 - DNA, 25 bp, SARS Virus
acaaaacattcatccattcgtagtt

SEQ ID NO: 174531 - DNA, 25 bp, SARS Virus
caaaacattcactcattcgtagtta

SEQ ID NO: 174532 - DNA, 25 bp, SARS Virus
aaaacattcacctattcgtagttat

SEQ ID NO: 174533 - DNA, 25 bp, SARS Virus
aaacattcaccctttcgtagttatc

SEQ ID NO: 174534 - DNA, 25 bp, SARS Virus
aacattcacccattcgtagttatcg

SEQ ID NO: 174535 - DNA, 25 bp, SARS Virus
acattcacccattcgtagttatcgg

SEQ ID NO: 174536 - DNA, 25 bp, SARS Virus
cattcacccatttgtagttatcggt

SEQ ID NO: 174537 - DNA, 25 bp, SARS Virus
attcacccattcttagttatcggtc

SEQ ID NO: 174538 - DNA, 25 bp, SARS Virus
ttcacccattcgtagttatcggtca

SEQ ID NO: 174539 - DNA, 25 bp, SARS Virus
tcacccattcgttgttatcggtcac

SEQ ID NO: 174540 - DNA, 25 bp, SARS Virus
cacccattcgtatttatcggtcact

SEQ ID NO: 174541 - DNA, 25 bp, SARS Virus
acccattcgtagttatcggtcactg

SEQ ID NO: 174542 - DNA, 25 bp, SARS Virus
cccattcgtagttatcggtcactgt

SEQ ID NO: 174543 - DNA, 25 bp, SARS Virus
ccattcgtagttttcggtcactgtg

SEQ ID NO: 174544 - DNA, 25 bp, SARS Virus
cattcgtagttatcggtcactgtgc

SEQ ID NO: 174545 - DNA, 25 bp, SARS Virus
attcgtagttattggtcactgtgct

SEQ ID NO: 174546 - DNA, 25 bp, SARS Virus
ttcgtagttatctgtcactgtgctt

SEQ ID NO: 174547 - DNA, 25 bp, SARS Virus
tcgtagttatcgttcactgtgcttg

SEQ ID NO: 174548 - DNA, 25 bp, SARS Virus
cgtagttatcggtcactgtgcttgg

SEQ ID NO: 174549 - DNA, 25 bp, SARS Virus
gtagttatcggttactgtgcttgga

SEQ ID NO: 174550 - DNA, 25 bp, SARS Virus
tagttatcggtctctgtgcttggaa

SEQ ID NO: 174551 - DNA, 25 bp, SARS Virus
agttatcggtcattgtgcttggaaa

SEQ ID NO: 174552 - DNA, 25 bp, SARS Virus
gttatcggtcactgtgcttggaaag

SEQ ID NO: 174553 - DNA, 25 bp, SARS Virus
ttatcggtcactttgcttggaaagt

SEQ ID NO: 174554 - DNA, 25 bp, SARS Virus
tatcggtcactgtgcttggaaagtt

SEQ ID NO: 174555 - DNA, 25 bp, SARS Virus
atcggtcactgttcttggaaagtta

SEQ ID NO: 174556 - DNA, 25 bp, SARS Virus
tcggtcactgtgtttggaaagttag

SEQ ID NO: 174557 - DNA, 25 bp, SARS Virus
cggtcactgtgcttggaaagttagt

SEQ ID NO: 174558 - DNA, 25 bp, SARS Virus
ggtcactgtgcttggaaagttagta

SEQ ID NO: 174559 - DNA, 25 bp, SARS Virus
gtcactgtgctttgaaagttagtat

SEQ ID NO: 174560 - DNA, 25 bp, SARS Virus
tcactgtgcttgtaaagttagtatt

SEQ ID NO: 174561 - DNA, 25 bp, SARS Virus
cactgtgcttggtaagttagtattc

SEQ ID NO: 174562 - DNA, 25 bp, SARS Virus
actgtgcttggatagttagtattca

SEQ ID NO: 174563 - DNA, 25 bp, SARS Virus
ctgtgcttggaatgttagtattcac

SEQ ID NO: 174564 - DNA, 25 bp, SARS Virus
tgtgcttggaaatttagtattcaca

SEQ ID NO: 174565 - DNA, 25 bp, SARS Virus
gtgcttggaaagttagtattcacat

SEQ ID NO: 174566 - DNA, 25 bp, SARS Virus
tgcttggaaagttagtattcacatg

SEQ ID NO: 174567 - DNA, 25 bp, SARS Virus
gcttggaaagtttgtattcacatgg

SEQ ID NO: 174568 - DNA, 25 bp, SARS Virus
cttggaaagttattattcacatggt

SEQ ID NO: 174569 - DNA, 25 bp, SARS Virus
ttggaaagttagtattcacatggta

SEQ ID NO: 174570 - DNA, 25 bp, SARS Virus
tggaaagttagttttcacatggtag

SEQ ID NO: 174571 - DNA, 25 bp, SARS Virus
ggaaagttagtattcacatggtaga

SEQ ID NO: 174572 - DNA, 25 bp, SARS Virus
gaaagttagtattcacatggtagac

SEQ ID NO: 174573 - DNA, 25 bp, SARS Virus
aaagttagtatttacatggtagaca

SEQ ID NO: 174574 - DNA, 25 bp, SARS Virus
aagttagtattctcatggtagacaa

SEQ ID NO: 174575 - DNA, 25 bp, SARS Virus
agttagtattcatatggtagacaaa

SEQ ID NO: 174576 - DNA, 25 bp, SARS Virus
gttagtattcacttggtagacaaaa

SEQ ID NO: 174577 - DNA, 25 bp, SARS Virus
ttagtattcacatggtagacaaaac

SEQ ID NO: 174578 - DNA, 25 bp, SARS Virus
tagtattcacattgtagacaaaact

SEQ ID NO: 174579 - DNA, 25 bp, SARS Virus
agtattcacatgttagacaaaactg

SEQ ID NO: 174580 - DNA, 25 bp, SARS Virus
gtattcacatggtagacaaaactgt

SEQ ID NO: 174581 - DNA, 25 bp, SARS Virus
tattcacatggttgacaaaactgtt

SEQ ID NO: 174582 - DNA, 25 bp, SARS Virus
attcacatggtatacaaaactgtta

SEQ ID NO: 174583 - DNA, 25 bp, SARS Virus
ttcacatggtagtcaaaactgttat

SEQ ID NO: 174584 - DNA, 25 bp, SARS Virus
tcacatggtagataaaactgttata

SEQ ID NO: 174585 - DNA, 25 bp, SARS Virus
cacatggtagactaaactgttatag

SEQ ID NO: 174586 - DNA, 25 bp, SARS Virus
acatggtagacataactgttatagt

SEQ ID NO: 174587 - DNA, 25 bp, SARS Virus
catggtagacaatactgttatagta

SEQ ID NO: 174588 - DNA, 25 bp, SARS Virus
atggtagacaaatctgttatagtag

SEQ ID NO: 174589 - DNA, 25 bp, SARS Virus
tggtagacaaaattgttatagtagc

SEQ ID NO: 174590 - DNA, 25 bp, SARS Virus
ggtagacaaaactgttatagtagct

SEQ ID NO: 174591 - DNA, 25 bp, SARS Virus
gtagacaaaacttttatagtagctg

SEQ ID NO: 174592 - DNA, 25 bp, SARS Virus
tagacaaaactgttatagtagctgt

SEQ ID NO: 174593 - DNA, 25 bp, SARS Virus
agacaaaactgttatagtagctgtt

SEQ ID NO: 174594 - DNA, 25 bp, SARS Virus
gacaaaactgttttagtagctgttt

SEQ ID NO: 174595 - DNA, 25 bp, SARS Virus
acaaaactgttatagtagctgtttt

SEQ ID NO: 174596 - DNA, 25 bp, SARS Virus
caaaactgttattgtagctgttttg

SEQ ID NO: 174597 - DNA, 25 bp, SARS Virus
aaaactgttatattagctgttttgt

SEQ ID NO: 174598 - DNA, 25 bp, SARS Virus
aaactgttatagtagctgttttgtc

SEQ ID NO: 174599 - DNA, 25 bp, SARS Virus
aactgttatagttgctgttttgtcg

SEQ ID NO: 174600 - DNA, 25 bp, SARS Virus
actgttatagtatctgttttgtcgg

SEQ ID NO: 174601 - DNA, 25 bp, SARS Virus
ctgttatagtagttgttttgtcgga

SEQ ID NO: 174602 - DNA, 25 bp, SARS Virus
tgttatagtagctgttttgtcggac

SEQ ID NO: 174603 - DNA, 25 bp, SARS Virus
gttatagtagcttttttgtcggacg

SEQ ID NO: 174604 - DNA, 25 bp, SARS Virus
ttatagtagctgttttgtcggacgc

SEQ ID NO: 174605 - DNA, 25 bp, SARS Virus
tatagtagctgttttgtcggacgcg

SEQ ID NO: 174606 - DNA, 25 bp, SARS Virus
atagtagctgttttgtcggacgcgg

SEQ ID NO: 174607 - DNA, 25 bp, SARS Virus
tagtagctgttttgtcggacgcgga

SEQ ID NO: 174608 - DNA, 25 bp, SARS Virus
agtagctgttttttcggacgcggat

SEQ ID NO: 174609 - DNA, 25 bp, SARS Virus
gtagctgttttgtcggacgcggatt

SEQ ID NO: 174610 - DNA, 25 bp, SARS Virus
tagctgttttgttggacgcggatta

SEQ ID NO: 174611 - DNA, 25 bp, SARS Virus
agctgttttgtctgacgcggattat

SEQ ID NO: 174612 - DNA, 25 bp, SARS Virus
gctgttttgtcgtacgcggattata

SEQ ID NO: 174613 - DNA, 25 bp, SARS Virus
ctgttttgtcggtcgcggattataa

SEQ ID NO: 174614 - DNA, 25 bp, SARS Virus
tgttttgtcggatgcggattataag

SEQ ID NO: 174615 - DNA, 25 bp, SARS Virus
gttttgtcggactcggattataaga

SEQ ID NO: 174616 - DNA, 25 bp, SARS Virus
ttttgtcggacgtggattataagaa

SEQ ID NO: 174617 - DNA, 25 bp, SARS Virus
tttgtcggacgctgattataagaac

SEQ ID NO: 174618 - DNA, 25 bp, SARS Virus
ttgtcggacgcgtattataagaact

SEQ ID NO: 174619 - DNA, 25 bp, SARS Virus
tgtcggacgcggtttataagaacta

SEQ ID NO: 174620 - DNA, 25 bp, SARS Virus
gtcggacgcggattataagaactac

SEQ ID NO: 174621 - DNA, 25 bp, SARS Virus
tcggacgcggattataagaactacc

SEQ ID NO: 174622 - DNA, 25 bp, SARS Virus
cggacgcggattttaagaactacct

SEQ ID NO: 174623 - DNA, 25 bp, SARS Virus
ggacgcggattataagaactaccta

SEQ ID NO: 174624 - DNA, 25 bp, SARS Virus
gacgcggattattagaactacctag

SEQ ID NO: 174625 - DNA, 25 bp, SARS Virus
acgcggattatatgaactacctaga

SEQ ID NO: 174626 - DNA, 25 bp, SARS Virus
cgcggattataataactacctagac

SEQ ID NO: 174627 - DNA, 25 bp, SARS Virus
gcggattataagtactacctagacc

SEQ ID NO: 174628 - DNA, 25 bp, SARS Virus
cggattataagatctacctagaccc

SEQ ID NO: 174629 - DNA, 25 bp, SARS Virus
ggattataagaattacctagaccca

SEQ ID NO: 174630 - DNA, 25 bp, SARS Virus
gattataagaactacctagacccat

SEQ ID NO: 174631 - DNA, 25 bp, SARS Virus
attataagaacttcctagacccatt

SEQ ID NO: 174632 - DNA, 25 bp, SARS Virus
ttataagaactatctagacccattc

SEQ ID NO: 174633 - DNA, 25 bp, SARS Virus
tataagaactacttagacccattcc

SEQ ID NO: 174634 - DNA, 25 bp, SARS Virus
ataagaactacctagacccattccg

SEQ ID NO: 174635 - DNA, 25 bp, SARS Virus
taagaactaccttgacccattccgt

SEQ ID NO: 174636 - DNA, 25 bp, SARS Virus
aagaactacctatacccattccgtc

SEQ ID NO: 174637 - DNA, 25 bp, SARS Virus
agaactacctagtcccattccgtcc

SEQ ID NO: 174638 - DNA, 25 bp, SARS Virus
gaactacctagatccattccgtcca

SEQ ID NO: 174639 - DNA, 25 bp, SARS Virus
aactacctagactcattccgtccat

SEQ ID NO: 174640 - DNA, 25 bp, SARS Virus
actacctagacctattccgtccatg

SEQ ID NO: 174641 - DNA, 25 bp, SARS Virus
ctacctagaccctttccgtccatgt

SEQ ID NO: 174642 - DNA, 25 bp, SARS Virus
tacctagacccattccgtccatgtg

SEQ ID NO: 174643 - DNA, 25 bp, SARS Virus
acctagacccattccgtccatgtgc

SEQ ID NO: 174644 - DNA, 25 bp, SARS Virus
cctagacccatttcgtccatgtgca

SEQ ID NO: 174645 - DNA, 25 bp, SARS Virus
ctagacccattctgtccatgtgcat

SEQ ID NO: 174646 - DNA, 25 bp, SARS Virus
tagacccattccttccatgtgcatt

SEQ ID NO: 174647 - DNA, 25 bp, SARS Virus
agacccattccgtccatgtgcatta

SEQ ID NO: 174648 - DNA, 25 bp, SARS Virus
gacccattccgttcatgtgcattag

SEQ ID NO: 174649 - DNA, 25 bp, SARS Virus
acccattccgtctatgtgcattagt

SEQ ID NO: 174650 - DNA, 25 bp, SARS Virus
cccattccgtccttgtgcattagta

SEQ ID NO: 174651 - DNA, 25 bp, SARS Virus
ccattccgtccatgtgcattagtag

SEQ ID NO: 174652 - DNA, 25 bp, SARS Virus
cattccgtccatttgcattagtaga

SEQ ID NO: 174653 - DNA, 25 bp, SARS Virus
attccgtccatgtgcattagtagag

SEQ ID NO: 174654 - DNA, 25 bp, SARS Virus
ttccgtccatgttcattagtagagg

SEQ ID NO: 174655 - DNA, 25 bp, SARS Virus
tccgtccatgtgtattagtagagga

SEQ ID NO: 174656 - DNA, 25 bp, SARS Virus
ccgtccatgtgctttagtagaggaa

SEQ ID NO: 174657 - DNA, 25 bp, SARS Virus
cgtccatgtgcattagtagaggaac

SEQ ID NO: 174658 - DNA, 25 bp, SARS Virus
gtccatgtgcattagtagaggaaca

SEQ ID NO: 174659 - DNA, 25 bp, SARS Virus
tccatgtgcatttgtagaggaacaa

SEQ ID NO: 174660 - DNA, 25 bp, SARS Virus
ccatgtgcattattagaggaacaaa

SEQ ID NO: 174661 - DNA, 25 bp, SARS Virus
catgtgcattagtagaggaacaaat

SEQ ID NO: 174662 - DNA, 25 bp, SARS Virus
atgtgcattagttgaggaacaaatt

SEQ ID NO: 174663 - DNA, 25 bp, SARS Virus
tgtgcattagtataggaacaaattg

SEQ ID NO: 174664 - DNA, 25 bp, SARS Virus
gtgcattagtagtggaacaaattga

SEQ ID NO: 174665 - DNA, 25 bp, SARS Virus
tgcattagtagatgaacaaattgat

SEQ ID NO: 174666 - DNA, 25 bp, SARS Virus
gcattagtagagtaacaaattgatc

SEQ ID NO: 174667 - DNA, 25 bp, SARS Virus
cattagtagaggtacaaattgatcg

SEQ ID NO: 174668 - DNA, 25 bp, SARS Virus
attagtagaggatcaaattgatcgt

SEQ ID NO: 174669 - DNA, 25 bp, SARS Virus
ttagtagaggaataaattgatcgta

SEQ ID NO: 174670 - DNA, 25 bp, SARS Virus
tagtagaggaactaattgatcgtaa

SEQ ID NO: 174671 - DNA, 25 bp, SARS Virus
agtagaggaacatattgatcgtaac

SEQ ID NO: 174672 - DNA, 25 bp, SARS Virus
gtagaggaacaatttgatcgtaaca

SEQ ID NO: 174673 - DNA, 25 bp, SARS Virus
tagaggaacaaattgatcgtaacat

SEQ ID NO: 174674 - DNA, 25 bp, SARS Virus
agaggaacaaattgatcgtaacata

SEQ ID NO: 174675 - DNA, 25 bp, SARS Virus
gaggaacaaatttatcgtaacatac

SEQ ID NO: 174676 - DNA, 25 bp, SARS Virus
aggaacaaattgttcgtaacatacg

SEQ ID NO: 174677 - DNA, 25 bp, SARS Virus
ggaacaaattgatcgtaacatacga

SEQ ID NO: 174678 - DNA, 25 bp, SARS Virus
gaacaaattgattgtaacatacgac

SEQ ID NO: 174679 - DNA, 25 bp, SARS Virus
aacaaattgatcttaacatacgaca

SEQ ID NO: 174680 - DNA, 25 bp, SARS Virus
acaaattgatcgtaacatacgacac

SEQ ID NO: 174681 - DNA, 25 bp, SARS Virus
caaattgatcgttacatacgacact

SEQ ID NO: 174682 - DNA, 25 bp, SARS Virus
aaattgatcgtatcatacgacactc

SEQ ID NO: 174683 - DNA, 25 bp, SARS Virus
aattgatcgtaatatacgacactcg

SEQ ID NO: 174684 - DNA, 25 bp, SARS Virus
attgatcgtaacttacgacactcgt

SEQ ID NO: 174685 - DNA, 25 bp, SARS Virus
ttgatcgtaacatacgacactcgtt

SEQ ID NO: 174686 - DNA, 25 bp, SARS Virus
tgatcgtaacattcgacactcgttt

SEQ ID NO: 174687 - DNA, 25 bp, SARS Virus
gatcgtaacatatgacactcgtttt

SEQ ID NO: 174688 - DNA, 25 bp, SARS Virus
atcgtaacatactacactcgtttta

SEQ ID NO: 174689 - DNA, 25 bp, SARS Virus
tcgtaacatacgtcactcgttttaa

SEQ ID NO: 174690 - DNA, 25 bp, SARS Virus
cgtaacatacgatactcgttttaag

SEQ ID NO: 174691 - DNA, 25 bp, SARS Virus
gtaacatacgactctcgttttaagc

SEQ ID NO: 174692 - DNA, 25 bp, SARS Virus
taacatacgacattcgttttaagca

SEQ ID NO: 174693 - DNA, 25 bp, SARS Virus
aacatacgacactcgttttaagcac

SEQ ID NO: 174694 - DNA, 25 bp, SARS Virus
acatacgacacttgttttaagcact

SEQ ID NO: 174695 - DNA, 25 bp, SARS Virus
catacgacactctttttaagcactc

SEQ ID NO: 174696 - DNA, 25 bp, SARS Virus
atacgacactcgttttaagcactcc

SEQ ID NO: 174697 - DNA, 25 bp, SARS Virus
tacgacactcgttttaagcactcca

SEQ ID NO: 174698 - DNA, 25 bp, SARS Virus
acgacactcgttttaagcactccag

SEQ ID NO: 174699 - DNA, 25 bp, SARS Virus
cgacactcgttttaagcactccagg

SEQ ID NO: 174700 - DNA, 25 bp, SARS Virus
gacactcgtttttagcactccagga

SEQ ID NO: 174701 - DNA, 25 bp, SARS Virus
acactcgttttatgcactccaggaa

SEQ ID NO: 174702 - DNA, 25 bp, SARS Virus
cactcgttttaatcactccaggaaa

SEQ ID NO: 174703 - DNA, 25 bp, SARS Virus
actcgttttaagtactccaggaaat

SEQ ID NO: 174704 - DNA, 25 bp, SARS Virus
ctcgttttaagctctccaggaaatc

SEQ ID NO: 174705 - DNA, 25 bp, SARS Virus
tcgttttaagcattccaggaaatca

SEQ ID NO: 174706 - DNA, 25 bp, SARS Virus
cgttttaagcactccaggaaatcat

SEQ ID NO: 174707 - DNA, 25 bp, SARS Virus
gttttaagcacttcaggaaatcatt

SEQ ID NO: 174708 - DNA, 25 bp, SARS Virus
ttttaagcactctaggaaatcattc

SEQ ID NO: 174709 - DNA, 25 bp, SARS Virus
tttaagcactcctggaaatcattcc

SEQ ID NO: 174710 - DNA, 25 bp, SARS Virus
ttaagcactccatgaaatcattcca

SEQ ID NO: 174711 - DNA, 25 bp, SARS Virus
taagcactccagtaaatcattccag

SEQ ID NO: 174712 - DNA, 25 bp, SARS Virus
aagcactccaggtaatcattccagt

SEQ ID NO: 174713 - DNA, 25 bp, SARS Virus
agcactccaggatatcattccagtc

SEQ ID NO: 174714 - DNA, 25 bp, SARS Virus
gcactccaggaattcattccagtca

SEQ ID NO: 174715 - DNA, 25 bp, SARS Virus
cactccaggaaatcattccagtcag

SEQ ID NO: 174716 - DNA, 25 bp, SARS Virus
actccaggaaattattccagtcaga

SEQ ID NO: 174717 - DNA, 25 bp, SARS Virus
ctccaggaaatctttccagtcagag

SEQ ID NO: 174718 - DNA, 25 bp, SARS Virus
tccaggaaatcattccagtcagagt

SEQ ID NO: 174719 - DNA, 25 bp, SARS Virus
ccaggaaatcattccagtcagagtc

SEQ ID NO: 174720 - DNA, 25 bp, SARS Virus
caggaaatcatttcagtcagagtca

SEQ ID NO: 174721 - DNA, 25 bp, SARS Virus
aggaaatcattctagtcagagtcag

SEQ ID NO: 174722 - DNA, 25 bp, SARS Virus
ggaaatcattcctgtcagagtcagg

SEQ ID NO: 174723 - DNA, 25 bp, SARS Virus
gaaatcattccattcagagtcaggt

SEQ ID NO: 174724 - DNA, 25 bp, SARS Virus
aaatcattccagtcagagtcaggtt

SEQ ID NO: 174725 - DNA, 25 bp, SARS Virus
aatcattccagttagagtcaggttg

SEQ ID NO: 174726 - DNA, 25 bp, SARS Virus
atcattccagtctgagtcaggttgt

SEQ ID NO: 174727 - DNA, 25 bp, SARS Virus
tcattccagtcatagtcaggttgta

SEQ ID NO: 174728 - DNA, 25 bp, SARS Virus
cattccagtcagtgtcaggttgtaa

SEQ ID NO: 174729 - DNA, 25 bp, SARS Virus
attccagtcagattcaggttgtaaa

SEQ ID NO: 174730 - DNA, 25 bp, SARS Virus
ttccagtcagagtcaggttgtaaaa

SEQ ID NO: 174731 - DNA, 25 bp, SARS Virus
tccagtcagagttaggttgtaaaac

SEQ ID NO: 174732 - DNA, 25 bp, SARS Virus
ccagtcagagtctggttgtaaaacg

SEQ ID NO: 174733 - DNA, 25 bp, SARS Virus
cagtcagagtcatgttgtaaaacgg

SEQ ID NO: 174734 - DNA, 25 bp, SARS Virus
agtcagagtcagtttgtaaaacgga

SEQ ID NO: 174735 - DNA, 25 bp, SARS Virus
gtcagagtcaggttgtaaaacggag

SEQ ID NO: 174736 - DNA, 25 bp, SARS Virus
tcagagtcaggttgtaaaacggagt

SEQ ID NO: 174737 - DNA, 25 bp, SARS Virus
cagagtcaggttataaaacggagtc

SEQ ID NO: 174738 - DNA, 25 bp, SARS Virus
agagtcaggttgaaaaacggagtct

SEQ ID NO: 174739 - DNA, 25 bp, SARS Virus
gagtcaggttgtaaaacggagtctg

SEQ ID NO: 174740 - DNA, 25 bp, SARS Virus
agtcaggttgtaaaacggagtctgt

SEQ ID NO: 174741 - DNA, 25 bp, SARS Virus
gtcaggttgtaaaacggagtctgta

SEQ ID NO: 174742 - DNA, 25 bp, SARS Virus
tcaggttgtaaaacggagtctgtac

SEQ ID NO: 174743 - DNA, 25 bp, SARS Virus
caggttgtaaaaaggagtctgtact

SEQ ID NO: 174744 - DNA, 25 bp, SARS Virus
aggttgtaaaacagagtctgtactt

SEQ ID NO: 174745 - DNA, 25 bp, SARS Virus
ggttgtaaaacgaagtctgtacttg

SEQ ID NO: 174746 - DNA, 25 bp, SARS Virus
gttgtaaaacggagtctgtacttgt

SEQ ID NO: 174747 - DNA, 25 bp, SARS Virus
ttgtaaaacggaatctgtacttgtg

SEQ ID NO: 174748 - DNA, 25 bp, SARS Virus
tgtaaaacggagactgtacttgtgt

SEQ ID NO: 174749 - DNA, 25 bp, SARS Virus
gtaaaacggagtatgtacttgtgta

SEQ ID NO: 174750 - DNA, 25 bp, SARS Virus
taaaacggagtcagtacttgtgtaa

SEQ ID NO: 174751 - DNA, 25 bp, SARS Virus
aaaacggagtctatacttgtgtaat

SEQ ID NO: 174752 - DNA, 25 bp, SARS Virus
aaacggagtctgaacttgtgtaata

SEQ ID NO: 174753 - DNA, 25 bp, SARS Virus
aacggagtctgtacttgtgtaataa

SEQ ID NO: 174754 - DNA, 25 bp, SARS Virus
acggagtctgtaattgtgtaataaa

SEQ ID NO: 174755 - DNA, 25 bp, SARS Virus
cggagtctgtacatgtgtaataaaa

SEQ ID NO: 174756 - DNA, 25 bp, SARS Virus
ggagtctgtactagtgtaataaaac

SEQ ID NO: 174757 - DNA, 25 bp, SARS Virus
gagtctgtacttatgtaataaaact

SEQ ID NO: 174758 - DNA, 25 bp, SARS Virus
agtctgtacttgagtaataaaacta

SEQ ID NO: 174759 - DNA, 25 bp, SARS Virus
gtctgtacttgtataataaaactat

SEQ ID NO: 174760 - DNA, 25 bp, SARS Virus
tctgtacttgtgaaataaaactatt

SEQ ID NO: 174761 - DNA, 25 bp, SARS Virus
ctgtacttgtgtaataaaactatta

SEQ ID NO: 174762 - DNA, 25 bp, SARS Virus
tgtacttgtgtaataaaactattat

SEQ ID NO: 174763 - DNA, 25 bp, SARS Virus
gtacttgtgtaaaaaaactattatt

SEQ ID NO: 174764 - DNA, 25 bp, SARS Virus
tacttgtgtaataaaactattattt

SEQ ID NO: 174765 - DNA, 25 bp, SARS Virus
acttgtgtaataaaactattatttc

SEQ ID NO: 174766 - DNA, 25 bp, SARS Virus
cttgtgtaataaaactattatttct

SEQ ID NO: 174767 - DNA, 25 bp, SARS Virus
ttgtgtaataaaactattatttctt

SEQ ID NO: 174768 - DNA, 25 bp, SARS Virus
tgtgtaataaaaatattatttcttg

SEQ ID NO: 174769 - DNA, 25 bp, SARS Virus
gtgtaataaaacaattatttcttga

SEQ ID NO: 174770 - DNA, 25 bp, SARS Virus
tgtaataaaactattatttcttgac

SEQ ID NO: 174771 - DNA, 25 bp, SARS Virus
gtaataaaactaatatttcttgacg

SEQ ID NO: 174772 - DNA, 25 bp, SARS Virus
taataaaactataatttcttgacgg

SEQ ID NO: 174773 - DNA, 25 bp, SARS Virus
aataaaactattatttcttgacgga

SEQ ID NO: 174774 - DNA, 25 bp, SARS Virus
ataaaactattaattcttgacggaa

SEQ ID NO: 174775 - DNA, 25 bp, SARS Virus
taaaactattatatcttgacggaat

SEQ ID NO: 174776 - DNA, 25 bp, SARS Virus
aaaactattattacttgacggaatt

SEQ ID NO: 174777 - DNA, 25 bp, SARS Virus
aaactattatttattgacggaattt

SEQ ID NO: 174778 - DNA, 25 bp, SARS Virus
aactattatttcatgacggaatttc

SEQ ID NO: 174779 - DNA, 25 bp, SARS Virus
actattatttctagacggaatttca

SEQ ID NO: 174780 - DNA, 25 bp, SARS Virus
ctattatttcttaacggaatttcaa

SEQ ID NO: 174781 - DNA, 25 bp, SARS Virus
tattatttcttgacggaatttcaag

SEQ ID NO: 174782 - DNA, 25 bp, SARS Virus
attatttcttgaaggaatttcaaga

SEQ ID NO: 174783 - DNA, 25 bp, SARS Virus
ttatttcttgacagaatttcaagaa

SEQ ID NO: 174784 - DNA, 25 bp, SARS Virus
tatttcttgacgaaatttcaagaat

SEQ ID NO: 174785 - DNA, 25 bp, SARS Virus
atttcttgacggaatttcaagaatt

SEQ ID NO: 174786 - DNA, 25 bp, SARS Virus
tttcttgacggaatttcaagaatta

SEQ ID NO: 174787 - DNA, 25 bp, SARS Virus
ttcttgacggaaattcaagaattac

SEQ ID NO: 174788 - DNA, 25 bp, SARS Virus
tcttgacggaatatcaagaattacg

SEQ ID NO: 174789 - DNA, 25 bp, SARS Virus
cttgacggaattacaagaattacga

SEQ ID NO: 174790 - DNA, 25 bp, SARS Virus
ttgacggaatttaaagaattacgat

SEQ ID NO: 174791 - DNA, 25 bp, SARS Virus
tgacggaatttcaagaattacgatc

SEQ ID NO: 174792 - DNA, 25 bp, SARS Virus
gacggaatttcaagaattacgatcg

SEQ ID NO: 174793 - DNA, 25 bp, SARS Virus
acggaatttcaaaaattacgatcga

SEQ ID NO: 174794 - DNA, 25 bp, SARS Virus
cggaatttcaagaattacgatcgat

SEQ ID NO: 174795 - DNA, 25 bp, SARS Virus
ggaatttcaagaattacgatcgatg

SEQ ID NO: 174796 - DNA, 25 bp, SARS Virus
gaatttcaagaaatacgatcgatga

SEQ ID NO: 174797 - DNA, 25 bp, SARS Virus
aatttcaagaataacgatcgatgat

SEQ ID NO: 174798 - DNA, 25 bp, SARS Virus
atttcaagaattacgatcgatgatt

SEQ ID NO: 174799 - DNA, 25 bp, SARS Virus
tttcaagaattaagatcgatgattt

SEQ ID NO: 174800 - DNA, 25 bp, SARS Virus
ttcaagaattacaatcgatgatttg

SEQ ID NO: 174801 - DNA, 25 bp, SARS Virus
tcaagaattacgatcgatgatttgg

SEQ ID NO: 174802 - DNA, 25 bp, SARS Virus
caagaattacgaacgatgatttgga

SEQ ID NO: 174803 - DNA, 25 bp, SARS Virus
aagaattacgatagatgatttggaa

SEQ ID NO: 174804 - DNA, 25 bp, SARS Virus
agaattacgatcaatgatttggaac

SEQ ID NO: 174805 - DNA, 25 bp, SARS Virus
gaattacgatcgatgatttggaact

SEQ ID NO: 174806 - DNA, 25 bp, SARS Virus
aattacgatcgaagatttggaactc

SEQ ID NO: 174807 - DNA, 25 bp, SARS Virus
attacgatcgataatttggaactcg

SEQ ID NO: 174808 - DNA, 25 bp, SARS Virus
ttacgatcgatgatttggaactcgg

SEQ ID NO: 174809 - DNA, 25 bp, SARS Virus
tacgatcgatgaattggaactcggc

SEQ ID NO: 174810 - DNA, 25 bp, SARS Virus
acgatcgatgatatggaactcggcg

SEQ ID NO: 174811 - DNA, 25 bp, SARS Virus
cgatcgatgattaggaactcggcgt

SEQ ID NO: 174812 - DNA, 25 bp, SARS Virus
gatcgatgatttagaactcggcgta

SEQ ID NO: 174813 - DNA, 25 bp, SARS Virus
atcgatgatttgaaactcggcgtat

SEQ ID NO: 174814 - DNA, 25 bp, SARS Virus
tcgatgatttggaactcggcgtatc

SEQ ID NO: 174815 - DNA, 25 bp, SARS Virus
cgatgatttggaactcggcgtatca

SEQ ID NO: 174816 - DNA, 25 bp, SARS Virus
gatgatttggaaatcggcgtatcaa

SEQ ID NO: 174817 - DNA, 25 bp, SARS Virus
atgatttggaacacggcgtatcaat

SEQ ID NO: 174818 - DNA, 25 bp, SARS Virus
tgatttggaactaggcgtatcaatg

SEQ ID NO: 174819 - DNA, 25 bp, SARS Virus
gatttggaactcagcgtatcaatga

SEQ ID NO: 174820 - DNA, 25 bp, SARS Virus
atttggaactcgacgtatcaatgac

SEQ ID NO: 174821 - DNA, 25 bp, SARS Virus
tttggaactcggagtatcaatgaca

SEQ ID NO: 174822 - DNA, 25 bp, SARS Virus
ttggaactcggcatatcaatgacaa

SEQ ID NO: 174823 - DNA, 25 bp, SARS Virus
tggaactcggcgaatcaatgacaat

SEQ ID NO: 174824 - DNA, 25 bp, SARS Virus
ggaactcggcgtatcaatgacaata

SEQ ID NO: 174825 - DNA, 25 bp, SARS Virus
gaactcggcgtaacaatgacaatat

SEQ ID NO: 174826 - DNA, 25 bp, SARS Virus
aactcggcgtataaatgacaatatc

SEQ ID NO: 174827 - DNA, 25 bp, SARS Virus
actcggcgtatcaatgacaatatcg

SEQ ID NO: 174828 - DNA, 25 bp, SARS Virus
ctcggcgtatcaatgacaatatcgt

SEQ ID NO: 174829 - DNA, 25 bp, SARS Virus
tcggcgtatcaaagacaatatcgtg

SEQ ID NO: 174830 - DNA, 25 bp, SARS Virus
cggcgtatcaataacaatatcgtgt

SEQ ID NO: 174831 - DNA, 25 bp, SARS Virus
ggcgtatcaatgacaatatcgtgtg

SEQ ID NO: 174832 - DNA, 25 bp, SARS Virus
gcgtatcaatgaaaatatcgtgtgt

SEQ ID NO: 174833 - DNA, 25 bp, SARS Virus
cgtatcaatgacaatatcgtgtgtt

SEQ ID NO: 174834 - DNA, 25 bp, SARS Virus
gtatcaatgacaatatcgtgtgttg

SEQ ID NO: 174835 - DNA, 25 bp, SARS Virus
tatcaatgacaaaatcgtgtgttgc

SEQ ID NO: 174836 - DNA, 25 bp, SARS Virus
atcaatgacaatatcgtgtgttgcc

SEQ ID NO: 174837 - DNA, 25 bp, SARS Virus
tcaatgacaataacgtgtgttgccg

SEQ ID NO: 174838 - DNA, 25 bp, SARS Virus
caatgacaatatagtgtgttgccgt

SEQ ID NO: 174839 - DNA, 25 bp, SARS Virus
aatgacaatatcatgtgttgccgta

SEQ ID NO: 174840 - DNA, 25 bp, SARS Virus
atgacaatatcgagtgttgccgtag

SEQ ID NO: 174841 - DNA, 25 bp, SARS Virus
tgacaatatcgtatgttgccgtagt

SEQ ID NO: 174842 - DNA, 25 bp, SARS Virus
gacaatatcgtgagttgccgtagta

SEQ ID NO: 174843 - DNA, 25 bp, SARS Virus
acaatatcgtgtattgccgtagtag

SEQ ID NO: 174844 - DNA, 25 bp, SARS Virus
caatatcgtgtgatgccgtagtagt

SEQ ID NO: 174845 - DNA, 25 bp, SARS Virus
aatatcgtgtgtagccgtagtagtc

SEQ ID NO: 174846 - DNA, 25 bp, SARS Virus
atatcgtgtgttaccgtagtagtct

SEQ ID NO: 174847 - DNA, 25 bp, SARS Virus
tatcgtgtgttgacgtagtagtctt

SEQ ID NO: 174848 - DNA, 25 bp, SARS Virus
atcgtgtgttgcagtagtagtcttt

SEQ ID NO: 174849 - DNA, 25 bp, SARS Virus
tcgtgtgttgccatagtagtctttc

SEQ ID NO: 174850 - DNA, 25 bp, SARS Virus
cgtgtgttgccgaagtagtctttct

SEQ ID NO: 174851 - DNA, 25 bp, SARS Virus
gtgtgttgccgtagtagtctttctt

SEQ ID NO: 174852 - DNA, 25 bp, SARS Virus
tgtgttgccgtaatagtctttctta

SEQ ID NO: 174853 - DNA, 25 bp, SARS Virus
gtgttgccgtagaagtctttcttag

SEQ ID NO: 174854 - DNA, 25 bp, SARS Virus
tgttgccgtagtagtctttcttagt

SEQ ID NO: 174855 - DNA, 25 bp, SARS Virus
gttgccgtagtaatctttcttagta

SEQ ID NO: 174856 - DNA, 25 bp, SARS Virus
ttgccgtagtagactttcttagtag

SEQ ID NO: 174857 - DNA, 25 bp, SARS Virus
tgccgtagtagtatttcttagtagt

SEQ ID NO: 174858 - DNA, 25 bp, SARS Virus
gccgtagtagtcattcttagtagta

SEQ ID NO: 174859 - DNA, 25 bp, SARS Virus
ccgtagtagtctatcttagtagtac

SEQ ID NO: 174860 - DNA, 25 bp, SARS Virus
cgtagtagtcttacttagtagtacc

SEQ ID NO: 174861 - DNA, 25 bp, SARS Virus
gtagtagtctttattagtagtacct

SEQ ID NO: 174862 - DNA, 25 bp, SARS Virus
tagtagtctttcatagtagtacctc

SEQ ID NO: 174863 - DNA, 25 bp, SARS Virus
agtagtctttctaagtagtacctct

SEQ ID NO: 174864 - DNA, 25 bp, SARS Virus
gtagtctttcttagtagtacctctt

SEQ ID NO: 174865 - DNA, 25 bp, SARS Virus
tagtctttcttaatagtacctcttt

SEQ ID NO: 174866 - DNA, 25 bp, SARS Virus
agtctttcttagaagtacctcttta

SEQ ID NO: 174867 - DNA, 25 bp, SARS Virus
gtctttcttagtagtacctctttac

SEQ ID NO: 174868 - DNA, 25 bp, SARS Virus
tctttcttagtaatacctctttaca

SEQ ID NO: 174869 - DNA, 25 bp, SARS Virus
ctttcttagtagaacctctttacaa

SEQ ID NO: 174870 - DNA, 25 bp, SARS Virus
tttcttagtagtacctctttacaaa

SEQ ID NO: 174871 - DNA, 25 bp, SARS Virus
ttcttagtagtaactctttacaaat

SEQ ID NO: 174872 - DNA, 25 bp, SARS Virus
tcttagtagtacatctttacaaatg

SEQ ID NO: 174873 - DNA, 25 bp, SARS Virus
cttagtagtaccactttacaaatgc

SEQ ID NO: 174874 - DNA, 25 bp, SARS Virus
ttagtagtacctatttacaaatgcg

SEQ ID NO: 174875 - DNA, 25 bp, SARS Virus
tagtagtacctcattacaaatgcgt

SEQ ID NO: 174876 - DNA, 25 bp, SARS Virus
agtagtacctctatacaaatgcgtc

SEQ ID NO: 174877 - DNA, 25 bp, SARS Virus
gtagtacctcttaacaaatgcgtcc

SEQ ID NO: 174878 - DNA, 25 bp, SARS Virus
tagtacctctttacaaatgcgtcca

SEQ ID NO: 174879 - DNA, 25 bp, SARS Virus
agtacctctttaaaaatgcgtccat

SEQ ID NO: 174880 - DNA, 25 bp, SARS Virus
gtacctctttacaaatgcgtccatt

SEQ ID NO: 174881 - DNA, 25 bp, SARS Virus
tacctctttacaaatgcgtccattc

SEQ ID NO: 174882 - DNA, 25 bp, SARS Virus
acctctttacaaatgcgtccattcg

SEQ ID NO: 174883 - DNA, 25 bp, SARS Virus
cctctttacaaaagcgtccattcgc

SEQ ID NO: 174884 - DNA, 25 bp, SARS Virus
ctctttacaaatacgtccattcgca

SEQ ID NO: 174885 - DNA, 25 bp, SARS Virus
tctttacaaatgagtccattcgcat

SEQ ID NO: 174886 - DNA, 25 bp, SARS Virus
ctttacaaatgcatccattcgcatt

SEQ ID NO: 174887 - DNA, 25 bp, SARS Virus
tttacaaatgcgaccattcgcattt

SEQ ID NO: 174888 - DNA, 25 bp, SARS Virus
ttacaaatgcgtacattcgcatttt

SEQ ID NO: 174889 - DNA, 25 bp, SARS Virus
tacaaatgcgtcaattcgcattttg

SEQ ID NO: 174890 - DNA, 25 bp, SARS Virus
acaaatgcgtccattcgcattttga

SEQ ID NO: 174891 - DNA, 25 bp, SARS Virus
caaatgcgtccaatcgcattttgag

SEQ ID NO: 174892 - DNA, 25 bp, SARS Virus
aaatgcgtccatacgcattttgagt

SEQ ID NO: 174893 - DNA, 25 bp, SARS Virus
aatgcgtccattagcattttgagta

SEQ ID NO: 174894 - DNA, 25 bp, SARS Virus
atgcgtccattcacattttgagtag

SEQ ID NO: 174895 - DNA, 25 bp, SARS Virus
tgcgtccattcgaattttgagtagg

SEQ ID NO: 174896 - DNA, 25 bp, SARS Virus
gcgtccattcgcattttgagtaggt

SEQ ID NO: 174897 - DNA, 25 bp, SARS Virus
cgtccattcgcaatttgagtaggtg

SEQ ID NO: 174898 - DNA, 25 bp, SARS Virus
gtccattcgcatattgagtaggtgc

SEQ ID NO: 174899 - DNA, 25 bp, SARS Virus
tccattcgcattatgagtaggtgct

SEQ ID NO: 174900 - DNA, 25 bp, SARS Virus
ccattcgcatttagagtaggtgctt

SEQ ID NO: 174901 - DNA, 25 bp, SARS Virus
cattcgcattttaagtaggtgctta

SEQ ID NO: 174902 - DNA, 25 bp, SARS Virus
attcgcattttgagtaggtgcttaa

SEQ ID NO: 174903 - DNA, 25 bp, SARS Virus
ttcgcattttgaataggtgcttaag

SEQ ID NO: 174904 - DNA, 25 bp, SARS Virus
tcgcattttgagaaggtgcttaagt

SEQ ID NO: 174905 - DNA, 25 bp, SARS Virus
cgcattttgagtaggtgcttaagta

SEQ ID NO: 174906 - DNA, 25 bp, SARS Virus
gcattttgagtaagtgcttaagtac

SEQ ID NO: 174907 - DNA, 25 bp, SARS Virus
cattttgagtagatgcttaagtact

SEQ ID NO: 174908 - DNA, 25 bp, SARS Virus
attttgagtaggagcttaagtacta

SEQ ID NO: 174909 - DNA, 25 bp, SARS Virus
ttttgagtaggtacttaagtactag

SEQ ID NO: 174910 - DNA, 25 bp, SARS Virus
tttgagtaggtgattaagtactagt

SEQ ID NO: 174911 - DNA, 25 bp, SARS Virus
ttgagtaggtgcataagtactagtt

SEQ ID NO: 174912 - DNA, 25 bp, SARS Virus
tgagtaggtgctaaagtactagttg

SEQ ID NO: 174913 - DNA, 25 bp, SARS Virus
gagtaggtgcttaagtactagttgt

SEQ ID NO: 174914 - DNA, 25 bp, SARS Virus
agtaggtgcttaagtactagttgta

SEQ ID NO: 174915 - DNA, 25 bp, SARS Virus
gtaggtgcttaaatactagttgtag

SEQ ID NO: 174916 - DNA, 25 bp, SARS Virus
taggtgcttaagaactagttgtagg

SEQ ID NO: 174917 - DNA, 25 bp, SARS Virus
aggtgcttaagtactagttgtaggg

SEQ ID NO: 174918 - DNA, 25 bp, SARS Virus
ggtgcttaagtaatagttgtaggga

SEQ ID NO: 174919 - DNA, 25 bp, SARS Virus
gtgcttaagtacaagttgtagggat

SEQ ID NO: 174920 - DNA, 25 bp, SARS Virus
tgcttaagtactagttgtagggata

SEQ ID NO: 174921 - DNA, 25 bp, SARS Virus
gcttaagtactaattgtagggataa

SEQ ID NO: 174922 - DNA, 25 bp, SARS Virus
cttaagtactagatgtagggataaa

SEQ ID NO: 174923 - DNA, 25 bp, SARS Virus
ttaagtactagtagtagggataaag

SEQ ID NO: 174924 - DNA, 25 bp, SARS Virus
taagtactagttatagggataaaga

SEQ ID NO: 174925 - DNA, 25 bp, SARS Virus
aagtactagttgaagggataaagat

SEQ ID NO: 174926 - DNA, 25 bp, SARS Virus
agtactagttgtagggataaagata

SEQ ID NO: 174927 - DNA, 25 bp, SARS Virus
gtactagttgtaaggataaagatat

SEQ ID NO: 174928 - DNA, 25 bp, SARS Virus
tactagttgtagagataaagatatc

SEQ ID NO: 174929 - DNA, 25 bp, SARS Virus
actagttgtaggaataaagatatct

SEQ ID NO: 174930 - DNA, 25 bp, SARS Virus
ctagttgtagggataaagatatctc

SEQ ID NO: 174931 - DNA, 25 bp, SARS Virus
tagttgtagggaaaaagatatctct

SEQ ID NO: 174932 - DNA, 25 bp, SARS Virus
agttgtagggataaagatatctctg

SEQ ID NO: 174933 - DNA, 25 bp, SARS Virus
gttgtagggataaagatatctctgt

SEQ ID NO: 174934 - DNA, 25 bp, SARS Virus
ttgtagggataaagatatctctgtg

SEQ ID NO: 174935 - DNA, 25 bp, SARS Virus
tgtagggataaaaatatctctgtga

SEQ ID NO: 174936 - DNA, 25 bp, SARS Virus
gtagggataaagatatctctgtgag

SEQ ID NO: 174937 - DNA, 25 bp, SARS Virus
tagggataaagaaatctctgtgagt

SEQ ID NO: 174938 - DNA, 25 bp, SARS Virus
agggataaagatatctctgtgagta

SEQ ID NO: 174939 - DNA, 25 bp, SARS Virus
gggataaagataactctgtgagtat

SEQ ID NO: 174940 - DNA, 25 bp, SARS Virus
ggataaagatatatctgtgagtatc

SEQ ID NO: 174941 - DNA, 25 bp, SARS Virus
gataaagatatcactgtgagtatct

SEQ ID NO: 174942 - DNA, 25 bp, SARS Virus
ataaagatatctatgtgagtatctc

SEQ ID NO: 174943 - DNA, 25 bp, SARS Virus
taaagatatctcagtgagtatctcg

SEQ ID NO: 174944 - DNA, 25 bp, SARS Virus
aaagatatctctatgagtatctcgg

SEQ ID NO: 174945 - DNA, 25 bp, SARS Virus
aagatatctctgagagtatctcgga

SEQ ID NO: 174946 - DNA, 25 bp, SARS Virus
agatatctctgtaagtatctcggac

SEQ ID NO: 174947 - DNA, 25 bp, SARS Virus
gatatctctgtgagtatctcggaca

SEQ ID NO: 174948 - DNA, 25 bp, SARS Virus
atatctctgtgaatatctcggacac

SEQ ID NO: 174949 - DNA, 25 bp, SARS Virus
tatctctgtgagaatctcggacaca

SEQ ID NO: 174950 - DNA, 25 bp, SARS Virus
atctctgtgagtatctcggacacaa

SEQ ID NO: 174951 - DNA, 25 bp, SARS Virus
tctctgtgagtaactcggacacaac

SEQ ID NO: 174952 - DNA, 25 bp, SARS Virus
ctctgtgagtatatcggacacaaca

SEQ ID NO: 174953 - DNA, 25 bp, SARS Virus
tctgtgagtatcacggacacaacat

SEQ ID NO: 174954 - DNA, 25 bp, SARS Virus
ctgtgagtatctaggacacaacatc

SEQ ID NO: 174955 - DNA, 25 bp, SARS Virus
tgtgagtatctcagacacaacatct

SEQ ID NO: 174956 - DNA, 25 bp, SARS Virus
gtgagtatctcgaacacaacatcta

SEQ ID NO: 174957 - DNA, 25 bp, SARS Virus
tgagtatctcggacacaacatctaa

SEQ ID NO: 174958 - DNA, 25 bp, SARS Virus
gagtatctcggaaacaacatctaac

SEQ ID NO: 174959 - DNA, 25 bp, SARS Virus
agtatctcggacacaacatctaacg

SEQ ID NO: 174960 - DNA, 25 bp, SARS Virus
gtatctcggacaaaacatctaacgc

SEQ ID NO: 174961 - DNA, 25 bp, SARS Virus
tatctcggacacaacatctaacgcc

SEQ ID NO: 174962 - DNA, 25 bp, SARS Virus
atctcggacacaacatctaacgcct

SEQ ID NO: 174963 - DNA, 25 bp, SARS Virus
tctcggacacaaaatctaacgcctg

SEQ ID NO: 174964 - DNA, 25 bp, SARS Virus
ctcggacacaacatctaacgcctgt

SEQ ID NO: 174965 - DNA, 25 bp, SARS Virus
tcggacacaacaactaacgcctgta

SEQ ID NO: 174966 - DNA, 25 bp, SARS Virus
cggacacaacatataacgcctgtat

SEQ ID NO: 174967 - DNA, 25 bp, SARS Virus
ggacacaacatcaaacgcctgtatg

SEQ ID NO: 174968 - DNA, 25 bp, SARS Virus
gacacaacatctaacgcctgtatga

SEQ ID NO: 174969 - DNA, 25 bp, SARS Virus
acacaacatctaacgcctgtatgaa

SEQ ID NO: 174970 - DNA, 25 bp, SARS Virus
cacaacatctaaagcctgtatgaac

SEQ ID NO: 174971 - DNA, 25 bp, SARS Virus
acaacatctaacacctgtatgaaca

SEQ ID NO: 174972 - DNA, 25 bp, SARS Virus
caacatctaacgactgtatgaacag

SEQ ID NO: 174973 - DNA, 25 bp, SARS Virus
aacatctaacgcatgtatgaacagt

SEQ ID NO: 174974 - DNA, 25 bp, SARS Virus
acatctaacgccagtatgaacagtc

SEQ ID NO: 174975 - DNA, 25 bp, SARS Virus
catctaacgcctatatgaacagtcg

SEQ ID NO: 174976 - DNA, 25 bp, SARS Virus
atctaacgcctgaatgaacagtcga

SEQ ID NO: 174977 - DNA, 25 bp, SARS Virus
tctaacgcctgtatgaacagtcgat

SEQ ID NO: 174978 - DNA, 25 bp, SARS Virus
ctaacgcctgtaagaacagtcgata

SEQ ID NO: 174979 - DNA, 25 bp, SARS Virus
taacgcctgtataaacagtcgatag

SEQ ID NO: 174980 - DNA, 25 bp, SARS Virus
aacgcctgtatgaacagtcgataga

SEQ ID NO: 174981 - DNA, 25 bp, SARS Virus
acgcctgtatgaacagtcgatagaa

SEQ ID NO: 174982 - DNA, 25 bp, SARS Virus
cgcctgtatgaaaagtcgatagaat

SEQ ID NO: 174983 - DNA, 25 bp, SARS Virus
gcctgtatgaacagtcgatagaata

SEQ ID NO: 174984 - DNA, 25 bp, SARS Virus
cctgtatgaacaatcgatagaataa

SEQ ID NO: 174985 - DNA, 25 bp, SARS Virus
ctgtatgaacagacgatagaataat

SEQ ID NO: 174986 - DNA, 25 bp, SARS Virus
tgtatgaacagtagatagaataatg

SEQ ID NO: 174987 - DNA, 25 bp, SARS Virus
gtatgaacagtcaatagaataatgg

SEQ ID NO: 174988 - DNA, 25 bp, SARS Virus
tatgaacagtcgatagaataatggt

SEQ ID NO: 174989 - DNA, 25 bp, SARS Virus
atgaacagtcgaaagaataatggta

SEQ ID NO: 174990 - DNA, 25 bp, SARS Virus
tgaacagtcgatagaataatggtag

SEQ ID NO: 174991 - DNA, 25 bp, SARS Virus
gaacagtcgataaaataatggtagt

SEQ ID NO: 174992 - DNA, 25 bp, SARS Virus
aacagtcgatagaataatggtagtc

SEQ ID NO: 174993 - DNA, 25 bp, SARS Virus
acagtcgatagaataatggtagtca

SEQ ID NO: 174994 - DNA, 25 bp, SARS Virus
cagtcgatagaaaaatggtagtcaa

SEQ ID NO: 174995 - DNA, 25 bp, SARS Virus
agtcgatagaataatggtagtcaac

SEQ ID NO: 174996 - DNA, 25 bp, SARS Virus
gtcgatagaataatggtagtcaact

SEQ ID NO: 174997 - DNA, 25 bp, SARS Virus
tcgatagaataaaggtagtcaactt

SEQ ID NO: 174998 - DNA, 25 bp, SARS Virus
cgatagaataatagtagtcaacttt

SEQ ID NO: 174999 - DNA, 25 bp, SARS Virus
gatagaataatgatagtcaactttc

SEQ ID NO: 175000 - DNA, 25 bp, SARS Virus
atagaataatggaagtcaactttct

SEQ ID NO: 175001 - DNA, 25 bp, SARS Virus
tagaataatggtagtcaactttctt

SEQ ID NO: 175002 - DNA, 25 bp, SARS Virus
agaataatggtaatcaactttcttc

SEQ ID NO: 175003 - DNA, 25 bp, SARS Virus
gaataatggtagacaactttcttca

SEQ ID NO: 175004 - DNA, 25 bp, SARS Virus
aataatggtagtaaactttcttcac

SEQ ID NO: 175005 - DNA, 25 bp, SARS Virus
ataatggtagtcaactttcttcacg

SEQ ID NO: 175006 - DNA, 25 bp, SARS Virus
taatggtagtcaactttcttcacgt

SEQ ID NO: 175007 - DNA, 25 bp, SARS Virus
aatggtagtcaaatttcttcacgta

SEQ ID NO: 175008 - DNA, 25 bp, SARS Virus
atggtagtcaacattcttcacgtaa

SEQ ID NO: 175009 - DNA, 25 bp, SARS Virus
tggtagtcaactatcttcacgtaaa

SEQ ID NO: 175010 - DNA, 25 bp, SARS Virus
ggtagtcaacttacttcacgtaaat

SEQ ID NO: 175011 - DNA, 25 bp, SARS Virus
gtagtcaactttattcacgtaaatg

SEQ ID NO: 175012 - DNA, 25 bp, SARS Virus
tagtcaactttcatcacgtaaatgt

SEQ ID NO: 175013 - DNA, 25 bp, SARS Virus
agtcaactttctacacgtaaatgta

SEQ ID NO: 175014 - DNA, 25 bp, SARS Virus
gtcaactttcttaacgtaaatgtaa

SEQ ID NO: 175015 - DNA, 25 bp, SARS Virus
tcaactttcttcacgtaaatgtaac

SEQ ID NO: 175016 - DNA, 25 bp, SARS Virus
caactttcttcaagtaaatgtaacc

SEQ ID NO: 175017 - DNA, 25 bp, SARS Virus
aactttcttcacataaatgtaaccg

SEQ ID NO: 175018 - DNA, 25 bp, SARS Virus
actttcttcacgaaaatgtaaccga

SEQ ID NO: 175019 - DNA, 25 bp, SARS Virus
ctttcttcacgtaaatgtaaccgac

SEQ ID NO: 175020 - DNA, 25 bp, SARS Virus
tttcttcacgtaaatgtaaccgaca

SEQ ID NO: 175021 - DNA, 25 bp, SARS Virus
ttcttcacgtaaatgtaaccgacat

SEQ ID NO: 175022 - DNA, 25 bp, SARS Virus
tcttcacgtaaaagtaaccgacatt

SEQ ID NO: 175023 - DNA, 25 bp, SARS Virus
cttcacgtaaatataaccgacattg

SEQ ID NO: 175024 - DNA, 25 bp, SARS Virus
ttcacgtaaatgaaaccgacattgt

SEQ ID NO: 175025 - DNA, 25 bp, SARS Virus
tcacgtaaatgtaaccgacattgtc

SEQ ID NO: 175026 - DNA, 25 bp, SARS Virus
cacgtaaatgtaaccgacattgtcg

SEQ ID NO: 175027 - DNA, 25 bp, SARS Virus
acgtaaatgtaaacgacattgtcga

SEQ ID NO: 175028 - DNA, 25 bp, SARS Virus
cgtaaatgtaacagacattgtcgaa

SEQ ID NO: 175029 - DNA, 25 bp, SARS Virus
gtaaatgtaaccaacattgtcgaac

SEQ ID NO: 175030 - DNA, 25 bp, SARS Virus
taaatgtaaccgacattgtcgaact

SEQ ID NO: 175031 - DNA, 25 bp, SARS Virus
aaatgtaaccgaaattgtcgaactg

SEQ ID NO: 175032 - DNA, 25 bp, SARS Virus
aatgtaaccgacattgtcgaactgt

SEQ ID NO: 175033 - DNA, 25 bp, SARS Virus
atgtaaccgacaatgtcgaactgtt

SEQ ID NO: 175034 - DNA, 25 bp, SARS Virus
tgtaaccgacatagtcgaactgttt

SEQ ID NO: 175035 - DNA, 25 bp, SARS Virus
gtaaccgacattatcgaactgttta

SEQ ID NO: 175036 - DNA, 25 bp, SARS Virus
taaccgacattgacgaactgtttac

SEQ ID NO: 175037 - DNA, 25 bp, SARS Virus
aaccgacattgtagaactgtttaca

SEQ ID NO: 175038 - DNA, 25 bp, SARS Virus
accgacattgtcaaactgtttacaa

SEQ ID NO: 175039 - DNA, 25 bp, SARS Virus
ccgacattgtcgaactgtttacaat

SEQ ID NO: 175040 - DNA, 25 bp, SARS Virus
cgacattgtcgaactgtttacaatt

SEQ ID NO: 175041 - DNA, 25 bp, SARS Virus
gacattgtcgaaatgtttacaattt

SEQ ID NO: 175042 - DNA, 25 bp, SARS Virus
acattgtcgaacagtttacaatttc

SEQ ID NO: 175043 - DNA, 25 bp, SARS Virus
cattgtcgaactatttacaatttct

SEQ ID NO: 175044 - DNA, 25 bp, SARS Virus
attgtcgaactgattacaatttctg

SEQ ID NO: 175045 - DNA, 25 bp, SARS Virus
ttgtcgaactgtatacaatttctgt

SEQ ID NO: 175046 - DNA, 25 bp, SARS Virus
tgtcgaactgttaacaatttctgtg

SEQ ID NO: 175047 - DNA, 25 bp, SARS Virus
gtcgaactgtttacaatttctgtga

SEQ ID NO: 175048 - DNA, 25 bp, SARS Virus
tcgaactgtttaaaatttctgtgat

SEQ ID NO: 175049 - DNA, 25 bp, SARS Virus
cgaactgtttacaatttctgtgata

SEQ ID NO: 175050 - DNA, 25 bp, SARS Virus
gaactgtttacaatttctgtgataa

SEQ ID NO: 175051 - DNA, 25 bp, SARS Virus
aactgtttacaaattctgtgataat

SEQ ID NO: 175052 - DNA, 25 bp, SARS Virus
actgtttacaatatctgtgataatc

SEQ ID NO: 175053 - DNA, 25 bp, SARS Virus
ctgtttacaattactgtgataatcg

SEQ ID NO: 175054 - DNA, 25 bp, SARS Virus
tgtttacaatttatgtgataatcgt

SEQ ID NO: 175055 - DNA, 25 bp, SARS Virus
gtttacaatttcagtgataatcgta

SEQ ID NO: 175056 - DNA, 25 bp, SARS Virus
tttacaatttctatgataatcgtat

SEQ ID NO: 175057 - DNA, 25 bp, SARS Virus
ttacaatttctgagataatcgtatt

SEQ ID NO: 175058 - DNA, 25 bp, SARS Virus
tacaatttctgtaataatcgtattc

SEQ ID NO: 175059 - DNA, 25 bp, SARS Virus
acaatttctgtgataatcgtattcg

SEQ ID NO: 175060 - DNA, 25 bp, SARS Virus
caatttctgtgaaaatcgtattcgt

SEQ ID NO: 175061 - DNA, 25 bp, SARS Virus
aatttctgtgataatcgtattcgtc

SEQ ID NO: 175062 - DNA, 25 bp, SARS Virus
atttctgtgataatcgtattcgtca

SEQ ID NO: 175063 - DNA, 25 bp, SARS Virus
tttctgtgataaacgtattcgtcaa

SEQ ID NO: 175064 - DNA, 25 bp, SARS Virus
ttctgtgataatagtattcgtcaac

SEQ ID NO: 175065 - DNA, 25 bp, SARS Virus
tctgtgataatcatattcgtcaaca

SEQ ID NO: 175066 - DNA, 25 bp, SARS Virus
ctgtgataatcgaattcgtcaacat

SEQ ID NO: 175067 - DNA, 25 bp, SARS Virus
tgtgataatcgtattcgtcaacatc

SEQ ID NO: 175068 - DNA, 25 bp, SARS Virus
gtgataatcgtaatcgtcaacatcg

SEQ ID NO: 175069 - DNA, 25 bp, SARS Virus
tgataatcgtatacgtcaacatcgt

SEQ ID NO: 175070 - DNA, 25 bp, SARS Virus
gataatcgtattagtcaacatcgta

SEQ ID NO: 175071 - DNA, 25 bp, SARS Virus
ataatcgtattcatcaacatcgtag

SEQ ID NO: 175072 - DNA, 25 bp, SARS Virus
taatcgtattcgacaacatcgtagt

SEQ ID NO: 175073 - DNA, 25 bp, SARS Virus
aatcgtattcgtaaacatcgtagtg

SEQ ID NO: 175074 - DNA, 25 bp, SARS Virus
atcgtattcgtcaacatcgtagtgg

SEQ ID NO: 175075 - DNA, 25 bp, SARS Virus
tcgtattcgtcaacatcgtagtggc

SEQ ID NO: 175076 - DNA, 25 bp, SARS Virus
cgtattcgtcaaaatcgtagtggcc

SEQ ID NO: 175077 - DNA, 25 bp, SARS Virus
gtattcgtcaacatcgtagtggcct

SEQ ID NO: 175078 - DNA, 25 bp, SARS Virus
tattcgtcaacaacgtagtggccta

SEQ ID NO: 175079 - DNA, 25 bp, SARS Virus
attcgtcaacatagtagtggcctac

SEQ ID NO: 175080 - DNA, 25 bp, SARS Virus
ttcgtcaacatcatagtggcctact

SEQ ID NO: 175081 - DNA, 25 bp, SARS Virus
tcgtcaacatcgaagtggcctacta

SEQ ID NO: 175082 - DNA, 25 bp, SARS Virus
cgtcaacatcgtagtggcctactac

SEQ ID NO: 175083 - DNA, 25 bp, SARS Virus
gtcaacatcgtaatggcctactaca

SEQ ID NO: 175084 - DNA, 25 bp, SARS Virus
tcaacatcgtagaggcctactacaa

SEQ ID NO: 175085 - DNA, 25 bp, SARS Virus
caacatcgtagtagcctactacaag

SEQ ID NO: 175086 - DNA, 25 bp, SARS Virus
aacatcgtagtgacctactacaagg

SEQ ID NO: 175087 - DNA, 25 bp, SARS Virus
acatcgtagtggactactacaaggt

SEQ ID NO: 175088 - DNA, 25 bp, SARS Virus
catcgtagtggcatactacaaggtg

SEQ ID NO: 175089 - DNA, 25 bp, SARS Virus
atcgtagtggccaactacaaggtgg

SEQ ID NO: 175090 - DNA, 25 bp, SARS Virus
tcgtagtggcctactacaaggtgga

SEQ ID NO: 175091 - DNA, 25 bp, SARS Virus
cgtagtggcctaatacaaggtggac

SEQ ID NO: 175092 - DNA, 25 bp, SARS Virus
gtagtggcctacaacaaggtggacc

SEQ ID NO: 175093 - DNA, 25 bp, SARS Virus
tagtggcctactacaaggtggacca

SEQ ID NO: 175094 - DNA, 25 bp, SARS Virus
agtggcctactaaaaggtggaccaa

SEQ ID NO: 175095 - DNA, 25 bp, SARS Virus
gtggcctactacaaggtggaccaaa

SEQ ID NO: 175096 - DNA, 25 bp, SARS Virus
tggcctactacaaggtggaccaaat

SEQ ID NO: 175097 - DNA, 25 bp, SARS Virus
ggcctactacaaagtggaccaaatt

SEQ ID NO: 175098 - DNA, 25 bp, SARS Virus
gcctactacaagatggaccaaattg

SEQ ID NO: 175099 - DNA, 25 bp, SARS Virus
cctactacaaggaggaccaaattgt

SEQ ID NO: 175100 - DNA, 25 bp, SARS Virus
ctactacaaggtagaccaaattgta

SEQ ID NO: 175101 - DNA, 25 bp, SARS Virus
tactacaaggtgaaccaaattgtat

SEQ ID NO: 175102 - DNA, 25 bp, SARS Virus
actacaaggtggaccaaattgtata

SEQ ID NO: 175103 - DNA, 25 bp, SARS Virus
ctacaaggtggaacaaattgtatat

SEQ ID NO: 175104 - DNA, 25 bp, SARS Virus
tacaaggtggacaaaattgtatatc

SEQ ID NO: 175105 - DNA, 25 bp, SARS Virus
acaaggtggaccaaattgtatatca

SEQ ID NO: 175106 - DNA, 25 bp, SARS Virus
caaggtggaccaaattgtatatcac

SEQ ID NO: 175107 - DNA, 25 bp, SARS Virus
aaggtggaccaaattgtatatcact

SEQ ID NO: 175108 - DNA, 25 bp, SARS Virus
aggtggaccaaaatgtatatcactc

SEQ ID NO: 175109 - DNA, 25 bp, SARS Virus
ggtggaccaaatagtatatcactcg

SEQ ID NO: 175110 - DNA, 25 bp, SARS Virus
gtggaccaaattatatatcactcgg

SEQ ID NO: 175111 - DNA, 25 bp, SARS Virus
tggaccaaattgaatatcactcggc

SEQ ID NO: 175112 - DNA, 25 bp, SARS Virus
ggaccaaattgtatatcactcggcg

SEQ ID NO: 175113 - DNA, 25 bp, SARS Virus
gaccaaattgtaaatcactcggcgg

SEQ ID NO: 175114 - DNA, 25 bp, SARS Virus
accaaattgtatatcactcggcggt

SEQ ID NO: 175115 - DNA, 25 bp, SARS Virus
ccaaattgtataacactcggcggtg

SEQ ID NO: 175116 - DNA, 25 bp, SARS Virus
caaattgtatataactcggcggtgt

SEQ ID NO: 175117 - DNA, 25 bp, SARS Virus
aaattgtatatcactcggcggtgtg

SEQ ID NO: 175118 - DNA, 25 bp, SARS Virus
aattgtatatcaatcggcggtgtgt

SEQ ID NO: 175119 - DNA, 25 bp, SARS Virus
attgtatatcacacggcggtgtgta

SEQ ID NO: 175120 - DNA, 25 bp, SARS Virus
ttgtatatcactaggcggtgtgtac

SEQ ID NO: 175121 - DNA, 25 bp, SARS Virus
tgtatatcactcagcggtgtgtact

SEQ ID NO: 175122 - DNA, 25 bp, SARS Virus
gtatatcactcgacggtgtgtactg

SEQ ID NO: 175123 - DNA, 25 bp, SARS Virus
tatatcactcggaggtgtgtactgg

SEQ ID NO: 175124 - DNA, 25 bp, SARS Virus
atatcactcggcagtgtgtactggt

SEQ ID NO: 175125 - DNA, 25 bp, SARS Virus
tatcactcggcgatgtgtactggta

SEQ ID NO: 175126 - DNA, 25 bp, SARS Virus
atcactcggcggagtgtactggtag

SEQ ID NO: 175127 - DNA, 25 bp, SARS Virus
tcactcggcggtatgtactggtaga

SEQ ID NO: 175128 - DNA, 25 bp, SARS Virus
cactcggcggtgagtactggtagag

SEQ ID NO: 175129 - DNA, 25 bp, SARS Virus
actcggcggtgtatactggtagagt

SEQ ID NO: 175130 - DNA, 25 bp, SARS Virus
ctcggcggtgtgaactggtagagtg

SEQ ID NO: 175131 - DNA, 25 bp, SARS Virus
tcggcggtgtgtactggtagagtga

SEQ ID NO: 175132 - DNA, 25 bp, SARS Virus
cggcggtgtgtaatggtagagtgaa

SEQ ID NO: 175133 - DNA, 25 bp, SARS Virus
ggcggtgtgtacaggtagagtgaat

SEQ ID NO: 175134 - DNA, 25 bp, SARS Virus
gcggtgtgtactagtagagtgaatt

SEQ ID NO: 175135 - DNA, 25 bp, SARS Virus
cggtgtgtactgatagagtgaatta

SEQ ID NO: 175136 - DNA, 25 bp, SARS Virus
ggtgtgtactggaagagtgaattat

SEQ ID NO: 175137 - DNA, 25 bp, SARS Virus
gtgtgtactggtagagtgaattatg

SEQ ID NO: 175138 - DNA, 25 bp, SARS Virus
tgtgtactggtaaagtgaattatga

SEQ ID NO: 175139 - DNA, 25 bp, SARS Virus
gtgtactggtagagtgaattatgaa

SEQ ID NO: 175140 - DNA, 25 bp, SARS Virus
tgtactggtagaatgaattatgaac

SEQ ID NO: 175141 - DNA, 25 bp, SARS Virus
gtactggtagagagaattatgaacg

SEQ ID NO: 175142 - DNA, 25 bp, SARS Virus
tactggtagagtaaattatgaacgc

SEQ ID NO: 175143 - DNA, 25 bp, SARS Virus
actggtagagtgaattatgaacgcg

SEQ ID NO: 175144 - DNA, 25 bp, SARS Virus
ctggtagagtgaattatgaacgcgt

SEQ ID NO: 175145 - DNA, 25 bp, SARS Virus
tggtagagtgaaatatgaacgcgtg

SEQ ID NO: 175146 - DNA, 25 bp, SARS Virus
ggtagagtgaataatgaacgcgtgt

SEQ ID NO: 175147 - DNA, 25 bp, SARS Virus
gtagagtgaattatgaacgcgtgtg

SEQ ID NO: 175148 - DNA, 25 bp, SARS Virus
tagagtgaattaagaacgcgtgtga

SEQ ID NO: 175149 - DNA, 25 bp, SARS Virus
agagtgaattataaacgcgtgtgag

SEQ ID NO: 175150 - DNA, 25 bp, SARS Virus
gagtgaattatgaacgcgtgtgagc

SEQ ID NO: 175151 - DNA, 25 bp, SARS Virus
agtgaattatgaacgcgtgtgagca

SEQ ID NO: 175152 - DNA, 25 bp, SARS Virus
gtgaattatgaaagcgtgtgagcaa

SEQ ID NO: 175153 - DNA, 25 bp, SARS Virus
tgaattatgaacacgtgtgagcaat

SEQ ID NO: 175154 - DNA, 25 bp, SARS Virus
gaattatgaacgagtgtgagcaatc

SEQ ID NO: 175155 - DNA, 25 bp, SARS Virus
aattatgaacgcatgtgagcaatcg

SEQ ID NO: 175156 - DNA, 25 bp, SARS Virus
attatgaacgcgagtgagcaatcga

SEQ ID NO: 175157 - DNA, 25 bp, SARS Virus
ttatgaacgcgtatgagcaatcgat

SEQ ID NO: 175158 - DNA, 25 bp, SARS Virus
tatgaacgcgtgagagcaatcgatt

SEQ ID NO: 175159 - DNA, 25 bp, SARS Virus
atgaacgcgtgtaagcaatcgattg

SEQ ID NO: 175160 - DNA, 25 bp, SARS Virus
tgaacgcgtgtgagcaatcgattgg

SEQ ID NO: 175161 - DNA, 25 bp, SARS Virus
gaacgcgtgtgaacaatcgattgga

SEQ ID NO: 175162 - DNA, 25 bp, SARS Virus
aacgcgtgtgagaaatcgattggac

SEQ ID NO: 175163 - DNA, 25 bp, SARS Virus
acgcgtgtgagcaatcgattggaca

SEQ ID NO: 175164 - DNA, 25 bp, SARS Virus
cgcgtgtgagcaatcgattggacat

SEQ ID NO: 175165 - DNA, 25 bp, SARS Virus
gcgtgtgagcaaacgattggacatc

SEQ ID NO: 175166 - DNA, 25 bp, SARS Virus
cgtgtgagcaatagattggacatct

SEQ ID NO: 175167 - DNA, 25 bp, SARS Virus
gtgtgagcaatcaattggacatctt

SEQ ID NO: 175168 - DNA, 25 bp, SARS Virus
tgtgagcaatcgattggacatcttt

SEQ ID NO: 175169 - DNA, 25 bp, SARS Virus
gtgagcaatcgaatggacatctttg

SEQ ID NO: 175170 - DNA, 25 bp, SARS Virus
tgagcaatcgataggacatctttgc

SEQ ID NO: 175171 - DNA, 25 bp, SARS Virus
gagcaatcgattagacatctttgcc

SEQ ID NO: 175172 - DNA, 25 bp, SARS Virus
agcaatcgattgaacatctttgcca

SEQ ID NO: 175173 - DNA, 25 bp, SARS Virus
gcaatcgattggacatctttgccac

SEQ ID NO: 175174 - DNA, 25 bp, SARS Virus
caatcgattggaaatctttgccaca

SEQ ID NO: 175175 - DNA, 25 bp, SARS Virus
aatcgattggacatctttgccacac

SEQ ID NO: 175176 - DNA, 25 bp, SARS Virus
atcgattggacaactttgccacact

SEQ ID NO: 175177 - DNA, 25 bp, SARS Virus
tcgattggacatatttgccacacta

SEQ ID NO: 175178 - DNA, 25 bp, SARS Virus
cgattggacatcattgccacactat

SEQ ID NO: 175179 - DNA, 25 bp, SARS Virus
gattggacatctatgccacactatt

SEQ ID NO: 175180 - DNA, 25 bp, SARS Virus
attggacatcttagccacactattc

SEQ ID NO: 175181 - DNA, 25 bp, SARS Virus
ttggacatctttaccacactattca

SEQ ID NO: 175182 - DNA, 25 bp, SARS Virus
tggacatctttgacacactattcaa

SEQ ID NO: 175183 - DNA, 25 bp, SARS Virus
ggacatctttgcaacactattcaat

SEQ ID NO: 175184 - DNA, 25 bp, SARS Virus
gacatctttgccacactattcaatg

SEQ ID NO: 175185 - DNA, 25 bp, SARS Virus
acatctttgccaaactattcaatgt

SEQ ID NO: 175186 - DNA, 25 bp, SARS Virus
catctttgccacactattcaatgtc

SEQ ID NO: 175187 - DNA, 25 bp, SARS Virus
atctttgccacaatattcaatgtcg

SEQ ID NO: 175188 - DNA, 25 bp, SARS Virus
tctttgccacacaattcaatgtcgt

SEQ ID NO: 175189 - DNA, 25 bp, SARS Virus
ctttgccacactattcaatgtcgtt

SEQ ID NO: 175190 - DNA, 25 bp, SARS Virus
tttgccacactaatcaatgtcgttc

SEQ ID NO: 175191 - DNA, 25 bp, SARS Virus
ttgccacactatacaatgtcgttca

SEQ ID NO: 175192 - DNA, 25 bp, SARS Virus
tgccacactattaaatgtcgttcac

SEQ ID NO: 175193 - DNA, 25 bp, SARS Virus
gccacactattcaatgtcgttcaca

SEQ ID NO: 175194 - DNA, 25 bp, SARS Virus
ccacactattcaatgtcgttcacaa

SEQ ID NO: 175195 - DNA, 25 bp, SARS Virus
cacactattcaaagtcgttcacaat

SEQ ID NO: 175196 - DNA, 25 bp, SARS Virus
acactattcaatatcgttcacaata

SEQ ID NO: 175197 - DNA, 25 bp, SARS Virus
cactattcaatgacgttcacaatac

SEQ ID NO: 175198 - DNA, 25 bp, SARS Virus
actattcaatgtagttcacaataca

SEQ ID NO: 175199 - DNA, 25 bp, SARS Virus
ctattcaatgtcattcacaatacaa

SEQ ID NO: 175200 - DNA, 25 bp, SARS Virus
tattcaatgtcgatcacaatacaaa

SEQ ID NO: 175201 - DNA, 25 bp, SARS Virus
attcaatgtcgtacacaatacaaac

SEQ ID NO: 175202 - DNA, 25 bp, SARS Virus
ttcaatgtcgttaacaatacaaacg

SEQ ID NO: 175203 - DNA, 25 bp, SARS Virus
tcaatgtcgttcacaatacaaacgc

SEQ ID NO: 175204 - DNA, 25 bp, SARS Virus
caatgtcgttcaaaatacaaacgct

SEQ ID NO: 175205 - DNA, 25 bp, SARS Virus
aatgtcgttcacaatacaaacgctc

SEQ ID NO: 175206 - DNA, 25 bp, SARS Virus
atgtcgttcacaatacaaacgctcg

SEQ ID NO: 175207 - DNA, 25 bp, SARS Virus
tgtcgttcacaaaacaaacgctcgt

SEQ ID NO: 175208 - DNA, 25 bp, SARS Virus
gtcgttcacaatacaaacgctcgtt

SEQ ID NO: 175209 - DNA, 25 bp, SARS Virus
tcgttcacaataaaaacgctcgttc

SEQ ID NO: 175210 - DNA, 25 bp, SARS Virus
cgttcacaatacaaacgctcgttct

SEQ ID NO: 175211 - DNA, 25 bp, SARS Virus
gttcacaatacaaacgctcgttctt

SEQ ID NO: 175212 - DNA, 25 bp, SARS Virus
ttcacaatacaaacgctcgttcttg

SEQ ID NO: 175213 - DNA, 25 bp, SARS Virus
tcacaatacaaaagctcgttcttgt

SEQ ID NO: 175214 - DNA, 25 bp, SARS Virus
cacaatacaaacactcgttcttgtt

SEQ ID NO: 175215 - DNA, 25 bp, SARS Virus
acaatacaaacgatcgttcttgttc

SEQ ID NO: 175216 - DNA, 25 bp, SARS Virus
caatacaaacgcacgttcttgttct

SEQ ID NO: 175217 - DNA, 25 bp, SARS Virus
aatacaaacgctagttcttgttctc

SEQ ID NO: 175218 - DNA, 25 bp, SARS Virus
atacaaacgctcattcttgttctct

SEQ ID NO: 175219 - DNA, 25 bp, SARS Virus
tacaaacgctcgatcttgttctctc

SEQ ID NO: 175220 - DNA, 25 bp, SARS Virus
acaaacgctcgtacttgttctctcc

SEQ ID NO: 175221 - DNA, 25 bp, SARS Virus
caaacgctcgttattgttctctccg

SEQ ID NO: 175222 - DNA, 25 bp, SARS Virus
aaacgctcgttcatgttctctccgg

SEQ ID NO: 175223 - DNA, 25 bp, SARS Virus
aacgctcgttctagttctctccggt

SEQ ID NO: 175224 - DNA, 25 bp, SARS Virus
acgctcgttcttattctctccggta

SEQ ID NO: 175225 - DNA, 25 bp, SARS Virus
cagagtcaggttctaaaacggagtc

SEQ ID NO: 175226 - DNA, 25 bp, SARS Virus
agagtcaggttgcaaaacggagtct

SEQ ID NO: 175227 - DNA, 25 bp, SARS Virus
gagtcaggttgtcaaacggagtctg

SEQ ID NO: 175228 - DNA, 25 bp, SARS Virus
agtcaggttgtacaacggagtctgt

SEQ ID NO: 175229 - DNA, 25 bp, SARS Virus
gtcaggttgtaacacggagtctgta

SEQ ID NO: 175230 - DNA, 25 bp, SARS Virus
tcaggttgtaaaccggagtctgtac

SEQ ID NO: 175231 - DNA, 25 bp, SARS Virus
caggttgtaaaacggagtctgtact

SEQ ID NO: 175232 - DNA, 25 bp, SARS Virus
aggttgtaaaaccgagtctgtactt

SEQ ID NO: 175233 - DNA, 25 bp, SARS Virus
ggttgtaaaacgcagtctgtacttg

SEQ ID NO: 175234 - DNA, 25 bp, SARS Virus
gttgtaaaacggcgtctgtacttgt

SEQ ID NO: 175235 - DNA, 25 bp, SARS Virus
ttgtaaaacggactctgtacttgtg

SEQ ID NO: 175236 - DNA, 25 bp, SARS Virus
tgtaaaacggagcctgtacttgtgt

SEQ ID NO: 175237 - DNA, 25 bp, SARS Virus
gtaaaacggagtctgtacttgtgta

SEQ ID NO: 175238 - DNA, 25 bp, SARS Virus
taaaacggagtccgtacttgtgtaa

SEQ ID NO: 175239 - DNA, 25 bp, SARS Virus
aaaacggagtctctacttgtgtaat

SEQ ID NO: 175240 - DNA, 25 bp, SARS Virus
aaacggagtctgcacttgtgtaata

SEQ ID NO: 175241 - DNA, 25 bp, SARS Virus
aacggagtctgtccttgtgtaataa

SEQ ID NO: 175242 - DNA, 25 bp, SARS Virus
acggagtctgtacttgtgtaataaa

SEQ ID NO: 175243 - DNA, 25 bp, SARS Virus
cggagtctgtacctgtgtaataaaa

SEQ ID NO: 175244 - DNA, 25 bp, SARS Virus
ggagtctgtactcgtgtaataaaac

SEQ ID NO: 175245 - DNA, 25 bp, SARS Virus
gagtctgtacttctgtaataaaact

SEQ ID NO: 175246 - DNA, 25 bp, SARS Virus
agtctgtacttgcgtaataaaacta

SEQ ID NO: 175247 - DNA, 25 bp, SARS Virus
gtctgtacttgtctaataaaactat

SEQ ID NO: 175248 - DNA, 25 bp, SARS Virus
tctgtacttgtgcaataaaactatt

SEQ ID NO: 175249 - DNA, 25 bp, SARS Virus
ctgtacttgtgtcataaaactatta

SEQ ID NO: 175250 - DNA, 25 bp, SARS Virus
tgtacttgtgtactaaaactattat

SEQ ID NO: 175251 - DNA, 25 bp, SARS Virus
gtacttgtgtaacaaaactattatt

SEQ ID NO: 175252 - DNA, 25 bp, SARS Virus
tacttgtgtaatcaaactattattt

SEQ ID NO: 175253 - DNA, 25 bp, SARS Virus
acttgtgtaatacaactattatttc

SEQ ID NO: 175254 - DNA, 25 bp, SARS Virus
cttgtgtaataacactattatttct

SEQ ID NO: 175255 - DNA, 25 bp, SARS Virus
ttgtgtaataaacctattatttctt

SEQ ID NO: 175256 - DNA, 25 bp, SARS Virus
tgtgtaataaaactattatttcttg

SEQ ID NO: 175257 - DNA, 25 bp, SARS Virus
gtgtaataaaaccattatttcttga

SEQ ID NO: 175258 - DNA, 25 bp, SARS Virus
tgtaataaaactcttatttcttgac

SEQ ID NO: 175259 - DNA, 25 bp, SARS Virus
gtaataaaactactatttcttgacg

SEQ ID NO: 175260 - DNA, 25 bp, SARS Virus
taataaaactatcatttcttgacgg

SEQ ID NO: 175261 - DNA, 25 bp, SARS Virus
aataaaactattctttcttgacgga

SEQ ID NO: 175262 - DNA, 25 bp, SARS Virus
ataaaactattacttcttgacggaa

SEQ ID NO: 175263 - DNA, 25 bp, SARS Virus
taaaactattatctcttgacggaat

SEQ ID NO: 175264 - DNA, 25 bp, SARS Virus
aaaactattattccttgacggaatt

SEQ ID NO: 175265 - DNA, 25 bp, SARS Virus
aaactattatttcttgacggaattt

SEQ ID NO: 175266 - DNA, 25 bp, SARS Virus
aactattatttcctgacggaatttc

SEQ ID NO: 175267 - DNA, 25 bp, SARS Virus
actattatttctcgacggaatttca

SEQ ID NO: 175268 - DNA, 25 bp, SARS Virus
ctattatttcttcacggaatttcaa

SEQ ID NO: 175269 - DNA, 25 bp, SARS Virus
tattatttcttgccggaatttcaag

SEQ ID NO: 175270 - DNA, 25 bp, SARS Virus
attatttcttgacggaatttcaaga

SEQ ID NO: 175271 - DNA, 25 bp, SARS Virus
ttatttcttgaccgaatttcaagaa

SEQ ID NO: 175272 - DNA, 25 bp, SARS Virus
tatttcttgacgcaatttcaagaat

SEQ ID NO: 175273 - DNA, 25 bp, SARS Virus
atttcttgacggcatttcaagaatt

SEQ ID NO: 175274 - DNA, 25 bp, SARS Virus
tttcttgacggactttcaagaatta

SEQ ID NO: 175275 - DNA, 25 bp, SARS Virus
ttcttgacggaacttcaagaattac

SEQ ID NO: 175276 - DNA, 25 bp, SARS Virus
tcttgacggaatctcaagaattacg

SEQ ID NO: 175277 - DNA, 25 bp, SARS Virus
cttgacggaattccaagaattacga

SEQ ID NO: 175278 - DNA, 25 bp, SARS Virus
ttgacggaatttcaagaattacgat

SEQ ID NO: 175279 - DNA, 25 bp, SARS Virus
tgacggaatttccagaattacgatc

SEQ ID NO: 175280 - DNA, 25 bp, SARS Virus
gacggaatttcacgaattacgatcg

SEQ ID NO: 175281 - DNA, 25 bp, SARS Virus
acggaatttcaacaattacgatcga

SEQ ID NO: 175282 - DNA, 25 bp, SARS Virus
cggaatttcaagcattacgatcgat

SEQ ID NO: 175283 - DNA, 25 bp, SARS Virus
ggaatttcaagacttacgatcgatg

SEQ ID NO: 175284 - DNA, 25 bp, SARS Virus
gaatttcaagaactacgatcgatga

SEQ ID NO: 175285 - DNA, 25 bp, SARS Virus
aatttcaagaatcacgatcgatgat

SEQ ID NO: 175286 - DNA, 25 bp, SARS Virus
atttcaagaattccgatcgatgatt

SEQ ID NO: 175287 - DNA, 25 bp, SARS Virus
tttcaagaattacgatcgatgattt

SEQ ID NO: 175288 - DNA, 25 bp, SARS Virus
ttcaagaattaccatcgatgatttg

SEQ ID NO: 175289 - DNA, 25 bp, SARS Virus
tcaagaattacgctcgatgatttgg

SEQ ID NO: 175290 - DNA, 25 bp, SARS Virus
caagaattacgaccgatgatttgga

SEQ ID NO: 175291 - DNA, 25 bp, SARS Virus
aagaattacgatcgatgatttggaa

SEQ ID NO: 175292 - DNA, 25 bp, SARS Virus
agaattacgatccatgatttggaac

SEQ ID NO: 175293 - DNA, 25 bp, SARS Virus
gaattacgatcgctgatttggaact

SEQ ID NO: 175294 - DNA, 25 bp, SARS Virus
aattacgatcgacgatttggaactc

SEQ ID NO: 175295 - DNA, 25 bp, SARS Virus
attacgatcgatcatttggaactcg

SEQ ID NO: 175296 - DNA, 25 bp, SARS Virus
ttacgatcgatgctttggaactcgg

SEQ ID NO: 175297 - DNA, 25 bp, SARS Virus
tacgatcgatgacttggaactcggc

SEQ ID NO: 175298 - DNA, 25 bp, SARS Virus
acgatcgatgatctggaactcggcg

SEQ ID NO: 175299 - DNA, 25 bp, SARS Virus
cgatcgatgattcggaactcggcgt

SEQ ID NO: 175300 - DNA, 25 bp, SARS Virus
gatcgatgatttcgaactcggcgta

SEQ ID NO: 175301 - DNA, 25 bp, SARS Virus
atcgatgatttgcaactcggcgtat

SEQ ID NO: 175302 - DNA, 25 bp, SARS Virus
tcgatgatttggcactcggcgtatc

SEQ ID NO: 175303 - DNA, 25 bp, SARS Virus
cgatgatttggacctcggcgtatca

SEQ ID NO: 175304 - DNA, 25 bp, SARS Virus
gatgatttggaactcggcgtatcaa

SEQ ID NO: 175305 - DNA, 25 bp, SARS Virus
atgatttggaacccggcgtatcaat

SEQ ID NO: 175306 - DNA, 25 bp, SARS Virus
tgatttggaactcggcgtatcaatg

SEQ ID NO: 175307 - DNA, 25 bp, SARS Virus
gatttggaactccgcgtatcaatga

SEQ ID NO: 175308 - DNA, 25 bp, SARS Virus
atttggaactcgccgtatcaatgac

SEQ ID NO: 175309 - DNA, 25 bp, SARS Virus
tttggaactcggcgtatcaatgaca

SEQ ID NO: 175310 - DNA, 25 bp, SARS Virus
ttggaactcggcctatcaatgacaa

SEQ ID NO: 175311 - DNA, 25 bp, SARS Virus
tggaactcggcgcatcaatgacaat

SEQ ID NO: 175312 - DNA, 25 bp, SARS Virus
ggaactcggcgtctcaatgacaata

SEQ ID NO: 175313 - DNA, 25 bp, SARS Virus
gaactcggcgtaccaatgacaatat

SEQ ID NO: 175314 - DNA, 25 bp, SARS Virus
aactcggcgtatcaatgacaatatc

SEQ ID NO: 175315 - DNA, 25 bp, SARS Virus
actcggcgtatccatgacaatatcg

SEQ ID NO: 175316 - DNA, 25 bp, SARS Virus
ctcggcgtatcactgacaatatcgt

SEQ ID NO: 175317 - DNA, 25 bp, SARS Virus
tcggcgtatcaacgacaatatcgtg

SEQ ID NO: 175318 - DNA, 25 bp, SARS Virus
cggcgtatcaatcacaatatcgtgt

SEQ ID NO: 175319 - DNA, 25 bp, SARS Virus
ggcgtatcaatgccaatatcgtgtg

SEQ ID NO: 175320 - DNA, 25 bp, SARS Virus
gcgtatcaatgacaatatcgtgtgt

SEQ ID NO: 175321 - DNA, 25 bp, SARS Virus
cgtatcaatgaccatatcgtgtgtt

SEQ ID NO: 175322 - DNA, 25 bp, SARS Virus
gtatcaatgacactatcgtgtgttg

SEQ ID NO: 175323 - DNA, 25 bp, SARS Virus
tatcaatgacaacatcgtgtgttgc

SEQ ID NO: 175324 - DNA, 25 bp, SARS Virus
atcaatgacaatctcgtgtgttgcc

SEQ ID NO: 175325 - DNA, 25 bp, SARS Virus
tcaatgacaataccgtgtgttgccg

SEQ ID NO: 175326 - DNA, 25 bp, SARS Virus
caatgacaatatcgtgtgttgccgt

SEQ ID NO: 175327 - DNA, 25 bp, SARS Virus
aatgacaatatcctgtgttgccgta

SEQ ID NO: 175328 - DNA, 25 bp, SARS Virus
atgacaatatcgcgtgttgccgtag

SEQ ID NO: 175329 - DNA, 25 bp, SARS Virus
tgacaatatcgtctgttgccgtagt

SEQ ID NO: 175330 - DNA, 25 bp, SARS Virus
gacaatatcgtgcgttgccgtagta

SEQ ID NO: 175331 - DNA, 25 bp, SARS Virus
acaatatcgtgtcttgccgtagtag

SEQ ID NO: 175332 - DNA, 25 bp, SARS Virus
caatatcgtgtgctgccgtagtagt

SEQ ID NO: 175333 - DNA, 25 bp, SARS Virus
aatatcgtgtgtcgccgtagtagtc

SEQ ID NO: 175334 - DNA, 25 bp, SARS Virus
atatcgtgtgttcccgtagtagtct

SEQ ID NO: 175335 - DNA, 25 bp, SARS Virus
tatcgtgtgttgccgtagtagtctt

SEQ ID NO: 175336 - DNA, 25 bp, SARS Virus
atcgtgtgttgccgtagtagtcttt

SEQ ID NO: 175337 - DNA, 25 bp, SARS Virus
tcgtgtgttgccctagtagtctttc

SEQ ID NO: 175338 - DNA, 25 bp, SARS Virus
cgtgtgttgccgcagtagtctttct

SEQ ID NO: 175339 - DNA, 25 bp, SARS Virus
gtgtgttgccgtcgtagtctttctt

SEQ ID NO: 175340 - DNA, 25 bp, SARS Virus
tgtgttgccgtactagtctttctta

SEQ ID NO: 175341 - DNA, 25 bp, SARS Virus
gtgttgccgtagcagtctttcttag

SEQ ID NO: 175342 - DNA, 25 bp, SARS Virus
tgttgccgtagtcgtctttcttagt

SEQ ID NO: 175343 - DNA, 25 bp, SARS Virus
gttgccgtagtactctttcttagta

SEQ ID NO: 175344 - DNA, 25 bp, SARS Virus
ttgccgtagtagcctttcttagtag

SEQ ID NO: 175345 - DNA, 25 bp, SARS Virus
tgccgtagtagtctttcttagtagt

SEQ ID NO: 175346 - DNA, 25 bp, SARS Virus
gccgtagtagtccttcttagtagta

SEQ ID NO: 175347 - DNA, 25 bp, SARS Virus
ccgtagtagtctctcttagtagtac

SEQ ID NO: 175348 - DNA, 25 bp, SARS Virus
cgtagtagtcttccttagtagtacc

SEQ ID NO: 175349 - DNA, 25 bp, SARS Virus
gtagtagtctttcttagtagtacct

SEQ ID NO: 175350 - DNA, 25 bp, SARS Virus
tagtagtctttcctagtagtacctc

SEQ ID NO: 175351 - DNA, 25 bp, SARS Virus
agtagtctttctcagtagtacctct

SEQ ID NO: 175352 - DNA, 25 bp, SARS Virus
gtagtctttcttcgtagtacctctt

SEQ ID NO: 175353 - DNA, 25 bp, SARS Virus
tagtctttcttactagtacctcttt

SEQ ID NO: 175354 - DNA, 25 bp, SARS Virus
agtctttcttagcagtacctcttta

SEQ ID NO: 175355 - DNA, 25 bp, SARS Virus
gtctttcttagtcgtacctctttac

SEQ ID NO: 175356 - DNA, 25 bp, SARS Virus
tctttcttagtactacctctttaca

SEQ ID NO: 175357 - DNA, 25 bp, SARS Virus
ctttcttagtagcacctctttacaa

SEQ ID NO: 175358 - DNA, 25 bp, SARS Virus
tttcttagtagtccctctttacaaa

SEQ ID NO: 175359 - DNA, 25 bp, SARS Virus
ttcttagtagtacctctttacaaat

SEQ ID NO: 175360 - DNA, 25 bp, SARS Virus
tcttagtagtacctctttacaaatg

SEQ ID NO: 175361 - DNA, 25 bp, SARS Virus
cttagtagtacccctttacaaatgc

SEQ ID NO: 175362 - DNA, 25 bp, SARS Virus
ttagtagtacctctttacaaatgcg

SEQ ID NO: 175363 - DNA, 25 bp, SARS Virus
tagtagtacctccttacaaatgcgt

SEQ ID NO: 175364 - DNA, 25 bp, SARS Virus
agtagtacctctctacaaatgcgtc

SEQ ID NO: 175365 - DNA, 25 bp, SARS Virus
gtagtacctcttcacaaatgcgtcc

SEQ ID NO: 175366 - DNA, 25 bp, SARS Virus
tagtacctctttccaaatgcgtcca

SEQ ID NO: 175367 - DNA, 25 bp, SARS Virus
agtacctctttacaaatgcgtccat

SEQ ID NO: 175368 - DNA, 25 bp, SARS Virus
gtacctctttaccaatgcgtccatt

SEQ ID NO: 175369 - DNA, 25 bp, SARS Virus
tacctctttacacatgcgtccattc

SEQ ID NO: 175370 - DNA, 25 bp, SARS Virus
acctctttacaactgcgtccattcg

SEQ ID NO: 175371 - DNA, 25 bp, SARS Virus
cctctttacaaacgcgtccattcgc

SEQ ID NO: 175372 - DNA, 25 bp, SARS Virus
ctctttacaaatccgtccattcgca

SEQ ID NO: 175373 - DNA, 25 bp, SARS Virus
tctttacaaatgcgtccattcgcat

SEQ ID NO: 175374 - DNA, 25 bp, SARS Virus
ctttacaaatgcctccattcgcatt

SEQ ID NO: 175375 - DNA, 25 bp, SARS Virus
tttacaaatgcgcccattcgcattt

SEQ ID NO: 175376 - DNA, 25 bp, SARS Virus
ttacaaatgcgtccattcgcatttt

SEQ ID NO: 175377 - DNA, 25 bp, SARS Virus
tacaaatgcgtccattcgcattttg

SEQ ID NO: 175378 - DNA, 25 bp, SARS Virus
acaaatgcgtcccttcgcattttga

SEQ ID NO: 175379 - DNA, 25 bp, SARS Virus
caaatgcgtccactcgcattttgag

SEQ ID NO: 175380 - DNA, 25 bp, SARS Virus
aaatgcgtccatccgcattttgagt

SEQ ID NO: 175381 - DNA, 25 bp, SARS Virus
aatgcgtccattcgcattttgagta

SEQ ID NO: 175382 - DNA, 25 bp, SARS Virus
atgcgtccattcccattttgagtag

SEQ ID NO: 175383 - DNA, 25 bp, SARS Virus
tgcgtccattcgcattttgagtagg

SEQ ID NO: 175384 - DNA, 25 bp, SARS Virus
gcgtccattcgccttttgagtaggt

SEQ ID NO: 175385 - DNA, 25 bp, SARS Virus
cgtccattcgcactttgagtaggtg

SEQ ID NO: 175386 - DNA, 25 bp, SARS Virus
gtccattcgcatcttgagtaggtgc

SEQ ID NO: 175387 - DNA, 25 bp, SARS Virus
tccattcgcattctgagtaggtgct

SEQ ID NO: 175388 - DNA, 25 bp, SARS Virus
ccattcgcatttcgagtaggtgctt

SEQ ID NO: 175389 - DNA, 25 bp, SARS Virus
cattcgcattttcagtaggtgctta

SEQ ID NO: 175390 - DNA, 25 bp, SARS Virus
attcgcattttgcgtaggtgcttaa

SEQ ID NO: 175391 - DNA, 25 bp, SARS Virus
ttcgcattttgactaggtgcttaag

SEQ ID NO: 175392 - DNA, 25 bp, SARS Virus
tcgcattttgagcaggtgcttaagt

SEQ ID NO: 175393 - DNA, 25 bp, SARS Virus
cgcattttgagtcggtgcttaagta

SEQ ID NO: 175394 - DNA, 25 bp, SARS Virus
gcattttgagtacgtgcttaagtac

SEQ ID NO: 175395 - DNA, 25 bp, SARS Virus
cattttgagtagctgcttaagtact

SEQ ID NO: 175396 - DNA, 25 bp, SARS Virus
attttgagtaggcgcttaagtacta

SEQ ID NO: 175397 - DNA, 25 bp, SARS Virus
ttttgagtaggtccttaagtactag

SEQ ID NO: 175398 - DNA, 25 bp, SARS Virus
tttgagtaggtgcttaagtactagt

SEQ ID NO: 175399 - DNA, 25 bp, SARS Virus
ttgagtaggtgcctaagtactagtt

SEQ ID NO: 175400 - DNA, 25 bp, SARS Virus
tgagtaggtgctcaagtactagttg

SEQ ID NO: 175401 - DNA, 25 bp, SARS Virus
gagtaggtgcttcagtactagttgt

SEQ ID NO: 175402 - DNA, 25 bp, SARS Virus
agtaggtgcttacgtactagttgta

SEQ ID NO: 175403 - DNA, 25 bp, SARS Virus
gtaggtgcttaactactagttgtag

SEQ ID NO: 175404 - DNA, 25 bp, SARS Virus
taggtgcttaagcactagttgtagg

SEQ ID NO: 175405 - DNA, 25 bp, SARS Virus
aggtgcttaagtcctagttgtaggg

SEQ ID NO: 175406 - DNA, 25 bp, SARS Virus
ggtgcttaagtactagttgtaggga

SEQ ID NO: 175407 - DNA, 25 bp, SARS Virus
gtgcttaagtaccagttgtagggat

SEQ ID NO: 175408 - DNA, 25 bp, SARS Virus
tgcttaagtactcgttgtagggata

SEQ ID NO: 175409 - DNA, 25 bp, SARS Virus
gcttaagtactacttgtagggataa

SEQ ID NO: 175410 - DNA, 25 bp, SARS Virus
cttaagtactagctgtagggataaa

SEQ ID NO: 175411 - DNA, 25 bp, SARS Virus
ttaagtactagtcgtagggataaag

SEQ ID NO: 175412 - DNA, 25 bp, SARS Virus
taagtactagttctagggataaaga

SEQ ID NO: 175413 - DNA, 25 bp, SARS Virus
aagtactagttgcagggataaagat

SEQ ID NO: 175414 - DNA, 25 bp, SARS Virus
agtactagttgtcgggataaagata

SEQ ID NO: 175415 - DNA, 25 bp, SARS Virus
gtactagttgtacggataaagatat

SEQ ID NO: 175416 - DNA, 25 bp, SARS Virus
tactagttgtagcgataaagatatc

SEQ ID NO: 175417 - DNA, 25 bp, SARS Virus
actagttgtaggcataaagatatct

SEQ ID NO: 175418 - DNA, 25 bp, SARS Virus
ctagttgtagggctaaagatatctc

SEQ ID NO: 175419 - DNA, 25 bp, SARS Virus
tagttgtagggacaaagatatctct

SEQ ID NO: 175420 - DNA, 25 bp, SARS Virus
agttgtagggatcaagatatctctg

SEQ ID NO: 175421 - DNA, 25 bp, SARS Virus
gttgtagggatacagatatctctgt

SEQ ID NO: 175422 - DNA, 25 bp, SARS Virus
ttgtagggataacgatatctctgtg

SEQ ID NO: 175423 - DNA, 25 bp, SARS Virus
tgtagggataaacatatctctgtga

SEQ ID NO: 175424 - DNA, 25 bp, SARS Virus
gtagggataaagctatctctgtgag

SEQ ID NO: 175425 - DNA, 25 bp, SARS Virus
tagggataaagacatctctgtgagt

SEQ ID NO: 175426 - DNA, 25 bp, SARS Virus
agggataaagatctctctgtgagta

SEQ ID NO: 175427 - DNA, 25 bp, SARS Virus
gggataaagatacctctgtgagtat

SEQ ID NO: 175428 - DNA, 25 bp, SARS Virus
ggataaagatatctctgtgagtatc

SEQ ID NO: 175429 - DNA, 25 bp, SARS Virus
gataaagatatccctgtgagtatct

SEQ ID NO: 175430 - DNA, 25 bp, SARS Virus
ataaagatatctctgtgagtatctc

SEQ ID NO: 175431 - DNA, 25 bp, SARS Virus
taaagatatctccgtgagtatctcg

SEQ ID NO: 175432 - DNA, 25 bp, SARS Virus
aaagatatctctctgagtatctcgg

SEQ ID NO: 175433 - DNA, 25 bp, SARS Virus
aagatatctctgcgagtatctcgga

SEQ ID NO: 175434 - DNA, 25 bp, SARS Virus
agatatctctgtcagtatctcggac

SEQ ID NO: 175435 - DNA, 25 bp, SARS Virus
gatatctctgtgcgtatctcggaca

SEQ ID NO: 175436 - DNA, 25 bp, SARS Virus
atatctctgtgactatctcggacac

SEQ ID NO: 175437 - DNA, 25 bp, SARS Virus
tatctctgtgagcatctcggacaca

SEQ ID NO: 175438 - DNA, 25 bp, SARS Virus
atctctgtgagtctctcggacacaa

SEQ ID NO: 175439 - DNA, 25 bp, SARS Virus
tctctgtgagtacctcggacacaac

SEQ ID NO: 175440 - DNA, 25 bp, SARS Virus
ctctgtgagtatctcggacacaaca

SEQ ID NO: 175441 - DNA, 25 bp, SARS Virus
tctgtgagtatcccggacacaacat

SEQ ID NO: 175442 - DNA, 25 bp, SARS Virus
ctgtgagtatctcggacacaacatc

SEQ ID NO: 175443 - DNA, 25 bp, SARS Virus
tgtgagtatctccgacacaacatct

SEQ ID NO: 175444 - DNA, 25 bp, SARS Virus
gtgagtatctcgcacacaacatcta

SEQ ID NO: 175445 - DNA, 25 bp, SARS Virus
tgagtatctcggccacaacatctaa

SEQ ID NO: 175446 - DNA, 25 bp, SARS Virus
gagtatctcggacacaacatctaac

SEQ ID NO: 175447 - DNA, 25 bp, SARS Virus
agtatctcggacccaacatctaacg

SEQ ID NO: 175448 - DNA, 25 bp, SARS Virus
gtatctcggacacaacatctaacgc

SEQ ID NO: 175449 - DNA, 25 bp, SARS Virus
tatctcggacaccacatctaacgcc

SEQ ID NO: 175450 - DNA, 25 bp, SARS Virus
atctcggacacaccatctaacgcct

SEQ ID NO: 175451 - DNA, 25 bp, SARS Virus
tctcggacacaacatctaacgcctg

SEQ ID NO: 175452 - DNA, 25 bp, SARS Virus
ctcggacacaacctctaacgcctgt

SEQ ID NO: 175453 - DNA, 25 bp, SARS Virus
tcggacacaacacctaacgcctgta

SEQ ID NO: 175454 - DNA, 25 bp, SARS Virus
cggacacaacatctaacgcctgtat

SEQ ID NO: 175455 - DNA, 25 bp, SARS Virus
ggacacaacatccaacgcctgtatg

SEQ ID NO: 175456 - DNA, 25 bp, SARS Virus
gacacaacatctcacgcctgtatga

SEQ ID NO: 175457 - DNA, 25 bp, SARS Virus
acacaacatctaccgcctgtatgaa

SEQ ID NO: 175458 - DNA, 25 bp, SARS Virus
cacaacatctaacgcctgtatgaac

SEQ ID NO: 175459 - DNA, 25 bp, SARS Virus
acaacatctaacccctgtatgaaca

SEQ ID NO: 175460 - DNA, 25 bp, SARS Virus
caacatctaacgcctgtatgaacag

SEQ ID NO: 175461 - DNA, 25 bp, SARS Virus
aacatctaacgcctgtatgaacagt

SEQ ID NO: 175462 - DNA, 25 bp, SARS Virus
acatctaacgcccgtatgaacagtc

SEQ ID NO: 175463 - DNA, 25 bp, SARS Virus
catctaacgcctctatgaacagtcg

SEQ ID NO: 175464 - DNA, 25 bp, SARS Virus
atctaacgcctgcatgaacagtcga

SEQ ID NO: 175465 - DNA, 25 bp, SARS Virus
tctaacgcctgtctgaacagtcgat

SEQ ID NO: 175466 - DNA, 25 bp, SARS Virus
ctaacgcctgtacgaacagtcgata

SEQ ID NO: 175467 - DNA, 25 bp, SARS Virus
taacgcctgtatcaacagtcgatag

SEQ ID NO: 175468 - DNA, 25 bp, SARS Virus
aacgcctgtatgcacagtcgataga

SEQ ID NO: 175469 - DNA, 25 bp, SARS Virus
acgcctgtatgaccagtcgatagaa

SEQ ID NO: 175470 - DNA, 25 bp, SARS Virus
cgcctgtatgaacagtcgatagaat

SEQ ID NO: 175471 - DNA, 25 bp, SARS Virus
gcctgtatgaaccgtcgatagaata

SEQ ID NO: 175472 - DNA, 25 bp, SARS Virus
cctgtatgaacactcgatagaataa

SEQ ID NO: 175473 - DNA, 25 bp, SARS Virus
ctgtatgaacagccgatagaataat

SEQ ID NO: 175474 - DNA, 25 bp, SARS Virus
tgtatgaacagtcgatagaataatg

SEQ ID NO: 175475 - DNA, 25 bp, SARS Virus
gtatgaacagtccatagaataatgg

SEQ ID NO: 175476 - DNA, 25 bp, SARS Virus
tatgaacagtcgctagaataatggt

SEQ ID NO: 175477 - DNA, 25 bp, SARS Virus
atgaacagtcgacagaataatggta

SEQ ID NO: 175478 - DNA, 25 bp, SARS Virus
tgaacagtcgatcgaataatggtag

SEQ ID NO: 175479 - DNA, 25 bp, SARS Virus
gaacagtcgatacaataatggtagt

SEQ ID NO: 175480 - DNA, 25 bp, SARS Virus
aacagtcgatagcataatggtagtc

SEQ ID NO: 175481 - DNA, 25 bp, SARS Virus
acagtcgatagactaatggtagtca

SEQ ID NO: 175482 - DNA, 25 bp, SARS Virus
cagtcgatagaacaatggtagtcaa

SEQ ID NO: 175483 - DNA, 25 bp, SARS Virus
agtcgatagaatcatggtagtcaac

SEQ ID NO: 175484 - DNA, 25 bp, SARS Virus
gtcgatagaatactggtagtcaact

SEQ ID NO: 175485 - DNA, 25 bp, SARS Virus
tcgatagaataacggtagtcaactt

SEQ ID NO: 175486 - DNA, 25 bp, SARS Virus
cgatagaataatcgtagtcaacttt

SEQ ID NO: 175487 - DNA, 25 bp, SARS Virus
gatagaataatgctagtcaactttc

SEQ ID NO: 175488 - DNA, 25 bp, SARS Virus
atagaataatggcagtcaactttct

SEQ ID NO: 175489 - DNA, 25 bp, SARS Virus
tagaataatggtcgtcaactttctt

SEQ ID NO: 175490 - DNA, 25 bp, SARS Virus
agaataatggtactcaactttcttc

SEQ ID NO: 175491 - DNA, 25 bp, SARS Virus
gaataatggtagccaactttcttca

SEQ ID NO: 175492 - DNA, 25 bp, SARS Virus
aataatggtagtcaactttcttcac

SEQ ID NO: 175493 - DNA, 25 bp, SARS Virus
ataatggtagtccactttcttcacg

SEQ ID NO: 175494 - DNA, 25 bp, SARS Virus
taatggtagtcacctttcttcacgt

SEQ ID NO: 175495 - DNA, 25 bp, SARS Virus
aatggtagtcaactttcttcacgta

SEQ ID NO: 175496 - DNA, 25 bp, SARS Virus
atggtagtcaaccttcttcacgtaa

SEQ ID NO: 175497 - DNA, 25 bp, SARS Virus
tggtagtcaactctcttcacgtaaa

SEQ ID NO: 175498 - DNA, 25 bp, SARS Virus
ggtagtcaacttccttcacgtaaat

SEQ ID NO: 175499 - DNA, 25 bp, SARS Virus
gtagtcaactttcttcacgtaaatg

SEQ ID NO: 175500 - DNA, 25 bp, SARS Virus
tagtcaactttcctcacgtaaatgt

SEQ ID NO: 175501 - DNA, 25 bp, SARS Virus
agtcaactttctccacgtaaatgta

SEQ ID NO: 175502 - DNA, 25 bp, SARS Virus
gtcaactttcttcacgtaaatgtaa

SEQ ID NO: 175503 - DNA, 25 bp, SARS Virus
tcaactttcttcccgtaaatgtaac

SEQ ID NO: 175504 - DNA, 25 bp, SARS Virus
caactttcttcacgtaaatgtaacc

SEQ ID NO: 175505 - DNA, 25 bp, SARS Virus
aactttcttcacctaaatgtaaccg

SEQ ID NO: 175506 - DNA, 25 bp, SARS Virus
actttcttcacgcaaatgtaaccga

SEQ ID NO: 175507 - DNA, 25 bp, SARS Virus
ctttcttcacgtcaatgtaaccgac

SEQ ID NO: 175508 - DNA, 25 bp, SARS Virus
tttcttcacgtacatgtaaccgaca

SEQ ID NO: 175509 - DNA, 25 bp, SARS Virus
ttcttcacgtaactgtaaccgacat

SEQ ID NO: 175510 - DNA, 25 bp, SARS Virus
tcttcacgtaaacgtaaccgacatt

SEQ ID NO: 175511 - DNA, 25 bp, SARS Virus
cttcacgtaaatctaaccgacattg

SEQ ID NO: 175512 - DNA, 25 bp, SARS Virus
ttcacgtaaatgcaaccgacattgt

SEQ ID NO: 175513 - DNA, 25 bp, SARS Virus
tcacgtaaatgtcaccgacattgtc

SEQ ID NO: 175514 - DNA, 25 bp, SARS Virus
cacgtaaatgtacccgacattgtcg

SEQ ID NO: 175515 - DNA, 25 bp, SARS Virus
acgtaaatgtaaccgacattgtcga

SEQ ID NO: 175516 - DNA, 25 bp, SARS Virus
cgtaaatgtaaccgacattgtcgaa

SEQ ID NO: 175517 - DNA, 25 bp, SARS Virus
gtaaatgtaacccacattgtcgaac

SEQ ID NO: 175518 - DNA, 25 bp, SARS Virus
taaatgtaaccgccattgtcgaact

SEQ ID NO: 175519 - DNA, 25 bp, SARS Virus
aaatgtaaccgacattgtcgaactg

SEQ ID NO: 175520 - DNA, 25 bp, SARS Virus
aatgtaaccgaccttgtcgaactgt

SEQ ID NO: 175521 - DNA, 25 bp, SARS Virus
atgtaaccgacactgtcgaactgtt

SEQ ID NO: 175522 - DNA, 25 bp, SARS Virus
tgtaaccgacatcgtcgaactgttt

SEQ ID NO: 175523 - DNA, 25 bp, SARS Virus
gtaaccgacattctcgaactgttta

SEQ ID NO: 175524 - DNA, 25 bp, SARS Virus
taaccgacattgccgaactgtttac

SEQ ID NO: 175525 - DNA, 25 bp, SARS Virus
aaccgacattgtcgaactgtttaca

SEQ ID NO: 175526 - DNA, 25 bp, SARS Virus
accgacattgtccaactgtttacaa

SEQ ID NO: 175527 - DNA, 25 bp, SARS Virus
ccgacattgtcgcactgtttacaat

SEQ ID NO: 175528 - DNA, 25 bp, SARS Virus
cgacattgtcgacctgtttacaatt

SEQ ID NO: 175529 - DNA, 25 bp, SARS Virus
gacattgtcgaactgtttacaattt

SEQ ID NO: 175530 - DNA, 25 bp, SARS Virus
acattgtcgaaccgtttacaatttc

SEQ ID NO: 175531 - DNA, 25 bp, SARS Virus
cattgtcgaactctttacaatttct

SEQ ID NO: 175532 - DNA, 25 bp, SARS Virus
attgtcgaactgcttacaatttctg

SEQ ID NO: 175533 - DNA, 25 bp, SARS Virus
ttgtcgaactgtctacaatttctgt

SEQ ID NO: 175534 - DNA, 25 bp, SARS Virus
tgtcgaactgttcacaatttctgtg

SEQ ID NO: 175535 - DNA, 25 bp, SARS Virus
gtcgaactgtttccaatttctgtga

SEQ ID NO: 175536 - DNA, 25 bp, SARS Virus
tcgaactgtttacaatttctgtgat

SEQ ID NO: 175537 - DNA, 25 bp, SARS Virus
cgaactgtttaccatttctgtgata

SEQ ID NO: 175538 - DNA, 25 bp, SARS Virus
gaactgtttacactttctgtgataa

SEQ ID NO: 175539 - DNA, 25 bp, SARS Virus
aactgtttacaacttctgtgataat

SEQ ID NO: 175540 - DNA, 25 bp, SARS Virus
actgtttacaatctctgtgataatc

SEQ ID NO: 175541 - DNA, 25 bp, SARS Virus
ctgtttacaattcctgtgataatcg

SEQ ID NO: 175542 - DNA, 25 bp, SARS Virus
tgtttacaatttctgtgataatcgt

SEQ ID NO: 175543 - DNA, 25 bp, SARS Virus
gtttacaatttccgtgataatcgta

SEQ ID NO: 175544 - DNA, 25 bp, SARS Virus
tttacaatttctctgataatcgtat

SEQ ID NO: 175545 - DNA, 25 bp, SARS Virus
ttacaatttctgcgataatcgtatt

SEQ ID NO: 175546 - DNA, 25 bp, SARS Virus
tacaatttctgtcataatcgtattc

SEQ ID NO: 175547 - DNA, 25 bp, SARS Virus
acaatttctgtgctaatcgtattcg

SEQ ID NO: 175548 - DNA, 25 bp, SARS Virus
caatttctgtgacaatcgtattcgt

SEQ ID NO: 175549 - DNA, 25 bp, SARS Virus
aatttctgtgatcatcgtattcgtc

SEQ ID NO: 175550 - DNA, 25 bp, SARS Virus
atttctgtgatactcgtattcgtca

SEQ ID NO: 175551 - DNA, 25 bp, SARS Virus
tttctgtgataaccgtattcgtcaa

SEQ ID NO: 175552 - DNA, 25 bp, SARS Virus
ttctgtgataatcgtattcgtcaac

SEQ ID NO: 175553 - DNA, 25 bp, SARS Virus
tctgtgataatcctattcgtcaaca

SEQ ID NO: 175554 - DNA, 25 bp, SARS Virus
ctgtgataatcgcattcgtcaacat

SEQ ID NO: 175555 - DNA, 25 bp, SARS Virus
tgtgataatcgtcttcgtcaacatc

SEQ ID NO: 175556 - DNA, 25 bp, SARS Virus
gtgataatcgtactcgtcaacatcg

SEQ ID NO: 175557 - DNA, 25 bp, SARS Virus
tgataatcgtatccgtcaacatcgt

SEQ ID NO: 175558 - DNA, 25 bp, SARS Virus
gataatcgtattcgtcaacatcgta

SEQ ID NO: 175559 - DNA, 25 bp, SARS Virus
ataatcgtattcctcaacatcgtag

SEQ ID NO: 175560 - DNA, 25 bp, SARS Virus
taatcgtattcgccaacatcgtagt

SEQ ID NO: 175561 - DNA, 25 bp, SARS Virus
aatcgtattcgtcaacatcgtagtg

SEQ ID NO: 175562 - DNA, 25 bp, SARS Virus
atcgtattcgtccacatcgtagtgg

SEQ ID NO: 175563 - DNA, 25 bp, SARS Virus
tcgtattcgtcaccatcgtagtggc

SEQ ID NO: 175564 - DNA, 25 bp, SARS Virus
cgtattcgtcaacatcgtagtggcc

SEQ ID NO: 175565 - DNA, 25 bp, SARS Virus
gtattcgtcaacctcgtagtggcct

SEQ ID NO: 175566 - DNA, 25 bp, SARS Virus
tattcgtcaacaccgtagtggccta

SEQ ID NO: 175567 - DNA, 25 bp, SARS Virus
attcgtcaacatcgtagtggcctac

SEQ ID NO: 175568 - DNA, 25 bp, SARS Virus
ttcgtcaacatcctagtggcctact

SEQ ID NO: 175569 - DNA, 25 bp, SARS Virus
tcgtcaacatcgcagtggcctacta

SEQ ID NO: 175570 - DNA, 25 bp, SARS Virus
cgtcaacatcgtcgtggcctactac

SEQ ID NO: 175571 - DNA, 25 bp, SARS Virus
gtcaacatcgtactggcctactaca

SEQ ID NO: 175572 - DNA, 25 bp, SARS Virus
tcaacatcgtagcggcctactacaa

SEQ ID NO: 175573 - DNA, 25 bp, SARS Virus
caacatcgtagtcgcctactacaag

SEQ ID NO: 175574 - DNA, 25 bp, SARS Virus
aacatcgtagtgccctactacaagg

SEQ ID NO: 175575 - DNA, 25 bp, SARS Virus
acatcgtagtggcctactacaaggt

SEQ ID NO: 175576 - DNA, 25 bp, SARS Virus
catcgtagtggcctactacaaggtg

SEQ ID NO: 175577 - DNA, 25 bp, SARS Virus
atcgtagtggcccactacaaggtgg

SEQ ID NO: 175578 - DNA, 25 bp, SARS Virus
tcgtagtggcctcctacaaggtgga

SEQ ID NO: 175579 - DNA, 25 bp, SARS Virus
cgtagtggcctactacaaggtggac

SEQ ID NO: 175580 - DNA, 25 bp, SARS Virus
gtagtggcctaccacaaggtggacc

SEQ ID NO: 175581 - DNA, 25 bp, SARS Virus
tagtggcctactccaaggtggacca

SEQ ID NO: 175582 - DNA, 25 bp, SARS Virus
agtggcctactacaaggtggaccaa

SEQ ID NO: 175583 - DNA, 25 bp, SARS Virus
gtggcctactaccaggtggaccaaa

SEQ ID NO: 175584 - DNA, 25 bp, SARS Virus
tggcctactacacggtggaccaaat

SEQ ID NO: 175585 - DNA, 25 bp, SARS Virus
ggcctactacaacgtggaccaaatt

SEQ ID NO: 175586 - DNA, 25 bp, SARS Virus
gcctactacaagctggaccaaattg

SEQ ID NO: 175587 - DNA, 25 bp, SARS Virus
cctactacaaggcggaccaaattgt

SEQ ID NO: 175588 - DNA, 25 bp, SARS Virus
ctactacaaggtcgaccaaattgta

SEQ ID NO: 175589 - DNA, 25 bp, SARS Virus
tactacaaggtgcaccaaattgtat

SEQ ID NO: 175590 - DNA, 25 bp, SARS Virus
actacaaggtggcccaaattgtata

SEQ ID NO: 175591 - DNA, 25 bp, SARS Virus
ctacaaggtggaccaaattgtatat

SEQ ID NO: 175592 - DNA, 25 bp, SARS Virus
tacaaggtggaccaaattgtatatc

SEQ ID NO: 175593 - DNA, 25 bp, SARS Virus
acaaggtggacccaattgtatatca

SEQ ID NO: 175594 - DNA, 25 bp, SARS Virus
caaggtggaccacattgtatatcac

SEQ ID NO: 175595 - DNA, 25 bp, SARS Virus
aaggtggaccaacttgtatatcact

SEQ ID NO: 175596 - DNA, 25 bp, SARS Virus
aggtggaccaaactgtatatcactc

SEQ ID NO: 175597 - DNA, 25 bp, SARS Virus
ggtggaccaaatcgtatatcactcg

SEQ ID NO: 175598 - DNA, 25 bp, SARS Virus
gtggaccaaattctatatcactcgg

SEQ ID NO: 175599 - DNA, 25 bp, SARS Virus
tggaccaaattgcatatcactcggc

SEQ ID NO: 175600 - DNA, 25 bp, SARS Virus
ggaccaaattgtctatcactcggcg

SEQ ID NO: 175601 - DNA, 25 bp, SARS Virus
gaccaaattgtacatcactcggcgg

SEQ ID NO: 175602 - DNA, 25 bp, SARS Virus
accaaattgtatctcactcggcggt

SEQ ID NO: 175603 - DNA, 25 bp, SARS Virus
ccaaattgtataccactcggcggtg

SEQ ID NO: 175604 - DNA, 25 bp, SARS Virus
caaattgtatatcactcggcggtgt

SEQ ID NO: 175605 - DNA, 25 bp, SARS Virus
aaattgtatatccctcggcggtgtg

SEQ ID NO: 175606 - DNA, 25 bp, SARS Virus
aattgtatatcactcggcggtgtgt

SEQ ID NO: 175607 - DNA, 25 bp, SARS Virus
attgtatatcacccggcggtgtgta

SEQ ID NO: 175608 - DNA, 25 bp, SARS Virus
ttgtatatcactcggcggtgtgtac

SEQ ID NO: 175609 - DNA, 25 bp, SARS Virus
tgtatatcactccgcggtgtgtact

SEQ ID NO: 175610 - DNA, 25 bp, SARS Virus
gtatatcactcgccggtgtgtactg

SEQ ID NO: 175611 - DNA, 25 bp, SARS Virus
tatatcactcggcggtgtgtactgg

SEQ ID NO: 175612 - DNA, 25 bp, SARS Virus
atatcactcggccgtgtgtactggt

SEQ ID NO: 175613 - DNA, 25 bp, SARS Virus
tatcactcggcgctgtgtactggta

SEQ ID NO: 175614 - DNA, 25 bp, SARS Virus
atcactcggcggcgtgtactggtag

SEQ ID NO: 175615 - DNA, 25 bp, SARS Virus
tcactcggcggtctgtactggtaga

SEQ ID NO: 175616 - DNA, 25 bp, SARS Virus
cactcggcggtgcgtactggtagag

SEQ ID NO: 175617 - DNA, 25 bp, SARS Virus
actcggcggtgtctactggtagagt

SEQ ID NO: 175618 - DNA, 25 bp, SARS Virus
ctcggcggtgtgcactggtagagtg

SEQ ID NO: 175619 - DNA, 25 bp, SARS Virus
tcggcggtgtgtcctggtagagtga

SEQ ID NO: 175620 - DNA, 25 bp, SARS Virus
cggcggtgtgtactggtagagtgaa

SEQ ID NO: 175621 - DNA, 25 bp, SARS Virus
ggcggtgtgtaccggtagagtgaat

SEQ ID NO: 175622 - DNA, 25 bp, SARS Virus
gcggtgtgtactcgtagagtgaatt

SEQ ID NO: 175623 - DNA, 25 bp, SARS Virus
cggtgtgtactgctagagtgaatta

SEQ ID NO: 175624 - DNA, 25 bp, SARS Virus
ggtgtgtactggcagagtgaattat

SEQ ID NO: 175625 - DNA, 25 bp, SARS Virus
gtgtgtactggtcgagtgaattatg

SEQ ID NO: 175626 - DNA, 25 bp, SARS Virus
tgtgtactggtacagtgaattatga

SEQ ID NO: 175627 - DNA, 25 bp, SARS Virus
gtgtactggtagcgtgaattatgaa

SEQ ID NO: 175628 - DNA, 25 bp, SARS Virus
tgtactggtagactgaattatgaac

SEQ ID NO: 175629 - DNA, 25 bp, SARS Virus
gtactggtagagcgaattatgaacg

SEQ ID NO: 175630 - DNA, 25 bp, SARS Virus
tactggtagagtcaattatgaacgc

SEQ ID NO: 175631 - DNA, 25 bp, SARS Virus
actggtagagtgcattatgaacgcg

SEQ ID NO: 175632 - DNA, 25 bp, SARS Virus
ctggtagagtgacttatgaacgcgt

SEQ ID NO: 175633 - DNA, 25 bp, SARS Virus
tggtagagtgaactatgaacgcgtg

SEQ ID NO: 175634 - DNA, 25 bp, SARS Virus
ggtagagtgaatcatgaacgcgtgt

SEQ ID NO: 175635 - DNA, 25 bp, SARS Virus
gtagagtgaattctgaacgcgtgtg

SEQ ID NO: 175636 - DNA, 25 bp, SARS Virus
tagagtgaattacgaacgcgtgtga

SEQ ID NO: 175637 - DNA, 25 bp, SARS Virus
agagtgaattatcaacgcgtgtgag

SEQ ID NO: 175638 - DNA, 25 bp, SARS Virus
gagtgaattatgcacgcgtgtgagc

SEQ ID NO: 175639 - DNA, 25 bp, SARS Virus
agtgaattatgaccgcgtgtgagca

SEQ ID NO: 175640 - DNA, 25 bp, SARS Virus
gtgaattatgaacgcgtgtgagcaa

SEQ ID NO: 175641 - DNA, 25 bp, SARS Virus
tgaattatgaacccgtgtgagcaat

SEQ ID NO: 175642 - DNA, 25 bp, SARS Virus
gaattatgaacgcgtgtgagcaatc

SEQ ID NO: 175643 - DNA, 25 bp, SARS Virus
aattatgaacgcctgtgagcaatcg

SEQ ID NO: 175644 - DNA, 25 bp, SARS Virus
attatgaacgcgcgtgagcaatcga

SEQ ID NO: 175645 - DNA, 25 bp, SARS Virus
ttatgaacgcgtctgagcaatcgat

SEQ ID NO: 175646 - DNA, 25 bp, SARS Virus
tatgaacgcgtgcgagcaatcgatt

SEQ ID NO: 175647 - DNA, 25 bp, SARS Virus
atgaacgcgtgtcagcaatcgattg

SEQ ID NO: 175648 - DNA, 25 bp, SARS Virus
tgaacgcgtgtgcgcaatcgattgg

SEQ ID NO: 175649 - DNA, 25 bp, SARS Virus
gaacgcgtgtgaccaatcgattgga

SEQ ID NO: 175650 - DNA, 25 bp, SARS Virus
aacgcgtgtgagcaatcgattggac

SEQ ID NO: 175651 - DNA, 25 bp, SARS Virus
acgcgtgtgagccatcgattggaca

SEQ ID NO: 175652 - DNA, 25 bp, SARS Virus
cgcgtgtgagcactcgattggacat

SEQ ID NO: 175653 - DNA, 25 bp, SARS Virus
gcgtgtgagcaaccgattggacatc

SEQ ID NO: 175654 - DNA, 25 bp, SARS Virus
cgtgtgagcaatcgattggacatct

SEQ ID NO: 175655 - DNA, 25 bp, SARS Virus
gtgtgagcaatccattggacatctt

SEQ ID NO: 175656 - DNA, 25 bp, SARS Virus
tgtgagcaatcgcttggacatcttt

SEQ ID NO: 175657 - DNA, 25 bp, SARS Virus
gtgagcaatcgactggacatctttg

SEQ ID NO: 175658 - DNA, 25 bp, SARS Virus
tgagcaatcgatcggacatctttgc

SEQ ID NO: 175659 - DNA, 25 bp, SARS Virus
gagcaatcgattcgacatctttgcc

SEQ ID NO: 175660 - DNA, 25 bp, SARS Virus
agcaatcgattgcacatctttgcca

SEQ ID NO: 175661 - DNA, 25 bp, SARS Virus
gcaatcgattggccatctttgccac

SEQ ID NO: 175662 - DNA, 25 bp, SARS Virus
caatcgattggacatctttgccaca

SEQ ID NO: 175663 - DNA, 25 bp, SARS Virus
aatcgattggacctctttgccacac

SEQ ID NO: 175664 - DNA, 25 bp, SARS Virus
atcgattggacacctttgccacact

SEQ ID NO: 175665 - DNA, 25 bp, SARS Virus
tcgattggacatctttgccacacta

SEQ ID NO: 175666 - DNA, 25 bp, SARS Virus
cgattggacatccttgccacactat

SEQ ID NO: 175667 - DNA, 25 bp, SARS Virus
gattggacatctctgccacactatt

SEQ ID NO: 175668 - DNA, 25 bp, SARS Virus
attggacatcttcgccacactattc

SEQ ID NO: 175669 - DNA, 25 bp, SARS Virus
ttggacatctttcccacactattca

SEQ ID NO: 175670 - DNA, 25 bp, SARS Virus
tggacatctttgccacactattcaa

SEQ ID NO: 175671 - DNA, 25 bp, SARS Virus
ggacatctttgccacactattcaat

SEQ ID NO: 175672 - DNA, 25 bp, SARS Virus
gacatctttgccccactattcaatg

SEQ ID NO: 175673 - DNA, 25 bp, SARS Virus
acatctttgccacactattcaatgt

SEQ ID NO: 175674 - DNA, 25 bp, SARS Virus
catctttgccaccctattcaatgtc

SEQ ID NO: 175675 - DNA, 25 bp, SARS Virus
atctttgccacactattcaatgtcg

SEQ ID NO: 175676 - DNA, 25 bp, SARS Virus
tctttgccacaccattcaatgtcgt

SEQ ID NO: 175677 - DNA, 25 bp, SARS Virus
ctttgccacactcttcaatgtcgtt

SEQ ID NO: 175678 - DNA, 25 bp, SARS Virus
tttgccacactactcaatgtcgttc

SEQ ID NO: 175679 - DNA, 25 bp, SARS Virus
ttgccacactatccaatgtcgttca

SEQ ID NO: 175680 - DNA, 25 bp, SARS Virus
tgccacactattcaatgtcgttcac

SEQ ID NO: 175681 - DNA, 25 bp, SARS Virus
gccacactattccatgtcgttcaca

SEQ ID NO: 175682 - DNA, 25 bp, SARS Virus
ccacactattcactgtcgttcacaa

SEQ ID NO: 175683 - DNA, 25 bp, SARS Virus
cacactattcaacgtcgttcacaat

SEQ ID NO: 175684 - DNA, 25 bp, SARS Virus
acactattcaatctcgttcacaata

SEQ ID NO: 175685 - DNA, 25 bp, SARS Virus
cactattcaatgccgttcacaatac

SEQ ID NO: 175686 - DNA, 25 bp, SARS Virus
actattcaatgtcgttcacaataca

SEQ ID NO: 175687 - DNA, 25 bp, SARS Virus
ctattcaatgtccttcacaatacaa

SEQ ID NO: 175688 - DNA, 25 bp, SARS Virus
tattcaatgtcgctcacaatacaaa

SEQ ID NO: 175689 - DNA, 25 bp, SARS Virus
attcaatgtcgtccacaatacaaac

SEQ ID NO: 175690 - DNA, 25 bp, SARS Virus
ttcaatgtcgttcacaatacaaacg

SEQ ID NO: 175691 - DNA, 25 bp, SARS Virus
tcaatgtcgttcccaatacaaacgc

SEQ ID NO: 175692 - DNA, 25 bp, SARS Virus
caatgtcgttcacaatacaaacgct

SEQ ID NO: 175693 - DNA, 25 bp, SARS Virus
aatgtcgttcaccatacaaacgctc

SEQ ID NO: 175694 - DNA, 25 bp, SARS Virus
atgtcgttcacactacaaacgctcg

SEQ ID NO: 175695 - DNA, 25 bp, SARS Virus
tgtcgttcacaacacaaacgctcgt

SEQ ID NO: 175696 - DNA, 25 bp, SARS Virus
gtcgttcacaatccaaacgctcgtt

SEQ ID NO: 175697 - DNA, 25 bp, SARS Virus
tcgttcacaatacaaacgctcgttc

SEQ ID NO: 175698 - DNA, 25 bp, SARS Virus
cgttcacaataccaacgctcgttct

SEQ ID NO: 175699 - DNA, 25 bp, SARS Virus
gttcacaatacacacgctcgttctt

SEQ ID NO: 175700 - DNA, 25 bp, SARS Virus
ttcacaatacaaccgctcgttcttg

SEQ ID NO: 175701 - DNA, 25 bp, SARS Virus
tcacaatacaaacgctcgttcttgt

SEQ ID NO: 175702 - DNA, 25 bp, SARS Virus
cacaatacaaaccctcgttcttgtt

SEQ ID NO: 175703 - DNA, 25 bp, SARS Virus
acaatacaaacgctcgttcttgttc

SEQ ID NO: 175704 - DNA, 25 bp, SARS Virus
caatacaaacgcccgttcttgttct

SEQ ID NO: 175705 - DNA, 25 bp, SARS Virus
aatacaaacgctcgttcttgttctc

SEQ ID NO: 175706 - DNA, 25 bp, SARS Virus
atacaaacgctccttcttgttctct

SEQ ID NO: 175707 - DNA, 25 bp, SARS Virus
tacaaacgctcgctcttgttctctc

SEQ ID NO: 175708 - DNA, 25 bp, SARS Virus
acaaacgctcgtccttgttctctcc

SEQ ID NO: 175709 - DNA, 25 bp, SARS Virus
caaacgctcgttcttgttctctccg

SEQ ID NO: 175710 - DNA, 25 bp, SARS Virus
aaacgctcgttcctgttctctccgg

SEQ ID NO: 175711 - DNA, 25 bp, SARS Virus
aacgctcgttctcgttctctccggt

SEQ ID NO: 175712 - DNA, 25 bp, SARS Virus
acgctcgttcttcttctctccggta

SEQ ID NO: 175713 - DNA, 25 bp, SARS Virus
cagagtcaggttgtaaaacggagtc

SEQ ID NO: 175714 - DNA, 25 bp, SARS Virus
agagtcaggttggaaaacggagtct

SEQ ID NO: 175715 - DNA, 25 bp, SARS Virus
gagtcaggttgtgaaacggagtctg

SEQ ID NO: 175716 - DNA, 25 bp, SARS Virus
agtcaggttgtagaacggagtctgt

SEQ ID NO: 175717 - DNA, 25 bp, SARS Virus
gtcaggttgtaagacggagtctgta

SEQ ID NO: 175718 - DNA, 25 bp, SARS Virus
tcaggttgtaaagcggagtctgtac

SEQ ID NO: 175719 - DNA, 25 bp, SARS Virus
caggttgtaaaagggagtctgtact

SEQ ID NO: 175720 - DNA, 25 bp, SARS Virus
aggttgtaaaacggagtctgtactt

SEQ ID NO: 175721 - DNA, 25 bp, SARS Virus
ggttgtaaaacggagtctgtacttg

SEQ ID NO: 175722 - DNA, 25 bp, SARS Virus
gttgtaaaacggggtctgtacttgt

SEQ ID NO: 175723 - DNA, 25 bp, SARS Virus
ttgtaaaacggagtctgtacttgtg

SEQ ID NO: 175724 - DNA, 25 bp, SARS Virus
tgtaaaacggaggctgtacttgtgt

SEQ ID NO: 175725 - DNA, 25 bp, SARS Virus
gtaaaacggagtgtgtacttgtgta

SEQ ID NO: 175726 - DNA, 25 bp, SARS Virus
taaaacggagtcggtacttgtgtaa

SEQ ID NO: 175727 - DNA, 25 bp, SARS Virus
aaaacggagtctgtacttgtgtaat

SEQ ID NO: 175728 - DNA, 25 bp, SARS Virus
aaacggagtctggacttgtgtaata

SEQ ID NO: 175729 - DNA, 25 bp, SARS Virus
aacggagtctgtgcttgtgtaataa

SEQ ID NO: 175730 - DNA, 25 bp, SARS Virus
acggagtctgtagttgtgtaataaa

SEQ ID NO: 175731 - DNA, 25 bp, SARS Virus
cggagtctgtacgtgtgtaataaaa

SEQ ID NO: 175732 - DNA, 25 bp, SARS Virus
ggagtctgtactggtgtaataaaac

SEQ ID NO: 175733 - DNA, 25 bp, SARS Virus
gagtctgtacttgtgtaataaaact

SEQ ID NO: 175734 - DNA, 25 bp, SARS Virus
agtctgtacttgggtaataaaacta

SEQ ID NO: 175735 - DNA, 25 bp, SARS Virus
gtctgtacttgtgtaataaaactat

SEQ ID NO: 175736 - DNA, 25 bp, SARS Virus
tctgtacttgtggaataaaactatt

SEQ ID NO: 175737 - DNA, 25 bp, SARS Virus
ctgtacttgtgtgataaaactatta

SEQ ID NO: 175738 - DNA, 25 bp, SARS Virus
tgtacttgtgtagtaaaactattat

SEQ ID NO: 175739 - DNA, 25 bp, SARS Virus
gtacttgtgtaagaaaactattatt

SEQ ID NO: 175740 - DNA, 25 bp, SARS Virus
tacttgtgtaatgaaactattattt

SEQ ID NO: 175741 - DNA, 25 bp, SARS Virus
acttgtgtaatagaactattatttc

SEQ ID NO: 175742 - DNA, 25 bp, SARS Virus
cttgtgtaataagactattatttct

SEQ ID NO: 175743 - DNA, 25 bp, SARS Virus
ttgtgtaataaagctattatttctt

SEQ ID NO: 175744 - DNA, 25 bp, SARS Virus
tgtgtaataaaagtattatttcttg

SEQ ID NO: 175745 - DNA, 25 bp, SARS Virus
gtgtaataaaacgattatttcttga

SEQ ID NO: 175746 - DNA, 25 bp, SARS Virus
tgtaataaaactgttatttcttgac

SEQ ID NO: 175747 - DNA, 25 bp, SARS Virus
gtaataaaactagtatttcttgacg

SEQ ID NO: 175748 - DNA, 25 bp, SARS Virus
taataaaactatgatttcttgacgg

SEQ ID NO: 175749 - DNA, 25 bp, SARS Virus
aataaaactattgtttcttgacgga

SEQ ID NO: 175750 - DNA, 25 bp, SARS Virus
ataaaactattagttcttgacggaa

SEQ ID NO: 175751 - DNA, 25 bp, SARS Virus
taaaactattatgtcttgacggaat

SEQ ID NO: 175752 - DNA, 25 bp, SARS Virus
aaaactattattgcttgacggaatt

SEQ ID NO: 175753 - DNA, 25 bp, SARS Virus
aaactattatttgttgacggaattt

SEQ ID NO: 175754 - DNA, 25 bp, SARS Virus
aactattatttcgtgacggaatttc

SEQ ID NO: 175755 - DNA, 25 bp, SARS Virus
actattatttctggacggaatttca

SEQ ID NO: 175756 - DNA, 25 bp, SARS Virus
ctattatttcttgacggaatttcaa

SEQ ID NO: 175757 - DNA, 25 bp, SARS Virus
tattatttcttggcggaatttcaag

SEQ ID NO: 175758 - DNA, 25 bp, SARS Virus
attatttcttgagggaatttcaaga

SEQ ID NO: 175759 - DNA, 25 bp, SARS Virus
ttatttcttgacggaatttcaagaa

SEQ ID NO: 175760 - DNA, 25 bp, SARS Virus
tatttcttgacggaatttcaagaat

SEQ ID NO: 175761 - DNA, 25 bp, SARS Virus
atttcttgacgggatttcaagaatt

SEQ ID NO: 175762 - DNA, 25 bp, SARS Virus
tttcttgacggagtttcaagaatta

SEQ ID NO: 175763 - DNA, 25 bp, SARS Virus
ttcttgacggaagttcaagaattac

SEQ ID NO: 175764 - DNA, 25 bp, SARS Virus
tcttgacggaatgtcaagaattacg

SEQ ID NO: 175765 - DNA, 25 bp, SARS Virus
cttgacggaattgcaagaattacga

SEQ ID NO: 175766 - DNA, 25 bp, SARS Virus
ttgacggaatttgaagaattacgat

SEQ ID NO: 175767 - DNA, 25 bp, SARS Virus
tgacggaatttcgagaattacgatc

SEQ ID NO: 175768 - DNA, 25 bp, SARS Virus
gacggaatttcaggaattacgatcg

SEQ ID NO: 175769 - DNA, 25 bp, SARS Virus
acggaatttcaagaattacgatcga

SEQ ID NO: 175770 - DNA, 25 bp, SARS Virus
cggaatttcaaggattacgatcgat

SEQ ID NO: 175771 - DNA, 25 bp, SARS Virus
ggaatttcaagagttacgatcgatg

SEQ ID NO: 175772 - DNA, 25 bp, SARS Virus
gaatttcaagaagtacgatcgatga

SEQ ID NO: 175773 - DNA, 25 bp, SARS Virus
aatttcaagaatgacgatcgatgat

SEQ ID NO: 175774 - DNA, 25 bp, SARS Virus
atttcaagaattgcgatcgatgatt

SEQ ID NO: 175775 - DNA, 25 bp, SARS Virus
tttcaagaattaggatcgatgattt

SEQ ID NO: 175776 - DNA, 25 bp, SARS Virus
ttcaagaattacgatcgatgatttg

SEQ ID NO: 175777 - DNA, 25 bp, SARS Virus
tcaagaattacggtcgatgatttgg

SEQ ID NO: 175778 - DNA, 25 bp, SARS Virus
caagaattacgagcgatgatttgga

SEQ ID NO: 175779 - DNA, 25 bp, SARS Virus
aagaattacgatggatgatttggaa

SEQ ID NO: 175780 - DNA, 25 bp, SARS Virus
agaattacgatcgatgatttggaac

SEQ ID NO: 175781 - DNA, 25 bp, SARS Virus
gaattacgatcggtgatttggaact

SEQ ID NO: 175782 - DNA, 25 bp, SARS Virus
aattacgatcgaggatttggaactc

SEQ ID NO: 175783 - DNA, 25 bp, SARS Virus
attacgatcgatgatttggaactcg

SEQ ID NO: 175784 - DNA, 25 bp, SARS Virus
ttacgatcgatggtttggaactcgg

SEQ ID NO: 175785 - DNA, 25 bp, SARS Virus
tacgatcgatgagttggaactcggc

SEQ ID NO: 175786 - DNA, 25 bp, SARS Virus
acgatcgatgatgtggaactcggcg

SEQ ID NO: 175787 - DNA, 25 bp, SARS Virus
cgatcgatgattgggaactcggcgt

SEQ ID NO: 175788 - DNA, 25 bp, SARS Virus
gatcgatgatttggaactcggcgta

SEQ ID NO: 175789 - DNA, 25 bp, SARS Virus
atcgatgatttggaactcggcgtat

SEQ ID NO: 175790 - DNA, 25 bp, SARS Virus
tcgatgatttgggactcggcgtatc

SEQ ID NO: 175791 - DNA, 25 bp, SARS Virus
cgatgatttggagctcggcgtatca

SEQ ID NO: 175792 - DNA, 25 bp, SARS Virus
gatgatttggaagtcggcgtatcaa

SEQ ID NO: 175793 - DNA, 25 bp, SARS Virus
atgatttggaacgcggcgtatcaat

SEQ ID NO: 175794 - DNA, 25 bp, SARS Virus
tgatttggaactgggcgtatcaatg

SEQ ID NO: 175795 - DNA, 25 bp, SARS Virus
gatttggaactcggcgtatcaatga

SEQ ID NO: 175796 - DNA, 25 bp, SARS Virus
atttggaactcggcgtatcaatgac

SEQ ID NO: 175797 - DNA, 25 bp, SARS Virus
tttggaactcggggtatcaatgaca

SEQ ID NO: 175798 - DNA, 25 bp, SARS Virus
ttggaactcggcgtatcaatgacaa

SEQ ID NO: 175799 - DNA, 25 bp, SARS Virus
tggaactcggcggatcaatgacaat

SEQ ID NO: 175800 - DNA, 25 bp, SARS Virus
ggaactcggcgtgtcaatgacaata

SEQ ID NO: 175801 - DNA, 25 bp, SARS Virus
gaactcggcgtagcaatgacaatat

SEQ ID NO: 175802 - DNA, 25 bp, SARS Virus
aactcggcgtatgaatgacaatatc

SEQ ID NO: 175803 - DNA, 25 bp, SARS Virus
actcggcgtatcgatgacaatatcg

SEQ ID NO: 175804 - DNA, 25 bp, SARS Virus
ctcggcgtatcagtgacaatatcgt

SEQ ID NO: 175805 - DNA, 25 bp, SARS Virus
tcggcgtatcaaggacaatatcgtg

SEQ ID NO: 175806 - DNA, 25 bp, SARS Virus
cggcgtatcaatgacaatatcgtgt

SEQ ID NO: 175807 - DNA, 25 bp, SARS Virus
ggcgtatcaatggcaatatcgtgtg

SEQ ID NO: 175808 - DNA, 25 bp, SARS Virus
gcgtatcaatgagaatatcgtgtgt

SEQ ID NO: 175809 - DNA, 25 bp, SARS Virus
cgtatcaatgacgatatcgtgtgtt

SEQ ID NO: 175810 - DNA, 25 bp, SARS Virus
gtatcaatgacagtatcgtgtgttg

SEQ ID NO: 175811 - DNA, 25 bp, SARS Virus
tatcaatgacaagatcgtgtgttgc

SEQ ID NO: 175812 - DNA, 25 bp, SARS Virus
atcaatgacaatgtcgtgtgttgcc

SEQ ID NO: 175813 - DNA, 25 bp, SARS Virus
tcaatgacaatagcgtgtgttgccg

SEQ ID NO: 175814 - DNA, 25 bp, SARS Virus
caatgacaatatggtgtgttgccgt

SEQ ID NO: 175815 - DNA, 25 bp, SARS Virus
aatgacaatatcgtgtgttgccgta

SEQ ID NO: 175816 - DNA, 25 bp, SARS Virus
atgacaatatcgggtgttgccgtag

SEQ ID NO: 175817 - DNA, 25 bp, SARS Virus
tgacaatatcgtgtgttgccgtagt

SEQ ID NO: 175818 - DNA, 25 bp, SARS Virus
gacaatatcgtgggttgccgtagta

SEQ ID NO: 175819 - DNA, 25 bp, SARS Virus
acaatatcgtgtgttgccgtagtag

SEQ ID NO: 175820 - DNA, 25 bp, SARS Virus
caatatcgtgtggtgccgtagtagt

SEQ ID NO: 175821 - DNA, 25 bp, SARS Virus
aatatcgtgtgtggccgtagtagtc

SEQ ID NO: 175822 - DNA, 25 bp, SARS Virus
atatcgtgtgttgccgtagtagtct

SEQ ID NO: 175823 - DNA, 25 bp, SARS Virus
tatcgtgtgttggcgtagtagtctt

SEQ ID NO: 175824 - DNA, 25 bp, SARS Virus
atcgtgtgttgcggtagtagtcttt

SEQ ID NO: 175825 - DNA, 25 bp, SARS Virus
tcgtgtgttgccgtagtagtctttc

SEQ ID NO: 175826 - DNA, 25 bp, SARS Virus
cgtgtgttgccggagtagtctttct

SEQ ID NO: 175827 - DNA, 25 bp, SARS Virus
gtgtgttgccgtggtagtctttctt

SEQ ID NO: 175828 - DNA, 25 bp, SARS Virus
tgtgttgccgtagtagtctttctta

SEQ ID NO: 175829 - DNA, 25 bp, SARS Virus
gtgttgccgtaggagtctttcttag

SEQ ID NO: 175830 - DNA, 25 bp, SARS Virus
tgttgccgtagtggtctttcttagt

SEQ ID NO: 175831 - DNA, 25 bp, SARS Virus
gttgccgtagtagtctttcttagta

SEQ ID NO: 175832 - DNA, 25 bp, SARS Virus
ttgccgtagtaggctttcttagtag

SEQ ID NO: 175833 - DNA, 25 bp, SARS Virus
tgccgtagtagtgtttcttagtagt

SEQ ID NO: 175834 - DNA, 25 bp, SARS Virus
gccgtagtagtcgttcttagtagta

SEQ ID NO: 175835 - DNA, 25 bp, SARS Virus
ccgtagtagtctgtcttagtagtac

SEQ ID NO: 175836 - DNA, 25 bp, SARS Virus
cgtagtagtcttgcttagtagtacc

SEQ ID NO: 175837 - DNA, 25 bp, SARS Virus
gtagtagtctttgttagtagtacct

SEQ ID NO: 175838 - DNA, 25 bp, SARS Virus
tagtagtctttcgtagtagtacctc

SEQ ID NO: 175839 - DNA, 25 bp, SARS Virus
agtagtctttctgagtagtacctct

SEQ ID NO: 175840 - DNA, 25 bp, SARS Virus
gtagtctttcttggtagtacctctt

SEQ ID NO: 175841 - DNA, 25 bp, SARS Virus
tagtctttcttagtagtacctcttt

SEQ ID NO: 175842 - DNA, 25 bp, SARS Virus
agtctttcttaggagtacctcttta

SEQ ID NO: 175843 - DNA, 25 bp, SARS Virus
gtctttcttagtggtacctctttac

SEQ ID NO: 175844 - DNA, 25 bp, SARS Virus
tctttcttagtagtacctctttaca

SEQ ID NO: 175845 - DNA, 25 bp, SARS Virus
ctttcttagtaggacctctttacaa

SEQ ID NO: 175846 - DNA, 25 bp, SARS Virus
tttcttagtagtgcctctttacaaa

SEQ ID NO: 175847 - DNA, 25 bp, SARS Virus
ttcttagtagtagctctttacaaat

SEQ ID NO: 175848 - DNA, 25 bp, SARS Virus
tcttagtagtacgtctttacaaatg

SEQ ID NO: 175849 - DNA, 25 bp, SARS Virus
cttagtagtaccgctttacaaatgc

SEQ ID NO: 175850 - DNA, 25 bp, SARS Virus
ttagtagtacctgtttacaaatgcg

SEQ ID NO: 175851 - DNA, 25 bp, SARS Virus
tagtagtacctcgttacaaatgcgt

SEQ ID NO: 175852 - DNA, 25 bp, SARS Virus
agtagtacctctgtacaaatgcgtc

SEQ ID NO: 175853 - DNA, 25 bp, SARS Virus
gtagtacctcttgacaaatgcgtcc

SEQ ID NO: 175854 - DNA, 25 bp, SARS Virus
tagtacctctttgcaaatgcgtcca

SEQ ID NO: 175855 - DNA, 25 bp, SARS Virus
agtacctctttagaaatgcgtccat

SEQ ID NO: 175856 - DNA, 25 bp, SARS Virus
gtacctctttacgaatgcgtccatt

SEQ ID NO: 175857 - DNA, 25 bp, SARS Virus
tacctctttacagatgcgtccattc

SEQ ID NO: 175858 - DNA, 25 bp, SARS Virus
acctctttacaagtgcgtccattcg

SEQ ID NO: 175859 - DNA, 25 bp, SARS Virus
cctctttacaaaggcgtccattcgc

SEQ ID NO: 175860 - DNA, 25 bp, SARS Virus
ctctttacaaatgcgtccattcgca

SEQ ID NO: 175861 - DNA, 25 bp, SARS Virus
tctttacaaatgggtccattcgcat

SEQ ID NO: 175862 - DNA, 25 bp, SARS Virus
ctttacaaatgcgtccattcgcatt

SEQ ID NO: 175863 - DNA, 25 bp, SARS Virus
tttacaaatgcggccattcgcattt

SEQ ID NO: 175864 - DNA, 25 bp, SARS Virus
ttacaaatgcgtgcattcgcatttt

SEQ ID NO: 175865 - DNA, 25 bp, SARS Virus
tacaaatgcgtcgattcgcattttg

SEQ ID NO: 175866 - DNA, 25 bp, SARS Virus
acaaatgcgtccgttcgcattttga

SEQ ID NO: 175867 - DNA, 25 bp, SARS Virus
caaatgcgtccagtcgcattttgag

SEQ ID NO: 175868 - DNA, 25 bp, SARS Virus
aaatgcgtccatgcgcattttgagt

SEQ ID NO: 175869 - DNA, 25 bp, SARS Virus
aatgcgtccattggcattttgagta

SEQ ID NO: 175870 - DNA, 25 bp, SARS Virus
atgcgtccattcgcattttgagtag

SEQ ID NO: 175871 - DNA, 25 bp, SARS Virus
tgcgtccattcggattttgagtagg

SEQ ID NO: 175872 - DNA, 25 bp, SARS Virus
gcgtccattcgcgttttgagtaggt

SEQ ID NO: 175873 - DNA, 25 bp, SARS Virus
cgtccattcgcagtttgagtaggtg

SEQ ID NO: 175874 - DNA, 25 bp, SARS Virus
gtccattcgcatgttgagtaggtgc

SEQ ID NO: 175875 - DNA, 25 bp, SARS Virus
tccattcgcattgtgagtaggtgct

SEQ ID NO: 175876 - DNA, 25 bp, SARS Virus
ccattcgcatttggagtaggtgctt

SEQ ID NO: 175877 - DNA, 25 bp, SARS Virus
cattcgcattttgagtaggtgctta

SEQ ID NO: 175878 - DNA, 25 bp, SARS Virus
attcgcattttgggtaggtgcttaa

SEQ ID NO: 175879 - DNA, 25 bp, SARS Virus
ttcgcattttgagtaggtgcttaag

SEQ ID NO: 175880 - DNA, 25 bp, SARS Virus
tcgcattttgaggaggtgcttaagt

SEQ ID NO: 175881 - DNA, 25 bp, SARS Virus
cgcattttgagtgggtgcttaagta

SEQ ID NO: 175882 - DNA, 25 bp, SARS Virus
gcattttgagtaggtgcttaagtac

SEQ ID NO: 175883 - DNA, 25 bp, SARS Virus
cattttgagtaggtgcttaagtact

SEQ ID NO: 175884 - DNA, 25 bp, SARS Virus
attttgagtaggggcttaagtacta

SEQ ID NO: 175885 - DNA, 25 bp, SARS Virus
ttttgagtaggtgcttaagtactag

SEQ ID NO: 175886 - DNA, 25 bp, SARS Virus
tttgagtaggtggttaagtactagt

SEQ ID NO: 175887 - DNA, 25 bp, SARS Virus
ttgagtaggtgcgtaagtactagtt

SEQ ID NO: 175888 - DNA, 25 bp, SARS Virus
tgagtaggtgctgaagtactagttg

SEQ ID NO: 175889 - DNA, 25 bp, SARS Virus
gagtaggtgcttgagtactagttgt

SEQ ID NO: 175890 - DNA, 25 bp, SARS Virus
agtaggtgcttaggtactagttgta

SEQ ID NO: 175891 - DNA, 25 bp, SARS Virus
gtaggtgcttaagtactagttgtag

SEQ ID NO: 175892 - DNA, 25 bp, SARS Virus
taggtgcttaaggactagttgtagg

SEQ ID NO: 175893 - DNA, 25 bp, SARS Virus
aggtgcttaagtgctagttgtaggg

SEQ ID NO: 175894 - DNA, 25 bp, SARS Virus
ggtgcttaagtagtagttgtaggga

SEQ ID NO: 175895 - DNA, 25 bp, SARS Virus
gtgcttaagtacgagttgtagggat

SEQ ID NO: 175896 - DNA, 25 bp, SARS Virus
tgcttaagtactggttgtagggata

SEQ ID NO: 175897 - DNA, 25 bp, SARS Virus
gcttaagtactagttgtagggataa

SEQ ID NO: 175898 - DNA, 25 bp, SARS Virus
cttaagtactaggtgtagggataaa

SEQ ID NO: 175899 - DNA, 25 bp, SARS Virus
ttaagtactagtggtagggataaag

SEQ ID NO: 175900 - DNA, 25 bp, SARS Virus
taagtactagttgtagggataaaga

SEQ ID NO: 175901 - DNA, 25 bp, SARS Virus
aagtactagttggagggataaagat

SEQ ID NO: 175902 - DNA, 25 bp, SARS Virus
agtactagttgtggggataaagata

SEQ ID NO: 175903 - DNA, 25 bp, SARS Virus
gtactagttgtagggataaagatat

SEQ ID NO: 175904 - DNA, 25 bp, SARS Virus
tactagttgtagggataaagatatc

SEQ ID NO: 175905 - DNA, 25 bp, SARS Virus
actagttgtagggataaagatatct

SEQ ID NO: 175906 - DNA, 25 bp, SARS Virus
ctagttgtaggggtaaagatatctc

SEQ ID NO: 175907 - DNA, 25 bp, SARS Virus
tagttgtagggagaaagatatctct

SEQ ID NO: 175908 - DNA, 25 bp, SARS Virus
agttgtagggatgaagatatctctg

SEQ ID NO: 175909 - DNA, 25 bp, SARS Virus
gttgtagggatagagatatctctgt

SEQ ID NO: 175910 - DNA, 25 bp, SARS Virus
ttgtagggataaggatatctctgtg

SEQ ID NO: 175911 - DNA, 25 bp, SARS Virus
tgtagggataaagatatctctgtga

SEQ ID NO: 175912 - DNA, 25 bp, SARS Virus
gtagggataaaggtatctctgtgag

SEQ ID NO: 175913 - DNA, 25 bp, SARS Virus
tagggataaagagatctctgtgagt

SEQ ID NO: 175914 - DNA, 25 bp, SARS Virus
agggataaagatgtctctgtgagta

SEQ ID NO: 175915 - DNA, 25 bp, SARS Virus
gggataaagatagctctgtgagtat

SEQ ID NO: 175916 - DNA, 25 bp, SARS Virus
ggataaagatatgtctgtgagtatc

SEQ ID NO: 175917 - DNA, 25 bp, SARS Virus
gataaagatatcgctgtgagtatct

SEQ ID NO: 175918 - DNA, 25 bp, SARS Virus
ataaagatatctgtgtgagtatctc

SEQ ID NO: 175919 - DNA, 25 bp, SARS Virus
taaagatatctcggtgagtatctcg

SEQ ID NO: 175920 - DNA, 25 bp, SARS Virus
aaagatatctctgtgagtatctcgg

SEQ ID NO: 175921 - DNA, 25 bp, SARS Virus
aagatatctctgggagtatctcgga

SEQ ID NO: 175922 - DNA, 25 bp, SARS Virus
agatatctctgtgagtatctcggac

SEQ ID NO: 175923 - DNA, 25 bp, SARS Virus
gatatctctgtgggtatctcggaca

SEQ ID NO: 175924 - DNA, 25 bp, SARS Virus
atatctctgtgagtatctcggacac

SEQ ID NO: 175925 - DNA, 25 bp, SARS Virus
tatctctgtgaggatctcggacaca

SEQ ID NO: 175926 - DNA, 25 bp, SARS Virus
atctctgtgagtgtctcggacacaa

SEQ ID NO: 175927 - DNA, 25 bp, SARS Virus
tctctgtgagtagctcggacacaac

SEQ ID NO: 175928 - DNA, 25 bp, SARS Virus
ctctgtgagtatgtcggacacaaca

SEQ ID NO: 175929 - DNA, 25 bp, SARS Virus
tctgtgagtatcgcggacacaacat

SEQ ID NO: 175930 - DNA, 25 bp, SARS Virus
ctgtgagtatctgggacacaacatc

SEQ ID NO: 175931 - DNA, 25 bp, SARS Virus
tgtgagtatctcggacacaacatct

SEQ ID NO: 175932 - DNA, 25 bp, SARS Virus
gtgagtatctcggacacaacatcta

SEQ ID NO: 175933 - DNA, 25 bp, SARS Virus
tgagtatctcgggcacaacatctaa

SEQ ID NO: 175934 - DNA, 25 bp, SARS Virus
gagtatctcggagacaacatctaac

SEQ ID NO: 175935 - DNA, 25 bp, SARS Virus
agtatctcggacgcaacatctaacg

SEQ ID NO: 175936 - DNA, 25 bp, SARS Virus
gtatctcggacagaacatctaacgc

SEQ ID NO: 175937 - DNA, 25 bp, SARS Virus
tatctcggacacgacatctaacgcc

SEQ ID NO: 175938 - DNA, 25 bp, SARS Virus
atctcggacacagcatctaacgcct

SEQ ID NO: 175939 - DNA, 25 bp, SARS Virus
tctcggacacaagatctaacgcctg

SEQ ID NO: 175940 - DNA, 25 bp, SARS Virus
ctcggacacaacgtctaacgcctgt

SEQ ID NO: 175941 - DNA, 25 bp, SARS Virus
tcggacacaacagctaacgcctgta

SEQ ID NO: 175942 - DNA, 25 bp, SARS Virus
cggacacaacatgtaacgcctgtat

SEQ ID NO: 175943 - DNA, 25 bp, SARS Virus
ggacacaacatcgaacgcctgtatg

SEQ ID NO: 175944 - DNA, 25 bp, SARS Virus
gacacaacatctgacgcctgtatga

SEQ ID NO: 175945 - DNA, 25 bp, SARS Virus
acacaacatctagcgcctgtatgaa

SEQ ID NO: 175946 - DNA, 25 bp, SARS Virus
cacaacatctaaggcctgtatgaac

SEQ ID NO: 175947 - DNA, 25 bp, SARS Virus
acaacatctaacgcctgtatgaaca

SEQ ID NO: 175948 - DNA, 25 bp, SARS Virus
caacatctaacggctgtatgaacag

SEQ ID NO: 175949 - DNA, 25 bp, SARS Virus
aacatctaacgcgtgtatgaacagt

SEQ ID NO: 175950 - DNA, 25 bp, SARS Virus
acatctaacgccggtatgaacagtc

SEQ ID NO: 175951 - DNA, 25 bp, SARS Virus
catctaacgcctgtatgaacagtcg

SEQ ID NO: 175952 - DNA, 25 bp, SARS Virus
atctaacgcctggatgaacagtcga

SEQ ID NO: 175953 - DNA, 25 bp, SARS Virus
tctaacgcctgtgtgaacagtcgat

SEQ ID NO: 175954 - DNA, 25 bp, SARS Virus
ctaacgcctgtaggaacagtcgata

SEQ ID NO: 175955 - DNA, 25 bp, SARS Virus
taacgcctgtatgaacagtcgatag

SEQ ID NO: 175956 - DNA, 25 bp, SARS Virus
aacgcctgtatggacagtcgataga

SEQ ID NO: 175957 - DNA, 25 bp, SARS Virus
acgcctgtatgagcagtcgatagaa

SEQ ID NO: 175958 - DNA, 25 bp, SARS Virus
cgcctgtatgaagagtcgatagaat

SEQ ID NO: 175959 - DNA, 25 bp, SARS Virus
gcctgtatgaacggtcgatagaata

SEQ ID NO: 175960 - DNA, 25 bp, SARS Virus
cctgtatgaacagtcgatagaataa

SEQ ID NO: 175961 - DNA, 25 bp, SARS Virus
ctgtatgaacaggcgatagaataat

SEQ ID NO: 175962 - DNA, 25 bp, SARS Virus
tgtatgaacagtggatagaataatg

SEQ ID NO: 175963 - DNA, 25 bp, SARS Virus
gtatgaacagtcgatagaataatgg

SEQ ID NO: 175964 - DNA, 25 bp, SARS Virus
tatgaacagtcggtagaataatggt

SEQ ID NO: 175965 - DNA, 25 bp, SARS Virus
atgaacagtcgagagaataatggta

SEQ ID NO: 175966 - DNA, 25 bp, SARS Virus
tgaacagtcgatggaataatggtag

SEQ ID NO: 175967 - DNA, 25 bp, SARS Virus
gaacagtcgatagaataatggtagt

SEQ ID NO: 175968 - DNA, 25 bp, SARS Virus
aacagtcgataggataatggtagtc

SEQ ID NO: 175969 - DNA, 25 bp, SARS Virus
acagtcgatagagtaatggtagtca

SEQ ID NO: 175970 - DNA, 25 bp, SARS Virus
cagtcgatagaagaatggtagtcaa

SEQ ID NO: 175971 - DNA, 25 bp, SARS Virus
agtcgatagaatgatggtagtcaac

SEQ ID NO: 175972 - DNA, 25 bp, SARS Virus
gtcgatagaatagtggtagtcaact

SEQ ID NO: 175973 - DNA, 25 bp, SARS Virus
tcgatagaataagggtagtcaactt

SEQ ID NO: 175974 - DNA, 25 bp, SARS Virus
cgatagaataatggtagtcaacttt

SEQ ID NO: 175975 - DNA, 25 bp, SARS Virus
gatagaataatggtagtcaactttc

SEQ ID NO: 175976 - DNA, 25 bp, SARS Virus
atagaataatgggagtcaactttct

SEQ ID NO: 175977 - DNA, 25 bp, SARS Virus
tagaataatggtggtcaactttctt

SEQ ID NO: 175978 - DNA, 25 bp, SARS Virus
agaataatggtagtcaactttcttc

SEQ ID NO: 175979 - DNA, 25 bp, SARS Virus
gaataatggtaggcaactttcttca

SEQ ID NO: 175980 - DNA, 25 bp, SARS Virus
aataatggtagtgaactttcttcac

SEQ ID NO: 175981 - DNA, 25 bp, SARS Virus
ataatggtagtcgactttcttcacg

SEQ ID NO: 175982 - DNA, 25 bp, SARS Virus
taatggtagtcagctttcttcacgt

SEQ ID NO: 175983 - DNA, 25 bp, SARS Virus
aatggtagtcaagtttcttcacgta

SEQ ID NO: 175984 - DNA, 25 bp, SARS Virus
atggtagtcaacgttcttcacgtaa

SEQ ID NO: 175985 - DNA, 25 bp, SARS Virus
tggtagtcaactgtcttcacgtaaa

SEQ ID NO: 175986 - DNA, 25 bp, SARS Virus
ggtagtcaacttgcttcacgtaaat

SEQ ID NO: 175987 - DNA, 25 bp, SARS Virus
gtagtcaactttgttcacgtaaatg

SEQ ID NO: 175988 - DNA, 25 bp, SARS Virus
tagtcaactttcgtcacgtaaatgt

SEQ ID NO: 175989 - DNA, 25 bp, SARS Virus
agtcaactttctgcacgtaaatgta

SEQ ID NO: 175990 - DNA, 25 bp, SARS Virus
gtcaactttcttgacgtaaatgtaa

SEQ ID NO: 175991 - DNA, 25 bp, SARS Virus
tcaactttcttcgcgtaaatgtaac

SEQ ID NO: 175992 - DNA, 25 bp, SARS Virus
caactttcttcaggtaaatgtaacc

SEQ ID NO: 175993 - DNA, 25 bp, SARS Virus
aactttcttcacgtaaatgtaaccg

SEQ ID NO: 175994 - DNA, 25 bp, SARS Virus
actttcttcacggaaatgtaaccga

SEQ ID NO: 175995 - DNA, 25 bp, SARS Virus
ctttcttcacgtgaatgtaaccgac

SEQ ID NO: 175996 - DNA, 25 bp, SARS Virus
tttcttcacgtagatgtaaccgaca

SEQ ID NO: 175997 - DNA, 25 bp, SARS Virus
ttcttcacgtaagtgtaaccgacat

SEQ ID NO: 175998 - DNA, 25 bp, SARS Virus
tcttcacgtaaaggtaaccgacatt

SEQ ID NO: 175999 - DNA, 25 bp, SARS Virus
cttcacgtaaatgtaaccgacattg

SEQ ID NO: 176000 - DNA, 25 bp, SARS Virus
ttcacgtaaatggaaccgacattgt

SEQ ID NO: 176001 - DNA, 25 bp, SARS Virus
tcacgtaaatgtgaccgacattgtc

SEQ ID NO: 176002 - DNA, 25 bp, SARS Virus
cacgtaaatgtagccgacattgtcg

SEQ ID NO: 176003 - DNA, 25 bp, SARS Virus
acgtaaatgtaagcgacattgtcga

SEQ ID NO: 176004 - DNA, 25 bp, SARS Virus
cgtaaatgtaacggacattgtcgaa

SEQ ID NO: 176005 - DNA, 25 bp, SARS Virus
gtaaatgtaaccgacattgtcgaac

SEQ ID NO: 176006 - DNA, 25 bp, SARS Virus
taaatgtaaccggcattgtcgaact

SEQ ID NO: 176007 - DNA, 25 bp, SARS Virus
aaatgtaaccgagattgtcgaactg

SEQ ID NO: 176008 - DNA, 25 bp, SARS Virus
aatgtaaccgacgttgtcgaactgt

SEQ ID NO: 176009 - DNA, 25 bp, SARS Virus
atgtaaccgacagtgtcgaactgtt

SEQ ID NO: 176010 - DNA, 25 bp, SARS Virus
tgtaaccgacatggtcgaactgttt

SEQ ID NO: 176011 - DNA, 25 bp, SARS Virus
gtaaccgacattgtcgaactgttta

SEQ ID NO: 176012 - DNA, 25 bp, SARS Virus
taaccgacattggcgaactgtttac

SEQ ID NO: 176013 - DNA, 25 bp, SARS Virus
aaccgacattgtggaactgtttaca

SEQ ID NO: 176014 - DNA, 25 bp, SARS Virus
accgacattgtcgaactgtttacaa

SEQ ID NO: 176015 - DNA, 25 bp, SARS Virus
ccgacattgtcggactgtttacaat

SEQ ID NO: 176016 - DNA, 25 bp, SARS Virus
cgacattgtcgagctgtttacaatt

SEQ ID NO: 176017 - DNA, 25 bp, SARS Virus
gacattgtcgaagtgtttacaattt

SEQ ID NO: 176018 - DNA, 25 bp, SARS Virus
acattgtcgaacggtttacaatttc

SEQ ID NO: 176019 - DNA, 25 bp, SARS Virus
cattgtcgaactgtttacaatttct

SEQ ID NO: 176020 - DNA, 25 bp, SARS Virus
attgtcgaactggttacaatttctg

SEQ ID NO: 176021 - DNA, 25 bp, SARS Virus
ttgtcgaactgtgtacaatttctgt

SEQ ID NO: 176022 - DNA, 25 bp, SARS Virus
tgtcgaactgttgacaatttctgtg

SEQ ID NO: 176023 - DNA, 25 bp, SARS Virus
gtcgaactgtttgcaatttctgtga

SEQ ID NO: 176024 - DNA, 25 bp, SARS Virus
tcgaactgtttagaatttctgtgat

SEQ ID NO: 176025 - DNA, 25 bp, SARS Virus
cgaactgtttacgatttctgtgata

SEQ ID NO: 176026 - DNA, 25 bp, SARS Virus
gaactgtttacagtttctgtgataa

SEQ ID NO: 176027 - DNA, 25 bp, SARS Virus
aactgtttacaagttctgtgataat

SEQ ID NO: 176028 - DNA, 25 bp, SARS Virus
actgtttacaatgtctgtgataatc

SEQ ID NO: 176029 - DNA, 25 bp, SARS Virus
ctgtttacaattgctgtgataatcg

SEQ ID NO: 176030 - DNA, 25 bp, SARS Virus
tgtttacaatttgtgtgataatcgt

SEQ ID NO: 176031 - DNA, 25 bp, SARS Virus
gtttacaatttcggtgataatcgta

SEQ ID NO: 176032 - DNA, 25 bp, SARS Virus
tttacaatttctgtgataatcgtat

SEQ ID NO: 176033 - DNA, 25 bp, SARS Virus
ttacaatttctgggataatcgtatt

SEQ ID NO: 176034 - DNA, 25 bp, SARS Virus
tacaatttctgtgataatcgtattc

SEQ ID NO: 176035 - DNA, 25 bp, SARS Virus
acaatttctgtggtaatcgtattcg

SEQ ID NO: 176036 - DNA, 25 bp, SARS Virus
caatttctgtgagaatcgtattcgt

SEQ ID NO: 176037 - DNA, 25 bp, SARS Virus
aatttctgtgatgatcgtattcgtc

SEQ ID NO: 176038 - DNA, 25 bp, SARS Virus
atttctgtgatagtcgtattcgtca

SEQ ID NO: 176039 - DNA, 25 bp, SARS Virus
tttctgtgataagcgtattcgtcaa

SEQ ID NO: 176040 - DNA, 25 bp, SARS Virus
ttctgtgataatggtattcgtcaac

SEQ ID NO: 176041 - DNA, 25 bp, SARS Virus
tctgtgataatcgtattcgtcaaca

SEQ ID NO: 176042 - DNA, 25 bp, SARS Virus
ctgtgataatcggattcgtcaacat

SEQ ID NO: 176043 - DNA, 25 bp, SARS Virus
tgtgataatcgtgttcgtcaacatc

SEQ ID NO: 176044 - DNA, 25 bp, SARS Virus
gtgataatcgtagtcgtcaacatcg

SEQ ID NO: 176045 - DNA, 25 bp, SARS Virus
tgataatcgtatgcgtcaacatcgt

SEQ ID NO: 176046 - DNA, 25 bp, SARS Virus
gataatcgtattggtcaacatcgta

SEQ ID NO: 176047 - DNA, 25 bp, SARS Virus
ataatcgtattcgtcaacatcgtag

SEQ ID NO: 176048 - DNA, 25 bp, SARS Virus
taatcgtattcggcaacatcgtagt

SEQ ID NO: 176049 - DNA, 25 bp, SARS Virus
aatcgtattcgtgaacatcgtagtg

SEQ ID NO: 176050 - DNA, 25 bp, SARS Virus
atcgtattcgtcgacatcgtagtgg

SEQ ID NO: 176051 - DNA, 25 bp, SARS Virus
tcgtattcgtcagcatcgtagtggc

SEQ ID NO: 176052 - DNA, 25 bp, SARS Virus
cgtattcgtcaagatcgtagtggcc

SEQ ID NO: 176053 - DNA, 25 bp, SARS Virus
gtattcgtcaacgtcgtagtggcct

SEQ ID NO: 176054 - DNA, 25 bp, SARS Virus
tattcgtcaacagcgtagtggccta

SEQ ID NO: 176055 - DNA, 25 bp, SARS Virus
attcgtcaacatggtagtggcctac

SEQ ID NO: 176056 - DNA, 25 bp, SARS Virus
ttcgtcaacatcgtagtggcctact

SEQ ID NO: 176057 - DNA, 25 bp, SARS Virus
tcgtcaacatcggagtggcctacta

SEQ ID NO: 176058 - DNA, 25 bp, SARS Virus
cgtcaacatcgtggtggcctactac

SEQ ID NO: 176059 - DNA, 25 bp, SARS Virus
gtcaacatcgtagtggcctactaca

SEQ ID NO: 176060 - DNA, 25 bp, SARS Virus
tcaacatcgtaggggcctactacaa

SEQ ID NO: 176061 - DNA, 25 bp, SARS Virus
caacatcgtagtggcctactacaag

SEQ ID NO: 176062 - DNA, 25 bp, SARS Virus
aacatcgtagtggcctactacaagg

SEQ ID NO: 176063 - DNA, 25 bp, SARS Virus
acatcgtagtgggctactacaaggt

SEQ ID NO: 176064 - DNA, 25 bp, SARS Virus
catcgtagtggcgtactacaaggtg

SEQ ID NO: 176065 - DNA, 25 bp, SARS Virus
atcgtagtggccgactacaaggtgg

SEQ ID NO: 176066 - DNA, 25 bp, SARS Virus
tcgtagtggcctgctacaaggtgga

SEQ ID NO: 176067 - DNA, 25 bp, SARS Virus
cgtagtggcctagtacaaggtggac

SEQ ID NO: 176068 - DNA, 25 bp, SARS Virus
gtagtggcctacgacaaggtggacc

SEQ ID NO: 176069 - DNA, 25 bp, SARS Virus
tagtggcctactgcaaggtggacca

SEQ ID NO: 176070 - DNA, 25 bp, SARS Virus
agtggcctactagaaggtggaccaa

SEQ ID NO: 176071 - DNA, 25 bp, SARS Virus
gtggcctactacgaggtggaccaaa

SEQ ID NO: 176072 - DNA, 25 bp, SARS Virus
tggcctactacagggtggaccaaat

SEQ ID NO: 176073 - DNA, 25 bp, SARS Virus
ggcctactacaaggtggaccaaatt

SEQ ID NO: 176074 - DNA, 25 bp, SARS Virus
gcctactacaaggtggaccaaattg

SEQ ID NO: 176075 - DNA, 25 bp, SARS Virus
cctactacaagggggaccaaattgt

SEQ ID NO: 176076 - DNA, 25 bp, SARS Virus
ctactacaaggtggaccaaattgta

SEQ ID NO: 176077 - DNA, 25 bp, SARS Virus
tactacaaggtggaccaaattgtat

SEQ ID NO: 176078 - DNA, 25 bp, SARS Virus
actacaaggtgggccaaattgtata

SEQ ID NO: 176079 - DNA, 25 bp, SARS Virus
ctacaaggtggagcaaattgtatat

SEQ ID NO: 176080 - DNA, 25 bp, SARS Virus
tacaaggtggacgaaattgtatatc

SEQ ID NO: 176081 - DNA, 25 bp, SARS Virus
acaaggtggaccgaattgtatatca

SEQ ID NO: 176082 - DNA, 25 bp, SARS Virus
caaggtggaccagattgtatatcac

SEQ ID NO: 176083 - DNA, 25 bp, SARS Virus
aaggtggaccaagttgtatatcact

SEQ ID NO: 176084 - DNA, 25 bp, SARS Virus
aggtggaccaaagtgtatatcactc

SEQ ID NO: 176085 - DNA, 25 bp, SARS Virus
ggtggaccaaatggtatatcactcg

SEQ ID NO: 176086 - DNA, 25 bp, SARS Virus
gtggaccaaattgtatatcactcgg

SEQ ID NO: 176087 - DNA, 25 bp, SARS Virus
tggaccaaattggatatcactcggc

SEQ ID NO: 176088 - DNA, 25 bp, SARS Virus
ggaccaaattgtgtatcactcggcg

SEQ ID NO: 176089 - DNA, 25 bp, SARS Virus
gaccaaattgtagatcactcggcgg

SEQ ID NO: 176090 - DNA, 25 bp, SARS Virus
accaaattgtatgtcactcggcggt

SEQ ID NO: 176091 - DNA, 25 bp, SARS Virus
ccaaattgtatagcactcggcggtg

SEQ ID NO: 176092 - DNA, 25 bp, SARS Virus
caaattgtatatgactcggcggtgt

SEQ ID NO: 176093 - DNA, 25 bp, SARS Virus
aaattgtatatcgctcggcggtgtg

SEQ ID NO: 176094 - DNA, 25 bp, SARS Virus
aattgtatatcagtcggcggtgtgt

SEQ ID NO: 176095 - DNA, 25 bp, SARS Virus
attgtatatcacgcggcggtgtgta

SEQ ID NO: 176096 - DNA, 25 bp, SARS Virus
ttgtatatcactgggcggtgtgtac

SEQ ID NO: 176097 - DNA, 25 bp, SARS Virus
tgtatatcactcggcggtgtgtact

SEQ ID NO: 176098 - DNA, 25 bp, SARS Virus
gtatatcactcggcggtgtgtactg

SEQ ID NO: 176099 - DNA, 25 bp, SARS Virus
tatatcactcgggggtgtgtactgg

SEQ ID NO: 176100 - DNA, 25 bp, SARS Virus
atatcactcggcggtgtgtactggt

SEQ ID NO: 176101 - DNA, 25 bp, SARS Virus
tatcactcggcggtgtgtactggta

SEQ ID NO: 176102 - DNA, 25 bp, SARS Virus
atcactcggcggggtgtactggtag

SEQ ID NO: 176103 - DNA, 25 bp, SARS Virus
tcactcggcggtgtgtactggtaga

SEQ ID NO: 176104 - DNA, 25 bp, SARS Virus
cactcggcggtgggtactggtagag

SEQ ID NO: 176105 - DNA, 25 bp, SARS Virus
actcggcggtgtgtactggtagagt

SEQ ID NO: 176106 - DNA, 25 bp, SARS Virus
ctcggcggtgtggactggtagagtg

SEQ ID NO: 176107 - DNA, 25 bp, SARS Virus
tcggcggtgtgtgctggtagagtga

SEQ ID NO: 176108 - DNA, 25 bp, SARS Virus
cggcggtgtgtagtggtagagtgaa

SEQ ID NO: 176109 - DNA, 25 bp, SARS Virus
ggcggtgtgtacgggtagagtgaat

SEQ ID NO: 176110 - DNA, 25 bp, SARS Virus
gcggtgtgtactggtagagtgaatt

SEQ ID NO: 176111 - DNA, 25 bp, SARS Virus
cggtgtgtactggtagagtgaatta

SEQ ID NO: 176112 - DNA, 25 bp, SARS Virus
ggtgtgtactgggagagtgaattat

SEQ ID NO: 176113 - DNA, 25 bp, SARS Virus
gtgtgtactggtggagtgaattatg

SEQ ID NO: 176114 - DNA, 25 bp, SARS Virus
tgtgtactggtagagtgaattatga

SEQ ID NO: 176115 - DNA, 25 bp, SARS Virus
gtgtactggtagggtgaattatgaa

SEQ ID NO: 176116 - DNA, 25 bp, SARS Virus
tgtactggtagagtgaattatgaac

SEQ ID NO: 176117 - DNA, 25 bp, SARS Virus
gtactggtagagggaattatgaacg

SEQ ID NO: 176118 - DNA, 25 bp, SARS Virus
tactggtagagtgaattatgaacgc

SEQ ID NO: 176119 - DNA, 25 bp, SARS Virus
actggtagagtggattatgaacgcg

SEQ ID NO: 176120 - DNA, 25 bp, SARS Virus
ctggtagagtgagttatgaacgcgt

SEQ ID NO: 176121 - DNA, 25 bp, SARS Virus
tggtagagtgaagtatgaacgcgtg

SEQ ID NO: 176122 - DNA, 25 bp, SARS Virus
ggtagagtgaatgatgaacgcgtgt

SEQ ID NO: 176123 - DNA, 25 bp, SARS Virus
gtagagtgaattgtgaacgcgtgtg

SEQ ID NO: 176124 - DNA, 25 bp, SARS Virus
tagagtgaattaggaacgcgtgtga

SEQ ID NO: 176125 - DNA, 25 bp, SARS Virus
agagtgaattatgaacgcgtgtgag

SEQ ID NO: 176126 - DNA, 25 bp, SARS Virus
gagtgaattatggacgcgtgtgagc

SEQ ID NO: 176127 - DNA, 25 bp, SARS Virus
agtgaattatgagcgcgtgtgagca

SEQ ID NO: 176128 - DNA, 25 bp, SARS Virus
gtgaattatgaaggcgtgtgagcaa

SEQ ID NO: 176129 - DNA, 25 bp, SARS Virus
tgaattatgaacgcgtgtgagcaat

SEQ ID NO: 176130 - DNA, 25 bp, SARS Virus
gaattatgaacgggtgtgagcaatc

SEQ ID NO: 176131 - DNA, 25 bp, SARS Virus
aattatgaacgcgtgtgagcaatcg

SEQ ID NO: 176132 - DNA, 25 bp, SARS Virus
attatgaacgcgggtgagcaatcga

SEQ ID NO: 176133 - DNA, 25 bp, SARS Virus
ttatgaacgcgtgtgagcaatcgat

SEQ ID NO: 176134 - DNA, 25 bp, SARS Virus
tatgaacgcgtgggagcaatcgatt

SEQ ID NO: 176135 - DNA, 25 bp, SARS Virus
atgaacgcgtgtgagcaatcgattg

SEQ ID NO: 176136 - DNA, 25 bp, SARS Virus
tgaacgcgtgtgggcaatcgattgg

SEQ ID NO: 176137 - DNA, 25 bp, SARS Virus
gaacgcgtgtgagcaatcgattgga

SEQ ID NO: 176138 - DNA, 25 bp, SARS Virus
aacgcgtgtgaggaatcgattggac

SEQ ID NO: 176139 - DNA, 25 bp, SARS Virus
acgcgtgtgagcgatcgattggaca

SEQ ID NO: 176140 - DNA, 25 bp, SARS Virus
cgcgtgtgagcagtcgattggacat

SEQ ID NO: 176141 - DNA, 25 bp, SARS Virus
gcgtgtgagcaagcgattggacatc

SEQ ID NO: 176142 - DNA, 25 bp, SARS Virus
cgtgtgagcaatggattggacatct

SEQ ID NO: 176143 - DNA, 25 bp, SARS Virus
gtgtgagcaatcgattggacatctt

SEQ ID NO: 176144 - DNA, 25 bp, SARS Virus
tgtgagcaatcggttggacatcttt

SEQ ID NO: 176145 - DNA, 25 bp, SARS Virus
gtgagcaatcgagtggacatctttg

SEQ ID NO: 176146 - DNA, 25 bp, SARS Virus
tgagcaatcgatgggacatctttgc

SEQ ID NO: 176147 - DNA, 25 bp, SARS Virus
gagcaatcgattggacatctttgcc

SEQ ID NO: 176148 - DNA, 25 bp, SARS Virus
agcaatcgattggacatctttgcca

SEQ ID NO: 176149 - DNA, 25 bp, SARS Virus
gcaatcgattgggcatctttgccac

SEQ ID NO: 176150 - DNA, 25 bp, SARS Virus
caatcgattggagatctttgccaca

SEQ ID NO: 176151 - DNA, 25 bp, SARS Virus
aatcgattggacgtctttgccacac

SEQ ID NO: 176152 - DNA, 25 bp, SARS Virus
atcgattggacagctttgccacact

SEQ ID NO: 176153 - DNA, 25 bp, SARS Virus
tcgattggacatgtttgccacacta

SEQ ID NO: 176154 - DNA, 25 bp, SARS Virus
cgattggacatcgttgccacactat

SEQ ID NO: 176155 - DNA, 25 bp, SARS Virus
gattggacatctgtgccacactatt

SEQ ID NO: 176156 - DNA, 25 bp, SARS Virus
attggacatcttggccacactattc

SEQ ID NO: 176157 - DNA, 25 bp, SARS Virus
ttggacatctttgccacactattca

SEQ ID NO: 176158 - DNA, 25 bp, SARS Virus
tggacatctttggcacactattcaa

SEQ ID NO: 176159 - DNA, 25 bp, SARS Virus
ggacatctttgcgacactattcaat

SEQ ID NO: 176160 - DNA, 25 bp, SARS Virus
gacatctttgccgcactattcaatg

SEQ ID NO: 176161 - DNA, 25 bp, SARS Virus
acatctttgccagactattcaatgt

SEQ ID NO: 176162 - DNA, 25 bp, SARS Virus
catctttgccacgctattcaatgtc

SEQ ID NO: 176163 - DNA, 25 bp, SARS Virus
atctttgccacagtattcaatgtcg

SEQ ID NO: 176164 - DNA, 25 bp, SARS Virus
tctttgccacacgattcaatgtcgt

SEQ ID NO: 176165 - DNA, 25 bp, SARS Virus
ctttgccacactgttcaatgtcgtt

SEQ ID NO: 176166 - DNA, 25 bp, SARS Virus
tttgccacactagtcaatgtcgttc

SEQ ID NO: 176167 - DNA, 25 bp, SARS Virus
ttgccacactatgcaatgtcgttca

SEQ ID NO: 176168 - DNA, 25 bp, SARS Virus
tgccacactattgaatgtcgttcac

SEQ ID NO: 176169 - DNA, 25 bp, SARS Virus
gccacactattcgatgtcgttcaca

SEQ ID NO: 176170 - DNA, 25 bp, SARS Virus
ccacactattcagtgtcgttcacaa

SEQ ID NO: 176171 - DNA, 25 bp, SARS Virus
cacactattcaaggtcgttcacaat

SEQ ID NO: 176172 - DNA, 25 bp, SARS Virus
acactattcaatgtcgttcacaata

SEQ ID NO: 176173 - DNA, 25 bp, SARS Virus
cactattcaatggcgttcacaatac

SEQ ID NO: 176174 - DNA, 25 bp, SARS Virus
actattcaatgtggttcacaataca

SEQ ID NO: 176175 - DNA, 25 bp, SARS Virus
ctattcaatgtcgttcacaatacaa

SEQ ID NO: 176176 - DNA, 25 bp, SARS Virus
tattcaatgtcggtcacaatacaaa

SEQ ID NO: 176177 - DNA, 25 bp, SARS Virus
attcaatgtcgtgcacaatacaaac

SEQ ID NO: 176178 - DNA, 25 bp, SARS Virus
ttcaatgtcgttgacaatacaaacg

SEQ ID NO: 176179 - DNA, 25 bp, SARS Virus
tcaatgtcgttcgcaatacaaacgc

SEQ ID NO: 176180 - DNA, 25 bp, SARS Virus
caatgtcgttcagaatacaaacgct

SEQ ID NO: 176181 - DNA, 25 bp, SARS Virus
aatgtcgttcacgatacaaacgctc

SEQ ID NO: 176182 - DNA, 25 bp, SARS Virus
atgtcgttcacagtacaaacgctcg

SEQ ID NO: 176183 - DNA, 25 bp, SARS Virus
tgtcgttcacaagacaaacgctcgt

SEQ ID NO: 176184 - DNA, 25 bp, SARS Virus
gtcgttcacaatgcaaacgctcgtt

SEQ ID NO: 176185 - DNA, 25 bp, SARS Virus
tcgttcacaatagaaacgctcgttc

SEQ ID NO: 176186 - DNA, 25 bp, SARS Virus
cgttcacaatacgaacgctcgttct

SEQ ID NO: 176187 - DNA, 25 bp, SARS Virus
gttcacaatacagacgctcgttctt

SEQ ID NO: 176188 - DNA, 25 bp, SARS Virus
ttcacaatacaagcgctcgttcttg

SEQ ID NO: 176189 - DNA, 25 bp, SARS Virus
tcacaatacaaaggctcgttcttgt

SEQ ID NO: 176190 - DNA, 25 bp, SARS Virus
cacaatacaaacgctcgttcttgtt

SEQ ID NO: 176191 - DNA, 25 bp, SARS Virus
acaatacaaacggtcgttcttgttc

SEQ ID NO: 176192 - DNA, 25 bp, SARS Virus
caatacaaacgcgcgttcttgttct

SEQ ID NO: 176193 - DNA, 25 bp, SARS Virus
aatacaaacgctggttcttgttctc

SEQ ID NO: 176194 - DNA, 25 bp, SARS Virus
atacaaacgctcgttcttgttctct

SEQ ID NO: 176195 - DNA, 25 bp, SARS Virus
tacaaacgctcggtcttgttctctc

SEQ ID NO: 176196 - DNA, 25 bp, SARS Virus
acaaacgctcgtgcttgttctctcc

SEQ ID NO: 176197 - DNA, 25 bp, SARS Virus
caaacgctcgttgttgttctctccg

SEQ ID NO: 176198 - DNA, 25 bp, SARS Virus
aaacgctcgttcgtgttctctccgg

SEQ ID NO: 176199 - DNA, 25 bp, SARS Virus
aacgctcgttctggttctctccggt

SEQ ID NO: 176200 - DNA, 25 bp, SARS Virus
acgctcgttcttgttctctccggta

SEQ ID NO: 176201 - DNA, 25 bp, SARS Virus
cagagtcaggttttaaaacggagtc

SEQ ID NO: 176202 - DNA, 25 bp, SARS Virus
agagtcaggttgtaaaacggagtct

SEQ ID NO: 176203 - DNA, 25 bp, SARS Virus
gagtcaggttgttaaacggagtctg

SEQ ID NO: 176204 - DNA, 25 bp, SARS Virus
agtcaggttgtataacggagtctgt

SEQ ID NO: 176205 - DNA, 25 bp, SARS Virus
gtcaggttgtaatacggagtctgta

SEQ ID NO: 176206 - DNA, 25 bp, SARS Virus
tcaggttgtaaatcggagtctgtac

SEQ ID NO: 176207 - DNA, 25 bp, SARS Virus
caggttgtaaaatggagtctgtact

SEQ ID NO: 176208 - DNA, 25 bp, SARS Virus
aggttgtaaaactgagtctgtactt

SEQ ID NO: 176209 - DNA, 25 bp, SARS Virus
ggttgtaaaacgtagtctgtacttg

SEQ ID NO: 176210 - DNA, 25 bp, SARS Virus
gttgtaaaacggtgtctgtacttgt

SEQ ID NO: 176211 - DNA, 25 bp, SARS Virus
ttgtaaaacggattctgtacttgtg

SEQ ID NO: 176212 - DNA, 25 bp, SARS Virus
tgtaaaacggagtctgtacttgtgt

SEQ ID NO: 176213 - DNA, 25 bp, SARS Virus
gtaaaacggagtttgtacttgtgta

SEQ ID NO: 176214 - DNA, 25 bp, SARS Virus
taaaacggagtctgtacttgtgtaa

SEQ ID NO: 176215 - DNA, 25 bp, SARS Virus
aaaacggagtctttacttgtgtaat

SEQ ID NO: 176216 - DNA, 25 bp, SARS Virus
aaacggagtctgtacttgtgtaata

SEQ ID NO: 176217 - DNA, 25 bp, SARS Virus
aacggagtctgttcttgtgtaataa

SEQ ID NO: 176218 - DNA, 25 bp, SARS Virus
acggagtctgtatttgtgtaataaa

SEQ ID NO: 176219 - DNA, 25 bp, SARS Virus
cggagtctgtacttgtgtaataaaa

SEQ ID NO: 176220 - DNA, 25 bp, SARS Virus
ggagtctgtacttgtgtaataaaac

SEQ ID NO: 176221 - DNA, 25 bp, SARS Virus
gagtctgtacttttgtaataaaact

SEQ ID NO: 176222 - DNA, 25 bp, SARS Virus
agtctgtacttgtgtaataaaacta

SEQ ID NO: 176223 - DNA, 25 bp, SARS Virus
gtctgtacttgtttaataaaactat

SEQ ID NO: 176224 - DNA, 25 bp, SARS Virus
tctgtacttgtgtaataaaactatt

SEQ ID NO: 176225 - DNA, 25 bp, SARS Virus
ctgtacttgtgttataaaactatta

SEQ ID NO: 176226 - DNA, 25 bp, SARS Virus
tgtacttgtgtattaaaactattat

SEQ ID NO: 176227 - DNA, 25 bp, SARS Virus
gtacttgtgtaataaaactattatt

SEQ ID NO: 176228 - DNA, 25 bp, SARS Virus
tacttgtgtaattaaactattattt

SEQ ID NO: 176229 - DNA, 25 bp, SARS Virus
acttgtgtaatataactattatttc

SEQ ID NO: 176230 - DNA, 25 bp, SARS Virus
cttgtgtaataatactattatttct

SEQ ID NO: 176231 - DNA, 25 bp, SARS Virus
ttgtgtaataaatctattatttctt

SEQ ID NO: 176232 - DNA, 25 bp, SARS Virus
tgtgtaataaaattattatttcttg

SEQ ID NO: 176233 - DNA, 25 bp, SARS Virus
gtgtaataaaactattatttcttga

SEQ ID NO: 176234 - DNA, 25 bp, SARS Virus
tgtaataaaacttttatttcttgac

SEQ ID NO: 176235 - DNA, 25 bp, SARS Virus
gtaataaaactattatttcttgacg

SEQ ID NO: 176236 - DNA, 25 bp, SARS Virus
taataaaactattatttcttgacgg

SEQ ID NO: 176237 - DNA, 25 bp, SARS Virus
aataaaactattttttcttgacgga

SEQ ID NO: 176238 - DNA, 25 bp, SARS Virus
ataaaactattatttcttgacggaa

SEQ ID NO: 176239 - DNA, 25 bp, SARS Virus
taaaactattatttcttgacggaat

SEQ ID NO: 176240 - DNA, 25 bp, SARS Virus
aaaactattatttcttgacggaatt

SEQ ID NO: 176241 - DNA, 25 bp, SARS Virus
aaactattattttttgacggaattt

SEQ ID NO: 176242 - DNA, 25 bp, SARS Virus
aactattatttcttgacggaatttc

SEQ ID NO: 176243 - DNA, 25 bp, SARS Virus
actattatttcttgacggaatttca

SEQ ID NO: 176244 - DNA, 25 bp, SARS Virus
ctattatttctttacggaatttcaa

SEQ ID NO: 176245 - DNA, 25 bp, SARS Virus
tattatttcttgtcggaatttcaag

SEQ ID NO: 176246 - DNA, 25 bp, SARS Virus
attatttcttgatggaatttcaaga

SEQ ID NO: 176247 - DNA, 25 bp, SARS Virus
ttatttcttgactgaatttcaagaa

SEQ ID NO: 176248 - DNA, 25 bp, SARS Virus
tatttcttgacgtaatttcaagaat

SEQ ID NO: 176249 - DNA, 25 bp, SARS Virus
atttcttgacggtatttcaagaatt

SEQ ID NO: 176250 - DNA, 25 bp, SARS Virus
tttcttgacggattttcaagaatta

SEQ ID NO: 176251 - DNA, 25 bp, SARS Virus
ttcttgacggaatttcaagaattac

SEQ ID NO: 176252 - DNA, 25 bp, SARS Virus
tcttgacggaatttcaagaattacg

SEQ ID NO: 176253 - DNA, 25 bp, SARS Virus
cttgacggaatttcaagaattacga

SEQ ID NO: 176254 - DNA, 25 bp, SARS Virus
ttgacggaattttaagaattacgat

SEQ ID NO: 176255 - DNA, 25 bp, SARS Virus
tgacggaatttctagaattacgatc

SEQ ID NO: 176256 - DNA, 25 bp, SARS Virus
gacggaatttcatgaattacgatcg

SEQ ID NO: 176257 - DNA, 25 bp, SARS Virus
acggaatttcaataattacgatcga

SEQ ID NO: 176258 - DNA, 25 bp, SARS Virus
cggaatttcaagtattacgatcgat

SEQ ID NO: 176259 - DNA, 25 bp, SARS Virus
ggaatttcaagatttacgatcgatg

SEQ ID NO: 176260 - DNA, 25 bp, SARS Virus
gaatttcaagaattacgatcgatga

SEQ ID NO: 176261 - DNA, 25 bp, SARS Virus
aatttcaagaattacgatcgatgat

SEQ ID NO: 176262 - DNA, 25 bp, SARS Virus
atttcaagaatttcgatcgatgatt

SEQ ID NO: 176263 - DNA, 25 bp, SARS Virus
tttcaagaattatgatcgatgattt

SEQ ID NO: 176264 - DNA, 25 bp, SARS Virus
ttcaagaattactatcgatgatttg

SEQ ID NO: 176265 - DNA, 25 bp, SARS Virus
tcaagaattacgttcgatgatttgg

SEQ ID NO: 176266 - DNA, 25 bp, SARS Virus
caagaattacgatcgatgatttgga

SEQ ID NO: 176267 - DNA, 25 bp, SARS Virus
aagaattacgattgatgatttggaa

SEQ ID NO: 176268 - DNA, 25 bp, SARS Virus
agaattacgatctatgatttggaac

SEQ ID NO: 176269 - DNA, 25 bp, SARS Virus
gaattacgatcgttgatttggaact

SEQ ID NO: 176270 - DNA, 25 bp, SARS Virus
aattacgatcgatgatttggaactc

SEQ ID NO: 176271 - DNA, 25 bp, SARS Virus
attacgatcgattatttggaactcg

SEQ ID NO: 176272 - DNA, 25 bp, SARS Virus
ttacgatcgatgttttggaactcgg

SEQ ID NO: 176273 - DNA, 25 bp, SARS Virus
tacgatcgatgatttggaactcggc

SEQ ID NO: 176274 - DNA, 25 bp, SARS Virus
acgatcgatgatttggaactcggcg

SEQ ID NO: 176275 - DNA, 25 bp, SARS Virus
cgatcgatgatttggaactcggcgt

SEQ ID NO: 176276 - DNA, 25 bp, SARS Virus
gatcgatgattttgaactcggcgta

SEQ ID NO: 176277 - DNA, 25 bp, SARS Virus
atcgatgatttgtaactcggcgtat

SEQ ID NO: 176278 - DNA, 25 bp, SARS Virus
tcgatgatttggtactcggcgtatc

SEQ ID NO: 176279 - DNA, 25 bp, SARS Virus
cgatgatttggatctcggcgtatca

SEQ ID NO: 176280 - DNA, 25 bp, SARS Virus
gatgatttggaattcggcgtatcaa

SEQ ID NO: 176281 - DNA, 25 bp, SARS Virus
atgatttggaactcggcgtatcaat

SEQ ID NO: 176282 - DNA, 25 bp, SARS Virus
tgatttggaacttggcgtatcaatg

SEQ ID NO: 176283 - DNA, 25 bp, SARS Virus
gatttggaactctgcgtatcaatga

SEQ ID NO: 176284 - DNA, 25 bp, SARS Virus
atttggaactcgtcgtatcaatgac

SEQ ID NO: 176285 - DNA, 25 bp, SARS Virus
tttggaactcggtgtatcaatgaca

SEQ ID NO: 176286 - DNA, 25 bp, SARS Virus
ttggaactcggcttatcaatgacaa

SEQ ID NO: 176287 - DNA, 25 bp, SARS Virus
tggaactcggcgtatcaatgacaat

SEQ ID NO: 176288 - DNA, 25 bp, SARS Virus
ggaactcggcgtttcaatgacaata

SEQ ID NO: 176289 - DNA, 25 bp, SARS Virus
gaactcggcgtatcaatgacaatat

SEQ ID NO: 176290 - DNA, 25 bp, SARS Virus
aactcggcgtattaatgacaatatc

SEQ ID NO: 176291 - DNA, 25 bp, SARS Virus
actcggcgtatctatgacaatatcg

SEQ ID NO: 176292 - DNA, 25 bp, SARS Virus
ctcggcgtatcattgacaatatcgt

SEQ ID NO: 176293 - DNA, 25 bp, SARS Virus
tcggcgtatcaatgacaatatcgtg

SEQ ID NO: 176294 - DNA, 25 bp, SARS Virus
cggcgtatcaattacaatatcgtgt

SEQ ID NO: 176295 - DNA, 25 bp, SARS Virus
ggcgtatcaatgtcaatatcgtgtg

SEQ ID NO: 176296 - DNA, 25 bp, SARS Virus
gcgtatcaatgataatatcgtgtgt

SEQ ID NO: 176297 - DNA, 25 bp, SARS Virus
cgtatcaatgactatatcgtgtgtt

SEQ ID NO: 176298 - DNA, 25 bp, SARS Virus
gtatcaatgacattatcgtgtgttg

SEQ ID NO: 176299 - DNA, 25 bp, SARS Virus
tatcaatgacaatatcgtgtgttgc

SEQ ID NO: 176300 - DNA, 25 bp, SARS Virus
atcaatgacaatttcgtgtgttgcc

SEQ ID NO: 176301 - DNA, 25 bp, SARS Virus
tcaatgacaatatcgtgtgttgccg

SEQ ID NO: 176302 - DNA, 25 bp, SARS Virus
caatgacaatattgtgtgttgccgt

SEQ ID NO: 176303 - DNA, 25 bp, SARS Virus
aatgacaatatcttgtgttgccgta

SEQ ID NO: 176304 - DNA, 25 bp, SARS Virus
atgacaatatcgtgtgttgccgtag

SEQ ID NO: 176305 - DNA, 25 bp, SARS Virus
tgacaatatcgtttgttgccgtagt

SEQ ID NO: 176306 - DNA, 25 bp, SARS Virus
gacaatatcgtgtgttgccgtagta

SEQ ID NO: 176307 - DNA, 25 bp, SARS Virus
acaatatcgtgttttgccgtagtag

SEQ ID NO: 176308 - DNA, 25 bp, SARS Virus
caatatcgtgtgttgccgtagtagt

SEQ ID NO: 176309 - DNA, 25 bp, SARS Virus
aatatcgtgtgttgccgtagtagtc

SEQ ID NO: 176310 - DNA, 25 bp, SARS Virus
atatcgtgtgtttccgtagtagtct

SEQ ID NO: 176311 - DNA, 25 bp, SARS Virus
tatcgtgtgttgtcgtagtagtctt

SEQ ID NO: 176312 - DNA, 25 bp, SARS Virus
atcgtgtgttgctgtagtagtcttt

SEQ ID NO: 176313 - DNA, 25 bp, SARS Virus
tcgtgtgttgccttagtagtctttc

SEQ ID NO: 176314 - DNA, 25 bp, SARS Virus
cgtgtgttgccgtagtagtctttct

SEQ ID NO: 176315 - DNA, 25 bp, SARS Virus
gtgtgttgccgttgtagtctttctt

SEQ ID NO: 176316 - DNA, 25 bp, SARS Virus
tgtgttgccgtattagtctttctta

SEQ ID NO: 176317 - DNA, 25 bp, SARS Virus
gtgttgccgtagtagtctttcttag

SEQ ID NO: 176318 - DNA, 25 bp, SARS Virus
tgttgccgtagttgtctttcttagt

SEQ ID NO: 176319 - DNA, 25 bp, SARS Virus
gttgccgtagtattctttcttagta

SEQ ID NO: 176320 - DNA, 25 bp, SARS Virus
ttgccgtagtagtctttcttagtag

SEQ ID NO: 176321 - DNA, 25 bp, SARS Virus
tgccgtagtagtttttcttagtagt

SEQ ID NO: 176322 - DNA, 25 bp, SARS Virus
gccgtagtagtctttcttagtagta

SEQ ID NO: 176323 - DNA, 25 bp, SARS Virus
ccgtagtagtctttcttagtagtac

SEQ ID NO: 176324 - DNA, 25 bp, SARS Virus
cgtagtagtctttcttagtagtacc

SEQ ID NO: 176325 - DNA, 25 bp, SARS Virus
gtagtagtcttttttagtagtacct

SEQ ID NO: 176326 - DNA, 25 bp, SARS Virus
tagtagtctttcttagtagtacctc

SEQ ID NO: 176327 - DNA, 25 bp, SARS Virus
agtagtctttcttagtagtacctct

SEQ ID NO: 176328 - DNA, 25 bp, SARS Virus
gtagtctttctttgtagtacctctt

SEQ ID NO: 176329 - DNA, 25 bp, SARS Virus
tagtctttcttattagtacctcttt

SEQ ID NO: 176330 - DNA, 25 bp, SARS Virus
agtctttcttagtagtacctcttta

SEQ ID NO: 176331 - DNA, 25 bp, SARS Virus
gtctttcttagttgtacctctttac

SEQ ID NO: 176332 - DNA, 25 bp, SARS Virus
tctttcttagtattacctctttaca

SEQ ID NO: 176333 - DNA, 25 bp, SARS Virus
ctttcttagtagtacctctttacaa

SEQ ID NO: 176334 - DNA, 25 bp, SARS Virus
tttcttagtagttcctctttacaaa

SEQ ID NO: 176335 - DNA, 25 bp, SARS Virus
ttcttagtagtatctctttacaaat

SEQ ID NO: 176336 - DNA, 25 bp, SARS Virus
tcttagtagtacttctttacaaatg

SEQ ID NO: 176337 - DNA, 25 bp, SARS Virus
cttagtagtacctctttacaaatgc

SEQ ID NO: 176338 - DNA, 25 bp, SARS Virus
ttagtagtacctttttacaaatgcg

SEQ ID NO: 176339 - DNA, 25 bp, SARS Virus
tagtagtacctctttacaaatgcgt

SEQ ID NO: 176340 - DNA, 25 bp, SARS Virus
agtagtacctctttacaaatgcgtc

SEQ ID NO: 176341 - DNA, 25 bp, SARS Virus
gtagtacctctttacaaatgcgtcc

SEQ ID NO: 176342 - DNA, 25 bp, SARS Virus
tagtacctcttttcaaatgcgtcca

SEQ ID NO: 176343 - DNA, 25 bp, SARS Virus
agtacctctttataaatgcgtccat

SEQ ID NO: 176344 - DNA, 25 bp, SARS Virus
gtacctctttactaatgcgtccatt

SEQ ID NO: 176345 - DNA, 25 bp, SARS Virus
tacctctttacatatgcgtccattc

SEQ ID NO: 176346 - DNA, 25 bp, SARS Virus
acctctttacaattgcgtccattcg

SEQ ID NO: 176347 - DNA, 25 bp, SARS Virus
cctctttacaaatgcgtccattcgc

SEQ ID NO: 176348 - DNA, 25 bp, SARS Virus
ctctttacaaattcgtccattcgca

SEQ ID NO: 176349 - DNA, 25 bp, SARS Virus
tctttacaaatgtgtccattcgcat

SEQ ID NO: 176350 - DNA, 25 bp, SARS Virus
ctttacaaatgcttccattcgcatt

SEQ ID NO: 176351 - DNA, 25 bp, SARS Virus
tttacaaatgcgtccattcgcattt

SEQ ID NO: 176352 - DNA, 25 bp, SARS Virus
ttacaaatgcgttcattcgcatttt

SEQ ID NO: 176353 - DNA, 25 bp, SARS Virus
tacaaatgcgtctattcgcattttg

SEQ ID NO: 176354 - DNA, 25 bp, SARS Virus
acaaatgcgtcctttcgcattttga

SEQ ID NO: 176355 - DNA, 25 bp, SARS Virus
caaatgcgtccattcgcattttgag

SEQ ID NO: 176356 - DNA, 25 bp, SARS Virus
aaatgcgtccattcgcattttgagt

SEQ ID NO: 176357 - DNA, 25 bp, SARS Virus
aatgcgtccatttgcattttgagta

SEQ ID NO: 176358 - DNA, 25 bp, SARS Virus
atgcgtccattctcattttgagtag

SEQ ID NO: 176359 - DNA, 25 bp, SARS Virus
tgcgtccattcgtattttgagtagg

SEQ ID NO: 176360 - DNA, 25 bp, SARS Virus
gcgtccattcgctttttgagtaggt

SEQ ID NO: 176361 - DNA, 25 bp, SARS Virus
cgtccattcgcattttgagtaggtg

SEQ ID NO: 176362 - DNA, 25 bp, SARS Virus
gtccattcgcattttgagtaggtgc

SEQ ID NO: 176363 - DNA, 25 bp, SARS Virus
tccattcgcattttgagtaggtgct

SEQ ID NO: 176364 - DNA, 25 bp, SARS Virus
ccattcgcattttgagtaggtgctt

SEQ ID NO: 176365 - DNA, 25 bp, SARS Virus
cattcgcatttttagtaggtgctta

SEQ ID NO: 176366 - DNA, 25 bp, SARS Virus
attcgcattttgtgtaggtgcttaa

SEQ ID NO: 176367 - DNA, 25 bp, SARS Virus
ttcgcattttgattaggtgcttaag

SEQ ID NO: 176368 - DNA, 25 bp, SARS Virus
tcgcattttgagtaggtgcttaagt

SEQ ID NO: 176369 - DNA, 25 bp, SARS Virus
cgcattttgagttggtgcttaagta

SEQ ID NO: 176370 - DNA, 25 bp, SARS Virus
gcattttgagtatgtgcttaagtac

SEQ ID NO: 176371 - DNA, 25 bp, SARS Virus
cattttgagtagttgcttaagtact

SEQ ID NO: 176372 - DNA, 25 bp, SARS Virus
attttgagtaggtgcttaagtacta

SEQ ID NO: 176373 - DNA, 25 bp, SARS Virus
ttttgagtaggttcttaagtactag

SEQ ID NO: 176374 - DNA, 25 bp, SARS Virus
tttgagtaggtgtttaagtactagt

SEQ ID NO: 176375 - DNA, 25 bp, SARS Virus
ttgagtaggtgcttaagtactagtt

SEQ ID NO: 176376 - DNA, 25 bp, SARS Virus
tgagtaggtgcttaagtactagttg

SEQ ID NO: 176377 - DNA, 25 bp, SARS Virus
gagtaggtgctttagtactagttgt

SEQ ID NO: 176378 - DNA, 25 bp, SARS Virus
agtaggtgcttatgtactagttgta

SEQ ID NO: 176379 - DNA, 25 bp, SARS Virus
gtaggtgcttaattactagttgtag

SEQ ID NO: 176380 - DNA, 25 bp, SARS Virus
taggtgcttaagtactagttgtagg

SEQ ID NO: 176381 - DNA, 25 bp, SARS Virus
aggtgcttaagttctagttgtaggg

SEQ ID NO: 176382 - DNA, 25 bp, SARS Virus
ggtgcttaagtattagttgtaggga

SEQ ID NO: 176383 - DNA, 25 bp, SARS Virus
gtgcttaagtactagttgtagggat

SEQ ID NO: 176384 - DNA, 25 bp, SARS Virus
tgcttaagtacttgttgtagggata

SEQ ID NO: 176385 - DNA, 25 bp, SARS Virus
gcttaagtactatttgtagggataa

SEQ ID NO: 176386 - DNA, 25 bp, SARS Virus
cttaagtactagttgtagggataaa

SEQ ID NO: 176387 - DNA, 25 bp, SARS Virus
ttaagtactagttgtagggataaag

SEQ ID NO: 176388 - DNA, 25 bp, SARS Virus
taagtactagttttagggataaaga

SEQ ID NO: 176389 - DNA, 25 bp, SARS Virus
aagtactagttgtagggataaagat

SEQ ID NO: 176390 - DNA, 25 bp, SARS Virus
agtactagttgttgggataaagata

SEQ ID NO: 176391 - DNA, 25 bp, SARS Virus
gtactagttgtatggataaagatat

SEQ ID NO: 176392 - DNA, 25 bp, SARS Virus
tactagttgtagtgataaagatatc

SEQ ID NO: 176393 - DNA, 25 bp, SARS Virus
actagttgtaggtataaagatatct

SEQ ID NO: 176394 - DNA, 25 bp, SARS Virus
ctagttgtagggttaaagatatctc

SEQ ID NO: 176395 - DNA, 25 bp, SARS Virus
tagttgtagggataaagatatctct

SEQ ID NO: 176396 - DNA, 25 bp, SARS Virus
agttgtagggattaagatatctctg

SEQ ID NO: 176397 - DNA, 25 bp, SARS Virus
gttgtagggatatagatatctctgt

SEQ ID NO: 176398 - DNA, 25 bp, SARS Virus
ttgtagggataatgatatctctgtg

SEQ ID NO: 176399 - DNA, 25 bp, SARS Virus
tgtagggataaatatatctctgtga

SEQ ID NO: 176400 - DNA, 25 bp, SARS Virus
gtagggataaagttatctctgtgag

SEQ ID NO: 176401 - DNA, 25 bp, SARS Virus
tagggataaagatatctctgtgagt

SEQ ID NO: 176402 - DNA, 25 bp, SARS Virus
agggataaagatttctctgtgagta

SEQ ID NO: 176403 - DNA, 25 bp, SARS Virus
gggataaagatatctctgtgagtat

SEQ ID NO: 176404 - DNA, 25 bp, SARS Virus
ggataaagatatttctgtgagtatc

SEQ ID NO: 176405 - DNA, 25 bp, SARS Virus
gataaagatatctctgtgagtatct

SEQ ID NO: 176406 - DNA, 25 bp, SARS Virus
ataaagatatctttgtgagtatctc

SEQ ID NO: 176407 - DNA, 25 bp, SARS Virus
taaagatatctctgtgagtatctcg

SEQ ID NO: 176408 - DNA, 25 bp, SARS Virus
aaagatatctctttgagtatctcgg

SEQ ID NO: 176409 - DNA, 25 bp, SARS Virus
aagatatctctgtgagtatctcgga

SEQ ID NO: 176410 - DNA, 25 bp, SARS Virus
agatatctctgttagtatctcggac

SEQ ID NO: 176411 - DNA, 25 bp, SARS Virus
gatatctctgtgtgtatctcggaca

SEQ ID NO: 176412 - DNA, 25 bp, SARS Virus
atatctctgtgattatctcggacac

SEQ ID NO: 176413 - DNA, 25 bp, SARS Virus
tatctctgtgagtatctcggacaca

SEQ ID NO: 176414 - DNA, 25 bp, SARS Virus
atctctgtgagtttctcggacacaa

SEQ ID NO: 176415 - DNA, 25 bp, SARS Virus
tctctgtgagtatctcggacacaac

SEQ ID NO: 176416 - DNA, 25 bp, SARS Virus
ctctgtgagtatttcggacacaaca

SEQ ID NO: 176417 - DNA, 25 bp, SARS Virus
tctgtgagtatctcggacacaacat

SEQ ID NO: 176418 - DNA, 25 bp, SARS Virus
ctgtgagtatcttggacacaacatc

SEQ ID NO: 176419 - DNA, 25 bp, SARS Virus
tgtgagtatctctgacacaacatct

SEQ ID NO: 176420 - DNA, 25 bp, SARS Virus
gtgagtatctcgtacacaacatcta

SEQ ID NO: 176421 - DNA, 25 bp, SARS Virus
tgagtatctcggtcacaacatctaa

SEQ ID NO: 176422 - DNA, 25 bp, SARS Virus
gagtatctcggatacaacatctaac

SEQ ID NO: 176423 - DNA, 25 bp, SARS Virus
agtatctcggactcaacatctaacg

SEQ ID NO: 176424 - DNA, 25 bp, SARS Virus
gtatctcggacataacatctaacgc

SEQ ID NO: 176425 - DNA, 25 bp, SARS Virus
tatctcggacactacatctaacgcc

SEQ ID NO: 176426 - DNA, 25 bp, SARS Virus
atctcggacacatcatctaacgcct

SEQ ID NO: 176427 - DNA, 25 bp, SARS Virus
tctcggacacaatatctaacgcctg

SEQ ID NO: 176428 - DNA, 25 bp, SARS Virus
ctcggacacaacttctaacgcctgt

SEQ ID NO: 176429 - DNA, 25 bp, SARS Virus
tcggacacaacatctaacgcctgta

SEQ ID NO: 176430 - DNA, 25 bp, SARS Virus
cggacacaacatttaacgcctgtat

SEQ ID NO: 176431 - DNA, 25 bp, SARS Virus
ggacacaacatctaacgcctgtatg

SEQ ID NO: 176432 - DNA, 25 bp, SARS Virus
gacacaacatcttacgcctgtatga

SEQ ID NO: 176433 - DNA, 25 bp, SARS Virus
acacaacatctatcgcctgtatgaa

SEQ ID NO: 176434 - DNA, 25 bp, SARS Virus
cacaacatctaatgcctgtatgaac

SEQ ID NO: 176435 - DNA, 25 bp, SARS Virus
acaacatctaactcctgtatgaaca

SEQ ID NO: 176436 - DNA, 25 bp, SARS Virus
caacatctaacgtctgtatgaacag

SEQ ID NO: 176437 - DNA, 25 bp, SARS Virus
aacatctaacgcttgtatgaacagt

SEQ ID NO: 176438 - DNA, 25 bp, SARS Virus
acatctaacgcctgtatgaacagtc

SEQ ID NO: 176439 - DNA, 25 bp, SARS Virus
catctaacgcctttatgaacagtcg

SEQ ID NO: 176440 - DNA, 25 bp, SARS Virus
atctaacgcctgtatgaacagtcga

SEQ ID NO: 176441 - DNA, 25 bp, SARS Virus
tctaacgcctgtttgaacagtcgat

SEQ ID NO: 176442 - DNA, 25 bp, SARS Virus
ctaacgcctgtatgaacagtcgata

SEQ ID NO: 176443 - DNA, 25 bp, SARS Virus
taacgcctgtattaacagtcgatag

SEQ ID NO: 176444 - DNA, 25 bp, SARS Virus
aacgcctgtatgtacagtcgataga

SEQ ID NO: 176445 - DNA, 25 bp, SARS Virus
acgcctgtatgatcagtcgatagaa

SEQ ID NO: 176446 - DNA, 25 bp, SARS Virus
cgcctgtatgaatagtcgatagaat

SEQ ID NO: 176447 - DNA, 25 bp, SARS Virus
gcctgtatgaactgtcgatagaata

SEQ ID NO: 176448 - DNA, 25 bp, SARS Virus
cctgtatgaacattcgatagaataa

SEQ ID NO: 176449 - DNA, 25 bp, SARS Virus
ctgtatgaacagtcgatagaataat

SEQ ID NO: 176450 - DNA, 25 bp, SARS Virus
tgtatgaacagttgatagaataatg

SEQ ID NO: 176451 - DNA, 25 bp, SARS Virus
gtatgaacagtctatagaataatgg

SEQ ID NO: 176452 - DNA, 25 bp, SARS Virus
tatgaacagtcgttagaataatggt

SEQ ID NO: 176453 - DNA, 25 bp, SARS Virus
atgaacagtcgatagaataatggta

SEQ ID NO: 176454 - DNA, 25 bp, SARS Virus
tgaacagtcgattgaataatggtag

SEQ ID NO: 176455 - DNA, 25 bp, SARS Virus
gaacagtcgatataataatggtagt

SEQ ID NO: 176456 - DNA, 25 bp, SARS Virus
aacagtcgatagtataatggtagtc

SEQ ID NO: 176457 - DNA, 25 bp, SARS Virus
acagtcgatagattaatggtagtca

SEQ ID NO: 176458 - DNA, 25 bp, SARS Virus
cagtcgatagaataatggtagtcaa

SEQ ID NO: 176459 - DNA, 25 bp, SARS Virus
agtcgatagaattatggtagtcaac

SEQ ID NO: 176460 - DNA, 25 bp, SARS Virus
gtcgatagaatattggtagtcaact

SEQ ID NO: 176461 - DNA, 25 bp, SARS Virus
tcgatagaataatggtagtcaactt

SEQ ID NO: 176462 - DNA, 25 bp, SARS Virus
cgatagaataattgtagtcaacttt

SEQ ID NO: 176463 - DNA, 25 bp, SARS Virus
gatagaataatgttagtcaactttc

SEQ ID NO: 176464 - DNA, 25 bp, SARS Virus
atagaataatggtagtcaactttct

SEQ ID NO: 176465 - DNA, 25 bp, SARS Virus
tagaataatggttgtcaactttctt

SEQ ID NO: 176466 - DNA, 25 bp, SARS Virus
agaataatggtattcaactttcttc

SEQ ID NO: 176467 - DNA, 25 bp, SARS Virus
gaataatggtagtcaactttcttca

SEQ ID NO: 176468 - DNA, 25 bp, SARS Virus
aataatggtagttaactttcttcac

SEQ ID NO: 176469 - DNA, 25 bp, SARS Virus
ataatggtagtctactttcttcacg

SEQ ID NO: 176470 - DNA, 25 bp, SARS Virus
taatggtagtcatctttcttcacgt

SEQ ID NO: 176471 - DNA, 25 bp, SARS Virus
aatggtagtcaattttcttcacgta

SEQ ID NO: 176472 - DNA, 25 bp, SARS Virus
atggtagtcaactttcttcacgtaa

SEQ ID NO: 176473 - DNA, 25 bp, SARS Virus
tggtagtcaactttcttcacgtaaa

SEQ ID NO: 176474 - DNA, 25 bp, SARS Virus
ggtagtcaactttcttcacgtaaat

SEQ ID NO: 176475 - DNA, 25 bp, SARS Virus
gtagtcaacttttttcacgtaaatg

SEQ ID NO: 176476 - DNA, 25 bp, SARS Virus
tagtcaactttcttcacgtaaatgt

SEQ ID NO: 176477 - DNA, 25 bp, SARS Virus
agtcaactttcttcacgtaaatgta

SEQ ID NO: 176478 - DNA, 25 bp, SARS Virus
gtcaactttctttacgtaaatgtaa

SEQ ID NO: 176479 - DNA, 25 bp, SARS Virus
tcaactttcttctcgtaaatgtaac

SEQ ID NO: 176480 - DNA, 25 bp, SARS Virus
caactttcttcatgtaaatgtaacc

SEQ ID NO: 176481 - DNA, 25 bp, SARS Virus
aactttcttcacttaaatgtaaccg

SEQ ID NO: 176482 - DNA, 25 bp, SARS Virus
actttcttcacgtaaatgtaaccga

SEQ ID NO: 176483 - DNA, 25 bp, SARS Virus
ctttcttcacgttaatgtaaccgac

SEQ ID NO: 176484 - DNA, 25 bp, SARS Virus
tttcttcacgtatatgtaaccgaca

SEQ ID NO: 176485 - DNA, 25 bp, SARS Virus
ttcttcacgtaattgtaaccgacat

SEQ ID NO: 176486 - DNA, 25 bp, SARS Virus
tcttcacgtaaatgtaaccgacatt

SEQ ID NO: 176487 - DNA, 25 bp, SARS Virus
cttcacgtaaatttaaccgacattg

SEQ ID NO: 176488 - DNA, 25 bp, SARS Virus
ttcacgtaaatgtaaccgacattgt

SEQ ID NO: 176489 - DNA, 25 bp, SARS Virus
tcacgtaaatgttaccgacattgtc

SEQ ID NO: 176490 - DNA, 25 bp, SARS Virus
cacgtaaatgtatccgacattgtcg

SEQ ID NO: 176491 - DNA, 25 bp, SARS Virus
acgtaaatgtaatcgacattgtcga

SEQ ID NO: 176492 - DNA, 25 bp, SARS Virus
cgtaaatgtaactgacattgtcgaa

SEQ ID NO: 176493 - DNA, 25 bp, SARS Virus
gtaaatgtaacctacattgtcgaac

SEQ ID NO: 176494 - DNA, 25 bp, SARS Virus
taaatgtaaccgtcattgtcgaact

SEQ ID NO: 176495 - DNA, 25 bp, SARS Virus
aaatgtaaccgatattgtcgaactg

SEQ ID NO: 176496 - DNA, 25 bp, SARS Virus
aatgtaaccgactttgtcgaactgt

SEQ ID NO: 176497 - DNA, 25 bp, SARS Virus
atgtaaccgacattgtcgaactgtt

SEQ ID NO: 176498 - DNA, 25 bp, SARS Virus
tgtaaccgacattgtcgaactgttt

SEQ ID NO: 176499 - DNA, 25 bp, SARS Virus
gtaaccgacattttcgaactgttta

SEQ ID NO: 176500 - DNA, 25 bp, SARS Virus
taaccgacattgtcgaactgtttac

SEQ ID NO: 176501 - DNA, 25 bp, SARS Virus
aaccgacattgttgaactgtttaca

SEQ ID NO: 176502 - DNA, 25 bp, SARS Virus
accgacattgtctaactgtttacaa

SEQ ID NO: 176503 - DNA, 25 bp, SARS Virus
ccgacattgtcgtactgtttacaat

SEQ ID NO: 176504 - DNA, 25 bp, SARS Virus
cgacattgtcgatctgtttacaatt

SEQ ID NO: 176505 - DNA, 25 bp, SARS Virus
gacattgtcgaattgtttacaattt

SEQ ID NO: 176506 - DNA, 25 bp, SARS Virus
acattgtcgaactgtttacaatttc

SEQ ID NO: 176507 - DNA, 25 bp, SARS Virus
cattgtcgaactttttacaatttct

SEQ ID NO: 176508 - DNA, 25 bp, SARS Virus
attgtcgaactgtttacaatttctg

SEQ ID NO: 176509 - DNA, 25 bp, SARS Virus
ttgtcgaactgtttacaatttctgt

SEQ ID NO: 176510 - DNA, 25 bp, SARS Virus
tgtcgaactgtttacaatttctgtg

SEQ ID NO: 176511 - DNA, 25 bp, SARS Virus
gtcgaactgttttcaatttctgtga

SEQ ID NO: 176512 - DNA, 25 bp, SARS Virus
tcgaactgtttataatttctgtgat

SEQ ID NO: 176513 - DNA, 25 bp, SARS Virus
cgaactgtttactatttctgtgata

SEQ ID NO: 176514 - DNA, 25 bp, SARS Virus
gaactgtttacattttctgtgataa

SEQ ID NO: 176515 - DNA, 25 bp, SARS Virus
aactgtttacaatttctgtgataat

SEQ ID NO: 176516 - DNA, 25 bp, SARS Virus
actgtttacaatttctgtgataatc

SEQ ID NO: 176517 - DNA, 25 bp, SARS Virus
ctgtttacaatttctgtgataatcg

SEQ ID NO: 176518 - DNA, 25 bp, SARS Virus
tgtttacaatttttgtgataatcgt

SEQ ID NO: 176519 - DNA, 25 bp, SARS Virus
gtttacaatttctgtgataatcgta

SEQ ID NO: 176520 - DNA, 25 bp, SARS Virus
tttacaatttctttgataatcgtat

SEQ ID NO: 176521 - DNA, 25 bp, SARS Virus
ttacaatttctgtgataatcgtatt

SEQ ID NO: 176522 - DNA, 25 bp, SARS Virus
tacaatttctgttataatcgtattc

SEQ ID NO: 176523 - DNA, 25 bp, SARS Virus
acaatttctgtgttaatcgtattcg

SEQ ID NO: 176524 - DNA, 25 bp, SARS Virus
caatttctgtgataatcgtattcgt

SEQ ID NO: 176525 - DNA, 25 bp, SARS Virus
aatttctgtgattatcgtattcgtc

SEQ ID NO: 176526 - DNA, 25 bp, SARS Virus
atttctgtgatattcgtattcgtca

SEQ ID NO: 176527 - DNA, 25 bp, SARS Virus
tttctgtgataatcgtattcgtcaa

SEQ ID NO: 176528 - DNA, 25 bp, SARS Virus
ttctgtgataattgtattcgtcaac

SEQ ID NO: 176529 - DNA, 25 bp, SARS Virus
tctgtgataatcttattcgtcaaca

SEQ ID NO: 176530 - DNA, 25 bp, SARS Virus
ctgtgataatcgtattcgtcaacat

SEQ ID NO: 176531 - DNA, 25 bp, SARS Virus
tgtgataatcgttttcgtcaacatc

SEQ ID NO: 176532 - DNA, 25 bp, SARS Virus
gtgataatcgtattcgtcaacatcg

SEQ ID NO: 176533 - DNA, 25 bp, SARS Virus
tgataatcgtattcgtcaacatcgt

SEQ ID NO: 176534 - DNA, 25 bp, SARS Virus
gataatcgtatttgtcaacatcgta

SEQ ID NO: 176535 - DNA, 25 bp, SARS Virus
ataatcgtattcttcaacatcgtag

SEQ ID NO: 176536 - DNA, 25 bp, SARS Virus
taatcgtattcgtcaacatcgtagt

SEQ ID NO: 176537 - DNA, 25 bp, SARS Virus
aatcgtattcgttaacatcgtagtg

SEQ ID NO: 176538 - DNA, 25 bp, SARS Virus
atcgtattcgtctacatcgtagtgg

SEQ ID NO: 176539 - DNA, 25 bp, SARS Virus
tcgtattcgtcatcatcgtagtggc

SEQ ID NO: 176540 - DNA, 25 bp, SARS Virus
cgtattcgtcaatatcgtagtggcc

SEQ ID NO: 176541 - DNA, 25 bp, SARS Virus
gtattcgtcaacttcgtagtggcct

SEQ ID NO: 176542 - DNA, 25 bp, SARS Virus
tattcgtcaacatcgtagtggccta

SEQ ID NO: 176543 - DNA, 25 bp, SARS Virus
attcgtcaacattgtagtggcctac

SEQ ID NO: 176544 - DNA, 25 bp, SARS Virus
ttcgtcaacatcttagtggcctact

SEQ ID NO: 176545 - DNA, 25 bp, SARS Virus
tcgtcaacatcgtagtggcctacta

SEQ ID NO: 176546 - DNA, 25 bp, SARS Virus
cgtcaacatcgttgtggcctactac

SEQ ID NO: 176547 - DNA, 25 bp, SARS Virus
gtcaacatcgtattggcctactaca

SEQ ID NO: 176548 - DNA, 25 bp, SARS Virus
tcaacatcgtagtggcctactacaa

SEQ ID NO: 176549 - DNA, 25 bp, SARS Virus
caacatcgtagttgcctactacaag

SEQ ID NO: 176550 - DNA, 25 bp, SARS Virus
aacatcgtagtgtcctactacaagg

SEQ ID NO: 176551 - DNA, 25 bp, SARS Virus
acatcgtagtggtctactacaaggt

SEQ ID NO: 176552 - DNA, 25 bp, SARS Virus
catcgtagtggcttactacaaggtg

SEQ ID NO: 176553 - DNA, 25 bp, SARS Virus
atcgtagtggcctactacaaggtgg

SEQ ID NO: 176554 - DNA, 25 bp, SARS Virus
tcgtagtggccttctacaaggtgga

SEQ ID NO: 176555 - DNA, 25 bp, SARS Virus
cgtagtggcctattacaaggtggac

SEQ ID NO: 176556 - DNA, 25 bp, SARS Virus
gtagtggcctactacaaggtggacc

SEQ ID NO: 176557 - DNA, 25 bp, SARS Virus
tagtggcctacttcaaggtggacca

SEQ ID NO: 176558 - DNA, 25 bp, SARS Virus
agtggcctactataaggtggaccaa

SEQ ID NO: 176559 - DNA, 25 bp, SARS Virus
gtggcctactactaggtggaccaaa

SEQ ID NO: 176560 - DNA, 25 bp, SARS Virus
tggcctactacatggtggaccaaat

SEQ ID NO: 176561 - DNA, 25 bp, SARS Virus
ggcctactacaatgtggaccaaatt

SEQ ID NO: 176562 - DNA, 25 bp, SARS Virus
gcctactacaagttggaccaaattg

SEQ ID NO: 176563 - DNA, 25 bp, SARS Virus
cctactacaaggtggaccaaattgt

SEQ ID NO: 176564 - DNA, 25 bp, SARS Virus
ctactacaaggttgaccaaattgta

SEQ ID NO: 176565 - DNA, 25 bp, SARS Virus
tactacaaggtgtaccaaattgtat

SEQ ID NO: 176566 - DNA, 25 bp, SARS Virus
actacaaggtggtccaaattgtata

SEQ ID NO: 176567 - DNA, 25 bp, SARS Virus
ctacaaggtggatcaaattgtatat

SEQ ID NO: 176568 - DNA, 25 bp, SARS Virus
tacaaggtggactaaattgtatatc

SEQ ID NO: 176569 - DNA, 25 bp, SARS Virus
acaaggtggacctaattgtatatca

SEQ ID NO: 176570 - DNA, 25 bp, SARS Virus
caaggtggaccatattgtatatcac

SEQ ID NO: 176571 - DNA, 25 bp, SARS Virus
aaggtggaccaatttgtatatcact

SEQ ID NO: 176572 - DNA, 25 bp, SARS Virus
aggtggaccaaattgtatatcactc

SEQ ID NO: 176573 - DNA, 25 bp, SARS Virus
ggtggaccaaattgtatatcactcg

SEQ ID NO: 176574 - DNA, 25 bp, SARS Virus
gtggaccaaattttatatcactcgg

SEQ ID NO: 176575 - DNA, 25 bp, SARS Virus
tggaccaaattgtatatcactcggc

SEQ ID NO: 176576 - DNA, 25 bp, SARS Virus
ggaccaaattgtttatcactcggcg

SEQ ID NO: 176577 - DNA, 25 bp, SARS Virus
gaccaaattgtatatcactcggcgg

SEQ ID NO: 176578 - DNA, 25 bp, SARS Virus
accaaattgtatttcactcggcggt

SEQ ID NO: 176579 - DNA, 25 bp, SARS Virus
ccaaattgtatatcactcggcggtg

SEQ ID NO: 176580 - DNA, 25 bp, SARS Virus
caaattgtatattactcggcggtgt

SEQ ID NO: 176581 - DNA, 25 bp, SARS Virus
aaattgtatatctctcggcggtgtg

SEQ ID NO: 176582 - DNA, 25 bp, SARS Virus
aattgtatatcattcggcggtgtgt

SEQ ID NO: 176583 - DNA, 25 bp, SARS Virus
attgtatatcactcggcggtgtgta

SEQ ID NO: 176584 - DNA, 25 bp, SARS Virus
ttgtatatcacttggcggtgtgtac

SEQ ID NO: 176585 - DNA, 25 bp, SARS Virus
tgtatatcactctgcggtgtgtact

SEQ ID NO: 176586 - DNA, 25 bp, SARS Virus
gtatatcactcgtcggtgtgtactg

SEQ ID NO: 176587 - DNA, 25 bp, SARS Virus
tatatcactcggtggtgtgtactgg

SEQ ID NO: 176588 - DNA, 25 bp, SARS Virus
atatcactcggctgtgtgtactggt

SEQ ID NO: 176589 - DNA, 25 bp, SARS Virus
tatcactcggcgttgtgtactggta

SEQ ID NO: 176590 - DNA, 25 bp, SARS Virus
atcactcggcggtgtgtactggtag

SEQ ID NO: 176591 - DNA, 25 bp, SARS Virus
tcactcggcggtttgtactggtaga

SEQ ID NO: 176592 - DNA, 25 bp, SARS Virus
cactcggcggtgtgtactggtagag

SEQ ID NO: 176593 - DNA, 25 bp, SARS Virus
actcggcggtgtttactggtagagt

SEQ ID NO: 176594 - DNA, 25 bp, SARS Virus
ctcggcggtgtgtactggtagagtg

SEQ ID NO: 176595 - DNA, 25 bp, SARS Virus
tcggcggtgtgttctggtagagtga

SEQ ID NO: 176596 - DNA, 25 bp, SARS Virus
cggcggtgtgtattggtagagtgaa

SEQ ID NO: 176597 - DNA, 25 bp, SARS Virus
ggcggtgtgtactggtagagtgaat

SEQ ID NO: 176598 - DNA, 25 bp, SARS Virus
gcggtgtgtacttgtagagtgaatt

SEQ ID NO: 176599 - DNA, 25 bp, SARS Virus
cggtgtgtactgttagagtgaatta

SEQ ID NO: 176600 - DNA, 25 bp, SARS Virus
ggtgtgtactggtagagtgaattat

SEQ ID NO: 176601 - DNA, 25 bp, SARS Virus
gtgtgtactggttgagtgaattatg

SEQ ID NO: 176602 - DNA, 25 bp, SARS Virus
tgtgtactggtatagtgaattatga

SEQ ID NO: 176603 - DNA, 25 bp, SARS Virus
gtgtactggtagtgtgaattatgaa

SEQ ID NO: 176604 - DNA, 25 bp, SARS Virus
tgtactggtagattgaattatgaac

SEQ ID NO: 176605 - DNA, 25 bp, SARS Virus
gtactggtagagtgaattatgaacg

SEQ ID NO: 176606 - DNA, 25 bp, SARS Virus
tactggtagagttaattatgaacgc

SEQ ID NO: 176607 - DNA, 25 bp, SARS Virus
actggtagagtgtattatgaacgcg

SEQ ID NO: 176608 - DNA, 25 bp, SARS Virus
ctggtagagtgatttatgaacgcgt

SEQ ID NO: 176609 - DNA, 25 bp, SARS Virus
tggtagagtgaattatgaacgcgtg

SEQ ID NO: 176610 - DNA, 25 bp, SARS Virus
ggtagagtgaattatgaacgcgtgt

SEQ ID NO: 176611 - DNA, 25 bp, SARS Virus
gtagagtgaattttgaacgcgtgtg

SEQ ID NO: 176612 - DNA, 25 bp, SARS Virus
tagagtgaattatgaacgcgtgtga

SEQ ID NO: 176613 - DNA, 25 bp, SARS Virus
agagtgaattattaacgcgtgtgag

SEQ ID NO: 176614 - DNA, 25 bp, SARS Virus
gagtgaattatgtacgcgtgtgagc

SEQ ID NO: 176615 - DNA, 25 bp, SARS Virus
agtgaattatgatcgcgtgtgagca

SEQ ID NO: 176616 - DNA, 25 bp, SARS Virus
gtgaattatgaatgcgtgtgagcaa

SEQ ID NO: 176617 - DNA, 25 bp, SARS Virus
tgaattatgaactcgtgtgagcaat

SEQ ID NO: 176618 - DNA, 25 bp, SARS Virus
gaattatgaacgtgtgtgagcaatc

SEQ ID NO: 176619 - DNA, 25 bp, SARS Virus
aattatgaacgcttgtgagcaatcg

SEQ ID NO: 176620 - DNA, 25 bp, SARS Virus
attatgaacgcgtgtgagcaatcga

SEQ ID NO: 176621 - DNA, 25 bp, SARS Virus
ttatgaacgcgtttgagcaatcgat

SEQ ID NO: 176622 - DNA, 25 bp, SARS Virus
tatgaacgcgtgtgagcaatcgatt

SEQ ID NO: 176623 - DNA, 25 bp, SARS Virus
atgaacgcgtgttagcaatcgattg

SEQ ID NO: 176624 - DNA, 25 bp, SARS Virus
tgaacgcgtgtgtgcaatcgattgg

SEQ ID NO: 176625 - DNA, 25 bp, SARS Virus
gaacgcgtgtgatcaatcgattgga

SEQ ID NO: 176626 - DNA, 25 bp, SARS Virus
aacgcgtgtgagtaatcgattggac

SEQ ID NO: 176627 - DNA, 25 bp, SARS Virus
acgcgtgtgagctatcgattggaca

SEQ ID NO: 176628 - DNA, 25 bp, SARS Virus
cgcgtgtgagcattcgattggacat

SEQ ID NO: 176629 - DNA, 25 bp, SARS Virus
gcgtgtgagcaatcgattggacatc

SEQ ID NO: 176630 - DNA, 25 bp, SARS Virus
cgtgtgagcaattgattggacatct

SEQ ID NO: 176631 - DNA, 25 bp, SARS Virus
gtgtgagcaatctattggacatctt

SEQ ID NO: 176632 - DNA, 25 bp, SARS Virus
tgtgagcaatcgtttggacatcttt

SEQ ID NO: 176633 - DNA, 25 bp, SARS Virus
gtgagcaatcgattggacatctttg

SEQ ID NO: 176634 - DNA, 25 bp, SARS Virus
tgagcaatcgattggacatctttgc

SEQ ID NO: 176635 - DNA, 25 bp, SARS Virus
gagcaatcgatttgacatctttgcc

SEQ ID NO: 176636 - DNA, 25 bp, SARS Virus
agcaatcgattgtacatctttgcca

SEQ ID NO: 176637 - DNA, 25 bp, SARS Virus
gcaatcgattggtcatctttgccac

SEQ ID NO: 176638 - DNA, 25 bp, SARS Virus
caatcgattggatatctttgccaca

SEQ ID NO: 176639 - DNA, 25 bp, SARS Virus
aatcgattggacttctttgccacac

SEQ ID NO: 176640 - DNA, 25 bp, SARS Virus
atcgattggacatctttgccacact

SEQ ID NO: 176641 - DNA, 25 bp, SARS Virus
tcgattggacatttttgccacacta

SEQ ID NO: 176642 - DNA, 25 bp, SARS Virus
cgattggacatctttgccacactat

SEQ ID NO: 176643 - DNA, 25 bp, SARS Virus
gattggacatctttgccacactatt

SEQ ID NO: 176644 - DNA, 25 bp, SARS Virus
attggacatctttgccacactattc

SEQ ID NO: 176645 - DNA, 25 bp, SARS Virus
ttggacatcttttccacactattca

SEQ ID NO: 176646 - DNA, 25 bp, SARS Virus
tggacatctttgtcacactattcaa

SEQ ID NO: 176647 - DNA, 25 bp, SARS Virus
ggacatctttgctacactattcaat

SEQ ID NO: 176648 - DNA, 25 bp, SARS Virus
gacatctttgcctcactattcaatg

SEQ ID NO: 176649 - DNA, 25 bp, SARS Virus
acatctttgccatactattcaatgt

SEQ ID NO: 176650 - DNA, 25 bp, SARS Virus
catctttgccactctattcaatgtc

SEQ ID NO: 176651 - DNA, 25 bp, SARS Virus
atctttgccacattattcaatgtcg

SEQ ID NO: 176652 - DNA, 25 bp, SARS Virus
tctttgccacactattcaatgtcgt

SEQ ID NO: 176653 - DNA, 25 bp, SARS Virus
ctttgccacacttttcaatgtcgtt

SEQ ID NO: 176654 - DNA, 25 bp, SARS Virus
tttgccacactattcaatgtcgttc

SEQ ID NO: 176655 - DNA, 25 bp, SARS Virus
ttgccacactattcaatgtcgttca

SEQ ID NO: 176656 - DNA, 25 bp, SARS Virus
tgccacactatttaatgtcgttcac

SEQ ID NO: 176657 - DNA, 25 bp, SARS Virus
gccacactattctatgtcgttcaca

SEQ ID NO: 176658 - DNA, 25 bp, SARS Virus
ccacactattcattgtcgttcacaa

SEQ ID NO: 176659 - DNA, 25 bp, SARS Virus
cacactattcaatgtcgttcacaat

SEQ ID NO: 176660 - DNA, 25 bp, SARS Virus
acactattcaatttcgttcacaata

SEQ ID NO: 176661 - DNA, 25 bp, SARS Virus
cactattcaatgtcgttcacaatac

SEQ ID NO: 176662 - DNA, 25 bp, SARS Virus
actattcaatgttgttcacaataca

SEQ ID NO: 176663 - DNA, 25 bp, SARS Virus
ctattcaatgtctttcacaatacaa

SEQ ID NO: 176664 - DNA, 25 bp, SARS Virus
tattcaatgtcgttcacaatacaaa

SEQ ID NO: 176665 - DNA, 25 bp, SARS Virus
attcaatgtcgttcacaatacaaac

SEQ ID NO: 176666 - DNA, 25 bp, SARS Virus
ttcaatgtcgtttacaatacaaacg

SEQ ID NO: 176667 - DNA, 25 bp, SARS Virus
tcaatgtcgttctcaatacaaacgc

SEQ ID NO: 176668 - DNA, 25 bp, SARS Virus
caatgtcgttcataatacaaacgct

SEQ ID NO: 176669 - DNA, 25 bp, SARS Virus
aatgtcgttcactatacaaacgctc

SEQ ID NO: 176670 - DNA, 25 bp, SARS Virus
atgtcgttcacattacaaacgctcg

SEQ ID NO: 176671 - DNA, 25 bp, SARS Virus
tgtcgttcacaatacaaacgctcgt

SEQ ID NO: 176672 - DNA, 25 bp, SARS Virus
gtcgttcacaattcaaacgctcgtt

SEQ ID NO: 176673 - DNA, 25 bp, SARS Virus
tcgttcacaatataaacgctcgttc

SEQ ID NO: 176674 - DNA, 25 bp, SARS Virus
cgttcacaatactaacgctcgttct

SEQ ID NO: 176675 - DNA, 25 bp, SARS Virus
gttcacaatacatacgctcgttctt

SEQ ID NO: 176676 - DNA, 25 bp, SARS Virus
ttcacaatacaatcgctcgttcttg

SEQ ID NO: 176677 - DNA, 25 bp, SARS Virus
tcacaatacaaatgctcgttcttgt

SEQ ID NO: 176678 - DNA, 25 bp, SARS Virus
cacaatacaaactctcgttcttgtt

SEQ ID NO: 176679 - DNA, 25 bp, SARS Virus
acaatacaaacgttcgttcttgttc

SEQ ID NO: 176680 - DNA, 25 bp, SARS Virus
caatacaaacgctcgttcttgttct

SEQ ID NO: 176681 - DNA, 25 bp, SARS Virus
aatacaaacgcttgttcttgttctc

SEQ ID NO: 176682 - DNA, 25 bp, SARS Virus
atacaaacgctctttcttgttctct

SEQ ID NO: 176683 - DNA, 25 bp, SARS Virus
tacaaacgctcgttcttgttctctc

SEQ ID NO: 176684 - DNA, 25 bp, SARS Virus
acaaacgctcgttcttgttctctcc

SEQ ID NO: 176685 - DNA, 25 bp, SARS Virus
caaacgctcgtttttgttctctccg

SEQ ID NO: 176686 - DNA, 25 bp, SARS Virus
aaacgctcgttcttgttctctccgg

SEQ ID NO: 176687 - DNA, 25 bp, SARS Virus
aacgctcgttcttgttctctccggt

SEQ ID NO: 176688 - DNA, 25 bp, SARS Virus
acgctcgttctttttctctccggta

SEQ ID NO: 176689 - DNA, 25 bp, SARS Virus
cgctcgttcttgatctctccggtaa

SEQ ID NO: 176690 - DNA, 25 bp, SARS Virus
gctcgttcttgtactctccggtaat

SEQ ID NO: 176691 - DNA, 25 bp, SARS Virus
ctcgttcttgttatctccggtaata

SEQ ID NO: 176692 - DNA, 25 bp, SARS Virus
tcgttcttgttcactccggtaatag

SEQ ID NO: 176693 - DNA, 25 bp, SARS Virus
cgttcttgttctatccggtaatagg

SEQ ID NO: 176694 - DNA, 25 bp, SARS Virus
gttcttgttctcaccggtaatagga

SEQ ID NO: 176695 - DNA, 25 bp, SARS Virus
ttcttgttctctacggtaataggat

SEQ ID NO: 176696 - DNA, 25 bp, SARS Virus
tcttgttctctcaggtaataggatt

SEQ ID NO: 176697 - DNA, 25 bp, SARS Virus
cttgttctctccagtaataggattc

SEQ ID NO: 176698 - DNA, 25 bp, SARS Virus
ttgttctctccgataataggattcg

SEQ ID NO: 176699 - DNA, 25 bp, SARS Virus
tgttctctccggaaataggattcgt

SEQ ID NO: 176700 - DNA, 25 bp, SARS Virus
gttctctccggtaataggattcgta

SEQ ID NO: 176701 - DNA, 25 bp, SARS Virus
ttctctccggtaataggattcgtac

SEQ ID NO: 176702 - DNA, 25 bp, SARS Virus
tctctccggtaaaaggattcgtaca

SEQ ID NO: 176703 - DNA, 25 bp, SARS Virus
ctctccggtaataggattcgtacaa

SEQ ID NO: 176704 - DNA, 25 bp, SARS Virus
tctccggtaataagattcgtacaat

SEQ ID NO: 176705 - DNA, 25 bp, SARS Virus
ctccggtaatagaattcgtacaatc

SEQ ID NO: 176706 - DNA, 25 bp, SARS Virus
tccggtaataggattcgtacaatcc

SEQ ID NO: 176707 - DNA, 25 bp, SARS Virus
ccggtaataggaatcgtacaatccg

SEQ ID NO: 176708 - DNA, 25 bp, SARS Virus
cggtaataggatacgtacaatccgt

SEQ ID NO: 176709 - DNA, 25 bp, SARS Virus
ggtaataggattagtacaatccgta

SEQ ID NO: 176710 - DNA, 25 bp, SARS Virus
gtaataggattcatacaatccgtac

SEQ ID NO: 176711 - DNA, 25 bp, SARS Virus
taataggattcgaacaatccgtacc

SEQ ID NO: 176712 - DNA, 25 bp, SARS Virus
aataggattcgtacaatccgtaccg

SEQ ID NO: 176713 - DNA, 25 bp, SARS Virus
ataggattcgtaaaatccgtaccga

SEQ ID NO: 176714 - DNA, 25 bp, SARS Virus
taggattcgtacaatccgtaccgag

SEQ ID NO: 176715 - DNA, 25 bp, SARS Virus
aggattcgtacaatccgtaccgaga

SEQ ID NO: 176716 - DNA, 25 bp, SARS Virus
ggattcgtacaaaccgtaccgagac

SEQ ID NO: 176717 - DNA, 25 bp, SARS Virus
gattcgtacaatacgtaccgagaca

SEQ ID NO: 176718 - DNA, 25 bp, SARS Virus
attcgtacaatcagtaccgagacag

SEQ ID NO: 176719 - DNA, 25 bp, SARS Virus
ttcgtacaatccataccgagacagt

SEQ ID NO: 176720 - DNA, 25 bp, SARS Virus
tcgtacaatccgaaccgagacagtg

SEQ ID NO: 176721 - DNA, 25 bp, SARS Virus
cgtacaatccgtaccgagacagtgt

SEQ ID NO: 176722 - DNA, 25 bp, SARS Virus
gtacaatccgtaacgagacagtgta

SEQ ID NO: 176723 - DNA, 25 bp, SARS Virus
tacaatccgtacagagacagtgtaa

SEQ ID NO: 176724 - DNA, 25 bp, SARS Virus
acaatccgtaccaagacagtgtaaa

SEQ ID NO: 176725 - DNA, 25 bp, SARS Virus
caatccgtaccgagacagtgtaaaa

SEQ ID NO: 176726 - DNA, 25 bp, SARS Virus
aatccgtaccgaaacagtgtaaaac

SEQ ID NO: 176727 - DNA, 25 bp, SARS Virus
atccgtaccgagacagtgtaaaacc

SEQ ID NO: 176728 - DNA, 25 bp, SARS Virus
tccgtaccgagaaagtgtaaaacct

SEQ ID NO: 176729 - DNA, 25 bp, SARS Virus
ccgtaccgagacagtgtaaaaccta

SEQ ID NO: 176730 - DNA, 25 bp, SARS Virus
cgtaccgagacaatgtaaaacctat

SEQ ID NO: 176731 - DNA, 25 bp, SARS Virus
gtaccgagacagagtaaaacctatt

SEQ ID NO: 176732 - DNA, 25 bp, SARS Virus
taccgagacagtataaaacctatta

SEQ ID NO: 176733 - DNA, 25 bp, SARS Virus
accgagacagtgaaaaacctattag

SEQ ID NO: 176734 - DNA, 25 bp, SARS Virus
ccgagacagtgtaaaacctattagg

SEQ ID NO: 176735 - DNA, 25 bp, SARS Virus
cgagacagtgtaaaacctattaggg

SEQ ID NO: 176736 - DNA, 25 bp, SARS Virus
gagacagtgtaaaacctattagggt

SEQ ID NO: 176737 - DNA, 25 bp, SARS Virus
agacagtgtaaaacctattagggtt

SEQ ID NO: 176738 - DNA, 25 bp, SARS Virus
gacagtgtaaaaactattagggttg

SEQ ID NO: 176739 - DNA, 25 bp, SARS Virus
acagtgtaaaacatattagggttgg

SEQ ID NO: 176740 - DNA, 25 bp, SARS Virus
cagtgtaaaaccaattagggttggg

SEQ ID NO: 176741 - DNA, 25 bp, SARS Virus
agtgtaaaacctattagggttgggt

SEQ ID NO: 176742 - DNA, 25 bp, SARS Virus
gtgtaaaacctaatagggttgggta

SEQ ID NO: 176743 - DNA, 25 bp, SARS Virus
tgtaaaacctataagggttgggtat

SEQ ID NO: 176744 - DNA, 25 bp, SARS Virus
gtaaaacctattagggttgggtatt

SEQ ID NO: 176745 - DNA, 25 bp, SARS Virus
taaaacctattaaggttgggtattc

SEQ ID NO: 176746 - DNA, 25 bp, SARS Virus
aaaacctattagagttgggtattcc

SEQ ID NO: 176747 - DNA, 25 bp, SARS Virus
aaacctattaggattgggtattcca

SEQ ID NO: 176748 - DNA, 25 bp, SARS Virus
aacctattagggatgggtattccac

SEQ ID NO: 176749 - DNA, 25 bp, SARS Virus
acctattagggtagggtattccaca

SEQ ID NO: 176750 - DNA, 25 bp, SARS Virus
cctattagggttaggtattccacac

SEQ ID NO: 176751 - DNA, 25 bp, SARS Virus
ctattagggttgagtattccacacc

SEQ ID NO: 176752 - DNA, 25 bp, SARS Virus
tattagggttggatattccacacct

SEQ ID NO: 176753 - DNA, 25 bp, SARS Virus
attagggttgggaattccacacctc

SEQ ID NO: 176754 - DNA, 25 bp, SARS Virus
ttagggttgggtattccacacctca

SEQ ID NO: 176755 - DNA, 25 bp, SARS Virus
tagggttgggtaatccacacctcaa

SEQ ID NO: 176756 - DNA, 25 bp, SARS Virus
agggttgggtataccacacctcaaa

SEQ ID NO: 176757 - DNA, 25 bp, SARS Virus
gggttgggtattacacacctcaaag

SEQ ID NO: 176758 - DNA, 25 bp, SARS Virus
ggttgggtattcaacacctcaaaga

SEQ ID NO: 176759 - DNA, 25 bp, SARS Virus
gttgggtattccacacctcaaagat

SEQ ID NO: 176760 - DNA, 25 bp, SARS Virus
ttgggtattccaaacctcaaagatg

SEQ ID NO: 176761 - DNA, 25 bp, SARS Virus
tgggtattccacacctcaaagatgt

SEQ ID NO: 176762 - DNA, 25 bp, SARS Virus
gggtattccacaactcaaagatgta

SEQ ID NO: 176763 - DNA, 25 bp, SARS Virus
ggtattccacacatcaaagatgtag

SEQ ID NO: 176764 - DNA, 25 bp, SARS Virus
gtattccacaccacaaagatgtagt

SEQ ID NO: 176765 - DNA, 25 bp, SARS Virus
tattccacacctaaaagatgtagtg

SEQ ID NO: 176766 - DNA, 25 bp, SARS Virus
attccacacctcaaagatgtagtga

SEQ ID NO: 176767 - DNA, 25 bp, SARS Virus
ttccacacctcaaagatgtagtgac

SEQ ID NO: 176768 - DNA, 25 bp, SARS Virus
tccacacctcaaagatgtagtgaca

SEQ ID NO: 176769 - DNA, 25 bp, SARS Virus
ccacacctcaaaaatgtagtgacat

SEQ ID NO: 176770 - DNA, 25 bp, SARS Virus
cacacctcaaagatgtagtgacatt

SEQ ID NO: 176771 - DNA, 25 bp, SARS Virus
acacctcaaagaagtagtgacattt

SEQ ID NO: 176772 - DNA, 25 bp, SARS Virus
cacctcaaagatatagtgacatttg

SEQ ID NO: 176773 - DNA, 25 bp, SARS Virus
acctcaaagatgaagtgacatttgt

SEQ ID NO: 176774 - DNA, 25 bp, SARS Virus
cctcaaagatgtagtgacatttgtc

SEQ ID NO: 176775 - DNA, 25 bp, SARS Virus
ctcaaagatgtaatgacatttgtca

SEQ ID NO: 176776 - DNA, 25 bp, SARS Virus
tcaaagatgtagagacatttgtcaa

SEQ ID NO: 176777 - DNA, 25 bp, SARS Virus
caaagatgtagtaacatttgtcaaa

SEQ ID NO: 176778 - DNA, 25 bp, SARS Virus
aaagatgtagtgacatttgtcaaaa

SEQ ID NO: 176779 - DNA, 25 bp, SARS Virus
aagatgtagtgaaatttgtcaaaaa

SEQ ID NO: 176780 - DNA, 25 bp, SARS Virus
agatgtagtgacatttgtcaaaaat

SEQ ID NO: 176781 - DNA, 25 bp, SARS Virus
gatgtagtgacaattgtcaaaaatt

SEQ ID NO: 176782 - DNA, 25 bp, SARS Virus
atgtagtgacatatgtcaaaaattg

SEQ ID NO: 176783 - DNA, 25 bp, SARS Virus
tgtagtgacattagtcaaaaattgt

SEQ ID NO: 176784 - DNA, 25 bp, SARS Virus
gtagtgacatttatcaaaaattgta

SEQ ID NO: 176785 - DNA, 25 bp, SARS Virus
tagtgacatttgacaaaaattgtat

SEQ ID NO: 176786 - DNA, 25 bp, SARS Virus
agtgacatttgtaaaaaattgtata

SEQ ID NO: 176787 - DNA, 25 bp, SARS Virus
gtgacatttgtcaaaaattgtataa

SEQ ID NO: 176788 - DNA, 25 bp, SARS Virus
tgacatttgtcaaaaattgtataat

SEQ ID NO: 176789 - DNA, 25 bp, SARS Virus
gacatttgtcaaaaattgtataata

SEQ ID NO: 176790 - DNA, 25 bp, SARS Virus
acatttgtcaaaaattgtataatac

SEQ ID NO: 176791 - DNA, 25 bp, SARS Virus
catttgtcaaaaattgtataatacg

SEQ ID NO: 176792 - DNA, 25 bp, SARS Virus
atttgtcaaaaaatgtataatacgg

SEQ ID NO: 176793 - DNA, 25 bp, SARS Virus
tttgtcaaaaatagtataatacggt

SEQ ID NO: 176794 - DNA, 25 bp, SARS Virus
ttgtcaaaaattatataatacggtc

SEQ ID NO: 176795 - DNA, 25 bp, SARS Virus
tgtcaaaaattgaataatacggtcg

SEQ ID NO: 176796 - DNA, 25 bp, SARS Virus
gtcaaaaattgtataatacggtcgg

SEQ ID NO: 176797 - DNA, 25 bp, SARS Virus
tcaaaaattgtaaaatacggtcggt

SEQ ID NO: 176798 - DNA, 25 bp, SARS Virus
caaaaattgtataatacggtcggtg

SEQ ID NO: 176799 - DNA, 25 bp, SARS Virus
aaaaattgtataatacggtcggtgg

SEQ ID NO: 176800 - DNA, 25 bp, SARS Virus
aaaattgtataaaacggtcggtggc

SEQ ID NO: 176801 - DNA, 25 bp, SARS Virus
aaattgtataatacggtcggtggca

SEQ ID NO: 176802 - DNA, 25 bp, SARS Virus
aattgtataataaggtcggtggcat

SEQ ID NO: 176803 - DNA, 25 bp, SARS Virus
attgtataatacagtcggtggcatt

SEQ ID NO: 176804 - DNA, 25 bp, SARS Virus
ttgtataatacgatcggtggcattt

SEQ ID NO: 176805 - DNA, 25 bp, SARS Virus
tgtataatacggacggtggcatttt

SEQ ID NO: 176806 - DNA, 25 bp, SARS Virus
gtataatacggtaggtggcattttg

SEQ ID NO: 176807 - DNA, 25 bp, SARS Virus
tataatacggtcagtggcattttga

SEQ ID NO: 176808 - DNA, 25 bp, SARS Virus
ataatacggtcgatggcattttgaa

SEQ ID NO: 176809 - DNA, 25 bp, SARS Virus
taatacggtcggaggcattttgaac

SEQ ID NO: 176810 - DNA, 25 bp, SARS Virus
aatacggtcggtagcattttgaacg

SEQ ID NO: 176811 - DNA, 25 bp, SARS Virus
atacggtcggtgacattttgaacga

SEQ ID NO: 176812 - DNA, 25 bp, SARS Virus
tacggtcggtggaattttgaacgaa

SEQ ID NO: 176813 - DNA, 25 bp, SARS Virus
acggtcggtggcattttgaacgaac

SEQ ID NO: 176814 - DNA, 25 bp, SARS Virus
cggtcggtggcaatttgaacgaaca

SEQ ID NO: 176815 - DNA, 25 bp, SARS Virus
ggtcggtggcatattgaacgaacaa

SEQ ID NO: 176816 - DNA, 25 bp, SARS Virus
gtcggtggcattatgaacgaacaag

SEQ ID NO: 176817 - DNA, 25 bp, SARS Virus
tcggtggcatttagaacgaacaagg

SEQ ID NO: 176818 - DNA, 25 bp, SARS Virus
cggtggcattttaaacgaacaaggt

SEQ ID NO: 176819 - DNA, 25 bp, SARS Virus
ggtggcattttgaacgaacaaggtt

SEQ ID NO: 176820 - DNA, 25 bp, SARS Virus
gtggcattttgaacgaacaaggtta

SEQ ID NO: 176821 - DNA, 25 bp, SARS Virus
tggcattttgaaagaacaaggttaa

SEQ ID NO: 176822 - DNA, 25 bp, SARS Virus
ggcattttgaacaaacaaggttaat

SEQ ID NO: 176823 - DNA, 25 bp, SARS Virus
gcattttgaacgaacaaggttaatg

SEQ ID NO: 176824 - DNA, 25 bp, SARS Virus
cattttgaacgaacaaggttaatgg

SEQ ID NO: 176825 - DNA, 25 bp, SARS Virus
attttgaacgaaaaaggttaatggt

SEQ ID NO: 176826 - DNA, 25 bp, SARS Virus
ttttgaacgaacaaggttaatggtg

SEQ ID NO: 176827 - DNA, 25 bp, SARS Virus
tttgaacgaacaaggttaatggtgt

SEQ ID NO: 176828 - DNA, 25 bp, SARS Virus
ttgaacgaacaaagttaatggtgtc

SEQ ID NO: 176829 - DNA, 25 bp, SARS Virus
tgaacgaacaagattaatggtgtca

SEQ ID NO: 176830 - DNA, 25 bp, SARS Virus
gaacgaacaaggataatggtgtcat

SEQ ID NO: 176831 - DNA, 25 bp, SARS Virus
aacgaacaaggtaaatggtgtcatc

SEQ ID NO: 176832 - DNA, 25 bp, SARS Virus
acgaacaaggttaatggtgtcatcg

SEQ ID NO: 176833 - DNA, 25 bp, SARS Virus
cgaacaaggttaatggtgtcatcga

SEQ ID NO: 176834 - DNA, 25 bp, SARS Virus
gaacaaggttaaaggtgtcatcgag

SEQ ID NO: 176835 - DNA, 25 bp, SARS Virus
aacaaggttaatagtgtcatcgagg

SEQ ID NO: 176836 - DNA, 25 bp, SARS Virus
acaaggttaatgatgtcatcgagga

SEQ ID NO: 176837 - DNA, 25 bp, SARS Virus
caaggttaatggagtcatcgaggag

SEQ ID NO: 176838 - DNA, 25 bp, SARS Virus
aaggttaatggtatcatcgaggaga

SEQ ID NO: 176839 - DNA, 25 bp, SARS Virus
aggttaatggtgacatcgaggagat

SEQ ID NO: 176840 - DNA, 25 bp, SARS Virus
ggttaatggtgtaatcgaggagatc

SEQ ID NO: 176841 - DNA, 25 bp, SARS Virus
gttaatggtgtcatcgaggagatca

SEQ ID NO: 176842 - DNA, 25 bp, SARS Virus
ttaatggtgtcaacgaggagatcac

SEQ ID NO: 176843 - DNA, 25 bp, SARS Virus
taatggtgtcatagaggagatcacc

SEQ ID NO: 176844 - DNA, 25 bp, SARS Virus
aatggtgtcatcaaggagatcaccg

SEQ ID NO: 176845 - DNA, 25 bp, SARS Virus
atggtgtcatcgaggagatcaccgc

SEQ ID NO: 176846 - DNA, 25 bp, SARS Virus
tggtgtcatcgaagagatcaccgcc

SEQ ID NO: 176847 - DNA, 25 bp, SARS Virus
ggtgtcatcgagaagatcaccgccg

SEQ ID NO: 176848 - DNA, 25 bp, SARS Virus
gtgtcatcgaggagatcaccgccga

SEQ ID NO: 176849 - DNA, 25 bp, SARS Virus
tgtcatcgaggaaatcaccgccgat

SEQ ID NO: 176850 - DNA, 25 bp, SARS Virus
gtcatcgaggagatcaccgccgata

SEQ ID NO: 176851 - DNA, 25 bp, SARS Virus
tcatcgaggagaacaccgccgataa

SEQ ID NO: 176852 - DNA, 25 bp, SARS Virus
catcgaggagataaccgccgataac

SEQ ID NO: 176853 - DNA, 25 bp, SARS Virus
atcgaggagatcaccgccgataact

SEQ ID NO: 176854 - DNA, 25 bp, SARS Virus
tcgaggagatcaacgccgataactg

SEQ ID NO: 176855 - DNA, 25 bp, SARS Virus
cgaggagatcacagccgataactga

SEQ ID NO: 176856 - DNA, 25 bp, SARS Virus
gaggagatcaccaccgataactgaa

SEQ ID NO: 176857 - DNA, 25 bp, SARS Virus
aggagatcaccgacgataactgaag

SEQ ID NO: 176858 - DNA, 25 bp, SARS Virus
ggagatcaccgcagataactgaagt

SEQ ID NO: 176859 - DNA, 25 bp, SARS Virus
gagatcaccgccaataactgaagtt

SEQ ID NO: 176860 - DNA, 25 bp, SARS Virus
agatcaccgccgataactgaagtta

SEQ ID NO: 176861 - DNA, 25 bp, SARS Virus
gatcaccgccgaaaactgaagttat

SEQ ID NO: 176862 - DNA, 25 bp, SARS Virus
atcaccgccgataactgaagttatt

SEQ ID NO: 176863 - DNA, 25 bp, SARS Virus
tcaccgccgataactgaagttatta

SEQ ID NO: 176864 - DNA, 25 bp, SARS Virus
caccgccgataaatgaagttattaa

SEQ ID NO: 176865 - DNA, 25 bp, SARS Virus
accgccgataacagaagttattaaa

SEQ ID NO: 176866 - DNA, 25 bp, SARS Virus
ccgccgataactaaagttattaaag

SEQ ID NO: 176867 - DNA, 25 bp, SARS Virus
cgccgataactgaagttattaaaga

SEQ ID NO: 176868 - DNA, 25 bp, SARS Virus
gccgataactgaagttattaaagac

SEQ ID NO: 176869 - DNA, 25 bp, SARS Virus
ccgataactgaaattattaaagact

SEQ ID NO: 176870 - DNA, 25 bp, SARS Virus
cgataactgaagatattaaagacta

SEQ ID NO: 176871 - DNA, 25 bp, SARS Virus
gataactgaagtaattaaagactac

SEQ ID NO: 176872 - DNA, 25 bp, SARS Virus
ataactgaagttattaaagactact

SEQ ID NO: 176873 - DNA, 25 bp, SARS Virus
taactgaagttaataaagactactt

SEQ ID NO: 176874 - DNA, 25 bp, SARS Virus
aactgaagttataaaagactacttt

SEQ ID NO: 176875 - DNA, 25 bp, SARS Virus
actgaagttattaaagactactttg

SEQ ID NO: 176876 - DNA, 25 bp, SARS Virus
ctgaagttattaaagactactttga

SEQ ID NO: 176877 - DNA, 25 bp, SARS Virus
tgaagttattaaagactactttgac

SEQ ID NO: 176878 - DNA, 25 bp, SARS Virus
gaagttattaaaaactactttgaca

SEQ ID NO: 176879 - DNA, 25 bp, SARS Virus
aagttattaaagactactttgacag

SEQ ID NO: 176880 - DNA, 25 bp, SARS Virus
agttattaaagaatactttgacaga

SEQ ID NO: 176881 - DNA, 25 bp, SARS Virus
gttattaaagacaactttgacagat

SEQ ID NO: 176882 - DNA, 25 bp, SARS Virus
ttattaaagactactttgacagata

SEQ ID NO: 176883 - DNA, 25 bp, SARS Virus
tattaaagactaatttgacagataa

SEQ ID NO: 176884 - DNA, 25 bp, SARS Virus
attaaagactacattgacagataaa

SEQ ID NO: 176885 - DNA, 25 bp, SARS Virus
ttaaagactactatgacagataaac

SEQ ID NO: 176886 - DNA, 25 bp, SARS Virus
taaagactacttagacagataaaca

SEQ ID NO: 176887 - DNA, 25 bp, SARS Virus
aaagactactttaacagataaacag

SEQ ID NO: 176888 - DNA, 25 bp, SARS Virus
aagactactttgacagataaacagt

SEQ ID NO: 176889 - DNA, 25 bp, SARS Virus
agactactttgaaagataaacagta

SEQ ID NO: 176890 - DNA, 25 bp, SARS Virus
gactactttgacagataaacagtat

SEQ ID NO: 176891 - DNA, 25 bp, SARS Virus
actactttgacaaataaacagtatc

SEQ ID NO: 176892 - DNA, 25 bp, SARS Virus
ctactttgacagataaacagtatca

SEQ ID NO: 176893 - DNA, 25 bp, SARS Virus
tactttgacagaaaaacagtatcat

SEQ ID NO: 176894 - DNA, 25 bp, SARS Virus
actttgacagataaacagtatcatg

SEQ ID NO: 176895 - DNA, 25 bp, SARS Virus
ctttgacagataaacagtatcatga

SEQ ID NO: 176896 - DNA, 25 bp, SARS Virus
tttgacagataaacagtatcatgat

SEQ ID NO: 176897 - DNA, 25 bp, SARS Virus
ttgacagataaaaagtatcatgatg

SEQ ID NO: 176898 - DNA, 25 bp, SARS Virus
tgacagataaacagtatcatgatgt

SEQ ID NO: 176899 - DNA, 25 bp, SARS Virus
gacagataaacaatatcatgatgtc

SEQ ID NO: 176900 - DNA, 25 bp, SARS Virus
acagataaacagaatcatgatgtct

SEQ ID NO: 176901 - DNA, 25 bp, SARS Virus
cagataaacagtatcatgatgtcta

SEQ ID NO: 176902 - DNA, 25 bp, SARS Virus
agataaacagtaacatgatgtctat

SEQ ID NO: 176903 - DNA, 25 bp, SARS Virus
gataaacagtataatgatgtctatc

SEQ ID NO: 176904 - DNA, 25 bp, SARS Virus
ataaacagtatcatgatgtctatct

SEQ ID NO: 176905 - DNA, 25 bp, SARS Virus
taaacagtatcaagatgtctatctc

SEQ ID NO: 176906 - DNA, 25 bp, SARS Virus
aaacagtatcataatgtctatctct

SEQ ID NO: 176907 - DNA, 25 bp, SARS Virus
aacagtatcatgatgtctatctctg

SEQ ID NO: 176908 - DNA, 25 bp, SARS Virus
acagtatcatgaagtctatctctgt

SEQ ID NO: 176909 - DNA, 25 bp, SARS Virus
cagtatcatgatatctatctctgtg

SEQ ID NO: 176910 - DNA, 25 bp, SARS Virus
agtatcatgatgactatctctgtgg

SEQ ID NO: 176911 - DNA, 25 bp, SARS Virus
gtatcatgatgtatatctctgtggt

SEQ ID NO: 176912 - DNA, 25 bp, SARS Virus
tatcatgatgtcaatctctgtggtc

SEQ ID NO: 176913 - DNA, 25 bp, SARS Virus
atcatgatgtctatctctgtggtcg

SEQ ID NO: 176914 - DNA, 25 bp, SARS Virus
tcatgatgtctaactctgtggtcga

SEQ ID NO: 176915 - DNA, 25 bp, SARS Virus
catgatgtctatatctgtggtcgat

SEQ ID NO: 176916 - DNA, 25 bp, SARS Virus
atgatgtctatcactgtggtcgatg

SEQ ID NO: 176917 - DNA, 25 bp, SARS Virus
tgatgtctatctatgtggtcgatgc

SEQ ID NO: 176918 - DNA, 25 bp, SARS Virus
gatgtctatctcagtggtcgatgcc

SEQ ID NO: 176919 - DNA, 25 bp, SARS Virus
atgtctatctctatggtcgatgcca

SEQ ID NO: 176920 - DNA, 25 bp, SARS Virus
tgtctatctctgaggtcgatgccac

SEQ ID NO: 176921 - DNA, 25 bp, SARS Virus
gtctatctctgtagtcgatgccacg

SEQ ID NO: 176922 - DNA, 25 bp, SARS Virus
tctatctctgtgatcgatgccacgc

SEQ ID NO: 176923 - DNA, 25 bp, SARS Virus
ctatctctgtggacgatgccacgct

SEQ ID NO: 176924 - DNA, 25 bp, SARS Virus
tatctctgtggtagatgccacgctc

SEQ ID NO: 176925 - DNA, 25 bp, SARS Virus
atctctgtggtcaatgccacgctcg

SEQ ID NO: 176926 - DNA, 25 bp, SARS Virus
tctctgtggtcgatgccacgctcga

SEQ ID NO: 176927 - DNA, 25 bp, SARS Virus
ctctgtggtcgaagccacgctcgag

SEQ ID NO: 176928 - DNA, 25 bp, SARS Virus
tctgtggtcgataccacgctcgaga

SEQ ID NO: 176929 - DNA, 25 bp, SARS Virus
ctgtggtcgatgacacgctcgagat

SEQ ID NO: 176930 - DNA, 25 bp, SARS Virus
tgtggtcgatgcaacgctcgagata

SEQ ID NO: 176931 - DNA, 25 bp, SARS Virus
gtggtcgatgccacgctcgagataa

SEQ ID NO: 176932 - DNA, 25 bp, SARS Virus
tggtcgatgccaagctcgagataag

SEQ ID NO: 176933 - DNA, 25 bp, SARS Virus
ggtcgatgccacactcgagataaga

SEQ ID NO: 176934 - DNA, 25 bp, SARS Virus
gtcgatgccacgatcgagataagaa

SEQ ID NO: 176935 - DNA, 25 bp, SARS Virus
tcgatgccacgcacgagataagaaa

SEQ ID NO: 176936 - DNA, 25 bp, SARS Virus
cgatgccacgctagagataagaaac

SEQ ID NO: 176937 - DNA, 25 bp, SARS Virus
gatgccacgctcaagataagaaacg

SEQ ID NO: 176938 - DNA, 25 bp, SARS Virus
atgccacgctcgagataagaaacgt

SEQ ID NO: 176939 - DNA, 25 bp, SARS Virus
tgccacgctcgaaataagaaacgtg

SEQ ID NO: 176940 - DNA, 25 bp, SARS Virus
gccacgctcgagataagaaacgtga

SEQ ID NO: 176941 - DNA, 25 bp, SARS Virus
ccacgctcgagaaaagaaacgtgat

SEQ ID NO: 176942 - DNA, 25 bp, SARS Virus
cacgctcgagataagaaacgtgatt

SEQ ID NO: 176943 - DNA, 25 bp, SARS Virus
acgctcgagataagaaacgtgatta

SEQ ID NO: 176944 - DNA, 25 bp, SARS Virus
cgctcgagataaaaaacgtgattac

SEQ ID NO: 176945 - DNA, 25 bp, SARS Virus
gctcgagataagaaacgtgattacc

SEQ ID NO: 176946 - DNA, 25 bp, SARS Virus
ctcgagataagaaacgtgattaccg

SEQ ID NO: 176947 - DNA, 25 bp, SARS Virus
tcgagataagaaacgtgattaccgt

SEQ ID NO: 176948 - DNA, 25 bp, SARS Virus
cgagataagaaaagtgattaccgta

SEQ ID NO: 176949 - DNA, 25 bp, SARS Virus
gagataagaaacatgattaccgtat

SEQ ID NO: 176950 - DNA, 25 bp, SARS Virus
agataagaaacgagattaccgtatg

SEQ ID NO: 176951 - DNA, 25 bp, SARS Virus
gataagaaacgtaattaccgtatga

SEQ ID NO: 176952 - DNA, 25 bp, SARS Virus
ataagaaacgtgattaccgtatgaa

SEQ ID NO: 176953 - DNA, 25 bp, SARS Virus
taagaaacgtgaataccgtatgaat

SEQ ID NO: 176954 - DNA, 25 bp, SARS Virus
aagaaacgtgataaccgtatgaatt

SEQ ID NO: 176955 - DNA, 25 bp, SARS Virus
agaaacgtgattaccgtatgaattc

SEQ ID NO: 176956 - DNA, 25 bp, SARS Virus
gaaacgtgattaacgtatgaattct

SEQ ID NO: 176957 - DNA, 25 bp, SARS Virus
aaacgtgattacagtatgaattcta

SEQ ID NO: 176958 - DNA, 25 bp, SARS Virus
aacgtgattaccatatgaattctaa

SEQ ID NO: 176959 - DNA, 25 bp, SARS Virus
acgtgattaccgaatgaattctaag

SEQ ID NO: 176960 - DNA, 25 bp, SARS Virus
cgtgattaccgtatgaattctaagt

SEQ ID NO: 176961 - DNA, 25 bp, SARS Virus
gtgattaccgtaagaattctaagta

SEQ ID NO: 176962 - DNA, 25 bp, SARS Virus
tgattaccgtataaattctaagtaa

SEQ ID NO: 176963 - DNA, 25 bp, SARS Virus
gattaccgtatgaattctaagtaaa

SEQ ID NO: 176964 - DNA, 25 bp, SARS Virus
attaccgtatgaattctaagtaaac

SEQ ID NO: 176965 - DNA, 25 bp, SARS Virus
ttaccgtatgaaatctaagtaaact

SEQ ID NO: 176966 - DNA, 25 bp, SARS Virus
taccgtatgaatactaagtaaactc

SEQ ID NO: 176967 - DNA, 25 bp, SARS Virus
accgtatgaattataagtaaactca

SEQ ID NO: 176968 - DNA, 25 bp, SARS Virus
ccgtatgaattcaaagtaaactcaa

SEQ ID NO: 176969 - DNA, 25 bp, SARS Virus
cgtatgaattctaagtaaactcaat

SEQ ID NO: 176970 - DNA, 25 bp, SARS Virus
gtatgaattctaagtaaactcaata

SEQ ID NO: 176971 - DNA, 25 bp, SARS Virus
tatgaattctaaataaactcaatat

SEQ ID NO: 176972 - DNA, 25 bp, SARS Virus
atgaattctaagaaaactcaatatc

SEQ ID NO: 176973 - DNA, 25 bp, SARS Virus
tgaattctaagtaaactcaatatca

SEQ ID NO: 176974 - DNA, 25 bp, SARS Virus
gaattctaagtaaactcaatatcat

SEQ ID NO: 176975 - DNA, 25 bp, SARS Virus
aattctaagtaaactcaatatcatc

SEQ ID NO: 176976 - DNA, 25 bp, SARS Virus
attctaagtaaaatcaatatcatcc

SEQ ID NO: 176977 - DNA, 25 bp, SARS Virus
ttctaagtaaacacaatatcatccc

SEQ ID NO: 176978 - DNA, 25 bp, SARS Virus
tctaagtaaactaaatatcatccct

SEQ ID NO: 176979 - DNA, 25 bp, SARS Virus
ctaagtaaactcaatatcatcccta

SEQ ID NO: 176980 - DNA, 25 bp, SARS Virus
taagtaaactcaatatcatccctac

SEQ ID NO: 176981 - DNA, 25 bp, SARS Virus
aagtaaactcaaaatcatccctact

SEQ ID NO: 176982 - DNA, 25 bp, SARS Virus
agtaaactcaatatcatccctactg

SEQ ID NO: 176983 - DNA, 25 bp, SARS Virus
gtaaactcaataacatccctactgt

SEQ ID NO: 176984 - DNA, 25 bp, SARS Virus
taaactcaatataatccctactgta

SEQ ID NO: 176985 - DNA, 25 bp, SARS Virus
aaactcaatatcatccctactgtaa

SEQ ID NO: 176986 - DNA, 25 bp, SARS Virus
aactcaatatcaaccctactgtaat

SEQ ID NO: 176987 - DNA, 25 bp, SARS Virus
actcaatatcatacctactgtaatg

SEQ ID NO: 176988 - DNA, 25 bp, SARS Virus
ctcaatatcatcactactgtaatgc

SEQ ID NO: 176989 - DNA, 25 bp, SARS Virus
tcaatatcatccatactgtaatgcg

SEQ ID NO: 176990 - DNA, 25 bp, SARS Virus
caatatcatcccaactgtaatgcga

SEQ ID NO: 176991 - DNA, 25 bp, SARS Virus
aatatcatccctactgtaatgcgaa

SEQ ID NO: 176992 - DNA, 25 bp, SARS Virus
atatcatccctaatgtaatgcgaat

SEQ ID NO: 176993 - DNA, 25 bp, SARS Virus
tatcatccctacagtaatgcgaatc

SEQ ID NO: 176994 - DNA, 25 bp, SARS Virus
atcatccctactataatgcgaatca

SEQ ID NO: 176995 - DNA, 25 bp, SARS Virus
tcatccctactgaaatgcgaatcat

SEQ ID NO: 176996 - DNA, 25 bp, SARS Virus
catccctactgtaatgcgaatcata

SEQ ID NO: 176997 - DNA, 25 bp, SARS Virus
atccctactgtaatgcgaatcatat

SEQ ID NO: 176998 - DNA, 25 bp, SARS Virus
tccctactgtaaagcgaatcatatg

SEQ ID NO: 176999 - DNA, 25 bp, SARS Virus
ccctactgtaatacgaatcatatgc

SEQ ID NO: 177000 - DNA, 25 bp, SARS Virus
cctactgtaatgagaatcatatgcg

SEQ ID NO: 177001 - DNA, 25 bp, SARS Virus
ctactgtaatgcaaatcatatgcgc

SEQ ID NO: 177002 - DNA, 25 bp, SARS Virus
tactgtaatgcgaatcatatgcgct

SEQ ID NO: 177003 - DNA, 25 bp, SARS Virus
actgtaatgcgaatcatatgcgctt

SEQ ID NO: 177004 - DNA, 25 bp, SARS Virus
ctgtaatgcgaaacatatgcgcttt

SEQ ID NO: 177005 - DNA, 25 bp, SARS Virus
tgtaatgcgaataatatgcgctttt

SEQ ID NO: 177006 - DNA, 25 bp, SARS Virus
gtaatgcgaatcatatgcgcttttc

SEQ ID NO: 177007 - DNA, 25 bp, SARS Virus
taatgcgaatcaaatgcgcttttca

SEQ ID NO: 177008 - DNA, 25 bp, SARS Virus
aatgcgaatcatatgcgcttttcac

SEQ ID NO: 177009 - DNA, 25 bp, SARS Virus
atgcgaatcataagcgcttttcacg

SEQ ID NO: 177010 - DNA, 25 bp, SARS Virus
tgcgaatcatatacgcttttcacgt

SEQ ID NO: 177011 - DNA, 25 bp, SARS Virus
gcgaatcatatgagcttttcacgta

SEQ ID NO: 177012 - DNA, 25 bp, SARS Virus
cgaatcatatgcacttttcacgtag

SEQ ID NO: 177013 - DNA, 25 bp, SARS Virus
gaatcatatgcgattttcacgtaga

SEQ ID NO: 177014 - DNA, 25 bp, SARS Virus
aatcatatgcgcatttcacgtagaa

SEQ ID NO: 177015 - DNA, 25 bp, SARS Virus
atcatatgcgctattcacgtagaac

SEQ ID NO: 177016 - DNA, 25 bp, SARS Virus
tcatatgcgcttatcacgtagaact

SEQ ID NO: 177017 - DNA, 25 bp, SARS Virus
catatgcgctttacacgtagaacta

SEQ ID NO: 177018 - DNA, 25 bp, SARS Virus
atatgcgcttttaacgtagaactag

SEQ ID NO: 177019 - DNA, 25 bp, SARS Virus
tatgcgcttttcacgtagaactagg

SEQ ID NO: 177020 - DNA, 25 bp, SARS Virus
atgcgcttttcaagtagaactagga

SEQ ID NO: 177021 - DNA, 25 bp, SARS Virus
tgcgcttttcacatagaactaggag

SEQ ID NO: 177022 - DNA, 25 bp, SARS Virus
gcgcttttcacgaagaactaggagt

SEQ ID NO: 177023 - DNA, 25 bp, SARS Virus
cgcttttcacgtagaactaggagta

SEQ ID NO: 177024 - DNA, 25 bp, SARS Virus
gcttttcacgtaaaactaggagtat

SEQ ID NO: 177025 - DNA, 25 bp, SARS Virus
cttttcacgtagaactaggagtatt

SEQ ID NO: 177026 - DNA, 25 bp, SARS Virus
ttttcacgtagaactaggagtattg

SEQ ID NO: 177027 - DNA, 25 bp, SARS Virus
tttcacgtagaaataggagtattga

SEQ ID NO: 177028 - DNA, 25 bp, SARS Virus
ttcacgtagaacaaggagtattgag

SEQ ID NO: 177029 - DNA, 25 bp, SARS Virus
tcacgtagaactaggagtattgagt

SEQ ID NO: 177030 - DNA, 25 bp, SARS Virus
cacgtagaactaagagtattgagta

SEQ ID NO: 177031 - DNA, 25 bp, SARS Virus
acgtagaactagaagtattgagtaa

SEQ ID NO: 177032 - DNA, 25 bp, SARS Virus
cgtagaactaggagtattgagtaac

SEQ ID NO: 177033 - DNA, 25 bp, SARS Virus
gtagaactaggaatattgagtaact

SEQ ID NO: 177034 - DNA, 25 bp, SARS Virus
tagaactaggagaattgagtaactc

SEQ ID NO: 177035 - DNA, 25 bp, SARS Virus
agaactaggagtattgagtaactca

SEQ ID NO: 177036 - DNA, 25 bp, SARS Virus
gaactaggagtaatgagtaactcag

SEQ ID NO: 177037 - DNA, 25 bp, SARS Virus
aactaggagtatagagtaactcagt

SEQ ID NO: 177038 - DNA, 25 bp, SARS Virus
actaggagtattaagtaactcagta

SEQ ID NO: 177039 - DNA, 25 bp, SARS Virus
ctaggagtattgagtaactcagtat

SEQ ID NO: 177040 - DNA, 25 bp, SARS Virus
taggagtattgaataactcagtatt

SEQ ID NO: 177041 - DNA, 25 bp, SARS Virus
aggagtattgagaaactcagtatta

SEQ ID NO: 177042 - DNA, 25 bp, SARS Virus
ggagtattgagtaactcagtattat

SEQ ID NO: 177043 - DNA, 25 bp, SARS Virus
gagtattgagtaactcagtattatt

SEQ ID NO: 177044 - DNA, 25 bp, SARS Virus
agtattgagtaaatcagtattattt

SEQ ID NO: 177045 - DNA, 25 bp, SARS Virus
gtattgagtaacacagtattatttc

SEQ ID NO: 177046 - DNA, 25 bp, SARS Virus
tattgagtaactaagtattatttca

SEQ ID NO: 177047 - DNA, 25 bp, SARS Virus
attgagtaactcagtattatttcag

SEQ ID NO: 177048 - DNA, 25 bp, SARS Virus
ttgagtaactcaatattatttcaga

SEQ ID NO: 177049 - DNA, 25 bp, SARS Virus
tgagtaactcagaattatttcagat

SEQ ID NO: 177050 - DNA, 25 bp, SARS Virus
gagtaactcagtattatttcagatc

SEQ ID NO: 177051 - DNA, 25 bp, SARS Virus
agtaactcagtaatatttcagatcg

SEQ ID NO: 177052 - DNA, 25 bp, SARS Virus
gtaactcagtataatttcagatcgg

SEQ ID NO: 177053 - DNA, 25 bp, SARS Virus
taactcagtattatttcagatcgga

SEQ ID NO: 177054 - DNA, 25 bp, SARS Virus
aactcagtattaattcagatcggaa

SEQ ID NO: 177055 - DNA, 25 bp, SARS Virus
actcagtattatatcagatcggaat

SEQ ID NO: 177056 - DNA, 25 bp, SARS Virus
ctcagtattattacagatcggaatg

SEQ ID NO: 177057 - DNA, 25 bp, SARS Virus
tcagtattatttaagatcggaatgg

SEQ ID NO: 177058 - DNA, 25 bp, SARS Virus
cagtattatttcagatcggaatggg

SEQ ID NO: 177059 - DNA, 25 bp, SARS Virus
agtattatttcaaatcggaatgggg

SEQ ID NO: 177060 - DNA, 25 bp, SARS Virus
gtattatttcagatcggaatggggt

SEQ ID NO: 177061 - DNA, 25 bp, SARS Virus
tattatttcagaacggaatggggta

SEQ ID NO: 177062 - DNA, 25 bp, SARS Virus
attatttcagataggaatggggtaa

SEQ ID NO: 177063 - DNA, 25 bp, SARS Virus
ttatttcagatcagaatggggtaaa

SEQ ID NO: 177064 - DNA, 25 bp, SARS Virus
tatttcagatcgaaatggggtaaat

SEQ ID NO: 177065 - DNA, 25 bp, SARS Virus
atttcagatcggaatggggtaaata

SEQ ID NO: 177066 - DNA, 25 bp, SARS Virus
tttcagatcggaatggggtaaataa

SEQ ID NO: 177067 - DNA, 25 bp, SARS Virus
ttcagatcggaaaggggtaaataat

SEQ ID NO: 177068 - DNA, 25 bp, SARS Virus
tcagatcggaatagggtaaataatt

SEQ ID NO: 177069 - DNA, 25 bp, SARS Virus
cagatcggaatgaggtaaataattt

SEQ ID NO: 177070 - DNA, 25 bp, SARS Virus
agatcggaatggagtaaataattta

SEQ ID NO: 177071 - DNA, 25 bp, SARS Virus
gatcggaatgggataaataatttac

SEQ ID NO: 177072 - DNA, 25 bp, SARS Virus
atcggaatggggaaaataatttacc

SEQ ID NO: 177073 - DNA, 25 bp, SARS Virus
tcggaatggggtaaataatttaccc

SEQ ID NO: 177074 - DNA, 25 bp, SARS Virus
cggaatggggtaaataatttaccct

SEQ ID NO: 177075 - DNA, 25 bp, SARS Virus
ggaatggggtaaataatttaccctt

SEQ ID NO: 177076 - DNA, 25 bp, SARS Virus
gaatggggtaaaaaatttacccttt

SEQ ID NO: 177077 - DNA, 25 bp, SARS Virus
aatggggtaaataatttaccctttg

SEQ ID NO: 177078 - DNA, 25 bp, SARS Virus
atggggtaaataatttaccctttgg

SEQ ID NO: 177079 - DNA, 25 bp, SARS Virus
tggggtaaataaattaccctttggt

SEQ ID NO: 177080 - DNA, 25 bp, SARS Virus
ggggtaaataatataccctttggtc

SEQ ID NO: 177081 - DNA, 25 bp, SARS Virus
gggtaaataattaaccctttggtcg

SEQ ID NO: 177082 - DNA, 25 bp, SARS Virus
ggtaaataatttaccctttggtcga

SEQ ID NO: 177083 - DNA, 25 bp, SARS Virus
gtaaataatttaacctttggtcgac

SEQ ID NO: 177084 - DNA, 25 bp, SARS Virus
taaataatttacactttggtcgact

SEQ ID NO: 177085 - DNA, 25 bp, SARS Virus
aaataatttaccatttggtcgacta

SEQ ID NO: 177086 - DNA, 25 bp, SARS Virus
aataatttacccattggtcgactaa

SEQ ID NO: 177087 - DNA, 25 bp, SARS Virus
ataatttaccctatggtcgactaaa

SEQ ID NO: 177088 - DNA, 25 bp, SARS Virus
taatttacccttaggtcgactaaat

SEQ ID NO: 177089 - DNA, 25 bp, SARS Virus
aatttaccctttagtcgactaaata

SEQ ID NO: 177090 - DNA, 25 bp, SARS Virus
atttaccctttgatcgactaaatag

SEQ ID NO: 177091 - DNA, 25 bp, SARS Virus
tttaccctttggacgactaaatagg

SEQ ID NO: 177092 - DNA, 25 bp, SARS Virus
ttaccctttggtagactaaataggt

SEQ ID NO: 177093 - DNA, 25 bp, SARS Virus
taccctttggtcaactaaataggtc

SEQ ID NO: 177094 - DNA, 25 bp, SARS Virus
accctttggtcgactaaataggtct

SEQ ID NO: 177095 - DNA, 25 bp, SARS Virus
ccctttggtcgaataaataggtcta

SEQ ID NO: 177096 - DNA, 25 bp, SARS Virus
cctttggtcgacaaaataggtctaa

SEQ ID NO: 177097 - DNA, 25 bp, SARS Virus
ctttggtcgactaaataggtctaac

SEQ ID NO: 177098 - DNA, 25 bp, SARS Virus
tttggtcgactaaataggtctaaca

SEQ ID NO: 177099 - DNA, 25 bp, SARS Virus
ttggtcgactaaataggtctaacaa

SEQ ID NO: 177100 - DNA, 25 bp, SARS Virus
tggtcgactaaaaaggtctaacaat

SEQ ID NO: 177101 - DNA, 25 bp, SARS Virus
ggtcgactaaataggtctaacaatt

SEQ ID NO: 177102 - DNA, 25 bp, SARS Virus
gtcgactaaataagtctaacaattg

SEQ ID NO: 177103 - DNA, 25 bp, SARS Virus
tcgactaaatagatctaacaattgc

SEQ ID NO: 177104 - DNA, 25 bp, SARS Virus
cgactaaataggactaacaattgct

SEQ ID NO: 177105 - DNA, 25 bp, SARS Virus
gactaaataggtataacaattgcta

SEQ ID NO: 177106 - DNA, 25 bp, SARS Virus
actaaataggtcaaacaattgctaa

SEQ ID NO: 177107 - DNA, 25 bp, SARS Virus
ctaaataggtctaacaattgctaat

SEQ ID NO: 177108 - DNA, 25 bp, SARS Virus
taaataggtctaacaattgctaatg

SEQ ID NO: 177109 - DNA, 25 bp, SARS Virus
aaataggtctaaaaattgctaatga

SEQ ID NO: 177110 - DNA, 25 bp, SARS Virus
aataggtctaacaattgctaatgaa

SEQ ID NO: 177111 - DNA, 25 bp, SARS Virus
ataggtctaacaattgctaatgaac

SEQ ID NO: 177112 - DNA, 25 bp, SARS Virus
taggtctaacaaatgctaatgaacc

SEQ ID NO: 177113 - DNA, 25 bp, SARS Virus
aggtctaacaatagctaatgaacca

SEQ ID NO: 177114 - DNA, 25 bp, SARS Virus
ggtctaacaattactaatgaaccaa

SEQ ID NO: 177115 - DNA, 25 bp, SARS Virus
gtctaacaattgataatgaaccaac

SEQ ID NO: 177116 - DNA, 25 bp, SARS Virus
tctaacaattgcaaatgaaccaacc

SEQ ID NO: 177117 - DNA, 25 bp, SARS Virus
ctaacaattgctaatgaaccaaccg

SEQ ID NO: 177118 - DNA, 25 bp, SARS Virus
taacaattgctaatgaaccaaccgt

SEQ ID NO: 177119 - DNA, 25 bp, SARS Virus
aacaattgctaaagaaccaaccgta

SEQ ID NO: 177120 - DNA, 25 bp, SARS Virus
acaattgctaataaaccaaccgtaa

SEQ ID NO: 177121 - DNA, 25 bp, SARS Virus
caattgctaatgaaccaaccgtaat

SEQ ID NO: 177122 - DNA, 25 bp, SARS Virus
aattgctaatgaaccaaccgtaatt

SEQ ID NO: 177123 - DNA, 25 bp, SARS Virus
attgctaatgaaacaaccgtaatta

SEQ ID NO: 177124 - DNA, 25 bp, SARS Virus
ttgctaatgaacaaaccgtaattat

SEQ ID NO: 177125 - DNA, 25 bp, SARS Virus
tgctaatgaaccaaccgtaattatg

SEQ ID NO: 177126 - DNA, 25 bp, SARS Virus
gctaatgaaccaaccgtaattatgt

SEQ ID NO: 177127 - DNA, 25 bp, SARS Virus
ctaatgaaccaaacgtaattatgtc

SEQ ID NO: 177128 - DNA, 25 bp, SARS Virus
taatgaaccaacagtaattatgtcg

SEQ ID NO: 177129 - DNA, 25 bp, SARS Virus
aatgaaccaaccataattatgtcgg

SEQ ID NO: 177130 - DNA, 25 bp, SARS Virus
atgaaccaaccgaaattatgtcggt

SEQ ID NO: 177131 - DNA, 25 bp, SARS Virus
tgaaccaaccgtaattatgtcggtg

SEQ ID NO: 177132 - DNA, 25 bp, SARS Virus
gaaccaaccgtaattatgtcggtgg

SEQ ID NO: 177133 - DNA, 25 bp, SARS Virus
aaccaaccgtaaatatgtcggtggt

SEQ ID NO: 177134 - DNA, 25 bp, SARS Virus
accaaccgtaataatgtcggtggta

SEQ ID NO: 177135 - DNA, 25 bp, SARS Virus
ccaaccgtaattatgtcggtggtag

SEQ ID NO: 177136 - DNA, 25 bp, SARS Virus
caaccgtaattaagtcggtggtagc

SEQ ID NO: 177137 - DNA, 25 bp, SARS Virus
aaccgtaattatatcggtggtagca

SEQ ID NO: 177138 - DNA, 25 bp, SARS Virus
accgtaattatgacggtggtagcat

SEQ ID NO: 177139 - DNA, 25 bp, SARS Virus
ccgtaattatgtaggtggtagcatt

SEQ ID NO: 177140 - DNA, 25 bp, SARS Virus
cgtaattatgtcagtggtagcattg

SEQ ID NO: 177141 - DNA, 25 bp, SARS Virus
gtaattatgtcgatggtagcattgt

SEQ ID NO: 177142 - DNA, 25 bp, SARS Virus
taattatgtcggaggtagcattgtt

SEQ ID NO: 177143 - DNA, 25 bp, SARS Virus
aattatgtcggtagtagcattgtta

SEQ ID NO: 177144 - DNA, 25 bp, SARS Virus
attatgtcggtgatagcattgttag

SEQ ID NO: 177145 - DNA, 25 bp, SARS Virus
ttatgtcggtggaagcattgttagt

SEQ ID NO: 177146 - DNA, 25 bp, SARS Virus
tatgtcggtggtagcattgttagtt

SEQ ID NO: 177147 - DNA, 25 bp, SARS Virus
atgtcggtggtaacattgttagttt

SEQ ID NO: 177148 - DNA, 25 bp, SARS Virus
tgtcggtggtagaattgttagtttc

SEQ ID NO: 177149 - DNA, 25 bp, SARS Virus
gtcggtggtagcattgttagtttca

SEQ ID NO: 177150 - DNA, 25 bp, SARS Virus
tcggtggtagcaatgttagtttcat

SEQ ID NO: 177151 - DNA, 25 bp, SARS Virus
cggtggtagcatagttagtttcata

SEQ ID NO: 177152 - DNA, 25 bp, SARS Virus
ggtggtagcattattagtttcataa

SEQ ID NO: 177153 - DNA, 25 bp, SARS Virus
gtggtagcattgatagtttcataaa

SEQ ID NO: 177154 - DNA, 25 bp, SARS Virus
tggtagcattgtaagtttcataaat

SEQ ID NO: 177155 - DNA, 25 bp, SARS Virus
ggtagcattgttagtttcataaata

SEQ ID NO: 177156 - DNA, 25 bp, SARS Virus
gtagcattgttaatttcataaatag

SEQ ID NO: 177157 - DNA, 25 bp, SARS Virus
tagcattgttagattcataaatagt

SEQ ID NO: 177158 - DNA, 25 bp, SARS Virus
agcattgttagtatcataaatagtt

SEQ ID NO: 177159 - DNA, 25 bp, SARS Virus
gcattgttagttacataaatagttg

SEQ ID NO: 177160 - DNA, 25 bp, SARS Virus
cattgttagtttaataaatagttgt

SEQ ID NO: 177161 - DNA, 25 bp, SARS Virus
attgttagtttcataaatagttgtt

SEQ ID NO: 177162 - DNA, 25 bp, SARS Virus
ttgttagtttcaaaaatagttgttg

SEQ ID NO: 177163 - DNA, 25 bp, SARS Virus
tgttagtttcataaatagttgttga

SEQ ID NO: 177164 - DNA, 25 bp, SARS Virus
gttagtttcataaatagttgttgaa

SEQ ID NO: 177165 - DNA, 25 bp, SARS Virus
ttagtttcataaatagttgttgaag

SEQ ID NO: 177166 - DNA, 25 bp, SARS Virus
tagtttcataaaaagttgttgaagt

SEQ ID NO: 177167 - DNA, 25 bp, SARS Virus
agtttcataaatagttgttgaagtt

SEQ ID NO: 177168 - DNA, 25 bp, SARS Virus
gtttcataaataattgttgaagttg

SEQ ID NO: 177169 - DNA, 25 bp, SARS Virus
tttcataaatagatgttgaagttga

SEQ ID NO: 177170 - DNA, 25 bp, SARS Virus
ttcataaatagtagttgaagttgat

SEQ ID NO: 177171 - DNA, 25 bp, SARS Virus
tcataaatagttattgaagttgatg

SEQ ID NO: 177172 - DNA, 25 bp, SARS Virus
cataaatagttgatgaagttgatgc

SEQ ID NO: 177173 - DNA, 25 bp, SARS Virus
ataaatagttgtagaagttgatgct

SEQ ID NO: 177174 - DNA, 25 bp, SARS Virus
taaatagttgttaaagttgatgctt

SEQ ID NO: 177175 - DNA, 25 bp, SARS Virus
aaatagttgttgaagttgatgctta

SEQ ID NO: 177176 - DNA, 25 bp, SARS Virus
aatagttgttgaagttgatgcttat

SEQ ID NO: 177177 - DNA, 25 bp, SARS Virus
cgctcgttcttgctctctccggtaa

SEQ ID NO: 177178 - DNA, 25 bp, SARS Virus
gctcgttcttgtcctctccggtaat

SEQ ID NO: 177179 - DNA, 25 bp, SARS Virus
ctcgttcttgttctctccggtaata

SEQ ID NO: 177180 - DNA, 25 bp, SARS Virus
tcgttcttgttccctccggtaatag

SEQ ID NO: 177181 - DNA, 25 bp, SARS Virus
cgttcttgttctctccggtaatagg

SEQ ID NO: 177182 - DNA, 25 bp, SARS Virus
gttcttgttctccccggtaatagga

SEQ ID NO: 177183 - DNA, 25 bp, SARS Virus
ttcttgttctctccggtaataggat

SEQ ID NO: 177184 - DNA, 25 bp, SARS Virus
tcttgttctctccggtaataggatt

SEQ ID NO: 177185 - DNA, 25 bp, SARS Virus
cttgttctctcccgtaataggattc

SEQ ID NO: 177186 - DNA, 25 bp, SARS Virus
ttgttctctccgctaataggattcg

SEQ ID NO: 177187 - DNA, 25 bp, SARS Virus
tgttctctccggcaataggattcgt

SEQ ID NO: 177188 - DNA, 25 bp, SARS Virus
gttctctccggtcataggattcgta

SEQ ID NO: 177189 - DNA, 25 bp, SARS Virus
ttctctccggtactaggattcgtac

SEQ ID NO: 177190 - DNA, 25 bp, SARS Virus
tctctccggtaacaggattcgtaca

SEQ ID NO: 177191 - DNA, 25 bp, SARS Virus
ctctccggtaatcggattcgtacaa

SEQ ID NO: 177192 - DNA, 25 bp, SARS Virus
tctccggtaatacgattcgtacaat

SEQ ID NO: 177193 - DNA, 25 bp, SARS Virus
ctccggtaatagcattcgtacaatc

SEQ ID NO: 177194 - DNA, 25 bp, SARS Virus
tccggtaataggcttcgtacaatcc

SEQ ID NO: 177195 - DNA, 25 bp, SARS Virus
ccggtaataggactcgtacaatccg

SEQ ID NO: 177196 - DNA, 25 bp, SARS Virus
cggtaataggatccgtacaatccgt

SEQ ID NO: 177197 - DNA, 25 bp, SARS Virus
ggtaataggattcgtacaatccgta

SEQ ID NO: 177198 - DNA, 25 bp, SARS Virus
gtaataggattcctacaatccgtac

SEQ ID NO: 177199 - DNA, 25 bp, SARS Virus
taataggattcgcacaatccgtacc

SEQ ID NO: 177200 - DNA, 25 bp, SARS Virus
aataggattcgtccaatccgtaccg

SEQ ID NO: 177201 - DNA, 25 bp, SARS Virus
ataggattcgtacaatccgtaccga

SEQ ID NO: 177202 - DNA, 25 bp, SARS Virus
taggattcgtaccatccgtaccgag

SEQ ID NO: 177203 - DNA, 25 bp, SARS Virus
aggattcgtacactccgtaccgaga

SEQ ID NO: 177204 - DNA, 25 bp, SARS Virus
ggattcgtacaacccgtaccgagac

SEQ ID NO: 177205 - DNA, 25 bp, SARS Virus
gattcgtacaatccgtaccgagaca

SEQ ID NO: 177206 - DNA, 25 bp, SARS Virus
attcgtacaatccgtaccgagacag

SEQ ID NO: 177207 - DNA, 25 bp, SARS Virus
ttcgtacaatccctaccgagacagt

SEQ ID NO: 177208 - DNA, 25 bp, SARS Virus
tcgtacaatccgcaccgagacagtg

SEQ ID NO: 177209 - DNA, 25 bp, SARS Virus
cgtacaatccgtcccgagacagtgt

SEQ ID NO: 177210 - DNA, 25 bp, SARS Virus
gtacaatccgtaccgagacagtgta

SEQ ID NO: 177211 - DNA, 25 bp, SARS Virus
tacaatccgtaccgagacagtgtaa

SEQ ID NO: 177212 - DNA, 25 bp, SARS Virus
acaatccgtacccagacagtgtaaa

SEQ ID NO: 177213 - DNA, 25 bp, SARS Virus
caatccgtaccgcgacagtgtaaaa

SEQ ID NO: 177214 - DNA, 25 bp, SARS Virus
aatccgtaccgacacagtgtaaaac

SEQ ID NO: 177215 - DNA, 25 bp, SARS Virus
atccgtaccgagccagtgtaaaacc

SEQ ID NO: 177216 - DNA, 25 bp, SARS Virus
tccgtaccgagacagtgtaaaacct

SEQ ID NO: 177217 - DNA, 25 bp, SARS Virus
ccgtaccgagaccgtgtaaaaccta

SEQ ID NO: 177218 - DNA, 25 bp, SARS Virus
cgtaccgagacactgtaaaacctat

SEQ ID NO: 177219 - DNA, 25 bp, SARS Virus
gtaccgagacagcgtaaaacctatt

SEQ ID NO: 177220 - DNA, 25 bp, SARS Virus
taccgagacagtctaaaacctatta

SEQ ID NO: 177221 - DNA, 25 bp, SARS Virus
accgagacagtgcaaaacctattag

SEQ ID NO: 177222 - DNA, 25 bp, SARS Virus
ccgagacagtgtcaaacctattagg

SEQ ID NO: 177223 - DNA, 25 bp, SARS Virus
cgagacagtgtacaacctattaggg

SEQ ID NO: 177224 - DNA, 25 bp, SARS Virus
gagacagtgtaacacctattagggt

SEQ ID NO: 177225 - DNA, 25 bp, SARS Virus
agacagtgtaaaccctattagggtt

SEQ ID NO: 177226 - DNA, 25 bp, SARS Virus
gacagtgtaaaacctattagggttg

SEQ ID NO: 177227 - DNA, 25 bp, SARS Virus
acagtgtaaaacctattagggttgg

SEQ ID NO: 177228 - DNA, 25 bp, SARS Virus
cagtgtaaaacccattagggttggg

SEQ ID NO: 177229 - DNA, 25 bp, SARS Virus
agtgtaaaacctcttagggttgggt

SEQ ID NO: 177230 - DNA, 25 bp, SARS Virus
gtgtaaaacctactagggttgggta

SEQ ID NO: 177231 - DNA, 25 bp, SARS Virus
tgtaaaacctatcagggttgggtat

SEQ ID NO: 177232 - DNA, 25 bp, SARS Virus
gtaaaacctattcgggttgggtatt

SEQ ID NO: 177233 - DNA, 25 bp, SARS Virus
taaaacctattacggttgggtattc

SEQ ID NO: 177234 - DNA, 25 bp, SARS Virus
aaaacctattagcgttgggtattcc

SEQ ID NO: 177235 - DNA, 25 bp, SARS Virus
aaacctattaggcttgggtattcca

SEQ ID NO: 177236 - DNA, 25 bp, SARS Virus
aacctattagggctgggtattccac

SEQ ID NO: 177237 - DNA, 25 bp, SARS Virus
acctattagggtcgggtattccaca

SEQ ID NO: 177238 - DNA, 25 bp, SARS Virus
cctattagggttcggtattccacac

SEQ ID NO: 177239 - DNA, 25 bp, SARS Virus
ctattagggttgcgtattccacacc

SEQ ID NO: 177240 - DNA, 25 bp, SARS Virus
tattagggttggctattccacacct

SEQ ID NO: 177241 - DNA, 25 bp, SARS Virus
attagggttgggcattccacacctc

SEQ ID NO: 177242 - DNA, 25 bp, SARS Virus
ttagggttgggtcttccacacctca

SEQ ID NO: 177243 - DNA, 25 bp, SARS Virus
tagggttgggtactccacacctcaa

SEQ ID NO: 177244 - DNA, 25 bp, SARS Virus
agggttgggtatcccacacctcaaa

SEQ ID NO: 177245 - DNA, 25 bp, SARS Virus
gggttgggtattccacacctcaaag

SEQ ID NO: 177246 - DNA, 25 bp, SARS Virus
ggttgggtattccacacctcaaaga

SEQ ID NO: 177247 - DNA, 25 bp, SARS Virus
gttgggtattccccacctcaaagat

SEQ ID NO: 177248 - DNA, 25 bp, SARS Virus
ttgggtattccacacctcaaagatg

SEQ ID NO: 177249 - DNA, 25 bp, SARS Virus
tgggtattccacccctcaaagatgt

SEQ ID NO: 177250 - DNA, 25 bp, SARS Virus
gggtattccacacctcaaagatgta

SEQ ID NO: 177251 - DNA, 25 bp, SARS Virus
ggtattccacacctcaaagatgtag

SEQ ID NO: 177252 - DNA, 25 bp, SARS Virus
gtattccacaccccaaagatgtagt

SEQ ID NO: 177253 - DNA, 25 bp, SARS Virus
tattccacacctcaaagatgtagtg

SEQ ID NO: 177254 - DNA, 25 bp, SARS Virus
attccacacctccaagatgtagtga

SEQ ID NO: 177255 - DNA, 25 bp, SARS Virus
ttccacacctcacagatgtagtgac

SEQ ID NO: 177256 - DNA, 25 bp, SARS Virus
tccacacctcaacgatgtagtgaca

SEQ ID NO: 177257 - DNA, 25 bp, SARS Virus
ccacacctcaaacatgtagtgacat

SEQ ID NO: 177258 - DNA, 25 bp, SARS Virus
cacacctcaaagctgtagtgacatt

SEQ ID NO: 177259 - DNA, 25 bp, SARS Virus
acacctcaaagacgtagtgacattt

SEQ ID NO: 177260 - DNA, 25 bp, SARS Virus
cacctcaaagatctagtgacatttg

SEQ ID NO: 177261 - DNA, 25 bp, SARS Virus
acctcaaagatgcagtgacatttgt

SEQ ID NO: 177262 - DNA, 25 bp, SARS Virus
cctcaaagatgtcgtgacatttgtc

SEQ ID NO: 177263 - DNA, 25 bp, SARS Virus
ctcaaagatgtactgacatttgtca

SEQ ID NO: 177264 - DNA, 25 bp, SARS Virus
tcaaagatgtagcgacatttgtcaa

SEQ ID NO: 177265 - DNA, 25 bp, SARS Virus
caaagatgtagtcacatttgtcaaa

SEQ ID NO: 177266 - DNA, 25 bp, SARS Virus
aaagatgtagtgccatttgtcaaaa

SEQ ID NO: 177267 - DNA, 25 bp, SARS Virus
aagatgtagtgacatttgtcaaaaa

SEQ ID NO: 177268 - DNA, 25 bp, SARS Virus
agatgtagtgacctttgtcaaaaat

SEQ ID NO: 177269 - DNA, 25 bp, SARS Virus
gatgtagtgacacttgtcaaaaatt

SEQ ID NO: 177270 - DNA, 25 bp, SARS Virus
atgtagtgacatctgtcaaaaattg

SEQ ID NO: 177271 - DNA, 25 bp, SARS Virus
tgtagtgacattcgtcaaaaattgt

SEQ ID NO: 177272 - DNA, 25 bp, SARS Virus
gtagtgacatttctcaaaaattgta

SEQ ID NO: 177273 - DNA, 25 bp, SARS Virus
tagtgacatttgccaaaaattgtat

SEQ ID NO: 177274 - DNA, 25 bp, SARS Virus
agtgacatttgtcaaaaattgtata

SEQ ID NO: 177275 - DNA, 25 bp, SARS Virus
gtgacatttgtccaaaattgtataa

SEQ ID NO: 177276 - DNA, 25 bp, SARS Virus
tgacatttgtcacaaattgtataat

SEQ ID NO: 177277 - DNA, 25 bp, SARS Virus
gacatttgtcaacaattgtataata

SEQ ID NO: 177278 - DNA, 25 bp, SARS Virus
acatttgtcaaacattgtataatac

SEQ ID NO: 177279 - DNA, 25 bp, SARS Virus
catttgtcaaaacttgtataatacg

SEQ ID NO: 177280 - DNA, 25 bp, SARS Virus
atttgtcaaaaactgtataatacgg

SEQ ID NO: 177281 - DNA, 25 bp, SARS Virus
tttgtcaaaaatcgtataatacggt

SEQ ID NO: 177282 - DNA, 25 bp, SARS Virus
ttgtcaaaaattctataatacggtc

SEQ ID NO: 177283 - DNA, 25 bp, SARS Virus
tgtcaaaaattgcataatacggtcg

SEQ ID NO: 177284 - DNA, 25 bp, SARS Virus
gtcaaaaattgtctaatacggtcgg

SEQ ID NO: 177285 - DNA, 25 bp, SARS Virus
tcaaaaattgtacaatacggtcggt

SEQ ID NO: 177286 - DNA, 25 bp, SARS Virus
caaaaattgtatcatacggtcggtg

SEQ ID NO: 177287 - DNA, 25 bp, SARS Virus
aaaaattgtatactacggtcggtgg

SEQ ID NO: 177288 - DNA, 25 bp, SARS Virus
aaaattgtataacacggtcggtggc

SEQ ID NO: 177289 - DNA, 25 bp, SARS Virus
aaattgtataatccggtcggtggca

SEQ ID NO: 177290 - DNA, 25 bp, SARS Virus
aattgtataatacggtcggtggcat

SEQ ID NO: 177291 - DNA, 25 bp, SARS Virus
attgtataataccgtcggtggcatt

SEQ ID NO: 177292 - DNA, 25 bp, SARS Virus
ttgtataatacgctcggtggcattt

SEQ ID NO: 177293 - DNA, 25 bp, SARS Virus
tgtataatacggccggtggcatttt

SEQ ID NO: 177294 - DNA, 25 bp, SARS Virus
gtataatacggtcggtggcattttg

SEQ ID NO: 177295 - DNA, 25 bp, SARS Virus
tataatacggtccgtggcattttga

SEQ ID NO: 177296 - DNA, 25 bp, SARS Virus
ataatacggtcgctggcattttgaa

SEQ ID NO: 177297 - DNA, 25 bp, SARS Virus
taatacggtcggcggcattttgaac

SEQ ID NO: 177298 - DNA, 25 bp, SARS Virus
aatacggtcggtcgcattttgaacg

SEQ ID NO: 177299 - DNA, 25 bp, SARS Virus
atacggtcggtgccattttgaacga

SEQ ID NO: 177300 - DNA, 25 bp, SARS Virus
tacggtcggtggcattttgaacgaa

SEQ ID NO: 177301 - DNA, 25 bp, SARS Virus
acggtcggtggccttttgaacgaac

SEQ ID NO: 177302 - DNA, 25 bp, SARS Virus
cggtcggtggcactttgaacgaaca

SEQ ID NO: 177303 - DNA, 25 bp, SARS Virus
ggtcggtggcatcttgaacgaacaa

SEQ ID NO: 177304 - DNA, 25 bp, SARS Virus
gtcggtggcattctgaacgaacaag

SEQ ID NO: 177305 - DNA, 25 bp, SARS Virus
tcggtggcatttcgaacgaacaagg

SEQ ID NO: 177306 - DNA, 25 bp, SARS Virus
cggtggcattttcaacgaacaaggt

SEQ ID NO: 177307 - DNA, 25 bp, SARS Virus
ggtggcattttgcacgaacaaggtt

SEQ ID NO: 177308 - DNA, 25 bp, SARS Virus
gtggcattttgaccgaacaaggtta

SEQ ID NO: 177309 - DNA, 25 bp, SARS Virus
tggcattttgaacgaacaaggttaa

SEQ ID NO: 177310 - DNA, 25 bp, SARS Virus
ggcattttgaaccaacaaggttaat

SEQ ID NO: 177311 - DNA, 25 bp, SARS Virus
gcattttgaacgcacaaggttaatg

SEQ ID NO: 177312 - DNA, 25 bp, SARS Virus
cattttgaacgaccaaggttaatgg

SEQ ID NO: 177313 - DNA, 25 bp, SARS Virus
attttgaacgaacaaggttaatggt

SEQ ID NO: 177314 - DNA, 25 bp, SARS Virus
ttttgaacgaaccaggttaatggtg

SEQ ID NO: 177315 - DNA, 25 bp, SARS Virus
tttgaacgaacacggttaatggtgt

SEQ ID NO: 177316 - DNA, 25 bp, SARS Virus
ttgaacgaacaacgttaatggtgtc

SEQ ID NO: 177317 - DNA, 25 bp, SARS Virus
tgaacgaacaagcttaatggtgtca

SEQ ID NO: 177318 - DNA, 25 bp, SARS Virus
gaacgaacaaggctaatggtgtcat

SEQ ID NO: 177319 - DNA, 25 bp, SARS Virus
aacgaacaaggtcaatggtgtcatc

SEQ ID NO: 177320 - DNA, 25 bp, SARS Virus
acgaacaaggttcatggtgtcatcg

SEQ ID NO: 177321 - DNA, 25 bp, SARS Virus
cgaacaaggttactggtgtcatcga

SEQ ID NO: 177322 - DNA, 25 bp, SARS Virus
gaacaaggttaacggtgtcatcgag

SEQ ID NO: 177323 - DNA, 25 bp, SARS Virus
aacaaggttaatcgtgtcatcgagg

SEQ ID NO: 177324 - DNA, 25 bp, SARS Virus
acaaggttaatgctgtcatcgagga

SEQ ID NO: 177325 - DNA, 25 bp, SARS Virus
caaggttaatggcgtcatcgaggag

SEQ ID NO: 177326 - DNA, 25 bp, SARS Virus
aaggttaatggtctcatcgaggaga

SEQ ID NO: 177327 - DNA, 25 bp, SARS Virus
aggttaatggtgccatcgaggagat

SEQ ID NO: 177328 - DNA, 25 bp, SARS Virus
ggttaatggtgtcatcgaggagatc

SEQ ID NO: 177329 - DNA, 25 bp, SARS Virus
gttaatggtgtcctcgaggagatca

SEQ ID NO: 177330 - DNA, 25 bp, SARS Virus
ttaatggtgtcaccgaggagatcac

SEQ ID NO: 177331 - DNA, 25 bp, SARS Virus
taatggtgtcatcgaggagatcacc

SEQ ID NO: 177332 - DNA, 25 bp, SARS Virus
aatggtgtcatccaggagatcaccg

SEQ ID NO: 177333 - DNA, 25 bp, SARS Virus
atggtgtcatcgcggagatcaccgc

SEQ ID NO: 177334 - DNA, 25 bp, SARS Virus
tggtgtcatcgacgagatcaccgcc

SEQ ID NO: 177335 - DNA, 25 bp, SARS Virus
ggtgtcatcgagcagatcaccgccg

SEQ ID NO: 177336 - DNA, 25 bp, SARS Virus
gtgtcatcgaggcgatcaccgccga

SEQ ID NO: 177337 - DNA, 25 bp, SARS Virus
tgtcatcgaggacatcaccgccgat

SEQ ID NO: 177338 - DNA, 25 bp, SARS Virus
gtcatcgaggagctcaccgccgata

SEQ ID NO: 177339 - DNA, 25 bp, SARS Virus
tcatcgaggagaccaccgccgataa

SEQ ID NO: 177340 - DNA, 25 bp, SARS Virus
catcgaggagatcaccgccgataac

SEQ ID NO: 177341 - DNA, 25 bp, SARS Virus
atcgaggagatccccgccgataact

SEQ ID NO: 177342 - DNA, 25 bp, SARS Virus
tcgaggagatcaccgccgataactg

SEQ ID NO: 177343 - DNA, 25 bp, SARS Virus
cgaggagatcaccgccgataactga

SEQ ID NO: 177344 - DNA, 25 bp, SARS Virus
gaggagatcacccccgataactgaa

SEQ ID NO: 177345 - DNA, 25 bp, SARS Virus
aggagatcaccgccgataactgaag

SEQ ID NO: 177346 - DNA, 25 bp, SARS Virus
ggagatcaccgccgataactgaagt

SEQ ID NO: 177347 - DNA, 25 bp, SARS Virus
gagatcaccgcccataactgaagtt

SEQ ID NO: 177348 - DNA, 25 bp, SARS Virus
agatcaccgccgctaactgaagtta

SEQ ID NO: 177349 - DNA, 25 bp, SARS Virus
gatcaccgccgacaactgaagttat

SEQ ID NO: 177350 - DNA, 25 bp, SARS Virus
atcaccgccgatcactgaagttatt

SEQ ID NO: 177351 - DNA, 25 bp, SARS Virus
tcaccgccgatacctgaagttatta

SEQ ID NO: 177352 - DNA, 25 bp, SARS Virus
caccgccgataactgaagttattaa

SEQ ID NO: 177353 - DNA, 25 bp, SARS Virus
accgccgataaccgaagttattaaa

SEQ ID NO: 177354 - DNA, 25 bp, SARS Virus
ccgccgataactcaagttattaaag

SEQ ID NO: 177355 - DNA, 25 bp, SARS Virus
cgccgataactgcagttattaaaga

SEQ ID NO: 177356 - DNA, 25 bp, SARS Virus
gccgataactgacgttattaaagac

SEQ ID NO: 177357 - DNA, 25 bp, SARS Virus
ccgataactgaacttattaaagact

SEQ ID NO: 177358 - DNA, 25 bp, SARS Virus
cgataactgaagctattaaagacta

SEQ ID NO: 177359 - DNA, 25 bp, SARS Virus
gataactgaagtcattaaagactac

SEQ ID NO: 177360 - DNA, 25 bp, SARS Virus
ataactgaagttcttaaagactact

SEQ ID NO: 177361 - DNA, 25 bp, SARS Virus
taactgaagttactaaagactactt

SEQ ID NO: 177362 - DNA, 25 bp, SARS Virus
aactgaagttatcaaagactacttt

SEQ ID NO: 177363 - DNA, 25 bp, SARS Virus
actgaagttattcaagactactttg

SEQ ID NO: 177364 - DNA, 25 bp, SARS Virus
ctgaagttattacagactactttga

SEQ ID NO: 177365 - DNA, 25 bp, SARS Virus
tgaagttattaacgactactttgac

SEQ ID NO: 177366 - DNA, 25 bp, SARS Virus
gaagttattaaacactactttgaca

SEQ ID NO: 177367 - DNA, 25 bp, SARS Virus
aagttattaaagcctactttgacag

SEQ ID NO: 177368 - DNA, 25 bp, SARS Virus
agttattaaagactactttgacaga

SEQ ID NO: 177369 - DNA, 25 bp, SARS Virus
gttattaaagaccactttgacagat

SEQ ID NO: 177370 - DNA, 25 bp, SARS Virus
ttattaaagactcctttgacagata

SEQ ID NO: 177371 - DNA, 25 bp, SARS Virus
tattaaagactactttgacagataa

SEQ ID NO: 177372 - DNA, 25 bp, SARS Virus
attaaagactaccttgacagataaa

SEQ ID NO: 177373 - DNA, 25 bp, SARS Virus
ttaaagactactctgacagataaac

SEQ ID NO: 177374 - DNA, 25 bp, SARS Virus
taaagactacttcgacagataaaca

SEQ ID NO: 177375 - DNA, 25 bp, SARS Virus
aaagactactttcacagataaacag

SEQ ID NO: 177376 - DNA, 25 bp, SARS Virus
aagactactttgccagataaacagt

SEQ ID NO: 177377 - DNA, 25 bp, SARS Virus
agactactttgacagataaacagta

SEQ ID NO: 177378 - DNA, 25 bp, SARS Virus
gactactttgaccgataaacagtat

SEQ ID NO: 177379 - DNA, 25 bp, SARS Virus
actactttgacacataaacagtatc

SEQ ID NO: 177380 - DNA, 25 bp, SARS Virus
ctactttgacagctaaacagtatca

SEQ ID NO: 177381 - DNA, 25 bp, SARS Virus
tactttgacagacaaacagtatcat

SEQ ID NO: 177382 - DNA, 25 bp, SARS Virus
actttgacagatcaacagtatcatg

SEQ ID NO: 177383 - DNA, 25 bp, SARS Virus
ctttgacagatacacagtatcatga

SEQ ID NO: 177384 - DNA, 25 bp, SARS Virus
tttgacagataaccagtatcatgat

SEQ ID NO: 177385 - DNA, 25 bp, SARS Virus
ttgacagataaacagtatcatgatg

SEQ ID NO: 177386 - DNA, 25 bp, SARS Virus
tgacagataaaccgtatcatgatgt

SEQ ID NO: 177387 - DNA, 25 bp, SARS Virus
gacagataaacactatcatgatgtc

SEQ ID NO: 177388 - DNA, 25 bp, SARS Virus
acagataaacagcatcatgatgtct

SEQ ID NO: 177389 - DNA, 25 bp, SARS Virus
cagataaacagtctcatgatgtcta

SEQ ID NO: 177390 - DNA, 25 bp, SARS Virus
agataaacagtaccatgatgtctat

SEQ ID NO: 177391 - DNA, 25 bp, SARS Virus
gataaacagtatcatgatgtctatc

SEQ ID NO: 177392 - DNA, 25 bp, SARS Virus
ataaacagtatcctgatgtctatct

SEQ ID NO: 177393 - DNA, 25 bp, SARS Virus
taaacagtatcacgatgtctatctc

SEQ ID NO: 177394 - DNA, 25 bp, SARS Virus
aaacagtatcatcatgtctatctct

SEQ ID NO: 177395 - DNA, 25 bp, SARS Virus
aacagtatcatgctgtctatctctg

SEQ ID NO: 177396 - DNA, 25 bp, SARS Virus
acagtatcatgacgtctatctctgt

SEQ ID NO: 177397 - DNA, 25 bp, SARS Virus
cagtatcatgatctctatctctgtg

SEQ ID NO: 177398 - DNA, 25 bp, SARS Virus
agtatcatgatgcctatctctgtgg

SEQ ID NO: 177399 - DNA, 25 bp, SARS Virus
gtatcatgatgtctatctctgtggt

SEQ ID NO: 177400 - DNA, 25 bp, SARS Virus
tatcatgatgtccatctctgtggtc

SEQ ID NO: 177401 - DNA, 25 bp, SARS Virus
atcatgatgtctctctctgtggtcg

SEQ ID NO: 177402 - DNA, 25 bp, SARS Virus
tcatgatgtctacctctgtggtcga

SEQ ID NO: 177403 - DNA, 25 bp, SARS Virus
catgatgtctatctctgtggtcgat

SEQ ID NO: 177404 - DNA, 25 bp, SARS Virus
atgatgtctatccctgtggtcgatg

SEQ ID NO: 177405 - DNA, 25 bp, SARS Virus
tgatgtctatctctgtggtcgatgc

SEQ ID NO: 177406 - DNA, 25 bp, SARS Virus
gatgtctatctccgtggtcgatgcc

SEQ ID NO: 177407 - DNA, 25 bp, SARS Virus
atgtctatctctctggtcgatgcca

SEQ ID NO: 177408 - DNA, 25 bp, SARS Virus
tgtctatctctgcggtcgatgccac

SEQ ID NO: 177409 - DNA, 25 bp, SARS Virus
gtctatctctgtcgtcgatgccacg

SEQ ID NO: 177410 - DNA, 25 bp, SARS Virus
tctatctctgtgctcgatgccacgc

SEQ ID NO: 177411 - DNA, 25 bp, SARS Virus
ctatctctgtggccgatgccacgct

SEQ ID NO: 177412 - DNA, 25 bp, SARS Virus
tatctctgtggtcgatgccacgctc

SEQ ID NO: 177413 - DNA, 25 bp, SARS Virus
atctctgtggtccatgccacgctcg

SEQ ID NO: 177414 - DNA, 25 bp, SARS Virus
tctctgtggtcgctgccacgctcga

SEQ ID NO: 177415 - DNA, 25 bp, SARS Virus
ctctgtggtcgacgccacgctcgag

SEQ ID NO: 177416 - DNA, 25 bp, SARS Virus
tctgtggtcgatcccacgctcgaga

SEQ ID NO: 177417 - DNA, 25 bp, SARS Virus
ctgtggtcgatgccacgctcgagat

SEQ ID NO: 177418 - DNA, 25 bp, SARS Virus
tgtggtcgatgccacgctcgagata

SEQ ID NO: 177419 - DNA, 25 bp, SARS Virus
gtggtcgatgccccgctcgagataa

SEQ ID NO: 177420 - DNA, 25 bp, SARS Virus
tggtcgatgccacgctcgagataag

SEQ ID NO: 177421 - DNA, 25 bp, SARS Virus
ggtcgatgccaccctcgagataaga

SEQ ID NO: 177422 - DNA, 25 bp, SARS Virus
gtcgatgccacgctcgagataagaa

SEQ ID NO: 177423 - DNA, 25 bp, SARS Virus
tcgatgccacgcccgagataagaaa

SEQ ID NO: 177424 - DNA, 25 bp, SARS Virus
cgatgccacgctcgagataagaaac

SEQ ID NO: 177425 - DNA, 25 bp, SARS Virus
gatgccacgctccagataagaaacg

SEQ ID NO: 177426 - DNA, 25 bp, SARS Virus
atgccacgctcgcgataagaaacgt

SEQ ID NO: 177427 - DNA, 25 bp, SARS Virus
tgccacgctcgacataagaaacgtg

SEQ ID NO: 177428 - DNA, 25 bp, SARS Virus
gccacgctcgagctaagaaacgtga

SEQ ID NO: 177429 - DNA, 25 bp, SARS Virus
ccacgctcgagacaagaaacgtgat

SEQ ID NO: 177430 - DNA, 25 bp, SARS Virus
cacgctcgagatcagaaacgtgatt

SEQ ID NO: 177431 - DNA, 25 bp, SARS Virus
acgctcgagatacgaaacgtgatta

SEQ ID NO: 177432 - DNA, 25 bp, SARS Virus
cgctcgagataacaaacgtgattac

SEQ ID NO: 177433 - DNA, 25 bp, SARS Virus
gctcgagataagcaacgtgattacc

SEQ ID NO: 177434 - DNA, 25 bp, SARS Virus
ctcgagataagacacgtgattaccg

SEQ ID NO: 177435 - DNA, 25 bp, SARS Virus
tcgagataagaaccgtgattaccgt

SEQ ID NO: 177436 - DNA, 25 bp, SARS Virus
cgagataagaaacgtgattaccgta

SEQ ID NO: 177437 - DNA, 25 bp, SARS Virus
gagataagaaacctgattaccgtat

SEQ ID NO: 177438 - DNA, 25 bp, SARS Virus
agataagaaacgcgattaccgtatg

SEQ ID NO: 177439 - DNA, 25 bp, SARS Virus
gataagaaacgtcattaccgtatga

SEQ ID NO: 177440 - DNA, 25 bp, SARS Virus
ataagaaacgtgcttaccgtatgaa

SEQ ID NO: 177441 - DNA, 25 bp, SARS Virus
taagaaacgtgactaccgtatgaat

SEQ ID NO: 177442 - DNA, 25 bp, SARS Virus
aagaaacgtgatcaccgtatgaatt

SEQ ID NO: 177443 - DNA, 25 bp, SARS Virus
agaaacgtgattcccgtatgaattc

SEQ ID NO: 177444 - DNA, 25 bp, SARS Virus
gaaacgtgattaccgtatgaattct

SEQ ID NO: 177445 - DNA, 25 bp, SARS Virus
aaacgtgattaccgtatgaattcta

SEQ ID NO: 177446 - DNA, 25 bp, SARS Virus
aacgtgattaccctatgaattctaa

SEQ ID NO: 177447 - DNA, 25 bp, SARS Virus
acgtgattaccgcatgaattctaag

SEQ ID NO: 177448 - DNA, 25 bp, SARS Virus
cgtgattaccgtctgaattctaagt

SEQ ID NO: 177449 - DNA, 25 bp, SARS Virus
gtgattaccgtacgaattctaagta

SEQ ID NO: 177450 - DNA, 25 bp, SARS Virus
tgattaccgtatcaattctaagtaa

SEQ ID NO: 177451 - DNA, 25 bp, SARS Virus
gattaccgtatgcattctaagtaaa

SEQ ID NO: 177452 - DNA, 25 bp, SARS Virus
attaccgtatgacttctaagtaaac

SEQ ID NO: 177453 - DNA, 25 bp, SARS Virus
ttaccgtatgaactctaagtaaact

SEQ ID NO: 177454 - DNA, 25 bp, SARS Virus
taccgtatgaatcctaagtaaactc

SEQ ID NO: 177455 - DNA, 25 bp, SARS Virus
accgtatgaattctaagtaaactca

SEQ ID NO: 177456 - DNA, 25 bp, SARS Virus
ccgtatgaattccaagtaaactcaa

SEQ ID NO: 177457 - DNA, 25 bp, SARS Virus
cgtatgaattctcagtaaactcaat

SEQ ID NO: 177458 - DNA, 25 bp, SARS Virus
gtatgaattctacgtaaactcaata

SEQ ID NO: 177459 - DNA, 25 bp, SARS Virus
tatgaattctaactaaactcaatat

SEQ ID NO: 177460 - DNA, 25 bp, SARS Virus
atgaattctaagcaaactcaatatc

SEQ ID NO: 177461 - DNA, 25 bp, SARS Virus
tgaattctaagtcaactcaatatca

SEQ ID NO: 177462 - DNA, 25 bp, SARS Virus
gaattctaagtacactcaatatcat

SEQ ID NO: 177463 - DNA, 25 bp, SARS Virus
aattctaagtaacctcaatatcatc

SEQ ID NO: 177464 - DNA, 25 bp, SARS Virus
attctaagtaaactcaatatcatcc

SEQ ID NO: 177465 - DNA, 25 bp, SARS Virus
ttctaagtaaacccaatatcatccc

SEQ ID NO: 177466 - DNA, 25 bp, SARS Virus
tctaagtaaactcaatatcatccct

SEQ ID NO: 177467 - DNA, 25 bp, SARS Virus
ctaagtaaactccatatcatcccta

SEQ ID NO: 177468 - DNA, 25 bp, SARS Virus
taagtaaactcactatcatccctac

SEQ ID NO: 177469 - DNA, 25 bp, SARS Virus
aagtaaactcaacatcatccctact

SEQ ID NO: 177470 - DNA, 25 bp, SARS Virus
agtaaactcaatctcatccctactg

SEQ ID NO: 177471 - DNA, 25 bp, SARS Virus
gtaaactcaataccatccctactgt

SEQ ID NO: 177472 - DNA, 25 bp, SARS Virus
taaactcaatatcatccctactgta

SEQ ID NO: 177473 - DNA, 25 bp, SARS Virus
aaactcaatatcctccctactgtaa

SEQ ID NO: 177474 - DNA, 25 bp, SARS Virus
aactcaatatcacccctactgtaat

SEQ ID NO: 177475 - DNA, 25 bp, SARS Virus
actcaatatcatccctactgtaatg

SEQ ID NO: 177476 - DNA, 25 bp, SARS Virus
ctcaatatcatccctactgtaatgc

SEQ ID NO: 177477 - DNA, 25 bp, SARS Virus
tcaatatcatccctactgtaatgcg

SEQ ID NO: 177478 - DNA, 25 bp, SARS Virus
caatatcatccccactgtaatgcga

SEQ ID NO: 177479 - DNA, 25 bp, SARS Virus
aatatcatccctcctgtaatgcgaa

SEQ ID NO: 177480 - DNA, 25 bp, SARS Virus
atatcatccctactgtaatgcgaat

SEQ ID NO: 177481 - DNA, 25 bp, SARS Virus
tatcatccctaccgtaatgcgaatc

SEQ ID NO: 177482 - DNA, 25 bp, SARS Virus
atcatccctactctaatgcgaatca

SEQ ID NO: 177483 - DNA, 25 bp, SARS Virus
tcatccctactgcaatgcgaatcat

SEQ ID NO: 177484 - DNA, 25 bp, SARS Virus
catccctactgtcatgcgaatcata

SEQ ID NO: 177485 - DNA, 25 bp, SARS Virus
atccctactgtactgcgaatcatat

SEQ ID NO: 177486 - DNA, 25 bp, SARS Virus
tccctactgtaacgcgaatcatatg

SEQ ID NO: 177487 - DNA, 25 bp, SARS Virus
ccctactgtaatccgaatcatatgc

SEQ ID NO: 177488 - DNA, 25 bp, SARS Virus
cctactgtaatgcgaatcatatgcg

SEQ ID NO: 177489 - DNA, 25 bp, SARS Virus
ctactgtaatgccaatcatatgcgc

SEQ ID NO: 177490 - DNA, 25 bp, SARS Virus
tactgtaatgcgcatcatatgcgct

SEQ ID NO: 177491 - DNA, 25 bp, SARS Virus
actgtaatgcgactcatatgcgctt

SEQ ID NO: 177492 - DNA, 25 bp, SARS Virus
ctgtaatgcgaaccatatgcgcttt

SEQ ID NO: 177493 - DNA, 25 bp, SARS Virus
tgtaatgcgaatcatatgcgctttt

SEQ ID NO: 177494 - DNA, 25 bp, SARS Virus
gtaatgcgaatcctatgcgcttttc

SEQ ID NO: 177495 - DNA, 25 bp, SARS Virus
taatgcgaatcacatgcgcttttca

SEQ ID NO: 177496 - DNA, 25 bp, SARS Virus
aatgcgaatcatctgcgcttttcac

SEQ ID NO: 177497 - DNA, 25 bp, SARS Virus
atgcgaatcatacgcgcttttcacg

SEQ ID NO: 177498 - DNA, 25 bp, SARS Virus
tgcgaatcatatccgcttttcacgt

SEQ ID NO: 177499 - DNA, 25 bp, SARS Virus
gcgaatcatatgcgcttttcacgta

SEQ ID NO: 177500 - DNA, 25 bp, SARS Virus
cgaatcatatgcccttttcacgtag

SEQ ID NO: 177501 - DNA, 25 bp, SARS Virus
gaatcatatgcgcttttcacgtaga

SEQ ID NO: 177502 - DNA, 25 bp, SARS Virus
aatcatatgcgcctttcacgtagaa

SEQ ID NO: 177503 - DNA, 25 bp, SARS Virus
atcatatgcgctcttcacgtagaac

SEQ ID NO: 177504 - DNA, 25 bp, SARS Virus
tcatatgcgcttctcacgtagaact

SEQ ID NO: 177505 - DNA, 25 bp, SARS Virus
catatgcgctttccacgtagaacta

SEQ ID NO: 177506 - DNA, 25 bp, SARS Virus
atatgcgcttttcacgtagaactag

SEQ ID NO: 177507 - DNA, 25 bp, SARS Virus
tatgcgcttttcccgtagaactagg

SEQ ID NO: 177508 - DNA, 25 bp, SARS Virus
atgcgcttttcacgtagaactagga

SEQ ID NO: 177509 - DNA, 25 bp, SARS Virus
tgcgcttttcacctagaactaggag

SEQ ID NO: 177510 - DNA, 25 bp, SARS Virus
gcgcttttcacgcagaactaggagt

SEQ ID NO: 177511 - DNA, 25 bp, SARS Virus
cgcttttcacgtcgaactaggagta

SEQ ID NO: 177512 - DNA, 25 bp, SARS Virus
gcttttcacgtacaactaggagtat

SEQ ID NO: 177513 - DNA, 25 bp, SARS Virus
cttttcacgtagcactaggagtatt

SEQ ID NO: 177514 - DNA, 25 bp, SARS Virus
ttttcacgtagacctaggagtattg

SEQ ID NO: 177515 - DNA, 25 bp, SARS Virus
tttcacgtagaactaggagtattga

SEQ ID NO: 177516 - DNA, 25 bp, SARS Virus
ttcacgtagaaccaggagtattgag

SEQ ID NO: 177517 - DNA, 25 bp, SARS Virus
tcacgtagaactcggagtattgagt

SEQ ID NO: 177518 - DNA, 25 bp, SARS Virus
cacgtagaactacgagtattgagta

SEQ ID NO: 177519 - DNA, 25 bp, SARS Virus
acgtagaactagcagtattgagtaa

SEQ ID NO: 177520 - DNA, 25 bp, SARS Virus
cgtagaactaggcgtattgagtaac

SEQ ID NO: 177521 - DNA, 25 bp, SARS Virus
gtagaactaggactattgagtaact

SEQ ID NO: 177522 - DNA, 25 bp, SARS Virus
tagaactaggagcattgagtaactc

SEQ ID NO: 177523 - DNA, 25 bp, SARS Virus
agaactaggagtcttgagtaactca

SEQ ID NO: 177524 - DNA, 25 bp, SARS Virus
gaactaggagtactgagtaactcag

SEQ ID NO: 177525 - DNA, 25 bp, SARS Virus
aactaggagtatcgagtaactcagt

SEQ ID NO: 177526 - DNA, 25 bp, SARS Virus
actaggagtattcagtaactcagta

SEQ ID NO: 177527 - DNA, 25 bp, SARS Virus
ctaggagtattgcgtaactcagtat

SEQ ID NO: 177528 - DNA, 25 bp, SARS Virus
taggagtattgactaactcagtatt

SEQ ID NO: 177529 - DNA, 25 bp, SARS Virus
aggagtattgagcaactcagtatta

SEQ ID NO: 177530 - DNA, 25 bp, SARS Virus
ggagtattgagtcactcagtattat

SEQ ID NO: 177531 - DNA, 25 bp, SARS Virus
gagtattgagtacctcagtattatt

SEQ ID NO: 177532 - DNA, 25 bp, SARS Virus
agtattgagtaactcagtattattt

SEQ ID NO: 177533 - DNA, 25 bp, SARS Virus
gtattgagtaacccagtattatttc

SEQ ID NO: 177534 - DNA, 25 bp, SARS Virus
tattgagtaactcagtattatttca

SEQ ID NO: 177535 - DNA, 25 bp, SARS Virus
attgagtaactccgtattatttcag

SEQ ID NO: 177536 - DNA, 25 bp, SARS Virus
ttgagtaactcactattatttcaga

SEQ ID NO: 177537 - DNA, 25 bp, SARS Virus
tgagtaactcagcattatttcagat

SEQ ID NO: 177538 - DNA, 25 bp, SARS Virus
gagtaactcagtcttatttcagatc

SEQ ID NO: 177539 - DNA, 25 bp, SARS Virus
agtaactcagtactatttcagatcg

SEQ ID NO: 177540 - DNA, 25 bp, SARS Virus
gtaactcagtatcatttcagatcgg

SEQ ID NO: 177541 - DNA, 25 bp, SARS Virus
taactcagtattctttcagatcgga

SEQ ID NO: 177542 - DNA, 25 bp, SARS Virus
aactcagtattacttcagatcggaa

SEQ ID NO: 177543 - DNA, 25 bp, SARS Virus
actcagtattatctcagatcggaat

SEQ ID NO: 177544 - DNA, 25 bp, SARS Virus
ctcagtattattccagatcggaatg

SEQ ID NO: 177545 - DNA, 25 bp, SARS Virus
tcagtattatttcagatcggaatgg

SEQ ID NO: 177546 - DNA, 25 bp, SARS Virus
cagtattatttccgatcggaatggg

SEQ ID NO: 177547 - DNA, 25 bp, SARS Virus
agtattatttcacatcggaatgggg

SEQ ID NO: 177548 - DNA, 25 bp, SARS Virus
gtattatttcagctcggaatggggt

SEQ ID NO: 177549 - DNA, 25 bp, SARS Virus
tattatttcagaccggaatggggta

SEQ ID NO: 177550 - DNA, 25 bp, SARS Virus
attatttcagatcggaatggggtaa

SEQ ID NO: 177551 - DNA, 25 bp, SARS Virus
ttatttcagatccgaatggggtaaa

SEQ ID NO: 177552 - DNA, 25 bp, SARS Virus
tatttcagatcgcaatggggtaaat

SEQ ID NO: 177553 - DNA, 25 bp, SARS Virus
atttcagatcggcatggggtaaata

SEQ ID NO: 177554 - DNA, 25 bp, SARS Virus
tttcagatcggactggggtaaataa

SEQ ID NO: 177555 - DNA, 25 bp, SARS Virus
ttcagatcggaacggggtaaataat

SEQ ID NO: 177556 - DNA, 25 bp, SARS Virus
tcagatcggaatcgggtaaataatt

SEQ ID NO: 177557 - DNA, 25 bp, SARS Virus
cagatcggaatgcggtaaataattt

SEQ ID NO: 177558 - DNA, 25 bp, SARS Virus
agatcggaatggcgtaaataattta

SEQ ID NO: 177559 - DNA, 25 bp, SARS Virus
gatcggaatgggctaaataatttac

SEQ ID NO: 177560 - DNA, 25 bp, SARS Virus
atcggaatggggcaaataatttacc

SEQ ID NO: 177561 - DNA, 25 bp, SARS Virus
tcggaatggggtcaataatttaccc

SEQ ID NO: 177562 - DNA, 25 bp, SARS Virus
cggaatggggtacataatttaccct

SEQ ID NO: 177563 - DNA, 25 bp, SARS Virus
ggaatggggtaactaatttaccctt

SEQ ID NO: 177564 - DNA, 25 bp, SARS Virus
gaatggggtaaacaatttacccttt

SEQ ID NO: 177565 - DNA, 25 bp, SARS Virus
aatggggtaaatcatttaccctttg

SEQ ID NO: 177566 - DNA, 25 bp, SARS Virus
atggggtaaatactttaccctttgg

SEQ ID NO: 177567 - DNA, 25 bp, SARS Virus
tggggtaaataacttaccctttggt

SEQ ID NO: 177568 - DNA, 25 bp, SARS Virus
ggggtaaataatctaccctttggtc

SEQ ID NO: 177569 - DNA, 25 bp, SARS Virus
gggtaaataattcaccctttggtcg

SEQ ID NO: 177570 - DNA, 25 bp, SARS Virus
ggtaaataatttcccctttggtcga

SEQ ID NO: 177571 - DNA, 25 bp, SARS Virus
gtaaataatttaccctttggtcgac

SEQ ID NO: 177572 - DNA, 25 bp, SARS Virus
taaataatttaccctttggtcgact

SEQ ID NO: 177573 - DNA, 25 bp, SARS Virus
aaataatttaccctttggtcgacta

SEQ ID NO: 177574 - DNA, 25 bp, SARS Virus
aataatttaccccttggtcgactaa

SEQ ID NO: 177575 - DNA, 25 bp, SARS Virus
ataatttaccctctggtcgactaaa

SEQ ID NO: 177576 - DNA, 25 bp, SARS Virus
taatttacccttcggtcgactaaat

SEQ ID NO: 177577 - DNA, 25 bp, SARS Virus
aatttaccctttcgtcgactaaata

SEQ ID NO: 177578 - DNA, 25 bp, SARS Virus
atttaccctttgctcgactaaatag

SEQ ID NO: 177579 - DNA, 25 bp, SARS Virus
tttaccctttggccgactaaatagg

SEQ ID NO: 177580 - DNA, 25 bp, SARS Virus
ttaccctttggtcgactaaataggt

SEQ ID NO: 177581 - DNA, 25 bp, SARS Virus
taccctttggtccactaaataggtc

SEQ ID NO: 177582 - DNA, 25 bp, SARS Virus
accctttggtcgcctaaataggtct

SEQ ID NO: 177583 - DNA, 25 bp, SARS Virus
ccctttggtcgactaaataggtcta

SEQ ID NO: 177584 - DNA, 25 bp, SARS Virus
cctttggtcgaccaaataggtctaa

SEQ ID NO: 177585 - DNA, 25 bp, SARS Virus
ctttggtcgactcaataggtctaac

SEQ ID NO: 177586 - DNA, 25 bp, SARS Virus
tttggtcgactacataggtctaaca

SEQ ID NO: 177587 - DNA, 25 bp, SARS Virus
ttggtcgactaactaggtctaacaa

SEQ ID NO: 177588 - DNA, 25 bp, SARS Virus
tggtcgactaaacaggtctaacaat

SEQ ID NO: 177589 - DNA, 25 bp, SARS Virus
ggtcgactaaatcggtctaacaatt

SEQ ID NO: 177590 - DNA, 25 bp, SARS Virus
gtcgactaaatacgtctaacaattg

SEQ ID NO: 177591 - DNA, 25 bp, SARS Virus
tcgactaaatagctctaacaattgc

SEQ ID NO: 177592 - DNA, 25 bp, SARS Virus
cgactaaataggcctaacaattgct

SEQ ID NO: 177593 - DNA, 25 bp, SARS Virus
gactaaataggtctaacaattgcta

SEQ ID NO: 177594 - DNA, 25 bp, SARS Virus
actaaataggtccaacaattgctaa

SEQ ID NO: 177595 - DNA, 25 bp, SARS Virus
ctaaataggtctcacaattgctaat

SEQ ID NO: 177596 - DNA, 25 bp, SARS Virus
taaataggtctaccaattgctaatg

SEQ ID NO: 177597 - DNA, 25 bp, SARS Virus
aaataggtctaacaattgctaatga

SEQ ID NO: 177598 - DNA, 25 bp, SARS Virus
aataggtctaaccattgctaatgaa

SEQ ID NO: 177599 - DNA, 25 bp, SARS Virus
ataggtctaacacttgctaatgaac

SEQ ID NO: 177600 - DNA, 25 bp, SARS Virus
taggtctaacaactgctaatgaacc

SEQ ID NO: 177601 - DNA, 25 bp, SARS Virus
aggtctaacaatcgctaatgaacca

SEQ ID NO: 177602 - DNA, 25 bp, SARS Virus
ggtctaacaattcctaatgaaccaa

SEQ ID NO: 177603 - DNA, 25 bp, SARS Virus
gtctaacaattgctaatgaaccaac

SEQ ID NO: 177604 - DNA, 25 bp, SARS Virus
tctaacaattgccaatgaaccaacc

SEQ ID NO: 177605 - DNA, 25 bp, SARS Virus
ctaacaattgctcatgaaccaaccg

SEQ ID NO: 177606 - DNA, 25 bp, SARS Virus
taacaattgctactgaaccaaccgt

SEQ ID NO: 177607 - DNA, 25 bp, SARS Virus
aacaattgctaacgaaccaaccgta

SEQ ID NO: 177608 - DNA, 25 bp, SARS Virus
acaattgctaatcaaccaaccgtaa

SEQ ID NO: 177609 - DNA, 25 bp, SARS Virus
caattgctaatgcaccaaccgtaat

SEQ ID NO: 177610 - DNA, 25 bp, SARS Virus
aattgctaatgacccaaccgtaatt

SEQ ID NO: 177611 - DNA, 25 bp, SARS Virus
attgctaatgaaccaaccgtaatta

SEQ ID NO: 177612 - DNA, 25 bp, SARS Virus
ttgctaatgaaccaaccgtaattat

SEQ ID NO: 177613 - DNA, 25 bp, SARS Virus
tgctaatgaacccaccgtaattatg

SEQ ID NO: 177614 - DNA, 25 bp, SARS Virus
gctaatgaaccacccgtaattatgt

SEQ ID NO: 177615 - DNA, 25 bp, SARS Virus
ctaatgaaccaaccgtaattatgtc

SEQ ID NO: 177616 - DNA, 25 bp, SARS Virus
taatgaaccaaccgtaattatgtcg

SEQ ID NO: 177617 - DNA, 25 bp, SARS Virus
aatgaaccaaccctaattatgtcgg

SEQ ID NO: 177618 - DNA, 25 bp, SARS Virus
atgaaccaaccgcaattatgtcggt

SEQ ID NO: 177619 - DNA, 25 bp, SARS Virus
tgaaccaaccgtcattatgtcggtg

SEQ ID NO: 177620 - DNA, 25 bp, SARS Virus
gaaccaaccgtacttatgtcggtgg

SEQ ID NO: 177621 - DNA, 25 bp, SARS Virus
aaccaaccgtaactatgtcggtggt

SEQ ID NO: 177622 - DNA, 25 bp, SARS Virus
accaaccgtaatcatgtcggtggta

SEQ ID NO: 177623 - DNA, 25 bp, SARS Virus
ccaaccgtaattctgtcggtggtag

SEQ ID NO: 177624 - DNA, 25 bp, SARS Virus
caaccgtaattacgtcggtggtagc

SEQ ID NO: 177625 - DNA, 25 bp, SARS Virus
aaccgtaattatctcggtggtagca

SEQ ID NO: 177626 - DNA, 25 bp, SARS Virus
accgtaattatgccggtggtagcat

SEQ ID NO: 177627 - DNA, 25 bp, SARS Virus
ccgtaattatgtcggtggtagcatt

SEQ ID NO: 177628 - DNA, 25 bp, SARS Virus
cgtaattatgtccgtggtagcattg

SEQ ID NO: 177629 - DNA, 25 bp, SARS Virus
gtaattatgtcgctggtagcattgt

SEQ ID NO: 177630 - DNA, 25 bp, SARS Virus
taattatgtcggcggtagcattgtt

SEQ ID NO: 177631 - DNA, 25 bp, SARS Virus
aattatgtcggtcgtagcattgtta

SEQ ID NO: 177632 - DNA, 25 bp, SARS Virus
attatgtcggtgctagcattgttag

SEQ ID NO: 177633 - DNA, 25 bp, SARS Virus
ttatgtcggtggcagcattgttagt

SEQ ID NO: 177634 - DNA, 25 bp, SARS Virus
tatgtcggtggtcgcattgttagtt

SEQ ID NO: 177635 - DNA, 25 bp, SARS Virus
atgtcggtggtaccattgttagttt

SEQ ID NO: 177636 - DNA, 25 bp, SARS Virus
tgtcggtggtagcattgttagtttc

SEQ ID NO: 177637 - DNA, 25 bp, SARS Virus
gtcggtggtagccttgttagtttca

SEQ ID NO: 177638 - DNA, 25 bp, SARS Virus
tcggtggtagcactgttagtttcat

SEQ ID NO: 177639 - DNA, 25 bp, SARS Virus
cggtggtagcatcgttagtttcata

SEQ ID NO: 177640 - DNA, 25 bp, SARS Virus
ggtggtagcattcttagtttcataa

SEQ ID NO: 177641 - DNA, 25 bp, SARS Virus
gtggtagcattgctagtttcataaa

SEQ ID NO: 177642 - DNA, 25 bp, SARS Virus
tggtagcattgtcagtttcataaat

SEQ ID NO: 177643 - DNA, 25 bp, SARS Virus
ggtagcattgttcgtttcataaata

SEQ ID NO: 177644 - DNA, 25 bp, SARS Virus
gtagcattgttactttcataaatag

SEQ ID NO: 177645 - DNA, 25 bp, SARS Virus
tagcattgttagcttcataaatagt

SEQ ID NO: 177646 - DNA, 25 bp, SARS Virus
agcattgttagtctcataaatagtt

SEQ ID NO: 177647 - DNA, 25 bp, SARS Virus
gcattgttagttccataaatagttg

SEQ ID NO: 177648 - DNA, 25 bp, SARS Virus
cattgttagtttcataaatagttgt

SEQ ID NO: 177649 - DNA, 25 bp, SARS Virus
attgttagtttcctaaatagttgtt

SEQ ID NO: 177650 - DNA, 25 bp, SARS Virus
ttgttagtttcacaaatagttgttg

SEQ ID NO: 177651 - DNA, 25 bp, SARS Virus
tgttagtttcatcaatagttgttga

SEQ ID NO: 177652 - DNA, 25 bp, SARS Virus
gttagtttcatacatagttgttgaa

SEQ ID NO: 177653 - DNA, 25 bp, SARS Virus
ttagtttcataactagttgttgaag

SEQ ID NO: 177654 - DNA, 25 bp, SARS Virus
tagtttcataaacagttgttgaagt

SEQ ID NO: 177655 - DNA, 25 bp, SARS Virus
agtttcataaatcgttgttgaagtt

SEQ ID NO: 177656 - DNA, 25 bp, SARS Virus
gtttcataaatacttgttgaagttg

SEQ ID NO: 177657 - DNA, 25 bp, SARS Virus
tttcataaatagctgttgaagttga

SEQ ID NO: 177658 - DNA, 25 bp, SARS Virus
ttcataaatagtcgttgaagttgat

SEQ ID NO: 177659 - DNA, 25 bp, SARS Virus
tcataaatagttcttgaagttgatg

SEQ ID NO: 177660 - DNA, 25 bp, SARS Virus
cataaatagttgctgaagttgatgc

SEQ ID NO: 177661 - DNA, 25 bp, SARS Virus
ataaatagttgtcgaagttgatgct

SEQ ID NO: 177662 - DNA, 25 bp, SARS Virus
taaatagttgttcaagttgatgctt

SEQ ID NO: 177663 - DNA, 25 bp, SARS Virus
aaatagttgttgcagttgatgctta

SEQ ID NO: 177664 - DNA, 25 bp, SARS Virus
aatagttgttgacgttgatgcttat

SEQ ID NO: 177665 - DNA, 25 bp, SARS Virus
cgctcgttcttggtctctccggtaa

SEQ ID NO: 177666 - DNA, 25 bp, SARS Virus
gctcgttcttgtgctctccggtaat

SEQ ID NO: 177667 - DNA, 25 bp, SARS Virus
ctcgttcttgttgtctccggtaata

SEQ ID NO: 177668 - DNA, 25 bp, SARS Virus
tcgttcttgttcgctccggtaatag

SEQ ID NO: 177669 - DNA, 25 bp, SARS Virus
cgttcttgttctgtccggtaatagg

SEQ ID NO: 177670 - DNA, 25 bp, SARS Virus
gttcttgttctcgccggtaatagga

SEQ ID NO: 177671 - DNA, 25 bp, SARS Virus
ttcttgttctctgcggtaataggat

SEQ ID NO: 177672 - DNA, 25 bp, SARS Virus
tcttgttctctcgggtaataggatt

SEQ ID NO: 177673 - DNA, 25 bp, SARS Virus
cttgttctctccggtaataggattc

SEQ ID NO: 177674 - DNA, 25 bp, SARS Virus
ttgttctctccggtaataggattcg

SEQ ID NO: 177675 - DNA, 25 bp, SARS Virus
tgttctctccgggaataggattcgt

SEQ ID NO: 177676 - DNA, 25 bp, SARS Virus
gttctctccggtgataggattcgta

SEQ ID NO: 177677 - DNA, 25 bp, SARS Virus
ttctctccggtagtaggattcgtac

SEQ ID NO: 177678 - DNA, 25 bp, SARS Virus
tctctccggtaagaggattcgtaca

SEQ ID NO: 177679 - DNA, 25 bp, SARS Virus
ctctccggtaatgggattcgtacaa

SEQ ID NO: 177680 - DNA, 25 bp, SARS Virus
tctccggtaataggattcgtacaat

SEQ ID NO: 177681 - DNA, 25 bp, SARS Virus
ctccggtaataggattcgtacaatc

SEQ ID NO: 177682 - DNA, 25 bp, SARS Virus
tccggtaatagggttcgtacaatcc

SEQ ID NO: 177683 - DNA, 25 bp, SARS Virus
ccggtaataggagtcgtacaatccg

SEQ ID NO: 177684 - DNA, 25 bp, SARS Virus
cggtaataggatgcgtacaatccgt

SEQ ID NO: 177685 - DNA, 25 bp, SARS Virus
ggtaataggattggtacaatccgta

SEQ ID NO: 177686 - DNA, 25 bp, SARS Virus
gtaataggattcgtacaatccgtac

SEQ ID NO: 177687 - DNA, 25 bp, SARS Virus
taataggattcggacaatccgtacc

SEQ ID NO: 177688 - DNA, 25 bp, SARS Virus
aataggattcgtgcaatccgtaccg

SEQ ID NO: 177689 - DNA, 25 bp, SARS Virus
ataggattcgtagaatccgtaccga

SEQ ID NO: 177690 - DNA, 25 bp, SARS Virus
taggattcgtacgatccgtaccgag

SEQ ID NO: 177691 - DNA, 25 bp, SARS Virus
aggattcgtacagtccgtaccgaga

SEQ ID NO: 177692 - DNA, 25 bp, SARS Virus
ggattcgtacaagccgtaccgagac

SEQ ID NO: 177693 - DNA, 25 bp, SARS Virus
gattcgtacaatgcgtaccgagaca

SEQ ID NO: 177694 - DNA, 25 bp, SARS Virus
attcgtacaatcggtaccgagacag

SEQ ID NO: 177695 - DNA, 25 bp, SARS Virus
ttcgtacaatccgtaccgagacagt

SEQ ID NO: 177696 - DNA, 25 bp, SARS Virus
tcgtacaatccggaccgagacagtg

SEQ ID NO: 177697 - DNA, 25 bp, SARS Virus
cgtacaatccgtgccgagacagtgt

SEQ ID NO: 177698 - DNA, 25 bp, SARS Virus
gtacaatccgtagcgagacagtgta

SEQ ID NO: 177699 - DNA, 25 bp, SARS Virus
tacaatccgtacggagacagtgtaa

SEQ ID NO: 177700 - DNA, 25 bp, SARS Virus
acaatccgtaccgagacagtgtaaa

SEQ ID NO: 177701 - DNA, 25 bp, SARS Virus
caatccgtaccgggacagtgtaaaa

SEQ ID NO: 177702 - DNA, 25 bp, SARS Virus
aatccgtaccgagacagtgtaaaac

SEQ ID NO: 177703 - DNA, 25 bp, SARS Virus
atccgtaccgaggcagtgtaaaacc

SEQ ID NO: 177704 - DNA, 25 bp, SARS Virus
tccgtaccgagagagtgtaaaacct

SEQ ID NO: 177705 - DNA, 25 bp, SARS Virus
ccgtaccgagacggtgtaaaaccta

SEQ ID NO: 177706 - DNA, 25 bp, SARS Virus
cgtaccgagacagtgtaaaacctat

SEQ ID NO: 177707 - DNA, 25 bp, SARS Virus
gtaccgagacagggtaaaacctatt

SEQ ID NO: 177708 - DNA, 25 bp, SARS Virus
taccgagacagtgtaaaacctatta

SEQ ID NO: 177709 - DNA, 25 bp, SARS Virus
accgagacagtggaaaacctattag

SEQ ID NO: 177710 - DNA, 25 bp, SARS Virus
ccgagacagtgtgaaacctattagg

SEQ ID NO: 177711 - DNA, 25 bp, SARS Virus
cgagacagtgtagaacctattaggg

SEQ ID NO: 177712 - DNA, 25 bp, SARS Virus
gagacagtgtaagacctattagggt

SEQ ID NO: 177713 - DNA, 25 bp, SARS Virus
agacagtgtaaagcctattagggtt

SEQ ID NO: 177714 - DNA, 25 bp, SARS Virus
gacagtgtaaaagctattagggttg

SEQ ID NO: 177715 - DNA, 25 bp, SARS Virus
acagtgtaaaacgtattagggttgg

SEQ ID NO: 177716 - DNA, 25 bp, SARS Virus
cagtgtaaaaccgattagggttggg

SEQ ID NO: 177717 - DNA, 25 bp, SARS Virus
agtgtaaaacctgttagggttgggt

SEQ ID NO: 177718 - DNA, 25 bp, SARS Virus
gtgtaaaacctagtagggttgggta

SEQ ID NO: 177719 - DNA, 25 bp, SARS Virus
tgtaaaacctatgagggttgggtat

SEQ ID NO: 177720 - DNA, 25 bp, SARS Virus
gtaaaacctattggggttgggtatt

SEQ ID NO: 177721 - DNA, 25 bp, SARS Virus
taaaacctattagggttgggtattc

SEQ ID NO: 177722 - DNA, 25 bp, SARS Virus
aaaacctattagggttgggtattcc

SEQ ID NO: 177723 - DNA, 25 bp, SARS Virus
aaacctattagggttgggtattcca

SEQ ID NO: 177724 - DNA, 25 bp, SARS Virus
aacctattaggggtgggtattccac

SEQ ID NO: 177725 - DNA, 25 bp, SARS Virus
acctattagggtggggtattccaca

SEQ ID NO: 177726 - DNA, 25 bp, SARS Virus
cctattagggttgggtattccacac

SEQ ID NO: 177727 - DNA, 25 bp, SARS Virus
ctattagggttgggtattccacacc

SEQ ID NO: 177728 - DNA, 25 bp, SARS Virus
tattagggttgggtattccacacct

SEQ ID NO: 177729 - DNA, 25 bp, SARS Virus
attagggttggggattccacacctc

SEQ ID NO: 177730 - DNA, 25 bp, SARS Virus
ttagggttgggtgttccacacctca

SEQ ID NO: 177731 - DNA, 25 bp, SARS Virus
tagggttgggtagtccacacctcaa

SEQ ID NO: 177732 - DNA, 25 bp, SARS Virus
agggttgggtatgccacacctcaaa

SEQ ID NO: 177733 - DNA, 25 bp, SARS Virus
gggttgggtattgcacacctcaaag

SEQ ID NO: 177734 - DNA, 25 bp, SARS Virus
ggttgggtattcgacacctcaaaga

SEQ ID NO: 177735 - DNA, 25 bp, SARS Virus
gttgggtattccgcacctcaaagat

SEQ ID NO: 177736 - DNA, 25 bp, SARS Virus
ttgggtattccagacctcaaagatg

SEQ ID NO: 177737 - DNA, 25 bp, SARS Virus
tgggtattccacgcctcaaagatgt

SEQ ID NO: 177738 - DNA, 25 bp, SARS Virus
gggtattccacagctcaaagatgta

SEQ ID NO: 177739 - DNA, 25 bp, SARS Virus
ggtattccacacgtcaaagatgtag

SEQ ID NO: 177740 - DNA, 25 bp, SARS Virus
gtattccacaccgcaaagatgtagt

SEQ ID NO: 177741 - DNA, 25 bp, SARS Virus
tattccacacctgaaagatgtagtg

SEQ ID NO: 177742 - DNA, 25 bp, SARS Virus
attccacacctcgaagatgtagtga

SEQ ID NO: 177743 - DNA, 25 bp, SARS Virus
ttccacacctcagagatgtagtgac

SEQ ID NO: 177744 - DNA, 25 bp, SARS Virus
tccacacctcaaggatgtagtgaca

SEQ ID NO: 177745 - DNA, 25 bp, SARS Virus
ccacacctcaaagatgtagtgacat

SEQ ID NO: 177746 - DNA, 25 bp, SARS Virus
cacacctcaaaggtgtagtgacatt

SEQ ID NO: 177747 - DNA, 25 bp, SARS Virus
acacctcaaagaggtagtgacattt

SEQ ID NO: 177748 - DNA, 25 bp, SARS Virus
cacctcaaagatgtagtgacatttg

SEQ ID NO: 177749 - DNA, 25 bp, SARS Virus
acctcaaagatggagtgacatttgt

SEQ ID NO: 177750 - DNA, 25 bp, SARS Virus
cctcaaagatgtggtgacatttgtc

SEQ ID NO: 177751 - DNA, 25 bp, SARS Virus
ctcaaagatgtagtgacatttgtca

SEQ ID NO: 177752 - DNA, 25 bp, SARS Virus
tcaaagatgtagggacatttgtcaa

SEQ ID NO: 177753 - DNA, 25 bp, SARS Virus
caaagatgtagtgacatttgtcaaa

SEQ ID NO: 177754 - DNA, 25 bp, SARS Virus
aaagatgtagtggcatttgtcaaaa

SEQ ID NO: 177755 - DNA, 25 bp, SARS Virus
aagatgtagtgagatttgtcaaaaa

SEQ ID NO: 177756 - DNA, 25 bp, SARS Virus
agatgtagtgacgtttgtcaaaaat

SEQ ID NO: 177757 - DNA, 25 bp, SARS Virus
gatgtagtgacagttgtcaaaaatt

SEQ ID NO: 177758 - DNA, 25 bp, SARS Virus
atgtagtgacatgtgtcaaaaattg

SEQ ID NO: 177759 - DNA, 25 bp, SARS Virus
tgtagtgacattggtcaaaaattgt

SEQ ID NO: 177760 - DNA, 25 bp, SARS Virus
gtagtgacatttgtcaaaaattgta

SEQ ID NO: 177761 - DNA, 25 bp, SARS Virus
tagtgacatttggcaaaaattgtat

SEQ ID NO: 177762 - DNA, 25 bp, SARS Virus
agtgacatttgtgaaaaattgtata

SEQ ID NO: 177763 - DNA, 25 bp, SARS Virus
gtgacatttgtcgaaaattgtataa

SEQ ID NO: 177764 - DNA, 25 bp, SARS Virus
tgacatttgtcagaaattgtataat

SEQ ID NO: 177765 - DNA, 25 bp, SARS Virus
gacatttgtcaagaattgtataata

SEQ ID NO: 177766 - DNA, 25 bp, SARS Virus
acatttgtcaaagattgtataatac

SEQ ID NO: 177767 - DNA, 25 bp, SARS Virus
catttgtcaaaagttgtataatacg

SEQ ID NO: 177768 - DNA, 25 bp, SARS Virus
atttgtcaaaaagtgtataatacgg

SEQ ID NO: 177769 - DNA, 25 bp, SARS Virus
tttgtcaaaaatggtataatacggt

SEQ ID NO: 177770 - DNA, 25 bp, SARS Virus
ttgtcaaaaattgtataatacggtc

SEQ ID NO: 177771 - DNA, 25 bp, SARS Virus
tgtcaaaaattggataatacggtcg

SEQ ID NO: 177772 - DNA, 25 bp, SARS Virus
gtcaaaaattgtgtaatacggtcgg

SEQ ID NO: 177773 - DNA, 25 bp, SARS Virus
tcaaaaattgtagaatacggtcggt

SEQ ID NO: 177774 - DNA, 25 bp, SARS Virus
caaaaattgtatgatacggtcggtg

SEQ ID NO: 177775 - DNA, 25 bp, SARS Virus
aaaaattgtatagtacggtcggtgg

SEQ ID NO: 177776 - DNA, 25 bp, SARS Virus
aaaattgtataagacggtcggtggc

SEQ ID NO: 177777 - DNA, 25 bp, SARS Virus
aaattgtataatgcggtcggtggca

SEQ ID NO: 177778 - DNA, 25 bp, SARS Virus
aattgtataatagggtcggtggcat

SEQ ID NO: 177779 - DNA, 25 bp, SARS Virus
attgtataatacggtcggtggcatt

SEQ ID NO: 177780 - DNA, 25 bp, SARS Virus
ttgtataatacggtcggtggcattt

SEQ ID NO: 177781 - DNA, 25 bp, SARS Virus
tgtataatacgggcggtggcatttt

SEQ ID NO: 177782 - DNA, 25 bp, SARS Virus
gtataatacggtgggtggcattttg

SEQ ID NO: 177783 - DNA, 25 bp, SARS Virus
tataatacggtcggtggcattttga

SEQ ID NO: 177784 - DNA, 25 bp, SARS Virus
ataatacggtcggtggcattttgaa

SEQ ID NO: 177785 - DNA, 25 bp, SARS Virus
taatacggtcgggggcattttgaac

SEQ ID NO: 177786 - DNA, 25 bp, SARS Virus
aatacggtcggtggcattttgaacg

SEQ ID NO: 177787 - DNA, 25 bp, SARS Virus
atacggtcggtggcattttgaacga

SEQ ID NO: 177788 - DNA, 25 bp, SARS Virus
tacggtcggtgggattttgaacgaa

SEQ ID NO: 177789 - DNA, 25 bp, SARS Virus
acggtcggtggcgttttgaacgaac

SEQ ID NO: 177790 - DNA, 25 bp, SARS Virus
cggtcggtggcagtttgaacgaaca

SEQ ID NO: 177791 - DNA, 25 bp, SARS Virus
ggtcggtggcatgttgaacgaacaa

SEQ ID NO: 177792 - DNA, 25 bp, SARS Virus
gtcggtggcattgtgaacgaacaag

SEQ ID NO: 177793 - DNA, 25 bp, SARS Virus
tcggtggcatttggaacgaacaagg

SEQ ID NO: 177794 - DNA, 25 bp, SARS Virus
cggtggcattttgaacgaacaaggt

SEQ ID NO: 177795 - DNA, 25 bp, SARS Virus
ggtggcattttggacgaacaaggtt

SEQ ID NO: 177796 - DNA, 25 bp, SARS Virus
gtggcattttgagcgaacaaggtta

SEQ ID NO: 177797 - DNA, 25 bp, SARS Virus
tggcattttgaaggaacaaggttaa

SEQ ID NO: 177798 - DNA, 25 bp, SARS Virus
ggcattttgaacgaacaaggttaat

SEQ ID NO: 177799 - DNA, 25 bp, SARS Virus
gcattttgaacggacaaggttaatg

SEQ ID NO: 177800 - DNA, 25 bp, SARS Virus
cattttgaacgagcaaggttaatgg

SEQ ID NO: 177801 - DNA, 25 bp, SARS Virus
attttgaacgaagaaggttaatggt

SEQ ID NO: 177802 - DNA, 25 bp, SARS Virus
ttttgaacgaacgaggttaatggtg

SEQ ID NO: 177803 - DNA, 25 bp, SARS Virus
tttgaacgaacagggttaatggtgt

SEQ ID NO: 177804 - DNA, 25 bp, SARS Virus
ttgaacgaacaaggttaatggtgtc

SEQ ID NO: 177805 - DNA, 25 bp, SARS Virus
tgaacgaacaaggttaatggtgtca

SEQ ID NO: 177806 - DNA, 25 bp, SARS Virus
gaacgaacaagggtaatggtgtcat

SEQ ID NO: 177807 - DNA, 25 bp, SARS Virus
aacgaacaaggtgaatggtgtcatc

SEQ ID NO: 177808 - DNA, 25 bp, SARS Virus
acgaacaaggttgatggtgtcatcg

SEQ ID NO: 177809 - DNA, 25 bp, SARS Virus
cgaacaaggttagtggtgtcatcga

SEQ ID NO: 177810 - DNA, 25 bp, SARS Virus
gaacaaggttaagggtgtcatcgag

SEQ ID NO: 177811 - DNA, 25 bp, SARS Virus
aacaaggttaatggtgtcatcgagg

SEQ ID NO: 177812 - DNA, 25 bp, SARS Virus
acaaggttaatggtgtcatcgagga

SEQ ID NO: 177813 - DNA, 25 bp, SARS Virus
caaggttaatggggtcatcgaggag

SEQ ID NO: 177814 - DNA, 25 bp, SARS Virus
aaggttaatggtgtcatcgaggaga

SEQ ID NO: 177815 - DNA, 25 bp, SARS Virus
aggttaatggtggcatcgaggagat

SEQ ID NO: 177816 - DNA, 25 bp, SARS Virus
ggttaatggtgtgatcgaggagatc

SEQ ID NO: 177817 - DNA, 25 bp, SARS Virus
gttaatggtgtcgtcgaggagatca

SEQ ID NO: 177818 - DNA, 25 bp, SARS Virus
ttaatggtgtcagcgaggagatcac

SEQ ID NO: 177819 - DNA, 25 bp, SARS Virus
taatggtgtcatggaggagatcacc

SEQ ID NO: 177820 - DNA, 25 bp, SARS Virus
aatggtgtcatcgaggagatcaccg

SEQ ID NO: 177821 - DNA, 25 bp, SARS Virus
atggtgtcatcggggagatcaccgc

SEQ ID NO: 177822 - DNA, 25 bp, SARS Virus
tggtgtcatcgaggagatcaccgcc

SEQ ID NO: 177823 - DNA, 25 bp, SARS Virus
ggtgtcatcgaggagatcaccgccg

SEQ ID NO: 177824 - DNA, 25 bp, SARS Virus
gtgtcatcgaggggatcaccgccga

SEQ ID NO: 177825 - DNA, 25 bp, SARS Virus
tgtcatcgaggagatcaccgccgat

SEQ ID NO: 177826 - DNA, 25 bp, SARS Virus
gtcatcgaggaggtcaccgccgata

SEQ ID NO: 177827 - DNA, 25 bp, SARS Virus
tcatcgaggagagcaccgccgataa

SEQ ID NO: 177828 - DNA, 25 bp, SARS Virus
catcgaggagatgaccgccgataac

SEQ ID NO: 177829 - DNA, 25 bp, SARS Virus
atcgaggagatcgccgccgataact

SEQ ID NO: 177830 - DNA, 25 bp, SARS Virus
tcgaggagatcagcgccgataactg

SEQ ID NO: 177831 - DNA, 25 bp, SARS Virus
cgaggagatcacggccgataactga

SEQ ID NO: 177832 - DNA, 25 bp, SARS Virus
gaggagatcaccgccgataactgaa

SEQ ID NO: 177833 - DNA, 25 bp, SARS Virus
aggagatcaccggcgataactgaag

SEQ ID NO: 177834 - DNA, 25 bp, SARS Virus
ggagatcaccgcggataactgaagt

SEQ ID NO: 177835 - DNA, 25 bp, SARS Virus
gagatcaccgccgataactgaagtt

SEQ ID NO: 177836 - DNA, 25 bp, SARS Virus
agatcaccgccggtaactgaagtta

SEQ ID NO: 177837 - DNA, 25 bp, SARS Virus
gatcaccgccgagaactgaagttat

SEQ ID NO: 177838 - DNA, 25 bp, SARS Virus
atcaccgccgatgactgaagttatt

SEQ ID NO: 177839 - DNA, 25 bp, SARS Virus
tcaccgccgatagctgaagttatta

SEQ ID NO: 177840 - DNA, 25 bp, SARS Virus
caccgccgataagtgaagttattaa

SEQ ID NO: 177841 - DNA, 25 bp, SARS Virus
accgccgataacggaagttattaaa

SEQ ID NO: 177842 - DNA, 25 bp, SARS Virus
ccgccgataactgaagttattaaag

SEQ ID NO: 177843 - DNA, 25 bp, SARS Virus
cgccgataactggagttattaaaga

SEQ ID NO: 177844 - DNA, 25 bp, SARS Virus
gccgataactgaggttattaaagac

SEQ ID NO: 177845 - DNA, 25 bp, SARS Virus
ccgataactgaagttattaaagact

SEQ ID NO: 177846 - DNA, 25 bp, SARS Virus
cgataactgaaggtattaaagacta

SEQ ID NO: 177847 - DNA, 25 bp, SARS Virus
gataactgaagtgattaaagactac

SEQ ID NO: 177848 - DNA, 25 bp, SARS Virus
ataactgaagttgttaaagactact

SEQ ID NO: 177849 - DNA, 25 bp, SARS Virus
taactgaagttagtaaagactactt

SEQ ID NO: 177850 - DNA, 25 bp, SARS Virus
aactgaagttatgaaagactacttt

SEQ ID NO: 177851 - DNA, 25 bp, SARS Virus
actgaagttattgaagactactttg

SEQ ID NO: 177852 - DNA, 25 bp, SARS Virus
ctgaagttattagagactactttga

SEQ ID NO: 177853 - DNA, 25 bp, SARS Virus
tgaagttattaaggactactttgac

SEQ ID NO: 177854 - DNA, 25 bp, SARS Virus
gaagttattaaagactactttgaca

SEQ ID NO: 177855 - DNA, 25 bp, SARS Virus
aagttattaaaggctactttgacag

SEQ ID NO: 177856 - DNA, 25 bp, SARS Virus
agttattaaagagtactttgacaga

SEQ ID NO: 177857 - DNA, 25 bp, SARS Virus
gttattaaagacgactttgacagat

SEQ ID NO: 177858 - DNA, 25 bp, SARS Virus
ttattaaagactgctttgacagata

SEQ ID NO: 177859 - DNA, 25 bp, SARS Virus
tattaaagactagtttgacagataa

SEQ ID NO: 177860 - DNA, 25 bp, SARS Virus
attaaagactacgttgacagataaa

SEQ ID NO: 177861 - DNA, 25 bp, SARS Virus
ttaaagactactgtgacagataaac

SEQ ID NO: 177862 - DNA, 25 bp, SARS Virus
taaagactacttggacagataaaca

SEQ ID NO: 177863 - DNA, 25 bp, SARS Virus
aaagactactttgacagataaacag

SEQ ID NO: 177864 - DNA, 25 bp, SARS Virus
aagactactttggcagataaacagt

SEQ ID NO: 177865 - DNA, 25 bp, SARS Virus
agactactttgagagataaacagta

SEQ ID NO: 177866 - DNA, 25 bp, SARS Virus
gactactttgacggataaacagtat

SEQ ID NO: 177867 - DNA, 25 bp, SARS Virus
actactttgacagataaacagtatc

SEQ ID NO: 177868 - DNA, 25 bp, SARS Virus
ctactttgacaggtaaacagtatca

SEQ ID NO: 177869 - DNA, 25 bp, SARS Virus
tactttgacagagaaacagtatcat

SEQ ID NO: 177870 - DNA, 25 bp, SARS Virus
actttgacagatgaacagtatcatg

SEQ ID NO: 177871 - DNA, 25 bp, SARS Virus
ctttgacagatagacagtatcatga

SEQ ID NO: 177872 - DNA, 25 bp, SARS Virus
tttgacagataagcagtatcatgat

SEQ ID NO: 177873 - DNA, 25 bp, SARS Virus
ttgacagataaagagtatcatgatg

SEQ ID NO: 177874 - DNA, 25 bp, SARS Virus
tgacagataaacggtatcatgatgt

SEQ ID NO: 177875 - DNA, 25 bp, SARS Virus
gacagataaacagtatcatgatgtc

SEQ ID NO: 177876 - DNA, 25 bp, SARS Virus
acagataaacaggatcatgatgtct

SEQ ID NO: 177877 - DNA, 25 bp, SARS Virus
cagataaacagtgtcatgatgtcta

SEQ ID NO: 177878 - DNA, 25 bp, SARS Virus
agataaacagtagcatgatgtctat

SEQ ID NO: 177879 - DNA, 25 bp, SARS Virus
gataaacagtatgatgatgtctatc

SEQ ID NO: 177880 - DNA, 25 bp, SARS Virus
ataaacagtatcgtgatgtctatct

SEQ ID NO: 177881 - DNA, 25 bp, SARS Virus
taaacagtatcaggatgtctatctc

SEQ ID NO: 177882 - DNA, 25 bp, SARS Virus
aaacagtatcatgatgtctatctct

SEQ ID NO: 177883 - DNA, 25 bp, SARS Virus
aacagtatcatggtgtctatctctg

SEQ ID NO: 177884 - DNA, 25 bp, SARS Virus
acagtatcatgaggtctatctctgt

SEQ ID NO: 177885 - DNA, 25 bp, SARS Virus
cagtatcatgatgtctatctctgtg

SEQ ID NO: 177886 - DNA, 25 bp, SARS Virus
agtatcatgatggctatctctgtgg

SEQ ID NO: 177887 - DNA, 25 bp, SARS Virus
gtatcatgatgtgtatctctgtggt

SEQ ID NO: 177888 - DNA, 25 bp, SARS Virus
tatcatgatgtcgatctctgtggtc

SEQ ID NO: 177889 - DNA, 25 bp, SARS Virus
atcatgatgtctgtctctgtggtcg

SEQ ID NO: 177890 - DNA, 25 bp, SARS Virus
tcatgatgtctagctctgtggtcga

SEQ ID NO: 177891 - DNA, 25 bp, SARS Virus
catgatgtctatgtctgtggtcgat

SEQ ID NO: 177892 - DNA, 25 bp, SARS Virus
atgatgtctatcgctgtggtcgatg

SEQ ID NO: 177893 - DNA, 25 bp, SARS Virus
tgatgtctatctgtgtggtcgatgc

SEQ ID NO: 177894 - DNA, 25 bp, SARS Virus
gatgtctatctcggtggtcgatgcc

SEQ ID NO: 177895 - DNA, 25 bp, SARS Virus
atgtctatctctgtggtcgatgcca

SEQ ID NO: 177896 - DNA, 25 bp, SARS Virus
tgtctatctctggggtcgatgccac

SEQ ID NO: 177897 - DNA, 25 bp, SARS Virus
gtctatctctgtggtcgatgccacg

SEQ ID NO: 177898 - DNA, 25 bp, SARS Virus
tctatctctgtggtcgatgccacgc

SEQ ID NO: 177899 - DNA, 25 bp, SARS Virus
ctatctctgtgggcgatgccacgct

SEQ ID NO: 177900 - DNA, 25 bp, SARS Virus
tatctctgtggtggatgccacgctc

SEQ ID NO: 177901 - DNA, 25 bp, SARS Virus
atctctgtggtcgatgccacgctcg

SEQ ID NO: 177902 - DNA, 25 bp, SARS Virus
tctctgtggtcggtgccacgctcga

SEQ ID NO: 177903 - DNA, 25 bp, SARS Virus
ctctgtggtcgaggccacgctcgag

SEQ ID NO: 177904 - DNA, 25 bp, SARS Virus
tctgtggtcgatgccacgctcgaga

SEQ ID NO: 177905 - DNA, 25 bp, SARS Virus
ctgtggtcgatggcacgctcgagat

SEQ ID NO: 177906 - DNA, 25 bp, SARS Virus
tgtggtcgatgcgacgctcgagata

SEQ ID NO: 177907 - DNA, 25 bp, SARS Virus
gtggtcgatgccgcgctcgagataa

SEQ ID NO: 177908 - DNA, 25 bp, SARS Virus
tggtcgatgccaggctcgagataag

SEQ ID NO: 177909 - DNA, 25 bp, SARS Virus
ggtcgatgccacgctcgagataaga

SEQ ID NO: 177910 - DNA, 25 bp, SARS Virus
gtcgatgccacggtcgagataagaa

SEQ ID NO: 177911 - DNA, 25 bp, SARS Virus
tcgatgccacgcgcgagataagaaa

SEQ ID NO: 177912 - DNA, 25 bp, SARS Virus
cgatgccacgctggagataagaaac

SEQ ID NO: 177913 - DNA, 25 bp, SARS Virus
gatgccacgctcgagataagaaacg

SEQ ID NO: 177914 - DNA, 25 bp, SARS Virus
atgccacgctcgggataagaaacgt

SEQ ID NO: 177915 - DNA, 25 bp, SARS Virus
tgccacgctcgagataagaaacgtg

SEQ ID NO: 177916 - DNA, 25 bp, SARS Virus
gccacgctcgaggtaagaaacgtga

SEQ ID NO: 177917 - DNA, 25 bp, SARS Virus
ccacgctcgagagaagaaacgtgat

SEQ ID NO: 177918 - DNA, 25 bp, SARS Virus
cacgctcgagatgagaaacgtgatt

SEQ ID NO: 177919 - DNA, 25 bp, SARS Virus
acgctcgagataggaaacgtgatta

SEQ ID NO: 177920 - DNA, 25 bp, SARS Virus
cgctcgagataagaaacgtgattac

SEQ ID NO: 177921 - DNA, 25 bp, SARS Virus
gctcgagataaggaacgtgattacc

SEQ ID NO: 177922 - DNA, 25 bp, SARS Virus
ctcgagataagagacgtgattaccg

SEQ ID NO: 177923 - DNA, 25 bp, SARS Virus
tcgagataagaagcgtgattaccgt

SEQ ID NO: 177924 - DNA, 25 bp, SARS Virus
cgagataagaaaggtgattaccgta

SEQ ID NO: 177925 - DNA, 25 bp, SARS Virus
gagataagaaacgtgattaccgtat

SEQ ID NO: 177926 - DNA, 25 bp, SARS Virus
agataagaaacgggattaccgtatg

SEQ ID NO: 177927 - DNA, 25 bp, SARS Virus
gataagaaacgtgattaccgtatga

SEQ ID NO: 177928 - DNA, 25 bp, SARS Virus
ataagaaacgtggttaccgtatgaa

SEQ ID NO: 177929 - DNA, 25 bp, SARS Virus
taagaaacgtgagtaccgtatgaat

SEQ ID NO: 177930 - DNA, 25 bp, SARS Virus
aagaaacgtgatgaccgtatgaatt

SEQ ID NO: 177931 - DNA, 25 bp, SARS Virus
agaaacgtgattgccgtatgaattc

SEQ ID NO: 177932 - DNA, 25 bp, SARS Virus
gaaacgtgattagcgtatgaattct

SEQ ID NO: 177933 - DNA, 25 bp, SARS Virus
aaacgtgattacggtatgaattcta

SEQ ID NO: 177934 - DNA, 25 bp, SARS Virus
aacgtgattaccgtatgaattctaa

SEQ ID NO: 177935 - DNA, 25 bp, SARS Virus
acgtgattaccggatgaattctaag

SEQ ID NO: 177936 - DNA, 25 bp, SARS Virus
cgtgattaccgtgtgaattctaagt

SEQ ID NO: 177937 - DNA, 25 bp, SARS Virus
gtgattaccgtaggaattctaagta

SEQ ID NO: 177938 - DNA, 25 bp, SARS Virus
tgattaccgtatgaattctaagtaa

SEQ ID NO: 177939 - DNA, 25 bp, SARS Virus
gattaccgtatggattctaagtaaa

SEQ ID NO: 177940 - DNA, 25 bp, SARS Virus
attaccgtatgagttctaagtaaac

SEQ ID NO: 177941 - DNA, 25 bp, SARS Virus
ttaccgtatgaagtctaagtaaact

SEQ ID NO: 177942 - DNA, 25 bp, SARS Virus
taccgtatgaatgctaagtaaactc

SEQ ID NO: 177943 - DNA, 25 bp, SARS Virus
accgtatgaattgtaagtaaactca

SEQ ID NO: 177944 - DNA, 25 bp, SARS Virus
ccgtatgaattcgaagtaaactcaa

SEQ ID NO: 177945 - DNA, 25 bp, SARS Virus
cgtatgaattctgagtaaactcaat

SEQ ID NO: 177946 - DNA, 25 bp, SARS Virus
gtatgaattctaggtaaactcaata

SEQ ID NO: 177947 - DNA, 25 bp, SARS Virus
tatgaattctaagtaaactcaatat

SEQ ID NO: 177948 - DNA, 25 bp, SARS Virus
atgaattctaaggaaactcaatatc

SEQ ID NO: 177949 - DNA, 25 bp, SARS Virus
tgaattctaagtgaactcaatatca

SEQ ID NO: 177950 - DNA, 25 bp, SARS Virus
gaattctaagtagactcaatatcat

SEQ ID NO: 177951 - DNA, 25 bp, SARS Virus
aattctaagtaagctcaatatcatc

SEQ ID NO: 177952 - DNA, 25 bp, SARS Virus
attctaagtaaagtcaatatcatcc

SEQ ID NO: 177953 - DNA, 25 bp, SARS Virus
ttctaagtaaacgcaatatcatccc

SEQ ID NO: 177954 - DNA, 25 bp, SARS Virus
tctaagtaaactgaatatcatccct

SEQ ID NO: 177955 - DNA, 25 bp, SARS Virus
ctaagtaaactcgatatcatcccta

SEQ ID NO: 177956 - DNA, 25 bp, SARS Virus
taagtaaactcagtatcatccctac

SEQ ID NO: 177957 - DNA, 25 bp, SARS Virus
aagtaaactcaagatcatccctact

SEQ ID NO: 177958 - DNA, 25 bp, SARS Virus
agtaaactcaatgtcatccctactg

SEQ ID NO: 177959 - DNA, 25 bp, SARS Virus
gtaaactcaatagcatccctactgt

SEQ ID NO: 177960 - DNA, 25 bp, SARS Virus
taaactcaatatgatccctactgta

SEQ ID NO: 177961 - DNA, 25 bp, SARS Virus
aaactcaatatcgtccctactgtaa

SEQ ID NO: 177962 - DNA, 25 bp, SARS Virus
aactcaatatcagccctactgtaat

SEQ ID NO: 177963 - DNA, 25 bp, SARS Virus
actcaatatcatgcctactgtaatg

SEQ ID NO: 177964 - DNA, 25 bp, SARS Virus
ctcaatatcatcgctactgtaatgc

SEQ ID NO: 177965 - DNA, 25 bp, SARS Virus
tcaatatcatccgtactgtaatgcg

SEQ ID NO: 177966 - DNA, 25 bp, SARS Virus
caatatcatcccgactgtaatgcga

SEQ ID NO: 177967 - DNA, 25 bp, SARS Virus
aatatcatccctgctgtaatgcgaa

SEQ ID NO: 177968 - DNA, 25 bp, SARS Virus
atatcatccctagtgtaatgcgaat

SEQ ID NO: 177969 - DNA, 25 bp, SARS Virus
tatcatccctacggtaatgcgaatc

SEQ ID NO: 177970 - DNA, 25 bp, SARS Virus
atcatccctactgtaatgcgaatca

SEQ ID NO: 177971 - DNA, 25 bp, SARS Virus
tcatccctactggaatgcgaatcat

SEQ ID NO: 177972 - DNA, 25 bp, SARS Virus
catccctactgtgatgcgaatcata

SEQ ID NO: 177973 - DNA, 25 bp, SARS Virus
atccctactgtagtgcgaatcatat

SEQ ID NO: 177974 - DNA, 25 bp, SARS Virus
tccctactgtaaggcgaatcatatg

SEQ ID NO: 177975 - DNA, 25 bp, SARS Virus
ccctactgtaatgcgaatcatatgc

SEQ ID NO: 177976 - DNA, 25 bp, SARS Virus
cctactgtaatgggaatcatatgcg

SEQ ID NO: 177977 - DNA, 25 bp, SARS Virus
ctactgtaatgcgaatcatatgcgc

SEQ ID NO: 177978 - DNA, 25 bp, SARS Virus
tactgtaatgcggatcatatgcgct

SEQ ID NO: 177979 - DNA, 25 bp, SARS Virus
actgtaatgcgagtcatatgcgctt

SEQ ID NO: 177980 - DNA, 25 bp, SARS Virus
ctgtaatgcgaagcatatgcgcttt

SEQ ID NO: 177981 - DNA, 25 bp, SARS Virus
tgtaatgcgaatgatatgcgctttt

SEQ ID NO: 177982 - DNA, 25 bp, SARS Virus
gtaatgcgaatcgtatgcgcttttc

SEQ ID NO: 177983 - DNA, 25 bp, SARS Virus
taatgcgaatcagatgcgcttttca

SEQ ID NO: 177984 - DNA, 25 bp, SARS Virus
aatgcgaatcatgtgcgcttttcac

SEQ ID NO: 177985 - DNA, 25 bp, SARS Virus
atgcgaatcataggcgcttttcacg

SEQ ID NO: 177986 - DNA, 25 bp, SARS Virus
tgcgaatcatatgcgcttttcacgt

SEQ ID NO: 177987 - DNA, 25 bp, SARS Virus
gcgaatcatatgggcttttcacgta

SEQ ID NO: 177988 - DNA, 25 bp, SARS Virus
cgaatcatatgcgcttttcacgtag

SEQ ID NO: 177989 - DNA, 25 bp, SARS Virus
gaatcatatgcggttttcacgtaga

SEQ ID NO: 177990 - DNA, 25 bp, SARS Virus
aatcatatgcgcgtttcacgtagaa

SEQ ID NO: 177991 - DNA, 25 bp, SARS Virus
atcatatgcgctgttcacgtagaac

SEQ ID NO: 177992 - DNA, 25 bp, SARS Virus
tcatatgcgcttgtcacgtagaact

SEQ ID NO: 177993 - DNA, 25 bp, SARS Virus
catatgcgctttgcacgtagaacta

SEQ ID NO: 177994 - DNA, 25 bp, SARS Virus
atatgcgcttttgacgtagaactag

SEQ ID NO: 177995 - DNA, 25 bp, SARS Virus
tatgcgcttttcgcgtagaactagg

SEQ ID NO: 177996 - DNA, 25 bp, SARS Virus
atgcgcttttcaggtagaactagga

SEQ ID NO: 177997 - DNA, 25 bp, SARS Virus
tgcgcttttcacgtagaactaggag

SEQ ID NO: 177998 - DNA, 25 bp, SARS Virus
gcgcttttcacggagaactaggagt

SEQ ID NO: 177999 - DNA, 25 bp, SARS Virus
cgcttttcacgtggaactaggagta

SEQ ID NO: 178000 - DNA, 25 bp, SARS Virus
gcttttcacgtagaactaggagtat

SEQ ID NO: 178001 - DNA, 25 bp, SARS Virus
cttttcacgtaggactaggagtatt

SEQ ID NO: 178002 - DNA, 25 bp, SARS Virus
ttttcacgtagagctaggagtattg

SEQ ID NO: 178003 - DNA, 25 bp, SARS Virus
tttcacgtagaagtaggagtattga

SEQ ID NO: 178004 - DNA, 25 bp, SARS Virus
ttcacgtagaacgaggagtattgag

SEQ ID NO: 178005 - DNA, 25 bp, SARS Virus
tcacgtagaactgggagtattgagt

SEQ ID NO: 178006 - DNA, 25 bp, SARS Virus
cacgtagaactaggagtattgagta

SEQ ID NO: 178007 - DNA, 25 bp, SARS Virus
acgtagaactaggagtattgagtaa

SEQ ID NO: 178008 - DNA, 25 bp, SARS Virus
cgtagaactaggggtattgagtaac

SEQ ID NO: 178009 - DNA, 25 bp, SARS Virus
gtagaactaggagtattgagtaact

SEQ ID NO: 178010 - DNA, 25 bp, SARS Virus
tagaactaggaggattgagtaactc

SEQ ID NO: 178011 - DNA, 25 bp, SARS Virus
agaactaggagtgttgagtaactca

SEQ ID NO: 178012 - DNA, 25 bp, SARS Virus
gaactaggagtagtgagtaactcag

SEQ ID NO: 178013 - DNA, 25 bp, SARS Virus
aactaggagtatggagtaactcagt

SEQ ID NO: 178014 - DNA, 25 bp, SARS Virus
actaggagtattgagtaactcagta

SEQ ID NO: 178015 - DNA, 25 bp, SARS Virus
ctaggagtattgggtaactcagtat

SEQ ID NO: 178016 - DNA, 25 bp, SARS Virus
taggagtattgagtaactcagtatt

SEQ ID NO: 178017 - DNA, 25 bp, SARS Virus
aggagtattgaggaactcagtatta

SEQ ID NO: 178018 - DNA, 25 bp, SARS Virus
ggagtattgagtgactcagtattat

SEQ ID NO: 178019 - DNA, 25 bp, SARS Virus
gagtattgagtagctcagtattatt

SEQ ID NO: 178020 - DNA, 25 bp, SARS Virus
agtattgagtaagtcagtattattt

SEQ ID NO: 178021 - DNA, 25 bp, SARS Virus
gtattgagtaacgcagtattatttc

SEQ ID NO: 178022 - DNA, 25 bp, SARS Virus
tattgagtaactgagtattatttca

SEQ ID NO: 178023 - DNA, 25 bp, SARS Virus
attgagtaactcggtattatttcag

SEQ ID NO: 178024 - DNA, 25 bp, SARS Virus
ttgagtaactcagtattatttcaga

SEQ ID NO: 178025 - DNA, 25 bp, SARS Virus
tgagtaactcaggattatttcagat

SEQ ID NO: 178026 - DNA, 25 bp, SARS Virus
gagtaactcagtgttatttcagatc

SEQ ID NO: 178027 - DNA, 25 bp, SARS Virus
agtaactcagtagtatttcagatcg

SEQ ID NO: 178028 - DNA, 25 bp, SARS Virus
gtaactcagtatgatttcagatcgg

SEQ ID NO: 178029 - DNA, 25 bp, SARS Virus
taactcagtattgtttcagatcgga

SEQ ID NO: 178030 - DNA, 25 bp, SARS Virus
aactcagtattagttcagatcggaa

SEQ ID NO: 178031 - DNA, 25 bp, SARS Virus
actcagtattatgtcagatcggaat

SEQ ID NO: 178032 - DNA, 25 bp, SARS Virus
ctcagtattattgcagatcggaatg

SEQ ID NO: 178033 - DNA, 25 bp, SARS Virus
tcagtattatttgagatcggaatgg

SEQ ID NO: 178034 - DNA, 25 bp, SARS Virus
cagtattatttcggatcggaatggg

SEQ ID NO: 178035 - DNA, 25 bp, SARS Virus
agtattatttcagatcggaatgggg

SEQ ID NO: 178036 - DNA, 25 bp, SARS Virus
gtattatttcaggtcggaatggggt

SEQ ID NO: 178037 - DNA, 25 bp, SARS Virus
tattatttcagagcggaatggggta

SEQ ID NO: 178038 - DNA, 25 bp, SARS Virus
attatttcagatgggaatggggtaa

SEQ ID NO: 178039 - DNA, 25 bp, SARS Virus
ttatttcagatcggaatggggtaaa

SEQ ID NO: 178040 - DNA, 25 bp, SARS Virus
tatttcagatcggaatggggtaaat

SEQ ID NO: 178041 - DNA, 25 bp, SARS Virus
atttcagatcgggatggggtaaata

SEQ ID NO: 178042 - DNA, 25 bp, SARS Virus
tttcagatcggagtggggtaaataa

SEQ ID NO: 178043 - DNA, 25 bp, SARS Virus
ttcagatcggaagggggtaaataat

SEQ ID NO: 178044 - DNA, 25 bp, SARS Virus
tcagatcggaatggggtaaataatt

SEQ ID NO: 178045 - DNA, 25 bp, SARS Virus
cagatcggaatggggtaaataattt

SEQ ID NO: 178046 - DNA, 25 bp, SARS Virus
agatcggaatggggtaaataattta

SEQ ID NO: 178047 - DNA, 25 bp, SARS Virus
gatcggaatggggtaaataatttac

SEQ ID NO: 178048 - DNA, 25 bp, SARS Virus
atcggaatgggggaaataatttacc

SEQ ID NO: 178049 - DNA, 25 bp, SARS Virus
tcggaatggggtgaataatttaccc

SEQ ID NO: 178050 - DNA, 25 bp, SARS Virus
cggaatggggtagataatttaccct

SEQ ID NO: 178051 - DNA, 25 bp, SARS Virus
ggaatggggtaagtaatttaccctt

SEQ ID NO: 178052 - DNA, 25 bp, SARS Virus
gaatggggtaaagaatttacccttt

SEQ ID NO: 178053 - DNA, 25 bp, SARS Virus
aatggggtaaatgatttaccctttg

SEQ ID NO: 178054 - DNA, 25 bp, SARS Virus
atggggtaaatagtttaccctttgg

SEQ ID NO: 178055 - DNA, 25 bp, SARS Virus
tggggtaaataagttaccctttggt

SEQ ID NO: 178056 - DNA, 25 bp, SARS Virus
ggggtaaataatgtaccctttggtc

SEQ ID NO: 178057 - DNA, 25 bp, SARS Virus
gggtaaataattgaccctttggtcg

SEQ ID NO: 178058 - DNA, 25 bp, SARS Virus
ggtaaataatttgccctttggtcga

SEQ ID NO: 178059 - DNA, 25 bp, SARS Virus
gtaaataatttagcctttggtcgac

SEQ ID NO: 178060 - DNA, 25 bp, SARS Virus
taaataatttacgctttggtcgact

SEQ ID NO: 178061 - DNA, 25 bp, SARS Virus
aaataatttaccgtttggtcgacta

SEQ ID NO: 178062 - DNA, 25 bp, SARS Virus
aataatttacccgttggtcgactaa

SEQ ID NO: 178063 - DNA, 25 bp, SARS Virus
ataatttaccctgtggtcgactaaa

SEQ ID NO: 178064 - DNA, 25 bp, SARS Virus
taatttacccttgggtcgactaaat

SEQ ID NO: 178065 - DNA, 25 bp, SARS Virus
aatttaccctttggtcgactaaata

SEQ ID NO: 178066 - DNA, 25 bp, SARS Virus
atttaccctttggtcgactaaatag

SEQ ID NO: 178067 - DNA, 25 bp, SARS Virus
tttaccctttgggcgactaaatagg

SEQ ID NO: 178068 - DNA, 25 bp, SARS Virus
ttaccctttggtggactaaataggt

SEQ ID NO: 178069 - DNA, 25 bp, SARS Virus
taccctttggtcgactaaataggtc

SEQ ID NO: 178070 - DNA, 25 bp, SARS Virus
accctttggtcggctaaataggtct

SEQ ID NO: 178071 - DNA, 25 bp, SARS Virus
ccctttggtcgagtaaataggtcta

SEQ ID NO: 178072 - DNA, 25 bp, SARS Virus
cctttggtcgacgaaataggtctaa

SEQ ID NO: 178073 - DNA, 25 bp, SARS Virus
ctttggtcgactgaataggtctaac

SEQ ID NO: 178074 - DNA, 25 bp, SARS Virus
tttggtcgactagataggtctaaca

SEQ ID NO: 178075 - DNA, 25 bp, SARS Virus
ttggtcgactaagtaggtctaacaa

SEQ ID NO: 178076 - DNA, 25 bp, SARS Virus
tggtcgactaaagaggtctaacaat

SEQ ID NO: 178077 - DNA, 25 bp, SARS Virus
ggtcgactaaatgggtctaacaatt

SEQ ID NO: 178078 - DNA, 25 bp, SARS Virus
gtcgactaaataggtctaacaattg

SEQ ID NO: 178079 - DNA, 25 bp, SARS Virus
tcgactaaataggtctaacaattgc

SEQ ID NO: 178080 - DNA, 25 bp, SARS Virus
cgactaaatagggctaacaattgct

SEQ ID NO: 178081 - DNA, 25 bp, SARS Virus
gactaaataggtgtaacaattgcta

SEQ ID NO: 178082 - DNA, 25 bp, SARS Virus
actaaataggtcgaacaattgctaa

SEQ ID NO: 178083 - DNA, 25 bp, SARS Virus
ctaaataggtctgacaattgctaat

SEQ ID NO: 178084 - DNA, 25 bp, SARS Virus
taaataggtctagcaattgctaatg

SEQ ID NO: 178085 - DNA, 25 bp, SARS Virus
aaataggtctaagaattgctaatga

SEQ ID NO: 178086 - DNA, 25 bp, SARS Virus
aataggtctaacgattgctaatgaa

SEQ ID NO: 178087 - DNA, 25 bp, SARS Virus
ataggtctaacagttgctaatgaac

SEQ ID NO: 178088 - DNA, 25 bp, SARS Virus
taggtctaacaagtgctaatgaacc

SEQ ID NO: 178089 - DNA, 25 bp, SARS Virus
aggtctaacaatggctaatgaacca

SEQ ID NO: 178090 - DNA, 25 bp, SARS Virus
ggtctaacaattgctaatgaaccaa

SEQ ID NO: 178091 - DNA, 25 bp, SARS Virus
gtctaacaattggtaatgaaccaac

SEQ ID NO: 178092 - DNA, 25 bp, SARS Virus
tctaacaattgcgaatgaaccaacc

SEQ ID NO: 178093 - DNA, 25 bp, SARS Virus
ctaacaattgctgatgaaccaaccg

SEQ ID NO: 178094 - DNA, 25 bp, SARS Virus
taacaattgctagtgaaccaaccgt

SEQ ID NO: 178095 - DNA, 25 bp, SARS Virus
aacaattgctaaggaaccaaccgta

SEQ ID NO: 178096 - DNA, 25 bp, SARS Virus
acaattgctaatgaaccaaccgtaa

SEQ ID NO: 178097 - DNA, 25 bp, SARS Virus
caattgctaatggaccaaccgtaat

SEQ ID NO: 178098 - DNA, 25 bp, SARS Virus
aattgctaatgagccaaccgtaatt

SEQ ID NO: 178099 - DNA, 25 bp, SARS Virus
attgctaatgaagcaaccgtaatta

SEQ ID NO: 178100 - DNA, 25 bp, SARS Virus
ttgctaatgaacgaaccgtaattat

SEQ ID NO: 178101 - DNA, 25 bp, SARS Virus
tgctaatgaaccgaccgtaattatg

SEQ ID NO: 178102 - DNA, 25 bp, SARS Virus
gctaatgaaccagccgtaattatgt

SEQ ID NO: 178103 - DNA, 25 bp, SARS Virus
ctaatgaaccaagcgtaattatgtc

SEQ ID NO: 178104 - DNA, 25 bp, SARS Virus
taatgaaccaacggtaattatgtcg

SEQ ID NO: 178105 - DNA, 25 bp, SARS Virus
aatgaaccaaccgtaattatgtcgg

SEQ ID NO: 178106 - DNA, 25 bp, SARS Virus
atgaaccaaccggaattatgtcggt

SEQ ID NO: 178107 - DNA, 25 bp, SARS Virus
tgaaccaaccgtgattatgtcggtg

SEQ ID NO: 178108 - DNA, 25 bp, SARS Virus
gaaccaaccgtagttatgtcggtgg

SEQ ID NO: 178109 - DNA, 25 bp, SARS Virus
aaccaaccgtaagtatgtcggtggt

SEQ ID NO: 178110 - DNA, 25 bp, SARS Virus
accaaccgtaatgatgtcggtggta

SEQ ID NO: 178111 - DNA, 25 bp, SARS Virus
ccaaccgtaattgtgtcggtggtag

SEQ ID NO: 178112 - DNA, 25 bp, SARS Virus
caaccgtaattaggtcggtggtagc

SEQ ID NO: 178113 - DNA, 25 bp, SARS Virus
aaccgtaattatgtcggtggtagca

SEQ ID NO: 178114 - DNA, 25 bp, SARS Virus
accgtaattatggcggtggtagcat

SEQ ID NO: 178115 - DNA, 25 bp, SARS Virus
ccgtaattatgtgggtggtagcatt

SEQ ID NO: 178116 - DNA, 25 bp, SARS Virus
cgtaattatgtcggtggtagcattg

SEQ ID NO: 178117 - DNA, 25 bp, SARS Virus
gtaattatgtcggtggtagcattgt

SEQ ID NO: 178118 - DNA, 25 bp, SARS Virus
taattatgtcgggggtagcattgtt

SEQ ID NO: 178119 - DNA, 25 bp, SARS Virus
aattatgtcggtggtagcattgtta

SEQ ID NO: 178120 - DNA, 25 bp, SARS Virus
attatgtcggtggtagcattgttag

SEQ ID NO: 178121 - DNA, 25 bp, SARS Virus
ttatgtcggtgggagcattgttagt

SEQ ID NO: 178122 - DNA, 25 bp, SARS Virus
tatgtcggtggtggcattgttagtt

SEQ ID NO: 178123 - DNA, 25 bp, SARS Virus
atgtcggtggtagcattgttagttt

SEQ ID NO: 178124 - DNA, 25 bp, SARS Virus
tgtcggtggtaggattgttagtttc

SEQ ID NO: 178125 - DNA, 25 bp, SARS Virus
gtcggtggtagcgttgttagtttca

SEQ ID NO: 178126 - DNA, 25 bp, SARS Virus
tcggtggtagcagtgttagtttcat

SEQ ID NO: 178127 - DNA, 25 bp, SARS Virus
cggtggtagcatggttagtttcata

SEQ ID NO: 178128 - DNA, 25 bp, SARS Virus
ggtggtagcattgttagtttcataa

SEQ ID NO: 178129 - DNA, 25 bp, SARS Virus
gtggtagcattggtagtttcataaa

SEQ ID NO: 178130 - DNA, 25 bp, SARS Virus
tggtagcattgtgagtttcataaat

SEQ ID NO: 178131 - DNA, 25 bp, SARS Virus
ggtagcattgttggtttcataaata

SEQ ID NO: 178132 - DNA, 25 bp, SARS Virus
gtagcattgttagtttcataaatag

SEQ ID NO: 178133 - DNA, 25 bp, SARS Virus
tagcattgttaggttcataaatagt

SEQ ID NO: 178134 - DNA, 25 bp, SARS Virus
agcattgttagtgtcataaatagtt

SEQ ID NO: 178135 - DNA, 25 bp, SARS Virus
gcattgttagttgcataaatagttg

SEQ ID NO: 178136 - DNA, 25 bp, SARS Virus
cattgttagtttgataaatagttgt

SEQ ID NO: 178137 - DNA, 25 bp, SARS Virus
attgttagtttcgtaaatagttgtt

SEQ ID NO: 178138 - DNA, 25 bp, SARS Virus
ttgttagtttcagaaatagttgttg

SEQ ID NO: 178139 - DNA, 25 bp, SARS Virus
tgttagtttcatgaatagttgttga

SEQ ID NO: 178140 - DNA, 25 bp, SARS Virus
gttagtttcatagatagttgttgaa

SEQ ID NO: 178141 - DNA, 25 bp, SARS Virus
ttagtttcataagtagttgttgaag

SEQ ID NO: 178142 - DNA, 25 bp, SARS Virus
tagtttcataaagagttgttgaagt

SEQ ID NO: 178143 - DNA, 25 bp, SARS Virus
agtttcataaatggttgttgaagtt

SEQ ID NO: 178144 - DNA, 25 bp, SARS Virus
gtttcataaatagttgttgaagttg

SEQ ID NO: 178145 - DNA, 25 bp, SARS Virus
tttcataaataggtgttgaagttga

SEQ ID NO: 178146 - DNA, 25 bp, SARS Virus
ttcataaatagtggttgaagttgat

SEQ ID NO: 178147 - DNA, 25 bp, SARS Virus
tcataaatagttgttgaagttgatg

SEQ ID NO: 178148 - DNA, 25 bp, SARS Virus
cataaatagttggtgaagttgatgc

SEQ ID NO: 178149 - DNA, 25 bp, SARS Virus
ataaatagttgtggaagttgatgct

SEQ ID NO: 178150 - DNA, 25 bp, SARS Virus
taaatagttgttgaagttgatgctt

SEQ ID NO: 178151 - DNA, 25 bp, SARS Virus
aaatagttgttggagttgatgctta

SEQ ID NO: 178152 - DNA, 25 bp, SARS Virus
aatagttgttgaggttgatgcttat

SEQ ID NO: 178153 - DNA, 25 bp, SARS Virus
cgctcgttcttgttctctccggtaa

SEQ ID NO: 178154 - DNA, 25 bp, SARS Virus
gctcgttcttgttctctccggtaat

SEQ ID NO: 178155 - DNA, 25 bp, SARS Virus
ctcgttcttgttttctccggtaata

SEQ ID NO: 178156 - DNA, 25 bp, SARS Virus
tcgttcttgttctctccggtaatag

SEQ ID NO: 178157 - DNA, 25 bp, SARS Virus
cgttcttgttctttccggtaatagg

SEQ ID NO: 178158 - DNA, 25 bp, SARS Virus
gttcttgttctctccggtaatagga

SEQ ID NO: 178159 - DNA, 25 bp, SARS Virus
ttcttgttctcttcggtaataggat

SEQ ID NO: 178160 - DNA, 25 bp, SARS Virus
tcttgttctctctggtaataggatt

SEQ ID NO: 178161 - DNA, 25 bp, SARS Virus
cttgttctctcctgtaataggattc

SEQ ID NO: 178162 - DNA, 25 bp, SARS Virus
ttgttctctccgttaataggattcg

SEQ ID NO: 178163 - DNA, 25 bp, SARS Virus
tgttctctccggtaataggattcgt

SEQ ID NO: 178164 - DNA, 25 bp, SARS Virus
gttctctccggttataggattcgta

SEQ ID NO: 178165 - DNA, 25 bp, SARS Virus
ttctctccggtattaggattcgtac

SEQ ID NO: 178166 - DNA, 25 bp, SARS Virus
tctctccggtaataggattcgtaca

SEQ ID NO: 178167 - DNA, 25 bp, SARS Virus
ctctccggtaattggattcgtacaa

SEQ ID NO: 178168 - DNA, 25 bp, SARS Virus
tctccggtaatatgattcgtacaat

SEQ ID NO: 178169 - DNA, 25 bp, SARS Virus
ctccggtaatagtattcgtacaatc

SEQ ID NO: 178170 - DNA, 25 bp, SARS Virus
tccggtaataggtttcgtacaatcc

SEQ ID NO: 178171 - DNA, 25 bp, SARS Virus
ccggtaataggattcgtacaatccg

SEQ ID NO: 178172 - DNA, 25 bp, SARS Virus
cggtaataggattcgtacaatccgt

SEQ ID NO: 178173 - DNA, 25 bp, SARS Virus
ggtaataggatttgtacaatccgta

SEQ ID NO: 178174 - DNA, 25 bp, SARS Virus
gtaataggattcttacaatccgtac

SEQ ID NO: 178175 - DNA, 25 bp, SARS Virus
taataggattcgtacaatccgtacc

SEQ ID NO: 178176 - DNA, 25 bp, SARS Virus
aataggattcgttcaatccgtaccg

SEQ ID NO: 178177 - DNA, 25 bp, SARS Virus
ataggattcgtataatccgtaccga

SEQ ID NO: 178178 - DNA, 25 bp, SARS Virus
taggattcgtactatccgtaccgag

SEQ ID NO: 178179 - DNA, 25 bp, SARS Virus
aggattcgtacattccgtaccgaga

SEQ ID NO: 178180 - DNA, 25 bp, SARS Virus
ggattcgtacaatccgtaccgagac

SEQ ID NO: 178181 - DNA, 25 bp, SARS Virus
gattcgtacaattcgtaccgagaca

SEQ ID NO: 178182 - DNA, 25 bp, SARS Virus
attcgtacaatctgtaccgagacag

SEQ ID NO: 178183 - DNA, 25 bp, SARS Virus
ttcgtacaatccttaccgagacagt

SEQ ID NO: 178184 - DNA, 25 bp, SARS Virus
tcgtacaatccgtaccgagacagtg

SEQ ID NO: 178185 - DNA, 25 bp, SARS Virus
cgtacaatccgttccgagacagtgt

SEQ ID NO: 178186 - DNA, 25 bp, SARS Virus
gtacaatccgtatcgagacagtgta

SEQ ID NO: 178187 - DNA, 25 bp, SARS Virus
tacaatccgtactgagacagtgtaa

SEQ ID NO: 178188 - DNA, 25 bp, SARS Virus
acaatccgtacctagacagtgtaaa

SEQ ID NO: 178189 - DNA, 25 bp, SARS Virus
caatccgtaccgtgacagtgtaaaa

SEQ ID NO: 178190 - DNA, 25 bp, SARS Virus
aatccgtaccgatacagtgtaaaac

SEQ ID NO: 178191 - DNA, 25 bp, SARS Virus
atccgtaccgagtcagtgtaaaacc

SEQ ID NO: 178192 - DNA, 25 bp, SARS Virus
tccgtaccgagatagtgtaaaacct

SEQ ID NO: 178193 - DNA, 25 bp, SARS Virus
ccgtaccgagactgtgtaaaaccta

SEQ ID NO: 178194 - DNA, 25 bp, SARS Virus
cgtaccgagacattgtaaaacctat

SEQ ID NO: 178195 - DNA, 25 bp, SARS Virus
gtaccgagacagtgtaaaacctatt

SEQ ID NO: 178196 - DNA, 25 bp, SARS Virus
taccgagacagtttaaaacctatta

SEQ ID NO: 178197 - DNA, 25 bp, SARS Virus
accgagacagtgtaaaacctattag

SEQ ID NO: 178198 - DNA, 25 bp, SARS Virus
ccgagacagtgttaaacctattagg

SEQ ID NO: 178199 - DNA, 25 bp, SARS Virus
cgagacagtgtataacctattaggg

SEQ ID NO: 178200 - DNA, 25 bp, SARS Virus
gagacagtgtaatacctattagggt

SEQ ID NO: 178201 - DNA, 25 bp, SARS Virus
agacagtgtaaatcctattagggtt

SEQ ID NO: 178202 - DNA, 25 bp, SARS Virus
gacagtgtaaaatctattagggttg

SEQ ID NO: 178203 - DNA, 25 bp, SARS Virus
acagtgtaaaacttattagggttgg

SEQ ID NO: 178204 - DNA, 25 bp, SARS Virus
cagtgtaaaacctattagggttggg

SEQ ID NO: 178205 - DNA, 25 bp, SARS Virus
agtgtaaaaccttttagggttgggt

SEQ ID NO: 178206 - DNA, 25 bp, SARS Virus
gtgtaaaacctattagggttgggta

SEQ ID NO: 178207 - DNA, 25 bp, SARS Virus
tgtaaaacctattagggttgggtat

SEQ ID NO: 178208 - DNA, 25 bp, SARS Virus
gtaaaacctatttgggttgggtatt

SEQ ID NO: 178209 - DNA, 25 bp, SARS Virus
taaaacctattatggttgggtattc

SEQ ID NO: 178210 - DNA, 25 bp, SARS Virus
aaaacctattagtgttgggtattcc

SEQ ID NO: 178211 - DNA, 25 bp, SARS Virus
aaacctattaggtttgggtattcca

SEQ ID NO: 178212 - DNA, 25 bp, SARS Virus
aacctattagggttgggtattccac

SEQ ID NO: 178213 - DNA, 25 bp, SARS Virus
acctattagggttgggtattccaca

SEQ ID NO: 178214 - DNA, 25 bp, SARS Virus
cctattagggtttggtattccacac

SEQ ID NO: 178215 - DNA, 25 bp, SARS Virus
ctattagggttgtgtattccacacc

SEQ ID NO: 178216 - DNA, 25 bp, SARS Virus
tattagggttggttattccacacct

SEQ ID NO: 178217 - DNA, 25 bp, SARS Virus
attagggttgggtattccacacctc

SEQ ID NO: 178218 - DNA, 25 bp, SARS Virus
ttagggttgggttttccacacctca

SEQ ID NO: 178219 - DNA, 25 bp, SARS Virus
tagggttgggtattccacacctcaa

SEQ ID NO: 178220 - DNA, 25 bp, SARS Virus
agggttgggtattccacacctcaaa

SEQ ID NO: 178221 - DNA, 25 bp, SARS Virus
gggttgggtatttcacacctcaaag

SEQ ID NO: 178222 - DNA, 25 bp, SARS Virus
ggttgggtattctacacctcaaaga

SEQ ID NO: 178223 - DNA, 25 bp, SARS Virus
gttgggtattcctcacctcaaagat

SEQ ID NO: 178224 - DNA, 25 bp, SARS Virus
ttgggtattccatacctcaaagatg

SEQ ID NO: 178225 - DNA, 25 bp, SARS Virus
tgggtattccactcctcaaagatgt

SEQ ID NO: 178226 - DNA, 25 bp, SARS Virus
gggtattccacatctcaaagatgta

SEQ ID NO: 178227 - DNA, 25 bp, SARS Virus
ggtattccacacttcaaagatgtag

SEQ ID NO: 178228 - DNA, 25 bp, SARS Virus
gtattccacacctcaaagatgtagt

SEQ ID NO: 178229 - DNA, 25 bp, SARS Virus
tattccacaccttaaagatgtagtg

SEQ ID NO: 178230 - DNA, 25 bp, SARS Virus
attccacacctctaagatgtagtga

SEQ ID NO: 178231 - DNA, 25 bp, SARS Virus
ttccacacctcatagatgtagtgac

SEQ ID NO: 178232 - DNA, 25 bp, SARS Virus
tccacacctcaatgatgtagtgaca

SEQ ID NO: 178233 - DNA, 25 bp, SARS Virus
ccacacctcaaatatgtagtgacat

SEQ ID NO: 178234 - DNA, 25 bp, SARS Virus
cacacctcaaagttgtagtgacatt

SEQ ID NO: 178235 - DNA, 25 bp, SARS Virus
acacctcaaagatgtagtgacattt

SEQ ID NO: 178236 - DNA, 25 bp, SARS Virus
cacctcaaagatttagtgacatttg

SEQ ID NO: 178237 - DNA, 25 bp, SARS Virus
acctcaaagatgtagtgacatttgt

SEQ ID NO: 178238 - DNA, 25 bp, SARS Virus
cctcaaagatgttgtgacatttgtc

SEQ ID NO: 178239 - DNA, 25 bp, SARS Virus
ctcaaagatgtattgacatttgtca

SEQ ID NO: 178240 - DNA, 25 bp, SARS Virus
tcaaagatgtagtgacatttgtcaa

SEQ ID NO: 178241 - DNA, 25 bp, SARS Virus
caaagatgtagttacatttgtcaaa

SEQ ID NO: 178242 - DNA, 25 bp, SARS Virus
aaagatgtagtgtcatttgtcaaaa

SEQ ID NO: 178243 - DNA, 25 bp, SARS Virus
aagatgtagtgatatttgtcaaaaa

SEQ ID NO: 178244 - DNA, 25 bp, SARS Virus
agatgtagtgacttttgtcaaaaat

SEQ ID NO: 178245 - DNA, 25 bp, SARS Virus
gatgtagtgacatttgtcaaaaatt

SEQ ID NO: 178246 - DNA, 25 bp, SARS Virus
atgtagtgacatttgtcaaaaattg

SEQ ID NO: 178247 - DNA, 25 bp, SARS Virus
tgtagtgacatttgtcaaaaattgt

SEQ ID NO: 178248 - DNA, 25 bp, SARS Virus
gtagtgacatttttcaaaaattgta

SEQ ID NO: 178249 - DNA, 25 bp, SARS Virus
tagtgacatttgtcaaaaattgtat

SEQ ID NO: 178250 - DNA, 25 bp, SARS Virus
agtgacatttgttaaaaattgtata

SEQ ID NO: 178251 - DNA, 25 bp, SARS Virus
gtgacatttgtctaaaattgtataa

SEQ ID NO: 178252 - DNA, 25 bp, SARS Virus
tgacatttgtcataaattgtataat

SEQ ID NO: 178253 - DNA, 25 bp, SARS Virus
gacatttgtcaataattgtataata

SEQ ID NO: 178254 - DNA, 25 bp, SARS Virus
acatttgtcaaatattgtataatac

SEQ ID NO: 178255 - DNA, 25 bp, SARS Virus
catttgtcaaaatttgtataatacg

SEQ ID NO: 178256 - DNA, 25 bp, SARS Virus
atttgtcaaaaattgtataatacgg

SEQ ID NO: 178257 - DNA, 25 bp, SARS Virus
tttgtcaaaaattgtataatacggt

SEQ ID NO: 178258 - DNA, 25 bp, SARS Virus
ttgtcaaaaattttataatacggtc

SEQ ID NO: 178259 - DNA, 25 bp, SARS Virus
tgtcaaaaattgtataatacggtcg

SEQ ID NO: 178260 - DNA, 25 bp, SARS Virus
gtcaaaaattgtttaatacggtcgg

SEQ ID NO: 178261 - DNA, 25 bp, SARS Virus
tcaaaaattgtataatacggtcggt

SEQ ID NO: 178262 - DNA, 25 bp, SARS Virus
caaaaattgtattatacggtcggtg

SEQ ID NO: 178263 - DNA, 25 bp, SARS Virus
aaaaattgtatattacggtcggtgg

SEQ ID NO: 178264 - DNA, 25 bp, SARS Virus
aaaattgtataatacggtcggtggc

SEQ ID NO: 178265 - DNA, 25 bp, SARS Virus
aaattgtataattcggtcggtggca

SEQ ID NO: 178266 - DNA, 25 bp, SARS Virus
aattgtataatatggtcggtggcat

SEQ ID NO: 178267 - DNA, 25 bp, SARS Virus
attgtataatactgtcggtggcatt

SEQ ID NO: 178268 - DNA, 25 bp, SARS Virus
ttgtataatacgttcggtggcattt

SEQ ID NO: 178269 - DNA, 25 bp, SARS Virus
tgtataatacggtcggtggcatttt

SEQ ID NO: 178270 - DNA, 25 bp, SARS Virus
gtataatacggttggtggcattttg

SEQ ID NO: 178271 - DNA, 25 bp, SARS Virus
tataatacggtctgtggcattttga

SEQ ID NO: 178272 - DNA, 25 bp, SARS Virus
ataatacggtcgttggcattttgaa

SEQ ID NO: 178273 - DNA, 25 bp, SARS Virus
taatacggtcggtggcattttgaac

SEQ ID NO: 178274 - DNA, 25 bp, SARS Virus
aatacggtcggttgcattttgaacg

SEQ ID NO: 178275 - DNA, 25 bp, SARS Virus
atacggtcggtgtcattttgaacga

SEQ ID NO: 178276 - DNA, 25 bp, SARS Virus
tacggtcggtggtattttgaacgaa

SEQ ID NO: 178277 - DNA, 25 bp, SARS Virus
acggtcggtggctttttgaacgaac

SEQ ID NO: 178278 - DNA, 25 bp, SARS Virus
cggtcggtggcattttgaacgaaca

SEQ ID NO: 178279 - DNA, 25 bp, SARS Virus
ggtcggtggcattttgaacgaacaa

SEQ ID NO: 178280 - DNA, 25 bp, SARS Virus
gtcggtggcattttgaacgaacaag

SEQ ID NO: 178281 - DNA, 25 bp, SARS Virus
tcggtggcattttgaacgaacaagg

SEQ ID NO: 178282 - DNA, 25 bp, SARS Virus
cggtggcatttttaacgaacaaggt

SEQ ID NO: 178283 - DNA, 25 bp, SARS Virus
ggtggcattttgtacgaacaaggtt

SEQ ID NO: 178284 - DNA, 25 bp, SARS Virus
gtggcattttgatcgaacaaggtta

SEQ ID NO: 178285 - DNA, 25 bp, SARS Virus
tggcattttgaatgaacaaggttaa

SEQ ID NO: 178286 - DNA, 25 bp, SARS Virus
ggcattttgaactaacaaggttaat

SEQ ID NO: 178287 - DNA, 25 bp, SARS Virus
gcattttgaacgtacaaggttaatg

SEQ ID NO: 178288 - DNA, 25 bp, SARS Virus
cattttgaacgatcaaggttaatgg

SEQ ID NO: 178289 - DNA, 25 bp, SARS Virus
attttgaacgaataaggttaatggt

SEQ ID NO: 178290 - DNA, 25 bp, SARS Virus
ttttgaacgaactaggttaatggtg

SEQ ID NO: 178291 - DNA, 25 bp, SARS Virus
tttgaacgaacatggttaatggtgt

SEQ ID NO: 178292 - DNA, 25 bp, SARS Virus
ttgaacgaacaatgttaatggtgtc

SEQ ID NO: 178293 - DNA, 25 bp, SARS Virus
tgaacgaacaagtttaatggtgtca

SEQ ID NO: 178294 - DNA, 25 bp, SARS Virus
gaacgaacaaggttaatggtgtcat

SEQ ID NO: 178295 - DNA, 25 bp, SARS Virus
aacgaacaaggttaatggtgtcatc

SEQ ID NO: 178296 - DNA, 25 bp, SARS Virus
acgaacaaggtttatggtgtcatcg

SEQ ID NO: 178297 - DNA, 25 bp, SARS Virus
cgaacaaggttattggtgtcatcga

SEQ ID NO: 178298 - DNA, 25 bp, SARS Virus
gaacaaggttaatggtgtcatcgag

SEQ ID NO: 178299 - DNA, 25 bp, SARS Virus
aacaaggttaattgtgtcatcgagg

SEQ ID NO: 178300 - DNA, 25 bp, SARS Virus
acaaggttaatgttgtcatcgagga

SEQ ID NO: 178301 - DNA, 25 bp, SARS Virus
caaggttaatggtgtcatcgaggag

SEQ ID NO: 178302 - DNA, 25 bp, SARS Virus
aaggttaatggtttcatcgaggaga

SEQ ID NO: 178303 - DNA, 25 bp, SARS Virus
aggttaatggtgtcatcgaggagat

SEQ ID NO: 178304 - DNA, 25 bp, SARS Virus
ggttaatggtgttatcgaggagatc

SEQ ID NO: 178305 - DNA, 25 bp, SARS Virus
gttaatggtgtcttcgaggagatca

SEQ ID NO: 178306 - DNA, 25 bp, SARS Virus
ttaatggtgtcatcgaggagatcac

SEQ ID NO: 178307 - DNA, 25 bp, SARS Virus
taatggtgtcattgaggagatcacc

SEQ ID NO: 178308 - DNA, 25 bp, SARS Virus
aatggtgtcatctaggagatcaccg

SEQ ID NO: 178309 - DNA, 25 bp, SARS Virus
atggtgtcatcgtggagatcaccgc

SEQ ID NO: 178310 - DNA, 25 bp, SARS Virus
tggtgtcatcgatgagatcaccgcc

SEQ ID NO: 178311 - DNA, 25 bp, SARS Virus
ggtgtcatcgagtagatcaccgccg

SEQ ID NO: 178312 - DNA, 25 bp, SARS Virus
gtgtcatcgaggtgatcaccgccga

SEQ ID NO: 178313 - DNA, 25 bp, SARS Virus
tgtcatcgaggatatcaccgccgat

SEQ ID NO: 178314 - DNA, 25 bp, SARS Virus
gtcatcgaggagttcaccgccgata

SEQ ID NO: 178315 - DNA, 25 bp, SARS Virus
tcatcgaggagatcaccgccgataa

SEQ ID NO: 178316 - DNA, 25 bp, SARS Virus
catcgaggagattaccgccgataac

SEQ ID NO: 178317 - DNA, 25 bp, SARS Virus
atcgaggagatctccgccgataact

SEQ ID NO: 178318 - DNA, 25 bp, SARS Virus
tcgaggagatcatcgccgataactg

SEQ ID NO: 178319 - DNA, 25 bp, SARS Virus
cgaggagatcactgccgataactga

SEQ ID NO: 178320 - DNA, 25 bp, SARS Virus
gaggagatcacctccgataactgaa

SEQ ID NO: 178321 - DNA, 25 bp, SARS Virus
aggagatcaccgtcgataactgaag

SEQ ID NO: 178322 - DNA, 25 bp, SARS Virus
ggagatcaccgctgataactgaagt

SEQ ID NO: 178323 - DNA, 25 bp, SARS Virus
gagatcaccgcctataactgaagtt

SEQ ID NO: 178324 - DNA, 25 bp, SARS Virus
agatcaccgccgttaactgaagtta

SEQ ID NO: 178325 - DNA, 25 bp, SARS Virus
gatcaccgccgataactgaagttat

SEQ ID NO: 178326 - DNA, 25 bp, SARS Virus
atcaccgccgattactgaagttatt

SEQ ID NO: 178327 - DNA, 25 bp, SARS Virus
tcaccgccgatatctgaagttatta

SEQ ID NO: 178328 - DNA, 25 bp, SARS Virus
caccgccgataattgaagttattaa

SEQ ID NO: 178329 - DNA, 25 bp, SARS Virus
accgccgataactgaagttattaaa

SEQ ID NO: 178330 - DNA, 25 bp, SARS Virus
ccgccgataacttaagttattaaag

SEQ ID NO: 178331 - DNA, 25 bp, SARS Virus
cgccgataactgtagttattaaaga

SEQ ID NO: 178332 - DNA, 25 bp, SARS Virus
gccgataactgatgttattaaagac

SEQ ID NO: 178333 - DNA, 25 bp, SARS Virus
ccgataactgaatttattaaagact

SEQ ID NO: 178334 - DNA, 25 bp, SARS Virus
cgataactgaagttattaaagacta

SEQ ID NO: 178335 - DNA, 25 bp, SARS Virus
gataactgaagttattaaagactac

SEQ ID NO: 178336 - DNA, 25 bp, SARS Virus
ataactgaagtttttaaagactact

SEQ ID NO: 178337 - DNA, 25 bp, SARS Virus
taactgaagttattaaagactactt

SEQ ID NO: 178338 - DNA, 25 bp, SARS Virus
aactgaagttattaaagactacttt

SEQ ID NO: 178339 - DNA, 25 bp, SARS Virus
actgaagttatttaagactactttg

SEQ ID NO: 178340 - DNA, 25 bp, SARS Virus
ctgaagttattatagactactttga

SEQ ID NO: 178341 - DNA, 25 bp, SARS Virus
tgaagttattaatgactactttgac

SEQ ID NO: 178342 - DNA, 25 bp, SARS Virus
gaagttattaaatactactttgaca

SEQ ID NO: 178343 - DNA, 25 bp, SARS Virus
aagttattaaagtctactttgacag

SEQ ID NO: 178344 - DNA, 25 bp, SARS Virus
agttattaaagattactttgacaga

SEQ ID NO: 178345 - DNA, 25 bp, SARS Virus
gttattaaagactactttgacagat

SEQ ID NO: 178346 - DNA, 25 bp, SARS Virus
ttattaaagacttctttgacagata

SEQ ID NO: 178347 - DNA, 25 bp, SARS Virus
tattaaagactattttgacagataa

SEQ ID NO: 178348 - DNA, 25 bp, SARS Virus
attaaagactactttgacagataaa

SEQ ID NO: 178349 - DNA, 25 bp, SARS Virus
ttaaagactactttgacagataaac

SEQ ID NO: 178350 - DNA, 25 bp, SARS Virus
taaagactactttgacagataaaca

SEQ ID NO: 178351 - DNA, 25 bp, SARS Virus
aaagactacttttacagataaacag

SEQ ID NO: 178352 - DNA, 25 bp, SARS Virus
aagactactttgtcagataaacagt

SEQ ID NO: 178353 - DNA, 25 bp, SARS Virus
agactactttgatagataaacagta

SEQ ID NO: 178354 - DNA, 25 bp, SARS Virus
gactactttgactgataaacagtat

SEQ ID NO: 178355 - DNA, 25 bp, SARS Virus
actactttgacatataaacagtatc

SEQ ID NO: 178356 - DNA, 25 bp, SARS Virus
ctactttgacagttaaacagtatca

SEQ ID NO: 178357 - DNA, 25 bp, SARS Virus
tactttgacagataaacagtatcat

SEQ ID NO: 178358 - DNA, 25 bp, SARS Virus
actttgacagattaacagtatcatg

SEQ ID NO: 178359 - DNA, 25 bp, SARS Virus
ctttgacagatatacagtatcatga

SEQ ID NO: 178360 - DNA, 25 bp, SARS Virus
tttgacagataatcagtatcatgat

SEQ ID NO: 178361 - DNA, 25 bp, SARS Virus
ttgacagataaatagtatcatgatg

SEQ ID NO: 178362 - DNA, 25 bp, SARS Virus
tgacagataaactgtatcatgatgt

SEQ ID NO: 178363 - DNA, 25 bp, SARS Virus
gacagataaacattatcatgatgtc

SEQ ID NO: 178364 - DNA, 25 bp, SARS Virus
acagataaacagtatcatgatgtct

SEQ ID NO: 178365 - DNA, 25 bp, SARS Virus
cagataaacagtttcatgatgtcta

SEQ ID NO: 178366 - DNA, 25 bp, SARS Virus
agataaacagtatcatgatgtctat

SEQ ID NO: 178367 - DNA, 25 bp, SARS Virus
gataaacagtattatgatgtctatc

SEQ ID NO: 178368 - DNA, 25 bp, SARS Virus
ataaacagtatcttgatgtctatct

SEQ ID NO: 178369 - DNA, 25 bp, SARS Virus
taaacagtatcatgatgtctatctc

SEQ ID NO: 178370 - DNA, 25 bp, SARS Virus
aaacagtatcattatgtctatctct

SEQ ID NO: 178371 - DNA, 25 bp, SARS Virus
aacagtatcatgttgtctatctctg

SEQ ID NO: 178372 - DNA, 25 bp, SARS Virus
acagtatcatgatgtctatctctgt

SEQ ID NO: 178373 - DNA, 25 bp, SARS Virus
cagtatcatgatttctatctctgtg

SEQ ID NO: 178374 - DNA, 25 bp, SARS Virus
agtatcatgatgtctatctctgtgg

SEQ ID NO: 178375 - DNA, 25 bp, SARS Virus
gtatcatgatgtttatctctgtggt

SEQ ID NO: 178376 - DNA, 25 bp, SARS Virus
tatcatgatgtctatctctgtggtc

SEQ ID NO: 178377 - DNA, 25 bp, SARS Virus
atcatgatgtctttctctgtggtcg

SEQ ID NO: 178378 - DNA, 25 bp, SARS Virus
tcatgatgtctatctctgtggtcga

SEQ ID NO: 178379 - DNA, 25 bp, SARS Virus
catgatgtctatttctgtggtcgat

SEQ ID NO: 178380 - DNA, 25 bp, SARS Virus
atgatgtctatctctgtggtcgatg

SEQ ID NO: 178381 - DNA, 25 bp, SARS Virus
tgatgtctatctttgtggtcgatgc

SEQ ID NO: 178382 - DNA, 25 bp, SARS Virus
gatgtctatctctgtggtcgatgcc

SEQ ID NO: 178383 - DNA, 25 bp, SARS Virus
atgtctatctctttggtcgatgcca

SEQ ID NO: 178384 - DNA, 25 bp, SARS Virus
tgtctatctctgtggtcgatgccac

SEQ ID NO: 178385 - DNA, 25 bp, SARS Virus
gtctatctctgttgtcgatgccacg

SEQ ID NO: 178386 - DNA, 25 bp, SARS Virus
tctatctctgtgttcgatgccacgc

SEQ ID NO: 178387 - DNA, 25 bp, SARS Virus
ctatctctgtggtcgatgccacgct

SEQ ID NO: 178388 - DNA, 25 bp, SARS Virus
tatctctgtggttgatgccacgctc

SEQ ID NO: 178389 - DNA, 25 bp, SARS Virus
atctctgtggtctatgccacgctcg

SEQ ID NO: 178390 - DNA, 25 bp, SARS Virus
tctctgtggtcgttgccacgctcga

SEQ ID NO: 178391 - DNA, 25 bp, SARS Virus
ctctgtggtcgatgccacgctcgag

SEQ ID NO: 178392 - DNA, 25 bp, SARS Virus
tctgtggtcgattccacgctcgaga

SEQ ID NO: 178393 - DNA, 25 bp, SARS Virus
ctgtggtcgatgtcacgctcgagat

SEQ ID NO: 178394 - DNA, 25 bp, SARS Virus
tgtggtcgatgctacgctcgagata

SEQ ID NO: 178395 - DNA, 25 bp, SARS Virus
gtggtcgatgcctcgctcgagataa

SEQ ID NO: 178396 - DNA, 25 bp, SARS Virus
tggtcgatgccatgctcgagataag

SEQ ID NO: 178397 - DNA, 25 bp, SARS Virus
ggtcgatgccactctcgagataaga

SEQ ID NO: 178398 - DNA, 25 bp, SARS Virus
gtcgatgccacgttcgagataagaa

SEQ ID NO: 178399 - DNA, 25 bp, SARS Virus
tcgatgccacgctcgagataagaaa

SEQ ID NO: 178400 - DNA, 25 bp, SARS Virus
cgatgccacgcttgagataagaaac

SEQ ID NO: 178401 - DNA, 25 bp, SARS Virus
gatgccacgctctagataagaaacg

SEQ ID NO: 178402 - DNA, 25 bp, SARS Virus
atgccacgctcgtgataagaaacgt

SEQ ID NO: 178403 - DNA, 25 bp, SARS Virus
tgccacgctcgatataagaaacgtg

SEQ ID NO: 178404 - DNA, 25 bp, SARS Virus
gccacgctcgagttaagaaacgtga

SEQ ID NO: 178405 - DNA, 25 bp, SARS Virus
ccacgctcgagataagaaacgtgat

SEQ ID NO: 178406 - DNA, 25 bp, SARS Virus
cacgctcgagattagaaacgtgatt

SEQ ID NO: 178407 - DNA, 25 bp, SARS Virus
acgctcgagatatgaaacgtgatta

SEQ ID NO: 178408 - DNA, 25 bp, SARS Virus
cgctcgagataataaacgtgattac

SEQ ID NO: 178409 - DNA, 25 bp, SARS Virus
gctcgagataagtaacgtgattacc

SEQ ID NO: 178410 - DNA, 25 bp, SARS Virus
ctcgagataagatacgtgattaccg

SEQ ID NO: 178411 - DNA, 25 bp, SARS Virus
tcgagataagaatcgtgattaccgt

SEQ ID NO: 178412 - DNA, 25 bp, SARS Virus
cgagataagaaatgtgattaccgta

SEQ ID NO: 178413 - DNA, 25 bp, SARS Virus
gagataagaaacttgattaccgtat

SEQ ID NO: 178414 - DNA, 25 bp, SARS Virus
agataagaaacgtgattaccgtatg

SEQ ID NO: 178415 - DNA, 25 bp, SARS Virus
gataagaaacgttattaccgtatga

SEQ ID NO: 178416 - DNA, 25 bp, SARS Virus
ataagaaacgtgtttaccgtatgaa

SEQ ID NO: 178417 - DNA, 25 bp, SARS Virus
taagaaacgtgattaccgtatgaat

SEQ ID NO: 178418 - DNA, 25 bp, SARS Virus
aagaaacgtgattaccgtatgaatt

SEQ ID NO: 178419 - DNA, 25 bp, SARS Virus
agaaacgtgatttccgtatgaattc

SEQ ID NO: 178420 - DNA, 25 bp, SARS Virus
gaaacgtgattatcgtatgaattct

SEQ ID NO: 178421 - DNA, 25 bp, SARS Virus
aaacgtgattactgtatgaattcta

SEQ ID NO: 178422 - DNA, 25 bp, SARS Virus
aacgtgattaccttatgaattctaa

SEQ ID NO: 178423 - DNA, 25 bp, SARS Virus
acgtgattaccgtatgaattctaag

SEQ ID NO: 178424 - DNA, 25 bp, SARS Virus
cgtgattaccgtttgaattctaagt

SEQ ID NO: 178425 - DNA, 25 bp, SARS Virus
gtgattaccgtatgaattctaagta

SEQ ID NO: 178426 - DNA, 25 bp, SARS Virus
tgattaccgtattaattctaagtaa

SEQ ID NO: 178427 - DNA, 25 bp, SARS Virus
gattaccgtatgtattctaagtaaa

SEQ ID NO: 178428 - DNA, 25 bp, SARS Virus
attaccgtatgatttctaagtaaac

SEQ ID NO: 178429 - DNA, 25 bp, SARS Virus
ttaccgtatgaattctaagtaaact

SEQ ID NO: 178430 - DNA, 25 bp, SARS Virus
taccgtatgaattctaagtaaactc

SEQ ID NO: 178431 - DNA, 25 bp, SARS Virus
accgtatgaattttaagtaaactca

SEQ ID NO: 178432 - DNA, 25 bp, SARS Virus
ccgtatgaattctaagtaaactcaa

SEQ ID NO: 178433 - DNA, 25 bp, SARS Virus
cgtatgaattcttagtaaactcaat

SEQ ID NO: 178434 - DNA, 25 bp, SARS Virus
gtatgaattctatgtaaactcaata

SEQ ID NO: 178435 - DNA, 25 bp, SARS Virus
tatgaattctaattaaactcaatat

SEQ ID NO: 178436 - DNA, 25 bp, SARS Virus
atgaattctaagtaaactcaatatc

SEQ ID NO: 178437 - DNA, 25 bp, SARS Virus
tgaattctaagttaactcaatatca

SEQ ID NO: 178438 - DNA, 25 bp, SARS Virus
gaattctaagtatactcaatatcat

SEQ ID NO: 178439 - DNA, 25 bp, SARS Virus
aattctaagtaatctcaatatcatc

SEQ ID NO: 178440 - DNA, 25 bp, SARS Virus
attctaagtaaattcaatatcatcc

SEQ ID NO: 178441 - DNA, 25 bp, SARS Virus
ttctaagtaaactcaatatcatccc

SEQ ID NO: 178442 - DNA, 25 bp, SARS Virus
tctaagtaaacttaatatcatccct

SEQ ID NO: 178443 - DNA, 25 bp, SARS Virus
ctaagtaaactctatatcatcccta

SEQ ID NO: 178444 - DNA, 25 bp, SARS Virus
taagtaaactcattatcatccctac

SEQ ID NO: 178445 - DNA, 25 bp, SARS Virus
aagtaaactcaatatcatccctact

SEQ ID NO: 178446 - DNA, 25 bp, SARS Virus
agtaaactcaatttcatccctactg

SEQ ID NO: 178447 - DNA, 25 bp, SARS Virus
gtaaactcaatatcatccctactgt

SEQ ID NO: 178448 - DNA, 25 bp, SARS Virus
taaactcaatattatccctactgta

SEQ ID NO: 178449 - DNA, 25 bp, SARS Virus
aaactcaatatcttccctactgtaa

SEQ ID NO: 178450 - DNA, 25 bp, SARS Virus
aactcaatatcatccctactgtaat

SEQ ID NO: 178451 - DNA, 25 bp, SARS Virus
actcaatatcattcctactgtaatg

SEQ ID NO: 178452 - DNA, 25 bp, SARS Virus
ctcaatatcatctctactgtaatgc

SEQ ID NO: 178453 - DNA, 25 bp, SARS Virus
tcaatatcatccttactgtaatgcg

SEQ ID NO: 178454 - DNA, 25 bp, SARS Virus
caatatcatccctactgtaatgcga

SEQ ID NO: 178455 - DNA, 25 bp, SARS Virus
aatatcatcccttctgtaatgcgaa

SEQ ID NO: 178456 - DNA, 25 bp, SARS Virus
atatcatccctattgtaatgcgaat

SEQ ID NO: 178457 - DNA, 25 bp, SARS Virus
tatcatccctactgtaatgcgaatc

SEQ ID NO: 178458 - DNA, 25 bp, SARS Virus
atcatccctactttaatgcgaatca

SEQ ID NO: 178459 - DNA, 25 bp, SARS Virus
tcatccctactgtaatgcgaatcat

SEQ ID NO: 178460 - DNA, 25 bp, SARS Virus
catccctactgttatgcgaatcata

SEQ ID NO: 178461 - DNA, 25 bp, SARS Virus
atccctactgtattgcgaatcatat

SEQ ID NO: 178462 - DNA, 25 bp, SARS Virus
tccctactgtaatgcgaatcatatg

SEQ ID NO: 178463 - DNA, 25 bp, SARS Virus
ccctactgtaattcgaatcatatgc

SEQ ID NO: 178464 - DNA, 25 bp, SARS Virus
cctactgtaatgtgaatcatatgcg

SEQ ID NO: 178465 - DNA, 25 bp, SARS Virus
ctactgtaatgctaatcatatgcgc

SEQ ID NO: 178466 - DNA, 25 bp, SARS Virus
tactgtaatgcgtatcatatgcgct

SEQ ID NO: 178467 - DNA, 25 bp, SARS Virus
actgtaatgcgattcatatgcgctt

SEQ ID NO: 178468 - DNA, 25 bp, SARS Virus
ctgtaatgcgaatcatatgcgcttt

SEQ ID NO: 178469 - DNA, 25 bp, SARS Virus
tgtaatgcgaattatatgcgctttt

SEQ ID NO: 178470 - DNA, 25 bp, SARS Virus
gtaatgcgaatcttatgcgcttttc

SEQ ID NO: 178471 - DNA, 25 bp, SARS Virus
taatgcgaatcatatgcgcttttca

SEQ ID NO: 178472 - DNA, 25 bp, SARS Virus
aatgcgaatcatttgcgcttttcac

SEQ ID NO: 178473 - DNA, 25 bp, SARS Virus
atgcgaatcatatgcgcttttcacg

SEQ ID NO: 178474 - DNA, 25 bp, SARS Virus
tgcgaatcatattcgcttttcacgt

SEQ ID NO: 178475 - DNA, 25 bp, SARS Virus
gcgaatcatatgtgcttttcacgta

SEQ ID NO: 178476 - DNA, 25 bp, SARS Virus
cgaatcatatgctcttttcacgtag

SEQ ID NO: 178477 - DNA, 25 bp, SARS Virus
gaatcatatgcgtttttcacgtaga

SEQ ID NO: 178478 - DNA, 25 bp, SARS Virus
aatcatatgcgcttttcacgtagaa

SEQ ID NO: 178479 - DNA, 25 bp, SARS Virus
atcatatgcgcttttcacgtagaac

SEQ ID NO: 178480 - DNA, 25 bp, SARS Virus
tcatatgcgcttttcacgtagaact

SEQ ID NO: 178481 - DNA, 25 bp, SARS Virus
catatgcgcttttcacgtagaacta

SEQ ID NO: 178482 - DNA, 25 bp, SARS Virus
atatgcgctttttacgtagaactag

SEQ ID NO: 178483 - DNA, 25 bp, SARS Virus
tatgcgcttttctcgtagaactagg

SEQ ID NO: 178484 - DNA, 25 bp, SARS Virus
atgcgcttttcatgtagaactagga

SEQ ID NO: 178485 - DNA, 25 bp, SARS Virus
tgcgcttttcacttagaactaggag

SEQ ID NO: 178486 - DNA, 25 bp, SARS Virus
gcgcttttcacgtagaactaggagt

SEQ ID NO: 178487 - DNA, 25 bp, SARS Virus
cgcttttcacgttgaactaggagta

SEQ ID NO: 178488 - DNA, 25 bp, SARS Virus
gcttttcacgtataactaggagtat

SEQ ID NO: 178489 - DNA, 25 bp, SARS Virus
cttttcacgtagtactaggagtatt

SEQ ID NO: 178490 - DNA, 25 bp, SARS Virus
ttttcacgtagatctaggagtattg

SEQ ID NO: 178491 - DNA, 25 bp, SARS Virus
tttcacgtagaattaggagtattga

SEQ ID NO: 178492 - DNA, 25 bp, SARS Virus
ttcacgtagaactaggagtattgag

SEQ ID NO: 178493 - DNA, 25 bp, SARS Virus
tcacgtagaacttggagtattgagt

SEQ ID NO: 178494 - DNA, 25 bp, SARS Virus
cacgtagaactatgagtattgagta

SEQ ID NO: 178495 - DNA, 25 bp, SARS Virus
acgtagaactagtagtattgagtaa

SEQ ID NO: 178496 - DNA, 25 bp, SARS Virus
cgtagaactaggtgtattgagtaac

SEQ ID NO: 178497 - DNA, 25 bp, SARS Virus
gtagaactaggattattgagtaact

SEQ ID NO: 178498 - DNA, 25 bp, SARS Virus
tagaactaggagtattgagtaactc

SEQ ID NO: 178499 - DNA, 25 bp, SARS Virus
agaactaggagttttgagtaactca

SEQ ID NO: 178500 - DNA, 25 bp, SARS Virus
gaactaggagtattgagtaactcag

SEQ ID NO: 178501 - DNA, 25 bp, SARS Virus
aactaggagtattgagtaactcagt

SEQ ID NO: 178502 - DNA, 25 bp, SARS Virus
actaggagtatttagtaactcagta

SEQ ID NO: 178503 - DNA, 25 bp, SARS Virus
ctaggagtattgtgtaactcagtat

SEQ ID NO: 178504 - DNA, 25 bp, SARS Virus
taggagtattgattaactcagtatt

SEQ ID NO: 178505 - DNA, 25 bp, SARS Virus
aggagtattgagtaactcagtatta

SEQ ID NO: 178506 - DNA, 25 bp, SARS Virus
ggagtattgagttactcagtattat

SEQ ID NO: 178507 - DNA, 25 bp, SARS Virus
gagtattgagtatctcagtattatt

SEQ ID NO: 178508 - DNA, 25 bp, SARS Virus
agtattgagtaattcagtattattt

SEQ ID NO: 178509 - DNA, 25 bp, SARS Virus
gtattgagtaactcagtattatttc

SEQ ID NO: 178510 - DNA, 25 bp, SARS Virus
tattgagtaacttagtattatttca

SEQ ID NO: 178511 - DNA, 25 bp, SARS Virus
attgagtaactctgtattatttcag

SEQ ID NO: 178512 - DNA, 25 bp, SARS Virus
ttgagtaactcattattatttcaga

SEQ ID NO: 178513 - DNA, 25 bp, SARS Virus
tgagtaactcagtattatttcagat

SEQ ID NO: 178514 - DNA, 25 bp, SARS Virus
gagtaactcagttttatttcagatc

SEQ ID NO: 178515 - DNA, 25 bp, SARS Virus
agtaactcagtattatttcagatcg

SEQ ID NO: 178516 - DNA, 25 bp, SARS Virus
gtaactcagtattatttcagatcgg

SEQ ID NO: 178517 - DNA, 25 bp, SARS Virus
taactcagtattttttcagatcgga

SEQ ID NO: 178518 - DNA, 25 bp, SARS Virus
aactcagtattatttcagatcggaa

SEQ ID NO: 178519 - DNA, 25 bp, SARS Virus
actcagtattatttcagatcggaat

SEQ ID NO: 178520 - DNA, 25 bp, SARS Virus
ctcagtattatttcagatcggaatg

SEQ ID NO: 178521 - DNA, 25 bp, SARS Virus
tcagtattattttagatcggaatgg

SEQ ID NO: 178522 - DNA, 25 bp, SARS Virus
cagtattatttctgatcggaatggg

SEQ ID NO: 178523 - DNA, 25 bp, SARS Virus
agtattatttcatatcggaatgggg

SEQ ID NO: 178524 - DNA, 25 bp, SARS Virus
gtattatttcagttcggaatggggt

SEQ ID NO: 178525 - DNA, 25 bp, SARS Virus
tattatttcagatcggaatggggta

SEQ ID NO: 178526 - DNA, 25 bp, SARS Virus
attatttcagattggaatggggtaa

SEQ ID NO: 178527 - DNA, 25 bp, SARS Virus
ttatttcagatctgaatggggtaaa

SEQ ID NO: 178528 - DNA, 25 bp, SARS Virus
tatttcagatcgtaatggggtaaat

SEQ ID NO: 178529 - DNA, 25 bp, SARS Virus
atttcagatcggtatggggtaaata

SEQ ID NO: 178530 - DNA, 25 bp, SARS Virus
tttcagatcggattggggtaaataa

SEQ ID NO: 178531 - DNA, 25 bp, SARS Virus
ttcagatcggaatggggtaaataat

SEQ ID NO: 178532 - DNA, 25 bp, SARS Virus
tcagatcggaattgggtaaataatt

SEQ ID NO: 178533 - DNA, 25 bp, SARS Virus
cagatcggaatgtggtaaataattt

SEQ ID NO: 178534 - DNA, 25 bp, SARS Virus
agatcggaatggtgtaaataattta

SEQ ID NO: 178535 - DNA, 25 bp, SARS Virus
gatcggaatgggttaaataatttac

SEQ ID NO: 178536 - DNA, 25 bp, SARS Virus
atcggaatggggtaaataatttacc

SEQ ID NO: 178537 - DNA, 25 bp, SARS Virus
tcggaatggggttaataatttaccc

SEQ ID NO: 178538 - DNA, 25 bp, SARS Virus
cggaatggggtatataatttaccct

SEQ ID NO: 178539 - DNA, 25 bp, SARS Virus
ggaatggggtaattaatttaccctt

SEQ ID NO: 178540 - DNA, 25 bp, SARS Virus
gaatggggtaaataatttacccttt

SEQ ID NO: 178541 - DNA, 25 bp, SARS Virus
aatggggtaaattatttaccctttg

SEQ ID NO: 178542 - DNA, 25 bp, SARS Virus
atggggtaaatattttaccctttgg

SEQ ID NO: 178543 - DNA, 25 bp, SARS Virus
tggggtaaataatttaccctttggt

SEQ ID NO: 178544 - DNA, 25 bp, SARS Virus
ggggtaaataatttaccctttggtc

SEQ ID NO: 178545 - DNA, 25 bp, SARS Virus
gggtaaataatttaccctttggtcg

SEQ ID NO: 178546 - DNA, 25 bp, SARS Virus
ggtaaataattttccctttggtcga

SEQ ID NO: 178547 - DNA, 25 bp, SARS Virus
gtaaataatttatcctttggtcgac

SEQ ID NO: 178548 - DNA, 25 bp, SARS Virus
taaataatttactctttggtcgact

SEQ ID NO: 178549 - DNA, 25 bp, SARS Virus
aaataatttaccttttggtcgacta

SEQ ID NO: 178550 - DNA, 25 bp, SARS Virus
aataatttaccctttggtcgactaa

SEQ ID NO: 178551 - DNA, 25 bp, SARS Virus
ataatttaccctttggtcgactaaa

SEQ ID NO: 178552 - DNA, 25 bp, SARS Virus
taatttaccctttggtcgactaaat

SEQ ID NO: 178553 - DNA, 25 bp, SARS Virus
aatttacccttttgtcgactaaata

SEQ ID NO: 178554 - DNA, 25 bp, SARS Virus
atttaccctttgttcgactaaatag

SEQ ID NO: 178555 - DNA, 25 bp, SARS Virus
tttaccctttggtcgactaaatagg

SEQ ID NO: 178556 - DNA, 25 bp, SARS Virus
ttaccctttggttgactaaataggt

SEQ ID NO: 178557 - DNA, 25 bp, SARS Virus
taccctttggtctactaaataggtc

SEQ ID NO: 178558 - DNA, 25 bp, SARS Virus
accctttggtcgtctaaataggtct

SEQ ID NO: 178559 - DNA, 25 bp, SARS Virus
ccctttggtcgattaaataggtcta

SEQ ID NO: 178560 - DNA, 25 bp, SARS Virus
cctttggtcgactaaataggtctaa

SEQ ID NO: 178561 - DNA, 25 bp, SARS Virus
ctttggtcgacttaataggtctaac

SEQ ID NO: 178562 - DNA, 25 bp, SARS Virus
tttggtcgactatataggtctaaca

SEQ ID NO: 178563 - DNA, 25 bp, SARS Virus
ttggtcgactaattaggtctaacaa

SEQ ID NO: 178564 - DNA, 25 bp, SARS Virus
tggtcgactaaataggtctaacaat

SEQ ID NO: 178565 - DNA, 25 bp, SARS Virus
ggtcgactaaattggtctaacaatt

SEQ ID NO: 178566 - DNA, 25 bp, SARS Virus
gtcgactaaatatgtctaacaattg

SEQ ID NO: 178567 - DNA, 25 bp, SARS Virus
tcgactaaatagttctaacaattgc

SEQ ID NO: 178568 - DNA, 25 bp, SARS Virus
cgactaaataggtctaacaattgct

SEQ ID NO: 178569 - DNA, 25 bp, SARS Virus
gactaaataggtttaacaattgcta

SEQ ID NO: 178570 - DNA, 25 bp, SARS Virus
actaaataggtctaacaattgctaa

SEQ ID NO: 178571 - DNA, 25 bp, SARS Virus
ctaaataggtcttacaattgctaat

SEQ ID NO: 178572 - DNA, 25 bp, SARS Virus
taaataggtctatcaattgctaatg

SEQ ID NO: 178573 - DNA, 25 bp, SARS Virus
aaataggtctaataattgctaatga

SEQ ID NO: 178574 - DNA, 25 bp, SARS Virus
aataggtctaactattgctaatgaa

SEQ ID NO: 178575 - DNA, 25 bp, SARS Virus
ataggtctaacatttgctaatgaac

SEQ ID NO: 178576 - DNA, 25 bp, SARS Virus
taggtctaacaattgctaatgaacc

SEQ ID NO: 178577 - DNA, 25 bp, SARS Virus
aggtctaacaattgctaatgaacca

SEQ ID NO: 178578 - DNA, 25 bp, SARS Virus
ggtctaacaatttctaatgaaccaa

SEQ ID NO: 178579 - DNA, 25 bp, SARS Virus
gtctaacaattgttaatgaaccaac

SEQ ID NO: 178580 - DNA, 25 bp, SARS Virus
tctaacaattgctaatgaaccaacc

SEQ ID NO: 178581 - DNA, 25 bp, SARS Virus
ctaacaattgcttatgaaccaaccg

SEQ ID NO: 178582 - DNA, 25 bp, SARS Virus
taacaattgctattgaaccaaccgt

SEQ ID NO: 178583 - DNA, 25 bp, SARS Virus
aacaattgctaatgaaccaaccgta

SEQ ID NO: 178584 - DNA, 25 bp, SARS Virus
acaattgctaattaaccaaccgtaa

SEQ ID NO: 178585 - DNA, 25 bp, SARS Virus
caattgctaatgtaccaaccgtaat

SEQ ID NO: 178586 - DNA, 25 bp, SARS Virus
aattgctaatgatccaaccgtaatt

SEQ ID NO: 178587 - DNA, 25 bp, SARS Virus
attgctaatgaatcaaccgtaatta

SEQ ID NO: 178588 - DNA, 25 bp, SARS Virus
ttgctaatgaactaaccgtaattat

SEQ ID NO: 178589 - DNA, 25 bp, SARS Virus
tgctaatgaacctaccgtaattatg

SEQ ID NO: 178590 - DNA, 25 bp, SARS Virus
gctaatgaaccatccgtaattatgt

SEQ ID NO: 178591 - DNA, 25 bp, SARS Virus
ctaatgaaccaatcgtaattatgtc

SEQ ID NO: 178592 - DNA, 25 bp, SARS Virus
taatgaaccaactgtaattatgtcg

SEQ ID NO: 178593 - DNA, 25 bp, SARS Virus
aatgaaccaaccttaattatgtcgg

SEQ ID NO: 178594 - DNA, 25 bp, SARS Virus
atgaaccaaccgtaattatgtcggt

SEQ ID NO: 178595 - DNA, 25 bp, SARS Virus
tgaaccaaccgttattatgtcggtg

SEQ ID NO: 178596 - DNA, 25 bp, SARS Virus
gaaccaaccgtatttatgtcggtgg

SEQ ID NO: 178597 - DNA, 25 bp, SARS Virus
aaccaaccgtaattatgtcggtggt

SEQ ID NO: 178598 - DNA, 25 bp, SARS Virus
accaaccgtaattatgtcggtggta

SEQ ID NO: 178599 - DNA, 25 bp, SARS Virus
ccaaccgtaattttgtcggtggtag

SEQ ID NO: 178600 - DNA, 25 bp, SARS Virus
caaccgtaattatgtcggtggtagc

SEQ ID NO: 178601 - DNA, 25 bp, SARS Virus
aaccgtaattatttcggtggtagca

SEQ ID NO: 178602 - DNA, 25 bp, SARS Virus
accgtaattatgtcggtggtagcat

SEQ ID NO: 178603 - DNA, 25 bp, SARS Virus
ccgtaattatgttggtggtagcatt

SEQ ID NO: 178604 - DNA, 25 bp, SARS Virus
cgtaattatgtctgtggtagcattg

SEQ ID NO: 178605 - DNA, 25 bp, SARS Virus
gtaattatgtcgttggtagcattgt

SEQ ID NO: 178606 - DNA, 25 bp, SARS Virus
taattatgtcggtggtagcattgtt

SEQ ID NO: 178607 - DNA, 25 bp, SARS Virus
aattatgtcggttgtagcattgtta

SEQ ID NO: 178608 - DNA, 25 bp, SARS Virus
attatgtcggtgttagcattgttag

SEQ ID NO: 178609 - DNA, 25 bp, SARS Virus
ttatgtcggtggtagcattgttagt

SEQ ID NO: 178610 - DNA, 25 bp, SARS Virus
tatgtcggtggttgcattgttagtt

SEQ ID NO: 178611 - DNA, 25 bp, SARS Virus
atgtcggtggtatcattgttagttt

SEQ ID NO: 178612 - DNA, 25 bp, SARS Virus
tgtcggtggtagtattgttagtttc

SEQ ID NO: 178613 - DNA, 25 bp, SARS Virus
gtcggtggtagctttgttagtttca

SEQ ID NO: 178614 - DNA, 25 bp, SARS Virus
tcggtggtagcattgttagtttcat

SEQ ID NO: 178615 - DNA, 25 bp, SARS Virus
cggtggtagcattgttagtttcata

SEQ ID NO: 178616 - DNA, 25 bp, SARS Virus
ggtggtagcatttttagtttcataa

SEQ ID NO: 178617 - DNA, 25 bp, SARS Virus
gtggtagcattgttagtttcataaa

SEQ ID NO: 178618 - DNA, 25 bp, SARS Virus
tggtagcattgttagtttcataaat

SEQ ID NO: 178619 - DNA, 25 bp, SARS Virus
ggtagcattgtttgtttcataaata

SEQ ID NO: 178620 - DNA, 25 bp, SARS Virus
gtagcattgttattttcataaatag

SEQ ID NO: 178621 - DNA, 25 bp, SARS Virus
tagcattgttagtttcataaatagt

SEQ ID NO: 178622 - DNA, 25 bp, SARS Virus
agcattgttagtttcataaatagtt

SEQ ID NO: 178623 - DNA, 25 bp, SARS Virus
gcattgttagtttcataaatagttg

SEQ ID NO: 178624 - DNA, 25 bp, SARS Virus
cattgttagttttataaatagttgt

SEQ ID NO: 178625 - DNA, 25 bp, SARS Virus
attgttagtttcttaaatagttgtt

SEQ ID NO: 178626 - DNA, 25 bp, SARS Virus
ttgttagtttcataaatagttgttg

SEQ ID NO: 178627 - DNA, 25 bp, SARS Virus
tgttagtttcattaatagttgttga

SEQ ID NO: 178628 - DNA, 25 bp, SARS Virus
gttagtttcatatatagttgttgaa

SEQ ID NO: 178629 - DNA, 25 bp, SARS Virus
ttagtttcataattagttgttgaag

SEQ ID NO: 178630 - DNA, 25 bp, SARS Virus
tagtttcataaatagttgttgaagt

SEQ ID NO: 178631 - DNA, 25 bp, SARS Virus
agtttcataaattgttgttgaagtt

SEQ ID NO: 178632 - DNA, 25 bp, SARS Virus
gtttcataaatatttgttgaagttg

SEQ ID NO: 178633 - DNA, 25 bp, SARS Virus
tttcataaatagttgttgaagttga

SEQ ID NO: 178634 - DNA, 25 bp, SARS Virus
ttcataaatagttgttgaagttgat

SEQ ID NO: 178635 - DNA, 25 bp, SARS Virus
tcataaatagtttttgaagttgatg

SEQ ID NO: 178636 - DNA, 25 bp, SARS Virus
cataaatagttgttgaagttgatgc

SEQ ID NO: 178637 - DNA, 25 bp, SARS Virus
ataaatagttgttgaagttgatgct

SEQ ID NO: 178638 - DNA, 25 bp, SARS Virus
taaatagttgtttaagttgatgctt

SEQ ID NO: 178639 - DNA, 25 bp, SARS Virus
aaatagttgttgtagttgatgctta

SEQ ID NO: 178640 - DNA, 25 bp, SARS Virus
aatagttgttgatgttgatgcttat

SEQ ID NO: 178641 - DNA, 25 bp, SARS Virus
atagttgttgaaattgatgcttatc

SEQ ID NO: 178642 - DNA, 25 bp, SARS Virus
tagttgttgaagatgatgcttatcc

SEQ ID NO: 178643 - DNA, 25 bp, SARS Virus
agttgttgaagtagatgcttatcct

SEQ ID NO: 178644 - DNA, 25 bp, SARS Virus
gttgttgaagttaatgcttatcctc

SEQ ID NO: 178645 - DNA, 25 bp, SARS Virus
ttgttgaagttgatgcttatcctca

SEQ ID NO: 178646 - DNA, 25 bp, SARS Virus
tgttgaagttgaagcttatcctcaa

SEQ ID NO: 178647 - DNA, 25 bp, SARS Virus
gttgaagttgatacttatcctcaac

SEQ ID NO: 178648 - DNA, 25 bp, SARS Virus
ttgaagttgatgattatcctcaaca

SEQ ID NO: 178649 - DNA, 25 bp, SARS Virus
tgaagttgatgcatatcctcaacag

SEQ ID NO: 178650 - DNA, 25 bp, SARS Virus
gaagttgatgctaatcctcaacaga

SEQ ID NO: 178651 - DNA, 25 bp, SARS Virus
aagttgatgcttatcctcaacagac

SEQ ID NO: 178652 - DNA, 25 bp, SARS Virus
agttgatgcttaacctcaacagact

SEQ ID NO: 178653 - DNA, 25 bp, SARS Virus
gttgatgcttatactcaacagacta

SEQ ID NO: 178654 - DNA, 25 bp, SARS Virus
ttgatgcttatcatcaacagactat

SEQ ID NO: 178655 - DNA, 25 bp, SARS Virus
tgatgcttatccacaacagactata

SEQ ID NO: 178656 - DNA, 25 bp, SARS Virus
gatgcttatcctaaacagactatag

SEQ ID NO: 178657 - DNA, 25 bp, SARS Virus
atgcttatcctcaacagactatagt

SEQ ID NO: 178658 - DNA, 25 bp, SARS Virus
tgcttatcctcaacagactatagtg

SEQ ID NO: 178659 - DNA, 25 bp, SARS Virus
gcttatcctcaaaagactatagtgt

SEQ ID NO: 178660 - DNA, 25 bp, SARS Virus
cttatcctcaacagactatagtgtg

SEQ ID NO: 178661 - DNA, 25 bp, SARS Virus
ttatcctcaacaaactatagtgtgt

SEQ ID NO: 178662 - DNA, 25 bp, SARS Virus
tatcctcaacagactatagtgtgta

SEQ ID NO: 178663 - DNA, 25 bp, SARS Virus
atcctcaacagaatatagtgtgtaa

SEQ ID NO: 178664 - DNA, 25 bp, SARS Virus
tcctcaacagacaatagtgtgtaac

SEQ ID NO: 178665 - DNA, 25 bp, SARS Virus
cctcaacagactatagtgtgtaaca

SEQ ID NO: 178666 - DNA, 25 bp, SARS Virus
ctcaacagactaaagtgtgtaacaa

SEQ ID NO: 178667 - DNA, 25 bp, SARS Virus
tcaacagactatagtgtgtaacaac

SEQ ID NO: 178668 - DNA, 25 bp, SARS Virus
caacagactataatgtgtaacaacc

SEQ ID NO: 178669 - DNA, 25 bp, SARS Virus
aacagactatagagtgtaacaaccg

SEQ ID NO: 178670 - DNA, 25 bp, SARS Virus
acagactatagtatgtaacaaccgt

SEQ ID NO: 178671 - DNA, 25 bp, SARS Virus
cagactatagtgagtaacaaccgtc

SEQ ID NO: 178672 - DNA, 25 bp, SARS Virus
agactatagtgtataacaaccgtct

SEQ ID NO: 178673 - DNA, 25 bp, SARS Virus
gactatagtgtgaaacaaccgtcta

SEQ ID NO: 178674 - DNA, 25 bp, SARS Virus
actatagtgtgtaacaaccgtctaa

SEQ ID NO: 178675 - DNA, 25 bp, SARS Virus
ctatagtgtgtaacaaccgtctaat

SEQ ID NO: 178676 - DNA, 25 bp, SARS Virus
tatagtgtgtaaaaaccgtctaata

SEQ ID NO: 178677 - DNA, 25 bp, SARS Virus
atagtgtgtaacaaccgtctaatat

SEQ ID NO: 178678 - DNA, 25 bp, SARS Virus
tagtgtgtaacaaccgtctaatatt

SEQ ID NO: 178679 - DNA, 25 bp, SARS Virus
agtgtgtaacaaacgtctaatattg

SEQ ID NO: 178680 - DNA, 25 bp, SARS Virus
gtgtgtaacaacagtctaatattgc

SEQ ID NO: 178681 - DNA, 25 bp, SARS Virus
tgtgtaacaaccatctaatattgct

SEQ ID NO: 178682 - DNA, 25 bp, SARS Virus
gtgtaacaaccgactaatattgcta

SEQ ID NO: 178683 - DNA, 25 bp, SARS Virus
tgtaacaaccgtataatattgctat

SEQ ID NO: 178684 - DNA, 25 bp, SARS Virus
gtaacaaccgtcaaatattgctatt

SEQ ID NO: 178685 - DNA, 25 bp, SARS Virus
taacaaccgtctaatattgctatta

SEQ ID NO: 178686 - DNA, 25 bp, SARS Virus
aacaaccgtctaatattgctattat

SEQ ID NO: 178687 - DNA, 25 bp, SARS Virus
acaaccgtctaaaattgctattatc

SEQ ID NO: 178688 - DNA, 25 bp, SARS Virus
caaccgtctaatattgctattatca

SEQ ID NO: 178689 - DNA, 25 bp, SARS Virus
aaccgtctaataatgctattatcag

SEQ ID NO: 178690 - DNA, 25 bp, SARS Virus
accgtctaatatagctattatcagt

SEQ ID NO: 178691 - DNA, 25 bp, SARS Virus
ccgtctaatattactattatcagta

SEQ ID NO: 178692 - DNA, 25 bp, SARS Virus
cgtctaatattgatattatcagtat

SEQ ID NO: 178693 - DNA, 25 bp, SARS Virus
gtctaatattgcaattatcagtatt

SEQ ID NO: 178694 - DNA, 25 bp, SARS Virus
tctaatattgctattatcagtatta

SEQ ID NO: 178695 - DNA, 25 bp, SARS Virus
ctaatattgctaatatcagtattag

SEQ ID NO: 178696 - DNA, 25 bp, SARS Virus
taatattgctataatcagtattagt

SEQ ID NO: 178697 - DNA, 25 bp, SARS Virus
aatattgctattatcagtattagtg

SEQ ID NO: 178698 - DNA, 25 bp, SARS Virus
atattgctattaacagtattagtga

SEQ ID NO: 178699 - DNA, 25 bp, SARS Virus
tattgctattataagtattagtgac

SEQ ID NO: 178700 - DNA, 25 bp, SARS Virus
attgctattatcagtattagtgact

SEQ ID NO: 178701 - DNA, 25 bp, SARS Virus
ttgctattatcaatattagtgacta

SEQ ID NO: 178702 - DNA, 25 bp, SARS Virus
tgctattatcagaattagtgactat

SEQ ID NO: 178703 - DNA, 25 bp, SARS Virus
gctattatcagtattagtgactatc

SEQ ID NO: 178704 - DNA, 25 bp, SARS Virus
ctattatcagtaatagtgactatcg

SEQ ID NO: 178705 - DNA, 25 bp, SARS Virus
tattatcagtataagtgactatcgt

SEQ ID NO: 178706 - DNA, 25 bp, SARS Virus
attatcagtattagtgactatcgtc

SEQ ID NO: 178707 - DNA, 25 bp, SARS Virus
ttatcagtattaatgactatcgtcg

SEQ ID NO: 178708 - DNA, 25 bp, SARS Virus
tatcagtattagagactatcgtcgc

SEQ ID NO: 178709 - DNA, 25 bp, SARS Virus
atcagtattagtaactatcgtcgca

SEQ ID NO: 178710 - DNA, 25 bp, SARS Virus
tcagtattagtgactatcgtcgcaa

SEQ ID NO: 178711 - DNA, 25 bp, SARS Virus
cagtattagtgaatatcgtcgcaac

SEQ ID NO: 178712 - DNA, 25 bp, SARS Virus
agtattagtgacaatcgtcgcaacg

SEQ ID NO: 178713 - DNA, 25 bp, SARS Virus
gtattagtgactatcgtcgcaacgg

SEQ ID NO: 178714 - DNA, 25 bp, SARS Virus
tattagtgactaacgtcgcaacggt

SEQ ID NO: 178715 - DNA, 25 bp, SARS Virus
attagtgactatagtcgcaacggta

SEQ ID NO: 178716 - DNA, 25 bp, SARS Virus
ttagtgactatcatcgcaacggtag

SEQ ID NO: 178717 - DNA, 25 bp, SARS Virus
tagtgactatcgacgcaacggtagg

SEQ ID NO: 178718 - DNA, 25 bp, SARS Virus
agtgactatcgtagcaacggtagga

SEQ ID NO: 178719 - DNA, 25 bp, SARS Virus
gtgactatcgtcacaacggtaggac

SEQ ID NO: 178720 - DNA, 25 bp, SARS Virus
tgactatcgtcgaaacggtaggact

SEQ ID NO: 178721 - DNA, 25 bp, SARS Virus
gactatcgtcgcaacggtaggactc

SEQ ID NO: 178722 - DNA, 25 bp, SARS Virus
actatcgtcgcaacggtaggactcg

SEQ ID NO: 178723 - DNA, 25 bp, SARS Virus
ctatcgtcgcaaaggtaggactcgt

SEQ ID NO: 178724 - DNA, 25 bp, SARS Virus
tatcgtcgcaacagtaggactcgtt

SEQ ID NO: 178725 - DNA, 25 bp, SARS Virus
atcgtcgcaacgataggactcgttt

SEQ ID NO: 178726 - DNA, 25 bp, SARS Virus
tcgtcgcaacggaaggactcgtttc

SEQ ID NO: 178727 - DNA, 25 bp, SARS Virus
cgtcgcaacggtaggactcgtttct

SEQ ID NO: 178728 - DNA, 25 bp, SARS Virus
gtcgcaacggtaagactcgtttctt

SEQ ID NO: 178729 - DNA, 25 bp, SARS Virus
tcgcaacggtagaactcgtttcttc

SEQ ID NO: 178730 - DNA, 25 bp, SARS Virus
cgcaacggtaggactcgtttcttct

SEQ ID NO: 178731 - DNA, 25 bp, SARS Virus
gcaacggtaggaatcgtttcttctt

SEQ ID NO: 178732 - DNA, 25 bp, SARS Virus
caacggtaggacacgtttcttcttc

SEQ ID NO: 178733 - DNA, 25 bp, SARS Virus
aacggtaggactagtttcttcttca

SEQ ID NO: 178734 - DNA, 25 bp, SARS Virus
acggtaggactcatttcttcttcac

SEQ ID NO: 178735 - DNA, 25 bp, SARS Virus
cggtaggactcgattcttcttcaca

SEQ ID NO: 178736 - DNA, 25 bp, SARS Virus
ggtaggactcgtatcttcttcacaa

SEQ ID NO: 178737 - DNA, 25 bp, SARS Virus
gtaggactcgttacttcttcacaaa

SEQ ID NO: 178738 - DNA, 25 bp, SARS Virus
taggactcgtttattcttcacaaaa

SEQ ID NO: 178739 - DNA, 25 bp, SARS Virus
aggactcgtttcatcttcacaaaat

SEQ ID NO: 178740 - DNA, 25 bp, SARS Virus
ggactcgtttctacttcacaaaatc

SEQ ID NO: 178741 - DNA, 25 bp, SARS Virus
gactcgtttcttattcacaaaatca

SEQ ID NO: 178742 - DNA, 25 bp, SARS Virus
actcgtttcttcatcacaaaatcaa

SEQ ID NO: 178743 - DNA, 25 bp, SARS Virus
ctcgtttcttctacacaaaatcaag

SEQ ID NO: 178744 - DNA, 25 bp, SARS Virus
tcgtttcttcttaacaaaatcaagt

SEQ ID NO: 178745 - DNA, 25 bp, SARS Virus
cgtttcttcttcacaaaatcaagtt

SEQ ID NO: 178746 - DNA, 25 bp, SARS Virus
gtttcttcttcaaaaaatcaagttg

SEQ ID NO: 178747 - DNA, 25 bp, SARS Virus
tttcttcttcacaaaatcaagttgt

SEQ ID NO: 178748 - DNA, 25 bp, SARS Virus
ttcttcttcacaaaatcaagttgtc

SEQ ID NO: 178749 - DNA, 25 bp, SARS Virus
tcttcttcacaaaatcaagttgtct

SEQ ID NO: 178750 - DNA, 25 bp, SARS Virus
cttcttcacaaaatcaagttgtctt

SEQ ID NO: 178751 - DNA, 25 bp, SARS Virus
ttcttcacaaaaacaagttgtcttg

SEQ ID NO: 178752 - DNA, 25 bp, SARS Virus
tcttcacaaaataaagttgtcttga

SEQ ID NO: 178753 - DNA, 25 bp, SARS Virus
cttcacaaaatcaagttgtcttgaa

SEQ ID NO: 178754 - DNA, 25 bp, SARS Virus
ttcacaaaatcaagttgtcttgaag

SEQ ID NO: 178755 - DNA, 25 bp, SARS Virus
tcacaaaatcaaattgtcttgaagg

SEQ ID NO: 178756 - DNA, 25 bp, SARS Virus
cacaaaatcaagatgtcttgaagga

SEQ ID NO: 178757 - DNA, 25 bp, SARS Virus
acaaaatcaagtagtcttgaaggaa

SEQ ID NO: 178758 - DNA, 25 bp, SARS Virus
caaaatcaagttatcttgaaggaag

SEQ ID NO: 178759 - DNA, 25 bp, SARS Virus
aaaatcaagttgacttgaaggaagg

SEQ ID NO: 178760 - DNA, 25 bp, SARS Virus
aaatcaagttgtattgaaggaagga

SEQ ID NO: 178761 - DNA, 25 bp, SARS Virus
aatcaagttgtcatgaaggaaggaa

SEQ ID NO: 178762 - DNA, 25 bp, SARS Virus
atcaagttgtctagaaggaaggaat

SEQ ID NO: 178763 - DNA, 25 bp, SARS Virus
tcaagttgtcttaaaggaaggaatt

SEQ ID NO: 178764 - DNA, 25 bp, SARS Virus
caagttgtcttgaaggaaggaattt

SEQ ID NO: 178765 - DNA, 25 bp, SARS Virus
aagttgtcttgaaggaaggaatttc

SEQ ID NO: 178766 - DNA, 25 bp, SARS Virus
agttgtcttgaaagaaggaatttct

SEQ ID NO: 178767 - DNA, 25 bp, SARS Virus
gttgtcttgaagaaaggaatttctt

SEQ ID NO: 178768 - DNA, 25 bp, SARS Virus
ttgtcttgaaggaaggaatttcttt

SEQ ID NO: 178769 - DNA, 25 bp, SARS Virus
tgtcttgaaggaaggaatttctttg

SEQ ID NO: 178770 - DNA, 25 bp, SARS Virus
gtcttgaaggaaagaatttctttgg

SEQ ID NO: 178771 - DNA, 25 bp, SARS Virus
tcttgaaggaagaaatttctttgga

SEQ ID NO: 178772 - DNA, 25 bp, SARS Virus
cttgaaggaaggaatttctttggaa

SEQ ID NO: 178773 - DNA, 25 bp, SARS Virus
ttgaaggaaggaatttctttggaaa

SEQ ID NO: 178774 - DNA, 25 bp, SARS Virus
tgaaggaaggaaattctttggaaat

SEQ ID NO: 178775 - DNA, 25 bp, SARS Virus
gaaggaaggaatatctttggaaatc

SEQ ID NO: 178776 - DNA, 25 bp, SARS Virus
aaggaaggaattactttggaaatct

SEQ ID NO: 178777 - DNA, 25 bp, SARS Virus
aggaaggaatttatttggaaatctg

SEQ ID NO: 178778 - DNA, 25 bp, SARS Virus
ggaaggaatttcattggaaatctgt

SEQ ID NO: 178779 - DNA, 25 bp, SARS Virus
gaaggaatttctatggaaatctgtg

SEQ ID NO: 178780 - DNA, 25 bp, SARS Virus
aaggaatttcttaggaaatctgtgt

SEQ ID NO: 178781 - DNA, 25 bp, SARS Virus
aggaatttctttagaaatctgtgtc

SEQ ID NO: 178782 - DNA, 25 bp, SARS Virus
ggaatttctttgaaaatctgtgtcg

SEQ ID NO: 178783 - DNA, 25 bp, SARS Virus
gaatttctttggaaatctgtgtcgt

SEQ ID NO: 178784 - DNA, 25 bp, SARS Virus
aatttctttggaaatctgtgtcgtt

SEQ ID NO: 178785 - DNA, 25 bp, SARS Virus
atttctttggaaatctgtgtcgttt

SEQ ID NO: 178786 - DNA, 25 bp, SARS Virus
tttctttggaaaactgtgtcgtttc

SEQ ID NO: 178787 - DNA, 25 bp, SARS Virus
ttctttggaaatatgtgtcgtttca

SEQ ID NO: 178788 - DNA, 25 bp, SARS Virus
tctttggaaatcagtgtcgtttcag

SEQ ID NO: 178789 - DNA, 25 bp, SARS Virus
ctttggaaatctatgtcgtttcagt

SEQ ID NO: 178790 - DNA, 25 bp, SARS Virus
tttggaaatctgagtcgtttcagta

SEQ ID NO: 178791 - DNA, 25 bp, SARS Virus
ttggaaatctgtatcgtttcagtat

SEQ ID NO: 178792 - DNA, 25 bp, SARS Virus
tggaaatctgtgacgtttcagtatt

SEQ ID NO: 178793 - DNA, 25 bp, SARS Virus
ggaaatctgtgtagtttcagtattt

SEQ ID NO: 178794 - DNA, 25 bp, SARS Virus
gaaatctgtgtcatttcagtatttt

SEQ ID NO: 178795 - DNA, 25 bp, SARS Virus
aaatctgtgtcgattcagtattttc

SEQ ID NO: 178796 - DNA, 25 bp, SARS Virus
aatctgtgtcgtatcagtattttca

SEQ ID NO: 178797 - DNA, 25 bp, SARS Virus
atctgtgtcgttacagtattttcag

SEQ ID NO: 178798 - DNA, 25 bp, SARS Virus
tctgtgtcgtttaagtattttcaga

SEQ ID NO: 178799 - DNA, 25 bp, SARS Virus
ctgtgtcgtttcagtattttcagaa

SEQ ID NO: 178800 - DNA, 25 bp, SARS Virus
tgtgtcgtttcaatattttcagaaa

SEQ ID NO: 178801 - DNA, 25 bp, SARS Virus
gtgtcgtttcagaattttcagaaat

SEQ ID NO: 178802 - DNA, 25 bp, SARS Virus
tgtcgtttcagtattttcagaaata

SEQ ID NO: 178803 - DNA, 25 bp, SARS Virus
gtcgtttcagtaatttcagaaataa

SEQ ID NO: 178804 - DNA, 25 bp, SARS Virus
tcgtttcagtatattcagaaataat

SEQ ID NO: 178805 - DNA, 25 bp, SARS Virus
cgtttcagtattatcagaaataatt

SEQ ID NO: 178806 - DNA, 25 bp, SARS Virus
gtttcagtatttacagaaataattt

SEQ ID NO: 178807 - DNA, 25 bp, SARS Virus
tttcagtattttaagaaataatttt

SEQ ID NO: 178808 - DNA, 25 bp, SARS Virus
ttcagtattttcagaaataatttta

SEQ ID NO: 178809 - DNA, 25 bp, SARS Virus
tcagtattttcaaaaataattttaa

SEQ ID NO: 178810 - DNA, 25 bp, SARS Virus
cagtattttcagaaataattttaat

SEQ ID NO: 178811 - DNA, 25 bp, SARS Virus
agtattttcagaaataattttaatg

SEQ ID NO: 178812 - DNA, 25 bp, SARS Virus
gtattttcagaaataattttaatgg

SEQ ID NO: 178813 - DNA, 25 bp, SARS Virus
tattttcagaaaaaattttaatggc

SEQ ID NO: 178814 - DNA, 25 bp, SARS Virus
attttcagaaataattttaatggcc

SEQ ID NO: 178815 - DNA, 25 bp, SARS Virus
ttttcagaaataattttaatggccc

SEQ ID NO: 178816 - DNA, 25 bp, SARS Virus
tttcagaaataaatttaatggccca

SEQ ID NO: 178817 - DNA, 25 bp, SARS Virus
ttcagaaataatattaatggcccaa

SEQ ID NO: 178818 - DNA, 25 bp, SARS Virus
tcagaaataattataatggcccaaa

SEQ ID NO: 178819 - DNA, 25 bp, SARS Virus
cagaaataatttaaatggcccaaac

SEQ ID NO: 178820 - DNA, 25 bp, SARS Virus
agaaataattttaatggcccaaact

SEQ ID NO: 178821 - DNA, 25 bp, SARS Virus
gaaataattttaatggcccaaactg

SEQ ID NO: 178822 - DNA, 25 bp, SARS Virus
aaataattttaaaggcccaaactgt

SEQ ID NO: 178823 - DNA, 25 bp, SARS Virus
aataattttaatagcccaaactgtc

SEQ ID NO: 178824 - DNA, 25 bp, SARS Virus
ataattttaatgacccaaactgtca

SEQ ID NO: 178825 - DNA, 25 bp, SARS Virus
taattttaatggaccaaactgtcaa

SEQ ID NO: 178826 - DNA, 25 bp, SARS Virus
aattttaatggcacaaactgtcaaa

SEQ ID NO: 178827 - DNA, 25 bp, SARS Virus
attttaatggccaaaactgtcaaac

SEQ ID NO: 178828 - DNA, 25 bp, SARS Virus
ttttaatggcccaaactgtcaaact

SEQ ID NO: 178829 - DNA, 25 bp, SARS Virus
tttaatggcccaaactgtcaaactt

SEQ ID NO: 178830 - DNA, 25 bp, SARS Virus
ttaatggcccaaactgtcaaacttt

SEQ ID NO: 178831 - DNA, 25 bp, SARS Virus
taatggcccaaaatgtcaaactttt

SEQ ID NO: 178832 - DNA, 25 bp, SARS Virus
aatggcccaaacagtcaaacttttc

SEQ ID NO: 178833 - DNA, 25 bp, SARS Virus
atggcccaaactatcaaacttttcg

SEQ ID NO: 178834 - DNA, 25 bp, SARS Virus
tggcccaaactgacaaacttttcgt

SEQ ID NO: 178835 - DNA, 25 bp, SARS Virus
ggcccaaactgtaaaacttttcgtt

SEQ ID NO: 178836 - DNA, 25 bp, SARS Virus
gcccaaactgtcaaacttttcgttg

SEQ ID NO: 178837 - DNA, 25 bp, SARS Virus
cccaaactgtcaaacttttcgttgt

SEQ ID NO: 178838 - DNA, 25 bp, SARS Virus
ccaaactgtcaaacttttcgttgta

SEQ ID NO: 178839 - DNA, 25 bp, SARS Virus
caaactgtcaaaattttcgttgtaa

SEQ ID NO: 178840 - DNA, 25 bp, SARS Virus
aaactgtcaaacatttcgttgtaac

SEQ ID NO: 178841 - DNA, 25 bp, SARS Virus
aactgtcaaactattcgttgtaaca

SEQ ID NO: 178842 - DNA, 25 bp, SARS Virus
actgtcaaacttatcgttgtaacaa

SEQ ID NO: 178843 - DNA, 25 bp, SARS Virus
ctgtcaaactttacgttgtaacaaa

SEQ ID NO: 178844 - DNA, 25 bp, SARS Virus
tgtcaaacttttagttgtaacaaac

SEQ ID NO: 178845 - DNA, 25 bp, SARS Virus
gtcaaacttttcattgtaacaaaca

SEQ ID NO: 178846 - DNA, 25 bp, SARS Virus
tcaaacttttcgatgtaacaaacaa

SEQ ID NO: 178847 - DNA, 25 bp, SARS Virus
caaacttttcgtagtaacaaacaat

SEQ ID NO: 178848 - DNA, 25 bp, SARS Virus
aaacttttcgttataacaaacaatc

SEQ ID NO: 178849 - DNA, 25 bp, SARS Virus
aacttttcgttgaaacaaacaatca

SEQ ID NO: 178850 - DNA, 25 bp, SARS Virus
acttttcgttgtaacaaacaatcac

SEQ ID NO: 178851 - DNA, 25 bp, SARS Virus
cttttcgttgtaacaaacaatcacg

SEQ ID NO: 178852 - DNA, 25 bp, SARS Virus
ttttcgttgtaaaaaacaatcacgt

SEQ ID NO: 178853 - DNA, 25 bp, SARS Virus
tttcgttgtaacaaacaatcacgtc

SEQ ID NO: 178854 - DNA, 25 bp, SARS Virus
ttcgttgtaacaaacaatcacgtcg

SEQ ID NO: 178855 - DNA, 25 bp, SARS Virus
tcgttgtaacaaacaatcacgtcga

SEQ ID NO: 178856 - DNA, 25 bp, SARS Virus
cgttgtaacaaaaaatcacgtcgat

SEQ ID NO: 178857 - DNA, 25 bp, SARS Virus
gttgtaacaaacaatcacgtcgatg

SEQ ID NO: 178858 - DNA, 25 bp, SARS Virus
ttgtaacaaacaatcacgtcgatga

SEQ ID NO: 178859 - DNA, 25 bp, SARS Virus
tgtaacaaacaaacacgtcgatgac

SEQ ID NO: 178860 - DNA, 25 bp, SARS Virus
gtaacaaacaataacgtcgatgact

SEQ ID NO: 178861 - DNA, 25 bp, SARS Virus
taacaaacaatcacgtcgatgactt

SEQ ID NO: 178862 - DNA, 25 bp, SARS Virus
aacaaacaatcaagtcgatgacttt

SEQ ID NO: 178863 - DNA, 25 bp, SARS Virus
acaaacaatcacatcgatgactttt

SEQ ID NO: 178864 - DNA, 25 bp, SARS Virus
caaacaatcacgacgatgacttttc

SEQ ID NO: 178865 - DNA, 25 bp, SARS Virus
aaacaatcacgtagatgacttttcg

SEQ ID NO: 178866 - DNA, 25 bp, SARS Virus
aacaatcacgtcaatgacttttcgt

SEQ ID NO: 178867 - DNA, 25 bp, SARS Virus
acaatcacgtcgatgacttttcgta

SEQ ID NO: 178868 - DNA, 25 bp, SARS Virus
caatcacgtcgaagacttttcgtac

SEQ ID NO: 178869 - DNA, 25 bp, SARS Virus
aatcacgtcgataacttttcgtaca

SEQ ID NO: 178870 - DNA, 25 bp, SARS Virus
atcacgtcgatgacttttcgtacat

SEQ ID NO: 178871 - DNA, 25 bp, SARS Virus
tcacgtcgatgaattttcgtacatc

SEQ ID NO: 178872 - DNA, 25 bp, SARS Virus
cacgtcgatgacatttcgtacatca

SEQ ID NO: 178873 - DNA, 25 bp, SARS Virus
acgtcgatgactattcgtacatcac

SEQ ID NO: 178874 - DNA, 25 bp, SARS Virus
cgtcgatgacttatcgtacatcacg

SEQ ID NO: 178875 - DNA, 25 bp, SARS Virus
gtcgatgactttacgtacatcacgc

SEQ ID NO: 178876 - DNA, 25 bp, SARS Virus
tcgatgacttttagtacatcacgca

SEQ ID NO: 178877 - DNA, 25 bp, SARS Virus
cgatgacttttcatacatcacgcaa

SEQ ID NO: 178878 - DNA, 25 bp, SARS Virus
gatgacttttcgaacatcacgcaaa

SEQ ID NO: 178879 - DNA, 25 bp, SARS Virus
atgacttttcgtacatcacgcaaat

SEQ ID NO: 178880 - DNA, 25 bp, SARS Virus
tgacttttcgtaaatcacgcaaata

SEQ ID NO: 178881 - DNA, 25 bp, SARS Virus
gacttttcgtacatcacgcaaatag

SEQ ID NO: 178882 - DNA, 25 bp, SARS Virus
acttttcgtacaacacgcaaataga

SEQ ID NO: 178883 - DNA, 25 bp, SARS Virus
cttttcgtacataacgcaaatagat

SEQ ID NO: 178884 - DNA, 25 bp, SARS Virus
ttttcgtacatcacgcaaatagatc

SEQ ID NO: 178885 - DNA, 25 bp, SARS Virus
tttcgtacatcaagcaaatagatcg

SEQ ID NO: 178886 - DNA, 25 bp, SARS Virus
ttcgtacatcacacaaatagatcgt

SEQ ID NO: 178887 - DNA, 25 bp, SARS Virus
tcgtacatcacgaaaatagatcgtt

SEQ ID NO: 178888 - DNA, 25 bp, SARS Virus
cgtacatcacgcaaatagatcgtta

SEQ ID NO: 178889 - DNA, 25 bp, SARS Virus
gtacatcacgcaaatagatcgttat

SEQ ID NO: 178890 - DNA, 25 bp, SARS Virus
tacatcacgcaaatagatcgttatt

SEQ ID NO: 178891 - DNA, 25 bp, SARS Virus
acatcacgcaaaaagatcgttattt

SEQ ID NO: 178892 - DNA, 25 bp, SARS Virus
catcacgcaaatagatcgttattta

SEQ ID NO: 178893 - DNA, 25 bp, SARS Virus
atcacgcaaataaatcgttatttaa

SEQ ID NO: 178894 - DNA, 25 bp, SARS Virus
tcacgcaaatagatcgttatttaac

SEQ ID NO: 178895 - DNA, 25 bp, SARS Virus
cacgcaaatagaacgttatttaacg

SEQ ID NO: 178896 - DNA, 25 bp, SARS Virus
acgcaaatagatagttatttaacgg

SEQ ID NO: 178897 - DNA, 25 bp, SARS Virus
cgcaaatagatcattatttaacggt

SEQ ID NO: 178898 - DNA, 25 bp, SARS Virus
gcaaatagatcgatatttaacggtc

SEQ ID NO: 178899 - DNA, 25 bp, SARS Virus
caaatagatcgtaatttaacggtct

SEQ ID NO: 178900 - DNA, 25 bp, SARS Virus
aaatagatcgttatttaacggtctt

SEQ ID NO: 178901 - DNA, 25 bp, SARS Virus
aatagatcgttaattaacggtcttc

SEQ ID NO: 178902 - DNA, 25 bp, SARS Virus
atagatcgttatataacggtcttcg

SEQ ID NO: 178903 - DNA, 25 bp, SARS Virus
tagatcgttattaaacggtcttcga

SEQ ID NO: 178904 - DNA, 25 bp, SARS Virus
agatcgttatttaacggtcttcgac

SEQ ID NO: 178905 - DNA, 25 bp, SARS Virus
gatcgttatttaacggtcttcgacg

SEQ ID NO: 178906 - DNA, 25 bp, SARS Virus
atcgttatttaaaggtcttcgacgt

SEQ ID NO: 178907 - DNA, 25 bp, SARS Virus
tcgttatttaacagtcttcgacgta

SEQ ID NO: 178908 - DNA, 25 bp, SARS Virus
cgttatttaacgatcttcgacgtac

SEQ ID NO: 178909 - DNA, 25 bp, SARS Virus
gttatttaacggacttcgacgtacg

SEQ ID NO: 178910 - DNA, 25 bp, SARS Virus
ttatttaacggtattcgacgtacgt

SEQ ID NO: 178911 - DNA, 25 bp, SARS Virus
tatttaacggtcatcgacgtacgta

SEQ ID NO: 178912 - DNA, 25 bp, SARS Virus
atttaacggtctacgacgtacgtat

SEQ ID NO: 178913 - DNA, 25 bp, SARS Virus
tttaacggtcttagacgtacgtatc

SEQ ID NO: 178914 - DNA, 25 bp, SARS Virus
ttaacggtcttcaacgtacgtatcg

SEQ ID NO: 178915 - DNA, 25 bp, SARS Virus
taacggtcttcgacgtacgtatcga

SEQ ID NO: 178916 - DNA, 25 bp, SARS Virus
aacggtcttcgaagtacgtatcgac

SEQ ID NO: 178917 - DNA, 25 bp, SARS Virus
acggtcttcgacatacgtatcgacc

SEQ ID NO: 178918 - DNA, 25 bp, SARS Virus
cggtcttcgacgaacgtatcgacct

SEQ ID NO: 178919 - DNA, 25 bp, SARS Virus
ggtcttcgacgtacgtatcgaccta

SEQ ID NO: 178920 - DNA, 25 bp, SARS Virus
gtcttcgacgtaagtatcgacctag

SEQ ID NO: 178921 - DNA, 25 bp, SARS Virus
tcttcgacgtacatatcgacctagt

SEQ ID NO: 178922 - DNA, 25 bp, SARS Virus
cttcgacgtacgaatcgacctagtc

SEQ ID NO: 178923 - DNA, 25 bp, SARS Virus
ttcgacgtacgtatcgacctagtcg

SEQ ID NO: 178924 - DNA, 25 bp, SARS Virus
tcgacgtacgtaacgacctagtcgt

SEQ ID NO: 178925 - DNA, 25 bp, SARS Virus
cgacgtacgtatagacctagtcgtc

SEQ ID NO: 178926 - DNA, 25 bp, SARS Virus
gacgtacgtatcaacctagtcgtcg

SEQ ID NO: 178927 - DNA, 25 bp, SARS Virus
acgtacgtatcgacctagtcgtcgt

SEQ ID NO: 178928 - DNA, 25 bp, SARS Virus
cgtacgtatcgaactagtcgtcgta

SEQ ID NO: 178929 - DNA, 25 bp, SARS Virus
gtacgtatcgacatagtcgtcgtat

SEQ ID NO: 178930 - DNA, 25 bp, SARS Virus
tacgtatcgaccaagtcgtcgtatg

SEQ ID NO: 178931 - DNA, 25 bp, SARS Virus
acgtatcgacctagtcgtcgtatgt

SEQ ID NO: 178932 - DNA, 25 bp, SARS Virus
cgtatcgacctaatcgtcgtatgtg

SEQ ID NO: 178933 - DNA, 25 bp, SARS Virus
gtatcgacctagacgtcgtatgtga

SEQ ID NO: 178934 - DNA, 25 bp, SARS Virus
tatcgacctagtagtcgtatgtgat

SEQ ID NO: 178935 - DNA, 25 bp, SARS Virus
atcgacctagtcatcgtatgtgatt

SEQ ID NO: 178936 - DNA, 25 bp, SARS Virus
tcgacctagtcgacgtatgtgattt

SEQ ID NO: 178937 - DNA, 25 bp, SARS Virus
cgacctagtcgtagtatgtgatttt

SEQ ID NO: 178938 - DNA, 25 bp, SARS Virus
gacctagtcgtcatatgtgattttc

SEQ ID NO: 178939 - DNA, 25 bp, SARS Virus
acctagtcgtcgaatgtgattttca

SEQ ID NO: 178940 - DNA, 25 bp, SARS Virus
cctagtcgtcgtatgtgattttcaa

SEQ ID NO: 178941 - DNA, 25 bp, SARS Virus
ctagtcgtcgtaagtgattttcaag

SEQ ID NO: 178942 - DNA, 25 bp, SARS Virus
tagtcgtcgtatatgattttcaagg

SEQ ID NO: 178943 - DNA, 25 bp, SARS Virus
agtcgtcgtatgagattttcaagga

SEQ ID NO: 178944 - DNA, 25 bp, SARS Virus
gtcgtcgtatgtaattttcaaggaa

SEQ ID NO: 178945 - DNA, 25 bp, SARS Virus
tcgtcgtatgtgattttcaaggaac

SEQ ID NO: 178946 - DNA, 25 bp, SARS Virus
cgtcgtatgtgaatttcaaggaact

SEQ ID NO: 178947 - DNA, 25 bp, SARS Virus
gtcgtatgtgatattcaaggaactt

SEQ ID NO: 178948 - DNA, 25 bp, SARS Virus
tcgtatgtgattatcaaggaacttt

SEQ ID NO: 178949 - DNA, 25 bp, SARS Virus
cgtatgtgatttacaaggaactttg

SEQ ID NO: 178950 - DNA, 25 bp, SARS Virus
gtatgtgattttaaaggaactttga

SEQ ID NO: 178951 - DNA, 25 bp, SARS Virus
tatgtgattttcaaggaactttgac

SEQ ID NO: 178952 - DNA, 25 bp, SARS Virus
atgtgattttcaaggaactttgact

SEQ ID NO: 178953 - DNA, 25 bp, SARS Virus
tgtgattttcaaagaactttgactc

SEQ ID NO: 178954 - DNA, 25 bp, SARS Virus
gtgattttcaagaaactttgactct

SEQ ID NO: 178955 - DNA, 25 bp, SARS Virus
tgattttcaaggaactttgactctg

SEQ ID NO: 178956 - DNA, 25 bp, SARS Virus
gattttcaaggaactttgactctgc

SEQ ID NO: 178957 - DNA, 25 bp, SARS Virus
attttcaaggaaatttgactctgcg

SEQ ID NO: 178958 - DNA, 25 bp, SARS Virus
ttttcaaggaacattgactctgcgc

SEQ ID NO: 178959 - DNA, 25 bp, SARS Virus
tttcaaggaactatgactctgcgct

SEQ ID NO: 178960 - DNA, 25 bp, SARS Virus
ttcaaggaacttagactctgcgctc

SEQ ID NO: 178961 - DNA, 25 bp, SARS Virus
tcaaggaactttaactctgcgctcg

SEQ ID NO: 178962 - DNA, 25 bp, SARS Virus
caaggaactttgactctgcgctcga

SEQ ID NO: 178963 - DNA, 25 bp, SARS Virus
aaggaactttgaatctgcgctcgat

SEQ ID NO: 178964 - DNA, 25 bp, SARS Virus
aggaactttgacactgcgctcgata

SEQ ID NO: 178965 - DNA, 25 bp, SARS Virus
ggaactttgactatgcgctcgatac

SEQ ID NO: 178966 - DNA, 25 bp, SARS Virus
gaactttgactcagcgctcgataca

SEQ ID NO: 178967 - DNA, 25 bp, SARS Virus
aactttgactctacgctcgatacat

SEQ ID NO: 178968 - DNA, 25 bp, SARS Virus
actttgactctgagctcgatacatt

SEQ ID NO: 178969 - DNA, 25 bp, SARS Virus
ctttgactctgcactcgatacattc

SEQ ID NO: 178970 - DNA, 25 bp, SARS Virus
tttgactctgcgatcgatacattca

SEQ ID NO: 178971 - DNA, 25 bp, SARS Virus
ttgactctgcgcacgatacattcaa

SEQ ID NO: 178972 - DNA, 25 bp, SARS Virus
tgactctgcgctagatacattcaaa

SEQ ID NO: 178973 - DNA, 25 bp, SARS Virus
gactctgcgctcaatacattcaaat

SEQ ID NO: 178974 - DNA, 25 bp, SARS Virus
actctgcgctcgatacattcaaatg

SEQ ID NO: 178975 - DNA, 25 bp, SARS Virus
ctctgcgctcgaaacattcaaatgt

SEQ ID NO: 178976 - DNA, 25 bp, SARS Virus
tctgcgctcgatacattcaaatgta

SEQ ID NO: 178977 - DNA, 25 bp, SARS Virus
ctgcgctcgataaattcaaatgtag

SEQ ID NO: 178978 - DNA, 25 bp, SARS Virus
tgcgctcgatacattcaaatgtagg

SEQ ID NO: 178979 - DNA, 25 bp, SARS Virus
gcgctcgatacaatcaaatgtagga

SEQ ID NO: 178980 - DNA, 25 bp, SARS Virus
cgctcgatacatacaaatgtaggac

SEQ ID NO: 178981 - DNA, 25 bp, SARS Virus
gctcgatacattaaaatgtaggact

SEQ ID NO: 178982 - DNA, 25 bp, SARS Virus
ctcgatacattcaaatgtaggacta

SEQ ID NO: 178983 - DNA, 25 bp, SARS Virus
tcgatacattcaaatgtaggactaa

SEQ ID NO: 178984 - DNA, 25 bp, SARS Virus
cgatacattcaaatgtaggactaat

SEQ ID NO: 178985 - DNA, 25 bp, SARS Virus
gatacattcaaaagtaggactaata

SEQ ID NO: 178986 - DNA, 25 bp, SARS Virus
atacattcaaatataggactaatac

SEQ ID NO: 178987 - DNA, 25 bp, SARS Virus
tacattcaaatgaaggactaataca

SEQ ID NO: 178988 - DNA, 25 bp, SARS Virus
acattcaaatgtaggactaatacat

SEQ ID NO: 178989 - DNA, 25 bp, SARS Virus
cattcaaatgtaagactaatacatg

SEQ ID NO: 178990 - DNA, 25 bp, SARS Virus
attcaaatgtagaactaatacatgc

SEQ ID NO: 178991 - DNA, 25 bp, SARS Virus
ttcaaatgtaggactaatacatgct

SEQ ID NO: 178992 - DNA, 25 bp, SARS Virus
tcaaatgtaggaataatacatgctg

SEQ ID NO: 178993 - DNA, 25 bp, SARS Virus
caaatgtaggacaaatacatgctga

SEQ ID NO: 178994 - DNA, 25 bp, SARS Virus
aaatgtaggactaatacatgctgag

SEQ ID NO: 178995 - DNA, 25 bp, SARS Virus
aatgtaggactaatacatgctgagg

SEQ ID NO: 178996 - DNA, 25 bp, SARS Virus
atgtaggactaaaacatgctgagga

SEQ ID NO: 178997 - DNA, 25 bp, SARS Virus
tgtaggactaatacatgctgaggat

SEQ ID NO: 178998 - DNA, 25 bp, SARS Virus
gtaggactaataaatgctgaggatt

SEQ ID NO: 178999 - DNA, 25 bp, SARS Virus
taggactaatacatgctgaggattg

SEQ ID NO: 179000 - DNA, 25 bp, SARS Virus
aggactaatacaagctgaggattga

SEQ ID NO: 179001 - DNA, 25 bp, SARS Virus
ggactaatacatactgaggattgag

SEQ ID NO: 179002 - DNA, 25 bp, SARS Virus
gactaatacatgatgaggattgagt

SEQ ID NO: 179003 - DNA, 25 bp, SARS Virus
actaatacatgcagaggattgagtg

SEQ ID NO: 179004 - DNA, 25 bp, SARS Virus
ctaatacatgctaaggattgagtgc

SEQ ID NO: 179005 - DNA, 25 bp, SARS Virus
taatacatgctgaggattgagtgct

SEQ ID NO: 179006 - DNA, 25 bp, SARS Virus
aatacatgctgaagattgagtgctt

SEQ ID NO: 179007 - DNA, 25 bp, SARS Virus
atacatgctgagaattgagtgcttt

SEQ ID NO: 179008 - DNA, 25 bp, SARS Virus
tacatgctgaggattgagtgctttt

SEQ ID NO: 179009 - DNA, 25 bp, SARS Virus
acatgctgaggaatgagtgctttta

SEQ ID NO: 179010 - DNA, 25 bp, SARS Virus
catgctgaggatagagtgcttttac

SEQ ID NO: 179011 - DNA, 25 bp, SARS Virus
atgctgaggattaagtgcttttacc

SEQ ID NO: 179012 - DNA, 25 bp, SARS Virus
tgctgaggattgagtgcttttacca

SEQ ID NO: 179013 - DNA, 25 bp, SARS Virus
gctgaggattgaatgcttttaccat

SEQ ID NO: 179014 - DNA, 25 bp, SARS Virus
ctgaggattgagagcttttaccata

SEQ ID NO: 179015 - DNA, 25 bp, SARS Virus
tgaggattgagtacttttaccatag

SEQ ID NO: 179016 - DNA, 25 bp, SARS Virus
gaggattgagtgattttaccatagg

SEQ ID NO: 179017 - DNA, 25 bp, SARS Virus
aggattgagtgcatttaccataggt

SEQ ID NO: 179018 - DNA, 25 bp, SARS Virus
ggattgagtgctattaccataggtc

SEQ ID NO: 179019 - DNA, 25 bp, SARS Virus
gattgagtgcttataccataggtca

SEQ ID NO: 179020 - DNA, 25 bp, SARS Virus
attgagtgctttaaccataggtcaa

SEQ ID NO: 179021 - DNA, 25 bp, SARS Virus
ttgagtgcttttaccataggtcaac

SEQ ID NO: 179022 - DNA, 25 bp, SARS Virus
tgagtgcttttaacataggtcaact

SEQ ID NO: 179023 - DNA, 25 bp, SARS Virus
gagtgcttttacaataggtcaactt

SEQ ID NO: 179024 - DNA, 25 bp, SARS Virus
agtgcttttaccataggtcaacttt

SEQ ID NO: 179025 - DNA, 25 bp, SARS Virus
gtgcttttaccaaaggtcaactttg

SEQ ID NO: 179026 - DNA, 25 bp, SARS Virus
tgcttttaccataggtcaactttgt

SEQ ID NO: 179027 - DNA, 25 bp, SARS Virus
gcttttaccataagtcaactttgtt

SEQ ID NO: 179028 - DNA, 25 bp, SARS Virus
cttttaccatagatcaactttgttg

SEQ ID NO: 179029 - DNA, 25 bp, SARS Virus
ttttaccataggacaactttgttgt

SEQ ID NO: 179030 - DNA, 25 bp, SARS Virus
tttaccataggtaaactttgttgtt

SEQ ID NO: 179031 - DNA, 25 bp, SARS Virus
ttaccataggtcaactttgttgttt

SEQ ID NO: 179032 - DNA, 25 bp, SARS Virus
taccataggtcaactttgttgtttt

SEQ ID NO: 179033 - DNA, 25 bp, SARS Virus
accataggtcaaatttgttgttttc

SEQ ID NO: 179034 - DNA, 25 bp, SARS Virus
ccataggtcaacattgttgttttcc

SEQ ID NO: 179035 - DNA, 25 bp, SARS Virus
cataggtcaactatgttgttttcct

SEQ ID NO: 179036 - DNA, 25 bp, SARS Virus
ataggtcaacttagttgttttcctt

SEQ ID NO: 179037 - DNA, 25 bp, SARS Virus
taggtcaactttattgttttccttg

SEQ ID NO: 179038 - DNA, 25 bp, SARS Virus
aggtcaactttgatgttttccttgt

SEQ ID NO: 179039 - DNA, 25 bp, SARS Virus
ggtcaactttgtagttttccttgtg

SEQ ID NO: 179040 - DNA, 25 bp, SARS Virus
gtcaactttgttattttccttgtgg

SEQ ID NO: 179041 - DNA, 25 bp, SARS Virus
tcaactttgttgatttccttgtggt

SEQ ID NO: 179042 - DNA, 25 bp, SARS Virus
caactttgttgtattccttgtggta

SEQ ID NO: 179043 - DNA, 25 bp, SARS Virus
aactttgttgttatccttgtggtag

SEQ ID NO: 179044 - DNA, 25 bp, SARS Virus
actttgttgtttaccttgtggtaga

SEQ ID NO: 179045 - DNA, 25 bp, SARS Virus
ctttgttgttttacttgtggtagat

SEQ ID NO: 179046 - DNA, 25 bp, SARS Virus
tttgttgttttcattgtggtagatg

SEQ ID NO: 179047 - DNA, 25 bp, SARS Virus
ttgttgttttccatgtggtagatgt

SEQ ID NO: 179048 - DNA, 25 bp, SARS Virus
tgttgttttcctagtggtagatgtt

SEQ ID NO: 179049 - DNA, 25 bp, SARS Virus
gttgttttccttatggtagatgttt

SEQ ID NO: 179050 - DNA, 25 bp, SARS Virus
ttgttttccttgaggtagatgttta

SEQ ID NO: 179051 - DNA, 25 bp, SARS Virus
tgttttccttgtagtagatgtttat

SEQ ID NO: 179052 - DNA, 25 bp, SARS Virus
gttttccttgtgatagatgtttata

SEQ ID NO: 179053 - DNA, 25 bp, SARS Virus
ttttccttgtggaagatgtttataa

SEQ ID NO: 179054 - DNA, 25 bp, SARS Virus
tttccttgtggtagatgtttataaa

SEQ ID NO: 179055 - DNA, 25 bp, SARS Virus
ttccttgtggtaaatgtttataaaa

SEQ ID NO: 179056 - DNA, 25 bp, SARS Virus
tccttgtggtagatgtttataaaaa

SEQ ID NO: 179057 - DNA, 25 bp, SARS Virus
ccttgtggtagaagtttataaaaag

SEQ ID NO: 179058 - DNA, 25 bp, SARS Virus
cttgtggtagatatttataaaaaga

SEQ ID NO: 179059 - DNA, 25 bp, SARS Virus
ttgtggtagatgattataaaaagaa

SEQ ID NO: 179060 - DNA, 25 bp, SARS Virus
tgtggtagatgtatataaaaagaat

SEQ ID NO: 179061 - DNA, 25 bp, SARS Virus
gtggtagatgttaataaaaagaatg

SEQ ID NO: 179062 - DNA, 25 bp, SARS Virus
tggtagatgtttataaaaagaatga

SEQ ID NO: 179063 - DNA, 25 bp, SARS Virus
ggtagatgtttaaaaaaagaatgat

SEQ ID NO: 179064 - DNA, 25 bp, SARS Virus
gtagatgtttataaaaagaatgatc

SEQ ID NO: 179065 - DNA, 25 bp, SARS Virus
tagatgtttataaaaagaatgatca

SEQ ID NO: 179066 - DNA, 25 bp, SARS Virus
agatgtttataaaaagaatgatcac

SEQ ID NO: 179067 - DNA, 25 bp, SARS Virus
gatgtttataaaaagaatgatcacc

SEQ ID NO: 179068 - DNA, 25 bp, SARS Virus
atgtttataaaaagaatgatcacca

SEQ ID NO: 179069 - DNA, 25 bp, SARS Virus
tgtttataaaaaaaatgatcaccag

SEQ ID NO: 179070 - DNA, 25 bp, SARS Virus
gtttataaaaagaatgatcaccagg

SEQ ID NO: 179071 - DNA, 25 bp, SARS Virus
tttataaaaagaatgatcaccaggt

SEQ ID NO: 179072 - DNA, 25 bp, SARS Virus
ttataaaaagaaagatcaccaggtt

SEQ ID NO: 179073 - DNA, 25 bp, SARS Virus
tataaaaagaataatcaccaggttt

SEQ ID NO: 179074 - DNA, 25 bp, SARS Virus
ataaaaagaatgatcaccaggtttt

SEQ ID NO: 179075 - DNA, 25 bp, SARS Virus
taaaaagaatgaacaccaggttttg

SEQ ID NO: 179076 - DNA, 25 bp, SARS Virus
aaaaagaatgataaccaggttttga

SEQ ID NO: 179077 - DNA, 25 bp, SARS Virus
aaaagaatgatcaccaggttttgaa

SEQ ID NO: 179078 - DNA, 25 bp, SARS Virus
aaagaatgatcaacaggttttgaac

SEQ ID NO: 179079 - DNA, 25 bp, SARS Virus
aagaatgatcacaaggttttgaaca

SEQ ID NO: 179080 - DNA, 25 bp, SARS Virus
agaatgatcaccaggttttgaacat

SEQ ID NO: 179081 - DNA, 25 bp, SARS Virus
gaatgatcaccaagttttgaacatc

SEQ ID NO: 179082 - DNA, 25 bp, SARS Virus
aatgatcaccagattttgaacatcc

SEQ ID NO: 179083 - DNA, 25 bp, SARS Virus
atgatcaccaggatttgaacatcca

SEQ ID NO: 179084 - DNA, 25 bp, SARS Virus
tgatcaccaggtattgaacatccac

SEQ ID NO: 179085 - DNA, 25 bp, SARS Virus
gatcaccaggttatgaacatccacc

SEQ ID NO: 179086 - DNA, 25 bp, SARS Virus
atcaccaggtttagaacatccacct

SEQ ID NO: 179087 - DNA, 25 bp, SARS Virus
tcaccaggttttaaacatccacctt

SEQ ID NO: 179088 - DNA, 25 bp, SARS Virus
caccaggttttgaacatccaccttt

SEQ ID NO: 179089 - DNA, 25 bp, SARS Virus
accaggttttgaacatccacctttg

SEQ ID NO: 179090 - DNA, 25 bp, SARS Virus
ccaggttttgaaaatccacctttgt

SEQ ID NO: 179091 - DNA, 25 bp, SARS Virus
caggttttgaacatccacctttgtg

SEQ ID NO: 179092 - DNA, 25 bp, SARS Virus
aggttttgaacaaccacctttgtgt

SEQ ID NO: 179093 - DNA, 25 bp, SARS Virus
ggttttgaacatacacctttgtgtc

SEQ ID NO: 179094 - DNA, 25 bp, SARS Virus
gttttgaacatcaacctttgtgtca

SEQ ID NO: 179095 - DNA, 25 bp, SARS Virus
ttttgaacatccacctttgtgtcat

SEQ ID NO: 179096 - DNA, 25 bp, SARS Virus
tttgaacatccaactttgtgtcatc

SEQ ID NO: 179097 - DNA, 25 bp, SARS Virus
ttgaacatccacatttgtgtcatct

SEQ ID NO: 179098 - DNA, 25 bp, SARS Virus
tgaacatccaccattgtgtcatctt

SEQ ID NO: 179099 - DNA, 25 bp, SARS Virus
gaacatccacctatgtgtcatcttt

SEQ ID NO: 179100 - DNA, 25 bp, SARS Virus
aacatccaccttagtgtcatctttt

SEQ ID NO: 179101 - DNA, 25 bp, SARS Virus
acatccacctttatgtcatctttta

SEQ ID NO: 179102 - DNA, 25 bp, SARS Virus
catccacctttgagtcatcttttat

SEQ ID NO: 179103 - DNA, 25 bp, SARS Virus
atccacctttgtatcatcttttatt

SEQ ID NO: 179104 - DNA, 25 bp, SARS Virus
tccacctttgtgacatcttttattg

SEQ ID NO: 179105 - DNA, 25 bp, SARS Virus
ccacctttgtgtaatcttttattgt

SEQ ID NO: 179106 - DNA, 25 bp, SARS Virus
cacctttgtgtcatcttttattgtg

SEQ ID NO: 179107 - DNA, 25 bp, SARS Virus
acctttgtgtcaacttttattgtgt

SEQ ID NO: 179108 - DNA, 25 bp, SARS Virus
cctttgtgtcatattttattgtgta

SEQ ID NO: 179109 - DNA, 25 bp, SARS Virus
ctttgtgtcatcatttattgtgtaa

SEQ ID NO: 179110 - DNA, 25 bp, SARS Virus
tttgtgtcatctattattgtgtaat

SEQ ID NO: 179111 - DNA, 25 bp, SARS Virus
ttgtgtcatcttatattgtgtaatt

SEQ ID NO: 179112 - DNA, 25 bp, SARS Virus
tgtgtcatctttaattgtgtaattt

SEQ ID NO: 179113 - DNA, 25 bp, SARS Virus
gtgtcatcttttattgtgtaatttc

SEQ ID NO: 179114 - DNA, 25 bp, SARS Virus
tgtcatcttttaatgtgtaatttca

SEQ ID NO: 179115 - DNA, 25 bp, SARS Virus
gtcatcttttatagtgtaatttcaa

SEQ ID NO: 179116 - DNA, 25 bp, SARS Virus
tcatcttttattatgtaatttcaaa

SEQ ID NO: 179117 - DNA, 25 bp, SARS Virus
catcttttattgagtaatttcaaac

SEQ ID NO: 179118 - DNA, 25 bp, SARS Virus
atcttttattgtataatttcaaacg

SEQ ID NO: 179119 - DNA, 25 bp, SARS Virus
tcttttattgtgaaatttcaaacgt

SEQ ID NO: 179120 - DNA, 25 bp, SARS Virus
cttttattgtgtaatttcaaacgtg

SEQ ID NO: 179121 - DNA, 25 bp, SARS Virus
ttttattgtgtaatttcaaacgtgt

SEQ ID NO: 179122 - DNA, 25 bp, SARS Virus
tttattgtgtaaattcaaacgtgtt

SEQ ID NO: 179123 - DNA, 25 bp, SARS Virus
ttattgtgtaatatcaaacgtgtta

SEQ ID NO: 179124 - DNA, 25 bp, SARS Virus
tattgtgtaattacaaacgtgttac

SEQ ID NO: 179125 - DNA, 25 bp, SARS Virus
attgtgtaatttaaaacgtgttact

SEQ ID NO: 179126 - DNA, 25 bp, SARS Virus
ttgtgtaatttcaaacgtgttactt

SEQ ID NO: 179127 - DNA, 25 bp, SARS Virus
tgtgtaatttcaaacgtgttacttc

SEQ ID NO: 179128 - DNA, 25 bp, SARS Virus
gtgtaatttcaaacgtgttacttcc

SEQ ID NO: 179129 - DNA, 25 bp, SARS Virus
atagttgttgaacttgatgcttatc

SEQ ID NO: 179130 - DNA, 25 bp, SARS Virus
tagttgttgaagctgatgcttatcc

SEQ ID NO: 179131 - DNA, 25 bp, SARS Virus
agttgttgaagtcgatgcttatcct

SEQ ID NO: 179132 - DNA, 25 bp, SARS Virus
gttgttgaagttcatgcttatcctc

SEQ ID NO: 179133 - DNA, 25 bp, SARS Virus
ttgttgaagttgctgcttatcctca

SEQ ID NO: 179134 - DNA, 25 bp, SARS Virus
tgttgaagttgacgcttatcctcaa

SEQ ID NO: 179135 - DNA, 25 bp, SARS Virus
gttgaagttgatccttatcctcaac

SEQ ID NO: 179136 - DNA, 25 bp, SARS Virus
ttgaagttgatgcttatcctcaaca

SEQ ID NO: 179137 - DNA, 25 bp, SARS Virus
tgaagttgatgcctatcctcaacag

SEQ ID NO: 179138 - DNA, 25 bp, SARS Virus
gaagttgatgctcatcctcaacaga

SEQ ID NO: 179139 - DNA, 25 bp, SARS Virus
aagttgatgcttctcctcaacagac

SEQ ID NO: 179140 - DNA, 25 bp, SARS Virus
agttgatgcttaccctcaacagact

SEQ ID NO: 179141 - DNA, 25 bp, SARS Virus
gttgatgcttatcctcaacagacta

SEQ ID NO: 179142 - DNA, 25 bp, SARS Virus
ttgatgcttatcctcaacagactat

SEQ ID NO: 179143 - DNA, 25 bp, SARS Virus
tgatgcttatccccaacagactata

SEQ ID NO: 179144 - DNA, 25 bp, SARS Virus
gatgcttatcctcaacagactatag

SEQ ID NO: 179145 - DNA, 25 bp, SARS Virus
atgcttatcctccacagactatagt

SEQ ID NO: 179146 - DNA, 25 bp, SARS Virus
tgcttatcctcaccagactatagtg

SEQ ID NO: 179147 - DNA, 25 bp, SARS Virus
gcttatcctcaacagactatagtgt

SEQ ID NO: 179148 - DNA, 25 bp, SARS Virus
cttatcctcaaccgactatagtgtg

SEQ ID NO: 179149 - DNA, 25 bp, SARS Virus
ttatcctcaacacactatagtgtgt

SEQ ID NO: 179150 - DNA, 25 bp, SARS Virus
tatcctcaacagcctatagtgtgta

SEQ ID NO: 179151 - DNA, 25 bp, SARS Virus
atcctcaacagactatagtgtgtaa

SEQ ID NO: 179152 - DNA, 25 bp, SARS Virus
tcctcaacagaccatagtgtgtaac

SEQ ID NO: 179153 - DNA, 25 bp, SARS Virus
cctcaacagactctagtgtgtaaca

SEQ ID NO: 179154 - DNA, 25 bp, SARS Virus
ctcaacagactacagtgtgtaacaa

SEQ ID NO: 179155 - DNA, 25 bp, SARS Virus
tcaacagactatcgtgtgtaacaac

SEQ ID NO: 179156 - DNA, 25 bp, SARS Virus
caacagactatactgtgtaacaacc

SEQ ID NO: 179157 - DNA, 25 bp, SARS Virus
aacagactatagcgtgtaacaaccg

SEQ ID NO: 179158 - DNA, 25 bp, SARS Virus
acagactatagtctgtaacaaccgt

SEQ ID NO: 179159 - DNA, 25 bp, SARS Virus
cagactatagtgcgtaacaaccgtc

SEQ ID NO: 179160 - DNA, 25 bp, SARS Virus
agactatagtgtctaacaaccgtct

SEQ ID NO: 179161 - DNA, 25 bp, SARS Virus
gactatagtgtgcaacaaccgtcta

SEQ ID NO: 179162 - DNA, 25 bp, SARS Virus
actatagtgtgtcacaaccgtctaa

SEQ ID NO: 179163 - DNA, 25 bp, SARS Virus
ctatagtgtgtaccaaccgtctaat

SEQ ID NO: 179164 - DNA, 25 bp, SARS Virus
tatagtgtgtaacaaccgtctaata

SEQ ID NO: 179165 - DNA, 25 bp, SARS Virus
atagtgtgtaaccaccgtctaatat

SEQ ID NO: 179166 - DNA, 25 bp, SARS Virus
tagtgtgtaacacccgtctaatatt

SEQ ID NO: 179167 - DNA, 25 bp, SARS Virus
agtgtgtaacaaccgtctaatattg

SEQ ID NO: 179168 - DNA, 25 bp, SARS Virus
gtgtgtaacaaccgtctaatattgc

SEQ ID NO: 179169 - DNA, 25 bp, SARS Virus
tgtgtaacaaccctctaatattgct

SEQ ID NO: 179170 - DNA, 25 bp, SARS Virus
gtgtaacaaccgcctaatattgcta

SEQ ID NO: 179171 - DNA, 25 bp, SARS Virus
tgtaacaaccgtctaatattgctat

SEQ ID NO: 179172 - DNA, 25 bp, SARS Virus
gtaacaaccgtccaatattgctatt

SEQ ID NO: 179173 - DNA, 25 bp, SARS Virus
taacaaccgtctcatattgctatta

SEQ ID NO: 179174 - DNA, 25 bp, SARS Virus
aacaaccgtctactattgctattat

SEQ ID NO: 179175 - DNA, 25 bp, SARS Virus
acaaccgtctaacattgctattatc

SEQ ID NO: 179176 - DNA, 25 bp, SARS Virus
caaccgtctaatcttgctattatca

SEQ ID NO: 179177 - DNA, 25 bp, SARS Virus
aaccgtctaatactgctattatcag

SEQ ID NO: 179178 - DNA, 25 bp, SARS Virus
accgtctaatatcgctattatcagt

SEQ ID NO: 179179 - DNA, 25 bp, SARS Virus
ccgtctaatattcctattatcagta

SEQ ID NO: 179180 - DNA, 25 bp, SARS Virus
cgtctaatattgctattatcagtat

SEQ ID NO: 179181 - DNA, 25 bp, SARS Virus
gtctaatattgccattatcagtatt

SEQ ID NO: 179182 - DNA, 25 bp, SARS Virus
tctaatattgctcttatcagtatta

SEQ ID NO: 179183 - DNA, 25 bp, SARS Virus
ctaatattgctactatcagtattag

SEQ ID NO: 179184 - DNA, 25 bp, SARS Virus
taatattgctatcatcagtattagt

SEQ ID NO: 179185 - DNA, 25 bp, SARS Virus
aatattgctattctcagtattagtg

SEQ ID NO: 179186 - DNA, 25 bp, SARS Virus
atattgctattaccagtattagtga

SEQ ID NO: 179187 - DNA, 25 bp, SARS Virus
tattgctattatcagtattagtgac

SEQ ID NO: 179188 - DNA, 25 bp, SARS Virus
attgctattatccgtattagtgact

SEQ ID NO: 179189 - DNA, 25 bp, SARS Virus
ttgctattatcactattagtgacta

SEQ ID NO: 179190 - DNA, 25 bp, SARS Virus
tgctattatcagcattagtgactat

SEQ ID NO: 179191 - DNA, 25 bp, SARS Virus
gctattatcagtcttagtgactatc

SEQ ID NO: 179192 - DNA, 25 bp, SARS Virus
ctattatcagtactagtgactatcg

SEQ ID NO: 179193 - DNA, 25 bp, SARS Virus
tattatcagtatcagtgactatcgt

SEQ ID NO: 179194 - DNA, 25 bp, SARS Virus
attatcagtattcgtgactatcgtc

SEQ ID NO: 179195 - DNA, 25 bp, SARS Virus
ttatcagtattactgactatcgtcg

SEQ ID NO: 179196 - DNA, 25 bp, SARS Virus
tatcagtattagcgactatcgtcgc

SEQ ID NO: 179197 - DNA, 25 bp, SARS Virus
atcagtattagtcactatcgtcgca

SEQ ID NO: 179198 - DNA, 25 bp, SARS Virus
tcagtattagtgcctatcgtcgcaa

SEQ ID NO: 179199 - DNA, 25 bp, SARS Virus
cagtattagtgactatcgtcgcaac

SEQ ID NO: 179200 - DNA, 25 bp, SARS Virus
agtattagtgaccatcgtcgcaacg

SEQ ID NO: 179201 - DNA, 25 bp, SARS Virus
gtattagtgactctcgtcgcaacgg

SEQ ID NO: 179202 - DNA, 25 bp, SARS Virus
tattagtgactaccgtcgcaacggt

SEQ ID NO: 179203 - DNA, 25 bp, SARS Virus
attagtgactatcgtcgcaacggta

SEQ ID NO: 179204 - DNA, 25 bp, SARS Virus
ttagtgactatcctcgcaacggtag

SEQ ID NO: 179205 - DNA, 25 bp, SARS Virus
tagtgactatcgccgcaacggtagg

SEQ ID NO: 179206 - DNA, 25 bp, SARS Virus
agtgactatcgtcgcaacggtagga

SEQ ID NO: 179207 - DNA, 25 bp, SARS Virus
gtgactatcgtcccaacggtaggac

SEQ ID NO: 179208 - DNA, 25 bp, SARS Virus
tgactatcgtcgcaacggtaggact

SEQ ID NO: 179209 - DNA, 25 bp, SARS Virus
gactatcgtcgccacggtaggactc

SEQ ID NO: 179210 - DNA, 25 bp, SARS Virus
actatcgtcgcaccggtaggactcg

SEQ ID NO: 179211 - DNA, 25 bp, SARS Virus
ctatcgtcgcaacggtaggactcgt

SEQ ID NO: 179212 - DNA, 25 bp, SARS Virus
tatcgtcgcaaccgtaggactcgtt

SEQ ID NO: 179213 - DNA, 25 bp, SARS Virus
atcgtcgcaacgctaggactcgttt

SEQ ID NO: 179214 - DNA, 25 bp, SARS Virus
tcgtcgcaacggcaggactcgtttc

SEQ ID NO: 179215 - DNA, 25 bp, SARS Virus
cgtcgcaacggtcggactcgtttct

SEQ ID NO: 179216 - DNA, 25 bp, SARS Virus
gtcgcaacggtacgactcgtttctt

SEQ ID NO: 179217 - DNA, 25 bp, SARS Virus
tcgcaacggtagcactcgtttcttc

SEQ ID NO: 179218 - DNA, 25 bp, SARS Virus
cgcaacggtaggcctcgtttcttct

SEQ ID NO: 179219 - DNA, 25 bp, SARS Virus
gcaacggtaggactcgtttcttctt

SEQ ID NO: 179220 - DNA, 25 bp, SARS Virus
caacggtaggacccgtttcttcttc

SEQ ID NO: 179221 - DNA, 25 bp, SARS Virus
aacggtaggactcgtttcttcttca

SEQ ID NO: 179222 - DNA, 25 bp, SARS Virus
acggtaggactcctttcttcttcac

SEQ ID NO: 179223 - DNA, 25 bp, SARS Virus
cggtaggactcgcttcttcttcaca

SEQ ID NO: 179224 - DNA, 25 bp, SARS Virus
ggtaggactcgtctcttcttcacaa

SEQ ID NO: 179225 - DNA, 25 bp, SARS Virus
gtaggactcgttccttcttcacaaa

SEQ ID NO: 179226 - DNA, 25 bp, SARS Virus
taggactcgtttcttcttcacaaaa

SEQ ID NO: 179227 - DNA, 25 bp, SARS Virus
aggactcgtttcctcttcacaaaat

SEQ ID NO: 179228 - DNA, 25 bp, SARS Virus
ggactcgtttctccttcacaaaatc

SEQ ID NO: 179229 - DNA, 25 bp, SARS Virus
gactcgtttcttcttcacaaaatca

SEQ ID NO: 179230 - DNA, 25 bp, SARS Virus
actcgtttcttcctcacaaaatcaa

SEQ ID NO: 179231 - DNA, 25 bp, SARS Virus
ctcgtttcttctccacaaaatcaag

SEQ ID NO: 179232 - DNA, 25 bp, SARS Virus
tcgtttcttcttcacaaaatcaagt

SEQ ID NO: 179233 - DNA, 25 bp, SARS Virus
cgtttcttcttcccaaaatcaagtt

SEQ ID NO: 179234 - DNA, 25 bp, SARS Virus
gtttcttcttcacaaaatcaagttg

SEQ ID NO: 179235 - DNA, 25 bp, SARS Virus
tttcttcttcaccaaatcaagttgt

SEQ ID NO: 179236 - DNA, 25 bp, SARS Virus
ttcttcttcacacaatcaagttgtc

SEQ ID NO: 179237 - DNA, 25 bp, SARS Virus
tcttcttcacaacatcaagttgtct

SEQ ID NO: 179238 - DNA, 25 bp, SARS Virus
cttcttcacaaactcaagttgtctt

SEQ ID NO: 179239 - DNA, 25 bp, SARS Virus
ttcttcacaaaaccaagttgtcttg

SEQ ID NO: 179240 - DNA, 25 bp, SARS Virus
tcttcacaaaatcaagttgtcttga

SEQ ID NO: 179241 - DNA, 25 bp, SARS Virus
cttcacaaaatccagttgtcttgaa

SEQ ID NO: 179242 - DNA, 25 bp, SARS Virus
ttcacaaaatcacgttgtcttgaag

SEQ ID NO: 179243 - DNA, 25 bp, SARS Virus
tcacaaaatcaacttgtcttgaagg

SEQ ID NO: 179244 - DNA, 25 bp, SARS Virus
cacaaaatcaagctgtcttgaagga

SEQ ID NO: 179245 - DNA, 25 bp, SARS Virus
acaaaatcaagtcgtcttgaaggaa

SEQ ID NO: 179246 - DNA, 25 bp, SARS Virus
caaaatcaagttctcttgaaggaag

SEQ ID NO: 179247 - DNA, 25 bp, SARS Virus
aaaatcaagttgccttgaaggaagg

SEQ ID NO: 179248 - DNA, 25 bp, SARS Virus
aaatcaagttgtcttgaaggaagga

SEQ ID NO: 179249 - DNA, 25 bp, SARS Virus
aatcaagttgtcctgaaggaaggaa

SEQ ID NO: 179250 - DNA, 25 bp, SARS Virus
atcaagttgtctcgaaggaaggaat

SEQ ID NO: 179251 - DNA, 25 bp, SARS Virus
tcaagttgtcttcaaggaaggaatt

SEQ ID NO: 179252 - DNA, 25 bp, SARS Virus
caagttgtcttgcaggaaggaattt

SEQ ID NO: 179253 - DNA, 25 bp, SARS Virus
aagttgtcttgacggaaggaatttc

SEQ ID NO: 179254 - DNA, 25 bp, SARS Virus
agttgtcttgaacgaaggaatttct

SEQ ID NO: 179255 - DNA, 25 bp, SARS Virus
gttgtcttgaagcaaggaatttctt

SEQ ID NO: 179256 - DNA, 25 bp, SARS Virus
ttgtcttgaaggcaggaatttcttt

SEQ ID NO: 179257 - DNA, 25 bp, SARS Virus
tgtcttgaaggacggaatttctttg

SEQ ID NO: 179258 - DNA, 25 bp, SARS Virus
gtcttgaaggaacgaatttctttgg

SEQ ID NO: 179259 - DNA, 25 bp, SARS Virus
tcttgaaggaagcaatttctttgga

SEQ ID NO: 179260 - DNA, 25 bp, SARS Virus
cttgaaggaaggcatttctttggaa

SEQ ID NO: 179261 - DNA, 25 bp, SARS Virus
ttgaaggaaggactttctttggaaa

SEQ ID NO: 179262 - DNA, 25 bp, SARS Virus
tgaaggaaggaacttctttggaaat

SEQ ID NO: 179263 - DNA, 25 bp, SARS Virus
gaaggaaggaatctctttggaaatc

SEQ ID NO: 179264 - DNA, 25 bp, SARS Virus
aaggaaggaattcctttggaaatct

SEQ ID NO: 179265 - DNA, 25 bp, SARS Virus
aggaaggaatttctttggaaatctg

SEQ ID NO: 179266 - DNA, 25 bp, SARS Virus
ggaaggaatttccttggaaatctgt

SEQ ID NO: 179267 - DNA, 25 bp, SARS Virus
gaaggaatttctctggaaatctgtg

SEQ ID NO: 179268 - DNA, 25 bp, SARS Virus
aaggaatttcttcggaaatctgtgt

SEQ ID NO: 179269 - DNA, 25 bp, SARS Virus
aggaatttctttcgaaatctgtgtc

SEQ ID NO: 179270 - DNA, 25 bp, SARS Virus
ggaatttctttgcaaatctgtgtcg

SEQ ID NO: 179271 - DNA, 25 bp, SARS Virus
gaatttctttggcaatctgtgtcgt

SEQ ID NO: 179272 - DNA, 25 bp, SARS Virus
aatttctttggacatctgtgtcgtt

SEQ ID NO: 179273 - DNA, 25 bp, SARS Virus
atttctttggaactctgtgtcgttt

SEQ ID NO: 179274 - DNA, 25 bp, SARS Virus
tttctttggaaacctgtgtcgtttc

SEQ ID NO: 179275 - DNA, 25 bp, SARS Virus
ttctttggaaatctgtgtcgtttca

SEQ ID NO: 179276 - DNA, 25 bp, SARS Virus
tctttggaaatccgtgtcgtttcag

SEQ ID NO: 179277 - DNA, 25 bp, SARS Virus
ctttggaaatctctgtcgtttcagt

SEQ ID NO: 179278 - DNA, 25 bp, SARS Virus
tttggaaatctgcgtcgtttcagta

SEQ ID NO: 179279 - DNA, 25 bp, SARS Virus
ttggaaatctgtctcgtttcagtat

SEQ ID NO: 179280 - DNA, 25 bp, SARS Virus
tggaaatctgtgccgtttcagtatt

SEQ ID NO: 179281 - DNA, 25 bp, SARS Virus
ggaaatctgtgtcgtttcagtattt

SEQ ID NO: 179282 - DNA, 25 bp, SARS Virus
gaaatctgtgtcctttcagtatttt

SEQ ID NO: 179283 - DNA, 25 bp, SARS Virus
aaatctgtgtcgcttcagtattttc

SEQ ID NO: 179284 - DNA, 25 bp, SARS Virus
aatctgtgtcgtctcagtattttca

SEQ ID NO: 179285 - DNA, 25 bp, SARS Virus
atctgtgtcgttccagtattttcag

SEQ ID NO: 179286 - DNA, 25 bp, SARS Virus
tctgtgtcgtttcagtattttcaga

SEQ ID NO: 179287 - DNA, 25 bp, SARS Virus
ctgtgtcgtttccgtattttcagaa

SEQ ID NO: 179288 - DNA, 25 bp, SARS Virus
tgtgtcgtttcactattttcagaaa

SEQ ID NO: 179289 - DNA, 25 bp, SARS Virus
gtgtcgtttcagcattttcagaaat

SEQ ID NO: 179290 - DNA, 25 bp, SARS Virus
tgtcgtttcagtcttttcagaaata

SEQ ID NO: 179291 - DNA, 25 bp, SARS Virus
gtcgtttcagtactttcagaaataa

SEQ ID NO: 179292 - DNA, 25 bp, SARS Virus
tcgtttcagtatcttcagaaataat

SEQ ID NO: 179293 - DNA, 25 bp, SARS Virus
cgtttcagtattctcagaaataatt

SEQ ID NO: 179294 - DNA, 25 bp, SARS Virus
gtttcagtatttccagaaataattt

SEQ ID NO: 179295 - DNA, 25 bp, SARS Virus
tttcagtattttcagaaataatttt

SEQ ID NO: 179296 - DNA, 25 bp, SARS Virus
ttcagtattttccgaaataatttta

SEQ ID NO: 179297 - DNA, 25 bp, SARS Virus
tcagtattttcacaaataattttaa

SEQ ID NO: 179298 - DNA, 25 bp, SARS Virus
cagtattttcagcaataattttaat

SEQ ID NO: 179299 - DNA, 25 bp, SARS Virus
agtattttcagacataattttaatg

SEQ ID NO: 179300 - DNA, 25 bp, SARS Virus
gtattttcagaactaattttaatgg

SEQ ID NO: 179301 - DNA, 25 bp, SARS Virus
tattttcagaaacaattttaatggc

SEQ ID NO: 179302 - DNA, 25 bp, SARS Virus
attttcagaaatcattttaatggcc

SEQ ID NO: 179303 - DNA, 25 bp, SARS Virus
ttttcagaaatacttttaatggccc

SEQ ID NO: 179304 - DNA, 25 bp, SARS Virus
tttcagaaataactttaatggccca

SEQ ID NO: 179305 - DNA, 25 bp, SARS Virus
ttcagaaataatcttaatggcccaa

SEQ ID NO: 179306 - DNA, 25 bp, SARS Virus
tcagaaataattctaatggcccaaa

SEQ ID NO: 179307 - DNA, 25 bp, SARS Virus
cagaaataatttcaatggcccaaac

SEQ ID NO: 179308 - DNA, 25 bp, SARS Virus
agaaataattttcatggcccaaact

SEQ ID NO: 179309 - DNA, 25 bp, SARS Virus
gaaataattttactggcccaaactg

SEQ ID NO: 179310 - DNA, 25 bp, SARS Virus
aaataattttaacggcccaaactgt

SEQ ID NO: 179311 - DNA, 25 bp, SARS Virus
aataattttaatcgcccaaactgtc

SEQ ID NO: 179312 - DNA, 25 bp, SARS Virus
ataattttaatgccccaaactgtca

SEQ ID NO: 179313 - DNA, 25 bp, SARS Virus
taattttaatggcccaaactgtcaa

SEQ ID NO: 179314 - DNA, 25 bp, SARS Virus
aattttaatggcccaaactgtcaaa

SEQ ID NO: 179315 - DNA, 25 bp, SARS Virus
attttaatggcccaaactgtcaaac

SEQ ID NO: 179316 - DNA, 25 bp, SARS Virus
ttttaatggccccaactgtcaaact

SEQ ID NO: 179317 - DNA, 25 bp, SARS Virus
tttaatggcccacactgtcaaactt

SEQ ID NO: 179318 - DNA, 25 bp, SARS Virus
ttaatggcccaacctgtcaaacttt

SEQ ID NO: 179319 - DNA, 25 bp, SARS Virus
taatggcccaaactgtcaaactttt

SEQ ID NO: 179320 - DNA, 25 bp, SARS Virus
aatggcccaaaccgtcaaacttttc

SEQ ID NO: 179321 - DNA, 25 bp, SARS Virus
atggcccaaactctcaaacttttcg

SEQ ID NO: 179322 - DNA, 25 bp, SARS Virus
tggcccaaactgccaaacttttcgt

SEQ ID NO: 179323 - DNA, 25 bp, SARS Virus
ggcccaaactgtcaaacttttcgtt

SEQ ID NO: 179324 - DNA, 25 bp, SARS Virus
gcccaaactgtccaacttttcgttg

SEQ ID NO: 179325 - DNA, 25 bp, SARS Virus
cccaaactgtcacacttttcgttgt

SEQ ID NO: 179326 - DNA, 25 bp, SARS Virus
ccaaactgtcaaccttttcgttgta

SEQ ID NO: 179327 - DNA, 25 bp, SARS Virus
caaactgtcaaacttttcgttgtaa

SEQ ID NO: 179328 - DNA, 25 bp, SARS Virus
aaactgtcaaacctttcgttgtaac

SEQ ID NO: 179329 - DNA, 25 bp, SARS Virus
aactgtcaaactcttcgttgtaaca

SEQ ID NO: 179330 - DNA, 25 bp, SARS Virus
actgtcaaacttctcgttgtaacaa

SEQ ID NO: 179331 - DNA, 25 bp, SARS Virus
ctgtcaaactttccgttgtaacaaa

SEQ ID NO: 179332 - DNA, 25 bp, SARS Virus
tgtcaaacttttcgttgtaacaaac

SEQ ID NO: 179333 - DNA, 25 bp, SARS Virus
gtcaaacttttccttgtaacaaaca

SEQ ID NO: 179334 - DNA, 25 bp, SARS Virus
tcaaacttttcgctgtaacaaacaa

SEQ ID NO: 179335 - DNA, 25 bp, SARS Virus
caaacttttcgtcgtaacaaacaat

SEQ ID NO: 179336 - DNA, 25 bp, SARS Virus
aaacttttcgttctaacaaacaatc

SEQ ID NO: 179337 - DNA, 25 bp, SARS Virus
aacttttcgttgcaacaaacaatca

SEQ ID NO: 179338 - DNA, 25 bp, SARS Virus
acttttcgttgtcacaaacaatcac

SEQ ID NO: 179339 - DNA, 25 bp, SARS Virus
cttttcgttgtaccaaacaatcacg

SEQ ID NO: 179340 - DNA, 25 bp, SARS Virus
ttttcgttgtaacaaacaatcacgt

SEQ ID NO: 179341 - DNA, 25 bp, SARS Virus
tttcgttgtaaccaacaatcacgtc

SEQ ID NO: 179342 - DNA, 25 bp, SARS Virus
ttcgttgtaacacacaatcacgtcg

SEQ ID NO: 179343 - DNA, 25 bp, SARS Virus
tcgttgtaacaaccaatcacgtcga

SEQ ID NO: 179344 - DNA, 25 bp, SARS Virus
cgttgtaacaaacaatcacgtcgat

SEQ ID NO: 179345 - DNA, 25 bp, SARS Virus
gttgtaacaaaccatcacgtcgatg

SEQ ID NO: 179346 - DNA, 25 bp, SARS Virus
ttgtaacaaacactcacgtcgatga

SEQ ID NO: 179347 - DNA, 25 bp, SARS Virus
tgtaacaaacaaccacgtcgatgac

SEQ ID NO: 179348 - DNA, 25 bp, SARS Virus
gtaacaaacaatcacgtcgatgact

SEQ ID NO: 179349 - DNA, 25 bp, SARS Virus
taacaaacaatcccgtcgatgactt

SEQ ID NO: 179350 - DNA, 25 bp, SARS Virus
aacaaacaatcacgtcgatgacttt

SEQ ID NO: 179351 - DNA, 25 bp, SARS Virus
acaaacaatcacctcgatgactttt

SEQ ID NO: 179352 - DNA, 25 bp, SARS Virus
caaacaatcacgccgatgacttttc

SEQ ID NO: 179353 - DNA, 25 bp, SARS Virus
aaacaatcacgtcgatgacttttcg

SEQ ID NO: 179354 - DNA, 25 bp, SARS Virus
aacaatcacgtccatgacttttcgt

SEQ ID NO: 179355 - DNA, 25 bp, SARS Virus
acaatcacgtcgctgacttttcgta

SEQ ID NO: 179356 - DNA, 25 bp, SARS Virus
caatcacgtcgacgacttttcgtac

SEQ ID NO: 179357 - DNA, 25 bp, SARS Virus
aatcacgtcgatcacttttcgtaca

SEQ ID NO: 179358 - DNA, 25 bp, SARS Virus
atcacgtcgatgccttttcgtacat

SEQ ID NO: 179359 - DNA, 25 bp, SARS Virus
tcacgtcgatgacttttcgtacatc

SEQ ID NO: 179360 - DNA, 25 bp, SARS Virus
cacgtcgatgacctttcgtacatca

SEQ ID NO: 179361 - DNA, 25 bp, SARS Virus
acgtcgatgactcttcgtacatcac

SEQ ID NO: 179362 - DNA, 25 bp, SARS Virus
cgtcgatgacttctcgtacatcacg

SEQ ID NO: 179363 - DNA, 25 bp, SARS Virus
gtcgatgactttccgtacatcacgc

SEQ ID NO: 179364 - DNA, 25 bp, SARS Virus
tcgatgacttttcgtacatcacgca

SEQ ID NO: 179365 - DNA, 25 bp, SARS Virus
cgatgacttttcctacatcacgcaa

SEQ ID NO: 179366 - DNA, 25 bp, SARS Virus
gatgacttttcgcacatcacgcaaa

SEQ ID NO: 179367 - DNA, 25 bp, SARS Virus
atgacttttcgtccatcacgcaaat

SEQ ID NO: 179368 - DNA, 25 bp, SARS Virus
tgacttttcgtacatcacgcaaata

SEQ ID NO: 179369 - DNA, 25 bp, SARS Virus
gacttttcgtacctcacgcaaatag

SEQ ID NO: 179370 - DNA, 25 bp, SARS Virus
acttttcgtacaccacgcaaataga

SEQ ID NO: 179371 - DNA, 25 bp, SARS Virus
cttttcgtacatcacgcaaatagat

SEQ ID NO: 179372 - DNA, 25 bp, SARS Virus
ttttcgtacatcccgcaaatagatc

SEQ ID NO: 179373 - DNA, 25 bp, SARS Virus
tttcgtacatcacgcaaatagatcg

SEQ ID NO: 179374 - DNA, 25 bp, SARS Virus
ttcgtacatcacccaaatagatcgt

SEQ ID NO: 179375 - DNA, 25 bp, SARS Virus
tcgtacatcacgcaaatagatcgtt

SEQ ID NO: 179376 - DNA, 25 bp, SARS Virus
cgtacatcacgccaatagatcgtta

SEQ ID NO: 179377 - DNA, 25 bp, SARS Virus
gtacatcacgcacatagatcgttat

SEQ ID NO: 179378 - DNA, 25 bp, SARS Virus
tacatcacgcaactagatcgttatt

SEQ ID NO: 179379 - DNA, 25 bp, SARS Virus
acatcacgcaaacagatcgttattt

SEQ ID NO: 179380 - DNA, 25 bp, SARS Virus
catcacgcaaatcgatcgttattta

SEQ ID NO: 179381 - DNA, 25 bp, SARS Virus
atcacgcaaatacatcgttatttaa

SEQ ID NO: 179382 - DNA, 25 bp, SARS Virus
tcacgcaaatagctcgttatttaac

SEQ ID NO: 179383 - DNA, 25 bp, SARS Virus
cacgcaaatagaccgttatttaacg

SEQ ID NO: 179384 - DNA, 25 bp, SARS Virus
acgcaaatagatcgttatttaacgg

SEQ ID NO: 179385 - DNA, 25 bp, SARS Virus
cgcaaatagatccttatttaacggt

SEQ ID NO: 179386 - DNA, 25 bp, SARS Virus
gcaaatagatcgctatttaacggtc

SEQ ID NO: 179387 - DNA, 25 bp, SARS Virus
caaatagatcgtcatttaacggtct

SEQ ID NO: 179388 - DNA, 25 bp, SARS Virus
aaatagatcgttctttaacggtctt

SEQ ID NO: 179389 - DNA, 25 bp, SARS Virus
aatagatcgttacttaacggtcttc

SEQ ID NO: 179390 - DNA, 25 bp, SARS Virus
atagatcgttatctaacggtcttcg

SEQ ID NO: 179391 - DNA, 25 bp, SARS Virus
tagatcgttattcaacggtcttcga

SEQ ID NO: 179392 - DNA, 25 bp, SARS Virus
agatcgttatttcacggtcttcgac

SEQ ID NO: 179393 - DNA, 25 bp, SARS Virus
gatcgttatttaccggtcttcgacg

SEQ ID NO: 179394 - DNA, 25 bp, SARS Virus
atcgttatttaacggtcttcgacgt

SEQ ID NO: 179395 - DNA, 25 bp, SARS Virus
tcgttatttaaccgtcttcgacgta

SEQ ID NO: 179396 - DNA, 25 bp, SARS Virus
cgttatttaacgctcttcgacgtac

SEQ ID NO: 179397 - DNA, 25 bp, SARS Virus
gttatttaacggccttcgacgtacg

SEQ ID NO: 179398 - DNA, 25 bp, SARS Virus
ttatttaacggtcttcgacgtacgt

SEQ ID NO: 179399 - DNA, 25 bp, SARS Virus
tatttaacggtcctcgacgtacgta

SEQ ID NO: 179400 - DNA, 25 bp, SARS Virus
atttaacggtctccgacgtacgtat

SEQ ID NO: 179401 - DNA, 25 bp, SARS Virus
tttaacggtcttcgacgtacgtatc

SEQ ID NO: 179402 - DNA, 25 bp, SARS Virus
ttaacggtcttccacgtacgtatcg

SEQ ID NO: 179403 - DNA, 25 bp, SARS Virus
taacggtcttcgccgtacgtatcga

SEQ ID NO: 179404 - DNA, 25 bp, SARS Virus
aacggtcttcgacgtacgtatcgac

SEQ ID NO: 179405 - DNA, 25 bp, SARS Virus
acggtcttcgacctacgtatcgacc

SEQ ID NO: 179406 - DNA, 25 bp, SARS Virus
cggtcttcgacgcacgtatcgacct

SEQ ID NO: 179407 - DNA, 25 bp, SARS Virus
ggtcttcgacgtccgtatcgaccta

SEQ ID NO: 179408 - DNA, 25 bp, SARS Virus
gtcttcgacgtacgtatcgacctag

SEQ ID NO: 179409 - DNA, 25 bp, SARS Virus
tcttcgacgtacctatcgacctagt

SEQ ID NO: 179410 - DNA, 25 bp, SARS Virus
cttcgacgtacgcatcgacctagtc

SEQ ID NO: 179411 - DNA, 25 bp, SARS Virus
ttcgacgtacgtctcgacctagtcg

SEQ ID NO: 179412 - DNA, 25 bp, SARS Virus
tcgacgtacgtaccgacctagtcgt

SEQ ID NO: 179413 - DNA, 25 bp, SARS Virus
cgacgtacgtatcgacctagtcgtc

SEQ ID NO: 179414 - DNA, 25 bp, SARS Virus
gacgtacgtatccacctagtcgtcg

SEQ ID NO: 179415 - DNA, 25 bp, SARS Virus
acgtacgtatcgccctagtcgtcgt

SEQ ID NO: 179416 - DNA, 25 bp, SARS Virus
cgtacgtatcgacctagtcgtcgta

SEQ ID NO: 179417 - DNA, 25 bp, SARS Virus
gtacgtatcgacctagtcgtcgtat

SEQ ID NO: 179418 - DNA, 25 bp, SARS Virus
tacgtatcgacccagtcgtcgtatg

SEQ ID NO: 179419 - DNA, 25 bp, SARS Virus
acgtatcgacctcgtcgtcgtatgt

SEQ ID NO: 179420 - DNA, 25 bp, SARS Virus
cgtatcgacctactcgtcgtatgtg

SEQ ID NO: 179421 - DNA, 25 bp, SARS Virus
gtatcgacctagccgtcgtatgtga

SEQ ID NO: 179422 - DNA, 25 bp, SARS Virus
tatcgacctagtcgtcgtatgtgat

SEQ ID NO: 179423 - DNA, 25 bp, SARS Virus
atcgacctagtcctcgtatgtgatt

SEQ ID NO: 179424 - DNA, 25 bp, SARS Virus
tcgacctagtcgccgtatgtgattt

SEQ ID NO: 179425 - DNA, 25 bp, SARS Virus
cgacctagtcgtcgtatgtgatttt

SEQ ID NO: 179426 - DNA, 25 bp, SARS Virus
gacctagtcgtcctatgtgattttc

SEQ ID NO: 179427 - DNA, 25 bp, SARS Virus
acctagtcgtcgcatgtgattttca

SEQ ID NO: 179428 - DNA, 25 bp, SARS Virus
cctagtcgtcgtctgtgattttcaa

SEQ ID NO: 179429 - DNA, 25 bp, SARS Virus
ctagtcgtcgtacgtgattttcaag

SEQ ID NO: 179430 - DNA, 25 bp, SARS Virus
tagtcgtcgtatctgattttcaagg

SEQ ID NO: 179431 - DNA, 25 bp, SARS Virus
agtcgtcgtatgcgattttcaagga

SEQ ID NO: 179432 - DNA, 25 bp, SARS Virus
gtcgtcgtatgtcattttcaaggaa

SEQ ID NO: 179433 - DNA, 25 bp, SARS Virus
tcgtcgtatgtgcttttcaaggaac

SEQ ID NO: 179434 - DNA, 25 bp, SARS Virus
cgtcgtatgtgactttcaaggaact

SEQ ID NO: 179435 - DNA, 25 bp, SARS Virus
gtcgtatgtgatcttcaaggaactt

SEQ ID NO: 179436 - DNA, 25 bp, SARS Virus
tcgtatgtgattctcaaggaacttt

SEQ ID NO: 179437 - DNA, 25 bp, SARS Virus
cgtatgtgatttccaaggaactttg

SEQ ID NO: 179438 - DNA, 25 bp, SARS Virus
gtatgtgattttcaaggaactttga

SEQ ID NO: 179439 - DNA, 25 bp, SARS Virus
tatgtgattttccaggaactttgac

SEQ ID NO: 179440 - DNA, 25 bp, SARS Virus
atgtgattttcacggaactttgact

SEQ ID NO: 179441 - DNA, 25 bp, SARS Virus
tgtgattttcaacgaactttgactc

SEQ ID NO: 179442 - DNA, 25 bp, SARS Virus
gtgattttcaagcaactttgactct

SEQ ID NO: 179443 - DNA, 25 bp, SARS Virus
tgattttcaaggcactttgactctg

SEQ ID NO: 179444 - DNA, 25 bp, SARS Virus
gattttcaaggacctttgactctgc

SEQ ID NO: 179445 - DNA, 25 bp, SARS Virus
attttcaaggaactttgactctgcg

SEQ ID NO: 179446 - DNA, 25 bp, SARS Virus
ttttcaaggaaccttgactctgcgc

SEQ ID NO: 179447 - DNA, 25 bp, SARS Virus
tttcaaggaactctgactctgcgct

SEQ ID NO: 179448 - DNA, 25 bp, SARS Virus
ttcaaggaacttcgactctgcgctc

SEQ ID NO: 179449 - DNA, 25 bp, SARS Virus
tcaaggaactttcactctgcgctcg

SEQ ID NO: 179450 - DNA, 25 bp, SARS Virus
caaggaactttgcctctgcgctcga

SEQ ID NO: 179451 - DNA, 25 bp, SARS Virus
aaggaactttgactctgcgctcgat

SEQ ID NO: 179452 - DNA, 25 bp, SARS Virus
aggaactttgaccctgcgctcgata

SEQ ID NO: 179453 - DNA, 25 bp, SARS Virus
ggaactttgactctgcgctcgatac

SEQ ID NO: 179454 - DNA, 25 bp, SARS Virus
gaactttgactccgcgctcgataca

SEQ ID NO: 179455 - DNA, 25 bp, SARS Virus
aactttgactctccgctcgatacat

SEQ ID NO: 179456 - DNA, 25 bp, SARS Virus
actttgactctgcgctcgatacatt

SEQ ID NO: 179457 - DNA, 25 bp, SARS Virus
ctttgactctgccctcgatacattc

SEQ ID NO: 179458 - DNA, 25 bp, SARS Virus
tttgactctgcgctcgatacattca

SEQ ID NO: 179459 - DNA, 25 bp, SARS Virus
ttgactctgcgcccgatacattcaa

SEQ ID NO: 179460 - DNA, 25 bp, SARS Virus
tgactctgcgctcgatacattcaaa

SEQ ID NO: 179461 - DNA, 25 bp, SARS Virus
gactctgcgctccatacattcaaat

SEQ ID NO: 179462 - DNA, 25 bp, SARS Virus
actctgcgctcgctacattcaaatg

SEQ ID NO: 179463 - DNA, 25 bp, SARS Virus
ctctgcgctcgacacattcaaatgt

SEQ ID NO: 179464 - DNA, 25 bp, SARS Virus
tctgcgctcgatccattcaaatgta

SEQ ID NO: 179465 - DNA, 25 bp, SARS Virus
ctgcgctcgatacattcaaatgtag

SEQ ID NO: 179466 - DNA, 25 bp, SARS Virus
tgcgctcgataccttcaaatgtagg

SEQ ID NO: 179467 - DNA, 25 bp, SARS Virus
gcgctcgatacactcaaatgtagga

SEQ ID NO: 179468 - DNA, 25 bp, SARS Virus
cgctcgatacatccaaatgtaggac

SEQ ID NO: 179469 - DNA, 25 bp, SARS Virus
gctcgatacattcaaatgtaggact

SEQ ID NO: 179470 - DNA, 25 bp, SARS Virus
ctcgatacattccaatgtaggacta

SEQ ID NO: 179471 - DNA, 25 bp, SARS Virus
tcgatacattcacatgtaggactaa

SEQ ID NO: 179472 - DNA, 25 bp, SARS Virus
cgatacattcaactgtaggactaat

SEQ ID NO: 179473 - DNA, 25 bp, SARS Virus
gatacattcaaacgtaggactaata

SEQ ID NO: 179474 - DNA, 25 bp, SARS Virus
atacattcaaatctaggactaatac

SEQ ID NO: 179475 - DNA, 25 bp, SARS Virus
tacattcaaatgcaggactaataca

SEQ ID NO: 179476 - DNA, 25 bp, SARS Virus
acattcaaatgtcggactaatacat

SEQ ID NO: 179477 - DNA, 25 bp, SARS Virus
cattcaaatgtacgactaatacatg

SEQ ID NO: 179478 - DNA, 25 bp, SARS Virus
attcaaatgtagcactaatacatgc

SEQ ID NO: 179479 - DNA, 25 bp, SARS Virus
ttcaaatgtaggcctaatacatgct

SEQ ID NO: 179480 - DNA, 25 bp, SARS Virus
tcaaatgtaggactaatacatgctg

SEQ ID NO: 179481 - DNA, 25 bp, SARS Virus
caaatgtaggaccaatacatgctga

SEQ ID NO: 179482 - DNA, 25 bp, SARS Virus
aaatgtaggactcatacatgctgag

SEQ ID NO: 179483 - DNA, 25 bp, SARS Virus
aatgtaggactactacatgctgagg

SEQ ID NO: 179484 - DNA, 25 bp, SARS Virus
atgtaggactaacacatgctgagga

SEQ ID NO: 179485 - DNA, 25 bp, SARS Virus
tgtaggactaatccatgctgaggat

SEQ ID NO: 179486 - DNA, 25 bp, SARS Virus
gtaggactaatacatgctgaggatt

SEQ ID NO: 179487 - DNA, 25 bp, SARS Virus
taggactaatacctgctgaggattg

SEQ ID NO: 179488 - DNA, 25 bp, SARS Virus
aggactaatacacgctgaggattga

SEQ ID NO: 179489 - DNA, 25 bp, SARS Virus
ggactaatacatcctgaggattgag

SEQ ID NO: 179490 - DNA, 25 bp, SARS Virus
gactaatacatgctgaggattgagt

SEQ ID NO: 179491 - DNA, 25 bp, SARS Virus
actaatacatgccgaggattgagtg

SEQ ID NO: 179492 - DNA, 25 bp, SARS Virus
ctaatacatgctcaggattgagtgc

SEQ ID NO: 179493 - DNA, 25 bp, SARS Virus
taatacatgctgcggattgagtgct

SEQ ID NO: 179494 - DNA, 25 bp, SARS Virus
aatacatgctgacgattgagtgctt

SEQ ID NO: 179495 - DNA, 25 bp, SARS Virus
atacatgctgagcattgagtgcttt

SEQ ID NO: 179496 - DNA, 25 bp, SARS Virus
tacatgctgaggcttgagtgctttt

SEQ ID NO: 179497 - DNA, 25 bp, SARS Virus
acatgctgaggactgagtgctttta

SEQ ID NO: 179498 - DNA, 25 bp, SARS Virus
catgctgaggatcgagtgcttttac

SEQ ID NO: 179499 - DNA, 25 bp, SARS Virus
atgctgaggattcagtgcttttacc

SEQ ID NO: 179500 - DNA, 25 bp, SARS Virus
tgctgaggattgcgtgcttttacca

SEQ ID NO: 179501 - DNA, 25 bp, SARS Virus
gctgaggattgactgcttttaccat

SEQ ID NO: 179502 - DNA, 25 bp, SARS Virus
ctgaggattgagcgcttttaccata

SEQ ID NO: 179503 - DNA, 25 bp, SARS Virus
tgaggattgagtccttttaccatag

SEQ ID NO: 179504 - DNA, 25 bp, SARS Virus
gaggattgagtgcttttaccatagg

SEQ ID NO: 179505 - DNA, 25 bp, SARS Virus
aggattgagtgcctttaccataggt

SEQ ID NO: 179506 - DNA, 25 bp, SARS Virus
ggattgagtgctcttaccataggtc

SEQ ID NO: 179507 - DNA, 25 bp, SARS Virus
gattgagtgcttctaccataggtca

SEQ ID NO: 179508 - DNA, 25 bp, SARS Virus
attgagtgctttcaccataggtcaa

SEQ ID NO: 179509 - DNA, 25 bp, SARS Virus
ttgagtgcttttcccataggtcaac

SEQ ID NO: 179510 - DNA, 25 bp, SARS Virus
tgagtgcttttaccataggtcaact

SEQ ID NO: 179511 - DNA, 25 bp, SARS Virus
gagtgcttttaccataggtcaactt

SEQ ID NO: 179512 - DNA, 25 bp, SARS Virus
agtgcttttaccctaggtcaacttt

SEQ ID NO: 179513 - DNA, 25 bp, SARS Virus
gtgcttttaccacaggtcaactttg

SEQ ID NO: 179514 - DNA, 25 bp, SARS Virus
tgcttttaccatcggtcaactttgt

SEQ ID NO: 179515 - DNA, 25 bp, SARS Virus
gcttttaccatacgtcaactttgtt

SEQ ID NO: 179516 - DNA, 25 bp, SARS Virus
cttttaccatagctcaactttgttg

SEQ ID NO: 179517 - DNA, 25 bp, SARS Virus
ttttaccataggccaactttgttgt

SEQ ID NO: 179518 - DNA, 25 bp, SARS Virus
tttaccataggtcaactttgttgtt

SEQ ID NO: 179519 - DNA, 25 bp, SARS Virus
ttaccataggtccactttgttgttt

SEQ ID NO: 179520 - DNA, 25 bp, SARS Virus
taccataggtcacctttgttgtttt

SEQ ID NO: 179521 - DNA, 25 bp, SARS Virus
accataggtcaactttgttgttttc

SEQ ID NO: 179522 - DNA, 25 bp, SARS Virus
ccataggtcaaccttgttgttttcc

SEQ ID NO: 179523 - DNA, 25 bp, SARS Virus
cataggtcaactctgttgttttcct

SEQ ID NO: 179524 - DNA, 25 bp, SARS Virus
ataggtcaacttcgttgttttcctt

SEQ ID NO: 179525 - DNA, 25 bp, SARS Virus
taggtcaactttcttgttttccttg

SEQ ID NO: 179526 - DNA, 25 bp, SARS Virus
aggtcaactttgctgttttccttgt

SEQ ID NO: 179527 - DNA, 25 bp, SARS Virus
ggtcaactttgtcgttttccttgtg

SEQ ID NO: 179528 - DNA, 25 bp, SARS Virus
gtcaactttgttcttttccttgtgg

SEQ ID NO: 179529 - DNA, 25 bp, SARS Virus
tcaactttgttgctttccttgtggt

SEQ ID NO: 179530 - DNA, 25 bp, SARS Virus
caactttgttgtcttccttgtggta

SEQ ID NO: 179531 - DNA, 25 bp, SARS Virus
aactttgttgttctccttgtggtag

SEQ ID NO: 179532 - DNA, 25 bp, SARS Virus
actttgttgtttcccttgtggtaga

SEQ ID NO: 179533 - DNA, 25 bp, SARS Virus
ctttgttgttttccttgtggtagat

SEQ ID NO: 179534 - DNA, 25 bp, SARS Virus
tttgttgttttccttgtggtagatg

SEQ ID NO: 179535 - DNA, 25 bp, SARS Virus
ttgttgttttccctgtggtagatgt

SEQ ID NO: 179536 - DNA, 25 bp, SARS Virus
tgttgttttcctcgtggtagatgtt

SEQ ID NO: 179537 - DNA, 25 bp, SARS Virus
gttgttttccttctggtagatgttt

SEQ ID NO: 179538 - DNA, 25 bp, SARS Virus
ttgttttccttgcggtagatgttta

SEQ ID NO: 179539 - DNA, 25 bp, SARS Virus
tgttttccttgtcgtagatgtttat

SEQ ID NO: 179540 - DNA, 25 bp, SARS Virus
gttttccttgtgctagatgtttata

SEQ ID NO: 179541 - DNA, 25 bp, SARS Virus
ttttccttgtggcagatgtttataa

SEQ ID NO: 179542 - DNA, 25 bp, SARS Virus
tttccttgtggtcgatgtttataaa

SEQ ID NO: 179543 - DNA, 25 bp, SARS Virus
ttccttgtggtacatgtttataaaa

SEQ ID NO: 179544 - DNA, 25 bp, SARS Virus
tccttgtggtagctgtttataaaaa

SEQ ID NO: 179545 - DNA, 25 bp, SARS Virus
ccttgtggtagacgtttataaaaag

SEQ ID NO: 179546 - DNA, 25 bp, SARS Virus
cttgtggtagatctttataaaaaga

SEQ ID NO: 179547 - DNA, 25 bp, SARS Virus
ttgtggtagatgcttataaaaagaa

SEQ ID NO: 179548 - DNA, 25 bp, SARS Virus
tgtggtagatgtctataaaaagaat

SEQ ID NO: 179549 - DNA, 25 bp, SARS Virus
gtggtagatgttcataaaaagaatg

SEQ ID NO: 179550 - DNA, 25 bp, SARS Virus
tggtagatgtttctaaaaagaatga

SEQ ID NO: 179551 - DNA, 25 bp, SARS Virus
ggtagatgtttacaaaaagaatgat

SEQ ID NO: 179552 - DNA, 25 bp, SARS Virus
gtagatgtttatcaaaagaatgatc

SEQ ID NO: 179553 - DNA, 25 bp, SARS Virus
tagatgtttatacaaagaatgatca

SEQ ID NO: 179554 - DNA, 25 bp, SARS Virus
agatgtttataacaagaatgatcac

SEQ ID NO: 179555 - DNA, 25 bp, SARS Virus
gatgtttataaacagaatgatcacc

SEQ ID NO: 179556 - DNA, 25 bp, SARS Virus
atgtttataaaacgaatgatcacca

SEQ ID NO: 179557 - DNA, 25 bp, SARS Virus
tgtttataaaaacaatgatcaccag

SEQ ID NO: 179558 - DNA, 25 bp, SARS Virus
gtttataaaaagcatgatcaccagg

SEQ ID NO: 179559 - DNA, 25 bp, SARS Virus
tttataaaaagactgatcaccaggt

SEQ ID NO: 179560 - DNA, 25 bp, SARS Virus
ttataaaaagaacgatcaccaggtt

SEQ ID NO: 179561 - DNA, 25 bp, SARS Virus
tataaaaagaatcatcaccaggttt

SEQ ID NO: 179562 - DNA, 25 bp, SARS Virus
ataaaaagaatgctcaccaggtttt

SEQ ID NO: 179563 - DNA, 25 bp, SARS Virus
taaaaagaatgaccaccaggttttg

SEQ ID NO: 179564 - DNA, 25 bp, SARS Virus
aaaaagaatgatcaccaggttttga

SEQ ID NO: 179565 - DNA, 25 bp, SARS Virus
aaaagaatgatccccaggttttgaa

SEQ ID NO: 179566 - DNA, 25 bp, SARS Virus
aaagaatgatcaccaggttttgaac

SEQ ID NO: 179567 - DNA, 25 bp, SARS Virus
aagaatgatcaccaggttttgaaca

SEQ ID NO: 179568 - DNA, 25 bp, SARS Virus
agaatgatcacccggttttgaacat

SEQ ID NO: 179569 - DNA, 25 bp, SARS Virus
gaatgatcaccacgttttgaacatc

SEQ ID NO: 179570 - DNA, 25 bp, SARS Virus
aatgatcaccagcttttgaacatcc

SEQ ID NO: 179571 - DNA, 25 bp, SARS Virus
atgatcaccaggctttgaacatcca

SEQ ID NO: 179572 - DNA, 25 bp, SARS Virus
tgatcaccaggtcttgaacatccac

SEQ ID NO: 179573 - DNA, 25 bp, SARS Virus
gatcaccaggttctgaacatccacc

SEQ ID NO: 179574 - DNA, 25 bp, SARS Virus
atcaccaggtttcgaacatccacct

SEQ ID NO: 179575 - DNA, 25 bp, SARS Virus
tcaccaggttttcaacatccacctt

SEQ ID NO: 179576 - DNA, 25 bp, SARS Virus
caccaggttttgcacatccaccttt

SEQ ID NO: 179577 - DNA, 25 bp, SARS Virus
accaggttttgaccatccacctttg

SEQ ID NO: 179578 - DNA, 25 bp, SARS Virus
ccaggttttgaacatccacctttgt

SEQ ID NO: 179579 - DNA, 25 bp, SARS Virus
caggttttgaacctccacctttgtg

SEQ ID NO: 179580 - DNA, 25 bp, SARS Virus
aggttttgaacacccacctttgtgt

SEQ ID NO: 179581 - DNA, 25 bp, SARS Virus
ggttttgaacatccacctttgtgtc

SEQ ID NO: 179582 - DNA, 25 bp, SARS Virus
gttttgaacatccacctttgtgtca

SEQ ID NO: 179583 - DNA, 25 bp, SARS Virus
ttttgaacatccccctttgtgtcat

SEQ ID NO: 179584 - DNA, 25 bp, SARS Virus
tttgaacatccacctttgtgtcatc

SEQ ID NO: 179585 - DNA, 25 bp, SARS Virus
ttgaacatccacctttgtgtcatct

SEQ ID NO: 179586 - DNA, 25 bp, SARS Virus
tgaacatccacccttgtgtcatctt

SEQ ID NO: 179587 - DNA, 25 bp, SARS Virus
gaacatccacctctgtgtcatcttt

SEQ ID NO: 179588 - DNA, 25 bp, SARS Virus
aacatccaccttcgtgtcatctttt

SEQ ID NO: 179589 - DNA, 25 bp, SARS Virus
acatccacctttctgtcatctttta

SEQ ID NO: 179590 - DNA, 25 bp, SARS Virus
catccacctttgcgtcatcttttat

SEQ ID NO: 179591 - DNA, 25 bp, SARS Virus
atccacctttgtctcatcttttatt

SEQ ID NO: 179592 - DNA, 25 bp, SARS Virus
tccacctttgtgccatcttttattg

SEQ ID NO: 179593 - DNA, 25 bp, SARS Virus
ccacctttgtgtcatcttttattgt

SEQ ID NO: 179594 - DNA, 25 bp, SARS Virus
cacctttgtgtcctcttttattgtg

SEQ ID NO: 179595 - DNA, 25 bp, SARS Virus
acctttgtgtcaccttttattgtgt

SEQ ID NO: 179596 - DNA, 25 bp, SARS Virus
cctttgtgtcatcttttattgtgta

SEQ ID NO: 179597 - DNA, 25 bp, SARS Virus
ctttgtgtcatcctttattgtgtaa

SEQ ID NO: 179598 - DNA, 25 bp, SARS Virus
tttgtgtcatctcttattgtgtaat

SEQ ID NO: 179599 - DNA, 25 bp, SARS Virus
ttgtgtcatcttctattgtgtaatt

SEQ ID NO: 179600 - DNA, 25 bp, SARS Virus
tgtgtcatctttcattgtgtaattt

SEQ ID NO: 179601 - DNA, 25 bp, SARS Virus
gtgtcatcttttcttgtgtaatttc

SEQ ID NO: 179602 - DNA, 25 bp, SARS Virus
tgtcatcttttactgtgtaatttca

SEQ ID NO: 179603 - DNA, 25 bp, SARS Virus
gtcatcttttatcgtgtaatttcaa

SEQ ID NO: 179604 - DNA, 25 bp, SARS Virus
tcatcttttattctgtaatttcaaa

SEQ ID NO: 179605 - DNA, 25 bp, SARS Virus
catcttttattgcgtaatttcaaac

SEQ ID NO: 179606 - DNA, 25 bp, SARS Virus
atcttttattgtctaatttcaaacg

SEQ ID NO: 179607 - DNA, 25 bp, SARS Virus
tcttttattgtgcaatttcaaacgt

SEQ ID NO: 179608 - DNA, 25 bp, SARS Virus
cttttattgtgtcatttcaaacgtg

SEQ ID NO: 179609 - DNA, 25 bp, SARS Virus
ttttattgtgtactttcaaacgtgt

SEQ ID NO: 179610 - DNA, 25 bp, SARS Virus
tttattgtgtaacttcaaacgtgtt

SEQ ID NO: 179611 - DNA, 25 bp, SARS Virus
ttattgtgtaatctcaaacgtgtta

SEQ ID NO: 179612 - DNA, 25 bp, SARS Virus
tattgtgtaattccaaacgtgttac

SEQ ID NO: 179613 - DNA, 25 bp, SARS Virus
attgtgtaatttcaaacgtgttact

SEQ ID NO: 179614 - DNA, 25 bp, SARS Virus
ttgtgtaatttccaacgtgttactt

SEQ ID NO: 179615 - DNA, 25 bp, SARS Virus
tgtgtaatttcacacgtgttacttc

SEQ ID NO: 179616 - DNA, 25 bp, SARS Virus
gtgtaatttcaaccgtgttacttcc

SEQ ID NO: 179617 - DNA, 25 bp, SARS Virus
atagttgttgaagttgatgcttatc

SEQ ID NO: 179618 - DNA, 25 bp, SARS Virus
tagttgttgaaggtgatgcttatcc

SEQ ID NO: 179619 - DNA, 25 bp, SARS Virus
agttgttgaagtggatgcttatcct

SEQ ID NO: 179620 - DNA, 25 bp, SARS Virus
gttgttgaagttgatgcttatcctc

SEQ ID NO: 179621 - DNA, 25 bp, SARS Virus
ttgttgaagttggtgcttatcctca

SEQ ID NO: 179622 - DNA, 25 bp, SARS Virus
tgttgaagttgaggcttatcctcaa

SEQ ID NO: 179623 - DNA, 25 bp, SARS Virus
gttgaagttgatgcttatcctcaac

SEQ ID NO: 179624 - DNA, 25 bp, SARS Virus
ttgaagttgatggttatcctcaaca

SEQ ID NO: 179625 - DNA, 25 bp, SARS Virus
tgaagttgatgcgtatcctcaacag

SEQ ID NO: 179626 - DNA, 25 bp, SARS Virus
gaagttgatgctgatcctcaacaga

SEQ ID NO: 179627 - DNA, 25 bp, SARS Virus
aagttgatgcttgtcctcaacagac

SEQ ID NO: 179628 - DNA, 25 bp, SARS Virus
agttgatgcttagcctcaacagact

SEQ ID NO: 179629 - DNA, 25 bp, SARS Virus
gttgatgcttatgctcaacagacta

SEQ ID NO: 179630 - DNA, 25 bp, SARS Virus
ttgatgcttatcgtcaacagactat

SEQ ID NO: 179631 - DNA, 25 bp, SARS Virus
tgatgcttatccgcaacagactata

SEQ ID NO: 179632 - DNA, 25 bp, SARS Virus
gatgcttatcctgaacagactatag

SEQ ID NO: 179633 - DNA, 25 bp, SARS Virus
atgcttatcctcgacagactatagt

SEQ ID NO: 179634 - DNA, 25 bp, SARS Virus
tgcttatcctcagcagactatagtg

SEQ ID NO: 179635 - DNA, 25 bp, SARS Virus
gcttatcctcaagagactatagtgt

SEQ ID NO: 179636 - DNA, 25 bp, SARS Virus
cttatcctcaacggactatagtgtg

SEQ ID NO: 179637 - DNA, 25 bp, SARS Virus
ttatcctcaacagactatagtgtgt

SEQ ID NO: 179638 - DNA, 25 bp, SARS Virus
tatcctcaacaggctatagtgtgta

SEQ ID NO: 179639 - DNA, 25 bp, SARS Virus
atcctcaacagagtatagtgtgtaa

SEQ ID NO: 179640 - DNA, 25 bp, SARS Virus
tcctcaacagacgatagtgtgtaac

SEQ ID NO: 179641 - DNA, 25 bp, SARS Virus
cctcaacagactgtagtgtgtaaca

SEQ ID NO: 179642 - DNA, 25 bp, SARS Virus
ctcaacagactagagtgtgtaacaa

SEQ ID NO: 179643 - DNA, 25 bp, SARS Virus
tcaacagactatggtgtgtaacaac

SEQ ID NO: 179644 - DNA, 25 bp, SARS Virus
caacagactatagtgtgtaacaacc

SEQ ID NO: 179645 - DNA, 25 bp, SARS Virus
aacagactatagggtgtaacaaccg

SEQ ID NO: 179646 - DNA, 25 bp, SARS Virus
acagactatagtgtgtaacaaccgt

SEQ ID NO: 179647 - DNA, 25 bp, SARS Virus
cagactatagtgggtaacaaccgtc

SEQ ID NO: 179648 - DNA, 25 bp, SARS Virus
agactatagtgtgtaacaaccgtct

SEQ ID NO: 179649 - DNA, 25 bp, SARS Virus
gactatagtgtggaacaaccgtcta

SEQ ID NO: 179650 - DNA, 25 bp, SARS Virus
actatagtgtgtgacaaccgtctaa

SEQ ID NO: 179651 - DNA, 25 bp, SARS Virus
ctatagtgtgtagcaaccgtctaat

SEQ ID NO: 179652 - DNA, 25 bp, SARS Virus
tatagtgtgtaagaaccgtctaata

SEQ ID NO: 179653 - DNA, 25 bp, SARS Virus
atagtgtgtaacgaccgtctaatat

SEQ ID NO: 179654 - DNA, 25 bp, SARS Virus
tagtgtgtaacagccgtctaatatt

SEQ ID NO: 179655 - DNA, 25 bp, SARS Virus
agtgtgtaacaagcgtctaatattg

SEQ ID NO: 179656 - DNA, 25 bp, SARS Virus
gtgtgtaacaacggtctaatattgc

SEQ ID NO: 179657 - DNA, 25 bp, SARS Virus
tgtgtaacaaccgtctaatattgct

SEQ ID NO: 179658 - DNA, 25 bp, SARS Virus
gtgtaacaaccggctaatattgcta

SEQ ID NO: 179659 - DNA, 25 bp, SARS Virus
tgtaacaaccgtgtaatattgctat

SEQ ID NO: 179660 - DNA, 25 bp, SARS Virus
gtaacaaccgtcgaatattgctatt

SEQ ID NO: 179661 - DNA, 25 bp, SARS Virus
taacaaccgtctgatattgctatta

SEQ ID NO: 179662 - DNA, 25 bp, SARS Virus
aacaaccgtctagtattgctattat

SEQ ID NO: 179663 - DNA, 25 bp, SARS Virus
acaaccgtctaagattgctattatc

SEQ ID NO: 179664 - DNA, 25 bp, SARS Virus
caaccgtctaatgttgctattatca

SEQ ID NO: 179665 - DNA, 25 bp, SARS Virus
aaccgtctaatagtgctattatcag

SEQ ID NO: 179666 - DNA, 25 bp, SARS Virus
accgtctaatatggctattatcagt

SEQ ID NO: 179667 - DNA, 25 bp, SARS Virus
ccgtctaatattgctattatcagta

SEQ ID NO: 179668 - DNA, 25 bp, SARS Virus
cgtctaatattggtattatcagtat

SEQ ID NO: 179669 - DNA, 25 bp, SARS Virus
gtctaatattgcgattatcagtatt

SEQ ID NO: 179670 - DNA, 25 bp, SARS Virus
tctaatattgctgttatcagtatta

SEQ ID NO: 179671 - DNA, 25 bp, SARS Virus
ctaatattgctagtatcagtattag

SEQ ID NO: 179672 - DNA, 25 bp, SARS Virus
taatattgctatgatcagtattagt

SEQ ID NO: 179673 - DNA, 25 bp, SARS Virus
aatattgctattgtcagtattagtg

SEQ ID NO: 179674 - DNA, 25 bp, SARS Virus
atattgctattagcagtattagtga

SEQ ID NO: 179675 - DNA, 25 bp, SARS Virus
tattgctattatgagtattagtgac

SEQ ID NO: 179676 - DNA, 25 bp, SARS Virus
attgctattatcggtattagtgact

SEQ ID NO: 179677 - DNA, 25 bp, SARS Virus
ttgctattatcagtattagtgacta

SEQ ID NO: 179678 - DNA, 25 bp, SARS Virus
tgctattatcaggattagtgactat

SEQ ID NO: 179679 - DNA, 25 bp, SARS Virus
gctattatcagtgttagtgactatc

SEQ ID NO: 179680 - DNA, 25 bp, SARS Virus
ctattatcagtagtagtgactatcg

SEQ ID NO: 179681 - DNA, 25 bp, SARS Virus
tattatcagtatgagtgactatcgt

SEQ ID NO: 179682 - DNA, 25 bp, SARS Virus
attatcagtattggtgactatcgtc

SEQ ID NO: 179683 - DNA, 25 bp, SARS Virus
ttatcagtattagtgactatcgtcg

SEQ ID NO: 179684 - DNA, 25 bp, SARS Virus
tatcagtattagggactatcgtcgc

SEQ ID NO: 179685 - DNA, 25 bp, SARS Virus
atcagtattagtgactatcgtcgca

SEQ ID NO: 179686 - DNA, 25 bp, SARS Virus
tcagtattagtggctatcgtcgcaa

SEQ ID NO: 179687 - DNA, 25 bp, SARS Virus
cagtattagtgagtatcgtcgcaac

SEQ ID NO: 179688 - DNA, 25 bp, SARS Virus
agtattagtgacgatcgtcgcaacg

SEQ ID NO: 179689 - DNA, 25 bp, SARS Virus
gtattagtgactgtcgtcgcaacgg

SEQ ID NO: 179690 - DNA, 25 bp, SARS Virus
tattagtgactagcgtcgcaacggt

SEQ ID NO: 179691 - DNA, 25 bp, SARS Virus
attagtgactatggtcgcaacggta

SEQ ID NO: 179692 - DNA, 25 bp, SARS Virus
ttagtgactatcgtcgcaacggtag

SEQ ID NO: 179693 - DNA, 25 bp, SARS Virus
tagtgactatcggcgcaacggtagg

SEQ ID NO: 179694 - DNA, 25 bp, SARS Virus
agtgactatcgtggcaacggtagga

SEQ ID NO: 179695 - DNA, 25 bp, SARS Virus
gtgactatcgtcgcaacggtaggac

SEQ ID NO: 179696 - DNA, 25 bp, SARS Virus
tgactatcgtcggaacggtaggact

SEQ ID NO: 179697 - DNA, 25 bp, SARS Virus
gactatcgtcgcgacggtaggactc

SEQ ID NO: 179698 - DNA, 25 bp, SARS Virus
actatcgtcgcagcggtaggactcg

SEQ ID NO: 179699 - DNA, 25 bp, SARS Virus
ctatcgtcgcaagggtaggactcgt

SEQ ID NO: 179700 - DNA, 25 bp, SARS Virus
tatcgtcgcaacggtaggactcgtt

SEQ ID NO: 179701 - DNA, 25 bp, SARS Virus
atcgtcgcaacggtaggactcgttt

SEQ ID NO: 179702 - DNA, 25 bp, SARS Virus
tcgtcgcaacgggaggactcgtttc

SEQ ID NO: 179703 - DNA, 25 bp, SARS Virus
cgtcgcaacggtgggactcgtttct

SEQ ID NO: 179704 - DNA, 25 bp, SARS Virus
gtcgcaacggtaggactcgtttctt

SEQ ID NO: 179705 - DNA, 25 bp, SARS Virus
tcgcaacggtaggactcgtttcttc

SEQ ID NO: 179706 - DNA, 25 bp, SARS Virus
cgcaacggtagggctcgtttcttct

SEQ ID NO: 179707 - DNA, 25 bp, SARS Virus
gcaacggtaggagtcgtttcttctt

SEQ ID NO: 179708 - DNA, 25 bp, SARS Virus
caacggtaggacgcgtttcttcttc

SEQ ID NO: 179709 - DNA, 25 bp, SARS Virus
aacggtaggactggtttcttcttca

SEQ ID NO: 179710 - DNA, 25 bp, SARS Virus
acggtaggactcgtttcttcttcac

SEQ ID NO: 179711 - DNA, 25 bp, SARS Virus
cggtaggactcggttcttcttcaca

SEQ ID NO: 179712 - DNA, 25 bp, SARS Virus
ggtaggactcgtgtcttcttcacaa

SEQ ID NO: 179713 - DNA, 25 bp, SARS Virus
gtaggactcgttgcttcttcacaaa

SEQ ID NO: 179714 - DNA, 25 bp, SARS Virus
taggactcgtttgttcttcacaaaa

SEQ ID NO: 179715 - DNA, 25 bp, SARS Virus
aggactcgtttcgtcttcacaaaat

SEQ ID NO: 179716 - DNA, 25 bp, SARS Virus
ggactcgtttctgcttcacaaaatc

SEQ ID NO: 179717 - DNA, 25 bp, SARS Virus
gactcgtttcttgttcacaaaatca

SEQ ID NO: 179718 - DNA, 25 bp, SARS Virus
actcgtttcttcgtcacaaaatcaa

SEQ ID NO: 179719 - DNA, 25 bp, SARS Virus
ctcgtttcttctgcacaaaatcaag

SEQ ID NO: 179720 - DNA, 25 bp, SARS Virus
tcgtttcttcttgacaaaatcaagt

SEQ ID NO: 179721 - DNA, 25 bp, SARS Virus
cgtttcttcttcgcaaaatcaagtt

SEQ ID NO: 179722 - DNA, 25 bp, SARS Virus
gtttcttcttcagaaaatcaagttg

SEQ ID NO: 179723 - DNA, 25 bp, SARS Virus
tttcttcttcacgaaatcaagttgt

SEQ ID NO: 179724 - DNA, 25 bp, SARS Virus
ttcttcttcacagaatcaagttgtc

SEQ ID NO: 179725 - DNA, 25 bp, SARS Virus
tcttcttcacaagatcaagttgtct

SEQ ID NO: 179726 - DNA, 25 bp, SARS Virus
cttcttcacaaagtcaagttgtctt

SEQ ID NO: 179727 - DNA, 25 bp, SARS Virus
ttcttcacaaaagcaagttgtcttg

SEQ ID NO: 179728 - DNA, 25 bp, SARS Virus
tcttcacaaaatgaagttgtcttga

SEQ ID NO: 179729 - DNA, 25 bp, SARS Virus
cttcacaaaatcgagttgtcttgaa

SEQ ID NO: 179730 - DNA, 25 bp, SARS Virus
ttcacaaaatcaggttgtcttgaag

SEQ ID NO: 179731 - DNA, 25 bp, SARS Virus
tcacaaaatcaagttgtcttgaagg

SEQ ID NO: 179732 - DNA, 25 bp, SARS Virus
cacaaaatcaaggtgtcttgaagga

SEQ ID NO: 179733 - DNA, 25 bp, SARS Virus
acaaaatcaagtggtcttgaaggaa

SEQ ID NO: 179734 - DNA, 25 bp, SARS Virus
caaaatcaagttgtcttgaaggaag

SEQ ID NO: 179735 - DNA, 25 bp, SARS Virus
aaaatcaagttggcttgaaggaagg

SEQ ID NO: 179736 - DNA, 25 bp, SARS Virus
aaatcaagttgtgttgaaggaagga

SEQ ID NO: 179737 - DNA, 25 bp, SARS Virus
aatcaagttgtcgtgaaggaaggaa

SEQ ID NO: 179738 - DNA, 25 bp, SARS Virus
atcaagttgtctggaaggaaggaat

SEQ ID NO: 179739 - DNA, 25 bp, SARS Virus
tcaagttgtcttgaaggaaggaatt

SEQ ID NO: 179740 - DNA, 25 bp, SARS Virus
caagttgtcttggaggaaggaattt

SEQ ID NO: 179741 - DNA, 25 bp, SARS Virus
aagttgtcttgagggaaggaatttc

SEQ ID NO: 179742 - DNA, 25 bp, SARS Virus
agttgtcttgaaggaaggaatttct

SEQ ID NO: 179743 - DNA, 25 bp, SARS Virus
gttgtcttgaaggaaggaatttctt

SEQ ID NO: 179744 - DNA, 25 bp, SARS Virus
ttgtcttgaagggaggaatttcttt

SEQ ID NO: 179745 - DNA, 25 bp, SARS Virus
tgtcttgaaggagggaatttctttg

SEQ ID NO: 179746 - DNA, 25 bp, SARS Virus
gtcttgaaggaaggaatttctttgg

SEQ ID NO: 179747 - DNA, 25 bp, SARS Virus
tcttgaaggaaggaatttctttgga

SEQ ID NO: 179748 - DNA, 25 bp, SARS Virus
cttgaaggaagggatttctttggaa

SEQ ID NO: 179749 - DNA, 25 bp, SARS Virus
ttgaaggaaggagtttctttggaaa

SEQ ID NO: 179750 - DNA, 25 bp, SARS Virus
tgaaggaaggaagttctttggaaat

SEQ ID NO: 179751 - DNA, 25 bp, SARS Virus
gaaggaaggaatgtctttggaaatc

SEQ ID NO: 179752 - DNA, 25 bp, SARS Virus
aaggaaggaattgctttggaaatct

SEQ ID NO: 179753 - DNA, 25 bp, SARS Virus
aggaaggaatttgtttggaaatctg

SEQ ID NO: 179754 - DNA, 25 bp, SARS Virus
ggaaggaatttcgttggaaatctgt

SEQ ID NO: 179755 - DNA, 25 bp, SARS Virus
gaaggaatttctgtggaaatctgtg

SEQ ID NO: 179756 - DNA, 25 bp, SARS Virus
aaggaatttcttgggaaatctgtgt

SEQ ID NO: 179757 - DNA, 25 bp, SARS Virus
aggaatttctttggaaatctgtgtc

SEQ ID NO: 179758 - DNA, 25 bp, SARS Virus
ggaatttctttggaaatctgtgtcg

SEQ ID NO: 179759 - DNA, 25 bp, SARS Virus
gaatttctttgggaatctgtgtcgt

SEQ ID NO: 179760 - DNA, 25 bp, SARS Virus
aatttctttggagatctgtgtcgtt

SEQ ID NO: 179761 - DNA, 25 bp, SARS Virus
atttctttggaagtctgtgtcgttt

SEQ ID NO: 179762 - DNA, 25 bp, SARS Virus
tttctttggaaagctgtgtcgtttc

SEQ ID NO: 179763 - DNA, 25 bp, SARS Virus
ttctttggaaatgtgtgtcgtttca

SEQ ID NO: 179764 - DNA, 25 bp, SARS Virus
tctttggaaatcggtgtcgtttcag

SEQ ID NO: 179765 - DNA, 25 bp, SARS Virus
ctttggaaatctgtgtcgtttcagt

SEQ ID NO: 179766 - DNA, 25 bp, SARS Virus
tttggaaatctgggtcgtttcagta

SEQ ID NO: 179767 - DNA, 25 bp, SARS Virus
ttggaaatctgtgtcgtttcagtat

SEQ ID NO: 179768 - DNA, 25 bp, SARS Virus
tggaaatctgtggcgtttcagtatt

SEQ ID NO: 179769 - DNA, 25 bp, SARS Virus
ggaaatctgtgtggtttcagtattt

SEQ ID NO: 179770 - DNA, 25 bp, SARS Virus
gaaatctgtgtcgtttcagtatttt

SEQ ID NO: 179771 - DNA, 25 bp, SARS Virus
aaatctgtgtcggttcagtattttc

SEQ ID NO: 179772 - DNA, 25 bp, SARS Virus
aatctgtgtcgtgtcagtattttca

SEQ ID NO: 179773 - DNA, 25 bp, SARS Virus
atctgtgtcgttgcagtattttcag

SEQ ID NO: 179774 - DNA, 25 bp, SARS Virus
tctgtgtcgtttgagtattttcaga

SEQ ID NO: 179775 - DNA, 25 bp, SARS Virus
ctgtgtcgtttcggtattttcagaa

SEQ ID NO: 179776 - DNA, 25 bp, SARS Virus
tgtgtcgtttcagtattttcagaaa

SEQ ID NO: 179777 - DNA, 25 bp, SARS Virus
gtgtcgtttcaggattttcagaaat

SEQ ID NO: 179778 - DNA, 25 bp, SARS Virus
tgtcgtttcagtgttttcagaaata

SEQ ID NO: 179779 - DNA, 25 bp, SARS Virus
gtcgtttcagtagtttcagaaataa

SEQ ID NO: 179780 - DNA, 25 bp, SARS Virus
tcgtttcagtatgttcagaaataat

SEQ ID NO: 179781 - DNA, 25 bp, SARS Virus
cgtttcagtattgtcagaaataatt

SEQ ID NO: 179782 - DNA, 25 bp, SARS Virus
gtttcagtatttgcagaaataattt

SEQ ID NO: 179783 - DNA, 25 bp, SARS Virus
tttcagtattttgagaaataatttt

SEQ ID NO: 179784 - DNA, 25 bp, SARS Virus
ttcagtattttcggaaataatttta

SEQ ID NO: 179785 - DNA, 25 bp, SARS Virus
tcagtattttcagaaataattttaa

SEQ ID NO: 179786 - DNA, 25 bp, SARS Virus
cagtattttcaggaataattttaat

SEQ ID NO: 179787 - DNA, 25 bp, SARS Virus
agtattttcagagataattttaatg

SEQ ID NO: 179788 - DNA, 25 bp, SARS Virus
gtattttcagaagtaattttaatgg

SEQ ID NO: 179789 - DNA, 25 bp, SARS Virus
tattttcagaaagaattttaatggc

SEQ ID NO: 179790 - DNA, 25 bp, SARS Virus
attttcagaaatgattttaatggcc

SEQ ID NO: 179791 - DNA, 25 bp, SARS Virus
ttttcagaaatagttttaatggccc

SEQ ID NO: 179792 - DNA, 25 bp, SARS Virus
tttcagaaataagtttaatggccca

SEQ ID NO: 179793 - DNA, 25 bp, SARS Virus
ttcagaaataatgttaatggcccaa

SEQ ID NO: 179794 - DNA, 25 bp, SARS Virus
tcagaaataattgtaatggcccaaa

SEQ ID NO: 179795 - DNA, 25 bp, SARS Virus
cagaaataatttgaatggcccaaac

SEQ ID NO: 179796 - DNA, 25 bp, SARS Virus
agaaataattttgatggcccaaact

SEQ ID NO: 179797 - DNA, 25 bp, SARS Virus
gaaataattttagtggcccaaactg

SEQ ID NO: 179798 - DNA, 25 bp, SARS Virus
aaataattttaagggcccaaactgt

SEQ ID NO: 179799 - DNA, 25 bp, SARS Virus
aataattttaatggcccaaactgtc

SEQ ID NO: 179800 - DNA, 25 bp, SARS Virus
ataattttaatggcccaaactgtca

SEQ ID NO: 179801 - DNA, 25 bp, SARS Virus
taattttaatgggccaaactgtcaa

SEQ ID NO: 179802 - DNA, 25 bp, SARS Virus
aattttaatggcgcaaactgtcaaa

SEQ ID NO: 179803 - DNA, 25 bp, SARS Virus
attttaatggccgaaactgtcaaac

SEQ ID NO: 179804 - DNA, 25 bp, SARS Virus
ttttaatggcccgaactgtcaaact

SEQ ID NO: 179805 - DNA, 25 bp, SARS Virus
tttaatggcccagactgtcaaactt

SEQ ID NO: 179806 - DNA, 25 bp, SARS Virus
ttaatggcccaagctgtcaaacttt

SEQ ID NO: 179807 - DNA, 25 bp, SARS Virus
taatggcccaaagtgtcaaactttt

SEQ ID NO: 179808 - DNA, 25 bp, SARS Virus
aatggcccaaacggtcaaacttttc

SEQ ID NO: 179809 - DNA, 25 bp, SARS Virus
atggcccaaactgtcaaacttttcg

SEQ ID NO: 179810 - DNA, 25 bp, SARS Virus
tggcccaaactggcaaacttttcgt

SEQ ID NO: 179811 - DNA, 25 bp, SARS Virus
ggcccaaactgtgaaacttttcgtt

SEQ ID NO: 179812 - DNA, 25 bp, SARS Virus
gcccaaactgtcgaacttttcgttg

SEQ ID NO: 179813 - DNA, 25 bp, SARS Virus
cccaaactgtcagacttttcgttgt

SEQ ID NO: 179814 - DNA, 25 bp, SARS Virus
ccaaactgtcaagcttttcgttgta

SEQ ID NO: 179815 - DNA, 25 bp, SARS Virus
caaactgtcaaagttttcgttgtaa

SEQ ID NO: 179816 - DNA, 25 bp, SARS Virus
aaactgtcaaacgtttcgttgtaac

SEQ ID NO: 179817 - DNA, 25 bp, SARS Virus
aactgtcaaactgttcgttgtaaca

SEQ ID NO: 179818 - DNA, 25 bp, SARS Virus
actgtcaaacttgtcgttgtaacaa

SEQ ID NO: 179819 - DNA, 25 bp, SARS Virus
ctgtcaaactttgcgttgtaacaaa

SEQ ID NO: 179820 - DNA, 25 bp, SARS Virus
tgtcaaacttttggttgtaacaaac

SEQ ID NO: 179821 - DNA, 25 bp, SARS Virus
gtcaaacttttcgttgtaacaaaca

SEQ ID NO: 179822 - DNA, 25 bp, SARS Virus
tcaaacttttcggtgtaacaaacaa

SEQ ID NO: 179823 - DNA, 25 bp, SARS Virus
caaacttttcgtggtaacaaacaat

SEQ ID NO: 179824 - DNA, 25 bp, SARS Virus
aaacttttcgttgtaacaaacaatc

SEQ ID NO: 179825 - DNA, 25 bp, SARS Virus
aacttttcgttggaacaaacaatca

SEQ ID NO: 179826 - DNA, 25 bp, SARS Virus
acttttcgttgtgacaaacaatcac

SEQ ID NO: 179827 - DNA, 25 bp, SARS Virus
cttttcgttgtagcaaacaatcacg

SEQ ID NO: 179828 - DNA, 25 bp, SARS Virus
ttttcgttgtaagaaacaatcacgt

SEQ ID NO: 179829 - DNA, 25 bp, SARS Virus
tttcgttgtaacgaacaatcacgtc

SEQ ID NO: 179830 - DNA, 25 bp, SARS Virus
ttcgttgtaacagacaatcacgtcg

SEQ ID NO: 179831 - DNA, 25 bp, SARS Virus
tcgttgtaacaagcaatcacgtcga

SEQ ID NO: 179832 - DNA, 25 bp, SARS Virus
cgttgtaacaaagaatcacgtcgat

SEQ ID NO: 179833 - DNA, 25 bp, SARS Virus
gttgtaacaaacgatcacgtcgatg

SEQ ID NO: 179834 - DNA, 25 bp, SARS Virus
ttgtaacaaacagtcacgtcgatga

SEQ ID NO: 179835 - DNA, 25 bp, SARS Virus
tgtaacaaacaagcacgtcgatgac

SEQ ID NO: 179836 - DNA, 25 bp, SARS Virus
gtaacaaacaatgacgtcgatgact

SEQ ID NO: 179837 - DNA, 25 bp, SARS Virus
taacaaacaatcgcgtcgatgactt

SEQ ID NO: 179838 - DNA, 25 bp, SARS Virus
aacaaacaatcaggtcgatgacttt

SEQ ID NO: 179839 - DNA, 25 bp, SARS Virus
acaaacaatcacgtcgatgactttt

SEQ ID NO: 179840 - DNA, 25 bp, SARS Virus
caaacaatcacggcgatgacttttc

SEQ ID NO: 179841 - DNA, 25 bp, SARS Virus
aaacaatcacgtggatgacttttcg

SEQ ID NO: 179842 - DNA, 25 bp, SARS Virus
aacaatcacgtcgatgacttttcgt

SEQ ID NO: 179843 - DNA, 25 bp, SARS Virus
acaatcacgtcggtgacttttcgta

SEQ ID NO: 179844 - DNA, 25 bp, SARS Virus
caatcacgtcgaggacttttcgtac

SEQ ID NO: 179845 - DNA, 25 bp, SARS Virus
aatcacgtcgatgacttttcgtaca

SEQ ID NO: 179846 - DNA, 25 bp, SARS Virus
atcacgtcgatggcttttcgtacat

SEQ ID NO: 179847 - DNA, 25 bp, SARS Virus
tcacgtcgatgagttttcgtacatc

SEQ ID NO: 179848 - DNA, 25 bp, SARS Virus
cacgtcgatgacgtttcgtacatca

SEQ ID NO: 179849 - DNA, 25 bp, SARS Virus
acgtcgatgactgttcgtacatcac

SEQ ID NO: 179850 - DNA, 25 bp, SARS Virus
cgtcgatgacttgtcgtacatcacg

SEQ ID NO: 179851 - DNA, 25 bp, SARS Virus
gtcgatgactttgcgtacatcacgc

SEQ ID NO: 179852 - DNA, 25 bp, SARS Virus
tcgatgacttttggtacatcacgca

SEQ ID NO: 179853 - DNA, 25 bp, SARS Virus
cgatgacttttcgtacatcacgcaa

SEQ ID NO: 179854 - DNA, 25 bp, SARS Virus
gatgacttttcggacatcacgcaaa

SEQ ID NO: 179855 - DNA, 25 bp, SARS Virus
atgacttttcgtgcatcacgcaaat

SEQ ID NO: 179856 - DNA, 25 bp, SARS Virus
tgacttttcgtagatcacgcaaata

SEQ ID NO: 179857 - DNA, 25 bp, SARS Virus
gacttttcgtacgtcacgcaaatag

SEQ ID NO: 179858 - DNA, 25 bp, SARS Virus
acttttcgtacagcacgcaaataga

SEQ ID NO: 179859 - DNA, 25 bp, SARS Virus
cttttcgtacatgacgcaaatagat

SEQ ID NO: 179860 - DNA, 25 bp, SARS Virus
ttttcgtacatcgcgcaaatagatc

SEQ ID NO: 179861 - DNA, 25 bp, SARS Virus
tttcgtacatcaggcaaatagatcg

SEQ ID NO: 179862 - DNA, 25 bp, SARS Virus
ttcgtacatcacgcaaatagatcgt

SEQ ID NO: 179863 - DNA, 25 bp, SARS Virus
tcgtacatcacggaaatagatcgtt

SEQ ID NO: 179864 - DNA, 25 bp, SARS Virus
cgtacatcacgcgaatagatcgtta

SEQ ID NO: 179865 - DNA, 25 bp, SARS Virus
gtacatcacgcagatagatcgttat

SEQ ID NO: 179866 - DNA, 25 bp, SARS Virus
tacatcacgcaagtagatcgttatt

SEQ ID NO: 179867 - DNA, 25 bp, SARS Virus
acatcacgcaaagagatcgttattt

SEQ ID NO: 179868 - DNA, 25 bp, SARS Virus
catcacgcaaatggatcgttattta

SEQ ID NO: 179869 - DNA, 25 bp, SARS Virus
atcacgcaaatagatcgttatttaa

SEQ ID NO: 179870 - DNA, 25 bp, SARS Virus
tcacgcaaataggtcgttatttaac

SEQ ID NO: 179871 - DNA, 25 bp, SARS Virus
cacgcaaatagagcgttatttaacg

SEQ ID NO: 179872 - DNA, 25 bp, SARS Virus
acgcaaatagatggttatttaacgg

SEQ ID NO: 179873 - DNA, 25 bp, SARS Virus
cgcaaatagatcgttatttaacggt

SEQ ID NO: 179874 - DNA, 25 bp, SARS Virus
gcaaatagatcggtatttaacggtc

SEQ ID NO: 179875 - DNA, 25 bp, SARS Virus
caaatagatcgtgatttaacggtct

SEQ ID NO: 179876 - DNA, 25 bp, SARS Virus
aaatagatcgttgtttaacggtctt

SEQ ID NO: 179877 - DNA, 25 bp, SARS Virus
aatagatcgttagttaacggtcttc

SEQ ID NO: 179878 - DNA, 25 bp, SARS Virus
atagatcgttatgtaacggtcttcg

SEQ ID NO: 179879 - DNA, 25 bp, SARS Virus
tagatcgttattgaacggtcttcga

SEQ ID NO: 179880 - DNA, 25 bp, SARS Virus
agatcgttatttgacggtcttcgac

SEQ ID NO: 179881 - DNA, 25 bp, SARS Virus
gatcgttatttagcggtcttcgacg

SEQ ID NO: 179882 - DNA, 25 bp, SARS Virus
atcgttatttaagggtcttcgacgt

SEQ ID NO: 179883 - DNA, 25 bp, SARS Virus
tcgttatttaacggtcttcgacgta

SEQ ID NO: 179884 - DNA, 25 bp, SARS Virus
cgttatttaacggtcttcgacgtac

SEQ ID NO: 179885 - DNA, 25 bp, SARS Virus
gttatttaacgggcttcgacgtacg

SEQ ID NO: 179886 - DNA, 25 bp, SARS Virus
ttatttaacggtgttcgacgtacgt

SEQ ID NO: 179887 - DNA, 25 bp, SARS Virus
tatttaacggtcgtcgacgtacgta

SEQ ID NO: 179888 - DNA, 25 bp, SARS Virus
atttaacggtctgcgacgtacgtat

SEQ ID NO: 179889 - DNA, 25 bp, SARS Virus
tttaacggtcttggacgtacgtatc

SEQ ID NO: 179890 - DNA, 25 bp, SARS Virus
ttaacggtcttcgacgtacgtatcg

SEQ ID NO: 179891 - DNA, 25 bp, SARS Virus
taacggtcttcggcgtacgtatcga

SEQ ID NO: 179892 - DNA, 25 bp, SARS Virus
aacggtcttcgaggtacgtatcgac

SEQ ID NO: 179893 - DNA, 25 bp, SARS Virus
acggtcttcgacgtacgtatcgacc

SEQ ID NO: 179894 - DNA, 25 bp, SARS Virus
cggtcttcgacggacgtatcgacct

SEQ ID NO: 179895 - DNA, 25 bp, SARS Virus
ggtcttcgacgtgcgtatcgaccta

SEQ ID NO: 179896 - DNA, 25 bp, SARS Virus
gtcttcgacgtaggtatcgacctag

SEQ ID NO: 179897 - DNA, 25 bp, SARS Virus
tcttcgacgtacgtatcgacctagt

SEQ ID NO: 179898 - DNA, 25 bp, SARS Virus
cttcgacgtacggatcgacctagtc

SEQ ID NO: 179899 - DNA, 25 bp, SARS Virus
ttcgacgtacgtgtcgacctagtcg

SEQ ID NO: 179900 - DNA, 25 bp, SARS Virus
tcgacgtacgtagcgacctagtcgt

SEQ ID NO: 179901 - DNA, 25 bp, SARS Virus
cgacgtacgtatggacctagtcgtc

SEQ ID NO: 179902 - DNA, 25 bp, SARS Virus
gacgtacgtatcgacctagtcgtcg

SEQ ID NO: 179903 - DNA, 25 bp, SARS Virus
acgtacgtatcggcctagtcgtcgt

SEQ ID NO: 179904 - DNA, 25 bp, SARS Virus
cgtacgtatcgagctagtcgtcgta

SEQ ID NO: 179905 - DNA, 25 bp, SARS Virus
gtacgtatcgacgtagtcgtcgtat

SEQ ID NO: 179906 - DNA, 25 bp, SARS Virus
tacgtatcgaccgagtcgtcgtatg

SEQ ID NO: 179907 - DNA, 25 bp, SARS Virus
acgtatcgacctggtcgtcgtatgt

SEQ ID NO: 179908 - DNA, 25 bp, SARS Virus
cgtatcgacctagtcgtcgtatgtg

SEQ ID NO: 179909 - DNA, 25 bp, SARS Virus
gtatcgacctaggcgtcgtatgtga

SEQ ID NO: 179910 - DNA, 25 bp, SARS Virus
tatcgacctagtggtcgtatgtgat

SEQ ID NO: 179911 - DNA, 25 bp, SARS Virus
atcgacctagtcgtcgtatgtgatt

SEQ ID NO: 179912 - DNA, 25 bp, SARS Virus
tcgacctagtcggcgtatgtgattt

SEQ ID NO: 179913 - DNA, 25 bp, SARS Virus
cgacctagtcgtggtatgtgatttt

SEQ ID NO: 179914 - DNA, 25 bp, SARS Virus
gacctagtcgtcgtatgtgattttc

SEQ ID NO: 179915 - DNA, 25 bp, SARS Virus
acctagtcgtcggatgtgattttca

SEQ ID NO: 179916 - DNA, 25 bp, SARS Virus
cctagtcgtcgtgtgtgattttcaa

SEQ ID NO: 179917 - DNA, 25 bp, SARS Virus
ctagtcgtcgtaggtgattttcaag

SEQ ID NO: 179918 - DNA, 25 bp, SARS Virus
tagtcgtcgtatgtgattttcaagg

SEQ ID NO: 179919 - DNA, 25 bp, SARS Virus
agtcgtcgtatgggattttcaagga

SEQ ID NO: 179920 - DNA, 25 bp, SARS Virus
gtcgtcgtatgtgattttcaaggaa

SEQ ID NO: 179921 - DNA, 25 bp, SARS Virus
tcgtcgtatgtggttttcaaggaac

SEQ ID NO: 179922 - DNA, 25 bp, SARS Virus
cgtcgtatgtgagtttcaaggaact

SEQ ID NO: 179923 - DNA, 25 bp, SARS Virus
gtcgtatgtgatgttcaaggaactt

SEQ ID NO: 179924 - DNA, 25 bp, SARS Virus
tcgtatgtgattgtcaaggaacttt

SEQ ID NO: 179925 - DNA, 25 bp, SARS Virus
cgtatgtgatttgcaaggaactttg

SEQ ID NO: 179926 - DNA, 25 bp, SARS Virus
gtatgtgattttgaaggaactttga

SEQ ID NO: 179927 - DNA, 25 bp, SARS Virus
tatgtgattttcgaggaactttgac

SEQ ID NO: 179928 - DNA, 25 bp, SARS Virus
atgtgattttcagggaactttgact

SEQ ID NO: 179929 - DNA, 25 bp, SARS Virus
tgtgattttcaaggaactttgactc

SEQ ID NO: 179930 - DNA, 25 bp, SARS Virus
gtgattttcaaggaactttgactct

SEQ ID NO: 179931 - DNA, 25 bp, SARS Virus
tgattttcaagggactttgactctg

SEQ ID NO: 179932 - DNA, 25 bp, SARS Virus
gattttcaaggagctttgactctgc

SEQ ID NO: 179933 - DNA, 25 bp, SARS Virus
attttcaaggaagtttgactctgcg

SEQ ID NO: 179934 - DNA, 25 bp, SARS Virus
ttttcaaggaacgttgactctgcgc

SEQ ID NO: 179935 - DNA, 25 bp, SARS Virus
tttcaaggaactgtgactctgcgct

SEQ ID NO: 179936 - DNA, 25 bp, SARS Virus
ttcaaggaacttggactctgcgctc

SEQ ID NO: 179937 - DNA, 25 bp, SARS Virus
tcaaggaactttgactctgcgctcg

SEQ ID NO: 179938 - DNA, 25 bp, SARS Virus
caaggaactttggctctgcgctcga

SEQ ID NO: 179939 - DNA, 25 bp, SARS Virus
aaggaactttgagtctgcgctcgat

SEQ ID NO: 179940 - DNA, 25 bp, SARS Virus
aggaactttgacgctgcgctcgata

SEQ ID NO: 179941 - DNA, 25 bp, SARS Virus
ggaactttgactgtgcgctcgatac

SEQ ID NO: 179942 - DNA, 25 bp, SARS Virus
gaactttgactcggcgctcgataca

SEQ ID NO: 179943 - DNA, 25 bp, SARS Virus
aactttgactctgcgctcgatacat

SEQ ID NO: 179944 - DNA, 25 bp, SARS Virus
actttgactctgggctcgatacatt

SEQ ID NO: 179945 - DNA, 25 bp, SARS Virus
ctttgactctgcgctcgatacattc

SEQ ID NO: 179946 - DNA, 25 bp, SARS Virus
tttgactctgcggtcgatacattca

SEQ ID NO: 179947 - DNA, 25 bp, SARS Virus
ttgactctgcgcgcgatacattcaa

SEQ ID NO: 179948 - DNA, 25 bp, SARS Virus
tgactctgcgctggatacattcaaa

SEQ ID NO: 179949 - DNA, 25 bp, SARS Virus
gactctgcgctcgatacattcaaat

SEQ ID NO: 179950 - DNA, 25 bp, SARS Virus
actctgcgctcggtacattcaaatg

SEQ ID NO: 179951 - DNA, 25 bp, SARS Virus
ctctgcgctcgagacattcaaatgt

SEQ ID NO: 179952 - DNA, 25 bp, SARS Virus
tctgcgctcgatgcattcaaatgta

SEQ ID NO: 179953 - DNA, 25 bp, SARS Virus
ctgcgctcgatagattcaaatgtag

SEQ ID NO: 179954 - DNA, 25 bp, SARS Virus
tgcgctcgatacgttcaaatgtagg

SEQ ID NO: 179955 - DNA, 25 bp, SARS Virus
gcgctcgatacagtcaaatgtagga

SEQ ID NO: 179956 - DNA, 25 bp, SARS Virus
cgctcgatacatgcaaatgtaggac

SEQ ID NO: 179957 - DNA, 25 bp, SARS Virus
gctcgatacattgaaatgtaggact

SEQ ID NO: 179958 - DNA, 25 bp, SARS Virus
ctcgatacattcgaatgtaggacta

SEQ ID NO: 179959 - DNA, 25 bp, SARS Virus
tcgatacattcagatgtaggactaa

SEQ ID NO: 179960 - DNA, 25 bp, SARS Virus
cgatacattcaagtgtaggactaat

SEQ ID NO: 179961 - DNA, 25 bp, SARS Virus
gatacattcaaaggtaggactaata

SEQ ID NO: 179962 - DNA, 25 bp, SARS Virus
atacattcaaatgtaggactaatac

SEQ ID NO: 179963 - DNA, 25 bp, SARS Virus
tacattcaaatggaggactaataca

SEQ ID NO: 179964 - DNA, 25 bp, SARS Virus
acattcaaatgtgggactaatacat

SEQ ID NO: 179965 - DNA, 25 bp, SARS Virus
cattcaaatgtaggactaatacatg

SEQ ID NO: 179966 - DNA, 25 bp, SARS Virus
attcaaatgtaggactaatacatgc

SEQ ID NO: 179967 - DNA, 25 bp, SARS Virus
ttcaaatgtagggctaatacatgct

SEQ ID NO: 179968 - DNA, 25 bp, SARS Virus
tcaaatgtaggagtaatacatgctg

SEQ ID NO: 179969 - DNA, 25 bp, SARS Virus
caaatgtaggacgaatacatgctga

SEQ ID NO: 179970 - DNA, 25 bp, SARS Virus
aaatgtaggactgatacatgctgag

SEQ ID NO: 179971 - DNA, 25 bp, SARS Virus
aatgtaggactagtacatgctgagg

SEQ ID NO: 179972 - DNA, 25 bp, SARS Virus
atgtaggactaagacatgctgagga

SEQ ID NO: 179973 - DNA, 25 bp, SARS Virus
tgtaggactaatgcatgctgaggat

SEQ ID NO: 179974 - DNA, 25 bp, SARS Virus
gtaggactaatagatgctgaggatt

SEQ ID NO: 179975 - DNA, 25 bp, SARS Virus
taggactaatacgtgctgaggattg

SEQ ID NO: 179976 - DNA, 25 bp, SARS Virus
aggactaatacaggctgaggattga

SEQ ID NO: 179977 - DNA, 25 bp, SARS Virus
ggactaatacatgctgaggattgag

SEQ ID NO: 179978 - DNA, 25 bp, SARS Virus
gactaatacatggtgaggattgagt

SEQ ID NO: 179979 - DNA, 25 bp, SARS Virus
actaatacatgcggaggattgagtg

SEQ ID NO: 179980 - DNA, 25 bp, SARS Virus
ctaatacatgctgaggattgagtgc

SEQ ID NO: 179981 - DNA, 25 bp, SARS Virus
taatacatgctggggattgagtgct

SEQ ID NO: 179982 - DNA, 25 bp, SARS Virus
aatacatgctgaggattgagtgctt

SEQ ID NO: 179983 - DNA, 25 bp, SARS Virus
atacatgctgaggattgagtgcttt

SEQ ID NO: 179984 - DNA, 25 bp, SARS Virus
tacatgctgagggttgagtgctttt

SEQ ID NO: 179985 - DNA, 25 bp, SARS Virus
acatgctgaggagtgagtgctttta

SEQ ID NO: 179986 - DNA, 25 bp, SARS Virus
catgctgaggatggagtgcttttac

SEQ ID NO: 179987 - DNA, 25 bp, SARS Virus
atgctgaggattgagtgcttttacc

SEQ ID NO: 179988 - DNA, 25 bp, SARS Virus
tgctgaggattgggtgcttttacca

SEQ ID NO: 179989 - DNA, 25 bp, SARS Virus
gctgaggattgagtgcttttaccat

SEQ ID NO: 179990 - DNA, 25 bp, SARS Virus
ctgaggattgagggcttttaccata

SEQ ID NO: 179991 - DNA, 25 bp, SARS Virus
tgaggattgagtgcttttaccatag

SEQ ID NO: 179992 - DNA, 25 bp, SARS Virus
gaggattgagtggttttaccatagg

SEQ ID NO: 179993 - DNA, 25 bp, SARS Virus
aggattgagtgcgtttaccataggt

SEQ ID NO: 179994 - DNA, 25 bp, SARS Virus
ggattgagtgctgttaccataggtc

SEQ ID NO: 179995 - DNA, 25 bp, SARS Virus
gattgagtgcttgtaccataggtca

SEQ ID NO: 179996 - DNA, 25 bp, SARS Virus
attgagtgctttgaccataggtcaa

SEQ ID NO: 179997 - DNA, 25 bp, SARS Virus
ttgagtgcttttgccataggtcaac

SEQ ID NO: 179998 - DNA, 25 bp, SARS Virus
tgagtgcttttagcataggtcaact

SEQ ID NO: 179999 - DNA, 25 bp, SARS Virus
gagtgcttttacgataggtcaactt

SEQ ID NO: 180000 - DNA, 25 bp, SARS Virus
agtgcttttaccgtaggtcaacttt

SEQ ID NO: 180001 - DNA, 25 bp, SARS Virus
gtgcttttaccagaggtcaactttg

SEQ ID NO: 180002 - DNA, 25 bp, SARS Virus
tgcttttaccatgggtcaactttgt

SEQ ID NO: 180003 - DNA, 25 bp, SARS Virus
gcttttaccataggtcaactttgtt

SEQ ID NO: 180004 - DNA, 25 bp, SARS Virus
cttttaccataggtcaactttgttg

SEQ ID NO: 180005 - DNA, 25 bp, SARS Virus
ttttaccatagggcaactttgttgt

SEQ ID NO: 180006 - DNA, 25 bp, SARS Virus
tttaccataggtgaactttgttgtt

SEQ ID NO: 180007 - DNA, 25 bp, SARS Virus
ttaccataggtcgactttgttgttt

SEQ ID NO: 180008 - DNA, 25 bp, SARS Virus
taccataggtcagctttgttgtttt

SEQ ID NO: 180009 - DNA, 25 bp, SARS Virus
accataggtcaagtttgttgttttc

SEQ ID NO: 180010 - DNA, 25 bp, SARS Virus
ccataggtcaacgttgttgttttcc

SEQ ID NO: 180011 - DNA, 25 bp, SARS Virus
cataggtcaactgtgttgttttcct

SEQ ID NO: 180012 - DNA, 25 bp, SARS Virus
ataggtcaacttggttgttttcctt

SEQ ID NO: 180013 - DNA, 25 bp, SARS Virus
taggtcaactttgttgttttccttg

SEQ ID NO: 180014 - DNA, 25 bp, SARS Virus
aggtcaactttggtgttttccttgt

SEQ ID NO: 180015 - DNA, 25 bp, SARS Virus
ggtcaactttgtggttttccttgtg

SEQ ID NO: 180016 - DNA, 25 bp, SARS Virus
gtcaactttgttgttttccttgtgg

SEQ ID NO: 180017 - DNA, 25 bp, SARS Virus
tcaactttgttggtttccttgtggt

SEQ ID NO: 180018 - DNA, 25 bp, SARS Virus
caactttgttgtgttccttgtggta

SEQ ID NO: 180019 - DNA, 25 bp, SARS Virus
aactttgttgttgtccttgtggtag

SEQ ID NO: 180020 - DNA, 25 bp, SARS Virus
actttgttgtttgccttgtggtaga

SEQ ID NO: 180021 - DNA, 25 bp, SARS Virus
ctttgttgttttgcttgtggtagat

SEQ ID NO: 180022 - DNA, 25 bp, SARS Virus
tttgttgttttcgttgtggtagatg

SEQ ID NO: 180023 - DNA, 25 bp, SARS Virus
ttgttgttttccgtgtggtagatgt

SEQ ID NO: 180024 - DNA, 25 bp, SARS Virus
tgttgttttcctggtggtagatgtt

SEQ ID NO: 180025 - DNA, 25 bp, SARS Virus
gttgttttccttgtggtagatgttt

SEQ ID NO: 180026 - DNA, 25 bp, SARS Virus
ttgttttccttggggtagatgttta

SEQ ID NO: 180027 - DNA, 25 bp, SARS Virus
tgttttccttgtggtagatgtttat

SEQ ID NO: 180028 - DNA, 25 bp, SARS Virus
gttttccttgtggtagatgtttata

SEQ ID NO: 180029 - DNA, 25 bp, SARS Virus
ttttccttgtgggagatgtttataa

SEQ ID NO: 180030 - DNA, 25 bp, SARS Virus
tttccttgtggtggatgtttataaa

SEQ ID NO: 180031 - DNA, 25 bp, SARS Virus
ttccttgtggtagatgtttataaaa

SEQ ID NO: 180032 - DNA, 25 bp, SARS Virus
tccttgtggtaggtgtttataaaaa

SEQ ID NO: 180033 - DNA, 25 bp, SARS Virus
ccttgtggtagaggtttataaaaag

SEQ ID NO: 180034 - DNA, 25 bp, SARS Virus
cttgtggtagatgtttataaaaaga

SEQ ID NO: 180035 - DNA, 25 bp, SARS Virus
ttgtggtagatggttataaaaagaa

SEQ ID NO: 180036 - DNA, 25 bp, SARS Virus
tgtggtagatgtgtataaaaagaat

SEQ ID NO: 180037 - DNA, 25 bp, SARS Virus
gtggtagatgttgataaaaagaatg

SEQ ID NO: 180038 - DNA, 25 bp, SARS Virus
tggtagatgtttgtaaaaagaatga

SEQ ID NO: 180039 - DNA, 25 bp, SARS Virus
ggtagatgtttagaaaaagaatgat

SEQ ID NO: 180040 - DNA, 25 bp, SARS Virus
gtagatgtttatgaaaagaatgatc

SEQ ID NO: 180041 - DNA, 25 bp, SARS Virus
tagatgtttatagaaagaatgatca

SEQ ID NO: 180042 - DNA, 25 bp, SARS Virus
agatgtttataagaagaatgatcac

SEQ ID NO: 180043 - DNA, 25 bp, SARS Virus
gatgtttataaagagaatgatcacc

SEQ ID NO: 180044 - DNA, 25 bp, SARS Virus
atgtttataaaaggaatgatcacca

SEQ ID NO: 180045 - DNA, 25 bp, SARS Virus
tgtttataaaaagaatgatcaccag

SEQ ID NO: 180046 - DNA, 25 bp, SARS Virus
gtttataaaaaggatgatcaccagg

SEQ ID NO: 180047 - DNA, 25 bp, SARS Virus
tttataaaaagagtgatcaccaggt

SEQ ID NO: 180048 - DNA, 25 bp, SARS Virus
ttataaaaagaaggatcaccaggtt

SEQ ID NO: 180049 - DNA, 25 bp, SARS Virus
tataaaaagaatgatcaccaggttt

SEQ ID NO: 180050 - DNA, 25 bp, SARS Virus
ataaaaagaatggtcaccaggtttt

SEQ ID NO: 180051 - DNA, 25 bp, SARS Virus
taaaaagaatgagcaccaggttttg

SEQ ID NO: 180052 - DNA, 25 bp, SARS Virus
aaaaagaatgatgaccaggttttga

SEQ ID NO: 180053 - DNA, 25 bp, SARS Virus
aaaagaatgatcgccaggttttgaa

SEQ ID NO: 180054 - DNA, 25 bp, SARS Virus
aaagaatgatcagcaggttttgaac

SEQ ID NO: 180055 - DNA, 25 bp, SARS Virus
aagaatgatcacgaggttttgaaca

SEQ ID NO: 180056 - DNA, 25 bp, SARS Virus
agaatgatcaccgggttttgaacat

SEQ ID NO: 180057 - DNA, 25 bp, SARS Virus
gaatgatcaccaggttttgaacatc

SEQ ID NO: 180058 - DNA, 25 bp, SARS Virus
aatgatcaccaggttttgaacatcc

SEQ ID NO: 180059 - DNA, 25 bp, SARS Virus
atgatcaccagggtttgaacatcca

SEQ ID NO: 180060 - DNA, 25 bp, SARS Virus
tgatcaccaggtgttgaacatccac

SEQ ID NO: 180061 - DNA, 25 bp, SARS Virus
gatcaccaggttgtgaacatccacc

SEQ ID NO: 180062 - DNA, 25 bp, SARS Virus
atcaccaggtttggaacatccacct

SEQ ID NO: 180063 - DNA, 25 bp, SARS Virus
tcaccaggttttgaacatccacctt

SEQ ID NO: 180064 - DNA, 25 bp, SARS Virus
caccaggttttggacatccaccttt

SEQ ID NO: 180065 - DNA, 25 bp, SARS Virus
accaggttttgagcatccacctttg

SEQ ID NO: 180066 - DNA, 25 bp, SARS Virus
ccaggttttgaagatccacctttgt

SEQ ID NO: 180067 - DNA, 25 bp, SARS Virus
caggttttgaacgtccacctttgtg

SEQ ID NO: 180068 - DNA, 25 bp, SARS Virus
aggttttgaacagccacctttgtgt

SEQ ID NO: 180069 - DNA, 25 bp, SARS Virus
ggttttgaacatgcacctttgtgtc

SEQ ID NO: 180070 - DNA, 25 bp, SARS Virus
gttttgaacatcgacctttgtgtca

SEQ ID NO: 180071 - DNA, 25 bp, SARS Virus
ttttgaacatccgcctttgtgtcat

SEQ ID NO: 180072 - DNA, 25 bp, SARS Virus
tttgaacatccagctttgtgtcatc

SEQ ID NO: 180073 - DNA, 25 bp, SARS Virus
ttgaacatccacgtttgtgtcatct

SEQ ID NO: 180074 - DNA, 25 bp, SARS Virus
tgaacatccaccgttgtgtcatctt

SEQ ID NO: 180075 - DNA, 25 bp, SARS Virus
gaacatccacctgtgtgtcatcttt

SEQ ID NO: 180076 - DNA, 25 bp, SARS Virus
aacatccaccttggtgtcatctttt

SEQ ID NO: 180077 - DNA, 25 bp, SARS Virus
acatccacctttgtgtcatctttta

SEQ ID NO: 180078 - DNA, 25 bp, SARS Virus
catccacctttgggtcatcttttat

SEQ ID NO: 180079 - DNA, 25 bp, SARS Virus
atccacctttgtgtcatcttttatt

SEQ ID NO: 180080 - DNA, 25 bp, SARS Virus
tccacctttgtggcatcttttattg

SEQ ID NO: 180081 - DNA, 25 bp, SARS Virus
ccacctttgtgtgatcttttattgt

SEQ ID NO: 180082 - DNA, 25 bp, SARS Virus
cacctttgtgtcgtcttttattgtg

SEQ ID NO: 180083 - DNA, 25 bp, SARS Virus
acctttgtgtcagcttttattgtgt

SEQ ID NO: 180084 - DNA, 25 bp, SARS Virus
cctttgtgtcatgttttattgtgta

SEQ ID NO: 180085 - DNA, 25 bp, SARS Virus
ctttgtgtcatcgtttattgtgtaa

SEQ ID NO: 180086 - DNA, 25 bp, SARS Virus
tttgtgtcatctgttattgtgtaat

SEQ ID NO: 180087 - DNA, 25 bp, SARS Virus
ttgtgtcatcttgtattgtgtaatt

SEQ ID NO: 180088 - DNA, 25 bp, SARS Virus
tgtgtcatctttgattgtgtaattt

SEQ ID NO: 180089 - DNA, 25 bp, SARS Virus
gtgtcatcttttgttgtgtaatttc

SEQ ID NO: 180090 - DNA, 25 bp, SARS Virus
tgtcatcttttagtgtgtaatttca

SEQ ID NO: 180091 - DNA, 25 bp, SARS Virus
gtcatcttttatggtgtaatttcaa

SEQ ID NO: 180092 - DNA, 25 bp, SARS Virus
tcatcttttattgtgtaatttcaaa

SEQ ID NO: 180093 - DNA, 25 bp, SARS Virus
catcttttattgggtaatttcaaac

SEQ ID NO: 180094 - DNA, 25 bp, SARS Virus
atcttttattgtgtaatttcaaacg

SEQ ID NO: 180095 - DNA, 25 bp, SARS Virus
tcttttattgtggaatttcaaacgt

SEQ ID NO: 180096 - DNA, 25 bp, SARS Virus
cttttattgtgtgatttcaaacgtg

SEQ ID NO: 180097 - DNA, 25 bp, SARS Virus
ttttattgtgtagtttcaaacgtgt

SEQ ID NO: 180098 - DNA, 25 bp, SARS Virus
tttattgtgtaagttcaaacgtgtt

SEQ ID NO: 180099 - DNA, 25 bp, SARS Virus
ttattgtgtaatgtcaaacgtgtta

SEQ ID NO: 180100 - DNA, 25 bp, SARS Virus
tattgtgtaattgcaaacgtgttac

SEQ ID NO: 180101 - DNA, 25 bp, SARS Virus
attgtgtaatttgaaacgtgttact

SEQ ID NO: 180102 - DNA, 25 bp, SARS Virus
ttgtgtaatttcgaacgtgttactt

SEQ ID NO: 180103 - DNA, 25 bp, SARS Virus
tgtgtaatttcagacgtgttacttc

SEQ ID NO: 180104 - DNA, 25 bp, SARS Virus
gtgtaatttcaagcgtgttacttcc

SEQ ID NO: 180105 - DNA, 25 bp, SARS Virus
atagttgttgaatttgatgcttatc

SEQ ID NO: 180106 - DNA, 25 bp, SARS Virus
tagttgttgaagttgatgcttatcc

SEQ ID NO: 180107 - DNA, 25 bp, SARS Virus
agttgttgaagttgatgcttatcct

SEQ ID NO: 180108 - DNA, 25 bp, SARS Virus
gttgttgaagtttatgcttatcctc

SEQ ID NO: 180109 - DNA, 25 bp, SARS Virus
ttgttgaagttgttgcttatcctca

SEQ ID NO: 180110 - DNA, 25 bp, SARS Virus
tgttgaagttgatgcttatcctcaa

SEQ ID NO: 180111 - DNA, 25 bp, SARS Virus
gttgaagttgattcttatcctcaac

SEQ ID NO: 180112 - DNA, 25 bp, SARS Virus
ttgaagttgatgtttatcctcaaca

SEQ ID NO: 180113 - DNA, 25 bp, SARS Virus
tgaagttgatgcttatcctcaacag

SEQ ID NO: 180114 - DNA, 25 bp, SARS Virus
gaagttgatgcttatcctcaacaga

SEQ ID NO: 180115 - DNA, 25 bp, SARS Virus
aagttgatgcttttcctcaacagac

SEQ ID NO: 180116 - DNA, 25 bp, SARS Virus
agttgatgcttatcctcaacagact

SEQ ID NO: 180117 - DNA, 25 bp, SARS Virus
gttgatgcttattctcaacagacta

SEQ ID NO: 180118 - DNA, 25 bp, SARS Virus
ttgatgcttatcttcaacagactat

SEQ ID NO: 180119 - DNA, 25 bp, SARS Virus
tgatgcttatcctcaacagactata

SEQ ID NO: 180120 - DNA, 25 bp, SARS Virus
gatgcttatccttaacagactatag

SEQ ID NO: 180121 - DNA, 25 bp, SARS Virus
atgcttatcctctacagactatagt

SEQ ID NO: 180122 - DNA, 25 bp, SARS Virus
tgcttatcctcatcagactatagtg

SEQ ID NO: 180123 - DNA, 25 bp, SARS Virus
gcttatcctcaatagactatagtgt

SEQ ID NO: 180124 - DNA, 25 bp, SARS Virus
cttatcctcaactgactatagtgtg

SEQ ID NO: 180125 - DNA, 25 bp, SARS Virus
ttatcctcaacatactatagtgtgt

SEQ ID NO: 180126 - DNA, 25 bp, SARS Virus
tatcctcaacagtctatagtgtgta

SEQ ID NO: 180127 - DNA, 25 bp, SARS Virus
atcctcaacagattatagtgtgtaa

SEQ ID NO: 180128 - DNA, 25 bp, SARS Virus
tcctcaacagactatagtgtgtaac

SEQ ID NO: 180129 - DNA, 25 bp, SARS Virus
cctcaacagactttagtgtgtaaca

SEQ ID NO: 180130 - DNA, 25 bp, SARS Virus
ctcaacagactatagtgtgtaacaa

SEQ ID NO: 180131 - DNA, 25 bp, SARS Virus
tcaacagactattgtgtgtaacaac

SEQ ID NO: 180132 - DNA, 25 bp, SARS Virus
caacagactatattgtgtaacaacc

SEQ ID NO: 180133 - DNA, 25 bp, SARS Virus
aacagactatagtgtgtaacaaccg

SEQ ID NO: 180134 - DNA, 25 bp, SARS Virus
acagactatagtttgtaacaaccgt

SEQ ID NO: 180135 - DNA, 25 bp, SARS Virus
cagactatagtgtgtaacaaccgtc

SEQ ID NO: 180136 - DNA, 25 bp, SARS Virus
agactatagtgtttaacaaccgtct

SEQ ID NO: 180137 - DNA, 25 bp, SARS Virus
gactatagtgtgtaacaaccgtcta

SEQ ID NO: 180138 - DNA, 25 bp, SARS Virus
actatagtgtgttacaaccgtctaa

SEQ ID NO: 180139 - DNA, 25 bp, SARS Virus
ctatagtgtgtatcaaccgtctaat

SEQ ID NO: 180140 - DNA, 25 bp, SARS Virus
tatagtgtgtaataaccgtctaata

SEQ ID NO: 180141 - DNA, 25 bp, SARS Virus
atagtgtgtaactaccgtctaatat

SEQ ID NO: 180142 - DNA, 25 bp, SARS Virus
tagtgtgtaacatccgtctaatatt

SEQ ID NO: 180143 - DNA, 25 bp, SARS Virus
agtgtgtaacaatcgtctaatattg

SEQ ID NO: 180144 - DNA, 25 bp, SARS Virus
gtgtgtaacaactgtctaatattgc

SEQ ID NO: 180145 - DNA, 25 bp, SARS Virus
tgtgtaacaaccttctaatattgct

SEQ ID NO: 180146 - DNA, 25 bp, SARS Virus
gtgtaacaaccgtctaatattgcta

SEQ ID NO: 180147 - DNA, 25 bp, SARS Virus
tgtaacaaccgtttaatattgctat

SEQ ID NO: 180148 - DNA, 25 bp, SARS Virus
gtaacaaccgtctaatattgctatt

SEQ ID NO: 180149 - DNA, 25 bp, SARS Virus
taacaaccgtcttatattgctatta

SEQ ID NO: 180150 - DNA, 25 bp, SARS Virus
aacaaccgtctattattgctattat

SEQ ID NO: 180151 - DNA, 25 bp, SARS Virus
acaaccgtctaatattgctattatc

SEQ ID NO: 180152 - DNA, 25 bp, SARS Virus
caaccgtctaattttgctattatca

SEQ ID NO: 180153 - DNA, 25 bp, SARS Virus
aaccgtctaatattgctattatcag

SEQ ID NO: 180154 - DNA, 25 bp, SARS Virus
accgtctaatattgctattatcagt

SEQ ID NO: 180155 - DNA, 25 bp, SARS Virus
ccgtctaatatttctattatcagta

SEQ ID NO: 180156 - DNA, 25 bp, SARS Virus
cgtctaatattgttattatcagtat

SEQ ID NO: 180157 - DNA, 25 bp, SARS Virus
gtctaatattgctattatcagtatt

SEQ ID NO: 180158 - DNA, 25 bp, SARS Virus
tctaatattgcttttatcagtatta

SEQ ID NO: 180159 - DNA, 25 bp, SARS Virus
ctaatattgctattatcagtattag

SEQ ID NO: 180160 - DNA, 25 bp, SARS Virus
taatattgctattatcagtattagt

SEQ ID NO: 180161 - DNA, 25 bp, SARS Virus
aatattgctattttcagtattagtg

SEQ ID NO: 180162 - DNA, 25 bp, SARS Virus
atattgctattatcagtattagtga

SEQ ID NO: 180163 - DNA, 25 bp, SARS Virus
tattgctattattagtattagtgac

SEQ ID NO: 180164 - DNA, 25 bp, SARS Virus
attgctattatctgtattagtgact

SEQ ID NO: 180165 - DNA, 25 bp, SARS Virus
ttgctattatcattattagtgacta

SEQ ID NO: 180166 - DNA, 25 bp, SARS Virus
tgctattatcagtattagtgactat

SEQ ID NO: 180167 - DNA, 25 bp, SARS Virus
gctattatcagttttagtgactatc

SEQ ID NO: 180168 - DNA, 25 bp, SARS Virus
ctattatcagtattagtgactatcg

SEQ ID NO: 180169 - DNA, 25 bp, SARS Virus
tattatcagtattagtgactatcgt

SEQ ID NO: 180170 - DNA, 25 bp, SARS Virus
attatcagtatttgtgactatcgtc

SEQ ID NO: 180171 - DNA, 25 bp, SARS Virus
ttatcagtattattgactatcgtcg

SEQ ID NO: 180172 - DNA, 25 bp, SARS Virus
tatcagtattagtgactatcgtcgc

SEQ ID NO: 180173 - DNA, 25 bp, SARS Virus
atcagtattagttactatcgtcgca

SEQ ID NO: 180174 - DNA, 25 bp, SARS Virus
tcagtattagtgtctatcgtcgcaa

SEQ ID NO: 180175 - DNA, 25 bp, SARS Virus
cagtattagtgattatcgtcgcaac

SEQ ID NO: 180176 - DNA, 25 bp, SARS Virus
agtattagtgactatcgtcgcaacg

SEQ ID NO: 180177 - DNA, 25 bp, SARS Virus
gtattagtgactttcgtcgcaacgg

SEQ ID NO: 180178 - DNA, 25 bp, SARS Virus
tattagtgactatcgtcgcaacggt

SEQ ID NO: 180179 - DNA, 25 bp, SARS Virus
attagtgactattgtcgcaacggta

SEQ ID NO: 180180 - DNA, 25 bp, SARS Virus
ttagtgactatcttcgcaacggtag

SEQ ID NO: 180181 - DNA, 25 bp, SARS Virus
tagtgactatcgtcgcaacggtagg

SEQ ID NO: 180182 - DNA, 25 bp, SARS Virus
agtgactatcgttgcaacggtagga

SEQ ID NO: 180183 - DNA, 25 bp, SARS Virus
gtgactatcgtctcaacggtaggac

SEQ ID NO: 180184 - DNA, 25 bp, SARS Virus
tgactatcgtcgtaacggtaggact

SEQ ID NO: 180185 - DNA, 25 bp, SARS Virus
gactatcgtcgctacggtaggactc

SEQ ID NO: 180186 - DNA, 25 bp, SARS Virus
actatcgtcgcatcggtaggactcg

SEQ ID NO: 180187 - DNA, 25 bp, SARS Virus
ctatcgtcgcaatggtaggactcgt

SEQ ID NO: 180188 - DNA, 25 bp, SARS Virus
tatcgtcgcaactgtaggactcgtt

SEQ ID NO: 180189 - DNA, 25 bp, SARS Virus
atcgtcgcaacgttaggactcgttt

SEQ ID NO: 180190 - DNA, 25 bp, SARS Virus
tcgtcgcaacggtaggactcgtttc

SEQ ID NO: 180191 - DNA, 25 bp, SARS Virus
cgtcgcaacggttggactcgtttct

SEQ ID NO: 180192 - DNA, 25 bp, SARS Virus
gtcgcaacggtatgactcgtttctt

SEQ ID NO: 180193 - DNA, 25 bp, SARS Virus
tcgcaacggtagtactcgtttcttc

SEQ ID NO: 180194 - DNA, 25 bp, SARS Virus
cgcaacggtaggtctcgtttcttct

SEQ ID NO: 180195 - DNA, 25 bp, SARS Virus
gcaacggtaggattcgtttcttctt

SEQ ID NO: 180196 - DNA, 25 bp, SARS Virus
caacggtaggactcgtttcttcttc

SEQ ID NO: 180197 - DNA, 25 bp, SARS Virus
aacggtaggacttgtttcttcttca

SEQ ID NO: 180198 - DNA, 25 bp, SARS Virus
acggtaggactcttttcttcttcac

SEQ ID NO: 180199 - DNA, 25 bp, SARS Virus
cggtaggactcgtttcttcttcaca

SEQ ID NO: 180200 - DNA, 25 bp, SARS Virus
ggtaggactcgtttcttcttcacaa

SEQ ID NO: 180201 - DNA, 25 bp, SARS Virus
gtaggactcgtttcttcttcacaaa

SEQ ID NO: 180202 - DNA, 25 bp, SARS Virus
taggactcgttttttcttcacaaaa

SEQ ID NO: 180203 - DNA, 25 bp, SARS Virus
aggactcgtttcttcttcacaaaat

SEQ ID NO: 180204 - DNA, 25 bp, SARS Virus
ggactcgtttcttcttcacaaaatc

SEQ ID NO: 180205 - DNA, 25 bp, SARS Virus
gactcgtttctttttcacaaaatca

SEQ ID NO: 180206 - DNA, 25 bp, SARS Virus
actcgtttcttcttcacaaaatcaa

SEQ ID NO: 180207 - DNA, 25 bp, SARS Virus
ctcgtttcttcttcacaaaatcaag

SEQ ID NO: 180208 - DNA, 25 bp, SARS Virus
tcgtttcttctttacaaaatcaagt

SEQ ID NO: 180209 - DNA, 25 bp, SARS Virus
cgtttcttcttctcaaaatcaagtt

SEQ ID NO: 180210 - DNA, 25 bp, SARS Virus
gtttcttcttcataaaatcaagttg

SEQ ID NO: 180211 - DNA, 25 bp, SARS Virus
tttcttcttcactaaatcaagttgt

SEQ ID NO: 180212 - DNA, 25 bp, SARS Virus
ttcttcttcacataatcaagttgtc

SEQ ID NO: 180213 - DNA, 25 bp, SARS Virus
tcttcttcacaatatcaagttgtct

SEQ ID NO: 180214 - DNA, 25 bp, SARS Virus
cttcttcacaaattcaagttgtctt

SEQ ID NO: 180215 - DNA, 25 bp, SARS Virus
ttcttcacaaaatcaagttgtcttg

SEQ ID NO: 180216 - DNA, 25 bp, SARS Virus
tcttcacaaaattaagttgtcttga

SEQ ID NO: 180217 - DNA, 25 bp, SARS Virus
cttcacaaaatctagttgtcttgaa

SEQ ID NO: 180218 - DNA, 25 bp, SARS Virus
ttcacaaaatcatgttgtcttgaag

SEQ ID NO: 180219 - DNA, 25 bp, SARS Virus
tcacaaaatcaatttgtcttgaagg

SEQ ID NO: 180220 - DNA, 25 bp, SARS Virus
cacaaaatcaagttgtcttgaagga

SEQ ID NO: 180221 - DNA, 25 bp, SARS Virus
acaaaatcaagttgtcttgaaggaa

SEQ ID NO: 180222 - DNA, 25 bp, SARS Virus
caaaatcaagttttcttgaaggaag

SEQ ID NO: 180223 - DNA, 25 bp, SARS Virus
aaaatcaagttgtcttgaaggaagg

SEQ ID NO: 180224 - DNA, 25 bp, SARS Virus
aaatcaagttgttttgaaggaagga

SEQ ID NO: 180225 - DNA, 25 bp, SARS Virus
aatcaagttgtcttgaaggaaggaa

SEQ ID NO: 180226 - DNA, 25 bp, SARS Virus
atcaagttgtcttgaaggaaggaat

SEQ ID NO: 180227 - DNA, 25 bp, SARS Virus
tcaagttgtctttaaggaaggaatt

SEQ ID NO: 180228 - DNA, 25 bp, SARS Virus
caagttgtcttgtaggaaggaattt

SEQ ID NO: 180229 - DNA, 25 bp, SARS Virus
aagttgtcttgatggaaggaatttc

SEQ ID NO: 180230 - DNA, 25 bp, SARS Virus
agttgtcttgaatgaaggaatttct

SEQ ID NO: 180231 - DNA, 25 bp, SARS Virus
gttgtcttgaagtaaggaatttctt

SEQ ID NO: 180232 - DNA, 25 bp, SARS Virus
ttgtcttgaaggtaggaatttcttt

SEQ ID NO: 180233 - DNA, 25 bp, SARS Virus
tgtcttgaaggatggaatttctttg

SEQ ID NO: 180234 - DNA, 25 bp, SARS Virus
gtcttgaaggaatgaatttctttgg

SEQ ID NO: 180235 - DNA, 25 bp, SARS Virus
tcttgaaggaagtaatttctttgga

SEQ ID NO: 180236 - DNA, 25 bp, SARS Virus
cttgaaggaaggtatttctttggaa

SEQ ID NO: 180237 - DNA, 25 bp, SARS Virus
ttgaaggaaggattttctttggaaa

SEQ ID NO: 180238 - DNA, 25 bp, SARS Virus
tgaaggaaggaatttctttggaaat

SEQ ID NO: 180239 - DNA, 25 bp, SARS Virus
gaaggaaggaatttctttggaaatc

SEQ ID NO: 180240 - DNA, 25 bp, SARS Virus
aaggaaggaatttctttggaaatct

SEQ ID NO: 180241 - DNA, 25 bp, SARS Virus
aggaaggaatttttttggaaatctg

SEQ ID NO: 180242 - DNA, 25 bp, SARS Virus
ggaaggaatttctttggaaatctgt

SEQ ID NO: 180243 - DNA, 25 bp, SARS Virus
gaaggaatttctttggaaatctgtg

SEQ ID NO: 180244 - DNA, 25 bp, SARS Virus
aaggaatttctttggaaatctgtgt

SEQ ID NO: 180245 - DNA, 25 bp, SARS Virus
aggaatttcttttgaaatctgtgtc

SEQ ID NO: 180246 - DNA, 25 bp, SARS Virus
ggaatttctttgtaaatctgtgtcg

SEQ ID NO: 180247 - DNA, 25 bp, SARS Virus
gaatttctttggtaatctgtgtcgt

SEQ ID NO: 180248 - DNA, 25 bp, SARS Virus
aatttctttggatatctgtgtcgtt

SEQ ID NO: 180249 - DNA, 25 bp, SARS Virus
atttctttggaattctgtgtcgttt

SEQ ID NO: 180250 - DNA, 25 bp, SARS Virus
tttctttggaaatctgtgtcgtttc

SEQ ID NO: 180251 - DNA, 25 bp, SARS Virus
ttctttggaaatttgtgtcgtttca

SEQ ID NO: 180252 - DNA, 25 bp, SARS Virus
tctttggaaatctgtgtcgtttcag

SEQ ID NO: 180253 - DNA, 25 bp, SARS Virus
ctttggaaatctttgtcgtttcagt

SEQ ID NO: 180254 - DNA, 25 bp, SARS Virus
tttggaaatctgtgtcgtttcagta

SEQ ID NO: 180255 - DNA, 25 bp, SARS Virus
ttggaaatctgtttcgtttcagtat

SEQ ID NO: 180256 - DNA, 25 bp, SARS Virus
tggaaatctgtgtcgtttcagtatt

SEQ ID NO: 180257 - DNA, 25 bp, SARS Virus
ggaaatctgtgttgtttcagtattt

SEQ ID NO: 180258 - DNA, 25 bp, SARS Virus
gaaatctgtgtcttttcagtatttt

SEQ ID NO: 180259 - DNA, 25 bp, SARS Virus
aaatctgtgtcgtttcagtattttc

SEQ ID NO: 180260 - DNA, 25 bp, SARS Virus
aatctgtgtcgtttcagtattttca

SEQ ID NO: 180261 - DNA, 25 bp, SARS Virus
atctgtgtcgtttcagtattttcag

SEQ ID NO: 180262 - DNA, 25 bp, SARS Virus
tctgtgtcgttttagtattttcaga

SEQ ID NO: 180263 - DNA, 25 bp, SARS Virus
ctgtgtcgtttctgtattttcagaa

SEQ ID NO: 180264 - DNA, 25 bp, SARS Virus
tgtgtcgtttcattattttcagaaa

SEQ ID NO: 180265 - DNA, 25 bp, SARS Virus
gtgtcgtttcagtattttcagaaat

SEQ ID NO: 180266 - DNA, 25 bp, SARS Virus
tgtcgtttcagttttttcagaaata

SEQ ID NO: 180267 - DNA, 25 bp, SARS Virus
gtcgtttcagtattttcagaaataa

SEQ ID NO: 180268 - DNA, 25 bp, SARS Virus
tcgtttcagtattttcagaaataat

SEQ ID NO: 180269 - DNA, 25 bp, SARS Virus
cgtttcagtattttcagaaataatt

SEQ ID NO: 180270 - DNA, 25 bp, SARS Virus
gtttcagtattttcagaaataattt

SEQ ID NO: 180271 - DNA, 25 bp, SARS Virus
tttcagtatttttagaaataatttt

SEQ ID NO: 180272 - DNA, 25 bp, SARS Virus
ttcagtattttctgaaataatttta

SEQ ID NO: 180273 - DNA, 25 bp, SARS Virus
tcagtattttcataaataattttaa

SEQ ID NO: 180274 - DNA, 25 bp, SARS Virus
cagtattttcagtaataattttaat

SEQ ID NO: 180275 - DNA, 25 bp, SARS Virus
agtattttcagatataattttaatg

SEQ ID NO: 180276 - DNA, 25 bp, SARS Virus
gtattttcagaattaattttaatgg

SEQ ID NO: 180277 - DNA, 25 bp, SARS Virus
tattttcagaaataattttaatggc

SEQ ID NO: 180278 - DNA, 25 bp, SARS Virus
attttcagaaattattttaatggcc

SEQ ID NO: 180279 - DNA, 25 bp, SARS Virus
ttttcagaaatatttttaatggccc

SEQ ID NO: 180280 - DNA, 25 bp, SARS Virus
tttcagaaataattttaatggccca

SEQ ID NO: 180281 - DNA, 25 bp, SARS Virus
ttcagaaataattttaatggcccaa

SEQ ID NO: 180282 - DNA, 25 bp, SARS Virus
tcagaaataattttaatggcccaaa

SEQ ID NO: 180283 - DNA, 25 bp, SARS Virus
cagaaataattttaatggcccaaac

SEQ ID NO: 180284 - DNA, 25 bp, SARS Virus
agaaataatttttatggcccaaact

SEQ ID NO: 180285 - DNA, 25 bp, SARS Virus
gaaataattttattggcccaaactg

SEQ ID NO: 180286 - DNA, 25 bp, SARS Virus
aaataattttaatggcccaaactgt

SEQ ID NO: 180287 - DNA, 25 bp, SARS Virus
aataattttaattgcccaaactgtc

SEQ ID NO: 180288 - DNA, 25 bp, SARS Virus
ataattttaatgtcccaaactgtca

SEQ ID NO: 180289 - DNA, 25 bp, SARS Virus
taattttaatggtccaaactgtcaa

SEQ ID NO: 180290 - DNA, 25 bp, SARS Virus
aattttaatggctcaaactgtcaaa

SEQ ID NO: 180291 - DNA, 25 bp, SARS Virus
attttaatggcctaaactgtcaaac

SEQ ID NO: 180292 - DNA, 25 bp, SARS Virus
ttttaatggccctaactgtcaaact

SEQ ID NO: 180293 - DNA, 25 bp, SARS Virus
tttaatggcccatactgtcaaactt

SEQ ID NO: 180294 - DNA, 25 bp, SARS Virus
ttaatggcccaatctgtcaaacttt

SEQ ID NO: 180295 - DNA, 25 bp, SARS Virus
taatggcccaaattgtcaaactttt

SEQ ID NO: 180296 - DNA, 25 bp, SARS Virus
aatggcccaaactgtcaaacttttc

SEQ ID NO: 180297 - DNA, 25 bp, SARS Virus
atggcccaaactttcaaacttttcg

SEQ ID NO: 180298 - DNA, 25 bp, SARS Virus
tggcccaaactgtcaaacttttcgt

SEQ ID NO: 180299 - DNA, 25 bp, SARS Virus
ggcccaaactgttaaacttttcgtt

SEQ ID NO: 180300 - DNA, 25 bp, SARS Virus
gcccaaactgtctaacttttcgttg

SEQ ID NO: 180301 - DNA, 25 bp, SARS Virus
cccaaactgtcatacttttcgttgt

SEQ ID NO: 180302 - DNA, 25 bp, SARS Virus
ccaaactgtcaatcttttcgttgta

SEQ ID NO: 180303 - DNA, 25 bp, SARS Virus
caaactgtcaaatttttcgttgtaa

SEQ ID NO: 180304 - DNA, 25 bp, SARS Virus
aaactgtcaaacttttcgttgtaac

SEQ ID NO: 180305 - DNA, 25 bp, SARS Virus
aactgtcaaacttttcgttgtaaca

SEQ ID NO: 180306 - DNA, 25 bp, SARS Virus
actgtcaaacttttcgttgtaacaa

SEQ ID NO: 180307 - DNA, 25 bp, SARS Virus
ctgtcaaacttttcgttgtaacaaa

SEQ ID NO: 180308 - DNA, 25 bp, SARS Virus
tgtcaaactttttgttgtaacaaac

SEQ ID NO: 180309 - DNA, 25 bp, SARS Virus
gtcaaacttttctttgtaacaaaca

SEQ ID NO: 180310 - DNA, 25 bp, SARS Virus
tcaaacttttcgttgtaacaaacaa

SEQ ID NO: 180311 - DNA, 25 bp, SARS Virus
caaacttttcgttgtaacaaacaat

SEQ ID NO: 180312 - DNA, 25 bp, SARS Virus
aaacttttcgttttaacaaacaatc

SEQ ID NO: 180313 - DNA, 25 bp, SARS Virus
aacttttcgttgtaacaaacaatca

SEQ ID NO: 180314 - DNA, 25 bp, SARS Virus
acttttcgttgttacaaacaatcac

SEQ ID NO: 180315 - DNA, 25 bp, SARS Virus
cttttcgttgtatcaaacaatcacg

SEQ ID NO: 180316 - DNA, 25 bp, SARS Virus
ttttcgttgtaataaacaatcacgt

SEQ ID NO: 180317 - DNA, 25 bp, SARS Virus
tttcgttgtaactaacaatcacgtc

SEQ ID NO: 180318 - DNA, 25 bp, SARS Virus
ttcgttgtaacatacaatcacgtcg

SEQ ID NO: 180319 - DNA, 25 bp, SARS Virus
tcgttgtaacaatcaatcacgtcga

SEQ ID NO: 180320 - DNA, 25 bp, SARS Virus
cgttgtaacaaataatcacgtcgat

SEQ ID NO: 180321 - DNA, 25 bp, SARS Virus
gttgtaacaaactatcacgtcgatg

SEQ ID NO: 180322 - DNA, 25 bp, SARS Virus
ttgtaacaaacattcacgtcgatga

SEQ ID NO: 180323 - DNA, 25 bp, SARS Virus
tgtaacaaacaatcacgtcgatgac

SEQ ID NO: 180324 - DNA, 25 bp, SARS Virus
gtaacaaacaattacgtcgatgact

SEQ ID NO: 180325 - DNA, 25 bp, SARS Virus
taacaaacaatctcgtcgatgactt

SEQ ID NO: 180326 - DNA, 25 bp, SARS Virus
aacaaacaatcatgtcgatgacttt

SEQ ID NO: 180327 - DNA, 25 bp, SARS Virus
acaaacaatcacttcgatgactttt

SEQ ID NO: 180328 - DNA, 25 bp, SARS Virus
caaacaatcacgtcgatgacttttc

SEQ ID NO: 180329 - DNA, 25 bp, SARS Virus
aaacaatcacgttgatgacttttcg

SEQ ID NO: 180330 - DNA, 25 bp, SARS Virus
aacaatcacgtctatgacttttcgt

SEQ ID NO: 180331 - DNA, 25 bp, SARS Virus
acaatcacgtcgttgacttttcgta

SEQ ID NO: 180332 - DNA, 25 bp, SARS Virus
caatcacgtcgatgacttttcgtac

SEQ ID NO: 180333 - DNA, 25 bp, SARS Virus
aatcacgtcgattacttttcgtaca

SEQ ID NO: 180334 - DNA, 25 bp, SARS Virus
atcacgtcgatgtcttttcgtacat

SEQ ID NO: 180335 - DNA, 25 bp, SARS Virus
tcacgtcgatgatttttcgtacatc

SEQ ID NO: 180336 - DNA, 25 bp, SARS Virus
cacgtcgatgacttttcgtacatca

SEQ ID NO: 180337 - DNA, 25 bp, SARS Virus
acgtcgatgacttttcgtacatcac

SEQ ID NO: 180338 - DNA, 25 bp, SARS Virus
cgtcgatgacttttcgtacatcacg

SEQ ID NO: 180339 - DNA, 25 bp, SARS Virus
gtcgatgacttttcgtacatcacgc

SEQ ID NO: 180340 - DNA, 25 bp, SARS Virus
tcgatgactttttgtacatcacgca

SEQ ID NO: 180341 - DNA, 25 bp, SARS Virus
cgatgacttttcttacatcacgcaa

SEQ ID NO: 180342 - DNA, 25 bp, SARS Virus
gatgacttttcgtacatcacgcaaa

SEQ ID NO: 180343 - DNA, 25 bp, SARS Virus
atgacttttcgttcatcacgcaaat

SEQ ID NO: 180344 - DNA, 25 bp, SARS Virus
tgacttttcgtatatcacgcaaata

SEQ ID NO: 180345 - DNA, 25 bp, SARS Virus
gacttttcgtacttcacgcaaatag

SEQ ID NO: 180346 - DNA, 25 bp, SARS Virus
acttttcgtacatcacgcaaataga

SEQ ID NO: 180347 - DNA, 25 bp, SARS Virus
cttttcgtacattacgcaaatagat

SEQ ID NO: 180348 - DNA, 25 bp, SARS Virus
ttttcgtacatctcgcaaatagatc

SEQ ID NO: 180349 - DNA, 25 bp, SARS Virus
tttcgtacatcatgcaaatagatcg

SEQ ID NO: 180350 - DNA, 25 bp, SARS Virus
ttcgtacatcactcaaatagatcgt

SEQ ID NO: 180351 - DNA, 25 bp, SARS Virus
tcgtacatcacgtaaatagatcgtt

SEQ ID NO: 180352 - DNA, 25 bp, SARS Virus
cgtacatcacgctaatagatcgtta

SEQ ID NO: 180353 - DNA, 25 bp, SARS Virus
gtacatcacgcatatagatcgttat

SEQ ID NO: 180354 - DNA, 25 bp, SARS Virus
tacatcacgcaattagatcgttatt

SEQ ID NO: 180355 - DNA, 25 bp, SARS Virus
acatcacgcaaatagatcgttattt

SEQ ID NO: 180356 - DNA, 25 bp, SARS Virus
catcacgcaaattgatcgttattta

SEQ ID NO: 180357 - DNA, 25 bp, SARS Virus
atcacgcaaatatatcgttatttaa

SEQ ID NO: 180358 - DNA, 25 bp, SARS Virus
tcacgcaaatagttcgttatttaac

SEQ ID NO: 180359 - DNA, 25 bp, SARS Virus
cacgcaaatagatcgttatttaacg

SEQ ID NO: 180360 - DNA, 25 bp, SARS Virus
acgcaaatagattgttatttaacgg

SEQ ID NO: 180361 - DNA, 25 bp, SARS Virus
cgcaaatagatctttatttaacggt

SEQ ID NO: 180362 - DNA, 25 bp, SARS Virus
gcaaatagatcgttatttaacggtc

SEQ ID NO: 180363 - DNA, 25 bp, SARS Virus
caaatagatcgttatttaacggtct

SEQ ID NO: 180364 - DNA, 25 bp, SARS Virus
aaatagatcgttttttaacggtctt

SEQ ID NO: 180365 - DNA, 25 bp, SARS Virus
aatagatcgttatttaacggtcttc

SEQ ID NO: 180366 - DNA, 25 bp, SARS Virus
atagatcgttatttaacggtcttcg

SEQ ID NO: 180367 - DNA, 25 bp, SARS Virus
tagatcgttatttaacggtcttcga

SEQ ID NO: 180368 - DNA, 25 bp, SARS Virus
agatcgttattttacggtcttcgac

SEQ ID NO: 180369 - DNA, 25 bp, SARS Virus
gatcgttatttatcggtcttcgacg

SEQ ID NO: 180370 - DNA, 25 bp, SARS Virus
atcgttatttaatggtcttcgacgt

SEQ ID NO: 180371 - DNA, 25 bp, SARS Virus
tcgttatttaactgtcttcgacgta

SEQ ID NO: 180372 - DNA, 25 bp, SARS Virus
cgttatttaacgttcttcgacgtac

SEQ ID NO: 180373 - DNA, 25 bp, SARS Virus
gttatttaacggtcttcgacgtacg

SEQ ID NO: 180374 - DNA, 25 bp, SARS Virus
ttatttaacggttttcgacgtacgt

SEQ ID NO: 180375 - DNA, 25 bp, SARS Virus
tatttaacggtcttcgacgtacgta

SEQ ID NO: 180376 - DNA, 25 bp, SARS Virus
atttaacggtcttcgacgtacgtat

SEQ ID NO: 180377 - DNA, 25 bp, SARS Virus
tttaacggtctttgacgtacgtatc

SEQ ID NO: 180378 - DNA, 25 bp, SARS Virus
ttaacggtcttctacgtacgtatcg

SEQ ID NO: 180379 - DNA, 25 bp, SARS Virus
taacggtcttcgtcgtacgtatcga

SEQ ID NO: 180380 - DNA, 25 bp, SARS Virus
aacggtcttcgatgtacgtatcgac

SEQ ID NO: 180381 - DNA, 25 bp, SARS Virus
acggtcttcgacttacgtatcgacc

SEQ ID NO: 180382 - DNA, 25 bp, SARS Virus
cggtcttcgacgtacgtatcgacct

SEQ ID NO: 180383 - DNA, 25 bp, SARS Virus
ggtcttcgacgttcgtatcgaccta

SEQ ID NO: 180384 - DNA, 25 bp, SARS Virus
gtcttcgacgtatgtatcgacctag

SEQ ID NO: 180385 - DNA, 25 bp, SARS Virus
tcttcgacgtacttatcgacctagt

SEQ ID NO: 180386 - DNA, 25 bp, SARS Virus
cttcgacgtacgtatcgacctagtc

SEQ ID NO: 180387 - DNA, 25 bp, SARS Virus
ttcgacgtacgtttcgacctagtcg

SEQ ID NO: 180388 - DNA, 25 bp, SARS Virus
tcgacgtacgtatcgacctagtcgt

SEQ ID NO: 180389 - DNA, 25 bp, SARS Virus
cgacgtacgtattgacctagtcgtc

SEQ ID NO: 180390 - DNA, 25 bp, SARS Virus
gacgtacgtatctacctagtcgtcg

SEQ ID NO: 180391 - DNA, 25 bp, SARS Virus
acgtacgtatcgtcctagtcgtcgt

SEQ ID NO: 180392 - DNA, 25 bp, SARS Virus
cgtacgtatcgatctagtcgtcgta

SEQ ID NO: 180393 - DNA, 25 bp, SARS Virus
gtacgtatcgacttagtcgtcgtat

SEQ ID NO: 180394 - DNA, 25 bp, SARS Virus
tacgtatcgacctagtcgtcgtatg

SEQ ID NO: 180395 - DNA, 25 bp, SARS Virus
acgtatcgaccttgtcgtcgtatgt

SEQ ID NO: 180396 - DNA, 25 bp, SARS Virus
cgtatcgacctattcgtcgtatgtg

SEQ ID NO: 180397 - DNA, 25 bp, SARS Virus
gtatcgacctagtcgtcgtatgtga

SEQ ID NO: 180398 - DNA, 25 bp, SARS Virus
tatcgacctagttgtcgtatgtgat

SEQ ID NO: 180399 - DNA, 25 bp, SARS Virus
atcgacctagtcttcgtatgtgatt

SEQ ID NO: 180400 - DNA, 25 bp, SARS Virus
tcgacctagtcgtcgtatgtgattt

SEQ ID NO: 180401 - DNA, 25 bp, SARS Virus
cgacctagtcgttgtatgtgatttt

SEQ ID NO: 180402 - DNA, 25 bp, SARS Virus
gacctagtcgtcttatgtgattttc

SEQ ID NO: 180403 - DNA, 25 bp, SARS Virus
acctagtcgtcgtatgtgattttca

SEQ ID NO: 180404 - DNA, 25 bp, SARS Virus
cctagtcgtcgtttgtgattttcaa

SEQ ID NO: 180405 - DNA, 25 bp, SARS Virus
ctagtcgtcgtatgtgattttcaag

SEQ ID NO: 180406 - DNA, 25 bp, SARS Virus
tagtcgtcgtatttgattttcaagg

SEQ ID NO: 180407 - DNA, 25 bp, SARS Virus
agtcgtcgtatgtgattttcaagga

SEQ ID NO: 180408 - DNA, 25 bp, SARS Virus
gtcgtcgtatgttattttcaaggaa

SEQ ID NO: 180409 - DNA, 25 bp, SARS Virus
tcgtcgtatgtgtttttcaaggaac

SEQ ID NO: 180410 - DNA, 25 bp, SARS Virus
cgtcgtatgtgattttcaaggaact

SEQ ID NO: 180411 - DNA, 25 bp, SARS Virus
gtcgtatgtgattttcaaggaactt

SEQ ID NO: 180412 - DNA, 25 bp, SARS Virus
tcgtatgtgattttcaaggaacttt

SEQ ID NO: 180413 - DNA, 25 bp, SARS Virus
cgtatgtgattttcaaggaactttg

SEQ ID NO: 180414 - DNA, 25 bp, SARS Virus
gtatgtgatttttaaggaactttga

SEQ ID NO: 180415 - DNA, 25 bp, SARS Virus
tatgtgattttctaggaactttgac

SEQ ID NO: 180416 - DNA, 25 bp, SARS Virus
atgtgattttcatggaactttgact

SEQ ID NO: 180417 - DNA, 25 bp, SARS Virus
tgtgattttcaatgaactttgactc

SEQ ID NO: 180418 - DNA, 25 bp, SARS Virus
gtgattttcaagtaactttgactct

SEQ ID NO: 180419 - DNA, 25 bp, SARS Virus
tgattttcaaggtactttgactctg

SEQ ID NO: 180420 - DNA, 25 bp, SARS Virus
gattttcaaggatctttgactctgc

SEQ ID NO: 180421 - DNA, 25 bp, SARS Virus
attttcaaggaattttgactctgcg

SEQ ID NO: 180422 - DNA, 25 bp, SARS Virus
ttttcaaggaactttgactctgcgc

SEQ ID NO: 180423 - DNA, 25 bp, SARS Virus
tttcaaggaactttgactctgcgct

SEQ ID NO: 180424 - DNA, 25 bp, SARS Virus
ttcaaggaactttgactctgcgctc

SEQ ID NO: 180425 - DNA, 25 bp, SARS Virus
tcaaggaacttttactctgcgctcg

SEQ ID NO: 180426 - DNA, 25 bp, SARS Virus
caaggaactttgtctctgcgctcga

SEQ ID NO: 180427 - DNA, 25 bp, SARS Virus
aaggaactttgattctgcgctcgat

SEQ ID NO: 180428 - DNA, 25 bp, SARS Virus
aggaactttgactctgcgctcgata

SEQ ID NO: 180429 - DNA, 25 bp, SARS Virus
ggaactttgactttgcgctcgatac

SEQ ID NO: 180430 - DNA, 25 bp, SARS Virus
gaactttgactctgcgctcgataca

SEQ ID NO: 180431 - DNA, 25 bp, SARS Virus
aactttgactcttcgctcgatacat

SEQ ID NO: 180432 - DNA, 25 bp, SARS Virus
actttgactctgtgctcgatacatt

SEQ ID NO: 180433 - DNA, 25 bp, SARS Virus
ctttgactctgctctcgatacattc

SEQ ID NO: 180434 - DNA, 25 bp, SARS Virus
tttgactctgcgttcgatacattca

SEQ ID NO: 180435 - DNA, 25 bp, SARS Virus
ttgactctgcgctcgatacattcaa

SEQ ID NO: 180436 - DNA, 25 bp, SARS Virus
tgactctgcgcttgatacattcaaa

SEQ ID NO: 180437 - DNA, 25 bp, SARS Virus
gactctgcgctctatacattcaaat

SEQ ID NO: 180438 - DNA, 25 bp, SARS Virus
actctgcgctcgttacattcaaatg

SEQ ID NO: 180439 - DNA, 25 bp, SARS Virus
ctctgcgctcgatacattcaaatgt

SEQ ID NO: 180440 - DNA, 25 bp, SARS Virus
tctgcgctcgattcattcaaatgta

SEQ ID NO: 180441 - DNA, 25 bp, SARS Virus
ctgcgctcgatatattcaaatgtag

SEQ ID NO: 180442 - DNA, 25 bp, SARS Virus
tgcgctcgatactttcaaatgtagg

SEQ ID NO: 180443 - DNA, 25 bp, SARS Virus
gcgctcgatacattcaaatgtagga

SEQ ID NO: 180444 - DNA, 25 bp, SARS Virus
cgctcgatacattcaaatgtaggac

SEQ ID NO: 180445 - DNA, 25 bp, SARS Virus
gctcgatacatttaaatgtaggact

SEQ ID NO: 180446 - DNA, 25 bp, SARS Virus
ctcgatacattctaatgtaggacta

SEQ ID NO: 180447 - DNA, 25 bp, SARS Virus
tcgatacattcatatgtaggactaa

SEQ ID NO: 180448 - DNA, 25 bp, SARS Virus
cgatacattcaattgtaggactaat

SEQ ID NO: 180449 - DNA, 25 bp, SARS Virus
gatacattcaaatgtaggactaata

SEQ ID NO: 180450 - DNA, 25 bp, SARS Virus
atacattcaaatttaggactaatac

SEQ ID NO: 180451 - DNA, 25 bp, SARS Virus
tacattcaaatgtaggactaataca

SEQ ID NO: 180452 - DNA, 25 bp, SARS Virus
acattcaaatgttggactaatacat

SEQ ID NO: 180453 - DNA, 25 bp, SARS Virus
cattcaaatgtatgactaatacatg

SEQ ID NO: 180454 - DNA, 25 bp, SARS Virus
attcaaatgtagtactaatacatgc

SEQ ID NO: 180455 - DNA, 25 bp, SARS Virus
ttcaaatgtaggtctaatacatgct

SEQ ID NO: 180456 - DNA, 25 bp, SARS Virus
tcaaatgtaggattaatacatgctg

SEQ ID NO: 180457 - DNA, 25 bp, SARS Virus
caaatgtaggactaatacatgctga

SEQ ID NO: 180458 - DNA, 25 bp, SARS Virus
aaatgtaggacttatacatgctgag

SEQ ID NO: 180459 - DNA, 25 bp, SARS Virus
aatgtaggactattacatgctgagg

SEQ ID NO: 180460 - DNA, 25 bp, SARS Virus
atgtaggactaatacatgctgagga

SEQ ID NO: 180461 - DNA, 25 bp, SARS Virus
tgtaggactaattcatgctgaggat

SEQ ID NO: 180462 - DNA, 25 bp, SARS Virus
gtaggactaatatatgctgaggatt

SEQ ID NO: 180463 - DNA, 25 bp, SARS Virus
taggactaatacttgctgaggattg

SEQ ID NO: 180464 - DNA, 25 bp, SARS Virus
aggactaatacatgctgaggattga

SEQ ID NO: 180465 - DNA, 25 bp, SARS Virus
ggactaatacattctgaggattgag

SEQ ID NO: 180466 - DNA, 25 bp, SARS Virus
gactaatacatgttgaggattgagt

SEQ ID NO: 180467 - DNA, 25 bp, SARS Virus
actaatacatgctgaggattgagtg

SEQ ID NO: 180468 - DNA, 25 bp, SARS Virus
ctaatacatgcttaggattgagtgc

SEQ ID NO: 180469 - DNA, 25 bp, SARS Virus
taatacatgctgtggattgagtgct

SEQ ID NO: 180470 - DNA, 25 bp, SARS Virus
aatacatgctgatgattgagtgctt

SEQ ID NO: 180471 - DNA, 25 bp, SARS Virus
atacatgctgagtattgagtgcttt

SEQ ID NO: 180472 - DNA, 25 bp, SARS Virus
tacatgctgaggtttgagtgctttt

SEQ ID NO: 180473 - DNA, 25 bp, SARS Virus
acatgctgaggattgagtgctttta

SEQ ID NO: 180474 - DNA, 25 bp, SARS Virus
catgctgaggattgagtgcttttac

SEQ ID NO: 180475 - DNA, 25 bp, SARS Virus
atgctgaggatttagtgcttttacc

SEQ ID NO: 180476 - DNA, 25 bp, SARS Virus
tgctgaggattgtgtgcttttacca

SEQ ID NO: 180477 - DNA, 25 bp, SARS Virus
gctgaggattgattgcttttaccat

SEQ ID NO: 180478 - DNA, 25 bp, SARS Virus
ctgaggattgagtgcttttaccata

SEQ ID NO: 180479 - DNA, 25 bp, SARS Virus
tgaggattgagttcttttaccatag

SEQ ID NO: 180480 - DNA, 25 bp, SARS Virus
gaggattgagtgtttttaccatagg

SEQ ID NO: 180481 - DNA, 25 bp, SARS Virus
aggattgagtgcttttaccataggt

SEQ ID NO: 180482 - DNA, 25 bp, SARS Virus
ggattgagtgcttttaccataggtc

SEQ ID NO: 180483 - DNA, 25 bp, SARS Virus
gattgagtgcttttaccataggtca

SEQ ID NO: 180484 - DNA, 25 bp, SARS Virus
attgagtgcttttaccataggtcaa

SEQ ID NO: 180485 - DNA, 25 bp, SARS Virus
ttgagtgctttttccataggtcaac

SEQ ID NO: 180486 - DNA, 25 bp, SARS Virus
tgagtgcttttatcataggtcaact

SEQ ID NO: 180487 - DNA, 25 bp, SARS Virus
gagtgcttttactataggtcaactt

SEQ ID NO: 180488 - DNA, 25 bp, SARS Virus
agtgcttttaccttaggtcaacttt

SEQ ID NO: 180489 - DNA, 25 bp, SARS Virus
gtgcttttaccataggtcaactttg

SEQ ID NO: 180490 - DNA, 25 bp, SARS Virus
tgcttttaccattggtcaactttgt

SEQ ID NO: 180491 - DNA, 25 bp, SARS Virus
gcttttaccatatgtcaactttgtt

SEQ ID NO: 180492 - DNA, 25 bp, SARS Virus
cttttaccatagttcaactttgttg

SEQ ID NO: 180493 - DNA, 25 bp, SARS Virus
ttttaccataggtcaactttgttgt

SEQ ID NO: 180494 - DNA, 25 bp, SARS Virus
tttaccataggttaactttgttgtt

SEQ ID NO: 180495 - DNA, 25 bp, SARS Virus
ttaccataggtctactttgttgttt

SEQ ID NO: 180496 - DNA, 25 bp, SARS Virus
taccataggtcatctttgttgtttt

SEQ ID NO: 180497 - DNA, 25 bp, SARS Virus
accataggtcaattttgttgttttc

SEQ ID NO: 180498 - DNA, 25 bp, SARS Virus
ccataggtcaactttgttgttttcc

SEQ ID NO: 180499 - DNA, 25 bp, SARS Virus
cataggtcaactttgttgttttcct

SEQ ID NO: 180500 - DNA, 25 bp, SARS Virus
ataggtcaactttgttgttttcctt

SEQ ID NO: 180501 - DNA, 25 bp, SARS Virus
taggtcaacttttttgttttccttg

SEQ ID NO: 180502 - DNA, 25 bp, SARS Virus
aggtcaactttgttgttttccttgt

SEQ ID NO: 180503 - DNA, 25 bp, SARS Virus
ggtcaactttgttgttttccttgtg

SEQ ID NO: 180504 - DNA, 25 bp, SARS Virus
gtcaactttgtttttttccttgtgg

SEQ ID NO: 180505 - DNA, 25 bp, SARS Virus
tcaactttgttgttttccttgtggt

SEQ ID NO: 180506 - DNA, 25 bp, SARS Virus
caactttgttgttttccttgtggta

SEQ ID NO: 180507 - DNA, 25 bp, SARS Virus
aactttgttgttttccttgtggtag

SEQ ID NO: 180508 - DNA, 25 bp, SARS Virus
actttgttgttttccttgtggtaga

SEQ ID NO: 180509 - DNA, 25 bp, SARS Virus
ctttgttgtttttcttgtggtagat

SEQ ID NO: 180510 - DNA, 25 bp, SARS Virus
tttgttgttttctttgtggtagatg

SEQ ID NO: 180511 - DNA, 25 bp, SARS Virus
ttgttgttttccttgtggtagatgt

SEQ ID NO: 180512 - DNA, 25 bp, SARS Virus
tgttgttttccttgtggtagatgtt

SEQ ID NO: 180513 - DNA, 25 bp, SARS Virus
gttgttttccttttggtagatgttt

SEQ ID NO: 180514 - DNA, 25 bp, SARS Virus
ttgttttccttgtggtagatgttta

SEQ ID NO: 180515 - DNA, 25 bp, SARS Virus
tgttttccttgttgtagatgtttat

SEQ ID NO: 180516 - DNA, 25 bp, SARS Virus
gttttccttgtgttagatgtttata

SEQ ID NO: 180517 - DNA, 25 bp, SARS Virus
ttttccttgtggtagatgtttataa

SEQ ID NO: 180518 - DNA, 25 bp, SARS Virus
tttccttgtggttgatgtttataaa

SEQ ID NO: 180519 - DNA, 25 bp, SARS Virus
ttccttgtggtatatgtttataaaa

SEQ ID NO: 180520 - DNA, 25 bp, SARS Virus
tccttgtggtagttgtttataaaaa

SEQ ID NO: 180521 - DNA, 25 bp, SARS Virus
ccttgtggtagatgtttataaaaag

SEQ ID NO: 180522 - DNA, 25 bp, SARS Virus
cttgtggtagatttttataaaaaga

SEQ ID NO: 180523 - DNA, 25 bp, SARS Virus
ttgtggtagatgtttataaaaagaa

SEQ ID NO: 180524 - DNA, 25 bp, SARS Virus
tgtggtagatgtttataaaaagaat

SEQ ID NO: 180525 - DNA, 25 bp, SARS Virus
gtggtagatgtttataaaaagaatg

SEQ ID NO: 180526 - DNA, 25 bp, SARS Virus
tggtagatgtttttaaaaagaatga

SEQ ID NO: 180527 - DNA, 25 bp, SARS Virus
ggtagatgtttataaaaagaatgat

SEQ ID NO: 180528 - DNA, 25 bp, SARS Virus
gtagatgtttattaaaagaatgatc

SEQ ID NO: 180529 - DNA, 25 bp, SARS Virus
tagatgtttatataaagaatgatca

SEQ ID NO: 180530 - DNA, 25 bp, SARS Virus
agatgtttataataagaatgatcac

SEQ ID NO: 180531 - DNA, 25 bp, SARS Virus
gatgtttataaatagaatgatcacc

SEQ ID NO: 180532 - DNA, 25 bp, SARS Virus
atgtttataaaatgaatgatcacca

SEQ ID NO: 180533 - DNA, 25 bp, SARS Virus
tgtttataaaaataatgatcaccag

SEQ ID NO: 180534 - DNA, 25 bp, SARS Virus
gtttataaaaagtatgatcaccagg

SEQ ID NO: 180535 - DNA, 25 bp, SARS Virus
tttataaaaagattgatcaccaggt

SEQ ID NO: 180536 - DNA, 25 bp, SARS Virus
ttataaaaagaatgatcaccaggtt

SEQ ID NO: 180537 - DNA, 25 bp, SARS Virus
tataaaaagaattatcaccaggttt

SEQ ID NO: 180538 - DNA, 25 bp, SARS Virus
ataaaaagaatgttcaccaggtttt

SEQ ID NO: 180539 - DNA, 25 bp, SARS Virus
taaaaagaatgatcaccaggttttg

SEQ ID NO: 180540 - DNA, 25 bp, SARS Virus
aaaaagaatgattaccaggttttga

SEQ ID NO: 180541 - DNA, 25 bp, SARS Virus
aaaagaatgatctccaggttttgaa

SEQ ID NO: 180542 - DNA, 25 bp, SARS Virus
aaagaatgatcatcaggttttgaac

SEQ ID NO: 180543 - DNA, 25 bp, SARS Virus
aagaatgatcactaggttttgaaca

SEQ ID NO: 180544 - DNA, 25 bp, SARS Virus
agaatgatcacctggttttgaacat

SEQ ID NO: 180545 - DNA, 25 bp, SARS Virus
gaatgatcaccatgttttgaacatc

SEQ ID NO: 180546 - DNA, 25 bp, SARS Virus
aatgatcaccagtttttgaacatcc

SEQ ID NO: 180547 - DNA, 25 bp, SARS Virus
atgatcaccaggttttgaacatcca

SEQ ID NO: 180548 - DNA, 25 bp, SARS Virus
tgatcaccaggttttgaacatccac

SEQ ID NO: 180549 - DNA, 25 bp, SARS Virus
gatcaccaggttttgaacatccacc

SEQ ID NO: 180550 - DNA, 25 bp, SARS Virus
atcaccaggttttgaacatccacct

SEQ ID NO: 180551 - DNA, 25 bp, SARS Virus
tcaccaggtttttaacatccacctt

SEQ ID NO: 180552 - DNA, 25 bp, SARS Virus
caccaggttttgtacatccaccttt

SEQ ID NO: 180553 - DNA, 25 bp, SARS Virus
accaggttttgatcatccacctttg

SEQ ID NO: 180554 - DNA, 25 bp, SARS Virus
ccaggttttgaatatccacctttgt

SEQ ID NO: 180555 - DNA, 25 bp, SARS Virus
caggttttgaacttccacctttgtg

SEQ ID NO: 180556 - DNA, 25 bp, SARS Virus
aggttttgaacatccacctttgtgt

SEQ ID NO: 180557 - DNA, 25 bp, SARS Virus
ggttttgaacattcacctttgtgtc

SEQ ID NO: 180558 - DNA, 25 bp, SARS Virus
gttttgaacatctacctttgtgtca

SEQ ID NO: 180559 - DNA, 25 bp, SARS Virus
ttttgaacatcctcctttgtgtcat

SEQ ID NO: 180560 - DNA, 25 bp, SARS Virus
tttgaacatccatctttgtgtcatc

SEQ ID NO: 180561 - DNA, 25 bp, SARS Virus
ttgaacatccacttttgtgtcatct

SEQ ID NO: 180562 - DNA, 25 bp, SARS Virus
tgaacatccacctttgtgtcatctt

SEQ ID NO: 180563 - DNA, 25 bp, SARS Virus
gaacatccacctttgtgtcatcttt

SEQ ID NO: 180564 - DNA, 25 bp, SARS Virus
aacatccacctttgtgtcatctttt

SEQ ID NO: 180565 - DNA, 25 bp, SARS Virus
acatccacctttttgtcatctttta

SEQ ID NO: 180566 - DNA, 25 bp, SARS Virus
catccacctttgtgtcatcttttat

SEQ ID NO: 180567 - DNA, 25 bp, SARS Virus
atccacctttgtttcatcttttatt

SEQ ID NO: 180568 - DNA, 25 bp, SARS Virus
tccacctttgtgtcatcttttattg

SEQ ID NO: 180569 - DNA, 25 bp, SARS Virus
ccacctttgtgttatcttttattgt

SEQ ID NO: 180570 - DNA, 25 bp, SARS Virus
cacctttgtgtcttcttttattgtg

SEQ ID NO: 180571 - DNA, 25 bp, SARS Virus
acctttgtgtcatcttttattgtgt

SEQ ID NO: 180572 - DNA, 25 bp, SARS Virus
cctttgtgtcattttttattgtgta

SEQ ID NO: 180573 - DNA, 25 bp, SARS Virus
ctttgtgtcatcttttattgtgtaa

SEQ ID NO: 180574 - DNA, 25 bp, SARS Virus
tttgtgtcatcttttattgtgtaat

SEQ ID NO: 180575 - DNA, 25 bp, SARS Virus
ttgtgtcatcttttattgtgtaatt

SEQ ID NO: 180576 - DNA, 25 bp, SARS Virus
tgtgtcatcttttattgtgtaattt

SEQ ID NO: 180577 - DNA, 25 bp, SARS Virus
gtgtcatctttttttgtgtaatttc

SEQ ID NO: 180578 - DNA, 25 bp, SARS Virus
tgtcatcttttattgtgtaatttca

SEQ ID NO: 180579 - DNA, 25 bp, SARS Virus
gtcatcttttattgtgtaatttcaa

SEQ ID NO: 180580 - DNA, 25 bp, SARS Virus
tcatcttttattttgtaatttcaaa

SEQ ID NO: 180581 - DNA, 25 bp, SARS Virus
catcttttattgtgtaatttcaaac

SEQ ID NO: 180582 - DNA, 25 bp, SARS Virus
atcttttattgtttaatttcaaacg

SEQ ID NO: 180583 - DNA, 25 bp, SARS Virus
tcttttattgtgtaatttcaaacgt

SEQ ID NO: 180584 - DNA, 25 bp, SARS Virus
cttttattgtgttatttcaaacgtg

SEQ ID NO: 180585 - DNA, 25 bp, SARS Virus
ttttattgtgtattttcaaacgtgt

SEQ ID NO: 180586 - DNA, 25 bp, SARS Virus
tttattgtgtaatttcaaacgtgtt

SEQ ID NO: 180587 - DNA, 25 bp, SARS Virus
ttattgtgtaatttcaaacgtgtta

SEQ ID NO: 180588 - DNA, 25 bp, SARS Virus
tattgtgtaatttcaaacgtgttac

SEQ ID NO: 180589 - DNA, 25 bp, SARS Virus
attgtgtaattttaaacgtgttact

SEQ ID NO: 180590 - DNA, 25 bp, SARS Virus
ttgtgtaatttctaacgtgttactt

SEQ ID NO: 180591 - DNA, 25 bp, SARS Virus
tgtgtaatttcatacgtgttacttc

SEQ ID NO: 180592 - DNA, 25 bp, SARS Virus
gtgtaatttcaatcgtgttacttcc

SEQ ID NO: 180593 - DNA, 25 bp, SARS Virus
tgtaatttcaaaagtgttacttcct

SEQ ID NO: 180594 - DNA, 25 bp, SARS Virus
gtaatttcaaacatgttacttccta

SEQ ID NO: 180595 - DNA, 25 bp, SARS Virus
taatttcaaacgagttacttcctat

SEQ ID NO: 180596 - DNA, 25 bp, SARS Virus
aatttcaaacgtattacttcctatg

SEQ ID NO: 180597 - DNA, 25 bp, SARS Virus
atttcaaacgtgatacttcctatgt

SEQ ID NO: 180598 - DNA, 25 bp, SARS Virus
tttcaaacgtgtaacttcctatgtg

SEQ ID NO: 180599 - DNA, 25 bp, SARS Virus
ttcaaacgtgttacttcctatgtgg

SEQ ID NO: 180600 - DNA, 25 bp, SARS Virus
tcaaacgtgttaattcctatgtgga

SEQ ID NO: 180601 - DNA, 25 bp, SARS Virus
caaacgtgttacatcctatgtggat

SEQ ID NO: 180602 - DNA, 25 bp, SARS Virus
aaacgtgttactacctatgtggata

SEQ ID NO: 180603 - DNA, 25 bp, SARS Virus
aacgtgttacttactatgtggatag

SEQ ID NO: 180604 - DNA, 25 bp, SARS Virus
acgtgttacttcatatgtggatagt

SEQ ID NO: 180605 - DNA, 25 bp, SARS Virus
cgtgttacttccaatgtggatagta

SEQ ID NO: 180606 - DNA, 25 bp, SARS Virus
gtgttacttcctatgtggatagtag

SEQ ID NO: 180607 - DNA, 25 bp, SARS Virus
tgttacttcctaagtggatagtagg

SEQ ID NO: 180608 - DNA, 25 bp, SARS Virus
gttacttcctatatggatagtaggt

SEQ ID NO: 180609 - DNA, 25 bp, SARS Virus
ttacttcctatgaggatagtaggtt

SEQ ID NO: 180610 - DNA, 25 bp, SARS Virus
tacttcctatgtagatagtaggttt

SEQ ID NO: 180611 - DNA, 25 bp, SARS Virus
acttcctatgtgaatagtaggtttg

SEQ ID NO: 180612 - DNA, 25 bp, SARS Virus
cttcctatgtggatagtaggtttgt

SEQ ID NO: 180613 - DNA, 25 bp, SARS Virus
ttcctatgtggaaagtaggtttgtc

SEQ ID NO: 180614 - DNA, 25 bp, SARS Virus
tcctatgtggatagtaggtttgtca

SEQ ID NO: 180615 - DNA, 25 bp, SARS Virus
cctatgtggataataggtttgtcaa

SEQ ID NO: 180616 - DNA, 25 bp, SARS Virus
ctatgtggatagaaggtttgtcaat

SEQ ID NO: 180617 - DNA, 25 bp, SARS Virus
tatgtggatagtaggtttgtcaatt

SEQ ID NO: 180618 - DNA, 25 bp, SARS Virus
atgtggatagtaagtttgtcaatta

SEQ ID NO: 180619 - DNA, 25 bp, SARS Virus
tgtggatagtagatttgtcaattat

SEQ ID NO: 180620 - DNA, 25 bp, SARS Virus
gtggatagtaggattgtcaattatg

SEQ ID NO: 180621 - DNA, 25 bp, SARS Virus
tggatagtaggtatgtcaattatgt

SEQ ID NO: 180622 - DNA, 25 bp, SARS Virus
ggatagtaggttagtcaattatgtt

SEQ ID NO: 180623 - DNA, 25 bp, SARS Virus
gatagtaggtttatcaattatgtta

SEQ ID NO: 180624 - DNA, 25 bp, SARS Virus
atagtaggtttgacaattatgttaa

SEQ ID NO: 180625 - DNA, 25 bp, SARS Virus
tagtaggtttgtaaattatgttaac

SEQ ID NO: 180626 - DNA, 25 bp, SARS Virus
agtaggtttgtcaattatgttaacc

SEQ ID NO: 180627 - DNA, 25 bp, SARS Virus
gtaggtttgtcaattatgttaaccc

SEQ ID NO: 180628 - DNA, 25 bp, SARS Virus
taggtttgtcaaatatgttaaccct

SEQ ID NO: 180629 - DNA, 25 bp, SARS Virus
aggtttgtcaataatgttaacccta

SEQ ID NO: 180630 - DNA, 25 bp, SARS Virus
ggtttgtcaattatgttaaccctac

SEQ ID NO: 180631 - DNA, 25 bp, SARS Virus
gtttgtcaattaagttaaccctacc

SEQ ID NO: 180632 - DNA, 25 bp, SARS Virus
tttgtcaattatattaaccctacca

SEQ ID NO: 180633 - DNA, 25 bp, SARS Virus
ttgtcaattatgataaccctaccat

SEQ ID NO: 180634 - DNA, 25 bp, SARS Virus
tgtcaattatgtaaaccctaccata

SEQ ID NO: 180635 - DNA, 25 bp, SARS Virus
gtcaattatgttaaccctaccatac

SEQ ID NO: 180636 - DNA, 25 bp, SARS Virus
tcaattatgttaaccctaccataca

SEQ ID NO: 180637 - DNA, 25 bp, SARS Virus
caattatgttaaacctaccatacag

SEQ ID NO: 180638 - DNA, 25 bp, SARS Virus
aattatgttaacactaccatacaga

SEQ ID NO: 180639 - DNA, 25 bp, SARS Virus
attatgttaaccataccatacagac

SEQ ID NO: 180640 - DNA, 25 bp, SARS Virus
ttatgttaacccaaccatacagacc

SEQ ID NO: 180641 - DNA, 25 bp, SARS Virus
tatgttaaccctaccatacagacca

SEQ ID NO: 180642 - DNA, 25 bp, SARS Virus
atgttaaccctaacatacagaccag

SEQ ID NO: 180643 - DNA, 25 bp, SARS Virus
tgttaaccctacaatacagaccagg

SEQ ID NO: 180644 - DNA, 25 bp, SARS Virus
gttaaccctaccatacagaccaggg

SEQ ID NO: 180645 - DNA, 25 bp, SARS Virus
ttaaccctaccaaacagaccagggt

SEQ ID NO: 180646 - DNA, 25 bp, SARS Virus
taaccctaccatacagaccagggtt

SEQ ID NO: 180647 - DNA, 25 bp, SARS Virus
aaccctaccataaagaccagggtta

SEQ ID NO: 180648 - DNA, 25 bp, SARS Virus
accctaccatacagaccagggttat

SEQ ID NO: 180649 - DNA, 25 bp, SARS Virus
ccctaccatacaaaccagggttata

SEQ ID NO: 180650 - DNA, 25 bp, SARS Virus
cctaccatacagaccagggttataa

SEQ ID NO: 180651 - DNA, 25 bp, SARS Virus
ctaccatacagaacagggttataaa

SEQ ID NO: 180652 - DNA, 25 bp, SARS Virus
taccatacagacaagggttataaat

SEQ ID NO: 180653 - DNA, 25 bp, SARS Virus
accatacagaccagggttataaatt

SEQ ID NO: 180654 - DNA, 25 bp, SARS Virus
ccatacagaccaaggttataaattt

SEQ ID NO: 180655 - DNA, 25 bp, SARS Virus
catacagaccagagttataaatttt

SEQ ID NO: 180656 - DNA, 25 bp, SARS Virus
atacagaccaggattataaatttta

SEQ ID NO: 180657 - DNA, 25 bp, SARS Virus
tacagaccagggatataaattttat

SEQ ID NO: 180658 - DNA, 25 bp, SARS Virus
acagaccagggtaataaattttatt

SEQ ID NO: 180659 - DNA, 25 bp, SARS Virus
cagaccagggttataaattttattg

SEQ ID NO: 180660 - DNA, 25 bp, SARS Virus
agaccagggttaaaaattttattgc

SEQ ID NO: 180661 - DNA, 25 bp, SARS Virus
gaccagggttataaattttattgcc

SEQ ID NO: 180662 - DNA, 25 bp, SARS Virus
accagggttataaattttattgcca

SEQ ID NO: 180663 - DNA, 25 bp, SARS Virus
ccagggttataaattttattgccag

SEQ ID NO: 180664 - DNA, 25 bp, SARS Virus
cagggttataaaatttattgccagc

SEQ ID NO: 180665 - DNA, 25 bp, SARS Virus
agggttataaatattattgccagct

SEQ ID NO: 180666 - DNA, 25 bp, SARS Virus
gggttataaattatattgccagctt

SEQ ID NO: 180667 - DNA, 25 bp, SARS Virus
ggttataaatttaattgccagcttc

SEQ ID NO: 180668 - DNA, 25 bp, SARS Virus
gttataaattttattgccagcttct

SEQ ID NO: 180669 - DNA, 25 bp, SARS Virus
ttataaattttaatgccagcttctc

SEQ ID NO: 180670 - DNA, 25 bp, SARS Virus
tataaattttatagccagcttctct

SEQ ID NO: 180671 - DNA, 25 bp, SARS Virus
ataaattttattaccagcttctctg

SEQ ID NO: 180672 - DNA, 25 bp, SARS Virus
taaattttattgacagcttctctgt

SEQ ID NO: 180673 - DNA, 25 bp, SARS Virus
aaattttattgcaagcttctctgtt

SEQ ID NO: 180674 - DNA, 25 bp, SARS Virus
aattttattgccagcttctctgttt

SEQ ID NO: 180675 - DNA, 25 bp, SARS Virus
attttattgccaacttctctgtttc

SEQ ID NO: 180676 - DNA, 25 bp, SARS Virus
ttttattgccagattctctgtttca

SEQ ID NO: 180677 - DNA, 25 bp, SARS Virus
tttattgccagcatctctgtttcag

SEQ ID NO: 180678 - DNA, 25 bp, SARS Virus
ttattgccagctactctgtttcaga

SEQ ID NO: 180679 - DNA, 25 bp, SARS Virus
tattgccagcttatctgtttcagag

SEQ ID NO: 180680 - DNA, 25 bp, SARS Virus
attgccagcttcactgtttcagaga

SEQ ID NO: 180681 - DNA, 25 bp, SARS Virus
ttgccagcttctatgtttcagagag

SEQ ID NO: 180682 - DNA, 25 bp, SARS Virus
tgccagcttctcagtttcagagaga

SEQ ID NO: 180683 - DNA, 25 bp, SARS Virus
gccagcttctctatttcagagagaa

SEQ ID NO: 180684 - DNA, 25 bp, SARS Virus
ccagcttctctgattcagagagaag

SEQ ID NO: 180685 - DNA, 25 bp, SARS Virus
cagcttctctgtatcagagagaagg

SEQ ID NO: 180686 - DNA, 25 bp, SARS Virus
agcttctctgttacagagagaaggc

SEQ ID NO: 180687 - DNA, 25 bp, SARS Virus
gcttctctgtttaagagagaaggca

SEQ ID NO: 180688 - DNA, 25 bp, SARS Virus
cttctctgtttcagagagaaggcat

SEQ ID NO: 180689 - DNA, 25 bp, SARS Virus
ttctctgtttcaaagagaaggcatt

SEQ ID NO: 180690 - DNA, 25 bp, SARS Virus
tctctgtttcagagagaaggcattt

SEQ ID NO: 180691 - DNA, 25 bp, SARS Virus
ctctgtttcagaaagaaggcatttt

SEQ ID NO: 180692 - DNA, 25 bp, SARS Virus
tctgtttcagagagaaggcatttta

SEQ ID NO: 180693 - DNA, 25 bp, SARS Virus
ctgtttcagagaaaaggcattttag

SEQ ID NO: 180694 - DNA, 25 bp, SARS Virus
tgtttcagagagaaggcattttagt

SEQ ID NO: 180695 - DNA, 25 bp, SARS Virus
gtttcagagagaaggcattttagta

SEQ ID NO: 180696 - DNA, 25 bp, SARS Virus
tttcagagagaaagcattttagtat

SEQ ID NO: 180697 - DNA, 25 bp, SARS Virus
ttcagagagaagacattttagtata

SEQ ID NO: 180698 - DNA, 25 bp, SARS Virus
tcagagagaaggaattttagtataa

SEQ ID NO: 180699 - DNA, 25 bp, SARS Virus
cagagagaaggcattttagtataaa

SEQ ID NO: 180700 - DNA, 25 bp, SARS Virus
agagagaaggcaatttagtataaag

SEQ ID NO: 180701 - DNA, 25 bp, SARS Virus
gagagaaggcatattagtataaagt

SEQ ID NO: 180702 - DNA, 25 bp, SARS Virus
agagaaggcattatagtataaagtc

SEQ ID NO: 180703 - DNA, 25 bp, SARS Virus
gagaaggcatttaagtataaagtcg

SEQ ID NO: 180704 - DNA, 25 bp, SARS Virus
agaaggcattttagtataaagtcgt

SEQ ID NO: 180705 - DNA, 25 bp, SARS Virus
gaaggcattttaatataaagtcgtt

SEQ ID NO: 180706 - DNA, 25 bp, SARS Virus
aaggcattttagaataaagtcgttt

SEQ ID NO: 180707 - DNA, 25 bp, SARS Virus
aggcattttagtataaagtcgttta

SEQ ID NO: 180708 - DNA, 25 bp, SARS Virus
ggcattttagtaaaaagtcgtttag

SEQ ID NO: 180709 - DNA, 25 bp, SARS Virus
gcattttagtataaagtcgtttagg

SEQ ID NO: 180710 - DNA, 25 bp, SARS Virus
cattttagtataaagtcgtttaggg

SEQ ID NO: 180711 - DNA, 25 bp, SARS Virus
attttagtataaagtcgtttagggt

SEQ ID NO: 180712 - DNA, 25 bp, SARS Virus
ttttagtataaaatcgtttagggtg

SEQ ID NO: 180713 - DNA, 25 bp, SARS Virus
tttagtataaagacgtttagggtga

SEQ ID NO: 180714 - DNA, 25 bp, SARS Virus
ttagtataaagtagtttagggtgaa

SEQ ID NO: 180715 - DNA, 25 bp, SARS Virus
tagtataaagtcatttagggtgaat

SEQ ID NO: 180716 - DNA, 25 bp, SARS Virus
agtataaagtcgattagggtgaatt

SEQ ID NO: 180717 - DNA, 25 bp, SARS Virus
gtataaagtcgtatagggtgaatta

SEQ ID NO: 180718 - DNA, 25 bp, SARS Virus
tataaagtcgttaagggtgaattat

SEQ ID NO: 180719 - DNA, 25 bp, SARS Virus
ataaagtcgtttagggtgaattatt

SEQ ID NO: 180720 - DNA, 25 bp, SARS Virus
taaagtcgtttaaggtgaattattc

SEQ ID NO: 180721 - DNA, 25 bp, SARS Virus
aaagtcgtttagagtgaattattca

SEQ ID NO: 180722 - DNA, 25 bp, SARS Virus
aagtcgtttaggatgaattattcac

SEQ ID NO: 180723 - DNA, 25 bp, SARS Virus
agtcgtttagggagaattattcacc

SEQ ID NO: 180724 - DNA, 25 bp, SARS Virus
gtcgtttagggtaaattattcacca

SEQ ID NO: 180725 - DNA, 25 bp, SARS Virus
tcgtttagggtgaattattcaccaa

SEQ ID NO: 180726 - DNA, 25 bp, SARS Virus
cgtttagggtgaattattcaccaaa

SEQ ID NO: 180727 - DNA, 25 bp, SARS Virus
gtttagggtgaaatattcaccaaaa

SEQ ID NO: 180728 - DNA, 25 bp, SARS Virus
tttagggtgaataattcaccaaaac

SEQ ID NO: 180729 - DNA, 25 bp, SARS Virus
ttagggtgaattattcaccaaaacg

SEQ ID NO: 180730 - DNA, 25 bp, SARS Virus
tagggtgaattaatcaccaaaacgc

SEQ ID NO: 180731 - DNA, 25 bp, SARS Virus
agggtgaattatacaccaaaacgct

SEQ ID NO: 180732 - DNA, 25 bp, SARS Virus
gggtgaattattaaccaaaacgctc

SEQ ID NO: 180733 - DNA, 25 bp, SARS Virus
ggtgaattattcaccaaaacgctct

SEQ ID NO: 180734 - DNA, 25 bp, SARS Virus
gtgaattattcaacaaaacgctcta

SEQ ID NO: 180735 - DNA, 25 bp, SARS Virus
tgaattattcacaaaaacgctctag

SEQ ID NO: 180736 - DNA, 25 bp, SARS Virus
gaattattcaccaaaacgctctagt

SEQ ID NO: 180737 - DNA, 25 bp, SARS Virus
aattattcaccaaaacgctctagtc

SEQ ID NO: 180738 - DNA, 25 bp, SARS Virus
attattcaccaaaacgctctagtcg

SEQ ID NO: 180739 - DNA, 25 bp, SARS Virus
ttattcaccaaaacgctctagtcgt

SEQ ID NO: 180740 - DNA, 25 bp, SARS Virus
tattcaccaaaaagctctagtcgta

SEQ ID NO: 180741 - DNA, 25 bp, SARS Virus
attcaccaaaacactctagtcgtag

SEQ ID NO: 180742 - DNA, 25 bp, SARS Virus
ttcaccaaaacgatctagtcgtagg

SEQ ID NO: 180743 - DNA, 25 bp, SARS Virus
tcaccaaaacgcactagtcgtaggt

SEQ ID NO: 180744 - DNA, 25 bp, SARS Virus
caccaaaacgctatagtcgtaggta

SEQ ID NO: 180745 - DNA, 25 bp, SARS Virus
accaaaacgctcaagtcgtaggtat

SEQ ID NO: 180746 - DNA, 25 bp, SARS Virus
ccaaaacgctctagtcgtaggtata

SEQ ID NO: 180747 - DNA, 25 bp, SARS Virus
caaaacgctctaatcgtaggtatac

SEQ ID NO: 180748 - DNA, 25 bp, SARS Virus
aaaacgctctagacgtaggtatacc

SEQ ID NO: 180749 - DNA, 25 bp, SARS Virus
aaacgctctagtagtaggtataccc

SEQ ID NO: 180750 - DNA, 25 bp, SARS Virus
aacgctctagtcataggtataccct

SEQ ID NO: 180751 - DNA, 25 bp, SARS Virus
acgctctagtcgaaggtataccctg

SEQ ID NO: 180752 - DNA, 25 bp, SARS Virus
cgctctagtcgtaggtataccctga

SEQ ID NO: 180753 - DNA, 25 bp, SARS Virus
gctctagtcgtaagtataccctgag

SEQ ID NO: 180754 - DNA, 25 bp, SARS Virus
ctctagtcgtagatataccctgagt

SEQ ID NO: 180755 - DNA, 25 bp, SARS Virus
tctagtcgtaggaataccctgagtc

SEQ ID NO: 180756 - DNA, 25 bp, SARS Virus
ctagtcgtaggtataccctgagtcg

SEQ ID NO: 180757 - DNA, 25 bp, SARS Virus
tagtcgtaggtaaaccctgagtcgt

SEQ ID NO: 180758 - DNA, 25 bp, SARS Virus
agtcgtaggtataccctgagtcgtc

SEQ ID NO: 180759 - DNA, 25 bp, SARS Virus
gtcgtaggtataacctgagtcgtcg

SEQ ID NO: 180760 - DNA, 25 bp, SARS Virus
tcgtaggtatacactgagtcgtcgg

SEQ ID NO: 180761 - DNA, 25 bp, SARS Virus
cgtaggtataccatgagtcgtcggt

SEQ ID NO: 180762 - DNA, 25 bp, SARS Virus
gtaggtatacccagagtcgtcggtt

SEQ ID NO: 180763 - DNA, 25 bp, SARS Virus
taggtataccctaagtcgtcggtta

SEQ ID NO: 180764 - DNA, 25 bp, SARS Virus
aggtataccctgagtcgtcggttac

SEQ ID NO: 180765 - DNA, 25 bp, SARS Virus
ggtataccctgaatcgtcggttacg

SEQ ID NO: 180766 - DNA, 25 bp, SARS Virus
gtataccctgagacgtcggttacgg

SEQ ID NO: 180767 - DNA, 25 bp, SARS Virus
tataccctgagtagtcggttacggg

SEQ ID NO: 180768 - DNA, 25 bp, SARS Virus
ataccctgagtcatcggttacggga

SEQ ID NO: 180769 - DNA, 25 bp, SARS Virus
taccctgagtcgacggttacgggat

SEQ ID NO: 180770 - DNA, 25 bp, SARS Virus
accctgagtcgtaggttacgggatc

SEQ ID NO: 180771 - DNA, 25 bp, SARS Virus
ccctgagtcgtcagttacgggatca

SEQ ID NO: 180772 - DNA, 25 bp, SARS Virus
cctgagtcgtcgattacgggatcag

SEQ ID NO: 180773 - DNA, 25 bp, SARS Virus
ctgagtcgtcggatacgggatcagt

SEQ ID NO: 180774 - DNA, 25 bp, SARS Virus
tgagtcgtcggtaacgggatcagtt

SEQ ID NO: 180775 - DNA, 25 bp, SARS Virus
gagtcgtcggttacgggatcagttt

SEQ ID NO: 180776 - DNA, 25 bp, SARS Virus
agtcgtcggttaagggatcagtttc

SEQ ID NO: 180777 - DNA, 25 bp, SARS Virus
gtcgtcggttacaggatcagtttca

SEQ ID NO: 180778 - DNA, 25 bp, SARS Virus
tcgtcggttacgagatcagtttcac

SEQ ID NO: 180779 - DNA, 25 bp, SARS Virus
cgtcggttacggaatcagtttcact

SEQ ID NO: 180780 - DNA, 25 bp, SARS Virus
gtcggttacgggatcagtttcactc

SEQ ID NO: 180781 - DNA, 25 bp, SARS Virus
tcggttacgggaacagtttcactcc

SEQ ID NO: 180782 - DNA, 25 bp, SARS Virus
cggttacgggataagtttcactcct

SEQ ID NO: 180783 - DNA, 25 bp, SARS Virus
ggttacgggatcagtttcactccta

SEQ ID NO: 180784 - DNA, 25 bp, SARS Virus
gttacgggatcaatttcactcctac

SEQ ID NO: 180785 - DNA, 25 bp, SARS Virus
ttacgggatcagattcactcctacc

SEQ ID NO: 180786 - DNA, 25 bp, SARS Virus
tacgggatcagtatcactcctaccc

SEQ ID NO: 180787 - DNA, 25 bp, SARS Virus
acgggatcagttacactcctacccg

SEQ ID NO: 180788 - DNA, 25 bp, SARS Virus
cgggatcagtttaactcctacccgt

SEQ ID NO: 180789 - DNA, 25 bp, SARS Virus
gggatcagtttcactcctacccgta

SEQ ID NO: 180790 - DNA, 25 bp, SARS Virus
ggatcagtttcaatcctacccgtag

SEQ ID NO: 180791 - DNA, 25 bp, SARS Virus
gatcagtttcacacctacccgtagt

SEQ ID NO: 180792 - DNA, 25 bp, SARS Virus
atcagtttcactactacccgtagtc

SEQ ID NO: 180793 - DNA, 25 bp, SARS Virus
tcagtttcactcatacccgtagtcg

SEQ ID NO: 180794 - DNA, 25 bp, SARS Virus
cagtttcactccaacccgtagtcgt

SEQ ID NO: 180795 - DNA, 25 bp, SARS Virus
agtttcactcctacccgtagtcgtt

SEQ ID NO: 180796 - DNA, 25 bp, SARS Virus
gtttcactcctaaccgtagtcgtta

SEQ ID NO: 180797 - DNA, 25 bp, SARS Virus
tttcactcctacacgtagtcgttac

SEQ ID NO: 180798 - DNA, 25 bp, SARS Virus
ttcactcctaccagtagtcgttact

SEQ ID NO: 180799 - DNA, 25 bp, SARS Virus
tcactcctacccatagtcgttactc

SEQ ID NO: 180800 - DNA, 25 bp, SARS Virus
cactcctacccgaagtcgttactca

SEQ ID NO: 180801 - DNA, 25 bp, SARS Virus
actcctacccgtagtcgttactcat

SEQ ID NO: 180802 - DNA, 25 bp, SARS Virus
ctcctacccgtaatcgttactcatt

SEQ ID NO: 180803 - DNA, 25 bp, SARS Virus
tcctacccgtagacgttactcatta

SEQ ID NO: 180804 - DNA, 25 bp, SARS Virus
cctacccgtagtagttactcattat

SEQ ID NO: 180805 - DNA, 25 bp, SARS Virus
ctacccgtagtcattactcattata

SEQ ID NO: 180806 - DNA, 25 bp, SARS Virus
tacccgtagtcgatactcattatac

SEQ ID NO: 180807 - DNA, 25 bp, SARS Virus
acccgtagtcgtaactcattatact

SEQ ID NO: 180808 - DNA, 25 bp, SARS Virus
cccgtagtcgttactcattatactt

SEQ ID NO: 180809 - DNA, 25 bp, SARS Virus
ccgtagtcgttaatcattatactta

SEQ ID NO: 180810 - DNA, 25 bp, SARS Virus
cgtagtcgttacacattatacttag

SEQ ID NO: 180811 - DNA, 25 bp, SARS Virus
gtagtcgttactaattatacttagg

SEQ ID NO: 180812 - DNA, 25 bp, SARS Virus
tagtcgttactcattatacttaggt

SEQ ID NO: 180813 - DNA, 25 bp, SARS Virus
agtcgttactcaatatacttaggtg

SEQ ID NO: 180814 - DNA, 25 bp, SARS Virus
gtcgttactcataatacttaggtgt

SEQ ID NO: 180815 - DNA, 25 bp, SARS Virus
tcgttactcattatacttaggtgtt

SEQ ID NO: 180816 - DNA, 25 bp, SARS Virus
cgttactcattaaacttaggtgtta

SEQ ID NO: 180817 - DNA, 25 bp, SARS Virus
gttactcattatacttaggtgttat

SEQ ID NO: 180818 - DNA, 25 bp, SARS Virus
ttactcattataattaggtgttatc

SEQ ID NO: 180819 - DNA, 25 bp, SARS Virus
tactcattatacataggtgttatcc

SEQ ID NO: 180820 - DNA, 25 bp, SARS Virus
actcattatactaaggtgttatcct

SEQ ID NO: 180821 - DNA, 25 bp, SARS Virus
ctcattatacttaggtgttatcctt

SEQ ID NO: 180822 - DNA, 25 bp, SARS Virus
tcattatacttaagtgttatccttg

SEQ ID NO: 180823 - DNA, 25 bp, SARS Virus
cattatacttagatgttatccttga

SEQ ID NO: 180824 - DNA, 25 bp, SARS Virus
attatacttaggagttatccttgag

SEQ ID NO: 180825 - DNA, 25 bp, SARS Virus
ttatacttaggtattatccttgagg

SEQ ID NO: 180826 - DNA, 25 bp, SARS Virus
tatacttaggtgatatccttgaggc

SEQ ID NO: 180827 - DNA, 25 bp, SARS Virus
atacttaggtgtaatccttgaggcg

SEQ ID NO: 180828 - DNA, 25 bp, SARS Virus
tacttaggtgttatccttgaggcgt

SEQ ID NO: 180829 - DNA, 25 bp, SARS Virus
acttaggtgttaaccttgaggcgtc

SEQ ID NO: 180830 - DNA, 25 bp, SARS Virus
cttaggtgttatacttgaggcgtcg

SEQ ID NO: 180831 - DNA, 25 bp, SARS Virus
ttaggtgttatcattgaggcgtcgg

SEQ ID NO: 180832 - DNA, 25 bp, SARS Virus
taggtgttatccatgaggcgtcgga

SEQ ID NO: 180833 - DNA, 25 bp, SARS Virus
aggtgttatcctagaggcgtcggac

SEQ ID NO: 180834 - DNA, 25 bp, SARS Virus
ggtgttatccttaaggcgtcggacc

SEQ ID NO: 180835 - DNA, 25 bp, SARS Virus
gtgttatccttgaggcgtcggacca

SEQ ID NO: 180836 - DNA, 25 bp, SARS Virus
tgttatccttgaagcgtcggaccac

SEQ ID NO: 180837 - DNA, 25 bp, SARS Virus
gttatccttgagacgtcggaccacg

SEQ ID NO: 180838 - DNA, 25 bp, SARS Virus
ttatccttgaggagtcggaccacga

SEQ ID NO: 180839 - DNA, 25 bp, SARS Virus
tatccttgaggcatcggaccacgat

SEQ ID NO: 180840 - DNA, 25 bp, SARS Virus
atccttgaggcgacggaccacgatg

SEQ ID NO: 180841 - DNA, 25 bp, SARS Virus
tccttgaggcgtaggaccacgatga

SEQ ID NO: 180842 - DNA, 25 bp, SARS Virus
ccttgaggcgtcagaccacgatgaa

SEQ ID NO: 180843 - DNA, 25 bp, SARS Virus
cttgaggcgtcgaaccacgatgaac

SEQ ID NO: 180844 - DNA, 25 bp, SARS Virus
ttgaggcgtcggaccacgatgaaca

SEQ ID NO: 180845 - DNA, 25 bp, SARS Virus
tgaggcgtcggaacacgatgaacat

SEQ ID NO: 180846 - DNA, 25 bp, SARS Virus
gaggcgtcggacaacgatgaacatg

SEQ ID NO: 180847 - DNA, 25 bp, SARS Virus
aggcgtcggaccacgatgaacatgc

SEQ ID NO: 180848 - DNA, 25 bp, SARS Virus
ggcgtcggaccaagatgaacatgct

SEQ ID NO: 180849 - DNA, 25 bp, SARS Virus
gcgtcggaccacaatgaacatgctt

SEQ ID NO: 180850 - DNA, 25 bp, SARS Virus
cgtcggaccacgatgaacatgcttt

SEQ ID NO: 180851 - DNA, 25 bp, SARS Virus
gtcggaccacgaagaacatgcttta

SEQ ID NO: 180852 - DNA, 25 bp, SARS Virus
tcggaccacgataaacatgctttag

SEQ ID NO: 180853 - DNA, 25 bp, SARS Virus
cggaccacgatgaacatgctttagt

SEQ ID NO: 180854 - DNA, 25 bp, SARS Virus
ggaccacgatgaacatgctttagtg

SEQ ID NO: 180855 - DNA, 25 bp, SARS Virus
gaccacgatgaaaatgctttagtgg

SEQ ID NO: 180856 - DNA, 25 bp, SARS Virus
accacgatgaacatgctttagtggc

SEQ ID NO: 180857 - DNA, 25 bp, SARS Virus
ccacgatgaacaagctttagtggct

SEQ ID NO: 180858 - DNA, 25 bp, SARS Virus
cacgatgaacatactttagtggctt

SEQ ID NO: 180859 - DNA, 25 bp, SARS Virus
acgatgaacatgatttagtggcttt

SEQ ID NO: 180860 - DNA, 25 bp, SARS Virus
cgatgaacatgcattagtggcttta

SEQ ID NO: 180861 - DNA, 25 bp, SARS Virus
gatgaacatgctatagtggctttag

SEQ ID NO: 180862 - DNA, 25 bp, SARS Virus
atgaacatgcttaagtggctttagc

SEQ ID NO: 180863 - DNA, 25 bp, SARS Virus
tgaacatgctttagtggctttagca

SEQ ID NO: 180864 - DNA, 25 bp, SARS Virus
gaacatgctttaatggctttagcat

SEQ ID NO: 180865 - DNA, 25 bp, SARS Virus
aacatgctttagaggctttagcatg

SEQ ID NO: 180866 - DNA, 25 bp, SARS Virus
acatgctttagtagctttagcatgg

SEQ ID NO: 180867 - DNA, 25 bp, SARS Virus
catgctttagtgactttagcatggt

SEQ ID NO: 180868 - DNA, 25 bp, SARS Virus
atgctttagtggatttagcatggtc

SEQ ID NO: 180869 - DNA, 25 bp, SARS Virus
tgctttagtggcattagcatggtca

SEQ ID NO: 180870 - DNA, 25 bp, SARS Virus
gctttagtggctatagcatggtcaa

SEQ ID NO: 180871 - DNA, 25 bp, SARS Virus
ctttagtggcttaagcatggtcaag

SEQ ID NO: 180872 - DNA, 25 bp, SARS Virus
tttagtggctttagcatggtcaagg

SEQ ID NO: 180873 - DNA, 25 bp, SARS Virus
ttagtggctttaacatggtcaaggg

SEQ ID NO: 180874 - DNA, 25 bp, SARS Virus
tagtggctttagaatggtcaagggt

SEQ ID NO: 180875 - DNA, 25 bp, SARS Virus
agtggctttagcatggtcaagggta

SEQ ID NO: 180876 - DNA, 25 bp, SARS Virus
gtggctttagcaaggtcaagggtaa

SEQ ID NO: 180877 - DNA, 25 bp, SARS Virus
tggctttagcatagtcaagggtaat

SEQ ID NO: 180878 - DNA, 25 bp, SARS Virus
ggctttagcatgatcaagggtaatt

SEQ ID NO: 180879 - DNA, 25 bp, SARS Virus
gctttagcatggacaagggtaattc

SEQ ID NO: 180880 - DNA, 25 bp, SARS Virus
ctttagcatggtaaagggtaattct

SEQ ID NO: 180881 - DNA, 25 bp, SARS Virus
tttagcatggtcaagggtaattcta

SEQ ID NO: 180882 - DNA, 25 bp, SARS Virus
ttagcatggtcaagggtaattctag

SEQ ID NO: 180883 - DNA, 25 bp, SARS Virus
tagcatggtcaaaggtaattctagg

SEQ ID NO: 180884 - DNA, 25 bp, SARS Virus
agcatggtcaagagtaattctagga

SEQ ID NO: 180885 - DNA, 25 bp, SARS Virus
gcatggtcaaggataattctaggac

SEQ ID NO: 180886 - DNA, 25 bp, SARS Virus
catggtcaagggaaattctaggact

SEQ ID NO: 180887 - DNA, 25 bp, SARS Virus
atggtcaagggtaattctaggacta

SEQ ID NO: 180888 - DNA, 25 bp, SARS Virus
tggtcaagggtaattctaggactaa

SEQ ID NO: 180889 - DNA, 25 bp, SARS Virus
ggtcaagggtaaatctaggactaat

SEQ ID NO: 180890 - DNA, 25 bp, SARS Virus
gtcaagggtaatactaggactaata

SEQ ID NO: 180891 - DNA, 25 bp, SARS Virus
tcaagggtaattataggactaatag

SEQ ID NO: 180892 - DNA, 25 bp, SARS Virus
caagggtaattcaaggactaataga

SEQ ID NO: 180893 - DNA, 25 bp, SARS Virus
aagggtaattctaggactaatagat

SEQ ID NO: 180894 - DNA, 25 bp, SARS Virus
agggtaattctaagactaatagatt

SEQ ID NO: 180895 - DNA, 25 bp, SARS Virus
gggtaattctagaactaatagatta

SEQ ID NO: 180896 - DNA, 25 bp, SARS Virus
ggtaattctaggactaatagattac

SEQ ID NO: 180897 - DNA, 25 bp, SARS Virus
gtaattctaggaataatagattaca

SEQ ID NO: 180898 - DNA, 25 bp, SARS Virus
taattctaggacaaatagattacag

SEQ ID NO: 180899 - DNA, 25 bp, SARS Virus
aattctaggactaatagattacagt

SEQ ID NO: 180900 - DNA, 25 bp, SARS Virus
attctaggactaatagattacagtc

SEQ ID NO: 180901 - DNA, 25 bp, SARS Virus
ttctaggactaaaagattacagtca

SEQ ID NO: 180902 - DNA, 25 bp, SARS Virus
tctaggactaatagattacagtcat

SEQ ID NO: 180903 - DNA, 25 bp, SARS Virus
ctaggactaataaattacagtcatg

SEQ ID NO: 180904 - DNA, 25 bp, SARS Virus
taggactaatagattacagtcatgc

SEQ ID NO: 180905 - DNA, 25 bp, SARS Virus
aggactaatagaatacagtcatgcg

SEQ ID NO: 180906 - DNA, 25 bp, SARS Virus
ggactaatagataacagtcatgcgg

SEQ ID NO: 180907 - DNA, 25 bp, SARS Virus
gactaatagattacagtcatgcgga

SEQ ID NO: 180908 - DNA, 25 bp, SARS Virus
actaatagattaaagtcatgcggat

SEQ ID NO: 180909 - DNA, 25 bp, SARS Virus
ctaatagattacagtcatgcggatg

SEQ ID NO: 180910 - DNA, 25 bp, SARS Virus
taatagattacaatcatgcggatgt

SEQ ID NO: 180911 - DNA, 25 bp, SARS Virus
aatagattacagacatgcggatgtt

SEQ ID NO: 180912 - DNA, 25 bp, SARS Virus
atagattacagtaatgcggatgtta

SEQ ID NO: 180913 - DNA, 25 bp, SARS Virus
tagattacagtcatgcggatgttac

SEQ ID NO: 180914 - DNA, 25 bp, SARS Virus
agattacagtcaagcggatgttacg

SEQ ID NO: 180915 - DNA, 25 bp, SARS Virus
gattacagtcatacggatgttacgg

SEQ ID NO: 180916 - DNA, 25 bp, SARS Virus
attacagtcatgaggatgttacgga

SEQ ID NO: 180917 - DNA, 25 bp, SARS Virus
ttacagtcatgcagatgttacggac

SEQ ID NO: 180918 - DNA, 25 bp, SARS Virus
tacagtcatgcgaatgttacggacg

SEQ ID NO: 180919 - DNA, 25 bp, SARS Virus
acagtcatgcggatgttacggacgt

SEQ ID NO: 180920 - DNA, 25 bp, SARS Virus
cagtcatgcggaagttacggacgta

SEQ ID NO: 180921 - DNA, 25 bp, SARS Virus
agtcatgcggatattacggacgtag

SEQ ID NO: 180922 - DNA, 25 bp, SARS Virus
gtcatgcggatgatacggacgtagt

SEQ ID NO: 180923 - DNA, 25 bp, SARS Virus
tcatgcggatgtaacggacgtagtg

SEQ ID NO: 180924 - DNA, 25 bp, SARS Virus
catgcggatgttacggacgtagtgc

SEQ ID NO: 180925 - DNA, 25 bp, SARS Virus
atgcggatgttaaggacgtagtgcg

SEQ ID NO: 180926 - DNA, 25 bp, SARS Virus
tgcggatgttacagacgtagtgcgt

SEQ ID NO: 180927 - DNA, 25 bp, SARS Virus
gcggatgttacgaacgtagtgcgta

SEQ ID NO: 180928 - DNA, 25 bp, SARS Virus
cggatgttacggacgtagtgcgtat

SEQ ID NO: 180929 - DNA, 25 bp, SARS Virus
ggatgttacggaagtagtgcgtatc

SEQ ID NO: 180930 - DNA, 25 bp, SARS Virus
gatgttacggacatagtgcgtatcg

SEQ ID NO: 180931 - DNA, 25 bp, SARS Virus
atgttacggacgaagtgcgtatcgt

SEQ ID NO: 180932 - DNA, 25 bp, SARS Virus
tgttacggacgtagtgcgtatcgta

SEQ ID NO: 180933 - DNA, 25 bp, SARS Virus
gttacggacgtaatgcgtatcgtag

SEQ ID NO: 180934 - DNA, 25 bp, SARS Virus
ttacggacgtagagcgtatcgtagc

SEQ ID NO: 180935 - DNA, 25 bp, SARS Virus
tacggacgtagtacgtatcgtagcg

SEQ ID NO: 180936 - DNA, 25 bp, SARS Virus
acggacgtagtgagtatcgtagcgt

SEQ ID NO: 180937 - DNA, 25 bp, SARS Virus
cggacgtagtgcatatcgtagcgtc

SEQ ID NO: 180938 - DNA, 25 bp, SARS Virus
ggacgtagtgcgaatcgtagcgtct

SEQ ID NO: 180939 - DNA, 25 bp, SARS Virus
gacgtagtgcgtatcgtagcgtctt

SEQ ID NO: 180940 - DNA, 25 bp, SARS Virus
acgtagtgcgtaacgtagcgtctta

SEQ ID NO: 180941 - DNA, 25 bp, SARS Virus
cgtagtgcgtatagtagcgtcttaa

SEQ ID NO: 180942 - DNA, 25 bp, SARS Virus
gtagtgcgtatcatagcgtcttaac

SEQ ID NO: 180943 - DNA, 25 bp, SARS Virus
tagtgcgtatcgaagcgtcttaaca

SEQ ID NO: 180944 - DNA, 25 bp, SARS Virus
agtgcgtatcgtagcgtcttaacat

SEQ ID NO: 180945 - DNA, 25 bp, SARS Virus
gtgcgtatcgtaacgtcttaacatg

SEQ ID NO: 180946 - DNA, 25 bp, SARS Virus
tgcgtatcgtagagtcttaacatgt

SEQ ID NO: 180947 - DNA, 25 bp, SARS Virus
gcgtatcgtagcatcttaacatgtc

SEQ ID NO: 180948 - DNA, 25 bp, SARS Virus
cgtatcgtagcgacttaacatgtca

SEQ ID NO: 180949 - DNA, 25 bp, SARS Virus
gtatcgtagcgtattaacatgtcag

SEQ ID NO: 180950 - DNA, 25 bp, SARS Virus
tatcgtagcgtcataacatgtcaga

SEQ ID NO: 180951 - DNA, 25 bp, SARS Virus
atcgtagcgtctaaacatgtcagaa

SEQ ID NO: 180952 - DNA, 25 bp, SARS Virus
tcgtagcgtcttaacatgtcagaaa

SEQ ID NO: 180953 - DNA, 25 bp, SARS Virus
cgtagcgtcttaacatgtcagaaat

SEQ ID NO: 180954 - DNA, 25 bp, SARS Virus
gtagcgtcttaaaatgtcagaaatt

SEQ ID NO: 180955 - DNA, 25 bp, SARS Virus
tagcgtcttaacatgtcagaaatta

SEQ ID NO: 180956 - DNA, 25 bp, SARS Virus
agcgtcttaacaagtcagaaattat

SEQ ID NO: 180957 - DNA, 25 bp, SARS Virus
gcgtcttaacatatcagaaattatt

SEQ ID NO: 180958 - DNA, 25 bp, SARS Virus
cgtcttaacatgacagaaattatta

SEQ ID NO: 180959 - DNA, 25 bp, SARS Virus
gtcttaacatgtaagaaattattac

SEQ ID NO: 180960 - DNA, 25 bp, SARS Virus
tcttaacatgtcagaaattattact

SEQ ID NO: 180961 - DNA, 25 bp, SARS Virus
cttaacatgtcaaaaattattacta

SEQ ID NO: 180962 - DNA, 25 bp, SARS Virus
ttaacatgtcagaaattattactaa

SEQ ID NO: 180963 - DNA, 25 bp, SARS Virus
taacatgtcagaaattattactaac

SEQ ID NO: 180964 - DNA, 25 bp, SARS Virus
aacatgtcagaaattattactaacc

SEQ ID NO: 180965 - DNA, 25 bp, SARS Virus
acatgtcagaaaatattactaaccg

SEQ ID NO: 180966 - DNA, 25 bp, SARS Virus
catgtcagaaataattactaaccgc

SEQ ID NO: 180967 - DNA, 25 bp, SARS Virus
atgtcagaaattattactaaccgca

SEQ ID NO: 180968 - DNA, 25 bp, SARS Virus
tgtcagaaattaatactaaccgcat

SEQ ID NO: 180969 - DNA, 25 bp, SARS Virus
gtcagaaattataactaaccgcatg

SEQ ID NO: 180970 - DNA, 25 bp, SARS Virus
tcagaaattattactaaccgcatgt

SEQ ID NO: 180971 - DNA, 25 bp, SARS Virus
cagaaattattaataaccgcatgtg

SEQ ID NO: 180972 - DNA, 25 bp, SARS Virus
agaaattattacaaaccgcatgtgc

SEQ ID NO: 180973 - DNA, 25 bp, SARS Virus
gaaattattactaaccgcatgtgcg

SEQ ID NO: 180974 - DNA, 25 bp, SARS Virus
aaattattactaaccgcatgtgcga

SEQ ID NO: 180975 - DNA, 25 bp, SARS Virus
aattattactaaacgcatgtgcgag

SEQ ID NO: 180976 - DNA, 25 bp, SARS Virus
attattactaacagcatgtgcgagt

SEQ ID NO: 180977 - DNA, 25 bp, SARS Virus
ttattactaaccacatgtgcgagtg

SEQ ID NO: 180978 - DNA, 25 bp, SARS Virus
tattactaaccgaatgtgcgagtgg

SEQ ID NO: 180979 - DNA, 25 bp, SARS Virus
attactaaccgcatgtgcgagtgga

SEQ ID NO: 180980 - DNA, 25 bp, SARS Virus
ttactaaccgcaagtgcgagtggat

SEQ ID NO: 180981 - DNA, 25 bp, SARS Virus
tactaaccgcatatgcgagtggatt

SEQ ID NO: 180982 - DNA, 25 bp, SARS Virus
actaaccgcatgagcgagtggattc

SEQ ID NO: 180983 - DNA, 25 bp, SARS Virus
ctaaccgcatgtacgagtggattca

SEQ ID NO: 180984 - DNA, 25 bp, SARS Virus
taaccgcatgtgagagtggattcaa

SEQ ID NO: 180985 - DNA, 25 bp, SARS Virus
aaccgcatgtgcaagtggattcaat

SEQ ID NO: 180986 - DNA, 25 bp, SARS Virus
accgcatgtgcgagtggattcaatc

SEQ ID NO: 180987 - DNA, 25 bp, SARS Virus
ccgcatgtgcgaatggattcaatcg

SEQ ID NO: 180988 - DNA, 25 bp, SARS Virus
cgcatgtgcgagaggattcaatcgt

SEQ ID NO: 180989 - DNA, 25 bp, SARS Virus
gcatgtgcgagtagattcaatcgta

SEQ ID NO: 180990 - DNA, 25 bp, SARS Virus
catgtgcgagtgaattcaatcgtat

SEQ ID NO: 180991 - DNA, 25 bp, SARS Virus
atgtgcgagtggattcaatcgtata

SEQ ID NO: 180992 - DNA, 25 bp, SARS Virus
tgtgcgagtggaatcaatcgtatat

SEQ ID NO: 180993 - DNA, 25 bp, SARS Virus
gtgcgagtggatacaatcgtatatg

SEQ ID NO: 180994 - DNA, 25 bp, SARS Virus
tgcgagtggattaaatcgtatatgc

SEQ ID NO: 180995 - DNA, 25 bp, SARS Virus
gcgagtggattcaatcgtatatgcg

SEQ ID NO: 180996 - DNA, 25 bp, SARS Virus
cgagtggattcaatcgtatatgcgc

SEQ ID NO: 180997 - DNA, 25 bp, SARS Virus
gagtggattcaaacgtatatgcgca

SEQ ID NO: 180998 - DNA, 25 bp, SARS Virus
agtggattcaatagtatatgcgcat

SEQ ID NO: 180999 - DNA, 25 bp, SARS Virus
gtggattcaatcatatatgcgcatt

SEQ ID NO: 181000 - DNA, 25 bp, SARS Virus
tggattcaatcgaatatgcgcattc

SEQ ID NO: 181001 - DNA, 25 bp, SARS Virus
ggattcaatcgtatatgcgcattct

SEQ ID NO: 181002 - DNA, 25 bp, SARS Virus
gattcaatcgtaaatgcgcattcta

SEQ ID NO: 181003 - DNA, 25 bp, SARS Virus
attcaatcgtatatgcgcattctac

SEQ ID NO: 181004 - DNA, 25 bp, SARS Virus
ttcaatcgtataagcgcattctaca

SEQ ID NO: 181005 - DNA, 25 bp, SARS Virus
tcaatcgtatatacgcattctacag

SEQ ID NO: 181006 - DNA, 25 bp, SARS Virus
caatcgtatatgagcattctacagt

SEQ ID NO: 181007 - DNA, 25 bp, SARS Virus
aatcgtatatgcacattctacagtc

SEQ ID NO: 181008 - DNA, 25 bp, SARS Virus
atcgtatatgcgaattctacagtcc

SEQ ID NO: 181009 - DNA, 25 bp, SARS Virus
tcgtatatgcgcattctacagtcct

SEQ ID NO: 181010 - DNA, 25 bp, SARS Virus
cgtatatgcgcaatctacagtccta

SEQ ID NO: 181011 - DNA, 25 bp, SARS Virus
gtatatgcgcatactacagtcctaa

SEQ ID NO: 181012 - DNA, 25 bp, SARS Virus
tatatgcgcattatacagtcctaag

SEQ ID NO: 181013 - DNA, 25 bp, SARS Virus
atatgcgcattcaacagtcctaaga

SEQ ID NO: 181014 - DNA, 25 bp, SARS Virus
tatgcgcattctacagtcctaagag

SEQ ID NO: 181015 - DNA, 25 bp, SARS Virus
atgcgcattctaaagtcctaagaga

SEQ ID NO: 181016 - DNA, 25 bp, SARS Virus
tgcgcattctacagtcctaagagat

SEQ ID NO: 181017 - DNA, 25 bp, SARS Virus
gcgcattctacaatcctaagagatg

SEQ ID NO: 181018 - DNA, 25 bp, SARS Virus
cgcattctacagacctaagagatgc

SEQ ID NO: 181019 - DNA, 25 bp, SARS Virus
gcattctacagtactaagagatgct

SEQ ID NO: 181020 - DNA, 25 bp, SARS Virus
cattctacagtcataagagatgctt

SEQ ID NO: 181021 - DNA, 25 bp, SARS Virus
attctacagtccaaagagatgcttc

SEQ ID NO: 181022 - DNA, 25 bp, SARS Virus
ttctacagtcctaagagatgcttca

SEQ ID NO: 181023 - DNA, 25 bp, SARS Virus
tctacagtcctaagagatgcttcag

SEQ ID NO: 181024 - DNA, 25 bp, SARS Virus
ctacagtcctaaaagatgcttcagt

SEQ ID NO: 181025 - DNA, 25 bp, SARS Virus
tacagtcctaagagatgcttcagta

SEQ ID NO: 181026 - DNA, 25 bp, SARS Virus
acagtcctaagaaatgcttcagtat

SEQ ID NO: 181027 - DNA, 25 bp, SARS Virus
cagtcctaagagatgcttcagtatg

SEQ ID NO: 181028 - DNA, 25 bp, SARS Virus
agtcctaagagaagcttcagtatgg

SEQ ID NO: 181029 - DNA, 25 bp, SARS Virus
gtcctaagagatacttcagtatggt

SEQ ID NO: 181030 - DNA, 25 bp, SARS Virus
tcctaagagatgattcagtatggtt

SEQ ID NO: 181031 - DNA, 25 bp, SARS Virus
cctaagagatgcatcagtatggtta

SEQ ID NO: 181032 - DNA, 25 bp, SARS Virus
ctaagagatgctacagtatggttag

SEQ ID NO: 181033 - DNA, 25 bp, SARS Virus
taagagatgcttaagtatggttagg

SEQ ID NO: 181034 - DNA, 25 bp, SARS Virus
aagagatgcttcagtatggttagga

SEQ ID NO: 181035 - DNA, 25 bp, SARS Virus
agagatgcttcaatatggttaggaa

SEQ ID NO: 181036 - DNA, 25 bp, SARS Virus
gagatgcttcagaatggttaggaag

SEQ ID NO: 181037 - DNA, 25 bp, SARS Virus
agatgcttcagtatggttaggaaga

SEQ ID NO: 181038 - DNA, 25 bp, SARS Virus
gatgcttcagtaaggttaggaagaa

SEQ ID NO: 181039 - DNA, 25 bp, SARS Virus
atgcttcagtatagttaggaagaat

SEQ ID NO: 181040 - DNA, 25 bp, SARS Virus
tgcttcagtatgattaggaagaata

SEQ ID NO: 181041 - DNA, 25 bp, SARS Virus
gcttcagtatggataggaagaataa

SEQ ID NO: 181042 - DNA, 25 bp, SARS Virus
cttcagtatggtaaggaagaataac

SEQ ID NO: 181043 - DNA, 25 bp, SARS Virus
ttcagtatggttaggaagaataact

SEQ ID NO: 181044 - DNA, 25 bp, SARS Virus
tcagtatggttaagaagaataactt

SEQ ID NO: 181045 - DNA, 25 bp, SARS Virus
cagtatggttagaaagaataacttt

SEQ ID NO: 181046 - DNA, 25 bp, SARS Virus
agtatggttaggaagaataacttta

SEQ ID NO: 181047 - DNA, 25 bp, SARS Virus
gtatggttaggaagaataactttat

SEQ ID NO: 181048 - DNA, 25 bp, SARS Virus
tatggttaggaaaaataactttatt

SEQ ID NO: 181049 - DNA, 25 bp, SARS Virus
atggttaggaagaataactttatta

SEQ ID NO: 181050 - DNA, 25 bp, SARS Virus
tggttaggaagaataactttattag

SEQ ID NO: 181051 - DNA, 25 bp, SARS Virus
ggttaggaagaaaaactttattagt

SEQ ID NO: 181052 - DNA, 25 bp, SARS Virus
gttaggaagaataactttattagta

SEQ ID NO: 181053 - DNA, 25 bp, SARS Virus
ttaggaagaataactttattagtag

SEQ ID NO: 181054 - DNA, 25 bp, SARS Virus
taggaagaataaatttattagtagt

SEQ ID NO: 181055 - DNA, 25 bp, SARS Virus
aggaagaataacattattagtagta

SEQ ID NO: 181056 - DNA, 25 bp, SARS Virus
ggaagaataactatattagtagtag

SEQ ID NO: 181057 - DNA, 25 bp, SARS Virus
gaagaataacttaattagtagtagt

SEQ ID NO: 181058 - DNA, 25 bp, SARS Virus
aagaataactttattagtagtagtg

SEQ ID NO: 181059 - DNA, 25 bp, SARS Virus
agaataactttaatagtagtagtgt

SEQ ID NO: 181060 - DNA, 25 bp, SARS Virus
gaataactttataagtagtagtgtc

SEQ ID NO: 181061 - DNA, 25 bp, SARS Virus
aataactttattagtagtagtgtcg

SEQ ID NO: 181062 - DNA, 25 bp, SARS Virus
ataactttattaatagtagtgtcgt

SEQ ID NO: 181063 - DNA, 25 bp, SARS Virus
taactttattagaagtagtgtcgtt

SEQ ID NO: 181064 - DNA, 25 bp, SARS Virus
aactttattagtagtagtgtcgtta

SEQ ID NO: 181065 - DNA, 25 bp, SARS Virus
actttattagtaatagtgtcgttaa

SEQ ID NO: 181066 - DNA, 25 bp, SARS Virus
ctttattagtagaagtgtcgttaac

SEQ ID NO: 181067 - DNA, 25 bp, SARS Virus
tttattagtagtagtgtcgttaaca

SEQ ID NO: 181068 - DNA, 25 bp, SARS Virus
ttattagtagtaatgtcgttaacat

SEQ ID NO: 181069 - DNA, 25 bp, SARS Virus
tattagtagtagagtcgttaacata

SEQ ID NO: 181070 - DNA, 25 bp, SARS Virus
attagtagtagtatcgttaacatac

SEQ ID NO: 181071 - DNA, 25 bp, SARS Virus
ttagtagtagtgacgttaacataca

SEQ ID NO: 181072 - DNA, 25 bp, SARS Virus
tagtagtagtgtagttaacatacac

SEQ ID NO: 181073 - DNA, 25 bp, SARS Virus
agtagtagtgtcattaacatacact

SEQ ID NO: 181074 - DNA, 25 bp, SARS Virus
gtagtagtgtcgataacatacactg

SEQ ID NO: 181075 - DNA, 25 bp, SARS Virus
tagtagtgtcgtaaacatacactgc

SEQ ID NO: 181076 - DNA, 25 bp, SARS Virus
agtagtgtcgttaacatacactgct

SEQ ID NO: 181077 - DNA, 25 bp, SARS Virus
gtagtgtcgttaacatacactgctc

SEQ ID NO: 181078 - DNA, 25 bp, SARS Virus
tagtgtcgttaaaatacactgctca

SEQ ID NO: 181079 - DNA, 25 bp, SARS Virus
agtgtcgttaacatacactgctcat

SEQ ID NO: 181080 - DNA, 25 bp, SARS Virus
gtgtcgttaacaaacactgctcata

SEQ ID NO: 181081 - DNA, 25 bp, SARS Virus
tgtaatttcaaacgtgttacttcct

SEQ ID NO: 181082 - DNA, 25 bp, SARS Virus
gtaatttcaaacctgttacttccta

SEQ ID NO: 181083 - DNA, 25 bp, SARS Virus
taatttcaaacgcgttacttcctat

SEQ ID NO: 181084 - DNA, 25 bp, SARS Virus
aatttcaaacgtcttacttcctatg

SEQ ID NO: 181085 - DNA, 25 bp, SARS Virus
atttcaaacgtgctacttcctatgt

SEQ ID NO: 181086 - DNA, 25 bp, SARS Virus
tttcaaacgtgtcacttcctatgtg

SEQ ID NO: 181087 - DNA, 25 bp, SARS Virus
ttcaaacgtgttccttcctatgtgg

SEQ ID NO: 181088 - DNA, 25 bp, SARS Virus
tcaaacgtgttacttcctatgtgga

SEQ ID NO: 181089 - DNA, 25 bp, SARS Virus
caaacgtgttacctcctatgtggat

SEQ ID NO: 181090 - DNA, 25 bp, SARS Virus
aaacgtgttactccctatgtggata

SEQ ID NO: 181091 - DNA, 25 bp, SARS Virus
aacgtgttacttcctatgtggatag

SEQ ID NO: 181092 - DNA, 25 bp, SARS Virus
acgtgttacttcctatgtggatagt

SEQ ID NO: 181093 - DNA, 25 bp, SARS Virus
cgtgttacttcccatgtggatagta

SEQ ID NO: 181094 - DNA, 25 bp, SARS Virus
gtgttacttcctctgtggatagtag

SEQ ID NO: 181095 - DNA, 25 bp, SARS Virus
tgttacttcctacgtggatagtagg

SEQ ID NO: 181096 - DNA, 25 bp, SARS Virus
gttacttcctatctggatagtaggt

SEQ ID NO: 181097 - DNA, 25 bp, SARS Virus
ttacttcctatgcggatagtaggtt

SEQ ID NO: 181098 - DNA, 25 bp, SARS Virus
tacttcctatgtcgatagtaggttt

SEQ ID NO: 181099 - DNA, 25 bp, SARS Virus
acttcctatgtgcatagtaggtttg

SEQ ID NO: 181100 - DNA, 25 bp, SARS Virus
cttcctatgtggctagtaggtttgt

SEQ ID NO: 181101 - DNA, 25 bp, SARS Virus
ttcctatgtggacagtaggtttgtc

SEQ ID NO: 181102 - DNA, 25 bp, SARS Virus
tcctatgtggatcgtaggtttgtca

SEQ ID NO: 181103 - DNA, 25 bp, SARS Virus
cctatgtggatactaggtttgtcaa

SEQ ID NO: 181104 - DNA, 25 bp, SARS Virus
ctatgtggatagcaggtttgtcaat

SEQ ID NO: 181105 - DNA, 25 bp, SARS Virus
tatgtggatagtcggtttgtcaatt

SEQ ID NO: 181106 - DNA, 25 bp, SARS Virus
atgtggatagtacgtttgtcaatta

SEQ ID NO: 181107 - DNA, 25 bp, SARS Virus
tgtggatagtagctttgtcaattat

SEQ ID NO: 181108 - DNA, 25 bp, SARS Virus
gtggatagtaggcttgtcaattatg

SEQ ID NO: 181109 - DNA, 25 bp, SARS Virus
tggatagtaggtctgtcaattatgt

SEQ ID NO: 181110 - DNA, 25 bp, SARS Virus
ggatagtaggttcgtcaattatgtt

SEQ ID NO: 181111 - DNA, 25 bp, SARS Virus
gatagtaggtttctcaattatgtta

SEQ ID NO: 181112 - DNA, 25 bp, SARS Virus
atagtaggtttgccaattatgttaa

SEQ ID NO: 181113 - DNA, 25 bp, SARS Virus
tagtaggtttgtcaattatgttaac

SEQ ID NO: 181114 - DNA, 25 bp, SARS Virus
agtaggtttgtccattatgttaacc

SEQ ID NO: 181115 - DNA, 25 bp, SARS Virus
gtaggtttgtcacttatgttaaccc

SEQ ID NO: 181116 - DNA, 25 bp, SARS Virus
taggtttgtcaactatgttaaccct

SEQ ID NO: 181117 - DNA, 25 bp, SARS Virus
aggtttgtcaatcatgttaacccta

SEQ ID NO: 181118 - DNA, 25 bp, SARS Virus
ggtttgtcaattctgttaaccctac

SEQ ID NO: 181119 - DNA, 25 bp, SARS Virus
gtttgtcaattacgttaaccctacc

SEQ ID NO: 181120 - DNA, 25 bp, SARS Virus
tttgtcaattatcttaaccctacca

SEQ ID NO: 181121 - DNA, 25 bp, SARS Virus
ttgtcaattatgctaaccctaccat

SEQ ID NO: 181122 - DNA, 25 bp, SARS Virus
tgtcaattatgtcaaccctaccata

SEQ ID NO: 181123 - DNA, 25 bp, SARS Virus
gtcaattatgttcaccctaccatac

SEQ ID NO: 181124 - DNA, 25 bp, SARS Virus
tcaattatgttacccctaccataca

SEQ ID NO: 181125 - DNA, 25 bp, SARS Virus
caattatgttaaccctaccatacag

SEQ ID NO: 181126 - DNA, 25 bp, SARS Virus
aattatgttaaccctaccatacaga

SEQ ID NO: 181127 - DNA, 25 bp, SARS Virus
attatgttaaccctaccatacagac

SEQ ID NO: 181128 - DNA, 25 bp, SARS Virus
ttatgttaaccccaccatacagacc

SEQ ID NO: 181129 - DNA, 25 bp, SARS Virus
tatgttaaccctcccatacagacca

SEQ ID NO: 181130 - DNA, 25 bp, SARS Virus
atgttaaccctaccatacagaccag

SEQ ID NO: 181131 - DNA, 25 bp, SARS Virus
tgttaaccctaccatacagaccagg

SEQ ID NO: 181132 - DNA, 25 bp, SARS Virus
gttaaccctaccctacagaccaggg

SEQ ID NO: 181133 - DNA, 25 bp, SARS Virus
ttaaccctaccacacagaccagggt

SEQ ID NO: 181134 - DNA, 25 bp, SARS Virus
taaccctaccatccagaccagggtt

SEQ ID NO: 181135 - DNA, 25 bp, SARS Virus
aaccctaccatacagaccagggtta

SEQ ID NO: 181136 - DNA, 25 bp, SARS Virus
accctaccataccgaccagggttat

SEQ ID NO: 181137 - DNA, 25 bp, SARS Virus
ccctaccatacacaccagggttata

SEQ ID NO: 181138 - DNA, 25 bp, SARS Virus
cctaccatacagcccagggttataa

SEQ ID NO: 181139 - DNA, 25 bp, SARS Virus
ctaccatacagaccagggttataaa

SEQ ID NO: 181140 - DNA, 25 bp, SARS Virus
taccatacagaccagggttataaat

SEQ ID NO: 181141 - DNA, 25 bp, SARS Virus
accatacagacccgggttataaatt

SEQ ID NO: 181142 - DNA, 25 bp, SARS Virus
ccatacagaccacggttataaattt

SEQ ID NO: 181143 - DNA, 25 bp, SARS Virus
catacagaccagcgttataaatttt

SEQ ID NO: 181144 - DNA, 25 bp, SARS Virus
atacagaccaggcttataaatttta

SEQ ID NO: 181145 - DNA, 25 bp, SARS Virus
tacagaccagggctataaattttat

SEQ ID NO: 181146 - DNA, 25 bp, SARS Virus
acagaccagggtcataaattttatt

SEQ ID NO: 181147 - DNA, 25 bp, SARS Virus
cagaccagggttctaaattttattg

SEQ ID NO: 181148 - DNA, 25 bp, SARS Virus
agaccagggttacaaattttattgc

SEQ ID NO: 181149 - DNA, 25 bp, SARS Virus
gaccagggttatcaattttattgcc

SEQ ID NO: 181150 - DNA, 25 bp, SARS Virus
accagggttatacattttattgcca

SEQ ID NO: 181151 - DNA, 25 bp, SARS Virus
ccagggttataacttttattgccag

SEQ ID NO: 181152 - DNA, 25 bp, SARS Virus
cagggttataaactttattgccagc

SEQ ID NO: 181153 - DNA, 25 bp, SARS Virus
agggttataaatcttattgccagct

SEQ ID NO: 181154 - DNA, 25 bp, SARS Virus
gggttataaattctattgccagctt

SEQ ID NO: 181155 - DNA, 25 bp, SARS Virus
ggttataaatttcattgccagcttc

SEQ ID NO: 181156 - DNA, 25 bp, SARS Virus
gttataaattttcttgccagcttct

SEQ ID NO: 181157 - DNA, 25 bp, SARS Virus
ttataaattttactgccagcttctc

SEQ ID NO: 181158 - DNA, 25 bp, SARS Virus
tataaattttatcgccagcttctct

SEQ ID NO: 181159 - DNA, 25 bp, SARS Virus
ataaattttattcccagcttctctg

SEQ ID NO: 181160 - DNA, 25 bp, SARS Virus
taaattttattgccagcttctctgt

SEQ ID NO: 181161 - DNA, 25 bp, SARS Virus
aaattttattgccagcttctctgtt

SEQ ID NO: 181162 - DNA, 25 bp, SARS Virus
aattttattgcccgcttctctgttt

SEQ ID NO: 181163 - DNA, 25 bp, SARS Virus
attttattgccaccttctctgtttc

SEQ ID NO: 181164 - DNA, 25 bp, SARS Virus
ttttattgccagcttctctgtttca

SEQ ID NO: 181165 - DNA, 25 bp, SARS Virus
tttattgccagcctctctgtttcag

SEQ ID NO: 181166 - DNA, 25 bp, SARS Virus
ttattgccagctcctctgtttcaga

SEQ ID NO: 181167 - DNA, 25 bp, SARS Virus
tattgccagcttctctgtttcagag

SEQ ID NO: 181168 - DNA, 25 bp, SARS Virus
attgccagcttccctgtttcagaga

SEQ ID NO: 181169 - DNA, 25 bp, SARS Virus
ttgccagcttctctgtttcagagag

SEQ ID NO: 181170 - DNA, 25 bp, SARS Virus
tgccagcttctccgtttcagagaga

SEQ ID NO: 181171 - DNA, 25 bp, SARS Virus
gccagcttctctctttcagagagaa

SEQ ID NO: 181172 - DNA, 25 bp, SARS Virus
ccagcttctctgcttcagagagaag

SEQ ID NO: 181173 - DNA, 25 bp, SARS Virus
cagcttctctgtctcagagagaagg

SEQ ID NO: 181174 - DNA, 25 bp, SARS Virus
agcttctctgttccagagagaaggc

SEQ ID NO: 181175 - DNA, 25 bp, SARS Virus
gcttctctgtttcagagagaaggca

SEQ ID NO: 181176 - DNA, 25 bp, SARS Virus
cttctctgtttccgagagaaggcat

SEQ ID NO: 181177 - DNA, 25 bp, SARS Virus
ttctctgtttcacagagaaggcatt

SEQ ID NO: 181178 - DNA, 25 bp, SARS Virus
tctctgtttcagcgagaaggcattt

SEQ ID NO: 181179 - DNA, 25 bp, SARS Virus
ctctgtttcagacagaaggcatttt

SEQ ID NO: 181180 - DNA, 25 bp, SARS Virus
tctgtttcagagcgaaggcatttta

SEQ ID NO: 181181 - DNA, 25 bp, SARS Virus
ctgtttcagagacaaggcattttag

SEQ ID NO: 181182 - DNA, 25 bp, SARS Virus
tgtttcagagagcaggcattttagt

SEQ ID NO: 181183 - DNA, 25 bp, SARS Virus
gtttcagagagacggcattttagta

SEQ ID NO: 181184 - DNA, 25 bp, SARS Virus
tttcagagagaacgcattttagtat

SEQ ID NO: 181185 - DNA, 25 bp, SARS Virus
ttcagagagaagccattttagtata

SEQ ID NO: 181186 - DNA, 25 bp, SARS Virus
tcagagagaaggcattttagtataa

SEQ ID NO: 181187 - DNA, 25 bp, SARS Virus
cagagagaaggccttttagtataaa

SEQ ID NO: 181188 - DNA, 25 bp, SARS Virus
agagagaaggcactttagtataaag

SEQ ID NO: 181189 - DNA, 25 bp, SARS Virus
gagagaaggcatcttagtataaagt

SEQ ID NO: 181190 - DNA, 25 bp, SARS Virus
agagaaggcattctagtataaagtc

SEQ ID NO: 181191 - DNA, 25 bp, SARS Virus
gagaaggcatttcagtataaagtcg

SEQ ID NO: 181192 - DNA, 25 bp, SARS Virus
agaaggcattttcgtataaagtcgt

SEQ ID NO: 181193 - DNA, 25 bp, SARS Virus
gaaggcattttactataaagtcgtt

SEQ ID NO: 181194 - DNA, 25 bp, SARS Virus
aaggcattttagcataaagtcgttt

SEQ ID NO: 181195 - DNA, 25 bp, SARS Virus
aggcattttagtctaaagtcgttta

SEQ ID NO: 181196 - DNA, 25 bp, SARS Virus
ggcattttagtacaaagtcgtttag

SEQ ID NO: 181197 - DNA, 25 bp, SARS Virus
gcattttagtatcaagtcgtttagg

SEQ ID NO: 181198 - DNA, 25 bp, SARS Virus
cattttagtatacagtcgtttaggg

SEQ ID NO: 181199 - DNA, 25 bp, SARS Virus
attttagtataacgtcgtttagggt

SEQ ID NO: 181200 - DNA, 25 bp, SARS Virus
ttttagtataaactcgtttagggtg

SEQ ID NO: 181201 - DNA, 25 bp, SARS Virus
tttagtataaagccgtttagggtga

SEQ ID NO: 181202 - DNA, 25 bp, SARS Virus
ttagtataaagtcgtttagggtgaa

SEQ ID NO: 181203 - DNA, 25 bp, SARS Virus
tagtataaagtcctttagggtgaat

SEQ ID NO: 181204 - DNA, 25 bp, SARS Virus
agtataaagtcgcttagggtgaatt

SEQ ID NO: 181205 - DNA, 25 bp, SARS Virus
gtataaagtcgtctagggtgaatta

SEQ ID NO: 181206 - DNA, 25 bp, SARS Virus
tataaagtcgttcagggtgaattat

SEQ ID NO: 181207 - DNA, 25 bp, SARS Virus
ataaagtcgtttcgggtgaattatt

SEQ ID NO: 181208 - DNA, 25 bp, SARS Virus
taaagtcgtttacggtgaattattc

SEQ ID NO: 181209 - DNA, 25 bp, SARS Virus
aaagtcgtttagcgtgaattattca

SEQ ID NO: 181210 - DNA, 25 bp, SARS Virus
aagtcgtttaggctgaattattcac

SEQ ID NO: 181211 - DNA, 25 bp, SARS Virus
agtcgtttagggcgaattattcacc

SEQ ID NO: 181212 - DNA, 25 bp, SARS Virus
gtcgtttagggtcaattattcacca

SEQ ID NO: 181213 - DNA, 25 bp, SARS Virus
tcgtttagggtgcattattcaccaa

SEQ ID NO: 181214 - DNA, 25 bp, SARS Virus
cgtttagggtgacttattcaccaaa

SEQ ID NO: 181215 - DNA, 25 bp, SARS Virus
gtttagggtgaactattcaccaaaa

SEQ ID NO: 181216 - DNA, 25 bp, SARS Virus
tttagggtgaatcattcaccaaaac

SEQ ID NO: 181217 - DNA, 25 bp, SARS Virus
ttagggtgaattcttcaccaaaacg

SEQ ID NO: 181218 - DNA, 25 bp, SARS Virus
tagggtgaattactcaccaaaacgc

SEQ ID NO: 181219 - DNA, 25 bp, SARS Virus
agggtgaattatccaccaaaacgct

SEQ ID NO: 181220 - DNA, 25 bp, SARS Virus
gggtgaattattcaccaaaacgctc

SEQ ID NO: 181221 - DNA, 25 bp, SARS Virus
ggtgaattattccccaaaacgctct

SEQ ID NO: 181222 - DNA, 25 bp, SARS Virus
gtgaattattcaccaaaacgctcta

SEQ ID NO: 181223 - DNA, 25 bp, SARS Virus
tgaattattcaccaaaacgctctag

SEQ ID NO: 181224 - DNA, 25 bp, SARS Virus
gaattattcacccaaacgctctagt

SEQ ID NO: 181225 - DNA, 25 bp, SARS Virus
aattattcaccacaacgctctagtc

SEQ ID NO: 181226 - DNA, 25 bp, SARS Virus
attattcaccaacacgctctagtcg

SEQ ID NO: 181227 - DNA, 25 bp, SARS Virus
ttattcaccaaaccgctctagtcgt

SEQ ID NO: 181228 - DNA, 25 bp, SARS Virus
tattcaccaaaacgctctagtcgta

SEQ ID NO: 181229 - DNA, 25 bp, SARS Virus
attcaccaaaaccctctagtcgtag

SEQ ID NO: 181230 - DNA, 25 bp, SARS Virus
ttcaccaaaacgctctagtcgtagg

SEQ ID NO: 181231 - DNA, 25 bp, SARS Virus
tcaccaaaacgccctagtcgtaggt

SEQ ID NO: 181232 - DNA, 25 bp, SARS Virus
caccaaaacgctctagtcgtaggta

SEQ ID NO: 181233 - DNA, 25 bp, SARS Virus
accaaaacgctccagtcgtaggtat

SEQ ID NO: 181234 - DNA, 25 bp, SARS Virus
ccaaaacgctctcgtcgtaggtata

SEQ ID NO: 181235 - DNA, 25 bp, SARS Virus
caaaacgctctactcgtaggtatac

SEQ ID NO: 181236 - DNA, 25 bp, SARS Virus
aaaacgctctagccgtaggtatacc

SEQ ID NO: 181237 - DNA, 25 bp, SARS Virus
aaacgctctagtcgtaggtataccc

SEQ ID NO: 181238 - DNA, 25 bp, SARS Virus
aacgctctagtcctaggtataccct

SEQ ID NO: 181239 - DNA, 25 bp, SARS Virus
acgctctagtcgcaggtataccctg

SEQ ID NO: 181240 - DNA, 25 bp, SARS Virus
cgctctagtcgtcggtataccctga

SEQ ID NO: 181241 - DNA, 25 bp, SARS Virus
gctctagtcgtacgtataccctgag

SEQ ID NO: 181242 - DNA, 25 bp, SARS Virus
ctctagtcgtagctataccctgagt

SEQ ID NO: 181243 - DNA, 25 bp, SARS Virus
tctagtcgtaggcataccctgagtc

SEQ ID NO: 181244 - DNA, 25 bp, SARS Virus
ctagtcgtaggtctaccctgagtcg

SEQ ID NO: 181245 - DNA, 25 bp, SARS Virus
tagtcgtaggtacaccctgagtcgt

SEQ ID NO: 181246 - DNA, 25 bp, SARS Virus
agtcgtaggtatcccctgagtcgtc

SEQ ID NO: 181247 - DNA, 25 bp, SARS Virus
gtcgtaggtataccctgagtcgtcg

SEQ ID NO: 181248 - DNA, 25 bp, SARS Virus
tcgtaggtataccctgagtcgtcgg

SEQ ID NO: 181249 - DNA, 25 bp, SARS Virus
cgtaggtataccctgagtcgtcggt

SEQ ID NO: 181250 - DNA, 25 bp, SARS Virus
gtaggtataccccgagtcgtcggtt

SEQ ID NO: 181251 - DNA, 25 bp, SARS Virus
taggtataccctcagtcgtcggtta

SEQ ID NO: 181252 - DNA, 25 bp, SARS Virus
aggtataccctgcgtcgtcggttac

SEQ ID NO: 181253 - DNA, 25 bp, SARS Virus
ggtataccctgactcgtcggttacg

SEQ ID NO: 181254 - DNA, 25 bp, SARS Virus
gtataccctgagccgtcggttacgg

SEQ ID NO: 181255 - DNA, 25 bp, SARS Virus
tataccctgagtcgtcggttacggg

SEQ ID NO: 181256 - DNA, 25 bp, SARS Virus
ataccctgagtcctcggttacggga

SEQ ID NO: 181257 - DNA, 25 bp, SARS Virus
taccctgagtcgccggttacgggat

SEQ ID NO: 181258 - DNA, 25 bp, SARS Virus
accctgagtcgtcggttacgggatc

SEQ ID NO: 181259 - DNA, 25 bp, SARS Virus
ccctgagtcgtccgttacgggatca

SEQ ID NO: 181260 - DNA, 25 bp, SARS Virus
cctgagtcgtcgcttacgggatcag

SEQ ID NO: 181261 - DNA, 25 bp, SARS Virus
ctgagtcgtcggctacgggatcagt

SEQ ID NO: 181262 - DNA, 25 bp, SARS Virus
tgagtcgtcggtcacgggatcagtt

SEQ ID NO: 181263 - DNA, 25 bp, SARS Virus
gagtcgtcggttccgggatcagttt

SEQ ID NO: 181264 - DNA, 25 bp, SARS Virus
agtcgtcggttacgggatcagtttc

SEQ ID NO: 181265 - DNA, 25 bp, SARS Virus
gtcgtcggttaccggatcagtttca

SEQ ID NO: 181266 - DNA, 25 bp, SARS Virus
tcgtcggttacgcgatcagtttcac

SEQ ID NO: 181267 - DNA, 25 bp, SARS Virus
cgtcggttacggcatcagtttcact

SEQ ID NO: 181268 - DNA, 25 bp, SARS Virus
gtcggttacgggctcagtttcactc

SEQ ID NO: 181269 - DNA, 25 bp, SARS Virus
tcggttacgggaccagtttcactcc

SEQ ID NO: 181270 - DNA, 25 bp, SARS Virus
cggttacgggatcagtttcactcct

SEQ ID NO: 181271 - DNA, 25 bp, SARS Virus
ggttacgggatccgtttcactccta

SEQ ID NO: 181272 - DNA, 25 bp, SARS Virus
gttacgggatcactttcactcctac

SEQ ID NO: 181273 - DNA, 25 bp, SARS Virus
ttacgggatcagcttcactcctacc

SEQ ID NO: 181274 - DNA, 25 bp, SARS Virus
tacgggatcagtctcactcctaccc

SEQ ID NO: 181275 - DNA, 25 bp, SARS Virus
acgggatcagttccactcctacccg

SEQ ID NO: 181276 - DNA, 25 bp, SARS Virus
cgggatcagtttcactcctacccgt

SEQ ID NO: 181277 - DNA, 25 bp, SARS Virus
gggatcagtttccctcctacccgta

SEQ ID NO: 181278 - DNA, 25 bp, SARS Virus
ggatcagtttcactcctacccgtag

SEQ ID NO: 181279 - DNA, 25 bp, SARS Virus
gatcagtttcacccctacccgtagt

SEQ ID NO: 181280 - DNA, 25 bp, SARS Virus
atcagtttcactcctacccgtagtc

SEQ ID NO: 181281 - DNA, 25 bp, SARS Virus
tcagtttcactcctacccgtagtcg

SEQ ID NO: 181282 - DNA, 25 bp, SARS Virus
cagtttcactcccacccgtagtcgt

SEQ ID NO: 181283 - DNA, 25 bp, SARS Virus
agtttcactcctccccgtagtcgtt

SEQ ID NO: 181284 - DNA, 25 bp, SARS Virus
gtttcactcctacccgtagtcgtta

SEQ ID NO: 181285 - DNA, 25 bp, SARS Virus
tttcactcctacccgtagtcgttac

SEQ ID NO: 181286 - DNA, 25 bp, SARS Virus
ttcactcctacccgtagtcgttact

SEQ ID NO: 181287 - DNA, 25 bp, SARS Virus
tcactcctacccctagtcgttactc

SEQ ID NO: 181288 - DNA, 25 bp, SARS Virus
cactcctacccgcagtcgttactca

SEQ ID NO: 181289 - DNA, 25 bp, SARS Virus
actcctacccgtcgtcgttactcat

SEQ ID NO: 181290 - DNA, 25 bp, SARS Virus
ctcctacccgtactcgttactcatt

SEQ ID NO: 181291 - DNA, 25 bp, SARS Virus
tcctacccgtagccgttactcatta

SEQ ID NO: 181292 - DNA, 25 bp, SARS Virus
cctacccgtagtcgttactcattat

SEQ ID NO: 181293 - DNA, 25 bp, SARS Virus
ctacccgtagtccttactcattata

SEQ ID NO: 181294 - DNA, 25 bp, SARS Virus
tacccgtagtcgctactcattatac

SEQ ID NO: 181295 - DNA, 25 bp, SARS Virus
acccgtagtcgtcactcattatact

SEQ ID NO: 181296 - DNA, 25 bp, SARS Virus
cccgtagtcgttcctcattatactt

SEQ ID NO: 181297 - DNA, 25 bp, SARS Virus
ccgtagtcgttactcattatactta

SEQ ID NO: 181298 - DNA, 25 bp, SARS Virus
cgtagtcgttacccattatacttag

SEQ ID NO: 181299 - DNA, 25 bp, SARS Virus
gtagtcgttactcattatacttagg

SEQ ID NO: 181300 - DNA, 25 bp, SARS Virus
tagtcgttactccttatacttaggt

SEQ ID NO: 181301 - DNA, 25 bp, SARS Virus
agtcgttactcactatacttaggtg

SEQ ID NO: 181302 - DNA, 25 bp, SARS Virus
gtcgttactcatcatacttaggtgt

SEQ ID NO: 181303 - DNA, 25 bp, SARS Virus
tcgttactcattctacttaggtgtt

SEQ ID NO: 181304 - DNA, 25 bp, SARS Virus
cgttactcattacacttaggtgtta

SEQ ID NO: 181305 - DNA, 25 bp, SARS Virus
gttactcattatccttaggtgttat

SEQ ID NO: 181306 - DNA, 25 bp, SARS Virus
ttactcattatacttaggtgttatc

SEQ ID NO: 181307 - DNA, 25 bp, SARS Virus
tactcattatacctaggtgttatcc

SEQ ID NO: 181308 - DNA, 25 bp, SARS Virus
actcattatactcaggtgttatcct

SEQ ID NO: 181309 - DNA, 25 bp, SARS Virus
ctcattatacttcggtgttatcctt

SEQ ID NO: 181310 - DNA, 25 bp, SARS Virus
tcattatacttacgtgttatccttg

SEQ ID NO: 181311 - DNA, 25 bp, SARS Virus
cattatacttagctgttatccttga

SEQ ID NO: 181312 - DNA, 25 bp, SARS Virus
attatacttaggcgttatccttgag

SEQ ID NO: 181313 - DNA, 25 bp, SARS Virus
ttatacttaggtcttatccttgagg

SEQ ID NO: 181314 - DNA, 25 bp, SARS Virus
tatacttaggtgctatccttgaggc

SEQ ID NO: 181315 - DNA, 25 bp, SARS Virus
atacttaggtgtcatccttgaggcg

SEQ ID NO: 181316 - DNA, 25 bp, SARS Virus
tacttaggtgttctccttgaggcgt

SEQ ID NO: 181317 - DNA, 25 bp, SARS Virus
acttaggtgttacccttgaggcgtc

SEQ ID NO: 181318 - DNA, 25 bp, SARS Virus
cttaggtgttatccttgaggcgtcg

SEQ ID NO: 181319 - DNA, 25 bp, SARS Virus
ttaggtgttatccttgaggcgtcgg

SEQ ID NO: 181320 - DNA, 25 bp, SARS Virus
taggtgttatccctgaggcgtcgga

SEQ ID NO: 181321 - DNA, 25 bp, SARS Virus
aggtgttatcctcgaggcgtcggac

SEQ ID NO: 181322 - DNA, 25 bp, SARS Virus
ggtgttatccttcaggcgtcggacc

SEQ ID NO: 181323 - DNA, 25 bp, SARS Virus
gtgttatccttgcggcgtcggacca

SEQ ID NO: 181324 - DNA, 25 bp, SARS Virus
tgttatccttgacgcgtcggaccac

SEQ ID NO: 181325 - DNA, 25 bp, SARS Virus
gttatccttgagccgtcggaccacg

SEQ ID NO: 181326 - DNA, 25 bp, SARS Virus
ttatccttgaggcgtcggaccacga

SEQ ID NO: 181327 - DNA, 25 bp, SARS Virus
tatccttgaggcctcggaccacgat

SEQ ID NO: 181328 - DNA, 25 bp, SARS Virus
atccttgaggcgccggaccacgatg

SEQ ID NO: 181329 - DNA, 25 bp, SARS Virus
tccttgaggcgtcggaccacgatga

SEQ ID NO: 181330 - DNA, 25 bp, SARS Virus
ccttgaggcgtccgaccacgatgaa

SEQ ID NO: 181331 - DNA, 25 bp, SARS Virus
cttgaggcgtcgcaccacgatgaac

SEQ ID NO: 181332 - DNA, 25 bp, SARS Virus
ttgaggcgtcggcccacgatgaaca

SEQ ID NO: 181333 - DNA, 25 bp, SARS Virus
tgaggcgtcggaccacgatgaacat

SEQ ID NO: 181334 - DNA, 25 bp, SARS Virus
gaggcgtcggaccacgatgaacatg

SEQ ID NO: 181335 - DNA, 25 bp, SARS Virus
aggcgtcggaccccgatgaacatgc

SEQ ID NO: 181336 - DNA, 25 bp, SARS Virus
ggcgtcggaccacgatgaacatgct

SEQ ID NO: 181337 - DNA, 25 bp, SARS Virus
gcgtcggaccaccatgaacatgctt

SEQ ID NO: 181338 - DNA, 25 bp, SARS Virus
cgtcggaccacgctgaacatgcttt

SEQ ID NO: 181339 - DNA, 25 bp, SARS Virus
gtcggaccacgacgaacatgcttta

SEQ ID NO: 181340 - DNA, 25 bp, SARS Virus
tcggaccacgatcaacatgctttag

SEQ ID NO: 181341 - DNA, 25 bp, SARS Virus
cggaccacgatgcacatgctttagt

SEQ ID NO: 181342 - DNA, 25 bp, SARS Virus
ggaccacgatgaccatgctttagtg

SEQ ID NO: 181343 - DNA, 25 bp, SARS Virus
gaccacgatgaacatgctttagtgg

SEQ ID NO: 181344 - DNA, 25 bp, SARS Virus
accacgatgaacctgctttagtggc

SEQ ID NO: 181345 - DNA, 25 bp, SARS Virus
ccacgatgaacacgctttagtggct

SEQ ID NO: 181346 - DNA, 25 bp, SARS Virus
cacgatgaacatcctttagtggctt

SEQ ID NO: 181347 - DNA, 25 bp, SARS Virus
acgatgaacatgctttagtggcttt

SEQ ID NO: 181348 - DNA, 25 bp, SARS Virus
cgatgaacatgccttagtggcttta

SEQ ID NO: 181349 - DNA, 25 bp, SARS Virus
gatgaacatgctctagtggctttag

SEQ ID NO: 181350 - DNA, 25 bp, SARS Virus
atgaacatgcttcagtggctttagc

SEQ ID NO: 181351 - DNA, 25 bp, SARS Virus
tgaacatgctttcgtggctttagca

SEQ ID NO: 181352 - DNA, 25 bp, SARS Virus
gaacatgctttactggctttagcat

SEQ ID NO: 181353 - DNA, 25 bp, SARS Virus
aacatgctttagcggctttagcatg

SEQ ID NO: 181354 - DNA, 25 bp, SARS Virus
acatgctttagtcgctttagcatgg

SEQ ID NO: 181355 - DNA, 25 bp, SARS Virus
catgctttagtgcctttagcatggt

SEQ ID NO: 181356 - DNA, 25 bp, SARS Virus
atgctttagtggctttagcatggtc

SEQ ID NO: 181357 - DNA, 25 bp, SARS Virus
tgctttagtggccttagcatggtca

SEQ ID NO: 181358 - DNA, 25 bp, SARS Virus
gctttagtggctctagcatggtcaa

SEQ ID NO: 181359 - DNA, 25 bp, SARS Virus
ctttagtggcttcagcatggtcaag

SEQ ID NO: 181360 - DNA, 25 bp, SARS Virus
tttagtggctttcgcatggtcaagg

SEQ ID NO: 181361 - DNA, 25 bp, SARS Virus
ttagtggctttaccatggtcaaggg

SEQ ID NO: 181362 - DNA, 25 bp, SARS Virus
tagtggctttagcatggtcaagggt

SEQ ID NO: 181363 - DNA, 25 bp, SARS Virus
agtggctttagcctggtcaagggta

SEQ ID NO: 181364 - DNA, 25 bp, SARS Virus
gtggctttagcacggtcaagggtaa

SEQ ID NO: 181365 - DNA, 25 bp, SARS Virus
tggctttagcatcgtcaagggtaat

SEQ ID NO: 181366 - DNA, 25 bp, SARS Virus
ggctttagcatgctcaagggtaatt

SEQ ID NO: 181367 - DNA, 25 bp, SARS Virus
gctttagcatggccaagggtaattc

SEQ ID NO: 181368 - DNA, 25 bp, SARS Virus
ctttagcatggtcaagggtaattct

SEQ ID NO: 181369 - DNA, 25 bp, SARS Virus
tttagcatggtccagggtaattcta

SEQ ID NO: 181370 - DNA, 25 bp, SARS Virus
ttagcatggtcacgggtaattctag

SEQ ID NO: 181371 - DNA, 25 bp, SARS Virus
tagcatggtcaacggtaattctagg

SEQ ID NO: 181372 - DNA, 25 bp, SARS Virus
agcatggtcaagcgtaattctagga

SEQ ID NO: 181373 - DNA, 25 bp, SARS Virus
gcatggtcaaggctaattctaggac

SEQ ID NO: 181374 - DNA, 25 bp, SARS Virus
catggtcaagggcaattctaggact

SEQ ID NO: 181375 - DNA, 25 bp, SARS Virus
atggtcaagggtcattctaggacta

SEQ ID NO: 181376 - DNA, 25 bp, SARS Virus
tggtcaagggtacttctaggactaa

SEQ ID NO: 181377 - DNA, 25 bp, SARS Virus
ggtcaagggtaactctaggactaat

SEQ ID NO: 181378 - DNA, 25 bp, SARS Virus
gtcaagggtaatcctaggactaata

SEQ ID NO: 181379 - DNA, 25 bp, SARS Virus
tcaagggtaattctaggactaatag

SEQ ID NO: 181380 - DNA, 25 bp, SARS Virus
caagggtaattccaggactaataga

SEQ ID NO: 181381 - DNA, 25 bp, SARS Virus
aagggtaattctcggactaatagat

SEQ ID NO: 181382 - DNA, 25 bp, SARS Virus
agggtaattctacgactaatagatt

SEQ ID NO: 181383 - DNA, 25 bp, SARS Virus
gggtaattctagcactaatagatta

SEQ ID NO: 181384 - DNA, 25 bp, SARS Virus
ggtaattctaggcctaatagattac

SEQ ID NO: 181385 - DNA, 25 bp, SARS Virus
gtaattctaggactaatagattaca

SEQ ID NO: 181386 - DNA, 25 bp, SARS Virus
taattctaggaccaatagattacag

SEQ ID NO: 181387 - DNA, 25 bp, SARS Virus
aattctaggactcatagattacagt

SEQ ID NO: 181388 - DNA, 25 bp, SARS Virus
attctaggactactagattacagtc

SEQ ID NO: 181389 - DNA, 25 bp, SARS Virus
ttctaggactaacagattacagtca

SEQ ID NO: 181390 - DNA, 25 bp, SARS Virus
tctaggactaatcgattacagtcat

SEQ ID NO: 181391 - DNA, 25 bp, SARS Virus
ctaggactaatacattacagtcatg

SEQ ID NO: 181392 - DNA, 25 bp, SARS Virus
taggactaatagcttacagtcatgc

SEQ ID NO: 181393 - DNA, 25 bp, SARS Virus
aggactaatagactacagtcatgcg

SEQ ID NO: 181394 - DNA, 25 bp, SARS Virus
ggactaatagatcacagtcatgcgg

SEQ ID NO: 181395 - DNA, 25 bp, SARS Virus
gactaatagattccagtcatgcgga

SEQ ID NO: 181396 - DNA, 25 bp, SARS Virus
actaatagattacagtcatgcggat

SEQ ID NO: 181397 - DNA, 25 bp, SARS Virus
ctaatagattaccgtcatgcggatg

SEQ ID NO: 181398 - DNA, 25 bp, SARS Virus
taatagattacactcatgcggatgt

SEQ ID NO: 181399 - DNA, 25 bp, SARS Virus
aatagattacagccatgcggatgtt

SEQ ID NO: 181400 - DNA, 25 bp, SARS Virus
atagattacagtcatgcggatgtta

SEQ ID NO: 181401 - DNA, 25 bp, SARS Virus
tagattacagtcctgcggatgttac

SEQ ID NO: 181402 - DNA, 25 bp, SARS Virus
agattacagtcacgcggatgttacg

SEQ ID NO: 181403 - DNA, 25 bp, SARS Virus
gattacagtcatccggatgttacgg

SEQ ID NO: 181404 - DNA, 25 bp, SARS Virus
attacagtcatgcggatgttacgga

SEQ ID NO: 181405 - DNA, 25 bp, SARS Virus
ttacagtcatgccgatgttacggac

SEQ ID NO: 181406 - DNA, 25 bp, SARS Virus
tacagtcatgcgcatgttacggacg

SEQ ID NO: 181407 - DNA, 25 bp, SARS Virus
acagtcatgcggctgttacggacgt

SEQ ID NO: 181408 - DNA, 25 bp, SARS Virus
cagtcatgcggacgttacggacgta

SEQ ID NO: 181409 - DNA, 25 bp, SARS Virus
agtcatgcggatcttacggacgtag

SEQ ID NO: 181410 - DNA, 25 bp, SARS Virus
gtcatgcggatgctacggacgtagt

SEQ ID NO: 181411 - DNA, 25 bp, SARS Virus
tcatgcggatgtcacggacgtagtg

SEQ ID NO: 181412 - DNA, 25 bp, SARS Virus
catgcggatgttccggacgtagtgc

SEQ ID NO: 181413 - DNA, 25 bp, SARS Virus
atgcggatgttacggacgtagtgcg

SEQ ID NO: 181414 - DNA, 25 bp, SARS Virus
tgcggatgttaccgacgtagtgcgt

SEQ ID NO: 181415 - DNA, 25 bp, SARS Virus
gcggatgttacgcacgtagtgcgta

SEQ ID NO: 181416 - DNA, 25 bp, SARS Virus
cggatgttacggccgtagtgcgtat

SEQ ID NO: 181417 - DNA, 25 bp, SARS Virus
ggatgttacggacgtagtgcgtatc

SEQ ID NO: 181418 - DNA, 25 bp, SARS Virus
gatgttacggacctagtgcgtatcg

SEQ ID NO: 181419 - DNA, 25 bp, SARS Virus
atgttacggacgcagtgcgtatcgt

SEQ ID NO: 181420 - DNA, 25 bp, SARS Virus
tgttacggacgtcgtgcgtatcgta

SEQ ID NO: 181421 - DNA, 25 bp, SARS Virus
gttacggacgtactgcgtatcgtag

SEQ ID NO: 181422 - DNA, 25 bp, SARS Virus
ttacggacgtagcgcgtatcgtagc

SEQ ID NO: 181423 - DNA, 25 bp, SARS Virus
tacggacgtagtccgtatcgtagcg

SEQ ID NO: 181424 - DNA, 25 bp, SARS Virus
acggacgtagtgcgtatcgtagcgt

SEQ ID NO: 181425 - DNA, 25 bp, SARS Virus
cggacgtagtgcctatcgtagcgtc

SEQ ID NO: 181426 - DNA, 25 bp, SARS Virus
ggacgtagtgcgcatcgtagcgtct

SEQ ID NO: 181427 - DNA, 25 bp, SARS Virus
gacgtagtgcgtctcgtagcgtctt

SEQ ID NO: 181428 - DNA, 25 bp, SARS Virus
acgtagtgcgtaccgtagcgtctta

SEQ ID NO: 181429 - DNA, 25 bp, SARS Virus
cgtagtgcgtatcgtagcgtcttaa

SEQ ID NO: 181430 - DNA, 25 bp, SARS Virus
gtagtgcgtatcctagcgtcttaac

SEQ ID NO: 181431 - DNA, 25 bp, SARS Virus
tagtgcgtatcgcagcgtcttaaca

SEQ ID NO: 181432 - DNA, 25 bp, SARS Virus
agtgcgtatcgtcgcgtcttaacat

SEQ ID NO: 181433 - DNA, 25 bp, SARS Virus
gtgcgtatcgtaccgtcttaacatg

SEQ ID NO: 181434 - DNA, 25 bp, SARS Virus
tgcgtatcgtagcgtcttaacatgt

SEQ ID NO: 181435 - DNA, 25 bp, SARS Virus
gcgtatcgtagcctcttaacatgtc

SEQ ID NO: 181436 - DNA, 25 bp, SARS Virus
cgtatcgtagcgccttaacatgtca

SEQ ID NO: 181437 - DNA, 25 bp, SARS Virus
gtatcgtagcgtcttaacatgtcag

SEQ ID NO: 181438 - DNA, 25 bp, SARS Virus
tatcgtagcgtcctaacatgtcaga

SEQ ID NO: 181439 - DNA, 25 bp, SARS Virus
atcgtagcgtctcaacatgtcagaa

SEQ ID NO: 181440 - DNA, 25 bp, SARS Virus
tcgtagcgtcttcacatgtcagaaa

SEQ ID NO: 181441 - DNA, 25 bp, SARS Virus
cgtagcgtcttaccatgtcagaaat

SEQ ID NO: 181442 - DNA, 25 bp, SARS Virus
gtagcgtcttaacatgtcagaaatt

SEQ ID NO: 181443 - DNA, 25 bp, SARS Virus
tagcgtcttaacctgtcagaaatta

SEQ ID NO: 181444 - DNA, 25 bp, SARS Virus
agcgtcttaacacgtcagaaattat

SEQ ID NO: 181445 - DNA, 25 bp, SARS Virus
gcgtcttaacatctcagaaattatt

SEQ ID NO: 181446 - DNA, 25 bp, SARS Virus
cgtcttaacatgccagaaattatta

SEQ ID NO: 181447 - DNA, 25 bp, SARS Virus
gtcttaacatgtcagaaattattac

SEQ ID NO: 181448 - DNA, 25 bp, SARS Virus
tcttaacatgtccgaaattattact

SEQ ID NO: 181449 - DNA, 25 bp, SARS Virus
cttaacatgtcacaaattattacta

SEQ ID NO: 181450 - DNA, 25 bp, SARS Virus
ttaacatgtcagcaattattactaa

SEQ ID NO: 181451 - DNA, 25 bp, SARS Virus
taacatgtcagacattattactaac

SEQ ID NO: 181452 - DNA, 25 bp, SARS Virus
aacatgtcagaacttattactaacc

SEQ ID NO: 181453 - DNA, 25 bp, SARS Virus
acatgtcagaaactattactaaccg

SEQ ID NO: 181454 - DNA, 25 bp, SARS Virus
catgtcagaaatcattactaaccgc

SEQ ID NO: 181455 - DNA, 25 bp, SARS Virus
atgtcagaaattcttactaaccgca

SEQ ID NO: 181456 - DNA, 25 bp, SARS Virus
tgtcagaaattactactaaccgcat

SEQ ID NO: 181457 - DNA, 25 bp, SARS Virus
gtcagaaattatcactaaccgcatg

SEQ ID NO: 181458 - DNA, 25 bp, SARS Virus
tcagaaattattcctaaccgcatgt

SEQ ID NO: 181459 - DNA, 25 bp, SARS Virus
cagaaattattactaaccgcatgtg

SEQ ID NO: 181460 - DNA, 25 bp, SARS Virus
agaaattattaccaaccgcatgtgc

SEQ ID NO: 181461 - DNA, 25 bp, SARS Virus
gaaattattactcaccgcatgtgcg

SEQ ID NO: 181462 - DNA, 25 bp, SARS Virus
aaattattactacccgcatgtgcga

SEQ ID NO: 181463 - DNA, 25 bp, SARS Virus
aattattactaaccgcatgtgcgag

SEQ ID NO: 181464 - DNA, 25 bp, SARS Virus
attattactaaccgcatgtgcgagt

SEQ ID NO: 181465 - DNA, 25 bp, SARS Virus
ttattactaaccccatgtgcgagtg

SEQ ID NO: 181466 - DNA, 25 bp, SARS Virus
tattactaaccgcatgtgcgagtgg

SEQ ID NO: 181467 - DNA, 25 bp, SARS Virus
attactaaccgcctgtgcgagtgga

SEQ ID NO: 181468 - DNA, 25 bp, SARS Virus
ttactaaccgcacgtgcgagtggat

SEQ ID NO: 181469 - DNA, 25 bp, SARS Virus
tactaaccgcatctgcgagtggatt

SEQ ID NO: 181470 - DNA, 25 bp, SARS Virus
actaaccgcatgcgcgagtggattc

SEQ ID NO: 181471 - DNA, 25 bp, SARS Virus
ctaaccgcatgtccgagtggattca

SEQ ID NO: 181472 - DNA, 25 bp, SARS Virus
taaccgcatgtgcgagtggattcaa

SEQ ID NO: 181473 - DNA, 25 bp, SARS Virus
aaccgcatgtgccagtggattcaat

SEQ ID NO: 181474 - DNA, 25 bp, SARS Virus
accgcatgtgcgcgtggattcaatc

SEQ ID NO: 181475 - DNA, 25 bp, SARS Virus
ccgcatgtgcgactggattcaatcg

SEQ ID NO: 181476 - DNA, 25 bp, SARS Virus
cgcatgtgcgagcggattcaatcgt

SEQ ID NO: 181477 - DNA, 25 bp, SARS Virus
gcatgtgcgagtcgattcaatcgta

SEQ ID NO: 181478 - DNA, 25 bp, SARS Virus
catgtgcgagtgcattcaatcgtat

SEQ ID NO: 181479 - DNA, 25 bp, SARS Virus
atgtgcgagtggcttcaatcgtata

SEQ ID NO: 181480 - DNA, 25 bp, SARS Virus
tgtgcgagtggactcaatcgtatat

SEQ ID NO: 181481 - DNA, 25 bp, SARS Virus
gtgcgagtggatccaatcgtatatg

SEQ ID NO: 181482 - DNA, 25 bp, SARS Virus
tgcgagtggattcaatcgtatatgc

SEQ ID NO: 181483 - DNA, 25 bp, SARS Virus
gcgagtggattccatcgtatatgcg

SEQ ID NO: 181484 - DNA, 25 bp, SARS Virus
cgagtggattcactcgtatatgcgc

SEQ ID NO: 181485 - DNA, 25 bp, SARS Virus
gagtggattcaaccgtatatgcgca

SEQ ID NO: 181486 - DNA, 25 bp, SARS Virus
agtggattcaatcgtatatgcgcat

SEQ ID NO: 181487 - DNA, 25 bp, SARS Virus
gtggattcaatcctatatgcgcatt

SEQ ID NO: 181488 - DNA, 25 bp, SARS Virus
tggattcaatcgcatatgcgcattc

SEQ ID NO: 181489 - DNA, 25 bp, SARS Virus
ggattcaatcgtctatgcgcattct

SEQ ID NO: 181490 - DNA, 25 bp, SARS Virus
gattcaatcgtacatgcgcattcta

SEQ ID NO: 181491 - DNA, 25 bp, SARS Virus
attcaatcgtatctgcgcattctac

SEQ ID NO: 181492 - DNA, 25 bp, SARS Virus
ttcaatcgtatacgcgcattctaca

SEQ ID NO: 181493 - DNA, 25 bp, SARS Virus
tcaatcgtatatccgcattctacag

SEQ ID NO: 181494 - DNA, 25 bp, SARS Virus
caatcgtatatgcgcattctacagt

SEQ ID NO: 181495 - DNA, 25 bp, SARS Virus
aatcgtatatgcccattctacagtc

SEQ ID NO: 181496 - DNA, 25 bp, SARS Virus
atcgtatatgcgcattctacagtcc

SEQ ID NO: 181497 - DNA, 25 bp, SARS Virus
tcgtatatgcgccttctacagtcct

SEQ ID NO: 181498 - DNA, 25 bp, SARS Virus
cgtatatgcgcactctacagtccta

SEQ ID NO: 181499 - DNA, 25 bp, SARS Virus
gtatatgcgcatcctacagtcctaa

SEQ ID NO: 181500 - DNA, 25 bp, SARS Virus
tatatgcgcattctacagtcctaag

SEQ ID NO: 181501 - DNA, 25 bp, SARS Virus
atatgcgcattccacagtcctaaga

SEQ ID NO: 181502 - DNA, 25 bp, SARS Virus
tatgcgcattctccagtcctaagag

SEQ ID NO: 181503 - DNA, 25 bp, SARS Virus
atgcgcattctacagtcctaagaga

SEQ ID NO: 181504 - DNA, 25 bp, SARS Virus
tgcgcattctaccgtcctaagagat

SEQ ID NO: 181505 - DNA, 25 bp, SARS Virus
gcgcattctacactcctaagagatg

SEQ ID NO: 181506 - DNA, 25 bp, SARS Virus
cgcattctacagccctaagagatgc

SEQ ID NO: 181507 - DNA, 25 bp, SARS Virus
gcattctacagtcctaagagatgct

SEQ ID NO: 181508 - DNA, 25 bp, SARS Virus
cattctacagtcctaagagatgctt

SEQ ID NO: 181509 - DNA, 25 bp, SARS Virus
attctacagtcccaagagatgcttc

SEQ ID NO: 181510 - DNA, 25 bp, SARS Virus
ttctacagtcctcagagatgcttca

SEQ ID NO: 181511 - DNA, 25 bp, SARS Virus
tctacagtcctacgagatgcttcag

SEQ ID NO: 181512 - DNA, 25 bp, SARS Virus
ctacagtcctaacagatgcttcagt

SEQ ID NO: 181513 - DNA, 25 bp, SARS Virus
tacagtcctaagcgatgcttcagta

SEQ ID NO: 181514 - DNA, 25 bp, SARS Virus
acagtcctaagacatgcttcagtat

SEQ ID NO: 181515 - DNA, 25 bp, SARS Virus
cagtcctaagagctgcttcagtatg

SEQ ID NO: 181516 - DNA, 25 bp, SARS Virus
agtcctaagagacgcttcagtatgg

SEQ ID NO: 181517 - DNA, 25 bp, SARS Virus
gtcctaagagatccttcagtatggt

SEQ ID NO: 181518 - DNA, 25 bp, SARS Virus
tcctaagagatgcttcagtatggtt

SEQ ID NO: 181519 - DNA, 25 bp, SARS Virus
cctaagagatgcctcagtatggtta

SEQ ID NO: 181520 - DNA, 25 bp, SARS Virus
ctaagagatgctccagtatggttag

SEQ ID NO: 181521 - DNA, 25 bp, SARS Virus
taagagatgcttcagtatggttagg

SEQ ID NO: 181522 - DNA, 25 bp, SARS Virus
aagagatgcttccgtatggttagga

SEQ ID NO: 181523 - DNA, 25 bp, SARS Virus
agagatgcttcactatggttaggaa

SEQ ID NO: 181524 - DNA, 25 bp, SARS Virus
gagatgcttcagcatggttaggaag

SEQ ID NO: 181525 - DNA, 25 bp, SARS Virus
agatgcttcagtctggttaggaaga

SEQ ID NO: 181526 - DNA, 25 bp, SARS Virus
gatgcttcagtacggttaggaagaa

SEQ ID NO: 181527 - DNA, 25 bp, SARS Virus
atgcttcagtatcgttaggaagaat

SEQ ID NO: 181528 - DNA, 25 bp, SARS Virus
tgcttcagtatgcttaggaagaata

SEQ ID NO: 181529 - DNA, 25 bp, SARS Virus
gcttcagtatggctaggaagaataa

SEQ ID NO: 181530 - DNA, 25 bp, SARS Virus
cttcagtatggtcaggaagaataac

SEQ ID NO: 181531 - DNA, 25 bp, SARS Virus
ttcagtatggttcggaagaataact

SEQ ID NO: 181532 - DNA, 25 bp, SARS Virus
tcagtatggttacgaagaataactt

SEQ ID NO: 181533 - DNA, 25 bp, SARS Virus
cagtatggttagcaagaataacttt

SEQ ID NO: 181534 - DNA, 25 bp, SARS Virus
agtatggttaggcagaataacttta

SEQ ID NO: 181535 - DNA, 25 bp, SARS Virus
gtatggttaggacgaataactttat

SEQ ID NO: 181536 - DNA, 25 bp, SARS Virus
tatggttaggaacaataactttatt

SEQ ID NO: 181537 - DNA, 25 bp, SARS Virus
atggttaggaagcataactttatta

SEQ ID NO: 181538 - DNA, 25 bp, SARS Virus
tggttaggaagactaactttattag

SEQ ID NO: 181539 - DNA, 25 bp, SARS Virus
ggttaggaagaacaactttattagt

SEQ ID NO: 181540 - DNA, 25 bp, SARS Virus
gttaggaagaatcactttattagta

SEQ ID NO: 181541 - DNA, 25 bp, SARS Virus
ttaggaagaatacctttattagtag

SEQ ID NO: 181542 - DNA, 25 bp, SARS Virus
taggaagaataactttattagtagt

SEQ ID NO: 181543 - DNA, 25 bp, SARS Virus
aggaagaataaccttattagtagta

SEQ ID NO: 181544 - DNA, 25 bp, SARS Virus
ggaagaataactctattagtagtag

SEQ ID NO: 181545 - DNA, 25 bp, SARS Virus
gaagaataacttcattagtagtagt

SEQ ID NO: 181546 - DNA, 25 bp, SARS Virus
aagaataactttcttagtagtagtg

SEQ ID NO: 181547 - DNA, 25 bp, SARS Virus
agaataactttactagtagtagtgt

SEQ ID NO: 181548 - DNA, 25 bp, SARS Virus
gaataactttatcagtagtagtgtc

SEQ ID NO: 181549 - DNA, 25 bp, SARS Virus
aataactttattcgtagtagtgtcg

SEQ ID NO: 181550 - DNA, 25 bp, SARS Virus
ataactttattactagtagtgtcgt

SEQ ID NO: 181551 - DNA, 25 bp, SARS Virus
taactttattagcagtagtgtcgtt

SEQ ID NO: 181552 - DNA, 25 bp, SARS Virus
aactttattagtcgtagtgtcgtta

SEQ ID NO: 181553 - DNA, 25 bp, SARS Virus
actttattagtactagtgtcgttaa

SEQ ID NO: 181554 - DNA, 25 bp, SARS Virus
ctttattagtagcagtgtcgttaac

SEQ ID NO: 181555 - DNA, 25 bp, SARS Virus
tttattagtagtcgtgtcgttaaca

SEQ ID NO: 181556 - DNA, 25 bp, SARS Virus
ttattagtagtactgtcgttaacat

SEQ ID NO: 181557 - DNA, 25 bp, SARS Virus
tattagtagtagcgtcgttaacata

SEQ ID NO: 181558 - DNA, 25 bp, SARS Virus
attagtagtagtctcgttaacatac

SEQ ID NO: 181559 - DNA, 25 bp, SARS Virus
ttagtagtagtgccgttaacataca

SEQ ID NO: 181560 - DNA, 25 bp, SARS Virus
tagtagtagtgtcgttaacatacac

SEQ ID NO: 181561 - DNA, 25 bp, SARS Virus
agtagtagtgtccttaacatacact

SEQ ID NO: 181562 - DNA, 25 bp, SARS Virus
gtagtagtgtcgctaacatacactg

SEQ ID NO: 181563 - DNA, 25 bp, SARS Virus
tagtagtgtcgtcaacatacactgc

SEQ ID NO: 181564 - DNA, 25 bp, SARS Virus
agtagtgtcgttcacatacactgct

SEQ ID NO: 181565 - DNA, 25 bp, SARS Virus
gtagtgtcgttaccatacactgctc

SEQ ID NO: 181566 - DNA, 25 bp, SARS Virus
tagtgtcgttaacatacactgctca

SEQ ID NO: 181567 - DNA, 25 bp, SARS Virus
agtgtcgttaacctacactgctcat

SEQ ID NO: 181568 - DNA, 25 bp, SARS Virus
gtgtcgttaacacacactgctcata

SEQ ID NO: 181569 - DNA, 25 bp, SARS Virus
tgtaatttcaaaggtgttacttcct

SEQ ID NO: 181570 - DNA, 25 bp, SARS Virus
gtaatttcaaacgtgttacttccta

SEQ ID NO: 181571 - DNA, 25 bp, SARS Virus
taatttcaaacgggttacttcctat

SEQ ID NO: 181572 - DNA, 25 bp, SARS Virus
aatttcaaacgtgttacttcctatg

SEQ ID NO: 181573 - DNA, 25 bp, SARS Virus
atttcaaacgtggtacttcctatgt

SEQ ID NO: 181574 - DNA, 25 bp, SARS Virus
tttcaaacgtgtgacttcctatgtg

SEQ ID NO: 181575 - DNA, 25 bp, SARS Virus
ttcaaacgtgttgcttcctatgtgg

SEQ ID NO: 181576 - DNA, 25 bp, SARS Virus
tcaaacgtgttagttcctatgtgga

SEQ ID NO: 181577 - DNA, 25 bp, SARS Virus
caaacgtgttacgtcctatgtggat

SEQ ID NO: 181578 - DNA, 25 bp, SARS Virus
aaacgtgttactgcctatgtggata

SEQ ID NO: 181579 - DNA, 25 bp, SARS Virus
aacgtgttacttgctatgtggatag

SEQ ID NO: 181580 - DNA, 25 bp, SARS Virus
acgtgttacttcgtatgtggatagt

SEQ ID NO: 181581 - DNA, 25 bp, SARS Virus
cgtgttacttccgatgtggatagta

SEQ ID NO: 181582 - DNA, 25 bp, SARS Virus
gtgttacttcctgtgtggatagtag

SEQ ID NO: 181583 - DNA, 25 bp, SARS Virus
tgttacttcctaggtggatagtagg

SEQ ID NO: 181584 - DNA, 25 bp, SARS Virus
gttacttcctatgtggatagtaggt

SEQ ID NO: 181585 - DNA, 25 bp, SARS Virus
ttacttcctatggggatagtaggtt

SEQ ID NO: 181586 - DNA, 25 bp, SARS Virus
tacttcctatgtggatagtaggttt

SEQ ID NO: 181587 - DNA, 25 bp, SARS Virus
acttcctatgtggatagtaggtttg

SEQ ID NO: 181588 - DNA, 25 bp, SARS Virus
cttcctatgtgggtagtaggtttgt

SEQ ID NO: 181589 - DNA, 25 bp, SARS Virus
ttcctatgtggagagtaggtttgtc

SEQ ID NO: 181590 - DNA, 25 bp, SARS Virus
tcctatgtggatggtaggtttgtca

SEQ ID NO: 181591 - DNA, 25 bp, SARS Virus
cctatgtggatagtaggtttgtcaa

SEQ ID NO: 181592 - DNA, 25 bp, SARS Virus
ctatgtggataggaggtttgtcaat

SEQ ID NO: 181593 - DNA, 25 bp, SARS Virus
tatgtggatagtgggtttgtcaatt

SEQ ID NO: 181594 - DNA, 25 bp, SARS Virus
atgtggatagtaggtttgtcaatta

SEQ ID NO: 181595 - DNA, 25 bp, SARS Virus
tgtggatagtaggtttgtcaattat

SEQ ID NO: 181596 - DNA, 25 bp, SARS Virus
gtggatagtagggttgtcaattatg

SEQ ID NO: 181597 - DNA, 25 bp, SARS Virus
tggatagtaggtgtgtcaattatgt

SEQ ID NO: 181598 - DNA, 25 bp, SARS Virus
ggatagtaggttggtcaattatgtt

SEQ ID NO: 181599 - DNA, 25 bp, SARS Virus
gatagtaggtttgtcaattatgtta

SEQ ID NO: 181600 - DNA, 25 bp, SARS Virus
atagtaggtttggcaattatgttaa

SEQ ID NO: 181601 - DNA, 25 bp, SARS Virus
tagtaggtttgtgaattatgttaac

SEQ ID NO: 181602 - DNA, 25 bp, SARS Virus
agtaggtttgtcgattatgttaacc

SEQ ID NO: 181603 - DNA, 25 bp, SARS Virus
gtaggtttgtcagttatgttaaccc

SEQ ID NO: 181604 - DNA, 25 bp, SARS Virus
taggtttgtcaagtatgttaaccct

SEQ ID NO: 181605 - DNA, 25 bp, SARS Virus
aggtttgtcaatgatgttaacccta

SEQ ID NO: 181606 - DNA, 25 bp, SARS Virus
ggtttgtcaattgtgttaaccctac

SEQ ID NO: 181607 - DNA, 25 bp, SARS Virus
gtttgtcaattaggttaaccctacc

SEQ ID NO: 181608 - DNA, 25 bp, SARS Virus
tttgtcaattatgttaaccctacca

SEQ ID NO: 181609 - DNA, 25 bp, SARS Virus
ttgtcaattatggtaaccctaccat

SEQ ID NO: 181610 - DNA, 25 bp, SARS Virus
tgtcaattatgtgaaccctaccata

SEQ ID NO: 181611 - DNA, 25 bp, SARS Virus
gtcaattatgttgaccctaccatac

SEQ ID NO: 181612 - DNA, 25 bp, SARS Virus
tcaattatgttagccctaccataca

SEQ ID NO: 181613 - DNA, 25 bp, SARS Virus
caattatgttaagcctaccatacag

SEQ ID NO: 181614 - DNA, 25 bp, SARS Virus
aattatgttaacgctaccatacaga

SEQ ID NO: 181615 - DNA, 25 bp, SARS Virus
attatgttaaccgtaccatacagac

SEQ ID NO: 181616 - DNA, 25 bp, SARS Virus
ttatgttaacccgaccatacagacc

SEQ ID NO: 181617 - DNA, 25 bp, SARS Virus
tatgttaaccctgccatacagacca

SEQ ID NO: 181618 - DNA, 25 bp, SARS Virus
atgttaaccctagcatacagaccag

SEQ ID NO: 181619 - DNA, 25 bp, SARS Virus
tgttaaccctacgatacagaccagg

SEQ ID NO: 181620 - DNA, 25 bp, SARS Virus
gttaaccctaccgtacagaccaggg

SEQ ID NO: 181621 - DNA, 25 bp, SARS Virus
ttaaccctaccagacagaccagggt

SEQ ID NO: 181622 - DNA, 25 bp, SARS Virus
taaccctaccatgcagaccagggtt

SEQ ID NO: 181623 - DNA, 25 bp, SARS Virus
aaccctaccatagagaccagggtta

SEQ ID NO: 181624 - DNA, 25 bp, SARS Virus
accctaccatacggaccagggttat

SEQ ID NO: 181625 - DNA, 25 bp, SARS Virus
ccctaccatacagaccagggttata

SEQ ID NO: 181626 - DNA, 25 bp, SARS Virus
cctaccatacaggccagggttataa

SEQ ID NO: 181627 - DNA, 25 bp, SARS Virus
ctaccatacagagcagggttataaa

SEQ ID NO: 181628 - DNA, 25 bp, SARS Virus
taccatacagacgagggttataaat

SEQ ID NO: 181629 - DNA, 25 bp, SARS Virus
accatacagaccggggttataaatt

SEQ ID NO: 181630 - DNA, 25 bp, SARS Virus
ccatacagaccagggttataaattt

SEQ ID NO: 181631 - DNA, 25 bp, SARS Virus
catacagaccagggttataaatttt

SEQ ID NO: 181632 - DNA, 25 bp, SARS Virus
atacagaccagggttataaatttta

SEQ ID NO: 181633 - DNA, 25 bp, SARS Virus
tacagaccaggggtataaattttat

SEQ ID NO: 181634 - DNA, 25 bp, SARS Virus
acagaccagggtgataaattttatt

SEQ ID NO: 181635 - DNA, 25 bp, SARS Virus
cagaccagggttgtaaattttattg

SEQ ID NO: 181636 - DNA, 25 bp, SARS Virus
agaccagggttagaaattttattgc

SEQ ID NO: 181637 - DNA, 25 bp, SARS Virus
gaccagggttatgaattttattgcc

SEQ ID NO: 181638 - DNA, 25 bp, SARS Virus
accagggttatagattttattgcca

SEQ ID NO: 181639 - DNA, 25 bp, SARS Virus
ccagggttataagttttattgccag

SEQ ID NO: 181640 - DNA, 25 bp, SARS Virus
cagggttataaagtttattgccagc

SEQ ID NO: 181641 - DNA, 25 bp, SARS Virus
agggttataaatgttattgccagct

SEQ ID NO: 181642 - DNA, 25 bp, SARS Virus
gggttataaattgtattgccagctt

SEQ ID NO: 181643 - DNA, 25 bp, SARS Virus
ggttataaatttgattgccagcttc

SEQ ID NO: 181644 - DNA, 25 bp, SARS Virus
gttataaattttgttgccagcttct

SEQ ID NO: 181645 - DNA, 25 bp, SARS Virus
ttataaattttagtgccagcttctc

SEQ ID NO: 181646 - DNA, 25 bp, SARS Virus
tataaattttatggccagcttctct

SEQ ID NO: 181647 - DNA, 25 bp, SARS Virus
ataaattttattgccagcttctctg

SEQ ID NO: 181648 - DNA, 25 bp, SARS Virus
taaattttattggcagcttctctgt

SEQ ID NO: 181649 - DNA, 25 bp, SARS Virus
aaattttattgcgagcttctctgtt

SEQ ID NO: 181650 - DNA, 25 bp, SARS Virus
aattttattgccggcttctctgttt

SEQ ID NO: 181651 - DNA, 25 bp, SARS Virus
attttattgccagcttctctgtttc

SEQ ID NO: 181652 - DNA, 25 bp, SARS Virus
ttttattgccaggttctctgtttca

SEQ ID NO: 181653 - DNA, 25 bp, SARS Virus
tttattgccagcgtctctgtttcag

SEQ ID NO: 181654 - DNA, 25 bp, SARS Virus
ttattgccagctgctctgtttcaga

SEQ ID NO: 181655 - DNA, 25 bp, SARS Virus
tattgccagcttgtctgtttcagag

SEQ ID NO: 181656 - DNA, 25 bp, SARS Virus
attgccagcttcgctgtttcagaga

SEQ ID NO: 181657 - DNA, 25 bp, SARS Virus
ttgccagcttctgtgtttcagagag

SEQ ID NO: 181658 - DNA, 25 bp, SARS Virus
tgccagcttctcggtttcagagaga

SEQ ID NO: 181659 - DNA, 25 bp, SARS Virus
gccagcttctctgtttcagagagaa

SEQ ID NO: 181660 - DNA, 25 bp, SARS Virus
ccagcttctctggttcagagagaag

SEQ ID NO: 181661 - DNA, 25 bp, SARS Virus
cagcttctctgtgtcagagagaagg

SEQ ID NO: 181662 - DNA, 25 bp, SARS Virus
agcttctctgttgcagagagaaggc

SEQ ID NO: 181663 - DNA, 25 bp, SARS Virus
gcttctctgtttgagagagaaggca

SEQ ID NO: 181664 - DNA, 25 bp, SARS Virus
cttctctgtttcggagagaaggcat

SEQ ID NO: 181665 - DNA, 25 bp, SARS Virus
ttctctgtttcagagagaaggcatt

SEQ ID NO: 181666 - DNA, 25 bp, SARS Virus
tctctgtttcagggagaaggcattt

SEQ ID NO: 181667 - DNA, 25 bp, SARS Virus
ctctgtttcagagagaaggcatttt

SEQ ID NO: 181668 - DNA, 25 bp, SARS Virus
tctgtttcagagggaaggcatttta

SEQ ID NO: 181669 - DNA, 25 bp, SARS Virus
ctgtttcagagagaaggcattttag

SEQ ID NO: 181670 - DNA, 25 bp, SARS Virus
tgtttcagagaggaggcattttagt

SEQ ID NO: 181671 - DNA, 25 bp, SARS Virus
gtttcagagagagggcattttagta

SEQ ID NO: 181672 - DNA, 25 bp, SARS Virus
tttcagagagaaggcattttagtat

SEQ ID NO: 181673 - DNA, 25 bp, SARS Virus
ttcagagagaaggcattttagtata

SEQ ID NO: 181674 - DNA, 25 bp, SARS Virus
tcagagagaagggattttagtataa

SEQ ID NO: 181675 - DNA, 25 bp, SARS Virus
cagagagaaggcgttttagtataaa

SEQ ID NO: 181676 - DNA, 25 bp, SARS Virus
agagagaaggcagtttagtataaag

SEQ ID NO: 181677 - DNA, 25 bp, SARS Virus
gagagaaggcatgttagtataaagt

SEQ ID NO: 181678 - DNA, 25 bp, SARS Virus
agagaaggcattgtagtataaagtc

SEQ ID NO: 181679 - DNA, 25 bp, SARS Virus
gagaaggcatttgagtataaagtcg

SEQ ID NO: 181680 - DNA, 25 bp, SARS Virus
agaaggcattttggtataaagtcgt

SEQ ID NO: 181681 - DNA, 25 bp, SARS Virus
gaaggcattttagtataaagtcgtt

SEQ ID NO: 181682 - DNA, 25 bp, SARS Virus
aaggcattttaggataaagtcgttt

SEQ ID NO: 181683 - DNA, 25 bp, SARS Virus
aggcattttagtgtaaagtcgttta

SEQ ID NO: 181684 - DNA, 25 bp, SARS Virus
ggcattttagtagaaagtcgtttag

SEQ ID NO: 181685 - DNA, 25 bp, SARS Virus
gcattttagtatgaagtcgtttagg

SEQ ID NO: 181686 - DNA, 25 bp, SARS Virus
cattttagtatagagtcgtttaggg

SEQ ID NO: 181687 - DNA, 25 bp, SARS Virus
attttagtataaggtcgtttagggt

SEQ ID NO: 181688 - DNA, 25 bp, SARS Virus
ttttagtataaagtcgtttagggtg

SEQ ID NO: 181689 - DNA, 25 bp, SARS Virus
tttagtataaaggcgtttagggtga

SEQ ID NO: 181690 - DNA, 25 bp, SARS Virus
ttagtataaagtggtttagggtgaa

SEQ ID NO: 181691 - DNA, 25 bp, SARS Virus
tagtataaagtcgtttagggtgaat

SEQ ID NO: 181692 - DNA, 25 bp, SARS Virus
agtataaagtcggttagggtgaatt

SEQ ID NO: 181693 - DNA, 25 bp, SARS Virus
gtataaagtcgtgtagggtgaatta

SEQ ID NO: 181694 - DNA, 25 bp, SARS Virus
tataaagtcgttgagggtgaattat

SEQ ID NO: 181695 - DNA, 25 bp, SARS Virus
ataaagtcgtttggggtgaattatt

SEQ ID NO: 181696 - DNA, 25 bp, SARS Virus
taaagtcgtttagggtgaattattc

SEQ ID NO: 181697 - DNA, 25 bp, SARS Virus
aaagtcgtttagggtgaattattca

SEQ ID NO: 181698 - DNA, 25 bp, SARS Virus
aagtcgtttagggtgaattattcac

SEQ ID NO: 181699 - DNA, 25 bp, SARS Virus
agtcgtttagggggaattattcacc

SEQ ID NO: 181700 - DNA, 25 bp, SARS Virus
gtcgtttagggtgaattattcacca

SEQ ID NO: 181701 - DNA, 25 bp, SARS Virus
tcgtttagggtggattattcaccaa

SEQ ID NO: 181702 - DNA, 25 bp, SARS Virus
cgtttagggtgagttattcaccaaa

SEQ ID NO: 181703 - DNA, 25 bp, SARS Virus
gtttagggtgaagtattcaccaaaa

SEQ ID NO: 181704 - DNA, 25 bp, SARS Virus
tttagggtgaatgattcaccaaaac

SEQ ID NO: 181705 - DNA, 25 bp, SARS Virus
ttagggtgaattgttcaccaaaacg

SEQ ID NO: 181706 - DNA, 25 bp, SARS Virus
tagggtgaattagtcaccaaaacgc

SEQ ID NO: 181707 - DNA, 25 bp, SARS Virus
agggtgaattatgcaccaaaacgct

SEQ ID NO: 181708 - DNA, 25 bp, SARS Virus
gggtgaattattgaccaaaacgctc

SEQ ID NO: 181709 - DNA, 25 bp, SARS Virus
ggtgaattattcgccaaaacgctct

SEQ ID NO: 181710 - DNA, 25 bp, SARS Virus
gtgaattattcagcaaaacgctcta

SEQ ID NO: 181711 - DNA, 25 bp, SARS Virus
tgaattattcacgaaaacgctctag

SEQ ID NO: 181712 - DNA, 25 bp, SARS Virus
gaattattcaccgaaacgctctagt

SEQ ID NO: 181713 - DNA, 25 bp, SARS Virus
aattattcaccagaacgctctagtc

SEQ ID NO: 181714 - DNA, 25 bp, SARS Virus
attattcaccaagacgctctagtcg

SEQ ID NO: 181715 - DNA, 25 bp, SARS Virus
ttattcaccaaagcgctctagtcgt

SEQ ID NO: 181716 - DNA, 25 bp, SARS Virus
tattcaccaaaaggctctagtcgta

SEQ ID NO: 181717 - DNA, 25 bp, SARS Virus
attcaccaaaacgctctagtcgtag

SEQ ID NO: 181718 - DNA, 25 bp, SARS Virus
ttcaccaaaacggtctagtcgtagg

SEQ ID NO: 181719 - DNA, 25 bp, SARS Virus
tcaccaaaacgcgctagtcgtaggt

SEQ ID NO: 181720 - DNA, 25 bp, SARS Virus
caccaaaacgctgtagtcgtaggta

SEQ ID NO: 181721 - DNA, 25 bp, SARS Virus
accaaaacgctcgagtcgtaggtat

SEQ ID NO: 181722 - DNA, 25 bp, SARS Virus
ccaaaacgctctggtcgtaggtata

SEQ ID NO: 181723 - DNA, 25 bp, SARS Virus
caaaacgctctagtcgtaggtatac

SEQ ID NO: 181724 - DNA, 25 bp, SARS Virus
aaaacgctctaggcgtaggtatacc

SEQ ID NO: 181725 - DNA, 25 bp, SARS Virus
aaacgctctagtggtaggtataccc

SEQ ID NO: 181726 - DNA, 25 bp, SARS Virus
aacgctctagtcgtaggtataccct

SEQ ID NO: 181727 - DNA, 25 bp, SARS Virus
acgctctagtcggaggtataccctg

SEQ ID NO: 181728 - DNA, 25 bp, SARS Virus
cgctctagtcgtgggtataccctga

SEQ ID NO: 181729 - DNA, 25 bp, SARS Virus
gctctagtcgtaggtataccctgag

SEQ ID NO: 181730 - DNA, 25 bp, SARS Virus
ctctagtcgtaggtataccctgagt

SEQ ID NO: 181731 - DNA, 25 bp, SARS Virus
tctagtcgtagggataccctgagtc

SEQ ID NO: 181732 - DNA, 25 bp, SARS Virus
ctagtcgtaggtgtaccctgagtcg

SEQ ID NO: 181733 - DNA, 25 bp, SARS Virus
tagtcgtaggtagaccctgagtcgt

SEQ ID NO: 181734 - DNA, 25 bp, SARS Virus
agtcgtaggtatgccctgagtcgtc

SEQ ID NO: 181735 - DNA, 25 bp, SARS Virus
gtcgtaggtatagcctgagtcgtcg

SEQ ID NO: 181736 - DNA, 25 bp, SARS Virus
tcgtaggtatacgctgagtcgtcgg

SEQ ID NO: 181737 - DNA, 25 bp, SARS Virus
cgtaggtataccgtgagtcgtcggt

SEQ ID NO: 181738 - DNA, 25 bp, SARS Virus
gtaggtatacccggagtcgtcggtt

SEQ ID NO: 181739 - DNA, 25 bp, SARS Virus
taggtataccctgagtcgtcggtta

SEQ ID NO: 181740 - DNA, 25 bp, SARS Virus
aggtataccctgggtcgtcggttac

SEQ ID NO: 181741 - DNA, 25 bp, SARS Virus
ggtataccctgagtcgtcggttacg

SEQ ID NO: 181742 - DNA, 25 bp, SARS Virus
gtataccctgaggcgtcggttacgg

SEQ ID NO: 181743 - DNA, 25 bp, SARS Virus
tataccctgagtggtcggttacggg

SEQ ID NO: 181744 - DNA, 25 bp, SARS Virus
ataccctgagtcgtcggttacggga

SEQ ID NO: 181745 - DNA, 25 bp, SARS Virus
taccctgagtcggcggttacgggat

SEQ ID NO: 181746 - DNA, 25 bp, SARS Virus
accctgagtcgtgggttacgggatc

SEQ ID NO: 181747 - DNA, 25 bp, SARS Virus
ccctgagtcgtcggttacgggatca

SEQ ID NO: 181748 - DNA, 25 bp, SARS Virus
cctgagtcgtcggttacgggatcag

SEQ ID NO: 181749 - DNA, 25 bp, SARS Virus
ctgagtcgtcgggtacgggatcagt

SEQ ID NO: 181750 - DNA, 25 bp, SARS Virus
tgagtcgtcggtgacgggatcagtt

SEQ ID NO: 181751 - DNA, 25 bp, SARS Virus
gagtcgtcggttgcgggatcagttt

SEQ ID NO: 181752 - DNA, 25 bp, SARS Virus
agtcgtcggttaggggatcagtttc

SEQ ID NO: 181753 - DNA, 25 bp, SARS Virus
gtcgtcggttacgggatcagtttca

SEQ ID NO: 181754 - DNA, 25 bp, SARS Virus
tcgtcggttacgggatcagtttcac

SEQ ID NO: 181755 - DNA, 25 bp, SARS Virus
cgtcggttacgggatcagtttcact

SEQ ID NO: 181756 - DNA, 25 bp, SARS Virus
gtcggttacggggtcagtttcactc

SEQ ID NO: 181757 - DNA, 25 bp, SARS Virus
tcggttacgggagcagtttcactcc

SEQ ID NO: 181758 - DNA, 25 bp, SARS Virus
cggttacgggatgagtttcactcct

SEQ ID NO: 181759 - DNA, 25 bp, SARS Virus
ggttacgggatcggtttcactccta

SEQ ID NO: 181760 - DNA, 25 bp, SARS Virus
gttacgggatcagtttcactcctac

SEQ ID NO: 181761 - DNA, 25 bp, SARS Virus
ttacgggatcaggttcactcctacc

SEQ ID NO: 181762 - DNA, 25 bp, SARS Virus
tacgggatcagtgtcactcctaccc

SEQ ID NO: 181763 - DNA, 25 bp, SARS Virus
acgggatcagttgcactcctacccg

SEQ ID NO: 181764 - DNA, 25 bp, SARS Virus
cgggatcagtttgactcctacccgt

SEQ ID NO: 181765 - DNA, 25 bp, SARS Virus
gggatcagtttcgctcctacccgta

SEQ ID NO: 181766 - DNA, 25 bp, SARS Virus
ggatcagtttcagtcctacccgtag

SEQ ID NO: 181767 - DNA, 25 bp, SARS Virus
gatcagtttcacgcctacccgtagt

SEQ ID NO: 181768 - DNA, 25 bp, SARS Virus
atcagtttcactgctacccgtagtc

SEQ ID NO: 181769 - DNA, 25 bp, SARS Virus
tcagtttcactcgtacccgtagtcg

SEQ ID NO: 181770 - DNA, 25 bp, SARS Virus
cagtttcactccgacccgtagtcgt

SEQ ID NO: 181771 - DNA, 25 bp, SARS Virus
agtttcactcctgcccgtagtcgtt

SEQ ID NO: 181772 - DNA, 25 bp, SARS Virus
gtttcactcctagccgtagtcgtta

SEQ ID NO: 181773 - DNA, 25 bp, SARS Virus
tttcactcctacgcgtagtcgttac

SEQ ID NO: 181774 - DNA, 25 bp, SARS Virus
ttcactcctaccggtagtcgttact

SEQ ID NO: 181775 - DNA, 25 bp, SARS Virus
tcactcctacccgtagtcgttactc

SEQ ID NO: 181776 - DNA, 25 bp, SARS Virus
cactcctacccggagtcgttactca

SEQ ID NO: 181777 - DNA, 25 bp, SARS Virus
actcctacccgtggtcgttactcat

SEQ ID NO: 181778 - DNA, 25 bp, SARS Virus
ctcctacccgtagtcgttactcatt

SEQ ID NO: 181779 - DNA, 25 bp, SARS Virus
tcctacccgtaggcgttactcatta

SEQ ID NO: 181780 - DNA, 25 bp, SARS Virus
cctacccgtagtggttactcattat

SEQ ID NO: 181781 - DNA, 25 bp, SARS Virus
ctacccgtagtcgttactcattata

SEQ ID NO: 181782 - DNA, 25 bp, SARS Virus
tacccgtagtcggtactcattatac

SEQ ID NO: 181783 - DNA, 25 bp, SARS Virus
acccgtagtcgtgactcattatact

SEQ ID NO: 181784 - DNA, 25 bp, SARS Virus
cccgtagtcgttgctcattatactt

SEQ ID NO: 181785 - DNA, 25 bp, SARS Virus
ccgtagtcgttagtcattatactta

SEQ ID NO: 181786 - DNA, 25 bp, SARS Virus
cgtagtcgttacgcattatacttag

SEQ ID NO: 181787 - DNA, 25 bp, SARS Virus
gtagtcgttactgattatacttagg

SEQ ID NO: 181788 - DNA, 25 bp, SARS Virus
tagtcgttactcgttatacttaggt

SEQ ID NO: 181789 - DNA, 25 bp, SARS Virus
agtcgttactcagtatacttaggtg

SEQ ID NO: 181790 - DNA, 25 bp, SARS Virus
gtcgttactcatgatacttaggtgt

SEQ ID NO: 181791 - DNA, 25 bp, SARS Virus
tcgttactcattgtacttaggtgtt

SEQ ID NO: 181792 - DNA, 25 bp, SARS Virus
cgttactcattagacttaggtgtta

SEQ ID NO: 181793 - DNA, 25 bp, SARS Virus
gttactcattatgcttaggtgttat

SEQ ID NO: 181794 - DNA, 25 bp, SARS Virus
ttactcattatagttaggtgttatc

SEQ ID NO: 181795 - DNA, 25 bp, SARS Virus
tactcattatacgtaggtgttatcc

SEQ ID NO: 181796 - DNA, 25 bp, SARS Virus
actcattatactgaggtgttatcct

SEQ ID NO: 181797 - DNA, 25 bp, SARS Virus
ctcattatacttgggtgttatcctt

SEQ ID NO: 181798 - DNA, 25 bp, SARS Virus
tcattatacttaggtgttatccttg

SEQ ID NO: 181799 - DNA, 25 bp, SARS Virus
cattatacttaggtgttatccttga

SEQ ID NO: 181800 - DNA, 25 bp, SARS Virus
attatacttaggggttatccttgag

SEQ ID NO: 181801 - DNA, 25 bp, SARS Virus
ttatacttaggtgttatccttgagg

SEQ ID NO: 181802 - DNA, 25 bp, SARS Virus
tatacttaggtggtatccttgaggc

SEQ ID NO: 181803 - DNA, 25 bp, SARS Virus
atacttaggtgtgatccttgaggcg

SEQ ID NO: 181804 - DNA, 25 bp, SARS Virus
tacttaggtgttgtccttgaggcgt

SEQ ID NO: 181805 - DNA, 25 bp, SARS Virus
acttaggtgttagccttgaggcgtc

SEQ ID NO: 181806 - DNA, 25 bp, SARS Virus
cttaggtgttatgcttgaggcgtcg

SEQ ID NO: 181807 - DNA, 25 bp, SARS Virus
ttaggtgttatcgttgaggcgtcgg

SEQ ID NO: 181808 - DNA, 25 bp, SARS Virus
taggtgttatccgtgaggcgtcgga

SEQ ID NO: 181809 - DNA, 25 bp, SARS Virus
aggtgttatcctggaggcgtcggac

SEQ ID NO: 181810 - DNA, 25 bp, SARS Virus
ggtgttatccttgaggcgtcggacc

SEQ ID NO: 181811 - DNA, 25 bp, SARS Virus
gtgttatccttggggcgtcggacca

SEQ ID NO: 181812 - DNA, 25 bp, SARS Virus
tgttatccttgaggcgtcggaccac

SEQ ID NO: 181813 - DNA, 25 bp, SARS Virus
gttatccttgaggcgtcggaccacg

SEQ ID NO: 181814 - DNA, 25 bp, SARS Virus
ttatccttgaggggtcggaccacga

SEQ ID NO: 181815 - DNA, 25 bp, SARS Virus
tatccttgaggcgtcggaccacgat

SEQ ID NO: 181816 - DNA, 25 bp, SARS Virus
atccttgaggcggcggaccacgatg

SEQ ID NO: 181817 - DNA, 25 bp, SARS Virus
tccttgaggcgtgggaccacgatga

SEQ ID NO: 181818 - DNA, 25 bp, SARS Virus
ccttgaggcgtcggaccacgatgaa

SEQ ID NO: 181819 - DNA, 25 bp, SARS Virus
cttgaggcgtcggaccacgatgaac

SEQ ID NO: 181820 - DNA, 25 bp, SARS Virus
ttgaggcgtcgggccacgatgaaca

SEQ ID NO: 181821 - DNA, 25 bp, SARS Virus
tgaggcgtcggagcacgatgaacat

SEQ ID NO: 181822 - DNA, 25 bp, SARS Virus
gaggcgtcggacgacgatgaacatg

SEQ ID NO: 181823 - DNA, 25 bp, SARS Virus
aggcgtcggaccgcgatgaacatgc

SEQ ID NO: 181824 - DNA, 25 bp, SARS Virus
ggcgtcggaccaggatgaacatgct

SEQ ID NO: 181825 - DNA, 25 bp, SARS Virus
gcgtcggaccacgatgaacatgctt

SEQ ID NO: 181826 - DNA, 25 bp, SARS Virus
cgtcggaccacggtgaacatgcttt

SEQ ID NO: 181827 - DNA, 25 bp, SARS Virus
gtcggaccacgaggaacatgcttta

SEQ ID NO: 181828 - DNA, 25 bp, SARS Virus
tcggaccacgatgaacatgctttag

SEQ ID NO: 181829 - DNA, 25 bp, SARS Virus
cggaccacgatggacatgctttagt

SEQ ID NO: 181830 - DNA, 25 bp, SARS Virus
ggaccacgatgagcatgctttagtg

SEQ ID NO: 181831 - DNA, 25 bp, SARS Virus
gaccacgatgaagatgctttagtgg

SEQ ID NO: 181832 - DNA, 25 bp, SARS Virus
accacgatgaacgtgctttagtggc

SEQ ID NO: 181833 - DNA, 25 bp, SARS Virus
ccacgatgaacaggctttagtggct

SEQ ID NO: 181834 - DNA, 25 bp, SARS Virus
cacgatgaacatgctttagtggctt

SEQ ID NO: 181835 - DNA, 25 bp, SARS Virus
acgatgaacatggtttagtggcttt

SEQ ID NO: 181836 - DNA, 25 bp, SARS Virus
cgatgaacatgcgttagtggcttta

SEQ ID NO: 181837 - DNA, 25 bp, SARS Virus
gatgaacatgctgtagtggctttag

SEQ ID NO: 181838 - DNA, 25 bp, SARS Virus
atgaacatgcttgagtggctttagc

SEQ ID NO: 181839 - DNA, 25 bp, SARS Virus
tgaacatgctttggtggctttagca

SEQ ID NO: 181840 - DNA, 25 bp, SARS Virus
gaacatgctttagtggctttagcat

SEQ ID NO: 181841 - DNA, 25 bp, SARS Virus
aacatgctttaggggctttagcatg

SEQ ID NO: 181842 - DNA, 25 bp, SARS Virus
acatgctttagtggctttagcatgg

SEQ ID NO: 181843 - DNA, 25 bp, SARS Virus
catgctttagtggctttagcatggt

SEQ ID NO: 181844 - DNA, 25 bp, SARS Virus
atgctttagtgggtttagcatggtc

SEQ ID NO: 181845 - DNA, 25 bp, SARS Virus
tgctttagtggcgttagcatggtca

SEQ ID NO: 181846 - DNA, 25 bp, SARS Virus
gctttagtggctgtagcatggtcaa

SEQ ID NO: 181847 - DNA, 25 bp, SARS Virus
ctttagtggcttgagcatggtcaag

SEQ ID NO: 181848 - DNA, 25 bp, SARS Virus
tttagtggctttggcatggtcaagg

SEQ ID NO: 181849 - DNA, 25 bp, SARS Virus
ttagtggctttagcatggtcaaggg

SEQ ID NO: 181850 - DNA, 25 bp, SARS Virus
tagtggctttaggatggtcaagggt

SEQ ID NO: 181851 - DNA, 25 bp, SARS Virus
agtggctttagcgtggtcaagggta

SEQ ID NO: 181852 - DNA, 25 bp, SARS Virus
gtggctttagcagggtcaagggtaa

SEQ ID NO: 181853 - DNA, 25 bp, SARS Virus
tggctttagcatggtcaagggtaat

SEQ ID NO: 181854 - DNA, 25 bp, SARS Virus
ggctttagcatggtcaagggtaatt

SEQ ID NO: 181855 - DNA, 25 bp, SARS Virus
gctttagcatgggcaagggtaattc

SEQ ID NO: 181856 - DNA, 25 bp, SARS Virus
ctttagcatggtgaagggtaattct

SEQ ID NO: 181857 - DNA, 25 bp, SARS Virus
tttagcatggtcgagggtaattcta

SEQ ID NO: 181858 - DNA, 25 bp, SARS Virus
ttagcatggtcaggggtaattctag

SEQ ID NO: 181859 - DNA, 25 bp, SARS Virus
tagcatggtcaagggtaattctagg

SEQ ID NO: 181860 - DNA, 25 bp, SARS Virus
agcatggtcaagggtaattctagga

SEQ ID NO: 181861 - DNA, 25 bp, SARS Virus
gcatggtcaagggtaattctaggac

SEQ ID NO: 181862 - DNA, 25 bp, SARS Virus
catggtcaaggggaattctaggact

SEQ ID NO: 181863 - DNA, 25 bp, SARS Virus
atggtcaagggtgattctaggacta

SEQ ID NO: 181864 - DNA, 25 bp, SARS Virus
tggtcaagggtagttctaggactaa

SEQ ID NO: 181865 - DNA, 25 bp, SARS Virus
ggtcaagggtaagtctaggactaat

SEQ ID NO: 181866 - DNA, 25 bp, SARS Virus
gtcaagggtaatgctaggactaata

SEQ ID NO: 181867 - DNA, 25 bp, SARS Virus
tcaagggtaattgtaggactaatag

SEQ ID NO: 181868 - DNA, 25 bp, SARS Virus
caagggtaattcgaggactaataga

SEQ ID NO: 181869 - DNA, 25 bp, SARS Virus
aagggtaattctgggactaatagat

SEQ ID NO: 181870 - DNA, 25 bp, SARS Virus
agggtaattctaggactaatagatt

SEQ ID NO: 181871 - DNA, 25 bp, SARS Virus
gggtaattctaggactaatagatta

SEQ ID NO: 181872 - DNA, 25 bp, SARS Virus
ggtaattctagggctaatagattac

SEQ ID NO: 181873 - DNA, 25 bp, SARS Virus
gtaattctaggagtaatagattaca

SEQ ID NO: 181874 - DNA, 25 bp, SARS Virus
taattctaggacgaatagattacag

SEQ ID NO: 181875 - DNA, 25 bp, SARS Virus
aattctaggactgatagattacagt

SEQ ID NO: 181876 - DNA, 25 bp, SARS Virus
attctaggactagtagattacagtc

SEQ ID NO: 181877 - DNA, 25 bp, SARS Virus
ttctaggactaagagattacagtca

SEQ ID NO: 181878 - DNA, 25 bp, SARS Virus
tctaggactaatggattacagtcat

SEQ ID NO: 181879 - DNA, 25 bp, SARS Virus
ctaggactaatagattacagtcatg

SEQ ID NO: 181880 - DNA, 25 bp, SARS Virus
taggactaataggttacagtcatgc

SEQ ID NO: 181881 - DNA, 25 bp, SARS Virus
aggactaatagagtacagtcatgcg

SEQ ID NO: 181882 - DNA, 25 bp, SARS Virus
ggactaatagatgacagtcatgcgg

SEQ ID NO: 181883 - DNA, 25 bp, SARS Virus
gactaatagattgcagtcatgcgga

SEQ ID NO: 181884 - DNA, 25 bp, SARS Virus
actaatagattagagtcatgcggat

SEQ ID NO: 181885 - DNA, 25 bp, SARS Virus
ctaatagattacggtcatgcggatg

SEQ ID NO: 181886 - DNA, 25 bp, SARS Virus
taatagattacagtcatgcggatgt

SEQ ID NO: 181887 - DNA, 25 bp, SARS Virus
aatagattacaggcatgcggatgtt

SEQ ID NO: 181888 - DNA, 25 bp, SARS Virus
atagattacagtgatgcggatgtta

SEQ ID NO: 181889 - DNA, 25 bp, SARS Virus
tagattacagtcgtgcggatgttac

SEQ ID NO: 181890 - DNA, 25 bp, SARS Virus
agattacagtcaggcggatgttacg

SEQ ID NO: 181891 - DNA, 25 bp, SARS Virus
gattacagtcatgcggatgttacgg

SEQ ID NO: 181892 - DNA, 25 bp, SARS Virus
attacagtcatggggatgttacgga

SEQ ID NO: 181893 - DNA, 25 bp, SARS Virus
ttacagtcatgcggatgttacggac

SEQ ID NO: 181894 - DNA, 25 bp, SARS Virus
tacagtcatgcggatgttacggacg

SEQ ID NO: 181895 - DNA, 25 bp, SARS Virus
acagtcatgcgggtgttacggacgt

SEQ ID NO: 181896 - DNA, 25 bp, SARS Virus
cagtcatgcggaggttacggacgta

SEQ ID NO: 181897 - DNA, 25 bp, SARS Virus
agtcatgcggatgttacggacgtag

SEQ ID NO: 181898 - DNA, 25 bp, SARS Virus
gtcatgcggatggtacggacgtagt

SEQ ID NO: 181899 - DNA, 25 bp, SARS Virus
tcatgcggatgtgacggacgtagtg

SEQ ID NO: 181900 - DNA, 25 bp, SARS Virus
catgcggatgttgcggacgtagtgc

SEQ ID NO: 181901 - DNA, 25 bp, SARS Virus
atgcggatgttagggacgtagtgcg

SEQ ID NO: 181902 - DNA, 25 bp, SARS Virus
tgcggatgttacggacgtagtgcgt

SEQ ID NO: 181903 - DNA, 25 bp, SARS Virus
gcggatgttacggacgtagtgcgta

SEQ ID NO: 181904 - DNA, 25 bp, SARS Virus
cggatgttacgggcgtagtgcgtat

SEQ ID NO: 181905 - DNA, 25 bp, SARS Virus
ggatgttacggaggtagtgcgtatc

SEQ ID NO: 181906 - DNA, 25 bp, SARS Virus
gatgttacggacgtagtgcgtatcg

SEQ ID NO: 181907 - DNA, 25 bp, SARS Virus
atgttacggacggagtgcgtatcgt

SEQ ID NO: 181908 - DNA, 25 bp, SARS Virus
tgttacggacgtggtgcgtatcgta

SEQ ID NO: 181909 - DNA, 25 bp, SARS Virus
gttacggacgtagtgcgtatcgtag

SEQ ID NO: 181910 - DNA, 25 bp, SARS Virus
ttacggacgtagggcgtatcgtagc

SEQ ID NO: 181911 - DNA, 25 bp, SARS Virus
tacggacgtagtgcgtatcgtagcg

SEQ ID NO: 181912 - DNA, 25 bp, SARS Virus
acggacgtagtgggtatcgtagcgt

SEQ ID NO: 181913 - DNA, 25 bp, SARS Virus
cggacgtagtgcgtatcgtagcgtc

SEQ ID NO: 181914 - DNA, 25 bp, SARS Virus
ggacgtagtgcggatcgtagcgtct

SEQ ID NO: 181915 - DNA, 25 bp, SARS Virus
gacgtagtgcgtgtcgtagcgtctt

SEQ ID NO: 181916 - DNA, 25 bp, SARS Virus
acgtagtgcgtagcgtagcgtctta

SEQ ID NO: 181917 - DNA, 25 bp, SARS Virus
cgtagtgcgtatggtagcgtcttaa

SEQ ID NO: 181918 - DNA, 25 bp, SARS Virus
gtagtgcgtatcgtagcgtcttaac

SEQ ID NO: 181919 - DNA, 25 bp, SARS Virus
tagtgcgtatcggagcgtcttaaca

SEQ ID NO: 181920 - DNA, 25 bp, SARS Virus
agtgcgtatcgtggcgtcttaacat

SEQ ID NO: 181921 - DNA, 25 bp, SARS Virus
gtgcgtatcgtagcgtcttaacatg

SEQ ID NO: 181922 - DNA, 25 bp, SARS Virus
tgcgtatcgtagggtcttaacatgt

SEQ ID NO: 181923 - DNA, 25 bp, SARS Virus
gcgtatcgtagcgtcttaacatgtc

SEQ ID NO: 181924 - DNA, 25 bp, SARS Virus
cgtatcgtagcggcttaacatgtca

SEQ ID NO: 181925 - DNA, 25 bp, SARS Virus
gtatcgtagcgtgttaacatgtcag

SEQ ID NO: 181926 - DNA, 25 bp, SARS Virus
tatcgtagcgtcgtaacatgtcaga

SEQ ID NO: 181927 - DNA, 25 bp, SARS Virus
atcgtagcgtctgaacatgtcagaa

SEQ ID NO: 181928 - DNA, 25 bp, SARS Virus
tcgtagcgtcttgacatgtcagaaa

SEQ ID NO: 181929 - DNA, 25 bp, SARS Virus
cgtagcgtcttagcatgtcagaaat

SEQ ID NO: 181930 - DNA, 25 bp, SARS Virus
gtagcgtcttaagatgtcagaaatt

SEQ ID NO: 181931 - DNA, 25 bp, SARS Virus
tagcgtcttaacgtgtcagaaatta

SEQ ID NO: 181932 - DNA, 25 bp, SARS Virus
agcgtcttaacaggtcagaaattat

SEQ ID NO: 181933 - DNA, 25 bp, SARS Virus
gcgtcttaacatgtcagaaattatt

SEQ ID NO: 181934 - DNA, 25 bp, SARS Virus
cgtcttaacatggcagaaattatta

SEQ ID NO: 181935 - DNA, 25 bp, SARS Virus
gtcttaacatgtgagaaattattac

SEQ ID NO: 181936 - DNA, 25 bp, SARS Virus
tcttaacatgtcggaaattattact

SEQ ID NO: 181937 - DNA, 25 bp, SARS Virus
cttaacatgtcagaaattattacta

SEQ ID NO: 181938 - DNA, 25 bp, SARS Virus
ttaacatgtcaggaattattactaa

SEQ ID NO: 181939 - DNA, 25 bp, SARS Virus
taacatgtcagagattattactaac

SEQ ID NO: 181940 - DNA, 25 bp, SARS Virus
aacatgtcagaagttattactaacc

SEQ ID NO: 181941 - DNA, 25 bp, SARS Virus
acatgtcagaaagtattactaaccg

SEQ ID NO: 181942 - DNA, 25 bp, SARS Virus
catgtcagaaatgattactaaccgc

SEQ ID NO: 181943 - DNA, 25 bp, SARS Virus
atgtcagaaattgttactaaccgca

SEQ ID NO: 181944 - DNA, 25 bp, SARS Virus
tgtcagaaattagtactaaccgcat

SEQ ID NO: 181945 - DNA, 25 bp, SARS Virus
gtcagaaattatgactaaccgcatg

SEQ ID NO: 181946 - DNA, 25 bp, SARS Virus
tcagaaattattgctaaccgcatgt

SEQ ID NO: 181947 - DNA, 25 bp, SARS Virus
cagaaattattagtaaccgcatgtg

SEQ ID NO: 181948 - DNA, 25 bp, SARS Virus
agaaattattacgaaccgcatgtgc

SEQ ID NO: 181949 - DNA, 25 bp, SARS Virus
gaaattattactgaccgcatgtgcg

SEQ ID NO: 181950 - DNA, 25 bp, SARS Virus
aaattattactagccgcatgtgcga

SEQ ID NO: 181951 - DNA, 25 bp, SARS Virus
aattattactaagcgcatgtgcgag

SEQ ID NO: 181952 - DNA, 25 bp, SARS Virus
attattactaacggcatgtgcgagt

SEQ ID NO: 181953 - DNA, 25 bp, SARS Virus
ttattactaaccgcatgtgcgagtg

SEQ ID NO: 181954 - DNA, 25 bp, SARS Virus
tattactaaccggatgtgcgagtgg

SEQ ID NO: 181955 - DNA, 25 bp, SARS Virus
attactaaccgcgtgtgcgagtgga

SEQ ID NO: 181956 - DNA, 25 bp, SARS Virus
ttactaaccgcaggtgcgagtggat

SEQ ID NO: 181957 - DNA, 25 bp, SARS Virus
tactaaccgcatgtgcgagtggatt

SEQ ID NO: 181958 - DNA, 25 bp, SARS Virus
actaaccgcatgggcgagtggattc

SEQ ID NO: 181959 - DNA, 25 bp, SARS Virus
ctaaccgcatgtgcgagtggattca

SEQ ID NO: 181960 - DNA, 25 bp, SARS Virus
taaccgcatgtgggagtggattcaa

SEQ ID NO: 181961 - DNA, 25 bp, SARS Virus
aaccgcatgtgcgagtggattcaat

SEQ ID NO: 181962 - DNA, 25 bp, SARS Virus
accgcatgtgcgggtggattcaatc

SEQ ID NO: 181963 - DNA, 25 bp, SARS Virus
ccgcatgtgcgagtggattcaatcg

SEQ ID NO: 181964 - DNA, 25 bp, SARS Virus
cgcatgtgcgaggggattcaatcgt

SEQ ID NO: 181965 - DNA, 25 bp, SARS Virus
gcatgtgcgagtggattcaatcgta

SEQ ID NO: 181966 - DNA, 25 bp, SARS Virus
catgtgcgagtggattcaatcgtat

SEQ ID NO: 181967 - DNA, 25 bp, SARS Virus
atgtgcgagtgggttcaatcgtata

SEQ ID NO: 181968 - DNA, 25 bp, SARS Virus
tgtgcgagtggagtcaatcgtatat

SEQ ID NO: 181969 - DNA, 25 bp, SARS Virus
gtgcgagtggatgcaatcgtatatg

SEQ ID NO: 181970 - DNA, 25 bp, SARS Virus
tgcgagtggattgaatcgtatatgc

SEQ ID NO: 181971 - DNA, 25 bp, SARS Virus
gcgagtggattcgatcgtatatgcg

SEQ ID NO: 181972 - DNA, 25 bp, SARS Virus
cgagtggattcagtcgtatatgcgc

SEQ ID NO: 181973 - DNA, 25 bp, SARS Virus
gagtggattcaagcgtatatgcgca

SEQ ID NO: 181974 - DNA, 25 bp, SARS Virus
agtggattcaatggtatatgcgcat

SEQ ID NO: 181975 - DNA, 25 bp, SARS Virus
gtggattcaatcgtatatgcgcatt

SEQ ID NO: 181976 - DNA, 25 bp, SARS Virus
tggattcaatcggatatgcgcattc

SEQ ID NO: 181977 - DNA, 25 bp, SARS Virus
ggattcaatcgtgtatgcgcattct

SEQ ID NO: 181978 - DNA, 25 bp, SARS Virus
gattcaatcgtagatgcgcattcta

SEQ ID NO: 181979 - DNA, 25 bp, SARS Virus
attcaatcgtatgtgcgcattctac

SEQ ID NO: 181980 - DNA, 25 bp, SARS Virus
ttcaatcgtataggcgcattctaca

SEQ ID NO: 181981 - DNA, 25 bp, SARS Virus
tcaatcgtatatgcgcattctacag

SEQ ID NO: 181982 - DNA, 25 bp, SARS Virus
caatcgtatatgggcattctacagt

SEQ ID NO: 181983 - DNA, 25 bp, SARS Virus
aatcgtatatgcgcattctacagtc

SEQ ID NO: 181984 - DNA, 25 bp, SARS Virus
atcgtatatgcggattctacagtcc

SEQ ID NO: 181985 - DNA, 25 bp, SARS Virus
tcgtatatgcgcgttctacagtcct

SEQ ID NO: 181986 - DNA, 25 bp, SARS Virus
cgtatatgcgcagtctacagtccta

SEQ ID NO: 181987 - DNA, 25 bp, SARS Virus
gtatatgcgcatgctacagtcctaa

SEQ ID NO: 181988 - DNA, 25 bp, SARS Virus
tatatgcgcattgtacagtcctaag

SEQ ID NO: 181989 - DNA, 25 bp, SARS Virus
atatgcgcattcgacagtcctaaga

SEQ ID NO: 181990 - DNA, 25 bp, SARS Virus
tatgcgcattctgcagtcctaagag

SEQ ID NO: 181991 - DNA, 25 bp, SARS Virus
atgcgcattctagagtcctaagaga

SEQ ID NO: 181992 - DNA, 25 bp, SARS Virus
tgcgcattctacggtcctaagagat

SEQ ID NO: 181993 - DNA, 25 bp, SARS Virus
gcgcattctacagtcctaagagatg

SEQ ID NO: 181994 - DNA, 25 bp, SARS Virus
cgcattctacaggcctaagagatgc

SEQ ID NO: 181995 - DNA, 25 bp, SARS Virus
gcattctacagtgctaagagatgct

SEQ ID NO: 181996 - DNA, 25 bp, SARS Virus
cattctacagtcgtaagagatgctt

SEQ ID NO: 181997 - DNA, 25 bp, SARS Virus
attctacagtccgaagagatgcttc

SEQ ID NO: 181998 - DNA, 25 bp, SARS Virus
ttctacagtcctgagagatgcttca

SEQ ID NO: 181999 - DNA, 25 bp, SARS Virus
tctacagtcctaggagatgcttcag

SEQ ID NO: 182000 - DNA, 25 bp, SARS Virus
ctacagtcctaagagatgcttcagt

SEQ ID NO: 182001 - DNA, 25 bp, SARS Virus
tacagtcctaagggatgcttcagta

SEQ ID NO: 182002 - DNA, 25 bp, SARS Virus
acagtcctaagagatgcttcagtat

SEQ ID NO: 182003 - DNA, 25 bp, SARS Virus
cagtcctaagaggtgcttcagtatg

SEQ ID NO: 182004 - DNA, 25 bp, SARS Virus
agtcctaagagaggcttcagtatgg

SEQ ID NO: 182005 - DNA, 25 bp, SARS Virus
gtcctaagagatgcttcagtatggt

SEQ ID NO: 182006 - DNA, 25 bp, SARS Virus
tcctaagagatggttcagtatggtt

SEQ ID NO: 182007 - DNA, 25 bp, SARS Virus
cctaagagatgcgtcagtatggtta

SEQ ID NO: 182008 - DNA, 25 bp, SARS Virus
ctaagagatgctgcagtatggttag

SEQ ID NO: 182009 - DNA, 25 bp, SARS Virus
taagagatgcttgagtatggttagg

SEQ ID NO: 182010 - DNA, 25 bp, SARS Virus
aagagatgcttcggtatggttagga

SEQ ID NO: 182011 - DNA, 25 bp, SARS Virus
agagatgcttcagtatggttaggaa

SEQ ID NO: 182012 - DNA, 25 bp, SARS Virus
gagatgcttcaggatggttaggaag

SEQ ID NO: 182013 - DNA, 25 bp, SARS Virus
agatgcttcagtgtggttaggaaga

SEQ ID NO: 182014 - DNA, 25 bp, SARS Virus
gatgcttcagtagggttaggaagaa

SEQ ID NO: 182015 - DNA, 25 bp, SARS Virus
atgcttcagtatggttaggaagaat

SEQ ID NO: 182016 - DNA, 25 bp, SARS Virus
tgcttcagtatggttaggaagaata

SEQ ID NO: 182017 - DNA, 25 bp, SARS Virus
gcttcagtatgggtaggaagaataa

SEQ ID NO: 182018 - DNA, 25 bp, SARS Virus
cttcagtatggtgaggaagaataac

SEQ ID NO: 182019 - DNA, 25 bp, SARS Virus
ttcagtatggttgggaagaataact

SEQ ID NO: 182020 - DNA, 25 bp, SARS Virus
tcagtatggttaggaagaataactt

SEQ ID NO: 182021 - DNA, 25 bp, SARS Virus
cagtatggttaggaagaataacttt

SEQ ID NO: 182022 - DNA, 25 bp, SARS Virus
agtatggttagggagaataacttta

SEQ ID NO: 182023 - DNA, 25 bp, SARS Virus
gtatggttaggaggaataactttat

SEQ ID NO: 182024 - DNA, 25 bp, SARS Virus
tatggttaggaagaataactttatt

SEQ ID NO: 182025 - DNA, 25 bp, SARS Virus
atggttaggaaggataactttatta

SEQ ID NO: 182026 - DNA, 25 bp, SARS Virus
tggttaggaagagtaactttattag

SEQ ID NO: 182027 - DNA, 25 bp, SARS Virus
ggttaggaagaagaactttattagt

SEQ ID NO: 182028 - DNA, 25 bp, SARS Virus
gttaggaagaatgactttattagta

SEQ ID NO: 182029 - DNA, 25 bp, SARS Virus
ttaggaagaatagctttattagtag

SEQ ID NO: 182030 - DNA, 25 bp, SARS Virus
taggaagaataagtttattagtagt

SEQ ID NO: 182031 - DNA, 25 bp, SARS Virus
aggaagaataacgttattagtagta

SEQ ID NO: 182032 - DNA, 25 bp, SARS Virus
ggaagaataactgtattagtagtag

SEQ ID NO: 182033 - DNA, 25 bp, SARS Virus
gaagaataacttgattagtagtagt

SEQ ID NO: 182034 - DNA, 25 bp, SARS Virus
aagaataactttgttagtagtagtg

SEQ ID NO: 182035 - DNA, 25 bp, SARS Virus
agaataactttagtagtagtagtgt

SEQ ID NO: 182036 - DNA, 25 bp, SARS Virus
gaataactttatgagtagtagtgtc

SEQ ID NO: 182037 - DNA, 25 bp, SARS Virus
aataactttattggtagtagtgtcg

SEQ ID NO: 182038 - DNA, 25 bp, SARS Virus
ataactttattagtagtagtgtcgt

SEQ ID NO: 182039 - DNA, 25 bp, SARS Virus
taactttattaggagtagtgtcgtt

SEQ ID NO: 182040 - DNA, 25 bp, SARS Virus
aactttattagtggtagtgtcgtta

SEQ ID NO: 182041 - DNA, 25 bp, SARS Virus
actttattagtagtagtgtcgttaa

SEQ ID NO: 182042 - DNA, 25 bp, SARS Virus
ctttattagtaggagtgtcgttaac

SEQ ID NO: 182043 - DNA, 25 bp, SARS Virus
tttattagtagtggtgtcgttaaca

SEQ ID NO: 182044 - DNA, 25 bp, SARS Virus
ttattagtagtagtgtcgttaacat

SEQ ID NO: 182045 - DNA, 25 bp, SARS Virus
tattagtagtagggtcgttaacata

SEQ ID NO: 182046 - DNA, 25 bp, SARS Virus
attagtagtagtgtcgttaacatac

SEQ ID NO: 182047 - DNA, 25 bp, SARS Virus
ttagtagtagtggcgttaacataca

SEQ ID NO: 182048 - DNA, 25 bp, SARS Virus
tagtagtagtgtggttaacatacac

SEQ ID NO: 182049 - DNA, 25 bp, SARS Virus
agtagtagtgtcgttaacatacact

SEQ ID NO: 182050 - DNA, 25 bp, SARS Virus
gtagtagtgtcggtaacatacactg

SEQ ID NO: 182051 - DNA, 25 bp, SARS Virus
tagtagtgtcgtgaacatacactgc

SEQ ID NO: 182052 - DNA, 25 bp, SARS Virus
agtagtgtcgttgacatacactgct

SEQ ID NO: 182053 - DNA, 25 bp, SARS Virus
gtagtgtcgttagcatacactgctc

SEQ ID NO: 182054 - DNA, 25 bp, SARS Virus
tagtgtcgttaagatacactgctca

SEQ ID NO: 182055 - DNA, 25 bp, SARS Virus
agtgtcgttaacgtacactgctcat

SEQ ID NO: 182056 - DNA, 25 bp, SARS Virus
gtgtcgttaacagacactgctcata

SEQ ID NO: 182057 - DNA, 25 bp, SARS Virus
tgtaatttcaaatgtgttacttcct

SEQ ID NO: 182058 - DNA, 25 bp, SARS Virus
gtaatttcaaacttgttacttccta

SEQ ID NO: 182059 - DNA, 25 bp, SARS Virus
taatttcaaacgtgttacttcctat

SEQ ID NO: 182060 - DNA, 25 bp, SARS Virus
aatttcaaacgttttacttcctatg

SEQ ID NO: 182061 - DNA, 25 bp, SARS Virus
atttcaaacgtgttacttcctatgt

SEQ ID NO: 182062 - DNA, 25 bp, SARS Virus
tttcaaacgtgttacttcctatgtg

SEQ ID NO: 182063 - DNA, 25 bp, SARS Virus
ttcaaacgtgtttcttcctatgtgg

SEQ ID NO: 182064 - DNA, 25 bp, SARS Virus
tcaaacgtgttatttcctatgtgga

SEQ ID NO: 182065 - DNA, 25 bp, SARS Virus
caaacgtgttacttcctatgtggat

SEQ ID NO: 182066 - DNA, 25 bp, SARS Virus
aaacgtgttacttcctatgtggata

SEQ ID NO: 182067 - DNA, 25 bp, SARS Virus
aacgtgttactttctatgtggatag

SEQ ID NO: 182068 - DNA, 25 bp, SARS Virus
acgtgttacttcttatgtggatagt

SEQ ID NO: 182069 - DNA, 25 bp, SARS Virus
cgtgttacttcctatgtggatagta

SEQ ID NO: 182070 - DNA, 25 bp, SARS Virus
gtgttacttcctttgtggatagtag

SEQ ID NO: 182071 - DNA, 25 bp, SARS Virus
tgttacttcctatgtggatagtagg

SEQ ID NO: 182072 - DNA, 25 bp, SARS Virus
gttacttcctatttggatagtaggt

SEQ ID NO: 182073 - DNA, 25 bp, SARS Virus
ttacttcctatgtggatagtaggtt

SEQ ID NO: 182074 - DNA, 25 bp, SARS Virus
tacttcctatgttgatagtaggttt

SEQ ID NO: 182075 - DNA, 25 bp, SARS Virus
acttcctatgtgtatagtaggtttg

SEQ ID NO: 182076 - DNA, 25 bp, SARS Virus
cttcctatgtggttagtaggtttgt

SEQ ID NO: 182077 - DNA, 25 bp, SARS Virus
ttcctatgtggatagtaggtttgtc

SEQ ID NO: 182078 - DNA, 25 bp, SARS Virus
tcctatgtggattgtaggtttgtca

SEQ ID NO: 182079 - DNA, 25 bp, SARS Virus
cctatgtggatattaggtttgtcaa

SEQ ID NO: 182080 - DNA, 25 bp, SARS Virus
ctatgtggatagtaggtttgtcaat

SEQ ID NO: 182081 - DNA, 25 bp, SARS Virus
tatgtggatagttggtttgtcaatt

SEQ ID NO: 182082 - DNA, 25 bp, SARS Virus
atgtggatagtatgtttgtcaatta

SEQ ID NO: 182083 - DNA, 25 bp, SARS Virus
tgtggatagtagttttgtcaattat

SEQ ID NO: 182084 - DNA, 25 bp, SARS Virus
gtggatagtaggtttgtcaattatg

SEQ ID NO: 182085 - DNA, 25 bp, SARS Virus
tggatagtaggtttgtcaattatgt

SEQ ID NO: 182086 - DNA, 25 bp, SARS Virus
ggatagtaggtttgtcaattatgtt

SEQ ID NO: 182087 - DNA, 25 bp, SARS Virus
gatagtaggtttttcaattatgtta

SEQ ID NO: 182088 - DNA, 25 bp, SARS Virus
atagtaggtttgtcaattatgttaa

SEQ ID NO: 182089 - DNA, 25 bp, SARS Virus
tagtaggtttgttaattatgttaac

SEQ ID NO: 182090 - DNA, 25 bp, SARS Virus
agtaggtttgtctattatgttaacc

SEQ ID NO: 182091 - DNA, 25 bp, SARS Virus
gtaggtttgtcatttatgttaaccc

SEQ ID NO: 182092 - DNA, 25 bp, SARS Virus
taggtttgtcaattatgttaaccct

SEQ ID NO: 182093 - DNA, 25 bp, SARS Virus
aggtttgtcaattatgttaacccta

SEQ ID NO: 182094 - DNA, 25 bp, SARS Virus
ggtttgtcaattttgttaaccctac

SEQ ID NO: 182095 - DNA, 25 bp, SARS Virus
gtttgtcaattatgttaaccctacc

SEQ ID NO: 182096 - DNA, 25 bp, SARS Virus
tttgtcaattattttaaccctacca

SEQ ID NO: 182097 - DNA, 25 bp, SARS Virus
ttgtcaattatgttaaccctaccat

SEQ ID NO: 182098 - DNA, 25 bp, SARS Virus
tgtcaattatgttaaccctaccata

SEQ ID NO: 182099 - DNA, 25 bp, SARS Virus
gtcaattatgtttaccctaccatac

SEQ ID NO: 182100 - DNA, 25 bp, SARS Virus
tcaattatgttatccctaccataca

SEQ ID NO: 182101 - DNA, 25 bp, SARS Virus
caattatgttaatcctaccatacag

SEQ ID NO: 182102 - DNA, 25 bp, SARS Virus
aattatgttaactctaccatacaga

SEQ ID NO: 182103 - DNA, 25 bp, SARS Virus
attatgttaaccttaccatacagac

SEQ ID NO: 182104 - DNA, 25 bp, SARS Virus
ttatgttaaccctaccatacagacc

SEQ ID NO: 182105 - DNA, 25 bp, SARS Virus
tatgttaacccttccatacagacca

SEQ ID NO: 182106 - DNA, 25 bp, SARS Virus
atgttaaccctatcatacagaccag

SEQ ID NO: 182107 - DNA, 25 bp, SARS Virus
tgttaaccctactatacagaccagg

SEQ ID NO: 182108 - DNA, 25 bp, SARS Virus
gttaaccctaccttacagaccaggg

SEQ ID NO: 182109 - DNA, 25 bp, SARS Virus
ttaaccctaccatacagaccagggt

SEQ ID NO: 182110 - DNA, 25 bp, SARS Virus
taaccctaccattcagaccagggtt

SEQ ID NO: 182111 - DNA, 25 bp, SARS Virus
aaccctaccatatagaccagggtta

SEQ ID NO: 182112 - DNA, 25 bp, SARS Virus
accctaccatactgaccagggttat

SEQ ID NO: 182113 - DNA, 25 bp, SARS Virus
ccctaccatacataccagggttata

SEQ ID NO: 182114 - DNA, 25 bp, SARS Virus
cctaccatacagtccagggttataa

SEQ ID NO: 182115 - DNA, 25 bp, SARS Virus
ctaccatacagatcagggttataaa

SEQ ID NO: 182116 - DNA, 25 bp, SARS Virus
taccatacagactagggttataaat

SEQ ID NO: 182117 - DNA, 25 bp, SARS Virus
accatacagacctgggttataaatt

SEQ ID NO: 182118 - DNA, 25 bp, SARS Virus
ccatacagaccatggttataaattt

SEQ ID NO: 182119 - DNA, 25 bp, SARS Virus
catacagaccagtgttataaatttt

SEQ ID NO: 182120 - DNA, 25 bp, SARS Virus
atacagaccaggtttataaatttta

SEQ ID NO: 182121 - DNA, 25 bp, SARS Virus
tacagaccagggttataaattttat

SEQ ID NO: 182122 - DNA, 25 bp, SARS Virus
acagaccagggttataaattttatt

SEQ ID NO: 182123 - DNA, 25 bp, SARS Virus
cagaccagggttttaaattttattg

SEQ ID NO: 182124 - DNA, 25 bp, SARS Virus
agaccagggttataaattttattgc

SEQ ID NO: 182125 - DNA, 25 bp, SARS Virus
gaccagggttattaattttattgcc

SEQ ID NO: 182126 - DNA, 25 bp, SARS Virus
accagggttatatattttattgcca

SEQ ID NO: 182127 - DNA, 25 bp, SARS Virus
ccagggttataatttttattgccag

SEQ ID NO: 182128 - DNA, 25 bp, SARS Virus
cagggttataaattttattgccagc

SEQ ID NO: 182129 - DNA, 25 bp, SARS Virus
agggttataaattttattgccagct

SEQ ID NO: 182130 - DNA, 25 bp, SARS Virus
gggttataaattttattgccagctt

SEQ ID NO: 182131 - DNA, 25 bp, SARS Virus
ggttataaattttattgccagcttc

SEQ ID NO: 182132 - DNA, 25 bp, SARS Virus
gttataaatttttttgccagcttct

SEQ ID NO: 182133 - DNA, 25 bp, SARS Virus
ttataaattttattgccagcttctc

SEQ ID NO: 182134 - DNA, 25 bp, SARS Virus
tataaattttattgccagcttctct

SEQ ID NO: 182135 - DNA, 25 bp, SARS Virus
ataaattttatttccagcttctctg

SEQ ID NO: 182136 - DNA, 25 bp, SARS Virus
taaattttattgtcagcttctctgt

SEQ ID NO: 182137 - DNA, 25 bp, SARS Virus
aaattttattgctagcttctctgtt

SEQ ID NO: 182138 - DNA, 25 bp, SARS Virus
aattttattgcctgcttctctgttt

SEQ ID NO: 182139 - DNA, 25 bp, SARS Virus
attttattgccatcttctctgtttc

SEQ ID NO: 182140 - DNA, 25 bp, SARS Virus
ttttattgccagtttctctgtttca

SEQ ID NO: 182141 - DNA, 25 bp, SARS Virus
tttattgccagcttctctgtttcag

SEQ ID NO: 182142 - DNA, 25 bp, SARS Virus
ttattgccagcttctctgtttcaga

SEQ ID NO: 182143 - DNA, 25 bp, SARS Virus
tattgccagcttttctgtttcagag

SEQ ID NO: 182144 - DNA, 25 bp, SARS Virus
attgccagcttctctgtttcagaga

SEQ ID NO: 182145 - DNA, 25 bp, SARS Virus
ttgccagcttctttgtttcagagag

SEQ ID NO: 182146 - DNA, 25 bp, SARS Virus
tgccagcttctctgtttcagagaga

SEQ ID NO: 182147 - DNA, 25 bp, SARS Virus
gccagcttctctttttcagagagaa

SEQ ID NO: 182148 - DNA, 25 bp, SARS Virus
ccagcttctctgtttcagagagaag

SEQ ID NO: 182149 - DNA, 25 bp, SARS Virus
cagcttctctgtttcagagagaagg

SEQ ID NO: 182150 - DNA, 25 bp, SARS Virus
agcttctctgtttcagagagaaggc

SEQ ID NO: 182151 - DNA, 25 bp, SARS Virus
gcttctctgttttagagagaaggca

SEQ ID NO: 182152 - DNA, 25 bp, SARS Virus
cttctctgtttctgagagaaggcat

SEQ ID NO: 182153 - DNA, 25 bp, SARS Virus
ttctctgtttcatagagaaggcatt

SEQ ID NO: 182154 - DNA, 25 bp, SARS Virus
tctctgtttcagtgagaaggcattt

SEQ ID NO: 182155 - DNA, 25 bp, SARS Virus
ctctgtttcagatagaaggcatttt

SEQ ID NO: 182156 - DNA, 25 bp, SARS Virus
tctgtttcagagtgaaggcatttta

SEQ ID NO: 182157 - DNA, 25 bp, SARS Virus
ctgtttcagagataaggcattttag

SEQ ID NO: 182158 - DNA, 25 bp, SARS Virus
tgtttcagagagtaggcattttagt

SEQ ID NO: 182159 - DNA, 25 bp, SARS Virus
gtttcagagagatggcattttagta

SEQ ID NO: 182160 - DNA, 25 bp, SARS Virus
tttcagagagaatgcattttagtat

SEQ ID NO: 182161 - DNA, 25 bp, SARS Virus
ttcagagagaagtcattttagtata

SEQ ID NO: 182162 - DNA, 25 bp, SARS Virus
tcagagagaaggtattttagtataa

SEQ ID NO: 182163 - DNA, 25 bp, SARS Virus
cagagagaaggctttttagtataaa

SEQ ID NO: 182164 - DNA, 25 bp, SARS Virus
agagagaaggcattttagtataaag

SEQ ID NO: 182165 - DNA, 25 bp, SARS Virus
gagagaaggcattttagtataaagt

SEQ ID NO: 182166 - DNA, 25 bp, SARS Virus
agagaaggcattttagtataaagtc

SEQ ID NO: 182167 - DNA, 25 bp, SARS Virus
gagaaggcattttagtataaagtcg

SEQ ID NO: 182168 - DNA, 25 bp, SARS Virus
agaaggcatttttgtataaagtcgt

SEQ ID NO: 182169 - DNA, 25 bp, SARS Virus
gaaggcattttattataaagtcgtt

SEQ ID NO: 182170 - DNA, 25 bp, SARS Virus
aaggcattttagtataaagtcgttt

SEQ ID NO: 182171 - DNA, 25 bp, SARS Virus
aggcattttagtttaaagtcgttta

SEQ ID NO: 182172 - DNA, 25 bp, SARS Virus
ggcattttagtataaagtcgtttag

SEQ ID NO: 182173 - DNA, 25 bp, SARS Virus
gcattttagtattaagtcgtttagg

SEQ ID NO: 182174 - DNA, 25 bp, SARS Virus
cattttagtatatagtcgtttaggg

SEQ ID NO: 182175 - DNA, 25 bp, SARS Virus
attttagtataatgtcgtttagggt

SEQ ID NO: 182176 - DNA, 25 bp, SARS Virus
ttttagtataaattcgtttagggtg

SEQ ID NO: 182177 - DNA, 25 bp, SARS Virus
tttagtataaagtcgtttagggtga

SEQ ID NO: 182178 - DNA, 25 bp, SARS Virus
ttagtataaagttgtttagggtgaa

SEQ ID NO: 182179 - DNA, 25 bp, SARS Virus
tagtataaagtcttttagggtgaat

SEQ ID NO: 182180 - DNA, 25 bp, SARS Virus
agtataaagtcgtttagggtgaatt

SEQ ID NO: 182181 - DNA, 25 bp, SARS Virus
gtataaagtcgtttagggtgaatta

SEQ ID NO: 182182 - DNA, 25 bp, SARS Virus
tataaagtcgtttagggtgaattat

SEQ ID NO: 182183 - DNA, 25 bp, SARS Virus
ataaagtcgttttgggtgaattatt

SEQ ID NO: 182184 - DNA, 25 bp, SARS Virus
taaagtcgtttatggtgaattattc

SEQ ID NO: 182185 - DNA, 25 bp, SARS Virus
aaagtcgtttagtgtgaattattca

SEQ ID NO: 182186 - DNA, 25 bp, SARS Virus
aagtcgtttaggttgaattattcac

SEQ ID NO: 182187 - DNA, 25 bp, SARS Virus
agtcgtttagggtgaattattcacc

SEQ ID NO: 182188 - DNA, 25 bp, SARS Virus
gtcgtttagggttaattattcacca

SEQ ID NO: 182189 - DNA, 25 bp, SARS Virus
tcgtttagggtgtattattcaccaa

SEQ ID NO: 182190 - DNA, 25 bp, SARS Virus
cgtttagggtgatttattcaccaaa

SEQ ID NO: 182191 - DNA, 25 bp, SARS Virus
gtttagggtgaattattcaccaaaa

SEQ ID NO: 182192 - DNA, 25 bp, SARS Virus
tttagggtgaattattcaccaaaac

SEQ ID NO: 182193 - DNA, 25 bp, SARS Virus
ttagggtgaatttttcaccaaaacg

SEQ ID NO: 182194 - DNA, 25 bp, SARS Virus
tagggtgaattattcaccaaaacgc

SEQ ID NO: 182195 - DNA, 25 bp, SARS Virus
agggtgaattattcaccaaaacgct

SEQ ID NO: 182196 - DNA, 25 bp, SARS Virus
gggtgaattatttaccaaaacgctc

SEQ ID NO: 182197 - DNA, 25 bp, SARS Virus
ggtgaattattctccaaaacgctct

SEQ ID NO: 182198 - DNA, 25 bp, SARS Virus
gtgaattattcatcaaaacgctcta

SEQ ID NO: 182199 - DNA, 25 bp, SARS Virus
tgaattattcactaaaacgctctag

SEQ ID NO: 182200 - DNA, 25 bp, SARS Virus
gaattattcacctaaacgctctagt

SEQ ID NO: 182201 - DNA, 25 bp, SARS Virus
aattattcaccataacgctctagtc

SEQ ID NO: 182202 - DNA, 25 bp, SARS Virus
attattcaccaatacgctctagtcg

SEQ ID NO: 182203 - DNA, 25 bp, SARS Virus
ttattcaccaaatcgctctagtcgt

SEQ ID NO: 182204 - DNA, 25 bp, SARS Virus
tattcaccaaaatgctctagtcgta

SEQ ID NO: 182205 - DNA, 25 bp, SARS Virus
attcaccaaaactctctagtcgtag

SEQ ID NO: 182206 - DNA, 25 bp, SARS Virus
ttcaccaaaacgttctagtcgtagg

SEQ ID NO: 182207 - DNA, 25 bp, SARS Virus
tcaccaaaacgctctagtcgtaggt

SEQ ID NO: 182208 - DNA, 25 bp, SARS Virus
caccaaaacgctttagtcgtaggta

SEQ ID NO: 182209 - DNA, 25 bp, SARS Virus
accaaaacgctctagtcgtaggtat

SEQ ID NO: 182210 - DNA, 25 bp, SARS Virus
ccaaaacgctcttgtcgtaggtata

SEQ ID NO: 182211 - DNA, 25 bp, SARS Virus
caaaacgctctattcgtaggtatac

SEQ ID NO: 182212 - DNA, 25 bp, SARS Virus
aaaacgctctagtcgtaggtatacc

SEQ ID NO: 182213 - DNA, 25 bp, SARS Virus
aaacgctctagttgtaggtataccc

SEQ ID NO: 182214 - DNA, 25 bp, SARS Virus
aacgctctagtcttaggtataccct

SEQ ID NO: 182215 - DNA, 25 bp, SARS Virus
acgctctagtcgtaggtataccctg

SEQ ID NO: 182216 - DNA, 25 bp, SARS Virus
cgctctagtcgttggtataccctga

SEQ ID NO: 182217 - DNA, 25 bp, SARS Virus
gctctagtcgtatgtataccctgag

SEQ ID NO: 182218 - DNA, 25 bp, SARS Virus
ctctagtcgtagttataccctgagt

SEQ ID NO: 182219 - DNA, 25 bp, SARS Virus
tctagtcgtaggtataccctgagtc

SEQ ID NO: 182220 - DNA, 25 bp, SARS Virus
ctagtcgtaggtttaccctgagtcg

SEQ ID NO: 182221 - DNA, 25 bp, SARS Virus
tagtcgtaggtataccctgagtcgt

SEQ ID NO: 182222 - DNA, 25 bp, SARS Virus
agtcgtaggtattccctgagtcgtc

SEQ ID NO: 182223 - DNA, 25 bp, SARS Virus
gtcgtaggtatatcctgagtcgtcg

SEQ ID NO: 182224 - DNA, 25 bp, SARS Virus
tcgtaggtatactctgagtcgtcgg

SEQ ID NO: 182225 - DNA, 25 bp, SARS Virus
cgtaggtataccttgagtcgtcggt

SEQ ID NO: 182226 - DNA, 25 bp, SARS Virus
gtaggtataccctgagtcgtcggtt

SEQ ID NO: 182227 - DNA, 25 bp, SARS Virus
taggtatacccttagtcgtcggtta

SEQ ID NO: 182228 - DNA, 25 bp, SARS Virus
aggtataccctgtgtcgtcggttac

SEQ ID NO: 182229 - DNA, 25 bp, SARS Virus
ggtataccctgattcgtcggttacg

SEQ ID NO: 182230 - DNA, 25 bp, SARS Virus
gtataccctgagtcgtcggttacgg

SEQ ID NO: 182231 - DNA, 25 bp, SARS Virus
tataccctgagttgtcggttacggg

SEQ ID NO: 182232 - DNA, 25 bp, SARS Virus
ataccctgagtcttcggttacggga

SEQ ID NO: 182233 - DNA, 25 bp, SARS Virus
taccctgagtcgtcggttacgggat

SEQ ID NO: 182234 - DNA, 25 bp, SARS Virus
accctgagtcgttggttacgggatc

SEQ ID NO: 182235 - DNA, 25 bp, SARS Virus
ccctgagtcgtctgttacgggatca

SEQ ID NO: 182236 - DNA, 25 bp, SARS Virus
cctgagtcgtcgtttacgggatcag

SEQ ID NO: 182237 - DNA, 25 bp, SARS Virus
ctgagtcgtcggttacgggatcagt

SEQ ID NO: 182238 - DNA, 25 bp, SARS Virus
tgagtcgtcggttacgggatcagtt

SEQ ID NO: 182239 - DNA, 25 bp, SARS Virus
gagtcgtcggtttcgggatcagttt

SEQ ID NO: 182240 - DNA, 25 bp, SARS Virus
agtcgtcggttatgggatcagtttc

SEQ ID NO: 182241 - DNA, 25 bp, SARS Virus
gtcgtcggttactggatcagtttca

SEQ ID NO: 182242 - DNA, 25 bp, SARS Virus
tcgtcggttacgtgatcagtttcac

SEQ ID NO: 182243 - DNA, 25 bp, SARS Virus
cgtcggttacggtatcagtttcact

SEQ ID NO: 182244 - DNA, 25 bp, SARS Virus
gtcggttacgggttcagtttcactc

SEQ ID NO: 182245 - DNA, 25 bp, SARS Virus
tcggttacgggatcagtttcactcc

SEQ ID NO: 182246 - DNA, 25 bp, SARS Virus
cggttacgggattagtttcactcct

SEQ ID NO: 182247 - DNA, 25 bp, SARS Virus
ggttacgggatctgtttcactccta

SEQ ID NO: 182248 - DNA, 25 bp, SARS Virus
gttacgggatcattttcactcctac

SEQ ID NO: 182249 - DNA, 25 bp, SARS Virus
ttacgggatcagtttcactcctacc

SEQ ID NO: 182250 - DNA, 25 bp, SARS Virus
tacgggatcagtttcactcctaccc

SEQ ID NO: 182251 - DNA, 25 bp, SARS Virus
acgggatcagtttcactcctacccg

SEQ ID NO: 182252 - DNA, 25 bp, SARS Virus
cgggatcagttttactcctacccgt

SEQ ID NO: 182253 - DNA, 25 bp, SARS Virus
gggatcagtttctctcctacccgta

SEQ ID NO: 182254 - DNA, 25 bp, SARS Virus
ggatcagtttcattcctacccgtag

SEQ ID NO: 182255 - DNA, 25 bp, SARS Virus
gatcagtttcactcctacccgtagt

SEQ ID NO: 182256 - DNA, 25 bp, SARS Virus
atcagtttcacttctacccgtagtc

SEQ ID NO: 182257 - DNA, 25 bp, SARS Virus
tcagtttcactcttacccgtagtcg

SEQ ID NO: 182258 - DNA, 25 bp, SARS Virus
cagtttcactcctacccgtagtcgt

SEQ ID NO: 182259 - DNA, 25 bp, SARS Virus
agtttcactccttcccgtagtcgtt

SEQ ID NO: 182260 - DNA, 25 bp, SARS Virus
gtttcactcctatccgtagtcgtta

SEQ ID NO: 182261 - DNA, 25 bp, SARS Virus
tttcactcctactcgtagtcgttac

SEQ ID NO: 182262 - DNA, 25 bp, SARS Virus
ttcactcctacctgtagtcgttact

SEQ ID NO: 182263 - DNA, 25 bp, SARS Virus
tcactcctacccttagtcgttactc

SEQ ID NO: 182264 - DNA, 25 bp, SARS Virus
cactcctacccgtagtcgttactca

SEQ ID NO: 182265 - DNA, 25 bp, SARS Virus
actcctacccgttgtcgttactcat

SEQ ID NO: 182266 - DNA, 25 bp, SARS Virus
ctcctacccgtattcgttactcatt

SEQ ID NO: 182267 - DNA, 25 bp, SARS Virus
tcctacccgtagtcgttactcatta

SEQ ID NO: 182268 - DNA, 25 bp, SARS Virus
cctacccgtagttgttactcattat

SEQ ID NO: 182269 - DNA, 25 bp, SARS Virus
ctacccgtagtctttactcattata

SEQ ID NO: 182270 - DNA, 25 bp, SARS Virus
tacccgtagtcgttactcattatac

SEQ ID NO: 182271 - DNA, 25 bp, SARS Virus
acccgtagtcgttactcattatact

SEQ ID NO: 182272 - DNA, 25 bp, SARS Virus
cccgtagtcgtttctcattatactt

SEQ ID NO: 182273 - DNA, 25 bp, SARS Virus
ccgtagtcgttattcattatactta

SEQ ID NO: 182274 - DNA, 25 bp, SARS Virus
cgtagtcgttactcattatacttag

SEQ ID NO: 182275 - DNA, 25 bp, SARS Virus
gtagtcgttacttattatacttagg

SEQ ID NO: 182276 - DNA, 25 bp, SARS Virus
tagtcgttactctttatacttaggt

SEQ ID NO: 182277 - DNA, 25 bp, SARS Virus
agtcgttactcattatacttaggtg

SEQ ID NO: 182278 - DNA, 25 bp, SARS Virus
gtcgttactcattatacttaggtgt

SEQ ID NO: 182279 - DNA, 25 bp, SARS Virus
tcgttactcattttacttaggtgtt

SEQ ID NO: 182280 - DNA, 25 bp, SARS Virus
cgttactcattatacttaggtgtta

SEQ ID NO: 182281 - DNA, 25 bp, SARS Virus
gttactcattattcttaggtgttat

SEQ ID NO: 182282 - DNA, 25 bp, SARS Virus
ttactcattatatttaggtgttatc

SEQ ID NO: 182283 - DNA, 25 bp, SARS Virus
tactcattatacttaggtgttatcc

SEQ ID NO: 182284 - DNA, 25 bp, SARS Virus
actcattatacttaggtgttatcct

SEQ ID NO: 182285 - DNA, 25 bp, SARS Virus
ctcattatactttggtgttatcctt

SEQ ID NO: 182286 - DNA, 25 bp, SARS Virus
tcattatacttatgtgttatccttg

SEQ ID NO: 182287 - DNA, 25 bp, SARS Virus
cattatacttagttgttatccttga

SEQ ID NO: 182288 - DNA, 25 bp, SARS Virus
attatacttaggtgttatccttgag

SEQ ID NO: 182289 - DNA, 25 bp, SARS Virus
ttatacttaggttttatccttgagg

SEQ ID NO: 182290 - DNA, 25 bp, SARS Virus
tatacttaggtgttatccttgaggc

SEQ ID NO: 182291 - DNA, 25 bp, SARS Virus
atacttaggtgttatccttgaggcg

SEQ ID NO: 182292 - DNA, 25 bp, SARS Virus
tacttaggtgttttccttgaggcgt

SEQ ID NO: 182293 - DNA, 25 bp, SARS Virus
acttaggtgttatccttgaggcgtc

SEQ ID NO: 182294 - DNA, 25 bp, SARS Virus
cttaggtgttattcttgaggcgtcg

SEQ ID NO: 182295 - DNA, 25 bp, SARS Virus
ttaggtgttatctttgaggcgtcgg

SEQ ID NO: 182296 - DNA, 25 bp, SARS Virus
taggtgttatccttgaggcgtcgga

SEQ ID NO: 182297 - DNA, 25 bp, SARS Virus
aggtgttatccttgaggcgtcggac

SEQ ID NO: 182298 - DNA, 25 bp, SARS Virus
ggtgttatcctttaggcgtcggacc

SEQ ID NO: 182299 - DNA, 25 bp, SARS Virus
gtgttatccttgtggcgtcggacca

SEQ ID NO: 182300 - DNA, 25 bp, SARS Virus
tgttatccttgatgcgtcggaccac

SEQ ID NO: 182301 - DNA, 25 bp, SARS Virus
gttatccttgagtcgtcggaccacg

SEQ ID NO: 182302 - DNA, 25 bp, SARS Virus
ttatccttgaggtgtcggaccacga

SEQ ID NO: 182303 - DNA, 25 bp, SARS Virus
tatccttgaggcttcggaccacgat

SEQ ID NO: 182304 - DNA, 25 bp, SARS Virus
atccttgaggcgtcggaccacgatg

SEQ ID NO: 182305 - DNA, 25 bp, SARS Virus
tccttgaggcgttggaccacgatga

SEQ ID NO: 182306 - DNA, 25 bp, SARS Virus
ccttgaggcgtctgaccacgatgaa

SEQ ID NO: 182307 - DNA, 25 bp, SARS Virus
cttgaggcgtcgtaccacgatgaac

SEQ ID NO: 182308 - DNA, 25 bp, SARS Virus
ttgaggcgtcggtccacgatgaaca

SEQ ID NO: 182309 - DNA, 25 bp, SARS Virus
tgaggcgtcggatcacgatgaacat

SEQ ID NO: 182310 - DNA, 25 bp, SARS Virus
gaggcgtcggactacgatgaacatg

SEQ ID NO: 182311 - DNA, 25 bp, SARS Virus
aggcgtcggacctcgatgaacatgc

SEQ ID NO: 182312 - DNA, 25 bp, SARS Virus
ggcgtcggaccatgatgaacatgct

SEQ ID NO: 182313 - DNA, 25 bp, SARS Virus
gcgtcggaccactatgaacatgctt

SEQ ID NO: 182314 - DNA, 25 bp, SARS Virus
cgtcggaccacgttgaacatgcttt

SEQ ID NO: 182315 - DNA, 25 bp, SARS Virus
gtcggaccacgatgaacatgcttta

SEQ ID NO: 182316 - DNA, 25 bp, SARS Virus
tcggaccacgattaacatgctttag

SEQ ID NO: 182317 - DNA, 25 bp, SARS Virus
cggaccacgatgtacatgctttagt

SEQ ID NO: 182318 - DNA, 25 bp, SARS Virus
ggaccacgatgatcatgctttagtg

SEQ ID NO: 182319 - DNA, 25 bp, SARS Virus
gaccacgatgaatatgctttagtgg

SEQ ID NO: 182320 - DNA, 25 bp, SARS Virus
accacgatgaacttgctttagtggc

SEQ ID NO: 182321 - DNA, 25 bp, SARS Virus
ccacgatgaacatgctttagtggct

SEQ ID NO: 182322 - DNA, 25 bp, SARS Virus
cacgatgaacattctttagtggctt

SEQ ID NO: 182323 - DNA, 25 bp, SARS Virus
acgatgaacatgttttagtggcttt

SEQ ID NO: 182324 - DNA, 25 bp, SARS Virus
cgatgaacatgctttagtggcttta

SEQ ID NO: 182325 - DNA, 25 bp, SARS Virus
gatgaacatgctttagtggctttag

SEQ ID NO: 182326 - DNA, 25 bp, SARS Virus
atgaacatgctttagtggctttagc

SEQ ID NO: 182327 - DNA, 25 bp, SARS Virus
tgaacatgcttttgtggctttagca

SEQ ID NO: 182328 - DNA, 25 bp, SARS Virus
gaacatgctttattggctttagcat

SEQ ID NO: 182329 - DNA, 25 bp, SARS Virus
aacatgctttagtggctttagcatg

SEQ ID NO: 182330 - DNA, 25 bp, SARS Virus
acatgctttagttgctttagcatgg

SEQ ID NO: 182331 - DNA, 25 bp, SARS Virus
catgctttagtgtctttagcatggt

SEQ ID NO: 182332 - DNA, 25 bp, SARS Virus
atgctttagtggttttagcatggtc

SEQ ID NO: 182333 - DNA, 25 bp, SARS Virus
tgctttagtggctttagcatggtca

SEQ ID NO: 182334 - DNA, 25 bp, SARS Virus
gctttagtggctttagcatggtcaa

SEQ ID NO: 182335 - DNA, 25 bp, SARS Virus
ctttagtggctttagcatggtcaag

SEQ ID NO: 182336 - DNA, 25 bp, SARS Virus
tttagtggcttttgcatggtcaagg

SEQ ID NO: 182337 - DNA, 25 bp, SARS Virus
ttagtggctttatcatggtcaaggg

SEQ ID NO: 182338 - DNA, 25 bp, SARS Virus
tagtggctttagtatggtcaagggt

SEQ ID NO: 182339 - DNA, 25 bp, SARS Virus
agtggctttagcttggtcaagggta

SEQ ID NO: 182340 - DNA, 25 bp, SARS Virus
gtggctttagcatggtcaagggtaa

SEQ ID NO: 182341 - DNA, 25 bp, SARS Virus
tggctttagcattgtcaagggtaat

SEQ ID NO: 182342 - DNA, 25 bp, SARS Virus
ggctttagcatgttcaagggtaatt

SEQ ID NO: 182343 - DNA, 25 bp, SARS Virus
gctttagcatggtcaagggtaattc

SEQ ID NO: 182344 - DNA, 25 bp, SARS Virus
ctttagcatggttaagggtaattct

SEQ ID NO: 182345 - DNA, 25 bp, SARS Virus
tttagcatggtctagggtaattcta

SEQ ID NO: 182346 - DNA, 25 bp, SARS Virus
ttagcatggtcatgggtaattctag

SEQ ID NO: 182347 - DNA, 25 bp, SARS Virus
tagcatggtcaatggtaattctagg

SEQ ID NO: 182348 - DNA, 25 bp, SARS Virus
agcatggtcaagtgtaattctagga

SEQ ID NO: 182349 - DNA, 25 bp, SARS Virus
gcatggtcaaggttaattctaggac

SEQ ID NO: 182350 - DNA, 25 bp, SARS Virus
catggtcaagggtaattctaggact

SEQ ID NO: 182351 - DNA, 25 bp, SARS Virus
atggtcaagggttattctaggacta

SEQ ID NO: 182352 - DNA, 25 bp, SARS Virus
tggtcaagggtatttctaggactaa

SEQ ID NO: 182353 - DNA, 25 bp, SARS Virus
ggtcaagggtaattctaggactaat

SEQ ID NO: 182354 - DNA, 25 bp, SARS Virus
gtcaagggtaattctaggactaata

SEQ ID NO: 182355 - DNA, 25 bp, SARS Virus
tcaagggtaattttaggactaatag

SEQ ID NO: 182356 - DNA, 25 bp, SARS Virus
caagggtaattctaggactaataga

SEQ ID NO: 182357 - DNA, 25 bp, SARS Virus
aagggtaattcttggactaatagat

SEQ ID NO: 182358 - DNA, 25 bp, SARS Virus
agggtaattctatgactaatagatt

SEQ ID NO: 182359 - DNA, 25 bp, SARS Virus
gggtaattctagtactaatagatta

SEQ ID NO: 182360 - DNA, 25 bp, SARS Virus
ggtaattctaggtctaatagattac

SEQ ID NO: 182361 - DNA, 25 bp, SARS Virus
gtaattctaggattaatagattaca

SEQ ID NO: 182362 - DNA, 25 bp, SARS Virus
taattctaggactaatagattacag

SEQ ID NO: 182363 - DNA, 25 bp, SARS Virus
aattctaggacttatagattacagt

SEQ ID NO: 182364 - DNA, 25 bp, SARS Virus
attctaggactattagattacagtc

SEQ ID NO: 182365 - DNA, 25 bp, SARS Virus
ttctaggactaatagattacagtca

SEQ ID NO: 182366 - DNA, 25 bp, SARS Virus
tctaggactaattgattacagtcat

SEQ ID NO: 182367 - DNA, 25 bp, SARS Virus
ctaggactaatatattacagtcatg

SEQ ID NO: 182368 - DNA, 25 bp, SARS Virus
taggactaatagtttacagtcatgc

SEQ ID NO: 182369 - DNA, 25 bp, SARS Virus
aggactaatagattacagtcatgcg

SEQ ID NO: 182370 - DNA, 25 bp, SARS Virus
ggactaatagattacagtcatgcgg

SEQ ID NO: 182371 - DNA, 25 bp, SARS Virus
gactaatagatttcagtcatgcgga

SEQ ID NO: 182372 - DNA, 25 bp, SARS Virus
actaatagattatagtcatgcggat

SEQ ID NO: 182373 - DNA, 25 bp, SARS Virus
ctaatagattactgtcatgcggatg

SEQ ID NO: 182374 - DNA, 25 bp, SARS Virus
taatagattacattcatgcggatgt

SEQ ID NO: 182375 - DNA, 25 bp, SARS Virus
aatagattacagtcatgcggatgtt

SEQ ID NO: 182376 - DNA, 25 bp, SARS Virus
atagattacagttatgcggatgtta

SEQ ID NO: 182377 - DNA, 25 bp, SARS Virus
tagattacagtcttgcggatgttac

SEQ ID NO: 182378 - DNA, 25 bp, SARS Virus
agattacagtcatgcggatgttacg

SEQ ID NO: 182379 - DNA, 25 bp, SARS Virus
gattacagtcattcggatgttacgg

SEQ ID NO: 182380 - DNA, 25 bp, SARS Virus
attacagtcatgtggatgttacgga

SEQ ID NO: 182381 - DNA, 25 bp, SARS Virus
ttacagtcatgctgatgttacggac

SEQ ID NO: 182382 - DNA, 25 bp, SARS Virus
tacagtcatgcgtatgttacggacg

SEQ ID NO: 182383 - DNA, 25 bp, SARS Virus
acagtcatgcggttgttacggacgt

SEQ ID NO: 182384 - DNA, 25 bp, SARS Virus
cagtcatgcggatgttacggacgta

SEQ ID NO: 182385 - DNA, 25 bp, SARS Virus
agtcatgcggattttacggacgtag

SEQ ID NO: 182386 - DNA, 25 bp, SARS Virus
gtcatgcggatgttacggacgtagt

SEQ ID NO: 182387 - DNA, 25 bp, SARS Virus
tcatgcggatgttacggacgtagtg

SEQ ID NO: 182388 - DNA, 25 bp, SARS Virus
catgcggatgtttcggacgtagtgc

SEQ ID NO: 182389 - DNA, 25 bp, SARS Virus
atgcggatgttatggacgtagtgcg

SEQ ID NO: 182390 - DNA, 25 bp, SARS Virus
tgcggatgttactgacgtagtgcgt

SEQ ID NO: 182391 - DNA, 25 bp, SARS Virus
gcggatgttacgtacgtagtgcgta

SEQ ID NO: 182392 - DNA, 25 bp, SARS Virus
cggatgttacggtcgtagtgcgtat

SEQ ID NO: 182393 - DNA, 25 bp, SARS Virus
ggatgttacggatgtagtgcgtatc

SEQ ID NO: 182394 - DNA, 25 bp, SARS Virus
gatgttacggacttagtgcgtatcg

SEQ ID NO: 182395 - DNA, 25 bp, SARS Virus
atgttacggacgtagtgcgtatcgt

SEQ ID NO: 182396 - DNA, 25 bp, SARS Virus
tgttacggacgttgtgcgtatcgta

SEQ ID NO: 182397 - DNA, 25 bp, SARS Virus
gttacggacgtattgcgtatcgtag

SEQ ID NO: 182398 - DNA, 25 bp, SARS Virus
ttacggacgtagtgcgtatcgtagc

SEQ ID NO: 182399 - DNA, 25 bp, SARS Virus
tacggacgtagttcgtatcgtagcg

SEQ ID NO: 182400 - DNA, 25 bp, SARS Virus
acggacgtagtgtgtatcgtagcgt

SEQ ID NO: 182401 - DNA, 25 bp, SARS Virus
cggacgtagtgcttatcgtagcgtc

SEQ ID NO: 182402 - DNA, 25 bp, SARS Virus
ggacgtagtgcgtatcgtagcgtct

SEQ ID NO: 182403 - DNA, 25 bp, SARS Virus
gacgtagtgcgtttcgtagcgtctt

SEQ ID NO: 182404 - DNA, 25 bp, SARS Virus
acgtagtgcgtatcgtagcgtctta

SEQ ID NO: 182405 - DNA, 25 bp, SARS Virus
cgtagtgcgtattgtagcgtcttaa

SEQ ID NO: 182406 - DNA, 25 bp, SARS Virus
gtagtgcgtatcttagcgtcttaac

SEQ ID NO: 182407 - DNA, 25 bp, SARS Virus
tagtgcgtatcgtagcgtcttaaca

SEQ ID NO: 182408 - DNA, 25 bp, SARS Virus
agtgcgtatcgttgcgtcttaacat

SEQ ID NO: 182409 - DNA, 25 bp, SARS Virus
gtgcgtatcgtatcgtcttaacatg

SEQ ID NO: 182410 - DNA, 25 bp, SARS Virus
tgcgtatcgtagtgtcttaacatgt

SEQ ID NO: 182411 - DNA, 25 bp, SARS Virus
gcgtatcgtagcttcttaacatgtc

SEQ ID NO: 182412 - DNA, 25 bp, SARS Virus
cgtatcgtagcgtcttaacatgtca

SEQ ID NO: 182413 - DNA, 25 bp, SARS Virus
gtatcgtagcgttttaacatgtcag

SEQ ID NO: 182414 - DNA, 25 bp, SARS Virus
tatcgtagcgtcttaacatgtcaga

SEQ ID NO: 182415 - DNA, 25 bp, SARS Virus
atcgtagcgtcttaacatgtcagaa

SEQ ID NO: 182416 - DNA, 25 bp, SARS Virus
tcgtagcgtctttacatgtcagaaa

SEQ ID NO: 182417 - DNA, 25 bp, SARS Virus
cgtagcgtcttatcatgtcagaaat

SEQ ID NO: 182418 - DNA, 25 bp, SARS Virus
gtagcgtcttaatatgtcagaaatt

SEQ ID NO: 182419 - DNA, 25 bp, SARS Virus
tagcgtcttaacttgtcagaaatta

SEQ ID NO: 182420 - DNA, 25 bp, SARS Virus
agcgtcttaacatgtcagaaattat

SEQ ID NO: 182421 - DNA, 25 bp, SARS Virus
gcgtcttaacatttcagaaattatt

SEQ ID NO: 182422 - DNA, 25 bp, SARS Virus
cgtcttaacatgtcagaaattatta

SEQ ID NO: 182423 - DNA, 25 bp, SARS Virus
gtcttaacatgttagaaattattac

SEQ ID NO: 182424 - DNA, 25 bp, SARS Virus
tcttaacatgtctgaaattattact

SEQ ID NO: 182425 - DNA, 25 bp, SARS Virus
cttaacatgtcataaattattacta

SEQ ID NO: 182426 - DNA, 25 bp, SARS Virus
ttaacatgtcagtaattattactaa

SEQ ID NO: 182427 - DNA, 25 bp, SARS Virus
taacatgtcagatattattactaac

SEQ ID NO: 182428 - DNA, 25 bp, SARS Virus
aacatgtcagaatttattactaacc

SEQ ID NO: 182429 - DNA, 25 bp, SARS Virus
acatgtcagaaattattactaaccg

SEQ ID NO: 182430 - DNA, 25 bp, SARS Virus
catgtcagaaattattactaaccgc

SEQ ID NO: 182431 - DNA, 25 bp, SARS Virus
atgtcagaaatttttactaaccgca

SEQ ID NO: 182432 - DNA, 25 bp, SARS Virus
tgtcagaaattattactaaccgcat

SEQ ID NO: 182433 - DNA, 25 bp, SARS Virus
gtcagaaattattactaaccgcatg

SEQ ID NO: 182434 - DNA, 25 bp, SARS Virus
tcagaaattatttctaaccgcatgt

SEQ ID NO: 182435 - DNA, 25 bp, SARS Virus
cagaaattattattaaccgcatgtg

SEQ ID NO: 182436 - DNA, 25 bp, SARS Virus
agaaattattactaaccgcatgtgc

SEQ ID NO: 182437 - DNA, 25 bp, SARS Virus
gaaattattacttaccgcatgtgcg

SEQ ID NO: 182438 - DNA, 25 bp, SARS Virus
aaattattactatccgcatgtgcga

SEQ ID NO: 182439 - DNA, 25 bp, SARS Virus
aattattactaatcgcatgtgcgag

SEQ ID NO: 182440 - DNA, 25 bp, SARS Virus
attattactaactgcatgtgcgagt

SEQ ID NO: 182441 - DNA, 25 bp, SARS Virus
ttattactaacctcatgtgcgagtg

SEQ ID NO: 182442 - DNA, 25 bp, SARS Virus
tattactaaccgtatgtgcgagtgg

SEQ ID NO: 182443 - DNA, 25 bp, SARS Virus
attactaaccgcttgtgcgagtgga

SEQ ID NO: 182444 - DNA, 25 bp, SARS Virus
ttactaaccgcatgtgcgagtggat

SEQ ID NO: 182445 - DNA, 25 bp, SARS Virus
tactaaccgcatttgcgagtggatt

SEQ ID NO: 182446 - DNA, 25 bp, SARS Virus
actaaccgcatgtgcgagtggattc

SEQ ID NO: 182447 - DNA, 25 bp, SARS Virus
ctaaccgcatgttcgagtggattca

SEQ ID NO: 182448 - DNA, 25 bp, SARS Virus
taaccgcatgtgtgagtggattcaa

SEQ ID NO: 182449 - DNA, 25 bp, SARS Virus
aaccgcatgtgctagtggattcaat

SEQ ID NO: 182450 - DNA, 25 bp, SARS Virus
accgcatgtgcgtgtggattcaatc

SEQ ID NO: 182451 - DNA, 25 bp, SARS Virus
ccgcatgtgcgattggattcaatcg

SEQ ID NO: 182452 - DNA, 25 bp, SARS Virus
cgcatgtgcgagtggattcaatcgt

SEQ ID NO: 182453 - DNA, 25 bp, SARS Virus
gcatgtgcgagttgattcaatcgta

SEQ ID NO: 182454 - DNA, 25 bp, SARS Virus
catgtgcgagtgtattcaatcgtat

SEQ ID NO: 182455 - DNA, 25 bp, SARS Virus
atgtgcgagtggtttcaatcgtata

SEQ ID NO: 182456 - DNA, 25 bp, SARS Virus
tgtgcgagtggattcaatcgtatat

SEQ ID NO: 182457 - DNA, 25 bp, SARS Virus
gtgcgagtggattcaatcgtatatg

SEQ ID NO: 182458 - DNA, 25 bp, SARS Virus
tgcgagtggatttaatcgtatatgc

SEQ ID NO: 182459 - DNA, 25 bp, SARS Virus
gcgagtggattctatcgtatatgcg

SEQ ID NO: 182460 - DNA, 25 bp, SARS Virus
cgagtggattcattcgtatatgcgc

SEQ ID NO: 182461 - DNA, 25 bp, SARS Virus
gagtggattcaatcgtatatgcgca

SEQ ID NO: 182462 - DNA, 25 bp, SARS Virus
agtggattcaattgtatatgcgcat

SEQ ID NO: 182463 - DNA, 25 bp, SARS Virus
gtggattcaatcttatatgcgcatt

SEQ ID NO: 182464 - DNA, 25 bp, SARS Virus
tggattcaatcgtatatgcgcattc

SEQ ID NO: 182465 - DNA, 25 bp, SARS Virus
ggattcaatcgtttatgcgcattct

SEQ ID NO: 182466 - DNA, 25 bp, SARS Virus
gattcaatcgtatatgcgcattcta

SEQ ID NO: 182467 - DNA, 25 bp, SARS Virus
attcaatcgtatttgcgcattctac

SEQ ID NO: 182468 - DNA, 25 bp, SARS Virus
ttcaatcgtatatgcgcattctaca

SEQ ID NO: 182469 - DNA, 25 bp, SARS Virus
tcaatcgtatattcgcattctacag

SEQ ID NO: 182470 - DNA, 25 bp, SARS Virus
caatcgtatatgtgcattctacagt

SEQ ID NO: 182471 - DNA, 25 bp, SARS Virus
aatcgtatatgctcattctacagtc

SEQ ID NO: 182472 - DNA, 25 bp, SARS Virus
atcgtatatgcgtattctacagtcc

SEQ ID NO: 182473 - DNA, 25 bp, SARS Virus
tcgtatatgcgctttctacagtcct

SEQ ID NO: 182474 - DNA, 25 bp, SARS Virus
cgtatatgcgcattctacagtccta

SEQ ID NO: 182475 - DNA, 25 bp, SARS Virus
gtatatgcgcattctacagtcctaa

SEQ ID NO: 182476 - DNA, 25 bp, SARS Virus
tatatgcgcattttacagtcctaag

SEQ ID NO: 182477 - DNA, 25 bp, SARS Virus
atatgcgcattctacagtcctaaga

SEQ ID NO: 182478 - DNA, 25 bp, SARS Virus
tatgcgcattcttcagtcctaagag

SEQ ID NO: 182479 - DNA, 25 bp, SARS Virus
atgcgcattctatagtcctaagaga

SEQ ID NO: 182480 - DNA, 25 bp, SARS Virus
tgcgcattctactgtcctaagagat

SEQ ID NO: 182481 - DNA, 25 bp, SARS Virus
gcgcattctacattcctaagagatg

SEQ ID NO: 182482 - DNA, 25 bp, SARS Virus
cgcattctacagtcctaagagatgc

SEQ ID NO: 182483 - DNA, 25 bp, SARS Virus
gcattctacagttctaagagatgct

SEQ ID NO: 182484 - DNA, 25 bp, SARS Virus
cattctacagtcttaagagatgctt

SEQ ID NO: 182485 - DNA, 25 bp, SARS Virus
attctacagtcctaagagatgcttc

SEQ ID NO: 182486 - DNA, 25 bp, SARS Virus
ttctacagtccttagagatgcttca

SEQ ID NO: 182487 - DNA, 25 bp, SARS Virus
tctacagtcctatgagatgcttcag

SEQ ID NO: 182488 - DNA, 25 bp, SARS Virus
ctacagtcctaatagatgcttcagt

SEQ ID NO: 182489 - DNA, 25 bp, SARS Virus
tacagtcctaagtgatgcttcagta

SEQ ID NO: 182490 - DNA, 25 bp, SARS Virus
acagtcctaagatatgcttcagtat

SEQ ID NO: 182491 - DNA, 25 bp, SARS Virus
cagtcctaagagttgcttcagtatg

SEQ ID NO: 182492 - DNA, 25 bp, SARS Virus
agtcctaagagatgcttcagtatgg

SEQ ID NO: 182493 - DNA, 25 bp, SARS Virus
gtcctaagagattcttcagtatggt

SEQ ID NO: 182494 - DNA, 25 bp, SARS Virus
tcctaagagatgtttcagtatggtt

SEQ ID NO: 182495 - DNA, 25 bp, SARS Virus
cctaagagatgcttcagtatggtta

SEQ ID NO: 182496 - DNA, 25 bp, SARS Virus
ctaagagatgcttcagtatggttag

SEQ ID NO: 182497 - DNA, 25 bp, SARS Virus
taagagatgctttagtatggttagg

SEQ ID NO: 182498 - DNA, 25 bp, SARS Virus
aagagatgcttctgtatggttagga

SEQ ID NO: 182499 - DNA, 25 bp, SARS Virus
agagatgcttcattatggttaggaa

SEQ ID NO: 182500 - DNA, 25 bp, SARS Virus
gagatgcttcagtatggttaggaag

SEQ ID NO: 182501 - DNA, 25 bp, SARS Virus
agatgcttcagtttggttaggaaga

SEQ ID NO: 182502 - DNA, 25 bp, SARS Virus
gatgcttcagtatggttaggaagaa

SEQ ID NO: 182503 - DNA, 25 bp, SARS Virus
atgcttcagtattgttaggaagaat

SEQ ID NO: 182504 - DNA, 25 bp, SARS Virus
tgcttcagtatgtttaggaagaata

SEQ ID NO: 182505 - DNA, 25 bp, SARS Virus
gcttcagtatggttaggaagaataa

SEQ ID NO: 182506 - DNA, 25 bp, SARS Virus
cttcagtatggttaggaagaataac

SEQ ID NO: 182507 - DNA, 25 bp, SARS Virus
ttcagtatggtttggaagaataact

SEQ ID NO: 182508 - DNA, 25 bp, SARS Virus
tcagtatggttatgaagaataactt

SEQ ID NO: 182509 - DNA, 25 bp, SARS Virus
cagtatggttagtaagaataacttt

SEQ ID NO: 182510 - DNA, 25 bp, SARS Virus
agtatggttaggtagaataacttta

SEQ ID NO: 182511 - DNA, 25 bp, SARS Virus
gtatggttaggatgaataactttat

SEQ ID NO: 182512 - DNA, 25 bp, SARS Virus
tatggttaggaataataactttatt

SEQ ID NO: 182513 - DNA, 25 bp, SARS Virus
atggttaggaagtataactttatta

SEQ ID NO: 182514 - DNA, 25 bp, SARS Virus
tggttaggaagattaactttattag

SEQ ID NO: 182515 - DNA, 25 bp, SARS Virus
ggttaggaagaataactttattagt

SEQ ID NO: 182516 - DNA, 25 bp, SARS Virus
gttaggaagaattactttattagta

SEQ ID NO: 182517 - DNA, 25 bp, SARS Virus
ttaggaagaatatctttattagtag

SEQ ID NO: 182518 - DNA, 25 bp, SARS Virus
taggaagaataattttattagtagt

SEQ ID NO: 182519 - DNA, 25 bp, SARS Virus
aggaagaataactttattagtagta

SEQ ID NO: 182520 - DNA, 25 bp, SARS Virus
ggaagaataactttattagtagtag

SEQ ID NO: 182521 - DNA, 25 bp, SARS Virus
gaagaataactttattagtagtagt

SEQ ID NO: 182522 - DNA, 25 bp, SARS Virus
aagaataacttttttagtagtagtg

SEQ ID NO: 182523 - DNA, 25 bp, SARS Virus
agaataactttattagtagtagtgt

SEQ ID NO: 182524 - DNA, 25 bp, SARS Virus
gaataactttattagtagtagtgtc

SEQ ID NO: 182525 - DNA, 25 bp, SARS Virus
aataactttatttgtagtagtgtcg

SEQ ID NO: 182526 - DNA, 25 bp, SARS Virus
ataactttattattagtagtgtcgt

SEQ ID NO: 182527 - DNA, 25 bp, SARS Virus
taactttattagtagtagtgtcgtt

SEQ ID NO: 182528 - DNA, 25 bp, SARS Virus
aactttattagttgtagtgtcgtta

SEQ ID NO: 182529 - DNA, 25 bp, SARS Virus
actttattagtattagtgtcgttaa

SEQ ID NO: 182530 - DNA, 25 bp, SARS Virus
ctttattagtagtagtgtcgttaac

SEQ ID NO: 182531 - DNA, 25 bp, SARS Virus
tttattagtagttgtgtcgttaaca

SEQ ID NO: 182532 - DNA, 25 bp, SARS Virus
ttattagtagtattgtcgttaacat

SEQ ID NO: 182533 - DNA, 25 bp, SARS Virus
tattagtagtagtgtcgttaacata

SEQ ID NO: 182534 - DNA, 25 bp, SARS Virus
attagtagtagtttcgttaacatac

SEQ ID NO: 182535 - DNA, 25 bp, SARS Virus
ttagtagtagtgtcgttaacataca

SEQ ID NO: 182536 - DNA, 25 bp, SARS Virus
tagtagtagtgttgttaacatacac

SEQ ID NO: 182537 - DNA, 25 bp, SARS Virus
agtagtagtgtctttaacatacact

SEQ ID NO: 182538 - DNA, 25 bp, SARS Virus
gtagtagtgtcgttaacatacactg

SEQ ID NO: 182539 - DNA, 25 bp, SARS Virus
tagtagtgtcgttaacatacactgc

SEQ ID NO: 182540 - DNA, 25 bp, SARS Virus
agtagtgtcgtttacatacactgct

SEQ ID NO: 182541 - DNA, 25 bp, SARS Virus
gtagtgtcgttatcatacactgctc

SEQ ID NO: 182542 - DNA, 25 bp, SARS Virus
tagtgtcgttaatatacactgctca

SEQ ID NO: 182543 - DNA, 25 bp, SARS Virus
agtgtcgttaacttacactgctcat

SEQ ID NO: 182544 - DNA, 25 bp, SARS Virus
gtgtcgttaacatacactgctcata

SEQ ID NO: 182545 - DNA, 25 bp, SARS Virus
tgtcgttaacatacactgctcataa

SEQ ID NO: 182546 - DNA, 25 bp, SARS Virus
gtcgttaacataaactgctcataaa

SEQ ID NO: 182547 - DNA, 25 bp, SARS Virus
tcgttaacatacactgctcataaag

SEQ ID NO: 182548 - DNA, 25 bp, SARS Virus
cgttaacatacaatgctcataaaga

SEQ ID NO: 182549 - DNA, 25 bp, SARS Virus
gttaacatacacagctcataaagaa

SEQ ID NO: 182550 - DNA, 25 bp, SARS Virus
ttaacatacactactcataaagaaa

SEQ ID NO: 182551 - DNA, 25 bp, SARS Virus
taacatacactgatcataaagaaaa

SEQ ID NO: 182552 - DNA, 25 bp, SARS Virus
aacatacactgcacataaagaaaat

SEQ ID NO: 182553 - DNA, 25 bp, SARS Virus
acatacactgctaataaagaaaatt

SEQ ID NO: 182554 - DNA, 25 bp, SARS Virus
catacactgctcataaagaaaatta

SEQ ID NO: 182555 - DNA, 25 bp, SARS Virus
atacactgctcaaaaagaaaattac

SEQ ID NO: 182556 - DNA, 25 bp, SARS Virus
tacactgctcataaagaaaattaca

SEQ ID NO: 182557 - DNA, 25 bp, SARS Virus
acactgctcataaagaaaattacat

SEQ ID NO: 182558 - DNA, 25 bp, SARS Virus
cactgctcataaagaaaattacata

SEQ ID NO: 182559 - DNA, 25 bp, SARS Virus
actgctcataaaaaaaattacatag

SEQ ID NO: 182560 - DNA, 25 bp, SARS Virus
ctgctcataaagaaaattacatagt

SEQ ID NO: 182561 - DNA, 25 bp, SARS Virus
tgctcataaagaaaattacatagtg

SEQ ID NO: 182562 - DNA, 25 bp, SARS Virus
gctcataaagaaaattacatagtgt

SEQ ID NO: 182563 - DNA, 25 bp, SARS Virus
ctcataaagaaaattacatagtgtt

SEQ ID NO: 182564 - DNA, 25 bp, SARS Virus
tcataaagaaaaatacatagtgtta

SEQ ID NO: 182565 - DNA, 25 bp, SARS Virus
cataaagaaaataacatagtgttaa

SEQ ID NO: 182566 - DNA, 25 bp, SARS Virus
ataaagaaaattacatagtgttaat

SEQ ID NO: 182567 - DNA, 25 bp, SARS Virus
taaagaaaattaaatagtgttaatg

SEQ ID NO: 182568 - DNA, 25 bp, SARS Virus
aaagaaaattacatagtgttaatgg

SEQ ID NO: 182569 - DNA, 25 bp, SARS Virus
aagaaaattacaaagtgttaatggg

SEQ ID NO: 182570 - DNA, 25 bp, SARS Virus
agaaaattacatagtgttaatggga

SEQ ID NO: 182571 - DNA, 25 bp, SARS Virus
gaaaattacataatgttaatgggag

SEQ ID NO: 182572 - DNA, 25 bp, SARS Virus
aaaattacatagagttaatgggagt

SEQ ID NO: 182573 - DNA, 25 bp, SARS Virus
aaattacatagtattaatgggagta

SEQ ID NO: 182574 - DNA, 25 bp, SARS Virus
aattacatagtgataatgggagtag

SEQ ID NO: 182575 - DNA, 25 bp, SARS Virus
attacatagtgtaaatgggagtagt

SEQ ID NO: 182576 - DNA, 25 bp, SARS Virus
ttacatagtgttaatgggagtagtt

SEQ ID NO: 182577 - DNA, 25 bp, SARS Virus
tacatagtgttaatgggagtagttt

SEQ ID NO: 182578 - DNA, 25 bp, SARS Virus
acatagtgttaaagggagtagtttt

SEQ ID NO: 182579 - DNA, 25 bp, SARS Virus
catagtgttaataggagtagtttta

SEQ ID NO: 182580 - DNA, 25 bp, SARS Virus
atagtgttaatgagagtagttttac

SEQ ID NO: 182581 - DNA, 25 bp, SARS Virus
tagtgttaatggaagtagttttact

SEQ ID NO: 182582 - DNA, 25 bp, SARS Virus
agtgttaatgggagtagttttactg

SEQ ID NO: 182583 - DNA, 25 bp, SARS Virus
gtgttaatgggaatagttttactgc

SEQ ID NO: 182584 - DNA, 25 bp, SARS Virus
tgttaatgggagaagttttactgca

SEQ ID NO: 182585 - DNA, 25 bp, SARS Virus
gttaatgggagtagttttactgcat

SEQ ID NO: 182586 - DNA, 25 bp, SARS Virus
ttaatgggagtaattttactgcatc

SEQ ID NO: 182587 - DNA, 25 bp, SARS Virus
taatgggagtagatttactgcatct

SEQ ID NO: 182588 - DNA, 25 bp, SARS Virus
aatgggagtagtattactgcatctc

SEQ ID NO: 182589 - DNA, 25 bp, SARS Virus
atgggagtagttatactgcatctcg

SEQ ID NO: 182590 - DNA, 25 bp, SARS Virus
tgggagtagtttaactgcatctcgt

SEQ ID NO: 182591 - DNA, 25 bp, SARS Virus
gggagtagttttactgcatctcgta

SEQ ID NO: 182592 - DNA, 25 bp, SARS Virus
ggagtagttttaatgcatctcgtat

SEQ ID NO: 182593 - DNA, 25 bp, SARS Virus
gagtagttttacagcatctcgtatc

SEQ ID NO: 182594 - DNA, 25 bp, SARS Virus
agtagttttactacatctcgtatct

SEQ ID NO: 182595 - DNA, 25 bp, SARS Virus
gtagttttactgaatctcgtatctg

SEQ ID NO: 182596 - DNA, 25 bp, SARS Virus
tagttttactgcatctcgtatctga

SEQ ID NO: 182597 - DNA, 25 bp, SARS Virus
agttttactgcaactcgtatctgat

SEQ ID NO: 182598 - DNA, 25 bp, SARS Virus
gttttactgcatatcgtatctgatt

SEQ ID NO: 182599 - DNA, 25 bp, SARS Virus
ttttactgcatcacgtatctgattt

SEQ ID NO: 182600 - DNA, 25 bp, SARS Virus
tttactgcatctagtatctgattta

SEQ ID NO: 182601 - DNA, 25 bp, SARS Virus
ttactgcatctcatatctgatttag

SEQ ID NO: 182602 - DNA, 25 bp, SARS Virus
tactgcatctcgaatctgatttagt

SEQ ID NO: 182603 - DNA, 25 bp, SARS Virus
actgcatctcgtatctgatttagtc

SEQ ID NO: 182604 - DNA, 25 bp, SARS Virus
ctgcatctcgtaactgatttagtcg

SEQ ID NO: 182605 - DNA, 25 bp, SARS Virus
tgcatctcgtatatgatttagtcgg

SEQ ID NO: 182606 - DNA, 25 bp, SARS Virus
gcatctcgtatcagatttagtcggt

SEQ ID NO: 182607 - DNA, 25 bp, SARS Virus
catctcgtatctaatttagtcggta

SEQ ID NO: 182608 - DNA, 25 bp, SARS Virus
atctcgtatctgatttagtcggtaa

SEQ ID NO: 182609 - DNA, 25 bp, SARS Virus
tctcgtatctgaattagtcggtaac

SEQ ID NO: 182610 - DNA, 25 bp, SARS Virus
ctcgtatctgatatagtcggtaaca

SEQ ID NO: 182611 - DNA, 25 bp, SARS Virus
tcgtatctgattaagtcggtaacac

SEQ ID NO: 182612 - DNA, 25 bp, SARS Virus
cgtatctgatttagtcggtaacaca

SEQ ID NO: 182613 - DNA, 25 bp, SARS Virus
gtatctgatttaatcggtaacacat

SEQ ID NO: 182614 - DNA, 25 bp, SARS Virus
tatctgatttagacggtaacacata

SEQ ID NO: 182615 - DNA, 25 bp, SARS Virus
atctgatttagtaggtaacacataa

SEQ ID NO: 182616 - DNA, 25 bp, SARS Virus
tctgatttagtcagtaacacataaa

SEQ ID NO: 182617 - DNA, 25 bp, SARS Virus
ctgatttagtcgataacacataaat

SEQ ID NO: 182618 - DNA, 25 bp, SARS Virus
tgatttagtcggaaacacataaatc

SEQ ID NO: 182619 - DNA, 25 bp, SARS Virus
gatttagtcggtaacacataaatca

SEQ ID NO: 182620 - DNA, 25 bp, SARS Virus
atttagtcggtaacacataaatcaa

SEQ ID NO: 182621 - DNA, 25 bp, SARS Virus
tttagtcggtaaaacataaatcaat

SEQ ID NO: 182622 - DNA, 25 bp, SARS Virus
ttagtcggtaacacataaatcaatc

SEQ ID NO: 182623 - DNA, 25 bp, SARS Virus
tagtcggtaacaaataaatcaatct

SEQ ID NO: 182624 - DNA, 25 bp, SARS Virus
agtcggtaacacataaatcaatctg

SEQ ID NO: 182625 - DNA, 25 bp, SARS Virus
gtcggtaacacaaaaatcaatctgc

SEQ ID NO: 182626 - DNA, 25 bp, SARS Virus
tcggtaacacataaatcaatctgcg

SEQ ID NO: 182627 - DNA, 25 bp, SARS Virus
cggtaacacataaatcaatctgcga

SEQ ID NO: 182628 - DNA, 25 bp, SARS Virus
ggtaacacataaatcaatctgcgac

SEQ ID NO: 182629 - DNA, 25 bp, SARS Virus
gtaacacataaaacaatctgcgact

SEQ ID NO: 182630 - DNA, 25 bp, SARS Virus
taacacataaataaatctgcgactg

SEQ ID NO: 182631 - DNA, 25 bp, SARS Virus
aacacataaatcaatctgcgactgc

SEQ ID NO: 182632 - DNA, 25 bp, SARS Virus
acacataaatcaatctgcgactgca

SEQ ID NO: 182633 - DNA, 25 bp, SARS Virus
cacataaatcaaactgcgactgcac

SEQ ID NO: 182634 - DNA, 25 bp, SARS Virus
acataaatcaatatgcgactgcact

SEQ ID NO: 182635 - DNA, 25 bp, SARS Virus
cataaatcaatcagcgactgcacta

SEQ ID NO: 182636 - DNA, 25 bp, SARS Virus
ataaatcaatctacgactgcactat

SEQ ID NO: 182637 - DNA, 25 bp, SARS Virus
taaatcaatctgagactgcactata

SEQ ID NO: 182638 - DNA, 25 bp, SARS Virus
aaatcaatctgcaactgcactatat

SEQ ID NO: 182639 - DNA, 25 bp, SARS Virus
aatcaatctgcgactgcactatata

SEQ ID NO: 182640 - DNA, 25 bp, SARS Virus
atcaatctgcgaatgcactatatac

SEQ ID NO: 182641 - DNA, 25 bp, SARS Virus
tcaatctgcgacagcactatataca

SEQ ID NO: 182642 - DNA, 25 bp, SARS Virus
caatctgcgactacactatatacac

SEQ ID NO: 182643 - DNA, 25 bp, SARS Virus
aatctgcgactgaactatatacacc

SEQ ID NO: 182644 - DNA, 25 bp, SARS Virus
atctgcgactgcactatatacacca

SEQ ID NO: 182645 - DNA, 25 bp, SARS Virus
tctgcgactgcaatatatacaccat

SEQ ID NO: 182646 - DNA, 25 bp, SARS Virus
ctgcgactgcacaatatacaccatg

SEQ ID NO: 182647 - DNA, 25 bp, SARS Virus
tgcgactgcactatatacaccatgg

SEQ ID NO: 182648 - DNA, 25 bp, SARS Virus
gcgactgcactaaatacaccatggt

SEQ ID NO: 182649 - DNA, 25 bp, SARS Virus
cgactgcactatatacaccatggta

SEQ ID NO: 182650 - DNA, 25 bp, SARS Virus
gactgcactataaacaccatggtac

SEQ ID NO: 182651 - DNA, 25 bp, SARS Virus
actgcactatatacaccatggtaca

SEQ ID NO: 182652 - DNA, 25 bp, SARS Virus
ctgcactatataaaccatggtacag

SEQ ID NO: 182653 - DNA, 25 bp, SARS Virus
tgcactatatacaccatggtacagt

SEQ ID NO: 182654 - DNA, 25 bp, SARS Virus
gcactatatacaacatggtacagtg

SEQ ID NO: 182655 - DNA, 25 bp, SARS Virus
cactatatacacaatggtacagtgg

SEQ ID NO: 182656 - DNA, 25 bp, SARS Virus
actatatacaccatggtacagtggt

SEQ ID NO: 182657 - DNA, 25 bp, SARS Virus
ctatatacaccaaggtacagtggta

SEQ ID NO: 182658 - DNA, 25 bp, SARS Virus
tatatacaccatagtacagtggtag

SEQ ID NO: 182659 - DNA, 25 bp, SARS Virus
atatacaccatgatacagtggtaga

SEQ ID NO: 182660 - DNA, 25 bp, SARS Virus
tatacaccatggaacagtggtagat

SEQ ID NO: 182661 - DNA, 25 bp, SARS Virus
atacaccatggtacagtggtagatg

SEQ ID NO: 182662 - DNA, 25 bp, SARS Virus
tacaccatggtaaagtggtagatga

SEQ ID NO: 182663 - DNA, 25 bp, SARS Virus
acaccatggtacagtggtagatgag

SEQ ID NO: 182664 - DNA, 25 bp, SARS Virus
caccatggtacaatggtagatgaga

SEQ ID NO: 182665 - DNA, 25 bp, SARS Virus
accatggtacagaggtagatgagat

SEQ ID NO: 182666 - DNA, 25 bp, SARS Virus
ccatggtacagtagtagatgagatt

SEQ ID NO: 182667 - DNA, 25 bp, SARS Virus
catggtacagtgatagatgagattt

SEQ ID NO: 182668 - DNA, 25 bp, SARS Virus
atggtacagtggaagatgagatttg

SEQ ID NO: 182669 - DNA, 25 bp, SARS Virus
tggtacagtggtagatgagatttga

SEQ ID NO: 182670 - DNA, 25 bp, SARS Virus
ggtacagtggtaaatgagatttgaa

SEQ ID NO: 182671 - DNA, 25 bp, SARS Virus
gtacagtggtagatgagatttgaac

SEQ ID NO: 182672 - DNA, 25 bp, SARS Virus
tacagtggtagaagagatttgaact

SEQ ID NO: 182673 - DNA, 25 bp, SARS Virus
acagtggtagataagatttgaactt

SEQ ID NO: 182674 - DNA, 25 bp, SARS Virus
cagtggtagatgagatttgaacttt

SEQ ID NO: 182675 - DNA, 25 bp, SARS Virus
agtggtagatgaaatttgaactttt

SEQ ID NO: 182676 - DNA, 25 bp, SARS Virus
gtggtagatgagatttgaacttttt

SEQ ID NO: 182677 - DNA, 25 bp, SARS Virus
tggtagatgagaattgaactttttc

SEQ ID NO: 182678 - DNA, 25 bp, SARS Virus
ggtagatgagatatgaactttttca

SEQ ID NO: 182679 - DNA, 25 bp, SARS Virus
gtagatgagattagaactttttcag

SEQ ID NO: 182680 - DNA, 25 bp, SARS Virus
tagatgagatttaaactttttcagt

SEQ ID NO: 182681 - DNA, 25 bp, SARS Virus
agatgagatttgaactttttcagta

SEQ ID NO: 182682 - DNA, 25 bp, SARS Virus
gatgagatttgaactttttcagtac

SEQ ID NO: 182683 - DNA, 25 bp, SARS Virus
atgagatttgaaatttttcagtacc

SEQ ID NO: 182684 - DNA, 25 bp, SARS Virus
tgagatttgaacattttcagtacct

SEQ ID NO: 182685 - DNA, 25 bp, SARS Virus
gagatttgaactatttcagtacctg

SEQ ID NO: 182686 - DNA, 25 bp, SARS Virus
agatttgaacttattcagtacctgt

SEQ ID NO: 182687 - DNA, 25 bp, SARS Virus
gatttgaactttatcagtacctgtc

SEQ ID NO: 182688 - DNA, 25 bp, SARS Virus
atttgaacttttacagtacctgtcg

SEQ ID NO: 182689 - DNA, 25 bp, SARS Virus
tttgaactttttaagtacctgtcgt

SEQ ID NO: 182690 - DNA, 25 bp, SARS Virus
ttgaactttttcagtacctgtcgtt

SEQ ID NO: 182691 - DNA, 25 bp, SARS Virus
tgaactttttcaatacctgtcgttg

SEQ ID NO: 182692 - DNA, 25 bp, SARS Virus
gaactttttcagaacctgtcgttgg

SEQ ID NO: 182693 - DNA, 25 bp, SARS Virus
aactttttcagtacctgtcgttggc

SEQ ID NO: 182694 - DNA, 25 bp, SARS Virus
actttttcagtaactgtcgttggcg

SEQ ID NO: 182695 - DNA, 25 bp, SARS Virus
ctttttcagtacatgtcgttggcga

SEQ ID NO: 182696 - DNA, 25 bp, SARS Virus
tttttcagtaccagtcgttggcgac

SEQ ID NO: 182697 - DNA, 25 bp, SARS Virus
ttttcagtacctatcgttggcgacc

SEQ ID NO: 182698 - DNA, 25 bp, SARS Virus
tttcagtacctgacgttggcgacct

SEQ ID NO: 182699 - DNA, 25 bp, SARS Virus
ttcagtacctgtagttggcgacctg

SEQ ID NO: 182700 - DNA, 25 bp, SARS Virus
tcagtacctgtcattggcgacctgt

SEQ ID NO: 182701 - DNA, 25 bp, SARS Virus
cagtacctgtcgatggcgacctgtt

SEQ ID NO: 182702 - DNA, 25 bp, SARS Virus
agtacctgtcgtaggcgacctgtta

SEQ ID NO: 182703 - DNA, 25 bp, SARS Virus
gtacctgtcgttagcgacctgttag

SEQ ID NO: 182704 - DNA, 25 bp, SARS Virus
tacctgtcgttgacgacctgttaga

SEQ ID NO: 182705 - DNA, 25 bp, SARS Virus
acctgtcgttggagacctgttagaa

SEQ ID NO: 182706 - DNA, 25 bp, SARS Virus
cctgtcgttggcaacctgttagaaa

SEQ ID NO: 182707 - DNA, 25 bp, SARS Virus
ctgtcgttggcgacctgttagaaat

SEQ ID NO: 182708 - DNA, 25 bp, SARS Virus
tgtcgttggcgaactgttagaaatt

SEQ ID NO: 182709 - DNA, 25 bp, SARS Virus
gtcgttggcgacatgttagaaattg

SEQ ID NO: 182710 - DNA, 25 bp, SARS Virus
tcgttggcgaccagttagaaattgg

SEQ ID NO: 182711 - DNA, 25 bp, SARS Virus
cgttggcgacctattagaaattggt

SEQ ID NO: 182712 - DNA, 25 bp, SARS Virus
gttggcgacctgatagaaattggtt

SEQ ID NO: 182713 - DNA, 25 bp, SARS Virus
ttggcgacctgtaagaaattggttc

SEQ ID NO: 182714 - DNA, 25 bp, SARS Virus
tggcgacctgttagaaattggttca

SEQ ID NO: 182715 - DNA, 25 bp, SARS Virus
ggcgacctgttaaaaattggttcaa

SEQ ID NO: 182716 - DNA, 25 bp, SARS Virus
gcgacctgttagaaattggttcaat

SEQ ID NO: 182717 - DNA, 25 bp, SARS Virus
cgacctgttagaaattggttcaata

SEQ ID NO: 182718 - DNA, 25 bp, SARS Virus
gacctgttagaaattggttcaatat

SEQ ID NO: 182719 - DNA, 25 bp, SARS Virus
acctgttagaaaatggttcaatatt

SEQ ID NO: 182720 - DNA, 25 bp, SARS Virus
cctgttagaaataggttcaatattt

SEQ ID NO: 182721 - DNA, 25 bp, SARS Virus
ctgttagaaattagttcaatattta

SEQ ID NO: 182722 - DNA, 25 bp, SARS Virus
tgttagaaattgattcaatatttat

SEQ ID NO: 182723 - DNA, 25 bp, SARS Virus
gttagaaattggatcaatatttatc

SEQ ID NO: 182724 - DNA, 25 bp, SARS Virus
ttagaaattggtacaatatttatca

SEQ ID NO: 182725 - DNA, 25 bp, SARS Virus
tagaaattggttaaatatttatcag

SEQ ID NO: 182726 - DNA, 25 bp, SARS Virus
agaaattggttcaatatttatcaga

SEQ ID NO: 182727 - DNA, 25 bp, SARS Virus
gaaattggttcaatatttatcagag

SEQ ID NO: 182728 - DNA, 25 bp, SARS Virus
aaattggttcaaaatttatcagaga

SEQ ID NO: 182729 - DNA, 25 bp, SARS Virus
aattggttcaatatttatcagagaa

SEQ ID NO: 182730 - DNA, 25 bp, SARS Virus
attggttcaataattatcagagaag

SEQ ID NO: 182731 - DNA, 25 bp, SARS Virus
ttggttcaatatatatcagagaagt

SEQ ID NO: 182732 - DNA, 25 bp, SARS Virus
tggttcaatattaatcagagaagta

SEQ ID NO: 182733 - DNA, 25 bp, SARS Virus
ggttcaatatttatcagagaagtac

SEQ ID NO: 182734 - DNA, 25 bp, SARS Virus
gttcaatatttaacagagaagtaca

SEQ ID NO: 182735 - DNA, 25 bp, SARS Virus
ttcaatatttataagagaagtacaa

SEQ ID NO: 182736 - DNA, 25 bp, SARS Virus
tcaatatttatcagagaagtacaac

SEQ ID NO: 182737 - DNA, 25 bp, SARS Virus
caatatttatcaaagaagtacaacc

SEQ ID NO: 182738 - DNA, 25 bp, SARS Virus
aatatttatcagagaagtacaacca

SEQ ID NO: 182739 - DNA, 25 bp, SARS Virus
atatttatcagaaaagtacaaccat

SEQ ID NO: 182740 - DNA, 25 bp, SARS Virus
tatttatcagagaagtacaaccatc

SEQ ID NO: 182741 - DNA, 25 bp, SARS Virus
atttatcagagaagtacaaccatca

SEQ ID NO: 182742 - DNA, 25 bp, SARS Virus
tttatcagagaaatacaaccatcaa

SEQ ID NO: 182743 - DNA, 25 bp, SARS Virus
ttatcagagaagaacaaccatcaat

SEQ ID NO: 182744 - DNA, 25 bp, SARS Virus
tatcagagaagtacaaccatcaatc

SEQ ID NO: 182745 - DNA, 25 bp, SARS Virus
atcagagaagtaaaaccatcaatct

SEQ ID NO: 182746 - DNA, 25 bp, SARS Virus
tcagagaagtacaaccatcaatctg

SEQ ID NO: 182747 - DNA, 25 bp, SARS Virus
cagagaagtacaaccatcaatctgt

SEQ ID NO: 182748 - DNA, 25 bp, SARS Virus
agagaagtacaaacatcaatctgta

SEQ ID NO: 182749 - DNA, 25 bp, SARS Virus
gagaagtacaacaatcaatctgtat

SEQ ID NO: 182750 - DNA, 25 bp, SARS Virus
agaagtacaaccatcaatctgtatc

SEQ ID NO: 182751 - DNA, 25 bp, SARS Virus
gaagtacaaccaacaatctgtatca

SEQ ID NO: 182752 - DNA, 25 bp, SARS Virus
aagtacaaccataaatctgtatcat

SEQ ID NO: 182753 - DNA, 25 bp, SARS Virus
agtacaaccatcaatctgtatcata

SEQ ID NO: 182754 - DNA, 25 bp, SARS Virus
gtacaaccatcaatctgtatcatac

SEQ ID NO: 182755 - DNA, 25 bp, SARS Virus
tacaaccatcaaactgtatcatacg

SEQ ID NO: 182756 - DNA, 25 bp, SARS Virus
acaaccatcaatatgtatcatacgg

SEQ ID NO: 182757 - DNA, 25 bp, SARS Virus
caaccatcaatcagtatcatacgga

SEQ ID NO: 182758 - DNA, 25 bp, SARS Virus
aaccatcaatctatatcatacggag

SEQ ID NO: 182759 - DNA, 25 bp, SARS Virus
accatcaatctgaatcatacggaga

SEQ ID NO: 182760 - DNA, 25 bp, SARS Virus
ccatcaatctgtatcatacggagaa

SEQ ID NO: 182761 - DNA, 25 bp, SARS Virus
catcaatctgtaacatacggagaat

SEQ ID NO: 182762 - DNA, 25 bp, SARS Virus
atcaatctgtataatacggagaatt

SEQ ID NO: 182763 - DNA, 25 bp, SARS Virus
tcaatctgtatcatacggagaattg

SEQ ID NO: 182764 - DNA, 25 bp, SARS Virus
caatctgtatcaaacggagaattga

SEQ ID NO: 182765 - DNA, 25 bp, SARS Virus
aatctgtatcatacggagaattgat

SEQ ID NO: 182766 - DNA, 25 bp, SARS Virus
atctgtatcataaggagaattgatg

SEQ ID NO: 182767 - DNA, 25 bp, SARS Virus
tctgtatcatacagagaattgatgt

SEQ ID NO: 182768 - DNA, 25 bp, SARS Virus
ctgtatcatacgaagaattgatgtt

SEQ ID NO: 182769 - DNA, 25 bp, SARS Virus
tgtatcatacggagaattgatgttt

SEQ ID NO: 182770 - DNA, 25 bp, SARS Virus
gtatcatacggaaaattgatgtttc

SEQ ID NO: 182771 - DNA, 25 bp, SARS Virus
tatcatacggagaattgatgtttca

SEQ ID NO: 182772 - DNA, 25 bp, SARS Virus
atcatacggagaattgatgtttcat

SEQ ID NO: 182773 - DNA, 25 bp, SARS Virus
tcatacggagaaatgatgtttcatt

SEQ ID NO: 182774 - DNA, 25 bp, SARS Virus
catacggagaatagatgtttcattc

SEQ ID NO: 182775 - DNA, 25 bp, SARS Virus
atacggagaattaatgtttcattct

SEQ ID NO: 182776 - DNA, 25 bp, SARS Virus
tacggagaattgatgtttcattctc

SEQ ID NO: 182777 - DNA, 25 bp, SARS Virus
acggagaattgaagtttcattctca

SEQ ID NO: 182778 - DNA, 25 bp, SARS Virus
cggagaattgatatttcattctcag

SEQ ID NO: 182779 - DNA, 25 bp, SARS Virus
ggagaattgatgattcattctcaga

SEQ ID NO: 182780 - DNA, 25 bp, SARS Virus
gagaattgatgtatcattctcagat

SEQ ID NO: 182781 - DNA, 25 bp, SARS Virus
agaattgatgttacattctcagatt

SEQ ID NO: 182782 - DNA, 25 bp, SARS Virus
gaattgatgtttaattctcagatta

SEQ ID NO: 182783 - DNA, 25 bp, SARS Virus
aattgatgtttcattctcagattat

SEQ ID NO: 182784 - DNA, 25 bp, SARS Virus
attgatgtttcaatctcagattatt

SEQ ID NO: 182785 - DNA, 25 bp, SARS Virus
ttgatgtttcatactcagattattt

SEQ ID NO: 182786 - DNA, 25 bp, SARS Virus
tgatgtttcattatcagattattta

SEQ ID NO: 182787 - DNA, 25 bp, SARS Virus
gatgtttcattcacagattatttaa

SEQ ID NO: 182788 - DNA, 25 bp, SARS Virus
atgtttcattctaagattatttaac

SEQ ID NO: 182789 - DNA, 25 bp, SARS Virus
tgtttcattctcagattatttaacg

SEQ ID NO: 182790 - DNA, 25 bp, SARS Virus
gtttcattctcaaattatttaacgg

SEQ ID NO: 182791 - DNA, 25 bp, SARS Virus
tttcattctcagattatttaacgga

SEQ ID NO: 182792 - DNA, 25 bp, SARS Virus
ttcattctcagaatatttaacggaa

SEQ ID NO: 182793 - DNA, 25 bp, SARS Virus
tcattctcagataatttaacggaag

SEQ ID NO: 182794 - DNA, 25 bp, SARS Virus
cattctcagattatttaacggaagg

SEQ ID NO: 182795 - DNA, 25 bp, SARS Virus
attctcagattaattaacggaagga

SEQ ID NO: 182796 - DNA, 25 bp, SARS Virus
ttctcagattatataacggaaggag

SEQ ID NO: 182797 - DNA, 25 bp, SARS Virus
tctcagattattaaacggaaggagt

SEQ ID NO: 182798 - DNA, 25 bp, SARS Virus
ctcagattatttaacggaaggagta

SEQ ID NO: 182799 - DNA, 25 bp, SARS Virus
tcagattatttaacggaaggagtag

SEQ ID NO: 182800 - DNA, 25 bp, SARS Virus
cagattatttaaaggaaggagtagg

SEQ ID NO: 182801 - DNA, 25 bp, SARS Virus
agattatttaacagaaggagtagga

SEQ ID NO: 182802 - DNA, 25 bp, SARS Virus
gattatttaacgaaaggagtaggaa

SEQ ID NO: 182803 - DNA, 25 bp, SARS Virus
attatttaacggaaggagtaggaag

SEQ ID NO: 182804 - DNA, 25 bp, SARS Virus
ttatttaacggaaggagtaggaaga

SEQ ID NO: 182805 - DNA, 25 bp, SARS Virus
tatttaacggaaagagtaggaagag

SEQ ID NO: 182806 - DNA, 25 bp, SARS Virus
atttaacggaagaagtaggaagagg

SEQ ID NO: 182807 - DNA, 25 bp, SARS Virus
tttaacggaaggagtaggaagagga

SEQ ID NO: 182808 - DNA, 25 bp, SARS Virus
ttaacggaaggaataggaagaggac

SEQ ID NO: 182809 - DNA, 25 bp, SARS Virus
taacggaaggagaaggaagaggacc

SEQ ID NO: 182810 - DNA, 25 bp, SARS Virus
aacggaaggagtaggaagaggacct

SEQ ID NO: 182811 - DNA, 25 bp, SARS Virus
acggaaggagtaagaagaggacctt

SEQ ID NO: 182812 - DNA, 25 bp, SARS Virus
cggaaggagtagaaagaggaccttc

SEQ ID NO: 182813 - DNA, 25 bp, SARS Virus
ggaaggagtaggaagaggaccttcg

SEQ ID NO: 182814 - DNA, 25 bp, SARS Virus
gaaggagtaggaagaggaccttcgc

SEQ ID NO: 182815 - DNA, 25 bp, SARS Virus
aaggagtaggaaaaggaccttcgct

SEQ ID NO: 182816 - DNA, 25 bp, SARS Virus
aggagtaggaagaggaccttcgctg

SEQ ID NO: 182817 - DNA, 25 bp, SARS Virus
ggagtaggaagaagaccttcgctgt

SEQ ID NO: 182818 - DNA, 25 bp, SARS Virus
gagtaggaagagaaccttcgctgtc

SEQ ID NO: 182819 - DNA, 25 bp, SARS Virus
agtaggaagaggaccttcgctgtcg

SEQ ID NO: 182820 - DNA, 25 bp, SARS Virus
gtaggaagaggaacttcgctgtcgt

SEQ ID NO: 182821 - DNA, 25 bp, SARS Virus
taggaagaggacattcgctgtcgtt

SEQ ID NO: 182822 - DNA, 25 bp, SARS Virus
aggaagaggaccatcgctgtcgtta

SEQ ID NO: 182823 - DNA, 25 bp, SARS Virus
ggaagaggacctacgctgtcgttaa

SEQ ID NO: 182824 - DNA, 25 bp, SARS Virus
gaagaggaccttagctgtcgttaat

SEQ ID NO: 182825 - DNA, 25 bp, SARS Virus
aagaggaccttcactgtcgttaatc

SEQ ID NO: 182826 - DNA, 25 bp, SARS Virus
agaggaccttcgatgtcgttaatca

SEQ ID NO: 182827 - DNA, 25 bp, SARS Virus
gaggaccttcgcagtcgttaatcaa

SEQ ID NO: 182828 - DNA, 25 bp, SARS Virus
aggaccttcgctatcgttaatcaaa

SEQ ID NO: 182829 - DNA, 25 bp, SARS Virus
ggaccttcgctgacgttaatcaaaa

SEQ ID NO: 182830 - DNA, 25 bp, SARS Virus
gaccttcgctgtagttaatcaaaaa

SEQ ID NO: 182831 - DNA, 25 bp, SARS Virus
accttcgctgtcattaatcaaaaat

SEQ ID NO: 182832 - DNA, 25 bp, SARS Virus
ccttcgctgtcgataatcaaaaatc

SEQ ID NO: 182833 - DNA, 25 bp, SARS Virus
cttcgctgtcgtaaatcaaaaatcc

SEQ ID NO: 182834 - DNA, 25 bp, SARS Virus
ttcgctgtcgttaatcaaaaatcct

SEQ ID NO: 182835 - DNA, 25 bp, SARS Virus
tcgctgtcgttaatcaaaaatcctt

SEQ ID NO: 182836 - DNA, 25 bp, SARS Virus
cgctgtcgttaaacaaaaatccttg

SEQ ID NO: 182837 - DNA, 25 bp, SARS Virus
gctgtcgttaataaaaaatccttga

SEQ ID NO: 182838 - DNA, 25 bp, SARS Virus
ctgtcgttaatcaaaaatccttgaa

SEQ ID NO: 182839 - DNA, 25 bp, SARS Virus
tgtcgttaatcaaaaatccttgaaa

SEQ ID NO: 182840 - DNA, 25 bp, SARS Virus
gtcgttaatcaaaaatccttgaaac

SEQ ID NO: 182841 - DNA, 25 bp, SARS Virus
tcgttaatcaaaaatccttgaaacg

SEQ ID NO: 182842 - DNA, 25 bp, SARS Virus
cgttaatcaaaaatccttgaaacgt

SEQ ID NO: 182843 - DNA, 25 bp, SARS Virus
gttaatcaaaaaaccttgaaacgtt

SEQ ID NO: 182844 - DNA, 25 bp, SARS Virus
ttaatcaaaaatacttgaaacgttt

SEQ ID NO: 182845 - DNA, 25 bp, SARS Virus
taatcaaaaatcattgaaacgtttt

SEQ ID NO: 182846 - DNA, 25 bp, SARS Virus
aatcaaaaatccatgaaacgttttg

SEQ ID NO: 182847 - DNA, 25 bp, SARS Virus
atcaaaaatcctagaaacgttttgg

SEQ ID NO: 182848 - DNA, 25 bp, SARS Virus
tcaaaaatccttaaaacgttttggt

SEQ ID NO: 182849 - DNA, 25 bp, SARS Virus
caaaaatccttgaaacgttttggtc

SEQ ID NO: 182850 - DNA, 25 bp, SARS Virus
aaaaatccttgaaacgttttggtcg

SEQ ID NO: 182851 - DNA, 25 bp, SARS Virus
aaaatccttgaaacgttttggtcgt

SEQ ID NO: 182852 - DNA, 25 bp, SARS Virus
aaatccttgaaaagttttggtcgtt

SEQ ID NO: 182853 - DNA, 25 bp, SARS Virus
aatccttgaaacattttggtcgttg

SEQ ID NO: 182854 - DNA, 25 bp, SARS Virus
atccttgaaacgatttggtcgttga

SEQ ID NO: 182855 - DNA, 25 bp, SARS Virus
tccttgaaacgtattggtcgttgaa

SEQ ID NO: 182856 - DNA, 25 bp, SARS Virus
ccttgaaacgttatggtcgttgaaa

SEQ ID NO: 182857 - DNA, 25 bp, SARS Virus
cttgaaacgtttaggtcgttgaaaa

SEQ ID NO: 182858 - DNA, 25 bp, SARS Virus
ttgaaacgttttagtcgttgaaaaa

SEQ ID NO: 182859 - DNA, 25 bp, SARS Virus
tgaaacgttttgatcgttgaaaaag

SEQ ID NO: 182860 - DNA, 25 bp, SARS Virus
gaaacgttttggacgttgaaaaagc

SEQ ID NO: 182861 - DNA, 25 bp, SARS Virus
aaacgttttggtagttgaaaaagca

SEQ ID NO: 182862 - DNA, 25 bp, SARS Virus
aacgttttggtcattgaaaaagcaa

SEQ ID NO: 182863 - DNA, 25 bp, SARS Virus
acgttttggtcgatgaaaaagcaac

SEQ ID NO: 182864 - DNA, 25 bp, SARS Virus
cgttttggtcgtagaaaaagcaaca

SEQ ID NO: 182865 - DNA, 25 bp, SARS Virus
gttttggtcgttaaaaaagcaacat

SEQ ID NO: 182866 - DNA, 25 bp, SARS Virus
ttttggtcgttgaaaaagcaacatt

SEQ ID NO: 182867 - DNA, 25 bp, SARS Virus
tttggtcgttgaaaaagcaacattt

SEQ ID NO: 182868 - DNA, 25 bp, SARS Virus
ttggtcgttgaaaaagcaacattta

SEQ ID NO: 182869 - DNA, 25 bp, SARS Virus
tggtcgttgaaaaagcaacatttat

SEQ ID NO: 182870 - DNA, 25 bp, SARS Virus
ggtcgttgaaaaagcaacatttata

SEQ ID NO: 182871 - DNA, 25 bp, SARS Virus
gtcgttgaaaaaacaacatttatag

SEQ ID NO: 182872 - DNA, 25 bp, SARS Virus
tcgttgaaaaagaaacatttatagt

SEQ ID NO: 182873 - DNA, 25 bp, SARS Virus
cgttgaaaaagcaacatttatagtt

SEQ ID NO: 182874 - DNA, 25 bp, SARS Virus
gttgaaaaagcaacatttatagttt

SEQ ID NO: 182875 - DNA, 25 bp, SARS Virus
ttgaaaaagcaaaatttatagtttt

SEQ ID NO: 182876 - DNA, 25 bp, SARS Virus
tgaaaaagcaacatttatagttttc

SEQ ID NO: 182877 - DNA, 25 bp, SARS Virus
gaaaaagcaacaattatagttttcg

SEQ ID NO: 182878 - DNA, 25 bp, SARS Virus
aaaaagcaacatatatagttttcgg

SEQ ID NO: 182879 - DNA, 25 bp, SARS Virus
aaaagcaacattaatagttttcggg

SEQ ID NO: 182880 - DNA, 25 bp, SARS Virus
aaagcaacatttatagttttcggga

SEQ ID NO: 182881 - DNA, 25 bp, SARS Virus
aagcaacatttaaagttttcgggac

SEQ ID NO: 182882 - DNA, 25 bp, SARS Virus
agcaacatttatagttttcgggaca

SEQ ID NO: 182883 - DNA, 25 bp, SARS Virus
gcaacatttataattttcgggacat

SEQ ID NO: 182884 - DNA, 25 bp, SARS Virus
caacatttatagatttcgggacatc

SEQ ID NO: 182885 - DNA, 25 bp, SARS Virus
aacatttatagtattcgggacatct

SEQ ID NO: 182886 - DNA, 25 bp, SARS Virus
acatttatagttatcgggacatctg

SEQ ID NO: 182887 - DNA, 25 bp, SARS Virus
catttatagtttacgggacatctgc

SEQ ID NO: 182888 - DNA, 25 bp, SARS Virus
atttatagttttagggacatctgct

SEQ ID NO: 182889 - DNA, 25 bp, SARS Virus
tttatagttttcaggacatctgctg

SEQ ID NO: 182890 - DNA, 25 bp, SARS Virus
ttatagttttcgagacatctgctgt

SEQ ID NO: 182891 - DNA, 25 bp, SARS Virus
tatagttttcggaacatctgctgta

SEQ ID NO: 182892 - DNA, 25 bp, SARS Virus
atagttttcgggacatctgctgtag

SEQ ID NO: 182893 - DNA, 25 bp, SARS Virus
tagttttcgggaaatctgctgtagt

SEQ ID NO: 182894 - DNA, 25 bp, SARS Virus
agttttcgggacatctgctgtagtc

SEQ ID NO: 182895 - DNA, 25 bp, SARS Virus
gttttcgggacaactgctgtagtca

SEQ ID NO: 182896 - DNA, 25 bp, SARS Virus
ttttcgggacatatgctgtagtcat

SEQ ID NO: 182897 - DNA, 25 bp, SARS Virus
tttcgggacatcagctgtagtcatg

SEQ ID NO: 182898 - DNA, 25 bp, SARS Virus
ttcgggacatctactgtagtcatga

SEQ ID NO: 182899 - DNA, 25 bp, SARS Virus
tcgggacatctgatgtagtcatgat

SEQ ID NO: 182900 - DNA, 25 bp, SARS Virus
cgggacatctgcagtagtcatgatc

SEQ ID NO: 182901 - DNA, 25 bp, SARS Virus
gggacatctgctatagtcatgatca

SEQ ID NO: 182902 - DNA, 25 bp, SARS Virus
ggacatctgctgaagtcatgatcac

SEQ ID NO: 182903 - DNA, 25 bp, SARS Virus
gacatctgctgtagtcatgatcacg

SEQ ID NO: 182904 - DNA, 25 bp, SARS Virus
acatctgctgtaatcatgatcacgg

SEQ ID NO: 182905 - DNA, 25 bp, SARS Virus
catctgctgtagacatgatcacgga

SEQ ID NO: 182906 - DNA, 25 bp, SARS Virus
atctgctgtagtaatgatcacggac

SEQ ID NO: 182907 - DNA, 25 bp, SARS Virus
tctgctgtagtcatgatcacggaca

SEQ ID NO: 182908 - DNA, 25 bp, SARS Virus
ctgctgtagtcaagatcacggacac

SEQ ID NO: 182909 - DNA, 25 bp, SARS Virus
tgctgtagtcataatcacggacacg

SEQ ID NO: 182910 - DNA, 25 bp, SARS Virus
gctgtagtcatgatcacggacacgg

SEQ ID NO: 182911 - DNA, 25 bp, SARS Virus
ctgtagtcatgaacacggacacggc

SEQ ID NO: 182912 - DNA, 25 bp, SARS Virus
tgtagtcatgataacggacacggcg

SEQ ID NO: 182913 - DNA, 25 bp, SARS Virus
gtagtcatgatcacggacacggcgt

SEQ ID NO: 182914 - DNA, 25 bp, SARS Virus
tagtcatgatcaaggacacggcgtg

SEQ ID NO: 182915 - DNA, 25 bp, SARS Virus
agtcatgatcacagacacggcgtgc

SEQ ID NO: 182916 - DNA, 25 bp, SARS Virus
gtcatgatcacgaacacggcgtgcc

SEQ ID NO: 182917 - DNA, 25 bp, SARS Virus
tcatgatcacggacacggcgtgcca

SEQ ID NO: 182918 - DNA, 25 bp, SARS Virus
catgatcacggaaacggcgtgccac

SEQ ID NO: 182919 - DNA, 25 bp, SARS Virus
atgatcacggacacggcgtgccaca

SEQ ID NO: 182920 - DNA, 25 bp, SARS Virus
tgatcacggacaaggcgtgccacat

SEQ ID NO: 182921 - DNA, 25 bp, SARS Virus
gatcacggacacagcgtgccacatt

SEQ ID NO: 182922 - DNA, 25 bp, SARS Virus
atcacggacacgacgtgccacattc

SEQ ID NO: 182923 - DNA, 25 bp, SARS Virus
tcacggacacggagtgccacattct

SEQ ID NO: 182924 - DNA, 25 bp, SARS Virus
cacggacacggcatgccacattctg

SEQ ID NO: 182925 - DNA, 25 bp, SARS Virus
acggacacggcgagccacattctgc

SEQ ID NO: 182926 - DNA, 25 bp, SARS Virus
cggacacggcgtaccacattctgcc

SEQ ID NO: 182927 - DNA, 25 bp, SARS Virus
ggacacggcgtgacacattctgccc

SEQ ID NO: 182928 - DNA, 25 bp, SARS Virus
gacacggcgtgcaacattctgcccg

SEQ ID NO: 182929 - DNA, 25 bp, SARS Virus
acacggcgtgccacattctgcccga

SEQ ID NO: 182930 - DNA, 25 bp, SARS Virus
cacggcgtgccaaattctgcccgac

SEQ ID NO: 182931 - DNA, 25 bp, SARS Virus
acggcgtgccacattctgcccgacg

SEQ ID NO: 182932 - DNA, 25 bp, SARS Virus
cggcgtgccacaatctgcccgacgt

SEQ ID NO: 182933 - DNA, 25 bp, SARS Virus
ggcgtgccacatactgcccgacgtg

SEQ ID NO: 182934 - DNA, 25 bp, SARS Virus
gcgtgccacattatgcccgacgtga

SEQ ID NO: 182935 - DNA, 25 bp, SARS Virus
cgtgccacattcagcccgacgtgaa

SEQ ID NO: 182936 - DNA, 25 bp, SARS Virus
gtgccacattctacccgacgtgaat

SEQ ID NO: 182937 - DNA, 25 bp, SARS Virus
tgccacattctgaccgacgtgaatg

SEQ ID NO: 182938 - DNA, 25 bp, SARS Virus
gccacattctgcacgacgtgaatgt

SEQ ID NO: 182939 - DNA, 25 bp, SARS Virus
ccacattctgccagacgtgaatgtg

SEQ ID NO: 182940 - DNA, 25 bp, SARS Virus
cacattctgcccaacgtgaatgtgg

SEQ ID NO: 182941 - DNA, 25 bp, SARS Virus
acattctgcccgacgtgaatgtggc

SEQ ID NO: 182942 - DNA, 25 bp, SARS Virus
cattctgcccgaagtgaatgtggcg

SEQ ID NO: 182943 - DNA, 25 bp, SARS Virus
attctgcccgacatgaatgtggcgt

SEQ ID NO: 182944 - DNA, 25 bp, SARS Virus
ttctgcccgacgagaatgtggcgtt

SEQ ID NO: 182945 - DNA, 25 bp, SARS Virus
tctgcccgacgtaaatgtggcgttt

SEQ ID NO: 182946 - DNA, 25 bp, SARS Virus
ctgcccgacgtgaatgtggcgtttg

SEQ ID NO: 182947 - DNA, 25 bp, SARS Virus
tgcccgacgtgaatgtggcgtttgg

SEQ ID NO: 182948 - DNA, 25 bp, SARS Virus
gcccgacgtgaaagtggcgtttggg

SEQ ID NO: 182949 - DNA, 25 bp, SARS Virus
cccgacgtgaatatggcgtttgggc

SEQ ID NO: 182950 - DNA, 25 bp, SARS Virus
ccgacgtgaatgaggcgtttgggca

SEQ ID NO: 182951 - DNA, 25 bp, SARS Virus
cgacgtgaatgtagcgtttgggcaa

SEQ ID NO: 182952 - DNA, 25 bp, SARS Virus
gacgtgaatgtgacgtttgggcaaa

SEQ ID NO: 182953 - DNA, 25 bp, SARS Virus
acgtgaatgtggagtttgggcaaat

SEQ ID NO: 182954 - DNA, 25 bp, SARS Virus
cgtgaatgtggcatttgggcaaatt

SEQ ID NO: 182955 - DNA, 25 bp, SARS Virus
gtgaatgtggcgattgggcaaattt

SEQ ID NO: 182956 - DNA, 25 bp, SARS Virus
tgaatgtggcgtatgggcaaatttt

SEQ ID NO: 182957 - DNA, 25 bp, SARS Virus
gaatgtggcgttagggcaaattttt

SEQ ID NO: 182958 - DNA, 25 bp, SARS Virus
aatgtggcgtttaggcaaatttttg

SEQ ID NO: 182959 - DNA, 25 bp, SARS Virus
atgtggcgtttgagcaaatttttgc

SEQ ID NO: 182960 - DNA, 25 bp, SARS Virus
tgtggcgtttggacaaatttttgca

SEQ ID NO: 182961 - DNA, 25 bp, SARS Virus
gtggcgtttgggaaaatttttgcaa

SEQ ID NO: 182962 - DNA, 25 bp, SARS Virus
tggcgtttgggcaaatttttgcaac

SEQ ID NO: 182963 - DNA, 25 bp, SARS Virus
ggcgtttgggcaaatttttgcaact

SEQ ID NO: 182964 - DNA, 25 bp, SARS Virus
gcgtttgggcaaatttttgcaacta

SEQ ID NO: 182965 - DNA, 25 bp, SARS Virus
cgtttgggcaaaattttgcaactac

SEQ ID NO: 182966 - DNA, 25 bp, SARS Virus
gtttgggcaaatatttgcaactacg

SEQ ID NO: 182967 - DNA, 25 bp, SARS Virus
tttgggcaaattattgcaactacgt

SEQ ID NO: 182968 - DNA, 25 bp, SARS Virus
ttgggcaaatttatgcaactacgta

SEQ ID NO: 182969 - DNA, 25 bp, SARS Virus
tgggcaaattttagcaactacgtag

SEQ ID NO: 182970 - DNA, 25 bp, SARS Virus
gggcaaatttttacaactacgtagg

SEQ ID NO: 182971 - DNA, 25 bp, SARS Virus
ggcaaatttttgaaactacgtaggc

SEQ ID NO: 182972 - DNA, 25 bp, SARS Virus
gcaaatttttgcaactacgtaggcg

SEQ ID NO: 182973 - DNA, 25 bp, SARS Virus
caaatttttgcaactacgtaggcgt

SEQ ID NO: 182974 - DNA, 25 bp, SARS Virus
aaatttttgcaaatacgtaggcgtc

SEQ ID NO: 182975 - DNA, 25 bp, SARS Virus
aatttttgcaacaacgtaggcgtct

SEQ ID NO: 182976 - DNA, 25 bp, SARS Virus
atttttgcaactacgtaggcgtctg

SEQ ID NO: 182977 - DNA, 25 bp, SARS Virus
tttttgcaactaagtaggcgtctga

SEQ ID NO: 182978 - DNA, 25 bp, SARS Virus
ttttgcaactacataggcgtctgac

SEQ ID NO: 182979 - DNA, 25 bp, SARS Virus
tttgcaactacgaaggcgtctgacg

SEQ ID NO: 182980 - DNA, 25 bp, SARS Virus
ttgcaactacgtaggcgtctgacgt

SEQ ID NO: 182981 - DNA, 25 bp, SARS Virus
tgcaactacgtaagcgtctgacgta

SEQ ID NO: 182982 - DNA, 25 bp, SARS Virus
gcaactacgtagacgtctgacgtag

SEQ ID NO: 182983 - DNA, 25 bp, SARS Virus
caactacgtaggagtctgacgtagt

SEQ ID NO: 182984 - DNA, 25 bp, SARS Virus
aactacgtaggcatctgacgtagtt

SEQ ID NO: 182985 - DNA, 25 bp, SARS Virus
actacgtaggcgactgacgtagttc

SEQ ID NO: 182986 - DNA, 25 bp, SARS Virus
ctacgtaggcgtatgacgtagttcc

SEQ ID NO: 182987 - DNA, 25 bp, SARS Virus
tacgtaggcgtcagacgtagttccc

SEQ ID NO: 182988 - DNA, 25 bp, SARS Virus
acgtaggcgtctaacgtagttccca

SEQ ID NO: 182989 - DNA, 25 bp, SARS Virus
cgtaggcgtctgacgtagttcccaa

SEQ ID NO: 182990 - DNA, 25 bp, SARS Virus
gtaggcgtctgaagtagttcccaag

SEQ ID NO: 182991 - DNA, 25 bp, SARS Virus
taggcgtctgacatagttcccaagc

SEQ ID NO: 182992 - DNA, 25 bp, SARS Virus
aggcgtctgacgaagttcccaagcg

SEQ ID NO: 182993 - DNA, 25 bp, SARS Virus
ggcgtctgacgtagttcccaagcgc

SEQ ID NO: 182994 - DNA, 25 bp, SARS Virus
gcgtctgacgtaattcccaagcgcc

SEQ ID NO: 182995 - DNA, 25 bp, SARS Virus
cgtctgacgtagatcccaagcgcct

SEQ ID NO: 182996 - DNA, 25 bp, SARS Virus
gtctgacgtagtacccaagcgcctc

SEQ ID NO: 182997 - DNA, 25 bp, SARS Virus
tctgacgtagttaccaagcgcctca

SEQ ID NO: 182998 - DNA, 25 bp, SARS Virus
ctgacgtagttcacaagcgcctcaa

SEQ ID NO: 182999 - DNA, 25 bp, SARS Virus
tgacgtagttccaaagcgcctcaac

SEQ ID NO: 183000 - DNA, 25 bp, SARS Virus
gacgtagttcccaagcgcctcaacc

SEQ ID NO: 183001 - DNA, 25 bp, SARS Virus
acgtagttcccaagcgcctcaacca

SEQ ID NO: 183002 - DNA, 25 bp, SARS Virus
cgtagttcccaaacgcctcaaccag

SEQ ID NO: 183003 - DNA, 25 bp, SARS Virus
gtagttcccaagagcctcaaccagt

SEQ ID NO: 183004 - DNA, 25 bp, SARS Virus
tagttcccaagcacctcaaccagtg

SEQ ID NO: 183005 - DNA, 25 bp, SARS Virus
agttcccaagcgactcaaccagtgt

SEQ ID NO: 183006 - DNA, 25 bp, SARS Virus
gttcccaagcgcatcaaccagtgtt

SEQ ID NO: 183007 - DNA, 25 bp, SARS Virus
ttcccaagcgccacaaccagtgttg

SEQ ID NO: 183008 - DNA, 25 bp, SARS Virus
tcccaagcgcctaaaccagtgttga

SEQ ID NO: 183009 - DNA, 25 bp, SARS Virus
cccaagcgcctcaaccagtgttgat

SEQ ID NO: 183010 - DNA, 25 bp, SARS Virus
ccaagcgcctcaaccagtgttgatg

SEQ ID NO: 183011 - DNA, 25 bp, SARS Virus
caagcgcctcaaacagtgttgatgt

SEQ ID NO: 183012 - DNA, 25 bp, SARS Virus
aagcgcctcaacaagtgttgatgtc

SEQ ID NO: 183013 - DNA, 25 bp, SARS Virus
agcgcctcaaccagtgttgatgtcg

SEQ ID NO: 183014 - DNA, 25 bp, SARS Virus
gcgcctcaaccaatgttgatgtcgg

SEQ ID NO: 183015 - DNA, 25 bp, SARS Virus
cgcctcaaccagagttgatgtcggt

SEQ ID NO: 183016 - DNA, 25 bp, SARS Virus
gcctcaaccagtattgatgtcggta

SEQ ID NO: 183017 - DNA, 25 bp, SARS Virus
cctcaaccagtgatgatgtcggtat

SEQ ID NO: 183018 - DNA, 25 bp, SARS Virus
ctcaaccagtgtagatgtcggtatt

SEQ ID NO: 183019 - DNA, 25 bp, SARS Virus
tcaaccagtgttaatgtcggtattg

SEQ ID NO: 183020 - DNA, 25 bp, SARS Virus
caaccagtgttgatgtcggtattgg

SEQ ID NO: 183021 - DNA, 25 bp, SARS Virus
aaccagtgttgaagtcggtattgga

SEQ ID NO: 183022 - DNA, 25 bp, SARS Virus
accagtgttgatatcggtattggaa

SEQ ID NO: 183023 - DNA, 25 bp, SARS Virus
ccagtgttgatgacggtattggaaa

SEQ ID NO: 183024 - DNA, 25 bp, SARS Virus
cagtgttgatgtaggtattggaaag

SEQ ID NO: 183025 - DNA, 25 bp, SARS Virus
agtgttgatgtcagtattggaaagg

SEQ ID NO: 183026 - DNA, 25 bp, SARS Virus
gtgttgatgtcgatattggaaaggt

SEQ ID NO: 183027 - DNA, 25 bp, SARS Virus
tgttgatgtcggaattggaaaggtg

SEQ ID NO: 183028 - DNA, 25 bp, SARS Virus
gttgatgtcggtattggaaaggtgt

SEQ ID NO: 183029 - DNA, 25 bp, SARS Virus
ttgatgtcggtaatggaaaggtgta

SEQ ID NO: 183030 - DNA, 25 bp, SARS Virus
tgatgtcggtataggaaaggtgtaa

SEQ ID NO: 183031 - DNA, 25 bp, SARS Virus
gatgtcggtattagaaaggtgtaag

SEQ ID NO: 183032 - DNA, 25 bp, SARS Virus
atgtcggtattgaaaaggtgtaagg

SEQ ID NO: 183033 - DNA, 25 bp, SARS Virus
tgtcgttaacatccactgctcataa

SEQ ID NO: 183034 - DNA, 25 bp, SARS Virus
gtcgttaacatacactgctcataaa

SEQ ID NO: 183035 - DNA, 25 bp, SARS Virus
tcgttaacataccctgctcataaag

SEQ ID NO: 183036 - DNA, 25 bp, SARS Virus
cgttaacatacactgctcataaaga

SEQ ID NO: 183037 - DNA, 25 bp, SARS Virus
gttaacatacaccgctcataaagaa

SEQ ID NO: 183038 - DNA, 25 bp, SARS Virus
ttaacatacactcctcataaagaaa

SEQ ID NO: 183039 - DNA, 25 bp, SARS Virus
taacatacactgctcataaagaaaa

SEQ ID NO: 183040 - DNA, 25 bp, SARS Virus
aacatacactgcccataaagaaaat

SEQ ID NO: 183041 - DNA, 25 bp, SARS Virus
acatacactgctcataaagaaaatt

SEQ ID NO: 183042 - DNA, 25 bp, SARS Virus
catacactgctcctaaagaaaatta

SEQ ID NO: 183043 - DNA, 25 bp, SARS Virus
atacactgctcacaaagaaaattac

SEQ ID NO: 183044 - DNA, 25 bp, SARS Virus
tacactgctcatcaagaaaattaca

SEQ ID NO: 183045 - DNA, 25 bp, SARS Virus
acactgctcatacagaaaattacat

SEQ ID NO: 183046 - DNA, 25 bp, SARS Virus
cactgctcataacgaaaattacata

SEQ ID NO: 183047 - DNA, 25 bp, SARS Virus
actgctcataaacaaaattacatag

SEQ ID NO: 183048 - DNA, 25 bp, SARS Virus
ctgctcataaagcaaattacatagt

SEQ ID NO: 183049 - DNA, 25 bp, SARS Virus
tgctcataaagacaattacatagtg

SEQ ID NO: 183050 - DNA, 25 bp, SARS Virus
gctcataaagaacattacatagtgt

SEQ ID NO: 183051 - DNA, 25 bp, SARS Virus
ctcataaagaaacttacatagtgtt

SEQ ID NO: 183052 - DNA, 25 bp, SARS Virus
tcataaagaaaactacatagtgtta

SEQ ID NO: 183053 - DNA, 25 bp, SARS Virus
cataaagaaaatcacatagtgttaa

SEQ ID NO: 183054 - DNA, 25 bp, SARS Virus
ataaagaaaattccatagtgttaat

SEQ ID NO: 183055 - DNA, 25 bp, SARS Virus
taaagaaaattacatagtgttaatg

SEQ ID NO: 183056 - DNA, 25 bp, SARS Virus
aaagaaaattacctagtgttaatgg

SEQ ID NO: 183057 - DNA, 25 bp, SARS Virus
aagaaaattacacagtgttaatggg

SEQ ID NO: 183058 - DNA, 25 bp, SARS Virus
agaaaattacatcgtgttaatggga

SEQ ID NO: 183059 - DNA, 25 bp, SARS Virus
gaaaattacatactgttaatgggag

SEQ ID NO: 183060 - DNA, 25 bp, SARS Virus
aaaattacatagcgttaatgggagt

SEQ ID NO: 183061 - DNA, 25 bp, SARS Virus
aaattacatagtcttaatgggagta

SEQ ID NO: 183062 - DNA, 25 bp, SARS Virus
aattacatagtgctaatgggagtag

SEQ ID NO: 183063 - DNA, 25 bp, SARS Virus
attacatagtgtcaatgggagtagt

SEQ ID NO: 183064 - DNA, 25 bp, SARS Virus
ttacatagtgttcatgggagtagtt

SEQ ID NO: 183065 - DNA, 25 bp, SARS Virus
tacatagtgttactgggagtagttt

SEQ ID NO: 183066 - DNA, 25 bp, SARS Virus
acatagtgttaacgggagtagtttt

SEQ ID NO: 183067 - DNA, 25 bp, SARS Virus
catagtgttaatcggagtagtttta

SEQ ID NO: 183068 - DNA, 25 bp, SARS Virus
atagtgttaatgcgagtagttttac

SEQ ID NO: 183069 - DNA, 25 bp, SARS Virus
tagtgttaatggcagtagttttact

SEQ ID NO: 183070 - DNA, 25 bp, SARS Virus
agtgttaatgggcgtagttttactg

SEQ ID NO: 183071 - DNA, 25 bp, SARS Virus
gtgttaatgggactagttttactgc

SEQ ID NO: 183072 - DNA, 25 bp, SARS Virus
tgttaatgggagcagttttactgca

SEQ ID NO: 183073 - DNA, 25 bp, SARS Virus
gttaatgggagtcgttttactgcat

SEQ ID NO: 183074 - DNA, 25 bp, SARS Virus
ttaatgggagtacttttactgcatc

SEQ ID NO: 183075 - DNA, 25 bp, SARS Virus
taatgggagtagctttactgcatct

SEQ ID NO: 183076 - DNA, 25 bp, SARS Virus
aatgggagtagtcttactgcatctc

SEQ ID NO: 183077 - DNA, 25 bp, SARS Virus
atgggagtagttctactgcatctcg

SEQ ID NO: 183078 - DNA, 25 bp, SARS Virus
tgggagtagtttcactgcatctcgt

SEQ ID NO: 183079 - DNA, 25 bp, SARS Virus
gggagtagttttcctgcatctcgta

SEQ ID NO: 183080 - DNA, 25 bp, SARS Virus
ggagtagttttactgcatctcgtat

SEQ ID NO: 183081 - DNA, 25 bp, SARS Virus
gagtagttttaccgcatctcgtatc

SEQ ID NO: 183082 - DNA, 25 bp, SARS Virus
agtagttttactccatctcgtatct

SEQ ID NO: 183083 - DNA, 25 bp, SARS Virus
gtagttttactgcatctcgtatctg

SEQ ID NO: 183084 - DNA, 25 bp, SARS Virus
tagttttactgcctctcgtatctga

SEQ ID NO: 183085 - DNA, 25 bp, SARS Virus
agttttactgcacctcgtatctgat

SEQ ID NO: 183086 - DNA, 25 bp, SARS Virus
gttttactgcatctcgtatctgatt

SEQ ID NO: 183087 - DNA, 25 bp, SARS Virus
ttttactgcatcccgtatctgattt

SEQ ID NO: 183088 - DNA, 25 bp, SARS Virus
tttactgcatctcgtatctgattta

SEQ ID NO: 183089 - DNA, 25 bp, SARS Virus
ttactgcatctcctatctgatttag

SEQ ID NO: 183090 - DNA, 25 bp, SARS Virus
tactgcatctcgcatctgatttagt

SEQ ID NO: 183091 - DNA, 25 bp, SARS Virus
actgcatctcgtctctgatttagtc

SEQ ID NO: 183092 - DNA, 25 bp, SARS Virus
ctgcatctcgtacctgatttagtcg

SEQ ID NO: 183093 - DNA, 25 bp, SARS Virus
tgcatctcgtatctgatttagtcgg

SEQ ID NO: 183094 - DNA, 25 bp, SARS Virus
gcatctcgtatccgatttagtcggt

SEQ ID NO: 183095 - DNA, 25 bp, SARS Virus
catctcgtatctcatttagtcggta

SEQ ID NO: 183096 - DNA, 25 bp, SARS Virus
atctcgtatctgctttagtcggtaa

SEQ ID NO: 183097 - DNA, 25 bp, SARS Virus
tctcgtatctgacttagtcggtaac

SEQ ID NO: 183098 - DNA, 25 bp, SARS Virus
ctcgtatctgatctagtcggtaaca

SEQ ID NO: 183099 - DNA, 25 bp, SARS Virus
tcgtatctgattcagtcggtaacac

SEQ ID NO: 183100 - DNA, 25 bp, SARS Virus
cgtatctgatttcgtcggtaacaca

SEQ ID NO: 183101 - DNA, 25 bp, SARS Virus
gtatctgatttactcggtaacacat

SEQ ID NO: 183102 - DNA, 25 bp, SARS Virus
tatctgatttagccggtaacacata

SEQ ID NO: 183103 - DNA, 25 bp, SARS Virus
atctgatttagtcggtaacacataa

SEQ ID NO: 183104 - DNA, 25 bp, SARS Virus
tctgatttagtccgtaacacataaa

SEQ ID NO: 183105 - DNA, 25 bp, SARS Virus
ctgatttagtcgctaacacataaat

SEQ ID NO: 183106 - DNA, 25 bp, SARS Virus
tgatttagtcggcaacacataaatc

SEQ ID NO: 183107 - DNA, 25 bp, SARS Virus
gatttagtcggtcacacataaatca

SEQ ID NO: 183108 - DNA, 25 bp, SARS Virus
atttagtcggtaccacataaatcaa

SEQ ID NO: 183109 - DNA, 25 bp, SARS Virus
tttagtcggtaacacataaatcaat

SEQ ID NO: 183110 - DNA, 25 bp, SARS Virus
ttagtcggtaacccataaatcaatc

SEQ ID NO: 183111 - DNA, 25 bp, SARS Virus
tagtcggtaacacataaatcaatct

SEQ ID NO: 183112 - DNA, 25 bp, SARS Virus
agtcggtaacacctaaatcaatctg

SEQ ID NO: 183113 - DNA, 25 bp, SARS Virus
gtcggtaacacacaaatcaatctgc

SEQ ID NO: 183114 - DNA, 25 bp, SARS Virus
tcggtaacacatcaatcaatctgcg

SEQ ID NO: 183115 - DNA, 25 bp, SARS Virus
cggtaacacatacatcaatctgcga

SEQ ID NO: 183116 - DNA, 25 bp, SARS Virus
ggtaacacataactcaatctgcgac

SEQ ID NO: 183117 - DNA, 25 bp, SARS Virus
gtaacacataaaccaatctgcgact

SEQ ID NO: 183118 - DNA, 25 bp, SARS Virus
taacacataaatcaatctgcgactg

SEQ ID NO: 183119 - DNA, 25 bp, SARS Virus
aacacataaatccatctgcgactgc

SEQ ID NO: 183120 - DNA, 25 bp, SARS Virus
acacataaatcactctgcgactgca

SEQ ID NO: 183121 - DNA, 25 bp, SARS Virus
cacataaatcaacctgcgactgcac

SEQ ID NO: 183122 - DNA, 25 bp, SARS Virus
acataaatcaatctgcgactgcact

SEQ ID NO: 183123 - DNA, 25 bp, SARS Virus
cataaatcaatccgcgactgcacta

SEQ ID NO: 183124 - DNA, 25 bp, SARS Virus
ataaatcaatctccgactgcactat

SEQ ID NO: 183125 - DNA, 25 bp, SARS Virus
taaatcaatctgcgactgcactata

SEQ ID NO: 183126 - DNA, 25 bp, SARS Virus
aaatcaatctgccactgcactatat

SEQ ID NO: 183127 - DNA, 25 bp, SARS Virus
aatcaatctgcgcctgcactatata

SEQ ID NO: 183128 - DNA, 25 bp, SARS Virus
atcaatctgcgactgcactatatac

SEQ ID NO: 183129 - DNA, 25 bp, SARS Virus
tcaatctgcgaccgcactatataca

SEQ ID NO: 183130 - DNA, 25 bp, SARS Virus
caatctgcgactccactatatacac

SEQ ID NO: 183131 - DNA, 25 bp, SARS Virus
aatctgcgactgcactatatacacc

SEQ ID NO: 183132 - DNA, 25 bp, SARS Virus
atctgcgactgccctatatacacca

SEQ ID NO: 183133 - DNA, 25 bp, SARS Virus
tctgcgactgcactatatacaccat

SEQ ID NO: 183134 - DNA, 25 bp, SARS Virus
ctgcgactgcaccatatacaccatg

SEQ ID NO: 183135 - DNA, 25 bp, SARS Virus
tgcgactgcactctatacaccatgg

SEQ ID NO: 183136 - DNA, 25 bp, SARS Virus
gcgactgcactacatacaccatggt

SEQ ID NO: 183137 - DNA, 25 bp, SARS Virus
cgactgcactatctacaccatggta

SEQ ID NO: 183138 - DNA, 25 bp, SARS Virus
gactgcactatacacaccatggtac

SEQ ID NO: 183139 - DNA, 25 bp, SARS Virus
actgcactatatccaccatggtaca

SEQ ID NO: 183140 - DNA, 25 bp, SARS Virus
ctgcactatatacaccatggtacag

SEQ ID NO: 183141 - DNA, 25 bp, SARS Virus
tgcactatataccccatggtacagt

SEQ ID NO: 183142 - DNA, 25 bp, SARS Virus
gcactatatacaccatggtacagtg

SEQ ID NO: 183143 - DNA, 25 bp, SARS Virus
cactatatacaccatggtacagtgg

SEQ ID NO: 183144 - DNA, 25 bp, SARS Virus
actatatacaccctggtacagtggt

SEQ ID NO: 183145 - DNA, 25 bp, SARS Virus
ctatatacaccacggtacagtggta

SEQ ID NO: 183146 - DNA, 25 bp, SARS Virus
tatatacaccatcgtacagtggtag

SEQ ID NO: 183147 - DNA, 25 bp, SARS Virus
atatacaccatgctacagtggtaga

SEQ ID NO: 183148 - DNA, 25 bp, SARS Virus
tatacaccatggcacagtggtagat

SEQ ID NO: 183149 - DNA, 25 bp, SARS Virus
atacaccatggtccagtggtagatg

SEQ ID NO: 183150 - DNA, 25 bp, SARS Virus
tacaccatggtacagtggtagatga

SEQ ID NO: 183151 - DNA, 25 bp, SARS Virus
acaccatggtaccgtggtagatgag

SEQ ID NO: 183152 - DNA, 25 bp, SARS Virus
caccatggtacactggtagatgaga

SEQ ID NO: 183153 - DNA, 25 bp, SARS Virus
accatggtacagcggtagatgagat

SEQ ID NO: 183154 - DNA, 25 bp, SARS Virus
ccatggtacagtcgtagatgagatt

SEQ ID NO: 183155 - DNA, 25 bp, SARS Virus
catggtacagtgctagatgagattt

SEQ ID NO: 183156 - DNA, 25 bp, SARS Virus
atggtacagtggcagatgagatttg

SEQ ID NO: 183157 - DNA, 25 bp, SARS Virus
tggtacagtggtcgatgagatttga

SEQ ID NO: 183158 - DNA, 25 bp, SARS Virus
ggtacagtggtacatgagatttgaa

SEQ ID NO: 183159 - DNA, 25 bp, SARS Virus
gtacagtggtagctgagatttgaac

SEQ ID NO: 183160 - DNA, 25 bp, SARS Virus
tacagtggtagacgagatttgaact

SEQ ID NO: 183161 - DNA, 25 bp, SARS Virus
acagtggtagatcagatttgaactt

SEQ ID NO: 183162 - DNA, 25 bp, SARS Virus
cagtggtagatgcgatttgaacttt

SEQ ID NO: 183163 - DNA, 25 bp, SARS Virus
agtggtagatgacatttgaactttt

SEQ ID NO: 183164 - DNA, 25 bp, SARS Virus
gtggtagatgagctttgaacttttt

SEQ ID NO: 183165 - DNA, 25 bp, SARS Virus
tggtagatgagacttgaactttttc

SEQ ID NO: 183166 - DNA, 25 bp, SARS Virus
ggtagatgagatctgaactttttca

SEQ ID NO: 183167 - DNA, 25 bp, SARS Virus
gtagatgagattcgaactttttcag

SEQ ID NO: 183168 - DNA, 25 bp, SARS Virus
tagatgagatttcaactttttcagt

SEQ ID NO: 183169 - DNA, 25 bp, SARS Virus
agatgagatttgcactttttcagta

SEQ ID NO: 183170 - DNA, 25 bp, SARS Virus
gatgagatttgacctttttcagtac

SEQ ID NO: 183171 - DNA, 25 bp, SARS Virus
atgagatttgaactttttcagtacc

SEQ ID NO: 183172 - DNA, 25 bp, SARS Virus
tgagatttgaaccttttcagtacct

SEQ ID NO: 183173 - DNA, 25 bp, SARS Virus
gagatttgaactctttcagtacctg

SEQ ID NO: 183174 - DNA, 25 bp, SARS Virus
agatttgaacttcttcagtacctgt

SEQ ID NO: 183175 - DNA, 25 bp, SARS Virus
gatttgaactttctcagtacctgtc

SEQ ID NO: 183176 - DNA, 25 bp, SARS Virus
atttgaacttttccagtacctgtcg

SEQ ID NO: 183177 - DNA, 25 bp, SARS Virus
tttgaactttttcagtacctgtcgt

SEQ ID NO: 183178 - DNA, 25 bp, SARS Virus
ttgaactttttccgtacctgtcgtt

SEQ ID NO: 183179 - DNA, 25 bp, SARS Virus
tgaactttttcactacctgtcgttg

SEQ ID NO: 183180 - DNA, 25 bp, SARS Virus
gaactttttcagcacctgtcgttgg

SEQ ID NO: 183181 - DNA, 25 bp, SARS Virus
aactttttcagtccctgtcgttggc

SEQ ID NO: 183182 - DNA, 25 bp, SARS Virus
actttttcagtacctgtcgttggcg

SEQ ID NO: 183183 - DNA, 25 bp, SARS Virus
ctttttcagtacctgtcgttggcga

SEQ ID NO: 183184 - DNA, 25 bp, SARS Virus
tttttcagtacccgtcgttggcgac

SEQ ID NO: 183185 - DNA, 25 bp, SARS Virus
ttttcagtacctctcgttggcgacc

SEQ ID NO: 183186 - DNA, 25 bp, SARS Virus
tttcagtacctgccgttggcgacct

SEQ ID NO: 183187 - DNA, 25 bp, SARS Virus
ttcagtacctgtcgttggcgacctg

SEQ ID NO: 183188 - DNA, 25 bp, SARS Virus
tcagtacctgtccttggcgacctgt

SEQ ID NO: 183189 - DNA, 25 bp, SARS Virus
cagtacctgtcgctggcgacctgtt

SEQ ID NO: 183190 - DNA, 25 bp, SARS Virus
agtacctgtcgtcggcgacctgtta

SEQ ID NO: 183191 - DNA, 25 bp, SARS Virus
gtacctgtcgttcgcgacctgttag

SEQ ID NO: 183192 - DNA, 25 bp, SARS Virus
tacctgtcgttgccgacctgttaga

SEQ ID NO: 183193 - DNA, 25 bp, SARS Virus
acctgtcgttggcgacctgttagaa

SEQ ID NO: 183194 - DNA, 25 bp, SARS Virus
cctgtcgttggccacctgttagaaa

SEQ ID NO: 183195 - DNA, 25 bp, SARS Virus
ctgtcgttggcgccctgttagaaat

SEQ ID NO: 183196 - DNA, 25 bp, SARS Virus
tgtcgttggcgacctgttagaaatt

SEQ ID NO: 183197 - DNA, 25 bp, SARS Virus
gtcgttggcgacctgttagaaattg

SEQ ID NO: 183198 - DNA, 25 bp, SARS Virus
tcgttggcgacccgttagaaattgg

SEQ ID NO: 183199 - DNA, 25 bp, SARS Virus
cgttggcgacctcttagaaattggt

SEQ ID NO: 183200 - DNA, 25 bp, SARS Virus
gttggcgacctgctagaaattggtt

SEQ ID NO: 183201 - DNA, 25 bp, SARS Virus
ttggcgacctgtcagaaattggttc

SEQ ID NO: 183202 - DNA, 25 bp, SARS Virus
tggcgacctgttcgaaattggttca

SEQ ID NO: 183203 - DNA, 25 bp, SARS Virus
ggcgacctgttacaaattggttcaa

SEQ ID NO: 183204 - DNA, 25 bp, SARS Virus
gcgacctgttagcaattggttcaat

SEQ ID NO: 183205 - DNA, 25 bp, SARS Virus
cgacctgttagacattggttcaata

SEQ ID NO: 183206 - DNA, 25 bp, SARS Virus
gacctgttagaacttggttcaatat

SEQ ID NO: 183207 - DNA, 25 bp, SARS Virus
acctgttagaaactggttcaatatt

SEQ ID NO: 183208 - DNA, 25 bp, SARS Virus
cctgttagaaatcggttcaatattt

SEQ ID NO: 183209 - DNA, 25 bp, SARS Virus
ctgttagaaattcgttcaatattta

SEQ ID NO: 183210 - DNA, 25 bp, SARS Virus
tgttagaaattgcttcaatatttat

SEQ ID NO: 183211 - DNA, 25 bp, SARS Virus
gttagaaattggctcaatatttatc

SEQ ID NO: 183212 - DNA, 25 bp, SARS Virus
ttagaaattggtccaatatttatca

SEQ ID NO: 183213 - DNA, 25 bp, SARS Virus
tagaaattggttcaatatttatcag

SEQ ID NO: 183214 - DNA, 25 bp, SARS Virus
agaaattggttccatatttatcaga

SEQ ID NO: 183215 - DNA, 25 bp, SARS Virus
gaaattggttcactatttatcagag

SEQ ID NO: 183216 - DNA, 25 bp, SARS Virus
aaattggttcaacatttatcagaga

SEQ ID NO: 183217 - DNA, 25 bp, SARS Virus
aattggttcaatctttatcagagaa

SEQ ID NO: 183218 - DNA, 25 bp, SARS Virus
attggttcaatacttatcagagaag

SEQ ID NO: 183219 - DNA, 25 bp, SARS Virus
ttggttcaatatctatcagagaagt

SEQ ID NO: 183220 - DNA, 25 bp, SARS Virus
tggttcaatattcatcagagaagta

SEQ ID NO: 183221 - DNA, 25 bp, SARS Virus
ggttcaatatttctcagagaagtac

SEQ ID NO: 183222 - DNA, 25 bp, SARS Virus
gttcaatatttaccagagaagtaca

SEQ ID NO: 183223 - DNA, 25 bp, SARS Virus
ttcaatatttatcagagaagtacaa

SEQ ID NO: 183224 - DNA, 25 bp, SARS Virus
tcaatatttatccgagaagtacaac

SEQ ID NO: 183225 - DNA, 25 bp, SARS Virus
caatatttatcacagaagtacaacc

SEQ ID NO: 183226 - DNA, 25 bp, SARS Virus
aatatttatcagcgaagtacaacca

SEQ ID NO: 183227 - DNA, 25 bp, SARS Virus
atatttatcagacaagtacaaccat

SEQ ID NO: 183228 - DNA, 25 bp, SARS Virus
tatttatcagagcagtacaaccatc

SEQ ID NO: 183229 - DNA, 25 bp, SARS Virus
atttatcagagacgtacaaccatca

SEQ ID NO: 183230 - DNA, 25 bp, SARS Virus
tttatcagagaactacaaccatcaa

SEQ ID NO: 183231 - DNA, 25 bp, SARS Virus
ttatcagagaagcacaaccatcaat

SEQ ID NO: 183232 - DNA, 25 bp, SARS Virus
tatcagagaagtccaaccatcaatc

SEQ ID NO: 183233 - DNA, 25 bp, SARS Virus
atcagagaagtacaaccatcaatct

SEQ ID NO: 183234 - DNA, 25 bp, SARS Virus
tcagagaagtaccaccatcaatctg

SEQ ID NO: 183235 - DNA, 25 bp, SARS Virus
cagagaagtacacccatcaatctgt

SEQ ID NO: 183236 - DNA, 25 bp, SARS Virus
agagaagtacaaccatcaatctgta

SEQ ID NO: 183237 - DNA, 25 bp, SARS Virus
gagaagtacaaccatcaatctgtat

SEQ ID NO: 183238 - DNA, 25 bp, SARS Virus
agaagtacaaccctcaatctgtatc

SEQ ID NO: 183239 - DNA, 25 bp, SARS Virus
gaagtacaaccaccaatctgtatca

SEQ ID NO: 183240 - DNA, 25 bp, SARS Virus
aagtacaaccatcaatctgtatcat

SEQ ID NO: 183241 - DNA, 25 bp, SARS Virus
agtacaaccatccatctgtatcata

SEQ ID NO: 183242 - DNA, 25 bp, SARS Virus
gtacaaccatcactctgtatcatac

SEQ ID NO: 183243 - DNA, 25 bp, SARS Virus
tacaaccatcaacctgtatcatacg

SEQ ID NO: 183244 - DNA, 25 bp, SARS Virus
acaaccatcaatctgtatcatacgg

SEQ ID NO: 183245 - DNA, 25 bp, SARS Virus
caaccatcaatccgtatcatacgga

SEQ ID NO: 183246 - DNA, 25 bp, SARS Virus
aaccatcaatctctatcatacggag

SEQ ID NO: 183247 - DNA, 25 bp, SARS Virus
accatcaatctgcatcatacggaga

SEQ ID NO: 183248 - DNA, 25 bp, SARS Virus
ccatcaatctgtctcatacggagaa

SEQ ID NO: 183249 - DNA, 25 bp, SARS Virus
catcaatctgtaccatacggagaat

SEQ ID NO: 183250 - DNA, 25 bp, SARS Virus
atcaatctgtatcatacggagaatt

SEQ ID NO: 183251 - DNA, 25 bp, SARS Virus
tcaatctgtatcctacggagaattg

SEQ ID NO: 183252 - DNA, 25 bp, SARS Virus
caatctgtatcacacggagaattga

SEQ ID NO: 183253 - DNA, 25 bp, SARS Virus
aatctgtatcatccggagaattgat

SEQ ID NO: 183254 - DNA, 25 bp, SARS Virus
atctgtatcatacggagaattgatg

SEQ ID NO: 183255 - DNA, 25 bp, SARS Virus
tctgtatcataccgagaattgatgt

SEQ ID NO: 183256 - DNA, 25 bp, SARS Virus
ctgtatcatacgcagaattgatgtt

SEQ ID NO: 183257 - DNA, 25 bp, SARS Virus
tgtatcatacggcgaattgatgttt

SEQ ID NO: 183258 - DNA, 25 bp, SARS Virus
gtatcatacggacaattgatgtttc

SEQ ID NO: 183259 - DNA, 25 bp, SARS Virus
tatcatacggagcattgatgtttca

SEQ ID NO: 183260 - DNA, 25 bp, SARS Virus
atcatacggagacttgatgtttcat

SEQ ID NO: 183261 - DNA, 25 bp, SARS Virus
tcatacggagaactgatgtttcatt

SEQ ID NO: 183262 - DNA, 25 bp, SARS Virus
catacggagaatcgatgtttcattc

SEQ ID NO: 183263 - DNA, 25 bp, SARS Virus
atacggagaattcatgtttcattct

SEQ ID NO: 183264 - DNA, 25 bp, SARS Virus
tacggagaattgctgtttcattctc

SEQ ID NO: 183265 - DNA, 25 bp, SARS Virus
acggagaattgacgtttcattctca

SEQ ID NO: 183266 - DNA, 25 bp, SARS Virus
cggagaattgatctttcattctcag

SEQ ID NO: 183267 - DNA, 25 bp, SARS Virus
ggagaattgatgcttcattctcaga

SEQ ID NO: 183268 - DNA, 25 bp, SARS Virus
gagaattgatgtctcattctcagat

SEQ ID NO: 183269 - DNA, 25 bp, SARS Virus
agaattgatgttccattctcagatt

SEQ ID NO: 183270 - DNA, 25 bp, SARS Virus
gaattgatgtttcattctcagatta

SEQ ID NO: 183271 - DNA, 25 bp, SARS Virus
aattgatgtttccttctcagattat

SEQ ID NO: 183272 - DNA, 25 bp, SARS Virus
attgatgtttcactctcagattatt

SEQ ID NO: 183273 - DNA, 25 bp, SARS Virus
ttgatgtttcatcctcagattattt

SEQ ID NO: 183274 - DNA, 25 bp, SARS Virus
tgatgtttcattctcagattattta

SEQ ID NO: 183275 - DNA, 25 bp, SARS Virus
gatgtttcattcccagattatttaa

SEQ ID NO: 183276 - DNA, 25 bp, SARS Virus
atgtttcattctcagattatttaac

SEQ ID NO: 183277 - DNA, 25 bp, SARS Virus
tgtttcattctccgattatttaacg

SEQ ID NO: 183278 - DNA, 25 bp, SARS Virus
gtttcattctcacattatttaacgg

SEQ ID NO: 183279 - DNA, 25 bp, SARS Virus
tttcattctcagcttatttaacgga

SEQ ID NO: 183280 - DNA, 25 bp, SARS Virus
ttcattctcagactatttaacggaa

SEQ ID NO: 183281 - DNA, 25 bp, SARS Virus
tcattctcagatcatttaacggaag

SEQ ID NO: 183282 - DNA, 25 bp, SARS Virus
cattctcagattctttaacggaagg

SEQ ID NO: 183283 - DNA, 25 bp, SARS Virus
attctcagattacttaacggaagga

SEQ ID NO: 183284 - DNA, 25 bp, SARS Virus
ttctcagattatctaacggaaggag

SEQ ID NO: 183285 - DNA, 25 bp, SARS Virus
tctcagattattcaacggaaggagt

SEQ ID NO: 183286 - DNA, 25 bp, SARS Virus
ctcagattatttcacggaaggagta

SEQ ID NO: 183287 - DNA, 25 bp, SARS Virus
tcagattatttaccggaaggagtag

SEQ ID NO: 183288 - DNA, 25 bp, SARS Virus
cagattatttaacggaaggagtagg

SEQ ID NO: 183289 - DNA, 25 bp, SARS Virus
agattatttaaccgaaggagtagga

SEQ ID NO: 183290 - DNA, 25 bp, SARS Virus
gattatttaacgcaaggagtaggaa

SEQ ID NO: 183291 - DNA, 25 bp, SARS Virus
attatttaacggcaggagtaggaag

SEQ ID NO: 183292 - DNA, 25 bp, SARS Virus
ttatttaacggacggagtaggaaga

SEQ ID NO: 183293 - DNA, 25 bp, SARS Virus
tatttaacggaacgagtaggaagag

SEQ ID NO: 183294 - DNA, 25 bp, SARS Virus
atttaacggaagcagtaggaagagg

SEQ ID NO: 183295 - DNA, 25 bp, SARS Virus
tttaacggaaggcgtaggaagagga

SEQ ID NO: 183296 - DNA, 25 bp, SARS Virus
ttaacggaaggactaggaagaggac

SEQ ID NO: 183297 - DNA, 25 bp, SARS Virus
taacggaaggagcaggaagaggacc

SEQ ID NO: 183298 - DNA, 25 bp, SARS Virus
aacggaaggagtcggaagaggacct

SEQ ID NO: 183299 - DNA, 25 bp, SARS Virus
acggaaggagtacgaagaggacctt

SEQ ID NO: 183300 - DNA, 25 bp, SARS Virus
cggaaggagtagcaagaggaccttc

SEQ ID NO: 183301 - DNA, 25 bp, SARS Virus
ggaaggagtaggcagaggaccttcg

SEQ ID NO: 183302 - DNA, 25 bp, SARS Virus
gaaggagtaggacgaggaccttcgc

SEQ ID NO: 183303 - DNA, 25 bp, SARS Virus
aaggagtaggaacaggaccttcgct

SEQ ID NO: 183304 - DNA, 25 bp, SARS Virus
aggagtaggaagcggaccttcgctg

SEQ ID NO: 183305 - DNA, 25 bp, SARS Virus
ggagtaggaagacgaccttcgctgt

SEQ ID NO: 183306 - DNA, 25 bp, SARS Virus
gagtaggaagagcaccttcgctgtc

SEQ ID NO: 183307 - DNA, 25 bp, SARS Virus
agtaggaagaggcccttcgctgtcg

SEQ ID NO: 183308 - DNA, 25 bp, SARS Virus
gtaggaagaggaccttcgctgtcgt

SEQ ID NO: 183309 - DNA, 25 bp, SARS Virus
taggaagaggaccttcgctgtcgtt

SEQ ID NO: 183310 - DNA, 25 bp, SARS Virus
aggaagaggaccctcgctgtcgtta

SEQ ID NO: 183311 - DNA, 25 bp, SARS Virus
ggaagaggacctccgctgtcgttaa

SEQ ID NO: 183312 - DNA, 25 bp, SARS Virus
gaagaggaccttcgctgtcgttaat

SEQ ID NO: 183313 - DNA, 25 bp, SARS Virus
aagaggaccttccctgtcgttaatc

SEQ ID NO: 183314 - DNA, 25 bp, SARS Virus
agaggaccttcgctgtcgttaatca

SEQ ID NO: 183315 - DNA, 25 bp, SARS Virus
gaggaccttcgccgtcgttaatcaa

SEQ ID NO: 183316 - DNA, 25 bp, SARS Virus
aggaccttcgctctcgttaatcaaa

SEQ ID NO: 183317 - DNA, 25 bp, SARS Virus
ggaccttcgctgccgttaatcaaaa

SEQ ID NO: 183318 - DNA, 25 bp, SARS Virus
gaccttcgctgtcgttaatcaaaaa

SEQ ID NO: 183319 - DNA, 25 bp, SARS Virus
accttcgctgtccttaatcaaaaat

SEQ ID NO: 183320 - DNA, 25 bp, SARS Virus
ccttcgctgtcgctaatcaaaaatc

SEQ ID NO: 183321 - DNA, 25 bp, SARS Virus
cttcgctgtcgtcaatcaaaaatcc

SEQ ID NO: 183322 - DNA, 25 bp, SARS Virus
ttcgctgtcgttcatcaaaaatcct

SEQ ID NO: 183323 - DNA, 25 bp, SARS Virus
tcgctgtcgttactcaaaaatcctt

SEQ ID NO: 183324 - DNA, 25 bp, SARS Virus
cgctgtcgttaaccaaaaatccttg

SEQ ID NO: 183325 - DNA, 25 bp, SARS Virus
gctgtcgttaatcaaaaatccttga

SEQ ID NO: 183326 - DNA, 25 bp, SARS Virus
ctgtcgttaatccaaaatccttgaa

SEQ ID NO: 183327 - DNA, 25 bp, SARS Virus
tgtcgttaatcacaaatccttgaaa

SEQ ID NO: 183328 - DNA, 25 bp, SARS Virus
gtcgttaatcaacaatccttgaaac

SEQ ID NO: 183329 - DNA, 25 bp, SARS Virus
tcgttaatcaaacatccttgaaacg

SEQ ID NO: 183330 - DNA, 25 bp, SARS Virus
cgttaatcaaaactccttgaaacgt

SEQ ID NO: 183331 - DNA, 25 bp, SARS Virus
gttaatcaaaaacccttgaaacgtt

SEQ ID NO: 183332 - DNA, 25 bp, SARS Virus
ttaatcaaaaatccttgaaacgttt

SEQ ID NO: 183333 - DNA, 25 bp, SARS Virus
taatcaaaaatccttgaaacgtttt

SEQ ID NO: 183334 - DNA, 25 bp, SARS Virus
aatcaaaaatccctgaaacgttttg

SEQ ID NO: 183335 - DNA, 25 bp, SARS Virus
atcaaaaatcctcgaaacgttttgg

SEQ ID NO: 183336 - DNA, 25 bp, SARS Virus
tcaaaaatccttcaaacgttttggt

SEQ ID NO: 183337 - DNA, 25 bp, SARS Virus
caaaaatccttgcaacgttttggtc

SEQ ID NO: 183338 - DNA, 25 bp, SARS Virus
aaaaatccttgacacgttttggtcg

SEQ ID NO: 183339 - DNA, 25 bp, SARS Virus
aaaatccttgaaccgttttggtcgt

SEQ ID NO: 183340 - DNA, 25 bp, SARS Virus
aaatccttgaaacgttttggtcgtt

SEQ ID NO: 183341 - DNA, 25 bp, SARS Virus
aatccttgaaaccttttggtcgttg

SEQ ID NO: 183342 - DNA, 25 bp, SARS Virus
atccttgaaacgctttggtcgttga

SEQ ID NO: 183343 - DNA, 25 bp, SARS Virus
tccttgaaacgtcttggtcgttgaa

SEQ ID NO: 183344 - DNA, 25 bp, SARS Virus
ccttgaaacgttctggtcgttgaaa

SEQ ID NO: 183345 - DNA, 25 bp, SARS Virus
cttgaaacgtttcggtcgttgaaaa

SEQ ID NO: 183346 - DNA, 25 bp, SARS Virus
ttgaaacgttttcgtcgttgaaaaa

SEQ ID NO: 183347 - DNA, 25 bp, SARS Virus
tgaaacgttttgctcgttgaaaaag

SEQ ID NO: 183348 - DNA, 25 bp, SARS Virus
gaaacgttttggccgttgaaaaagc

SEQ ID NO: 183349 - DNA, 25 bp, SARS Virus
aaacgttttggtcgttgaaaaagca

SEQ ID NO: 183350 - DNA, 25 bp, SARS Virus
aacgttttggtccttgaaaaagcaa

SEQ ID NO: 183351 - DNA, 25 bp, SARS Virus
acgttttggtcgctgaaaaagcaac

SEQ ID NO: 183352 - DNA, 25 bp, SARS Virus
cgttttggtcgtcgaaaaagcaaca

SEQ ID NO: 183353 - DNA, 25 bp, SARS Virus
gttttggtcgttcaaaaagcaacat

SEQ ID NO: 183354 - DNA, 25 bp, SARS Virus
ttttggtcgttgcaaaagcaacatt

SEQ ID NO: 183355 - DNA, 25 bp, SARS Virus
tttggtcgttgacaaagcaacattt

SEQ ID NO: 183356 - DNA, 25 bp, SARS Virus
ttggtcgttgaacaagcaacattta

SEQ ID NO: 183357 - DNA, 25 bp, SARS Virus
tggtcgttgaaacagcaacatttat

SEQ ID NO: 183358 - DNA, 25 bp, SARS Virus
ggtcgttgaaaacgcaacatttata

SEQ ID NO: 183359 - DNA, 25 bp, SARS Virus
gtcgttgaaaaaccaacatttatag

SEQ ID NO: 183360 - DNA, 25 bp, SARS Virus
tcgttgaaaaagcaacatttatagt

SEQ ID NO: 183361 - DNA, 25 bp, SARS Virus
cgttgaaaaagccacatttatagtt

SEQ ID NO: 183362 - DNA, 25 bp, SARS Virus
gttgaaaaagcaccatttatagttt

SEQ ID NO: 183363 - DNA, 25 bp, SARS Virus
ttgaaaaagcaacatttatagtttt

SEQ ID NO: 183364 - DNA, 25 bp, SARS Virus
tgaaaaagcaacctttatagttttc

SEQ ID NO: 183365 - DNA, 25 bp, SARS Virus
gaaaaagcaacacttatagttttcg

SEQ ID NO: 183366 - DNA, 25 bp, SARS Virus
aaaaagcaacatctatagttttcgg

SEQ ID NO: 183367 - DNA, 25 bp, SARS Virus
aaaagcaacattcatagttttcggg

SEQ ID NO: 183368 - DNA, 25 bp, SARS Virus
aaagcaacatttctagttttcggga

SEQ ID NO: 183369 - DNA, 25 bp, SARS Virus
aagcaacatttacagttttcgggac

SEQ ID NO: 183370 - DNA, 25 bp, SARS Virus
agcaacatttatcgttttcgggaca

SEQ ID NO: 183371 - DNA, 25 bp, SARS Virus
gcaacatttatacttttcgggacat

SEQ ID NO: 183372 - DNA, 25 bp, SARS Virus
caacatttatagctttcgggacatc

SEQ ID NO: 183373 - DNA, 25 bp, SARS Virus
aacatttatagtcttcgggacatct

SEQ ID NO: 183374 - DNA, 25 bp, SARS Virus
acatttatagttctcgggacatctg

SEQ ID NO: 183375 - DNA, 25 bp, SARS Virus
catttatagtttccgggacatctgc

SEQ ID NO: 183376 - DNA, 25 bp, SARS Virus
atttatagttttcgggacatctgct

SEQ ID NO: 183377 - DNA, 25 bp, SARS Virus
tttatagttttccggacatctgctg

SEQ ID NO: 183378 - DNA, 25 bp, SARS Virus
ttatagttttcgcgacatctgctgt

SEQ ID NO: 183379 - DNA, 25 bp, SARS Virus
tatagttttcggcacatctgctgta

SEQ ID NO: 183380 - DNA, 25 bp, SARS Virus
atagttttcgggccatctgctgtag

SEQ ID NO: 183381 - DNA, 25 bp, SARS Virus
tagttttcgggacatctgctgtagt

SEQ ID NO: 183382 - DNA, 25 bp, SARS Virus
agttttcgggacctctgctgtagtc

SEQ ID NO: 183383 - DNA, 25 bp, SARS Virus
gttttcgggacacctgctgtagtca

SEQ ID NO: 183384 - DNA, 25 bp, SARS Virus
ttttcgggacatctgctgtagtcat

SEQ ID NO: 183385 - DNA, 25 bp, SARS Virus
tttcgggacatccgctgtagtcatg

SEQ ID NO: 183386 - DNA, 25 bp, SARS Virus
ttcgggacatctcctgtagtcatga

SEQ ID NO: 183387 - DNA, 25 bp, SARS Virus
tcgggacatctgctgtagtcatgat

SEQ ID NO: 183388 - DNA, 25 bp, SARS Virus
cgggacatctgccgtagtcatgatc

SEQ ID NO: 183389 - DNA, 25 bp, SARS Virus
gggacatctgctctagtcatgatca

SEQ ID NO: 183390 - DNA, 25 bp, SARS Virus
ggacatctgctgcagtcatgatcac

SEQ ID NO: 183391 - DNA, 25 bp, SARS Virus
gacatctgctgtcgtcatgatcacg

SEQ ID NO: 183392 - DNA, 25 bp, SARS Virus
acatctgctgtactcatgatcacgg

SEQ ID NO: 183393 - DNA, 25 bp, SARS Virus
catctgctgtagccatgatcacgga

SEQ ID NO: 183394 - DNA, 25 bp, SARS Virus
atctgctgtagtcatgatcacggac

SEQ ID NO: 183395 - DNA, 25 bp, SARS Virus
tctgctgtagtcctgatcacggaca

SEQ ID NO: 183396 - DNA, 25 bp, SARS Virus
ctgctgtagtcacgatcacggacac

SEQ ID NO: 183397 - DNA, 25 bp, SARS Virus
tgctgtagtcatcatcacggacacg

SEQ ID NO: 183398 - DNA, 25 bp, SARS Virus
gctgtagtcatgctcacggacacgg

SEQ ID NO: 183399 - DNA, 25 bp, SARS Virus
ctgtagtcatgaccacggacacggc

SEQ ID NO: 183400 - DNA, 25 bp, SARS Virus
tgtagtcatgatcacggacacggcg

SEQ ID NO: 183401 - DNA, 25 bp, SARS Virus
gtagtcatgatcccggacacggcgt

SEQ ID NO: 183402 - DNA, 25 bp, SARS Virus
tagtcatgatcacggacacggcgtg

SEQ ID NO: 183403 - DNA, 25 bp, SARS Virus
agtcatgatcaccgacacggcgtgc

SEQ ID NO: 183404 - DNA, 25 bp, SARS Virus
gtcatgatcacgcacacggcgtgcc

SEQ ID NO: 183405 - DNA, 25 bp, SARS Virus
tcatgatcacggccacggcgtgcca

SEQ ID NO: 183406 - DNA, 25 bp, SARS Virus
catgatcacggacacggcgtgccac

SEQ ID NO: 183407 - DNA, 25 bp, SARS Virus
atgatcacggacccggcgtgccaca

SEQ ID NO: 183408 - DNA, 25 bp, SARS Virus
tgatcacggacacggcgtgccacat

SEQ ID NO: 183409 - DNA, 25 bp, SARS Virus
gatcacggacaccgcgtgccacatt

SEQ ID NO: 183410 - DNA, 25 bp, SARS Virus
atcacggacacgccgtgccacattc

SEQ ID NO: 183411 - DNA, 25 bp, SARS Virus
tcacggacacggcgtgccacattct

SEQ ID NO: 183412 - DNA, 25 bp, SARS Virus
cacggacacggcctgccacattctg

SEQ ID NO: 183413 - DNA, 25 bp, SARS Virus
acggacacggcgcgccacattctgc

SEQ ID NO: 183414 - DNA, 25 bp, SARS Virus
cggacacggcgtcccacattctgcc

SEQ ID NO: 183415 - DNA, 25 bp, SARS Virus
ggacacggcgtgccacattctgccc

SEQ ID NO: 183416 - DNA, 25 bp, SARS Virus
gacacggcgtgccacattctgcccg

SEQ ID NO: 183417 - DNA, 25 bp, SARS Virus
acacggcgtgccccattctgcccga

SEQ ID NO: 183418 - DNA, 25 bp, SARS Virus
cacggcgtgccacattctgcccgac

SEQ ID NO: 183419 - DNA, 25 bp, SARS Virus
acggcgtgccaccttctgcccgacg

SEQ ID NO: 183420 - DNA, 25 bp, SARS Virus
cggcgtgccacactctgcccgacgt

SEQ ID NO: 183421 - DNA, 25 bp, SARS Virus
ggcgtgccacatcctgcccgacgtg

SEQ ID NO: 183422 - DNA, 25 bp, SARS Virus
gcgtgccacattctgcccgacgtga

SEQ ID NO: 183423 - DNA, 25 bp, SARS Virus
cgtgccacattccgcccgacgtgaa

SEQ ID NO: 183424 - DNA, 25 bp, SARS Virus
gtgccacattctccccgacgtgaat

SEQ ID NO: 183425 - DNA, 25 bp, SARS Virus
tgccacattctgcccgacgtgaatg

SEQ ID NO: 183426 - DNA, 25 bp, SARS Virus
gccacattctgcccgacgtgaatgt

SEQ ID NO: 183427 - DNA, 25 bp, SARS Virus
ccacattctgcccgacgtgaatgtg

SEQ ID NO: 183428 - DNA, 25 bp, SARS Virus
cacattctgccccacgtgaatgtgg

SEQ ID NO: 183429 - DNA, 25 bp, SARS Virus
acattctgcccgccgtgaatgtggc

SEQ ID NO: 183430 - DNA, 25 bp, SARS Virus
cattctgcccgacgtgaatgtggcg

SEQ ID NO: 183431 - DNA, 25 bp, SARS Virus
attctgcccgacctgaatgtggcgt

SEQ ID NO: 183432 - DNA, 25 bp, SARS Virus
ttctgcccgacgcgaatgtggcgtt

SEQ ID NO: 183433 - DNA, 25 bp, SARS Virus
tctgcccgacgtcaatgtggcgttt

SEQ ID NO: 183434 - DNA, 25 bp, SARS Virus
ctgcccgacgtgcatgtggcgtttg

SEQ ID NO: 183435 - DNA, 25 bp, SARS Virus
tgcccgacgtgactgtggcgtttgg

SEQ ID NO: 183436 - DNA, 25 bp, SARS Virus
gcccgacgtgaacgtggcgtttggg

SEQ ID NO: 183437 - DNA, 25 bp, SARS Virus
cccgacgtgaatctggcgtttgggc

SEQ ID NO: 183438 - DNA, 25 bp, SARS Virus
ccgacgtgaatgcggcgtttgggca

SEQ ID NO: 183439 - DNA, 25 bp, SARS Virus
cgacgtgaatgtcgcgtttgggcaa

SEQ ID NO: 183440 - DNA, 25 bp, SARS Virus
gacgtgaatgtgccgtttgggcaaa

SEQ ID NO: 183441 - DNA, 25 bp, SARS Virus
acgtgaatgtggcgtttgggcaaat

SEQ ID NO: 183442 - DNA, 25 bp, SARS Virus
cgtgaatgtggcctttgggcaaatt

SEQ ID NO: 183443 - DNA, 25 bp, SARS Virus
gtgaatgtggcgcttgggcaaattt

SEQ ID NO: 183444 - DNA, 25 bp, SARS Virus
tgaatgtggcgtctgggcaaatttt

SEQ ID NO: 183445 - DNA, 25 bp, SARS Virus
gaatgtggcgttcgggcaaattttt

SEQ ID NO: 183446 - DNA, 25 bp, SARS Virus
aatgtggcgtttcggcaaatttttg

SEQ ID NO: 183447 - DNA, 25 bp, SARS Virus
atgtggcgtttgcgcaaatttttgc

SEQ ID NO: 183448 - DNA, 25 bp, SARS Virus
tgtggcgtttggccaaatttttgca

SEQ ID NO: 183449 - DNA, 25 bp, SARS Virus
gtggcgtttgggcaaatttttgcaa

SEQ ID NO: 183450 - DNA, 25 bp, SARS Virus
tggcgtttgggccaatttttgcaac

SEQ ID NO: 183451 - DNA, 25 bp, SARS Virus
ggcgtttgggcacatttttgcaact

SEQ ID NO: 183452 - DNA, 25 bp, SARS Virus
gcgtttgggcaactttttgcaacta

SEQ ID NO: 183453 - DNA, 25 bp, SARS Virus
cgtttgggcaaacttttgcaactac

SEQ ID NO: 183454 - DNA, 25 bp, SARS Virus
gtttgggcaaatctttgcaactacg

SEQ ID NO: 183455 - DNA, 25 bp, SARS Virus
tttgggcaaattcttgcaactacgt

SEQ ID NO: 183456 - DNA, 25 bp, SARS Virus
ttgggcaaatttctgcaactacgta

SEQ ID NO: 183457 - DNA, 25 bp, SARS Virus
tgggcaaattttcgcaactacgtag

SEQ ID NO: 183458 - DNA, 25 bp, SARS Virus
gggcaaatttttccaactacgtagg

SEQ ID NO: 183459 - DNA, 25 bp, SARS Virus
ggcaaatttttgcaactacgtaggc

SEQ ID NO: 183460 - DNA, 25 bp, SARS Virus
gcaaatttttgccactacgtaggcg

SEQ ID NO: 183461 - DNA, 25 bp, SARS Virus
caaatttttgcacctacgtaggcgt

SEQ ID NO: 183462 - DNA, 25 bp, SARS Virus
aaatttttgcaactacgtaggcgtc

SEQ ID NO: 183463 - DNA, 25 bp, SARS Virus
aatttttgcaaccacgtaggcgtct

SEQ ID NO: 183464 - DNA, 25 bp, SARS Virus
atttttgcaactccgtaggcgtctg

SEQ ID NO: 183465 - DNA, 25 bp, SARS Virus
tttttgcaactacgtaggcgtctga

SEQ ID NO: 183466 - DNA, 25 bp, SARS Virus
ttttgcaactacctaggcgtctgac

SEQ ID NO: 183467 - DNA, 25 bp, SARS Virus
tttgcaactacgcaggcgtctgacg

SEQ ID NO: 183468 - DNA, 25 bp, SARS Virus
ttgcaactacgtcggcgtctgacgt

SEQ ID NO: 183469 - DNA, 25 bp, SARS Virus
tgcaactacgtacgcgtctgacgta

SEQ ID NO: 183470 - DNA, 25 bp, SARS Virus
gcaactacgtagccgtctgacgtag

SEQ ID NO: 183471 - DNA, 25 bp, SARS Virus
caactacgtaggcgtctgacgtagt

SEQ ID NO: 183472 - DNA, 25 bp, SARS Virus
aactacgtaggcctctgacgtagtt

SEQ ID NO: 183473 - DNA, 25 bp, SARS Virus
actacgtaggcgcctgacgtagttc

SEQ ID NO: 183474 - DNA, 25 bp, SARS Virus
ctacgtaggcgtctgacgtagttcc

SEQ ID NO: 183475 - DNA, 25 bp, SARS Virus
tacgtaggcgtccgacgtagttccc

SEQ ID NO: 183476 - DNA, 25 bp, SARS Virus
acgtaggcgtctcacgtagttccca

SEQ ID NO: 183477 - DNA, 25 bp, SARS Virus
cgtaggcgtctgccgtagttcccaa

SEQ ID NO: 183478 - DNA, 25 bp, SARS Virus
gtaggcgtctgacgtagttcccaag

SEQ ID NO: 183479 - DNA, 25 bp, SARS Virus
taggcgtctgacctagttcccaagc

SEQ ID NO: 183480 - DNA, 25 bp, SARS Virus
aggcgtctgacgcagttcccaagcg

SEQ ID NO: 183481 - DNA, 25 bp, SARS Virus
ggcgtctgacgtcgttcccaagcgc

SEQ ID NO: 183482 - DNA, 25 bp, SARS Virus
gcgtctgacgtacttcccaagcgcc

SEQ ID NO: 183483 - DNA, 25 bp, SARS Virus
cgtctgacgtagctcccaagcgcct

SEQ ID NO: 183484 - DNA, 25 bp, SARS Virus
gtctgacgtagtccccaagcgcctc

SEQ ID NO: 183485 - DNA, 25 bp, SARS Virus
tctgacgtagttcccaagcgcctca

SEQ ID NO: 183486 - DNA, 25 bp, SARS Virus
ctgacgtagttcccaagcgcctcaa

SEQ ID NO: 183487 - DNA, 25 bp, SARS Virus
tgacgtagttcccaagcgcctcaac

SEQ ID NO: 183488 - DNA, 25 bp, SARS Virus
gacgtagttccccagcgcctcaacc

SEQ ID NO: 183489 - DNA, 25 bp, SARS Virus
acgtagttcccacgcgcctcaacca

SEQ ID NO: 183490 - DNA, 25 bp, SARS Virus
cgtagttcccaaccgcctcaaccag

SEQ ID NO: 183491 - DNA, 25 bp, SARS Virus
gtagttcccaagcgcctcaaccagt

SEQ ID NO: 183492 - DNA, 25 bp, SARS Virus
tagttcccaagcccctcaaccagtg

SEQ ID NO: 183493 - DNA, 25 bp, SARS Virus
agttcccaagcgcctcaaccagtgt

SEQ ID NO: 183494 - DNA, 25 bp, SARS Virus
gttcccaagcgcctcaaccagtgtt

SEQ ID NO: 183495 - DNA, 25 bp, SARS Virus
ttcccaagcgccccaaccagtgttg

SEQ ID NO: 183496 - DNA, 25 bp, SARS Virus
tcccaagcgcctcaaccagtgttga

SEQ ID NO: 183497 - DNA, 25 bp, SARS Virus
cccaagcgcctccaccagtgttgat

SEQ ID NO: 183498 - DNA, 25 bp, SARS Virus
ccaagcgcctcacccagtgttgatg

SEQ ID NO: 183499 - DNA, 25 bp, SARS Virus
caagcgcctcaaccagtgttgatgt

SEQ ID NO: 183500 - DNA, 25 bp, SARS Virus
aagcgcctcaaccagtgttgatgtc

SEQ ID NO: 183501 - DNA, 25 bp, SARS Virus
agcgcctcaacccgtgttgatgtcg

SEQ ID NO: 183502 - DNA, 25 bp, SARS Virus
gcgcctcaaccactgttgatgtcgg

SEQ ID NO: 183503 - DNA, 25 bp, SARS Virus
cgcctcaaccagcgttgatgtcggt

SEQ ID NO: 183504 - DNA, 25 bp, SARS Virus
gcctcaaccagtcttgatgtcggta

SEQ ID NO: 183505 - DNA, 25 bp, SARS Virus
cctcaaccagtgctgatgtcggtat

SEQ ID NO: 183506 - DNA, 25 bp, SARS Virus
ctcaaccagtgtcgatgtcggtatt

SEQ ID NO: 183507 - DNA, 25 bp, SARS Virus
tcaaccagtgttcatgtcggtattg

SEQ ID NO: 183508 - DNA, 25 bp, SARS Virus
caaccagtgttgctgtcggtattgg

SEQ ID NO: 183509 - DNA, 25 bp, SARS Virus
aaccagtgttgacgtcggtattgga

SEQ ID NO: 183510 - DNA, 25 bp, SARS Virus
accagtgttgatctcggtattggaa

SEQ ID NO: 183511 - DNA, 25 bp, SARS Virus
ccagtgttgatgccggtattggaaa

SEQ ID NO: 183512 - DNA, 25 bp, SARS Virus
cagtgttgatgtcggtattggaaag

SEQ ID NO: 183513 - DNA, 25 bp, SARS Virus
agtgttgatgtccgtattggaaagg

SEQ ID NO: 183514 - DNA, 25 bp, SARS Virus
gtgttgatgtcgctattggaaaggt

SEQ ID NO: 183515 - DNA, 25 bp, SARS Virus
tgttgatgtcggcattggaaaggtg

SEQ ID NO: 183516 - DNA, 25 bp, SARS Virus
gttgatgtcggtcttggaaaggtgt

SEQ ID NO: 183517 - DNA, 25 bp, SARS Virus
ttgatgtcggtactggaaaggtgta

SEQ ID NO: 183518 - DNA, 25 bp, SARS Virus
tgatgtcggtatcggaaaggtgtaa

SEQ ID NO: 183519 - DNA, 25 bp, SARS Virus
gatgtcggtattcgaaaggtgtaag

SEQ ID NO: 183520 - DNA, 25 bp, SARS Virus
atgtcggtattgcaaaggtgtaagg

SEQ ID NO: 183521 - DNA, 25 bp, SARS Virus
tgtcgttaacatgcactgctcataa

SEQ ID NO: 183522 - DNA, 25 bp, SARS Virus
gtcgttaacatagactgctcataaa

SEQ ID NO: 183523 - DNA, 25 bp, SARS Virus
tcgttaacatacgctgctcataaag

SEQ ID NO: 183524 - DNA, 25 bp, SARS Virus
cgttaacatacagtgctcataaaga

SEQ ID NO: 183525 - DNA, 25 bp, SARS Virus
gttaacatacacggctcataaagaa

SEQ ID NO: 183526 - DNA, 25 bp, SARS Virus
ttaacatacactgctcataaagaaa

SEQ ID NO: 183527 - DNA, 25 bp, SARS Virus
taacatacactggtcataaagaaaa

SEQ ID NO: 183528 - DNA, 25 bp, SARS Virus
aacatacactgcgcataaagaaaat

SEQ ID NO: 183529 - DNA, 25 bp, SARS Virus
acatacactgctgataaagaaaatt

SEQ ID NO: 183530 - DNA, 25 bp, SARS Virus
catacactgctcgtaaagaaaatta

SEQ ID NO: 183531 - DNA, 25 bp, SARS Virus
atacactgctcagaaagaaaattac

SEQ ID NO: 183532 - DNA, 25 bp, SARS Virus
tacactgctcatgaagaaaattaca

SEQ ID NO: 183533 - DNA, 25 bp, SARS Virus
acactgctcatagagaaaattacat

SEQ ID NO: 183534 - DNA, 25 bp, SARS Virus
cactgctcataaggaaaattacata

SEQ ID NO: 183535 - DNA, 25 bp, SARS Virus
actgctcataaagaaaattacatag

SEQ ID NO: 183536 - DNA, 25 bp, SARS Virus
ctgctcataaaggaaattacatagt

SEQ ID NO: 183537 - DNA, 25 bp, SARS Virus
tgctcataaagagaattacatagtg

SEQ ID NO: 183538 - DNA, 25 bp, SARS Virus
gctcataaagaagattacatagtgt

SEQ ID NO: 183539 - DNA, 25 bp, SARS Virus
ctcataaagaaagttacatagtgtt

SEQ ID NO: 183540 - DNA, 25 bp, SARS Virus
tcataaagaaaagtacatagtgtta

SEQ ID NO: 183541 - DNA, 25 bp, SARS Virus
cataaagaaaatgacatagtgttaa

SEQ ID NO: 183542 - DNA, 25 bp, SARS Virus
ataaagaaaattgcatagtgttaat

SEQ ID NO: 183543 - DNA, 25 bp, SARS Virus
taaagaaaattagatagtgttaatg

SEQ ID NO: 183544 - DNA, 25 bp, SARS Virus
aaagaaaattacgtagtgttaatgg

SEQ ID NO: 183545 - DNA, 25 bp, SARS Virus
aagaaaattacagagtgttaatggg

SEQ ID NO: 183546 - DNA, 25 bp, SARS Virus
agaaaattacatggtgttaatggga

SEQ ID NO: 183547 - DNA, 25 bp, SARS Virus
gaaaattacatagtgttaatgggag

SEQ ID NO: 183548 - DNA, 25 bp, SARS Virus
aaaattacatagggttaatgggagt

SEQ ID NO: 183549 - DNA, 25 bp, SARS Virus
aaattacatagtgttaatgggagta

SEQ ID NO: 183550 - DNA, 25 bp, SARS Virus
aattacatagtggtaatgggagtag

SEQ ID NO: 183551 - DNA, 25 bp, SARS Virus
attacatagtgtgaatgggagtagt

SEQ ID NO: 183552 - DNA, 25 bp, SARS Virus
ttacatagtgttgatgggagtagtt

SEQ ID NO: 183553 - DNA, 25 bp, SARS Virus
tacatagtgttagtgggagtagttt

SEQ ID NO: 183554 - DNA, 25 bp, SARS Virus
acatagtgttaaggggagtagtttt

SEQ ID NO: 183555 - DNA, 25 bp, SARS Virus
catagtgttaatgggagtagtttta

SEQ ID NO: 183556 - DNA, 25 bp, SARS Virus
atagtgttaatgggagtagttttac

SEQ ID NO: 183557 - DNA, 25 bp, SARS Virus
tagtgttaatgggagtagttttact

SEQ ID NO: 183558 - DNA, 25 bp, SARS Virus
agtgttaatgggggtagttttactg

SEQ ID NO: 183559 - DNA, 25 bp, SARS Virus
gtgttaatgggagtagttttactgc

SEQ ID NO: 183560 - DNA, 25 bp, SARS Virus
tgttaatgggaggagttttactgca

SEQ ID NO: 183561 - DNA, 25 bp, SARS Virus
gttaatgggagtggttttactgcat

SEQ ID NO: 183562 - DNA, 25 bp, SARS Virus
ttaatgggagtagttttactgcatc

SEQ ID NO: 183563 - DNA, 25 bp, SARS Virus
taatgggagtaggtttactgcatct

SEQ ID NO: 183564 - DNA, 25 bp, SARS Virus
aatgggagtagtgttactgcatctc

SEQ ID NO: 183565 - DNA, 25 bp, SARS Virus
atgggagtagttgtactgcatctcg

SEQ ID NO: 183566 - DNA, 25 bp, SARS Virus
tgggagtagtttgactgcatctcgt

SEQ ID NO: 183567 - DNA, 25 bp, SARS Virus
gggagtagttttgctgcatctcgta

SEQ ID NO: 183568 - DNA, 25 bp, SARS Virus
ggagtagttttagtgcatctcgtat

SEQ ID NO: 183569 - DNA, 25 bp, SARS Virus
gagtagttttacggcatctcgtatc

SEQ ID NO: 183570 - DNA, 25 bp, SARS Virus
agtagttttactgcatctcgtatct

SEQ ID NO: 183571 - DNA, 25 bp, SARS Virus
gtagttttactggatctcgtatctg

SEQ ID NO: 183572 - DNA, 25 bp, SARS Virus
tagttttactgcgtctcgtatctga

SEQ ID NO: 183573 - DNA, 25 bp, SARS Virus
agttttactgcagctcgtatctgat

SEQ ID NO: 183574 - DNA, 25 bp, SARS Virus
gttttactgcatgtcgtatctgatt

SEQ ID NO: 183575 - DNA, 25 bp, SARS Virus
ttttactgcatcgcgtatctgattt

SEQ ID NO: 183576 - DNA, 25 bp, SARS Virus
tttactgcatctggtatctgattta

SEQ ID NO: 183577 - DNA, 25 bp, SARS Virus
ttactgcatctcgtatctgatttag

SEQ ID NO: 183578 - DNA, 25 bp, SARS Virus
tactgcatctcggatctgatttagt

SEQ ID NO: 183579 - DNA, 25 bp, SARS Virus
actgcatctcgtgtctgatttagtc

SEQ ID NO: 183580 - DNA, 25 bp, SARS Virus
ctgcatctcgtagctgatttagtcg

SEQ ID NO: 183581 - DNA, 25 bp, SARS Virus
tgcatctcgtatgtgatttagtcgg

SEQ ID NO: 183582 - DNA, 25 bp, SARS Virus
gcatctcgtatcggatttagtcggt

SEQ ID NO: 183583 - DNA, 25 bp, SARS Virus
catctcgtatctgatttagtcggta

SEQ ID NO: 183584 - DNA, 25 bp, SARS Virus
atctcgtatctggtttagtcggtaa

SEQ ID NO: 183585 - DNA, 25 bp, SARS Virus
tctcgtatctgagttagtcggtaac

SEQ ID NO: 183586 - DNA, 25 bp, SARS Virus
ctcgtatctgatgtagtcggtaaca

SEQ ID NO: 183587 - DNA, 25 bp, SARS Virus
tcgtatctgattgagtcggtaacac

SEQ ID NO: 183588 - DNA, 25 bp, SARS Virus
cgtatctgatttggtcggtaacaca

SEQ ID NO: 183589 - DNA, 25 bp, SARS Virus
gtatctgatttagtcggtaacacat

SEQ ID NO: 183590 - DNA, 25 bp, SARS Virus
tatctgatttaggcggtaacacata

SEQ ID NO: 183591 - DNA, 25 bp, SARS Virus
atctgatttagtgggtaacacataa

SEQ ID NO: 183592 - DNA, 25 bp, SARS Virus
tctgatttagtcggtaacacataaa

SEQ ID NO: 183593 - DNA, 25 bp, SARS Virus
ctgatttagtcggtaacacataaat

SEQ ID NO: 183594 - DNA, 25 bp, SARS Virus
tgatttagtcgggaacacataaatc

SEQ ID NO: 183595 - DNA, 25 bp, SARS Virus
gatttagtcggtgacacataaatca

SEQ ID NO: 183596 - DNA, 25 bp, SARS Virus
atttagtcggtagcacataaatcaa

SEQ ID NO: 183597 - DNA, 25 bp, SARS Virus
tttagtcggtaagacataaatcaat

SEQ ID NO: 183598 - DNA, 25 bp, SARS Virus
ttagtcggtaacgcataaatcaatc

SEQ ID NO: 183599 - DNA, 25 bp, SARS Virus
tagtcggtaacagataaatcaatct

SEQ ID NO: 183600 - DNA, 25 bp, SARS Virus
agtcggtaacacgtaaatcaatctg

SEQ ID NO: 183601 - DNA, 25 bp, SARS Virus
gtcggtaacacagaaatcaatctgc

SEQ ID NO: 183602 - DNA, 25 bp, SARS Virus
tcggtaacacatgaatcaatctgcg

SEQ ID NO: 183603 - DNA, 25 bp, SARS Virus
cggtaacacatagatcaatctgcga

SEQ ID NO: 183604 - DNA, 25 bp, SARS Virus
ggtaacacataagtcaatctgcgac

SEQ ID NO: 183605 - DNA, 25 bp, SARS Virus
gtaacacataaagcaatctgcgact

SEQ ID NO: 183606 - DNA, 25 bp, SARS Virus
taacacataaatgaatctgcgactg

SEQ ID NO: 183607 - DNA, 25 bp, SARS Virus
aacacataaatcgatctgcgactgc

SEQ ID NO: 183608 - DNA, 25 bp, SARS Virus
acacataaatcagtctgcgactgca

SEQ ID NO: 183609 - DNA, 25 bp, SARS Virus
cacataaatcaagctgcgactgcac

SEQ ID NO: 183610 - DNA, 25 bp, SARS Virus
acataaatcaatgtgcgactgcact

SEQ ID NO: 183611 - DNA, 25 bp, SARS Virus
cataaatcaatcggcgactgcacta

SEQ ID NO: 183612 - DNA, 25 bp, SARS Virus
ataaatcaatctgcgactgcactat

SEQ ID NO: 183613 - DNA, 25 bp, SARS Virus
taaatcaatctgggactgcactata

SEQ ID NO: 183614 - DNA, 25 bp, SARS Virus
aaatcaatctgcgactgcactatat

SEQ ID NO: 183615 - DNA, 25 bp, SARS Virus
aatcaatctgcggctgcactatata

SEQ ID NO: 183616 - DNA, 25 bp, SARS Virus
atcaatctgcgagtgcactatatac

SEQ ID NO: 183617 - DNA, 25 bp, SARS Virus
tcaatctgcgacggcactatataca

SEQ ID NO: 183618 - DNA, 25 bp, SARS Virus
caatctgcgactgcactatatacac

SEQ ID NO: 183619 - DNA, 25 bp, SARS Virus
aatctgcgactggactatatacacc

SEQ ID NO: 183620 - DNA, 25 bp, SARS Virus
atctgcgactgcgctatatacacca

SEQ ID NO: 183621 - DNA, 25 bp, SARS Virus
tctgcgactgcagtatatacaccat

SEQ ID NO: 183622 - DNA, 25 bp, SARS Virus
ctgcgactgcacgatatacaccatg

SEQ ID NO: 183623 - DNA, 25 bp, SARS Virus
tgcgactgcactgtatacaccatgg

SEQ ID NO: 183624 - DNA, 25 bp, SARS Virus
gcgactgcactagatacaccatggt

SEQ ID NO: 183625 - DNA, 25 bp, SARS Virus
cgactgcactatgtacaccatggta

SEQ ID NO: 183626 - DNA, 25 bp, SARS Virus
gactgcactatagacaccatggtac

SEQ ID NO: 183627 - DNA, 25 bp, SARS Virus
actgcactatatgcaccatggtaca

SEQ ID NO: 183628 - DNA, 25 bp, SARS Virus
ctgcactatatagaccatggtacag

SEQ ID NO: 183629 - DNA, 25 bp, SARS Virus
tgcactatatacgccatggtacagt

SEQ ID NO: 183630 - DNA, 25 bp, SARS Virus
gcactatatacagcatggtacagtg

SEQ ID NO: 183631 - DNA, 25 bp, SARS Virus
cactatatacacgatggtacagtgg

SEQ ID NO: 183632 - DNA, 25 bp, SARS Virus
actatatacaccgtggtacagtggt

SEQ ID NO: 183633 - DNA, 25 bp, SARS Virus
ctatatacaccagggtacagtggta

SEQ ID NO: 183634 - DNA, 25 bp, SARS Virus
tatatacaccatggtacagtggtag

SEQ ID NO: 183635 - DNA, 25 bp, SARS Virus
atatacaccatggtacagtggtaga

SEQ ID NO: 183636 - DNA, 25 bp, SARS Virus
tatacaccatgggacagtggtagat

SEQ ID NO: 183637 - DNA, 25 bp, SARS Virus
atacaccatggtgcagtggtagatg

SEQ ID NO: 183638 - DNA, 25 bp, SARS Virus
tacaccatggtagagtggtagatga

SEQ ID NO: 183639 - DNA, 25 bp, SARS Virus
acaccatggtacggtggtagatgag

SEQ ID NO: 183640 - DNA, 25 bp, SARS Virus
caccatggtacagtggtagatgaga

SEQ ID NO: 183641 - DNA, 25 bp, SARS Virus
accatggtacaggggtagatgagat

SEQ ID NO: 183642 - DNA, 25 bp, SARS Virus
ccatggtacagtggtagatgagatt

SEQ ID NO: 183643 - DNA, 25 bp, SARS Virus
catggtacagtggtagatgagattt

SEQ ID NO: 183644 - DNA, 25 bp, SARS Virus
atggtacagtgggagatgagatttg

SEQ ID NO: 183645 - DNA, 25 bp, SARS Virus
tggtacagtggtggatgagatttga

SEQ ID NO: 183646 - DNA, 25 bp, SARS Virus
ggtacagtggtagatgagatttgaa

SEQ ID NO: 183647 - DNA, 25 bp, SARS Virus
gtacagtggtaggtgagatttgaac

SEQ ID NO: 183648 - DNA, 25 bp, SARS Virus
tacagtggtagaggagatttgaact

SEQ ID NO: 183649 - DNA, 25 bp, SARS Virus
acagtggtagatgagatttgaactt

SEQ ID NO: 183650 - DNA, 25 bp, SARS Virus
cagtggtagatgggatttgaacttt

SEQ ID NO: 183651 - DNA, 25 bp, SARS Virus
agtggtagatgagatttgaactttt

SEQ ID NO: 183652 - DNA, 25 bp, SARS Virus
gtggtagatgaggtttgaacttttt

SEQ ID NO: 183653 - DNA, 25 bp, SARS Virus
tggtagatgagagttgaactttttc

SEQ ID NO: 183654 - DNA, 25 bp, SARS Virus
ggtagatgagatgtgaactttttca

SEQ ID NO: 183655 - DNA, 25 bp, SARS Virus
gtagatgagattggaactttttcag

SEQ ID NO: 183656 - DNA, 25 bp, SARS Virus
tagatgagatttgaactttttcagt

SEQ ID NO: 183657 - DNA, 25 bp, SARS Virus
agatgagatttggactttttcagta

SEQ ID NO: 183658 - DNA, 25 bp, SARS Virus
gatgagatttgagctttttcagtac

SEQ ID NO: 183659 - DNA, 25 bp, SARS Virus
atgagatttgaagtttttcagtacc

SEQ ID NO: 183660 - DNA, 25 bp, SARS Virus
tgagatttgaacgttttcagtacct

SEQ ID NO: 183661 - DNA, 25 bp, SARS Virus
gagatttgaactgtttcagtacctg

SEQ ID NO: 183662 - DNA, 25 bp, SARS Virus
agatttgaacttgttcagtacctgt

SEQ ID NO: 183663 - DNA, 25 bp, SARS Virus
gatttgaactttgtcagtacctgtc

SEQ ID NO: 183664 - DNA, 25 bp, SARS Virus
atttgaacttttgcagtacctgtcg

SEQ ID NO: 183665 - DNA, 25 bp, SARS Virus
tttgaactttttgagtacctgtcgt

SEQ ID NO: 183666 - DNA, 25 bp, SARS Virus
ttgaactttttcggtacctgtcgtt

SEQ ID NO: 183667 - DNA, 25 bp, SARS Virus
tgaactttttcagtacctgtcgttg

SEQ ID NO: 183668 - DNA, 25 bp, SARS Virus
gaactttttcaggacctgtcgttgg

SEQ ID NO: 183669 - DNA, 25 bp, SARS Virus
aactttttcagtgcctgtcgttggc

SEQ ID NO: 183670 - DNA, 25 bp, SARS Virus
actttttcagtagctgtcgttggcg

SEQ ID NO: 183671 - DNA, 25 bp, SARS Virus
ctttttcagtacgtgtcgttggcga

SEQ ID NO: 183672 - DNA, 25 bp, SARS Virus
tttttcagtaccggtcgttggcgac

SEQ ID NO: 183673 - DNA, 25 bp, SARS Virus
ttttcagtacctgtcgttggcgacc

SEQ ID NO: 183674 - DNA, 25 bp, SARS Virus
tttcagtacctggcgttggcgacct

SEQ ID NO: 183675 - DNA, 25 bp, SARS Virus
ttcagtacctgtggttggcgacctg

SEQ ID NO: 183676 - DNA, 25 bp, SARS Virus
tcagtacctgtcgttggcgacctgt

SEQ ID NO: 183677 - DNA, 25 bp, SARS Virus
cagtacctgtcggtggcgacctgtt

SEQ ID NO: 183678 - DNA, 25 bp, SARS Virus
agtacctgtcgtgggcgacctgtta

SEQ ID NO: 183679 - DNA, 25 bp, SARS Virus
gtacctgtcgttggcgacctgttag

SEQ ID NO: 183680 - DNA, 25 bp, SARS Virus
tacctgtcgttggcgacctgttaga

SEQ ID NO: 183681 - DNA, 25 bp, SARS Virus
acctgtcgttggggacctgttagaa

SEQ ID NO: 183682 - DNA, 25 bp, SARS Virus
cctgtcgttggcgacctgttagaaa

SEQ ID NO: 183683 - DNA, 25 bp, SARS Virus
ctgtcgttggcggcctgttagaaat

SEQ ID NO: 183684 - DNA, 25 bp, SARS Virus
tgtcgttggcgagctgttagaaatt

SEQ ID NO: 183685 - DNA, 25 bp, SARS Virus
gtcgttggcgacgtgttagaaattg

SEQ ID NO: 183686 - DNA, 25 bp, SARS Virus
tcgttggcgaccggttagaaattgg

SEQ ID NO: 183687 - DNA, 25 bp, SARS Virus
cgttggcgacctgttagaaattggt

SEQ ID NO: 183688 - DNA, 25 bp, SARS Virus
gttggcgacctggtagaaattggtt

SEQ ID NO: 183689 - DNA, 25 bp, SARS Virus
ttggcgacctgtgagaaattggttc

SEQ ID NO: 183690 - DNA, 25 bp, SARS Virus
tggcgacctgttggaaattggttca

SEQ ID NO: 183691 - DNA, 25 bp, SARS Virus
ggcgacctgttagaaattggttcaa

SEQ ID NO: 183692 - DNA, 25 bp, SARS Virus
gcgacctgttaggaattggttcaat

SEQ ID NO: 183693 - DNA, 25 bp, SARS Virus
cgacctgttagagattggttcaata

SEQ ID NO: 183694 - DNA, 25 bp, SARS Virus
gacctgttagaagttggttcaatat

SEQ ID NO: 183695 - DNA, 25 bp, SARS Virus
acctgttagaaagtggttcaatatt

SEQ ID NO: 183696 - DNA, 25 bp, SARS Virus
cctgttagaaatgggttcaatattt

SEQ ID NO: 183697 - DNA, 25 bp, SARS Virus
ctgttagaaattggttcaatattta

SEQ ID NO: 183698 - DNA, 25 bp, SARS Virus
tgttagaaattggttcaatatttat

SEQ ID NO: 183699 - DNA, 25 bp, SARS Virus
gttagaaattgggtcaatatttatc

SEQ ID NO: 183700 - DNA, 25 bp, SARS Virus
ttagaaattggtgcaatatttatca

SEQ ID NO: 183701 - DNA, 25 bp, SARS Virus
tagaaattggttgaatatttatcag

SEQ ID NO: 183702 - DNA, 25 bp, SARS Virus
agaaattggttcgatatttatcaga

SEQ ID NO: 183703 - DNA, 25 bp, SARS Virus
gaaattggttcagtatttatcagag

SEQ ID NO: 183704 - DNA, 25 bp, SARS Virus
aaattggttcaagatttatcagaga

SEQ ID NO: 183705 - DNA, 25 bp, SARS Virus
aattggttcaatgtttatcagagaa

SEQ ID NO: 183706 - DNA, 25 bp, SARS Virus
attggttcaatagttatcagagaag

SEQ ID NO: 183707 - DNA, 25 bp, SARS Virus
ttggttcaatatgtatcagagaagt

SEQ ID NO: 183708 - DNA, 25 bp, SARS Virus
tggttcaatattgatcagagaagta

SEQ ID NO: 183709 - DNA, 25 bp, SARS Virus
ggttcaatatttgtcagagaagtac

SEQ ID NO: 183710 - DNA, 25 bp, SARS Virus
gttcaatatttagcagagaagtaca

SEQ ID NO: 183711 - DNA, 25 bp, SARS Virus
ttcaatatttatgagagaagtacaa

SEQ ID NO: 183712 - DNA, 25 bp, SARS Virus
tcaatatttatcggagaagtacaac

SEQ ID NO: 183713 - DNA, 25 bp, SARS Virus
caatatttatcagagaagtacaacc

SEQ ID NO: 183714 - DNA, 25 bp, SARS Virus
aatatttatcagggaagtacaacca

SEQ ID NO: 183715 - DNA, 25 bp, SARS Virus
atatttatcagagaagtacaaccat

SEQ ID NO: 183716 - DNA, 25 bp, SARS Virus
tatttatcagaggagtacaaccatc

SEQ ID NO: 183717 - DNA, 25 bp, SARS Virus
atttatcagagaggtacaaccatca

SEQ ID NO: 183718 - DNA, 25 bp, SARS Virus
tttatcagagaagtacaaccatcaa

SEQ ID NO: 183719 - DNA, 25 bp, SARS Virus
ttatcagagaaggacaaccatcaat

SEQ ID NO: 183720 - DNA, 25 bp, SARS Virus
tatcagagaagtgcaaccatcaatc

SEQ ID NO: 183721 - DNA, 25 bp, SARS Virus
atcagagaagtagaaccatcaatct

SEQ ID NO: 183722 - DNA, 25 bp, SARS Virus
tcagagaagtacgaccatcaatctg

SEQ ID NO: 183723 - DNA, 25 bp, SARS Virus
cagagaagtacagccatcaatctgt

SEQ ID NO: 183724 - DNA, 25 bp, SARS Virus
agagaagtacaagcatcaatctgta

SEQ ID NO: 183725 - DNA, 25 bp, SARS Virus
gagaagtacaacgatcaatctgtat

SEQ ID NO: 183726 - DNA, 25 bp, SARS Virus
agaagtacaaccgtcaatctgtatc

SEQ ID NO: 183727 - DNA, 25 bp, SARS Virus
gaagtacaaccagcaatctgtatca

SEQ ID NO: 183728 - DNA, 25 bp, SARS Virus
aagtacaaccatgaatctgtatcat

SEQ ID NO: 183729 - DNA, 25 bp, SARS Virus
agtacaaccatcgatctgtatcata

SEQ ID NO: 183730 - DNA, 25 bp, SARS Virus
gtacaaccatcagtctgtatcatac

SEQ ID NO: 183731 - DNA, 25 bp, SARS Virus
tacaaccatcaagctgtatcatacg

SEQ ID NO: 183732 - DNA, 25 bp, SARS Virus
acaaccatcaatgtgtatcatacgg

SEQ ID NO: 183733 - DNA, 25 bp, SARS Virus
caaccatcaatcggtatcatacgga

SEQ ID NO: 183734 - DNA, 25 bp, SARS Virus
aaccatcaatctgtatcatacggag

SEQ ID NO: 183735 - DNA, 25 bp, SARS Virus
accatcaatctggatcatacggaga

SEQ ID NO: 183736 - DNA, 25 bp, SARS Virus
ccatcaatctgtgtcatacggagaa

SEQ ID NO: 183737 - DNA, 25 bp, SARS Virus
catcaatctgtagcatacggagaat

SEQ ID NO: 183738 - DNA, 25 bp, SARS Virus
atcaatctgtatgatacggagaatt

SEQ ID NO: 183739 - DNA, 25 bp, SARS Virus
tcaatctgtatcgtacggagaattg

SEQ ID NO: 183740 - DNA, 25 bp, SARS Virus
caatctgtatcagacggagaattga

SEQ ID NO: 183741 - DNA, 25 bp, SARS Virus
aatctgtatcatgcggagaattgat

SEQ ID NO: 183742 - DNA, 25 bp, SARS Virus
atctgtatcatagggagaattgatg

SEQ ID NO: 183743 - DNA, 25 bp, SARS Virus
tctgtatcatacggagaattgatgt

SEQ ID NO: 183744 - DNA, 25 bp, SARS Virus
ctgtatcatacggagaattgatgtt

SEQ ID NO: 183745 - DNA, 25 bp, SARS Virus
tgtatcatacggggaattgatgttt

SEQ ID NO: 183746 - DNA, 25 bp, SARS Virus
gtatcatacggagaattgatgtttc

SEQ ID NO: 183747 - DNA, 25 bp, SARS Virus
tatcatacggaggattgatgtttca

SEQ ID NO: 183748 - DNA, 25 bp, SARS Virus
atcatacggagagttgatgtttcat

SEQ ID NO: 183749 - DNA, 25 bp, SARS Virus
tcatacggagaagtgatgtttcatt

SEQ ID NO: 183750 - DNA, 25 bp, SARS Virus
catacggagaatggatgtttcattc

SEQ ID NO: 183751 - DNA, 25 bp, SARS Virus
atacggagaattgatgtttcattct

SEQ ID NO: 183752 - DNA, 25 bp, SARS Virus
tacggagaattggtgtttcattctc

SEQ ID NO: 183753 - DNA, 25 bp, SARS Virus
acggagaattgaggtttcattctca

SEQ ID NO: 183754 - DNA, 25 bp, SARS Virus
cggagaattgatgtttcattctcag

SEQ ID NO: 183755 - DNA, 25 bp, SARS Virus
ggagaattgatggttcattctcaga

SEQ ID NO: 183756 - DNA, 25 bp, SARS Virus
gagaattgatgtgtcattctcagat

SEQ ID NO: 183757 - DNA, 25 bp, SARS Virus
agaattgatgttgcattctcagatt

SEQ ID NO: 183758 - DNA, 25 bp, SARS Virus
gaattgatgtttgattctcagatta

SEQ ID NO: 183759 - DNA, 25 bp, SARS Virus
aattgatgtttcgttctcagattat

SEQ ID NO: 183760 - DNA, 25 bp, SARS Virus
attgatgtttcagtctcagattatt

SEQ ID NO: 183761 - DNA, 25 bp, SARS Virus
ttgatgtttcatgctcagattattt

SEQ ID NO: 183762 - DNA, 25 bp, SARS Virus
tgatgtttcattgtcagattattta

SEQ ID NO: 183763 - DNA, 25 bp, SARS Virus
gatgtttcattcgcagattatttaa

SEQ ID NO: 183764 - DNA, 25 bp, SARS Virus
atgtttcattctgagattatttaac

SEQ ID NO: 183765 - DNA, 25 bp, SARS Virus
tgtttcattctcggattatttaacg

SEQ ID NO: 183766 - DNA, 25 bp, SARS Virus
gtttcattctcagattatttaacgg

SEQ ID NO: 183767 - DNA, 25 bp, SARS Virus
tttcattctcaggttatttaacgga

SEQ ID NO: 183768 - DNA, 25 bp, SARS Virus
ttcattctcagagtatttaacggaa

SEQ ID NO: 183769 - DNA, 25 bp, SARS Virus
tcattctcagatgatttaacggaag

SEQ ID NO: 183770 - DNA, 25 bp, SARS Virus
cattctcagattgtttaacggaagg

SEQ ID NO: 183771 - DNA, 25 bp, SARS Virus
attctcagattagttaacggaagga

SEQ ID NO: 183772 - DNA, 25 bp, SARS Virus
ttctcagattatgtaacggaaggag

SEQ ID NO: 183773 - DNA, 25 bp, SARS Virus
tctcagattattgaacggaaggagt

SEQ ID NO: 183774 - DNA, 25 bp, SARS Virus
ctcagattatttgacggaaggagta

SEQ ID NO: 183775 - DNA, 25 bp, SARS Virus
tcagattatttagcggaaggagtag

SEQ ID NO: 183776 - DNA, 25 bp, SARS Virus
cagattatttaagggaaggagtagg

SEQ ID NO: 183777 - DNA, 25 bp, SARS Virus
agattatttaacggaaggagtagga

SEQ ID NO: 183778 - DNA, 25 bp, SARS Virus
gattatttaacggaaggagtaggaa

SEQ ID NO: 183779 - DNA, 25 bp, SARS Virus
attatttaacgggaggagtaggaag

SEQ ID NO: 183780 - DNA, 25 bp, SARS Virus
ttatttaacggagggagtaggaaga

SEQ ID NO: 183781 - DNA, 25 bp, SARS Virus
tatttaacggaaggagtaggaagag

SEQ ID NO: 183782 - DNA, 25 bp, SARS Virus
atttaacggaaggagtaggaagagg

SEQ ID NO: 183783 - DNA, 25 bp, SARS Virus
tttaacggaaggggtaggaagagga

SEQ ID NO: 183784 - DNA, 25 bp, SARS Virus
ttaacggaaggagtaggaagaggac

SEQ ID NO: 183785 - DNA, 25 bp, SARS Virus
taacggaaggaggaggaagaggacc

SEQ ID NO: 183786 - DNA, 25 bp, SARS Virus
aacggaaggagtgggaagaggacct

SEQ ID NO: 183787 - DNA, 25 bp, SARS Virus
acggaaggagtaggaagaggacctt

SEQ ID NO: 183788 - DNA, 25 bp, SARS Virus
cggaaggagtaggaagaggaccttc

SEQ ID NO: 183789 - DNA, 25 bp, SARS Virus
ggaaggagtagggagaggaccttcg

SEQ ID NO: 183790 - DNA, 25 bp, SARS Virus
gaaggagtaggaggaggaccttcgc

SEQ ID NO: 183791 - DNA, 25 bp, SARS Virus
aaggagtaggaagaggaccttcgct

SEQ ID NO: 183792 - DNA, 25 bp, SARS Virus
aggagtaggaaggggaccttcgctg

SEQ ID NO: 183793 - DNA, 25 bp, SARS Virus
ggagtaggaagaggaccttcgctgt

SEQ ID NO: 183794 - DNA, 25 bp, SARS Virus
gagtaggaagaggaccttcgctgtc

SEQ ID NO: 183795 - DNA, 25 bp, SARS Virus
agtaggaagagggccttcgctgtcg

SEQ ID NO: 183796 - DNA, 25 bp, SARS Virus
gtaggaagaggagcttcgctgtcgt

SEQ ID NO: 183797 - DNA, 25 bp, SARS Virus
taggaagaggacgttcgctgtcgtt

SEQ ID NO: 183798 - DNA, 25 bp, SARS Virus
aggaagaggaccgtcgctgtcgtta

SEQ ID NO: 183799 - DNA, 25 bp, SARS Virus
ggaagaggacctgcgctgtcgttaa

SEQ ID NO: 183800 - DNA, 25 bp, SARS Virus
gaagaggaccttggctgtcgttaat

SEQ ID NO: 183801 - DNA, 25 bp, SARS Virus
aagaggaccttcgctgtcgttaatc

SEQ ID NO: 183802 - DNA, 25 bp, SARS Virus
agaggaccttcggtgtcgttaatca

SEQ ID NO: 183803 - DNA, 25 bp, SARS Virus
gaggaccttcgcggtcgttaatcaa

SEQ ID NO: 183804 - DNA, 25 bp, SARS Virus
aggaccttcgctgtcgttaatcaaa

SEQ ID NO: 183805 - DNA, 25 bp, SARS Virus
ggaccttcgctggcgttaatcaaaa

SEQ ID NO: 183806 - DNA, 25 bp, SARS Virus
gaccttcgctgtggttaatcaaaaa

SEQ ID NO: 183807 - DNA, 25 bp, SARS Virus
accttcgctgtcgttaatcaaaaat

SEQ ID NO: 183808 - DNA, 25 bp, SARS Virus
ccttcgctgtcggtaatcaaaaatc

SEQ ID NO: 183809 - DNA, 25 bp, SARS Virus
cttcgctgtcgtgaatcaaaaatcc

SEQ ID NO: 183810 - DNA, 25 bp, SARS Virus
ttcgctgtcgttgatcaaaaatcct

SEQ ID NO: 183811 - DNA, 25 bp, SARS Virus
tcgctgtcgttagtcaaaaatcctt

SEQ ID NO: 183812 - DNA, 25 bp, SARS Virus
cgctgtcgttaagcaaaaatccttg

SEQ ID NO: 183813 - DNA, 25 bp, SARS Virus
gctgtcgttaatgaaaaatccttga

SEQ ID NO: 183814 - DNA, 25 bp, SARS Virus
ctgtcgttaatcgaaaatccttgaa

SEQ ID NO: 183815 - DNA, 25 bp, SARS Virus
tgtcgttaatcagaaatccttgaaa

SEQ ID NO: 183816 - DNA, 25 bp, SARS Virus
gtcgttaatcaagaatccttgaaac

SEQ ID NO: 183817 - DNA, 25 bp, SARS Virus
tcgttaatcaaagatccttgaaacg

SEQ ID NO: 183818 - DNA, 25 bp, SARS Virus
cgttaatcaaaagtccttgaaacgt

SEQ ID NO: 183819 - DNA, 25 bp, SARS Virus
gttaatcaaaaagccttgaaacgtt

SEQ ID NO: 183820 - DNA, 25 bp, SARS Virus
ttaatcaaaaatgcttgaaacgttt

SEQ ID NO: 183821 - DNA, 25 bp, SARS Virus
taatcaaaaatcgttgaaacgtttt

SEQ ID NO: 183822 - DNA, 25 bp, SARS Virus
aatcaaaaatccgtgaaacgttttg

SEQ ID NO: 183823 - DNA, 25 bp, SARS Virus
atcaaaaatcctggaaacgttttgg

SEQ ID NO: 183824 - DNA, 25 bp, SARS Virus
tcaaaaatccttgaaacgttttggt

SEQ ID NO: 183825 - DNA, 25 bp, SARS Virus
caaaaatccttggaacgttttggtc

SEQ ID NO: 183826 - DNA, 25 bp, SARS Virus
aaaaatccttgagacgttttggtcg

SEQ ID NO: 183827 - DNA, 25 bp, SARS Virus
aaaatccttgaagcgttttggtcgt

SEQ ID NO: 183828 - DNA, 25 bp, SARS Virus
aaatccttgaaaggttttggtcgtt

SEQ ID NO: 183829 - DNA, 25 bp, SARS Virus
aatccttgaaacgttttggtcgttg

SEQ ID NO: 183830 - DNA, 25 bp, SARS Virus
atccttgaaacggtttggtcgttga

SEQ ID NO: 183831 - DNA, 25 bp, SARS Virus
tccttgaaacgtgttggtcgttgaa

SEQ ID NO: 183832 - DNA, 25 bp, SARS Virus
ccttgaaacgttgtggtcgttgaaa

SEQ ID NO: 183833 - DNA, 25 bp, SARS Virus
cttgaaacgtttgggtcgttgaaaa

SEQ ID NO: 183834 - DNA, 25 bp, SARS Virus
ttgaaacgttttggtcgttgaaaaa

SEQ ID NO: 183835 - DNA, 25 bp, SARS Virus
tgaaacgttttggtcgttgaaaaag

SEQ ID NO: 183836 - DNA, 25 bp, SARS Virus
gaaacgttttgggcgttgaaaaagc

SEQ ID NO: 183837 - DNA, 25 bp, SARS Virus
aaacgttttggtggttgaaaaagca

SEQ ID NO: 183838 - DNA, 25 bp, SARS Virus
aacgttttggtcgttgaaaaagcaa

SEQ ID NO: 183839 - DNA, 25 bp, SARS Virus
acgttttggtcggtgaaaaagcaac

SEQ ID NO: 183840 - DNA, 25 bp, SARS Virus
cgttttggtcgtggaaaaagcaaca

SEQ ID NO: 183841 - DNA, 25 bp, SARS Virus
gttttggtcgttgaaaaagcaacat

SEQ ID NO: 183842 - DNA, 25 bp, SARS Virus
ttttggtcgttggaaaagcaacatt

SEQ ID NO: 183843 - DNA, 25 bp, SARS Virus
tttggtcgttgagaaagcaacattt

SEQ ID NO: 183844 - DNA, 25 bp, SARS Virus
ttggtcgttgaagaagcaacattta

SEQ ID NO: 183845 - DNA, 25 bp, SARS Virus
tggtcgttgaaagagcaacatttat

SEQ ID NO: 183846 - DNA, 25 bp, SARS Virus
ggtcgttgaaaaggcaacatttata

SEQ ID NO: 183847 - DNA, 25 bp, SARS Virus
gtcgttgaaaaagcaacatttatag

SEQ ID NO: 183848 - DNA, 25 bp, SARS Virus
tcgttgaaaaaggaacatttatagt

SEQ ID NO: 183849 - DNA, 25 bp, SARS Virus
cgttgaaaaagcgacatttatagtt

SEQ ID NO: 183850 - DNA, 25 bp, SARS Virus
gttgaaaaagcagcatttatagttt

SEQ ID NO: 183851 - DNA, 25 bp, SARS Virus
ttgaaaaagcaagatttatagtttt

SEQ ID NO: 183852 - DNA, 25 bp, SARS Virus
tgaaaaagcaacgtttatagttttc

SEQ ID NO: 183853 - DNA, 25 bp, SARS Virus
gaaaaagcaacagttatagttttcg

SEQ ID NO: 183854 - DNA, 25 bp, SARS Virus
aaaaagcaacatgtatagttttcgg

SEQ ID NO: 183855 - DNA, 25 bp, SARS Virus
aaaagcaacattgatagttttcggg

SEQ ID NO: 183856 - DNA, 25 bp, SARS Virus
aaagcaacatttgtagttttcggga

SEQ ID NO: 183857 - DNA, 25 bp, SARS Virus
aagcaacatttagagttttcgggac

SEQ ID NO: 183858 - DNA, 25 bp, SARS Virus
agcaacatttatggttttcgggaca

SEQ ID NO: 183859 - DNA, 25 bp, SARS Virus
gcaacatttatagttttcgggacat

SEQ ID NO: 183860 - DNA, 25 bp, SARS Virus
caacatttataggtttcgggacatc

SEQ ID NO: 183861 - DNA, 25 bp, SARS Virus
aacatttatagtgttcgggacatct

SEQ ID NO: 183862 - DNA, 25 bp, SARS Virus
acatttatagttgtcgggacatctg

SEQ ID NO: 183863 - DNA, 25 bp, SARS Virus
catttatagtttgcgggacatctgc

SEQ ID NO: 183864 - DNA, 25 bp, SARS Virus
atttatagttttggggacatctgct

SEQ ID NO: 183865 - DNA, 25 bp, SARS Virus
tttatagttttcgggacatctgctg

SEQ ID NO: 183866 - DNA, 25 bp, SARS Virus
ttatagttttcgggacatctgctgt

SEQ ID NO: 183867 - DNA, 25 bp, SARS Virus
tatagttttcgggacatctgctgta

SEQ ID NO: 183868 - DNA, 25 bp, SARS Virus
atagttttcggggcatctgctgtag

SEQ ID NO: 183869 - DNA, 25 bp, SARS Virus
tagttttcgggagatctgctgtagt

SEQ ID NO: 183870 - DNA, 25 bp, SARS Virus
agttttcgggacgtctgctgtagtc

SEQ ID NO: 183871 - DNA, 25 bp, SARS Virus
gttttcgggacagctgctgtagtca

SEQ ID NO: 183872 - DNA, 25 bp, SARS Virus
ttttcgggacatgtgctgtagtcat

SEQ ID NO: 183873 - DNA, 25 bp, SARS Virus
tttcgggacatcggctgtagtcatg

SEQ ID NO: 183874 - DNA, 25 bp, SARS Virus
ttcgggacatctgctgtagtcatga

SEQ ID NO: 183875 - DNA, 25 bp, SARS Virus
tcgggacatctggtgtagtcatgat

SEQ ID NO: 183876 - DNA, 25 bp, SARS Virus
cgggacatctgcggtagtcatgatc

SEQ ID NO: 183877 - DNA, 25 bp, SARS Virus
gggacatctgctgtagtcatgatca

SEQ ID NO: 183878 - DNA, 25 bp, SARS Virus
ggacatctgctggagtcatgatcac

SEQ ID NO: 183879 - DNA, 25 bp, SARS Virus
gacatctgctgtggtcatgatcacg

SEQ ID NO: 183880 - DNA, 25 bp, SARS Virus
acatctgctgtagtcatgatcacgg

SEQ ID NO: 183881 - DNA, 25 bp, SARS Virus
catctgctgtaggcatgatcacgga

SEQ ID NO: 183882 - DNA, 25 bp, SARS Virus
atctgctgtagtgatgatcacggac

SEQ ID NO: 183883 - DNA, 25 bp, SARS Virus
tctgctgtagtcgtgatcacggaca

SEQ ID NO: 183884 - DNA, 25 bp, SARS Virus
ctgctgtagtcaggatcacggacac

SEQ ID NO: 183885 - DNA, 25 bp, SARS Virus
tgctgtagtcatgatcacggacacg

SEQ ID NO: 183886 - DNA, 25 bp, SARS Virus
gctgtagtcatggtcacggacacgg

SEQ ID NO: 183887 - DNA, 25 bp, SARS Virus
ctgtagtcatgagcacggacacggc

SEQ ID NO: 183888 - DNA, 25 bp, SARS Virus
tgtagtcatgatgacggacacggcg

SEQ ID NO: 183889 - DNA, 25 bp, SARS Virus
gtagtcatgatcgcggacacggcgt

SEQ ID NO: 183890 - DNA, 25 bp, SARS Virus
tagtcatgatcagggacacggcgtg

SEQ ID NO: 183891 - DNA, 25 bp, SARS Virus
agtcatgatcacggacacggcgtgc

SEQ ID NO: 183892 - DNA, 25 bp, SARS Virus
gtcatgatcacggacacggcgtgcc

SEQ ID NO: 183893 - DNA, 25 bp, SARS Virus
tcatgatcacgggcacggcgtgcca

SEQ ID NO: 183894 - DNA, 25 bp, SARS Virus
catgatcacggagacggcgtgccac

SEQ ID NO: 183895 - DNA, 25 bp, SARS Virus
atgatcacggacgcggcgtgccaca

SEQ ID NO: 183896 - DNA, 25 bp, SARS Virus
tgatcacggacagggcgtgccacat

SEQ ID NO: 183897 - DNA, 25 bp, SARS Virus
gatcacggacacggcgtgccacatt

SEQ ID NO: 183898 - DNA, 25 bp, SARS Virus
atcacggacacggcgtgccacattc

SEQ ID NO: 183899 - DNA, 25 bp, SARS Virus
tcacggacacggggtgccacattct

SEQ ID NO: 183900 - DNA, 25 bp, SARS Virus
cacggacacggcgtgccacattctg

SEQ ID NO: 183901 - DNA, 25 bp, SARS Virus
acggacacggcgggccacattctgc

SEQ ID NO: 183902 - DNA, 25 bp, SARS Virus
cggacacggcgtgccacattctgcc

SEQ ID NO: 183903 - DNA, 25 bp, SARS Virus
ggacacggcgtggcacattctgccc

SEQ ID NO: 183904 - DNA, 25 bp, SARS Virus
gacacggcgtgcgacattctgcccg

SEQ ID NO: 183905 - DNA, 25 bp, SARS Virus
acacggcgtgccgcattctgcccga

SEQ ID NO: 183906 - DNA, 25 bp, SARS Virus
cacggcgtgccagattctgcccgac

SEQ ID NO: 183907 - DNA, 25 bp, SARS Virus
acggcgtgccacgttctgcccgacg

SEQ ID NO: 183908 - DNA, 25 bp, SARS Virus
cggcgtgccacagtctgcccgacgt

SEQ ID NO: 183909 - DNA, 25 bp, SARS Virus
ggcgtgccacatgctgcccgacgtg

SEQ ID NO: 183910 - DNA, 25 bp, SARS Virus
gcgtgccacattgtgcccgacgtga

SEQ ID NO: 183911 - DNA, 25 bp, SARS Virus
cgtgccacattcggcccgacgtgaa

SEQ ID NO: 183912 - DNA, 25 bp, SARS Virus
gtgccacattctgcccgacgtgaat

SEQ ID NO: 183913 - DNA, 25 bp, SARS Virus
tgccacattctggccgacgtgaatg

SEQ ID NO: 183914 - DNA, 25 bp, SARS Virus
gccacattctgcgcgacgtgaatgt

SEQ ID NO: 183915 - DNA, 25 bp, SARS Virus
ccacattctgccggacgtgaatgtg

SEQ ID NO: 183916 - DNA, 25 bp, SARS Virus
cacattctgcccgacgtgaatgtgg

SEQ ID NO: 183917 - DNA, 25 bp, SARS Virus
acattctgcccggcgtgaatgtggc

SEQ ID NO: 183918 - DNA, 25 bp, SARS Virus
cattctgcccgaggtgaatgtggcg

SEQ ID NO: 183919 - DNA, 25 bp, SARS Virus
attctgcccgacgtgaatgtggcgt

SEQ ID NO: 183920 - DNA, 25 bp, SARS Virus
ttctgcccgacgggaatgtggcgtt

SEQ ID NO: 183921 - DNA, 25 bp, SARS Virus
tctgcccgacgtgaatgtggcgttt

SEQ ID NO: 183922 - DNA, 25 bp, SARS Virus
ctgcccgacgtggatgtggcgtttg

SEQ ID NO: 183923 - DNA, 25 bp, SARS Virus
tgcccgacgtgagtgtggcgtttgg

SEQ ID NO: 183924 - DNA, 25 bp, SARS Virus
gcccgacgtgaaggtggcgtttggg

SEQ ID NO: 183925 - DNA, 25 bp, SARS Virus
cccgacgtgaatgtggcgtttgggc

SEQ ID NO: 183926 - DNA, 25 bp, SARS Virus
ccgacgtgaatggggcgtttgggca

SEQ ID NO: 183927 - DNA, 25 bp, SARS Virus
cgacgtgaatgtggcgtttgggcaa

SEQ ID NO: 183928 - DNA, 25 bp, SARS Virus
gacgtgaatgtggcgtttgggcaaa

SEQ ID NO: 183929 - DNA, 25 bp, SARS Virus
acgtgaatgtggggtttgggcaaat

SEQ ID NO: 183930 - DNA, 25 bp, SARS Virus
cgtgaatgtggcgtttgggcaaatt

SEQ ID NO: 183931 - DNA, 25 bp, SARS Virus
gtgaatgtggcggttgggcaaattt

SEQ ID NO: 183932 - DNA, 25 bp, SARS Virus
tgaatgtggcgtgtgggcaaatttt

SEQ ID NO: 183933 - DNA, 25 bp, SARS Virus
gaatgtggcgttggggcaaattttt

SEQ ID NO: 183934 - DNA, 25 bp, SARS Virus
aatgtggcgtttgggcaaatttttg

SEQ ID NO: 183935 - DNA, 25 bp, SARS Virus
atgtggcgtttgggcaaatttttgc

SEQ ID NO: 183936 - DNA, 25 bp, SARS Virus
tgtggcgtttgggcaaatttttgca

SEQ ID NO: 183937 - DNA, 25 bp, SARS Virus
gtggcgtttggggaaatttttgcaa

SEQ ID NO: 183938 - DNA, 25 bp, SARS Virus
tggcgtttgggcgaatttttgcaac

SEQ ID NO: 183939 - DNA, 25 bp, SARS Virus
ggcgtttgggcagatttttgcaact

SEQ ID NO: 183940 - DNA, 25 bp, SARS Virus
gcgtttgggcaagtttttgcaacta

SEQ ID NO: 183941 - DNA, 25 bp, SARS Virus
cgtttgggcaaagttttgcaactac

SEQ ID NO: 183942 - DNA, 25 bp, SARS Virus
gtttgggcaaatgtttgcaactacg

SEQ ID NO: 183943 - DNA, 25 bp, SARS Virus
tttgggcaaattgttgcaactacgt

SEQ ID NO: 183944 - DNA, 25 bp, SARS Virus
ttgggcaaatttgtgcaactacgta

SEQ ID NO: 183945 - DNA, 25 bp, SARS Virus
tgggcaaattttggcaactacgtag

SEQ ID NO: 183946 - DNA, 25 bp, SARS Virus
gggcaaatttttgcaactacgtagg

SEQ ID NO: 183947 - DNA, 25 bp, SARS Virus
ggcaaatttttggaactacgtaggc

SEQ ID NO: 183948 - DNA, 25 bp, SARS Virus
gcaaatttttgcgactacgtaggcg

SEQ ID NO: 183949 - DNA, 25 bp, SARS Virus
caaatttttgcagctacgtaggcgt

SEQ ID NO: 183950 - DNA, 25 bp, SARS Virus
aaatttttgcaagtacgtaggcgtc

SEQ ID NO: 183951 - DNA, 25 bp, SARS Virus
aatttttgcaacgacgtaggcgtct

SEQ ID NO: 183952 - DNA, 25 bp, SARS Virus
atttttgcaactgcgtaggcgtctg

SEQ ID NO: 183953 - DNA, 25 bp, SARS Virus
tttttgcaactaggtaggcgtctga

SEQ ID NO: 183954 - DNA, 25 bp, SARS Virus
ttttgcaactacgtaggcgtctgac

SEQ ID NO: 183955 - DNA, 25 bp, SARS Virus
tttgcaactacggaggcgtctgacg

SEQ ID NO: 183956 - DNA, 25 bp, SARS Virus
ttgcaactacgtgggcgtctgacgt

SEQ ID NO: 183957 - DNA, 25 bp, SARS Virus
tgcaactacgtaggcgtctgacgta

SEQ ID NO: 183958 - DNA, 25 bp, SARS Virus
gcaactacgtaggcgtctgacgtag

SEQ ID NO: 183959 - DNA, 25 bp, SARS Virus
caactacgtaggggtctgacgtagt

SEQ ID NO: 183960 - DNA, 25 bp, SARS Virus
aactacgtaggcgtctgacgtagtt

SEQ ID NO: 183961 - DNA, 25 bp, SARS Virus
actacgtaggcggctgacgtagttc

SEQ ID NO: 183962 - DNA, 25 bp, SARS Virus
ctacgtaggcgtgtgacgtagttcc

SEQ ID NO: 183963 - DNA, 25 bp, SARS Virus
tacgtaggcgtcggacgtagttccc

SEQ ID NO: 183964 - DNA, 25 bp, SARS Virus
acgtaggcgtctgacgtagttccca

SEQ ID NO: 183965 - DNA, 25 bp, SARS Virus
cgtaggcgtctggcgtagttcccaa

SEQ ID NO: 183966 - DNA, 25 bp, SARS Virus
gtaggcgtctgaggtagttcccaag

SEQ ID NO: 183967 - DNA, 25 bp, SARS Virus
taggcgtctgacgtagttcccaagc

SEQ ID NO: 183968 - DNA, 25 bp, SARS Virus
aggcgtctgacggagttcccaagcg

SEQ ID NO: 183969 - DNA, 25 bp, SARS Virus
ggcgtctgacgtggttcccaagcgc

SEQ ID NO: 183970 - DNA, 25 bp, SARS Virus
gcgtctgacgtagttcccaagcgcc

SEQ ID NO: 183971 - DNA, 25 bp, SARS Virus
cgtctgacgtaggtcccaagcgcct

SEQ ID NO: 183972 - DNA, 25 bp, SARS Virus
gtctgacgtagtgcccaagcgcctc

SEQ ID NO: 183973 - DNA, 25 bp, SARS Virus
tctgacgtagttgccaagcgcctca

SEQ ID NO: 183974 - DNA, 25 bp, SARS Virus
ctgacgtagttcgcaagcgcctcaa

SEQ ID NO: 183975 - DNA, 25 bp, SARS Virus
tgacgtagttccgaagcgcctcaac

SEQ ID NO: 183976 - DNA, 25 bp, SARS Virus
gacgtagttcccgagcgcctcaacc

SEQ ID NO: 183977 - DNA, 25 bp, SARS Virus
acgtagttcccaggcgcctcaacca

SEQ ID NO: 183978 - DNA, 25 bp, SARS Virus
cgtagttcccaagcgcctcaaccag

SEQ ID NO: 183979 - DNA, 25 bp, SARS Virus
gtagttcccaagggcctcaaccagt

SEQ ID NO: 183980 - DNA, 25 bp, SARS Virus
tagttcccaagcgcctcaaccagtg

SEQ ID NO: 183981 - DNA, 25 bp, SARS Virus
agttcccaagcggctcaaccagtgt

SEQ ID NO: 183982 - DNA, 25 bp, SARS Virus
gttcccaagcgcgtcaaccagtgtt

SEQ ID NO: 183983 - DNA, 25 bp, SARS Virus
ttcccaagcgccgcaaccagtgttg

SEQ ID NO: 183984 - DNA, 25 bp, SARS Virus
tcccaagcgcctgaaccagtgttga

SEQ ID NO: 183985 - DNA, 25 bp, SARS Virus
cccaagcgcctcgaccagtgttgat

SEQ ID NO: 183986 - DNA, 25 bp, SARS Virus
ccaagcgcctcagccagtgttgatg

SEQ ID NO: 183987 - DNA, 25 bp, SARS Virus
caagcgcctcaagcagtgttgatgt

SEQ ID NO: 183988 - DNA, 25 bp, SARS Virus
aagcgcctcaacgagtgttgatgtc

SEQ ID NO: 183989 - DNA, 25 bp, SARS Virus
agcgcctcaaccggtgttgatgtcg

SEQ ID NO: 183990 - DNA, 25 bp, SARS Virus
gcgcctcaaccagtgttgatgtcgg

SEQ ID NO: 183991 - DNA, 25 bp, SARS Virus
cgcctcaaccagggttgatgtcggt

SEQ ID NO: 183992 - DNA, 25 bp, SARS Virus
gcctcaaccagtgttgatgtcggta

SEQ ID NO: 183993 - DNA, 25 bp, SARS Virus
cctcaaccagtggtgatgtcggtat

SEQ ID NO: 183994 - DNA, 25 bp, SARS Virus
ctcaaccagtgtggatgtcggtatt

SEQ ID NO: 183995 - DNA, 25 bp, SARS Virus
tcaaccagtgttgatgtcggtattg

SEQ ID NO: 183996 - DNA, 25 bp, SARS Virus
caaccagtgttggtgtcggtattgg

SEQ ID NO: 183997 - DNA, 25 bp, SARS Virus
aaccagtgttgaggtcggtattgga

SEQ ID NO: 183998 - DNA, 25 bp, SARS Virus
accagtgttgatgtcggtattggaa

SEQ ID NO: 183999 - DNA, 25 bp, SARS Virus
ccagtgttgatggcggtattggaaa

SEQ ID NO: 184000 - DNA, 25 bp, SARS Virus
cagtgttgatgtgggtattggaaag

SEQ ID NO: 184001 - DNA, 25 bp, SARS Virus
agtgttgatgtcggtattggaaagg

SEQ ID NO: 184002 - DNA, 25 bp, SARS Virus
gtgttgatgtcggtattggaaaggt

SEQ ID NO: 184003 - DNA, 25 bp, SARS Virus
tgttgatgtcgggattggaaaggtg

SEQ ID NO: 184004 - DNA, 25 bp, SARS Virus
gttgatgtcggtgttggaaaggtgt

SEQ ID NO: 184005 - DNA, 25 bp, SARS Virus
ttgatgtcggtagtggaaaggtgta

SEQ ID NO: 184006 - DNA, 25 bp, SARS Virus
tgatgtcggtatgggaaaggtgtaa

SEQ ID NO: 184007 - DNA, 25 bp, SARS Virus
gatgtcggtattggaaaggtgtaag

SEQ ID NO: 184008 - DNA, 25 bp, SARS Virus
atgtcggtattggaaaggtgtaagg

SEQ ID NO: 184009 - DNA, 25 bp, SARS Virus
tgtcgttaacattcactgctcataa

SEQ ID NO: 184010 - DNA, 25 bp, SARS Virus
gtcgttaacatatactgctcataaa

SEQ ID NO: 184011 - DNA, 25 bp, SARS Virus
tcgttaacatactctgctcataaag

SEQ ID NO: 184012 - DNA, 25 bp, SARS Virus
cgttaacatacattgctcataaaga

SEQ ID NO: 184013 - DNA, 25 bp, SARS Virus
gttaacatacactgctcataaagaa

SEQ ID NO: 184014 - DNA, 25 bp, SARS Virus
ttaacatacacttctcataaagaaa

SEQ ID NO: 184015 - DNA, 25 bp, SARS Virus
taacatacactgttcataaagaaaa

SEQ ID NO: 184016 - DNA, 25 bp, SARS Virus
aacatacactgctcataaagaaaat

SEQ ID NO: 184017 - DNA, 25 bp, SARS Virus
acatacactgcttataaagaaaatt

SEQ ID NO: 184018 - DNA, 25 bp, SARS Virus
catacactgctcttaaagaaaatta

SEQ ID NO: 184019 - DNA, 25 bp, SARS Virus
atacactgctcataaagaaaattac

SEQ ID NO: 184020 - DNA, 25 bp, SARS Virus
tacactgctcattaagaaaattaca

SEQ ID NO: 184021 - DNA, 25 bp, SARS Virus
acactgctcatatagaaaattacat

SEQ ID NO: 184022 - DNA, 25 bp, SARS Virus
cactgctcataatgaaaattacata

SEQ ID NO: 184023 - DNA, 25 bp, SARS Virus
actgctcataaataaaattacatag

SEQ ID NO: 184024 - DNA, 25 bp, SARS Virus
ctgctcataaagtaaattacatagt

SEQ ID NO: 184025 - DNA, 25 bp, SARS Virus
tgctcataaagataattacatagtg

SEQ ID NO: 184026 - DNA, 25 bp, SARS Virus
gctcataaagaatattacatagtgt

SEQ ID NO: 184027 - DNA, 25 bp, SARS Virus
ctcataaagaaatttacatagtgtt

SEQ ID NO: 184028 - DNA, 25 bp, SARS Virus
tcataaagaaaattacatagtgtta

SEQ ID NO: 184029 - DNA, 25 bp, SARS Virus
cataaagaaaattacatagtgttaa

SEQ ID NO: 184030 - DNA, 25 bp, SARS Virus
ataaagaaaatttcatagtgttaat

SEQ ID NO: 184031 - DNA, 25 bp, SARS Virus
taaagaaaattatatagtgttaatg

SEQ ID NO: 184032 - DNA, 25 bp, SARS Virus
aaagaaaattacttagtgttaatgg

SEQ ID NO: 184033 - DNA, 25 bp, SARS Virus
aagaaaattacatagtgttaatggg

SEQ ID NO: 184034 - DNA, 25 bp, SARS Virus
agaaaattacattgtgttaatggga

SEQ ID NO: 184035 - DNA, 25 bp, SARS Virus
gaaaattacatattgttaatgggag

SEQ ID NO: 184036 - DNA, 25 bp, SARS Virus
aaaattacatagtgttaatgggagt

SEQ ID NO: 184037 - DNA, 25 bp, SARS Virus
aaattacatagttttaatgggagta

SEQ ID NO: 184038 - DNA, 25 bp, SARS Virus
aattacatagtgttaatgggagtag

SEQ ID NO: 184039 - DNA, 25 bp, SARS Virus
attacatagtgttaatgggagtagt

SEQ ID NO: 184040 - DNA, 25 bp, SARS Virus
ttacatagtgtttatgggagtagtt

SEQ ID NO: 184041 - DNA, 25 bp, SARS Virus
tacatagtgttattgggagtagttt

SEQ ID NO: 184042 - DNA, 25 bp, SARS Virus
acatagtgttaatgggagtagtttt

SEQ ID NO: 184043 - DNA, 25 bp, SARS Virus
catagtgttaattggagtagtttta

SEQ ID NO: 184044 - DNA, 25 bp, SARS Virus
atagtgttaatgtgagtagttttac

SEQ ID NO: 184045 - DNA, 25 bp, SARS Virus
tagtgttaatggtagtagttttact

SEQ ID NO: 184046 - DNA, 25 bp, SARS Virus
agtgttaatgggtgtagttttactg

SEQ ID NO: 184047 - DNA, 25 bp, SARS Virus
gtgttaatgggattagttttactgc

SEQ ID NO: 184048 - DNA, 25 bp, SARS Virus
tgttaatgggagtagttttactgca

SEQ ID NO: 184049 - DNA, 25 bp, SARS Virus
gttaatgggagttgttttactgcat

SEQ ID NO: 184050 - DNA, 25 bp, SARS Virus
ttaatgggagtatttttactgcatc

SEQ ID NO: 184051 - DNA, 25 bp, SARS Virus
taatgggagtagttttactgcatct

SEQ ID NO: 184052 - DNA, 25 bp, SARS Virus
aatgggagtagttttactgcatctc

SEQ ID NO: 184053 - DNA, 25 bp, SARS Virus
atgggagtagttttactgcatctcg

SEQ ID NO: 184054 - DNA, 25 bp, SARS Virus
tgggagtagttttactgcatctcgt

SEQ ID NO: 184055 - DNA, 25 bp, SARS Virus
gggagtagtttttctgcatctcgta

SEQ ID NO: 184056 - DNA, 25 bp, SARS Virus
ggagtagttttattgcatctcgtat

SEQ ID NO: 184057 - DNA, 25 bp, SARS Virus
gagtagttttactgcatctcgtatc

SEQ ID NO: 184058 - DNA, 25 bp, SARS Virus
agtagttttacttcatctcgtatct

SEQ ID NO: 184059 - DNA, 25 bp, SARS Virus
gtagttttactgtatctcgtatctg

SEQ ID NO: 184060 - DNA, 25 bp, SARS Virus
tagttttactgcttctcgtatctga

SEQ ID NO: 184061 - DNA, 25 bp, SARS Virus
agttttactgcatctcgtatctgat

SEQ ID NO: 184062 - DNA, 25 bp, SARS Virus
gttttactgcatttcgtatctgatt

SEQ ID NO: 184063 - DNA, 25 bp, SARS Virus
ttttactgcatctcgtatctgattt

SEQ ID NO: 184064 - DNA, 25 bp, SARS Virus
tttactgcatcttgtatctgattta

SEQ ID NO: 184065 - DNA, 25 bp, SARS Virus
ttactgcatctcttatctgatttag

SEQ ID NO: 184066 - DNA, 25 bp, SARS Virus
tactgcatctcgtatctgatttagt

SEQ ID NO: 184067 - DNA, 25 bp, SARS Virus
actgcatctcgtttctgatttagtc

SEQ ID NO: 184068 - DNA, 25 bp, SARS Virus
ctgcatctcgtatctgatttagtcg

SEQ ID NO: 184069 - DNA, 25 bp, SARS Virus
tgcatctcgtatttgatttagtcgg

SEQ ID NO: 184070 - DNA, 25 bp, SARS Virus
gcatctcgtatctgatttagtcggt

SEQ ID NO: 184071 - DNA, 25 bp, SARS Virus
catctcgtatcttatttagtcggta

SEQ ID NO: 184072 - DNA, 25 bp, SARS Virus
atctcgtatctgttttagtcggtaa

SEQ ID NO: 184073 - DNA, 25 bp, SARS Virus
tctcgtatctgatttagtcggtaac

SEQ ID NO: 184074 - DNA, 25 bp, SARS Virus
ctcgtatctgatttagtcggtaaca

SEQ ID NO: 184075 - DNA, 25 bp, SARS Virus
tcgtatctgatttagtcggtaacac

SEQ ID NO: 184076 - DNA, 25 bp, SARS Virus
cgtatctgattttgtcggtaacaca

SEQ ID NO: 184077 - DNA, 25 bp, SARS Virus
gtatctgatttattcggtaacacat

SEQ ID NO: 184078 - DNA, 25 bp, SARS Virus
tatctgatttagtcggtaacacata

SEQ ID NO: 184079 - DNA, 25 bp, SARS Virus
atctgatttagttggtaacacataa

SEQ ID NO: 184080 - DNA, 25 bp, SARS Virus
tctgatttagtctgtaacacataaa

SEQ ID NO: 184081 - DNA, 25 bp, SARS Virus
ctgatttagtcgttaacacataaat

SEQ ID NO: 184082 - DNA, 25 bp, SARS Virus
tgatttagtcggtaacacataaatc

SEQ ID NO: 184083 - DNA, 25 bp, SARS Virus
gatttagtcggttacacataaatca

SEQ ID NO: 184084 - DNA, 25 bp, SARS Virus
atttagtcggtatcacataaatcaa

SEQ ID NO: 184085 - DNA, 25 bp, SARS Virus
tttagtcggtaatacataaatcaat

SEQ ID NO: 184086 - DNA, 25 bp, SARS Virus
ttagtcggtaactcataaatcaatc

SEQ ID NO: 184087 - DNA, 25 bp, SARS Virus
tagtcggtaacatataaatcaatct

SEQ ID NO: 184088 - DNA, 25 bp, SARS Virus
agtcggtaacacttaaatcaatctg

SEQ ID NO: 184089 - DNA, 25 bp, SARS Virus
gtcggtaacacataaatcaatctgc

SEQ ID NO: 184090 - DNA, 25 bp, SARS Virus
tcggtaacacattaatcaatctgcg

SEQ ID NO: 184091 - DNA, 25 bp, SARS Virus
cggtaacacatatatcaatctgcga

SEQ ID NO: 184092 - DNA, 25 bp, SARS Virus
ggtaacacataattcaatctgcgac

SEQ ID NO: 184093 - DNA, 25 bp, SARS Virus
gtaacacataaatcaatctgcgact

SEQ ID NO: 184094 - DNA, 25 bp, SARS Virus
taacacataaattaatctgcgactg

SEQ ID NO: 184095 - DNA, 25 bp, SARS Virus
aacacataaatctatctgcgactgc

SEQ ID NO: 184096 - DNA, 25 bp, SARS Virus
acacataaatcattctgcgactgca

SEQ ID NO: 184097 - DNA, 25 bp, SARS Virus
cacataaatcaatctgcgactgcac

SEQ ID NO: 184098 - DNA, 25 bp, SARS Virus
acataaatcaatttgcgactgcact

SEQ ID NO: 184099 - DNA, 25 bp, SARS Virus
cataaatcaatctgcgactgcacta

SEQ ID NO: 184100 - DNA, 25 bp, SARS Virus
ataaatcaatcttcgactgcactat

SEQ ID NO: 184101 - DNA, 25 bp, SARS Virus
taaatcaatctgtgactgcactata

SEQ ID NO: 184102 - DNA, 25 bp, SARS Virus
aaatcaatctgctactgcactatat

SEQ ID NO: 184103 - DNA, 25 bp, SARS Virus
aatcaatctgcgtctgcactatata

SEQ ID NO: 184104 - DNA, 25 bp, SARS Virus
atcaatctgcgattgcactatatac

SEQ ID NO: 184105 - DNA, 25 bp, SARS Virus
tcaatctgcgactgcactatataca

SEQ ID NO: 184106 - DNA, 25 bp, SARS Virus
caatctgcgacttcactatatacac

SEQ ID NO: 184107 - DNA, 25 bp, SARS Virus
aatctgcgactgtactatatacacc

SEQ ID NO: 184108 - DNA, 25 bp, SARS Virus
atctgcgactgctctatatacacca

SEQ ID NO: 184109 - DNA, 25 bp, SARS Virus
tctgcgactgcattatatacaccat

SEQ ID NO: 184110 - DNA, 25 bp, SARS Virus
ctgcgactgcactatatacaccatg

SEQ ID NO: 184111 - DNA, 25 bp, SARS Virus
tgcgactgcactttatacaccatgg

SEQ ID NO: 184112 - DNA, 25 bp, SARS Virus
gcgactgcactatatacaccatggt

SEQ ID NO: 184113 - DNA, 25 bp, SARS Virus
cgactgcactatttacaccatggta

SEQ ID NO: 184114 - DNA, 25 bp, SARS Virus
gactgcactatatacaccatggtac

SEQ ID NO: 184115 - DNA, 25 bp, SARS Virus
actgcactatattcaccatggtaca

SEQ ID NO: 184116 - DNA, 25 bp, SARS Virus
ctgcactatatataccatggtacag

SEQ ID NO: 184117 - DNA, 25 bp, SARS Virus
tgcactatatactccatggtacagt

SEQ ID NO: 184118 - DNA, 25 bp, SARS Virus
gcactatatacatcatggtacagtg

SEQ ID NO: 184119 - DNA, 25 bp, SARS Virus
cactatatacactatggtacagtgg

SEQ ID NO: 184120 - DNA, 25 bp, SARS Virus
actatatacaccttggtacagtggt

SEQ ID NO: 184121 - DNA, 25 bp, SARS Virus
ctatatacaccatggtacagtggta

SEQ ID NO: 184122 - DNA, 25 bp, SARS Virus
tatatacaccattgtacagtggtag

SEQ ID NO: 184123 - DNA, 25 bp, SARS Virus
atatacaccatgttacagtggtaga

SEQ ID NO: 184124 - DNA, 25 bp, SARS Virus
tatacaccatggtacagtggtagat

SEQ ID NO: 184125 - DNA, 25 bp, SARS Virus
atacaccatggttcagtggtagatg

SEQ ID NO: 184126 - DNA, 25 bp, SARS Virus
tacaccatggtatagtggtagatga

SEQ ID NO: 184127 - DNA, 25 bp, SARS Virus
acaccatggtactgtggtagatgag

SEQ ID NO: 184128 - DNA, 25 bp, SARS Virus
caccatggtacattggtagatgaga

SEQ ID NO: 184129 - DNA, 25 bp, SARS Virus
accatggtacagtggtagatgagat

SEQ ID NO: 184130 - DNA, 25 bp, SARS Virus
ccatggtacagttgtagatgagatt

SEQ ID NO: 184131 - DNA, 25 bp, SARS Virus
catggtacagtgttagatgagattt

SEQ ID NO: 184132 - DNA, 25 bp, SARS Virus
atggtacagtggtagatgagatttg

SEQ ID NO: 184133 - DNA, 25 bp, SARS Virus
tggtacagtggttgatgagatttga

SEQ ID NO: 184134 - DNA, 25 bp, SARS Virus
ggtacagtggtatatgagatttgaa

SEQ ID NO: 184135 - DNA, 25 bp, SARS Virus
gtacagtggtagttgagatttgaac

SEQ ID NO: 184136 - DNA, 25 bp, SARS Virus
tacagtggtagatgagatttgaact

SEQ ID NO: 184137 - DNA, 25 bp, SARS Virus
acagtggtagattagatttgaactt

SEQ ID NO: 184138 - DNA, 25 bp, SARS Virus
cagtggtagatgtgatttgaacttt

SEQ ID NO: 184139 - DNA, 25 bp, SARS Virus
agtggtagatgatatttgaactttt

SEQ ID NO: 184140 - DNA, 25 bp, SARS Virus
gtggtagatgagttttgaacttttt

SEQ ID NO: 184141 - DNA, 25 bp, SARS Virus
tggtagatgagatttgaactttttc

SEQ ID NO: 184142 - DNA, 25 bp, SARS Virus
ggtagatgagatttgaactttttca

SEQ ID NO: 184143 - DNA, 25 bp, SARS Virus
gtagatgagatttgaactttttcag

SEQ ID NO: 184144 - DNA, 25 bp, SARS Virus
tagatgagattttaactttttcagt

SEQ ID NO: 184145 - DNA, 25 bp, SARS Virus
agatgagatttgtactttttcagta

SEQ ID NO: 184146 - DNA, 25 bp, SARS Virus
gatgagatttgatctttttcagtac

SEQ ID NO: 184147 - DNA, 25 bp, SARS Virus
atgagatttgaattttttcagtacc

SEQ ID NO: 184148 - DNA, 25 bp, SARS Virus
tgagatttgaactttttcagtacct

SEQ ID NO: 184149 - DNA, 25 bp, SARS Virus
gagatttgaactttttcagtacctg

SEQ ID NO: 184150 - DNA, 25 bp, SARS Virus
agatttgaactttttcagtacctgt

SEQ ID NO: 184151 - DNA, 25 bp, SARS Virus
gatttgaactttttcagtacctgtc

SEQ ID NO: 184152 - DNA, 25 bp, SARS Virus
atttgaactttttcagtacctgtcg

SEQ ID NO: 184153 - DNA, 25 bp, SARS Virus
tttgaacttttttagtacctgtcgt

SEQ ID NO: 184154 - DNA, 25 bp, SARS Virus
ttgaactttttctgtacctgtcgtt

SEQ ID NO: 184155 - DNA, 25 bp, SARS Virus
tgaactttttcattacctgtcgttg

SEQ ID NO: 184156 - DNA, 25 bp, SARS Virus
gaactttttcagtacctgtcgttgg

SEQ ID NO: 184157 - DNA, 25 bp, SARS Virus
aactttttcagttcctgtcgttggc

SEQ ID NO: 184158 - DNA, 25 bp, SARS Virus
actttttcagtatctgtcgttggcg

SEQ ID NO: 184159 - DNA, 25 bp, SARS Virus
ctttttcagtacttgtcgttggcga

SEQ ID NO: 184160 - DNA, 25 bp, SARS Virus
tttttcagtacctgtcgttggcgac

SEQ ID NO: 184161 - DNA, 25 bp, SARS Virus
ttttcagtacctttcgttggcgacc

SEQ ID NO: 184162 - DNA, 25 bp, SARS Virus
tttcagtacctgtcgttggcgacct

SEQ ID NO: 184163 - DNA, 25 bp, SARS Virus
ttcagtacctgttgttggcgacctg

SEQ ID NO: 184164 - DNA, 25 bp, SARS Virus
tcagtacctgtctttggcgacctgt

SEQ ID NO: 184165 - DNA, 25 bp, SARS Virus
cagtacctgtcgttggcgacctgtt

SEQ ID NO: 184166 - DNA, 25 bp, SARS Virus
agtacctgtcgttggcgacctgtta

SEQ ID NO: 184167 - DNA, 25 bp, SARS Virus
gtacctgtcgtttgcgacctgttag

SEQ ID NO: 184168 - DNA, 25 bp, SARS Virus
tacctgtcgttgtcgacctgttaga

SEQ ID NO: 184169 - DNA, 25 bp, SARS Virus
acctgtcgttggtgacctgttagaa

SEQ ID NO: 184170 - DNA, 25 bp, SARS Virus
cctgtcgttggctacctgttagaaa

SEQ ID NO: 184171 - DNA, 25 bp, SARS Virus
ctgtcgttggcgtcctgttagaaat

SEQ ID NO: 184172 - DNA, 25 bp, SARS Virus
tgtcgttggcgatctgttagaaatt

SEQ ID NO: 184173 - DNA, 25 bp, SARS Virus
gtcgttggcgacttgttagaaattg

SEQ ID NO: 184174 - DNA, 25 bp, SARS Virus
tcgttggcgacctgttagaaattgg

SEQ ID NO: 184175 - DNA, 25 bp, SARS Virus
cgttggcgaccttttagaaattggt

SEQ ID NO: 184176 - DNA, 25 bp, SARS Virus
gttggcgacctgttagaaattggtt

SEQ ID NO: 184177 - DNA, 25 bp, SARS Virus
ttggcgacctgttagaaattggttc

SEQ ID NO: 184178 - DNA, 25 bp, SARS Virus
tggcgacctgtttgaaattggttca

SEQ ID NO: 184179 - DNA, 25 bp, SARS Virus
ggcgacctgttataaattggttcaa

SEQ ID NO: 184180 - DNA, 25 bp, SARS Virus
gcgacctgttagtaattggttcaat

SEQ ID NO: 184181 - DNA, 25 bp, SARS Virus
cgacctgttagatattggttcaata

SEQ ID NO: 184182 - DNA, 25 bp, SARS Virus
gacctgttagaatttggttcaatat

SEQ ID NO: 184183 - DNA, 25 bp, SARS Virus
acctgttagaaattggttcaatatt

SEQ ID NO: 184184 - DNA, 25 bp, SARS Virus
cctgttagaaattggttcaatattt

SEQ ID NO: 184185 - DNA, 25 bp, SARS Virus
ctgttagaaatttgttcaatattta

SEQ ID NO: 184186 - DNA, 25 bp, SARS Virus
tgttagaaattgtttcaatatttat

SEQ ID NO: 184187 - DNA, 25 bp, SARS Virus
gttagaaattggttcaatatttatc

SEQ ID NO: 184188 - DNA, 25 bp, SARS Virus
ttagaaattggttcaatatttatca

SEQ ID NO: 184189 - DNA, 25 bp, SARS Virus
tagaaattggtttaatatttatcag

SEQ ID NO: 184190 - DNA, 25 bp, SARS Virus
agaaattggttctatatttatcaga

SEQ ID NO: 184191 - DNA, 25 bp, SARS Virus
gaaattggttcattatttatcagag

SEQ ID NO: 184192 - DNA, 25 bp, SARS Virus
aaattggttcaatatttatcagaga

SEQ ID NO: 184193 - DNA, 25 bp, SARS Virus
aattggttcaatttttatcagagaa

SEQ ID NO: 184194 - DNA, 25 bp, SARS Virus
attggttcaatatttatcagagaag

SEQ ID NO: 184195 - DNA, 25 bp, SARS Virus
ttggttcaatatttatcagagaagt

SEQ ID NO: 184196 - DNA, 25 bp, SARS Virus
tggttcaatatttatcagagaagta

SEQ ID NO: 184197 - DNA, 25 bp, SARS Virus
ggttcaatatttttcagagaagtac

SEQ ID NO: 184198 - DNA, 25 bp, SARS Virus
gttcaatatttatcagagaagtaca

SEQ ID NO: 184199 - DNA, 25 bp, SARS Virus
ttcaatatttattagagaagtacaa

SEQ ID NO: 184200 - DNA, 25 bp, SARS Virus
tcaatatttatctgagaagtacaac

SEQ ID NO: 184201 - DNA, 25 bp, SARS Virus
caatatttatcatagaagtacaacc

SEQ ID NO: 184202 - DNA, 25 bp, SARS Virus
aatatttatcagtgaagtacaacca

SEQ ID NO: 184203 - DNA, 25 bp, SARS Virus
atatttatcagataagtacaaccat

SEQ ID NO: 184204 - DNA, 25 bp, SARS Virus
tatttatcagagtagtacaaccatc

SEQ ID NO: 184205 - DNA, 25 bp, SARS Virus
atttatcagagatgtacaaccatca

SEQ ID NO: 184206 - DNA, 25 bp, SARS Virus
tttatcagagaattacaaccatcaa

SEQ ID NO: 184207 - DNA, 25 bp, SARS Virus
ttatcagagaagtacaaccatcaat

SEQ ID NO: 184208 - DNA, 25 bp, SARS Virus
tatcagagaagttcaaccatcaatc

SEQ ID NO: 184209 - DNA, 25 bp, SARS Virus
atcagagaagtataaccatcaatct

SEQ ID NO: 184210 - DNA, 25 bp, SARS Virus
tcagagaagtactaccatcaatctg

SEQ ID NO: 184211 - DNA, 25 bp, SARS Virus
cagagaagtacatccatcaatctgt

SEQ ID NO: 184212 - DNA, 25 bp, SARS Virus
agagaagtacaatcatcaatctgta

SEQ ID NO: 184213 - DNA, 25 bp, SARS Virus
gagaagtacaactatcaatctgtat

SEQ ID NO: 184214 - DNA, 25 bp, SARS Virus
agaagtacaaccttcaatctgtatc

SEQ ID NO: 184215 - DNA, 25 bp, SARS Virus
gaagtacaaccatcaatctgtatca

SEQ ID NO: 184216 - DNA, 25 bp, SARS Virus
aagtacaaccattaatctgtatcat

SEQ ID NO: 184217 - DNA, 25 bp, SARS Virus
agtacaaccatctatctgtatcata

SEQ ID NO: 184218 - DNA, 25 bp, SARS Virus
gtacaaccatcattctgtatcatac

SEQ ID NO: 184219 - DNA, 25 bp, SARS Virus
tacaaccatcaatctgtatcatacg

SEQ ID NO: 184220 - DNA, 25 bp, SARS Virus
acaaccatcaatttgtatcatacgg

SEQ ID NO: 184221 - DNA, 25 bp, SARS Virus
caaccatcaatctgtatcatacgga

SEQ ID NO: 184222 - DNA, 25 bp, SARS Virus
aaccatcaatctttatcatacggag

SEQ ID NO: 184223 - DNA, 25 bp, SARS Virus
accatcaatctgtatcatacggaga

SEQ ID NO: 184224 - DNA, 25 bp, SARS Virus
ccatcaatctgtttcatacggagaa

SEQ ID NO: 184225 - DNA, 25 bp, SARS Virus
catcaatctgtatcatacggagaat

SEQ ID NO: 184226 - DNA, 25 bp, SARS Virus
atcaatctgtattatacggagaatt

SEQ ID NO: 184227 - DNA, 25 bp, SARS Virus
tcaatctgtatcttacggagaattg

SEQ ID NO: 184228 - DNA, 25 bp, SARS Virus
caatctgtatcatacggagaattga

SEQ ID NO: 184229 - DNA, 25 bp, SARS Virus
aatctgtatcattcggagaattgat

SEQ ID NO: 184230 - DNA, 25 bp, SARS Virus
atctgtatcatatggagaattgatg

SEQ ID NO: 184231 - DNA, 25 bp, SARS Virus
tctgtatcatactgagaattgatgt

SEQ ID NO: 184232 - DNA, 25 bp, SARS Virus
ctgtatcatacgtagaattgatgtt

SEQ ID NO: 184233 - DNA, 25 bp, SARS Virus
tgtatcatacggtgaattgatgttt

SEQ ID NO: 184234 - DNA, 25 bp, SARS Virus
gtatcatacggataattgatgtttc

SEQ ID NO: 184235 - DNA, 25 bp, SARS Virus
tatcatacggagtattgatgtttca

SEQ ID NO: 184236 - DNA, 25 bp, SARS Virus
atcatacggagatttgatgtttcat

SEQ ID NO: 184237 - DNA, 25 bp, SARS Virus
tcatacggagaattgatgtttcatt

SEQ ID NO: 184238 - DNA, 25 bp, SARS Virus
catacggagaattgatgtttcattc

SEQ ID NO: 184239 - DNA, 25 bp, SARS Virus
atacggagaatttatgtttcattct

SEQ ID NO: 184240 - DNA, 25 bp, SARS Virus
tacggagaattgttgtttcattctc

SEQ ID NO: 184241 - DNA, 25 bp, SARS Virus
acggagaattgatgtttcattctca

SEQ ID NO: 184242 - DNA, 25 bp, SARS Virus
cggagaattgatttttcattctcag

SEQ ID NO: 184243 - DNA, 25 bp, SARS Virus
ggagaattgatgtttcattctcaga

SEQ ID NO: 184244 - DNA, 25 bp, SARS Virus
gagaattgatgtttcattctcagat

SEQ ID NO: 184245 - DNA, 25 bp, SARS Virus
agaattgatgtttcattctcagatt

SEQ ID NO: 184246 - DNA, 25 bp, SARS Virus
gaattgatgttttattctcagatta

SEQ ID NO: 184247 - DNA, 25 bp, SARS Virus
aattgatgtttctttctcagattat

SEQ ID NO: 184248 - DNA, 25 bp, SARS Virus
attgatgtttcattctcagattatt

SEQ ID NO: 184249 - DNA, 25 bp, SARS Virus
ttgatgtttcattctcagattattt

SEQ ID NO: 184250 - DNA, 25 bp, SARS Virus
tgatgtttcattttcagattattta

SEQ ID NO: 184251 - DNA, 25 bp, SARS Virus
gatgtttcattctcagattatttaa

SEQ ID NO: 184252 - DNA, 25 bp, SARS Virus
atgtttcattcttagattatttaac

SEQ ID NO: 184253 - DNA, 25 bp, SARS Virus
tgtttcattctctgattatttaacg

SEQ ID NO: 184254 - DNA, 25 bp, SARS Virus
gtttcattctcatattatttaacgg

SEQ ID NO: 184255 - DNA, 25 bp, SARS Virus
tttcattctcagtttatttaacgga

SEQ ID NO: 184256 - DNA, 25 bp, SARS Virus
ttcattctcagattatttaacggaa

SEQ ID NO: 184257 - DNA, 25 bp, SARS Virus
tcattctcagattatttaacggaag

SEQ ID NO: 184258 - DNA, 25 bp, SARS Virus
cattctcagattttttaacggaagg

SEQ ID NO: 184259 - DNA, 25 bp, SARS Virus
attctcagattatttaacggaagga

SEQ ID NO: 184260 - DNA, 25 bp, SARS Virus
ttctcagattatttaacggaaggag

SEQ ID NO: 184261 - DNA, 25 bp, SARS Virus
tctcagattatttaacggaaggagt

SEQ ID NO: 184262 - DNA, 25 bp, SARS Virus
ctcagattattttacggaaggagta

SEQ ID NO: 184263 - DNA, 25 bp, SARS Virus
tcagattatttatcggaaggagtag

SEQ ID NO: 184264 - DNA, 25 bp, SARS Virus
cagattatttaatggaaggagtagg

SEQ ID NO: 184265 - DNA, 25 bp, SARS Virus
agattatttaactgaaggagtagga

SEQ ID NO: 184266 - DNA, 25 bp, SARS Virus
gattatttaacgtaaggagtaggaa

SEQ ID NO: 184267 - DNA, 25 bp, SARS Virus
attatttaacggtaggagtaggaag

SEQ ID NO: 184268 - DNA, 25 bp, SARS Virus
ttatttaacggatggagtaggaaga

SEQ ID NO: 184269 - DNA, 25 bp, SARS Virus
tatttaacggaatgagtaggaagag

SEQ ID NO: 184270 - DNA, 25 bp, SARS Virus
atttaacggaagtagtaggaagagg

SEQ ID NO: 184271 - DNA, 25 bp, SARS Virus
tttaacggaaggtgtaggaagagga

SEQ ID NO: 184272 - DNA, 25 bp, SARS Virus
ttaacggaaggattaggaagaggac

SEQ ID NO: 184273 - DNA, 25 bp, SARS Virus
taacggaaggagtaggaagaggacc

SEQ ID NO: 184274 - DNA, 25 bp, SARS Virus
aacggaaggagttggaagaggacct

SEQ ID NO: 184275 - DNA, 25 bp, SARS Virus
acggaaggagtatgaagaggacctt

SEQ ID NO: 184276 - DNA, 25 bp, SARS Virus
cggaaggagtagtaagaggaccttc

SEQ ID NO: 184277 - DNA, 25 bp, SARS Virus
ggaaggagtaggtagaggaccttcg

SEQ ID NO: 184278 - DNA, 25 bp, SARS Virus
gaaggagtaggatgaggaccttcgc

SEQ ID NO: 184279 - DNA, 25 bp, SARS Virus
aaggagtaggaataggaccttcgct

SEQ ID NO: 184280 - DNA, 25 bp, SARS Virus
aggagtaggaagtggaccttcgctg

SEQ ID NO: 184281 - DNA, 25 bp, SARS Virus
ggagtaggaagatgaccttcgctgt

SEQ ID NO: 184282 - DNA, 25 bp, SARS Virus
gagtaggaagagtaccttcgctgtc

SEQ ID NO: 184283 - DNA, 25 bp, SARS Virus
agtaggaagaggtccttcgctgtcg

SEQ ID NO: 184284 - DNA, 25 bp, SARS Virus
gtaggaagaggatcttcgctgtcgt

SEQ ID NO: 184285 - DNA, 25 bp, SARS Virus
taggaagaggactttcgctgtcgtt

SEQ ID NO: 184286 - DNA, 25 bp, SARS Virus
aggaagaggaccttcgctgtcgtta

SEQ ID NO: 184287 - DNA, 25 bp, SARS Virus
ggaagaggaccttcgctgtcgttaa

SEQ ID NO: 184288 - DNA, 25 bp, SARS Virus
gaagaggacctttgctgtcgttaat

SEQ ID NO: 184289 - DNA, 25 bp, SARS Virus
aagaggaccttctctgtcgttaatc

SEQ ID NO: 184290 - DNA, 25 bp, SARS Virus
agaggaccttcgttgtcgttaatca

SEQ ID NO: 184291 - DNA, 25 bp, SARS Virus
gaggaccttcgctgtcgttaatcaa

SEQ ID NO: 184292 - DNA, 25 bp, SARS Virus
aggaccttcgctttcgttaatcaaa

SEQ ID NO: 184293 - DNA, 25 bp, SARS Virus
ggaccttcgctgtcgttaatcaaaa

SEQ ID NO: 184294 - DNA, 25 bp, SARS Virus
gaccttcgctgttgttaatcaaaaa

SEQ ID NO: 184295 - DNA, 25 bp, SARS Virus
accttcgctgtctttaatcaaaaat

SEQ ID NO: 184296 - DNA, 25 bp, SARS Virus
ccttcgctgtcgttaatcaaaaatc

SEQ ID NO: 184297 - DNA, 25 bp, SARS Virus
cttcgctgtcgttaatcaaaaatcc

SEQ ID NO: 184298 - DNA, 25 bp, SARS Virus
ttcgctgtcgtttatcaaaaatcct

SEQ ID NO: 184299 - DNA, 25 bp, SARS Virus
tcgctgtcgttattcaaaaatcctt

SEQ ID NO: 184300 - DNA, 25 bp, SARS Virus
cgctgtcgttaatcaaaaatccttg

SEQ ID NO: 184301 - DNA, 25 bp, SARS Virus
gctgtcgttaattaaaaatccttga

SEQ ID NO: 184302 - DNA, 25 bp, SARS Virus
ctgtcgttaatctaaaatccttgaa

SEQ ID NO: 184303 - DNA, 25 bp, SARS Virus
tgtcgttaatcataaatccttgaaa

SEQ ID NO: 184304 - DNA, 25 bp, SARS Virus
gtcgttaatcaataatccttgaaac

SEQ ID NO: 184305 - DNA, 25 bp, SARS Virus
tcgttaatcaaatatccttgaaacg

SEQ ID NO: 184306 - DNA, 25 bp, SARS Virus
cgttaatcaaaattccttgaaacgt

SEQ ID NO: 184307 - DNA, 25 bp, SARS Virus
gttaatcaaaaatccttgaaacgtt

SEQ ID NO: 184308 - DNA, 25 bp, SARS Virus
ttaatcaaaaattcttgaaacgttt

SEQ ID NO: 184309 - DNA, 25 bp, SARS Virus
taatcaaaaatctttgaaacgtttt

SEQ ID NO: 184310 - DNA, 25 bp, SARS Virus
aatcaaaaatccttgaaacgttttg

SEQ ID NO: 184311 - DNA, 25 bp, SARS Virus
atcaaaaatccttgaaacgttttgg

SEQ ID NO: 184312 - DNA, 25 bp, SARS Virus
tcaaaaatcctttaaacgttttggt

SEQ ID NO: 184313 - DNA, 25 bp, SARS Virus
caaaaatccttgtaacgttttggtc

SEQ ID NO: 184314 - DNA, 25 bp, SARS Virus
aaaaatccttgatacgttttggtcg

SEQ ID NO: 184315 - DNA, 25 bp, SARS Virus
aaaatccttgaatcgttttggtcgt

SEQ ID NO: 184316 - DNA, 25 bp, SARS Virus
aaatccttgaaatgttttggtcgtt

SEQ ID NO: 184317 - DNA, 25 bp, SARS Virus
aatccttgaaactttttggtcgttg

SEQ ID NO: 184318 - DNA, 25 bp, SARS Virus
atccttgaaacgttttggtcgttga

SEQ ID NO: 184319 - DNA, 25 bp, SARS Virus
tccttgaaacgttttggtcgttgaa

SEQ ID NO: 184320 - DNA, 25 bp, SARS Virus
ccttgaaacgttttggtcgttgaaa

SEQ ID NO: 184321 - DNA, 25 bp, SARS Virus
cttgaaacgttttggtcgttgaaaa

SEQ ID NO: 184322 - DNA, 25 bp, SARS Virus
ttgaaacgtttttgtcgttgaaaaa

SEQ ID NO: 184323 - DNA, 25 bp, SARS Virus
tgaaacgttttgttcgttgaaaaag

SEQ ID NO: 184324 - DNA, 25 bp, SARS Virus
gaaacgttttggtcgttgaaaaagc

SEQ ID NO: 184325 - DNA, 25 bp, SARS Virus
aaacgttttggttgttgaaaaagca

SEQ ID NO: 184326 - DNA, 25 bp, SARS Virus
aacgttttggtctttgaaaaagcaa

SEQ ID NO: 184327 - DNA, 25 bp, SARS Virus
acgttttggtcgttgaaaaagcaac

SEQ ID NO: 184328 - DNA, 25 bp, SARS Virus
cgttttggtcgttgaaaaagcaaca

SEQ ID NO: 184329 - DNA, 25 bp, SARS Virus
gttttggtcgtttaaaaagcaacat

SEQ ID NO: 184330 - DNA, 25 bp, SARS Virus
ttttggtcgttgtaaaagcaacatt

SEQ ID NO: 184331 - DNA, 25 bp, SARS Virus
tttggtcgttgataaagcaacattt

SEQ ID NO: 184332 - DNA, 25 bp, SARS Virus
ttggtcgttgaataagcaacattta

SEQ ID NO: 184333 - DNA, 25 bp, SARS Virus
tggtcgttgaaatagcaacatttat

SEQ ID NO: 184334 - DNA, 25 bp, SARS Virus
ggtcgttgaaaatgcaacatttata

SEQ ID NO: 184335 - DNA, 25 bp, SARS Virus
gtcgttgaaaaatcaacatttatag

SEQ ID NO: 184336 - DNA, 25 bp, SARS Virus
tcgttgaaaaagtaacatttatagt

SEQ ID NO: 184337 - DNA, 25 bp, SARS Virus
cgttgaaaaagctacatttatagtt

SEQ ID NO: 184338 - DNA, 25 bp, SARS Virus
gttgaaaaagcatcatttatagttt

SEQ ID NO: 184339 - DNA, 25 bp, SARS Virus
ttgaaaaagcaatatttatagtttt

SEQ ID NO: 184340 - DNA, 25 bp, SARS Virus
tgaaaaagcaacttttatagttttc

SEQ ID NO: 184341 - DNA, 25 bp, SARS Virus
gaaaaagcaacatttatagttttcg

SEQ ID NO: 184342 - DNA, 25 bp, SARS Virus
aaaaagcaacatttatagttttcgg

SEQ ID NO: 184343 - DNA, 25 bp, SARS Virus
aaaagcaacatttatagttttcggg

SEQ ID NO: 184344 - DNA, 25 bp, SARS Virus
aaagcaacatttttagttttcggga

SEQ ID NO: 184345 - DNA, 25 bp, SARS Virus
aagcaacatttatagttttcgggac

SEQ ID NO: 184346 - DNA, 25 bp, SARS Virus
agcaacatttattgttttcgggaca

SEQ ID NO: 184347 - DNA, 25 bp, SARS Virus
gcaacatttatatttttcgggacat

SEQ ID NO: 184348 - DNA, 25 bp, SARS Virus
caacatttatagttttcgggacatc

SEQ ID NO: 184349 - DNA, 25 bp, SARS Virus
aacatttatagttttcgggacatct

SEQ ID NO: 184350 - DNA, 25 bp, SARS Virus
acatttatagttttcgggacatctg

SEQ ID NO: 184351 - DNA, 25 bp, SARS Virus
catttatagttttcgggacatctgc

SEQ ID NO: 184352 - DNA, 25 bp, SARS Virus
atttatagtttttgggacatctgct

SEQ ID NO: 184353 - DNA, 25 bp, SARS Virus
tttatagttttctggacatctgctg

SEQ ID NO: 184354 - DNA, 25 bp, SARS Virus
ttatagttttcgtgacatctgctgt

SEQ ID NO: 184355 - DNA, 25 bp, SARS Virus
tatagttttcggtacatctgctgta

SEQ ID NO: 184356 - DNA, 25 bp, SARS Virus
atagttttcgggtcatctgctgtag

SEQ ID NO: 184357 - DNA, 25 bp, SARS Virus
tagttttcgggatatctgctgtagt

SEQ ID NO: 184358 - DNA, 25 bp, SARS Virus
agttttcgggacttctgctgtagtc

SEQ ID NO: 184359 - DNA, 25 bp, SARS Virus
gttttcgggacatctgctgtagtca

SEQ ID NO: 184360 - DNA, 25 bp, SARS Virus
ttttcgggacatttgctgtagtcat

SEQ ID NO: 184361 - DNA, 25 bp, SARS Virus
tttcgggacatctgctgtagtcatg

SEQ ID NO: 184362 - DNA, 25 bp, SARS Virus
ttcgggacatcttctgtagtcatga

SEQ ID NO: 184363 - DNA, 25 bp, SARS Virus
tcgggacatctgttgtagtcatgat

SEQ ID NO: 184364 - DNA, 25 bp, SARS Virus
cgggacatctgctgtagtcatgatc

SEQ ID NO: 184365 - DNA, 25 bp, SARS Virus
gggacatctgctttagtcatgatca

SEQ ID NO: 184366 - DNA, 25 bp, SARS Virus
ggacatctgctgtagtcatgatcac

SEQ ID NO: 184367 - DNA, 25 bp, SARS Virus
gacatctgctgttgtcatgatcacg

SEQ ID NO: 184368 - DNA, 25 bp, SARS Virus
acatctgctgtattcatgatcacgg

SEQ ID NO: 184369 - DNA, 25 bp, SARS Virus
catctgctgtagtcatgatcacgga

SEQ ID NO: 184370 - DNA, 25 bp, SARS Virus
atctgctgtagttatgatcacggac

SEQ ID NO: 184371 - DNA, 25 bp, SARS Virus
tctgctgtagtcttgatcacggaca

SEQ ID NO: 184372 - DNA, 25 bp, SARS Virus
ctgctgtagtcatgatcacggacac

SEQ ID NO: 184373 - DNA, 25 bp, SARS Virus
tgctgtagtcattatcacggacacg

SEQ ID NO: 184374 - DNA, 25 bp, SARS Virus
gctgtagtcatgttcacggacacgg

SEQ ID NO: 184375 - DNA, 25 bp, SARS Virus
ctgtagtcatgatcacggacacggc

SEQ ID NO: 184376 - DNA, 25 bp, SARS Virus
tgtagtcatgattacggacacggcg

SEQ ID NO: 184377 - DNA, 25 bp, SARS Virus
gtagtcatgatctcggacacggcgt

SEQ ID NO: 184378 - DNA, 25 bp, SARS Virus
tagtcatgatcatggacacggcgtg

SEQ ID NO: 184379 - DNA, 25 bp, SARS Virus
agtcatgatcactgacacggcgtgc

SEQ ID NO: 184380 - DNA, 25 bp, SARS Virus
gtcatgatcacgtacacggcgtgcc

SEQ ID NO: 184381 - DNA, 25 bp, SARS Virus
tcatgatcacggtcacggcgtgcca

SEQ ID NO: 184382 - DNA, 25 bp, SARS Virus
catgatcacggatacggcgtgccac

SEQ ID NO: 184383 - DNA, 25 bp, SARS Virus
atgatcacggactcggcgtgccaca

SEQ ID NO: 184384 - DNA, 25 bp, SARS Virus
tgatcacggacatggcgtgccacat

SEQ ID NO: 184385 - DNA, 25 bp, SARS Virus
gatcacggacactgcgtgccacatt

SEQ ID NO: 184386 - DNA, 25 bp, SARS Virus
atcacggacacgtcgtgccacattc

SEQ ID NO: 184387 - DNA, 25 bp, SARS Virus
tcacggacacggtgtgccacattct

SEQ ID NO: 184388 - DNA, 25 bp, SARS Virus
cacggacacggcttgccacattctg

SEQ ID NO: 184389 - DNA, 25 bp, SARS Virus
acggacacggcgtgccacattctgc

SEQ ID NO: 184390 - DNA, 25 bp, SARS Virus
cggacacggcgttccacattctgcc

SEQ ID NO: 184391 - DNA, 25 bp, SARS Virus
ggacacggcgtgtcacattctgccc

SEQ ID NO: 184392 - DNA, 25 bp, SARS Virus
gacacggcgtgctacattctgcccg

SEQ ID NO: 184393 - DNA, 25 bp, SARS Virus
acacggcgtgcctcattctgcccga

SEQ ID NO: 184394 - DNA, 25 bp, SARS Virus
cacggcgtgccatattctgcccgac

SEQ ID NO: 184395 - DNA, 25 bp, SARS Virus
acggcgtgccactttctgcccgacg

SEQ ID NO: 184396 - DNA, 25 bp, SARS Virus
cggcgtgccacattctgcccgacgt

SEQ ID NO: 184397 - DNA, 25 bp, SARS Virus
ggcgtgccacattctgcccgacgtg

SEQ ID NO: 184398 - DNA, 25 bp, SARS Virus
gcgtgccacattttgcccgacgtga

SEQ ID NO: 184399 - DNA, 25 bp, SARS Virus
cgtgccacattctgcccgacgtgaa

SEQ ID NO: 184400 - DNA, 25 bp, SARS Virus
gtgccacattcttcccgacgtgaat

SEQ ID NO: 184401 - DNA, 25 bp, SARS Virus
tgccacattctgtccgacgtgaatg

SEQ ID NO: 184402 - DNA, 25 bp, SARS Virus
gccacattctgctcgacgtgaatgt

SEQ ID NO: 184403 - DNA, 25 bp, SARS Virus
ccacattctgcctgacgtgaatgtg

SEQ ID NO: 184404 - DNA, 25 bp, SARS Virus
cacattctgccctacgtgaatgtgg

SEQ ID NO: 184405 - DNA, 25 bp, SARS Virus
acattctgcccgtcgtgaatgtggc

SEQ ID NO: 184406 - DNA, 25 bp, SARS Virus
cattctgcccgatgtgaatgtggcg

SEQ ID NO: 184407 - DNA, 25 bp, SARS Virus
attctgcccgacttgaatgtggcgt

SEQ ID NO: 184408 - DNA, 25 bp, SARS Virus
ttctgcccgacgtgaatgtggcgtt

SEQ ID NO: 184409 - DNA, 25 bp, SARS Virus
tctgcccgacgttaatgtggcgttt

SEQ ID NO: 184410 - DNA, 25 bp, SARS Virus
ctgcccgacgtgtatgtggcgtttg

SEQ ID NO: 184411 - DNA, 25 bp, SARS Virus
tgcccgacgtgattgtggcgtttgg

SEQ ID NO: 184412 - DNA, 25 bp, SARS Virus
gcccgacgtgaatgtggcgtttggg

SEQ ID NO: 184413 - DNA, 25 bp, SARS Virus
cccgacgtgaatttggcgtttgggc

SEQ ID NO: 184414 - DNA, 25 bp, SARS Virus
ccgacgtgaatgtggcgtttgggca

SEQ ID NO: 184415 - DNA, 25 bp, SARS Virus
cgacgtgaatgttgcgtttgggcaa

SEQ ID NO: 184416 - DNA, 25 bp, SARS Virus
gacgtgaatgtgtcgtttgggcaaa

SEQ ID NO: 184417 - DNA, 25 bp, SARS Virus
acgtgaatgtggtgtttgggcaaat

SEQ ID NO: 184418 - DNA, 25 bp, SARS Virus
cgtgaatgtggcttttgggcaaatt

SEQ ID NO: 184419 - DNA, 25 bp, SARS Virus
gtgaatgtggcgtttgggcaaattt

SEQ ID NO: 184420 - DNA, 25 bp, SARS Virus
tgaatgtggcgtttgggcaaatttt

SEQ ID NO: 184421 - DNA, 25 bp, SARS Virus
gaatgtggcgtttgggcaaattttt

SEQ ID NO: 184422 - DNA, 25 bp, SARS Virus
aatgtggcgttttggcaaatttttg

SEQ ID NO: 184423 - DNA, 25 bp, SARS Virus
atgtggcgtttgtgcaaatttttgc

SEQ ID NO: 184424 - DNA, 25 bp, SARS Virus
tgtggcgtttggtcaaatttttgca

SEQ ID NO: 184425 - DNA, 25 bp, SARS Virus
gtggcgtttgggtaaatttttgcaa

SEQ ID NO: 184426 - DNA, 25 bp, SARS Virus
tggcgtttgggctaatttttgcaac

SEQ ID NO: 184427 - DNA, 25 bp, SARS Virus
ggcgtttgggcatatttttgcaact

SEQ ID NO: 184428 - DNA, 25 bp, SARS Virus
gcgtttgggcaattttttgcaacta

SEQ ID NO: 184429 - DNA, 25 bp, SARS Virus
cgtttgggcaaatttttgcaactac

SEQ ID NO: 184430 - DNA, 25 bp, SARS Virus
gtttgggcaaatttttgcaactacg

SEQ ID NO: 184431 - DNA, 25 bp, SARS Virus
tttgggcaaatttttgcaactacgt

SEQ ID NO: 184432 - DNA, 25 bp, SARS Virus
ttgggcaaatttttgcaactacgta

SEQ ID NO: 184433 - DNA, 25 bp, SARS Virus
tgggcaaatttttgcaactacgtag

SEQ ID NO: 184434 - DNA, 25 bp, SARS Virus
gggcaaattttttcaactacgtagg

SEQ ID NO: 184435 - DNA, 25 bp, SARS Virus
ggcaaatttttgtaactacgtaggc

SEQ ID NO: 184436 - DNA, 25 bp, SARS Virus
gcaaatttttgctactacgtaggcg

SEQ ID NO: 184437 - DNA, 25 bp, SARS Virus
caaatttttgcatctacgtaggcgt

SEQ ID NO: 184438 - DNA, 25 bp, SARS Virus
aaatttttgcaattacgtaggcgtc

SEQ ID NO: 184439 - DNA, 25 bp, SARS Virus
aatttttgcaactacgtaggcgtct

SEQ ID NO: 184440 - DNA, 25 bp, SARS Virus
atttttgcaacttcgtaggcgtctg

SEQ ID NO: 184441 - DNA, 25 bp, SARS Virus
tttttgcaactatgtaggcgtctga

SEQ ID NO: 184442 - DNA, 25 bp, SARS Virus
ttttgcaactacttaggcgtctgac

SEQ ID NO: 184443 - DNA, 25 bp, SARS Virus
tttgcaactacgtaggcgtctgacg

SEQ ID NO: 184444 - DNA, 25 bp, SARS Virus
ttgcaactacgttggcgtctgacgt

SEQ ID NO: 184445 - DNA, 25 bp, SARS Virus
tgcaactacgtatgcgtctgacgta

SEQ ID NO: 184446 - DNA, 25 bp, SARS Virus
gcaactacgtagtcgtctgacgtag

SEQ ID NO: 184447 - DNA, 25 bp, SARS Virus
caactacgtaggtgtctgacgtagt

SEQ ID NO: 184448 - DNA, 25 bp, SARS Virus
aactacgtaggcttctgacgtagtt

SEQ ID NO: 184449 - DNA, 25 bp, SARS Virus
actacgtaggcgtctgacgtagttc

SEQ ID NO: 184450 - DNA, 25 bp, SARS Virus
ctacgtaggcgtttgacgtagttcc

SEQ ID NO: 184451 - DNA, 25 bp, SARS Virus
tacgtaggcgtctgacgtagttccc

SEQ ID NO: 184452 - DNA, 25 bp, SARS Virus
acgtaggcgtcttacgtagttccca

SEQ ID NO: 184453 - DNA, 25 bp, SARS Virus
cgtaggcgtctgtcgtagttcccaa

SEQ ID NO: 184454 - DNA, 25 bp, SARS Virus
gtaggcgtctgatgtagttcccaag

SEQ ID NO: 184455 - DNA, 25 bp, SARS Virus
taggcgtctgacttagttcccaagc

SEQ ID NO: 184456 - DNA, 25 bp, SARS Virus
aggcgtctgacgtagttcccaagcg

SEQ ID NO: 184457 - DNA, 25 bp, SARS Virus
ggcgtctgacgttgttcccaagcgc

SEQ ID NO: 184458 - DNA, 25 bp, SARS Virus
gcgtctgacgtatttcccaagcgcc

SEQ ID NO: 184459 - DNA, 25 bp, SARS Virus
cgtctgacgtagttcccaagcgcct

SEQ ID NO: 184460 - DNA, 25 bp, SARS Virus
gtctgacgtagttcccaagcgcctc

SEQ ID NO: 184461 - DNA, 25 bp, SARS Virus
tctgacgtagtttccaagcgcctca

SEQ ID NO: 184462 - DNA, 25 bp, SARS Virus
ctgacgtagttctcaagcgcctcaa

SEQ ID NO: 184463 - DNA, 25 bp, SARS Virus
tgacgtagttcctaagcgcctcaac

SEQ ID NO: 184464 - DNA, 25 bp, SARS Virus
gacgtagttccctagcgcctcaacc

SEQ ID NO: 184465 - DNA, 25 bp, SARS Virus
acgtagttcccatgcgcctcaacca

SEQ ID NO: 184466 - DNA, 25 bp, SARS Virus
cgtagttcccaatcgcctcaaccag

SEQ ID NO: 184467 - DNA, 25 bp, SARS Virus
gtagttcccaagtgcctcaaccagt

SEQ ID NO: 184468 - DNA, 25 bp, SARS Virus
tagttcccaagctcctcaaccagtg

SEQ ID NO: 184469 - DNA, 25 bp, SARS Virus
agttcccaagcgtctcaaccagtgt

SEQ ID NO: 184470 - DNA, 25 bp, SARS Virus
gttcccaagcgcttcaaccagtgtt

SEQ ID NO: 184471 - DNA, 25 bp, SARS Virus
ttcccaagcgcctcaaccagtgttg

SEQ ID NO: 184472 - DNA, 25 bp, SARS Virus
tcccaagcgccttaaccagtgttga

SEQ ID NO: 184473 - DNA, 25 bp, SARS Virus
cccaagcgcctctaccagtgttgat

SEQ ID NO: 184474 - DNA, 25 bp, SARS Virus
ccaagcgcctcatccagtgttgatg

SEQ ID NO: 184475 - DNA, 25 bp, SARS Virus
caagcgcctcaatcagtgttgatgt

SEQ ID NO: 184476 - DNA, 25 bp, SARS Virus
aagcgcctcaactagtgttgatgtc

SEQ ID NO: 184477 - DNA, 25 bp, SARS Virus
agcgcctcaacctgtgttgatgtcg

SEQ ID NO: 184478 - DNA, 25 bp, SARS Virus
gcgcctcaaccattgttgatgtcgg

SEQ ID NO: 184479 - DNA, 25 bp, SARS Virus
cgcctcaaccagtgttgatgtcggt

SEQ ID NO: 184480 - DNA, 25 bp, SARS Virus
gcctcaaccagttttgatgtcggta

SEQ ID NO: 184481 - DNA, 25 bp, SARS Virus
cctcaaccagtgttgatgtcggtat

SEQ ID NO: 184482 - DNA, 25 bp, SARS Virus
ctcaaccagtgttgatgtcggtatt

SEQ ID NO: 184483 - DNA, 25 bp, SARS Virus
tcaaccagtgtttatgtcggtattg

SEQ ID NO: 184484 - DNA, 25 bp, SARS Virus
caaccagtgttgttgtcggtattgg

SEQ ID NO: 184485 - DNA, 25 bp, SARS Virus
aaccagtgttgatgtcggtattgga

SEQ ID NO: 184486 - DNA, 25 bp, SARS Virus
accagtgttgatttcggtattggaa

SEQ ID NO: 184487 - DNA, 25 bp, SARS Virus
ccagtgttgatgtcggtattggaaa

SEQ ID NO: 184488 - DNA, 25 bp, SARS Virus
cagtgttgatgttggtattggaaag

SEQ ID NO: 184489 - DNA, 25 bp, SARS Virus
agtgttgatgtctgtattggaaagg

SEQ ID NO: 184490 - DNA, 25 bp, SARS Virus
gtgttgatgtcgttattggaaaggt

SEQ ID NO: 184491 - DNA, 25 bp, SARS Virus
tgttgatgtcggtattggaaaggtg

SEQ ID NO: 184492 - DNA, 25 bp, SARS Virus
gttgatgtcggttttggaaaggtgt

SEQ ID NO: 184493 - DNA, 25 bp, SARS Virus
ttgatgtcggtattggaaaggtgta

SEQ ID NO: 184494 - DNA, 25 bp, SARS Virus
tgatgtcggtattggaaaggtgtaa

SEQ ID NO: 184495 - DNA, 25 bp, SARS Virus
gatgtcggtatttgaaaggtgtaag

SEQ ID NO: 184496 - DNA, 25 bp, SARS Virus
atgtcggtattgtaaaggtgtaagg

SEQ ID NO: 184497 - DNA, 25 bp, SARS Virus
tgtcggtattggaaaggtgtaaggc

SEQ ID NO: 184498 - DNA, 25 bp, SARS Virus
gtcggtattggaaaggtgtaaggcg

SEQ ID NO: 184499 - DNA, 25 bp, SARS Virus
tcggtattggaaaggtgtaaggcgt

SEQ ID NO: 184500 - DNA, 25 bp, SARS Virus
cggtattggaaaagtgtaaggcgtc

SEQ ID NO: 184501 - DNA, 25 bp, SARS Virus
ggtattggaaagatgtaaggcgtct

SEQ ID NO: 184502 - DNA, 25 bp, SARS Virus
gtattggaaaggagtaaggcgtctg

SEQ ID NO: 184503 - DNA, 25 bp, SARS Virus
tattggaaaggtataaggcgtctgc

SEQ ID NO: 184504 - DNA, 25 bp, SARS Virus
attggaaaggtgaaaggcgtctgcc

SEQ ID NO: 184505 - DNA, 25 bp, SARS Virus
ttggaaaggtgtaaggcgtctgcca

SEQ ID NO: 184506 - DNA, 25 bp, SARS Virus
tggaaaggtgtaaggcgtctgccat

SEQ ID NO: 184507 - DNA, 25 bp, SARS Virus
ggaaaggtgtaaagcgtctgccatg

SEQ ID NO: 184508 - DNA, 25 bp, SARS Virus
gaaaggtgtaagacgtctgccatgt

SEQ ID NO: 184509 - DNA, 25 bp, SARS Virus
aaaggtgtaaggagtctgccatgtc

SEQ ID NO: 184510 - DNA, 25 bp, SARS Virus
aaggtgtaaggcatctgccatgtct

SEQ ID NO: 184511 - DNA, 25 bp, SARS Virus
aggtgtaaggcgactgccatgtctg

SEQ ID NO: 184512 - DNA, 25 bp, SARS Virus
ggtgtaaggcgtatgccatgtctga

SEQ ID NO: 184513 - DNA, 25 bp, SARS Virus
gtgtaaggcgtcagccatgtctgac

SEQ ID NO: 184514 - DNA, 25 bp, SARS Virus
tgtaaggcgtctaccatgtctgaca

SEQ ID NO: 184515 - DNA, 25 bp, SARS Virus
gtaaggcgtctgacatgtctgacac

SEQ ID NO: 184516 - DNA, 25 bp, SARS Virus
taaggcgtctgcaatgtctgacaca

SEQ ID NO: 184517 - DNA, 25 bp, SARS Virus
aaggcgtctgccatgtctgacacaa

SEQ ID NO: 184518 - DNA, 25 bp, SARS Virus
aggcgtctgccaagtctgacacaaa

SEQ ID NO: 184519 - DNA, 25 bp, SARS Virus
ggcgtctgccatatctgacacaaag

SEQ ID NO: 184520 - DNA, 25 bp, SARS Virus
gcgtctgccatgactgacacaaaga

SEQ ID NO: 184521 - DNA, 25 bp, SARS Virus
cgtctgccatgtatgacacaaagat

SEQ ID NO: 184522 - DNA, 25 bp, SARS Virus
gtctgccatgtcagacacaaagatt

SEQ ID NO: 184523 - DNA, 25 bp, SARS Virus
tctgccatgtctaacacaaagattc

SEQ ID NO: 184524 - DNA, 25 bp, SARS Virus
ctgccatgtctgacacaaagattca

SEQ ID NO: 184525 - DNA, 25 bp, SARS Virus
tgccatgtctgaaacaaagattcac

SEQ ID NO: 184526 - DNA, 25 bp, SARS Virus
gccatgtctgacacaaagattcaca

SEQ ID NO: 184527 - DNA, 25 bp, SARS Virus
ccatgtctgacaaaaagattcacat

SEQ ID NO: 184528 - DNA, 25 bp, SARS Virus
catgtctgacacaaagattcacatt

SEQ ID NO: 184529 - DNA, 25 bp, SARS Virus
atgtctgacacaaagattcacattt

SEQ ID NO: 184530 - DNA, 25 bp, SARS Virus
tgtctgacacaaagattcacatttt

SEQ ID NO: 184531 - DNA, 25 bp, SARS Virus
gtctgacacaaaaattcacattttg

SEQ ID NO: 184532 - DNA, 25 bp, SARS Virus
tctgacacaaagattcacattttgg

SEQ ID NO: 184533 - DNA, 25 bp, SARS Virus
ctgacacaaagaatcacattttggg

SEQ ID NO: 184534 - DNA, 25 bp, SARS Virus
tgacacaaagatacacattttgggt

SEQ ID NO: 184535 - DNA, 25 bp, SARS Virus
gacacaaagattaacattttgggtg

SEQ ID NO: 184536 - DNA, 25 bp, SARS Virus
acacaaagattcacattttgggtga

SEQ ID NO: 184537 - DNA, 25 bp, SARS Virus
cacaaagattcaaattttgggtgac

SEQ ID NO: 184538 - DNA, 25 bp, SARS Virus
acaaagattcacattttgggtgacc

SEQ ID NO: 184539 - DNA, 25 bp, SARS Virus
caaagattcacaatttgggtgaccc

SEQ ID NO: 184540 - DNA, 25 bp, SARS Virus
aaagattcacatattgggtgaccca

SEQ ID NO: 184541 - DNA, 25 bp, SARS Virus
aagattcacattatgggtgacccag

SEQ ID NO: 184542 - DNA, 25 bp, SARS Virus
agattcacatttagggtgacccagt

SEQ ID NO: 184543 - DNA, 25 bp, SARS Virus
gattcacattttaggtgacccagta

SEQ ID NO: 184544 - DNA, 25 bp, SARS Virus
attcacattttgagtgacccagtaa

SEQ ID NO: 184545 - DNA, 25 bp, SARS Virus
ttcacattttggatgacccagtaat

SEQ ID NO: 184546 - DNA, 25 bp, SARS Virus
tcacattttgggagacccagtaatc

SEQ ID NO: 184547 - DNA, 25 bp, SARS Virus
cacattttgggtaacccagtaatcg

SEQ ID NO: 184548 - DNA, 25 bp, SARS Virus
acattttgggtgacccagtaatcgt

SEQ ID NO: 184549 - DNA, 25 bp, SARS Virus
cattttgggtgaaccagtaatcgtg

SEQ ID NO: 184550 - DNA, 25 bp, SARS Virus
attttgggtgacacagtaatcgtgt

SEQ ID NO: 184551 - DNA, 25 bp, SARS Virus
ttttgggtgaccaagtaatcgtgtt

SEQ ID NO: 184552 - DNA, 25 bp, SARS Virus
tttgggtgacccagtaatcgtgttc

SEQ ID NO: 184553 - DNA, 25 bp, SARS Virus
ttgggtgacccaataatcgtgttca

SEQ ID NO: 184554 - DNA, 25 bp, SARS Virus
tgggtgacccagaaatcgtgttcac

SEQ ID NO: 184555 - DNA, 25 bp, SARS Virus
gggtgacccagtaatcgtgttcacc

SEQ ID NO: 184556 - DNA, 25 bp, SARS Virus
ggtgacccagtaatcgtgttcacca

SEQ ID NO: 184557 - DNA, 25 bp, SARS Virus
gtgacccagtaaacgtgttcaccat

SEQ ID NO: 184558 - DNA, 25 bp, SARS Virus
tgacccagtaatagtgttcaccatc

SEQ ID NO: 184559 - DNA, 25 bp, SARS Virus
gacccagtaatcatgttcaccatcc

SEQ ID NO: 184560 - DNA, 25 bp, SARS Virus
acccagtaatcgagttcaccatcca

SEQ ID NO: 184561 - DNA, 25 bp, SARS Virus
cccagtaatcgtattcaccatccat

SEQ ID NO: 184562 - DNA, 25 bp, SARS Virus
ccagtaatcgtgatcaccatccata

SEQ ID NO: 184563 - DNA, 25 bp, SARS Virus
cagtaatcgtgtacaccatccataa

SEQ ID NO: 184564 - DNA, 25 bp, SARS Virus
agtaatcgtgttaaccatccataaa

SEQ ID NO: 184565 - DNA, 25 bp, SARS Virus
gtaatcgtgttcaccatccataaac

SEQ ID NO: 184566 - DNA, 25 bp, SARS Virus
taatcgtgttcaacatccataaacc

SEQ ID NO: 184567 - DNA, 25 bp, SARS Virus
aatcgtgttcacaatccataaacct

SEQ ID NO: 184568 - DNA, 25 bp, SARS Virus
atcgtgttcaccatccataaacctg

SEQ ID NO: 184569 - DNA, 25 bp, SARS Virus
tcgtgttcaccaaccataaacctgc

SEQ ID NO: 184570 - DNA, 25 bp, SARS Virus
cgtgttcaccatacataaacctgca

SEQ ID NO: 184571 - DNA, 25 bp, SARS Virus
gtgttcaccatcaataaacctgcat

SEQ ID NO: 184572 - DNA, 25 bp, SARS Virus
tgttcaccatccataaacctgcatg

SEQ ID NO: 184573 - DNA, 25 bp, SARS Virus
gttcaccatccaaaaacctgcatga

SEQ ID NO: 184574 - DNA, 25 bp, SARS Virus
ttcaccatccataaacctgcatgaa

SEQ ID NO: 184575 - DNA, 25 bp, SARS Virus
tcaccatccataaacctgcatgaat

SEQ ID NO: 184576 - DNA, 25 bp, SARS Virus
caccatccataaacctgcatgaatg

SEQ ID NO: 184577 - DNA, 25 bp, SARS Virus
accatccataaaactgcatgaatgg

SEQ ID NO: 184578 - DNA, 25 bp, SARS Virus
ccatccataaacatgcatgaatgga

SEQ ID NO: 184579 - DNA, 25 bp, SARS Virus
catccataaaccagcatgaatggaa

SEQ ID NO: 184580 - DNA, 25 bp, SARS Virus
atccataaacctacatgaatggaaa

SEQ ID NO: 184581 - DNA, 25 bp, SARS Virus
tccataaacctgaatgaatggaaag

SEQ ID NO: 184582 - DNA, 25 bp, SARS Virus
ccataaacctgcatgaatggaaagt

SEQ ID NO: 184583 - DNA, 25 bp, SARS Virus
cataaacctgcaagaatggaaagtt

SEQ ID NO: 184584 - DNA, 25 bp, SARS Virus
ataaacctgcataaatggaaagttc

SEQ ID NO: 184585 - DNA, 25 bp, SARS Virus
taaacctgcatgaatggaaagttca

SEQ ID NO: 184586 - DNA, 25 bp, SARS Virus
aaacctgcatgaatggaaagttcag

SEQ ID NO: 184587 - DNA, 25 bp, SARS Virus
aacctgcatgaaaggaaagttcagt

SEQ ID NO: 184588 - DNA, 25 bp, SARS Virus
acctgcatgaatagaaagttcagtg

SEQ ID NO: 184589 - DNA, 25 bp, SARS Virus
cctgcatgaatgaaaagttcagtgt

SEQ ID NO: 184590 - DNA, 25 bp, SARS Virus
ctgcatgaatggaaagttcagtgtc

SEQ ID NO: 184591 - DNA, 25 bp, SARS Virus
tgcatgaatggaaagttcagtgtct

SEQ ID NO: 184592 - DNA, 25 bp, SARS Virus
gcatgaatggaaagttcagtgtctt

SEQ ID NO: 184593 - DNA, 25 bp, SARS Virus
catgaatggaaaattcagtgtctta

SEQ ID NO: 184594 - DNA, 25 bp, SARS Virus
atgaatggaaagatcagtgtcttag

SEQ ID NO: 184595 - DNA, 25 bp, SARS Virus
tgaatggaaagtacagtgtcttagg

SEQ ID NO: 184596 - DNA, 25 bp, SARS Virus
gaatggaaagttaagtgtcttagga

SEQ ID NO: 184597 - DNA, 25 bp, SARS Virus
aatggaaagttcagtgtcttaggaa

SEQ ID NO: 184598 - DNA, 25 bp, SARS Virus
atggaaagttcaatgtcttaggaaa

SEQ ID NO: 184599 - DNA, 25 bp, SARS Virus
tggaaagttcagagtcttaggaaat

SEQ ID NO: 184600 - DNA, 25 bp, SARS Virus
ggaaagttcagtatcttaggaaatc

SEQ ID NO: 184601 - DNA, 25 bp, SARS Virus
gaaagttcagtgacttaggaaatcc

SEQ ID NO: 184602 - DNA, 25 bp, SARS Virus
aaagttcagtgtattaggaaatcct

SEQ ID NO: 184603 - DNA, 25 bp, SARS Virus
aagttcagtgtcataggaaatccta

SEQ ID NO: 184604 - DNA, 25 bp, SARS Virus
agttcagtgtctaaggaaatcctaa

SEQ ID NO: 184605 - DNA, 25 bp, SARS Virus
gttcagtgtcttaggaaatcctaaa

SEQ ID NO: 184606 - DNA, 25 bp, SARS Virus
ttcagtgtcttaagaaatcctaaac

SEQ ID NO: 184607 - DNA, 25 bp, SARS Virus
tcagtgtcttagaaaatcctaaacc

SEQ ID NO: 184608 - DNA, 25 bp, SARS Virus
cagtgtcttaggaaatcctaaacct

SEQ ID NO: 184609 - DNA, 25 bp, SARS Virus
agtgtcttaggaaatcctaaaccta

SEQ ID NO: 184610 - DNA, 25 bp, SARS Virus
gtgtcttaggaaatcctaaacctac

SEQ ID NO: 184611 - DNA, 25 bp, SARS Virus
tgtcttaggaaaacctaaacctacc

SEQ ID NO: 184612 - DNA, 25 bp, SARS Virus
gtcttaggaaatactaaacctacca

SEQ ID NO: 184613 - DNA, 25 bp, SARS Virus
tcttaggaaatcataaacctaccag

SEQ ID NO: 184614 - DNA, 25 bp, SARS Virus
cttaggaaatccaaaacctaccagt

SEQ ID NO: 184615 - DNA, 25 bp, SARS Virus
ttaggaaatcctaaacctaccagtt

SEQ ID NO: 184616 - DNA, 25 bp, SARS Virus
taggaaatcctaaacctaccagtta

SEQ ID NO: 184617 - DNA, 25 bp, SARS Virus
aggaaatcctaaacctaccagttac

SEQ ID NO: 184618 - DNA, 25 bp, SARS Virus
ggaaatcctaaaactaccagttaca

SEQ ID NO: 184619 - DNA, 25 bp, SARS Virus
gaaatcctaaacataccagttacac

SEQ ID NO: 184620 - DNA, 25 bp, SARS Virus
aaatcctaaaccaaccagttacacc

SEQ ID NO: 184621 - DNA, 25 bp, SARS Virus
aatcctaaacctaccagttacaccg

SEQ ID NO: 184622 - DNA, 25 bp, SARS Virus
atcctaaacctaacagttacaccgt

SEQ ID NO: 184623 - DNA, 25 bp, SARS Virus
tcctaaacctacaagttacaccgta

SEQ ID NO: 184624 - DNA, 25 bp, SARS Virus
cctaaacctaccagttacaccgtag

SEQ ID NO: 184625 - DNA, 25 bp, SARS Virus
ctaaacctaccaattacaccgtaga

SEQ ID NO: 184626 - DNA, 25 bp, SARS Virus
taaacctaccagatacaccgtagat

SEQ ID NO: 184627 - DNA, 25 bp, SARS Virus
aaacctaccagtaacaccgtagatg

SEQ ID NO: 184628 - DNA, 25 bp, SARS Virus
aacctaccagttacaccgtagatgt

SEQ ID NO: 184629 - DNA, 25 bp, SARS Virus
acctaccagttaaaccgtagatgtt

SEQ ID NO: 184630 - DNA, 25 bp, SARS Virus
cctaccagttacaccgtagatgtta

SEQ ID NO: 184631 - DNA, 25 bp, SARS Virus
ctaccagttacaacgtagatgttat

SEQ ID NO: 184632 - DNA, 25 bp, SARS Virus
taccagttacacagtagatgttatg

SEQ ID NO: 184633 - DNA, 25 bp, SARS Virus
accagttacaccatagatgttatgt

SEQ ID NO: 184634 - DNA, 25 bp, SARS Virus
ccagttacaccgaagatgttatgtc

SEQ ID NO: 184635 - DNA, 25 bp, SARS Virus
cagttacaccgtagatgttatgtct

SEQ ID NO: 184636 - DNA, 25 bp, SARS Virus
agttacaccgtaaatgttatgtctg

SEQ ID NO: 184637 - DNA, 25 bp, SARS Virus
gttacaccgtagatgttatgtctgt

SEQ ID NO: 184638 - DNA, 25 bp, SARS Virus
ttacaccgtagaagttatgtctgtt

SEQ ID NO: 184639 - DNA, 25 bp, SARS Virus
tacaccgtagatattatgtctgttg

SEQ ID NO: 184640 - DNA, 25 bp, SARS Virus
acaccgtagatgatatgtctgttgt

SEQ ID NO: 184641 - DNA, 25 bp, SARS Virus
caccgtagatgtaatgtctgttgta

SEQ ID NO: 184642 - DNA, 25 bp, SARS Virus
accgtagatgttatgtctgttgtac

SEQ ID NO: 184643 - DNA, 25 bp, SARS Virus
ccgtagatgttaagtctgttgtact

SEQ ID NO: 184644 - DNA, 25 bp, SARS Virus
cgtagatgttatatctgttgtactt

SEQ ID NO: 184645 - DNA, 25 bp, SARS Virus
gtagatgttatgactgttgtacttc

SEQ ID NO: 184646 - DNA, 25 bp, SARS Virus
tagatgttatgtatgttgtacttcg

SEQ ID NO: 184647 - DNA, 25 bp, SARS Virus
agatgttatgtcagttgtacttcgt

SEQ ID NO: 184648 - DNA, 25 bp, SARS Virus
gatgttatgtctattgtacttcgtg

SEQ ID NO: 184649 - DNA, 25 bp, SARS Virus
atgttatgtctgatgtacttcgtgg

SEQ ID NO: 184650 - DNA, 25 bp, SARS Virus
tgttatgtctgtagtacttcgtggt

SEQ ID NO: 184651 - DNA, 25 bp, SARS Virus
gttatgtctgttatacttcgtggtg

SEQ ID NO: 184652 - DNA, 25 bp, SARS Virus
ttatgtctgttgaacttcgtggtgg

SEQ ID NO: 184653 - DNA, 25 bp, SARS Virus
tatgtctgttgtacttcgtggtggt

SEQ ID NO: 184654 - DNA, 25 bp, SARS Virus
atgtctgttgtaattcgtggtggtt

SEQ ID NO: 184655 - DNA, 25 bp, SARS Virus
tgtctgttgtacatcgtggtggttt

SEQ ID NO: 184656 - DNA, 25 bp, SARS Virus
gtctgttgtactacgtggtggtttc

SEQ ID NO: 184657 - DNA, 25 bp, SARS Virus
tctgttgtacttagtggtggtttcc

SEQ ID NO: 184658 - DNA, 25 bp, SARS Virus
ctgttgtacttcatggtggtttcct

SEQ ID NO: 184659 - DNA, 25 bp, SARS Virus
tgttgtacttcgaggtggtttcctg

SEQ ID NO: 184660 - DNA, 25 bp, SARS Virus
gttgtacttcgtagtggtttcctga

SEQ ID NO: 184661 - DNA, 25 bp, SARS Virus
ttgtacttcgtgatggtttcctgag

SEQ ID NO: 184662 - DNA, 25 bp, SARS Virus
tgtacttcgtggaggtttcctgaga

SEQ ID NO: 184663 - DNA, 25 bp, SARS Virus
gtacttcgtggtagtttcctgagaa

SEQ ID NO: 184664 - DNA, 25 bp, SARS Virus
tacttcgtggtgatttcctgagaac

SEQ ID NO: 184665 - DNA, 25 bp, SARS Virus
acttcgtggtggattcctgagaacc

SEQ ID NO: 184666 - DNA, 25 bp, SARS Virus
cttcgtggtggtatcctgagaacca

SEQ ID NO: 184667 - DNA, 25 bp, SARS Virus
ttcgtggtggttacctgagaaccag

SEQ ID NO: 184668 - DNA, 25 bp, SARS Virus
tcgtggtggtttactgagaaccagg

SEQ ID NO: 184669 - DNA, 25 bp, SARS Virus
cgtggtggtttcatgagaaccaggt

SEQ ID NO: 184670 - DNA, 25 bp, SARS Virus
gtggtggtttccagagaaccaggta

SEQ ID NO: 184671 - DNA, 25 bp, SARS Virus
tggtggtttcctaagaaccaggtac

SEQ ID NO: 184672 - DNA, 25 bp, SARS Virus
ggtggtttcctgagaaccaggtaca

SEQ ID NO: 184673 - DNA, 25 bp, SARS Virus
gtggtttcctgaaaaccaggtacaa

SEQ ID NO: 184674 - DNA, 25 bp, SARS Virus
tggtttcctgagaaccaggtacaat

SEQ ID NO: 184675 - DNA, 25 bp, SARS Virus
ggtttcctgagaaccaggtacaatc

SEQ ID NO: 184676 - DNA, 25 bp, SARS Virus
gtttcctgagaaacaggtacaatcg

SEQ ID NO: 184677 - DNA, 25 bp, SARS Virus
tttcctgagaacaaggtacaatcga

SEQ ID NO: 184678 - DNA, 25 bp, SARS Virus
ttcctgagaaccaggtacaatcgaa

SEQ ID NO: 184679 - DNA, 25 bp, SARS Virus
tcctgagaaccaagtacaatcgaag

SEQ ID NO: 184680 - DNA, 25 bp, SARS Virus
cctgagaaccagatacaatcgaaga

SEQ ID NO: 184681 - DNA, 25 bp, SARS Virus
ctgagaaccaggaacaatcgaagac

SEQ ID NO: 184682 - DNA, 25 bp, SARS Virus
tgagaaccaggtacaatcgaagacc

SEQ ID NO: 184683 - DNA, 25 bp, SARS Virus
gagaaccaggtaaaatcgaagacca

SEQ ID NO: 184684 - DNA, 25 bp, SARS Virus
agaaccaggtacaatcgaagaccac

SEQ ID NO: 184685 - DNA, 25 bp, SARS Virus
gaaccaggtacaatcgaagaccaca

SEQ ID NO: 184686 - DNA, 25 bp, SARS Virus
aaccaggtacaaacgaagaccacaa

SEQ ID NO: 184687 - DNA, 25 bp, SARS Virus
accaggtacaatagaagaccacaat

SEQ ID NO: 184688 - DNA, 25 bp, SARS Virus
ccaggtacaatcaaagaccacaatg

SEQ ID NO: 184689 - DNA, 25 bp, SARS Virus
caggtacaatcgaagaccacaatgt

SEQ ID NO: 184690 - DNA, 25 bp, SARS Virus
aggtacaatcgaagaccacaatgtc

SEQ ID NO: 184691 - DNA, 25 bp, SARS Virus
ggtacaatcgaaaaccacaatgtca

SEQ ID NO: 184692 - DNA, 25 bp, SARS Virus
gtacaatcgaagaccacaatgtcat

SEQ ID NO: 184693 - DNA, 25 bp, SARS Virus
tacaatcgaagaacacaatgtcatt

SEQ ID NO: 184694 - DNA, 25 bp, SARS Virus
acaatcgaagacaacaatgtcatta

SEQ ID NO: 184695 - DNA, 25 bp, SARS Virus
caatcgaagaccacaatgtcattaa

SEQ ID NO: 184696 - DNA, 25 bp, SARS Virus
aatcgaagaccaaaatgtcattaac

SEQ ID NO: 184697 - DNA, 25 bp, SARS Virus
atcgaagaccacaatgtcattaacg

SEQ ID NO: 184698 - DNA, 25 bp, SARS Virus
tcgaagaccacaatgtcattaacgg

SEQ ID NO: 184699 - DNA, 25 bp, SARS Virus
cgaagaccacaaagtcattaacgga

SEQ ID NO: 184700 - DNA, 25 bp, SARS Virus
gaagaccacaatatcattaacggac

SEQ ID NO: 184701 - DNA, 25 bp, SARS Virus
aagaccacaatgacattaacggaca

SEQ ID NO: 184702 - DNA, 25 bp, SARS Virus
agaccacaatgtaattaacggacag

SEQ ID NO: 184703 - DNA, 25 bp, SARS Virus
gaccacaatgtcattaacggacagg

SEQ ID NO: 184704 - DNA, 25 bp, SARS Virus
accacaatgtcaataacggacagga

SEQ ID NO: 184705 - DNA, 25 bp, SARS Virus
ccacaatgtcataaacggacaggac

SEQ ID NO: 184706 - DNA, 25 bp, SARS Virus
cacaatgtcattaacggacaggaca

SEQ ID NO: 184707 - DNA, 25 bp, SARS Virus
acaatgtcattaacggacaggacat

SEQ ID NO: 184708 - DNA, 25 bp, SARS Virus
caatgtcattaaaggacaggacatg

SEQ ID NO: 184709 - DNA, 25 bp, SARS Virus
aatgtcattaacagacaggacatgg

SEQ ID NO: 184710 - DNA, 25 bp, SARS Virus
atgtcattaacgaacaggacatggt

SEQ ID NO: 184711 - DNA, 25 bp, SARS Virus
tgtcattaacggacaggacatggtc

SEQ ID NO: 184712 - DNA, 25 bp, SARS Virus
gtcattaacggaaaggacatggtca

SEQ ID NO: 184713 - DNA, 25 bp, SARS Virus
tcattaacggacaggacatggtcac

SEQ ID NO: 184714 - DNA, 25 bp, SARS Virus
cattaacggacaagacatggtcaca

SEQ ID NO: 184715 - DNA, 25 bp, SARS Virus
attaacggacagaacatggtcacac

SEQ ID NO: 184716 - DNA, 25 bp, SARS Virus
ttaacggacaggacatggtcacaca

SEQ ID NO: 184717 - DNA, 25 bp, SARS Virus
taacggacaggaaatggtcacacac

SEQ ID NO: 184718 - DNA, 25 bp, SARS Virus
aacggacaggacatggtcacacaca

SEQ ID NO: 184719 - DNA, 25 bp, SARS Virus
acggacaggacaaggtcacacacat

SEQ ID NO: 184720 - DNA, 25 bp, SARS Virus
cggacaggacatagtcacacacatg

SEQ ID NO: 184721 - DNA, 25 bp, SARS Virus
ggacaggacatgatcacacacatgt

SEQ ID NO: 184722 - DNA, 25 bp, SARS Virus
gacaggacatggacacacacatgtg

SEQ ID NO: 184723 - DNA, 25 bp, SARS Virus
acaggacatggtaacacacatgtgt

SEQ ID NO: 184724 - DNA, 25 bp, SARS Virus
caggacatggtcacacacatgtgtt

SEQ ID NO: 184725 - DNA, 25 bp, SARS Virus
aggacatggtcaaacacatgtgttg

SEQ ID NO: 184726 - DNA, 25 bp, SARS Virus
ggacatggtcacacacatgtgttgt

SEQ ID NO: 184727 - DNA, 25 bp, SARS Virus
gacatggtcacaaacatgtgttgta

SEQ ID NO: 184728 - DNA, 25 bp, SARS Virus
acatggtcacacacatgtgttgtag

SEQ ID NO: 184729 - DNA, 25 bp, SARS Virus
catggtcacacaaatgtgttgtaga

SEQ ID NO: 184730 - DNA, 25 bp, SARS Virus
atggtcacacacatgtgttgtagaa

SEQ ID NO: 184731 - DNA, 25 bp, SARS Virus
tggtcacacacaagtgttgtagaag

SEQ ID NO: 184732 - DNA, 25 bp, SARS Virus
ggtcacacacatatgttgtagaagt

SEQ ID NO: 184733 - DNA, 25 bp, SARS Virus
gtcacacacatgagttgtagaagtg

SEQ ID NO: 184734 - DNA, 25 bp, SARS Virus
tcacacacatgtattgtagaagtgt

SEQ ID NO: 184735 - DNA, 25 bp, SARS Virus
cacacacatgtgatgtagaagtgtg

SEQ ID NO: 184736 - DNA, 25 bp, SARS Virus
acacacatgtgtagtagaagtgtgt

SEQ ID NO: 184737 - DNA, 25 bp, SARS Virus
cacacatgtgttatagaagtgtgtc

SEQ ID NO: 184738 - DNA, 25 bp, SARS Virus
acacatgtgttgaagaagtgtgtca

SEQ ID NO: 184739 - DNA, 25 bp, SARS Virus
cacatgtgttgtagaagtgtgtcaa

SEQ ID NO: 184740 - DNA, 25 bp, SARS Virus
acatgtgttgtaaaagtgtgtcaac

SEQ ID NO: 184741 - DNA, 25 bp, SARS Virus
catgtgttgtagaagtgtgtcaacc

SEQ ID NO: 184742 - DNA, 25 bp, SARS Virus
atgtgttgtagaagtgtgtcaacca

SEQ ID NO: 184743 - DNA, 25 bp, SARS Virus
tgtgttgtagaaatgtgtcaaccac

SEQ ID NO: 184744 - DNA, 25 bp, SARS Virus
gtgttgtagaagagtgtcaaccact

SEQ ID NO: 184745 - DNA, 25 bp, SARS Virus
tgttgtagaagtatgtcaaccacta

SEQ ID NO: 184746 - DNA, 25 bp, SARS Virus
gttgtagaagtgagtcaaccactaa

SEQ ID NO: 184747 - DNA, 25 bp, SARS Virus
ttgtagaagtgtatcaaccactaac

SEQ ID NO: 184748 - DNA, 25 bp, SARS Virus
tgtagaagtgtgacaaccactaacc

SEQ ID NO: 184749 - DNA, 25 bp, SARS Virus
gtagaagtgtgtaaaccactaacca

SEQ ID NO: 184750 - DNA, 25 bp, SARS Virus
tagaagtgtgtcaaccactaaccaa

SEQ ID NO: 184751 - DNA, 25 bp, SARS Virus
agaagtgtgtcaaccactaaccaac

SEQ ID NO: 184752 - DNA, 25 bp, SARS Virus
gaagtgtgtcaaacactaaccaaca

SEQ ID NO: 184753 - DNA, 25 bp, SARS Virus
aagtgtgtcaacaactaaccaacag

SEQ ID NO: 184754 - DNA, 25 bp, SARS Virus
agtgtgtcaaccactaaccaacagg

SEQ ID NO: 184755 - DNA, 25 bp, SARS Virus
gtgtgtcaaccaataaccaacagga

SEQ ID NO: 184756 - DNA, 25 bp, SARS Virus
tgtgtcaaccacaaaccaacaggag

SEQ ID NO: 184757 - DNA, 25 bp, SARS Virus
gtgtcaaccactaaccaacaggagg

SEQ ID NO: 184758 - DNA, 25 bp, SARS Virus
tgtcaaccactaaccaacaggaggt

SEQ ID NO: 184759 - DNA, 25 bp, SARS Virus
gtcaaccactaaacaacaggaggtg

SEQ ID NO: 184760 - DNA, 25 bp, SARS Virus
tcaaccactaacaaacaggaggtga

SEQ ID NO: 184761 - DNA, 25 bp, SARS Virus
caaccactaaccaacaggaggtgaa

SEQ ID NO: 184762 - DNA, 25 bp, SARS Virus
aaccactaaccaacaggaggtgaac

SEQ ID NO: 184763 - DNA, 25 bp, SARS Virus
accactaaccaaaaggaggtgaacg

SEQ ID NO: 184764 - DNA, 25 bp, SARS Virus
ccactaaccaacaggaggtgaacga

SEQ ID NO: 184765 - DNA, 25 bp, SARS Virus
cactaaccaacaagaggtgaacgat

SEQ ID NO: 184766 - DNA, 25 bp, SARS Virus
actaaccaacagaaggtgaacgatc

SEQ ID NO: 184767 - DNA, 25 bp, SARS Virus
ctaaccaacaggaggtgaacgatcc

SEQ ID NO: 184768 - DNA, 25 bp, SARS Virus
taaccaacaggaagtgaacgatcca

SEQ ID NO: 184769 - DNA, 25 bp, SARS Virus
aaccaacaggagatgaacgatccat

SEQ ID NO: 184770 - DNA, 25 bp, SARS Virus
accaacaggaggagaacgatccatt

SEQ ID NO: 184771 - DNA, 25 bp, SARS Virus
ccaacaggaggtaaacgatccatta

SEQ ID NO: 184772 - DNA, 25 bp, SARS Virus
caacaggaggtgaacgatccattag

SEQ ID NO: 184773 - DNA, 25 bp, SARS Virus
aacaggaggtgaacgatccattagg

SEQ ID NO: 184774 - DNA, 25 bp, SARS Virus
acaggaggtgaaagatccattagga

SEQ ID NO: 184775 - DNA, 25 bp, SARS Virus
caggaggtgaacaatccattaggaa

SEQ ID NO: 184776 - DNA, 25 bp, SARS Virus
aggaggtgaacgatccattaggaat

SEQ ID NO: 184777 - DNA, 25 bp, SARS Virus
ggaggtgaacgaaccattaggaata

SEQ ID NO: 184778 - DNA, 25 bp, SARS Virus
gaggtgaacgatacattaggaatat

SEQ ID NO: 184779 - DNA, 25 bp, SARS Virus
aggtgaacgatcaattaggaatata

SEQ ID NO: 184780 - DNA, 25 bp, SARS Virus
ggtgaacgatccattaggaatatac

SEQ ID NO: 184781 - DNA, 25 bp, SARS Virus
gtgaacgatccaataggaatatacg

SEQ ID NO: 184782 - DNA, 25 bp, SARS Virus
tgaacgatccataaggaatatacga

SEQ ID NO: 184783 - DNA, 25 bp, SARS Virus
gaacgatccattaggaatatacgaa

SEQ ID NO: 184784 - DNA, 25 bp, SARS Virus
aacgatccattaagaatatacgaaa

SEQ ID NO: 184785 - DNA, 25 bp, SARS Virus
acgatccattagaaatatacgaaat

SEQ ID NO: 184786 - DNA, 25 bp, SARS Virus
cgatccattaggaatatacgaaatc

SEQ ID NO: 184787 - DNA, 25 bp, SARS Virus
gatccattaggaatatacgaaatcg

SEQ ID NO: 184788 - DNA, 25 bp, SARS Virus
atccattaggaaaatacgaaatcgt

SEQ ID NO: 184789 - DNA, 25 bp, SARS Virus
tccattaggaatatacgaaatcgtc

SEQ ID NO: 184790 - DNA, 25 bp, SARS Virus
ccattaggaataaacgaaatcgtcc

SEQ ID NO: 184791 - DNA, 25 bp, SARS Virus
cattaggaatatacgaaatcgtccc

SEQ ID NO: 184792 - DNA, 25 bp, SARS Virus
attaggaatataagaaatcgtccca

SEQ ID NO: 184793 - DNA, 25 bp, SARS Virus
ttaggaatatacaaaatcgtcccag

SEQ ID NO: 184794 - DNA, 25 bp, SARS Virus
taggaatatacgaaatcgtcccaga

SEQ ID NO: 184795 - DNA, 25 bp, SARS Virus
aggaatatacgaaatcgtcccagat

SEQ ID NO: 184796 - DNA, 25 bp, SARS Virus
ggaatatacgaaatcgtcccagatg

SEQ ID NO: 184797 - DNA, 25 bp, SARS Virus
gaatatacgaaaacgtcccagatga

SEQ ID NO: 184798 - DNA, 25 bp, SARS Virus
aatatacgaaatagtcccagatgac

SEQ ID NO: 184799 - DNA, 25 bp, SARS Virus
atatacgaaatcatcccagatgacg

SEQ ID NO: 184800 - DNA, 25 bp, SARS Virus
tatacgaaatcgacccagatgacgt

SEQ ID NO: 184801 - DNA, 25 bp, SARS Virus
atacgaaatcgtaccagatgacgtt

SEQ ID NO: 184802 - DNA, 25 bp, SARS Virus
tacgaaatcgtcacagatgacgttt

SEQ ID NO: 184803 - DNA, 25 bp, SARS Virus
acgaaatcgtccaagatgacgtttt

SEQ ID NO: 184804 - DNA, 25 bp, SARS Virus
cgaaatcgtcccagatgacgttttc

SEQ ID NO: 184805 - DNA, 25 bp, SARS Virus
gaaatcgtcccaaatgacgttttcg

SEQ ID NO: 184806 - DNA, 25 bp, SARS Virus
aaatcgtcccagatgacgttttcgt

SEQ ID NO: 184807 - DNA, 25 bp, SARS Virus
aatcgtcccagaagacgttttcgtg

SEQ ID NO: 184808 - DNA, 25 bp, SARS Virus
atcgtcccagataacgttttcgtgt

SEQ ID NO: 184809 - DNA, 25 bp, SARS Virus
tcgtcccagatgacgttttcgtgtc

SEQ ID NO: 184810 - DNA, 25 bp, SARS Virus
cgtcccagatgaagttttcgtgtct

SEQ ID NO: 184811 - DNA, 25 bp, SARS Virus
gtcccagatgacattttcgtgtctt

SEQ ID NO: 184812 - DNA, 25 bp, SARS Virus
tcccagatgacgatttcgtgtcttc

SEQ ID NO: 184813 - DNA, 25 bp, SARS Virus
cccagatgacgtattcgtgtcttcc

SEQ ID NO: 184814 - DNA, 25 bp, SARS Virus
ccagatgacgttatcgtgtcttcct

SEQ ID NO: 184815 - DNA, 25 bp, SARS Virus
cagatgacgtttacgtgtcttcctt

SEQ ID NO: 184816 - DNA, 25 bp, SARS Virus
agatgacgttttagtgtcttccttt

SEQ ID NO: 184817 - DNA, 25 bp, SARS Virus
gatgacgttttcatgtcttcctttc

SEQ ID NO: 184818 - DNA, 25 bp, SARS Virus
atgacgttttcgagtcttcctttcg

SEQ ID NO: 184819 - DNA, 25 bp, SARS Virus
tgacgttttcgtatcttcctttcgt

SEQ ID NO: 184820 - DNA, 25 bp, SARS Virus
gacgttttcgtgacttcctttcgtg

SEQ ID NO: 184821 - DNA, 25 bp, SARS Virus
acgttttcgtgtattcctttcgtgt

SEQ ID NO: 184822 - DNA, 25 bp, SARS Virus
cgttttcgtgtcatcctttcgtgtc

SEQ ID NO: 184823 - DNA, 25 bp, SARS Virus
gttttcgtgtctacctttcgtgtca

SEQ ID NO: 184824 - DNA, 25 bp, SARS Virus
ttttcgtgtcttactttcgtgtcaa

SEQ ID NO: 184825 - DNA, 25 bp, SARS Virus
tttcgtgtcttcatttcgtgtcaac

SEQ ID NO: 184826 - DNA, 25 bp, SARS Virus
ttcgtgtcttccattcgtgtcaact

SEQ ID NO: 184827 - DNA, 25 bp, SARS Virus
tcgtgtcttcctatcgtgtcaactt

SEQ ID NO: 184828 - DNA, 25 bp, SARS Virus
cgtgtcttccttacgtgtcaactta

SEQ ID NO: 184829 - DNA, 25 bp, SARS Virus
gtgtcttcctttagtgtcaacttaa

SEQ ID NO: 184830 - DNA, 25 bp, SARS Virus
tgtcttcctttcatgtcaacttaac

SEQ ID NO: 184831 - DNA, 25 bp, SARS Virus
gtcttcctttcgagtcaacttaacc

SEQ ID NO: 184832 - DNA, 25 bp, SARS Virus
tcttcctttcgtatcaacttaaccg

SEQ ID NO: 184833 - DNA, 25 bp, SARS Virus
cttcctttcgtgacaacttaaccgt

SEQ ID NO: 184834 - DNA, 25 bp, SARS Virus
ttcctttcgtgtaaacttaaccgtc

SEQ ID NO: 184835 - DNA, 25 bp, SARS Virus
tcctttcgtgtcaacttaaccgtcc

SEQ ID NO: 184836 - DNA, 25 bp, SARS Virus
cctttcgtgtcaacttaaccgtcca

SEQ ID NO: 184837 - DNA, 25 bp, SARS Virus
ctttcgtgtcaaattaaccgtccat

SEQ ID NO: 184838 - DNA, 25 bp, SARS Virus
tttcgtgtcaacataaccgtccatg

SEQ ID NO: 184839 - DNA, 25 bp, SARS Virus
ttcgtgtcaactaaaccgtccatga

SEQ ID NO: 184840 - DNA, 25 bp, SARS Virus
tcgtgtcaacttaaccgtccatgaa

SEQ ID NO: 184841 - DNA, 25 bp, SARS Virus
cgtgtcaacttaaccgtccatgaag

SEQ ID NO: 184842 - DNA, 25 bp, SARS Virus
gtgtcaacttaaacgtccatgaaga

SEQ ID NO: 184843 - DNA, 25 bp, SARS Virus
tgtcaacttaacagtccatgaagac

SEQ ID NO: 184844 - DNA, 25 bp, SARS Virus
gtcaacttaaccatccatgaagaca

SEQ ID NO: 184845 - DNA, 25 bp, SARS Virus
tcaacttaaccgaccatgaagacat

SEQ ID NO: 184846 - DNA, 25 bp, SARS Virus
caacttaaccgtacatgaagacatc

SEQ ID NO: 184847 - DNA, 25 bp, SARS Virus
aacttaaccgtcaatgaagacatcg

SEQ ID NO: 184848 - DNA, 25 bp, SARS Virus
acttaaccgtccatgaagacatcgt

SEQ ID NO: 184849 - DNA, 25 bp, SARS Virus
cttaaccgtccaagaagacatcgta

SEQ ID NO: 184850 - DNA, 25 bp, SARS Virus
ttaaccgtccataaagacatcgtaa

SEQ ID NO: 184851 - DNA, 25 bp, SARS Virus
taaccgtccatgaagacatcgtaaa

SEQ ID NO: 184852 - DNA, 25 bp, SARS Virus
aaccgtccatgaagacatcgtaaag

SEQ ID NO: 184853 - DNA, 25 bp, SARS Virus
accgtccatgaaaacatcgtaaagg

SEQ ID NO: 184854 - DNA, 25 bp, SARS Virus
ccgtccatgaagacatcgtaaaggt

SEQ ID NO: 184855 - DNA, 25 bp, SARS Virus
cgtccatgaagaaatcgtaaaggtc

SEQ ID NO: 184856 - DNA, 25 bp, SARS Virus
gtccatgaagacatcgtaaaggtcg

SEQ ID NO: 184857 - DNA, 25 bp, SARS Virus
tccatgaagacaacgtaaaggtcgg

SEQ ID NO: 184858 - DNA, 25 bp, SARS Virus
ccatgaagacatagtaaaggtcgga

SEQ ID NO: 184859 - DNA, 25 bp, SARS Virus
catgaagacatcataaaggtcggac

SEQ ID NO: 184860 - DNA, 25 bp, SARS Virus
atgaagacatcgaaaaggtcggact

SEQ ID NO: 184861 - DNA, 25 bp, SARS Virus
tgaagacatcgtaaaggtcggactt

SEQ ID NO: 184862 - DNA, 25 bp, SARS Virus
gaagacatcgtaaaggtcggacttc

SEQ ID NO: 184863 - DNA, 25 bp, SARS Virus
aagacatcgtaaaggtcggacttct

SEQ ID NO: 184864 - DNA, 25 bp, SARS Virus
agacatcgtaaaagtcggacttctg

SEQ ID NO: 184865 - DNA, 25 bp, SARS Virus
gacatcgtaaagatcggacttctgc

SEQ ID NO: 184866 - DNA, 25 bp, SARS Virus
acatcgtaaaggacggacttctgca

SEQ ID NO: 184867 - DNA, 25 bp, SARS Virus
catcgtaaaggtaggacttctgcat

SEQ ID NO: 184868 - DNA, 25 bp, SARS Virus
atcgtaaaggtcagacttctgcatg

SEQ ID NO: 184869 - DNA, 25 bp, SARS Virus
tcgtaaaggtcgaacttctgcatga

SEQ ID NO: 184870 - DNA, 25 bp, SARS Virus
cgtaaaggtcggacttctgcatgac

SEQ ID NO: 184871 - DNA, 25 bp, SARS Virus
gtaaaggtcggaattctgcatgaca

SEQ ID NO: 184872 - DNA, 25 bp, SARS Virus
taaaggtcggacatctgcatgacat

SEQ ID NO: 184873 - DNA, 25 bp, SARS Virus
aaaggtcggactactgcatgacatc

SEQ ID NO: 184874 - DNA, 25 bp, SARS Virus
aaggtcggacttatgcatgacatcg

SEQ ID NO: 184875 - DNA, 25 bp, SARS Virus
aggtcggacttcagcatgacatcgt

SEQ ID NO: 184876 - DNA, 25 bp, SARS Virus
ggtcggacttctacatgacatcgtc

SEQ ID NO: 184877 - DNA, 25 bp, SARS Virus
gtcggacttctgaatgacatcgtcg

SEQ ID NO: 184878 - DNA, 25 bp, SARS Virus
tcggacttctgcatgacatcgtcga

SEQ ID NO: 184879 - DNA, 25 bp, SARS Virus
cggacttctgcaagacatcgtcgat

SEQ ID NO: 184880 - DNA, 25 bp, SARS Virus
ggacttctgcataacatcgtcgatt

SEQ ID NO: 184881 - DNA, 25 bp, SARS Virus
gacttctgcatgacatcgtcgattt

SEQ ID NO: 184882 - DNA, 25 bp, SARS Virus
acttctgcatgaaatcgtcgatttg

SEQ ID NO: 184883 - DNA, 25 bp, SARS Virus
cttctgcatgacatcgtcgatttga

SEQ ID NO: 184884 - DNA, 25 bp, SARS Virus
ttctgcatgacaacgtcgatttgac

SEQ ID NO: 184885 - DNA, 25 bp, SARS Virus
tctgcatgacatagtcgatttgacg

SEQ ID NO: 184886 - DNA, 25 bp, SARS Virus
ctgcatgacatcatcgatttgacgg

SEQ ID NO: 184887 - DNA, 25 bp, SARS Virus
tgcatgacatcgacgatttgacggg

SEQ ID NO: 184888 - DNA, 25 bp, SARS Virus
gcatgacatcgtagatttgacgggt

SEQ ID NO: 184889 - DNA, 25 bp, SARS Virus
catgacatcgtcaatttgacgggtc

SEQ ID NO: 184890 - DNA, 25 bp, SARS Virus
atgacatcgtcgatttgacgggtcg

SEQ ID NO: 184891 - DNA, 25 bp, SARS Virus
tgacatcgtcgaattgacgggtcgt

SEQ ID NO: 184892 - DNA, 25 bp, SARS Virus
gacatcgtcgatatgacgggtcgtg

SEQ ID NO: 184893 - DNA, 25 bp, SARS Virus
acatcgtcgattagacgggtcgtgg

SEQ ID NO: 184894 - DNA, 25 bp, SARS Virus
catcgtcgatttaacgggtcgtggt

SEQ ID NO: 184895 - DNA, 25 bp, SARS Virus
atcgtcgatttgacgggtcgtggta

SEQ ID NO: 184896 - DNA, 25 bp, SARS Virus
tcgtcgatttgaagggtcgtggtat

SEQ ID NO: 184897 - DNA, 25 bp, SARS Virus
cgtcgatttgacaggtcgtggtatg

SEQ ID NO: 184898 - DNA, 25 bp, SARS Virus
gtcgatttgacgagtcgtggtatgg

SEQ ID NO: 184899 - DNA, 25 bp, SARS Virus
tcgatttgacggatcgtggtatgga

SEQ ID NO: 184900 - DNA, 25 bp, SARS Virus
cgatttgacgggacgtggtatggag

SEQ ID NO: 184901 - DNA, 25 bp, SARS Virus
gatttgacgggtagtggtatggaga

SEQ ID NO: 184902 - DNA, 25 bp, SARS Virus
atttgacgggtcatggtatggagat

SEQ ID NO: 184903 - DNA, 25 bp, SARS Virus
tttgacgggtcgaggtatggagata

SEQ ID NO: 184904 - DNA, 25 bp, SARS Virus
ttgacgggtcgtagtatggagataa

SEQ ID NO: 184905 - DNA, 25 bp, SARS Virus
tgacgggtcgtgatatggagataaa

SEQ ID NO: 184906 - DNA, 25 bp, SARS Virus
gacgggtcgtggaatggagataaat

SEQ ID NO: 184907 - DNA, 25 bp, SARS Virus
acgggtcgtggtatggagataaatc

SEQ ID NO: 184908 - DNA, 25 bp, SARS Virus
cgggtcgtggtaaggagataaatcc

SEQ ID NO: 184909 - DNA, 25 bp, SARS Virus
gggtcgtggtatagagataaatcca

SEQ ID NO: 184910 - DNA, 25 bp, SARS Virus
ggtcgtggtatgaagataaatccaa

SEQ ID NO: 184911 - DNA, 25 bp, SARS Virus
gtcgtggtatggagataaatccaac

SEQ ID NO: 184912 - DNA, 25 bp, SARS Virus
tcgtggtatggaaataaatccaaca

SEQ ID NO: 184913 - DNA, 25 bp, SARS Virus
cgtggtatggagataaatccaacaa

SEQ ID NO: 184914 - DNA, 25 bp, SARS Virus
gtggtatggagaaaaatccaacaaa

SEQ ID NO: 184915 - DNA, 25 bp, SARS Virus
tggtatggagataaatccaacaaat

SEQ ID NO: 184916 - DNA, 25 bp, SARS Virus
ggtatggagataaatccaacaaatt

SEQ ID NO: 184917 - DNA, 25 bp, SARS Virus
gtatggagataaatccaacaaattc

SEQ ID NO: 184918 - DNA, 25 bp, SARS Virus
tatggagataaaaccaacaaattcg

SEQ ID NO: 184919 - DNA, 25 bp, SARS Virus
atggagataaatacaacaaattcgg

SEQ ID NO: 184920 - DNA, 25 bp, SARS Virus
tggagataaatcaaacaaattcgga

SEQ ID NO: 184921 - DNA, 25 bp, SARS Virus
ggagataaatccaacaaattcggaa

SEQ ID NO: 184922 - DNA, 25 bp, SARS Virus
gagataaatccaacaaattcggaaa

SEQ ID NO: 184923 - DNA, 25 bp, SARS Virus
agataaatccaaaaaattcggaaac

SEQ ID NO: 184924 - DNA, 25 bp, SARS Virus
gataaatccaacaaattcggaaact

SEQ ID NO: 184925 - DNA, 25 bp, SARS Virus
ataaatccaacaaattcggaaacta

SEQ ID NO: 184926 - DNA, 25 bp, SARS Virus
taaatccaacaaattcggaaactac

SEQ ID NO: 184927 - DNA, 25 bp, SARS Virus
aaatccaacaaaatcggaaactact

SEQ ID NO: 184928 - DNA, 25 bp, SARS Virus
aatccaacaaatacggaaactactt

SEQ ID NO: 184929 - DNA, 25 bp, SARS Virus
atccaacaaattaggaaactacttc

SEQ ID NO: 184930 - DNA, 25 bp, SARS Virus
tccaacaaattcagaaactacttca

SEQ ID NO: 184931 - DNA, 25 bp, SARS Virus
ccaacaaattcgaaaactacttcat

SEQ ID NO: 184932 - DNA, 25 bp, SARS Virus
caacaaattcggaaactacttcatg

SEQ ID NO: 184933 - DNA, 25 bp, SARS Virus
aacaaattcggaaactacttcatgt

SEQ ID NO: 184934 - DNA, 25 bp, SARS Virus
acaaattcggaaactacttcatgtt

SEQ ID NO: 184935 - DNA, 25 bp, SARS Virus
caaattcggaaaatacttcatgttc

SEQ ID NO: 184936 - DNA, 25 bp, SARS Virus
aaattcggaaacaacttcatgttca

SEQ ID NO: 184937 - DNA, 25 bp, SARS Virus
aattcggaaactacttcatgttcat

SEQ ID NO: 184938 - DNA, 25 bp, SARS Virus
attcggaaactaattcatgttcata

SEQ ID NO: 184939 - DNA, 25 bp, SARS Virus
ttcggaaactacatcatgttcataa

SEQ ID NO: 184940 - DNA, 25 bp, SARS Virus
tcggaaactactacatgttcataaa

SEQ ID NO: 184941 - DNA, 25 bp, SARS Virus
cggaaactacttaatgttcataaag

SEQ ID NO: 184942 - DNA, 25 bp, SARS Virus
ggaaactacttcatgttcataaagt

SEQ ID NO: 184943 - DNA, 25 bp, SARS Virus
gaaactacttcaagttcataaagtg

SEQ ID NO: 184944 - DNA, 25 bp, SARS Virus
aaactacttcatattcataaagtga

SEQ ID NO: 184945 - DNA, 25 bp, SARS Virus
aactacttcatgatcataaagtgaa

SEQ ID NO: 184946 - DNA, 25 bp, SARS Virus
actacttcatgtacataaagtgaaa

SEQ ID NO: 184947 - DNA, 25 bp, SARS Virus
ctacttcatgttaataaagtgaaat

SEQ ID NO: 184948 - DNA, 25 bp, SARS Virus
tacttcatgttcataaagtgaaatc

SEQ ID NO: 184949 - DNA, 25 bp, SARS Virus
acttcatgttcaaaaagtgaaatcc

SEQ ID NO: 184950 - DNA, 25 bp, SARS Virus
cttcatgttcataaagtgaaatccg

SEQ ID NO: 184951 - DNA, 25 bp, SARS Virus
ttcatgttcataaagtgaaatccgg

SEQ ID NO: 184952 - DNA, 25 bp, SARS Virus
tcatgttcataaagtgaaatccggg

SEQ ID NO: 184953 - DNA, 25 bp, SARS Virus
catgttcataaaatgaaatccggga

SEQ ID NO: 184954 - DNA, 25 bp, SARS Virus
atgttcataaagagaaatccgggaa

SEQ ID NO: 184955 - DNA, 25 bp, SARS Virus
tgttcataaagtaaaatccgggaaa

SEQ ID NO: 184956 - DNA, 25 bp, SARS Virus
gttcataaagtgaaatccgggaaaa

SEQ ID NO: 184957 - DNA, 25 bp, SARS Virus
ttcataaagtgaaatccgggaaaac

SEQ ID NO: 184958 - DNA, 25 bp, SARS Virus
tcataaagtgaaatccgggaaaacc

SEQ ID NO: 184959 - DNA, 25 bp, SARS Virus
cataaagtgaaaaccgggaaaacca

SEQ ID NO: 184960 - DNA, 25 bp, SARS Virus
ataaagtgaaatacgggaaaaccac

SEQ ID NO: 184961 - DNA, 25 bp, SARS Virus
taaagtgaaatcagggaaaaccaca

SEQ ID NO: 184962 - DNA, 25 bp, SARS Virus
aaagtgaaatccaggaaaaccacac

SEQ ID NO: 184963 - DNA, 25 bp, SARS Virus
aagtgaaatccgagaaaaccacaca

SEQ ID NO: 184964 - DNA, 25 bp, SARS Virus
agtgaaatccggaaaaaccacacag

SEQ ID NO: 184965 - DNA, 25 bp, SARS Virus
gtgaaatccgggaaaaccacacaga

SEQ ID NO: 184966 - DNA, 25 bp, SARS Virus
tgaaatccgggaaaaccacacagac

SEQ ID NO: 184967 - DNA, 25 bp, SARS Virus
gaaatccgggaaaaccacacagaca

SEQ ID NO: 184968 - DNA, 25 bp, SARS Virus
aaatccgggaaaaccacacagacat

SEQ ID NO: 184969 - DNA, 25 bp, SARS Virus
aatccgggaaaaacacacagacatt

SEQ ID NO: 184970 - DNA, 25 bp, SARS Virus
atccgggaaaacaacacagacattg

SEQ ID NO: 184971 - DNA, 25 bp, SARS Virus
tccgggaaaaccacacagacattgt

SEQ ID NO: 184972 - DNA, 25 bp, SARS Virus
ccgggaaaaccaaacagacattgtt

SEQ ID NO: 184973 - DNA, 25 bp, SARS Virus
cgggaaaaccacacagacattgttt

SEQ ID NO: 184974 - DNA, 25 bp, SARS Virus
gggaaaaccacaaagacattgtttg

SEQ ID NO: 184975 - DNA, 25 bp, SARS Virus
ggaaaaccacacagacattgtttgg

SEQ ID NO: 184976 - DNA, 25 bp, SARS Virus
gaaaaccacacaaacattgtttgga

SEQ ID NO: 184977 - DNA, 25 bp, SARS Virus
aaaaccacacagacattgtttggat

SEQ ID NO: 184978 - DNA, 25 bp, SARS Virus
aaaccacacagaaattgtttggatg

SEQ ID NO: 184979 - DNA, 25 bp, SARS Virus
aaccacacagacattgtttggatgt

SEQ ID NO: 184980 - DNA, 25 bp, SARS Virus
accacacagacaatgtttggatgtt

SEQ ID NO: 184981 - DNA, 25 bp, SARS Virus
ccacacagacatagtttggatgttc

SEQ ID NO: 184982 - DNA, 25 bp, SARS Virus
cacacagacattatttggatgttcc

SEQ ID NO: 184983 - DNA, 25 bp, SARS Virus
acacagacattgattggatgttcca

SEQ ID NO: 184984 - DNA, 25 bp, SARS Virus
cacagacattgtatggatgttccac

SEQ ID NO: 184985 - DNA, 25 bp, SARS Virus
tgtcggtattggcaaggtgtaaggc

SEQ ID NO: 184986 - DNA, 25 bp, SARS Virus
gtcggtattggacaggtgtaaggcg

SEQ ID NO: 184987 - DNA, 25 bp, SARS Virus
tcggtattggaacggtgtaaggcgt

SEQ ID NO: 184988 - DNA, 25 bp, SARS Virus
cggtattggaaacgtgtaaggcgtc

SEQ ID NO: 184989 - DNA, 25 bp, SARS Virus
ggtattggaaagctgtaaggcgtct

SEQ ID NO: 184990 - DNA, 25 bp, SARS Virus
gtattggaaaggcgtaaggcgtctg

SEQ ID NO: 184991 - DNA, 25 bp, SARS Virus
tattggaaaggtctaaggcgtctgc

SEQ ID NO: 184992 - DNA, 25 bp, SARS Virus
attggaaaggtgcaaggcgtctgcc

SEQ ID NO: 184993 - DNA, 25 bp, SARS Virus
ttggaaaggtgtcaggcgtctgcca

SEQ ID NO: 184994 - DNA, 25 bp, SARS Virus
tggaaaggtgtacggcgtctgccat

SEQ ID NO: 184995 - DNA, 25 bp, SARS Virus
ggaaaggtgtaacgcgtctgccatg

SEQ ID NO: 184996 - DNA, 25 bp, SARS Virus
gaaaggtgtaagccgtctgccatgt

SEQ ID NO: 184997 - DNA, 25 bp, SARS Virus
aaaggtgtaaggcgtctgccatgtc

SEQ ID NO: 184998 - DNA, 25 bp, SARS Virus
aaggtgtaaggcctctgccatgtct

SEQ ID NO: 184999 - DNA, 25 bp, SARS Virus
aggtgtaaggcgcctgccatgtctg

SEQ ID NO: 185000 - DNA, 25 bp, SARS Virus
ggtgtaaggcgtctgccatgtctga

SEQ ID NO: 185001 - DNA, 25 bp, SARS Virus
gtgtaaggcgtccgccatgtctgac

SEQ ID NO: 185002 - DNA, 25 bp, SARS Virus
tgtaaggcgtctcccatgtctgaca

SEQ ID NO: 185003 - DNA, 25 bp, SARS Virus
gtaaggcgtctgccatgtctgacac

SEQ ID NO: 185004 - DNA, 25 bp, SARS Virus
taaggcgtctgccatgtctgacaca

SEQ ID NO: 185005 - DNA, 25 bp, SARS Virus
aaggcgtctgccctgtctgacacaa

SEQ ID NO: 185006 - DNA, 25 bp, SARS Virus
aggcgtctgccacgtctgacacaaa

SEQ ID NO: 185007 - DNA, 25 bp, SARS Virus
ggcgtctgccatctctgacacaaag

SEQ ID NO: 185008 - DNA, 25 bp, SARS Virus
gcgtctgccatgcctgacacaaaga

SEQ ID NO: 185009 - DNA, 25 bp, SARS Virus
cgtctgccatgtctgacacaaagat

SEQ ID NO: 185010 - DNA, 25 bp, SARS Virus
gtctgccatgtccgacacaaagatt

SEQ ID NO: 185011 - DNA, 25 bp, SARS Virus
tctgccatgtctcacacaaagattc

SEQ ID NO: 185012 - DNA, 25 bp, SARS Virus
ctgccatgtctgccacaaagattca

SEQ ID NO: 185013 - DNA, 25 bp, SARS Virus
tgccatgtctgacacaaagattcac

SEQ ID NO: 185014 - DNA, 25 bp, SARS Virus
gccatgtctgacccaaagattcaca

SEQ ID NO: 185015 - DNA, 25 bp, SARS Virus
ccatgtctgacacaaagattcacat

SEQ ID NO: 185016 - DNA, 25 bp, SARS Virus
catgtctgacaccaagattcacatt

SEQ ID NO: 185017 - DNA, 25 bp, SARS Virus
atgtctgacacacagattcacattt

SEQ ID NO: 185018 - DNA, 25 bp, SARS Virus
tgtctgacacaacgattcacatttt

SEQ ID NO: 185019 - DNA, 25 bp, SARS Virus
gtctgacacaaacattcacattttg

SEQ ID NO: 185020 - DNA, 25 bp, SARS Virus
tctgacacaaagcttcacattttgg

SEQ ID NO: 185021 - DNA, 25 bp, SARS Virus
ctgacacaaagactcacattttggg

SEQ ID NO: 185022 - DNA, 25 bp, SARS Virus
tgacacaaagatccacattttgggt

SEQ ID NO: 185023 - DNA, 25 bp, SARS Virus
gacacaaagattcacattttgggtg

SEQ ID NO: 185024 - DNA, 25 bp, SARS Virus
acacaaagattcccattttgggtga

SEQ ID NO: 185025 - DNA, 25 bp, SARS Virus
cacaaagattcacattttgggtgac

SEQ ID NO: 185026 - DNA, 25 bp, SARS Virus
acaaagattcaccttttgggtgacc

SEQ ID NO: 185027 - DNA, 25 bp, SARS Virus
caaagattcacactttgggtgaccc

SEQ ID NO: 185028 - DNA, 25 bp, SARS Virus
aaagattcacatcttgggtgaccca

SEQ ID NO: 185029 - DNA, 25 bp, SARS Virus
aagattcacattctgggtgacccag

SEQ ID NO: 185030 - DNA, 25 bp, SARS Virus
agattcacatttcgggtgacccagt

SEQ ID NO: 185031 - DNA, 25 bp, SARS Virus
gattcacattttcggtgacccagta

SEQ ID NO: 185032 - DNA, 25 bp, SARS Virus
attcacattttgcgtgacccagtaa

SEQ ID NO: 185033 - DNA, 25 bp, SARS Virus
ttcacattttggctgacccagtaat

SEQ ID NO: 185034 - DNA, 25 bp, SARS Virus
tcacattttgggcgacccagtaatc

SEQ ID NO: 185035 - DNA, 25 bp, SARS Virus
cacattttgggtcacccagtaatcg

SEQ ID NO: 185036 - DNA, 25 bp, SARS Virus
acattttgggtgccccagtaatcgt

SEQ ID NO: 185037 - DNA, 25 bp, SARS Virus
cattttgggtgacccagtaatcgtg

SEQ ID NO: 185038 - DNA, 25 bp, SARS Virus
attttgggtgacccagtaatcgtgt

SEQ ID NO: 185039 - DNA, 25 bp, SARS Virus
ttttgggtgacccagtaatcgtgtt

SEQ ID NO: 185040 - DNA, 25 bp, SARS Virus
tttgggtgaccccgtaatcgtgttc

SEQ ID NO: 185041 - DNA, 25 bp, SARS Virus
ttgggtgacccactaatcgtgttca

SEQ ID NO: 185042 - DNA, 25 bp, SARS Virus
tgggtgacccagcaatcgtgttcac

SEQ ID NO: 185043 - DNA, 25 bp, SARS Virus
gggtgacccagtcatcgtgttcacc

SEQ ID NO: 185044 - DNA, 25 bp, SARS Virus
ggtgacccagtactcgtgttcacca

SEQ ID NO: 185045 - DNA, 25 bp, SARS Virus
gtgacccagtaaccgtgttcaccat

SEQ ID NO: 185046 - DNA, 25 bp, SARS Virus
tgacccagtaatcgtgttcaccatc

SEQ ID NO: 185047 - DNA, 25 bp, SARS Virus
gacccagtaatcctgttcaccatcc

SEQ ID NO: 185048 - DNA, 25 bp, SARS Virus
acccagtaatcgcgttcaccatcca

SEQ ID NO: 185049 - DNA, 25 bp, SARS Virus
cccagtaatcgtcttcaccatccat

SEQ ID NO: 185050 - DNA, 25 bp, SARS Virus
ccagtaatcgtgctcaccatccata

SEQ ID NO: 185051 - DNA, 25 bp, SARS Virus
cagtaatcgtgtccaccatccataa

SEQ ID NO: 185052 - DNA, 25 bp, SARS Virus
agtaatcgtgttcaccatccataaa

SEQ ID NO: 185053 - DNA, 25 bp, SARS Virus
gtaatcgtgttccccatccataaac

SEQ ID NO: 185054 - DNA, 25 bp, SARS Virus
taatcgtgttcaccatccataaacc

SEQ ID NO: 185055 - DNA, 25 bp, SARS Virus
aatcgtgttcaccatccataaacct

SEQ ID NO: 185056 - DNA, 25 bp, SARS Virus
atcgtgttcaccctccataaacctg

SEQ ID NO: 185057 - DNA, 25 bp, SARS Virus
tcgtgttcaccacccataaacctgc

SEQ ID NO: 185058 - DNA, 25 bp, SARS Virus
cgtgttcaccatccataaacctgca

SEQ ID NO: 185059 - DNA, 25 bp, SARS Virus
gtgttcaccatccataaacctgcat

SEQ ID NO: 185060 - DNA, 25 bp, SARS Virus
tgttcaccatccctaaacctgcatg

SEQ ID NO: 185061 - DNA, 25 bp, SARS Virus
gttcaccatccacaaacctgcatga

SEQ ID NO: 185062 - DNA, 25 bp, SARS Virus
ttcaccatccatcaacctgcatgaa

SEQ ID NO: 185063 - DNA, 25 bp, SARS Virus
tcaccatccatacacctgcatgaat

SEQ ID NO: 185064 - DNA, 25 bp, SARS Virus
caccatccataaccctgcatgaatg

SEQ ID NO: 185065 - DNA, 25 bp, SARS Virus
accatccataaacctgcatgaatgg

SEQ ID NO: 185066 - DNA, 25 bp, SARS Virus
ccatccataaacctgcatgaatgga

SEQ ID NO: 185067 - DNA, 25 bp, SARS Virus
catccataaacccgcatgaatggaa

SEQ ID NO: 185068 - DNA, 25 bp, SARS Virus
atccataaacctccatgaatggaaa

SEQ ID NO: 185069 - DNA, 25 bp, SARS Virus
tccataaacctgcatgaatggaaag

SEQ ID NO: 185070 - DNA, 25 bp, SARS Virus
ccataaacctgcctgaatggaaagt

SEQ ID NO: 185071 - DNA, 25 bp, SARS Virus
cataaacctgcacgaatggaaagtt

SEQ ID NO: 185072 - DNA, 25 bp, SARS Virus
ataaacctgcatcaatggaaagttc

SEQ ID NO: 185073 - DNA, 25 bp, SARS Virus
taaacctgcatgcatggaaagttca

SEQ ID NO: 185074 - DNA, 25 bp, SARS Virus
aaacctgcatgactggaaagttcag

SEQ ID NO: 185075 - DNA, 25 bp, SARS Virus
aacctgcatgaacggaaagttcagt

SEQ ID NO: 185076 - DNA, 25 bp, SARS Virus
acctgcatgaatcgaaagttcagtg

SEQ ID NO: 185077 - DNA, 25 bp, SARS Virus
cctgcatgaatgcaaagttcagtgt

SEQ ID NO: 185078 - DNA, 25 bp, SARS Virus
ctgcatgaatggcaagttcagtgtc

SEQ ID NO: 185079 - DNA, 25 bp, SARS Virus
tgcatgaatggacagttcagtgtct

SEQ ID NO: 185080 - DNA, 25 bp, SARS Virus
gcatgaatggaacgttcagtgtctt

SEQ ID NO: 185081 - DNA, 25 bp, SARS Virus
catgaatggaaacttcagtgtctta

SEQ ID NO: 185082 - DNA, 25 bp, SARS Virus
atgaatggaaagctcagtgtcttag

SEQ ID NO: 185083 - DNA, 25 bp, SARS Virus
tgaatggaaagtccagtgtcttagg

SEQ ID NO: 185084 - DNA, 25 bp, SARS Virus
gaatggaaagttcagtgtcttagga

SEQ ID NO: 185085 - DNA, 25 bp, SARS Virus
aatggaaagttccgtgtcttaggaa

SEQ ID NO: 185086 - DNA, 25 bp, SARS Virus
atggaaagttcactgtcttaggaaa

SEQ ID NO: 185087 - DNA, 25 bp, SARS Virus
tggaaagttcagcgtcttaggaaat

SEQ ID NO: 185088 - DNA, 25 bp, SARS Virus
ggaaagttcagtctcttaggaaatc

SEQ ID NO: 185089 - DNA, 25 bp, SARS Virus
gaaagttcagtgccttaggaaatcc

SEQ ID NO: 185090 - DNA, 25 bp, SARS Virus
aaagttcagtgtcttaggaaatcct

SEQ ID NO: 185091 - DNA, 25 bp, SARS Virus
aagttcagtgtcctaggaaatccta

SEQ ID NO: 185092 - DNA, 25 bp, SARS Virus
agttcagtgtctcaggaaatcctaa

SEQ ID NO: 185093 - DNA, 25 bp, SARS Virus
gttcagtgtcttcggaaatcctaaa

SEQ ID NO: 185094 - DNA, 25 bp, SARS Virus
ttcagtgtcttacgaaatcctaaac

SEQ ID NO: 185095 - DNA, 25 bp, SARS Virus
tcagtgtcttagcaaatcctaaacc

SEQ ID NO: 185096 - DNA, 25 bp, SARS Virus
cagtgtcttaggcaatcctaaacct

SEQ ID NO: 185097 - DNA, 25 bp, SARS Virus
agtgtcttaggacatcctaaaccta

SEQ ID NO: 185098 - DNA, 25 bp, SARS Virus
gtgtcttaggaactcctaaacctac

SEQ ID NO: 185099 - DNA, 25 bp, SARS Virus
tgtcttaggaaaccctaaacctacc

SEQ ID NO: 185100 - DNA, 25 bp, SARS Virus
gtcttaggaaatcctaaacctacca

SEQ ID NO: 185101 - DNA, 25 bp, SARS Virus
tcttaggaaatcctaaacctaccag

SEQ ID NO: 185102 - DNA, 25 bp, SARS Virus
cttaggaaatcccaaacctaccagt

SEQ ID NO: 185103 - DNA, 25 bp, SARS Virus
ttaggaaatcctcaacctaccagtt

SEQ ID NO: 185104 - DNA, 25 bp, SARS Virus
taggaaatcctacacctaccagtta

SEQ ID NO: 185105 - DNA, 25 bp, SARS Virus
aggaaatcctaaccctaccagttac

SEQ ID NO: 185106 - DNA, 25 bp, SARS Virus
ggaaatcctaaacctaccagttaca

SEQ ID NO: 185107 - DNA, 25 bp, SARS Virus
gaaatcctaaacctaccagttacac

SEQ ID NO: 185108 - DNA, 25 bp, SARS Virus
aaatcctaaacccaccagttacacc

SEQ ID NO: 185109 - DNA, 25 bp, SARS Virus
aatcctaaacctcccagttacaccg

SEQ ID NO: 185110 - DNA, 25 bp, SARS Virus
atcctaaacctaccagttacaccgt

SEQ ID NO: 185111 - DNA, 25 bp, SARS Virus
tcctaaacctaccagttacaccgta

SEQ ID NO: 185112 - DNA, 25 bp, SARS Virus
cctaaacctacccgttacaccgtag

SEQ ID NO: 185113 - DNA, 25 bp, SARS Virus
ctaaacctaccacttacaccgtaga

SEQ ID NO: 185114 - DNA, 25 bp, SARS Virus
taaacctaccagctacaccgtagat

SEQ ID NO: 185115 - DNA, 25 bp, SARS Virus
aaacctaccagtcacaccgtagatg

SEQ ID NO: 185116 - DNA, 25 bp, SARS Virus
aacctaccagttccaccgtagatgt

SEQ ID NO: 185117 - DNA, 25 bp, SARS Virus
acctaccagttacaccgtagatgtt

SEQ ID NO: 185118 - DNA, 25 bp, SARS Virus
cctaccagttaccccgtagatgtta

SEQ ID NO: 185119 - DNA, 25 bp, SARS Virus
ctaccagttacaccgtagatgttat

SEQ ID NO: 185120 - DNA, 25 bp, SARS Virus
taccagttacaccgtagatgttatg

SEQ ID NO: 185121 - DNA, 25 bp, SARS Virus
accagttacaccctagatgttatgt

SEQ ID NO: 185122 - DNA, 25 bp, SARS Virus
ccagttacaccgcagatgttatgtc

SEQ ID NO: 185123 - DNA, 25 bp, SARS Virus
cagttacaccgtcgatgttatgtct

SEQ ID NO: 185124 - DNA, 25 bp, SARS Virus
agttacaccgtacatgttatgtctg

SEQ ID NO: 185125 - DNA, 25 bp, SARS Virus
gttacaccgtagctgttatgtctgt

SEQ ID NO: 185126 - DNA, 25 bp, SARS Virus
ttacaccgtagacgttatgtctgtt

SEQ ID NO: 185127 - DNA, 25 bp, SARS Virus
tacaccgtagatcttatgtctgttg

SEQ ID NO: 185128 - DNA, 25 bp, SARS Virus
acaccgtagatgctatgtctgttgt

SEQ ID NO: 185129 - DNA, 25 bp, SARS Virus
caccgtagatgtcatgtctgttgta

SEQ ID NO: 185130 - DNA, 25 bp, SARS Virus
accgtagatgttctgtctgttgtac

SEQ ID NO: 185131 - DNA, 25 bp, SARS Virus
ccgtagatgttacgtctgttgtact

SEQ ID NO: 185132 - DNA, 25 bp, SARS Virus
cgtagatgttatctctgttgtactt

SEQ ID NO: 185133 - DNA, 25 bp, SARS Virus
gtagatgttatgcctgttgtacttc

SEQ ID NO: 185134 - DNA, 25 bp, SARS Virus
tagatgttatgtctgttgtacttcg

SEQ ID NO: 185135 - DNA, 25 bp, SARS Virus
agatgttatgtccgttgtacttcgt

SEQ ID NO: 185136 - DNA, 25 bp, SARS Virus
gatgttatgtctcttgtacttcgtg

SEQ ID NO: 185137 - DNA, 25 bp, SARS Virus
atgttatgtctgctgtacttcgtgg

SEQ ID NO: 185138 - DNA, 25 bp, SARS Virus
tgttatgtctgtcgtacttcgtggt

SEQ ID NO: 185139 - DNA, 25 bp, SARS Virus
gttatgtctgttctacttcgtggtg

SEQ ID NO: 185140 - DNA, 25 bp, SARS Virus
ttatgtctgttgcacttcgtggtgg

SEQ ID NO: 185141 - DNA, 25 bp, SARS Virus
tatgtctgttgtccttcgtggtggt

SEQ ID NO: 185142 - DNA, 25 bp, SARS Virus
atgtctgttgtacttcgtggtggtt

SEQ ID NO: 185143 - DNA, 25 bp, SARS Virus
tgtctgttgtacctcgtggtggttt

SEQ ID NO: 185144 - DNA, 25 bp, SARS Virus
gtctgttgtactccgtggtggtttc

SEQ ID NO: 185145 - DNA, 25 bp, SARS Virus
tctgttgtacttcgtggtggtttcc

SEQ ID NO: 185146 - DNA, 25 bp, SARS Virus
ctgttgtacttcctggtggtttcct

SEQ ID NO: 185147 - DNA, 25 bp, SARS Virus
tgttgtacttcgcggtggtttcctg

SEQ ID NO: 185148 - DNA, 25 bp, SARS Virus
gttgtacttcgtcgtggtttcctga

SEQ ID NO: 185149 - DNA, 25 bp, SARS Virus
ttgtacttcgtgctggtttcctgag

SEQ ID NO: 185150 - DNA, 25 bp, SARS Virus
tgtacttcgtggcggtttcctgaga

SEQ ID NO: 185151 - DNA, 25 bp, SARS Virus
gtacttcgtggtcgtttcctgagaa

SEQ ID NO: 185152 - DNA, 25 bp, SARS Virus
tacttcgtggtgctttcctgagaac

SEQ ID NO: 185153 - DNA, 25 bp, SARS Virus
acttcgtggtggcttcctgagaacc

SEQ ID NO: 185154 - DNA, 25 bp, SARS Virus
cttcgtggtggtctcctgagaacca

SEQ ID NO: 185155 - DNA, 25 bp, SARS Virus
ttcgtggtggttccctgagaaccag

SEQ ID NO: 185156 - DNA, 25 bp, SARS Virus
tcgtggtggtttcctgagaaccagg

SEQ ID NO: 185157 - DNA, 25 bp, SARS Virus
cgtggtggtttcctgagaaccaggt

SEQ ID NO: 185158 - DNA, 25 bp, SARS Virus
gtggtggtttcccgagaaccaggta

SEQ ID NO: 185159 - DNA, 25 bp, SARS Virus
tggtggtttcctcagaaccaggtac

SEQ ID NO: 185160 - DNA, 25 bp, SARS Virus
ggtggtttcctgcgaaccaggtaca

SEQ ID NO: 185161 - DNA, 25 bp, SARS Virus
gtggtttcctgacaaccaggtacaa

SEQ ID NO: 185162 - DNA, 25 bp, SARS Virus
tggtttcctgagcaccaggtacaat

SEQ ID NO: 185163 - DNA, 25 bp, SARS Virus
ggtttcctgagacccaggtacaatc

SEQ ID NO: 185164 - DNA, 25 bp, SARS Virus
gtttcctgagaaccaggtacaatcg

SEQ ID NO: 185165 - DNA, 25 bp, SARS Virus
tttcctgagaaccaggtacaatcga

SEQ ID NO: 185166 - DNA, 25 bp, SARS Virus
ttcctgagaacccggtacaatcgaa

SEQ ID NO: 185167 - DNA, 25 bp, SARS Virus
tcctgagaaccacgtacaatcgaag

SEQ ID NO: 185168 - DNA, 25 bp, SARS Virus
cctgagaaccagctacaatcgaaga

SEQ ID NO: 185169 - DNA, 25 bp, SARS Virus
ctgagaaccaggcacaatcgaagac

SEQ ID NO: 185170 - DNA, 25 bp, SARS Virus
tgagaaccaggtccaatcgaagacc

SEQ ID NO: 185171 - DNA, 25 bp, SARS Virus
gagaaccaggtacaatcgaagacca

SEQ ID NO: 185172 - DNA, 25 bp, SARS Virus
agaaccaggtaccatcgaagaccac

SEQ ID NO: 185173 - DNA, 25 bp, SARS Virus
gaaccaggtacactcgaagaccaca

SEQ ID NO: 185174 - DNA, 25 bp, SARS Virus
aaccaggtacaaccgaagaccacaa

SEQ ID NO: 185175 - DNA, 25 bp, SARS Virus
accaggtacaatcgaagaccacaat

SEQ ID NO: 185176 - DNA, 25 bp, SARS Virus
ccaggtacaatccaagaccacaatg

SEQ ID NO: 185177 - DNA, 25 bp, SARS Virus
caggtacaatcgcagaccacaatgt

SEQ ID NO: 185178 - DNA, 25 bp, SARS Virus
aggtacaatcgacgaccacaatgtc

SEQ ID NO: 185179 - DNA, 25 bp, SARS Virus
ggtacaatcgaacaccacaatgtca

SEQ ID NO: 185180 - DNA, 25 bp, SARS Virus
gtacaatcgaagcccacaatgtcat

SEQ ID NO: 185181 - DNA, 25 bp, SARS Virus
tacaatcgaagaccacaatgtcatt

SEQ ID NO: 185182 - DNA, 25 bp, SARS Virus
acaatcgaagaccacaatgtcatta

SEQ ID NO: 185183 - DNA, 25 bp, SARS Virus
caatcgaagaccccaatgtcattaa

SEQ ID NO: 185184 - DNA, 25 bp, SARS Virus
aatcgaagaccacaatgtcattaac

SEQ ID NO: 185185 - DNA, 25 bp, SARS Virus
atcgaagaccaccatgtcattaacg

SEQ ID NO: 185186 - DNA, 25 bp, SARS Virus
tcgaagaccacactgtcattaacgg

SEQ ID NO: 185187 - DNA, 25 bp, SARS Virus
cgaagaccacaacgtcattaacgga

SEQ ID NO: 185188 - DNA, 25 bp, SARS Virus
gaagaccacaatctcattaacggac

SEQ ID NO: 185189 - DNA, 25 bp, SARS Virus
aagaccacaatgccattaacggaca

SEQ ID NO: 185190 - DNA, 25 bp, SARS Virus
agaccacaatgtcattaacggacag

SEQ ID NO: 185191 - DNA, 25 bp, SARS Virus
gaccacaatgtccttaacggacagg

SEQ ID NO: 185192 - DNA, 25 bp, SARS Virus
accacaatgtcactaacggacagga

SEQ ID NO: 185193 - DNA, 25 bp, SARS Virus
ccacaatgtcatcaacggacaggac

SEQ ID NO: 185194 - DNA, 25 bp, SARS Virus
cacaatgtcattcacggacaggaca

SEQ ID NO: 185195 - DNA, 25 bp, SARS Virus
acaatgtcattaccggacaggacat

SEQ ID NO: 185196 - DNA, 25 bp, SARS Virus
caatgtcattaacggacaggacatg

SEQ ID NO: 185197 - DNA, 25 bp, SARS Virus
aatgtcattaaccgacaggacatgg

SEQ ID NO: 185198 - DNA, 25 bp, SARS Virus
atgtcattaacgcacaggacatggt

SEQ ID NO: 185199 - DNA, 25 bp, SARS Virus
tgtcattaacggccaggacatggtc

SEQ ID NO: 185200 - DNA, 25 bp, SARS Virus
gtcattaacggacaggacatggtca

SEQ ID NO: 185201 - DNA, 25 bp, SARS Virus
tcattaacggaccggacatggtcac

SEQ ID NO: 185202 - DNA, 25 bp, SARS Virus
cattaacggacacgacatggtcaca

SEQ ID NO: 185203 - DNA, 25 bp, SARS Virus
attaacggacagcacatggtcacac

SEQ ID NO: 185204 - DNA, 25 bp, SARS Virus
ttaacggacaggccatggtcacaca

SEQ ID NO: 185205 - DNA, 25 bp, SARS Virus
taacggacaggacatggtcacacac

SEQ ID NO: 185206 - DNA, 25 bp, SARS Virus
aacggacaggacctggtcacacaca

SEQ ID NO: 185207 - DNA, 25 bp, SARS Virus
acggacaggacacggtcacacacat

SEQ ID NO: 185208 - DNA, 25 bp, SARS Virus
cggacaggacatcgtcacacacatg

SEQ ID NO: 185209 - DNA, 25 bp, SARS Virus
ggacaggacatgctcacacacatgt

SEQ ID NO: 185210 - DNA, 25 bp, SARS Virus
gacaggacatggccacacacatgtg

SEQ ID NO: 185211 - DNA, 25 bp, SARS Virus
acaggacatggtcacacacatgtgt

SEQ ID NO: 185212 - DNA, 25 bp, SARS Virus
caggacatggtcccacacatgtgtt

SEQ ID NO: 185213 - DNA, 25 bp, SARS Virus
aggacatggtcacacacatgtgttg

SEQ ID NO: 185214 - DNA, 25 bp, SARS Virus
ggacatggtcacccacatgtgttgt

SEQ ID NO: 185215 - DNA, 25 bp, SARS Virus
gacatggtcacacacatgtgttgta

SEQ ID NO: 185216 - DNA, 25 bp, SARS Virus
acatggtcacacccatgtgttgtag

SEQ ID NO: 185217 - DNA, 25 bp, SARS Virus
catggtcacacacatgtgttgtaga

SEQ ID NO: 185218 - DNA, 25 bp, SARS Virus
atggtcacacacctgtgttgtagaa

SEQ ID NO: 185219 - DNA, 25 bp, SARS Virus
tggtcacacacacgtgttgtagaag

SEQ ID NO: 185220 - DNA, 25 bp, SARS Virus
ggtcacacacatctgttgtagaagt

SEQ ID NO: 185221 - DNA, 25 bp, SARS Virus
gtcacacacatgcgttgtagaagtg

SEQ ID NO: 185222 - DNA, 25 bp, SARS Virus
tcacacacatgtcttgtagaagtgt

SEQ ID NO: 185223 - DNA, 25 bp, SARS Virus
cacacacatgtgctgtagaagtgtg

SEQ ID NO: 185224 - DNA, 25 bp, SARS Virus
acacacatgtgtcgtagaagtgtgt

SEQ ID NO: 185225 - DNA, 25 bp, SARS Virus
cacacatgtgttctagaagtgtgtc

SEQ ID NO: 185226 - DNA, 25 bp, SARS Virus
acacatgtgttgcagaagtgtgtca

SEQ ID NO: 185227 - DNA, 25 bp, SARS Virus
cacatgtgttgtcgaagtgtgtcaa

SEQ ID NO: 185228 - DNA, 25 bp, SARS Virus
acatgtgttgtacaagtgtgtcaac

SEQ ID NO: 185229 - DNA, 25 bp, SARS Virus
catgtgttgtagcagtgtgtcaacc

SEQ ID NO: 185230 - DNA, 25 bp, SARS Virus
atgtgttgtagacgtgtgtcaacca

SEQ ID NO: 185231 - DNA, 25 bp, SARS Virus
tgtgttgtagaactgtgtcaaccac

SEQ ID NO: 185232 - DNA, 25 bp, SARS Virus
gtgttgtagaagcgtgtcaaccact

SEQ ID NO: 185233 - DNA, 25 bp, SARS Virus
tgttgtagaagtctgtcaaccacta

SEQ ID NO: 185234 - DNA, 25 bp, SARS Virus
gttgtagaagtgcgtcaaccactaa

SEQ ID NO: 185235 - DNA, 25 bp, SARS Virus
ttgtagaagtgtctcaaccactaac

SEQ ID NO: 185236 - DNA, 25 bp, SARS Virus
tgtagaagtgtgccaaccactaacc

SEQ ID NO: 185237 - DNA, 25 bp, SARS Virus
gtagaagtgtgtcaaccactaacca

SEQ ID NO: 185238 - DNA, 25 bp, SARS Virus
tagaagtgtgtccaccactaaccaa

SEQ ID NO: 185239 - DNA, 25 bp, SARS Virus
agaagtgtgtcacccactaaccaac

SEQ ID NO: 185240 - DNA, 25 bp, SARS Virus
gaagtgtgtcaaccactaaccaaca

SEQ ID NO: 185241 - DNA, 25 bp, SARS Virus
aagtgtgtcaaccactaaccaacag

SEQ ID NO: 185242 - DNA, 25 bp, SARS Virus
agtgtgtcaacccctaaccaacagg

SEQ ID NO: 185243 - DNA, 25 bp, SARS Virus
gtgtgtcaaccactaaccaacagga

SEQ ID NO: 185244 - DNA, 25 bp, SARS Virus
tgtgtcaaccaccaaccaacaggag

SEQ ID NO: 185245 - DNA, 25 bp, SARS Virus
gtgtcaaccactcaccaacaggagg

SEQ ID NO: 185246 - DNA, 25 bp, SARS Virus
tgtcaaccactacccaacaggaggt

SEQ ID NO: 185247 - DNA, 25 bp, SARS Virus
gtcaaccactaaccaacaggaggtg

SEQ ID NO: 185248 - DNA, 25 bp, SARS Virus
tcaaccactaaccaacaggaggtga

SEQ ID NO: 185249 - DNA, 25 bp, SARS Virus
caaccactaacccacaggaggtgaa

SEQ ID NO: 185250 - DNA, 25 bp, SARS Virus
aaccactaaccaccaggaggtgaac

SEQ ID NO: 185251 - DNA, 25 bp, SARS Virus
accactaaccaacaggaggtgaacg

SEQ ID NO: 185252 - DNA, 25 bp, SARS Virus
ccactaaccaaccggaggtgaacga

SEQ ID NO: 185253 - DNA, 25 bp, SARS Virus
cactaaccaacacgaggtgaacgat

SEQ ID NO: 185254 - DNA, 25 bp, SARS Virus
actaaccaacagcaggtgaacgatc

SEQ ID NO: 185255 - DNA, 25 bp, SARS Virus
ctaaccaacaggcggtgaacgatcc

SEQ ID NO: 185256 - DNA, 25 bp, SARS Virus
taaccaacaggacgtgaacgatcca

SEQ ID NO: 185257 - DNA, 25 bp, SARS Virus
aaccaacaggagctgaacgatccat

SEQ ID NO: 185258 - DNA, 25 bp, SARS Virus
accaacaggaggcgaacgatccatt

SEQ ID NO: 185259 - DNA, 25 bp, SARS Virus
ccaacaggaggtcaacgatccatta

SEQ ID NO: 185260 - DNA, 25 bp, SARS Virus
caacaggaggtgcacgatccattag

SEQ ID NO: 185261 - DNA, 25 bp, SARS Virus
aacaggaggtgaccgatccattagg

SEQ ID NO: 185262 - DNA, 25 bp, SARS Virus
acaggaggtgaacgatccattagga

SEQ ID NO: 185263 - DNA, 25 bp, SARS Virus
caggaggtgaaccatccattaggaa

SEQ ID NO: 185264 - DNA, 25 bp, SARS Virus
aggaggtgaacgctccattaggaat

SEQ ID NO: 185265 - DNA, 25 bp, SARS Virus
ggaggtgaacgacccattaggaata

SEQ ID NO: 185266 - DNA, 25 bp, SARS Virus
gaggtgaacgatccattaggaatat

SEQ ID NO: 185267 - DNA, 25 bp, SARS Virus
aggtgaacgatccattaggaatata

SEQ ID NO: 185268 - DNA, 25 bp, SARS Virus
ggtgaacgatcccttaggaatatac

SEQ ID NO: 185269 - DNA, 25 bp, SARS Virus
gtgaacgatccactaggaatatacg

SEQ ID NO: 185270 - DNA, 25 bp, SARS Virus
tgaacgatccatcaggaatatacga

SEQ ID NO: 185271 - DNA, 25 bp, SARS Virus
gaacgatccattcggaatatacgaa

SEQ ID NO: 185272 - DNA, 25 bp, SARS Virus
aacgatccattacgaatatacgaaa

SEQ ID NO: 185273 - DNA, 25 bp, SARS Virus
acgatccattagcaatatacgaaat

SEQ ID NO: 185274 - DNA, 25 bp, SARS Virus
cgatccattaggcatatacgaaatc

SEQ ID NO: 185275 - DNA, 25 bp, SARS Virus
gatccattaggactatacgaaatcg

SEQ ID NO: 185276 - DNA, 25 bp, SARS Virus
atccattaggaacatacgaaatcgt

SEQ ID NO: 185277 - DNA, 25 bp, SARS Virus
tccattaggaatctacgaaatcgtc

SEQ ID NO: 185278 - DNA, 25 bp, SARS Virus
ccattaggaatacacgaaatcgtcc

SEQ ID NO: 185279 - DNA, 25 bp, SARS Virus
cattaggaatatccgaaatcgtccc

SEQ ID NO: 185280 - DNA, 25 bp, SARS Virus
attaggaatatacgaaatcgtccca

SEQ ID NO: 185281 - DNA, 25 bp, SARS Virus
ttaggaatataccaaatcgtcccag

SEQ ID NO: 185282 - DNA, 25 bp, SARS Virus
taggaatatacgcaatcgtcccaga

SEQ ID NO: 185283 - DNA, 25 bp, SARS Virus
aggaatatacgacatcgtcccagat

SEQ ID NO: 185284 - DNA, 25 bp, SARS Virus
ggaatatacgaactcgtcccagatg

SEQ ID NO: 185285 - DNA, 25 bp, SARS Virus
gaatatacgaaaccgtcccagatga

SEQ ID NO: 185286 - DNA, 25 bp, SARS Virus
aatatacgaaatcgtcccagatgac

SEQ ID NO: 185287 - DNA, 25 bp, SARS Virus
atatacgaaatcctcccagatgacg

SEQ ID NO: 185288 - DNA, 25 bp, SARS Virus
tatacgaaatcgccccagatgacgt

SEQ ID NO: 185289 - DNA, 25 bp, SARS Virus
atacgaaatcgtcccagatgacgtt

SEQ ID NO: 185290 - DNA, 25 bp, SARS Virus
tacgaaatcgtcccagatgacgttt

SEQ ID NO: 185291 - DNA, 25 bp, SARS Virus
acgaaatcgtcccagatgacgtttt

SEQ ID NO: 185292 - DNA, 25 bp, SARS Virus
cgaaatcgtccccgatgacgttttc

SEQ ID NO: 185293 - DNA, 25 bp, SARS Virus
gaaatcgtcccacatgacgttttcg

SEQ ID NO: 185294 - DNA, 25 bp, SARS Virus
aaatcgtcccagctgacgttttcgt

SEQ ID NO: 185295 - DNA, 25 bp, SARS Virus
aatcgtcccagacgacgttttcgtg

SEQ ID NO: 185296 - DNA, 25 bp, SARS Virus
atcgtcccagatcacgttttcgtgt

SEQ ID NO: 185297 - DNA, 25 bp, SARS Virus
tcgtcccagatgccgttttcgtgtc

SEQ ID NO: 185298 - DNA, 25 bp, SARS Virus
cgtcccagatgacgttttcgtgtct

SEQ ID NO: 185299 - DNA, 25 bp, SARS Virus
gtcccagatgaccttttcgtgtctt

SEQ ID NO: 185300 - DNA, 25 bp, SARS Virus
tcccagatgacgctttcgtgtcttc

SEQ ID NO: 185301 - DNA, 25 bp, SARS Virus
cccagatgacgtcttcgtgtcttcc

SEQ ID NO: 185302 - DNA, 25 bp, SARS Virus
ccagatgacgttctcgtgtcttcct

SEQ ID NO: 185303 - DNA, 25 bp, SARS Virus
cagatgacgtttccgtgtcttcctt

SEQ ID NO: 185304 - DNA, 25 bp, SARS Virus
agatgacgttttcgtgtcttccttt

SEQ ID NO: 185305 - DNA, 25 bp, SARS Virus
gatgacgttttcctgtcttcctttc

SEQ ID NO: 185306 - DNA, 25 bp, SARS Virus
atgacgttttcgcgtcttcctttcg

SEQ ID NO: 185307 - DNA, 25 bp, SARS Virus
tgacgttttcgtctcttcctttcgt

SEQ ID NO: 185308 - DNA, 25 bp, SARS Virus
gacgttttcgtgccttcctttcgtg

SEQ ID NO: 185309 - DNA, 25 bp, SARS Virus
acgttttcgtgtcttcctttcgtgt

SEQ ID NO: 185310 - DNA, 25 bp, SARS Virus
cgttttcgtgtcctcctttcgtgtc

SEQ ID NO: 185311 - DNA, 25 bp, SARS Virus
gttttcgtgtctccctttcgtgtca

SEQ ID NO: 185312 - DNA, 25 bp, SARS Virus
ttttcgtgtcttcctttcgtgtcaa

SEQ ID NO: 185313 - DNA, 25 bp, SARS Virus
tttcgtgtcttcctttcgtgtcaac

SEQ ID NO: 185314 - DNA, 25 bp, SARS Virus
ttcgtgtcttcccttcgtgtcaact

SEQ ID NO: 185315 - DNA, 25 bp, SARS Virus
tcgtgtcttcctctcgtgtcaactt

SEQ ID NO: 185316 - DNA, 25 bp, SARS Virus
cgtgtcttccttccgtgtcaactta

SEQ ID NO: 185317 - DNA, 25 bp, SARS Virus
gtgtcttcctttcgtgtcaacttaa

SEQ ID NO: 185318 - DNA, 25 bp, SARS Virus
tgtcttcctttcctgtcaacttaac

SEQ ID NO: 185319 - DNA, 25 bp, SARS Virus
gtcttcctttcgcgtcaacttaacc

SEQ ID NO: 185320 - DNA, 25 bp, SARS Virus
tcttcctttcgtctcaacttaaccg

SEQ ID NO: 185321 - DNA, 25 bp, SARS Virus
cttcctttcgtgccaacttaaccgt

SEQ ID NO: 185322 - DNA, 25 bp, SARS Virus
ttcctttcgtgtcaacttaaccgtc

SEQ ID NO: 185323 - DNA, 25 bp, SARS Virus
tcctttcgtgtccacttaaccgtcc

SEQ ID NO: 185324 - DNA, 25 bp, SARS Virus
cctttcgtgtcaccttaaccgtcca

SEQ ID NO: 185325 - DNA, 25 bp, SARS Virus
ctttcgtgtcaacttaaccgtccat

SEQ ID NO: 185326 - DNA, 25 bp, SARS Virus
tttcgtgtcaacctaaccgtccatg

SEQ ID NO: 185327 - DNA, 25 bp, SARS Virus
ttcgtgtcaactcaaccgtccatga

SEQ ID NO: 185328 - DNA, 25 bp, SARS Virus
tcgtgtcaacttcaccgtccatgaa

SEQ ID NO: 185329 - DNA, 25 bp, SARS Virus
cgtgtcaacttacccgtccatgaag

SEQ ID NO: 185330 - DNA, 25 bp, SARS Virus
gtgtcaacttaaccgtccatgaaga

SEQ ID NO: 185331 - DNA, 25 bp, SARS Virus
tgtcaacttaaccgtccatgaagac

SEQ ID NO: 185332 - DNA, 25 bp, SARS Virus
gtcaacttaaccctccatgaagaca

SEQ ID NO: 185333 - DNA, 25 bp, SARS Virus
tcaacttaaccgcccatgaagacat

SEQ ID NO: 185334 - DNA, 25 bp, SARS Virus
caacttaaccgtccatgaagacatc

SEQ ID NO: 185335 - DNA, 25 bp, SARS Virus
aacttaaccgtccatgaagacatcg

SEQ ID NO: 185336 - DNA, 25 bp, SARS Virus
acttaaccgtccctgaagacatcgt

SEQ ID NO: 185337 - DNA, 25 bp, SARS Virus
cttaaccgtccacgaagacatcgta

SEQ ID NO: 185338 - DNA, 25 bp, SARS Virus
ttaaccgtccatcaagacatcgtaa

SEQ ID NO: 185339 - DNA, 25 bp, SARS Virus
taaccgtccatgcagacatcgtaaa

SEQ ID NO: 185340 - DNA, 25 bp, SARS Virus
aaccgtccatgacgacatcgtaaag

SEQ ID NO: 185341 - DNA, 25 bp, SARS Virus
accgtccatgaacacatcgtaaagg

SEQ ID NO: 185342 - DNA, 25 bp, SARS Virus
ccgtccatgaagccatcgtaaaggt

SEQ ID NO: 185343 - DNA, 25 bp, SARS Virus
cgtccatgaagacatcgtaaaggtc

SEQ ID NO: 185344 - DNA, 25 bp, SARS Virus
gtccatgaagacctcgtaaaggtcg

SEQ ID NO: 185345 - DNA, 25 bp, SARS Virus
tccatgaagacaccgtaaaggtcgg

SEQ ID NO: 185346 - DNA, 25 bp, SARS Virus
ccatgaagacatcgtaaaggtcgga

SEQ ID NO: 185347 - DNA, 25 bp, SARS Virus
catgaagacatcctaaaggtcggac

SEQ ID NO: 185348 - DNA, 25 bp, SARS Virus
atgaagacatcgcaaaggtcggact

SEQ ID NO: 185349 - DNA, 25 bp, SARS Virus
tgaagacatcgtcaaggtcggactt

SEQ ID NO: 185350 - DNA, 25 bp, SARS Virus
gaagacatcgtacaggtcggacttc

SEQ ID NO: 185351 - DNA, 25 bp, SARS Virus
aagacatcgtaacggtcggacttct

SEQ ID NO: 185352 - DNA, 25 bp, SARS Virus
agacatcgtaaacgtcggacttctg

SEQ ID NO: 185353 - DNA, 25 bp, SARS Virus
gacatcgtaaagctcggacttctgc

SEQ ID NO: 185354 - DNA, 25 bp, SARS Virus
acatcgtaaaggccggacttctgca

SEQ ID NO: 185355 - DNA, 25 bp, SARS Virus
catcgtaaaggtcggacttctgcat

SEQ ID NO: 185356 - DNA, 25 bp, SARS Virus
atcgtaaaggtccgacttctgcatg

SEQ ID NO: 185357 - DNA, 25 bp, SARS Virus
tcgtaaaggtcgcacttctgcatga

SEQ ID NO: 185358 - DNA, 25 bp, SARS Virus
cgtaaaggtcggccttctgcatgac

SEQ ID NO: 185359 - DNA, 25 bp, SARS Virus
gtaaaggtcggacttctgcatgaca

SEQ ID NO: 185360 - DNA, 25 bp, SARS Virus
taaaggtcggacctctgcatgacat

SEQ ID NO: 185361 - DNA, 25 bp, SARS Virus
aaaggtcggactcctgcatgacatc

SEQ ID NO: 185362 - DNA, 25 bp, SARS Virus
aaggtcggacttctgcatgacatcg

SEQ ID NO: 185363 - DNA, 25 bp, SARS Virus
aggtcggacttccgcatgacatcgt

SEQ ID NO: 185364 - DNA, 25 bp, SARS Virus
ggtcggacttctccatgacatcgtc

SEQ ID NO: 185365 - DNA, 25 bp, SARS Virus
gtcggacttctgcatgacatcgtcg

SEQ ID NO: 185366 - DNA, 25 bp, SARS Virus
tcggacttctgcctgacatcgtcga

SEQ ID NO: 185367 - DNA, 25 bp, SARS Virus
cggacttctgcacgacatcgtcgat

SEQ ID NO: 185368 - DNA, 25 bp, SARS Virus
ggacttctgcatcacatcgtcgatt

SEQ ID NO: 185369 - DNA, 25 bp, SARS Virus
gacttctgcatgccatcgtcgattt

SEQ ID NO: 185370 - DNA, 25 bp, SARS Virus
acttctgcatgacatcgtcgatttg

SEQ ID NO: 185371 - DNA, 25 bp, SARS Virus
cttctgcatgacctcgtcgatttga

SEQ ID NO: 185372 - DNA, 25 bp, SARS Virus
ttctgcatgacaccgtcgatttgac

SEQ ID NO: 185373 - DNA, 25 bp, SARS Virus
tctgcatgacatcgtcgatttgacg

SEQ ID NO: 185374 - DNA, 25 bp, SARS Virus
ctgcatgacatcctcgatttgacgg

SEQ ID NO: 185375 - DNA, 25 bp, SARS Virus
tgcatgacatcgccgatttgacggg

SEQ ID NO: 185376 - DNA, 25 bp, SARS Virus
gcatgacatcgtcgatttgacgggt

SEQ ID NO: 185377 - DNA, 25 bp, SARS Virus
catgacatcgtccatttgacgggtc

SEQ ID NO: 185378 - DNA, 25 bp, SARS Virus
atgacatcgtcgctttgacgggtcg

SEQ ID NO: 185379 - DNA, 25 bp, SARS Virus
tgacatcgtcgacttgacgggtcgt

SEQ ID NO: 185380 - DNA, 25 bp, SARS Virus
gacatcgtcgatctgacgggtcgtg

SEQ ID NO: 185381 - DNA, 25 bp, SARS Virus
acatcgtcgattcgacgggtcgtgg

SEQ ID NO: 185382 - DNA, 25 bp, SARS Virus
catcgtcgatttcacgggtcgtggt

SEQ ID NO: 185383 - DNA, 25 bp, SARS Virus
atcgtcgatttgccgggtcgtggta

SEQ ID NO: 185384 - DNA, 25 bp, SARS Virus
tcgtcgatttgacgggtcgtggtat

SEQ ID NO: 185385 - DNA, 25 bp, SARS Virus
cgtcgatttgaccggtcgtggtatg

SEQ ID NO: 185386 - DNA, 25 bp, SARS Virus
gtcgatttgacgcgtcgtggtatgg

SEQ ID NO: 185387 - DNA, 25 bp, SARS Virus
tcgatttgacggctcgtggtatgga

SEQ ID NO: 185388 - DNA, 25 bp, SARS Virus
cgatttgacgggccgtggtatggag

SEQ ID NO: 185389 - DNA, 25 bp, SARS Virus
gatttgacgggtcgtggtatggaga

SEQ ID NO: 185390 - DNA, 25 bp, SARS Virus
atttgacgggtcctggtatggagat

SEQ ID NO: 185391 - DNA, 25 bp, SARS Virus
tttgacgggtcgcggtatggagata

SEQ ID NO: 185392 - DNA, 25 bp, SARS Virus
ttgacgggtcgtcgtatggagataa

SEQ ID NO: 185393 - DNA, 25 bp, SARS Virus
tgacgggtcgtgctatggagataaa

SEQ ID NO: 185394 - DNA, 25 bp, SARS Virus
gacgggtcgtggcatggagataaat

SEQ ID NO: 185395 - DNA, 25 bp, SARS Virus
acgggtcgtggtctggagataaatc

SEQ ID NO: 185396 - DNA, 25 bp, SARS Virus
cgggtcgtggtacggagataaatcc

SEQ ID NO: 185397 - DNA, 25 bp, SARS Virus
gggtcgtggtatcgagataaatcca

SEQ ID NO: 185398 - DNA, 25 bp, SARS Virus
ggtcgtggtatgcagataaatccaa

SEQ ID NO: 185399 - DNA, 25 bp, SARS Virus
gtcgtggtatggcgataaatccaac

SEQ ID NO: 185400 - DNA, 25 bp, SARS Virus
tcgtggtatggacataaatccaaca

SEQ ID NO: 185401 - DNA, 25 bp, SARS Virus
cgtggtatggagctaaatccaacaa

SEQ ID NO: 185402 - DNA, 25 bp, SARS Virus
gtggtatggagacaaatccaacaaa

SEQ ID NO: 185403 - DNA, 25 bp, SARS Virus
tggtatggagatcaatccaacaaat

SEQ ID NO: 185404 - DNA, 25 bp, SARS Virus
ggtatggagatacatccaacaaatt

SEQ ID NO: 185405 - DNA, 25 bp, SARS Virus
gtatggagataactccaacaaattc

SEQ ID NO: 185406 - DNA, 25 bp, SARS Virus
tatggagataaacccaacaaattcg

SEQ ID NO: 185407 - DNA, 25 bp, SARS Virus
atggagataaatccaacaaattcgg

SEQ ID NO: 185408 - DNA, 25 bp, SARS Virus
tggagataaatccaacaaattcgga

SEQ ID NO: 185409 - DNA, 25 bp, SARS Virus
ggagataaatcccacaaattcggaa

SEQ ID NO: 185410 - DNA, 25 bp, SARS Virus
gagataaatccaccaaattcggaaa

SEQ ID NO: 185411 - DNA, 25 bp, SARS Virus
agataaatccaacaaattcggaaac

SEQ ID NO: 185412 - DNA, 25 bp, SARS Virus
gataaatccaaccaattcggaaact

SEQ ID NO: 185413 - DNA, 25 bp, SARS Virus
ataaatccaacacattcggaaacta

SEQ ID NO: 185414 - DNA, 25 bp, SARS Virus
taaatccaacaacttcggaaactac

SEQ ID NO: 185415 - DNA, 25 bp, SARS Virus
aaatccaacaaactcggaaactact

SEQ ID NO: 185416 - DNA, 25 bp, SARS Virus
aatccaacaaatccggaaactactt

SEQ ID NO: 185417 - DNA, 25 bp, SARS Virus
atccaacaaattcggaaactacttc

SEQ ID NO: 185418 - DNA, 25 bp, SARS Virus
tccaacaaattccgaaactacttca

SEQ ID NO: 185419 - DNA, 25 bp, SARS Virus
ccaacaaattcgcaaactacttcat

SEQ ID NO: 185420 - DNA, 25 bp, SARS Virus
caacaaattcggcaactacttcatg

SEQ ID NO: 185421 - DNA, 25 bp, SARS Virus
aacaaattcggacactacttcatgt

SEQ ID NO: 185422 - DNA, 25 bp, SARS Virus
acaaattcggaacctacttcatgtt

SEQ ID NO: 185423 - DNA, 25 bp, SARS Virus
caaattcggaaactacttcatgttc

SEQ ID NO: 185424 - DNA, 25 bp, SARS Virus
aaattcggaaaccacttcatgttca

SEQ ID NO: 185425 - DNA, 25 bp, SARS Virus
aattcggaaactccttcatgttcat

SEQ ID NO: 185426 - DNA, 25 bp, SARS Virus
attcggaaactacttcatgttcata

SEQ ID NO: 185427 - DNA, 25 bp, SARS Virus
ttcggaaactacctcatgttcataa

SEQ ID NO: 185428 - DNA, 25 bp, SARS Virus
tcggaaactactccatgttcataaa

SEQ ID NO: 185429 - DNA, 25 bp, SARS Virus
cggaaactacttcatgttcataaag

SEQ ID NO: 185430 - DNA, 25 bp, SARS Virus
ggaaactacttcctgttcataaagt

SEQ ID NO: 185431 - DNA, 25 bp, SARS Virus
gaaactacttcacgttcataaagtg

SEQ ID NO: 185432 - DNA, 25 bp, SARS Virus
aaactacttcatcttcataaagtga

SEQ ID NO: 185433 - DNA, 25 bp, SARS Virus
aactacttcatgctcataaagtgaa

SEQ ID NO: 185434 - DNA, 25 bp, SARS Virus
actacttcatgtccataaagtgaaa

SEQ ID NO: 185435 - DNA, 25 bp, SARS Virus
ctacttcatgttcataaagtgaaat

SEQ ID NO: 185436 - DNA, 25 bp, SARS Virus
tacttcatgttcctaaagtgaaatc

SEQ ID NO: 185437 - DNA, 25 bp, SARS Virus
acttcatgttcacaaagtgaaatcc

SEQ ID NO: 185438 - DNA, 25 bp, SARS Virus
cttcatgttcatcaagtgaaatccg

SEQ ID NO: 185439 - DNA, 25 bp, SARS Virus
ttcatgttcatacagtgaaatccgg

SEQ ID NO: 185440 - DNA, 25 bp, SARS Virus
tcatgttcataacgtgaaatccggg

SEQ ID NO: 185441 - DNA, 25 bp, SARS Virus
catgttcataaactgaaatccggga

SEQ ID NO: 185442 - DNA, 25 bp, SARS Virus
atgttcataaagcgaaatccgggaa

SEQ ID NO: 185443 - DNA, 25 bp, SARS Virus
tgttcataaagtcaaatccgggaaa

SEQ ID NO: 185444 - DNA, 25 bp, SARS Virus
gttcataaagtgcaatccgggaaaa

SEQ ID NO: 185445 - DNA, 25 bp, SARS Virus
ttcataaagtgacatccgggaaaac

SEQ ID NO: 185446 - DNA, 25 bp, SARS Virus
tcataaagtgaactccgggaaaacc

SEQ ID NO: 185447 - DNA, 25 bp, SARS Virus
cataaagtgaaacccgggaaaacca

SEQ ID NO: 185448 - DNA, 25 bp, SARS Virus
ataaagtgaaatccgggaaaaccac

SEQ ID NO: 185449 - DNA, 25 bp, SARS Virus
taaagtgaaatccgggaaaaccaca

SEQ ID NO: 185450 - DNA, 25 bp, SARS Virus
aaagtgaaatcccggaaaaccacac

SEQ ID NO: 185451 - DNA, 25 bp, SARS Virus
aagtgaaatccgcgaaaaccacaca

SEQ ID NO: 185452 - DNA, 25 bp, SARS Virus
agtgaaatccggcaaaaccacacag

SEQ ID NO: 185453 - DNA, 25 bp, SARS Virus
gtgaaatccgggcaaaccacacaga

SEQ ID NO: 185454 - DNA, 25 bp, SARS Virus
tgaaatccgggacaaccacacagac

SEQ ID NO: 185455 - DNA, 25 bp, SARS Virus
gaaatccgggaacaccacacagaca

SEQ ID NO: 185456 - DNA, 25 bp, SARS Virus
aaatccgggaaacccacacagacat

SEQ ID NO: 185457 - DNA, 25 bp, SARS Virus
aatccgggaaaaccacacagacatt

SEQ ID NO: 185458 - DNA, 25 bp, SARS Virus
atccgggaaaaccacacagacattg

SEQ ID NO: 185459 - DNA, 25 bp, SARS Virus
tccgggaaaaccccacagacattgt

SEQ ID NO: 185460 - DNA, 25 bp, SARS Virus
ccgggaaaaccacacagacattgtt

SEQ ID NO: 185461 - DNA, 25 bp, SARS Virus
cgggaaaaccacccagacattgttt

SEQ ID NO: 185462 - DNA, 25 bp, SARS Virus
gggaaaaccacacagacattgtttg

SEQ ID NO: 185463 - DNA, 25 bp, SARS Virus
ggaaaaccacaccgacattgtttgg

SEQ ID NO: 185464 - DNA, 25 bp, SARS Virus
gaaaaccacacacacattgtttgga

SEQ ID NO: 185465 - DNA, 25 bp, SARS Virus
aaaaccacacagccattgtttggat

SEQ ID NO: 185466 - DNA, 25 bp, SARS Virus
aaaccacacagacattgtttggatg

SEQ ID NO: 185467 - DNA, 25 bp, SARS Virus
aaccacacagaccttgtttggatgt

SEQ ID NO: 185468 - DNA, 25 bp, SARS Virus
accacacagacactgtttggatgtt

SEQ ID NO: 185469 - DNA, 25 bp, SARS Virus
ccacacagacatcgtttggatgttc

SEQ ID NO: 185470 - DNA, 25 bp, SARS Virus
cacacagacattctttggatgttcc

SEQ ID NO: 185471 - DNA, 25 bp, SARS Virus
acacagacattgcttggatgttcca

SEQ ID NO: 185472 - DNA, 25 bp, SARS Virus
cacagacattgtctggatgttccac

SEQ ID NO: 185473 - DNA, 25 bp, SARS Virus
tgtcggtattgggaaggtgtaaggc

SEQ ID NO: 185474 - DNA, 25 bp, SARS Virus
gtcggtattggagaggtgtaaggcg

SEQ ID NO: 185475 - DNA, 25 bp, SARS Virus
tcggtattggaagggtgtaaggcgt

SEQ ID NO: 185476 - DNA, 25 bp, SARS Virus
cggtattggaaaggtgtaaggcgtc

SEQ ID NO: 185477 - DNA, 25 bp, SARS Virus
ggtattggaaaggtgtaaggcgtct

SEQ ID NO: 185478 - DNA, 25 bp, SARS Virus
gtattggaaaggggtaaggcgtctg

SEQ ID NO: 185479 - DNA, 25 bp, SARS Virus
tattggaaaggtgtaaggcgtctgc

SEQ ID NO: 185480 - DNA, 25 bp, SARS Virus
attggaaaggtggaaggcgtctgcc

SEQ ID NO: 185481 - DNA, 25 bp, SARS Virus
ttggaaaggtgtgaggcgtctgcca

SEQ ID NO: 185482 - DNA, 25 bp, SARS Virus
tggaaaggtgtagggcgtctgccat

SEQ ID NO: 185483 - DNA, 25 bp, SARS Virus
ggaaaggtgtaaggcgtctgccatg

SEQ ID NO: 185484 - DNA, 25 bp, SARS Virus
gaaaggtgtaaggcgtctgccatgt

SEQ ID NO: 185485 - DNA, 25 bp, SARS Virus
aaaggtgtaaggggtctgccatgtc

SEQ ID NO: 185486 - DNA, 25 bp, SARS Virus
aaggtgtaaggcgtctgccatgtct

SEQ ID NO: 185487 - DNA, 25 bp, SARS Virus
aggtgtaaggcggctgccatgtctg

SEQ ID NO: 185488 - DNA, 25 bp, SARS Virus
ggtgtaaggcgtgtgccatgtctga

SEQ ID NO: 185489 - DNA, 25 bp, SARS Virus
gtgtaaggcgtcggccatgtctgac

SEQ ID NO: 185490 - DNA, 25 bp, SARS Virus
tgtaaggcgtctgccatgtctgaca

SEQ ID NO: 185491 - DNA, 25 bp, SARS Virus
gtaaggcgtctggcatgtctgacac

SEQ ID NO: 185492 - DNA, 25 bp, SARS Virus
taaggcgtctgcgatgtctgacaca

SEQ ID NO: 185493 - DNA, 25 bp, SARS Virus
aaggcgtctgccgtgtctgacacaa

SEQ ID NO: 185494 - DNA, 25 bp, SARS Virus
aggcgtctgccaggtctgacacaaa

SEQ ID NO: 185495 - DNA, 25 bp, SARS Virus
ggcgtctgccatgtctgacacaaag

SEQ ID NO: 185496 - DNA, 25 bp, SARS Virus
gcgtctgccatggctgacacaaaga

SEQ ID NO: 185497 - DNA, 25 bp, SARS Virus
cgtctgccatgtgtgacacaaagat

SEQ ID NO: 185498 - DNA, 25 bp, SARS Virus
gtctgccatgtcggacacaaagatt

SEQ ID NO: 185499 - DNA, 25 bp, SARS Virus
tctgccatgtctgacacaaagattc

SEQ ID NO: 185500 - DNA, 25 bp, SARS Virus
ctgccatgtctggcacaaagattca

SEQ ID NO: 185501 - DNA, 25 bp, SARS Virus
tgccatgtctgagacaaagattcac

SEQ ID NO: 185502 - DNA, 25 bp, SARS Virus
gccatgtctgacgcaaagattcaca

SEQ ID NO: 185503 - DNA, 25 bp, SARS Virus
ccatgtctgacagaaagattcacat

SEQ ID NO: 185504 - DNA, 25 bp, SARS Virus
catgtctgacacgaagattcacatt

SEQ ID NO: 185505 - DNA, 25 bp, SARS Virus
atgtctgacacagagattcacattt

SEQ ID NO: 185506 - DNA, 25 bp, SARS Virus
tgtctgacacaaggattcacatttt

SEQ ID NO: 185507 - DNA, 25 bp, SARS Virus
gtctgacacaaagattcacattttg

SEQ ID NO: 185508 - DNA, 25 bp, SARS Virus
tctgacacaaaggttcacattttgg

SEQ ID NO: 185509 - DNA, 25 bp, SARS Virus
ctgacacaaagagtcacattttggg

SEQ ID NO: 185510 - DNA, 25 bp, SARS Virus
tgacacaaagatgcacattttgggt

SEQ ID NO: 185511 - DNA, 25 bp, SARS Virus
gacacaaagattgacattttgggtg

SEQ ID NO: 185512 - DNA, 25 bp, SARS Virus
acacaaagattcgcattttgggtga

SEQ ID NO: 185513 - DNA, 25 bp, SARS Virus
cacaaagattcagattttgggtgac

SEQ ID NO: 185514 - DNA, 25 bp, SARS Virus
acaaagattcacgttttgggtgacc

SEQ ID NO: 185515 - DNA, 25 bp, SARS Virus
caaagattcacagtttgggtgaccc

SEQ ID NO: 185516 - DNA, 25 bp, SARS Virus
aaagattcacatgttgggtgaccca

SEQ ID NO: 185517 - DNA, 25 bp, SARS Virus
aagattcacattgtgggtgacccag

SEQ ID NO: 185518 - DNA, 25 bp, SARS Virus
agattcacatttggggtgacccagt

SEQ ID NO: 185519 - DNA, 25 bp, SARS Virus
gattcacattttgggtgacccagta

SEQ ID NO: 185520 - DNA, 25 bp, SARS Virus
attcacattttgggtgacccagtaa

SEQ ID NO: 185521 - DNA, 25 bp, SARS Virus
ttcacattttgggtgacccagtaat

SEQ ID NO: 185522 - DNA, 25 bp, SARS Virus
tcacattttgggggacccagtaatc

SEQ ID NO: 185523 - DNA, 25 bp, SARS Virus
cacattttgggtgacccagtaatcg

SEQ ID NO: 185524 - DNA, 25 bp, SARS Virus
acattttgggtggcccagtaatcgt

SEQ ID NO: 185525 - DNA, 25 bp, SARS Virus
cattttgggtgagccagtaatcgtg

SEQ ID NO: 185526 - DNA, 25 bp, SARS Virus
attttgggtgacgcagtaatcgtgt

SEQ ID NO: 185527 - DNA, 25 bp, SARS Virus
ttttgggtgaccgagtaatcgtgtt

SEQ ID NO: 185528 - DNA, 25 bp, SARS Virus
tttgggtgacccggtaatcgtgttc

SEQ ID NO: 185529 - DNA, 25 bp, SARS Virus
ttgggtgacccagtaatcgtgttca

SEQ ID NO: 185530 - DNA, 25 bp, SARS Virus
tgggtgacccaggaatcgtgttcac

SEQ ID NO: 185531 - DNA, 25 bp, SARS Virus
gggtgacccagtgatcgtgttcacc

SEQ ID NO: 185532 - DNA, 25 bp, SARS Virus
ggtgacccagtagtcgtgttcacca

SEQ ID NO: 185533 - DNA, 25 bp, SARS Virus
gtgacccagtaagcgtgttcaccat

SEQ ID NO: 185534 - DNA, 25 bp, SARS Virus
tgacccagtaatggtgttcaccatc

SEQ ID NO: 185535 - DNA, 25 bp, SARS Virus
gacccagtaatcgtgttcaccatcc

SEQ ID NO: 185536 - DNA, 25 bp, SARS Virus
acccagtaatcgggttcaccatcca

SEQ ID NO: 185537 - DNA, 25 bp, SARS Virus
cccagtaatcgtgttcaccatccat

SEQ ID NO: 185538 - DNA, 25 bp, SARS Virus
ccagtaatcgtggtcaccatccata

SEQ ID NO: 185539 - DNA, 25 bp, SARS Virus
cagtaatcgtgtgcaccatccataa

SEQ ID NO: 185540 - DNA, 25 bp, SARS Virus
agtaatcgtgttgaccatccataaa

SEQ ID NO: 185541 - DNA, 25 bp, SARS Virus
gtaatcgtgttcgccatccataaac

SEQ ID NO: 185542 - DNA, 25 bp, SARS Virus
taatcgtgttcagcatccataaacc

SEQ ID NO: 185543 - DNA, 25 bp, SARS Virus
aatcgtgttcacgatccataaacct

SEQ ID NO: 185544 - DNA, 25 bp, SARS Virus
atcgtgttcaccgtccataaacctg

SEQ ID NO: 185545 - DNA, 25 bp, SARS Virus
tcgtgttcaccagccataaacctgc

SEQ ID NO: 185546 - DNA, 25 bp, SARS Virus
cgtgttcaccatgcataaacctgca

SEQ ID NO: 185547 - DNA, 25 bp, SARS Virus
gtgttcaccatcgataaacctgcat

SEQ ID NO: 185548 - DNA, 25 bp, SARS Virus
tgttcaccatccgtaaacctgcatg

SEQ ID NO: 185549 - DNA, 25 bp, SARS Virus
gttcaccatccagaaacctgcatga

SEQ ID NO: 185550 - DNA, 25 bp, SARS Virus
ttcaccatccatgaacctgcatgaa

SEQ ID NO: 185551 - DNA, 25 bp, SARS Virus
tcaccatccatagacctgcatgaat

SEQ ID NO: 185552 - DNA, 25 bp, SARS Virus
caccatccataagcctgcatgaatg

SEQ ID NO: 185553 - DNA, 25 bp, SARS Virus
accatccataaagctgcatgaatgg

SEQ ID NO: 185554 - DNA, 25 bp, SARS Virus
ccatccataaacgtgcatgaatgga

SEQ ID NO: 185555 - DNA, 25 bp, SARS Virus
catccataaaccggcatgaatggaa

SEQ ID NO: 185556 - DNA, 25 bp, SARS Virus
atccataaacctgcatgaatggaaa

SEQ ID NO: 185557 - DNA, 25 bp, SARS Virus
tccataaacctggatgaatggaaag

SEQ ID NO: 185558 - DNA, 25 bp, SARS Virus
ccataaacctgcgtgaatggaaagt

SEQ ID NO: 185559 - DNA, 25 bp, SARS Virus
cataaacctgcaggaatggaaagtt

SEQ ID NO: 185560 - DNA, 25 bp, SARS Virus
ataaacctgcatgaatggaaagttc

SEQ ID NO: 185561 - DNA, 25 bp, SARS Virus
taaacctgcatggatggaaagttca

SEQ ID NO: 185562 - DNA, 25 bp, SARS Virus
aaacctgcatgagtggaaagttcag

SEQ ID NO: 185563 - DNA, 25 bp, SARS Virus
aacctgcatgaagggaaagttcagt

SEQ ID NO: 185564 - DNA, 25 bp, SARS Virus
acctgcatgaatggaaagttcagtg

SEQ ID NO: 185565 - DNA, 25 bp, SARS Virus
cctgcatgaatggaaagttcagtgt

SEQ ID NO: 185566 - DNA, 25 bp, SARS Virus
ctgcatgaatgggaagttcagtgtc

SEQ ID NO: 185567 - DNA, 25 bp, SARS Virus
tgcatgaatggagagttcagtgtct

SEQ ID NO: 185568 - DNA, 25 bp, SARS Virus
gcatgaatggaaggttcagtgtctt

SEQ ID NO: 185569 - DNA, 25 bp, SARS Virus
catgaatggaaagttcagtgtctta

SEQ ID NO: 185570 - DNA, 25 bp, SARS Virus
atgaatggaaaggtcagtgtcttag

SEQ ID NO: 185571 - DNA, 25 bp, SARS Virus
tgaatggaaagtgcagtgtcttagg

SEQ ID NO: 185572 - DNA, 25 bp, SARS Virus
gaatggaaagttgagtgtcttagga

SEQ ID NO: 185573 - DNA, 25 bp, SARS Virus
aatggaaagttcggtgtcttaggaa

SEQ ID NO: 185574 - DNA, 25 bp, SARS Virus
atggaaagttcagtgtcttaggaaa

SEQ ID NO: 185575 - DNA, 25 bp, SARS Virus
tggaaagttcagggtcttaggaaat

SEQ ID NO: 185576 - DNA, 25 bp, SARS Virus
ggaaagttcagtgtcttaggaaatc

SEQ ID NO: 185577 - DNA, 25 bp, SARS Virus
gaaagttcagtggcttaggaaatcc

SEQ ID NO: 185578 - DNA, 25 bp, SARS Virus
aaagttcagtgtgttaggaaatcct

SEQ ID NO: 185579 - DNA, 25 bp, SARS Virus
aagttcagtgtcgtaggaaatccta

SEQ ID NO: 185580 - DNA, 25 bp, SARS Virus
agttcagtgtctgaggaaatcctaa

SEQ ID NO: 185581 - DNA, 25 bp, SARS Virus
gttcagtgtcttgggaaatcctaaa

SEQ ID NO: 185582 - DNA, 25 bp, SARS Virus
ttcagtgtcttaggaaatcctaaac

SEQ ID NO: 185583 - DNA, 25 bp, SARS Virus
tcagtgtcttaggaaatcctaaacc

SEQ ID NO: 185584 - DNA, 25 bp, SARS Virus
cagtgtcttagggaatcctaaacct

SEQ ID NO: 185585 - DNA, 25 bp, SARS Virus
agtgtcttaggagatcctaaaccta

SEQ ID NO: 185586 - DNA, 25 bp, SARS Virus
gtgtcttaggaagtcctaaacctac

SEQ ID NO: 185587 - DNA, 25 bp, SARS Virus
tgtcttaggaaagcctaaacctacc

SEQ ID NO: 185588 - DNA, 25 bp, SARS Virus
gtcttaggaaatgctaaacctacca

SEQ ID NO: 185589 - DNA, 25 bp, SARS Virus
tcttaggaaatcgtaaacctaccag

SEQ ID NO: 185590 - DNA, 25 bp, SARS Virus
cttaggaaatccgaaacctaccagt

SEQ ID NO: 185591 - DNA, 25 bp, SARS Virus
ttaggaaatcctgaacctaccagtt

SEQ ID NO: 185592 - DNA, 25 bp, SARS Virus
taggaaatcctagacctaccagtta

SEQ ID NO: 185593 - DNA, 25 bp, SARS Virus
aggaaatcctaagcctaccagttac

SEQ ID NO: 185594 - DNA, 25 bp, SARS Virus
ggaaatcctaaagctaccagttaca

SEQ ID NO: 185595 - DNA, 25 bp, SARS Virus
gaaatcctaaacgtaccagttacac

SEQ ID NO: 185596 - DNA, 25 bp, SARS Virus
aaatcctaaaccgaccagttacacc

SEQ ID NO: 185597 - DNA, 25 bp, SARS Virus
aatcctaaacctgccagttacaccg

SEQ ID NO: 185598 - DNA, 25 bp, SARS Virus
atcctaaacctagcagttacaccgt

SEQ ID NO: 185599 - DNA, 25 bp, SARS Virus
tcctaaacctacgagttacaccgta

SEQ ID NO: 185600 - DNA, 25 bp, SARS Virus
cctaaacctaccggttacaccgtag

SEQ ID NO: 185601 - DNA, 25 bp, SARS Virus
ctaaacctaccagttacaccgtaga

SEQ ID NO: 185602 - DNA, 25 bp, SARS Virus
taaacctaccaggtacaccgtagat

SEQ ID NO: 185603 - DNA, 25 bp, SARS Virus
aaacctaccagtgacaccgtagatg

SEQ ID NO: 185604 - DNA, 25 bp, SARS Virus
aacctaccagttgcaccgtagatgt

SEQ ID NO: 185605 - DNA, 25 bp, SARS Virus
acctaccagttagaccgtagatgtt

SEQ ID NO: 185606 - DNA, 25 bp, SARS Virus
cctaccagttacgccgtagatgtta

SEQ ID NO: 185607 - DNA, 25 bp, SARS Virus
ctaccagttacagcgtagatgttat

SEQ ID NO: 185608 - DNA, 25 bp, SARS Virus
taccagttacacggtagatgttatg

SEQ ID NO: 185609 - DNA, 25 bp, SARS Virus
accagttacaccgtagatgttatgt

SEQ ID NO: 185610 - DNA, 25 bp, SARS Virus
ccagttacaccggagatgttatgtc

SEQ ID NO: 185611 - DNA, 25 bp, SARS Virus
cagttacaccgtggatgttatgtct

SEQ ID NO: 185612 - DNA, 25 bp, SARS Virus
agttacaccgtagatgttatgtctg

SEQ ID NO: 185613 - DNA, 25 bp, SARS Virus
gttacaccgtaggtgttatgtctgt

SEQ ID NO: 185614 - DNA, 25 bp, SARS Virus
ttacaccgtagaggttatgtctgtt

SEQ ID NO: 185615 - DNA, 25 bp, SARS Virus
tacaccgtagatgttatgtctgttg

SEQ ID NO: 185616 - DNA, 25 bp, SARS Virus
acaccgtagatggtatgtctgttgt

SEQ ID NO: 185617 - DNA, 25 bp, SARS Virus
caccgtagatgtgatgtctgttgta

SEQ ID NO: 185618 - DNA, 25 bp, SARS Virus
accgtagatgttgtgtctgttgtac

SEQ ID NO: 185619 - DNA, 25 bp, SARS Virus
ccgtagatgttaggtctgttgtact

SEQ ID NO: 185620 - DNA, 25 bp, SARS Virus
cgtagatgttatgtctgttgtactt

SEQ ID NO: 185621 - DNA, 25 bp, SARS Virus
gtagatgttatggctgttgtacttc

SEQ ID NO: 185622 - DNA, 25 bp, SARS Virus
tagatgttatgtgtgttgtacttcg

SEQ ID NO: 185623 - DNA, 25 bp, SARS Virus
agatgttatgtcggttgtacttcgt

SEQ ID NO: 185624 - DNA, 25 bp, SARS Virus
gatgttatgtctgttgtacttcgtg

SEQ ID NO: 185625 - DNA, 25 bp, SARS Virus
atgttatgtctggtgtacttcgtgg

SEQ ID NO: 185626 - DNA, 25 bp, SARS Virus
tgttatgtctgtggtacttcgtggt

SEQ ID NO: 185627 - DNA, 25 bp, SARS Virus
gttatgtctgttgtacttcgtggtg

SEQ ID NO: 185628 - DNA, 25 bp, SARS Virus
ttatgtctgttggacttcgtggtgg

SEQ ID NO: 185629 - DNA, 25 bp, SARS Virus
tatgtctgttgtgcttcgtggtggt

SEQ ID NO: 185630 - DNA, 25 bp, SARS Virus
atgtctgttgtagttcgtggtggtt

SEQ ID NO: 185631 - DNA, 25 bp, SARS Virus
tgtctgttgtacgtcgtggtggttt

SEQ ID NO: 185632 - DNA, 25 bp, SARS Virus
gtctgttgtactgcgtggtggtttc

SEQ ID NO: 185633 - DNA, 25 bp, SARS Virus
tctgttgtacttggtggtggtttcc

SEQ ID NO: 185634 - DNA, 25 bp, SARS Virus
ctgttgtacttcgtggtggtttcct

SEQ ID NO: 185635 - DNA, 25 bp, SARS Virus
tgttgtacttcggggtggtttcctg

SEQ ID NO: 185636 - DNA, 25 bp, SARS Virus
gttgtacttcgtggtggtttcctga

SEQ ID NO: 185637 - DNA, 25 bp, SARS Virus
ttgtacttcgtggtggtttcctgag

SEQ ID NO: 185638 - DNA, 25 bp, SARS Virus
tgtacttcgtgggggtttcctgaga

SEQ ID NO: 185639 - DNA, 25 bp, SARS Virus
gtacttcgtggtggtttcctgagaa

SEQ ID NO: 185640 - DNA, 25 bp, SARS Virus
tacttcgtggtggtttcctgagaac

SEQ ID NO: 185641 - DNA, 25 bp, SARS Virus
acttcgtggtgggttcctgagaacc

SEQ ID NO: 185642 - DNA, 25 bp, SARS Virus
cttcgtggtggtgtcctgagaacca

SEQ ID NO: 185643 - DNA, 25 bp, SARS Virus
ttcgtggtggttgcctgagaaccag

SEQ ID NO: 185644 - DNA, 25 bp, SARS Virus
tcgtggtggtttgctgagaaccagg

SEQ ID NO: 185645 - DNA, 25 bp, SARS Virus
cgtggtggtttcgtgagaaccaggt

SEQ ID NO: 185646 - DNA, 25 bp, SARS Virus
gtggtggtttccggagaaccaggta

SEQ ID NO: 185647 - DNA, 25 bp, SARS Virus
tggtggtttcctgagaaccaggtac

SEQ ID NO: 185648 - DNA, 25 bp, SARS Virus
ggtggtttcctgggaaccaggtaca

SEQ ID NO: 185649 - DNA, 25 bp, SARS Virus
gtggtttcctgagaaccaggtacaa

SEQ ID NO: 185650 - DNA, 25 bp, SARS Virus
tggtttcctgaggaccaggtacaat

SEQ ID NO: 185651 - DNA, 25 bp, SARS Virus
ggtttcctgagagccaggtacaatc

SEQ ID NO: 185652 - DNA, 25 bp, SARS Virus
gtttcctgagaagcaggtacaatcg

SEQ ID NO: 185653 - DNA, 25 bp, SARS Virus
tttcctgagaacgaggtacaatcga

SEQ ID NO: 185654 - DNA, 25 bp, SARS Virus
ttcctgagaaccgggtacaatcgaa

SEQ ID NO: 185655 - DNA, 25 bp, SARS Virus
tcctgagaaccaggtacaatcgaag

SEQ ID NO: 185656 - DNA, 25 bp, SARS Virus
cctgagaaccaggtacaatcgaaga

SEQ ID NO: 185657 - DNA, 25 bp, SARS Virus
ctgagaaccagggacaatcgaagac

SEQ ID NO: 185658 - DNA, 25 bp, SARS Virus
tgagaaccaggtgcaatcgaagacc

SEQ ID NO: 185659 - DNA, 25 bp, SARS Virus
gagaaccaggtagaatcgaagacca

SEQ ID NO: 185660 - DNA, 25 bp, SARS Virus
agaaccaggtacgatcgaagaccac

SEQ ID NO: 185661 - DNA, 25 bp, SARS Virus
gaaccaggtacagtcgaagaccaca

SEQ ID NO: 185662 - DNA, 25 bp, SARS Virus
aaccaggtacaagcgaagaccacaa

SEQ ID NO: 185663 - DNA, 25 bp, SARS Virus
accaggtacaatggaagaccacaat

SEQ ID NO: 185664 - DNA, 25 bp, SARS Virus
ccaggtacaatcgaagaccacaatg

SEQ ID NO: 185665 - DNA, 25 bp, SARS Virus
caggtacaatcggagaccacaatgt

SEQ ID NO: 185666 - DNA, 25 bp, SARS Virus
aggtacaatcgaggaccacaatgtc

SEQ ID NO: 185667 - DNA, 25 bp, SARS Virus
ggtacaatcgaagaccacaatgtca

SEQ ID NO: 185668 - DNA, 25 bp, SARS Virus
gtacaatcgaaggccacaatgtcat

SEQ ID NO: 185669 - DNA, 25 bp, SARS Virus
tacaatcgaagagcacaatgtcatt

SEQ ID NO: 185670 - DNA, 25 bp, SARS Virus
acaatcgaagacgacaatgtcatta

SEQ ID NO: 185671 - DNA, 25 bp, SARS Virus
caatcgaagaccgcaatgtcattaa

SEQ ID NO: 185672 - DNA, 25 bp, SARS Virus
aatcgaagaccagaatgtcattaac

SEQ ID NO: 185673 - DNA, 25 bp, SARS Virus
atcgaagaccacgatgtcattaacg

SEQ ID NO: 185674 - DNA, 25 bp, SARS Virus
tcgaagaccacagtgtcattaacgg

SEQ ID NO: 185675 - DNA, 25 bp, SARS Virus
cgaagaccacaaggtcattaacgga

SEQ ID NO: 185676 - DNA, 25 bp, SARS Virus
gaagaccacaatgtcattaacggac

SEQ ID NO: 185677 - DNA, 25 bp, SARS Virus
aagaccacaatggcattaacggaca

SEQ ID NO: 185678 - DNA, 25 bp, SARS Virus
agaccacaatgtgattaacggacag

SEQ ID NO: 185679 - DNA, 25 bp, SARS Virus
gaccacaatgtcgttaacggacagg

SEQ ID NO: 185680 - DNA, 25 bp, SARS Virus
accacaatgtcagtaacggacagga

SEQ ID NO: 185681 - DNA, 25 bp, SARS Virus
ccacaatgtcatgaacggacaggac

SEQ ID NO: 185682 - DNA, 25 bp, SARS Virus
cacaatgtcattgacggacaggaca

SEQ ID NO: 185683 - DNA, 25 bp, SARS Virus
acaatgtcattagcggacaggacat

SEQ ID NO: 185684 - DNA, 25 bp, SARS Virus
caatgtcattaagggacaggacatg

SEQ ID NO: 185685 - DNA, 25 bp, SARS Virus
aatgtcattaacggacaggacatgg

SEQ ID NO: 185686 - DNA, 25 bp, SARS Virus
atgtcattaacggacaggacatggt

SEQ ID NO: 185687 - DNA, 25 bp, SARS Virus
tgtcattaacgggcaggacatggtc

SEQ ID NO: 185688 - DNA, 25 bp, SARS Virus
gtcattaacggagaggacatggtca

SEQ ID NO: 185689 - DNA, 25 bp, SARS Virus
tcattaacggacgggacatggtcac

SEQ ID NO: 185690 - DNA, 25 bp, SARS Virus
cattaacggacaggacatggtcaca

SEQ ID NO: 185691 - DNA, 25 bp, SARS Virus
attaacggacaggacatggtcacac

SEQ ID NO: 185692 - DNA, 25 bp, SARS Virus
ttaacggacagggcatggtcacaca

SEQ ID NO: 185693 - DNA, 25 bp, SARS Virus
taacggacaggagatggtcacacac

SEQ ID NO: 185694 - DNA, 25 bp, SARS Virus
aacggacaggacgtggtcacacaca

SEQ ID NO: 185695 - DNA, 25 bp, SARS Virus
acggacaggacagggtcacacacat

SEQ ID NO: 185696 - DNA, 25 bp, SARS Virus
cggacaggacatggtcacacacatg

SEQ ID NO: 185697 - DNA, 25 bp, SARS Virus
ggacaggacatggtcacacacatgt

SEQ ID NO: 185698 - DNA, 25 bp, SARS Virus
gacaggacatgggcacacacatgtg

SEQ ID NO: 185699 - DNA, 25 bp, SARS Virus
acaggacatggtgacacacatgtgt

SEQ ID NO: 185700 - DNA, 25 bp, SARS Virus
caggacatggtcgcacacatgtgtt

SEQ ID NO: 185701 - DNA, 25 bp, SARS Virus
aggacatggtcagacacatgtgttg

SEQ ID NO: 185702 - DNA, 25 bp, SARS Virus
ggacatggtcacgcacatgtgttgt

SEQ ID NO: 185703 - DNA, 25 bp, SARS Virus
gacatggtcacagacatgtgttgta

SEQ ID NO: 185704 - DNA, 25 bp, SARS Virus
acatggtcacacgcatgtgttgtag

SEQ ID NO: 185705 - DNA, 25 bp, SARS Virus
catggtcacacagatgtgttgtaga

SEQ ID NO: 185706 - DNA, 25 bp, SARS Virus
atggtcacacacgtgtgttgtagaa

SEQ ID NO: 185707 - DNA, 25 bp, SARS Virus
tggtcacacacaggtgttgtagaag

SEQ ID NO: 185708 - DNA, 25 bp, SARS Virus
ggtcacacacatgtgttgtagaagt

SEQ ID NO: 185709 - DNA, 25 bp, SARS Virus
gtcacacacatgggttgtagaagtg

SEQ ID NO: 185710 - DNA, 25 bp, SARS Virus
tcacacacatgtgttgtagaagtgt

SEQ ID NO: 185711 - DNA, 25 bp, SARS Virus
cacacacatgtggtgtagaagtgtg

SEQ ID NO: 185712 - DNA, 25 bp, SARS Virus
acacacatgtgtggtagaagtgtgt

SEQ ID NO: 185713 - DNA, 25 bp, SARS Virus
cacacatgtgttgtagaagtgtgtc

SEQ ID NO: 185714 - DNA, 25 bp, SARS Virus
acacatgtgttggagaagtgtgtca

SEQ ID NO: 185715 - DNA, 25 bp, SARS Virus
cacatgtgttgtggaagtgtgtcaa

SEQ ID NO: 185716 - DNA, 25 bp, SARS Virus
acatgtgttgtagaagtgtgtcaac

SEQ ID NO: 185717 - DNA, 25 bp, SARS Virus
catgtgttgtaggagtgtgtcaacc

SEQ ID NO: 185718 - DNA, 25 bp, SARS Virus
atgtgttgtagaggtgtgtcaacca

SEQ ID NO: 185719 - DNA, 25 bp, SARS Virus
tgtgttgtagaagtgtgtcaaccac

SEQ ID NO: 185720 - DNA, 25 bp, SARS Virus
gtgttgtagaagggtgtcaaccact

SEQ ID NO: 185721 - DNA, 25 bp, SARS Virus
tgttgtagaagtgtgtcaaccacta

SEQ ID NO: 185722 - DNA, 25 bp, SARS Virus
gttgtagaagtgggtcaaccactaa

SEQ ID NO: 185723 - DNA, 25 bp, SARS Virus
ttgtagaagtgtgtcaaccactaac

SEQ ID NO: 185724 - DNA, 25 bp, SARS Virus
tgtagaagtgtggcaaccactaacc

SEQ ID NO: 185725 - DNA, 25 bp, SARS Virus
gtagaagtgtgtgaaccactaacca

SEQ ID NO: 185726 - DNA, 25 bp, SARS Virus
tagaagtgtgtcgaccactaaccaa

SEQ ID NO: 185727 - DNA, 25 bp, SARS Virus
agaagtgtgtcagccactaaccaac

SEQ ID NO: 185728 - DNA, 25 bp, SARS Virus
gaagtgtgtcaagcactaaccaaca

SEQ ID NO: 185729 - DNA, 25 bp, SARS Virus
aagtgtgtcaacgactaaccaacag

SEQ ID NO: 185730 - DNA, 25 bp, SARS Virus
agtgtgtcaaccgctaaccaacagg

SEQ ID NO: 185731 - DNA, 25 bp, SARS Virus
gtgtgtcaaccagtaaccaacagga

SEQ ID NO: 185732 - DNA, 25 bp, SARS Virus
tgtgtcaaccacgaaccaacaggag

SEQ ID NO: 185733 - DNA, 25 bp, SARS Virus
gtgtcaaccactgaccaacaggagg

SEQ ID NO: 185734 - DNA, 25 bp, SARS Virus
tgtcaaccactagccaacaggaggt

SEQ ID NO: 185735 - DNA, 25 bp, SARS Virus
gtcaaccactaagcaacaggaggtg

SEQ ID NO: 185736 - DNA, 25 bp, SARS Virus
tcaaccactaacgaacaggaggtga

SEQ ID NO: 185737 - DNA, 25 bp, SARS Virus
caaccactaaccgacaggaggtgaa

SEQ ID NO: 185738 - DNA, 25 bp, SARS Virus
aaccactaaccagcaggaggtgaac

SEQ ID NO: 185739 - DNA, 25 bp, SARS Virus
accactaaccaagaggaggtgaacg

SEQ ID NO: 185740 - DNA, 25 bp, SARS Virus
ccactaaccaacgggaggtgaacga

SEQ ID NO: 185741 - DNA, 25 bp, SARS Virus
cactaaccaacaggaggtgaacgat

SEQ ID NO: 185742 - DNA, 25 bp, SARS Virus
actaaccaacaggaggtgaacgatc

SEQ ID NO: 185743 - DNA, 25 bp, SARS Virus
ctaaccaacagggggtgaacgatcc

SEQ ID NO: 185744 - DNA, 25 bp, SARS Virus
taaccaacaggaggtgaacgatcca

SEQ ID NO: 185745 - DNA, 25 bp, SARS Virus
aaccaacaggaggtgaacgatccat

SEQ ID NO: 185746 - DNA, 25 bp, SARS Virus
accaacaggaggggaacgatccatt

SEQ ID NO: 185747 - DNA, 25 bp, SARS Virus
ccaacaggaggtgaacgatccatta

SEQ ID NO: 185748 - DNA, 25 bp, SARS Virus
caacaggaggtggacgatccattag

SEQ ID NO: 185749 - DNA, 25 bp, SARS Virus
aacaggaggtgagcgatccattagg

SEQ ID NO: 185750 - DNA, 25 bp, SARS Virus
acaggaggtgaaggatccattagga

SEQ ID NO: 185751 - DNA, 25 bp, SARS Virus
caggaggtgaacgatccattaggaa

SEQ ID NO: 185752 - DNA, 25 bp, SARS Virus
aggaggtgaacggtccattaggaat

SEQ ID NO: 185753 - DNA, 25 bp, SARS Virus
ggaggtgaacgagccattaggaata

SEQ ID NO: 185754 - DNA, 25 bp, SARS Virus
gaggtgaacgatgcattaggaatat

SEQ ID NO: 185755 - DNA, 25 bp, SARS Virus
aggtgaacgatcgattaggaatata

SEQ ID NO: 185756 - DNA, 25 bp, SARS Virus
ggtgaacgatccgttaggaatatac

SEQ ID NO: 185757 - DNA, 25 bp, SARS Virus
gtgaacgatccagtaggaatatacg

SEQ ID NO: 185758 - DNA, 25 bp, SARS Virus
tgaacgatccatgaggaatatacga

SEQ ID NO: 185759 - DNA, 25 bp, SARS Virus
gaacgatccattgggaatatacgaa

SEQ ID NO: 185760 - DNA, 25 bp, SARS Virus
aacgatccattaggaatatacgaaa

SEQ ID NO: 185761 - DNA, 25 bp, SARS Virus
acgatccattaggaatatacgaaat

SEQ ID NO: 185762 - DNA, 25 bp, SARS Virus
cgatccattagggatatacgaaatc

SEQ ID NO: 185763 - DNA, 25 bp, SARS Virus
gatccattaggagtatacgaaatcg

SEQ ID NO: 185764 - DNA, 25 bp, SARS Virus
atccattaggaagatacgaaatcgt

SEQ ID NO: 185765 - DNA, 25 bp, SARS Virus
tccattaggaatgtacgaaatcgtc

SEQ ID NO: 185766 - DNA, 25 bp, SARS Virus
ccattaggaatagacgaaatcgtcc

SEQ ID NO: 185767 - DNA, 25 bp, SARS Virus
cattaggaatatgcgaaatcgtccc

SEQ ID NO: 185768 - DNA, 25 bp, SARS Virus
attaggaatataggaaatcgtccca

SEQ ID NO: 185769 - DNA, 25 bp, SARS Virus
ttaggaatatacgaaatcgtcccag

SEQ ID NO: 185770 - DNA, 25 bp, SARS Virus
taggaatatacggaatcgtcccaga

SEQ ID NO: 185771 - DNA, 25 bp, SARS Virus
aggaatatacgagatcgtcccagat

SEQ ID NO: 185772 - DNA, 25 bp, SARS Virus
ggaatatacgaagtcgtcccagatg

SEQ ID NO: 185773 - DNA, 25 bp, SARS Virus
gaatatacgaaagcgtcccagatga

SEQ ID NO: 185774 - DNA, 25 bp, SARS Virus
aatatacgaaatggtcccagatgac

SEQ ID NO: 185775 - DNA, 25 bp, SARS Virus
atatacgaaatcgtcccagatgacg

SEQ ID NO: 185776 - DNA, 25 bp, SARS Virus
tatacgaaatcggcccagatgacgt

SEQ ID NO: 185777 - DNA, 25 bp, SARS Virus
atacgaaatcgtgccagatgacgtt

SEQ ID NO: 185778 - DNA, 25 bp, SARS Virus
tacgaaatcgtcgcagatgacgttt

SEQ ID NO: 185779 - DNA, 25 bp, SARS Virus
acgaaatcgtccgagatgacgtttt

SEQ ID NO: 185780 - DNA, 25 bp, SARS Virus
cgaaatcgtcccggatgacgttttc

SEQ ID NO: 185781 - DNA, 25 bp, SARS Virus
gaaatcgtcccagatgacgttttcg

SEQ ID NO: 185782 - DNA, 25 bp, SARS Virus
aaatcgtcccaggtgacgttttcgt

SEQ ID NO: 185783 - DNA, 25 bp, SARS Virus
aatcgtcccagaggacgttttcgtg

SEQ ID NO: 185784 - DNA, 25 bp, SARS Virus
atcgtcccagatgacgttttcgtgt

SEQ ID NO: 185785 - DNA, 25 bp, SARS Virus
tcgtcccagatggcgttttcgtgtc

SEQ ID NO: 185786 - DNA, 25 bp, SARS Virus
cgtcccagatgaggttttcgtgtct

SEQ ID NO: 185787 - DNA, 25 bp, SARS Virus
gtcccagatgacgttttcgtgtctt

SEQ ID NO: 185788 - DNA, 25 bp, SARS Virus
tcccagatgacggtttcgtgtcttc

SEQ ID NO: 185789 - DNA, 25 bp, SARS Virus
cccagatgacgtgttcgtgtcttcc

SEQ ID NO: 185790 - DNA, 25 bp, SARS Virus
ccagatgacgttgtcgtgtcttcct

SEQ ID NO: 185791 - DNA, 25 bp, SARS Virus
cagatgacgtttgcgtgtcttcctt

SEQ ID NO: 185792 - DNA, 25 bp, SARS Virus
agatgacgttttggtgtcttccttt

SEQ ID NO: 185793 - DNA, 25 bp, SARS Virus
gatgacgttttcgtgtcttcctttc

SEQ ID NO: 185794 - DNA, 25 bp, SARS Virus
atgacgttttcgggtcttcctttcg

SEQ ID NO: 185795 - DNA, 25 bp, SARS Virus
tgacgttttcgtgtcttcctttcgt

SEQ ID NO: 185796 - DNA, 25 bp, SARS Virus
gacgttttcgtggcttcctttcgtg

SEQ ID NO: 185797 - DNA, 25 bp, SARS Virus
acgttttcgtgtgttcctttcgtgt

SEQ ID NO: 185798 - DNA, 25 bp, SARS Virus
cgttttcgtgtcgtcctttcgtgtc

SEQ ID NO: 185799 - DNA, 25 bp, SARS Virus
gttttcgtgtctgcctttcgtgtca

SEQ ID NO: 185800 - DNA, 25 bp, SARS Virus
ttttcgtgtcttgctttcgtgtcaa

SEQ ID NO: 185801 - DNA, 25 bp, SARS Virus
tttcgtgtcttcgtttcgtgtcaac

SEQ ID NO: 185802 - DNA, 25 bp, SARS Virus
ttcgtgtcttccgttcgtgtcaact

SEQ ID NO: 185803 - DNA, 25 bp, SARS Virus
tcgtgtcttcctgtcgtgtcaactt

SEQ ID NO: 185804 - DNA, 25 bp, SARS Virus
cgtgtcttccttgcgtgtcaactta

SEQ ID NO: 185805 - DNA, 25 bp, SARS Virus
gtgtcttcctttggtgtcaacttaa

SEQ ID NO: 185806 - DNA, 25 bp, SARS Virus
tgtcttcctttcgtgtcaacttaac

SEQ ID NO: 185807 - DNA, 25 bp, SARS Virus
gtcttcctttcgggtcaacttaacc

SEQ ID NO: 185808 - DNA, 25 bp, SARS Virus
tcttcctttcgtgtcaacttaaccg

SEQ ID NO: 185809 - DNA, 25 bp, SARS Virus
cttcctttcgtggcaacttaaccgt

SEQ ID NO: 185810 - DNA, 25 bp, SARS Virus
ttcctttcgtgtgaacttaaccgtc

SEQ ID NO: 185811 - DNA, 25 bp, SARS Virus
tcctttcgtgtcgacttaaccgtcc

SEQ ID NO: 185812 - DNA, 25 bp, SARS Virus
cctttcgtgtcagcttaaccgtcca

SEQ ID NO: 185813 - DNA, 25 bp, SARS Virus
ctttcgtgtcaagttaaccgtccat

SEQ ID NO: 185814 - DNA, 25 bp, SARS Virus
tttcgtgtcaacgtaaccgtccatg

SEQ ID NO: 185815 - DNA, 25 bp, SARS Virus
ttcgtgtcaactgaaccgtccatga

SEQ ID NO: 185816 - DNA, 25 bp, SARS Virus
tcgtgtcaacttgaccgtccatgaa

SEQ ID NO: 185817 - DNA, 25 bp, SARS Virus
cgtgtcaacttagccgtccatgaag

SEQ ID NO: 185818 - DNA, 25 bp, SARS Virus
gtgtcaacttaagcgtccatgaaga

SEQ ID NO: 185819 - DNA, 25 bp, SARS Virus
tgtcaacttaacggtccatgaagac

SEQ ID NO: 185820 - DNA, 25 bp, SARS Virus
gtcaacttaaccgtccatgaagaca

SEQ ID NO: 185821 - DNA, 25 bp, SARS Virus
tcaacttaaccggccatgaagacat

SEQ ID NO: 185822 - DNA, 25 bp, SARS Virus
caacttaaccgtgcatgaagacatc

SEQ ID NO: 185823 - DNA, 25 bp, SARS Virus
aacttaaccgtcgatgaagacatcg

SEQ ID NO: 185824 - DNA, 25 bp, SARS Virus
acttaaccgtccgtgaagacatcgt

SEQ ID NO: 185825 - DNA, 25 bp, SARS Virus
cttaaccgtccaggaagacatcgta

SEQ ID NO: 185826 - DNA, 25 bp, SARS Virus
ttaaccgtccatgaagacatcgtaa

SEQ ID NO: 185827 - DNA, 25 bp, SARS Virus
taaccgtccatggagacatcgtaaa

SEQ ID NO: 185828 - DNA, 25 bp, SARS Virus
aaccgtccatgaggacatcgtaaag

SEQ ID NO: 185829 - DNA, 25 bp, SARS Virus
accgtccatgaagacatcgtaaagg

SEQ ID NO: 185830 - DNA, 25 bp, SARS Virus
ccgtccatgaaggcatcgtaaaggt

SEQ ID NO: 185831 - DNA, 25 bp, SARS Virus
cgtccatgaagagatcgtaaaggtc

SEQ ID NO: 185832 - DNA, 25 bp, SARS Virus
gtccatgaagacgtcgtaaaggtcg

SEQ ID NO: 185833 - DNA, 25 bp, SARS Virus
tccatgaagacagcgtaaaggtcgg

SEQ ID NO: 185834 - DNA, 25 bp, SARS Virus
ccatgaagacatggtaaaggtcgga

SEQ ID NO: 185835 - DNA, 25 bp, SARS Virus
catgaagacatcgtaaaggtcggac

SEQ ID NO: 185836 - DNA, 25 bp, SARS Virus
atgaagacatcggaaaggtcggact

SEQ ID NO: 185837 - DNA, 25 bp, SARS Virus
tgaagacatcgtgaaggtcggactt

SEQ ID NO: 185838 - DNA, 25 bp, SARS Virus
gaagacatcgtagaggtcggacttc

SEQ ID NO: 185839 - DNA, 25 bp, SARS Virus
aagacatcgtaagggtcggacttct

SEQ ID NO: 185840 - DNA, 25 bp, SARS Virus
agacatcgtaaaggtcggacttctg

SEQ ID NO: 185841 - DNA, 25 bp, SARS Virus
gacatcgtaaaggtcggacttctgc

SEQ ID NO: 185842 - DNA, 25 bp, SARS Virus
acatcgtaaagggcggacttctgca

SEQ ID NO: 185843 - DNA, 25 bp, SARS Virus
catcgtaaaggtgggacttctgcat

SEQ ID NO: 185844 - DNA, 25 bp, SARS Virus
atcgtaaaggtcggacttctgcatg

SEQ ID NO: 185845 - DNA, 25 bp, SARS Virus
tcgtaaaggtcggacttctgcatga

SEQ ID NO: 185846 - DNA, 25 bp, SARS Virus
cgtaaaggtcgggcttctgcatgac

SEQ ID NO: 185847 - DNA, 25 bp, SARS Virus
gtaaaggtcggagttctgcatgaca

SEQ ID NO: 185848 - DNA, 25 bp, SARS Virus
taaaggtcggacgtctgcatgacat

SEQ ID NO: 185849 - DNA, 25 bp, SARS Virus
aaaggtcggactgctgcatgacatc

SEQ ID NO: 185850 - DNA, 25 bp, SARS Virus
aaggtcggacttgtgcatgacatcg

SEQ ID NO: 185851 - DNA, 25 bp, SARS Virus
aggtcggacttcggcatgacatcgt

SEQ ID NO: 185852 - DNA, 25 bp, SARS Virus
ggtcggacttctgcatgacatcgtc

SEQ ID NO: 185853 - DNA, 25 bp, SARS Virus
gtcggacttctggatgacatcgtcg

SEQ ID NO: 185854 - DNA, 25 bp, SARS Virus
tcggacttctgcgtgacatcgtcga

SEQ ID NO: 185855 - DNA, 25 bp, SARS Virus
cggacttctgcaggacatcgtcgat

SEQ ID NO: 185856 - DNA, 25 bp, SARS Virus
ggacttctgcatgacatcgtcgatt

SEQ ID NO: 185857 - DNA, 25 bp, SARS Virus
gacttctgcatggcatcgtcgattt

SEQ ID NO: 185858 - DNA, 25 bp, SARS Virus
acttctgcatgagatcgtcgatttg

SEQ ID NO: 185859 - DNA, 25 bp, SARS Virus
cttctgcatgacgtcgtcgatttga

SEQ ID NO: 185860 - DNA, 25 bp, SARS Virus
ttctgcatgacagcgtcgatttgac

SEQ ID NO: 185861 - DNA, 25 bp, SARS Virus
tctgcatgacatggtcgatttgacg

SEQ ID NO: 185862 - DNA, 25 bp, SARS Virus
ctgcatgacatcgtcgatttgacgg

SEQ ID NO: 185863 - DNA, 25 bp, SARS Virus
tgcatgacatcggcgatttgacggg

SEQ ID NO: 185864 - DNA, 25 bp, SARS Virus
gcatgacatcgtggatttgacgggt

SEQ ID NO: 185865 - DNA, 25 bp, SARS Virus
catgacatcgtcgatttgacgggtc

SEQ ID NO: 185866 - DNA, 25 bp, SARS Virus
atgacatcgtcggtttgacgggtcg

SEQ ID NO: 185867 - DNA, 25 bp, SARS Virus
tgacatcgtcgagttgacgggtcgt

SEQ ID NO: 185868 - DNA, 25 bp, SARS Virus
gacatcgtcgatgtgacgggtcgtg

SEQ ID NO: 185869 - DNA, 25 bp, SARS Virus
acatcgtcgattggacgggtcgtgg

SEQ ID NO: 185870 - DNA, 25 bp, SARS Virus
catcgtcgatttgacgggtcgtggt

SEQ ID NO: 185871 - DNA, 25 bp, SARS Virus
atcgtcgatttggcgggtcgtggta

SEQ ID NO: 185872 - DNA, 25 bp, SARS Virus
tcgtcgatttgaggggtcgtggtat

SEQ ID NO: 185873 - DNA, 25 bp, SARS Virus
cgtcgatttgacgggtcgtggtatg

SEQ ID NO: 185874 - DNA, 25 bp, SARS Virus
gtcgatttgacgggtcgtggtatgg

SEQ ID NO: 185875 - DNA, 25 bp, SARS Virus
tcgatttgacgggtcgtggtatgga

SEQ ID NO: 185876 - DNA, 25 bp, SARS Virus
cgatttgacggggcgtggtatggag

SEQ ID NO: 185877 - DNA, 25 bp, SARS Virus
gatttgacgggtggtggtatggaga

SEQ ID NO: 185878 - DNA, 25 bp, SARS Virus
atttgacgggtcgtggtatggagat

SEQ ID NO: 185879 - DNA, 25 bp, SARS Virus
tttgacgggtcggggtatggagata

SEQ ID NO: 185880 - DNA, 25 bp, SARS Virus
ttgacgggtcgtggtatggagataa

SEQ ID NO: 185881 - DNA, 25 bp, SARS Virus
tgacgggtcgtggtatggagataaa

SEQ ID NO: 185882 - DNA, 25 bp, SARS Virus
gacgggtcgtgggatggagataaat

SEQ ID NO: 185883 - DNA, 25 bp, SARS Virus
acgggtcgtggtgtggagataaatc

SEQ ID NO: 185884 - DNA, 25 bp, SARS Virus
cgggtcgtggtagggagataaatcc

SEQ ID NO: 185885 - DNA, 25 bp, SARS Virus
gggtcgtggtatggagataaatcca

SEQ ID NO: 185886 - DNA, 25 bp, SARS Virus
ggtcgtggtatggagataaatccaa

SEQ ID NO: 185887 - DNA, 25 bp, SARS Virus
gtcgtggtatggggataaatccaac

SEQ ID NO: 185888 - DNA, 25 bp, SARS Virus
tcgtggtatggagataaatccaaca

SEQ ID NO: 185889 - DNA, 25 bp, SARS Virus
cgtggtatggaggtaaatccaacaa

SEQ ID NO: 185890 - DNA, 25 bp, SARS Virus
gtggtatggagagaaatccaacaaa

SEQ ID NO: 185891 - DNA, 25 bp, SARS Virus
tggtatggagatgaatccaacaaat

SEQ ID NO: 185892 - DNA, 25 bp, SARS Virus
ggtatggagatagatccaacaaatt

SEQ ID NO: 185893 - DNA, 25 bp, SARS Virus
gtatggagataagtccaacaaattc

SEQ ID NO: 185894 - DNA, 25 bp, SARS Virus
tatggagataaagccaacaaattcg

SEQ ID NO: 185895 - DNA, 25 bp, SARS Virus
atggagataaatgcaacaaattcgg

SEQ ID NO: 185896 - DNA, 25 bp, SARS Virus
tggagataaatcgaacaaattcgga

SEQ ID NO: 185897 - DNA, 25 bp, SARS Virus
ggagataaatccgacaaattcggaa

SEQ ID NO: 185898 - DNA, 25 bp, SARS Virus
gagataaatccagcaaattcggaaa

SEQ ID NO: 185899 - DNA, 25 bp, SARS Virus
agataaatccaagaaattcggaaac

SEQ ID NO: 185900 - DNA, 25 bp, SARS Virus
gataaatccaacgaattcggaaact

SEQ ID NO: 185901 - DNA, 25 bp, SARS Virus
ataaatccaacagattcggaaacta

SEQ ID NO: 185902 - DNA, 25 bp, SARS Virus
taaatccaacaagttcggaaactac

SEQ ID NO: 185903 - DNA, 25 bp, SARS Virus
aaatccaacaaagtcggaaactact

SEQ ID NO: 185904 - DNA, 25 bp, SARS Virus
aatccaacaaatgcggaaactactt

SEQ ID NO: 185905 - DNA, 25 bp, SARS Virus
atccaacaaattgggaaactacttc

SEQ ID NO: 185906 - DNA, 25 bp, SARS Virus
tccaacaaattcggaaactacttca

SEQ ID NO: 185907 - DNA, 25 bp, SARS Virus
ccaacaaattcggaaactacttcat

SEQ ID NO: 185908 - DNA, 25 bp, SARS Virus
caacaaattcgggaactacttcatg

SEQ ID NO: 185909 - DNA, 25 bp, SARS Virus
aacaaattcggagactacttcatgt

SEQ ID NO: 185910 - DNA, 25 bp, SARS Virus
acaaattcggaagctacttcatgtt

SEQ ID NO: 185911 - DNA, 25 bp, SARS Virus
caaattcggaaagtacttcatgttc

SEQ ID NO: 185912 - DNA, 25 bp, SARS Virus
aaattcggaaacgacttcatgttca

SEQ ID NO: 185913 - DNA, 25 bp, SARS Virus
aattcggaaactgcttcatgttcat

SEQ ID NO: 185914 - DNA, 25 bp, SARS Virus
attcggaaactagttcatgttcata

SEQ ID NO: 185915 - DNA, 25 bp, SARS Virus
ttcggaaactacgtcatgttcataa

SEQ ID NO: 185916 - DNA, 25 bp, SARS Virus
tcggaaactactgcatgttcataaa

SEQ ID NO: 185917 - DNA, 25 bp, SARS Virus
cggaaactacttgatgttcataaag

SEQ ID NO: 185918 - DNA, 25 bp, SARS Virus
ggaaactacttcgtgttcataaagt

SEQ ID NO: 185919 - DNA, 25 bp, SARS Virus
gaaactacttcaggttcataaagtg

SEQ ID NO: 185920 - DNA, 25 bp, SARS Virus
aaactacttcatgttcataaagtga

SEQ ID NO: 185921 - DNA, 25 bp, SARS Virus
aactacttcatggtcataaagtgaa

SEQ ID NO: 185922 - DNA, 25 bp, SARS Virus
actacttcatgtgcataaagtgaaa

SEQ ID NO: 185923 - DNA, 25 bp, SARS Virus
ctacttcatgttgataaagtgaaat

SEQ ID NO: 185924 - DNA, 25 bp, SARS Virus
tacttcatgttcgtaaagtgaaatc

SEQ ID NO: 185925 - DNA, 25 bp, SARS Virus
acttcatgttcagaaagtgaaatcc

SEQ ID NO: 185926 - DNA, 25 bp, SARS Virus
cttcatgttcatgaagtgaaatccg

SEQ ID NO: 185927 - DNA, 25 bp, SARS Virus
ttcatgttcatagagtgaaatccgg

SEQ ID NO: 185928 - DNA, 25 bp, SARS Virus
tcatgttcataaggtgaaatccggg

SEQ ID NO: 185929 - DNA, 25 bp, SARS Virus
catgttcataaagtgaaatccggga

SEQ ID NO: 185930 - DNA, 25 bp, SARS Virus
atgttcataaagggaaatccgggaa

SEQ ID NO: 185931 - DNA, 25 bp, SARS Virus
tgttcataaagtgaaatccgggaaa

SEQ ID NO: 185932 - DNA, 25 bp, SARS Virus
gttcataaagtggaatccgggaaaa

SEQ ID NO: 185933 - DNA, 25 bp, SARS Virus
ttcataaagtgagatccgggaaaac

SEQ ID NO: 185934 - DNA, 25 bp, SARS Virus
tcataaagtgaagtccgggaaaacc

SEQ ID NO: 185935 - DNA, 25 bp, SARS Virus
cataaagtgaaagccgggaaaacca

SEQ ID NO: 185936 - DNA, 25 bp, SARS Virus
ataaagtgaaatgcgggaaaaccac

SEQ ID NO: 185937 - DNA, 25 bp, SARS Virus
taaagtgaaatcggggaaaaccaca

SEQ ID NO: 185938 - DNA, 25 bp, SARS Virus
aaagtgaaatccgggaaaaccacac

SEQ ID NO: 185939 - DNA, 25 bp, SARS Virus
aagtgaaatccgggaaaaccacaca

SEQ ID NO: 185940 - DNA, 25 bp, SARS Virus
agtgaaatccgggaaaaccacacag

SEQ ID NO: 185941 - DNA, 25 bp, SARS Virus
gtgaaatccggggaaaccacacaga

SEQ ID NO: 185942 - DNA, 25 bp, SARS Virus
tgaaatccgggagaaccacacagac

SEQ ID NO: 185943 - DNA, 25 bp, SARS Virus
gaaatccgggaagaccacacagaca

SEQ ID NO: 185944 - DNA, 25 bp, SARS Virus
aaatccgggaaagccacacagacat

SEQ ID NO: 185945 - DNA, 25 bp, SARS Virus
aatccgggaaaagcacacagacatt

SEQ ID NO: 185946 - DNA, 25 bp, SARS Virus
atccgggaaaacgacacagacattg

SEQ ID NO: 185947 - DNA, 25 bp, SARS Virus
tccgggaaaaccgcacagacattgt

SEQ ID NO: 185948 - DNA, 25 bp, SARS Virus
ccgggaaaaccagacagacattgtt

SEQ ID NO: 185949 - DNA, 25 bp, SARS Virus
cgggaaaaccacgcagacattgttt

SEQ ID NO: 185950 - DNA, 25 bp, SARS Virus
gggaaaaccacagagacattgtttg

SEQ ID NO: 185951 - DNA, 25 bp, SARS Virus
ggaaaaccacacggacattgtttgg

SEQ ID NO: 185952 - DNA, 25 bp, SARS Virus
gaaaaccacacagacattgtttgga

SEQ ID NO: 185953 - DNA, 25 bp, SARS Virus
aaaaccacacaggcattgtttggat

SEQ ID NO: 185954 - DNA, 25 bp, SARS Virus
aaaccacacagagattgtttggatg

SEQ ID NO: 185955 - DNA, 25 bp, SARS Virus
aaccacacagacgttgtttggatgt

SEQ ID NO: 185956 - DNA, 25 bp, SARS Virus
accacacagacagtgtttggatgtt

SEQ ID NO: 185957 - DNA, 25 bp, SARS Virus
ccacacagacatggtttggatgttc

SEQ ID NO: 185958 - DNA, 25 bp, SARS Virus
cacacagacattgtttggatgttcc

SEQ ID NO: 185959 - DNA, 25 bp, SARS Virus
acacagacattggttggatgttcca

SEQ ID NO: 185960 - DNA, 25 bp, SARS Virus
cacagacattgtgtggatgttccac

SEQ ID NO: 185961 - DNA, 25 bp, SARS Virus
tgtcggtattggtaaggtgtaaggc

SEQ ID NO: 185962 - DNA, 25 bp, SARS Virus
gtcggtattggataggtgtaaggcg

SEQ ID NO: 185963 - DNA, 25 bp, SARS Virus
tcggtattggaatggtgtaaggcgt

SEQ ID NO: 185964 - DNA, 25 bp, SARS Virus
cggtattggaaatgtgtaaggcgtc

SEQ ID NO: 185965 - DNA, 25 bp, SARS Virus
ggtattggaaagttgtaaggcgtct

SEQ ID NO: 185966 - DNA, 25 bp, SARS Virus
gtattggaaaggtgtaaggcgtctg

SEQ ID NO: 185967 - DNA, 25 bp, SARS Virus
tattggaaaggtttaaggcgtctgc

SEQ ID NO: 185968 - DNA, 25 bp, SARS Virus
attggaaaggtgtaaggcgtctgcc

SEQ ID NO: 185969 - DNA, 25 bp, SARS Virus
ttggaaaggtgttaggcgtctgcca

SEQ ID NO: 185970 - DNA, 25 bp, SARS Virus
tggaaaggtgtatggcgtctgccat

SEQ ID NO: 185971 - DNA, 25 bp, SARS Virus
ggaaaggtgtaatgcgtctgccatg

SEQ ID NO: 185972 - DNA, 25 bp, SARS Virus
gaaaggtgtaagtcgtctgccatgt

SEQ ID NO: 185973 - DNA, 25 bp, SARS Virus
aaaggtgtaaggtgtctgccatgtc

SEQ ID NO: 185974 - DNA, 25 bp, SARS Virus
aaggtgtaaggcttctgccatgtct

SEQ ID NO: 185975 - DNA, 25 bp, SARS Virus
aggtgtaaggcgtctgccatgtctg

SEQ ID NO: 185976 - DNA, 25 bp, SARS Virus
ggtgtaaggcgtttgccatgtctga

SEQ ID NO: 185977 - DNA, 25 bp, SARS Virus
gtgtaaggcgtctgccatgtctgac

SEQ ID NO: 185978 - DNA, 25 bp, SARS Virus
tgtaaggcgtcttccatgtctgaca

SEQ ID NO: 185979 - DNA, 25 bp, SARS Virus
gtaaggcgtctgtcatgtctgacac

SEQ ID NO: 185980 - DNA, 25 bp, SARS Virus
taaggcgtctgctatgtctgacaca

SEQ ID NO: 185981 - DNA, 25 bp, SARS Virus
aaggcgtctgccttgtctgacacaa

SEQ ID NO: 185982 - DNA, 25 bp, SARS Virus
aggcgtctgccatgtctgacacaaa

SEQ ID NO: 185983 - DNA, 25 bp, SARS Virus
ggcgtctgccatttctgacacaaag

SEQ ID NO: 185984 - DNA, 25 bp, SARS Virus
gcgtctgccatgtctgacacaaaga

SEQ ID NO: 185985 - DNA, 25 bp, SARS Virus
cgtctgccatgtttgacacaaagat

SEQ ID NO: 185986 - DNA, 25 bp, SARS Virus
gtctgccatgtctgacacaaagatt

SEQ ID NO: 185987 - DNA, 25 bp, SARS Virus
tctgccatgtcttacacaaagattc

SEQ ID NO: 185988 - DNA, 25 bp, SARS Virus
ctgccatgtctgtcacaaagattca

SEQ ID NO: 185989 - DNA, 25 bp, SARS Virus
tgccatgtctgatacaaagattcac

SEQ ID NO: 185990 - DNA, 25 bp, SARS Virus
gccatgtctgactcaaagattcaca

SEQ ID NO: 185991 - DNA, 25 bp, SARS Virus
ccatgtctgacataaagattcacat

SEQ ID NO: 185992 - DNA, 25 bp, SARS Virus
catgtctgacactaagattcacatt

SEQ ID NO: 185993 - DNA, 25 bp, SARS Virus
atgtctgacacatagattcacattt

SEQ ID NO: 185994 - DNA, 25 bp, SARS Virus
tgtctgacacaatgattcacatttt

SEQ ID NO: 185995 - DNA, 25 bp, SARS Virus
gtctgacacaaatattcacattttg

SEQ ID NO: 185996 - DNA, 25 bp, SARS Virus
tctgacacaaagtttcacattttgg

SEQ ID NO: 185997 - DNA, 25 bp, SARS Virus
ctgacacaaagattcacattttggg

SEQ ID NO: 185998 - DNA, 25 bp, SARS Virus
tgacacaaagattcacattttgggt

SEQ ID NO: 185999 - DNA, 25 bp, SARS Virus
gacacaaagatttacattttgggtg

SEQ ID NO: 186000 - DNA, 25 bp, SARS Virus
acacaaagattctcattttgggtga

SEQ ID NO: 186001 - DNA, 25 bp, SARS Virus
cacaaagattcatattttgggtgac

SEQ ID NO: 186002 - DNA, 25 bp, SARS Virus
acaaagattcactttttgggtgacc

SEQ ID NO: 186003 - DNA, 25 bp, SARS Virus
caaagattcacattttgggtgaccc

SEQ ID NO: 186004 - DNA, 25 bp, SARS Virus
aaagattcacattttgggtgaccca

SEQ ID NO: 186005 - DNA, 25 bp, SARS Virus
aagattcacattttgggtgacccag

SEQ ID NO: 186006 - DNA, 25 bp, SARS Virus
agattcacattttgggtgacccagt

SEQ ID NO: 186007 - DNA, 25 bp, SARS Virus
gattcacatttttggtgacccagta

SEQ ID NO: 186008 - DNA, 25 bp, SARS Virus
attcacattttgtgtgacccagtaa

SEQ ID NO: 186009 - DNA, 25 bp, SARS Virus
ttcacattttggttgacccagtaat

SEQ ID NO: 186010 - DNA, 25 bp, SARS Virus
tcacattttgggtgacccagtaatc

SEQ ID NO: 186011 - DNA, 25 bp, SARS Virus
cacattttgggttacccagtaatcg

SEQ ID NO: 186012 - DNA, 25 bp, SARS Virus
acattttgggtgtcccagtaatcgt

SEQ ID NO: 186013 - DNA, 25 bp, SARS Virus
cattttgggtgatccagtaatcgtg

SEQ ID NO: 186014 - DNA, 25 bp, SARS Virus
attttgggtgactcagtaatcgtgt

SEQ ID NO: 186015 - DNA, 25 bp, SARS Virus
ttttgggtgacctagtaatcgtgtt

SEQ ID NO: 186016 - DNA, 25 bp, SARS Virus
tttgggtgaccctgtaatcgtgttc

SEQ ID NO: 186017 - DNA, 25 bp, SARS Virus
ttgggtgacccattaatcgtgttca

SEQ ID NO: 186018 - DNA, 25 bp, SARS Virus
tgggtgacccagtaatcgtgttcac

SEQ ID NO: 186019 - DNA, 25 bp, SARS Virus
gggtgacccagttatcgtgttcacc

SEQ ID NO: 186020 - DNA, 25 bp, SARS Virus
ggtgacccagtattcgtgttcacca

SEQ ID NO: 186021 - DNA, 25 bp, SARS Virus
gtgacccagtaatcgtgttcaccat

SEQ ID NO: 186022 - DNA, 25 bp, SARS Virus
tgacccagtaattgtgttcaccatc

SEQ ID NO: 186023 - DNA, 25 bp, SARS Virus
gacccagtaatcttgttcaccatcc

SEQ ID NO: 186024 - DNA, 25 bp, SARS Virus
acccagtaatcgtgttcaccatcca

SEQ ID NO: 186025 - DNA, 25 bp, SARS Virus
cccagtaatcgttttcaccatccat

SEQ ID NO: 186026 - DNA, 25 bp, SARS Virus
ccagtaatcgtgttcaccatccata

SEQ ID NO: 186027 - DNA, 25 bp, SARS Virus
cagtaatcgtgttcaccatccataa

SEQ ID NO: 186028 - DNA, 25 bp, SARS Virus
agtaatcgtgtttaccatccataaa

SEQ ID NO: 186029 - DNA, 25 bp, SARS Virus
gtaatcgtgttctccatccataaac

SEQ ID NO: 186030 - DNA, 25 bp, SARS Virus
taatcgtgttcatcatccataaacc

SEQ ID NO: 186031 - DNA, 25 bp, SARS Virus
aatcgtgttcactatccataaacct

SEQ ID NO: 186032 - DNA, 25 bp, SARS Virus
atcgtgttcaccttccataaacctg

SEQ ID NO: 186033 - DNA, 25 bp, SARS Virus
tcgtgttcaccatccataaacctgc

SEQ ID NO: 186034 - DNA, 25 bp, SARS Virus
cgtgttcaccattcataaacctgca

SEQ ID NO: 186035 - DNA, 25 bp, SARS Virus
gtgttcaccatctataaacctgcat

SEQ ID NO: 186036 - DNA, 25 bp, SARS Virus
tgttcaccatccttaaacctgcatg

SEQ ID NO: 186037 - DNA, 25 bp, SARS Virus
gttcaccatccataaacctgcatga

SEQ ID NO: 186038 - DNA, 25 bp, SARS Virus
ttcaccatccattaacctgcatgaa

SEQ ID NO: 186039 - DNA, 25 bp, SARS Virus
tcaccatccatatacctgcatgaat

SEQ ID NO: 186040 - DNA, 25 bp, SARS Virus
caccatccataatcctgcatgaatg

SEQ ID NO: 186041 - DNA, 25 bp, SARS Virus
accatccataaatctgcatgaatgg

SEQ ID NO: 186042 - DNA, 25 bp, SARS Virus
ccatccataaacttgcatgaatgga

SEQ ID NO: 186043 - DNA, 25 bp, SARS Virus
catccataaacctgcatgaatggaa

SEQ ID NO: 186044 - DNA, 25 bp, SARS Virus
atccataaaccttcatgaatggaaa

SEQ ID NO: 186045 - DNA, 25 bp, SARS Virus
tccataaacctgtatgaatggaaag

SEQ ID NO: 186046 - DNA, 25 bp, SARS Virus
ccataaacctgcttgaatggaaagt

SEQ ID NO: 186047 - DNA, 25 bp, SARS Virus
cataaacctgcatgaatggaaagtt

SEQ ID NO: 186048 - DNA, 25 bp, SARS Virus
ataaacctgcattaatggaaagttc

SEQ ID NO: 186049 - DNA, 25 bp, SARS Virus
taaacctgcatgtatggaaagttca

SEQ ID NO: 186050 - DNA, 25 bp, SARS Virus
aaacctgcatgattggaaagttcag

SEQ ID NO: 186051 - DNA, 25 bp, SARS Virus
aacctgcatgaatggaaagttcagt

SEQ ID NO: 186052 - DNA, 25 bp, SARS Virus
acctgcatgaattgaaagttcagtg

SEQ ID NO: 186053 - DNA, 25 bp, SARS Virus
cctgcatgaatgtaaagttcagtgt

SEQ ID NO: 186054 - DNA, 25 bp, SARS Virus
ctgcatgaatggtaagttcagtgtc

SEQ ID NO: 186055 - DNA, 25 bp, SARS Virus
tgcatgaatggatagttcagtgtct

SEQ ID NO: 186056 - DNA, 25 bp, SARS Virus
gcatgaatggaatgttcagtgtctt

SEQ ID NO: 186057 - DNA, 25 bp, SARS Virus
catgaatggaaatttcagtgtctta

SEQ ID NO: 186058 - DNA, 25 bp, SARS Virus
atgaatggaaagttcagtgtcttag

SEQ ID NO: 186059 - DNA, 25 bp, SARS Virus
tgaatggaaagttcagtgtcttagg

SEQ ID NO: 186060 - DNA, 25 bp, SARS Virus
gaatggaaagtttagtgtcttagga

SEQ ID NO: 186061 - DNA, 25 bp, SARS Virus
aatggaaagttctgtgtcttaggaa

SEQ ID NO: 186062 - DNA, 25 bp, SARS Virus
atggaaagttcattgtcttaggaaa

SEQ ID NO: 186063 - DNA, 25 bp, SARS Virus
tggaaagttcagtgtcttaggaaat

SEQ ID NO: 186064 - DNA, 25 bp, SARS Virus
ggaaagttcagtttcttaggaaatc

SEQ ID NO: 186065 - DNA, 25 bp, SARS Virus
gaaagttcagtgtcttaggaaatcc

SEQ ID NO: 186066 - DNA, 25 bp, SARS Virus
aaagttcagtgttttaggaaatcct

SEQ ID NO: 186067 - DNA, 25 bp, SARS Virus
aagttcagtgtcttaggaaatccta

SEQ ID NO: 186068 - DNA, 25 bp, SARS Virus
agttcagtgtcttaggaaatcctaa

SEQ ID NO: 186069 - DNA, 25 bp, SARS Virus
gttcagtgtctttggaaatcctaaa

SEQ ID NO: 186070 - DNA, 25 bp, SARS Virus
ttcagtgtcttatgaaatcctaaac

SEQ ID NO: 186071 - DNA, 25 bp, SARS Virus
tcagtgtcttagtaaatcctaaacc

SEQ ID NO: 186072 - DNA, 25 bp, SARS Virus
cagtgtcttaggtaatcctaaacct

SEQ ID NO: 186073 - DNA, 25 bp, SARS Virus
agtgtcttaggatatcctaaaccta

SEQ ID NO: 186074 - DNA, 25 bp, SARS Virus
gtgtcttaggaattcctaaacctac

SEQ ID NO: 186075 - DNA, 25 bp, SARS Virus
tgtcttaggaaatcctaaacctacc

SEQ ID NO: 186076 - DNA, 25 bp, SARS Virus
gtcttaggaaattctaaacctacca

SEQ ID NO: 186077 - DNA, 25 bp, SARS Virus
tcttaggaaatcttaaacctaccag

SEQ ID NO: 186078 - DNA, 25 bp, SARS Virus
cttaggaaatcctaaacctaccagt

SEQ ID NO: 186079 - DNA, 25 bp, SARS Virus
ttaggaaatccttaacctaccagtt

SEQ ID NO: 186080 - DNA, 25 bp, SARS Virus
taggaaatcctatacctaccagtta

SEQ ID NO: 186081 - DNA, 25 bp, SARS Virus
aggaaatcctaatcctaccagttac

SEQ ID NO: 186082 - DNA, 25 bp, SARS Virus
ggaaatcctaaatctaccagttaca

SEQ ID NO: 186083 - DNA, 25 bp, SARS Virus
gaaatcctaaacttaccagttacac

SEQ ID NO: 186084 - DNA, 25 bp, SARS Virus
aaatcctaaacctaccagttacacc

SEQ ID NO: 186085 - DNA, 25 bp, SARS Virus
aatcctaaaccttccagttacaccg

SEQ ID NO: 186086 - DNA, 25 bp, SARS Virus
atcctaaacctatcagttacaccgt

SEQ ID NO: 186087 - DNA, 25 bp, SARS Virus
tcctaaacctactagttacaccgta

SEQ ID NO: 186088 - DNA, 25 bp, SARS Virus
cctaaacctacctgttacaccgtag

SEQ ID NO: 186089 - DNA, 25 bp, SARS Virus
ctaaacctaccatttacaccgtaga

SEQ ID NO: 186090 - DNA, 25 bp, SARS Virus
taaacctaccagttacaccgtagat

SEQ ID NO: 186091 - DNA, 25 bp, SARS Virus
aaacctaccagttacaccgtagatg

SEQ ID NO: 186092 - DNA, 25 bp, SARS Virus
aacctaccagtttcaccgtagatgt

SEQ ID NO: 186093 - DNA, 25 bp, SARS Virus
acctaccagttataccgtagatgtt

SEQ ID NO: 186094 - DNA, 25 bp, SARS Virus
cctaccagttactccgtagatgtta

SEQ ID NO: 186095 - DNA, 25 bp, SARS Virus
ctaccagttacatcgtagatgttat

SEQ ID NO: 186096 - DNA, 25 bp, SARS Virus
taccagttacactgtagatgttatg

SEQ ID NO: 186097 - DNA, 25 bp, SARS Virus
accagttacaccttagatgttatgt

SEQ ID NO: 186098 - DNA, 25 bp, SARS Virus
ccagttacaccgtagatgttatgtc

SEQ ID NO: 186099 - DNA, 25 bp, SARS Virus
cagttacaccgttgatgttatgtct

SEQ ID NO: 186100 - DNA, 25 bp, SARS Virus
agttacaccgtatatgttatgtctg

SEQ ID NO: 186101 - DNA, 25 bp, SARS Virus
gttacaccgtagttgttatgtctgt

SEQ ID NO: 186102 - DNA, 25 bp, SARS Virus
ttacaccgtagatgttatgtctgtt

SEQ ID NO: 186103 - DNA, 25 bp, SARS Virus
tacaccgtagattttatgtctgttg

SEQ ID NO: 186104 - DNA, 25 bp, SARS Virus
acaccgtagatgttatgtctgttgt

SEQ ID NO: 186105 - DNA, 25 bp, SARS Virus
caccgtagatgttatgtctgttgta

SEQ ID NO: 186106 - DNA, 25 bp, SARS Virus
accgtagatgttttgtctgttgtac

SEQ ID NO: 186107 - DNA, 25 bp, SARS Virus
ccgtagatgttatgtctgttgtact

SEQ ID NO: 186108 - DNA, 25 bp, SARS Virus
cgtagatgttatttctgttgtactt

SEQ ID NO: 186109 - DNA, 25 bp, SARS Virus
gtagatgttatgtctgttgtacttc

SEQ ID NO: 186110 - DNA, 25 bp, SARS Virus
tagatgttatgtttgttgtacttcg

SEQ ID NO: 186111 - DNA, 25 bp, SARS Virus
agatgttatgtctgttgtacttcgt

SEQ ID NO: 186112 - DNA, 25 bp, SARS Virus
gatgttatgtcttttgtacttcgtg

SEQ ID NO: 186113 - DNA, 25 bp, SARS Virus
atgttatgtctgttgtacttcgtgg

SEQ ID NO: 186114 - DNA, 25 bp, SARS Virus
tgttatgtctgttgtacttcgtggt

SEQ ID NO: 186115 - DNA, 25 bp, SARS Virus
gttatgtctgttttacttcgtggtg

SEQ ID NO: 186116 - DNA, 25 bp, SARS Virus
ttatgtctgttgtacttcgtggtgg

SEQ ID NO: 186117 - DNA, 25 bp, SARS Virus
tatgtctgttgttcttcgtggtggt

SEQ ID NO: 186118 - DNA, 25 bp, SARS Virus
atgtctgttgtatttcgtggtggtt

SEQ ID NO: 186119 - DNA, 25 bp, SARS Virus
tgtctgttgtacttcgtggtggttt

SEQ ID NO: 186120 - DNA, 25 bp, SARS Virus
gtctgttgtacttcgtggtggtttc

SEQ ID NO: 186121 - DNA, 25 bp, SARS Virus
tctgttgtactttgtggtggtttcc

SEQ ID NO: 186122 - DNA, 25 bp, SARS Virus
ctgttgtacttcttggtggtttcct

SEQ ID NO: 186123 - DNA, 25 bp, SARS Virus
tgttgtacttcgtggtggtttcctg

SEQ ID NO: 186124 - DNA, 25 bp, SARS Virus
gttgtacttcgttgtggtttcctga

SEQ ID NO: 186125 - DNA, 25 bp, SARS Virus
ttgtacttcgtgttggtttcctgag

SEQ ID NO: 186126 - DNA, 25 bp, SARS Virus
tgtacttcgtggtggtttcctgaga

SEQ ID NO: 186127 - DNA, 25 bp, SARS Virus
gtacttcgtggttgtttcctgagaa

SEQ ID NO: 186128 - DNA, 25 bp, SARS Virus
tacttcgtggtgttttcctgagaac

SEQ ID NO: 186129 - DNA, 25 bp, SARS Virus
acttcgtggtggtttcctgagaacc

SEQ ID NO: 186130 - DNA, 25 bp, SARS Virus
cttcgtggtggtttcctgagaacca

SEQ ID NO: 186131 - DNA, 25 bp, SARS Virus
ttcgtggtggtttcctgagaaccag

SEQ ID NO: 186132 - DNA, 25 bp, SARS Virus
tcgtggtggttttctgagaaccagg

SEQ ID NO: 186133 - DNA, 25 bp, SARS Virus
cgtggtggtttcttgagaaccaggt

SEQ ID NO: 186134 - DNA, 25 bp, SARS Virus
gtggtggtttcctgagaaccaggta

SEQ ID NO: 186135 - DNA, 25 bp, SARS Virus
tggtggtttccttagaaccaggtac

SEQ ID NO: 186136 - DNA, 25 bp, SARS Virus
ggtggtttcctgtgaaccaggtaca

SEQ ID NO: 186137 - DNA, 25 bp, SARS Virus
gtggtttcctgataaccaggtacaa

SEQ ID NO: 186138 - DNA, 25 bp, SARS Virus
tggtttcctgagtaccaggtacaat

SEQ ID NO: 186139 - DNA, 25 bp, SARS Virus
ggtttcctgagatccaggtacaatc

SEQ ID NO: 186140 - DNA, 25 bp, SARS Virus
gtttcctgagaatcaggtacaatcg

SEQ ID NO: 186141 - DNA, 25 bp, SARS Virus
tttcctgagaactaggtacaatcga

SEQ ID NO: 186142 - DNA, 25 bp, SARS Virus
ttcctgagaacctggtacaatcgaa

SEQ ID NO: 186143 - DNA, 25 bp, SARS Virus
tcctgagaaccatgtacaatcgaag

SEQ ID NO: 186144 - DNA, 25 bp, SARS Virus
cctgagaaccagttacaatcgaaga

SEQ ID NO: 186145 - DNA, 25 bp, SARS Virus
ctgagaaccaggtacaatcgaagac

SEQ ID NO: 186146 - DNA, 25 bp, SARS Virus
tgagaaccaggttcaatcgaagacc

SEQ ID NO: 186147 - DNA, 25 bp, SARS Virus
gagaaccaggtataatcgaagacca

SEQ ID NO: 186148 - DNA, 25 bp, SARS Virus
agaaccaggtactatcgaagaccac

SEQ ID NO: 186149 - DNA, 25 bp, SARS Virus
gaaccaggtacattcgaagaccaca

SEQ ID NO: 186150 - DNA, 25 bp, SARS Virus
aaccaggtacaatcgaagaccacaa

SEQ ID NO: 186151 - DNA, 25 bp, SARS Virus
accaggtacaattgaagaccacaat

SEQ ID NO: 186152 - DNA, 25 bp, SARS Virus
ccaggtacaatctaagaccacaatg

SEQ ID NO: 186153 - DNA, 25 bp, SARS Virus
caggtacaatcgtagaccacaatgt

SEQ ID NO: 186154 - DNA, 25 bp, SARS Virus
aggtacaatcgatgaccacaatgtc

SEQ ID NO: 186155 - DNA, 25 bp, SARS Virus
ggtacaatcgaataccacaatgtca

SEQ ID NO: 186156 - DNA, 25 bp, SARS Virus
gtacaatcgaagtccacaatgtcat

SEQ ID NO: 186157 - DNA, 25 bp, SARS Virus
tacaatcgaagatcacaatgtcatt

SEQ ID NO: 186158 - DNA, 25 bp, SARS Virus
acaatcgaagactacaatgtcatta

SEQ ID NO: 186159 - DNA, 25 bp, SARS Virus
caatcgaagacctcaatgtcattaa

SEQ ID NO: 186160 - DNA, 25 bp, SARS Virus
aatcgaagaccataatgtcattaac

SEQ ID NO: 186161 - DNA, 25 bp, SARS Virus
atcgaagaccactatgtcattaacg

SEQ ID NO: 186162 - DNA, 25 bp, SARS Virus
tcgaagaccacattgtcattaacgg

SEQ ID NO: 186163 - DNA, 25 bp, SARS Virus
cgaagaccacaatgtcattaacgga

SEQ ID NO: 186164 - DNA, 25 bp, SARS Virus
gaagaccacaatttcattaacggac

SEQ ID NO: 186165 - DNA, 25 bp, SARS Virus
aagaccacaatgtcattaacggaca

SEQ ID NO: 186166 - DNA, 25 bp, SARS Virus
agaccacaatgttattaacggacag

SEQ ID NO: 186167 - DNA, 25 bp, SARS Virus
gaccacaatgtctttaacggacagg

SEQ ID NO: 186168 - DNA, 25 bp, SARS Virus
accacaatgtcattaacggacagga

SEQ ID NO: 186169 - DNA, 25 bp, SARS Virus
ccacaatgtcattaacggacaggac

SEQ ID NO: 186170 - DNA, 25 bp, SARS Virus
cacaatgtcatttacggacaggaca

SEQ ID NO: 186171 - DNA, 25 bp, SARS Virus
acaatgtcattatcggacaggacat

SEQ ID NO: 186172 - DNA, 25 bp, SARS Virus
caatgtcattaatggacaggacatg

SEQ ID NO: 186173 - DNA, 25 bp, SARS Virus
aatgtcattaactgacaggacatgg

SEQ ID NO: 186174 - DNA, 25 bp, SARS Virus
atgtcattaacgtacaggacatggt

SEQ ID NO: 186175 - DNA, 25 bp, SARS Virus
tgtcattaacggtcaggacatggtc

SEQ ID NO: 186176 - DNA, 25 bp, SARS Virus
gtcattaacggataggacatggtca

SEQ ID NO: 186177 - DNA, 25 bp, SARS Virus
tcattaacggactggacatggtcac

SEQ ID NO: 186178 - DNA, 25 bp, SARS Virus
cattaacggacatgacatggtcaca

SEQ ID NO: 186179 - DNA, 25 bp, SARS Virus
attaacggacagtacatggtcacac

SEQ ID NO: 186180 - DNA, 25 bp, SARS Virus
ttaacggacaggtcatggtcacaca

SEQ ID NO: 186181 - DNA, 25 bp, SARS Virus
taacggacaggatatggtcacacac

SEQ ID NO: 186182 - DNA, 25 bp, SARS Virus
aacggacaggacttggtcacacaca

SEQ ID NO: 186183 - DNA, 25 bp, SARS Virus
acggacaggacatggtcacacacat

SEQ ID NO: 186184 - DNA, 25 bp, SARS Virus
cggacaggacattgtcacacacatg

SEQ ID NO: 186185 - DNA, 25 bp, SARS Virus
ggacaggacatgttcacacacatgt

SEQ ID NO: 186186 - DNA, 25 bp, SARS Virus
gacaggacatggtcacacacatgtg

SEQ ID NO: 186187 - DNA, 25 bp, SARS Virus
acaggacatggttacacacatgtgt

SEQ ID NO: 186188 - DNA, 25 bp, SARS Virus
caggacatggtctcacacatgtgtt

SEQ ID NO: 186189 - DNA, 25 bp, SARS Virus
aggacatggtcatacacatgtgttg

SEQ ID NO: 186190 - DNA, 25 bp, SARS Virus
ggacatggtcactcacatgtgttgt

SEQ ID NO: 186191 - DNA, 25 bp, SARS Virus
gacatggtcacatacatgtgttgta

SEQ ID NO: 186192 - DNA, 25 bp, SARS Virus
acatggtcacactcatgtgttgtag

SEQ ID NO: 186193 - DNA, 25 bp, SARS Virus
catggtcacacatatgtgttgtaga

SEQ ID NO: 186194 - DNA, 25 bp, SARS Virus
atggtcacacacttgtgttgtagaa

SEQ ID NO: 186195 - DNA, 25 bp, SARS Virus
tggtcacacacatgtgttgtagaag

SEQ ID NO: 186196 - DNA, 25 bp, SARS Virus
ggtcacacacatttgttgtagaagt

SEQ ID NO: 186197 - DNA, 25 bp, SARS Virus
gtcacacacatgtgttgtagaagtg

SEQ ID NO: 186198 - DNA, 25 bp, SARS Virus
tcacacacatgttttgtagaagtgt

SEQ ID NO: 186199 - DNA, 25 bp, SARS Virus
cacacacatgtgttgtagaagtgtg

SEQ ID NO: 186200 - DNA, 25 bp, SARS Virus
acacacatgtgttgtagaagtgtgt

SEQ ID NO: 186201 - DNA, 25 bp, SARS Virus
cacacatgtgttttagaagtgtgtc

SEQ ID NO: 186202 - DNA, 25 bp, SARS Virus
acacatgtgttgtagaagtgtgtca

SEQ ID NO: 186203 - DNA, 25 bp, SARS Virus
cacatgtgttgttgaagtgtgtcaa

SEQ ID NO: 186204 - DNA, 25 bp, SARS Virus
acatgtgttgtataagtgtgtcaac

SEQ ID NO: 186205 - DNA, 25 bp, SARS Virus
catgtgttgtagtagtgtgtcaacc

SEQ ID NO: 186206 - DNA, 25 bp, SARS Virus
atgtgttgtagatgtgtgtcaacca

SEQ ID NO: 186207 - DNA, 25 bp, SARS Virus
tgtgttgtagaattgtgtcaaccac

SEQ ID NO: 186208 - DNA, 25 bp, SARS Virus
gtgttgtagaagtgtgtcaaccact

SEQ ID NO: 186209 - DNA, 25 bp, SARS Virus
tgttgtagaagtttgtcaaccacta

SEQ ID NO: 186210 - DNA, 25 bp, SARS Virus
gttgtagaagtgtgtcaaccactaa

SEQ ID NO: 186211 - DNA, 25 bp, SARS Virus
ttgtagaagtgtttcaaccactaac

SEQ ID NO: 186212 - DNA, 25 bp, SARS Virus
tgtagaagtgtgtcaaccactaacc

SEQ ID NO: 186213 - DNA, 25 bp, SARS Virus
gtagaagtgtgttaaccactaacca

SEQ ID NO: 186214 - DNA, 25 bp, SARS Virus
tagaagtgtgtctaccactaaccaa

SEQ ID NO: 186215 - DNA, 25 bp, SARS Virus
agaagtgtgtcatccactaaccaac

SEQ ID NO: 186216 - DNA, 25 bp, SARS Virus
gaagtgtgtcaatcactaaccaaca

SEQ ID NO: 186217 - DNA, 25 bp, SARS Virus
aagtgtgtcaactactaaccaacag

SEQ ID NO: 186218 - DNA, 25 bp, SARS Virus
agtgtgtcaacctctaaccaacagg

SEQ ID NO: 186219 - DNA, 25 bp, SARS Virus
gtgtgtcaaccattaaccaacagga

SEQ ID NO: 186220 - DNA, 25 bp, SARS Virus
tgtgtcaaccactaaccaacaggag

SEQ ID NO: 186221 - DNA, 25 bp, SARS Virus
gtgtcaaccacttaccaacaggagg

SEQ ID NO: 186222 - DNA, 25 bp, SARS Virus
tgtcaaccactatccaacaggaggt

SEQ ID NO: 186223 - DNA, 25 bp, SARS Virus
gtcaaccactaatcaacaggaggtg

SEQ ID NO: 186224 - DNA, 25 bp, SARS Virus
tcaaccactaactaacaggaggtga

SEQ ID NO: 186225 - DNA, 25 bp, SARS Virus
caaccactaacctacaggaggtgaa

SEQ ID NO: 186226 - DNA, 25 bp, SARS Virus
aaccactaaccatcaggaggtgaac

SEQ ID NO: 186227 - DNA, 25 bp, SARS Virus
accactaaccaataggaggtgaacg

SEQ ID NO: 186228 - DNA, 25 bp, SARS Virus
ccactaaccaactggaggtgaacga

SEQ ID NO: 186229 - DNA, 25 bp, SARS Virus
cactaaccaacatgaggtgaacgat

SEQ ID NO: 186230 - DNA, 25 bp, SARS Virus
actaaccaacagtaggtgaacgatc

SEQ ID NO: 186231 - DNA, 25 bp, SARS Virus
ctaaccaacaggtggtgaacgatcc

SEQ ID NO: 186232 - DNA, 25 bp, SARS Virus
taaccaacaggatgtgaacgatcca

SEQ ID NO: 186233 - DNA, 25 bp, SARS Virus
aaccaacaggagttgaacgatccat

SEQ ID NO: 186234 - DNA, 25 bp, SARS Virus
accaacaggaggtgaacgatccatt

SEQ ID NO: 186235 - DNA, 25 bp, SARS Virus
ccaacaggaggttaacgatccatta

SEQ ID NO: 186236 - DNA, 25 bp, SARS Virus
caacaggaggtgtacgatccattag

SEQ ID NO: 186237 - DNA, 25 bp, SARS Virus
aacaggaggtgatcgatccattagg

SEQ ID NO: 186238 - DNA, 25 bp, SARS Virus
acaggaggtgaatgatccattagga

SEQ ID NO: 186239 - DNA, 25 bp, SARS Virus
caggaggtgaactatccattaggaa

SEQ ID NO: 186240 - DNA, 25 bp, SARS Virus
aggaggtgaacgttccattaggaat

SEQ ID NO: 186241 - DNA, 25 bp, SARS Virus
ggaggtgaacgatccattaggaata

SEQ ID NO: 186242 - DNA, 25 bp, SARS Virus
gaggtgaacgattcattaggaatat

SEQ ID NO: 186243 - DNA, 25 bp, SARS Virus
aggtgaacgatctattaggaatata

SEQ ID NO: 186244 - DNA, 25 bp, SARS Virus
ggtgaacgatcctttaggaatatac

SEQ ID NO: 186245 - DNA, 25 bp, SARS Virus
gtgaacgatccattaggaatatacg

SEQ ID NO: 186246 - DNA, 25 bp, SARS Virus
tgaacgatccattaggaatatacga

SEQ ID NO: 186247 - DNA, 25 bp, SARS Virus
gaacgatccatttggaatatacgaa

SEQ ID NO: 186248 - DNA, 25 bp, SARS Virus
aacgatccattatgaatatacgaaa

SEQ ID NO: 186249 - DNA, 25 bp, SARS Virus
acgatccattagtaatatacgaaat

SEQ ID NO: 186250 - DNA, 25 bp, SARS Virus
cgatccattaggtatatacgaaatc

SEQ ID NO: 186251 - DNA, 25 bp, SARS Virus
gatccattaggattatacgaaatcg

SEQ ID NO: 186252 - DNA, 25 bp, SARS Virus
atccattaggaatatacgaaatcgt

SEQ ID NO: 186253 - DNA, 25 bp, SARS Virus
tccattaggaatttacgaaatcgtc

SEQ ID NO: 186254 - DNA, 25 bp, SARS Virus
ccattaggaatatacgaaatcgtcc

SEQ ID NO: 186255 - DNA, 25 bp, SARS Virus
cattaggaatattcgaaatcgtccc

SEQ ID NO: 186256 - DNA, 25 bp, SARS Virus
attaggaatatatgaaatcgtccca

SEQ ID NO: 186257 - DNA, 25 bp, SARS Virus
ttaggaatatactaaatcgtcccag

SEQ ID NO: 186258 - DNA, 25 bp, SARS Virus
taggaatatacgtaatcgtcccaga

SEQ ID NO: 186259 - DNA, 25 bp, SARS Virus
aggaatatacgatatcgtcccagat

SEQ ID NO: 186260 - DNA, 25 bp, SARS Virus
ggaatatacgaattcgtcccagatg

SEQ ID NO: 186261 - DNA, 25 bp, SARS Virus
gaatatacgaaatcgtcccagatga

SEQ ID NO: 186262 - DNA, 25 bp, SARS Virus
aatatacgaaattgtcccagatgac

SEQ ID NO: 186263 - DNA, 25 bp, SARS Virus
atatacgaaatcttcccagatgacg

SEQ ID NO: 186264 - DNA, 25 bp, SARS Virus
tatacgaaatcgtcccagatgacgt

SEQ ID NO: 186265 - DNA, 25 bp, SARS Virus
atacgaaatcgttccagatgacgtt

SEQ ID NO: 186266 - DNA, 25 bp, SARS Virus
tacgaaatcgtctcagatgacgttt

SEQ ID NO: 186267 - DNA, 25 bp, SARS Virus
acgaaatcgtcctagatgacgtttt

SEQ ID NO: 186268 - DNA, 25 bp, SARS Virus
cgaaatcgtccctgatgacgttttc

SEQ ID NO: 186269 - DNA, 25 bp, SARS Virus
gaaatcgtcccatatgacgttttcg

SEQ ID NO: 186270 - DNA, 25 bp, SARS Virus
aaatcgtcccagttgacgttttcgt

SEQ ID NO: 186271 - DNA, 25 bp, SARS Virus
aatcgtcccagatgacgttttcgtg

SEQ ID NO: 186272 - DNA, 25 bp, SARS Virus
atcgtcccagattacgttttcgtgt

SEQ ID NO: 186273 - DNA, 25 bp, SARS Virus
tcgtcccagatgtcgttttcgtgtc

SEQ ID NO: 186274 - DNA, 25 bp, SARS Virus
cgtcccagatgatgttttcgtgtct

SEQ ID NO: 186275 - DNA, 25 bp, SARS Virus
gtcccagatgactttttcgtgtctt

SEQ ID NO: 186276 - DNA, 25 bp, SARS Virus
tcccagatgacgttttcgtgtcttc

SEQ ID NO: 186277 - DNA, 25 bp, SARS Virus
cccagatgacgttttcgtgtcttcc

SEQ ID NO: 186278 - DNA, 25 bp, SARS Virus
ccagatgacgttttcgtgtcttcct

SEQ ID NO: 186279 - DNA, 25 bp, SARS Virus
cagatgacgttttcgtgtcttcctt

SEQ ID NO: 186280 - DNA, 25 bp, SARS Virus
agatgacgtttttgtgtcttccttt

SEQ ID NO: 186281 - DNA, 25 bp, SARS Virus
gatgacgttttcttgtcttcctttc

SEQ ID NO: 186282 - DNA, 25 bp, SARS Virus
atgacgttttcgtgtcttcctttcg

SEQ ID NO: 186283 - DNA, 25 bp, SARS Virus
tgacgttttcgtttcttcctttcgt

SEQ ID NO: 186284 - DNA, 25 bp, SARS Virus
gacgttttcgtgtcttcctttcgtg

SEQ ID NO: 186285 - DNA, 25 bp, SARS Virus
acgttttcgtgttttcctttcgtgt

SEQ ID NO: 186286 - DNA, 25 bp, SARS Virus
cgttttcgtgtcttcctttcgtgtc

SEQ ID NO: 186287 - DNA, 25 bp, SARS Virus
gttttcgtgtcttcctttcgtgtca

SEQ ID NO: 186288 - DNA, 25 bp, SARS Virus
ttttcgtgtctttctttcgtgtcaa

SEQ ID NO: 186289 - DNA, 25 bp, SARS Virus
tttcgtgtcttcttttcgtgtcaac

SEQ ID NO: 186290 - DNA, 25 bp, SARS Virus
ttcgtgtcttcctttcgtgtcaact

SEQ ID NO: 186291 - DNA, 25 bp, SARS Virus
tcgtgtcttcctttcgtgtcaactt

SEQ ID NO: 186292 - DNA, 25 bp, SARS Virus
cgtgtcttcctttcgtgtcaactta

SEQ ID NO: 186293 - DNA, 25 bp, SARS Virus
gtgtcttccttttgtgtcaacttaa

SEQ ID NO: 186294 - DNA, 25 bp, SARS Virus
tgtcttcctttcttgtcaacttaac

SEQ ID NO: 186295 - DNA, 25 bp, SARS Virus
gtcttcctttcgtgtcaacttaacc

SEQ ID NO: 186296 - DNA, 25 bp, SARS Virus
tcttcctttcgtttcaacttaaccg

SEQ ID NO: 186297 - DNA, 25 bp, SARS Virus
cttcctttcgtgtcaacttaaccgt

SEQ ID NO: 186298 - DNA, 25 bp, SARS Virus
ttcctttcgtgttaacttaaccgtc

SEQ ID NO: 186299 - DNA, 25 bp, SARS Virus
tcctttcgtgtctacttaaccgtcc

SEQ ID NO: 186300 - DNA, 25 bp, SARS Virus
cctttcgtgtcatcttaaccgtcca

SEQ ID NO: 186301 - DNA, 25 bp, SARS Virus
ctttcgtgtcaatttaaccgtccat

SEQ ID NO: 186302 - DNA, 25 bp, SARS Virus
tttcgtgtcaacttaaccgtccatg

SEQ ID NO: 186303 - DNA, 25 bp, SARS Virus
ttcgtgtcaacttaaccgtccatga

SEQ ID NO: 186304 - DNA, 25 bp, SARS Virus
tcgtgtcaactttaccgtccatgaa

SEQ ID NO: 186305 - DNA, 25 bp, SARS Virus
cgtgtcaacttatccgtccatgaag

SEQ ID NO: 186306 - DNA, 25 bp, SARS Virus
gtgtcaacttaatcgtccatgaaga

SEQ ID NO: 186307 - DNA, 25 bp, SARS Virus
tgtcaacttaactgtccatgaagac

SEQ ID NO: 186308 - DNA, 25 bp, SARS Virus
gtcaacttaaccttccatgaagaca

SEQ ID NO: 186309 - DNA, 25 bp, SARS Virus
tcaacttaaccgtccatgaagacat

SEQ ID NO: 186310 - DNA, 25 bp, SARS Virus
caacttaaccgttcatgaagacatc

SEQ ID NO: 186311 - DNA, 25 bp, SARS Virus
aacttaaccgtctatgaagacatcg

SEQ ID NO: 186312 - DNA, 25 bp, SARS Virus
acttaaccgtccttgaagacatcgt

SEQ ID NO: 186313 - DNA, 25 bp, SARS Virus
cttaaccgtccatgaagacatcgta

SEQ ID NO: 186314 - DNA, 25 bp, SARS Virus
ttaaccgtccattaagacatcgtaa

SEQ ID NO: 186315 - DNA, 25 bp, SARS Virus
taaccgtccatgtagacatcgtaaa

SEQ ID NO: 186316 - DNA, 25 bp, SARS Virus
aaccgtccatgatgacatcgtaaag

SEQ ID NO: 186317 - DNA, 25 bp, SARS Virus
accgtccatgaatacatcgtaaagg

SEQ ID NO: 186318 - DNA, 25 bp, SARS Virus
ccgtccatgaagtcatcgtaaaggt

SEQ ID NO: 186319 - DNA, 25 bp, SARS Virus
cgtccatgaagatatcgtaaaggtc

SEQ ID NO: 186320 - DNA, 25 bp, SARS Virus
gtccatgaagacttcgtaaaggtcg

SEQ ID NO: 186321 - DNA, 25 bp, SARS Virus
tccatgaagacatcgtaaaggtcgg

SEQ ID NO: 186322 - DNA, 25 bp, SARS Virus
ccatgaagacattgtaaaggtcgga

SEQ ID NO: 186323 - DNA, 25 bp, SARS Virus
catgaagacatcttaaaggtcggac

SEQ ID NO: 186324 - DNA, 25 bp, SARS Virus
atgaagacatcgtaaaggtcggact

SEQ ID NO: 186325 - DNA, 25 bp, SARS Virus
tgaagacatcgttaaggtcggactt

SEQ ID NO: 186326 - DNA, 25 bp, SARS Virus
gaagacatcgtataggtcggacttc

SEQ ID NO: 186327 - DNA, 25 bp, SARS Virus
aagacatcgtaatggtcggacttct

SEQ ID NO: 186328 - DNA, 25 bp, SARS Virus
agacatcgtaaatgtcggacttctg

SEQ ID NO: 186329 - DNA, 25 bp, SARS Virus
gacatcgtaaagttcggacttctgc

SEQ ID NO: 186330 - DNA, 25 bp, SARS Virus
acatcgtaaaggtcggacttctgca

SEQ ID NO: 186331 - DNA, 25 bp, SARS Virus
catcgtaaaggttggacttctgcat

SEQ ID NO: 186332 - DNA, 25 bp, SARS Virus
atcgtaaaggtctgacttctgcatg

SEQ ID NO: 186333 - DNA, 25 bp, SARS Virus
tcgtaaaggtcgtacttctgcatga

SEQ ID NO: 186334 - DNA, 25 bp, SARS Virus
cgtaaaggtcggtcttctgcatgac

SEQ ID NO: 186335 - DNA, 25 bp, SARS Virus
gtaaaggtcggatttctgcatgaca

SEQ ID NO: 186336 - DNA, 25 bp, SARS Virus
taaaggtcggacttctgcatgacat

SEQ ID NO: 186337 - DNA, 25 bp, SARS Virus
aaaggtcggacttctgcatgacatc

SEQ ID NO: 186338 - DNA, 25 bp, SARS Virus
aaggtcggacttttgcatgacatcg

SEQ ID NO: 186339 - DNA, 25 bp, SARS Virus
aggtcggacttctgcatgacatcgt

SEQ ID NO: 186340 - DNA, 25 bp, SARS Virus
ggtcggacttcttcatgacatcgtc

SEQ ID NO: 186341 - DNA, 25 bp, SARS Virus
gtcggacttctgtatgacatcgtcg

SEQ ID NO: 186342 - DNA, 25 bp, SARS Virus
tcggacttctgcttgacatcgtcga

SEQ ID NO: 186343 - DNA, 25 bp, SARS Virus
cggacttctgcatgacatcgtcgat

SEQ ID NO: 186344 - DNA, 25 bp, SARS Virus
ggacttctgcattacatcgtcgatt

SEQ ID NO: 186345 - DNA, 25 bp, SARS Virus
gacttctgcatgtcatcgtcgattt

SEQ ID NO: 186346 - DNA, 25 bp, SARS Virus
acttctgcatgatatcgtcgatttg

SEQ ID NO: 186347 - DNA, 25 bp, SARS Virus
cttctgcatgacttcgtcgatttga

SEQ ID NO: 186348 - DNA, 25 bp, SARS Virus
ttctgcatgacatcgtcgatttgac

SEQ ID NO: 186349 - DNA, 25 bp, SARS Virus
tctgcatgacattgtcgatttgacg

SEQ ID NO: 186350 - DNA, 25 bp, SARS Virus
ctgcatgacatcttcgatttgacgg

SEQ ID NO: 186351 - DNA, 25 bp, SARS Virus
tgcatgacatcgtcgatttgacggg

SEQ ID NO: 186352 - DNA, 25 bp, SARS Virus
gcatgacatcgttgatttgacgggt

SEQ ID NO: 186353 - DNA, 25 bp, SARS Virus
catgacatcgtctatttgacgggtc

SEQ ID NO: 186354 - DNA, 25 bp, SARS Virus
atgacatcgtcgttttgacgggtcg

SEQ ID NO: 186355 - DNA, 25 bp, SARS Virus
tgacatcgtcgatttgacgggtcgt

SEQ ID NO: 186356 - DNA, 25 bp, SARS Virus
gacatcgtcgatttgacgggtcgtg

SEQ ID NO: 186357 - DNA, 25 bp, SARS Virus
acatcgtcgatttgacgggtcgtgg

SEQ ID NO: 186358 - DNA, 25 bp, SARS Virus
catcgtcgattttacgggtcgtggt

SEQ ID NO: 186359 - DNA, 25 bp, SARS Virus
atcgtcgatttgtcgggtcgtggta

SEQ ID NO: 186360 - DNA, 25 bp, SARS Virus
tcgtcgatttgatgggtcgtggtat

SEQ ID NO: 186361 - DNA, 25 bp, SARS Virus
cgtcgatttgactggtcgtggtatg

SEQ ID NO: 186362 - DNA, 25 bp, SARS Virus
gtcgatttgacgtgtcgtggtatgg

SEQ ID NO: 186363 - DNA, 25 bp, SARS Virus
tcgatttgacggttcgtggtatgga

SEQ ID NO: 186364 - DNA, 25 bp, SARS Virus
cgatttgacgggtcgtggtatggag

SEQ ID NO: 186365 - DNA, 25 bp, SARS Virus
gatttgacgggttgtggtatggaga

SEQ ID NO: 186366 - DNA, 25 bp, SARS Virus
atttgacgggtcttggtatggagat

SEQ ID NO: 186367 - DNA, 25 bp, SARS Virus
tttgacgggtcgtggtatggagata

SEQ ID NO: 186368 - DNA, 25 bp, SARS Virus
ttgacgggtcgttgtatggagataa

SEQ ID NO: 186369 - DNA, 25 bp, SARS Virus
tgacgggtcgtgttatggagataaa

SEQ ID NO: 186370 - DNA, 25 bp, SARS Virus
gacgggtcgtggtatggagataaat

SEQ ID NO: 186371 - DNA, 25 bp, SARS Virus
acgggtcgtggtttggagataaatc

SEQ ID NO: 186372 - DNA, 25 bp, SARS Virus
cgggtcgtggtatggagataaatcc

SEQ ID NO: 186373 - DNA, 25 bp, SARS Virus
gggtcgtggtattgagataaatcca

SEQ ID NO: 186374 - DNA, 25 bp, SARS Virus
ggtcgtggtatgtagataaatccaa

SEQ ID NO: 186375 - DNA, 25 bp, SARS Virus
gtcgtggtatggtgataaatccaac

SEQ ID NO: 186376 - DNA, 25 bp, SARS Virus
tcgtggtatggatataaatccaaca

SEQ ID NO: 186377 - DNA, 25 bp, SARS Virus
cgtggtatggagttaaatccaacaa

SEQ ID NO: 186378 - DNA, 25 bp, SARS Virus
gtggtatggagataaatccaacaaa

SEQ ID NO: 186379 - DNA, 25 bp, SARS Virus
tggtatggagattaatccaacaaat

SEQ ID NO: 186380 - DNA, 25 bp, SARS Virus
ggtatggagatatatccaacaaatt

SEQ ID NO: 186381 - DNA, 25 bp, SARS Virus
gtatggagataattccaacaaattc

SEQ ID NO: 186382 - DNA, 25 bp, SARS Virus
tatggagataaatccaacaaattcg

SEQ ID NO: 186383 - DNA, 25 bp, SARS Virus
atggagataaattcaacaaattcgg

SEQ ID NO: 186384 - DNA, 25 bp, SARS Virus
tggagataaatctaacaaattcgga

SEQ ID NO: 186385 - DNA, 25 bp, SARS Virus
ggagataaatcctacaaattcggaa

SEQ ID NO: 186386 - DNA, 25 bp, SARS Virus
gagataaatccatcaaattcggaaa

SEQ ID NO: 186387 - DNA, 25 bp, SARS Virus
agataaatccaataaattcggaaac

SEQ ID NO: 186388 - DNA, 25 bp, SARS Virus
gataaatccaactaattcggaaact

SEQ ID NO: 186389 - DNA, 25 bp, SARS Virus
ataaatccaacatattcggaaacta

SEQ ID NO: 186390 - DNA, 25 bp, SARS Virus
taaatccaacaatttcggaaactac

SEQ ID NO: 186391 - DNA, 25 bp, SARS Virus
aaatccaacaaattcggaaactact

SEQ ID NO: 186392 - DNA, 25 bp, SARS Virus
aatccaacaaattcggaaactactt

SEQ ID NO: 186393 - DNA, 25 bp, SARS Virus
atccaacaaatttggaaactacttc

SEQ ID NO: 186394 - DNA, 25 bp, SARS Virus
tccaacaaattctgaaactacttca

SEQ ID NO: 186395 - DNA, 25 bp, SARS Virus
ccaacaaattcgtaaactacttcat

SEQ ID NO: 186396 - DNA, 25 bp, SARS Virus
caacaaattcggtaactacttcatg

SEQ ID NO: 186397 - DNA, 25 bp, SARS Virus
aacaaattcggatactacttcatgt

SEQ ID NO: 186398 - DNA, 25 bp, SARS Virus
acaaattcggaatctacttcatgtt

SEQ ID NO: 186399 - DNA, 25 bp, SARS Virus
caaattcggaaattacttcatgttc

SEQ ID NO: 186400 - DNA, 25 bp, SARS Virus
aaattcggaaactacttcatgttca

SEQ ID NO: 186401 - DNA, 25 bp, SARS Virus
aattcggaaacttcttcatgttcat

SEQ ID NO: 186402 - DNA, 25 bp, SARS Virus
attcggaaactatttcatgttcata

SEQ ID NO: 186403 - DNA, 25 bp, SARS Virus
ttcggaaactacttcatgttcataa

SEQ ID NO: 186404 - DNA, 25 bp, SARS Virus
tcggaaactacttcatgttcataaa

SEQ ID NO: 186405 - DNA, 25 bp, SARS Virus
cggaaactactttatgttcataaag

SEQ ID NO: 186406 - DNA, 25 bp, SARS Virus
ggaaactacttcttgttcataaagt

SEQ ID NO: 186407 - DNA, 25 bp, SARS Virus
gaaactacttcatgttcataaagtg

SEQ ID NO: 186408 - DNA, 25 bp, SARS Virus
aaactacttcattttcataaagtga

SEQ ID NO: 186409 - DNA, 25 bp, SARS Virus
aactacttcatgttcataaagtgaa

SEQ ID NO: 186410 - DNA, 25 bp, SARS Virus
actacttcatgttcataaagtgaaa

SEQ ID NO: 186411 - DNA, 25 bp, SARS Virus
ctacttcatgtttataaagtgaaat

SEQ ID NO: 186412 - DNA, 25 bp, SARS Virus
tacttcatgttcttaaagtgaaatc

SEQ ID NO: 186413 - DNA, 25 bp, SARS Virus
acttcatgttcataaagtgaaatcc

SEQ ID NO: 186414 - DNA, 25 bp, SARS Virus
cttcatgttcattaagtgaaatccg

SEQ ID NO: 186415 - DNA, 25 bp, SARS Virus
ttcatgttcatatagtgaaatccgg

SEQ ID NO: 186416 - DNA, 25 bp, SARS Virus
tcatgttcataatgtgaaatccggg

SEQ ID NO: 186417 - DNA, 25 bp, SARS Virus
catgttcataaattgaaatccggga

SEQ ID NO: 186418 - DNA, 25 bp, SARS Virus
atgttcataaagtgaaatccgggaa

SEQ ID NO: 186419 - DNA, 25 bp, SARS Virus
tgttcataaagttaaatccgggaaa

SEQ ID NO: 186420 - DNA, 25 bp, SARS Virus
gttcataaagtgtaatccgggaaaa

SEQ ID NO: 186421 - DNA, 25 bp, SARS Virus
ttcataaagtgatatccgggaaaac

SEQ ID NO: 186422 - DNA, 25 bp, SARS Virus
tcataaagtgaattccgggaaaacc

SEQ ID NO: 186423 - DNA, 25 bp, SARS Virus
cataaagtgaaatccgggaaaacca

SEQ ID NO: 186424 - DNA, 25 bp, SARS Virus
ataaagtgaaattcgggaaaaccac

SEQ ID NO: 186425 - DNA, 25 bp, SARS Virus
taaagtgaaatctgggaaaaccaca

SEQ ID NO: 186426 - DNA, 25 bp, SARS Virus
aaagtgaaatcctggaaaaccacac

SEQ ID NO: 186427 - DNA, 25 bp, SARS Virus
aagtgaaatccgtgaaaaccacaca

SEQ ID NO: 186428 - DNA, 25 bp, SARS Virus
agtgaaatccggtaaaaccacacag

SEQ ID NO: 186429 - DNA, 25 bp, SARS Virus
gtgaaatccgggtaaaccacacaga

SEQ ID NO: 186430 - DNA, 25 bp, SARS Virus
tgaaatccgggataaccacacagac

SEQ ID NO: 186431 - DNA, 25 bp, SARS Virus
gaaatccgggaataccacacagaca

SEQ ID NO: 186432 - DNA, 25 bp, SARS Virus
aaatccgggaaatccacacagacat

SEQ ID NO: 186433 - DNA, 25 bp, SARS Virus
aatccgggaaaatcacacagacatt

SEQ ID NO: 186434 - DNA, 25 bp, SARS Virus
atccgggaaaactacacagacattg

SEQ ID NO: 186435 - DNA, 25 bp, SARS Virus
tccgggaaaacctcacagacattgt

SEQ ID NO: 186436 - DNA, 25 bp, SARS Virus
ccgggaaaaccatacagacattgtt

SEQ ID NO: 186437 - DNA, 25 bp, SARS Virus
cgggaaaaccactcagacattgttt

SEQ ID NO: 186438 - DNA, 25 bp, SARS Virus
gggaaaaccacatagacattgtttg

SEQ ID NO: 186439 - DNA, 25 bp, SARS Virus
ggaaaaccacactgacattgtttgg

SEQ ID NO: 186440 - DNA, 25 bp, SARS Virus
gaaaaccacacatacattgtttgga

SEQ ID NO: 186441 - DNA, 25 bp, SARS Virus
aaaaccacacagtcattgtttggat

SEQ ID NO: 186442 - DNA, 25 bp, SARS Virus
aaaccacacagatattgtttggatg

SEQ ID NO: 186443 - DNA, 25 bp, SARS Virus
aaccacacagactttgtttggatgt

SEQ ID NO: 186444 - DNA, 25 bp, SARS Virus
accacacagacattgtttggatgtt

SEQ ID NO: 186445 - DNA, 25 bp, SARS Virus
ccacacagacattgtttggatgttc

SEQ ID NO: 186446 - DNA, 25 bp, SARS Virus
cacacagacattttttggatgttcc

SEQ ID NO: 186447 - DNA, 25 bp, SARS Virus
acacagacattgtttggatgttcca

SEQ ID NO: 186448 - DNA, 25 bp, SARS Virus
cacagacattgtttggatgttccac

SEQ ID NO: 186449 - DNA, 25 bp, SARS Virus
acagacattgttaggatgttccacc

SEQ ID NO: 186450 - DNA, 25 bp, SARS Virus
cagacattgtttagatgttccacca

SEQ ID NO: 186451 - DNA, 25 bp, SARS Virus
agacattgtttgaatgttccaccaa

SEQ ID NO: 186452 - DNA, 25 bp, SARS Virus
gacattgtttggatgttccaccaag

SEQ ID NO: 186453 - DNA, 25 bp, SARS Virus
acattgtttggaagttccaccaagg

SEQ ID NO: 186454 - DNA, 25 bp, SARS Virus
cattgtttggatattccaccaaggt

SEQ ID NO: 186455 - DNA, 25 bp, SARS Virus
attgtttggatgatccaccaaggtc

SEQ ID NO: 186456 - DNA, 25 bp, SARS Virus
ttgtttggatgtaccaccaaggtca

SEQ ID NO: 186457 - DNA, 25 bp, SARS Virus
tgtttggatgttacaccaaggtcaa

SEQ ID NO: 186458 - DNA, 25 bp, SARS Virus
gtttggatgttcaaccaaggtcaag

SEQ ID NO: 186459 - DNA, 25 bp, SARS Virus
tttggatgttccaccaaggtcaaga

SEQ ID NO: 186460 - DNA, 25 bp, SARS Virus
ttggatgttccaacaaggtcaagac

SEQ ID NO: 186461 - DNA, 25 bp, SARS Virus
tggatgttccacaaaggtcaagaca

SEQ ID NO: 186462 - DNA, 25 bp, SARS Virus
ggatgttccaccaaggtcaagacac

SEQ ID NO: 186463 - DNA, 25 bp, SARS Virus
gatgttccaccaaggtcaagacaca

SEQ ID NO: 186464 - DNA, 25 bp, SARS Virus
atgttccaccaaagtcaagacacat

SEQ ID NO: 186465 - DNA, 25 bp, SARS Virus
tgttccaccaagatcaagacacatt

SEQ ID NO: 186466 - DNA, 25 bp, SARS Virus
gttccaccaaggacaagacacattt

SEQ ID NO: 186467 - DNA, 25 bp, SARS Virus
ttccaccaaggtaaagacacattta

SEQ ID NO: 186468 - DNA, 25 bp, SARS Virus
tccaccaaggtcaagacacatttaa

SEQ ID NO: 186469 - DNA, 25 bp, SARS Virus
ccaccaaggtcaagacacatttaac

SEQ ID NO: 186470 - DNA, 25 bp, SARS Virus
caccaaggtcaaaacacatttaaca

SEQ ID NO: 186471 - DNA, 25 bp, SARS Virus
accaaggtcaagacacatttaacat

SEQ ID NO: 186472 - DNA, 25 bp, SARS Virus
ccaaggtcaagaaacatttaacatg

SEQ ID NO: 186473 - DNA, 25 bp, SARS Virus
caaggtcaagacacatttaacatgg

SEQ ID NO: 186474 - DNA, 25 bp, SARS Virus
aaggtcaagacaaatttaacatgga

SEQ ID NO: 186475 - DNA, 25 bp, SARS Virus
aggtcaagacacatttaacatggac

SEQ ID NO: 186476 - DNA, 25 bp, SARS Virus
ggtcaagacacaattaacatggaca

SEQ ID NO: 186477 - DNA, 25 bp, SARS Virus
gtcaagacacatataacatggacat

SEQ ID NO: 186478 - DNA, 25 bp, SARS Virus
tcaagacacattaaacatggacatg

SEQ ID NO: 186479 - DNA, 25 bp, SARS Virus
caagacacatttaacatggacatgg

SEQ ID NO: 186480 - DNA, 25 bp, SARS Virus
aagacacatttaacatggacatggt

SEQ ID NO: 186481 - DNA, 25 bp, SARS Virus
agacacatttaaaatggacatggta

SEQ ID NO: 186482 - DNA, 25 bp, SARS Virus
gacacatttaacatggacatggtag

SEQ ID NO: 186483 - DNA, 25 bp, SARS Virus
acacatttaacaaggacatggtagt

SEQ ID NO: 186484 - DNA, 25 bp, SARS Virus
cacatttaacatagacatggtagtg

SEQ ID NO: 186485 - DNA, 25 bp, SARS Virus
acatttaacatgaacatggtagtga

SEQ ID NO: 186486 - DNA, 25 bp, SARS Virus
catttaacatggacatggtagtgag

SEQ ID NO: 186487 - DNA, 25 bp, SARS Virus
atttaacatggaaatggtagtgaga

SEQ ID NO: 186488 - DNA, 25 bp, SARS Virus
tttaacatggacatggtagtgagaa

SEQ ID NO: 186489 - DNA, 25 bp, SARS Virus
ttaacatggacaaggtagtgagaat

SEQ ID NO: 186490 - DNA, 25 bp, SARS Virus
taacatggacatagtagtgagaatc

SEQ ID NO: 186491 - DNA, 25 bp, SARS Virus
aacatggacatgatagtgagaatcc

SEQ ID NO: 186492 - DNA, 25 bp, SARS Virus
acatggacatggaagtgagaatccc

SEQ ID NO: 186493 - DNA, 25 bp, SARS Virus
catggacatggtagtgagaatccct

SEQ ID NO: 186494 - DNA, 25 bp, SARS Virus
atggacatggtaatgagaatccctt

SEQ ID NO: 186495 - DNA, 25 bp, SARS Virus
tggacatggtagagagaatccctta

SEQ ID NO: 186496 - DNA, 25 bp, SARS Virus
ggacatggtagtaagaatcccttag

SEQ ID NO: 186497 - DNA, 25 bp, SARS Virus
gacatggtagtgagaatcccttaga

SEQ ID NO: 186498 - DNA, 25 bp, SARS Virus
acatggtagtgaaaatcccttagat

SEQ ID NO: 186499 - DNA, 25 bp, SARS Virus
catggtagtgagaatcccttagatc

SEQ ID NO: 186500 - DNA, 25 bp, SARS Virus
atggtagtgagaatcccttagatcg

SEQ ID NO: 186501 - DNA, 25 bp, SARS Virus
tggtagtgagaaacccttagatcgg

SEQ ID NO: 186502 - DNA, 25 bp, SARS Virus
ggtagtgagaataccttagatcggg

SEQ ID NO: 186503 - DNA, 25 bp, SARS Virus
gtagtgagaatcacttagatcgggt

SEQ ID NO: 186504 - DNA, 25 bp, SARS Virus
tagtgagaatccattagatcgggta

SEQ ID NO: 186505 - DNA, 25 bp, SARS Virus
agtgagaatcccatagatcgggtaa

SEQ ID NO: 186506 - DNA, 25 bp, SARS Virus
gtgagaatccctaagatcgggtaaa

SEQ ID NO: 186507 - DNA, 25 bp, SARS Virus
tgagaatcccttagatcgggtaaac

SEQ ID NO: 186508 - DNA, 25 bp, SARS Virus
gagaatcccttaaatcgggtaaact

SEQ ID NO: 186509 - DNA, 25 bp, SARS Virus
agaatcccttagatcgggtaaactc

SEQ ID NO: 186510 - DNA, 25 bp, SARS Virus
gaatcccttagaacgggtaaactct

SEQ ID NO: 186511 - DNA, 25 bp, SARS Virus
aatcccttagatagggtaaactcta

SEQ ID NO: 186512 - DNA, 25 bp, SARS Virus
atcccttagatcaggtaaactctag

SEQ ID NO: 186513 - DNA, 25 bp, SARS Virus
tcccttagatcgagtaaactctaga

SEQ ID NO: 186514 - DNA, 25 bp, SARS Virus
cccttagatcggataaactctagaa

SEQ ID NO: 186515 - DNA, 25 bp, SARS Virus
ccttagatcgggaaaactctagaac

SEQ ID NO: 186516 - DNA, 25 bp, SARS Virus
cttagatcgggtaaactctagaacc

SEQ ID NO: 186517 - DNA, 25 bp, SARS Virus
ttagatcgggtaaactctagaacca

SEQ ID NO: 186518 - DNA, 25 bp, SARS Virus
tagatcgggtaaactctagaaccac

SEQ ID NO: 186519 - DNA, 25 bp, SARS Virus
agatcgggtaaaatctagaaccacc

SEQ ID NO: 186520 - DNA, 25 bp, SARS Virus
gatcgggtaaacactagaaccacca

SEQ ID NO: 186521 - DNA, 25 bp, SARS Virus
atcgggtaaactatagaaccaccag

SEQ ID NO: 186522 - DNA, 25 bp, SARS Virus
tcgggtaaactcaagaaccaccaga

SEQ ID NO: 186523 - DNA, 25 bp, SARS Virus
cgggtaaactctagaaccaccagac

SEQ ID NO: 186524 - DNA, 25 bp, SARS Virus
gggtaaactctaaaaccaccagact

SEQ ID NO: 186525 - DNA, 25 bp, SARS Virus
ggtaaactctagaaccaccagacta

SEQ ID NO: 186526 - DNA, 25 bp, SARS Virus
gtaaactctagaaccaccagactat

SEQ ID NO: 186527 - DNA, 25 bp, SARS Virus
taaactctagaaacaccagactatc

SEQ ID NO: 186528 - DNA, 25 bp, SARS Virus
aaactctagaacaaccagactatca

SEQ ID NO: 186529 - DNA, 25 bp, SARS Virus
aactctagaaccaccagactatcat

SEQ ID NO: 186530 - DNA, 25 bp, SARS Virus
actctagaaccaacagactatcatt

SEQ ID NO: 186531 - DNA, 25 bp, SARS Virus
ctctagaaccacaagactatcatta

SEQ ID NO: 186532 - DNA, 25 bp, SARS Virus
tctagaaccaccagactatcattac

SEQ ID NO: 186533 - DNA, 25 bp, SARS Virus
ctagaaccaccaaactatcattacg

SEQ ID NO: 186534 - DNA, 25 bp, SARS Virus
tagaaccaccagactatcattacgg

SEQ ID NO: 186535 - DNA, 25 bp, SARS Virus
agaaccaccagaatatcattacggt

SEQ ID NO: 186536 - DNA, 25 bp, SARS Virus
gaaccaccagacaatcattacggtc

SEQ ID NO: 186537 - DNA, 25 bp, SARS Virus
aaccaccagactatcattacggtcg

SEQ ID NO: 186538 - DNA, 25 bp, SARS Virus
accaccagactaacattacggtcgt

SEQ ID NO: 186539 - DNA, 25 bp, SARS Virus
ccaccagactataattacggtcgtg

SEQ ID NO: 186540 - DNA, 25 bp, SARS Virus
caccagactatcattacggtcgtgt

SEQ ID NO: 186541 - DNA, 25 bp, SARS Virus
accagactatcaatacggtcgtgtt

SEQ ID NO: 186542 - DNA, 25 bp, SARS Virus
ccagactatcataacggtcgtgttt

SEQ ID NO: 186543 - DNA, 25 bp, SARS Virus
cagactatcattacggtcgtgtttg

SEQ ID NO: 186544 - DNA, 25 bp, SARS Virus
agactatcattaaggtcgtgtttgg

SEQ ID NO: 186545 - DNA, 25 bp, SARS Virus
gactatcattacagtcgtgtttgga

SEQ ID NO: 186546 - DNA, 25 bp, SARS Virus
actatcattacgatcgtgtttggat

SEQ ID NO: 186547 - DNA, 25 bp, SARS Virus
ctatcattacggacgtgtttggatg

SEQ ID NO: 186548 - DNA, 25 bp, SARS Virus
tatcattacggtagtgtttggatgg

SEQ ID NO: 186549 - DNA, 25 bp, SARS Virus
atcattacggtcatgtttggatgga

SEQ ID NO: 186550 - DNA, 25 bp, SARS Virus
tcattacggtcgagtttggatggag

SEQ ID NO: 186551 - DNA, 25 bp, SARS Virus
cattacggtcgtatttggatggagg

SEQ ID NO: 186552 - DNA, 25 bp, SARS Virus
attacggtcgtgattggatggaggg

SEQ ID NO: 186553 - DNA, 25 bp, SARS Virus
ttacggtcgtgtatggatggaggga

SEQ ID NO: 186554 - DNA, 25 bp, SARS Virus
tacggtcgtgttaggatggagggaa

SEQ ID NO: 186555 - DNA, 25 bp, SARS Virus
acggtcgtgtttagatggagggaag

SEQ ID NO: 186556 - DNA, 25 bp, SARS Virus
cggtcgtgtttgaatggagggaagc

SEQ ID NO: 186557 - DNA, 25 bp, SARS Virus
ggtcgtgtttggatggagggaagct

SEQ ID NO: 186558 - DNA, 25 bp, SARS Virus
gtcgtgtttggaaggagggaagctt

SEQ ID NO: 186559 - DNA, 25 bp, SARS Virus
tcgtgtttggatagagggaagctta

SEQ ID NO: 186560 - DNA, 25 bp, SARS Virus
cgtgtttggatgaagggaagcttaa

SEQ ID NO: 186561 - DNA, 25 bp, SARS Virus
gtgtttggatggagggaagcttaac

SEQ ID NO: 186562 - DNA, 25 bp, SARS Virus
tgtttggatggaaggaagcttaaca

SEQ ID NO: 186563 - DNA, 25 bp, SARS Virus
gtttggatggagagaagcttaacaa

SEQ ID NO: 186564 - DNA, 25 bp, SARS Virus
tttggatggaggaaagcttaacaat

SEQ ID NO: 186565 - DNA, 25 bp, SARS Virus
ttggatggagggaagcttaacaata

SEQ ID NO: 186566 - DNA, 25 bp, SARS Virus
tggatggagggaagcttaacaatat

SEQ ID NO: 186567 - DNA, 25 bp, SARS Virus
ggatggagggaaacttaacaatatc

SEQ ID NO: 186568 - DNA, 25 bp, SARS Virus
gatggagggaagattaacaatatca

SEQ ID NO: 186569 - DNA, 25 bp, SARS Virus
atggagggaagcataacaatatcat

SEQ ID NO: 186570 - DNA, 25 bp, SARS Virus
tggagggaagctaaacaatatcatc

SEQ ID NO: 186571 - DNA, 25 bp, SARS Virus
ggagggaagcttaacaatatcatcc

SEQ ID NO: 186572 - DNA, 25 bp, SARS Virus
gagggaagcttaacaatatcatccg

SEQ ID NO: 186573 - DNA, 25 bp, SARS Virus
agggaagcttaaaaatatcatccgt

SEQ ID NO: 186574 - DNA, 25 bp, SARS Virus
gggaagcttaacaatatcatccgtt

SEQ ID NO: 186575 - DNA, 25 bp, SARS Virus
ggaagcttaacaatatcatccgttc

SEQ ID NO: 186576 - DNA, 25 bp, SARS Virus
gaagcttaacaaaatcatccgttca

SEQ ID NO: 186577 - DNA, 25 bp, SARS Virus
aagcttaacaatatcatccgttcac

SEQ ID NO: 186578 - DNA, 25 bp, SARS Virus
agcttaacaataacatccgttcacg

SEQ ID NO: 186579 - DNA, 25 bp, SARS Virus
gcttaacaatataatccgttcacgt

SEQ ID NO: 186580 - DNA, 25 bp, SARS Virus
cttaacaatatcatccgttcacgta

SEQ ID NO: 186581 - DNA, 25 bp, SARS Virus
ttaacaatatcaaccgttcacgtaa

SEQ ID NO: 186582 - DNA, 25 bp, SARS Virus
taacaatatcatacgttcacgtaac

SEQ ID NO: 186583 - DNA, 25 bp, SARS Virus
aacaatatcatcagttcacgtaaca

SEQ ID NO: 186584 - DNA, 25 bp, SARS Virus
acaatatcatccattcacgtaacag

SEQ ID NO: 186585 - DNA, 25 bp, SARS Virus
caatatcatccgatcacgtaacagt

SEQ ID NO: 186586 - DNA, 25 bp, SARS Virus
aatatcatccgtacacgtaacagta

SEQ ID NO: 186587 - DNA, 25 bp, SARS Virus
atatcatccgttaacgtaacagtag

SEQ ID NO: 186588 - DNA, 25 bp, SARS Virus
tatcatccgttcacgtaacagtagt

SEQ ID NO: 186589 - DNA, 25 bp, SARS Virus
atcatccgttcaagtaacagtagtc

SEQ ID NO: 186590 - DNA, 25 bp, SARS Virus
tcatccgttcacataacagtagtca

SEQ ID NO: 186591 - DNA, 25 bp, SARS Virus
catccgttcacgaaacagtagtcat

SEQ ID NO: 186592 - DNA, 25 bp, SARS Virus
atccgttcacgtaacagtagtcatg

SEQ ID NO: 186593 - DNA, 25 bp, SARS Virus
tccgttcacgtaacagtagtcatgt

SEQ ID NO: 186594 - DNA, 25 bp, SARS Virus
ccgttcacgtaaaagtagtcatgtt

SEQ ID NO: 186595 - DNA, 25 bp, SARS Virus
cgttcacgtaacagtagtcatgttc

SEQ ID NO: 186596 - DNA, 25 bp, SARS Virus
gttcacgtaacaatagtcatgttcg

SEQ ID NO: 186597 - DNA, 25 bp, SARS Virus
ttcacgtaacagaagtcatgttcga

SEQ ID NO: 186598 - DNA, 25 bp, SARS Virus
tcacgtaacagtagtcatgttcgac

SEQ ID NO: 186599 - DNA, 25 bp, SARS Virus
cacgtaacagtaatcatgttcgaca

SEQ ID NO: 186600 - DNA, 25 bp, SARS Virus
acgtaacagtagacatgttcgacaa

SEQ ID NO: 186601 - DNA, 25 bp, SARS Virus
cgtaacagtagtaatgttcgacaaa

SEQ ID NO: 186602 - DNA, 25 bp, SARS Virus
gtaacagtagtcatgttcgacaaac

SEQ ID NO: 186603 - DNA, 25 bp, SARS Virus
taacagtagtcaagttcgacaaaca

SEQ ID NO: 186604 - DNA, 25 bp, SARS Virus
aacagtagtcatattcgacaaacac

SEQ ID NO: 186605 - DNA, 25 bp, SARS Virus
acagtagtcatgatcgacaaacaca

SEQ ID NO: 186606 - DNA, 25 bp, SARS Virus
cagtagtcatgtacgacaaacacac

SEQ ID NO: 186607 - DNA, 25 bp, SARS Virus
agtagtcatgttagacaaacacacc

SEQ ID NO: 186608 - DNA, 25 bp, SARS Virus
gtagtcatgttcaacaaacacacca

SEQ ID NO: 186609 - DNA, 25 bp, SARS Virus
tagtcatgttcgacaaacacaccat

SEQ ID NO: 186610 - DNA, 25 bp, SARS Virus
agtcatgttcgaaaaacacaccatg

SEQ ID NO: 186611 - DNA, 25 bp, SARS Virus
gtcatgttcgacaaacacaccatgg

SEQ ID NO: 186612 - DNA, 25 bp, SARS Virus
tcatgttcgacaaacacaccatggt

SEQ ID NO: 186613 - DNA, 25 bp, SARS Virus
catgttcgacaaacacaccatggtc

SEQ ID NO: 186614 - DNA, 25 bp, SARS Virus
atgttcgacaaaaacaccatggtcg

SEQ ID NO: 186615 - DNA, 25 bp, SARS Virus
tgttcgacaaacacaccatggtcgg

SEQ ID NO: 186616 - DNA, 25 bp, SARS Virus
gttcgacaaacaaaccatggtcggc

SEQ ID NO: 186617 - DNA, 25 bp, SARS Virus
ttcgacaaacacaccatggtcggcg

SEQ ID NO: 186618 - DNA, 25 bp, SARS Virus
tcgacaaacacaacatggtcggcgt

SEQ ID NO: 186619 - DNA, 25 bp, SARS Virus
cgacaaacacacaatggtcggcgtg

SEQ ID NO: 186620 - DNA, 25 bp, SARS Virus
gacaaacacaccatggtcggcgtgt

SEQ ID NO: 186621 - DNA, 25 bp, SARS Virus
acaaacacaccaaggtcggcgtgtc

SEQ ID NO: 186622 - DNA, 25 bp, SARS Virus
caaacacaccatagtcggcgtgtcc

SEQ ID NO: 186623 - DNA, 25 bp, SARS Virus
aaacacaccatgatcggcgtgtcct

SEQ ID NO: 186624 - DNA, 25 bp, SARS Virus
aacacaccatggacggcgtgtcctg

SEQ ID NO: 186625 - DNA, 25 bp, SARS Virus
acacaccatggtaggcgtgtcctgt

SEQ ID NO: 186626 - DNA, 25 bp, SARS Virus
cacaccatggtcagcgtgtcctgta

SEQ ID NO: 186627 - DNA, 25 bp, SARS Virus
acaccatggtcgacgtgtcctgtag

SEQ ID NO: 186628 - DNA, 25 bp, SARS Virus
caccatggtcggagtgtcctgtaga

SEQ ID NO: 186629 - DNA, 25 bp, SARS Virus
accatggtcggcatgtcctgtagac

SEQ ID NO: 186630 - DNA, 25 bp, SARS Virus
ccatggtcggcgagtcctgtagaca

SEQ ID NO: 186631 - DNA, 25 bp, SARS Virus
catggtcggcgtatcctgtagacag

SEQ ID NO: 186632 - DNA, 25 bp, SARS Virus
atggtcggcgtgacctgtagacagc

SEQ ID NO: 186633 - DNA, 25 bp, SARS Virus
tggtcggcgtgtactgtagacagca

SEQ ID NO: 186634 - DNA, 25 bp, SARS Virus
ggtcggcgtgtcatgtagacagcat

SEQ ID NO: 186635 - DNA, 25 bp, SARS Virus
gtcggcgtgtccagtagacagcatc

SEQ ID NO: 186636 - DNA, 25 bp, SARS Virus
tcggcgtgtcctatagacagcatca

SEQ ID NO: 186637 - DNA, 25 bp, SARS Virus
cggcgtgtcctgaagacagcatcac

SEQ ID NO: 186638 - DNA, 25 bp, SARS Virus
ggcgtgtcctgtagacagcatcacg

SEQ ID NO: 186639 - DNA, 25 bp, SARS Virus
gcgtgtcctgtaaacagcatcacga

SEQ ID NO: 186640 - DNA, 25 bp, SARS Virus
cgtgtcctgtagacagcatcacgat

SEQ ID NO: 186641 - DNA, 25 bp, SARS Virus
gtgtcctgtagaaagcatcacgatg

SEQ ID NO: 186642 - DNA, 25 bp, SARS Virus
tgtcctgtagacagcatcacgatga

SEQ ID NO: 186643 - DNA, 25 bp, SARS Virus
gtcctgtagacaacatcacgatgac

SEQ ID NO: 186644 - DNA, 25 bp, SARS Virus
tcctgtagacagaatcacgatgacc

SEQ ID NO: 186645 - DNA, 25 bp, SARS Virus
cctgtagacagcatcacgatgacct

SEQ ID NO: 186646 - DNA, 25 bp, SARS Virus
ctgtagacagcaacacgatgacctg

SEQ ID NO: 186647 - DNA, 25 bp, SARS Virus
tgtagacagcataacgatgacctga

SEQ ID NO: 186648 - DNA, 25 bp, SARS Virus
gtagacagcatcacgatgacctgag

SEQ ID NO: 186649 - DNA, 25 bp, SARS Virus
tagacagcatcaagatgacctgagt

SEQ ID NO: 186650 - DNA, 25 bp, SARS Virus
agacagcatcacaatgacctgagtc

SEQ ID NO: 186651 - DNA, 25 bp, SARS Virus
gacagcatcacgatgacctgagtca

SEQ ID NO: 186652 - DNA, 25 bp, SARS Virus
acagcatcacgaagacctgagtcaa

SEQ ID NO: 186653 - DNA, 25 bp, SARS Virus
cagcatcacgataacctgagtcaag

SEQ ID NO: 186654 - DNA, 25 bp, SARS Virus
agcatcacgatgacctgagtcaagt

SEQ ID NO: 186655 - DNA, 25 bp, SARS Virus
gcatcacgatgaactgagtcaagta

SEQ ID NO: 186656 - DNA, 25 bp, SARS Virus
catcacgatgacatgagtcaagtaa

SEQ ID NO: 186657 - DNA, 25 bp, SARS Virus
atcacgatgaccagagtcaagtaat

SEQ ID NO: 186658 - DNA, 25 bp, SARS Virus
tcacgatgacctaagtcaagtaata

SEQ ID NO: 186659 - DNA, 25 bp, SARS Virus
cacgatgacctgagtcaagtaataa

SEQ ID NO: 186660 - DNA, 25 bp, SARS Virus
acgatgacctgaatcaagtaataag

SEQ ID NO: 186661 - DNA, 25 bp, SARS Virus
cgatgacctgagacaagtaataaga

SEQ ID NO: 186662 - DNA, 25 bp, SARS Virus
gatgacctgagtaaagtaataagac

SEQ ID NO: 186663 - DNA, 25 bp, SARS Virus
atgacctgagtcaagtaataagaca

SEQ ID NO: 186664 - DNA, 25 bp, SARS Virus
tgacctgagtcaagtaataagacat

SEQ ID NO: 186665 - DNA, 25 bp, SARS Virus
gacctgagtcaaataataagacatc

SEQ ID NO: 186666 - DNA, 25 bp, SARS Virus
acctgagtcaagaaataagacatca

SEQ ID NO: 186667 - DNA, 25 bp, SARS Virus
cctgagtcaagtaataagacatcaa

SEQ ID NO: 186668 - DNA, 25 bp, SARS Virus
ctgagtcaagtaataagacatcaaa

SEQ ID NO: 186669 - DNA, 25 bp, SARS Virus
tgagtcaagtaaaaagacatcaaat

SEQ ID NO: 186670 - DNA, 25 bp, SARS Virus
gagtcaagtaataagacatcaaatt

SEQ ID NO: 186671 - DNA, 25 bp, SARS Virus
agtcaagtaataagacatcaaattg

SEQ ID NO: 186672 - DNA, 25 bp, SARS Virus
gtcaagtaataaaacatcaaattgt

SEQ ID NO: 186673 - DNA, 25 bp, SARS Virus
tcaagtaataagacatcaaattgtc

SEQ ID NO: 186674 - DNA, 25 bp, SARS Virus
caagtaataagaaatcaaattgtcg

SEQ ID NO: 186675 - DNA, 25 bp, SARS Virus
aagtaataagacatcaaattgtcga

SEQ ID NO: 186676 - DNA, 25 bp, SARS Virus
agtaataagacaacaaattgtcgac

SEQ ID NO: 186677 - DNA, 25 bp, SARS Virus
gtaataagacataaaattgtcgact

SEQ ID NO: 186678 - DNA, 25 bp, SARS Virus
taataagacatcaaattgtcgactc

SEQ ID NO: 186679 - DNA, 25 bp, SARS Virus
aataagacatcaaattgtcgactca

SEQ ID NO: 186680 - DNA, 25 bp, SARS Virus
ataagacatcaaattgtcgactcaa

SEQ ID NO: 186681 - DNA, 25 bp, SARS Virus
taagacatcaaaatgtcgactcaac

SEQ ID NO: 186682 - DNA, 25 bp, SARS Virus
aagacatcaaatagtcgactcaacc

SEQ ID NO: 186683 - DNA, 25 bp, SARS Virus
agacatcaaattatcgactcaaccg

SEQ ID NO: 186684 - DNA, 25 bp, SARS Virus
gacatcaaattgacgactcaaccga

SEQ ID NO: 186685 - DNA, 25 bp, SARS Virus
acatcaaattgtagactcaaccgag

SEQ ID NO: 186686 - DNA, 25 bp, SARS Virus
catcaaattgtcaactcaaccgaga

SEQ ID NO: 186687 - DNA, 25 bp, SARS Virus
atcaaattgtcgactcaaccgagaa

SEQ ID NO: 186688 - DNA, 25 bp, SARS Virus
tcaaattgtcgaatcaaccgagaat

SEQ ID NO: 186689 - DNA, 25 bp, SARS Virus
caaattgtcgacacaaccgagaatc

SEQ ID NO: 186690 - DNA, 25 bp, SARS Virus
aaattgtcgactaaaccgagaatct

SEQ ID NO: 186691 - DNA, 25 bp, SARS Virus
aattgtcgactcaaccgagaatctc

SEQ ID NO: 186692 - DNA, 25 bp, SARS Virus
attgtcgactcaaccgagaatctcg

SEQ ID NO: 186693 - DNA, 25 bp, SARS Virus
ttgtcgactcaaacgagaatctcga

SEQ ID NO: 186694 - DNA, 25 bp, SARS Virus
tgtcgactcaacagagaatctcgac

SEQ ID NO: 186695 - DNA, 25 bp, SARS Virus
gtcgactcaaccaagaatctcgaca

SEQ ID NO: 186696 - DNA, 25 bp, SARS Virus
tcgactcaaccgagaatctcgacat

SEQ ID NO: 186697 - DNA, 25 bp, SARS Virus
cgactcaaccgaaaatctcgacatt

SEQ ID NO: 186698 - DNA, 25 bp, SARS Virus
gactcaaccgagaatctcgacattg

SEQ ID NO: 186699 - DNA, 25 bp, SARS Virus
actcaaccgagaatctcgacattgt

SEQ ID NO: 186700 - DNA, 25 bp, SARS Virus
ctcaaccgagaaactcgacattgtt

SEQ ID NO: 186701 - DNA, 25 bp, SARS Virus
tcaaccgagaatatcgacattgtta

SEQ ID NO: 186702 - DNA, 25 bp, SARS Virus
caaccgagaatcacgacattgttat

SEQ ID NO: 186703 - DNA, 25 bp, SARS Virus
aaccgagaatctagacattgttatt

SEQ ID NO: 186704 - DNA, 25 bp, SARS Virus
accgagaatctcaacattgttattc

SEQ ID NO: 186705 - DNA, 25 bp, SARS Virus
ccgagaatctcgacattgttattct

SEQ ID NO: 186706 - DNA, 25 bp, SARS Virus
cgagaatctcgaaattgttattctc

SEQ ID NO: 186707 - DNA, 25 bp, SARS Virus
gagaatctcgacattgttattctcc

SEQ ID NO: 186708 - DNA, 25 bp, SARS Virus
agaatctcgacaatgttattctccg

SEQ ID NO: 186709 - DNA, 25 bp, SARS Virus
gaatctcgacatagttattctccgg

SEQ ID NO: 186710 - DNA, 25 bp, SARS Virus
aatctcgacattattattctccggt

SEQ ID NO: 186711 - DNA, 25 bp, SARS Virus
atctcgacattgatattctccggtt

SEQ ID NO: 186712 - DNA, 25 bp, SARS Virus
tctcgacattgtaattctccggttc

SEQ ID NO: 186713 - DNA, 25 bp, SARS Virus
ctcgacattgttattctccggttcg

SEQ ID NO: 186714 - DNA, 25 bp, SARS Virus
tcgacattgttaatctccggttcgg

SEQ ID NO: 186715 - DNA, 25 bp, SARS Virus
cgacattgttatactccggttcggt

SEQ ID NO: 186716 - DNA, 25 bp, SARS Virus
gacattgttattatccggttcggtt

SEQ ID NO: 186717 - DNA, 25 bp, SARS Virus
acattgttattcaccggttcggttt

SEQ ID NO: 186718 - DNA, 25 bp, SARS Virus
cattgttattctacggttcggttta

SEQ ID NO: 186719 - DNA, 25 bp, SARS Virus
attgttattctcaggttcggtttaa

SEQ ID NO: 186720 - DNA, 25 bp, SARS Virus
ttgttattctccagttcggtttaaa

SEQ ID NO: 186721 - DNA, 25 bp, SARS Virus
tgttattctccgattcggtttaaac

SEQ ID NO: 186722 - DNA, 25 bp, SARS Virus
gttattctccggatcggtttaaacc

SEQ ID NO: 186723 - DNA, 25 bp, SARS Virus
ttattctccggtacggtttaaacca

SEQ ID NO: 186724 - DNA, 25 bp, SARS Virus
tattctccggttaggtttaaaccac

SEQ ID NO: 186725 - DNA, 25 bp, SARS Virus
attctccggttcagtttaaaccact

SEQ ID NO: 186726 - DNA, 25 bp, SARS Virus
ttctccggttcgatttaaaccactt

SEQ ID NO: 186727 - DNA, 25 bp, SARS Virus
tctccggttcggattaaaccactta

SEQ ID NO: 186728 - DNA, 25 bp, SARS Virus
ctccggttcggtataaaccacttaa

SEQ ID NO: 186729 - DNA, 25 bp, SARS Virus
tccggttcggttaaaaccacttaac

SEQ ID NO: 186730 - DNA, 25 bp, SARS Virus
ccggttcggtttaaaccacttaaca

SEQ ID NO: 186731 - DNA, 25 bp, SARS Virus
cggttcggtttaaaccacttaacag

SEQ ID NO: 186732 - DNA, 25 bp, SARS Virus
ggttcggtttaaaccacttaacagg

SEQ ID NO: 186733 - DNA, 25 bp, SARS Virus
gttcggtttaaaacacttaacaggt

SEQ ID NO: 186734 - DNA, 25 bp, SARS Virus
ttcggtttaaacaacttaacaggta

SEQ ID NO: 186735 - DNA, 25 bp, SARS Virus
tcggtttaaaccacttaacaggtac

SEQ ID NO: 186736 - DNA, 25 bp, SARS Virus
cggtttaaaccaattaacaggtaca

SEQ ID NO: 186737 - DNA, 25 bp, SARS Virus
ggtttaaaccacataacaggtacaa

SEQ ID NO: 186738 - DNA, 25 bp, SARS Virus
gtttaaaccactaaacaggtacaat

SEQ ID NO: 186739 - DNA, 25 bp, SARS Virus
tttaaaccacttaacaggtacaatt

SEQ ID NO: 186740 - DNA, 25 bp, SARS Virus
ttaaaccacttaacaggtacaatta

SEQ ID NO: 186741 - DNA, 25 bp, SARS Virus
taaaccacttaaaaggtacaattaa

SEQ ID NO: 186742 - DNA, 25 bp, SARS Virus
aaaccacttaacaggtacaattaaa

SEQ ID NO: 186743 - DNA, 25 bp, SARS Virus
aaccacttaacaagtacaattaaag

SEQ ID NO: 186744 - DNA, 25 bp, SARS Virus
accacttaacagatacaattaaagt

SEQ ID NO: 186745 - DNA, 25 bp, SARS Virus
ccacttaacaggaacaattaaagtg

SEQ ID NO: 186746 - DNA, 25 bp, SARS Virus
cacttaacaggtacaattaaagtga

SEQ ID NO: 186747 - DNA, 25 bp, SARS Virus
acttaacaggtaaaattaaagtgat

SEQ ID NO: 186748 - DNA, 25 bp, SARS Virus
cttaacaggtacaattaaagtgatt

SEQ ID NO: 186749 - DNA, 25 bp, SARS Virus
ttaacaggtacaattaaagtgattc

SEQ ID NO: 186750 - DNA, 25 bp, SARS Virus
taacaggtacaaataaagtgattca

SEQ ID NO: 186751 - DNA, 25 bp, SARS Virus
aacaggtacaataaaagtgattcaa

SEQ ID NO: 186752 - DNA, 25 bp, SARS Virus
acaggtacaattaaagtgattcaac

SEQ ID NO: 186753 - DNA, 25 bp, SARS Virus
caggtacaattaaagtgattcaact

SEQ ID NO: 186754 - DNA, 25 bp, SARS Virus
aggtacaattaaagtgattcaactt

SEQ ID NO: 186755 - DNA, 25 bp, SARS Virus
ggtacaattaaaatgattcaacttg

SEQ ID NO: 186756 - DNA, 25 bp, SARS Virus
gtacaattaaagagattcaacttgt

SEQ ID NO: 186757 - DNA, 25 bp, SARS Virus
tacaattaaagtaattcaacttgtt

SEQ ID NO: 186758 - DNA, 25 bp, SARS Virus
acaattaaagtgattcaacttgtta

SEQ ID NO: 186759 - DNA, 25 bp, SARS Virus
caattaaagtgaatcaacttgttag

SEQ ID NO: 186760 - DNA, 25 bp, SARS Virus
aattaaagtgatacaacttgttaga

SEQ ID NO: 186761 - DNA, 25 bp, SARS Virus
attaaagtgattaaacttgttagaa

SEQ ID NO: 186762 - DNA, 25 bp, SARS Virus
ttaaagtgattcaacttgttagaac

SEQ ID NO: 186763 - DNA, 25 bp, SARS Virus
taaagtgattcaacttgttagaacg

SEQ ID NO: 186764 - DNA, 25 bp, SARS Virus
aaagtgattcaaattgttagaacga

SEQ ID NO: 186765 - DNA, 25 bp, SARS Virus
aagtgattcaacatgttagaacgat

SEQ ID NO: 186766 - DNA, 25 bp, SARS Virus
agtgattcaactagttagaacgata

SEQ ID NO: 186767 - DNA, 25 bp, SARS Virus
gtgattcaacttattagaacgatag

SEQ ID NO: 186768 - DNA, 25 bp, SARS Virus
tgattcaacttgatagaacgatagg

SEQ ID NO: 186769 - DNA, 25 bp, SARS Virus
gattcaacttgtaagaacgataggc

SEQ ID NO: 186770 - DNA, 25 bp, SARS Virus
attcaacttgttagaacgataggcg

SEQ ID NO: 186771 - DNA, 25 bp, SARS Virus
ttcaacttgttaaaacgataggcgt

SEQ ID NO: 186772 - DNA, 25 bp, SARS Virus
tcaacttgttagaacgataggcgta

SEQ ID NO: 186773 - DNA, 25 bp, SARS Virus
caacttgttagaacgataggcgtag

SEQ ID NO: 186774 - DNA, 25 bp, SARS Virus
aacttgttagaaagataggcgtagt

SEQ ID NO: 186775 - DNA, 25 bp, SARS Virus
acttgttagaacaataggcgtagtt

SEQ ID NO: 186776 - DNA, 25 bp, SARS Virus
cttgttagaacgataggcgtagttg

SEQ ID NO: 186777 - DNA, 25 bp, SARS Virus
ttgttagaacgaaaggcgtagttgt

SEQ ID NO: 186778 - DNA, 25 bp, SARS Virus
tgttagaacgataggcgtagttgtt

SEQ ID NO: 186779 - DNA, 25 bp, SARS Virus
gttagaacgataagcgtagttgttg

SEQ ID NO: 186780 - DNA, 25 bp, SARS Virus
ttagaacgatagacgtagttgttga

SEQ ID NO: 186781 - DNA, 25 bp, SARS Virus
tagaacgataggagtagttgttgaa

SEQ ID NO: 186782 - DNA, 25 bp, SARS Virus
agaacgataggcatagttgttgaac

SEQ ID NO: 186783 - DNA, 25 bp, SARS Virus
gaacgataggcgaagttgttgaacg

SEQ ID NO: 186784 - DNA, 25 bp, SARS Virus
aacgataggcgtagttgttgaacga

SEQ ID NO: 186785 - DNA, 25 bp, SARS Virus
acgataggcgtaattgttgaacgac

SEQ ID NO: 186786 - DNA, 25 bp, SARS Virus
cgataggcgtagatgttgaacgacc

SEQ ID NO: 186787 - DNA, 25 bp, SARS Virus
gataggcgtagtagttgaacgacct

SEQ ID NO: 186788 - DNA, 25 bp, SARS Virus
ataggcgtagttattgaacgaccta

SEQ ID NO: 186789 - DNA, 25 bp, SARS Virus
taggcgtagttgatgaacgacctaa

SEQ ID NO: 186790 - DNA, 25 bp, SARS Virus
aggcgtagttgtagaacgacctaaa

SEQ ID NO: 186791 - DNA, 25 bp, SARS Virus
ggcgtagttgttaaacgacctaaag

SEQ ID NO: 186792 - DNA, 25 bp, SARS Virus
gcgtagttgttgaacgacctaaagg

SEQ ID NO: 186793 - DNA, 25 bp, SARS Virus
cgtagttgttgaacgacctaaaggg

SEQ ID NO: 186794 - DNA, 25 bp, SARS Virus
gtagttgttgaaagacctaaagggt

SEQ ID NO: 186795 - DNA, 25 bp, SARS Virus
tagttgttgaacaacctaaagggtc

SEQ ID NO: 186796 - DNA, 25 bp, SARS Virus
agttgttgaacgacctaaagggtct

SEQ ID NO: 186797 - DNA, 25 bp, SARS Virus
gttgttgaacgaactaaagggtctc

SEQ ID NO: 186798 - DNA, 25 bp, SARS Virus
ttgttgaacgacataaagggtctca

SEQ ID NO: 186799 - DNA, 25 bp, SARS Virus
tgttgaacgaccaaaagggtctcac

SEQ ID NO: 186800 - DNA, 25 bp, SARS Virus
gttgaacgacctaaagggtctcacg

SEQ ID NO: 186801 - DNA, 25 bp, SARS Virus
ttgaacgacctaaagggtctcacgt

SEQ ID NO: 186802 - DNA, 25 bp, SARS Virus
tgaacgacctaaagggtctcacgtc

SEQ ID NO: 186803 - DNA, 25 bp, SARS Virus
gaacgacctaaaaggtctcacgtct

SEQ ID NO: 186804 - DNA, 25 bp, SARS Virus
aacgacctaaagagtctcacgtcta

SEQ ID NO: 186805 - DNA, 25 bp, SARS Virus
acgacctaaaggatctcacgtctac

SEQ ID NO: 186806 - DNA, 25 bp, SARS Virus
cgacctaaagggactcacgtctacg

SEQ ID NO: 186807 - DNA, 25 bp, SARS Virus
gacctaaagggtatcacgtctacgt

SEQ ID NO: 186808 - DNA, 25 bp, SARS Virus
acctaaagggtcacacgtctacgta

SEQ ID NO: 186809 - DNA, 25 bp, SARS Virus
cctaaagggtctaacgtctacgtat

SEQ ID NO: 186810 - DNA, 25 bp, SARS Virus
ctaaagggtctcacgtctacgtata

SEQ ID NO: 186811 - DNA, 25 bp, SARS Virus
taaagggtctcaagtctacgtatac

SEQ ID NO: 186812 - DNA, 25 bp, SARS Virus
aaagggtctcacatctacgtataca

SEQ ID NO: 186813 - DNA, 25 bp, SARS Virus
aagggtctcacgactacgtatacat

SEQ ID NO: 186814 - DNA, 25 bp, SARS Virus
agggtctcacgtatacgtatacatt

SEQ ID NO: 186815 - DNA, 25 bp, SARS Virus
gggtctcacgtcaacgtatacattt

SEQ ID NO: 186816 - DNA, 25 bp, SARS Virus
ggtctcacgtctacgtatacatttc

SEQ ID NO: 186817 - DNA, 25 bp, SARS Virus
gtctcacgtctaagtatacatttcc

SEQ ID NO: 186818 - DNA, 25 bp, SARS Virus
tctcacgtctacatatacatttcca

SEQ ID NO: 186819 - DNA, 25 bp, SARS Virus
ctcacgtctacgaatacatttccac

SEQ ID NO: 186820 - DNA, 25 bp, SARS Virus
tcacgtctacgtatacatttccaca

SEQ ID NO: 186821 - DNA, 25 bp, SARS Virus
cacgtctacgtaaacatttccacaa

SEQ ID NO: 186822 - DNA, 25 bp, SARS Virus
acgtctacgtatacatttccacaat

SEQ ID NO: 186823 - DNA, 25 bp, SARS Virus
cgtctacgtataaatttccacaatg

SEQ ID NO: 186824 - DNA, 25 bp, SARS Virus
gtctacgtatacatttccacaatgg

SEQ ID NO: 186825 - DNA, 25 bp, SARS Virus
tctacgtatacaattccacaatggt

SEQ ID NO: 186826 - DNA, 25 bp, SARS Virus
ctacgtatacatatccacaatggta

SEQ ID NO: 186827 - DNA, 25 bp, SARS Virus
tacgtatacattaccacaatggtag

SEQ ID NO: 186828 - DNA, 25 bp, SARS Virus
acgtatacatttacacaatggtagt

SEQ ID NO: 186829 - DNA, 25 bp, SARS Virus
cgtatacatttcaacaatggtagtg

SEQ ID NO: 186830 - DNA, 25 bp, SARS Virus
gtatacatttccacaatggtagtgt

SEQ ID NO: 186831 - DNA, 25 bp, SARS Virus
tatacatttccaaaatggtagtgtt

SEQ ID NO: 186832 - DNA, 25 bp, SARS Virus
atacatttccacaatggtagtgttc

SEQ ID NO: 186833 - DNA, 25 bp, SARS Virus
tacatttccacaatggtagtgttca

SEQ ID NO: 186834 - DNA, 25 bp, SARS Virus
acatttccacaaaggtagtgttcac

SEQ ID NO: 186835 - DNA, 25 bp, SARS Virus
catttccacaatagtagtgttcaca

SEQ ID NO: 186836 - DNA, 25 bp, SARS Virus
atttccacaatgatagtgttcacaa

SEQ ID NO: 186837 - DNA, 25 bp, SARS Virus
tttccacaatggaagtgttcacaag

SEQ ID NO: 186838 - DNA, 25 bp, SARS Virus
ttccacaatggtagtgttcacaaga

SEQ ID NO: 186839 - DNA, 25 bp, SARS Virus
tccacaatggtaatgttcacaagaa

SEQ ID NO: 186840 - DNA, 25 bp, SARS Virus
ccacaatggtagagttcacaagaac

SEQ ID NO: 186841 - DNA, 25 bp, SARS Virus
cacaatggtagtattcacaagaaca

SEQ ID NO: 186842 - DNA, 25 bp, SARS Virus
acaatggtagtgatcacaagaacat

SEQ ID NO: 186843 - DNA, 25 bp, SARS Virus
caatggtagtgtacacaagaacatc

SEQ ID NO: 186844 - DNA, 25 bp, SARS Virus
aatggtagtgttaacaagaacatcc

SEQ ID NO: 186845 - DNA, 25 bp, SARS Virus
atggtagtgttcacaagaacatcca

SEQ ID NO: 186846 - DNA, 25 bp, SARS Virus
tggtagtgttcaaaagaacatccat

SEQ ID NO: 186847 - DNA, 25 bp, SARS Virus
ggtagtgttcacaagaacatccatg

SEQ ID NO: 186848 - DNA, 25 bp, SARS Virus
gtagtgttcacaagaacatccatgg

SEQ ID NO: 186849 - DNA, 25 bp, SARS Virus
tagtgttcacaaaaacatccatggt

SEQ ID NO: 186850 - DNA, 25 bp, SARS Virus
agtgttcacaagaacatccatggta

SEQ ID NO: 186851 - DNA, 25 bp, SARS Virus
gtgttcacaagaacatccatggtat

SEQ ID NO: 186852 - DNA, 25 bp, SARS Virus
tgttcacaagaaaatccatggtatt

SEQ ID NO: 186853 - DNA, 25 bp, SARS Virus
gttcacaagaacatccatggtatta

SEQ ID NO: 186854 - DNA, 25 bp, SARS Virus
ttcacaagaacaaccatggtattag

SEQ ID NO: 186855 - DNA, 25 bp, SARS Virus
tcacaagaacatacatggtattagt

SEQ ID NO: 186856 - DNA, 25 bp, SARS Virus
cacaagaacatcaatggtattagtc

SEQ ID NO: 186857 - DNA, 25 bp, SARS Virus
acaagaacatccatggtattagtcc

SEQ ID NO: 186858 - DNA, 25 bp, SARS Virus
caagaacatccaaggtattagtccc

SEQ ID NO: 186859 - DNA, 25 bp, SARS Virus
aagaacatccatagtattagtccct

SEQ ID NO: 186860 - DNA, 25 bp, SARS Virus
agaacatccatgatattagtccctg

SEQ ID NO: 186861 - DNA, 25 bp, SARS Virus
gaacatccatggaattagtccctgt

SEQ ID NO: 186862 - DNA, 25 bp, SARS Virus
aacatccatggtattagtccctgtt

SEQ ID NO: 186863 - DNA, 25 bp, SARS Virus
acatccatggtaatagtccctgttg

SEQ ID NO: 186864 - DNA, 25 bp, SARS Virus
catccatggtataagtccctgttgt

SEQ ID NO: 186865 - DNA, 25 bp, SARS Virus
atccatggtattagtccctgttgtt

SEQ ID NO: 186866 - DNA, 25 bp, SARS Virus
tccatggtattaatccctgttgttg

SEQ ID NO: 186867 - DNA, 25 bp, SARS Virus
ccatggtattagaccctgttgttgg

SEQ ID NO: 186868 - DNA, 25 bp, SARS Virus
catggtattagtacctgttgttggt

SEQ ID NO: 186869 - DNA, 25 bp, SARS Virus
atggtattagtcactgttgttggta

SEQ ID NO: 186870 - DNA, 25 bp, SARS Virus
tggtattagtccatgttgttggtac

SEQ ID NO: 186871 - DNA, 25 bp, SARS Virus
ggtattagtcccagttgttggtact

SEQ ID NO: 186872 - DNA, 25 bp, SARS Virus
gtattagtccctattgttggtactc

SEQ ID NO: 186873 - DNA, 25 bp, SARS Virus
tattagtccctgatgttggtactca

SEQ ID NO: 186874 - DNA, 25 bp, SARS Virus
attagtccctgtagttggtactcaa

SEQ ID NO: 186875 - DNA, 25 bp, SARS Virus
ttagtccctgttattggtactcaaa

SEQ ID NO: 186876 - DNA, 25 bp, SARS Virus
tagtccctgttgatggtactcaaac

SEQ ID NO: 186877 - DNA, 25 bp, SARS Virus
agtccctgttgtaggtactcaaacc

SEQ ID NO: 186878 - DNA, 25 bp, SARS Virus
gtccctgttgttagtactcaaaccg

SEQ ID NO: 186879 - DNA, 25 bp, SARS Virus
tccctgttgttgatactcaaaccga

SEQ ID NO: 186880 - DNA, 25 bp, SARS Virus
ccctgttgttggaactcaaaccgac

SEQ ID NO: 186881 - DNA, 25 bp, SARS Virus
cctgttgttggtactcaaaccgacg

SEQ ID NO: 186882 - DNA, 25 bp, SARS Virus
ctgttgttggtaatcaaaccgacga

SEQ ID NO: 186883 - DNA, 25 bp, SARS Virus
tgttgttggtacacaaaccgacgac

SEQ ID NO: 186884 - DNA, 25 bp, SARS Virus
gttgttggtactaaaaccgacgaca

SEQ ID NO: 186885 - DNA, 25 bp, SARS Virus
ttgttggtactcaaaccgacgacat

SEQ ID NO: 186886 - DNA, 25 bp, SARS Virus
tgttggtactcaaaccgacgacatc

SEQ ID NO: 186887 - DNA, 25 bp, SARS Virus
gttggtactcaaaccgacgacatca

SEQ ID NO: 186888 - DNA, 25 bp, SARS Virus
ttggtactcaaaacgacgacatcag

SEQ ID NO: 186889 - DNA, 25 bp, SARS Virus
tggtactcaaacagacgacatcagt

SEQ ID NO: 186890 - DNA, 25 bp, SARS Virus
ggtactcaaaccaacgacatcagtt

SEQ ID NO: 186891 - DNA, 25 bp, SARS Virus
gtactcaaaccgacgacatcagtta

SEQ ID NO: 186892 - DNA, 25 bp, SARS Virus
tactcaaaccgaagacatcagttac

SEQ ID NO: 186893 - DNA, 25 bp, SARS Virus
actcaaaccgacaacatcagttacc

SEQ ID NO: 186894 - DNA, 25 bp, SARS Virus
ctcaaaccgacgacatcagttacca

SEQ ID NO: 186895 - DNA, 25 bp, SARS Virus
tcaaaccgacgaaatcagttaccat

SEQ ID NO: 186896 - DNA, 25 bp, SARS Virus
caaaccgacgacatcagttaccata

SEQ ID NO: 186897 - DNA, 25 bp, SARS Virus
aaaccgacgacaacagttaccatac

SEQ ID NO: 186898 - DNA, 25 bp, SARS Virus
aaccgacgacataagttaccatact

SEQ ID NO: 186899 - DNA, 25 bp, SARS Virus
accgacgacatcagttaccatacta

SEQ ID NO: 186900 - DNA, 25 bp, SARS Virus
ccgacgacatcaattaccatactac

SEQ ID NO: 186901 - DNA, 25 bp, SARS Virus
cgacgacatcagataccatactaca

SEQ ID NO: 186902 - DNA, 25 bp, SARS Virus
gacgacatcagtaaccatactacaa

SEQ ID NO: 186903 - DNA, 25 bp, SARS Virus
acgacatcagttaccatactacaac

SEQ ID NO: 186904 - DNA, 25 bp, SARS Virus
cgacatcagttaacatactacaact

SEQ ID NO: 186905 - DNA, 25 bp, SARS Virus
gacatcagttacaatactacaactc

SEQ ID NO: 186906 - DNA, 25 bp, SARS Virus
acatcagttaccatactacaactca

SEQ ID NO: 186907 - DNA, 25 bp, SARS Virus
catcagttaccaaactacaactcac

SEQ ID NO: 186908 - DNA, 25 bp, SARS Virus
atcagttaccatactacaactcacc

SEQ ID NO: 186909 - DNA, 25 bp, SARS Virus
tcagttaccataatacaactcacct

SEQ ID NO: 186910 - DNA, 25 bp, SARS Virus
cagttaccatacaacaactcacctt

SEQ ID NO: 186911 - DNA, 25 bp, SARS Virus
agttaccatactacaactcaccttg

SEQ ID NO: 186912 - DNA, 25 bp, SARS Virus
gttaccatactaaaactcaccttgt

SEQ ID NO: 186913 - DNA, 25 bp, SARS Virus
ttaccatactacaactcaccttgtg

SEQ ID NO: 186914 - DNA, 25 bp, SARS Virus
taccatactacaactcaccttgtgt

SEQ ID NO: 186915 - DNA, 25 bp, SARS Virus
accatactacaaatcaccttgtgtt

SEQ ID NO: 186916 - DNA, 25 bp, SARS Virus
ccatactacaacacaccttgtgttg

SEQ ID NO: 186917 - DNA, 25 bp, SARS Virus
catactacaactaaccttgtgttgg

SEQ ID NO: 186918 - DNA, 25 bp, SARS Virus
atactacaactcaccttgtgttggt

SEQ ID NO: 186919 - DNA, 25 bp, SARS Virus
tactacaactcaacttgtgttggta

SEQ ID NO: 186920 - DNA, 25 bp, SARS Virus
actacaactcacattgtgttggtag

SEQ ID NO: 186921 - DNA, 25 bp, SARS Virus
ctacaactcaccatgtgttggtagt

SEQ ID NO: 186922 - DNA, 25 bp, SARS Virus
tacaactcacctagtgttggtagtg

SEQ ID NO: 186923 - DNA, 25 bp, SARS Virus
acaactcaccttatgttggtagtgc

SEQ ID NO: 186924 - DNA, 25 bp, SARS Virus
caactcaccttgagttggtagtgcg

SEQ ID NO: 186925 - DNA, 25 bp, SARS Virus
aactcaccttgtattggtagtgcgc

SEQ ID NO: 186926 - DNA, 25 bp, SARS Virus
actcaccttgtgatggtagtgcgcg

SEQ ID NO: 186927 - DNA, 25 bp, SARS Virus
ctcaccttgtgtaggtagtgcgcgt

SEQ ID NO: 186928 - DNA, 25 bp, SARS Virus
tcaccttgtgttagtagtgcgcgta

SEQ ID NO: 186929 - DNA, 25 bp, SARS Virus
caccttgtgttgatagtgcgcgtaa

SEQ ID NO: 186930 - DNA, 25 bp, SARS Virus
accttgtgttggaagtgcgcgtaac

SEQ ID NO: 186931 - DNA, 25 bp, SARS Virus
ccttgtgttggtagtgcgcgtaaca

SEQ ID NO: 186932 - DNA, 25 bp, SARS Virus
cttgtgttggtaatgcgcgtaacaa

SEQ ID NO: 186933 - DNA, 25 bp, SARS Virus
ttgtgttggtagagcgcgtaacaac

SEQ ID NO: 186934 - DNA, 25 bp, SARS Virus
tgtgttggtagtacgcgtaacaact

SEQ ID NO: 186935 - DNA, 25 bp, SARS Virus
gtgttggtagtgagcgtaacaacta

SEQ ID NO: 186936 - DNA, 25 bp, SARS Virus
tgttggtagtgcacgtaacaactat

SEQ ID NO: 186937 - DNA, 25 bp, SARS Virus
acagacattgttcggatgttccacc

SEQ ID NO: 186938 - DNA, 25 bp, SARS Virus
cagacattgtttcgatgttccacca

SEQ ID NO: 186939 - DNA, 25 bp, SARS Virus
agacattgtttgcatgttccaccaa

SEQ ID NO: 186940 - DNA, 25 bp, SARS Virus
gacattgtttggctgttccaccaag

SEQ ID NO: 186941 - DNA, 25 bp, SARS Virus
acattgtttggacgttccaccaagg

SEQ ID NO: 186942 - DNA, 25 bp, SARS Virus
cattgtttggatcttccaccaaggt

SEQ ID NO: 186943 - DNA, 25 bp, SARS Virus
attgtttggatgctccaccaaggtc

SEQ ID NO: 186944 - DNA, 25 bp, SARS Virus
ttgtttggatgtcccaccaaggtca

SEQ ID NO: 186945 - DNA, 25 bp, SARS Virus
tgtttggatgttccaccaaggtcaa

SEQ ID NO: 186946 - DNA, 25 bp, SARS Virus
gtttggatgttccaccaaggtcaag

SEQ ID NO: 186947 - DNA, 25 bp, SARS Virus
tttggatgttcccccaaggtcaaga

SEQ ID NO: 186948 - DNA, 25 bp, SARS Virus
ttggatgttccaccaaggtcaagac

SEQ ID NO: 186949 - DNA, 25 bp, SARS Virus
tggatgttccaccaaggtcaagaca

SEQ ID NO: 186950 - DNA, 25 bp, SARS Virus
ggatgttccacccaggtcaagacac

SEQ ID NO: 186951 - DNA, 25 bp, SARS Virus
gatgttccaccacggtcaagacaca

SEQ ID NO: 186952 - DNA, 25 bp, SARS Virus
atgttccaccaacgtcaagacacat

SEQ ID NO: 186953 - DNA, 25 bp, SARS Virus
tgttccaccaagctcaagacacatt

SEQ ID NO: 186954 - DNA, 25 bp, SARS Virus
gttccaccaaggccaagacacattt

SEQ ID NO: 186955 - DNA, 25 bp, SARS Virus
ttccaccaaggtcaagacacattta

SEQ ID NO: 186956 - DNA, 25 bp, SARS Virus
tccaccaaggtccagacacatttaa

SEQ ID NO: 186957 - DNA, 25 bp, SARS Virus
ccaccaaggtcacgacacatttaac

SEQ ID NO: 186958 - DNA, 25 bp, SARS Virus
caccaaggtcaacacacatttaaca

SEQ ID NO: 186959 - DNA, 25 bp, SARS Virus
accaaggtcaagccacatttaacat

SEQ ID NO: 186960 - DNA, 25 bp, SARS Virus
ccaaggtcaagacacatttaacatg

SEQ ID NO: 186961 - DNA, 25 bp, SARS Virus
caaggtcaagacccatttaacatgg

SEQ ID NO: 186962 - DNA, 25 bp, SARS Virus
aaggtcaagacacatttaacatgga

SEQ ID NO: 186963 - DNA, 25 bp, SARS Virus
aggtcaagacacctttaacatggac

SEQ ID NO: 186964 - DNA, 25 bp, SARS Virus
ggtcaagacacacttaacatggaca

SEQ ID NO: 186965 - DNA, 25 bp, SARS Virus
gtcaagacacatctaacatggacat

SEQ ID NO: 186966 - DNA, 25 bp, SARS Virus
tcaagacacattcaacatggacatg

SEQ ID NO: 186967 - DNA, 25 bp, SARS Virus
caagacacatttcacatggacatgg

SEQ ID NO: 186968 - DNA, 25 bp, SARS Virus
aagacacatttaccatggacatggt

SEQ ID NO: 186969 - DNA, 25 bp, SARS Virus
agacacatttaacatggacatggta

SEQ ID NO: 186970 - DNA, 25 bp, SARS Virus
gacacatttaacctggacatggtag

SEQ ID NO: 186971 - DNA, 25 bp, SARS Virus
acacatttaacacggacatggtagt

SEQ ID NO: 186972 - DNA, 25 bp, SARS Virus
cacatttaacatcgacatggtagtg

SEQ ID NO: 186973 - DNA, 25 bp, SARS Virus
acatttaacatgcacatggtagtga

SEQ ID NO: 186974 - DNA, 25 bp, SARS Virus
catttaacatggccatggtagtgag

SEQ ID NO: 186975 - DNA, 25 bp, SARS Virus
atttaacatggacatggtagtgaga

SEQ ID NO: 186976 - DNA, 25 bp, SARS Virus
tttaacatggacctggtagtgagaa

SEQ ID NO: 186977 - DNA, 25 bp, SARS Virus
ttaacatggacacggtagtgagaat

SEQ ID NO: 186978 - DNA, 25 bp, SARS Virus
taacatggacatcgtagtgagaatc

SEQ ID NO: 186979 - DNA, 25 bp, SARS Virus
aacatggacatgctagtgagaatcc

SEQ ID NO: 186980 - DNA, 25 bp, SARS Virus
acatggacatggcagtgagaatccc

SEQ ID NO: 186981 - DNA, 25 bp, SARS Virus
catggacatggtcgtgagaatccct

SEQ ID NO: 186982 - DNA, 25 bp, SARS Virus
atggacatggtactgagaatccctt

SEQ ID NO: 186983 - DNA, 25 bp, SARS Virus
tggacatggtagcgagaatccctta

SEQ ID NO: 186984 - DNA, 25 bp, SARS Virus
ggacatggtagtcagaatcccttag

SEQ ID NO: 186985 - DNA, 25 bp, SARS Virus
gacatggtagtgcgaatcccttaga

SEQ ID NO: 186986 - DNA, 25 bp, SARS Virus
acatggtagtgacaatcccttagat

SEQ ID NO: 186987 - DNA, 25 bp, SARS Virus
catggtagtgagcatcccttagatc

SEQ ID NO: 186988 - DNA, 25 bp, SARS Virus
atggtagtgagactcccttagatcg

SEQ ID NO: 186989 - DNA, 25 bp, SARS Virus
tggtagtgagaaccccttagatcgg

SEQ ID NO: 186990 - DNA, 25 bp, SARS Virus
ggtagtgagaatcccttagatcggg

SEQ ID NO: 186991 - DNA, 25 bp, SARS Virus
gtagtgagaatcccttagatcgggt

SEQ ID NO: 186992 - DNA, 25 bp, SARS Virus
tagtgagaatcccttagatcgggta

SEQ ID NO: 186993 - DNA, 25 bp, SARS Virus
agtgagaatcccctagatcgggtaa

SEQ ID NO: 186994 - DNA, 25 bp, SARS Virus
gtgagaatccctcagatcgggtaaa

SEQ ID NO: 186995 - DNA, 25 bp, SARS Virus
tgagaatcccttcgatcgggtaaac

SEQ ID NO: 186996 - DNA, 25 bp, SARS Virus
gagaatcccttacatcgggtaaact

SEQ ID NO: 186997 - DNA, 25 bp, SARS Virus
agaatcccttagctcgggtaaactc

SEQ ID NO: 186998 - DNA, 25 bp, SARS Virus
gaatcccttagaccgggtaaactct

SEQ ID NO: 186999 - DNA, 25 bp, SARS Virus
aatcccttagatcgggtaaactcta

SEQ ID NO: 187000 - DNA, 25 bp, SARS Virus
atcccttagatccggtaaactctag

SEQ ID NO: 187001 - DNA, 25 bp, SARS Virus
tcccttagatcgcgtaaactctaga

SEQ ID NO: 187002 - DNA, 25 bp, SARS Virus
cccttagatcggctaaactctagaa

SEQ ID NO: 187003 - DNA, 25 bp, SARS Virus
ccttagatcgggcaaactctagaac

SEQ ID NO: 187004 - DNA, 25 bp, SARS Virus
cttagatcgggtcaactctagaacc

SEQ ID NO: 187005 - DNA, 25 bp, SARS Virus
ttagatcgggtacactctagaacca

SEQ ID NO: 187006 - DNA, 25 bp, SARS Virus
tagatcgggtaacctctagaaccac

SEQ ID NO: 187007 - DNA, 25 bp, SARS Virus
agatcgggtaaactctagaaccacc

SEQ ID NO: 187008 - DNA, 25 bp, SARS Virus
gatcgggtaaaccctagaaccacca

SEQ ID NO: 187009 - DNA, 25 bp, SARS Virus
atcgggtaaactctagaaccaccag

SEQ ID NO: 187010 - DNA, 25 bp, SARS Virus
tcgggtaaactccagaaccaccaga

SEQ ID NO: 187011 - DNA, 25 bp, SARS Virus
cgggtaaactctcgaaccaccagac

SEQ ID NO: 187012 - DNA, 25 bp, SARS Virus
gggtaaactctacaaccaccagact

SEQ ID NO: 187013 - DNA, 25 bp, SARS Virus
ggtaaactctagcaccaccagacta

SEQ ID NO: 187014 - DNA, 25 bp, SARS Virus
gtaaactctagacccaccagactat

SEQ ID NO: 187015 - DNA, 25 bp, SARS Virus
taaactctagaaccaccagactatc

SEQ ID NO: 187016 - DNA, 25 bp, SARS Virus
aaactctagaaccaccagactatca

SEQ ID NO: 187017 - DNA, 25 bp, SARS Virus
aactctagaacccccagactatcat

SEQ ID NO: 187018 - DNA, 25 bp, SARS Virus
actctagaaccaccagactatcatt

SEQ ID NO: 187019 - DNA, 25 bp, SARS Virus
ctctagaaccaccagactatcatta

SEQ ID NO: 187020 - DNA, 25 bp, SARS Virus
tctagaaccacccgactatcattac

SEQ ID NO: 187021 - DNA, 25 bp, SARS Virus
ctagaaccaccacactatcattacg

SEQ ID NO: 187022 - DNA, 25 bp, SARS Virus
tagaaccaccagcctatcattacgg

SEQ ID NO: 187023 - DNA, 25 bp, SARS Virus
agaaccaccagactatcattacggt

SEQ ID NO: 187024 - DNA, 25 bp, SARS Virus
gaaccaccagaccatcattacggtc

SEQ ID NO: 187025 - DNA, 25 bp, SARS Virus
aaccaccagactctcattacggtcg

SEQ ID NO: 187026 - DNA, 25 bp, SARS Virus
accaccagactaccattacggtcgt

SEQ ID NO: 187027 - DNA, 25 bp, SARS Virus
ccaccagactatcattacggtcgtg

SEQ ID NO: 187028 - DNA, 25 bp, SARS Virus
caccagactatccttacggtcgtgt

SEQ ID NO: 187029 - DNA, 25 bp, SARS Virus
accagactatcactacggtcgtgtt

SEQ ID NO: 187030 - DNA, 25 bp, SARS Virus
ccagactatcatcacggtcgtgttt

SEQ ID NO: 187031 - DNA, 25 bp, SARS Virus
cagactatcattccggtcgtgtttg

SEQ ID NO: 187032 - DNA, 25 bp, SARS Virus
agactatcattacggtcgtgtttgg

SEQ ID NO: 187033 - DNA, 25 bp, SARS Virus
gactatcattaccgtcgtgtttgga

SEQ ID NO: 187034 - DNA, 25 bp, SARS Virus
actatcattacgctcgtgtttggat

SEQ ID NO: 187035 - DNA, 25 bp, SARS Virus
ctatcattacggccgtgtttggatg

SEQ ID NO: 187036 - DNA, 25 bp, SARS Virus
tatcattacggtcgtgtttggatgg

SEQ ID NO: 187037 - DNA, 25 bp, SARS Virus
atcattacggtcctgtttggatgga

SEQ ID NO: 187038 - DNA, 25 bp, SARS Virus
tcattacggtcgcgtttggatggag

SEQ ID NO: 187039 - DNA, 25 bp, SARS Virus
cattacggtcgtctttggatggagg

SEQ ID NO: 187040 - DNA, 25 bp, SARS Virus
attacggtcgtgcttggatggaggg

SEQ ID NO: 187041 - DNA, 25 bp, SARS Virus
ttacggtcgtgtctggatggaggga

SEQ ID NO: 187042 - DNA, 25 bp, SARS Virus
tacggtcgtgttcggatggagggaa

SEQ ID NO: 187043 - DNA, 25 bp, SARS Virus
acggtcgtgtttcgatggagggaag

SEQ ID NO: 187044 - DNA, 25 bp, SARS Virus
cggtcgtgtttgcatggagggaagc

SEQ ID NO: 187045 - DNA, 25 bp, SARS Virus
ggtcgtgtttggctggagggaagct

SEQ ID NO: 187046 - DNA, 25 bp, SARS Virus
gtcgtgtttggacggagggaagctt

SEQ ID NO: 187047 - DNA, 25 bp, SARS Virus
tcgtgtttggatcgagggaagctta

SEQ ID NO: 187048 - DNA, 25 bp, SARS Virus
cgtgtttggatgcagggaagcttaa

SEQ ID NO: 187049 - DNA, 25 bp, SARS Virus
gtgtttggatggcgggaagcttaac

SEQ ID NO: 187050 - DNA, 25 bp, SARS Virus
tgtttggatggacggaagcttaaca

SEQ ID NO: 187051 - DNA, 25 bp, SARS Virus
gtttggatggagcgaagcttaacaa

SEQ ID NO: 187052 - DNA, 25 bp, SARS Virus
tttggatggaggcaagcttaacaat

SEQ ID NO: 187053 - DNA, 25 bp, SARS Virus
ttggatggagggcagcttaacaata

SEQ ID NO: 187054 - DNA, 25 bp, SARS Virus
tggatggagggacgcttaacaatat

SEQ ID NO: 187055 - DNA, 25 bp, SARS Virus
ggatggagggaaccttaacaatatc

SEQ ID NO: 187056 - DNA, 25 bp, SARS Virus
gatggagggaagcttaacaatatca

SEQ ID NO: 187057 - DNA, 25 bp, SARS Virus
atggagggaagcctaacaatatcat

SEQ ID NO: 187058 - DNA, 25 bp, SARS Virus
tggagggaagctcaacaatatcatc

SEQ ID NO: 187059 - DNA, 25 bp, SARS Virus
ggagggaagcttcacaatatcatcc

SEQ ID NO: 187060 - DNA, 25 bp, SARS Virus
gagggaagcttaccaatatcatccg

SEQ ID NO: 187061 - DNA, 25 bp, SARS Virus
agggaagcttaacaatatcatccgt

SEQ ID NO: 187062 - DNA, 25 bp, SARS Virus
gggaagcttaaccatatcatccgtt

SEQ ID NO: 187063 - DNA, 25 bp, SARS Virus
ggaagcttaacactatcatccgttc

SEQ ID NO: 187064 - DNA, 25 bp, SARS Virus
gaagcttaacaacatcatccgttca

SEQ ID NO: 187065 - DNA, 25 bp, SARS Virus
aagcttaacaatctcatccgttcac

SEQ ID NO: 187066 - DNA, 25 bp, SARS Virus
agcttaacaataccatccgttcacg

SEQ ID NO: 187067 - DNA, 25 bp, SARS Virus
gcttaacaatatcatccgttcacgt

SEQ ID NO: 187068 - DNA, 25 bp, SARS Virus
cttaacaatatcctccgttcacgta

SEQ ID NO: 187069 - DNA, 25 bp, SARS Virus
ttaacaatatcacccgttcacgtaa

SEQ ID NO: 187070 - DNA, 25 bp, SARS Virus
taacaatatcatccgttcacgtaac

SEQ ID NO: 187071 - DNA, 25 bp, SARS Virus
aacaatatcatccgttcacgtaaca

SEQ ID NO: 187072 - DNA, 25 bp, SARS Virus
acaatatcatcccttcacgtaacag

SEQ ID NO: 187073 - DNA, 25 bp, SARS Virus
caatatcatccgctcacgtaacagt

SEQ ID NO: 187074 - DNA, 25 bp, SARS Virus
aatatcatccgtccacgtaacagta

SEQ ID NO: 187075 - DNA, 25 bp, SARS Virus
atatcatccgttcacgtaacagtag

SEQ ID NO: 187076 - DNA, 25 bp, SARS Virus
tatcatccgttcccgtaacagtagt

SEQ ID NO: 187077 - DNA, 25 bp, SARS Virus
atcatccgttcacgtaacagtagtc

SEQ ID NO: 187078 - DNA, 25 bp, SARS Virus
tcatccgttcacctaacagtagtca

SEQ ID NO: 187079 - DNA, 25 bp, SARS Virus
catccgttcacgcaacagtagtcat

SEQ ID NO: 187080 - DNA, 25 bp, SARS Virus
atccgttcacgtcacagtagtcatg

SEQ ID NO: 187081 - DNA, 25 bp, SARS Virus
tccgttcacgtaccagtagtcatgt

SEQ ID NO: 187082 - DNA, 25 bp, SARS Virus
ccgttcacgtaacagtagtcatgtt

SEQ ID NO: 187083 - DNA, 25 bp, SARS Virus
cgttcacgtaaccgtagtcatgttc

SEQ ID NO: 187084 - DNA, 25 bp, SARS Virus
gttcacgtaacactagtcatgttcg

SEQ ID NO: 187085 - DNA, 25 bp, SARS Virus
ttcacgtaacagcagtcatgttcga

SEQ ID NO: 187086 - DNA, 25 bp, SARS Virus
tcacgtaacagtcgtcatgttcgac

SEQ ID NO: 187087 - DNA, 25 bp, SARS Virus
cacgtaacagtactcatgttcgaca

SEQ ID NO: 187088 - DNA, 25 bp, SARS Virus
acgtaacagtagccatgttcgacaa

SEQ ID NO: 187089 - DNA, 25 bp, SARS Virus
cgtaacagtagtcatgttcgacaaa

SEQ ID NO: 187090 - DNA, 25 bp, SARS Virus
gtaacagtagtcctgttcgacaaac

SEQ ID NO: 187091 - DNA, 25 bp, SARS Virus
taacagtagtcacgttcgacaaaca

SEQ ID NO: 187092 - DNA, 25 bp, SARS Virus
aacagtagtcatcttcgacaaacac

SEQ ID NO: 187093 - DNA, 25 bp, SARS Virus
acagtagtcatgctcgacaaacaca

SEQ ID NO: 187094 - DNA, 25 bp, SARS Virus
cagtagtcatgtccgacaaacacac

SEQ ID NO: 187095 - DNA, 25 bp, SARS Virus
agtagtcatgttcgacaaacacacc

SEQ ID NO: 187096 - DNA, 25 bp, SARS Virus
gtagtcatgttccacaaacacacca

SEQ ID NO: 187097 - DNA, 25 bp, SARS Virus
tagtcatgttcgccaaacacaccat

SEQ ID NO: 187098 - DNA, 25 bp, SARS Virus
agtcatgttcgacaaacacaccatg

SEQ ID NO: 187099 - DNA, 25 bp, SARS Virus
gtcatgttcgaccaacacaccatgg

SEQ ID NO: 187100 - DNA, 25 bp, SARS Virus
tcatgttcgacacacacaccatggt

SEQ ID NO: 187101 - DNA, 25 bp, SARS Virus
catgttcgacaaccacaccatggtc

SEQ ID NO: 187102 - DNA, 25 bp, SARS Virus
atgttcgacaaacacaccatggtcg

SEQ ID NO: 187103 - DNA, 25 bp, SARS Virus
tgttcgacaaacccaccatggtcgg

SEQ ID NO: 187104 - DNA, 25 bp, SARS Virus
gttcgacaaacacaccatggtcggc

SEQ ID NO: 187105 - DNA, 25 bp, SARS Virus
ttcgacaaacaccccatggtcggcg

SEQ ID NO: 187106 - DNA, 25 bp, SARS Virus
tcgacaaacacaccatggtcggcgt

SEQ ID NO: 187107 - DNA, 25 bp, SARS Virus
cgacaaacacaccatggtcggcgtg

SEQ ID NO: 187108 - DNA, 25 bp, SARS Virus
gacaaacacaccctggtcggcgtgt

SEQ ID NO: 187109 - DNA, 25 bp, SARS Virus
acaaacacaccacggtcggcgtgtc

SEQ ID NO: 187110 - DNA, 25 bp, SARS Virus
caaacacaccatcgtcggcgtgtcc

SEQ ID NO: 187111 - DNA, 25 bp, SARS Virus
aaacacaccatgctcggcgtgtcct

SEQ ID NO: 187112 - DNA, 25 bp, SARS Virus
aacacaccatggccggcgtgtcctg

SEQ ID NO: 187113 - DNA, 25 bp, SARS Virus
acacaccatggtcggcgtgtcctgt

SEQ ID NO: 187114 - DNA, 25 bp, SARS Virus
cacaccatggtccgcgtgtcctgta

SEQ ID NO: 187115 - DNA, 25 bp, SARS Virus
acaccatggtcgccgtgtcctgtag

SEQ ID NO: 187116 - DNA, 25 bp, SARS Virus
caccatggtcggcgtgtcctgtaga

SEQ ID NO: 187117 - DNA, 25 bp, SARS Virus
accatggtcggcctgtcctgtagac

SEQ ID NO: 187118 - DNA, 25 bp, SARS Virus
ccatggtcggcgcgtcctgtagaca

SEQ ID NO: 187119 - DNA, 25 bp, SARS Virus
catggtcggcgtctcctgtagacag

SEQ ID NO: 187120 - DNA, 25 bp, SARS Virus
atggtcggcgtgccctgtagacagc

SEQ ID NO: 187121 - DNA, 25 bp, SARS Virus
tggtcggcgtgtcctgtagacagca

SEQ ID NO: 187122 - DNA, 25 bp, SARS Virus
ggtcggcgtgtcctgtagacagcat

SEQ ID NO: 187123 - DNA, 25 bp, SARS Virus
gtcggcgtgtcccgtagacagcatc

SEQ ID NO: 187124 - DNA, 25 bp, SARS Virus
tcggcgtgtcctctagacagcatca

SEQ ID NO: 187125 - DNA, 25 bp, SARS Virus
cggcgtgtcctgcagacagcatcac

SEQ ID NO: 187126 - DNA, 25 bp, SARS Virus
ggcgtgtcctgtcgacagcatcacg

SEQ ID NO: 187127 - DNA, 25 bp, SARS Virus
gcgtgtcctgtacacagcatcacga

SEQ ID NO: 187128 - DNA, 25 bp, SARS Virus
cgtgtcctgtagccagcatcacgat

SEQ ID NO: 187129 - DNA, 25 bp, SARS Virus
gtgtcctgtagacagcatcacgatg

SEQ ID NO: 187130 - DNA, 25 bp, SARS Virus
tgtcctgtagaccgcatcacgatga

SEQ ID NO: 187131 - DNA, 25 bp, SARS Virus
gtcctgtagacaccatcacgatgac

SEQ ID NO: 187132 - DNA, 25 bp, SARS Virus
tcctgtagacagcatcacgatgacc

SEQ ID NO: 187133 - DNA, 25 bp, SARS Virus
cctgtagacagcctcacgatgacct

SEQ ID NO: 187134 - DNA, 25 bp, SARS Virus
ctgtagacagcaccacgatgacctg

SEQ ID NO: 187135 - DNA, 25 bp, SARS Virus
tgtagacagcatcacgatgacctga

SEQ ID NO: 187136 - DNA, 25 bp, SARS Virus
gtagacagcatcccgatgacctgag

SEQ ID NO: 187137 - DNA, 25 bp, SARS Virus
tagacagcatcacgatgacctgagt

SEQ ID NO: 187138 - DNA, 25 bp, SARS Virus
agacagcatcaccatgacctgagtc

SEQ ID NO: 187139 - DNA, 25 bp, SARS Virus
gacagcatcacgctgacctgagtca

SEQ ID NO: 187140 - DNA, 25 bp, SARS Virus
acagcatcacgacgacctgagtcaa

SEQ ID NO: 187141 - DNA, 25 bp, SARS Virus
cagcatcacgatcacctgagtcaag

SEQ ID NO: 187142 - DNA, 25 bp, SARS Virus
agcatcacgatgccctgagtcaagt

SEQ ID NO: 187143 - DNA, 25 bp, SARS Virus
gcatcacgatgacctgagtcaagta

SEQ ID NO: 187144 - DNA, 25 bp, SARS Virus
catcacgatgacctgagtcaagtaa

SEQ ID NO: 187145 - DNA, 25 bp, SARS Virus
atcacgatgacccgagtcaagtaat

SEQ ID NO: 187146 - DNA, 25 bp, SARS Virus
tcacgatgacctcagtcaagtaata

SEQ ID NO: 187147 - DNA, 25 bp, SARS Virus
cacgatgacctgcgtcaagtaataa

SEQ ID NO: 187148 - DNA, 25 bp, SARS Virus
acgatgacctgactcaagtaataag

SEQ ID NO: 187149 - DNA, 25 bp, SARS Virus
cgatgacctgagccaagtaataaga

SEQ ID NO: 187150 - DNA, 25 bp, SARS Virus
gatgacctgagtcaagtaataagac

SEQ ID NO: 187151 - DNA, 25 bp, SARS Virus
atgacctgagtccagtaataagaca

SEQ ID NO: 187152 - DNA, 25 bp, SARS Virus
tgacctgagtcacgtaataagacat

SEQ ID NO: 187153 - DNA, 25 bp, SARS Virus
gacctgagtcaactaataagacatc

SEQ ID NO: 187154 - DNA, 25 bp, SARS Virus
acctgagtcaagcaataagacatca

SEQ ID NO: 187155 - DNA, 25 bp, SARS Virus
cctgagtcaagtcataagacatcaa

SEQ ID NO: 187156 - DNA, 25 bp, SARS Virus
ctgagtcaagtactaagacatcaaa

SEQ ID NO: 187157 - DNA, 25 bp, SARS Virus
tgagtcaagtaacaagacatcaaat

SEQ ID NO: 187158 - DNA, 25 bp, SARS Virus
gagtcaagtaatcagacatcaaatt

SEQ ID NO: 187159 - DNA, 25 bp, SARS Virus
agtcaagtaatacgacatcaaattg

SEQ ID NO: 187160 - DNA, 25 bp, SARS Virus
gtcaagtaataacacatcaaattgt

SEQ ID NO: 187161 - DNA, 25 bp, SARS Virus
tcaagtaataagccatcaaattgtc

SEQ ID NO: 187162 - DNA, 25 bp, SARS Virus
caagtaataagacatcaaattgtcg

SEQ ID NO: 187163 - DNA, 25 bp, SARS Virus
aagtaataagacctcaaattgtcga

SEQ ID NO: 187164 - DNA, 25 bp, SARS Virus
agtaataagacaccaaattgtcgac

SEQ ID NO: 187165 - DNA, 25 bp, SARS Virus
gtaataagacatcaaattgtcgact

SEQ ID NO: 187166 - DNA, 25 bp, SARS Virus
taataagacatccaattgtcgactc

SEQ ID NO: 187167 - DNA, 25 bp, SARS Virus
aataagacatcacattgtcgactca

SEQ ID NO: 187168 - DNA, 25 bp, SARS Virus
ataagacatcaacttgtcgactcaa

SEQ ID NO: 187169 - DNA, 25 bp, SARS Virus
taagacatcaaactgtcgactcaac

SEQ ID NO: 187170 - DNA, 25 bp, SARS Virus
aagacatcaaatcgtcgactcaacc

SEQ ID NO: 187171 - DNA, 25 bp, SARS Virus
agacatcaaattctcgactcaaccg

SEQ ID NO: 187172 - DNA, 25 bp, SARS Virus
gacatcaaattgccgactcaaccga

SEQ ID NO: 187173 - DNA, 25 bp, SARS Virus
acatcaaattgtcgactcaaccgag

SEQ ID NO: 187174 - DNA, 25 bp, SARS Virus
catcaaattgtccactcaaccgaga

SEQ ID NO: 187175 - DNA, 25 bp, SARS Virus
atcaaattgtcgcctcaaccgagaa

SEQ ID NO: 187176 - DNA, 25 bp, SARS Virus
tcaaattgtcgactcaaccgagaat

SEQ ID NO: 187177 - DNA, 25 bp, SARS Virus
caaattgtcgacccaaccgagaatc

SEQ ID NO: 187178 - DNA, 25 bp, SARS Virus
aaattgtcgactcaaccgagaatct

SEQ ID NO: 187179 - DNA, 25 bp, SARS Virus
aattgtcgactccaccgagaatctc

SEQ ID NO: 187180 - DNA, 25 bp, SARS Virus
attgtcgactcacccgagaatctcg

SEQ ID NO: 187181 - DNA, 25 bp, SARS Virus
ttgtcgactcaaccgagaatctcga

SEQ ID NO: 187182 - DNA, 25 bp, SARS Virus
tgtcgactcaaccgagaatctcgac

SEQ ID NO: 187183 - DNA, 25 bp, SARS Virus
gtcgactcaacccagaatctcgaca

SEQ ID NO: 187184 - DNA, 25 bp, SARS Virus
tcgactcaaccgcgaatctcgacat

SEQ ID NO: 187185 - DNA, 25 bp, SARS Virus
cgactcaaccgacaatctcgacatt

SEQ ID NO: 187186 - DNA, 25 bp, SARS Virus
gactcaaccgagcatctcgacattg

SEQ ID NO: 187187 - DNA, 25 bp, SARS Virus
actcaaccgagactctcgacattgt

SEQ ID NO: 187188 - DNA, 25 bp, SARS Virus
ctcaaccgagaacctcgacattgtt

SEQ ID NO: 187189 - DNA, 25 bp, SARS Virus
tcaaccgagaatctcgacattgtta

SEQ ID NO: 187190 - DNA, 25 bp, SARS Virus
caaccgagaatcccgacattgttat

SEQ ID NO: 187191 - DNA, 25 bp, SARS Virus
aaccgagaatctcgacattgttatt

SEQ ID NO: 187192 - DNA, 25 bp, SARS Virus
accgagaatctccacattgttattc

SEQ ID NO: 187193 - DNA, 25 bp, SARS Virus
ccgagaatctcgccattgttattct

SEQ ID NO: 187194 - DNA, 25 bp, SARS Virus
cgagaatctcgacattgttattctc

SEQ ID NO: 187195 - DNA, 25 bp, SARS Virus
gagaatctcgaccttgttattctcc

SEQ ID NO: 187196 - DNA, 25 bp, SARS Virus
agaatctcgacactgttattctccg

SEQ ID NO: 187197 - DNA, 25 bp, SARS Virus
gaatctcgacatcgttattctccgg

SEQ ID NO: 187198 - DNA, 25 bp, SARS Virus
aatctcgacattcttattctccggt

SEQ ID NO: 187199 - DNA, 25 bp, SARS Virus
atctcgacattgctattctccggtt

SEQ ID NO: 187200 - DNA, 25 bp, SARS Virus
tctcgacattgtcattctccggttc

SEQ ID NO: 187201 - DNA, 25 bp, SARS Virus
ctcgacattgttcttctccggttcg

SEQ ID NO: 187202 - DNA, 25 bp, SARS Virus
tcgacattgttactctccggttcgg

SEQ ID NO: 187203 - DNA, 25 bp, SARS Virus
cgacattgttatcctccggttcggt

SEQ ID NO: 187204 - DNA, 25 bp, SARS Virus
gacattgttattctccggttcggtt

SEQ ID NO: 187205 - DNA, 25 bp, SARS Virus
acattgttattccccggttcggttt

SEQ ID NO: 187206 - DNA, 25 bp, SARS Virus
cattgttattctccggttcggttta

SEQ ID NO: 187207 - DNA, 25 bp, SARS Virus
attgttattctccggttcggtttaa

SEQ ID NO: 187208 - DNA, 25 bp, SARS Virus
ttgttattctcccgttcggtttaaa

SEQ ID NO: 187209 - DNA, 25 bp, SARS Virus
tgttattctccgcttcggtttaaac

SEQ ID NO: 187210 - DNA, 25 bp, SARS Virus
gttattctccggctcggtttaaacc

SEQ ID NO: 187211 - DNA, 25 bp, SARS Virus
ttattctccggtccggtttaaacca

SEQ ID NO: 187212 - DNA, 25 bp, SARS Virus
tattctccggttcggtttaaaccac

SEQ ID NO: 187213 - DNA, 25 bp, SARS Virus
attctccggttccgtttaaaccact

SEQ ID NO: 187214 - DNA, 25 bp, SARS Virus
ttctccggttcgctttaaaccactt

SEQ ID NO: 187215 - DNA, 25 bp, SARS Virus
tctccggttcggcttaaaccactta

SEQ ID NO: 187216 - DNA, 25 bp, SARS Virus
ctccggttcggtctaaaccacttaa

SEQ ID NO: 187217 - DNA, 25 bp, SARS Virus
tccggttcggttcaaaccacttaac

SEQ ID NO: 187218 - DNA, 25 bp, SARS Virus
ccggttcggtttcaaccacttaaca

SEQ ID NO: 187219 - DNA, 25 bp, SARS Virus
cggttcggtttacaccacttaacag

SEQ ID NO: 187220 - DNA, 25 bp, SARS Virus
ggttcggtttaacccacttaacagg

SEQ ID NO: 187221 - DNA, 25 bp, SARS Virus
gttcggtttaaaccacttaacaggt

SEQ ID NO: 187222 - DNA, 25 bp, SARS Virus
ttcggtttaaaccacttaacaggta

SEQ ID NO: 187223 - DNA, 25 bp, SARS Virus
tcggtttaaaccccttaacaggtac

SEQ ID NO: 187224 - DNA, 25 bp, SARS Virus
cggtttaaaccacttaacaggtaca

SEQ ID NO: 187225 - DNA, 25 bp, SARS Virus
ggtttaaaccacctaacaggtacaa

SEQ ID NO: 187226 - DNA, 25 bp, SARS Virus
gtttaaaccactcaacaggtacaat

SEQ ID NO: 187227 - DNA, 25 bp, SARS Virus
tttaaaccacttcacaggtacaatt

SEQ ID NO: 187228 - DNA, 25 bp, SARS Virus
ttaaaccacttaccaggtacaatta

SEQ ID NO: 187229 - DNA, 25 bp, SARS Virus
taaaccacttaacaggtacaattaa

SEQ ID NO: 187230 - DNA, 25 bp, SARS Virus
aaaccacttaaccggtacaattaaa

SEQ ID NO: 187231 - DNA, 25 bp, SARS Virus
aaccacttaacacgtacaattaaag

SEQ ID NO: 187232 - DNA, 25 bp, SARS Virus
accacttaacagctacaattaaagt

SEQ ID NO: 187233 - DNA, 25 bp, SARS Virus
ccacttaacaggcacaattaaagtg

SEQ ID NO: 187234 - DNA, 25 bp, SARS Virus
cacttaacaggtccaattaaagtga

SEQ ID NO: 187235 - DNA, 25 bp, SARS Virus
acttaacaggtacaattaaagtgat

SEQ ID NO: 187236 - DNA, 25 bp, SARS Virus
cttaacaggtaccattaaagtgatt

SEQ ID NO: 187237 - DNA, 25 bp, SARS Virus
ttaacaggtacacttaaagtgattc

SEQ ID NO: 187238 - DNA, 25 bp, SARS Virus
taacaggtacaactaaagtgattca

SEQ ID NO: 187239 - DNA, 25 bp, SARS Virus
aacaggtacaatcaaagtgattcaa

SEQ ID NO: 187240 - DNA, 25 bp, SARS Virus
acaggtacaattcaagtgattcaac

SEQ ID NO: 187241 - DNA, 25 bp, SARS Virus
caggtacaattacagtgattcaact

SEQ ID NO: 187242 - DNA, 25 bp, SARS Virus
aggtacaattaacgtgattcaactt

SEQ ID NO: 187243 - DNA, 25 bp, SARS Virus
ggtacaattaaactgattcaacttg

SEQ ID NO: 187244 - DNA, 25 bp, SARS Virus
gtacaattaaagcgattcaacttgt

SEQ ID NO: 187245 - DNA, 25 bp, SARS Virus
tacaattaaagtcattcaacttgtt

SEQ ID NO: 187246 - DNA, 25 bp, SARS Virus
acaattaaagtgcttcaacttgtta

SEQ ID NO: 187247 - DNA, 25 bp, SARS Virus
caattaaagtgactcaacttgttag

SEQ ID NO: 187248 - DNA, 25 bp, SARS Virus
aattaaagtgatccaacttgttaga

SEQ ID NO: 187249 - DNA, 25 bp, SARS Virus
attaaagtgattcaacttgttagaa

SEQ ID NO: 187250 - DNA, 25 bp, SARS Virus
ttaaagtgattccacttgttagaac

SEQ ID NO: 187251 - DNA, 25 bp, SARS Virus
taaagtgattcaccttgttagaacg

SEQ ID NO: 187252 - DNA, 25 bp, SARS Virus
aaagtgattcaacttgttagaacga

SEQ ID NO: 187253 - DNA, 25 bp, SARS Virus
aagtgattcaacctgttagaacgat

SEQ ID NO: 187254 - DNA, 25 bp, SARS Virus
agtgattcaactcgttagaacgata

SEQ ID NO: 187255 - DNA, 25 bp, SARS Virus
gtgattcaacttcttagaacgatag

SEQ ID NO: 187256 - DNA, 25 bp, SARS Virus
tgattcaacttgctagaacgatagg

SEQ ID NO: 187257 - DNA, 25 bp, SARS Virus
gattcaacttgtcagaacgataggc

SEQ ID NO: 187258 - DNA, 25 bp, SARS Virus
attcaacttgttcgaacgataggcg

SEQ ID NO: 187259 - DNA, 25 bp, SARS Virus
ttcaacttgttacaacgataggcgt

SEQ ID NO: 187260 - DNA, 25 bp, SARS Virus
tcaacttgttagcacgataggcgta

SEQ ID NO: 187261 - DNA, 25 bp, SARS Virus
caacttgttagaccgataggcgtag

SEQ ID NO: 187262 - DNA, 25 bp, SARS Virus
aacttgttagaacgataggcgtagt

SEQ ID NO: 187263 - DNA, 25 bp, SARS Virus
acttgttagaaccataggcgtagtt

SEQ ID NO: 187264 - DNA, 25 bp, SARS Virus
cttgttagaacgctaggcgtagttg

SEQ ID NO: 187265 - DNA, 25 bp, SARS Virus
ttgttagaacgacaggcgtagttgt

SEQ ID NO: 187266 - DNA, 25 bp, SARS Virus
tgttagaacgatcggcgtagttgtt

SEQ ID NO: 187267 - DNA, 25 bp, SARS Virus
gttagaacgatacgcgtagttgttg

SEQ ID NO: 187268 - DNA, 25 bp, SARS Virus
ttagaacgatagccgtagttgttga

SEQ ID NO: 187269 - DNA, 25 bp, SARS Virus
tagaacgataggcgtagttgttgaa

SEQ ID NO: 187270 - DNA, 25 bp, SARS Virus
agaacgataggcctagttgttgaac

SEQ ID NO: 187271 - DNA, 25 bp, SARS Virus
gaacgataggcgcagttgttgaacg

SEQ ID NO: 187272 - DNA, 25 bp, SARS Virus
aacgataggcgtcgttgttgaacga

SEQ ID NO: 187273 - DNA, 25 bp, SARS Virus
acgataggcgtacttgttgaacgac

SEQ ID NO: 187274 - DNA, 25 bp, SARS Virus
cgataggcgtagctgttgaacgacc

SEQ ID NO: 187275 - DNA, 25 bp, SARS Virus
gataggcgtagtcgttgaacgacct

SEQ ID NO: 187276 - DNA, 25 bp, SARS Virus
ataggcgtagttcttgaacgaccta

SEQ ID NO: 187277 - DNA, 25 bp, SARS Virus
taggcgtagttgctgaacgacctaa

SEQ ID NO: 187278 - DNA, 25 bp, SARS Virus
aggcgtagttgtcgaacgacctaaa

SEQ ID NO: 187279 - DNA, 25 bp, SARS Virus
ggcgtagttgttcaacgacctaaag

SEQ ID NO: 187280 - DNA, 25 bp, SARS Virus
gcgtagttgttgcacgacctaaagg

SEQ ID NO: 187281 - DNA, 25 bp, SARS Virus
cgtagttgttgaccgacctaaaggg

SEQ ID NO: 187282 - DNA, 25 bp, SARS Virus
gtagttgttgaacgacctaaagggt

SEQ ID NO: 187283 - DNA, 25 bp, SARS Virus
tagttgttgaaccacctaaagggtc

SEQ ID NO: 187284 - DNA, 25 bp, SARS Virus
agttgttgaacgccctaaagggtct

SEQ ID NO: 187285 - DNA, 25 bp, SARS Virus
gttgttgaacgacctaaagggtctc

SEQ ID NO: 187286 - DNA, 25 bp, SARS Virus
ttgttgaacgacctaaagggtctca

SEQ ID NO: 187287 - DNA, 25 bp, SARS Virus
tgttgaacgacccaaagggtctcac

SEQ ID NO: 187288 - DNA, 25 bp, SARS Virus
gttgaacgacctcaagggtctcacg

SEQ ID NO: 187289 - DNA, 25 bp, SARS Virus
ttgaacgacctacagggtctcacgt

SEQ ID NO: 187290 - DNA, 25 bp, SARS Virus
tgaacgacctaacgggtctcacgtc

SEQ ID NO: 187291 - DNA, 25 bp, SARS Virus
gaacgacctaaacggtctcacgtct

SEQ ID NO: 187292 - DNA, 25 bp, SARS Virus
aacgacctaaagcgtctcacgtcta

SEQ ID NO: 187293 - DNA, 25 bp, SARS Virus
acgacctaaaggctctcacgtctac

SEQ ID NO: 187294 - DNA, 25 bp, SARS Virus
cgacctaaagggcctcacgtctacg

SEQ ID NO: 187295 - DNA, 25 bp, SARS Virus
gacctaaagggtctcacgtctacgt

SEQ ID NO: 187296 - DNA, 25 bp, SARS Virus
acctaaagggtcccacgtctacgta

SEQ ID NO: 187297 - DNA, 25 bp, SARS Virus
cctaaagggtctcacgtctacgtat

SEQ ID NO: 187298 - DNA, 25 bp, SARS Virus
ctaaagggtctcccgtctacgtata

SEQ ID NO: 187299 - DNA, 25 bp, SARS Virus
taaagggtctcacgtctacgtatac

SEQ ID NO: 187300 - DNA, 25 bp, SARS Virus
aaagggtctcacctctacgtataca

SEQ ID NO: 187301 - DNA, 25 bp, SARS Virus
aagggtctcacgcctacgtatacat

SEQ ID NO: 187302 - DNA, 25 bp, SARS Virus
agggtctcacgtctacgtatacatt

SEQ ID NO: 187303 - DNA, 25 bp, SARS Virus
gggtctcacgtccacgtatacattt

SEQ ID NO: 187304 - DNA, 25 bp, SARS Virus
ggtctcacgtctccgtatacatttc

SEQ ID NO: 187305 - DNA, 25 bp, SARS Virus
gtctcacgtctacgtatacatttcc

SEQ ID NO: 187306 - DNA, 25 bp, SARS Virus
tctcacgtctacctatacatttcca

SEQ ID NO: 187307 - DNA, 25 bp, SARS Virus
ctcacgtctacgcatacatttccac

SEQ ID NO: 187308 - DNA, 25 bp, SARS Virus
tcacgtctacgtctacatttccaca

SEQ ID NO: 187309 - DNA, 25 bp, SARS Virus
cacgtctacgtacacatttccacaa

SEQ ID NO: 187310 - DNA, 25 bp, SARS Virus
acgtctacgtatccatttccacaat

SEQ ID NO: 187311 - DNA, 25 bp, SARS Virus
cgtctacgtatacatttccacaatg

SEQ ID NO: 187312 - DNA, 25 bp, SARS Virus
gtctacgtatacctttccacaatgg

SEQ ID NO: 187313 - DNA, 25 bp, SARS Virus
tctacgtatacacttccacaatggt

SEQ ID NO: 187314 - DNA, 25 bp, SARS Virus
ctacgtatacatctccacaatggta

SEQ ID NO: 187315 - DNA, 25 bp, SARS Virus
tacgtatacattcccacaatggtag

SEQ ID NO: 187316 - DNA, 25 bp, SARS Virus
acgtatacatttccacaatggtagt

SEQ ID NO: 187317 - DNA, 25 bp, SARS Virus
cgtatacatttccacaatggtagtg

SEQ ID NO: 187318 - DNA, 25 bp, SARS Virus
gtatacatttccccaatggtagtgt

SEQ ID NO: 187319 - DNA, 25 bp, SARS Virus
tatacatttccacaatggtagtgtt

SEQ ID NO: 187320 - DNA, 25 bp, SARS Virus
atacatttccaccatggtagtgttc

SEQ ID NO: 187321 - DNA, 25 bp, SARS Virus
tacatttccacactggtagtgttca

SEQ ID NO: 187322 - DNA, 25 bp, SARS Virus
acatttccacaacggtagtgttcac

SEQ ID NO: 187323 - DNA, 25 bp, SARS Virus
catttccacaatcgtagtgttcaca

SEQ ID NO: 187324 - DNA, 25 bp, SARS Virus
atttccacaatgctagtgttcacaa

SEQ ID NO: 187325 - DNA, 25 bp, SARS Virus
tttccacaatggcagtgttcacaag

SEQ ID NO: 187326 - DNA, 25 bp, SARS Virus
ttccacaatggtcgtgttcacaaga

SEQ ID NO: 187327 - DNA, 25 bp, SARS Virus
tccacaatggtactgttcacaagaa

SEQ ID NO: 187328 - DNA, 25 bp, SARS Virus
ccacaatggtagcgttcacaagaac

SEQ ID NO: 187329 - DNA, 25 bp, SARS Virus
cacaatggtagtcttcacaagaaca

SEQ ID NO: 187330 - DNA, 25 bp, SARS Virus
acaatggtagtgctcacaagaacat

SEQ ID NO: 187331 - DNA, 25 bp, SARS Virus
caatggtagtgtccacaagaacatc

SEQ ID NO: 187332 - DNA, 25 bp, SARS Virus
aatggtagtgttcacaagaacatcc

SEQ ID NO: 187333 - DNA, 25 bp, SARS Virus
atggtagtgttcccaagaacatcca

SEQ ID NO: 187334 - DNA, 25 bp, SARS Virus
tggtagtgttcacaagaacatccat

SEQ ID NO: 187335 - DNA, 25 bp, SARS Virus
ggtagtgttcaccagaacatccatg

SEQ ID NO: 187336 - DNA, 25 bp, SARS Virus
gtagtgttcacacgaacatccatgg

SEQ ID NO: 187337 - DNA, 25 bp, SARS Virus
tagtgttcacaacaacatccatggt

SEQ ID NO: 187338 - DNA, 25 bp, SARS Virus
agtgttcacaagcacatccatggta

SEQ ID NO: 187339 - DNA, 25 bp, SARS Virus
gtgttcacaagaccatccatggtat

SEQ ID NO: 187340 - DNA, 25 bp, SARS Virus
tgttcacaagaacatccatggtatt

SEQ ID NO: 187341 - DNA, 25 bp, SARS Virus
gttcacaagaacctccatggtatta

SEQ ID NO: 187342 - DNA, 25 bp, SARS Virus
ttcacaagaacacccatggtattag

SEQ ID NO: 187343 - DNA, 25 bp, SARS Virus
tcacaagaacatccatggtattagt

SEQ ID NO: 187344 - DNA, 25 bp, SARS Virus
cacaagaacatccatggtattagtc

SEQ ID NO: 187345 - DNA, 25 bp, SARS Virus
acaagaacatccctggtattagtcc

SEQ ID NO: 187346 - DNA, 25 bp, SARS Virus
caagaacatccacggtattagtccc

SEQ ID NO: 187347 - DNA, 25 bp, SARS Virus
aagaacatccatcgtattagtccct

SEQ ID NO: 187348 - DNA, 25 bp, SARS Virus
agaacatccatgctattagtccctg

SEQ ID NO: 187349 - DNA, 25 bp, SARS Virus
gaacatccatggcattagtccctgt

SEQ ID NO: 187350 - DNA, 25 bp, SARS Virus
aacatccatggtcttagtccctgtt

SEQ ID NO: 187351 - DNA, 25 bp, SARS Virus
acatccatggtactagtccctgttg

SEQ ID NO: 187352 - DNA, 25 bp, SARS Virus
catccatggtatcagtccctgttgt

SEQ ID NO: 187353 - DNA, 25 bp, SARS Virus
atccatggtattcgtccctgttgtt

SEQ ID NO: 187354 - DNA, 25 bp, SARS Virus
tccatggtattactccctgttgttg

SEQ ID NO: 187355 - DNA, 25 bp, SARS Virus
ccatggtattagcccctgttgttgg

SEQ ID NO: 187356 - DNA, 25 bp, SARS Virus
catggtattagtccctgttgttggt

SEQ ID NO: 187357 - DNA, 25 bp, SARS Virus
atggtattagtccctgttgttggta

SEQ ID NO: 187358 - DNA, 25 bp, SARS Virus
tggtattagtccctgttgttggtac

SEQ ID NO: 187359 - DNA, 25 bp, SARS Virus
ggtattagtccccgttgttggtact

SEQ ID NO: 187360 - DNA, 25 bp, SARS Virus
gtattagtccctcttgttggtactc

SEQ ID NO: 187361 - DNA, 25 bp, SARS Virus
tattagtccctgctgttggtactca

SEQ ID NO: 187362 - DNA, 25 bp, SARS Virus
attagtccctgtcgttggtactcaa

SEQ ID NO: 187363 - DNA, 25 bp, SARS Virus
ttagtccctgttcttggtactcaaa

SEQ ID NO: 187364 - DNA, 25 bp, SARS Virus
tagtccctgttgctggtactcaaac

SEQ ID NO: 187365 - DNA, 25 bp, SARS Virus
agtccctgttgtcggtactcaaacc

SEQ ID NO: 187366 - DNA, 25 bp, SARS Virus
gtccctgttgttcgtactcaaaccg

SEQ ID NO: 187367 - DNA, 25 bp, SARS Virus
tccctgttgttgctactcaaaccga

SEQ ID NO: 187368 - DNA, 25 bp, SARS Virus
ccctgttgttggcactcaaaccgac

SEQ ID NO: 187369 - DNA, 25 bp, SARS Virus
cctgttgttggtcctcaaaccgacg

SEQ ID NO: 187370 - DNA, 25 bp, SARS Virus
ctgttgttggtactcaaaccgacga

SEQ ID NO: 187371 - DNA, 25 bp, SARS Virus
tgttgttggtacccaaaccgacgac

SEQ ID NO: 187372 - DNA, 25 bp, SARS Virus
gttgttggtactcaaaccgacgaca

SEQ ID NO: 187373 - DNA, 25 bp, SARS Virus
ttgttggtactccaaccgacgacat

SEQ ID NO: 187374 - DNA, 25 bp, SARS Virus
tgttggtactcacaccgacgacatc

SEQ ID NO: 187375 - DNA, 25 bp, SARS Virus
gttggtactcaacccgacgacatca

SEQ ID NO: 187376 - DNA, 25 bp, SARS Virus
ttggtactcaaaccgacgacatcag

SEQ ID NO: 187377 - DNA, 25 bp, SARS Virus
tggtactcaaaccgacgacatcagt

SEQ ID NO: 187378 - DNA, 25 bp, SARS Virus
ggtactcaaacccacgacatcagtt

SEQ ID NO: 187379 - DNA, 25 bp, SARS Virus
gtactcaaaccgccgacatcagtta

SEQ ID NO: 187380 - DNA, 25 bp, SARS Virus
tactcaaaccgacgacatcagttac

SEQ ID NO: 187381 - DNA, 25 bp, SARS Virus
actcaaaccgaccacatcagttacc

SEQ ID NO: 187382 - DNA, 25 bp, SARS Virus
ctcaaaccgacgccatcagttacca

SEQ ID NO: 187383 - DNA, 25 bp, SARS Virus
tcaaaccgacgacatcagttaccat

SEQ ID NO: 187384 - DNA, 25 bp, SARS Virus
caaaccgacgacctcagttaccata

SEQ ID NO: 187385 - DNA, 25 bp, SARS Virus
aaaccgacgacaccagttaccatac

SEQ ID NO: 187386 - DNA, 25 bp, SARS Virus
aaccgacgacatcagttaccatact

SEQ ID NO: 187387 - DNA, 25 bp, SARS Virus
accgacgacatccgttaccatacta

SEQ ID NO: 187388 - DNA, 25 bp, SARS Virus
ccgacgacatcacttaccatactac

SEQ ID NO: 187389 - DNA, 25 bp, SARS Virus
cgacgacatcagctaccatactaca

SEQ ID NO: 187390 - DNA, 25 bp, SARS Virus
gacgacatcagtcaccatactacaa

SEQ ID NO: 187391 - DNA, 25 bp, SARS Virus
acgacatcagttcccatactacaac

SEQ ID NO: 187392 - DNA, 25 bp, SARS Virus
cgacatcagttaccatactacaact

SEQ ID NO: 187393 - DNA, 25 bp, SARS Virus
gacatcagttaccatactacaactc

SEQ ID NO: 187394 - DNA, 25 bp, SARS Virus
acatcagttaccctactacaactca

SEQ ID NO: 187395 - DNA, 25 bp, SARS Virus
catcagttaccacactacaactcac

SEQ ID NO: 187396 - DNA, 25 bp, SARS Virus
atcagttaccatcctacaactcacc

SEQ ID NO: 187397 - DNA, 25 bp, SARS Virus
tcagttaccatactacaactcacct

SEQ ID NO: 187398 - DNA, 25 bp, SARS Virus
cagttaccataccacaactcacctt

SEQ ID NO: 187399 - DNA, 25 bp, SARS Virus
agttaccatactccaactcaccttg

SEQ ID NO: 187400 - DNA, 25 bp, SARS Virus
gttaccatactacaactcaccttgt

SEQ ID NO: 187401 - DNA, 25 bp, SARS Virus
ttaccatactaccactcaccttgtg

SEQ ID NO: 187402 - DNA, 25 bp, SARS Virus
taccatactacacctcaccttgtgt

SEQ ID NO: 187403 - DNA, 25 bp, SARS Virus
accatactacaactcaccttgtgtt

SEQ ID NO: 187404 - DNA, 25 bp, SARS Virus
ccatactacaacccaccttgtgttg

SEQ ID NO: 187405 - DNA, 25 bp, SARS Virus
catactacaactcaccttgtgttgg

SEQ ID NO: 187406 - DNA, 25 bp, SARS Virus
atactacaactccccttgtgttggt

SEQ ID NO: 187407 - DNA, 25 bp, SARS Virus
tactacaactcaccttgtgttggta

SEQ ID NO: 187408 - DNA, 25 bp, SARS Virus
actacaactcaccttgtgttggtag

SEQ ID NO: 187409 - DNA, 25 bp, SARS Virus
ctacaactcaccctgtgttggtagt

SEQ ID NO: 187410 - DNA, 25 bp, SARS Virus
tacaactcacctcgtgttggtagtg

SEQ ID NO: 187411 - DNA, 25 bp, SARS Virus
acaactcaccttctgttggtagtgc

SEQ ID NO: 187412 - DNA, 25 bp, SARS Virus
caactcaccttgcgttggtagtgcg

SEQ ID NO: 187413 - DNA, 25 bp, SARS Virus
aactcaccttgtcttggtagtgcgc

SEQ ID NO: 187414 - DNA, 25 bp, SARS Virus
actcaccttgtgctggtagtgcgcg

SEQ ID NO: 187415 - DNA, 25 bp, SARS Virus
ctcaccttgtgtcggtagtgcgcgt

SEQ ID NO: 187416 - DNA, 25 bp, SARS Virus
tcaccttgtgttcgtagtgcgcgta

SEQ ID NO: 187417 - DNA, 25 bp, SARS Virus
caccttgtgttgctagtgcgcgtaa

SEQ ID NO: 187418 - DNA, 25 bp, SARS Virus
accttgtgttggcagtgcgcgtaac

SEQ ID NO: 187419 - DNA, 25 bp, SARS Virus
ccttgtgttggtcgtgcgcgtaaca

SEQ ID NO: 187420 - DNA, 25 bp, SARS Virus
cttgtgttggtactgcgcgtaacaa

SEQ ID NO: 187421 - DNA, 25 bp, SARS Virus
ttgtgttggtagcgcgcgtaacaac

SEQ ID NO: 187422 - DNA, 25 bp, SARS Virus
tgtgttggtagtccgcgtaacaact

SEQ ID NO: 187423 - DNA, 25 bp, SARS Virus
gtgttggtagtgcgcgtaacaacta

SEQ ID NO: 187424 - DNA, 25 bp, SARS Virus
tgttggtagtgcccgtaacaactat

SEQ ID NO: 187425 - DNA, 25 bp, SARS Virus
acagacattgttgggatgttccacc

SEQ ID NO: 187426 - DNA, 25 bp, SARS Virus
cagacattgtttggatgttccacca

SEQ ID NO: 187427 - DNA, 25 bp, SARS Virus
agacattgtttggatgttccaccaa

SEQ ID NO: 187428 - DNA, 25 bp, SARS Virus
gacattgtttgggtgttccaccaag

SEQ ID NO: 187429 - DNA, 25 bp, SARS Virus
acattgtttggaggttccaccaagg

SEQ ID NO: 187430 - DNA, 25 bp, SARS Virus
cattgtttggatgttccaccaaggt

SEQ ID NO: 187431 - DNA, 25 bp, SARS Virus
attgtttggatggtccaccaaggtc

SEQ ID NO: 187432 - DNA, 25 bp, SARS Virus
ttgtttggatgtgccaccaaggtca

SEQ ID NO: 187433 - DNA, 25 bp, SARS Virus
tgtttggatgttgcaccaaggtcaa

SEQ ID NO: 187434 - DNA, 25 bp, SARS Virus
gtttggatgttcgaccaaggtcaag

SEQ ID NO: 187435 - DNA, 25 bp, SARS Virus
tttggatgttccgccaaggtcaaga

SEQ ID NO: 187436 - DNA, 25 bp, SARS Virus
ttggatgttccagcaaggtcaagac

SEQ ID NO: 187437 - DNA, 25 bp, SARS Virus
tggatgttccacgaaggtcaagaca

SEQ ID NO: 187438 - DNA, 25 bp, SARS Virus
ggatgttccaccgaggtcaagacac

SEQ ID NO: 187439 - DNA, 25 bp, SARS Virus
gatgttccaccagggtcaagacaca

SEQ ID NO: 187440 - DNA, 25 bp, SARS Virus
atgttccaccaaggtcaagacacat

SEQ ID NO: 187441 - DNA, 25 bp, SARS Virus
tgttccaccaaggtcaagacacatt

SEQ ID NO: 187442 - DNA, 25 bp, SARS Virus
gttccaccaagggcaagacacattt

SEQ ID NO: 187443 - DNA, 25 bp, SARS Virus
ttccaccaaggtgaagacacattta

SEQ ID NO: 187444 - DNA, 25 bp, SARS Virus
tccaccaaggtcgagacacatttaa

SEQ ID NO: 187445 - DNA, 25 bp, SARS Virus
ccaccaaggtcaggacacatttaac

SEQ ID NO: 187446 - DNA, 25 bp, SARS Virus
caccaaggtcaagacacatttaaca

SEQ ID NO: 187447 - DNA, 25 bp, SARS Virus
accaaggtcaaggcacatttaacat

SEQ ID NO: 187448 - DNA, 25 bp, SARS Virus
ccaaggtcaagagacatttaacatg

SEQ ID NO: 187449 - DNA, 25 bp, SARS Virus
caaggtcaagacgcatttaacatgg

SEQ ID NO: 187450 - DNA, 25 bp, SARS Virus
aaggtcaagacagatttaacatgga

SEQ ID NO: 187451 - DNA, 25 bp, SARS Virus
aggtcaagacacgtttaacatggac

SEQ ID NO: 187452 - DNA, 25 bp, SARS Virus
ggtcaagacacagttaacatggaca

SEQ ID NO: 187453 - DNA, 25 bp, SARS Virus
gtcaagacacatgtaacatggacat

SEQ ID NO: 187454 - DNA, 25 bp, SARS Virus
tcaagacacattgaacatggacatg

SEQ ID NO: 187455 - DNA, 25 bp, SARS Virus
caagacacatttgacatggacatgg

SEQ ID NO: 187456 - DNA, 25 bp, SARS Virus
aagacacatttagcatggacatggt

SEQ ID NO: 187457 - DNA, 25 bp, SARS Virus
agacacatttaagatggacatggta

SEQ ID NO: 187458 - DNA, 25 bp, SARS Virus
gacacatttaacgtggacatggtag

SEQ ID NO: 187459 - DNA, 25 bp, SARS Virus
acacatttaacagggacatggtagt

SEQ ID NO: 187460 - DNA, 25 bp, SARS Virus
cacatttaacatggacatggtagtg

SEQ ID NO: 187461 - DNA, 25 bp, SARS Virus
acatttaacatggacatggtagtga

SEQ ID NO: 187462 - DNA, 25 bp, SARS Virus
catttaacatgggcatggtagtgag

SEQ ID NO: 187463 - DNA, 25 bp, SARS Virus
atttaacatggagatggtagtgaga

SEQ ID NO: 187464 - DNA, 25 bp, SARS Virus
tttaacatggacgtggtagtgagaa

SEQ ID NO: 187465 - DNA, 25 bp, SARS Virus
ttaacatggacagggtagtgagaat

SEQ ID NO: 187466 - DNA, 25 bp, SARS Virus
taacatggacatggtagtgagaatc

SEQ ID NO: 187467 - DNA, 25 bp, SARS Virus
aacatggacatggtagtgagaatcc

SEQ ID NO: 187468 - DNA, 25 bp, SARS Virus
acatggacatgggagtgagaatccc

SEQ ID NO: 187469 - DNA, 25 bp, SARS Virus
catggacatggtggtgagaatccct

SEQ ID NO: 187470 - DNA, 25 bp, SARS Virus
atggacatggtagtgagaatccctt

SEQ ID NO: 187471 - DNA, 25 bp, SARS Virus
tggacatggtagggagaatccctta

SEQ ID NO: 187472 - DNA, 25 bp, SARS Virus
ggacatggtagtgagaatcccttag

SEQ ID NO: 187473 - DNA, 25 bp, SARS Virus
gacatggtagtgggaatcccttaga

SEQ ID NO: 187474 - DNA, 25 bp, SARS Virus
acatggtagtgagaatcccttagat

SEQ ID NO: 187475 - DNA, 25 bp, SARS Virus
catggtagtgaggatcccttagatc

SEQ ID NO: 187476 - DNA, 25 bp, SARS Virus
atggtagtgagagtcccttagatcg

SEQ ID NO: 187477 - DNA, 25 bp, SARS Virus
tggtagtgagaagcccttagatcgg

SEQ ID NO: 187478 - DNA, 25 bp, SARS Virus
ggtagtgagaatgccttagatcggg

SEQ ID NO: 187479 - DNA, 25 bp, SARS Virus
gtagtgagaatcgcttagatcgggt

SEQ ID NO: 187480 - DNA, 25 bp, SARS Virus
tagtgagaatccgttagatcgggta

SEQ ID NO: 187481 - DNA, 25 bp, SARS Virus
agtgagaatcccgtagatcgggtaa

SEQ ID NO: 187482 - DNA, 25 bp, SARS Virus
gtgagaatccctgagatcgggtaaa

SEQ ID NO: 187483 - DNA, 25 bp, SARS Virus
tgagaatcccttggatcgggtaaac

SEQ ID NO: 187484 - DNA, 25 bp, SARS Virus
gagaatcccttagatcgggtaaact

SEQ ID NO: 187485 - DNA, 25 bp, SARS Virus
agaatcccttaggtcgggtaaactc

SEQ ID NO: 187486 - DNA, 25 bp, SARS Virus
gaatcccttagagcgggtaaactct

SEQ ID NO: 187487 - DNA, 25 bp, SARS Virus
aatcccttagatggggtaaactcta

SEQ ID NO: 187488 - DNA, 25 bp, SARS Virus
atcccttagatcgggtaaactctag

SEQ ID NO: 187489 - DNA, 25 bp, SARS Virus
tcccttagatcgggtaaactctaga

SEQ ID NO: 187490 - DNA, 25 bp, SARS Virus
cccttagatcgggtaaactctagaa

SEQ ID NO: 187491 - DNA, 25 bp, SARS Virus
ccttagatcggggaaactctagaac

SEQ ID NO: 187492 - DNA, 25 bp, SARS Virus
cttagatcgggtgaactctagaacc

SEQ ID NO: 187493 - DNA, 25 bp, SARS Virus
ttagatcgggtagactctagaacca

SEQ ID NO: 187494 - DNA, 25 bp, SARS Virus
tagatcgggtaagctctagaaccac

SEQ ID NO: 187495 - DNA, 25 bp, SARS Virus
agatcgggtaaagtctagaaccacc

SEQ ID NO: 187496 - DNA, 25 bp, SARS Virus
gatcgggtaaacgctagaaccacca

SEQ ID NO: 187497 - DNA, 25 bp, SARS Virus
atcgggtaaactgtagaaccaccag

SEQ ID NO: 187498 - DNA, 25 bp, SARS Virus
tcgggtaaactcgagaaccaccaga

SEQ ID NO: 187499 - DNA, 25 bp, SARS Virus
cgggtaaactctggaaccaccagac

SEQ ID NO: 187500 - DNA, 25 bp, SARS Virus
gggtaaactctagaaccaccagact

SEQ ID NO: 187501 - DNA, 25 bp, SARS Virus
ggtaaactctaggaccaccagacta

SEQ ID NO: 187502 - DNA, 25 bp, SARS Virus
gtaaactctagagccaccagactat

SEQ ID NO: 187503 - DNA, 25 bp, SARS Virus
taaactctagaagcaccagactatc

SEQ ID NO: 187504 - DNA, 25 bp, SARS Virus
aaactctagaacgaccagactatca

SEQ ID NO: 187505 - DNA, 25 bp, SARS Virus
aactctagaaccgccagactatcat

SEQ ID NO: 187506 - DNA, 25 bp, SARS Virus
actctagaaccagcagactatcatt

SEQ ID NO: 187507 - DNA, 25 bp, SARS Virus
ctctagaaccacgagactatcatta

SEQ ID NO: 187508 - DNA, 25 bp, SARS Virus
tctagaaccaccggactatcattac

SEQ ID NO: 187509 - DNA, 25 bp, SARS Virus
ctagaaccaccagactatcattacg

SEQ ID NO: 187510 - DNA, 25 bp, SARS Virus
tagaaccaccaggctatcattacgg

SEQ ID NO: 187511 - DNA, 25 bp, SARS Virus
agaaccaccagagtatcattacggt

SEQ ID NO: 187512 - DNA, 25 bp, SARS Virus
gaaccaccagacgatcattacggtc

SEQ ID NO: 187513 - DNA, 25 bp, SARS Virus
aaccaccagactgtcattacggtcg

SEQ ID NO: 187514 - DNA, 25 bp, SARS Virus
accaccagactagcattacggtcgt

SEQ ID NO: 187515 - DNA, 25 bp, SARS Virus
ccaccagactatgattacggtcgtg

SEQ ID NO: 187516 - DNA, 25 bp, SARS Virus
caccagactatcgttacggtcgtgt

SEQ ID NO: 187517 - DNA, 25 bp, SARS Virus
accagactatcagtacggtcgtgtt

SEQ ID NO: 187518 - DNA, 25 bp, SARS Virus
ccagactatcatgacggtcgtgttt

SEQ ID NO: 187519 - DNA, 25 bp, SARS Virus
cagactatcattgcggtcgtgtttg

SEQ ID NO: 187520 - DNA, 25 bp, SARS Virus
agactatcattagggtcgtgtttgg

SEQ ID NO: 187521 - DNA, 25 bp, SARS Virus
gactatcattacggtcgtgtttgga

SEQ ID NO: 187522 - DNA, 25 bp, SARS Virus
actatcattacggtcgtgtttggat

SEQ ID NO: 187523 - DNA, 25 bp, SARS Virus
ctatcattacgggcgtgtttggatg

SEQ ID NO: 187524 - DNA, 25 bp, SARS Virus
tatcattacggtggtgtttggatgg

SEQ ID NO: 187525 - DNA, 25 bp, SARS Virus
atcattacggtcgtgtttggatgga

SEQ ID NO: 187526 - DNA, 25 bp, SARS Virus
tcattacggtcgggtttggatggag

SEQ ID NO: 187527 - DNA, 25 bp, SARS Virus
cattacggtcgtgtttggatggagg

SEQ ID NO: 187528 - DNA, 25 bp, SARS Virus
attacggtcgtggttggatggaggg

SEQ ID NO: 187529 - DNA, 25 bp, SARS Virus
ttacggtcgtgtgtggatggaggga

SEQ ID NO: 187530 - DNA, 25 bp, SARS Virus
tacggtcgtgttgggatggagggaa

SEQ ID NO: 187531 - DNA, 25 bp, SARS Virus
acggtcgtgtttggatggagggaag

SEQ ID NO: 187532 - DNA, 25 bp, SARS Virus
cggtcgtgtttggatggagggaagc

SEQ ID NO: 187533 - DNA, 25 bp, SARS Virus
ggtcgtgtttgggtggagggaagct

SEQ ID NO: 187534 - DNA, 25 bp, SARS Virus
gtcgtgtttggagggagggaagctt

SEQ ID NO: 187535 - DNA, 25 bp, SARS Virus
tcgtgtttggatggagggaagctta

SEQ ID NO: 187536 - DNA, 25 bp, SARS Virus
cgtgtttggatggagggaagcttaa

SEQ ID NO: 187537 - DNA, 25 bp, SARS Virus
gtgtttggatggggggaagcttaac

SEQ ID NO: 187538 - DNA, 25 bp, SARS Virus
tgtttggatggagggaagcttaaca

SEQ ID NO: 187539 - DNA, 25 bp, SARS Virus
gtttggatggagggaagcttaacaa

SEQ ID NO: 187540 - DNA, 25 bp, SARS Virus
tttggatggagggaagcttaacaat

SEQ ID NO: 187541 - DNA, 25 bp, SARS Virus
ttggatggaggggagcttaacaata

SEQ ID NO: 187542 - DNA, 25 bp, SARS Virus
tggatggagggaggcttaacaatat

SEQ ID NO: 187543 - DNA, 25 bp, SARS Virus
ggatggagggaagcttaacaatatc

SEQ ID NO: 187544 - DNA, 25 bp, SARS Virus
gatggagggaaggttaacaatatca

SEQ ID NO: 187545 - DNA, 25 bp, SARS Virus
atggagggaagcgtaacaatatcat

SEQ ID NO: 187546 - DNA, 25 bp, SARS Virus
tggagggaagctgaacaatatcatc

SEQ ID NO: 187547 - DNA, 25 bp, SARS Virus
ggagggaagcttgacaatatcatcc

SEQ ID NO: 187548 - DNA, 25 bp, SARS Virus
gagggaagcttagcaatatcatccg

SEQ ID NO: 187549 - DNA, 25 bp, SARS Virus
agggaagcttaagaatatcatccgt

SEQ ID NO: 187550 - DNA, 25 bp, SARS Virus
gggaagcttaacgatatcatccgtt

SEQ ID NO: 187551 - DNA, 25 bp, SARS Virus
ggaagcttaacagtatcatccgttc

SEQ ID NO: 187552 - DNA, 25 bp, SARS Virus
gaagcttaacaagatcatccgttca

SEQ ID NO: 187553 - DNA, 25 bp, SARS Virus
aagcttaacaatgtcatccgttcac

SEQ ID NO: 187554 - DNA, 25 bp, SARS Virus
agcttaacaatagcatccgttcacg

SEQ ID NO: 187555 - DNA, 25 bp, SARS Virus
gcttaacaatatgatccgttcacgt

SEQ ID NO: 187556 - DNA, 25 bp, SARS Virus
cttaacaatatcgtccgttcacgta

SEQ ID NO: 187557 - DNA, 25 bp, SARS Virus
ttaacaatatcagccgttcacgtaa

SEQ ID NO: 187558 - DNA, 25 bp, SARS Virus
taacaatatcatgcgttcacgtaac

SEQ ID NO: 187559 - DNA, 25 bp, SARS Virus
aacaatatcatcggttcacgtaaca

SEQ ID NO: 187560 - DNA, 25 bp, SARS Virus
acaatatcatccgttcacgtaacag

SEQ ID NO: 187561 - DNA, 25 bp, SARS Virus
caatatcatccggtcacgtaacagt

SEQ ID NO: 187562 - DNA, 25 bp, SARS Virus
aatatcatccgtgcacgtaacagta

SEQ ID NO: 187563 - DNA, 25 bp, SARS Virus
atatcatccgttgacgtaacagtag

SEQ ID NO: 187564 - DNA, 25 bp, SARS Virus
tatcatccgttcgcgtaacagtagt

SEQ ID NO: 187565 - DNA, 25 bp, SARS Virus
atcatccgttcaggtaacagtagtc

SEQ ID NO: 187566 - DNA, 25 bp, SARS Virus
tcatccgttcacgtaacagtagtca

SEQ ID NO: 187567 - DNA, 25 bp, SARS Virus
catccgttcacggaacagtagtcat

SEQ ID NO: 187568 - DNA, 25 bp, SARS Virus
atccgttcacgtgacagtagtcatg

SEQ ID NO: 187569 - DNA, 25 bp, SARS Virus
tccgttcacgtagcagtagtcatgt

SEQ ID NO: 187570 - DNA, 25 bp, SARS Virus
ccgttcacgtaagagtagtcatgtt

SEQ ID NO: 187571 - DNA, 25 bp, SARS Virus
cgttcacgtaacggtagtcatgttc

SEQ ID NO: 187572 - DNA, 25 bp, SARS Virus
gttcacgtaacagtagtcatgttcg

SEQ ID NO: 187573 - DNA, 25 bp, SARS Virus
ttcacgtaacaggagtcatgttcga

SEQ ID NO: 187574 - DNA, 25 bp, SARS Virus
tcacgtaacagtggtcatgttcgac

SEQ ID NO: 187575 - DNA, 25 bp, SARS Virus
cacgtaacagtagtcatgttcgaca

SEQ ID NO: 187576 - DNA, 25 bp, SARS Virus
acgtaacagtaggcatgttcgacaa

SEQ ID NO: 187577 - DNA, 25 bp, SARS Virus
cgtaacagtagtgatgttcgacaaa

SEQ ID NO: 187578 - DNA, 25 bp, SARS Virus
gtaacagtagtcgtgttcgacaaac

SEQ ID NO: 187579 - DNA, 25 bp, SARS Virus
taacagtagtcaggttcgacaaaca

SEQ ID NO: 187580 - DNA, 25 bp, SARS Virus
aacagtagtcatgttcgacaaacac

SEQ ID NO: 187581 - DNA, 25 bp, SARS Virus
acagtagtcatggtcgacaaacaca

SEQ ID NO: 187582 - DNA, 25 bp, SARS Virus
cagtagtcatgtgcgacaaacacac

SEQ ID NO: 187583 - DNA, 25 bp, SARS Virus
agtagtcatgttggacaaacacacc

SEQ ID NO: 187584 - DNA, 25 bp, SARS Virus
gtagtcatgttcgacaaacacacca

SEQ ID NO: 187585 - DNA, 25 bp, SARS Virus
tagtcatgttcggcaaacacaccat

SEQ ID NO: 187586 - DNA, 25 bp, SARS Virus
agtcatgttcgagaaacacaccatg

SEQ ID NO: 187587 - DNA, 25 bp, SARS Virus
gtcatgttcgacgaacacaccatgg

SEQ ID NO: 187588 - DNA, 25 bp, SARS Virus
tcatgttcgacagacacaccatggt

SEQ ID NO: 187589 - DNA, 25 bp, SARS Virus
catgttcgacaagcacaccatggtc

SEQ ID NO: 187590 - DNA, 25 bp, SARS Virus
atgttcgacaaagacaccatggtcg

SEQ ID NO: 187591 - DNA, 25 bp, SARS Virus
tgttcgacaaacgcaccatggtcgg

SEQ ID NO: 187592 - DNA, 25 bp, SARS Virus
gttcgacaaacagaccatggtcggc

SEQ ID NO: 187593 - DNA, 25 bp, SARS Virus
ttcgacaaacacgccatggtcggcg

SEQ ID NO: 187594 - DNA, 25 bp, SARS Virus
tcgacaaacacagcatggtcggcgt

SEQ ID NO: 187595 - DNA, 25 bp, SARS Virus
cgacaaacacacgatggtcggcgtg

SEQ ID NO: 187596 - DNA, 25 bp, SARS Virus
gacaaacacaccgtggtcggcgtgt

SEQ ID NO: 187597 - DNA, 25 bp, SARS Virus
acaaacacaccagggtcggcgtgtc

SEQ ID NO: 187598 - DNA, 25 bp, SARS Virus
caaacacaccatggtcggcgtgtcc

SEQ ID NO: 187599 - DNA, 25 bp, SARS Virus
aaacacaccatggtcggcgtgtcct

SEQ ID NO: 187600 - DNA, 25 bp, SARS Virus
aacacaccatgggcggcgtgtcctg

SEQ ID NO: 187601 - DNA, 25 bp, SARS Virus
acacaccatggtgggcgtgtcctgt

SEQ ID NO: 187602 - DNA, 25 bp, SARS Virus
cacaccatggtcggcgtgtcctgta

SEQ ID NO: 187603 - DNA, 25 bp, SARS Virus
acaccatggtcggcgtgtcctgtag

SEQ ID NO: 187604 - DNA, 25 bp, SARS Virus
caccatggtcggggtgtcctgtaga

SEQ ID NO: 187605 - DNA, 25 bp, SARS Virus
accatggtcggcgtgtcctgtagac

SEQ ID NO: 187606 - DNA, 25 bp, SARS Virus
ccatggtcggcgggtcctgtagaca

SEQ ID NO: 187607 - DNA, 25 bp, SARS Virus
catggtcggcgtgtcctgtagacag

SEQ ID NO: 187608 - DNA, 25 bp, SARS Virus
atggtcggcgtggcctgtagacagc

SEQ ID NO: 187609 - DNA, 25 bp, SARS Virus
tggtcggcgtgtgctgtagacagca

SEQ ID NO: 187610 - DNA, 25 bp, SARS Virus
ggtcggcgtgtcgtgtagacagcat

SEQ ID NO: 187611 - DNA, 25 bp, SARS Virus
gtcggcgtgtccggtagacagcatc

SEQ ID NO: 187612 - DNA, 25 bp, SARS Virus
tcggcgtgtcctgtagacagcatca

SEQ ID NO: 187613 - DNA, 25 bp, SARS Virus
cggcgtgtcctggagacagcatcac

SEQ ID NO: 187614 - DNA, 25 bp, SARS Virus
ggcgtgtcctgtggacagcatcacg

SEQ ID NO: 187615 - DNA, 25 bp, SARS Virus
gcgtgtcctgtagacagcatcacga

SEQ ID NO: 187616 - DNA, 25 bp, SARS Virus
cgtgtcctgtaggcagcatcacgat

SEQ ID NO: 187617 - DNA, 25 bp, SARS Virus
gtgtcctgtagagagcatcacgatg

SEQ ID NO: 187618 - DNA, 25 bp, SARS Virus
tgtcctgtagacggcatcacgatga

SEQ ID NO: 187619 - DNA, 25 bp, SARS Virus
gtcctgtagacagcatcacgatgac

SEQ ID NO: 187620 - DNA, 25 bp, SARS Virus
tcctgtagacaggatcacgatgacc

SEQ ID NO: 187621 - DNA, 25 bp, SARS Virus
cctgtagacagcgtcacgatgacct

SEQ ID NO: 187622 - DNA, 25 bp, SARS Virus
ctgtagacagcagcacgatgacctg

SEQ ID NO: 187623 - DNA, 25 bp, SARS Virus
tgtagacagcatgacgatgacctga

SEQ ID NO: 187624 - DNA, 25 bp, SARS Virus
gtagacagcatcgcgatgacctgag

SEQ ID NO: 187625 - DNA, 25 bp, SARS Virus
tagacagcatcaggatgacctgagt

SEQ ID NO: 187626 - DNA, 25 bp, SARS Virus
agacagcatcacgatgacctgagtc

SEQ ID NO: 187627 - DNA, 25 bp, SARS Virus
gacagcatcacggtgacctgagtca

SEQ ID NO: 187628 - DNA, 25 bp, SARS Virus
acagcatcacgaggacctgagtcaa

SEQ ID NO: 187629 - DNA, 25 bp, SARS Virus
cagcatcacgatgacctgagtcaag

SEQ ID NO: 187630 - DNA, 25 bp, SARS Virus
agcatcacgatggcctgagtcaagt

SEQ ID NO: 187631 - DNA, 25 bp, SARS Virus
gcatcacgatgagctgagtcaagta

SEQ ID NO: 187632 - DNA, 25 bp, SARS Virus
catcacgatgacgtgagtcaagtaa

SEQ ID NO: 187633 - DNA, 25 bp, SARS Virus
atcacgatgaccggagtcaagtaat

SEQ ID NO: 187634 - DNA, 25 bp, SARS Virus
tcacgatgacctgagtcaagtaata

SEQ ID NO: 187635 - DNA, 25 bp, SARS Virus
cacgatgacctgggtcaagtaataa

SEQ ID NO: 187636 - DNA, 25 bp, SARS Virus
acgatgacctgagtcaagtaataag

SEQ ID NO: 187637 - DNA, 25 bp, SARS Virus
cgatgacctgaggcaagtaataaga

SEQ ID NO: 187638 - DNA, 25 bp, SARS Virus
gatgacctgagtgaagtaataagac

SEQ ID NO: 187639 - DNA, 25 bp, SARS Virus
atgacctgagtcgagtaataagaca

SEQ ID NO: 187640 - DNA, 25 bp, SARS Virus
tgacctgagtcaggtaataagacat

SEQ ID NO: 187641 - DNA, 25 bp, SARS Virus
gacctgagtcaagtaataagacatc

SEQ ID NO: 187642 - DNA, 25 bp, SARS Virus
acctgagtcaaggaataagacatca

SEQ ID NO: 187643 - DNA, 25 bp, SARS Virus
cctgagtcaagtgataagacatcaa

SEQ ID NO: 187644 - DNA, 25 bp, SARS Virus
ctgagtcaagtagtaagacatcaaa

SEQ ID NO: 187645 - DNA, 25 bp, SARS Virus
tgagtcaagtaagaagacatcaaat

SEQ ID NO: 187646 - DNA, 25 bp, SARS Virus
gagtcaagtaatgagacatcaaatt

SEQ ID NO: 187647 - DNA, 25 bp, SARS Virus
agtcaagtaataggacatcaaattg

SEQ ID NO: 187648 - DNA, 25 bp, SARS Virus
gtcaagtaataagacatcaaattgt

SEQ ID NO: 187649 - DNA, 25 bp, SARS Virus
tcaagtaataaggcatcaaattgtc

SEQ ID NO: 187650 - DNA, 25 bp, SARS Virus
caagtaataagagatcaaattgtcg

SEQ ID NO: 187651 - DNA, 25 bp, SARS Virus
aagtaataagacgtcaaattgtcga

SEQ ID NO: 187652 - DNA, 25 bp, SARS Virus
agtaataagacagcaaattgtcgac

SEQ ID NO: 187653 - DNA, 25 bp, SARS Virus
gtaataagacatgaaattgtcgact

SEQ ID NO: 187654 - DNA, 25 bp, SARS Virus
taataagacatcgaattgtcgactc

SEQ ID NO: 187655 - DNA, 25 bp, SARS Virus
aataagacatcagattgtcgactca

SEQ ID NO: 187656 - DNA, 25 bp, SARS Virus
ataagacatcaagttgtcgactcaa

SEQ ID NO: 187657 - DNA, 25 bp, SARS Virus
taagacatcaaagtgtcgactcaac

SEQ ID NO: 187658 - DNA, 25 bp, SARS Virus
aagacatcaaatggtcgactcaacc

SEQ ID NO: 187659 - DNA, 25 bp, SARS Virus
agacatcaaattgtcgactcaaccg

SEQ ID NO: 187660 - DNA, 25 bp, SARS Virus
gacatcaaattggcgactcaaccga

SEQ ID NO: 187661 - DNA, 25 bp, SARS Virus
acatcaaattgtggactcaaccgag

SEQ ID NO: 187662 - DNA, 25 bp, SARS Virus
catcaaattgtcgactcaaccgaga

SEQ ID NO: 187663 - DNA, 25 bp, SARS Virus
atcaaattgtcggctcaaccgagaa

SEQ ID NO: 187664 - DNA, 25 bp, SARS Virus
tcaaattgtcgagtcaaccgagaat

SEQ ID NO: 187665 - DNA, 25 bp, SARS Virus
caaattgtcgacgcaaccgagaatc

SEQ ID NO: 187666 - DNA, 25 bp, SARS Virus
aaattgtcgactgaaccgagaatct

SEQ ID NO: 187667 - DNA, 25 bp, SARS Virus
aattgtcgactcgaccgagaatctc

SEQ ID NO: 187668 - DNA, 25 bp, SARS Virus
attgtcgactcagccgagaatctcg

SEQ ID NO: 187669 - DNA, 25 bp, SARS Virus
ttgtcgactcaagcgagaatctcga

SEQ ID NO: 187670 - DNA, 25 bp, SARS Virus
tgtcgactcaacggagaatctcgac

SEQ ID NO: 187671 - DNA, 25 bp, SARS Virus
gtcgactcaaccgagaatctcgaca

SEQ ID NO: 187672 - DNA, 25 bp, SARS Virus
tcgactcaaccgggaatctcgacat

SEQ ID NO: 187673 - DNA, 25 bp, SARS Virus
cgactcaaccgagaatctcgacatt

SEQ ID NO: 187674 - DNA, 25 bp, SARS Virus
gactcaaccgaggatctcgacattg

SEQ ID NO: 187675 - DNA, 25 bp, SARS Virus
actcaaccgagagtctcgacattgt

SEQ ID NO: 187676 - DNA, 25 bp, SARS Virus
ctcaaccgagaagctcgacattgtt

SEQ ID NO: 187677 - DNA, 25 bp, SARS Virus
tcaaccgagaatgtcgacattgtta

SEQ ID NO: 187678 - DNA, 25 bp, SARS Virus
caaccgagaatcgcgacattgttat

SEQ ID NO: 187679 - DNA, 25 bp, SARS Virus
aaccgagaatctggacattgttatt

SEQ ID NO: 187680 - DNA, 25 bp, SARS Virus
accgagaatctcgacattgttattc

SEQ ID NO: 187681 - DNA, 25 bp, SARS Virus
ccgagaatctcggcattgttattct

SEQ ID NO: 187682 - DNA, 25 bp, SARS Virus
cgagaatctcgagattgttattctc

SEQ ID NO: 187683 - DNA, 25 bp, SARS Virus
gagaatctcgacgttgttattctcc

SEQ ID NO: 187684 - DNA, 25 bp, SARS Virus
agaatctcgacagtgttattctccg

SEQ ID NO: 187685 - DNA, 25 bp, SARS Virus
gaatctcgacatggttattctccgg

SEQ ID NO: 187686 - DNA, 25 bp, SARS Virus
aatctcgacattgttattctccggt

SEQ ID NO: 187687 - DNA, 25 bp, SARS Virus
atctcgacattggtattctccggtt

SEQ ID NO: 187688 - DNA, 25 bp, SARS Virus
tctcgacattgtgattctccggttc

SEQ ID NO: 187689 - DNA, 25 bp, SARS Virus
ctcgacattgttgttctccggttcg

SEQ ID NO: 187690 - DNA, 25 bp, SARS Virus
tcgacattgttagtctccggttcgg

SEQ ID NO: 187691 - DNA, 25 bp, SARS Virus
cgacattgttatgctccggttcggt

SEQ ID NO: 187692 - DNA, 25 bp, SARS Virus
gacattgttattgtccggttcggtt

SEQ ID NO: 187693 - DNA, 25 bp, SARS Virus
acattgttattcgccggttcggttt

SEQ ID NO: 187694 - DNA, 25 bp, SARS Virus
cattgttattctgcggttcggttta

SEQ ID NO: 187695 - DNA, 25 bp, SARS Virus
attgttattctcgggttcggtttaa

SEQ ID NO: 187696 - DNA, 25 bp, SARS Virus
ttgttattctccggttcggtttaaa

SEQ ID NO: 187697 - DNA, 25 bp, SARS Virus
tgttattctccggttcggtttaaac

SEQ ID NO: 187698 - DNA, 25 bp, SARS Virus
gttattctccgggtcggtttaaacc

SEQ ID NO: 187699 - DNA, 25 bp, SARS Virus
ttattctccggtgcggtttaaacca

SEQ ID NO: 187700 - DNA, 25 bp, SARS Virus
tattctccggttgggtttaaaccac

SEQ ID NO: 187701 - DNA, 25 bp, SARS Virus
attctccggttcggtttaaaccact

SEQ ID NO: 187702 - DNA, 25 bp, SARS Virus
ttctccggttcggtttaaaccactt

SEQ ID NO: 187703 - DNA, 25 bp, SARS Virus
tctccggttcgggttaaaccactta

SEQ ID NO: 187704 - DNA, 25 bp, SARS Virus
ctccggttcggtgtaaaccacttaa

SEQ ID NO: 187705 - DNA, 25 bp, SARS Virus
tccggttcggttgaaaccacttaac

SEQ ID NO: 187706 - DNA, 25 bp, SARS Virus
ccggttcggtttgaaccacttaaca

SEQ ID NO: 187707 - DNA, 25 bp, SARS Virus
cggttcggtttagaccacttaacag

SEQ ID NO: 187708 - DNA, 25 bp, SARS Virus
ggttcggtttaagccacttaacagg

SEQ ID NO: 187709 - DNA, 25 bp, SARS Virus
gttcggtttaaagcacttaacaggt

SEQ ID NO: 187710 - DNA, 25 bp, SARS Virus
ttcggtttaaacgacttaacaggta

SEQ ID NO: 187711 - DNA, 25 bp, SARS Virus
tcggtttaaaccgcttaacaggtac

SEQ ID NO: 187712 - DNA, 25 bp, SARS Virus
cggtttaaaccagttaacaggtaca

SEQ ID NO: 187713 - DNA, 25 bp, SARS Virus
ggtttaaaccacgtaacaggtacaa

SEQ ID NO: 187714 - DNA, 25 bp, SARS Virus
gtttaaaccactgaacaggtacaat

SEQ ID NO: 187715 - DNA, 25 bp, SARS Virus
tttaaaccacttgacaggtacaatt

SEQ ID NO: 187716 - DNA, 25 bp, SARS Virus
ttaaaccacttagcaggtacaatta

SEQ ID NO: 187717 - DNA, 25 bp, SARS Virus
taaaccacttaagaggtacaattaa

SEQ ID NO: 187718 - DNA, 25 bp, SARS Virus
aaaccacttaacgggtacaattaaa

SEQ ID NO: 187719 - DNA, 25 bp, SARS Virus
aaccacttaacaggtacaattaaag

SEQ ID NO: 187720 - DNA, 25 bp, SARS Virus
accacttaacaggtacaattaaagt

SEQ ID NO: 187721 - DNA, 25 bp, SARS Virus
ccacttaacagggacaattaaagtg

SEQ ID NO: 187722 - DNA, 25 bp, SARS Virus
cacttaacaggtgcaattaaagtga

SEQ ID NO: 187723 - DNA, 25 bp, SARS Virus
acttaacaggtagaattaaagtgat

SEQ ID NO: 187724 - DNA, 25 bp, SARS Virus
cttaacaggtacgattaaagtgatt

SEQ ID NO: 187725 - DNA, 25 bp, SARS Virus
ttaacaggtacagttaaagtgattc

SEQ ID NO: 187726 - DNA, 25 bp, SARS Virus
taacaggtacaagtaaagtgattca

SEQ ID NO: 187727 - DNA, 25 bp, SARS Virus
aacaggtacaatgaaagtgattcaa

SEQ ID NO: 187728 - DNA, 25 bp, SARS Virus
acaggtacaattgaagtgattcaac

SEQ ID NO: 187729 - DNA, 25 bp, SARS Virus
caggtacaattagagtgattcaact

SEQ ID NO: 187730 - DNA, 25 bp, SARS Virus
aggtacaattaaggtgattcaactt

SEQ ID NO: 187731 - DNA, 25 bp, SARS Virus
ggtacaattaaagtgattcaacttg

SEQ ID NO: 187732 - DNA, 25 bp, SARS Virus
gtacaattaaagggattcaacttgt

SEQ ID NO: 187733 - DNA, 25 bp, SARS Virus
tacaattaaagtgattcaacttgtt

SEQ ID NO: 187734 - DNA, 25 bp, SARS Virus
acaattaaagtggttcaacttgtta

SEQ ID NO: 187735 - DNA, 25 bp, SARS Virus
caattaaagtgagtcaacttgttag

SEQ ID NO: 187736 - DNA, 25 bp, SARS Virus
aattaaagtgatgcaacttgttaga

SEQ ID NO: 187737 - DNA, 25 bp, SARS Virus
attaaagtgattgaacttgttagaa

SEQ ID NO: 187738 - DNA, 25 bp, SARS Virus
ttaaagtgattcgacttgttagaac

SEQ ID NO: 187739 - DNA, 25 bp, SARS Virus
taaagtgattcagcttgttagaacg

SEQ ID NO: 187740 - DNA, 25 bp, SARS Virus
aaagtgattcaagttgttagaacga

SEQ ID NO: 187741 - DNA, 25 bp, SARS Virus
aagtgattcaacgtgttagaacgat

SEQ ID NO: 187742 - DNA, 25 bp, SARS Virus
agtgattcaactggttagaacgata

SEQ ID NO: 187743 - DNA, 25 bp, SARS Virus
gtgattcaacttgttagaacgatag

SEQ ID NO: 187744 - DNA, 25 bp, SARS Virus
tgattcaacttggtagaacgatagg

SEQ ID NO: 187745 - DNA, 25 bp, SARS Virus
gattcaacttgtgagaacgataggc

SEQ ID NO: 187746 - DNA, 25 bp, SARS Virus
attcaacttgttggaacgataggcg

SEQ ID NO: 187747 - DNA, 25 bp, SARS Virus
ttcaacttgttagaacgataggcgt

SEQ ID NO: 187748 - DNA, 25 bp, SARS Virus
tcaacttgttaggacgataggcgta

SEQ ID NO: 187749 - DNA, 25 bp, SARS Virus
caacttgttagagcgataggcgtag

SEQ ID NO: 187750 - DNA, 25 bp, SARS Virus
aacttgttagaaggataggcgtagt

SEQ ID NO: 187751 - DNA, 25 bp, SARS Virus
acttgttagaacgataggcgtagtt

SEQ ID NO: 187752 - DNA, 25 bp, SARS Virus
cttgttagaacggtaggcgtagttg

SEQ ID NO: 187753 - DNA, 25 bp, SARS Virus
ttgttagaacgagaggcgtagttgt

SEQ ID NO: 187754 - DNA, 25 bp, SARS Virus
tgttagaacgatgggcgtagttgtt

SEQ ID NO: 187755 - DNA, 25 bp, SARS Virus
gttagaacgataggcgtagttgttg

SEQ ID NO: 187756 - DNA, 25 bp, SARS Virus
ttagaacgataggcgtagttgttga

SEQ ID NO: 187757 - DNA, 25 bp, SARS Virus
tagaacgataggggtagttgttgaa

SEQ ID NO: 187758 - DNA, 25 bp, SARS Virus
agaacgataggcgtagttgttgaac

SEQ ID NO: 187759 - DNA, 25 bp, SARS Virus
gaacgataggcggagttgttgaacg

SEQ ID NO: 187760 - DNA, 25 bp, SARS Virus
aacgataggcgtggttgttgaacga

SEQ ID NO: 187761 - DNA, 25 bp, SARS Virus
acgataggcgtagttgttgaacgac

SEQ ID NO: 187762 - DNA, 25 bp, SARS Virus
cgataggcgtaggtgttgaacgacc

SEQ ID NO: 187763 - DNA, 25 bp, SARS Virus
gataggcgtagtggttgaacgacct

SEQ ID NO: 187764 - DNA, 25 bp, SARS Virus
ataggcgtagttgttgaacgaccta

SEQ ID NO: 187765 - DNA, 25 bp, SARS Virus
taggcgtagttggtgaacgacctaa

SEQ ID NO: 187766 - DNA, 25 bp, SARS Virus
aggcgtagttgtggaacgacctaaa

SEQ ID NO: 187767 - DNA, 25 bp, SARS Virus
ggcgtagttgttgaacgacctaaag

SEQ ID NO: 187768 - DNA, 25 bp, SARS Virus
gcgtagttgttggacgacctaaagg

SEQ ID NO: 187769 - DNA, 25 bp, SARS Virus
cgtagttgttgagcgacctaaaggg

SEQ ID NO: 187770 - DNA, 25 bp, SARS Virus
gtagttgttgaaggacctaaagggt

SEQ ID NO: 187771 - DNA, 25 bp, SARS Virus
tagttgttgaacgacctaaagggtc

SEQ ID NO: 187772 - DNA, 25 bp, SARS Virus
agttgttgaacggcctaaagggtct

SEQ ID NO: 187773 - DNA, 25 bp, SARS Virus
gttgttgaacgagctaaagggtctc

SEQ ID NO: 187774 - DNA, 25 bp, SARS Virus
ttgttgaacgacgtaaagggtctca

SEQ ID NO: 187775 - DNA, 25 bp, SARS Virus
tgttgaacgaccgaaagggtctcac

SEQ ID NO: 187776 - DNA, 25 bp, SARS Virus
gttgaacgacctgaagggtctcacg

SEQ ID NO: 187777 - DNA, 25 bp, SARS Virus
ttgaacgacctagagggtctcacgt

SEQ ID NO: 187778 - DNA, 25 bp, SARS Virus
tgaacgacctaaggggtctcacgtc

SEQ ID NO: 187779 - DNA, 25 bp, SARS Virus
gaacgacctaaagggtctcacgtct

SEQ ID NO: 187780 - DNA, 25 bp, SARS Virus
aacgacctaaagggtctcacgtcta

SEQ ID NO: 187781 - DNA, 25 bp, SARS Virus
acgacctaaagggtctcacgtctac

SEQ ID NO: 187782 - DNA, 25 bp, SARS Virus
cgacctaaaggggctcacgtctacg

SEQ ID NO: 187783 - DNA, 25 bp, SARS Virus
gacctaaagggtgtcacgtctacgt

SEQ ID NO: 187784 - DNA, 25 bp, SARS Virus
acctaaagggtcgcacgtctacgta

SEQ ID NO: 187785 - DNA, 25 bp, SARS Virus
cctaaagggtctgacgtctacgtat

SEQ ID NO: 187786 - DNA, 25 bp, SARS Virus
ctaaagggtctcgcgtctacgtata

SEQ ID NO: 187787 - DNA, 25 bp, SARS Virus
taaagggtctcaggtctacgtatac

SEQ ID NO: 187788 - DNA, 25 bp, SARS Virus
aaagggtctcacgtctacgtataca

SEQ ID NO: 187789 - DNA, 25 bp, SARS Virus
aagggtctcacggctacgtatacat

SEQ ID NO: 187790 - DNA, 25 bp, SARS Virus
agggtctcacgtgtacgtatacatt

SEQ ID NO: 187791 - DNA, 25 bp, SARS Virus
gggtctcacgtcgacgtatacattt

SEQ ID NO: 187792 - DNA, 25 bp, SARS Virus
ggtctcacgtctgcgtatacatttc

SEQ ID NO: 187793 - DNA, 25 bp, SARS Virus
gtctcacgtctaggtatacatttcc

SEQ ID NO: 187794 - DNA, 25 bp, SARS Virus
tctcacgtctacgtatacatttcca

SEQ ID NO: 187795 - DNA, 25 bp, SARS Virus
ctcacgtctacggatacatttccac

SEQ ID NO: 187796 - DNA, 25 bp, SARS Virus
tcacgtctacgtgtacatttccaca

SEQ ID NO: 187797 - DNA, 25 bp, SARS Virus
cacgtctacgtagacatttccacaa

SEQ ID NO: 187798 - DNA, 25 bp, SARS Virus
acgtctacgtatgcatttccacaat

SEQ ID NO: 187799 - DNA, 25 bp, SARS Virus
cgtctacgtatagatttccacaatg

SEQ ID NO: 187800 - DNA, 25 bp, SARS Virus
gtctacgtatacgtttccacaatgg

SEQ ID NO: 187801 - DNA, 25 bp, SARS Virus
tctacgtatacagttccacaatggt

SEQ ID NO: 187802 - DNA, 25 bp, SARS Virus
ctacgtatacatgtccacaatggta

SEQ ID NO: 187803 - DNA, 25 bp, SARS Virus
tacgtatacattgccacaatggtag

SEQ ID NO: 187804 - DNA, 25 bp, SARS Virus
acgtatacatttgcacaatggtagt

SEQ ID NO: 187805 - DNA, 25 bp, SARS Virus
cgtatacatttcgacaatggtagtg

SEQ ID NO: 187806 - DNA, 25 bp, SARS Virus
gtatacatttccgcaatggtagtgt

SEQ ID NO: 187807 - DNA, 25 bp, SARS Virus
tatacatttccagaatggtagtgtt

SEQ ID NO: 187808 - DNA, 25 bp, SARS Virus
atacatttccacgatggtagtgttc

SEQ ID NO: 187809 - DNA, 25 bp, SARS Virus
tacatttccacagtggtagtgttca

SEQ ID NO: 187810 - DNA, 25 bp, SARS Virus
acatttccacaagggtagtgttcac

SEQ ID NO: 187811 - DNA, 25 bp, SARS Virus
catttccacaatggtagtgttcaca

SEQ ID NO: 187812 - DNA, 25 bp, SARS Virus
atttccacaatggtagtgttcacaa

SEQ ID NO: 187813 - DNA, 25 bp, SARS Virus
tttccacaatgggagtgttcacaag

SEQ ID NO: 187814 - DNA, 25 bp, SARS Virus
ttccacaatggtggtgttcacaaga

SEQ ID NO: 187815 - DNA, 25 bp, SARS Virus
tccacaatggtagtgttcacaagaa

SEQ ID NO: 187816 - DNA, 25 bp, SARS Virus
ccacaatggtagggttcacaagaac

SEQ ID NO: 187817 - DNA, 25 bp, SARS Virus
cacaatggtagtgttcacaagaaca

SEQ ID NO: 187818 - DNA, 25 bp, SARS Virus
acaatggtagtggtcacaagaacat

SEQ ID NO: 187819 - DNA, 25 bp, SARS Virus
caatggtagtgtgcacaagaacatc

SEQ ID NO: 187820 - DNA, 25 bp, SARS Virus
aatggtagtgttgacaagaacatcc

SEQ ID NO: 187821 - DNA, 25 bp, SARS Virus
atggtagtgttcgcaagaacatcca

SEQ ID NO: 187822 - DNA, 25 bp, SARS Virus
tggtagtgttcagaagaacatccat

SEQ ID NO: 187823 - DNA, 25 bp, SARS Virus
ggtagtgttcacgagaacatccatg

SEQ ID NO: 187824 - DNA, 25 bp, SARS Virus
gtagtgttcacaggaacatccatgg

SEQ ID NO: 187825 - DNA, 25 bp, SARS Virus
tagtgttcacaagaacatccatggt

SEQ ID NO: 187826 - DNA, 25 bp, SARS Virus
agtgttcacaaggacatccatggta

SEQ ID NO: 187827 - DNA, 25 bp, SARS Virus
gtgttcacaagagcatccatggtat

SEQ ID NO: 187828 - DNA, 25 bp, SARS Virus
tgttcacaagaagatccatggtatt

SEQ ID NO: 187829 - DNA, 25 bp, SARS Virus
gttcacaagaacgtccatggtatta

SEQ ID NO: 187830 - DNA, 25 bp, SARS Virus
ttcacaagaacagccatggtattag

SEQ ID NO: 187831 - DNA, 25 bp, SARS Virus
tcacaagaacatgcatggtattagt

SEQ ID NO: 187832 - DNA, 25 bp, SARS Virus
cacaagaacatcgatggtattagtc

SEQ ID NO: 187833 - DNA, 25 bp, SARS Virus
acaagaacatccgtggtattagtcc

SEQ ID NO: 187834 - DNA, 25 bp, SARS Virus
caagaacatccagggtattagtccc

SEQ ID NO: 187835 - DNA, 25 bp, SARS Virus
aagaacatccatggtattagtccct

SEQ ID NO: 187836 - DNA, 25 bp, SARS Virus
agaacatccatggtattagtccctg

SEQ ID NO: 187837 - DNA, 25 bp, SARS Virus
gaacatccatgggattagtccctgt

SEQ ID NO: 187838 - DNA, 25 bp, SARS Virus
aacatccatggtgttagtccctgtt

SEQ ID NO: 187839 - DNA, 25 bp, SARS Virus
acatccatggtagtagtccctgttg

SEQ ID NO: 187840 - DNA, 25 bp, SARS Virus
catccatggtatgagtccctgttgt

SEQ ID NO: 187841 - DNA, 25 bp, SARS Virus
atccatggtattggtccctgttgtt

SEQ ID NO: 187842 - DNA, 25 bp, SARS Virus
tccatggtattagtccctgttgttg

SEQ ID NO: 187843 - DNA, 25 bp, SARS Virus
ccatggtattaggccctgttgttgg

SEQ ID NO: 187844 - DNA, 25 bp, SARS Virus
catggtattagtgcctgttgttggt

SEQ ID NO: 187845 - DNA, 25 bp, SARS Virus
atggtattagtcgctgttgttggta

SEQ ID NO: 187846 - DNA, 25 bp, SARS Virus
tggtattagtccgtgttgttggtac

SEQ ID NO: 187847 - DNA, 25 bp, SARS Virus
ggtattagtcccggttgttggtact

SEQ ID NO: 187848 - DNA, 25 bp, SARS Virus
gtattagtccctgttgttggtactc

SEQ ID NO: 187849 - DNA, 25 bp, SARS Virus
tattagtccctggtgttggtactca

SEQ ID NO: 187850 - DNA, 25 bp, SARS Virus
attagtccctgtggttggtactcaa

SEQ ID NO: 187851 - DNA, 25 bp, SARS Virus
ttagtccctgttgttggtactcaaa

SEQ ID NO: 187852 - DNA, 25 bp, SARS Virus
tagtccctgttggtggtactcaaac

SEQ ID NO: 187853 - DNA, 25 bp, SARS Virus
agtccctgttgtgggtactcaaacc

SEQ ID NO: 187854 - DNA, 25 bp, SARS Virus
gtccctgttgttggtactcaaaccg

SEQ ID NO: 187855 - DNA, 25 bp, SARS Virus
tccctgttgttggtactcaaaccga

SEQ ID NO: 187856 - DNA, 25 bp, SARS Virus
ccctgttgttgggactcaaaccgac

SEQ ID NO: 187857 - DNA, 25 bp, SARS Virus
cctgttgttggtgctcaaaccgacg

SEQ ID NO: 187858 - DNA, 25 bp, SARS Virus
ctgttgttggtagtcaaaccgacga

SEQ ID NO: 187859 - DNA, 25 bp, SARS Virus
tgttgttggtacgcaaaccgacgac

SEQ ID NO: 187860 - DNA, 25 bp, SARS Virus
gttgttggtactgaaaccgacgaca

SEQ ID NO: 187861 - DNA, 25 bp, SARS Virus
ttgttggtactcgaaccgacgacat

SEQ ID NO: 187862 - DNA, 25 bp, SARS Virus
tgttggtactcagaccgacgacatc

SEQ ID NO: 187863 - DNA, 25 bp, SARS Virus
gttggtactcaagccgacgacatca

SEQ ID NO: 187864 - DNA, 25 bp, SARS Virus
ttggtactcaaagcgacgacatcag

SEQ ID NO: 187865 - DNA, 25 bp, SARS Virus
tggtactcaaacggacgacatcagt

SEQ ID NO: 187866 - DNA, 25 bp, SARS Virus
ggtactcaaaccgacgacatcagtt

SEQ ID NO: 187867 - DNA, 25 bp, SARS Virus
gtactcaaaccggcgacatcagtta

SEQ ID NO: 187868 - DNA, 25 bp, SARS Virus
tactcaaaccgaggacatcagttac

SEQ ID NO: 187869 - DNA, 25 bp, SARS Virus
actcaaaccgacgacatcagttacc

SEQ ID NO: 187870 - DNA, 25 bp, SARS Virus
ctcaaaccgacggcatcagttacca

SEQ ID NO: 187871 - DNA, 25 bp, SARS Virus
tcaaaccgacgagatcagttaccat

SEQ ID NO: 187872 - DNA, 25 bp, SARS Virus
caaaccgacgacgtcagttaccata

SEQ ID NO: 187873 - DNA, 25 bp, SARS Virus
aaaccgacgacagcagttaccatac

SEQ ID NO: 187874 - DNA, 25 bp, SARS Virus
aaccgacgacatgagttaccatact

SEQ ID NO: 187875 - DNA, 25 bp, SARS Virus
accgacgacatcggttaccatacta

SEQ ID NO: 187876 - DNA, 25 bp, SARS Virus
ccgacgacatcagttaccatactac

SEQ ID NO: 187877 - DNA, 25 bp, SARS Virus
cgacgacatcaggtaccatactaca

SEQ ID NO: 187878 - DNA, 25 bp, SARS Virus
gacgacatcagtgaccatactacaa

SEQ ID NO: 187879 - DNA, 25 bp, SARS Virus
acgacatcagttgccatactacaac

SEQ ID NO: 187880 - DNA, 25 bp, SARS Virus
cgacatcagttagcatactacaact

SEQ ID NO: 187881 - DNA, 25 bp, SARS Virus
gacatcagttacgatactacaactc

SEQ ID NO: 187882 - DNA, 25 bp, SARS Virus
acatcagttaccgtactacaactca

SEQ ID NO: 187883 - DNA, 25 bp, SARS Virus
catcagttaccagactacaactcac

SEQ ID NO: 187884 - DNA, 25 bp, SARS Virus
atcagttaccatgctacaactcacc

SEQ ID NO: 187885 - DNA, 25 bp, SARS Virus
tcagttaccatagtacaactcacct

SEQ ID NO: 187886 - DNA, 25 bp, SARS Virus
cagttaccatacgacaactcacctt

SEQ ID NO: 187887 - DNA, 25 bp, SARS Virus
agttaccatactgcaactcaccttg

SEQ ID NO: 187888 - DNA, 25 bp, SARS Virus
gttaccatactagaactcaccttgt

SEQ ID NO: 187889 - DNA, 25 bp, SARS Virus
ttaccatactacgactcaccttgtg

SEQ ID NO: 187890 - DNA, 25 bp, SARS Virus
taccatactacagctcaccttgtgt

SEQ ID NO: 187891 - DNA, 25 bp, SARS Virus
accatactacaagtcaccttgtgtt

SEQ ID NO: 187892 - DNA, 25 bp, SARS Virus
ccatactacaacgcaccttgtgttg

SEQ ID NO: 187893 - DNA, 25 bp, SARS Virus
catactacaactgaccttgtgttgg

SEQ ID NO: 187894 - DNA, 25 bp, SARS Virus
atactacaactcgccttgtgttggt

SEQ ID NO: 187895 - DNA, 25 bp, SARS Virus
tactacaactcagcttgtgttggta

SEQ ID NO: 187896 - DNA, 25 bp, SARS Virus
actacaactcacgttgtgttggtag

SEQ ID NO: 187897 - DNA, 25 bp, SARS Virus
ctacaactcaccgtgtgttggtagt

SEQ ID NO: 187898 - DNA, 25 bp, SARS Virus
tacaactcacctggtgttggtagtg

SEQ ID NO: 187899 - DNA, 25 bp, SARS Virus
acaactcaccttgtgttggtagtgc

SEQ ID NO: 187900 - DNA, 25 bp, SARS Virus
caactcaccttgggttggtagtgcg

SEQ ID NO: 187901 - DNA, 25 bp, SARS Virus
aactcaccttgtgttggtagtgcgc

SEQ ID NO: 187902 - DNA, 25 bp, SARS Virus
actcaccttgtggtggtagtgcgcg

SEQ ID NO: 187903 - DNA, 25 bp, SARS Virus
ctcaccttgtgtgggtagtgcgcgt

SEQ ID NO: 187904 - DNA, 25 bp, SARS Virus
tcaccttgtgttggtagtgcgcgta

SEQ ID NO: 187905 - DNA, 25 bp, SARS Virus
caccttgtgttggtagtgcgcgtaa

SEQ ID NO: 187906 - DNA, 25 bp, SARS Virus
accttgtgttgggagtgcgcgtaac

SEQ ID NO: 187907 - DNA, 25 bp, SARS Virus
ccttgtgttggtggtgcgcgtaaca

SEQ ID NO: 187908 - DNA, 25 bp, SARS Virus
cttgtgttggtagtgcgcgtaacaa

SEQ ID NO: 187909 - DNA, 25 bp, SARS Virus
ttgtgttggtagggcgcgtaacaac

SEQ ID NO: 187910 - DNA, 25 bp, SARS Virus
tgtgttggtagtgcgcgtaacaact

SEQ ID NO: 187911 - DNA, 25 bp, SARS Virus
gtgttggtagtgggcgtaacaacta

SEQ ID NO: 187912 - DNA, 25 bp, SARS Virus
tgttggtagtgcgcgtaacaactat

SEQ ID NO: 187913 - DNA, 25 bp, SARS Virus
acagacattgtttggatgttccacc

SEQ ID NO: 187914 - DNA, 25 bp, SARS Virus
cagacattgttttgatgttccacca

SEQ ID NO: 187915 - DNA, 25 bp, SARS Virus
agacattgtttgtatgttccaccaa

SEQ ID NO: 187916 - DNA, 25 bp, SARS Virus
gacattgtttggttgttccaccaag

SEQ ID NO: 187917 - DNA, 25 bp, SARS Virus
acattgtttggatgttccaccaagg

SEQ ID NO: 187918 - DNA, 25 bp, SARS Virus
cattgtttggattttccaccaaggt

SEQ ID NO: 187919 - DNA, 25 bp, SARS Virus
attgtttggatgttccaccaaggtc

SEQ ID NO: 187920 - DNA, 25 bp, SARS Virus
ttgtttggatgttccaccaaggtca

SEQ ID NO: 187921 - DNA, 25 bp, SARS Virus
tgtttggatgtttcaccaaggtcaa

SEQ ID NO: 187922 - DNA, 25 bp, SARS Virus
gtttggatgttctaccaaggtcaag

SEQ ID NO: 187923 - DNA, 25 bp, SARS Virus
tttggatgttcctccaaggtcaaga

SEQ ID NO: 187924 - DNA, 25 bp, SARS Virus
ttggatgttccatcaaggtcaagac

SEQ ID NO: 187925 - DNA, 25 bp, SARS Virus
tggatgttccactaaggtcaagaca

SEQ ID NO: 187926 - DNA, 25 bp, SARS Virus
ggatgttccacctaggtcaagacac

SEQ ID NO: 187927 - DNA, 25 bp, SARS Virus
gatgttccaccatggtcaagacaca

SEQ ID NO: 187928 - DNA, 25 bp, SARS Virus
atgttccaccaatgtcaagacacat

SEQ ID NO: 187929 - DNA, 25 bp, SARS Virus
tgttccaccaagttcaagacacatt

SEQ ID NO: 187930 - DNA, 25 bp, SARS Virus
gttccaccaaggtcaagacacattt

SEQ ID NO: 187931 - DNA, 25 bp, SARS Virus
ttccaccaaggttaagacacattta

SEQ ID NO: 187932 - DNA, 25 bp, SARS Virus
tccaccaaggtctagacacatttaa

SEQ ID NO: 187933 - DNA, 25 bp, SARS Virus
ccaccaaggtcatgacacatttaac

SEQ ID NO: 187934 - DNA, 25 bp, SARS Virus
caccaaggtcaatacacatttaaca

SEQ ID NO: 187935 - DNA, 25 bp, SARS Virus
accaaggtcaagtcacatttaacat

SEQ ID NO: 187936 - DNA, 25 bp, SARS Virus
ccaaggtcaagatacatttaacatg

SEQ ID NO: 187937 - DNA, 25 bp, SARS Virus
caaggtcaagactcatttaacatgg

SEQ ID NO: 187938 - DNA, 25 bp, SARS Virus
aaggtcaagacatatttaacatgga

SEQ ID NO: 187939 - DNA, 25 bp, SARS Virus
aggtcaagacacttttaacatggac

SEQ ID NO: 187940 - DNA, 25 bp, SARS Virus
ggtcaagacacatttaacatggaca

SEQ ID NO: 187941 - DNA, 25 bp, SARS Virus
gtcaagacacatttaacatggacat

SEQ ID NO: 187942 - DNA, 25 bp, SARS Virus
tcaagacacatttaacatggacatg

SEQ ID NO: 187943 - DNA, 25 bp, SARS Virus
caagacacattttacatggacatgg

SEQ ID NO: 187944 - DNA, 25 bp, SARS Virus
aagacacatttatcatggacatggt

SEQ ID NO: 187945 - DNA, 25 bp, SARS Virus
agacacatttaatatggacatggta

SEQ ID NO: 187946 - DNA, 25 bp, SARS Virus
gacacatttaacttggacatggtag

SEQ ID NO: 187947 - DNA, 25 bp, SARS Virus
acacatttaacatggacatggtagt

SEQ ID NO: 187948 - DNA, 25 bp, SARS Virus
cacatttaacattgacatggtagtg

SEQ ID NO: 187949 - DNA, 25 bp, SARS Virus
acatttaacatgtacatggtagtga

SEQ ID NO: 187950 - DNA, 25 bp, SARS Virus
catttaacatggtcatggtagtgag

SEQ ID NO: 187951 - DNA, 25 bp, SARS Virus
atttaacatggatatggtagtgaga

SEQ ID NO: 187952 - DNA, 25 bp, SARS Virus
tttaacatggacttggtagtgagaa

SEQ ID NO: 187953 - DNA, 25 bp, SARS Virus
ttaacatggacatggtagtgagaat

SEQ ID NO: 187954 - DNA, 25 bp, SARS Virus
taacatggacattgtagtgagaatc

SEQ ID NO: 187955 - DNA, 25 bp, SARS Virus
aacatggacatgttagtgagaatcc

SEQ ID NO: 187956 - DNA, 25 bp, SARS Virus
acatggacatggtagtgagaatccc

SEQ ID NO: 187957 - DNA, 25 bp, SARS Virus
catggacatggttgtgagaatccct

SEQ ID NO: 187958 - DNA, 25 bp, SARS Virus
atggacatggtattgagaatccctt

SEQ ID NO: 187959 - DNA, 25 bp, SARS Virus
tggacatggtagtgagaatccctta

SEQ ID NO: 187960 - DNA, 25 bp, SARS Virus
ggacatggtagttagaatcccttag

SEQ ID NO: 187961 - DNA, 25 bp, SARS Virus
gacatggtagtgtgaatcccttaga

SEQ ID NO: 187962 - DNA, 25 bp, SARS Virus
acatggtagtgataatcccttagat

SEQ ID NO: 187963 - DNA, 25 bp, SARS Virus
catggtagtgagtatcccttagatc

SEQ ID NO: 187964 - DNA, 25 bp, SARS Virus
atggtagtgagattcccttagatcg

SEQ ID NO: 187965 - DNA, 25 bp, SARS Virus
tggtagtgagaatcccttagatcgg

SEQ ID NO: 187966 - DNA, 25 bp, SARS Virus
ggtagtgagaattccttagatcggg

SEQ ID NO: 187967 - DNA, 25 bp, SARS Virus
gtagtgagaatctcttagatcgggt

SEQ ID NO: 187968 - DNA, 25 bp, SARS Virus
tagtgagaatcctttagatcgggta

SEQ ID NO: 187969 - DNA, 25 bp, SARS Virus
agtgagaatcccttagatcgggtaa

SEQ ID NO: 187970 - DNA, 25 bp, SARS Virus
gtgagaatcccttagatcgggtaaa

SEQ ID NO: 187971 - DNA, 25 bp, SARS Virus
tgagaatccctttgatcgggtaaac

SEQ ID NO: 187972 - DNA, 25 bp, SARS Virus
gagaatcccttatatcgggtaaact

SEQ ID NO: 187973 - DNA, 25 bp, SARS Virus
agaatcccttagttcgggtaaactc

SEQ ID NO: 187974 - DNA, 25 bp, SARS Virus
gaatcccttagatcgggtaaactct

SEQ ID NO: 187975 - DNA, 25 bp, SARS Virus
aatcccttagattgggtaaactcta

SEQ ID NO: 187976 - DNA, 25 bp, SARS Virus
atcccttagatctggtaaactctag

SEQ ID NO: 187977 - DNA, 25 bp, SARS Virus
tcccttagatcgtgtaaactctaga

SEQ ID NO: 187978 - DNA, 25 bp, SARS Virus
cccttagatcggttaaactctagaa

SEQ ID NO: 187979 - DNA, 25 bp, SARS Virus
ccttagatcgggtaaactctagaac

SEQ ID NO: 187980 - DNA, 25 bp, SARS Virus
cttagatcgggttaactctagaacc

SEQ ID NO: 187981 - DNA, 25 bp, SARS Virus
ttagatcgggtatactctagaacca

SEQ ID NO: 187982 - DNA, 25 bp, SARS Virus
tagatcgggtaatctctagaaccac

SEQ ID NO: 187983 - DNA, 25 bp, SARS Virus
agatcgggtaaattctagaaccacc

SEQ ID NO: 187984 - DNA, 25 bp, SARS Virus
gatcgggtaaactctagaaccacca

SEQ ID NO: 187985 - DNA, 25 bp, SARS Virus
atcgggtaaactttagaaccaccag

SEQ ID NO: 187986 - DNA, 25 bp, SARS Virus
tcgggtaaactctagaaccaccaga

SEQ ID NO: 187987 - DNA, 25 bp, SARS Virus
cgggtaaactcttgaaccaccagac

SEQ ID NO: 187988 - DNA, 25 bp, SARS Virus
gggtaaactctataaccaccagact

SEQ ID NO: 187989 - DNA, 25 bp, SARS Virus
ggtaaactctagtaccaccagacta

SEQ ID NO: 187990 - DNA, 25 bp, SARS Virus
gtaaactctagatccaccagactat

SEQ ID NO: 187991 - DNA, 25 bp, SARS Virus
taaactctagaatcaccagactatc

SEQ ID NO: 187992 - DNA, 25 bp, SARS Virus
aaactctagaactaccagactatca

SEQ ID NO: 187993 - DNA, 25 bp, SARS Virus
aactctagaacctccagactatcat

SEQ ID NO: 187994 - DNA, 25 bp, SARS Virus
actctagaaccatcagactatcatt

SEQ ID NO: 187995 - DNA, 25 bp, SARS Virus
ctctagaaccactagactatcatta

SEQ ID NO: 187996 - DNA, 25 bp, SARS Virus
tctagaaccacctgactatcattac

SEQ ID NO: 187997 - DNA, 25 bp, SARS Virus
ctagaaccaccatactatcattacg

SEQ ID NO: 187998 - DNA, 25 bp, SARS Virus
tagaaccaccagtctatcattacgg

SEQ ID NO: 187999 - DNA, 25 bp, SARS Virus
agaaccaccagattatcattacggt

SEQ ID NO: 188000 - DNA, 25 bp, SARS Virus
gaaccaccagactatcattacggtc

SEQ ID NO: 188001 - DNA, 25 bp, SARS Virus
aaccaccagactttcattacggtcg

SEQ ID NO: 188002 - DNA, 25 bp, SARS Virus
accaccagactatcattacggtcgt

SEQ ID NO: 188003 - DNA, 25 bp, SARS Virus
ccaccagactattattacggtcgtg

SEQ ID NO: 188004 - DNA, 25 bp, SARS Virus
caccagactatctttacggtcgtgt

SEQ ID NO: 188005 - DNA, 25 bp, SARS Virus
accagactatcattacggtcgtgtt

SEQ ID NO: 188006 - DNA, 25 bp, SARS Virus
ccagactatcattacggtcgtgttt

SEQ ID NO: 188007 - DNA, 25 bp, SARS Virus
cagactatcatttcggtcgtgtttg

SEQ ID NO: 188008 - DNA, 25 bp, SARS Virus
agactatcattatggtcgtgtttgg

SEQ ID NO: 188009 - DNA, 25 bp, SARS Virus
gactatcattactgtcgtgtttgga

SEQ ID NO: 188010 - DNA, 25 bp, SARS Virus
actatcattacgttcgtgtttggat

SEQ ID NO: 188011 - DNA, 25 bp, SARS Virus
ctatcattacggtcgtgtttggatg

SEQ ID NO: 188012 - DNA, 25 bp, SARS Virus
tatcattacggttgtgtttggatgg

SEQ ID NO: 188013 - DNA, 25 bp, SARS Virus
atcattacggtcttgtttggatgga

SEQ ID NO: 188014 - DNA, 25 bp, SARS Virus
tcattacggtcgtgtttggatggag

SEQ ID NO: 188015 - DNA, 25 bp, SARS Virus
cattacggtcgtttttggatggagg

SEQ ID NO: 188016 - DNA, 25 bp, SARS Virus
attacggtcgtgtttggatggaggg

SEQ ID NO: 188017 - DNA, 25 bp, SARS Virus
ttacggtcgtgtttggatggaggga

SEQ ID NO: 188018 - DNA, 25 bp, SARS Virus
tacggtcgtgtttggatggagggaa

SEQ ID NO: 188019 - DNA, 25 bp, SARS Virus
acggtcgtgttttgatggagggaag

SEQ ID NO: 188020 - DNA, 25 bp, SARS Virus
cggtcgtgtttgtatggagggaagc

SEQ ID NO: 188021 - DNA, 25 bp, SARS Virus
ggtcgtgtttggttggagggaagct

SEQ ID NO: 188022 - DNA, 25 bp, SARS Virus
gtcgtgtttggatggagggaagctt

SEQ ID NO: 188023 - DNA, 25 bp, SARS Virus
tcgtgtttggattgagggaagctta

SEQ ID NO: 188024 - DNA, 25 bp, SARS Virus
cgtgtttggatgtagggaagcttaa

SEQ ID NO: 188025 - DNA, 25 bp, SARS Virus
gtgtttggatggtgggaagcttaac

SEQ ID NO: 188026 - DNA, 25 bp, SARS Virus
tgtttggatggatggaagcttaaca

SEQ ID NO: 188027 - DNA, 25 bp, SARS Virus
gtttggatggagtgaagcttaacaa

SEQ ID NO: 188028 - DNA, 25 bp, SARS Virus
tttggatggaggtaagcttaacaat

SEQ ID NO: 188029 - DNA, 25 bp, SARS Virus
ttggatggagggtagcttaacaata

SEQ ID NO: 188030 - DNA, 25 bp, SARS Virus
tggatggagggatgcttaacaatat

SEQ ID NO: 188031 - DNA, 25 bp, SARS Virus
ggatggagggaatcttaacaatatc

SEQ ID NO: 188032 - DNA, 25 bp, SARS Virus
gatggagggaagtttaacaatatca

SEQ ID NO: 188033 - DNA, 25 bp, SARS Virus
atggagggaagcttaacaatatcat

SEQ ID NO: 188034 - DNA, 25 bp, SARS Virus
tggagggaagcttaacaatatcatc

SEQ ID NO: 188035 - DNA, 25 bp, SARS Virus
ggagggaagctttacaatatcatcc

SEQ ID NO: 188036 - DNA, 25 bp, SARS Virus
gagggaagcttatcaatatcatccg

SEQ ID NO: 188037 - DNA, 25 bp, SARS Virus
agggaagcttaataatatcatccgt

SEQ ID NO: 188038 - DNA, 25 bp, SARS Virus
gggaagcttaactatatcatccgtt

SEQ ID NO: 188039 - DNA, 25 bp, SARS Virus
ggaagcttaacattatcatccgttc

SEQ ID NO: 188040 - DNA, 25 bp, SARS Virus
gaagcttaacaatatcatccgttca

SEQ ID NO: 188041 - DNA, 25 bp, SARS Virus
aagcttaacaatttcatccgttcac

SEQ ID NO: 188042 - DNA, 25 bp, SARS Virus
agcttaacaatatcatccgttcacg

SEQ ID NO: 188043 - DNA, 25 bp, SARS Virus
gcttaacaatattatccgttcacgt

SEQ ID NO: 188044 - DNA, 25 bp, SARS Virus
cttaacaatatcttccgttcacgta

SEQ ID NO: 188045 - DNA, 25 bp, SARS Virus
ttaacaatatcatccgttcacgtaa

SEQ ID NO: 188046 - DNA, 25 bp, SARS Virus
taacaatatcattcgttcacgtaac

SEQ ID NO: 188047 - DNA, 25 bp, SARS Virus
aacaatatcatctgttcacgtaaca

SEQ ID NO: 188048 - DNA, 25 bp, SARS Virus
acaatatcatcctttcacgtaacag

SEQ ID NO: 188049 - DNA, 25 bp, SARS Virus
caatatcatccgttcacgtaacagt

SEQ ID NO: 188050 - DNA, 25 bp, SARS Virus
aatatcatccgttcacgtaacagta

SEQ ID NO: 188051 - DNA, 25 bp, SARS Virus
atatcatccgtttacgtaacagtag

SEQ ID NO: 188052 - DNA, 25 bp, SARS Virus
tatcatccgttctcgtaacagtagt

SEQ ID NO: 188053 - DNA, 25 bp, SARS Virus
atcatccgttcatgtaacagtagtc

SEQ ID NO: 188054 - DNA, 25 bp, SARS Virus
tcatccgttcacttaacagtagtca

SEQ ID NO: 188055 - DNA, 25 bp, SARS Virus
catccgttcacgtaacagtagtcat

SEQ ID NO: 188056 - DNA, 25 bp, SARS Virus
atccgttcacgttacagtagtcatg

SEQ ID NO: 188057 - DNA, 25 bp, SARS Virus
tccgttcacgtatcagtagtcatgt

SEQ ID NO: 188058 - DNA, 25 bp, SARS Virus
ccgttcacgtaatagtagtcatgtt

SEQ ID NO: 188059 - DNA, 25 bp, SARS Virus
cgttcacgtaactgtagtcatgttc

SEQ ID NO: 188060 - DNA, 25 bp, SARS Virus
gttcacgtaacattagtcatgttcg

SEQ ID NO: 188061 - DNA, 25 bp, SARS Virus
ttcacgtaacagtagtcatgttcga

SEQ ID NO: 188062 - DNA, 25 bp, SARS Virus
tcacgtaacagttgtcatgttcgac

SEQ ID NO: 188063 - DNA, 25 bp, SARS Virus
cacgtaacagtattcatgttcgaca

SEQ ID NO: 188064 - DNA, 25 bp, SARS Virus
acgtaacagtagtcatgttcgacaa

SEQ ID NO: 188065 - DNA, 25 bp, SARS Virus
cgtaacagtagttatgttcgacaaa

SEQ ID NO: 188066 - DNA, 25 bp, SARS Virus
gtaacagtagtcttgttcgacaaac

SEQ ID NO: 188067 - DNA, 25 bp, SARS Virus
taacagtagtcatgttcgacaaaca

SEQ ID NO: 188068 - DNA, 25 bp, SARS Virus
aacagtagtcattttcgacaaacac

SEQ ID NO: 188069 - DNA, 25 bp, SARS Virus
acagtagtcatgttcgacaaacaca

SEQ ID NO: 188070 - DNA, 25 bp, SARS Virus
cagtagtcatgttcgacaaacacac

SEQ ID NO: 188071 - DNA, 25 bp, SARS Virus
agtagtcatgtttgacaaacacacc

SEQ ID NO: 188072 - DNA, 25 bp, SARS Virus
gtagtcatgttctacaaacacacca

SEQ ID NO: 188073 - DNA, 25 bp, SARS Virus
tagtcatgttcgtcaaacacaccat

SEQ ID NO: 188074 - DNA, 25 bp, SARS Virus
agtcatgttcgataaacacaccatg

SEQ ID NO: 188075 - DNA, 25 bp, SARS Virus
gtcatgttcgactaacacaccatgg

SEQ ID NO: 188076 - DNA, 25 bp, SARS Virus
tcatgttcgacatacacaccatggt

SEQ ID NO: 188077 - DNA, 25 bp, SARS Virus
catgttcgacaatcacaccatggtc

SEQ ID NO: 188078 - DNA, 25 bp, SARS Virus
atgttcgacaaatacaccatggtcg

SEQ ID NO: 188079 - DNA, 25 bp, SARS Virus
tgttcgacaaactcaccatggtcgg

SEQ ID NO: 188080 - DNA, 25 bp, SARS Virus
gttcgacaaacataccatggtcggc

SEQ ID NO: 188081 - DNA, 25 bp, SARS Virus
ttcgacaaacactccatggtcggcg

SEQ ID NO: 188082 - DNA, 25 bp, SARS Virus
tcgacaaacacatcatggtcggcgt

SEQ ID NO: 188083 - DNA, 25 bp, SARS Virus
cgacaaacacactatggtcggcgtg

SEQ ID NO: 188084 - DNA, 25 bp, SARS Virus
gacaaacacaccttggtcggcgtgt

SEQ ID NO: 188085 - DNA, 25 bp, SARS Virus
acaaacacaccatggtcggcgtgtc

SEQ ID NO: 188086 - DNA, 25 bp, SARS Virus
caaacacaccattgtcggcgtgtcc

SEQ ID NO: 188087 - DNA, 25 bp, SARS Virus
aaacacaccatgttcggcgtgtcct

SEQ ID NO: 188088 - DNA, 25 bp, SARS Virus
aacacaccatggtcggcgtgtcctg

SEQ ID NO: 188089 - DNA, 25 bp, SARS Virus
acacaccatggttggcgtgtcctgt

SEQ ID NO: 188090 - DNA, 25 bp, SARS Virus
cacaccatggtctgcgtgtcctgta

SEQ ID NO: 188091 - DNA, 25 bp, SARS Virus
acaccatggtcgtcgtgtcctgtag

SEQ ID NO: 188092 - DNA, 25 bp, SARS Virus
caccatggtcggtgtgtcctgtaga

SEQ ID NO: 188093 - DNA, 25 bp, SARS Virus
accatggtcggcttgtcctgtagac

SEQ ID NO: 188094 - DNA, 25 bp, SARS Virus
ccatggtcggcgtgtcctgtagaca

SEQ ID NO: 188095 - DNA, 25 bp, SARS Virus
catggtcggcgtttcctgtagacag

SEQ ID NO: 188096 - DNA, 25 bp, SARS Virus
atggtcggcgtgtcctgtagacagc

SEQ ID NO: 188097 - DNA, 25 bp, SARS Virus
tggtcggcgtgttctgtagacagca

SEQ ID NO: 188098 - DNA, 25 bp, SARS Virus
ggtcggcgtgtcttgtagacagcat

SEQ ID NO: 188099 - DNA, 25 bp, SARS Virus
gtcggcgtgtcctgtagacagcatc

SEQ ID NO: 188100 - DNA, 25 bp, SARS Virus
tcggcgtgtcctttagacagcatca

SEQ ID NO: 188101 - DNA, 25 bp, SARS Virus
cggcgtgtcctgtagacagcatcac

SEQ ID NO: 188102 - DNA, 25 bp, SARS Virus
ggcgtgtcctgttgacagcatcacg

SEQ ID NO: 188103 - DNA, 25 bp, SARS Virus
gcgtgtcctgtatacagcatcacga

SEQ ID NO: 188104 - DNA, 25 bp, SARS Virus
cgtgtcctgtagtcagcatcacgat

SEQ ID NO: 188105 - DNA, 25 bp, SARS Virus
gtgtcctgtagatagcatcacgatg

SEQ ID NO: 188106 - DNA, 25 bp, SARS Virus
tgtcctgtagactgcatcacgatga

SEQ ID NO: 188107 - DNA, 25 bp, SARS Virus
gtcctgtagacatcatcacgatgac

SEQ ID NO: 188108 - DNA, 25 bp, SARS Virus
tcctgtagacagtatcacgatgacc

SEQ ID NO: 188109 - DNA, 25 bp, SARS Virus
cctgtagacagcttcacgatgacct

SEQ ID NO: 188110 - DNA, 25 bp, SARS Virus
ctgtagacagcatcacgatgacctg

SEQ ID NO: 188111 - DNA, 25 bp, SARS Virus
tgtagacagcattacgatgacctga

SEQ ID NO: 188112 - DNA, 25 bp, SARS Virus
gtagacagcatctcgatgacctgag

SEQ ID NO: 188113 - DNA, 25 bp, SARS Virus
tagacagcatcatgatgacctgagt

SEQ ID NO: 188114 - DNA, 25 bp, SARS Virus
agacagcatcactatgacctgagtc

SEQ ID NO: 188115 - DNA, 25 bp, SARS Virus
gacagcatcacgttgacctgagtca

SEQ ID NO: 188116 - DNA, 25 bp, SARS Virus
acagcatcacgatgacctgagtcaa

SEQ ID NO: 188117 - DNA, 25 bp, SARS Virus
cagcatcacgattacctgagtcaag

SEQ ID NO: 188118 - DNA, 25 bp, SARS Virus
agcatcacgatgtcctgagtcaagt

SEQ ID NO: 188119 - DNA, 25 bp, SARS Virus
gcatcacgatgatctgagtcaagta

SEQ ID NO: 188120 - DNA, 25 bp, SARS Virus
catcacgatgacttgagtcaagtaa

SEQ ID NO: 188121 - DNA, 25 bp, SARS Virus
atcacgatgacctgagtcaagtaat

SEQ ID NO: 188122 - DNA, 25 bp, SARS Virus
tcacgatgaccttagtcaagtaata

SEQ ID NO: 188123 - DNA, 25 bp, SARS Virus
cacgatgacctgtgtcaagtaataa

SEQ ID NO: 188124 - DNA, 25 bp, SARS Virus
acgatgacctgattcaagtaataag

SEQ ID NO: 188125 - DNA, 25 bp, SARS Virus
cgatgacctgagtcaagtaataaga

SEQ ID NO: 188126 - DNA, 25 bp, SARS Virus
gatgacctgagttaagtaataagac

SEQ ID NO: 188127 - DNA, 25 bp, SARS Virus
atgacctgagtctagtaataagaca

SEQ ID NO: 188128 - DNA, 25 bp, SARS Virus
tgacctgagtcatgtaataagacat

SEQ ID NO: 188129 - DNA, 25 bp, SARS Virus
gacctgagtcaattaataagacatc

SEQ ID NO: 188130 - DNA, 25 bp, SARS Virus
acctgagtcaagtaataagacatca

SEQ ID NO: 188131 - DNA, 25 bp, SARS Virus
cctgagtcaagttataagacatcaa

SEQ ID NO: 188132 - DNA, 25 bp, SARS Virus
ctgagtcaagtattaagacatcaaa

SEQ ID NO: 188133 - DNA, 25 bp, SARS Virus
tgagtcaagtaataagacatcaaat

SEQ ID NO: 188134 - DNA, 25 bp, SARS Virus
gagtcaagtaattagacatcaaatt

SEQ ID NO: 188135 - DNA, 25 bp, SARS Virus
agtcaagtaatatgacatcaaattg

SEQ ID NO: 188136 - DNA, 25 bp, SARS Virus
gtcaagtaataatacatcaaattgt

SEQ ID NO: 188137 - DNA, 25 bp, SARS Virus
tcaagtaataagtcatcaaattgtc

SEQ ID NO: 188138 - DNA, 25 bp, SARS Virus
caagtaataagatatcaaattgtcg

SEQ ID NO: 188139 - DNA, 25 bp, SARS Virus
aagtaataagacttcaaattgtcga

SEQ ID NO: 188140 - DNA, 25 bp, SARS Virus
agtaataagacatcaaattgtcgac

SEQ ID NO: 188141 - DNA, 25 bp, SARS Virus
gtaataagacattaaattgtcgact

SEQ ID NO: 188142 - DNA, 25 bp, SARS Virus
taataagacatctaattgtcgactc

SEQ ID NO: 188143 - DNA, 25 bp, SARS Virus
aataagacatcatattgtcgactca

SEQ ID NO: 188144 - DNA, 25 bp, SARS Virus
ataagacatcaatttgtcgactcaa

SEQ ID NO: 188145 - DNA, 25 bp, SARS Virus
taagacatcaaattgtcgactcaac

SEQ ID NO: 188146 - DNA, 25 bp, SARS Virus
aagacatcaaattgtcgactcaacc

SEQ ID NO: 188147 - DNA, 25 bp, SARS Virus
agacatcaaattttcgactcaaccg

SEQ ID NO: 188148 - DNA, 25 bp, SARS Virus
gacatcaaattgtcgactcaaccga

SEQ ID NO: 188149 - DNA, 25 bp, SARS Virus
acatcaaattgttgactcaaccgag

SEQ ID NO: 188150 - DNA, 25 bp, SARS Virus
catcaaattgtctactcaaccgaga

SEQ ID NO: 188151 - DNA, 25 bp, SARS Virus
atcaaattgtcgtctcaaccgagaa

SEQ ID NO: 188152 - DNA, 25 bp, SARS Virus
tcaaattgtcgattcaaccgagaat

SEQ ID NO: 188153 - DNA, 25 bp, SARS Virus
caaattgtcgactcaaccgagaatc

SEQ ID NO: 188154 - DNA, 25 bp, SARS Virus
aaattgtcgacttaaccgagaatct

SEQ ID NO: 188155 - DNA, 25 bp, SARS Virus
aattgtcgactctaccgagaatctc

SEQ ID NO: 188156 - DNA, 25 bp, SARS Virus
attgtcgactcatccgagaatctcg

SEQ ID NO: 188157 - DNA, 25 bp, SARS Virus
ttgtcgactcaatcgagaatctcga

SEQ ID NO: 188158 - DNA, 25 bp, SARS Virus
tgtcgactcaactgagaatctcgac

SEQ ID NO: 188159 - DNA, 25 bp, SARS Virus
gtcgactcaacctagaatctcgaca

SEQ ID NO: 188160 - DNA, 25 bp, SARS Virus
tcgactcaaccgtgaatctcgacat

SEQ ID NO: 188161 - DNA, 25 bp, SARS Virus
cgactcaaccgataatctcgacatt

SEQ ID NO: 188162 - DNA, 25 bp, SARS Virus
gactcaaccgagtatctcgacattg

SEQ ID NO: 188163 - DNA, 25 bp, SARS Virus
actcaaccgagattctcgacattgt

SEQ ID NO: 188164 - DNA, 25 bp, SARS Virus
ctcaaccgagaatctcgacattgtt

SEQ ID NO: 188165 - DNA, 25 bp, SARS Virus
tcaaccgagaatttcgacattgtta

SEQ ID NO: 188166 - DNA, 25 bp, SARS Virus
caaccgagaatctcgacattgttat

SEQ ID NO: 188167 - DNA, 25 bp, SARS Virus
aaccgagaatcttgacattgttatt

SEQ ID NO: 188168 - DNA, 25 bp, SARS Virus
accgagaatctctacattgttattc

SEQ ID NO: 188169 - DNA, 25 bp, SARS Virus
ccgagaatctcgtcattgttattct

SEQ ID NO: 188170 - DNA, 25 bp, SARS Virus
cgagaatctcgatattgttattctc

SEQ ID NO: 188171 - DNA, 25 bp, SARS Virus
gagaatctcgactttgttattctcc

SEQ ID NO: 188172 - DNA, 25 bp, SARS Virus
agaatctcgacattgttattctccg

SEQ ID NO: 188173 - DNA, 25 bp, SARS Virus
gaatctcgacattgttattctccgg

SEQ ID NO: 188174 - DNA, 25 bp, SARS Virus
aatctcgacatttttattctccggt

SEQ ID NO: 188175 - DNA, 25 bp, SARS Virus
atctcgacattgttattctccggtt

SEQ ID NO: 188176 - DNA, 25 bp, SARS Virus
tctcgacattgttattctccggttc

SEQ ID NO: 188177 - DNA, 25 bp, SARS Virus
ctcgacattgtttttctccggttcg

SEQ ID NO: 188178 - DNA, 25 bp, SARS Virus
tcgacattgttattctccggttcgg

SEQ ID NO: 188179 - DNA, 25 bp, SARS Virus
cgacattgttattctccggttcggt

SEQ ID NO: 188180 - DNA, 25 bp, SARS Virus
gacattgttattttccggttcggtt

SEQ ID NO: 188181 - DNA, 25 bp, SARS Virus
acattgttattctccggttcggttt

SEQ ID NO: 188182 - DNA, 25 bp, SARS Virus
cattgttattcttcggttcggttta

SEQ ID NO: 188183 - DNA, 25 bp, SARS Virus
attgttattctctggttcggtttaa

SEQ ID NO: 188184 - DNA, 25 bp, SARS Virus
ttgttattctcctgttcggtttaaa

SEQ ID NO: 188185 - DNA, 25 bp, SARS Virus
tgttattctccgtttcggtttaaac

SEQ ID NO: 188186 - DNA, 25 bp, SARS Virus
gttattctccggttcggtttaaacc

SEQ ID NO: 188187 - DNA, 25 bp, SARS Virus
ttattctccggttcggtttaaacca

SEQ ID NO: 188188 - DNA, 25 bp, SARS Virus
tattctccggtttggtttaaaccac

SEQ ID NO: 188189 - DNA, 25 bp, SARS Virus
attctccggttctgtttaaaccact

SEQ ID NO: 188190 - DNA, 25 bp, SARS Virus
ttctccggttcgttttaaaccactt

SEQ ID NO: 188191 - DNA, 25 bp, SARS Virus
tctccggttcggtttaaaccactta

SEQ ID NO: 188192 - DNA, 25 bp, SARS Virus
ctccggttcggtttaaaccacttaa

SEQ ID NO: 188193 - DNA, 25 bp, SARS Virus
tccggttcggtttaaaccacttaac

SEQ ID NO: 188194 - DNA, 25 bp, SARS Virus
ccggttcggttttaaccacttaaca

SEQ ID NO: 188195 - DNA, 25 bp, SARS Virus
cggttcggtttataccacttaacag

SEQ ID NO: 188196 - DNA, 25 bp, SARS Virus
ggttcggtttaatccacttaacagg

SEQ ID NO: 188197 - DNA, 25 bp, SARS Virus
gttcggtttaaatcacttaacaggt

SEQ ID NO: 188198 - DNA, 25 bp, SARS Virus
ttcggtttaaactacttaacaggta

SEQ ID NO: 188199 - DNA, 25 bp, SARS Virus
tcggtttaaacctcttaacaggtac

SEQ ID NO: 188200 - DNA, 25 bp, SARS Virus
cggtttaaaccatttaacaggtaca

SEQ ID NO: 188201 - DNA, 25 bp, SARS Virus
ggtttaaaccacttaacaggtacaa

SEQ ID NO: 188202 - DNA, 25 bp, SARS Virus
gtttaaaccacttaacaggtacaat

SEQ ID NO: 188203 - DNA, 25 bp, SARS Virus
tttaaaccactttacaggtacaatt

SEQ ID NO: 188204 - DNA, 25 bp, SARS Virus
ttaaaccacttatcaggtacaatta

SEQ ID NO: 188205 - DNA, 25 bp, SARS Virus
taaaccacttaataggtacaattaa

SEQ ID NO: 188206 - DNA, 25 bp, SARS Virus
aaaccacttaactggtacaattaaa

SEQ ID NO: 188207 - DNA, 25 bp, SARS Virus
aaccacttaacatgtacaattaaag

SEQ ID NO: 188208 - DNA, 25 bp, SARS Virus
accacttaacagttacaattaaagt

SEQ ID NO: 188209 - DNA, 25 bp, SARS Virus
ccacttaacaggtacaattaaagtg

SEQ ID NO: 188210 - DNA, 25 bp, SARS Virus
cacttaacaggttcaattaaagtga

SEQ ID NO: 188211 - DNA, 25 bp, SARS Virus
acttaacaggtataattaaagtgat

SEQ ID NO: 188212 - DNA, 25 bp, SARS Virus
cttaacaggtactattaaagtgatt

SEQ ID NO: 188213 - DNA, 25 bp, SARS Virus
ttaacaggtacatttaaagtgattc

SEQ ID NO: 188214 - DNA, 25 bp, SARS Virus
taacaggtacaattaaagtgattca

SEQ ID NO: 188215 - DNA, 25 bp, SARS Virus
aacaggtacaattaaagtgattcaa

SEQ ID NO: 188216 - DNA, 25 bp, SARS Virus
acaggtacaatttaagtgattcaac

SEQ ID NO: 188217 - DNA, 25 bp, SARS Virus
caggtacaattatagtgattcaact

SEQ ID NO: 188218 - DNA, 25 bp, SARS Virus
aggtacaattaatgtgattcaactt

SEQ ID NO: 188219 - DNA, 25 bp, SARS Virus
ggtacaattaaattgattcaacttg

SEQ ID NO: 188220 - DNA, 25 bp, SARS Virus
gtacaattaaagtgattcaacttgt

SEQ ID NO: 188221 - DNA, 25 bp, SARS Virus
tacaattaaagttattcaacttgtt

SEQ ID NO: 188222 - DNA, 25 bp, SARS Virus
acaattaaagtgtttcaacttgtta

SEQ ID NO: 188223 - DNA, 25 bp, SARS Virus
caattaaagtgattcaacttgttag

SEQ ID NO: 188224 - DNA, 25 bp, SARS Virus
aattaaagtgattcaacttgttaga

SEQ ID NO: 188225 - DNA, 25 bp, SARS Virus
attaaagtgatttaacttgttagaa

SEQ ID NO: 188226 - DNA, 25 bp, SARS Virus
ttaaagtgattctacttgttagaac

SEQ ID NO: 188227 - DNA, 25 bp, SARS Virus
taaagtgattcatcttgttagaacg

SEQ ID NO: 188228 - DNA, 25 bp, SARS Virus
aaagtgattcaatttgttagaacga

SEQ ID NO: 188229 - DNA, 25 bp, SARS Virus
aagtgattcaacttgttagaacgat

SEQ ID NO: 188230 - DNA, 25 bp, SARS Virus
agtgattcaacttgttagaacgata

SEQ ID NO: 188231 - DNA, 25 bp, SARS Virus
gtgattcaactttttagaacgatag

SEQ ID NO: 188232 - DNA, 25 bp, SARS Virus
tgattcaacttgttagaacgatagg

SEQ ID NO: 188233 - DNA, 25 bp, SARS Virus
gattcaacttgttagaacgataggc

SEQ ID NO: 188234 - DNA, 25 bp, SARS Virus
attcaacttgtttgaacgataggcg

SEQ ID NO: 188235 - DNA, 25 bp, SARS Virus
ttcaacttgttataacgataggcgt

SEQ ID NO: 188236 - DNA, 25 bp, SARS Virus
tcaacttgttagtacgataggcgta

SEQ ID NO: 188237 - DNA, 25 bp, SARS Virus
caacttgttagatcgataggcgtag

SEQ ID NO: 188238 - DNA, 25 bp, SARS Virus
aacttgttagaatgataggcgtagt

SEQ ID NO: 188239 - DNA, 25 bp, SARS Virus
acttgttagaactataggcgtagtt

SEQ ID NO: 188240 - DNA, 25 bp, SARS Virus
cttgttagaacgttaggcgtagttg

SEQ ID NO: 188241 - DNA, 25 bp, SARS Virus
ttgttagaacgataggcgtagttgt

SEQ ID NO: 188242 - DNA, 25 bp, SARS Virus
tgttagaacgattggcgtagttgtt

SEQ ID NO: 188243 - DNA, 25 bp, SARS Virus
gttagaacgatatgcgtagttgttg

SEQ ID NO: 188244 - DNA, 25 bp, SARS Virus
ttagaacgatagtcgtagttgttga

SEQ ID NO: 188245 - DNA, 25 bp, SARS Virus
tagaacgataggtgtagttgttgaa

SEQ ID NO: 188246 - DNA, 25 bp, SARS Virus
agaacgataggcttagttgttgaac

SEQ ID NO: 188247 - DNA, 25 bp, SARS Virus
gaacgataggcgtagttgttgaacg

SEQ ID NO: 188248 - DNA, 25 bp, SARS Virus
aacgataggcgttgttgttgaacga

SEQ ID NO: 188249 - DNA, 25 bp, SARS Virus
acgataggcgtatttgttgaacgac

SEQ ID NO: 188250 - DNA, 25 bp, SARS Virus
cgataggcgtagttgttgaacgacc

SEQ ID NO: 188251 - DNA, 25 bp, SARS Virus
gataggcgtagttgttgaacgacct

SEQ ID NO: 188252 - DNA, 25 bp, SARS Virus
ataggcgtagtttttgaacgaccta

SEQ ID NO: 188253 - DNA, 25 bp, SARS Virus
taggcgtagttgttgaacgacctaa

SEQ ID NO: 188254 - DNA, 25 bp, SARS Virus
aggcgtagttgttgaacgacctaaa

SEQ ID NO: 188255 - DNA, 25 bp, SARS Virus
ggcgtagttgtttaacgacctaaag

SEQ ID NO: 188256 - DNA, 25 bp, SARS Virus
gcgtagttgttgtacgacctaaagg

SEQ ID NO: 188257 - DNA, 25 bp, SARS Virus
cgtagttgttgatcgacctaaaggg

SEQ ID NO: 188258 - DNA, 25 bp, SARS Virus
gtagttgttgaatgacctaaagggt

SEQ ID NO: 188259 - DNA, 25 bp, SARS Virus
tagttgttgaactacctaaagggtc

SEQ ID NO: 188260 - DNA, 25 bp, SARS Virus
agttgttgaacgtcctaaagggtct

SEQ ID NO: 188261 - DNA, 25 bp, SARS Virus
gttgttgaacgatctaaagggtctc

SEQ ID NO: 188262 - DNA, 25 bp, SARS Virus
ttgttgaacgacttaaagggtctca

SEQ ID NO: 188263 - DNA, 25 bp, SARS Virus
tgttgaacgacctaaagggtctcac

SEQ ID NO: 188264 - DNA, 25 bp, SARS Virus
gttgaacgaccttaagggtctcacg

SEQ ID NO: 188265 - DNA, 25 bp, SARS Virus
ttgaacgacctatagggtctcacgt

SEQ ID NO: 188266 - DNA, 25 bp, SARS Virus
tgaacgacctaatgggtctcacgtc

SEQ ID NO: 188267 - DNA, 25 bp, SARS Virus
gaacgacctaaatggtctcacgtct

SEQ ID NO: 188268 - DNA, 25 bp, SARS Virus
aacgacctaaagtgtctcacgtcta

SEQ ID NO: 188269 - DNA, 25 bp, SARS Virus
acgacctaaaggttctcacgtctac

SEQ ID NO: 188270 - DNA, 25 bp, SARS Virus
cgacctaaagggtctcacgtctacg

SEQ ID NO: 188271 - DNA, 25 bp, SARS Virus
gacctaaagggtttcacgtctacgt

SEQ ID NO: 188272 - DNA, 25 bp, SARS Virus
acctaaagggtctcacgtctacgta

SEQ ID NO: 188273 - DNA, 25 bp, SARS Virus
cctaaagggtcttacgtctacgtat

SEQ ID NO: 188274 - DNA, 25 bp, SARS Virus
ctaaagggtctctcgtctacgtata

SEQ ID NO: 188275 - DNA, 25 bp, SARS Virus
taaagggtctcatgtctacgtatac

SEQ ID NO: 188276 - DNA, 25 bp, SARS Virus
aaagggtctcacttctacgtataca

SEQ ID NO: 188277 - DNA, 25 bp, SARS Virus
aagggtctcacgtctacgtatacat

SEQ ID NO: 188278 - DNA, 25 bp, SARS Virus
agggtctcacgtttacgtatacatt

SEQ ID NO: 188279 - DNA, 25 bp, SARS Virus
gggtctcacgtctacgtatacattt

SEQ ID NO: 188280 - DNA, 25 bp, SARS Virus
ggtctcacgtcttcgtatacatttc

SEQ ID NO: 188281 - DNA, 25 bp, SARS Virus
gtctcacgtctatgtatacatttcc

SEQ ID NO: 188282 - DNA, 25 bp, SARS Virus
tctcacgtctacttatacatttcca

SEQ ID NO: 188283 - DNA, 25 bp, SARS Virus
ctcacgtctacgtatacatttccac

SEQ ID NO: 188284 - DNA, 25 bp, SARS Virus
tcacgtctacgtttacatttccaca

SEQ ID NO: 188285 - DNA, 25 bp, SARS Virus
cacgtctacgtatacatttccacaa

SEQ ID NO: 188286 - DNA, 25 bp, SARS Virus
acgtctacgtattcatttccacaat

SEQ ID NO: 188287 - DNA, 25 bp, SARS Virus
cgtctacgtatatatttccacaatg

SEQ ID NO: 188288 - DNA, 25 bp, SARS Virus
gtctacgtatacttttccacaatgg

SEQ ID NO: 188289 - DNA, 25 bp, SARS Virus
tctacgtatacatttccacaatggt

SEQ ID NO: 188290 - DNA, 25 bp, SARS Virus
ctacgtatacatttccacaatggta

SEQ ID NO: 188291 - DNA, 25 bp, SARS Virus
tacgtatacatttccacaatggtag

SEQ ID NO: 188292 - DNA, 25 bp, SARS Virus
acgtatacattttcacaatggtagt

SEQ ID NO: 188293 - DNA, 25 bp, SARS Virus
cgtatacatttctacaatggtagtg

SEQ ID NO: 188294 - DNA, 25 bp, SARS Virus
gtatacatttcctcaatggtagtgt

SEQ ID NO: 188295 - DNA, 25 bp, SARS Virus
tatacatttccataatggtagtgtt

SEQ ID NO: 188296 - DNA, 25 bp, SARS Virus
atacatttccactatggtagtgttc

SEQ ID NO: 188297 - DNA, 25 bp, SARS Virus
tacatttccacattggtagtgttca

SEQ ID NO: 188298 - DNA, 25 bp, SARS Virus
acatttccacaatggtagtgttcac

SEQ ID NO: 188299 - DNA, 25 bp, SARS Virus
catttccacaattgtagtgttcaca

SEQ ID NO: 188300 - DNA, 25 bp, SARS Virus
atttccacaatgttagtgttcacaa

SEQ ID NO: 188301 - DNA, 25 bp, SARS Virus
tttccacaatggtagtgttcacaag

SEQ ID NO: 188302 - DNA, 25 bp, SARS Virus
ttccacaatggttgtgttcacaaga

SEQ ID NO: 188303 - DNA, 25 bp, SARS Virus
tccacaatggtattgttcacaagaa

SEQ ID NO: 188304 - DNA, 25 bp, SARS Virus
ccacaatggtagtgttcacaagaac

SEQ ID NO: 188305 - DNA, 25 bp, SARS Virus
cacaatggtagttttcacaagaaca

SEQ ID NO: 188306 - DNA, 25 bp, SARS Virus
acaatggtagtgttcacaagaacat

SEQ ID NO: 188307 - DNA, 25 bp, SARS Virus
caatggtagtgttcacaagaacatc

SEQ ID NO: 188308 - DNA, 25 bp, SARS Virus
aatggtagtgtttacaagaacatcc

SEQ ID NO: 188309 - DNA, 25 bp, SARS Virus
atggtagtgttctcaagaacatcca

SEQ ID NO: 188310 - DNA, 25 bp, SARS Virus
tggtagtgttcataagaacatccat

SEQ ID NO: 188311 - DNA, 25 bp, SARS Virus
ggtagtgttcactagaacatccatg

SEQ ID NO: 188312 - DNA, 25 bp, SARS Virus
gtagtgttcacatgaacatccatgg

SEQ ID NO: 188313 - DNA, 25 bp, SARS Virus
tagtgttcacaataacatccatggt

SEQ ID NO: 188314 - DNA, 25 bp, SARS Virus
agtgttcacaagtacatccatggta

SEQ ID NO: 188315 - DNA, 25 bp, SARS Virus
gtgttcacaagatcatccatggtat

SEQ ID NO: 188316 - DNA, 25 bp, SARS Virus
tgttcacaagaatatccatggtatt

SEQ ID NO: 188317 - DNA, 25 bp, SARS Virus
gttcacaagaacttccatggtatta

SEQ ID NO: 188318 - DNA, 25 bp, SARS Virus
ttcacaagaacatccatggtattag

SEQ ID NO: 188319 - DNA, 25 bp, SARS Virus
tcacaagaacattcatggtattagt

SEQ ID NO: 188320 - DNA, 25 bp, SARS Virus
cacaagaacatctatggtattagtc

SEQ ID NO: 188321 - DNA, 25 bp, SARS Virus
acaagaacatccttggtattagtcc

SEQ ID NO: 188322 - DNA, 25 bp, SARS Virus
caagaacatccatggtattagtccc

SEQ ID NO: 188323 - DNA, 25 bp, SARS Virus
aagaacatccattgtattagtccct

SEQ ID NO: 188324 - DNA, 25 bp, SARS Virus
agaacatccatgttattagtccctg

SEQ ID NO: 188325 - DNA, 25 bp, SARS Virus
gaacatccatggtattagtccctgt

SEQ ID NO: 188326 - DNA, 25 bp, SARS Virus
aacatccatggttttagtccctgtt

SEQ ID NO: 188327 - DNA, 25 bp, SARS Virus
acatccatggtattagtccctgttg

SEQ ID NO: 188328 - DNA, 25 bp, SARS Virus
catccatggtattagtccctgttgt

SEQ ID NO: 188329 - DNA, 25 bp, SARS Virus
atccatggtatttgtccctgttgtt

SEQ ID NO: 188330 - DNA, 25 bp, SARS Virus
tccatggtattattccctgttgttg

SEQ ID NO: 188331 - DNA, 25 bp, SARS Virus
ccatggtattagtccctgttgttgg

SEQ ID NO: 188332 - DNA, 25 bp, SARS Virus
catggtattagttcctgttgttggt

SEQ ID NO: 188333 - DNA, 25 bp, SARS Virus
atggtattagtctctgttgttggta

SEQ ID NO: 188334 - DNA, 25 bp, SARS Virus
tggtattagtccttgttgttggtac

SEQ ID NO: 188335 - DNA, 25 bp, SARS Virus
ggtattagtccctgttgttggtact

SEQ ID NO: 188336 - DNA, 25 bp, SARS Virus
gtattagtcccttttgttggtactc

SEQ ID NO: 188337 - DNA, 25 bp, SARS Virus
tattagtccctgttgttggtactca

SEQ ID NO: 188338 - DNA, 25 bp, SARS Virus
attagtccctgttgttggtactcaa

SEQ ID NO: 188339 - DNA, 25 bp, SARS Virus
ttagtccctgtttttggtactcaaa

SEQ ID NO: 188340 - DNA, 25 bp, SARS Virus
tagtccctgttgttggtactcaaac

SEQ ID NO: 188341 - DNA, 25 bp, SARS Virus
agtccctgttgttggtactcaaacc

SEQ ID NO: 188342 - DNA, 25 bp, SARS Virus
gtccctgttgtttgtactcaaaccg

SEQ ID NO: 188343 - DNA, 25 bp, SARS Virus
tccctgttgttgttactcaaaccga

SEQ ID NO: 188344 - DNA, 25 bp, SARS Virus
ccctgttgttggtactcaaaccgac

SEQ ID NO: 188345 - DNA, 25 bp, SARS Virus
cctgttgttggttctcaaaccgacg

SEQ ID NO: 188346 - DNA, 25 bp, SARS Virus
ctgttgttggtattcaaaccgacga

SEQ ID NO: 188347 - DNA, 25 bp, SARS Virus
tgttgttggtactcaaaccgacgac

SEQ ID NO: 188348 - DNA, 25 bp, SARS Virus
gttgttggtacttaaaccgacgaca

SEQ ID NO: 188349 - DNA, 25 bp, SARS Virus
ttgttggtactctaaccgacgacat

SEQ ID NO: 188350 - DNA, 25 bp, SARS Virus
tgttggtactcataccgacgacatc

SEQ ID NO: 188351 - DNA, 25 bp, SARS Virus
gttggtactcaatccgacgacatca

SEQ ID NO: 188352 - DNA, 25 bp, SARS Virus
ttggtactcaaatcgacgacatcag

SEQ ID NO: 188353 - DNA, 25 bp, SARS Virus
tggtactcaaactgacgacatcagt

SEQ ID NO: 188354 - DNA, 25 bp, SARS Virus
ggtactcaaacctacgacatcagtt

SEQ ID NO: 188355 - DNA, 25 bp, SARS Virus
gtactcaaaccgtcgacatcagtta

SEQ ID NO: 188356 - DNA, 25 bp, SARS Virus
tactcaaaccgatgacatcagttac

SEQ ID NO: 188357 - DNA, 25 bp, SARS Virus
actcaaaccgactacatcagttacc

SEQ ID NO: 188358 - DNA, 25 bp, SARS Virus
ctcaaaccgacgtcatcagttacca

SEQ ID NO: 188359 - DNA, 25 bp, SARS Virus
tcaaaccgacgatatcagttaccat

SEQ ID NO: 188360 - DNA, 25 bp, SARS Virus
caaaccgacgacttcagttaccata

SEQ ID NO: 188361 - DNA, 25 bp, SARS Virus
aaaccgacgacatcagttaccatac

SEQ ID NO: 188362 - DNA, 25 bp, SARS Virus
aaccgacgacattagttaccatact

SEQ ID NO: 188363 - DNA, 25 bp, SARS Virus
accgacgacatctgttaccatacta

SEQ ID NO: 188364 - DNA, 25 bp, SARS Virus
ccgacgacatcatttaccatactac

SEQ ID NO: 188365 - DNA, 25 bp, SARS Virus
cgacgacatcagttaccatactaca

SEQ ID NO: 188366 - DNA, 25 bp, SARS Virus
gacgacatcagttaccatactacaa

SEQ ID NO: 188367 - DNA, 25 bp, SARS Virus
acgacatcagtttccatactacaac

SEQ ID NO: 188368 - DNA, 25 bp, SARS Virus
cgacatcagttatcatactacaact

SEQ ID NO: 188369 - DNA, 25 bp, SARS Virus
gacatcagttactatactacaactc

SEQ ID NO: 188370 - DNA, 25 bp, SARS Virus
acatcagttaccttactacaactca

SEQ ID NO: 188371 - DNA, 25 bp, SARS Virus
catcagttaccatactacaactcac

SEQ ID NO: 188372 - DNA, 25 bp, SARS Virus
atcagttaccattctacaactcacc

SEQ ID NO: 188373 - DNA, 25 bp, SARS Virus
tcagttaccatattacaactcacct

SEQ ID NO: 188374 - DNA, 25 bp, SARS Virus
cagttaccatactacaactcacctt

SEQ ID NO: 188375 - DNA, 25 bp, SARS Virus
agttaccatacttcaactcaccttg

SEQ ID NO: 188376 - DNA, 25 bp, SARS Virus
gttaccatactataactcaccttgt

SEQ ID NO: 188377 - DNA, 25 bp, SARS Virus
ttaccatactactactcaccttgtg

SEQ ID NO: 188378 - DNA, 25 bp, SARS Virus
taccatactacatctcaccttgtgt

SEQ ID NO: 188379 - DNA, 25 bp, SARS Virus
accatactacaattcaccttgtgtt

SEQ ID NO: 188380 - DNA, 25 bp, SARS Virus
ccatactacaactcaccttgtgttg

SEQ ID NO: 188381 - DNA, 25 bp, SARS Virus
catactacaacttaccttgtgttgg

SEQ ID NO: 188382 - DNA, 25 bp, SARS Virus
atactacaactctccttgtgttggt

SEQ ID NO: 188383 - DNA, 25 bp, SARS Virus
tactacaactcatcttgtgttggta

SEQ ID NO: 188384 - DNA, 25 bp, SARS Virus
actacaactcactttgtgttggtag

SEQ ID NO: 188385 - DNA, 25 bp, SARS Virus
ctacaactcaccttgtgttggtagt

SEQ ID NO: 188386 - DNA, 25 bp, SARS Virus
tacaactcaccttgtgttggtagtg

SEQ ID NO: 188387 - DNA, 25 bp, SARS Virus
acaactcaccttttgttggtagtgc

SEQ ID NO: 188388 - DNA, 25 bp, SARS Virus
caactcaccttgtgttggtagtgcg

SEQ ID NO: 188389 - DNA, 25 bp, SARS Virus
aactcaccttgttttggtagtgcgc

SEQ ID NO: 188390 - DNA, 25 bp, SARS Virus
actcaccttgtgttggtagtgcgcg

SEQ ID NO: 188391 - DNA, 25 bp, SARS Virus
ctcaccttgtgttggtagtgcgcgt

SEQ ID NO: 188392 - DNA, 25 bp, SARS Virus
tcaccttgtgtttgtagtgcgcgta

SEQ ID NO: 188393 - DNA, 25 bp, SARS Virus
caccttgtgttgttagtgcgcgtaa

SEQ ID NO: 188394 - DNA, 25 bp, SARS Virus
accttgtgttggtagtgcgcgtaac

SEQ ID NO: 188395 - DNA, 25 bp, SARS Virus
ccttgtgttggttgtgcgcgtaaca

SEQ ID NO: 188396 - DNA, 25 bp, SARS Virus
cttgtgttggtattgcgcgtaacaa

SEQ ID NO: 188397 - DNA, 25 bp, SARS Virus
ttgtgttggtagtgcgcgtaacaac

SEQ ID NO: 188398 - DNA, 25 bp, SARS Virus
tgtgttggtagttcgcgtaacaact

SEQ ID NO: 188399 - DNA, 25 bp, SARS Virus
gtgttggtagtgtgcgtaacaacta

SEQ ID NO: 188400 - DNA, 25 bp, SARS Virus
tgttggtagtgctcgtaacaactat

SEQ ID NO: 188401 - DNA, 25 bp, SARS Virus
gttggtagtgcgagtaacaactatt

SEQ ID NO: 188402 - DNA, 25 bp, SARS Virus
ttggtagtgcgcataacaactatta

SEQ ID NO: 188403 - DNA, 25 bp, SARS Virus
tggtagtgcgcgaaacaactattac

SEQ ID NO: 188404 - DNA, 25 bp, SARS Virus
ggtagtgcgcgtaacaactattaca

SEQ ID NO: 188405 - DNA, 25 bp, SARS Virus
gtagtgcgcgtaacaactattacaa

SEQ ID NO: 188406 - DNA, 25 bp, SARS Virus
tagtgcgcgtaaaaactattacaac

SEQ ID NO: 188407 - DNA, 25 bp, SARS Virus
agtgcgcgtaacaactattacaaca

SEQ ID NO: 188408 - DNA, 25 bp, SARS Virus
gtgcgcgtaacaactattacaacaa

SEQ ID NO: 188409 - DNA, 25 bp, SARS Virus
tgcgcgtaacaaatattacaacaat

SEQ ID NO: 188410 - DNA, 25 bp, SARS Virus
gcgcgtaacaacaattacaacaatt

SEQ ID NO: 188411 - DNA, 25 bp, SARS Virus
cgcgtaacaactattacaacaattc

SEQ ID NO: 188412 - DNA, 25 bp, SARS Virus
gcgtaacaactaatacaacaattca

SEQ ID NO: 188413 - DNA, 25 bp, SARS Virus
cgtaacaactataacaacaattcac

SEQ ID NO: 188414 - DNA, 25 bp, SARS Virus
gtaacaactattacaacaattcacg

SEQ ID NO: 188415 - DNA, 25 bp, SARS Virus
taacaactattaaaacaattcacgt

SEQ ID NO: 188416 - DNA, 25 bp, SARS Virus
aacaactattacaacaattcacgta

SEQ ID NO: 188417 - DNA, 25 bp, SARS Virus
acaactattacaacaattcacgtag

SEQ ID NO: 188418 - DNA, 25 bp, SARS Virus
caactattacaaaaattcacgtagt

SEQ ID NO: 188419 - DNA, 25 bp, SARS Virus
aactattacaacaattcacgtagta

SEQ ID NO: 188420 - DNA, 25 bp, SARS Virus
actattacaacaattcacgtagtaa

SEQ ID NO: 188421 - DNA, 25 bp, SARS Virus
ctattacaacaaatcacgtagtaat

SEQ ID NO: 188422 - DNA, 25 bp, SARS Virus
tattacaacaatacacgtagtaata

SEQ ID NO: 188423 - DNA, 25 bp, SARS Virus
attacaacaattaacgtagtaatag

SEQ ID NO: 188424 - DNA, 25 bp, SARS Virus
ttacaacaattcacgtagtaatagt

SEQ ID NO: 188425 - DNA, 25 bp, SARS Virus
tacaacaattcaagtagtaatagtt

SEQ ID NO: 188426 - DNA, 25 bp, SARS Virus
acaacaattcacatagtaatagttc

SEQ ID NO: 188427 - DNA, 25 bp, SARS Virus
caacaattcacgaagtaatagttcg

SEQ ID NO: 188428 - DNA, 25 bp, SARS Virus
aacaattcacgtagtaatagttcga

SEQ ID NO: 188429 - DNA, 25 bp, SARS Virus
acaattcacgtaataatagttcgaa

SEQ ID NO: 188430 - DNA, 25 bp, SARS Virus
caattcacgtagaaatagttcgaag

SEQ ID NO: 188431 - DNA, 25 bp, SARS Virus
aattcacgtagtaatagttcgaagg

SEQ ID NO: 188432 - DNA, 25 bp, SARS Virus
attcacgtagtaatagttcgaagga

SEQ ID NO: 188433 - DNA, 25 bp, SARS Virus
ttcacgtagtaaaagttcgaaggat

SEQ ID NO: 188434 - DNA, 25 bp, SARS Virus
tcacgtagtaatagttcgaaggatt

SEQ ID NO: 188435 - DNA, 25 bp, SARS Virus
cacgtagtaataattcgaaggattc

SEQ ID NO: 188436 - DNA, 25 bp, SARS Virus
acgtagtaatagatcgaaggattcg

SEQ ID NO: 188437 - DNA, 25 bp, SARS Virus
cgtagtaatagtacgaaggattcgt

SEQ ID NO: 188438 - DNA, 25 bp, SARS Virus
gtagtaatagttagaaggattcgta

SEQ ID NO: 188439 - DNA, 25 bp, SARS Virus
tagtaatagttcaaaggattcgtat

SEQ ID NO: 188440 - DNA, 25 bp, SARS Virus
agtaatagttcgaaggattcgtatc

SEQ ID NO: 188441 - DNA, 25 bp, SARS Virus
gtaatagttcgaaggattcgtatca

SEQ ID NO: 188442 - DNA, 25 bp, SARS Virus
taatagttcgaaagattcgtatcac

SEQ ID NO: 188443 - DNA, 25 bp, SARS Virus
aatagttcgaagaattcgtatcact

SEQ ID NO: 188444 - DNA, 25 bp, SARS Virus
atagttcgaaggattcgtatcactt

SEQ ID NO: 188445 - DNA, 25 bp, SARS Virus
tagttcgaaggaatcgtatcacttc

SEQ ID NO: 188446 - DNA, 25 bp, SARS Virus
agttcgaaggatacgtatcacttct

SEQ ID NO: 188447 - DNA, 25 bp, SARS Virus
gttcgaaggattagtatcacttctc

SEQ ID NO: 188448 - DNA, 25 bp, SARS Virus
ttcgaaggattcatatcacttctcg

SEQ ID NO: 188449 - DNA, 25 bp, SARS Virus
tcgaaggattcgaatcacttctcgt

SEQ ID NO: 188450 - DNA, 25 bp, SARS Virus
cgaaggattcgtatcacttctcgta

SEQ ID NO: 188451 - DNA, 25 bp, SARS Virus
gaaggattcgtaacacttctcgtaa

SEQ ID NO: 188452 - DNA, 25 bp, SARS Virus
aaggattcgtataacttctcgtaac

SEQ ID NO: 188453 - DNA, 25 bp, SARS Virus
aggattcgtatcacttctcgtaaca

SEQ ID NO: 188454 - DNA, 25 bp, SARS Virus
ggattcgtatcaattctcgtaacaa

SEQ ID NO: 188455 - DNA, 25 bp, SARS Virus
gattcgtatcacatctcgtaacaaa

SEQ ID NO: 188456 - DNA, 25 bp, SARS Virus
attcgtatcactactcgtaacaaac

SEQ ID NO: 188457 - DNA, 25 bp, SARS Virus
ttcgtatcacttatcgtaacaaacg

SEQ ID NO: 188458 - DNA, 25 bp, SARS Virus
tcgtatcacttcacgtaacaaacgt

SEQ ID NO: 188459 - DNA, 25 bp, SARS Virus
cgtatcacttctagtaacaaacgta

SEQ ID NO: 188460 - DNA, 25 bp, SARS Virus
gtatcacttctcataacaaacgtat

SEQ ID NO: 188461 - DNA, 25 bp, SARS Virus
tatcacttctcgaaacaaacgtatc

SEQ ID NO: 188462 - DNA, 25 bp, SARS Virus
atcacttctcgtaacaaacgtatcg

SEQ ID NO: 188463 - DNA, 25 bp, SARS Virus
tcacttctcgtaacaaacgtatcgt

SEQ ID NO: 188464 - DNA, 25 bp, SARS Virus
cacttctcgtaaaaaacgtatcgtg

SEQ ID NO: 188465 - DNA, 25 bp, SARS Virus
acttctcgtaacaaacgtatcgtga

SEQ ID NO: 188466 - DNA, 25 bp, SARS Virus
cttctcgtaacaaacgtatcgtgat

SEQ ID NO: 188467 - DNA, 25 bp, SARS Virus
ttctcgtaacaaacgtatcgtgatc

SEQ ID NO: 188468 - DNA, 25 bp, SARS Virus
tctcgtaacaaaagtatcgtgatca

SEQ ID NO: 188469 - DNA, 25 bp, SARS Virus
ctcgtaacaaacatatcgtgatcaa

SEQ ID NO: 188470 - DNA, 25 bp, SARS Virus
tcgtaacaaacgaatcgtgatcaat

SEQ ID NO: 188471 - DNA, 25 bp, SARS Virus
cgtaacaaacgtatcgtgatcaatg

SEQ ID NO: 188472 - DNA, 25 bp, SARS Virus
gtaacaaacgtaacgtgatcaatga

SEQ ID NO: 188473 - DNA, 25 bp, SARS Virus
taacaaacgtatagtgatcaatgaa

SEQ ID NO: 188474 - DNA, 25 bp, SARS Virus
aacaaacgtatcatgatcaatgaaa

SEQ ID NO: 188475 - DNA, 25 bp, SARS Virus
acaaacgtatcgagatcaatgaaaa

SEQ ID NO: 188476 - DNA, 25 bp, SARS Virus
caaacgtatcgtaatcaatgaaaac

SEQ ID NO: 188477 - DNA, 25 bp, SARS Virus
aaacgtatcgtgatcaatgaaaacg

SEQ ID NO: 188478 - DNA, 25 bp, SARS Virus
aacgtatcgtgaacaatgaaaacgg

SEQ ID NO: 188479 - DNA, 25 bp, SARS Virus
acgtatcgtgataaatgaaaacggg

SEQ ID NO: 188480 - DNA, 25 bp, SARS Virus
cgtatcgtgatcaatgaaaacggga

SEQ ID NO: 188481 - DNA, 25 bp, SARS Virus
gtatcgtgatcaatgaaaacgggag

SEQ ID NO: 188482 - DNA, 25 bp, SARS Virus
tatcgtgatcaaagaaaacgggaga

SEQ ID NO: 188483 - DNA, 25 bp, SARS Virus
atcgtgatcaataaaaacgggagaa

SEQ ID NO: 188484 - DNA, 25 bp, SARS Virus
tcgtgatcaatgaaaacgggagaac

SEQ ID NO: 188485 - DNA, 25 bp, SARS Virus
cgtgatcaatgaaaacgggagaaca

SEQ ID NO: 188486 - DNA, 25 bp, SARS Virus
gtgatcaatgaaaacgggagaacag

SEQ ID NO: 188487 - DNA, 25 bp, SARS Virus
tgatcaatgaaaacgggagaacagg

SEQ ID NO: 188488 - DNA, 25 bp, SARS Virus
gatcaatgaaaaagggagaacagga

SEQ ID NO: 188489 - DNA, 25 bp, SARS Virus
atcaatgaaaacaggagaacaggag

SEQ ID NO: 188490 - DNA, 25 bp, SARS Virus
tcaatgaaaacgagagaacaggagt

SEQ ID NO: 188491 - DNA, 25 bp, SARS Virus
caatgaaaacggaagaacaggagtc

SEQ ID NO: 188492 - DNA, 25 bp, SARS Virus
aatgaaaacgggagaacaggagtct

SEQ ID NO: 188493 - DNA, 25 bp, SARS Virus
atgaaaacgggaaaacaggagtcta

SEQ ID NO: 188494 - DNA, 25 bp, SARS Virus
tgaaaacgggagaacaggagtctag

SEQ ID NO: 188495 - DNA, 25 bp, SARS Virus
gaaaacgggagaacaggagtctaga

SEQ ID NO: 188496 - DNA, 25 bp, SARS Virus
aaaacgggagaaaaggagtctagaa

SEQ ID NO: 188497 - DNA, 25 bp, SARS Virus
aaacgggagaacaggagtctagaac

SEQ ID NO: 188498 - DNA, 25 bp, SARS Virus
aacgggagaacaagagtctagaacg

SEQ ID NO: 188499 - DNA, 25 bp, SARS Virus
acgggagaacagaagtctagaacgg

SEQ ID NO: 188500 - DNA, 25 bp, SARS Virus
cgggagaacaggagtctagaacgga

SEQ ID NO: 188501 - DNA, 25 bp, SARS Virus
gggagaacaggaatctagaacggac

SEQ ID NO: 188502 - DNA, 25 bp, SARS Virus
ggagaacaggagactagaacggaca

SEQ ID NO: 188503 - DNA, 25 bp, SARS Virus
gagaacaggagtatagaacggacaa

SEQ ID NO: 188504 - DNA, 25 bp, SARS Virus
agaacaggagtcaagaacggacaaa

SEQ ID NO: 188505 - DNA, 25 bp, SARS Virus
gaacaggagtctagaacggacaaac

SEQ ID NO: 188506 - DNA, 25 bp, SARS Virus
aacaggagtctaaaacggacaaaca

SEQ ID NO: 188507 - DNA, 25 bp, SARS Virus
acaggagtctagaacggacaaacat

SEQ ID NO: 188508 - DNA, 25 bp, SARS Virus
caggagtctagaacggacaaacatg

SEQ ID NO: 188509 - DNA, 25 bp, SARS Virus
aggagtctagaaaggacaaacatgt

SEQ ID NO: 188510 - DNA, 25 bp, SARS Virus
ggagtctagaacagacaaacatgta

SEQ ID NO: 188511 - DNA, 25 bp, SARS Virus
gagtctagaacgaacaaacatgtaa

SEQ ID NO: 188512 - DNA, 25 bp, SARS Virus
agtctagaacggacaaacatgtaaa

SEQ ID NO: 188513 - DNA, 25 bp, SARS Virus
gtctagaacggaaaaacatgtaaac

SEQ ID NO: 188514 - DNA, 25 bp, SARS Virus
tctagaacggacaaacatgtaaacc

SEQ ID NO: 188515 - DNA, 25 bp, SARS Virus
ctagaacggacaaacatgtaaaccc

SEQ ID NO: 188516 - DNA, 25 bp, SARS Virus
tagaacggacaaacatgtaaaccca

SEQ ID NO: 188517 - DNA, 25 bp, SARS Virus
agaacggacaaaaatgtaaacccag

SEQ ID NO: 188518 - DNA, 25 bp, SARS Virus
gaacggacaaacatgtaaacccagt

SEQ ID NO: 188519 - DNA, 25 bp, SARS Virus
aacggacaaacaagtaaacccagta

SEQ ID NO: 188520 - DNA, 25 bp, SARS Virus
acggacaaacatataaacccagtat

SEQ ID NO: 188521 - DNA, 25 bp, SARS Virus
cggacaaacatgaaaacccagtatc

SEQ ID NO: 188522 - DNA, 25 bp, SARS Virus
ggacaaacatgtaaacccagtatcg

SEQ ID NO: 188523 - DNA, 25 bp, SARS Virus
gacaaacatgtaaacccagtatcgg

SEQ ID NO: 188524 - DNA, 25 bp, SARS Virus
acaaacatgtaaacccagtatcgga

SEQ ID NO: 188525 - DNA, 25 bp, SARS Virus
caaacatgtaaaaccagtatcggac

SEQ ID NO: 188526 - DNA, 25 bp, SARS Virus
aaacatgtaaacacagtatcggact

SEQ ID NO: 188527 - DNA, 25 bp, SARS Virus
aacatgtaaaccaagtatcggacta

SEQ ID NO: 188528 - DNA, 25 bp, SARS Virus
acatgtaaacccagtatcggactag

SEQ ID NO: 188529 - DNA, 25 bp, SARS Virus
catgtaaacccaatatcggactaga

SEQ ID NO: 188530 - DNA, 25 bp, SARS Virus
atgtaaacccagaatcggactagac

SEQ ID NO: 188531 - DNA, 25 bp, SARS Virus
tgtaaacccagtatcggactagacg

SEQ ID NO: 188532 - DNA, 25 bp, SARS Virus
gtaaacccagtaacggactagacgg

SEQ ID NO: 188533 - DNA, 25 bp, SARS Virus
taaacccagtataggactagacggt

SEQ ID NO: 188534 - DNA, 25 bp, SARS Virus
aaacccagtatcagactagacggta

SEQ ID NO: 188535 - DNA, 25 bp, SARS Virus
aacccagtatcgaactagacggtag

SEQ ID NO: 188536 - DNA, 25 bp, SARS Virus
acccagtatcggactagacggtaga

SEQ ID NO: 188537 - DNA, 25 bp, SARS Virus
cccagtatcggaatagacggtagaa

SEQ ID NO: 188538 - DNA, 25 bp, SARS Virus
ccagtatcggacaagacggtagaaa

SEQ ID NO: 188539 - DNA, 25 bp, SARS Virus
cagtatcggactagacggtagaaaa

SEQ ID NO: 188540 - DNA, 25 bp, SARS Virus
agtatcggactaaacggtagaaaag

SEQ ID NO: 188541 - DNA, 25 bp, SARS Virus
gtatcggactagacggtagaaaagg

SEQ ID NO: 188542 - DNA, 25 bp, SARS Virus
tatcggactagaaggtagaaaaggt

SEQ ID NO: 188543 - DNA, 25 bp, SARS Virus
atcggactagacagtagaaaaggtt

SEQ ID NO: 188544 - DNA, 25 bp, SARS Virus
tcggactagacgatagaaaaggttg

SEQ ID NO: 188545 - DNA, 25 bp, SARS Virus
cggactagacggaagaaaaggttga

SEQ ID NO: 188546 - DNA, 25 bp, SARS Virus
ggactagacggtagaaaaggttgaa

SEQ ID NO: 188547 - DNA, 25 bp, SARS Virus
gactagacggtaaaaaaggttgaac

SEQ ID NO: 188548 - DNA, 25 bp, SARS Virus
actagacggtagaaaaggttgaacg

SEQ ID NO: 188549 - DNA, 25 bp, SARS Virus
ctagacggtagaaaaggttgaacgc

SEQ ID NO: 188550 - DNA, 25 bp, SARS Virus
tagacggtagaaaaggttgaacgca

SEQ ID NO: 188551 - DNA, 25 bp, SARS Virus
agacggtagaaaaggttgaacgcaa

SEQ ID NO: 188552 - DNA, 25 bp, SARS Virus
gacggtagaaaaagttgaacgcaac

SEQ ID NO: 188553 - DNA, 25 bp, SARS Virus
acggtagaaaagattgaacgcaacg

SEQ ID NO: 188554 - DNA, 25 bp, SARS Virus
cggtagaaaaggatgaacgcaacgt

SEQ ID NO: 188555 - DNA, 25 bp, SARS Virus
ggtagaaaaggtagaacgcaacgta

SEQ ID NO: 188556 - DNA, 25 bp, SARS Virus
gtagaaaaggttaaacgcaacgtac

SEQ ID NO: 188557 - DNA, 25 bp, SARS Virus
tagaaaaggttgaacgcaacgtacc

SEQ ID NO: 188558 - DNA, 25 bp, SARS Virus
agaaaaggttgaacgcaacgtaccg

SEQ ID NO: 188559 - DNA, 25 bp, SARS Virus
gaaaaggttgaaagcaacgtaccgt

SEQ ID NO: 188560 - DNA, 25 bp, SARS Virus
aaaaggttgaacacaacgtaccgtc

SEQ ID NO: 188561 - DNA, 25 bp, SARS Virus
aaaggttgaacgaaacgtaccgtcg

SEQ ID NO: 188562 - DNA, 25 bp, SARS Virus
aaggttgaacgcaacgtaccgtcgt

SEQ ID NO: 188563 - DNA, 25 bp, SARS Virus
aggttgaacgcaacgtaccgtcgta

SEQ ID NO: 188564 - DNA, 25 bp, SARS Virus
ggttgaacgcaaagtaccgtcgtag

SEQ ID NO: 188565 - DNA, 25 bp, SARS Virus
gttgaacgcaacataccgtcgtagt

SEQ ID NO: 188566 - DNA, 25 bp, SARS Virus
ttgaacgcaacgaaccgtcgtagtg

SEQ ID NO: 188567 - DNA, 25 bp, SARS Virus
tgaacgcaacgtaccgtcgtagtgc

SEQ ID NO: 188568 - DNA, 25 bp, SARS Virus
gaacgcaacgtaacgtcgtagtgcc

SEQ ID NO: 188569 - DNA, 25 bp, SARS Virus
aacgcaacgtacagtcgtagtgcca

SEQ ID NO: 188570 - DNA, 25 bp, SARS Virus
acgcaacgtaccatcgtagtgccag

SEQ ID NO: 188571 - DNA, 25 bp, SARS Virus
cgcaacgtaccgacgtagtgccagt

SEQ ID NO: 188572 - DNA, 25 bp, SARS Virus
gcaacgtaccgtagtagtgccagtt

SEQ ID NO: 188573 - DNA, 25 bp, SARS Virus
caacgtaccgtcatagtgccagttt

SEQ ID NO: 188574 - DNA, 25 bp, SARS Virus
aacgtaccgtcgaagtgccagtttg

SEQ ID NO: 188575 - DNA, 25 bp, SARS Virus
acgtaccgtcgtagtgccagtttga

SEQ ID NO: 188576 - DNA, 25 bp, SARS Virus
cgtaccgtcgtaatgccagtttgag

SEQ ID NO: 188577 - DNA, 25 bp, SARS Virus
gtaccgtcgtagagccagtttgagt

SEQ ID NO: 188578 - DNA, 25 bp, SARS Virus
taccgtcgtagtaccagtttgagtc

SEQ ID NO: 188579 - DNA, 25 bp, SARS Virus
accgtcgtagtgacagtttgagtct

SEQ ID NO: 188580 - DNA, 25 bp, SARS Virus
ccgtcgtagtgcaagtttgagtcta

SEQ ID NO: 188581 - DNA, 25 bp, SARS Virus
cgtcgtagtgccagtttgagtctaa

SEQ ID NO: 188582 - DNA, 25 bp, SARS Virus
gtcgtagtgccaatttgagtctaaa

SEQ ID NO: 188583 - DNA, 25 bp, SARS Virus
tcgtagtgccagattgagtctaaat

SEQ ID NO: 188584 - DNA, 25 bp, SARS Virus
cgtagtgccagtatgagtctaaatc

SEQ ID NO: 188585 - DNA, 25 bp, SARS Virus
gtagtgccagttagagtctaaatcg

SEQ ID NO: 188586 - DNA, 25 bp, SARS Virus
tagtgccagtttaagtctaaatcgg

SEQ ID NO: 188587 - DNA, 25 bp, SARS Virus
agtgccagtttgagtctaaatcggt

SEQ ID NO: 188588 - DNA, 25 bp, SARS Virus
gtgccagtttgaatctaaatcggtg

SEQ ID NO: 188589 - DNA, 25 bp, SARS Virus
tgccagtttgagactaaatcggtgt

SEQ ID NO: 188590 - DNA, 25 bp, SARS Virus
gccagtttgagtataaatcggtgta

SEQ ID NO: 188591 - DNA, 25 bp, SARS Virus
ccagtttgagtcaaaatcggtgtaa

SEQ ID NO: 188592 - DNA, 25 bp, SARS Virus
cagtttgagtctaaatcggtgtaag

SEQ ID NO: 188593 - DNA, 25 bp, SARS Virus
agtttgagtctaaatcggtgtaagt

SEQ ID NO: 188594 - DNA, 25 bp, SARS Virus
gtttgagtctaaatcggtgtaagtt

SEQ ID NO: 188595 - DNA, 25 bp, SARS Virus
tttgagtctaaaacggtgtaagttt

SEQ ID NO: 188596 - DNA, 25 bp, SARS Virus
ttgagtctaaataggtgtaagtttc

SEQ ID NO: 188597 - DNA, 25 bp, SARS Virus
tgagtctaaatcagtgtaagtttct

SEQ ID NO: 188598 - DNA, 25 bp, SARS Virus
gagtctaaatcgatgtaagtttcta

SEQ ID NO: 188599 - DNA, 25 bp, SARS Virus
agtctaaatcggagtaagtttctaa

SEQ ID NO: 188600 - DNA, 25 bp, SARS Virus
gtctaaatcggtataagtttctaaa

SEQ ID NO: 188601 - DNA, 25 bp, SARS Virus
tctaaatcggtgaaagtttctaaag

SEQ ID NO: 188602 - DNA, 25 bp, SARS Virus
ctaaatcggtgtaagtttctaaaga

SEQ ID NO: 188603 - DNA, 25 bp, SARS Virus
taaatcggtgtaagtttctaaagaa

SEQ ID NO: 188604 - DNA, 25 bp, SARS Virus
aaatcggtgtaaatttctaaagaaa

SEQ ID NO: 188605 - DNA, 25 bp, SARS Virus
aatcggtgtaagattctaaagaaat

SEQ ID NO: 188606 - DNA, 25 bp, SARS Virus
atcggtgtaagtatctaaagaaatt

SEQ ID NO: 188607 - DNA, 25 bp, SARS Virus
tcggtgtaagttactaaagaaattg

SEQ ID NO: 188608 - DNA, 25 bp, SARS Virus
cggtgtaagtttataaagaaattga

SEQ ID NO: 188609 - DNA, 25 bp, SARS Virus
ggtgtaagtttcaaaagaaattgaa

SEQ ID NO: 188610 - DNA, 25 bp, SARS Virus
gtgtaagtttctaaagaaattgaaa

SEQ ID NO: 188611 - DNA, 25 bp, SARS Virus
tgtaagtttctaaagaaattgaaaa

SEQ ID NO: 188612 - DNA, 25 bp, SARS Virus
gtaagtttctaaagaaattgaaaaa

SEQ ID NO: 188613 - DNA, 25 bp, SARS Virus
taagtttctaaaaaaattgaaaaac

SEQ ID NO: 188614 - DNA, 25 bp, SARS Virus
aagtttctaaagaaattgaaaaact

SEQ ID NO: 188615 - DNA, 25 bp, SARS Virus
agtttctaaagaaattgaaaaactc

SEQ ID NO: 188616 - DNA, 25 bp, SARS Virus
gtttctaaagaaattgaaaaactct

SEQ ID NO: 188617 - DNA, 25 bp, SARS Virus
tttctaaagaaaatgaaaaactctt

SEQ ID NO: 188618 - DNA, 25 bp, SARS Virus
ttctaaagaaatagaaaaactcttg

SEQ ID NO: 188619 - DNA, 25 bp, SARS Virus
tctaaagaaattaaaaaactcttgc

SEQ ID NO: 188620 - DNA, 25 bp, SARS Virus
ctaaagaaattgaaaaactcttgct

SEQ ID NO: 188621 - DNA, 25 bp, SARS Virus
taaagaaattgaaaaactcttgctg

SEQ ID NO: 188622 - DNA, 25 bp, SARS Virus
aaagaaattgaaaaactcttgctga

SEQ ID NO: 188623 - DNA, 25 bp, SARS Virus
aagaaattgaaaaactcttgctgaa

SEQ ID NO: 188624 - DNA, 25 bp, SARS Virus
agaaattgaaaaactcttgctgaag

SEQ ID NO: 188625 - DNA, 25 bp, SARS Virus
gaaattgaaaaaatcttgctgaagt

SEQ ID NO: 188626 - DNA, 25 bp, SARS Virus
aaattgaaaaacacttgctgaagtc

SEQ ID NO: 188627 - DNA, 25 bp, SARS Virus
aattgaaaaactattgctgaagtct

SEQ ID NO: 188628 - DNA, 25 bp, SARS Virus
attgaaaaactcatgctgaagtctt

SEQ ID NO: 188629 - DNA, 25 bp, SARS Virus
ttgaaaaactctagctgaagtctta

SEQ ID NO: 188630 - DNA, 25 bp, SARS Virus
tgaaaaactcttactgaagtcttag

SEQ ID NO: 188631 - DNA, 25 bp, SARS Virus
gaaaaactcttgatgaagtcttagt

SEQ ID NO: 188632 - DNA, 25 bp, SARS Virus
aaaaactcttgcagaagtcttagtg

SEQ ID NO: 188633 - DNA, 25 bp, SARS Virus
aaaactcttgctaaagtcttagtgg

SEQ ID NO: 188634 - DNA, 25 bp, SARS Virus
aaactcttgctgaagtcttagtggt

SEQ ID NO: 188635 - DNA, 25 bp, SARS Virus
aactcttgctgaagtcttagtggta

SEQ ID NO: 188636 - DNA, 25 bp, SARS Virus
actcttgctgaaatcttagtggtaa

SEQ ID NO: 188637 - DNA, 25 bp, SARS Virus
ctcttgctgaagacttagtggtaat

SEQ ID NO: 188638 - DNA, 25 bp, SARS Virus
tcttgctgaagtattagtggtaatc

SEQ ID NO: 188639 - DNA, 25 bp, SARS Virus
cttgctgaagtcatagtggtaatcg

SEQ ID NO: 188640 - DNA, 25 bp, SARS Virus
ttgctgaagtctaagtggtaatcga

SEQ ID NO: 188641 - DNA, 25 bp, SARS Virus
tgctgaagtcttagtggtaatcgat

SEQ ID NO: 188642 - DNA, 25 bp, SARS Virus
gctgaagtcttaatggtaatcgatg

SEQ ID NO: 188643 - DNA, 25 bp, SARS Virus
ctgaagtcttagaggtaatcgatgt

SEQ ID NO: 188644 - DNA, 25 bp, SARS Virus
tgaagtcttagtagtaatcgatgtc

SEQ ID NO: 188645 - DNA, 25 bp, SARS Virus
gaagtcttagtgataatcgatgtcg

SEQ ID NO: 188646 - DNA, 25 bp, SARS Virus
aagtcttagtggaaatcgatgtcgg

SEQ ID NO: 188647 - DNA, 25 bp, SARS Virus
agtcttagtggtaatcgatgtcgga

SEQ ID NO: 188648 - DNA, 25 bp, SARS Virus
gtcttagtggtaatcgatgtcggac

SEQ ID NO: 188649 - DNA, 25 bp, SARS Virus
tcttagtggtaaacgatgtcggacg

SEQ ID NO: 188650 - DNA, 25 bp, SARS Virus
cttagtggtaatagatgtcggacga

SEQ ID NO: 188651 - DNA, 25 bp, SARS Virus
ttagtggtaatcaatgtcggacgag

SEQ ID NO: 188652 - DNA, 25 bp, SARS Virus
tagtggtaatcgatgtcggacgagt

SEQ ID NO: 188653 - DNA, 25 bp, SARS Virus
agtggtaatcgaagtcggacgagta

SEQ ID NO: 188654 - DNA, 25 bp, SARS Virus
gtggtaatcgatatcggacgagtat

SEQ ID NO: 188655 - DNA, 25 bp, SARS Virus
tggtaatcgatgacggacgagtatc

SEQ ID NO: 188656 - DNA, 25 bp, SARS Virus
ggtaatcgatgtaggacgagtatcc

SEQ ID NO: 188657 - DNA, 25 bp, SARS Virus
gtaatcgatgtcagacgagtatccg

SEQ ID NO: 188658 - DNA, 25 bp, SARS Virus
taatcgatgtcgaacgagtatccgg

SEQ ID NO: 188659 - DNA, 25 bp, SARS Virus
aatcgatgtcggacgagtatccgga

SEQ ID NO: 188660 - DNA, 25 bp, SARS Virus
atcgatgtcggaagagtatccggag

SEQ ID NO: 188661 - DNA, 25 bp, SARS Virus
tcgatgtcggacaagtatccggagg

SEQ ID NO: 188662 - DNA, 25 bp, SARS Virus
cgatgtcggacgagtatccggagga

SEQ ID NO: 188663 - DNA, 25 bp, SARS Virus
gatgtcggacgaatatccggaggac

SEQ ID NO: 188664 - DNA, 25 bp, SARS Virus
atgtcggacgagaatccggaggacc

SEQ ID NO: 188665 - DNA, 25 bp, SARS Virus
tgtcggacgagtatccggaggaccc

SEQ ID NO: 188666 - DNA, 25 bp, SARS Virus
gtcggacgagtaaccggaggacccg

SEQ ID NO: 188667 - DNA, 25 bp, SARS Virus
tcggacgagtatacggaggacccgt

SEQ ID NO: 188668 - DNA, 25 bp, SARS Virus
cggacgagtatcaggaggacccgtc

SEQ ID NO: 188669 - DNA, 25 bp, SARS Virus
ggacgagtatccagaggacccgtca

SEQ ID NO: 188670 - DNA, 25 bp, SARS Virus
gacgagtatccgaaggacccgtcac

SEQ ID NO: 188671 - DNA, 25 bp, SARS Virus
acgagtatccggaggacccgtcacc

SEQ ID NO: 188672 - DNA, 25 bp, SARS Virus
cgagtatccggaagacccgtcaccg

SEQ ID NO: 188673 - DNA, 25 bp, SARS Virus
gagtatccggagaacccgtcaccgt

SEQ ID NO: 188674 - DNA, 25 bp, SARS Virus
agtatccggaggacccgtcaccgta

SEQ ID NO: 188675 - DNA, 25 bp, SARS Virus
gtatccggaggaaccgtcaccgtat

SEQ ID NO: 188676 - DNA, 25 bp, SARS Virus
tatccggaggacacgtcaccgtatt

SEQ ID NO: 188677 - DNA, 25 bp, SARS Virus
atccggaggaccagtcaccgtattc

SEQ ID NO: 188678 - DNA, 25 bp, SARS Virus
tccggaggacccatcaccgtattcg

SEQ ID NO: 188679 - DNA, 25 bp, SARS Virus
ccggaggacccgacaccgtattcgc

SEQ ID NO: 188680 - DNA, 25 bp, SARS Virus
cggaggacccgtaaccgtattcgcc

SEQ ID NO: 188681 - DNA, 25 bp, SARS Virus
ggaggacccgtcaccgtattcgccg

SEQ ID NO: 188682 - DNA, 25 bp, SARS Virus
gaggacccgtcaacgtattcgccgt

SEQ ID NO: 188683 - DNA, 25 bp, SARS Virus
aggacccgtcacagtattcgccgta

SEQ ID NO: 188684 - DNA, 25 bp, SARS Virus
ggacccgtcaccatattcgccgtat

SEQ ID NO: 188685 - DNA, 25 bp, SARS Virus
gacccgtcaccgaattcgccgtata

SEQ ID NO: 188686 - DNA, 25 bp, SARS Virus
acccgtcaccgtattcgccgtatac

SEQ ID NO: 188687 - DNA, 25 bp, SARS Virus
cccgtcaccgtaatcgccgtatact

SEQ ID NO: 188688 - DNA, 25 bp, SARS Virus
ccgtcaccgtatacgccgtatacta

SEQ ID NO: 188689 - DNA, 25 bp, SARS Virus
cgtcaccgtattagccgtatactac

SEQ ID NO: 188690 - DNA, 25 bp, SARS Virus
gtcaccgtattcaccgtatactacc

SEQ ID NO: 188691 - DNA, 25 bp, SARS Virus
tcaccgtattcgacgtatactacca

SEQ ID NO: 188692 - DNA, 25 bp, SARS Virus
caccgtattcgcagtatactaccat

SEQ ID NO: 188693 - DNA, 25 bp, SARS Virus
accgtattcgccatatactaccatt

SEQ ID NO: 188694 - DNA, 25 bp, SARS Virus
ccgtattcgccgaatactaccattt

SEQ ID NO: 188695 - DNA, 25 bp, SARS Virus
cgtattcgccgtatactaccatttc

SEQ ID NO: 188696 - DNA, 25 bp, SARS Virus
gtattcgccgtaaactaccatttct

SEQ ID NO: 188697 - DNA, 25 bp, SARS Virus
tattcgccgtatactaccatttctt

SEQ ID NO: 188698 - DNA, 25 bp, SARS Virus
attcgccgtataataccatttcttg

SEQ ID NO: 188699 - DNA, 25 bp, SARS Virus
ttcgccgtatacaaccatttcttga

SEQ ID NO: 188700 - DNA, 25 bp, SARS Virus
tcgccgtatactaccatttcttgat

SEQ ID NO: 188701 - DNA, 25 bp, SARS Virus
cgccgtatactaacatttcttgatt

SEQ ID NO: 188702 - DNA, 25 bp, SARS Virus
gccgtatactacaatttcttgattt

SEQ ID NO: 188703 - DNA, 25 bp, SARS Virus
ccgtatactaccatttcttgattta

SEQ ID NO: 188704 - DNA, 25 bp, SARS Virus
cgtatactaccaattcttgatttaa

SEQ ID NO: 188705 - DNA, 25 bp, SARS Virus
gtatactaccatatcttgatttaag

SEQ ID NO: 188706 - DNA, 25 bp, SARS Virus
tatactaccattacttgatttaaga

SEQ ID NO: 188707 - DNA, 25 bp, SARS Virus
atactaccatttattgatttaagac

SEQ ID NO: 188708 - DNA, 25 bp, SARS Virus
tactaccatttcatgatttaagact

SEQ ID NO: 188709 - DNA, 25 bp, SARS Virus
actaccatttctagatttaagactt

SEQ ID NO: 188710 - DNA, 25 bp, SARS Virus
ctaccatttcttaatttaagacttc

SEQ ID NO: 188711 - DNA, 25 bp, SARS Virus
taccatttcttgatttaagacttcg

SEQ ID NO: 188712 - DNA, 25 bp, SARS Virus
accatttcttgaattaagacttcgt

SEQ ID NO: 188713 - DNA, 25 bp, SARS Virus
ccatttcttgatataagacttcgtt

SEQ ID NO: 188714 - DNA, 25 bp, SARS Virus
catttcttgattaaagacttcgtta

SEQ ID NO: 188715 - DNA, 25 bp, SARS Virus
atttcttgatttaagacttcgttat

SEQ ID NO: 188716 - DNA, 25 bp, SARS Virus
tttcttgatttaagacttcgttatc

SEQ ID NO: 188717 - DNA, 25 bp, SARS Virus
ttcttgatttaaaacttcgttatcg

SEQ ID NO: 188718 - DNA, 25 bp, SARS Virus
tcttgatttaagacttcgttatcgg

SEQ ID NO: 188719 - DNA, 25 bp, SARS Virus
cttgatttaagaattcgttatcgga

SEQ ID NO: 188720 - DNA, 25 bp, SARS Virus
ttgatttaagacatcgttatcggac

SEQ ID NO: 188721 - DNA, 25 bp, SARS Virus
tgatttaagactacgttatcggact

SEQ ID NO: 188722 - DNA, 25 bp, SARS Virus
gatttaagacttagttatcggactt

SEQ ID NO: 188723 - DNA, 25 bp, SARS Virus
atttaagacttcattatcggacttc

SEQ ID NO: 188724 - DNA, 25 bp, SARS Virus
tttaagacttcgatatcggacttct

SEQ ID NO: 188725 - DNA, 25 bp, SARS Virus
ttaagacttcgtaatcggacttctc

SEQ ID NO: 188726 - DNA, 25 bp, SARS Virus
taagacttcgttatcggacttctca

SEQ ID NO: 188727 - DNA, 25 bp, SARS Virus
aagacttcgttaacggacttctcat

SEQ ID NO: 188728 - DNA, 25 bp, SARS Virus
agacttcgttataggacttctcatc

SEQ ID NO: 188729 - DNA, 25 bp, SARS Virus
gacttcgttatcagacttctcatcg

SEQ ID NO: 188730 - DNA, 25 bp, SARS Virus
acttcgttatcgaacttctcatcgt

SEQ ID NO: 188731 - DNA, 25 bp, SARS Virus
cttcgttatcggacttctcatcgtg

SEQ ID NO: 188732 - DNA, 25 bp, SARS Virus
ttcgttatcggaattctcatcgtgc

SEQ ID NO: 188733 - DNA, 25 bp, SARS Virus
tcgttatcggacatctcatcgtgcc

SEQ ID NO: 188734 - DNA, 25 bp, SARS Virus
cgttatcggactactcatcgtgcca

SEQ ID NO: 188735 - DNA, 25 bp, SARS Virus
gttatcggacttatcatcgtgccaa

SEQ ID NO: 188736 - DNA, 25 bp, SARS Virus
ttatcggacttcacatcgtgccaat

SEQ ID NO: 188737 - DNA, 25 bp, SARS Virus
tatcggacttctaatcgtgccaata

SEQ ID NO: 188738 - DNA, 25 bp, SARS Virus
atcggacttctcatcgtgccaatag

SEQ ID NO: 188739 - DNA, 25 bp, SARS Virus
tcggacttctcaacgtgccaatagc

SEQ ID NO: 188740 - DNA, 25 bp, SARS Virus
cggacttctcatagtgccaatagct

SEQ ID NO: 188741 - DNA, 25 bp, SARS Virus
ggacttctcatcatgccaatagctc

SEQ ID NO: 188742 - DNA, 25 bp, SARS Virus
gacttctcatcgagccaatagctcg

SEQ ID NO: 188743 - DNA, 25 bp, SARS Virus
acttctcatcgtaccaatagctcgt

SEQ ID NO: 188744 - DNA, 25 bp, SARS Virus
cttctcatcgtgacaatagctcgta

SEQ ID NO: 188745 - DNA, 25 bp, SARS Virus
ttctcatcgtgcaaatagctcgtaa

SEQ ID NO: 188746 - DNA, 25 bp, SARS Virus
tctcatcgtgccaatagctcgtaaa

SEQ ID NO: 188747 - DNA, 25 bp, SARS Virus
ctcatcgtgccaatagctcgtaaag

SEQ ID NO: 188748 - DNA, 25 bp, SARS Virus
tcatcgtgccaaaagctcgtaaagg

SEQ ID NO: 188749 - DNA, 25 bp, SARS Virus
catcgtgccaatagctcgtaaagga

SEQ ID NO: 188750 - DNA, 25 bp, SARS Virus
atcgtgccaataactcgtaaaggag

SEQ ID NO: 188751 - DNA, 25 bp, SARS Virus
tcgtgccaatagatcgtaaaggagc

SEQ ID NO: 188752 - DNA, 25 bp, SARS Virus
cgtgccaatagcacgtaaaggagcg

SEQ ID NO: 188753 - DNA, 25 bp, SARS Virus
gtgccaatagctagtaaaggagcgt

SEQ ID NO: 188754 - DNA, 25 bp, SARS Virus
tgccaatagctcataaaggagcgtg

SEQ ID NO: 188755 - DNA, 25 bp, SARS Virus
gccaatagctcgaaaaggagcgtgt

SEQ ID NO: 188756 - DNA, 25 bp, SARS Virus
ccaatagctcgtaaaggagcgtgtt

SEQ ID NO: 188757 - DNA, 25 bp, SARS Virus
caatagctcgtaaaggagcgtgttg

SEQ ID NO: 188758 - DNA, 25 bp, SARS Virus
aatagctcgtaaaggagcgtgttgg

SEQ ID NO: 188759 - DNA, 25 bp, SARS Virus
atagctcgtaaaagagcgtgttgga

SEQ ID NO: 188760 - DNA, 25 bp, SARS Virus
tagctcgtaaagaagcgtgttggat

SEQ ID NO: 188761 - DNA, 25 bp, SARS Virus
agctcgtaaaggagcgtgttggata

SEQ ID NO: 188762 - DNA, 25 bp, SARS Virus
gctcgtaaaggaacgtgttggataa

SEQ ID NO: 188763 - DNA, 25 bp, SARS Virus
ctcgtaaaggagagtgttggataat

SEQ ID NO: 188764 - DNA, 25 bp, SARS Virus
tcgtaaaggagcatgttggataatt

SEQ ID NO: 188765 - DNA, 25 bp, SARS Virus
cgtaaaggagcgagttggataatta

SEQ ID NO: 188766 - DNA, 25 bp, SARS Virus
gtaaaggagcgtattggataattac

SEQ ID NO: 188767 - DNA, 25 bp, SARS Virus
taaaggagcgtgatggataattaca

SEQ ID NO: 188768 - DNA, 25 bp, SARS Virus
aaaggagcgtgtaggataattacag

SEQ ID NO: 188769 - DNA, 25 bp, SARS Virus
aaggagcgtgttagataattacaga

SEQ ID NO: 188770 - DNA, 25 bp, SARS Virus
aggagcgtgttgaataattacagat

SEQ ID NO: 188771 - DNA, 25 bp, SARS Virus
ggagcgtgttggataattacagatg

SEQ ID NO: 188772 - DNA, 25 bp, SARS Virus
gagcgtgttggaaaattacagatgt

SEQ ID NO: 188773 - DNA, 25 bp, SARS Virus
agcgtgttggataattacagatgtc

SEQ ID NO: 188774 - DNA, 25 bp, SARS Virus
gcgtgttggataattacagatgtcg

SEQ ID NO: 188775 - DNA, 25 bp, SARS Virus
cgtgttggataaatacagatgtcgt

SEQ ID NO: 188776 - DNA, 25 bp, SARS Virus
gtgttggataataacagatgtcgtg

SEQ ID NO: 188777 - DNA, 25 bp, SARS Virus
tgttggataattacagatgtcgtgg

SEQ ID NO: 188778 - DNA, 25 bp, SARS Virus
gttggataattaaagatgtcgtggg

SEQ ID NO: 188779 - DNA, 25 bp, SARS Virus
ttggataattacagatgtcgtggga

SEQ ID NO: 188780 - DNA, 25 bp, SARS Virus
tggataattacaaatgtcgtgggac

SEQ ID NO: 188781 - DNA, 25 bp, SARS Virus
ggataattacagatgtcgtgggacg

SEQ ID NO: 188782 - DNA, 25 bp, SARS Virus
gataattacagaagtcgtgggacgt

SEQ ID NO: 188783 - DNA, 25 bp, SARS Virus
ataattacagatatcgtgggacgta

SEQ ID NO: 188784 - DNA, 25 bp, SARS Virus
taattacagatgacgtgggacgtac

SEQ ID NO: 188785 - DNA, 25 bp, SARS Virus
aattacagatgtagtgggacgtacc

SEQ ID NO: 188786 - DNA, 25 bp, SARS Virus
attacagatgtcatgggacgtacct

SEQ ID NO: 188787 - DNA, 25 bp, SARS Virus
ttacagatgtcgagggacgtaccta

SEQ ID NO: 188788 - DNA, 25 bp, SARS Virus
tacagatgtcgtaggacgtacctat

SEQ ID NO: 188789 - DNA, 25 bp, SARS Virus
acagatgtcgtgagacgtacctatc

SEQ ID NO: 188790 - DNA, 25 bp, SARS Virus
cagatgtcgtggaacgtacctatcg

SEQ ID NO: 188791 - DNA, 25 bp, SARS Virus
agatgtcgtgggacgtacctatcgt

SEQ ID NO: 188792 - DNA, 25 bp, SARS Virus
gatgtcgtgggaagtacctatcgtt

SEQ ID NO: 188793 - DNA, 25 bp, SARS Virus
atgtcgtgggacatacctatcgttt

SEQ ID NO: 188794 - DNA, 25 bp, SARS Virus
tgtcgtgggacgaacctatcgtttt

SEQ ID NO: 188795 - DNA, 25 bp, SARS Virus
gtcgtgggacgtacctatcgttttg

SEQ ID NO: 188796 - DNA, 25 bp, SARS Virus
tcgtgggacgtaactatcgttttgt

SEQ ID NO: 188797 - DNA, 25 bp, SARS Virus
cgtgggacgtacatatcgttttgtc

SEQ ID NO: 188798 - DNA, 25 bp, SARS Virus
gtgggacgtaccaatcgttttgtct

SEQ ID NO: 188799 - DNA, 25 bp, SARS Virus
tgggacgtacctatcgttttgtctg

SEQ ID NO: 188800 - DNA, 25 bp, SARS Virus
gggacgtacctaacgttttgtctgt

SEQ ID NO: 188801 - DNA, 25 bp, SARS Virus
ggacgtacctatagttttgtctgtt

SEQ ID NO: 188802 - DNA, 25 bp, SARS Virus
gacgtacctatcattttgtctgttt

SEQ ID NO: 188803 - DNA, 25 bp, SARS Virus
acgtacctatcgatttgtctgtttt

SEQ ID NO: 188804 - DNA, 25 bp, SARS Virus
cgtacctatcgtattgtctgttttc

SEQ ID NO: 188805 - DNA, 25 bp, SARS Virus
gtacctatcgttatgtctgttttct

SEQ ID NO: 188806 - DNA, 25 bp, SARS Virus
tacctatcgtttagtctgttttctc

SEQ ID NO: 188807 - DNA, 25 bp, SARS Virus
acctatcgttttatctgttttctct

SEQ ID NO: 188808 - DNA, 25 bp, SARS Virus
cctatcgttttgactgttttctctt

SEQ ID NO: 188809 - DNA, 25 bp, SARS Virus
ctatcgttttgtatgttttctcttt

SEQ ID NO: 188810 - DNA, 25 bp, SARS Virus
tatcgttttgtcagttttctctttg

SEQ ID NO: 188811 - DNA, 25 bp, SARS Virus
atcgttttgtctattttctctttgg

SEQ ID NO: 188812 - DNA, 25 bp, SARS Virus
tcgttttgtctgatttctctttggt

SEQ ID NO: 188813 - DNA, 25 bp, SARS Virus
cgttttgtctgtattctctttggta

SEQ ID NO: 188814 - DNA, 25 bp, SARS Virus
gttttgtctgttatctctttggtag

SEQ ID NO: 188815 - DNA, 25 bp, SARS Virus
ttttgtctgtttactctttggtaga

SEQ ID NO: 188816 - DNA, 25 bp, SARS Virus
tttgtctgttttatctttggtagaa

SEQ ID NO: 188817 - DNA, 25 bp, SARS Virus
ttgtctgttttcactttggtagaag

SEQ ID NO: 188818 - DNA, 25 bp, SARS Virus
tgtctgttttctatttggtagaaga

SEQ ID NO: 188819 - DNA, 25 bp, SARS Virus
gtctgttttctcattggtagaagag

SEQ ID NO: 188820 - DNA, 25 bp, SARS Virus
tctgttttctctatggtagaagagc

SEQ ID NO: 188821 - DNA, 25 bp, SARS Virus
ctgttttctcttaggtagaagagct

SEQ ID NO: 188822 - DNA, 25 bp, SARS Virus
tgttttctctttagtagaagagctt

SEQ ID NO: 188823 - DNA, 25 bp, SARS Virus
gttttctctttgatagaagagcttt

SEQ ID NO: 188824 - DNA, 25 bp, SARS Virus
ttttctctttggaagaagagctttc

SEQ ID NO: 188825 - DNA, 25 bp, SARS Virus
tttctctttggtagaagagctttcg

SEQ ID NO: 188826 - DNA, 25 bp, SARS Virus
ttctctttggtaaaagagctttcga

SEQ ID NO: 188827 - DNA, 25 bp, SARS Virus
tctctttggtagaagagctttcgaa

SEQ ID NO: 188828 - DNA, 25 bp, SARS Virus
ctctttggtagaagagctttcgaag

SEQ ID NO: 188829 - DNA, 25 bp, SARS Virus
tctttggtagaaaagctttcgaagt

SEQ ID NO: 188830 - DNA, 25 bp, SARS Virus
ctttggtagaagagctttcgaagtc

SEQ ID NO: 188831 - DNA, 25 bp, SARS Virus
tttggtagaagaactttcgaagtca

SEQ ID NO: 188832 - DNA, 25 bp, SARS Virus
ttggtagaagagatttcgaagtcaa

SEQ ID NO: 188833 - DNA, 25 bp, SARS Virus
tggtagaagagcattcgaagtcaac

SEQ ID NO: 188834 - DNA, 25 bp, SARS Virus
ggtagaagagctatcgaagtcaaca

SEQ ID NO: 188835 - DNA, 25 bp, SARS Virus
gtagaagagcttacgaagtcaacac

SEQ ID NO: 188836 - DNA, 25 bp, SARS Virus
tagaagagctttagaagtcaacaca

SEQ ID NO: 188837 - DNA, 25 bp, SARS Virus
agaagagctttcaaagtcaacacag

SEQ ID NO: 188838 - DNA, 25 bp, SARS Virus
gaagagctttcgaagtcaacacaga

SEQ ID NO: 188839 - DNA, 25 bp, SARS Virus
aagagctttcgaagtcaacacagaa

SEQ ID NO: 188840 - DNA, 25 bp, SARS Virus
agagctttcgaaatcaacacagaaa

SEQ ID NO: 188841 - DNA, 25 bp, SARS Virus
gagctttcgaagacaacacagaaaa

SEQ ID NO: 188842 - DNA, 25 bp, SARS Virus
agctttcgaagtaaacacagaaaac

SEQ ID NO: 188843 - DNA, 25 bp, SARS Virus
gctttcgaagtcaacacagaaaacg

SEQ ID NO: 188844 - DNA, 25 bp, SARS Virus
ctttcgaagtcaacacagaaaacgt

SEQ ID NO: 188845 - DNA, 25 bp, SARS Virus
tttcgaagtcaaaacagaaaacgtt

SEQ ID NO: 188846 - DNA, 25 bp, SARS Virus
ttcgaagtcaacacagaaaacgttc

SEQ ID NO: 188847 - DNA, 25 bp, SARS Virus
tcgaagtcaacaaagaaaacgttct

SEQ ID NO: 188848 - DNA, 25 bp, SARS Virus
cgaagtcaacacagaaaacgttctt

SEQ ID NO: 188849 - DNA, 25 bp, SARS Virus
gaagtcaacacaaaaaacgttcttc

SEQ ID NO: 188850 - DNA, 25 bp, SARS Virus
aagtcaacacagaaaacgttcttct

SEQ ID NO: 188851 - DNA, 25 bp, SARS Virus
agtcaacacagaaaacgttcttctt

SEQ ID NO: 188852 - DNA, 25 bp, SARS Virus
gtcaacacagaaaacgttcttctta

SEQ ID NO: 188853 - DNA, 25 bp, SARS Virus
tcaacacagaaaacgttcttcttat

SEQ ID NO: 188854 - DNA, 25 bp, SARS Virus
caacacagaaaaagttcttcttata

SEQ ID NO: 188855 - DNA, 25 bp, SARS Virus
aacacagaaaacattcttcttatag

SEQ ID NO: 188856 - DNA, 25 bp, SARS Virus
acacagaaaacgatcttcttatagt

SEQ ID NO: 188857 - DNA, 25 bp, SARS Virus
cacagaaaacgtacttcttatagta

SEQ ID NO: 188858 - DNA, 25 bp, SARS Virus
acagaaaacgttattcttatagtaa

SEQ ID NO: 188859 - DNA, 25 bp, SARS Virus
cagaaaacgttcatcttatagtaac

SEQ ID NO: 188860 - DNA, 25 bp, SARS Virus
agaaaacgttctacttatagtaaca

SEQ ID NO: 188861 - DNA, 25 bp, SARS Virus
gaaaacgttcttattatagtaacac

SEQ ID NO: 188862 - DNA, 25 bp, SARS Virus
aaaacgttcttcatatagtaacacc

SEQ ID NO: 188863 - DNA, 25 bp, SARS Virus
aaacgttcttctaatagtaacacct

SEQ ID NO: 188864 - DNA, 25 bp, SARS Virus
aacgttcttcttatagtaacacctc

SEQ ID NO: 188865 - DNA, 25 bp, SARS Virus
acgttcttcttaaagtaacacctca

SEQ ID NO: 188866 - DNA, 25 bp, SARS Virus
cgttcttcttatagtaacacctcaa

SEQ ID NO: 188867 - DNA, 25 bp, SARS Virus
gttcttcttataataacacctcaac

SEQ ID NO: 188868 - DNA, 25 bp, SARS Virus
ttcttcttatagaaacacctcaaca

SEQ ID NO: 188869 - DNA, 25 bp, SARS Virus
tcttcttatagtaacacctcaacat

SEQ ID NO: 188870 - DNA, 25 bp, SARS Virus
cttcttatagtaacacctcaacatg

SEQ ID NO: 188871 - DNA, 25 bp, SARS Virus
ttcttatagtaaaacctcaacatgt

SEQ ID NO: 188872 - DNA, 25 bp, SARS Virus
tcttatagtaacacctcaacatgtg

SEQ ID NO: 188873 - DNA, 25 bp, SARS Virus
cttatagtaacaactcaacatgtgt

SEQ ID NO: 188874 - DNA, 25 bp, SARS Virus
ttatagtaacacatcaacatgtgta

SEQ ID NO: 188875 - DNA, 25 bp, SARS Virus
tatagtaacaccacaacatgtgtaa

SEQ ID NO: 188876 - DNA, 25 bp, SARS Virus
atagtaacacctaaacatgtgtaac

SEQ ID NO: 188877 - DNA, 25 bp, SARS Virus
tagtaacacctcaacatgtgtaaca

SEQ ID NO: 188878 - DNA, 25 bp, SARS Virus
agtaacacctcaacatgtgtaacac

SEQ ID NO: 188879 - DNA, 25 bp, SARS Virus
gtaacacctcaaaatgtgtaacacg

SEQ ID NO: 188880 - DNA, 25 bp, SARS Virus
taacacctcaacatgtgtaacacgg

SEQ ID NO: 188881 - DNA, 25 bp, SARS Virus
aacacctcaacaagtgtaacacggg

SEQ ID NO: 188882 - DNA, 25 bp, SARS Virus
acacctcaacatatgtaacacgggt

SEQ ID NO: 188883 - DNA, 25 bp, SARS Virus
cacctcaacatgagtaacacgggtg

SEQ ID NO: 188884 - DNA, 25 bp, SARS Virus
acctcaacatgtataacacgggtgt

SEQ ID NO: 188885 - DNA, 25 bp, SARS Virus
cctcaacatgtgaaacacgggtgtt

SEQ ID NO: 188886 - DNA, 25 bp, SARS Virus
ctcaacatgtgtaacacgggtgtta

SEQ ID NO: 188887 - DNA, 25 bp, SARS Virus
tcaacatgtgtaacacgggtgttaa

SEQ ID NO: 188888 - DNA, 25 bp, SARS Virus
caacatgtgtaaaacgggtgttaaa

SEQ ID NO: 188889 - DNA, 25 bp, SARS Virus
gttggtagtgcgcgtaacaactatt

SEQ ID NO: 188890 - DNA, 25 bp, SARS Virus
ttggtagtgcgcctaacaactatta

SEQ ID NO: 188891 - DNA, 25 bp, SARS Virus
tggtagtgcgcgcaacaactattac

SEQ ID NO: 188892 - DNA, 25 bp, SARS Virus
ggtagtgcgcgtcacaactattaca

SEQ ID NO: 188893 - DNA, 25 bp, SARS Virus
gtagtgcgcgtaccaactattacaa

SEQ ID NO: 188894 - DNA, 25 bp, SARS Virus
tagtgcgcgtaacaactattacaac

SEQ ID NO: 188895 - DNA, 25 bp, SARS Virus
agtgcgcgtaaccactattacaaca

SEQ ID NO: 188896 - DNA, 25 bp, SARS Virus
gtgcgcgtaacacctattacaacaa

SEQ ID NO: 188897 - DNA, 25 bp, SARS Virus
tgcgcgtaacaactattacaacaat

SEQ ID NO: 188898 - DNA, 25 bp, SARS Virus
gcgcgtaacaaccattacaacaatt

SEQ ID NO: 188899 - DNA, 25 bp, SARS Virus
cgcgtaacaactcttacaacaattc

SEQ ID NO: 188900 - DNA, 25 bp, SARS Virus
gcgtaacaactactacaacaattca

SEQ ID NO: 188901 - DNA, 25 bp, SARS Virus
cgtaacaactatcacaacaattcac

SEQ ID NO: 188902 - DNA, 25 bp, SARS Virus
gtaacaactattccaacaattcacg

SEQ ID NO: 188903 - DNA, 25 bp, SARS Virus
taacaactattacaacaattcacgt

SEQ ID NO: 188904 - DNA, 25 bp, SARS Virus
aacaactattaccacaattcacgta

SEQ ID NO: 188905 - DNA, 25 bp, SARS Virus
acaactattacaccaattcacgtag

SEQ ID NO: 188906 - DNA, 25 bp, SARS Virus
caactattacaacaattcacgtagt

SEQ ID NO: 188907 - DNA, 25 bp, SARS Virus
aactattacaaccattcacgtagta

SEQ ID NO: 188908 - DNA, 25 bp, SARS Virus
actattacaacacttcacgtagtaa

SEQ ID NO: 188909 - DNA, 25 bp, SARS Virus
ctattacaacaactcacgtagtaat

SEQ ID NO: 188910 - DNA, 25 bp, SARS Virus
tattacaacaatccacgtagtaata

SEQ ID NO: 188911 - DNA, 25 bp, SARS Virus
attacaacaattcacgtagtaatag

SEQ ID NO: 188912 - DNA, 25 bp, SARS Virus
ttacaacaattcccgtagtaatagt

SEQ ID NO: 188913 - DNA, 25 bp, SARS Virus
tacaacaattcacgtagtaatagtt

SEQ ID NO: 188914 - DNA, 25 bp, SARS Virus
acaacaattcacctagtaatagttc

SEQ ID NO: 188915 - DNA, 25 bp, SARS Virus
caacaattcacgcagtaatagttcg

SEQ ID NO: 188916 - DNA, 25 bp, SARS Virus
aacaattcacgtcgtaatagttcga

SEQ ID NO: 188917 - DNA, 25 bp, SARS Virus
acaattcacgtactaatagttcgaa

SEQ ID NO: 188918 - DNA, 25 bp, SARS Virus
caattcacgtagcaatagttcgaag

SEQ ID NO: 188919 - DNA, 25 bp, SARS Virus
aattcacgtagtcatagttcgaagg

SEQ ID NO: 188920 - DNA, 25 bp, SARS Virus
attcacgtagtactagttcgaagga

SEQ ID NO: 188921 - DNA, 25 bp, SARS Virus
ttcacgtagtaacagttcgaaggat

SEQ ID NO: 188922 - DNA, 25 bp, SARS Virus
tcacgtagtaatcgttcgaaggatt

SEQ ID NO: 188923 - DNA, 25 bp, SARS Virus
cacgtagtaatacttcgaaggattc

SEQ ID NO: 188924 - DNA, 25 bp, SARS Virus
acgtagtaatagctcgaaggattcg

SEQ ID NO: 188925 - DNA, 25 bp, SARS Virus
cgtagtaatagtccgaaggattcgt

SEQ ID NO: 188926 - DNA, 25 bp, SARS Virus
gtagtaatagttcgaaggattcgta

SEQ ID NO: 188927 - DNA, 25 bp, SARS Virus
tagtaatagttccaaggattcgtat

SEQ ID NO: 188928 - DNA, 25 bp, SARS Virus
agtaatagttcgcaggattcgtatc

SEQ ID NO: 188929 - DNA, 25 bp, SARS Virus
gtaatagttcgacggattcgtatca

SEQ ID NO: 188930 - DNA, 25 bp, SARS Virus
taatagttcgaacgattcgtatcac

SEQ ID NO: 188931 - DNA, 25 bp, SARS Virus
aatagttcgaagcattcgtatcact

SEQ ID NO: 188932 - DNA, 25 bp, SARS Virus
atagttcgaaggcttcgtatcactt

SEQ ID NO: 188933 - DNA, 25 bp, SARS Virus
tagttcgaaggactcgtatcacttc

SEQ ID NO: 188934 - DNA, 25 bp, SARS Virus
agttcgaaggatccgtatcacttct

SEQ ID NO: 188935 - DNA, 25 bp, SARS Virus
gttcgaaggattcgtatcacttctc

SEQ ID NO: 188936 - DNA, 25 bp, SARS Virus
ttcgaaggattcctatcacttctcg

SEQ ID NO: 188937 - DNA, 25 bp, SARS Virus
tcgaaggattcgcatcacttctcgt

SEQ ID NO: 188938 - DNA, 25 bp, SARS Virus
cgaaggattcgtctcacttctcgta

SEQ ID NO: 188939 - DNA, 25 bp, SARS Virus
gaaggattcgtaccacttctcgtaa

SEQ ID NO: 188940 - DNA, 25 bp, SARS Virus
aaggattcgtatcacttctcgtaac

SEQ ID NO: 188941 - DNA, 25 bp, SARS Virus
aggattcgtatcccttctcgtaaca

SEQ ID NO: 188942 - DNA, 25 bp, SARS Virus
ggattcgtatcacttctcgtaacaa

SEQ ID NO: 188943 - DNA, 25 bp, SARS Virus
gattcgtatcacctctcgtaacaaa

SEQ ID NO: 188944 - DNA, 25 bp, SARS Virus
attcgtatcactcctcgtaacaaac

SEQ ID NO: 188945 - DNA, 25 bp, SARS Virus
ttcgtatcacttctcgtaacaaacg

SEQ ID NO: 188946 - DNA, 25 bp, SARS Virus
tcgtatcacttcccgtaacaaacgt

SEQ ID NO: 188947 - DNA, 25 bp, SARS Virus
cgtatcacttctcgtaacaaacgta

SEQ ID NO: 188948 - DNA, 25 bp, SARS Virus
gtatcacttctcctaacaaacgtat

SEQ ID NO: 188949 - DNA, 25 bp, SARS Virus
tatcacttctcgcaacaaacgtatc

SEQ ID NO: 188950 - DNA, 25 bp, SARS Virus
atcacttctcgtcacaaacgtatcg

SEQ ID NO: 188951 - DNA, 25 bp, SARS Virus
tcacttctcgtaccaaacgtatcgt

SEQ ID NO: 188952 - DNA, 25 bp, SARS Virus
cacttctcgtaacaaacgtatcgtg

SEQ ID NO: 188953 - DNA, 25 bp, SARS Virus
acttctcgtaaccaacgtatcgtga

SEQ ID NO: 188954 - DNA, 25 bp, SARS Virus
cttctcgtaacacacgtatcgtgat

SEQ ID NO: 188955 - DNA, 25 bp, SARS Virus
ttctcgtaacaaccgtatcgtgatc

SEQ ID NO: 188956 - DNA, 25 bp, SARS Virus
tctcgtaacaaacgtatcgtgatca

SEQ ID NO: 188957 - DNA, 25 bp, SARS Virus
ctcgtaacaaacctatcgtgatcaa

SEQ ID NO: 188958 - DNA, 25 bp, SARS Virus
tcgtaacaaacgcatcgtgatcaat

SEQ ID NO: 188959 - DNA, 25 bp, SARS Virus
cgtaacaaacgtctcgtgatcaatg

SEQ ID NO: 188960 - DNA, 25 bp, SARS Virus
gtaacaaacgtaccgtgatcaatga

SEQ ID NO: 188961 - DNA, 25 bp, SARS Virus
taacaaacgtatcgtgatcaatgaa

SEQ ID NO: 188962 - DNA, 25 bp, SARS Virus
aacaaacgtatcctgatcaatgaaa

SEQ ID NO: 188963 - DNA, 25 bp, SARS Virus
acaaacgtatcgcgatcaatgaaaa

SEQ ID NO: 188964 - DNA, 25 bp, SARS Virus
caaacgtatcgtcatcaatgaaaac

SEQ ID NO: 188965 - DNA, 25 bp, SARS Virus
aaacgtatcgtgctcaatgaaaacg

SEQ ID NO: 188966 - DNA, 25 bp, SARS Virus
aacgtatcgtgaccaatgaaaacgg

SEQ ID NO: 188967 - DNA, 25 bp, SARS Virus
acgtatcgtgatcaatgaaaacggg

SEQ ID NO: 188968 - DNA, 25 bp, SARS Virus
cgtatcgtgatccatgaaaacggga

SEQ ID NO: 188969 - DNA, 25 bp, SARS Virus
gtatcgtgatcactgaaaacgggag

SEQ ID NO: 188970 - DNA, 25 bp, SARS Virus
tatcgtgatcaacgaaaacgggaga

SEQ ID NO: 188971 - DNA, 25 bp, SARS Virus
atcgtgatcaatcaaaacgggagaa

SEQ ID NO: 188972 - DNA, 25 bp, SARS Virus
tcgtgatcaatgcaaacgggagaac

SEQ ID NO: 188973 - DNA, 25 bp, SARS Virus
cgtgatcaatgacaacgggagaaca

SEQ ID NO: 188974 - DNA, 25 bp, SARS Virus
gtgatcaatgaacacgggagaacag

SEQ ID NO: 188975 - DNA, 25 bp, SARS Virus
tgatcaatgaaaccgggagaacagg

SEQ ID NO: 188976 - DNA, 25 bp, SARS Virus
gatcaatgaaaacgggagaacagga

SEQ ID NO: 188977 - DNA, 25 bp, SARS Virus
atcaatgaaaaccggagaacaggag

SEQ ID NO: 188978 - DNA, 25 bp, SARS Virus
tcaatgaaaacgcgagaacaggagt

SEQ ID NO: 188979 - DNA, 25 bp, SARS Virus
caatgaaaacggcagaacaggagtc

SEQ ID NO: 188980 - DNA, 25 bp, SARS Virus
aatgaaaacgggcgaacaggagtct

SEQ ID NO: 188981 - DNA, 25 bp, SARS Virus
atgaaaacgggacaacaggagtcta

SEQ ID NO: 188982 - DNA, 25 bp, SARS Virus
tgaaaacgggagcacaggagtctag

SEQ ID NO: 188983 - DNA, 25 bp, SARS Virus
gaaaacgggagaccaggagtctaga

SEQ ID NO: 188984 - DNA, 25 bp, SARS Virus
aaaacgggagaacaggagtctagaa

SEQ ID NO: 188985 - DNA, 25 bp, SARS Virus
aaacgggagaaccggagtctagaac

SEQ ID NO: 188986 - DNA, 25 bp, SARS Virus
aacgggagaacacgagtctagaacg

SEQ ID NO: 188987 - DNA, 25 bp, SARS Virus
acgggagaacagcagtctagaacgg

SEQ ID NO: 188988 - DNA, 25 bp, SARS Virus
cgggagaacaggcgtctagaacgga

SEQ ID NO: 188989 - DNA, 25 bp, SARS Virus
gggagaacaggactctagaacggac

SEQ ID NO: 188990 - DNA, 25 bp, SARS Virus
ggagaacaggagcctagaacggaca

SEQ ID NO: 188991 - DNA, 25 bp, SARS Virus
gagaacaggagtctagaacggacaa

SEQ ID NO: 188992 - DNA, 25 bp, SARS Virus
agaacaggagtccagaacggacaaa

SEQ ID NO: 188993 - DNA, 25 bp, SARS Virus
gaacaggagtctcgaacggacaaac

SEQ ID NO: 188994 - DNA, 25 bp, SARS Virus
aacaggagtctacaacggacaaaca

SEQ ID NO: 188995 - DNA, 25 bp, SARS Virus
acaggagtctagcacggacaaacat

SEQ ID NO: 188996 - DNA, 25 bp, SARS Virus
caggagtctagaccggacaaacatg

SEQ ID NO: 188997 - DNA, 25 bp, SARS Virus
aggagtctagaacggacaaacatgt

SEQ ID NO: 188998 - DNA, 25 bp, SARS Virus
ggagtctagaaccgacaaacatgta

SEQ ID NO: 188999 - DNA, 25 bp, SARS Virus
gagtctagaacgcacaaacatgtaa

SEQ ID NO: 189000 - DNA, 25 bp, SARS Virus
agtctagaacggccaaacatgtaaa

SEQ ID NO: 189001 - DNA, 25 bp, SARS Virus
gtctagaacggacaaacatgtaaac

SEQ ID NO: 189002 - DNA, 25 bp, SARS Virus
tctagaacggaccaacatgtaaacc

SEQ ID NO: 189003 - DNA, 25 bp, SARS Virus
ctagaacggacacacatgtaaaccc

SEQ ID NO: 189004 - DNA, 25 bp, SARS Virus
tagaacggacaaccatgtaaaccca

SEQ ID NO: 189005 - DNA, 25 bp, SARS Virus
agaacggacaaacatgtaaacccag

SEQ ID NO: 189006 - DNA, 25 bp, SARS Virus
gaacggacaaacctgtaaacccagt

SEQ ID NO: 189007 - DNA, 25 bp, SARS Virus
aacggacaaacacgtaaacccagta

SEQ ID NO: 189008 - DNA, 25 bp, SARS Virus
acggacaaacatctaaacccagtat

SEQ ID NO: 189009 - DNA, 25 bp, SARS Virus
cggacaaacatgcaaacccagtatc

SEQ ID NO: 189010 - DNA, 25 bp, SARS Virus
ggacaaacatgtcaacccagtatcg

SEQ ID NO: 189011 - DNA, 25 bp, SARS Virus
gacaaacatgtacacccagtatcgg

SEQ ID NO: 189012 - DNA, 25 bp, SARS Virus
acaaacatgtaaccccagtatcgga

SEQ ID NO: 189013 - DNA, 25 bp, SARS Virus
caaacatgtaaacccagtatcggac

SEQ ID NO: 189014 - DNA, 25 bp, SARS Virus
aaacatgtaaacccagtatcggact

SEQ ID NO: 189015 - DNA, 25 bp, SARS Virus
aacatgtaaacccagtatcggacta

SEQ ID NO: 189016 - DNA, 25 bp, SARS Virus
acatgtaaaccccgtatcggactag

SEQ ID NO: 189017 - DNA, 25 bp, SARS Virus
catgtaaacccactatcggactaga

SEQ ID NO: 189018 - DNA, 25 bp, SARS Virus
atgtaaacccagcatcggactagac

SEQ ID NO: 189019 - DNA, 25 bp, SARS Virus
tgtaaacccagtctcggactagacg

SEQ ID NO: 189020 - DNA, 25 bp, SARS Virus
gtaaacccagtaccggactagacgg

SEQ ID NO: 189021 - DNA, 25 bp, SARS Virus
taaacccagtatcggactagacggt

SEQ ID NO: 189022 - DNA, 25 bp, SARS Virus
aaacccagtatccgactagacggta

SEQ ID NO: 189023 - DNA, 25 bp, SARS Virus
aacccagtatcgcactagacggtag

SEQ ID NO: 189024 - DNA, 25 bp, SARS Virus
acccagtatcggcctagacggtaga

SEQ ID NO: 189025 - DNA, 25 bp, SARS Virus
cccagtatcggactagacggtagaa

SEQ ID NO: 189026 - DNA, 25 bp, SARS Virus
ccagtatcggaccagacggtagaaa

SEQ ID NO: 189027 - DNA, 25 bp, SARS Virus
cagtatcggactcgacggtagaaaa

SEQ ID NO: 189028 - DNA, 25 bp, SARS Virus
agtatcggactacacggtagaaaag

SEQ ID NO: 189029 - DNA, 25 bp, SARS Virus
gtatcggactagccggtagaaaagg

SEQ ID NO: 189030 - DNA, 25 bp, SARS Virus
tatcggactagacggtagaaaaggt

SEQ ID NO: 189031 - DNA, 25 bp, SARS Virus
atcggactagaccgtagaaaaggtt

SEQ ID NO: 189032 - DNA, 25 bp, SARS Virus
tcggactagacgctagaaaaggttg

SEQ ID NO: 189033 - DNA, 25 bp, SARS Virus
cggactagacggcagaaaaggttga

SEQ ID NO: 189034 - DNA, 25 bp, SARS Virus
ggactagacggtcgaaaaggttgaa

SEQ ID NO: 189035 - DNA, 25 bp, SARS Virus
gactagacggtacaaaaggttgaac

SEQ ID NO: 189036 - DNA, 25 bp, SARS Virus
actagacggtagcaaaggttgaacg

SEQ ID NO: 189037 - DNA, 25 bp, SARS Virus
ctagacggtagacaaggttgaacgc

SEQ ID NO: 189038 - DNA, 25 bp, SARS Virus
tagacggtagaacaggttgaacgca

SEQ ID NO: 189039 - DNA, 25 bp, SARS Virus
agacggtagaaacggttgaacgcaa

SEQ ID NO: 189040 - DNA, 25 bp, SARS Virus
gacggtagaaaacgttgaacgcaac

SEQ ID NO: 189041 - DNA, 25 bp, SARS Virus
acggtagaaaagcttgaacgcaacg

SEQ ID NO: 189042 - DNA, 25 bp, SARS Virus
cggtagaaaaggctgaacgcaacgt

SEQ ID NO: 189043 - DNA, 25 bp, SARS Virus
ggtagaaaaggtcgaacgcaacgta

SEQ ID NO: 189044 - DNA, 25 bp, SARS Virus
gtagaaaaggttcaacgcaacgtac

SEQ ID NO: 189045 - DNA, 25 bp, SARS Virus
tagaaaaggttgcacgcaacgtacc

SEQ ID NO: 189046 - DNA, 25 bp, SARS Virus
agaaaaggttgaccgcaacgtaccg

SEQ ID NO: 189047 - DNA, 25 bp, SARS Virus
gaaaaggttgaacgcaacgtaccgt

SEQ ID NO: 189048 - DNA, 25 bp, SARS Virus
aaaaggttgaacccaacgtaccgtc

SEQ ID NO: 189049 - DNA, 25 bp, SARS Virus
aaaggttgaacgcaacgtaccgtcg

SEQ ID NO: 189050 - DNA, 25 bp, SARS Virus
aaggttgaacgccacgtaccgtcgt

SEQ ID NO: 189051 - DNA, 25 bp, SARS Virus
aggttgaacgcaccgtaccgtcgta

SEQ ID NO: 189052 - DNA, 25 bp, SARS Virus
ggttgaacgcaacgtaccgtcgtag

SEQ ID NO: 189053 - DNA, 25 bp, SARS Virus
gttgaacgcaacctaccgtcgtagt

SEQ ID NO: 189054 - DNA, 25 bp, SARS Virus
ttgaacgcaacgcaccgtcgtagtg

SEQ ID NO: 189055 - DNA, 25 bp, SARS Virus
tgaacgcaacgtcccgtcgtagtgc

SEQ ID NO: 189056 - DNA, 25 bp, SARS Virus
gaacgcaacgtaccgtcgtagtgcc

SEQ ID NO: 189057 - DNA, 25 bp, SARS Virus
aacgcaacgtaccgtcgtagtgcca

SEQ ID NO: 189058 - DNA, 25 bp, SARS Virus
acgcaacgtaccctcgtagtgccag

SEQ ID NO: 189059 - DNA, 25 bp, SARS Virus
cgcaacgtaccgccgtagtgccagt

SEQ ID NO: 189060 - DNA, 25 bp, SARS Virus
gcaacgtaccgtcgtagtgccagtt

SEQ ID NO: 189061 - DNA, 25 bp, SARS Virus
caacgtaccgtcctagtgccagttt

SEQ ID NO: 189062 - DNA, 25 bp, SARS Virus
aacgtaccgtcgcagtgccagtttg

SEQ ID NO: 189063 - DNA, 25 bp, SARS Virus
acgtaccgtcgtcgtgccagtttga

SEQ ID NO: 189064 - DNA, 25 bp, SARS Virus
cgtaccgtcgtactgccagtttgag

SEQ ID NO: 189065 - DNA, 25 bp, SARS Virus
gtaccgtcgtagcgccagtttgagt

SEQ ID NO: 189066 - DNA, 25 bp, SARS Virus
taccgtcgtagtcccagtttgagtc

SEQ ID NO: 189067 - DNA, 25 bp, SARS Virus
accgtcgtagtgccagtttgagtct

SEQ ID NO: 189068 - DNA, 25 bp, SARS Virus
ccgtcgtagtgccagtttgagtcta

SEQ ID NO: 189069 - DNA, 25 bp, SARS Virus
cgtcgtagtgcccgtttgagtctaa

SEQ ID NO: 189070 - DNA, 25 bp, SARS Virus
gtcgtagtgccactttgagtctaaa

SEQ ID NO: 189071 - DNA, 25 bp, SARS Virus
tcgtagtgccagcttgagtctaaat

SEQ ID NO: 189072 - DNA, 25 bp, SARS Virus
cgtagtgccagtctgagtctaaatc

SEQ ID NO: 189073 - DNA, 25 bp, SARS Virus
gtagtgccagttcgagtctaaatcg

SEQ ID NO: 189074 - DNA, 25 bp, SARS Virus
tagtgccagtttcagtctaaatcgg

SEQ ID NO: 189075 - DNA, 25 bp, SARS Virus
agtgccagtttgcgtctaaatcggt

SEQ ID NO: 189076 - DNA, 25 bp, SARS Virus
gtgccagtttgactctaaatcggtg

SEQ ID NO: 189077 - DNA, 25 bp, SARS Virus
tgccagtttgagcctaaatcggtgt

SEQ ID NO: 189078 - DNA, 25 bp, SARS Virus
gccagtttgagtctaaatcggtgta

SEQ ID NO: 189079 - DNA, 25 bp, SARS Virus
ccagtttgagtccaaatcggtgtaa

SEQ ID NO: 189080 - DNA, 25 bp, SARS Virus
cagtttgagtctcaatcggtgtaag

SEQ ID NO: 189081 - DNA, 25 bp, SARS Virus
agtttgagtctacatcggtgtaagt

SEQ ID NO: 189082 - DNA, 25 bp, SARS Virus
gtttgagtctaactcggtgtaagtt

SEQ ID NO: 189083 - DNA, 25 bp, SARS Virus
tttgagtctaaaccggtgtaagttt

SEQ ID NO: 189084 - DNA, 25 bp, SARS Virus
ttgagtctaaatcggtgtaagtttc

SEQ ID NO: 189085 - DNA, 25 bp, SARS Virus
tgagtctaaatccgtgtaagtttct

SEQ ID NO: 189086 - DNA, 25 bp, SARS Virus
gagtctaaatcgctgtaagtttcta

SEQ ID NO: 189087 - DNA, 25 bp, SARS Virus
agtctaaatcggcgtaagtttctaa

SEQ ID NO: 189088 - DNA, 25 bp, SARS Virus
gtctaaatcggtctaagtttctaaa

SEQ ID NO: 189089 - DNA, 25 bp, SARS Virus
tctaaatcggtgcaagtttctaaag

SEQ ID NO: 189090 - DNA, 25 bp, SARS Virus
ctaaatcggtgtcagtttctaaaga

SEQ ID NO: 189091 - DNA, 25 bp, SARS Virus
taaatcggtgtacgtttctaaagaa

SEQ ID NO: 189092 - DNA, 25 bp, SARS Virus
aaatcggtgtaactttctaaagaaa

SEQ ID NO: 189093 - DNA, 25 bp, SARS Virus
aatcggtgtaagcttctaaagaaat

SEQ ID NO: 189094 - DNA, 25 bp, SARS Virus
atcggtgtaagtctctaaagaaatt

SEQ ID NO: 189095 - DNA, 25 bp, SARS Virus
tcggtgtaagttcctaaagaaattg

SEQ ID NO: 189096 - DNA, 25 bp, SARS Virus
cggtgtaagtttctaaagaaattga

SEQ ID NO: 189097 - DNA, 25 bp, SARS Virus
ggtgtaagtttccaaagaaattgaa

SEQ ID NO: 189098 - DNA, 25 bp, SARS Virus
gtgtaagtttctcaagaaattgaaa

SEQ ID NO: 189099 - DNA, 25 bp, SARS Virus
tgtaagtttctacagaaattgaaaa

SEQ ID NO: 189100 - DNA, 25 bp, SARS Virus
gtaagtttctaacgaaattgaaaaa

SEQ ID NO: 189101 - DNA, 25 bp, SARS Virus
taagtttctaaacaaattgaaaaac

SEQ ID NO: 189102 - DNA, 25 bp, SARS Virus
aagtttctaaagcaattgaaaaact

SEQ ID NO: 189103 - DNA, 25 bp, SARS Virus
agtttctaaagacattgaaaaactc

SEQ ID NO: 189104 - DNA, 25 bp, SARS Virus
gtttctaaagaacttgaaaaactct

SEQ ID NO: 189105 - DNA, 25 bp, SARS Virus
tttctaaagaaactgaaaaactctt

SEQ ID NO: 189106 - DNA, 25 bp, SARS Virus
ttctaaagaaatcgaaaaactcttg

SEQ ID NO: 189107 - DNA, 25 bp, SARS Virus
tctaaagaaattcaaaaactcttgc

SEQ ID NO: 189108 - DNA, 25 bp, SARS Virus
ctaaagaaattgcaaaactcttgct

SEQ ID NO: 189109 - DNA, 25 bp, SARS Virus
taaagaaattgacaaactcttgctg

SEQ ID NO: 189110 - DNA, 25 bp, SARS Virus
aaagaaattgaacaactcttgctga

SEQ ID NO: 189111 - DNA, 25 bp, SARS Virus
aagaaattgaaacactcttgctgaa

SEQ ID NO: 189112 - DNA, 25 bp, SARS Virus
agaaattgaaaacctcttgctgaag

SEQ ID NO: 189113 - DNA, 25 bp, SARS Virus
gaaattgaaaaactcttgctgaagt

SEQ ID NO: 189114 - DNA, 25 bp, SARS Virus
aaattgaaaaacccttgctgaagtc

SEQ ID NO: 189115 - DNA, 25 bp, SARS Virus
aattgaaaaactcttgctgaagtct

SEQ ID NO: 189116 - DNA, 25 bp, SARS Virus
attgaaaaactcctgctgaagtctt

SEQ ID NO: 189117 - DNA, 25 bp, SARS Virus
ttgaaaaactctcgctgaagtctta

SEQ ID NO: 189118 - DNA, 25 bp, SARS Virus
tgaaaaactcttcctgaagtcttag

SEQ ID NO: 189119 - DNA, 25 bp, SARS Virus
gaaaaactcttgctgaagtcttagt

SEQ ID NO: 189120 - DNA, 25 bp, SARS Virus
aaaaactcttgccgaagtcttagtg

SEQ ID NO: 189121 - DNA, 25 bp, SARS Virus
aaaactcttgctcaagtcttagtgg

SEQ ID NO: 189122 - DNA, 25 bp, SARS Virus
aaactcttgctgcagtcttagtggt

SEQ ID NO: 189123 - DNA, 25 bp, SARS Virus
aactcttgctgacgtcttagtggta

SEQ ID NO: 189124 - DNA, 25 bp, SARS Virus
actcttgctgaactcttagtggtaa

SEQ ID NO: 189125 - DNA, 25 bp, SARS Virus
ctcttgctgaagccttagtggtaat

SEQ ID NO: 189126 - DNA, 25 bp, SARS Virus
tcttgctgaagtcttagtggtaatc

SEQ ID NO: 189127 - DNA, 25 bp, SARS Virus
cttgctgaagtcctagtggtaatcg

SEQ ID NO: 189128 - DNA, 25 bp, SARS Virus
ttgctgaagtctcagtggtaatcga

SEQ ID NO: 189129 - DNA, 25 bp, SARS Virus
tgctgaagtcttcgtggtaatcgat

SEQ ID NO: 189130 - DNA, 25 bp, SARS Virus
gctgaagtcttactggtaatcgatg

SEQ ID NO: 189131 - DNA, 25 bp, SARS Virus
ctgaagtcttagcggtaatcgatgt

SEQ ID NO: 189132 - DNA, 25 bp, SARS Virus
tgaagtcttagtcgtaatcgatgtc

SEQ ID NO: 189133 - DNA, 25 bp, SARS Virus
gaagtcttagtgctaatcgatgtcg

SEQ ID NO: 189134 - DNA, 25 bp, SARS Virus
aagtcttagtggcaatcgatgtcgg

SEQ ID NO: 189135 - DNA, 25 bp, SARS Virus
agtcttagtggtcatcgatgtcgga

SEQ ID NO: 189136 - DNA, 25 bp, SARS Virus
gtcttagtggtactcgatgtcggac

SEQ ID NO: 189137 - DNA, 25 bp, SARS Virus
tcttagtggtaaccgatgtcggacg

SEQ ID NO: 189138 - DNA, 25 bp, SARS Virus
cttagtggtaatcgatgtcggacga

SEQ ID NO: 189139 - DNA, 25 bp, SARS Virus
ttagtggtaatccatgtcggacgag

SEQ ID NO: 189140 - DNA, 25 bp, SARS Virus
tagtggtaatcgctgtcggacgagt

SEQ ID NO: 189141 - DNA, 25 bp, SARS Virus
agtggtaatcgacgtcggacgagta

SEQ ID NO: 189142 - DNA, 25 bp, SARS Virus
gtggtaatcgatctcggacgagtat

SEQ ID NO: 189143 - DNA, 25 bp, SARS Virus
tggtaatcgatgccggacgagtatc

SEQ ID NO: 189144 - DNA, 25 bp, SARS Virus
ggtaatcgatgtcggacgagtatcc

SEQ ID NO: 189145 - DNA, 25 bp, SARS Virus
gtaatcgatgtccgacgagtatccg

SEQ ID NO: 189146 - DNA, 25 bp, SARS Virus
taatcgatgtcgcacgagtatccgg

SEQ ID NO: 189147 - DNA, 25 bp, SARS Virus
aatcgatgtcggccgagtatccgga

SEQ ID NO: 189148 - DNA, 25 bp, SARS Virus
atcgatgtcggacgagtatccggag

SEQ ID NO: 189149 - DNA, 25 bp, SARS Virus
tcgatgtcggaccagtatccggagg

SEQ ID NO: 189150 - DNA, 25 bp, SARS Virus
cgatgtcggacgcgtatccggagga

SEQ ID NO: 189151 - DNA, 25 bp, SARS Virus
gatgtcggacgactatccggaggac

SEQ ID NO: 189152 - DNA, 25 bp, SARS Virus
atgtcggacgagcatccggaggacc

SEQ ID NO: 189153 - DNA, 25 bp, SARS Virus
tgtcggacgagtctccggaggaccc

SEQ ID NO: 189154 - DNA, 25 bp, SARS Virus
gtcggacgagtacccggaggacccg

SEQ ID NO: 189155 - DNA, 25 bp, SARS Virus
tcggacgagtatccggaggacccgt

SEQ ID NO: 189156 - DNA, 25 bp, SARS Virus
cggacgagtatccggaggacccgtc

SEQ ID NO: 189157 - DNA, 25 bp, SARS Virus
ggacgagtatcccgaggacccgtca

SEQ ID NO: 189158 - DNA, 25 bp, SARS Virus
gacgagtatccgcaggacccgtcac

SEQ ID NO: 189159 - DNA, 25 bp, SARS Virus
acgagtatccggcggacccgtcacc

SEQ ID NO: 189160 - DNA, 25 bp, SARS Virus
cgagtatccggacgacccgtcaccg

SEQ ID NO: 189161 - DNA, 25 bp, SARS Virus
gagtatccggagcacccgtcaccgt

SEQ ID NO: 189162 - DNA, 25 bp, SARS Virus
agtatccggaggccccgtcaccgta

SEQ ID NO: 189163 - DNA, 25 bp, SARS Virus
gtatccggaggacccgtcaccgtat

SEQ ID NO: 189164 - DNA, 25 bp, SARS Virus
tatccggaggacccgtcaccgtatt

SEQ ID NO: 189165 - DNA, 25 bp, SARS Virus
atccggaggacccgtcaccgtattc

SEQ ID NO: 189166 - DNA, 25 bp, SARS Virus
tccggaggacccctcaccgtattcg

SEQ ID NO: 189167 - DNA, 25 bp, SARS Virus
ccggaggacccgccaccgtattcgc

SEQ ID NO: 189168 - DNA, 25 bp, SARS Virus
cggaggacccgtcaccgtattcgcc

SEQ ID NO: 189169 - DNA, 25 bp, SARS Virus
ggaggacccgtccccgtattcgccg

SEQ ID NO: 189170 - DNA, 25 bp, SARS Virus
gaggacccgtcaccgtattcgccgt

SEQ ID NO: 189171 - DNA, 25 bp, SARS Virus
aggacccgtcaccgtattcgccgta

SEQ ID NO: 189172 - DNA, 25 bp, SARS Virus
ggacccgtcaccctattcgccgtat

SEQ ID NO: 189173 - DNA, 25 bp, SARS Virus
gacccgtcaccgcattcgccgtata

SEQ ID NO: 189174 - DNA, 25 bp, SARS Virus
acccgtcaccgtcttcgccgtatac

SEQ ID NO: 189175 - DNA, 25 bp, SARS Virus
cccgtcaccgtactcgccgtatact

SEQ ID NO: 189176 - DNA, 25 bp, SARS Virus
ccgtcaccgtatccgccgtatacta

SEQ ID NO: 189177 - DNA, 25 bp, SARS Virus
cgtcaccgtattcgccgtatactac

SEQ ID NO: 189178 - DNA, 25 bp, SARS Virus
gtcaccgtattccccgtatactacc

SEQ ID NO: 189179 - DNA, 25 bp, SARS Virus
tcaccgtattcgccgtatactacca

SEQ ID NO: 189180 - DNA, 25 bp, SARS Virus
caccgtattcgccgtatactaccat

SEQ ID NO: 189181 - DNA, 25 bp, SARS Virus
accgtattcgccctatactaccatt

SEQ ID NO: 189182 - DNA, 25 bp, SARS Virus
ccgtattcgccgcatactaccattt

SEQ ID NO: 189183 - DNA, 25 bp, SARS Virus
cgtattcgccgtctactaccatttc

SEQ ID NO: 189184 - DNA, 25 bp, SARS Virus
gtattcgccgtacactaccatttct

SEQ ID NO: 189185 - DNA, 25 bp, SARS Virus
tattcgccgtatcctaccatttctt

SEQ ID NO: 189186 - DNA, 25 bp, SARS Virus
attcgccgtatactaccatttcttg

SEQ ID NO: 189187 - DNA, 25 bp, SARS Virus
ttcgccgtataccaccatttcttga

SEQ ID NO: 189188 - DNA, 25 bp, SARS Virus
tcgccgtatactcccatttcttgat

SEQ ID NO: 189189 - DNA, 25 bp, SARS Virus
cgccgtatactaccatttcttgatt

SEQ ID NO: 189190 - DNA, 25 bp, SARS Virus
gccgtatactaccatttcttgattt

SEQ ID NO: 189191 - DNA, 25 bp, SARS Virus
ccgtatactaccctttcttgattta

SEQ ID NO: 189192 - DNA, 25 bp, SARS Virus
cgtatactaccacttcttgatttaa

SEQ ID NO: 189193 - DNA, 25 bp, SARS Virus
gtatactaccatctcttgatttaag

SEQ ID NO: 189194 - DNA, 25 bp, SARS Virus
tatactaccattccttgatttaaga

SEQ ID NO: 189195 - DNA, 25 bp, SARS Virus
atactaccatttcttgatttaagac

SEQ ID NO: 189196 - DNA, 25 bp, SARS Virus
tactaccatttcctgatttaagact

SEQ ID NO: 189197 - DNA, 25 bp, SARS Virus
actaccatttctcgatttaagactt

SEQ ID NO: 189198 - DNA, 25 bp, SARS Virus
ctaccatttcttcatttaagacttc

SEQ ID NO: 189199 - DNA, 25 bp, SARS Virus
taccatttcttgctttaagacttcg

SEQ ID NO: 189200 - DNA, 25 bp, SARS Virus
accatttcttgacttaagacttcgt

SEQ ID NO: 189201 - DNA, 25 bp, SARS Virus
ccatttcttgatctaagacttcgtt

SEQ ID NO: 189202 - DNA, 25 bp, SARS Virus
catttcttgattcaagacttcgtta

SEQ ID NO: 189203 - DNA, 25 bp, SARS Virus
atttcttgatttcagacttcgttat

SEQ ID NO: 189204 - DNA, 25 bp, SARS Virus
tttcttgatttacgacttcgttatc

SEQ ID NO: 189205 - DNA, 25 bp, SARS Virus
ttcttgatttaacacttcgttatcg

SEQ ID NO: 189206 - DNA, 25 bp, SARS Virus
tcttgatttaagccttcgttatcgg

SEQ ID NO: 189207 - DNA, 25 bp, SARS Virus
cttgatttaagacttcgttatcgga

SEQ ID NO: 189208 - DNA, 25 bp, SARS Virus
ttgatttaagacctcgttatcggac

SEQ ID NO: 189209 - DNA, 25 bp, SARS Virus
tgatttaagactccgttatcggact

SEQ ID NO: 189210 - DNA, 25 bp, SARS Virus
gatttaagacttcgttatcggactt

SEQ ID NO: 189211 - DNA, 25 bp, SARS Virus
atttaagacttccttatcggacttc

SEQ ID NO: 189212 - DNA, 25 bp, SARS Virus
tttaagacttcgctatcggacttct

SEQ ID NO: 189213 - DNA, 25 bp, SARS Virus
ttaagacttcgtcatcggacttctc

SEQ ID NO: 189214 - DNA, 25 bp, SARS Virus
taagacttcgttctcggacttctca

SEQ ID NO: 189215 - DNA, 25 bp, SARS Virus
aagacttcgttaccggacttctcat

SEQ ID NO: 189216 - DNA, 25 bp, SARS Virus
agacttcgttatcggacttctcatc

SEQ ID NO: 189217 - DNA, 25 bp, SARS Virus
gacttcgttatccgacttctcatcg

SEQ ID NO: 189218 - DNA, 25 bp, SARS Virus
acttcgttatcgcacttctcatcgt

SEQ ID NO: 189219 - DNA, 25 bp, SARS Virus
cttcgttatcggccttctcatcgtg

SEQ ID NO: 189220 - DNA, 25 bp, SARS Virus
ttcgttatcggacttctcatcgtgc

SEQ ID NO: 189221 - DNA, 25 bp, SARS Virus
tcgttatcggacctctcatcgtgcc

SEQ ID NO: 189222 - DNA, 25 bp, SARS Virus
cgttatcggactcctcatcgtgcca

SEQ ID NO: 189223 - DNA, 25 bp, SARS Virus
gttatcggacttctcatcgtgccaa

SEQ ID NO: 189224 - DNA, 25 bp, SARS Virus
ttatcggacttcccatcgtgccaat

SEQ ID NO: 189225 - DNA, 25 bp, SARS Virus
tatcggacttctcatcgtgccaata

SEQ ID NO: 189226 - DNA, 25 bp, SARS Virus
atcggacttctcctcgtgccaatag

SEQ ID NO: 189227 - DNA, 25 bp, SARS Virus
tcggacttctcaccgtgccaatagc

SEQ ID NO: 189228 - DNA, 25 bp, SARS Virus
cggacttctcatcgtgccaatagct

SEQ ID NO: 189229 - DNA, 25 bp, SARS Virus
ggacttctcatcctgccaatagctc

SEQ ID NO: 189230 - DNA, 25 bp, SARS Virus
gacttctcatcgcgccaatagctcg

SEQ ID NO: 189231 - DNA, 25 bp, SARS Virus
acttctcatcgtcccaatagctcgt

SEQ ID NO: 189232 - DNA, 25 bp, SARS Virus
cttctcatcgtgccaatagctcgta

SEQ ID NO: 189233 - DNA, 25 bp, SARS Virus
ttctcatcgtgccaatagctcgtaa

SEQ ID NO: 189234 - DNA, 25 bp, SARS Virus
tctcatcgtgcccatagctcgtaaa

SEQ ID NO: 189235 - DNA, 25 bp, SARS Virus
ctcatcgtgccactagctcgtaaag

SEQ ID NO: 189236 - DNA, 25 bp, SARS Virus
tcatcgtgccaacagctcgtaaagg

SEQ ID NO: 189237 - DNA, 25 bp, SARS Virus
catcgtgccaatcgctcgtaaagga

SEQ ID NO: 189238 - DNA, 25 bp, SARS Virus
atcgtgccaatacctcgtaaaggag

SEQ ID NO: 189239 - DNA, 25 bp, SARS Virus
tcgtgccaatagctcgtaaaggagc

SEQ ID NO: 189240 - DNA, 25 bp, SARS Virus
cgtgccaatagcccgtaaaggagcg

SEQ ID NO: 189241 - DNA, 25 bp, SARS Virus
gtgccaatagctcgtaaaggagcgt

SEQ ID NO: 189242 - DNA, 25 bp, SARS Virus
tgccaatagctcctaaaggagcgtg

SEQ ID NO: 189243 - DNA, 25 bp, SARS Virus
gccaatagctcgcaaaggagcgtgt

SEQ ID NO: 189244 - DNA, 25 bp, SARS Virus
ccaatagctcgtcaaggagcgtgtt

SEQ ID NO: 189245 - DNA, 25 bp, SARS Virus
caatagctcgtacaggagcgtgttg

SEQ ID NO: 189246 - DNA, 25 bp, SARS Virus
aatagctcgtaacggagcgtgttgg

SEQ ID NO: 189247 - DNA, 25 bp, SARS Virus
atagctcgtaaacgagcgtgttgga

SEQ ID NO: 189248 - DNA, 25 bp, SARS Virus
tagctcgtaaagcagcgtgttggat

SEQ ID NO: 189249 - DNA, 25 bp, SARS Virus
agctcgtaaaggcgcgtgttggata

SEQ ID NO: 189250 - DNA, 25 bp, SARS Virus
gctcgtaaaggaccgtgttggataa

SEQ ID NO: 189251 - DNA, 25 bp, SARS Virus
ctcgtaaaggagcgtgttggataat

SEQ ID NO: 189252 - DNA, 25 bp, SARS Virus
tcgtaaaggagcctgttggataatt

SEQ ID NO: 189253 - DNA, 25 bp, SARS Virus
cgtaaaggagcgcgttggataatta

SEQ ID NO: 189254 - DNA, 25 bp, SARS Virus
gtaaaggagcgtcttggataattac

SEQ ID NO: 189255 - DNA, 25 bp, SARS Virus
taaaggagcgtgctggataattaca

SEQ ID NO: 189256 - DNA, 25 bp, SARS Virus
aaaggagcgtgtcggataattacag

SEQ ID NO: 189257 - DNA, 25 bp, SARS Virus
aaggagcgtgttcgataattacaga

SEQ ID NO: 189258 - DNA, 25 bp, SARS Virus
aggagcgtgttgcataattacagat

SEQ ID NO: 189259 - DNA, 25 bp, SARS Virus
ggagcgtgttggctaattacagatg

SEQ ID NO: 189260 - DNA, 25 bp, SARS Virus
gagcgtgttggacaattacagatgt

SEQ ID NO: 189261 - DNA, 25 bp, SARS Virus
agcgtgttggatcattacagatgtc

SEQ ID NO: 189262 - DNA, 25 bp, SARS Virus
gcgtgttggatacttacagatgtcg

SEQ ID NO: 189263 - DNA, 25 bp, SARS Virus
cgtgttggataactacagatgtcgt

SEQ ID NO: 189264 - DNA, 25 bp, SARS Virus
gtgttggataatcacagatgtcgtg

SEQ ID NO: 189265 - DNA, 25 bp, SARS Virus
tgttggataattccagatgtcgtgg

SEQ ID NO: 189266 - DNA, 25 bp, SARS Virus
gttggataattacagatgtcgtggg

SEQ ID NO: 189267 - DNA, 25 bp, SARS Virus
ttggataattaccgatgtcgtggga

SEQ ID NO: 189268 - DNA, 25 bp, SARS Virus
tggataattacacatgtcgtgggac

SEQ ID NO: 189269 - DNA, 25 bp, SARS Virus
ggataattacagctgtcgtgggacg

SEQ ID NO: 189270 - DNA, 25 bp, SARS Virus
gataattacagacgtcgtgggacgt

SEQ ID NO: 189271 - DNA, 25 bp, SARS Virus
ataattacagatctcgtgggacgta

SEQ ID NO: 189272 - DNA, 25 bp, SARS Virus
taattacagatgccgtgggacgtac

SEQ ID NO: 189273 - DNA, 25 bp, SARS Virus
aattacagatgtcgtgggacgtacc

SEQ ID NO: 189274 - DNA, 25 bp, SARS Virus
attacagatgtcctgggacgtacct

SEQ ID NO: 189275 - DNA, 25 bp, SARS Virus
ttacagatgtcgcgggacgtaccta

SEQ ID NO: 189276 - DNA, 25 bp, SARS Virus
tacagatgtcgtcggacgtacctat

SEQ ID NO: 189277 - DNA, 25 bp, SARS Virus
acagatgtcgtgcgacgtacctatc

SEQ ID NO: 189278 - DNA, 25 bp, SARS Virus
cagatgtcgtggcacgtacctatcg

SEQ ID NO: 189279 - DNA, 25 bp, SARS Virus
agatgtcgtgggccgtacctatcgt

SEQ ID NO: 189280 - DNA, 25 bp, SARS Virus
gatgtcgtgggacgtacctatcgtt

SEQ ID NO: 189281 - DNA, 25 bp, SARS Virus
atgtcgtgggacctacctatcgttt

SEQ ID NO: 189282 - DNA, 25 bp, SARS Virus
tgtcgtgggacgcacctatcgtttt

SEQ ID NO: 189283 - DNA, 25 bp, SARS Virus
gtcgtgggacgtccctatcgttttg

SEQ ID NO: 189284 - DNA, 25 bp, SARS Virus
tcgtgggacgtacctatcgttttgt

SEQ ID NO: 189285 - DNA, 25 bp, SARS Virus
cgtgggacgtacctatcgttttgtc

SEQ ID NO: 189286 - DNA, 25 bp, SARS Virus
gtgggacgtacccatcgttttgtct

SEQ ID NO: 189287 - DNA, 25 bp, SARS Virus
tgggacgtacctctcgttttgtctg

SEQ ID NO: 189288 - DNA, 25 bp, SARS Virus
gggacgtacctaccgttttgtctgt

SEQ ID NO: 189289 - DNA, 25 bp, SARS Virus
ggacgtacctatcgttttgtctgtt

SEQ ID NO: 189290 - DNA, 25 bp, SARS Virus
gacgtacctatccttttgtctgttt

SEQ ID NO: 189291 - DNA, 25 bp, SARS Virus
acgtacctatcgctttgtctgtttt

SEQ ID NO: 189292 - DNA, 25 bp, SARS Virus
cgtacctatcgtcttgtctgttttc

SEQ ID NO: 189293 - DNA, 25 bp, SARS Virus
gtacctatcgttctgtctgttttct

SEQ ID NO: 189294 - DNA, 25 bp, SARS Virus
tacctatcgtttcgtctgttttctc

SEQ ID NO: 189295 - DNA, 25 bp, SARS Virus
acctatcgttttctctgttttctct

SEQ ID NO: 189296 - DNA, 25 bp, SARS Virus
cctatcgttttgcctgttttctctt

SEQ ID NO: 189297 - DNA, 25 bp, SARS Virus
ctatcgttttgtctgttttctcttt

SEQ ID NO: 189298 - DNA, 25 bp, SARS Virus
tatcgttttgtccgttttctctttg

SEQ ID NO: 189299 - DNA, 25 bp, SARS Virus
atcgttttgtctcttttctctttgg

SEQ ID NO: 189300 - DNA, 25 bp, SARS Virus
tcgttttgtctgctttctctttggt

SEQ ID NO: 189301 - DNA, 25 bp, SARS Virus
cgttttgtctgtcttctctttggta

SEQ ID NO: 189302 - DNA, 25 bp, SARS Virus
gttttgtctgttctctctttggtag

SEQ ID NO: 189303 - DNA, 25 bp, SARS Virus
ttttgtctgtttcctctttggtaga

SEQ ID NO: 189304 - DNA, 25 bp, SARS Virus
tttgtctgttttctctttggtagaa

SEQ ID NO: 189305 - DNA, 25 bp, SARS Virus
ttgtctgttttccctttggtagaag

SEQ ID NO: 189306 - DNA, 25 bp, SARS Virus
tgtctgttttctctttggtagaaga

SEQ ID NO: 189307 - DNA, 25 bp, SARS Virus
gtctgttttctccttggtagaagag

SEQ ID NO: 189308 - DNA, 25 bp, SARS Virus
tctgttttctctctggtagaagagc

SEQ ID NO: 189309 - DNA, 25 bp, SARS Virus
ctgttttctcttcggtagaagagct

SEQ ID NO: 189310 - DNA, 25 bp, SARS Virus
tgttttctctttcgtagaagagctt

SEQ ID NO: 189311 - DNA, 25 bp, SARS Virus
gttttctctttgctagaagagcttt

SEQ ID NO: 189312 - DNA, 25 bp, SARS Virus
ttttctctttggcagaagagctttc

SEQ ID NO: 189313 - DNA, 25 bp, SARS Virus
tttctctttggtcgaagagctttcg

SEQ ID NO: 189314 - DNA, 25 bp, SARS Virus
ttctctttggtacaagagctttcga

SEQ ID NO: 189315 - DNA, 25 bp, SARS Virus
tctctttggtagcagagctttcgaa

SEQ ID NO: 189316 - DNA, 25 bp, SARS Virus
ctctttggtagacgagctttcgaag

SEQ ID NO: 189317 - DNA, 25 bp, SARS Virus
tctttggtagaacagctttcgaagt

SEQ ID NO: 189318 - DNA, 25 bp, SARS Virus
ctttggtagaagcgctttcgaagtc

SEQ ID NO: 189319 - DNA, 25 bp, SARS Virus
tttggtagaagacctttcgaagtca

SEQ ID NO: 189320 - DNA, 25 bp, SARS Virus
ttggtagaagagctttcgaagtcaa

SEQ ID NO: 189321 - DNA, 25 bp, SARS Virus
tggtagaagagccttcgaagtcaac

SEQ ID NO: 189322 - DNA, 25 bp, SARS Virus
ggtagaagagctctcgaagtcaaca

SEQ ID NO: 189323 - DNA, 25 bp, SARS Virus
gtagaagagcttccgaagtcaacac

SEQ ID NO: 189324 - DNA, 25 bp, SARS Virus
tagaagagctttcgaagtcaacaca

SEQ ID NO: 189325 - DNA, 25 bp, SARS Virus
agaagagctttccaagtcaacacag

SEQ ID NO: 189326 - DNA, 25 bp, SARS Virus
gaagagctttcgcagtcaacacaga

SEQ ID NO: 189327 - DNA, 25 bp, SARS Virus
aagagctttcgacgtcaacacagaa

SEQ ID NO: 189328 - DNA, 25 bp, SARS Virus
agagctttcgaactcaacacagaaa

SEQ ID NO: 189329 - DNA, 25 bp, SARS Virus
gagctttcgaagccaacacagaaaa

SEQ ID NO: 189330 - DNA, 25 bp, SARS Virus
agctttcgaagtcaacacagaaaac

SEQ ID NO: 189331 - DNA, 25 bp, SARS Virus
gctttcgaagtccacacagaaaacg

SEQ ID NO: 189332 - DNA, 25 bp, SARS Virus
ctttcgaagtcaccacagaaaacgt

SEQ ID NO: 189333 - DNA, 25 bp, SARS Virus
tttcgaagtcaacacagaaaacgtt

SEQ ID NO: 189334 - DNA, 25 bp, SARS Virus
ttcgaagtcaacccagaaaacgttc

SEQ ID NO: 189335 - DNA, 25 bp, SARS Virus
tcgaagtcaacacagaaaacgttct

SEQ ID NO: 189336 - DNA, 25 bp, SARS Virus
cgaagtcaacaccgaaaacgttctt

SEQ ID NO: 189337 - DNA, 25 bp, SARS Virus
gaagtcaacacacaaaacgttcttc

SEQ ID NO: 189338 - DNA, 25 bp, SARS Virus
aagtcaacacagcaaacgttcttct

SEQ ID NO: 189339 - DNA, 25 bp, SARS Virus
agtcaacacagacaacgttcttctt

SEQ ID NO: 189340 - DNA, 25 bp, SARS Virus
gtcaacacagaacacgttcttctta

SEQ ID NO: 189341 - DNA, 25 bp, SARS Virus
tcaacacagaaaccgttcttcttat

SEQ ID NO: 189342 - DNA, 25 bp, SARS Virus
caacacagaaaacgttcttcttata

SEQ ID NO: 189343 - DNA, 25 bp, SARS Virus
aacacagaaaaccttcttcttatag

SEQ ID NO: 189344 - DNA, 25 bp, SARS Virus
acacagaaaacgctcttcttatagt

SEQ ID NO: 189345 - DNA, 25 bp, SARS Virus
cacagaaaacgtccttcttatagta

SEQ ID NO: 189346 - DNA, 25 bp, SARS Virus
acagaaaacgttcttcttatagtaa

SEQ ID NO: 189347 - DNA, 25 bp, SARS Virus
cagaaaacgttcctcttatagtaac

SEQ ID NO: 189348 - DNA, 25 bp, SARS Virus
agaaaacgttctccttatagtaaca

SEQ ID NO: 189349 - DNA, 25 bp, SARS Virus
gaaaacgttcttcttatagtaacac

SEQ ID NO: 189350 - DNA, 25 bp, SARS Virus
aaaacgttcttcctatagtaacacc

SEQ ID NO: 189351 - DNA, 25 bp, SARS Virus
aaacgttcttctcatagtaacacct

SEQ ID NO: 189352 - DNA, 25 bp, SARS Virus
aacgttcttcttctagtaacacctc

SEQ ID NO: 189353 - DNA, 25 bp, SARS Virus
acgttcttcttacagtaacacctca

SEQ ID NO: 189354 - DNA, 25 bp, SARS Virus
cgttcttcttatcgtaacacctcaa

SEQ ID NO: 189355 - DNA, 25 bp, SARS Virus
gttcttcttatactaacacctcaac

SEQ ID NO: 189356 - DNA, 25 bp, SARS Virus
ttcttcttatagcaacacctcaaca

SEQ ID NO: 189357 - DNA, 25 bp, SARS Virus
tcttcttatagtcacacctcaacat

SEQ ID NO: 189358 - DNA, 25 bp, SARS Virus
cttcttatagtaccacctcaacatg

SEQ ID NO: 189359 - DNA, 25 bp, SARS Virus
ttcttatagtaacacctcaacatgt

SEQ ID NO: 189360 - DNA, 25 bp, SARS Virus
tcttatagtaacccctcaacatgtg

SEQ ID NO: 189361 - DNA, 25 bp, SARS Virus
cttatagtaacacctcaacatgtgt

SEQ ID NO: 189362 - DNA, 25 bp, SARS Virus
ttatagtaacacctcaacatgtgta

SEQ ID NO: 189363 - DNA, 25 bp, SARS Virus
tatagtaacaccccaacatgtgtaa

SEQ ID NO: 189364 - DNA, 25 bp, SARS Virus
atagtaacacctcaacatgtgtaac

SEQ ID NO: 189365 - DNA, 25 bp, SARS Virus
tagtaacacctccacatgtgtaaca

SEQ ID NO: 189366 - DNA, 25 bp, SARS Virus
agtaacacctcaccatgtgtaacac

SEQ ID NO: 189367 - DNA, 25 bp, SARS Virus
gtaacacctcaacatgtgtaacacg

SEQ ID NO: 189368 - DNA, 25 bp, SARS Virus
taacacctcaacctgtgtaacacgg

SEQ ID NO: 189369 - DNA, 25 bp, SARS Virus
aacacctcaacacgtgtaacacggg

SEQ ID NO: 189370 - DNA, 25 bp, SARS Virus
acacctcaacatctgtaacacgggt

SEQ ID NO: 189371 - DNA, 25 bp, SARS Virus
cacctcaacatgcgtaacacgggtg

SEQ ID NO: 189372 - DNA, 25 bp, SARS Virus
acctcaacatgtctaacacgggtgt

SEQ ID NO: 189373 - DNA, 25 bp, SARS Virus
cctcaacatgtgcaacacgggtgtt

SEQ ID NO: 189374 - DNA, 25 bp, SARS Virus
ctcaacatgtgtcacacgggtgtta

SEQ ID NO: 189375 - DNA, 25 bp, SARS Virus
tcaacatgtgtaccacgggtgttaa

SEQ ID NO: 189376 - DNA, 25 bp, SARS Virus
caacatgtgtaacacgggtgttaaa

SEQ ID NO: 189377 - DNA, 25 bp, SARS Virus
gttggtagtgcgggtaacaactatt

SEQ ID NO: 189378 - DNA, 25 bp, SARS Virus
ttggtagtgcgcgtaacaactatta

SEQ ID NO: 189379 - DNA, 25 bp, SARS Virus
tggtagtgcgcggaacaactattac

SEQ ID NO: 189380 - DNA, 25 bp, SARS Virus
ggtagtgcgcgtgacaactattaca

SEQ ID NO: 189381 - DNA, 25 bp, SARS Virus
gtagtgcgcgtagcaactattacaa

SEQ ID NO: 189382 - DNA, 25 bp, SARS Virus
tagtgcgcgtaagaactattacaac

SEQ ID NO: 189383 - DNA, 25 bp, SARS Virus
agtgcgcgtaacgactattacaaca

SEQ ID NO: 189384 - DNA, 25 bp, SARS Virus
gtgcgcgtaacagctattacaacaa

SEQ ID NO: 189385 - DNA, 25 bp, SARS Virus
tgcgcgtaacaagtattacaacaat

SEQ ID NO: 189386 - DNA, 25 bp, SARS Virus
gcgcgtaacaacgattacaacaatt

SEQ ID NO: 189387 - DNA, 25 bp, SARS Virus
cgcgtaacaactgttacaacaattc

SEQ ID NO: 189388 - DNA, 25 bp, SARS Virus
gcgtaacaactagtacaacaattca

SEQ ID NO: 189389 - DNA, 25 bp, SARS Virus
cgtaacaactatgacaacaattcac

SEQ ID NO: 189390 - DNA, 25 bp, SARS Virus
gtaacaactattgcaacaattcacg

SEQ ID NO: 189391 - DNA, 25 bp, SARS Virus
taacaactattagaacaattcacgt

SEQ ID NO: 189392 - DNA, 25 bp, SARS Virus
aacaactattacgacaattcacgta

SEQ ID NO: 189393 - DNA, 25 bp, SARS Virus
acaactattacagcaattcacgtag

SEQ ID NO: 189394 - DNA, 25 bp, SARS Virus
caactattacaagaattcacgtagt

SEQ ID NO: 189395 - DNA, 25 bp, SARS Virus
aactattacaacgattcacgtagta

SEQ ID NO: 189396 - DNA, 25 bp, SARS Virus
actattacaacagttcacgtagtaa

SEQ ID NO: 189397 - DNA, 25 bp, SARS Virus
ctattacaacaagtcacgtagtaat

SEQ ID NO: 189398 - DNA, 25 bp, SARS Virus
tattacaacaatgcacgtagtaata

SEQ ID NO: 189399 - DNA, 25 bp, SARS Virus
attacaacaattgacgtagtaatag

SEQ ID NO: 189400 - DNA, 25 bp, SARS Virus
ttacaacaattcgcgtagtaatagt

SEQ ID NO: 189401 - DNA, 25 bp, SARS Virus
tacaacaattcaggtagtaatagtt

SEQ ID NO: 189402 - DNA, 25 bp, SARS Virus
acaacaattcacgtagtaatagttc

SEQ ID NO: 189403 - DNA, 25 bp, SARS Virus
caacaattcacggagtaatagttcg

SEQ ID NO: 189404 - DNA, 25 bp, SARS Virus
aacaattcacgtggtaatagttcga

SEQ ID NO: 189405 - DNA, 25 bp, SARS Virus
acaattcacgtagtaatagttcgaa

SEQ ID NO: 189406 - DNA, 25 bp, SARS Virus
caattcacgtaggaatagttcgaag

SEQ ID NO: 189407 - DNA, 25 bp, SARS Virus
aattcacgtagtgatagttcgaagg

SEQ ID NO: 189408 - DNA, 25 bp, SARS Virus
attcacgtagtagtagttcgaagga

SEQ ID NO: 189409 - DNA, 25 bp, SARS Virus
ttcacgtagtaagagttcgaaggat

SEQ ID NO: 189410 - DNA, 25 bp, SARS Virus
tcacgtagtaatggttcgaaggatt

SEQ ID NO: 189411 - DNA, 25 bp, SARS Virus
cacgtagtaatagttcgaaggattc

SEQ ID NO: 189412 - DNA, 25 bp, SARS Virus
acgtagtaataggtcgaaggattcg

SEQ ID NO: 189413 - DNA, 25 bp, SARS Virus
cgtagtaatagtgcgaaggattcgt

SEQ ID NO: 189414 - DNA, 25 bp, SARS Virus
gtagtaatagttggaaggattcgta

SEQ ID NO: 189415 - DNA, 25 bp, SARS Virus
tagtaatagttcgaaggattcgtat

SEQ ID NO: 189416 - DNA, 25 bp, SARS Virus
agtaatagttcggaggattcgtatc

SEQ ID NO: 189417 - DNA, 25 bp, SARS Virus
gtaatagttcgagggattcgtatca

SEQ ID NO: 189418 - DNA, 25 bp, SARS Virus
taatagttcgaaggattcgtatcac

SEQ ID NO: 189419 - DNA, 25 bp, SARS Virus
aatagttcgaaggattcgtatcact

SEQ ID NO: 189420 - DNA, 25 bp, SARS Virus
atagttcgaagggttcgtatcactt

SEQ ID NO: 189421 - DNA, 25 bp, SARS Virus
tagttcgaaggagtcgtatcacttc

SEQ ID NO: 189422 - DNA, 25 bp, SARS Virus
agttcgaaggatgcgtatcacttct

SEQ ID NO: 189423 - DNA, 25 bp, SARS Virus
gttcgaaggattggtatcacttctc

SEQ ID NO: 189424 - DNA, 25 bp, SARS Virus
ttcgaaggattcgtatcacttctcg

SEQ ID NO: 189425 - DNA, 25 bp, SARS Virus
tcgaaggattcggatcacttctcgt

SEQ ID NO: 189426 - DNA, 25 bp, SARS Virus
cgaaggattcgtgtcacttctcgta

SEQ ID NO: 189427 - DNA, 25 bp, SARS Virus
gaaggattcgtagcacttctcgtaa

SEQ ID NO: 189428 - DNA, 25 bp, SARS Virus
aaggattcgtatgacttctcgtaac

SEQ ID NO: 189429 - DNA, 25 bp, SARS Virus
aggattcgtatcgcttctcgtaaca

SEQ ID NO: 189430 - DNA, 25 bp, SARS Virus
ggattcgtatcagttctcgtaacaa

SEQ ID NO: 189431 - DNA, 25 bp, SARS Virus
gattcgtatcacgtctcgtaacaaa

SEQ ID NO: 189432 - DNA, 25 bp, SARS Virus
attcgtatcactgctcgtaacaaac

SEQ ID NO: 189433 - DNA, 25 bp, SARS Virus
ttcgtatcacttgtcgtaacaaacg

SEQ ID NO: 189434 - DNA, 25 bp, SARS Virus
tcgtatcacttcgcgtaacaaacgt

SEQ ID NO: 189435 - DNA, 25 bp, SARS Virus
cgtatcacttctggtaacaaacgta

SEQ ID NO: 189436 - DNA, 25 bp, SARS Virus
gtatcacttctcgtaacaaacgtat

SEQ ID NO: 189437 - DNA, 25 bp, SARS Virus
tatcacttctcggaacaaacgtatc

SEQ ID NO: 189438 - DNA, 25 bp, SARS Virus
atcacttctcgtgacaaacgtatcg

SEQ ID NO: 189439 - DNA, 25 bp, SARS Virus
tcacttctcgtagcaaacgtatcgt

SEQ ID NO: 189440 - DNA, 25 bp, SARS Virus
cacttctcgtaagaaacgtatcgtg

SEQ ID NO: 189441 - DNA, 25 bp, SARS Virus
acttctcgtaacgaacgtatcgtga

SEQ ID NO: 189442 - DNA, 25 bp, SARS Virus
cttctcgtaacagacgtatcgtgat

SEQ ID NO: 189443 - DNA, 25 bp, SARS Virus
ttctcgtaacaagcgtatcgtgatc

SEQ ID NO: 189444 - DNA, 25 bp, SARS Virus
tctcgtaacaaaggtatcgtgatca

SEQ ID NO: 189445 - DNA, 25 bp, SARS Virus
ctcgtaacaaacgtatcgtgatcaa

SEQ ID NO: 189446 - DNA, 25 bp, SARS Virus
tcgtaacaaacggatcgtgatcaat

SEQ ID NO: 189447 - DNA, 25 bp, SARS Virus
cgtaacaaacgtgtcgtgatcaatg

SEQ ID NO: 189448 - DNA, 25 bp, SARS Virus
gtaacaaacgtagcgtgatcaatga

SEQ ID NO: 189449 - DNA, 25 bp, SARS Virus
taacaaacgtatggtgatcaatgaa

SEQ ID NO: 189450 - DNA, 25 bp, SARS Virus
aacaaacgtatcgtgatcaatgaaa

SEQ ID NO: 189451 - DNA, 25 bp, SARS Virus
acaaacgtatcgggatcaatgaaaa

SEQ ID NO: 189452 - DNA, 25 bp, SARS Virus
caaacgtatcgtgatcaatgaaaac

SEQ ID NO: 189453 - DNA, 25 bp, SARS Virus
aaacgtatcgtggtcaatgaaaacg

SEQ ID NO: 189454 - DNA, 25 bp, SARS Virus
aacgtatcgtgagcaatgaaaacgg

SEQ ID NO: 189455 - DNA, 25 bp, SARS Virus
acgtatcgtgatgaatgaaaacggg

SEQ ID NO: 189456 - DNA, 25 bp, SARS Virus
cgtatcgtgatcgatgaaaacggga

SEQ ID NO: 189457 - DNA, 25 bp, SARS Virus
gtatcgtgatcagtgaaaacgggag

SEQ ID NO: 189458 - DNA, 25 bp, SARS Virus
tatcgtgatcaaggaaaacgggaga

SEQ ID NO: 189459 - DNA, 25 bp, SARS Virus
atcgtgatcaatgaaaacgggagaa

SEQ ID NO: 189460 - DNA, 25 bp, SARS Virus
tcgtgatcaatggaaacgggagaac

SEQ ID NO: 189461 - DNA, 25 bp, SARS Virus
cgtgatcaatgagaacgggagaaca

SEQ ID NO: 189462 - DNA, 25 bp, SARS Virus
gtgatcaatgaagacgggagaacag

SEQ ID NO: 189463 - DNA, 25 bp, SARS Virus
tgatcaatgaaagcgggagaacagg

SEQ ID NO: 189464 - DNA, 25 bp, SARS Virus
gatcaatgaaaaggggagaacagga

SEQ ID NO: 189465 - DNA, 25 bp, SARS Virus
atcaatgaaaacgggagaacaggag

SEQ ID NO: 189466 - DNA, 25 bp, SARS Virus
tcaatgaaaacgggagaacaggagt

SEQ ID NO: 189467 - DNA, 25 bp, SARS Virus
caatgaaaacgggagaacaggagtc

SEQ ID NO: 189468 - DNA, 25 bp, SARS Virus
aatgaaaacgggggaacaggagtct

SEQ ID NO: 189469 - DNA, 25 bp, SARS Virus
atgaaaacgggagaacaggagtcta

SEQ ID NO: 189470 - DNA, 25 bp, SARS Virus
tgaaaacgggaggacaggagtctag

SEQ ID NO: 189471 - DNA, 25 bp, SARS Virus
gaaaacgggagagcaggagtctaga

SEQ ID NO: 189472 - DNA, 25 bp, SARS Virus
aaaacgggagaagaggagtctagaa

SEQ ID NO: 189473 - DNA, 25 bp, SARS Virus
aaacgggagaacgggagtctagaac

SEQ ID NO: 189474 - DNA, 25 bp, SARS Virus
aacgggagaacaggagtctagaacg

SEQ ID NO: 189475 - DNA, 25 bp, SARS Virus
acgggagaacaggagtctagaacgg

SEQ ID NO: 189476 - DNA, 25 bp, SARS Virus
cgggagaacaggggtctagaacgga

SEQ ID NO: 189477 - DNA, 25 bp, SARS Virus
gggagaacaggagtctagaacggac

SEQ ID NO: 189478 - DNA, 25 bp, SARS Virus
ggagaacaggaggctagaacggaca

SEQ ID NO: 189479 - DNA, 25 bp, SARS Virus
gagaacaggagtgtagaacggacaa

SEQ ID NO: 189480 - DNA, 25 bp, SARS Virus
agaacaggagtcgagaacggacaaa

SEQ ID NO: 189481 - DNA, 25 bp, SARS Virus
gaacaggagtctggaacggacaaac

SEQ ID NO: 189482 - DNA, 25 bp, SARS Virus
aacaggagtctagaacggacaaaca

SEQ ID NO: 189483 - DNA, 25 bp, SARS Virus
acaggagtctaggacggacaaacat

SEQ ID NO: 189484 - DNA, 25 bp, SARS Virus
caggagtctagagcggacaaacatg

SEQ ID NO: 189485 - DNA, 25 bp, SARS Virus
aggagtctagaagggacaaacatgt

SEQ ID NO: 189486 - DNA, 25 bp, SARS Virus
ggagtctagaacggacaaacatgta

SEQ ID NO: 189487 - DNA, 25 bp, SARS Virus
gagtctagaacggacaaacatgtaa

SEQ ID NO: 189488 - DNA, 25 bp, SARS Virus
agtctagaacgggcaaacatgtaaa

SEQ ID NO: 189489 - DNA, 25 bp, SARS Virus
gtctagaacggagaaacatgtaaac

SEQ ID NO: 189490 - DNA, 25 bp, SARS Virus
tctagaacggacgaacatgtaaacc

SEQ ID NO: 189491 - DNA, 25 bp, SARS Virus
ctagaacggacagacatgtaaaccc

SEQ ID NO: 189492 - DNA, 25 bp, SARS Virus
tagaacggacaagcatgtaaaccca

SEQ ID NO: 189493 - DNA, 25 bp, SARS Virus
agaacggacaaagatgtaaacccag

SEQ ID NO: 189494 - DNA, 25 bp, SARS Virus
gaacggacaaacgtgtaaacccagt

SEQ ID NO: 189495 - DNA, 25 bp, SARS Virus
aacggacaaacaggtaaacccagta

SEQ ID NO: 189496 - DNA, 25 bp, SARS Virus
acggacaaacatgtaaacccagtat

SEQ ID NO: 189497 - DNA, 25 bp, SARS Virus
cggacaaacatggaaacccagtatc

SEQ ID NO: 189498 - DNA, 25 bp, SARS Virus
ggacaaacatgtgaacccagtatcg

SEQ ID NO: 189499 - DNA, 25 bp, SARS Virus
gacaaacatgtagacccagtatcgg

SEQ ID NO: 189500 - DNA, 25 bp, SARS Virus
acaaacatgtaagcccagtatcgga

SEQ ID NO: 189501 - DNA, 25 bp, SARS Virus
caaacatgtaaagccagtatcggac

SEQ ID NO: 189502 - DNA, 25 bp, SARS Virus
aaacatgtaaacgcagtatcggact

SEQ ID NO: 189503 - DNA, 25 bp, SARS Virus
aacatgtaaaccgagtatcggacta

SEQ ID NO: 189504 - DNA, 25 bp, SARS Virus
acatgtaaacccggtatcggactag

SEQ ID NO: 189505 - DNA, 25 bp, SARS Virus
catgtaaacccagtatcggactaga

SEQ ID NO: 189506 - DNA, 25 bp, SARS Virus
atgtaaacccaggatcggactagac

SEQ ID NO: 189507 - DNA, 25 bp, SARS Virus
tgtaaacccagtgtcggactagacg

SEQ ID NO: 189508 - DNA, 25 bp, SARS Virus
gtaaacccagtagcggactagacgg

SEQ ID NO: 189509 - DNA, 25 bp, SARS Virus
taaacccagtatgggactagacggt

SEQ ID NO: 189510 - DNA, 25 bp, SARS Virus
aaacccagtatcggactagacggta

SEQ ID NO: 189511 - DNA, 25 bp, SARS Virus
aacccagtatcggactagacggtag

SEQ ID NO: 189512 - DNA, 25 bp, SARS Virus
acccagtatcgggctagacggtaga

SEQ ID NO: 189513 - DNA, 25 bp, SARS Virus
cccagtatcggagtagacggtagaa

SEQ ID NO: 189514 - DNA, 25 bp, SARS Virus
ccagtatcggacgagacggtagaaa

SEQ ID NO: 189515 - DNA, 25 bp, SARS Virus
cagtatcggactggacggtagaaaa

SEQ ID NO: 189516 - DNA, 25 bp, SARS Virus
agtatcggactagacggtagaaaag

SEQ ID NO: 189517 - DNA, 25 bp, SARS Virus
gtatcggactaggcggtagaaaagg

SEQ ID NO: 189518 - DNA, 25 bp, SARS Virus
tatcggactagagggtagaaaaggt

SEQ ID NO: 189519 - DNA, 25 bp, SARS Virus
atcggactagacggtagaaaaggtt

SEQ ID NO: 189520 - DNA, 25 bp, SARS Virus
tcggactagacggtagaaaaggttg

SEQ ID NO: 189521 - DNA, 25 bp, SARS Virus
cggactagacgggagaaaaggttga

SEQ ID NO: 189522 - DNA, 25 bp, SARS Virus
ggactagacggtggaaaaggttgaa

SEQ ID NO: 189523 - DNA, 25 bp, SARS Virus
gactagacggtagaaaaggttgaac

SEQ ID NO: 189524 - DNA, 25 bp, SARS Virus
actagacggtaggaaaggttgaacg

SEQ ID NO: 189525 - DNA, 25 bp, SARS Virus
ctagacggtagagaaggttgaacgc

SEQ ID NO: 189526 - DNA, 25 bp, SARS Virus
tagacggtagaagaggttgaacgca

SEQ ID NO: 189527 - DNA, 25 bp, SARS Virus
agacggtagaaagggttgaacgcaa

SEQ ID NO: 189528 - DNA, 25 bp, SARS Virus
gacggtagaaaaggttgaacgcaac

SEQ ID NO: 189529 - DNA, 25 bp, SARS Virus
acggtagaaaaggttgaacgcaacg

SEQ ID NO: 189530 - DNA, 25 bp, SARS Virus
cggtagaaaagggtgaacgcaacgt

SEQ ID NO: 189531 - DNA, 25 bp, SARS Virus
ggtagaaaaggtggaacgcaacgta

SEQ ID NO: 189532 - DNA, 25 bp, SARS Virus
gtagaaaaggttgaacgcaacgtac

SEQ ID NO: 189533 - DNA, 25 bp, SARS Virus
tagaaaaggttggacgcaacgtacc

SEQ ID NO: 189534 - DNA, 25 bp, SARS Virus
agaaaaggttgagcgcaacgtaccg

SEQ ID NO: 189535 - DNA, 25 bp, SARS Virus
gaaaaggttgaaggcaacgtaccgt

SEQ ID NO: 189536 - DNA, 25 bp, SARS Virus
aaaaggttgaacgcaacgtaccgtc

SEQ ID NO: 189537 - DNA, 25 bp, SARS Virus
aaaggttgaacggaacgtaccgtcg

SEQ ID NO: 189538 - DNA, 25 bp, SARS Virus
aaggttgaacgcgacgtaccgtcgt

SEQ ID NO: 189539 - DNA, 25 bp, SARS Virus
aggttgaacgcagcgtaccgtcgta

SEQ ID NO: 189540 - DNA, 25 bp, SARS Virus
ggttgaacgcaaggtaccgtcgtag

SEQ ID NO: 189541 - DNA, 25 bp, SARS Virus
gttgaacgcaacgtaccgtcgtagt

SEQ ID NO: 189542 - DNA, 25 bp, SARS Virus
ttgaacgcaacggaccgtcgtagtg

SEQ ID NO: 189543 - DNA, 25 bp, SARS Virus
tgaacgcaacgtgccgtcgtagtgc

SEQ ID NO: 189544 - DNA, 25 bp, SARS Virus
gaacgcaacgtagcgtcgtagtgcc

SEQ ID NO: 189545 - DNA, 25 bp, SARS Virus
aacgcaacgtacggtcgtagtgcca

SEQ ID NO: 189546 - DNA, 25 bp, SARS Virus
acgcaacgtaccgtcgtagtgccag

SEQ ID NO: 189547 - DNA, 25 bp, SARS Virus
cgcaacgtaccggcgtagtgccagt

SEQ ID NO: 189548 - DNA, 25 bp, SARS Virus
gcaacgtaccgtggtagtgccagtt

SEQ ID NO: 189549 - DNA, 25 bp, SARS Virus
caacgtaccgtcgtagtgccagttt

SEQ ID NO: 189550 - DNA, 25 bp, SARS Virus
aacgtaccgtcggagtgccagtttg

SEQ ID NO: 189551 - DNA, 25 bp, SARS Virus
acgtaccgtcgtggtgccagtttga

SEQ ID NO: 189552 - DNA, 25 bp, SARS Virus
cgtaccgtcgtagtgccagtttgag

SEQ ID NO: 189553 - DNA, 25 bp, SARS Virus
gtaccgtcgtagggccagtttgagt

SEQ ID NO: 189554 - DNA, 25 bp, SARS Virus
taccgtcgtagtgccagtttgagtc

SEQ ID NO: 189555 - DNA, 25 bp, SARS Virus
accgtcgtagtggcagtttgagtct

SEQ ID NO: 189556 - DNA, 25 bp, SARS Virus
ccgtcgtagtgcgagtttgagtcta

SEQ ID NO: 189557 - DNA, 25 bp, SARS Virus
cgtcgtagtgccggtttgagtctaa

SEQ ID NO: 189558 - DNA, 25 bp, SARS Virus
gtcgtagtgccagtttgagtctaaa

SEQ ID NO: 189559 - DNA, 25 bp, SARS Virus
tcgtagtgccaggttgagtctaaat

SEQ ID NO: 189560 - DNA, 25 bp, SARS Virus
cgtagtgccagtgtgagtctaaatc

SEQ ID NO: 189561 - DNA, 25 bp, SARS Virus
gtagtgccagttggagtctaaatcg

SEQ ID NO: 189562 - DNA, 25 bp, SARS Virus
tagtgccagtttgagtctaaatcgg

SEQ ID NO: 189563 - DNA, 25 bp, SARS Virus
agtgccagtttgggtctaaatcggt

SEQ ID NO: 189564 - DNA, 25 bp, SARS Virus
gtgccagtttgagtctaaatcggtg

SEQ ID NO: 189565 - DNA, 25 bp, SARS Virus
tgccagtttgaggctaaatcggtgt

SEQ ID NO: 189566 - DNA, 25 bp, SARS Virus
gccagtttgagtgtaaatcggtgta

SEQ ID NO: 189567 - DNA, 25 bp, SARS Virus
ccagtttgagtcgaaatcggtgtaa

SEQ ID NO: 189568 - DNA, 25 bp, SARS Virus
cagtttgagtctgaatcggtgtaag

SEQ ID NO: 189569 - DNA, 25 bp, SARS Virus
agtttgagtctagatcggtgtaagt

SEQ ID NO: 189570 - DNA, 25 bp, SARS Virus
gtttgagtctaagtcggtgtaagtt

SEQ ID NO: 189571 - DNA, 25 bp, SARS Virus
tttgagtctaaagcggtgtaagttt

SEQ ID NO: 189572 - DNA, 25 bp, SARS Virus
ttgagtctaaatgggtgtaagtttc

SEQ ID NO: 189573 - DNA, 25 bp, SARS Virus
tgagtctaaatcggtgtaagtttct

SEQ ID NO: 189574 - DNA, 25 bp, SARS Virus
gagtctaaatcggtgtaagtttcta

SEQ ID NO: 189575 - DNA, 25 bp, SARS Virus
agtctaaatcggggtaagtttctaa

SEQ ID NO: 189576 - DNA, 25 bp, SARS Virus
gtctaaatcggtgtaagtttctaaa

SEQ ID NO: 189577 - DNA, 25 bp, SARS Virus
tctaaatcggtggaagtttctaaag

SEQ ID NO: 189578 - DNA, 25 bp, SARS Virus
ctaaatcggtgtgagtttctaaaga

SEQ ID NO: 189579 - DNA, 25 bp, SARS Virus
taaatcggtgtaggtttctaaagaa

SEQ ID NO: 189580 - DNA, 25 bp, SARS Virus
aaatcggtgtaagtttctaaagaaa

SEQ ID NO: 189581 - DNA, 25 bp, SARS Virus
aatcggtgtaaggttctaaagaaat

SEQ ID NO: 189582 - DNA, 25 bp, SARS Virus
atcggtgtaagtgtctaaagaaatt

SEQ ID NO: 189583 - DNA, 25 bp, SARS Virus
tcggtgtaagttgctaaagaaattg

SEQ ID NO: 189584 - DNA, 25 bp, SARS Virus
cggtgtaagtttgtaaagaaattga

SEQ ID NO: 189585 - DNA, 25 bp, SARS Virus
ggtgtaagtttcgaaagaaattgaa

SEQ ID NO: 189586 - DNA, 25 bp, SARS Virus
gtgtaagtttctgaagaaattgaaa

SEQ ID NO: 189587 - DNA, 25 bp, SARS Virus
tgtaagtttctagagaaattgaaaa

SEQ ID NO: 189588 - DNA, 25 bp, SARS Virus
gtaagtttctaaggaaattgaaaaa

SEQ ID NO: 189589 - DNA, 25 bp, SARS Virus
taagtttctaaagaaattgaaaaac

SEQ ID NO: 189590 - DNA, 25 bp, SARS Virus
aagtttctaaaggaattgaaaaact

SEQ ID NO: 189591 - DNA, 25 bp, SARS Virus
agtttctaaagagattgaaaaactc

SEQ ID NO: 189592 - DNA, 25 bp, SARS Virus
gtttctaaagaagttgaaaaactct

SEQ ID NO: 189593 - DNA, 25 bp, SARS Virus
tttctaaagaaagtgaaaaactctt

SEQ ID NO: 189594 - DNA, 25 bp, SARS Virus
ttctaaagaaatggaaaaactcttg

SEQ ID NO: 189595 - DNA, 25 bp, SARS Virus
tctaaagaaattgaaaaactcttgc

SEQ ID NO: 189596 - DNA, 25 bp, SARS Virus
ctaaagaaattggaaaactcttgct

SEQ ID NO: 189597 - DNA, 25 bp, SARS Virus
taaagaaattgagaaactcttgctg

SEQ ID NO: 189598 - DNA, 25 bp, SARS Virus
aaagaaattgaagaactcttgctga

SEQ ID NO: 189599 - DNA, 25 bp, SARS Virus
aagaaattgaaagactcttgctgaa

SEQ ID NO: 189600 - DNA, 25 bp, SARS Virus
agaaattgaaaagctcttgctgaag

SEQ ID NO: 189601 - DNA, 25 bp, SARS Virus
gaaattgaaaaagtcttgctgaagt

SEQ ID NO: 189602 - DNA, 25 bp, SARS Virus
aaattgaaaaacgcttgctgaagtc

SEQ ID NO: 189603 - DNA, 25 bp, SARS Virus
aattgaaaaactgttgctgaagtct

SEQ ID NO: 189604 - DNA, 25 bp, SARS Virus
attgaaaaactcgtgctgaagtctt

SEQ ID NO: 189605 - DNA, 25 bp, SARS Virus
ttgaaaaactctggctgaagtctta

SEQ ID NO: 189606 - DNA, 25 bp, SARS Virus
tgaaaaactcttgctgaagtcttag

SEQ ID NO: 189607 - DNA, 25 bp, SARS Virus
gaaaaactcttggtgaagtcttagt

SEQ ID NO: 189608 - DNA, 25 bp, SARS Virus
aaaaactcttgcggaagtcttagtg

SEQ ID NO: 189609 - DNA, 25 bp, SARS Virus
aaaactcttgctgaagtcttagtgg

SEQ ID NO: 189610 - DNA, 25 bp, SARS Virus
aaactcttgctggagtcttagtggt

SEQ ID NO: 189611 - DNA, 25 bp, SARS Virus
aactcttgctgaggtcttagtggta

SEQ ID NO: 189612 - DNA, 25 bp, SARS Virus
actcttgctgaagtcttagtggtaa

SEQ ID NO: 189613 - DNA, 25 bp, SARS Virus
ctcttgctgaaggcttagtggtaat

SEQ ID NO: 189614 - DNA, 25 bp, SARS Virus
tcttgctgaagtgttagtggtaatc

SEQ ID NO: 189615 - DNA, 25 bp, SARS Virus
cttgctgaagtcgtagtggtaatcg

SEQ ID NO: 189616 - DNA, 25 bp, SARS Virus
ttgctgaagtctgagtggtaatcga

SEQ ID NO: 189617 - DNA, 25 bp, SARS Virus
tgctgaagtcttggtggtaatcgat

SEQ ID NO: 189618 - DNA, 25 bp, SARS Virus
gctgaagtcttagtggtaatcgatg

SEQ ID NO: 189619 - DNA, 25 bp, SARS Virus
ctgaagtcttaggggtaatcgatgt

SEQ ID NO: 189620 - DNA, 25 bp, SARS Virus
tgaagtcttagtggtaatcgatgtc

SEQ ID NO: 189621 - DNA, 25 bp, SARS Virus
gaagtcttagtggtaatcgatgtcg

SEQ ID NO: 189622 - DNA, 25 bp, SARS Virus
aagtcttagtgggaatcgatgtcgg

SEQ ID NO: 189623 - DNA, 25 bp, SARS Virus
agtcttagtggtgatcgatgtcgga

SEQ ID NO: 189624 - DNA, 25 bp, SARS Virus
gtcttagtggtagtcgatgtcggac

SEQ ID NO: 189625 - DNA, 25 bp, SARS Virus
tcttagtggtaagcgatgtcggacg

SEQ ID NO: 189626 - DNA, 25 bp, SARS Virus
cttagtggtaatggatgtcggacga

SEQ ID NO: 189627 - DNA, 25 bp, SARS Virus
ttagtggtaatcgatgtcggacgag

SEQ ID NO: 189628 - DNA, 25 bp, SARS Virus
tagtggtaatcggtgtcggacgagt

SEQ ID NO: 189629 - DNA, 25 bp, SARS Virus
agtggtaatcgaggtcggacgagta

SEQ ID NO: 189630 - DNA, 25 bp, SARS Virus
gtggtaatcgatgtcggacgagtat

SEQ ID NO: 189631 - DNA, 25 bp, SARS Virus
tggtaatcgatggcggacgagtatc

SEQ ID NO: 189632 - DNA, 25 bp, SARS Virus
ggtaatcgatgtgggacgagtatcc

SEQ ID NO: 189633 - DNA, 25 bp, SARS Virus
gtaatcgatgtcggacgagtatccg

SEQ ID NO: 189634 - DNA, 25 bp, SARS Virus
taatcgatgtcggacgagtatccgg

SEQ ID NO: 189635 - DNA, 25 bp, SARS Virus
aatcgatgtcgggcgagtatccgga

SEQ ID NO: 189636 - DNA, 25 bp, SARS Virus
atcgatgtcggaggagtatccggag

SEQ ID NO: 189637 - DNA, 25 bp, SARS Virus
tcgatgtcggacgagtatccggagg

SEQ ID NO: 189638 - DNA, 25 bp, SARS Virus
cgatgtcggacgggtatccggagga

SEQ ID NO: 189639 - DNA, 25 bp, SARS Virus
gatgtcggacgagtatccggaggac

SEQ ID NO: 189640 - DNA, 25 bp, SARS Virus
atgtcggacgaggatccggaggacc

SEQ ID NO: 189641 - DNA, 25 bp, SARS Virus
tgtcggacgagtgtccggaggaccc

SEQ ID NO: 189642 - DNA, 25 bp, SARS Virus
gtcggacgagtagccggaggacccg

SEQ ID NO: 189643 - DNA, 25 bp, SARS Virus
tcggacgagtatgcggaggacccgt

SEQ ID NO: 189644 - DNA, 25 bp, SARS Virus
cggacgagtatcgggaggacccgtc

SEQ ID NO: 189645 - DNA, 25 bp, SARS Virus
ggacgagtatccggaggacccgtca

SEQ ID NO: 189646 - DNA, 25 bp, SARS Virus
gacgagtatccggaggacccgtcac

SEQ ID NO: 189647 - DNA, 25 bp, SARS Virus
acgagtatccgggggacccgtcacc

SEQ ID NO: 189648 - DNA, 25 bp, SARS Virus
cgagtatccggaggacccgtcaccg

SEQ ID NO: 189649 - DNA, 25 bp, SARS Virus
gagtatccggaggacccgtcaccgt

SEQ ID NO: 189650 - DNA, 25 bp, SARS Virus
agtatccggagggcccgtcaccgta

SEQ ID NO: 189651 - DNA, 25 bp, SARS Virus
gtatccggaggagccgtcaccgtat

SEQ ID NO: 189652 - DNA, 25 bp, SARS Virus
tatccggaggacgcgtcaccgtatt

SEQ ID NO: 189653 - DNA, 25 bp, SARS Virus
atccggaggaccggtcaccgtattc

SEQ ID NO: 189654 - DNA, 25 bp, SARS Virus
tccggaggacccgtcaccgtattcg

SEQ ID NO: 189655 - DNA, 25 bp, SARS Virus
ccggaggacccggcaccgtattcgc

SEQ ID NO: 189656 - DNA, 25 bp, SARS Virus
cggaggacccgtgaccgtattcgcc

SEQ ID NO: 189657 - DNA, 25 bp, SARS Virus
ggaggacccgtcgccgtattcgccg

SEQ ID NO: 189658 - DNA, 25 bp, SARS Virus
gaggacccgtcagcgtattcgccgt

SEQ ID NO: 189659 - DNA, 25 bp, SARS Virus
aggacccgtcacggtattcgccgta

SEQ ID NO: 189660 - DNA, 25 bp, SARS Virus
ggacccgtcaccgtattcgccgtat

SEQ ID NO: 189661 - DNA, 25 bp, SARS Virus
gacccgtcaccggattcgccgtata

SEQ ID NO: 189662 - DNA, 25 bp, SARS Virus
acccgtcaccgtgttcgccgtatac

SEQ ID NO: 189663 - DNA, 25 bp, SARS Virus
cccgtcaccgtagtcgccgtatact

SEQ ID NO: 189664 - DNA, 25 bp, SARS Virus
ccgtcaccgtatgcgccgtatacta

SEQ ID NO: 189665 - DNA, 25 bp, SARS Virus
cgtcaccgtattggccgtatactac

SEQ ID NO: 189666 - DNA, 25 bp, SARS Virus
gtcaccgtattcgccgtatactacc

SEQ ID NO: 189667 - DNA, 25 bp, SARS Virus
tcaccgtattcggcgtatactacca

SEQ ID NO: 189668 - DNA, 25 bp, SARS Virus
caccgtattcgcggtatactaccat

SEQ ID NO: 189669 - DNA, 25 bp, SARS Virus
accgtattcgccgtatactaccatt

SEQ ID NO: 189670 - DNA, 25 bp, SARS Virus
ccgtattcgccggatactaccattt

SEQ ID NO: 189671 - DNA, 25 bp, SARS Virus
cgtattcgccgtgtactaccatttc

SEQ ID NO: 189672 - DNA, 25 bp, SARS Virus
gtattcgccgtagactaccatttct

SEQ ID NO: 189673 - DNA, 25 bp, SARS Virus
tattcgccgtatgctaccatttctt

SEQ ID NO: 189674 - DNA, 25 bp, SARS Virus
attcgccgtatagtaccatttcttg

SEQ ID NO: 189675 - DNA, 25 bp, SARS Virus
ttcgccgtatacgaccatttcttga

SEQ ID NO: 189676 - DNA, 25 bp, SARS Virus
tcgccgtatactgccatttcttgat

SEQ ID NO: 189677 - DNA, 25 bp, SARS Virus
cgccgtatactagcatttcttgatt

SEQ ID NO: 189678 - DNA, 25 bp, SARS Virus
gccgtatactacgatttcttgattt

SEQ ID NO: 189679 - DNA, 25 bp, SARS Virus
ccgtatactaccgtttcttgattta

SEQ ID NO: 189680 - DNA, 25 bp, SARS Virus
cgtatactaccagttcttgatttaa

SEQ ID NO: 189681 - DNA, 25 bp, SARS Virus
gtatactaccatgtcttgatttaag

SEQ ID NO: 189682 - DNA, 25 bp, SARS Virus
tatactaccattgcttgatttaaga

SEQ ID NO: 189683 - DNA, 25 bp, SARS Virus
atactaccatttgttgatttaagac

SEQ ID NO: 189684 - DNA, 25 bp, SARS Virus
tactaccatttcgtgatttaagact

SEQ ID NO: 189685 - DNA, 25 bp, SARS Virus
actaccatttctggatttaagactt

SEQ ID NO: 189686 - DNA, 25 bp, SARS Virus
ctaccatttcttgatttaagacttc

SEQ ID NO: 189687 - DNA, 25 bp, SARS Virus
taccatttcttggtttaagacttcg

SEQ ID NO: 189688 - DNA, 25 bp, SARS Virus
accatttcttgagttaagacttcgt

SEQ ID NO: 189689 - DNA, 25 bp, SARS Virus
ccatttcttgatgtaagacttcgtt

SEQ ID NO: 189690 - DNA, 25 bp, SARS Virus
catttcttgattgaagacttcgtta

SEQ ID NO: 189691 - DNA, 25 bp, SARS Virus
atttcttgatttgagacttcgttat

SEQ ID NO: 189692 - DNA, 25 bp, SARS Virus
tttcttgatttaggacttcgttatc

SEQ ID NO: 189693 - DNA, 25 bp, SARS Virus
ttcttgatttaagacttcgttatcg

SEQ ID NO: 189694 - DNA, 25 bp, SARS Virus
tcttgatttaaggcttcgttatcgg

SEQ ID NO: 189695 - DNA, 25 bp, SARS Virus
cttgatttaagagttcgttatcgga

SEQ ID NO: 189696 - DNA, 25 bp, SARS Virus
ttgatttaagacgtcgttatcggac

SEQ ID NO: 189697 - DNA, 25 bp, SARS Virus
tgatttaagactgcgttatcggact

SEQ ID NO: 189698 - DNA, 25 bp, SARS Virus
gatttaagacttggttatcggactt

SEQ ID NO: 189699 - DNA, 25 bp, SARS Virus
atttaagacttcgttatcggacttc

SEQ ID NO: 189700 - DNA, 25 bp, SARS Virus
tttaagacttcggtatcggacttct

SEQ ID NO: 189701 - DNA, 25 bp, SARS Virus
ttaagacttcgtgatcggacttctc

SEQ ID NO: 189702 - DNA, 25 bp, SARS Virus
taagacttcgttgtcggacttctca

SEQ ID NO: 189703 - DNA, 25 bp, SARS Virus
aagacttcgttagcggacttctcat

SEQ ID NO: 189704 - DNA, 25 bp, SARS Virus
agacttcgttatgggacttctcatc

SEQ ID NO: 189705 - DNA, 25 bp, SARS Virus
gacttcgttatcggacttctcatcg

SEQ ID NO: 189706 - DNA, 25 bp, SARS Virus
acttcgttatcggacttctcatcgt

SEQ ID NO: 189707 - DNA, 25 bp, SARS Virus
cttcgttatcgggcttctcatcgtg

SEQ ID NO: 189708 - DNA, 25 bp, SARS Virus
ttcgttatcggagttctcatcgtgc

SEQ ID NO: 189709 - DNA, 25 bp, SARS Virus
tcgttatcggacgtctcatcgtgcc

SEQ ID NO: 189710 - DNA, 25 bp, SARS Virus
cgttatcggactgctcatcgtgcca

SEQ ID NO: 189711 - DNA, 25 bp, SARS Virus
gttatcggacttgtcatcgtgccaa

SEQ ID NO: 189712 - DNA, 25 bp, SARS Virus
ttatcggacttcgcatcgtgccaat

SEQ ID NO: 189713 - DNA, 25 bp, SARS Virus
tatcggacttctgatcgtgccaata

SEQ ID NO: 189714 - DNA, 25 bp, SARS Virus
atcggacttctcgtcgtgccaatag

SEQ ID NO: 189715 - DNA, 25 bp, SARS Virus
tcggacttctcagcgtgccaatagc

SEQ ID NO: 189716 - DNA, 25 bp, SARS Virus
cggacttctcatggtgccaatagct

SEQ ID NO: 189717 - DNA, 25 bp, SARS Virus
ggacttctcatcgtgccaatagctc

SEQ ID NO: 189718 - DNA, 25 bp, SARS Virus
gacttctcatcgggccaatagctcg

SEQ ID NO: 189719 - DNA, 25 bp, SARS Virus
acttctcatcgtgccaatagctcgt

SEQ ID NO: 189720 - DNA, 25 bp, SARS Virus
cttctcatcgtggcaatagctcgta

SEQ ID NO: 189721 - DNA, 25 bp, SARS Virus
ttctcatcgtgcgaatagctcgtaa

SEQ ID NO: 189722 - DNA, 25 bp, SARS Virus
tctcatcgtgccgatagctcgtaaa

SEQ ID NO: 189723 - DNA, 25 bp, SARS Virus
ctcatcgtgccagtagctcgtaaag

SEQ ID NO: 189724 - DNA, 25 bp, SARS Virus
tcatcgtgccaagagctcgtaaagg

SEQ ID NO: 189725 - DNA, 25 bp, SARS Virus
catcgtgccaatggctcgtaaagga

SEQ ID NO: 189726 - DNA, 25 bp, SARS Virus
atcgtgccaatagctcgtaaaggag

SEQ ID NO: 189727 - DNA, 25 bp, SARS Virus
tcgtgccaataggtcgtaaaggagc

SEQ ID NO: 189728 - DNA, 25 bp, SARS Virus
cgtgccaatagcgcgtaaaggagcg

SEQ ID NO: 189729 - DNA, 25 bp, SARS Virus
gtgccaatagctggtaaaggagcgt

SEQ ID NO: 189730 - DNA, 25 bp, SARS Virus
tgccaatagctcgtaaaggagcgtg

SEQ ID NO: 189731 - DNA, 25 bp, SARS Virus
gccaatagctcggaaaggagcgtgt

SEQ ID NO: 189732 - DNA, 25 bp, SARS Virus
ccaatagctcgtgaaggagcgtgtt

SEQ ID NO: 189733 - DNA, 25 bp, SARS Virus
caatagctcgtagaggagcgtgttg

SEQ ID NO: 189734 - DNA, 25 bp, SARS Virus
aatagctcgtaagggagcgtgttgg

SEQ ID NO: 189735 - DNA, 25 bp, SARS Virus
atagctcgtaaaggagcgtgttgga

SEQ ID NO: 189736 - DNA, 25 bp, SARS Virus
tagctcgtaaaggagcgtgttggat

SEQ ID NO: 189737 - DNA, 25 bp, SARS Virus
agctcgtaaaggggcgtgttggata

SEQ ID NO: 189738 - DNA, 25 bp, SARS Virus
gctcgtaaaggagcgtgttggataa

SEQ ID NO: 189739 - DNA, 25 bp, SARS Virus
ctcgtaaaggagggtgttggataat

SEQ ID NO: 189740 - DNA, 25 bp, SARS Virus
tcgtaaaggagcgtgttggataatt

SEQ ID NO: 189741 - DNA, 25 bp, SARS Virus
cgtaaaggagcgggttggataatta

SEQ ID NO: 189742 - DNA, 25 bp, SARS Virus
gtaaaggagcgtgttggataattac

SEQ ID NO: 189743 - DNA, 25 bp, SARS Virus
taaaggagcgtggtggataattaca

SEQ ID NO: 189744 - DNA, 25 bp, SARS Virus
aaaggagcgtgtgggataattacag

SEQ ID NO: 189745 - DNA, 25 bp, SARS Virus
aaggagcgtgttggataattacaga

SEQ ID NO: 189746 - DNA, 25 bp, SARS Virus
aggagcgtgttggataattacagat

SEQ ID NO: 189747 - DNA, 25 bp, SARS Virus
ggagcgtgttgggtaattacagatg

SEQ ID NO: 189748 - DNA, 25 bp, SARS Virus
gagcgtgttggagaattacagatgt

SEQ ID NO: 189749 - DNA, 25 bp, SARS Virus
agcgtgttggatgattacagatgtc

SEQ ID NO: 189750 - DNA, 25 bp, SARS Virus
gcgtgttggatagttacagatgtcg

SEQ ID NO: 189751 - DNA, 25 bp, SARS Virus
cgtgttggataagtacagatgtcgt

SEQ ID NO: 189752 - DNA, 25 bp, SARS Virus
gtgttggataatgacagatgtcgtg

SEQ ID NO: 189753 - DNA, 25 bp, SARS Virus
tgttggataattgcagatgtcgtgg

SEQ ID NO: 189754 - DNA, 25 bp, SARS Virus
gttggataattagagatgtcgtggg

SEQ ID NO: 189755 - DNA, 25 bp, SARS Virus
ttggataattacggatgtcgtggga

SEQ ID NO: 189756 - DNA, 25 bp, SARS Virus
tggataattacagatgtcgtgggac

SEQ ID NO: 189757 - DNA, 25 bp, SARS Virus
ggataattacaggtgtcgtgggacg

SEQ ID NO: 189758 - DNA, 25 bp, SARS Virus
gataattacagaggtcgtgggacgt

SEQ ID NO: 189759 - DNA, 25 bp, SARS Virus
ataattacagatgtcgtgggacgta

SEQ ID NO: 189760 - DNA, 25 bp, SARS Virus
taattacagatggcgtgggacgtac

SEQ ID NO: 189761 - DNA, 25 bp, SARS Virus
aattacagatgtggtgggacgtacc

SEQ ID NO: 189762 - DNA, 25 bp, SARS Virus
attacagatgtcgtgggacgtacct

SEQ ID NO: 189763 - DNA, 25 bp, SARS Virus
ttacagatgtcgggggacgtaccta

SEQ ID NO: 189764 - DNA, 25 bp, SARS Virus
tacagatgtcgtgggacgtacctat

SEQ ID NO: 189765 - DNA, 25 bp, SARS Virus
acagatgtcgtgggacgtacctatc

SEQ ID NO: 189766 - DNA, 25 bp, SARS Virus
cagatgtcgtgggacgtacctatcg

SEQ ID NO: 189767 - DNA, 25 bp, SARS Virus
agatgtcgtggggcgtacctatcgt

SEQ ID NO: 189768 - DNA, 25 bp, SARS Virus
gatgtcgtgggaggtacctatcgtt

SEQ ID NO: 189769 - DNA, 25 bp, SARS Virus
atgtcgtgggacgtacctatcgttt

SEQ ID NO: 189770 - DNA, 25 bp, SARS Virus
tgtcgtgggacggacctatcgtttt

SEQ ID NO: 189771 - DNA, 25 bp, SARS Virus
gtcgtgggacgtgcctatcgttttg

SEQ ID NO: 189772 - DNA, 25 bp, SARS Virus
tcgtgggacgtagctatcgttttgt

SEQ ID NO: 189773 - DNA, 25 bp, SARS Virus
cgtgggacgtacgtatcgttttgtc

SEQ ID NO: 189774 - DNA, 25 bp, SARS Virus
gtgggacgtaccgatcgttttgtct

SEQ ID NO: 189775 - DNA, 25 bp, SARS Virus
tgggacgtacctgtcgttttgtctg

SEQ ID NO: 189776 - DNA, 25 bp, SARS Virus
gggacgtacctagcgttttgtctgt

SEQ ID NO: 189777 - DNA, 25 bp, SARS Virus
ggacgtacctatggttttgtctgtt

SEQ ID NO: 189778 - DNA, 25 bp, SARS Virus
gacgtacctatcgttttgtctgttt

SEQ ID NO: 189779 - DNA, 25 bp, SARS Virus
acgtacctatcggtttgtctgtttt

SEQ ID NO: 189780 - DNA, 25 bp, SARS Virus
cgtacctatcgtgttgtctgttttc

SEQ ID NO: 189781 - DNA, 25 bp, SARS Virus
gtacctatcgttgtgtctgttttct

SEQ ID NO: 189782 - DNA, 25 bp, SARS Virus
tacctatcgtttggtctgttttctc

SEQ ID NO: 189783 - DNA, 25 bp, SARS Virus
acctatcgttttgtctgttttctct

SEQ ID NO: 189784 - DNA, 25 bp, SARS Virus
cctatcgttttggctgttttctctt

SEQ ID NO: 189785 - DNA, 25 bp, SARS Virus
ctatcgttttgtgtgttttctcttt

SEQ ID NO: 189786 - DNA, 25 bp, SARS Virus
tatcgttttgtcggttttctctttg

SEQ ID NO: 189787 - DNA, 25 bp, SARS Virus
atcgttttgtctgttttctctttgg

SEQ ID NO: 189788 - DNA, 25 bp, SARS Virus
tcgttttgtctggtttctctttggt

SEQ ID NO: 189789 - DNA, 25 bp, SARS Virus
cgttttgtctgtgttctctttggta

SEQ ID NO: 189790 - DNA, 25 bp, SARS Virus
gttttgtctgttgtctctttggtag

SEQ ID NO: 189791 - DNA, 25 bp, SARS Virus
ttttgtctgtttgctctttggtaga

SEQ ID NO: 189792 - DNA, 25 bp, SARS Virus
tttgtctgttttgtctttggtagaa

SEQ ID NO: 189793 - DNA, 25 bp, SARS Virus
ttgtctgttttcgctttggtagaag

SEQ ID NO: 189794 - DNA, 25 bp, SARS Virus
tgtctgttttctgtttggtagaaga

SEQ ID NO: 189795 - DNA, 25 bp, SARS Virus
gtctgttttctcgttggtagaagag

SEQ ID NO: 189796 - DNA, 25 bp, SARS Virus
tctgttttctctgtggtagaagagc

SEQ ID NO: 189797 - DNA, 25 bp, SARS Virus
ctgttttctcttgggtagaagagct

SEQ ID NO: 189798 - DNA, 25 bp, SARS Virus
tgttttctctttggtagaagagctt

SEQ ID NO: 189799 - DNA, 25 bp, SARS Virus
gttttctctttggtagaagagcttt

SEQ ID NO: 189800 - DNA, 25 bp, SARS Virus
ttttctctttgggagaagagctttc

SEQ ID NO: 189801 - DNA, 25 bp, SARS Virus
tttctctttggtggaagagctttcg

SEQ ID NO: 189802 - DNA, 25 bp, SARS Virus
ttctctttggtagaagagctttcga

SEQ ID NO: 189803 - DNA, 25 bp, SARS Virus
tctctttggtaggagagctttcgaa

SEQ ID NO: 189804 - DNA, 25 bp, SARS Virus
ctctttggtagaggagctttcgaag

SEQ ID NO: 189805 - DNA, 25 bp, SARS Virus
tctttggtagaagagctttcgaagt

SEQ ID NO: 189806 - DNA, 25 bp, SARS Virus
ctttggtagaagggctttcgaagtc

SEQ ID NO: 189807 - DNA, 25 bp, SARS Virus
tttggtagaagagctttcgaagtca

SEQ ID NO: 189808 - DNA, 25 bp, SARS Virus
ttggtagaagaggtttcgaagtcaa

SEQ ID NO: 189809 - DNA, 25 bp, SARS Virus
tggtagaagagcgttcgaagtcaac

SEQ ID NO: 189810 - DNA, 25 bp, SARS Virus
ggtagaagagctgtcgaagtcaaca

SEQ ID NO: 189811 - DNA, 25 bp, SARS Virus
gtagaagagcttgcgaagtcaacac

SEQ ID NO: 189812 - DNA, 25 bp, SARS Virus
tagaagagctttggaagtcaacaca

SEQ ID NO: 189813 - DNA, 25 bp, SARS Virus
agaagagctttcgaagtcaacacag

SEQ ID NO: 189814 - DNA, 25 bp, SARS Virus
gaagagctttcggagtcaacacaga

SEQ ID NO: 189815 - DNA, 25 bp, SARS Virus
aagagctttcgaggtcaacacagaa

SEQ ID NO: 189816 - DNA, 25 bp, SARS Virus
agagctttcgaagtcaacacagaaa

SEQ ID NO: 189817 - DNA, 25 bp, SARS Virus
gagctttcgaaggcaacacagaaaa

SEQ ID NO: 189818 - DNA, 25 bp, SARS Virus
agctttcgaagtgaacacagaaaac

SEQ ID NO: 189819 - DNA, 25 bp, SARS Virus
gctttcgaagtcgacacagaaaacg

SEQ ID NO: 189820 - DNA, 25 bp, SARS Virus
ctttcgaagtcagcacagaaaacgt

SEQ ID NO: 189821 - DNA, 25 bp, SARS Virus
tttcgaagtcaagacagaaaacgtt

SEQ ID NO: 189822 - DNA, 25 bp, SARS Virus
ttcgaagtcaacgcagaaaacgttc

SEQ ID NO: 189823 - DNA, 25 bp, SARS Virus
tcgaagtcaacagagaaaacgttct

SEQ ID NO: 189824 - DNA, 25 bp, SARS Virus
cgaagtcaacacggaaaacgttctt

SEQ ID NO: 189825 - DNA, 25 bp, SARS Virus
gaagtcaacacagaaaacgttcttc

SEQ ID NO: 189826 - DNA, 25 bp, SARS Virus
aagtcaacacaggaaacgttcttct

SEQ ID NO: 189827 - DNA, 25 bp, SARS Virus
agtcaacacagagaacgttcttctt

SEQ ID NO: 189828 - DNA, 25 bp, SARS Virus
gtcaacacagaagacgttcttctta

SEQ ID NO: 189829 - DNA, 25 bp, SARS Virus
tcaacacagaaagcgttcttcttat

SEQ ID NO: 189830 - DNA, 25 bp, SARS Virus
caacacagaaaaggttcttcttata

SEQ ID NO: 189831 - DNA, 25 bp, SARS Virus
aacacagaaaacgttcttcttatag

SEQ ID NO: 189832 - DNA, 25 bp, SARS Virus
acacagaaaacggtcttcttatagt

SEQ ID NO: 189833 - DNA, 25 bp, SARS Virus
cacagaaaacgtgcttcttatagta

SEQ ID NO: 189834 - DNA, 25 bp, SARS Virus
acagaaaacgttgttcttatagtaa

SEQ ID NO: 189835 - DNA, 25 bp, SARS Virus
cagaaaacgttcgtcttatagtaac

SEQ ID NO: 189836 - DNA, 25 bp, SARS Virus
agaaaacgttctgcttatagtaaca

SEQ ID NO: 189837 - DNA, 25 bp, SARS Virus
gaaaacgttcttgttatagtaacac

SEQ ID NO: 189838 - DNA, 25 bp, SARS Virus
aaaacgttcttcgtatagtaacacc

SEQ ID NO: 189839 - DNA, 25 bp, SARS Virus
aaacgttcttctgatagtaacacct

SEQ ID NO: 189840 - DNA, 25 bp, SARS Virus
aacgttcttcttgtagtaacacctc

SEQ ID NO: 189841 - DNA, 25 bp, SARS Virus
acgttcttcttagagtaacacctca

SEQ ID NO: 189842 - DNA, 25 bp, SARS Virus
cgttcttcttatggtaacacctcaa

SEQ ID NO: 189843 - DNA, 25 bp, SARS Virus
gttcttcttatagtaacacctcaac

SEQ ID NO: 189844 - DNA, 25 bp, SARS Virus
ttcttcttataggaacacctcaaca

SEQ ID NO: 189845 - DNA, 25 bp, SARS Virus
tcttcttatagtgacacctcaacat

SEQ ID NO: 189846 - DNA, 25 bp, SARS Virus
cttcttatagtagcacctcaacatg

SEQ ID NO: 189847 - DNA, 25 bp, SARS Virus
ttcttatagtaagacctcaacatgt

SEQ ID NO: 189848 - DNA, 25 bp, SARS Virus
tcttatagtaacgcctcaacatgtg

SEQ ID NO: 189849 - DNA, 25 bp, SARS Virus
cttatagtaacagctcaacatgtgt

SEQ ID NO: 189850 - DNA, 25 bp, SARS Virus
ttatagtaacacgtcaacatgtgta

SEQ ID NO: 189851 - DNA, 25 bp, SARS Virus
tatagtaacaccgcaacatgtgtaa

SEQ ID NO: 189852 - DNA, 25 bp, SARS Virus
atagtaacacctgaacatgtgtaac

SEQ ID NO: 189853 - DNA, 25 bp, SARS Virus
tagtaacacctcgacatgtgtaaca

SEQ ID NO: 189854 - DNA, 25 bp, SARS Virus
agtaacacctcagcatgtgtaacac

SEQ ID NO: 189855 - DNA, 25 bp, SARS Virus
gtaacacctcaagatgtgtaacacg

SEQ ID NO: 189856 - DNA, 25 bp, SARS Virus
taacacctcaacgtgtgtaacacgg

SEQ ID NO: 189857 - DNA, 25 bp, SARS Virus
aacacctcaacaggtgtaacacggg

SEQ ID NO: 189858 - DNA, 25 bp, SARS Virus
acacctcaacatgtgtaacacgggt

SEQ ID NO: 189859 - DNA, 25 bp, SARS Virus
cacctcaacatgggtaacacgggtg

SEQ ID NO: 189860 - DNA, 25 bp, SARS Virus
acctcaacatgtgtaacacgggtgt

SEQ ID NO: 189861 - DNA, 25 bp, SARS Virus
cctcaacatgtggaacacgggtgtt

SEQ ID NO: 189862 - DNA, 25 bp, SARS Virus
ctcaacatgtgtgacacgggtgtta

SEQ ID NO: 189863 - DNA, 25 bp, SARS Virus
tcaacatgtgtagcacgggtgttaa

SEQ ID NO: 189864 - DNA, 25 bp, SARS Virus
caacatgtgtaagacgggtgttaaa

SEQ ID NO: 189865 - DNA, 25 bp, SARS Virus
gttggtagtgcgtgtaacaactatt

SEQ ID NO: 189866 - DNA, 25 bp, SARS Virus
ttggtagtgcgcttaacaactatta

SEQ ID NO: 189867 - DNA, 25 bp, SARS Virus
tggtagtgcgcgtaacaactattac

SEQ ID NO: 189868 - DNA, 25 bp, SARS Virus
ggtagtgcgcgttacaactattaca

SEQ ID NO: 189869 - DNA, 25 bp, SARS Virus
gtagtgcgcgtatcaactattacaa

SEQ ID NO: 189870 - DNA, 25 bp, SARS Virus
tagtgcgcgtaataactattacaac

SEQ ID NO: 189871 - DNA, 25 bp, SARS Virus
agtgcgcgtaactactattacaaca

SEQ ID NO: 189872 - DNA, 25 bp, SARS Virus
gtgcgcgtaacatctattacaacaa

SEQ ID NO: 189873 - DNA, 25 bp, SARS Virus
tgcgcgtaacaattattacaacaat

SEQ ID NO: 189874 - DNA, 25 bp, SARS Virus
gcgcgtaacaactattacaacaatt

SEQ ID NO: 189875 - DNA, 25 bp, SARS Virus
cgcgtaacaacttttacaacaattc

SEQ ID NO: 189876 - DNA, 25 bp, SARS Virus
gcgtaacaactattacaacaattca

SEQ ID NO: 189877 - DNA, 25 bp, SARS Virus
cgtaacaactattacaacaattcac

SEQ ID NO: 189878 - DNA, 25 bp, SARS Virus
gtaacaactatttcaacaattcacg

SEQ ID NO: 189879 - DNA, 25 bp, SARS Virus
taacaactattataacaattcacgt

SEQ ID NO: 189880 - DNA, 25 bp, SARS Virus
aacaactattactacaattcacgta

SEQ ID NO: 189881 - DNA, 25 bp, SARS Virus
acaactattacatcaattcacgtag

SEQ ID NO: 189882 - DNA, 25 bp, SARS Virus
caactattacaataattcacgtagt

SEQ ID NO: 189883 - DNA, 25 bp, SARS Virus
aactattacaactattcacgtagta

SEQ ID NO: 189884 - DNA, 25 bp, SARS Virus
actattacaacatttcacgtagtaa

SEQ ID NO: 189885 - DNA, 25 bp, SARS Virus
ctattacaacaattcacgtagtaat

SEQ ID NO: 189886 - DNA, 25 bp, SARS Virus
tattacaacaattcacgtagtaata

SEQ ID NO: 189887 - DNA, 25 bp, SARS Virus
attacaacaatttacgtagtaatag

SEQ ID NO: 189888 - DNA, 25 bp, SARS Virus
ttacaacaattctcgtagtaatagt

SEQ ID NO: 189889 - DNA, 25 bp, SARS Virus
tacaacaattcatgtagtaatagtt

SEQ ID NO: 189890 - DNA, 25 bp, SARS Virus
acaacaattcacttagtaatagttc

SEQ ID NO: 189891 - DNA, 25 bp, SARS Virus
caacaattcacgtagtaatagttcg

SEQ ID NO: 189892 - DNA, 25 bp, SARS Virus
aacaattcacgttgtaatagttcga

SEQ ID NO: 189893 - DNA, 25 bp, SARS Virus
acaattcacgtattaatagttcgaa

SEQ ID NO: 189894 - DNA, 25 bp, SARS Virus
caattcacgtagtaatagttcgaag

SEQ ID NO: 189895 - DNA, 25 bp, SARS Virus
aattcacgtagttatagttcgaagg

SEQ ID NO: 189896 - DNA, 25 bp, SARS Virus
attcacgtagtattagttcgaagga

SEQ ID NO: 189897 - DNA, 25 bp, SARS Virus
ttcacgtagtaatagttcgaaggat

SEQ ID NO: 189898 - DNA, 25 bp, SARS Virus
tcacgtagtaattgttcgaaggatt

SEQ ID NO: 189899 - DNA, 25 bp, SARS Virus
cacgtagtaatatttcgaaggattc

SEQ ID NO: 189900 - DNA, 25 bp, SARS Virus
acgtagtaatagttcgaaggattcg

SEQ ID NO: 189901 - DNA, 25 bp, SARS Virus
cgtagtaatagttcgaaggattcgt

SEQ ID NO: 189902 - DNA, 25 bp, SARS Virus
gtagtaatagtttgaaggattcgta

SEQ ID NO: 189903 - DNA, 25 bp, SARS Virus
tagtaatagttctaaggattcgtat

SEQ ID NO: 189904 - DNA, 25 bp, SARS Virus
agtaatagttcgtaggattcgtatc

SEQ ID NO: 189905 - DNA, 25 bp, SARS Virus
gtaatagttcgatggattcgtatca

SEQ ID NO: 189906 - DNA, 25 bp, SARS Virus
taatagttcgaatgattcgtatcac

SEQ ID NO: 189907 - DNA, 25 bp, SARS Virus
aatagttcgaagtattcgtatcact

SEQ ID NO: 189908 - DNA, 25 bp, SARS Virus
atagttcgaaggtttcgtatcactt

SEQ ID NO: 189909 - DNA, 25 bp, SARS Virus
tagttcgaaggattcgtatcacttc

SEQ ID NO: 189910 - DNA, 25 bp, SARS Virus
agttcgaaggattcgtatcacttct

SEQ ID NO: 189911 - DNA, 25 bp, SARS Virus
gttcgaaggatttgtatcacttctc

SEQ ID NO: 189912 - DNA, 25 bp, SARS Virus
ttcgaaggattcttatcacttctcg

SEQ ID NO: 189913 - DNA, 25 bp, SARS Virus
tcgaaggattcgtatcacttctcgt

SEQ ID NO: 189914 - DNA, 25 bp, SARS Virus
cgaaggattcgtttcacttctcgta

SEQ ID NO: 189915 - DNA, 25 bp, SARS Virus
gaaggattcgtatcacttctcgtaa

SEQ ID NO: 189916 - DNA, 25 bp, SARS Virus
aaggattcgtattacttctcgtaac

SEQ ID NO: 189917 - DNA, 25 bp, SARS Virus
aggattcgtatctcttctcgtaaca

SEQ ID NO: 189918 - DNA, 25 bp, SARS Virus
ggattcgtatcatttctcgtaacaa

SEQ ID NO: 189919 - DNA, 25 bp, SARS Virus
gattcgtatcacttctcgtaacaaa

SEQ ID NO: 189920 - DNA, 25 bp, SARS Virus
attcgtatcacttctcgtaacaaac

SEQ ID NO: 189921 - DNA, 25 bp, SARS Virus
ttcgtatcacttttcgtaacaaacg

SEQ ID NO: 189922 - DNA, 25 bp, SARS Virus
tcgtatcacttctcgtaacaaacgt

SEQ ID NO: 189923 - DNA, 25 bp, SARS Virus
cgtatcacttcttgtaacaaacgta

SEQ ID NO: 189924 - DNA, 25 bp, SARS Virus
gtatcacttctcttaacaaacgtat

SEQ ID NO: 189925 - DNA, 25 bp, SARS Virus
tatcacttctcgtaacaaacgtatc

SEQ ID NO: 189926 - DNA, 25 bp, SARS Virus
atcacttctcgttacaaacgtatcg

SEQ ID NO: 189927 - DNA, 25 bp, SARS Virus
tcacttctcgtatcaaacgtatcgt

SEQ ID NO: 189928 - DNA, 25 bp, SARS Virus
cacttctcgtaataaacgtatcgtg

SEQ ID NO: 189929 - DNA, 25 bp, SARS Virus
acttctcgtaactaacgtatcgtga

SEQ ID NO: 189930 - DNA, 25 bp, SARS Virus
cttctcgtaacatacgtatcgtgat

SEQ ID NO: 189931 - DNA, 25 bp, SARS Virus
ttctcgtaacaatcgtatcgtgatc

SEQ ID NO: 189932 - DNA, 25 bp, SARS Virus
tctcgtaacaaatgtatcgtgatca

SEQ ID NO: 189933 - DNA, 25 bp, SARS Virus
ctcgtaacaaacttatcgtgatcaa

SEQ ID NO: 189934 - DNA, 25 bp, SARS Virus
tcgtaacaaacgtatcgtgatcaat

SEQ ID NO: 189935 - DNA, 25 bp, SARS Virus
cgtaacaaacgtttcgtgatcaatg

SEQ ID NO: 189936 - DNA, 25 bp, SARS Virus
gtaacaaacgtatcgtgatcaatga

SEQ ID NO: 189937 - DNA, 25 bp, SARS Virus
taacaaacgtattgtgatcaatgaa

SEQ ID NO: 189938 - DNA, 25 bp, SARS Virus
aacaaacgtatcttgatcaatgaaa

SEQ ID NO: 189939 - DNA, 25 bp, SARS Virus
acaaacgtatcgtgatcaatgaaaa

SEQ ID NO: 189940 - DNA, 25 bp, SARS Virus
caaacgtatcgttatcaatgaaaac

SEQ ID NO: 189941 - DNA, 25 bp, SARS Virus
aaacgtatcgtgttcaatgaaaacg

SEQ ID NO: 189942 - DNA, 25 bp, SARS Virus
aacgtatcgtgatcaatgaaaacgg

SEQ ID NO: 189943 - DNA, 25 bp, SARS Virus
acgtatcgtgattaatgaaaacggg

SEQ ID NO: 189944 - DNA, 25 bp, SARS Virus
cgtatcgtgatctatgaaaacggga

SEQ ID NO: 189945 - DNA, 25 bp, SARS Virus
gtatcgtgatcattgaaaacgggag

SEQ ID NO: 189946 - DNA, 25 bp, SARS Virus
tatcgtgatcaatgaaaacgggaga

SEQ ID NO: 189947 - DNA, 25 bp, SARS Virus
atcgtgatcaattaaaacgggagaa

SEQ ID NO: 189948 - DNA, 25 bp, SARS Virus
tcgtgatcaatgtaaacgggagaac

SEQ ID NO: 189949 - DNA, 25 bp, SARS Virus
cgtgatcaatgataacgggagaaca

SEQ ID NO: 189950 - DNA, 25 bp, SARS Virus
gtgatcaatgaatacgggagaacag

SEQ ID NO: 189951 - DNA, 25 bp, SARS Virus
tgatcaatgaaatcgggagaacagg

SEQ ID NO: 189952 - DNA, 25 bp, SARS Virus
gatcaatgaaaatgggagaacagga

SEQ ID NO: 189953 - DNA, 25 bp, SARS Virus
atcaatgaaaactggagaacaggag

SEQ ID NO: 189954 - DNA, 25 bp, SARS Virus
tcaatgaaaacgtgagaacaggagt

SEQ ID NO: 189955 - DNA, 25 bp, SARS Virus
caatgaaaacggtagaacaggagtc

SEQ ID NO: 189956 - DNA, 25 bp, SARS Virus
aatgaaaacgggtgaacaggagtct

SEQ ID NO: 189957 - DNA, 25 bp, SARS Virus
atgaaaacgggataacaggagtcta

SEQ ID NO: 189958 - DNA, 25 bp, SARS Virus
tgaaaacgggagtacaggagtctag

SEQ ID NO: 189959 - DNA, 25 bp, SARS Virus
gaaaacgggagatcaggagtctaga

SEQ ID NO: 189960 - DNA, 25 bp, SARS Virus
aaaacgggagaataggagtctagaa

SEQ ID NO: 189961 - DNA, 25 bp, SARS Virus
aaacgggagaactggagtctagaac

SEQ ID NO: 189962 - DNA, 25 bp, SARS Virus
aacgggagaacatgagtctagaacg

SEQ ID NO: 189963 - DNA, 25 bp, SARS Virus
acgggagaacagtagtctagaacgg

SEQ ID NO: 189964 - DNA, 25 bp, SARS Virus
cgggagaacaggtgtctagaacgga

SEQ ID NO: 189965 - DNA, 25 bp, SARS Virus
gggagaacaggattctagaacggac

SEQ ID NO: 189966 - DNA, 25 bp, SARS Virus
ggagaacaggagtctagaacggaca

SEQ ID NO: 189967 - DNA, 25 bp, SARS Virus
gagaacaggagtttagaacggacaa

SEQ ID NO: 189968 - DNA, 25 bp, SARS Virus
agaacaggagtctagaacggacaaa

SEQ ID NO: 189969 - DNA, 25 bp, SARS Virus
gaacaggagtcttgaacggacaaac

SEQ ID NO: 189970 - DNA, 25 bp, SARS Virus
aacaggagtctataacggacaaaca

SEQ ID NO: 189971 - DNA, 25 bp, SARS Virus
acaggagtctagtacggacaaacat

SEQ ID NO: 189972 - DNA, 25 bp, SARS Virus
caggagtctagatcggacaaacatg

SEQ ID NO: 189973 - DNA, 25 bp, SARS Virus
aggagtctagaatggacaaacatgt

SEQ ID NO: 189974 - DNA, 25 bp, SARS Virus
ggagtctagaactgacaaacatgta

SEQ ID NO: 189975 - DNA, 25 bp, SARS Virus
gagtctagaacgtacaaacatgtaa

SEQ ID NO: 189976 - DNA, 25 bp, SARS Virus
agtctagaacggtcaaacatgtaaa

SEQ ID NO: 189977 - DNA, 25 bp, SARS Virus
gtctagaacggataaacatgtaaac

SEQ ID NO: 189978 - DNA, 25 bp, SARS Virus
tctagaacggactaacatgtaaacc

SEQ ID NO: 189979 - DNA, 25 bp, SARS Virus
ctagaacggacatacatgtaaaccc

SEQ ID NO: 189980 - DNA, 25 bp, SARS Virus
tagaacggacaatcatgtaaaccca

SEQ ID NO: 189981 - DNA, 25 bp, SARS Virus
agaacggacaaatatgtaaacccag

SEQ ID NO: 189982 - DNA, 25 bp, SARS Virus
gaacggacaaacttgtaaacccagt

SEQ ID NO: 189983 - DNA, 25 bp, SARS Virus
aacggacaaacatgtaaacccagta

SEQ ID NO: 189984 - DNA, 25 bp, SARS Virus
acggacaaacatttaaacccagtat

SEQ ID NO: 189985 - DNA, 25 bp, SARS Virus
cggacaaacatgtaaacccagtatc

SEQ ID NO: 189986 - DNA, 25 bp, SARS Virus
ggacaaacatgttaacccagtatcg

SEQ ID NO: 189987 - DNA, 25 bp, SARS Virus
gacaaacatgtatacccagtatcgg

SEQ ID NO: 189988 - DNA, 25 bp, SARS Virus
acaaacatgtaatcccagtatcgga

SEQ ID NO: 189989 - DNA, 25 bp, SARS Virus
caaacatgtaaatccagtatcggac

SEQ ID NO: 189990 - DNA, 25 bp, SARS Virus
aaacatgtaaactcagtatcggact

SEQ ID NO: 189991 - DNA, 25 bp, SARS Virus
aacatgtaaacctagtatcggacta

SEQ ID NO: 189992 - DNA, 25 bp, SARS Virus
acatgtaaaccctgtatcggactag

SEQ ID NO: 189993 - DNA, 25 bp, SARS Virus
catgtaaacccattatcggactaga

SEQ ID NO: 189994 - DNA, 25 bp, SARS Virus
atgtaaacccagtatcggactagac

SEQ ID NO: 189995 - DNA, 25 bp, SARS Virus
tgtaaacccagtttcggactagacg

SEQ ID NO: 189996 - DNA, 25 bp, SARS Virus
gtaaacccagtatcggactagacgg

SEQ ID NO: 189997 - DNA, 25 bp, SARS Virus
taaacccagtattggactagacggt

SEQ ID NO: 189998 - DNA, 25 bp, SARS Virus
aaacccagtatctgactagacggta

SEQ ID NO: 189999 - DNA, 25 bp, SARS Virus
aacccagtatcgtactagacggtag

SEQ ID NO: 190000 - DNA, 25 bp, SARS Virus
acccagtatcggtctagacggtaga

SEQ ID NO: 190001 - DNA, 25 bp, SARS Virus
cccagtatcggattagacggtagaa

SEQ ID NO: 190002 - DNA, 25 bp, SARS Virus
ccagtatcggactagacggtagaaa

SEQ ID NO: 190003 - DNA, 25 bp, SARS Virus
cagtatcggacttgacggtagaaaa

SEQ ID NO: 190004 - DNA, 25 bp, SARS Virus
agtatcggactatacggtagaaaag

SEQ ID NO: 190005 - DNA, 25 bp, SARS Virus
gtatcggactagtcggtagaaaagg

SEQ ID NO: 190006 - DNA, 25 bp, SARS Virus
tatcggactagatggtagaaaaggt

SEQ ID NO: 190007 - DNA, 25 bp, SARS Virus
atcggactagactgtagaaaaggtt

SEQ ID NO: 190008 - DNA, 25 bp, SARS Virus
tcggactagacgttagaaaaggttg

SEQ ID NO: 190009 - DNA, 25 bp, SARS Virus
cggactagacggtagaaaaggttga

SEQ ID NO: 190010 - DNA, 25 bp, SARS Virus
ggactagacggttgaaaaggttgaa

SEQ ID NO: 190011 - DNA, 25 bp, SARS Virus
gactagacggtataaaaggttgaac

SEQ ID NO: 190012 - DNA, 25 bp, SARS Virus
actagacggtagtaaaggttgaacg

SEQ ID NO: 190013 - DNA, 25 bp, SARS Virus
ctagacggtagataaggttgaacgc

SEQ ID NO: 190014 - DNA, 25 bp, SARS Virus
tagacggtagaataggttgaacgca

SEQ ID NO: 190015 - DNA, 25 bp, SARS Virus
agacggtagaaatggttgaacgcaa

SEQ ID NO: 190016 - DNA, 25 bp, SARS Virus
gacggtagaaaatgttgaacgcaac

SEQ ID NO: 190017 - DNA, 25 bp, SARS Virus
acggtagaaaagtttgaacgcaacg

SEQ ID NO: 190018 - DNA, 25 bp, SARS Virus
cggtagaaaaggttgaacgcaacgt

SEQ ID NO: 190019 - DNA, 25 bp, SARS Virus
ggtagaaaaggttgaacgcaacgta

SEQ ID NO: 190020 - DNA, 25 bp, SARS Virus
gtagaaaaggtttaacgcaacgtac

SEQ ID NO: 190021 - DNA, 25 bp, SARS Virus
tagaaaaggttgtacgcaacgtacc

SEQ ID NO: 190022 - DNA, 25 bp, SARS Virus
agaaaaggttgatcgcaacgtaccg

SEQ ID NO: 190023 - DNA, 25 bp, SARS Virus
gaaaaggttgaatgcaacgtaccgt

SEQ ID NO: 190024 - DNA, 25 bp, SARS Virus
aaaaggttgaactcaacgtaccgtc

SEQ ID NO: 190025 - DNA, 25 bp, SARS Virus
aaaggttgaacgtaacgtaccgtcg

SEQ ID NO: 190026 - DNA, 25 bp, SARS Virus
aaggttgaacgctacgtaccgtcgt

SEQ ID NO: 190027 - DNA, 25 bp, SARS Virus
aggttgaacgcatcgtaccgtcgta

SEQ ID NO: 190028 - DNA, 25 bp, SARS Virus
ggttgaacgcaatgtaccgtcgtag

SEQ ID NO: 190029 - DNA, 25 bp, SARS Virus
gttgaacgcaacttaccgtcgtagt

SEQ ID NO: 190030 - DNA, 25 bp, SARS Virus
ttgaacgcaacgtaccgtcgtagtg

SEQ ID NO: 190031 - DNA, 25 bp, SARS Virus
tgaacgcaacgttccgtcgtagtgc

SEQ ID NO: 190032 - DNA, 25 bp, SARS Virus
gaacgcaacgtatcgtcgtagtgcc

SEQ ID NO: 190033 - DNA, 25 bp, SARS Virus
aacgcaacgtactgtcgtagtgcca

SEQ ID NO: 190034 - DNA, 25 bp, SARS Virus
acgcaacgtaccttcgtagtgccag

SEQ ID NO: 190035 - DNA, 25 bp, SARS Virus
cgcaacgtaccgtcgtagtgccagt

SEQ ID NO: 190036 - DNA, 25 bp, SARS Virus
gcaacgtaccgttgtagtgccagtt

SEQ ID NO: 190037 - DNA, 25 bp, SARS Virus
caacgtaccgtcttagtgccagttt

SEQ ID NO: 190038 - DNA, 25 bp, SARS Virus
aacgtaccgtcgtagtgccagtttg

SEQ ID NO: 190039 - DNA, 25 bp, SARS Virus
acgtaccgtcgttgtgccagtttga

SEQ ID NO: 190040 - DNA, 25 bp, SARS Virus
cgtaccgtcgtattgccagtttgag

SEQ ID NO: 190041 - DNA, 25 bp, SARS Virus
gtaccgtcgtagtgccagtttgagt

SEQ ID NO: 190042 - DNA, 25 bp, SARS Virus
taccgtcgtagttccagtttgagtc

SEQ ID NO: 190043 - DNA, 25 bp, SARS Virus
accgtcgtagtgtcagtttgagtct

SEQ ID NO: 190044 - DNA, 25 bp, SARS Virus
ccgtcgtagtgctagtttgagtcta

SEQ ID NO: 190045 - DNA, 25 bp, SARS Virus
cgtcgtagtgcctgtttgagtctaa

SEQ ID NO: 190046 - DNA, 25 bp, SARS Virus
gtcgtagtgccattttgagtctaaa

SEQ ID NO: 190047 - DNA, 25 bp, SARS Virus
tcgtagtgccagtttgagtctaaat

SEQ ID NO: 190048 - DNA, 25 bp, SARS Virus
cgtagtgccagtttgagtctaaatc

SEQ ID NO: 190049 - DNA, 25 bp, SARS Virus
gtagtgccagtttgagtctaaatcg

SEQ ID NO: 190050 - DNA, 25 bp, SARS Virus
tagtgccagttttagtctaaatcgg

SEQ ID NO: 190051 - DNA, 25 bp, SARS Virus
agtgccagtttgtgtctaaatcggt

SEQ ID NO: 190052 - DNA, 25 bp, SARS Virus
gtgccagtttgattctaaatcggtg

SEQ ID NO: 190053 - DNA, 25 bp, SARS Virus
tgccagtttgagtctaaatcggtgt

SEQ ID NO: 190054 - DNA, 25 bp, SARS Virus
gccagtttgagtttaaatcggtgta

SEQ ID NO: 190055 - DNA, 25 bp, SARS Virus
ccagtttgagtctaaatcggtgtaa

SEQ ID NO: 190056 - DNA, 25 bp, SARS Virus
cagtttgagtcttaatcggtgtaag

SEQ ID NO: 190057 - DNA, 25 bp, SARS Virus
agtttgagtctatatcggtgtaagt

SEQ ID NO: 190058 - DNA, 25 bp, SARS Virus
gtttgagtctaattcggtgtaagtt

SEQ ID NO: 190059 - DNA, 25 bp, SARS Virus
tttgagtctaaatcggtgtaagttt

SEQ ID NO: 190060 - DNA, 25 bp, SARS Virus
ttgagtctaaattggtgtaagtttc

SEQ ID NO: 190061 - DNA, 25 bp, SARS Virus
tgagtctaaatctgtgtaagtttct

SEQ ID NO: 190062 - DNA, 25 bp, SARS Virus
gagtctaaatcgttgtaagtttcta

SEQ ID NO: 190063 - DNA, 25 bp, SARS Virus
agtctaaatcggtgtaagtttctaa

SEQ ID NO: 190064 - DNA, 25 bp, SARS Virus
gtctaaatcggtttaagtttctaaa

SEQ ID NO: 190065 - DNA, 25 bp, SARS Virus
tctaaatcggtgtaagtttctaaag

SEQ ID NO: 190066 - DNA, 25 bp, SARS Virus
ctaaatcggtgttagtttctaaaga

SEQ ID NO: 190067 - DNA, 25 bp, SARS Virus
taaatcggtgtatgtttctaaagaa

SEQ ID NO: 190068 - DNA, 25 bp, SARS Virus
aaatcggtgtaattttctaaagaaa

SEQ ID NO: 190069 - DNA, 25 bp, SARS Virus
aatcggtgtaagtttctaaagaaat

SEQ ID NO: 190070 - DNA, 25 bp, SARS Virus
atcggtgtaagtttctaaagaaatt

SEQ ID NO: 190071 - DNA, 25 bp, SARS Virus
tcggtgtaagtttctaaagaaattg

SEQ ID NO: 190072 - DNA, 25 bp, SARS Virus
cggtgtaagtttttaaagaaattga

SEQ ID NO: 190073 - DNA, 25 bp, SARS Virus
ggtgtaagtttctaaagaaattgaa

SEQ ID NO: 190074 - DNA, 25 bp, SARS Virus
gtgtaagtttcttaagaaattgaaa

SEQ ID NO: 190075 - DNA, 25 bp, SARS Virus
tgtaagtttctatagaaattgaaaa

SEQ ID NO: 190076 - DNA, 25 bp, SARS Virus
gtaagtttctaatgaaattgaaaaa

SEQ ID NO: 190077 - DNA, 25 bp, SARS Virus
taagtttctaaataaattgaaaaac

SEQ ID NO: 190078 - DNA, 25 bp, SARS Virus
aagtttctaaagtaattgaaaaact

SEQ ID NO: 190079 - DNA, 25 bp, SARS Virus
agtttctaaagatattgaaaaactc

SEQ ID NO: 190080 - DNA, 25 bp, SARS Virus
gtttctaaagaatttgaaaaactct

SEQ ID NO: 190081 - DNA, 25 bp, SARS Virus
tttctaaagaaattgaaaaactctt

SEQ ID NO: 190082 - DNA, 25 bp, SARS Virus
ttctaaagaaattgaaaaactcttg

SEQ ID NO: 190083 - DNA, 25 bp, SARS Virus
tctaaagaaatttaaaaactcttgc

SEQ ID NO: 190084 - DNA, 25 bp, SARS Virus
ctaaagaaattgtaaaactcttgct

SEQ ID NO: 190085 - DNA, 25 bp, SARS Virus
taaagaaattgataaactcttgctg

SEQ ID NO: 190086 - DNA, 25 bp, SARS Virus
aaagaaattgaataactcttgctga

SEQ ID NO: 190087 - DNA, 25 bp, SARS Virus
aagaaattgaaatactcttgctgaa

SEQ ID NO: 190088 - DNA, 25 bp, SARS Virus
agaaattgaaaatctcttgctgaag

SEQ ID NO: 190089 - DNA, 25 bp, SARS Virus
gaaattgaaaaattcttgctgaagt

SEQ ID NO: 190090 - DNA, 25 bp, SARS Virus
aaattgaaaaactcttgctgaagtc

SEQ ID NO: 190091 - DNA, 25 bp, SARS Virus
aattgaaaaacttttgctgaagtct

SEQ ID NO: 190092 - DNA, 25 bp, SARS Virus
attgaaaaactcttgctgaagtctt

SEQ ID NO: 190093 - DNA, 25 bp, SARS Virus
ttgaaaaactcttgctgaagtctta

SEQ ID NO: 190094 - DNA, 25 bp, SARS Virus
tgaaaaactctttctgaagtcttag

SEQ ID NO: 190095 - DNA, 25 bp, SARS Virus
gaaaaactcttgttgaagtcttagt

SEQ ID NO: 190096 - DNA, 25 bp, SARS Virus
aaaaactcttgctgaagtcttagtg

SEQ ID NO: 190097 - DNA, 25 bp, SARS Virus
aaaactcttgcttaagtcttagtgg

SEQ ID NO: 190098 - DNA, 25 bp, SARS Virus
aaactcttgctgtagtcttagtggt

SEQ ID NO: 190099 - DNA, 25 bp, SARS Virus
aactcttgctgatgtcttagtggta

SEQ ID NO: 190100 - DNA, 25 bp, SARS Virus
actcttgctgaattcttagtggtaa

SEQ ID NO: 190101 - DNA, 25 bp, SARS Virus
ctcttgctgaagtcttagtggtaat

SEQ ID NO: 190102 - DNA, 25 bp, SARS Virus
tcttgctgaagttttagtggtaatc

SEQ ID NO: 190103 - DNA, 25 bp, SARS Virus
cttgctgaagtcttagtggtaatcg

SEQ ID NO: 190104 - DNA, 25 bp, SARS Virus
ttgctgaagtcttagtggtaatcga

SEQ ID NO: 190105 - DNA, 25 bp, SARS Virus
tgctgaagtctttgtggtaatcgat

SEQ ID NO: 190106 - DNA, 25 bp, SARS Virus
gctgaagtcttattggtaatcgatg

SEQ ID NO: 190107 - DNA, 25 bp, SARS Virus
ctgaagtcttagtggtaatcgatgt

SEQ ID NO: 190108 - DNA, 25 bp, SARS Virus
tgaagtcttagttgtaatcgatgtc

SEQ ID NO: 190109 - DNA, 25 bp, SARS Virus
gaagtcttagtgttaatcgatgtcg

SEQ ID NO: 190110 - DNA, 25 bp, SARS Virus
aagtcttagtggtaatcgatgtcgg

SEQ ID NO: 190111 - DNA, 25 bp, SARS Virus
agtcttagtggttatcgatgtcgga

SEQ ID NO: 190112 - DNA, 25 bp, SARS Virus
gtcttagtggtattcgatgtcggac

SEQ ID NO: 190113 - DNA, 25 bp, SARS Virus
tcttagtggtaatcgatgtcggacg

SEQ ID NO: 190114 - DNA, 25 bp, SARS Virus
cttagtggtaattgatgtcggacga

SEQ ID NO: 190115 - DNA, 25 bp, SARS Virus
ttagtggtaatctatgtcggacgag

SEQ ID NO: 190116 - DNA, 25 bp, SARS Virus
tagtggtaatcgttgtcggacgagt

SEQ ID NO: 190117 - DNA, 25 bp, SARS Virus
agtggtaatcgatgtcggacgagta

SEQ ID NO: 190118 - DNA, 25 bp, SARS Virus
gtggtaatcgatttcggacgagtat

SEQ ID NO: 190119 - DNA, 25 bp, SARS Virus
tggtaatcgatgtcggacgagtatc

SEQ ID NO: 190120 - DNA, 25 bp, SARS Virus
ggtaatcgatgttggacgagtatcc

SEQ ID NO: 190121 - DNA, 25 bp, SARS Virus
gtaatcgatgtctgacgagtatccg

SEQ ID NO: 190122 - DNA, 25 bp, SARS Virus
taatcgatgtcgtacgagtatccgg

SEQ ID NO: 190123 - DNA, 25 bp, SARS Virus
aatcgatgtcggtcgagtatccgga

SEQ ID NO: 190124 - DNA, 25 bp, SARS Virus
atcgatgtcggatgagtatccggag

SEQ ID NO: 190125 - DNA, 25 bp, SARS Virus
tcgatgtcggactagtatccggagg

SEQ ID NO: 190126 - DNA, 25 bp, SARS Virus
cgatgtcggacgtgtatccggagga

SEQ ID NO: 190127 - DNA, 25 bp, SARS Virus
gatgtcggacgattatccggaggac

SEQ ID NO: 190128 - DNA, 25 bp, SARS Virus
atgtcggacgagtatccggaggacc

SEQ ID NO: 190129 - DNA, 25 bp, SARS Virus
tgtcggacgagtttccggaggaccc

SEQ ID NO: 190130 - DNA, 25 bp, SARS Virus
gtcggacgagtatccggaggacccg

SEQ ID NO: 190131 - DNA, 25 bp, SARS Virus
tcggacgagtattcggaggacccgt

SEQ ID NO: 190132 - DNA, 25 bp, SARS Virus
cggacgagtatctggaggacccgtc

SEQ ID NO: 190133 - DNA, 25 bp, SARS Virus
ggacgagtatcctgaggacccgtca

SEQ ID NO: 190134 - DNA, 25 bp, SARS Virus
gacgagtatccgtaggacccgtcac

SEQ ID NO: 190135 - DNA, 25 bp, SARS Virus
acgagtatccggtggacccgtcacc

SEQ ID NO: 190136 - DNA, 25 bp, SARS Virus
cgagtatccggatgacccgtcaccg

SEQ ID NO: 190137 - DNA, 25 bp, SARS Virus
gagtatccggagtacccgtcaccgt

SEQ ID NO: 190138 - DNA, 25 bp, SARS Virus
agtatccggaggtcccgtcaccgta

SEQ ID NO: 190139 - DNA, 25 bp, SARS Virus
gtatccggaggatccgtcaccgtat

SEQ ID NO: 190140 - DNA, 25 bp, SARS Virus
tatccggaggactcgtcaccgtatt

SEQ ID NO: 190141 - DNA, 25 bp, SARS Virus
atccggaggacctgtcaccgtattc

SEQ ID NO: 190142 - DNA, 25 bp, SARS Virus
tccggaggacccttcaccgtattcg

SEQ ID NO: 190143 - DNA, 25 bp, SARS Virus
ccggaggacccgtcaccgtattcgc

SEQ ID NO: 190144 - DNA, 25 bp, SARS Virus
cggaggacccgttaccgtattcgcc

SEQ ID NO: 190145 - DNA, 25 bp, SARS Virus
ggaggacccgtctccgtattcgccg

SEQ ID NO: 190146 - DNA, 25 bp, SARS Virus
gaggacccgtcatcgtattcgccgt

SEQ ID NO: 190147 - DNA, 25 bp, SARS Virus
aggacccgtcactgtattcgccgta

SEQ ID NO: 190148 - DNA, 25 bp, SARS Virus
ggacccgtcaccttattcgccgtat

SEQ ID NO: 190149 - DNA, 25 bp, SARS Virus
gacccgtcaccgtattcgccgtata

SEQ ID NO: 190150 - DNA, 25 bp, SARS Virus
acccgtcaccgttttcgccgtatac

SEQ ID NO: 190151 - DNA, 25 bp, SARS Virus
cccgtcaccgtattcgccgtatact

SEQ ID NO: 190152 - DNA, 25 bp, SARS Virus
ccgtcaccgtattcgccgtatacta

SEQ ID NO: 190153 - DNA, 25 bp, SARS Virus
cgtcaccgtatttgccgtatactac

SEQ ID NO: 190154 - DNA, 25 bp, SARS Virus
gtcaccgtattctccgtatactacc

SEQ ID NO: 190155 - DNA, 25 bp, SARS Virus
tcaccgtattcgtcgtatactacca

SEQ ID NO: 190156 - DNA, 25 bp, SARS Virus
caccgtattcgctgtatactaccat

SEQ ID NO: 190157 - DNA, 25 bp, SARS Virus
accgtattcgccttatactaccatt

SEQ ID NO: 190158 - DNA, 25 bp, SARS Virus
ccgtattcgccgtatactaccattt

SEQ ID NO: 190159 - DNA, 25 bp, SARS Virus
cgtattcgccgtttactaccatttc

SEQ ID NO: 190160 - DNA, 25 bp, SARS Virus
gtattcgccgtatactaccatttct

SEQ ID NO: 190161 - DNA, 25 bp, SARS Virus
tattcgccgtattctaccatttctt

SEQ ID NO: 190162 - DNA, 25 bp, SARS Virus
attcgccgtatattaccatttcttg

SEQ ID NO: 190163 - DNA, 25 bp, SARS Virus
ttcgccgtatactaccatttcttga

SEQ ID NO: 190164 - DNA, 25 bp, SARS Virus
tcgccgtatacttccatttcttgat

SEQ ID NO: 190165 - DNA, 25 bp, SARS Virus
cgccgtatactatcatttcttgatt

SEQ ID NO: 190166 - DNA, 25 bp, SARS Virus
gccgtatactactatttcttgattt

SEQ ID NO: 190167 - DNA, 25 bp, SARS Virus
ccgtatactaccttttcttgattta

SEQ ID NO: 190168 - DNA, 25 bp, SARS Virus
cgtatactaccatttcttgatttaa

SEQ ID NO: 190169 - DNA, 25 bp, SARS Virus
gtatactaccatttcttgatttaag

SEQ ID NO: 190170 - DNA, 25 bp, SARS Virus
tatactaccatttcttgatttaaga

SEQ ID NO: 190171 - DNA, 25 bp, SARS Virus
atactaccattttttgatttaagac

SEQ ID NO: 190172 - DNA, 25 bp, SARS Virus
tactaccatttcttgatttaagact

SEQ ID NO: 190173 - DNA, 25 bp, SARS Virus
actaccatttcttgatttaagactt

SEQ ID NO: 190174 - DNA, 25 bp, SARS Virus
ctaccatttctttatttaagacttc

SEQ ID NO: 190175 - DNA, 25 bp, SARS Virus
taccatttcttgttttaagacttcg

SEQ ID NO: 190176 - DNA, 25 bp, SARS Virus
accatttcttgatttaagacttcgt

SEQ ID NO: 190177 - DNA, 25 bp, SARS Virus
ccatttcttgatttaagacttcgtt

SEQ ID NO: 190178 - DNA, 25 bp, SARS Virus
catttcttgatttaagacttcgtta

SEQ ID NO: 190179 - DNA, 25 bp, SARS Virus
atttcttgattttagacttcgttat

SEQ ID NO: 190180 - DNA, 25 bp, SARS Virus
tttcttgatttatgacttcgttatc

SEQ ID NO: 190181 - DNA, 25 bp, SARS Virus
ttcttgatttaatacttcgttatcg

SEQ ID NO: 190182 - DNA, 25 bp, SARS Virus
tcttgatttaagtcttcgttatcgg

SEQ ID NO: 190183 - DNA, 25 bp, SARS Virus
cttgatttaagatttcgttatcgga

SEQ ID NO: 190184 - DNA, 25 bp, SARS Virus
ttgatttaagacttcgttatcggac

SEQ ID NO: 190185 - DNA, 25 bp, SARS Virus
tgatttaagacttcgttatcggact

SEQ ID NO: 190186 - DNA, 25 bp, SARS Virus
gatttaagactttgttatcggactt

SEQ ID NO: 190187 - DNA, 25 bp, SARS Virus
atttaagacttctttatcggacttc

SEQ ID NO: 190188 - DNA, 25 bp, SARS Virus
tttaagacttcgttatcggacttct

SEQ ID NO: 190189 - DNA, 25 bp, SARS Virus
ttaagacttcgttatcggacttctc

SEQ ID NO: 190190 - DNA, 25 bp, SARS Virus
taagacttcgttttcggacttctca

SEQ ID NO: 190191 - DNA, 25 bp, SARS Virus
aagacttcgttatcggacttctcat

SEQ ID NO: 190192 - DNA, 25 bp, SARS Virus
agacttcgttattggacttctcatc

SEQ ID NO: 190193 - DNA, 25 bp, SARS Virus
gacttcgttatctgacttctcatcg

SEQ ID NO: 190194 - DNA, 25 bp, SARS Virus
acttcgttatcgtacttctcatcgt

SEQ ID NO: 190195 - DNA, 25 bp, SARS Virus
cttcgttatcggtcttctcatcgtg

SEQ ID NO: 190196 - DNA, 25 bp, SARS Virus
ttcgttatcggatttctcatcgtgc

SEQ ID NO: 190197 - DNA, 25 bp, SARS Virus
tcgttatcggacttctcatcgtgcc

SEQ ID NO: 190198 - DNA, 25 bp, SARS Virus
cgttatcggacttctcatcgtgcca

SEQ ID NO: 190199 - DNA, 25 bp, SARS Virus
gttatcggacttttcatcgtgccaa

SEQ ID NO: 190200 - DNA, 25 bp, SARS Virus
ttatcggacttctcatcgtgccaat

SEQ ID NO: 190201 - DNA, 25 bp, SARS Virus
tatcggacttcttatcgtgccaata

SEQ ID NO: 190202 - DNA, 25 bp, SARS Virus
atcggacttctcttcgtgccaatag

SEQ ID NO: 190203 - DNA, 25 bp, SARS Virus
tcggacttctcatcgtgccaatagc

SEQ ID NO: 190204 - DNA, 25 bp, SARS Virus
cggacttctcattgtgccaatagct

SEQ ID NO: 190205 - DNA, 25 bp, SARS Virus
ggacttctcatcttgccaatagctc

SEQ ID NO: 190206 - DNA, 25 bp, SARS Virus
gacttctcatcgtgccaatagctcg

SEQ ID NO: 190207 - DNA, 25 bp, SARS Virus
acttctcatcgttccaatagctcgt

SEQ ID NO: 190208 - DNA, 25 bp, SARS Virus
cttctcatcgtgtcaatagctcgta

SEQ ID NO: 190209 - DNA, 25 bp, SARS Virus
ttctcatcgtgctaatagctcgtaa

SEQ ID NO: 190210 - DNA, 25 bp, SARS Virus
tctcatcgtgcctatagctcgtaaa

SEQ ID NO: 190211 - DNA, 25 bp, SARS Virus
ctcatcgtgccattagctcgtaaag

SEQ ID NO: 190212 - DNA, 25 bp, SARS Virus
tcatcgtgccaatagctcgtaaagg

SEQ ID NO: 190213 - DNA, 25 bp, SARS Virus
catcgtgccaattgctcgtaaagga

SEQ ID NO: 190214 - DNA, 25 bp, SARS Virus
atcgtgccaatatctcgtaaaggag

SEQ ID NO: 190215 - DNA, 25 bp, SARS Virus
tcgtgccaatagttcgtaaaggagc

SEQ ID NO: 190216 - DNA, 25 bp, SARS Virus
cgtgccaatagctcgtaaaggagcg

SEQ ID NO: 190217 - DNA, 25 bp, SARS Virus
gtgccaatagcttgtaaaggagcgt

SEQ ID NO: 190218 - DNA, 25 bp, SARS Virus
tgccaatagctcttaaaggagcgtg

SEQ ID NO: 190219 - DNA, 25 bp, SARS Virus
gccaatagctcgtaaaggagcgtgt

SEQ ID NO: 190220 - DNA, 25 bp, SARS Virus
ccaatagctcgttaaggagcgtgtt

SEQ ID NO: 190221 - DNA, 25 bp, SARS Virus
caatagctcgtataggagcgtgttg

SEQ ID NO: 190222 - DNA, 25 bp, SARS Virus
aatagctcgtaatggagcgtgttgg

SEQ ID NO: 190223 - DNA, 25 bp, SARS Virus
atagctcgtaaatgagcgtgttgga

SEQ ID NO: 190224 - DNA, 25 bp, SARS Virus
tagctcgtaaagtagcgtgttggat

SEQ ID NO: 190225 - DNA, 25 bp, SARS Virus
agctcgtaaaggtgcgtgttggata

SEQ ID NO: 190226 - DNA, 25 bp, SARS Virus
gctcgtaaaggatcgtgttggataa

SEQ ID NO: 190227 - DNA, 25 bp, SARS Virus
ctcgtaaaggagtgtgttggataat

SEQ ID NO: 190228 - DNA, 25 bp, SARS Virus
tcgtaaaggagcttgttggataatt

SEQ ID NO: 190229 - DNA, 25 bp, SARS Virus
cgtaaaggagcgtgttggataatta

SEQ ID NO: 190230 - DNA, 25 bp, SARS Virus
gtaaaggagcgttttggataattac

SEQ ID NO: 190231 - DNA, 25 bp, SARS Virus
taaaggagcgtgttggataattaca

SEQ ID NO: 190232 - DNA, 25 bp, SARS Virus
aaaggagcgtgttggataattacag

SEQ ID NO: 190233 - DNA, 25 bp, SARS Virus
aaggagcgtgtttgataattacaga

SEQ ID NO: 190234 - DNA, 25 bp, SARS Virus
aggagcgtgttgtataattacagat

SEQ ID NO: 190235 - DNA, 25 bp, SARS Virus
ggagcgtgttggttaattacagatg

SEQ ID NO: 190236 - DNA, 25 bp, SARS Virus
gagcgtgttggataattacagatgt

SEQ ID NO: 190237 - DNA, 25 bp, SARS Virus
agcgtgttggattattacagatgtc

SEQ ID NO: 190238 - DNA, 25 bp, SARS Virus
gcgtgttggatatttacagatgtcg

SEQ ID NO: 190239 - DNA, 25 bp, SARS Virus
cgtgttggataattacagatgtcgt

SEQ ID NO: 190240 - DNA, 25 bp, SARS Virus
gtgttggataattacagatgtcgtg

SEQ ID NO: 190241 - DNA, 25 bp, SARS Virus
tgttggataatttcagatgtcgtgg

SEQ ID NO: 190242 - DNA, 25 bp, SARS Virus
gttggataattatagatgtcgtggg

SEQ ID NO: 190243 - DNA, 25 bp, SARS Virus
ttggataattactgatgtcgtggga

SEQ ID NO: 190244 - DNA, 25 bp, SARS Virus
tggataattacatatgtcgtgggac

SEQ ID NO: 190245 - DNA, 25 bp, SARS Virus
ggataattacagttgtcgtgggacg

SEQ ID NO: 190246 - DNA, 25 bp, SARS Virus
gataattacagatgtcgtgggacgt

SEQ ID NO: 190247 - DNA, 25 bp, SARS Virus
ataattacagatttcgtgggacgta

SEQ ID NO: 190248 - DNA, 25 bp, SARS Virus
taattacagatgtcgtgggacgtac

SEQ ID NO: 190249 - DNA, 25 bp, SARS Virus
aattacagatgttgtgggacgtacc

SEQ ID NO: 190250 - DNA, 25 bp, SARS Virus
attacagatgtcttgggacgtacct

SEQ ID NO: 190251 - DNA, 25 bp, SARS Virus
ttacagatgtcgtgggacgtaccta

SEQ ID NO: 190252 - DNA, 25 bp, SARS Virus
tacagatgtcgttggacgtacctat

SEQ ID NO: 190253 - DNA, 25 bp, SARS Virus
acagatgtcgtgtgacgtacctatc

SEQ ID NO: 190254 - DNA, 25 bp, SARS Virus
cagatgtcgtggtacgtacctatcg

SEQ ID NO: 190255 - DNA, 25 bp, SARS Virus
agatgtcgtgggtcgtacctatcgt

SEQ ID NO: 190256 - DNA, 25 bp, SARS Virus
gatgtcgtgggatgtacctatcgtt

SEQ ID NO: 190257 - DNA, 25 bp, SARS Virus
atgtcgtgggacttacctatcgttt

SEQ ID NO: 190258 - DNA, 25 bp, SARS Virus
tgtcgtgggacgtacctatcgtttt

SEQ ID NO: 190259 - DNA, 25 bp, SARS Virus
gtcgtgggacgttcctatcgttttg

SEQ ID NO: 190260 - DNA, 25 bp, SARS Virus
tcgtgggacgtatctatcgttttgt

SEQ ID NO: 190261 - DNA, 25 bp, SARS Virus
cgtgggacgtacttatcgttttgtc

SEQ ID NO: 190262 - DNA, 25 bp, SARS Virus
gtgggacgtacctatcgttttgtct

SEQ ID NO: 190263 - DNA, 25 bp, SARS Virus
tgggacgtacctttcgttttgtctg

SEQ ID NO: 190264 - DNA, 25 bp, SARS Virus
gggacgtacctatcgttttgtctgt

SEQ ID NO: 190265 - DNA, 25 bp, SARS Virus
ggacgtacctattgttttgtctgtt

SEQ ID NO: 190266 - DNA, 25 bp, SARS Virus
gacgtacctatctttttgtctgttt

SEQ ID NO: 190267 - DNA, 25 bp, SARS Virus
acgtacctatcgttttgtctgtttt

SEQ ID NO: 190268 - DNA, 25 bp, SARS Virus
cgtacctatcgttttgtctgttttc

SEQ ID NO: 190269 - DNA, 25 bp, SARS Virus
gtacctatcgttttgtctgttttct

SEQ ID NO: 190270 - DNA, 25 bp, SARS Virus
tacctatcgttttgtctgttttctc

SEQ ID NO: 190271 - DNA, 25 bp, SARS Virus
acctatcgttttttctgttttctct

SEQ ID NO: 190272 - DNA, 25 bp, SARS Virus
cctatcgttttgtctgttttctctt

SEQ ID NO: 190273 - DNA, 25 bp, SARS Virus
ctatcgttttgtttgttttctcttt

SEQ ID NO: 190274 - DNA, 25 bp, SARS Virus
tatcgttttgtctgttttctctttg

SEQ ID NO: 190275 - DNA, 25 bp, SARS Virus
atcgttttgtcttttttctctttgg

SEQ ID NO: 190276 - DNA, 25 bp, SARS Virus
tcgttttgtctgttttctctttggt

SEQ ID NO: 190277 - DNA, 25 bp, SARS Virus
cgttttgtctgttttctctttggta

SEQ ID NO: 190278 - DNA, 25 bp, SARS Virus
gttttgtctgttttctctttggtag

SEQ ID NO: 190279 - DNA, 25 bp, SARS Virus
ttttgtctgttttctctttggtaga

SEQ ID NO: 190280 - DNA, 25 bp, SARS Virus
tttgtctgttttttctttggtagaa

SEQ ID NO: 190281 - DNA, 25 bp, SARS Virus
ttgtctgttttctctttggtagaag

SEQ ID NO: 190282 - DNA, 25 bp, SARS Virus
tgtctgttttctttttggtagaaga

SEQ ID NO: 190283 - DNA, 25 bp, SARS Virus
gtctgttttctctttggtagaagag

SEQ ID NO: 190284 - DNA, 25 bp, SARS Virus
tctgttttctctttggtagaagagc

SEQ ID NO: 190285 - DNA, 25 bp, SARS Virus
ctgttttctctttggtagaagagct

SEQ ID NO: 190286 - DNA, 25 bp, SARS Virus
tgttttctcttttgtagaagagctt

SEQ ID NO: 190287 - DNA, 25 bp, SARS Virus
gttttctctttgttagaagagcttt

SEQ ID NO: 190288 - DNA, 25 bp, SARS Virus
ttttctctttggtagaagagctttc

SEQ ID NO: 190289 - DNA, 25 bp, SARS Virus
tttctctttggttgaagagctttcg

SEQ ID NO: 190290 - DNA, 25 bp, SARS Virus
ttctctttggtataagagctttcga

SEQ ID NO: 190291 - DNA, 25 bp, SARS Virus
tctctttggtagtagagctttcgaa

SEQ ID NO: 190292 - DNA, 25 bp, SARS Virus
ctctttggtagatgagctttcgaag

SEQ ID NO: 190293 - DNA, 25 bp, SARS Virus
tctttggtagaatagctttcgaagt

SEQ ID NO: 190294 - DNA, 25 bp, SARS Virus
ctttggtagaagtgctttcgaagtc

SEQ ID NO: 190295 - DNA, 25 bp, SARS Virus
tttggtagaagatctttcgaagtca

SEQ ID NO: 190296 - DNA, 25 bp, SARS Virus
ttggtagaagagttttcgaagtcaa

SEQ ID NO: 190297 - DNA, 25 bp, SARS Virus
tggtagaagagctttcgaagtcaac

SEQ ID NO: 190298 - DNA, 25 bp, SARS Virus
ggtagaagagctttcgaagtcaaca

SEQ ID NO: 190299 - DNA, 25 bp, SARS Virus
gtagaagagctttcgaagtcaacac

SEQ ID NO: 190300 - DNA, 25 bp, SARS Virus
tagaagagcttttgaagtcaacaca

SEQ ID NO: 190301 - DNA, 25 bp, SARS Virus
agaagagctttctaagtcaacacag

SEQ ID NO: 190302 - DNA, 25 bp, SARS Virus
gaagagctttcgtagtcaacacaga

SEQ ID NO: 190303 - DNA, 25 bp, SARS Virus
aagagctttcgatgtcaacacagaa

SEQ ID NO: 190304 - DNA, 25 bp, SARS Virus
agagctttcgaattcaacacagaaa

SEQ ID NO: 190305 - DNA, 25 bp, SARS Virus
gagctttcgaagtcaacacagaaaa

SEQ ID NO: 190306 - DNA, 25 bp, SARS Virus
agctttcgaagttaacacagaaaac

SEQ ID NO: 190307 - DNA, 25 bp, SARS Virus
gctttcgaagtctacacagaaaacg

SEQ ID NO: 190308 - DNA, 25 bp, SARS Virus
ctttcgaagtcatcacagaaaacgt

SEQ ID NO: 190309 - DNA, 25 bp, SARS Virus
tttcgaagtcaatacagaaaacgtt

SEQ ID NO: 190310 - DNA, 25 bp, SARS Virus
ttcgaagtcaactcagaaaacgttc

SEQ ID NO: 190311 - DNA, 25 bp, SARS Virus
tcgaagtcaacatagaaaacgttct

SEQ ID NO: 190312 - DNA, 25 bp, SARS Virus
cgaagtcaacactgaaaacgttctt

SEQ ID NO: 190313 - DNA, 25 bp, SARS Virus
gaagtcaacacataaaacgttcttc

SEQ ID NO: 190314 - DNA, 25 bp, SARS Virus
aagtcaacacagtaaacgttcttct

SEQ ID NO: 190315 - DNA, 25 bp, SARS Virus
agtcaacacagataacgttcttctt

SEQ ID NO: 190316 - DNA, 25 bp, SARS Virus
gtcaacacagaatacgttcttctta

SEQ ID NO: 190317 - DNA, 25 bp, SARS Virus
tcaacacagaaatcgttcttcttat

SEQ ID NO: 190318 - DNA, 25 bp, SARS Virus
caacacagaaaatgttcttcttata

SEQ ID NO: 190319 - DNA, 25 bp, SARS Virus
aacacagaaaactttcttcttatag

SEQ ID NO: 190320 - DNA, 25 bp, SARS Virus
acacagaaaacgttcttcttatagt

SEQ ID NO: 190321 - DNA, 25 bp, SARS Virus
cacagaaaacgttcttcttatagta

SEQ ID NO: 190322 - DNA, 25 bp, SARS Virus
acagaaaacgtttttcttatagtaa

SEQ ID NO: 190323 - DNA, 25 bp, SARS Virus
cagaaaacgttcttcttatagtaac

SEQ ID NO: 190324 - DNA, 25 bp, SARS Virus
agaaaacgttcttcttatagtaaca

SEQ ID NO: 190325 - DNA, 25 bp, SARS Virus
gaaaacgttctttttatagtaacac

SEQ ID NO: 190326 - DNA, 25 bp, SARS Virus
aaaacgttcttcttatagtaacacc

SEQ ID NO: 190327 - DNA, 25 bp, SARS Virus
aaacgttcttcttatagtaacacct

SEQ ID NO: 190328 - DNA, 25 bp, SARS Virus
aacgttcttcttttagtaacacctc

SEQ ID NO: 190329 - DNA, 25 bp, SARS Virus
acgttcttcttatagtaacacctca

SEQ ID NO: 190330 - DNA, 25 bp, SARS Virus
cgttcttcttattgtaacacctcaa

SEQ ID NO: 190331 - DNA, 25 bp, SARS Virus
gttcttcttatattaacacctcaac

SEQ ID NO: 190332 - DNA, 25 bp, SARS Virus
ttcttcttatagtaacacctcaaca

SEQ ID NO: 190333 - DNA, 25 bp, SARS Virus
tcttcttatagttacacctcaacat

SEQ ID NO: 190334 - DNA, 25 bp, SARS Virus
cttcttatagtatcacctcaacatg

SEQ ID NO: 190335 - DNA, 25 bp, SARS Virus
ttcttatagtaatacctcaacatgt

SEQ ID NO: 190336 - DNA, 25 bp, SARS Virus
tcttatagtaactcctcaacatgtg

SEQ ID NO: 190337 - DNA, 25 bp, SARS Virus
cttatagtaacatctcaacatgtgt

SEQ ID NO: 190338 - DNA, 25 bp, SARS Virus
ttatagtaacacttcaacatgtgta

SEQ ID NO: 190339 - DNA, 25 bp, SARS Virus
tatagtaacacctcaacatgtgtaa

SEQ ID NO: 190340 - DNA, 25 bp, SARS Virus
atagtaacaccttaacatgtgtaac

SEQ ID NO: 190341 - DNA, 25 bp, SARS Virus
tagtaacacctctacatgtgtaaca

SEQ ID NO: 190342 - DNA, 25 bp, SARS Virus
agtaacacctcatcatgtgtaacac

SEQ ID NO: 190343 - DNA, 25 bp, SARS Virus
gtaacacctcaatatgtgtaacacg

SEQ ID NO: 190344 - DNA, 25 bp, SARS Virus
taacacctcaacttgtgtaacacgg

SEQ ID NO: 190345 - DNA, 25 bp, SARS Virus
aacacctcaacatgtgtaacacggg

SEQ ID NO: 190346 - DNA, 25 bp, SARS Virus
acacctcaacatttgtaacacgggt

SEQ ID NO: 190347 - DNA, 25 bp, SARS Virus
cacctcaacatgtgtaacacgggtg

SEQ ID NO: 190348 - DNA, 25 bp, SARS Virus
acctcaacatgtttaacacgggtgt

SEQ ID NO: 190349 - DNA, 25 bp, SARS Virus
cctcaacatgtgtaacacgggtgtt

SEQ ID NO: 190350 - DNA, 25 bp, SARS Virus
ctcaacatgtgttacacgggtgtta

SEQ ID NO: 190351 - DNA, 25 bp, SARS Virus
tcaacatgtgtatcacgggtgttaa

SEQ ID NO: 190352 - DNA, 25 bp, SARS Virus
caacatgtgtaatacgggtgttaaa

SEQ ID NO: 190353 - DNA, 25 bp, SARS Virus
aacatgtgtaacacgggtgttaaat

SEQ ID NO: 190354 - DNA, 25 bp, SARS Virus
acatgtgtaacaagggtgttaaatc

SEQ ID NO: 190355 - DNA, 25 bp, SARS Virus
catgtgtaacacaggtgttaaatct

SEQ ID NO: 190356 - DNA, 25 bp, SARS Virus
atgtgtaacacgagtgttaaatctt

SEQ ID NO: 190357 - DNA, 25 bp, SARS Virus
tgtgtaacacggatgttaaatcttc

SEQ ID NO: 190358 - DNA, 25 bp, SARS Virus
gtgtaacacgggagttaaatcttct

SEQ ID NO: 190359 - DNA, 25 bp, SARS Virus
tgtaacacgggtattaaatcttcta

SEQ ID NO: 190360 - DNA, 25 bp, SARS Virus
gtaacacgggtgataaatcttctac

SEQ ID NO: 190361 - DNA, 25 bp, SARS Virus
taacacgggtgtaaaatcttctact

SEQ ID NO: 190362 - DNA, 25 bp, SARS Virus
aacacgggtgttaaatcttctactg

SEQ ID NO: 190363 - DNA, 25 bp, SARS Virus
acacgggtgttaaatcttctactga

SEQ ID NO: 190364 - DNA, 25 bp, SARS Virus
cacgggtgttaaatcttctactgag

SEQ ID NO: 190365 - DNA, 25 bp, SARS Virus
acgggtgttaaaacttctactgaga

SEQ ID NO: 190366 - DNA, 25 bp, SARS Virus
cgggtgttaaatattctactgagat

SEQ ID NO: 190367 - DNA, 25 bp, SARS Virus
gggtgttaaatcatctactgagatg

SEQ ID NO: 190368 - DNA, 25 bp, SARS Virus
ggtgttaaatctactactgagatga

SEQ ID NO: 190369 - DNA, 25 bp, SARS Virus
gtgttaaatcttatactgagatgag

SEQ ID NO: 190370 - DNA, 25 bp, SARS Virus
tgttaaatcttcaactgagatgaga

SEQ ID NO: 190371 - DNA, 25 bp, SARS Virus
gttaaatcttctactgagatgagat

SEQ ID NO: 190372 - DNA, 25 bp, SARS Virus
ttaaatcttctaatgagatgagatt

SEQ ID NO: 190373 - DNA, 25 bp, SARS Virus
taaatcttctacagagatgagattc

SEQ ID NO: 190374 - DNA, 25 bp, SARS Virus
aaatcttctactaagatgagattca

SEQ ID NO: 190375 - DNA, 25 bp, SARS Virus
aatcttctactgagatgagattcaa

SEQ ID NO: 190376 - DNA, 25 bp, SARS Virus
atcttctactgaaatgagattcaac

SEQ ID NO: 190377 - DNA, 25 bp, SARS Virus
tcttctactgagatgagattcaaca

SEQ ID NO: 190378 - DNA, 25 bp, SARS Virus
cttctactgagaagagattcaacaa

SEQ ID NO: 190379 - DNA, 25 bp, SARS Virus
ttctactgagataagattcaacaac

SEQ ID NO: 190380 - DNA, 25 bp, SARS Virus
tctactgagatgagattcaacaact

SEQ ID NO: 190381 - DNA, 25 bp, SARS Virus
ctactgagatgaaattcaacaactt

SEQ ID NO: 190382 - DNA, 25 bp, SARS Virus
tactgagatgagattcaacaacttc

SEQ ID NO: 190383 - DNA, 25 bp, SARS Virus
actgagatgagaatcaacaacttct

SEQ ID NO: 190384 - DNA, 25 bp, SARS Virus
ctgagatgagatacaacaacttctt

SEQ ID NO: 190385 - DNA, 25 bp, SARS Virus
tgagatgagattaaacaacttcttg

SEQ ID NO: 190386 - DNA, 25 bp, SARS Virus
gagatgagattcaacaacttcttgg

SEQ ID NO: 190387 - DNA, 25 bp, SARS Virus
agatgagattcaacaacttcttggc

SEQ ID NO: 190388 - DNA, 25 bp, SARS Virus
gatgagattcaaaaacttcttggct

SEQ ID NO: 190389 - DNA, 25 bp, SARS Virus
atgagattcaacaacttcttggctc

SEQ ID NO: 190390 - DNA, 25 bp, SARS Virus
tgagattcaacaacttcttggctct

SEQ ID NO: 190391 - DNA, 25 bp, SARS Virus
gagattcaacaaattcttggctctc

SEQ ID NO: 190392 - DNA, 25 bp, SARS Virus
agattcaacaacatcttggctctcg

SEQ ID NO: 190393 - DNA, 25 bp, SARS Virus
gattcaacaactacttggctctcgt

SEQ ID NO: 190394 - DNA, 25 bp, SARS Virus
attcaacaacttattggctctcgtc

SEQ ID NO: 190395 - DNA, 25 bp, SARS Virus
ttcaacaacttcatggctctcgtca

SEQ ID NO: 190396 - DNA, 25 bp, SARS Virus
tcaacaacttctaggctctcgtcat

SEQ ID NO: 190397 - DNA, 25 bp, SARS Virus
caacaacttcttagctctcgtcatg

SEQ ID NO: 190398 - DNA, 25 bp, SARS Virus
aacaacttcttgactctcgtcatgg

SEQ ID NO: 190399 - DNA, 25 bp, SARS Virus
acaacttcttggatctcgtcatggt

SEQ ID NO: 190400 - DNA, 25 bp, SARS Virus
caacttcttggcactcgtcatggtg

SEQ ID NO: 190401 - DNA, 25 bp, SARS Virus
aacttcttggctatcgtcatggtgt

SEQ ID NO: 190402 - DNA, 25 bp, SARS Virus
acttcttggctcacgtcatggtgtc

SEQ ID NO: 190403 - DNA, 25 bp, SARS Virus
cttcttggctctagtcatggtgtct

SEQ ID NO: 190404 - DNA, 25 bp, SARS Virus
ttcttggctctcatcatggtgtcta

SEQ ID NO: 190405 - DNA, 25 bp, SARS Virus
tcttggctctcgacatggtgtctac

SEQ ID NO: 190406 - DNA, 25 bp, SARS Virus
cttggctctcgtaatggtgtctaca

SEQ ID NO: 190407 - DNA, 25 bp, SARS Virus
ttggctctcgtcatggtgtctacac

SEQ ID NO: 190408 - DNA, 25 bp, SARS Virus
tggctctcgtcaaggtgtctacacg

SEQ ID NO: 190409 - DNA, 25 bp, SARS Virus
ggctctcgtcatagtgtctacacgt

SEQ ID NO: 190410 - DNA, 25 bp, SARS Virus
gctctcgtcatgatgtctacacgtg

SEQ ID NO: 190411 - DNA, 25 bp, SARS Virus
ctctcgtcatggagtctacacgtga

SEQ ID NO: 190412 - DNA, 25 bp, SARS Virus
tctcgtcatggtatctacacgtgaa

SEQ ID NO: 190413 - DNA, 25 bp, SARS Virus
ctcgtcatggtgactacacgtgaaa

SEQ ID NO: 190414 - DNA, 25 bp, SARS Virus
tcgtcatggtgtatacacgtgaaat

SEQ ID NO: 190415 - DNA, 25 bp, SARS Virus
cgtcatggtgtcaacacgtgaaatg

SEQ ID NO: 190416 - DNA, 25 bp, SARS Virus
gtcatggtgtctacacgtgaaatgc

SEQ ID NO: 190417 - DNA, 25 bp, SARS Virus
tcatggtgtctaaacgtgaaatgca

SEQ ID NO: 190418 - DNA, 25 bp, SARS Virus
catggtgtctacacgtgaaatgcag

SEQ ID NO: 190419 - DNA, 25 bp, SARS Virus
atggtgtctacaagtgaaatgcagt

SEQ ID NO: 190420 - DNA, 25 bp, SARS Virus
tggtgtctacacatgaaatgcagtc

SEQ ID NO: 190421 - DNA, 25 bp, SARS Virus
ggtgtctacacgagaaatgcagtct

SEQ ID NO: 190422 - DNA, 25 bp, SARS Virus
gtgtctacacgtaaaatgcagtctg

SEQ ID NO: 190423 - DNA, 25 bp, SARS Virus
tgtctacacgtgaaatgcagtctgt

SEQ ID NO: 190424 - DNA, 25 bp, SARS Virus
gtctacacgtgaaatgcagtctgta

SEQ ID NO: 190425 - DNA, 25 bp, SARS Virus
tctacacgtgaaatgcagtctgtaa

SEQ ID NO: 190426 - DNA, 25 bp, SARS Virus
ctacacgtgaaaagcagtctgtaaa

SEQ ID NO: 190427 - DNA, 25 bp, SARS Virus
tacacgtgaaatacagtctgtaaaa

SEQ ID NO: 190428 - DNA, 25 bp, SARS Virus
acacgtgaaatgaagtctgtaaaat

SEQ ID NO: 190429 - DNA, 25 bp, SARS Virus
cacgtgaaatgcagtctgtaaaatc

SEQ ID NO: 190430 - DNA, 25 bp, SARS Virus
acgtgaaatgcaatctgtaaaatct

SEQ ID NO: 190431 - DNA, 25 bp, SARS Virus
cgtgaaatgcagactgtaaaatctg

SEQ ID NO: 190432 - DNA, 25 bp, SARS Virus
gtgaaatgcagtatgtaaaatctga

SEQ ID NO: 190433 - DNA, 25 bp, SARS Virus
tgaaatgcagtcagtaaaatctgac

SEQ ID NO: 190434 - DNA, 25 bp, SARS Virus
gaaatgcagtctataaaatctgaca

SEQ ID NO: 190435 - DNA, 25 bp, SARS Virus
aaatgcagtctgaaaaatctgacat

SEQ ID NO: 190436 - DNA, 25 bp, SARS Virus
aatgcagtctgtaaaatctgacatg

SEQ ID NO: 190437 - DNA, 25 bp, SARS Virus
atgcagtctgtaaaatctgacatgt

SEQ ID NO: 190438 - DNA, 25 bp, SARS Virus
tgcagtctgtaaaatctgacatgtc

SEQ ID NO: 190439 - DNA, 25 bp, SARS Virus
gcagtctgtaaaatctgacatgtca

SEQ ID NO: 190440 - DNA, 25 bp, SARS Virus
cagtctgtaaaaactgacatgtcat

SEQ ID NO: 190441 - DNA, 25 bp, SARS Virus
agtctgtaaaatatgacatgtcatc

SEQ ID NO: 190442 - DNA, 25 bp, SARS Virus
gtctgtaaaatcagacatgtcatcg

SEQ ID NO: 190443 - DNA, 25 bp, SARS Virus
tctgtaaaatctaacatgtcatcgt

SEQ ID NO: 190444 - DNA, 25 bp, SARS Virus
ctgtaaaatctgacatgtcatcgtt

SEQ ID NO: 190445 - DNA, 25 bp, SARS Virus
tgtaaaatctgaaatgtcatcgttg

SEQ ID NO: 190446 - DNA, 25 bp, SARS Virus
gtaaaatctgacatgtcatcgttgg

SEQ ID NO: 190447 - DNA, 25 bp, SARS Virus
taaaatctgacaagtcatcgttgga

SEQ ID NO: 190448 - DNA, 25 bp, SARS Virus
aaaatctgacatatcatcgttggaa

SEQ ID NO: 190449 - DNA, 25 bp, SARS Virus
aaatctgacatgacatcgttggaac

SEQ ID NO: 190450 - DNA, 25 bp, SARS Virus
aatctgacatgtaatcgttggaact

SEQ ID NO: 190451 - DNA, 25 bp, SARS Virus
atctgacatgtcatcgttggaacta

SEQ ID NO: 190452 - DNA, 25 bp, SARS Virus
tctgacatgtcaacgttggaactat

SEQ ID NO: 190453 - DNA, 25 bp, SARS Virus
ctgacatgtcatagttggaactatg

SEQ ID NO: 190454 - DNA, 25 bp, SARS Virus
tgacatgtcatcattggaactatgt

SEQ ID NO: 190455 - DNA, 25 bp, SARS Virus
gacatgtcatcgatggaactatgta

SEQ ID NO: 190456 - DNA, 25 bp, SARS Virus
acatgtcatcgtaggaactatgtac

SEQ ID NO: 190457 - DNA, 25 bp, SARS Virus
catgtcatcgttagaactatgtacc

SEQ ID NO: 190458 - DNA, 25 bp, SARS Virus
atgtcatcgttgaaactatgtacca

SEQ ID NO: 190459 - DNA, 25 bp, SARS Virus
tgtcatcgttggaactatgtaccaa

SEQ ID NO: 190460 - DNA, 25 bp, SARS Virus
gtcatcgttggaactatgtaccaaa

SEQ ID NO: 190461 - DNA, 25 bp, SARS Virus
tcatcgttggaaatatgtaccaaat

SEQ ID NO: 190462 - DNA, 25 bp, SARS Virus
catcgttggaacaatgtaccaaatg

SEQ ID NO: 190463 - DNA, 25 bp, SARS Virus
atcgttggaactatgtaccaaatgg

SEQ ID NO: 190464 - DNA, 25 bp, SARS Virus
tcgttggaactaagtaccaaatgga

SEQ ID NO: 190465 - DNA, 25 bp, SARS Virus
cgttggaactatataccaaatggag

SEQ ID NO: 190466 - DNA, 25 bp, SARS Virus
gttggaactatgaaccaaatggagg

SEQ ID NO: 190467 - DNA, 25 bp, SARS Virus
ttggaactatgtaccaaatggaggt

SEQ ID NO: 190468 - DNA, 25 bp, SARS Virus
tggaactatgtaacaaatggaggtt

SEQ ID NO: 190469 - DNA, 25 bp, SARS Virus
ggaactatgtacaaaatggaggtta

SEQ ID NO: 190470 - DNA, 25 bp, SARS Virus
gaactatgtaccaaatggaggttat

SEQ ID NO: 190471 - DNA, 25 bp, SARS Virus
aactatgtaccaaatggaggttatg

SEQ ID NO: 190472 - DNA, 25 bp, SARS Virus
actatgtaccaaatggaggttatgg

SEQ ID NO: 190473 - DNA, 25 bp, SARS Virus
ctatgtaccaaaaggaggttatggg

SEQ ID NO: 190474 - DNA, 25 bp, SARS Virus
tatgtaccaaatagaggttatgggt

SEQ ID NO: 190475 - DNA, 25 bp, SARS Virus
atgtaccaaatgaaggttatgggtt

SEQ ID NO: 190476 - DNA, 25 bp, SARS Virus
tgtaccaaatggaggttatgggttg

SEQ ID NO: 190477 - DNA, 25 bp, SARS Virus
gtaccaaatggaagttatgggttgt

SEQ ID NO: 190478 - DNA, 25 bp, SARS Virus
taccaaatggagattatgggttgtt

SEQ ID NO: 190479 - DNA, 25 bp, SARS Virus
accaaatggaggatatgggttgttg

SEQ ID NO: 190480 - DNA, 25 bp, SARS Virus
ccaaatggaggtaatgggttgttga

SEQ ID NO: 190481 - DNA, 25 bp, SARS Virus
caaatggaggttatgggttgttgaa

SEQ ID NO: 190482 - DNA, 25 bp, SARS Virus
aaatggaggttaagggttgttgaat

SEQ ID NO: 190483 - DNA, 25 bp, SARS Virus
aatggaggttataggttgttgaatt

SEQ ID NO: 190484 - DNA, 25 bp, SARS Virus
atggaggttatgagttgttgaatta

SEQ ID NO: 190485 - DNA, 25 bp, SARS Virus
tggaggttatggattgttgaattac

SEQ ID NO: 190486 - DNA, 25 bp, SARS Virus
ggaggttatgggatgttgaattaca

SEQ ID NO: 190487 - DNA, 25 bp, SARS Virus
gaggttatgggtagttgaattacaa

SEQ ID NO: 190488 - DNA, 25 bp, SARS Virus
aggttatgggttattgaattacaat

SEQ ID NO: 190489 - DNA, 25 bp, SARS Virus
ggttatgggttgatgaattacaatt

SEQ ID NO: 190490 - DNA, 25 bp, SARS Virus
gttatgggttgtagaattacaattc

SEQ ID NO: 190491 - DNA, 25 bp, SARS Virus
ttatgggttgttaaattacaattcg

SEQ ID NO: 190492 - DNA, 25 bp, SARS Virus
tatgggttgttgaattacaattcga

SEQ ID NO: 190493 - DNA, 25 bp, SARS Virus
atgggttgttgaattacaattcgaa

SEQ ID NO: 190494 - DNA, 25 bp, SARS Virus
tgggttgttgaaatacaattcgaac

SEQ ID NO: 190495 - DNA, 25 bp, SARS Virus
gggttgttgaataacaattcgaact

SEQ ID NO: 190496 - DNA, 25 bp, SARS Virus
ggttgttgaattacaattcgaactt

SEQ ID NO: 190497 - DNA, 25 bp, SARS Virus
gttgttgaattaaaattcgaacttt

SEQ ID NO: 190498 - DNA, 25 bp, SARS Virus
ttgttgaattacaattcgaactttc

SEQ ID NO: 190499 - DNA, 25 bp, SARS Virus
tgttgaattacaattcgaactttcg

SEQ ID NO: 190500 - DNA, 25 bp, SARS Virus
gttgaattacaaatcgaactttcgt

SEQ ID NO: 190501 - DNA, 25 bp, SARS Virus
ttgaattacaatacgaactttcgta

SEQ ID NO: 190502 - DNA, 25 bp, SARS Virus
tgaattacaattagaactttcgtag

SEQ ID NO: 190503 - DNA, 25 bp, SARS Virus
gaattacaattcaaactttcgtagt

SEQ ID NO: 190504 - DNA, 25 bp, SARS Virus
aattacaattcgaactttcgtagtt

SEQ ID NO: 190505 - DNA, 25 bp, SARS Virus
attacaattcgaactttcgtagtta

SEQ ID NO: 190506 - DNA, 25 bp, SARS Virus
ttacaattcgaaatttcgtagttat

SEQ ID NO: 190507 - DNA, 25 bp, SARS Virus
tacaattcgaacattcgtagttatg

SEQ ID NO: 190508 - DNA, 25 bp, SARS Virus
acaattcgaactatcgtagttatga

SEQ ID NO: 190509 - DNA, 25 bp, SARS Virus
caattcgaacttacgtagttatgat

SEQ ID NO: 190510 - DNA, 25 bp, SARS Virus
aattcgaactttagtagttatgatg

SEQ ID NO: 190511 - DNA, 25 bp, SARS Virus
attcgaactttcatagttatgatga

SEQ ID NO: 190512 - DNA, 25 bp, SARS Virus
ttcgaactttcgaagttatgatgag

SEQ ID NO: 190513 - DNA, 25 bp, SARS Virus
tcgaactttcgtagttatgatgaga

SEQ ID NO: 190514 - DNA, 25 bp, SARS Virus
cgaactttcgtaattatgatgagaa

SEQ ID NO: 190515 - DNA, 25 bp, SARS Virus
gaactttcgtagatatgatgagaat

SEQ ID NO: 190516 - DNA, 25 bp, SARS Virus
aactttcgtagtaatgatgagaatc

SEQ ID NO: 190517 - DNA, 25 bp, SARS Virus
actttcgtagttatgatgagaatcc

SEQ ID NO: 190518 - DNA, 25 bp, SARS Virus
ctttcgtagttaagatgagaatcct

SEQ ID NO: 190519 - DNA, 25 bp, SARS Virus
tttcgtagttataatgagaatcctc

SEQ ID NO: 190520 - DNA, 25 bp, SARS Virus
ttcgtagttatgatgagaatcctcc

SEQ ID NO: 190521 - DNA, 25 bp, SARS Virus
tcgtagttatgaagagaatcctccg

SEQ ID NO: 190522 - DNA, 25 bp, SARS Virus
cgtagttatgataagaatcctccgt

SEQ ID NO: 190523 - DNA, 25 bp, SARS Virus
gtagttatgatgagaatcctccgtt

SEQ ID NO: 190524 - DNA, 25 bp, SARS Virus
tagttatgatgaaaatcctccgttt

SEQ ID NO: 190525 - DNA, 25 bp, SARS Virus
agttatgatgagaatcctccgtttt

SEQ ID NO: 190526 - DNA, 25 bp, SARS Virus
gttatgatgagaatcctccgttttc

SEQ ID NO: 190527 - DNA, 25 bp, SARS Virus
ttatgatgagaaacctccgttttcg

SEQ ID NO: 190528 - DNA, 25 bp, SARS Virus
tatgatgagaatactccgttttcgg

SEQ ID NO: 190529 - DNA, 25 bp, SARS Virus
atgatgagaatcatccgttttcggg

SEQ ID NO: 190530 - DNA, 25 bp, SARS Virus
tgatgagaatccaccgttttcgggg

SEQ ID NO: 190531 - DNA, 25 bp, SARS Virus
gatgagaatcctacgttttcgggga

SEQ ID NO: 190532 - DNA, 25 bp, SARS Virus
atgagaatcctcagttttcggggac

SEQ ID NO: 190533 - DNA, 25 bp, SARS Virus
tgagaatcctccattttcggggacc

SEQ ID NO: 190534 - DNA, 25 bp, SARS Virus
gagaatcctccgatttcggggaccc

SEQ ID NO: 190535 - DNA, 25 bp, SARS Virus
agaatcctccgtattcggggaccct

SEQ ID NO: 190536 - DNA, 25 bp, SARS Virus
gaatcctccgttatcggggaccctc

SEQ ID NO: 190537 - DNA, 25 bp, SARS Virus
aatcctccgtttacggggaccctca

SEQ ID NO: 190538 - DNA, 25 bp, SARS Virus
atcctccgttttaggggaccctcaa

SEQ ID NO: 190539 - DNA, 25 bp, SARS Virus
tcctccgttttcagggaccctcaag

SEQ ID NO: 190540 - DNA, 25 bp, SARS Virus
cctccgttttcgaggaccctcaagt

SEQ ID NO: 190541 - DNA, 25 bp, SARS Virus
ctccgttttcggagaccctcaagta

SEQ ID NO: 190542 - DNA, 25 bp, SARS Virus
tccgttttcgggaaccctcaagtat

SEQ ID NO: 190543 - DNA, 25 bp, SARS Virus
ccgttttcggggaccctcaagtata

SEQ ID NO: 190544 - DNA, 25 bp, SARS Virus
cgttttcggggaacctcaagtatat

SEQ ID NO: 190545 - DNA, 25 bp, SARS Virus
gttttcggggacactcaagtatatg

SEQ ID NO: 190546 - DNA, 25 bp, SARS Virus
ttttcggggaccatcaagtatatgg

SEQ ID NO: 190547 - DNA, 25 bp, SARS Virus
tttcggggacccacaagtatatgga

SEQ ID NO: 190548 - DNA, 25 bp, SARS Virus
ttcggggaccctaaagtatatggat

SEQ ID NO: 190549 - DNA, 25 bp, SARS Virus
tcggggaccctcaagtatatggatt

SEQ ID NO: 190550 - DNA, 25 bp, SARS Virus
cggggaccctcaagtatatggattt

SEQ ID NO: 190551 - DNA, 25 bp, SARS Virus
ggggaccctcaaatatatggattta

SEQ ID NO: 190552 - DNA, 25 bp, SARS Virus
gggaccctcaagaatatggatttaa

SEQ ID NO: 190553 - DNA, 25 bp, SARS Virus
ggaccctcaagtatatggatttaag

SEQ ID NO: 190554 - DNA, 25 bp, SARS Virus
gaccctcaagtaaatggatttaaga

SEQ ID NO: 190555 - DNA, 25 bp, SARS Virus
accctcaagtatatggatttaagaa

SEQ ID NO: 190556 - DNA, 25 bp, SARS Virus
ccctcaagtataaggatttaagaac

SEQ ID NO: 190557 - DNA, 25 bp, SARS Virus
cctcaagtatatagatttaagaaca

SEQ ID NO: 190558 - DNA, 25 bp, SARS Virus
ctcaagtatatgaatttaagaacac

SEQ ID NO: 190559 - DNA, 25 bp, SARS Virus
tcaagtatatggatttaagaacaca

SEQ ID NO: 190560 - DNA, 25 bp, SARS Virus
caagtatatggaattaagaacacat

SEQ ID NO: 190561 - DNA, 25 bp, SARS Virus
aagtatatggatataagaacacatc

SEQ ID NO: 190562 - DNA, 25 bp, SARS Virus
agtatatggattaaagaacacatct

SEQ ID NO: 190563 - DNA, 25 bp, SARS Virus
gtatatggatttaagaacacatctc

SEQ ID NO: 190564 - DNA, 25 bp, SARS Virus
tatatggatttaagaacacatctct

SEQ ID NO: 190565 - DNA, 25 bp, SARS Virus
atatggatttaaaaacacatctctg

SEQ ID NO: 190566 - DNA, 25 bp, SARS Virus
tatggatttaagaacacatctctgg

SEQ ID NO: 190567 - DNA, 25 bp, SARS Virus
atggatttaagaacacatctctggt

SEQ ID NO: 190568 - DNA, 25 bp, SARS Virus
tggatttaagaaaacatctctggtt

SEQ ID NO: 190569 - DNA, 25 bp, SARS Virus
ggatttaagaacacatctctggttc

SEQ ID NO: 190570 - DNA, 25 bp, SARS Virus
gatttaagaacaaatctctggttca

SEQ ID NO: 190571 - DNA, 25 bp, SARS Virus
atttaagaacacatctctggttcat

SEQ ID NO: 190572 - DNA, 25 bp, SARS Virus
tttaagaacacaactctggttcatc

SEQ ID NO: 190573 - DNA, 25 bp, SARS Virus
ttaagaacacatatctggttcatca

SEQ ID NO: 190574 - DNA, 25 bp, SARS Virus
taagaacacatcactggttcatcag

SEQ ID NO: 190575 - DNA, 25 bp, SARS Virus
aagaacacatctatggttcatcagt

SEQ ID NO: 190576 - DNA, 25 bp, SARS Virus
agaacacatctcaggttcatcagta

SEQ ID NO: 190577 - DNA, 25 bp, SARS Virus
gaacacatctctagttcatcagtat

SEQ ID NO: 190578 - DNA, 25 bp, SARS Virus
aacacatctctgattcatcagtatt

SEQ ID NO: 190579 - DNA, 25 bp, SARS Virus
acacatctctggatcatcagtattt

SEQ ID NO: 190580 - DNA, 25 bp, SARS Virus
cacatctctggtacatcagtatttg

SEQ ID NO: 190581 - DNA, 25 bp, SARS Virus
acatctctggttaatcagtatttgt

SEQ ID NO: 190582 - DNA, 25 bp, SARS Virus
catctctggttcatcagtatttgtg

SEQ ID NO: 190583 - DNA, 25 bp, SARS Virus
atctctggttcaacagtatttgtgg

SEQ ID NO: 190584 - DNA, 25 bp, SARS Virus
tctctggttcataagtatttgtggt

SEQ ID NO: 190585 - DNA, 25 bp, SARS Virus
ctctggttcatcagtatttgtggtt

SEQ ID NO: 190586 - DNA, 25 bp, SARS Virus
tctggttcatcaatatttgtggttc

SEQ ID NO: 190587 - DNA, 25 bp, SARS Virus
ctggttcatcagaatttgtggttct

SEQ ID NO: 190588 - DNA, 25 bp, SARS Virus
tggttcatcagtatttgtggttctc

SEQ ID NO: 190589 - DNA, 25 bp, SARS Virus
ggttcatcagtaattgtggttctca

SEQ ID NO: 190590 - DNA, 25 bp, SARS Virus
gttcatcagtatatgtggttctcat

SEQ ID NO: 190591 - DNA, 25 bp, SARS Virus
ttcatcagtattagtggttctcatt

SEQ ID NO: 190592 - DNA, 25 bp, SARS Virus
tcatcagtatttatggttctcattc

SEQ ID NO: 190593 - DNA, 25 bp, SARS Virus
catcagtatttgaggttctcattcg

SEQ ID NO: 190594 - DNA, 25 bp, SARS Virus
atcagtatttgtagttctcattcgg

SEQ ID NO: 190595 - DNA, 25 bp, SARS Virus
tcagtatttgtgattctcattcgga

SEQ ID NO: 190596 - DNA, 25 bp, SARS Virus
cagtatttgtggatctcattcggac

SEQ ID NO: 190597 - DNA, 25 bp, SARS Virus
agtatttgtggtactcattcggact

SEQ ID NO: 190598 - DNA, 25 bp, SARS Virus
gtatttgtggttatcattcggactt

SEQ ID NO: 190599 - DNA, 25 bp, SARS Virus
tatttgtggttcacattcggacttc

SEQ ID NO: 190600 - DNA, 25 bp, SARS Virus
atttgtggttctaattcggacttca

SEQ ID NO: 190601 - DNA, 25 bp, SARS Virus
tttgtggttctcattcggacttcat

SEQ ID NO: 190602 - DNA, 25 bp, SARS Virus
ttgtggttctcaatcggacttcatt

SEQ ID NO: 190603 - DNA, 25 bp, SARS Virus
tgtggttctcatacggacttcattg

SEQ ID NO: 190604 - DNA, 25 bp, SARS Virus
gtggttctcattaggacttcattgc

SEQ ID NO: 190605 - DNA, 25 bp, SARS Virus
tggttctcattcagacttcattgcc

SEQ ID NO: 190606 - DNA, 25 bp, SARS Virus
ggttctcattcgaacttcattgcca

SEQ ID NO: 190607 - DNA, 25 bp, SARS Virus
gttctcattcggacttcattgccaa

SEQ ID NO: 190608 - DNA, 25 bp, SARS Virus
ttctcattcggaattcattgccaac

SEQ ID NO: 190609 - DNA, 25 bp, SARS Virus
tctcattcggacatcattgccaact

SEQ ID NO: 190610 - DNA, 25 bp, SARS Virus
ctcattcggactacattgccaactc

SEQ ID NO: 190611 - DNA, 25 bp, SARS Virus
tcattcggacttaattgccaactca

SEQ ID NO: 190612 - DNA, 25 bp, SARS Virus
cattcggacttcattgccaactcat

SEQ ID NO: 190613 - DNA, 25 bp, SARS Virus
attcggacttcaatgccaactcatt

SEQ ID NO: 190614 - DNA, 25 bp, SARS Virus
ttcggacttcatagccaactcattt

SEQ ID NO: 190615 - DNA, 25 bp, SARS Virus
tcggacttcattaccaactcatttg

SEQ ID NO: 190616 - DNA, 25 bp, SARS Virus
cggacttcattgacaactcatttgt

SEQ ID NO: 190617 - DNA, 25 bp, SARS Virus
ggacttcattgcaaactcatttgtc

SEQ ID NO: 190618 - DNA, 25 bp, SARS Virus
gacttcattgccaactcatttgtct

SEQ ID NO: 190619 - DNA, 25 bp, SARS Virus
acttcattgccaactcatttgtctt

SEQ ID NO: 190620 - DNA, 25 bp, SARS Virus
cttcattgccaaatcatttgtcttt

SEQ ID NO: 190621 - DNA, 25 bp, SARS Virus
ttcattgccaacacatttgtctttt

SEQ ID NO: 190622 - DNA, 25 bp, SARS Virus
tcattgccaactaatttgtcttttc

SEQ ID NO: 190623 - DNA, 25 bp, SARS Virus
cattgccaactcatttgtcttttcc

SEQ ID NO: 190624 - DNA, 25 bp, SARS Virus
attgccaactcaattgtcttttccg

SEQ ID NO: 190625 - DNA, 25 bp, SARS Virus
ttgccaactcatatgtcttttccgg

SEQ ID NO: 190626 - DNA, 25 bp, SARS Virus
tgccaactcattagtcttttccggt

SEQ ID NO: 190627 - DNA, 25 bp, SARS Virus
gccaactcatttatcttttccggtt

SEQ ID NO: 190628 - DNA, 25 bp, SARS Virus
ccaactcatttgacttttccggttt

SEQ ID NO: 190629 - DNA, 25 bp, SARS Virus
caactcatttgtattttccggtttc

SEQ ID NO: 190630 - DNA, 25 bp, SARS Virus
aactcatttgtcatttccggtttca

SEQ ID NO: 190631 - DNA, 25 bp, SARS Virus
actcatttgtctattccggtttcat

SEQ ID NO: 190632 - DNA, 25 bp, SARS Virus
ctcatttgtcttatccggtttcatc

SEQ ID NO: 190633 - DNA, 25 bp, SARS Virus
tcatttgtctttaccggtttcatcg

SEQ ID NO: 190634 - DNA, 25 bp, SARS Virus
catttgtcttttacggtttcatcgt

SEQ ID NO: 190635 - DNA, 25 bp, SARS Virus
atttgtcttttcaggtttcatcgtc

SEQ ID NO: 190636 - DNA, 25 bp, SARS Virus
tttgtcttttccagtttcatcgtcg

SEQ ID NO: 190637 - DNA, 25 bp, SARS Virus
ttgtcttttccgatttcatcgtcgt

SEQ ID NO: 190638 - DNA, 25 bp, SARS Virus
tgtcttttccggattcatcgtcgtc

SEQ ID NO: 190639 - DNA, 25 bp, SARS Virus
gtcttttccggtatcatcgtcgtcg

SEQ ID NO: 190640 - DNA, 25 bp, SARS Virus
tcttttccggttacatcgtcgtcgt

SEQ ID NO: 190641 - DNA, 25 bp, SARS Virus
cttttccggtttaatcgtcgtcgtt

SEQ ID NO: 190642 - DNA, 25 bp, SARS Virus
ttttccggtttcatcgtcgtcgttg

SEQ ID NO: 190643 - DNA, 25 bp, SARS Virus
tttccggtttcaacgtcgtcgttgt

SEQ ID NO: 190644 - DNA, 25 bp, SARS Virus
ttccggtttcatagtcgtcgttgtt

SEQ ID NO: 190645 - DNA, 25 bp, SARS Virus
tccggtttcatcatcgtcgttgtta

SEQ ID NO: 190646 - DNA, 25 bp, SARS Virus
ccggtttcatcgacgtcgttgttat

SEQ ID NO: 190647 - DNA, 25 bp, SARS Virus
cggtttcatcgtagtcgttgttatc

SEQ ID NO: 190648 - DNA, 25 bp, SARS Virus
ggtttcatcgtcatcgttgttatcg

SEQ ID NO: 190649 - DNA, 25 bp, SARS Virus
gtttcatcgtcgacgttgttatcgg

SEQ ID NO: 190650 - DNA, 25 bp, SARS Virus
tttcatcgtcgtagttgttatcgga

SEQ ID NO: 190651 - DNA, 25 bp, SARS Virus
ttcatcgtcgtcattgttatcggat

SEQ ID NO: 190652 - DNA, 25 bp, SARS Virus
tcatcgtcgtcgatgttatcggatt

SEQ ID NO: 190653 - DNA, 25 bp, SARS Virus
catcgtcgtcgtagttatcggattc

SEQ ID NO: 190654 - DNA, 25 bp, SARS Virus
atcgtcgtcgttattatcggattct

SEQ ID NO: 190655 - DNA, 25 bp, SARS Virus
tcgtcgtcgttgatatcggattctt

SEQ ID NO: 190656 - DNA, 25 bp, SARS Virus
cgtcgtcgttgtaatcggattcttt

SEQ ID NO: 190657 - DNA, 25 bp, SARS Virus
gtcgtcgttgttatcggattctttg

SEQ ID NO: 190658 - DNA, 25 bp, SARS Virus
tcgtcgttgttaacggattctttgt

SEQ ID NO: 190659 - DNA, 25 bp, SARS Virus
cgtcgttgttataggattctttgtt

SEQ ID NO: 190660 - DNA, 25 bp, SARS Virus
gtcgttgttatcagattctttgtta

SEQ ID NO: 190661 - DNA, 25 bp, SARS Virus
tcgttgttatcgaattctttgttat

SEQ ID NO: 190662 - DNA, 25 bp, SARS Virus
cgttgttatcggattctttgttatt

SEQ ID NO: 190663 - DNA, 25 bp, SARS Virus
gttgttatcggaatctttgttattt

SEQ ID NO: 190664 - DNA, 25 bp, SARS Virus
ttgttatcggatactttgttatttg

SEQ ID NO: 190665 - DNA, 25 bp, SARS Virus
tgttatcggattatttgttatttgt

SEQ ID NO: 190666 - DNA, 25 bp, SARS Virus
gttatcggattcattgttatttgtt

SEQ ID NO: 190667 - DNA, 25 bp, SARS Virus
ttatcggattctatgttatttgttc

SEQ ID NO: 190668 - DNA, 25 bp, SARS Virus
tatcggattcttagttatttgttcg

SEQ ID NO: 190669 - DNA, 25 bp, SARS Virus
atcggattctttattatttgttcgt

SEQ ID NO: 190670 - DNA, 25 bp, SARS Virus
tcggattctttgatatttgttcgta

SEQ ID NO: 190671 - DNA, 25 bp, SARS Virus
cggattctttgtaatttgttcgtac

SEQ ID NO: 190672 - DNA, 25 bp, SARS Virus
ggattctttgttatttgttcgtact

SEQ ID NO: 190673 - DNA, 25 bp, SARS Virus
gattctttgttaattgttcgtacta

SEQ ID NO: 190674 - DNA, 25 bp, SARS Virus
attctttgttatatgttcgtactat

SEQ ID NO: 190675 - DNA, 25 bp, SARS Virus
ttctttgttattagttcgtactatg

SEQ ID NO: 190676 - DNA, 25 bp, SARS Virus
tctttgttatttattcgtactatgt

SEQ ID NO: 190677 - DNA, 25 bp, SARS Virus
ctttgttatttgatcgtactatgtg

SEQ ID NO: 190678 - DNA, 25 bp, SARS Virus
tttgttatttgtacgtactatgtga

SEQ ID NO: 190679 - DNA, 25 bp, SARS Virus
ttgttatttgttagtactatgtgac

SEQ ID NO: 190680 - DNA, 25 bp, SARS Virus
tgttatttgttcatactatgtgaca

SEQ ID NO: 190681 - DNA, 25 bp, SARS Virus
gttatttgttcgaactatgtgacat

SEQ ID NO: 190682 - DNA, 25 bp, SARS Virus
ttatttgttcgtactatgtgacatt

SEQ ID NO: 190683 - DNA, 25 bp, SARS Virus
tatttgttcgtaatatgtgacattc

SEQ ID NO: 190684 - DNA, 25 bp, SARS Virus
atttgttcgtacaatgtgacattcc

SEQ ID NO: 190685 - DNA, 25 bp, SARS Virus
tttgttcgtactatgtgacattcca

SEQ ID NO: 190686 - DNA, 25 bp, SARS Virus
ttgttcgtactaagtgacattccac

SEQ ID NO: 190687 - DNA, 25 bp, SARS Virus
tgttcgtactatatgacattccaca

SEQ ID NO: 190688 - DNA, 25 bp, SARS Virus
gttcgtactatgagacattccacaa

SEQ ID NO: 190689 - DNA, 25 bp, SARS Virus
ttcgtactatgtaacattccacaac

SEQ ID NO: 190690 - DNA, 25 bp, SARS Virus
tcgtactatgtgacattccacaacg

SEQ ID NO: 190691 - DNA, 25 bp, SARS Virus
cgtactatgtgaaattccacaacgg

SEQ ID NO: 190692 - DNA, 25 bp, SARS Virus
gtactatgtgacattccacaacggt

SEQ ID NO: 190693 - DNA, 25 bp, SARS Virus
tactatgtgacaatccacaacggtc

SEQ ID NO: 190694 - DNA, 25 bp, SARS Virus
actatgtgacataccacaacggtca

SEQ ID NO: 190695 - DNA, 25 bp, SARS Virus
ctatgtgacattacacaacggtcat

SEQ ID NO: 190696 - DNA, 25 bp, SARS Virus
tatgtgacattcaacaacggtcatt

SEQ ID NO: 190697 - DNA, 25 bp, SARS Virus
atgtgacattccacaacggtcatta

SEQ ID NO: 190698 - DNA, 25 bp, SARS Virus
tgtgacattccaaaacggtcattat

SEQ ID NO: 190699 - DNA, 25 bp, SARS Virus
gtgacattccacaacggtcattatt

SEQ ID NO: 190700 - DNA, 25 bp, SARS Virus
tgacattccacaacggtcattattt

SEQ ID NO: 190701 - DNA, 25 bp, SARS Virus
gacattccacaaaggtcattattta

SEQ ID NO: 190702 - DNA, 25 bp, SARS Virus
acattccacaacagtcattatttat

SEQ ID NO: 190703 - DNA, 25 bp, SARS Virus
cattccacaacgatcattatttatt

SEQ ID NO: 190704 - DNA, 25 bp, SARS Virus
attccacaacggacattatttattg

SEQ ID NO: 190705 - DNA, 25 bp, SARS Virus
ttccacaacggtaattatttattgt

SEQ ID NO: 190706 - DNA, 25 bp, SARS Virus
tccacaacggtcattatttattgtt

SEQ ID NO: 190707 - DNA, 25 bp, SARS Virus
ccacaacggtcaatatttattgtta

SEQ ID NO: 190708 - DNA, 25 bp, SARS Virus
cacaacggtcataatttattgttac

SEQ ID NO: 190709 - DNA, 25 bp, SARS Virus
acaacggtcattatttattgttacc

SEQ ID NO: 190710 - DNA, 25 bp, SARS Virus
caacggtcattaattattgttaccc

SEQ ID NO: 190711 - DNA, 25 bp, SARS Virus
aacggtcattatatattgttaccca

SEQ ID NO: 190712 - DNA, 25 bp, SARS Virus
acggtcattattaattgttacccat

SEQ ID NO: 190713 - DNA, 25 bp, SARS Virus
cggtcattatttattgttacccatt

SEQ ID NO: 190714 - DNA, 25 bp, SARS Virus
ggtcattatttaatgttacccatta

SEQ ID NO: 190715 - DNA, 25 bp, SARS Virus
gtcattatttatagttacccattat

SEQ ID NO: 190716 - DNA, 25 bp, SARS Virus
tcattatttattattacccattatg

SEQ ID NO: 190717 - DNA, 25 bp, SARS Virus
cattatttattgatacccattatga

SEQ ID NO: 190718 - DNA, 25 bp, SARS Virus
attatttattgtaacccattatgag

SEQ ID NO: 190719 - DNA, 25 bp, SARS Virus
ttatttattgttacccattatgagt

SEQ ID NO: 190720 - DNA, 25 bp, SARS Virus
tatttattgttaaccattatgagtt

SEQ ID NO: 190721 - DNA, 25 bp, SARS Virus
atttattgttacacattatgagttg

SEQ ID NO: 190722 - DNA, 25 bp, SARS Virus
tttattgttaccaattatgagttgt

SEQ ID NO: 190723 - DNA, 25 bp, SARS Virus
ttattgttacccattatgagttgtg

SEQ ID NO: 190724 - DNA, 25 bp, SARS Virus
tattgttacccaatatgagttgtgt

SEQ ID NO: 190725 - DNA, 25 bp, SARS Virus
attgttacccataatgagttgtgtg

SEQ ID NO: 190726 - DNA, 25 bp, SARS Virus
ttgttacccattatgagttgtgtgt

SEQ ID NO: 190727 - DNA, 25 bp, SARS Virus
tgttacccattaagagttgtgtgtg

SEQ ID NO: 190728 - DNA, 25 bp, SARS Virus
gttacccattataagttgtgtgtgt

SEQ ID NO: 190729 - DNA, 25 bp, SARS Virus
ttacccattatgagttgtgtgtgtt

SEQ ID NO: 190730 - DNA, 25 bp, SARS Virus
tacccattatgaattgtgtgtgttt

SEQ ID NO: 190731 - DNA, 25 bp, SARS Virus
acccattatgagatgtgtgtgtttg

SEQ ID NO: 190732 - DNA, 25 bp, SARS Virus
cccattatgagtagtgtgtgtttgt

SEQ ID NO: 190733 - DNA, 25 bp, SARS Virus
ccattatgagttatgtgtgtttgtg

SEQ ID NO: 190734 - DNA, 25 bp, SARS Virus
cattatgagttgagtgtgtttgtga

SEQ ID NO: 190735 - DNA, 25 bp, SARS Virus
attatgagttgtatgtgtttgtgat

SEQ ID NO: 190736 - DNA, 25 bp, SARS Virus
ttatgagttgtgagtgtttgtgata

SEQ ID NO: 190737 - DNA, 25 bp, SARS Virus
tatgagttgtgtatgtttgtgatat

SEQ ID NO: 190738 - DNA, 25 bp, SARS Virus
atgagttgtgtgagtttgtgatatc

SEQ ID NO: 190739 - DNA, 25 bp, SARS Virus
tgagttgtgtgtatttgtgatatcg

SEQ ID NO: 190740 - DNA, 25 bp, SARS Virus
gagttgtgtgtgattgtgatatcga

SEQ ID NO: 190741 - DNA, 25 bp, SARS Virus
agttgtgtgtgtatgtgatatcgag

SEQ ID NO: 190742 - DNA, 25 bp, SARS Virus
gttgtgtgtgttagtgatatcgaga

SEQ ID NO: 190743 - DNA, 25 bp, SARS Virus
ttgtgtgtgtttatgatatcgagat

SEQ ID NO: 190744 - DNA, 25 bp, SARS Virus
tgtgtgtgtttgagatatcgagatc

SEQ ID NO: 190745 - DNA, 25 bp, SARS Virus
gtgtgtgtttgtaatatcgagatcg

SEQ ID NO: 190746 - DNA, 25 bp, SARS Virus
tgtgtgtttgtgatatcgagatcga

SEQ ID NO: 190747 - DNA, 25 bp, SARS Virus
gtgtgtttgtgaaatcgagatcgat

SEQ ID NO: 190748 - DNA, 25 bp, SARS Virus
tgtgtttgtgatatcgagatcgatt

SEQ ID NO: 190749 - DNA, 25 bp, SARS Virus
gtgtttgtgataacgagatcgattt

SEQ ID NO: 190750 - DNA, 25 bp, SARS Virus
tgtttgtgatatagagatcgatttt

SEQ ID NO: 190751 - DNA, 25 bp, SARS Virus
gtttgtgatatcaagatcgattttt

SEQ ID NO: 190752 - DNA, 25 bp, SARS Virus
tttgtgatatcgagatcgatttttg

SEQ ID NO: 190753 - DNA, 25 bp, SARS Virus
ttgtgatatcgaaatcgatttttgt

SEQ ID NO: 190754 - DNA, 25 bp, SARS Virus
tgtgatatcgagatcgatttttgta

SEQ ID NO: 190755 - DNA, 25 bp, SARS Virus
gtgatatcgagaacgatttttgtac

SEQ ID NO: 190756 - DNA, 25 bp, SARS Virus
tgatatcgagatagatttttgtact

SEQ ID NO: 190757 - DNA, 25 bp, SARS Virus
gatatcgagatcaatttttgtacta

SEQ ID NO: 190758 - DNA, 25 bp, SARS Virus
atatcgagatcgatttttgtactat

SEQ ID NO: 190759 - DNA, 25 bp, SARS Virus
tatcgagatcgaattttgtactatc

SEQ ID NO: 190760 - DNA, 25 bp, SARS Virus
atcgagatcgatatttgtactatca

SEQ ID NO: 190761 - DNA, 25 bp, SARS Virus
tcgagatcgattattgtactatcag

SEQ ID NO: 190762 - DNA, 25 bp, SARS Virus
cgagatcgatttatgtactatcagc

SEQ ID NO: 190763 - DNA, 25 bp, SARS Virus
gagatcgattttagtactatcagca

SEQ ID NO: 190764 - DNA, 25 bp, SARS Virus
agatcgatttttatactatcagcat

SEQ ID NO: 190765 - DNA, 25 bp, SARS Virus
gatcgatttttgaactatcagcatt

SEQ ID NO: 190766 - DNA, 25 bp, SARS Virus
atcgatttttgtactatcagcattg

SEQ ID NO: 190767 - DNA, 25 bp, SARS Virus
tcgatttttgtaatatcagcattgc

SEQ ID NO: 190768 - DNA, 25 bp, SARS Virus
cgatttttgtacaatcagcattgct

SEQ ID NO: 190769 - DNA, 25 bp, SARS Virus
gatttttgtactatcagcattgctg

SEQ ID NO: 190770 - DNA, 25 bp, SARS Virus
atttttgtactaacagcattgctgt

SEQ ID NO: 190771 - DNA, 25 bp, SARS Virus
tttttgtactataagcattgctgtg

SEQ ID NO: 190772 - DNA, 25 bp, SARS Virus
ttttgtactatcagcattgctgtgg

SEQ ID NO: 190773 - DNA, 25 bp, SARS Virus
tttgtactatcaacattgctgtggt

SEQ ID NO: 190774 - DNA, 25 bp, SARS Virus
ttgtactatcagaattgctgtggtc

SEQ ID NO: 190775 - DNA, 25 bp, SARS Virus
tgtactatcagcattgctgtggtct

SEQ ID NO: 190776 - DNA, 25 bp, SARS Virus
gtactatcagcaatgctgtggtctt

SEQ ID NO: 190777 - DNA, 25 bp, SARS Virus
tactatcagcatagctgtggtctta

SEQ ID NO: 190778 - DNA, 25 bp, SARS Virus
actatcagcattactgtggtcttat

SEQ ID NO: 190779 - DNA, 25 bp, SARS Virus
ctatcagcattgatgtggtcttatc

SEQ ID NO: 190780 - DNA, 25 bp, SARS Virus
tatcagcattgcagtggtcttatca

SEQ ID NO: 190781 - DNA, 25 bp, SARS Virus
atcagcattgctatggtcttatcaa

SEQ ID NO: 190782 - DNA, 25 bp, SARS Virus
tcagcattgctgaggtcttatcaat

SEQ ID NO: 190783 - DNA, 25 bp, SARS Virus
cagcattgctgtagtcttatcaatc

SEQ ID NO: 190784 - DNA, 25 bp, SARS Virus
agcattgctgtgatcttatcaatct

SEQ ID NO: 190785 - DNA, 25 bp, SARS Virus
gcattgctgtggacttatcaatctc

SEQ ID NO: 190786 - DNA, 25 bp, SARS Virus
cattgctgtggtattatcaatctcc

SEQ ID NO: 190787 - DNA, 25 bp, SARS Virus
attgctgtggtcatatcaatctcca

SEQ ID NO: 190788 - DNA, 25 bp, SARS Virus
ttgctgtggtctaatcaatctccaa

SEQ ID NO: 190789 - DNA, 25 bp, SARS Virus
tgctgtggtcttatcaatctccaat

SEQ ID NO: 190790 - DNA, 25 bp, SARS Virus
gctgtggtcttaacaatctccaatg

SEQ ID NO: 190791 - DNA, 25 bp, SARS Virus
ctgtggtcttataaatctccaatgt

SEQ ID NO: 190792 - DNA, 25 bp, SARS Virus
tgtggtcttatcaatctccaatgtc

SEQ ID NO: 190793 - DNA, 25 bp, SARS Virus
gtggtcttatcaatctccaatgtct

SEQ ID NO: 190794 - DNA, 25 bp, SARS Virus
tggtcttatcaaactccaatgtctt

SEQ ID NO: 190795 - DNA, 25 bp, SARS Virus
ggtcttatcaatatccaatgtcttt

SEQ ID NO: 190796 - DNA, 25 bp, SARS Virus
gtcttatcaatcaccaatgtcttta

SEQ ID NO: 190797 - DNA, 25 bp, SARS Virus
tcttatcaatctacaatgtctttat

SEQ ID NO: 190798 - DNA, 25 bp, SARS Virus
cttatcaatctcaaatgtctttatt

SEQ ID NO: 190799 - DNA, 25 bp, SARS Virus
ttatcaatctccaatgtctttattg

SEQ ID NO: 190800 - DNA, 25 bp, SARS Virus
tatcaatctccaatgtctttattga

SEQ ID NO: 190801 - DNA, 25 bp, SARS Virus
atcaatctccaaagtctttattgat

SEQ ID NO: 190802 - DNA, 25 bp, SARS Virus
tcaatctccaatatctttattgatt

SEQ ID NO: 190803 - DNA, 25 bp, SARS Virus
caatctccaatgactttattgattc

SEQ ID NO: 190804 - DNA, 25 bp, SARS Virus
aatctccaatgtatttattgattcc

SEQ ID NO: 190805 - DNA, 25 bp, SARS Virus
atctccaatgtcattattgattccg

SEQ ID NO: 190806 - DNA, 25 bp, SARS Virus
tctccaatgtctatattgattccgg

SEQ ID NO: 190807 - DNA, 25 bp, SARS Virus
ctccaatgtcttaattgattccggg

SEQ ID NO: 190808 - DNA, 25 bp, SARS Virus
tccaatgtctttattgattccgggt

SEQ ID NO: 190809 - DNA, 25 bp, SARS Virus
ccaatgtctttaatgattccgggtg

SEQ ID NO: 190810 - DNA, 25 bp, SARS Virus
caatgtctttatagattccgggtgt

SEQ ID NO: 190811 - DNA, 25 bp, SARS Virus
aatgtctttattaattccgggtgta

SEQ ID NO: 190812 - DNA, 25 bp, SARS Virus
atgtctttattgattccgggtgtac

SEQ ID NO: 190813 - DNA, 25 bp, SARS Virus
tgtctttattgaatccgggtgtacc

SEQ ID NO: 190814 - DNA, 25 bp, SARS Virus
gtctttattgataccgggtgtacct

SEQ ID NO: 190815 - DNA, 25 bp, SARS Virus
tctttattgattacgggtgtacctt

SEQ ID NO: 190816 - DNA, 25 bp, SARS Virus
ctttattgattcagggtgtaccttt

SEQ ID NO: 190817 - DNA, 25 bp, SARS Virus
tttattgattccaggtgtaccttta

SEQ ID NO: 190818 - DNA, 25 bp, SARS Virus
ttattgattccgagtgtacctttat

SEQ ID NO: 190819 - DNA, 25 bp, SARS Virus
tattgattccggatgtacctttatc

SEQ ID NO: 190820 - DNA, 25 bp, SARS Virus
attgattccgggagtacctttatcg

SEQ ID NO: 190821 - DNA, 25 bp, SARS Virus
ttgattccgggtatacctttatcga

SEQ ID NO: 190822 - DNA, 25 bp, SARS Virus
tgattccgggtgaacctttatcgaa

SEQ ID NO: 190823 - DNA, 25 bp, SARS Virus
gattccgggtgtacctttatcgaac

SEQ ID NO: 190824 - DNA, 25 bp, SARS Virus
attccgggtgtaactttatcgaact

SEQ ID NO: 190825 - DNA, 25 bp, SARS Virus
ttccgggtgtacatttatcgaacta

SEQ ID NO: 190826 - DNA, 25 bp, SARS Virus
tccgggtgtaccattatcgaactag

SEQ ID NO: 190827 - DNA, 25 bp, SARS Virus
ccgggtgtacctatatcgaactaga

SEQ ID NO: 190828 - DNA, 25 bp, SARS Virus
cgggtgtaccttaatcgaactagat

SEQ ID NO: 190829 - DNA, 25 bp, SARS Virus
gggtgtacctttatcgaactagatt

SEQ ID NO: 190830 - DNA, 25 bp, SARS Virus
ggtgtacctttaacgaactagattt

SEQ ID NO: 190831 - DNA, 25 bp, SARS Virus
gtgtacctttatagaactagatttc

SEQ ID NO: 190832 - DNA, 25 bp, SARS Virus
tgtacctttatcaaactagatttcg

SEQ ID NO: 190833 - DNA, 25 bp, SARS Virus
gtacctttatcgaactagatttcgt

SEQ ID NO: 190834 - DNA, 25 bp, SARS Virus
tacctttatcgaactagatttcgta

SEQ ID NO: 190835 - DNA, 25 bp, SARS Virus
acctttatcgaaatagatttcgtaa

SEQ ID NO: 190836 - DNA, 25 bp, SARS Virus
cctttatcgaacaagatttcgtaat

SEQ ID NO: 190837 - DNA, 25 bp, SARS Virus
ctttatcgaactagatttcgtaatg

SEQ ID NO: 190838 - DNA, 25 bp, SARS Virus
tttatcgaactaaatttcgtaatgg

SEQ ID NO: 190839 - DNA, 25 bp, SARS Virus
ttatcgaactagatttcgtaatggt

SEQ ID NO: 190840 - DNA, 25 bp, SARS Virus
tatcgaactagaattcgtaatggta

SEQ ID NO: 190841 - DNA, 25 bp, SARS Virus
aacatgtgtaacccgggtgttaaat

SEQ ID NO: 190842 - DNA, 25 bp, SARS Virus
acatgtgtaacacgggtgttaaatc

SEQ ID NO: 190843 - DNA, 25 bp, SARS Virus
catgtgtaacaccggtgttaaatct

SEQ ID NO: 190844 - DNA, 25 bp, SARS Virus
atgtgtaacacgcgtgttaaatctt

SEQ ID NO: 190845 - DNA, 25 bp, SARS Virus
tgtgtaacacggctgttaaatcttc

SEQ ID NO: 190846 - DNA, 25 bp, SARS Virus
gtgtaacacgggcgttaaatcttct

SEQ ID NO: 190847 - DNA, 25 bp, SARS Virus
tgtaacacgggtcttaaatcttcta

SEQ ID NO: 190848 - DNA, 25 bp, SARS Virus
gtaacacgggtgctaaatcttctac

SEQ ID NO: 190849 - DNA, 25 bp, SARS Virus
taacacgggtgtcaaatcttctact

SEQ ID NO: 190850 - DNA, 25 bp, SARS Virus
aacacgggtgttcaatcttctactg

SEQ ID NO: 190851 - DNA, 25 bp, SARS Virus
acacgggtgttacatcttctactga

SEQ ID NO: 190852 - DNA, 25 bp, SARS Virus
cacgggtgttaactcttctactgag

SEQ ID NO: 190853 - DNA, 25 bp, SARS Virus
acgggtgttaaaccttctactgaga

SEQ ID NO: 190854 - DNA, 25 bp, SARS Virus
cgggtgttaaatcttctactgagat

SEQ ID NO: 190855 - DNA, 25 bp, SARS Virus
gggtgttaaatcctctactgagatg

SEQ ID NO: 190856 - DNA, 25 bp, SARS Virus
ggtgttaaatctcctactgagatga

SEQ ID NO: 190857 - DNA, 25 bp, SARS Virus
gtgttaaatcttctactgagatgag

SEQ ID NO: 190858 - DNA, 25 bp, SARS Virus
tgttaaatcttccactgagatgaga

SEQ ID NO: 190859 - DNA, 25 bp, SARS Virus
gttaaatcttctcctgagatgagat

SEQ ID NO: 190860 - DNA, 25 bp, SARS Virus
ttaaatcttctactgagatgagatt

SEQ ID NO: 190861 - DNA, 25 bp, SARS Virus
taaatcttctaccgagatgagattc

SEQ ID NO: 190862 - DNA, 25 bp, SARS Virus
aaatcttctactcagatgagattca

SEQ ID NO: 190863 - DNA, 25 bp, SARS Virus
aatcttctactgcgatgagattcaa

SEQ ID NO: 190864 - DNA, 25 bp, SARS Virus
atcttctactgacatgagattcaac

SEQ ID NO: 190865 - DNA, 25 bp, SARS Virus
tcttctactgagctgagattcaaca

SEQ ID NO: 190866 - DNA, 25 bp, SARS Virus
cttctactgagacgagattcaacaa

SEQ ID NO: 190867 - DNA, 25 bp, SARS Virus
ttctactgagatcagattcaacaac

SEQ ID NO: 190868 - DNA, 25 bp, SARS Virus
tctactgagatgcgattcaacaact

SEQ ID NO: 190869 - DNA, 25 bp, SARS Virus
ctactgagatgacattcaacaactt

SEQ ID NO: 190870 - DNA, 25 bp, SARS Virus
tactgagatgagcttcaacaacttc

SEQ ID NO: 190871 - DNA, 25 bp, SARS Virus
actgagatgagactcaacaacttct

SEQ ID NO: 190872 - DNA, 25 bp, SARS Virus
ctgagatgagatccaacaacttctt

SEQ ID NO: 190873 - DNA, 25 bp, SARS Virus
tgagatgagattcaacaacttcttg

SEQ ID NO: 190874 - DNA, 25 bp, SARS Virus
gagatgagattccacaacttcttgg

SEQ ID NO: 190875 - DNA, 25 bp, SARS Virus
agatgagattcaccaacttcttggc

SEQ ID NO: 190876 - DNA, 25 bp, SARS Virus
gatgagattcaacaacttcttggct

SEQ ID NO: 190877 - DNA, 25 bp, SARS Virus
atgagattcaaccacttcttggctc

SEQ ID NO: 190878 - DNA, 25 bp, SARS Virus
tgagattcaacaccttcttggctct

SEQ ID NO: 190879 - DNA, 25 bp, SARS Virus
gagattcaacaacttcttggctctc

SEQ ID NO: 190880 - DNA, 25 bp, SARS Virus
agattcaacaacctcttggctctcg

SEQ ID NO: 190881 - DNA, 25 bp, SARS Virus
gattcaacaactccttggctctcgt

SEQ ID NO: 190882 - DNA, 25 bp, SARS Virus
attcaacaacttcttggctctcgtc

SEQ ID NO: 190883 - DNA, 25 bp, SARS Virus
ttcaacaacttcctggctctcgtca

SEQ ID NO: 190884 - DNA, 25 bp, SARS Virus
tcaacaacttctcggctctcgtcat

SEQ ID NO: 190885 - DNA, 25 bp, SARS Virus
caacaacttcttcgctctcgtcatg

SEQ ID NO: 190886 - DNA, 25 bp, SARS Virus
aacaacttcttgcctctcgtcatgg

SEQ ID NO: 190887 - DNA, 25 bp, SARS Virus
acaacttcttggctctcgtcatggt

SEQ ID NO: 190888 - DNA, 25 bp, SARS Virus
caacttcttggccctcgtcatggtg

SEQ ID NO: 190889 - DNA, 25 bp, SARS Virus
aacttcttggctctcgtcatggtgt

SEQ ID NO: 190890 - DNA, 25 bp, SARS Virus
acttcttggctcccgtcatggtgtc

SEQ ID NO: 190891 - DNA, 25 bp, SARS Virus
cttcttggctctcgtcatggtgtct

SEQ ID NO: 190892 - DNA, 25 bp, SARS Virus
ttcttggctctcctcatggtgtcta

SEQ ID NO: 190893 - DNA, 25 bp, SARS Virus
tcttggctctcgccatggtgtctac

SEQ ID NO: 190894 - DNA, 25 bp, SARS Virus
cttggctctcgtcatggtgtctaca

SEQ ID NO: 190895 - DNA, 25 bp, SARS Virus
ttggctctcgtcctggtgtctacac

SEQ ID NO: 190896 - DNA, 25 bp, SARS Virus
tggctctcgtcacggtgtctacacg

SEQ ID NO: 190897 - DNA, 25 bp, SARS Virus
ggctctcgtcatcgtgtctacacgt

SEQ ID NO: 190898 - DNA, 25 bp, SARS Virus
gctctcgtcatgctgtctacacgtg

SEQ ID NO: 190899 - DNA, 25 bp, SARS Virus
ctctcgtcatggcgtctacacgtga

SEQ ID NO: 190900 - DNA, 25 bp, SARS Virus
tctcgtcatggtctctacacgtgaa

SEQ ID NO: 190901 - DNA, 25 bp, SARS Virus
ctcgtcatggtgcctacacgtgaaa

SEQ ID NO: 190902 - DNA, 25 bp, SARS Virus
tcgtcatggtgtctacacgtgaaat

SEQ ID NO: 190903 - DNA, 25 bp, SARS Virus
cgtcatggtgtccacacgtgaaatg

SEQ ID NO: 190904 - DNA, 25 bp, SARS Virus
gtcatggtgtctccacgtgaaatgc

SEQ ID NO: 190905 - DNA, 25 bp, SARS Virus
tcatggtgtctacacgtgaaatgca

SEQ ID NO: 190906 - DNA, 25 bp, SARS Virus
catggtgtctacccgtgaaatgcag

SEQ ID NO: 190907 - DNA, 25 bp, SARS Virus
atggtgtctacacgtgaaatgcagt

SEQ ID NO: 190908 - DNA, 25 bp, SARS Virus
tggtgtctacacctgaaatgcagtc

SEQ ID NO: 190909 - DNA, 25 bp, SARS Virus
ggtgtctacacgcgaaatgcagtct

SEQ ID NO: 190910 - DNA, 25 bp, SARS Virus
gtgtctacacgtcaaatgcagtctg

SEQ ID NO: 190911 - DNA, 25 bp, SARS Virus
tgtctacacgtgcaatgcagtctgt

SEQ ID NO: 190912 - DNA, 25 bp, SARS Virus
gtctacacgtgacatgcagtctgta

SEQ ID NO: 190913 - DNA, 25 bp, SARS Virus
tctacacgtgaactgcagtctgtaa

SEQ ID NO: 190914 - DNA, 25 bp, SARS Virus
ctacacgtgaaacgcagtctgtaaa

SEQ ID NO: 190915 - DNA, 25 bp, SARS Virus
tacacgtgaaatccagtctgtaaaa

SEQ ID NO: 190916 - DNA, 25 bp, SARS Virus
acacgtgaaatgcagtctgtaaaat

SEQ ID NO: 190917 - DNA, 25 bp, SARS Virus
cacgtgaaatgccgtctgtaaaatc

SEQ ID NO: 190918 - DNA, 25 bp, SARS Virus
acgtgaaatgcactctgtaaaatct

SEQ ID NO: 190919 - DNA, 25 bp, SARS Virus
cgtgaaatgcagcctgtaaaatctg

SEQ ID NO: 190920 - DNA, 25 bp, SARS Virus
gtgaaatgcagtctgtaaaatctga

SEQ ID NO: 190921 - DNA, 25 bp, SARS Virus
tgaaatgcagtccgtaaaatctgac

SEQ ID NO: 190922 - DNA, 25 bp, SARS Virus
gaaatgcagtctctaaaatctgaca

SEQ ID NO: 190923 - DNA, 25 bp, SARS Virus
aaatgcagtctgcaaaatctgacat

SEQ ID NO: 190924 - DNA, 25 bp, SARS Virus
aatgcagtctgtcaaatctgacatg

SEQ ID NO: 190925 - DNA, 25 bp, SARS Virus
atgcagtctgtacaatctgacatgt

SEQ ID NO: 190926 - DNA, 25 bp, SARS Virus
tgcagtctgtaacatctgacatgtc

SEQ ID NO: 190927 - DNA, 25 bp, SARS Virus
gcagtctgtaaactctgacatgtca

SEQ ID NO: 190928 - DNA, 25 bp, SARS Virus
cagtctgtaaaacctgacatgtcat

SEQ ID NO: 190929 - DNA, 25 bp, SARS Virus
agtctgtaaaatctgacatgtcatc

SEQ ID NO: 190930 - DNA, 25 bp, SARS Virus
gtctgtaaaatccgacatgtcatcg

SEQ ID NO: 190931 - DNA, 25 bp, SARS Virus
tctgtaaaatctcacatgtcatcgt

SEQ ID NO: 190932 - DNA, 25 bp, SARS Virus
ctgtaaaatctgccatgtcatcgtt

SEQ ID NO: 190933 - DNA, 25 bp, SARS Virus
tgtaaaatctgacatgtcatcgttg

SEQ ID NO: 190934 - DNA, 25 bp, SARS Virus
gtaaaatctgacctgtcatcgttgg

SEQ ID NO: 190935 - DNA, 25 bp, SARS Virus
taaaatctgacacgtcatcgttgga

SEQ ID NO: 190936 - DNA, 25 bp, SARS Virus
aaaatctgacatctcatcgttggaa

SEQ ID NO: 190937 - DNA, 25 bp, SARS Virus
aaatctgacatgccatcgttggaac

SEQ ID NO: 190938 - DNA, 25 bp, SARS Virus
aatctgacatgtcatcgttggaact

SEQ ID NO: 190939 - DNA, 25 bp, SARS Virus
atctgacatgtcctcgttggaacta

SEQ ID NO: 190940 - DNA, 25 bp, SARS Virus
tctgacatgtcaccgttggaactat

SEQ ID NO: 190941 - DNA, 25 bp, SARS Virus
ctgacatgtcatcgttggaactatg

SEQ ID NO: 190942 - DNA, 25 bp, SARS Virus
tgacatgtcatccttggaactatgt

SEQ ID NO: 190943 - DNA, 25 bp, SARS Virus
gacatgtcatcgctggaactatgta

SEQ ID NO: 190944 - DNA, 25 bp, SARS Virus
acatgtcatcgtcggaactatgtac

SEQ ID NO: 190945 - DNA, 25 bp, SARS Virus
catgtcatcgttcgaactatgtacc

SEQ ID NO: 190946 - DNA, 25 bp, SARS Virus
atgtcatcgttgcaactatgtacca

SEQ ID NO: 190947 - DNA, 25 bp, SARS Virus
tgtcatcgttggcactatgtaccaa

SEQ ID NO: 190948 - DNA, 25 bp, SARS Virus
gtcatcgttggacctatgtaccaaa

SEQ ID NO: 190949 - DNA, 25 bp, SARS Virus
tcatcgttggaactatgtaccaaat

SEQ ID NO: 190950 - DNA, 25 bp, SARS Virus
catcgttggaaccatgtaccaaatg

SEQ ID NO: 190951 - DNA, 25 bp, SARS Virus
atcgttggaactctgtaccaaatgg

SEQ ID NO: 190952 - DNA, 25 bp, SARS Virus
tcgttggaactacgtaccaaatgga

SEQ ID NO: 190953 - DNA, 25 bp, SARS Virus
cgttggaactatctaccaaatggag

SEQ ID NO: 190954 - DNA, 25 bp, SARS Virus
gttggaactatgcaccaaatggagg

SEQ ID NO: 190955 - DNA, 25 bp, SARS Virus
ttggaactatgtcccaaatggaggt

SEQ ID NO: 190956 - DNA, 25 bp, SARS Virus
tggaactatgtaccaaatggaggtt

SEQ ID NO: 190957 - DNA, 25 bp, SARS Virus
ggaactatgtaccaaatggaggtta

SEQ ID NO: 190958 - DNA, 25 bp, SARS Virus
gaactatgtacccaatggaggttat

SEQ ID NO: 190959 - DNA, 25 bp, SARS Virus
aactatgtaccacatggaggttatg

SEQ ID NO: 190960 - DNA, 25 bp, SARS Virus
actatgtaccaactggaggttatgg

SEQ ID NO: 190961 - DNA, 25 bp, SARS Virus
ctatgtaccaaacggaggttatggg

SEQ ID NO: 190962 - DNA, 25 bp, SARS Virus
tatgtaccaaatcgaggttatgggt

SEQ ID NO: 190963 - DNA, 25 bp, SARS Virus
atgtaccaaatgcaggttatgggtt

SEQ ID NO: 190964 - DNA, 25 bp, SARS Virus
tgtaccaaatggcggttatgggttg

SEQ ID NO: 190965 - DNA, 25 bp, SARS Virus
gtaccaaatggacgttatgggttgt

SEQ ID NO: 190966 - DNA, 25 bp, SARS Virus
taccaaatggagcttatgggttgtt

SEQ ID NO: 190967 - DNA, 25 bp, SARS Virus
accaaatggaggctatgggttgttg

SEQ ID NO: 190968 - DNA, 25 bp, SARS Virus
ccaaatggaggtcatgggttgttga

SEQ ID NO: 190969 - DNA, 25 bp, SARS Virus
caaatggaggttctgggttgttgaa

SEQ ID NO: 190970 - DNA, 25 bp, SARS Virus
aaatggaggttacgggttgttgaat

SEQ ID NO: 190971 - DNA, 25 bp, SARS Virus
aatggaggttatcggttgttgaatt

SEQ ID NO: 190972 - DNA, 25 bp, SARS Virus
atggaggttatgcgttgttgaatta

SEQ ID NO: 190973 - DNA, 25 bp, SARS Virus
tggaggttatggcttgttgaattac

SEQ ID NO: 190974 - DNA, 25 bp, SARS Virus
ggaggttatgggctgttgaattaca

SEQ ID NO: 190975 - DNA, 25 bp, SARS Virus
gaggttatgggtcgttgaattacaa

SEQ ID NO: 190976 - DNA, 25 bp, SARS Virus
aggttatgggttcttgaattacaat

SEQ ID NO: 190977 - DNA, 25 bp, SARS Virus
ggttatgggttgctgaattacaatt

SEQ ID NO: 190978 - DNA, 25 bp, SARS Virus
gttatgggttgtcgaattacaattc

SEQ ID NO: 190979 - DNA, 25 bp, SARS Virus
ttatgggttgttcaattacaattcg

SEQ ID NO: 190980 - DNA, 25 bp, SARS Virus
tatgggttgttgcattacaattcga

SEQ ID NO: 190981 - DNA, 25 bp, SARS Virus
atgggttgttgacttacaattcgaa

SEQ ID NO: 190982 - DNA, 25 bp, SARS Virus
tgggttgttgaactacaattcgaac

SEQ ID NO: 190983 - DNA, 25 bp, SARS Virus
gggttgttgaatcacaattcgaact

SEQ ID NO: 190984 - DNA, 25 bp, SARS Virus
ggttgttgaattccaattcgaactt

SEQ ID NO: 190985 - DNA, 25 bp, SARS Virus
gttgttgaattacaattcgaacttt

SEQ ID NO: 190986 - DNA, 25 bp, SARS Virus
ttgttgaattaccattcgaactttc

SEQ ID NO: 190987 - DNA, 25 bp, SARS Virus
tgttgaattacacttcgaactttcg

SEQ ID NO: 190988 - DNA, 25 bp, SARS Virus
gttgaattacaactcgaactttcgt

SEQ ID NO: 190989 - DNA, 25 bp, SARS Virus
ttgaattacaatccgaactttcgta

SEQ ID NO: 190990 - DNA, 25 bp, SARS Virus
tgaattacaattcgaactttcgtag

SEQ ID NO: 190991 - DNA, 25 bp, SARS Virus
gaattacaattccaactttcgtagt

SEQ ID NO: 190992 - DNA, 25 bp, SARS Virus
aattacaattcgcactttcgtagtt

SEQ ID NO: 190993 - DNA, 25 bp, SARS Virus
attacaattcgacctttcgtagtta

SEQ ID NO: 190994 - DNA, 25 bp, SARS Virus
ttacaattcgaactttcgtagttat

SEQ ID NO: 190995 - DNA, 25 bp, SARS Virus
tacaattcgaaccttcgtagttatg

SEQ ID NO: 190996 - DNA, 25 bp, SARS Virus
acaattcgaactctcgtagttatga

SEQ ID NO: 190997 - DNA, 25 bp, SARS Virus
caattcgaacttccgtagttatgat

SEQ ID NO: 190998 - DNA, 25 bp, SARS Virus
aattcgaactttcgtagttatgatg

SEQ ID NO: 190999 - DNA, 25 bp, SARS Virus
attcgaactttcctagttatgatga

SEQ ID NO: 191000 - DNA, 25 bp, SARS Virus
ttcgaactttcgcagttatgatgag

SEQ ID NO: 191001 - DNA, 25 bp, SARS Virus
tcgaactttcgtcgttatgatgaga

SEQ ID NO: 191002 - DNA, 25 bp, SARS Virus
cgaactttcgtacttatgatgagaa

SEQ ID NO: 191003 - DNA, 25 bp, SARS Virus
gaactttcgtagctatgatgagaat

SEQ ID NO: 191004 - DNA, 25 bp, SARS Virus
aactttcgtagtcatgatgagaatc

SEQ ID NO: 191005 - DNA, 25 bp, SARS Virus
actttcgtagttctgatgagaatcc

SEQ ID NO: 191006 - DNA, 25 bp, SARS Virus
ctttcgtagttacgatgagaatcct

SEQ ID NO: 191007 - DNA, 25 bp, SARS Virus
tttcgtagttatcatgagaatcctc

SEQ ID NO: 191008 - DNA, 25 bp, SARS Virus
ttcgtagttatgctgagaatcctcc

SEQ ID NO: 191009 - DNA, 25 bp, SARS Virus
tcgtagttatgacgagaatcctccg

SEQ ID NO: 191010 - DNA, 25 bp, SARS Virus
cgtagttatgatcagaatcctccgt

SEQ ID NO: 191011 - DNA, 25 bp, SARS Virus
gtagttatgatgcgaatcctccgtt

SEQ ID NO: 191012 - DNA, 25 bp, SARS Virus
tagttatgatgacaatcctccgttt

SEQ ID NO: 191013 - DNA, 25 bp, SARS Virus
agttatgatgagcatcctccgtttt

SEQ ID NO: 191014 - DNA, 25 bp, SARS Virus
gttatgatgagactcctccgttttc

SEQ ID NO: 191015 - DNA, 25 bp, SARS Virus
ttatgatgagaaccctccgttttcg

SEQ ID NO: 191016 - DNA, 25 bp, SARS Virus
tatgatgagaatcctccgttttcgg

SEQ ID NO: 191017 - DNA, 25 bp, SARS Virus
atgatgagaatcctccgttttcggg

SEQ ID NO: 191018 - DNA, 25 bp, SARS Virus
tgatgagaatcccccgttttcgggg

SEQ ID NO: 191019 - DNA, 25 bp, SARS Virus
gatgagaatcctccgttttcgggga

SEQ ID NO: 191020 - DNA, 25 bp, SARS Virus
atgagaatcctccgttttcggggac

SEQ ID NO: 191021 - DNA, 25 bp, SARS Virus
tgagaatcctcccttttcggggacc

SEQ ID NO: 191022 - DNA, 25 bp, SARS Virus
gagaatcctccgctttcggggaccc

SEQ ID NO: 191023 - DNA, 25 bp, SARS Virus
agaatcctccgtcttcggggaccct

SEQ ID NO: 191024 - DNA, 25 bp, SARS Virus
gaatcctccgttctcggggaccctc

SEQ ID NO: 191025 - DNA, 25 bp, SARS Virus
aatcctccgtttccggggaccctca

SEQ ID NO: 191026 - DNA, 25 bp, SARS Virus
atcctccgttttcggggaccctcaa

SEQ ID NO: 191027 - DNA, 25 bp, SARS Virus
tcctccgttttccgggaccctcaag

SEQ ID NO: 191028 - DNA, 25 bp, SARS Virus
cctccgttttcgcggaccctcaagt

SEQ ID NO: 191029 - DNA, 25 bp, SARS Virus
ctccgttttcggcgaccctcaagta

SEQ ID NO: 191030 - DNA, 25 bp, SARS Virus
tccgttttcgggcaccctcaagtat

SEQ ID NO: 191031 - DNA, 25 bp, SARS Virus
ccgttttcggggcccctcaagtata

SEQ ID NO: 191032 - DNA, 25 bp, SARS Virus
cgttttcggggaccctcaagtatat

SEQ ID NO: 191033 - DNA, 25 bp, SARS Virus
gttttcggggaccctcaagtatatg

SEQ ID NO: 191034 - DNA, 25 bp, SARS Virus
ttttcggggaccctcaagtatatgg

SEQ ID NO: 191035 - DNA, 25 bp, SARS Virus
tttcggggacccccaagtatatgga

SEQ ID NO: 191036 - DNA, 25 bp, SARS Virus
ttcggggaccctcaagtatatggat

SEQ ID NO: 191037 - DNA, 25 bp, SARS Virus
tcggggaccctccagtatatggatt

SEQ ID NO: 191038 - DNA, 25 bp, SARS Virus
cggggaccctcacgtatatggattt

SEQ ID NO: 191039 - DNA, 25 bp, SARS Virus
ggggaccctcaactatatggattta

SEQ ID NO: 191040 - DNA, 25 bp, SARS Virus
gggaccctcaagcatatggatttaa

SEQ ID NO: 191041 - DNA, 25 bp, SARS Virus
ggaccctcaagtctatggatttaag

SEQ ID NO: 191042 - DNA, 25 bp, SARS Virus
gaccctcaagtacatggatttaaga

SEQ ID NO: 191043 - DNA, 25 bp, SARS Virus
accctcaagtatctggatttaagaa

SEQ ID NO: 191044 - DNA, 25 bp, SARS Virus
ccctcaagtatacggatttaagaac

SEQ ID NO: 191045 - DNA, 25 bp, SARS Virus
cctcaagtatatcgatttaagaaca

SEQ ID NO: 191046 - DNA, 25 bp, SARS Virus
ctcaagtatatgcatttaagaacac

SEQ ID NO: 191047 - DNA, 25 bp, SARS Virus
tcaagtatatggctttaagaacaca

SEQ ID NO: 191048 - DNA, 25 bp, SARS Virus
caagtatatggacttaagaacacat

SEQ ID NO: 191049 - DNA, 25 bp, SARS Virus
aagtatatggatctaagaacacatc

SEQ ID NO: 191050 - DNA, 25 bp, SARS Virus
agtatatggattcaagaacacatct

SEQ ID NO: 191051 - DNA, 25 bp, SARS Virus
gtatatggatttcagaacacatctc

SEQ ID NO: 191052 - DNA, 25 bp, SARS Virus
tatatggatttacgaacacatctct

SEQ ID NO: 191053 - DNA, 25 bp, SARS Virus
atatggatttaacaacacatctctg

SEQ ID NO: 191054 - DNA, 25 bp, SARS Virus
tatggatttaagcacacatctctgg

SEQ ID NO: 191055 - DNA, 25 bp, SARS Virus
atggatttaagaccacatctctggt

SEQ ID NO: 191056 - DNA, 25 bp, SARS Virus
tggatttaagaacacatctctggtt

SEQ ID NO: 191057 - DNA, 25 bp, SARS Virus
ggatttaagaacccatctctggttc

SEQ ID NO: 191058 - DNA, 25 bp, SARS Virus
gatttaagaacacatctctggttca

SEQ ID NO: 191059 - DNA, 25 bp, SARS Virus
atttaagaacacctctctggttcat

SEQ ID NO: 191060 - DNA, 25 bp, SARS Virus
tttaagaacacacctctggttcatc

SEQ ID NO: 191061 - DNA, 25 bp, SARS Virus
ttaagaacacatctctggttcatca

SEQ ID NO: 191062 - DNA, 25 bp, SARS Virus
taagaacacatccctggttcatcag

SEQ ID NO: 191063 - DNA, 25 bp, SARS Virus
aagaacacatctctggttcatcagt

SEQ ID NO: 191064 - DNA, 25 bp, SARS Virus
agaacacatctccggttcatcagta

SEQ ID NO: 191065 - DNA, 25 bp, SARS Virus
gaacacatctctcgttcatcagtat

SEQ ID NO: 191066 - DNA, 25 bp, SARS Virus
aacacatctctgcttcatcagtatt

SEQ ID NO: 191067 - DNA, 25 bp, SARS Virus
acacatctctggctcatcagtattt

SEQ ID NO: 191068 - DNA, 25 bp, SARS Virus
cacatctctggtccatcagtatttg

SEQ ID NO: 191069 - DNA, 25 bp, SARS Virus
acatctctggttcatcagtatttgt

SEQ ID NO: 191070 - DNA, 25 bp, SARS Virus
catctctggttcctcagtatttgtg

SEQ ID NO: 191071 - DNA, 25 bp, SARS Virus
atctctggttcaccagtatttgtgg

SEQ ID NO: 191072 - DNA, 25 bp, SARS Virus
tctctggttcatcagtatttgtggt

SEQ ID NO: 191073 - DNA, 25 bp, SARS Virus
ctctggttcatccgtatttgtggtt

SEQ ID NO: 191074 - DNA, 25 bp, SARS Virus
tctggttcatcactatttgtggttc

SEQ ID NO: 191075 - DNA, 25 bp, SARS Virus
ctggttcatcagcatttgtggttct

SEQ ID NO: 191076 - DNA, 25 bp, SARS Virus
tggttcatcagtctttgtggttctc

SEQ ID NO: 191077 - DNA, 25 bp, SARS Virus
ggttcatcagtacttgtggttctca

SEQ ID NO: 191078 - DNA, 25 bp, SARS Virus
gttcatcagtatctgtggttctcat

SEQ ID NO: 191079 - DNA, 25 bp, SARS Virus
ttcatcagtattcgtggttctcatt

SEQ ID NO: 191080 - DNA, 25 bp, SARS Virus
tcatcagtatttctggttctcattc

SEQ ID NO: 191081 - DNA, 25 bp, SARS Virus
catcagtatttgcggttctcattcg

SEQ ID NO: 191082 - DNA, 25 bp, SARS Virus
atcagtatttgtcgttctcattcgg

SEQ ID NO: 191083 - DNA, 25 bp, SARS Virus
tcagtatttgtgcttctcattcgga

SEQ ID NO: 191084 - DNA, 25 bp, SARS Virus
cagtatttgtggctctcattcggac

SEQ ID NO: 191085 - DNA, 25 bp, SARS Virus
agtatttgtggtcctcattcggact

SEQ ID NO: 191086 - DNA, 25 bp, SARS Virus
gtatttgtggttctcattcggactt

SEQ ID NO: 191087 - DNA, 25 bp, SARS Virus
tatttgtggttcccattcggacttc

SEQ ID NO: 191088 - DNA, 25 bp, SARS Virus
atttgtggttctcattcggacttca

SEQ ID NO: 191089 - DNA, 25 bp, SARS Virus
tttgtggttctccttcggacttcat

SEQ ID NO: 191090 - DNA, 25 bp, SARS Virus
ttgtggttctcactcggacttcatt

SEQ ID NO: 191091 - DNA, 25 bp, SARS Virus
tgtggttctcatccggacttcattg

SEQ ID NO: 191092 - DNA, 25 bp, SARS Virus
gtggttctcattcggacttcattgc

SEQ ID NO: 191093 - DNA, 25 bp, SARS Virus
tggttctcattccgacttcattgcc

SEQ ID NO: 191094 - DNA, 25 bp, SARS Virus
ggttctcattcgcacttcattgcca

SEQ ID NO: 191095 - DNA, 25 bp, SARS Virus
gttctcattcggccttcattgccaa

SEQ ID NO: 191096 - DNA, 25 bp, SARS Virus
ttctcattcggacttcattgccaac

SEQ ID NO: 191097 - DNA, 25 bp, SARS Virus
tctcattcggacctcattgccaact

SEQ ID NO: 191098 - DNA, 25 bp, SARS Virus
ctcattcggactccattgccaactc

SEQ ID NO: 191099 - DNA, 25 bp, SARS Virus
tcattcggacttcattgccaactca

SEQ ID NO: 191100 - DNA, 25 bp, SARS Virus
cattcggacttccttgccaactcat

SEQ ID NO: 191101 - DNA, 25 bp, SARS Virus
attcggacttcactgccaactcatt

SEQ ID NO: 191102 - DNA, 25 bp, SARS Virus
ttcggacttcatcgccaactcattt

SEQ ID NO: 191103 - DNA, 25 bp, SARS Virus
tcggacttcattcccaactcatttg

SEQ ID NO: 191104 - DNA, 25 bp, SARS Virus
cggacttcattgccaactcatttgt

SEQ ID NO: 191105 - DNA, 25 bp, SARS Virus
ggacttcattgccaactcatttgtc

SEQ ID NO: 191106 - DNA, 25 bp, SARS Virus
gacttcattgcccactcatttgtct

SEQ ID NO: 191107 - DNA, 25 bp, SARS Virus
acttcattgccacctcatttgtctt

SEQ ID NO: 191108 - DNA, 25 bp, SARS Virus
cttcattgccaactcatttgtcttt

SEQ ID NO: 191109 - DNA, 25 bp, SARS Virus
ttcattgccaacccatttgtctttt

SEQ ID NO: 191110 - DNA, 25 bp, SARS Virus
tcattgccaactcatttgtcttttc

SEQ ID NO: 191111 - DNA, 25 bp, SARS Virus
cattgccaactcctttgtcttttcc

SEQ ID NO: 191112 - DNA, 25 bp, SARS Virus
attgccaactcacttgtcttttccg

SEQ ID NO: 191113 - DNA, 25 bp, SARS Virus
ttgccaactcatctgtcttttccgg

SEQ ID NO: 191114 - DNA, 25 bp, SARS Virus
tgccaactcattcgtcttttccggt

SEQ ID NO: 191115 - DNA, 25 bp, SARS Virus
gccaactcatttctcttttccggtt

SEQ ID NO: 191116 - DNA, 25 bp, SARS Virus
ccaactcatttgccttttccggttt

SEQ ID NO: 191117 - DNA, 25 bp, SARS Virus
caactcatttgtcttttccggtttc

SEQ ID NO: 191118 - DNA, 25 bp, SARS Virus
aactcatttgtcctttccggtttca

SEQ ID NO: 191119 - DNA, 25 bp, SARS Virus
actcatttgtctcttccggtttcat

SEQ ID NO: 191120 - DNA, 25 bp, SARS Virus
ctcatttgtcttctccggtttcatc

SEQ ID NO: 191121 - DNA, 25 bp, SARS Virus
tcatttgtctttcccggtttcatcg

SEQ ID NO: 191122 - DNA, 25 bp, SARS Virus
catttgtcttttccggtttcatcgt

SEQ ID NO: 191123 - DNA, 25 bp, SARS Virus
atttgtcttttccggtttcatcgtc

SEQ ID NO: 191124 - DNA, 25 bp, SARS Virus
tttgtcttttcccgtttcatcgtcg

SEQ ID NO: 191125 - DNA, 25 bp, SARS Virus
ttgtcttttccgctttcatcgtcgt

SEQ ID NO: 191126 - DNA, 25 bp, SARS Virus
tgtcttttccggcttcatcgtcgtc

SEQ ID NO: 191127 - DNA, 25 bp, SARS Virus
gtcttttccggtctcatcgtcgtcg

SEQ ID NO: 191128 - DNA, 25 bp, SARS Virus
tcttttccggttccatcgtcgtcgt

SEQ ID NO: 191129 - DNA, 25 bp, SARS Virus
cttttccggtttcatcgtcgtcgtt

SEQ ID NO: 191130 - DNA, 25 bp, SARS Virus
ttttccggtttcctcgtcgtcgttg

SEQ ID NO: 191131 - DNA, 25 bp, SARS Virus
tttccggtttcaccgtcgtcgttgt

SEQ ID NO: 191132 - DNA, 25 bp, SARS Virus
ttccggtttcatcgtcgtcgttgtt

SEQ ID NO: 191133 - DNA, 25 bp, SARS Virus
tccggtttcatcctcgtcgttgtta

SEQ ID NO: 191134 - DNA, 25 bp, SARS Virus
ccggtttcatcgccgtcgttgttat

SEQ ID NO: 191135 - DNA, 25 bp, SARS Virus
cggtttcatcgtcgtcgttgttatc

SEQ ID NO: 191136 - DNA, 25 bp, SARS Virus
ggtttcatcgtcctcgttgttatcg

SEQ ID NO: 191137 - DNA, 25 bp, SARS Virus
gtttcatcgtcgccgttgttatcgg

SEQ ID NO: 191138 - DNA, 25 bp, SARS Virus
tttcatcgtcgtcgttgttatcgga

SEQ ID NO: 191139 - DNA, 25 bp, SARS Virus
ttcatcgtcgtccttgttatcggat

SEQ ID NO: 191140 - DNA, 25 bp, SARS Virus
tcatcgtcgtcgctgttatcggatt

SEQ ID NO: 191141 - DNA, 25 bp, SARS Virus
catcgtcgtcgtcgttatcggattc

SEQ ID NO: 191142 - DNA, 25 bp, SARS Virus
atcgtcgtcgttcttatcggattct

SEQ ID NO: 191143 - DNA, 25 bp, SARS Virus
tcgtcgtcgttgctatcggattctt

SEQ ID NO: 191144 - DNA, 25 bp, SARS Virus
cgtcgtcgttgtcatcggattcttt

SEQ ID NO: 191145 - DNA, 25 bp, SARS Virus
gtcgtcgttgttctcggattctttg

SEQ ID NO: 191146 - DNA, 25 bp, SARS Virus
tcgtcgttgttaccggattctttgt

SEQ ID NO: 191147 - DNA, 25 bp, SARS Virus
cgtcgttgttatcggattctttgtt

SEQ ID NO: 191148 - DNA, 25 bp, SARS Virus
gtcgttgttatccgattctttgtta

SEQ ID NO: 191149 - DNA, 25 bp, SARS Virus
tcgttgttatcgcattctttgttat

SEQ ID NO: 191150 - DNA, 25 bp, SARS Virus
cgttgttatcggcttctttgttatt

SEQ ID NO: 191151 - DNA, 25 bp, SARS Virus
gttgttatcggactctttgttattt

SEQ ID NO: 191152 - DNA, 25 bp, SARS Virus
ttgttatcggatcctttgttatttg

SEQ ID NO: 191153 - DNA, 25 bp, SARS Virus
tgttatcggattctttgttatttgt

SEQ ID NO: 191154 - DNA, 25 bp, SARS Virus
gttatcggattccttgttatttgtt

SEQ ID NO: 191155 - DNA, 25 bp, SARS Virus
ttatcggattctctgttatttgttc

SEQ ID NO: 191156 - DNA, 25 bp, SARS Virus
tatcggattcttcgttatttgttcg

SEQ ID NO: 191157 - DNA, 25 bp, SARS Virus
atcggattctttcttatttgttcgt

SEQ ID NO: 191158 - DNA, 25 bp, SARS Virus
tcggattctttgctatttgttcgta

SEQ ID NO: 191159 - DNA, 25 bp, SARS Virus
cggattctttgtcatttgttcgtac

SEQ ID NO: 191160 - DNA, 25 bp, SARS Virus
ggattctttgttctttgttcgtact

SEQ ID NO: 191161 - DNA, 25 bp, SARS Virus
gattctttgttacttgttcgtacta

SEQ ID NO: 191162 - DNA, 25 bp, SARS Virus
attctttgttatctgttcgtactat

SEQ ID NO: 191163 - DNA, 25 bp, SARS Virus
ttctttgttattcgttcgtactatg

SEQ ID NO: 191164 - DNA, 25 bp, SARS Virus
tctttgttatttcttcgtactatgt

SEQ ID NO: 191165 - DNA, 25 bp, SARS Virus
ctttgttatttgctcgtactatgtg

SEQ ID NO: 191166 - DNA, 25 bp, SARS Virus
tttgttatttgtccgtactatgtga

SEQ ID NO: 191167 - DNA, 25 bp, SARS Virus
ttgttatttgttcgtactatgtgac

SEQ ID NO: 191168 - DNA, 25 bp, SARS Virus
tgttatttgttcctactatgtgaca

SEQ ID NO: 191169 - DNA, 25 bp, SARS Virus
gttatttgttcgcactatgtgacat

SEQ ID NO: 191170 - DNA, 25 bp, SARS Virus
ttatttgttcgtcctatgtgacatt

SEQ ID NO: 191171 - DNA, 25 bp, SARS Virus
tatttgttcgtactatgtgacattc

SEQ ID NO: 191172 - DNA, 25 bp, SARS Virus
atttgttcgtaccatgtgacattcc

SEQ ID NO: 191173 - DNA, 25 bp, SARS Virus
tttgttcgtactctgtgacattcca

SEQ ID NO: 191174 - DNA, 25 bp, SARS Virus
ttgttcgtactacgtgacattccac

SEQ ID NO: 191175 - DNA, 25 bp, SARS Virus
tgttcgtactatctgacattccaca

SEQ ID NO: 191176 - DNA, 25 bp, SARS Virus
gttcgtactatgcgacattccacaa

SEQ ID NO: 191177 - DNA, 25 bp, SARS Virus
ttcgtactatgtcacattccacaac

SEQ ID NO: 191178 - DNA, 25 bp, SARS Virus
tcgtactatgtgccattccacaacg

SEQ ID NO: 191179 - DNA, 25 bp, SARS Virus
cgtactatgtgacattccacaacgg

SEQ ID NO: 191180 - DNA, 25 bp, SARS Virus
gtactatgtgaccttccacaacggt

SEQ ID NO: 191181 - DNA, 25 bp, SARS Virus
tactatgtgacactccacaacggtc

SEQ ID NO: 191182 - DNA, 25 bp, SARS Virus
actatgtgacatcccacaacggtca

SEQ ID NO: 191183 - DNA, 25 bp, SARS Virus
ctatgtgacattccacaacggtcat

SEQ ID NO: 191184 - DNA, 25 bp, SARS Virus
tatgtgacattccacaacggtcatt

SEQ ID NO: 191185 - DNA, 25 bp, SARS Virus
atgtgacattccccaacggtcatta

SEQ ID NO: 191186 - DNA, 25 bp, SARS Virus
tgtgacattccacaacggtcattat

SEQ ID NO: 191187 - DNA, 25 bp, SARS Virus
gtgacattccaccacggtcattatt

SEQ ID NO: 191188 - DNA, 25 bp, SARS Virus
tgacattccacaccggtcattattt

SEQ ID NO: 191189 - DNA, 25 bp, SARS Virus
gacattccacaacggtcattattta

SEQ ID NO: 191190 - DNA, 25 bp, SARS Virus
acattccacaaccgtcattatttat

SEQ ID NO: 191191 - DNA, 25 bp, SARS Virus
cattccacaacgctcattatttatt

SEQ ID NO: 191192 - DNA, 25 bp, SARS Virus
attccacaacggccattatttattg

SEQ ID NO: 191193 - DNA, 25 bp, SARS Virus
ttccacaacggtcattatttattgt

SEQ ID NO: 191194 - DNA, 25 bp, SARS Virus
tccacaacggtccttatttattgtt

SEQ ID NO: 191195 - DNA, 25 bp, SARS Virus
ccacaacggtcactatttattgtta

SEQ ID NO: 191196 - DNA, 25 bp, SARS Virus
cacaacggtcatcatttattgttac

SEQ ID NO: 191197 - DNA, 25 bp, SARS Virus
acaacggtcattctttattgttacc

SEQ ID NO: 191198 - DNA, 25 bp, SARS Virus
caacggtcattacttattgttaccc

SEQ ID NO: 191199 - DNA, 25 bp, SARS Virus
aacggtcattatctattgttaccca

SEQ ID NO: 191200 - DNA, 25 bp, SARS Virus
acggtcattattcattgttacccat

SEQ ID NO: 191201 - DNA, 25 bp, SARS Virus
cggtcattatttcttgttacccatt

SEQ ID NO: 191202 - DNA, 25 bp, SARS Virus
ggtcattatttactgttacccatta

SEQ ID NO: 191203 - DNA, 25 bp, SARS Virus
gtcattatttatcgttacccattat

SEQ ID NO: 191204 - DNA, 25 bp, SARS Virus
tcattatttattcttacccattatg

SEQ ID NO: 191205 - DNA, 25 bp, SARS Virus
cattatttattgctacccattatga

SEQ ID NO: 191206 - DNA, 25 bp, SARS Virus
attatttattgtcacccattatgag

SEQ ID NO: 191207 - DNA, 25 bp, SARS Virus
ttatttattgttccccattatgagt

SEQ ID NO: 191208 - DNA, 25 bp, SARS Virus
tatttattgttacccattatgagtt

SEQ ID NO: 191209 - DNA, 25 bp, SARS Virus
atttattgttacccattatgagttg

SEQ ID NO: 191210 - DNA, 25 bp, SARS Virus
tttattgttacccattatgagttgt

SEQ ID NO: 191211 - DNA, 25 bp, SARS Virus
ttattgttaccccttatgagttgtg

SEQ ID NO: 191212 - DNA, 25 bp, SARS Virus
tattgttacccactatgagttgtgt

SEQ ID NO: 191213 - DNA, 25 bp, SARS Virus
attgttacccatcatgagttgtgtg

SEQ ID NO: 191214 - DNA, 25 bp, SARS Virus
ttgttacccattctgagttgtgtgt

SEQ ID NO: 191215 - DNA, 25 bp, SARS Virus
tgttacccattacgagttgtgtgtg

SEQ ID NO: 191216 - DNA, 25 bp, SARS Virus
gttacccattatcagttgtgtgtgt

SEQ ID NO: 191217 - DNA, 25 bp, SARS Virus
ttacccattatgcgttgtgtgtgtt

SEQ ID NO: 191218 - DNA, 25 bp, SARS Virus
tacccattatgacttgtgtgtgttt

SEQ ID NO: 191219 - DNA, 25 bp, SARS Virus
acccattatgagctgtgtgtgtttg

SEQ ID NO: 191220 - DNA, 25 bp, SARS Virus
cccattatgagtcgtgtgtgtttgt

SEQ ID NO: 191221 - DNA, 25 bp, SARS Virus
ccattatgagttctgtgtgtttgtg

SEQ ID NO: 191222 - DNA, 25 bp, SARS Virus
cattatgagttgcgtgtgtttgtga

SEQ ID NO: 191223 - DNA, 25 bp, SARS Virus
attatgagttgtctgtgtttgtgat

SEQ ID NO: 191224 - DNA, 25 bp, SARS Virus
ttatgagttgtgcgtgtttgtgata

SEQ ID NO: 191225 - DNA, 25 bp, SARS Virus
tatgagttgtgtctgtttgtgatat

SEQ ID NO: 191226 - DNA, 25 bp, SARS Virus
atgagttgtgtgcgtttgtgatatc

SEQ ID NO: 191227 - DNA, 25 bp, SARS Virus
tgagttgtgtgtctttgtgatatcg

SEQ ID NO: 191228 - DNA, 25 bp, SARS Virus
gagttgtgtgtgcttgtgatatcga

SEQ ID NO: 191229 - DNA, 25 bp, SARS Virus
agttgtgtgtgtctgtgatatcgag

SEQ ID NO: 191230 - DNA, 25 bp, SARS Virus
gttgtgtgtgttcgtgatatcgaga

SEQ ID NO: 191231 - DNA, 25 bp, SARS Virus
ttgtgtgtgtttctgatatcgagat

SEQ ID NO: 191232 - DNA, 25 bp, SARS Virus
tgtgtgtgtttgcgatatcgagatc

SEQ ID NO: 191233 - DNA, 25 bp, SARS Virus
gtgtgtgtttgtcatatcgagatcg

SEQ ID NO: 191234 - DNA, 25 bp, SARS Virus
tgtgtgtttgtgctatcgagatcga

SEQ ID NO: 191235 - DNA, 25 bp, SARS Virus
gtgtgtttgtgacatcgagatcgat

SEQ ID NO: 191236 - DNA, 25 bp, SARS Virus
tgtgtttgtgatctcgagatcgatt

SEQ ID NO: 191237 - DNA, 25 bp, SARS Virus
gtgtttgtgataccgagatcgattt

SEQ ID NO: 191238 - DNA, 25 bp, SARS Virus
tgtttgtgatatcgagatcgatttt

SEQ ID NO: 191239 - DNA, 25 bp, SARS Virus
gtttgtgatatccagatcgattttt

SEQ ID NO: 191240 - DNA, 25 bp, SARS Virus
tttgtgatatcgcgatcgatttttg

SEQ ID NO: 191241 - DNA, 25 bp, SARS Virus
ttgtgatatcgacatcgatttttgt

SEQ ID NO: 191242 - DNA, 25 bp, SARS Virus
tgtgatatcgagctcgatttttgta

SEQ ID NO: 191243 - DNA, 25 bp, SARS Virus
gtgatatcgagaccgatttttgtac

SEQ ID NO: 191244 - DNA, 25 bp, SARS Virus
tgatatcgagatcgatttttgtact

SEQ ID NO: 191245 - DNA, 25 bp, SARS Virus
gatatcgagatccatttttgtacta

SEQ ID NO: 191246 - DNA, 25 bp, SARS Virus
atatcgagatcgctttttgtactat

SEQ ID NO: 191247 - DNA, 25 bp, SARS Virus
tatcgagatcgacttttgtactatc

SEQ ID NO: 191248 - DNA, 25 bp, SARS Virus
atcgagatcgatctttgtactatca

SEQ ID NO: 191249 - DNA, 25 bp, SARS Virus
tcgagatcgattcttgtactatcag

SEQ ID NO: 191250 - DNA, 25 bp, SARS Virus
cgagatcgatttctgtactatcagc

SEQ ID NO: 191251 - DNA, 25 bp, SARS Virus
gagatcgattttcgtactatcagca

SEQ ID NO: 191252 - DNA, 25 bp, SARS Virus
agatcgatttttctactatcagcat

SEQ ID NO: 191253 - DNA, 25 bp, SARS Virus
gatcgatttttgcactatcagcatt

SEQ ID NO: 191254 - DNA, 25 bp, SARS Virus
atcgatttttgtcctatcagcattg

SEQ ID NO: 191255 - DNA, 25 bp, SARS Virus
tcgatttttgtactatcagcattgc

SEQ ID NO: 191256 - DNA, 25 bp, SARS Virus
cgatttttgtaccatcagcattgct

SEQ ID NO: 191257 - DNA, 25 bp, SARS Virus
gatttttgtactctcagcattgctg

SEQ ID NO: 191258 - DNA, 25 bp, SARS Virus
atttttgtactaccagcattgctgt

SEQ ID NO: 191259 - DNA, 25 bp, SARS Virus
tttttgtactatcagcattgctgtg

SEQ ID NO: 191260 - DNA, 25 bp, SARS Virus
ttttgtactatccgcattgctgtgg

SEQ ID NO: 191261 - DNA, 25 bp, SARS Virus
tttgtactatcaccattgctgtggt

SEQ ID NO: 191262 - DNA, 25 bp, SARS Virus
ttgtactatcagcattgctgtggtc

SEQ ID NO: 191263 - DNA, 25 bp, SARS Virus
tgtactatcagccttgctgtggtct

SEQ ID NO: 191264 - DNA, 25 bp, SARS Virus
gtactatcagcactgctgtggtctt

SEQ ID NO: 191265 - DNA, 25 bp, SARS Virus
tactatcagcatcgctgtggtctta

SEQ ID NO: 191266 - DNA, 25 bp, SARS Virus
actatcagcattcctgtggtcttat

SEQ ID NO: 191267 - DNA, 25 bp, SARS Virus
ctatcagcattgctgtggtcttatc

SEQ ID NO: 191268 - DNA, 25 bp, SARS Virus
tatcagcattgccgtggtcttatca

SEQ ID NO: 191269 - DNA, 25 bp, SARS Virus
atcagcattgctctggtcttatcaa

SEQ ID NO: 191270 - DNA, 25 bp, SARS Virus
tcagcattgctgcggtcttatcaat

SEQ ID NO: 191271 - DNA, 25 bp, SARS Virus
cagcattgctgtcgtcttatcaatc

SEQ ID NO: 191272 - DNA, 25 bp, SARS Virus
agcattgctgtgctcttatcaatct

SEQ ID NO: 191273 - DNA, 25 bp, SARS Virus
gcattgctgtggccttatcaatctc

SEQ ID NO: 191274 - DNA, 25 bp, SARS Virus
cattgctgtggtcttatcaatctcc

SEQ ID NO: 191275 - DNA, 25 bp, SARS Virus
attgctgtggtcctatcaatctcca

SEQ ID NO: 191276 - DNA, 25 bp, SARS Virus
ttgctgtggtctcatcaatctccaa

SEQ ID NO: 191277 - DNA, 25 bp, SARS Virus
tgctgtggtcttctcaatctccaat

SEQ ID NO: 191278 - DNA, 25 bp, SARS Virus
gctgtggtcttaccaatctccaatg

SEQ ID NO: 191279 - DNA, 25 bp, SARS Virus
ctgtggtcttatcaatctccaatgt

SEQ ID NO: 191280 - DNA, 25 bp, SARS Virus
tgtggtcttatccatctccaatgtc

SEQ ID NO: 191281 - DNA, 25 bp, SARS Virus
gtggtcttatcactctccaatgtct

SEQ ID NO: 191282 - DNA, 25 bp, SARS Virus
tggtcttatcaacctccaatgtctt

SEQ ID NO: 191283 - DNA, 25 bp, SARS Virus
ggtcttatcaatctccaatgtcttt

SEQ ID NO: 191284 - DNA, 25 bp, SARS Virus
gtcttatcaatccccaatgtcttta

SEQ ID NO: 191285 - DNA, 25 bp, SARS Virus
tcttatcaatctccaatgtctttat

SEQ ID NO: 191286 - DNA, 25 bp, SARS Virus
cttatcaatctccaatgtctttatt

SEQ ID NO: 191287 - DNA, 25 bp, SARS Virus
ttatcaatctcccatgtctttattg

SEQ ID NO: 191288 - DNA, 25 bp, SARS Virus
tatcaatctccactgtctttattga

SEQ ID NO: 191289 - DNA, 25 bp, SARS Virus
atcaatctccaacgtctttattgat

SEQ ID NO: 191290 - DNA, 25 bp, SARS Virus
tcaatctccaatctctttattgatt

SEQ ID NO: 191291 - DNA, 25 bp, SARS Virus
caatctccaatgcctttattgattc

SEQ ID NO: 191292 - DNA, 25 bp, SARS Virus
aatctccaatgtctttattgattcc

SEQ ID NO: 191293 - DNA, 25 bp, SARS Virus
atctccaatgtccttattgattccg

SEQ ID NO: 191294 - DNA, 25 bp, SARS Virus
tctccaatgtctctattgattccgg

SEQ ID NO: 191295 - DNA, 25 bp, SARS Virus
ctccaatgtcttcattgattccggg

SEQ ID NO: 191296 - DNA, 25 bp, SARS Virus
tccaatgtctttcttgattccgggt

SEQ ID NO: 191297 - DNA, 25 bp, SARS Virus
ccaatgtctttactgattccgggtg

SEQ ID NO: 191298 - DNA, 25 bp, SARS Virus
caatgtctttatcgattccgggtgt

SEQ ID NO: 191299 - DNA, 25 bp, SARS Virus
aatgtctttattcattccgggtgta

SEQ ID NO: 191300 - DNA, 25 bp, SARS Virus
atgtctttattgcttccgggtgtac

SEQ ID NO: 191301 - DNA, 25 bp, SARS Virus
tgtctttattgactccgggtgtacc

SEQ ID NO: 191302 - DNA, 25 bp, SARS Virus
gtctttattgatcccgggtgtacct

SEQ ID NO: 191303 - DNA, 25 bp, SARS Virus
tctttattgattccgggtgtacctt

SEQ ID NO: 191304 - DNA, 25 bp, SARS Virus
ctttattgattccgggtgtaccttt

SEQ ID NO: 191305 - DNA, 25 bp, SARS Virus
tttattgattcccggtgtaccttta

SEQ ID NO: 191306 - DNA, 25 bp, SARS Virus
ttattgattccgcgtgtacctttat

SEQ ID NO: 191307 - DNA, 25 bp, SARS Virus
tattgattccggctgtacctttatc

SEQ ID NO: 191308 - DNA, 25 bp, SARS Virus
attgattccgggcgtacctttatcg

SEQ ID NO: 191309 - DNA, 25 bp, SARS Virus
ttgattccgggtctacctttatcga

SEQ ID NO: 191310 - DNA, 25 bp, SARS Virus
tgattccgggtgcacctttatcgaa

SEQ ID NO: 191311 - DNA, 25 bp, SARS Virus
gattccgggtgtccctttatcgaac

SEQ ID NO: 191312 - DNA, 25 bp, SARS Virus
attccgggtgtacctttatcgaact

SEQ ID NO: 191313 - DNA, 25 bp, SARS Virus
ttccgggtgtacctttatcgaacta

SEQ ID NO: 191314 - DNA, 25 bp, SARS Virus
tccgggtgtacccttatcgaactag

SEQ ID NO: 191315 - DNA, 25 bp, SARS Virus
ccgggtgtacctctatcgaactaga

SEQ ID NO: 191316 - DNA, 25 bp, SARS Virus
cgggtgtaccttcatcgaactagat

SEQ ID NO: 191317 - DNA, 25 bp, SARS Virus
gggtgtacctttctcgaactagatt

SEQ ID NO: 191318 - DNA, 25 bp, SARS Virus
ggtgtacctttaccgaactagattt

SEQ ID NO: 191319 - DNA, 25 bp, SARS Virus
gtgtacctttatcgaactagatttc

SEQ ID NO: 191320 - DNA, 25 bp, SARS Virus
tgtacctttatccaactagatttcg

SEQ ID NO: 191321 - DNA, 25 bp, SARS Virus
gtacctttatcgcactagatttcgt

SEQ ID NO: 191322 - DNA, 25 bp, SARS Virus
tacctttatcgacctagatttcgta

SEQ ID NO: 191323 - DNA, 25 bp, SARS Virus
acctttatcgaactagatttcgtaa

SEQ ID NO: 191324 - DNA, 25 bp, SARS Virus
cctttatcgaaccagatttcgtaat

SEQ ID NO: 191325 - DNA, 25 bp, SARS Virus
ctttatcgaactcgatttcgtaatg

SEQ ID NO: 191326 - DNA, 25 bp, SARS Virus
tttatcgaactacatttcgtaatgg

SEQ ID NO: 191327 - DNA, 25 bp, SARS Virus
ttatcgaactagctttcgtaatggt

SEQ ID NO: 191328 - DNA, 25 bp, SARS Virus
tatcgaactagacttcgtaatggta

SEQ ID NO: 191329 - DNA, 25 bp, SARS Virus
aacatgtgtaacgcgggtgttaaat

SEQ ID NO: 191330 - DNA, 25 bp, SARS Virus
acatgtgtaacaggggtgttaaatc

SEQ ID NO: 191331 - DNA, 25 bp, SARS Virus
catgtgtaacacgggtgttaaatct

SEQ ID NO: 191332 - DNA, 25 bp, SARS Virus
atgtgtaacacgggtgttaaatctt

SEQ ID NO: 191333 - DNA, 25 bp, SARS Virus
tgtgtaacacgggtgttaaatcttc

SEQ ID NO: 191334 - DNA, 25 bp, SARS Virus
gtgtaacacgggggttaaatcttct

SEQ ID NO: 191335 - DNA, 25 bp, SARS Virus
tgtaacacgggtgttaaatcttcta

SEQ ID NO: 191336 - DNA, 25 bp, SARS Virus
gtaacacgggtggtaaatcttctac

SEQ ID NO: 191337 - DNA, 25 bp, SARS Virus
taacacgggtgtgaaatcttctact

SEQ ID NO: 191338 - DNA, 25 bp, SARS Virus
aacacgggtgttgaatcttctactg

SEQ ID NO: 191339 - DNA, 25 bp, SARS Virus
acacgggtgttagatcttctactga

SEQ ID NO: 191340 - DNA, 25 bp, SARS Virus
cacgggtgttaagtcttctactgag

SEQ ID NO: 191341 - DNA, 25 bp, SARS Virus
acgggtgttaaagcttctactgaga

SEQ ID NO: 191342 - DNA, 25 bp, SARS Virus
cgggtgttaaatgttctactgagat

SEQ ID NO: 191343 - DNA, 25 bp, SARS Virus
gggtgttaaatcgtctactgagatg

SEQ ID NO: 191344 - DNA, 25 bp, SARS Virus
ggtgttaaatctgctactgagatga

SEQ ID NO: 191345 - DNA, 25 bp, SARS Virus
gtgttaaatcttgtactgagatgag

SEQ ID NO: 191346 - DNA, 25 bp, SARS Virus
tgttaaatcttcgactgagatgaga

SEQ ID NO: 191347 - DNA, 25 bp, SARS Virus
gttaaatcttctgctgagatgagat

SEQ ID NO: 191348 - DNA, 25 bp, SARS Virus
ttaaatcttctagtgagatgagatt

SEQ ID NO: 191349 - DNA, 25 bp, SARS Virus
taaatcttctacggagatgagattc

SEQ ID NO: 191350 - DNA, 25 bp, SARS Virus
aaatcttctactgagatgagattca

SEQ ID NO: 191351 - DNA, 25 bp, SARS Virus
aatcttctactgggatgagattcaa

SEQ ID NO: 191352 - DNA, 25 bp, SARS Virus
atcttctactgagatgagattcaac

SEQ ID NO: 191353 - DNA, 25 bp, SARS Virus
tcttctactgaggtgagattcaaca

SEQ ID NO: 191354 - DNA, 25 bp, SARS Virus
cttctactgagaggagattcaacaa

SEQ ID NO: 191355 - DNA, 25 bp, SARS Virus
ttctactgagatgagattcaacaac

SEQ ID NO: 191356 - DNA, 25 bp, SARS Virus
tctactgagatgggattcaacaact

SEQ ID NO: 191357 - DNA, 25 bp, SARS Virus
ctactgagatgagattcaacaactt

SEQ ID NO: 191358 - DNA, 25 bp, SARS Virus
tactgagatgaggttcaacaacttc

SEQ ID NO: 191359 - DNA, 25 bp, SARS Virus
actgagatgagagtcaacaacttct

SEQ ID NO: 191360 - DNA, 25 bp, SARS Virus
ctgagatgagatgcaacaacttctt

SEQ ID NO: 191361 - DNA, 25 bp, SARS Virus
tgagatgagattgaacaacttcttg

SEQ ID NO: 191362 - DNA, 25 bp, SARS Virus
gagatgagattcgacaacttcttgg

SEQ ID NO: 191363 - DNA, 25 bp, SARS Virus
agatgagattcagcaacttcttggc

SEQ ID NO: 191364 - DNA, 25 bp, SARS Virus
gatgagattcaagaacttcttggct

SEQ ID NO: 191365 - DNA, 25 bp, SARS Virus
atgagattcaacgacttcttggctc

SEQ ID NO: 191366 - DNA, 25 bp, SARS Virus
tgagattcaacagcttcttggctct

SEQ ID NO: 191367 - DNA, 25 bp, SARS Virus
gagattcaacaagttcttggctctc

SEQ ID NO: 191368 - DNA, 25 bp, SARS Virus
agattcaacaacgtcttggctctcg

SEQ ID NO: 191369 - DNA, 25 bp, SARS Virus
gattcaacaactgcttggctctcgt

SEQ ID NO: 191370 - DNA, 25 bp, SARS Virus
attcaacaacttgttggctctcgtc

SEQ ID NO: 191371 - DNA, 25 bp, SARS Virus
ttcaacaacttcgtggctctcgtca

SEQ ID NO: 191372 - DNA, 25 bp, SARS Virus
tcaacaacttctgggctctcgtcat

SEQ ID NO: 191373 - DNA, 25 bp, SARS Virus
caacaacttcttggctctcgtcatg

SEQ ID NO: 191374 - DNA, 25 bp, SARS Virus
aacaacttcttggctctcgtcatgg

SEQ ID NO: 191375 - DNA, 25 bp, SARS Virus
acaacttcttgggtctcgtcatggt

SEQ ID NO: 191376 - DNA, 25 bp, SARS Virus
caacttcttggcgctcgtcatggtg

SEQ ID NO: 191377 - DNA, 25 bp, SARS Virus
aacttcttggctgtcgtcatggtgt

SEQ ID NO: 191378 - DNA, 25 bp, SARS Virus
acttcttggctcgcgtcatggtgtc

SEQ ID NO: 191379 - DNA, 25 bp, SARS Virus
cttcttggctctggtcatggtgtct

SEQ ID NO: 191380 - DNA, 25 bp, SARS Virus
ttcttggctctcgtcatggtgtcta

SEQ ID NO: 191381 - DNA, 25 bp, SARS Virus
tcttggctctcggcatggtgtctac

SEQ ID NO: 191382 - DNA, 25 bp, SARS Virus
cttggctctcgtgatggtgtctaca

SEQ ID NO: 191383 - DNA, 25 bp, SARS Virus
ttggctctcgtcgtggtgtctacac

SEQ ID NO: 191384 - DNA, 25 bp, SARS Virus
tggctctcgtcagggtgtctacacg

SEQ ID NO: 191385 - DNA, 25 bp, SARS Virus
ggctctcgtcatggtgtctacacgt

SEQ ID NO: 191386 - DNA, 25 bp, SARS Virus
gctctcgtcatggtgtctacacgtg

SEQ ID NO: 191387 - DNA, 25 bp, SARS Virus
ctctcgtcatggggtctacacgtga

SEQ ID NO: 191388 - DNA, 25 bp, SARS Virus
tctcgtcatggtgtctacacgtgaa

SEQ ID NO: 191389 - DNA, 25 bp, SARS Virus
ctcgtcatggtggctacacgtgaaa

SEQ ID NO: 191390 - DNA, 25 bp, SARS Virus
tcgtcatggtgtgtacacgtgaaat

SEQ ID NO: 191391 - DNA, 25 bp, SARS Virus
cgtcatggtgtcgacacgtgaaatg

SEQ ID NO: 191392 - DNA, 25 bp, SARS Virus
gtcatggtgtctgcacgtgaaatgc

SEQ ID NO: 191393 - DNA, 25 bp, SARS Virus
tcatggtgtctagacgtgaaatgca

SEQ ID NO: 191394 - DNA, 25 bp, SARS Virus
catggtgtctacgcgtgaaatgcag

SEQ ID NO: 191395 - DNA, 25 bp, SARS Virus
atggtgtctacaggtgaaatgcagt

SEQ ID NO: 191396 - DNA, 25 bp, SARS Virus
tggtgtctacacgtgaaatgcagtc

SEQ ID NO: 191397 - DNA, 25 bp, SARS Virus
ggtgtctacacgggaaatgcagtct

SEQ ID NO: 191398 - DNA, 25 bp, SARS Virus
gtgtctacacgtgaaatgcagtctg

SEQ ID NO: 191399 - DNA, 25 bp, SARS Virus
tgtctacacgtggaatgcagtctgt

SEQ ID NO: 191400 - DNA, 25 bp, SARS Virus
gtctacacgtgagatgcagtctgta

SEQ ID NO: 191401 - DNA, 25 bp, SARS Virus
tctacacgtgaagtgcagtctgtaa

SEQ ID NO: 191402 - DNA, 25 bp, SARS Virus
ctacacgtgaaaggcagtctgtaaa

SEQ ID NO: 191403 - DNA, 25 bp, SARS Virus
tacacgtgaaatgcagtctgtaaaa

SEQ ID NO: 191404 - DNA, 25 bp, SARS Virus
acacgtgaaatggagtctgtaaaat

SEQ ID NO: 191405 - DNA, 25 bp, SARS Virus
cacgtgaaatgcggtctgtaaaatc

SEQ ID NO: 191406 - DNA, 25 bp, SARS Virus
acgtgaaatgcagtctgtaaaatct

SEQ ID NO: 191407 - DNA, 25 bp, SARS Virus
cgtgaaatgcaggctgtaaaatctg

SEQ ID NO: 191408 - DNA, 25 bp, SARS Virus
gtgaaatgcagtgtgtaaaatctga

SEQ ID NO: 191409 - DNA, 25 bp, SARS Virus
tgaaatgcagtcggtaaaatctgac

SEQ ID NO: 191410 - DNA, 25 bp, SARS Virus
gaaatgcagtctgtaaaatctgaca

SEQ ID NO: 191411 - DNA, 25 bp, SARS Virus
aaatgcagtctggaaaatctgacat

SEQ ID NO: 191412 - DNA, 25 bp, SARS Virus
aatgcagtctgtgaaatctgacatg

SEQ ID NO: 191413 - DNA, 25 bp, SARS Virus
atgcagtctgtagaatctgacatgt

SEQ ID NO: 191414 - DNA, 25 bp, SARS Virus
tgcagtctgtaagatctgacatgtc

SEQ ID NO: 191415 - DNA, 25 bp, SARS Virus
gcagtctgtaaagtctgacatgtca

SEQ ID NO: 191416 - DNA, 25 bp, SARS Virus
cagtctgtaaaagctgacatgtcat

SEQ ID NO: 191417 - DNA, 25 bp, SARS Virus
agtctgtaaaatgtgacatgtcatc

SEQ ID NO: 191418 - DNA, 25 bp, SARS Virus
gtctgtaaaatcggacatgtcatcg

SEQ ID NO: 191419 - DNA, 25 bp, SARS Virus
tctgtaaaatctgacatgtcatcgt

SEQ ID NO: 191420 - DNA, 25 bp, SARS Virus
ctgtaaaatctggcatgtcatcgtt

SEQ ID NO: 191421 - DNA, 25 bp, SARS Virus
tgtaaaatctgagatgtcatcgttg

SEQ ID NO: 191422 - DNA, 25 bp, SARS Virus
gtaaaatctgacgtgtcatcgttgg

SEQ ID NO: 191423 - DNA, 25 bp, SARS Virus
taaaatctgacaggtcatcgttgga

SEQ ID NO: 191424 - DNA, 25 bp, SARS Virus
aaaatctgacatgtcatcgttggaa

SEQ ID NO: 191425 - DNA, 25 bp, SARS Virus
aaatctgacatggcatcgttggaac

SEQ ID NO: 191426 - DNA, 25 bp, SARS Virus
aatctgacatgtgatcgttggaact

SEQ ID NO: 191427 - DNA, 25 bp, SARS Virus
atctgacatgtcgtcgttggaacta

SEQ ID NO: 191428 - DNA, 25 bp, SARS Virus
tctgacatgtcagcgttggaactat

SEQ ID NO: 191429 - DNA, 25 bp, SARS Virus
ctgacatgtcatggttggaactatg

SEQ ID NO: 191430 - DNA, 25 bp, SARS Virus
tgacatgtcatcgttggaactatgt

SEQ ID NO: 191431 - DNA, 25 bp, SARS Virus
gacatgtcatcggtggaactatgta

SEQ ID NO: 191432 - DNA, 25 bp, SARS Virus
acatgtcatcgtgggaactatgtac

SEQ ID NO: 191433 - DNA, 25 bp, SARS Virus
catgtcatcgttggaactatgtacc

SEQ ID NO: 191434 - DNA, 25 bp, SARS Virus
atgtcatcgttggaactatgtacca

SEQ ID NO: 191435 - DNA, 25 bp, SARS Virus
tgtcatcgttgggactatgtaccaa

SEQ ID NO: 191436 - DNA, 25 bp, SARS Virus
gtcatcgttggagctatgtaccaaa

SEQ ID NO: 191437 - DNA, 25 bp, SARS Virus
tcatcgttggaagtatgtaccaaat

SEQ ID NO: 191438 - DNA, 25 bp, SARS Virus
catcgttggaacgatgtaccaaatg

SEQ ID NO: 191439 - DNA, 25 bp, SARS Virus
atcgttggaactgtgtaccaaatgg

SEQ ID NO: 191440 - DNA, 25 bp, SARS Virus
tcgttggaactaggtaccaaatgga

SEQ ID NO: 191441 - DNA, 25 bp, SARS Virus
cgttggaactatgtaccaaatggag

SEQ ID NO: 191442 - DNA, 25 bp, SARS Virus
gttggaactatggaccaaatggagg

SEQ ID NO: 191443 - DNA, 25 bp, SARS Virus
ttggaactatgtgccaaatggaggt

SEQ ID NO: 191444 - DNA, 25 bp, SARS Virus
tggaactatgtagcaaatggaggtt

SEQ ID NO: 191445 - DNA, 25 bp, SARS Virus
ggaactatgtacgaaatggaggtta

SEQ ID NO: 191446 - DNA, 25 bp, SARS Virus
gaactatgtaccgaatggaggttat

SEQ ID NO: 191447 - DNA, 25 bp, SARS Virus
aactatgtaccagatggaggttatg

SEQ ID NO: 191448 - DNA, 25 bp, SARS Virus
actatgtaccaagtggaggttatgg

SEQ ID NO: 191449 - DNA, 25 bp, SARS Virus
ctatgtaccaaagggaggttatggg

SEQ ID NO: 191450 - DNA, 25 bp, SARS Virus
tatgtaccaaatggaggttatgggt

SEQ ID NO: 191451 - DNA, 25 bp, SARS Virus
atgtaccaaatggaggttatgggtt

SEQ ID NO: 191452 - DNA, 25 bp, SARS Virus
tgtaccaaatgggggttatgggttg

SEQ ID NO: 191453 - DNA, 25 bp, SARS Virus
gtaccaaatggaggttatgggttgt

SEQ ID NO: 191454 - DNA, 25 bp, SARS Virus
taccaaatggaggttatgggttgtt

SEQ ID NO: 191455 - DNA, 25 bp, SARS Virus
accaaatggagggtatgggttgttg

SEQ ID NO: 191456 - DNA, 25 bp, SARS Virus
ccaaatggaggtgatgggttgttga

SEQ ID NO: 191457 - DNA, 25 bp, SARS Virus
caaatggaggttgtgggttgttgaa

SEQ ID NO: 191458 - DNA, 25 bp, SARS Virus
aaatggaggttaggggttgttgaat

SEQ ID NO: 191459 - DNA, 25 bp, SARS Virus
aatggaggttatgggttgttgaatt

SEQ ID NO: 191460 - DNA, 25 bp, SARS Virus
atggaggttatgggttgttgaatta

SEQ ID NO: 191461 - DNA, 25 bp, SARS Virus
tggaggttatgggttgttgaattac

SEQ ID NO: 191462 - DNA, 25 bp, SARS Virus
ggaggttatggggtgttgaattaca

SEQ ID NO: 191463 - DNA, 25 bp, SARS Virus
gaggttatgggtggttgaattacaa

SEQ ID NO: 191464 - DNA, 25 bp, SARS Virus
aggttatgggttgttgaattacaat

SEQ ID NO: 191465 - DNA, 25 bp, SARS Virus
ggttatgggttggtgaattacaatt

SEQ ID NO: 191466 - DNA, 25 bp, SARS Virus
gttatgggttgtggaattacaattc

SEQ ID NO: 191467 - DNA, 25 bp, SARS Virus
ttatgggttgttgaattacaattcg

SEQ ID NO: 191468 - DNA, 25 bp, SARS Virus
tatgggttgttggattacaattcga

SEQ ID NO: 191469 - DNA, 25 bp, SARS Virus
atgggttgttgagttacaattcgaa

SEQ ID NO: 191470 - DNA, 25 bp, SARS Virus
tgggttgttgaagtacaattcgaac

SEQ ID NO: 191471 - DNA, 25 bp, SARS Virus
gggttgttgaatgacaattcgaact

SEQ ID NO: 191472 - DNA, 25 bp, SARS Virus
ggttgttgaattgcaattcgaactt

SEQ ID NO: 191473 - DNA, 25 bp, SARS Virus
gttgttgaattagaattcgaacttt

SEQ ID NO: 191474 - DNA, 25 bp, SARS Virus
ttgttgaattacgattcgaactttc

SEQ ID NO: 191475 - DNA, 25 bp, SARS Virus
tgttgaattacagttcgaactttcg

SEQ ID NO: 191476 - DNA, 25 bp, SARS Virus
gttgaattacaagtcgaactttcgt

SEQ ID NO: 191477 - DNA, 25 bp, SARS Virus
ttgaattacaatgcgaactttcgta

SEQ ID NO: 191478 - DNA, 25 bp, SARS Virus
tgaattacaattggaactttcgtag

SEQ ID NO: 191479 - DNA, 25 bp, SARS Virus
gaattacaattcgaactttcgtagt

SEQ ID NO: 191480 - DNA, 25 bp, SARS Virus
aattacaattcggactttcgtagtt

SEQ ID NO: 191481 - DNA, 25 bp, SARS Virus
attacaattcgagctttcgtagtta

SEQ ID NO: 191482 - DNA, 25 bp, SARS Virus
ttacaattcgaagtttcgtagttat

SEQ ID NO: 191483 - DNA, 25 bp, SARS Virus
tacaattcgaacgttcgtagttatg

SEQ ID NO: 191484 - DNA, 25 bp, SARS Virus
acaattcgaactgtcgtagttatga

SEQ ID NO: 191485 - DNA, 25 bp, SARS Virus
caattcgaacttgcgtagttatgat

SEQ ID NO: 191486 - DNA, 25 bp, SARS Virus
aattcgaactttggtagttatgatg

SEQ ID NO: 191487 - DNA, 25 bp, SARS Virus
attcgaactttcgtagttatgatga

SEQ ID NO: 191488 - DNA, 25 bp, SARS Virus
ttcgaactttcggagttatgatgag

SEQ ID NO: 191489 - DNA, 25 bp, SARS Virus
tcgaactttcgtggttatgatgaga

SEQ ID NO: 191490 - DNA, 25 bp, SARS Virus
cgaactttcgtagttatgatgagaa

SEQ ID NO: 191491 - DNA, 25 bp, SARS Virus
gaactttcgtaggtatgatgagaat

SEQ ID NO: 191492 - DNA, 25 bp, SARS Virus
aactttcgtagtgatgatgagaatc

SEQ ID NO: 191493 - DNA, 25 bp, SARS Virus
actttcgtagttgtgatgagaatcc

SEQ ID NO: 191494 - DNA, 25 bp, SARS Virus
ctttcgtagttaggatgagaatcct

SEQ ID NO: 191495 - DNA, 25 bp, SARS Virus
tttcgtagttatgatgagaatcctc

SEQ ID NO: 191496 - DNA, 25 bp, SARS Virus
ttcgtagttatggtgagaatcctcc

SEQ ID NO: 191497 - DNA, 25 bp, SARS Virus
tcgtagttatgaggagaatcctccg

SEQ ID NO: 191498 - DNA, 25 bp, SARS Virus
cgtagttatgatgagaatcctccgt

SEQ ID NO: 191499 - DNA, 25 bp, SARS Virus
gtagttatgatgggaatcctccgtt

SEQ ID NO: 191500 - DNA, 25 bp, SARS Virus
tagttatgatgagaatcctccgttt

SEQ ID NO: 191501 - DNA, 25 bp, SARS Virus
agttatgatgaggatcctccgtttt

SEQ ID NO: 191502 - DNA, 25 bp, SARS Virus
gttatgatgagagtcctccgttttc

SEQ ID NO: 191503 - DNA, 25 bp, SARS Virus
ttatgatgagaagcctccgttttcg

SEQ ID NO: 191504 - DNA, 25 bp, SARS Virus
tatgatgagaatgctccgttttcgg

SEQ ID NO: 191505 - DNA, 25 bp, SARS Virus
atgatgagaatcgtccgttttcggg

SEQ ID NO: 191506 - DNA, 25 bp, SARS Virus
tgatgagaatccgccgttttcgggg

SEQ ID NO: 191507 - DNA, 25 bp, SARS Virus
gatgagaatcctgcgttttcgggga

SEQ ID NO: 191508 - DNA, 25 bp, SARS Virus
atgagaatcctcggttttcggggac

SEQ ID NO: 191509 - DNA, 25 bp, SARS Virus
tgagaatcctccgttttcggggacc

SEQ ID NO: 191510 - DNA, 25 bp, SARS Virus
gagaatcctccggtttcggggaccc

SEQ ID NO: 191511 - DNA, 25 bp, SARS Virus
agaatcctccgtgttcggggaccct

SEQ ID NO: 191512 - DNA, 25 bp, SARS Virus
gaatcctccgttgtcggggaccctc

SEQ ID NO: 191513 - DNA, 25 bp, SARS Virus
aatcctccgtttgcggggaccctca

SEQ ID NO: 191514 - DNA, 25 bp, SARS Virus
atcctccgttttgggggaccctcaa

SEQ ID NO: 191515 - DNA, 25 bp, SARS Virus
tcctccgttttcggggaccctcaag

SEQ ID NO: 191516 - DNA, 25 bp, SARS Virus
cctccgttttcggggaccctcaagt

SEQ ID NO: 191517 - DNA, 25 bp, SARS Virus
ctccgttttcggggaccctcaagta

SEQ ID NO: 191518 - DNA, 25 bp, SARS Virus
tccgttttcggggaccctcaagtat

SEQ ID NO: 191519 - DNA, 25 bp, SARS Virus
ccgttttcgggggccctcaagtata

SEQ ID NO: 191520 - DNA, 25 bp, SARS Virus
cgttttcggggagcctcaagtatat

SEQ ID NO: 191521 - DNA, 25 bp, SARS Virus
gttttcggggacgctcaagtatatg

SEQ ID NO: 191522 - DNA, 25 bp, SARS Virus
ttttcggggaccgtcaagtatatgg

SEQ ID NO: 191523 - DNA, 25 bp, SARS Virus
tttcggggacccgcaagtatatgga

SEQ ID NO: 191524 - DNA, 25 bp, SARS Virus
ttcggggaccctgaagtatatggat

SEQ ID NO: 191525 - DNA, 25 bp, SARS Virus
tcggggaccctcgagtatatggatt

SEQ ID NO: 191526 - DNA, 25 bp, SARS Virus
cggggaccctcaggtatatggattt

SEQ ID NO: 191527 - DNA, 25 bp, SARS Virus
ggggaccctcaagtatatggattta

SEQ ID NO: 191528 - DNA, 25 bp, SARS Virus
gggaccctcaaggatatggatttaa

SEQ ID NO: 191529 - DNA, 25 bp, SARS Virus
ggaccctcaagtgtatggatttaag

SEQ ID NO: 191530 - DNA, 25 bp, SARS Virus
gaccctcaagtagatggatttaaga

SEQ ID NO: 191531 - DNA, 25 bp, SARS Virus
accctcaagtatgtggatttaagaa

SEQ ID NO: 191532 - DNA, 25 bp, SARS Virus
ccctcaagtatagggatttaagaac

SEQ ID NO: 191533 - DNA, 25 bp, SARS Virus
cctcaagtatatggatttaagaaca

SEQ ID NO: 191534 - DNA, 25 bp, SARS Virus
ctcaagtatatggatttaagaacac

SEQ ID NO: 191535 - DNA, 25 bp, SARS Virus
tcaagtatatgggtttaagaacaca

SEQ ID NO: 191536 - DNA, 25 bp, SARS Virus
caagtatatggagttaagaacacat

SEQ ID NO: 191537 - DNA, 25 bp, SARS Virus
aagtatatggatgtaagaacacatc

SEQ ID NO: 191538 - DNA, 25 bp, SARS Virus
agtatatggattgaagaacacatct

SEQ ID NO: 191539 - DNA, 25 bp, SARS Virus
gtatatggatttgagaacacatctc

SEQ ID NO: 191540 - DNA, 25 bp, SARS Virus
tatatggatttaggaacacatctct

SEQ ID NO: 191541 - DNA, 25 bp, SARS Virus
atatggatttaagaacacatctctg

SEQ ID NO: 191542 - DNA, 25 bp, SARS Virus
tatggatttaaggacacatctctgg

SEQ ID NO: 191543 - DNA, 25 bp, SARS Virus
atggatttaagagcacatctctggt

SEQ ID NO: 191544 - DNA, 25 bp, SARS Virus
tggatttaagaagacatctctggtt

SEQ ID NO: 191545 - DNA, 25 bp, SARS Virus
ggatttaagaacgcatctctggttc

SEQ ID NO: 191546 - DNA, 25 bp, SARS Virus
gatttaagaacagatctctggttca

SEQ ID NO: 191547 - DNA, 25 bp, SARS Virus
atttaagaacacgtctctggttcat

SEQ ID NO: 191548 - DNA, 25 bp, SARS Virus
tttaagaacacagctctggttcatc

SEQ ID NO: 191549 - DNA, 25 bp, SARS Virus
ttaagaacacatgtctggttcatca

SEQ ID NO: 191550 - DNA, 25 bp, SARS Virus
taagaacacatcgctggttcatcag

SEQ ID NO: 191551 - DNA, 25 bp, SARS Virus
aagaacacatctgtggttcatcagt

SEQ ID NO: 191552 - DNA, 25 bp, SARS Virus
agaacacatctcgggttcatcagta

SEQ ID NO: 191553 - DNA, 25 bp, SARS Virus
gaacacatctctggttcatcagtat

SEQ ID NO: 191554 - DNA, 25 bp, SARS Virus
aacacatctctggttcatcagtatt

SEQ ID NO: 191555 - DNA, 25 bp, SARS Virus
acacatctctgggtcatcagtattt

SEQ ID NO: 191556 - DNA, 25 bp, SARS Virus
cacatctctggtgcatcagtatttg

SEQ ID NO: 191557 - DNA, 25 bp, SARS Virus
acatctctggttgatcagtatttgt

SEQ ID NO: 191558 - DNA, 25 bp, SARS Virus
catctctggttcgtcagtatttgtg

SEQ ID NO: 191559 - DNA, 25 bp, SARS Virus
atctctggttcagcagtatttgtgg

SEQ ID NO: 191560 - DNA, 25 bp, SARS Virus
tctctggttcatgagtatttgtggt

SEQ ID NO: 191561 - DNA, 25 bp, SARS Virus
ctctggttcatcggtatttgtggtt

SEQ ID NO: 191562 - DNA, 25 bp, SARS Virus
tctggttcatcagtatttgtggttc

SEQ ID NO: 191563 - DNA, 25 bp, SARS Virus
ctggttcatcaggatttgtggttct

SEQ ID NO: 191564 - DNA, 25 bp, SARS Virus
tggttcatcagtgtttgtggttctc

SEQ ID NO: 191565 - DNA, 25 bp, SARS Virus
ggttcatcagtagttgtggttctca

SEQ ID NO: 191566 - DNA, 25 bp, SARS Virus
gttcatcagtatgtgtggttctcat

SEQ ID NO: 191567 - DNA, 25 bp, SARS Virus
ttcatcagtattggtggttctcatt

SEQ ID NO: 191568 - DNA, 25 bp, SARS Virus
tcatcagtatttgtggttctcattc

SEQ ID NO: 191569 - DNA, 25 bp, SARS Virus
catcagtatttggggttctcattcg

SEQ ID NO: 191570 - DNA, 25 bp, SARS Virus
atcagtatttgtggttctcattcgg

SEQ ID NO: 191571 - DNA, 25 bp, SARS Virus
tcagtatttgtggttctcattcgga

SEQ ID NO: 191572 - DNA, 25 bp, SARS Virus
cagtatttgtgggtctcattcggac

SEQ ID NO: 191573 - DNA, 25 bp, SARS Virus
agtatttgtggtgctcattcggact

SEQ ID NO: 191574 - DNA, 25 bp, SARS Virus
gtatttgtggttgtcattcggactt

SEQ ID NO: 191575 - DNA, 25 bp, SARS Virus
tatttgtggttcgcattcggacttc

SEQ ID NO: 191576 - DNA, 25 bp, SARS Virus
atttgtggttctgattcggacttca

SEQ ID NO: 191577 - DNA, 25 bp, SARS Virus
tttgtggttctcgttcggacttcat

SEQ ID NO: 191578 - DNA, 25 bp, SARS Virus
ttgtggttctcagtcggacttcatt

SEQ ID NO: 191579 - DNA, 25 bp, SARS Virus
tgtggttctcatgcggacttcattg

SEQ ID NO: 191580 - DNA, 25 bp, SARS Virus
gtggttctcattgggacttcattgc

SEQ ID NO: 191581 - DNA, 25 bp, SARS Virus
tggttctcattcggacttcattgcc

SEQ ID NO: 191582 - DNA, 25 bp, SARS Virus
ggttctcattcggacttcattgcca

SEQ ID NO: 191583 - DNA, 25 bp, SARS Virus
gttctcattcgggcttcattgccaa

SEQ ID NO: 191584 - DNA, 25 bp, SARS Virus
ttctcattcggagttcattgccaac

SEQ ID NO: 191585 - DNA, 25 bp, SARS Virus
tctcattcggacgtcattgccaact

SEQ ID NO: 191586 - DNA, 25 bp, SARS Virus
ctcattcggactgcattgccaactc

SEQ ID NO: 191587 - DNA, 25 bp, SARS Virus
tcattcggacttgattgccaactca

SEQ ID NO: 191588 - DNA, 25 bp, SARS Virus
cattcggacttcgttgccaactcat

SEQ ID NO: 191589 - DNA, 25 bp, SARS Virus
attcggacttcagtgccaactcatt

SEQ ID NO: 191590 - DNA, 25 bp, SARS Virus
ttcggacttcatggccaactcattt

SEQ ID NO: 191591 - DNA, 25 bp, SARS Virus
tcggacttcattgccaactcatttg

SEQ ID NO: 191592 - DNA, 25 bp, SARS Virus
cggacttcattggcaactcatttgt

SEQ ID NO: 191593 - DNA, 25 bp, SARS Virus
ggacttcattgcgaactcatttgtc

SEQ ID NO: 191594 - DNA, 25 bp, SARS Virus
gacttcattgccgactcatttgtct

SEQ ID NO: 191595 - DNA, 25 bp, SARS Virus
acttcattgccagctcatttgtctt

SEQ ID NO: 191596 - DNA, 25 bp, SARS Virus
cttcattgccaagtcatttgtcttt

SEQ ID NO: 191597 - DNA, 25 bp, SARS Virus
ttcattgccaacgcatttgtctttt

SEQ ID NO: 191598 - DNA, 25 bp, SARS Virus
tcattgccaactgatttgtcttttc

SEQ ID NO: 191599 - DNA, 25 bp, SARS Virus
cattgccaactcgtttgtcttttcc

SEQ ID NO: 191600 - DNA, 25 bp, SARS Virus
attgccaactcagttgtcttttccg

SEQ ID NO: 191601 - DNA, 25 bp, SARS Virus
ttgccaactcatgtgtcttttccgg

SEQ ID NO: 191602 - DNA, 25 bp, SARS Virus
tgccaactcattggtcttttccggt

SEQ ID NO: 191603 - DNA, 25 bp, SARS Virus
gccaactcatttgtcttttccggtt

SEQ ID NO: 191604 - DNA, 25 bp, SARS Virus
ccaactcatttggcttttccggttt

SEQ ID NO: 191605 - DNA, 25 bp, SARS Virus
caactcatttgtgttttccggtttc

SEQ ID NO: 191606 - DNA, 25 bp, SARS Virus
aactcatttgtcgtttccggtttca

SEQ ID NO: 191607 - DNA, 25 bp, SARS Virus
actcatttgtctgttccggtttcat

SEQ ID NO: 191608 - DNA, 25 bp, SARS Virus
ctcatttgtcttgtccggtttcatc

SEQ ID NO: 191609 - DNA, 25 bp, SARS Virus
tcatttgtctttgccggtttcatcg

SEQ ID NO: 191610 - DNA, 25 bp, SARS Virus
catttgtcttttgcggtttcatcgt

SEQ ID NO: 191611 - DNA, 25 bp, SARS Virus
atttgtcttttcgggtttcatcgtc

SEQ ID NO: 191612 - DNA, 25 bp, SARS Virus
tttgtcttttccggtttcatcgtcg

SEQ ID NO: 191613 - DNA, 25 bp, SARS Virus
ttgtcttttccggtttcatcgtcgt

SEQ ID NO: 191614 - DNA, 25 bp, SARS Virus
tgtcttttccgggttcatcgtcgtc

SEQ ID NO: 191615 - DNA, 25 bp, SARS Virus
gtcttttccggtgtcatcgtcgtcg

SEQ ID NO: 191616 - DNA, 25 bp, SARS Virus
tcttttccggttgcatcgtcgtcgt

SEQ ID NO: 191617 - DNA, 25 bp, SARS Virus
cttttccggtttgatcgtcgtcgtt

SEQ ID NO: 191618 - DNA, 25 bp, SARS Virus
ttttccggtttcgtcgtcgtcgttg

SEQ ID NO: 191619 - DNA, 25 bp, SARS Virus
tttccggtttcagcgtcgtcgttgt

SEQ ID NO: 191620 - DNA, 25 bp, SARS Virus
ttccggtttcatggtcgtcgttgtt

SEQ ID NO: 191621 - DNA, 25 bp, SARS Virus
tccggtttcatcgtcgtcgttgtta

SEQ ID NO: 191622 - DNA, 25 bp, SARS Virus
ccggtttcatcggcgtcgttgttat

SEQ ID NO: 191623 - DNA, 25 bp, SARS Virus
cggtttcatcgtggtcgttgttatc

SEQ ID NO: 191624 - DNA, 25 bp, SARS Virus
ggtttcatcgtcgtcgttgttatcg

SEQ ID NO: 191625 - DNA, 25 bp, SARS Virus
gtttcatcgtcggcgttgttatcgg

SEQ ID NO: 191626 - DNA, 25 bp, SARS Virus
tttcatcgtcgtggttgttatcgga

SEQ ID NO: 191627 - DNA, 25 bp, SARS Virus
ttcatcgtcgtcgttgttatcggat

SEQ ID NO: 191628 - DNA, 25 bp, SARS Virus
tcatcgtcgtcggtgttatcggatt

SEQ ID NO: 191629 - DNA, 25 bp, SARS Virus
catcgtcgtcgtggttatcggattc

SEQ ID NO: 191630 - DNA, 25 bp, SARS Virus
atcgtcgtcgttgttatcggattct

SEQ ID NO: 191631 - DNA, 25 bp, SARS Virus
tcgtcgtcgttggtatcggattctt

SEQ ID NO: 191632 - DNA, 25 bp, SARS Virus
cgtcgtcgttgtgatcggattcttt

SEQ ID NO: 191633 - DNA, 25 bp, SARS Virus
gtcgtcgttgttgtcggattctttg

SEQ ID NO: 191634 - DNA, 25 bp, SARS Virus
tcgtcgttgttagcggattctttgt

SEQ ID NO: 191635 - DNA, 25 bp, SARS Virus
cgtcgttgttatgggattctttgtt

SEQ ID NO: 191636 - DNA, 25 bp, SARS Virus
gtcgttgttatcggattctttgtta

SEQ ID NO: 191637 - DNA, 25 bp, SARS Virus
tcgttgttatcggattctttgttat

SEQ ID NO: 191638 - DNA, 25 bp, SARS Virus
cgttgttatcgggttctttgttatt

SEQ ID NO: 191639 - DNA, 25 bp, SARS Virus
gttgttatcggagtctttgttattt

SEQ ID NO: 191640 - DNA, 25 bp, SARS Virus
ttgttatcggatgctttgttatttg

SEQ ID NO: 191641 - DNA, 25 bp, SARS Virus
tgttatcggattgtttgttatttgt

SEQ ID NO: 191642 - DNA, 25 bp, SARS Virus
gttatcggattcgttgttatttgtt

SEQ ID NO: 191643 - DNA, 25 bp, SARS Virus
ttatcggattctgtgttatttgttc

SEQ ID NO: 191644 - DNA, 25 bp, SARS Virus
tatcggattcttggttatttgttcg

SEQ ID NO: 191645 - DNA, 25 bp, SARS Virus
atcggattctttgttatttgttcgt

SEQ ID NO: 191646 - DNA, 25 bp, SARS Virus
tcggattctttggtatttgttcgta

SEQ ID NO: 191647 - DNA, 25 bp, SARS Virus
cggattctttgtgatttgttcgtac

SEQ ID NO: 191648 - DNA, 25 bp, SARS Virus
ggattctttgttgtttgttcgtact

SEQ ID NO: 191649 - DNA, 25 bp, SARS Virus
gattctttgttagttgttcgtacta

SEQ ID NO: 191650 - DNA, 25 bp, SARS Virus
attctttgttatgtgttcgtactat

SEQ ID NO: 191651 - DNA, 25 bp, SARS Virus
ttctttgttattggttcgtactatg

SEQ ID NO: 191652 - DNA, 25 bp, SARS Virus
tctttgttatttgttcgtactatgt

SEQ ID NO: 191653 - DNA, 25 bp, SARS Virus
ctttgttatttggtcgtactatgtg

SEQ ID NO: 191654 - DNA, 25 bp, SARS Virus
tttgttatttgtgcgtactatgtga

SEQ ID NO: 191655 - DNA, 25 bp, SARS Virus
ttgttatttgttggtactatgtgac

SEQ ID NO: 191656 - DNA, 25 bp, SARS Virus
tgttatttgttcgtactatgtgaca

SEQ ID NO: 191657 - DNA, 25 bp, SARS Virus
gttatttgttcggactatgtgacat

SEQ ID NO: 191658 - DNA, 25 bp, SARS Virus
ttatttgttcgtgctatgtgacatt

SEQ ID NO: 191659 - DNA, 25 bp, SARS Virus
tatttgttcgtagtatgtgacattc

SEQ ID NO: 191660 - DNA, 25 bp, SARS Virus
atttgttcgtacgatgtgacattcc

SEQ ID NO: 191661 - DNA, 25 bp, SARS Virus
tttgttcgtactgtgtgacattcca

SEQ ID NO: 191662 - DNA, 25 bp, SARS Virus
ttgttcgtactaggtgacattccac

SEQ ID NO: 191663 - DNA, 25 bp, SARS Virus
tgttcgtactatgtgacattccaca

SEQ ID NO: 191664 - DNA, 25 bp, SARS Virus
gttcgtactatgggacattccacaa

SEQ ID NO: 191665 - DNA, 25 bp, SARS Virus
ttcgtactatgtgacattccacaac

SEQ ID NO: 191666 - DNA, 25 bp, SARS Virus
tcgtactatgtggcattccacaacg

SEQ ID NO: 191667 - DNA, 25 bp, SARS Virus
cgtactatgtgagattccacaacgg

SEQ ID NO: 191668 - DNA, 25 bp, SARS Virus
gtactatgtgacgttccacaacggt

SEQ ID NO: 191669 - DNA, 25 bp, SARS Virus
tactatgtgacagtccacaacggtc

SEQ ID NO: 191670 - DNA, 25 bp, SARS Virus
actatgtgacatgccacaacggtca

SEQ ID NO: 191671 - DNA, 25 bp, SARS Virus
ctatgtgacattgcacaacggtcat

SEQ ID NO: 191672 - DNA, 25 bp, SARS Virus
tatgtgacattcgacaacggtcatt

SEQ ID NO: 191673 - DNA, 25 bp, SARS Virus
atgtgacattccgcaacggtcatta

SEQ ID NO: 191674 - DNA, 25 bp, SARS Virus
tgtgacattccagaacggtcattat

SEQ ID NO: 191675 - DNA, 25 bp, SARS Virus
gtgacattccacgacggtcattatt

SEQ ID NO: 191676 - DNA, 25 bp, SARS Virus
tgacattccacagcggtcattattt

SEQ ID NO: 191677 - DNA, 25 bp, SARS Virus
gacattccacaagggtcattattta

SEQ ID NO: 191678 - DNA, 25 bp, SARS Virus
acattccacaacggtcattatttat

SEQ ID NO: 191679 - DNA, 25 bp, SARS Virus
cattccacaacggtcattatttatt

SEQ ID NO: 191680 - DNA, 25 bp, SARS Virus
attccacaacgggcattatttattg

SEQ ID NO: 191681 - DNA, 25 bp, SARS Virus
ttccacaacggtgattatttattgt

SEQ ID NO: 191682 - DNA, 25 bp, SARS Virus
tccacaacggtcgttatttattgtt

SEQ ID NO: 191683 - DNA, 25 bp, SARS Virus
ccacaacggtcagtatttattgtta

SEQ ID NO: 191684 - DNA, 25 bp, SARS Virus
cacaacggtcatgatttattgttac

SEQ ID NO: 191685 - DNA, 25 bp, SARS Virus
acaacggtcattgtttattgttacc

SEQ ID NO: 191686 - DNA, 25 bp, SARS Virus
caacggtcattagttattgttaccc

SEQ ID NO: 191687 - DNA, 25 bp, SARS Virus
aacggtcattatgtattgttaccca

SEQ ID NO: 191688 - DNA, 25 bp, SARS Virus
acggtcattattgattgttacccat

SEQ ID NO: 191689 - DNA, 25 bp, SARS Virus
cggtcattatttgttgttacccatt

SEQ ID NO: 191690 - DNA, 25 bp, SARS Virus
ggtcattatttagtgttacccatta

SEQ ID NO: 191691 - DNA, 25 bp, SARS Virus
gtcattatttatggttacccattat

SEQ ID NO: 191692 - DNA, 25 bp, SARS Virus
tcattatttattgttacccattatg

SEQ ID NO: 191693 - DNA, 25 bp, SARS Virus
cattatttattggtacccattatga

SEQ ID NO: 191694 - DNA, 25 bp, SARS Virus
attatttattgtgacccattatgag

SEQ ID NO: 191695 - DNA, 25 bp, SARS Virus
ttatttattgttgcccattatgagt

SEQ ID NO: 191696 - DNA, 25 bp, SARS Virus
tatttattgttagccattatgagtt

SEQ ID NO: 191697 - DNA, 25 bp, SARS Virus
atttattgttacgcattatgagttg

SEQ ID NO: 191698 - DNA, 25 bp, SARS Virus
tttattgttaccgattatgagttgt

SEQ ID NO: 191699 - DNA, 25 bp, SARS Virus
ttattgttacccgttatgagttgtg

SEQ ID NO: 191700 - DNA, 25 bp, SARS Virus
tattgttacccagtatgagttgtgt

SEQ ID NO: 191701 - DNA, 25 bp, SARS Virus
attgttacccatgatgagttgtgtg

SEQ ID NO: 191702 - DNA, 25 bp, SARS Virus
ttgttacccattgtgagttgtgtgt

SEQ ID NO: 191703 - DNA, 25 bp, SARS Virus
tgttacccattaggagttgtgtgtg

SEQ ID NO: 191704 - DNA, 25 bp, SARS Virus
gttacccattatgagttgtgtgtgt

SEQ ID NO: 191705 - DNA, 25 bp, SARS Virus
ttacccattatgggttgtgtgtgtt

SEQ ID NO: 191706 - DNA, 25 bp, SARS Virus
tacccattatgagttgtgtgtgttt

SEQ ID NO: 191707 - DNA, 25 bp, SARS Virus
acccattatgaggtgtgtgtgtttg

SEQ ID NO: 191708 - DNA, 25 bp, SARS Virus
cccattatgagtggtgtgtgtttgt

SEQ ID NO: 191709 - DNA, 25 bp, SARS Virus
ccattatgagttgtgtgtgtttgtg

SEQ ID NO: 191710 - DNA, 25 bp, SARS Virus
cattatgagttgggtgtgtttgtga

SEQ ID NO: 191711 - DNA, 25 bp, SARS Virus
attatgagttgtgtgtgtttgtgat

SEQ ID NO: 191712 - DNA, 25 bp, SARS Virus
ttatgagttgtgggtgtttgtgata

SEQ ID NO: 191713 - DNA, 25 bp, SARS Virus
tatgagttgtgtgtgtttgtgatat

SEQ ID NO: 191714 - DNA, 25 bp, SARS Virus
atgagttgtgtgggtttgtgatatc

SEQ ID NO: 191715 - DNA, 25 bp, SARS Virus
tgagttgtgtgtgtttgtgatatcg

SEQ ID NO: 191716 - DNA, 25 bp, SARS Virus
gagttgtgtgtggttgtgatatcga

SEQ ID NO: 191717 - DNA, 25 bp, SARS Virus
agttgtgtgtgtgtgtgatatcgag

SEQ ID NO: 191718 - DNA, 25 bp, SARS Virus
gttgtgtgtgttggtgatatcgaga

SEQ ID NO: 191719 - DNA, 25 bp, SARS Virus
ttgtgtgtgtttgtgatatcgagat

SEQ ID NO: 191720 - DNA, 25 bp, SARS Virus
tgtgtgtgtttgggatatcgagatc

SEQ ID NO: 191721 - DNA, 25 bp, SARS Virus
gtgtgtgtttgtgatatcgagatcg

SEQ ID NO: 191722 - DNA, 25 bp, SARS Virus
tgtgtgtttgtggtatcgagatcga

SEQ ID NO: 191723 - DNA, 25 bp, SARS Virus
gtgtgtttgtgagatcgagatcgat

SEQ ID NO: 191724 - DNA, 25 bp, SARS Virus
tgtgtttgtgatgtcgagatcgatt

SEQ ID NO: 191725 - DNA, 25 bp, SARS Virus
gtgtttgtgatagcgagatcgattt

SEQ ID NO: 191726 - DNA, 25 bp, SARS Virus
tgtttgtgatatggagatcgatttt

SEQ ID NO: 191727 - DNA, 25 bp, SARS Virus
gtttgtgatatcgagatcgattttt

SEQ ID NO: 191728 - DNA, 25 bp, SARS Virus
tttgtgatatcgggatcgatttttg

SEQ ID NO: 191729 - DNA, 25 bp, SARS Virus
ttgtgatatcgagatcgatttttgt

SEQ ID NO: 191730 - DNA, 25 bp, SARS Virus
tgtgatatcgaggtcgatttttgta

SEQ ID NO: 191731 - DNA, 25 bp, SARS Virus
gtgatatcgagagcgatttttgtac

SEQ ID NO: 191732 - DNA, 25 bp, SARS Virus
tgatatcgagatggatttttgtact

SEQ ID NO: 191733 - DNA, 25 bp, SARS Virus
gatatcgagatcgatttttgtacta

SEQ ID NO: 191734 - DNA, 25 bp, SARS Virus
atatcgagatcggtttttgtactat

SEQ ID NO: 191735 - DNA, 25 bp, SARS Virus
tatcgagatcgagttttgtactatc

SEQ ID NO: 191736 - DNA, 25 bp, SARS Virus
atcgagatcgatgtttgtactatca

SEQ ID NO: 191737 - DNA, 25 bp, SARS Virus
tcgagatcgattgttgtactatcag

SEQ ID NO: 191738 - DNA, 25 bp, SARS Virus
cgagatcgatttgtgtactatcagc

SEQ ID NO: 191739 - DNA, 25 bp, SARS Virus
gagatcgattttggtactatcagca

SEQ ID NO: 191740 - DNA, 25 bp, SARS Virus
agatcgatttttgtactatcagcat

SEQ ID NO: 191741 - DNA, 25 bp, SARS Virus
gatcgatttttggactatcagcatt

SEQ ID NO: 191742 - DNA, 25 bp, SARS Virus
atcgatttttgtgctatcagcattg

SEQ ID NO: 191743 - DNA, 25 bp, SARS Virus
tcgatttttgtagtatcagcattgc

SEQ ID NO: 191744 - DNA, 25 bp, SARS Virus
cgatttttgtacgatcagcattgct

SEQ ID NO: 191745 - DNA, 25 bp, SARS Virus
gatttttgtactgtcagcattgctg

SEQ ID NO: 191746 - DNA, 25 bp, SARS Virus
atttttgtactagcagcattgctgt

SEQ ID NO: 191747 - DNA, 25 bp, SARS Virus
tttttgtactatgagcattgctgtg

SEQ ID NO: 191748 - DNA, 25 bp, SARS Virus
ttttgtactatcggcattgctgtgg

SEQ ID NO: 191749 - DNA, 25 bp, SARS Virus
tttgtactatcagcattgctgtggt

SEQ ID NO: 191750 - DNA, 25 bp, SARS Virus
ttgtactatcaggattgctgtggtc

SEQ ID NO: 191751 - DNA, 25 bp, SARS Virus
tgtactatcagcgttgctgtggtct

SEQ ID NO: 191752 - DNA, 25 bp, SARS Virus
gtactatcagcagtgctgtggtctt

SEQ ID NO: 191753 - DNA, 25 bp, SARS Virus
tactatcagcatggctgtggtctta

SEQ ID NO: 191754 - DNA, 25 bp, SARS Virus
actatcagcattgctgtggtcttat

SEQ ID NO: 191755 - DNA, 25 bp, SARS Virus
ctatcagcattggtgtggtcttatc

SEQ ID NO: 191756 - DNA, 25 bp, SARS Virus
tatcagcattgcggtggtcttatca

SEQ ID NO: 191757 - DNA, 25 bp, SARS Virus
atcagcattgctgtggtcttatcaa

SEQ ID NO: 191758 - DNA, 25 bp, SARS Virus
tcagcattgctggggtcttatcaat

SEQ ID NO: 191759 - DNA, 25 bp, SARS Virus
cagcattgctgtggtcttatcaatc

SEQ ID NO: 191760 - DNA, 25 bp, SARS Virus
agcattgctgtggtcttatcaatct

SEQ ID NO: 191761 - DNA, 25 bp, SARS Virus
gcattgctgtgggcttatcaatctc

SEQ ID NO: 191762 - DNA, 25 bp, SARS Virus
cattgctgtggtgttatcaatctcc

SEQ ID NO: 191763 - DNA, 25 bp, SARS Virus
attgctgtggtcgtatcaatctcca

SEQ ID NO: 191764 - DNA, 25 bp, SARS Virus
ttgctgtggtctgatcaatctccaa

SEQ ID NO: 191765 - DNA, 25 bp, SARS Virus
tgctgtggtcttgtcaatctccaat

SEQ ID NO: 191766 - DNA, 25 bp, SARS Virus
gctgtggtcttagcaatctccaatg

SEQ ID NO: 191767 - DNA, 25 bp, SARS Virus
ctgtggtcttatgaatctccaatgt

SEQ ID NO: 191768 - DNA, 25 bp, SARS Virus
tgtggtcttatcgatctccaatgtc

SEQ ID NO: 191769 - DNA, 25 bp, SARS Virus
gtggtcttatcagtctccaatgtct

SEQ ID NO: 191770 - DNA, 25 bp, SARS Virus
tggtcttatcaagctccaatgtctt

SEQ ID NO: 191771 - DNA, 25 bp, SARS Virus
ggtcttatcaatgtccaatgtcttt

SEQ ID NO: 191772 - DNA, 25 bp, SARS Virus
gtcttatcaatcgccaatgtcttta

SEQ ID NO: 191773 - DNA, 25 bp, SARS Virus
tcttatcaatctgcaatgtctttat

SEQ ID NO: 191774 - DNA, 25 bp, SARS Virus
cttatcaatctcgaatgtctttatt

SEQ ID NO: 191775 - DNA, 25 bp, SARS Virus
ttatcaatctccgatgtctttattg

SEQ ID NO: 191776 - DNA, 25 bp, SARS Virus
tatcaatctccagtgtctttattga

SEQ ID NO: 191777 - DNA, 25 bp, SARS Virus
atcaatctccaaggtctttattgat

SEQ ID NO: 191778 - DNA, 25 bp, SARS Virus
tcaatctccaatgtctttattgatt

SEQ ID NO: 191779 - DNA, 25 bp, SARS Virus
caatctccaatggctttattgattc

SEQ ID NO: 191780 - DNA, 25 bp, SARS Virus
aatctccaatgtgtttattgattcc

SEQ ID NO: 191781 - DNA, 25 bp, SARS Virus
atctccaatgtcgttattgattccg

SEQ ID NO: 191782 - DNA, 25 bp, SARS Virus
tctccaatgtctgtattgattccgg

SEQ ID NO: 191783 - DNA, 25 bp, SARS Virus
ctccaatgtcttgattgattccggg

SEQ ID NO: 191784 - DNA, 25 bp, SARS Virus
tccaatgtctttgttgattccgggt

SEQ ID NO: 191785 - DNA, 25 bp, SARS Virus
ccaatgtctttagtgattccgggtg

SEQ ID NO: 191786 - DNA, 25 bp, SARS Virus
caatgtctttatggattccgggtgt

SEQ ID NO: 191787 - DNA, 25 bp, SARS Virus
aatgtctttattgattccgggtgta

SEQ ID NO: 191788 - DNA, 25 bp, SARS Virus
atgtctttattggttccgggtgtac

SEQ ID NO: 191789 - DNA, 25 bp, SARS Virus
tgtctttattgagtccgggtgtacc

SEQ ID NO: 191790 - DNA, 25 bp, SARS Virus
gtctttattgatgccgggtgtacct

SEQ ID NO: 191791 - DNA, 25 bp, SARS Virus
tctttattgattgcgggtgtacctt

SEQ ID NO: 191792 - DNA, 25 bp, SARS Virus
ctttattgattcggggtgtaccttt

SEQ ID NO: 191793 - DNA, 25 bp, SARS Virus
tttattgattccgggtgtaccttta

SEQ ID NO: 191794 - DNA, 25 bp, SARS Virus
ttattgattccgggtgtacctttat

SEQ ID NO: 191795 - DNA, 25 bp, SARS Virus
tattgattccgggtgtacctttatc

SEQ ID NO: 191796 - DNA, 25 bp, SARS Virus
attgattccgggggtacctttatcg

SEQ ID NO: 191797 - DNA, 25 bp, SARS Virus
ttgattccgggtgtacctttatcga

SEQ ID NO: 191798 - DNA, 25 bp, SARS Virus
tgattccgggtggacctttatcgaa

SEQ ID NO: 191799 - DNA, 25 bp, SARS Virus
gattccgggtgtgcctttatcgaac

SEQ ID NO: 191800 - DNA, 25 bp, SARS Virus
attccgggtgtagctttatcgaact

SEQ ID NO: 191801 - DNA, 25 bp, SARS Virus
ttccgggtgtacgtttatcgaacta

SEQ ID NO: 191802 - DNA, 25 bp, SARS Virus
tccgggtgtaccgttatcgaactag

SEQ ID NO: 191803 - DNA, 25 bp, SARS Virus
ccgggtgtacctgtatcgaactaga

SEQ ID NO: 191804 - DNA, 25 bp, SARS Virus
cgggtgtaccttgatcgaactagat

SEQ ID NO: 191805 - DNA, 25 bp, SARS Virus
gggtgtacctttgtcgaactagatt

SEQ ID NO: 191806 - DNA, 25 bp, SARS Virus
ggtgtacctttagcgaactagattt

SEQ ID NO: 191807 - DNA, 25 bp, SARS Virus
gtgtacctttatggaactagatttc

SEQ ID NO: 191808 - DNA, 25 bp, SARS Virus
tgtacctttatcgaactagatttcg

SEQ ID NO: 191809 - DNA, 25 bp, SARS Virus
gtacctttatcggactagatttcgt

SEQ ID NO: 191810 - DNA, 25 bp, SARS Virus
tacctttatcgagctagatttcgta

SEQ ID NO: 191811 - DNA, 25 bp, SARS Virus
acctttatcgaagtagatttcgtaa

SEQ ID NO: 191812 - DNA, 25 bp, SARS Virus
cctttatcgaacgagatttcgtaat

SEQ ID NO: 191813 - DNA, 25 bp, SARS Virus
ctttatcgaactggatttcgtaatg

SEQ ID NO: 191814 - DNA, 25 bp, SARS Virus
tttatcgaactagatttcgtaatgg

SEQ ID NO: 191815 - DNA, 25 bp, SARS Virus
ttatcgaactaggtttcgtaatggt

SEQ ID NO: 191816 - DNA, 25 bp, SARS Virus
tatcgaactagagttcgtaatggta

SEQ ID NO: 191817 - DNA, 25 bp, SARS Virus
aacatgtgtaactcgggtgttaaat

SEQ ID NO: 191818 - DNA, 25 bp, SARS Virus
acatgtgtaacatgggtgttaaatc

SEQ ID NO: 191819 - DNA, 25 bp, SARS Virus
catgtgtaacactggtgttaaatct

SEQ ID NO: 191820 - DNA, 25 bp, SARS Virus
atgtgtaacacgtgtgttaaatctt

SEQ ID NO: 191821 - DNA, 25 bp, SARS Virus
tgtgtaacacggttgttaaatcttc

SEQ ID NO: 191822 - DNA, 25 bp, SARS Virus
gtgtaacacgggtgttaaatcttct

SEQ ID NO: 191823 - DNA, 25 bp, SARS Virus
tgtaacacgggttttaaatcttcta

SEQ ID NO: 191824 - DNA, 25 bp, SARS Virus
gtaacacgggtgttaaatcttctac

SEQ ID NO: 191825 - DNA, 25 bp, SARS Virus
taacacgggtgttaaatcttctact

SEQ ID NO: 191826 - DNA, 25 bp, SARS Virus
aacacgggtgtttaatcttctactg

SEQ ID NO: 191827 - DNA, 25 bp, SARS Virus
acacgggtgttatatcttctactga

SEQ ID NO: 191828 - DNA, 25 bp, SARS Virus
cacgggtgttaattcttctactgag

SEQ ID NO: 191829 - DNA, 25 bp, SARS Virus
acgggtgttaaatcttctactgaga

SEQ ID NO: 191830 - DNA, 25 bp, SARS Virus
cgggtgttaaattttctactgagat

SEQ ID NO: 191831 - DNA, 25 bp, SARS Virus
gggtgttaaatcttctactgagatg

SEQ ID NO: 191832 - DNA, 25 bp, SARS Virus
ggtgttaaatcttctactgagatga

SEQ ID NO: 191833 - DNA, 25 bp, SARS Virus
gtgttaaatcttttactgagatgag

SEQ ID NO: 191834 - DNA, 25 bp, SARS Virus
tgttaaatcttctactgagatgaga

SEQ ID NO: 191835 - DNA, 25 bp, SARS Virus
gttaaatcttcttctgagatgagat

SEQ ID NO: 191836 - DNA, 25 bp, SARS Virus
ttaaatcttctattgagatgagatt

SEQ ID NO: 191837 - DNA, 25 bp, SARS Virus
taaatcttctactgagatgagattc

SEQ ID NO: 191838 - DNA, 25 bp, SARS Virus
aaatcttctacttagatgagattca

SEQ ID NO: 191839 - DNA, 25 bp, SARS Virus
aatcttctactgtgatgagattcaa

SEQ ID NO: 191840 - DNA, 25 bp, SARS Virus
atcttctactgatatgagattcaac

SEQ ID NO: 191841 - DNA, 25 bp, SARS Virus
tcttctactgagttgagattcaaca

SEQ ID NO: 191842 - DNA, 25 bp, SARS Virus
cttctactgagatgagattcaacaa

SEQ ID NO: 191843 - DNA, 25 bp, SARS Virus
ttctactgagattagattcaacaac

SEQ ID NO: 191844 - DNA, 25 bp, SARS Virus
tctactgagatgtgattcaacaact

SEQ ID NO: 191845 - DNA, 25 bp, SARS Virus
ctactgagatgatattcaacaactt

SEQ ID NO: 191846 - DNA, 25 bp, SARS Virus
tactgagatgagtttcaacaacttc

SEQ ID NO: 191847 - DNA, 25 bp, SARS Virus
actgagatgagattcaacaacttct

SEQ ID NO: 191848 - DNA, 25 bp, SARS Virus
ctgagatgagattcaacaacttctt

SEQ ID NO: 191849 - DNA, 25 bp, SARS Virus
tgagatgagatttaacaacttcttg

SEQ ID NO: 191850 - DNA, 25 bp, SARS Virus
gagatgagattctacaacttcttgg

SEQ ID NO: 191851 - DNA, 25 bp, SARS Virus
agatgagattcatcaacttcttggc

SEQ ID NO: 191852 - DNA, 25 bp, SARS Virus
gatgagattcaataacttcttggct

SEQ ID NO: 191853 - DNA, 25 bp, SARS Virus
atgagattcaactacttcttggctc

SEQ ID NO: 191854 - DNA, 25 bp, SARS Virus
tgagattcaacatcttcttggctct

SEQ ID NO: 191855 - DNA, 25 bp, SARS Virus
gagattcaacaatttcttggctctc

SEQ ID NO: 191856 - DNA, 25 bp, SARS Virus
agattcaacaacttcttggctctcg

SEQ ID NO: 191857 - DNA, 25 bp, SARS Virus
gattcaacaacttcttggctctcgt

SEQ ID NO: 191858 - DNA, 25 bp, SARS Virus
attcaacaactttttggctctcgtc

SEQ ID NO: 191859 - DNA, 25 bp, SARS Virus
ttcaacaacttcttggctctcgtca

SEQ ID NO: 191860 - DNA, 25 bp, SARS Virus
tcaacaacttcttggctctcgtcat

SEQ ID NO: 191861 - DNA, 25 bp, SARS Virus
caacaacttctttgctctcgtcatg

SEQ ID NO: 191862 - DNA, 25 bp, SARS Virus
aacaacttcttgtctctcgtcatgg

SEQ ID NO: 191863 - DNA, 25 bp, SARS Virus
acaacttcttggttctcgtcatggt

SEQ ID NO: 191864 - DNA, 25 bp, SARS Virus
caacttcttggctctcgtcatggtg

SEQ ID NO: 191865 - DNA, 25 bp, SARS Virus
aacttcttggctttcgtcatggtgt

SEQ ID NO: 191866 - DNA, 25 bp, SARS Virus
acttcttggctctcgtcatggtgtc

SEQ ID NO: 191867 - DNA, 25 bp, SARS Virus
cttcttggctcttgtcatggtgtct

SEQ ID NO: 191868 - DNA, 25 bp, SARS Virus
ttcttggctctcttcatggtgtcta

SEQ ID NO: 191869 - DNA, 25 bp, SARS Virus
tcttggctctcgtcatggtgtctac

SEQ ID NO: 191870 - DNA, 25 bp, SARS Virus
cttggctctcgttatggtgtctaca

SEQ ID NO: 191871 - DNA, 25 bp, SARS Virus
ttggctctcgtcttggtgtctacac

SEQ ID NO: 191872 - DNA, 25 bp, SARS Virus
tggctctcgtcatggtgtctacacg

SEQ ID NO: 191873 - DNA, 25 bp, SARS Virus
ggctctcgtcattgtgtctacacgt

SEQ ID NO: 191874 - DNA, 25 bp, SARS Virus
gctctcgtcatgttgtctacacgtg

SEQ ID NO: 191875 - DNA, 25 bp, SARS Virus
ctctcgtcatggtgtctacacgtga

SEQ ID NO: 191876 - DNA, 25 bp, SARS Virus
tctcgtcatggtttctacacgtgaa

SEQ ID NO: 191877 - DNA, 25 bp, SARS Virus
ctcgtcatggtgtctacacgtgaaa

SEQ ID NO: 191878 - DNA, 25 bp, SARS Virus
tcgtcatggtgtttacacgtgaaat

SEQ ID NO: 191879 - DNA, 25 bp, SARS Virus
cgtcatggtgtctacacgtgaaatg

SEQ ID NO: 191880 - DNA, 25 bp, SARS Virus
gtcatggtgtcttcacgtgaaatgc

SEQ ID NO: 191881 - DNA, 25 bp, SARS Virus
tcatggtgtctatacgtgaaatgca

SEQ ID NO: 191882 - DNA, 25 bp, SARS Virus
catggtgtctactcgtgaaatgcag

SEQ ID NO: 191883 - DNA, 25 bp, SARS Virus
atggtgtctacatgtgaaatgcagt

SEQ ID NO: 191884 - DNA, 25 bp, SARS Virus
tggtgtctacacttgaaatgcagtc

SEQ ID NO: 191885 - DNA, 25 bp, SARS Virus
ggtgtctacacgtgaaatgcagtct

SEQ ID NO: 191886 - DNA, 25 bp, SARS Virus
gtgtctacacgttaaatgcagtctg

SEQ ID NO: 191887 - DNA, 25 bp, SARS Virus
tgtctacacgtgtaatgcagtctgt

SEQ ID NO: 191888 - DNA, 25 bp, SARS Virus
gtctacacgtgatatgcagtctgta

SEQ ID NO: 191889 - DNA, 25 bp, SARS Virus
tctacacgtgaattgcagtctgtaa

SEQ ID NO: 191890 - DNA, 25 bp, SARS Virus
ctacacgtgaaatgcagtctgtaaa

SEQ ID NO: 191891 - DNA, 25 bp, SARS Virus
tacacgtgaaattcagtctgtaaaa

SEQ ID NO: 191892 - DNA, 25 bp, SARS Virus
acacgtgaaatgtagtctgtaaaat

SEQ ID NO: 191893 - DNA, 25 bp, SARS Virus
cacgtgaaatgctgtctgtaaaatc

SEQ ID NO: 191894 - DNA, 25 bp, SARS Virus
acgtgaaatgcattctgtaaaatct

SEQ ID NO: 191895 - DNA, 25 bp, SARS Virus
cgtgaaatgcagtctgtaaaatctg

SEQ ID NO: 191896 - DNA, 25 bp, SARS Virus
gtgaaatgcagtttgtaaaatctga

SEQ ID NO: 191897 - DNA, 25 bp, SARS Virus
tgaaatgcagtctgtaaaatctgac

SEQ ID NO: 191898 - DNA, 25 bp, SARS Virus
gaaatgcagtctttaaaatctgaca

SEQ ID NO: 191899 - DNA, 25 bp, SARS Virus
aaatgcagtctgtaaaatctgacat

SEQ ID NO: 191900 - DNA, 25 bp, SARS Virus
aatgcagtctgttaaatctgacatg

SEQ ID NO: 191901 - DNA, 25 bp, SARS Virus
atgcagtctgtataatctgacatgt

SEQ ID NO: 191902 - DNA, 25 bp, SARS Virus
tgcagtctgtaatatctgacatgtc

SEQ ID NO: 191903 - DNA, 25 bp, SARS Virus
gcagtctgtaaattctgacatgtca

SEQ ID NO: 191904 - DNA, 25 bp, SARS Virus
cagtctgtaaaatctgacatgtcat

SEQ ID NO: 191905 - DNA, 25 bp, SARS Virus
agtctgtaaaatttgacatgtcatc

SEQ ID NO: 191906 - DNA, 25 bp, SARS Virus
gtctgtaaaatctgacatgtcatcg

SEQ ID NO: 191907 - DNA, 25 bp, SARS Virus
tctgtaaaatcttacatgtcatcgt

SEQ ID NO: 191908 - DNA, 25 bp, SARS Virus
ctgtaaaatctgtcatgtcatcgtt

SEQ ID NO: 191909 - DNA, 25 bp, SARS Virus
tgtaaaatctgatatgtcatcgttg

SEQ ID NO: 191910 - DNA, 25 bp, SARS Virus
gtaaaatctgacttgtcatcgttgg

SEQ ID NO: 191911 - DNA, 25 bp, SARS Virus
taaaatctgacatgtcatcgttgga

SEQ ID NO: 191912 - DNA, 25 bp, SARS Virus
aaaatctgacatttcatcgttggaa

SEQ ID NO: 191913 - DNA, 25 bp, SARS Virus
aaatctgacatgtcatcgttggaac

SEQ ID NO: 191914 - DNA, 25 bp, SARS Virus
aatctgacatgttatcgttggaact

SEQ ID NO: 191915 - DNA, 25 bp, SARS Virus
atctgacatgtcttcgttggaacta

SEQ ID NO: 191916 - DNA, 25 bp, SARS Virus
tctgacatgtcatcgttggaactat

SEQ ID NO: 191917 - DNA, 25 bp, SARS Virus
ctgacatgtcattgttggaactatg

SEQ ID NO: 191918 - DNA, 25 bp, SARS Virus
tgacatgtcatctttggaactatgt

SEQ ID NO: 191919 - DNA, 25 bp, SARS Virus
gacatgtcatcgttggaactatgta

SEQ ID NO: 191920 - DNA, 25 bp, SARS Virus
acatgtcatcgttggaactatgtac

SEQ ID NO: 191921 - DNA, 25 bp, SARS Virus
catgtcatcgtttgaactatgtacc

SEQ ID NO: 191922 - DNA, 25 bp, SARS Virus
atgtcatcgttgtaactatgtacca

SEQ ID NO: 191923 - DNA, 25 bp, SARS Virus
tgtcatcgttggtactatgtaccaa

SEQ ID NO: 191924 - DNA, 25 bp, SARS Virus
gtcatcgttggatctatgtaccaaa

SEQ ID NO: 191925 - DNA, 25 bp, SARS Virus
tcatcgttggaattatgtaccaaat

SEQ ID NO: 191926 - DNA, 25 bp, SARS Virus
catcgttggaactatgtaccaaatg

SEQ ID NO: 191927 - DNA, 25 bp, SARS Virus
atcgttggaactttgtaccaaatgg

SEQ ID NO: 191928 - DNA, 25 bp, SARS Virus
tcgttggaactatgtaccaaatgga

SEQ ID NO: 191929 - DNA, 25 bp, SARS Virus
cgttggaactatttaccaaatggag

SEQ ID NO: 191930 - DNA, 25 bp, SARS Virus
gttggaactatgtaccaaatggagg

SEQ ID NO: 191931 - DNA, 25 bp, SARS Virus
ttggaactatgttccaaatggaggt

SEQ ID NO: 191932 - DNA, 25 bp, SARS Virus
tggaactatgtatcaaatggaggtt

SEQ ID NO: 191933 - DNA, 25 bp, SARS Virus
ggaactatgtactaaatggaggtta

SEQ ID NO: 191934 - DNA, 25 bp, SARS Virus
gaactatgtacctaatggaggttat

SEQ ID NO: 191935 - DNA, 25 bp, SARS Virus
aactatgtaccatatggaggttatg

SEQ ID NO: 191936 - DNA, 25 bp, SARS Virus
actatgtaccaattggaggttatgg

SEQ ID NO: 191937 - DNA, 25 bp, SARS Virus
ctatgtaccaaatggaggttatggg

SEQ ID NO: 191938 - DNA, 25 bp, SARS Virus
tatgtaccaaattgaggttatgggt

SEQ ID NO: 191939 - DNA, 25 bp, SARS Virus
atgtaccaaatgtaggttatgggtt

SEQ ID NO: 191940 - DNA, 25 bp, SARS Virus
tgtaccaaatggtggttatgggttg

SEQ ID NO: 191941 - DNA, 25 bp, SARS Virus
gtaccaaatggatgttatgggttgt

SEQ ID NO: 191942 - DNA, 25 bp, SARS Virus
taccaaatggagtttatgggttgtt

SEQ ID NO: 191943 - DNA, 25 bp, SARS Virus
accaaatggaggttatgggttgttg

SEQ ID NO: 191944 - DNA, 25 bp, SARS Virus
ccaaatggaggttatgggttgttga

SEQ ID NO: 191945 - DNA, 25 bp, SARS Virus
caaatggaggttttgggttgttgaa

SEQ ID NO: 191946 - DNA, 25 bp, SARS Virus
aaatggaggttatgggttgttgaat

SEQ ID NO: 191947 - DNA, 25 bp, SARS Virus
aatggaggttattggttgttgaatt

SEQ ID NO: 191948 - DNA, 25 bp, SARS Virus
atggaggttatgtgttgttgaatta

SEQ ID NO: 191949 - DNA, 25 bp, SARS Virus
tggaggttatggtttgttgaattac

SEQ ID NO: 191950 - DNA, 25 bp, SARS Virus
ggaggttatgggttgttgaattaca

SEQ ID NO: 191951 - DNA, 25 bp, SARS Virus
gaggttatgggttgttgaattacaa

SEQ ID NO: 191952 - DNA, 25 bp, SARS Virus
aggttatgggtttttgaattacaat

SEQ ID NO: 191953 - DNA, 25 bp, SARS Virus
ggttatgggttgttgaattacaatt

SEQ ID NO: 191954 - DNA, 25 bp, SARS Virus
gttatgggttgttgaattacaattc

SEQ ID NO: 191955 - DNA, 25 bp, SARS Virus
ttatgggttgtttaattacaattcg

SEQ ID NO: 191956 - DNA, 25 bp, SARS Virus
tatgggttgttgtattacaattcga

SEQ ID NO: 191957 - DNA, 25 bp, SARS Virus
atgggttgttgatttacaattcgaa

SEQ ID NO: 191958 - DNA, 25 bp, SARS Virus
tgggttgttgaattacaattcgaac

SEQ ID NO: 191959 - DNA, 25 bp, SARS Virus
gggttgttgaattacaattcgaact

SEQ ID NO: 191960 - DNA, 25 bp, SARS Virus
ggttgttgaatttcaattcgaactt

SEQ ID NO: 191961 - DNA, 25 bp, SARS Virus
gttgttgaattataattcgaacttt

SEQ ID NO: 191962 - DNA, 25 bp, SARS Virus
ttgttgaattactattcgaactttc

SEQ ID NO: 191963 - DNA, 25 bp, SARS Virus
tgttgaattacatttcgaactttcg

SEQ ID NO: 191964 - DNA, 25 bp, SARS Virus
gttgaattacaattcgaactttcgt

SEQ ID NO: 191965 - DNA, 25 bp, SARS Virus
ttgaattacaattcgaactttcgta

SEQ ID NO: 191966 - DNA, 25 bp, SARS Virus
tgaattacaatttgaactttcgtag

SEQ ID NO: 191967 - DNA, 25 bp, SARS Virus
gaattacaattctaactttcgtagt

SEQ ID NO: 191968 - DNA, 25 bp, SARS Virus
aattacaattcgtactttcgtagtt

SEQ ID NO: 191969 - DNA, 25 bp, SARS Virus
attacaattcgatctttcgtagtta

SEQ ID NO: 191970 - DNA, 25 bp, SARS Virus
ttacaattcgaattttcgtagttat

SEQ ID NO: 191971 - DNA, 25 bp, SARS Virus
tacaattcgaactttcgtagttatg

SEQ ID NO: 191972 - DNA, 25 bp, SARS Virus
acaattcgaactttcgtagttatga

SEQ ID NO: 191973 - DNA, 25 bp, SARS Virus
caattcgaactttcgtagttatgat

SEQ ID NO: 191974 - DNA, 25 bp, SARS Virus
aattcgaacttttgtagttatgatg

SEQ ID NO: 191975 - DNA, 25 bp, SARS Virus
attcgaactttcttagttatgatga

SEQ ID NO: 191976 - DNA, 25 bp, SARS Virus
ttcgaactttcgtagttatgatgag

SEQ ID NO: 191977 - DNA, 25 bp, SARS Virus
tcgaactttcgttgttatgatgaga

SEQ ID NO: 191978 - DNA, 25 bp, SARS Virus
cgaactttcgtatttatgatgagaa

SEQ ID NO: 191979 - DNA, 25 bp, SARS Virus
gaactttcgtagttatgatgagaat

SEQ ID NO: 191980 - DNA, 25 bp, SARS Virus
aactttcgtagttatgatgagaatc

SEQ ID NO: 191981 - DNA, 25 bp, SARS Virus
actttcgtagttttgatgagaatcc

SEQ ID NO: 191982 - DNA, 25 bp, SARS Virus
ctttcgtagttatgatgagaatcct

SEQ ID NO: 191983 - DNA, 25 bp, SARS Virus
tttcgtagttattatgagaatcctc

SEQ ID NO: 191984 - DNA, 25 bp, SARS Virus
ttcgtagttatgttgagaatcctcc

SEQ ID NO: 191985 - DNA, 25 bp, SARS Virus
tcgtagttatgatgagaatcctccg

SEQ ID NO: 191986 - DNA, 25 bp, SARS Virus
cgtagttatgattagaatcctccgt

SEQ ID NO: 191987 - DNA, 25 bp, SARS Virus
gtagttatgatgtgaatcctccgtt

SEQ ID NO: 191988 - DNA, 25 bp, SARS Virus
tagttatgatgataatcctccgttt

SEQ ID NO: 191989 - DNA, 25 bp, SARS Virus
agttatgatgagtatcctccgtttt

SEQ ID NO: 191990 - DNA, 25 bp, SARS Virus
gttatgatgagattcctccgttttc

SEQ ID NO: 191991 - DNA, 25 bp, SARS Virus
ttatgatgagaatcctccgttttcg

SEQ ID NO: 191992 - DNA, 25 bp, SARS Virus
tatgatgagaattctccgttttcgg

SEQ ID NO: 191993 - DNA, 25 bp, SARS Virus
atgatgagaatcttccgttttcggg

SEQ ID NO: 191994 - DNA, 25 bp, SARS Virus
tgatgagaatcctccgttttcgggg

SEQ ID NO: 191995 - DNA, 25 bp, SARS Virus
gatgagaatccttcgttttcgggga

SEQ ID NO: 191996 - DNA, 25 bp, SARS Virus
atgagaatcctctgttttcggggac

SEQ ID NO: 191997 - DNA, 25 bp, SARS Virus
tgagaatcctcctttttcggggacc

SEQ ID NO: 191998 - DNA, 25 bp, SARS Virus
gagaatcctccgttttcggggaccc

SEQ ID NO: 191999 - DNA, 25 bp, SARS Virus
agaatcctccgttttcggggaccct

SEQ ID NO: 192000 - DNA, 25 bp, SARS Virus
gaatcctccgttttcggggaccctc

SEQ ID NO: 192001 - DNA, 25 bp, SARS Virus
aatcctccgttttcggggaccctca

SEQ ID NO: 192002 - DNA, 25 bp, SARS Virus
atcctccgtttttggggaccctcaa

SEQ ID NO: 192003 - DNA, 25 bp, SARS Virus
tcctccgttttctgggaccctcaag

SEQ ID NO: 192004 - DNA, 25 bp, SARS Virus
cctccgttttcgtggaccctcaagt

SEQ ID NO: 192005 - DNA, 25 bp, SARS Virus
ctccgttttcggtgaccctcaagta

SEQ ID NO: 192006 - DNA, 25 bp, SARS Virus
tccgttttcgggtaccctcaagtat

SEQ ID NO: 192007 - DNA, 25 bp, SARS Virus
ccgttttcggggtccctcaagtata

SEQ ID NO: 192008 - DNA, 25 bp, SARS Virus
cgttttcggggatcctcaagtatat

SEQ ID NO: 192009 - DNA, 25 bp, SARS Virus
gttttcggggactctcaagtatatg

SEQ ID NO: 192010 - DNA, 25 bp, SARS Virus
ttttcggggaccttcaagtatatgg

SEQ ID NO: 192011 - DNA, 25 bp, SARS Virus
tttcggggaccctcaagtatatgga

SEQ ID NO: 192012 - DNA, 25 bp, SARS Virus
ttcggggacccttaagtatatggat

SEQ ID NO: 192013 - DNA, 25 bp, SARS Virus
tcggggaccctctagtatatggatt

SEQ ID NO: 192014 - DNA, 25 bp, SARS Virus
cggggaccctcatgtatatggattt

SEQ ID NO: 192015 - DNA, 25 bp, SARS Virus
ggggaccctcaattatatggattta

SEQ ID NO: 192016 - DNA, 25 bp, SARS Virus
gggaccctcaagtatatggatttaa

SEQ ID NO: 192017 - DNA, 25 bp, SARS Virus
ggaccctcaagtttatggatttaag

SEQ ID NO: 192018 - DNA, 25 bp, SARS Virus
gaccctcaagtatatggatttaaga

SEQ ID NO: 192019 - DNA, 25 bp, SARS Virus
accctcaagtatttggatttaagaa

SEQ ID NO: 192020 - DNA, 25 bp, SARS Virus
ccctcaagtatatggatttaagaac

SEQ ID NO: 192021 - DNA, 25 bp, SARS Virus
cctcaagtatattgatttaagaaca

SEQ ID NO: 192022 - DNA, 25 bp, SARS Virus
ctcaagtatatgtatttaagaacac

SEQ ID NO: 192023 - DNA, 25 bp, SARS Virus
tcaagtatatggttttaagaacaca

SEQ ID NO: 192024 - DNA, 25 bp, SARS Virus
caagtatatggatttaagaacacat

SEQ ID NO: 192025 - DNA, 25 bp, SARS Virus
aagtatatggatttaagaacacatc

SEQ ID NO: 192026 - DNA, 25 bp, SARS Virus
agtatatggatttaagaacacatct

SEQ ID NO: 192027 - DNA, 25 bp, SARS Virus
gtatatggattttagaacacatctc

SEQ ID NO: 192028 - DNA, 25 bp, SARS Virus
tatatggatttatgaacacatctct

SEQ ID NO: 192029 - DNA, 25 bp, SARS Virus
atatggatttaataacacatctctg

SEQ ID NO: 192030 - DNA, 25 bp, SARS Virus
tatggatttaagtacacatctctgg

SEQ ID NO: 192031 - DNA, 25 bp, SARS Virus
atggatttaagatcacatctctggt

SEQ ID NO: 192032 - DNA, 25 bp, SARS Virus
tggatttaagaatacatctctggtt

SEQ ID NO: 192033 - DNA, 25 bp, SARS Virus
ggatttaagaactcatctctggttc

SEQ ID NO: 192034 - DNA, 25 bp, SARS Virus
gatttaagaacatatctctggttca

SEQ ID NO: 192035 - DNA, 25 bp, SARS Virus
atttaagaacacttctctggttcat

SEQ ID NO: 192036 - DNA, 25 bp, SARS Virus
tttaagaacacatctctggttcatc

SEQ ID NO: 192037 - DNA, 25 bp, SARS Virus
ttaagaacacatttctggttcatca

SEQ ID NO: 192038 - DNA, 25 bp, SARS Virus
taagaacacatctctggttcatcag

SEQ ID NO: 192039 - DNA, 25 bp, SARS Virus
aagaacacatctttggttcatcagt

SEQ ID NO: 192040 - DNA, 25 bp, SARS Virus
agaacacatctctggttcatcagta

SEQ ID NO: 192041 - DNA, 25 bp, SARS Virus
gaacacatctcttgttcatcagtat

SEQ ID NO: 192042 - DNA, 25 bp, SARS Virus
aacacatctctgtttcatcagtatt

SEQ ID NO: 192043 - DNA, 25 bp, SARS Virus
acacatctctggttcatcagtattt

SEQ ID NO: 192044 - DNA, 25 bp, SARS Virus
cacatctctggttcatcagtatttg

SEQ ID NO: 192045 - DNA, 25 bp, SARS Virus
acatctctggtttatcagtatttgt

SEQ ID NO: 192046 - DNA, 25 bp, SARS Virus
catctctggttcttcagtatttgtg

SEQ ID NO: 192047 - DNA, 25 bp, SARS Virus
atctctggttcatcagtatttgtgg

SEQ ID NO: 192048 - DNA, 25 bp, SARS Virus
tctctggttcattagtatttgtggt

SEQ ID NO: 192049 - DNA, 25 bp, SARS Virus
ctctggttcatctgtatttgtggtt

SEQ ID NO: 192050 - DNA, 25 bp, SARS Virus
tctggttcatcattatttgtggttc

SEQ ID NO: 192051 - DNA, 25 bp, SARS Virus
ctggttcatcagtatttgtggttct

SEQ ID NO: 192052 - DNA, 25 bp, SARS Virus
tggttcatcagtttttgtggttctc

SEQ ID NO: 192053 - DNA, 25 bp, SARS Virus
ggttcatcagtatttgtggttctca

SEQ ID NO: 192054 - DNA, 25 bp, SARS Virus
gttcatcagtatttgtggttctcat

SEQ ID NO: 192055 - DNA, 25 bp, SARS Virus
ttcatcagtatttgtggttctcatt

SEQ ID NO: 192056 - DNA, 25 bp, SARS Virus
tcatcagtatttttggttctcattc

SEQ ID NO: 192057 - DNA, 25 bp, SARS Virus
catcagtatttgtggttctcattcg

SEQ ID NO: 192058 - DNA, 25 bp, SARS Virus
atcagtatttgttgttctcattcgg

SEQ ID NO: 192059 - DNA, 25 bp, SARS Virus
tcagtatttgtgtttctcattcgga

SEQ ID NO: 192060 - DNA, 25 bp, SARS Virus
cagtatttgtggttctcattcggac

SEQ ID NO: 192061 - DNA, 25 bp, SARS Virus
agtatttgtggttctcattcggact

SEQ ID NO: 192062 - DNA, 25 bp, SARS Virus
gtatttgtggttttcattcggactt

SEQ ID NO: 192063 - DNA, 25 bp, SARS Virus
tatttgtggttctcattcggacttc

SEQ ID NO: 192064 - DNA, 25 bp, SARS Virus
atttgtggttcttattcggacttca

SEQ ID NO: 192065 - DNA, 25 bp, SARS Virus
tttgtggttctctttcggacttcat

SEQ ID NO: 192066 - DNA, 25 bp, SARS Virus
ttgtggttctcattcggacttcatt

SEQ ID NO: 192067 - DNA, 25 bp, SARS Virus
tgtggttctcattcggacttcattg

SEQ ID NO: 192068 - DNA, 25 bp, SARS Virus
gtggttctcatttggacttcattgc

SEQ ID NO: 192069 - DNA, 25 bp, SARS Virus
tggttctcattctgacttcattgcc

SEQ ID NO: 192070 - DNA, 25 bp, SARS Virus
ggttctcattcgtacttcattgcca

SEQ ID NO: 192071 - DNA, 25 bp, SARS Virus
gttctcattcggtcttcattgccaa

SEQ ID NO: 192072 - DNA, 25 bp, SARS Virus
ttctcattcggatttcattgccaac

SEQ ID NO: 192073 - DNA, 25 bp, SARS Virus
tctcattcggacttcattgccaact

SEQ ID NO: 192074 - DNA, 25 bp, SARS Virus
ctcattcggacttcattgccaactc

SEQ ID NO: 192075 - DNA, 25 bp, SARS Virus
tcattcggactttattgccaactca

SEQ ID NO: 192076 - DNA, 25 bp, SARS Virus
cattcggacttctttgccaactcat

SEQ ID NO: 192077 - DNA, 25 bp, SARS Virus
attcggacttcattgccaactcatt

SEQ ID NO: 192078 - DNA, 25 bp, SARS Virus
ttcggacttcattgccaactcattt

SEQ ID NO: 192079 - DNA, 25 bp, SARS Virus
tcggacttcatttccaactcatttg

SEQ ID NO: 192080 - DNA, 25 bp, SARS Virus
cggacttcattgtcaactcatttgt

SEQ ID NO: 192081 - DNA, 25 bp, SARS Virus
ggacttcattgctaactcatttgtc

SEQ ID NO: 192082 - DNA, 25 bp, SARS Virus
gacttcattgcctactcatttgtct

SEQ ID NO: 192083 - DNA, 25 bp, SARS Virus
acttcattgccatctcatttgtctt

SEQ ID NO: 192084 - DNA, 25 bp, SARS Virus
cttcattgccaattcatttgtcttt

SEQ ID NO: 192085 - DNA, 25 bp, SARS Virus
ttcattgccaactcatttgtctttt

SEQ ID NO: 192086 - DNA, 25 bp, SARS Virus
tcattgccaacttatttgtcttttc

SEQ ID NO: 192087 - DNA, 25 bp, SARS Virus
cattgccaactcttttgtcttttcc

SEQ ID NO: 192088 - DNA, 25 bp, SARS Virus
attgccaactcatttgtcttttccg

SEQ ID NO: 192089 - DNA, 25 bp, SARS Virus
ttgccaactcatttgtcttttccgg

SEQ ID NO: 192090 - DNA, 25 bp, SARS Virus
tgccaactcatttgtcttttccggt

SEQ ID NO: 192091 - DNA, 25 bp, SARS Virus
gccaactcatttttcttttccggtt

SEQ ID NO: 192092 - DNA, 25 bp, SARS Virus
ccaactcatttgtcttttccggttt

SEQ ID NO: 192093 - DNA, 25 bp, SARS Virus
caactcatttgttttttccggtttc

SEQ ID NO: 192094 - DNA, 25 bp, SARS Virus
aactcatttgtcttttccggtttca

SEQ ID NO: 192095 - DNA, 25 bp, SARS Virus
actcatttgtcttttccggtttcat

SEQ ID NO: 192096 - DNA, 25 bp, SARS Virus
ctcatttgtcttttccggtttcatc

SEQ ID NO: 192097 - DNA, 25 bp, SARS Virus
tcatttgtcttttccggtttcatcg

SEQ ID NO: 192098 - DNA, 25 bp, SARS Virus
catttgtctttttcggtttcatcgt

SEQ ID NO: 192099 - DNA, 25 bp, SARS Virus
atttgtcttttctggtttcatcgtc

SEQ ID NO: 192100 - DNA, 25 bp, SARS Virus
tttgtcttttcctgtttcatcgtcg

SEQ ID NO: 192101 - DNA, 25 bp, SARS Virus
ttgtcttttccgttttcatcgtcgt

SEQ ID NO: 192102 - DNA, 25 bp, SARS Virus
tgtcttttccggtttcatcgtcgtc

SEQ ID NO: 192103 - DNA, 25 bp, SARS Virus
gtcttttccggtttcatcgtcgtcg

SEQ ID NO: 192104 - DNA, 25 bp, SARS Virus
tcttttccggtttcatcgtcgtcgt

SEQ ID NO: 192105 - DNA, 25 bp, SARS Virus
cttttccggttttatcgtcgtcgtt

SEQ ID NO: 192106 - DNA, 25 bp, SARS Virus
ttttccggtttcttcgtcgtcgttg

SEQ ID NO: 192107 - DNA, 25 bp, SARS Virus
tttccggtttcatcgtcgtcgttgt

SEQ ID NO: 192108 - DNA, 25 bp, SARS Virus
ttccggtttcattgtcgtcgttgtt

SEQ ID NO: 192109 - DNA, 25 bp, SARS Virus
tccggtttcatcttcgtcgttgtta

SEQ ID NO: 192110 - DNA, 25 bp, SARS Virus
ccggtttcatcgtcgtcgttgttat

SEQ ID NO: 192111 - DNA, 25 bp, SARS Virus
cggtttcatcgttgtcgttgttatc

SEQ ID NO: 192112 - DNA, 25 bp, SARS Virus
ggtttcatcgtcttcgttgttatcg

SEQ ID NO: 192113 - DNA, 25 bp, SARS Virus
gtttcatcgtcgtcgttgttatcgg

SEQ ID NO: 192114 - DNA, 25 bp, SARS Virus
tttcatcgtcgttgttgttatcgga

SEQ ID NO: 192115 - DNA, 25 bp, SARS Virus
ttcatcgtcgtctttgttatcggat

SEQ ID NO: 192116 - DNA, 25 bp, SARS Virus
tcatcgtcgtcgttgttatcggatt

SEQ ID NO: 192117 - DNA, 25 bp, SARS Virus
catcgtcgtcgttgttatcggattc

SEQ ID NO: 192118 - DNA, 25 bp, SARS Virus
atcgtcgtcgtttttatcggattct

SEQ ID NO: 192119 - DNA, 25 bp, SARS Virus
tcgtcgtcgttgttatcggattctt

SEQ ID NO: 192120 - DNA, 25 bp, SARS Virus
cgtcgtcgttgttatcggattcttt

SEQ ID NO: 192121 - DNA, 25 bp, SARS Virus
gtcgtcgttgttttcggattctttg

SEQ ID NO: 192122 - DNA, 25 bp, SARS Virus
tcgtcgttgttatcggattctttgt

SEQ ID NO: 192123 - DNA, 25 bp, SARS Virus
cgtcgttgttattggattctttgtt

SEQ ID NO: 192124 - DNA, 25 bp, SARS Virus
gtcgttgttatctgattctttgtta

SEQ ID NO: 192125 - DNA, 25 bp, SARS Virus
tcgttgttatcgtattctttgttat

SEQ ID NO: 192126 - DNA, 25 bp, SARS Virus
cgttgttatcggtttctttgttatt

SEQ ID NO: 192127 - DNA, 25 bp, SARS Virus
gttgttatcggattctttgttattt

SEQ ID NO: 192128 - DNA, 25 bp, SARS Virus
ttgttatcggattctttgttatttg

SEQ ID NO: 192129 - DNA, 25 bp, SARS Virus
tgttatcggattttttgttatttgt

SEQ ID NO: 192130 - DNA, 25 bp, SARS Virus
gttatcggattctttgttatttgtt

SEQ ID NO: 192131 - DNA, 25 bp, SARS Virus
ttatcggattctttgttatttgttc

SEQ ID NO: 192132 - DNA, 25 bp, SARS Virus
tatcggattctttgttatttgttcg

SEQ ID NO: 192133 - DNA, 25 bp, SARS Virus
atcggattcttttttatttgttcgt

SEQ ID NO: 192134 - DNA, 25 bp, SARS Virus
tcggattctttgttatttgttcgta

SEQ ID NO: 192135 - DNA, 25 bp, SARS Virus
cggattctttgttatttgttcgtac

SEQ ID NO: 192136 - DNA, 25 bp, SARS Virus
ggattctttgttttttgttcgtact

SEQ ID NO: 192137 - DNA, 25 bp, SARS Virus
gattctttgttatttgttcgtacta

SEQ ID NO: 192138 - DNA, 25 bp, SARS Virus
attctttgttatttgttcgtactat

SEQ ID NO: 192139 - DNA, 25 bp, SARS Virus
ttctttgttatttgttcgtactatg

SEQ ID NO: 192140 - DNA, 25 bp, SARS Virus
tctttgttattttttcgtactatgt

SEQ ID NO: 192141 - DNA, 25 bp, SARS Virus
ctttgttatttgttcgtactatgtg

SEQ ID NO: 192142 - DNA, 25 bp, SARS Virus
tttgttatttgttcgtactatgtga

SEQ ID NO: 192143 - DNA, 25 bp, SARS Virus
ttgttatttgtttgtactatgtgac

SEQ ID NO: 192144 - DNA, 25 bp, SARS Virus
tgttatttgttcttactatgtgaca

SEQ ID NO: 192145 - DNA, 25 bp, SARS Virus
gttatttgttcgtactatgtgacat

SEQ ID NO: 192146 - DNA, 25 bp, SARS Virus
ttatttgttcgttctatgtgacatt

SEQ ID NO: 192147 - DNA, 25 bp, SARS Virus
tatttgttcgtattatgtgacattc

SEQ ID NO: 192148 - DNA, 25 bp, SARS Virus
atttgttcgtactatgtgacattcc

SEQ ID NO: 192149 - DNA, 25 bp, SARS Virus
tttgttcgtactttgtgacattcca

SEQ ID NO: 192150 - DNA, 25 bp, SARS Virus
ttgttcgtactatgtgacattccac

SEQ ID NO: 192151 - DNA, 25 bp, SARS Virus
tgttcgtactatttgacattccaca

SEQ ID NO: 192152 - DNA, 25 bp, SARS Virus
gttcgtactatgtgacattccacaa

SEQ ID NO: 192153 - DNA, 25 bp, SARS Virus
ttcgtactatgttacattccacaac

SEQ ID NO: 192154 - DNA, 25 bp, SARS Virus
tcgtactatgtgtcattccacaacg

SEQ ID NO: 192155 - DNA, 25 bp, SARS Virus
cgtactatgtgatattccacaacgg

SEQ ID NO: 192156 - DNA, 25 bp, SARS Virus
gtactatgtgactttccacaacggt

SEQ ID NO: 192157 - DNA, 25 bp, SARS Virus
tactatgtgacattccacaacggtc

SEQ ID NO: 192158 - DNA, 25 bp, SARS Virus
actatgtgacattccacaacggtca

SEQ ID NO: 192159 - DNA, 25 bp, SARS Virus
ctatgtgacatttcacaacggtcat

SEQ ID NO: 192160 - DNA, 25 bp, SARS Virus
tatgtgacattctacaacggtcatt

SEQ ID NO: 192161 - DNA, 25 bp, SARS Virus
atgtgacattcctcaacggtcatta

SEQ ID NO: 192162 - DNA, 25 bp, SARS Virus
tgtgacattccataacggtcattat

SEQ ID NO: 192163 - DNA, 25 bp, SARS Virus
gtgacattccactacggtcattatt

SEQ ID NO: 192164 - DNA, 25 bp, SARS Virus
tgacattccacatcggtcattattt

SEQ ID NO: 192165 - DNA, 25 bp, SARS Virus
gacattccacaatggtcattattta

SEQ ID NO: 192166 - DNA, 25 bp, SARS Virus
acattccacaactgtcattatttat

SEQ ID NO: 192167 - DNA, 25 bp, SARS Virus
cattccacaacgttcattatttatt

SEQ ID NO: 192168 - DNA, 25 bp, SARS Virus
attccacaacggtcattatttattg

SEQ ID NO: 192169 - DNA, 25 bp, SARS Virus
ttccacaacggttattatttattgt

SEQ ID NO: 192170 - DNA, 25 bp, SARS Virus
tccacaacggtctttatttattgtt

SEQ ID NO: 192171 - DNA, 25 bp, SARS Virus
ccacaacggtcattatttattgtta

SEQ ID NO: 192172 - DNA, 25 bp, SARS Virus
cacaacggtcattatttattgttac

SEQ ID NO: 192173 - DNA, 25 bp, SARS Virus
acaacggtcattttttattgttacc

SEQ ID NO: 192174 - DNA, 25 bp, SARS Virus
caacggtcattatttattgttaccc

SEQ ID NO: 192175 - DNA, 25 bp, SARS Virus
aacggtcattatttattgttaccca

SEQ ID NO: 192176 - DNA, 25 bp, SARS Virus
acggtcattatttattgttacccat

SEQ ID NO: 192177 - DNA, 25 bp, SARS Virus
cggtcattattttttgttacccatt

SEQ ID NO: 192178 - DNA, 25 bp, SARS Virus
ggtcattatttattgttacccatta

SEQ ID NO: 192179 - DNA, 25 bp, SARS Virus
gtcattatttattgttacccattat

SEQ ID NO: 192180 - DNA, 25 bp, SARS Virus
tcattatttatttttacccattatg

SEQ ID NO: 192181 - DNA, 25 bp, SARS Virus
cattatttattgttacccattatga

SEQ ID NO: 192182 - DNA, 25 bp, SARS Virus
attatttattgttacccattatgag

SEQ ID NO: 192183 - DNA, 25 bp, SARS Virus
ttatttattgtttcccattatgagt

SEQ ID NO: 192184 - DNA, 25 bp, SARS Virus
tatttattgttatccattatgagtt

SEQ ID NO: 192185 - DNA, 25 bp, SARS Virus
atttattgttactcattatgagttg

SEQ ID NO: 192186 - DNA, 25 bp, SARS Virus
tttattgttacctattatgagttgt

SEQ ID NO: 192187 - DNA, 25 bp, SARS Virus
ttattgttaccctttatgagttgtg

SEQ ID NO: 192188 - DNA, 25 bp, SARS Virus
tattgttacccattatgagttgtgt

SEQ ID NO: 192189 - DNA, 25 bp, SARS Virus
attgttacccattatgagttgtgtg

SEQ ID NO: 192190 - DNA, 25 bp, SARS Virus
ttgttacccattttgagttgtgtgt

SEQ ID NO: 192191 - DNA, 25 bp, SARS Virus
tgttacccattatgagttgtgtgtg

SEQ ID NO: 192192 - DNA, 25 bp, SARS Virus
gttacccattattagttgtgtgtgt

SEQ ID NO: 192193 - DNA, 25 bp, SARS Virus
ttacccattatgtgttgtgtgtgtt

SEQ ID NO: 192194 - DNA, 25 bp, SARS Virus
tacccattatgatttgtgtgtgttt

SEQ ID NO: 192195 - DNA, 25 bp, SARS Virus
acccattatgagttgtgtgtgtttg

SEQ ID NO: 192196 - DNA, 25 bp, SARS Virus
cccattatgagttgtgtgtgtttgt

SEQ ID NO: 192197 - DNA, 25 bp, SARS Virus
ccattatgagttttgtgtgtttgtg

SEQ ID NO: 192198 - DNA, 25 bp, SARS Virus
cattatgagttgtgtgtgtttgtga

SEQ ID NO: 192199 - DNA, 25 bp, SARS Virus
attatgagttgtttgtgtttgtgat

SEQ ID NO: 192200 - DNA, 25 bp, SARS Virus
ttatgagttgtgtgtgtttgtgata

SEQ ID NO: 192201 - DNA, 25 bp, SARS Virus
tatgagttgtgtttgtttgtgatat

SEQ ID NO: 192202 - DNA, 25 bp, SARS Virus
atgagttgtgtgtgtttgtgatatc

SEQ ID NO: 192203 - DNA, 25 bp, SARS Virus
tgagttgtgtgtttttgtgatatcg

SEQ ID NO: 192204 - DNA, 25 bp, SARS Virus
gagttgtgtgtgtttgtgatatcga

SEQ ID NO: 192205 - DNA, 25 bp, SARS Virus
agttgtgtgtgtttgtgatatcgag

SEQ ID NO: 192206 - DNA, 25 bp, SARS Virus
gttgtgtgtgtttgtgatatcgaga

SEQ ID NO: 192207 - DNA, 25 bp, SARS Virus
ttgtgtgtgtttttgatatcgagat

SEQ ID NO: 192208 - DNA, 25 bp, SARS Virus
tgtgtgtgtttgtgatatcgagatc

SEQ ID NO: 192209 - DNA, 25 bp, SARS Virus
gtgtgtgtttgttatatcgagatcg

SEQ ID NO: 192210 - DNA, 25 bp, SARS Virus
tgtgtgtttgtgttatcgagatcga

SEQ ID NO: 192211 - DNA, 25 bp, SARS Virus
gtgtgtttgtgatatcgagatcgat

SEQ ID NO: 192212 - DNA, 25 bp, SARS Virus
tgtgtttgtgatttcgagatcgatt

SEQ ID NO: 192213 - DNA, 25 bp, SARS Virus
gtgtttgtgatatcgagatcgattt

SEQ ID NO: 192214 - DNA, 25 bp, SARS Virus
tgtttgtgatattgagatcgatttt

SEQ ID NO: 192215 - DNA, 25 bp, SARS Virus
gtttgtgatatctagatcgattttt

SEQ ID NO: 192216 - DNA, 25 bp, SARS Virus
tttgtgatatcgtgatcgatttttg

SEQ ID NO: 192217 - DNA, 25 bp, SARS Virus
ttgtgatatcgatatcgatttttgt

SEQ ID NO: 192218 - DNA, 25 bp, SARS Virus
tgtgatatcgagttcgatttttgta

SEQ ID NO: 192219 - DNA, 25 bp, SARS Virus
gtgatatcgagatcgatttttgtac

SEQ ID NO: 192220 - DNA, 25 bp, SARS Virus
tgatatcgagattgatttttgtact

SEQ ID NO: 192221 - DNA, 25 bp, SARS Virus
gatatcgagatctatttttgtacta

SEQ ID NO: 192222 - DNA, 25 bp, SARS Virus
atatcgagatcgttttttgtactat

SEQ ID NO: 192223 - DNA, 25 bp, SARS Virus
tatcgagatcgatttttgtactatc

SEQ ID NO: 192224 - DNA, 25 bp, SARS Virus
atcgagatcgatttttgtactatca

SEQ ID NO: 192225 - DNA, 25 bp, SARS Virus
tcgagatcgatttttgtactatcag

SEQ ID NO: 192226 - DNA, 25 bp, SARS Virus
cgagatcgatttttgtactatcagc

SEQ ID NO: 192227 - DNA, 25 bp, SARS Virus
gagatcgatttttgtactatcagca

SEQ ID NO: 192228 - DNA, 25 bp, SARS Virus
agatcgatttttttactatcagcat

SEQ ID NO: 192229 - DNA, 25 bp, SARS Virus
gatcgatttttgtactatcagcatt

SEQ ID NO: 192230 - DNA, 25 bp, SARS Virus
atcgatttttgttctatcagcattg

SEQ ID NO: 192231 - DNA, 25 bp, SARS Virus
tcgatttttgtattatcagcattgc

SEQ ID NO: 192232 - DNA, 25 bp, SARS Virus
cgatttttgtactatcagcattgct

SEQ ID NO: 192233 - DNA, 25 bp, SARS Virus
gatttttgtactttcagcattgctg

SEQ ID NO: 192234 - DNA, 25 bp, SARS Virus
atttttgtactatcagcattgctgt

SEQ ID NO: 192235 - DNA, 25 bp, SARS Virus
tttttgtactattagcattgctgtg

SEQ ID NO: 192236 - DNA, 25 bp, SARS Virus
ttttgtactatctgcattgctgtgg

SEQ ID NO: 192237 - DNA, 25 bp, SARS Virus
tttgtactatcatcattgctgtggt

SEQ ID NO: 192238 - DNA, 25 bp, SARS Virus
ttgtactatcagtattgctgtggtc

SEQ ID NO: 192239 - DNA, 25 bp, SARS Virus
tgtactatcagctttgctgtggtct

SEQ ID NO: 192240 - DNA, 25 bp, SARS Virus
gtactatcagcattgctgtggtctt

SEQ ID NO: 192241 - DNA, 25 bp, SARS Virus
tactatcagcattgctgtggtctta

SEQ ID NO: 192242 - DNA, 25 bp, SARS Virus
actatcagcatttctgtggtcttat

SEQ ID NO: 192243 - DNA, 25 bp, SARS Virus
ctatcagcattgttgtggtcttatc

SEQ ID NO: 192244 - DNA, 25 bp, SARS Virus
tatcagcattgctgtggtcttatca

SEQ ID NO: 192245 - DNA, 25 bp, SARS Virus
atcagcattgctttggtcttatcaa

SEQ ID NO: 192246 - DNA, 25 bp, SARS Virus
tcagcattgctgtggtcttatcaat

SEQ ID NO: 192247 - DNA, 25 bp, SARS Virus
cagcattgctgttgtcttatcaatc

SEQ ID NO: 192248 - DNA, 25 bp, SARS Virus
agcattgctgtgttcttatcaatct

SEQ ID NO: 192249 - DNA, 25 bp, SARS Virus
gcattgctgtggtcttatcaatctc

SEQ ID NO: 192250 - DNA, 25 bp, SARS Virus
cattgctgtggttttatcaatctcc

SEQ ID NO: 192251 - DNA, 25 bp, SARS Virus
attgctgtggtcttatcaatctcca

SEQ ID NO: 192252 - DNA, 25 bp, SARS Virus
ttgctgtggtcttatcaatctccaa

SEQ ID NO: 192253 - DNA, 25 bp, SARS Virus
tgctgtggtcttttcaatctccaat

SEQ ID NO: 192254 - DNA, 25 bp, SARS Virus
gctgtggtcttatcaatctccaatg

SEQ ID NO: 192255 - DNA, 25 bp, SARS Virus
ctgtggtcttattaatctccaatgt

SEQ ID NO: 192256 - DNA, 25 bp, SARS Virus
tgtggtcttatctatctccaatgtc

SEQ ID NO: 192257 - DNA, 25 bp, SARS Virus
gtggtcttatcattctccaatgtct

SEQ ID NO: 192258 - DNA, 25 bp, SARS Virus
tggtcttatcaatctccaatgtctt

SEQ ID NO: 192259 - DNA, 25 bp, SARS Virus
ggtcttatcaatttccaatgtcttt

SEQ ID NO: 192260 - DNA, 25 bp, SARS Virus
gtcttatcaatctccaatgtcttta

SEQ ID NO: 192261 - DNA, 25 bp, SARS Virus
tcttatcaatcttcaatgtctttat

SEQ ID NO: 192262 - DNA, 25 bp, SARS Virus
cttatcaatctctaatgtctttatt

SEQ ID NO: 192263 - DNA, 25 bp, SARS Virus
ttatcaatctcctatgtctttattg

SEQ ID NO: 192264 - DNA, 25 bp, SARS Virus
tatcaatctccattgtctttattga

SEQ ID NO: 192265 - DNA, 25 bp, SARS Virus
atcaatctccaatgtctttattgat

SEQ ID NO: 192266 - DNA, 25 bp, SARS Virus
tcaatctccaatttctttattgatt

SEQ ID NO: 192267 - DNA, 25 bp, SARS Virus
caatctccaatgtctttattgattc

SEQ ID NO: 192268 - DNA, 25 bp, SARS Virus
aatctccaatgtttttattgattcc

SEQ ID NO: 192269 - DNA, 25 bp, SARS Virus
atctccaatgtctttattgattccg

SEQ ID NO: 192270 - DNA, 25 bp, SARS Virus
tctccaatgtctttattgattccgg

SEQ ID NO: 192271 - DNA, 25 bp, SARS Virus
ctccaatgtctttattgattccggg

SEQ ID NO: 192272 - DNA, 25 bp, SARS Virus
tccaatgtcttttttgattccgggt

SEQ ID NO: 192273 - DNA, 25 bp, SARS Virus
ccaatgtctttattgattccgggtg

SEQ ID NO: 192274 - DNA, 25 bp, SARS Virus
caatgtctttattgattccgggtgt

SEQ ID NO: 192275 - DNA, 25 bp, SARS Virus
aatgtctttatttattccgggtgta

SEQ ID NO: 192276 - DNA, 25 bp, SARS Virus
atgtctttattgtttccgggtgtac

SEQ ID NO: 192277 - DNA, 25 bp, SARS Virus
tgtctttattgattccgggtgtacc

SEQ ID NO: 192278 - DNA, 25 bp, SARS Virus
gtctttattgattccgggtgtacct

SEQ ID NO: 192279 - DNA, 25 bp, SARS Virus
tctttattgatttcgggtgtacctt

SEQ ID NO: 192280 - DNA, 25 bp, SARS Virus
ctttattgattctgggtgtaccttt

SEQ ID NO: 192281 - DNA, 25 bp, SARS Virus
tttattgattcctggtgtaccttta

SEQ ID NO: 192282 - DNA, 25 bp, SARS Virus
ttattgattccgtgtgtacctttat

SEQ ID NO: 192283 - DNA, 25 bp, SARS Virus
tattgattccggttgtacctttatc

SEQ ID NO: 192284 - DNA, 25 bp, SARS Virus
attgattccgggtgtacctttatcg

SEQ ID NO: 192285 - DNA, 25 bp, SARS Virus
ttgattccgggtttacctttatcga

SEQ ID NO: 192286 - DNA, 25 bp, SARS Virus
tgattccgggtgtacctttatcgaa

SEQ ID NO: 192287 - DNA, 25 bp, SARS Virus
gattccgggtgttcctttatcgaac

SEQ ID NO: 192288 - DNA, 25 bp, SARS Virus
attccgggtgtatctttatcgaact

SEQ ID NO: 192289 - DNA, 25 bp, SARS Virus
ttccgggtgtacttttatcgaacta

SEQ ID NO: 192290 - DNA, 25 bp, SARS Virus
tccgggtgtacctttatcgaactag

SEQ ID NO: 192291 - DNA, 25 bp, SARS Virus
ccgggtgtacctttatcgaactaga

SEQ ID NO: 192292 - DNA, 25 bp, SARS Virus
cgggtgtacctttatcgaactagat

SEQ ID NO: 192293 - DNA, 25 bp, SARS Virus
gggtgtacctttttcgaactagatt

SEQ ID NO: 192294 - DNA, 25 bp, SARS Virus
ggtgtacctttatcgaactagattt

SEQ ID NO: 192295 - DNA, 25 bp, SARS Virus
gtgtacctttattgaactagatttc

SEQ ID NO: 192296 - DNA, 25 bp, SARS Virus
tgtacctttatctaactagatttcg

SEQ ID NO: 192297 - DNA, 25 bp, SARS Virus
gtacctttatcgtactagatttcgt

SEQ ID NO: 192298 - DNA, 25 bp, SARS Virus
tacctttatcgatctagatttcgta

SEQ ID NO: 192299 - DNA, 25 bp, SARS Virus
acctttatcgaattagatttcgtaa

SEQ ID NO: 192300 - DNA, 25 bp, SARS Virus
cctttatcgaactagatttcgtaat

SEQ ID NO: 192301 - DNA, 25 bp, SARS Virus
ctttatcgaacttgatttcgtaatg

SEQ ID NO: 192302 - DNA, 25 bp, SARS Virus
tttatcgaactatatttcgtaatgg

SEQ ID NO: 192303 - DNA, 25 bp, SARS Virus
ttatcgaactagttttcgtaatggt

SEQ ID NO: 192304 - DNA, 25 bp, SARS Virus
tatcgaactagatttcgtaatggta

SEQ ID NO: 192305 - DNA, 25 bp, SARS Virus
atcgaactagatatcgtaatggtat

SEQ ID NO: 192306 - DNA, 25 bp, SARS Virus
tcgaactagattacgtaatggtatc

SEQ ID NO: 192307 - DNA, 25 bp, SARS Virus
cgaactagatttagtaatggtatca

SEQ ID NO: 192308 - DNA, 25 bp, SARS Virus
gaactagatttcataatggtatcat

SEQ ID NO: 192309 - DNA, 25 bp, SARS Virus
aactagatttcgaaatggtatcatc

SEQ ID NO: 192310 - DNA, 25 bp, SARS Virus
actagatttcgtaatggtatcatct

SEQ ID NO: 192311 - DNA, 25 bp, SARS Virus
ctagatttcgtaatggtatcatctg

SEQ ID NO: 192312 - DNA, 25 bp, SARS Virus
tagatttcgtaaaggtatcatctga

SEQ ID NO: 192313 - DNA, 25 bp, SARS Virus
agatttcgtaatagtatcatctgaa

SEQ ID NO: 192314 - DNA, 25 bp, SARS Virus
gatttcgtaatgatatcatctgaaa

SEQ ID NO: 192315 - DNA, 25 bp, SARS Virus
atttcgtaatggaatcatctgaaac

SEQ ID NO: 192316 - DNA, 25 bp, SARS Virus
tttcgtaatggtatcatctgaaaca

SEQ ID NO: 192317 - DNA, 25 bp, SARS Virus
ttcgtaatggtaacatctgaaacat

SEQ ID NO: 192318 - DNA, 25 bp, SARS Virus
tcgtaatggtataatctgaaacatt

SEQ ID NO: 192319 - DNA, 25 bp, SARS Virus
cgtaatggtatcatctgaaacattt

SEQ ID NO: 192320 - DNA, 25 bp, SARS Virus
gtaatggtatcaactgaaacatttg

SEQ ID NO: 192321 - DNA, 25 bp, SARS Virus
taatggtatcatatgaaacatttgt

SEQ ID NO: 192322 - DNA, 25 bp, SARS Virus
aatggtatcatcagaaacatttgtt

SEQ ID NO: 192323 - DNA, 25 bp, SARS Virus
atggtatcatctaaaacatttgttc

SEQ ID NO: 192324 - DNA, 25 bp, SARS Virus
tggtatcatctgaaacatttgttca

SEQ ID NO: 192325 - DNA, 25 bp, SARS Virus
ggtatcatctgaaacatttgttcac

SEQ ID NO: 192326 - DNA, 25 bp, SARS Virus
gtatcatctgaaacatttgttcaca

SEQ ID NO: 192327 - DNA, 25 bp, SARS Virus
tatcatctgaaaaatttgttcacat

SEQ ID NO: 192328 - DNA, 25 bp, SARS Virus
atcatctgaaacatttgttcacatt

SEQ ID NO: 192329 - DNA, 25 bp, SARS Virus
tcatctgaaacaattgttcacatta

SEQ ID NO: 192330 - DNA, 25 bp, SARS Virus
catctgaaacatatgttcacattac

SEQ ID NO: 192331 - DNA, 25 bp, SARS Virus
atctgaaacattagttcacattact

SEQ ID NO: 192332 - DNA, 25 bp, SARS Virus
tctgaaacatttattcacattactg

SEQ ID NO: 192333 - DNA, 25 bp, SARS Virus
ctgaaacatttgatcacattactgt

SEQ ID NO: 192334 - DNA, 25 bp, SARS Virus
tgaaacatttgtacacattactgta

SEQ ID NO: 192335 - DNA, 25 bp, SARS Virus
gaaacatttgttaacattactgtaa

SEQ ID NO: 192336 - DNA, 25 bp, SARS Virus
aaacatttgttcacattactgtaag

SEQ ID NO: 192337 - DNA, 25 bp, SARS Virus
aacatttgttcaaattactgtaagt

SEQ ID NO: 192338 - DNA, 25 bp, SARS Virus
acatttgttcacattactgtaagta

SEQ ID NO: 192339 - DNA, 25 bp, SARS Virus
catttgttcacaatactgtaagtag

SEQ ID NO: 192340 - DNA, 25 bp, SARS Virus
atttgttcacataactgtaagtagt

SEQ ID NO: 192341 - DNA, 25 bp, SARS Virus
tttgttcacattactgtaagtagtc

SEQ ID NO: 192342 - DNA, 25 bp, SARS Virus
ttgttcacattaatgtaagtagtca

SEQ ID NO: 192343 - DNA, 25 bp, SARS Virus
tgttcacattacagtaagtagtcac

SEQ ID NO: 192344 - DNA, 25 bp, SARS Virus
gttcacattactataagtagtcaca

SEQ ID NO: 192345 - DNA, 25 bp, SARS Virus
ttcacattactgaaagtagtcacag

SEQ ID NO: 192346 - DNA, 25 bp, SARS Virus
tcacattactgtaagtagtcacagg

SEQ ID NO: 192347 - DNA, 25 bp, SARS Virus
cacattactgtaagtagtcacaggt

SEQ ID NO: 192348 - DNA, 25 bp, SARS Virus
acattactgtaaatagtcacaggtt

SEQ ID NO: 192349 - DNA, 25 bp, SARS Virus
cattactgtaagaagtcacaggttt

SEQ ID NO: 192350 - DNA, 25 bp, SARS Virus
attactgtaagtagtcacaggtttg

SEQ ID NO: 192351 - DNA, 25 bp, SARS Virus
ttactgtaagtaatcacaggtttgt

SEQ ID NO: 192352 - DNA, 25 bp, SARS Virus
tactgtaagtagacacaggtttgtg

SEQ ID NO: 192353 - DNA, 25 bp, SARS Virus
actgtaagtagtaacaggtttgtgc

SEQ ID NO: 192354 - DNA, 25 bp, SARS Virus
ctgtaagtagtcacaggtttgtgca

SEQ ID NO: 192355 - DNA, 25 bp, SARS Virus
tgtaagtagtcaaaggtttgtgcag

SEQ ID NO: 192356 - DNA, 25 bp, SARS Virus
gtaagtagtcacaggtttgtgcaga

SEQ ID NO: 192357 - DNA, 25 bp, SARS Virus
taagtagtcacaagtttgtgcagat

SEQ ID NO: 192358 - DNA, 25 bp, SARS Virus
aagtagtcacagatttgtgcagatc

SEQ ID NO: 192359 - DNA, 25 bp, SARS Virus
agtagtcacaggattgtgcagatcg

SEQ ID NO: 192360 - DNA, 25 bp, SARS Virus
gtagtcacaggtatgtgcagatcgt

SEQ ID NO: 192361 - DNA, 25 bp, SARS Virus
tagtcacaggttagtgcagatcgtc

SEQ ID NO: 192362 - DNA, 25 bp, SARS Virus
agtcacaggtttatgcagatcgtcg

SEQ ID NO: 192363 - DNA, 25 bp, SARS Virus
gtcacaggtttgagcagatcgtcgt

SEQ ID NO: 192364 - DNA, 25 bp, SARS Virus
tcacaggtttgtacagatcgtcgta

SEQ ID NO: 192365 - DNA, 25 bp, SARS Virus
cacaggtttgtgaagatcgtcgtag

SEQ ID NO: 192366 - DNA, 25 bp, SARS Virus
acaggtttgtgcagatcgtcgtagt

SEQ ID NO: 192367 - DNA, 25 bp, SARS Virus
caggtttgtgcaaatcgtcgtagta

SEQ ID NO: 192368 - DNA, 25 bp, SARS Virus
aggtttgtgcagatcgtcgtagtag

SEQ ID NO: 192369 - DNA, 25 bp, SARS Virus
ggtttgtgcagaacgtcgtagtagt

SEQ ID NO: 192370 - DNA, 25 bp, SARS Virus
gtttgtgcagatagtcgtagtagta

SEQ ID NO: 192371 - DNA, 25 bp, SARS Virus
tttgtgcagatcatcgtagtagtat

SEQ ID NO: 192372 - DNA, 25 bp, SARS Virus
ttgtgcagatcgacgtagtagtatt

SEQ ID NO: 192373 - DNA, 25 bp, SARS Virus
tgtgcagatcgtagtagtagtattt

SEQ ID NO: 192374 - DNA, 25 bp, SARS Virus
gtgcagatcgtcatagtagtatttg

SEQ ID NO: 192375 - DNA, 25 bp, SARS Virus
tgcagatcgtcgaagtagtatttgt

SEQ ID NO: 192376 - DNA, 25 bp, SARS Virus
gcagatcgtcgtagtagtatttgtc

SEQ ID NO: 192377 - DNA, 25 bp, SARS Virus
cagatcgtcgtaatagtatttgtca

SEQ ID NO: 192378 - DNA, 25 bp, SARS Virus
agatcgtcgtagaagtatttgtcac

SEQ ID NO: 192379 - DNA, 25 bp, SARS Virus
gatcgtcgtagtagtatttgtcacg

SEQ ID NO: 192380 - DNA, 25 bp, SARS Virus
atcgtcgtagtaatatttgtcacgc

SEQ ID NO: 192381 - DNA, 25 bp, SARS Virus
tcgtcgtagtagaatttgtcacgct

SEQ ID NO: 192382 - DNA, 25 bp, SARS Virus
cgtcgtagtagtatttgtcacgctc

SEQ ID NO: 192383 - DNA, 25 bp, SARS Virus
gtcgtagtagtaattgtcacgctcg

SEQ ID NO: 192384 - DNA, 25 bp, SARS Virus
tcgtagtagtatatgtcacgctcga

SEQ ID NO: 192385 - DNA, 25 bp, SARS Virus
cgtagtagtattagtcacgctcgac

SEQ ID NO: 192386 - DNA, 25 bp, SARS Virus
gtagtagtatttatcacgctcgaca

SEQ ID NO: 192387 - DNA, 25 bp, SARS Virus
tagtagtatttgacacgctcgacag

SEQ ID NO: 192388 - DNA, 25 bp, SARS Virus
agtagtatttgtaacgctcgacagt

SEQ ID NO: 192389 - DNA, 25 bp, SARS Virus
gtagtatttgtcacgctcgacagta

SEQ ID NO: 192390 - DNA, 25 bp, SARS Virus
tagtatttgtcaagctcgacagtac

SEQ ID NO: 192391 - DNA, 25 bp, SARS Virus
agtatttgtcacactcgacagtact

SEQ ID NO: 192392 - DNA, 25 bp, SARS Virus
gtatttgtcacgatcgacagtactc

SEQ ID NO: 192393 - DNA, 25 bp, SARS Virus
tatttgtcacgcacgacagtactct

SEQ ID NO: 192394 - DNA, 25 bp, SARS Virus
atttgtcacgctagacagtactctt

SEQ ID NO: 192395 - DNA, 25 bp, SARS Virus
tttgtcacgctcaacagtactctta

SEQ ID NO: 192396 - DNA, 25 bp, SARS Virus
ttgtcacgctcgacagtactcttat

SEQ ID NO: 192397 - DNA, 25 bp, SARS Virus
tgtcacgctcgaaagtactcttatt

SEQ ID NO: 192398 - DNA, 25 bp, SARS Virus
gtcacgctcgacagtactcttattc

SEQ ID NO: 192399 - DNA, 25 bp, SARS Virus
tcacgctcgacaatactcttattcg

SEQ ID NO: 192400 - DNA, 25 bp, SARS Virus
cacgctcgacagaactcttattcgt

SEQ ID NO: 192401 - DNA, 25 bp, SARS Virus
acgctcgacagtactcttattcgtt

SEQ ID NO: 192402 - DNA, 25 bp, SARS Virus
cgctcgacagtaatcttattcgttt

SEQ ID NO: 192403 - DNA, 25 bp, SARS Virus
gctcgacagtacacttattcgtttt

SEQ ID NO: 192404 - DNA, 25 bp, SARS Virus
ctcgacagtactattattcgttttg

SEQ ID NO: 192405 - DNA, 25 bp, SARS Virus
tcgacagtactcatattcgttttga

SEQ ID NO: 192406 - DNA, 25 bp, SARS Virus
cgacagtactctaattcgttttgat

SEQ ID NO: 192407 - DNA, 25 bp, SARS Virus
gacagtactcttattcgttttgatt

SEQ ID NO: 192408 - DNA, 25 bp, SARS Virus
acagtactcttaatcgttttgattt

SEQ ID NO: 192409 - DNA, 25 bp, SARS Virus
cagtactcttatacgttttgatttc

SEQ ID NO: 192410 - DNA, 25 bp, SARS Virus
agtactcttattagttttgatttcg

SEQ ID NO: 192411 - DNA, 25 bp, SARS Virus
gtactcttattcattttgatttcga

SEQ ID NO: 192412 - DNA, 25 bp, SARS Virus
tactcttattcgatttgatttcgac

SEQ ID NO: 192413 - DNA, 25 bp, SARS Virus
actcttattcgtattgatttcgact

SEQ ID NO: 192414 - DNA, 25 bp, SARS Virus
ctcttattcgttatgatttcgactt

SEQ ID NO: 192415 - DNA, 25 bp, SARS Virus
tcttattcgtttagatttcgacttc

SEQ ID NO: 192416 - DNA, 25 bp, SARS Virus
cttattcgttttaatttcgacttcg

SEQ ID NO: 192417 - DNA, 25 bp, SARS Virus
ttattcgttttgatttcgacttcgt

SEQ ID NO: 192418 - DNA, 25 bp, SARS Virus
tattcgttttgaattcgacttcgta

SEQ ID NO: 192419 - DNA, 25 bp, SARS Virus
attcgttttgatatcgacttcgtat

SEQ ID NO: 192420 - DNA, 25 bp, SARS Virus
ttcgttttgattacgacttcgtatg

SEQ ID NO: 192421 - DNA, 25 bp, SARS Virus
tcgttttgatttagacttcgtatgt

SEQ ID NO: 192422 - DNA, 25 bp, SARS Virus
cgttttgatttcaacttcgtatgta

SEQ ID NO: 192423 - DNA, 25 bp, SARS Virus
gttttgatttcgacttcgtatgtat

SEQ ID NO: 192424 - DNA, 25 bp, SARS Virus
ttttgatttcgaattcgtatgtatt

SEQ ID NO: 192425 - DNA, 25 bp, SARS Virus
tttgatttcgacatcgtatgtattg

SEQ ID NO: 192426 - DNA, 25 bp, SARS Virus
ttgatttcgactacgtatgtattgt

SEQ ID NO: 192427 - DNA, 25 bp, SARS Virus
tgatttcgacttagtatgtattgtg

SEQ ID NO: 192428 - DNA, 25 bp, SARS Virus
gatttcgacttcatatgtattgtgt

SEQ ID NO: 192429 - DNA, 25 bp, SARS Virus
atttcgacttcgaatgtattgtgtt

SEQ ID NO: 192430 - DNA, 25 bp, SARS Virus
tttcgacttcgtatgtattgtgtta

SEQ ID NO: 192431 - DNA, 25 bp, SARS Virus
ttcgacttcgtaagtattgtgttag

SEQ ID NO: 192432 - DNA, 25 bp, SARS Virus
tcgacttcgtatatattgtgttagg

SEQ ID NO: 192433 - DNA, 25 bp, SARS Virus
cgacttcgtatgaattgtgttagga

SEQ ID NO: 192434 - DNA, 25 bp, SARS Virus
gacttcgtatgtattgtgttaggaa

SEQ ID NO: 192435 - DNA, 25 bp, SARS Virus
acttcgtatgtaatgtgttaggaat

SEQ ID NO: 192436 - DNA, 25 bp, SARS Virus
cttcgtatgtatagtgttaggaatt

SEQ ID NO: 192437 - DNA, 25 bp, SARS Virus
ttcgtatgtattatgttaggaattc

SEQ ID NO: 192438 - DNA, 25 bp, SARS Virus
tcgtatgtattgagttaggaattcg

SEQ ID NO: 192439 - DNA, 25 bp, SARS Virus
cgtatgtattgtattaggaattcgg

SEQ ID NO: 192440 - DNA, 25 bp, SARS Virus
gtatgtattgtgataggaattcgga

SEQ ID NO: 192441 - DNA, 25 bp, SARS Virus
tatgtattgtgtaaggaattcggat

SEQ ID NO: 192442 - DNA, 25 bp, SARS Virus
atgtattgtgttaggaattcggata

SEQ ID NO: 192443 - DNA, 25 bp, SARS Virus
tgtattgtgttaagaattcggatat

SEQ ID NO: 192444 - DNA, 25 bp, SARS Virus
gtattgtgttagaaattcggatatt

SEQ ID NO: 192445 - DNA, 25 bp, SARS Virus
tattgtgttaggaattcggatattg

SEQ ID NO: 192446 - DNA, 25 bp, SARS Virus
attgtgttaggaattcggatattgg

SEQ ID NO: 192447 - DNA, 25 bp, SARS Virus
ttgtgttaggaaatcggatattggt

SEQ ID NO: 192448 - DNA, 25 bp, SARS Virus
tgtgttaggaatacggatattggtc

SEQ ID NO: 192449 - DNA, 25 bp, SARS Virus
gtgttaggaattaggatattggtct

SEQ ID NO: 192450 - DNA, 25 bp, SARS Virus
tgttaggaattcagatattggtctg

SEQ ID NO: 192451 - DNA, 25 bp, SARS Virus
gttaggaattcgaatattggtctgt

SEQ ID NO: 192452 - DNA, 25 bp, SARS Virus
ttaggaattcggatattggtctgtt

SEQ ID NO: 192453 - DNA, 25 bp, SARS Virus
taggaattcggaaattggtctgttc

SEQ ID NO: 192454 - DNA, 25 bp, SARS Virus
aggaattcggatattggtctgttcg

SEQ ID NO: 192455 - DNA, 25 bp, SARS Virus
ggaattcggataatggtctgttcga

SEQ ID NO: 192456 - DNA, 25 bp, SARS Virus
gaattcggatataggtctgttcgat

SEQ ID NO: 192457 - DNA, 25 bp, SARS Virus
aattcggatattagtctgttcgatc

SEQ ID NO: 192458 - DNA, 25 bp, SARS Virus
attcggatattgatctgttcgatca

SEQ ID NO: 192459 - DNA, 25 bp, SARS Virus
ttcggatattggactgttcgatcac

SEQ ID NO: 192460 - DNA, 25 bp, SARS Virus
tcggatattggtatgttcgatcaca

SEQ ID NO: 192461 - DNA, 25 bp, SARS Virus
cggatattggtcagttcgatcacag

SEQ ID NO: 192462 - DNA, 25 bp, SARS Virus
ggatattggtctattcgatcacagt

SEQ ID NO: 192463 - DNA, 25 bp, SARS Virus
gatattggtctgatcgatcacagtc

SEQ ID NO: 192464 - DNA, 25 bp, SARS Virus
atattggtctgtacgatcacagtcg

SEQ ID NO: 192465 - DNA, 25 bp, SARS Virus
tattggtctgttagatcacagtcgg

SEQ ID NO: 192466 - DNA, 25 bp, SARS Virus
attggtctgttcaatcacagtcggt

SEQ ID NO: 192467 - DNA, 25 bp, SARS Virus
ttggtctgttcgatcacagtcggtt

SEQ ID NO: 192468 - DNA, 25 bp, SARS Virus
tggtctgttcgaacacagtcggtta

SEQ ID NO: 192469 - DNA, 25 bp, SARS Virus
ggtctgttcgataacagtcggttaa

SEQ ID NO: 192470 - DNA, 25 bp, SARS Virus
gtctgttcgatcacagtcggttaag

SEQ ID NO: 192471 - DNA, 25 bp, SARS Virus
tctgttcgatcaaagtcggttaagt

SEQ ID NO: 192472 - DNA, 25 bp, SARS Virus
ctgttcgatcacagtcggttaagtt

SEQ ID NO: 192473 - DNA, 25 bp, SARS Virus
tgttcgatcacaatcggttaagttc

SEQ ID NO: 192474 - DNA, 25 bp, SARS Virus
gttcgatcacagacggttaagttcg

SEQ ID NO: 192475 - DNA, 25 bp, SARS Virus
ttcgatcacagtaggttaagttcgg

SEQ ID NO: 192476 - DNA, 25 bp, SARS Virus
tcgatcacagtcagttaagttcggt

SEQ ID NO: 192477 - DNA, 25 bp, SARS Virus
cgatcacagtcgattaagttcggta

SEQ ID NO: 192478 - DNA, 25 bp, SARS Virus
gatcacagtcggataagttcggtac

SEQ ID NO: 192479 - DNA, 25 bp, SARS Virus
atcacagtcggtaaagttcggtaca

SEQ ID NO: 192480 - DNA, 25 bp, SARS Virus
tcacagtcggttaagttcggtacag

SEQ ID NO: 192481 - DNA, 25 bp, SARS Virus
cacagtcggttaagttcggtacagt

SEQ ID NO: 192482 - DNA, 25 bp, SARS Virus
acagtcggttaaattcggtacagta

SEQ ID NO: 192483 - DNA, 25 bp, SARS Virus
cagtcggttaagatcggtacagtac

SEQ ID NO: 192484 - DNA, 25 bp, SARS Virus
agtcggttaagtacggtacagtact

SEQ ID NO: 192485 - DNA, 25 bp, SARS Virus
gtcggttaagttaggtacagtacta

SEQ ID NO: 192486 - DNA, 25 bp, SARS Virus
tcggttaagttcagtacagtactat

SEQ ID NO: 192487 - DNA, 25 bp, SARS Virus
cggttaagttcgatacagtactatg

SEQ ID NO: 192488 - DNA, 25 bp, SARS Virus
ggttaagttcggaacagtactatgc

SEQ ID NO: 192489 - DNA, 25 bp, SARS Virus
gttaagttcggtacagtactatgcg

SEQ ID NO: 192490 - DNA, 25 bp, SARS Virus
ttaagttcggtaaagtactatgcgt

SEQ ID NO: 192491 - DNA, 25 bp, SARS Virus
taagttcggtacagtactatgcgta

SEQ ID NO: 192492 - DNA, 25 bp, SARS Virus
aagttcggtacaatactatgcgtag

SEQ ID NO: 192493 - DNA, 25 bp, SARS Virus
agttcggtacagaactatgcgtagt

SEQ ID NO: 192494 - DNA, 25 bp, SARS Virus
gttcggtacagtactatgcgtagtg

SEQ ID NO: 192495 - DNA, 25 bp, SARS Virus
ttcggtacagtaatatgcgtagtgg

SEQ ID NO: 192496 - DNA, 25 bp, SARS Virus
tcggtacagtacaatgcgtagtggg

SEQ ID NO: 192497 - DNA, 25 bp, SARS Virus
cggtacagtactatgcgtagtgggt

SEQ ID NO: 192498 - DNA, 25 bp, SARS Virus
ggtacagtactaagcgtagtgggtc

SEQ ID NO: 192499 - DNA, 25 bp, SARS Virus
gtacagtactatacgtagtgggtcg

SEQ ID NO: 192500 - DNA, 25 bp, SARS Virus
tacagtactatgagtagtgggtcga

SEQ ID NO: 192501 - DNA, 25 bp, SARS Virus
acagtactatgcatagtgggtcgat

SEQ ID NO: 192502 - DNA, 25 bp, SARS Virus
cagtactatgcgaagtgggtcgatc

SEQ ID NO: 192503 - DNA, 25 bp, SARS Virus
agtactatgcgtagtgggtcgatcg

SEQ ID NO: 192504 - DNA, 25 bp, SARS Virus
gtactatgcgtaatgggtcgatcgt

SEQ ID NO: 192505 - DNA, 25 bp, SARS Virus
tactatgcgtagagggtcgatcgtc

SEQ ID NO: 192506 - DNA, 25 bp, SARS Virus
actatgcgtagtaggtcgatcgtcc

SEQ ID NO: 192507 - DNA, 25 bp, SARS Virus
ctatgcgtagtgagtcgatcgtccg

SEQ ID NO: 192508 - DNA, 25 bp, SARS Virus
tatgcgtagtggatcgatcgtccgt

SEQ ID NO: 192509 - DNA, 25 bp, SARS Virus
atgcgtagtgggacgatcgtccgta

SEQ ID NO: 192510 - DNA, 25 bp, SARS Virus
tgcgtagtgggtagatcgtccgtac

SEQ ID NO: 192511 - DNA, 25 bp, SARS Virus
gcgtagtgggtcaatcgtccgtaca

SEQ ID NO: 192512 - DNA, 25 bp, SARS Virus
cgtagtgggtcgatcgtccgtacat

SEQ ID NO: 192513 - DNA, 25 bp, SARS Virus
gtagtgggtcgaacgtccgtacatc

SEQ ID NO: 192514 - DNA, 25 bp, SARS Virus
tagtgggtcgatagtccgtacatct

SEQ ID NO: 192515 - DNA, 25 bp, SARS Virus
agtgggtcgatcatccgtacatctg

SEQ ID NO: 192516 - DNA, 25 bp, SARS Virus
gtgggtcgatcgaccgtacatctgg

SEQ ID NO: 192517 - DNA, 25 bp, SARS Virus
tgggtcgatcgtacgtacatctggt

SEQ ID NO: 192518 - DNA, 25 bp, SARS Virus
gggtcgatcgtcagtacatctggta

SEQ ID NO: 192519 - DNA, 25 bp, SARS Virus
ggtcgatcgtccatacatctggtat

SEQ ID NO: 192520 - DNA, 25 bp, SARS Virus
gtcgatcgtccgaacatctggtata

SEQ ID NO: 192521 - DNA, 25 bp, SARS Virus
tcgatcgtccgtacatctggtataa

SEQ ID NO: 192522 - DNA, 25 bp, SARS Virus
cgatcgtccgtaaatctggtataat

SEQ ID NO: 192523 - DNA, 25 bp, SARS Virus
gatcgtccgtacatctggtataatt

SEQ ID NO: 192524 - DNA, 25 bp, SARS Virus
atcgtccgtacaactggtataattt

SEQ ID NO: 192525 - DNA, 25 bp, SARS Virus
tcgtccgtacatatggtataatttc

SEQ ID NO: 192526 - DNA, 25 bp, SARS Virus
cgtccgtacatcaggtataatttca

SEQ ID NO: 192527 - DNA, 25 bp, SARS Virus
gtccgtacatctagtataatttcat

SEQ ID NO: 192528 - DNA, 25 bp, SARS Virus
tccgtacatctgatataatttcatt

SEQ ID NO: 192529 - DNA, 25 bp, SARS Virus
ccgtacatctggaataatttcattc

SEQ ID NO: 192530 - DNA, 25 bp, SARS Virus
cgtacatctggtataatttcattcg

SEQ ID NO: 192531 - DNA, 25 bp, SARS Virus
gtacatctggtaaaatttcattcgt

SEQ ID NO: 192532 - DNA, 25 bp, SARS Virus
tacatctggtataatttcattcgtt

SEQ ID NO: 192533 - DNA, 25 bp, SARS Virus
acatctggtataatttcattcgttg

SEQ ID NO: 192534 - DNA, 25 bp, SARS Virus
catctggtataaattcattcgttga

SEQ ID NO: 192535 - DNA, 25 bp, SARS Virus
atctggtataatatcattcgttgac

SEQ ID NO: 192536 - DNA, 25 bp, SARS Virus
tctggtataattacattcgttgaca

SEQ ID NO: 192537 - DNA, 25 bp, SARS Virus
ctggtataatttaattcgttgacaa

SEQ ID NO: 192538 - DNA, 25 bp, SARS Virus
tggtataatttcattcgttgacaac

SEQ ID NO: 192539 - DNA, 25 bp, SARS Virus
ggtataatttcaatcgttgacaacg

SEQ ID NO: 192540 - DNA, 25 bp, SARS Virus
gtataatttcatacgttgacaacgt

SEQ ID NO: 192541 - DNA, 25 bp, SARS Virus
tataatttcattagttgacaacgtt

SEQ ID NO: 192542 - DNA, 25 bp, SARS Virus
ataatttcattcattgacaacgttc

SEQ ID NO: 192543 - DNA, 25 bp, SARS Virus
taatttcattcgatgacaacgttct

SEQ ID NO: 192544 - DNA, 25 bp, SARS Virus
aatttcattcgtagacaacgttctc

SEQ ID NO: 192545 - DNA, 25 bp, SARS Virus
atttcattcgttaacaacgttctct

SEQ ID NO: 192546 - DNA, 25 bp, SARS Virus
tttcattcgttgacaacgttctctt

SEQ ID NO: 192547 - DNA, 25 bp, SARS Virus
ttcattcgttgaaaacgttctcttc

SEQ ID NO: 192548 - DNA, 25 bp, SARS Virus
tcattcgttgacaacgttctcttcc

SEQ ID NO: 192549 - DNA, 25 bp, SARS Virus
cattcgttgacaacgttctcttcca

SEQ ID NO: 192550 - DNA, 25 bp, SARS Virus
attcgttgacaaagttctcttccat

SEQ ID NO: 192551 - DNA, 25 bp, SARS Virus
ttcgttgacaacattctcttccatt

SEQ ID NO: 192552 - DNA, 25 bp, SARS Virus
tcgttgacaacgatctcttccattg

SEQ ID NO: 192553 - DNA, 25 bp, SARS Virus
cgttgacaacgtactcttccattgt

SEQ ID NO: 192554 - DNA, 25 bp, SARS Virus
gttgacaacgttatcttccattgtc

SEQ ID NO: 192555 - DNA, 25 bp, SARS Virus
ttgacaacgttcacttccattgtct

SEQ ID NO: 192556 - DNA, 25 bp, SARS Virus
tgacaacgttctattccattgtctt

SEQ ID NO: 192557 - DNA, 25 bp, SARS Virus
gacaacgttctcatccattgtcttt

SEQ ID NO: 192558 - DNA, 25 bp, SARS Virus
acaacgttctctaccattgtctttg

SEQ ID NO: 192559 - DNA, 25 bp, SARS Virus
caacgttctcttacattgtctttgt

SEQ ID NO: 192560 - DNA, 25 bp, SARS Virus
aacgttctcttcaattgtctttgtt

SEQ ID NO: 192561 - DNA, 25 bp, SARS Virus
acgttctcttccattgtctttgttc

SEQ ID NO: 192562 - DNA, 25 bp, SARS Virus
cgttctcttccaatgtctttgttcg

SEQ ID NO: 192563 - DNA, 25 bp, SARS Virus
gttctcttccatagtctttgttcgt

SEQ ID NO: 192564 - DNA, 25 bp, SARS Virus
ttctcttccattatctttgttcgtg

SEQ ID NO: 192565 - DNA, 25 bp, SARS Virus
tctcttccattgactttgttcgtgt

SEQ ID NO: 192566 - DNA, 25 bp, SARS Virus
ctcttccattgtatttgttcgtgtt

SEQ ID NO: 192567 - DNA, 25 bp, SARS Virus
tcttccattgtcattgttcgtgttc

SEQ ID NO: 192568 - DNA, 25 bp, SARS Virus
cttccattgtctatgttcgtgttct

SEQ ID NO: 192569 - DNA, 25 bp, SARS Virus
ttccattgtcttagttcgtgttctt

SEQ ID NO: 192570 - DNA, 25 bp, SARS Virus
tccattgtctttattcgtgttctta

SEQ ID NO: 192571 - DNA, 25 bp, SARS Virus
ccattgtctttgatcgtgttcttac

SEQ ID NO: 192572 - DNA, 25 bp, SARS Virus
cattgtctttgtacgtgttcttacg

SEQ ID NO: 192573 - DNA, 25 bp, SARS Virus
attgtctttgttagtgttcttacgc

SEQ ID NO: 192574 - DNA, 25 bp, SARS Virus
ttgtctttgttcatgttcttacgca

SEQ ID NO: 192575 - DNA, 25 bp, SARS Virus
tgtctttgttcgagttcttacgcac

SEQ ID NO: 192576 - DNA, 25 bp, SARS Virus
gtctttgttcgtattcttacgcacg

SEQ ID NO: 192577 - DNA, 25 bp, SARS Virus
tctttgttcgtgatcttacgcacga

SEQ ID NO: 192578 - DNA, 25 bp, SARS Virus
ctttgttcgtgtacttacgcacgaa

SEQ ID NO: 192579 - DNA, 25 bp, SARS Virus
tttgttcgtgttattacgcacgaat

SEQ ID NO: 192580 - DNA, 25 bp, SARS Virus
ttgttcgtgttcatacgcacgaata

SEQ ID NO: 192581 - DNA, 25 bp, SARS Virus
tgttcgtgttctaacgcacgaatac

SEQ ID NO: 192582 - DNA, 25 bp, SARS Virus
gttcgtgttcttacgcacgaatacg

SEQ ID NO: 192583 - DNA, 25 bp, SARS Virus
ttcgtgttcttaagcacgaatacga

SEQ ID NO: 192584 - DNA, 25 bp, SARS Virus
tcgtgttcttacacacgaatacgaa

SEQ ID NO: 192585 - DNA, 25 bp, SARS Virus
cgtgttcttacgaacgaatacgaat

SEQ ID NO: 192586 - DNA, 25 bp, SARS Virus
gtgttcttacgcacgaatacgaatt

SEQ ID NO: 192587 - DNA, 25 bp, SARS Virus
tgttcttacgcaagaatacgaattg

SEQ ID NO: 192588 - DNA, 25 bp, SARS Virus
gttcttacgcacaaatacgaattgt

SEQ ID NO: 192589 - DNA, 25 bp, SARS Virus
ttcttacgcacgaatacgaattgtt

SEQ ID NO: 192590 - DNA, 25 bp, SARS Virus
tcttacgcacgaatacgaattgttc

SEQ ID NO: 192591 - DNA, 25 bp, SARS Virus
cttacgcacgaaaacgaattgttcg

SEQ ID NO: 192592 - DNA, 25 bp, SARS Virus
ttacgcacgaatacgaattgttcgt

SEQ ID NO: 192593 - DNA, 25 bp, SARS Virus
tacgcacgaataagaattgttcgtc

SEQ ID NO: 192594 - DNA, 25 bp, SARS Virus
acgcacgaatacaaattgttcgtcg

SEQ ID NO: 192595 - DNA, 25 bp, SARS Virus
cgcacgaatacgaattgttcgtcgt

SEQ ID NO: 192596 - DNA, 25 bp, SARS Virus
gcacgaatacgaattgttcgtcgta

SEQ ID NO: 192597 - DNA, 25 bp, SARS Virus
cacgaatacgaaatgttcgtcgtat

SEQ ID NO: 192598 - DNA, 25 bp, SARS Virus
acgaatacgaatagttcgtcgtatc

SEQ ID NO: 192599 - DNA, 25 bp, SARS Virus
cgaatacgaattattcgtcgtatcg

SEQ ID NO: 192600 - DNA, 25 bp, SARS Virus
gaatacgaattgatcgtcgtatcgt

SEQ ID NO: 192601 - DNA, 25 bp, SARS Virus
aatacgaattgtacgtcgtatcgtg

SEQ ID NO: 192602 - DNA, 25 bp, SARS Virus
atacgaattgttagtcgtatcgtgt

SEQ ID NO: 192603 - DNA, 25 bp, SARS Virus
tacgaattgttcatcgtatcgtgta

SEQ ID NO: 192604 - DNA, 25 bp, SARS Virus
acgaattgttcgacgtatcgtgtac

SEQ ID NO: 192605 - DNA, 25 bp, SARS Virus
cgaattgttcgtagtatcgtgtacg

SEQ ID NO: 192606 - DNA, 25 bp, SARS Virus
gaattgttcgtcatatcgtgtacgt

SEQ ID NO: 192607 - DNA, 25 bp, SARS Virus
aattgttcgtcgaatcgtgtacgtc

SEQ ID NO: 192608 - DNA, 25 bp, SARS Virus
attgttcgtcgtatcgtgtacgtcg

SEQ ID NO: 192609 - DNA, 25 bp, SARS Virus
ttgttcgtcgtaacgtgtacgtcgt

SEQ ID NO: 192610 - DNA, 25 bp, SARS Virus
tgttcgtcgtatagtgtacgtcgtt

SEQ ID NO: 192611 - DNA, 25 bp, SARS Virus
gttcgtcgtatcatgtacgtcgtta

SEQ ID NO: 192612 - DNA, 25 bp, SARS Virus
ttcgtcgtatcgagtacgtcgttaa

SEQ ID NO: 192613 - DNA, 25 bp, SARS Virus
tcgtcgtatcgtatacgtcgttaac

SEQ ID NO: 192614 - DNA, 25 bp, SARS Virus
cgtcgtatcgtgaacgtcgttaacg

SEQ ID NO: 192615 - DNA, 25 bp, SARS Virus
gtcgtatcgtgtacgtcgttaacgg

SEQ ID NO: 192616 - DNA, 25 bp, SARS Virus
tcgtatcgtgtaagtcgttaacggt

SEQ ID NO: 192617 - DNA, 25 bp, SARS Virus
cgtatcgtgtacatcgttaacggta

SEQ ID NO: 192618 - DNA, 25 bp, SARS Virus
gtatcgtgtacgacgttaacggtat

SEQ ID NO: 192619 - DNA, 25 bp, SARS Virus
tatcgtgtacgtagttaacggtatt

SEQ ID NO: 192620 - DNA, 25 bp, SARS Virus
atcgtgtacgtcattaacggtatta

SEQ ID NO: 192621 - DNA, 25 bp, SARS Virus
tcgtgtacgtcgataacggtattat

SEQ ID NO: 192622 - DNA, 25 bp, SARS Virus
cgtgtacgtcgtaaacggtattatg

SEQ ID NO: 192623 - DNA, 25 bp, SARS Virus
gtgtacgtcgttaacggtattatgg

SEQ ID NO: 192624 - DNA, 25 bp, SARS Virus
tgtacgtcgttaacggtattatggt

SEQ ID NO: 192625 - DNA, 25 bp, SARS Virus
gtacgtcgttaaaggtattatggtt

SEQ ID NO: 192626 - DNA, 25 bp, SARS Virus
tacgtcgttaacagtattatggttc

SEQ ID NO: 192627 - DNA, 25 bp, SARS Virus
acgtcgttaacgatattatggttct

SEQ ID NO: 192628 - DNA, 25 bp, SARS Virus
cgtcgttaacggaattatggttctc

SEQ ID NO: 192629 - DNA, 25 bp, SARS Virus
gtcgttaacggtattatggttctca

SEQ ID NO: 192630 - DNA, 25 bp, SARS Virus
tcgttaacggtaatatggttctcat

SEQ ID NO: 192631 - DNA, 25 bp, SARS Virus
cgttaacggtataatggttctcatt

SEQ ID NO: 192632 - DNA, 25 bp, SARS Virus
gttaacggtattatggttctcattt

SEQ ID NO: 192633 - DNA, 25 bp, SARS Virus
ttaacggtattaaggttctcattta

SEQ ID NO: 192634 - DNA, 25 bp, SARS Virus
taacggtattatagttctcatttac

SEQ ID NO: 192635 - DNA, 25 bp, SARS Virus
aacggtattatgattctcatttacc

SEQ ID NO: 192636 - DNA, 25 bp, SARS Virus
acggtattatggatctcatttaccg

SEQ ID NO: 192637 - DNA, 25 bp, SARS Virus
cggtattatggtactcatttaccgt

SEQ ID NO: 192638 - DNA, 25 bp, SARS Virus
ggtattatggttatcatttaccgtt

SEQ ID NO: 192639 - DNA, 25 bp, SARS Virus
gtattatggttcacatttaccgttc

SEQ ID NO: 192640 - DNA, 25 bp, SARS Virus
tattatggttctaatttaccgttct

SEQ ID NO: 192641 - DNA, 25 bp, SARS Virus
attatggttctcatttaccgttctt

SEQ ID NO: 192642 - DNA, 25 bp, SARS Virus
ttatggttctcaattaccgttcttt

SEQ ID NO: 192643 - DNA, 25 bp, SARS Virus
tatggttctcatataccgttctttc

SEQ ID NO: 192644 - DNA, 25 bp, SARS Virus
atggttctcattaaccgttctttcg

SEQ ID NO: 192645 - DNA, 25 bp, SARS Virus
tggttctcatttaccgttctttcgt

SEQ ID NO: 192646 - DNA, 25 bp, SARS Virus
ggttctcatttaacgttctttcgta

SEQ ID NO: 192647 - DNA, 25 bp, SARS Virus
gttctcatttacagttctttcgtaa

SEQ ID NO: 192648 - DNA, 25 bp, SARS Virus
ttctcatttaccattctttcgtaag

SEQ ID NO: 192649 - DNA, 25 bp, SARS Virus
tctcatttaccgatctttcgtaaga

SEQ ID NO: 192650 - DNA, 25 bp, SARS Virus
ctcatttaccgtactttcgtaagag

SEQ ID NO: 192651 - DNA, 25 bp, SARS Virus
tcatttaccgttatttcgtaagagc

SEQ ID NO: 192652 - DNA, 25 bp, SARS Virus
catttaccgttcattcgtaagagca

SEQ ID NO: 192653 - DNA, 25 bp, SARS Virus
atttaccgttctatcgtaagagcat

SEQ ID NO: 192654 - DNA, 25 bp, SARS Virus
tttaccgttcttacgtaagagcatt

SEQ ID NO: 192655 - DNA, 25 bp, SARS Virus
ttaccgttctttagtaagagcattt

SEQ ID NO: 192656 - DNA, 25 bp, SARS Virus
taccgttctttcataagagcatttg

SEQ ID NO: 192657 - DNA, 25 bp, SARS Virus
accgttctttcgaaagagcatttgt

SEQ ID NO: 192658 - DNA, 25 bp, SARS Virus
ccgttctttcgtaagagcatttgtt

SEQ ID NO: 192659 - DNA, 25 bp, SARS Virus
cgttctttcgtaagagcatttgttt

SEQ ID NO: 192660 - DNA, 25 bp, SARS Virus
gttctttcgtaaaagcatttgtttc

SEQ ID NO: 192661 - DNA, 25 bp, SARS Virus
ttctttcgtaagagcatttgtttct

SEQ ID NO: 192662 - DNA, 25 bp, SARS Virus
tctttcgtaagaacatttgtttctt

SEQ ID NO: 192663 - DNA, 25 bp, SARS Virus
ctttcgtaagagaatttgtttcttt

SEQ ID NO: 192664 - DNA, 25 bp, SARS Virus
tttcgtaagagcatttgtttctttt

SEQ ID NO: 192665 - DNA, 25 bp, SARS Virus
ttcgtaagagcaattgtttcttttt

SEQ ID NO: 192666 - DNA, 25 bp, SARS Virus
tcgtaagagcatatgtttctttttg

SEQ ID NO: 192667 - DNA, 25 bp, SARS Virus
cgtaagagcattagtttctttttgt

SEQ ID NO: 192668 - DNA, 25 bp, SARS Virus
gtaagagcatttatttctttttgtc

SEQ ID NO: 192669 - DNA, 25 bp, SARS Virus
taagagcatttgattctttttgtca

SEQ ID NO: 192670 - DNA, 25 bp, SARS Virus
aagagcatttgtatctttttgtcac

SEQ ID NO: 192671 - DNA, 25 bp, SARS Virus
agagcatttgttactttttgtcact

SEQ ID NO: 192672 - DNA, 25 bp, SARS Virus
gagcatttgtttatttttgtcactg

SEQ ID NO: 192673 - DNA, 25 bp, SARS Virus
agcatttgtttcattttgtcactgg

SEQ ID NO: 192674 - DNA, 25 bp, SARS Virus
gcatttgtttctatttgtcactggt

SEQ ID NO: 192675 - DNA, 25 bp, SARS Virus
catttgtttcttattgtcactggtg

SEQ ID NO: 192676 - DNA, 25 bp, SARS Virus
atttgtttctttatgtcactggtga

SEQ ID NO: 192677 - DNA, 25 bp, SARS Virus
tttgtttcttttagtcactggtgac

SEQ ID NO: 192678 - DNA, 25 bp, SARS Virus
ttgtttctttttatcactggtgaca

SEQ ID NO: 192679 - DNA, 25 bp, SARS Virus
tgtttctttttgacactggtgacac

SEQ ID NO: 192680 - DNA, 25 bp, SARS Virus
gtttctttttgtaactggtgacaca

SEQ ID NO: 192681 - DNA, 25 bp, SARS Virus
tttctttttgtcactggtgacacat

SEQ ID NO: 192682 - DNA, 25 bp, SARS Virus
ttctttttgtcaatggtgacacatg

SEQ ID NO: 192683 - DNA, 25 bp, SARS Virus
tctttttgtcacaggtgacacatga

SEQ ID NO: 192684 - DNA, 25 bp, SARS Virus
ctttttgtcactagtgacacatgaa

SEQ ID NO: 192685 - DNA, 25 bp, SARS Virus
tttttgtcactgatgacacatgaaa

SEQ ID NO: 192686 - DNA, 25 bp, SARS Virus
ttttgtcactggagacacatgaaac

SEQ ID NO: 192687 - DNA, 25 bp, SARS Virus
tttgtcactggtaacacatgaaact

SEQ ID NO: 192688 - DNA, 25 bp, SARS Virus
ttgtcactggtgacacatgaaactt

SEQ ID NO: 192689 - DNA, 25 bp, SARS Virus
tgtcactggtgaaacatgaaacttg

SEQ ID NO: 192690 - DNA, 25 bp, SARS Virus
gtcactggtgacacatgaaacttgt

SEQ ID NO: 192691 - DNA, 25 bp, SARS Virus
tcactggtgacaaatgaaacttgtt

SEQ ID NO: 192692 - DNA, 25 bp, SARS Virus
cactggtgacacatgaaacttgttc

SEQ ID NO: 192693 - DNA, 25 bp, SARS Virus
actggtgacacaagaaacttgttct

SEQ ID NO: 192694 - DNA, 25 bp, SARS Virus
ctggtgacacataaaacttgttctt

SEQ ID NO: 192695 - DNA, 25 bp, SARS Virus
tggtgacacatgaaacttgttctta

SEQ ID NO: 192696 - DNA, 25 bp, SARS Virus
ggtgacacatgaaacttgttcttag

SEQ ID NO: 192697 - DNA, 25 bp, SARS Virus
gtgacacatgaaacttgttcttagt

SEQ ID NO: 192698 - DNA, 25 bp, SARS Virus
tgacacatgaaaattgttcttagtt

SEQ ID NO: 192699 - DNA, 25 bp, SARS Virus
gacacatgaaacatgttcttagtta

SEQ ID NO: 192700 - DNA, 25 bp, SARS Virus
acacatgaaactagttcttagttat

SEQ ID NO: 192701 - DNA, 25 bp, SARS Virus
cacatgaaacttattcttagttatc

SEQ ID NO: 192702 - DNA, 25 bp, SARS Virus
acatgaaacttgatcttagttatca

SEQ ID NO: 192703 - DNA, 25 bp, SARS Virus
catgaaacttgtacttagttatcac

SEQ ID NO: 192704 - DNA, 25 bp, SARS Virus
atgaaacttgttattagttatcact

SEQ ID NO: 192705 - DNA, 25 bp, SARS Virus
tgaaacttgttcatagttatcacta

SEQ ID NO: 192706 - DNA, 25 bp, SARS Virus
gaaacttgttctaagttatcactac

SEQ ID NO: 192707 - DNA, 25 bp, SARS Virus
aaacttgttcttagttatcactaca

SEQ ID NO: 192708 - DNA, 25 bp, SARS Virus
aacttgttcttaattatcactacag

SEQ ID NO: 192709 - DNA, 25 bp, SARS Virus
acttgttcttagatatcactacagt

SEQ ID NO: 192710 - DNA, 25 bp, SARS Virus
cttgttcttagtaatcactacagtt

SEQ ID NO: 192711 - DNA, 25 bp, SARS Virus
ttgttcttagttatcactacagttc

SEQ ID NO: 192712 - DNA, 25 bp, SARS Virus
tgttcttagttaacactacagttct

SEQ ID NO: 192713 - DNA, 25 bp, SARS Virus
gttcttagttataactacagttctt

SEQ ID NO: 192714 - DNA, 25 bp, SARS Virus
ttcttagttatcactacagttcttt

SEQ ID NO: 192715 - DNA, 25 bp, SARS Virus
tcttagttatcaatacagttctttc

SEQ ID NO: 192716 - DNA, 25 bp, SARS Virus
cttagttatcacaacagttctttca

SEQ ID NO: 192717 - DNA, 25 bp, SARS Virus
ttagttatcactacagttctttcaa

SEQ ID NO: 192718 - DNA, 25 bp, SARS Virus
tagttatcactaaagttctttcaat

SEQ ID NO: 192719 - DNA, 25 bp, SARS Virus
agttatcactacagttctttcaatt

SEQ ID NO: 192720 - DNA, 25 bp, SARS Virus
gttatcactacaattctttcaattt

SEQ ID NO: 192721 - DNA, 25 bp, SARS Virus
ttatcactacagatctttcaatttt

SEQ ID NO: 192722 - DNA, 25 bp, SARS Virus
tatcactacagtactttcaattttc

SEQ ID NO: 192723 - DNA, 25 bp, SARS Virus
atcactacagttatttcaattttcg

SEQ ID NO: 192724 - DNA, 25 bp, SARS Virus
tcactacagttcattcaattttcgt

SEQ ID NO: 192725 - DNA, 25 bp, SARS Virus
cactacagttctatcaattttcgta

SEQ ID NO: 192726 - DNA, 25 bp, SARS Virus
actacagttcttacaattttcgtag

SEQ ID NO: 192727 - DNA, 25 bp, SARS Virus
ctacagttctttaaattttcgtagg

SEQ ID NO: 192728 - DNA, 25 bp, SARS Virus
tacagttctttcaattttcgtaggt

SEQ ID NO: 192729 - DNA, 25 bp, SARS Virus
acagttctttcaattttcgtaggtt

SEQ ID NO: 192730 - DNA, 25 bp, SARS Virus
cagttctttcaaatttcgtaggtta

SEQ ID NO: 192731 - DNA, 25 bp, SARS Virus
agttctttcaatattcgtaggttac

SEQ ID NO: 192732 - DNA, 25 bp, SARS Virus
gttctttcaattatcgtaggttact

SEQ ID NO: 192733 - DNA, 25 bp, SARS Virus
ttctttcaatttacgtaggttacta

SEQ ID NO: 192734 - DNA, 25 bp, SARS Virus
tctttcaattttagtaggttactac

SEQ ID NO: 192735 - DNA, 25 bp, SARS Virus
ctttcaattttcataggttactact

SEQ ID NO: 192736 - DNA, 25 bp, SARS Virus
tttcaattttcgaaggttactactc

SEQ ID NO: 192737 - DNA, 25 bp, SARS Virus
ttcaattttcgtaggttactactca

SEQ ID NO: 192738 - DNA, 25 bp, SARS Virus
tcaattttcgtaagttactactcac

SEQ ID NO: 192739 - DNA, 25 bp, SARS Virus
caattttcgtagattactactcacg

SEQ ID NO: 192740 - DNA, 25 bp, SARS Virus
aattttcgtaggatactactcacgg

SEQ ID NO: 192741 - DNA, 25 bp, SARS Virus
attttcgtaggtaactactcacggg

SEQ ID NO: 192742 - DNA, 25 bp, SARS Virus
ttttcgtaggttactactcacggga

SEQ ID NO: 192743 - DNA, 25 bp, SARS Virus
tttcgtaggttaatactcacgggaa

SEQ ID NO: 192744 - DNA, 25 bp, SARS Virus
ttcgtaggttacaactcacgggaat

SEQ ID NO: 192745 - DNA, 25 bp, SARS Virus
tcgtaggttactactcacgggaatt

SEQ ID NO: 192746 - DNA, 25 bp, SARS Virus
cgtaggttactaatcacgggaattg

SEQ ID NO: 192747 - DNA, 25 bp, SARS Virus
gtaggttactacacacgggaattgt

SEQ ID NO: 192748 - DNA, 25 bp, SARS Virus
taggttactactaacgggaattgtt

SEQ ID NO: 192749 - DNA, 25 bp, SARS Virus
aggttactactcacgggaattgtta

SEQ ID NO: 192750 - DNA, 25 bp, SARS Virus
ggttactactcaagggaattgttaa

SEQ ID NO: 192751 - DNA, 25 bp, SARS Virus
gttactactcacaggaattgttaaa

SEQ ID NO: 192752 - DNA, 25 bp, SARS Virus
ttactactcacgagaattgttaaaa

SEQ ID NO: 192753 - DNA, 25 bp, SARS Virus
tactactcacggaaattgttaaaag

SEQ ID NO: 192754 - DNA, 25 bp, SARS Virus
actactcacgggaattgttaaaaga

SEQ ID NO: 192755 - DNA, 25 bp, SARS Virus
ctactcacgggaattgttaaaagaa

SEQ ID NO: 192756 - DNA, 25 bp, SARS Virus
tactcacgggaaatgttaaaagaac

SEQ ID NO: 192757 - DNA, 25 bp, SARS Virus
actcacgggaatagttaaaagaact

SEQ ID NO: 192758 - DNA, 25 bp, SARS Virus
ctcacgggaattattaaaagaactt

SEQ ID NO: 192759 - DNA, 25 bp, SARS Virus
tcacgggaattgataaaagaacttg

SEQ ID NO: 192760 - DNA, 25 bp, SARS Virus
cacgggaattgtaaaaagaacttga

SEQ ID NO: 192761 - DNA, 25 bp, SARS Virus
acgggaattgttaaaagaacttgaa

SEQ ID NO: 192762 - DNA, 25 bp, SARS Virus
cgggaattgttaaaagaacttgaat

SEQ ID NO: 192763 - DNA, 25 bp, SARS Virus
gggaattgttaaaagaacttgaatg

SEQ ID NO: 192764 - DNA, 25 bp, SARS Virus
ggaattgttaaaagaacttgaatgg

SEQ ID NO: 192765 - DNA, 25 bp, SARS Virus
gaattgttaaaaaaacttgaatgga

SEQ ID NO: 192766 - DNA, 25 bp, SARS Virus
aattgttaaaagaacttgaatggaa

SEQ ID NO: 192767 - DNA, 25 bp, SARS Virus
attgttaaaagaacttgaatggaac

SEQ ID NO: 192768 - DNA, 25 bp, SARS Virus
ttgttaaaagaaattgaatggaacc

SEQ ID NO: 192769 - DNA, 25 bp, SARS Virus
tgttaaaagaacatgaatggaacct

SEQ ID NO: 192770 - DNA, 25 bp, SARS Virus
gttaaaagaactagaatggaacctt

SEQ ID NO: 192771 - DNA, 25 bp, SARS Virus
ttaaaagaacttaaatggaaccttc

SEQ ID NO: 192772 - DNA, 25 bp, SARS Virus
taaaagaacttgaatggaaccttcc

SEQ ID NO: 192773 - DNA, 25 bp, SARS Virus
aaaagaacttgaatggaaccttcca

SEQ ID NO: 192774 - DNA, 25 bp, SARS Virus
aaagaacttgaaaggaaccttccat

SEQ ID NO: 192775 - DNA, 25 bp, SARS Virus
aagaacttgaatagaaccttccatt

SEQ ID NO: 192776 - DNA, 25 bp, SARS Virus
agaacttgaatgaaaccttccattg

SEQ ID NO: 192777 - DNA, 25 bp, SARS Virus
gaacttgaatggaaccttccattgt

SEQ ID NO: 192778 - DNA, 25 bp, SARS Virus
aacttgaatggaaccttccattgtg

SEQ ID NO: 192779 - DNA, 25 bp, SARS Virus
acttgaatggaaacttccattgtgg

SEQ ID NO: 192780 - DNA, 25 bp, SARS Virus
cttgaatggaacattccattgtggt

SEQ ID NO: 192781 - DNA, 25 bp, SARS Virus
ttgaatggaaccatccattgtggtc

SEQ ID NO: 192782 - DNA, 25 bp, SARS Virus
tgaatggaacctaccattgtggtct

SEQ ID NO: 192783 - DNA, 25 bp, SARS Virus
gaatggaaccttacattgtggtctc

SEQ ID NO: 192784 - DNA, 25 bp, SARS Virus
aatggaaccttcaattgtggtctcg

SEQ ID NO: 192785 - DNA, 25 bp, SARS Virus
atggaaccttccattgtggtctcgt

SEQ ID NO: 192786 - DNA, 25 bp, SARS Virus
tggaaccttccaatgtggtctcgta

SEQ ID NO: 192787 - DNA, 25 bp, SARS Virus
ggaaccttccatagtggtctcgtaa

SEQ ID NO: 192788 - DNA, 25 bp, SARS Virus
gaaccttccattatggtctcgtaac

SEQ ID NO: 192789 - DNA, 25 bp, SARS Virus
aaccttccattgaggtctcgtaaca

SEQ ID NO: 192790 - DNA, 25 bp, SARS Virus
accttccattgtagtctcgtaacag

SEQ ID NO: 192791 - DNA, 25 bp, SARS Virus
ccttccattgtgatctcgtaacaga

SEQ ID NO: 192792 - DNA, 25 bp, SARS Virus
cttccattgtggactcgtaacagat

SEQ ID NO: 192793 - DNA, 25 bp, SARS Virus
atcgaactagatctcgtaatggtat

SEQ ID NO: 192794 - DNA, 25 bp, SARS Virus
tcgaactagattccgtaatggtatc

SEQ ID NO: 192795 - DNA, 25 bp, SARS Virus
cgaactagatttcgtaatggtatca

SEQ ID NO: 192796 - DNA, 25 bp, SARS Virus
gaactagatttcctaatggtatcat

SEQ ID NO: 192797 - DNA, 25 bp, SARS Virus
aactagatttcgcaatggtatcatc

SEQ ID NO: 192798 - DNA, 25 bp, SARS Virus
actagatttcgtcatggtatcatct

SEQ ID NO: 192799 - DNA, 25 bp, SARS Virus
ctagatttcgtactggtatcatctg

SEQ ID NO: 192800 - DNA, 25 bp, SARS Virus
tagatttcgtaacggtatcatctga

SEQ ID NO: 192801 - DNA, 25 bp, SARS Virus
agatttcgtaatcgtatcatctgaa

SEQ ID NO: 192802 - DNA, 25 bp, SARS Virus
gatttcgtaatgctatcatctgaaa

SEQ ID NO: 192803 - DNA, 25 bp, SARS Virus
atttcgtaatggcatcatctgaaac

SEQ ID NO: 192804 - DNA, 25 bp, SARS Virus
tttcgtaatggtctcatctgaaaca

SEQ ID NO: 192805 - DNA, 25 bp, SARS Virus
ttcgtaatggtaccatctgaaacat

SEQ ID NO: 192806 - DNA, 25 bp, SARS Virus
tcgtaatggtatcatctgaaacatt

SEQ ID NO: 192807 - DNA, 25 bp, SARS Virus
cgtaatggtatcctctgaaacattt

SEQ ID NO: 192808 - DNA, 25 bp, SARS Virus
gtaatggtatcacctgaaacatttg

SEQ ID NO: 192809 - DNA, 25 bp, SARS Virus
taatggtatcatctgaaacatttgt

SEQ ID NO: 192810 - DNA, 25 bp, SARS Virus
aatggtatcatccgaaacatttgtt

SEQ ID NO: 192811 - DNA, 25 bp, SARS Virus
atggtatcatctcaaacatttgttc

SEQ ID NO: 192812 - DNA, 25 bp, SARS Virus
tggtatcatctgcaacatttgttca

SEQ ID NO: 192813 - DNA, 25 bp, SARS Virus
ggtatcatctgacacatttgttcac

SEQ ID NO: 192814 - DNA, 25 bp, SARS Virus
gtatcatctgaaccatttgttcaca

SEQ ID NO: 192815 - DNA, 25 bp, SARS Virus
tatcatctgaaacatttgttcacat

SEQ ID NO: 192816 - DNA, 25 bp, SARS Virus
atcatctgaaacctttgttcacatt

SEQ ID NO: 192817 - DNA, 25 bp, SARS Virus
tcatctgaaacacttgttcacatta

SEQ ID NO: 192818 - DNA, 25 bp, SARS Virus
catctgaaacatctgttcacattac

SEQ ID NO: 192819 - DNA, 25 bp, SARS Virus
atctgaaacattcgttcacattact

SEQ ID NO: 192820 - DNA, 25 bp, SARS Virus
tctgaaacatttcttcacattactg

SEQ ID NO: 192821 - DNA, 25 bp, SARS Virus
ctgaaacatttgctcacattactgt

SEQ ID NO: 192822 - DNA, 25 bp, SARS Virus
tgaaacatttgtccacattactgta

SEQ ID NO: 192823 - DNA, 25 bp, SARS Virus
gaaacatttgttcacattactgtaa

SEQ ID NO: 192824 - DNA, 25 bp, SARS Virus
aaacatttgttcccattactgtaag

SEQ ID NO: 192825 - DNA, 25 bp, SARS Virus
aacatttgttcacattactgtaagt

SEQ ID NO: 192826 - DNA, 25 bp, SARS Virus
acatttgttcaccttactgtaagta

SEQ ID NO: 192827 - DNA, 25 bp, SARS Virus
catttgttcacactactgtaagtag

SEQ ID NO: 192828 - DNA, 25 bp, SARS Virus
atttgttcacatcactgtaagtagt

SEQ ID NO: 192829 - DNA, 25 bp, SARS Virus
tttgttcacattcctgtaagtagtc

SEQ ID NO: 192830 - DNA, 25 bp, SARS Virus
ttgttcacattactgtaagtagtca

SEQ ID NO: 192831 - DNA, 25 bp, SARS Virus
tgttcacattaccgtaagtagtcac

SEQ ID NO: 192832 - DNA, 25 bp, SARS Virus
gttcacattactctaagtagtcaca

SEQ ID NO: 192833 - DNA, 25 bp, SARS Virus
ttcacattactgcaagtagtcacag

SEQ ID NO: 192834 - DNA, 25 bp, SARS Virus
tcacattactgtcagtagtcacagg

SEQ ID NO: 192835 - DNA, 25 bp, SARS Virus
cacattactgtacgtagtcacaggt

SEQ ID NO: 192836 - DNA, 25 bp, SARS Virus
acattactgtaactagtcacaggtt

SEQ ID NO: 192837 - DNA, 25 bp, SARS Virus
cattactgtaagcagtcacaggttt

SEQ ID NO: 192838 - DNA, 25 bp, SARS Virus
attactgtaagtcgtcacaggtttg

SEQ ID NO: 192839 - DNA, 25 bp, SARS Virus
ttactgtaagtactcacaggtttgt

SEQ ID NO: 192840 - DNA, 25 bp, SARS Virus
tactgtaagtagccacaggtttgtg

SEQ ID NO: 192841 - DNA, 25 bp, SARS Virus
actgtaagtagtcacaggtttgtgc

SEQ ID NO: 192842 - DNA, 25 bp, SARS Virus
ctgtaagtagtcccaggtttgtgca

SEQ ID NO: 192843 - DNA, 25 bp, SARS Virus
tgtaagtagtcacaggtttgtgcag

SEQ ID NO: 192844 - DNA, 25 bp, SARS Virus
gtaagtagtcaccggtttgtgcaga

SEQ ID NO: 192845 - DNA, 25 bp, SARS Virus
taagtagtcacacgtttgtgcagat

SEQ ID NO: 192846 - DNA, 25 bp, SARS Virus
aagtagtcacagctttgtgcagatc

SEQ ID NO: 192847 - DNA, 25 bp, SARS Virus
agtagtcacaggcttgtgcagatcg

SEQ ID NO: 192848 - DNA, 25 bp, SARS Virus
gtagtcacaggtctgtgcagatcgt

SEQ ID NO: 192849 - DNA, 25 bp, SARS Virus
tagtcacaggttcgtgcagatcgtc

SEQ ID NO: 192850 - DNA, 25 bp, SARS Virus
agtcacaggtttctgcagatcgtcg

SEQ ID NO: 192851 - DNA, 25 bp, SARS Virus
gtcacaggtttgcgcagatcgtcgt

SEQ ID NO: 192852 - DNA, 25 bp, SARS Virus
tcacaggtttgtccagatcgtcgta

SEQ ID NO: 192853 - DNA, 25 bp, SARS Virus
cacaggtttgtgcagatcgtcgtag

SEQ ID NO: 192854 - DNA, 25 bp, SARS Virus
acaggtttgtgccgatcgtcgtagt

SEQ ID NO: 192855 - DNA, 25 bp, SARS Virus
caggtttgtgcacatcgtcgtagta

SEQ ID NO: 192856 - DNA, 25 bp, SARS Virus
aggtttgtgcagctcgtcgtagtag

SEQ ID NO: 192857 - DNA, 25 bp, SARS Virus
ggtttgtgcagaccgtcgtagtagt

SEQ ID NO: 192858 - DNA, 25 bp, SARS Virus
gtttgtgcagatcgtcgtagtagta

SEQ ID NO: 192859 - DNA, 25 bp, SARS Virus
tttgtgcagatcctcgtagtagtat

SEQ ID NO: 192860 - DNA, 25 bp, SARS Virus
ttgtgcagatcgccgtagtagtatt

SEQ ID NO: 192861 - DNA, 25 bp, SARS Virus
tgtgcagatcgtcgtagtagtattt

SEQ ID NO: 192862 - DNA, 25 bp, SARS Virus
gtgcagatcgtcctagtagtatttg

SEQ ID NO: 192863 - DNA, 25 bp, SARS Virus
tgcagatcgtcgcagtagtatttgt

SEQ ID NO: 192864 - DNA, 25 bp, SARS Virus
gcagatcgtcgtcgtagtatttgtc

SEQ ID NO: 192865 - DNA, 25 bp, SARS Virus
cagatcgtcgtactagtatttgtca

SEQ ID NO: 192866 - DNA, 25 bp, SARS Virus
agatcgtcgtagcagtatttgtcac

SEQ ID NO: 192867 - DNA, 25 bp, SARS Virus
gatcgtcgtagtcgtatttgtcacg

SEQ ID NO: 192868 - DNA, 25 bp, SARS Virus
atcgtcgtagtactatttgtcacgc

SEQ ID NO: 192869 - DNA, 25 bp, SARS Virus
tcgtcgtagtagcatttgtcacgct

SEQ ID NO: 192870 - DNA, 25 bp, SARS Virus
cgtcgtagtagtctttgtcacgctc

SEQ ID NO: 192871 - DNA, 25 bp, SARS Virus
gtcgtagtagtacttgtcacgctcg

SEQ ID NO: 192872 - DNA, 25 bp, SARS Virus
tcgtagtagtatctgtcacgctcga

SEQ ID NO: 192873 - DNA, 25 bp, SARS Virus
cgtagtagtattcgtcacgctcgac

SEQ ID NO: 192874 - DNA, 25 bp, SARS Virus
gtagtagtatttctcacgctcgaca

SEQ ID NO: 192875 - DNA, 25 bp, SARS Virus
tagtagtatttgccacgctcgacag

SEQ ID NO: 192876 - DNA, 25 bp, SARS Virus
agtagtatttgtcacgctcgacagt

SEQ ID NO: 192877 - DNA, 25 bp, SARS Virus
gtagtatttgtcccgctcgacagta

SEQ ID NO: 192878 - DNA, 25 bp, SARS Virus
tagtatttgtcacgctcgacagtac

SEQ ID NO: 192879 - DNA, 25 bp, SARS Virus
agtatttgtcaccctcgacagtact

SEQ ID NO: 192880 - DNA, 25 bp, SARS Virus
gtatttgtcacgctcgacagtactc

SEQ ID NO: 192881 - DNA, 25 bp, SARS Virus
tatttgtcacgcccgacagtactct

SEQ ID NO: 192882 - DNA, 25 bp, SARS Virus
atttgtcacgctcgacagtactctt

SEQ ID NO: 192883 - DNA, 25 bp, SARS Virus
tttgtcacgctccacagtactctta

SEQ ID NO: 192884 - DNA, 25 bp, SARS Virus
ttgtcacgctcgccagtactcttat

SEQ ID NO: 192885 - DNA, 25 bp, SARS Virus
tgtcacgctcgacagtactcttatt

SEQ ID NO: 192886 - DNA, 25 bp, SARS Virus
gtcacgctcgaccgtactcttattc

SEQ ID NO: 192887 - DNA, 25 bp, SARS Virus
tcacgctcgacactactcttattcg

SEQ ID NO: 192888 - DNA, 25 bp, SARS Virus
cacgctcgacagcactcttattcgt

SEQ ID NO: 192889 - DNA, 25 bp, SARS Virus
acgctcgacagtcctcttattcgtt

SEQ ID NO: 192890 - DNA, 25 bp, SARS Virus
cgctcgacagtactcttattcgttt

SEQ ID NO: 192891 - DNA, 25 bp, SARS Virus
gctcgacagtacccttattcgtttt

SEQ ID NO: 192892 - DNA, 25 bp, SARS Virus
ctcgacagtactcttattcgttttg

SEQ ID NO: 192893 - DNA, 25 bp, SARS Virus
tcgacagtactcctattcgttttga

SEQ ID NO: 192894 - DNA, 25 bp, SARS Virus
cgacagtactctcattcgttttgat

SEQ ID NO: 192895 - DNA, 25 bp, SARS Virus
gacagtactcttcttcgttttgatt

SEQ ID NO: 192896 - DNA, 25 bp, SARS Virus
acagtactcttactcgttttgattt

SEQ ID NO: 192897 - DNA, 25 bp, SARS Virus
cagtactcttatccgttttgatttc

SEQ ID NO: 192898 - DNA, 25 bp, SARS Virus
agtactcttattcgttttgatttcg

SEQ ID NO: 192899 - DNA, 25 bp, SARS Virus
gtactcttattccttttgatttcga

SEQ ID NO: 192900 - DNA, 25 bp, SARS Virus
tactcttattcgctttgatttcgac

SEQ ID NO: 192901 - DNA, 25 bp, SARS Virus
actcttattcgtcttgatttcgact

SEQ ID NO: 192902 - DNA, 25 bp, SARS Virus
ctcttattcgttctgatttcgactt

SEQ ID NO: 192903 - DNA, 25 bp, SARS Virus
tcttattcgtttcgatttcgacttc

SEQ ID NO: 192904 - DNA, 25 bp, SARS Virus
cttattcgttttcatttcgacttcg

SEQ ID NO: 192905 - DNA, 25 bp, SARS Virus
ttattcgttttgctttcgacttcgt

SEQ ID NO: 192906 - DNA, 25 bp, SARS Virus
tattcgttttgacttcgacttcgta

SEQ ID NO: 192907 - DNA, 25 bp, SARS Virus
attcgttttgatctcgacttcgtat

SEQ ID NO: 192908 - DNA, 25 bp, SARS Virus
ttcgttttgattccgacttcgtatg

SEQ ID NO: 192909 - DNA, 25 bp, SARS Virus
tcgttttgatttcgacttcgtatgt

SEQ ID NO: 192910 - DNA, 25 bp, SARS Virus
cgttttgatttccacttcgtatgta

SEQ ID NO: 192911 - DNA, 25 bp, SARS Virus
gttttgatttcgccttcgtatgtat

SEQ ID NO: 192912 - DNA, 25 bp, SARS Virus
ttttgatttcgacttcgtatgtatt

SEQ ID NO: 192913 - DNA, 25 bp, SARS Virus
tttgatttcgacctcgtatgtattg

SEQ ID NO: 192914 - DNA, 25 bp, SARS Virus
ttgatttcgactccgtatgtattgt

SEQ ID NO: 192915 - DNA, 25 bp, SARS Virus
tgatttcgacttcgtatgtattgtg

SEQ ID NO: 192916 - DNA, 25 bp, SARS Virus
gatttcgacttcctatgtattgtgt

SEQ ID NO: 192917 - DNA, 25 bp, SARS Virus
atttcgacttcgcatgtattgtgtt

SEQ ID NO: 192918 - DNA, 25 bp, SARS Virus
tttcgacttcgtctgtattgtgtta

SEQ ID NO: 192919 - DNA, 25 bp, SARS Virus
ttcgacttcgtacgtattgtgttag

SEQ ID NO: 192920 - DNA, 25 bp, SARS Virus
tcgacttcgtatctattgtgttagg

SEQ ID NO: 192921 - DNA, 25 bp, SARS Virus
cgacttcgtatgcattgtgttagga

SEQ ID NO: 192922 - DNA, 25 bp, SARS Virus
gacttcgtatgtcttgtgttaggaa

SEQ ID NO: 192923 - DNA, 25 bp, SARS Virus
acttcgtatgtactgtgttaggaat

SEQ ID NO: 192924 - DNA, 25 bp, SARS Virus
cttcgtatgtatcgtgttaggaatt

SEQ ID NO: 192925 - DNA, 25 bp, SARS Virus
ttcgtatgtattctgttaggaattc

SEQ ID NO: 192926 - DNA, 25 bp, SARS Virus
tcgtatgtattgcgttaggaattcg

SEQ ID NO: 192927 - DNA, 25 bp, SARS Virus
cgtatgtattgtcttaggaattcgg

SEQ ID NO: 192928 - DNA, 25 bp, SARS Virus
gtatgtattgtgctaggaattcgga

SEQ ID NO: 192929 - DNA, 25 bp, SARS Virus
tatgtattgtgtcaggaattcggat

SEQ ID NO: 192930 - DNA, 25 bp, SARS Virus
atgtattgtgttcggaattcggata

SEQ ID NO: 192931 - DNA, 25 bp, SARS Virus
tgtattgtgttacgaattcggatat

SEQ ID NO: 192932 - DNA, 25 bp, SARS Virus
gtattgtgttagcaattcggatatt

SEQ ID NO: 192933 - DNA, 25 bp, SARS Virus
tattgtgttaggcattcggatattg

SEQ ID NO: 192934 - DNA, 25 bp, SARS Virus
attgtgttaggacttcggatattgg

SEQ ID NO: 192935 - DNA, 25 bp, SARS Virus
ttgtgttaggaactcggatattggt

SEQ ID NO: 192936 - DNA, 25 bp, SARS Virus
tgtgttaggaatccggatattggtc

SEQ ID NO: 192937 - DNA, 25 bp, SARS Virus
gtgttaggaattcggatattggtct

SEQ ID NO: 192938 - DNA, 25 bp, SARS Virus
tgttaggaattccgatattggtctg

SEQ ID NO: 192939 - DNA, 25 bp, SARS Virus
gttaggaattcgcatattggtctgt

SEQ ID NO: 192940 - DNA, 25 bp, SARS Virus
ttaggaattcggctattggtctgtt

SEQ ID NO: 192941 - DNA, 25 bp, SARS Virus
taggaattcggacattggtctgttc

SEQ ID NO: 192942 - DNA, 25 bp, SARS Virus
aggaattcggatcttggtctgttcg

SEQ ID NO: 192943 - DNA, 25 bp, SARS Virus
ggaattcggatactggtctgttcga

SEQ ID NO: 192944 - DNA, 25 bp, SARS Virus
gaattcggatatcggtctgttcgat

SEQ ID NO: 192945 - DNA, 25 bp, SARS Virus
aattcggatattcgtctgttcgatc

SEQ ID NO: 192946 - DNA, 25 bp, SARS Virus
attcggatattgctctgttcgatca

SEQ ID NO: 192947 - DNA, 25 bp, SARS Virus
ttcggatattggcctgttcgatcac

SEQ ID NO: 192948 - DNA, 25 bp, SARS Virus
tcggatattggtctgttcgatcaca

SEQ ID NO: 192949 - DNA, 25 bp, SARS Virus
cggatattggtccgttcgatcacag

SEQ ID NO: 192950 - DNA, 25 bp, SARS Virus
ggatattggtctcttcgatcacagt

SEQ ID NO: 192951 - DNA, 25 bp, SARS Virus
gatattggtctgctcgatcacagtc

SEQ ID NO: 192952 - DNA, 25 bp, SARS Virus
atattggtctgtccgatcacagtcg

SEQ ID NO: 192953 - DNA, 25 bp, SARS Virus
tattggtctgttcgatcacagtcgg

SEQ ID NO: 192954 - DNA, 25 bp, SARS Virus
attggtctgttccatcacagtcggt

SEQ ID NO: 192955 - DNA, 25 bp, SARS Virus
ttggtctgttcgctcacagtcggtt

SEQ ID NO: 192956 - DNA, 25 bp, SARS Virus
tggtctgttcgaccacagtcggtta

SEQ ID NO: 192957 - DNA, 25 bp, SARS Virus
ggtctgttcgatcacagtcggttaa

SEQ ID NO: 192958 - DNA, 25 bp, SARS Virus
gtctgttcgatcccagtcggttaag

SEQ ID NO: 192959 - DNA, 25 bp, SARS Virus
tctgttcgatcacagtcggttaagt

SEQ ID NO: 192960 - DNA, 25 bp, SARS Virus
ctgttcgatcaccgtcggttaagtt

SEQ ID NO: 192961 - DNA, 25 bp, SARS Virus
tgttcgatcacactcggttaagttc

SEQ ID NO: 192962 - DNA, 25 bp, SARS Virus
gttcgatcacagccggttaagttcg

SEQ ID NO: 192963 - DNA, 25 bp, SARS Virus
ttcgatcacagtcggttaagttcgg

SEQ ID NO: 192964 - DNA, 25 bp, SARS Virus
tcgatcacagtccgttaagttcggt

SEQ ID NO: 192965 - DNA, 25 bp, SARS Virus
cgatcacagtcgcttaagttcggta

SEQ ID NO: 192966 - DNA, 25 bp, SARS Virus
gatcacagtcggctaagttcggtac

SEQ ID NO: 192967 - DNA, 25 bp, SARS Virus
atcacagtcggtcaagttcggtaca

SEQ ID NO: 192968 - DNA, 25 bp, SARS Virus
tcacagtcggttcagttcggtacag

SEQ ID NO: 192969 - DNA, 25 bp, SARS Virus
cacagtcggttacgttcggtacagt

SEQ ID NO: 192970 - DNA, 25 bp, SARS Virus
acagtcggttaacttcggtacagta

SEQ ID NO: 192971 - DNA, 25 bp, SARS Virus
cagtcggttaagctcggtacagtac

SEQ ID NO: 192972 - DNA, 25 bp, SARS Virus
agtcggttaagtccggtacagtact

SEQ ID NO: 192973 - DNA, 25 bp, SARS Virus
gtcggttaagttcggtacagtacta

SEQ ID NO: 192974 - DNA, 25 bp, SARS Virus
tcggttaagttccgtacagtactat

SEQ ID NO: 192975 - DNA, 25 bp, SARS Virus
cggttaagttcgctacagtactatg

SEQ ID NO: 192976 - DNA, 25 bp, SARS Virus
ggttaagttcggcacagtactatgc

SEQ ID NO: 192977 - DNA, 25 bp, SARS Virus
gttaagttcggtccagtactatgcg

SEQ ID NO: 192978 - DNA, 25 bp, SARS Virus
ttaagttcggtacagtactatgcgt

SEQ ID NO: 192979 - DNA, 25 bp, SARS Virus
taagttcggtaccgtactatgcgta

SEQ ID NO: 192980 - DNA, 25 bp, SARS Virus
aagttcggtacactactatgcgtag

SEQ ID NO: 192981 - DNA, 25 bp, SARS Virus
agttcggtacagcactatgcgtagt

SEQ ID NO: 192982 - DNA, 25 bp, SARS Virus
gttcggtacagtcctatgcgtagtg

SEQ ID NO: 192983 - DNA, 25 bp, SARS Virus
ttcggtacagtactatgcgtagtgg

SEQ ID NO: 192984 - DNA, 25 bp, SARS Virus
tcggtacagtaccatgcgtagtggg

SEQ ID NO: 192985 - DNA, 25 bp, SARS Virus
cggtacagtactctgcgtagtgggt

SEQ ID NO: 192986 - DNA, 25 bp, SARS Virus
ggtacagtactacgcgtagtgggtc

SEQ ID NO: 192987 - DNA, 25 bp, SARS Virus
gtacagtactatccgtagtgggtcg

SEQ ID NO: 192988 - DNA, 25 bp, SARS Virus
tacagtactatgcgtagtgggtcga

SEQ ID NO: 192989 - DNA, 25 bp, SARS Virus
acagtactatgcctagtgggtcgat

SEQ ID NO: 192990 - DNA, 25 bp, SARS Virus
cagtactatgcgcagtgggtcgatc

SEQ ID NO: 192991 - DNA, 25 bp, SARS Virus
agtactatgcgtcgtgggtcgatcg

SEQ ID NO: 192992 - DNA, 25 bp, SARS Virus
gtactatgcgtactgggtcgatcgt

SEQ ID NO: 192993 - DNA, 25 bp, SARS Virus
tactatgcgtagcgggtcgatcgtc

SEQ ID NO: 192994 - DNA, 25 bp, SARS Virus
actatgcgtagtcggtcgatcgtcc

SEQ ID NO: 192995 - DNA, 25 bp, SARS Virus
ctatgcgtagtgcgtcgatcgtccg

SEQ ID NO: 192996 - DNA, 25 bp, SARS Virus
tatgcgtagtggctcgatcgtccgt

SEQ ID NO: 192997 - DNA, 25 bp, SARS Virus
atgcgtagtgggccgatcgtccgta

SEQ ID NO: 192998 - DNA, 25 bp, SARS Virus
tgcgtagtgggtcgatcgtccgtac

SEQ ID NO: 192999 - DNA, 25 bp, SARS Virus
gcgtagtgggtccatcgtccgtaca

SEQ ID NO: 193000 - DNA, 25 bp, SARS Virus
cgtagtgggtcgctcgtccgtacat

SEQ ID NO: 193001 - DNA, 25 bp, SARS Virus
gtagtgggtcgaccgtccgtacatc

SEQ ID NO: 193002 - DNA, 25 bp, SARS Virus
tagtgggtcgatcgtccgtacatct

SEQ ID NO: 193003 - DNA, 25 bp, SARS Virus
agtgggtcgatcctccgtacatctg

SEQ ID NO: 193004 - DNA, 25 bp, SARS Virus
gtgggtcgatcgcccgtacatctgg

SEQ ID NO: 193005 - DNA, 25 bp, SARS Virus
tgggtcgatcgtccgtacatctggt

SEQ ID NO: 193006 - DNA, 25 bp, SARS Virus
gggtcgatcgtccgtacatctggta

SEQ ID NO: 193007 - DNA, 25 bp, SARS Virus
ggtcgatcgtccctacatctggtat

SEQ ID NO: 193008 - DNA, 25 bp, SARS Virus
gtcgatcgtccgcacatctggtata

SEQ ID NO: 193009 - DNA, 25 bp, SARS Virus
tcgatcgtccgtccatctggtataa

SEQ ID NO: 193010 - DNA, 25 bp, SARS Virus
cgatcgtccgtacatctggtataat

SEQ ID NO: 193011 - DNA, 25 bp, SARS Virus
gatcgtccgtacctctggtataatt

SEQ ID NO: 193012 - DNA, 25 bp, SARS Virus
atcgtccgtacacctggtataattt

SEQ ID NO: 193013 - DNA, 25 bp, SARS Virus
tcgtccgtacatctggtataatttc

SEQ ID NO: 193014 - DNA, 25 bp, SARS Virus
cgtccgtacatccggtataatttca

SEQ ID NO: 193015 - DNA, 25 bp, SARS Virus
gtccgtacatctcgtataatttcat

SEQ ID NO: 193016 - DNA, 25 bp, SARS Virus
tccgtacatctgctataatttcatt

SEQ ID NO: 193017 - DNA, 25 bp, SARS Virus
ccgtacatctggcataatttcattc

SEQ ID NO: 193018 - DNA, 25 bp, SARS Virus
cgtacatctggtctaatttcattcg

SEQ ID NO: 193019 - DNA, 25 bp, SARS Virus
gtacatctggtacaatttcattcgt

SEQ ID NO: 193020 - DNA, 25 bp, SARS Virus
tacatctggtatcatttcattcgtt

SEQ ID NO: 193021 - DNA, 25 bp, SARS Virus
acatctggtatactttcattcgttg

SEQ ID NO: 193022 - DNA, 25 bp, SARS Virus
catctggtataacttcattcgttga

SEQ ID NO: 193023 - DNA, 25 bp, SARS Virus
atctggtataatctcattcgttgac

SEQ ID NO: 193024 - DNA, 25 bp, SARS Virus
tctggtataattccattcgttgaca

SEQ ID NO: 193025 - DNA, 25 bp, SARS Virus
ctggtataatttcattcgttgacaa

SEQ ID NO: 193026 - DNA, 25 bp, SARS Virus
tggtataatttccttcgttgacaac

SEQ ID NO: 193027 - DNA, 25 bp, SARS Virus
ggtataatttcactcgttgacaacg

SEQ ID NO: 193028 - DNA, 25 bp, SARS Virus
gtataatttcatccgttgacaacgt

SEQ ID NO: 193029 - DNA, 25 bp, SARS Virus
tataatttcattcgttgacaacgtt

SEQ ID NO: 193030 - DNA, 25 bp, SARS Virus
ataatttcattccttgacaacgttc

SEQ ID NO: 193031 - DNA, 25 bp, SARS Virus
taatttcattcgctgacaacgttct

SEQ ID NO: 193032 - DNA, 25 bp, SARS Virus
aatttcattcgtcgacaacgttctc

SEQ ID NO: 193033 - DNA, 25 bp, SARS Virus
atttcattcgttcacaacgttctct

SEQ ID NO: 193034 - DNA, 25 bp, SARS Virus
tttcattcgttgccaacgttctctt

SEQ ID NO: 193035 - DNA, 25 bp, SARS Virus
ttcattcgttgacaacgttctcttc

SEQ ID NO: 193036 - DNA, 25 bp, SARS Virus
tcattcgttgaccacgttctcttcc

SEQ ID NO: 193037 - DNA, 25 bp, SARS Virus
cattcgttgacaccgttctcttcca

SEQ ID NO: 193038 - DNA, 25 bp, SARS Virus
attcgttgacaacgttctcttccat

SEQ ID NO: 193039 - DNA, 25 bp, SARS Virus
ttcgttgacaaccttctcttccatt

SEQ ID NO: 193040 - DNA, 25 bp, SARS Virus
tcgttgacaacgctctcttccattg

SEQ ID NO: 193041 - DNA, 25 bp, SARS Virus
cgttgacaacgtcctcttccattgt

SEQ ID NO: 193042 - DNA, 25 bp, SARS Virus
gttgacaacgttctcttccattgtc

SEQ ID NO: 193043 - DNA, 25 bp, SARS Virus
ttgacaacgttcccttccattgtct

SEQ ID NO: 193044 - DNA, 25 bp, SARS Virus
tgacaacgttctcttccattgtctt

SEQ ID NO: 193045 - DNA, 25 bp, SARS Virus
gacaacgttctcctccattgtcttt

SEQ ID NO: 193046 - DNA, 25 bp, SARS Virus
acaacgttctctcccattgtctttg

SEQ ID NO: 193047 - DNA, 25 bp, SARS Virus
caacgttctcttccattgtctttgt

SEQ ID NO: 193048 - DNA, 25 bp, SARS Virus
aacgttctcttccattgtctttgtt

SEQ ID NO: 193049 - DNA, 25 bp, SARS Virus
acgttctcttcccttgtctttgttc

SEQ ID NO: 193050 - DNA, 25 bp, SARS Virus
cgttctcttccactgtctttgttcg

SEQ ID NO: 193051 - DNA, 25 bp, SARS Virus
gttctcttccatcgtctttgttcgt

SEQ ID NO: 193052 - DNA, 25 bp, SARS Virus
ttctcttccattctctttgttcgtg

SEQ ID NO: 193053 - DNA, 25 bp, SARS Virus
tctcttccattgcctttgttcgtgt

SEQ ID NO: 193054 - DNA, 25 bp, SARS Virus
ctcttccattgtctttgttcgtgtt

SEQ ID NO: 193055 - DNA, 25 bp, SARS Virus
tcttccattgtccttgttcgtgttc

SEQ ID NO: 193056 - DNA, 25 bp, SARS Virus
cttccattgtctctgttcgtgttct

SEQ ID NO: 193057 - DNA, 25 bp, SARS Virus
ttccattgtcttcgttcgtgttctt

SEQ ID NO: 193058 - DNA, 25 bp, SARS Virus
tccattgtctttcttcgtgttctta

SEQ ID NO: 193059 - DNA, 25 bp, SARS Virus
ccattgtctttgctcgtgttcttac

SEQ ID NO: 193060 - DNA, 25 bp, SARS Virus
cattgtctttgtccgtgttcttacg

SEQ ID NO: 193061 - DNA, 25 bp, SARS Virus
attgtctttgttcgtgttcttacgc

SEQ ID NO: 193062 - DNA, 25 bp, SARS Virus
ttgtctttgttcctgttcttacgca

SEQ ID NO: 193063 - DNA, 25 bp, SARS Virus
tgtctttgttcgcgttcttacgcac

SEQ ID NO: 193064 - DNA, 25 bp, SARS Virus
gtctttgttcgtcttcttacgcacg

SEQ ID NO: 193065 - DNA, 25 bp, SARS Virus
tctttgttcgtgctcttacgcacga

SEQ ID NO: 193066 - DNA, 25 bp, SARS Virus
ctttgttcgtgtccttacgcacgaa

SEQ ID NO: 193067 - DNA, 25 bp, SARS Virus
tttgttcgtgttcttacgcacgaat

SEQ ID NO: 193068 - DNA, 25 bp, SARS Virus
ttgttcgtgttcctacgcacgaata

SEQ ID NO: 193069 - DNA, 25 bp, SARS Virus
tgttcgtgttctcacgcacgaatac

SEQ ID NO: 193070 - DNA, 25 bp, SARS Virus
gttcgtgttcttccgcacgaatacg

SEQ ID NO: 193071 - DNA, 25 bp, SARS Virus
ttcgtgttcttacgcacgaatacga

SEQ ID NO: 193072 - DNA, 25 bp, SARS Virus
tcgtgttcttacccacgaatacgaa

SEQ ID NO: 193073 - DNA, 25 bp, SARS Virus
cgtgttcttacgcacgaatacgaat

SEQ ID NO: 193074 - DNA, 25 bp, SARS Virus
gtgttcttacgcccgaatacgaatt

SEQ ID NO: 193075 - DNA, 25 bp, SARS Virus
tgttcttacgcacgaatacgaattg

SEQ ID NO: 193076 - DNA, 25 bp, SARS Virus
gttcttacgcaccaatacgaattgt

SEQ ID NO: 193077 - DNA, 25 bp, SARS Virus
ttcttacgcacgcatacgaattgtt

SEQ ID NO: 193078 - DNA, 25 bp, SARS Virus
tcttacgcacgactacgaattgttc

SEQ ID NO: 193079 - DNA, 25 bp, SARS Virus
cttacgcacgaacacgaattgttcg

SEQ ID NO: 193080 - DNA, 25 bp, SARS Virus
ttacgcacgaatccgaattgttcgt

SEQ ID NO: 193081 - DNA, 25 bp, SARS Virus
tacgcacgaatacgaattgttcgtc

SEQ ID NO: 193082 - DNA, 25 bp, SARS Virus
acgcacgaataccaattgttcgtcg

SEQ ID NO: 193083 - DNA, 25 bp, SARS Virus
cgcacgaatacgcattgttcgtcgt

SEQ ID NO: 193084 - DNA, 25 bp, SARS Virus
gcacgaatacgacttgttcgtcgta

SEQ ID NO: 193085 - DNA, 25 bp, SARS Virus
cacgaatacgaactgttcgtcgtat

SEQ ID NO: 193086 - DNA, 25 bp, SARS Virus
acgaatacgaatcgttcgtcgtatc

SEQ ID NO: 193087 - DNA, 25 bp, SARS Virus
cgaatacgaattcttcgtcgtatcg

SEQ ID NO: 193088 - DNA, 25 bp, SARS Virus
gaatacgaattgctcgtcgtatcgt

SEQ ID NO: 193089 - DNA, 25 bp, SARS Virus
aatacgaattgtccgtcgtatcgtg

SEQ ID NO: 193090 - DNA, 25 bp, SARS Virus
atacgaattgttcgtcgtatcgtgt

SEQ ID NO: 193091 - DNA, 25 bp, SARS Virus
tacgaattgttcctcgtatcgtgta

SEQ ID NO: 193092 - DNA, 25 bp, SARS Virus
acgaattgttcgccgtatcgtgtac

SEQ ID NO: 193093 - DNA, 25 bp, SARS Virus
cgaattgttcgtcgtatcgtgtacg

SEQ ID NO: 193094 - DNA, 25 bp, SARS Virus
gaattgttcgtcctatcgtgtacgt

SEQ ID NO: 193095 - DNA, 25 bp, SARS Virus
aattgttcgtcgcatcgtgtacgtc

SEQ ID NO: 193096 - DNA, 25 bp, SARS Virus
attgttcgtcgtctcgtgtacgtcg

SEQ ID NO: 193097 - DNA, 25 bp, SARS Virus
ttgttcgtcgtaccgtgtacgtcgt

SEQ ID NO: 193098 - DNA, 25 bp, SARS Virus
tgttcgtcgtatcgtgtacgtcgtt

SEQ ID NO: 193099 - DNA, 25 bp, SARS Virus
gttcgtcgtatcctgtacgtcgtta

SEQ ID NO: 193100 - DNA, 25 bp, SARS Virus
ttcgtcgtatcgcgtacgtcgttaa

SEQ ID NO: 193101 - DNA, 25 bp, SARS Virus
tcgtcgtatcgtctacgtcgttaac

SEQ ID NO: 193102 - DNA, 25 bp, SARS Virus
cgtcgtatcgtgcacgtcgttaacg

SEQ ID NO: 193103 - DNA, 25 bp, SARS Virus
gtcgtatcgtgtccgtcgttaacgg

SEQ ID NO: 193104 - DNA, 25 bp, SARS Virus
tcgtatcgtgtacgtcgttaacggt

SEQ ID NO: 193105 - DNA, 25 bp, SARS Virus
cgtatcgtgtacctcgttaacggta

SEQ ID NO: 193106 - DNA, 25 bp, SARS Virus
gtatcgtgtacgccgttaacggtat

SEQ ID NO: 193107 - DNA, 25 bp, SARS Virus
tatcgtgtacgtcgttaacggtatt

SEQ ID NO: 193108 - DNA, 25 bp, SARS Virus
atcgtgtacgtccttaacggtatta

SEQ ID NO: 193109 - DNA, 25 bp, SARS Virus
tcgtgtacgtcgctaacggtattat

SEQ ID NO: 193110 - DNA, 25 bp, SARS Virus
cgtgtacgtcgtcaacggtattatg

SEQ ID NO: 193111 - DNA, 25 bp, SARS Virus
gtgtacgtcgttcacggtattatgg

SEQ ID NO: 193112 - DNA, 25 bp, SARS Virus
tgtacgtcgttaccggtattatggt

SEQ ID NO: 193113 - DNA, 25 bp, SARS Virus
gtacgtcgttaacggtattatggtt

SEQ ID NO: 193114 - DNA, 25 bp, SARS Virus
tacgtcgttaaccgtattatggttc

SEQ ID NO: 193115 - DNA, 25 bp, SARS Virus
acgtcgttaacgctattatggttct

SEQ ID NO: 193116 - DNA, 25 bp, SARS Virus
cgtcgttaacggcattatggttctc

SEQ ID NO: 193117 - DNA, 25 bp, SARS Virus
gtcgttaacggtcttatggttctca

SEQ ID NO: 193118 - DNA, 25 bp, SARS Virus
tcgttaacggtactatggttctcat

SEQ ID NO: 193119 - DNA, 25 bp, SARS Virus
cgttaacggtatcatggttctcatt

SEQ ID NO: 193120 - DNA, 25 bp, SARS Virus
gttaacggtattctggttctcattt

SEQ ID NO: 193121 - DNA, 25 bp, SARS Virus
ttaacggtattacggttctcattta

SEQ ID NO: 193122 - DNA, 25 bp, SARS Virus
taacggtattatcgttctcatttac

SEQ ID NO: 193123 - DNA, 25 bp, SARS Virus
aacggtattatgcttctcatttacc

SEQ ID NO: 193124 - DNA, 25 bp, SARS Virus
acggtattatggctctcatttaccg

SEQ ID NO: 193125 - DNA, 25 bp, SARS Virus
cggtattatggtcctcatttaccgt

SEQ ID NO: 193126 - DNA, 25 bp, SARS Virus
ggtattatggttctcatttaccgtt

SEQ ID NO: 193127 - DNA, 25 bp, SARS Virus
gtattatggttcccatttaccgttc

SEQ ID NO: 193128 - DNA, 25 bp, SARS Virus
tattatggttctcatttaccgttct

SEQ ID NO: 193129 - DNA, 25 bp, SARS Virus
attatggttctcctttaccgttctt

SEQ ID NO: 193130 - DNA, 25 bp, SARS Virus
ttatggttctcacttaccgttcttt

SEQ ID NO: 193131 - DNA, 25 bp, SARS Virus
tatggttctcatctaccgttctttc

SEQ ID NO: 193132 - DNA, 25 bp, SARS Virus
atggttctcattcaccgttctttcg

SEQ ID NO: 193133 - DNA, 25 bp, SARS Virus
tggttctcatttcccgttctttcgt

SEQ ID NO: 193134 - DNA, 25 bp, SARS Virus
ggttctcatttaccgttctttcgta

SEQ ID NO: 193135 - DNA, 25 bp, SARS Virus
gttctcatttaccgttctttcgtaa

SEQ ID NO: 193136 - DNA, 25 bp, SARS Virus
ttctcatttacccttctttcgtaag

SEQ ID NO: 193137 - DNA, 25 bp, SARS Virus
tctcatttaccgctctttcgtaaga

SEQ ID NO: 193138 - DNA, 25 bp, SARS Virus
ctcatttaccgtcctttcgtaagag

SEQ ID NO: 193139 - DNA, 25 bp, SARS Virus
tcatttaccgttctttcgtaagagc

SEQ ID NO: 193140 - DNA, 25 bp, SARS Virus
catttaccgttccttcgtaagagca

SEQ ID NO: 193141 - DNA, 25 bp, SARS Virus
atttaccgttctctcgtaagagcat

SEQ ID NO: 193142 - DNA, 25 bp, SARS Virus
tttaccgttcttccgtaagagcatt

SEQ ID NO: 193143 - DNA, 25 bp, SARS Virus
ttaccgttctttcgtaagagcattt

SEQ ID NO: 193144 - DNA, 25 bp, SARS Virus
taccgttctttcctaagagcatttg

SEQ ID NO: 193145 - DNA, 25 bp, SARS Virus
accgttctttcgcaagagcatttgt

SEQ ID NO: 193146 - DNA, 25 bp, SARS Virus
ccgttctttcgtcagagcatttgtt

SEQ ID NO: 193147 - DNA, 25 bp, SARS Virus
cgttctttcgtacgagcatttgttt

SEQ ID NO: 193148 - DNA, 25 bp, SARS Virus
gttctttcgtaacagcatttgtttc

SEQ ID NO: 193149 - DNA, 25 bp, SARS Virus
ttctttcgtaagcgcatttgtttct

SEQ ID NO: 193150 - DNA, 25 bp, SARS Virus
tctttcgtaagaccatttgtttctt

SEQ ID NO: 193151 - DNA, 25 bp, SARS Virus
ctttcgtaagagcatttgtttcttt

SEQ ID NO: 193152 - DNA, 25 bp, SARS Virus
tttcgtaagagcctttgtttctttt

SEQ ID NO: 193153 - DNA, 25 bp, SARS Virus
ttcgtaagagcacttgtttcttttt

SEQ ID NO: 193154 - DNA, 25 bp, SARS Virus
tcgtaagagcatctgtttctttttg

SEQ ID NO: 193155 - DNA, 25 bp, SARS Virus
cgtaagagcattcgtttctttttgt

SEQ ID NO: 193156 - DNA, 25 bp, SARS Virus
gtaagagcatttctttctttttgtc

SEQ ID NO: 193157 - DNA, 25 bp, SARS Virus
taagagcatttgcttctttttgtca

SEQ ID NO: 193158 - DNA, 25 bp, SARS Virus
aagagcatttgtctctttttgtcac

SEQ ID NO: 193159 - DNA, 25 bp, SARS Virus
agagcatttgttcctttttgtcact

SEQ ID NO: 193160 - DNA, 25 bp, SARS Virus
gagcatttgtttctttttgtcactg

SEQ ID NO: 193161 - DNA, 25 bp, SARS Virus
agcatttgtttccttttgtcactgg

SEQ ID NO: 193162 - DNA, 25 bp, SARS Virus
gcatttgtttctctttgtcactggt

SEQ ID NO: 193163 - DNA, 25 bp, SARS Virus
catttgtttcttcttgtcactggtg

SEQ ID NO: 193164 - DNA, 25 bp, SARS Virus
atttgtttctttctgtcactggtga

SEQ ID NO: 193165 - DNA, 25 bp, SARS Virus
tttgtttcttttcgtcactggtgac

SEQ ID NO: 193166 - DNA, 25 bp, SARS Virus
ttgtttctttttctcactggtgaca

SEQ ID NO: 193167 - DNA, 25 bp, SARS Virus
tgtttctttttgccactggtgacac

SEQ ID NO: 193168 - DNA, 25 bp, SARS Virus
gtttctttttgtcactggtgacaca

SEQ ID NO: 193169 - DNA, 25 bp, SARS Virus
tttctttttgtccctggtgacacat

SEQ ID NO: 193170 - DNA, 25 bp, SARS Virus
ttctttttgtcactggtgacacatg

SEQ ID NO: 193171 - DNA, 25 bp, SARS Virus
tctttttgtcaccggtgacacatga

SEQ ID NO: 193172 - DNA, 25 bp, SARS Virus
ctttttgtcactcgtgacacatgaa

SEQ ID NO: 193173 - DNA, 25 bp, SARS Virus
tttttgtcactgctgacacatgaaa

SEQ ID NO: 193174 - DNA, 25 bp, SARS Virus
ttttgtcactggcgacacatgaaac

SEQ ID NO: 193175 - DNA, 25 bp, SARS Virus
tttgtcactggtcacacatgaaact

SEQ ID NO: 193176 - DNA, 25 bp, SARS Virus
ttgtcactggtgccacatgaaactt

SEQ ID NO: 193177 - DNA, 25 bp, SARS Virus
tgtcactggtgacacatgaaacttg

SEQ ID NO: 193178 - DNA, 25 bp, SARS Virus
gtcactggtgacccatgaaacttgt

SEQ ID NO: 193179 - DNA, 25 bp, SARS Virus
tcactggtgacacatgaaacttgtt

SEQ ID NO: 193180 - DNA, 25 bp, SARS Virus
cactggtgacacctgaaacttgttc

SEQ ID NO: 193181 - DNA, 25 bp, SARS Virus
actggtgacacacgaaacttgttct

SEQ ID NO: 193182 - DNA, 25 bp, SARS Virus
ctggtgacacatcaaacttgttctt

SEQ ID NO: 193183 - DNA, 25 bp, SARS Virus
tggtgacacatgcaacttgttctta

SEQ ID NO: 193184 - DNA, 25 bp, SARS Virus
ggtgacacatgacacttgttcttag

SEQ ID NO: 193185 - DNA, 25 bp, SARS Virus
gtgacacatgaaccttgttcttagt

SEQ ID NO: 193186 - DNA, 25 bp, SARS Virus
tgacacatgaaacttgttcttagtt

SEQ ID NO: 193187 - DNA, 25 bp, SARS Virus
gacacatgaaacctgttcttagtta

SEQ ID NO: 193188 - DNA, 25 bp, SARS Virus
acacatgaaactcgttcttagttat

SEQ ID NO: 193189 - DNA, 25 bp, SARS Virus
cacatgaaacttcttcttagttatc

SEQ ID NO: 193190 - DNA, 25 bp, SARS Virus
acatgaaacttgctcttagttatca

SEQ ID NO: 193191 - DNA, 25 bp, SARS Virus
catgaaacttgtccttagttatcac

SEQ ID NO: 193192 - DNA, 25 bp, SARS Virus
atgaaacttgttcttagttatcact

SEQ ID NO: 193193 - DNA, 25 bp, SARS Virus
tgaaacttgttcctagttatcacta

SEQ ID NO: 193194 - DNA, 25 bp, SARS Virus
gaaacttgttctcagttatcactac

SEQ ID NO: 193195 - DNA, 25 bp, SARS Virus
aaacttgttcttcgttatcactaca

SEQ ID NO: 193196 - DNA, 25 bp, SARS Virus
aacttgttcttacttatcactacag

SEQ ID NO: 193197 - DNA, 25 bp, SARS Virus
acttgttcttagctatcactacagt

SEQ ID NO: 193198 - DNA, 25 bp, SARS Virus
cttgttcttagtcatcactacagtt

SEQ ID NO: 193199 - DNA, 25 bp, SARS Virus
ttgttcttagttctcactacagttc

SEQ ID NO: 193200 - DNA, 25 bp, SARS Virus
tgttcttagttaccactacagttct

SEQ ID NO: 193201 - DNA, 25 bp, SARS Virus
gttcttagttatcactacagttctt

SEQ ID NO: 193202 - DNA, 25 bp, SARS Virus
ttcttagttatccctacagttcttt

SEQ ID NO: 193203 - DNA, 25 bp, SARS Virus
tcttagttatcactacagttctttc

SEQ ID NO: 193204 - DNA, 25 bp, SARS Virus
cttagttatcaccacagttctttca

SEQ ID NO: 193205 - DNA, 25 bp, SARS Virus
ttagttatcactccagttctttcaa

SEQ ID NO: 193206 - DNA, 25 bp, SARS Virus
tagttatcactacagttctttcaat

SEQ ID NO: 193207 - DNA, 25 bp, SARS Virus
agttatcactaccgttctttcaatt

SEQ ID NO: 193208 - DNA, 25 bp, SARS Virus
gttatcactacacttctttcaattt

SEQ ID NO: 193209 - DNA, 25 bp, SARS Virus
ttatcactacagctctttcaatttt

SEQ ID NO: 193210 - DNA, 25 bp, SARS Virus
tatcactacagtcctttcaattttc

SEQ ID NO: 193211 - DNA, 25 bp, SARS Virus
atcactacagttctttcaattttcg

SEQ ID NO: 193212 - DNA, 25 bp, SARS Virus
tcactacagttccttcaattttcgt

SEQ ID NO: 193213 - DNA, 25 bp, SARS Virus
cactacagttctctcaattttcgta

SEQ ID NO: 193214 - DNA, 25 bp, SARS Virus
actacagttcttccaattttcgtag

SEQ ID NO: 193215 - DNA, 25 bp, SARS Virus
ctacagttctttcaattttcgtagg

SEQ ID NO: 193216 - DNA, 25 bp, SARS Virus
tacagttctttccattttcgtaggt

SEQ ID NO: 193217 - DNA, 25 bp, SARS Virus
acagttctttcacttttcgtaggtt

SEQ ID NO: 193218 - DNA, 25 bp, SARS Virus
cagttctttcaactttcgtaggtta

SEQ ID NO: 193219 - DNA, 25 bp, SARS Virus
agttctttcaatcttcgtaggttac

SEQ ID NO: 193220 - DNA, 25 bp, SARS Virus
gttctttcaattctcgtaggttact

SEQ ID NO: 193221 - DNA, 25 bp, SARS Virus
ttctttcaatttccgtaggttacta

SEQ ID NO: 193222 - DNA, 25 bp, SARS Virus
tctttcaattttcgtaggttactac

SEQ ID NO: 193223 - DNA, 25 bp, SARS Virus
ctttcaattttcctaggttactact

SEQ ID NO: 193224 - DNA, 25 bp, SARS Virus
tttcaattttcgcaggttactactc

SEQ ID NO: 193225 - DNA, 25 bp, SARS Virus
ttcaattttcgtcggttactactca

SEQ ID NO: 193226 - DNA, 25 bp, SARS Virus
tcaattttcgtacgttactactcac

SEQ ID NO: 193227 - DNA, 25 bp, SARS Virus
caattttcgtagcttactactcacg

SEQ ID NO: 193228 - DNA, 25 bp, SARS Virus
aattttcgtaggctactactcacgg

SEQ ID NO: 193229 - DNA, 25 bp, SARS Virus
attttcgtaggtcactactcacggg

SEQ ID NO: 193230 - DNA, 25 bp, SARS Virus
ttttcgtaggttcctactcacggga

SEQ ID NO: 193231 - DNA, 25 bp, SARS Virus
tttcgtaggttactactcacgggaa

SEQ ID NO: 193232 - DNA, 25 bp, SARS Virus
ttcgtaggttaccactcacgggaat

SEQ ID NO: 193233 - DNA, 25 bp, SARS Virus
tcgtaggttactcctcacgggaatt

SEQ ID NO: 193234 - DNA, 25 bp, SARS Virus
cgtaggttactactcacgggaattg

SEQ ID NO: 193235 - DNA, 25 bp, SARS Virus
gtaggttactacccacgggaattgt

SEQ ID NO: 193236 - DNA, 25 bp, SARS Virus
taggttactactcacgggaattgtt

SEQ ID NO: 193237 - DNA, 25 bp, SARS Virus
aggttactactcccgggaattgtta

SEQ ID NO: 193238 - DNA, 25 bp, SARS Virus
ggttactactcacgggaattgttaa

SEQ ID NO: 193239 - DNA, 25 bp, SARS Virus
gttactactcaccggaattgttaaa

SEQ ID NO: 193240 - DNA, 25 bp, SARS Virus
ttactactcacgcgaattgttaaaa

SEQ ID NO: 193241 - DNA, 25 bp, SARS Virus
tactactcacggcaattgttaaaag

SEQ ID NO: 193242 - DNA, 25 bp, SARS Virus
actactcacgggcattgttaaaaga

SEQ ID NO: 193243 - DNA, 25 bp, SARS Virus
ctactcacgggacttgttaaaagaa

SEQ ID NO: 193244 - DNA, 25 bp, SARS Virus
tactcacgggaactgttaaaagaac

SEQ ID NO: 193245 - DNA, 25 bp, SARS Virus
actcacgggaatcgttaaaagaact

SEQ ID NO: 193246 - DNA, 25 bp, SARS Virus
ctcacgggaattcttaaaagaactt

SEQ ID NO: 193247 - DNA, 25 bp, SARS Virus
tcacgggaattgctaaaagaacttg

SEQ ID NO: 193248 - DNA, 25 bp, SARS Virus
cacgggaattgtcaaaagaacttga

SEQ ID NO: 193249 - DNA, 25 bp, SARS Virus
acgggaattgttcaaagaacttgaa

SEQ ID NO: 193250 - DNA, 25 bp, SARS Virus
cgggaattgttacaagaacttgaat

SEQ ID NO: 193251 - DNA, 25 bp, SARS Virus
gggaattgttaacagaacttgaatg

SEQ ID NO: 193252 - DNA, 25 bp, SARS Virus
ggaattgttaaacgaacttgaatgg

SEQ ID NO: 193253 - DNA, 25 bp, SARS Virus
gaattgttaaaacaacttgaatgga

SEQ ID NO: 193254 - DNA, 25 bp, SARS Virus
aattgttaaaagcacttgaatggaa

SEQ ID NO: 193255 - DNA, 25 bp, SARS Virus
attgttaaaagaccttgaatggaac

SEQ ID NO: 193256 - DNA, 25 bp, SARS Virus
ttgttaaaagaacttgaatggaacc

SEQ ID NO: 193257 - DNA, 25 bp, SARS Virus
tgttaaaagaacctgaatggaacct

SEQ ID NO: 193258 - DNA, 25 bp, SARS Virus
gttaaaagaactcgaatggaacctt

SEQ ID NO: 193259 - DNA, 25 bp, SARS Virus
ttaaaagaacttcaatggaaccttc

SEQ ID NO: 193260 - DNA, 25 bp, SARS Virus
taaaagaacttgcatggaaccttcc

SEQ ID NO: 193261 - DNA, 25 bp, SARS Virus
aaaagaacttgactggaaccttcca

SEQ ID NO: 193262 - DNA, 25 bp, SARS Virus
aaagaacttgaacggaaccttccat

SEQ ID NO: 193263 - DNA, 25 bp, SARS Virus
aagaacttgaatcgaaccttccatt

SEQ ID NO: 193264 - DNA, 25 bp, SARS Virus
agaacttgaatgcaaccttccattg

SEQ ID NO: 193265 - DNA, 25 bp, SARS Virus
gaacttgaatggcaccttccattgt

SEQ ID NO: 193266 - DNA, 25 bp, SARS Virus
aacttgaatggacccttccattgtg

SEQ ID NO: 193267 - DNA, 25 bp, SARS Virus
acttgaatggaaccttccattgtgg

SEQ ID NO: 193268 - DNA, 25 bp, SARS Virus
cttgaatggaaccttccattgtggt

SEQ ID NO: 193269 - DNA, 25 bp, SARS Virus
ttgaatggaaccctccattgtggtc

SEQ ID NO: 193270 - DNA, 25 bp, SARS Virus
tgaatggaacctcccattgtggtct

SEQ ID NO: 193271 - DNA, 25 bp, SARS Virus
gaatggaaccttccattgtggtctc

SEQ ID NO: 193272 - DNA, 25 bp, SARS Virus
aatggaaccttccattgtggtctcg

SEQ ID NO: 193273 - DNA, 25 bp, SARS Virus
atggaaccttcccttgtggtctcgt

SEQ ID NO: 193274 - DNA, 25 bp, SARS Virus
tggaaccttccactgtggtctcgta

SEQ ID NO: 193275 - DNA, 25 bp, SARS Virus
ggaaccttccatcgtggtctcgtaa

SEQ ID NO: 193276 - DNA, 25 bp, SARS Virus
gaaccttccattctggtctcgtaac

SEQ ID NO: 193277 - DNA, 25 bp, SARS Virus
aaccttccattgcggtctcgtaaca

SEQ ID NO: 193278 - DNA, 25 bp, SARS Virus
accttccattgtcgtctcgtaacag

SEQ ID NO: 193279 - DNA, 25 bp, SARS Virus
ccttccattgtgctctcgtaacaga

SEQ ID NO: 193280 - DNA, 25 bp, SARS Virus
cttccattgtggcctcgtaacagat

SEQ ID NO: 193281 - DNA, 25 bp, SARS Virus
atcgaactagatgtcgtaatggtat

SEQ ID NO: 193282 - DNA, 25 bp, SARS Virus
tcgaactagattgcgtaatggtatc

SEQ ID NO: 193283 - DNA, 25 bp, SARS Virus
cgaactagatttggtaatggtatca

SEQ ID NO: 193284 - DNA, 25 bp, SARS Virus
gaactagatttcgtaatggtatcat

SEQ ID NO: 193285 - DNA, 25 bp, SARS Virus
aactagatttcggaatggtatcatc

SEQ ID NO: 193286 - DNA, 25 bp, SARS Virus
actagatttcgtgatggtatcatct

SEQ ID NO: 193287 - DNA, 25 bp, SARS Virus
ctagatttcgtagtggtatcatctg

SEQ ID NO: 193288 - DNA, 25 bp, SARS Virus
tagatttcgtaagggtatcatctga

SEQ ID NO: 193289 - DNA, 25 bp, SARS Virus
agatttcgtaatggtatcatctgaa

SEQ ID NO: 193290 - DNA, 25 bp, SARS Virus
gatttcgtaatggtatcatctgaaa

SEQ ID NO: 193291 - DNA, 25 bp, SARS Virus
atttcgtaatgggatcatctgaaac

SEQ ID NO: 193292 - DNA, 25 bp, SARS Virus
tttcgtaatggtgtcatctgaaaca

SEQ ID NO: 193293 - DNA, 25 bp, SARS Virus
ttcgtaatggtagcatctgaaacat

SEQ ID NO: 193294 - DNA, 25 bp, SARS Virus
tcgtaatggtatgatctgaaacatt

SEQ ID NO: 193295 - DNA, 25 bp, SARS Virus
cgtaatggtatcgtctgaaacattt

SEQ ID NO: 193296 - DNA, 25 bp, SARS Virus
gtaatggtatcagctgaaacatttg

SEQ ID NO: 193297 - DNA, 25 bp, SARS Virus
taatggtatcatgtgaaacatttgt

SEQ ID NO: 193298 - DNA, 25 bp, SARS Virus
aatggtatcatcggaaacatttgtt

SEQ ID NO: 193299 - DNA, 25 bp, SARS Virus
atggtatcatctgaaacatttgttc

SEQ ID NO: 193300 - DNA, 25 bp, SARS Virus
tggtatcatctggaacatttgttca

SEQ ID NO: 193301 - DNA, 25 bp, SARS Virus
ggtatcatctgagacatttgttcac

SEQ ID NO: 193302 - DNA, 25 bp, SARS Virus
gtatcatctgaagcatttgttcaca

SEQ ID NO: 193303 - DNA, 25 bp, SARS Virus
tatcatctgaaagatttgttcacat

SEQ ID NO: 193304 - DNA, 25 bp, SARS Virus
atcatctgaaacgtttgttcacatt

SEQ ID NO: 193305 - DNA, 25 bp, SARS Virus
tcatctgaaacagttgttcacatta

SEQ ID NO: 193306 - DNA, 25 bp, SARS Virus
catctgaaacatgtgttcacattac

SEQ ID NO: 193307 - DNA, 25 bp, SARS Virus
atctgaaacattggttcacattact

SEQ ID NO: 193308 - DNA, 25 bp, SARS Virus
tctgaaacatttgttcacattactg

SEQ ID NO: 193309 - DNA, 25 bp, SARS Virus
ctgaaacatttggtcacattactgt

SEQ ID NO: 193310 - DNA, 25 bp, SARS Virus
tgaaacatttgtgcacattactgta

SEQ ID NO: 193311 - DNA, 25 bp, SARS Virus
gaaacatttgttgacattactgtaa

SEQ ID NO: 193312 - DNA, 25 bp, SARS Virus
aaacatttgttcgcattactgtaag

SEQ ID NO: 193313 - DNA, 25 bp, SARS Virus
aacatttgttcagattactgtaagt

SEQ ID NO: 193314 - DNA, 25 bp, SARS Virus
acatttgttcacgttactgtaagta

SEQ ID NO: 193315 - DNA, 25 bp, SARS Virus
catttgttcacagtactgtaagtag

SEQ ID NO: 193316 - DNA, 25 bp, SARS Virus
atttgttcacatgactgtaagtagt

SEQ ID NO: 193317 - DNA, 25 bp, SARS Virus
tttgttcacattgctgtaagtagtc

SEQ ID NO: 193318 - DNA, 25 bp, SARS Virus
ttgttcacattagtgtaagtagtca

SEQ ID NO: 193319 - DNA, 25 bp, SARS Virus
tgttcacattacggtaagtagtcac

SEQ ID NO: 193320 - DNA, 25 bp, SARS Virus
gttcacattactgtaagtagtcaca

SEQ ID NO: 193321 - DNA, 25 bp, SARS Virus
ttcacattactggaagtagtcacag

SEQ ID NO: 193322 - DNA, 25 bp, SARS Virus
tcacattactgtgagtagtcacagg

SEQ ID NO: 193323 - DNA, 25 bp, SARS Virus
cacattactgtaggtagtcacaggt

SEQ ID NO: 193324 - DNA, 25 bp, SARS Virus
acattactgtaagtagtcacaggtt

SEQ ID NO: 193325 - DNA, 25 bp, SARS Virus
cattactgtaaggagtcacaggttt

SEQ ID NO: 193326 - DNA, 25 bp, SARS Virus
attactgtaagtggtcacaggtttg

SEQ ID NO: 193327 - DNA, 25 bp, SARS Virus
ttactgtaagtagtcacaggtttgt

SEQ ID NO: 193328 - DNA, 25 bp, SARS Virus
tactgtaagtaggcacaggtttgtg

SEQ ID NO: 193329 - DNA, 25 bp, SARS Virus
actgtaagtagtgacaggtttgtgc

SEQ ID NO: 193330 - DNA, 25 bp, SARS Virus
ctgtaagtagtcgcaggtttgtgca

SEQ ID NO: 193331 - DNA, 25 bp, SARS Virus
tgtaagtagtcagaggtttgtgcag

SEQ ID NO: 193332 - DNA, 25 bp, SARS Virus
gtaagtagtcacgggtttgtgcaga

SEQ ID NO: 193333 - DNA, 25 bp, SARS Virus
taagtagtcacaggtttgtgcagat

SEQ ID NO: 193334 - DNA, 25 bp, SARS Virus
aagtagtcacaggtttgtgcagatc

SEQ ID NO: 193335 - DNA, 25 bp, SARS Virus
agtagtcacagggttgtgcagatcg

SEQ ID NO: 193336 - DNA, 25 bp, SARS Virus
gtagtcacaggtgtgtgcagatcgt

SEQ ID NO: 193337 - DNA, 25 bp, SARS Virus
tagtcacaggttggtgcagatcgtc

SEQ ID NO: 193338 - DNA, 25 bp, SARS Virus
agtcacaggtttgtgcagatcgtcg

SEQ ID NO: 193339 - DNA, 25 bp, SARS Virus
gtcacaggtttgggcagatcgtcgt

SEQ ID NO: 193340 - DNA, 25 bp, SARS Virus
tcacaggtttgtgcagatcgtcgta

SEQ ID NO: 193341 - DNA, 25 bp, SARS Virus
cacaggtttgtggagatcgtcgtag

SEQ ID NO: 193342 - DNA, 25 bp, SARS Virus
acaggtttgtgcggatcgtcgtagt

SEQ ID NO: 193343 - DNA, 25 bp, SARS Virus
caggtttgtgcagatcgtcgtagta

SEQ ID NO: 193344 - DNA, 25 bp, SARS Virus
aggtttgtgcaggtcgtcgtagtag

SEQ ID NO: 193345 - DNA, 25 bp, SARS Virus
ggtttgtgcagagcgtcgtagtagt

SEQ ID NO: 193346 - DNA, 25 bp, SARS Virus
gtttgtgcagatggtcgtagtagta

SEQ ID NO: 193347 - DNA, 25 bp, SARS Virus
tttgtgcagatcgtcgtagtagtat

SEQ ID NO: 193348 - DNA, 25 bp, SARS Virus
ttgtgcagatcggcgtagtagtatt

SEQ ID NO: 193349 - DNA, 25 bp, SARS Virus
tgtgcagatcgtggtagtagtattt

SEQ ID NO: 193350 - DNA, 25 bp, SARS Virus
gtgcagatcgtcgtagtagtatttg

SEQ ID NO: 193351 - DNA, 25 bp, SARS Virus
tgcagatcgtcggagtagtatttgt

SEQ ID NO: 193352 - DNA, 25 bp, SARS Virus
gcagatcgtcgtggtagtatttgtc

SEQ ID NO: 193353 - DNA, 25 bp, SARS Virus
cagatcgtcgtagtagtatttgtca

SEQ ID NO: 193354 - DNA, 25 bp, SARS Virus
agatcgtcgtaggagtatttgtcac

SEQ ID NO: 193355 - DNA, 25 bp, SARS Virus
gatcgtcgtagtggtatttgtcacg

SEQ ID NO: 193356 - DNA, 25 bp, SARS Virus
atcgtcgtagtagtatttgtcacgc

SEQ ID NO: 193357 - DNA, 25 bp, SARS Virus
tcgtcgtagtaggatttgtcacgct

SEQ ID NO: 193358 - DNA, 25 bp, SARS Virus
cgtcgtagtagtgtttgtcacgctc

SEQ ID NO: 193359 - DNA, 25 bp, SARS Virus
gtcgtagtagtagttgtcacgctcg

SEQ ID NO: 193360 - DNA, 25 bp, SARS Virus
tcgtagtagtatgtgtcacgctcga

SEQ ID NO: 193361 - DNA, 25 bp, SARS Virus
cgtagtagtattggtcacgctcgac

SEQ ID NO: 193362 - DNA, 25 bp, SARS Virus
gtagtagtatttgtcacgctcgaca

SEQ ID NO: 193363 - DNA, 25 bp, SARS Virus
tagtagtatttggcacgctcgacag

SEQ ID NO: 193364 - DNA, 25 bp, SARS Virus
agtagtatttgtgacgctcgacagt

SEQ ID NO: 193365 - DNA, 25 bp, SARS Virus
gtagtatttgtcgcgctcgacagta

SEQ ID NO: 193366 - DNA, 25 bp, SARS Virus
tagtatttgtcaggctcgacagtac

SEQ ID NO: 193367 - DNA, 25 bp, SARS Virus
agtatttgtcacgctcgacagtact

SEQ ID NO: 193368 - DNA, 25 bp, SARS Virus
gtatttgtcacggtcgacagtactc

SEQ ID NO: 193369 - DNA, 25 bp, SARS Virus
tatttgtcacgcgcgacagtactct

SEQ ID NO: 193370 - DNA, 25 bp, SARS Virus
atttgtcacgctggacagtactctt

SEQ ID NO: 193371 - DNA, 25 bp, SARS Virus
tttgtcacgctcgacagtactctta

SEQ ID NO: 193372 - DNA, 25 bp, SARS Virus
ttgtcacgctcggcagtactcttat

SEQ ID NO: 193373 - DNA, 25 bp, SARS Virus
tgtcacgctcgagagtactcttatt

SEQ ID NO: 193374 - DNA, 25 bp, SARS Virus
gtcacgctcgacggtactcttattc

SEQ ID NO: 193375 - DNA, 25 bp, SARS Virus
tcacgctcgacagtactcttattcg

SEQ ID NO: 193376 - DNA, 25 bp, SARS Virus
cacgctcgacaggactcttattcgt

SEQ ID NO: 193377 - DNA, 25 bp, SARS Virus
acgctcgacagtgctcttattcgtt

SEQ ID NO: 193378 - DNA, 25 bp, SARS Virus
cgctcgacagtagtcttattcgttt

SEQ ID NO: 193379 - DNA, 25 bp, SARS Virus
gctcgacagtacgcttattcgtttt

SEQ ID NO: 193380 - DNA, 25 bp, SARS Virus
ctcgacagtactgttattcgttttg

SEQ ID NO: 193381 - DNA, 25 bp, SARS Virus
tcgacagtactcgtattcgttttga

SEQ ID NO: 193382 - DNA, 25 bp, SARS Virus
cgacagtactctgattcgttttgat

SEQ ID NO: 193383 - DNA, 25 bp, SARS Virus
gacagtactcttgttcgttttgatt

SEQ ID NO: 193384 - DNA, 25 bp, SARS Virus
acagtactcttagtcgttttgattt

SEQ ID NO: 193385 - DNA, 25 bp, SARS Virus
cagtactcttatgcgttttgatttc

SEQ ID NO: 193386 - DNA, 25 bp, SARS Virus
agtactcttattggttttgatttcg

SEQ ID NO: 193387 - DNA, 25 bp, SARS Virus
gtactcttattcgttttgatttcga

SEQ ID NO: 193388 - DNA, 25 bp, SARS Virus
tactcttattcggtttgatttcgac

SEQ ID NO: 193389 - DNA, 25 bp, SARS Virus
actcttattcgtgttgatttcgact

SEQ ID NO: 193390 - DNA, 25 bp, SARS Virus
ctcttattcgttgtgatttcgactt

SEQ ID NO: 193391 - DNA, 25 bp, SARS Virus
tcttattcgtttggatttcgacttc

SEQ ID NO: 193392 - DNA, 25 bp, SARS Virus
cttattcgttttgatttcgacttcg

SEQ ID NO: 193393 - DNA, 25 bp, SARS Virus
ttattcgttttggtttcgacttcgt

SEQ ID NO: 193394 - DNA, 25 bp, SARS Virus
tattcgttttgagttcgacttcgta

SEQ ID NO: 193395 - DNA, 25 bp, SARS Virus
attcgttttgatgtcgacttcgtat

SEQ ID NO: 193396 - DNA, 25 bp, SARS Virus
ttcgttttgattgcgacttcgtatg

SEQ ID NO: 193397 - DNA, 25 bp, SARS Virus
tcgttttgatttggacttcgtatgt

SEQ ID NO: 193398 - DNA, 25 bp, SARS Virus
cgttttgatttcgacttcgtatgta

SEQ ID NO: 193399 - DNA, 25 bp, SARS Virus
gttttgatttcggcttcgtatgtat

SEQ ID NO: 193400 - DNA, 25 bp, SARS Virus
ttttgatttcgagttcgtatgtatt

SEQ ID NO: 193401 - DNA, 25 bp, SARS Virus
tttgatttcgacgtcgtatgtattg

SEQ ID NO: 193402 - DNA, 25 bp, SARS Virus
ttgatttcgactgcgtatgtattgt

SEQ ID NO: 193403 - DNA, 25 bp, SARS Virus
tgatttcgacttggtatgtattgtg

SEQ ID NO: 193404 - DNA, 25 bp, SARS Virus
gatttcgacttcgtatgtattgtgt

SEQ ID NO: 193405 - DNA, 25 bp, SARS Virus
atttcgacttcggatgtattgtgtt

SEQ ID NO: 193406 - DNA, 25 bp, SARS Virus
tttcgacttcgtgtgtattgtgtta

SEQ ID NO: 193407 - DNA, 25 bp, SARS Virus
ttcgacttcgtaggtattgtgttag

SEQ ID NO: 193408 - DNA, 25 bp, SARS Virus
tcgacttcgtatgtattgtgttagg

SEQ ID NO: 193409 - DNA, 25 bp, SARS Virus
cgacttcgtatggattgtgttagga

SEQ ID NO: 193410 - DNA, 25 bp, SARS Virus
gacttcgtatgtgttgtgttaggaa

SEQ ID NO: 193411 - DNA, 25 bp, SARS Virus
acttcgtatgtagtgtgttaggaat

SEQ ID NO: 193412 - DNA, 25 bp, SARS Virus
cttcgtatgtatggtgttaggaatt

SEQ ID NO: 193413 - DNA, 25 bp, SARS Virus
ttcgtatgtattgtgttaggaattc

SEQ ID NO: 193414 - DNA, 25 bp, SARS Virus
tcgtatgtattgggttaggaattcg

SEQ ID NO: 193415 - DNA, 25 bp, SARS Virus
cgtatgtattgtgttaggaattcgg

SEQ ID NO: 193416 - DNA, 25 bp, SARS Virus
gtatgtattgtggtaggaattcgga

SEQ ID NO: 193417 - DNA, 25 bp, SARS Virus
tatgtattgtgtgaggaattcggat

SEQ ID NO: 193418 - DNA, 25 bp, SARS Virus
atgtattgtgttgggaattcggata

SEQ ID NO: 193419 - DNA, 25 bp, SARS Virus
tgtattgtgttaggaattcggatat

SEQ ID NO: 193420 - DNA, 25 bp, SARS Virus
gtattgtgttaggaattcggatatt

SEQ ID NO: 193421 - DNA, 25 bp, SARS Virus
tattgtgttagggattcggatattg

SEQ ID NO: 193422 - DNA, 25 bp, SARS Virus
attgtgttaggagttcggatattgg

SEQ ID NO: 193423 - DNA, 25 bp, SARS Virus
ttgtgttaggaagtcggatattggt

SEQ ID NO: 193424 - DNA, 25 bp, SARS Virus
tgtgttaggaatgcggatattggtc

SEQ ID NO: 193425 - DNA, 25 bp, SARS Virus
gtgttaggaattgggatattggtct

SEQ ID NO: 193426 - DNA, 25 bp, SARS Virus
tgttaggaattcggatattggtctg

SEQ ID NO: 193427 - DNA, 25 bp, SARS Virus
gttaggaattcggatattggtctgt

SEQ ID NO: 193428 - DNA, 25 bp, SARS Virus
ttaggaattcgggtattggtctgtt

SEQ ID NO: 193429 - DNA, 25 bp, SARS Virus
taggaattcggagattggtctgttc

SEQ ID NO: 193430 - DNA, 25 bp, SARS Virus
aggaattcggatgttggtctgttcg

SEQ ID NO: 193431 - DNA, 25 bp, SARS Virus
ggaattcggatagtggtctgttcga

SEQ ID NO: 193432 - DNA, 25 bp, SARS Virus
gaattcggatatgggtctgttcgat

SEQ ID NO: 193433 - DNA, 25 bp, SARS Virus
aattcggatattggtctgttcgatc

SEQ ID NO: 193434 - DNA, 25 bp, SARS Virus
attcggatattggtctgttcgatca

SEQ ID NO: 193435 - DNA, 25 bp, SARS Virus
ttcggatattgggctgttcgatcac

SEQ ID NO: 193436 - DNA, 25 bp, SARS Virus
tcggatattggtgtgttcgatcaca

SEQ ID NO: 193437 - DNA, 25 bp, SARS Virus
cggatattggtcggttcgatcacag

SEQ ID NO: 193438 - DNA, 25 bp, SARS Virus
ggatattggtctgttcgatcacagt

SEQ ID NO: 193439 - DNA, 25 bp, SARS Virus
gatattggtctggtcgatcacagtc

SEQ ID NO: 193440 - DNA, 25 bp, SARS Virus
atattggtctgtgcgatcacagtcg

SEQ ID NO: 193441 - DNA, 25 bp, SARS Virus
tattggtctgttggatcacagtcgg

SEQ ID NO: 193442 - DNA, 25 bp, SARS Virus
attggtctgttcgatcacagtcggt

SEQ ID NO: 193443 - DNA, 25 bp, SARS Virus
ttggtctgttcggtcacagtcggtt

SEQ ID NO: 193444 - DNA, 25 bp, SARS Virus
tggtctgttcgagcacagtcggtta

SEQ ID NO: 193445 - DNA, 25 bp, SARS Virus
ggtctgttcgatgacagtcggttaa

SEQ ID NO: 193446 - DNA, 25 bp, SARS Virus
gtctgttcgatcgcagtcggttaag

SEQ ID NO: 193447 - DNA, 25 bp, SARS Virus
tctgttcgatcagagtcggttaagt

SEQ ID NO: 193448 - DNA, 25 bp, SARS Virus
ctgttcgatcacggtcggttaagtt

SEQ ID NO: 193449 - DNA, 25 bp, SARS Virus
tgttcgatcacagtcggttaagttc

SEQ ID NO: 193450 - DNA, 25 bp, SARS Virus
gttcgatcacaggcggttaagttcg

SEQ ID NO: 193451 - DNA, 25 bp, SARS Virus
ttcgatcacagtgggttaagttcgg

SEQ ID NO: 193452 - DNA, 25 bp, SARS Virus
tcgatcacagtcggttaagttcggt

SEQ ID NO: 193453 - DNA, 25 bp, SARS Virus
cgatcacagtcggttaagttcggta

SEQ ID NO: 193454 - DNA, 25 bp, SARS Virus
gatcacagtcgggtaagttcggtac

SEQ ID NO: 193455 - DNA, 25 bp, SARS Virus
atcacagtcggtgaagttcggtaca

SEQ ID NO: 193456 - DNA, 25 bp, SARS Virus
tcacagtcggttgagttcggtacag

SEQ ID NO: 193457 - DNA, 25 bp, SARS Virus
cacagtcggttaggttcggtacagt

SEQ ID NO: 193458 - DNA, 25 bp, SARS Virus
acagtcggttaagttcggtacagta

SEQ ID NO: 193459 - DNA, 25 bp, SARS Virus
cagtcggttaaggtcggtacagtac

SEQ ID NO: 193460 - DNA, 25 bp, SARS Virus
agtcggttaagtgcggtacagtact

SEQ ID NO: 193461 - DNA, 25 bp, SARS Virus
gtcggttaagttgggtacagtacta

SEQ ID NO: 193462 - DNA, 25 bp, SARS Virus
tcggttaagttcggtacagtactat

SEQ ID NO: 193463 - DNA, 25 bp, SARS Virus
cggttaagttcggtacagtactatg

SEQ ID NO: 193464 - DNA, 25 bp, SARS Virus
ggttaagttcgggacagtactatgc

SEQ ID NO: 193465 - DNA, 25 bp, SARS Virus
gttaagttcggtgcagtactatgcg

SEQ ID NO: 193466 - DNA, 25 bp, SARS Virus
ttaagttcggtagagtactatgcgt

SEQ ID NO: 193467 - DNA, 25 bp, SARS Virus
taagttcggtacggtactatgcgta

SEQ ID NO: 193468 - DNA, 25 bp, SARS Virus
aagttcggtacagtactatgcgtag

SEQ ID NO: 193469 - DNA, 25 bp, SARS Virus
agttcggtacaggactatgcgtagt

SEQ ID NO: 193470 - DNA, 25 bp, SARS Virus
gttcggtacagtgctatgcgtagtg

SEQ ID NO: 193471 - DNA, 25 bp, SARS Virus
ttcggtacagtagtatgcgtagtgg

SEQ ID NO: 193472 - DNA, 25 bp, SARS Virus
tcggtacagtacgatgcgtagtggg

SEQ ID NO: 193473 - DNA, 25 bp, SARS Virus
cggtacagtactgtgcgtagtgggt

SEQ ID NO: 193474 - DNA, 25 bp, SARS Virus
ggtacagtactaggcgtagtgggtc

SEQ ID NO: 193475 - DNA, 25 bp, SARS Virus
gtacagtactatgcgtagtgggtcg

SEQ ID NO: 193476 - DNA, 25 bp, SARS Virus
tacagtactatgggtagtgggtcga

SEQ ID NO: 193477 - DNA, 25 bp, SARS Virus
acagtactatgcgtagtgggtcgat

SEQ ID NO: 193478 - DNA, 25 bp, SARS Virus
cagtactatgcggagtgggtcgatc

SEQ ID NO: 193479 - DNA, 25 bp, SARS Virus
agtactatgcgtggtgggtcgatcg

SEQ ID NO: 193480 - DNA, 25 bp, SARS Virus
gtactatgcgtagtgggtcgatcgt

SEQ ID NO: 193481 - DNA, 25 bp, SARS Virus
tactatgcgtagggggtcgatcgtc

SEQ ID NO: 193482 - DNA, 25 bp, SARS Virus
actatgcgtagtgggtcgatcgtcc

SEQ ID NO: 193483 - DNA, 25 bp, SARS Virus
ctatgcgtagtgggtcgatcgtccg

SEQ ID NO: 193484 - DNA, 25 bp, SARS Virus
tatgcgtagtgggtcgatcgtccgt

SEQ ID NO: 193485 - DNA, 25 bp, SARS Virus
atgcgtagtggggcgatcgtccgta

SEQ ID NO: 193486 - DNA, 25 bp, SARS Virus
tgcgtagtgggtggatcgtccgtac

SEQ ID NO: 193487 - DNA, 25 bp, SARS Virus
gcgtagtgggtcgatcgtccgtaca

SEQ ID NO: 193488 - DNA, 25 bp, SARS Virus
cgtagtgggtcggtcgtccgtacat

SEQ ID NO: 193489 - DNA, 25 bp, SARS Virus
gtagtgggtcgagcgtccgtacatc

SEQ ID NO: 193490 - DNA, 25 bp, SARS Virus
tagtgggtcgatggtccgtacatct

SEQ ID NO: 193491 - DNA, 25 bp, SARS Virus
agtgggtcgatcgtccgtacatctg

SEQ ID NO: 193492 - DNA, 25 bp, SARS Virus
gtgggtcgatcggccgtacatctgg

SEQ ID NO: 193493 - DNA, 25 bp, SARS Virus
tgggtcgatcgtgcgtacatctggt

SEQ ID NO: 193494 - DNA, 25 bp, SARS Virus
gggtcgatcgtcggtacatctggta

SEQ ID NO: 193495 - DNA, 25 bp, SARS Virus
ggtcgatcgtccgtacatctggtat

SEQ ID NO: 193496 - DNA, 25 bp, SARS Virus
gtcgatcgtccggacatctggtata

SEQ ID NO: 193497 - DNA, 25 bp, SARS Virus
tcgatcgtccgtgcatctggtataa

SEQ ID NO: 193498 - DNA, 25 bp, SARS Virus
cgatcgtccgtagatctggtataat

SEQ ID NO: 193499 - DNA, 25 bp, SARS Virus
gatcgtccgtacgtctggtataatt

SEQ ID NO: 193500 - DNA, 25 bp, SARS Virus
atcgtccgtacagctggtataattt

SEQ ID NO: 193501 - DNA, 25 bp, SARS Virus
tcgtccgtacatgtggtataatttc

SEQ ID NO: 193502 - DNA, 25 bp, SARS Virus
cgtccgtacatcgggtataatttca

SEQ ID NO: 193503 - DNA, 25 bp, SARS Virus
gtccgtacatctggtataatttcat

SEQ ID NO: 193504 - DNA, 25 bp, SARS Virus
tccgtacatctggtataatttcatt

SEQ ID NO: 193505 - DNA, 25 bp, SARS Virus
ccgtacatctgggataatttcattc

SEQ ID NO: 193506 - DNA, 25 bp, SARS Virus
cgtacatctggtgtaatttcattcg

SEQ ID NO: 193507 - DNA, 25 bp, SARS Virus
gtacatctggtagaatttcattcgt

SEQ ID NO: 193508 - DNA, 25 bp, SARS Virus
tacatctggtatgatttcattcgtt

SEQ ID NO: 193509 - DNA, 25 bp, SARS Virus
acatctggtatagtttcattcgttg

SEQ ID NO: 193510 - DNA, 25 bp, SARS Virus
catctggtataagttcattcgttga

SEQ ID NO: 193511 - DNA, 25 bp, SARS Virus
atctggtataatgtcattcgttgac

SEQ ID NO: 193512 - DNA, 25 bp, SARS Virus
tctggtataattgcattcgttgaca

SEQ ID NO: 193513 - DNA, 25 bp, SARS Virus
ctggtataatttgattcgttgacaa

SEQ ID NO: 193514 - DNA, 25 bp, SARS Virus
tggtataatttcgttcgttgacaac

SEQ ID NO: 193515 - DNA, 25 bp, SARS Virus
ggtataatttcagtcgttgacaacg

SEQ ID NO: 193516 - DNA, 25 bp, SARS Virus
gtataatttcatgcgttgacaacgt

SEQ ID NO: 193517 - DNA, 25 bp, SARS Virus
tataatttcattggttgacaacgtt

SEQ ID NO: 193518 - DNA, 25 bp, SARS Virus
ataatttcattcgttgacaacgttc

SEQ ID NO: 193519 - DNA, 25 bp, SARS Virus
taatttcattcggtgacaacgttct

SEQ ID NO: 193520 - DNA, 25 bp, SARS Virus
aatttcattcgtggacaacgttctc

SEQ ID NO: 193521 - DNA, 25 bp, SARS Virus
atttcattcgttgacaacgttctct

SEQ ID NO: 193522 - DNA, 25 bp, SARS Virus
tttcattcgttggcaacgttctctt

SEQ ID NO: 193523 - DNA, 25 bp, SARS Virus
ttcattcgttgagaacgttctcttc

SEQ ID NO: 193524 - DNA, 25 bp, SARS Virus
tcattcgttgacgacgttctcttcc

SEQ ID NO: 193525 - DNA, 25 bp, SARS Virus
cattcgttgacagcgttctcttcca

SEQ ID NO: 193526 - DNA, 25 bp, SARS Virus
attcgttgacaaggttctcttccat

SEQ ID NO: 193527 - DNA, 25 bp, SARS Virus
ttcgttgacaacgttctcttccatt

SEQ ID NO: 193528 - DNA, 25 bp, SARS Virus
tcgttgacaacggtctcttccattg

SEQ ID NO: 193529 - DNA, 25 bp, SARS Virus
cgttgacaacgtgctcttccattgt

SEQ ID NO: 193530 - DNA, 25 bp, SARS Virus
gttgacaacgttgtcttccattgtc

SEQ ID NO: 193531 - DNA, 25 bp, SARS Virus
ttgacaacgttcgcttccattgtct

SEQ ID NO: 193532 - DNA, 25 bp, SARS Virus
tgacaacgttctgttccattgtctt

SEQ ID NO: 193533 - DNA, 25 bp, SARS Virus
gacaacgttctcgtccattgtcttt

SEQ ID NO: 193534 - DNA, 25 bp, SARS Virus
acaacgttctctgccattgtctttg

SEQ ID NO: 193535 - DNA, 25 bp, SARS Virus
caacgttctcttgcattgtctttgt

SEQ ID NO: 193536 - DNA, 25 bp, SARS Virus
aacgttctcttcgattgtctttgtt

SEQ ID NO: 193537 - DNA, 25 bp, SARS Virus
acgttctcttccgttgtctttgttc

SEQ ID NO: 193538 - DNA, 25 bp, SARS Virus
cgttctcttccagtgtctttgttcg

SEQ ID NO: 193539 - DNA, 25 bp, SARS Virus
gttctcttccatggtctttgttcgt

SEQ ID NO: 193540 - DNA, 25 bp, SARS Virus
ttctcttccattgtctttgttcgtg

SEQ ID NO: 193541 - DNA, 25 bp, SARS Virus
tctcttccattggctttgttcgtgt

SEQ ID NO: 193542 - DNA, 25 bp, SARS Virus
ctcttccattgtgtttgttcgtgtt

SEQ ID NO: 193543 - DNA, 25 bp, SARS Virus
tcttccattgtcgttgttcgtgttc

SEQ ID NO: 193544 - DNA, 25 bp, SARS Virus
cttccattgtctgtgttcgtgttct

SEQ ID NO: 193545 - DNA, 25 bp, SARS Virus
ttccattgtcttggttcgtgttctt

SEQ ID NO: 193546 - DNA, 25 bp, SARS Virus
tccattgtctttgttcgtgttctta

SEQ ID NO: 193547 - DNA, 25 bp, SARS Virus
ccattgtctttggtcgtgttcttac

SEQ ID NO: 193548 - DNA, 25 bp, SARS Virus
cattgtctttgtgcgtgttcttacg

SEQ ID NO: 193549 - DNA, 25 bp, SARS Virus
attgtctttgttggtgttcttacgc

SEQ ID NO: 193550 - DNA, 25 bp, SARS Virus
ttgtctttgttcgtgttcttacgca

SEQ ID NO: 193551 - DNA, 25 bp, SARS Virus
tgtctttgttcgggttcttacgcac

SEQ ID NO: 193552 - DNA, 25 bp, SARS Virus
gtctttgttcgtgttcttacgcacg

SEQ ID NO: 193553 - DNA, 25 bp, SARS Virus
tctttgttcgtggtcttacgcacga

SEQ ID NO: 193554 - DNA, 25 bp, SARS Virus
ctttgttcgtgtgcttacgcacgaa

SEQ ID NO: 193555 - DNA, 25 bp, SARS Virus
tttgttcgtgttgttacgcacgaat

SEQ ID NO: 193556 - DNA, 25 bp, SARS Virus
ttgttcgtgttcgtacgcacgaata

SEQ ID NO: 193557 - DNA, 25 bp, SARS Virus
tgttcgtgttctgacgcacgaatac

SEQ ID NO: 193558 - DNA, 25 bp, SARS Virus
gttcgtgttcttgcgcacgaatacg

SEQ ID NO: 193559 - DNA, 25 bp, SARS Virus
ttcgtgttcttaggcacgaatacga

SEQ ID NO: 193560 - DNA, 25 bp, SARS Virus
tcgtgttcttacgcacgaatacgaa

SEQ ID NO: 193561 - DNA, 25 bp, SARS Virus
cgtgttcttacggacgaatacgaat

SEQ ID NO: 193562 - DNA, 25 bp, SARS Virus
gtgttcttacgcgcgaatacgaatt

SEQ ID NO: 193563 - DNA, 25 bp, SARS Virus
tgttcttacgcaggaatacgaattg

SEQ ID NO: 193564 - DNA, 25 bp, SARS Virus
gttcttacgcacgaatacgaattgt

SEQ ID NO: 193565 - DNA, 25 bp, SARS Virus
ttcttacgcacggatacgaattgtt

SEQ ID NO: 193566 - DNA, 25 bp, SARS Virus
tcttacgcacgagtacgaattgttc

SEQ ID NO: 193567 - DNA, 25 bp, SARS Virus
cttacgcacgaagacgaattgttcg

SEQ ID NO: 193568 - DNA, 25 bp, SARS Virus
ttacgcacgaatgcgaattgttcgt

SEQ ID NO: 193569 - DNA, 25 bp, SARS Virus
tacgcacgaataggaattgttcgtc

SEQ ID NO: 193570 - DNA, 25 bp, SARS Virus
acgcacgaatacgaattgttcgtcg

SEQ ID NO: 193571 - DNA, 25 bp, SARS Virus
cgcacgaatacggattgttcgtcgt

SEQ ID NO: 193572 - DNA, 25 bp, SARS Virus
gcacgaatacgagttgttcgtcgta

SEQ ID NO: 193573 - DNA, 25 bp, SARS Virus
cacgaatacgaagtgttcgtcgtat

SEQ ID NO: 193574 - DNA, 25 bp, SARS Virus
acgaatacgaatggttcgtcgtatc

SEQ ID NO: 193575 - DNA, 25 bp, SARS Virus
cgaatacgaattgttcgtcgtatcg

SEQ ID NO: 193576 - DNA, 25 bp, SARS Virus
gaatacgaattggtcgtcgtatcgt

SEQ ID NO: 193577 - DNA, 25 bp, SARS Virus
aatacgaattgtgcgtcgtatcgtg

SEQ ID NO: 193578 - DNA, 25 bp, SARS Virus
atacgaattgttggtcgtatcgtgt

SEQ ID NO: 193579 - DNA, 25 bp, SARS Virus
tacgaattgttcgtcgtatcgtgta

SEQ ID NO: 193580 - DNA, 25 bp, SARS Virus
acgaattgttcggcgtatcgtgtac

SEQ ID NO: 193581 - DNA, 25 bp, SARS Virus
cgaattgttcgtggtatcgtgtacg

SEQ ID NO: 193582 - DNA, 25 bp, SARS Virus
gaattgttcgtcgtatcgtgtacgt

SEQ ID NO: 193583 - DNA, 25 bp, SARS Virus
aattgttcgtcggatcgtgtacgtc

SEQ ID NO: 193584 - DNA, 25 bp, SARS Virus
attgttcgtcgtgtcgtgtacgtcg

SEQ ID NO: 193585 - DNA, 25 bp, SARS Virus
ttgttcgtcgtagcgtgtacgtcgt

SEQ ID NO: 193586 - DNA, 25 bp, SARS Virus
tgttcgtcgtatggtgtacgtcgtt

SEQ ID NO: 193587 - DNA, 25 bp, SARS Virus
gttcgtcgtatcgtgtacgtcgtta

SEQ ID NO: 193588 - DNA, 25 bp, SARS Virus
ttcgtcgtatcgggtacgtcgttaa

SEQ ID NO: 193589 - DNA, 25 bp, SARS Virus
tcgtcgtatcgtgtacgtcgttaac

SEQ ID NO: 193590 - DNA, 25 bp, SARS Virus
cgtcgtatcgtggacgtcgttaacg

SEQ ID NO: 193591 - DNA, 25 bp, SARS Virus
gtcgtatcgtgtgcgtcgttaacgg

SEQ ID NO: 193592 - DNA, 25 bp, SARS Virus
tcgtatcgtgtaggtcgttaacggt

SEQ ID NO: 193593 - DNA, 25 bp, SARS Virus
cgtatcgtgtacgtcgttaacggta

SEQ ID NO: 193594 - DNA, 25 bp, SARS Virus
gtatcgtgtacggcgttaacggtat

SEQ ID NO: 193595 - DNA, 25 bp, SARS Virus
tatcgtgtacgtggttaacggtatt

SEQ ID NO: 193596 - DNA, 25 bp, SARS Virus
atcgtgtacgtcgttaacggtatta

SEQ ID NO: 193597 - DNA, 25 bp, SARS Virus
tcgtgtacgtcggtaacggtattat

SEQ ID NO: 193598 - DNA, 25 bp, SARS Virus
cgtgtacgtcgtgaacggtattatg

SEQ ID NO: 193599 - DNA, 25 bp, SARS Virus
gtgtacgtcgttgacggtattatgg

SEQ ID NO: 193600 - DNA, 25 bp, SARS Virus
tgtacgtcgttagcggtattatggt

SEQ ID NO: 193601 - DNA, 25 bp, SARS Virus
gtacgtcgttaagggtattatggtt

SEQ ID NO: 193602 - DNA, 25 bp, SARS Virus
tacgtcgttaacggtattatggttc

SEQ ID NO: 193603 - DNA, 25 bp, SARS Virus
acgtcgttaacggtattatggttct

SEQ ID NO: 193604 - DNA, 25 bp, SARS Virus
cgtcgttaacgggattatggttctc

SEQ ID NO: 193605 - DNA, 25 bp, SARS Virus
gtcgttaacggtgttatggttctca

SEQ ID NO: 193606 - DNA, 25 bp, SARS Virus
tcgttaacggtagtatggttctcat

SEQ ID NO: 193607 - DNA, 25 bp, SARS Virus
cgttaacggtatgatggttctcatt

SEQ ID NO: 193608 - DNA, 25 bp, SARS Virus
gttaacggtattgtggttctcattt

SEQ ID NO: 193609 - DNA, 25 bp, SARS Virus
ttaacggtattagggttctcattta

SEQ ID NO: 193610 - DNA, 25 bp, SARS Virus
taacggtattatggttctcatttac

SEQ ID NO: 193611 - DNA, 25 bp, SARS Virus
aacggtattatggttctcatttacc

SEQ ID NO: 193612 - DNA, 25 bp, SARS Virus
acggtattatgggtctcatttaccg

SEQ ID NO: 193613 - DNA, 25 bp, SARS Virus
cggtattatggtgctcatttaccgt

SEQ ID NO: 193614 - DNA, 25 bp, SARS Virus
ggtattatggttgtcatttaccgtt

SEQ ID NO: 193615 - DNA, 25 bp, SARS Virus
gtattatggttcgcatttaccgttc

SEQ ID NO: 193616 - DNA, 25 bp, SARS Virus
tattatggttctgatttaccgttct

SEQ ID NO: 193617 - DNA, 25 bp, SARS Virus
attatggttctcgtttaccgttctt

SEQ ID NO: 193618 - DNA, 25 bp, SARS Virus
ttatggttctcagttaccgttcttt

SEQ ID NO: 193619 - DNA, 25 bp, SARS Virus
tatggttctcatgtaccgttctttc

SEQ ID NO: 193620 - DNA, 25 bp, SARS Virus
atggttctcattgaccgttctttcg

SEQ ID NO: 193621 - DNA, 25 bp, SARS Virus
tggttctcatttgccgttctttcgt

SEQ ID NO: 193622 - DNA, 25 bp, SARS Virus
ggttctcatttagcgttctttcgta

SEQ ID NO: 193623 - DNA, 25 bp, SARS Virus
gttctcatttacggttctttcgtaa

SEQ ID NO: 193624 - DNA, 25 bp, SARS Virus
ttctcatttaccgttctttcgtaag

SEQ ID NO: 193625 - DNA, 25 bp, SARS Virus
tctcatttaccggtctttcgtaaga

SEQ ID NO: 193626 - DNA, 25 bp, SARS Virus
ctcatttaccgtgctttcgtaagag

SEQ ID NO: 193627 - DNA, 25 bp, SARS Virus
tcatttaccgttgtttcgtaagagc

SEQ ID NO: 193628 - DNA, 25 bp, SARS Virus
catttaccgttcgttcgtaagagca

SEQ ID NO: 193629 - DNA, 25 bp, SARS Virus
atttaccgttctgtcgtaagagcat

SEQ ID NO: 193630 - DNA, 25 bp, SARS Virus
tttaccgttcttgcgtaagagcatt

SEQ ID NO: 193631 - DNA, 25 bp, SARS Virus
ttaccgttctttggtaagagcattt

SEQ ID NO: 193632 - DNA, 25 bp, SARS Virus
taccgttctttcgtaagagcatttg

SEQ ID NO: 193633 - DNA, 25 bp, SARS Virus
accgttctttcggaagagcatttgt

SEQ ID NO: 193634 - DNA, 25 bp, SARS Virus
ccgttctttcgtgagagcatttgtt

SEQ ID NO: 193635 - DNA, 25 bp, SARS Virus
cgttctttcgtaggagcatttgttt

SEQ ID NO: 193636 - DNA, 25 bp, SARS Virus
gttctttcgtaagagcatttgtttc

SEQ ID NO: 193637 - DNA, 25 bp, SARS Virus
ttctttcgtaagggcatttgtttct

SEQ ID NO: 193638 - DNA, 25 bp, SARS Virus
tctttcgtaagagcatttgtttctt

SEQ ID NO: 193639 - DNA, 25 bp, SARS Virus
ctttcgtaagaggatttgtttcttt

SEQ ID NO: 193640 - DNA, 25 bp, SARS Virus
tttcgtaagagcgtttgtttctttt

SEQ ID NO: 193641 - DNA, 25 bp, SARS Virus
ttcgtaagagcagttgtttcttttt

SEQ ID NO: 193642 - DNA, 25 bp, SARS Virus
tcgtaagagcatgtgtttctttttg

SEQ ID NO: 193643 - DNA, 25 bp, SARS Virus
cgtaagagcattggtttctttttgt

SEQ ID NO: 193644 - DNA, 25 bp, SARS Virus
gtaagagcatttgtttctttttgtc

SEQ ID NO: 193645 - DNA, 25 bp, SARS Virus
taagagcatttggttctttttgtca

SEQ ID NO: 193646 - DNA, 25 bp, SARS Virus
aagagcatttgtgtctttttgtcac

SEQ ID NO: 193647 - DNA, 25 bp, SARS Virus
agagcatttgttgctttttgtcact

SEQ ID NO: 193648 - DNA, 25 bp, SARS Virus
gagcatttgtttgtttttgtcactg

SEQ ID NO: 193649 - DNA, 25 bp, SARS Virus
agcatttgtttcgttttgtcactgg

SEQ ID NO: 193650 - DNA, 25 bp, SARS Virus
gcatttgtttctgtttgtcactggt

SEQ ID NO: 193651 - DNA, 25 bp, SARS Virus
catttgtttcttgttgtcactggtg

SEQ ID NO: 193652 - DNA, 25 bp, SARS Virus
atttgtttctttgtgtcactggtga

SEQ ID NO: 193653 - DNA, 25 bp, SARS Virus
tttgtttcttttggtcactggtgac

SEQ ID NO: 193654 - DNA, 25 bp, SARS Virus
ttgtttctttttgtcactggtgaca

SEQ ID NO: 193655 - DNA, 25 bp, SARS Virus
tgtttctttttggcactggtgacac

SEQ ID NO: 193656 - DNA, 25 bp, SARS Virus
gtttctttttgtgactggtgacaca

SEQ ID NO: 193657 - DNA, 25 bp, SARS Virus
tttctttttgtcgctggtgacacat

SEQ ID NO: 193658 - DNA, 25 bp, SARS Virus
ttctttttgtcagtggtgacacatg

SEQ ID NO: 193659 - DNA, 25 bp, SARS Virus
tctttttgtcacgggtgacacatga

SEQ ID NO: 193660 - DNA, 25 bp, SARS Virus
ctttttgtcactggtgacacatgaa

SEQ ID NO: 193661 - DNA, 25 bp, SARS Virus
tttttgtcactggtgacacatgaaa

SEQ ID NO: 193662 - DNA, 25 bp, SARS Virus
ttttgtcactggggacacatgaaac

SEQ ID NO: 193663 - DNA, 25 bp, SARS Virus
tttgtcactggtgacacatgaaact

SEQ ID NO: 193664 - DNA, 25 bp, SARS Virus
ttgtcactggtggcacatgaaactt

SEQ ID NO: 193665 - DNA, 25 bp, SARS Virus
tgtcactggtgagacatgaaacttg

SEQ ID NO: 193666 - DNA, 25 bp, SARS Virus
gtcactggtgacgcatgaaacttgt

SEQ ID NO: 193667 - DNA, 25 bp, SARS Virus
tcactggtgacagatgaaacttgtt

SEQ ID NO: 193668 - DNA, 25 bp, SARS Virus
cactggtgacacgtgaaacttgttc

SEQ ID NO: 193669 - DNA, 25 bp, SARS Virus
actggtgacacaggaaacttgttct

SEQ ID NO: 193670 - DNA, 25 bp, SARS Virus
ctggtgacacatgaaacttgttctt

SEQ ID NO: 193671 - DNA, 25 bp, SARS Virus
tggtgacacatggaacttgttctta

SEQ ID NO: 193672 - DNA, 25 bp, SARS Virus
ggtgacacatgagacttgttcttag

SEQ ID NO: 193673 - DNA, 25 bp, SARS Virus
gtgacacatgaagcttgttcttagt

SEQ ID NO: 193674 - DNA, 25 bp, SARS Virus
tgacacatgaaagttgttcttagtt

SEQ ID NO: 193675 - DNA, 25 bp, SARS Virus
gacacatgaaacgtgttcttagtta

SEQ ID NO: 193676 - DNA, 25 bp, SARS Virus
acacatgaaactggttcttagttat

SEQ ID NO: 193677 - DNA, 25 bp, SARS Virus
cacatgaaacttgttcttagttatc

SEQ ID NO: 193678 - DNA, 25 bp, SARS Virus
acatgaaacttggtcttagttatca

SEQ ID NO: 193679 - DNA, 25 bp, SARS Virus
catgaaacttgtgcttagttatcac

SEQ ID NO: 193680 - DNA, 25 bp, SARS Virus
atgaaacttgttgttagttatcact

SEQ ID NO: 193681 - DNA, 25 bp, SARS Virus
tgaaacttgttcgtagttatcacta

SEQ ID NO: 193682 - DNA, 25 bp, SARS Virus
gaaacttgttctgagttatcactac

SEQ ID NO: 193683 - DNA, 25 bp, SARS Virus
aaacttgttcttggttatcactaca

SEQ ID NO: 193684 - DNA, 25 bp, SARS Virus
aacttgttcttagttatcactacag

SEQ ID NO: 193685 - DNA, 25 bp, SARS Virus
acttgttcttaggtatcactacagt

SEQ ID NO: 193686 - DNA, 25 bp, SARS Virus
cttgttcttagtgatcactacagtt

SEQ ID NO: 193687 - DNA, 25 bp, SARS Virus
ttgttcttagttgtcactacagttc

SEQ ID NO: 193688 - DNA, 25 bp, SARS Virus
tgttcttagttagcactacagttct

SEQ ID NO: 193689 - DNA, 25 bp, SARS Virus
gttcttagttatgactacagttctt

SEQ ID NO: 193690 - DNA, 25 bp, SARS Virus
ttcttagttatcgctacagttcttt

SEQ ID NO: 193691 - DNA, 25 bp, SARS Virus
tcttagttatcagtacagttctttc

SEQ ID NO: 193692 - DNA, 25 bp, SARS Virus
cttagttatcacgacagttctttca

SEQ ID NO: 193693 - DNA, 25 bp, SARS Virus
ttagttatcactgcagttctttcaa

SEQ ID NO: 193694 - DNA, 25 bp, SARS Virus
tagttatcactagagttctttcaat

SEQ ID NO: 193695 - DNA, 25 bp, SARS Virus
agttatcactacggttctttcaatt

SEQ ID NO: 193696 - DNA, 25 bp, SARS Virus
gttatcactacagttctttcaattt

SEQ ID NO: 193697 - DNA, 25 bp, SARS Virus
ttatcactacaggtctttcaatttt

SEQ ID NO: 193698 - DNA, 25 bp, SARS Virus
tatcactacagtgctttcaattttc

SEQ ID NO: 193699 - DNA, 25 bp, SARS Virus
atcactacagttgtttcaattttcg

SEQ ID NO: 193700 - DNA, 25 bp, SARS Virus
tcactacagttcgttcaattttcgt

SEQ ID NO: 193701 - DNA, 25 bp, SARS Virus
cactacagttctgtcaattttcgta

SEQ ID NO: 193702 - DNA, 25 bp, SARS Virus
actacagttcttgcaattttcgtag

SEQ ID NO: 193703 - DNA, 25 bp, SARS Virus
ctacagttctttgaattttcgtagg

SEQ ID NO: 193704 - DNA, 25 bp, SARS Virus
tacagttctttcgattttcgtaggt

SEQ ID NO: 193705 - DNA, 25 bp, SARS Virus
acagttctttcagttttcgtaggtt

SEQ ID NO: 193706 - DNA, 25 bp, SARS Virus
cagttctttcaagtttcgtaggtta

SEQ ID NO: 193707 - DNA, 25 bp, SARS Virus
agttctttcaatgttcgtaggttac

SEQ ID NO: 193708 - DNA, 25 bp, SARS Virus
gttctttcaattgtcgtaggttact

SEQ ID NO: 193709 - DNA, 25 bp, SARS Virus
ttctttcaatttgcgtaggttacta

SEQ ID NO: 193710 - DNA, 25 bp, SARS Virus
tctttcaattttggtaggttactac

SEQ ID NO: 193711 - DNA, 25 bp, SARS Virus
ctttcaattttcgtaggttactact

SEQ ID NO: 193712 - DNA, 25 bp, SARS Virus
tttcaattttcggaggttactactc

SEQ ID NO: 193713 - DNA, 25 bp, SARS Virus
ttcaattttcgtgggttactactca

SEQ ID NO: 193714 - DNA, 25 bp, SARS Virus
tcaattttcgtaggttactactcac

SEQ ID NO: 193715 - DNA, 25 bp, SARS Virus
caattttcgtaggttactactcacg

SEQ ID NO: 193716 - DNA, 25 bp, SARS Virus
aattttcgtagggtactactcacgg

SEQ ID NO: 193717 - DNA, 25 bp, SARS Virus
attttcgtaggtgactactcacggg

SEQ ID NO: 193718 - DNA, 25 bp, SARS Virus
ttttcgtaggttgctactcacggga

SEQ ID NO: 193719 - DNA, 25 bp, SARS Virus
tttcgtaggttagtactcacgggaa

SEQ ID NO: 193720 - DNA, 25 bp, SARS Virus
ttcgtaggttacgactcacgggaat

SEQ ID NO: 193721 - DNA, 25 bp, SARS Virus
tcgtaggttactgctcacgggaatt

SEQ ID NO: 193722 - DNA, 25 bp, SARS Virus
cgtaggttactagtcacgggaattg

SEQ ID NO: 193723 - DNA, 25 bp, SARS Virus
gtaggttactacgcacgggaattgt

SEQ ID NO: 193724 - DNA, 25 bp, SARS Virus
taggttactactgacgggaattgtt

SEQ ID NO: 193725 - DNA, 25 bp, SARS Virus
aggttactactcgcgggaattgtta

SEQ ID NO: 193726 - DNA, 25 bp, SARS Virus
ggttactactcaggggaattgttaa

SEQ ID NO: 193727 - DNA, 25 bp, SARS Virus
gttactactcacgggaattgttaaa

SEQ ID NO: 193728 - DNA, 25 bp, SARS Virus
ttactactcacgggaattgttaaaa

SEQ ID NO: 193729 - DNA, 25 bp, SARS Virus
tactactcacgggaattgttaaaag

SEQ ID NO: 193730 - DNA, 25 bp, SARS Virus
actactcacggggattgttaaaaga

SEQ ID NO: 193731 - DNA, 25 bp, SARS Virus
ctactcacgggagttgttaaaagaa

SEQ ID NO: 193732 - DNA, 25 bp, SARS Virus
tactcacgggaagtgttaaaagaac

SEQ ID NO: 193733 - DNA, 25 bp, SARS Virus
actcacgggaatggttaaaagaact

SEQ ID NO: 193734 - DNA, 25 bp, SARS Virus
ctcacgggaattgttaaaagaactt

SEQ ID NO: 193735 - DNA, 25 bp, SARS Virus
tcacgggaattggtaaaagaacttg

SEQ ID NO: 193736 - DNA, 25 bp, SARS Virus
cacgggaattgtgaaaagaacttga

SEQ ID NO: 193737 - DNA, 25 bp, SARS Virus
acgggaattgttgaaagaacttgaa

SEQ ID NO: 193738 - DNA, 25 bp, SARS Virus
cgggaattgttagaagaacttgaat

SEQ ID NO: 193739 - DNA, 25 bp, SARS Virus
gggaattgttaagagaacttgaatg

SEQ ID NO: 193740 - DNA, 25 bp, SARS Virus
ggaattgttaaaggaacttgaatgg

SEQ ID NO: 193741 - DNA, 25 bp, SARS Virus
gaattgttaaaagaacttgaatgga

SEQ ID NO: 193742 - DNA, 25 bp, SARS Virus
aattgttaaaaggacttgaatggaa

SEQ ID NO: 193743 - DNA, 25 bp, SARS Virus
attgttaaaagagcttgaatggaac

SEQ ID NO: 193744 - DNA, 25 bp, SARS Virus
ttgttaaaagaagttgaatggaacc

SEQ ID NO: 193745 - DNA, 25 bp, SARS Virus
tgttaaaagaacgtgaatggaacct

SEQ ID NO: 193746 - DNA, 25 bp, SARS Virus
gttaaaagaactggaatggaacctt

SEQ ID NO: 193747 - DNA, 25 bp, SARS Virus
ttaaaagaacttgaatggaaccttc

SEQ ID NO: 193748 - DNA, 25 bp, SARS Virus
taaaagaacttggatggaaccttcc

SEQ ID NO: 193749 - DNA, 25 bp, SARS Virus
aaaagaacttgagtggaaccttcca

SEQ ID NO: 193750 - DNA, 25 bp, SARS Virus
aaagaacttgaagggaaccttccat

SEQ ID NO: 193751 - DNA, 25 bp, SARS Virus
aagaacttgaatggaaccttccatt

SEQ ID NO: 193752 - DNA, 25 bp, SARS Virus
agaacttgaatggaaccttccattg

SEQ ID NO: 193753 - DNA, 25 bp, SARS Virus
gaacttgaatgggaccttccattgt

SEQ ID NO: 193754 - DNA, 25 bp, SARS Virus
aacttgaatggagccttccattgtg

SEQ ID NO: 193755 - DNA, 25 bp, SARS Virus
acttgaatggaagcttccattgtgg

SEQ ID NO: 193756 - DNA, 25 bp, SARS Virus
cttgaatggaacgttccattgtggt

SEQ ID NO: 193757 - DNA, 25 bp, SARS Virus
ttgaatggaaccgtccattgtggtc

SEQ ID NO: 193758 - DNA, 25 bp, SARS Virus
tgaatggaacctgccattgtggtct

SEQ ID NO: 193759 - DNA, 25 bp, SARS Virus
gaatggaaccttgcattgtggtctc

SEQ ID NO: 193760 - DNA, 25 bp, SARS Virus
aatggaaccttcgattgtggtctcg

SEQ ID NO: 193761 - DNA, 25 bp, SARS Virus
atggaaccttccgttgtggtctcgt

SEQ ID NO: 193762 - DNA, 25 bp, SARS Virus
tggaaccttccagtgtggtctcgta

SEQ ID NO: 193763 - DNA, 25 bp, SARS Virus
ggaaccttccatggtggtctcgtaa

SEQ ID NO: 193764 - DNA, 25 bp, SARS Virus
gaaccttccattgtggtctcgtaac

SEQ ID NO: 193765 - DNA, 25 bp, SARS Virus
aaccttccattggggtctcgtaaca

SEQ ID NO: 193766 - DNA, 25 bp, SARS Virus
accttccattgtggtctcgtaacag

SEQ ID NO: 193767 - DNA, 25 bp, SARS Virus
ccttccattgtggtctcgtaacaga

SEQ ID NO: 193768 - DNA, 25 bp, SARS Virus
cttccattgtgggctcgtaacagat

SEQ ID NO: 193769 - DNA, 25 bp, SARS Virus
atcgaactagatttcgtaatggtat

SEQ ID NO: 193770 - DNA, 25 bp, SARS Virus
tcgaactagatttcgtaatggtatc

SEQ ID NO: 193771 - DNA, 25 bp, SARS Virus
cgaactagattttgtaatggtatca

SEQ ID NO: 193772 - DNA, 25 bp, SARS Virus
gaactagatttcttaatggtatcat

SEQ ID NO: 193773 - DNA, 25 bp, SARS Virus
aactagatttcgtaatggtatcatc

SEQ ID NO: 193774 - DNA, 25 bp, SARS Virus
actagatttcgttatggtatcatct

SEQ ID NO: 193775 - DNA, 25 bp, SARS Virus
ctagatttcgtattggtatcatctg

SEQ ID NO: 193776 - DNA, 25 bp, SARS Virus
tagatttcgtaatggtatcatctga

SEQ ID NO: 193777 - DNA, 25 bp, SARS Virus
agatttcgtaattgtatcatctgaa

SEQ ID NO: 193778 - DNA, 25 bp, SARS Virus
gatttcgtaatgttatcatctgaaa

SEQ ID NO: 193779 - DNA, 25 bp, SARS Virus
atttcgtaatggtatcatctgaaac

SEQ ID NO: 193780 - DNA, 25 bp, SARS Virus
tttcgtaatggtttcatctgaaaca

SEQ ID NO: 193781 - DNA, 25 bp, SARS Virus
ttcgtaatggtatcatctgaaacat

SEQ ID NO: 193782 - DNA, 25 bp, SARS Virus
tcgtaatggtattatctgaaacatt

SEQ ID NO: 193783 - DNA, 25 bp, SARS Virus
cgtaatggtatcttctgaaacattt

SEQ ID NO: 193784 - DNA, 25 bp, SARS Virus
gtaatggtatcatctgaaacatttg

SEQ ID NO: 193785 - DNA, 25 bp, SARS Virus
taatggtatcatttgaaacatttgt

SEQ ID NO: 193786 - DNA, 25 bp, SARS Virus
aatggtatcatctgaaacatttgtt

SEQ ID NO: 193787 - DNA, 25 bp, SARS Virus
atggtatcatcttaaacatttgttc

SEQ ID NO: 193788 - DNA, 25 bp, SARS Virus
tggtatcatctgtaacatttgttca

SEQ ID NO: 193789 - DNA, 25 bp, SARS Virus
ggtatcatctgatacatttgttcac

SEQ ID NO: 193790 - DNA, 25 bp, SARS Virus
gtatcatctgaatcatttgttcaca

SEQ ID NO: 193791 - DNA, 25 bp, SARS Virus
tatcatctgaaatatttgttcacat

SEQ ID NO: 193792 - DNA, 25 bp, SARS Virus
atcatctgaaacttttgttcacatt

SEQ ID NO: 193793 - DNA, 25 bp, SARS Virus
tcatctgaaacatttgttcacatta

SEQ ID NO: 193794 - DNA, 25 bp, SARS Virus
catctgaaacatttgttcacattac

SEQ ID NO: 193795 - DNA, 25 bp, SARS Virus
atctgaaacatttgttcacattact

SEQ ID NO: 193796 - DNA, 25 bp, SARS Virus
tctgaaacattttttcacattactg

SEQ ID NO: 193797 - DNA, 25 bp, SARS Virus
ctgaaacatttgttcacattactgt

SEQ ID NO: 193798 - DNA, 25 bp, SARS Virus
tgaaacatttgttcacattactgta

SEQ ID NO: 193799 - DNA, 25 bp, SARS Virus
gaaacatttgtttacattactgtaa

SEQ ID NO: 193800 - DNA, 25 bp, SARS Virus
aaacatttgttctcattactgtaag

SEQ ID NO: 193801 - DNA, 25 bp, SARS Virus
aacatttgttcatattactgtaagt

SEQ ID NO: 193802 - DNA, 25 bp, SARS Virus
acatttgttcactttactgtaagta

SEQ ID NO: 193803 - DNA, 25 bp, SARS Virus
catttgttcacattactgtaagtag

SEQ ID NO: 193804 - DNA, 25 bp, SARS Virus
atttgttcacattactgtaagtagt

SEQ ID NO: 193805 - DNA, 25 bp, SARS Virus
tttgttcacatttctgtaagtagtc

SEQ ID NO: 193806 - DNA, 25 bp, SARS Virus
ttgttcacattattgtaagtagtca

SEQ ID NO: 193807 - DNA, 25 bp, SARS Virus
tgttcacattactgtaagtagtcac

SEQ ID NO: 193808 - DNA, 25 bp, SARS Virus
gttcacattactttaagtagtcaca

SEQ ID NO: 193809 - DNA, 25 bp, SARS Virus
ttcacattactgtaagtagtcacag

SEQ ID NO: 193810 - DNA, 25 bp, SARS Virus
tcacattactgttagtagtcacagg

SEQ ID NO: 193811 - DNA, 25 bp, SARS Virus
cacattactgtatgtagtcacaggt

SEQ ID NO: 193812 - DNA, 25 bp, SARS Virus
acattactgtaattagtcacaggtt

SEQ ID NO: 193813 - DNA, 25 bp, SARS Virus
cattactgtaagtagtcacaggttt

SEQ ID NO: 193814 - DNA, 25 bp, SARS Virus
attactgtaagttgtcacaggtttg

SEQ ID NO: 193815 - DNA, 25 bp, SARS Virus
ttactgtaagtattcacaggtttgt

SEQ ID NO: 193816 - DNA, 25 bp, SARS Virus
tactgtaagtagtcacaggtttgtg

SEQ ID NO: 193817 - DNA, 25 bp, SARS Virus
actgtaagtagttacaggtttgtgc

SEQ ID NO: 193818 - DNA, 25 bp, SARS Virus
ctgtaagtagtctcaggtttgtgca

SEQ ID NO: 193819 - DNA, 25 bp, SARS Virus
tgtaagtagtcataggtttgtgcag

SEQ ID NO: 193820 - DNA, 25 bp, SARS Virus
gtaagtagtcactggtttgtgcaga

SEQ ID NO: 193821 - DNA, 25 bp, SARS Virus
taagtagtcacatgtttgtgcagat

SEQ ID NO: 193822 - DNA, 25 bp, SARS Virus
aagtagtcacagttttgtgcagatc

SEQ ID NO: 193823 - DNA, 25 bp, SARS Virus
agtagtcacaggtttgtgcagatcg

SEQ ID NO: 193824 - DNA, 25 bp, SARS Virus
gtagtcacaggtttgtgcagatcgt

SEQ ID NO: 193825 - DNA, 25 bp, SARS Virus
tagtcacaggtttgtgcagatcgtc

SEQ ID NO: 193826 - DNA, 25 bp, SARS Virus
agtcacaggtttttgcagatcgtcg

SEQ ID NO: 193827 - DNA, 25 bp, SARS Virus
gtcacaggtttgtgcagatcgtcgt

SEQ ID NO: 193828 - DNA, 25 bp, SARS Virus
tcacaggtttgttcagatcgtcgta

SEQ ID NO: 193829 - DNA, 25 bp, SARS Virus
cacaggtttgtgtagatcgtcgtag

SEQ ID NO: 193830 - DNA, 25 bp, SARS Virus
acaggtttgtgctgatcgtcgtagt

SEQ ID NO: 193831 - DNA, 25 bp, SARS Virus
caggtttgtgcatatcgtcgtagta

SEQ ID NO: 193832 - DNA, 25 bp, SARS Virus
aggtttgtgcagttcgtcgtagtag

SEQ ID NO: 193833 - DNA, 25 bp, SARS Virus
ggtttgtgcagatcgtcgtagtagt

SEQ ID NO: 193834 - DNA, 25 bp, SARS Virus
gtttgtgcagattgtcgtagtagta

SEQ ID NO: 193835 - DNA, 25 bp, SARS Virus
tttgtgcagatcttcgtagtagtat

SEQ ID NO: 193836 - DNA, 25 bp, SARS Virus
ttgtgcagatcgtcgtagtagtatt

SEQ ID NO: 193837 - DNA, 25 bp, SARS Virus
tgtgcagatcgttgtagtagtattt

SEQ ID NO: 193838 - DNA, 25 bp, SARS Virus
gtgcagatcgtcttagtagtatttg

SEQ ID NO: 193839 - DNA, 25 bp, SARS Virus
tgcagatcgtcgtagtagtatttgt

SEQ ID NO: 193840 - DNA, 25 bp, SARS Virus
gcagatcgtcgttgtagtatttgtc

SEQ ID NO: 193841 - DNA, 25 bp, SARS Virus
cagatcgtcgtattagtatttgtca

SEQ ID NO: 193842 - DNA, 25 bp, SARS Virus
agatcgtcgtagtagtatttgtcac

SEQ ID NO: 193843 - DNA, 25 bp, SARS Virus
gatcgtcgtagttgtatttgtcacg

SEQ ID NO: 193844 - DNA, 25 bp, SARS Virus
atcgtcgtagtattatttgtcacgc

SEQ ID NO: 193845 - DNA, 25 bp, SARS Virus
tcgtcgtagtagtatttgtcacgct

SEQ ID NO: 193846 - DNA, 25 bp, SARS Virus
cgtcgtagtagtttttgtcacgctc

SEQ ID NO: 193847 - DNA, 25 bp, SARS Virus
gtcgtagtagtatttgtcacgctcg

SEQ ID NO: 193848 - DNA, 25 bp, SARS Virus
tcgtagtagtatttgtcacgctcga

SEQ ID NO: 193849 - DNA, 25 bp, SARS Virus
cgtagtagtatttgtcacgctcgac

SEQ ID NO: 193850 - DNA, 25 bp, SARS Virus
gtagtagtatttttcacgctcgaca

SEQ ID NO: 193851 - DNA, 25 bp, SARS Virus
tagtagtatttgtcacgctcgacag

SEQ ID NO: 193852 - DNA, 25 bp, SARS Virus
agtagtatttgttacgctcgacagt

SEQ ID NO: 193853 - DNA, 25 bp, SARS Virus
gtagtatttgtctcgctcgacagta

SEQ ID NO: 193854 - DNA, 25 bp, SARS Virus
tagtatttgtcatgctcgacagtac

SEQ ID NO: 193855 - DNA, 25 bp, SARS Virus
agtatttgtcactctcgacagtact

SEQ ID NO: 193856 - DNA, 25 bp, SARS Virus
gtatttgtcacgttcgacagtactc

SEQ ID NO: 193857 - DNA, 25 bp, SARS Virus
tatttgtcacgctcgacagtactct

SEQ ID NO: 193858 - DNA, 25 bp, SARS Virus
atttgtcacgcttgacagtactctt

SEQ ID NO: 193859 - DNA, 25 bp, SARS Virus
tttgtcacgctctacagtactctta

SEQ ID NO: 193860 - DNA, 25 bp, SARS Virus
ttgtcacgctcgtcagtactcttat

SEQ ID NO: 193861 - DNA, 25 bp, SARS Virus
tgtcacgctcgatagtactcttatt

SEQ ID NO: 193862 - DNA, 25 bp, SARS Virus
gtcacgctcgactgtactcttattc

SEQ ID NO: 193863 - DNA, 25 bp, SARS Virus
tcacgctcgacattactcttattcg

SEQ ID NO: 193864 - DNA, 25 bp, SARS Virus
cacgctcgacagtactcttattcgt

SEQ ID NO: 193865 - DNA, 25 bp, SARS Virus
acgctcgacagttctcttattcgtt

SEQ ID NO: 193866 - DNA, 25 bp, SARS Virus
cgctcgacagtattcttattcgttt

SEQ ID NO: 193867 - DNA, 25 bp, SARS Virus
gctcgacagtactcttattcgtttt

SEQ ID NO: 193868 - DNA, 25 bp, SARS Virus
ctcgacagtacttttattcgttttg

SEQ ID NO: 193869 - DNA, 25 bp, SARS Virus
tcgacagtactcttattcgttttga

SEQ ID NO: 193870 - DNA, 25 bp, SARS Virus
cgacagtactcttattcgttttgat

SEQ ID NO: 193871 - DNA, 25 bp, SARS Virus
gacagtactctttttcgttttgatt

SEQ ID NO: 193872 - DNA, 25 bp, SARS Virus
acagtactcttattcgttttgattt

SEQ ID NO: 193873 - DNA, 25 bp, SARS Virus
cagtactcttattcgttttgatttc

SEQ ID NO: 193874 - DNA, 25 bp, SARS Virus
agtactcttatttgttttgatttcg

SEQ ID NO: 193875 - DNA, 25 bp, SARS Virus
gtactcttattctttttgatttcga

SEQ ID NO: 193876 - DNA, 25 bp, SARS Virus
tactcttattcgttttgatttcgac

SEQ ID NO: 193877 - DNA, 25 bp, SARS Virus
actcttattcgttttgatttcgact

SEQ ID NO: 193878 - DNA, 25 bp, SARS Virus
ctcttattcgttttgatttcgactt

SEQ ID NO: 193879 - DNA, 25 bp, SARS Virus
tcttattcgttttgatttcgacttc

SEQ ID NO: 193880 - DNA, 25 bp, SARS Virus
cttattcgtttttatttcgacttcg

SEQ ID NO: 193881 - DNA, 25 bp, SARS Virus
ttattcgttttgttttcgacttcgt

SEQ ID NO: 193882 - DNA, 25 bp, SARS Virus
tattcgttttgatttcgacttcgta

SEQ ID NO: 193883 - DNA, 25 bp, SARS Virus
attcgttttgatttcgacttcgtat

SEQ ID NO: 193884 - DNA, 25 bp, SARS Virus
ttcgttttgatttcgacttcgtatg

SEQ ID NO: 193885 - DNA, 25 bp, SARS Virus
tcgttttgattttgacttcgtatgt

SEQ ID NO: 193886 - DNA, 25 bp, SARS Virus
cgttttgatttctacttcgtatgta

SEQ ID NO: 193887 - DNA, 25 bp, SARS Virus
gttttgatttcgtcttcgtatgtat

SEQ ID NO: 193888 - DNA, 25 bp, SARS Virus
ttttgatttcgatttcgtatgtatt

SEQ ID NO: 193889 - DNA, 25 bp, SARS Virus
tttgatttcgacttcgtatgtattg

SEQ ID NO: 193890 - DNA, 25 bp, SARS Virus
ttgatttcgacttcgtatgtattgt

SEQ ID NO: 193891 - DNA, 25 bp, SARS Virus
tgatttcgactttgtatgtattgtg

SEQ ID NO: 193892 - DNA, 25 bp, SARS Virus
gatttcgacttcttatgtattgtgt

SEQ ID NO: 193893 - DNA, 25 bp, SARS Virus
atttcgacttcgtatgtattgtgtt

SEQ ID NO: 193894 - DNA, 25 bp, SARS Virus
tttcgacttcgtttgtattgtgtta

SEQ ID NO: 193895 - DNA, 25 bp, SARS Virus
ttcgacttcgtatgtattgtgttag

SEQ ID NO: 193896 - DNA, 25 bp, SARS Virus
tcgacttcgtatttattgtgttagg

SEQ ID NO: 193897 - DNA, 25 bp, SARS Virus
cgacttcgtatgtattgtgttagga

SEQ ID NO: 193898 - DNA, 25 bp, SARS Virus
gacttcgtatgttttgtgttaggaa

SEQ ID NO: 193899 - DNA, 25 bp, SARS Virus
acttcgtatgtattgtgttaggaat

SEQ ID NO: 193900 - DNA, 25 bp, SARS Virus
cttcgtatgtattgtgttaggaatt

SEQ ID NO: 193901 - DNA, 25 bp, SARS Virus
ttcgtatgtattttgttaggaattc

SEQ ID NO: 193902 - DNA, 25 bp, SARS Virus
tcgtatgtattgtgttaggaattcg

SEQ ID NO: 193903 - DNA, 25 bp, SARS Virus
cgtatgtattgttttaggaattcgg

SEQ ID NO: 193904 - DNA, 25 bp, SARS Virus
gtatgtattgtgttaggaattcgga

SEQ ID NO: 193905 - DNA, 25 bp, SARS Virus
tatgtattgtgttaggaattcggat

SEQ ID NO: 193906 - DNA, 25 bp, SARS Virus
atgtattgtgtttggaattcggata

SEQ ID NO: 193907 - DNA, 25 bp, SARS Virus
tgtattgtgttatgaattcggatat

SEQ ID NO: 193908 - DNA, 25 bp, SARS Virus
gtattgtgttagtaattcggatatt

SEQ ID NO: 193909 - DNA, 25 bp, SARS Virus
tattgtgttaggtattcggatattg

SEQ ID NO: 193910 - DNA, 25 bp, SARS Virus
attgtgttaggatttcggatattgg

SEQ ID NO: 193911 - DNA, 25 bp, SARS Virus
ttgtgttaggaattcggatattggt

SEQ ID NO: 193912 - DNA, 25 bp, SARS Virus
tgtgttaggaattcggatattggtc

SEQ ID NO: 193913 - DNA, 25 bp, SARS Virus
gtgttaggaatttggatattggtct

SEQ ID NO: 193914 - DNA, 25 bp, SARS Virus
tgttaggaattctgatattggtctg

SEQ ID NO: 193915 - DNA, 25 bp, SARS Virus
gttaggaattcgtatattggtctgt

SEQ ID NO: 193916 - DNA, 25 bp, SARS Virus
ttaggaattcggttattggtctgtt

SEQ ID NO: 193917 - DNA, 25 bp, SARS Virus
taggaattcggatattggtctgttc

SEQ ID NO: 193918 - DNA, 25 bp, SARS Virus
aggaattcggattttggtctgttcg

SEQ ID NO: 193919 - DNA, 25 bp, SARS Virus
ggaattcggatattggtctgttcga

SEQ ID NO: 193920 - DNA, 25 bp, SARS Virus
gaattcggatattggtctgttcgat

SEQ ID NO: 193921 - DNA, 25 bp, SARS Virus
aattcggatatttgtctgttcgatc

SEQ ID NO: 193922 - DNA, 25 bp, SARS Virus
attcggatattgttctgttcgatca

SEQ ID NO: 193923 - DNA, 25 bp, SARS Virus
ttcggatattggtctgttcgatcac

SEQ ID NO: 193924 - DNA, 25 bp, SARS Virus
tcggatattggtttgttcgatcaca

SEQ ID NO: 193925 - DNA, 25 bp, SARS Virus
cggatattggtctgttcgatcacag

SEQ ID NO: 193926 - DNA, 25 bp, SARS Virus
ggatattggtcttttcgatcacagt

SEQ ID NO: 193927 - DNA, 25 bp, SARS Virus
gatattggtctgttcgatcacagtc

SEQ ID NO: 193928 - DNA, 25 bp, SARS Virus
atattggtctgttcgatcacagtcg

SEQ ID NO: 193929 - DNA, 25 bp, SARS Virus
tattggtctgtttgatcacagtcgg

SEQ ID NO: 193930 - DNA, 25 bp, SARS Virus
attggtctgttctatcacagtcggt

SEQ ID NO: 193931 - DNA, 25 bp, SARS Virus
ttggtctgttcgttcacagtcggtt

SEQ ID NO: 193932 - DNA, 25 bp, SARS Virus
tggtctgttcgatcacagtcggtta

SEQ ID NO: 193933 - DNA, 25 bp, SARS Virus
ggtctgttcgattacagtcggttaa

SEQ ID NO: 193934 - DNA, 25 bp, SARS Virus
gtctgttcgatctcagtcggttaag

SEQ ID NO: 193935 - DNA, 25 bp, SARS Virus
tctgttcgatcatagtcggttaagt

SEQ ID NO: 193936 - DNA, 25 bp, SARS Virus
ctgttcgatcactgtcggttaagtt

SEQ ID NO: 193937 - DNA, 25 bp, SARS Virus
tgttcgatcacattcggttaagttc

SEQ ID NO: 193938 - DNA, 25 bp, SARS Virus
gttcgatcacagtcggttaagttcg

SEQ ID NO: 193939 - DNA, 25 bp, SARS Virus
ttcgatcacagttggttaagttcgg

SEQ ID NO: 193940 - DNA, 25 bp, SARS Virus
tcgatcacagtctgttaagttcggt

SEQ ID NO: 193941 - DNA, 25 bp, SARS Virus
cgatcacagtcgtttaagttcggta

SEQ ID NO: 193942 - DNA, 25 bp, SARS Virus
gatcacagtcggttaagttcggtac

SEQ ID NO: 193943 - DNA, 25 bp, SARS Virus
atcacagtcggttaagttcggtaca

SEQ ID NO: 193944 - DNA, 25 bp, SARS Virus
tcacagtcggtttagttcggtacag

SEQ ID NO: 193945 - DNA, 25 bp, SARS Virus
cacagtcggttatgttcggtacagt

SEQ ID NO: 193946 - DNA, 25 bp, SARS Virus
acagtcggttaatttcggtacagta

SEQ ID NO: 193947 - DNA, 25 bp, SARS Virus
cagtcggttaagttcggtacagtac

SEQ ID NO: 193948 - DNA, 25 bp, SARS Virus
agtcggttaagttcggtacagtact

SEQ ID NO: 193949 - DNA, 25 bp, SARS Virus
gtcggttaagtttggtacagtacta

SEQ ID NO: 193950 - DNA, 25 bp, SARS Virus
tcggttaagttctgtacagtactat

SEQ ID NO: 193951 - DNA, 25 bp, SARS Virus
cggttaagttcgttacagtactatg

SEQ ID NO: 193952 - DNA, 25 bp, SARS Virus
ggttaagttcggtacagtactatgc

SEQ ID NO: 193953 - DNA, 25 bp, SARS Virus
gttaagttcggttcagtactatgcg

SEQ ID NO: 193954 - DNA, 25 bp, SARS Virus
ttaagttcggtatagtactatgcgt

SEQ ID NO: 193955 - DNA, 25 bp, SARS Virus
taagttcggtactgtactatgcgta

SEQ ID NO: 193956 - DNA, 25 bp, SARS Virus
aagttcggtacattactatgcgtag

SEQ ID NO: 193957 - DNA, 25 bp, SARS Virus
agttcggtacagtactatgcgtagt

SEQ ID NO: 193958 - DNA, 25 bp, SARS Virus
gttcggtacagttctatgcgtagtg

SEQ ID NO: 193959 - DNA, 25 bp, SARS Virus
ttcggtacagtattatgcgtagtgg

SEQ ID NO: 193960 - DNA, 25 bp, SARS Virus
tcggtacagtactatgcgtagtggg

SEQ ID NO: 193961 - DNA, 25 bp, SARS Virus
cggtacagtactttgcgtagtgggt

SEQ ID NO: 193962 - DNA, 25 bp, SARS Virus
ggtacagtactatgcgtagtgggtc

SEQ ID NO: 193963 - DNA, 25 bp, SARS Virus
gtacagtactattcgtagtgggtcg

SEQ ID NO: 193964 - DNA, 25 bp, SARS Virus
tacagtactatgtgtagtgggtcga

SEQ ID NO: 193965 - DNA, 25 bp, SARS Virus
acagtactatgcttagtgggtcgat

SEQ ID NO: 193966 - DNA, 25 bp, SARS Virus
cagtactatgcgtagtgggtcgatc

SEQ ID NO: 193967 - DNA, 25 bp, SARS Virus
agtactatgcgttgtgggtcgatcg

SEQ ID NO: 193968 - DNA, 25 bp, SARS Virus
gtactatgcgtattgggtcgatcgt

SEQ ID NO: 193969 - DNA, 25 bp, SARS Virus
tactatgcgtagtgggtcgatcgtc

SEQ ID NO: 193970 - DNA, 25 bp, SARS Virus
actatgcgtagttggtcgatcgtcc

SEQ ID NO: 193971 - DNA, 25 bp, SARS Virus
ctatgcgtagtgtgtcgatcgtccg

SEQ ID NO: 193972 - DNA, 25 bp, SARS Virus
tatgcgtagtggttcgatcgtccgt

SEQ ID NO: 193973 - DNA, 25 bp, SARS Virus
atgcgtagtgggtcgatcgtccgta

SEQ ID NO: 193974 - DNA, 25 bp, SARS Virus
tgcgtagtgggttgatcgtccgtac

SEQ ID NO: 193975 - DNA, 25 bp, SARS Virus
gcgtagtgggtctatcgtccgtaca

SEQ ID NO: 193976 - DNA, 25 bp, SARS Virus
cgtagtgggtcgttcgtccgtacat

SEQ ID NO: 193977 - DNA, 25 bp, SARS Virus
gtagtgggtcgatcgtccgtacatc

SEQ ID NO: 193978 - DNA, 25 bp, SARS Virus
tagtgggtcgattgtccgtacatct

SEQ ID NO: 193979 - DNA, 25 bp, SARS Virus
agtgggtcgatcttccgtacatctg

SEQ ID NO: 193980 - DNA, 25 bp, SARS Virus
gtgggtcgatcgtccgtacatctgg

SEQ ID NO: 193981 - DNA, 25 bp, SARS Virus
tgggtcgatcgttcgtacatctggt

SEQ ID NO: 193982 - DNA, 25 bp, SARS Virus
gggtcgatcgtctgtacatctggta

SEQ ID NO: 193983 - DNA, 25 bp, SARS Virus
ggtcgatcgtccttacatctggtat

SEQ ID NO: 193984 - DNA, 25 bp, SARS Virus
gtcgatcgtccgtacatctggtata

SEQ ID NO: 193985 - DNA, 25 bp, SARS Virus
tcgatcgtccgttcatctggtataa

SEQ ID NO: 193986 - DNA, 25 bp, SARS Virus
cgatcgtccgtatatctggtataat

SEQ ID NO: 193987 - DNA, 25 bp, SARS Virus
gatcgtccgtacttctggtataatt

SEQ ID NO: 193988 - DNA, 25 bp, SARS Virus
atcgtccgtacatctggtataattt

SEQ ID NO: 193989 - DNA, 25 bp, SARS Virus
tcgtccgtacatttggtataatttc

SEQ ID NO: 193990 - DNA, 25 bp, SARS Virus
cgtccgtacatctggtataatttca

SEQ ID NO: 193991 - DNA, 25 bp, SARS Virus
gtccgtacatcttgtataatttcat

SEQ ID NO: 193992 - DNA, 25 bp, SARS Virus
tccgtacatctgttataatttcatt

SEQ ID NO: 193993 - DNA, 25 bp, SARS Virus
ccgtacatctggtataatttcattc

SEQ ID NO: 193994 - DNA, 25 bp, SARS Virus
cgtacatctggtttaatttcattcg

SEQ ID NO: 193995 - DNA, 25 bp, SARS Virus
gtacatctggtataatttcattcgt

SEQ ID NO: 193996 - DNA, 25 bp, SARS Virus
tacatctggtattatttcattcgtt

SEQ ID NO: 193997 - DNA, 25 bp, SARS Virus
acatctggtatattttcattcgttg

SEQ ID NO: 193998 - DNA, 25 bp, SARS Virus
catctggtataatttcattcgttga

SEQ ID NO: 193999 - DNA, 25 bp, SARS Virus
atctggtataatttcattcgttgac

SEQ ID NO: 194000 - DNA, 25 bp, SARS Virus
tctggtataatttcattcgttgaca

SEQ ID NO: 194001 - DNA, 25 bp, SARS Virus
ctggtataattttattcgttgacaa

SEQ ID NO: 194002 - DNA, 25 bp, SARS Virus
tggtataatttctttcgttgacaac

SEQ ID NO: 194003 - DNA, 25 bp, SARS Virus
ggtataatttcattcgttgacaacg

SEQ ID NO: 194004 - DNA, 25 bp, SARS Virus
gtataatttcattcgttgacaacgt

SEQ ID NO: 194005 - DNA, 25 bp, SARS Virus
tataatttcatttgttgacaacgtt

SEQ ID NO: 194006 - DNA, 25 bp, SARS Virus
ataatttcattctttgacaacgttc

SEQ ID NO: 194007 - DNA, 25 bp, SARS Virus
taatttcattcgttgacaacgttct

SEQ ID NO: 194008 - DNA, 25 bp, SARS Virus
aatttcattcgttgacaacgttctc

SEQ ID NO: 194009 - DNA, 25 bp, SARS Virus
atttcattcgtttacaacgttctct

SEQ ID NO: 194010 - DNA, 25 bp, SARS Virus
tttcattcgttgtcaacgttctctt

SEQ ID NO: 194011 - DNA, 25 bp, SARS Virus
ttcattcgttgataacgttctcttc

SEQ ID NO: 194012 - DNA, 25 bp, SARS Virus
tcattcgttgactacgttctcttcc

SEQ ID NO: 194013 - DNA, 25 bp, SARS Virus
cattcgttgacatcgttctcttcca

SEQ ID NO: 194014 - DNA, 25 bp, SARS Virus
attcgttgacaatgttctcttccat

SEQ ID NO: 194015 - DNA, 25 bp, SARS Virus
ttcgttgacaactttctcttccatt

SEQ ID NO: 194016 - DNA, 25 bp, SARS Virus
tcgttgacaacgttctcttccattg

SEQ ID NO: 194017 - DNA, 25 bp, SARS Virus
cgttgacaacgttctcttccattgt

SEQ ID NO: 194018 - DNA, 25 bp, SARS Virus
gttgacaacgttttcttccattgtc

SEQ ID NO: 194019 - DNA, 25 bp, SARS Virus
ttgacaacgttctcttccattgtct

SEQ ID NO: 194020 - DNA, 25 bp, SARS Virus
tgacaacgttcttttccattgtctt

SEQ ID NO: 194021 - DNA, 25 bp, SARS Virus
gacaacgttctcttccattgtcttt

SEQ ID NO: 194022 - DNA, 25 bp, SARS Virus
acaacgttctcttccattgtctttg

SEQ ID NO: 194023 - DNA, 25 bp, SARS Virus
caacgttctctttcattgtctttgt

SEQ ID NO: 194024 - DNA, 25 bp, SARS Virus
aacgttctcttctattgtctttgtt

SEQ ID NO: 194025 - DNA, 25 bp, SARS Virus
acgttctcttcctttgtctttgttc

SEQ ID NO: 194026 - DNA, 25 bp, SARS Virus
cgttctcttccattgtctttgttcg

SEQ ID NO: 194027 - DNA, 25 bp, SARS Virus
gttctcttccattgtctttgttcgt

SEQ ID NO: 194028 - DNA, 25 bp, SARS Virus
ttctcttccattttctttgttcgtg

SEQ ID NO: 194029 - DNA, 25 bp, SARS Virus
tctcttccattgtctttgttcgtgt

SEQ ID NO: 194030 - DNA, 25 bp, SARS Virus
ctcttccattgtttttgttcgtgtt

SEQ ID NO: 194031 - DNA, 25 bp, SARS Virus
tcttccattgtctttgttcgtgttc

SEQ ID NO: 194032 - DNA, 25 bp, SARS Virus
cttccattgtctttgttcgtgttct

SEQ ID NO: 194033 - DNA, 25 bp, SARS Virus
ttccattgtctttgttcgtgttctt

SEQ ID NO: 194034 - DNA, 25 bp, SARS Virus
tccattgtcttttttcgtgttctta

SEQ ID NO: 194035 - DNA, 25 bp, SARS Virus
ccattgtctttgttcgtgttcttac

SEQ ID NO: 194036 - DNA, 25 bp, SARS Virus
cattgtctttgttcgtgttcttacg

SEQ ID NO: 194037 - DNA, 25 bp, SARS Virus
attgtctttgtttgtgttcttacgc

SEQ ID NO: 194038 - DNA, 25 bp, SARS Virus
ttgtctttgttcttgttcttacgca

SEQ ID NO: 194039 - DNA, 25 bp, SARS Virus
tgtctttgttcgtgttcttacgcac

SEQ ID NO: 194040 - DNA, 25 bp, SARS Virus
gtctttgttcgttttcttacgcacg

SEQ ID NO: 194041 - DNA, 25 bp, SARS Virus
tctttgttcgtgttcttacgcacga

SEQ ID NO: 194042 - DNA, 25 bp, SARS Virus
ctttgttcgtgttcttacgcacgaa

SEQ ID NO: 194043 - DNA, 25 bp, SARS Virus
tttgttcgtgtttttacgcacgaat

SEQ ID NO: 194044 - DNA, 25 bp, SARS Virus
ttgttcgtgttcttacgcacgaata

SEQ ID NO: 194045 - DNA, 25 bp, SARS Virus
tgttcgtgttcttacgcacgaatac

SEQ ID NO: 194046 - DNA, 25 bp, SARS Virus
gttcgtgttctttcgcacgaatacg

SEQ ID NO: 194047 - DNA, 25 bp, SARS Virus
ttcgtgttcttatgcacgaatacga

SEQ ID NO: 194048 - DNA, 25 bp, SARS Virus
tcgtgttcttactcacgaatacgaa

SEQ ID NO: 194049 - DNA, 25 bp, SARS Virus
cgtgttcttacgtacgaatacgaat

SEQ ID NO: 194050 - DNA, 25 bp, SARS Virus
gtgttcttacgctcgaatacgaatt

SEQ ID NO: 194051 - DNA, 25 bp, SARS Virus
tgttcttacgcatgaatacgaattg

SEQ ID NO: 194052 - DNA, 25 bp, SARS Virus
gttcttacgcactaatacgaattgt

SEQ ID NO: 194053 - DNA, 25 bp, SARS Virus
ttcttacgcacgtatacgaattgtt

SEQ ID NO: 194054 - DNA, 25 bp, SARS Virus
tcttacgcacgattacgaattgttc

SEQ ID NO: 194055 - DNA, 25 bp, SARS Virus
cttacgcacgaatacgaattgttcg

SEQ ID NO: 194056 - DNA, 25 bp, SARS Virus
ttacgcacgaattcgaattgttcgt

SEQ ID NO: 194057 - DNA, 25 bp, SARS Virus
tacgcacgaatatgaattgttcgtc

SEQ ID NO: 194058 - DNA, 25 bp, SARS Virus
acgcacgaatactaattgttcgtcg

SEQ ID NO: 194059 - DNA, 25 bp, SARS Virus
cgcacgaatacgtattgttcgtcgt

SEQ ID NO: 194060 - DNA, 25 bp, SARS Virus
gcacgaatacgatttgttcgtcgta

SEQ ID NO: 194061 - DNA, 25 bp, SARS Virus
cacgaatacgaattgttcgtcgtat

SEQ ID NO: 194062 - DNA, 25 bp, SARS Virus
acgaatacgaattgttcgtcgtatc

SEQ ID NO: 194063 - DNA, 25 bp, SARS Virus
cgaatacgaatttttcgtcgtatcg

SEQ ID NO: 194064 - DNA, 25 bp, SARS Virus
gaatacgaattgttcgtcgtatcgt

SEQ ID NO: 194065 - DNA, 25 bp, SARS Virus
aatacgaattgttcgtcgtatcgtg

SEQ ID NO: 194066 - DNA, 25 bp, SARS Virus
atacgaattgtttgtcgtatcgtgt

SEQ ID NO: 194067 - DNA, 25 bp, SARS Virus
tacgaattgttcttcgtatcgtgta

SEQ ID NO: 194068 - DNA, 25 bp, SARS Virus
acgaattgttcgtcgtatcgtgtac

SEQ ID NO: 194069 - DNA, 25 bp, SARS Virus
cgaattgttcgttgtatcgtgtacg

SEQ ID NO: 194070 - DNA, 25 bp, SARS Virus
gaattgttcgtcttatcgtgtacgt

SEQ ID NO: 194071 - DNA, 25 bp, SARS Virus
aattgttcgtcgtatcgtgtacgtc

SEQ ID NO: 194072 - DNA, 25 bp, SARS Virus
attgttcgtcgtttcgtgtacgtcg

SEQ ID NO: 194073 - DNA, 25 bp, SARS Virus
ttgttcgtcgtatcgtgtacgtcgt

SEQ ID NO: 194074 - DNA, 25 bp, SARS Virus
tgttcgtcgtattgtgtacgtcgtt

SEQ ID NO: 194075 - DNA, 25 bp, SARS Virus
gttcgtcgtatcttgtacgtcgtta

SEQ ID NO: 194076 - DNA, 25 bp, SARS Virus
ttcgtcgtatcgtgtacgtcgttaa

SEQ ID NO: 194077 - DNA, 25 bp, SARS Virus
tcgtcgtatcgtttacgtcgttaac

SEQ ID NO: 194078 - DNA, 25 bp, SARS Virus
cgtcgtatcgtgtacgtcgttaacg

SEQ ID NO: 194079 - DNA, 25 bp, SARS Virus
gtcgtatcgtgttcgtcgttaacgg

SEQ ID NO: 194080 - DNA, 25 bp, SARS Virus
tcgtatcgtgtatgtcgttaacggt

SEQ ID NO: 194081 - DNA, 25 bp, SARS Virus
cgtatcgtgtacttcgttaacggta

SEQ ID NO: 194082 - DNA, 25 bp, SARS Virus
gtatcgtgtacgtcgttaacggtat

SEQ ID NO: 194083 - DNA, 25 bp, SARS Virus
tatcgtgtacgttgttaacggtatt

SEQ ID NO: 194084 - DNA, 25 bp, SARS Virus
atcgtgtacgtctttaacggtatta

SEQ ID NO: 194085 - DNA, 25 bp, SARS Virus
tcgtgtacgtcgttaacggtattat

SEQ ID NO: 194086 - DNA, 25 bp, SARS Virus
cgtgtacgtcgttaacggtattatg

SEQ ID NO: 194087 - DNA, 25 bp, SARS Virus
gtgtacgtcgtttacggtattatgg

SEQ ID NO: 194088 - DNA, 25 bp, SARS Virus
tgtacgtcgttatcggtattatggt

SEQ ID NO: 194089 - DNA, 25 bp, SARS Virus
gtacgtcgttaatggtattatggtt

SEQ ID NO: 194090 - DNA, 25 bp, SARS Virus
tacgtcgttaactgtattatggttc

SEQ ID NO: 194091 - DNA, 25 bp, SARS Virus
acgtcgttaacgttattatggttct

SEQ ID NO: 194092 - DNA, 25 bp, SARS Virus
cgtcgttaacggtattatggttctc

SEQ ID NO: 194093 - DNA, 25 bp, SARS Virus
gtcgttaacggttttatggttctca

SEQ ID NO: 194094 - DNA, 25 bp, SARS Virus
tcgttaacggtattatggttctcat

SEQ ID NO: 194095 - DNA, 25 bp, SARS Virus
cgttaacggtattatggttctcatt

SEQ ID NO: 194096 - DNA, 25 bp, SARS Virus
gttaacggtattttggttctcattt

SEQ ID NO: 194097 - DNA, 25 bp, SARS Virus
ttaacggtattatggttctcattta

SEQ ID NO: 194098 - DNA, 25 bp, SARS Virus
taacggtattattgttctcatttac

SEQ ID NO: 194099 - DNA, 25 bp, SARS Virus
aacggtattatgtttctcatttacc

SEQ ID NO: 194100 - DNA, 25 bp, SARS Virus
acggtattatggttctcatttaccg

SEQ ID NO: 194101 - DNA, 25 bp, SARS Virus
cggtattatggttctcatttaccgt

SEQ ID NO: 194102 - DNA, 25 bp, SARS Virus
ggtattatggttttcatttaccgtt

SEQ ID NO: 194103 - DNA, 25 bp, SARS Virus
gtattatggttctcatttaccgttc

SEQ ID NO: 194104 - DNA, 25 bp, SARS Virus
tattatggttcttatttaccgttct

SEQ ID NO: 194105 - DNA, 25 bp, SARS Virus
attatggttctcttttaccgttctt

SEQ ID NO: 194106 - DNA, 25 bp, SARS Virus
ttatggttctcatttaccgttcttt

SEQ ID NO: 194107 - DNA, 25 bp, SARS Virus
tatggttctcatttaccgttctttc

SEQ ID NO: 194108 - DNA, 25 bp, SARS Virus
atggttctcatttaccgttctttcg

SEQ ID NO: 194109 - DNA, 25 bp, SARS Virus
tggttctcattttccgttctttcgt

SEQ ID NO: 194110 - DNA, 25 bp, SARS Virus
ggttctcatttatcgttctttcgta

SEQ ID NO: 194111 - DNA, 25 bp, SARS Virus
gttctcatttactgttctttcgtaa

SEQ ID NO: 194112 - DNA, 25 bp, SARS Virus
ttctcatttacctttctttcgtaag

SEQ ID NO: 194113 - DNA, 25 bp, SARS Virus
tctcatttaccgttctttcgtaaga

SEQ ID NO: 194114 - DNA, 25 bp, SARS Virus
ctcatttaccgttctttcgtaagag

SEQ ID NO: 194115 - DNA, 25 bp, SARS Virus
tcatttaccgttttttcgtaagagc

SEQ ID NO: 194116 - DNA, 25 bp, SARS Virus
catttaccgttctttcgtaagagca

SEQ ID NO: 194117 - DNA, 25 bp, SARS Virus
atttaccgttctttcgtaagagcat

SEQ ID NO: 194118 - DNA, 25 bp, SARS Virus
tttaccgttctttcgtaagagcatt

SEQ ID NO: 194119 - DNA, 25 bp, SARS Virus
ttaccgttcttttgtaagagcattt

SEQ ID NO: 194120 - DNA, 25 bp, SARS Virus
taccgttctttcttaagagcatttg

SEQ ID NO: 194121 - DNA, 25 bp, SARS Virus
accgttctttcgtaagagcatttgt

SEQ ID NO: 194122 - DNA, 25 bp, SARS Virus
ccgttctttcgttagagcatttgtt

SEQ ID NO: 194123 - DNA, 25 bp, SARS Virus
cgttctttcgtatgagcatttgttt

SEQ ID NO: 194124 - DNA, 25 bp, SARS Virus
gttctttcgtaatagcatttgtttc

SEQ ID NO: 194125 - DNA, 25 bp, SARS Virus
ttctttcgtaagtgcatttgtttct

SEQ ID NO: 194126 - DNA, 25 bp, SARS Virus
tctttcgtaagatcatttgtttctt

SEQ ID NO: 194127 - DNA, 25 bp, SARS Virus
ctttcgtaagagtatttgtttcttt

SEQ ID NO: 194128 - DNA, 25 bp, SARS Virus
tttcgtaagagcttttgtttctttt

SEQ ID NO: 194129 - DNA, 25 bp, SARS Virus
ttcgtaagagcatttgtttcttttt

SEQ ID NO: 194130 - DNA, 25 bp, SARS Virus
tcgtaagagcatttgtttctttttg

SEQ ID NO: 194131 - DNA, 25 bp, SARS Virus
cgtaagagcatttgtttctttttgt

SEQ ID NO: 194132 - DNA, 25 bp, SARS Virus
gtaagagcatttttttctttttgtc

SEQ ID NO: 194133 - DNA, 25 bp, SARS Virus
taagagcatttgtttctttttgtca

SEQ ID NO: 194134 - DNA, 25 bp, SARS Virus
aagagcatttgtttctttttgtcac

SEQ ID NO: 194135 - DNA, 25 bp, SARS Virus
agagcatttgtttctttttgtcact

SEQ ID NO: 194136 - DNA, 25 bp, SARS Virus
gagcatttgtttttttttgtcactg

SEQ ID NO: 194137 - DNA, 25 bp, SARS Virus
agcatttgtttctttttgtcactgg

SEQ ID NO: 194138 - DNA, 25 bp, SARS Virus
gcatttgtttctttttgtcactggt

SEQ ID NO: 194139 - DNA, 25 bp, SARS Virus
catttgtttctttttgtcactggtg

SEQ ID NO: 194140 - DNA, 25 bp, SARS Virus
atttgtttctttttgtcactggtga

SEQ ID NO: 194141 - DNA, 25 bp, SARS Virus
tttgtttctttttgtcactggtgac

SEQ ID NO: 194142 - DNA, 25 bp, SARS Virus
ttgtttctttttttcactggtgaca

SEQ ID NO: 194143 - DNA, 25 bp, SARS Virus
tgtttctttttgtcactggtgacac

SEQ ID NO: 194144 - DNA, 25 bp, SARS Virus
gtttctttttgttactggtgacaca

SEQ ID NO: 194145 - DNA, 25 bp, SARS Virus
tttctttttgtctctggtgacacat

SEQ ID NO: 194146 - DNA, 25 bp, SARS Virus
ttctttttgtcattggtgacacatg

SEQ ID NO: 194147 - DNA, 25 bp, SARS Virus
tctttttgtcactggtgacacatga

SEQ ID NO: 194148 - DNA, 25 bp, SARS Virus
ctttttgtcacttgtgacacatgaa

SEQ ID NO: 194149 - DNA, 25 bp, SARS Virus
tttttgtcactgttgacacatgaaa

SEQ ID NO: 194150 - DNA, 25 bp, SARS Virus
ttttgtcactggtgacacatgaaac

SEQ ID NO: 194151 - DNA, 25 bp, SARS Virus
tttgtcactggttacacatgaaact

SEQ ID NO: 194152 - DNA, 25 bp, SARS Virus
ttgtcactggtgtcacatgaaactt

SEQ ID NO: 194153 - DNA, 25 bp, SARS Virus
tgtcactggtgatacatgaaacttg

SEQ ID NO: 194154 - DNA, 25 bp, SARS Virus
gtcactggtgactcatgaaacttgt

SEQ ID NO: 194155 - DNA, 25 bp, SARS Virus
tcactggtgacatatgaaacttgtt

SEQ ID NO: 194156 - DNA, 25 bp, SARS Virus
cactggtgacacttgaaacttgttc

SEQ ID NO: 194157 - DNA, 25 bp, SARS Virus
actggtgacacatgaaacttgttct

SEQ ID NO: 194158 - DNA, 25 bp, SARS Virus
ctggtgacacattaaacttgttctt

SEQ ID NO: 194159 - DNA, 25 bp, SARS Virus
tggtgacacatgtaacttgttctta

SEQ ID NO: 194160 - DNA, 25 bp, SARS Virus
ggtgacacatgatacttgttcttag

SEQ ID NO: 194161 - DNA, 25 bp, SARS Virus
gtgacacatgaatcttgttcttagt

SEQ ID NO: 194162 - DNA, 25 bp, SARS Virus
tgacacatgaaatttgttcttagtt

SEQ ID NO: 194163 - DNA, 25 bp, SARS Virus
gacacatgaaacttgttcttagtta

SEQ ID NO: 194164 - DNA, 25 bp, SARS Virus
acacatgaaacttgttcttagttat

SEQ ID NO: 194165 - DNA, 25 bp, SARS Virus
cacatgaaactttttcttagttatc

SEQ ID NO: 194166 - DNA, 25 bp, SARS Virus
acatgaaacttgttcttagttatca

SEQ ID NO: 194167 - DNA, 25 bp, SARS Virus
catgaaacttgttcttagttatcac

SEQ ID NO: 194168 - DNA, 25 bp, SARS Virus
atgaaacttgtttttagttatcact

SEQ ID NO: 194169 - DNA, 25 bp, SARS Virus
tgaaacttgttcttagttatcacta

SEQ ID NO: 194170 - DNA, 25 bp, SARS Virus
gaaacttgttcttagttatcactac

SEQ ID NO: 194171 - DNA, 25 bp, SARS Virus
aaacttgttctttgttatcactaca

SEQ ID NO: 194172 - DNA, 25 bp, SARS Virus
aacttgttcttatttatcactacag

SEQ ID NO: 194173 - DNA, 25 bp, SARS Virus
acttgttcttagttatcactacagt

SEQ ID NO: 194174 - DNA, 25 bp, SARS Virus
cttgttcttagttatcactacagtt

SEQ ID NO: 194175 - DNA, 25 bp, SARS Virus
ttgttcttagttttcactacagttc

SEQ ID NO: 194176 - DNA, 25 bp, SARS Virus
tgttcttagttatcactacagttct

SEQ ID NO: 194177 - DNA, 25 bp, SARS Virus
gttcttagttattactacagttctt

SEQ ID NO: 194178 - DNA, 25 bp, SARS Virus
ttcttagttatctctacagttcttt

SEQ ID NO: 194179 - DNA, 25 bp, SARS Virus
tcttagttatcattacagttctttc

SEQ ID NO: 194180 - DNA, 25 bp, SARS Virus
cttagttatcactacagttctttca

SEQ ID NO: 194181 - DNA, 25 bp, SARS Virus
ttagttatcacttcagttctttcaa

SEQ ID NO: 194182 - DNA, 25 bp, SARS Virus
tagttatcactatagttctttcaat

SEQ ID NO: 194183 - DNA, 25 bp, SARS Virus
agttatcactactgttctttcaatt

SEQ ID NO: 194184 - DNA, 25 bp, SARS Virus
gttatcactacatttctttcaattt

SEQ ID NO: 194185 - DNA, 25 bp, SARS Virus
ttatcactacagttctttcaatttt

SEQ ID NO: 194186 - DNA, 25 bp, SARS Virus
tatcactacagttctttcaattttc

SEQ ID NO: 194187 - DNA, 25 bp, SARS Virus
atcactacagttttttcaattttcg

SEQ ID NO: 194188 - DNA, 25 bp, SARS Virus
tcactacagttctttcaattttcgt

SEQ ID NO: 194189 - DNA, 25 bp, SARS Virus
cactacagttctttcaattttcgta

SEQ ID NO: 194190 - DNA, 25 bp, SARS Virus
actacagttctttcaattttcgtag

SEQ ID NO: 194191 - DNA, 25 bp, SARS Virus
ctacagttcttttaattttcgtagg

SEQ ID NO: 194192 - DNA, 25 bp, SARS Virus
tacagttctttctattttcgtaggt

SEQ ID NO: 194193 - DNA, 25 bp, SARS Virus
acagttctttcatttttcgtaggtt

SEQ ID NO: 194194 - DNA, 25 bp, SARS Virus
cagttctttcaattttcgtaggtta

SEQ ID NO: 194195 - DNA, 25 bp, SARS Virus
agttctttcaattttcgtaggttac

SEQ ID NO: 194196 - DNA, 25 bp, SARS Virus
gttctttcaattttcgtaggttact

SEQ ID NO: 194197 - DNA, 25 bp, SARS Virus
ttctttcaattttcgtaggttacta

SEQ ID NO: 194198 - DNA, 25 bp, SARS Virus
tctttcaatttttgtaggttactac

SEQ ID NO: 194199 - DNA, 25 bp, SARS Virus
ctttcaattttcttaggttactact

SEQ ID NO: 194200 - DNA, 25 bp, SARS Virus
tttcaattttcgtaggttactactc

SEQ ID NO: 194201 - DNA, 25 bp, SARS Virus
ttcaattttcgttggttactactca

SEQ ID NO: 194202 - DNA, 25 bp, SARS Virus
tcaattttcgtatgttactactcac

SEQ ID NO: 194203 - DNA, 25 bp, SARS Virus
caattttcgtagtttactactcacg

SEQ ID NO: 194204 - DNA, 25 bp, SARS Virus
aattttcgtaggttactactcacgg

SEQ ID NO: 194205 - DNA, 25 bp, SARS Virus
attttcgtaggttactactcacggg

SEQ ID NO: 194206 - DNA, 25 bp, SARS Virus
ttttcgtaggtttctactcacggga

SEQ ID NO: 194207 - DNA, 25 bp, SARS Virus
tttcgtaggttattactcacgggaa

SEQ ID NO: 194208 - DNA, 25 bp, SARS Virus
ttcgtaggttactactcacgggaat

SEQ ID NO: 194209 - DNA, 25 bp, SARS Virus
tcgtaggttacttctcacgggaatt

SEQ ID NO: 194210 - DNA, 25 bp, SARS Virus
cgtaggttactattcacgggaattg

SEQ ID NO: 194211 - DNA, 25 bp, SARS Virus
gtaggttactactcacgggaattgt

SEQ ID NO: 194212 - DNA, 25 bp, SARS Virus
taggttactacttacgggaattgtt

SEQ ID NO: 194213 - DNA, 25 bp, SARS Virus
aggttactactctcgggaattgtta

SEQ ID NO: 194214 - DNA, 25 bp, SARS Virus
ggttactactcatgggaattgttaa

SEQ ID NO: 194215 - DNA, 25 bp, SARS Virus
gttactactcactggaattgttaaa

SEQ ID NO: 194216 - DNA, 25 bp, SARS Virus
ttactactcacgtgaattgttaaaa

SEQ ID NO: 194217 - DNA, 25 bp, SARS Virus
tactactcacggtaattgttaaaag

SEQ ID NO: 194218 - DNA, 25 bp, SARS Virus
actactcacgggtattgttaaaaga

SEQ ID NO: 194219 - DNA, 25 bp, SARS Virus
ctactcacgggatttgttaaaagaa

SEQ ID NO: 194220 - DNA, 25 bp, SARS Virus
tactcacgggaattgttaaaagaac

SEQ ID NO: 194221 - DNA, 25 bp, SARS Virus
actcacgggaattgttaaaagaact

SEQ ID NO: 194222 - DNA, 25 bp, SARS Virus
ctcacgggaatttttaaaagaactt

SEQ ID NO: 194223 - DNA, 25 bp, SARS Virus
tcacgggaattgttaaaagaacttg

SEQ ID NO: 194224 - DNA, 25 bp, SARS Virus
cacgggaattgttaaaagaacttga

SEQ ID NO: 194225 - DNA, 25 bp, SARS Virus
acgggaattgtttaaagaacttgaa

SEQ ID NO: 194226 - DNA, 25 bp, SARS Virus
cgggaattgttataagaacttgaat

SEQ ID NO: 194227 - DNA, 25 bp, SARS Virus
gggaattgttaatagaacttgaatg

SEQ ID NO: 194228 - DNA, 25 bp, SARS Virus
ggaattgttaaatgaacttgaatgg

SEQ ID NO: 194229 - DNA, 25 bp, SARS Virus
gaattgttaaaataacttgaatgga

SEQ ID NO: 194230 - DNA, 25 bp, SARS Virus
aattgttaaaagtacttgaatggaa

SEQ ID NO: 194231 - DNA, 25 bp, SARS Virus
attgttaaaagatcttgaatggaac

SEQ ID NO: 194232 - DNA, 25 bp, SARS Virus
ttgttaaaagaatttgaatggaacc

SEQ ID NO: 194233 - DNA, 25 bp, SARS Virus
tgttaaaagaacttgaatggaacct

SEQ ID NO: 194234 - DNA, 25 bp, SARS Virus
gttaaaagaacttgaatggaacctt

SEQ ID NO: 194235 - DNA, 25 bp, SARS Virus
ttaaaagaactttaatggaaccttc

SEQ ID NO: 194236 - DNA, 25 bp, SARS Virus
taaaagaacttgtatggaaccttcc

SEQ ID NO: 194237 - DNA, 25 bp, SARS Virus
aaaagaacttgattggaaccttcca

SEQ ID NO: 194238 - DNA, 25 bp, SARS Virus
aaagaacttgaatggaaccttccat

SEQ ID NO: 194239 - DNA, 25 bp, SARS Virus
aagaacttgaattgaaccttccatt

SEQ ID NO: 194240 - DNA, 25 bp, SARS Virus
agaacttgaatgtaaccttccattg

SEQ ID NO: 194241 - DNA, 25 bp, SARS Virus
gaacttgaatggtaccttccattgt

SEQ ID NO: 194242 - DNA, 25 bp, SARS Virus
aacttgaatggatccttccattgtg

SEQ ID NO: 194243 - DNA, 25 bp, SARS Virus
acttgaatggaatcttccattgtgg

SEQ ID NO: 194244 - DNA, 25 bp, SARS Virus
cttgaatggaactttccattgtggt

SEQ ID NO: 194245 - DNA, 25 bp, SARS Virus
ttgaatggaaccttccattgtggtc

SEQ ID NO: 194246 - DNA, 25 bp, SARS Virus
tgaatggaaccttccattgtggtct

SEQ ID NO: 194247 - DNA, 25 bp, SARS Virus
gaatggaacctttcattgtggtctc

SEQ ID NO: 194248 - DNA, 25 bp, SARS Virus
aatggaaccttctattgtggtctcg

SEQ ID NO: 194249 - DNA, 25 bp, SARS Virus
atggaaccttcctttgtggtctcgt

SEQ ID NO: 194250 - DNA, 25 bp, SARS Virus
tggaaccttccattgtggtctcgta

SEQ ID NO: 194251 - DNA, 25 bp, SARS Virus
ggaaccttccattgtggtctcgtaa

SEQ ID NO: 194252 - DNA, 25 bp, SARS Virus
gaaccttccattttggtctcgtaac

SEQ ID NO: 194253 - DNA, 25 bp, SARS Virus
aaccttccattgtggtctcgtaaca

SEQ ID NO: 194254 - DNA, 25 bp, SARS Virus
accttccattgttgtctcgtaacag

SEQ ID NO: 194255 - DNA, 25 bp, SARS Virus
ccttccattgtgttctcgtaacaga

SEQ ID NO: 194256 - DNA, 25 bp, SARS Virus
cttccattgtggtctcgtaacagat

SEQ ID NO: 194257 - DNA, 25 bp, SARS Virus
ttccattgtggtatcgtaacagatt

SEQ ID NO: 194258 - DNA, 25 bp, SARS Virus
tccattgtggtcacgtaacagattg

SEQ ID NO: 194259 - DNA, 25 bp, SARS Virus
ccattgtggtctagtaacagattgt

SEQ ID NO: 194260 - DNA, 25 bp, SARS Virus
cattgtggtctcataacagattgtt

SEQ ID NO: 194261 - DNA, 25 bp, SARS Virus
attgtggtctcgaaacagattgttg

SEQ ID NO: 194262 - DNA, 25 bp, SARS Virus
ttgtggtctcgtaacagattgttgt

SEQ ID NO: 194263 - DNA, 25 bp, SARS Virus
tgtggtctcgtaacagattgttgta

SEQ ID NO: 194264 - DNA, 25 bp, SARS Virus
gtggtctcgtaaaagattgttgtag

SEQ ID NO: 194265 - DNA, 25 bp, SARS Virus
tggtctcgtaacagattgttgtagt

SEQ ID NO: 194266 - DNA, 25 bp, SARS Virus
ggtctcgtaacaaattgttgtagtt

SEQ ID NO: 194267 - DNA, 25 bp, SARS Virus
gtctcgtaacagattgttgtagttt

SEQ ID NO: 194268 - DNA, 25 bp, SARS Virus
tctcgtaacagaatgttgtagttta

SEQ ID NO: 194269 - DNA, 25 bp, SARS Virus
ctcgtaacagatagttgtagtttac

SEQ ID NO: 194270 - DNA, 25 bp, SARS Virus
tcgtaacagattattgtagtttacc

SEQ ID NO: 194271 - DNA, 25 bp, SARS Virus
cgtaacagattgatgtagtttacca

SEQ ID NO: 194272 - DNA, 25 bp, SARS Virus
gtaacagattgtagtagtttaccac

SEQ ID NO: 194273 - DNA, 25 bp, SARS Virus
taacagattgttatagtttaccaca

SEQ ID NO: 194274 - DNA, 25 bp, SARS Virus
aacagattgttgaagtttaccacat

SEQ ID NO: 194275 - DNA, 25 bp, SARS Virus
acagattgttgtagtttaccacatt

SEQ ID NO: 194276 - DNA, 25 bp, SARS Virus
cagattgttgtaatttaccacattt

SEQ ID NO: 194277 - DNA, 25 bp, SARS Virus
agattgttgtagattaccacatttg

SEQ ID NO: 194278 - DNA, 25 bp, SARS Virus
gattgttgtagtataccacatttga

SEQ ID NO: 194279 - DNA, 25 bp, SARS Virus
attgttgtagttaaccacatttgag

SEQ ID NO: 194280 - DNA, 25 bp, SARS Virus
ttgttgtagtttaccacatttgagt

SEQ ID NO: 194281 - DNA, 25 bp, SARS Virus
tgttgtagtttaacacatttgagta

SEQ ID NO: 194282 - DNA, 25 bp, SARS Virus
gttgtagtttacaacatttgagtag

SEQ ID NO: 194283 - DNA, 25 bp, SARS Virus
ttgtagtttaccacatttgagtaga

SEQ ID NO: 194284 - DNA, 25 bp, SARS Virus
tgtagtttaccaaatttgagtagaa

SEQ ID NO: 194285 - DNA, 25 bp, SARS Virus
gtagtttaccacatttgagtagaag

SEQ ID NO: 194286 - DNA, 25 bp, SARS Virus
tagtttaccacaattgagtagaaga

SEQ ID NO: 194287 - DNA, 25 bp, SARS Virus
agtttaccacatatgagtagaagat

SEQ ID NO: 194288 - DNA, 25 bp, SARS Virus
gtttaccacattagagtagaagatt

SEQ ID NO: 194289 - DNA, 25 bp, SARS Virus
tttaccacatttaagtagaagattt

SEQ ID NO: 194290 - DNA, 25 bp, SARS Virus
ttaccacatttgagtagaagatttt

SEQ ID NO: 194291 - DNA, 25 bp, SARS Virus
taccacatttgaatagaagatttta

SEQ ID NO: 194292 - DNA, 25 bp, SARS Virus
accacatttgagaagaagattttat

SEQ ID NO: 194293 - DNA, 25 bp, SARS Virus
ccacatttgagtagaagattttatc

SEQ ID NO: 194294 - DNA, 25 bp, SARS Virus
cacatttgagtaaaagattttatca

SEQ ID NO: 194295 - DNA, 25 bp, SARS Virus
acatttgagtagaagattttatcac

SEQ ID NO: 194296 - DNA, 25 bp, SARS Virus
catttgagtagaagattttatcacg

SEQ ID NO: 194297 - DNA, 25 bp, SARS Virus
atttgagtagaaaattttatcacga

SEQ ID NO: 194298 - DNA, 25 bp, SARS Virus
tttgagtagaagattttatcacgat

SEQ ID NO: 194299 - DNA, 25 bp, SARS Virus
ttgagtagaagaatttatcacgatg

SEQ ID NO: 194300 - DNA, 25 bp, SARS Virus
tgagtagaagatattatcacgatgg

SEQ ID NO: 194301 - DNA, 25 bp, SARS Virus
gagtagaagattatatcacgatggt

SEQ ID NO: 194302 - DNA, 25 bp, SARS Virus
agtagaagatttaatcacgatggtt

SEQ ID NO: 194303 - DNA, 25 bp, SARS Virus
gtagaagattttatcacgatggttc

SEQ ID NO: 194304 - DNA, 25 bp, SARS Virus
tagaagattttaacacgatggttcc

SEQ ID NO: 194305 - DNA, 25 bp, SARS Virus
agaagattttataacgatggttcct

SEQ ID NO: 194306 - DNA, 25 bp, SARS Virus
gaagattttatcacgatggttccta

SEQ ID NO: 194307 - DNA, 25 bp, SARS Virus
aagattttatcaagatggttcctat

SEQ ID NO: 194308 - DNA, 25 bp, SARS Virus
agattttatcacaatggttcctatc

SEQ ID NO: 194309 - DNA, 25 bp, SARS Virus
gattttatcacgatggttcctatca

SEQ ID NO: 194310 - DNA, 25 bp, SARS Virus
attttatcacgaaggttcctatcat

SEQ ID NO: 194311 - DNA, 25 bp, SARS Virus
ttttatcacgatagttcctatcatg

SEQ ID NO: 194312 - DNA, 25 bp, SARS Virus
tttatcacgatgattcctatcatgc

SEQ ID NO: 194313 - DNA, 25 bp, SARS Virus
ttatcacgatggatcctatcatgct

SEQ ID NO: 194314 - DNA, 25 bp, SARS Virus
tatcacgatggtacctatcatgctg

SEQ ID NO: 194315 - DNA, 25 bp, SARS Virus
atcacgatggttactatcatgctgg

SEQ ID NO: 194316 - DNA, 25 bp, SARS Virus
tcacgatggttcatatcatgctggt

SEQ ID NO: 194317 - DNA, 25 bp, SARS Virus
cacgatggttccaatcatgctggta

SEQ ID NO: 194318 - DNA, 25 bp, SARS Virus
acgatggttcctatcatgctggtaa

SEQ ID NO: 194319 - DNA, 25 bp, SARS Virus
cgatggttcctaacatgctggtaag

SEQ ID NO: 194320 - DNA, 25 bp, SARS Virus
gatggttcctataatgctggtaagt

SEQ ID NO: 194321 - DNA, 25 bp, SARS Virus
atggttcctatcatgctggtaagta

SEQ ID NO: 194322 - DNA, 25 bp, SARS Virus
tggttcctatcaagctggtaagtat

SEQ ID NO: 194323 - DNA, 25 bp, SARS Virus
ggttcctatcatactggtaagtatg

SEQ ID NO: 194324 - DNA, 25 bp, SARS Virus
gttcctatcatgatggtaagtatgg

SEQ ID NO: 194325 - DNA, 25 bp, SARS Virus
ttcctatcatgcaggtaagtatggt

SEQ ID NO: 194326 - DNA, 25 bp, SARS Virus
tcctatcatgctagtaagtatggta

SEQ ID NO: 194327 - DNA, 25 bp, SARS Virus
cctatcatgctgataagtatggtaa

SEQ ID NO: 194328 - DNA, 25 bp, SARS Virus
ctatcatgctggaaagtatggtaag

SEQ ID NO: 194329 - DNA, 25 bp, SARS Virus
tatcatgctggtaagtatggtaaga

SEQ ID NO: 194330 - DNA, 25 bp, SARS Virus
atcatgctggtaagtatggtaagac

SEQ ID NO: 194331 - DNA, 25 bp, SARS Virus
tcatgctggtaaatatggtaagacg

SEQ ID NO: 194332 - DNA, 25 bp, SARS Virus
catgctggtaagaatggtaagacgt

SEQ ID NO: 194333 - DNA, 25 bp, SARS Virus
atgctggtaagtatggtaagacgtc

SEQ ID NO: 194334 - DNA, 25 bp, SARS Virus
tgctggtaagtaaggtaagacgtcg

SEQ ID NO: 194335 - DNA, 25 bp, SARS Virus
gctggtaagtatagtaagacgtcgt

SEQ ID NO: 194336 - DNA, 25 bp, SARS Virus
ctggtaagtatgataagacgtcgtc

SEQ ID NO: 194337 - DNA, 25 bp, SARS Virus
tggtaagtatggaaagacgtcgtcg

SEQ ID NO: 194338 - DNA, 25 bp, SARS Virus
ggtaagtatggtaagacgtcgtcga

SEQ ID NO: 194339 - DNA, 25 bp, SARS Virus
gtaagtatggtaagacgtcgtcgag

SEQ ID NO: 194340 - DNA, 25 bp, SARS Virus
taagtatggtaaaacgtcgtcgaga

SEQ ID NO: 194341 - DNA, 25 bp, SARS Virus
aagtatggtaagacgtcgtcgagaa

SEQ ID NO: 194342 - DNA, 25 bp, SARS Virus
agtatggtaagaagtcgtcgagaaa

SEQ ID NO: 194343 - DNA, 25 bp, SARS Virus
gtatggtaagacatcgtcgagaaag

SEQ ID NO: 194344 - DNA, 25 bp, SARS Virus
tatggtaagacgacgtcgagaaagt

SEQ ID NO: 194345 - DNA, 25 bp, SARS Virus
atggtaagacgtagtcgagaaagtt

SEQ ID NO: 194346 - DNA, 25 bp, SARS Virus
tggtaagacgtcatcgagaaagttt

SEQ ID NO: 194347 - DNA, 25 bp, SARS Virus
ggtaagacgtcgacgagaaagtttc

SEQ ID NO: 194348 - DNA, 25 bp, SARS Virus
gtaagacgtcgtagagaaagtttcg

SEQ ID NO: 194349 - DNA, 25 bp, SARS Virus
taagacgtcgtcaagaaagtttcgt

SEQ ID NO: 194350 - DNA, 25 bp, SARS Virus
aagacgtcgtcgagaaagtttcgtc

SEQ ID NO: 194351 - DNA, 25 bp, SARS Virus
agacgtcgtcgaaaaagtttcgtcg

SEQ ID NO: 194352 - DNA, 25 bp, SARS Virus
gacgtcgtcgagaaagtttcgtcgt

SEQ ID NO: 194353 - DNA, 25 bp, SARS Virus
acgtcgtcgagaaagtttcgtcgtg

SEQ ID NO: 194354 - DNA, 25 bp, SARS Virus
cgtcgtcgagaaagtttcgtcgtgt

SEQ ID NO: 194355 - DNA, 25 bp, SARS Virus
gtcgtcgagaaaatttcgtcgtgtg

SEQ ID NO: 194356 - DNA, 25 bp, SARS Virus
tcgtcgagaaagattcgtcgtgtgt

SEQ ID NO: 194357 - DNA, 25 bp, SARS Virus
cgtcgagaaagtatcgtcgtgtgta

SEQ ID NO: 194358 - DNA, 25 bp, SARS Virus
gtcgagaaagttacgtcgtgtgtat

SEQ ID NO: 194359 - DNA, 25 bp, SARS Virus
tcgagaaagtttagtcgtgtgtata

SEQ ID NO: 194360 - DNA, 25 bp, SARS Virus
cgagaaagtttcatcgtgtgtatag

SEQ ID NO: 194361 - DNA, 25 bp, SARS Virus
gagaaagtttcgacgtgtgtataga

SEQ ID NO: 194362 - DNA, 25 bp, SARS Virus
agaaagtttcgtagtgtgtatagat

SEQ ID NO: 194363 - DNA, 25 bp, SARS Virus
gaaagtttcgtcatgtgtatagatt

SEQ ID NO: 194364 - DNA, 25 bp, SARS Virus
aaagtttcgtcgagtgtatagattc

SEQ ID NO: 194365 - DNA, 25 bp, SARS Virus
aagtttcgtcgtatgtatagattct

SEQ ID NO: 194366 - DNA, 25 bp, SARS Virus
agtttcgtcgtgagtatagattctg

SEQ ID NO: 194367 - DNA, 25 bp, SARS Virus
gtttcgtcgtgtatatagattctgc

SEQ ID NO: 194368 - DNA, 25 bp, SARS Virus
tttcgtcgtgtgaatagattctgcc

SEQ ID NO: 194369 - DNA, 25 bp, SARS Virus
ttcgtcgtgtgtatagattctgccg

SEQ ID NO: 194370 - DNA, 25 bp, SARS Virus
tcgtcgtgtgtaaagattctgccgt

SEQ ID NO: 194371 - DNA, 25 bp, SARS Virus
cgtcgtgtgtatagattctgccgtt

SEQ ID NO: 194372 - DNA, 25 bp, SARS Virus
gtcgtgtgtataaattctgccgtta

SEQ ID NO: 194373 - DNA, 25 bp, SARS Virus
tcgtgtgtatagattctgccgttaa

SEQ ID NO: 194374 - DNA, 25 bp, SARS Virus
cgtgtgtatagaatctgccgttaag

SEQ ID NO: 194375 - DNA, 25 bp, SARS Virus
gtgtgtatagatactgccgttaagg

SEQ ID NO: 194376 - DNA, 25 bp, SARS Virus
tgtgtatagattatgccgttaagga

SEQ ID NO: 194377 - DNA, 25 bp, SARS Virus
gtgtatagattcagccgttaaggac

SEQ ID NO: 194378 - DNA, 25 bp, SARS Virus
tgtatagattctaccgttaaggaca

SEQ ID NO: 194379 - DNA, 25 bp, SARS Virus
gtatagattctgacgttaaggacaa

SEQ ID NO: 194380 - DNA, 25 bp, SARS Virus
tatagattctgcagttaaggacaaa

SEQ ID NO: 194381 - DNA, 25 bp, SARS Virus
atagattctgccattaaggacaaac

SEQ ID NO: 194382 - DNA, 25 bp, SARS Virus
tagattctgccgataaggacaaact

SEQ ID NO: 194383 - DNA, 25 bp, SARS Virus
agattctgccgtaaaggacaaactc

SEQ ID NO: 194384 - DNA, 25 bp, SARS Virus
gattctgccgttaaggacaaactcg

SEQ ID NO: 194385 - DNA, 25 bp, SARS Virus
attctgccgttaaggacaaactcgt

SEQ ID NO: 194386 - DNA, 25 bp, SARS Virus
ttctgccgttaaagacaaactcgtc

SEQ ID NO: 194387 - DNA, 25 bp, SARS Virus
tctgccgttaagaacaaactcgtct

SEQ ID NO: 194388 - DNA, 25 bp, SARS Virus
ctgccgttaaggacaaactcgtctt

SEQ ID NO: 194389 - DNA, 25 bp, SARS Virus
tgccgttaaggaaaaactcgtcttt

SEQ ID NO: 194390 - DNA, 25 bp, SARS Virus
gccgttaaggacaaactcgtctttc

SEQ ID NO: 194391 - DNA, 25 bp, SARS Virus
ccgttaaggacaaactcgtctttct

SEQ ID NO: 194392 - DNA, 25 bp, SARS Virus
cgttaaggacaaactcgtctttctc

SEQ ID NO: 194393 - DNA, 25 bp, SARS Virus
gttaaggacaaaatcgtctttctcc

SEQ ID NO: 194394 - DNA, 25 bp, SARS Virus
ttaaggacaaacacgtctttctcca

SEQ ID NO: 194395 - DNA, 25 bp, SARS Virus
taaggacaaactagtctttctccag

SEQ ID NO: 194396 - DNA, 25 bp, SARS Virus
aaggacaaactcatctttctccagg

SEQ ID NO: 194397 - DNA, 25 bp, SARS Virus
aggacaaactcgactttctccaggg

SEQ ID NO: 194398 - DNA, 25 bp, SARS Virus
ggacaaactcgtatttctccagggt

SEQ ID NO: 194399 - DNA, 25 bp, SARS Virus
gacaaactcgtcattctccagggtt

SEQ ID NO: 194400 - DNA, 25 bp, SARS Virus
acaaactcgtctatctccagggtta

SEQ ID NO: 194401 - DNA, 25 bp, SARS Virus
caaactcgtcttactccagggttat

SEQ ID NO: 194402 - DNA, 25 bp, SARS Virus
aaactcgtctttatccagggttata

SEQ ID NO: 194403 - DNA, 25 bp, SARS Virus
aactcgtctttcaccagggttatac

SEQ ID NO: 194404 - DNA, 25 bp, SARS Virus
actcgtctttctacagggttataca

SEQ ID NO: 194405 - DNA, 25 bp, SARS Virus
ctcgtctttctcaagggttatacag

SEQ ID NO: 194406 - DNA, 25 bp, SARS Virus
tcgtctttctccagggttatacagt

SEQ ID NO: 194407 - DNA, 25 bp, SARS Virus
cgtctttctccaaggttatacagtt

SEQ ID NO: 194408 - DNA, 25 bp, SARS Virus
gtctttctccagagttatacagttg

SEQ ID NO: 194409 - DNA, 25 bp, SARS Virus
tctttctccaggattatacagttgt

SEQ ID NO: 194410 - DNA, 25 bp, SARS Virus
ctttctccagggatatacagttgta

SEQ ID NO: 194411 - DNA, 25 bp, SARS Virus
tttctccagggtaatacagttgtac

SEQ ID NO: 194412 - DNA, 25 bp, SARS Virus
ttctccagggttatacagttgtact

SEQ ID NO: 194413 - DNA, 25 bp, SARS Virus
tctccagggttaaacagttgtacta

SEQ ID NO: 194414 - DNA, 25 bp, SARS Virus
ctccagggttatacagttgtactag

SEQ ID NO: 194415 - DNA, 25 bp, SARS Virus
tccagggttataaagttgtactaga

SEQ ID NO: 194416 - DNA, 25 bp, SARS Virus
ccagggttatacagttgtactagaa

SEQ ID NO: 194417 - DNA, 25 bp, SARS Virus
cagggttatacaattgtactagaac

SEQ ID NO: 194418 - DNA, 25 bp, SARS Virus
agggttatacagatgtactagaaca

SEQ ID NO: 194419 - DNA, 25 bp, SARS Virus
gggttatacagtagtactagaacac

SEQ ID NO: 194420 - DNA, 25 bp, SARS Virus
ggttatacagttatactagaacaca

SEQ ID NO: 194421 - DNA, 25 bp, SARS Virus
gttatacagttgaactagaacacag

SEQ ID NO: 194422 - DNA, 25 bp, SARS Virus
ttatacagttgtactagaacacagt

SEQ ID NO: 194423 - DNA, 25 bp, SARS Virus
tatacagttgtaatagaacacagtt

SEQ ID NO: 194424 - DNA, 25 bp, SARS Virus
atacagttgtacaagaacacagttt

SEQ ID NO: 194425 - DNA, 25 bp, SARS Virus
tacagttgtactagaacacagtttc

SEQ ID NO: 194426 - DNA, 25 bp, SARS Virus
acagttgtactaaaacacagtttcc

SEQ ID NO: 194427 - DNA, 25 bp, SARS Virus
cagttgtactagaacacagtttcca

SEQ ID NO: 194428 - DNA, 25 bp, SARS Virus
agttgtactagaacacagtttccaa

SEQ ID NO: 194429 - DNA, 25 bp, SARS Virus
gttgtactagaaaacagtttccaag

SEQ ID NO: 194430 - DNA, 25 bp, SARS Virus
ttgtactagaacacagtttccaagt

SEQ ID NO: 194431 - DNA, 25 bp, SARS Virus
tgtactagaacaaagtttccaagta

SEQ ID NO: 194432 - DNA, 25 bp, SARS Virus
gtactagaacacagtttccaagtat

SEQ ID NO: 194433 - DNA, 25 bp, SARS Virus
tactagaacacaatttccaagtatc

SEQ ID NO: 194434 - DNA, 25 bp, SARS Virus
actagaacacagattccaagtatca

SEQ ID NO: 194435 - DNA, 25 bp, SARS Virus
ctagaacacagtatccaagtatcaa

SEQ ID NO: 194436 - DNA, 25 bp, SARS Virus
tagaacacagttaccaagtatcaac

SEQ ID NO: 194437 - DNA, 25 bp, SARS Virus
agaacacagtttacaagtatcaaca

SEQ ID NO: 194438 - DNA, 25 bp, SARS Virus
gaacacagtttcaaagtatcaacat

SEQ ID NO: 194439 - DNA, 25 bp, SARS Virus
aacacagtttccaagtatcaacatg

SEQ ID NO: 194440 - DNA, 25 bp, SARS Virus
acacagtttccaagtatcaacatga

SEQ ID NO: 194441 - DNA, 25 bp, SARS Virus
cacagtttccaaatatcaacatgaa

SEQ ID NO: 194442 - DNA, 25 bp, SARS Virus
acagtttccaagaatcaacatgaag

SEQ ID NO: 194443 - DNA, 25 bp, SARS Virus
cagtttccaagtatcaacatgaagt

SEQ ID NO: 194444 - DNA, 25 bp, SARS Virus
agtttccaagtaacaacatgaagta

SEQ ID NO: 194445 - DNA, 25 bp, SARS Virus
gtttccaagtataaacatgaagtaa

SEQ ID NO: 194446 - DNA, 25 bp, SARS Virus
tttccaagtatcaacatgaagtaac

SEQ ID NO: 194447 - DNA, 25 bp, SARS Virus
ttccaagtatcaacatgaagtaacg

SEQ ID NO: 194448 - DNA, 25 bp, SARS Virus
tccaagtatcaaaatgaagtaacgg

SEQ ID NO: 194449 - DNA, 25 bp, SARS Virus
ccaagtatcaacatgaagtaacggt

SEQ ID NO: 194450 - DNA, 25 bp, SARS Virus
caagtatcaacaagaagtaacggtg

SEQ ID NO: 194451 - DNA, 25 bp, SARS Virus
aagtatcaacataaagtaacggtgt

SEQ ID NO: 194452 - DNA, 25 bp, SARS Virus
agtatcaacatgaagtaacggtgtt

SEQ ID NO: 194453 - DNA, 25 bp, SARS Virus
gtatcaacatgaagtaacggtgttc

SEQ ID NO: 194454 - DNA, 25 bp, SARS Virus
tatcaacatgaaataacggtgttcc

SEQ ID NO: 194455 - DNA, 25 bp, SARS Virus
atcaacatgaagaaacggtgttcca

SEQ ID NO: 194456 - DNA, 25 bp, SARS Virus
tcaacatgaagtaacggtgttccaa

SEQ ID NO: 194457 - DNA, 25 bp, SARS Virus
caacatgaagtaacggtgttccaat

SEQ ID NO: 194458 - DNA, 25 bp, SARS Virus
aacatgaagtaaaggtgttccaatt

SEQ ID NO: 194459 - DNA, 25 bp, SARS Virus
acatgaagtaacagtgttccaattt

SEQ ID NO: 194460 - DNA, 25 bp, SARS Virus
catgaagtaacgatgttccaatttc

SEQ ID NO: 194461 - DNA, 25 bp, SARS Virus
atgaagtaacggagttccaatttca

SEQ ID NO: 194462 - DNA, 25 bp, SARS Virus
tgaagtaacggtattccaatttcag

SEQ ID NO: 194463 - DNA, 25 bp, SARS Virus
gaagtaacggtgatccaatttcagt

SEQ ID NO: 194464 - DNA, 25 bp, SARS Virus
aagtaacggtgtaccaatttcagta

SEQ ID NO: 194465 - DNA, 25 bp, SARS Virus
agtaacggtgttacaatttcagtaa

SEQ ID NO: 194466 - DNA, 25 bp, SARS Virus
gtaacggtgttcaaatttcagtaag

SEQ ID NO: 194467 - DNA, 25 bp, SARS Virus
taacggtgttccaatttcagtaagt

SEQ ID NO: 194468 - DNA, 25 bp, SARS Virus
aacggtgttccaatttcagtaagtt

SEQ ID NO: 194469 - DNA, 25 bp, SARS Virus
acggtgttccaaattcagtaagttt

SEQ ID NO: 194470 - DNA, 25 bp, SARS Virus
cggtgttccaatatcagtaagtttc

SEQ ID NO: 194471 - DNA, 25 bp, SARS Virus
ggtgttccaattacagtaagtttca

SEQ ID NO: 194472 - DNA, 25 bp, SARS Virus
gtgttccaatttaagtaagtttcat

SEQ ID NO: 194473 - DNA, 25 bp, SARS Virus
tgttccaatttcagtaagtttcatc

SEQ ID NO: 194474 - DNA, 25 bp, SARS Virus
gttccaatttcaataagtttcatca

SEQ ID NO: 194475 - DNA, 25 bp, SARS Virus
ttccaatttcagaaagtttcatcac

SEQ ID NO: 194476 - DNA, 25 bp, SARS Virus
tccaatttcagtaagtttcatcacc

SEQ ID NO: 194477 - DNA, 25 bp, SARS Virus
ccaatttcagtaagtttcatcacca

SEQ ID NO: 194478 - DNA, 25 bp, SARS Virus
caatttcagtaaatttcatcaccac

SEQ ID NO: 194479 - DNA, 25 bp, SARS Virus
aatttcagtaagattcatcaccact

SEQ ID NO: 194480 - DNA, 25 bp, SARS Virus
atttcagtaagtatcatcaccactt

SEQ ID NO: 194481 - DNA, 25 bp, SARS Virus
tttcagtaagttacatcaccactta

SEQ ID NO: 194482 - DNA, 25 bp, SARS Virus
ttcagtaagtttaatcaccacttag

SEQ ID NO: 194483 - DNA, 25 bp, SARS Virus
tcagtaagtttcatcaccacttaga

SEQ ID NO: 194484 - DNA, 25 bp, SARS Virus
cagtaagtttcaacaccacttagat

SEQ ID NO: 194485 - DNA, 25 bp, SARS Virus
agtaagtttcataaccacttagata

SEQ ID NO: 194486 - DNA, 25 bp, SARS Virus
gtaagtttcatcaccacttagataa

SEQ ID NO: 194487 - DNA, 25 bp, SARS Virus
taagtttcatcaacacttagataat

SEQ ID NO: 194488 - DNA, 25 bp, SARS Virus
aagtttcatcacaacttagataatt

SEQ ID NO: 194489 - DNA, 25 bp, SARS Virus
agtttcatcaccacttagataattc

SEQ ID NO: 194490 - DNA, 25 bp, SARS Virus
gtttcatcaccaattagataattct

SEQ ID NO: 194491 - DNA, 25 bp, SARS Virus
tttcatcaccacatagataattctt

SEQ ID NO: 194492 - DNA, 25 bp, SARS Virus
ttcatcaccactaagataattcttt

SEQ ID NO: 194493 - DNA, 25 bp, SARS Virus
tcatcaccacttagataattctttg

SEQ ID NO: 194494 - DNA, 25 bp, SARS Virus
catcaccacttaaataattctttgg

SEQ ID NO: 194495 - DNA, 25 bp, SARS Virus
atcaccacttagataattctttggt

SEQ ID NO: 194496 - DNA, 25 bp, SARS Virus
tcaccacttagaaaattctttggtg

SEQ ID NO: 194497 - DNA, 25 bp, SARS Virus
caccacttagataattctttggtgg

SEQ ID NO: 194498 - DNA, 25 bp, SARS Virus
accacttagataattctttggtgga

SEQ ID NO: 194499 - DNA, 25 bp, SARS Virus
ccacttagataaatctttggtggat

SEQ ID NO: 194500 - DNA, 25 bp, SARS Virus
cacttagataatactttggtggata

SEQ ID NO: 194501 - DNA, 25 bp, SARS Virus
acttagataattatttggtggatag

SEQ ID NO: 194502 - DNA, 25 bp, SARS Virus
cttagataattcattggtggatagt

SEQ ID NO: 194503 - DNA, 25 bp, SARS Virus
ttagataattctatggtggatagtg

SEQ ID NO: 194504 - DNA, 25 bp, SARS Virus
tagataattcttaggtggatagtgg

SEQ ID NO: 194505 - DNA, 25 bp, SARS Virus
agataattctttagtggatagtggt

SEQ ID NO: 194506 - DNA, 25 bp, SARS Virus
gataattctttgatggatagtggta

SEQ ID NO: 194507 - DNA, 25 bp, SARS Virus
ataattctttggaggatagtggtaa

SEQ ID NO: 194508 - DNA, 25 bp, SARS Virus
taattctttggtagatagtggtaac

SEQ ID NO: 194509 - DNA, 25 bp, SARS Virus
aattctttggtgaatagtggtaact

SEQ ID NO: 194510 - DNA, 25 bp, SARS Virus
attctttggtggatagtggtaacta

SEQ ID NO: 194511 - DNA, 25 bp, SARS Virus
ttctttggtggaaagtggtaactat

SEQ ID NO: 194512 - DNA, 25 bp, SARS Virus
tctttggtggatagtggtaactatt

SEQ ID NO: 194513 - DNA, 25 bp, SARS Virus
ctttggtggataatggtaactattg

SEQ ID NO: 194514 - DNA, 25 bp, SARS Virus
tttggtggatagaggtaactattgt

SEQ ID NO: 194515 - DNA, 25 bp, SARS Virus
ttggtggatagtagtaactattgtc

SEQ ID NO: 194516 - DNA, 25 bp, SARS Virus
tggtggatagtgataactattgtcg

SEQ ID NO: 194517 - DNA, 25 bp, SARS Virus
ggtggatagtggaaactattgtcgt

SEQ ID NO: 194518 - DNA, 25 bp, SARS Virus
gtggatagtggtaactattgtcgtc

SEQ ID NO: 194519 - DNA, 25 bp, SARS Virus
tggatagtggtaactattgtcgtcg

SEQ ID NO: 194520 - DNA, 25 bp, SARS Virus
ggatagtggtaaatattgtcgtcgt

SEQ ID NO: 194521 - DNA, 25 bp, SARS Virus
gatagtggtaacaattgtcgtcgta

SEQ ID NO: 194522 - DNA, 25 bp, SARS Virus
atagtggtaactattgtcgtcgtat

SEQ ID NO: 194523 - DNA, 25 bp, SARS Virus
tagtggtaactaatgtcgtcgtatg

SEQ ID NO: 194524 - DNA, 25 bp, SARS Virus
agtggtaactatagtcgtcgtatgt

SEQ ID NO: 194525 - DNA, 25 bp, SARS Virus
gtggtaactattatcgtcgtatgtc

SEQ ID NO: 194526 - DNA, 25 bp, SARS Virus
tggtaactattgacgtcgtatgtcg

SEQ ID NO: 194527 - DNA, 25 bp, SARS Virus
ggtaactattgtagtcgtatgtcgg

SEQ ID NO: 194528 - DNA, 25 bp, SARS Virus
gtaactattgtcatcgtatgtcggt

SEQ ID NO: 194529 - DNA, 25 bp, SARS Virus
taactattgtcgacgtatgtcggta

SEQ ID NO: 194530 - DNA, 25 bp, SARS Virus
aactattgtcgtagtatgtcggtac

SEQ ID NO: 194531 - DNA, 25 bp, SARS Virus
actattgtcgtcatatgtcggtacg

SEQ ID NO: 194532 - DNA, 25 bp, SARS Virus
ctattgtcgtcgaatgtcggtacgg

SEQ ID NO: 194533 - DNA, 25 bp, SARS Virus
tattgtcgtcgtatgtcggtacggt

SEQ ID NO: 194534 - DNA, 25 bp, SARS Virus
attgtcgtcgtaagtcggtacggtt

SEQ ID NO: 194535 - DNA, 25 bp, SARS Virus
ttgtcgtcgtatatcggtacggttt

SEQ ID NO: 194536 - DNA, 25 bp, SARS Virus
tgtcgtcgtatgacggtacggtttt

SEQ ID NO: 194537 - DNA, 25 bp, SARS Virus
gtcgtcgtatgtaggtacggttttg

SEQ ID NO: 194538 - DNA, 25 bp, SARS Virus
tcgtcgtatgtcagtacggttttgt

SEQ ID NO: 194539 - DNA, 25 bp, SARS Virus
cgtcgtatgtcgatacggttttgta

SEQ ID NO: 194540 - DNA, 25 bp, SARS Virus
gtcgtatgtcggaacggttttgtaa

SEQ ID NO: 194541 - DNA, 25 bp, SARS Virus
tcgtatgtcggtacggttttgtaaa

SEQ ID NO: 194542 - DNA, 25 bp, SARS Virus
cgtatgtcggtaaggttttgtaaat

SEQ ID NO: 194543 - DNA, 25 bp, SARS Virus
gtatgtcggtacagttttgtaaatt

SEQ ID NO: 194544 - DNA, 25 bp, SARS Virus
tatgtcggtacgattttgtaaatta

SEQ ID NO: 194545 - DNA, 25 bp, SARS Virus
atgtcggtacggatttgtaaattac

SEQ ID NO: 194546 - DNA, 25 bp, SARS Virus
tgtcggtacggtattgtaaattaca

SEQ ID NO: 194547 - DNA, 25 bp, SARS Virus
gtcggtacggttatgtaaattacaa

SEQ ID NO: 194548 - DNA, 25 bp, SARS Virus
tcggtacggtttagtaaattacaat

SEQ ID NO: 194549 - DNA, 25 bp, SARS Virus
cggtacggttttataaattacaata

SEQ ID NO: 194550 - DNA, 25 bp, SARS Virus
ggtacggttttgaaaattacaatac

SEQ ID NO: 194551 - DNA, 25 bp, SARS Virus
gtacggttttgtaaattacaatacc

SEQ ID NO: 194552 - DNA, 25 bp, SARS Virus
tacggttttgtaaattacaatacca

SEQ ID NO: 194553 - DNA, 25 bp, SARS Virus
acggttttgtaaattacaataccaa

SEQ ID NO: 194554 - DNA, 25 bp, SARS Virus
cggttttgtaaaatacaataccaac

SEQ ID NO: 194555 - DNA, 25 bp, SARS Virus
ggttttgtaaataacaataccaaca

SEQ ID NO: 194556 - DNA, 25 bp, SARS Virus
gttttgtaaattacaataccaacac

SEQ ID NO: 194557 - DNA, 25 bp, SARS Virus
ttttgtaaattaaaataccaacaca

SEQ ID NO: 194558 - DNA, 25 bp, SARS Virus
tttgtaaattacaataccaacacag

SEQ ID NO: 194559 - DNA, 25 bp, SARS Virus
ttgtaaattacaataccaacacaga

SEQ ID NO: 194560 - DNA, 25 bp, SARS Virus
tgtaaattacaaaaccaacacagac

SEQ ID NO: 194561 - DNA, 25 bp, SARS Virus
gtaaattacaataccaacacagaca

SEQ ID NO: 194562 - DNA, 25 bp, SARS Virus
taaattacaataacaacacagacat

SEQ ID NO: 194563 - DNA, 25 bp, SARS Virus
aaattacaatacaaacacagacatg

SEQ ID NO: 194564 - DNA, 25 bp, SARS Virus
aattacaataccaacacagacatgg

SEQ ID NO: 194565 - DNA, 25 bp, SARS Virus
attacaataccaacacagacatgga

SEQ ID NO: 194566 - DNA, 25 bp, SARS Virus
ttacaataccaaaacagacatggac

SEQ ID NO: 194567 - DNA, 25 bp, SARS Virus
tacaataccaacacagacatggacg

SEQ ID NO: 194568 - DNA, 25 bp, SARS Virus
acaataccaacaaagacatggacgt

SEQ ID NO: 194569 - DNA, 25 bp, SARS Virus
caataccaacacagacatggacgtc

SEQ ID NO: 194570 - DNA, 25 bp, SARS Virus
aataccaacacaaacatggacgtcg

SEQ ID NO: 194571 - DNA, 25 bp, SARS Virus
ataccaacacagacatggacgtcgg

SEQ ID NO: 194572 - DNA, 25 bp, SARS Virus
taccaacacagaaatggacgtcgga

SEQ ID NO: 194573 - DNA, 25 bp, SARS Virus
accaacacagacatggacgtcggac

SEQ ID NO: 194574 - DNA, 25 bp, SARS Virus
ccaacacagacaaggacgtcggaca

SEQ ID NO: 194575 - DNA, 25 bp, SARS Virus
caacacagacatagacgtcggacac

SEQ ID NO: 194576 - DNA, 25 bp, SARS Virus
aacacagacatgaacgtcggacacg

SEQ ID NO: 194577 - DNA, 25 bp, SARS Virus
acacagacatggacgtcggacacgt

SEQ ID NO: 194578 - DNA, 25 bp, SARS Virus
cacagacatggaagtcggacacgtc

SEQ ID NO: 194579 - DNA, 25 bp, SARS Virus
acagacatggacatcggacacgtca

SEQ ID NO: 194580 - DNA, 25 bp, SARS Virus
cagacatggacgacggacacgtcaa

SEQ ID NO: 194581 - DNA, 25 bp, SARS Virus
agacatggacgtaggacacgtcaaa

SEQ ID NO: 194582 - DNA, 25 bp, SARS Virus
gacatggacgtcagacacgtcaaac

SEQ ID NO: 194583 - DNA, 25 bp, SARS Virus
acatggacgtcgaacacgtcaaaca

SEQ ID NO: 194584 - DNA, 25 bp, SARS Virus
catggacgtcggacacgtcaaacag

SEQ ID NO: 194585 - DNA, 25 bp, SARS Virus
atggacgtcggaaacgtcaaacaga

SEQ ID NO: 194586 - DNA, 25 bp, SARS Virus
tggacgtcggacacgtcaaacagac

SEQ ID NO: 194587 - DNA, 25 bp, SARS Virus
ggacgtcggacaagtcaaacagaca

SEQ ID NO: 194588 - DNA, 25 bp, SARS Virus
gacgtcggacacatcaaacagacag

SEQ ID NO: 194589 - DNA, 25 bp, SARS Virus
acgtcggacacgacaaacagacagt

SEQ ID NO: 194590 - DNA, 25 bp, SARS Virus
cgtcggacacgtaaaacagacagtt

SEQ ID NO: 194591 - DNA, 25 bp, SARS Virus
gtcggacacgtcaaacagacagttg

SEQ ID NO: 194592 - DNA, 25 bp, SARS Virus
tcggacacgtcaaacagacagttgt

SEQ ID NO: 194593 - DNA, 25 bp, SARS Virus
cggacacgtcaaacagacagttgtt

SEQ ID NO: 194594 - DNA, 25 bp, SARS Virus
ggacacgtcaaaaagacagttgttt

SEQ ID NO: 194595 - DNA, 25 bp, SARS Virus
gacacgtcaaacagacagttgttta

SEQ ID NO: 194596 - DNA, 25 bp, SARS Virus
acacgtcaaacaaacagttgtttac

SEQ ID NO: 194597 - DNA, 25 bp, SARS Virus
cacgtcaaacagacagttgtttacc

SEQ ID NO: 194598 - DNA, 25 bp, SARS Virus
acgtcaaacagaaagttgtttacct

SEQ ID NO: 194599 - DNA, 25 bp, SARS Virus
cgtcaaacagacagttgtttacctg

SEQ ID NO: 194600 - DNA, 25 bp, SARS Virus
gtcaaacagacaattgtttacctgg

SEQ ID NO: 194601 - DNA, 25 bp, SARS Virus
tcaaacagacagatgtttacctggt

SEQ ID NO: 194602 - DNA, 25 bp, SARS Virus
caaacagacagtagtttacctggta

SEQ ID NO: 194603 - DNA, 25 bp, SARS Virus
aaacagacagttatttacctggtat

SEQ ID NO: 194604 - DNA, 25 bp, SARS Virus
aacagacagttgattacctggtatc

SEQ ID NO: 194605 - DNA, 25 bp, SARS Virus
acagacagttgtatacctggtatct

SEQ ID NO: 194606 - DNA, 25 bp, SARS Virus
cagacagttgttaacctggtatctt

SEQ ID NO: 194607 - DNA, 25 bp, SARS Virus
agacagttgtttacctggtatctta

SEQ ID NO: 194608 - DNA, 25 bp, SARS Virus
gacagttgtttaactggtatcttaa

SEQ ID NO: 194609 - DNA, 25 bp, SARS Virus
acagttgtttacatggtatcttaaa

SEQ ID NO: 194610 - DNA, 25 bp, SARS Virus
cagttgtttaccaggtatcttaaat

SEQ ID NO: 194611 - DNA, 25 bp, SARS Virus
agttgtttacctagtatcttaaatg

SEQ ID NO: 194612 - DNA, 25 bp, SARS Virus
gttgtttacctgatatcttaaatgg

SEQ ID NO: 194613 - DNA, 25 bp, SARS Virus
ttgtttacctggaatcttaaatgga

SEQ ID NO: 194614 - DNA, 25 bp, SARS Virus
tgtttacctggtatcttaaatggaa

SEQ ID NO: 194615 - DNA, 25 bp, SARS Virus
gtttacctggtaacttaaatggaag

SEQ ID NO: 194616 - DNA, 25 bp, SARS Virus
tttacctggtatattaaatggaaga

SEQ ID NO: 194617 - DNA, 25 bp, SARS Virus
ttacctggtatcataaatggaagat

SEQ ID NO: 194618 - DNA, 25 bp, SARS Virus
tacctggtatctaaaatggaagatt

SEQ ID NO: 194619 - DNA, 25 bp, SARS Virus
acctggtatcttaaatggaagattc

SEQ ID NO: 194620 - DNA, 25 bp, SARS Virus
cctggtatcttaaatggaagattca

SEQ ID NO: 194621 - DNA, 25 bp, SARS Virus
ctggtatcttaaatggaagattcag

SEQ ID NO: 194622 - DNA, 25 bp, SARS Virus
tggtatcttaaaaggaagattcagt

SEQ ID NO: 194623 - DNA, 25 bp, SARS Virus
ggtatcttaaatagaagattcagtc

SEQ ID NO: 194624 - DNA, 25 bp, SARS Virus
gtatcttaaatgaaagattcagtca

SEQ ID NO: 194625 - DNA, 25 bp, SARS Virus
tatcttaaatggaagattcagtcat

SEQ ID NO: 194626 - DNA, 25 bp, SARS Virus
atcttaaatggaagattcagtcatg

SEQ ID NO: 194627 - DNA, 25 bp, SARS Virus
tcttaaatggaaaattcagtcatgg

SEQ ID NO: 194628 - DNA, 25 bp, SARS Virus
cttaaatggaagattcagtcatggt

SEQ ID NO: 194629 - DNA, 25 bp, SARS Virus
ttaaatggaagaatcagtcatggtc

SEQ ID NO: 194630 - DNA, 25 bp, SARS Virus
taaatggaagatacagtcatggtcg

SEQ ID NO: 194631 - DNA, 25 bp, SARS Virus
aaatggaagattaagtcatggtcgc

SEQ ID NO: 194632 - DNA, 25 bp, SARS Virus
aatggaagattcagtcatggtcgca

SEQ ID NO: 194633 - DNA, 25 bp, SARS Virus
atggaagattcaatcatggtcgcac

SEQ ID NO: 194634 - DNA, 25 bp, SARS Virus
tggaagattcagacatggtcgcaca

SEQ ID NO: 194635 - DNA, 25 bp, SARS Virus
ggaagattcagtaatggtcgcacat

SEQ ID NO: 194636 - DNA, 25 bp, SARS Virus
gaagattcagtcatggtcgcacatg

SEQ ID NO: 194637 - DNA, 25 bp, SARS Virus
aagattcagtcaaggtcgcacatga

SEQ ID NO: 194638 - DNA, 25 bp, SARS Virus
agattcagtcatagtcgcacatgag

SEQ ID NO: 194639 - DNA, 25 bp, SARS Virus
gattcagtcatgatcgcacatgagg

SEQ ID NO: 194640 - DNA, 25 bp, SARS Virus
attcagtcatggacgcacatgagga

SEQ ID NO: 194641 - DNA, 25 bp, SARS Virus
ttcagtcatggtagcacatgaggac

SEQ ID NO: 194642 - DNA, 25 bp, SARS Virus
tcagtcatggtcacacatgaggaca

SEQ ID NO: 194643 - DNA, 25 bp, SARS Virus
cagtcatggtcgaacatgaggacaa

SEQ ID NO: 194644 - DNA, 25 bp, SARS Virus
agtcatggtcgcacatgaggacaac

SEQ ID NO: 194645 - DNA, 25 bp, SARS Virus
gtcatggtcgcaaatgaggacaacc

SEQ ID NO: 194646 - DNA, 25 bp, SARS Virus
tcatggtcgcacatgaggacaacct

SEQ ID NO: 194647 - DNA, 25 bp, SARS Virus
catggtcgcacaagaggacaacctt

SEQ ID NO: 194648 - DNA, 25 bp, SARS Virus
atggtcgcacataaggacaaccttc

SEQ ID NO: 194649 - DNA, 25 bp, SARS Virus
tggtcgcacatgaggacaaccttcg

SEQ ID NO: 194650 - DNA, 25 bp, SARS Virus
ggtcgcacatgaagacaaccttcga

SEQ ID NO: 194651 - DNA, 25 bp, SARS Virus
gtcgcacatgagaacaaccttcgag

SEQ ID NO: 194652 - DNA, 25 bp, SARS Virus
tcgcacatgaggacaaccttcgagg

SEQ ID NO: 194653 - DNA, 25 bp, SARS Virus
cgcacatgaggaaaaccttcgaggt

SEQ ID NO: 194654 - DNA, 25 bp, SARS Virus
gcacatgaggacaaccttcgaggta

SEQ ID NO: 194655 - DNA, 25 bp, SARS Virus
cacatgaggacaaccttcgaggtat

SEQ ID NO: 194656 - DNA, 25 bp, SARS Virus
acatgaggacaaacttcgaggtata

SEQ ID NO: 194657 - DNA, 25 bp, SARS Virus
catgaggacaacattcgaggtatac

SEQ ID NO: 194658 - DNA, 25 bp, SARS Virus
atgaggacaaccatcgaggtatact

SEQ ID NO: 194659 - DNA, 25 bp, SARS Virus
tgaggacaacctacgaggtatacta

SEQ ID NO: 194660 - DNA, 25 bp, SARS Virus
gaggacaaccttagaggtatactac

SEQ ID NO: 194661 - DNA, 25 bp, SARS Virus
aggacaaccttcaaggtatactacg

SEQ ID NO: 194662 - DNA, 25 bp, SARS Virus
ggacaaccttcgaggtatactacgt

SEQ ID NO: 194663 - DNA, 25 bp, SARS Virus
gacaaccttcgaagtatactacgta

SEQ ID NO: 194664 - DNA, 25 bp, SARS Virus
acaaccttcgagatatactacgtat

SEQ ID NO: 194665 - DNA, 25 bp, SARS Virus
caaccttcgaggaatactacgtata

SEQ ID NO: 194666 - DNA, 25 bp, SARS Virus
aaccttcgaggtatactacgtatat

SEQ ID NO: 194667 - DNA, 25 bp, SARS Virus
accttcgaggtaaactacgtatatc

SEQ ID NO: 194668 - DNA, 25 bp, SARS Virus
ccttcgaggtatactacgtatatcg

SEQ ID NO: 194669 - DNA, 25 bp, SARS Virus
cttcgaggtataatacgtatatcgt

SEQ ID NO: 194670 - DNA, 25 bp, SARS Virus
ttcgaggtatacaacgtatatcgtc

SEQ ID NO: 194671 - DNA, 25 bp, SARS Virus
tcgaggtatactacgtatatcgtct

SEQ ID NO: 194672 - DNA, 25 bp, SARS Virus
cgaggtatactaagtatatcgtctt

SEQ ID NO: 194673 - DNA, 25 bp, SARS Virus
gaggtatactacatatatcgtcttt

SEQ ID NO: 194674 - DNA, 25 bp, SARS Virus
aggtatactacgaatatcgtctttc

SEQ ID NO: 194675 - DNA, 25 bp, SARS Virus
ggtatactacgtatatcgtctttct

SEQ ID NO: 194676 - DNA, 25 bp, SARS Virus
gtatactacgtaaatcgtctttctg

SEQ ID NO: 194677 - DNA, 25 bp, SARS Virus
tatactacgtatatcgtctttctgt

SEQ ID NO: 194678 - DNA, 25 bp, SARS Virus
atactacgtataacgtctttctgtg

SEQ ID NO: 194679 - DNA, 25 bp, SARS Virus
tactacgtatatagtctttctgtgc

SEQ ID NO: 194680 - DNA, 25 bp, SARS Virus
actacgtatatcatctttctgtgcg

SEQ ID NO: 194681 - DNA, 25 bp, SARS Virus
ctacgtatatcgactttctgtgcgt

SEQ ID NO: 194682 - DNA, 25 bp, SARS Virus
tacgtatatcgtatttctgtgcgtt

SEQ ID NO: 194683 - DNA, 25 bp, SARS Virus
acgtatatcgtcattctgtgcgtta

SEQ ID NO: 194684 - DNA, 25 bp, SARS Virus
cgtatatcgtctatctgtgcgttag

SEQ ID NO: 194685 - DNA, 25 bp, SARS Virus
gtatatcgtcttactgtgcgttagt

SEQ ID NO: 194686 - DNA, 25 bp, SARS Virus
tatatcgtctttatgtgcgttagta

SEQ ID NO: 194687 - DNA, 25 bp, SARS Virus
atatcgtctttcagtgcgttagtat

SEQ ID NO: 194688 - DNA, 25 bp, SARS Virus
tatcgtctttctatgcgttagtatt

SEQ ID NO: 194689 - DNA, 25 bp, SARS Virus
atcgtctttctgagcgttagtatta

SEQ ID NO: 194690 - DNA, 25 bp, SARS Virus
tcgtctttctgtacgttagtattag

SEQ ID NO: 194691 - DNA, 25 bp, SARS Virus
cgtctttctgtgagttagtattagt

SEQ ID NO: 194692 - DNA, 25 bp, SARS Virus
gtctttctgtgcattagtattagtt

SEQ ID NO: 194693 - DNA, 25 bp, SARS Virus
tctttctgtgcgatagtattagtta

SEQ ID NO: 194694 - DNA, 25 bp, SARS Virus
ctttctgtgcgtaagtattagttac

SEQ ID NO: 194695 - DNA, 25 bp, SARS Virus
tttctgtgcgttagtattagttaca

SEQ ID NO: 194696 - DNA, 25 bp, SARS Virus
ttctgtgcgttaatattagttacaa

SEQ ID NO: 194697 - DNA, 25 bp, SARS Virus
tctgtgcgttagaattagttacaat

SEQ ID NO: 194698 - DNA, 25 bp, SARS Virus
ctgtgcgttagtattagttacaatt

SEQ ID NO: 194699 - DNA, 25 bp, SARS Virus
tgtgcgttagtaatagttacaattt

SEQ ID NO: 194700 - DNA, 25 bp, SARS Virus
gtgcgttagtataagttacaatttt

SEQ ID NO: 194701 - DNA, 25 bp, SARS Virus
tgcgttagtattagttacaattttg

SEQ ID NO: 194702 - DNA, 25 bp, SARS Virus
gcgttagtattaattacaattttgg

SEQ ID NO: 194703 - DNA, 25 bp, SARS Virus
cgttagtattagatacaattttggt

SEQ ID NO: 194704 - DNA, 25 bp, SARS Virus
gttagtattagtaacaattttggtt

SEQ ID NO: 194705 - DNA, 25 bp, SARS Virus
ttagtattagttacaattttggttg

SEQ ID NO: 194706 - DNA, 25 bp, SARS Virus
tagtattagttaaaattttggttgt

SEQ ID NO: 194707 - DNA, 25 bp, SARS Virus
agtattagttacaattttggttgtg

SEQ ID NO: 194708 - DNA, 25 bp, SARS Virus
gtattagttacaattttggttgtga

SEQ ID NO: 194709 - DNA, 25 bp, SARS Virus
tattagttacaaatttggttgtgat

SEQ ID NO: 194710 - DNA, 25 bp, SARS Virus
attagttacaatattggttgtgatg

SEQ ID NO: 194711 - DNA, 25 bp, SARS Virus
ttagttacaattatggttgtgatgg

SEQ ID NO: 194712 - DNA, 25 bp, SARS Virus
tagttacaatttaggttgtgatggt

SEQ ID NO: 194713 - DNA, 25 bp, SARS Virus
agttacaattttagttgtgatggtg

SEQ ID NO: 194714 - DNA, 25 bp, SARS Virus
gttacaattttgattgtgatggtgt

SEQ ID NO: 194715 - DNA, 25 bp, SARS Virus
ttacaattttggatgtgatggtgta

SEQ ID NO: 194716 - DNA, 25 bp, SARS Virus
tacaattttggtagtgatggtgtac

SEQ ID NO: 194717 - DNA, 25 bp, SARS Virus
acaattttggttatgatggtgtact

SEQ ID NO: 194718 - DNA, 25 bp, SARS Virus
caattttggttgagatggtgtacta

SEQ ID NO: 194719 - DNA, 25 bp, SARS Virus
aattttggttgtaatggtgtactag

SEQ ID NO: 194720 - DNA, 25 bp, SARS Virus
attttggttgtgatggtgtactagg

SEQ ID NO: 194721 - DNA, 25 bp, SARS Virus
ttttggttgtgaaggtgtactaggt

SEQ ID NO: 194722 - DNA, 25 bp, SARS Virus
tttggttgtgatagtgtactaggta

SEQ ID NO: 194723 - DNA, 25 bp, SARS Virus
ttggttgtgatgatgtactaggtaa

SEQ ID NO: 194724 - DNA, 25 bp, SARS Virus
tggttgtgatggagtactaggtaat

SEQ ID NO: 194725 - DNA, 25 bp, SARS Virus
ggttgtgatggtatactaggtaatt

SEQ ID NO: 194726 - DNA, 25 bp, SARS Virus
gttgtgatggtgaactaggtaattc

SEQ ID NO: 194727 - DNA, 25 bp, SARS Virus
ttgtgatggtgtactaggtaattcc

SEQ ID NO: 194728 - DNA, 25 bp, SARS Virus
tgtgatggtgtaataggtaattcct

SEQ ID NO: 194729 - DNA, 25 bp, SARS Virus
gtgatggtgtacaaggtaattcctt

SEQ ID NO: 194730 - DNA, 25 bp, SARS Virus
tgatggtgtactaggtaattccttt

SEQ ID NO: 194731 - DNA, 25 bp, SARS Virus
gatggtgtactaagtaattcctttc

SEQ ID NO: 194732 - DNA, 25 bp, SARS Virus
atggtgtactagataattcctttct

SEQ ID NO: 194733 - DNA, 25 bp, SARS Virus
tggtgtactaggaaattcctttctt

SEQ ID NO: 194734 - DNA, 25 bp, SARS Virus
ggtgtactaggtaattcctttcttg

SEQ ID NO: 194735 - DNA, 25 bp, SARS Virus
gtgtactaggtaattcctttcttgg

SEQ ID NO: 194736 - DNA, 25 bp, SARS Virus
tgtactaggtaaatcctttcttgga

SEQ ID NO: 194737 - DNA, 25 bp, SARS Virus
gtactaggtaatacctttcttggaa

SEQ ID NO: 194738 - DNA, 25 bp, SARS Virus
tactaggtaattactttcttggaaa

SEQ ID NO: 194739 - DNA, 25 bp, SARS Virus
actaggtaattcatttcttggaaat

SEQ ID NO: 194740 - DNA, 25 bp, SARS Virus
ctaggtaattccattcttggaaatt

SEQ ID NO: 194741 - DNA, 25 bp, SARS Virus
taggtaattcctatcttggaaatta

SEQ ID NO: 194742 - DNA, 25 bp, SARS Virus
aggtaattccttacttggaaattac

SEQ ID NO: 194743 - DNA, 25 bp, SARS Virus
ggtaattcctttattggaaattacc

SEQ ID NO: 194744 - DNA, 25 bp, SARS Virus
gtaattcctttcatggaaattacca

SEQ ID NO: 194745 - DNA, 25 bp, SARS Virus
ttccattgtggtctcgtaacagatt

SEQ ID NO: 194746 - DNA, 25 bp, SARS Virus
tccattgtggtcccgtaacagattg

SEQ ID NO: 194747 - DNA, 25 bp, SARS Virus
ccattgtggtctcgtaacagattgt

SEQ ID NO: 194748 - DNA, 25 bp, SARS Virus
cattgtggtctcctaacagattgtt

SEQ ID NO: 194749 - DNA, 25 bp, SARS Virus
attgtggtctcgcaacagattgttg

SEQ ID NO: 194750 - DNA, 25 bp, SARS Virus
ttgtggtctcgtcacagattgttgt

SEQ ID NO: 194751 - DNA, 25 bp, SARS Virus
tgtggtctcgtaccagattgttgta

SEQ ID NO: 194752 - DNA, 25 bp, SARS Virus
gtggtctcgtaacagattgttgtag

SEQ ID NO: 194753 - DNA, 25 bp, SARS Virus
tggtctcgtaaccgattgttgtagt

SEQ ID NO: 194754 - DNA, 25 bp, SARS Virus
ggtctcgtaacacattgttgtagtt

SEQ ID NO: 194755 - DNA, 25 bp, SARS Virus
gtctcgtaacagcttgttgtagttt

SEQ ID NO: 194756 - DNA, 25 bp, SARS Virus
tctcgtaacagactgttgtagttta

SEQ ID NO: 194757 - DNA, 25 bp, SARS Virus
ctcgtaacagatcgttgtagtttac

SEQ ID NO: 194758 - DNA, 25 bp, SARS Virus
tcgtaacagattcttgtagtttacc

SEQ ID NO: 194759 - DNA, 25 bp, SARS Virus
cgtaacagattgctgtagtttacca

SEQ ID NO: 194760 - DNA, 25 bp, SARS Virus
gtaacagattgtcgtagtttaccac

SEQ ID NO: 194761 - DNA, 25 bp, SARS Virus
taacagattgttctagtttaccaca

SEQ ID NO: 194762 - DNA, 25 bp, SARS Virus
aacagattgttgcagtttaccacat

SEQ ID NO: 194763 - DNA, 25 bp, SARS Virus
acagattgttgtcgtttaccacatt

SEQ ID NO: 194764 - DNA, 25 bp, SARS Virus
cagattgttgtactttaccacattt

SEQ ID NO: 194765 - DNA, 25 bp, SARS Virus
agattgttgtagcttaccacatttg

SEQ ID NO: 194766 - DNA, 25 bp, SARS Virus
gattgttgtagtctaccacatttga

SEQ ID NO: 194767 - DNA, 25 bp, SARS Virus
attgttgtagttcaccacatttgag

SEQ ID NO: 194768 - DNA, 25 bp, SARS Virus
ttgttgtagtttcccacatttgagt

SEQ ID NO: 194769 - DNA, 25 bp, SARS Virus
tgttgtagtttaccacatttgagta

SEQ ID NO: 194770 - DNA, 25 bp, SARS Virus
gttgtagtttaccacatttgagtag

SEQ ID NO: 194771 - DNA, 25 bp, SARS Virus
ttgtagtttaccccatttgagtaga

SEQ ID NO: 194772 - DNA, 25 bp, SARS Virus
tgtagtttaccacatttgagtagaa

SEQ ID NO: 194773 - DNA, 25 bp, SARS Virus
gtagtttaccacctttgagtagaag

SEQ ID NO: 194774 - DNA, 25 bp, SARS Virus
tagtttaccacacttgagtagaaga

SEQ ID NO: 194775 - DNA, 25 bp, SARS Virus
agtttaccacatctgagtagaagat

SEQ ID NO: 194776 - DNA, 25 bp, SARS Virus
gtttaccacattcgagtagaagatt

SEQ ID NO: 194777 - DNA, 25 bp, SARS Virus
tttaccacatttcagtagaagattt

SEQ ID NO: 194778 - DNA, 25 bp, SARS Virus
ttaccacatttgcgtagaagatttt

SEQ ID NO: 194779 - DNA, 25 bp, SARS Virus
taccacatttgactagaagatttta

SEQ ID NO: 194780 - DNA, 25 bp, SARS Virus
accacatttgagcagaagattttat

SEQ ID NO: 194781 - DNA, 25 bp, SARS Virus
ccacatttgagtcgaagattttatc

SEQ ID NO: 194782 - DNA, 25 bp, SARS Virus
cacatttgagtacaagattttatca

SEQ ID NO: 194783 - DNA, 25 bp, SARS Virus
acatttgagtagcagattttatcac

SEQ ID NO: 194784 - DNA, 25 bp, SARS Virus
catttgagtagacgattttatcacg

SEQ ID NO: 194785 - DNA, 25 bp, SARS Virus
atttgagtagaacattttatcacga

SEQ ID NO: 194786 - DNA, 25 bp, SARS Virus
tttgagtagaagcttttatcacgat

SEQ ID NO: 194787 - DNA, 25 bp, SARS Virus
ttgagtagaagactttatcacgatg

SEQ ID NO: 194788 - DNA, 25 bp, SARS Virus
tgagtagaagatcttatcacgatgg

SEQ ID NO: 194789 - DNA, 25 bp, SARS Virus
gagtagaagattctatcacgatggt

SEQ ID NO: 194790 - DNA, 25 bp, SARS Virus
agtagaagatttcatcacgatggtt

SEQ ID NO: 194791 - DNA, 25 bp, SARS Virus
gtagaagattttctcacgatggttc

SEQ ID NO: 194792 - DNA, 25 bp, SARS Virus
tagaagattttaccacgatggttcc

SEQ ID NO: 194793 - DNA, 25 bp, SARS Virus
agaagattttatcacgatggttcct

SEQ ID NO: 194794 - DNA, 25 bp, SARS Virus
gaagattttatcccgatggttccta

SEQ ID NO: 194795 - DNA, 25 bp, SARS Virus
aagattttatcacgatggttcctat

SEQ ID NO: 194796 - DNA, 25 bp, SARS Virus
agattttatcaccatggttcctatc

SEQ ID NO: 194797 - DNA, 25 bp, SARS Virus
gattttatcacgctggttcctatca

SEQ ID NO: 194798 - DNA, 25 bp, SARS Virus
attttatcacgacggttcctatcat

SEQ ID NO: 194799 - DNA, 25 bp, SARS Virus
ttttatcacgatcgttcctatcatg

SEQ ID NO: 194800 - DNA, 25 bp, SARS Virus
tttatcacgatgcttcctatcatgc

SEQ ID NO: 194801 - DNA, 25 bp, SARS Virus
ttatcacgatggctcctatcatgct

SEQ ID NO: 194802 - DNA, 25 bp, SARS Virus
tatcacgatggtccctatcatgctg

SEQ ID NO: 194803 - DNA, 25 bp, SARS Virus
atcacgatggttcctatcatgctgg

SEQ ID NO: 194804 - DNA, 25 bp, SARS Virus
tcacgatggttcctatcatgctggt

SEQ ID NO: 194805 - DNA, 25 bp, SARS Virus
cacgatggttcccatcatgctggta

SEQ ID NO: 194806 - DNA, 25 bp, SARS Virus
acgatggttcctctcatgctggtaa

SEQ ID NO: 194807 - DNA, 25 bp, SARS Virus
cgatggttcctaccatgctggtaag

SEQ ID NO: 194808 - DNA, 25 bp, SARS Virus
gatggttcctatcatgctggtaagt

SEQ ID NO: 194809 - DNA, 25 bp, SARS Virus
atggttcctatcctgctggtaagta

SEQ ID NO: 194810 - DNA, 25 bp, SARS Virus
tggttcctatcacgctggtaagtat

SEQ ID NO: 194811 - DNA, 25 bp, SARS Virus
ggttcctatcatcctggtaagtatg

SEQ ID NO: 194812 - DNA, 25 bp, SARS Virus
gttcctatcatgctggtaagtatgg

SEQ ID NO: 194813 - DNA, 25 bp, SARS Virus
ttcctatcatgccggtaagtatggt

SEQ ID NO: 194814 - DNA, 25 bp, SARS Virus
tcctatcatgctcgtaagtatggta

SEQ ID NO: 194815 - DNA, 25 bp, SARS Virus
cctatcatgctgctaagtatggtaa

SEQ ID NO: 194816 - DNA, 25 bp, SARS Virus
ctatcatgctggcaagtatggtaag

SEQ ID NO: 194817 - DNA, 25 bp, SARS Virus
tatcatgctggtcagtatggtaaga

SEQ ID NO: 194818 - DNA, 25 bp, SARS Virus
atcatgctggtacgtatggtaagac

SEQ ID NO: 194819 - DNA, 25 bp, SARS Virus
tcatgctggtaactatggtaagacg

SEQ ID NO: 194820 - DNA, 25 bp, SARS Virus
catgctggtaagcatggtaagacgt

SEQ ID NO: 194821 - DNA, 25 bp, SARS Virus
atgctggtaagtctggtaagacgtc

SEQ ID NO: 194822 - DNA, 25 bp, SARS Virus
tgctggtaagtacggtaagacgtcg

SEQ ID NO: 194823 - DNA, 25 bp, SARS Virus
gctggtaagtatcgtaagacgtcgt

SEQ ID NO: 194824 - DNA, 25 bp, SARS Virus
ctggtaagtatgctaagacgtcgtc

SEQ ID NO: 194825 - DNA, 25 bp, SARS Virus
tggtaagtatggcaagacgtcgtcg

SEQ ID NO: 194826 - DNA, 25 bp, SARS Virus
ggtaagtatggtcagacgtcgtcga

SEQ ID NO: 194827 - DNA, 25 bp, SARS Virus
gtaagtatggtacgacgtcgtcgag

SEQ ID NO: 194828 - DNA, 25 bp, SARS Virus
taagtatggtaacacgtcgtcgaga

SEQ ID NO: 194829 - DNA, 25 bp, SARS Virus
aagtatggtaagccgtcgtcgagaa

SEQ ID NO: 194830 - DNA, 25 bp, SARS Virus
agtatggtaagacgtcgtcgagaaa

SEQ ID NO: 194831 - DNA, 25 bp, SARS Virus
gtatggtaagacctcgtcgagaaag

SEQ ID NO: 194832 - DNA, 25 bp, SARS Virus
tatggtaagacgccgtcgagaaagt

SEQ ID NO: 194833 - DNA, 25 bp, SARS Virus
atggtaagacgtcgtcgagaaagtt

SEQ ID NO: 194834 - DNA, 25 bp, SARS Virus
tggtaagacgtcctcgagaaagttt

SEQ ID NO: 194835 - DNA, 25 bp, SARS Virus
ggtaagacgtcgccgagaaagtttc

SEQ ID NO: 194836 - DNA, 25 bp, SARS Virus
gtaagacgtcgtcgagaaagtttcg

SEQ ID NO: 194837 - DNA, 25 bp, SARS Virus
taagacgtcgtccagaaagtttcgt

SEQ ID NO: 194838 - DNA, 25 bp, SARS Virus
aagacgtcgtcgcgaaagtttcgtc

SEQ ID NO: 194839 - DNA, 25 bp, SARS Virus
agacgtcgtcgacaaagtttcgtcg

SEQ ID NO: 194840 - DNA, 25 bp, SARS Virus
gacgtcgtcgagcaagtttcgtcgt

SEQ ID NO: 194841 - DNA, 25 bp, SARS Virus
acgtcgtcgagacagtttcgtcgtg

SEQ ID NO: 194842 - DNA, 25 bp, SARS Virus
cgtcgtcgagaacgtttcgtcgtgt

SEQ ID NO: 194843 - DNA, 25 bp, SARS Virus
gtcgtcgagaaactttcgtcgtgtg

SEQ ID NO: 194844 - DNA, 25 bp, SARS Virus
tcgtcgagaaagcttcgtcgtgtgt

SEQ ID NO: 194845 - DNA, 25 bp, SARS Virus
cgtcgagaaagtctcgtcgtgtgta

SEQ ID NO: 194846 - DNA, 25 bp, SARS Virus
gtcgagaaagttccgtcgtgtgtat

SEQ ID NO: 194847 - DNA, 25 bp, SARS Virus
tcgagaaagtttcgtcgtgtgtata

SEQ ID NO: 194848 - DNA, 25 bp, SARS Virus
cgagaaagtttcctcgtgtgtatag

SEQ ID NO: 194849 - DNA, 25 bp, SARS Virus
gagaaagtttcgccgtgtgtataga

SEQ ID NO: 194850 - DNA, 25 bp, SARS Virus
agaaagtttcgtcgtgtgtatagat

SEQ ID NO: 194851 - DNA, 25 bp, SARS Virus
gaaagtttcgtcctgtgtatagatt

SEQ ID NO: 194852 - DNA, 25 bp, SARS Virus
aaagtttcgtcgcgtgtatagattc

SEQ ID NO: 194853 - DNA, 25 bp, SARS Virus
aagtttcgtcgtctgtatagattct

SEQ ID NO: 194854 - DNA, 25 bp, SARS Virus
agtttcgtcgtgcgtatagattctg

SEQ ID NO: 194855 - DNA, 25 bp, SARS Virus
gtttcgtcgtgtctatagattctgc

SEQ ID NO: 194856 - DNA, 25 bp, SARS Virus
tttcgtcgtgtgcatagattctgcc

SEQ ID NO: 194857 - DNA, 25 bp, SARS Virus
ttcgtcgtgtgtctagattctgccg

SEQ ID NO: 194858 - DNA, 25 bp, SARS Virus
tcgtcgtgtgtacagattctgccgt

SEQ ID NO: 194859 - DNA, 25 bp, SARS Virus
cgtcgtgtgtatcgattctgccgtt

SEQ ID NO: 194860 - DNA, 25 bp, SARS Virus
gtcgtgtgtatacattctgccgtta

SEQ ID NO: 194861 - DNA, 25 bp, SARS Virus
tcgtgtgtatagcttctgccgttaa

SEQ ID NO: 194862 - DNA, 25 bp, SARS Virus
cgtgtgtatagactctgccgttaag

SEQ ID NO: 194863 - DNA, 25 bp, SARS Virus
gtgtgtatagatcctgccgttaagg

SEQ ID NO: 194864 - DNA, 25 bp, SARS Virus
tgtgtatagattctgccgttaagga

SEQ ID NO: 194865 - DNA, 25 bp, SARS Virus
gtgtatagattccgccgttaaggac

SEQ ID NO: 194866 - DNA, 25 bp, SARS Virus
tgtatagattctcccgttaaggaca

SEQ ID NO: 194867 - DNA, 25 bp, SARS Virus
gtatagattctgccgttaaggacaa

SEQ ID NO: 194868 - DNA, 25 bp, SARS Virus
tatagattctgccgttaaggacaaa

SEQ ID NO: 194869 - DNA, 25 bp, SARS Virus
atagattctgcccttaaggacaaac

SEQ ID NO: 194870 - DNA, 25 bp, SARS Virus
tagattctgccgctaaggacaaact

SEQ ID NO: 194871 - DNA, 25 bp, SARS Virus
agattctgccgtcaaggacaaactc

SEQ ID NO: 194872 - DNA, 25 bp, SARS Virus
gattctgccgttcaggacaaactcg

SEQ ID NO: 194873 - DNA, 25 bp, SARS Virus
attctgccgttacggacaaactcgt

SEQ ID NO: 194874 - DNA, 25 bp, SARS Virus
ttctgccgttaacgacaaactcgtc

SEQ ID NO: 194875 - DNA, 25 bp, SARS Virus
tctgccgttaagcacaaactcgtct

SEQ ID NO: 194876 - DNA, 25 bp, SARS Virus
ctgccgttaaggccaaactcgtctt

SEQ ID NO: 194877 - DNA, 25 bp, SARS Virus
tgccgttaaggacaaactcgtcttt

SEQ ID NO: 194878 - DNA, 25 bp, SARS Virus
gccgttaaggaccaactcgtctttc

SEQ ID NO: 194879 - DNA, 25 bp, SARS Virus
ccgttaaggacacactcgtctttct

SEQ ID NO: 194880 - DNA, 25 bp, SARS Virus
cgttaaggacaacctcgtctttctc

SEQ ID NO: 194881 - DNA, 25 bp, SARS Virus
gttaaggacaaactcgtctttctcc

SEQ ID NO: 194882 - DNA, 25 bp, SARS Virus
ttaaggacaaacccgtctttctcca

SEQ ID NO: 194883 - DNA, 25 bp, SARS Virus
taaggacaaactcgtctttctccag

SEQ ID NO: 194884 - DNA, 25 bp, SARS Virus
aaggacaaactcctctttctccagg

SEQ ID NO: 194885 - DNA, 25 bp, SARS Virus
aggacaaactcgcctttctccaggg

SEQ ID NO: 194886 - DNA, 25 bp, SARS Virus
ggacaaactcgtctttctccagggt

SEQ ID NO: 194887 - DNA, 25 bp, SARS Virus
gacaaactcgtccttctccagggtt

SEQ ID NO: 194888 - DNA, 25 bp, SARS Virus
acaaactcgtctctctccagggtta

SEQ ID NO: 194889 - DNA, 25 bp, SARS Virus
caaactcgtcttcctccagggttat

SEQ ID NO: 194890 - DNA, 25 bp, SARS Virus
aaactcgtctttctccagggttata

SEQ ID NO: 194891 - DNA, 25 bp, SARS Virus
aactcgtctttccccagggttatac

SEQ ID NO: 194892 - DNA, 25 bp, SARS Virus
actcgtctttctccagggttataca

SEQ ID NO: 194893 - DNA, 25 bp, SARS Virus
ctcgtctttctccagggttatacag

SEQ ID NO: 194894 - DNA, 25 bp, SARS Virus
tcgtctttctcccgggttatacagt

SEQ ID NO: 194895 - DNA, 25 bp, SARS Virus
cgtctttctccacggttatacagtt

SEQ ID NO: 194896 - DNA, 25 bp, SARS Virus
gtctttctccagcgttatacagttg

SEQ ID NO: 194897 - DNA, 25 bp, SARS Virus
tctttctccaggcttatacagttgt

SEQ ID NO: 194898 - DNA, 25 bp, SARS Virus
ctttctccagggctatacagttgta

SEQ ID NO: 194899 - DNA, 25 bp, SARS Virus
tttctccagggtcatacagttgtac

SEQ ID NO: 194900 - DNA, 25 bp, SARS Virus
ttctccagggttctacagttgtact

SEQ ID NO: 194901 - DNA, 25 bp, SARS Virus
tctccagggttacacagttgtacta

SEQ ID NO: 194902 - DNA, 25 bp, SARS Virus
ctccagggttatccagttgtactag

SEQ ID NO: 194903 - DNA, 25 bp, SARS Virus
tccagggttatacagttgtactaga

SEQ ID NO: 194904 - DNA, 25 bp, SARS Virus
ccagggttataccgttgtactagaa

SEQ ID NO: 194905 - DNA, 25 bp, SARS Virus
cagggttatacacttgtactagaac

SEQ ID NO: 194906 - DNA, 25 bp, SARS Virus
agggttatacagctgtactagaaca

SEQ ID NO: 194907 - DNA, 25 bp, SARS Virus
gggttatacagtcgtactagaacac

SEQ ID NO: 194908 - DNA, 25 bp, SARS Virus
ggttatacagttctactagaacaca

SEQ ID NO: 194909 - DNA, 25 bp, SARS Virus
gttatacagttgcactagaacacag

SEQ ID NO: 194910 - DNA, 25 bp, SARS Virus
ttatacagttgtcctagaacacagt

SEQ ID NO: 194911 - DNA, 25 bp, SARS Virus
tatacagttgtactagaacacagtt

SEQ ID NO: 194912 - DNA, 25 bp, SARS Virus
atacagttgtaccagaacacagttt

SEQ ID NO: 194913 - DNA, 25 bp, SARS Virus
tacagttgtactcgaacacagtttc

SEQ ID NO: 194914 - DNA, 25 bp, SARS Virus
acagttgtactacaacacagtttcc

SEQ ID NO: 194915 - DNA, 25 bp, SARS Virus
cagttgtactagcacacagtttcca

SEQ ID NO: 194916 - DNA, 25 bp, SARS Virus
agttgtactagaccacagtttccaa

SEQ ID NO: 194917 - DNA, 25 bp, SARS Virus
gttgtactagaacacagtttccaag

SEQ ID NO: 194918 - DNA, 25 bp, SARS Virus
ttgtactagaacccagtttccaagt

SEQ ID NO: 194919 - DNA, 25 bp, SARS Virus
tgtactagaacacagtttccaagta

SEQ ID NO: 194920 - DNA, 25 bp, SARS Virus
gtactagaacaccgtttccaagtat

SEQ ID NO: 194921 - DNA, 25 bp, SARS Virus
tactagaacacactttccaagtatc

SEQ ID NO: 194922 - DNA, 25 bp, SARS Virus
actagaacacagcttccaagtatca

SEQ ID NO: 194923 - DNA, 25 bp, SARS Virus
ctagaacacagtctccaagtatcaa

SEQ ID NO: 194924 - DNA, 25 bp, SARS Virus
tagaacacagttcccaagtatcaac

SEQ ID NO: 194925 - DNA, 25 bp, SARS Virus
agaacacagtttccaagtatcaaca

SEQ ID NO: 194926 - DNA, 25 bp, SARS Virus
gaacacagtttccaagtatcaacat

SEQ ID NO: 194927 - DNA, 25 bp, SARS Virus
aacacagtttcccagtatcaacatg

SEQ ID NO: 194928 - DNA, 25 bp, SARS Virus
acacagtttccacgtatcaacatga

SEQ ID NO: 194929 - DNA, 25 bp, SARS Virus
cacagtttccaactatcaacatgaa

SEQ ID NO: 194930 - DNA, 25 bp, SARS Virus
acagtttccaagcatcaacatgaag

SEQ ID NO: 194931 - DNA, 25 bp, SARS Virus
cagtttccaagtctcaacatgaagt

SEQ ID NO: 194932 - DNA, 25 bp, SARS Virus
agtttccaagtaccaacatgaagta

SEQ ID NO: 194933 - DNA, 25 bp, SARS Virus
gtttccaagtatcaacatgaagtaa

SEQ ID NO: 194934 - DNA, 25 bp, SARS Virus
tttccaagtatccacatgaagtaac

SEQ ID NO: 194935 - DNA, 25 bp, SARS Virus
ttccaagtatcaccatgaagtaacg

SEQ ID NO: 194936 - DNA, 25 bp, SARS Virus
tccaagtatcaacatgaagtaacgg

SEQ ID NO: 194937 - DNA, 25 bp, SARS Virus
ccaagtatcaacctgaagtaacggt

SEQ ID NO: 194938 - DNA, 25 bp, SARS Virus
caagtatcaacacgaagtaacggtg

SEQ ID NO: 194939 - DNA, 25 bp, SARS Virus
aagtatcaacatcaagtaacggtgt

SEQ ID NO: 194940 - DNA, 25 bp, SARS Virus
agtatcaacatgcagtaacggtgtt

SEQ ID NO: 194941 - DNA, 25 bp, SARS Virus
gtatcaacatgacgtaacggtgttc

SEQ ID NO: 194942 - DNA, 25 bp, SARS Virus
tatcaacatgaactaacggtgttcc

SEQ ID NO: 194943 - DNA, 25 bp, SARS Virus
atcaacatgaagcaacggtgttcca

SEQ ID NO: 194944 - DNA, 25 bp, SARS Virus
tcaacatgaagtcacggtgttccaa

SEQ ID NO: 194945 - DNA, 25 bp, SARS Virus
caacatgaagtaccggtgttccaat

SEQ ID NO: 194946 - DNA, 25 bp, SARS Virus
aacatgaagtaacggtgttccaatt

SEQ ID NO: 194947 - DNA, 25 bp, SARS Virus
acatgaagtaaccgtgttccaattt

SEQ ID NO: 194948 - DNA, 25 bp, SARS Virus
catgaagtaacgctgttccaatttc

SEQ ID NO: 194949 - DNA, 25 bp, SARS Virus
atgaagtaacggcgttccaatttca

SEQ ID NO: 194950 - DNA, 25 bp, SARS Virus
tgaagtaacggtcttccaatttcag

SEQ ID NO: 194951 - DNA, 25 bp, SARS Virus
gaagtaacggtgctccaatttcagt

SEQ ID NO: 194952 - DNA, 25 bp, SARS Virus
aagtaacggtgtcccaatttcagta

SEQ ID NO: 194953 - DNA, 25 bp, SARS Virus
agtaacggtgttccaatttcagtaa

SEQ ID NO: 194954 - DNA, 25 bp, SARS Virus
gtaacggtgttccaatttcagtaag

SEQ ID NO: 194955 - DNA, 25 bp, SARS Virus
taacggtgttcccatttcagtaagt

SEQ ID NO: 194956 - DNA, 25 bp, SARS Virus
aacggtgttccactttcagtaagtt

SEQ ID NO: 194957 - DNA, 25 bp, SARS Virus
acggtgttccaacttcagtaagttt

SEQ ID NO: 194958 - DNA, 25 bp, SARS Virus
cggtgttccaatctcagtaagtttc

SEQ ID NO: 194959 - DNA, 25 bp, SARS Virus
ggtgttccaattccagtaagtttca

SEQ ID NO: 194960 - DNA, 25 bp, SARS Virus
gtgttccaatttcagtaagtttcat

SEQ ID NO: 194961 - DNA, 25 bp, SARS Virus
tgttccaatttccgtaagtttcatc

SEQ ID NO: 194962 - DNA, 25 bp, SARS Virus
gttccaatttcactaagtttcatca

SEQ ID NO: 194963 - DNA, 25 bp, SARS Virus
ttccaatttcagcaagtttcatcac

SEQ ID NO: 194964 - DNA, 25 bp, SARS Virus
tccaatttcagtcagtttcatcacc

SEQ ID NO: 194965 - DNA, 25 bp, SARS Virus
ccaatttcagtacgtttcatcacca

SEQ ID NO: 194966 - DNA, 25 bp, SARS Virus
caatttcagtaactttcatcaccac

SEQ ID NO: 194967 - DNA, 25 bp, SARS Virus
aatttcagtaagcttcatcaccact

SEQ ID NO: 194968 - DNA, 25 bp, SARS Virus
atttcagtaagtctcatcaccactt

SEQ ID NO: 194969 - DNA, 25 bp, SARS Virus
tttcagtaagttccatcaccactta

SEQ ID NO: 194970 - DNA, 25 bp, SARS Virus
ttcagtaagtttcatcaccacttag

SEQ ID NO: 194971 - DNA, 25 bp, SARS Virus
tcagtaagtttcctcaccacttaga

SEQ ID NO: 194972 - DNA, 25 bp, SARS Virus
cagtaagtttcaccaccacttagat

SEQ ID NO: 194973 - DNA, 25 bp, SARS Virus
agtaagtttcatcaccacttagata

SEQ ID NO: 194974 - DNA, 25 bp, SARS Virus
gtaagtttcatccccacttagataa

SEQ ID NO: 194975 - DNA, 25 bp, SARS Virus
taagtttcatcaccacttagataat

SEQ ID NO: 194976 - DNA, 25 bp, SARS Virus
aagtttcatcaccacttagataatt

SEQ ID NO: 194977 - DNA, 25 bp, SARS Virus
agtttcatcaccccttagataattc

SEQ ID NO: 194978 - DNA, 25 bp, SARS Virus
gtttcatcaccacttagataattct

SEQ ID NO: 194979 - DNA, 25 bp, SARS Virus
tttcatcaccacctagataattctt

SEQ ID NO: 194980 - DNA, 25 bp, SARS Virus
ttcatcaccactcagataattcttt

SEQ ID NO: 194981 - DNA, 25 bp, SARS Virus
tcatcaccacttcgataattctttg

SEQ ID NO: 194982 - DNA, 25 bp, SARS Virus
catcaccacttacataattctttgg

SEQ ID NO: 194983 - DNA, 25 bp, SARS Virus
atcaccacttagctaattctttggt

SEQ ID NO: 194984 - DNA, 25 bp, SARS Virus
tcaccacttagacaattctttggtg

SEQ ID NO: 194985 - DNA, 25 bp, SARS Virus
caccacttagatcattctttggtgg

SEQ ID NO: 194986 - DNA, 25 bp, SARS Virus
accacttagatacttctttggtgga

SEQ ID NO: 194987 - DNA, 25 bp, SARS Virus
ccacttagataactctttggtggat

SEQ ID NO: 194988 - DNA, 25 bp, SARS Virus
cacttagataatcctttggtggata

SEQ ID NO: 194989 - DNA, 25 bp, SARS Virus
acttagataattctttggtggatag

SEQ ID NO: 194990 - DNA, 25 bp, SARS Virus
cttagataattccttggtggatagt

SEQ ID NO: 194991 - DNA, 25 bp, SARS Virus
ttagataattctctggtggatagtg

SEQ ID NO: 194992 - DNA, 25 bp, SARS Virus
tagataattcttcggtggatagtgg

SEQ ID NO: 194993 - DNA, 25 bp, SARS Virus
agataattctttcgtggatagtggt

SEQ ID NO: 194994 - DNA, 25 bp, SARS Virus
gataattctttgctggatagtggta

SEQ ID NO: 194995 - DNA, 25 bp, SARS Virus
ataattctttggcggatagtggtaa

SEQ ID NO: 194996 - DNA, 25 bp, SARS Virus
taattctttggtcgatagtggtaac

SEQ ID NO: 194997 - DNA, 25 bp, SARS Virus
aattctttggtgcatagtggtaact

SEQ ID NO: 194998 - DNA, 25 bp, SARS Virus
attctttggtggctagtggtaacta

SEQ ID NO: 194999 - DNA, 25 bp, SARS Virus
ttctttggtggacagtggtaactat

SEQ ID NO: 195000 - DNA, 25 bp, SARS Virus
tctttggtggatcgtggtaactatt

SEQ ID NO: 195001 - DNA, 25 bp, SARS Virus
ctttggtggatactggtaactattg

SEQ ID NO: 195002 - DNA, 25 bp, SARS Virus
tttggtggatagcggtaactattgt

SEQ ID NO: 195003 - DNA, 25 bp, SARS Virus
ttggtggatagtcgtaactattgtc

SEQ ID NO: 195004 - DNA, 25 bp, SARS Virus
tggtggatagtgctaactattgtcg

SEQ ID NO: 195005 - DNA, 25 bp, SARS Virus
ggtggatagtggcaactattgtcgt

SEQ ID NO: 195006 - DNA, 25 bp, SARS Virus
gtggatagtggtcactattgtcgtc

SEQ ID NO: 195007 - DNA, 25 bp, SARS Virus
tggatagtggtacctattgtcgtcg

SEQ ID NO: 195008 - DNA, 25 bp, SARS Virus
ggatagtggtaactattgtcgtcgt

SEQ ID NO: 195009 - DNA, 25 bp, SARS Virus
gatagtggtaaccattgtcgtcgta

SEQ ID NO: 195010 - DNA, 25 bp, SARS Virus
atagtggtaactcttgtcgtcgtat

SEQ ID NO: 195011 - DNA, 25 bp, SARS Virus
tagtggtaactactgtcgtcgtatg

SEQ ID NO: 195012 - DNA, 25 bp, SARS Virus
agtggtaactatcgtcgtcgtatgt

SEQ ID NO: 195013 - DNA, 25 bp, SARS Virus
gtggtaactattctcgtcgtatgtc

SEQ ID NO: 195014 - DNA, 25 bp, SARS Virus
tggtaactattgccgtcgtatgtcg

SEQ ID NO: 195015 - DNA, 25 bp, SARS Virus
ggtaactattgtcgtcgtatgtcgg

SEQ ID NO: 195016 - DNA, 25 bp, SARS Virus
gtaactattgtcctcgtatgtcggt

SEQ ID NO: 195017 - DNA, 25 bp, SARS Virus
taactattgtcgccgtatgtcggta

SEQ ID NO: 195018 - DNA, 25 bp, SARS Virus
aactattgtcgtcgtatgtcggtac

SEQ ID NO: 195019 - DNA, 25 bp, SARS Virus
actattgtcgtcctatgtcggtacg

SEQ ID NO: 195020 - DNA, 25 bp, SARS Virus
ctattgtcgtcgcatgtcggtacgg

SEQ ID NO: 195021 - DNA, 25 bp, SARS Virus
tattgtcgtcgtctgtcggtacggt

SEQ ID NO: 195022 - DNA, 25 bp, SARS Virus
attgtcgtcgtacgtcggtacggtt

SEQ ID NO: 195023 - DNA, 25 bp, SARS Virus
ttgtcgtcgtatctcggtacggttt

SEQ ID NO: 195024 - DNA, 25 bp, SARS Virus
tgtcgtcgtatgccggtacggtttt

SEQ ID NO: 195025 - DNA, 25 bp, SARS Virus
gtcgtcgtatgtcggtacggttttg

SEQ ID NO: 195026 - DNA, 25 bp, SARS Virus
tcgtcgtatgtccgtacggttttgt

SEQ ID NO: 195027 - DNA, 25 bp, SARS Virus
cgtcgtatgtcgctacggttttgta

SEQ ID NO: 195028 - DNA, 25 bp, SARS Virus
gtcgtatgtcggcacggttttgtaa

SEQ ID NO: 195029 - DNA, 25 bp, SARS Virus
tcgtatgtcggtccggttttgtaaa

SEQ ID NO: 195030 - DNA, 25 bp, SARS Virus
cgtatgtcggtacggttttgtaaat

SEQ ID NO: 195031 - DNA, 25 bp, SARS Virus
gtatgtcggtaccgttttgtaaatt

SEQ ID NO: 195032 - DNA, 25 bp, SARS Virus
tatgtcggtacgcttttgtaaatta

SEQ ID NO: 195033 - DNA, 25 bp, SARS Virus
atgtcggtacggctttgtaaattac

SEQ ID NO: 195034 - DNA, 25 bp, SARS Virus
tgtcggtacggtcttgtaaattaca

SEQ ID NO: 195035 - DNA, 25 bp, SARS Virus
gtcggtacggttctgtaaattacaa

SEQ ID NO: 195036 - DNA, 25 bp, SARS Virus
tcggtacggtttcgtaaattacaat

SEQ ID NO: 195037 - DNA, 25 bp, SARS Virus
cggtacggttttctaaattacaata

SEQ ID NO: 195038 - DNA, 25 bp, SARS Virus
ggtacggttttgcaaattacaatac

SEQ ID NO: 195039 - DNA, 25 bp, SARS Virus
gtacggttttgtcaattacaatacc

SEQ ID NO: 195040 - DNA, 25 bp, SARS Virus
tacggttttgtacattacaatacca

SEQ ID NO: 195041 - DNA, 25 bp, SARS Virus
acggttttgtaacttacaataccaa

SEQ ID NO: 195042 - DNA, 25 bp, SARS Virus
cggttttgtaaactacaataccaac

SEQ ID NO: 195043 - DNA, 25 bp, SARS Virus
ggttttgtaaatcacaataccaaca

SEQ ID NO: 195044 - DNA, 25 bp, SARS Virus
gttttgtaaattccaataccaacac

SEQ ID NO: 195045 - DNA, 25 bp, SARS Virus
ttttgtaaattacaataccaacaca

SEQ ID NO: 195046 - DNA, 25 bp, SARS Virus
tttgtaaattaccataccaacacag

SEQ ID NO: 195047 - DNA, 25 bp, SARS Virus
ttgtaaattacactaccaacacaga

SEQ ID NO: 195048 - DNA, 25 bp, SARS Virus
tgtaaattacaacaccaacacagac

SEQ ID NO: 195049 - DNA, 25 bp, SARS Virus
gtaaattacaatcccaacacagaca

SEQ ID NO: 195050 - DNA, 25 bp, SARS Virus
taaattacaataccaacacagacat

SEQ ID NO: 195051 - DNA, 25 bp, SARS Virus
aaattacaataccaacacagacatg

SEQ ID NO: 195052 - DNA, 25 bp, SARS Virus
aattacaatacccacacagacatgg

SEQ ID NO: 195053 - DNA, 25 bp, SARS Virus
attacaataccaccacagacatgga

SEQ ID NO: 195054 - DNA, 25 bp, SARS Virus
ttacaataccaacacagacatggac

SEQ ID NO: 195055 - DNA, 25 bp, SARS Virus
tacaataccaacccagacatggacg

SEQ ID NO: 195056 - DNA, 25 bp, SARS Virus
acaataccaacacagacatggacgt

SEQ ID NO: 195057 - DNA, 25 bp, SARS Virus
caataccaacaccgacatggacgtc

SEQ ID NO: 195058 - DNA, 25 bp, SARS Virus
aataccaacacacacatggacgtcg

SEQ ID NO: 195059 - DNA, 25 bp, SARS Virus
ataccaacacagccatggacgtcgg

SEQ ID NO: 195060 - DNA, 25 bp, SARS Virus
taccaacacagacatggacgtcgga

SEQ ID NO: 195061 - DNA, 25 bp, SARS Virus
accaacacagacctggacgtcggac

SEQ ID NO: 195062 - DNA, 25 bp, SARS Virus
ccaacacagacacggacgtcggaca

SEQ ID NO: 195063 - DNA, 25 bp, SARS Virus
caacacagacatcgacgtcggacac

SEQ ID NO: 195064 - DNA, 25 bp, SARS Virus
aacacagacatgcacgtcggacacg

SEQ ID NO: 195065 - DNA, 25 bp, SARS Virus
acacagacatggccgtcggacacgt

SEQ ID NO: 195066 - DNA, 25 bp, SARS Virus
cacagacatggacgtcggacacgtc

SEQ ID NO: 195067 - DNA, 25 bp, SARS Virus
acagacatggacctcggacacgtca

SEQ ID NO: 195068 - DNA, 25 bp, SARS Virus
cagacatggacgccggacacgtcaa

SEQ ID NO: 195069 - DNA, 25 bp, SARS Virus
agacatggacgtcggacacgtcaaa

SEQ ID NO: 195070 - DNA, 25 bp, SARS Virus
gacatggacgtccgacacgtcaaac

SEQ ID NO: 195071 - DNA, 25 bp, SARS Virus
acatggacgtcgcacacgtcaaaca

SEQ ID NO: 195072 - DNA, 25 bp, SARS Virus
catggacgtcggccacgtcaaacag

SEQ ID NO: 195073 - DNA, 25 bp, SARS Virus
atggacgtcggacacgtcaaacaga

SEQ ID NO: 195074 - DNA, 25 bp, SARS Virus
tggacgtcggacccgtcaaacagac

SEQ ID NO: 195075 - DNA, 25 bp, SARS Virus
ggacgtcggacacgtcaaacagaca

SEQ ID NO: 195076 - DNA, 25 bp, SARS Virus
gacgtcggacacctcaaacagacag

SEQ ID NO: 195077 - DNA, 25 bp, SARS Virus
acgtcggacacgccaaacagacagt

SEQ ID NO: 195078 - DNA, 25 bp, SARS Virus
cgtcggacacgtcaaacagacagtt

SEQ ID NO: 195079 - DNA, 25 bp, SARS Virus
gtcggacacgtccaacagacagttg

SEQ ID NO: 195080 - DNA, 25 bp, SARS Virus
tcggacacgtcacacagacagttgt

SEQ ID NO: 195081 - DNA, 25 bp, SARS Virus
cggacacgtcaaccagacagttgtt

SEQ ID NO: 195082 - DNA, 25 bp, SARS Virus
ggacacgtcaaacagacagttgttt

SEQ ID NO: 195083 - DNA, 25 bp, SARS Virus
gacacgtcaaaccgacagttgttta

SEQ ID NO: 195084 - DNA, 25 bp, SARS Virus
acacgtcaaacacacagttgtttac

SEQ ID NO: 195085 - DNA, 25 bp, SARS Virus
cacgtcaaacagccagttgtttacc

SEQ ID NO: 195086 - DNA, 25 bp, SARS Virus
acgtcaaacagacagttgtttacct

SEQ ID NO: 195087 - DNA, 25 bp, SARS Virus
cgtcaaacagaccgttgtttacctg

SEQ ID NO: 195088 - DNA, 25 bp, SARS Virus
gtcaaacagacacttgtttacctgg

SEQ ID NO: 195089 - DNA, 25 bp, SARS Virus
tcaaacagacagctgtttacctggt

SEQ ID NO: 195090 - DNA, 25 bp, SARS Virus
caaacagacagtcgtttacctggta

SEQ ID NO: 195091 - DNA, 25 bp, SARS Virus
aaacagacagttctttacctggtat

SEQ ID NO: 195092 - DNA, 25 bp, SARS Virus
aacagacagttgcttacctggtatc

SEQ ID NO: 195093 - DNA, 25 bp, SARS Virus
acagacagttgtctacctggtatct

SEQ ID NO: 195094 - DNA, 25 bp, SARS Virus
cagacagttgttcacctggtatctt

SEQ ID NO: 195095 - DNA, 25 bp, SARS Virus
agacagttgtttccctggtatctta

SEQ ID NO: 195096 - DNA, 25 bp, SARS Virus
gacagttgtttacctggtatcttaa

SEQ ID NO: 195097 - DNA, 25 bp, SARS Virus
acagttgtttacctggtatcttaaa

SEQ ID NO: 195098 - DNA, 25 bp, SARS Virus
cagttgtttacccggtatcttaaat

SEQ ID NO: 195099 - DNA, 25 bp, SARS Virus
agttgtttacctcgtatcttaaatg

SEQ ID NO: 195100 - DNA, 25 bp, SARS Virus
gttgtttacctgctatcttaaatgg

SEQ ID NO: 195101 - DNA, 25 bp, SARS Virus
ttgtttacctggcatcttaaatgga

SEQ ID NO: 195102 - DNA, 25 bp, SARS Virus
tgtttacctggtctcttaaatggaa

SEQ ID NO: 195103 - DNA, 25 bp, SARS Virus
gtttacctggtaccttaaatggaag

SEQ ID NO: 195104 - DNA, 25 bp, SARS Virus
tttacctggtatcttaaatggaaga

SEQ ID NO: 195105 - DNA, 25 bp, SARS Virus
ttacctggtatcctaaatggaagat

SEQ ID NO: 195106 - DNA, 25 bp, SARS Virus
tacctggtatctcaaatggaagatt

SEQ ID NO: 195107 - DNA, 25 bp, SARS Virus
acctggtatcttcaatggaagattc

SEQ ID NO: 195108 - DNA, 25 bp, SARS Virus
cctggtatcttacatggaagattca

SEQ ID NO: 195109 - DNA, 25 bp, SARS Virus
ctggtatcttaactggaagattcag

SEQ ID NO: 195110 - DNA, 25 bp, SARS Virus
tggtatcttaaacggaagattcagt

SEQ ID NO: 195111 - DNA, 25 bp, SARS Virus
ggtatcttaaatcgaagattcagtc

SEQ ID NO: 195112 - DNA, 25 bp, SARS Virus
gtatcttaaatgcaagattcagtca

SEQ ID NO: 195113 - DNA, 25 bp, SARS Virus
tatcttaaatggcagattcagtcat

SEQ ID NO: 195114 - DNA, 25 bp, SARS Virus
atcttaaatggacgattcagtcatg

SEQ ID NO: 195115 - DNA, 25 bp, SARS Virus
tcttaaatggaacattcagtcatgg

SEQ ID NO: 195116 - DNA, 25 bp, SARS Virus
cttaaatggaagcttcagtcatggt

SEQ ID NO: 195117 - DNA, 25 bp, SARS Virus
ttaaatggaagactcagtcatggtc

SEQ ID NO: 195118 - DNA, 25 bp, SARS Virus
taaatggaagatccagtcatggtcg

SEQ ID NO: 195119 - DNA, 25 bp, SARS Virus
aaatggaagattcagtcatggtcgc

SEQ ID NO: 195120 - DNA, 25 bp, SARS Virus
aatggaagattccgtcatggtcgca

SEQ ID NO: 195121 - DNA, 25 bp, SARS Virus
atggaagattcactcatggtcgcac

SEQ ID NO: 195122 - DNA, 25 bp, SARS Virus
tggaagattcagccatggtcgcaca

SEQ ID NO: 195123 - DNA, 25 bp, SARS Virus
ggaagattcagtcatggtcgcacat

SEQ ID NO: 195124 - DNA, 25 bp, SARS Virus
gaagattcagtcctggtcgcacatg

SEQ ID NO: 195125 - DNA, 25 bp, SARS Virus
aagattcagtcacggtcgcacatga

SEQ ID NO: 195126 - DNA, 25 bp, SARS Virus
agattcagtcatcgtcgcacatgag

SEQ ID NO: 195127 - DNA, 25 bp, SARS Virus
gattcagtcatgctcgcacatgagg

SEQ ID NO: 195128 - DNA, 25 bp, SARS Virus
attcagtcatggccgcacatgagga

SEQ ID NO: 195129 - DNA, 25 bp, SARS Virus
ttcagtcatggtcgcacatgaggac

SEQ ID NO: 195130 - DNA, 25 bp, SARS Virus
tcagtcatggtcccacatgaggaca

SEQ ID NO: 195131 - DNA, 25 bp, SARS Virus
cagtcatggtcgcacatgaggacaa

SEQ ID NO: 195132 - DNA, 25 bp, SARS Virus
agtcatggtcgcccatgaggacaac

SEQ ID NO: 195133 - DNA, 25 bp, SARS Virus
gtcatggtcgcacatgaggacaacc

SEQ ID NO: 195134 - DNA, 25 bp, SARS Virus
tcatggtcgcacctgaggacaacct

SEQ ID NO: 195135 - DNA, 25 bp, SARS Virus
catggtcgcacacgaggacaacctt

SEQ ID NO: 195136 - DNA, 25 bp, SARS Virus
atggtcgcacatcaggacaaccttc

SEQ ID NO: 195137 - DNA, 25 bp, SARS Virus
tggtcgcacatgcggacaaccttcg

SEQ ID NO: 195138 - DNA, 25 bp, SARS Virus
ggtcgcacatgacgacaaccttcga

SEQ ID NO: 195139 - DNA, 25 bp, SARS Virus
gtcgcacatgagcacaaccttcgag

SEQ ID NO: 195140 - DNA, 25 bp, SARS Virus
tcgcacatgaggccaaccttcgagg

SEQ ID NO: 195141 - DNA, 25 bp, SARS Virus
cgcacatgaggacaaccttcgaggt

SEQ ID NO: 195142 - DNA, 25 bp, SARS Virus
gcacatgaggaccaccttcgaggta

SEQ ID NO: 195143 - DNA, 25 bp, SARS Virus
cacatgaggacacccttcgaggtat

SEQ ID NO: 195144 - DNA, 25 bp, SARS Virus
acatgaggacaaccttcgaggtata

SEQ ID NO: 195145 - DNA, 25 bp, SARS Virus
catgaggacaaccttcgaggtatac

SEQ ID NO: 195146 - DNA, 25 bp, SARS Virus
atgaggacaaccctcgaggtatact

SEQ ID NO: 195147 - DNA, 25 bp, SARS Virus
tgaggacaacctccgaggtatacta

SEQ ID NO: 195148 - DNA, 25 bp, SARS Virus
gaggacaaccttcgaggtatactac

SEQ ID NO: 195149 - DNA, 25 bp, SARS Virus
aggacaaccttccaggtatactacg

SEQ ID NO: 195150 - DNA, 25 bp, SARS Virus
ggacaaccttcgcggtatactacgt

SEQ ID NO: 195151 - DNA, 25 bp, SARS Virus
gacaaccttcgacgtatactacgta

SEQ ID NO: 195152 - DNA, 25 bp, SARS Virus
acaaccttcgagctatactacgtat

SEQ ID NO: 195153 - DNA, 25 bp, SARS Virus
caaccttcgaggcatactacgtata

SEQ ID NO: 195154 - DNA, 25 bp, SARS Virus
aaccttcgaggtctactacgtatat

SEQ ID NO: 195155 - DNA, 25 bp, SARS Virus
accttcgaggtacactacgtatatc

SEQ ID NO: 195156 - DNA, 25 bp, SARS Virus
ccttcgaggtatcctacgtatatcg

SEQ ID NO: 195157 - DNA, 25 bp, SARS Virus
cttcgaggtatactacgtatatcgt

SEQ ID NO: 195158 - DNA, 25 bp, SARS Virus
ttcgaggtataccacgtatatcgtc

SEQ ID NO: 195159 - DNA, 25 bp, SARS Virus
tcgaggtatactccgtatatcgtct

SEQ ID NO: 195160 - DNA, 25 bp, SARS Virus
cgaggtatactacgtatatcgtctt

SEQ ID NO: 195161 - DNA, 25 bp, SARS Virus
gaggtatactacctatatcgtcttt

SEQ ID NO: 195162 - DNA, 25 bp, SARS Virus
aggtatactacgcatatcgtctttc

SEQ ID NO: 195163 - DNA, 25 bp, SARS Virus
ggtatactacgtctatcgtctttct

SEQ ID NO: 195164 - DNA, 25 bp, SARS Virus
gtatactacgtacatcgtctttctg

SEQ ID NO: 195165 - DNA, 25 bp, SARS Virus
tatactacgtatctcgtctttctgt

SEQ ID NO: 195166 - DNA, 25 bp, SARS Virus
atactacgtataccgtctttctgtg

SEQ ID NO: 195167 - DNA, 25 bp, SARS Virus
tactacgtatatcgtctttctgtgc

SEQ ID NO: 195168 - DNA, 25 bp, SARS Virus
actacgtatatcctctttctgtgcg

SEQ ID NO: 195169 - DNA, 25 bp, SARS Virus
ctacgtatatcgcctttctgtgcgt

SEQ ID NO: 195170 - DNA, 25 bp, SARS Virus
tacgtatatcgtctttctgtgcgtt

SEQ ID NO: 195171 - DNA, 25 bp, SARS Virus
acgtatatcgtccttctgtgcgtta

SEQ ID NO: 195172 - DNA, 25 bp, SARS Virus
cgtatatcgtctctctgtgcgttag

SEQ ID NO: 195173 - DNA, 25 bp, SARS Virus
gtatatcgtcttcctgtgcgttagt

SEQ ID NO: 195174 - DNA, 25 bp, SARS Virus
tatatcgtctttctgtgcgttagta

SEQ ID NO: 195175 - DNA, 25 bp, SARS Virus
atatcgtctttccgtgcgttagtat

SEQ ID NO: 195176 - DNA, 25 bp, SARS Virus
tatcgtctttctctgcgttagtatt

SEQ ID NO: 195177 - DNA, 25 bp, SARS Virus
atcgtctttctgcgcgttagtatta

SEQ ID NO: 195178 - DNA, 25 bp, SARS Virus
tcgtctttctgtccgttagtattag

SEQ ID NO: 195179 - DNA, 25 bp, SARS Virus
cgtctttctgtgcgttagtattagt

SEQ ID NO: 195180 - DNA, 25 bp, SARS Virus
gtctttctgtgccttagtattagtt

SEQ ID NO: 195181 - DNA, 25 bp, SARS Virus
tctttctgtgcgctagtattagtta

SEQ ID NO: 195182 - DNA, 25 bp, SARS Virus
ctttctgtgcgtcagtattagttac

SEQ ID NO: 195183 - DNA, 25 bp, SARS Virus
tttctgtgcgttcgtattagttaca

SEQ ID NO: 195184 - DNA, 25 bp, SARS Virus
ttctgtgcgttactattagttacaa

SEQ ID NO: 195185 - DNA, 25 bp, SARS Virus
tctgtgcgttagcattagttacaat

SEQ ID NO: 195186 - DNA, 25 bp, SARS Virus
ctgtgcgttagtcttagttacaatt

SEQ ID NO: 195187 - DNA, 25 bp, SARS Virus
tgtgcgttagtactagttacaattt

SEQ ID NO: 195188 - DNA, 25 bp, SARS Virus
gtgcgttagtatcagttacaatttt

SEQ ID NO: 195189 - DNA, 25 bp, SARS Virus
tgcgttagtattcgttacaattttg

SEQ ID NO: 195190 - DNA, 25 bp, SARS Virus
gcgttagtattacttacaattttgg

SEQ ID NO: 195191 - DNA, 25 bp, SARS Virus
cgttagtattagctacaattttggt

SEQ ID NO: 195192 - DNA, 25 bp, SARS Virus
gttagtattagtcacaattttggtt

SEQ ID NO: 195193 - DNA, 25 bp, SARS Virus
ttagtattagttccaattttggttg

SEQ ID NO: 195194 - DNA, 25 bp, SARS Virus
tagtattagttacaattttggttgt

SEQ ID NO: 195195 - DNA, 25 bp, SARS Virus
agtattagttaccattttggttgtg

SEQ ID NO: 195196 - DNA, 25 bp, SARS Virus
gtattagttacacttttggttgtga

SEQ ID NO: 195197 - DNA, 25 bp, SARS Virus
tattagttacaactttggttgtgat

SEQ ID NO: 195198 - DNA, 25 bp, SARS Virus
attagttacaatcttggttgtgatg

SEQ ID NO: 195199 - DNA, 25 bp, SARS Virus
ttagttacaattctggttgtgatgg

SEQ ID NO: 195200 - DNA, 25 bp, SARS Virus
tagttacaatttcggttgtgatggt

SEQ ID NO: 195201 - DNA, 25 bp, SARS Virus
agttacaattttcgttgtgatggtg

SEQ ID NO: 195202 - DNA, 25 bp, SARS Virus
gttacaattttgcttgtgatggtgt

SEQ ID NO: 195203 - DNA, 25 bp, SARS Virus
ttacaattttggctgtgatggtgta

SEQ ID NO: 195204 - DNA, 25 bp, SARS Virus
tacaattttggtcgtgatggtgtac

SEQ ID NO: 195205 - DNA, 25 bp, SARS Virus
acaattttggttctgatggtgtact

SEQ ID NO: 195206 - DNA, 25 bp, SARS Virus
caattttggttgcgatggtgtacta

SEQ ID NO: 195207 - DNA, 25 bp, SARS Virus
aattttggttgtcatggtgtactag

SEQ ID NO: 195208 - DNA, 25 bp, SARS Virus
attttggttgtgctggtgtactagg

SEQ ID NO: 195209 - DNA, 25 bp, SARS Virus
ttttggttgtgacggtgtactaggt

SEQ ID NO: 195210 - DNA, 25 bp, SARS Virus
tttggttgtgatcgtgtactaggta

SEQ ID NO: 195211 - DNA, 25 bp, SARS Virus
ttggttgtgatgctgtactaggtaa

SEQ ID NO: 195212 - DNA, 25 bp, SARS Virus
tggttgtgatggcgtactaggtaat

SEQ ID NO: 195213 - DNA, 25 bp, SARS Virus
ggttgtgatggtctactaggtaatt

SEQ ID NO: 195214 - DNA, 25 bp, SARS Virus
gttgtgatggtgcactaggtaattc

SEQ ID NO: 195215 - DNA, 25 bp, SARS Virus
ttgtgatggtgtcctaggtaattcc

SEQ ID NO: 195216 - DNA, 25 bp, SARS Virus
tgtgatggtgtactaggtaattcct

SEQ ID NO: 195217 - DNA, 25 bp, SARS Virus
gtgatggtgtaccaggtaattcctt

SEQ ID NO: 195218 - DNA, 25 bp, SARS Virus
tgatggtgtactcggtaattccttt

SEQ ID NO: 195219 - DNA, 25 bp, SARS Virus
gatggtgtactacgtaattcctttc

SEQ ID NO: 195220 - DNA, 25 bp, SARS Virus
atggtgtactagctaattcctttct

SEQ ID NO: 195221 - DNA, 25 bp, SARS Virus
tggtgtactaggcaattcctttctt

SEQ ID NO: 195222 - DNA, 25 bp, SARS Virus
ggtgtactaggtcattcctttcttg

SEQ ID NO: 195223 - DNA, 25 bp, SARS Virus
gtgtactaggtacttcctttcttgg

SEQ ID NO: 195224 - DNA, 25 bp, SARS Virus
tgtactaggtaactcctttcttgga

SEQ ID NO: 195225 - DNA, 25 bp, SARS Virus
gtactaggtaatccctttcttggaa

SEQ ID NO: 195226 - DNA, 25 bp, SARS Virus
tactaggtaattcctttcttggaaa

SEQ ID NO: 195227 - DNA, 25 bp, SARS Virus
actaggtaattcctttcttggaaat

SEQ ID NO: 195228 - DNA, 25 bp, SARS Virus
ctaggtaattcccttcttggaaatt

SEQ ID NO: 195229 - DNA, 25 bp, SARS Virus
taggtaattcctctcttggaaatta

SEQ ID NO: 195230 - DNA, 25 bp, SARS Virus
aggtaattccttccttggaaattac

SEQ ID NO: 195231 - DNA, 25 bp, SARS Virus
ggtaattcctttcttggaaattacc

SEQ ID NO: 195232 - DNA, 25 bp, SARS Virus
gtaattcctttcctggaaattacca

SEQ ID NO: 195233 - DNA, 25 bp, SARS Virus
ttccattgtggtgtcgtaacagatt

SEQ ID NO: 195234 - DNA, 25 bp, SARS Virus
tccattgtggtcgcgtaacagattg

SEQ ID NO: 195235 - DNA, 25 bp, SARS Virus
ccattgtggtctggtaacagattgt

SEQ ID NO: 195236 - DNA, 25 bp, SARS Virus
cattgtggtctcgtaacagattgtt

SEQ ID NO: 195237 - DNA, 25 bp, SARS Virus
attgtggtctcggaacagattgttg

SEQ ID NO: 195238 - DNA, 25 bp, SARS Virus
ttgtggtctcgtgacagattgttgt

SEQ ID NO: 195239 - DNA, 25 bp, SARS Virus
tgtggtctcgtagcagattgttgta

SEQ ID NO: 195240 - DNA, 25 bp, SARS Virus
gtggtctcgtaagagattgttgtag

SEQ ID NO: 195241 - DNA, 25 bp, SARS Virus
tggtctcgtaacggattgttgtagt

SEQ ID NO: 195242 - DNA, 25 bp, SARS Virus
ggtctcgtaacagattgttgtagtt

SEQ ID NO: 195243 - DNA, 25 bp, SARS Virus
gtctcgtaacaggttgttgtagttt

SEQ ID NO: 195244 - DNA, 25 bp, SARS Virus
tctcgtaacagagtgttgtagttta

SEQ ID NO: 195245 - DNA, 25 bp, SARS Virus
ctcgtaacagatggttgtagtttac

SEQ ID NO: 195246 - DNA, 25 bp, SARS Virus
tcgtaacagattgttgtagtttacc

SEQ ID NO: 195247 - DNA, 25 bp, SARS Virus
cgtaacagattggtgtagtttacca

SEQ ID NO: 195248 - DNA, 25 bp, SARS Virus
gtaacagattgtggtagtttaccac

SEQ ID NO: 195249 - DNA, 25 bp, SARS Virus
taacagattgttgtagtttaccaca

SEQ ID NO: 195250 - DNA, 25 bp, SARS Virus
aacagattgttggagtttaccacat

SEQ ID NO: 195251 - DNA, 25 bp, SARS Virus
acagattgttgtggtttaccacatt

SEQ ID NO: 195252 - DNA, 25 bp, SARS Virus
cagattgttgtagtttaccacattt

SEQ ID NO: 195253 - DNA, 25 bp, SARS Virus
agattgttgtaggttaccacatttg

SEQ ID NO: 195254 - DNA, 25 bp, SARS Virus
gattgttgtagtgtaccacatttga

SEQ ID NO: 195255 - DNA, 25 bp, SARS Virus
attgttgtagttgaccacatttgag

SEQ ID NO: 195256 - DNA, 25 bp, SARS Virus
ttgttgtagtttgccacatttgagt

SEQ ID NO: 195257 - DNA, 25 bp, SARS Virus
tgttgtagtttagcacatttgagta

SEQ ID NO: 195258 - DNA, 25 bp, SARS Virus
gttgtagtttacgacatttgagtag

SEQ ID NO: 195259 - DNA, 25 bp, SARS Virus
ttgtagtttaccgcatttgagtaga

SEQ ID NO: 195260 - DNA, 25 bp, SARS Virus
tgtagtttaccagatttgagtagaa

SEQ ID NO: 195261 - DNA, 25 bp, SARS Virus
gtagtttaccacgtttgagtagaag

SEQ ID NO: 195262 - DNA, 25 bp, SARS Virus
tagtttaccacagttgagtagaaga

SEQ ID NO: 195263 - DNA, 25 bp, SARS Virus
agtttaccacatgtgagtagaagat

SEQ ID NO: 195264 - DNA, 25 bp, SARS Virus
gtttaccacattggagtagaagatt

SEQ ID NO: 195265 - DNA, 25 bp, SARS Virus
tttaccacatttgagtagaagattt

SEQ ID NO: 195266 - DNA, 25 bp, SARS Virus
ttaccacatttgggtagaagatttt

SEQ ID NO: 195267 - DNA, 25 bp, SARS Virus
taccacatttgagtagaagatttta

SEQ ID NO: 195268 - DNA, 25 bp, SARS Virus
accacatttgaggagaagattttat

SEQ ID NO: 195269 - DNA, 25 bp, SARS Virus
ccacatttgagtggaagattttatc

SEQ ID NO: 195270 - DNA, 25 bp, SARS Virus
cacatttgagtagaagattttatca

SEQ ID NO: 195271 - DNA, 25 bp, SARS Virus
acatttgagtaggagattttatcac

SEQ ID NO: 195272 - DNA, 25 bp, SARS Virus
catttgagtagaggattttatcacg

SEQ ID NO: 195273 - DNA, 25 bp, SARS Virus
atttgagtagaagattttatcacga

SEQ ID NO: 195274 - DNA, 25 bp, SARS Virus
tttgagtagaaggttttatcacgat

SEQ ID NO: 195275 - DNA, 25 bp, SARS Virus
ttgagtagaagagtttatcacgatg

SEQ ID NO: 195276 - DNA, 25 bp, SARS Virus
tgagtagaagatgttatcacgatgg

SEQ ID NO: 195277 - DNA, 25 bp, SARS Virus
gagtagaagattgtatcacgatggt

SEQ ID NO: 195278 - DNA, 25 bp, SARS Virus
agtagaagatttgatcacgatggtt

SEQ ID NO: 195279 - DNA, 25 bp, SARS Virus
gtagaagattttgtcacgatggttc

SEQ ID NO: 195280 - DNA, 25 bp, SARS Virus
tagaagattttagcacgatggttcc

SEQ ID NO: 195281 - DNA, 25 bp, SARS Virus
agaagattttatgacgatggttcct

SEQ ID NO: 195282 - DNA, 25 bp, SARS Virus
gaagattttatcgcgatggttccta

SEQ ID NO: 195283 - DNA, 25 bp, SARS Virus
aagattttatcaggatggttcctat

SEQ ID NO: 195284 - DNA, 25 bp, SARS Virus
agattttatcacgatggttcctatc

SEQ ID NO: 195285 - DNA, 25 bp, SARS Virus
gattttatcacggtggttcctatca

SEQ ID NO: 195286 - DNA, 25 bp, SARS Virus
attttatcacgagggttcctatcat

SEQ ID NO: 195287 - DNA, 25 bp, SARS Virus
ttttatcacgatggttcctatcatg

SEQ ID NO: 195288 - DNA, 25 bp, SARS Virus
tttatcacgatggttcctatcatgc

SEQ ID NO: 195289 - DNA, 25 bp, SARS Virus
ttatcacgatgggtcctatcatgct

SEQ ID NO: 195290 - DNA, 25 bp, SARS Virus
tatcacgatggtgcctatcatgctg

SEQ ID NO: 195291 - DNA, 25 bp, SARS Virus
atcacgatggttgctatcatgctgg

SEQ ID NO: 195292 - DNA, 25 bp, SARS Virus
tcacgatggttcgtatcatgctggt

SEQ ID NO: 195293 - DNA, 25 bp, SARS Virus
cacgatggttccgatcatgctggta

SEQ ID NO: 195294 - DNA, 25 bp, SARS Virus
acgatggttcctgtcatgctggtaa

SEQ ID NO: 195295 - DNA, 25 bp, SARS Virus
cgatggttcctagcatgctggtaag

SEQ ID NO: 195296 - DNA, 25 bp, SARS Virus
gatggttcctatgatgctggtaagt

SEQ ID NO: 195297 - DNA, 25 bp, SARS Virus
atggttcctatcgtgctggtaagta

SEQ ID NO: 195298 - DNA, 25 bp, SARS Virus
tggttcctatcaggctggtaagtat

SEQ ID NO: 195299 - DNA, 25 bp, SARS Virus
ggttcctatcatgctggtaagtatg

SEQ ID NO: 195300 - DNA, 25 bp, SARS Virus
gttcctatcatggtggtaagtatgg

SEQ ID NO: 195301 - DNA, 25 bp, SARS Virus
ttcctatcatgcgggtaagtatggt

SEQ ID NO: 195302 - DNA, 25 bp, SARS Virus
tcctatcatgctggtaagtatggta

SEQ ID NO: 195303 - DNA, 25 bp, SARS Virus
cctatcatgctggtaagtatggtaa

SEQ ID NO: 195304 - DNA, 25 bp, SARS Virus
ctatcatgctgggaagtatggtaag

SEQ ID NO: 195305 - DNA, 25 bp, SARS Virus
tatcatgctggtgagtatggtaaga

SEQ ID NO: 195306 - DNA, 25 bp, SARS Virus
atcatgctggtaggtatggtaagac

SEQ ID NO: 195307 - DNA, 25 bp, SARS Virus
tcatgctggtaagtatggtaagacg

SEQ ID NO: 195308 - DNA, 25 bp, SARS Virus
catgctggtaaggatggtaagacgt

SEQ ID NO: 195309 - DNA, 25 bp, SARS Virus
atgctggtaagtgtggtaagacgtc

SEQ ID NO: 195310 - DNA, 25 bp, SARS Virus
tgctggtaagtagggtaagacgtcg

SEQ ID NO: 195311 - DNA, 25 bp, SARS Virus
gctggtaagtatggtaagacgtcgt

SEQ ID NO: 195312 - DNA, 25 bp, SARS Virus
ctggtaagtatggtaagacgtcgtc

SEQ ID NO: 195313 - DNA, 25 bp, SARS Virus
tggtaagtatgggaagacgtcgtcg

SEQ ID NO: 195314 - DNA, 25 bp, SARS Virus
ggtaagtatggtgagacgtcgtcga

SEQ ID NO: 195315 - DNA, 25 bp, SARS Virus
gtaagtatggtaggacgtcgtcgag

SEQ ID NO: 195316 - DNA, 25 bp, SARS Virus
taagtatggtaagacgtcgtcgaga

SEQ ID NO: 195317 - DNA, 25 bp, SARS Virus
aagtatggtaaggcgtcgtcgagaa

SEQ ID NO: 195318 - DNA, 25 bp, SARS Virus
agtatggtaagaggtcgtcgagaaa

SEQ ID NO: 195319 - DNA, 25 bp, SARS Virus
gtatggtaagacgtcgtcgagaaag

SEQ ID NO: 195320 - DNA, 25 bp, SARS Virus
tatggtaagacggcgtcgagaaagt

SEQ ID NO: 195321 - DNA, 25 bp, SARS Virus
atggtaagacgtggtcgagaaagtt

SEQ ID NO: 195322 - DNA, 25 bp, SARS Virus
tggtaagacgtcgtcgagaaagttt

SEQ ID NO: 195323 - DNA, 25 bp, SARS Virus
ggtaagacgtcggcgagaaagtttc

SEQ ID NO: 195324 - DNA, 25 bp, SARS Virus
gtaagacgtcgtggagaaagtttcg

SEQ ID NO: 195325 - DNA, 25 bp, SARS Virus
taagacgtcgtcgagaaagtttcgt

SEQ ID NO: 195326 - DNA, 25 bp, SARS Virus
aagacgtcgtcgggaaagtttcgtc

SEQ ID NO: 195327 - DNA, 25 bp, SARS Virus
agacgtcgtcgagaaagtttcgtcg

SEQ ID NO: 195328 - DNA, 25 bp, SARS Virus
gacgtcgtcgaggaagtttcgtcgt

SEQ ID NO: 195329 - DNA, 25 bp, SARS Virus
acgtcgtcgagagagtttcgtcgtg

SEQ ID NO: 195330 - DNA, 25 bp, SARS Virus
cgtcgtcgagaaggtttcgtcgtgt

SEQ ID NO: 195331 - DNA, 25 bp, SARS Virus
gtcgtcgagaaagtttcgtcgtgtg

SEQ ID NO: 195332 - DNA, 25 bp, SARS Virus
tcgtcgagaaaggttcgtcgtgtgt

SEQ ID NO: 195333 - DNA, 25 bp, SARS Virus
cgtcgagaaagtgtcgtcgtgtgta

SEQ ID NO: 195334 - DNA, 25 bp, SARS Virus
gtcgagaaagttgcgtcgtgtgtat

SEQ ID NO: 195335 - DNA, 25 bp, SARS Virus
tcgagaaagtttggtcgtgtgtata

SEQ ID NO: 195336 - DNA, 25 bp, SARS Virus
cgagaaagtttcgtcgtgtgtatag

SEQ ID NO: 195337 - DNA, 25 bp, SARS Virus
gagaaagtttcggcgtgtgtataga

SEQ ID NO: 195338 - DNA, 25 bp, SARS Virus
agaaagtttcgtggtgtgtatagat

SEQ ID NO: 195339 - DNA, 25 bp, SARS Virus
gaaagtttcgtcgtgtgtatagatt

SEQ ID NO: 195340 - DNA, 25 bp, SARS Virus
aaagtttcgtcgggtgtatagattc

SEQ ID NO: 195341 - DNA, 25 bp, SARS Virus
aagtttcgtcgtgtgtatagattct

SEQ ID NO: 195342 - DNA, 25 bp, SARS Virus
agtttcgtcgtgggtatagattctg

SEQ ID NO: 195343 - DNA, 25 bp, SARS Virus
gtttcgtcgtgtgtatagattctgc

SEQ ID NO: 195344 - DNA, 25 bp, SARS Virus
tttcgtcgtgtggatagattctgcc

SEQ ID NO: 195345 - DNA, 25 bp, SARS Virus
ttcgtcgtgtgtgtagattctgccg

SEQ ID NO: 195346 - DNA, 25 bp, SARS Virus
tcgtcgtgtgtagagattctgccgt

SEQ ID NO: 195347 - DNA, 25 bp, SARS Virus
cgtcgtgtgtatggattctgccgtt

SEQ ID NO: 195348 - DNA, 25 bp, SARS Virus
gtcgtgtgtatagattctgccgtta

SEQ ID NO: 195349 - DNA, 25 bp, SARS Virus
tcgtgtgtataggttctgccgttaa

SEQ ID NO: 195350 - DNA, 25 bp, SARS Virus
cgtgtgtatagagtctgccgttaag

SEQ ID NO: 195351 - DNA, 25 bp, SARS Virus
gtgtgtatagatgctgccgttaagg

SEQ ID NO: 195352 - DNA, 25 bp, SARS Virus
tgtgtatagattgtgccgttaagga

SEQ ID NO: 195353 - DNA, 25 bp, SARS Virus
gtgtatagattcggccgttaaggac

SEQ ID NO: 195354 - DNA, 25 bp, SARS Virus
tgtatagattctgccgttaaggaca

SEQ ID NO: 195355 - DNA, 25 bp, SARS Virus
gtatagattctggcgttaaggacaa

SEQ ID NO: 195356 - DNA, 25 bp, SARS Virus
tatagattctgcggttaaggacaaa

SEQ ID NO: 195357 - DNA, 25 bp, SARS Virus
atagattctgccgttaaggacaaac

SEQ ID NO: 195358 - DNA, 25 bp, SARS Virus
tagattctgccggtaaggacaaact

SEQ ID NO: 195359 - DNA, 25 bp, SARS Virus
agattctgccgtgaaggacaaactc

SEQ ID NO: 195360 - DNA, 25 bp, SARS Virus
gattctgccgttgaggacaaactcg

SEQ ID NO: 195361 - DNA, 25 bp, SARS Virus
attctgccgttagggacaaactcgt

SEQ ID NO: 195362 - DNA, 25 bp, SARS Virus
ttctgccgttaaggacaaactcgtc

SEQ ID NO: 195363 - DNA, 25 bp, SARS Virus
tctgccgttaaggacaaactcgtct

SEQ ID NO: 195364 - DNA, 25 bp, SARS Virus
ctgccgttaagggcaaactcgtctt

SEQ ID NO: 195365 - DNA, 25 bp, SARS Virus
tgccgttaaggagaaactcgtcttt

SEQ ID NO: 195366 - DNA, 25 bp, SARS Virus
gccgttaaggacgaactcgtctttc

SEQ ID NO: 195367 - DNA, 25 bp, SARS Virus
ccgttaaggacagactcgtctttct

SEQ ID NO: 195368 - DNA, 25 bp, SARS Virus
cgttaaggacaagctcgtctttctc

SEQ ID NO: 195369 - DNA, 25 bp, SARS Virus
gttaaggacaaagtcgtctttctcc

SEQ ID NO: 195370 - DNA, 25 bp, SARS Virus
ttaaggacaaacgcgtctttctcca

SEQ ID NO: 195371 - DNA, 25 bp, SARS Virus
taaggacaaactggtctttctccag

SEQ ID NO: 195372 - DNA, 25 bp, SARS Virus
aaggacaaactcgtctttctccagg

SEQ ID NO: 195373 - DNA, 25 bp, SARS Virus
aggacaaactcggctttctccaggg

SEQ ID NO: 195374 - DNA, 25 bp, SARS Virus
ggacaaactcgtgtttctccagggt

SEQ ID NO: 195375 - DNA, 25 bp, SARS Virus
gacaaactcgtcgttctccagggtt

SEQ ID NO: 195376 - DNA, 25 bp, SARS Virus
acaaactcgtctgtctccagggtta

SEQ ID NO: 195377 - DNA, 25 bp, SARS Virus
caaactcgtcttgctccagggttat

SEQ ID NO: 195378 - DNA, 25 bp, SARS Virus
aaactcgtctttgtccagggttata

SEQ ID NO: 195379 - DNA, 25 bp, SARS Virus
aactcgtctttcgccagggttatac

SEQ ID NO: 195380 - DNA, 25 bp, SARS Virus
actcgtctttctgcagggttataca

SEQ ID NO: 195381 - DNA, 25 bp, SARS Virus
ctcgtctttctcgagggttatacag

SEQ ID NO: 195382 - DNA, 25 bp, SARS Virus
tcgtctttctccggggttatacagt

SEQ ID NO: 195383 - DNA, 25 bp, SARS Virus
cgtctttctccagggttatacagtt

SEQ ID NO: 195384 - DNA, 25 bp, SARS Virus
gtctttctccagggttatacagttg

SEQ ID NO: 195385 - DNA, 25 bp, SARS Virus
tctttctccagggttatacagttgt

SEQ ID NO: 195386 - DNA, 25 bp, SARS Virus
ctttctccaggggtatacagttgta

SEQ ID NO: 195387 - DNA, 25 bp, SARS Virus
tttctccagggtgatacagttgtac

SEQ ID NO: 195388 - DNA, 25 bp, SARS Virus
ttctccagggttgtacagttgtact

SEQ ID NO: 195389 - DNA, 25 bp, SARS Virus
tctccagggttagacagttgtacta

SEQ ID NO: 195390 - DNA, 25 bp, SARS Virus
ctccagggttatgcagttgtactag

SEQ ID NO: 195391 - DNA, 25 bp, SARS Virus
tccagggttatagagttgtactaga

SEQ ID NO: 195392 - DNA, 25 bp, SARS Virus
ccagggttatacggttgtactagaa

SEQ ID NO: 195393 - DNA, 25 bp, SARS Virus
cagggttatacagttgtactagaac

SEQ ID NO: 195394 - DNA, 25 bp, SARS Virus
agggttatacaggtgtactagaaca

SEQ ID NO: 195395 - DNA, 25 bp, SARS Virus
gggttatacagtggtactagaacac

SEQ ID NO: 195396 - DNA, 25 bp, SARS Virus
ggttatacagttgtactagaacaca

SEQ ID NO: 195397 - DNA, 25 bp, SARS Virus
gttatacagttggactagaacacag

SEQ ID NO: 195398 - DNA, 25 bp, SARS Virus
ttatacagttgtgctagaacacagt

SEQ ID NO: 195399 - DNA, 25 bp, SARS Virus
tatacagttgtagtagaacacagtt

SEQ ID NO: 195400 - DNA, 25 bp, SARS Virus
atacagttgtacgagaacacagttt

SEQ ID NO: 195401 - DNA, 25 bp, SARS Virus
tacagttgtactggaacacagtttc

SEQ ID NO: 195402 - DNA, 25 bp, SARS Virus
acagttgtactagaacacagtttcc

SEQ ID NO: 195403 - DNA, 25 bp, SARS Virus
cagttgtactaggacacagtttcca

SEQ ID NO: 195404 - DNA, 25 bp, SARS Virus
agttgtactagagcacagtttccaa

SEQ ID NO: 195405 - DNA, 25 bp, SARS Virus
gttgtactagaagacagtttccaag

SEQ ID NO: 195406 - DNA, 25 bp, SARS Virus
ttgtactagaacgcagtttccaagt

SEQ ID NO: 195407 - DNA, 25 bp, SARS Virus
tgtactagaacagagtttccaagta

SEQ ID NO: 195408 - DNA, 25 bp, SARS Virus
gtactagaacacggtttccaagtat

SEQ ID NO: 195409 - DNA, 25 bp, SARS Virus
tactagaacacagtttccaagtatc

SEQ ID NO: 195410 - DNA, 25 bp, SARS Virus
actagaacacaggttccaagtatca

SEQ ID NO: 195411 - DNA, 25 bp, SARS Virus
ctagaacacagtgtccaagtatcaa

SEQ ID NO: 195412 - DNA, 25 bp, SARS Virus
tagaacacagttgccaagtatcaac

SEQ ID NO: 195413 - DNA, 25 bp, SARS Virus
agaacacagtttgcaagtatcaaca

SEQ ID NO: 195414 - DNA, 25 bp, SARS Virus
gaacacagtttcgaagtatcaacat

SEQ ID NO: 195415 - DNA, 25 bp, SARS Virus
aacacagtttccgagtatcaacatg

SEQ ID NO: 195416 - DNA, 25 bp, SARS Virus
acacagtttccaggtatcaacatga

SEQ ID NO: 195417 - DNA, 25 bp, SARS Virus
cacagtttccaagtatcaacatgaa

SEQ ID NO: 195418 - DNA, 25 bp, SARS Virus
acagtttccaaggatcaacatgaag

SEQ ID NO: 195419 - DNA, 25 bp, SARS Virus
cagtttccaagtgtcaacatgaagt

SEQ ID NO: 195420 - DNA, 25 bp, SARS Virus
agtttccaagtagcaacatgaagta

SEQ ID NO: 195421 - DNA, 25 bp, SARS Virus
gtttccaagtatgaacatgaagtaa

SEQ ID NO: 195422 - DNA, 25 bp, SARS Virus
tttccaagtatcgacatgaagtaac

SEQ ID NO: 195423 - DNA, 25 bp, SARS Virus
ttccaagtatcagcatgaagtaacg

SEQ ID NO: 195424 - DNA, 25 bp, SARS Virus
tccaagtatcaagatgaagtaacgg

SEQ ID NO: 195425 - DNA, 25 bp, SARS Virus
ccaagtatcaacgtgaagtaacggt

SEQ ID NO: 195426 - DNA, 25 bp, SARS Virus
caagtatcaacaggaagtaacggtg

SEQ ID NO: 195427 - DNA, 25 bp, SARS Virus
aagtatcaacatgaagtaacggtgt

SEQ ID NO: 195428 - DNA, 25 bp, SARS Virus
agtatcaacatggagtaacggtgtt

SEQ ID NO: 195429 - DNA, 25 bp, SARS Virus
gtatcaacatgaggtaacggtgttc

SEQ ID NO: 195430 - DNA, 25 bp, SARS Virus
tatcaacatgaagtaacggtgttcc

SEQ ID NO: 195431 - DNA, 25 bp, SARS Virus
atcaacatgaaggaacggtgttcca

SEQ ID NO: 195432 - DNA, 25 bp, SARS Virus
tcaacatgaagtgacggtgttccaa

SEQ ID NO: 195433 - DNA, 25 bp, SARS Virus
caacatgaagtagcggtgttccaat

SEQ ID NO: 195434 - DNA, 25 bp, SARS Virus
aacatgaagtaagggtgttccaatt

SEQ ID NO: 195435 - DNA, 25 bp, SARS Virus
acatgaagtaacggtgttccaattt

SEQ ID NO: 195436 - DNA, 25 bp, SARS Virus
catgaagtaacggtgttccaatttc

SEQ ID NO: 195437 - DNA, 25 bp, SARS Virus
atgaagtaacggggttccaatttca

SEQ ID NO: 195438 - DNA, 25 bp, SARS Virus
tgaagtaacggtgttccaatttcag

SEQ ID NO: 195439 - DNA, 25 bp, SARS Virus
gaagtaacggtggtccaatttcagt

SEQ ID NO: 195440 - DNA, 25 bp, SARS Virus
aagtaacggtgtgccaatttcagta

SEQ ID NO: 195441 - DNA, 25 bp, SARS Virus
agtaacggtgttgcaatttcagtaa

SEQ ID NO: 195442 - DNA, 25 bp, SARS Virus
gtaacggtgttcgaatttcagtaag

SEQ ID NO: 195443 - DNA, 25 bp, SARS Virus
taacggtgttccgatttcagtaagt

SEQ ID NO: 195444 - DNA, 25 bp, SARS Virus
aacggtgttccagtttcagtaagtt

SEQ ID NO: 195445 - DNA, 25 bp, SARS Virus
acggtgttccaagttcagtaagttt

SEQ ID NO: 195446 - DNA, 25 bp, SARS Virus
cggtgttccaatgtcagtaagtttc

SEQ ID NO: 195447 - DNA, 25 bp, SARS Virus
ggtgttccaattgcagtaagtttca

SEQ ID NO: 195448 - DNA, 25 bp, SARS Virus
gtgttccaatttgagtaagtttcat

SEQ ID NO: 195449 - DNA, 25 bp, SARS Virus
tgttccaatttcggtaagtttcatc

SEQ ID NO: 195450 - DNA, 25 bp, SARS Virus
gttccaatttcagtaagtttcatca

SEQ ID NO: 195451 - DNA, 25 bp, SARS Virus
ttccaatttcaggaagtttcatcac

SEQ ID NO: 195452 - DNA, 25 bp, SARS Virus
tccaatttcagtgagtttcatcacc

SEQ ID NO: 195453 - DNA, 25 bp, SARS Virus
ccaatttcagtaggtttcatcacca

SEQ ID NO: 195454 - DNA, 25 bp, SARS Virus
caatttcagtaagtttcatcaccac

SEQ ID NO: 195455 - DNA, 25 bp, SARS Virus
aatttcagtaaggttcatcaccact

SEQ ID NO: 195456 - DNA, 25 bp, SARS Virus
atttcagtaagtgtcatcaccactt

SEQ ID NO: 195457 - DNA, 25 bp, SARS Virus
tttcagtaagttgcatcaccactta

SEQ ID NO: 195458 - DNA, 25 bp, SARS Virus
ttcagtaagtttgatcaccacttag

SEQ ID NO: 195459 - DNA, 25 bp, SARS Virus
tcagtaagtttcgtcaccacttaga

SEQ ID NO: 195460 - DNA, 25 bp, SARS Virus
cagtaagtttcagcaccacttagat

SEQ ID NO: 195461 - DNA, 25 bp, SARS Virus
agtaagtttcatgaccacttagata

SEQ ID NO: 195462 - DNA, 25 bp, SARS Virus
gtaagtttcatcgccacttagataa

SEQ ID NO: 195463 - DNA, 25 bp, SARS Virus
taagtttcatcagcacttagataat

SEQ ID NO: 195464 - DNA, 25 bp, SARS Virus
aagtttcatcacgacttagataatt

SEQ ID NO: 195465 - DNA, 25 bp, SARS Virus
agtttcatcaccgcttagataattc

SEQ ID NO: 195466 - DNA, 25 bp, SARS Virus
gtttcatcaccagttagataattct

SEQ ID NO: 195467 - DNA, 25 bp, SARS Virus
tttcatcaccacgtagataattctt

SEQ ID NO: 195468 - DNA, 25 bp, SARS Virus
ttcatcaccactgagataattcttt

SEQ ID NO: 195469 - DNA, 25 bp, SARS Virus
tcatcaccacttggataattctttg

SEQ ID NO: 195470 - DNA, 25 bp, SARS Virus
catcaccacttagataattctttgg

SEQ ID NO: 195471 - DNA, 25 bp, SARS Virus
atcaccacttaggtaattctttggt

SEQ ID NO: 195472 - DNA, 25 bp, SARS Virus
tcaccacttagagaattctttggtg

SEQ ID NO: 195473 - DNA, 25 bp, SARS Virus
caccacttagatgattctttggtgg

SEQ ID NO: 195474 - DNA, 25 bp, SARS Virus
accacttagatagttctttggtgga

SEQ ID NO: 195475 - DNA, 25 bp, SARS Virus
ccacttagataagtctttggtggat

SEQ ID NO: 195476 - DNA, 25 bp, SARS Virus
cacttagataatgctttggtggata

SEQ ID NO: 195477 - DNA, 25 bp, SARS Virus
acttagataattgtttggtggatag

SEQ ID NO: 195478 - DNA, 25 bp, SARS Virus
cttagataattcgttggtggatagt

SEQ ID NO: 195479 - DNA, 25 bp, SARS Virus
ttagataattctgtggtggatagtg

SEQ ID NO: 195480 - DNA, 25 bp, SARS Virus
tagataattcttgggtggatagtgg

SEQ ID NO: 195481 - DNA, 25 bp, SARS Virus
agataattctttggtggatagtggt

SEQ ID NO: 195482 - DNA, 25 bp, SARS Virus
gataattctttggtggatagtggta

SEQ ID NO: 195483 - DNA, 25 bp, SARS Virus
ataattctttgggggatagtggtaa

SEQ ID NO: 195484 - DNA, 25 bp, SARS Virus
taattctttggtggatagtggtaac

SEQ ID NO: 195485 - DNA, 25 bp, SARS Virus
aattctttggtggatagtggtaact

SEQ ID NO: 195486 - DNA, 25 bp, SARS Virus
attctttggtgggtagtggtaacta

SEQ ID NO: 195487 - DNA, 25 bp, SARS Virus
ttctttggtggagagtggtaactat

SEQ ID NO: 195488 - DNA, 25 bp, SARS Virus
tctttggtggatggtggtaactatt

SEQ ID NO: 195489 - DNA, 25 bp, SARS Virus
ctttggtggatagtggtaactattg

SEQ ID NO: 195490 - DNA, 25 bp, SARS Virus
tttggtggataggggtaactattgt

SEQ ID NO: 195491 - DNA, 25 bp, SARS Virus
ttggtggatagtggtaactattgtc

SEQ ID NO: 195492 - DNA, 25 bp, SARS Virus
tggtggatagtggtaactattgtcg

SEQ ID NO: 195493 - DNA, 25 bp, SARS Virus
ggtggatagtgggaactattgtcgt

SEQ ID NO: 195494 - DNA, 25 bp, SARS Virus
gtggatagtggtgactattgtcgtc

SEQ ID NO: 195495 - DNA, 25 bp, SARS Virus
tggatagtggtagctattgtcgtcg

SEQ ID NO: 195496 - DNA, 25 bp, SARS Virus
ggatagtggtaagtattgtcgtcgt

SEQ ID NO: 195497 - DNA, 25 bp, SARS Virus
gatagtggtaacgattgtcgtcgta

SEQ ID NO: 195498 - DNA, 25 bp, SARS Virus
atagtggtaactgttgtcgtcgtat

SEQ ID NO: 195499 - DNA, 25 bp, SARS Virus
tagtggtaactagtgtcgtcgtatg

SEQ ID NO: 195500 - DNA, 25 bp, SARS Virus
agtggtaactatggtcgtcgtatgt

SEQ ID NO: 195501 - DNA, 25 bp, SARS Virus
gtggtaactattgtcgtcgtatgtc

SEQ ID NO: 195502 - DNA, 25 bp, SARS Virus
tggtaactattggcgtcgtatgtcg

SEQ ID NO: 195503 - DNA, 25 bp, SARS Virus
ggtaactattgtggtcgtatgtcgg

SEQ ID NO: 195504 - DNA, 25 bp, SARS Virus
gtaactattgtcgtcgtatgtcggt

SEQ ID NO: 195505 - DNA, 25 bp, SARS Virus
taactattgtcggcgtatgtcggta

SEQ ID NO: 195506 - DNA, 25 bp, SARS Virus
aactattgtcgtggtatgtcggtac

SEQ ID NO: 195507 - DNA, 25 bp, SARS Virus
actattgtcgtcgtatgtcggtacg

SEQ ID NO: 195508 - DNA, 25 bp, SARS Virus
ctattgtcgtcggatgtcggtacgg

SEQ ID NO: 195509 - DNA, 25 bp, SARS Virus
tattgtcgtcgtgtgtcggtacggt

SEQ ID NO: 195510 - DNA, 25 bp, SARS Virus
attgtcgtcgtaggtcggtacggtt

SEQ ID NO: 195511 - DNA, 25 bp, SARS Virus
ttgtcgtcgtatgtcggtacggttt

SEQ ID NO: 195512 - DNA, 25 bp, SARS Virus
tgtcgtcgtatggcggtacggtttt

SEQ ID NO: 195513 - DNA, 25 bp, SARS Virus
gtcgtcgtatgtgggtacggttttg

SEQ ID NO: 195514 - DNA, 25 bp, SARS Virus
tcgtcgtatgtcggtacggttttgt

SEQ ID NO: 195515 - DNA, 25 bp, SARS Virus
cgtcgtatgtcggtacggttttgta

SEQ ID NO: 195516 - DNA, 25 bp, SARS Virus
gtcgtatgtcgggacggttttgtaa

SEQ ID NO: 195517 - DNA, 25 bp, SARS Virus
tcgtatgtcggtgcggttttgtaaa

SEQ ID NO: 195518 - DNA, 25 bp, SARS Virus
cgtatgtcggtagggttttgtaaat

SEQ ID NO: 195519 - DNA, 25 bp, SARS Virus
gtatgtcggtacggttttgtaaatt

SEQ ID NO: 195520 - DNA, 25 bp, SARS Virus
tatgtcggtacggttttgtaaatta

SEQ ID NO: 195521 - DNA, 25 bp, SARS Virus
atgtcggtacgggtttgtaaattac

SEQ ID NO: 195522 - DNA, 25 bp, SARS Virus
tgtcggtacggtgttgtaaattaca

SEQ ID NO: 195523 - DNA, 25 bp, SARS Virus
gtcggtacggttgtgtaaattacaa

SEQ ID NO: 195524 - DNA, 25 bp, SARS Virus
tcggtacggtttggtaaattacaat

SEQ ID NO: 195525 - DNA, 25 bp, SARS Virus
cggtacggttttgtaaattacaata

SEQ ID NO: 195526 - DNA, 25 bp, SARS Virus
ggtacggttttggaaattacaatac

SEQ ID NO: 195527 - DNA, 25 bp, SARS Virus
gtacggttttgtgaattacaatacc

SEQ ID NO: 195528 - DNA, 25 bp, SARS Virus
tacggttttgtagattacaatacca

SEQ ID NO: 195529 - DNA, 25 bp, SARS Virus
acggttttgtaagttacaataccaa

SEQ ID NO: 195530 - DNA, 25 bp, SARS Virus
cggttttgtaaagtacaataccaac

SEQ ID NO: 195531 - DNA, 25 bp, SARS Virus
ggttttgtaaatgacaataccaaca

SEQ ID NO: 195532 - DNA, 25 bp, SARS Virus
gttttgtaaattgcaataccaacac

SEQ ID NO: 195533 - DNA, 25 bp, SARS Virus
ttttgtaaattagaataccaacaca

SEQ ID NO: 195534 - DNA, 25 bp, SARS Virus
tttgtaaattacgataccaacacag

SEQ ID NO: 195535 - DNA, 25 bp, SARS Virus
ttgtaaattacagtaccaacacaga

SEQ ID NO: 195536 - DNA, 25 bp, SARS Virus
tgtaaattacaagaccaacacagac

SEQ ID NO: 195537 - DNA, 25 bp, SARS Virus
gtaaattacaatgccaacacagaca

SEQ ID NO: 195538 - DNA, 25 bp, SARS Virus
taaattacaatagcaacacagacat

SEQ ID NO: 195539 - DNA, 25 bp, SARS Virus
aaattacaatacgaacacagacatg

SEQ ID NO: 195540 - DNA, 25 bp, SARS Virus
aattacaataccgacacagacatgg

SEQ ID NO: 195541 - DNA, 25 bp, SARS Virus
attacaataccagcacagacatgga

SEQ ID NO: 195542 - DNA, 25 bp, SARS Virus
ttacaataccaagacagacatggac

SEQ ID NO: 195543 - DNA, 25 bp, SARS Virus
tacaataccaacgcagacatggacg

SEQ ID NO: 195544 - DNA, 25 bp, SARS Virus
acaataccaacagagacatggacgt

SEQ ID NO: 195545 - DNA, 25 bp, SARS Virus
caataccaacacggacatggacgtc

SEQ ID NO: 195546 - DNA, 25 bp, SARS Virus
aataccaacacagacatggacgtcg

SEQ ID NO: 195547 - DNA, 25 bp, SARS Virus
ataccaacacaggcatggacgtcgg

SEQ ID NO: 195548 - DNA, 25 bp, SARS Virus
taccaacacagagatggacgtcgga

SEQ ID NO: 195549 - DNA, 25 bp, SARS Virus
accaacacagacgtggacgtcggac

SEQ ID NO: 195550 - DNA, 25 bp, SARS Virus
ccaacacagacagggacgtcggaca

SEQ ID NO: 195551 - DNA, 25 bp, SARS Virus
caacacagacatggacgtcggacac

SEQ ID NO: 195552 - DNA, 25 bp, SARS Virus
aacacagacatggacgtcggacacg

SEQ ID NO: 195553 - DNA, 25 bp, SARS Virus
acacagacatgggcgtcggacacgt

SEQ ID NO: 195554 - DNA, 25 bp, SARS Virus
cacagacatggaggtcggacacgtc

SEQ ID NO: 195555 - DNA, 25 bp, SARS Virus
acagacatggacgtcggacacgtca

SEQ ID NO: 195556 - DNA, 25 bp, SARS Virus
cagacatggacggcggacacgtcaa

SEQ ID NO: 195557 - DNA, 25 bp, SARS Virus
agacatggacgtgggacacgtcaaa

SEQ ID NO: 195558 - DNA, 25 bp, SARS Virus
gacatggacgtcggacacgtcaaac

SEQ ID NO: 195559 - DNA, 25 bp, SARS Virus
acatggacgtcggacacgtcaaaca

SEQ ID NO: 195560 - DNA, 25 bp, SARS Virus
catggacgtcgggcacgtcaaacag

SEQ ID NO: 195561 - DNA, 25 bp, SARS Virus
atggacgtcggagacgtcaaacaga

SEQ ID NO: 195562 - DNA, 25 bp, SARS Virus
tggacgtcggacgcgtcaaacagac

SEQ ID NO: 195563 - DNA, 25 bp, SARS Virus
ggacgtcggacaggtcaaacagaca

SEQ ID NO: 195564 - DNA, 25 bp, SARS Virus
gacgtcggacacgtcaaacagacag

SEQ ID NO: 195565 - DNA, 25 bp, SARS Virus
acgtcggacacggcaaacagacagt

SEQ ID NO: 195566 - DNA, 25 bp, SARS Virus
cgtcggacacgtgaaacagacagtt

SEQ ID NO: 195567 - DNA, 25 bp, SARS Virus
gtcggacacgtcgaacagacagttg

SEQ ID NO: 195568 - DNA, 25 bp, SARS Virus
tcggacacgtcagacagacagttgt

SEQ ID NO: 195569 - DNA, 25 bp, SARS Virus
cggacacgtcaagcagacagttgtt

SEQ ID NO: 195570 - DNA, 25 bp, SARS Virus
ggacacgtcaaagagacagttgttt

SEQ ID NO: 195571 - DNA, 25 bp, SARS Virus
gacacgtcaaacggacagttgttta

SEQ ID NO: 195572 - DNA, 25 bp, SARS Virus
acacgtcaaacagacagttgtttac

SEQ ID NO: 195573 - DNA, 25 bp, SARS Virus
cacgtcaaacaggcagttgtttacc

SEQ ID NO: 195574 - DNA, 25 bp, SARS Virus
acgtcaaacagagagttgtttacct

SEQ ID NO: 195575 - DNA, 25 bp, SARS Virus
cgtcaaacagacggttgtttacctg

SEQ ID NO: 195576 - DNA, 25 bp, SARS Virus
gtcaaacagacagttgtttacctgg

SEQ ID NO: 195577 - DNA, 25 bp, SARS Virus
tcaaacagacaggtgtttacctggt

SEQ ID NO: 195578 - DNA, 25 bp, SARS Virus
caaacagacagtggtttacctggta

SEQ ID NO: 195579 - DNA, 25 bp, SARS Virus
aaacagacagttgtttacctggtat

SEQ ID NO: 195580 - DNA, 25 bp, SARS Virus
aacagacagttggttacctggtatc

SEQ ID NO: 195581 - DNA, 25 bp, SARS Virus
acagacagttgtgtacctggtatct

SEQ ID NO: 195582 - DNA, 25 bp, SARS Virus
cagacagttgttgacctggtatctt

SEQ ID NO: 195583 - DNA, 25 bp, SARS Virus
agacagttgtttgcctggtatctta

SEQ ID NO: 195584 - DNA, 25 bp, SARS Virus
gacagttgtttagctggtatcttaa

SEQ ID NO: 195585 - DNA, 25 bp, SARS Virus
acagttgtttacgtggtatcttaaa

SEQ ID NO: 195586 - DNA, 25 bp, SARS Virus
cagttgtttaccgggtatcttaaat

SEQ ID NO: 195587 - DNA, 25 bp, SARS Virus
agttgtttacctggtatcttaaatg

SEQ ID NO: 195588 - DNA, 25 bp, SARS Virus
gttgtttacctggtatcttaaatgg

SEQ ID NO: 195589 - DNA, 25 bp, SARS Virus
ttgtttacctgggatcttaaatgga

SEQ ID NO: 195590 - DNA, 25 bp, SARS Virus
tgtttacctggtgtcttaaatggaa

SEQ ID NO: 195591 - DNA, 25 bp, SARS Virus
gtttacctggtagcttaaatggaag

SEQ ID NO: 195592 - DNA, 25 bp, SARS Virus
tttacctggtatgttaaatggaaga

SEQ ID NO: 195593 - DNA, 25 bp, SARS Virus
ttacctggtatcgtaaatggaagat

SEQ ID NO: 195594 - DNA, 25 bp, SARS Virus
tacctggtatctgaaatggaagatt

SEQ ID NO: 195595 - DNA, 25 bp, SARS Virus
acctggtatcttgaatggaagattc

SEQ ID NO: 195596 - DNA, 25 bp, SARS Virus
cctggtatcttagatggaagattca

SEQ ID NO: 195597 - DNA, 25 bp, SARS Virus
ctggtatcttaagtggaagattcag

SEQ ID NO: 195598 - DNA, 25 bp, SARS Virus
tggtatcttaaagggaagattcagt

SEQ ID NO: 195599 - DNA, 25 bp, SARS Virus
ggtatcttaaatggaagattcagtc

SEQ ID NO: 195600 - DNA, 25 bp, SARS Virus
gtatcttaaatggaagattcagtca

SEQ ID NO: 195601 - DNA, 25 bp, SARS Virus
tatcttaaatgggagattcagtcat

SEQ ID NO: 195602 - DNA, 25 bp, SARS Virus
atcttaaatggaggattcagtcatg

SEQ ID NO: 195603 - DNA, 25 bp, SARS Virus
tcttaaatggaagattcagtcatgg

SEQ ID NO: 195604 - DNA, 25 bp, SARS Virus
cttaaatggaaggttcagtcatggt

SEQ ID NO: 195605 - DNA, 25 bp, SARS Virus
ttaaatggaagagtcagtcatggtc

SEQ ID NO: 195606 - DNA, 25 bp, SARS Virus
taaatggaagatgcagtcatggtcg

SEQ ID NO: 195607 - DNA, 25 bp, SARS Virus
aaatggaagattgagtcatggtcgc

SEQ ID NO: 195608 - DNA, 25 bp, SARS Virus
aatggaagattcggtcatggtcgca

SEQ ID NO: 195609 - DNA, 25 bp, SARS Virus
atggaagattcagtcatggtcgcac

SEQ ID NO: 195610 - DNA, 25 bp, SARS Virus
tggaagattcaggcatggtcgcaca

SEQ ID NO: 195611 - DNA, 25 bp, SARS Virus
ggaagattcagtgatggtcgcacat

SEQ ID NO: 195612 - DNA, 25 bp, SARS Virus
gaagattcagtcgtggtcgcacatg

SEQ ID NO: 195613 - DNA, 25 bp, SARS Virus
aagattcagtcagggtcgcacatga

SEQ ID NO: 195614 - DNA, 25 bp, SARS Virus
agattcagtcatggtcgcacatgag

SEQ ID NO: 195615 - DNA, 25 bp, SARS Virus
gattcagtcatggtcgcacatgagg

SEQ ID NO: 195616 - DNA, 25 bp, SARS Virus
attcagtcatgggcgcacatgagga

SEQ ID NO: 195617 - DNA, 25 bp, SARS Virus
ttcagtcatggtggcacatgaggac

SEQ ID NO: 195618 - DNA, 25 bp, SARS Virus
tcagtcatggtcgcacatgaggaca

SEQ ID NO: 195619 - DNA, 25 bp, SARS Virus
cagtcatggtcggacatgaggacaa

SEQ ID NO: 195620 - DNA, 25 bp, SARS Virus
agtcatggtcgcgcatgaggacaac

SEQ ID NO: 195621 - DNA, 25 bp, SARS Virus
gtcatggtcgcagatgaggacaacc

SEQ ID NO: 195622 - DNA, 25 bp, SARS Virus
tcatggtcgcacgtgaggacaacct

SEQ ID NO: 195623 - DNA, 25 bp, SARS Virus
catggtcgcacaggaggacaacctt

SEQ ID NO: 195624 - DNA, 25 bp, SARS Virus
atggtcgcacatgaggacaaccttc

SEQ ID NO: 195625 - DNA, 25 bp, SARS Virus
tggtcgcacatggggacaaccttcg

SEQ ID NO: 195626 - DNA, 25 bp, SARS Virus
ggtcgcacatgaggacaaccttcga

SEQ ID NO: 195627 - DNA, 25 bp, SARS Virus
gtcgcacatgaggacaaccttcgag

SEQ ID NO: 195628 - DNA, 25 bp, SARS Virus
tcgcacatgagggcaaccttcgagg

SEQ ID NO: 195629 - DNA, 25 bp, SARS Virus
cgcacatgaggagaaccttcgaggt

SEQ ID NO: 195630 - DNA, 25 bp, SARS Virus
gcacatgaggacgaccttcgaggta

SEQ ID NO: 195631 - DNA, 25 bp, SARS Virus
cacatgaggacagccttcgaggtat

SEQ ID NO: 195632 - DNA, 25 bp, SARS Virus
acatgaggacaagcttcgaggtata

SEQ ID NO: 195633 - DNA, 25 bp, SARS Virus
catgaggacaacgttcgaggtatac

SEQ ID NO: 195634 - DNA, 25 bp, SARS Virus
atgaggacaaccgtcgaggtatact

SEQ ID NO: 195635 - DNA, 25 bp, SARS Virus
tgaggacaacctgcgaggtatacta

SEQ ID NO: 195636 - DNA, 25 bp, SARS Virus
gaggacaaccttggaggtatactac

SEQ ID NO: 195637 - DNA, 25 bp, SARS Virus
aggacaaccttcgaggtatactacg

SEQ ID NO: 195638 - DNA, 25 bp, SARS Virus
ggacaaccttcggggtatactacgt

SEQ ID NO: 195639 - DNA, 25 bp, SARS Virus
gacaaccttcgaggtatactacgta

SEQ ID NO: 195640 - DNA, 25 bp, SARS Virus
acaaccttcgaggtatactacgtat

SEQ ID NO: 195641 - DNA, 25 bp, SARS Virus
caaccttcgagggatactacgtata

SEQ ID NO: 195642 - DNA, 25 bp, SARS Virus
aaccttcgaggtgtactacgtatat

SEQ ID NO: 195643 - DNA, 25 bp, SARS Virus
accttcgaggtagactacgtatatc

SEQ ID NO: 195644 - DNA, 25 bp, SARS Virus
ccttcgaggtatgctacgtatatcg

SEQ ID NO: 195645 - DNA, 25 bp, SARS Virus
cttcgaggtatagtacgtatatcgt

SEQ ID NO: 195646 - DNA, 25 bp, SARS Virus
ttcgaggtatacgacgtatatcgtc

SEQ ID NO: 195647 - DNA, 25 bp, SARS Virus
tcgaggtatactgcgtatatcgtct

SEQ ID NO: 195648 - DNA, 25 bp, SARS Virus
cgaggtatactaggtatatcgtctt

SEQ ID NO: 195649 - DNA, 25 bp, SARS Virus
gaggtatactacgtatatcgtcttt

SEQ ID NO: 195650 - DNA, 25 bp, SARS Virus
aggtatactacggatatcgtctttc

SEQ ID NO: 195651 - DNA, 25 bp, SARS Virus
ggtatactacgtgtatcgtctttct

SEQ ID NO: 195652 - DNA, 25 bp, SARS Virus
gtatactacgtagatcgtctttctg

SEQ ID NO: 195653 - DNA, 25 bp, SARS Virus
tatactacgtatgtcgtctttctgt

SEQ ID NO: 195654 - DNA, 25 bp, SARS Virus
atactacgtatagcgtctttctgtg

SEQ ID NO: 195655 - DNA, 25 bp, SARS Virus
tactacgtatatggtctttctgtgc

SEQ ID NO: 195656 - DNA, 25 bp, SARS Virus
actacgtatatcgtctttctgtgcg

SEQ ID NO: 195657 - DNA, 25 bp, SARS Virus
ctacgtatatcggctttctgtgcgt

SEQ ID NO: 195658 - DNA, 25 bp, SARS Virus
tacgtatatcgtgtttctgtgcgtt

SEQ ID NO: 195659 - DNA, 25 bp, SARS Virus
acgtatatcgtcgttctgtgcgtta

SEQ ID NO: 195660 - DNA, 25 bp, SARS Virus
cgtatatcgtctgtctgtgcgttag

SEQ ID NO: 195661 - DNA, 25 bp, SARS Virus
gtatatcgtcttgctgtgcgttagt

SEQ ID NO: 195662 - DNA, 25 bp, SARS Virus
tatatcgtctttgtgtgcgttagta

SEQ ID NO: 195663 - DNA, 25 bp, SARS Virus
atatcgtctttcggtgcgttagtat

SEQ ID NO: 195664 - DNA, 25 bp, SARS Virus
tatcgtctttctgtgcgttagtatt

SEQ ID NO: 195665 - DNA, 25 bp, SARS Virus
atcgtctttctgggcgttagtatta

SEQ ID NO: 195666 - DNA, 25 bp, SARS Virus
tcgtctttctgtgcgttagtattag

SEQ ID NO: 195667 - DNA, 25 bp, SARS Virus
cgtctttctgtgggttagtattagt

SEQ ID NO: 195668 - DNA, 25 bp, SARS Virus
gtctttctgtgcgttagtattagtt

SEQ ID NO: 195669 - DNA, 25 bp, SARS Virus
tctttctgtgcggtagtattagtta

SEQ ID NO: 195670 - DNA, 25 bp, SARS Virus
ctttctgtgcgtgagtattagttac

SEQ ID NO: 195671 - DNA, 25 bp, SARS Virus
tttctgtgcgttggtattagttaca

SEQ ID NO: 195672 - DNA, 25 bp, SARS Virus
ttctgtgcgttagtattagttacaa

SEQ ID NO: 195673 - DNA, 25 bp, SARS Virus
tctgtgcgttaggattagttacaat

SEQ ID NO: 195674 - DNA, 25 bp, SARS Virus
ctgtgcgttagtgttagttacaatt

SEQ ID NO: 195675 - DNA, 25 bp, SARS Virus
tgtgcgttagtagtagttacaattt

SEQ ID NO: 195676 - DNA, 25 bp, SARS Virus
gtgcgttagtatgagttacaatttt

SEQ ID NO: 195677 - DNA, 25 bp, SARS Virus
tgcgttagtattggttacaattttg

SEQ ID NO: 195678 - DNA, 25 bp, SARS Virus
gcgttagtattagttacaattttgg

SEQ ID NO: 195679 - DNA, 25 bp, SARS Virus
cgttagtattaggtacaattttggt

SEQ ID NO: 195680 - DNA, 25 bp, SARS Virus
gttagtattagtgacaattttggtt

SEQ ID NO: 195681 - DNA, 25 bp, SARS Virus
ttagtattagttgcaattttggttg

SEQ ID NO: 195682 - DNA, 25 bp, SARS Virus
tagtattagttagaattttggttgt

SEQ ID NO: 195683 - DNA, 25 bp, SARS Virus
agtattagttacgattttggttgtg

SEQ ID NO: 195684 - DNA, 25 bp, SARS Virus
gtattagttacagttttggttgtga

SEQ ID NO: 195685 - DNA, 25 bp, SARS Virus
tattagttacaagtttggttgtgat

SEQ ID NO: 195686 - DNA, 25 bp, SARS Virus
attagttacaatgttggttgtgatg

SEQ ID NO: 195687 - DNA, 25 bp, SARS Virus
ttagttacaattgtggttgtgatgg

SEQ ID NO: 195688 - DNA, 25 bp, SARS Virus
tagttacaatttgggttgtgatggt

SEQ ID NO: 195689 - DNA, 25 bp, SARS Virus
agttacaattttggttgtgatggtg

SEQ ID NO: 195690 - DNA, 25 bp, SARS Virus
gttacaattttggttgtgatggtgt

SEQ ID NO: 195691 - DNA, 25 bp, SARS Virus
ttacaattttgggtgtgatggtgta

SEQ ID NO: 195692 - DNA, 25 bp, SARS Virus
tacaattttggtggtgatggtgtac

SEQ ID NO: 195693 - DNA, 25 bp, SARS Virus
acaattttggttgtgatggtgtact

SEQ ID NO: 195694 - DNA, 25 bp, SARS Virus
caattttggttgggatggtgtacta

SEQ ID NO: 195695 - DNA, 25 bp, SARS Virus
aattttggttgtgatggtgtactag

SEQ ID NO: 195696 - DNA, 25 bp, SARS Virus
attttggttgtggtggtgtactagg

SEQ ID NO: 195697 - DNA, 25 bp, SARS Virus
ttttggttgtgagggtgtactaggt

SEQ ID NO: 195698 - DNA, 25 bp, SARS Virus
tttggttgtgatggtgtactaggta

SEQ ID NO: 195699 - DNA, 25 bp, SARS Virus
ttggttgtgatggtgtactaggtaa

SEQ ID NO: 195700 - DNA, 25 bp, SARS Virus
tggttgtgatggggtactaggtaat

SEQ ID NO: 195701 - DNA, 25 bp, SARS Virus
ggttgtgatggtgtactaggtaatt

SEQ ID NO: 195702 - DNA, 25 bp, SARS Virus
gttgtgatggtggactaggtaattc

SEQ ID NO: 195703 - DNA, 25 bp, SARS Virus
ttgtgatggtgtgctaggtaattcc

SEQ ID NO: 195704 - DNA, 25 bp, SARS Virus
tgtgatggtgtagtaggtaattcct

SEQ ID NO: 195705 - DNA, 25 bp, SARS Virus
gtgatggtgtacgaggtaattcctt

SEQ ID NO: 195706 - DNA, 25 bp, SARS Virus
tgatggtgtactgggtaattccttt

SEQ ID NO: 195707 - DNA, 25 bp, SARS Virus
gatggtgtactaggtaattcctttc

SEQ ID NO: 195708 - DNA, 25 bp, SARS Virus
atggtgtactaggtaattcctttct

SEQ ID NO: 195709 - DNA, 25 bp, SARS Virus
tggtgtactagggaattcctttctt

SEQ ID NO: 195710 - DNA, 25 bp, SARS Virus
ggtgtactaggtgattcctttcttg

SEQ ID NO: 195711 - DNA, 25 bp, SARS Virus
gtgtactaggtagttcctttcttgg

SEQ ID NO: 195712 - DNA, 25 bp, SARS Virus
tgtactaggtaagtcctttcttgga

SEQ ID NO: 195713 - DNA, 25 bp, SARS Virus
gtactaggtaatgcctttcttggaa

SEQ ID NO: 195714 - DNA, 25 bp, SARS Virus
tactaggtaattgctttcttggaaa

SEQ ID NO: 195715 - DNA, 25 bp, SARS Virus
actaggtaattcgtttcttggaaat

SEQ ID NO: 195716 - DNA, 25 bp, SARS Virus
ctaggtaattccgttcttggaaatt

SEQ ID NO: 195717 - DNA, 25 bp, SARS Virus
taggtaattcctgtcttggaaatta

SEQ ID NO: 195718 - DNA, 25 bp, SARS Virus
aggtaattccttgcttggaaattac

SEQ ID NO: 195719 - DNA, 25 bp, SARS Virus
ggtaattcctttgttggaaattacc

SEQ ID NO: 195720 - DNA, 25 bp, SARS Virus
gtaattcctttcgtggaaattacca

SEQ ID NO: 195721 - DNA, 25 bp, SARS Virus
ttccattgtggtttcgtaacagatt

SEQ ID NO: 195722 - DNA, 25 bp, SARS Virus
tccattgtggtctcgtaacagattg

SEQ ID NO: 195723 - DNA, 25 bp, SARS Virus
ccattgtggtcttgtaacagattgt

SEQ ID NO: 195724 - DNA, 25 bp, SARS Virus
cattgtggtctcttaacagattgtt

SEQ ID NO: 195725 - DNA, 25 bp, SARS Virus
attgtggtctcgtaacagattgttg

SEQ ID NO: 195726 - DNA, 25 bp, SARS Virus
ttgtggtctcgttacagattgttgt

SEQ ID NO: 195727 - DNA, 25 bp, SARS Virus
tgtggtctcgtatcagattgttgta

SEQ ID NO: 195728 - DNA, 25 bp, SARS Virus
gtggtctcgtaatagattgttgtag

SEQ ID NO: 195729 - DNA, 25 bp, SARS Virus
tggtctcgtaactgattgttgtagt

SEQ ID NO: 195730 - DNA, 25 bp, SARS Virus
ggtctcgtaacatattgttgtagtt

SEQ ID NO: 195731 - DNA, 25 bp, SARS Virus
gtctcgtaacagtttgttgtagttt

SEQ ID NO: 195732 - DNA, 25 bp, SARS Virus
tctcgtaacagattgttgtagttta

SEQ ID NO: 195733 - DNA, 25 bp, SARS Virus
ctcgtaacagattgttgtagtttac

SEQ ID NO: 195734 - DNA, 25 bp, SARS Virus
tcgtaacagatttttgtagtttacc

SEQ ID NO: 195735 - DNA, 25 bp, SARS Virus
cgtaacagattgttgtagtttacca

SEQ ID NO: 195736 - DNA, 25 bp, SARS Virus
gtaacagattgttgtagtttaccac

SEQ ID NO: 195737 - DNA, 25 bp, SARS Virus
taacagattgttttagtttaccaca

SEQ ID NO: 195738 - DNA, 25 bp, SARS Virus
aacagattgttgtagtttaccacat

SEQ ID NO: 195739 - DNA, 25 bp, SARS Virus
acagattgttgttgtttaccacatt

SEQ ID NO: 195740 - DNA, 25 bp, SARS Virus
cagattgttgtattttaccacattt

SEQ ID NO: 195741 - DNA, 25 bp, SARS Virus
agattgttgtagtttaccacatttg

SEQ ID NO: 195742 - DNA, 25 bp, SARS Virus
gattgttgtagtttaccacatttga

SEQ ID NO: 195743 - DNA, 25 bp, SARS Virus
attgttgtagtttaccacatttgag

SEQ ID NO: 195744 - DNA, 25 bp, SARS Virus
ttgttgtagttttccacatttgagt

SEQ ID NO: 195745 - DNA, 25 bp, SARS Virus
tgttgtagtttatcacatttgagta

SEQ ID NO: 195746 - DNA, 25 bp, SARS Virus
gttgtagtttactacatttgagtag

SEQ ID NO: 195747 - DNA, 25 bp, SARS Virus
ttgtagtttacctcatttgagtaga

SEQ ID NO: 195748 - DNA, 25 bp, SARS Virus
tgtagtttaccatatttgagtagaa

SEQ ID NO: 195749 - DNA, 25 bp, SARS Virus
gtagtttaccacttttgagtagaag

SEQ ID NO: 195750 - DNA, 25 bp, SARS Virus
tagtttaccacatttgagtagaaga

SEQ ID NO: 195751 - DNA, 25 bp, SARS Virus
agtttaccacatttgagtagaagat

SEQ ID NO: 195752 - DNA, 25 bp, SARS Virus
gtttaccacatttgagtagaagatt

SEQ ID NO: 195753 - DNA, 25 bp, SARS Virus
tttaccacattttagtagaagattt

SEQ ID NO: 195754 - DNA, 25 bp, SARS Virus
ttaccacatttgtgtagaagatttt

SEQ ID NO: 195755 - DNA, 25 bp, SARS Virus
taccacatttgattagaagatttta

SEQ ID NO: 195756 - DNA, 25 bp, SARS Virus
accacatttgagtagaagattttat

SEQ ID NO: 195757 - DNA, 25 bp, SARS Virus
ccacatttgagttgaagattttatc

SEQ ID NO: 195758 - DNA, 25 bp, SARS Virus
cacatttgagtataagattttatca

SEQ ID NO: 195759 - DNA, 25 bp, SARS Virus
acatttgagtagtagattttatcac

SEQ ID NO: 195760 - DNA, 25 bp, SARS Virus
catttgagtagatgattttatcacg

SEQ ID NO: 195761 - DNA, 25 bp, SARS Virus
atttgagtagaatattttatcacga

SEQ ID NO: 195762 - DNA, 25 bp, SARS Virus
tttgagtagaagtttttatcacgat

SEQ ID NO: 195763 - DNA, 25 bp, SARS Virus
ttgagtagaagattttatcacgatg

SEQ ID NO: 195764 - DNA, 25 bp, SARS Virus
tgagtagaagattttatcacgatgg

SEQ ID NO: 195765 - DNA, 25 bp, SARS Virus
gagtagaagattttatcacgatggt

SEQ ID NO: 195766 - DNA, 25 bp, SARS Virus
agtagaagattttatcacgatggtt

SEQ ID NO: 195767 - DNA, 25 bp, SARS Virus
gtagaagattttttcacgatggttc

SEQ ID NO: 195768 - DNA, 25 bp, SARS Virus
tagaagattttatcacgatggttcc

SEQ ID NO: 195769 - DNA, 25 bp, SARS Virus
agaagattttattacgatggttcct

SEQ ID NO: 195770 - DNA, 25 bp, SARS Virus
gaagattttatctcgatggttccta

SEQ ID NO: 195771 - DNA, 25 bp, SARS Virus
aagattttatcatgatggttcctat

SEQ ID NO: 195772 - DNA, 25 bp, SARS Virus
agattttatcactatggttcctatc

SEQ ID NO: 195773 - DNA, 25 bp, SARS Virus
gattttatcacgttggttcctatca

SEQ ID NO: 195774 - DNA, 25 bp, SARS Virus
attttatcacgatggttcctatcat

SEQ ID NO: 195775 - DNA, 25 bp, SARS Virus
ttttatcacgattgttcctatcatg

SEQ ID NO: 195776 - DNA, 25 bp, SARS Virus
tttatcacgatgtttcctatcatgc

SEQ ID NO: 195777 - DNA, 25 bp, SARS Virus
ttatcacgatggttcctatcatgct

SEQ ID NO: 195778 - DNA, 25 bp, SARS Virus
tatcacgatggttcctatcatgctg

SEQ ID NO: 195779 - DNA, 25 bp, SARS Virus
atcacgatggtttctatcatgctgg

SEQ ID NO: 195780 - DNA, 25 bp, SARS Virus
tcacgatggttcttatcatgctggt

SEQ ID NO: 195781 - DNA, 25 bp, SARS Virus
cacgatggttcctatcatgctggta

SEQ ID NO: 195782 - DNA, 25 bp, SARS Virus
acgatggttcctttcatgctggtaa

SEQ ID NO: 195783 - DNA, 25 bp, SARS Virus
cgatggttcctatcatgctggtaag

SEQ ID NO: 195784 - DNA, 25 bp, SARS Virus
gatggttcctattatgctggtaagt

SEQ ID NO: 195785 - DNA, 25 bp, SARS Virus
atggttcctatcttgctggtaagta

SEQ ID NO: 195786 - DNA, 25 bp, SARS Virus
tggttcctatcatgctggtaagtat

SEQ ID NO: 195787 - DNA, 25 bp, SARS Virus
ggttcctatcattctggtaagtatg

SEQ ID NO: 195788 - DNA, 25 bp, SARS Virus
gttcctatcatgttggtaagtatgg

SEQ ID NO: 195789 - DNA, 25 bp, SARS Virus
ttcctatcatgctggtaagtatggt

SEQ ID NO: 195790 - DNA, 25 bp, SARS Virus
tcctatcatgcttgtaagtatggta

SEQ ID NO: 195791 - DNA, 25 bp, SARS Virus
cctatcatgctgttaagtatggtaa

SEQ ID NO: 195792 - DNA, 25 bp, SARS Virus
ctatcatgctggtaagtatggtaag

SEQ ID NO: 195793 - DNA, 25 bp, SARS Virus
tatcatgctggttagtatggtaaga

SEQ ID NO: 195794 - DNA, 25 bp, SARS Virus
atcatgctggtatgtatggtaagac

SEQ ID NO: 195795 - DNA, 25 bp, SARS Virus
tcatgctggtaattatggtaagacg

SEQ ID NO: 195796 - DNA, 25 bp, SARS Virus
catgctggtaagtatggtaagacgt

SEQ ID NO: 195797 - DNA, 25 bp, SARS Virus
atgctggtaagtttggtaagacgtc

SEQ ID NO: 195798 - DNA, 25 bp, SARS Virus
tgctggtaagtatggtaagacgtcg

SEQ ID NO: 195799 - DNA, 25 bp, SARS Virus
gctggtaagtattgtaagacgtcgt

SEQ ID NO: 195800 - DNA, 25 bp, SARS Virus
ctggtaagtatgttaagacgtcgtc

SEQ ID NO: 195801 - DNA, 25 bp, SARS Virus
tggtaagtatggtaagacgtcgtcg

SEQ ID NO: 195802 - DNA, 25 bp, SARS Virus
ggtaagtatggttagacgtcgtcga

SEQ ID NO: 195803 - DNA, 25 bp, SARS Virus
gtaagtatggtatgacgtcgtcgag

SEQ ID NO: 195804 - DNA, 25 bp, SARS Virus
taagtatggtaatacgtcgtcgaga

SEQ ID NO: 195805 - DNA, 25 bp, SARS Virus
aagtatggtaagtcgtcgtcgagaa

SEQ ID NO: 195806 - DNA, 25 bp, SARS Virus
agtatggtaagatgtcgtcgagaaa

SEQ ID NO: 195807 - DNA, 25 bp, SARS Virus
gtatggtaagacttcgtcgagaaag

SEQ ID NO: 195808 - DNA, 25 bp, SARS Virus
tatggtaagacgtcgtcgagaaagt

SEQ ID NO: 195809 - DNA, 25 bp, SARS Virus
atggtaagacgttgtcgagaaagtt

SEQ ID NO: 195810 - DNA, 25 bp, SARS Virus
tggtaagacgtcttcgagaaagttt

SEQ ID NO: 195811 - DNA, 25 bp, SARS Virus
ggtaagacgtcgtcgagaaagtttc

SEQ ID NO: 195812 - DNA, 25 bp, SARS Virus
gtaagacgtcgttgagaaagtttcg

SEQ ID NO: 195813 - DNA, 25 bp, SARS Virus
taagacgtcgtctagaaagtttcgt

SEQ ID NO: 195814 - DNA, 25 bp, SARS Virus
aagacgtcgtcgtgaaagtttcgtc

SEQ ID NO: 195815 - DNA, 25 bp, SARS Virus
agacgtcgtcgataaagtttcgtcg

SEQ ID NO: 195816 - DNA, 25 bp, SARS Virus
gacgtcgtcgagtaagtttcgtcgt

SEQ ID NO: 195817 - DNA, 25 bp, SARS Virus
acgtcgtcgagatagtttcgtcgtg

SEQ ID NO: 195818 - DNA, 25 bp, SARS Virus
cgtcgtcgagaatgtttcgtcgtgt

SEQ ID NO: 195819 - DNA, 25 bp, SARS Virus
gtcgtcgagaaattttcgtcgtgtg

SEQ ID NO: 195820 - DNA, 25 bp, SARS Virus
tcgtcgagaaagtttcgtcgtgtgt

SEQ ID NO: 195821 - DNA, 25 bp, SARS Virus
cgtcgagaaagtttcgtcgtgtgta

SEQ ID NO: 195822 - DNA, 25 bp, SARS Virus
gtcgagaaagtttcgtcgtgtgtat

SEQ ID NO: 195823 - DNA, 25 bp, SARS Virus
tcgagaaagttttgtcgtgtgtata

SEQ ID NO: 195824 - DNA, 25 bp, SARS Virus
cgagaaagtttcttcgtgtgtatag

SEQ ID NO: 195825 - DNA, 25 bp, SARS Virus
gagaaagtttcgtcgtgtgtataga

SEQ ID NO: 195826 - DNA, 25 bp, SARS Virus
agaaagtttcgttgtgtgtatagat

SEQ ID NO: 195827 - DNA, 25 bp, SARS Virus
gaaagtttcgtcttgtgtatagatt

SEQ ID NO: 195828 - DNA, 25 bp, SARS Virus
aaagtttcgtcgtgtgtatagattc

SEQ ID NO: 195829 - DNA, 25 bp, SARS Virus
aagtttcgtcgtttgtatagattct

SEQ ID NO: 195830 - DNA, 25 bp, SARS Virus
agtttcgtcgtgtgtatagattctg

SEQ ID NO: 195831 - DNA, 25 bp, SARS Virus
gtttcgtcgtgtttatagattctgc

SEQ ID NO: 195832 - DNA, 25 bp, SARS Virus
tttcgtcgtgtgtatagattctgcc

SEQ ID NO: 195833 - DNA, 25 bp, SARS Virus
ttcgtcgtgtgtttagattctgccg

SEQ ID NO: 195834 - DNA, 25 bp, SARS Virus
tcgtcgtgtgtatagattctgccgt

SEQ ID NO: 195835 - DNA, 25 bp, SARS Virus
cgtcgtgtgtattgattctgccgtt

SEQ ID NO: 195836 - DNA, 25 bp, SARS Virus
gtcgtgtgtatatattctgccgtta

SEQ ID NO: 195837 - DNA, 25 bp, SARS Virus
tcgtgtgtatagtttctgccgttaa

SEQ ID NO: 195838 - DNA, 25 bp, SARS Virus
cgtgtgtatagattctgccgttaag

SEQ ID NO: 195839 - DNA, 25 bp, SARS Virus
gtgtgtatagattctgccgttaagg

SEQ ID NO: 195840 - DNA, 25 bp, SARS Virus
tgtgtatagattttgccgttaagga

SEQ ID NO: 195841 - DNA, 25 bp, SARS Virus
gtgtatagattctgccgttaaggac

SEQ ID NO: 195842 - DNA, 25 bp, SARS Virus
tgtatagattcttccgttaaggaca

SEQ ID NO: 195843 - DNA, 25 bp, SARS Virus
gtatagattctgtcgttaaggacaa

SEQ ID NO: 195844 - DNA, 25 bp, SARS Virus
tatagattctgctgttaaggacaaa

SEQ ID NO: 195845 - DNA, 25 bp, SARS Virus
atagattctgcctttaaggacaaac

SEQ ID NO: 195846 - DNA, 25 bp, SARS Virus
tagattctgccgttaaggacaaact

SEQ ID NO: 195847 - DNA, 25 bp, SARS Virus
agattctgccgttaaggacaaactc

SEQ ID NO: 195848 - DNA, 25 bp, SARS Virus
gattctgccgtttaggacaaactcg

SEQ ID NO: 195849 - DNA, 25 bp, SARS Virus
attctgccgttatggacaaactcgt

SEQ ID NO: 195850 - DNA, 25 bp, SARS Virus
ttctgccgttaatgacaaactcgtc

SEQ ID NO: 195851 - DNA, 25 bp, SARS Virus
tctgccgttaagtacaaactcgtct

SEQ ID NO: 195852 - DNA, 25 bp, SARS Virus
ctgccgttaaggtcaaactcgtctt

SEQ ID NO: 195853 - DNA, 25 bp, SARS Virus
tgccgttaaggataaactcgtcttt

SEQ ID NO: 195854 - DNA, 25 bp, SARS Virus
gccgttaaggactaactcgtctttc

SEQ ID NO: 195855 - DNA, 25 bp, SARS Virus
ccgttaaggacatactcgtctttct

SEQ ID NO: 195856 - DNA, 25 bp, SARS Virus
cgttaaggacaatctcgtctttctc

SEQ ID NO: 195857 - DNA, 25 bp, SARS Virus
gttaaggacaaattcgtctttctcc

SEQ ID NO: 195858 - DNA, 25 bp, SARS Virus
ttaaggacaaactcgtctttctcca

SEQ ID NO: 195859 - DNA, 25 bp, SARS Virus
taaggacaaacttgtctttctccag

SEQ ID NO: 195860 - DNA, 25 bp, SARS Virus
aaggacaaactcttctttctccagg

SEQ ID NO: 195861 - DNA, 25 bp, SARS Virus
aggacaaactcgtctttctccaggg

SEQ ID NO: 195862 - DNA, 25 bp, SARS Virus
ggacaaactcgtttttctccagggt

SEQ ID NO: 195863 - DNA, 25 bp, SARS Virus
gacaaactcgtctttctccagggtt

SEQ ID NO: 195864 - DNA, 25 bp, SARS Virus
acaaactcgtctttctccagggtta

SEQ ID NO: 195865 - DNA, 25 bp, SARS Virus
caaactcgtctttctccagggttat

SEQ ID NO: 195866 - DNA, 25 bp, SARS Virus
aaactcgtctttttccagggttata

SEQ ID NO: 195867 - DNA, 25 bp, SARS Virus
aactcgtctttctccagggttatac

SEQ ID NO: 195868 - DNA, 25 bp, SARS Virus
actcgtctttcttcagggttataca

SEQ ID NO: 195869 - DNA, 25 bp, SARS Virus
ctcgtctttctctagggttatacag

SEQ ID NO: 195870 - DNA, 25 bp, SARS Virus
tcgtctttctcctgggttatacagt

SEQ ID NO: 195871 - DNA, 25 bp, SARS Virus
cgtctttctccatggttatacagtt

SEQ ID NO: 195872 - DNA, 25 bp, SARS Virus
gtctttctccagtgttatacagttg

SEQ ID NO: 195873 - DNA, 25 bp, SARS Virus
tctttctccaggtttatacagttgt

SEQ ID NO: 195874 - DNA, 25 bp, SARS Virus
ctttctccagggttatacagttgta

SEQ ID NO: 195875 - DNA, 25 bp, SARS Virus
tttctccagggttatacagttgtac

SEQ ID NO: 195876 - DNA, 25 bp, SARS Virus
ttctccagggttttacagttgtact

SEQ ID NO: 195877 - DNA, 25 bp, SARS Virus
tctccagggttatacagttgtacta

SEQ ID NO: 195878 - DNA, 25 bp, SARS Virus
ctccagggttattcagttgtactag

SEQ ID NO: 195879 - DNA, 25 bp, SARS Virus
tccagggttatatagttgtactaga

SEQ ID NO: 195880 - DNA, 25 bp, SARS Virus
ccagggttatactgttgtactagaa

SEQ ID NO: 195881 - DNA, 25 bp, SARS Virus
cagggttatacatttgtactagaac

SEQ ID NO: 195882 - DNA, 25 bp, SARS Virus
agggttatacagttgtactagaaca

SEQ ID NO: 195883 - DNA, 25 bp, SARS Virus
gggttatacagttgtactagaacac

SEQ ID NO: 195884 - DNA, 25 bp, SARS Virus
ggttatacagttttactagaacaca

SEQ ID NO: 195885 - DNA, 25 bp, SARS Virus
gttatacagttgtactagaacacag

SEQ ID NO: 195886 - DNA, 25 bp, SARS Virus
ttatacagttgttctagaacacagt

SEQ ID NO: 195887 - DNA, 25 bp, SARS Virus
tatacagttgtattagaacacagtt

SEQ ID NO: 195888 - DNA, 25 bp, SARS Virus
atacagttgtactagaacacagttt

SEQ ID NO: 195889 - DNA, 25 bp, SARS Virus
tacagttgtacttgaacacagtttc

SEQ ID NO: 195890 - DNA, 25 bp, SARS Virus
acagttgtactataacacagtttcc

SEQ ID NO: 195891 - DNA, 25 bp, SARS Virus
cagttgtactagtacacagtttcca

SEQ ID NO: 195892 - DNA, 25 bp, SARS Virus
agttgtactagatcacagtttccaa

SEQ ID NO: 195893 - DNA, 25 bp, SARS Virus
gttgtactagaatacagtttccaag

SEQ ID NO: 195894 - DNA, 25 bp, SARS Virus
ttgtactagaactcagtttccaagt

SEQ ID NO: 195895 - DNA, 25 bp, SARS Virus
tgtactagaacatagtttccaagta

SEQ ID NO: 195896 - DNA, 25 bp, SARS Virus
gtactagaacactgtttccaagtat

SEQ ID NO: 195897 - DNA, 25 bp, SARS Virus
tactagaacacattttccaagtatc

SEQ ID NO: 195898 - DNA, 25 bp, SARS Virus
actagaacacagtttccaagtatca

SEQ ID NO: 195899 - DNA, 25 bp, SARS Virus
ctagaacacagtttccaagtatcaa

SEQ ID NO: 195900 - DNA, 25 bp, SARS Virus
tagaacacagtttccaagtatcaac

SEQ ID NO: 195901 - DNA, 25 bp, SARS Virus
agaacacagttttcaagtatcaaca

SEQ ID NO: 195902 - DNA, 25 bp, SARS Virus
gaacacagtttctaagtatcaacat

SEQ ID NO: 195903 - DNA, 25 bp, SARS Virus
aacacagtttcctagtatcaacatg

SEQ ID NO: 195904 - DNA, 25 bp, SARS Virus
acacagtttccatgtatcaacatga

SEQ ID NO: 195905 - DNA, 25 bp, SARS Virus
cacagtttccaattatcaacatgaa

SEQ ID NO: 195906 - DNA, 25 bp, SARS Virus
acagtttccaagtatcaacatgaag

SEQ ID NO: 195907 - DNA, 25 bp, SARS Virus
cagtttccaagtttcaacatgaagt

SEQ ID NO: 195908 - DNA, 25 bp, SARS Virus
agtttccaagtatcaacatgaagta

SEQ ID NO: 195909 - DNA, 25 bp, SARS Virus
gtttccaagtattaacatgaagtaa

SEQ ID NO: 195910 - DNA, 25 bp, SARS Virus
tttccaagtatctacatgaagtaac

SEQ ID NO: 195911 - DNA, 25 bp, SARS Virus
ttccaagtatcatcatgaagtaacg

SEQ ID NO: 195912 - DNA, 25 bp, SARS Virus
tccaagtatcaatatgaagtaacgg

SEQ ID NO: 195913 - DNA, 25 bp, SARS Virus
ccaagtatcaacttgaagtaacggt

SEQ ID NO: 195914 - DNA, 25 bp, SARS Virus
caagtatcaacatgaagtaacggtg

SEQ ID NO: 195915 - DNA, 25 bp, SARS Virus
aagtatcaacattaagtaacggtgt

SEQ ID NO: 195916 - DNA, 25 bp, SARS Virus
agtatcaacatgtagtaacggtgtt

SEQ ID NO: 195917 - DNA, 25 bp, SARS Virus
gtatcaacatgatgtaacggtgttc

SEQ ID NO: 195918 - DNA, 25 bp, SARS Virus
tatcaacatgaattaacggtgttcc

SEQ ID NO: 195919 - DNA, 25 bp, SARS Virus
atcaacatgaagtaacggtgttcca

SEQ ID NO: 195920 - DNA, 25 bp, SARS Virus
tcaacatgaagttacggtgttccaa

SEQ ID NO: 195921 - DNA, 25 bp, SARS Virus
caacatgaagtatcggtgttccaat

SEQ ID NO: 195922 - DNA, 25 bp, SARS Virus
aacatgaagtaatggtgttccaatt

SEQ ID NO: 195923 - DNA, 25 bp, SARS Virus
acatgaagtaactgtgttccaattt

SEQ ID NO: 195924 - DNA, 25 bp, SARS Virus
catgaagtaacgttgttccaatttc

SEQ ID NO: 195925 - DNA, 25 bp, SARS Virus
atgaagtaacggtgttccaatttca

SEQ ID NO: 195926 - DNA, 25 bp, SARS Virus
tgaagtaacggttttccaatttcag

SEQ ID NO: 195927 - DNA, 25 bp, SARS Virus
gaagtaacggtgttccaatttcagt

SEQ ID NO: 195928 - DNA, 25 bp, SARS Virus
aagtaacggtgttccaatttcagta

SEQ ID NO: 195929 - DNA, 25 bp, SARS Virus
agtaacggtgtttcaatttcagtaa

SEQ ID NO: 195930 - DNA, 25 bp, SARS Virus
gtaacggtgttctaatttcagtaag

SEQ ID NO: 195931 - DNA, 25 bp, SARS Virus
taacggtgttcctatttcagtaagt

SEQ ID NO: 195932 - DNA, 25 bp, SARS Virus
aacggtgttccattttcagtaagtt

SEQ ID NO: 195933 - DNA, 25 bp, SARS Virus
acggtgttccaatttcagtaagttt

SEQ ID NO: 195934 - DNA, 25 bp, SARS Virus
cggtgttccaatttcagtaagtttc

SEQ ID NO: 195935 - DNA, 25 bp, SARS Virus
ggtgttccaatttcagtaagtttca

SEQ ID NO: 195936 - DNA, 25 bp, SARS Virus
gtgttccaattttagtaagtttcat

SEQ ID NO: 195937 - DNA, 25 bp, SARS Virus
tgttccaatttctgtaagtttcatc

SEQ ID NO: 195938 - DNA, 25 bp, SARS Virus
gttccaatttcattaagtttcatca

SEQ ID NO: 195939 - DNA, 25 bp, SARS Virus
ttccaatttcagtaagtttcatcac

SEQ ID NO: 195940 - DNA, 25 bp, SARS Virus
tccaatttcagttagtttcatcacc

SEQ ID NO: 195941 - DNA, 25 bp, SARS Virus
ccaatttcagtatgtttcatcacca

SEQ ID NO: 195942 - DNA, 25 bp, SARS Virus
caatttcagtaattttcatcaccac

SEQ ID NO: 195943 - DNA, 25 bp, SARS Virus
aatttcagtaagtttcatcaccact

SEQ ID NO: 195944 - DNA, 25 bp, SARS Virus
atttcagtaagtttcatcaccactt

SEQ ID NO: 195945 - DNA, 25 bp, SARS Virus
tttcagtaagtttcatcaccactta

SEQ ID NO: 195946 - DNA, 25 bp, SARS Virus
ttcagtaagttttatcaccacttag

SEQ ID NO: 195947 - DNA, 25 bp, SARS Virus
tcagtaagtttcttcaccacttaga

SEQ ID NO: 195948 - DNA, 25 bp, SARS Virus
cagtaagtttcatcaccacttagat

SEQ ID NO: 195949 - DNA, 25 bp, SARS Virus
agtaagtttcattaccacttagata

SEQ ID NO: 195950 - DNA, 25 bp, SARS Virus
gtaagtttcatctccacttagataa

SEQ ID NO: 195951 - DNA, 25 bp, SARS Virus
taagtttcatcatcacttagataat

SEQ ID NO: 195952 - DNA, 25 bp, SARS Virus
aagtttcatcactacttagataatt

SEQ ID NO: 195953 - DNA, 25 bp, SARS Virus
agtttcatcacctcttagataattc

SEQ ID NO: 195954 - DNA, 25 bp, SARS Virus
gtttcatcaccatttagataattct

SEQ ID NO: 195955 - DNA, 25 bp, SARS Virus
tttcatcaccacttagataattctt

SEQ ID NO: 195956 - DNA, 25 bp, SARS Virus
ttcatcaccacttagataattcttt

SEQ ID NO: 195957 - DNA, 25 bp, SARS Virus
tcatcaccactttgataattctttg

SEQ ID NO: 195958 - DNA, 25 bp, SARS Virus
catcaccacttatataattctttgg

SEQ ID NO: 195959 - DNA, 25 bp, SARS Virus
atcaccacttagttaattctttggt

SEQ ID NO: 195960 - DNA, 25 bp, SARS Virus
tcaccacttagataattctttggtg

SEQ ID NO: 195961 - DNA, 25 bp, SARS Virus
caccacttagattattctttggtgg

SEQ ID NO: 195962 - DNA, 25 bp, SARS Virus
accacttagatatttctttggtgga

SEQ ID NO: 195963 - DNA, 25 bp, SARS Virus
ccacttagataattctttggtggat

SEQ ID NO: 195964 - DNA, 25 bp, SARS Virus
cacttagataattctttggtggata

SEQ ID NO: 195965 - DNA, 25 bp, SARS Virus
acttagataattttttggtggatag

SEQ ID NO: 195966 - DNA, 25 bp, SARS Virus
cttagataattctttggtggatagt

SEQ ID NO: 195967 - DNA, 25 bp, SARS Virus
ttagataattctttggtggatagtg

SEQ ID NO: 195968 - DNA, 25 bp, SARS Virus
tagataattctttggtggatagtgg

SEQ ID NO: 195969 - DNA, 25 bp, SARS Virus
agataattcttttgtggatagtggt

SEQ ID NO: 195970 - DNA, 25 bp, SARS Virus
gataattctttgttggatagtggta

SEQ ID NO: 195971 - DNA, 25 bp, SARS Virus
ataattctttggtggatagtggtaa

SEQ ID NO: 195972 - DNA, 25 bp, SARS Virus
taattctttggttgatagtggtaac

SEQ ID NO: 195973 - DNA, 25 bp, SARS Virus
aattctttggtgtatagtggtaact

SEQ ID NO: 195974 - DNA, 25 bp, SARS Virus
attctttggtggttagtggtaacta

SEQ ID NO: 195975 - DNA, 25 bp, SARS Virus
ttctttggtggatagtggtaactat

SEQ ID NO: 195976 - DNA, 25 bp, SARS Virus
tctttggtggattgtggtaactatt

SEQ ID NO: 195977 - DNA, 25 bp, SARS Virus
ctttggtggatattggtaactattg

SEQ ID NO: 195978 - DNA, 25 bp, SARS Virus
tttggtggatagtggtaactattgt

SEQ ID NO: 195979 - DNA, 25 bp, SARS Virus
ttggtggatagttgtaactattgtc

SEQ ID NO: 195980 - DNA, 25 bp, SARS Virus
tggtggatagtgttaactattgtcg

SEQ ID NO: 195981 - DNA, 25 bp, SARS Virus
ggtggatagtggtaactattgtcgt

SEQ ID NO: 195982 - DNA, 25 bp, SARS Virus
gtggatagtggttactattgtcgtc

SEQ ID NO: 195983 - DNA, 25 bp, SARS Virus
tggatagtggtatctattgtcgtcg

SEQ ID NO: 195984 - DNA, 25 bp, SARS Virus
ggatagtggtaattattgtcgtcgt

SEQ ID NO: 195985 - DNA, 25 bp, SARS Virus
gatagtggtaactattgtcgtcgta

SEQ ID NO: 195986 - DNA, 25 bp, SARS Virus
atagtggtaacttttgtcgtcgtat

SEQ ID NO: 195987 - DNA, 25 bp, SARS Virus
tagtggtaactattgtcgtcgtatg

SEQ ID NO: 195988 - DNA, 25 bp, SARS Virus
agtggtaactattgtcgtcgtatgt

SEQ ID NO: 195989 - DNA, 25 bp, SARS Virus
gtggtaactattttcgtcgtatgtc

SEQ ID NO: 195990 - DNA, 25 bp, SARS Virus
tggtaactattgtcgtcgtatgtcg

SEQ ID NO: 195991 - DNA, 25 bp, SARS Virus
ggtaactattgttgtcgtatgtcgg

SEQ ID NO: 195992 - DNA, 25 bp, SARS Virus
gtaactattgtcttcgtatgtcggt

SEQ ID NO: 195993 - DNA, 25 bp, SARS Virus
taactattgtcgtcgtatgtcggta

SEQ ID NO: 195994 - DNA, 25 bp, SARS Virus
aactattgtcgttgtatgtcggtac

SEQ ID NO: 195995 - DNA, 25 bp, SARS Virus
actattgtcgtcttatgtcggtacg

SEQ ID NO: 195996 - DNA, 25 bp, SARS Virus
ctattgtcgtcgtatgtcggtacgg

SEQ ID NO: 195997 - DNA, 25 bp, SARS Virus
tattgtcgtcgtttgtcggtacggt

SEQ ID NO: 195998 - DNA, 25 bp, SARS Virus
attgtcgtcgtatgtcggtacggtt

SEQ ID NO: 195999 - DNA, 25 bp, SARS Virus
ttgtcgtcgtatttcggtacggttt

SEQ ID NO: 196000 - DNA, 25 bp, SARS Virus
tgtcgtcgtatgtcggtacggtttt

SEQ ID NO: 196001 - DNA, 25 bp, SARS Virus
gtcgtcgtatgttggtacggttttg

SEQ ID NO: 196002 - DNA, 25 bp, SARS Virus
tcgtcgtatgtctgtacggttttgt

SEQ ID NO: 196003 - DNA, 25 bp, SARS Virus
cgtcgtatgtcgttacggttttgta

SEQ ID NO: 196004 - DNA, 25 bp, SARS Virus
gtcgtatgtcggtacggttttgtaa

SEQ ID NO: 196005 - DNA, 25 bp, SARS Virus
tcgtatgtcggttcggttttgtaaa

SEQ ID NO: 196006 - DNA, 25 bp, SARS Virus
cgtatgtcggtatggttttgtaaat

SEQ ID NO: 196007 - DNA, 25 bp, SARS Virus
gtatgtcggtactgttttgtaaatt

SEQ ID NO: 196008 - DNA, 25 bp, SARS Virus
tatgtcggtacgtttttgtaaatta

SEQ ID NO: 196009 - DNA, 25 bp, SARS Virus
atgtcggtacggttttgtaaattac

SEQ ID NO: 196010 - DNA, 25 bp, SARS Virus
tgtcggtacggttttgtaaattaca

SEQ ID NO: 196011 - DNA, 25 bp, SARS Virus
gtcggtacggttttgtaaattacaa

SEQ ID NO: 196012 - DNA, 25 bp, SARS Virus
tcggtacggttttgtaaattacaat

SEQ ID NO: 196013 - DNA, 25 bp, SARS Virus
cggtacggttttttaaattacaata

SEQ ID NO: 196014 - DNA, 25 bp, SARS Virus
ggtacggttttgtaaattacaatac

SEQ ID NO: 196015 - DNA, 25 bp, SARS Virus
gtacggttttgttaattacaatacc

SEQ ID NO: 196016 - DNA, 25 bp, SARS Virus
tacggttttgtatattacaatacca

SEQ ID NO: 196017 - DNA, 25 bp, SARS Virus
acggttttgtaatttacaataccaa

SEQ ID NO: 196018 - DNA, 25 bp, SARS Virus
cggttttgtaaattacaataccaac

SEQ ID NO: 196019 - DNA, 25 bp, SARS Virus
ggttttgtaaattacaataccaaca

SEQ ID NO: 196020 - DNA, 25 bp, SARS Virus
gttttgtaaatttcaataccaacac

SEQ ID NO: 196021 - DNA, 25 bp, SARS Virus
ttttgtaaattataataccaacaca

SEQ ID NO: 196022 - DNA, 25 bp, SARS Virus
tttgtaaattactataccaacacag

SEQ ID NO: 196023 - DNA, 25 bp, SARS Virus
ttgtaaattacattaccaacacaga

SEQ ID NO: 196024 - DNA, 25 bp, SARS Virus
tgtaaattacaataccaacacagac

SEQ ID NO: 196025 - DNA, 25 bp, SARS Virus
gtaaattacaattccaacacagaca

SEQ ID NO: 196026 - DNA, 25 bp, SARS Virus
taaattacaatatcaacacagacat

SEQ ID NO: 196027 - DNA, 25 bp, SARS Virus
aaattacaatactaacacagacatg

SEQ ID NO: 196028 - DNA, 25 bp, SARS Virus
aattacaatacctacacagacatgg

SEQ ID NO: 196029 - DNA, 25 bp, SARS Virus
attacaataccatcacagacatgga

SEQ ID NO: 196030 - DNA, 25 bp, SARS Virus
ttacaataccaatacagacatggac

SEQ ID NO: 196031 - DNA, 25 bp, SARS Virus
tacaataccaactcagacatggacg

SEQ ID NO: 196032 - DNA, 25 bp, SARS Virus
acaataccaacatagacatggacgt

SEQ ID NO: 196033 - DNA, 25 bp, SARS Virus
caataccaacactgacatggacgtc

SEQ ID NO: 196034 - DNA, 25 bp, SARS Virus
aataccaacacatacatggacgtcg

SEQ ID NO: 196035 - DNA, 25 bp, SARS Virus
ataccaacacagtcatggacgtcgg

SEQ ID NO: 196036 - DNA, 25 bp, SARS Virus
taccaacacagatatggacgtcgga

SEQ ID NO: 196037 - DNA, 25 bp, SARS Virus
accaacacagacttggacgtcggac

SEQ ID NO: 196038 - DNA, 25 bp, SARS Virus
ccaacacagacatggacgtcggaca

SEQ ID NO: 196039 - DNA, 25 bp, SARS Virus
caacacagacattgacgtcggacac

SEQ ID NO: 196040 - DNA, 25 bp, SARS Virus
aacacagacatgtacgtcggacacg

SEQ ID NO: 196041 - DNA, 25 bp, SARS Virus
acacagacatggtcgtcggacacgt

SEQ ID NO: 196042 - DNA, 25 bp, SARS Virus
cacagacatggatgtcggacacgtc

SEQ ID NO: 196043 - DNA, 25 bp, SARS Virus
acagacatggacttcggacacgtca

SEQ ID NO: 196044 - DNA, 25 bp, SARS Virus
cagacatggacgtcggacacgtcaa

SEQ ID NO: 196045 - DNA, 25 bp, SARS Virus
agacatggacgttggacacgtcaaa

SEQ ID NO: 196046 - DNA, 25 bp, SARS Virus
gacatggacgtctgacacgtcaaac

SEQ ID NO: 196047 - DNA, 25 bp, SARS Virus
acatggacgtcgtacacgtcaaaca

SEQ ID NO: 196048 - DNA, 25 bp, SARS Virus
catggacgtcggtcacgtcaaacag

SEQ ID NO: 196049 - DNA, 25 bp, SARS Virus
atggacgtcggatacgtcaaacaga

SEQ ID NO: 196050 - DNA, 25 bp, SARS Virus
tggacgtcggactcgtcaaacagac

SEQ ID NO: 196051 - DNA, 25 bp, SARS Virus
ggacgtcggacatgtcaaacagaca

SEQ ID NO: 196052 - DNA, 25 bp, SARS Virus
gacgtcggacacttcaaacagacag

SEQ ID NO: 196053 - DNA, 25 bp, SARS Virus
acgtcggacacgtcaaacagacagt

SEQ ID NO: 196054 - DNA, 25 bp, SARS Virus
cgtcggacacgttaaacagacagtt

SEQ ID NO: 196055 - DNA, 25 bp, SARS Virus
gtcggacacgtctaacagacagttg

SEQ ID NO: 196056 - DNA, 25 bp, SARS Virus
tcggacacgtcatacagacagttgt

SEQ ID NO: 196057 - DNA, 25 bp, SARS Virus
cggacacgtcaatcagacagttgtt

SEQ ID NO: 196058 - DNA, 25 bp, SARS Virus
ggacacgtcaaatagacagttgttt

SEQ ID NO: 196059 - DNA, 25 bp, SARS Virus
gacacgtcaaactgacagttgttta

SEQ ID NO: 196060 - DNA, 25 bp, SARS Virus
acacgtcaaacatacagttgtttac

SEQ ID NO: 196061 - DNA, 25 bp, SARS Virus
cacgtcaaacagtcagttgtttacc

SEQ ID NO: 196062 - DNA, 25 bp, SARS Virus
acgtcaaacagatagttgtttacct

SEQ ID NO: 196063 - DNA, 25 bp, SARS Virus
cgtcaaacagactgttgtttacctg

SEQ ID NO: 196064 - DNA, 25 bp, SARS Virus
gtcaaacagacatttgtttacctgg

SEQ ID NO: 196065 - DNA, 25 bp, SARS Virus
tcaaacagacagttgtttacctggt

SEQ ID NO: 196066 - DNA, 25 bp, SARS Virus
caaacagacagttgtttacctggta

SEQ ID NO: 196067 - DNA, 25 bp, SARS Virus
aaacagacagttttttacctggtat

SEQ ID NO: 196068 - DNA, 25 bp, SARS Virus
aacagacagttgtttacctggtatc

SEQ ID NO: 196069 - DNA, 25 bp, SARS Virus
acagacagttgtttacctggtatct

SEQ ID NO: 196070 - DNA, 25 bp, SARS Virus
cagacagttgtttacctggtatctt

SEQ ID NO: 196071 - DNA, 25 bp, SARS Virus
agacagttgttttcctggtatctta

SEQ ID NO: 196072 - DNA, 25 bp, SARS Virus
gacagttgtttatctggtatcttaa

SEQ ID NO: 196073 - DNA, 25 bp, SARS Virus
acagttgtttacttggtatcttaaa

SEQ ID NO: 196074 - DNA, 25 bp, SARS Virus
cagttgtttacctggtatcttaaat

SEQ ID NO: 196075 - DNA, 25 bp, SARS Virus
agttgtttaccttgtatcttaaatg

SEQ ID NO: 196076 - DNA, 25 bp, SARS Virus
gttgtttacctgttatcttaaatgg

SEQ ID NO: 196077 - DNA, 25 bp, SARS Virus
ttgtttacctggtatcttaaatgga

SEQ ID NO: 196078 - DNA, 25 bp, SARS Virus
tgtttacctggtttcttaaatggaa

SEQ ID NO: 196079 - DNA, 25 bp, SARS Virus
gtttacctggtatcttaaatggaag

SEQ ID NO: 196080 - DNA, 25 bp, SARS Virus
tttacctggtattttaaatggaaga

SEQ ID NO: 196081 - DNA, 25 bp, SARS Virus
ttacctggtatcttaaatggaagat

SEQ ID NO: 196082 - DNA, 25 bp, SARS Virus
tacctggtatcttaaatggaagatt

SEQ ID NO: 196083 - DNA, 25 bp, SARS Virus
acctggtatctttaatggaagattc

SEQ ID NO: 196084 - DNA, 25 bp, SARS Virus
cctggtatcttatatggaagattca

SEQ ID NO: 196085 - DNA, 25 bp, SARS Virus
ctggtatcttaattggaagattcag

SEQ ID NO: 196086 - DNA, 25 bp, SARS Virus
tggtatcttaaatggaagattcagt

SEQ ID NO: 196087 - DNA, 25 bp, SARS Virus
ggtatcttaaattgaagattcagtc

SEQ ID NO: 196088 - DNA, 25 bp, SARS Virus
gtatcttaaatgtaagattcagtca

SEQ ID NO: 196089 - DNA, 25 bp, SARS Virus
tatcttaaatggtagattcagtcat

SEQ ID NO: 196090 - DNA, 25 bp, SARS Virus
atcttaaatggatgattcagtcatg

SEQ ID NO: 196091 - DNA, 25 bp, SARS Virus
tcttaaatggaatattcagtcatgg

SEQ ID NO: 196092 - DNA, 25 bp, SARS Virus
cttaaatggaagtttcagtcatggt

SEQ ID NO: 196093 - DNA, 25 bp, SARS Virus
ttaaatggaagattcagtcatggtc

SEQ ID NO: 196094 - DNA, 25 bp, SARS Virus
taaatggaagattcagtcatggtcg

SEQ ID NO: 196095 - DNA, 25 bp, SARS Virus
aaatggaagatttagtcatggtcgc

SEQ ID NO: 196096 - DNA, 25 bp, SARS Virus
aatggaagattctgtcatggtcgca

SEQ ID NO: 196097 - DNA, 25 bp, SARS Virus
atggaagattcattcatggtcgcac

SEQ ID NO: 196098 - DNA, 25 bp, SARS Virus
tggaagattcagtcatggtcgcaca

SEQ ID NO: 196099 - DNA, 25 bp, SARS Virus
ggaagattcagttatggtcgcacat

SEQ ID NO: 196100 - DNA, 25 bp, SARS Virus
gaagattcagtcttggtcgcacatg

SEQ ID NO: 196101 - DNA, 25 bp, SARS Virus
aagattcagtcatggtcgcacatga

SEQ ID NO: 196102 - DNA, 25 bp, SARS Virus
agattcagtcattgtcgcacatgag

SEQ ID NO: 196103 - DNA, 25 bp, SARS Virus
gattcagtcatgttcgcacatgagg

SEQ ID NO: 196104 - DNA, 25 bp, SARS Virus
attcagtcatggtcgcacatgagga

SEQ ID NO: 196105 - DNA, 25 bp, SARS Virus
ttcagtcatggttgcacatgaggac

SEQ ID NO: 196106 - DNA, 25 bp, SARS Virus
tcagtcatggtctcacatgaggaca

SEQ ID NO: 196107 - DNA, 25 bp, SARS Virus
cagtcatggtcgtacatgaggacaa

SEQ ID NO: 196108 - DNA, 25 bp, SARS Virus
agtcatggtcgctcatgaggacaac

SEQ ID NO: 196109 - DNA, 25 bp, SARS Virus
gtcatggtcgcatatgaggacaacc

SEQ ID NO: 196110 - DNA, 25 bp, SARS Virus
tcatggtcgcacttgaggacaacct

SEQ ID NO: 196111 - DNA, 25 bp, SARS Virus
catggtcgcacatgaggacaacctt

SEQ ID NO: 196112 - DNA, 25 bp, SARS Virus
atggtcgcacattaggacaaccttc

SEQ ID NO: 196113 - DNA, 25 bp, SARS Virus
tggtcgcacatgtggacaaccttcg

SEQ ID NO: 196114 - DNA, 25 bp, SARS Virus
ggtcgcacatgatgacaaccttcga

SEQ ID NO: 196115 - DNA, 25 bp, SARS Virus
gtcgcacatgagtacaaccttcgag

SEQ ID NO: 196116 - DNA, 25 bp, SARS Virus
tcgcacatgaggtcaaccttcgagg

SEQ ID NO: 196117 - DNA, 25 bp, SARS Virus
cgcacatgaggataaccttcgaggt

SEQ ID NO: 196118 - DNA, 25 bp, SARS Virus
gcacatgaggactaccttcgaggta

SEQ ID NO: 196119 - DNA, 25 bp, SARS Virus
cacatgaggacatccttcgaggtat

SEQ ID NO: 196120 - DNA, 25 bp, SARS Virus
acatgaggacaatcttcgaggtata

SEQ ID NO: 196121 - DNA, 25 bp, SARS Virus
catgaggacaactttcgaggtatac

SEQ ID NO: 196122 - DNA, 25 bp, SARS Virus
atgaggacaaccttcgaggtatact

SEQ ID NO: 196123 - DNA, 25 bp, SARS Virus
tgaggacaaccttcgaggtatacta

SEQ ID NO: 196124 - DNA, 25 bp, SARS Virus
gaggacaacctttgaggtatactac

SEQ ID NO: 196125 - DNA, 25 bp, SARS Virus
aggacaaccttctaggtatactacg

SEQ ID NO: 196126 - DNA, 25 bp, SARS Virus
ggacaaccttcgtggtatactacgt

SEQ ID NO: 196127 - DNA, 25 bp, SARS Virus
gacaaccttcgatgtatactacgta

SEQ ID NO: 196128 - DNA, 25 bp, SARS Virus
acaaccttcgagttatactacgtat

SEQ ID NO: 196129 - DNA, 25 bp, SARS Virus
caaccttcgaggtatactacgtata

SEQ ID NO: 196130 - DNA, 25 bp, SARS Virus
aaccttcgaggtttactacgtatat

SEQ ID NO: 196131 - DNA, 25 bp, SARS Virus
accttcgaggtatactacgtatatc

SEQ ID NO: 196132 - DNA, 25 bp, SARS Virus
ccttcgaggtattctacgtatatcg

SEQ ID NO: 196133 - DNA, 25 bp, SARS Virus
cttcgaggtatattacgtatatcgt

SEQ ID NO: 196134 - DNA, 25 bp, SARS Virus
ttcgaggtatactacgtatatcgtc

SEQ ID NO: 196135 - DNA, 25 bp, SARS Virus
tcgaggtatacttcgtatatcgtct

SEQ ID NO: 196136 - DNA, 25 bp, SARS Virus
cgaggtatactatgtatatcgtctt

SEQ ID NO: 196137 - DNA, 25 bp, SARS Virus
gaggtatactacttatatcgtcttt

SEQ ID NO: 196138 - DNA, 25 bp, SARS Virus
aggtatactacgtatatcgtctttc

SEQ ID NO: 196139 - DNA, 25 bp, SARS Virus
ggtatactacgtttatcgtctttct

SEQ ID NO: 196140 - DNA, 25 bp, SARS Virus
gtatactacgtatatcgtctttctg

SEQ ID NO: 196141 - DNA, 25 bp, SARS Virus
tatactacgtatttcgtctttctgt

SEQ ID NO: 196142 - DNA, 25 bp, SARS Virus
atactacgtatatcgtctttctgtg

SEQ ID NO: 196143 - DNA, 25 bp, SARS Virus
tactacgtatattgtctttctgtgc

SEQ ID NO: 196144 - DNA, 25 bp, SARS Virus
actacgtatatcttctttctgtgcg

SEQ ID NO: 196145 - DNA, 25 bp, SARS Virus
ctacgtatatcgtctttctgtgcgt

SEQ ID NO: 196146 - DNA, 25 bp, SARS Virus
tacgtatatcgtttttctgtgcgtt

SEQ ID NO: 196147 - DNA, 25 bp, SARS Virus
acgtatatcgtctttctgtgcgtta

SEQ ID NO: 196148 - DNA, 25 bp, SARS Virus
cgtatatcgtctttctgtgcgttag

SEQ ID NO: 196149 - DNA, 25 bp, SARS Virus
gtatatcgtctttctgtgcgttagt

SEQ ID NO: 196150 - DNA, 25 bp, SARS Virus
tatatcgtctttttgtgcgttagta

SEQ ID NO: 196151 - DNA, 25 bp, SARS Virus
atatcgtctttctgtgcgttagtat

SEQ ID NO: 196152 - DNA, 25 bp, SARS Virus
tatcgtctttctttgcgttagtatt

SEQ ID NO: 196153 - DNA, 25 bp, SARS Virus
atcgtctttctgtgcgttagtatta

SEQ ID NO: 196154 - DNA, 25 bp, SARS Virus
tcgtctttctgttcgttagtattag

SEQ ID NO: 196155 - DNA, 25 bp, SARS Virus
cgtctttctgtgtgttagtattagt

SEQ ID NO: 196156 - DNA, 25 bp, SARS Virus
gtctttctgtgctttagtattagtt

SEQ ID NO: 196157 - DNA, 25 bp, SARS Virus
tctttctgtgcgttagtattagtta

SEQ ID NO: 196158 - DNA, 25 bp, SARS Virus
ctttctgtgcgttagtattagttac

SEQ ID NO: 196159 - DNA, 25 bp, SARS Virus
tttctgtgcgtttgtattagttaca

SEQ ID NO: 196160 - DNA, 25 bp, SARS Virus
ttctgtgcgttattattagttacaa

SEQ ID NO: 196161 - DNA, 25 bp, SARS Virus
tctgtgcgttagtattagttacaat

SEQ ID NO: 196162 - DNA, 25 bp, SARS Virus
ctgtgcgttagttttagttacaatt

SEQ ID NO: 196163 - DNA, 25 bp, SARS Virus
tgtgcgttagtattagttacaattt

SEQ ID NO: 196164 - DNA, 25 bp, SARS Virus
gtgcgttagtattagttacaatttt

SEQ ID NO: 196165 - DNA, 25 bp, SARS Virus
tgcgttagtatttgttacaattttg

SEQ ID NO: 196166 - DNA, 25 bp, SARS Virus
gcgttagtattatttacaattttgg

SEQ ID NO: 196167 - DNA, 25 bp, SARS Virus
cgttagtattagttacaattttggt

SEQ ID NO: 196168 - DNA, 25 bp, SARS Virus
gttagtattagttacaattttggtt

SEQ ID NO: 196169 - DNA, 25 bp, SARS Virus
ttagtattagtttcaattttggttg

SEQ ID NO: 196170 - DNA, 25 bp, SARS Virus
tagtattagttataattttggttgt

SEQ ID NO: 196171 - DNA, 25 bp, SARS Virus
agtattagttactattttggttgtg

SEQ ID NO: 196172 - DNA, 25 bp, SARS Virus
gtattagttacatttttggttgtga

SEQ ID NO: 196173 - DNA, 25 bp, SARS Virus
tattagttacaattttggttgtgat

SEQ ID NO: 196174 - DNA, 25 bp, SARS Virus
attagttacaattttggttgtgatg

SEQ ID NO: 196175 - DNA, 25 bp, SARS Virus
ttagttacaattttggttgtgatgg

SEQ ID NO: 196176 - DNA, 25 bp, SARS Virus
tagttacaattttggttgtgatggt

SEQ ID NO: 196177 - DNA, 25 bp, SARS Virus
agttacaatttttgttgtgatggtg

SEQ ID NO: 196178 - DNA, 25 bp, SARS Virus
gttacaattttgtttgtgatggtgt

SEQ ID NO: 196179 - DNA, 25 bp, SARS Virus
ttacaattttggttgtgatggtgta

SEQ ID NO: 196180 - DNA, 25 bp, SARS Virus
tacaattttggttgtgatggtgtac

SEQ ID NO: 196181 - DNA, 25 bp, SARS Virus
acaattttggttttgatggtgtact

SEQ ID NO: 196182 - DNA, 25 bp, SARS Virus
caattttggttgtgatggtgtacta

SEQ ID NO: 196183 - DNA, 25 bp, SARS Virus
aattttggttgttatggtgtactag

SEQ ID NO: 196184 - DNA, 25 bp, SARS Virus
attttggttgtgttggtgtactagg

SEQ ID NO: 196185 - DNA, 25 bp, SARS Virus
ttttggttgtgatggtgtactaggt

SEQ ID NO: 196186 - DNA, 25 bp, SARS Virus
tttggttgtgattgtgtactaggta

SEQ ID NO: 196187 - DNA, 25 bp, SARS Virus
ttggttgtgatgttgtactaggtaa

SEQ ID NO: 196188 - DNA, 25 bp, SARS Virus
tggttgtgatggtgtactaggtaat

SEQ ID NO: 196189 - DNA, 25 bp, SARS Virus
ggttgtgatggtttactaggtaatt

SEQ ID NO: 196190 - DNA, 25 bp, SARS Virus
gttgtgatggtgtactaggtaattc

SEQ ID NO: 196191 - DNA, 25 bp, SARS Virus
ttgtgatggtgttctaggtaattcc

SEQ ID NO: 196192 - DNA, 25 bp, SARS Virus
tgtgatggtgtattaggtaattcct

SEQ ID NO: 196193 - DNA, 25 bp, SARS Virus
gtgatggtgtactaggtaattcctt

SEQ ID NO: 196194 - DNA, 25 bp, SARS Virus
tgatggtgtacttggtaattccttt

SEQ ID NO: 196195 - DNA, 25 bp, SARS Virus
gatggtgtactatgtaattcctttc

SEQ ID NO: 196196 - DNA, 25 bp, SARS Virus
atggtgtactagttaattcctttct

SEQ ID NO: 196197 - DNA, 25 bp, SARS Virus
tggtgtactaggtaattcctttctt

SEQ ID NO: 196198 - DNA, 25 bp, SARS Virus
ggtgtactaggttattcctttcttg

SEQ ID NO: 196199 - DNA, 25 bp, SARS Virus
gtgtactaggtatttcctttcttgg

SEQ ID NO: 196200 - DNA, 25 bp, SARS Virus
tgtactaggtaattcctttcttgga

SEQ ID NO: 196201 - DNA, 25 bp, SARS Virus
gtactaggtaattcctttcttggaa

SEQ ID NO: 196202 - DNA, 25 bp, SARS Virus
tactaggtaatttctttcttggaaa

SEQ ID NO: 196203 - DNA, 25 bp, SARS Virus
actaggtaattcttttcttggaaat

SEQ ID NO: 196204 - DNA, 25 bp, SARS Virus
ctaggtaattcctttcttggaaatt

SEQ ID NO: 196205 - DNA, 25 bp, SARS Virus
taggtaattcctttcttggaaatta

SEQ ID NO: 196206 - DNA, 25 bp, SARS Virus
aggtaattcctttcttggaaattac

SEQ ID NO: 196207 - DNA, 25 bp, SARS Virus
ggtaattccttttttggaaattacc

SEQ ID NO: 196208 - DNA, 25 bp, SARS Virus
gtaattcctttcttggaaattacca

SEQ ID NO: 196209 - DNA, 25 bp, SARS Virus
taattcctttctaggaaattaccat

SEQ ID NO: 196210 - DNA, 25 bp, SARS Virus
aattcctttcttagaaattaccata

SEQ ID NO: 196211 - DNA, 25 bp, SARS Virus
attcctttcttgaaaattaccatac

SEQ ID NO: 196212 - DNA, 25 bp, SARS Virus
ttcctttcttggaaattaccatact

SEQ ID NO: 196213 - DNA, 25 bp, SARS Virus
tcctttcttggaaattaccatacta

SEQ ID NO: 196214 - DNA, 25 bp, SARS Virus
cctttcttggaaattaccatactaa

SEQ ID NO: 196215 - DNA, 25 bp, SARS Virus
ctttcttggaaaataccatactaat

SEQ ID NO: 196216 - DNA, 25 bp, SARS Virus
tttcttggaaataaccatactaatc

SEQ ID NO: 196217 - DNA, 25 bp, SARS Virus
ttcttggaaattaccatactaatcc

SEQ ID NO: 196218 - DNA, 25 bp, SARS Virus
tcttggaaattaacatactaatcca

SEQ ID NO: 196219 - DNA, 25 bp, SARS Virus
cttggaaattacaatactaatccag

SEQ ID NO: 196220 - DNA, 25 bp, SARS Virus
ttggaaattaccatactaatccaga

SEQ ID NO: 196221 - DNA, 25 bp, SARS Virus
tggaaattaccaaactaatccagag

SEQ ID NO: 196222 - DNA, 25 bp, SARS Virus
ggaaattaccatactaatccagagt

SEQ ID NO: 196223 - DNA, 25 bp, SARS Virus
gaaattaccataataatccagagta

SEQ ID NO: 196224 - DNA, 25 bp, SARS Virus
aaattaccatacaaatccagagtac

SEQ ID NO: 196225 - DNA, 25 bp, SARS Virus
aattaccatactaatccagagtacc

SEQ ID NO: 196226 - DNA, 25 bp, SARS Virus
attaccatactaatccagagtaccg

SEQ ID NO: 196227 - DNA, 25 bp, SARS Virus
ttaccatactaaaccagagtaccgt

SEQ ID NO: 196228 - DNA, 25 bp, SARS Virus
taccatactaatacagagtaccgtg

SEQ ID NO: 196229 - DNA, 25 bp, SARS Virus
accatactaatcaagagtaccgtgt

SEQ ID NO: 196230 - DNA, 25 bp, SARS Virus
ccatactaatccagagtaccgtgtg

SEQ ID NO: 196231 - DNA, 25 bp, SARS Virus
catactaatccaaagtaccgtgtga

SEQ ID NO: 196232 - DNA, 25 bp, SARS Virus
atactaatccagagtaccgtgtgac

SEQ ID NO: 196233 - DNA, 25 bp, SARS Virus
tactaatccagaataccgtgtgact

SEQ ID NO: 196234 - DNA, 25 bp, SARS Virus
actaatccagagaaccgtgtgacta

SEQ ID NO: 196235 - DNA, 25 bp, SARS Virus
ctaatccagagtaccgtgtgactat

SEQ ID NO: 196236 - DNA, 25 bp, SARS Virus
taatccagagtaacgtgtgactatt

SEQ ID NO: 196237 - DNA, 25 bp, SARS Virus
aatccagagtacagtgtgactattt

SEQ ID NO: 196238 - DNA, 25 bp, SARS Virus
atccagagtaccatgtgactatttg

SEQ ID NO: 196239 - DNA, 25 bp, SARS Virus
tccagagtaccgagtgactatttgt

SEQ ID NO: 196240 - DNA, 25 bp, SARS Virus
ccagagtaccgtatgactatttgtg

SEQ ID NO: 196241 - DNA, 25 bp, SARS Virus
cagagtaccgtgagactatttgtgg

SEQ ID NO: 196242 - DNA, 25 bp, SARS Virus
agagtaccgtgtaactatttgtggt

SEQ ID NO: 196243 - DNA, 25 bp, SARS Virus
gagtaccgtgtgactatttgtggtc

SEQ ID NO: 196244 - DNA, 25 bp, SARS Virus
agtaccgtgtgaatatttgtggtct

SEQ ID NO: 196245 - DNA, 25 bp, SARS Virus
gtaccgtgtgacaatttgtggtcta

SEQ ID NO: 196246 - DNA, 25 bp, SARS Virus
taccgtgtgactatttgtggtctac

SEQ ID NO: 196247 - DNA, 25 bp, SARS Virus
accgtgtgactaattgtggtctacc

SEQ ID NO: 196248 - DNA, 25 bp, SARS Virus
ccgtgtgactatatgtggtctacca

SEQ ID NO: 196249 - DNA, 25 bp, SARS Virus
cgtgtgactattagtggtctaccac

SEQ ID NO: 196250 - DNA, 25 bp, SARS Virus
gtgtgactatttatggtctaccact

SEQ ID NO: 196251 - DNA, 25 bp, SARS Virus
tgtgactatttgaggtctaccactt

SEQ ID NO: 196252 - DNA, 25 bp, SARS Virus
gtgactatttgtagtctaccacttg

SEQ ID NO: 196253 - DNA, 25 bp, SARS Virus
tgactatttgtgatctaccacttgg

SEQ ID NO: 196254 - DNA, 25 bp, SARS Virus
gactatttgtggactaccacttggt

SEQ ID NO: 196255 - DNA, 25 bp, SARS Virus
actatttgtggtataccacttggta

SEQ ID NO: 196256 - DNA, 25 bp, SARS Virus
ctatttgtggtcaaccacttggtaa

SEQ ID NO: 196257 - DNA, 25 bp, SARS Virus
tatttgtggtctaccacttggtaac

SEQ ID NO: 196258 - DNA, 25 bp, SARS Virus
atttgtggtctaacacttggtaaca

SEQ ID NO: 196259 - DNA, 25 bp, SARS Virus
tttgtggtctacaacttggtaacat

SEQ ID NO: 196260 - DNA, 25 bp, SARS Virus
ttgtggtctaccacttggtaacatc

SEQ ID NO: 196261 - DNA, 25 bp, SARS Virus
tgtggtctaccaattggtaacatcg

SEQ ID NO: 196262 - DNA, 25 bp, SARS Virus
gtggtctaccacatggtaacatcgt

SEQ ID NO: 196263 - DNA, 25 bp, SARS Virus
tggtctaccactaggtaacatcgta

SEQ ID NO: 196264 - DNA, 25 bp, SARS Virus
ggtctaccacttagtaacatcgtac

SEQ ID NO: 196265 - DNA, 25 bp, SARS Virus
gtctaccacttgataacatcgtacg

SEQ ID NO: 196266 - DNA, 25 bp, SARS Virus
tctaccacttggaaacatcgtacga

SEQ ID NO: 196267 - DNA, 25 bp, SARS Virus
ctaccacttggtaacatcgtacgat

SEQ ID NO: 196268 - DNA, 25 bp, SARS Virus
taccacttggtaacatcgtacgatc

SEQ ID NO: 196269 - DNA, 25 bp, SARS Virus
accacttggtaaaatcgtacgatct

SEQ ID NO: 196270 - DNA, 25 bp, SARS Virus
ccacttggtaacatcgtacgatctt

SEQ ID NO: 196271 - DNA, 25 bp, SARS Virus
cacttggtaacaacgtacgatcttg

SEQ ID NO: 196272 - DNA, 25 bp, SARS Virus
acttggtaacatagtacgatcttga

SEQ ID NO: 196273 - DNA, 25 bp, SARS Virus
cttggtaacatcatacgatcttgac

SEQ ID NO: 196274 - DNA, 25 bp, SARS Virus
ttggtaacatcgaacgatcttgact

SEQ ID NO: 196275 - DNA, 25 bp, SARS Virus
tggtaacatcgtacgatcttgactt

SEQ ID NO: 196276 - DNA, 25 bp, SARS Virus
ggtaacatcgtaagatcttgacttt

SEQ ID NO: 196277 - DNA, 25 bp, SARS Virus
gtaacatcgtacaatcttgactttt

SEQ ID NO: 196278 - DNA, 25 bp, SARS Virus
taacatcgtacgatcttgactttta

SEQ ID NO: 196279 - DNA, 25 bp, SARS Virus
aacatcgtacgaacttgacttttac

SEQ ID NO: 196280 - DNA, 25 bp, SARS Virus
acatcgtacgatattgacttttaca

SEQ ID NO: 196281 - DNA, 25 bp, SARS Virus
catcgtacgatcatgacttttacaa

SEQ ID NO: 196282 - DNA, 25 bp, SARS Virus
atcgtacgatctagacttttacaaa

SEQ ID NO: 196283 - DNA, 25 bp, SARS Virus
tcgtacgatcttaacttttacaaac

SEQ ID NO: 196284 - DNA, 25 bp, SARS Virus
cgtacgatcttgacttttacaaact

SEQ ID NO: 196285 - DNA, 25 bp, SARS Virus
gtacgatcttgaattttacaaactg

SEQ ID NO: 196286 - DNA, 25 bp, SARS Virus
tacgatcttgacatttacaaactgg

SEQ ID NO: 196287 - DNA, 25 bp, SARS Virus
acgatcttgactattacaaactggt

SEQ ID NO: 196288 - DNA, 25 bp, SARS Virus
cgatcttgacttatacaaactggtc

SEQ ID NO: 196289 - DNA, 25 bp, SARS Virus
gatcttgactttaacaaactggtcc

SEQ ID NO: 196290 - DNA, 25 bp, SARS Virus
atcttgacttttacaaactggtcca

SEQ ID NO: 196291 - DNA, 25 bp, SARS Virus
tcttgacttttaaaaactggtccaa

SEQ ID NO: 196292 - DNA, 25 bp, SARS Virus
cttgacttttacaaactggtccaac

SEQ ID NO: 196293 - DNA, 25 bp, SARS Virus
ttgacttttacaaactggtccaacc

SEQ ID NO: 196294 - DNA, 25 bp, SARS Virus
tgacttttacaaactggtccaacct

SEQ ID NO: 196295 - DNA, 25 bp, SARS Virus
gacttttacaaaatggtccaaccta

SEQ ID NO: 196296 - DNA, 25 bp, SARS Virus
acttttacaaacaggtccaacctat

SEQ ID NO: 196297 - DNA, 25 bp, SARS Virus
cttttacaaactagtccaacctatg

SEQ ID NO: 196298 - DNA, 25 bp, SARS Virus
ttttacaaactgatccaacctatgc

SEQ ID NO: 196299 - DNA, 25 bp, SARS Virus
tttacaaactggaccaacctatgcc

SEQ ID NO: 196300 - DNA, 25 bp, SARS Virus
ttacaaactggtacaacctatgcct

SEQ ID NO: 196301 - DNA, 25 bp, SARS Virus
tacaaactggtcaaacctatgcctg

SEQ ID NO: 196302 - DNA, 25 bp, SARS Virus
acaaactggtccaacctatgcctgt

SEQ ID NO: 196303 - DNA, 25 bp, SARS Virus
caaactggtccaacctatgcctgtt

SEQ ID NO: 196304 - DNA, 25 bp, SARS Virus
aaactggtccaaactatgcctgttt

SEQ ID NO: 196305 - DNA, 25 bp, SARS Virus
aactggtccaacatatgcctgttta

SEQ ID NO: 196306 - DNA, 25 bp, SARS Virus
actggtccaaccaatgcctgtttaa

SEQ ID NO: 196307 - DNA, 25 bp, SARS Virus
ctggtccaacctatgcctgtttaaa

SEQ ID NO: 196308 - DNA, 25 bp, SARS Virus
tggtccaacctaagcctgtttaaat

SEQ ID NO: 196309 - DNA, 25 bp, SARS Virus
ggtccaacctatacctgtttaaata

SEQ ID NO: 196310 - DNA, 25 bp, SARS Virus
gtccaacctatgactgtttaaatat

SEQ ID NO: 196311 - DNA, 25 bp, SARS Virus
tccaacctatgcatgtttaaatatg

SEQ ID NO: 196312 - DNA, 25 bp, SARS Virus
ccaacctatgccagtttaaatatga

SEQ ID NO: 196313 - DNA, 25 bp, SARS Virus
caacctatgcctatttaaatatgaa

SEQ ID NO: 196314 - DNA, 25 bp, SARS Virus
aacctatgcctgattaaatatgaac

SEQ ID NO: 196315 - DNA, 25 bp, SARS Virus
acctatgcctgtataaatatgaacc

SEQ ID NO: 196316 - DNA, 25 bp, SARS Virus
cctatgcctgttaaaatatgaaccc

SEQ ID NO: 196317 - DNA, 25 bp, SARS Virus
ctatgcctgtttaaatatgaaccca

SEQ ID NO: 196318 - DNA, 25 bp, SARS Virus
tatgcctgtttaaatatgaacccac

SEQ ID NO: 196319 - DNA, 25 bp, SARS Virus
atgcctgtttaaatatgaacccaca

SEQ ID NO: 196320 - DNA, 25 bp, SARS Virus
tgcctgtttaaaaatgaacccacag

SEQ ID NO: 196321 - DNA, 25 bp, SARS Virus
gcctgtttaaatatgaacccacaga

SEQ ID NO: 196322 - DNA, 25 bp, SARS Virus
cctgtttaaataagaacccacagaa

SEQ ID NO: 196323 - DNA, 25 bp, SARS Virus
ctgtttaaatataaacccacagaat

SEQ ID NO: 196324 - DNA, 25 bp, SARS Virus
tgtttaaatatgaacccacagaatc

SEQ ID NO: 196325 - DNA, 25 bp, SARS Virus
gtttaaatatgaacccacagaatcc

SEQ ID NO: 196326 - DNA, 25 bp, SARS Virus
tttaaatatgaaaccacagaatccc

SEQ ID NO: 196327 - DNA, 25 bp, SARS Virus
ttaaatatgaacacacagaatccca

SEQ ID NO: 196328 - DNA, 25 bp, SARS Virus
taaatatgaaccaacagaatcccaa

SEQ ID NO: 196329 - DNA, 25 bp, SARS Virus
aaatatgaacccacagaatcccaat

SEQ ID NO: 196330 - DNA, 25 bp, SARS Virus
aatatgaacccaaagaatcccaatc

SEQ ID NO: 196331 - DNA, 25 bp, SARS Virus
atatgaacccacagaatcccaatct

SEQ ID NO: 196332 - DNA, 25 bp, SARS Virus
tatgaacccacaaaatcccaatctt

SEQ ID NO: 196333 - DNA, 25 bp, SARS Virus
atgaacccacagaatcccaatcttc

SEQ ID NO: 196334 - DNA, 25 bp, SARS Virus
tgaacccacagaatcccaatcttca

SEQ ID NO: 196335 - DNA, 25 bp, SARS Virus
gaacccacagaaacccaatcttcat

SEQ ID NO: 196336 - DNA, 25 bp, SARS Virus
aacccacagaataccaatcttcata

SEQ ID NO: 196337 - DNA, 25 bp, SARS Virus
acccacagaatcacaatcttcatag

SEQ ID NO: 196338 - DNA, 25 bp, SARS Virus
cccacagaatccaaatcttcatagt

SEQ ID NO: 196339 - DNA, 25 bp, SARS Virus
ccacagaatcccaatcttcatagtt

SEQ ID NO: 196340 - DNA, 25 bp, SARS Virus
cacagaatcccaatcttcatagttg

SEQ ID NO: 196341 - DNA, 25 bp, SARS Virus
acagaatcccaaacttcatagttga

SEQ ID NO: 196342 - DNA, 25 bp, SARS Virus
cagaatcccaatattcatagttgaa

SEQ ID NO: 196343 - DNA, 25 bp, SARS Virus
agaatcccaatcatcatagttgaaa

SEQ ID NO: 196344 - DNA, 25 bp, SARS Virus
gaatcccaatctacatagttgaaat

SEQ ID NO: 196345 - DNA, 25 bp, SARS Virus
aatcccaatcttaatagttgaaatt

SEQ ID NO: 196346 - DNA, 25 bp, SARS Virus
atcccaatcttcatagttgaaattc

SEQ ID NO: 196347 - DNA, 25 bp, SARS Virus
tcccaatcttcaaagttgaaattcg

SEQ ID NO: 196348 - DNA, 25 bp, SARS Virus
cccaatcttcatagttgaaattcgg

SEQ ID NO: 196349 - DNA, 25 bp, SARS Virus
ccaatcttcataattgaaattcgga

SEQ ID NO: 196350 - DNA, 25 bp, SARS Virus
caatcttcatagatgaaattcggat

SEQ ID NO: 196351 - DNA, 25 bp, SARS Virus
aatcttcatagtagaaattcggatt

SEQ ID NO: 196352 - DNA, 25 bp, SARS Virus
atcttcatagttaaaattcggattc

SEQ ID NO: 196353 - DNA, 25 bp, SARS Virus
tcttcatagttgaaattcggattcg

SEQ ID NO: 196354 - DNA, 25 bp, SARS Virus
cttcatagttgaaattcggattcgt

SEQ ID NO: 196355 - DNA, 25 bp, SARS Virus
ttcatagttgaaattcggattcgtc

SEQ ID NO: 196356 - DNA, 25 bp, SARS Virus
tcatagttgaaaatcggattcgtct

SEQ ID NO: 196357 - DNA, 25 bp, SARS Virus
catagttgaaatacggattcgtctg

SEQ ID NO: 196358 - DNA, 25 bp, SARS Virus
atagttgaaattaggattcgtctgt

SEQ ID NO: 196359 - DNA, 25 bp, SARS Virus
tagttgaaattcagattcgtctgtt

SEQ ID NO: 196360 - DNA, 25 bp, SARS Virus
agttgaaattcgaattcgtctgtta

SEQ ID NO: 196361 - DNA, 25 bp, SARS Virus
gttgaaattcggattcgtctgttaa

SEQ ID NO: 196362 - DNA, 25 bp, SARS Virus
ttgaaattcggaatcgtctgttaaa

SEQ ID NO: 196363 - DNA, 25 bp, SARS Virus
tgaaattcggatacgtctgttaaaa

SEQ ID NO: 196364 - DNA, 25 bp, SARS Virus
gaaattcggattagtctgttaaaac

SEQ ID NO: 196365 - DNA, 25 bp, SARS Virus
aaattcggattcatctgttaaaacg

SEQ ID NO: 196366 - DNA, 25 bp, SARS Virus
aattcggattcgactgttaaaacgt

SEQ ID NO: 196367 - DNA, 25 bp, SARS Virus
attcggattcgtatgttaaaacgta

SEQ ID NO: 196368 - DNA, 25 bp, SARS Virus
ttcggattcgtcagttaaaacgtat

SEQ ID NO: 196369 - DNA, 25 bp, SARS Virus
tcggattcgtctattaaaacgtatc

SEQ ID NO: 196370 - DNA, 25 bp, SARS Virus
cggattcgtctgataaaacgtatct

SEQ ID NO: 196371 - DNA, 25 bp, SARS Virus
ggattcgtctgtaaaaacgtatctt

SEQ ID NO: 196372 - DNA, 25 bp, SARS Virus
gattcgtctgttaaaacgtatctta

SEQ ID NO: 196373 - DNA, 25 bp, SARS Virus
attcgtctgttaaaacgtatcttac

SEQ ID NO: 196374 - DNA, 25 bp, SARS Virus
ttcgtctgttaaaacgtatcttacc

SEQ ID NO: 196375 - DNA, 25 bp, SARS Virus
tcgtctgttaaaacgtatcttaccg

SEQ ID NO: 196376 - DNA, 25 bp, SARS Virus
cgtctgttaaaaagtatcttaccgg

SEQ ID NO: 196377 - DNA, 25 bp, SARS Virus
gtctgttaaaacatatcttaccggt

SEQ ID NO: 196378 - DNA, 25 bp, SARS Virus
tctgttaaaacgaatcttaccggtt

SEQ ID NO: 196379 - DNA, 25 bp, SARS Virus
ctgttaaaacgtatcttaccggtta

SEQ ID NO: 196380 - DNA, 25 bp, SARS Virus
tgttaaaacgtaacttaccggttat

SEQ ID NO: 196381 - DNA, 25 bp, SARS Virus
gttaaaacgtatattaccggttatt

SEQ ID NO: 196382 - DNA, 25 bp, SARS Virus
ttaaaacgtatcataccggttattg

SEQ ID NO: 196383 - DNA, 25 bp, SARS Virus
taaaacgtatctaaccggttattgt

SEQ ID NO: 196384 - DNA, 25 bp, SARS Virus
aaaacgtatcttaccggttattgtg

SEQ ID NO: 196385 - DNA, 25 bp, SARS Virus
aaacgtatcttaacggttattgtgc

SEQ ID NO: 196386 - DNA, 25 bp, SARS Virus
aacgtatcttacaggttattgtgct

SEQ ID NO: 196387 - DNA, 25 bp, SARS Virus
acgtatcttaccagttattgtgctt

SEQ ID NO: 196388 - DNA, 25 bp, SARS Virus
cgtatcttaccgattattgtgcttc

SEQ ID NO: 196389 - DNA, 25 bp, SARS Virus
gtatcttaccggatattgtgcttca

SEQ ID NO: 196390 - DNA, 25 bp, SARS Virus
tatcttaccggtaattgtgcttcaa

SEQ ID NO: 196391 - DNA, 25 bp, SARS Virus
atcttaccggttattgtgcttcaac

SEQ ID NO: 196392 - DNA, 25 bp, SARS Virus
tcttaccggttaatgtgcttcaact

SEQ ID NO: 196393 - DNA, 25 bp, SARS Virus
cttaccggttatagtgcttcaactt

SEQ ID NO: 196394 - DNA, 25 bp, SARS Virus
ttaccggttattatgcttcaacttg

SEQ ID NO: 196395 - DNA, 25 bp, SARS Virus
taccggttattgagcttcaacttgt

SEQ ID NO: 196396 - DNA, 25 bp, SARS Virus
accggttattgtacttcaacttgta

SEQ ID NO: 196397 - DNA, 25 bp, SARS Virus
ccggttattgtgattcaacttgtaa

SEQ ID NO: 196398 - DNA, 25 bp, SARS Virus
cggttattgtgcatcaacttgtaac

SEQ ID NO: 196399 - DNA, 25 bp, SARS Virus
ggttattgtgctacaacttgtaacg

SEQ ID NO: 196400 - DNA, 25 bp, SARS Virus
gttattgtgcttaaacttgtaacgg

SEQ ID NO: 196401 - DNA, 25 bp, SARS Virus
ttattgtgcttcaacttgtaacggt

SEQ ID NO: 196402 - DNA, 25 bp, SARS Virus
tattgtgcttcaacttgtaacggtc

SEQ ID NO: 196403 - DNA, 25 bp, SARS Virus
attgtgcttcaaattgtaacggtcg

SEQ ID NO: 196404 - DNA, 25 bp, SARS Virus
ttgtgcttcaacatgtaacggtcgg

SEQ ID NO: 196405 - DNA, 25 bp, SARS Virus
tgtgcttcaactagtaacggtcgga

SEQ ID NO: 196406 - DNA, 25 bp, SARS Virus
gtgcttcaacttataacggtcggac

SEQ ID NO: 196407 - DNA, 25 bp, SARS Virus
tgcttcaacttgaaacggtcggact

SEQ ID NO: 196408 - DNA, 25 bp, SARS Virus
gcttcaacttgtaacggtcggactt

SEQ ID NO: 196409 - DNA, 25 bp, SARS Virus
cttcaacttgtaacggtcggacttg

SEQ ID NO: 196410 - DNA, 25 bp, SARS Virus
ttcaacttgtaaaggtcggacttgt

SEQ ID NO: 196411 - DNA, 25 bp, SARS Virus
tcaacttgtaacagtcggacttgtt

SEQ ID NO: 196412 - DNA, 25 bp, SARS Virus
caacttgtaacgatcggacttgttc

SEQ ID NO: 196413 - DNA, 25 bp, SARS Virus
aacttgtaacggacggacttgttct

SEQ ID NO: 196414 - DNA, 25 bp, SARS Virus
acttgtaacggtaggacttgttctt

SEQ ID NO: 196415 - DNA, 25 bp, SARS Virus
cttgtaacggtcagacttgttcttt

SEQ ID NO: 196416 - DNA, 25 bp, SARS Virus
ttgtaacggtcgaacttgttctttc

SEQ ID NO: 196417 - DNA, 25 bp, SARS Virus
tgtaacggtcggacttgttctttcg

SEQ ID NO: 196418 - DNA, 25 bp, SARS Virus
gtaacggtcggaattgttctttcga

SEQ ID NO: 196419 - DNA, 25 bp, SARS Virus
taacggtcggacatgttctttcgat

SEQ ID NO: 196420 - DNA, 25 bp, SARS Virus
aacggtcggactagttctttcgata

SEQ ID NO: 196421 - DNA, 25 bp, SARS Virus
acggtcggacttattctttcgatac

SEQ ID NO: 196422 - DNA, 25 bp, SARS Virus
cggtcggacttgatctttcgatacc

SEQ ID NO: 196423 - DNA, 25 bp, SARS Virus
ggtcggacttgtactttcgatacca

SEQ ID NO: 196424 - DNA, 25 bp, SARS Virus
gtcggacttgttatttcgataccaa

SEQ ID NO: 196425 - DNA, 25 bp, SARS Virus
tcggacttgttcattcgataccaac

SEQ ID NO: 196426 - DNA, 25 bp, SARS Virus
cggacttgttctatcgataccaacc

SEQ ID NO: 196427 - DNA, 25 bp, SARS Virus
ggacttgttcttacgataccaacct

SEQ ID NO: 196428 - DNA, 25 bp, SARS Virus
gacttgttctttagataccaaccta

SEQ ID NO: 196429 - DNA, 25 bp, SARS Virus
acttgttctttcaataccaacctaa

SEQ ID NO: 196430 - DNA, 25 bp, SARS Virus
cttgttctttcgataccaacctaaa

SEQ ID NO: 196431 - DNA, 25 bp, SARS Virus
ttgttctttcgaaaccaacctaaac

SEQ ID NO: 196432 - DNA, 25 bp, SARS Virus
tgttctttcgataccaacctaaacg

SEQ ID NO: 196433 - DNA, 25 bp, SARS Virus
gttctttcgataacaacctaaacgc

SEQ ID NO: 196434 - DNA, 25 bp, SARS Virus
ttctttcgatacaaacctaaacgct

SEQ ID NO: 196435 - DNA, 25 bp, SARS Virus
tctttcgataccaacctaaacgctt

SEQ ID NO: 196436 - DNA, 25 bp, SARS Virus
ctttcgataccaacctaaacgctta

SEQ ID NO: 196437 - DNA, 25 bp, SARS Virus
tttcgataccaaactaaacgcttac

SEQ ID NO: 196438 - DNA, 25 bp, SARS Virus
ttcgataccaacataaacgcttact

SEQ ID NO: 196439 - DNA, 25 bp, SARS Virus
tcgataccaaccaaaacgcttactc

SEQ ID NO: 196440 - DNA, 25 bp, SARS Virus
cgataccaacctaaacgcttactcg

SEQ ID NO: 196441 - DNA, 25 bp, SARS Virus
gataccaacctaaacgcttactcgt

SEQ ID NO: 196442 - DNA, 25 bp, SARS Virus
ataccaacctaaacgcttactcgtc

SEQ ID NO: 196443 - DNA, 25 bp, SARS Virus
taccaacctaaaagcttactcgtct

SEQ ID NO: 196444 - DNA, 25 bp, SARS Virus
accaacctaaacacttactcgtcta

SEQ ID NO: 196445 - DNA, 25 bp, SARS Virus
ccaacctaaacgattactcgtctag

SEQ ID NO: 196446 - DNA, 25 bp, SARS Virus
caacctaaacgcatactcgtctaga

SEQ ID NO: 196447 - DNA, 25 bp, SARS Virus
aacctaaacgctaactcgtctagaa

SEQ ID NO: 196448 - DNA, 25 bp, SARS Virus
acctaaacgcttactcgtctagaag

SEQ ID NO: 196449 - DNA, 25 bp, SARS Virus
cctaaacgcttaatcgtctagaagt

SEQ ID NO: 196450 - DNA, 25 bp, SARS Virus
ctaaacgcttacacgtctagaagta

SEQ ID NO: 196451 - DNA, 25 bp, SARS Virus
taaacgcttactagtctagaagtat

SEQ ID NO: 196452 - DNA, 25 bp, SARS Virus
aaacgcttactcatctagaagtatc

SEQ ID NO: 196453 - DNA, 25 bp, SARS Virus
aacgcttactcgactagaagtatca

SEQ ID NO: 196454 - DNA, 25 bp, SARS Virus
acgcttactcgtatagaagtatcaa

SEQ ID NO: 196455 - DNA, 25 bp, SARS Virus
cgcttactcgtcaagaagtatcaat

SEQ ID NO: 196456 - DNA, 25 bp, SARS Virus
gcttactcgtctagaagtatcaatc

SEQ ID NO: 196457 - DNA, 25 bp, SARS Virus
cttactcgtctaaaagtatcaatcc

SEQ ID NO: 196458 - DNA, 25 bp, SARS Virus
ttactcgtctagaagtatcaatcct

SEQ ID NO: 196459 - DNA, 25 bp, SARS Virus
tactcgtctagaagtatcaatccta

SEQ ID NO: 196460 - DNA, 25 bp, SARS Virus
actcgtctagaaatatcaatcctaa

SEQ ID NO: 196461 - DNA, 25 bp, SARS Virus
ctcgtctagaagaatcaatcctaat

SEQ ID NO: 196462 - DNA, 25 bp, SARS Virus
tcgtctagaagtatcaatcctaatt

SEQ ID NO: 196463 - DNA, 25 bp, SARS Virus
cgtctagaagtaacaatcctaattc

SEQ ID NO: 196464 - DNA, 25 bp, SARS Virus
gtctagaagtataaatcctaattcg

SEQ ID NO: 196465 - DNA, 25 bp, SARS Virus
tctagaagtatcaatcctaattcgt

SEQ ID NO: 196466 - DNA, 25 bp, SARS Virus
ctagaagtatcaatcctaattcgta

SEQ ID NO: 196467 - DNA, 25 bp, SARS Virus
tagaagtatcaaacctaattcgtac

SEQ ID NO: 196468 - DNA, 25 bp, SARS Virus
agaagtatcaatactaattcgtaca

SEQ ID NO: 196469 - DNA, 25 bp, SARS Virus
gaagtatcaatcataattcgtacag

SEQ ID NO: 196470 - DNA, 25 bp, SARS Virus
aagtatcaatccaaattcgtacaga

SEQ ID NO: 196471 - DNA, 25 bp, SARS Virus
agtatcaatcctaattcgtacagaa

SEQ ID NO: 196472 - DNA, 25 bp, SARS Virus
gtatcaatcctaattcgtacagaag

SEQ ID NO: 196473 - DNA, 25 bp, SARS Virus
tatcaatcctaaatcgtacagaaga

SEQ ID NO: 196474 - DNA, 25 bp, SARS Virus
atcaatcctaatacgtacagaagac

SEQ ID NO: 196475 - DNA, 25 bp, SARS Virus
tcaatcctaattagtacagaagacg

SEQ ID NO: 196476 - DNA, 25 bp, SARS Virus
caatcctaattcatacagaagacga

SEQ ID NO: 196477 - DNA, 25 bp, SARS Virus
aatcctaattcgaacagaagacgac

SEQ ID NO: 196478 - DNA, 25 bp, SARS Virus
atcctaattcgtacagaagacgaca

SEQ ID NO: 196479 - DNA, 25 bp, SARS Virus
tcctaattcgtaaagaagacgacac

SEQ ID NO: 196480 - DNA, 25 bp, SARS Virus
cctaattcgtacagaagacgacacg

SEQ ID NO: 196481 - DNA, 25 bp, SARS Virus
ctaattcgtacaaaagacgacacgt

SEQ ID NO: 196482 - DNA, 25 bp, SARS Virus
taattcgtacagaagacgacacgtt

SEQ ID NO: 196483 - DNA, 25 bp, SARS Virus
aattcgtacagaagacgacacgttt

SEQ ID NO: 196484 - DNA, 25 bp, SARS Virus
attcgtacagaaaacgacacgttta

SEQ ID NO: 196485 - DNA, 25 bp, SARS Virus
ttcgtacagaagacgacacgtttac

SEQ ID NO: 196486 - DNA, 25 bp, SARS Virus
tcgtacagaagaagacacgtttact

SEQ ID NO: 196487 - DNA, 25 bp, SARS Virus
cgtacagaagacaacacgtttactg

SEQ ID NO: 196488 - DNA, 25 bp, SARS Virus
gtacagaagacgacacgtttactgt

SEQ ID NO: 196489 - DNA, 25 bp, SARS Virus
tacagaagacgaaacgtttactgta

SEQ ID NO: 196490 - DNA, 25 bp, SARS Virus
acagaagacgacacgtttactgtac

SEQ ID NO: 196491 - DNA, 25 bp, SARS Virus
cagaagacgacaagtttactgtaca

SEQ ID NO: 196492 - DNA, 25 bp, SARS Virus
agaagacgacacatttactgtacag

SEQ ID NO: 196493 - DNA, 25 bp, SARS Virus
gaagacgacacgattactgtacaga

SEQ ID NO: 196494 - DNA, 25 bp, SARS Virus
aagacgacacgtatactgtacagaa

SEQ ID NO: 196495 - DNA, 25 bp, SARS Virus
agacgacacgttaactgtacagaac

SEQ ID NO: 196496 - DNA, 25 bp, SARS Virus
gacgacacgtttactgtacagaacc

SEQ ID NO: 196497 - DNA, 25 bp, SARS Virus
acgacacgtttaatgtacagaacct

SEQ ID NO: 196498 - DNA, 25 bp, SARS Virus
cgacacgtttacagtacagaacctg

SEQ ID NO: 196499 - DNA, 25 bp, SARS Virus
gacacgtttactatacagaacctgt

SEQ ID NO: 196500 - DNA, 25 bp, SARS Virus
acacgtttactgaacagaacctgtc

SEQ ID NO: 196501 - DNA, 25 bp, SARS Virus
cacgtttactgtacagaacctgtca

SEQ ID NO: 196502 - DNA, 25 bp, SARS Virus
acgtttactgtaaagaacctgtcat

SEQ ID NO: 196503 - DNA, 25 bp, SARS Virus
cgtttactgtacagaacctgtcata

SEQ ID NO: 196504 - DNA, 25 bp, SARS Virus
gtttactgtacaaaacctgtcatat

SEQ ID NO: 196505 - DNA, 25 bp, SARS Virus
tttactgtacagaacctgtcatatg

SEQ ID NO: 196506 - DNA, 25 bp, SARS Virus
ttactgtacagaacctgtcatatga

SEQ ID NO: 196507 - DNA, 25 bp, SARS Virus
tactgtacagaaactgtcatatgac

SEQ ID NO: 196508 - DNA, 25 bp, SARS Virus
actgtacagaacatgtcatatgaca

SEQ ID NO: 196509 - DNA, 25 bp, SARS Virus
ctgtacagaaccagtcatatgacac

SEQ ID NO: 196510 - DNA, 25 bp, SARS Virus
tgtacagaacctatcatatgacaca

SEQ ID NO: 196511 - DNA, 25 bp, SARS Virus
gtacagaacctgacatatgacacag

SEQ ID NO: 196512 - DNA, 25 bp, SARS Virus
tacagaacctgtaatatgacacagt

SEQ ID NO: 196513 - DNA, 25 bp, SARS Virus
acagaacctgtcatatgacacagta

SEQ ID NO: 196514 - DNA, 25 bp, SARS Virus
cagaacctgtcaaatgacacagtag

SEQ ID NO: 196515 - DNA, 25 bp, SARS Virus
agaacctgtcatatgacacagtagg

SEQ ID NO: 196516 - DNA, 25 bp, SARS Virus
gaacctgtcataagacacagtaggt

SEQ ID NO: 196517 - DNA, 25 bp, SARS Virus
aacctgtcatataacacagtaggtt

SEQ ID NO: 196518 - DNA, 25 bp, SARS Virus
acctgtcatatgacacagtaggttg

SEQ ID NO: 196519 - DNA, 25 bp, SARS Virus
cctgtcatatgaaacagtaggttgg

SEQ ID NO: 196520 - DNA, 25 bp, SARS Virus
ctgtcatatgacacagtaggttggt

SEQ ID NO: 196521 - DNA, 25 bp, SARS Virus
tgtcatatgacaaagtaggttggtg

SEQ ID NO: 196522 - DNA, 25 bp, SARS Virus
gtcatatgacacagtaggttggtgt

SEQ ID NO: 196523 - DNA, 25 bp, SARS Virus
tcatatgacacaataggttggtgtt

SEQ ID NO: 196524 - DNA, 25 bp, SARS Virus
catatgacacagaaggttggtgtta

SEQ ID NO: 196525 - DNA, 25 bp, SARS Virus
atatgacacagtaggttggtgttag

SEQ ID NO: 196526 - DNA, 25 bp, SARS Virus
tatgacacagtaagttggtgttagg

SEQ ID NO: 196527 - DNA, 25 bp, SARS Virus
atgacacagtagattggtgttaggt

SEQ ID NO: 196528 - DNA, 25 bp, SARS Virus
tgacacagtaggatggtgttaggta

SEQ ID NO: 196529 - DNA, 25 bp, SARS Virus
gacacagtaggtaggtgttaggtaa

SEQ ID NO: 196530 - DNA, 25 bp, SARS Virus
acacagtaggttagtgttaggtaat

SEQ ID NO: 196531 - DNA, 25 bp, SARS Virus
cacagtaggttgatgttaggtaatt

SEQ ID NO: 196532 - DNA, 25 bp, SARS Virus
acagtaggttggagttaggtaattc

SEQ ID NO: 196533 - DNA, 25 bp, SARS Virus
cagtaggttggtattaggtaattct

SEQ ID NO: 196534 - DNA, 25 bp, SARS Virus
agtaggttggtgataggtaattctc

SEQ ID NO: 196535 - DNA, 25 bp, SARS Virus
gtaggttggtgtaaggtaattctca

SEQ ID NO: 196536 - DNA, 25 bp, SARS Virus
taggttggtgttaggtaattctcaa

SEQ ID NO: 196537 - DNA, 25 bp, SARS Virus
aggttggtgttaagtaattctcaac

SEQ ID NO: 196538 - DNA, 25 bp, SARS Virus
ggttggtgttagataattctcaaca

SEQ ID NO: 196539 - DNA, 25 bp, SARS Virus
gttggtgttaggaaattctcaacat

SEQ ID NO: 196540 - DNA, 25 bp, SARS Virus
ttggtgttaggtaattctcaacatc

SEQ ID NO: 196541 - DNA, 25 bp, SARS Virus
tggtgttaggtaattctcaacatca

SEQ ID NO: 196542 - DNA, 25 bp, SARS Virus
ggtgttaggtaaatctcaacatcaa

SEQ ID NO: 196543 - DNA, 25 bp, SARS Virus
gtgttaggtaatactcaacatcaag

SEQ ID NO: 196544 - DNA, 25 bp, SARS Virus
tgttaggtaattatcaacatcaagg

SEQ ID NO: 196545 - DNA, 25 bp, SARS Virus
gttaggtaattcacaacatcaaggt

SEQ ID NO: 196546 - DNA, 25 bp, SARS Virus
ttaggtaattctaaacatcaaggtg

SEQ ID NO: 196547 - DNA, 25 bp, SARS Virus
taggtaattctcaacatcaaggtgt

SEQ ID NO: 196548 - DNA, 25 bp, SARS Virus
aggtaattctcaacatcaaggtgtc

SEQ ID NO: 196549 - DNA, 25 bp, SARS Virus
ggtaattctcaaaatcaaggtgtcc

SEQ ID NO: 196550 - DNA, 25 bp, SARS Virus
gtaattctcaacatcaaggtgtcca

SEQ ID NO: 196551 - DNA, 25 bp, SARS Virus
taattctcaacaacaaggtgtccaa

SEQ ID NO: 196552 - DNA, 25 bp, SARS Virus
aattctcaacataaaggtgtccaat

SEQ ID NO: 196553 - DNA, 25 bp, SARS Virus
attctcaacatcaaggtgtccaatg

SEQ ID NO: 196554 - DNA, 25 bp, SARS Virus
ttctcaacatcaaggtgtccaatga

SEQ ID NO: 196555 - DNA, 25 bp, SARS Virus
tctcaacatcaaagtgtccaatgaa

SEQ ID NO: 196556 - DNA, 25 bp, SARS Virus
ctcaacatcaagatgtccaatgaac

SEQ ID NO: 196557 - DNA, 25 bp, SARS Virus
tcaacatcaaggagtccaatgaaca

SEQ ID NO: 196558 - DNA, 25 bp, SARS Virus
caacatcaaggtatccaatgaacat

SEQ ID NO: 196559 - DNA, 25 bp, SARS Virus
aacatcaaggtgaccaatgaacatg

SEQ ID NO: 196560 - DNA, 25 bp, SARS Virus
acatcaaggtgtacaatgaacatgg

SEQ ID NO: 196561 - DNA, 25 bp, SARS Virus
catcaaggtgtcaaatgaacatggt

SEQ ID NO: 196562 - DNA, 25 bp, SARS Virus
atcaaggtgtccaatgaacatggta

SEQ ID NO: 196563 - DNA, 25 bp, SARS Virus
tcaaggtgtccaatgaacatggtac

SEQ ID NO: 196564 - DNA, 25 bp, SARS Virus
caaggtgtccaaagaacatggtacg

SEQ ID NO: 196565 - DNA, 25 bp, SARS Virus
aaggtgtccaataaacatggtacgt

SEQ ID NO: 196566 - DNA, 25 bp, SARS Virus
aggtgtccaatgaacatggtacgtg

SEQ ID NO: 196567 - DNA, 25 bp, SARS Virus
ggtgtccaatgaacatggtacgtgg

SEQ ID NO: 196568 - DNA, 25 bp, SARS Virus
gtgtccaatgaaaatggtacgtggg

SEQ ID NO: 196569 - DNA, 25 bp, SARS Virus
tgtccaatgaacatggtacgtggga

SEQ ID NO: 196570 - DNA, 25 bp, SARS Virus
gtccaatgaacaaggtacgtgggaa

SEQ ID NO: 196571 - DNA, 25 bp, SARS Virus
tccaatgaacatagtacgtgggaag

SEQ ID NO: 196572 - DNA, 25 bp, SARS Virus
ccaatgaacatgatacgtgggaagt

SEQ ID NO: 196573 - DNA, 25 bp, SARS Virus
caatgaacatggaacgtgggaagtt

SEQ ID NO: 196574 - DNA, 25 bp, SARS Virus
aatgaacatggtacgtgggaagttg

SEQ ID NO: 196575 - DNA, 25 bp, SARS Virus
atgaacatggtaagtgggaagttga

SEQ ID NO: 196576 - DNA, 25 bp, SARS Virus
tgaacatggtacatgggaagttgaa

SEQ ID NO: 196577 - DNA, 25 bp, SARS Virus
gaacatggtacgagggaagttgaaa

SEQ ID NO: 196578 - DNA, 25 bp, SARS Virus
aacatggtacgtaggaagttgaaac

SEQ ID NO: 196579 - DNA, 25 bp, SARS Virus
acatggtacgtgagaagttgaaacg

SEQ ID NO: 196580 - DNA, 25 bp, SARS Virus
catggtacgtggaaagttgaaacgg

SEQ ID NO: 196581 - DNA, 25 bp, SARS Virus
atggtacgtgggaagttgaaacgga

SEQ ID NO: 196582 - DNA, 25 bp, SARS Virus
tggtacgtgggaagttgaaacggac

SEQ ID NO: 196583 - DNA, 25 bp, SARS Virus
ggtacgtgggaaattgaaacggact

SEQ ID NO: 196584 - DNA, 25 bp, SARS Virus
gtacgtgggaagatgaaacggactg

SEQ ID NO: 196585 - DNA, 25 bp, SARS Virus
tacgtgggaagtagaaacggactgc

SEQ ID NO: 196586 - DNA, 25 bp, SARS Virus
acgtgggaagttaaaacggactgcc

SEQ ID NO: 196587 - DNA, 25 bp, SARS Virus
cgtgggaagttgaaacggactgccc

SEQ ID NO: 196588 - DNA, 25 bp, SARS Virus
gtgggaagttgaaacggactgccct

SEQ ID NO: 196589 - DNA, 25 bp, SARS Virus
tgggaagttgaaacggactgccctt

SEQ ID NO: 196590 - DNA, 25 bp, SARS Virus
gggaagttgaaaaggactgccctta

SEQ ID NO: 196591 - DNA, 25 bp, SARS Virus
ggaagttgaaacagactgcccttac

SEQ ID NO: 196592 - DNA, 25 bp, SARS Virus
gaagttgaaacgaactgcccttacg

SEQ ID NO: 196593 - DNA, 25 bp, SARS Virus
aagttgaaacggactgcccttacgg

SEQ ID NO: 196594 - DNA, 25 bp, SARS Virus
agttgaaacggaatgcccttacggt

SEQ ID NO: 196595 - DNA, 25 bp, SARS Virus
gttgaaacggacagcccttacggta

SEQ ID NO: 196596 - DNA, 25 bp, SARS Virus
ttgaaacggactacccttacggtaa

SEQ ID NO: 196597 - DNA, 25 bp, SARS Virus
tgaaacggactgaccttacggtaaa

SEQ ID NO: 196598 - DNA, 25 bp, SARS Virus
gaaacggactgcacttacggtaaaa

SEQ ID NO: 196599 - DNA, 25 bp, SARS Virus
aaacggactgccattacggtaaaag

SEQ ID NO: 196600 - DNA, 25 bp, SARS Virus
aacggactgcccatacggtaaaagg

SEQ ID NO: 196601 - DNA, 25 bp, SARS Virus
acggactgccctaacggtaaaagga

SEQ ID NO: 196602 - DNA, 25 bp, SARS Virus
cggactgcccttacggtaaaaggat

SEQ ID NO: 196603 - DNA, 25 bp, SARS Virus
ggactgcccttaaggtaaaaggatt

SEQ ID NO: 196604 - DNA, 25 bp, SARS Virus
gactgcccttacagtaaaaggattt

SEQ ID NO: 196605 - DNA, 25 bp, SARS Virus
actgcccttacgataaaaggatttt

SEQ ID NO: 196606 - DNA, 25 bp, SARS Virus
ctgcccttacggaaaaaggattttg

SEQ ID NO: 196607 - DNA, 25 bp, SARS Virus
tgcccttacggtaaaaggattttgg

SEQ ID NO: 196608 - DNA, 25 bp, SARS Virus
gcccttacggtaaaaggattttggt

SEQ ID NO: 196609 - DNA, 25 bp, SARS Virus
cccttacggtaaaaggattttggtg

SEQ ID NO: 196610 - DNA, 25 bp, SARS Virus
ccttacggtaaaaggattttggtga

SEQ ID NO: 196611 - DNA, 25 bp, SARS Virus
cttacggtaaaaagattttggtgag

SEQ ID NO: 196612 - DNA, 25 bp, SARS Virus
ttacggtaaaagaattttggtgaga

SEQ ID NO: 196613 - DNA, 25 bp, SARS Virus
tacggtaaaaggattttggtgagac

SEQ ID NO: 196614 - DNA, 25 bp, SARS Virus
acggtaaaaggaatttggtgagacg

SEQ ID NO: 196615 - DNA, 25 bp, SARS Virus
cggtaaaaggatattggtgagacgt

SEQ ID NO: 196616 - DNA, 25 bp, SARS Virus
ggtaaaaggattatggtgagacgtc

SEQ ID NO: 196617 - DNA, 25 bp, SARS Virus
gtaaaaggatttaggtgagacgtct

SEQ ID NO: 196618 - DNA, 25 bp, SARS Virus
taaaaggattttagtgagacgtctt

SEQ ID NO: 196619 - DNA, 25 bp, SARS Virus
aaaaggattttgatgagacgtcttg

SEQ ID NO: 196620 - DNA, 25 bp, SARS Virus
aaaggattttggagagacgtcttgt

SEQ ID NO: 196621 - DNA, 25 bp, SARS Virus
aaggattttggtaagacgtcttgtc

SEQ ID NO: 196622 - DNA, 25 bp, SARS Virus
aggattttggtgagacgtcttgtcg

SEQ ID NO: 196623 - DNA, 25 bp, SARS Virus
ggattttggtgaaacgtcttgtcgt

SEQ ID NO: 196624 - DNA, 25 bp, SARS Virus
gattttggtgagacgtcttgtcgtc

SEQ ID NO: 196625 - DNA, 25 bp, SARS Virus
attttggtgagaagtcttgtcgtct

SEQ ID NO: 196626 - DNA, 25 bp, SARS Virus
ttttggtgagacatcttgtcgtctt

SEQ ID NO: 196627 - DNA, 25 bp, SARS Virus
tttggtgagacgacttgtcgtcttc

SEQ ID NO: 196628 - DNA, 25 bp, SARS Virus
ttggtgagacgtattgtcgtcttca

SEQ ID NO: 196629 - DNA, 25 bp, SARS Virus
tggtgagacgtcatgtcgtcttcac

SEQ ID NO: 196630 - DNA, 25 bp, SARS Virus
ggtgagacgtctagtcgtcttcact

SEQ ID NO: 196631 - DNA, 25 bp, SARS Virus
gtgagacgtcttatcgtcttcacta

SEQ ID NO: 196632 - DNA, 25 bp, SARS Virus
tgagacgtcttgacgtcttcactaa

SEQ ID NO: 196633 - DNA, 25 bp, SARS Virus
gagacgtcttgtagtcttcactaac

SEQ ID NO: 196634 - DNA, 25 bp, SARS Virus
agacgtcttgtcatcttcactaact

SEQ ID NO: 196635 - DNA, 25 bp, SARS Virus
gacgtcttgtcgacttcactaacta

SEQ ID NO: 196636 - DNA, 25 bp, SARS Virus
acgtcttgtcgtattcactaactac

SEQ ID NO: 196637 - DNA, 25 bp, SARS Virus
cgtcttgtcgtcatcactaactaca

SEQ ID NO: 196638 - DNA, 25 bp, SARS Virus
gtcttgtcgtctacactaactacag

SEQ ID NO: 196639 - DNA, 25 bp, SARS Virus
tcttgtcgtcttaactaactacaga

SEQ ID NO: 196640 - DNA, 25 bp, SARS Virus
cttgtcgtcttcactaactacagac

SEQ ID NO: 196641 - DNA, 25 bp, SARS Virus
ttgtcgtcttcaataactacagaca

SEQ ID NO: 196642 - DNA, 25 bp, SARS Virus
tgtcgtcttcacaaactacagacac

SEQ ID NO: 196643 - DNA, 25 bp, SARS Virus
gtcgtcttcactaactacagacacc

SEQ ID NO: 196644 - DNA, 25 bp, SARS Virus
tcgtcttcactaactacagacacca

SEQ ID NO: 196645 - DNA, 25 bp, SARS Virus
cgtcttcactaaatacagacaccac

SEQ ID NO: 196646 - DNA, 25 bp, SARS Virus
gtcttcactaacaacagacaccacc

SEQ ID NO: 196647 - DNA, 25 bp, SARS Virus
tcttcactaactacagacaccacca

SEQ ID NO: 196648 - DNA, 25 bp, SARS Virus
cttcactaactaaagacaccaccaa

SEQ ID NO: 196649 - DNA, 25 bp, SARS Virus
ttcactaactacagacaccaccaac

SEQ ID NO: 196650 - DNA, 25 bp, SARS Virus
tcactaactacaaacaccaccaacc

SEQ ID NO: 196651 - DNA, 25 bp, SARS Virus
cactaactacagacaccaccaacca

SEQ ID NO: 196652 - DNA, 25 bp, SARS Virus
actaactacagaaaccaccaaccat

SEQ ID NO: 196653 - DNA, 25 bp, SARS Virus
ctaactacagacaccaccaaccatc

SEQ ID NO: 196654 - DNA, 25 bp, SARS Virus
taactacagacaacaccaaccatct

SEQ ID NO: 196655 - DNA, 25 bp, SARS Virus
aactacagacacaaccaaccatctc

SEQ ID NO: 196656 - DNA, 25 bp, SARS Virus
actacagacaccaccaaccatctct

SEQ ID NO: 196657 - DNA, 25 bp, SARS Virus
ctacagacaccaacaaccatctctt

SEQ ID NO: 196658 - DNA, 25 bp, SARS Virus
tacagacaccacaaaccatctcttg

SEQ ID NO: 196659 - DNA, 25 bp, SARS Virus
acagacaccaccaaccatctcttgt

SEQ ID NO: 196660 - DNA, 25 bp, SARS Virus
cagacaccaccaaccatctcttgta

SEQ ID NO: 196661 - DNA, 25 bp, SARS Virus
agacaccaccaaacatctcttgtag

SEQ ID NO: 196662 - DNA, 25 bp, SARS Virus
gacaccaccaacaatctcttgtagt

SEQ ID NO: 196663 - DNA, 25 bp, SARS Virus
acaccaccaaccatctcttgtagtc

SEQ ID NO: 196664 - DNA, 25 bp, SARS Virus
caccaccaaccaactcttgtagtcg

SEQ ID NO: 196665 - DNA, 25 bp, SARS Virus
accaccaaccatatcttgtagtcgt

SEQ ID NO: 196666 - DNA, 25 bp, SARS Virus
ccaccaaccatcacttgtagtcgtg

SEQ ID NO: 196667 - DNA, 25 bp, SARS Virus
caccaaccatctattgtagtcgtgg

SEQ ID NO: 196668 - DNA, 25 bp, SARS Virus
accaaccatctcatgtagtcgtgga

SEQ ID NO: 196669 - DNA, 25 bp, SARS Virus
ccaaccatctctagtagtcgtggac

SEQ ID NO: 196670 - DNA, 25 bp, SARS Virus
caaccatctcttatagtcgtggact

SEQ ID NO: 196671 - DNA, 25 bp, SARS Virus
aaccatctcttgaagtcgtggactc

SEQ ID NO: 196672 - DNA, 25 bp, SARS Virus
accatctcttgtagtcgtggactca

SEQ ID NO: 196673 - DNA, 25 bp, SARS Virus
ccatctcttgtaatcgtggactcaa

SEQ ID NO: 196674 - DNA, 25 bp, SARS Virus
catctcttgtagacgtggactcaac

SEQ ID NO: 196675 - DNA, 25 bp, SARS Virus
atctcttgtagtagtggactcaacg

SEQ ID NO: 196676 - DNA, 25 bp, SARS Virus
tctcttgtagtcatggactcaacga

SEQ ID NO: 196677 - DNA, 25 bp, SARS Virus
ctcttgtagtcgaggactcaacgat

SEQ ID NO: 196678 - DNA, 25 bp, SARS Virus
tcttgtagtcgtagactcaacgatt

SEQ ID NO: 196679 - DNA, 25 bp, SARS Virus
cttgtagtcgtgaactcaacgattt

SEQ ID NO: 196680 - DNA, 25 bp, SARS Virus
ttgtagtcgtggactcaacgatttc

SEQ ID NO: 196681 - DNA, 25 bp, SARS Virus
tgtagtcgtggaatcaacgatttca

SEQ ID NO: 196682 - DNA, 25 bp, SARS Virus
gtagtcgtggacacaacgatttcag

SEQ ID NO: 196683 - DNA, 25 bp, SARS Virus
tagtcgtggactaaacgatttcagt

SEQ ID NO: 196684 - DNA, 25 bp, SARS Virus
agtcgtggactcaacgatttcagta

SEQ ID NO: 196685 - DNA, 25 bp, SARS Virus
gtcgtggactcaacgatttcagtaa

SEQ ID NO: 196686 - DNA, 25 bp, SARS Virus
tcgtggactcaaagatttcagtaaa

SEQ ID NO: 196687 - DNA, 25 bp, SARS Virus
cgtggactcaacaatttcagtaaat

SEQ ID NO: 196688 - DNA, 25 bp, SARS Virus
gtggactcaacgatttcagtaaatc

SEQ ID NO: 196689 - DNA, 25 bp, SARS Virus
tggactcaacgaattcagtaaatct

SEQ ID NO: 196690 - DNA, 25 bp, SARS Virus
ggactcaacgatatcagtaaatctc

SEQ ID NO: 196691 - DNA, 25 bp, SARS Virus
gactcaacgattacagtaaatctcg

SEQ ID NO: 196692 - DNA, 25 bp, SARS Virus
actcaacgatttaagtaaatctcgg

SEQ ID NO: 196693 - DNA, 25 bp, SARS Virus
ctcaacgatttcagtaaatctcgga

SEQ ID NO: 196694 - DNA, 25 bp, SARS Virus
tcaacgatttcaataaatctcggaa

SEQ ID NO: 196695 - DNA, 25 bp, SARS Virus
caacgatttcagaaaatctcggaaa

SEQ ID NO: 196696 - DNA, 25 bp, SARS Virus
aacgatttcagtaaatctcggaaac

SEQ ID NO: 196697 - DNA, 25 bp, SARS Virus
taattcctttctcggaaattaccat

SEQ ID NO: 196698 - DNA, 25 bp, SARS Virus
aattcctttcttcgaaattaccata

SEQ ID NO: 196699 - DNA, 25 bp, SARS Virus
attcctttcttgcaaattaccatac

SEQ ID NO: 196700 - DNA, 25 bp, SARS Virus
ttcctttcttggcaattaccatact

SEQ ID NO: 196701 - DNA, 25 bp, SARS Virus
tcctttcttggacattaccatacta

SEQ ID NO: 196702 - DNA, 25 bp, SARS Virus
cctttcttggaacttaccatactaa

SEQ ID NO: 196703 - DNA, 25 bp, SARS Virus
ctttcttggaaactaccatactaat

SEQ ID NO: 196704 - DNA, 25 bp, SARS Virus
tttcttggaaatcaccatactaatc

SEQ ID NO: 196705 - DNA, 25 bp, SARS Virus
ttcttggaaattcccatactaatcc

SEQ ID NO: 196706 - DNA, 25 bp, SARS Virus
tcttggaaattaccatactaatcca

SEQ ID NO: 196707 - DNA, 25 bp, SARS Virus
cttggaaattaccatactaatccag

SEQ ID NO: 196708 - DNA, 25 bp, SARS Virus
ttggaaattaccctactaatccaga

SEQ ID NO: 196709 - DNA, 25 bp, SARS Virus
tggaaattaccacactaatccagag

SEQ ID NO: 196710 - DNA, 25 bp, SARS Virus
ggaaattaccatcctaatccagagt

SEQ ID NO: 196711 - DNA, 25 bp, SARS Virus
gaaattaccatactaatccagagta

SEQ ID NO: 196712 - DNA, 25 bp, SARS Virus
aaattaccataccaatccagagtac

SEQ ID NO: 196713 - DNA, 25 bp, SARS Virus
aattaccatactcatccagagtacc

SEQ ID NO: 196714 - DNA, 25 bp, SARS Virus
attaccatactactccagagtaccg

SEQ ID NO: 196715 - DNA, 25 bp, SARS Virus
ttaccatactaacccagagtaccgt

SEQ ID NO: 196716 - DNA, 25 bp, SARS Virus
taccatactaatccagagtaccgtg

SEQ ID NO: 196717 - DNA, 25 bp, SARS Virus
accatactaatccagagtaccgtgt

SEQ ID NO: 196718 - DNA, 25 bp, SARS Virus
ccatactaatcccgagtaccgtgtg

SEQ ID NO: 196719 - DNA, 25 bp, SARS Virus
catactaatccacagtaccgtgtga

SEQ ID NO: 196720 - DNA, 25 bp, SARS Virus
atactaatccagcgtaccgtgtgac

SEQ ID NO: 196721 - DNA, 25 bp, SARS Virus
tactaatccagactaccgtgtgact

SEQ ID NO: 196722 - DNA, 25 bp, SARS Virus
actaatccagagcaccgtgtgacta

SEQ ID NO: 196723 - DNA, 25 bp, SARS Virus
ctaatccagagtcccgtgtgactat

SEQ ID NO: 196724 - DNA, 25 bp, SARS Virus
taatccagagtaccgtgtgactatt

SEQ ID NO: 196725 - DNA, 25 bp, SARS Virus
aatccagagtaccgtgtgactattt

SEQ ID NO: 196726 - DNA, 25 bp, SARS Virus
atccagagtaccctgtgactatttg

SEQ ID NO: 196727 - DNA, 25 bp, SARS Virus
tccagagtaccgcgtgactatttgt

SEQ ID NO: 196728 - DNA, 25 bp, SARS Virus
ccagagtaccgtctgactatttgtg

SEQ ID NO: 196729 - DNA, 25 bp, SARS Virus
cagagtaccgtgcgactatttgtgg

SEQ ID NO: 196730 - DNA, 25 bp, SARS Virus
agagtaccgtgtcactatttgtggt

SEQ ID NO: 196731 - DNA, 25 bp, SARS Virus
gagtaccgtgtgcctatttgtggtc

SEQ ID NO: 196732 - DNA, 25 bp, SARS Virus
agtaccgtgtgactatttgtggtct

SEQ ID NO: 196733 - DNA, 25 bp, SARS Virus
gtaccgtgtgaccatttgtggtcta

SEQ ID NO: 196734 - DNA, 25 bp, SARS Virus
taccgtgtgactctttgtggtctac

SEQ ID NO: 196735 - DNA, 25 bp, SARS Virus
accgtgtgactacttgtggtctacc

SEQ ID NO: 196736 - DNA, 25 bp, SARS Virus
ccgtgtgactatctgtggtctacca

SEQ ID NO: 196737 - DNA, 25 bp, SARS Virus
cgtgtgactattcgtggtctaccac

SEQ ID NO: 196738 - DNA, 25 bp, SARS Virus
gtgtgactatttctggtctaccact

SEQ ID NO: 196739 - DNA, 25 bp, SARS Virus
tgtgactatttgcggtctaccactt

SEQ ID NO: 196740 - DNA, 25 bp, SARS Virus
gtgactatttgtcgtctaccacttg

SEQ ID NO: 196741 - DNA, 25 bp, SARS Virus
tgactatttgtgctctaccacttgg

SEQ ID NO: 196742 - DNA, 25 bp, SARS Virus
gactatttgtggcctaccacttggt

SEQ ID NO: 196743 - DNA, 25 bp, SARS Virus
actatttgtggtctaccacttggta

SEQ ID NO: 196744 - DNA, 25 bp, SARS Virus
ctatttgtggtccaccacttggtaa

SEQ ID NO: 196745 - DNA, 25 bp, SARS Virus
tatttgtggtctcccacttggtaac

SEQ ID NO: 196746 - DNA, 25 bp, SARS Virus
atttgtggtctaccacttggtaaca

SEQ ID NO: 196747 - DNA, 25 bp, SARS Virus
tttgtggtctaccacttggtaacat

SEQ ID NO: 196748 - DNA, 25 bp, SARS Virus
ttgtggtctaccccttggtaacatc

SEQ ID NO: 196749 - DNA, 25 bp, SARS Virus
tgtggtctaccacttggtaacatcg

SEQ ID NO: 196750 - DNA, 25 bp, SARS Virus
gtggtctaccacctggtaacatcgt

SEQ ID NO: 196751 - DNA, 25 bp, SARS Virus
tggtctaccactcggtaacatcgta

SEQ ID NO: 196752 - DNA, 25 bp, SARS Virus
ggtctaccacttcgtaacatcgtac

SEQ ID NO: 196753 - DNA, 25 bp, SARS Virus
gtctaccacttgctaacatcgtacg

SEQ ID NO: 196754 - DNA, 25 bp, SARS Virus
tctaccacttggcaacatcgtacga

SEQ ID NO: 196755 - DNA, 25 bp, SARS Virus
ctaccacttggtcacatcgtacgat

SEQ ID NO: 196756 - DNA, 25 bp, SARS Virus
taccacttggtaccatcgtacgatc

SEQ ID NO: 196757 - DNA, 25 bp, SARS Virus
accacttggtaacatcgtacgatct

SEQ ID NO: 196758 - DNA, 25 bp, SARS Virus
ccacttggtaacctcgtacgatctt

SEQ ID NO: 196759 - DNA, 25 bp, SARS Virus
cacttggtaacaccgtacgatcttg

SEQ ID NO: 196760 - DNA, 25 bp, SARS Virus
acttggtaacatcgtacgatcttga

SEQ ID NO: 196761 - DNA, 25 bp, SARS Virus
cttggtaacatcctacgatcttgac

SEQ ID NO: 196762 - DNA, 25 bp, SARS Virus
ttggtaacatcgcacgatcttgact

SEQ ID NO: 196763 - DNA, 25 bp, SARS Virus
tggtaacatcgtccgatcttgactt

SEQ ID NO: 196764 - DNA, 25 bp, SARS Virus
ggtaacatcgtacgatcttgacttt

SEQ ID NO: 196765 - DNA, 25 bp, SARS Virus
gtaacatcgtaccatcttgactttt

SEQ ID NO: 196766 - DNA, 25 bp, SARS Virus
taacatcgtacgctcttgactttta

SEQ ID NO: 196767 - DNA, 25 bp, SARS Virus
aacatcgtacgaccttgacttttac

SEQ ID NO: 196768 - DNA, 25 bp, SARS Virus
acatcgtacgatcttgacttttaca

SEQ ID NO: 196769 - DNA, 25 bp, SARS Virus
catcgtacgatcctgacttttacaa

SEQ ID NO: 196770 - DNA, 25 bp, SARS Virus
atcgtacgatctcgacttttacaaa

SEQ ID NO: 196771 - DNA, 25 bp, SARS Virus
tcgtacgatcttcacttttacaaac

SEQ ID NO: 196772 - DNA, 25 bp, SARS Virus
cgtacgatcttgccttttacaaact

SEQ ID NO: 196773 - DNA, 25 bp, SARS Virus
gtacgatcttgacttttacaaactg

SEQ ID NO: 196774 - DNA, 25 bp, SARS Virus
tacgatcttgacctttacaaactgg

SEQ ID NO: 196775 - DNA, 25 bp, SARS Virus
acgatcttgactcttacaaactggt

SEQ ID NO: 196776 - DNA, 25 bp, SARS Virus
cgatcttgacttctacaaactggtc

SEQ ID NO: 196777 - DNA, 25 bp, SARS Virus
gatcttgactttcacaaactggtcc

SEQ ID NO: 196778 - DNA, 25 bp, SARS Virus
atcttgacttttccaaactggtcca

SEQ ID NO: 196779 - DNA, 25 bp, SARS Virus
tcttgacttttacaaactggtccaa

SEQ ID NO: 196780 - DNA, 25 bp, SARS Virus
cttgacttttaccaactggtccaac

SEQ ID NO: 196781 - DNA, 25 bp, SARS Virus
ttgacttttacacactggtccaacc

SEQ ID NO: 196782 - DNA, 25 bp, SARS Virus
tgacttttacaacctggtccaacct

SEQ ID NO: 196783 - DNA, 25 bp, SARS Virus
gacttttacaaactggtccaaccta

SEQ ID NO: 196784 - DNA, 25 bp, SARS Virus
acttttacaaaccggtccaacctat

SEQ ID NO: 196785 - DNA, 25 bp, SARS Virus
cttttacaaactcgtccaacctatg

SEQ ID NO: 196786 - DNA, 25 bp, SARS Virus
ttttacaaactgctccaacctatgc

SEQ ID NO: 196787 - DNA, 25 bp, SARS Virus
tttacaaactggcccaacctatgcc

SEQ ID NO: 196788 - DNA, 25 bp, SARS Virus
ttacaaactggtccaacctatgcct

SEQ ID NO: 196789 - DNA, 25 bp, SARS Virus
tacaaactggtccaacctatgcctg

SEQ ID NO: 196790 - DNA, 25 bp, SARS Virus
acaaactggtcccacctatgcctgt

SEQ ID NO: 196791 - DNA, 25 bp, SARS Virus
caaactggtccaccctatgcctgtt

SEQ ID NO: 196792 - DNA, 25 bp, SARS Virus
aaactggtccaacctatgcctgttt

SEQ ID NO: 196793 - DNA, 25 bp, SARS Virus
aactggtccaacctatgcctgttta

SEQ ID NO: 196794 - DNA, 25 bp, SARS Virus
actggtccaacccatgcctgtttaa

SEQ ID NO: 196795 - DNA, 25 bp, SARS Virus
ctggtccaacctctgcctgtttaaa

SEQ ID NO: 196796 - DNA, 25 bp, SARS Virus
tggtccaacctacgcctgtttaaat

SEQ ID NO: 196797 - DNA, 25 bp, SARS Virus
ggtccaacctatccctgtttaaata

SEQ ID NO: 196798 - DNA, 25 bp, SARS Virus
gtccaacctatgcctgtttaaatat

SEQ ID NO: 196799 - DNA, 25 bp, SARS Virus
tccaacctatgcctgtttaaatatg

SEQ ID NO: 196800 - DNA, 25 bp, SARS Virus
ccaacctatgcccgtttaaatatga

SEQ ID NO: 196801 - DNA, 25 bp, SARS Virus
caacctatgcctctttaaatatgaa

SEQ ID NO: 196802 - DNA, 25 bp, SARS Virus
aacctatgcctgcttaaatatgaac

SEQ ID NO: 196803 - DNA, 25 bp, SARS Virus
acctatgcctgtctaaatatgaacc

SEQ ID NO: 196804 - DNA, 25 bp, SARS Virus
cctatgcctgttcaaatatgaaccc

SEQ ID NO: 196805 - DNA, 25 bp, SARS Virus
ctatgcctgtttcaatatgaaccca

SEQ ID NO: 196806 - DNA, 25 bp, SARS Virus
tatgcctgtttacatatgaacccac

SEQ ID NO: 196807 - DNA, 25 bp, SARS Virus
atgcctgtttaactatgaacccaca

SEQ ID NO: 196808 - DNA, 25 bp, SARS Virus
tgcctgtttaaacatgaacccacag

SEQ ID NO: 196809 - DNA, 25 bp, SARS Virus
gcctgtttaaatctgaacccacaga

SEQ ID NO: 196810 - DNA, 25 bp, SARS Virus
cctgtttaaatacgaacccacagaa

SEQ ID NO: 196811 - DNA, 25 bp, SARS Virus
ctgtttaaatatcaacccacagaat

SEQ ID NO: 196812 - DNA, 25 bp, SARS Virus
tgtttaaatatgcacccacagaatc

SEQ ID NO: 196813 - DNA, 25 bp, SARS Virus
gtttaaatatgaccccacagaatcc

SEQ ID NO: 196814 - DNA, 25 bp, SARS Virus
tttaaatatgaacccacagaatccc

SEQ ID NO: 196815 - DNA, 25 bp, SARS Virus
ttaaatatgaacccacagaatccca

SEQ ID NO: 196816 - DNA, 25 bp, SARS Virus
taaatatgaacccacagaatcccaa

SEQ ID NO: 196817 - DNA, 25 bp, SARS Virus
aaatatgaacccccagaatcccaat

SEQ ID NO: 196818 - DNA, 25 bp, SARS Virus
aatatgaacccacagaatcccaatc

SEQ ID NO: 196819 - DNA, 25 bp, SARS Virus
atatgaacccaccgaatcccaatct

SEQ ID NO: 196820 - DNA, 25 bp, SARS Virus
tatgaacccacacaatcccaatctt

SEQ ID NO: 196821 - DNA, 25 bp, SARS Virus
atgaacccacagcatcccaatcttc

SEQ ID NO: 196822 - DNA, 25 bp, SARS Virus
tgaacccacagactcccaatcttca

SEQ ID NO: 196823 - DNA, 25 bp, SARS Virus
gaacccacagaaccccaatcttcat

SEQ ID NO: 196824 - DNA, 25 bp, SARS Virus
aacccacagaatcccaatcttcata

SEQ ID NO: 196825 - DNA, 25 bp, SARS Virus
acccacagaatcccaatcttcatag

SEQ ID NO: 196826 - DNA, 25 bp, SARS Virus
cccacagaatcccaatcttcatagt

SEQ ID NO: 196827 - DNA, 25 bp, SARS Virus
ccacagaatccccatcttcatagtt

SEQ ID NO: 196828 - DNA, 25 bp, SARS Virus
cacagaatcccactcttcatagttg

SEQ ID NO: 196829 - DNA, 25 bp, SARS Virus
acagaatcccaaccttcatagttga

SEQ ID NO: 196830 - DNA, 25 bp, SARS Virus
cagaatcccaatcttcatagttgaa

SEQ ID NO: 196831 - DNA, 25 bp, SARS Virus
agaatcccaatcctcatagttgaaa

SEQ ID NO: 196832 - DNA, 25 bp, SARS Virus
gaatcccaatctccatagttgaaat

SEQ ID NO: 196833 - DNA, 25 bp, SARS Virus
aatcccaatcttcatagttgaaatt

SEQ ID NO: 196834 - DNA, 25 bp, SARS Virus
atcccaatcttcctagttgaaattc

SEQ ID NO: 196835 - DNA, 25 bp, SARS Virus
tcccaatcttcacagttgaaattcg

SEQ ID NO: 196836 - DNA, 25 bp, SARS Virus
cccaatcttcatcgttgaaattcgg

SEQ ID NO: 196837 - DNA, 25 bp, SARS Virus
ccaatcttcatacttgaaattcgga

SEQ ID NO: 196838 - DNA, 25 bp, SARS Virus
caatcttcatagctgaaattcggat

SEQ ID NO: 196839 - DNA, 25 bp, SARS Virus
aatcttcatagtcgaaattcggatt

SEQ ID NO: 196840 - DNA, 25 bp, SARS Virus
atcttcatagttcaaattcggattc

SEQ ID NO: 196841 - DNA, 25 bp, SARS Virus
tcttcatagttgcaattcggattcg

SEQ ID NO: 196842 - DNA, 25 bp, SARS Virus
cttcatagttgacattcggattcgt

SEQ ID NO: 196843 - DNA, 25 bp, SARS Virus
ttcatagttgaacttcggattcgtc

SEQ ID NO: 196844 - DNA, 25 bp, SARS Virus
tcatagttgaaactcggattcgtct

SEQ ID NO: 196845 - DNA, 25 bp, SARS Virus
catagttgaaatccggattcgtctg

SEQ ID NO: 196846 - DNA, 25 bp, SARS Virus
atagttgaaattcggattcgtctgt

SEQ ID NO: 196847 - DNA, 25 bp, SARS Virus
tagttgaaattccgattcgtctgtt

SEQ ID NO: 196848 - DNA, 25 bp, SARS Virus
agttgaaattcgcattcgtctgtta

SEQ ID NO: 196849 - DNA, 25 bp, SARS Virus
gttgaaattcggcttcgtctgttaa

SEQ ID NO: 196850 - DNA, 25 bp, SARS Virus
ttgaaattcggactcgtctgttaaa

SEQ ID NO: 196851 - DNA, 25 bp, SARS Virus
tgaaattcggatccgtctgttaaaa

SEQ ID NO: 196852 - DNA, 25 bp, SARS Virus
gaaattcggattcgtctgttaaaac

SEQ ID NO: 196853 - DNA, 25 bp, SARS Virus
aaattcggattcctctgttaaaacg

SEQ ID NO: 196854 - DNA, 25 bp, SARS Virus
aattcggattcgcctgttaaaacgt

SEQ ID NO: 196855 - DNA, 25 bp, SARS Virus
attcggattcgtctgttaaaacgta

SEQ ID NO: 196856 - DNA, 25 bp, SARS Virus
ttcggattcgtccgttaaaacgtat

SEQ ID NO: 196857 - DNA, 25 bp, SARS Virus
tcggattcgtctcttaaaacgtatc

SEQ ID NO: 196858 - DNA, 25 bp, SARS Virus
cggattcgtctgctaaaacgtatct

SEQ ID NO: 196859 - DNA, 25 bp, SARS Virus
ggattcgtctgtcaaaacgtatctt

SEQ ID NO: 196860 - DNA, 25 bp, SARS Virus
gattcgtctgttcaaacgtatctta

SEQ ID NO: 196861 - DNA, 25 bp, SARS Virus
attcgtctgttacaacgtatcttac

SEQ ID NO: 196862 - DNA, 25 bp, SARS Virus
ttcgtctgttaacacgtatcttacc

SEQ ID NO: 196863 - DNA, 25 bp, SARS Virus
tcgtctgttaaaccgtatcttaccg

SEQ ID NO: 196864 - DNA, 25 bp, SARS Virus
cgtctgttaaaacgtatcttaccgg

SEQ ID NO: 196865 - DNA, 25 bp, SARS Virus
gtctgttaaaacctatcttaccggt

SEQ ID NO: 196866 - DNA, 25 bp, SARS Virus
tctgttaaaacgcatcttaccggtt

SEQ ID NO: 196867 - DNA, 25 bp, SARS Virus
ctgttaaaacgtctcttaccggtta

SEQ ID NO: 196868 - DNA, 25 bp, SARS Virus
tgttaaaacgtaccttaccggttat

SEQ ID NO: 196869 - DNA, 25 bp, SARS Virus
gttaaaacgtatcttaccggttatt

SEQ ID NO: 196870 - DNA, 25 bp, SARS Virus
ttaaaacgtatcctaccggttattg

SEQ ID NO: 196871 - DNA, 25 bp, SARS Virus
taaaacgtatctcaccggttattgt

SEQ ID NO: 196872 - DNA, 25 bp, SARS Virus
aaaacgtatcttcccggttattgtg

SEQ ID NO: 196873 - DNA, 25 bp, SARS Virus
aaacgtatcttaccggttattgtgc

SEQ ID NO: 196874 - DNA, 25 bp, SARS Virus
aacgtatcttaccggttattgtgct

SEQ ID NO: 196875 - DNA, 25 bp, SARS Virus
acgtatcttacccgttattgtgctt

SEQ ID NO: 196876 - DNA, 25 bp, SARS Virus
cgtatcttaccgcttattgtgcttc

SEQ ID NO: 196877 - DNA, 25 bp, SARS Virus
gtatcttaccggctattgtgcttca

SEQ ID NO: 196878 - DNA, 25 bp, SARS Virus
tatcttaccggtcattgtgcttcaa

SEQ ID NO: 196879 - DNA, 25 bp, SARS Virus
atcttaccggttcttgtgcttcaac

SEQ ID NO: 196880 - DNA, 25 bp, SARS Virus
tcttaccggttactgtgcttcaact

SEQ ID NO: 196881 - DNA, 25 bp, SARS Virus
cttaccggttatcgtgcttcaactt

SEQ ID NO: 196882 - DNA, 25 bp, SARS Virus
ttaccggttattctgcttcaacttg

SEQ ID NO: 196883 - DNA, 25 bp, SARS Virus
taccggttattgcgcttcaacttgt

SEQ ID NO: 196884 - DNA, 25 bp, SARS Virus
accggttattgtccttcaacttgta

SEQ ID NO: 196885 - DNA, 25 bp, SARS Virus
ccggttattgtgcttcaacttgtaa

SEQ ID NO: 196886 - DNA, 25 bp, SARS Virus
cggttattgtgcctcaacttgtaac

SEQ ID NO: 196887 - DNA, 25 bp, SARS Virus
ggttattgtgctccaacttgtaacg

SEQ ID NO: 196888 - DNA, 25 bp, SARS Virus
gttattgtgcttcaacttgtaacgg

SEQ ID NO: 196889 - DNA, 25 bp, SARS Virus
ttattgtgcttccacttgtaacggt

SEQ ID NO: 196890 - DNA, 25 bp, SARS Virus
tattgtgcttcaccttgtaacggtc

SEQ ID NO: 196891 - DNA, 25 bp, SARS Virus
attgtgcttcaacttgtaacggtcg

SEQ ID NO: 196892 - DNA, 25 bp, SARS Virus
ttgtgcttcaacctgtaacggtcgg

SEQ ID NO: 196893 - DNA, 25 bp, SARS Virus
tgtgcttcaactcgtaacggtcgga

SEQ ID NO: 196894 - DNA, 25 bp, SARS Virus
gtgcttcaacttctaacggtcggac

SEQ ID NO: 196895 - DNA, 25 bp, SARS Virus
tgcttcaacttgcaacggtcggact

SEQ ID NO: 196896 - DNA, 25 bp, SARS Virus
gcttcaacttgtcacggtcggactt

SEQ ID NO: 196897 - DNA, 25 bp, SARS Virus
cttcaacttgtaccggtcggacttg

SEQ ID NO: 196898 - DNA, 25 bp, SARS Virus
ttcaacttgtaacggtcggacttgt

SEQ ID NO: 196899 - DNA, 25 bp, SARS Virus
tcaacttgtaaccgtcggacttgtt

SEQ ID NO: 196900 - DNA, 25 bp, SARS Virus
caacttgtaacgctcggacttgttc

SEQ ID NO: 196901 - DNA, 25 bp, SARS Virus
aacttgtaacggccggacttgttct

SEQ ID NO: 196902 - DNA, 25 bp, SARS Virus
acttgtaacggtcggacttgttctt

SEQ ID NO: 196903 - DNA, 25 bp, SARS Virus
cttgtaacggtccgacttgttcttt

SEQ ID NO: 196904 - DNA, 25 bp, SARS Virus
ttgtaacggtcgcacttgttctttc

SEQ ID NO: 196905 - DNA, 25 bp, SARS Virus
tgtaacggtcggccttgttctttcg

SEQ ID NO: 196906 - DNA, 25 bp, SARS Virus
gtaacggtcggacttgttctttcga

SEQ ID NO: 196907 - DNA, 25 bp, SARS Virus
taacggtcggacctgttctttcgat

SEQ ID NO: 196908 - DNA, 25 bp, SARS Virus
aacggtcggactcgttctttcgata

SEQ ID NO: 196909 - DNA, 25 bp, SARS Virus
acggtcggacttcttctttcgatac

SEQ ID NO: 196910 - DNA, 25 bp, SARS Virus
cggtcggacttgctctttcgatacc

SEQ ID NO: 196911 - DNA, 25 bp, SARS Virus
ggtcggacttgtcctttcgatacca

SEQ ID NO: 196912 - DNA, 25 bp, SARS Virus
gtcggacttgttctttcgataccaa

SEQ ID NO: 196913 - DNA, 25 bp, SARS Virus
tcggacttgttccttcgataccaac

SEQ ID NO: 196914 - DNA, 25 bp, SARS Virus
cggacttgttctctcgataccaacc

SEQ ID NO: 196915 - DNA, 25 bp, SARS Virus
ggacttgttcttccgataccaacct

SEQ ID NO: 196916 - DNA, 25 bp, SARS Virus
gacttgttctttcgataccaaccta

SEQ ID NO: 196917 - DNA, 25 bp, SARS Virus
acttgttctttccataccaacctaa

SEQ ID NO: 196918 - DNA, 25 bp, SARS Virus
cttgttctttcgctaccaacctaaa

SEQ ID NO: 196919 - DNA, 25 bp, SARS Virus
ttgttctttcgacaccaacctaaac

SEQ ID NO: 196920 - DNA, 25 bp, SARS Virus
tgttctttcgatcccaacctaaacg

SEQ ID NO: 196921 - DNA, 25 bp, SARS Virus
gttctttcgataccaacctaaacgc

SEQ ID NO: 196922 - DNA, 25 bp, SARS Virus
ttctttcgataccaacctaaacgct

SEQ ID NO: 196923 - DNA, 25 bp, SARS Virus
tctttcgatacccacctaaacgctt

SEQ ID NO: 196924 - DNA, 25 bp, SARS Virus
ctttcgataccaccctaaacgctta

SEQ ID NO: 196925 - DNA, 25 bp, SARS Virus
tttcgataccaacctaaacgcttac

SEQ ID NO: 196926 - DNA, 25 bp, SARS Virus
ttcgataccaacctaaacgcttact

SEQ ID NO: 196927 - DNA, 25 bp, SARS Virus
tcgataccaacccaaacgcttactc

SEQ ID NO: 196928 - DNA, 25 bp, SARS Virus
cgataccaacctcaacgcttactcg

SEQ ID NO: 196929 - DNA, 25 bp, SARS Virus
gataccaacctacacgcttactcgt

SEQ ID NO: 196930 - DNA, 25 bp, SARS Virus
ataccaacctaaccgcttactcgtc

SEQ ID NO: 196931 - DNA, 25 bp, SARS Virus
taccaacctaaacgcttactcgtct

SEQ ID NO: 196932 - DNA, 25 bp, SARS Virus
accaacctaaacccttactcgtcta

SEQ ID NO: 196933 - DNA, 25 bp, SARS Virus
ccaacctaaacgcttactcgtctag

SEQ ID NO: 196934 - DNA, 25 bp, SARS Virus
caacctaaacgcctactcgtctaga

SEQ ID NO: 196935 - DNA, 25 bp, SARS Virus
aacctaaacgctcactcgtctagaa

SEQ ID NO: 196936 - DNA, 25 bp, SARS Virus
acctaaacgcttcctcgtctagaag

SEQ ID NO: 196937 - DNA, 25 bp, SARS Virus
cctaaacgcttactcgtctagaagt

SEQ ID NO: 196938 - DNA, 25 bp, SARS Virus
ctaaacgcttacccgtctagaagta

SEQ ID NO: 196939 - DNA, 25 bp, SARS Virus
taaacgcttactcgtctagaagtat

SEQ ID NO: 196940 - DNA, 25 bp, SARS Virus
aaacgcttactcctctagaagtatc

SEQ ID NO: 196941 - DNA, 25 bp, SARS Virus
aacgcttactcgcctagaagtatca

SEQ ID NO: 196942 - DNA, 25 bp, SARS Virus
acgcttactcgtctagaagtatcaa

SEQ ID NO: 196943 - DNA, 25 bp, SARS Virus
cgcttactcgtccagaagtatcaat

SEQ ID NO: 196944 - DNA, 25 bp, SARS Virus
gcttactcgtctcgaagtatcaatc

SEQ ID NO: 196945 - DNA, 25 bp, SARS Virus
cttactcgtctacaagtatcaatcc

SEQ ID NO: 196946 - DNA, 25 bp, SARS Virus
ttactcgtctagcagtatcaatcct

SEQ ID NO: 196947 - DNA, 25 bp, SARS Virus
tactcgtctagacgtatcaatccta

SEQ ID NO: 196948 - DNA, 25 bp, SARS Virus
actcgtctagaactatcaatcctaa

SEQ ID NO: 196949 - DNA, 25 bp, SARS Virus
ctcgtctagaagcatcaatcctaat

SEQ ID NO: 196950 - DNA, 25 bp, SARS Virus
tcgtctagaagtctcaatcctaatt

SEQ ID NO: 196951 - DNA, 25 bp, SARS Virus
cgtctagaagtaccaatcctaattc

SEQ ID NO: 196952 - DNA, 25 bp, SARS Virus
gtctagaagtatcaatcctaattcg

SEQ ID NO: 196953 - DNA, 25 bp, SARS Virus
tctagaagtatccatcctaattcgt

SEQ ID NO: 196954 - DNA, 25 bp, SARS Virus
ctagaagtatcactcctaattcgta

SEQ ID NO: 196955 - DNA, 25 bp, SARS Virus
tagaagtatcaaccctaattcgtac

SEQ ID NO: 196956 - DNA, 25 bp, SARS Virus
agaagtatcaatcctaattcgtaca

SEQ ID NO: 196957 - DNA, 25 bp, SARS Virus
gaagtatcaatcctaattcgtacag

SEQ ID NO: 196958 - DNA, 25 bp, SARS Virus
aagtatcaatcccaattcgtacaga

SEQ ID NO: 196959 - DNA, 25 bp, SARS Virus
agtatcaatcctcattcgtacagaa

SEQ ID NO: 196960 - DNA, 25 bp, SARS Virus
gtatcaatcctacttcgtacagaag

SEQ ID NO: 196961 - DNA, 25 bp, SARS Virus
tatcaatcctaactcgtacagaaga

SEQ ID NO: 196962 - DNA, 25 bp, SARS Virus
atcaatcctaatccgtacagaagac

SEQ ID NO: 196963 - DNA, 25 bp, SARS Virus
tcaatcctaattcgtacagaagacg

SEQ ID NO: 196964 - DNA, 25 bp, SARS Virus
caatcctaattcctacagaagacga

SEQ ID NO: 196965 - DNA, 25 bp, SARS Virus
aatcctaattcgcacagaagacgac

SEQ ID NO: 196966 - DNA, 25 bp, SARS Virus
atcctaattcgtccagaagacgaca

SEQ ID NO: 196967 - DNA, 25 bp, SARS Virus
tcctaattcgtacagaagacgacac

SEQ ID NO: 196968 - DNA, 25 bp, SARS Virus
cctaattcgtaccgaagacgacacg

SEQ ID NO: 196969 - DNA, 25 bp, SARS Virus
ctaattcgtacacaagacgacacgt

SEQ ID NO: 196970 - DNA, 25 bp, SARS Virus
taattcgtacagcagacgacacgtt

SEQ ID NO: 196971 - DNA, 25 bp, SARS Virus
aattcgtacagacgacgacacgttt

SEQ ID NO: 196972 - DNA, 25 bp, SARS Virus
attcgtacagaacacgacacgttta

SEQ ID NO: 196973 - DNA, 25 bp, SARS Virus
ttcgtacagaagccgacacgtttac

SEQ ID NO: 196974 - DNA, 25 bp, SARS Virus
tcgtacagaagacgacacgtttact

SEQ ID NO: 196975 - DNA, 25 bp, SARS Virus
cgtacagaagaccacacgtttactg

SEQ ID NO: 196976 - DNA, 25 bp, SARS Virus
gtacagaagacgccacgtttactgt

SEQ ID NO: 196977 - DNA, 25 bp, SARS Virus
tacagaagacgacacgtttactgta

SEQ ID NO: 196978 - DNA, 25 bp, SARS Virus
acagaagacgacccgtttactgtac

SEQ ID NO: 196979 - DNA, 25 bp, SARS Virus
cagaagacgacacgtttactgtaca

SEQ ID NO: 196980 - DNA, 25 bp, SARS Virus
agaagacgacacctttactgtacag

SEQ ID NO: 196981 - DNA, 25 bp, SARS Virus
gaagacgacacgcttactgtacaga

SEQ ID NO: 196982 - DNA, 25 bp, SARS Virus
aagacgacacgtctactgtacagaa

SEQ ID NO: 196983 - DNA, 25 bp, SARS Virus
agacgacacgttcactgtacagaac

SEQ ID NO: 196984 - DNA, 25 bp, SARS Virus
gacgacacgtttcctgtacagaacc

SEQ ID NO: 196985 - DNA, 25 bp, SARS Virus
acgacacgtttactgtacagaacct

SEQ ID NO: 196986 - DNA, 25 bp, SARS Virus
cgacacgtttaccgtacagaacctg

SEQ ID NO: 196987 - DNA, 25 bp, SARS Virus
gacacgtttactctacagaacctgt

SEQ ID NO: 196988 - DNA, 25 bp, SARS Virus
acacgtttactgcacagaacctgtc

SEQ ID NO: 196989 - DNA, 25 bp, SARS Virus
cacgtttactgtccagaacctgtca

SEQ ID NO: 196990 - DNA, 25 bp, SARS Virus
acgtttactgtacagaacctgtcat

SEQ ID NO: 196991 - DNA, 25 bp, SARS Virus
cgtttactgtaccgaacctgtcata

SEQ ID NO: 196992 - DNA, 25 bp, SARS Virus
gtttactgtacacaacctgtcatat

SEQ ID NO: 196993 - DNA, 25 bp, SARS Virus
tttactgtacagcacctgtcatatg

SEQ ID NO: 196994 - DNA, 25 bp, SARS Virus
ttactgtacagaccctgtcatatga

SEQ ID NO: 196995 - DNA, 25 bp, SARS Virus
tactgtacagaacctgtcatatgac

SEQ ID NO: 196996 - DNA, 25 bp, SARS Virus
actgtacagaacctgtcatatgaca

SEQ ID NO: 196997 - DNA, 25 bp, SARS Virus
ctgtacagaacccgtcatatgacac

SEQ ID NO: 196998 - DNA, 25 bp, SARS Virus
tgtacagaacctctcatatgacaca

SEQ ID NO: 196999 - DNA, 25 bp, SARS Virus
gtacagaacctgccatatgacacag

SEQ ID NO: 197000 - DNA, 25 bp, SARS Virus
tacagaacctgtcatatgacacagt

SEQ ID NO: 197001 - DNA, 25 bp, SARS Virus
acagaacctgtcctatgacacagta

SEQ ID NO: 197002 - DNA, 25 bp, SARS Virus
cagaacctgtcacatgacacagtag

SEQ ID NO: 197003 - DNA, 25 bp, SARS Virus
agaacctgtcatctgacacagtagg

SEQ ID NO: 197004 - DNA, 25 bp, SARS Virus
gaacctgtcatacgacacagtaggt

SEQ ID NO: 197005 - DNA, 25 bp, SARS Virus
aacctgtcatatcacacagtaggtt

SEQ ID NO: 197006 - DNA, 25 bp, SARS Virus
acctgtcatatgccacagtaggttg

SEQ ID NO: 197007 - DNA, 25 bp, SARS Virus
cctgtcatatgacacagtaggttgg

SEQ ID NO: 197008 - DNA, 25 bp, SARS Virus
ctgtcatatgacccagtaggttggt

SEQ ID NO: 197009 - DNA, 25 bp, SARS Virus
tgtcatatgacacagtaggttggtg

SEQ ID NO: 197010 - DNA, 25 bp, SARS Virus
gtcatatgacaccgtaggttggtgt

SEQ ID NO: 197011 - DNA, 25 bp, SARS Virus
tcatatgacacactaggttggtgtt

SEQ ID NO: 197012 - DNA, 25 bp, SARS Virus
catatgacacagcaggttggtgtta

SEQ ID NO: 197013 - DNA, 25 bp, SARS Virus
atatgacacagtcggttggtgttag

SEQ ID NO: 197014 - DNA, 25 bp, SARS Virus
tatgacacagtacgttggtgttagg

SEQ ID NO: 197015 - DNA, 25 bp, SARS Virus
atgacacagtagcttggtgttaggt

SEQ ID NO: 197016 - DNA, 25 bp, SARS Virus
tgacacagtaggctggtgttaggta

SEQ ID NO: 197017 - DNA, 25 bp, SARS Virus
gacacagtaggtcggtgttaggtaa

SEQ ID NO: 197018 - DNA, 25 bp, SARS Virus
acacagtaggttcgtgttaggtaat

SEQ ID NO: 197019 - DNA, 25 bp, SARS Virus
cacagtaggttgctgttaggtaatt

SEQ ID NO: 197020 - DNA, 25 bp, SARS Virus
acagtaggttggcgttaggtaattc

SEQ ID NO: 197021 - DNA, 25 bp, SARS Virus
cagtaggttggtcttaggtaattct

SEQ ID NO: 197022 - DNA, 25 bp, SARS Virus
agtaggttggtgctaggtaattctc

SEQ ID NO: 197023 - DNA, 25 bp, SARS Virus
gtaggttggtgtcaggtaattctca

SEQ ID NO: 197024 - DNA, 25 bp, SARS Virus
taggttggtgttcggtaattctcaa

SEQ ID NO: 197025 - DNA, 25 bp, SARS Virus
aggttggtgttacgtaattctcaac

SEQ ID NO: 197026 - DNA, 25 bp, SARS Virus
ggttggtgttagctaattctcaaca

SEQ ID NO: 197027 - DNA, 25 bp, SARS Virus
gttggtgttaggcaattctcaacat

SEQ ID NO: 197028 - DNA, 25 bp, SARS Virus
ttggtgttaggtcattctcaacatc

SEQ ID NO: 197029 - DNA, 25 bp, SARS Virus
tggtgttaggtacttctcaacatca

SEQ ID NO: 197030 - DNA, 25 bp, SARS Virus
ggtgttaggtaactctcaacatcaa

SEQ ID NO: 197031 - DNA, 25 bp, SARS Virus
gtgttaggtaatcctcaacatcaag

SEQ ID NO: 197032 - DNA, 25 bp, SARS Virus
tgttaggtaattctcaacatcaagg

SEQ ID NO: 197033 - DNA, 25 bp, SARS Virus
gttaggtaattcccaacatcaaggt

SEQ ID NO: 197034 - DNA, 25 bp, SARS Virus
ttaggtaattctcaacatcaaggtg

SEQ ID NO: 197035 - DNA, 25 bp, SARS Virus
taggtaattctccacatcaaggtgt

SEQ ID NO: 197036 - DNA, 25 bp, SARS Virus
aggtaattctcaccatcaaggtgtc

SEQ ID NO: 197037 - DNA, 25 bp, SARS Virus
ggtaattctcaacatcaaggtgtcc

SEQ ID NO: 197038 - DNA, 25 bp, SARS Virus
gtaattctcaacctcaaggtgtcca

SEQ ID NO: 197039 - DNA, 25 bp, SARS Virus
taattctcaacaccaaggtgtccaa

SEQ ID NO: 197040 - DNA, 25 bp, SARS Virus
aattctcaacatcaaggtgtccaat

SEQ ID NO: 197041 - DNA, 25 bp, SARS Virus
attctcaacatccaggtgtccaatg

SEQ ID NO: 197042 - DNA, 25 bp, SARS Virus
ttctcaacatcacggtgtccaatga

SEQ ID NO: 197043 - DNA, 25 bp, SARS Virus
tctcaacatcaacgtgtccaatgaa

SEQ ID NO: 197044 - DNA, 25 bp, SARS Virus
ctcaacatcaagctgtccaatgaac

SEQ ID NO: 197045 - DNA, 25 bp, SARS Virus
tcaacatcaaggcgtccaatgaaca

SEQ ID NO: 197046 - DNA, 25 bp, SARS Virus
caacatcaaggtctccaatgaacat

SEQ ID NO: 197047 - DNA, 25 bp, SARS Virus
aacatcaaggtgcccaatgaacatg

SEQ ID NO: 197048 - DNA, 25 bp, SARS Virus
acatcaaggtgtccaatgaacatgg

SEQ ID NO: 197049 - DNA, 25 bp, SARS Virus
catcaaggtgtccaatgaacatggt

SEQ ID NO: 197050 - DNA, 25 bp, SARS Virus
atcaaggtgtcccatgaacatggta

SEQ ID NO: 197051 - DNA, 25 bp, SARS Virus
tcaaggtgtccactgaacatggtac

SEQ ID NO: 197052 - DNA, 25 bp, SARS Virus
caaggtgtccaacgaacatggtacg

SEQ ID NO: 197053 - DNA, 25 bp, SARS Virus
aaggtgtccaatcaacatggtacgt

SEQ ID NO: 197054 - DNA, 25 bp, SARS Virus
aggtgtccaatgcacatggtacgtg

SEQ ID NO: 197055 - DNA, 25 bp, SARS Virus
ggtgtccaatgaccatggtacgtgg

SEQ ID NO: 197056 - DNA, 25 bp, SARS Virus
gtgtccaatgaacatggtacgtggg

SEQ ID NO: 197057 - DNA, 25 bp, SARS Virus
tgtccaatgaacctggtacgtggga

SEQ ID NO: 197058 - DNA, 25 bp, SARS Virus
gtccaatgaacacggtacgtgggaa

SEQ ID NO: 197059 - DNA, 25 bp, SARS Virus
tccaatgaacatcgtacgtgggaag

SEQ ID NO: 197060 - DNA, 25 bp, SARS Virus
ccaatgaacatgctacgtgggaagt

SEQ ID NO: 197061 - DNA, 25 bp, SARS Virus
caatgaacatggcacgtgggaagtt

SEQ ID NO: 197062 - DNA, 25 bp, SARS Virus
aatgaacatggtccgtgggaagttg

SEQ ID NO: 197063 - DNA, 25 bp, SARS Virus
atgaacatggtacgtgggaagttga

SEQ ID NO: 197064 - DNA, 25 bp, SARS Virus
tgaacatggtacctgggaagttgaa

SEQ ID NO: 197065 - DNA, 25 bp, SARS Virus
gaacatggtacgcgggaagttgaaa

SEQ ID NO: 197066 - DNA, 25 bp, SARS Virus
aacatggtacgtcggaagttgaaac

SEQ ID NO: 197067 - DNA, 25 bp, SARS Virus
acatggtacgtgcgaagttgaaacg

SEQ ID NO: 197068 - DNA, 25 bp, SARS Virus
catggtacgtggcaagttgaaacgg

SEQ ID NO: 197069 - DNA, 25 bp, SARS Virus
atggtacgtgggcagttgaaacgga

SEQ ID NO: 197070 - DNA, 25 bp, SARS Virus
tggtacgtgggacgttgaaacggac

SEQ ID NO: 197071 - DNA, 25 bp, SARS Virus
ggtacgtgggaacttgaaacggact

SEQ ID NO: 197072 - DNA, 25 bp, SARS Virus
gtacgtgggaagctgaaacggactg

SEQ ID NO: 197073 - DNA, 25 bp, SARS Virus
tacgtgggaagtcgaaacggactgc

SEQ ID NO: 197074 - DNA, 25 bp, SARS Virus
acgtgggaagttcaaacggactgcc

SEQ ID NO: 197075 - DNA, 25 bp, SARS Virus
cgtgggaagttgcaacggactgccc

SEQ ID NO: 197076 - DNA, 25 bp, SARS Virus
gtgggaagttgacacggactgccct

SEQ ID NO: 197077 - DNA, 25 bp, SARS Virus
tgggaagttgaaccggactgccctt

SEQ ID NO: 197078 - DNA, 25 bp, SARS Virus
gggaagttgaaacggactgccctta

SEQ ID NO: 197079 - DNA, 25 bp, SARS Virus
ggaagttgaaaccgactgcccttac

SEQ ID NO: 197080 - DNA, 25 bp, SARS Virus
gaagttgaaacgcactgcccttacg

SEQ ID NO: 197081 - DNA, 25 bp, SARS Virus
aagttgaaacggcctgcccttacgg

SEQ ID NO: 197082 - DNA, 25 bp, SARS Virus
agttgaaacggactgcccttacggt

SEQ ID NO: 197083 - DNA, 25 bp, SARS Virus
gttgaaacggaccgcccttacggta

SEQ ID NO: 197084 - DNA, 25 bp, SARS Virus
ttgaaacggactccccttacggtaa

SEQ ID NO: 197085 - DNA, 25 bp, SARS Virus
tgaaacggactgcccttacggtaaa

SEQ ID NO: 197086 - DNA, 25 bp, SARS Virus
gaaacggactgcccttacggtaaaa

SEQ ID NO: 197087 - DNA, 25 bp, SARS Virus
aaacggactgcccttacggtaaaag

SEQ ID NO: 197088 - DNA, 25 bp, SARS Virus
aacggactgcccctacggtaaaagg

SEQ ID NO: 197089 - DNA, 25 bp, SARS Virus
acggactgccctcacggtaaaagga

SEQ ID NO: 197090 - DNA, 25 bp, SARS Virus
cggactgcccttccggtaaaaggat

SEQ ID NO: 197091 - DNA, 25 bp, SARS Virus
ggactgcccttacggtaaaaggatt

SEQ ID NO: 197092 - DNA, 25 bp, SARS Virus
gactgcccttaccgtaaaaggattt

SEQ ID NO: 197093 - DNA, 25 bp, SARS Virus
actgcccttacgctaaaaggatttt

SEQ ID NO: 197094 - DNA, 25 bp, SARS Virus
ctgcccttacggcaaaaggattttg

SEQ ID NO: 197095 - DNA, 25 bp, SARS Virus
tgcccttacggtcaaaggattttgg

SEQ ID NO: 197096 - DNA, 25 bp, SARS Virus
gcccttacggtacaaggattttggt

SEQ ID NO: 197097 - DNA, 25 bp, SARS Virus
cccttacggtaacaggattttggtg

SEQ ID NO: 197098 - DNA, 25 bp, SARS Virus
ccttacggtaaacggattttggtga

SEQ ID NO: 197099 - DNA, 25 bp, SARS Virus
cttacggtaaaacgattttggtgag

SEQ ID NO: 197100 - DNA, 25 bp, SARS Virus
ttacggtaaaagcattttggtgaga

SEQ ID NO: 197101 - DNA, 25 bp, SARS Virus
tacggtaaaaggcttttggtgagac

SEQ ID NO: 197102 - DNA, 25 bp, SARS Virus
acggtaaaaggactttggtgagacg

SEQ ID NO: 197103 - DNA, 25 bp, SARS Virus
cggtaaaaggatcttggtgagacgt

SEQ ID NO: 197104 - DNA, 25 bp, SARS Virus
ggtaaaaggattctggtgagacgtc

SEQ ID NO: 197105 - DNA, 25 bp, SARS Virus
gtaaaaggatttcggtgagacgtct

SEQ ID NO: 197106 - DNA, 25 bp, SARS Virus
taaaaggattttcgtgagacgtctt

SEQ ID NO: 197107 - DNA, 25 bp, SARS Virus
aaaaggattttgctgagacgtcttg

SEQ ID NO: 197108 - DNA, 25 bp, SARS Virus
aaaggattttggcgagacgtcttgt

SEQ ID NO: 197109 - DNA, 25 bp, SARS Virus
aaggattttggtcagacgtcttgtc

SEQ ID NO: 197110 - DNA, 25 bp, SARS Virus
aggattttggtgcgacgtcttgtcg

SEQ ID NO: 197111 - DNA, 25 bp, SARS Virus
ggattttggtgacacgtcttgtcgt

SEQ ID NO: 197112 - DNA, 25 bp, SARS Virus
gattttggtgagccgtcttgtcgtc

SEQ ID NO: 197113 - DNA, 25 bp, SARS Virus
attttggtgagacgtcttgtcgtct

SEQ ID NO: 197114 - DNA, 25 bp, SARS Virus
ttttggtgagacctcttgtcgtctt

SEQ ID NO: 197115 - DNA, 25 bp, SARS Virus
tttggtgagacgccttgtcgtcttc

SEQ ID NO: 197116 - DNA, 25 bp, SARS Virus
ttggtgagacgtcttgtcgtcttca

SEQ ID NO: 197117 - DNA, 25 bp, SARS Virus
tggtgagacgtcctgtcgtcttcac

SEQ ID NO: 197118 - DNA, 25 bp, SARS Virus
ggtgagacgtctcgtcgtcttcact

SEQ ID NO: 197119 - DNA, 25 bp, SARS Virus
gtgagacgtcttctcgtcttcacta

SEQ ID NO: 197120 - DNA, 25 bp, SARS Virus
tgagacgtcttgccgtcttcactaa

SEQ ID NO: 197121 - DNA, 25 bp, SARS Virus
gagacgtcttgtcgtcttcactaac

SEQ ID NO: 197122 - DNA, 25 bp, SARS Virus
agacgtcttgtcctcttcactaact

SEQ ID NO: 197123 - DNA, 25 bp, SARS Virus
gacgtcttgtcgccttcactaacta

SEQ ID NO: 197124 - DNA, 25 bp, SARS Virus
acgtcttgtcgtcttcactaactac

SEQ ID NO: 197125 - DNA, 25 bp, SARS Virus
cgtcttgtcgtcctcactaactaca

SEQ ID NO: 197126 - DNA, 25 bp, SARS Virus
gtcttgtcgtctccactaactacag

SEQ ID NO: 197127 - DNA, 25 bp, SARS Virus
tcttgtcgtcttcactaactacaga

SEQ ID NO: 197128 - DNA, 25 bp, SARS Virus
cttgtcgtcttccctaactacagac

SEQ ID NO: 197129 - DNA, 25 bp, SARS Virus
ttgtcgtcttcactaactacagaca

SEQ ID NO: 197130 - DNA, 25 bp, SARS Virus
tgtcgtcttcaccaactacagacac

SEQ ID NO: 197131 - DNA, 25 bp, SARS Virus
gtcgtcttcactcactacagacacc

SEQ ID NO: 197132 - DNA, 25 bp, SARS Virus
tcgtcttcactacctacagacacca

SEQ ID NO: 197133 - DNA, 25 bp, SARS Virus
cgtcttcactaactacagacaccac

SEQ ID NO: 197134 - DNA, 25 bp, SARS Virus
gtcttcactaaccacagacaccacc

SEQ ID NO: 197135 - DNA, 25 bp, SARS Virus
tcttcactaactccagacaccacca

SEQ ID NO: 197136 - DNA, 25 bp, SARS Virus
cttcactaactacagacaccaccaa

SEQ ID NO: 197137 - DNA, 25 bp, SARS Virus
ttcactaactaccgacaccaccaac

SEQ ID NO: 197138 - DNA, 25 bp, SARS Virus
tcactaactacacacaccaccaacc

SEQ ID NO: 197139 - DNA, 25 bp, SARS Virus
cactaactacagccaccaccaacca

SEQ ID NO: 197140 - DNA, 25 bp, SARS Virus
actaactacagacaccaccaaccat

SEQ ID NO: 197141 - DNA, 25 bp, SARS Virus
ctaactacagaccccaccaaccatc

SEQ ID NO: 197142 - DNA, 25 bp, SARS Virus
taactacagacaccaccaaccatct

SEQ ID NO: 197143 - DNA, 25 bp, SARS Virus
aactacagacaccaccaaccatctc

SEQ ID NO: 197144 - DNA, 25 bp, SARS Virus
actacagacacccccaaccatctct

SEQ ID NO: 197145 - DNA, 25 bp, SARS Virus
ctacagacaccaccaaccatctctt

SEQ ID NO: 197146 - DNA, 25 bp, SARS Virus
tacagacaccaccaaccatctcttg

SEQ ID NO: 197147 - DNA, 25 bp, SARS Virus
acagacaccacccaccatctcttgt

SEQ ID NO: 197148 - DNA, 25 bp, SARS Virus
cagacaccaccacccatctcttgta

SEQ ID NO: 197149 - DNA, 25 bp, SARS Virus
agacaccaccaaccatctcttgtag

SEQ ID NO: 197150 - DNA, 25 bp, SARS Virus
gacaccaccaaccatctcttgtagt

SEQ ID NO: 197151 - DNA, 25 bp, SARS Virus
acaccaccaaccctctcttgtagtc

SEQ ID NO: 197152 - DNA, 25 bp, SARS Virus
caccaccaaccacctcttgtagtcg

SEQ ID NO: 197153 - DNA, 25 bp, SARS Virus
accaccaaccatctcttgtagtcgt

SEQ ID NO: 197154 - DNA, 25 bp, SARS Virus
ccaccaaccatcccttgtagtcgtg

SEQ ID NO: 197155 - DNA, 25 bp, SARS Virus
caccaaccatctcttgtagtcgtgg

SEQ ID NO: 197156 - DNA, 25 bp, SARS Virus
accaaccatctcctgtagtcgtgga

SEQ ID NO: 197157 - DNA, 25 bp, SARS Virus
ccaaccatctctcgtagtcgtggac

SEQ ID NO: 197158 - DNA, 25 bp, SARS Virus
caaccatctcttctagtcgtggact

SEQ ID NO: 197159 - DNA, 25 bp, SARS Virus
aaccatctcttgcagtcgtggactc

SEQ ID NO: 197160 - DNA, 25 bp, SARS Virus
accatctcttgtcgtcgtggactca

SEQ ID NO: 197161 - DNA, 25 bp, SARS Virus
ccatctcttgtactcgtggactcaa

SEQ ID NO: 197162 - DNA, 25 bp, SARS Virus
catctcttgtagccgtggactcaac

SEQ ID NO: 197163 - DNA, 25 bp, SARS Virus
atctcttgtagtcgtggactcaacg

SEQ ID NO: 197164 - DNA, 25 bp, SARS Virus
tctcttgtagtcctggactcaacga

SEQ ID NO: 197165 - DNA, 25 bp, SARS Virus
ctcttgtagtcgcggactcaacgat

SEQ ID NO: 197166 - DNA, 25 bp, SARS Virus
tcttgtagtcgtcgactcaacgatt

SEQ ID NO: 197167 - DNA, 25 bp, SARS Virus
cttgtagtcgtgcactcaacgattt

SEQ ID NO: 197168 - DNA, 25 bp, SARS Virus
ttgtagtcgtggcctcaacgatttc

SEQ ID NO: 197169 - DNA, 25 bp, SARS Virus
tgtagtcgtggactcaacgatttca

SEQ ID NO: 197170 - DNA, 25 bp, SARS Virus
gtagtcgtggacccaacgatttcag

SEQ ID NO: 197171 - DNA, 25 bp, SARS Virus
tagtcgtggactcaacgatttcagt

SEQ ID NO: 197172 - DNA, 25 bp, SARS Virus
agtcgtggactccacgatttcagta

SEQ ID NO: 197173 - DNA, 25 bp, SARS Virus
gtcgtggactcaccgatttcagtaa

SEQ ID NO: 197174 - DNA, 25 bp, SARS Virus
tcgtggactcaacgatttcagtaaa

SEQ ID NO: 197175 - DNA, 25 bp, SARS Virus
cgtggactcaaccatttcagtaaat

SEQ ID NO: 197176 - DNA, 25 bp, SARS Virus
gtggactcaacgctttcagtaaatc

SEQ ID NO: 197177 - DNA, 25 bp, SARS Virus
tggactcaacgacttcagtaaatct

SEQ ID NO: 197178 - DNA, 25 bp, SARS Virus
ggactcaacgatctcagtaaatctc

SEQ ID NO: 197179 - DNA, 25 bp, SARS Virus
gactcaacgattccagtaaatctcg

SEQ ID NO: 197180 - DNA, 25 bp, SARS Virus
actcaacgatttcagtaaatctcgg

SEQ ID NO: 197181 - DNA, 25 bp, SARS Virus
ctcaacgatttccgtaaatctcgga

SEQ ID NO: 197182 - DNA, 25 bp, SARS Virus
tcaacgatttcactaaatctcggaa

SEQ ID NO: 197183 - DNA, 25 bp, SARS Virus
caacgatttcagcaaatctcggaaa

SEQ ID NO: 197184 - DNA, 25 bp, SARS Virus
aacgatttcagtcaatctcggaaac

SEQ ID NO: 197185 - DNA, 25 bp, SARS Virus
taattcctttctgggaaattaccat

SEQ ID NO: 197186 - DNA, 25 bp, SARS Virus
aattcctttcttggaaattaccata

SEQ ID NO: 197187 - DNA, 25 bp, SARS Virus
attcctttcttggaaattaccatac

SEQ ID NO: 197188 - DNA, 25 bp, SARS Virus
ttcctttcttgggaattaccatact

SEQ ID NO: 197189 - DNA, 25 bp, SARS Virus
tcctttcttggagattaccatacta

SEQ ID NO: 197190 - DNA, 25 bp, SARS Virus
cctttcttggaagttaccatactaa

SEQ ID NO: 197191 - DNA, 25 bp, SARS Virus
ctttcttggaaagtaccatactaat

SEQ ID NO: 197192 - DNA, 25 bp, SARS Virus
tttcttggaaatgaccatactaatc

SEQ ID NO: 197193 - DNA, 25 bp, SARS Virus
ttcttggaaattgccatactaatcc

SEQ ID NO: 197194 - DNA, 25 bp, SARS Virus
tcttggaaattagcatactaatcca

SEQ ID NO: 197195 - DNA, 25 bp, SARS Virus
cttggaaattacgatactaatccag

SEQ ID NO: 197196 - DNA, 25 bp, SARS Virus
ttggaaattaccgtactaatccaga

SEQ ID NO: 197197 - DNA, 25 bp, SARS Virus
tggaaattaccagactaatccagag

SEQ ID NO: 197198 - DNA, 25 bp, SARS Virus
ggaaattaccatgctaatccagagt

SEQ ID NO: 197199 - DNA, 25 bp, SARS Virus
gaaattaccatagtaatccagagta

SEQ ID NO: 197200 - DNA, 25 bp, SARS Virus
aaattaccatacgaatccagagtac

SEQ ID NO: 197201 - DNA, 25 bp, SARS Virus
aattaccatactgatccagagtacc

SEQ ID NO: 197202 - DNA, 25 bp, SARS Virus
attaccatactagtccagagtaccg

SEQ ID NO: 197203 - DNA, 25 bp, SARS Virus
ttaccatactaagccagagtaccgt

SEQ ID NO: 197204 - DNA, 25 bp, SARS Virus
taccatactaatgcagagtaccgtg

SEQ ID NO: 197205 - DNA, 25 bp, SARS Virus
accatactaatcgagagtaccgtgt

SEQ ID NO: 197206 - DNA, 25 bp, SARS Virus
ccatactaatccggagtaccgtgtg

SEQ ID NO: 197207 - DNA, 25 bp, SARS Virus
catactaatccagagtaccgtgtga

SEQ ID NO: 197208 - DNA, 25 bp, SARS Virus
atactaatccagggtaccgtgtgac

SEQ ID NO: 197209 - DNA, 25 bp, SARS Virus
tactaatccagagtaccgtgtgact

SEQ ID NO: 197210 - DNA, 25 bp, SARS Virus
actaatccagaggaccgtgtgacta

SEQ ID NO: 197211 - DNA, 25 bp, SARS Virus
ctaatccagagtgccgtgtgactat

SEQ ID NO: 197212 - DNA, 25 bp, SARS Virus
taatccagagtagcgtgtgactatt

SEQ ID NO: 197213 - DNA, 25 bp, SARS Virus
aatccagagtacggtgtgactattt

SEQ ID NO: 197214 - DNA, 25 bp, SARS Virus
atccagagtaccgtgtgactatttg

SEQ ID NO: 197215 - DNA, 25 bp, SARS Virus
tccagagtaccgggtgactatttgt

SEQ ID NO: 197216 - DNA, 25 bp, SARS Virus
ccagagtaccgtgtgactatttgtg

SEQ ID NO: 197217 - DNA, 25 bp, SARS Virus
cagagtaccgtgggactatttgtgg

SEQ ID NO: 197218 - DNA, 25 bp, SARS Virus
agagtaccgtgtgactatttgtggt

SEQ ID NO: 197219 - DNA, 25 bp, SARS Virus
gagtaccgtgtggctatttgtggtc

SEQ ID NO: 197220 - DNA, 25 bp, SARS Virus
agtaccgtgtgagtatttgtggtct

SEQ ID NO: 197221 - DNA, 25 bp, SARS Virus
gtaccgtgtgacgatttgtggtcta

SEQ ID NO: 197222 - DNA, 25 bp, SARS Virus
taccgtgtgactgtttgtggtctac

SEQ ID NO: 197223 - DNA, 25 bp, SARS Virus
accgtgtgactagttgtggtctacc

SEQ ID NO: 197224 - DNA, 25 bp, SARS Virus
ccgtgtgactatgtgtggtctacca

SEQ ID NO: 197225 - DNA, 25 bp, SARS Virus
cgtgtgactattggtggtctaccac

SEQ ID NO: 197226 - DNA, 25 bp, SARS Virus
gtgtgactatttgtggtctaccact

SEQ ID NO: 197227 - DNA, 25 bp, SARS Virus
tgtgactatttggggtctaccactt

SEQ ID NO: 197228 - DNA, 25 bp, SARS Virus
gtgactatttgtggtctaccacttg

SEQ ID NO: 197229 - DNA, 25 bp, SARS Virus
tgactatttgtggtctaccacttgg

SEQ ID NO: 197230 - DNA, 25 bp, SARS Virus
gactatttgtgggctaccacttggt

SEQ ID NO: 197231 - DNA, 25 bp, SARS Virus
actatttgtggtgtaccacttggta

SEQ ID NO: 197232 - DNA, 25 bp, SARS Virus
ctatttgtggtcgaccacttggtaa

SEQ ID NO: 197233 - DNA, 25 bp, SARS Virus
tatttgtggtctgccacttggtaac

SEQ ID NO: 197234 - DNA, 25 bp, SARS Virus
atttgtggtctagcacttggtaaca

SEQ ID NO: 197235 - DNA, 25 bp, SARS Virus
tttgtggtctacgacttggtaacat

SEQ ID NO: 197236 - DNA, 25 bp, SARS Virus
ttgtggtctaccgcttggtaacatc

SEQ ID NO: 197237 - DNA, 25 bp, SARS Virus
tgtggtctaccagttggtaacatcg

SEQ ID NO: 197238 - DNA, 25 bp, SARS Virus
gtggtctaccacgtggtaacatcgt

SEQ ID NO: 197239 - DNA, 25 bp, SARS Virus
tggtctaccactgggtaacatcgta

SEQ ID NO: 197240 - DNA, 25 bp, SARS Virus
ggtctaccacttggtaacatcgtac

SEQ ID NO: 197241 - DNA, 25 bp, SARS Virus
gtctaccacttggtaacatcgtacg

SEQ ID NO: 197242 - DNA, 25 bp, SARS Virus
tctaccacttgggaacatcgtacga

SEQ ID NO: 197243 - DNA, 25 bp, SARS Virus
ctaccacttggtgacatcgtacgat

SEQ ID NO: 197244 - DNA, 25 bp, SARS Virus
taccacttggtagcatcgtacgatc

SEQ ID NO: 197245 - DNA, 25 bp, SARS Virus
accacttggtaagatcgtacgatct

SEQ ID NO: 197246 - DNA, 25 bp, SARS Virus
ccacttggtaacgtcgtacgatctt

SEQ ID NO: 197247 - DNA, 25 bp, SARS Virus
cacttggtaacagcgtacgatcttg

SEQ ID NO: 197248 - DNA, 25 bp, SARS Virus
acttggtaacatggtacgatcttga

SEQ ID NO: 197249 - DNA, 25 bp, SARS Virus
cttggtaacatcgtacgatcttgac

SEQ ID NO: 197250 - DNA, 25 bp, SARS Virus
ttggtaacatcggacgatcttgact

SEQ ID NO: 197251 - DNA, 25 bp, SARS Virus
tggtaacatcgtgcgatcttgactt

SEQ ID NO: 197252 - DNA, 25 bp, SARS Virus
ggtaacatcgtaggatcttgacttt

SEQ ID NO: 197253 - DNA, 25 bp, SARS Virus
gtaacatcgtacgatcttgactttt

SEQ ID NO: 197254 - DNA, 25 bp, SARS Virus
taacatcgtacggtcttgactttta

SEQ ID NO: 197255 - DNA, 25 bp, SARS Virus
aacatcgtacgagcttgacttttac

SEQ ID NO: 197256 - DNA, 25 bp, SARS Virus
acatcgtacgatgttgacttttaca

SEQ ID NO: 197257 - DNA, 25 bp, SARS Virus
catcgtacgatcgtgacttttacaa

SEQ ID NO: 197258 - DNA, 25 bp, SARS Virus
atcgtacgatctggacttttacaaa

SEQ ID NO: 197259 - DNA, 25 bp, SARS Virus
tcgtacgatcttgacttttacaaac

SEQ ID NO: 197260 - DNA, 25 bp, SARS Virus
cgtacgatcttggcttttacaaact

SEQ ID NO: 197261 - DNA, 25 bp, SARS Virus
gtacgatcttgagttttacaaactg

SEQ ID NO: 197262 - DNA, 25 bp, SARS Virus
tacgatcttgacgtttacaaactgg

SEQ ID NO: 197263 - DNA, 25 bp, SARS Virus
acgatcttgactgttacaaactggt

SEQ ID NO: 197264 - DNA, 25 bp, SARS Virus
cgatcttgacttgtacaaactggtc

SEQ ID NO: 197265 - DNA, 25 bp, SARS Virus
gatcttgactttgacaaactggtcc

SEQ ID NO: 197266 - DNA, 25 bp, SARS Virus
atcttgacttttgcaaactggtcca

SEQ ID NO: 197267 - DNA, 25 bp, SARS Virus
tcttgacttttagaaactggtccaa

SEQ ID NO: 197268 - DNA, 25 bp, SARS Virus
cttgacttttacgaactggtccaac

SEQ ID NO: 197269 - DNA, 25 bp, SARS Virus
ttgacttttacagactggtccaacc

SEQ ID NO: 197270 - DNA, 25 bp, SARS Virus
tgacttttacaagctggtccaacct

SEQ ID NO: 197271 - DNA, 25 bp, SARS Virus
gacttttacaaagtggtccaaccta

SEQ ID NO: 197272 - DNA, 25 bp, SARS Virus
acttttacaaacgggtccaacctat

SEQ ID NO: 197273 - DNA, 25 bp, SARS Virus
cttttacaaactggtccaacctatg

SEQ ID NO: 197274 - DNA, 25 bp, SARS Virus
ttttacaaactggtccaacctatgc

SEQ ID NO: 197275 - DNA, 25 bp, SARS Virus
tttacaaactgggccaacctatgcc

SEQ ID NO: 197276 - DNA, 25 bp, SARS Virus
ttacaaactggtgcaacctatgcct

SEQ ID NO: 197277 - DNA, 25 bp, SARS Virus
tacaaactggtcgaacctatgcctg

SEQ ID NO: 197278 - DNA, 25 bp, SARS Virus
acaaactggtccgacctatgcctgt

SEQ ID NO: 197279 - DNA, 25 bp, SARS Virus
caaactggtccagcctatgcctgtt

SEQ ID NO: 197280 - DNA, 25 bp, SARS Virus
aaactggtccaagctatgcctgttt

SEQ ID NO: 197281 - DNA, 25 bp, SARS Virus
aactggtccaacgtatgcctgttta

SEQ ID NO: 197282 - DNA, 25 bp, SARS Virus
actggtccaaccgatgcctgtttaa

SEQ ID NO: 197283 - DNA, 25 bp, SARS Virus
ctggtccaacctgtgcctgtttaaa

SEQ ID NO: 197284 - DNA, 25 bp, SARS Virus
tggtccaacctaggcctgtttaaat

SEQ ID NO: 197285 - DNA, 25 bp, SARS Virus
ggtccaacctatgcctgtttaaata

SEQ ID NO: 197286 - DNA, 25 bp, SARS Virus
gtccaacctatggctgtttaaatat

SEQ ID NO: 197287 - DNA, 25 bp, SARS Virus
tccaacctatgcgtgtttaaatatg

SEQ ID NO: 197288 - DNA, 25 bp, SARS Virus
ccaacctatgccggtttaaatatga

SEQ ID NO: 197289 - DNA, 25 bp, SARS Virus
caacctatgcctgtttaaatatgaa

SEQ ID NO: 197290 - DNA, 25 bp, SARS Virus
aacctatgcctggttaaatatgaac

SEQ ID NO: 197291 - DNA, 25 bp, SARS Virus
acctatgcctgtgtaaatatgaacc

SEQ ID NO: 197292 - DNA, 25 bp, SARS Virus
cctatgcctgttgaaatatgaaccc

SEQ ID NO: 197293 - DNA, 25 bp, SARS Virus
ctatgcctgtttgaatatgaaccca

SEQ ID NO: 197294 - DNA, 25 bp, SARS Virus
tatgcctgtttagatatgaacccac

SEQ ID NO: 197295 - DNA, 25 bp, SARS Virus
atgcctgtttaagtatgaacccaca

SEQ ID NO: 197296 - DNA, 25 bp, SARS Virus
tgcctgtttaaagatgaacccacag

SEQ ID NO: 197297 - DNA, 25 bp, SARS Virus
gcctgtttaaatgtgaacccacaga

SEQ ID NO: 197298 - DNA, 25 bp, SARS Virus
cctgtttaaataggaacccacagaa

SEQ ID NO: 197299 - DNA, 25 bp, SARS Virus
ctgtttaaatatgaacccacagaat

SEQ ID NO: 197300 - DNA, 25 bp, SARS Virus
tgtttaaatatggacccacagaatc

SEQ ID NO: 197301 - DNA, 25 bp, SARS Virus
gtttaaatatgagcccacagaatcc

SEQ ID NO: 197302 - DNA, 25 bp, SARS Virus
tttaaatatgaagccacagaatccc

SEQ ID NO: 197303 - DNA, 25 bp, SARS Virus
ttaaatatgaacgcacagaatccca

SEQ ID NO: 197304 - DNA, 25 bp, SARS Virus
taaatatgaaccgacagaatcccaa

SEQ ID NO: 197305 - DNA, 25 bp, SARS Virus
aaatatgaacccgcagaatcccaat

SEQ ID NO: 197306 - DNA, 25 bp, SARS Virus
aatatgaacccagagaatcccaatc

SEQ ID NO: 197307 - DNA, 25 bp, SARS Virus
atatgaacccacggaatcccaatct

SEQ ID NO: 197308 - DNA, 25 bp, SARS Virus
tatgaacccacagaatcccaatctt

SEQ ID NO: 197309 - DNA, 25 bp, SARS Virus
atgaacccacaggatcccaatcttc

SEQ ID NO: 197310 - DNA, 25 bp, SARS Virus
tgaacccacagagtcccaatcttca

SEQ ID NO: 197311 - DNA, 25 bp, SARS Virus
gaacccacagaagcccaatcttcat

SEQ ID NO: 197312 - DNA, 25 bp, SARS Virus
aacccacagaatgccaatcttcata

SEQ ID NO: 197313 - DNA, 25 bp, SARS Virus
acccacagaatcgcaatcttcatag

SEQ ID NO: 197314 - DNA, 25 bp, SARS Virus
cccacagaatccgaatcttcatagt

SEQ ID NO: 197315 - DNA, 25 bp, SARS Virus
ccacagaatcccgatcttcatagtt

SEQ ID NO: 197316 - DNA, 25 bp, SARS Virus
cacagaatcccagtcttcatagttg

SEQ ID NO: 197317 - DNA, 25 bp, SARS Virus
acagaatcccaagcttcatagttga

SEQ ID NO: 197318 - DNA, 25 bp, SARS Virus
cagaatcccaatgttcatagttgaa

SEQ ID NO: 197319 - DNA, 25 bp, SARS Virus
agaatcccaatcgtcatagttgaaa

SEQ ID NO: 197320 - DNA, 25 bp, SARS Virus
gaatcccaatctgcatagttgaaat

SEQ ID NO: 197321 - DNA, 25 bp, SARS Virus
aatcccaatcttgatagttgaaatt

SEQ ID NO: 197322 - DNA, 25 bp, SARS Virus
atcccaatcttcgtagttgaaattc

SEQ ID NO: 197323 - DNA, 25 bp, SARS Virus
tcccaatcttcagagttgaaattcg

SEQ ID NO: 197324 - DNA, 25 bp, SARS Virus
cccaatcttcatggttgaaattcgg

SEQ ID NO: 197325 - DNA, 25 bp, SARS Virus
ccaatcttcatagttgaaattcgga

SEQ ID NO: 197326 - DNA, 25 bp, SARS Virus
caatcttcataggtgaaattcggat

SEQ ID NO: 197327 - DNA, 25 bp, SARS Virus
aatcttcatagtggaaattcggatt

SEQ ID NO: 197328 - DNA, 25 bp, SARS Virus
atcttcatagttgaaattcggattc

SEQ ID NO: 197329 - DNA, 25 bp, SARS Virus
tcttcatagttggaattcggattcg

SEQ ID NO: 197330 - DNA, 25 bp, SARS Virus
cttcatagttgagattcggattcgt

SEQ ID NO: 197331 - DNA, 25 bp, SARS Virus
ttcatagttgaagttcggattcgtc

SEQ ID NO: 197332 - DNA, 25 bp, SARS Virus
tcatagttgaaagtcggattcgtct

SEQ ID NO: 197333 - DNA, 25 bp, SARS Virus
catagttgaaatgcggattcgtctg

SEQ ID NO: 197334 - DNA, 25 bp, SARS Virus
atagttgaaattgggattcgtctgt

SEQ ID NO: 197335 - DNA, 25 bp, SARS Virus
tagttgaaattcggattcgtctgtt

SEQ ID NO: 197336 - DNA, 25 bp, SARS Virus
agttgaaattcggattcgtctgtta

SEQ ID NO: 197337 - DNA, 25 bp, SARS Virus
gttgaaattcgggttcgtctgttaa

SEQ ID NO: 197338 - DNA, 25 bp, SARS Virus
ttgaaattcggagtcgtctgttaaa

SEQ ID NO: 197339 - DNA, 25 bp, SARS Virus
tgaaattcggatgcgtctgttaaaa

SEQ ID NO: 197340 - DNA, 25 bp, SARS Virus
gaaattcggattggtctgttaaaac

SEQ ID NO: 197341 - DNA, 25 bp, SARS Virus
aaattcggattcgtctgttaaaacg

SEQ ID NO: 197342 - DNA, 25 bp, SARS Virus
aattcggattcggctgttaaaacgt

SEQ ID NO: 197343 - DNA, 25 bp, SARS Virus
attcggattcgtgtgttaaaacgta

SEQ ID NO: 197344 - DNA, 25 bp, SARS Virus
ttcggattcgtcggttaaaacgtat

SEQ ID NO: 197345 - DNA, 25 bp, SARS Virus
tcggattcgtctgttaaaacgtatc

SEQ ID NO: 197346 - DNA, 25 bp, SARS Virus
cggattcgtctggtaaaacgtatct

SEQ ID NO: 197347 - DNA, 25 bp, SARS Virus
ggattcgtctgtgaaaacgtatctt

SEQ ID NO: 197348 - DNA, 25 bp, SARS Virus
gattcgtctgttgaaacgtatctta

SEQ ID NO: 197349 - DNA, 25 bp, SARS Virus
attcgtctgttagaacgtatcttac

SEQ ID NO: 197350 - DNA, 25 bp, SARS Virus
ttcgtctgttaagacgtatcttacc

SEQ ID NO: 197351 - DNA, 25 bp, SARS Virus
tcgtctgttaaagcgtatcttaccg

SEQ ID NO: 197352 - DNA, 25 bp, SARS Virus
cgtctgttaaaaggtatcttaccgg

SEQ ID NO: 197353 - DNA, 25 bp, SARS Virus
gtctgttaaaacgtatcttaccggt

SEQ ID NO: 197354 - DNA, 25 bp, SARS Virus
tctgttaaaacggatcttaccggtt

SEQ ID NO: 197355 - DNA, 25 bp, SARS Virus
ctgttaaaacgtgtcttaccggtta

SEQ ID NO: 197356 - DNA, 25 bp, SARS Virus
tgttaaaacgtagcttaccggttat

SEQ ID NO: 197357 - DNA, 25 bp, SARS Virus
gttaaaacgtatgttaccggttatt

SEQ ID NO: 197358 - DNA, 25 bp, SARS Virus
ttaaaacgtatcgtaccggttattg

SEQ ID NO: 197359 - DNA, 25 bp, SARS Virus
taaaacgtatctgaccggttattgt

SEQ ID NO: 197360 - DNA, 25 bp, SARS Virus
aaaacgtatcttgccggttattgtg

SEQ ID NO: 197361 - DNA, 25 bp, SARS Virus
aaacgtatcttagcggttattgtgc

SEQ ID NO: 197362 - DNA, 25 bp, SARS Virus
aacgtatcttacgggttattgtgct

SEQ ID NO: 197363 - DNA, 25 bp, SARS Virus
acgtatcttaccggttattgtgctt

SEQ ID NO: 197364 - DNA, 25 bp, SARS Virus
cgtatcttaccggttattgtgcttc

SEQ ID NO: 197365 - DNA, 25 bp, SARS Virus
gtatcttaccgggtattgtgcttca

SEQ ID NO: 197366 - DNA, 25 bp, SARS Virus
tatcttaccggtgattgtgcttcaa

SEQ ID NO: 197367 - DNA, 25 bp, SARS Virus
atcttaccggttgttgtgcttcaac

SEQ ID NO: 197368 - DNA, 25 bp, SARS Virus
tcttaccggttagtgtgcttcaact

SEQ ID NO: 197369 - DNA, 25 bp, SARS Virus
cttaccggttatggtgcttcaactt

SEQ ID NO: 197370 - DNA, 25 bp, SARS Virus
ttaccggttattgtgcttcaacttg

SEQ ID NO: 197371 - DNA, 25 bp, SARS Virus
taccggttattgggcttcaacttgt

SEQ ID NO: 197372 - DNA, 25 bp, SARS Virus
accggttattgtgcttcaacttgta

SEQ ID NO: 197373 - DNA, 25 bp, SARS Virus
ccggttattgtggttcaacttgtaa

SEQ ID NO: 197374 - DNA, 25 bp, SARS Virus
cggttattgtgcgtcaacttgtaac

SEQ ID NO: 197375 - DNA, 25 bp, SARS Virus
ggttattgtgctgcaacttgtaacg

SEQ ID NO: 197376 - DNA, 25 bp, SARS Virus
gttattgtgcttgaacttgtaacgg

SEQ ID NO: 197377 - DNA, 25 bp, SARS Virus
ttattgtgcttcgacttgtaacggt

SEQ ID NO: 197378 - DNA, 25 bp, SARS Virus
tattgtgcttcagcttgtaacggtc

SEQ ID NO: 197379 - DNA, 25 bp, SARS Virus
attgtgcttcaagttgtaacggtcg

SEQ ID NO: 197380 - DNA, 25 bp, SARS Virus
ttgtgcttcaacgtgtaacggtcgg

SEQ ID NO: 197381 - DNA, 25 bp, SARS Virus
tgtgcttcaactggtaacggtcgga

SEQ ID NO: 197382 - DNA, 25 bp, SARS Virus
gtgcttcaacttgtaacggtcggac

SEQ ID NO: 197383 - DNA, 25 bp, SARS Virus
tgcttcaacttggaacggtcggact

SEQ ID NO: 197384 - DNA, 25 bp, SARS Virus
gcttcaacttgtgacggtcggactt

SEQ ID NO: 197385 - DNA, 25 bp, SARS Virus
cttcaacttgtagcggtcggacttg

SEQ ID NO: 197386 - DNA, 25 bp, SARS Virus
ttcaacttgtaagggtcggacttgt

SEQ ID NO: 197387 - DNA, 25 bp, SARS Virus
tcaacttgtaacggtcggacttgtt

SEQ ID NO: 197388 - DNA, 25 bp, SARS Virus
caacttgtaacggtcggacttgttc

SEQ ID NO: 197389 - DNA, 25 bp, SARS Virus
aacttgtaacgggcggacttgttct

SEQ ID NO: 197390 - DNA, 25 bp, SARS Virus
acttgtaacggtgggacttgttctt

SEQ ID NO: 197391 - DNA, 25 bp, SARS Virus
cttgtaacggtcggacttgttcttt

SEQ ID NO: 197392 - DNA, 25 bp, SARS Virus
ttgtaacggtcggacttgttctttc

SEQ ID NO: 197393 - DNA, 25 bp, SARS Virus
tgtaacggtcgggcttgttctttcg

SEQ ID NO: 197394 - DNA, 25 bp, SARS Virus
gtaacggtcggagttgttctttcga

SEQ ID NO: 197395 - DNA, 25 bp, SARS Virus
taacggtcggacgtgttctttcgat

SEQ ID NO: 197396 - DNA, 25 bp, SARS Virus
aacggtcggactggttctttcgata

SEQ ID NO: 197397 - DNA, 25 bp, SARS Virus
acggtcggacttgttctttcgatac

SEQ ID NO: 197398 - DNA, 25 bp, SARS Virus
cggtcggacttggtctttcgatacc

SEQ ID NO: 197399 - DNA, 25 bp, SARS Virus
ggtcggacttgtgctttcgatacca

SEQ ID NO: 197400 - DNA, 25 bp, SARS Virus
gtcggacttgttgtttcgataccaa

SEQ ID NO: 197401 - DNA, 25 bp, SARS Virus
tcggacttgttcgttcgataccaac

SEQ ID NO: 197402 - DNA, 25 bp, SARS Virus
cggacttgttctgtcgataccaacc

SEQ ID NO: 197403 - DNA, 25 bp, SARS Virus
ggacttgttcttgcgataccaacct

SEQ ID NO: 197404 - DNA, 25 bp, SARS Virus
gacttgttctttggataccaaccta

SEQ ID NO: 197405 - DNA, 25 bp, SARS Virus
acttgttctttcgataccaacctaa

SEQ ID NO: 197406 - DNA, 25 bp, SARS Virus
cttgttctttcggtaccaacctaaa

SEQ ID NO: 197407 - DNA, 25 bp, SARS Virus
ttgttctttcgagaccaacctaaac

SEQ ID NO: 197408 - DNA, 25 bp, SARS Virus
tgttctttcgatgccaacctaaacg

SEQ ID NO: 197409 - DNA, 25 bp, SARS Virus
gttctttcgatagcaacctaaacgc

SEQ ID NO: 197410 - DNA, 25 bp, SARS Virus
ttctttcgatacgaacctaaacgct

SEQ ID NO: 197411 - DNA, 25 bp, SARS Virus
tctttcgataccgacctaaacgctt

SEQ ID NO: 197412 - DNA, 25 bp, SARS Virus
ctttcgataccagcctaaacgctta

SEQ ID NO: 197413 - DNA, 25 bp, SARS Virus
tttcgataccaagctaaacgcttac

SEQ ID NO: 197414 - DNA, 25 bp, SARS Virus
ttcgataccaacgtaaacgcttact

SEQ ID NO: 197415 - DNA, 25 bp, SARS Virus
tcgataccaaccgaaacgcttactc

SEQ ID NO: 197416 - DNA, 25 bp, SARS Virus
cgataccaacctgaacgcttactcg

SEQ ID NO: 197417 - DNA, 25 bp, SARS Virus
gataccaacctagacgcttactcgt

SEQ ID NO: 197418 - DNA, 25 bp, SARS Virus
ataccaacctaagcgcttactcgtc

SEQ ID NO: 197419 - DNA, 25 bp, SARS Virus
taccaacctaaaggcttactcgtct

SEQ ID NO: 197420 - DNA, 25 bp, SARS Virus
accaacctaaacgcttactcgtcta

SEQ ID NO: 197421 - DNA, 25 bp, SARS Virus
ccaacctaaacggttactcgtctag

SEQ ID NO: 197422 - DNA, 25 bp, SARS Virus
caacctaaacgcgtactcgtctaga

SEQ ID NO: 197423 - DNA, 25 bp, SARS Virus
aacctaaacgctgactcgtctagaa

SEQ ID NO: 197424 - DNA, 25 bp, SARS Virus
acctaaacgcttgctcgtctagaag

SEQ ID NO: 197425 - DNA, 25 bp, SARS Virus
cctaaacgcttagtcgtctagaagt

SEQ ID NO: 197426 - DNA, 25 bp, SARS Virus
ctaaacgcttacgcgtctagaagta

SEQ ID NO: 197427 - DNA, 25 bp, SARS Virus
taaacgcttactggtctagaagtat

SEQ ID NO: 197428 - DNA, 25 bp, SARS Virus
aaacgcttactcgtctagaagtatc

SEQ ID NO: 197429 - DNA, 25 bp, SARS Virus
aacgcttactcggctagaagtatca

SEQ ID NO: 197430 - DNA, 25 bp, SARS Virus
acgcttactcgtgtagaagtatcaa

SEQ ID NO: 197431 - DNA, 25 bp, SARS Virus
cgcttactcgtcgagaagtatcaat

SEQ ID NO: 197432 - DNA, 25 bp, SARS Virus
gcttactcgtctggaagtatcaatc

SEQ ID NO: 197433 - DNA, 25 bp, SARS Virus
cttactcgtctagaagtatcaatcc

SEQ ID NO: 197434 - DNA, 25 bp, SARS Virus
ttactcgtctaggagtatcaatcct

SEQ ID NO: 197435 - DNA, 25 bp, SARS Virus
tactcgtctagaggtatcaatccta

SEQ ID NO: 197436 - DNA, 25 bp, SARS Virus
actcgtctagaagtatcaatcctaa

SEQ ID NO: 197437 - DNA, 25 bp, SARS Virus
ctcgtctagaaggatcaatcctaat

SEQ ID NO: 197438 - DNA, 25 bp, SARS Virus
tcgtctagaagtgtcaatcctaatt

SEQ ID NO: 197439 - DNA, 25 bp, SARS Virus
cgtctagaagtagcaatcctaattc

SEQ ID NO: 197440 - DNA, 25 bp, SARS Virus
gtctagaagtatgaatcctaattcg

SEQ ID NO: 197441 - DNA, 25 bp, SARS Virus
tctagaagtatcgatcctaattcgt

SEQ ID NO: 197442 - DNA, 25 bp, SARS Virus
ctagaagtatcagtcctaattcgta

SEQ ID NO: 197443 - DNA, 25 bp, SARS Virus
tagaagtatcaagcctaattcgtac

SEQ ID NO: 197444 - DNA, 25 bp, SARS Virus
agaagtatcaatgctaattcgtaca

SEQ ID NO: 197445 - DNA, 25 bp, SARS Virus
gaagtatcaatcgtaattcgtacag

SEQ ID NO: 197446 - DNA, 25 bp, SARS Virus
aagtatcaatccgaattcgtacaga

SEQ ID NO: 197447 - DNA, 25 bp, SARS Virus
agtatcaatcctgattcgtacagaa

SEQ ID NO: 197448 - DNA, 25 bp, SARS Virus
gtatcaatcctagttcgtacagaag

SEQ ID NO: 197449 - DNA, 25 bp, SARS Virus
tatcaatcctaagtcgtacagaaga

SEQ ID NO: 197450 - DNA, 25 bp, SARS Virus
atcaatcctaatgcgtacagaagac

SEQ ID NO: 197451 - DNA, 25 bp, SARS Virus
tcaatcctaattggtacagaagacg

SEQ ID NO: 197452 - DNA, 25 bp, SARS Virus
caatcctaattcgtacagaagacga

SEQ ID NO: 197453 - DNA, 25 bp, SARS Virus
aatcctaattcggacagaagacgac

SEQ ID NO: 197454 - DNA, 25 bp, SARS Virus
atcctaattcgtgcagaagacgaca

SEQ ID NO: 197455 - DNA, 25 bp, SARS Virus
tcctaattcgtagagaagacgacac

SEQ ID NO: 197456 - DNA, 25 bp, SARS Virus
cctaattcgtacggaagacgacacg

SEQ ID NO: 197457 - DNA, 25 bp, SARS Virus
ctaattcgtacagaagacgacacgt

SEQ ID NO: 197458 - DNA, 25 bp, SARS Virus
taattcgtacaggagacgacacgtt

SEQ ID NO: 197459 - DNA, 25 bp, SARS Virus
aattcgtacagaggacgacacgttt

SEQ ID NO: 197460 - DNA, 25 bp, SARS Virus
attcgtacagaagacgacacgttta

SEQ ID NO: 197461 - DNA, 25 bp, SARS Virus
ttcgtacagaaggcgacacgtttac

SEQ ID NO: 197462 - DNA, 25 bp, SARS Virus
tcgtacagaagaggacacgtttact

SEQ ID NO: 197463 - DNA, 25 bp, SARS Virus
cgtacagaagacgacacgtttactg

SEQ ID NO: 197464 - DNA, 25 bp, SARS Virus
gtacagaagacggcacgtttactgt

SEQ ID NO: 197465 - DNA, 25 bp, SARS Virus
tacagaagacgagacgtttactgta

SEQ ID NO: 197466 - DNA, 25 bp, SARS Virus
acagaagacgacgcgtttactgtac

SEQ ID NO: 197467 - DNA, 25 bp, SARS Virus
cagaagacgacaggtttactgtaca

SEQ ID NO: 197468 - DNA, 25 bp, SARS Virus
agaagacgacacgtttactgtacag

SEQ ID NO: 197469 - DNA, 25 bp, SARS Virus
gaagacgacacggttactgtacaga

SEQ ID NO: 197470 - DNA, 25 bp, SARS Virus
aagacgacacgtgtactgtacagaa

SEQ ID NO: 197471 - DNA, 25 bp, SARS Virus
agacgacacgttgactgtacagaac

SEQ ID NO: 197472 - DNA, 25 bp, SARS Virus
gacgacacgtttgctgtacagaacc

SEQ ID NO: 197473 - DNA, 25 bp, SARS Virus
acgacacgtttagtgtacagaacct

SEQ ID NO: 197474 - DNA, 25 bp, SARS Virus
cgacacgtttacggtacagaacctg

SEQ ID NO: 197475 - DNA, 25 bp, SARS Virus
gacacgtttactgtacagaacctgt

SEQ ID NO: 197476 - DNA, 25 bp, SARS Virus
acacgtttactggacagaacctgtc

SEQ ID NO: 197477 - DNA, 25 bp, SARS Virus
cacgtttactgtgcagaacctgtca

SEQ ID NO: 197478 - DNA, 25 bp, SARS Virus
acgtttactgtagagaacctgtcat

SEQ ID NO: 197479 - DNA, 25 bp, SARS Virus
cgtttactgtacggaacctgtcata

SEQ ID NO: 197480 - DNA, 25 bp, SARS Virus
gtttactgtacagaacctgtcatat

SEQ ID NO: 197481 - DNA, 25 bp, SARS Virus
tttactgtacaggacctgtcatatg

SEQ ID NO: 197482 - DNA, 25 bp, SARS Virus
ttactgtacagagcctgtcatatga

SEQ ID NO: 197483 - DNA, 25 bp, SARS Virus
tactgtacagaagctgtcatatgac

SEQ ID NO: 197484 - DNA, 25 bp, SARS Virus
actgtacagaacgtgtcatatgaca

SEQ ID NO: 197485 - DNA, 25 bp, SARS Virus
ctgtacagaaccggtcatatgacac

SEQ ID NO: 197486 - DNA, 25 bp, SARS Virus
tgtacagaacctgtcatatgacaca

SEQ ID NO: 197487 - DNA, 25 bp, SARS Virus
gtacagaacctggcatatgacacag

SEQ ID NO: 197488 - DNA, 25 bp, SARS Virus
tacagaacctgtgatatgacacagt

SEQ ID NO: 197489 - DNA, 25 bp, SARS Virus
acagaacctgtcgtatgacacagta

SEQ ID NO: 197490 - DNA, 25 bp, SARS Virus
cagaacctgtcagatgacacagtag

SEQ ID NO: 197491 - DNA, 25 bp, SARS Virus
agaacctgtcatgtgacacagtagg

SEQ ID NO: 197492 - DNA, 25 bp, SARS Virus
gaacctgtcataggacacagtaggt

SEQ ID NO: 197493 - DNA, 25 bp, SARS Virus
aacctgtcatatgacacagtaggtt

SEQ ID NO: 197494 - DNA, 25 bp, SARS Virus
acctgtcatatggcacagtaggttg

SEQ ID NO: 197495 - DNA, 25 bp, SARS Virus
cctgtcatatgagacagtaggttgg

SEQ ID NO: 197496 - DNA, 25 bp, SARS Virus
ctgtcatatgacgcagtaggttggt

SEQ ID NO: 197497 - DNA, 25 bp, SARS Virus
tgtcatatgacagagtaggttggtg

SEQ ID NO: 197498 - DNA, 25 bp, SARS Virus
gtcatatgacacggtaggttggtgt

SEQ ID NO: 197499 - DNA, 25 bp, SARS Virus
tcatatgacacagtaggttggtgtt

SEQ ID NO: 197500 - DNA, 25 bp, SARS Virus
catatgacacaggaggttggtgtta

SEQ ID NO: 197501 - DNA, 25 bp, SARS Virus
atatgacacagtgggttggtgttag

SEQ ID NO: 197502 - DNA, 25 bp, SARS Virus
tatgacacagtaggttggtgttagg

SEQ ID NO: 197503 - DNA, 25 bp, SARS Virus
atgacacagtaggttggtgttaggt

SEQ ID NO: 197504 - DNA, 25 bp, SARS Virus
tgacacagtagggtggtgttaggta

SEQ ID NO: 197505 - DNA, 25 bp, SARS Virus
gacacagtaggtgggtgttaggtaa

SEQ ID NO: 197506 - DNA, 25 bp, SARS Virus
acacagtaggttggtgttaggtaat

SEQ ID NO: 197507 - DNA, 25 bp, SARS Virus
cacagtaggttggtgttaggtaatt

SEQ ID NO: 197508 - DNA, 25 bp, SARS Virus
acagtaggttggggttaggtaattc

SEQ ID NO: 197509 - DNA, 25 bp, SARS Virus
cagtaggttggtgttaggtaattct

SEQ ID NO: 197510 - DNA, 25 bp, SARS Virus
agtaggttggtggtaggtaattctc

SEQ ID NO: 197511 - DNA, 25 bp, SARS Virus
gtaggttggtgtgaggtaattctca

SEQ ID NO: 197512 - DNA, 25 bp, SARS Virus
taggttggtgttgggtaattctcaa

SEQ ID NO: 197513 - DNA, 25 bp, SARS Virus
aggttggtgttaggtaattctcaac

SEQ ID NO: 197514 - DNA, 25 bp, SARS Virus
ggttggtgttaggtaattctcaaca

SEQ ID NO: 197515 - DNA, 25 bp, SARS Virus
gttggtgttagggaattctcaacat

SEQ ID NO: 197516 - DNA, 25 bp, SARS Virus
ttggtgttaggtgattctcaacatc

SEQ ID NO: 197517 - DNA, 25 bp, SARS Virus
tggtgttaggtagttctcaacatca

SEQ ID NO: 197518 - DNA, 25 bp, SARS Virus
ggtgttaggtaagtctcaacatcaa

SEQ ID NO: 197519 - DNA, 25 bp, SARS Virus
gtgttaggtaatgctcaacatcaag

SEQ ID NO: 197520 - DNA, 25 bp, SARS Virus
tgttaggtaattgtcaacatcaagg

SEQ ID NO: 197521 - DNA, 25 bp, SARS Virus
gttaggtaattcgcaacatcaaggt

SEQ ID NO: 197522 - DNA, 25 bp, SARS Virus
ttaggtaattctgaacatcaaggtg

SEQ ID NO: 197523 - DNA, 25 bp, SARS Virus
taggtaattctcgacatcaaggtgt

SEQ ID NO: 197524 - DNA, 25 bp, SARS Virus
aggtaattctcagcatcaaggtgtc

SEQ ID NO: 197525 - DNA, 25 bp, SARS Virus
ggtaattctcaagatcaaggtgtcc

SEQ ID NO: 197526 - DNA, 25 bp, SARS Virus
gtaattctcaacgtcaaggtgtcca

SEQ ID NO: 197527 - DNA, 25 bp, SARS Virus
taattctcaacagcaaggtgtccaa

SEQ ID NO: 197528 - DNA, 25 bp, SARS Virus
aattctcaacatgaaggtgtccaat

SEQ ID NO: 197529 - DNA, 25 bp, SARS Virus
attctcaacatcgaggtgtccaatg

SEQ ID NO: 197530 - DNA, 25 bp, SARS Virus
ttctcaacatcagggtgtccaatga

SEQ ID NO: 197531 - DNA, 25 bp, SARS Virus
tctcaacatcaaggtgtccaatgaa

SEQ ID NO: 197532 - DNA, 25 bp, SARS Virus
ctcaacatcaaggtgtccaatgaac

SEQ ID NO: 197533 - DNA, 25 bp, SARS Virus
tcaacatcaaggggtccaatgaaca

SEQ ID NO: 197534 - DNA, 25 bp, SARS Virus
caacatcaaggtgtccaatgaacat

SEQ ID NO: 197535 - DNA, 25 bp, SARS Virus
aacatcaaggtggccaatgaacatg

SEQ ID NO: 197536 - DNA, 25 bp, SARS Virus
acatcaaggtgtgcaatgaacatgg

SEQ ID NO: 197537 - DNA, 25 bp, SARS Virus
catcaaggtgtcgaatgaacatggt

SEQ ID NO: 197538 - DNA, 25 bp, SARS Virus
atcaaggtgtccgatgaacatggta

SEQ ID NO: 197539 - DNA, 25 bp, SARS Virus
tcaaggtgtccagtgaacatggtac

SEQ ID NO: 197540 - DNA, 25 bp, SARS Virus
caaggtgtccaaggaacatggtacg

SEQ ID NO: 197541 - DNA, 25 bp, SARS Virus
aaggtgtccaatgaacatggtacgt

SEQ ID NO: 197542 - DNA, 25 bp, SARS Virus
aggtgtccaatggacatggtacgtg

SEQ ID NO: 197543 - DNA, 25 bp, SARS Virus
ggtgtccaatgagcatggtacgtgg

SEQ ID NO: 197544 - DNA, 25 bp, SARS Virus
gtgtccaatgaagatggtacgtggg

SEQ ID NO: 197545 - DNA, 25 bp, SARS Virus
tgtccaatgaacgtggtacgtggga

SEQ ID NO: 197546 - DNA, 25 bp, SARS Virus
gtccaatgaacagggtacgtgggaa

SEQ ID NO: 197547 - DNA, 25 bp, SARS Virus
tccaatgaacatggtacgtgggaag

SEQ ID NO: 197548 - DNA, 25 bp, SARS Virus
ccaatgaacatggtacgtgggaagt

SEQ ID NO: 197549 - DNA, 25 bp, SARS Virus
caatgaacatgggacgtgggaagtt

SEQ ID NO: 197550 - DNA, 25 bp, SARS Virus
aatgaacatggtgcgtgggaagttg

SEQ ID NO: 197551 - DNA, 25 bp, SARS Virus
atgaacatggtaggtgggaagttga

SEQ ID NO: 197552 - DNA, 25 bp, SARS Virus
tgaacatggtacgtgggaagttgaa

SEQ ID NO: 197553 - DNA, 25 bp, SARS Virus
gaacatggtacgggggaagttgaaa

SEQ ID NO: 197554 - DNA, 25 bp, SARS Virus
aacatggtacgtgggaagttgaaac

SEQ ID NO: 197555 - DNA, 25 bp, SARS Virus
acatggtacgtgggaagttgaaacg

SEQ ID NO: 197556 - DNA, 25 bp, SARS Virus
catggtacgtgggaagttgaaacgg

SEQ ID NO: 197557 - DNA, 25 bp, SARS Virus
atggtacgtggggagttgaaacgga

SEQ ID NO: 197558 - DNA, 25 bp, SARS Virus
tggtacgtgggaggttgaaacggac

SEQ ID NO: 197559 - DNA, 25 bp, SARS Virus
ggtacgtgggaagttgaaacggact

SEQ ID NO: 197560 - DNA, 25 bp, SARS Virus
gtacgtgggaaggtgaaacggactg

SEQ ID NO: 197561 - DNA, 25 bp, SARS Virus
tacgtgggaagtggaaacggactgc

SEQ ID NO: 197562 - DNA, 25 bp, SARS Virus
acgtgggaagttgaaacggactgcc

SEQ ID NO: 197563 - DNA, 25 bp, SARS Virus
cgtgggaagttggaacggactgccc

SEQ ID NO: 197564 - DNA, 25 bp, SARS Virus
gtgggaagttgagacggactgccct

SEQ ID NO: 197565 - DNA, 25 bp, SARS Virus
tgggaagttgaagcggactgccctt

SEQ ID NO: 197566 - DNA, 25 bp, SARS Virus
gggaagttgaaagggactgccctta

SEQ ID NO: 197567 - DNA, 25 bp, SARS Virus
ggaagttgaaacggactgcccttac

SEQ ID NO: 197568 - DNA, 25 bp, SARS Virus
gaagttgaaacggactgcccttacg

SEQ ID NO: 197569 - DNA, 25 bp, SARS Virus
aagttgaaacgggctgcccttacgg

SEQ ID NO: 197570 - DNA, 25 bp, SARS Virus
agttgaaacggagtgcccttacggt

SEQ ID NO: 197571 - DNA, 25 bp, SARS Virus
gttgaaacggacggcccttacggta

SEQ ID NO: 197572 - DNA, 25 bp, SARS Virus
ttgaaacggactgcccttacggtaa

SEQ ID NO: 197573 - DNA, 25 bp, SARS Virus
tgaaacggactggccttacggtaaa

SEQ ID NO: 197574 - DNA, 25 bp, SARS Virus
gaaacggactgcgcttacggtaaaa

SEQ ID NO: 197575 - DNA, 25 bp, SARS Virus
aaacggactgccgttacggtaaaag

SEQ ID NO: 197576 - DNA, 25 bp, SARS Virus
aacggactgcccgtacggtaaaagg

SEQ ID NO: 197577 - DNA, 25 bp, SARS Virus
acggactgccctgacggtaaaagga

SEQ ID NO: 197578 - DNA, 25 bp, SARS Virus
cggactgcccttgcggtaaaaggat

SEQ ID NO: 197579 - DNA, 25 bp, SARS Virus
ggactgcccttagggtaaaaggatt

SEQ ID NO: 197580 - DNA, 25 bp, SARS Virus
gactgcccttacggtaaaaggattt

SEQ ID NO: 197581 - DNA, 25 bp, SARS Virus
actgcccttacggtaaaaggatttt

SEQ ID NO: 197582 - DNA, 25 bp, SARS Virus
ctgcccttacgggaaaaggattttg

SEQ ID NO: 197583 - DNA, 25 bp, SARS Virus
tgcccttacggtgaaaggattttgg

SEQ ID NO: 197584 - DNA, 25 bp, SARS Virus
gcccttacggtagaaggattttggt

SEQ ID NO: 197585 - DNA, 25 bp, SARS Virus
cccttacggtaagaggattttggtg

SEQ ID NO: 197586 - DNA, 25 bp, SARS Virus
ccttacggtaaagggattttggtga

SEQ ID NO: 197587 - DNA, 25 bp, SARS Virus
cttacggtaaaaggattttggtgag

SEQ ID NO: 197588 - DNA, 25 bp, SARS Virus
ttacggtaaaaggattttggtgaga

SEQ ID NO: 197589 - DNA, 25 bp, SARS Virus
tacggtaaaagggttttggtgagac

SEQ ID NO: 197590 - DNA, 25 bp, SARS Virus
acggtaaaaggagtttggtgagacg

SEQ ID NO: 197591 - DNA, 25 bp, SARS Virus
cggtaaaaggatgttggtgagacgt

SEQ ID NO: 197592 - DNA, 25 bp, SARS Virus
ggtaaaaggattgtggtgagacgtc

SEQ ID NO: 197593 - DNA, 25 bp, SARS Virus
gtaaaaggatttgggtgagacgtct

SEQ ID NO: 197594 - DNA, 25 bp, SARS Virus
taaaaggattttggtgagacgtctt

SEQ ID NO: 197595 - DNA, 25 bp, SARS Virus
aaaaggattttggtgagacgtcttg

SEQ ID NO: 197596 - DNA, 25 bp, SARS Virus
aaaggattttggggagacgtcttgt

SEQ ID NO: 197597 - DNA, 25 bp, SARS Virus
aaggattttggtgagacgtcttgtc

SEQ ID NO: 197598 - DNA, 25 bp, SARS Virus
aggattttggtgggacgtcttgtcg

SEQ ID NO: 197599 - DNA, 25 bp, SARS Virus
ggattttggtgagacgtcttgtcgt

SEQ ID NO: 197600 - DNA, 25 bp, SARS Virus
gattttggtgaggcgtcttgtcgtc

SEQ ID NO: 197601 - DNA, 25 bp, SARS Virus
attttggtgagaggtcttgtcgtct

SEQ ID NO: 197602 - DNA, 25 bp, SARS Virus
ttttggtgagacgtcttgtcgtctt

SEQ ID NO: 197603 - DNA, 25 bp, SARS Virus
tttggtgagacggcttgtcgtcttc

SEQ ID NO: 197604 - DNA, 25 bp, SARS Virus
ttggtgagacgtgttgtcgtcttca

SEQ ID NO: 197605 - DNA, 25 bp, SARS Virus
tggtgagacgtcgtgtcgtcttcac

SEQ ID NO: 197606 - DNA, 25 bp, SARS Virus
ggtgagacgtctggtcgtcttcact

SEQ ID NO: 197607 - DNA, 25 bp, SARS Virus
gtgagacgtcttgtcgtcttcacta

SEQ ID NO: 197608 - DNA, 25 bp, SARS Virus
tgagacgtcttggcgtcttcactaa

SEQ ID NO: 197609 - DNA, 25 bp, SARS Virus
gagacgtcttgtggtcttcactaac

SEQ ID NO: 197610 - DNA, 25 bp, SARS Virus
agacgtcttgtcgtcttcactaact

SEQ ID NO: 197611 - DNA, 25 bp, SARS Virus
gacgtcttgtcggcttcactaacta

SEQ ID NO: 197612 - DNA, 25 bp, SARS Virus
acgtcttgtcgtgttcactaactac

SEQ ID NO: 197613 - DNA, 25 bp, SARS Virus
cgtcttgtcgtcgtcactaactaca

SEQ ID NO: 197614 - DNA, 25 bp, SARS Virus
gtcttgtcgtctgcactaactacag

SEQ ID NO: 197615 - DNA, 25 bp, SARS Virus
tcttgtcgtcttgactaactacaga

SEQ ID NO: 197616 - DNA, 25 bp, SARS Virus
cttgtcgtcttcgctaactacagac

SEQ ID NO: 197617 - DNA, 25 bp, SARS Virus
ttgtcgtcttcagtaactacagaca

SEQ ID NO: 197618 - DNA, 25 bp, SARS Virus
tgtcgtcttcacgaactacagacac

SEQ ID NO: 197619 - DNA, 25 bp, SARS Virus
gtcgtcttcactgactacagacacc

SEQ ID NO: 197620 - DNA, 25 bp, SARS Virus
tcgtcttcactagctacagacacca

SEQ ID NO: 197621 - DNA, 25 bp, SARS Virus
cgtcttcactaagtacagacaccac

SEQ ID NO: 197622 - DNA, 25 bp, SARS Virus
gtcttcactaacgacagacaccacc

SEQ ID NO: 197623 - DNA, 25 bp, SARS Virus
tcttcactaactgcagacaccacca

SEQ ID NO: 197624 - DNA, 25 bp, SARS Virus
cttcactaactagagacaccaccaa

SEQ ID NO: 197625 - DNA, 25 bp, SARS Virus
ttcactaactacggacaccaccaac

SEQ ID NO: 197626 - DNA, 25 bp, SARS Virus
tcactaactacagacaccaccaacc

SEQ ID NO: 197627 - DNA, 25 bp, SARS Virus
cactaactacaggcaccaccaacca

SEQ ID NO: 197628 - DNA, 25 bp, SARS Virus
actaactacagagaccaccaaccat

SEQ ID NO: 197629 - DNA, 25 bp, SARS Virus
ctaactacagacgccaccaaccatc

SEQ ID NO: 197630 - DNA, 25 bp, SARS Virus
taactacagacagcaccaaccatct

SEQ ID NO: 197631 - DNA, 25 bp, SARS Virus
aactacagacacgaccaaccatctc

SEQ ID NO: 197632 - DNA, 25 bp, SARS Virus
actacagacaccgccaaccatctct

SEQ ID NO: 197633 - DNA, 25 bp, SARS Virus
ctacagacaccagcaaccatctctt

SEQ ID NO: 197634 - DNA, 25 bp, SARS Virus
tacagacaccacgaaccatctcttg

SEQ ID NO: 197635 - DNA, 25 bp, SARS Virus
acagacaccaccgaccatctcttgt

SEQ ID NO: 197636 - DNA, 25 bp, SARS Virus
cagacaccaccagccatctcttgta

SEQ ID NO: 197637 - DNA, 25 bp, SARS Virus
agacaccaccaagcatctcttgtag

SEQ ID NO: 197638 - DNA, 25 bp, SARS Virus
gacaccaccaacgatctcttgtagt

SEQ ID NO: 197639 - DNA, 25 bp, SARS Virus
acaccaccaaccgtctcttgtagtc

SEQ ID NO: 197640 - DNA, 25 bp, SARS Virus
caccaccaaccagctcttgtagtcg

SEQ ID NO: 197641 - DNA, 25 bp, SARS Virus
accaccaaccatgtcttgtagtcgt

SEQ ID NO: 197642 - DNA, 25 bp, SARS Virus
ccaccaaccatcgcttgtagtcgtg

SEQ ID NO: 197643 - DNA, 25 bp, SARS Virus
caccaaccatctgttgtagtcgtgg

SEQ ID NO: 197644 - DNA, 25 bp, SARS Virus
accaaccatctcgtgtagtcgtgga

SEQ ID NO: 197645 - DNA, 25 bp, SARS Virus
ccaaccatctctggtagtcgtggac

SEQ ID NO: 197646 - DNA, 25 bp, SARS Virus
caaccatctcttgtagtcgtggact

SEQ ID NO: 197647 - DNA, 25 bp, SARS Virus
aaccatctcttggagtcgtggactc

SEQ ID NO: 197648 - DNA, 25 bp, SARS Virus
accatctcttgtggtcgtggactca

SEQ ID NO: 197649 - DNA, 25 bp, SARS Virus
ccatctcttgtagtcgtggactcaa

SEQ ID NO: 197650 - DNA, 25 bp, SARS Virus
catctcttgtaggcgtggactcaac

SEQ ID NO: 197651 - DNA, 25 bp, SARS Virus
atctcttgtagtggtggactcaacg

SEQ ID NO: 197652 - DNA, 25 bp, SARS Virus
tctcttgtagtcgtggactcaacga

SEQ ID NO: 197653 - DNA, 25 bp, SARS Virus
ctcttgtagtcggggactcaacgat

SEQ ID NO: 197654 - DNA, 25 bp, SARS Virus
tcttgtagtcgtggactcaacgatt

SEQ ID NO: 197655 - DNA, 25 bp, SARS Virus
cttgtagtcgtggactcaacgattt

SEQ ID NO: 197656 - DNA, 25 bp, SARS Virus
ttgtagtcgtgggctcaacgatttc

SEQ ID NO: 197657 - DNA, 25 bp, SARS Virus
tgtagtcgtggagtcaacgatttca

SEQ ID NO: 197658 - DNA, 25 bp, SARS Virus
gtagtcgtggacgcaacgatttcag

SEQ ID NO: 197659 - DNA, 25 bp, SARS Virus
tagtcgtggactgaacgatttcagt

SEQ ID NO: 197660 - DNA, 25 bp, SARS Virus
agtcgtggactcgacgatttcagta

SEQ ID NO: 197661 - DNA, 25 bp, SARS Virus
gtcgtggactcagcgatttcagtaa

SEQ ID NO: 197662 - DNA, 25 bp, SARS Virus
tcgtggactcaaggatttcagtaaa

SEQ ID NO: 197663 - DNA, 25 bp, SARS Virus
cgtggactcaacgatttcagtaaat

SEQ ID NO: 197664 - DNA, 25 bp, SARS Virus
gtggactcaacggtttcagtaaatc

SEQ ID NO: 197665 - DNA, 25 bp, SARS Virus
tggactcaacgagttcagtaaatct

SEQ ID NO: 197666 - DNA, 25 bp, SARS Virus
ggactcaacgatgtcagtaaatctc

SEQ ID NO: 197667 - DNA, 25 bp, SARS Virus
gactcaacgattgcagtaaatctcg

SEQ ID NO: 197668 - DNA, 25 bp, SARS Virus
actcaacgatttgagtaaatctcgg

SEQ ID NO: 197669 - DNA, 25 bp, SARS Virus
ctcaacgatttcggtaaatctcgga

SEQ ID NO: 197670 - DNA, 25 bp, SARS Virus
tcaacgatttcagtaaatctcggaa

SEQ ID NO: 197671 - DNA, 25 bp, SARS Virus
caacgatttcaggaaatctcggaaa

SEQ ID NO: 197672 - DNA, 25 bp, SARS Virus
aacgatttcagtgaatctcggaaac

SEQ ID NO: 197673 - DNA, 25 bp, SARS Virus
taattcctttcttggaaattaccat

SEQ ID NO: 197674 - DNA, 25 bp, SARS Virus
aattcctttctttgaaattaccata

SEQ ID NO: 197675 - DNA, 25 bp, SARS Virus
attcctttcttgtaaattaccatac

SEQ ID NO: 197676 - DNA, 25 bp, SARS Virus
ttcctttcttggtaattaccatact

SEQ ID NO: 197677 - DNA, 25 bp, SARS Virus
tcctttcttggatattaccatacta

SEQ ID NO: 197678 - DNA, 25 bp, SARS Virus
cctttcttggaatttaccatactaa

SEQ ID NO: 197679 - DNA, 25 bp, SARS Virus
ctttcttggaaattaccatactaat

SEQ ID NO: 197680 - DNA, 25 bp, SARS Virus
tttcttggaaattaccatactaatc

SEQ ID NO: 197681 - DNA, 25 bp, SARS Virus
ttcttggaaatttccatactaatcc

SEQ ID NO: 197682 - DNA, 25 bp, SARS Virus
tcttggaaattatcatactaatcca

SEQ ID NO: 197683 - DNA, 25 bp, SARS Virus
cttggaaattactatactaatccag

SEQ ID NO: 197684 - DNA, 25 bp, SARS Virus
ttggaaattaccttactaatccaga

SEQ ID NO: 197685 - DNA, 25 bp, SARS Virus
tggaaattaccatactaatccagag

SEQ ID NO: 197686 - DNA, 25 bp, SARS Virus
ggaaattaccattctaatccagagt

SEQ ID NO: 197687 - DNA, 25 bp, SARS Virus
gaaattaccatattaatccagagta

SEQ ID NO: 197688 - DNA, 25 bp, SARS Virus
aaattaccatactaatccagagtac

SEQ ID NO: 197689 - DNA, 25 bp, SARS Virus
aattaccatacttatccagagtacc

SEQ ID NO: 197690 - DNA, 25 bp, SARS Virus
attaccatactattccagagtaccg

SEQ ID NO: 197691 - DNA, 25 bp, SARS Virus
ttaccatactaatccagagtaccgt

SEQ ID NO: 197692 - DNA, 25 bp, SARS Virus
taccatactaattcagagtaccgtg

SEQ ID NO: 197693 - DNA, 25 bp, SARS Virus
accatactaatctagagtaccgtgt

SEQ ID NO: 197694 - DNA, 25 bp, SARS Virus
ccatactaatcctgagtaccgtgtg

SEQ ID NO: 197695 - DNA, 25 bp, SARS Virus
catactaatccatagtaccgtgtga

SEQ ID NO: 197696 - DNA, 25 bp, SARS Virus
atactaatccagtgtaccgtgtgac

SEQ ID NO: 197697 - DNA, 25 bp, SARS Virus
tactaatccagattaccgtgtgact

SEQ ID NO: 197698 - DNA, 25 bp, SARS Virus
actaatccagagtaccgtgtgacta

SEQ ID NO: 197699 - DNA, 25 bp, SARS Virus
ctaatccagagttccgtgtgactat

SEQ ID NO: 197700 - DNA, 25 bp, SARS Virus
taatccagagtatcgtgtgactatt

SEQ ID NO: 197701 - DNA, 25 bp, SARS Virus
aatccagagtactgtgtgactattt

SEQ ID NO: 197702 - DNA, 25 bp, SARS Virus
atccagagtaccttgtgactatttg

SEQ ID NO: 197703 - DNA, 25 bp, SARS Virus
tccagagtaccgtgtgactatttgt

SEQ ID NO: 197704 - DNA, 25 bp, SARS Virus
ccagagtaccgtttgactatttgtg

SEQ ID NO: 197705 - DNA, 25 bp, SARS Virus
cagagtaccgtgtgactatttgtgg

SEQ ID NO: 197706 - DNA, 25 bp, SARS Virus
agagtaccgtgttactatttgtggt

SEQ ID NO: 197707 - DNA, 25 bp, SARS Virus
gagtaccgtgtgtctatttgtggtc

SEQ ID NO: 197708 - DNA, 25 bp, SARS Virus
agtaccgtgtgattatttgtggtct

SEQ ID NO: 197709 - DNA, 25 bp, SARS Virus
gtaccgtgtgactatttgtggtcta

SEQ ID NO: 197710 - DNA, 25 bp, SARS Virus
taccgtgtgactttttgtggtctac

SEQ ID NO: 197711 - DNA, 25 bp, SARS Virus
accgtgtgactatttgtggtctacc

SEQ ID NO: 197712 - DNA, 25 bp, SARS Virus
ccgtgtgactatttgtggtctacca

SEQ ID NO: 197713 - DNA, 25 bp, SARS Virus
cgtgtgactatttgtggtctaccac

SEQ ID NO: 197714 - DNA, 25 bp, SARS Virus
gtgtgactatttttggtctaccact

SEQ ID NO: 197715 - DNA, 25 bp, SARS Virus
tgtgactatttgtggtctaccactt

SEQ ID NO: 197716 - DNA, 25 bp, SARS Virus
gtgactatttgttgtctaccacttg

SEQ ID NO: 197717 - DNA, 25 bp, SARS Virus
tgactatttgtgttctaccacttgg

SEQ ID NO: 197718 - DNA, 25 bp, SARS Virus
gactatttgtggtctaccacttggt

SEQ ID NO: 197719 - DNA, 25 bp, SARS Virus
actatttgtggtttaccacttggta

SEQ ID NO: 197720 - DNA, 25 bp, SARS Virus
ctatttgtggtctaccacttggtaa

SEQ ID NO: 197721 - DNA, 25 bp, SARS Virus
tatttgtggtcttccacttggtaac

SEQ ID NO: 197722 - DNA, 25 bp, SARS Virus
atttgtggtctatcacttggtaaca

SEQ ID NO: 197723 - DNA, 25 bp, SARS Virus
tttgtggtctactacttggtaacat

SEQ ID NO: 197724 - DNA, 25 bp, SARS Virus
ttgtggtctacctcttggtaacatc

SEQ ID NO: 197725 - DNA, 25 bp, SARS Virus
tgtggtctaccatttggtaacatcg

SEQ ID NO: 197726 - DNA, 25 bp, SARS Virus
gtggtctaccacttggtaacatcgt

SEQ ID NO: 197727 - DNA, 25 bp, SARS Virus
tggtctaccacttggtaacatcgta

SEQ ID NO: 197728 - DNA, 25 bp, SARS Virus
ggtctaccactttgtaacatcgtac

SEQ ID NO: 197729 - DNA, 25 bp, SARS Virus
gtctaccacttgttaacatcgtacg

SEQ ID NO: 197730 - DNA, 25 bp, SARS Virus
tctaccacttggtaacatcgtacga

SEQ ID NO: 197731 - DNA, 25 bp, SARS Virus
ctaccacttggttacatcgtacgat

SEQ ID NO: 197732 - DNA, 25 bp, SARS Virus
taccacttggtatcatcgtacgatc

SEQ ID NO: 197733 - DNA, 25 bp, SARS Virus
accacttggtaatatcgtacgatct

SEQ ID NO: 197734 - DNA, 25 bp, SARS Virus
ccacttggtaacttcgtacgatctt

SEQ ID NO: 197735 - DNA, 25 bp, SARS Virus
cacttggtaacatcgtacgatcttg

SEQ ID NO: 197736 - DNA, 25 bp, SARS Virus
acttggtaacattgtacgatcttga

SEQ ID NO: 197737 - DNA, 25 bp, SARS Virus
cttggtaacatcttacgatcttgac

SEQ ID NO: 197738 - DNA, 25 bp, SARS Virus
ttggtaacatcgtacgatcttgact

SEQ ID NO: 197739 - DNA, 25 bp, SARS Virus
tggtaacatcgttcgatcttgactt

SEQ ID NO: 197740 - DNA, 25 bp, SARS Virus
ggtaacatcgtatgatcttgacttt

SEQ ID NO: 197741 - DNA, 25 bp, SARS Virus
gtaacatcgtactatcttgactttt

SEQ ID NO: 197742 - DNA, 25 bp, SARS Virus
taacatcgtacgttcttgactttta

SEQ ID NO: 197743 - DNA, 25 bp, SARS Virus
aacatcgtacgatcttgacttttac

SEQ ID NO: 197744 - DNA, 25 bp, SARS Virus
acatcgtacgattttgacttttaca

SEQ ID NO: 197745 - DNA, 25 bp, SARS Virus
catcgtacgatcttgacttttacaa

SEQ ID NO: 197746 - DNA, 25 bp, SARS Virus
atcgtacgatcttgacttttacaaa

SEQ ID NO: 197747 - DNA, 25 bp, SARS Virus
tcgtacgatctttacttttacaaac

SEQ ID NO: 197748 - DNA, 25 bp, SARS Virus
cgtacgatcttgtcttttacaaact

SEQ ID NO: 197749 - DNA, 25 bp, SARS Virus
gtacgatcttgatttttacaaactg

SEQ ID NO: 197750 - DNA, 25 bp, SARS Virus
tacgatcttgacttttacaaactgg

SEQ ID NO: 197751 - DNA, 25 bp, SARS Virus
acgatcttgacttttacaaactggt

SEQ ID NO: 197752 - DNA, 25 bp, SARS Virus
cgatcttgacttttacaaactggtc

SEQ ID NO: 197753 - DNA, 25 bp, SARS Virus
gatcttgacttttacaaactggtcc

SEQ ID NO: 197754 - DNA, 25 bp, SARS Virus
atcttgactttttcaaactggtcca

SEQ ID NO: 197755 - DNA, 25 bp, SARS Virus
tcttgacttttataaactggtccaa

SEQ ID NO: 197756 - DNA, 25 bp, SARS Virus
cttgacttttactaactggtccaac

SEQ ID NO: 197757 - DNA, 25 bp, SARS Virus
ttgacttttacatactggtccaacc

SEQ ID NO: 197758 - DNA, 25 bp, SARS Virus
tgacttttacaatctggtccaacct

SEQ ID NO: 197759 - DNA, 25 bp, SARS Virus
gacttttacaaattggtccaaccta

SEQ ID NO: 197760 - DNA, 25 bp, SARS Virus
acttttacaaactggtccaacctat

SEQ ID NO: 197761 - DNA, 25 bp, SARS Virus
cttttacaaacttgtccaacctatg

SEQ ID NO: 197762 - DNA, 25 bp, SARS Virus
ttttacaaactgttccaacctatgc

SEQ ID NO: 197763 - DNA, 25 bp, SARS Virus
tttacaaactggtccaacctatgcc

SEQ ID NO: 197764 - DNA, 25 bp, SARS Virus
ttacaaactggttcaacctatgcct

SEQ ID NO: 197765 - DNA, 25 bp, SARS Virus
tacaaactggtctaacctatgcctg

SEQ ID NO: 197766 - DNA, 25 bp, SARS Virus
acaaactggtcctacctatgcctgt

SEQ ID NO: 197767 - DNA, 25 bp, SARS Virus
caaactggtccatcctatgcctgtt

SEQ ID NO: 197768 - DNA, 25 bp, SARS Virus
aaactggtccaatctatgcctgttt

SEQ ID NO: 197769 - DNA, 25 bp, SARS Virus
aactggtccaacttatgcctgttta

SEQ ID NO: 197770 - DNA, 25 bp, SARS Virus
actggtccaacctatgcctgtttaa

SEQ ID NO: 197771 - DNA, 25 bp, SARS Virus
ctggtccaacctttgcctgtttaaa

SEQ ID NO: 197772 - DNA, 25 bp, SARS Virus
tggtccaacctatgcctgtttaaat

SEQ ID NO: 197773 - DNA, 25 bp, SARS Virus
ggtccaacctattcctgtttaaata

SEQ ID NO: 197774 - DNA, 25 bp, SARS Virus
gtccaacctatgtctgtttaaatat

SEQ ID NO: 197775 - DNA, 25 bp, SARS Virus
tccaacctatgcttgtttaaatatg

SEQ ID NO: 197776 - DNA, 25 bp, SARS Virus
ccaacctatgcctgtttaaatatga

SEQ ID NO: 197777 - DNA, 25 bp, SARS Virus
caacctatgcctttttaaatatgaa

SEQ ID NO: 197778 - DNA, 25 bp, SARS Virus
aacctatgcctgtttaaatatgaac

SEQ ID NO: 197779 - DNA, 25 bp, SARS Virus
acctatgcctgtttaaatatgaacc

SEQ ID NO: 197780 - DNA, 25 bp, SARS Virus
cctatgcctgtttaaatatgaaccc

SEQ ID NO: 197781 - DNA, 25 bp, SARS Virus
ctatgcctgttttaatatgaaccca

SEQ ID NO: 197782 - DNA, 25 bp, SARS Virus
tatgcctgtttatatatgaacccac

SEQ ID NO: 197783 - DNA, 25 bp, SARS Virus
atgcctgtttaattatgaacccaca

SEQ ID NO: 197784 - DNA, 25 bp, SARS Virus
tgcctgtttaaatatgaacccacag

SEQ ID NO: 197785 - DNA, 25 bp, SARS Virus
gcctgtttaaatttgaacccacaga

SEQ ID NO: 197786 - DNA, 25 bp, SARS Virus
cctgtttaaatatgaacccacagaa

SEQ ID NO: 197787 - DNA, 25 bp, SARS Virus
ctgtttaaatattaacccacagaat

SEQ ID NO: 197788 - DNA, 25 bp, SARS Virus
tgtttaaatatgtacccacagaatc

SEQ ID NO: 197789 - DNA, 25 bp, SARS Virus
gtttaaatatgatcccacagaatcc

SEQ ID NO: 197790 - DNA, 25 bp, SARS Virus
tttaaatatgaatccacagaatccc

SEQ ID NO: 197791 - DNA, 25 bp, SARS Virus
ttaaatatgaactcacagaatccca

SEQ ID NO: 197792 - DNA, 25 bp, SARS Virus
taaatatgaacctacagaatcccaa

SEQ ID NO: 197793 - DNA, 25 bp, SARS Virus
aaatatgaaccctcagaatcccaat

SEQ ID NO: 197794 - DNA, 25 bp, SARS Virus
aatatgaacccatagaatcccaatc

SEQ ID NO: 197795 - DNA, 25 bp, SARS Virus
atatgaacccactgaatcccaatct

SEQ ID NO: 197796 - DNA, 25 bp, SARS Virus
tatgaacccacataatcccaatctt

SEQ ID NO: 197797 - DNA, 25 bp, SARS Virus
atgaacccacagtatcccaatcttc

SEQ ID NO: 197798 - DNA, 25 bp, SARS Virus
tgaacccacagattcccaatcttca

SEQ ID NO: 197799 - DNA, 25 bp, SARS Virus
gaacccacagaatcccaatcttcat

SEQ ID NO: 197800 - DNA, 25 bp, SARS Virus
aacccacagaattccaatcttcata

SEQ ID NO: 197801 - DNA, 25 bp, SARS Virus
acccacagaatctcaatcttcatag

SEQ ID NO: 197802 - DNA, 25 bp, SARS Virus
cccacagaatcctaatcttcatagt

SEQ ID NO: 197803 - DNA, 25 bp, SARS Virus
ccacagaatccctatcttcatagtt

SEQ ID NO: 197804 - DNA, 25 bp, SARS Virus
cacagaatcccattcttcatagttg

SEQ ID NO: 197805 - DNA, 25 bp, SARS Virus
acagaatcccaatcttcatagttga

SEQ ID NO: 197806 - DNA, 25 bp, SARS Virus
cagaatcccaattttcatagttgaa

SEQ ID NO: 197807 - DNA, 25 bp, SARS Virus
agaatcccaatcttcatagttgaaa

SEQ ID NO: 197808 - DNA, 25 bp, SARS Virus
gaatcccaatcttcatagttgaaat

SEQ ID NO: 197809 - DNA, 25 bp, SARS Virus
aatcccaatctttatagttgaaatt

SEQ ID NO: 197810 - DNA, 25 bp, SARS Virus
atcccaatcttcttagttgaaattc

SEQ ID NO: 197811 - DNA, 25 bp, SARS Virus
tcccaatcttcatagttgaaattcg

SEQ ID NO: 197812 - DNA, 25 bp, SARS Virus
cccaatcttcattgttgaaattcgg

SEQ ID NO: 197813 - DNA, 25 bp, SARS Virus
ccaatcttcatatttgaaattcgga

SEQ ID NO: 197814 - DNA, 25 bp, SARS Virus
caatcttcatagttgaaattcggat

SEQ ID NO: 197815 - DNA, 25 bp, SARS Virus
aatcttcatagttgaaattcggatt

SEQ ID NO: 197816 - DNA, 25 bp, SARS Virus
atcttcatagtttaaattcggattc

SEQ ID NO: 197817 - DNA, 25 bp, SARS Virus
tcttcatagttgtaattcggattcg

SEQ ID NO: 197818 - DNA, 25 bp, SARS Virus
cttcatagttgatattcggattcgt

SEQ ID NO: 197819 - DNA, 25 bp, SARS Virus
ttcatagttgaatttcggattcgtc

SEQ ID NO: 197820 - DNA, 25 bp, SARS Virus
tcatagttgaaattcggattcgtct

SEQ ID NO: 197821 - DNA, 25 bp, SARS Virus
catagttgaaattcggattcgtctg

SEQ ID NO: 197822 - DNA, 25 bp, SARS Virus
atagttgaaatttggattcgtctgt

SEQ ID NO: 197823 - DNA, 25 bp, SARS Virus
tagttgaaattctgattcgtctgtt

SEQ ID NO: 197824 - DNA, 25 bp, SARS Virus
agttgaaattcgtattcgtctgtta

SEQ ID NO: 197825 - DNA, 25 bp, SARS Virus
gttgaaattcggtttcgtctgttaa

SEQ ID NO: 197826 - DNA, 25 bp, SARS Virus
ttgaaattcggattcgtctgttaaa

SEQ ID NO: 197827 - DNA, 25 bp, SARS Virus
tgaaattcggattcgtctgttaaaa

SEQ ID NO: 197828 - DNA, 25 bp, SARS Virus
gaaattcggatttgtctgttaaaac

SEQ ID NO: 197829 - DNA, 25 bp, SARS Virus
aaattcggattcttctgttaaaacg

SEQ ID NO: 197830 - DNA, 25 bp, SARS Virus
aattcggattcgtctgttaaaacgt

SEQ ID NO: 197831 - DNA, 25 bp, SARS Virus
attcggattcgtttgttaaaacgta

SEQ ID NO: 197832 - DNA, 25 bp, SARS Virus
ttcggattcgtctgttaaaacgtat

SEQ ID NO: 197833 - DNA, 25 bp, SARS Virus
tcggattcgtcttttaaaacgtatc

SEQ ID NO: 197834 - DNA, 25 bp, SARS Virus
cggattcgtctgttaaaacgtatct

SEQ ID NO: 197835 - DNA, 25 bp, SARS Virus
ggattcgtctgttaaaacgtatctt

SEQ ID NO: 197836 - DNA, 25 bp, SARS Virus
gattcgtctgtttaaacgtatctta

SEQ ID NO: 197837 - DNA, 25 bp, SARS Virus
attcgtctgttataacgtatcttac

SEQ ID NO: 197838 - DNA, 25 bp, SARS Virus
ttcgtctgttaatacgtatcttacc

SEQ ID NO: 197839 - DNA, 25 bp, SARS Virus
tcgtctgttaaatcgtatcttaccg

SEQ ID NO: 197840 - DNA, 25 bp, SARS Virus
cgtctgttaaaatgtatcttaccgg

SEQ ID NO: 197841 - DNA, 25 bp, SARS Virus
gtctgttaaaacttatcttaccggt

SEQ ID NO: 197842 - DNA, 25 bp, SARS Virus
tctgttaaaacgtatcttaccggtt

SEQ ID NO: 197843 - DNA, 25 bp, SARS Virus
ctgttaaaacgtttcttaccggtta

SEQ ID NO: 197844 - DNA, 25 bp, SARS Virus
tgttaaaacgtatcttaccggttat

SEQ ID NO: 197845 - DNA, 25 bp, SARS Virus
gttaaaacgtattttaccggttatt

SEQ ID NO: 197846 - DNA, 25 bp, SARS Virus
ttaaaacgtatcttaccggttattg

SEQ ID NO: 197847 - DNA, 25 bp, SARS Virus
taaaacgtatcttaccggttattgt

SEQ ID NO: 197848 - DNA, 25 bp, SARS Virus
aaaacgtatctttccggttattgtg

SEQ ID NO: 197849 - DNA, 25 bp, SARS Virus
aaacgtatcttatcggttattgtgc

SEQ ID NO: 197850 - DNA, 25 bp, SARS Virus
aacgtatcttactggttattgtgct

SEQ ID NO: 197851 - DNA, 25 bp, SARS Virus
acgtatcttacctgttattgtgctt

SEQ ID NO: 197852 - DNA, 25 bp, SARS Virus
cgtatcttaccgtttattgtgcttc

SEQ ID NO: 197853 - DNA, 25 bp, SARS Virus
gtatcttaccggttattgtgcttca

SEQ ID NO: 197854 - DNA, 25 bp, SARS Virus
tatcttaccggttattgtgcttcaa

SEQ ID NO: 197855 - DNA, 25 bp, SARS Virus
atcttaccggtttttgtgcttcaac

SEQ ID NO: 197856 - DNA, 25 bp, SARS Virus
tcttaccggttattgtgcttcaact

SEQ ID NO: 197857 - DNA, 25 bp, SARS Virus
cttaccggttattgtgcttcaactt

SEQ ID NO: 197858 - DNA, 25 bp, SARS Virus
ttaccggttattttgcttcaacttg

SEQ ID NO: 197859 - DNA, 25 bp, SARS Virus
taccggttattgtgcttcaacttgt

SEQ ID NO: 197860 - DNA, 25 bp, SARS Virus
accggttattgttcttcaacttgta

SEQ ID NO: 197861 - DNA, 25 bp, SARS Virus
ccggttattgtgtttcaacttgtaa

SEQ ID NO: 197862 - DNA, 25 bp, SARS Virus
cggttattgtgcttcaacttgtaac

SEQ ID NO: 197863 - DNA, 25 bp, SARS Virus
ggttattgtgcttcaacttgtaacg

SEQ ID NO: 197864 - DNA, 25 bp, SARS Virus
gttattgtgctttaacttgtaacgg

SEQ ID NO: 197865 - DNA, 25 bp, SARS Virus
ttattgtgcttctacttgtaacggt

SEQ ID NO: 197866 - DNA, 25 bp, SARS Virus
tattgtgcttcatcttgtaacggtc

SEQ ID NO: 197867 - DNA, 25 bp, SARS Virus
attgtgcttcaatttgtaacggtcg

SEQ ID NO: 197868 - DNA, 25 bp, SARS Virus
ttgtgcttcaacttgtaacggtcgg

SEQ ID NO: 197869 - DNA, 25 bp, SARS Virus
tgtgcttcaacttgtaacggtcgga

SEQ ID NO: 197870 - DNA, 25 bp, SARS Virus
gtgcttcaacttttaacggtcggac

SEQ ID NO: 197871 - DNA, 25 bp, SARS Virus
tgcttcaacttgtaacggtcggact

SEQ ID NO: 197872 - DNA, 25 bp, SARS Virus
gcttcaacttgttacggtcggactt

SEQ ID NO: 197873 - DNA, 25 bp, SARS Virus
cttcaacttgtatcggtcggacttg

SEQ ID NO: 197874 - DNA, 25 bp, SARS Virus
ttcaacttgtaatggtcggacttgt

SEQ ID NO: 197875 - DNA, 25 bp, SARS Virus
tcaacttgtaactgtcggacttgtt

SEQ ID NO: 197876 - DNA, 25 bp, SARS Virus
caacttgtaacgttcggacttgttc

SEQ ID NO: 197877 - DNA, 25 bp, SARS Virus
aacttgtaacggtcggacttgttct

SEQ ID NO: 197878 - DNA, 25 bp, SARS Virus
acttgtaacggttggacttgttctt

SEQ ID NO: 197879 - DNA, 25 bp, SARS Virus
cttgtaacggtctgacttgttcttt

SEQ ID NO: 197880 - DNA, 25 bp, SARS Virus
ttgtaacggtcgtacttgttctttc

SEQ ID NO: 197881 - DNA, 25 bp, SARS Virus
tgtaacggtcggtcttgttctttcg

SEQ ID NO: 197882 - DNA, 25 bp, SARS Virus
gtaacggtcggatttgttctttcga

SEQ ID NO: 197883 - DNA, 25 bp, SARS Virus
taacggtcggacttgttctttcgat

SEQ ID NO: 197884 - DNA, 25 bp, SARS Virus
aacggtcggacttgttctttcgata

SEQ ID NO: 197885 - DNA, 25 bp, SARS Virus
acggtcggactttttctttcgatac

SEQ ID NO: 197886 - DNA, 25 bp, SARS Virus
cggtcggacttgttctttcgatacc

SEQ ID NO: 197887 - DNA, 25 bp, SARS Virus
ggtcggacttgttctttcgatacca

SEQ ID NO: 197888 - DNA, 25 bp, SARS Virus
gtcggacttgttttttcgataccaa

SEQ ID NO: 197889 - DNA, 25 bp, SARS Virus
tcggacttgttctttcgataccaac

SEQ ID NO: 197890 - DNA, 25 bp, SARS Virus
cggacttgttctttcgataccaacc

SEQ ID NO: 197891 - DNA, 25 bp, SARS Virus
ggacttgttctttcgataccaacct

SEQ ID NO: 197892 - DNA, 25 bp, SARS Virus
gacttgttcttttgataccaaccta

SEQ ID NO: 197893 - DNA, 25 bp, SARS Virus
acttgttctttctataccaacctaa

SEQ ID NO: 197894 - DNA, 25 bp, SARS Virus
cttgttctttcgttaccaacctaaa

SEQ ID NO: 197895 - DNA, 25 bp, SARS Virus
ttgttctttcgataccaacctaaac

SEQ ID NO: 197896 - DNA, 25 bp, SARS Virus
tgttctttcgattccaacctaaacg

SEQ ID NO: 197897 - DNA, 25 bp, SARS Virus
gttctttcgatatcaacctaaacgc

SEQ ID NO: 197898 - DNA, 25 bp, SARS Virus
ttctttcgatactaacctaaacgct

SEQ ID NO: 197899 - DNA, 25 bp, SARS Virus
tctttcgatacctacctaaacgctt

SEQ ID NO: 197900 - DNA, 25 bp, SARS Virus
ctttcgataccatcctaaacgctta

SEQ ID NO: 197901 - DNA, 25 bp, SARS Virus
tttcgataccaatctaaacgcttac

SEQ ID NO: 197902 - DNA, 25 bp, SARS Virus
ttcgataccaacttaaacgcttact

SEQ ID NO: 197903 - DNA, 25 bp, SARS Virus
tcgataccaacctaaacgcttactc

SEQ ID NO: 197904 - DNA, 25 bp, SARS Virus
cgataccaaccttaacgcttactcg

SEQ ID NO: 197905 - DNA, 25 bp, SARS Virus
gataccaacctatacgcttactcgt

SEQ ID NO: 197906 - DNA, 25 bp, SARS Virus
ataccaacctaatcgcttactcgtc

SEQ ID NO: 197907 - DNA, 25 bp, SARS Virus
taccaacctaaatgcttactcgtct

SEQ ID NO: 197908 - DNA, 25 bp, SARS Virus
accaacctaaactcttactcgtcta

SEQ ID NO: 197909 - DNA, 25 bp, SARS Virus
ccaacctaaacgtttactcgtctag

SEQ ID NO: 197910 - DNA, 25 bp, SARS Virus
caacctaaacgcttactcgtctaga

SEQ ID NO: 197911 - DNA, 25 bp, SARS Virus
aacctaaacgcttactcgtctagaa

SEQ ID NO: 197912 - DNA, 25 bp, SARS Virus
acctaaacgctttctcgtctagaag

SEQ ID NO: 197913 - DNA, 25 bp, SARS Virus
cctaaacgcttattcgtctagaagt

SEQ ID NO: 197914 - DNA, 25 bp, SARS Virus
ctaaacgcttactcgtctagaagta

SEQ ID NO: 197915 - DNA, 25 bp, SARS Virus
taaacgcttacttgtctagaagtat

SEQ ID NO: 197916 - DNA, 25 bp, SARS Virus
aaacgcttactcttctagaagtatc

SEQ ID NO: 197917 - DNA, 25 bp, SARS Virus
aacgcttactcgtctagaagtatca

SEQ ID NO: 197918 - DNA, 25 bp, SARS Virus
acgcttactcgtttagaagtatcaa

SEQ ID NO: 197919 - DNA, 25 bp, SARS Virus
cgcttactcgtctagaagtatcaat

SEQ ID NO: 197920 - DNA, 25 bp, SARS Virus
gcttactcgtcttgaagtatcaatc

SEQ ID NO: 197921 - DNA, 25 bp, SARS Virus
cttactcgtctataagtatcaatcc

SEQ ID NO: 197922 - DNA, 25 bp, SARS Virus
ttactcgtctagtagtatcaatcct

SEQ ID NO: 197923 - DNA, 25 bp, SARS Virus
tactcgtctagatgtatcaatccta

SEQ ID NO: 197924 - DNA, 25 bp, SARS Virus
actcgtctagaattatcaatcctaa

SEQ ID NO: 197925 - DNA, 25 bp, SARS Virus
ctcgtctagaagtatcaatcctaat

SEQ ID NO: 197926 - DNA, 25 bp, SARS Virus
tcgtctagaagtttcaatcctaatt

SEQ ID NO: 197927 - DNA, 25 bp, SARS Virus
cgtctagaagtatcaatcctaattc

SEQ ID NO: 197928 - DNA, 25 bp, SARS Virus
gtctagaagtattaatcctaattcg

SEQ ID NO: 197929 - DNA, 25 bp, SARS Virus
tctagaagtatctatcctaattcgt

SEQ ID NO: 197930 - DNA, 25 bp, SARS Virus
ctagaagtatcattcctaattcgta

SEQ ID NO: 197931 - DNA, 25 bp, SARS Virus
tagaagtatcaatcctaattcgtac

SEQ ID NO: 197932 - DNA, 25 bp, SARS Virus
agaagtatcaattctaattcgtaca

SEQ ID NO: 197933 - DNA, 25 bp, SARS Virus
gaagtatcaatcttaattcgtacag

SEQ ID NO: 197934 - DNA, 25 bp, SARS Virus
aagtatcaatcctaattcgtacaga

SEQ ID NO: 197935 - DNA, 25 bp, SARS Virus
agtatcaatccttattcgtacagaa

SEQ ID NO: 197936 - DNA, 25 bp, SARS Virus
gtatcaatcctatttcgtacagaag

SEQ ID NO: 197937 - DNA, 25 bp, SARS Virus
tatcaatcctaattcgtacagaaga

SEQ ID NO: 197938 - DNA, 25 bp, SARS Virus
atcaatcctaattcgtacagaagac

SEQ ID NO: 197939 - DNA, 25 bp, SARS Virus
tcaatcctaatttgtacagaagacg

SEQ ID NO: 197940 - DNA, 25 bp, SARS Virus
caatcctaattcttacagaagacga

SEQ ID NO: 197941 - DNA, 25 bp, SARS Virus
aatcctaattcgtacagaagacgac

SEQ ID NO: 197942 - DNA, 25 bp, SARS Virus
atcctaattcgttcagaagacgaca

SEQ ID NO: 197943 - DNA, 25 bp, SARS Virus
tcctaattcgtatagaagacgacac

SEQ ID NO: 197944 - DNA, 25 bp, SARS Virus
cctaattcgtactgaagacgacacg

SEQ ID NO: 197945 - DNA, 25 bp, SARS Virus
ctaattcgtacataagacgacacgt

SEQ ID NO: 197946 - DNA, 25 bp, SARS Virus
taattcgtacagtagacgacacgtt

SEQ ID NO: 197947 - DNA, 25 bp, SARS Virus
aattcgtacagatgacgacacgttt

SEQ ID NO: 197948 - DNA, 25 bp, SARS Virus
attcgtacagaatacgacacgttta

SEQ ID NO: 197949 - DNA, 25 bp, SARS Virus
ttcgtacagaagtcgacacgtttac

SEQ ID NO: 197950 - DNA, 25 bp, SARS Virus
tcgtacagaagatgacacgtttact

SEQ ID NO: 197951 - DNA, 25 bp, SARS Virus
cgtacagaagactacacgtttactg

SEQ ID NO: 197952 - DNA, 25 bp, SARS Virus
gtacagaagacgtcacgtttactgt

SEQ ID NO: 197953 - DNA, 25 bp, SARS Virus
tacagaagacgatacgtttactgta

SEQ ID NO: 197954 - DNA, 25 bp, SARS Virus
acagaagacgactcgtttactgtac

SEQ ID NO: 197955 - DNA, 25 bp, SARS Virus
cagaagacgacatgtttactgtaca

SEQ ID NO: 197956 - DNA, 25 bp, SARS Virus
agaagacgacacttttactgtacag

SEQ ID NO: 197957 - DNA, 25 bp, SARS Virus
gaagacgacacgtttactgtacaga

SEQ ID NO: 197958 - DNA, 25 bp, SARS Virus
aagacgacacgtttactgtacagaa

SEQ ID NO: 197959 - DNA, 25 bp, SARS Virus
agacgacacgtttactgtacagaac

SEQ ID NO: 197960 - DNA, 25 bp, SARS Virus
gacgacacgttttctgtacagaacc

SEQ ID NO: 197961 - DNA, 25 bp, SARS Virus
acgacacgtttattgtacagaacct

SEQ ID NO: 197962 - DNA, 25 bp, SARS Virus
cgacacgtttactgtacagaacctg

SEQ ID NO: 197963 - DNA, 25 bp, SARS Virus
gacacgtttactttacagaacctgt

SEQ ID NO: 197964 - DNA, 25 bp, SARS Virus
acacgtttactgtacagaacctgtc

SEQ ID NO: 197965 - DNA, 25 bp, SARS Virus
cacgtttactgttcagaacctgtca

SEQ ID NO: 197966 - DNA, 25 bp, SARS Virus
acgtttactgtatagaacctgtcat

SEQ ID NO: 197967 - DNA, 25 bp, SARS Virus
cgtttactgtactgaacctgtcata

SEQ ID NO: 197968 - DNA, 25 bp, SARS Virus
gtttactgtacataacctgtcatat

SEQ ID NO: 197969 - DNA, 25 bp, SARS Virus
tttactgtacagtacctgtcatatg

SEQ ID NO: 197970 - DNA, 25 bp, SARS Virus
ttactgtacagatcctgtcatatga

SEQ ID NO: 197971 - DNA, 25 bp, SARS Virus
tactgtacagaatctgtcatatgac

SEQ ID NO: 197972 - DNA, 25 bp, SARS Virus
actgtacagaacttgtcatatgaca

SEQ ID NO: 197973 - DNA, 25 bp, SARS Virus
ctgtacagaacctgtcatatgacac

SEQ ID NO: 197974 - DNA, 25 bp, SARS Virus
tgtacagaacctttcatatgacaca

SEQ ID NO: 197975 - DNA, 25 bp, SARS Virus
gtacagaacctgtcatatgacacag

SEQ ID NO: 197976 - DNA, 25 bp, SARS Virus
tacagaacctgttatatgacacagt

SEQ ID NO: 197977 - DNA, 25 bp, SARS Virus
acagaacctgtcttatgacacagta

SEQ ID NO: 197978 - DNA, 25 bp, SARS Virus
cagaacctgtcatatgacacagtag

SEQ ID NO: 197979 - DNA, 25 bp, SARS Virus
agaacctgtcatttgacacagtagg

SEQ ID NO: 197980 - DNA, 25 bp, SARS Virus
gaacctgtcatatgacacagtaggt

SEQ ID NO: 197981 - DNA, 25 bp, SARS Virus
aacctgtcatattacacagtaggtt

SEQ ID NO: 197982 - DNA, 25 bp, SARS Virus
acctgtcatatgtcacagtaggttg

SEQ ID NO: 197983 - DNA, 25 bp, SARS Virus
cctgtcatatgatacagtaggttgg

SEQ ID NO: 197984 - DNA, 25 bp, SARS Virus
ctgtcatatgactcagtaggttggt

SEQ ID NO: 197985 - DNA, 25 bp, SARS Virus
tgtcatatgacatagtaggttggtg

SEQ ID NO: 197986 - DNA, 25 bp, SARS Virus
gtcatatgacactgtaggttggtgt

SEQ ID NO: 197987 - DNA, 25 bp, SARS Virus
tcatatgacacattaggttggtgtt

SEQ ID NO: 197988 - DNA, 25 bp, SARS Virus
catatgacacagtaggttggtgtta

SEQ ID NO: 197989 - DNA, 25 bp, SARS Virus
atatgacacagttggttggtgttag

SEQ ID NO: 197990 - DNA, 25 bp, SARS Virus
tatgacacagtatgttggtgttagg

SEQ ID NO: 197991 - DNA, 25 bp, SARS Virus
atgacacagtagtttggtgttaggt

SEQ ID NO: 197992 - DNA, 25 bp, SARS Virus
tgacacagtaggttggtgttaggta

SEQ ID NO: 197993 - DNA, 25 bp, SARS Virus
gacacagtaggttggtgttaggtaa

SEQ ID NO: 197994 - DNA, 25 bp, SARS Virus
acacagtaggtttgtgttaggtaat

SEQ ID NO: 197995 - DNA, 25 bp, SARS Virus
cacagtaggttgttgttaggtaatt

SEQ ID NO: 197996 - DNA, 25 bp, SARS Virus
acagtaggttggtgttaggtaattc

SEQ ID NO: 197997 - DNA, 25 bp, SARS Virus
cagtaggttggttttaggtaattct

SEQ ID NO: 197998 - DNA, 25 bp, SARS Virus
agtaggttggtgttaggtaattctc

SEQ ID NO: 197999 - DNA, 25 bp, SARS Virus
gtaggttggtgttaggtaattctca

SEQ ID NO: 198000 - DNA, 25 bp, SARS Virus
taggttggtgtttggtaattctcaa

SEQ ID NO: 198001 - DNA, 25 bp, SARS Virus
aggttggtgttatgtaattctcaac

SEQ ID NO: 198002 - DNA, 25 bp, SARS Virus
ggttggtgttagttaattctcaaca

SEQ ID NO: 198003 - DNA, 25 bp, SARS Virus
gttggtgttaggtaattctcaacat

SEQ ID NO: 198004 - DNA, 25 bp, SARS Virus
ttggtgttaggttattctcaacatc

SEQ ID NO: 198005 - DNA, 25 bp, SARS Virus
tggtgttaggtatttctcaacatca

SEQ ID NO: 198006 - DNA, 25 bp, SARS Virus
ggtgttaggtaattctcaacatcaa

SEQ ID NO: 198007 - DNA, 25 bp, SARS Virus
gtgttaggtaattctcaacatcaag

SEQ ID NO: 198008 - DNA, 25 bp, SARS Virus
tgttaggtaattttcaacatcaagg

SEQ ID NO: 198009 - DNA, 25 bp, SARS Virus
gttaggtaattctcaacatcaaggt

SEQ ID NO: 198010 - DNA, 25 bp, SARS Virus
ttaggtaattcttaacatcaaggtg

SEQ ID NO: 198011 - DNA, 25 bp, SARS Virus
taggtaattctctacatcaaggtgt

SEQ ID NO: 198012 - DNA, 25 bp, SARS Virus
aggtaattctcatcatcaaggtgtc

SEQ ID NO: 198013 - DNA, 25 bp, SARS Virus
ggtaattctcaatatcaaggtgtcc

SEQ ID NO: 198014 - DNA, 25 bp, SARS Virus
gtaattctcaacttcaaggtgtcca

SEQ ID NO: 198015 - DNA, 25 bp, SARS Virus
taattctcaacatcaaggtgtccaa

SEQ ID NO: 198016 - DNA, 25 bp, SARS Virus
aattctcaacattaaggtgtccaat

SEQ ID NO: 198017 - DNA, 25 bp, SARS Virus
attctcaacatctaggtgtccaatg

SEQ ID NO: 198018 - DNA, 25 bp, SARS Virus
ttctcaacatcatggtgtccaatga

SEQ ID NO: 198019 - DNA, 25 bp, SARS Virus
tctcaacatcaatgtgtccaatgaa

SEQ ID NO: 198020 - DNA, 25 bp, SARS Virus
ctcaacatcaagttgtccaatgaac

SEQ ID NO: 198021 - DNA, 25 bp, SARS Virus
tcaacatcaaggtgtccaatgaaca

SEQ ID NO: 198022 - DNA, 25 bp, SARS Virus
caacatcaaggtttccaatgaacat

SEQ ID NO: 198023 - DNA, 25 bp, SARS Virus
aacatcaaggtgtccaatgaacatg

SEQ ID NO: 198024 - DNA, 25 bp, SARS Virus
acatcaaggtgttcaatgaacatgg

SEQ ID NO: 198025 - DNA, 25 bp, SARS Virus
catcaaggtgtctaatgaacatggt

SEQ ID NO: 198026 - DNA, 25 bp, SARS Virus
atcaaggtgtcctatgaacatggta

SEQ ID NO: 198027 - DNA, 25 bp, SARS Virus
tcaaggtgtccattgaacatggtac

SEQ ID NO: 198028 - DNA, 25 bp, SARS Virus
caaggtgtccaatgaacatggtacg

SEQ ID NO: 198029 - DNA, 25 bp, SARS Virus
aaggtgtccaattaacatggtacgt

SEQ ID NO: 198030 - DNA, 25 bp, SARS Virus
aggtgtccaatgtacatggtacgtg

SEQ ID NO: 198031 - DNA, 25 bp, SARS Virus
ggtgtccaatgatcatggtacgtgg

SEQ ID NO: 198032 - DNA, 25 bp, SARS Virus
gtgtccaatgaatatggtacgtggg

SEQ ID NO: 198033 - DNA, 25 bp, SARS Virus
tgtccaatgaacttggtacgtggga

SEQ ID NO: 198034 - DNA, 25 bp, SARS Virus
gtccaatgaacatggtacgtgggaa

SEQ ID NO: 198035 - DNA, 25 bp, SARS Virus
tccaatgaacattgtacgtgggaag

SEQ ID NO: 198036 - DNA, 25 bp, SARS Virus
ccaatgaacatgttacgtgggaagt

SEQ ID NO: 198037 - DNA, 25 bp, SARS Virus
caatgaacatggtacgtgggaagtt

SEQ ID NO: 198038 - DNA, 25 bp, SARS Virus
aatgaacatggttcgtgggaagttg

SEQ ID NO: 198039 - DNA, 25 bp, SARS Virus
atgaacatggtatgtgggaagttga

SEQ ID NO: 198040 - DNA, 25 bp, SARS Virus
tgaacatggtacttgggaagttgaa

SEQ ID NO: 198041 - DNA, 25 bp, SARS Virus
gaacatggtacgtgggaagttgaaa

SEQ ID NO: 198042 - DNA, 25 bp, SARS Virus
aacatggtacgttggaagttgaaac

SEQ ID NO: 198043 - DNA, 25 bp, SARS Virus
acatggtacgtgtgaagttgaaacg

SEQ ID NO: 198044 - DNA, 25 bp, SARS Virus
catggtacgtggtaagttgaaacgg

SEQ ID NO: 198045 - DNA, 25 bp, SARS Virus
atggtacgtgggtagttgaaacgga

SEQ ID NO: 198046 - DNA, 25 bp, SARS Virus
tggtacgtgggatgttgaaacggac

SEQ ID NO: 198047 - DNA, 25 bp, SARS Virus
ggtacgtgggaatttgaaacggact

SEQ ID NO: 198048 - DNA, 25 bp, SARS Virus
gtacgtgggaagttgaaacggactg

SEQ ID NO: 198049 - DNA, 25 bp, SARS Virus
tacgtgggaagttgaaacggactgc

SEQ ID NO: 198050 - DNA, 25 bp, SARS Virus
acgtgggaagtttaaacggactgcc

SEQ ID NO: 198051 - DNA, 25 bp, SARS Virus
cgtgggaagttgtaacggactgccc

SEQ ID NO: 198052 - DNA, 25 bp, SARS Virus
gtgggaagttgatacggactgccct

SEQ ID NO: 198053 - DNA, 25 bp, SARS Virus
tgggaagttgaatcggactgccctt

SEQ ID NO: 198054 - DNA, 25 bp, SARS Virus
gggaagttgaaatggactgccctta

SEQ ID NO: 198055 - DNA, 25 bp, SARS Virus
ggaagttgaaactgactgcccttac

SEQ ID NO: 198056 - DNA, 25 bp, SARS Virus
gaagttgaaacgtactgcccttacg

SEQ ID NO: 198057 - DNA, 25 bp, SARS Virus
aagttgaaacggtctgcccttacgg

SEQ ID NO: 198058 - DNA, 25 bp, SARS Virus
agttgaaacggattgcccttacggt

SEQ ID NO: 198059 - DNA, 25 bp, SARS Virus
gttgaaacggactgcccttacggta

SEQ ID NO: 198060 - DNA, 25 bp, SARS Virus
ttgaaacggacttcccttacggtaa

SEQ ID NO: 198061 - DNA, 25 bp, SARS Virus
tgaaacggactgtccttacggtaaa

SEQ ID NO: 198062 - DNA, 25 bp, SARS Virus
gaaacggactgctcttacggtaaaa

SEQ ID NO: 198063 - DNA, 25 bp, SARS Virus
aaacggactgcctttacggtaaaag

SEQ ID NO: 198064 - DNA, 25 bp, SARS Virus
aacggactgcccttacggtaaaagg

SEQ ID NO: 198065 - DNA, 25 bp, SARS Virus
acggactgcccttacggtaaaagga

SEQ ID NO: 198066 - DNA, 25 bp, SARS Virus
cggactgccctttcggtaaaaggat

SEQ ID NO: 198067 - DNA, 25 bp, SARS Virus
ggactgcccttatggtaaaaggatt

SEQ ID NO: 198068 - DNA, 25 bp, SARS Virus
gactgcccttactgtaaaaggattt

SEQ ID NO: 198069 - DNA, 25 bp, SARS Virus
actgcccttacgttaaaaggatttt

SEQ ID NO: 198070 - DNA, 25 bp, SARS Virus
ctgcccttacggtaaaaggattttg

SEQ ID NO: 198071 - DNA, 25 bp, SARS Virus
tgcccttacggttaaaggattttgg

SEQ ID NO: 198072 - DNA, 25 bp, SARS Virus
gcccttacggtataaggattttggt

SEQ ID NO: 198073 - DNA, 25 bp, SARS Virus
cccttacggtaataggattttggtg

SEQ ID NO: 198074 - DNA, 25 bp, SARS Virus
ccttacggtaaatggattttggtga

SEQ ID NO: 198075 - DNA, 25 bp, SARS Virus
cttacggtaaaatgattttggtgag

SEQ ID NO: 198076 - DNA, 25 bp, SARS Virus
ttacggtaaaagtattttggtgaga

SEQ ID NO: 198077 - DNA, 25 bp, SARS Virus
tacggtaaaaggtttttggtgagac

SEQ ID NO: 198078 - DNA, 25 bp, SARS Virus
acggtaaaaggattttggtgagacg

SEQ ID NO: 198079 - DNA, 25 bp, SARS Virus
cggtaaaaggattttggtgagacgt

SEQ ID NO: 198080 - DNA, 25 bp, SARS Virus
ggtaaaaggattttggtgagacgtc

SEQ ID NO: 198081 - DNA, 25 bp, SARS Virus
gtaaaaggattttggtgagacgtct

SEQ ID NO: 198082 - DNA, 25 bp, SARS Virus
taaaaggatttttgtgagacgtctt

SEQ ID NO: 198083 - DNA, 25 bp, SARS Virus
aaaaggattttgttgagacgtcttg

SEQ ID NO: 198084 - DNA, 25 bp, SARS Virus
aaaggattttggtgagacgtcttgt

SEQ ID NO: 198085 - DNA, 25 bp, SARS Virus
aaggattttggttagacgtcttgtc

SEQ ID NO: 198086 - DNA, 25 bp, SARS Virus
aggattttggtgtgacgtcttgtcg

SEQ ID NO: 198087 - DNA, 25 bp, SARS Virus
ggattttggtgatacgtcttgtcgt

SEQ ID NO: 198088 - DNA, 25 bp, SARS Virus
gattttggtgagtcgtcttgtcgtc

SEQ ID NO: 198089 - DNA, 25 bp, SARS Virus
attttggtgagatgtcttgtcgtct

SEQ ID NO: 198090 - DNA, 25 bp, SARS Virus
ttttggtgagacttcttgtcgtctt

SEQ ID NO: 198091 - DNA, 25 bp, SARS Virus
tttggtgagacgtcttgtcgtcttc

SEQ ID NO: 198092 - DNA, 25 bp, SARS Virus
ttggtgagacgttttgtcgtcttca

SEQ ID NO: 198093 - DNA, 25 bp, SARS Virus
tggtgagacgtcttgtcgtcttcac

SEQ ID NO: 198094 - DNA, 25 bp, SARS Virus
ggtgagacgtcttgtcgtcttcact

SEQ ID NO: 198095 - DNA, 25 bp, SARS Virus
gtgagacgtcttttcgtcttcacta

SEQ ID NO: 198096 - DNA, 25 bp, SARS Virus
tgagacgtcttgtcgtcttcactaa

SEQ ID NO: 198097 - DNA, 25 bp, SARS Virus
gagacgtcttgttgtcttcactaac

SEQ ID NO: 198098 - DNA, 25 bp, SARS Virus
agacgtcttgtcttcttcactaact

SEQ ID NO: 198099 - DNA, 25 bp, SARS Virus
gacgtcttgtcgtcttcactaacta

SEQ ID NO: 198100 - DNA, 25 bp, SARS Virus
acgtcttgtcgttttcactaactac

SEQ ID NO: 198101 - DNA, 25 bp, SARS Virus
cgtcttgtcgtcttcactaactaca

SEQ ID NO: 198102 - DNA, 25 bp, SARS Virus
gtcttgtcgtcttcactaactacag

SEQ ID NO: 198103 - DNA, 25 bp, SARS Virus
tcttgtcgtctttactaactacaga

SEQ ID NO: 198104 - DNA, 25 bp, SARS Virus
cttgtcgtcttctctaactacagac

SEQ ID NO: 198105 - DNA, 25 bp, SARS Virus
ttgtcgtcttcattaactacagaca

SEQ ID NO: 198106 - DNA, 25 bp, SARS Virus
tgtcgtcttcactaactacagacac

SEQ ID NO: 198107 - DNA, 25 bp, SARS Virus
gtcgtcttcacttactacagacacc

SEQ ID NO: 198108 - DNA, 25 bp, SARS Virus
tcgtcttcactatctacagacacca

SEQ ID NO: 198109 - DNA, 25 bp, SARS Virus
cgtcttcactaattacagacaccac

SEQ ID NO: 198110 - DNA, 25 bp, SARS Virus
gtcttcactaactacagacaccacc

SEQ ID NO: 198111 - DNA, 25 bp, SARS Virus
tcttcactaacttcagacaccacca

SEQ ID NO: 198112 - DNA, 25 bp, SARS Virus
cttcactaactatagacaccaccaa

SEQ ID NO: 198113 - DNA, 25 bp, SARS Virus
ttcactaactactgacaccaccaac

SEQ ID NO: 198114 - DNA, 25 bp, SARS Virus
tcactaactacatacaccaccaacc

SEQ ID NO: 198115 - DNA, 25 bp, SARS Virus
cactaactacagtcaccaccaacca

SEQ ID NO: 198116 - DNA, 25 bp, SARS Virus
actaactacagataccaccaaccat

SEQ ID NO: 198117 - DNA, 25 bp, SARS Virus
ctaactacagactccaccaaccatc

SEQ ID NO: 198118 - DNA, 25 bp, SARS Virus
taactacagacatcaccaaccatct

SEQ ID NO: 198119 - DNA, 25 bp, SARS Virus
aactacagacactaccaaccatctc

SEQ ID NO: 198120 - DNA, 25 bp, SARS Virus
actacagacacctccaaccatctct

SEQ ID NO: 198121 - DNA, 25 bp, SARS Virus
ctacagacaccatcaaccatctctt

SEQ ID NO: 198122 - DNA, 25 bp, SARS Virus
tacagacaccactaaccatctcttg

SEQ ID NO: 198123 - DNA, 25 bp, SARS Virus
acagacaccacctaccatctcttgt

SEQ ID NO: 198124 - DNA, 25 bp, SARS Virus
cagacaccaccatccatctcttgta

SEQ ID NO: 198125 - DNA, 25 bp, SARS Virus
agacaccaccaatcatctcttgtag

SEQ ID NO: 198126 - DNA, 25 bp, SARS Virus
gacaccaccaactatctcttgtagt

SEQ ID NO: 198127 - DNA, 25 bp, SARS Virus
acaccaccaaccttctcttgtagtc

SEQ ID NO: 198128 - DNA, 25 bp, SARS Virus
caccaccaaccatctcttgtagtcg

SEQ ID NO: 198129 - DNA, 25 bp, SARS Virus
accaccaaccatttcttgtagtcgt

SEQ ID NO: 198130 - DNA, 25 bp, SARS Virus
ccaccaaccatctcttgtagtcgtg

SEQ ID NO: 198131 - DNA, 25 bp, SARS Virus
caccaaccatcttttgtagtcgtgg

SEQ ID NO: 198132 - DNA, 25 bp, SARS Virus
accaaccatctcttgtagtcgtgga

SEQ ID NO: 198133 - DNA, 25 bp, SARS Virus
ccaaccatctcttgtagtcgtggac

SEQ ID NO: 198134 - DNA, 25 bp, SARS Virus
caaccatctcttttagtcgtggact

SEQ ID NO: 198135 - DNA, 25 bp, SARS Virus
aaccatctcttgtagtcgtggactc

SEQ ID NO: 198136 - DNA, 25 bp, SARS Virus
accatctcttgttgtcgtggactca

SEQ ID NO: 198137 - DNA, 25 bp, SARS Virus
ccatctcttgtattcgtggactcaa

SEQ ID NO: 198138 - DNA, 25 bp, SARS Virus
catctcttgtagtcgtggactcaac

SEQ ID NO: 198139 - DNA, 25 bp, SARS Virus
atctcttgtagttgtggactcaacg

SEQ ID NO: 198140 - DNA, 25 bp, SARS Virus
tctcttgtagtcttggactcaacga

SEQ ID NO: 198141 - DNA, 25 bp, SARS Virus
ctcttgtagtcgtggactcaacgat

SEQ ID NO: 198142 - DNA, 25 bp, SARS Virus
tcttgtagtcgttgactcaacgatt

SEQ ID NO: 198143 - DNA, 25 bp, SARS Virus
cttgtagtcgtgtactcaacgattt

SEQ ID NO: 198144 - DNA, 25 bp, SARS Virus
ttgtagtcgtggtctcaacgatttc

SEQ ID NO: 198145 - DNA, 25 bp, SARS Virus
tgtagtcgtggattcaacgatttca

SEQ ID NO: 198146 - DNA, 25 bp, SARS Virus
gtagtcgtggactcaacgatttcag

SEQ ID NO: 198147 - DNA, 25 bp, SARS Virus
tagtcgtggacttaacgatttcagt

SEQ ID NO: 198148 - DNA, 25 bp, SARS Virus
agtcgtggactctacgatttcagta

SEQ ID NO: 198149 - DNA, 25 bp, SARS Virus
gtcgtggactcatcgatttcagtaa

SEQ ID NO: 198150 - DNA, 25 bp, SARS Virus
tcgtggactcaatgatttcagtaaa

SEQ ID NO: 198151 - DNA, 25 bp, SARS Virus
cgtggactcaactatttcagtaaat

SEQ ID NO: 198152 - DNA, 25 bp, SARS Virus
gtggactcaacgttttcagtaaatc

SEQ ID NO: 198153 - DNA, 25 bp, SARS Virus
tggactcaacgatttcagtaaatct

SEQ ID NO: 198154 - DNA, 25 bp, SARS Virus
ggactcaacgatttcagtaaatctc

SEQ ID NO: 198155 - DNA, 25 bp, SARS Virus
gactcaacgatttcagtaaatctcg

SEQ ID NO: 198156 - DNA, 25 bp, SARS Virus
actcaacgattttagtaaatctcgg

SEQ ID NO: 198157 - DNA, 25 bp, SARS Virus
ctcaacgatttctgtaaatctcgga

SEQ ID NO: 198158 - DNA, 25 bp, SARS Virus
tcaacgatttcattaaatctcggaa

SEQ ID NO: 198159 - DNA, 25 bp, SARS Virus
caacgatttcagtaaatctcggaaa

SEQ ID NO: 198160 - DNA, 25 bp, SARS Virus
aacgatttcagttaatctcggaaac

SEQ ID NO: 198161 - DNA, 25 bp, SARS Virus
acgatttcagtaaatctcggaaacg

SEQ ID NO: 198162 - DNA, 25 bp, SARS Virus
cgatttcagtaaatctcggaaacga

SEQ ID NO: 198163 - DNA, 25 bp, SARS Virus
gatttcagtaaaactcggaaacgat

SEQ ID NO: 198164 - DNA, 25 bp, SARS Virus
atttcagtaaatatcggaaacgatt

SEQ ID NO: 198165 - DNA, 25 bp, SARS Virus
tttcagtaaatcacggaaacgattc

SEQ ID NO: 198166 - DNA, 25 bp, SARS Virus
ttcagtaaatctaggaaacgattca

SEQ ID NO: 198167 - DNA, 25 bp, SARS Virus
tcagtaaatctcagaaacgattcac

SEQ ID NO: 198168 - DNA, 25 bp, SARS Virus
cagtaaatctcgaaaacgattcacc

SEQ ID NO: 198169 - DNA, 25 bp, SARS Virus
agtaaatctcggaaacgattcaccg

SEQ ID NO: 198170 - DNA, 25 bp, SARS Virus
gtaaatctcggaaacgattcaccgt

SEQ ID NO: 198171 - DNA, 25 bp, SARS Virus
taaatctcggaaacgattcaccgtc

SEQ ID NO: 198172 - DNA, 25 bp, SARS Virus
aaatctcggaaaagattcaccgtcg

SEQ ID NO: 198173 - DNA, 25 bp, SARS Virus
aatctcggaaacaattcaccgtcgt

SEQ ID NO: 198174 - DNA, 25 bp, SARS Virus
atctcggaaacgattcaccgtcgtt

SEQ ID NO: 198175 - DNA, 25 bp, SARS Virus
tctcggaaacgaatcaccgtcgttc

SEQ ID NO: 198176 - DNA, 25 bp, SARS Virus
ctcggaaacgatacaccgtcgttcg

SEQ ID NO: 198177 - DNA, 25 bp, SARS Virus
tcggaaacgattaaccgtcgttcga

SEQ ID NO: 198178 - DNA, 25 bp, SARS Virus
cggaaacgattcaccgtcgttcgac

SEQ ID NO: 198179 - DNA, 25 bp, SARS Virus
ggaaacgattcaacgtcgttcgacg

SEQ ID NO: 198180 - DNA, 25 bp, SARS Virus
gaaacgattcacagtcgttcgacga

SEQ ID NO: 198181 - DNA, 25 bp, SARS Virus
aaacgattcaccatcgttcgacgaa

SEQ ID NO: 198182 - DNA, 25 bp, SARS Virus
aacgattcaccgacgttcgacgaag

SEQ ID NO: 198183 - DNA, 25 bp, SARS Virus
acgattcaccgtagttcgacgaagt

SEQ ID NO: 198184 - DNA, 25 bp, SARS Virus
cgattcaccgtcattcgacgaagtg

SEQ ID NO: 198185 - DNA, 25 bp, SARS Virus
gattcaccgtcgatcgacgaagtgc

SEQ ID NO: 198186 - DNA, 25 bp, SARS Virus
attcaccgtcgtacgacgaagtgct

SEQ ID NO: 198187 - DNA, 25 bp, SARS Virus
ttcaccgtcgttagacgaagtgcta

SEQ ID NO: 198188 - DNA, 25 bp, SARS Virus
tcaccgtcgttcaacgaagtgctat

SEQ ID NO: 198189 - DNA, 25 bp, SARS Virus
caccgtcgttcgacgaagtgctatc

SEQ ID NO: 198190 - DNA, 25 bp, SARS Virus
accgtcgttcgaagaagtgctatcg

SEQ ID NO: 198191 - DNA, 25 bp, SARS Virus
ccgtcgttcgacaaagtgctatcga

SEQ ID NO: 198192 - DNA, 25 bp, SARS Virus
cgtcgttcgacgaagtgctatcgac

SEQ ID NO: 198193 - DNA, 25 bp, SARS Virus
gtcgttcgacgaagtgctatcgacc

SEQ ID NO: 198194 - DNA, 25 bp, SARS Virus
tcgttcgacgaaatgctatcgacca

SEQ ID NO: 198195 - DNA, 25 bp, SARS Virus
cgttcgacgaagagctatcgaccat

SEQ ID NO: 198196 - DNA, 25 bp, SARS Virus
gttcgacgaagtactatcgaccatc

SEQ ID NO: 198197 - DNA, 25 bp, SARS Virus
ttcgacgaagtgatatcgaccatca

SEQ ID NO: 198198 - DNA, 25 bp, SARS Virus
tcgacgaagtgcaatcgaccatcat

SEQ ID NO: 198199 - DNA, 25 bp, SARS Virus
cgacgaagtgctatcgaccatcata

SEQ ID NO: 198200 - DNA, 25 bp, SARS Virus
gacgaagtgctaacgaccatcatag

SEQ ID NO: 198201 - DNA, 25 bp, SARS Virus
acgaagtgctatagaccatcataga

SEQ ID NO: 198202 - DNA, 25 bp, SARS Virus
cgaagtgctatcaaccatcatagat

SEQ ID NO: 198203 - DNA, 25 bp, SARS Virus
gaagtgctatcgaccatcatagatt

SEQ ID NO: 198204 - DNA, 25 bp, SARS Virus
aagtgctatcgaacatcatagattc

SEQ ID NO: 198205 - DNA, 25 bp, SARS Virus
agtgctatcgacaatcatagattcc

SEQ ID NO: 198206 - DNA, 25 bp, SARS Virus
gtgctatcgaccatcatagattccg

SEQ ID NO: 198207 - DNA, 25 bp, SARS Virus
tgctatcgaccaacatagattccga

SEQ ID NO: 198208 - DNA, 25 bp, SARS Virus
gctatcgaccataatagattccgag

SEQ ID NO: 198209 - DNA, 25 bp, SARS Virus
ctatcgaccatcatagattccgagg

SEQ ID NO: 198210 - DNA, 25 bp, SARS Virus
tatcgaccatcaaagattccgaggt

SEQ ID NO: 198211 - DNA, 25 bp, SARS Virus
atcgaccatcatagattccgaggtg

SEQ ID NO: 198212 - DNA, 25 bp, SARS Virus
tcgaccatcataaattccgaggtga

SEQ ID NO: 198213 - DNA, 25 bp, SARS Virus
cgaccatcatagattccgaggtgac

SEQ ID NO: 198214 - DNA, 25 bp, SARS Virus
gaccatcatagaatccgaggtgact

SEQ ID NO: 198215 - DNA, 25 bp, SARS Virus
accatcatagataccgaggtgactt

SEQ ID NO: 198216 - DNA, 25 bp, SARS Virus
ccatcatagattacgaggtgacttt

SEQ ID NO: 198217 - DNA, 25 bp, SARS Virus
catcatagattcagaggtgacttta

SEQ ID NO: 198218 - DNA, 25 bp, SARS Virus
atcatagattccaaggtgactttat

SEQ ID NO: 198219 - DNA, 25 bp, SARS Virus
tcatagattccgaggtgactttatg

SEQ ID NO: 198220 - DNA, 25 bp, SARS Virus
catagattccgaagtgactttatga

SEQ ID NO: 198221 - DNA, 25 bp, SARS Virus
atagattccgagatgactttatgaa

SEQ ID NO: 198222 - DNA, 25 bp, SARS Virus
tagattccgaggagactttatgaac

SEQ ID NO: 198223 - DNA, 25 bp, SARS Virus
agattccgaggtaactttatgaaca

SEQ ID NO: 198224 - DNA, 25 bp, SARS Virus
gattccgaggtgactttatgaacat

SEQ ID NO: 198225 - DNA, 25 bp, SARS Virus
attccgaggtgaatttatgaacatg

SEQ ID NO: 198226 - DNA, 25 bp, SARS Virus
ttccgaggtgacattatgaacatga

SEQ ID NO: 198227 - DNA, 25 bp, SARS Virus
tccgaggtgactatatgaacatgaa

SEQ ID NO: 198228 - DNA, 25 bp, SARS Virus
ccgaggtgacttaatgaacatgaac

SEQ ID NO: 198229 - DNA, 25 bp, SARS Virus
cgaggtgactttatgaacatgaaca

SEQ ID NO: 198230 - DNA, 25 bp, SARS Virus
gaggtgactttaagaacatgaacaa

SEQ ID NO: 198231 - DNA, 25 bp, SARS Virus
aggtgactttataaacatgaacaat

SEQ ID NO: 198232 - DNA, 25 bp, SARS Virus
ggtgactttatgaacatgaacaata

SEQ ID NO: 198233 - DNA, 25 bp, SARS Virus
gtgactttatgaacatgaacaatat

SEQ ID NO: 198234 - DNA, 25 bp, SARS Virus
tgactttatgaaaatgaacaatata

SEQ ID NO: 198235 - DNA, 25 bp, SARS Virus
gactttatgaacatgaacaatatat

SEQ ID NO: 198236 - DNA, 25 bp, SARS Virus
actttatgaacaagaacaatatatc

SEQ ID NO: 198237 - DNA, 25 bp, SARS Virus
ctttatgaacataaacaatatatct

SEQ ID NO: 198238 - DNA, 25 bp, SARS Virus
tttatgaacatgaacaatatatctc

SEQ ID NO: 198239 - DNA, 25 bp, SARS Virus
ttatgaacatgaacaatatatctcg

SEQ ID NO: 198240 - DNA, 25 bp, SARS Virus
tatgaacatgaaaaatatatctcgt

SEQ ID NO: 198241 - DNA, 25 bp, SARS Virus
atgaacatgaacaatatatctcgtt

SEQ ID NO: 198242 - DNA, 25 bp, SARS Virus
tgaacatgaacaatatatctcgttc

SEQ ID NO: 198243 - DNA, 25 bp, SARS Virus
gaacatgaacaaaatatctcgttct

SEQ ID NO: 198244 - DNA, 25 bp, SARS Virus
aacatgaacaatatatctcgttcta

SEQ ID NO: 198245 - DNA, 25 bp, SARS Virus
acatgaacaataaatctcgttctat

SEQ ID NO: 198246 - DNA, 25 bp, SARS Virus
catgaacaatatatctcgttctatg

SEQ ID NO: 198247 - DNA, 25 bp, SARS Virus
atgaacaatataactcgttctatgg

SEQ ID NO: 198248 - DNA, 25 bp, SARS Virus
tgaacaatatatatcgttctatgga

SEQ ID NO: 198249 - DNA, 25 bp, SARS Virus
gaacaatatatcacgttctatggac

SEQ ID NO: 198250 - DNA, 25 bp, SARS Virus
aacaatatatctagttctatggaca

SEQ ID NO: 198251 - DNA, 25 bp, SARS Virus
acaatatatctcattctatggacaa

SEQ ID NO: 198252 - DNA, 25 bp, SARS Virus
caatatatctcgatctatggacaat

SEQ ID NO: 198253 - DNA, 25 bp, SARS Virus
aatatatctcgtactatggacaata

SEQ ID NO: 198254 - DNA, 25 bp, SARS Virus
atatatctcgttatatggacaatat

SEQ ID NO: 198255 - DNA, 25 bp, SARS Virus
tatatctcgttcaatggacaatatg

SEQ ID NO: 198256 - DNA, 25 bp, SARS Virus
atatctcgttctatggacaatatga

SEQ ID NO: 198257 - DNA, 25 bp, SARS Virus
tatctcgttctaaggacaatatgac

SEQ ID NO: 198258 - DNA, 25 bp, SARS Virus
atctcgttctatagacaatatgaca

SEQ ID NO: 198259 - DNA, 25 bp, SARS Virus
tctcgttctatgaacaatatgacac

SEQ ID NO: 198260 - DNA, 25 bp, SARS Virus
ctcgttctatggacaatatgacaca

SEQ ID NO: 198261 - DNA, 25 bp, SARS Virus
tcgttctatggaaaatatgacacat

SEQ ID NO: 198262 - DNA, 25 bp, SARS Virus
cgttctatggacaatatgacacatt

SEQ ID NO: 198263 - DNA, 25 bp, SARS Virus
gttctatggacaatatgacacattc

SEQ ID NO: 198264 - DNA, 25 bp, SARS Virus
ttctatggacaaaatgacacattca

SEQ ID NO: 198265 - DNA, 25 bp, SARS Virus
tctatggacaatatgacacattcac

SEQ ID NO: 198266 - DNA, 25 bp, SARS Virus
ctatggacaataagacacattcacc

SEQ ID NO: 198267 - DNA, 25 bp, SARS Virus
tatggacaatataacacattcaccg

SEQ ID NO: 198268 - DNA, 25 bp, SARS Virus
atggacaatatgacacattcaccgt

SEQ ID NO: 198269 - DNA, 25 bp, SARS Virus
tggacaatatgaaacattcaccgtt

SEQ ID NO: 198270 - DNA, 25 bp, SARS Virus
ggacaatatgacacattcaccgttg

SEQ ID NO: 198271 - DNA, 25 bp, SARS Virus
gacaatatgacaaattcaccgttgt

SEQ ID NO: 198272 - DNA, 25 bp, SARS Virus
acaatatgacacattcaccgttgtc

SEQ ID NO: 198273 - DNA, 25 bp, SARS Virus
caatatgacacaatcaccgttgtca

SEQ ID NO: 198274 - DNA, 25 bp, SARS Virus
aatatgacacatacaccgttgtcac

SEQ ID NO: 198275 - DNA, 25 bp, SARS Virus
atatgacacattaaccgttgtcaca

SEQ ID NO: 198276 - DNA, 25 bp, SARS Virus
tatgacacattcaccgttgtcacag

SEQ ID NO: 198277 - DNA, 25 bp, SARS Virus
atgacacattcaacgttgtcacaga

SEQ ID NO: 198278 - DNA, 25 bp, SARS Virus
tgacacattcacagttgtcacagag

SEQ ID NO: 198279 - DNA, 25 bp, SARS Virus
gacacattcaccattgtcacagagc

SEQ ID NO: 198280 - DNA, 25 bp, SARS Virus
acacattcaccgatgtcacagagcg

SEQ ID NO: 198281 - DNA, 25 bp, SARS Virus
cacattcaccgtagtcacagagcga

SEQ ID NO: 198282 - DNA, 25 bp, SARS Virus
acattcaccgttatcacagagcgat

SEQ ID NO: 198283 - DNA, 25 bp, SARS Virus
cattcaccgttgacacagagcgatg

SEQ ID NO: 198284 - DNA, 25 bp, SARS Virus
attcaccgttgtaacagagcgatgc

SEQ ID NO: 198285 - DNA, 25 bp, SARS Virus
ttcaccgttgtcacagagcgatgcg

SEQ ID NO: 198286 - DNA, 25 bp, SARS Virus
tcaccgttgtcaaagagcgatgcgt

SEQ ID NO: 198287 - DNA, 25 bp, SARS Virus
caccgttgtcacagagcgatgcgtt

SEQ ID NO: 198288 - DNA, 25 bp, SARS Virus
accgttgtcacaaagcgatgcgtta

SEQ ID NO: 198289 - DNA, 25 bp, SARS Virus
ccgttgtcacagagcgatgcgttaa

SEQ ID NO: 198290 - DNA, 25 bp, SARS Virus
cgttgtcacagaacgatgcgttaaa

SEQ ID NO: 198291 - DNA, 25 bp, SARS Virus
gttgtcacagagagatgcgttaaaa

SEQ ID NO: 198292 - DNA, 25 bp, SARS Virus
ttgtcacagagcaatgcgttaaaat

SEQ ID NO: 198293 - DNA, 25 bp, SARS Virus
tgtcacagagcgatgcgttaaaatc

SEQ ID NO: 198294 - DNA, 25 bp, SARS Virus
gtcacagagcgaagcgttaaaatcc

SEQ ID NO: 198295 - DNA, 25 bp, SARS Virus
tcacagagcgatacgttaaaatcca

SEQ ID NO: 198296 - DNA, 25 bp, SARS Virus
cacagagcgatgagttaaaatccat

SEQ ID NO: 198297 - DNA, 25 bp, SARS Virus
acagagcgatgcattaaaatccatg

SEQ ID NO: 198298 - DNA, 25 bp, SARS Virus
cagagcgatgcgataaaatccatgt

SEQ ID NO: 198299 - DNA, 25 bp, SARS Virus
agagcgatgcgtaaaaatccatgta

SEQ ID NO: 198300 - DNA, 25 bp, SARS Virus
gagcgatgcgttaaaatccatgtaa

SEQ ID NO: 198301 - DNA, 25 bp, SARS Virus
agcgatgcgttaaaatccatgtaaa

SEQ ID NO: 198302 - DNA, 25 bp, SARS Virus
gcgatgcgttaaaatccatgtaaag

SEQ ID NO: 198303 - DNA, 25 bp, SARS Virus
cgatgcgttaaaatccatgtaaagg

SEQ ID NO: 198304 - DNA, 25 bp, SARS Virus
gatgcgttaaaaaccatgtaaagga

SEQ ID NO: 198305 - DNA, 25 bp, SARS Virus
atgcgttaaaatacatgtaaaggaa

SEQ ID NO: 198306 - DNA, 25 bp, SARS Virus
tgcgttaaaatcaatgtaaaggaac

SEQ ID NO: 198307 - DNA, 25 bp, SARS Virus
gcgttaaaatccatgtaaaggaaca

SEQ ID NO: 198308 - DNA, 25 bp, SARS Virus
cgttaaaatccaagtaaaggaacaa

SEQ ID NO: 198309 - DNA, 25 bp, SARS Virus
gttaaaatccatataaaggaacaac

SEQ ID NO: 198310 - DNA, 25 bp, SARS Virus
ttaaaatccatgaaaaggaacaact

SEQ ID NO: 198311 - DNA, 25 bp, SARS Virus
taaaatccatgtaaaggaacaactc

SEQ ID NO: 198312 - DNA, 25 bp, SARS Virus
aaaatccatgtaaaggaacaactcg

SEQ ID NO: 198313 - DNA, 25 bp, SARS Virus
aaatccatgtaaaggaacaactcgt

SEQ ID NO: 198314 - DNA, 25 bp, SARS Virus
aatccatgtaaaagaacaactcgtt

SEQ ID NO: 198315 - DNA, 25 bp, SARS Virus
atccatgtaaagaaacaactcgttt

SEQ ID NO: 198316 - DNA, 25 bp, SARS Virus
tccatgtaaaggaacaactcgtttt

SEQ ID NO: 198317 - DNA, 25 bp, SARS Virus
ccatgtaaaggaacaactcgttttt

SEQ ID NO: 198318 - DNA, 25 bp, SARS Virus
catgtaaaggaaaaactcgtttttc

SEQ ID NO: 198319 - DNA, 25 bp, SARS Virus
atgtaaaggaacaactcgtttttcc

SEQ ID NO: 198320 - DNA, 25 bp, SARS Virus
tgtaaaggaacaactcgtttttcca

SEQ ID NO: 198321 - DNA, 25 bp, SARS Virus
gtaaaggaacaaatcgtttttccat

SEQ ID NO: 198322 - DNA, 25 bp, SARS Virus
taaaggaacaacacgtttttccatg

SEQ ID NO: 198323 - DNA, 25 bp, SARS Virus
aaaggaacaactagtttttccatgt

SEQ ID NO: 198324 - DNA, 25 bp, SARS Virus
aaggaacaactcatttttccatgtg

SEQ ID NO: 198325 - DNA, 25 bp, SARS Virus
aggaacaactcgattttccatgtgt

SEQ ID NO: 198326 - DNA, 25 bp, SARS Virus
ggaacaactcgtatttccatgtgtt

SEQ ID NO: 198327 - DNA, 25 bp, SARS Virus
gaacaactcgttattccatgtgttt

SEQ ID NO: 198328 - DNA, 25 bp, SARS Virus
aacaactcgtttatccatgtgtttc

SEQ ID NO: 198329 - DNA, 25 bp, SARS Virus
acaactcgttttaccatgtgtttcg

SEQ ID NO: 198330 - DNA, 25 bp, SARS Virus
caactcgtttttacatgtgtttcgt

SEQ ID NO: 198331 - DNA, 25 bp, SARS Virus
aactcgtttttcaatgtgtttcgtc

SEQ ID NO: 198332 - DNA, 25 bp, SARS Virus
actcgtttttccatgtgtttcgtcg

SEQ ID NO: 198333 - DNA, 25 bp, SARS Virus
ctcgtttttccaagtgtttcgtcgg

SEQ ID NO: 198334 - DNA, 25 bp, SARS Virus
tcgtttttccatatgtttcgtcgga

SEQ ID NO: 198335 - DNA, 25 bp, SARS Virus
cgtttttccatgagtttcgtcggag

SEQ ID NO: 198336 - DNA, 25 bp, SARS Virus
gtttttccatgtatttcgtcggagg

SEQ ID NO: 198337 - DNA, 25 bp, SARS Virus
tttttccatgtgattcgtcggagga

SEQ ID NO: 198338 - DNA, 25 bp, SARS Virus
ttttccatgtgtatcgtcggaggag

SEQ ID NO: 198339 - DNA, 25 bp, SARS Virus
tttccatgtgttacgtcggaggagc

SEQ ID NO: 198340 - DNA, 25 bp, SARS Virus
ttccatgtgtttagtcggaggagct

SEQ ID NO: 198341 - DNA, 25 bp, SARS Virus
tccatgtgtttcatcggaggagctt

SEQ ID NO: 198342 - DNA, 25 bp, SARS Virus
ccatgtgtttcgacggaggagcttc

SEQ ID NO: 198343 - DNA, 25 bp, SARS Virus
catgtgtttcgtaggaggagcttcc

SEQ ID NO: 198344 - DNA, 25 bp, SARS Virus
atgtgtttcgtcagaggagcttcca

SEQ ID NO: 198345 - DNA, 25 bp, SARS Virus
tgtgtttcgtcgaaggagcttccat

SEQ ID NO: 198346 - DNA, 25 bp, SARS Virus
gtgtttcgtcggaggagcttccatg

SEQ ID NO: 198347 - DNA, 25 bp, SARS Virus
tgtttcgtcggaagagcttccatga

SEQ ID NO: 198348 - DNA, 25 bp, SARS Virus
gtttcgtcggagaagcttccatgat

SEQ ID NO: 198349 - DNA, 25 bp, SARS Virus
tttcgtcggaggagcttccatgatt

SEQ ID NO: 198350 - DNA, 25 bp, SARS Virus
ttcgtcggaggaacttccatgattt

SEQ ID NO: 198351 - DNA, 25 bp, SARS Virus
tcgtcggaggagattccatgattta

SEQ ID NO: 198352 - DNA, 25 bp, SARS Virus
cgtcggaggagcatccatgatttac

SEQ ID NO: 198353 - DNA, 25 bp, SARS Virus
gtcggaggagctaccatgatttaca

SEQ ID NO: 198354 - DNA, 25 bp, SARS Virus
tcggaggagcttacatgatttacat

SEQ ID NO: 198355 - DNA, 25 bp, SARS Virus
cggaggagcttcaatgatttacatt

SEQ ID NO: 198356 - DNA, 25 bp, SARS Virus
ggaggagcttccatgatttacattg

SEQ ID NO: 198357 - DNA, 25 bp, SARS Virus
gaggagcttccaagatttacattga

SEQ ID NO: 198358 - DNA, 25 bp, SARS Virus
aggagcttccataatttacattgag

SEQ ID NO: 198359 - DNA, 25 bp, SARS Virus
ggagcttccatgatttacattgagg

SEQ ID NO: 198360 - DNA, 25 bp, SARS Virus
gagcttccatgaattacattgaggt

SEQ ID NO: 198361 - DNA, 25 bp, SARS Virus
agcttccatgatatacattgaggta

SEQ ID NO: 198362 - DNA, 25 bp, SARS Virus
gcttccatgattaacattgaggtaa

SEQ ID NO: 198363 - DNA, 25 bp, SARS Virus
cttccatgatttacattgaggtaat

SEQ ID NO: 198364 - DNA, 25 bp, SARS Virus
ttccatgatttaaattgaggtaatt

SEQ ID NO: 198365 - DNA, 25 bp, SARS Virus
tccatgatttacattgaggtaattt

SEQ ID NO: 198366 - DNA, 25 bp, SARS Virus
ccatgatttacaatgaggtaatttg

SEQ ID NO: 198367 - DNA, 25 bp, SARS Virus
catgatttacatagaggtaatttgt

SEQ ID NO: 198368 - DNA, 25 bp, SARS Virus
atgatttacattaaggtaatttgta

SEQ ID NO: 198369 - DNA, 25 bp, SARS Virus
tgatttacattgaggtaatttgtac

SEQ ID NO: 198370 - DNA, 25 bp, SARS Virus
gatttacattgaagtaatttgtact

SEQ ID NO: 198371 - DNA, 25 bp, SARS Virus
atttacattgagataatttgtactg

SEQ ID NO: 198372 - DNA, 25 bp, SARS Virus
tttacattgaggaaatttgtactga

SEQ ID NO: 198373 - DNA, 25 bp, SARS Virus
ttacattgaggtaatttgtactgag

SEQ ID NO: 198374 - DNA, 25 bp, SARS Virus
tacattgaggtaatttgtactgaga

SEQ ID NO: 198375 - DNA, 25 bp, SARS Virus
acattgaggtaaattgtactgagaa

SEQ ID NO: 198376 - DNA, 25 bp, SARS Virus
cattgaggtaatatgtactgagaaa

SEQ ID NO: 198377 - DNA, 25 bp, SARS Virus
attgaggtaattagtactgagaaaa

SEQ ID NO: 198378 - DNA, 25 bp, SARS Virus
ttgaggtaatttatactgagaaaag

SEQ ID NO: 198379 - DNA, 25 bp, SARS Virus
tgaggtaatttgaactgagaaaagg

SEQ ID NO: 198380 - DNA, 25 bp, SARS Virus
gaggtaatttgtactgagaaaagga

SEQ ID NO: 198381 - DNA, 25 bp, SARS Virus
aggtaatttgtaatgagaaaaggat

SEQ ID NO: 198382 - DNA, 25 bp, SARS Virus
ggtaatttgtacagagaaaaggatt

SEQ ID NO: 198383 - DNA, 25 bp, SARS Virus
gtaatttgtactaagaaaaggattc

SEQ ID NO: 198384 - DNA, 25 bp, SARS Virus
taatttgtactgagaaaaggattct

SEQ ID NO: 198385 - DNA, 25 bp, SARS Virus
aatttgtactgaaaaaaggattcta

SEQ ID NO: 198386 - DNA, 25 bp, SARS Virus
atttgtactgagaaaaggattctat

SEQ ID NO: 198387 - DNA, 25 bp, SARS Virus
tttgtactgagaaaaggattctatc

SEQ ID NO: 198388 - DNA, 25 bp, SARS Virus
ttgtactgagaaaaggattctatca

SEQ ID NO: 198389 - DNA, 25 bp, SARS Virus
tgtactgagaaaaggattctatcaa

SEQ ID NO: 198390 - DNA, 25 bp, SARS Virus
gtactgagaaaaagattctatcaac

SEQ ID NO: 198391 - DNA, 25 bp, SARS Virus
tactgagaaaagaattctatcaaca

SEQ ID NO: 198392 - DNA, 25 bp, SARS Virus
actgagaaaaggattctatcaacaa

SEQ ID NO: 198393 - DNA, 25 bp, SARS Virus
ctgagaaaaggaatctatcaacaat

SEQ ID NO: 198394 - DNA, 25 bp, SARS Virus
tgagaaaaggatactatcaacaatt

SEQ ID NO: 198395 - DNA, 25 bp, SARS Virus
gagaaaaggattatatcaacaattt

SEQ ID NO: 198396 - DNA, 25 bp, SARS Virus
agaaaaggattcaatcaacaatttc

SEQ ID NO: 198397 - DNA, 25 bp, SARS Virus
gaaaaggattctatcaacaatttct

SEQ ID NO: 198398 - DNA, 25 bp, SARS Virus
aaaaggattctaacaacaatttctt

SEQ ID NO: 198399 - DNA, 25 bp, SARS Virus
aaaggattctataaacaatttcttg

SEQ ID NO: 198400 - DNA, 25 bp, SARS Virus
aaggattctatcaacaatttcttgg

SEQ ID NO: 198401 - DNA, 25 bp, SARS Virus
aggattctatcaacaatttcttggt

SEQ ID NO: 198402 - DNA, 25 bp, SARS Virus
ggattctatcaaaaatttcttggtt

SEQ ID NO: 198403 - DNA, 25 bp, SARS Virus
gattctatcaacaatttcttggtta

SEQ ID NO: 198404 - DNA, 25 bp, SARS Virus
attctatcaacaatttcttggttac

SEQ ID NO: 198405 - DNA, 25 bp, SARS Virus
ttctatcaacaaattcttggttacc

SEQ ID NO: 198406 - DNA, 25 bp, SARS Virus
tctatcaacaatatcttggttaccg

SEQ ID NO: 198407 - DNA, 25 bp, SARS Virus
ctatcaacaattacttggttaccgt

SEQ ID NO: 198408 - DNA, 25 bp, SARS Virus
tatcaacaatttattggttaccgtc

SEQ ID NO: 198409 - DNA, 25 bp, SARS Virus
atcaacaatttcatggttaccgtca

SEQ ID NO: 198410 - DNA, 25 bp, SARS Virus
tcaacaatttctaggttaccgtcac

SEQ ID NO: 198411 - DNA, 25 bp, SARS Virus
caacaatttcttagttaccgtcacg

SEQ ID NO: 198412 - DNA, 25 bp, SARS Virus
aacaatttcttgattaccgtcacga

SEQ ID NO: 198413 - DNA, 25 bp, SARS Virus
acaatttcttggataccgtcacgaa

SEQ ID NO: 198414 - DNA, 25 bp, SARS Virus
caatttcttggtaaccgtcacgaag

SEQ ID NO: 198415 - DNA, 25 bp, SARS Virus
aatttcttggttaccgtcacgaagt

SEQ ID NO: 198416 - DNA, 25 bp, SARS Virus
atttcttggttaacgtcacgaagtc

SEQ ID NO: 198417 - DNA, 25 bp, SARS Virus
tttcttggttacagtcacgaagtct

SEQ ID NO: 198418 - DNA, 25 bp, SARS Virus
ttcttggttaccatcacgaagtctc

SEQ ID NO: 198419 - DNA, 25 bp, SARS Virus
tcttggttaccgacacgaagtctct

SEQ ID NO: 198420 - DNA, 25 bp, SARS Virus
cttggttaccgtaacgaagtctctt

SEQ ID NO: 198421 - DNA, 25 bp, SARS Virus
ttggttaccgtcacgaagtctcttt

SEQ ID NO: 198422 - DNA, 25 bp, SARS Virus
tggttaccgtcaagaagtctcttta

SEQ ID NO: 198423 - DNA, 25 bp, SARS Virus
ggttaccgtcacaaagtctctttat

SEQ ID NO: 198424 - DNA, 25 bp, SARS Virus
gttaccgtcacgaagtctctttatg

SEQ ID NO: 198425 - DNA, 25 bp, SARS Virus
ttaccgtcacgaagtctctttatgt

SEQ ID NO: 198426 - DNA, 25 bp, SARS Virus
taccgtcacgaaatctctttatgtc

SEQ ID NO: 198427 - DNA, 25 bp, SARS Virus
accgtcacgaagactctttatgtct

SEQ ID NO: 198428 - DNA, 25 bp, SARS Virus
ccgtcacgaagtatctttatgtctt

SEQ ID NO: 198429 - DNA, 25 bp, SARS Virus
cgtcacgaagtcactttatgtctta

SEQ ID NO: 198430 - DNA, 25 bp, SARS Virus
gtcacgaagtctatttatgtcttat

SEQ ID NO: 198431 - DNA, 25 bp, SARS Virus
tcacgaagtctcattatgtcttatg

SEQ ID NO: 198432 - DNA, 25 bp, SARS Virus
cacgaagtctctatatgtcttatgt

SEQ ID NO: 198433 - DNA, 25 bp, SARS Virus
acgaagtctcttaatgtcttatgta

SEQ ID NO: 198434 - DNA, 25 bp, SARS Virus
cgaagtctctttatgtcttatgtat

SEQ ID NO: 198435 - DNA, 25 bp, SARS Virus
gaagtctctttaagtcttatgtatc

SEQ ID NO: 198436 - DNA, 25 bp, SARS Virus
aagtctctttatatcttatgtatct

SEQ ID NO: 198437 - DNA, 25 bp, SARS Virus
agtctctttatgacttatgtatcta

SEQ ID NO: 198438 - DNA, 25 bp, SARS Virus
gtctctttatgtattatgtatctaa

SEQ ID NO: 198439 - DNA, 25 bp, SARS Virus
tctctttatgtcatatgtatctaac

SEQ ID NO: 198440 - DNA, 25 bp, SARS Virus
ctctttatgtctaatgtatctaacg

SEQ ID NO: 198441 - DNA, 25 bp, SARS Virus
tctttatgtcttatgtatctaacga

SEQ ID NO: 198442 - DNA, 25 bp, SARS Virus
ctttatgtcttaagtatctaacgac

SEQ ID NO: 198443 - DNA, 25 bp, SARS Virus
tttatgtcttatatatctaacgaca

SEQ ID NO: 198444 - DNA, 25 bp, SARS Virus
ttatgtcttatgaatctaacgacaa

SEQ ID NO: 198445 - DNA, 25 bp, SARS Virus
tatgtcttatgtatctaacgacaat

SEQ ID NO: 198446 - DNA, 25 bp, SARS Virus
atgtcttatgtaactaacgacaata

SEQ ID NO: 198447 - DNA, 25 bp, SARS Virus
tgtcttatgtatataacgacaatag

SEQ ID NO: 198448 - DNA, 25 bp, SARS Virus
gtcttatgtatcaaacgacaatagg

SEQ ID NO: 198449 - DNA, 25 bp, SARS Virus
tcttatgtatctaacgacaataggt

SEQ ID NO: 198450 - DNA, 25 bp, SARS Virus
cttatgtatctaacgacaataggtt

SEQ ID NO: 198451 - DNA, 25 bp, SARS Virus
ttatgtatctaaagacaataggttt

SEQ ID NO: 198452 - DNA, 25 bp, SARS Virus
tatgtatctaacaacaataggtttt

SEQ ID NO: 198453 - DNA, 25 bp, SARS Virus
atgtatctaacgacaataggttttt

SEQ ID NO: 198454 - DNA, 25 bp, SARS Virus
tgtatctaacgaaaataggtttttc

SEQ ID NO: 198455 - DNA, 25 bp, SARS Virus
gtatctaacgacaataggtttttcc

SEQ ID NO: 198456 - DNA, 25 bp, SARS Virus
tatctaacgacaataggtttttccg

SEQ ID NO: 198457 - DNA, 25 bp, SARS Virus
atctaacgacaaaaggtttttccgt

SEQ ID NO: 198458 - DNA, 25 bp, SARS Virus
tctaacgacaataggtttttccgtg

SEQ ID NO: 198459 - DNA, 25 bp, SARS Virus
ctaacgacaataagtttttccgtgt

SEQ ID NO: 198460 - DNA, 25 bp, SARS Virus
taacgacaatagatttttccgtgtt

SEQ ID NO: 198461 - DNA, 25 bp, SARS Virus
aacgacaataggattttccgtgtta

SEQ ID NO: 198462 - DNA, 25 bp, SARS Virus
acgacaataggtatttccgtgttat

SEQ ID NO: 198463 - DNA, 25 bp, SARS Virus
cgacaataggttattccgtgttatc

SEQ ID NO: 198464 - DNA, 25 bp, SARS Virus
gacaataggtttatccgtgttatcc

SEQ ID NO: 198465 - DNA, 25 bp, SARS Virus
acaataggttttaccgtgttatcct

SEQ ID NO: 198466 - DNA, 25 bp, SARS Virus
caataggtttttacgtgttatcctc

SEQ ID NO: 198467 - DNA, 25 bp, SARS Virus
aataggtttttcagtgttatcctct

SEQ ID NO: 198468 - DNA, 25 bp, SARS Virus
ataggtttttccatgttatcctctt

SEQ ID NO: 198469 - DNA, 25 bp, SARS Virus
taggtttttccgagttatcctcttt

SEQ ID NO: 198470 - DNA, 25 bp, SARS Virus
aggtttttccgtattatcctctttt

SEQ ID NO: 198471 - DNA, 25 bp, SARS Virus
ggtttttccgtgatatcctcttttg

SEQ ID NO: 198472 - DNA, 25 bp, SARS Virus
gtttttccgtgtaatcctcttttgt

SEQ ID NO: 198473 - DNA, 25 bp, SARS Virus
tttttccgtgttatcctcttttgta

SEQ ID NO: 198474 - DNA, 25 bp, SARS Virus
ttttccgtgttaacctcttttgtac

SEQ ID NO: 198475 - DNA, 25 bp, SARS Virus
tttccgtgttatactcttttgtacc

SEQ ID NO: 198476 - DNA, 25 bp, SARS Virus
ttccgtgttatcatcttttgtaccg

SEQ ID NO: 198477 - DNA, 25 bp, SARS Virus
tccgtgttatccacttttgtaccgt

SEQ ID NO: 198478 - DNA, 25 bp, SARS Virus
ccgtgttatcctattttgtaccgtt

SEQ ID NO: 198479 - DNA, 25 bp, SARS Virus
cgtgttatcctcatttgtaccgttt

SEQ ID NO: 198480 - DNA, 25 bp, SARS Virus
gtgttatcctctattgtaccgtttg

SEQ ID NO: 198481 - DNA, 25 bp, SARS Virus
tgttatcctcttatgtaccgtttgg

SEQ ID NO: 198482 - DNA, 25 bp, SARS Virus
gttatcctctttagtaccgtttggt

SEQ ID NO: 198483 - DNA, 25 bp, SARS Virus
ttatcctcttttataccgtttggta

SEQ ID NO: 198484 - DNA, 25 bp, SARS Virus
tatcctcttttgaaccgtttggtaa

SEQ ID NO: 198485 - DNA, 25 bp, SARS Virus
atcctcttttgtaccgtttggtaac

SEQ ID NO: 198486 - DNA, 25 bp, SARS Virus
tcctcttttgtaacgtttggtaact

SEQ ID NO: 198487 - DNA, 25 bp, SARS Virus
cctcttttgtacagtttggtaactt

SEQ ID NO: 198488 - DNA, 25 bp, SARS Virus
ctcttttgtaccatttggtaacttc

SEQ ID NO: 198489 - DNA, 25 bp, SARS Virus
tcttttgtaccgattggtaacttcc

SEQ ID NO: 198490 - DNA, 25 bp, SARS Virus
cttttgtaccgtatggtaacttcca

SEQ ID NO: 198491 - DNA, 25 bp, SARS Virus
ttttgtaccgttaggtaacttccac

SEQ ID NO: 198492 - DNA, 25 bp, SARS Virus
tttgtaccgtttagtaacttccact

SEQ ID NO: 198493 - DNA, 25 bp, SARS Virus
ttgtaccgtttgataacttccactc

SEQ ID NO: 198494 - DNA, 25 bp, SARS Virus
tgtaccgtttggaaacttccactcg

SEQ ID NO: 198495 - DNA, 25 bp, SARS Virus
gtaccgtttggtaacttccactcgg

SEQ ID NO: 198496 - DNA, 25 bp, SARS Virus
taccgtttggtaacttccactcggt

SEQ ID NO: 198497 - DNA, 25 bp, SARS Virus
accgtttggtaaattccactcggtt

SEQ ID NO: 198498 - DNA, 25 bp, SARS Virus
ccgtttggtaacatccactcggttc

SEQ ID NO: 198499 - DNA, 25 bp, SARS Virus
cgtttggtaactaccactcggttct

SEQ ID NO: 198500 - DNA, 25 bp, SARS Virus
gtttggtaacttacactcggttctt

SEQ ID NO: 198501 - DNA, 25 bp, SARS Virus
tttggtaacttcaactcggttctta

SEQ ID NO: 198502 - DNA, 25 bp, SARS Virus
ttggtaacttccactcggttcttac

SEQ ID NO: 198503 - DNA, 25 bp, SARS Virus
tggtaacttccaatcggttcttact

SEQ ID NO: 198504 - DNA, 25 bp, SARS Virus
ggtaacttccacacggttcttactt

SEQ ID NO: 198505 - DNA, 25 bp, SARS Virus
gtaacttccactaggttcttacttt

SEQ ID NO: 198506 - DNA, 25 bp, SARS Virus
taacttccactcagttcttactttg

SEQ ID NO: 198507 - DNA, 25 bp, SARS Virus
aacttccactcgattcttactttgt

SEQ ID NO: 198508 - DNA, 25 bp, SARS Virus
acttccactcggatcttactttgta

SEQ ID NO: 198509 - DNA, 25 bp, SARS Virus
cttccactcggtacttactttgtag

SEQ ID NO: 198510 - DNA, 25 bp, SARS Virus
ttccactcggttattactttgtagt

SEQ ID NO: 198511 - DNA, 25 bp, SARS Virus
tccactcggttcatactttgtagta

SEQ ID NO: 198512 - DNA, 25 bp, SARS Virus
ccactcggttctaactttgtagtaa

SEQ ID NO: 198513 - DNA, 25 bp, SARS Virus
cactcggttcttactttgtagtaac

SEQ ID NO: 198514 - DNA, 25 bp, SARS Virus
actcggttcttaatttgtagtaacc

SEQ ID NO: 198515 - DNA, 25 bp, SARS Virus
ctcggttcttacattgtagtaacca

SEQ ID NO: 198516 - DNA, 25 bp, SARS Virus
tcggttcttactatgtagtaaccac

SEQ ID NO: 198517 - DNA, 25 bp, SARS Virus
cggttcttacttagtagtaaccact

SEQ ID NO: 198518 - DNA, 25 bp, SARS Virus
ggttcttactttatagtaaccactt

SEQ ID NO: 198519 - DNA, 25 bp, SARS Virus
gttcttactttgaagtaaccacttt

SEQ ID NO: 198520 - DNA, 25 bp, SARS Virus
ttcttactttgtagtaaccacttta

SEQ ID NO: 198521 - DNA, 25 bp, SARS Virus
tcttactttgtaataaccactttat

SEQ ID NO: 198522 - DNA, 25 bp, SARS Virus
cttactttgtagaaaccactttatc

SEQ ID NO: 198523 - DNA, 25 bp, SARS Virus
ttactttgtagtaaccactttatct

SEQ ID NO: 198524 - DNA, 25 bp, SARS Virus
tactttgtagtaaccactttatctt

SEQ ID NO: 198525 - DNA, 25 bp, SARS Virus
actttgtagtaaacactttatctta

SEQ ID NO: 198526 - DNA, 25 bp, SARS Virus
ctttgtagtaacaactttatcttac

SEQ ID NO: 198527 - DNA, 25 bp, SARS Virus
tttgtagtaaccactttatcttaca

SEQ ID NO: 198528 - DNA, 25 bp, SARS Virus
ttgtagtaaccaatttatcttacag

SEQ ID NO: 198529 - DNA, 25 bp, SARS Virus
tgtagtaaccacattatcttacagt

SEQ ID NO: 198530 - DNA, 25 bp, SARS Virus
gtagtaaccactatatcttacagtt

SEQ ID NO: 198531 - DNA, 25 bp, SARS Virus
tagtaaccacttaatcttacagttc

SEQ ID NO: 198532 - DNA, 25 bp, SARS Virus
agtaaccactttatcttacagttca

SEQ ID NO: 198533 - DNA, 25 bp, SARS Virus
gtaaccactttaacttacagttcat

SEQ ID NO: 198534 - DNA, 25 bp, SARS Virus
taaccactttatattacagttcatg

SEQ ID NO: 198535 - DNA, 25 bp, SARS Virus
aaccactttatcatacagttcatgt

SEQ ID NO: 198536 - DNA, 25 bp, SARS Virus
accactttatctaacagttcatgtt

SEQ ID NO: 198537 - DNA, 25 bp, SARS Virus
ccactttatcttacagttcatgttc

SEQ ID NO: 198538 - DNA, 25 bp, SARS Virus
cactttatcttaaagttcatgttca

SEQ ID NO: 198539 - DNA, 25 bp, SARS Virus
actttatcttacagttcatgttcat

SEQ ID NO: 198540 - DNA, 25 bp, SARS Virus
ctttatcttacaattcatgttcatt

SEQ ID NO: 198541 - DNA, 25 bp, SARS Virus
tttatcttacagatcatgttcattt

SEQ ID NO: 198542 - DNA, 25 bp, SARS Virus
ttatcttacagtacatgttcatttt

SEQ ID NO: 198543 - DNA, 25 bp, SARS Virus
tatcttacagttaatgttcattttc

SEQ ID NO: 198544 - DNA, 25 bp, SARS Virus
atcttacagttcatgttcattttct

SEQ ID NO: 198545 - DNA, 25 bp, SARS Virus
tcttacagttcaagttcattttctg

SEQ ID NO: 198546 - DNA, 25 bp, SARS Virus
cttacagttcatattcattttctga

SEQ ID NO: 198547 - DNA, 25 bp, SARS Virus
ttacagttcatgatcattttctgac

SEQ ID NO: 198548 - DNA, 25 bp, SARS Virus
tacagttcatgtacattttctgact

SEQ ID NO: 198549 - DNA, 25 bp, SARS Virus
acagttcatgttaattttctgactc

SEQ ID NO: 198550 - DNA, 25 bp, SARS Virus
cagttcatgttcattttctgactca

SEQ ID NO: 198551 - DNA, 25 bp, SARS Virus
agttcatgttcaatttctgactcat

SEQ ID NO: 198552 - DNA, 25 bp, SARS Virus
gttcatgttcatattctgactcatc

SEQ ID NO: 198553 - DNA, 25 bp, SARS Virus
ttcatgttcattatctgactcatct

SEQ ID NO: 198554 - DNA, 25 bp, SARS Virus
tcatgttcatttactgactcatctg

SEQ ID NO: 198555 - DNA, 25 bp, SARS Virus
catgttcattttatgactcatctga

SEQ ID NO: 198556 - DNA, 25 bp, SARS Virus
atgttcattttcagactcatctgag

SEQ ID NO: 198557 - DNA, 25 bp, SARS Virus
tgttcattttctaactcatctgagg

SEQ ID NO: 198558 - DNA, 25 bp, SARS Virus
gttcattttctgactcatctgaggg

SEQ ID NO: 198559 - DNA, 25 bp, SARS Virus
ttcattttctgaatcatctgagggc

SEQ ID NO: 198560 - DNA, 25 bp, SARS Virus
tcattttctgacacatctgagggcc

SEQ ID NO: 198561 - DNA, 25 bp, SARS Virus
cattttctgactaatctgagggccg

SEQ ID NO: 198562 - DNA, 25 bp, SARS Virus
attttctgactcatctgagggccgt

SEQ ID NO: 198563 - DNA, 25 bp, SARS Virus
ttttctgactcaactgagggccgtc

SEQ ID NO: 198564 - DNA, 25 bp, SARS Virus
tttctgactcatatgagggccgtct

SEQ ID NO: 198565 - DNA, 25 bp, SARS Virus
ttctgactcatcagagggccgtctt

SEQ ID NO: 198566 - DNA, 25 bp, SARS Virus
tctgactcatctaagggccgtcttt

SEQ ID NO: 198567 - DNA, 25 bp, SARS Virus
ctgactcatctgagggccgtctttc

SEQ ID NO: 198568 - DNA, 25 bp, SARS Virus
tgactcatctgaaggccgtctttcg

SEQ ID NO: 198569 - DNA, 25 bp, SARS Virus
gactcatctgagagccgtctttcga

SEQ ID NO: 198570 - DNA, 25 bp, SARS Virus
actcatctgaggaccgtctttcgac

SEQ ID NO: 198571 - DNA, 25 bp, SARS Virus
ctcatctgagggacgtctttcgaca

SEQ ID NO: 198572 - DNA, 25 bp, SARS Virus
tcatctgagggcagtctttcgacat

SEQ ID NO: 198573 - DNA, 25 bp, SARS Virus
catctgagggccatctttcgacatt

SEQ ID NO: 198574 - DNA, 25 bp, SARS Virus
atctgagggccgactttcgacattc

SEQ ID NO: 198575 - DNA, 25 bp, SARS Virus
tctgagggccgtatttcgacattcg

SEQ ID NO: 198576 - DNA, 25 bp, SARS Virus
ctgagggccgtcattcgacattcga

SEQ ID NO: 198577 - DNA, 25 bp, SARS Virus
tgagggccgtctatcgacattcgac

SEQ ID NO: 198578 - DNA, 25 bp, SARS Virus
gagggccgtcttacgacattcgacc

SEQ ID NO: 198579 - DNA, 25 bp, SARS Virus
agggccgtctttagacattcgacca

SEQ ID NO: 198580 - DNA, 25 bp, SARS Virus
gggccgtctttcaacattcgaccat

SEQ ID NO: 198581 - DNA, 25 bp, SARS Virus
ggccgtctttcgacattcgaccatg

SEQ ID NO: 198582 - DNA, 25 bp, SARS Virus
gccgtctttcgaaattcgaccatgg

SEQ ID NO: 198583 - DNA, 25 bp, SARS Virus
ccgtctttcgacattcgaccatggt

SEQ ID NO: 198584 - DNA, 25 bp, SARS Virus
cgtctttcgacaatcgaccatggtc

SEQ ID NO: 198585 - DNA, 25 bp, SARS Virus
gtctttcgacatacgaccatggtct

SEQ ID NO: 198586 - DNA, 25 bp, SARS Virus
tctttcgacattagaccatggtctg

SEQ ID NO: 198587 - DNA, 25 bp, SARS Virus
ctttcgacattcaaccatggtctgt

SEQ ID NO: 198588 - DNA, 25 bp, SARS Virus
tttcgacattcgaccatggtctgtc

SEQ ID NO: 198589 - DNA, 25 bp, SARS Virus
ttcgacattcgaacatggtctgtct

SEQ ID NO: 198590 - DNA, 25 bp, SARS Virus
tcgacattcgacaatggtctgtctc

SEQ ID NO: 198591 - DNA, 25 bp, SARS Virus
cgacattcgaccatggtctgtctca

SEQ ID NO: 198592 - DNA, 25 bp, SARS Virus
gacattcgaccaaggtctgtctcat

SEQ ID NO: 198593 - DNA, 25 bp, SARS Virus
acattcgaccatagtctgtctcata

SEQ ID NO: 198594 - DNA, 25 bp, SARS Virus
cattcgaccatgatctgtctcatat

SEQ ID NO: 198595 - DNA, 25 bp, SARS Virus
attcgaccatggactgtctcatatc

SEQ ID NO: 198596 - DNA, 25 bp, SARS Virus
ttcgaccatggtatgtctcatatca

SEQ ID NO: 198597 - DNA, 25 bp, SARS Virus
tcgaccatggtcagtctcatatcac

SEQ ID NO: 198598 - DNA, 25 bp, SARS Virus
cgaccatggtctatctcatatcact

SEQ ID NO: 198599 - DNA, 25 bp, SARS Virus
gaccatggtctgactcatatcactt

SEQ ID NO: 198600 - DNA, 25 bp, SARS Virus
accatggtctgtatcatatcacttt

SEQ ID NO: 198601 - DNA, 25 bp, SARS Virus
ccatggtctgtcacatatcactttc

SEQ ID NO: 198602 - DNA, 25 bp, SARS Virus
catggtctgtctaatatcactttct

SEQ ID NO: 198603 - DNA, 25 bp, SARS Virus
atggtctgtctcatatcactttctg

SEQ ID NO: 198604 - DNA, 25 bp, SARS Virus
tggtctgtctcaaatcactttctgt

SEQ ID NO: 198605 - DNA, 25 bp, SARS Virus
ggtctgtctcatatcactttctgta

SEQ ID NO: 198606 - DNA, 25 bp, SARS Virus
gtctgtctcataacactttctgtag

SEQ ID NO: 198607 - DNA, 25 bp, SARS Virus
tctgtctcatataactttctgtagt

SEQ ID NO: 198608 - DNA, 25 bp, SARS Virus
ctgtctcatatcactttctgtagtt

SEQ ID NO: 198609 - DNA, 25 bp, SARS Virus
tgtctcatatcaatttctgtagttt

SEQ ID NO: 198610 - DNA, 25 bp, SARS Virus
gtctcatatcacattctgtagtttt

SEQ ID NO: 198611 - DNA, 25 bp, SARS Virus
tctcatatcactatctgtagttttt

SEQ ID NO: 198612 - DNA, 25 bp, SARS Virus
ctcatatcacttactgtagtttttg

SEQ ID NO: 198613 - DNA, 25 bp, SARS Virus
tcatatcactttatgtagtttttgt

SEQ ID NO: 198614 - DNA, 25 bp, SARS Virus
catatcactttcagtagtttttgtt

SEQ ID NO: 198615 - DNA, 25 bp, SARS Virus
atatcactttctatagtttttgttt

SEQ ID NO: 198616 - DNA, 25 bp, SARS Virus
tatcactttctgaagtttttgtttt

SEQ ID NO: 198617 - DNA, 25 bp, SARS Virus
atcactttctgtagtttttgttttc

SEQ ID NO: 198618 - DNA, 25 bp, SARS Virus
tcactttctgtaatttttgttttca

SEQ ID NO: 198619 - DNA, 25 bp, SARS Virus
cactttctgtagattttgttttcac

SEQ ID NO: 198620 - DNA, 25 bp, SARS Virus
actttctgtagtatttgttttcacg

SEQ ID NO: 198621 - DNA, 25 bp, SARS Virus
ctttctgtagttattgttttcacgt

SEQ ID NO: 198622 - DNA, 25 bp, SARS Virus
tttctgtagtttatgttttcacgta

SEQ ID NO: 198623 - DNA, 25 bp, SARS Virus
ttctgtagttttagttttcacgtaa

SEQ ID NO: 198624 - DNA, 25 bp, SARS Virus
tctgtagtttttattttcacgtaat

SEQ ID NO: 198625 - DNA, 25 bp, SARS Virus
ctgtagtttttgatttcacgtaatc

SEQ ID NO: 198626 - DNA, 25 bp, SARS Virus
tgtagtttttgtattcacgtaatcg

SEQ ID NO: 198627 - DNA, 25 bp, SARS Virus
gtagtttttgttatcacgtaatcgt

SEQ ID NO: 198628 - DNA, 25 bp, SARS Virus
tagtttttgtttacacgtaatcgtc

SEQ ID NO: 198629 - DNA, 25 bp, SARS Virus
agtttttgttttaacgtaatcgtcg

SEQ ID NO: 198630 - DNA, 25 bp, SARS Virus
gtttttgttttcacgtaatcgtcgt

SEQ ID NO: 198631 - DNA, 25 bp, SARS Virus
tttttgttttcaagtaatcgtcgtt

SEQ ID NO: 198632 - DNA, 25 bp, SARS Virus
ttttgttttcacataatcgtcgttg

SEQ ID NO: 198633 - DNA, 25 bp, SARS Virus
tttgttttcacgaaatcgtcgttgt

SEQ ID NO: 198634 - DNA, 25 bp, SARS Virus
ttgttttcacgtaatcgtcgttgtt

SEQ ID NO: 198635 - DNA, 25 bp, SARS Virus
tgttttcacgtaatcgtcgttgttg

SEQ ID NO: 198636 - DNA, 25 bp, SARS Virus
gttttcacgtaaacgtcgttgttgt

SEQ ID NO: 198637 - DNA, 25 bp, SARS Virus
ttttcacgtaatagtcgttgttgta

SEQ ID NO: 198638 - DNA, 25 bp, SARS Virus
tttcacgtaatcatcgttgttgtac

SEQ ID NO: 198639 - DNA, 25 bp, SARS Virus
ttcacgtaatcgacgttgttgtacc

SEQ ID NO: 198640 - DNA, 25 bp, SARS Virus
tcacgtaatcgtagttgttgtacca

SEQ ID NO: 198641 - DNA, 25 bp, SARS Virus
cacgtaatcgtcattgttgtaccaa

SEQ ID NO: 198642 - DNA, 25 bp, SARS Virus
acgtaatcgtcgatgttgtaccaac

SEQ ID NO: 198643 - DNA, 25 bp, SARS Virus
cgtaatcgtcgtagttgtaccaaca

SEQ ID NO: 198644 - DNA, 25 bp, SARS Virus
gtaatcgtcgttattgtaccaacat

SEQ ID NO: 198645 - DNA, 25 bp, SARS Virus
taatcgtcgttgatgtaccaacatg

SEQ ID NO: 198646 - DNA, 25 bp, SARS Virus
aatcgtcgttgtagtaccaacatga

SEQ ID NO: 198647 - DNA, 25 bp, SARS Virus
atcgtcgttgttataccaacatgag

SEQ ID NO: 198648 - DNA, 25 bp, SARS Virus
tcgtcgttgttgaaccaacatgagt

SEQ ID NO: 198649 - DNA, 25 bp, SARS Virus
acgatttcagtacatctcggaaacg

SEQ ID NO: 198650 - DNA, 25 bp, SARS Virus
cgatttcagtaactctcggaaacga

SEQ ID NO: 198651 - DNA, 25 bp, SARS Virus
gatttcagtaaacctcggaaacgat

SEQ ID NO: 198652 - DNA, 25 bp, SARS Virus
atttcagtaaatctcggaaacgatt

SEQ ID NO: 198653 - DNA, 25 bp, SARS Virus
tttcagtaaatcccggaaacgattc

SEQ ID NO: 198654 - DNA, 25 bp, SARS Virus
ttcagtaaatctcggaaacgattca

SEQ ID NO: 198655 - DNA, 25 bp, SARS Virus
tcagtaaatctccgaaacgattcac

SEQ ID NO: 198656 - DNA, 25 bp, SARS Virus
cagtaaatctcgcaaacgattcacc

SEQ ID NO: 198657 - DNA, 25 bp, SARS Virus
agtaaatctcggcaacgattcaccg

SEQ ID NO: 198658 - DNA, 25 bp, SARS Virus
gtaaatctcggacacgattcaccgt

SEQ ID NO: 198659 - DNA, 25 bp, SARS Virus
taaatctcggaaccgattcaccgtc

SEQ ID NO: 198660 - DNA, 25 bp, SARS Virus
aaatctcggaaacgattcaccgtcg

SEQ ID NO: 198661 - DNA, 25 bp, SARS Virus
aatctcggaaaccattcaccgtcgt

SEQ ID NO: 198662 - DNA, 25 bp, SARS Virus
atctcggaaacgcttcaccgtcgtt

SEQ ID NO: 198663 - DNA, 25 bp, SARS Virus
tctcggaaacgactcaccgtcgttc

SEQ ID NO: 198664 - DNA, 25 bp, SARS Virus
ctcggaaacgatccaccgtcgttcg

SEQ ID NO: 198665 - DNA, 25 bp, SARS Virus
tcggaaacgattcaccgtcgttcga

SEQ ID NO: 198666 - DNA, 25 bp, SARS Virus
cggaaacgattccccgtcgttcgac

SEQ ID NO: 198667 - DNA, 25 bp, SARS Virus
ggaaacgattcaccgtcgttcgacg

SEQ ID NO: 198668 - DNA, 25 bp, SARS Virus
gaaacgattcaccgtcgttcgacga

SEQ ID NO: 198669 - DNA, 25 bp, SARS Virus
aaacgattcaccctcgttcgacgaa

SEQ ID NO: 198670 - DNA, 25 bp, SARS Virus
aacgattcaccgccgttcgacgaag

SEQ ID NO: 198671 - DNA, 25 bp, SARS Virus
acgattcaccgtcgttcgacgaagt

SEQ ID NO: 198672 - DNA, 25 bp, SARS Virus
cgattcaccgtccttcgacgaagtg

SEQ ID NO: 198673 - DNA, 25 bp, SARS Virus
gattcaccgtcgctcgacgaagtgc

SEQ ID NO: 198674 - DNA, 25 bp, SARS Virus
attcaccgtcgtccgacgaagtgct

SEQ ID NO: 198675 - DNA, 25 bp, SARS Virus
ttcaccgtcgttcgacgaagtgcta

SEQ ID NO: 198676 - DNA, 25 bp, SARS Virus
tcaccgtcgttccacgaagtgctat

SEQ ID NO: 198677 - DNA, 25 bp, SARS Virus
caccgtcgttcgccgaagtgctatc

SEQ ID NO: 198678 - DNA, 25 bp, SARS Virus
accgtcgttcgacgaagtgctatcg

SEQ ID NO: 198679 - DNA, 25 bp, SARS Virus
ccgtcgttcgaccaagtgctatcga

SEQ ID NO: 198680 - DNA, 25 bp, SARS Virus
cgtcgttcgacgcagtgctatcgac

SEQ ID NO: 198681 - DNA, 25 bp, SARS Virus
gtcgttcgacgacgtgctatcgacc

SEQ ID NO: 198682 - DNA, 25 bp, SARS Virus
tcgttcgacgaactgctatcgacca

SEQ ID NO: 198683 - DNA, 25 bp, SARS Virus
cgttcgacgaagcgctatcgaccat

SEQ ID NO: 198684 - DNA, 25 bp, SARS Virus
gttcgacgaagtcctatcgaccatc

SEQ ID NO: 198685 - DNA, 25 bp, SARS Virus
ttcgacgaagtgctatcgaccatca

SEQ ID NO: 198686 - DNA, 25 bp, SARS Virus
tcgacgaagtgccatcgaccatcat

SEQ ID NO: 198687 - DNA, 25 bp, SARS Virus
cgacgaagtgctctcgaccatcata

SEQ ID NO: 198688 - DNA, 25 bp, SARS Virus
gacgaagtgctaccgaccatcatag

SEQ ID NO: 198689 - DNA, 25 bp, SARS Virus
acgaagtgctatcgaccatcataga

SEQ ID NO: 198690 - DNA, 25 bp, SARS Virus
cgaagtgctatccaccatcatagat

SEQ ID NO: 198691 - DNA, 25 bp, SARS Virus
gaagtgctatcgcccatcatagatt

SEQ ID NO: 198692 - DNA, 25 bp, SARS Virus
aagtgctatcgaccatcatagattc

SEQ ID NO: 198693 - DNA, 25 bp, SARS Virus
agtgctatcgaccatcatagattcc

SEQ ID NO: 198694 - DNA, 25 bp, SARS Virus
gtgctatcgaccctcatagattccg

SEQ ID NO: 198695 - DNA, 25 bp, SARS Virus
tgctatcgaccaccatagattccga

SEQ ID NO: 198696 - DNA, 25 bp, SARS Virus
gctatcgaccatcatagattccgag

SEQ ID NO: 198697 - DNA, 25 bp, SARS Virus
ctatcgaccatcctagattccgagg

SEQ ID NO: 198698 - DNA, 25 bp, SARS Virus
tatcgaccatcacagattccgaggt

SEQ ID NO: 198699 - DNA, 25 bp, SARS Virus
atcgaccatcatcgattccgaggtg

SEQ ID NO: 198700 - DNA, 25 bp, SARS Virus
tcgaccatcatacattccgaggtga

SEQ ID NO: 198701 - DNA, 25 bp, SARS Virus
cgaccatcatagcttccgaggtgac

SEQ ID NO: 198702 - DNA, 25 bp, SARS Virus
gaccatcatagactccgaggtgact

SEQ ID NO: 198703 - DNA, 25 bp, SARS Virus
accatcatagatcccgaggtgactt

SEQ ID NO: 198704 - DNA, 25 bp, SARS Virus
ccatcatagattccgaggtgacttt

SEQ ID NO: 198705 - DNA, 25 bp, SARS Virus
catcatagattccgaggtgacttta

SEQ ID NO: 198706 - DNA, 25 bp, SARS Virus
atcatagattcccaggtgactttat

SEQ ID NO: 198707 - DNA, 25 bp, SARS Virus
tcatagattccgcggtgactttatg

SEQ ID NO: 198708 - DNA, 25 bp, SARS Virus
catagattccgacgtgactttatga

SEQ ID NO: 198709 - DNA, 25 bp, SARS Virus
atagattccgagctgactttatgaa

SEQ ID NO: 198710 - DNA, 25 bp, SARS Virus
tagattccgaggcgactttatgaac

SEQ ID NO: 198711 - DNA, 25 bp, SARS Virus
agattccgaggtcactttatgaaca

SEQ ID NO: 198712 - DNA, 25 bp, SARS Virus
gattccgaggtgcctttatgaacat

SEQ ID NO: 198713 - DNA, 25 bp, SARS Virus
attccgaggtgactttatgaacatg

SEQ ID NO: 198714 - DNA, 25 bp, SARS Virus
ttccgaggtgaccttatgaacatga

SEQ ID NO: 198715 - DNA, 25 bp, SARS Virus
tccgaggtgactctatgaacatgaa

SEQ ID NO: 198716 - DNA, 25 bp, SARS Virus
ccgaggtgacttcatgaacatgaac

SEQ ID NO: 198717 - DNA, 25 bp, SARS Virus
cgaggtgactttctgaacatgaaca

SEQ ID NO: 198718 - DNA, 25 bp, SARS Virus
gaggtgactttacgaacatgaacaa

SEQ ID NO: 198719 - DNA, 25 bp, SARS Virus
aggtgactttatcaacatgaacaat

SEQ ID NO: 198720 - DNA, 25 bp, SARS Virus
ggtgactttatgcacatgaacaata

SEQ ID NO: 198721 - DNA, 25 bp, SARS Virus
gtgactttatgaccatgaacaatat

SEQ ID NO: 198722 - DNA, 25 bp, SARS Virus
tgactttatgaacatgaacaatata

SEQ ID NO: 198723 - DNA, 25 bp, SARS Virus
gactttatgaacctgaacaatatat

SEQ ID NO: 198724 - DNA, 25 bp, SARS Virus
actttatgaacacgaacaatatatc

SEQ ID NO: 198725 - DNA, 25 bp, SARS Virus
ctttatgaacatcaacaatatatct

SEQ ID NO: 198726 - DNA, 25 bp, SARS Virus
tttatgaacatgcacaatatatctc

SEQ ID NO: 198727 - DNA, 25 bp, SARS Virus
ttatgaacatgaccaatatatctcg

SEQ ID NO: 198728 - DNA, 25 bp, SARS Virus
tatgaacatgaacaatatatctcgt

SEQ ID NO: 198729 - DNA, 25 bp, SARS Virus
atgaacatgaaccatatatctcgtt

SEQ ID NO: 198730 - DNA, 25 bp, SARS Virus
tgaacatgaacactatatctcgttc

SEQ ID NO: 198731 - DNA, 25 bp, SARS Virus
gaacatgaacaacatatctcgttct

SEQ ID NO: 198732 - DNA, 25 bp, SARS Virus
aacatgaacaatctatctcgttcta

SEQ ID NO: 198733 - DNA, 25 bp, SARS Virus
acatgaacaatacatctcgttctat

SEQ ID NO: 198734 - DNA, 25 bp, SARS Virus
catgaacaatatctctcgttctatg

SEQ ID NO: 198735 - DNA, 25 bp, SARS Virus
atgaacaatatacctcgttctatgg

SEQ ID NO: 198736 - DNA, 25 bp, SARS Virus
tgaacaatatatctcgttctatgga

SEQ ID NO: 198737 - DNA, 25 bp, SARS Virus
gaacaatatatcccgttctatggac

SEQ ID NO: 198738 - DNA, 25 bp, SARS Virus
aacaatatatctcgttctatggaca

SEQ ID NO: 198739 - DNA, 25 bp, SARS Virus
acaatatatctccttctatggacaa

SEQ ID NO: 198740 - DNA, 25 bp, SARS Virus
caatatatctcgctctatggacaat

SEQ ID NO: 198741 - DNA, 25 bp, SARS Virus
aatatatctcgtcctatggacaata

SEQ ID NO: 198742 - DNA, 25 bp, SARS Virus
atatatctcgttctatggacaatat

SEQ ID NO: 198743 - DNA, 25 bp, SARS Virus
tatatctcgttccatggacaatatg

SEQ ID NO: 198744 - DNA, 25 bp, SARS Virus
atatctcgttctctggacaatatga

SEQ ID NO: 198745 - DNA, 25 bp, SARS Virus
tatctcgttctacggacaatatgac

SEQ ID NO: 198746 - DNA, 25 bp, SARS Virus
atctcgttctatcgacaatatgaca

SEQ ID NO: 198747 - DNA, 25 bp, SARS Virus
tctcgttctatgcacaatatgacac

SEQ ID NO: 198748 - DNA, 25 bp, SARS Virus
ctcgttctatggccaatatgacaca

SEQ ID NO: 198749 - DNA, 25 bp, SARS Virus
tcgttctatggacaatatgacacat

SEQ ID NO: 198750 - DNA, 25 bp, SARS Virus
cgttctatggaccatatgacacatt

SEQ ID NO: 198751 - DNA, 25 bp, SARS Virus
gttctatggacactatgacacattc

SEQ ID NO: 198752 - DNA, 25 bp, SARS Virus
ttctatggacaacatgacacattca

SEQ ID NO: 198753 - DNA, 25 bp, SARS Virus
tctatggacaatctgacacattcac

SEQ ID NO: 198754 - DNA, 25 bp, SARS Virus
ctatggacaatacgacacattcacc

SEQ ID NO: 198755 - DNA, 25 bp, SARS Virus
tatggacaatatcacacattcaccg

SEQ ID NO: 198756 - DNA, 25 bp, SARS Virus
atggacaatatgccacattcaccgt

SEQ ID NO: 198757 - DNA, 25 bp, SARS Virus
tggacaatatgacacattcaccgtt

SEQ ID NO: 198758 - DNA, 25 bp, SARS Virus
ggacaatatgacccattcaccgttg

SEQ ID NO: 198759 - DNA, 25 bp, SARS Virus
gacaatatgacacattcaccgttgt

SEQ ID NO: 198760 - DNA, 25 bp, SARS Virus
acaatatgacaccttcaccgttgtc

SEQ ID NO: 198761 - DNA, 25 bp, SARS Virus
caatatgacacactcaccgttgtca

SEQ ID NO: 198762 - DNA, 25 bp, SARS Virus
aatatgacacatccaccgttgtcac

SEQ ID NO: 198763 - DNA, 25 bp, SARS Virus
atatgacacattcaccgttgtcaca

SEQ ID NO: 198764 - DNA, 25 bp, SARS Virus
tatgacacattccccgttgtcacag

SEQ ID NO: 198765 - DNA, 25 bp, SARS Virus
atgacacattcaccgttgtcacaga

SEQ ID NO: 198766 - DNA, 25 bp, SARS Virus
tgacacattcaccgttgtcacagag

SEQ ID NO: 198767 - DNA, 25 bp, SARS Virus
gacacattcacccttgtcacagagc

SEQ ID NO: 198768 - DNA, 25 bp, SARS Virus
acacattcaccgctgtcacagagcg

SEQ ID NO: 198769 - DNA, 25 bp, SARS Virus
cacattcaccgtcgtcacagagcga

SEQ ID NO: 198770 - DNA, 25 bp, SARS Virus
acattcaccgttctcacagagcgat

SEQ ID NO: 198771 - DNA, 25 bp, SARS Virus
cattcaccgttgccacagagcgatg

SEQ ID NO: 198772 - DNA, 25 bp, SARS Virus
attcaccgttgtcacagagcgatgc

SEQ ID NO: 198773 - DNA, 25 bp, SARS Virus
ttcaccgttgtcccagagcgatgcg

SEQ ID NO: 198774 - DNA, 25 bp, SARS Virus
tcaccgttgtcacagagcgatgcgt

SEQ ID NO: 198775 - DNA, 25 bp, SARS Virus
caccgttgtcaccgagcgatgcgtt

SEQ ID NO: 198776 - DNA, 25 bp, SARS Virus
accgttgtcacacagcgatgcgtta

SEQ ID NO: 198777 - DNA, 25 bp, SARS Virus
ccgttgtcacagcgcgatgcgttaa

SEQ ID NO: 198778 - DNA, 25 bp, SARS Virus
cgttgtcacagaccgatgcgttaaa

SEQ ID NO: 198779 - DNA, 25 bp, SARS Virus
gttgtcacagagcgatgcgttaaaa

SEQ ID NO: 198780 - DNA, 25 bp, SARS Virus
ttgtcacagagccatgcgttaaaat

SEQ ID NO: 198781 - DNA, 25 bp, SARS Virus
tgtcacagagcgctgcgttaaaatc

SEQ ID NO: 198782 - DNA, 25 bp, SARS Virus
gtcacagagcgacgcgttaaaatcc

SEQ ID NO: 198783 - DNA, 25 bp, SARS Virus
tcacagagcgatccgttaaaatcca

SEQ ID NO: 198784 - DNA, 25 bp, SARS Virus
cacagagcgatgcgttaaaatccat

SEQ ID NO: 198785 - DNA, 25 bp, SARS Virus
acagagcgatgccttaaaatccatg

SEQ ID NO: 198786 - DNA, 25 bp, SARS Virus
cagagcgatgcgctaaaatccatgt

SEQ ID NO: 198787 - DNA, 25 bp, SARS Virus
agagcgatgcgtcaaaatccatgta

SEQ ID NO: 198788 - DNA, 25 bp, SARS Virus
gagcgatgcgttcaaatccatgtaa

SEQ ID NO: 198789 - DNA, 25 bp, SARS Virus
agcgatgcgttacaatccatgtaaa

SEQ ID NO: 198790 - DNA, 25 bp, SARS Virus
gcgatgcgttaacatccatgtaaag

SEQ ID NO: 198791 - DNA, 25 bp, SARS Virus
cgatgcgttaaactccatgtaaagg

SEQ ID NO: 198792 - DNA, 25 bp, SARS Virus
gatgcgttaaaacccatgtaaagga

SEQ ID NO: 198793 - DNA, 25 bp, SARS Virus
atgcgttaaaatccatgtaaaggaa

SEQ ID NO: 198794 - DNA, 25 bp, SARS Virus
tgcgttaaaatccatgtaaaggaac

SEQ ID NO: 198795 - DNA, 25 bp, SARS Virus
gcgttaaaatccctgtaaaggaaca

SEQ ID NO: 198796 - DNA, 25 bp, SARS Virus
cgttaaaatccacgtaaaggaacaa

SEQ ID NO: 198797 - DNA, 25 bp, SARS Virus
gttaaaatccatctaaaggaacaac

SEQ ID NO: 198798 - DNA, 25 bp, SARS Virus
ttaaaatccatgcaaaggaacaact

SEQ ID NO: 198799 - DNA, 25 bp, SARS Virus
taaaatccatgtcaaggaacaactc

SEQ ID NO: 198800 - DNA, 25 bp, SARS Virus
aaaatccatgtacaggaacaactcg

SEQ ID NO: 198801 - DNA, 25 bp, SARS Virus
aaatccatgtaacggaacaactcgt

SEQ ID NO: 198802 - DNA, 25 bp, SARS Virus
aatccatgtaaacgaacaactcgtt

SEQ ID NO: 198803 - DNA, 25 bp, SARS Virus
atccatgtaaagcaacaactcgttt

SEQ ID NO: 198804 - DNA, 25 bp, SARS Virus
tccatgtaaaggcacaactcgtttt

SEQ ID NO: 198805 - DNA, 25 bp, SARS Virus
ccatgtaaaggaccaactcgttttt

SEQ ID NO: 198806 - DNA, 25 bp, SARS Virus
catgtaaaggaacaactcgtttttc

SEQ ID NO: 198807 - DNA, 25 bp, SARS Virus
atgtaaaggaaccactcgtttttcc

SEQ ID NO: 198808 - DNA, 25 bp, SARS Virus
tgtaaaggaacacctcgtttttcca

SEQ ID NO: 198809 - DNA, 25 bp, SARS Virus
gtaaaggaacaactcgtttttccat

SEQ ID NO: 198810 - DNA, 25 bp, SARS Virus
taaaggaacaacccgtttttccatg

SEQ ID NO: 198811 - DNA, 25 bp, SARS Virus
aaaggaacaactcgtttttccatgt

SEQ ID NO: 198812 - DNA, 25 bp, SARS Virus
aaggaacaactcctttttccatgtg

SEQ ID NO: 198813 - DNA, 25 bp, SARS Virus
aggaacaactcgcttttccatgtgt

SEQ ID NO: 198814 - DNA, 25 bp, SARS Virus
ggaacaactcgtctttccatgtgtt

SEQ ID NO: 198815 - DNA, 25 bp, SARS Virus
gaacaactcgttcttccatgtgttt

SEQ ID NO: 198816 - DNA, 25 bp, SARS Virus
aacaactcgtttctccatgtgtttc

SEQ ID NO: 198817 - DNA, 25 bp, SARS Virus
acaactcgttttcccatgtgtttcg

SEQ ID NO: 198818 - DNA, 25 bp, SARS Virus
caactcgtttttccatgtgtttcgt

SEQ ID NO: 198819 - DNA, 25 bp, SARS Virus
aactcgtttttccatgtgtttcgtc

SEQ ID NO: 198820 - DNA, 25 bp, SARS Virus
actcgtttttccctgtgtttcgtcg

SEQ ID NO: 198821 - DNA, 25 bp, SARS Virus
ctcgtttttccacgtgtttcgtcgg

SEQ ID NO: 198822 - DNA, 25 bp, SARS Virus
tcgtttttccatctgtttcgtcgga

SEQ ID NO: 198823 - DNA, 25 bp, SARS Virus
cgtttttccatgcgtttcgtcggag

SEQ ID NO: 198824 - DNA, 25 bp, SARS Virus
gtttttccatgtctttcgtcggagg

SEQ ID NO: 198825 - DNA, 25 bp, SARS Virus
tttttccatgtgcttcgtcggagga

SEQ ID NO: 198826 - DNA, 25 bp, SARS Virus
ttttccatgtgtctcgtcggaggag

SEQ ID NO: 198827 - DNA, 25 bp, SARS Virus
tttccatgtgttccgtcggaggagc

SEQ ID NO: 198828 - DNA, 25 bp, SARS Virus
ttccatgtgtttcgtcggaggagct

SEQ ID NO: 198829 - DNA, 25 bp, SARS Virus
tccatgtgtttcctcggaggagctt

SEQ ID NO: 198830 - DNA, 25 bp, SARS Virus
ccatgtgtttcgccggaggagcttc

SEQ ID NO: 198831 - DNA, 25 bp, SARS Virus
catgtgtttcgtcggaggagcttcc

SEQ ID NO: 198832 - DNA, 25 bp, SARS Virus
atgtgtttcgtccgaggagcttcca

SEQ ID NO: 198833 - DNA, 25 bp, SARS Virus
tgtgtttcgtcgcaggagcttccat

SEQ ID NO: 198834 - DNA, 25 bp, SARS Virus
gtgtttcgtcggcggagcttccatg

SEQ ID NO: 198835 - DNA, 25 bp, SARS Virus
tgtttcgtcggacgagcttccatga

SEQ ID NO: 198836 - DNA, 25 bp, SARS Virus
gtttcgtcggagcagcttccatgat

SEQ ID NO: 198837 - DNA, 25 bp, SARS Virus
tttcgtcggaggcgcttccatgatt

SEQ ID NO: 198838 - DNA, 25 bp, SARS Virus
ttcgtcggaggaccttccatgattt

SEQ ID NO: 198839 - DNA, 25 bp, SARS Virus
tcgtcggaggagcttccatgattta

SEQ ID NO: 198840 - DNA, 25 bp, SARS Virus
cgtcggaggagcctccatgatttac

SEQ ID NO: 198841 - DNA, 25 bp, SARS Virus
gtcggaggagctcccatgatttaca

SEQ ID NO: 198842 - DNA, 25 bp, SARS Virus
tcggaggagcttccatgatttacat

SEQ ID NO: 198843 - DNA, 25 bp, SARS Virus
cggaggagcttccatgatttacatt

SEQ ID NO: 198844 - DNA, 25 bp, SARS Virus
ggaggagcttccctgatttacattg

SEQ ID NO: 198845 - DNA, 25 bp, SARS Virus
gaggagcttccacgatttacattga

SEQ ID NO: 198846 - DNA, 25 bp, SARS Virus
aggagcttccatcatttacattgag

SEQ ID NO: 198847 - DNA, 25 bp, SARS Virus
ggagcttccatgctttacattgagg

SEQ ID NO: 198848 - DNA, 25 bp, SARS Virus
gagcttccatgacttacattgaggt

SEQ ID NO: 198849 - DNA, 25 bp, SARS Virus
agcttccatgatctacattgaggta

SEQ ID NO: 198850 - DNA, 25 bp, SARS Virus
gcttccatgattcacattgaggtaa

SEQ ID NO: 198851 - DNA, 25 bp, SARS Virus
cttccatgatttccattgaggtaat

SEQ ID NO: 198852 - DNA, 25 bp, SARS Virus
ttccatgatttacattgaggtaatt

SEQ ID NO: 198853 - DNA, 25 bp, SARS Virus
tccatgatttaccttgaggtaattt

SEQ ID NO: 198854 - DNA, 25 bp, SARS Virus
ccatgatttacactgaggtaatttg

SEQ ID NO: 198855 - DNA, 25 bp, SARS Virus
catgatttacatcgaggtaatttgt

SEQ ID NO: 198856 - DNA, 25 bp, SARS Virus
atgatttacattcaggtaatttgta

SEQ ID NO: 198857 - DNA, 25 bp, SARS Virus
tgatttacattgcggtaatttgtac

SEQ ID NO: 198858 - DNA, 25 bp, SARS Virus
gatttacattgacgtaatttgtact

SEQ ID NO: 198859 - DNA, 25 bp, SARS Virus
atttacattgagctaatttgtactg

SEQ ID NO: 198860 - DNA, 25 bp, SARS Virus
tttacattgaggcaatttgtactga

SEQ ID NO: 198861 - DNA, 25 bp, SARS Virus
ttacattgaggtcatttgtactgag

SEQ ID NO: 198862 - DNA, 25 bp, SARS Virus
tacattgaggtactttgtactgaga

SEQ ID NO: 198863 - DNA, 25 bp, SARS Virus
acattgaggtaacttgtactgagaa

SEQ ID NO: 198864 - DNA, 25 bp, SARS Virus
cattgaggtaatctgtactgagaaa

SEQ ID NO: 198865 - DNA, 25 bp, SARS Virus
attgaggtaattcgtactgagaaaa

SEQ ID NO: 198866 - DNA, 25 bp, SARS Virus
ttgaggtaatttctactgagaaaag

SEQ ID NO: 198867 - DNA, 25 bp, SARS Virus
tgaggtaatttgcactgagaaaagg

SEQ ID NO: 198868 - DNA, 25 bp, SARS Virus
gaggtaatttgtcctgagaaaagga

SEQ ID NO: 198869 - DNA, 25 bp, SARS Virus
aggtaatttgtactgagaaaaggat

SEQ ID NO: 198870 - DNA, 25 bp, SARS Virus
ggtaatttgtaccgagaaaaggatt

SEQ ID NO: 198871 - DNA, 25 bp, SARS Virus
gtaatttgtactcagaaaaggattc

SEQ ID NO: 198872 - DNA, 25 bp, SARS Virus
taatttgtactgcgaaaaggattct

SEQ ID NO: 198873 - DNA, 25 bp, SARS Virus
aatttgtactgacaaaaggattcta

SEQ ID NO: 198874 - DNA, 25 bp, SARS Virus
atttgtactgagcaaaggattctat

SEQ ID NO: 198875 - DNA, 25 bp, SARS Virus
tttgtactgagacaaggattctatc

SEQ ID NO: 198876 - DNA, 25 bp, SARS Virus
ttgtactgagaacaggattctatca

SEQ ID NO: 198877 - DNA, 25 bp, SARS Virus
tgtactgagaaacggattctatcaa

SEQ ID NO: 198878 - DNA, 25 bp, SARS Virus
gtactgagaaaacgattctatcaac

SEQ ID NO: 198879 - DNA, 25 bp, SARS Virus
tactgagaaaagcattctatcaaca

SEQ ID NO: 198880 - DNA, 25 bp, SARS Virus
actgagaaaaggcttctatcaacaa

SEQ ID NO: 198881 - DNA, 25 bp, SARS Virus
ctgagaaaaggactctatcaacaat

SEQ ID NO: 198882 - DNA, 25 bp, SARS Virus
tgagaaaaggatcctatcaacaatt

SEQ ID NO: 198883 - DNA, 25 bp, SARS Virus
gagaaaaggattctatcaacaattt

SEQ ID NO: 198884 - DNA, 25 bp, SARS Virus
agaaaaggattccatcaacaatttc

SEQ ID NO: 198885 - DNA, 25 bp, SARS Virus
gaaaaggattctctcaacaatttct

SEQ ID NO: 198886 - DNA, 25 bp, SARS Virus
aaaaggattctaccaacaatttctt

SEQ ID NO: 198887 - DNA, 25 bp, SARS Virus
aaaggattctatcaacaatttcttg

SEQ ID NO: 198888 - DNA, 25 bp, SARS Virus
aaggattctatccacaatttcttgg

SEQ ID NO: 198889 - DNA, 25 bp, SARS Virus
aggattctatcaccaatttcttggt

SEQ ID NO: 198890 - DNA, 25 bp, SARS Virus
ggattctatcaacaatttcttggtt

SEQ ID NO: 198891 - DNA, 25 bp, SARS Virus
gattctatcaaccatttcttggtta

SEQ ID NO: 198892 - DNA, 25 bp, SARS Virus
attctatcaacactttcttggttac

SEQ ID NO: 198893 - DNA, 25 bp, SARS Virus
ttctatcaacaacttcttggttacc

SEQ ID NO: 198894 - DNA, 25 bp, SARS Virus
tctatcaacaatctcttggttaccg

SEQ ID NO: 198895 - DNA, 25 bp, SARS Virus
ctatcaacaattccttggttaccgt

SEQ ID NO: 198896 - DNA, 25 bp, SARS Virus
tatcaacaatttcttggttaccgtc

SEQ ID NO: 198897 - DNA, 25 bp, SARS Virus
atcaacaatttcctggttaccgtca

SEQ ID NO: 198898 - DNA, 25 bp, SARS Virus
tcaacaatttctcggttaccgtcac

SEQ ID NO: 198899 - DNA, 25 bp, SARS Virus
caacaatttcttcgttaccgtcacg

SEQ ID NO: 198900 - DNA, 25 bp, SARS Virus
aacaatttcttgcttaccgtcacga

SEQ ID NO: 198901 - DNA, 25 bp, SARS Virus
acaatttcttggctaccgtcacgaa

SEQ ID NO: 198902 - DNA, 25 bp, SARS Virus
caatttcttggtcaccgtcacgaag

SEQ ID NO: 198903 - DNA, 25 bp, SARS Virus
aatttcttggttcccgtcacgaagt

SEQ ID NO: 198904 - DNA, 25 bp, SARS Virus
atttcttggttaccgtcacgaagtc

SEQ ID NO: 198905 - DNA, 25 bp, SARS Virus
tttcttggttaccgtcacgaagtct

SEQ ID NO: 198906 - DNA, 25 bp, SARS Virus
ttcttggttaccctcacgaagtctc

SEQ ID NO: 198907 - DNA, 25 bp, SARS Virus
tcttggttaccgccacgaagtctct

SEQ ID NO: 198908 - DNA, 25 bp, SARS Virus
cttggttaccgtcacgaagtctctt

SEQ ID NO: 198909 - DNA, 25 bp, SARS Virus
ttggttaccgtcccgaagtctcttt

SEQ ID NO: 198910 - DNA, 25 bp, SARS Virus
tggttaccgtcacgaagtctcttta

SEQ ID NO: 198911 - DNA, 25 bp, SARS Virus
ggttaccgtcaccaagtctctttat

SEQ ID NO: 198912 - DNA, 25 bp, SARS Virus
gttaccgtcacgcagtctctttatg

SEQ ID NO: 198913 - DNA, 25 bp, SARS Virus
ttaccgtcacgacgtctctttatgt

SEQ ID NO: 198914 - DNA, 25 bp, SARS Virus
taccgtcacgaactctctttatgtc

SEQ ID NO: 198915 - DNA, 25 bp, SARS Virus
accgtcacgaagcctctttatgtct

SEQ ID NO: 198916 - DNA, 25 bp, SARS Virus
ccgtcacgaagtctctttatgtctt

SEQ ID NO: 198917 - DNA, 25 bp, SARS Virus
cgtcacgaagtccctttatgtctta

SEQ ID NO: 198918 - DNA, 25 bp, SARS Virus
gtcacgaagtctctttatgtcttat

SEQ ID NO: 198919 - DNA, 25 bp, SARS Virus
tcacgaagtctccttatgtcttatg

SEQ ID NO: 198920 - DNA, 25 bp, SARS Virus
cacgaagtctctctatgtcttatgt

SEQ ID NO: 198921 - DNA, 25 bp, SARS Virus
acgaagtctcttcatgtcttatgta

SEQ ID NO: 198922 - DNA, 25 bp, SARS Virus
cgaagtctctttctgtcttatgtat

SEQ ID NO: 198923 - DNA, 25 bp, SARS Virus
gaagtctctttacgtcttatgtatc

SEQ ID NO: 198924 - DNA, 25 bp, SARS Virus
aagtctctttatctcttatgtatct

SEQ ID NO: 198925 - DNA, 25 bp, SARS Virus
agtctctttatgccttatgtatcta

SEQ ID NO: 198926 - DNA, 25 bp, SARS Virus
gtctctttatgtcttatgtatctaa

SEQ ID NO: 198927 - DNA, 25 bp, SARS Virus
tctctttatgtcctatgtatctaac

SEQ ID NO: 198928 - DNA, 25 bp, SARS Virus
ctctttatgtctcatgtatctaacg

SEQ ID NO: 198929 - DNA, 25 bp, SARS Virus
tctttatgtcttctgtatctaacga

SEQ ID NO: 198930 - DNA, 25 bp, SARS Virus
ctttatgtcttacgtatctaacgac

SEQ ID NO: 198931 - DNA, 25 bp, SARS Virus
tttatgtcttatctatctaacgaca

SEQ ID NO: 198932 - DNA, 25 bp, SARS Virus
ttatgtcttatgcatctaacgacaa

SEQ ID NO: 198933 - DNA, 25 bp, SARS Virus
tatgtcttatgtctctaacgacaat

SEQ ID NO: 198934 - DNA, 25 bp, SARS Virus
atgtcttatgtacctaacgacaata

SEQ ID NO: 198935 - DNA, 25 bp, SARS Virus
tgtcttatgtatctaacgacaatag

SEQ ID NO: 198936 - DNA, 25 bp, SARS Virus
gtcttatgtatccaacgacaatagg

SEQ ID NO: 198937 - DNA, 25 bp, SARS Virus
tcttatgtatctcacgacaataggt

SEQ ID NO: 198938 - DNA, 25 bp, SARS Virus
cttatgtatctaccgacaataggtt

SEQ ID NO: 198939 - DNA, 25 bp, SARS Virus
ttatgtatctaacgacaataggttt

SEQ ID NO: 198940 - DNA, 25 bp, SARS Virus
tatgtatctaaccacaataggtttt

SEQ ID NO: 198941 - DNA, 25 bp, SARS Virus
atgtatctaacgccaataggttttt

SEQ ID NO: 198942 - DNA, 25 bp, SARS Virus
tgtatctaacgacaataggtttttc

SEQ ID NO: 198943 - DNA, 25 bp, SARS Virus
gtatctaacgaccataggtttttcc

SEQ ID NO: 198944 - DNA, 25 bp, SARS Virus
tatctaacgacactaggtttttccg

SEQ ID NO: 198945 - DNA, 25 bp, SARS Virus
atctaacgacaacaggtttttccgt

SEQ ID NO: 198946 - DNA, 25 bp, SARS Virus
tctaacgacaatcggtttttccgtg

SEQ ID NO: 198947 - DNA, 25 bp, SARS Virus
ctaacgacaatacgtttttccgtgt

SEQ ID NO: 198948 - DNA, 25 bp, SARS Virus
taacgacaatagctttttccgtgtt

SEQ ID NO: 198949 - DNA, 25 bp, SARS Virus
aacgacaataggcttttccgtgtta

SEQ ID NO: 198950 - DNA, 25 bp, SARS Virus
acgacaataggtctttccgtgttat

SEQ ID NO: 198951 - DNA, 25 bp, SARS Virus
cgacaataggttcttccgtgttatc

SEQ ID NO: 198952 - DNA, 25 bp, SARS Virus
gacaataggtttctccgtgttatcc

SEQ ID NO: 198953 - DNA, 25 bp, SARS Virus
acaataggttttcccgtgttatcct

SEQ ID NO: 198954 - DNA, 25 bp, SARS Virus
caataggtttttccgtgttatcctc

SEQ ID NO: 198955 - DNA, 25 bp, SARS Virus
aataggtttttccgtgttatcctct

SEQ ID NO: 198956 - DNA, 25 bp, SARS Virus
ataggtttttccctgttatcctctt

SEQ ID NO: 198957 - DNA, 25 bp, SARS Virus
taggtttttccgcgttatcctcttt

SEQ ID NO: 198958 - DNA, 25 bp, SARS Virus
aggtttttccgtcttatcctctttt

SEQ ID NO: 198959 - DNA, 25 bp, SARS Virus
ggtttttccgtgctatcctcttttg

SEQ ID NO: 198960 - DNA, 25 bp, SARS Virus
gtttttccgtgtcatcctcttttgt

SEQ ID NO: 198961 - DNA, 25 bp, SARS Virus
tttttccgtgttctcctcttttgta

SEQ ID NO: 198962 - DNA, 25 bp, SARS Virus
ttttccgtgttaccctcttttgtac

SEQ ID NO: 198963 - DNA, 25 bp, SARS Virus
tttccgtgttatcctcttttgtacc

SEQ ID NO: 198964 - DNA, 25 bp, SARS Virus
ttccgtgttatcctcttttgtaccg

SEQ ID NO: 198965 - DNA, 25 bp, SARS Virus
tccgtgttatccccttttgtaccgt

SEQ ID NO: 198966 - DNA, 25 bp, SARS Virus
ccgtgttatcctcttttgtaccgtt

SEQ ID NO: 198967 - DNA, 25 bp, SARS Virus
cgtgttatcctcctttgtaccgttt

SEQ ID NO: 198968 - DNA, 25 bp, SARS Virus
gtgttatcctctcttgtaccgtttg

SEQ ID NO: 198969 - DNA, 25 bp, SARS Virus
tgttatcctcttctgtaccgtttgg

SEQ ID NO: 198970 - DNA, 25 bp, SARS Virus
gttatcctctttcgtaccgtttggt

SEQ ID NO: 198971 - DNA, 25 bp, SARS Virus
ttatcctcttttctaccgtttggta

SEQ ID NO: 198972 - DNA, 25 bp, SARS Virus
tatcctcttttgcaccgtttggtaa

SEQ ID NO: 198973 - DNA, 25 bp, SARS Virus
atcctcttttgtcccgtttggtaac

SEQ ID NO: 198974 - DNA, 25 bp, SARS Virus
tcctcttttgtaccgtttggtaact

SEQ ID NO: 198975 - DNA, 25 bp, SARS Virus
cctcttttgtaccgtttggtaactt

SEQ ID NO: 198976 - DNA, 25 bp, SARS Virus
ctcttttgtaccctttggtaacttc

SEQ ID NO: 198977 - DNA, 25 bp, SARS Virus
tcttttgtaccgcttggtaacttcc

SEQ ID NO: 198978 - DNA, 25 bp, SARS Virus
cttttgtaccgtctggtaacttcca

SEQ ID NO: 198979 - DNA, 25 bp, SARS Virus
ttttgtaccgttcggtaacttccac

SEQ ID NO: 198980 - DNA, 25 bp, SARS Virus
tttgtaccgtttcgtaacttccact

SEQ ID NO: 198981 - DNA, 25 bp, SARS Virus
ttgtaccgtttgctaacttccactc

SEQ ID NO: 198982 - DNA, 25 bp, SARS Virus
tgtaccgtttggcaacttccactcg

SEQ ID NO: 198983 - DNA, 25 bp, SARS Virus
gtaccgtttggtcacttccactcgg

SEQ ID NO: 198984 - DNA, 25 bp, SARS Virus
taccgtttggtaccttccactcggt

SEQ ID NO: 198985 - DNA, 25 bp, SARS Virus
accgtttggtaacttccactcggtt

SEQ ID NO: 198986 - DNA, 25 bp, SARS Virus
ccgtttggtaacctccactcggttc

SEQ ID NO: 198987 - DNA, 25 bp, SARS Virus
cgtttggtaactcccactcggttct

SEQ ID NO: 198988 - DNA, 25 bp, SARS Virus
gtttggtaacttccactcggttctt

SEQ ID NO: 198989 - DNA, 25 bp, SARS Virus
tttggtaacttccactcggttctta

SEQ ID NO: 198990 - DNA, 25 bp, SARS Virus
ttggtaacttcccctcggttcttac

SEQ ID NO: 198991 - DNA, 25 bp, SARS Virus
tggtaacttccactcggttcttact

SEQ ID NO: 198992 - DNA, 25 bp, SARS Virus
ggtaacttccacccggttcttactt

SEQ ID NO: 198993 - DNA, 25 bp, SARS Virus
gtaacttccactcggttcttacttt

SEQ ID NO: 198994 - DNA, 25 bp, SARS Virus
taacttccactccgttcttactttg

SEQ ID NO: 198995 - DNA, 25 bp, SARS Virus
aacttccactcgcttcttactttgt

SEQ ID NO: 198996 - DNA, 25 bp, SARS Virus
acttccactcggctcttactttgta

SEQ ID NO: 198997 - DNA, 25 bp, SARS Virus
cttccactcggtccttactttgtag

SEQ ID NO: 198998 - DNA, 25 bp, SARS Virus
ttccactcggttcttactttgtagt

SEQ ID NO: 198999 - DNA, 25 bp, SARS Virus
tccactcggttcctactttgtagta

SEQ ID NO: 199000 - DNA, 25 bp, SARS Virus
ccactcggttctcactttgtagtaa

SEQ ID NO: 199001 - DNA, 25 bp, SARS Virus
cactcggttcttcctttgtagtaac

SEQ ID NO: 199002 - DNA, 25 bp, SARS Virus
actcggttcttactttgtagtaacc

SEQ ID NO: 199003 - DNA, 25 bp, SARS Virus
ctcggttcttaccttgtagtaacca

SEQ ID NO: 199004 - DNA, 25 bp, SARS Virus
tcggttcttactctgtagtaaccac

SEQ ID NO: 199005 - DNA, 25 bp, SARS Virus
cggttcttacttcgtagtaaccact

SEQ ID NO: 199006 - DNA, 25 bp, SARS Virus
ggttcttactttctagtaaccactt

SEQ ID NO: 199007 - DNA, 25 bp, SARS Virus
gttcttactttgcagtaaccacttt

SEQ ID NO: 199008 - DNA, 25 bp, SARS Virus
ttcttactttgtcgtaaccacttta

SEQ ID NO: 199009 - DNA, 25 bp, SARS Virus
tcttactttgtactaaccactttat

SEQ ID NO: 199010 - DNA, 25 bp, SARS Virus
cttactttgtagcaaccactttatc

SEQ ID NO: 199011 - DNA, 25 bp, SARS Virus
ttactttgtagtcaccactttatct

SEQ ID NO: 199012 - DNA, 25 bp, SARS Virus
tactttgtagtacccactttatctt

SEQ ID NO: 199013 - DNA, 25 bp, SARS Virus
actttgtagtaaccactttatctta

SEQ ID NO: 199014 - DNA, 25 bp, SARS Virus
ctttgtagtaaccactttatcttac

SEQ ID NO: 199015 - DNA, 25 bp, SARS Virus
tttgtagtaacccctttatcttaca

SEQ ID NO: 199016 - DNA, 25 bp, SARS Virus
ttgtagtaaccactttatcttacag

SEQ ID NO: 199017 - DNA, 25 bp, SARS Virus
tgtagtaaccaccttatcttacagt

SEQ ID NO: 199018 - DNA, 25 bp, SARS Virus
gtagtaaccactctatcttacagtt

SEQ ID NO: 199019 - DNA, 25 bp, SARS Virus
tagtaaccacttcatcttacagttc

SEQ ID NO: 199020 - DNA, 25 bp, SARS Virus
agtaaccactttctcttacagttca

SEQ ID NO: 199021 - DNA, 25 bp, SARS Virus
gtaaccactttaccttacagttcat

SEQ ID NO: 199022 - DNA, 25 bp, SARS Virus
taaccactttatcttacagttcatg

SEQ ID NO: 199023 - DNA, 25 bp, SARS Virus
aaccactttatcctacagttcatgt

SEQ ID NO: 199024 - DNA, 25 bp, SARS Virus
accactttatctcacagttcatgtt

SEQ ID NO: 199025 - DNA, 25 bp, SARS Virus
ccactttatcttccagttcatgttc

SEQ ID NO: 199026 - DNA, 25 bp, SARS Virus
cactttatcttacagttcatgttca

SEQ ID NO: 199027 - DNA, 25 bp, SARS Virus
actttatcttaccgttcatgttcat

SEQ ID NO: 199028 - DNA, 25 bp, SARS Virus
ctttatcttacacttcatgttcatt

SEQ ID NO: 199029 - DNA, 25 bp, SARS Virus
tttatcttacagctcatgttcattt

SEQ ID NO: 199030 - DNA, 25 bp, SARS Virus
ttatcttacagtccatgttcatttt

SEQ ID NO: 199031 - DNA, 25 bp, SARS Virus
tatcttacagttcatgttcattttc

SEQ ID NO: 199032 - DNA, 25 bp, SARS Virus
atcttacagttcctgttcattttct

SEQ ID NO: 199033 - DNA, 25 bp, SARS Virus
tcttacagttcacgttcattttctg

SEQ ID NO: 199034 - DNA, 25 bp, SARS Virus
cttacagttcatcttcattttctga

SEQ ID NO: 199035 - DNA, 25 bp, SARS Virus
ttacagttcatgctcattttctgac

SEQ ID NO: 199036 - DNA, 25 bp, SARS Virus
tacagttcatgtccattttctgact

SEQ ID NO: 199037 - DNA, 25 bp, SARS Virus
acagttcatgttcattttctgactc

SEQ ID NO: 199038 - DNA, 25 bp, SARS Virus
cagttcatgttccttttctgactca

SEQ ID NO: 199039 - DNA, 25 bp, SARS Virus
agttcatgttcactttctgactcat

SEQ ID NO: 199040 - DNA, 25 bp, SARS Virus
gttcatgttcatcttctgactcatc

SEQ ID NO: 199041 - DNA, 25 bp, SARS Virus
ttcatgttcattctctgactcatct

SEQ ID NO: 199042 - DNA, 25 bp, SARS Virus
tcatgttcatttcctgactcatctg

SEQ ID NO: 199043 - DNA, 25 bp, SARS Virus
catgttcattttctgactcatctga

SEQ ID NO: 199044 - DNA, 25 bp, SARS Virus
atgttcattttccgactcatctgag

SEQ ID NO: 199045 - DNA, 25 bp, SARS Virus
tgttcattttctcactcatctgagg

SEQ ID NO: 199046 - DNA, 25 bp, SARS Virus
gttcattttctgcctcatctgaggg

SEQ ID NO: 199047 - DNA, 25 bp, SARS Virus
ttcattttctgactcatctgagggc

SEQ ID NO: 199048 - DNA, 25 bp, SARS Virus
tcattttctgacccatctgagggcc

SEQ ID NO: 199049 - DNA, 25 bp, SARS Virus
cattttctgactcatctgagggccg

SEQ ID NO: 199050 - DNA, 25 bp, SARS Virus
attttctgactcctctgagggccgt

SEQ ID NO: 199051 - DNA, 25 bp, SARS Virus
ttttctgactcacctgagggccgtc

SEQ ID NO: 199052 - DNA, 25 bp, SARS Virus
tttctgactcatctgagggccgtct

SEQ ID NO: 199053 - DNA, 25 bp, SARS Virus
ttctgactcatccgagggccgtctt

SEQ ID NO: 199054 - DNA, 25 bp, SARS Virus
tctgactcatctcagggccgtcttt

SEQ ID NO: 199055 - DNA, 25 bp, SARS Virus
ctgactcatctgcgggccgtctttc

SEQ ID NO: 199056 - DNA, 25 bp, SARS Virus
tgactcatctgacggccgtctttcg

SEQ ID NO: 199057 - DNA, 25 bp, SARS Virus
gactcatctgagcgccgtctttcga

SEQ ID NO: 199058 - DNA, 25 bp, SARS Virus
actcatctgaggcccgtctttcgac

SEQ ID NO: 199059 - DNA, 25 bp, SARS Virus
ctcatctgagggccgtctttcgaca

SEQ ID NO: 199060 - DNA, 25 bp, SARS Virus
tcatctgagggccgtctttcgacat

SEQ ID NO: 199061 - DNA, 25 bp, SARS Virus
catctgagggccctctttcgacatt

SEQ ID NO: 199062 - DNA, 25 bp, SARS Virus
atctgagggccgcctttcgacattc

SEQ ID NO: 199063 - DNA, 25 bp, SARS Virus
tctgagggccgtctttcgacattcg

SEQ ID NO: 199064 - DNA, 25 bp, SARS Virus
ctgagggccgtccttcgacattcga

SEQ ID NO: 199065 - DNA, 25 bp, SARS Virus
tgagggccgtctctcgacattcgac

SEQ ID NO: 199066 - DNA, 25 bp, SARS Virus
gagggccgtcttccgacattcgacc

SEQ ID NO: 199067 - DNA, 25 bp, SARS Virus
agggccgtctttcgacattcgacca

SEQ ID NO: 199068 - DNA, 25 bp, SARS Virus
gggccgtctttccacattcgaccat

SEQ ID NO: 199069 - DNA, 25 bp, SARS Virus
ggccgtctttcgccattcgaccatg

SEQ ID NO: 199070 - DNA, 25 bp, SARS Virus
gccgtctttcgacattcgaccatgg

SEQ ID NO: 199071 - DNA, 25 bp, SARS Virus
ccgtctttcgaccttcgaccatggt

SEQ ID NO: 199072 - DNA, 25 bp, SARS Virus
cgtctttcgacactcgaccatggtc

SEQ ID NO: 199073 - DNA, 25 bp, SARS Virus
gtctttcgacatccgaccatggtct

SEQ ID NO: 199074 - DNA, 25 bp, SARS Virus
tctttcgacattcgaccatggtctg

SEQ ID NO: 199075 - DNA, 25 bp, SARS Virus
ctttcgacattccaccatggtctgt

SEQ ID NO: 199076 - DNA, 25 bp, SARS Virus
tttcgacattcgcccatggtctgtc

SEQ ID NO: 199077 - DNA, 25 bp, SARS Virus
ttcgacattcgaccatggtctgtct

SEQ ID NO: 199078 - DNA, 25 bp, SARS Virus
tcgacattcgaccatggtctgtctc

SEQ ID NO: 199079 - DNA, 25 bp, SARS Virus
cgacattcgaccctggtctgtctca

SEQ ID NO: 199080 - DNA, 25 bp, SARS Virus
gacattcgaccacggtctgtctcat

SEQ ID NO: 199081 - DNA, 25 bp, SARS Virus
acattcgaccatcgtctgtctcata

SEQ ID NO: 199082 - DNA, 25 bp, SARS Virus
cattcgaccatgctctgtctcatat

SEQ ID NO: 199083 - DNA, 25 bp, SARS Virus
attcgaccatggcctgtctcatatc

SEQ ID NO: 199084 - DNA, 25 bp, SARS Virus
ttcgaccatggtctgtctcatatca

SEQ ID NO: 199085 - DNA, 25 bp, SARS Virus
tcgaccatggtccgtctcatatcac

SEQ ID NO: 199086 - DNA, 25 bp, SARS Virus
cgaccatggtctctctcatatcact

SEQ ID NO: 199087 - DNA, 25 bp, SARS Virus
gaccatggtctgcctcatatcactt

SEQ ID NO: 199088 - DNA, 25 bp, SARS Virus
accatggtctgtctcatatcacttt

SEQ ID NO: 199089 - DNA, 25 bp, SARS Virus
ccatggtctgtcccatatcactttc

SEQ ID NO: 199090 - DNA, 25 bp, SARS Virus
catggtctgtctcatatcactttct

SEQ ID NO: 199091 - DNA, 25 bp, SARS Virus
atggtctgtctcctatcactttctg

SEQ ID NO: 199092 - DNA, 25 bp, SARS Virus
tggtctgtctcacatcactttctgt

SEQ ID NO: 199093 - DNA, 25 bp, SARS Virus
ggtctgtctcatctcactttctgta

SEQ ID NO: 199094 - DNA, 25 bp, SARS Virus
gtctgtctcataccactttctgtag

SEQ ID NO: 199095 - DNA, 25 bp, SARS Virus
tctgtctcatatcactttctgtagt

SEQ ID NO: 199096 - DNA, 25 bp, SARS Virus
ctgtctcatatccctttctgtagtt

SEQ ID NO: 199097 - DNA, 25 bp, SARS Virus
tgtctcatatcactttctgtagttt

SEQ ID NO: 199098 - DNA, 25 bp, SARS Virus
gtctcatatcaccttctgtagtttt
